United States Patent Application Publication US 2023/0026259 A1 - sequence listing, part 76

SEQ ID NO: 179047 - DNA, 2423 bp, Homo sapiens
  Payload ID: 15290
  Gene Symbol: SLFN12
  Gene Name: schlafen family member 12
  Uniprot ID: Q8IYM2
  ENST ID: ENST00000452764
  CDS Start-End: 420-2156
aaagagtgcggacacttccggagcgccagctgcccaatagaaatgcaggccacgctggggaagtgtggagccgcagcccaggatggggagggccggaaaacagaaaaggattcgcgttctttttactctgtggagagtgagcccgcggactgtagcctgggcctcgccaagttcctttgttctttgttttctttaaattaccttttttctttttgtcttaaaaaatacacatgggtgaaaaagaaacgagagctccctagagatcactcagagctgttttcgtgggtttttaacttccagttgctcaagggtccacgctggcatctggggtgtgctcgcacctgcgaagaatccagcttctagggagcaccgcgagctgaaaagaatttctgcttggacactgcatagctgctgggaaaatgaacatcagtgttgatttggaaacgaattatgccgagttggttctagatgtgggaagagtcactcttggagagaacagtaggaaaaaaatgaaggattgtaaactgagaaaaaagcagaatgaaagtgtctcacgagctatgtgtgctctgctcaattctggagggggagtgatcaaggctgaaattgagaatgaagactatagttatacaaaagatggaataggactagatttggaaaattcttttagtaacattctgttatttgttcctgagtacttagacttcatgcagaatggtaactactttctgatttttgtgaagtcatggagcttgaacacctctggtctgcggattaccaccttgagctccaatttgtacaaaagagatataacatctgcaaaagtcatgaatgccactgctgcactggagttcctcaaagacatgaaaaagactagagggagattgtatttaagaccagaattgctggcaaagaggccctgtgttgatatacaagaagaaaataacatgaaggccttggccggggttttttttgatagaacagaacttgatcggaaagaaaaattgacctttactgaatccacacatgttgaaattaaaaacttctcgacagaaaagttgttacaacgaattaaagagattctccctcaatatgtttctgcatttgcaaatactgatggaggatatttgttcattggtttaaatgaagataaagaaataattggctttaaagcagagatgagtgacctcgatgacttagaaagagaaatcgaaaagtccattaggaagatgcctgtgcatcacttctgtatggagaagaagaagataaattattcatgcaaattccttggagtatatgataaaggaagtctttgtggatatgtctgtgcactcagagtggagcgcttctgctgtgcagtgtttgctaaagagcctgattcctggcatgtgaaagataaccgtgtgatgcagttgaccaggaaggaatggatccagttcatggtggaggctgaaccaaaattttccagttcatatgaagaggtgatctctcaaataaatacgtcattacctgctccccacagttggcctcttttggaatggcaacggcagagacatcactgtccagggctatcaggaaggataacgtatactccagaaaacctttgcagaaaactgttcttacaacatgaaggacttaagcaattaatatgtgaagaaatggactctgtcagaaagggctcactgatcttctctaggagctggtctgtggatctgggcttgcaagagaaccacaaagtcctctgtgatgctcttctgatttcccaggacagtcctccagtcctatacaccttccacatggtacaggatgaggagtttaaaggctattctacacaaactgccctaaccttaaagcagaagctggcaaaaattggtggttacactaaaaaagtgtgtgtcatgacaaagatcttctacttgagccctgaaggcatgacaagctgccagtatgatttaaggtcgcaagtaatttaccctgaatcctactattttacaagaaggaaatacttgctgaaagccctttttaaagccttaaagagactcaagtctctgagagaccagttttcctttgcagaaaatctataccagataatcggtatagattgctttcagaagaatgataaaaagatgtttaaatcttgtcgaaggctcacctgatggaaaatggactgggctactgagatatttttcattatatatttgataacattctctaattctgtgaaaatatttctttgaaaactttgcaagttaagcaacttaatgtgatgttggataattgggttttgtctattttcacttctccctaaataatcttcacagatattgtttgagggatattaggaaaattaatttgttaactcgtctgtgcacagtattatttactctgtctgtagttcctgaataaattttcttccatgcttg

SEQ ID NO: 179048 - DNA, 751 bp, Homo sapiens
  Payload ID: 15290
  Gene Symbol: SLFN12
  Gene Name: schlafen family member 12
  ENST ID: ENST00000447040
  CDS Start-End: 406-751
ggggagggccggaaaacagaaaaggattcgcgttctttttactctgtggagagtgagcccgcggactgtagcctgggcctcgccaagttcctttgttctttgttttctttaaattaccttttttctttttgtcttaaaaaatacacatgggtgaaaaagaaacgagagctccctagagatcactcagagctgttttcgtgggtttttaacttccagttgctcaagggtccacgctggcatctggggtgtgctcgcacctgcgaagaatccagcttctagggagcaccgcgagctgttctttgttcaacacgccaagaacctggacactcttcactggtaacatattttggcaagccaaccaggagaaaagaatttctgcttggacactgcatagctgctgggaaaatgaacatcagtgttgatttggaaacgaattatgccgagttggttctagatgtgggaagagtcactcttggagagaacagtaggaaaaaaatgaaggattgtaaactgagaaaaaagcagaatgaaagtgtctcacgagctatgtgtgctctgctcaattctggagggggagtgatcaaggctgaaattgagaatgaagactatagttatacaaaagatggaataggactagatttggaaaattcttttagtaacattctgttatttgttcctgagtacttagacttcatgcagaatggtaactactttctgatttttgtgaagtcatggagcttgaacacctctg

SEQ ID NO: 179049 - DNA, 702 bp, Homo sapiens
  Payload ID: 15290
  Gene Symbol: SLFN12
  Gene Name: schlafen family member 12
  ENST ID: ENST00000445092
  CDS Start-End: 495-702
gagcccgcggactgtagcctgggcctcgccaagttcctttgttctttgttttctttaaattaccttttttctttttgtcttaaaaaatacacatgggtgaaaaagaaacgagagctccctagagatcactcagagctgttttcgtgggtttttaacttccagttgctcaagggtccacgctggcatctggggtgtgctcgcacctgcgaagaatccagcttctagggagcaccgcgagctgttctttgttcaacacgccaagaacctggacactcttcactggtaacatattttggcaagccaaccaggaggttttcgatgtttgcatgcagccatctctagaatgtcaaatggtctctcttcaactggaatgatgagaagtgaaacaaatatgcgaccatgaggacactgtaacctatggatggtgtgctgagactggaaacccaaaatgatgaaaagaatttctgcttggacactgcatagctgctgggaaaatgaacatcagtgttgatttggaaacgaattatgccgagttggttctagatgtgggaagagtcactcttggagagaacagtaggaaaaaaatgaaggattgtaaactgagaaaaaagcagaatgaaagtgtctcacgagctatgtgtgctctgctcaattctggagggggagtgatcaaggctgaaattgagaatgaagactatagtt

SEQ ID NO: 179050 - DNA, 2752 bp, Homo sapiens
  Payload ID: 15291
  Gene Symbol: SLFN12L
  Gene Name: schlafen family member 12-like
  Uniprot ID: Q6IEE8
  ENST ID: ENST00000361112
  CDS Start-End: 880-2733
acatattccccccttgaggctagaatggcaggcctaaaatgagtaggagaattctgagaaatggaaactttaaaaaggcggcaaccttctagtttcattctcagaaataccaaagcagcatttttcctggacttgttctgcagagcgctcagatttgaaagccatttctagcctttgaggattaccactgtcctcagccaaactgcagggactcctaagtagatcagagctcctggaactttctcatcttttcagcatctcaaccctgtggaatcttttaactcccaagtgctaccaggatatttgcgatgtactctggaatccctctggaaggagctgtcctcacagaatgaaggattagaggagttaataaataagcaaacccaacctttctcctggggaattgtgatcctctctagaagctaggctgtggacctgaatttgcaggagaagccaggagtcatctgtgatgctctgctgatagcatagaacagccctggcagggccaggactactgcacttgcactgcccttactttgaagcagaagctggtgaacatggggggctacactggggaggtgtgtgtcagggccaaggtcctctgcctgagtcctgagagcagcgcagaggctttggaggctgcagtgtctccgatggattaccctgcgtcctatagttttgcaggcacccagcacattggaagccctgctgcagtccctcgtgattgtcttgctcggcttcaggtctctcttgagtgacctgtgcagctatgaggttttaaatctgctcacagcccagcagtatgagatattctccagaagcttccacaagaacagagaattgtttgtccatggcttacctggcttaggaaagaccatcatggccatgaagatcatggagaagatcaggaatgtgtttcactgtgaggcacacagaattctctacatttgtgaaagtcagtttctgaggaatttcatcagaaaagaatttctgcgtggaaatggcttagctgctgggaaaatgaacatcagtattgatttagacacaaactatgctgagctggttctaaatgtgggaagagtcactcttggagagaacaatagaaaaaaaatgaaggattgtcaactgagaaaacagcagaatgaaaatgtctcacgagctgtgtgtgctctgctgaattctggagggggagtgatcaaggctgaagttgagaataaaggctatagttataaaaaagatggaatagggctagatttggaaaattcttttagtaacatgctgccatttgttcctaatttcctggacttcatgcagaatggtaactactttcacatttttgtgaaatcatggagcttggaaacctctggtccgcagattgccacgttgagctccagtttgtacaagagagatgtaacgtctgcaaaagtcatgaatgcttctgctgcactggagttcctcaaagacatggaaaaaactggagggagagcatatttaagaccagaattccctgcaaaaagggcctgtgttgatgtacaagaagaaagtaacatggaagccttggctgctgatttttttaacagaacagaacttggttataaagaaaaattgacctttactgaatccacacacgttgaaataaaaaacttctcgactgaaaagttgttacaacgaattacagagattctccctcaatatgtttctgcatttgcaaatactgatggaggatatttattcgttggtctaaatgaagataaagaagtaattggctttaaagcagagaagagttatcttactaagttagaagaagtaacaaaaaattccattgggaaactgcctgtgcatcacttctgtgtggagaaggggacgataaattacttatgcaaattccttggagtatatgataaaggaaggctttgtggatatgtgtatgcactcagagtggaacgcttctgctgtgcagtgtttgctaaaaagcctgattcctggcacgtgaaagataacagagttaagcagttgaccgagaaggaatggatccagttcatggtggattcagaaccagtatgtgaggaactgccctctccagcaagtacatcatcacctgtctcccagagttatcctcttcgtgaatatattaacttcaaaattcagccactgagatatcaccttccagggctatcagaaaagataacttgtgctccaaaaaccttctgcagaaatctgttctcacaacatgaaggacttaagcaattaatatgtgaagaaatgggctctgtcaataagggctcactgatcttctctaggagctggtctttggatctgggcttgcaagagaaccacaaagtcctctgtgatgctcttctgatttcccaggacaagcctccagtcctatacaccttccacatggtacaggatgaggagtttaaagactattctacacaaactgcccaaactttaaaacagaagctggcaaaaattggtggttacactaaaaaagtgtgtgtcatgacaaagatcttctacttgagccctgaaggcaagacaagctgccagtatgatttaaactcgcaagtaatttaccctgaatcctactattggacaacagctcaaacaatgaaagacttggaaaaggccctttcaaatatcttacctaaggagaatcaaatctttttgtttgtttgtttgtttcgtttttgtttgtttgtttgttggtttgtttgttttttcttgagatgagtctcactctgtcacccag

SEQ ID NO: 179051 - DNA, 3119 bp, Homo sapiens
  Payload ID: 15291
  Gene Symbol: SLFN12L
  Gene Name: schlafen family member 12-like
  Uniprot ID: Q6IEE8
  ENST ID: ENST00000260908
  CDS Start-End: 119-1885
ggggagtcgagtgcccgatagaaatgcagctgagcgaggggctagccgcacacggacgcggagagcaggaaagtggaaaagaactcaggtccccctacttggtgaagagtgcgcagacatggacctcgccagaaaagaatttctgcgtggaaatggcttagctgctgggaaaatgaacatcagtattgatttagacacaaactatgctgagctggttctaaatgtgggaagagtcactcttggagagaacaatagaaaaaaaatgaaggattgtcaactgagaaaacagcagaatgaaaatgtctcacgagctgtgtgtgctctgctgaattctggagggggagtgatcaaggctgaagttgagaataaaggctatagttataaaaaagatggaatagggctagatttggaaaattcttttagtaacatgctgccatttgttcctaatttcctggacttcatgcagaatggtaactactttcacatttttgtgaaatcatggagcttggaaacctctggtccgcagattgccacgttgagctccagtttgtacaagagagatgtaacgtctgcaaaagtcatgaatgcttctgctgcactggagttcctcaaagacatggaaaaaactggagggagagcatatttaagaccagaattccctgcaaaaagggcctgtgttgatgtacaagaagaaagtaacatggaagccttggctgctgatttttttaacagaacagaacttggttataaagaaaaattgacctttactgaatccacacacgttgaaataaaaaacttctcgactgaaaagttgttacaacgaattacagagattctccctcaatatgtttctgcatttgcaaatactgatggaggatatttattcgttggtctaaatgaagataaagaagtaattggctttaaagcagagaagagttatcttactaagttagaagaagtaacaaaaaattccattgggaaactgcctgtgcatcacttctgtgtggagaaggggacgataaattacttatgcaaattccttggagtatatgataaaggaaggctttgtggatatgtgtatgcactcagagtggaacgcttctgctgtgcagtgtttgctaaaaagcctgattcctggcacgtgaaagataacagagttaagcagttgaccgagaaggaatggatccagttcatggtggattcagaaccagtatgtgaggaactgccctctccagcaagtacatcatcacctgtctcccagagttatcctcttcgtgaatatattaacttcaaaattcagccactgagatatcaccttccagggctatcagaaaagataacttgtgctccaaaaaccttctgcagaaatctgttctcacaacatgaaggacttaagcaattaatatgtgaagaaatgggctctgtcaataagggctcactgatcttctctaggagctggtctttggatctgggcttgcaagagaaccacaaagtcctctgtgatgctcttctgatttcccaggacaagcctccagtcctatacaccttccacatggtacaggatgaggagtttaaagactattctacacaaactgcccaaactttaaaacagaagctggcaaaaattggtggttacactaaaaaagtgtgtgtcatgacaaagatcttctacttgagccctgaaggcaagacaagctgccagtatgatttaaactcgcaagtaatttaccctgaatcctactattggacaacagctcaaacaatgaaagacttggaaaaggccctttcaaatatcttacctaaggagaatcaaatctttttgtttgtttgtttgtttcgtttttgtttgtttgtttgttggtttgtttgttttttcttgagatgagtctcactctgtcacccagactggagtgtagtgacacgatctcgactcactgcaacctctgcctcctgggttcaagcaattccctgcctcagcctcccgagtagctgggattacatgtgcctgccaccacacctggctaatttttttttttttgtatttttagcagagatggggtttcaccgtcttggccaggctggtcttgaactcctgacctcgtgattcaacccccccccccggtctcccaaagtgctaggagtacagatgtgagccaccgcgcccggctggagaatcaattcttttatagaccaattagcctttgacatttccagcatctcccagataatcagtatagataaggatgtttaaatcttgtccaaggctcacttgaatcatggaagatggactgggctacagagatatttttcattatatatttggtaacattctctaattctctaaaaatacgtctttgaaaacattgcaagttaggcaacttgacgtgatgttggaaaactgggattagcctatgttcgcttcttcctaagttctttatagatattccttaagggaaattagaaaaattaattacctacacatgttttgccataccaagatgtcatttgactataaaggaaatatcagacattcttatccaatggacatggaaaacatagttctctaatatcttcttgaaaactatattgcaatgaaatgcagccaatgaagagatgaatcaaaatggagaacttgccgagttggatggatcacttgaggtcaggagttgaagaccagcctgggcaacatggtgaaacccagtctctactaaaaatataaaaattagccaagtgtggtggcacacacatgtagtcccagctactcgggaggctgaggcatgagaattgcttgaacgcaggaagtggaggttacagtgagccaagaccacaccactgcactccagcttgggcaagagagcaagactctgtcatctctatgcaaataaactagaaaatctagaagaaatggataaattcctgaacacatgcaacctcccaagactgagccagggagaagtcaaatccctgaacaggtcaataacaagttctgaaattgaggcagtaattactaaccaaaaaaagcccaggaccagacagattcacagctgaattctaccagaggtacaaagaggagctggtaccatttctactgaaactattccaaacaataaaagaggaaa

SEQ ID NO: 179052 - DNA, 1767 bp, Homo sapiens
  Payload ID: 15291
  Gene Symbol: SLFN12L
  Gene Name: schlafen family member 12-like
  ENST ID: ENST00000628453
  CDS Start-End: 1-1767
gatttacttaaaagaaaagaatttctgcgtggaaatggcttagctgctgggaaaatgaacatcagtattgatttagacacaaactatgctgagctggttctaaatgtgggaagagtcactcttggagagaacaatagaaaaaaaatgaaggattgtcaactgagaaaacagcagaatgaaaatgtctcacgagctgtgtgtgctctgctgaattctggagggggagtgatcaaggctgaagttgagaataaaggctatagttataaaaaagatggaatagggctagatttggaaaattcttttagtaacatgctgccatttgttcctaatttcctggacttcatgcagaatggtaactactttcacatttttgtgaaatcatggagcttggaaacctctggtccgcagattgccacgttgagctccagtttgtacaagagagatgtaacgtctgcaaaagtcatgaatgcttctgctgcactggagttcctcaaagacatggaaaaaactggagggagagcatatttaagaccagaattccctgcaaaaagggcctgtgttgatgtacaagaagaaagtaacatggaagccttggctgctgatttttttaacagaacagaacttggttataaagaaaaattgacctttactgaatccacacacgttgaaataaaaaacttctcgactgaaaagttgttacaacgaattacagagattctccctcaatatgtttctgcatttgcaaatactgatggaggatatttattcgttggtctaaatgaagataaagaagtaattggctttaaagcagagaagagttatcttactaagttagaagaagtaacaaaaaattccattgggaaactgcctgtgcatcacttctgtgtggagaaggggacgataaattacttatgcaaattccttggagtatatgataaaggaaggctttgtggatatgtgtatgcactcagagtggaacgcttctgctgtgcagtgtttgctaaaaagcctgattcctggcacgtgaaagataacagagttaagcagttgaccgagaaggaatggatccagttcatggtggattcagaaccagtatgtgaggaactgccctctccagcaagtacatcatcacctgtctcccagagttatcctcttcgtgaatatattaacttcaaaattcagccactgagatatcaccttccagggctatcagaaaagataacttgtgctccaaaaaccttctgcagaaatctgttctcacaacatgaaggacttaagcaattaatatgtgaagaaatgggctctgtcaataagggctcactgatcttctctaggagctggtctttggatctgggcttgcaagagaaccacaaagtcctctgtgatgctcttctgatttcccaggacaagcctccagtcctatacaccttccacatggtacaggatgaggagtttaaagactattctacacaaactgcccaaactttaaaacagaagctggcaaaaattggtggttacactaaaaaagtgtgtgtcatgacaaagatcttctacttgagccctgaaggcaagacaagctgccagtatgatttaaactcgcaagtaatttaccctgaatcctactattggacaacagctcaaacaatgaaagacttggaaaaggccctttcaaatatcttacctaaggagaatcaaatctttttgtttgtttgtttgtttcgtttttgtttgtttgtttgttggtttgtttgttttttcttgagatga

SEQ ID NO: 179053 - DNA, 8469 bp, Homo sapiens
  Payload ID: 15292
  Gene Symbol: SLFN13
  Gene Name: schlafen family member 13
  Uniprot ID: Q68D06
  ENST ID: ENST00000285013
  CDS Start-End: 277-2970
atcccctgtgtgggacctgcccaggtaggcgccaaccattggttataagaacctgaccttggcgcctccagggaaacgcggagtgtcctggagcttgacgcgctggagcttgagaggtctttcaggactgattttggtggaagaagacagcaggcggtgggcattcactgtgctggtgggaagtctggttacattaagaaaggaattctagcaaagttattctgtaaatacaacagaatcagttgcttttgttaaatatattggtgcaagttcaacatggaggcaaatcactgctccctgggtgtgtatccatcttacccagacctggtcatcgatgtcggagaagtgactctgggagaagaaaacagaaaaaagctacagaaaactcagagagaccaagagagggcgagagttatacgggccgcgtgtgctttattaaactcaggaggaggagtgattcagatggaaatggccaacagggatgagcgtcccacagagatgggactggatttagaagaatccttgagaaagcttattcagtatccatatttgcaggctttctttgagactaagcaacacggaaggtgtttttatatttttgttaaatcttggagtggtgatcctttccttaaagatggttctttcaattcccgcatttgcagccttagttcttcattatactgtagatctggcacctctgtgcttcacatgaattcaagacaggcattcgatttcctgaagaccaaggaaagacagtccaaatataatctgattaatgaagggtctccacctagtaaaattatgaaagctgtataccagaacatatctgagtcaaatcctgcatatgaagttttccaaactgacactattgaatatggtgaaatcctatcttttcctgagtctccatccatagagtttaaacagttctctacaaaacatatccaacaatatgtagaaaatataattccagagtacatctctgcatttgcaaacactgagggaggctatctttttattggagtggatgataagagtaggaaagtcctgggatgtgccaaagaacaggttgaccctgactctttgaaaaatgtaattgcaagagcaatttctaagttgcccattgttcatttttgctcttcaaaacctcgggtagagtacagcaccaaaatcgtagaagtgttttgtgggaaagagttgtatggctatctctgtgtgattaaagtgaaggcattctgttgtgtggtgttctcggaagctcccaagtcatggatggtgagggagaagtacatccgccccttgacaactgaggaatgggtagagaaaatgatggacgcagatccagagtttcctccagactttgctgaggcctttgagtctcagttgagtctatctgacagtccttcactttgcagaccagtgtattctaagaaaggtctggaacacaaagctgatctacaacaacatttatttccagttccaccaggacatttggaatgtactccagagtccctctggaaggagctgtctttacagcatgaaggactaaaggagttaatacacaagcaaatgcgacctttctcccagggaattgtgatcctctctagaagctgggctgtggacctgaacttgcaggagaagccaggagtcatctgtgatgctctgctgatagcacagaacagcacccccattctctacaccattctcagggagcaggatgcagagggccaggactactgcactcgcaccgcctttactttgaagcagaagctagtgaacatggggggctacaccgggaaggtgtgtgtcagggccaaggtcctctgcctgagtcctgagagcagcgcagaggccttggaggctgcagtgtctccgatggattaccctgcgtcctatagccttgcaggcacccagcacatggaagccctgctgcagtccctcgtgattgtcttactcggcttcaggtctctcttgagtgaccagctcggctgtgaggttttaaatctgctcacagcccagcagtatgagatattctccagaagcctccgcaagaacagagagttgtttgtccacggcttacctggctcagggaagaccatcatggccatgaagatcatggagaagatcaggaatgtgtttcactgtgaggcacacagaattctctacgtttgtgaaaaccagcctctgaggaactttatcagtgatagaaatatctgccgagcagagacccgggaaactttcctaagagaaaaatttgaacacattcaacacatcgtcattgacgaagctcagaatttccgtactgaagatggggactggtataggaaggcaaaaaccatcactcagagagaaaaggattgtccaggagttctctggatctttctggactactttcagaccagtcacttgggtcacagtggccttccccctctctcagcacagtatccaagagaagagctcaccagagtagttcgcaatgcagatgaaatagccgagtacatacaacaagaaatgcaactaattatagaaaatcctccaattaatatcccccatgggtatctggcaattctcagtgaagctaaatgggttccaggtgttccaggcaacacaaagattattaaaaactttactttggagcaaatagtgacctatgtggcagacacctgcaggtgcttctttgaaaggggctattctccaaaggatgttgctgtgcttgtcagcaccgtgacagaagtggagcagtatcagtctaagctcttgaaagcaatgaggaagaaaatggtggtgcagctcagtgatgcatgtgatatgttgggtgtgcacattgtgttggacagtgtccggcgattctcaggcctggaaaggagcatagtgtttgggatccatccaaggacagctgacccagctatcttacccaatattctgatctgtctggcttccagggcaaaacagcacctatatatttttctgtgaagtgactattaggaagaactccaaaccaaaatactgtgtaaatgtctatgggtgacagtctgctgatggtagaaacctttctttttagttcacaagtcagttagagatttggacagagctgacacaaagagtttggagctcccccatttctggctctcctttcaggggttcctcccccaactcttttcagcagtggtggctgccccccattctgacccctgactcttgcagccagaaagatggtggttttctaaaggaactttagctgtgctgcacaatgcagacctgtgtcttgctctctgggtaaaagccataaaaataagaaactcagcctgtggcctttcttccaaggctggagttctcgagttcttttatgtgacttcgtgtagtttgttgctttaaaaaatttgtccagaattgttttctgcagaagcatggtctgttaggagcttacaggccataggagaagcagttgtttcctgaatttatctttgctgtattcatttagggcttgggagagtcccaagataattcagtcactgtcagattaatcatttcggcagaacaaacaatattgttatgattatttaatccttaaaattgtgatctccagagtttgttatcagaataacccagaccaaggcttaattgtaatagtgaacattaatggtacctttacagagaaattataggccaagagaaaatgctggctttcagtagaagttaatattagaaacccaaatctggttctgaaagtgtgtatcagatgtacggtgaacaaacttgggaaagattttctttaaaaatcaatgagcgttggccaggcacggtggctcacacctgtaatcccagctgtttgggaggctgaggcaggtggatcacctgaggtcaggagttcaagaccagcctggccaacatggagaaaccccatctctactaaaaatacaaaaattagcagggcatggtggtgcatgcctgtatcccagctacttgggaggctgaagcatgagaatcacttgaatcctggaggcagaggttgcagtgagctgagatcatgtcactgtactccagcctgggcaacagagtgagactgtctcaaaaagaagaagaagaaaaaaaatgcagtgagtttatgttgttacattgtaacatctcagcgtagctgtatgcattactctatagcataactacttaagttttatgtcattcttgaactgtgatttttttttctatttgctttcatagtttggtgggccattgttatggactgaatgtttgtgtcccatcctcacccctaaattcccatgttgaagccccaaccttcactgtggagctggggctgctaaggaagtaattaaggttacacgaagtcacagtggagaatctgatctgctaagactggtgtccttatagggagagaccccagagagcttgttcccttcctccctgtgcacacaaacaagagggcatgggagcacacagagagatggcagccacctacaagccaagaggagaagcctcacaatgaacccccccccccaccctgctggcacctatgtcttcgacttccagcccccagactgtgagaaataaatttctgttggttcagccatccagtctctagtgttttgttattgcagcctgagaacacagctgtatgatcattcatcaaactaaaaacactgatacttaacaatgctaatgcaattacttatttgcttttcagtctctacaaaacattctaaaacactaatctaaatactaacaataaaatatttgcataactaatgaaaattaagaaaccacatgcccaatattccatttataagtaatcctatttggctgatttccctccatattgtaagttttgaacttttctgccagtctttctcctatttgtgttaactcatggaattccagttgtctagccttgaaattgtaggctcttctaacttgagcaaaatctgacagatcagcaaaataaggagaaaaatatttcttctttctttctggctgcattaaatgagatacagctcagcaccaaaaagctatctttgtaaatgttcttagtaaactccctggtctttggagttatttcagcctttgagagtaattctttaaaagtctaattctgactggttgaatctctctatatgatttattgccctagtaatatttgaaacagtatcatattttaaaatatataaatatttatgaatttttgttcagcccaaagaggattactgatgctttcttctttttccatatgatgaggaaatgtttagcttatatatttattgcatttctgttttaaataaaaaattgagagtttgtgtttcattaaactgaaaaaaaaggttctgtaaaataaatgattaaatggaggaaaaggagaagactgaggccagcaactccatgatacagccaaaaatgagccagtaaaagattaagcaagattaactgtaaattttttttttttttttttttaaagagaaaaggtctcactgtgtttcccaggctggagggtagtggtgtgatcatagttcactagagccctgaactcctgggctcaagtgatcctcttgccttagcctcccattgctgggattataggcatgagccactgtgtcaggcttaattgggttttgatgggtacctgcctatctctgtaatttggctctagtcatataggacctgcttcattaaagatctgaaaatctatccagccattgtaaaatgaaacaaaatgttttgaaaatttaaattagccttttattttagttcagacatatagaaaagttgcaagcatagtacagaaagttcctatataccccacttagtgccctcctttttaaaatttttttaaacctagcttatttcctttaagatttctgagaattccaggaatgctcacagatctgtccttgtagtctcctgccacttcttgctatggagtgctgtaccaaggtctctgctagtttctagttggcttgacataatgactttcctaaacttcttctgctctgaatctcaagcatggaaagcggtcacatcttttgtttcacgaattaacagtcaacacctggccctacttttaacaaaacttagtaaagccttgagcatagtgaaagacaaatatttaaattatatattagcaggaggctgaggtgggaggatcatatgaggccagcctgggcagcatagcatgacccccccctcgagaagacaacaaaaaattatctgggtgtggtggtgtgctcctgcagtcctagctattccagaggccgaggcgagaggatcgcttgattccaggagttcaaggctgtagttagcgataatcgtgtcactgaatcctagcctgggcaacagaataagaccccatgtctaacaaaataataataaaacaatcaaaagtttaaaattagttattaaatgtcagtgtgcccagagtcctttgaccacagatgatcctgatggccttctctcgccttgtccctgtgcctccttctaccatttttcttcctgagattcaaaagtaagtagcggacagggttcccatttaccactaaatacttcagtgggtgtttcctaaaaggacatttatagtaccatcatcaaaatcagtaaattaaccctgatactattatctaatctgtagactttattgaattatatcagttgtgcctcaagtgtctttatgtttttttctcaaaagagaaaaagttctggtccaggatttgatctaagatcatgcattgtattgagctttcctttcttttaagtctcatttaatctggagatgttaatctgtctttgtcatatctttgacactattgaagaggactggcctattattttgcagagtatctgattttgggtcatttcatgtgttctcatgattagattcaggttatgcatttttggcatgaattccatagaagggctgttacggttctcagttcacggtattagaaggcacttgatagtgattagttccattcctgatgatgttaactctgatcatttggataaagtggcgtctgccaggtttccctactgtgcagttacaatttgctttttgtaattaataaagtgtgtgtgtgtgtgtgtgtggagggggggtgtttttgcttctgaacgcataatatttgagatttttttctaattaaaaagtaattattcaaagagttcagagaactgatactgatcacattctttgaccccacatgcaaatacattataaactagtaataaaacggtaactagaaaaatgttcatatcttttggaattaaaaaagtgtttaactcgtggatcaaagcagaaattctgtaaccattgtcacagcaggttctaacaagcaagtttaaggaggagagaatttcagtcctagagaatttcagtcttattcaaatgctttcctagaaagaggaaacagttcctaactaatttcatgaggctggcataatcttgataacaagtctgataggtaaagtatgaaaggaaaattgcaggtcactcaattatcactcaaatatctacatgaaaaattctaaacaaaattttagcaaacaaaatccaacaatttgtaaaagtgataatacaccacgaccaaggtggttcaagtcaggaattcaacgttgattttggcgttaaaaaatcaatcatcaggcccagtgaggtggctcactcctgtaatcccagactttctggaggctgaaggaggaaagatccttcaggccagaagtttgagtctgcactgagctgtgactgcatcaccgcactctagcctgggtgccagtttgagaccctgtctccaagaaaaaaaaattaatcagtgtaattcaccacagattaagagttcaaaagagaaaaatcacatgatcatctgaatagaggaaaaagcttttgataaagttcaacatccattcataataaggactctcagcaacttagaagtataaaaacacttttggaaatcaacaaagggaatttacagcatgaacaaacagcaagccagcatggtggctcacacctgtaatctcagcacttccagaggccaaggcaggagaatcacttgagcccaggggttagagacaagccttggcaacatagcaagatcctggctctacaaaaaataaaataaaatgaaataaaatttaaaaattagctgggtttggtggtgtgtgcctgtagtcccagctactgggaggctgaggtgagaggatcactggagcccaggaggtgaaggctgcagtgggctaaaaacaaccagaacaaccccccaaccccctccccgcaaaacactataaagaatagcaacacaaggttcaatgtaaactttgatatggtgttttacctctgaggagaggcttattgttaatattctttagccgtgtaaggggttcacagatgttcatacttttgttctttataccttatatgtattctataaatattgtttctactcaatagttaataaaaacataatttaaaagttc

SEQ ID NO: 179054 - DNA, 576 bp, Homo sapiens
  Payload ID: 15292
  Gene Symbol: SLFN13
  Gene Name: schlafen family member 13
  ENST ID: ENST00000524511
  CDS Start-End: 258-576
aaaacagaaagcccctgcccagcgagcagcggtttccgcgggggcggaacaaacaggcagagccaagtgcgtcctggaggcttcccccgttgcgaaggtctttcaggactgattttggtggaagaagacagcaggcggtgggcattcactgtgctggtgggaagtctggttacattaagaaaggaattctagcaaagttattctgtaaatacaacagaatcagttgcttttgttaaatatattggtgcaagttcaacatggaggcaaatcactgctccctgggtgtgtatccatcttacccagacctggtcatcgatgtcggagaagtgactctgggagaagaaaacagaaaaaagctacagaaaactcagagagaccaagagagggcgagagttatacgggccgcgtgtgctttattaaactcaggaggaggagtgattcagatggaaatggccaacagggatgagcgtcccacagagatgggactggatttagaagaatccttgagaaagcttattcagtatccatatttgcaggctttctttgagactaagcaacacggaaggtgtttttata

SEQ ID NO: 179055 - DNA, 6004 bp, Homo sapiens
  Payload ID: 15292
  Gene Symbol: SLFN13
  Gene Name: schlafen family member 13
  Uniprot ID: Q68D06
  ENST ID: ENST00000526861
  CDS Start-End: 259-2952
accttggcgcctccagggaaacgcggagtgtcctggagcttgacgcgctggagcttgagaggtctttcaggactgattttggtggaagaagacagcaggcggtgggcattcactgtgctggtgggaagtctggttacattaagaaaggaattctagcaaagttattctgtaaatacaacagaatcagttgcttttgttaaatatattggtacttcaggactgattttggtgtaagaagacagcaggtgcaagttcaacatggaggcaaatcactgctccctgggtgtgtatccatcttacccagacctggtcatcgatgtcggagaagtgactctgggagaagaaaacagaaaaaagctacagaaaactcagagagaccaagagagggcgagagttatacgggccgcgtgtgctttattaaactcaggaggaggagtgattcagatggaaatggccaacagggatgagcgtcccacagagatgggactggatttagaagaatccttgagaaagcttattcagtatccatatttgcaggctttctttgagactaagcaacacggaaggtgtttttatatttttgttaaatcttggagtggtgatcctttccttaaagatggttctttcaattcccgcatttgcagccttagttcttcattatactgtagatctggcacctctgtgcttcacatgaattcaagacaggcattcgatttcctgaagaccaaggaaagacagtccaaatataatctgattaatgaagggtctccacctagtaaaattatgaaagctgtataccagaacatatctgagtcaaatcctgcatatgaagttttccaaactgacactattgaatatggtgaaatcctatcttttcctgagtctccatccatagagtttaaacagttctctacaaaacatatccaacaatatgtagaaaatataattccagagtacatctctgcatttgcaaacactgagggaggctatctttttattggagtggatgataagagtaggaaagtcctgggatgtgccaaagaacaggttgaccctgactctttgaaaaatgtaattgcaagagcaatttctaagttgcccattgttcatttttgctcttcaaaacctcgggtagagtacagcaccaaaatcgtagaagtgttttgtgggaaagagttgtatggctatctctgtgtgattaaagtgaaggcattctgttgtgtggtgttctcggaagctcccaagtcatggatggtgagggagaagtacatccgccccttgacaactgaggaatgggtagagaaaatgatggacgcagatccagagtttcctccagactttgctgaggcctttgagtctcagttgagtctatctgacagtccttcactttgcagaccagtgtattctaagaaaggtctggaacacaaagctgatctacaacaacatttatttccagttccaccaggacatttggaatgtactccagagtccctctggaaggagctgtctttacagcatgaaggactaaaggagttaatacacaagcaaatgcgacctttctcccagggaattgtgatcctctctagaagctgggctgtggacctgaacttgcaggagaagccaggagtcatctgtgatgctctgctgatagcacagaacagcacccccattctctacaccattctcagggagcaggatgcagagggccaggactactgcactcgcaccgcctttactttgaagcagaagctagtgaacatggggggctacaccgggaaggtgtgtgtcagggccaaggtcctctgcctgagtcctgagagcagcgcagaggccttggaggctgcagtgtctccgatggattaccctgcgtcctatagccttgcaggcacccagcacatggaagccctgctgcagtccctcgtgattgtcttactcggcttcaggtctctcttgagtgaccagctcggctgtgaggttttaaatctgctcacagcccagcagtatgagatattctccagaagcctccgcaagaacagagagttgtttgtccacggcttacctggctcagggaagaccatcatggccatgaagatcatggagaagatcaggaatgtgtttcactgtgaggcacacagaattctctacgtttgtgaaaaccagcctctgaggaactttatcagtgatagaaatatctgccgagcagagacccgggaaactttcctaagagaaaaatttgaacacattcaacacatcgtcattgacgaagctcagaatttccgtactgaagatggggactggtataggaaggcaaaaaccatcactcagagagaaaaggattgtccaggagttctctggatctttctggactactttcagaccagtcacttgggtcacagtggccttccccctctctcagcacagtatccaagagaagagctcaccagagtagttcgcaatgcagatgaaatagccgagtacatacaacaagaaatgcaactaattatagaaaatcctccaattaatatcccccatgggtatctggcaattctcagtgaagctaaatgggttccaggtgttccaggcaacacaaagattattaaaaactttactttggagcaaatagtgacctatgtggcagacacctgcaggtgcttctttgaaaggggctattctccaaaggatgttgctgtgcttgtcagcaccgtgacagaagtggagcagtatcagtctaagctcttgaaagcaatgaggaagaaaatggtggtgcagctcagtgatgcatgtgatatgttgggtgtgcacattgtgttggacagtgtccggcgattctcaggcctggaaaggagcatagtgtttgggatccatccaaggacagctgacccagctatcttacccaatattctgatctgtctggcttccagggcaaaacagcacctatatatttttctgtgaagtgactattaggaagaactccaaaccaaaatactgtgtaaatgtctatgggtgacagtctgctgatggtagaaacctttctttttagttcacaagtcagttagagatttggacagagctgacacaaagagtttggagctcccccatttctggctctcctttcaggggttcctcccccaactcttttcagcagtggtggctgccccccattctgacccctgactcttgcagccagaaagatggtggttttctaaaggaactttagctgtgctgcacaatgcagacctgtgtcttgctctctgggtaaaagccataaaaataagaaactcagcctgtggcctttcttccaaggctggagttctcgagttcttttatgtgacttcgtgtagtttgttgctttaaaaaatttgtccagaattgttttctgcagaagcatggtctgttaggagcttacaggccataggagaagcagttgtttcctgaatttatctttgctgtattcatttagggcttgggagagtcccaagataattcagtcactgtcagattaatcatttcggcagaacaaacaatattgttatgattatttaatccttaaaattgtgatctccagagtttgttatcagaataacccagaccaaggcttaattgtaatagtgaacattaatggtacctttacagagaaattataggccaagagaaaatgctggctttcagtagaagttaatattagaaacccaaatctggttctgaaagtgtgtatcagatgtacggtgaacaaacttgggaaagattttctttaaaaatcaatgagcgttggccaggcacggtggctcacacctgtaatcccagctgtttgggaggctgaggcaggtggatcacctgaggtcaggagttcaagaccagcctggccaacatggagaaaccccatctctactaaaaatacaaaaattagcagggcatggtggtgcatgcctgtatcccagctacttgggaggctgaagcatgagaatcacttgaatcctggaggcagaggttgcagtgagctgagatcatgtcactgtactccagcctgggcaacagagtgagactgtctcaaaaagaagaagaagaaaaaaaatgcagtgagtttatgttgttacattgtaacatctcagcgtagctgtatgcattactctatagcataactacttaagttttatgtcattcttgaactgtgatttttttttctatttgctttcatagtttggtgggccattgttatggactgaatgtttgtgtcccatcctcacccctaaattcccatgttgaagccccaaccttcactgtggagctggggctgctaaggaagtaattaaggttacacgaagtcacagtggagaatctgatctgctaagactggtgtccttatagggagagaccccagagagcttgttcccttcctccctgtgcacacaaacaagagggcatgggagcacacagagagatggcagccacctacaagccaagaggagaagcctcacaatgaacccccccccccaccctgctggcacctatgtcttcgacttccagcccccagactgtgagaaataaatttctgttggttcagccatccagtctctagtgttttgttattgcagcctgagaacacagctgtatgatcattcatcaaactaaaaacactgatacttaacaatgctaatgcaattacttatttgcttttcagtctctacaaaacattctaaaacactaatctaaatactaacaataaaatatttgcataactaatgaaaattaagaaaccacatgcccaatattccatttataagtaatcctatttggctgatttccctccatattgtaagttttgaacttttctgccagtctttctcctatttgtgttaactcatggaattccagttgtctagccttgaaattgtaggctcttctaacttgagcaaaatctgacagatcagcaaaataaggagaaaaatatttcttctttctttctggctgcattaaatgagatacagctcagcaccaaaaagctatctttgtaaatgttcttagtaaactccctggtctttggagttatttcagcctttgagagtaattctttaaaagtctaattctgactggttgaatctctctatatgatttattgccctagtaatatttgaaacagtatcatattttaaaatatataaatatttatgaatttttgttcagcccaaagaggattactgatgctttcttctttttccatatgatgaggaaatgtttagcttatatatttattgcatttctgttttaaataaaaaattgagagtttgtgtttcattaaactgaaaaaaaaggttctgtaaaataaatgattaaatggaggaaaaggagaagactgaggccagcaactccatgatacagccaaaaatgagccagtaaaagattaagcaagattaactgtaaattttttttttttttttttttaaagagaaaaggtctcactgtgtttcccaggctggagggtagtggtgtgatcatagttcactagagccctgaactcctgggctcaagtgatcctcttgccttagcctcccattgctgggattataggcatgagccactgtgtcaggcttaattgggttttgatgggtacctgcctatctctgtaatttggctctagtcatataggacctgcttcattaaagatctgaaaatctatccagccattgtaaaatgaaacaaaatgttttgaaaatttaaattagccttttattttagttcagacatatagaaaagttgcaagcatagtacagaaagttcctatataccccacttagtgccctcctttttaaaatttttttaaacctagcttatttcctttaagatttctgagaattccaggaatgctcacagatctgtccttgtagtctcctgccacttcttgctatggagtgctgtaccaaggtctctgctagtttctagttggcttgacataatgactttcctaaacttcttctgctctgaatctcaagcatggaaagcggtcaca

SEQ ID NO: 179056 - DNA, 596 bp, Homo sapiens
  Payload ID: 15292
  Gene Symbol: SLFN13
  Gene Name: schlafen family member 13
  ENST ID: ENST00000532210
  CDS Start-End: 205-596
aaacgcggagtgtcctggagcttgacgcgctggagcttgagaggtctttcaggactgattttggtggaagaagacagcaggcggtgggcattcactgtgctggtgggaagtctggttacattaagaaaggaattctagcaaagttattctgtaaatacaacagaatcagttgcttttgttaaatatattgctcccaagtcatggatggtgagggagaagtacatccgccccttgacaactgaggaatgggtagagaaaatgatggacgcagatccagagtttcctccagactttgctgaggcctttgagtctcagttgagtctatctgacagtccttcactttgcagaccagtgtattctaagaaaggtctggaacacaaagctgatctacaacaacatttatttccagttccaccaggacatttggaatgtactccagagtccctctggaaggagctgtctttacagcatgaaggactaaaggagttaatacacaagcaaatgcgacctttctcccagggaattgtgatcctctctagaagctgggctgtggacctgaacttgcaggagaagccaggagtcatctgtgatgctct

SEQ ID NO: 179057 - DNA, 3058 bp, Homo sapiens
  Payload ID: 15292
  Gene Symbol: SLFN13
  Gene Name: schlafen family member 13
  Uniprot ID: Q68D06
  ENST ID: ENST00000534689
  CDS Start-End: 204-1943
aaacgcggagtgtcctggagcttgacgcgctggagcttgagaggtctttcaggactgattttggtggaagaagacagcaggcggtgggcattcactgtgctggtgggaagtctggttacattaagaaaggaattctagcaaagttattctgtaaatacaacagaatcagttgcttttgttaaatatattggtgcaagttcaacatggaggcaaatcactgctccctggctcccaagtcatggatggtgagggagaagtacatccgccccttgacaactgaggaatgggtagagaaaatgatggacgcagatccagagtttcctccagactttgctgaggcctttgagtctcagttgagtctatctgacagtccttcactttgcagaccagtgtattctaagaaaggtctggaacacaaagctgatctacaacaacatttatttccagttccaccaggacatttggaatgtactccagagtccctctggaaggagctgtctttacagcatgaaggactaaaggagttaatacacaagcaaatgcgacctttctcccagggaattgtgatcctctctagaagctgggctgtggacctgaacttgcaggagaagccaggagtcatctgtgatgctctgctgatagcacagaacagcacccccattctctacaccattctcagggagcaggatgcagagggccaggactactgcactcgcaccgcctttactttgaagcagaagctagtgaacatggggggctacaccgggaaggtgtgtgtcagggccaaggtcctctgcctgagtcctgagagcagcgcagaggccttggaggctgcagtgtctccgatggattaccctgcgtcctatagccttgcaggcacccagcacatggaagccctgctgcagtccctcgtgattgtcttactcggcttcaggtctctcttgagtgaccagctcggctgtgaggttttaaatctgctcacagcccagcagtatgagatattctccagaagcctccgcaagaacagagagttgtttgtccacggcttacctggctcagggaagaccatcatggccatgaagatcatggagaagatcaggaatgtgtttcactgtgaggcacacagaattctctacgtttgtgaaaaccagcctctgaggaactttatcagtgatagaaatatctgccgagcagagacccgggaaactttcctaagagaaaaatttgaacacattcaacacatcgtcattgacgaagctcagaatttccgtactgaagatggggactggtataggaaggcaaaaaccatcactcagagagaaaaggattgtccaggagttctctggatctttctggactactttcagaccagtcacttgggtcacagtggccttccccctctctcagcacagtatccaagagaagagctcaccagagtagttcgcaatgcagatgaaatagccgagtacatacaacaagaaatgcaactaattatagaaaatcctccaattaatatcccccatgggtatctggcaattctcagtgaagctaaatgggttccaggtgttccaggcaacacaaagattattaaaaactttactttggagcaaatagtgacctatgtggcagacacctgcaggtgcttctttgaaaggggctattctccaaaggatgttgctgtgcttgtcagcaccgtgacagaagtggagcagtatcagtctaagctcttgaaagcaatgaggaagaaaatggtggtgcagctcagtgatgcatgtgatatgttgggtgtgcacattgtgttggacagtgtccggcgattctcaggcctggaaaggagcatagtgtttgggatccatccaaggacagctgacccagctatcttacccaatattctgatctgtctggcttccagggcaaaacagcacctatatatttttctgtgaagtgactattaggaagaactccaaaccaaaatactgtgtaaatgtctatgggtgacagtctgctgatggtagaaacctttctttttagttcacaagtcagttagagatttggacagagctgacacaaagagtttggagctcccccatttctggctctcctttcaggggttcctcccccaactcttttcagcagtggtggctgccccccattctgacccctgactcttgcagccagaaagatggtggttttctaaaggaactttagctgtgctgcacaatgcagacctgtgtcttgctctctgggtaaaagccataaaaataagaaactcagcctgtggcctttcttccaaggctggagttctcgagttcttttatgtgacttcgtgtagtttgttgctttaaaaaatttgtccagaattgttttctgcagaagcatggtctgttaggagcttacaggccataggagaagcagttgtttcctgaatttatctttgctgtattcatttagggcttgggagagtcccaagataattcagtcactgtcagattaatcatttcggcagaacaaacaatattgttatgattatttaatccttaaaattgtgatctccagagtttgttatcagaataacccagaccaaggcttaattgtaatagtgaacattaatggtacctttacagagaaattataggccaagagaaaatgctggctttcagtagaagttaatattagaaacccaaatctggttctgaaagtgtgtatcagatgtacggtgaacaaacttgggaaagattttctttaaaaatcaatgagcgttggccaggcacggtggctcacacctgtaatcccagctgtttgggaggctgaggcaggtggatcacctgaggtcaggagttcaagaccagcctggccaacatggagaaaccccatctctactaaaaatacaaaaattagcagggcatggtggtgcatgcctgtatcccagctacttgggaggctgaagcatgagaatcacttgaatcctggaggcagaggttgcagtgagctgagatcatgtcactgtactccagcctgggcaacagagtgagactgtctcaaaaagaagaagaagaaa

SEQ ID NO: 179058 - DNA, 3910 bp, Homo sapiens
  Payload ID: 15292
  Gene Symbol: SLFN13
  Gene Name: schlafen family member 13
  ENST ID: ENST00000530782
  CDS Start-End: 277-636
atcccctgtgtgggacctgcccaggtaggcgccaaccattggttataagaacctgaccttggcgcctccagggaaacgcggagtgtcctggagcttgacgcgctggagcttgagaggtctttcaggactgattttggtggaagaagacagcaggcggtgggcattcactgtgctggtgggaagtctggttacattaagaaaggaattctagcaaagttattctgtaaatacaacagaatcagttgcttttgttaaatatattggtgcaagttcaacatggaggcaaatcactgctccctgggtgtgtatccatcttacccagacctggtcatcgatgtcggagaagtgactctgggagaagaaaacagaaaaaagctacagaaaactcagagagaccaagagagggcgagagttatacgggccgcgtgtgctttattaaactcaggaggaggagtgattcagatggaaatggccaacagggatgagcgtcccacagagatgggactggatttagaagaatccttgagaaagcttattcagtatccatatttgcaggctttctttgagactaagcaacacggaagctcccaagtcatggatggtgagggagaagtacatccgccccttgacaactgaggaatgggtagagaaaatgatggacgcagatccagagtttcctccagactttgctgaggcctttgagtctcagttgagtctatctgacagtccttcactttgcagaccagtgtattctaagaaaggtctggaacacaaagctgatctacaacaacatttatttccagttccaccaggacatttggaatgtactccagagtccctctggaaggagctgtctttacagcatgaaggactaaaggagttaatacacaagcaaatgcgacctttctcccagggaattgtgatcctctctagaagctgggctgtggacctgaacttgcaggagaagccaggagtcatctgtgatgctctgctgatagcacagaacagcacccccattctctacaccattctcagggagcaggatgcagagggccaggactactgcactcgcaccgcctttactttgaagcagaagctagtgaacatggggggctacaccgggaaggtgtgtgtcagggccaaggtcctctgcctgagtcctgagagcagcgcagaggccttggaggctgcagtgtctccgatggattaccctgcgtcctatagccttgcaggcacccagcacatggaagccctgctgcagtccctcgtgattgtcttactcggcttcaggtctctcttgagtgaccagctcggctgtgaggttttaaatctgctcacagcccagcagtatgagatattctccagaagcctccgcaagaacagagagttgtttgtccacggcttacctggctcagggaagaccatcatggccatgaagatcatggagaagatcaggaatgtgtttcactgtgaggcacacagaattctctacgtttgtgaaaaccagcctctgaggaactttatcagtgatagaaatatctgccgagcagagacccgggaaactttcctaagagaaaaatttgaacacattcaacacatcgtcattgacgaagctcagaatttccgtactgaagatggggactggtataggaaggcaaaaaccatcactcagagagaaaaggattgtccaggagttctctggatctttctggactactttcagaccagtcacttgggtcacagtggccttccccctctctcagcacagtatccaagagaagagctcaccagagtagttcgcaatgcagatgaaatagccgagtacatacaacaagaaatgcaactaattatagaaaatcctccaattaatatcccccatgggtatctggcaattctcagtgaagctaaatgggttccaggtgttccaggcaacacaaagattattaaaaactttactttggagcaaatagtgacctatgtggcagacacctgcaggtgcttctttgaaaggggctattctccaaaggatgttgctgtgcttgtcagcaccgtgacagaagtggagcagtatcagtctaagctcttgaaagcaatgaggaagaaaatggtggtgcagctcagtgatgcatgtgatatgttgggtgtgcacattgtgttggacagtgtccggcgattctcaggcctggaaaggagcatagtgtttgggatccatccaaggacagctgacccagctatcttacccaatattctgatctgtctggcttccagggcaaaacagcacctatatatttttctgtgaagtgactattaggaagaactccaaaccaaaatactgtgtaaatgtctatgggtgacagtctgctgatggtagaaacctttctttttagttcacaagtcagttagagatttggacagagctgacacaaagagtttggagctcccccatttctggctctcctttcaggggttcctcccccaactcttttcagcagtggtggctgccccccattctgacccctgactcttgcagccagaaagatggtggttttctaaaggaactttagctgtgctgcacaatgcagacctgtgtcttgctctctgggtaaaagccataaaaataagaaactcagcctgtggcctttcttccaaggctggagttctcgagttcttttatgtgacttcgtgtagtttgttgctttaaaaaatttgtccagaattgttttctgcagaagcatggtctgttaggagcttacaggccataggagaagcagttgtttcctgaatttatctttgctgtattcatttagggcttgggagagtcccaagataattcagtcactgtcagattaatcatttcggcagaacaaacaatattgttatgattatttaatccttaaaattgtgatctccagagtttgttatcagaataacccagaccaaggcttaattgtaatagtgaacattaatggtacctttacagagaaattataggccaagagaaaatgctggctttcagtagaagttaatattagaaacccaaatctggttctgaaagtgtgtatcagatgtacggtgaacaaacttgggaaagattttctttaaaaatcaatgagcgttggccaggcacggtggctcacacctgtaatcccagctgtttgggaggctgaggcaggtggatcacctgaggtcaggagttcaagaccagcctggccaacatggagaaaccccatctctactaaaaatacaaaaattagcagggcatggtggtgcatgcctgtatcccagctacttgggaggctgaagcatgagaatcacttgaatcctggaggcagaggttgcagtgagctgagatcatgtcactgtactccagcctgggcaacagagtgagactgtctcaaaaagaagaagaagaaaaaaaatgcagtgagtttatgttgttacattgtaacatctcagcgtagctgtatgcattactctatagcataactacttaagttttatgtcattcttgaactgtgatttttttttctatttgctttcatagtttggtgggccattgttatggactgaatgtttgtgtcccatcctcacccctaaattcccatgttgaagccccaaccttcactgtggagctggggctgctaaggaagtaattaaggttacacgaagtcacagtggagaatctgatctgctaagactggtgtccttatagggagagaccccagagagcttgttcccttcctccctgtgcacacaaacaagagggcatgggagcacacagagagatggcagccacctacaagccaagaggagaagcctcacaatgaacccccccccccaccctgctggcacctatgtcttcgacttccagcccccagactgtgagaaataaatttctgttggttcagcc

SEQ ID NO: 179059 - DNA, 5921 bp, Homo sapiens
  Payload ID: 15292
  Gene Symbol: SLFN13
  Gene Name: schlafen family member 13
  Uniprot ID: Q68D06
  ENST ID: ENST00000542635
  CDS Start-End: 178-2871
gtggaagaagacagcaggcggtgggcattcactgtgctggtgggaagtctggttacattaagaaaggaattctagcaaagttattctgtaaatacaacagaatcagttgcttttgttaaatatattggtacttcaggactgattttggtgtaagaagacagcaggtgcaagttcaacatggaggcaaatcactgctccctgggtgtgtatccatcttacccagacctggtcatcgatgtcggagaagtgactctgggagaagaaaacagaaaaaagctacagaaaactcagagagaccaagagagggcgagagttatacgggccgcgtgtgctttattaaactcaggaggaggagtgattcagatggaaatggccaacagggatgagcgtcccacagagatgggactggatttagaagaatccttgagaaagcttattcagtatccatatttgcaggctttctttgagactaagcaacacggaaggtgtttttatatttttgttaaatcttggagtggtgatcctttccttaaagatggttctttcaattcccgcatttgcagccttagttcttcattatactgtagatctggcacctctgtgcttcacatgaattcaagacaggcattcgatttcctgaagaccaaggaaagacagtccaaatataatctgattaatgaagggtctccacctagtaaaattatgaaagctgtataccagaacatatctgagtcaaatcctgcatatgaagttttccaaactgacactattgaatatggtgaaatcctatcttttcctgagtctccatccatagagtttaaacagttctctacaaaacatatccaacaatatgtagaaaatataattccagagtacatctctgcatttgcaaacactgagggaggctatctttttattggagtggatgataagagtaggaaagtcctgggatgtgccaaagaacaggttgaccctgactctttgaaaaatgtaattgcaagagcaatttctaagttgcccattgttcatttttgctcttcaaaacctcgggtagagtacagcaccaaaatcgtagaagtgttttgtgggaaagagttgtatggctatctctgtgtgattaaagtgaaggcattctgttgtgtggtgttctcggaagctcccaagtcatggatggtgagggagaagtacatccgccccttgacaactgaggaatgggtagagaaaatgatggacgcagatccagagtttcctccagactttgctgaggcctttgagtctcagttgagtctatctgacagtccttcactttgcagaccagtgtattctaagaaaggtctggaacacaaagctgatctacaacaacatttatttccagttccaccaggacatttggaatgtactccagagtccctctggaaggagctgtctttacagcatgaaggactaaaggagttaatacacaagcaaatgcgacctttctcccagggaattgtgatcctctctagaagctgggctgtggacctgaacttgcaggagaagccaggagtcatctgtgatgctctgctgatagcacagaacagcacccccattctctacaccattctcagggagcaggatgcagagggccaggactactgcactcgcaccgcctttactttgaagcagaagctagtgaacatggggggctacaccgggaaggtgtgtgtcagggccaaggtcctctgcctgagtcctgagagcagcgcagaggccttggaggctgcagtgtctccgatggattaccctgcgtcctatagccttgcaggcacccagcacatggaagccctgctgcagtccctcgtgattgtcttactcggcttcaggtctctcttgagtgaccagctcggctgtgaggttttaaatctgctcacagcccagcagtatgagatattctccagaagcctccgcaagaacagagagttgtttgtccacggcttacctggctcagggaagaccatcatggccatgaagatcatggagaagatcaggaatgtgtttcactgtgaggcacacagaattctctacgtttgtgaaaaccagcctctgaggaactttatcagtgatagaaatatctgccgagcagagacccgggaaactttcctaagagaaaaatttgaacacattcaacacatcgtcattgacgaagctcagaatttccgtactgaagatggggactggtataggaaggcaaaaaccatcactcagagagaaaaggattgtccaggagttctctggatctttctggactactttcagaccagtcacttgggtcacagtggccttccccctctctcagcacagtatccaagagaagagctcaccagagtagttcgcaatgcagatgaaatagccgagtacatacaacaagaaatgcaactaattatagaaaatcctccaattaatatcccccatgggtatctggcaattctcagtgaagctaaatgggttccaggtgttccaggcaacacaaagattattaaaaactttactttggagcaaatagtgacctatgtggcagacacctgcaggtgcttctttgaaaggggctattctccaaaggatgttgctgtgcttgtcagcaccgtgacagaagtggagcagtatcagtctaagctcttgaaagcaatgaggaagaaaatggtggtgcagctcagtgatgcatgtgatatgttgggtgtgcacattgtgttggacagtgtccggcgattctcaggcctggaaaggagcatagtgtttgggatccatccaaggacagctgacccagctatcttacccaatattctgatctgtctggcttccagggcaaaacagcacctatatatttttctgtgaagtgactattaggaagaactccaaaccaaaatactgtgtaaatgtctatgggtgacagtctgctgatggtagaaacctttctttttagttcacaagtcagttagagatttggacagagctgacacaaagagtttggagctcccccatttctggctctcctttcaggggttcctcccccaactcttttcagcagtggtggctgccccccattctgacccctgactcttgcagccagaaagatggtggttttctaaaggaactttagctgtgctgcacaatgcagacctgtgtcttgctctctgggtaaaagccataaaaataagaaactcagcctgtggcctttcttccaaggctggagttctcgagttcttttatgtgacttcgtgtagtttgttgctttaaaaaatttgtccagaattgttttctgcagaagcatggtctgttaggagcttacaggccataggagaagcagttgtttcctgaatttatctttgctgtattcatttagggcttgggagagtcccaagataattcagtcactgtcagattaatcatttcggcagaacaaacaatattgttatgattatttaatccttaaaattgtgatctccagagtttgttatcagaataacccagaccaaggcttaattgtaatagtgaacattaatggtacctttacagagaaattataggccaagagaaaatgctggctttcagtagaagttaatattagaaacccaaatctggttctgaaagtgtgtatcagatgtacggtgaacaaacttgggaaagattttctttaaaaatcaatgagcgttggccaggcacggtggctcacacctgtaatcccagctgtttgggaggctgaggcaggtggatcacctgaggtcaggagttcaagaccagcctggccaacatggagaaaccccatctctactaaaaatacaaaaattagcagggcatggtggtgcatgcctgtatcccagctacttgggaggctgaagcatgagaatcacttgaatcctggaggcagaggttgcagtgagctgagatcatgtcactgtactccagcctgggcaacagagtgagactgtctcaaaaagaagaagaagaaaaaaaatgcagtgagtttatgttgttacattgtaacatctcagcgtagctgtatgcattactctatagcataactacttaagttttatgtcattcttgaactgtgatttttttttctatttgctttcatagtttggtgggccattgttatggactgaatgtttgtgtcccatcctcacccctaaattcccatgttgaagccccaaccttcactgtggagctggggctgctaaggaagtaattaaggttacacgaagtcacagtggagaatctgatctgctaagactggtgtccttatagggagagaccccagagagcttgttcccttcctccctgtgcacacaaacaagagggcatgggagcacacagagagatggcagccacctacaagccaagaggagaagcctcacaatgaacccccccccccaccctgctggcacctatgtcttcgacttccagcccccagactgtgagaaataaatttctgttggttcagccatccagtctctagtgttttgttattgcagcctgagaacacagctgtatgatcattcatcaaactaaaaacactgatacttaacaatgctaatgcaattacttatttgcttttcagtctctacaaaacattctaaaacactaatctaaatactaacaataaaatatttgcataactaatgaaaattaagaaaccacatgcccaatattccatttataagtaatcctatttggctgatttccctccatattgtaagttttgaacttttctgccagtctttctcctatttgtgttaactcatggaattccagttgtctagccttgaaattgtaggctcttctaacttgagcaaaatctgacagatcagcaaaataaggagaaaaatatttcttctttctttctggctgcattaaatgagatacagctcagcaccaaaaagctatctttgtaaatgttcttagtaaactccctggtctttggagttatttcagcctttgagagtaattctttaaaagtctaattctgactggttgaatctctctatatgatttattgccctagtaatatttgaaacagtatcatattttaaaatatataaatatttatgaatttttgttcagcccaaagaggattactgatgctttcttctttttccatatgatgaggaaatgtttagcttatatatttattgcatttctgttttaaataaaaaattgagagtttgtgtttcattaaactgaaaaaaaaggttctgtaaaataaatgattaaatggaggaaaaggagaagactgaggccagcaactccatgatacagccaaaaatgagccagtaaaagattaagcaagattaactgtaaattttttttttttttttttttaaagagaaaaggtctcactgtgtttcccaggctggagggtagtggtgtgatcatagttcactagagccctgaactcctgggctcaagtgatcctcttgccttagcctcccattgctgggattataggcatgagccactgtgtcaggcttaattgggttttgatgggtacctgcctatctctgtaatttggctctagtcatataggacctgcttcattaaagatctgaaaatctatccagccattgtaaaatgaaacaaaatgttttgaaaatttaaattagccttttattttagttcagacatatagaaaagttgcaagcatagtacagaaagttcctatataccccacttagtgccctcctttttaaaatttttttaaacctagcttatttcctttaagatttctgagaattccaggaatgctcacagatctgtccttgtagtctcctgccacttcttgctatggagtgctgtaccaaggtctctgctagtttctagttggcttgacataatgactttcctaaacttcttctgctctgaatctcaagcatggaaagcggtca

SEQ ID NO: 179060 - DNA, 4121 bp, Homo sapiens
  Payload ID: 15292
  Gene Symbol: SLFN13
  Gene Name: schlafen family member 13
  Uniprot ID: Q68D06
  ENST ID: ENST00000533791
  CDS Start-End: 331-3024
gtgcatcttttaagtcttggcctaaatggaacctactcctggaagtcttatggaaccatggtctccagattcgttcagataccctattcaatgtgttttccctcttagagcccatgtcacagatgatggtaaaggctaatttcattagttcccttccctgccagccagtcagctcctaaagagactatacctgtctttcttgctattgtcttatcccagcacatattagacacgttttaaatattttctaataaatgaattgcaggcctgtaacaattttttaatcaaaaatgaaacaaatattctaatactttaaggtgcaagttcaacatggaggcaaatcactgctccctgggtgtgtatccatcttacccagacctggtcatcgatgtcggagaagtgactctgggagaagaaaacagaaaaaagctacagaaaactcagagagaccaagagagggcgagagttatacgggccgcgtgtgctttattaaactcaggaggaggagtgattcagatggaaatggccaacagggatgagcgtcccacagagatgggactggatttagaagaatccttgagaaagcttattcagtatccatatttgcaggctttctttgagactaagcaacacggaaggtgtttttatatttttgttaaatcttggagtggtgatcctttccttaaagatggttctttcaattcccgcatttgcagccttagttcttcattatactgtagatctggcacctctgtgcttcacatgaattcaagacaggcattcgatttcctgaagaccaaggaaagacagtccaaatataatctgattaatgaagggtctccacctagtaaaattatgaaagctgtataccagaacatatctgagtcaaatcctgcatatgaagttttccaaactgacactattgaatatggtgaaatcctatcttttcctgagtctccatccatagagtttaaacagttctctacaaaacatatccaacaatatgtagaaaatataattccagagtacatctctgcatttgcaaacactgagggaggctatctttttattggagtggatgataagagtaggaaagtcctgggatgtgccaaagaacaggttgaccctgactctttgaaaaatgtaattgcaagagcaatttctaagttgcccattgttcatttttgctcttcaaaacctcgggtagagtacagcaccaaaatcgtagaagtgttttgtgggaaagagttgtatggctatctctgtgtgattaaagtgaaggcattctgttgtgtggtgttctcggaagctcccaagtcatggatggtgagggagaagtacatccgccccttgacaactgaggaatgggtagagaaaatgatggacgcagatccagagtttcctccagactttgctgaggcctttgagtctcagttgagtctatctgacagtccttcactttgcagaccagtgtattctaagaaaggtctggaacacaaagctgatctacaacaacatttatttccagttccaccaggacatttggaatgtactccagagtccctctggaaggagctgtctttacagcatgaaggactaaaggagttaatacacaagcaaatgcgacctttctcccagggaattgtgatcctctctagaagctgggctgtggacctgaacttgcaggagaagccaggagtcatctgtgatgctctgctgatagcacagaacagcacccccattctctacaccattctcagggagcaggatgcagagggccaggactactgcactcgcaccgcctttactttgaagcagaagctagtgaacatggggggctacaccgggaaggtgtgtgtcagggccaaggtcctctgcctgagtcctgagagcagcgcagaggccttggaggctgcagtgtctccgatggattaccctgcgtcctatagccttgcaggcacccagcacatggaagccctgctgcagtccctcgtgattgtcttactcggcttcaggtctctcttgagtgaccagctcggctgtgaggttttaaatctgctcacagcccagcagtatgagatattctccagaagcctccgcaagaacagagagttgtttgtccacggcttacctggctcagggaagaccatcatggccatgaagatcatggagaagatcaggaatgtgtttcactgtgaggcacacagaattctctacgtttgtgaaaaccagcctctgaggaactttatcagtgatagaaatatctgccgagcagagacccgggaaactttcctaagagaaaaatttgaacacattcaacacatcgtcattgacgaagctcagaatttccgtactgaagatggggactggtataggaaggcaaaaaccatcactcagagagaaaaggattgtccaggagttctctggatctttctggactactttcagaccagtcacttgggtcacagtggccttccccctctctcagcacagtatccaagagaagagctcaccagagtagttcgcaatgcagatgaaatagccgagtacatacaacaagaaatgcaactaattatagaaaatcctccaattaatatcccccatgggtatctggcaattctcagtgaagctaaatgggttccaggtgttccaggcaacacaaagattattaaaaactttactttggagcaaatagtgacctatgtggcagacacctgcaggtgcttctttgaaaggggctattctccaaaggatgttgctgtgcttgtcagcaccgtgacagaagtggagcagtatcagtctaagctcttgaaagcaatgaggaagaaaatggtggtgcagctcagtgatgcatgtgatatgttgggtgtgcacattgtgttggacagtgtccggcgattctcaggcctggaaaggagcatagtgtttgggatccatccaaggacagctgacccagctatcttacccaatattctgatctgtctggcttccagggcaaaacagcacctatatatttttctgtgaagtgactattaggaagaactccaaaccaaaatactgtgtaaatgtctatgggtgacagtctgctgatggtagaaacctttctttttagttcacaagtcagttagagatttggacagagctgacacaaagagtttggagctcccccatttctggctctcctttcaggggttcctcccccaactcttttcagcagtggtggctgccccccattctgacccctgactcttgcagccagaaagatggtggttttctaaaggaactttagctgtgctgcacaatgcagacctgtgtcttgctctctgggtaaaagccataaaaataagaaactcagcctgtggcctttcttccaaggctggagttctcgagttcttttatgtgacttcgtgtagtttgttgctttaaaaaatttgtccagaattgttttctgcagaagcatggtctgttaggagcttacaggccataggagaagcagttgtttcctgaatttatctttgctgtattcatttagggcttgggagagtcccaagataattcagtcactgtcagattaatcatttcggcagaacaaacaatattgttatgattatttaatccttaaaattgtgatctccagagtttgttatcagaataacccagaccaaggcttaattgtaatagtgaacattaatggtacctttacagagaaattataggccaagagaaaatgctggctttcagtagaagttaatattagaaacccaaatctggttctgaaagtgtgtatcagatgtacggtgaacaaacttgggaaagattttctttaaaaatcaatgagcgttggccaggcacggtggctcacacctgtaatcccagctgtttgggaggctgaggcaggtggatcacctgaggtcaggagttcaagaccagcctggccaacatggagaaaccccatctctactaaaaatacaaaaattagcagggcatggtggtgcatgcctgtatcccagctacttgggaggctgaagcatgagaatcacttgaatcctggaggcagaggttgcagtgagctgagatcatgtcactgtactccagcctgggcaacagagtgagactgtctc

SEQ ID NO: 179061 - DNA, 550 bp, Homo sapiens
  Payload ID: 15292
  Gene Symbol: SLFN13
  Gene Name: schlafen family member 13
  ENST ID: ENST00000531588
  CDS Start-End: 318-550
ctgaccttggcgcctccagggaaacgcggagtgtcctggagcttgacgcgctggagcttgagaggtctttcaggactgattttggtggaagaagacagcaggcggtgggcattcactgtgctggtgggaagtctggttacattaagaaaggaattctagcaaagttattctgtaaatacaacagaatcagttgcttttgttaaatatattggtaacttgacaaagatgtttcagtggtctcggaatgcaagacagaatcctgacggtagaaatttctaggcaagggtctaaattaggcaaactggtgcaagttcaacatggaggcaaatcactgctccctgggtgtgtatccatcttacccagacctggtcatcgatgtcggagaagtgactctgggagaagaaaacagaaaaaagctacagaaaactcagagagaccaagagagggcgagagttatacgggccgcgtgtgctttattaaactcaggaggaggagtgattcagatggaaatggccaacagggatgagcgtcccacagagatgggactgga

SEQ ID NO: 179062 - DNA, 2889 bp, Homo sapiens
  Payload ID: 15293
  Gene Symbol: SLFN14
  Gene Name: schlafen family member 14
  Uniprot ID: P0C7P3
  ENST ID: ENST00000415846
  CDS Start-End: 37-2775
ttcttttattgtttggagcacagaggggctgctgaaatggagagtctcaagactgatactgaaatgccgtatcctgaggtaatagtagatgtgggcagagtgatttttggagaagaaaacaggaagaagatgaccaacagctgtttgaaaagatctgagaattctagaattatccgggctatatgtgcactgttaaattctggaggtggtgtgatcaaagcagagattgatgataaaacctatagttaccaatgccatgggctgggacaggatttggaaacttcttttcaaaagctccttccttcaggttcacagaaataccttgactacatgcagcaggggcacaatctcctgatttttgtgaagtcatggagcccagatgttttcagccttccactaaggatttgcagcttgcgctccaatttgtatcggagagatgtgacttctgctatcaacttgagtgctagcagtgccctggagcttctcagagagaaggggtttagagcccaaagaggaagaccaagggtgaagaagttgcatcctcagcaggttctcaatagatgcattcaggaagaggaagatatgaggatattggcctcagaattttttaaaaaggacaaactcatgtataaggagaaactcaactttactgagtcaacacatgttgaatttaaaaggttcaccaccaaaaaagtcatacctcggattaaggaaatgctgcctcattatgtttctgcatttgccaacactcaagggggatatgtcctcattggggtggatgataagagcaaagaagtggttggatgtaagtgggaaaaagtgaatcctgacttactaaaaaaagaaatcgaaaactgcatagaaaaattgcctacattccacttctgctgtgagaagccaaaggtaaatttcactacaaaaatcctgaatgtgtaccaaaaagatgtcctggatggttatgtctgtgtgattcaagtggagcccttctgttgcgtggtgtttgcagaggccccagattcctggatcatgaaagacaattctgtcacacggctgacagctgagcagtgggtggtcatgatgctggatactcagtcagctcctcccagtttggtcacagactacaactcttgcctgatttcatcagcttcatctgcacgaaaaagtcccggatatcccataaaagtccacaaatttaaggaggctctgcaacgacatttgtttccagtgacacaggaagaggtacaatttaaaccagaatccctctgtaagaagctgttctcagatcataaagaactggagggtttaatgaagaccctgatacatccttgttctcaggggattgtgatattttctagaagctgggctggtgatgttggcttcaggaaagaacagaatgtcctgtgtgatgctctcctgatagcagttaacagccccgtggtactctatacaatcttaatagaccccaattggcctggaggacttgaatatgcccgaaacacagctcatcagttaaagcagaaactgcaaactgttggtggttacacagggaaagtgtgcatcattccaaggctgatacacctgagcagcacacagagtagacctggtgagatccccctgcgttaccccaggtcctacaggcttgctgatgaggaggaaatggaagacttgctgcaggctctggtggtggtctccctgtcctccagatctcttctgagtgaccagatgggctgtgaatttttcaacttgctcataatggagcagagccagttgctttctgagagtcttcagaagacacgtgaattattcatctactgctttccaggagtcaggaagacagccctagccataaagatcatggagaaaattaaggacttgtttcactgcaaaccaaaagagatcctctatgtttgtgaaagcgactccctaaaggattttgtgacccaacaaaccacctgccaagctgtgaccaggaaaactttcatgcaaggggagtttctaaagattaaacacatagtgatggatgagactgagaatttctgcagcaaatatggcaattggtacatgaaggctaagaacatcacccatccaaaggcgaaggggactggaagtgaaaaccttcaccatgggattctctggctttttcttgacccttttcaaatccatcacgcagatgtcaatggccttccccctccatctgctcagtttcctcgaaaaacaatcaccagtgggatccactgtgctctggaaatagcgaaggttatgaaagaagaaatgaagaggatcaaagaaaatcctccctccaacatgtctccagacacattagcattgttcagcgagactgcctatgaggaagcaacgtgtgcccaggctctgcctggggtgtgtgagacaaagactaatctgacaacagaacaaatagctaactatgtggcaagaaaatgtcacagcctgttccagtgtggctatctgcccaaagatatagcaattctgtgcaggagaggggaggacagaggacgctataggcttgcactactcaaagcaatggaattaattgagacccacagaccatcagaggttgtgtttagcccggccaccggtgtttggggaagtcacattgttttagacagtattcagcaattttcaggcctggagaggactgtcgtgtttgggcttagtccagaatgtgaccagtcagaggaatttcataagctctgctttgcttcaagagccattaaacacctctacctgctttatgaaaagagggcagcctactgaaaattattacaaataatagaggaagacaggaagagcagagtcctttctcctagacaggtagcagtgactccattttaatattacaagtgaggaaatcaaggcacatcagtatgg

SEQ ID NO: 179063 - DNA, 10591 bp, Homo sapiens
  Payload ID: 15294
  Gene Symbol: SLFN5
  Gene Name: schlafen family member 5
  Uniprot ID: Q08AF3
  ENST ID: ENST00000299977
  CDS Start-End: 149-2824
agctgatataagcccgggatcccgccgggtcaggttctctgctctggacttgggaggctccgttgcctgctcccggagggagacgcgctgccgaggagaacccagcgggagaacatttcaggataggaataggccaagtgctgagaagatgagtcttaggattgatgtggatacaaactttcctgagtgtgttgtagatgcaggaaaagtcacccttgggactcagcagaggcaggagatggaccctcgcctgcgggagaaacagaatgaaatcatcctgcgagcagtatgtgctctgctgaattctggtgggggcataatcaaggctgagattgagaacaaaggctacaattatgaacgtcatggagtaggattggatgtgcctccaattttcagaagccatttagataagatgcagaaggaaaaccactttttgatttttgtgaaatcatggaacacagaggctggtgtgccacttgctaccttatgctccaatttgtaccacagagagagaacatccaccgatgtcatggattctcaggaagctctggcattcctcaaatgcaggactcagactccaacgaatattaatgtttccaattcattaggtccacaggcagctcagggtagtgtacaatatgaaggtaacataaatgtgtcagctgctgctttatttgatagaaagcggcttcagtatctggaaaaactcaaccttcctgagtccacacatgttgaatttgtaatgttctcgacagacgtgtcacactgtgttaaagacagacttccgaagtgtgtttctgcatttgcaaatactgaaggaggatatgtattttttggtgtgcatgatgagacttgtcaagtgattggatgtgaaaaagagaaaatagaccttacgagcttgagggcttctattgatggctgtattaagaagctacctgtccatcatttctgcacacagaggcctgagataaaatatgtccttaacttccttgaagtgcatgataagggggccctccgtggatatgtctgtgcaatcaaggtggagaaattctgctgtgcggtgtttgccaaagtgcctagttcctggcaggtgaaggacaaccgtgtgagacaattgcccacaagagaatggactgcttggatgatggaagctgacccagacctttccaggtgtcctgagatggttctccagttgagtttgtcatctgccacgccccgcagcaagcctgtgtgcattcataagaattcggaatgtctgaaagagcagcagaaacgctactttccagtattttcagacagagtggtatatactccagaaagcctctacaaggaactcttctcacaacataaaggactcagagacttaataaatacagaaatgcgccctttctctcaaggaatattgattttttctcaaagctgggctgtggatttaggtctgcaagagaagcagggagtcatctgtgatgctcttctaatttcccagaacaacacccctattctctacaccatcttcagcaagtgggatgcggggtgcaagggctattctatgatagttgcctattctttgaagcagaagctggtgaacaaaggcggctacactgggaggttatgcatcacccccttggtctgtgtgctgaattctgatagaaaagcacagagcgtttacagttcgtatttacaaatttaccctgaatcctataacttcatgaccccccagcacatggaagccctgttacagtccctcgtgatagtcttgcttgggttcaaatccttcttaagtgaagagctgggctctgaggttttgaacctactgacaaataaacagtatgagttgctttcaaagaaccttcgcaagaccagagagttgtttgttcatggcttacctggatcagggaagactatcttggctcttaggatcatggagaagatcaggaatgtgtttcactgtgaaccggctaacattctctacatctgtgaaaaccagcccctgaagaagttggtgagtttcagcaagaaaaacatctgccagccagtgacccggaaaaccttcatgaaaaacaactttgaacacatccagcacattatcattgatgacgctcagaatttccgtactgaagatggggactggtatgggaaagcaaagttcatcactcagacagcaagggatggcccaggagttctctggatctttctggactactttcagacctatcacttgagttgcagtggcctcccccctccctcagaccagtatccaagagaagagatcaacagagtggtccgcaatgcaggtccaatagctaattacctacaacaagtaatgcaggaagcccgacaaaatcctccacctaacctcccccctgggtccctggtgatgctctatgaacctaaatgggctcaaggtgtcccaggcaacttagagattattgaagacttgaacttggaggagatactgatctatgtagcgaataaatgccgttttctcttgcggaatggttattctccgaaggatattgctgtgcttttcaccaaagcaagtgaagtggaaaaatataaagacaggcttctaacagcaatgaggaagagaaaactgtctcagctccatgaggagtctgatctgttactacagatcggtgatgcgtcggatgttctaaccgatcacattgtgttggacagtgtctgtcgattttcaggcctggaaagaaatatcgtgtttggaatcaatccaggagtagccccaccggctggggcctacaatcttctgctctgtttggcttctagggcaaaaagacatctgtatattctgaaggcttctgtgtgacaggaaacccaagcctaagaaacaattaagtggttctcatctctaattaactgtgaaaccatttaatccaaacatgtaagcacacactcacttattaagtcacatacttttctaggtgctggggattgagaacgaatcgatgtaagattcctcctttagggcagagacagaccactgacaaatacacagatagacaaggaatttcccatggtaaaaagggatatcagtaattagaggaccgtgagactcagagatgtgtgtgtgtgtgtgtgtgtgtgtgtgtgtgtgtgcgcgcgcgcacgtgcacatgtgtgtaggtagatggagggggtgattattttgggtggtcagggaagtgctcagtgagggaagaacttgtcatgagaatctctgagcgtgccaggcagactcggatatttttataaatttttaacatggccacttgcagaagagcttgaatgggacgtgcagcgagaatgtgaaggatggagcaggtagctcatctggccttgtaggtgccgggaacgggcaagacatgttttgaaatgtaagatcacagactgttttttgcaagaccacattatattactttattattttctgctttttcttttaacgacattagtgtttttgatcactatattttaaaatgctttttgtgagccttttggttatgtggaatctgttccttagctctgattttttattcttatggagcgtcttaggttactacatgaaggtaagactgccacagtcccccagggaggcacactgtgttttactgattgatttgaagatgatagagagcctagggggatgagtctattggactcaaaggttacattttgtttttccatttaatttaataatcaacaaaacgacaaagtcagtttaatatctttcttctgctgagtcttcaggatgttagctagtctttcaaaagccattgctacaaaagtgcaaatttctcatttcctgtgggtctctagaaactctctcaatatttaaagccaaacaaatccatcttttctgagagacagaaactaaaaaattcagagttaattcactattaaaaacagcaaggccctgctatttcccaagaataaagaaatttaaaattctcattgtaagaagtatgaacttgaagctagaattggtttatttctggcagctacttacaatattaagaactttactttttaaatttgagacaatttcacaggaaagcaagaaattagtctattgtgaaatgtttttacaactaacttggaatatactgcaaatcactagtaagtagagacacatttaagataaaatgattaataaaacaattggtaattctgaataaggatctgaataaatccagatcacagactgttcctttaccaatatgtaaaagaatgtgcaaaattagtaaaaatatacccaaaaatttaccagcaacagagaagcaaagaatggagttcaaccttacactataaacatctaatagatatgtatgaaaatttaaaaactagaaaaggttgggcatggtggctcatgcttgtgatcccaggactttaggaggccaaggtgggaggattgtttgagcccaggagttcaagaccagcttgagcaatatagtgagaccctgtctctacaaaaacaaacaaacaaacaaacaaataaataaataaataaaattagctgggaatggtgatgcacacctggagtcctagctactcagaaggctgaggcaggacgatcacttgacctcagaagtctgaggttacagtgagctatgatcataccagtgcactccagtctgggtgacagaacaagaccctgtctccaaaaattaaataaataaaacaaaaaaaaagaatttaaaagttttatataaaggcatagctactatctcatctgcccagtgtagtcatgaatagatgtcacataaagaaaagaaaaccagaattcttgttaatatggccagtttgaagggtggtggcggaggtattgagcaggcagctcagggaaatgccagggagacccttgagcacagaaactcctgattgtccccagggactctccgtggacacaggagggattttccaggatttcacatgaattcaatgaagggggctgtgtcttattcctggatgctttgcctccttcatggaattcagtggatttaatggaagttcctaggcaacaataaagagtagaaaccaggttaacagcgagggcctcatctcacaccagatcatatcaggctacacaaaagtagatggaagacaccacccaggcctccagctatacactggagaagaagccaaactagtctacttcatctaagaaagttgtcaaagagagcccttctatactatcttaaggtaaaaagaaagactctacccagctgccctgattaagcattagaaagataagtgttctgatcattaggcgaaagacaatggggaaaaatgtagaaaagaaatatgacatgagccagatgaagaacccatcctgaaaggatatataactcaggggacaaaagacaactcaccataagttgggcgcagtggatcacgcctgtaatctcagcattttggtaggccaaggcaggtggatcacctgaggtcaggagttcaagtccagcctggccaacgtggtgaaatcctgtctctactaaaaatacaaaaattagctgggtgtggtggtgcatgcctgtaataccagctactcagaaggctgaggcaagagaattgcttgaatcaaggaggcagaggttacagtgagccaagatcaggccattgtacttcagcctgggcgacaaagtgagaccctgtctcaaaaaacaaacaaagcctccccatagatgtctcctgccatagaagaatttaagaagttcataaattcaataaaacaagagttgaaggcctgtcccactgtacccaatttctccctctctgaactgcagcctagaaactctctacaggcagtaagctggggcagtcacagaggtgacctcatctgtttcccacatcctgcattaggacagtgatcagggatcagtatccttcattgactgatttccaatatctcgagacctgttgtttcatatattttgccttattttgcaattgtttcatatattttgtcttattttgcaattgtttcaggagggaggataaatatggtccctgttcctctatcttgaccagaagcatctaagaaggcagtgaagcaacatgtgtacagttcttagggaaacaaattttgacctaaaaatattaaacctagtcaaaatattattctagtacaaaggcagcacatgggtatttttgaacataaaagagttctagaaatacaggacccatgaatcattcttgaagaaaagttactcagtaaggaaatctagctaagcaagcaacatgtacaaataaaagattattataattggaccaaagttaagtttaaatccattcacatgtatataattaagatatataggaattataattacagaaaagaatgttacaaaccttcacaaagtaaaaatatttttatatcagatagattcttctgtttcaatccataaaaccagggtttggatcattttaaaaaaacaaacaaaaataatttattggaatcattagggaggacctgatagaataaaatgacaagctgaccaaataggccttagaagggagaggtgcctgggcagttacaaggacctaggtagcaggggtgacttggccacagtcattttctttacttgatttaaggaggttaaattacagtgagagagttgcacttatttagtttgcataccgtactcaactcttagctagcatagggcaggttccttagttgaaaaatttccacaaaacatgatgtaaagtggaaagatcagttcccccaaagaatatcagttaccaaagtaggatgaaaggatgttgggtagatcaaaacaacaaatgtccattacagcaattaacaaaagttagggagtggggaagtctgagtgctaatatggatttcaaaacaactttaaaaatggcttcaaacattttatgctttttgtaatttagtcattttaatattagataaatcttcctgtaactgaaagttcttgagttaaagaaaaatattcggtagttcagctcttccttcaattttattagttgctttttcttttgttcaagtgaaataaacataaaaataattttaaaatattatgtatcatatccttcgatttaacataattctatctagctgttcttatattttctctgatatatttttaaaagctttctggaatattattaaccttgaatatttctagttgatgagtttatgagtgatttattgcttccttttctctttcagtattgctagaattaattttattgactttgcccctttgcataaagaccttgaaggtcacatgctgaaatcgccctctactaaaacaaactcatagaaataatggggaagatatttcaaaacattgccatatgcatagccatcctcacaaccaagaaaagcgcctctccatgaactaaaacctatgagtcattggtacaggtagggaaaatctaggtaaaccacggtaatacactgaggctggcaccaccacaggccaggacaaccgttgtcacaaagccaggacagaatctcccagccagaaagtgttgccctgaggctgaagccaaattcattttgcccccagttggccagaccaaagcctagaactaaaaaacccatacctcagggtttgtcagcattggcactgctggctttttgggctggacaaccatttattgtgagaggcttctctatgcactgtaggatgtttagcagcatccttggccctactccctagacgccagtagcaaatccaccaccctccctcccctaccccagggttggttgtcagttgtgacaaccaaaaatgtctccagacatcgccaaatgtcccttggggggtaaaatcaccaccaccatacctcttttgactaaaagagtttccagaatagtggcagaatatataggtcaagcataacacattacaatcaagattcagaacatcaaagattcttttttaatcctaaaagaaaaagtttggaaaatctacaaaaagaagtgtgaatttgacaataactatttcactagcaagggtagacgtaagcagaatacaggtagcatattcaaactgctgtggaaaaacaacatcaaacctagacttctctccccaaactatcattcagagtcgagggcaaaataaatagattttctgacttggaacaagtaggaataatgtacttatagtattcatcttcatacagggatggactataagtgatttttaaaaaacttcctacttgttccaagtcagaaaaactattcatatagggatgggctattagcaagagtatatgaataacgtactataacaagaaaaaatgaattgagaagaaagtagtggttttaagaaggaaaggagaacaaataaattagtgaaacataaggttaagtctatacatattattttctaattgcctattatgtcagactacatgtagttagaaaatacgatgaaagaaaaagccatattataattccaacaaaaagataaaataattaagaataactgcaacaagaaaatataagttctgcaacaataaaactatacaatgaaactaaagagcacaaaaaagaacttaaacagataaaaagcagaccacgtttttggataagaagattaaaaattataaatatatcaattttcactgttaatctataaattcagtgtaatcccaataaaaatgccaacaggttttccccaatagcattgaaatgattttaaaatttaatgaaggccaagcatggtggctcactcctgtaatcccagcactttgagaggccgaggcaggtggattgcctgagtccaggagttccagaccagcctggacaacatggtgaaatcccgtctctatttaaaatgcaagaaattagctgggtgtggtggtgtgcacctatagtcctagctactcgggaggctgaggtgggagaatcacccaagccttgggaggtcgaggctgtagtgagccaaaatcacatcactgcactccagtctgggcagccagagtgagaccctgtctcaaaaaaaaaaaaattattggaaactacgaggcaagaatatccaagaaaaatctagaaaagaagaaacctgagtgagtcagcatgaccaaatattaaaacatcttataaagctacaataattaaaacaatgtggtgctgatatgtggagggtcaatggaacaagatgaaatggccaaaaataaatttaaaatacatgttgaaatgtattaacagcatatgttaaagttaagttatgttaactttatatgttaaattcaagttaattggggaaagatggattattcaatatatgatgaacaactctgtcacccagctaaaaaaaattaagcttgggccatatgccagactagataccaaaataaattccaggaggaccaagtttttaaaagtaaaaatatggaatcatggaagtgcatgaagaagaagtagcacttaaaaaaataataatctcagcatggggaaggtctaagtatggccctcaatcagaaaccaggaaggaaaatattgactattttaaacaaaattatctctgtaccaaaaacagcataaaaggtcaagaaacaacacactggaaaaagaattgcaatgaatatcacagccaaatagttaatttcttattttcaaaaaatagcttctacaaatcgaagagaaaaattctaaggtctcaaaggaaaaatgagcaaaggatttgacaggtggtagaatacagaaaaagaatttaaaatagctcctaaagatatggaaacattactcatgatagcagaagtatcaattgacaaaattactcagattggtaacaaactttaagggggaaagcacttccatgcattgctgtaaattggtacatcttctactgagaacaatccggcagtagttaacaaaattgtgaatgcatatatctctttctctagaaatttctcttttgggaatttattctacatatatattcaaacgtgtgaaatacttctatacaggtgattgaatttcactttattcctaagagcagaagactgcaaaatagtaaatatatacccaaaagggtctaatggattagtttttggcatatcagcacatgataatactatgaagccataaaaaagagagatctctatatgtattgatgggggaccatctttaagatatactgtggtgttgaacaaaacaacatgctgaaaatgtctcttattcttttagaatcaatataagtctgtgcttgtaaatgcagtaagtatctttggaagtatacctaaaaattggtaatagtgtttgactccagggaagaacagatgggtgccagagtgaaaaaaagatagcttttgctttttatgacttttggattctgtaccacgtaataattttgatgtaaattttgctgtgtgtgtttttacttgttcatgtagtgattttataaattactcttttaattttctatcaatgaatatcctgggataaacccctcatgatcataatgaataatgatgtgtggagagtggggagggtttacatatgaaaaatgtagaaaatacaaaaagtgtctatatatacaaaaatgtaagtgttaacatttttatatttgcttcaagctttttttttaaataaaagaaatgcaatattgcaattaaa

SEQ ID NO: 179064 - DNA, 2540 bp, Homo sapiens
  Payload ID: 15294
  Gene Symbol: SLFN5
  Gene Name: schlafen family member 5
  ENST ID: ENST00000542451
  CDS Start-End: 114-1283
tctctgctctggacttgggaggctccgttgcctgctcccggagggagacgcgctgccgaggagaacccagcgggagaacatttcaggataggaataggccaagtgctgagaagatgagtcttaggattgatgtggatacaaactttcctgagtgtgttgtagatgcaggaaaagtcacccttgggactcagcagaggcaggagatggaccctcgcctgcgggagaaacagaatgaaatcatcctgcgagcagtatgtgctctgctgaattctggtgggggcataatcaaggctgagattgagaacaaaggctacaattatgaacgtcatggagtaggattggatgtgcctccaattttcagaagccatttagataagatgcagaaggaaaaccactttttgatttttgtgaaatcatggaacacagaggctggtgtgccacttgctaccttatgctccaatttgtaccacagagagagaacatccaccgatgtcatggattctcaggaagctctggcattcctcaaatgcaggactcagactccaacgaatattaatgtttccaattcattaggtccacaggcagctcagggtagtgtacaatatgaaggtaacataaatgtgtcagctgctgctttatttgatagaaagcggcttcagtatctggaaaaactcaaccttcctgagtccacacatgttgaatttgtaatgttctcgacagacgtgtcacactgtgttaaagacagacttccgaagtgtgtttctgcatttgcaaatactgaaggaggatatgtattttttggtgtgcatgatgagacttgtcaagtgattggatgtgaaaaagagaaaatagaccttacgagcttgagggcttctattgatggctgtattaagaagctacctgtccatcatttctgcacacagaggcctgagataaaatatgtccttaacttccttgaagtgcatgataagggggccctccgtggatatgtctgtgcaatcaaggtggagaaattctgctgtgcggtgtttgccaaagtgcctagttcctggcaggtgaaggacaaccgtgtgagacaattgcccacaagagaatggactgcttggatgatggaagctgacccagacctttccaggtgtcctgagatggttctccagttgagtttgtcatctgccacgccccgcagcaagcctgtgtgcattcataagaattcggaatgtctgaaagagcagcagaaacgctactttccagtttcagcaagaaaaacatctgccagccagtgacccggaaaaccttcatgaaaaacaactttgaacacatccagcacattatcattgatgacgctcagaatttccgtactgaagatggggactggtatgggaaagcaaagttcatcactcagacagcaagggatggcccaggagttctctggatctttctggactactttcagacctatcacttgagttgcagtggcctcccccctccctcagaccagtatccaagagaagagatcaacagagtggtccgcaatgcaggtccaatagctaattacctacaacaagtaatgcaggaagcccgacaaaatcctccacctaacctcccccctgggtccctggtgatgctctatgaacctaaatgggctcaaggtgtcccaggcaacttagagattattgaagacttgaacttggaggagatactgatctatgtagcgaataaatgccgttttctcttgcggaatggttattctccgaaggatattgctgtgcttttcaccaaagcaagtgaagtggaaaaatataaagacaggcttctaacagcaatgaggaagagaaaactgtctcagctccatgaggagtctgatctgttactacagatcggtgatgcgtcggatgttctaaccgatcacattgtgttggacagtgtctgtcgattttcaggcctggaaagaaatatcgtgtttggaatcaatccaggagtagccccaccggctggggcctacaatcttctgctctgtttggcttctagggcaaaaagacatctgtatattctgaaggcttctgtgtgacaggaaacccaagcctaagaaacaattaagtggttctcatctctaattaactgtgaaaccatttaatccaaacatgtaagcacacactcacttattaagtcacatacttttctaggtgctggggattgagaacgaatcgatgtaagattcctcctttagggcagagacagaccactgacaaatacacagatagacaaggaatttcccatggtaaaaagggatatcagtaattagaggaccgtgagactcagagatgtgtgtgtgtgtgtgtgtgtgtgtgtgtgtgtgtgcgcgcgcgcacgtgcacatgtgtgtaggtagatggagggggtgattattttgggtggtcagggaagtgctcagtgagggaagaacttgtcatgagaatctctgagcgtgccaggcagactcggatatttttataaatttttaacatggccacttgcagaagagcttgaatgggacgtgcagc

SEQ ID NO: 179065 - DNA, 1225 bp, Homo sapiens
  Payload ID: 15294
  Gene Symbol: SLFN5
  Gene Name: schlafen family member 5
  Uniprot ID: Q08AF3
  ENST ID: ENST00000592325
  CDS Start-End: 96-1112
gaggctccgttgcctgctcccggagggagacgcgctgccgaggagaacccagcgggagaacatttcaggataggaataggccaagtgctgagaagatgagtcttaggattgatgtggatacaaactttcctgagtgtgttgtagatgcaggaaaagtcacccttgggactcagcagaggcaggagatggaccctcgcctgcgggagaaacagaatgaaatcatcctgcgagcagtatgtgctctgctgaattctggtgggggcataatcaaggctgagattgagaacaaaggctacaattatgaacgtcatggagtaggattggatgtgcctccaattttcagaagccatttagataagatgcagaaggaaaaccactttttgatttttgtgaaatcatggaacacagaggctggtgtgccacttgctaccttatgctccaatttgtaccacagagagagaacatccaccgatgtcatggattctcaggaagctctggcattcctcaaatgcaggactcagactccaacgaatattaatgtttccaattcattaggtccacaggcagctcagggtagtgtacaatatgaaggtaacataaatgtgtcagctgctgctttatttgatagaaagcggcttcagtatctggaaaaactcaaccttcctgagtccacacatgttgaatttgtaatgttctcgacagacgtgtcacactgtgttaaagacagacttccgaagtgtgtttctgcatttgcaaatactgaaggaggatatgtattttttggtgtgcatgatgagacttgtcaagtgattggatgtgaaaaagagaaaatagaccttacgagcttgagggcttctattgatggctgtattaagaagctacctgtccatcatttctgcacacagaggcctgagataaaatatgtccttaacttccttgaagtgcatgataagggggccctccgtggatatgtctgtgcaatcaaggtggagaaattctgctgtgcggtgtttgccaaagtgcctagttcctggcaggtgaaggacaaccgtgtgagacaattgcccacaagagaatggactgcttggatgatggaagctgacccaggttagggagcaatatccacaatggttgtaatgtttgctggcagcaaggcagggcgggtcagagaggaaagagggatatggtattccttggaatctggggaaagagatttactctctga

SEQ ID NO: 179066 - DNA, 1951 bp, Homo sapiens
  Payload ID: 15295
  Gene Symbol: SLFNL1
  Gene Name: schlafen-like 1
  Uniprot ID: Q499Z3
  ENST ID: ENST00000302946
  CDS Start-End: 219-1442
gttccctgagagctaccggccaggggtcgggaggctatgggagctcagggcaggcacctcccatgctcccgcgggagccaccaggacatgaaggtcataggagccgggacactccctgagtcctctgggagcccttaagccacactgagaacacagaccctgggagaagcagccagcagtgaggaatcctggaaccccttcccagggagagccttcccatgacccccatgaagagatcagtgcaaacacaggtgtcagagcccttcatggagtcctggggtgaggagtccctgccggagctacccgcagagcagtccctgacggagtactctgacctcgaggaggctccctcggcgcacactctctatgtgggccatctgaacccccagttctcagtgccggtgcttgcctgcctgctgcgagacaccctggagcggctggagatgccggtggcgcgggagcacattgaagtggtgaggcggccgcggaaggcctatgcactggtgcaggtgactgtccacagggacaccctggcctccctcccctggcgcctgcagacggccctggaggagcacctaatcctcaaggagctggcagcccgtgggaaggacctgctattgagtgaggcccaagggcccttcagccacagagaggagaaggaggaggaggaggaggacagtggcctgagccctggccccagtccaggctctggtgtcccgctgcccacctggcctacacacacgctgcctgataggccccaggcccagcagctgcagagctgccagggccggcccagcggcgtgtgctccgacagtgccattgtgcaccagcagatcgtgggcaaggaccagctcttccagggtgccttcctgggcagcgagacccgcaatatggagttcaagcggggtagcggcgagtacctcagcctggccttcaagcaccacgtgcggcgctacgtgtgcgccttcctcaacagcgagggcggcagcctgctcgtgggagtagaggacagcggcctggtgcagggcatccgctgcagccaccgtgacgaggaccgcgcacgcctgctggtggactccatcctgcagggcttcaagcctcagatctttcccgatgcctacactctcaccttcatccctgtgatcagtacctcggagaccagcgtccccctcaaggtgatccgcctgaccgtgcacacccccaaggcccagagccagccgcaactctaccagacagaccagggggaggtgtttctgcggcgcgacgggagcatccagggcccgctgtctgccagcgccatccaggagtggtgcaggcagaggtggctggtggagctgggcaagctggaagagaagatgaaggcgctgatgatggagaaggagcagctccagcagcagctgcagcagcacgggcctgtgtcctgcacctgctgtgtcctgtgagggccctggggagcaggcaggacggcacggcactctccacctgagacccagggatttcctgtttgagtgtaaggccaaccagtaaagcccatgcgggctgctgagaggcggacagggactccttcaacatggcacatgagcaggcacccatgtggcttcaaccctgacagacccatctgtgtagccaagaaactgctctcagccctgtccccaaatgaccttactttcagaaagaatgtgtaaaaccctgcccagagctcccctagggctaagctataagggattgtccttctccctaaaatgctcatttggcccaggctgaggtctgtgactccagttggctacacagtgccagaaaggaatctgtcatctcaggaaagcccctcaaagatggcgaggcatatttgatgactgtggttacagggcaagaggccaccctgcagcccccacccctgacttgctggaacttgtgactgtcaaagctccattaataaattacatgcacctgg

SEQ ID NO: 179067 - DNA, 4310 bp, Homo sapiens
  Payload ID: 15295
  Gene Symbol: SLFNL1
  Gene Name: schlafen-like 1
  Uniprot ID: Q499Z3
  ENST ID: ENST00000359345
  CDS Start-End: 2578-3801
gaacccaccactccaagctgcctgcagagcacctatactttctaatactattacctaatactagagagccagagacaccgtaaataaccttgttatcttatatttatgtatttaaaagatggttcataaatgtgtttagtgcttaccatgaaagacaatttttacccccatctccaaaaagaagtagaactgattcagctcacagaaggctgttaaaggcgccagagaaatatgtgatgcagtggcttaaagagactgccaggaagagtggggaaagttgctgcactcaagtcaatttgggaaatttcatgcagaacagccacccaatagcaaggcctctaggtaagtagggagaacgcctctggtcatgttcaggtgtttcgtctgtcaaggtgcttctcccggacagctatttctgcacagttcaacacgacttgagttggccatctcaaaacagctatagcctcagttgctgtgagggcacctcatggatgacagaggcaagaaaggcttgagggagagggggtgaggcagggggagcttggagccgtcattctctaaccctaagagctgtggacacaaagccgagcccaacctggctgctgcccgggcgggcaaggagagggcaccgaatgcactctccccagagcctcgcactgccaccagttgaggcctgcgcccctctcttccccgcacaccatagcctcttttcttgagtgctctacccaaactactgcctcaccccctaggaaacaaacatttggtaacatcttcagaaaggctgctttcaaggaaggcagcttctctacgctgtcaaacagctttcttagttgaagcatctaactgtggcaccatccttactgcccccaattggggcttccagaagcagtgtgggcaagcgctgccagccttctgcagaatgatgagcactggtcagtcctgtgctgataaagactgtgtgtcacccacgtcttggtttctccaacagcaggtaacaacctcatcttcccaaagagatagatagctacgcctgacctatttttcagggctcttctggacagcagcctctgtctccagcacagagaagggcctggcgtcagggggagccctggagcctaccatgtgcctcctgctccatcttgggagcagctgggccctgtcagtactcagtagagcctgggattggtgactgactaaagagggaggtggaggctttaggcagcagcgctgaaagaggtggcaagaggtgacctgcatgggaactggggcctgaagagacatcactaagtggggaagtgtgtcccacagccaagctgcatggtgggtgggccgctgggtctgcttccagtgtgtggtgggacccacagggagctgagttttcctgtttgatttcccgcacccagcctgcctgtggctggccaagaaggcattgttgaacctcatgagatcacagaggtagctgtgcaggccccgcccacttcctataaccctggttctggccgtccctgtgccaagcctccaagttccctgagagctaccggccaggggtcgggaggctatgggagctcagggcaggcacctcccatgctcccgcgggagccaccaggacatgaaggtcataggcctctcctctcctcctcttcctgtttgacctgaatgcccccaggccaactgcctcaaggattccatttgagaagatgcaggctgggtgtgtggggagcagtagaggggctggtgtgtgcacatatgtgcacagctcaggacagaggctccctggacttggggcgggggcactagggccccaactctaaccctcgttctgccctgttgacctctgctctctggaccaaaaatggaggactcagtctagactagttcttagggtctaggagccaccttaagttatgtttatatgcaaaggccatttttctgagaggccatagctttcatcagtgtgccaaaaagcgtgagatcctctgctctaaaagcctctgccccagcgctgcctagtttcagagcccccgatggcctcacatggggttttagagcaggcagagaagctgcaatggggccaccagccagtcctcagagtcctgggttaaggcctcctctccaggaggccctgtgtaaaggttttctctgttgcctggaggcaggagtgaactggtaggcaggaaaccctgagggtacctaggaggcccctagcctgtgggttggggagggaagacaggacccctggggccactgaaatggtggagctctcagagacctgagttctggtcccttctgccactttttgggcagatcccgtcttcccacaggccctgtgtcttgctcagtccacgtgactctgctttctcatcctaggcctcaggtgggtggcaggccctttcctgcttgccctctgccctccctctctctggccctgcccagtctctgccaatctgtgtacctcccaggagccgggacactccctgagtcctctgggagcccttaagccacactgagaacacagaccctgggagaagcagccagcagtgaggaatcctggaaccccttcccagggagagccttcccatgacccccatgaagagatcagtgcaaacacaggtgtcagagcccttcatggagtcctggggtgaggagtccctgccggagctacccgcagagcagtccctgacggagtactctgacctcgaggaggctccctcggcgcacactctctatgtgggccatctgaacccccagttctcagtgccggtgcttgcctgcctgctgcgagacaccctggagcggctggagatgccggtggcgcgggagcacattgaagtggtgaggcggccgcggaaggcctatgcactggtgcaggtgactgtccacagggacaccctggcctccctcccctggcgcctgcagacggccctggaggagcacctaatcctcaaggagctggcagcccgtgggaaggacctgctattgagtgaggcccaagggcccttcagccacagagaggagaaggaggaggaggaggaggacagtggcctgagccctggccccagtccaggctctggtgtcccgctgcccacctggcctacacacacgctgcctgataggccccaggcccagcagctgcagagctgccagggccggcccagcggcgtgtgctccgacagtgccattgtgcaccagcagatcgtgggcaaggaccagctcttccagggtgccttcctgggcagcgagacccgcaatatggagttcaagcggggtagcggcgagtacctcagcctggccttcaagcaccacgtgcggcgctacgtgtgcgccttcctcaacagcgagggcggcagcctgctcgtgggagtagaggacagcggcctggtgcagggcatccgctgcagccaccgtgacgaggaccgcgcacgcctgctggtggactccatcctgcagggcttcaagcctcagatctttcccgatgcctacactctcaccttcatccctgtgatcagtacctcggagaccagcgtccccctcaaggtgatccgcctgaccgtgcacacccccaaggcccagagccagccgcaactctaccagacagaccagggggaggtgtttctgcggcgcgacgggagcatccagggcccgctgtctgccagcgccatccaggagtggtgcaggcagaggtggctggtggagctgggcaagctggaagagaagatgaaggcgctgatgatggagaaggagcagctccagcagcagctgcagcagcacgggcctgtgtcctgcacctgctgtgtcctgtgagggccctggggagcaggcaggacggcacggcactctccacctgagacccagggatttcctgtttgagtgtaaggccaaccagtaaagcccatgcgggctgctgagaggcggacagggactccttcaacatggcacatgagcaggcacccatgtggcttcaaccctgacagacccatctgtgtagccaagaaactgctctcagccctgtccccaaatgaccttactttcagaaagaatgtgtaaaaccctgcccagagctcccctagggctaagctataagggattgtccttctccctaaaatgctcatttggcccaggctgaggtctgtgactccagttggctacacagtgccagaaaggaatctgtcatctcaggaaagcccctcaaagatggcgaggcatatttgatgactgtggttacagggcaagaggccaccctgcagcccccacccctgacttgctggaacttgtgactgtcaaagctccattaataaattacatgcacctgg

SEQ ID NO: 179068 - DNA, 1865 bp, Homo sapiens
  Payload ID: 15295
  Gene Symbol: SLFNL1
  Gene Name: schlafen-like 1
  Uniprot ID: Q499Z3
  ENST ID: ENST00000372611
  CDS Start-End: 310-1356
tctggccgtccctgtgccaagcctccaagttccctgagagctaccggccaggggtcgggaggctatgggagctcagggcaggcacctcccatgctcccgcgggagccaccaggacatgaagatcccgtcttcccacaggccctgtgtcttgctcagtccacgtgactctgctttctcatcctaggcctcaggagccgggacactccctgagtcctctgggagcccttaagccacactgagaacacagaccctgggagaagcagccagcagtgaggaatcctggaaccccttcccagggagagccttcccatgacccccatgaagagatcagtgcaaacacaggtgtcagagcccttcatggagtcctggggtgaggagtccctgccggagctacccgcagagcagtccctgacggagtactctgacctcgaggaggctccctcggcgcacactctctatgtgggccatctgaacccccagttctcagtgccggtgcttgcctgcctgctgcgagacaccctggagcggctggagatgccggtggcgcgggagcacattgaagtggtgaggcggccgcggaaggcctatgcactggtgcaggtgactgtccacagggacaccctggcctccctcccctggcgcctgcagacggccctggaggagcacctaatcctcaaggagctggcagcccgtgggaaggacctgctattgagtgaggcccaagggcccttcagccacagagagcagatcgtgggcaaggaccagctcttccagggtgccttcctgggcagcgagacccgcaatatggagttcaagcggggtagcggcgagtacctcagcctggccttcaagcaccacgtgcggcgctacgtgtgcgccttcctcaacagcgagggcggcagcctgctcgtgggagtagaggacagcggcctggtgcagggcatccgctgcagccaccgtgacgaggaccgcgcacgcctgctggtggactccatcctgcagggcttcaagcctcagatctttcccgatgcctacactctcaccttcatccctgtgatcagtacctcggagaccagcgtccccctcaaggtgatccgcctgaccgtgcacacccccaaggcccagagccagccgcaactctaccagacagaccagggggaggtgtttctgcggcgcgacgggagcatccagggcccgctgtctgccagcgccatccaggagtggtgcaggcagaggtggctggtggagctgggcaagctggaagagaagatgaaggcgctgatgatggagaaggagcagctccagcagcagctgcagcagcacgggcctgtgtcctgcacctgctgtgtcctgtgagggccctggggagcaggcaggacggcacggcactctccacctgagacccagggatttcctgtttgagtgtaaggccaaccagtaaagcccatgcgggctgctgagaggcggacagggactccttcaacatggcacatgagcaggcacccatgtggcttcaaccctgacagacccatctgtgtagccaagaaactgctctcagccctgtccccaaatgaccttactttcagaaagaatgtgtaaaaccctgcccagagctcccctagggctaagctataagggattgtccttctccctaaaatgctcatttggcccaggctgaggtctgtgactccagttggctacacagtgccagaaaggaatctgtcatctcaggaaagcccctcaaagatggcgaggcatatttgatgactgtggttacagggcaagaggccaccctgcagcccccacccctgacttgctggaacttgtgactgtcaaagctccattaataaattacatgcacctgg

SEQ ID NO: 179069 - DNA, 2654 bp, Homo sapiens
  Payload ID: 15295
  Gene Symbol: SLFNL1
  Gene Name: schlafen-like 1
  Uniprot ID: Q499Z3
  ENST ID: ENST00000372613
  CDS Start-End: 1066-2145
aagcctccaagttccctgagagctaccggccaggggtcgggaggctatgggagctcagggcaggcacctcccatgctcccgcgggagccaccaggacatgaaggtcataggcctctcctctcctcctcttcctgtttgacctgaatgcccccaggccaactgcctcaaggattccatttgagaagatgcaggctgggtgtgtggggagcagtagaggggctggtgtgtgcacatatgtgcacagctcaggacagaggctccctggacttggggcgggggcactagggccccaactctaaccctcgttctgccctgttgacctctgctctctggaccaaaaatggaggactcagtctagactagttcttagggtctaggagccaccttaagttatgtttatatgcaaaggccatttttctgagaggccatagctttcatcagtgtgccaaaaagcgtgagatcctctgctctaaaagcctctgccccagcgctgcctagtttcagagcccccgatggcctcacatggggttttagagcaggcagagaagctgcaatggggccaccagccagtcctcagagtcctgggttaaggcctcctctccaggaggccctgtgtaaaggttttctctgttgcctggaggcaggagtgaactggtaggcaggaaaccctgagggtacctaggaggcccctagcctgtgggttggggagggaagacaggacccctggggccactgaaatggtggagctctcagagacctgagttctggtcccttctgccactttttgggcagatcccgtcttcccacaggccctgtgtcttgctcagtccacgtgactctgctttctcatcctaggcctcaggtgggtggcaggccctttcctgcttgccctctgccctccctctctctggccctgcccagtctctgccaatctgtgtacctcccaggagccgggacactccctgagtcctctgggagcccttaagccacactgagaacacagaccctgggagaagcagccagcagtgaggaatcctggaaccccttcccagggagagccttcccatgacccccatgaagagatcagtgcaaacacaggtgtcagagcccttcatggagtcctggggtgaggagtccctgccggagctacccgcagagcagtccctgacggagtactctgacctcgaggaggctccctcggcgcacactctctatgtgggccatctgaacccccagttctcagtgccggtgcttgcctgcctgctgcgagacaccctggagcggctggagatgccggtggcgcgggagcacattgaagtggtgaggcggccgcggaaggcctatgcactggtgcaggtgactgtccacagggacaccctggcctccctcccctggcgcctgcagacggccctggaggagcacctaatcctcaaggagctggcagcccgtgggaaggacctgctattgagtgaggcccaagggcccttcagccacagagaggagaaggaggaggaggaggaggacagtggcctgagccctggccccagtccaggctctggtgtcccgctgcccacctggcctacacacacgctgcctgataggccccaggcccagcagctgcagagctgccagggccggcccagcggcgtgtgctccgacagtgccattgtgcaccagcagatcgtgggcaaggaccagctcttccagggtgccttcctgggcagcgagacccgcaatatggagttcaagcggggtagcggcgagtacctcagcctggccttcaagcaccacgtgcggcgctacgtgtgcgccttcctcaacagcgagggcggcagcctgctcgtgggagtagaggacagcggcctggtgcagggcatccgctgcagccaccgtgacgaggaccgcgcacgcctgctggtggactccatcctgcagggcttcaagcctcagatctttcccgatgcctacactctcaccttcatccctgtgatcagtacctcggagaccagcgtccccctcaagaggtggctggtggagctgggcaagctggaagagaagatgaaggcgctgatgatggagaaggagcagctccagcagcagctgcagcagcacgggcctgtgtcctgcacctgctgtgtcctgtgagggccctggggagcaggcaggacggcacggcactctccacctgagacccagggatttcctgtttgagtgtaaggccaaccagtaaagcccatgcgggctgctgagaggcggacagggactccttcaacatggcacatgagcaggcacccatgtggcttcaaccctgacagacccatctgtgtagccaagaaactgctctcagccctgtccccaaatgaccttactttcagaaagaatgtgtaaaaccctgcccagagctcccctagggctaagctataagggattgtccttctccctaaaatgctcatttggcccaggctgaggtctgtgactccagttggctacacagtgccagaaaggaatctgtcatctcaggaaagcccctcaaagatggcgaggcatatttgatgactgtggttacagggcaagaggccaccctgcagcccccacccctgacttgctggaacttgtgactgtcaaagctccattaataaattacatgcacctgg

SEQ ID NO: 179070 - DNA, 2117 bp, Homo sapiens
  Payload ID: 15295
  Gene Symbol: SLFNL1
  Gene Name: schlafen-like 1
  Uniprot ID: Q499Z3
  ENST ID: ENST00000439569
  CDS Start-End: 385-1608
aagcctccaagttccctgagagctaccggccaggggtcgggaggctatgggagctcagggcaggcacctcccatgctcccgcgggagccaccaggacatgaaggtcataggcctctcctctcctcctcttcctgtttgacctgaatgcccccaggccaactgcctcaaggattccatttgagaagatgcaggctggatcccgtcttcccacaggccctgtgtcttgctcagtccacgtgactctgctttctcatcctaggcctcaggagccgggacactccctgagtcctctgggagcccttaagccacactgagaacacagaccctgggagaagcagccagcagtgaggaatcctggaaccccttcccagggagagccttcccatgacccccatgaagagatcagtgcaaacacaggtgtcagagcccttcatggagtcctggggtgaggagtccctgccggagctacccgcagagcagtccctgacggagtactctgacctcgaggaggctccctcggcgcacactctctatgtgggccatctgaacccccagttctcagtgccggtgcttgcctgcctgctgcgagacaccctggagcggctggagatgccggtggcgcgggagcacattgaagtggtgaggcggccgcggaaggcctatgcactggtgcaggtgactgtccacagggacaccctggcctccctcccctggcgcctgcagacggccctggaggagcacctaatcctcaaggagctggcagcccgtgggaaggacctgctattgagtgaggcccaagggcccttcagccacagagaggagaaggaggaggaggaggaggacagtggcctgagccctggccccagtccaggctctggtgtcccgctgcccacctggcctacacacacgctgcctgataggccccaggcccagcagctgcagagctgccagggccggcccagcggcgtgtgctccgacagtgccattgtgcaccagcagatcgtgggcaaggaccagctcttccagggtgccttcctgggcagcgagacccgcaatatggagttcaagcggggtagcggcgagtacctcagcctggccttcaagcaccacgtgcggcgctacgtgtgcgccttcctcaacagcgagggcggcagcctgctcgtgggagtagaggacagcggcctggtgcagggcatccgctgcagccaccgtgacgaggaccgcgcacgcctgctggtggactccatcctgcagggcttcaagcctcagatctttcccgatgcctacactctcaccttcatccctgtgatcagtacctcggagaccagcgtccccctcaaggtgatccgcctgaccgtgcacacccccaaggcccagagccagccgcaactctaccagacagaccagggggaggtgtttctgcggcgcgacgggagcatccagggcccgctgtctgccagcgccatccaggagtggtgcaggcagaggtggctggtggagctgggcaagctggaagagaagatgaaggcgctgatgatggagaaggagcagctccagcagcagctgcagcagcacgggcctgtgtcctgcacctgctgtgtcctgtgagggccctggggagcaggcaggacggcacggcactctccacctgagacccagggatttcctgtttgagtgtaaggccaaccagtaaagcccatgcgggctgctgagaggcggacagggactccttcaacatggcacatgagcaggcacccatgtggcttcaaccctgacagacccatctgtgtagccaagaaactgctctcagccctgtccccaaatgaccttactttcagaaagaatgtgtaaaaccctgcccagagctcccctagggctaagctataagggattgtccttctccctaaaatgctcatttggcccaggctgaggtctgtgactccagttggctacacagtgccagaaaggaatctgtcatctcaggaaagcccctcaaagatggcgaggcatatttgatgactgtggttacagggcaagaggccaccctgcagcccccacccctgacttgctggaacttgtgactgtcaaagctccattaataaattacatgcacctgg

SEQ ID NO: 179071 - DNA, 1645 bp, Homo sapiens
  Payload ID: 15296
  Gene Symbol: SCHIP1
  Gene Name: schwannomin interacting protein 1
  Uniprot ID: Q9P0W5
  ENST ID: ENST00000445224
  CDS Start-End: 325-1059
ttttctttgtgcctataatataattggctgattgtgcgggtgatgagcgccccctcccccagcccggtcccagctccatgttcctaagcctgcctcactggtttcggagggctggagagcagctcagctcgctagctgcgcgcttcccggcacaggcagtgccactgcgcaggttgatcagcgaaacagcatccattttaatctgcggggagcccctgccttaccagggcgttctctccgcccgccggtggatgctccgcgcctgccctccgcagcctcgctcagcagtcctgcgttggggtctgcgccctaggatgcactgagatggtacatcaggataactgctcgtatcaggcacagaaaaatgagagagagtctatcagacagaagttggcacttggaagcttctttgatgatggcccaggaatttataccagctgtagcaaaagtgggaagccaagcctttcctcccgactgcagagtgggatgaacttgcagatatgctttgtcaacgacagtggcagtgataaggacagtgatgctgatgacagtaagactgaaaccagcttggacacccccttgtctcccatgagcaaacagagttcttcctattctgatagagacactactgaagaggagtctgaatccttggatgacatggacttccttacaaggcaaaagaaattgcaagctgaagccaaaatggcccttgccatggccaaaccaatggccaaaatgcaagtagaagtggagaaacagaacaggaaaaagtctcccgtcgctgatcttctgccacacatgcctcatataagtgaatgcttgatgaaaagaagtttaaaacccaccgacctgagagacatgactattgggcagctacaagtgatagtcaatgatctccattcccagatagaaagcttgaatgaagagttggtccagctgcttctcatccgagatgagctgcacacagagcaggatgccatgctggtggacattgaagacttgaccagacatgctgaaagtcagcagaagcacatggcagagaaaatgcctgcaaagtgaaaagaagccattcaaccagagaacaagctagaatttattttgcttctgtggttgtaaaaatgctgttgctaaaggtggcgcagaaacaaatatcagtgttagtcattgataatgtctgaagcttaatgtccagtgattggcctttgcttcttaatttattttaattttttacttgtgccacttaatatcaggcattttaataaaatattgttacaaaaaatgtacagtactgacaccaccacaaatcatggttaataaaagagagtagttttaactttatttttatttgtttagagattttaagttggaacagtattttcccattgactacttttcattcttcactgtagttttaaagaagaactgtaaatgacggtgctatacaagtcaaaaaatacatgcctgcctcgtagtgaagttgtagctctccgtaatatgtatattttactcagttttcaacattttgtgaatgttgactacctgaagttcctttttagatgtgctattaacattctgttggattcagagggttccttgaaagttttatgtataaatatgtaaaataaaaattaaaactttgtttcat

SEQ ID NO: 179072 - DNA, 1799 bp, Homo sapiens
  Payload ID: 15296
  Gene Symbol: SCHIP1
  Gene Name: schwannomin interacting protein 1
  ENST ID: ENST00000482804
  CDS Start-End: 442-1224
agattgctagtttcctcacagagctccagtccacactcggccctgaacgcggagttgaatcagctggctgaagctgagtgcctctcttttcctttcttgggaacaggaaaggtgctgtggagaggaattggggcgggatcattcaggggaaggtgacagcagatggtgggaaggccggagtcagcaagccaagtgtcaggggcagagtgagcctcagaaaacagcagctgcccggtgccagagcaaggaaaggccagggaggctgggcggggcagtgtctgtgggacagagtggggcaagaacacacacggccgggcacagcctcttagccagctctccatgtcagtatgagcagtaaccagggaactgggcaattggcacatcagcctatcagaattcatgggaggttatttcttaagtgaaattctaaagagttaaaggatgaatttggacagtgatggaatggatgacatcatcagtcaagaatcctcattggatatggaggggaattataaaaaggcacagaaaaatgagagagagtctatcagacagaagttggcacttggaagcttctttgatgatggcccaggaatttataccagctgtagcaaaagtgggaagccaagcctttcctcccgactgcagagtgggatgaacttgcagatatgctttgtcaacgacagtggcagtgataaggacagtgatgctgatgacagtaagactgaaaccagcttggacacccccttgtctcccatgagcaaacagagttcttcctattctgatagagacactactgaagaggagtctgaatccttggatgacatggacttccttacaaggcaaaagaaattgcaagctgaagccaaaatggcccttgccatggccaaaccaatggccaaaatgcaagtagaagtggagaaacagaacaggaaaaagtctcccgtcgctgatcttctgccacacatgcctcatataagtgaatgcttgatgaaaagaagtttaaaacccaccgacctgagagacatgactattgggcagctacaagtgatagtcaatgatctccattcccagatagaaagcttgaatgaagagttggtccagctgcttctcatccgagatgagctgcacacagagcaggatgccatgctggtggacattgaagacttgaccagacatgctgaaagtcagcagaagcacatggcagagaaaatgcctgcaaagtgaaaagaagccattcaaccagagaacaagctagaatttattttgcttctgtggttgtaaaaatgctgttgctaaaggtggcgcagaaacaaatatcagtgttagtcattgataatgtctgaagcttaatgtccagtgattggcctttgcttcttaatttattttaattttttacttgtgccacttaatatcaggcattttaataaaatattgttacaaaaaatgtacagtactgacaccaccacaaatcatggttaataaaagagagtagttttaactttatttttatttgtttagagattttaagttggaacagtattttcccattgactacttttcattcttcactgtagttttaaagaagaactgtaaatgacggtgctatacaagtcaaaaaatacatgcctgcctcgtagtgaagttgtagctctccgtaatatgtatattttactcagttttcaacattttgtgaatgttgactacctgaagttcctttttagatgtgctattaacattctgttggattcagagggttccttgaaagttttatgtataaatatgtaaaataaaaattaaaa

SEQ ID NO: 179073 - DNA, 1000 bp, Homo sapiens
  Payload ID: 15296
  Gene Symbol: SCHIP1
  Gene Name: schwannomin interacting protein 1
  ENST ID: ENST00000495954
  CDS Start-End: 246-404
gttcctaagcctgcctcactggtttcggagggctggagagcagctcagctcgctagctgcgcgcttcccggcacaggcagtgccactgcgcaggttgatcagcgaaacagcatccattttaatctgcggggagcccctgccttaccagggcgttctctccgcccgccggtggatgctccgcgcctgccctccgcagcctcgctcagcagtcctgcgttggggtctgcgccctaggatgcactgagatggtacatcaggataactgctcgtatcaggcacagaaaaatgagagagagtctatcagacagaagttggcacttggaagcttctttgatgatggcccaggaatttataccagctgtagcaaaagtgggaagccaagcctttcctcccggcttgaatgaagagttggtccagctgcttctcatccgagatgagctgcacacagagcaggatgccatgctggtggacattgaagacttgaccagacatgctgaaagtcagcagaagcacatggcagagaaaatgcctgcaaagtgaaaagaagccattcaaccagagaacaagctagaatttattttgcttctgtggttgtaaaaatgctgttgctaaaggtggcgcagaaacaaatatcagtgttagtcattgataatgtctgaagcttaatgtccagtgattggcctttgcttcttaatttattttaattttttacttgtgccacttaatatcaggcattttaataaaatattgttacaaaaaatgtacagtactgacaccaccacaaatcatggttaataaaagagagtagttttaactttatttttatttgtttagagattttaagttggaacagtattttcccattgactacttttcattcttcactgtagttttaaagaagaactgtaaatgacggtgctatacaagtcaaaaaatacatgcctgcctcgtagtgaagttgtagctctccgtaatatgtatattttactcagttttcaac

SEQ ID NO: 179074 - DNA, 2386 bp, Homo sapiens
  Payload ID: 15297
  Gene Symbol: SCEL
  Gene Name: sciellin
  Uniprot ID: O95171
  ENST ID: ENST00000349847
  CDS Start-End: 85-2151
agatcctcccagggaatcactacaggctggttagccaaaaagtcctgattttctgctcaatagaggtccttactggaaggcagcatgtccaatgttaccttgagaaaaatgtctcccacaggaaatgagatgaagagcaccactcagggaaccacacggaagcagcaggattttcacgaggtgaacaaaagaagaactttcttacaggataacagttggataaagaaacgccctgaagaagaaaaagatgaaaattacggtagggtggtgctcaaccgacataattcccatgatgcattggacaggaaagtaaatgagagagatgtgccaaaagctacaattagtcggtacagttctgatgacactttggacaggatctcagacagaaatgatgctgctaaaacatataaggccaataccttggataaccaactaaccaataggagcatgtccatgtttagatcactggaagtaacaaagttgcaacctggcggttcattgaatgccaacacctccaacaccatagcatccacttctgctactactcctgtaaagaagaagaggcagtcctggtttccaccgccccctccaggttacaatgcctcctcgagcacaggaaccaggagacgggaaccaggtgttcaccctccaatacctccaaagcccagttctcctgtttcttctcctaaccagctgagacaggataataggcagatacatccacctaaaccaggtgtatatacagaaaccaacagatctgctgaaagaaatataaggagtcaggatcttgataacatcgtcaaagtggccacttcacttcagagaagtgacaaaggtgaagaattggataatctcatcaaaatgaacaaaagcttgaataggaatcaaggtcttgatagtctcttcagagcaaatccaaaggtagaagaaagagagaaaagagccaaaagccttgaaagtctcatctatatgagtacccggacagataaagatggcaaaggaatccaaagccttggaagtccgattaaagttaatcaaaggactgacaaaaatgagaaaggaagacaaaatctcgaatctgttgctaaagtgaatgccaggatgaataaaacgagcagaagaagtgaagaccttgataatgctactgaagtaaatcccaaaggacatgaaaataccactggaaaaaaagaccttgatgggcttattaaagtggatcctgaaacaaataaaaatattacgaggggccagagccttgataatctcatcaaagtgacccctgaagtaaagagaagtaaccaaggttccaaagaccttaataacttcatcaaagtgtatccaggaacagaaaaaagtactgaagggggccaaagtctcgacagcctcattaaagtgactcctgaaagaaacagaactaaccaagggaaccaagacttggaaaatcttatcaaagtgatcccttcagcaaacaaaagcagtgaacaaggtcttgatgaacatattaatgtcagccccaaagctgtcaaaaacactgatggaaaacaagatcttgataaactcatcaaggtgaatcctgaaattttcacaaacaaccaaagaaaccaagatcttgctaacctcatcaaagtaaatcctgcagtaatcagaaacaatcagagccaagacttggacaatcttattaaagtgaaaccttcagctcttagaaacactaatcgagaccagaacctggaaaatttaattgaagtaaattctcatgtgtctgaaaacaagaatggaagctctaacactggagccaagcaggcaggaccacaggatactgttgtgtacacaaggacatatgtggagaatagtaaatcacccaaggatggatatcaggagaatatctctggaaaatacatacaaactgtttattcaacttctgataggtctgtcattgaaagagatatgtgcacttactgccgaaaacccttgggtgtagaaactaaaatgattttagatgaattacaaatttgctgccattctacttgctttaagtgtgaaatatgcaagcagcctttggaaaatctacaagcgggtgatagtatttggatttatagacagacaatacactgtgaaccttgctactctaaaattatggcaaagtggattccataactctggcacaaggaaatcaagatgaaaagcactcattaaggaattaaagttacaagttttatcttaataatatgtaatctagaaaagctttcacattgaagatcaactcttgtacaaaattaacaattctgttattgcataagtaatctaattgtcttcaataaggtcacacacataaaaagagccatctggtctctggctagagttagcaataaaaagttcaaatggttccaga

SEQ ID NO: 179075 - DNA, 3081 bp, Homo sapiens
  Payload ID: 15297
  Gene Symbol: SCEL
  Gene Name: sciellin
  Uniprot ID: O95171
  ENST ID: ENST00000377246
  CDS Start-End: 86-2092
cagatcctcccagggaatcactacaggctggttagccaaaaagtcctgattttctgctcaatagaggtccttactggaaggcagcatgtccaatgttaccttgagaaaaatgtctcccacaggaaatgagatgaagagcaccactcagggaaccacacggaagcagcaggattttcacgaggtgaacaaaagaagaactttcttacaggataacagttggataaagaaacgccctgaagaagaaaaagatgaaaattacggtagggtggtgctcaaccgacataattcccatgatgcattggacaggaaagtaaatgagagagatgtgccaaaagctacaattagtcggtacagttctgatgacactttggacaggatctcagacagaaatgatgctgctaaaacatataaggccaataccttggataaccaactaaccaataggagcatgtccatgtttagatcactggaagtaacaaagttgcaacctggcggttcattgaatgccaacacctccaacaccatagcatccacttctgctactactcctgtaaagaagaagaggcagtcctggtttccaccgccccctccaggttacaatgcctcctcgagcacaggaaccaggagacgggaaccaggtgttcaccctccaatacctccaaagcccagttctcctgtttcttctcctaaccagctgagacaggataataggcagatacatccacctaaaccaggtgtatatacagaaaccaacagatctgctgaaagaaatataagtgaagaattggataatctcatcaaaatgaacaaaagcttgaataggaatcaaggtcttgatagtctcttcagagcaaatccaaaggtagaagaaagagagaaaagagccaaaagccttgaaagtctcatctatatgagtacccggacagataaagatggcaaaggaatccaaagccttggaagtccgattaaagttaatcaaaggactgacaaaaatgagaaaggaagacaaaatctcgaatctgttgctaaagtgaatgccaggatgaataaaacgagcagaagaagtgaagaccttgataatgctactgaagtaaatcccaaaggacatgaaaataccactggaaaaaaagaccttgatgggcttattaaagtggatcctgaaacaaataaaaatattacgaggggccagagccttgataatctcatcaaagtgacccctgaagtaaagagaagtaaccaaggttccaaagaccttaataacttcatcaaagtgtatccaggaacagaaaaaagtactgaagggggccaaagtctcgacagcctcattaaagtgactcctgaaagaaacagaactaaccaagggaaccaagacttggaaaatcttatcaaagtgatcccttcagcaaacaaaagcagtgaacaaggtcttgatgaacatattaatgtcagccccaaagctgtcaaaaacactgatggaaaacaagatcttgataaactcatcaaggtgaatcctgaaattttcacaaacaaccaaagaaaccaagatcttgctaacctcatcaaagtaaatcctgcagtaatcagaaacaatcagagccaagacttggacaatcttattaaagtgaaaccttcagctcttagaaacactaatcgagaccagaacctggaaaatttaattgaagtaaattctcatgtgtctgaaaacaagaatggaagctctaacactggagccaagcaggcaggaccacaggatactgttgtgtacacaaggacatatgtggagaatagtaaatcacccaaggatggatatcaggagaatatctctggaaaatacatacaaactgtttattcaacttctgataggtctgtcattgaaagagatatgtgcacttactgccgaaaacccttgggtgtagaaactaaaatgattttagatgaattacaaatttgctgccattctacttgctttaagtgtgaaatatgcaagcagcctttggaaaatctacaagcgggtgatagtatttggatttatagacagacaatacactgtgaaccttgctactctaaaattatggcaaagtggattccataactctggcacaaggaaatcaagatgaaaagcactcattaaggaattaaagttacaagttttatcttaataatatgtaatctagaaaagctttcacattgaagatcaactcttgtacaaaattaacaattctgttattgcataagtaatctaattgtcttcaataaggtcacacacataaaaagagccatctggtctctggctagagttagcaataaaaagttcaaatggttccagattccagtgtcaaaggagtgatgcattacactccagccaggtccatccctgctccgtatgttggctgtgagtggtggtttccatttaaaccaagtttctcatttcttcacctttttttctctaagaatttggattcgtagacattgacatcccgaagaactgtcaaggaagcaagatatgctttcttcatctgcaaaagaaatactaacaacaattttcttatacagtttggcagaaagatgttaacataaaaagtttatatacctcaaaaatcactaaactttccagatctctgtcctattatttgtaacacaaggggcattggataaaatgatttctagggttccttttgcttcccaaattctctgattctaaagcagtttttagaatcattagctctttggaaacatatatgcatacatgtttgttaagcctattgaactaggtaggacatataaacaatttaattttagtgtcattgtttaatcacagacttagtgtttgaaaactgtgttttaaaaacagaaacagattgatgggtaacaggtaaaatatgacatgtatagcttacatgttattatttgttaaattttctttgtatacatttcaaaatctgggtatacttataatccattagaagtaatggttatggactaaaaagatatgttctttagtatgttatatatactcatattacatagcagtatgtttacaaaaggcttataaaaataaaatgaactatcagttacatagaa

SEQ ID NO: 179076 - DNA, 2269 bp, Homo sapiens
  Payload ID: 15297
  Gene Symbol: SCEL
  Gene Name: sciellin
  ENST ID: ENST00000471491
  CDS Start-End: 121-972
cactgaataaactctaggttcccatttctttcagccagatcctcccagggaatcactacaggctggttagccaaaaagtcctgattttctgctcaatagaggtccttactggaaggcagcatgtccaatgttaccttgagaaaaatgtctcccacaggaaatgagatgaagagcaccactcagggaaccacacggaagcagcaggattttcacgaggtgaacaaaagaagaactttcttacaggataacagttggataaagaaacgccctgaagaagaaaaagatgaaaattacggtagggtggtgctcaaccgacataattcccatgatgcattggacaggaaagtaaatgagagagatgtgccaaaagctacaattagtcggtacagttctgatgacactttggacaggagcatgtccatgtttagatcactggaagtaacaaagttgcaacctggcggttcattgaatgccaacacctccaacaccatagcatccacttctgctactactcctgtaaagaagaagaggcagtcctggtttccaccgccccctccaggttacaatgcctcctcgagcacaggaaccaggagacgggaaccaggtgttcaccctccaatacctccaaagcccagttctcctgtttcttctcctaaccagctgagacaggataataggcagatacatccacctaaaccaggtgtatatacagaaaccaacagatctgctgaaagaaatataagtgaagaattggataatctcatcaaaatgaacaaaagcttgaataggaatcaaggtcttgatagtctcttcagagcaaatccaaaggtagaagaaagagagaaaagagccaaaagccttgaaagtctcatctatatgagtacccggacagataaagatggcaaaggaatccaaagccttggaagtccgattaaagttaatcaaaggactgacaaaaatgagaaagggtaagtcaatctcctaccttgatggagctctttttattcaggttagcttttttacctcattaggaatgggagtgttatgctttcctttgtggcagtgaactcttgtactgctttgacccatcagacctagtaggcaaaaggaatatgttgagtgctgtttcataggacctctgatttgagttacattgaagtaggtgcaggaaaacctgctacataatctcttattccgtattttcttaaataattaagagatgagtcaaattttaatttaaattaagaaatataaaggacaaaattgcacagcgagagccacattgagaagcctttctaaactgatttagacacatttaaatgaaatgctattgtggaaattactaaaggtaagttaaggataattacatcaaagctctttttggtcatttggtcctgaaaacacctgacaccacattcagggacattcttgattatacagatttcagagaaaattgtactgtaacctaactgacaagttttggtgttttttccaaagaagacaaaatctcgaatctgttgctaaagtgaatgccaggatgaataaaacgagcagaaggtgagaactgaacagatgtctctaaatattggttattttctctcatattaattatgtgatattgagggcaccacatctttgtttggcttctctcttctgtgtctaatccctggtgccctgatcttcacttcaaagaatctacagtatattcgatctaaatttacatttacatatagcccaataaaatcctaaggattaattaaactatgttattgattggcaatttttatacttaaagccaatttaatgtcagtataataattttctccaaaagcttgaattaatcattgggaatacagaagatgtatgtgtctaatattatgggaatgttttgaaactgatataaacttttttttttaaagaagtgaagaccttgataatgctactgaagtaaatcccaaaggacatgaaaataccactggaaaaaaagaccttgatgggcttattaaagtggatcctgaaacaaataaaaatattacgaggggccagagccttgataatctcatcaaagtgacccctgaagtaaagagaagtaaccaaggttccaaagaccttaataacttcatcaaagtgtatccaggaacagaaaaaagtactgaagggggccaaagtctcgacagcctcattaaagtgactcctgaaagaaacagaactaaccaagggaaccaagacttggaaaatcttatcaaagtgatcccttcagcaaacaaaa

SEQ ID NO: 179077 - DNA, 3096 bp, Homo sapiens
  Payload ID: 15297
  Gene Symbol: SCEL
  Gene Name: sciellin
  Uniprot ID: O95171
  ENST ID: ENST00000535157
  CDS Start-End: 171-2111
aagaaacctctgaactgttcactaatacagtcaggtagaggttgagactccactgaataaactctaggttcccatttctttcagccagatcctcccagggaatcactacaggctggttagccaaaaagtcctgattttctgctcaatagaggtccttactggaaggcagcatgtccaatgttaccttgagaaaaatgtctcccacaggaaatgagatgaagagcaccactcagggaaccacacggaagcagcaggattttcacgaggtgaacaaaagaagaactttcttacaggataacagttggataaagaaacgccctgaagaagaaaaagatgaaaattacggtagggtggtgctcaaccgacataattcccatgatgcattggacaggaaagtaaatgagagagatgtgccaaaagctacaattagtcggtacagttctgatgacactttggacaggatctcagacagaaatgatgctgctaaaacatataaggccaataccttggataaccaactaaccaataggagcatgtccatgtttagatcactggaagtaacaaagttgcaacctggcggttcattgaatgccaacacctccaacaccatagcatccacttctgctactactcctgtaaagaagaagagggaaccaggtgttcaccctccaatacctccaaagcccagttctcctgtttcttctcctaaccagctgagacaggataataggcagatacatccacctaaaccaggtgtatatacagaaaccaacagatctgctgaaagaaatataaggagtcaggatcttgataacatcgtcaaagtggccacttcacttcagagaagtgacaaaggtgaagaattggataatctcatcaaaatgaacaaaagcttgaataggaatcaaggtcttgatagtctcttcagagcaaatccaaaggtagaagaaagagagaaaagagccaaaagccttgaaagtctcatctatatgagtacccggacagataaagatggcaaaggaatccaaagccttggaagtccgattaaagttaatcaaaggactgacaaaaatgagaaaggaagacaaaatctcgaatctgttgctaaagtgaatgccaggatgaataaaacgagcagaagaagtgaagaccttgataatgctactgaagtaaatcccaaaggacatgaaaataccactgggggccagagccttgataatctcatcaaagtgacccctgaagtaaagagaagtaaccaaggttccaaagaccttaataacttcatcaaagtgtatccaggaacagaaaaaagtactgaagggggccaaagtctcgacagcctcattaaagtgactcctgaaagaaacagaactaaccaagggaaccaagacttggaaaatcttatcaaagtgatcccttcagcaaacaaaagcagtgaacaaggtcttgatgaacatattaatgtcagccccaaagctgtcaaaaacactgatggaaaacaagatcttgataaactcatcaaggtgaatcctgaaattttcacaaacaaccaaagaaaccaagatcttgctaacctcatcaaagtaaatcctgcagtaatcagaaacaatcagagccaagacttggacaatcttattaaagtgaaaccttcagctcttagaaacactaatcgagaccagaacctggaaaatttaattgaagtaaattctcatgtgtctgaaaacaagaatggaagctctaacactggagccaagcaggcaggaccacaggatactgttgtgtacacaaggacatatgtggagaatagtaaatcacccaaggatggatatcaggagaatatctctggaaaatacatacaaactgtttattcaacttctgataggtctgtcattgaaagagatatgtgcacttactgccgaaaacccttgggtgtagaaactaaaatgattttagatgaattacaaatttgctgccattctacttgctttaagtgtgaaatatgcaagcagcctttggaaaatctacaagcgggtgatagtatttggatttatagacagacaatacactgtgaaccttgctactctaaaattatggcaaagtggattccataactctggcacaaggaaatcaagatgaaaagcactcattaaggaattaaagttacaagttttatcttaataatatgtaatctagaaaagctttcacattgaagatcaactcttgtacaaaattaacaattctgttattgcataagtaatctaattgtcttcaataaggtcacacacataaaaagagccatctggtctctggctagagttagcaataaaaagttcaaatggttccagattccagtgtcaaaggagtgatgcattacactccagccaggtccatccctgctccgtatgttggctgtgagtggtggtttccatttaaaccaagtttctcatttcttcacctttttttctctaagaatttggattcgtagacattgacatcccgaagaactgtcaaggaagcaagatatgctttcttcatctgcaaaagaaatactaacaacaattttcttatacagtttggcagaaagatgttaacataaaaagtttatatacctcaaaaatcactaaactttccagatctctgtcctattatttgtaacacaaggggcattggataaaatgatttctagggttccttttgcttcccaaattctctgattctaaagcagtttttagaatcattagctctttggaaacatatatgcatacatgtttgttaagcctattgaactaggtaggacatataaacaatttaattttagtgtcattgtttaatcacagacttagtgtttgaaaactgtgttttaaaaacagaaacagattgatgggtaacaggtaaaatatgacatgtatagcttacatgttattatttgttaaattttctttgtatacatttcaaaatctgggtatacttataatccattagaagtaatggttatggactaaaaagatatgttctttagtatgttatatatactcatattacatagcagtatgtttacaaaaggcttataaaaataaaatgaactatcagttacat

SEQ ID NO: 179078 - DNA, 9713 bp, Homo sapiens
  Payload ID: 15298
  Gene Symbol: SCIN
  Gene Name: scinderin
  Uniprot ID: Q9Y6U3
  ENST ID: ENST00000297029
  CDS Start-End: 102-2249
aacactataaagtggcggcgaataaggttcctcctgctgctctcggtttagtccaagatcagcgatatcacgcgtcccccggagcatcgcgtgcaggagccatggcgcgggagctataccacgaagagttcgcccgggcgggcaagcaggcggggctgcaggtctggaggattgagaagctggagctggtgcccgtgccccagagcgctcacggcgacttctacgtcggggatgcctacctggtgctgcacacggccaagacgagccgaggcttcacctaccacctgcacttctggctcggaaaggagtgttcccaggatgaaagcacagctgctgccatcttcactgttcagatggatgactatttgggtggcaagccagtgcagaatagagaacttcaaggatatgagtctaatgactttgttagctatttcaaaggcggtctgaaatacaaggctggaggcgtggcatctggattaaatcatgttcttacgaacgacctgacagccaagaggctcctacatgtgaagggtcgtagagtggtgagagccacagaagttccccttagctgggacagtttcaacaagggtgactgcttcatcattgaccttggcaccgaaatttatcagtggtgtggttcctcgtgcaacaaatatgaacgtctgaaggcaaaccaggtagctactggcattcggtacaatgaaaggaaaggaaggtctgaactaattgtcgtggaagaaggaagtgaaccctcagaacttataaaggtcttaggggaaaagccagagcttccagatggaggtgatgatgatgacattatagcagacataagtaacaggaaaatggctaaactatacatggtttcagatgcaagtggctccatgagagtgactgtggtggcagaagaaaaccccttctcaatggcaatgctgctgtctgaagaatgctttattttggaccacggggctgccaaacaaattttcgtatggaaaggtaaagatgctaatccccaagagaggaaggctgcaatgaagacagctgaagaatttctacagcaaatgaattattccaagaatacccaaattcaagttcttccagaaggaggtgaaacaccaatcttcaaacagttttttaaggactggagagataaagatcagagtgatggcttcgggaaagtttatgtcacagagaaagtggctcaaataaaacaaattccctttgatgcctcaaaattacacagttctccgcagatggcagcccagcacaatatggtggatgatggttctggcaaagtggagatttggcgtgtagaaaacaatggtaggatccaagttgaccaaaactcatatggtgaattctatggtggtgactgctacatcatactctacacctatcccagaggacagattatctacacgtggcaaggagcaaatgccacacgagatgagctgacaacatctgcgttcctgactgttcagttggatcggtcccttggaggacaggctgtgcagatccgagtctcccaaggcaaagagcctgttcacctactgagtttgttcaaagacaaaccgctcattatttacaagaatggaacatcaaagaaaggaggtcaggcacctgctccccctacacgcctctttcaagtccggagaaacctggcatctatcaccagaattgtggaggttgatgttgatgcaaattcactgaattctaacgatgtttttgtcctgaaactgccacaaaatagtggctacatctgggtaggaaaaggtgctagccaggaggaggagaaaggagcagagtatgtagcaagtgtcctaaagtgcaaaaccttaaggatccaagaaggcgaggagccagaggagttctggaattcccttggagggaaaaaagactaccagacctcaccactactggaaacccaggctgaagaccatccacctcggctttacggctgctctaacaaaactggaagatttgttattgaagagattccaggagagttcacccaggatgatttagctgaagatgatgtcatgttactagatgcttgggaacagatatttatttggattggcaaagatgctaatgaagttgagaaaaaagaatctctgaagtctgccaaaatgtaccttgagacagacccttctggaagagacaagaggacaccaattgtcatcataaaacagggccatgagccacccacattcacaggctggttcctgggctgggattccagcaagtggtaaattggtatttgtaaaaagcaaacaaacattacaaggcagttatctcattgctgttttgggagaggaacgggaaaagctttttgcttatttgtcttttgaaaattaaggctgggcgcggtggctcacacctgtaatcccagcactttgagaggatgaggtaggcggatcactggggtcaggatttcgagaccagcctggccaacatggcgaaacctcgcctctactaaaaatacaaaaaaattagctgcgcgtggtggtgcacgcctgtagtccctgctacttggaaggctgagacaggaaaattgcttgaacccaggaggctgaggttgcagtgagccaggattgcgccaccacactccagcctgggcaacagagactctgtctcaaaaaaaaaaaaaaaaaaaattaacctcaaccaaacgcctattttttaatgcttagttttggcttgaaattcttcttcacctggagttttcttacgttaatacattaaaataacctgaaggaaactttcgttatgggccaatattagctcttatggaaactgatttatatcttttttatgacctttcaaaagtaaaatactatgcataatctagaaagatttgtcagataggaaattttataatgcattagccattagtcagagttgttttttaacatgccagagaaaaagttgtaatgccttggaagttattctcttttctatagattgtgttcaaaagatgtgtatacttgcaataaggtttatgttaaggtggctttaacaattggttgctattttccttctttagtcaatatgactttgatgtcattaactgctaagtgttattttctaagaggaattttatcttttttttaaccttattaaaagcctttgaaaacacagctctttcatgacaaaatgaattgtattgttatccacttagatacatgtacatgtacagtacatgtttaatatcacaggagatcaaaaagacaatgcacaggggagtatcccagggagcagagccaagttcaagtaagttaacgatatcaagttacttactggcaggtagccactagagaatcttagcaatttttgtcctgcaagatttcagcaaagctacagaaaagtgagtttttatgttttccattcttcccttttctaagtaataatttttatcgcagttaccctgattctattccattccattctattctattctattatttcattctattttatttccaatataccattgtatatcagtatatactgatacactgagtggcagttgcattatctactaatctatataggtcattgaaaaagaagaagctacgttagaacccatggaaagaactttgcctcatgtagagattctagattcttagccaaaagctcagaattgttgggccctaaaggatgaacaatgtagggtccaacaattcatcccacatgaatttttctcatccttcatgtggaatgaaaaaactaaagagacaactgacttaccacacaaatggactatggtagaagctgctgtcccttagtattgaatatctctattttcttttaatcatagaattcactgatattttagcagataatgtggccgtccaggcaggcatgagatttctcagccttacttcaacttgattatgaccatgtgacccaattctgacatttgcctaaaggaaaatttacctaaaaaggcgttttcttgctatggcagtgtaacctgtactaataaatatagtgctagtcctgcatgcaacaaaaatgatgtaagtagacatttaacatttctaggaatgtaattgagtgaaaaataatttttaaaaatatttataaatatcttctgggtcaagctgaatattttttgaaggatgatgagaataaaatgatttaataagtagtactttttcacaaaattagtaaaggtcaaggtgagtggcttagggtacactgtattttacgatgtttctctagtttagccagtggtttttctcatctccaatttatagcacaggccgaggcatatagtagggtctcagttaatatttattgaatggcaatatcaaaaatgagatcagcagcaagatgataaggcagaataaaagttgctgagagcctaaaatgattattcagttctgttgcagggttttaacctgcccaaaggatggaaaaagaagaacataagcataatttctgaatgcatcacggcaaagatgcatgtactcatgaagcataaaattaaaaatatgatacattcactacatgaaaatatgatatacggtttttcttcagtatccgcgggagattggctcgaggaaccccatggataccaacatccttgaatgctcaagtcccttatataaaacggcatagtatttgcataaaacctataccattctcctgtatactctaagtcatctctgcgttacttataatacctaatacagtgtaaacgctgtgtaaacagttgttatactatattggttttttaatttgcattacttttgtattgttgtattattttattgtttttccccaaatagttttgatccgcagatgtagaacccacagatatgataaatcaactgtatctagtacccaaaacagatgagtaacttagaaattaatatgtaatacatacagctaatgttatagctacttaaggaattcctttcactgaaaagaaactcttacaaatcaatgagtcaacaacccaatggaaaaatggccaaaagacatgaatagaagttcacagaaaagaatgaaaatgaccagtaaataatgaaaagatgttctaagacactcttaattaaataaattcacaataaaataatcatacttttatctatctaccagattagcaaatgttaaaatattaaaatgttagtggtcatcaaaatgtagggttacaggttcacccatacactgttaatagatgtataaactggtcaaaactttttgatccatagcacagtattacttttgtaaacatacacaaaaaatattatatatttgccaaacgtatgtactaatctaaaaccaaacacattagactaggtacatgtggagaaagagatacaggtgttccctagcaagttaatatgcttgtgtctcttcaaaccaatatattggcatatttatctaatatttaatcagaagaaagaaagaacagaaagacccaggaagcctactgttagtagaggtcagcctcatcttttctctctgattcaagaaattcatactcaactcagtcaaacagaggtcctgcatttacctcttggtgccggagagccttggtgagccatttagatcctctgtatcttctcaagcacaatcctcagtgttctcttctcgtcttagatagctcatcaaataatatttcccaccacttatttctagcagttctggtaaagagaatggccttcacattgtattttgaacaatgttttggcctccagtaatgattaggaacacactataaacataaaacatcagtccacttaactcattattcagtcatcaagcaattcttgtcccaatcattctccaaagctatatactgtgaatttatactgttgtgtagtgacacaagcccttctgctgaaaaagtaggtagataattactttgaactgaaagaaaacacttattttattttcttttaaacctaatttattttaaacctaatttatttattttaaacctaatttattttaaacctaatttatttattttaaacatttattttaaacctaattcatttgaactgaacttgaatttaaaagcctacaaatgccccgcatatgtagaattatcattcattccgtgttcttgctcttggataaaacggacaactcagagaaaaaactggcttataaatgcacttcacaaaaactgttagaaaagtagccattaaacctgtaaaaaggccgggcgcagtggctgacgcctgtaatcccagcactttgaaaggccaaggcggttggatcacgaggccaggagtccgagaccagcctgaccaacatagtgaaaccccgtctctactaaaaatacaaaaaattagctgggcgtagtggcgggcgcctgtaatcctagctactcgggaggctgaggcaggagaatcgcttgaacccgggaggcggaggttggagcgaaagtacgcgccactgtactccagcctgcgtgacgatgagagtctccgtctcgggggaagaaaaaaaaaacctgtaaaaagtggctcaactttaatattcattaggaaatgactaaaatcaaatattttacttggtaatgccaagtaaaaatacaggagaggatatagtgaaactggagcttacatccactacttgggaagtataaattgatacaatgggtttgaacagtttttgtattttctactaaaatgaacatacacatatcctataatccagaaatcccactccatggtgtgtacccaacaaaaatgcatacatgtgtgtactaaaggatataatatgatttttttttttttttttttttttttgagataggttctcactctgttgcccaggctggagtacagtagcgatctctgctcactgcaatctctgcctcctgggttcaagcaatcctcccacctcagtctccccaggagctgggactctaggtgcgtgccaccacgcccagctaattctttgtagagatggggttttgccatgttgtccaggctggtcttgaactcctagactcaggaaatccacctgccttggcctcccaatatgctgggattacaggcatgagccaccgcatctggacacgaatttttaagttttatatatgtgtgtgtatatatatatatatatatatatatatatatatattttttttttttttttttttttttttgcattggcaaaaaaacaaagatattgtttagcaatttccttgtataatgcaatcagtggaagacaaatcagaggtattattttcccttgggcctttgcagcctgtgttgtttttctctttttcatattgatgtgaaaagcagccaagtattatttgacaacatcagtcccttattaagatgttatttctagtttataattgactatggcatttgcatgcatttcatcatgtctccatttcttcggaatgataatttctaatatacttttcttctattataggaataagaattcagtagtcatatttcctgttgcctataaaaaattgatgctttaatttagttaacatgacaaactccatcttatttagagagattatttttgatgttattataataaaaatgacacctttactaaaaatgtctcatcataaattgttttccattatttctgtgctgattgcaaacaatactgaattaaaatatccctgcaagttcactgtgactcaatctaaggttttaataattcatgaaataaaactaatgttgatgttatccaaatcattctaacgccaacttctaggtaaacagtaaacaagaataagcaaatttgagttttcctaattatttgacattgtcattagcttgtgatccttagatggaatatattttgccagatctcacctcccagggaactgatgagctttaactggaatagtagtgagaatgatagagcagggcccttaactccttagaaaggtcaaaggaagaggtgaatgtgggcagggtttcactggagtattgacacaccaaagatgctatgtaggtgaaaatctctcctaatgcattccctttccaacgaacctgagcctggattcttcagtaacacaatgccttctgagaaacaatgttgttccacattttagagttttggcatgcataatggagtttatggcagagttcagaggatacaatgaaacaagaaagggaggcaactgatgttgtttgattatctccattattttgaaggagccaggtgcttggggaacctggttgtacagaaaggtgatgccaagactctcttgtatgattttcctctctagcttggggctgcaccctctgctgtgggaaggagtcctcaaggtattaatatacatcctatcatttattttagatacagatagcattagagtttatcagtaaagttgggcaactcatggaatattacgagtagaaattgtaattactgtagaatgtatagtgttttgaatggctattgtatttttcagcatacaaattcagaggggtgaaagtaggcaatgacaccactatttatgttttttgttgttgttgtttgtttttgttttgttttgttttgagatggagtcttgcactgtcacccaggctggaggacagtggcatgatctctgctcactgcaacctctgcctcccgtgttcaagcgattctcctgcctcagcctcctgagtagctgggattacaggcacccgccaccacacctgactaattttttgtatttttaagtagagacggagttttgccatgttggccaggctggtcttgaactcctgaacttgtgatccaccctcctctgccttccaaagtgctgggattacaggcatgagccaccgcacccagccctatttatgttttttaaaagcaccatttaccacccatttgtctatggacttaatctatgtctctatgagctggtaaacaatagacaggtaaatacagacttggctgtatttgaacagcaccttcaaaaaccagaagccagaaatcaggtagctagatttgtccatgaaagcaggagattcccttaactggtgatgcctgaagttgggataaagagtcttccaaacatgtgccattttggcatggatatctaaagccaccatgatggctttatattaatgaaggaaataagttgcaggataagtatatccatggtcatccaggggaagaaaatggcgtacataacttatataccatatttaacccagagacagatatcacaggtaaacagtgcaaatcactgtccctagtctgagccatatttagtgtcttgaaagagccacagtggctggctaaaatggcacagtggcaaatcctgaccatggactgccctatgcaaaataactagctccccactttacacagagtacaccatgtcaggcctctgagcccaagctaagccatcatatcccctgtgacctgcacatatacatccagatggcctgaagcaattgaagatctacaaaagaagtgaaaattaccttaactgatgacattccaccattgtgatgtgtttctgccccatcctaactgatcagtgtactttgtaatctcccccacccttaagaaggttctttgtaattcttcccacccttgagaatgtactttgtgagatccaccccctgccagcaaaacattgctcctgactccaccgcctatcccaaaacctataagaactaatgataatcccaccaccctttgctgactctcttttcggactcagcccgcctgcacccaggtgaaataaacagccttgttgctaaccc

SEQ ID NO: 179079 - DNA, 2569 bp, Homo sapiens
  Payload ID: 15298
  Gene Symbol: SCIN
  Gene Name: scinderin
  Uniprot ID: Q9Y6U3
  ENST ID: ENST00000341757
  CDS Start-End: 211-1953
gcttggaagccagcgctgcgctccccgtgggaagcgatcgtctcctctgtcaactcgcgcctgggcacttagcccctcccgtttcagggcgccgcctccccggatggcaaacactataaagtggcggcgaataaggttcctcctgctgctctcggtttagtccaagatcagcgatatcacgcgtcccccggagcatcgcgtgcaggagccatggcgcgggagctataccacgaagagttcgcccgggcgggcaagcaggcggggctgcaggtctggaggattgagaagctggagctggtgcccgtgccccagagcgctcacggcgacttctacgtcggggatgcctacctggtgctgcacacggccaagacgagccgaggcttcacctaccacctgcacttctggctcggaaaggagtgttcccaggatgaaagcacagctgctgccatcttcactgttcagatggatgactatttgggtggcaagccagtgcagaatagagaacttcaaggatatgagtctaatgactttgttagctatttcaaaggcggtctgaaatacaaggctggaggcgtggcatctggattaaatcatgttcttacgaacgacctgacagccaagaggctcctacatgtgaagggtcgtagagtggtgagagccacagaagttccccttagctgggacagtttcaacaagggtgactgcttcatcattgaccttggcaccgaaatttatcagtggtgtggttcctcgtgcaacaaatatgaacgtctgaaggcaaaccaggtagctactggcattcggtacaatgaaaggaaaggaaggtctgaactaattgtcgtggaagaaggaagtgaaccctcagaacttataaaggtcttaggggaaaagccagagcttccagatggaggtgatgatgatgacattatagcagacataagtaacaggaaaatggctaaactatacatggtttcagatgcaagtggctccatgagagtgactgtggtggcagaagaaaaccccttctcaatggcaatgctgctgtctgaagaatgctttattttggaccacggggctgccaaacaaattttcgtatggaaaggtaaagatgctaatccccaagagaggaaggctgcaatgaagacagctgaagaatttctacagcaaatgaattattccaagaatacccaaattcaagttcttccagaaggaggtgaaacaccaatcttcaaacagttttttaaggactggagagataaagatcagagtgatggcttcgggaaagtttatgtcacagagaaagtggctcaaataaaacaaattccctttgatgcctcaaaattacacagttctccgcagatggcagcccagcacaatatggtggatgatggttctggcaaagtggagatttggcgtgtagaaaacaatggtaggatccaagttgaccaaaactcatatggtgaattctatggtggtgactgctacatcatactctacacctatcccagaggacagattatctacacgtggcaaggagcaaatgccacacgagatgagctgacaacatctgcgttcctgactgttcagttggatcggtcccttggaggacaggctgtgcagatccgagtctcccaaggcaaagagcctgttcacctactgagtttgttcaaagacaaaccgctcattatttacaagaatggaacatcaaagaaaggaggtcaggcacctgctccccctacacgcctctttcaagtccggagaaacctggcatctatcaccagaattgtggagaggagttctggaattcccttggagggaaaaaagactaccagacctcaccactactggaaacccaggctgaagaccatccacctcggctttacggctgctctaacaaaactggaagatttgttattgaagagattccaggagagttcacccaggatgatttagctgaagatgatgtcatgttactagatgcttgggaacagatatttatttggattggcaaagatgctaatgaagttgagaaaaaagaatctctgaagtctgccaaaatgtaccttgagacagacccttctggaagagacaagaggacaccaattgtcatcataaaacagggccatgagccacccacattcacaggctggttcctgggctgggattccagcaagtggtaaattggtatttgtaaaaagcaaacaaacattacaaggcagttatctcattgctgttttgggagaggaacgggaaaagctttttgcttatttgtcttttgaaaattaaggctgggcgcggtggctcacacctgtaatcccagcactttgagaggatgaggtaggcggatcactggggtcaggatttcgagaccagcctggccaacatggcgaaacctcgcctctactaaaaatacaaaaaaattagctgcgcgtggtggtgcacgcctgtagtccctgctacttggaaggctgagacaggaaaattgcttgaacccaggaggctgaggttgcagtgagccaggattgcgccaccacactccagcctgggcaacagagactctgtctcaaaa

SEQ ID NO: 179080 - DNA, 549 bp, Homo sapiens
  Payload ID: 15298
  Gene Symbol: SCIN
  Gene Name: scinderin
  ENST ID: ENST00000417018
  CDS Start-End: 69-549
ctgctgctctcggtttagtccaagatcagcgatatcacgcgtcccccggagcatcgcgtgcaggagccatggcgcgggagctataccacgaagagttcgcccgggcgggcaagcaggcggggctgcaggtctggaggattgagaagctggagctggtgcccgtgccccagagcgctcacggcgacttctacgtcggggatgcctacctggtgctgcacacggccaagacgagccgaggcttcacctaccacctgcacttctggctcggattctacccgcaccatgctgcttgtgggtctggtagacaaaaactccgcttcattcggaagctggcgtcctcagatagaagaaaggagtgttcccaggatgaaagcacagctgctgccatcttcactgttcagatggatgactatttgggtggcaagccagtgcagaatagagaacttcaaggatatgagtctaatgactttgttagctatttcaaaggcggtctgaaatacaaggctggaggcgtggcatctggattaaatcatgttcttacgaacgacc

SEQ ID NO: 179081 - DNA, 570 bp, Homo sapiens
  Payload ID: 15298
  Gene Symbol: SCIN
  Gene Name: scinderin
  ENST ID: ENST00000436854
  CDS Start-End: 67-375
gctgctctcggtttagtccaagatcagcgatatcacgcgtcccccggagcatcgcgtgcaggagccatggcgcgggagctataccacgaagagttcgcccgggcgggcaagcaggcggggctgcaggtctggaggattgagaagctggagctggtgcccgtgccccagagcgctcacggcgacttctacgtcggggatgcctacctggtgctgcacacggccaagacgagccgaggcttcacctaccacctgcacttctggctcggaattggaaaaagcagaaacaaaaacaggccgggcatggtggctcatacctgtaatccccaacaatttaggaggccaaagccagaggactgcttgaggccaggagtttgagaccagcctgggcaacatatggagaccttttccctacaaaacacttttttgagaattagcaaagcatggtggcacgcacctgtagtccaagctgcttgtgagactgaggaaaggagtgttcccaggatgaaagcacagctgctgccatcttcactgttcagatggatgactatttgggtggcaagccagtgcaga

SEQ ID NO: 179082 - DNA, 536 bp, Homo sapiens
  Payload ID: 15298
  Gene Symbol: SCIN
  Gene Name: scinderin
  ENST ID: ENST00000518849
  CDS Start-End: 264-536
tagccaagatggtctcgatctcctgacctcgtgatccgcccgcctcagcctcccaaagatctgggattacaggcgtgagccactgcacccggccagaagctttttcatttattcgtccagcagcatcttgtactagtcctgactgtggcgtgtccccagaaggtcatactccaccatgttgtctcatcttgcacatccccaagaagttgcttctccctgacgtctgcgtttaattaagtgcaataggtgtggaccatcaggaaatggcctccctgatgtctgcattcactttagtgcaacaggaaatttatcagtggtgtggttcctcgtgcaacaaatatgaacgtctgaaggcaaaccaggtagctactggcattcggtacaatgaaaggaaaggaaggtctgaactaattgtcgtggaagaaggaagtgaaccctcagaacttataaaggtcttaggggaaaagccagagcttccagatggaggtgatgatgatgacattatagcagacataagtaacaggaaaatggctaaa

SEQ ID NO: 179083 - DNA, 585 bp, Homo sapiens
  Payload ID: 15298
  Gene Symbol: SCIN
  Gene Name: scinderin
  ENST ID: ENST00000523729
  CDS Start-End: 261-585
cttgctggataggggcgatggttggggggagaggctgggtagtagggactgctgttcctggagctgtcggtattctcggagtagcatcatgtcttgtactgttccatgggtgaaggctctaacacggccctgtaaaaactggtggcgtgtccccagaaggtcatactccaccatgttgtctcatcttgcacatccccaagaagttgcttctccctgacgtctgcgtttaattaagtgcaataggtgtggaccatcaggaaatggcctccctgatgtctgcattcactttagtgcaacaggaaatttatcagtggtgtggttcctcgtgcaacaaatatgaacgtctgaaggcaaaccaggtagctactggcattcggtacaatgaaaggaaaggaaggtctgaactaattgtcgtggaagaaggaagtgaaccctcagaacttataaaggtcttaggggaaaagccagagcttccagatggaggtgatgatgatgacattatagcagacataagtaacaggaaaatggctaaactatacatggtttcagatgcaagtggctccatgagagtgactgtggtggcag

SEQ ID NO: 179084 - DNA, 2660 bp, Homo sapiens
  Payload ID: 15298
  Gene Symbol: SCIN
  Gene Name: scinderin
  Uniprot ID: Q9Y6U3
  ENST ID: ENST00000519209
  CDS Start-End: 367-1773
caagatggtctcgatctcctgacctcgtgatccgcccgcctcagcctcccaaagatctgggattacaggcgtgagccactgcacccggccagaagctttttcatttattcgtccagcagcatcttgtactagtcctgactggaaatttatcagtggtgtggttcctcgtgcaacaaatatgaacgtctgaaggcaaaccaggtagctactggcattcggtacaatgaaaggaaaggaaggtctgaactaattgtcgtggaagaaggaagtgaaccctcagaacttataaaggtcttaggggaaaagccagagcttccagatggaggtgatgatgatgacattatagcagacataagtaacaggaaaatggctaaactatacatggtttcagatgcaagtggctccatgagagtgactgtggtggcagaagaaaaccccttctcaatggcaatgctgctgtctgaagaatgctttattttggaccacggggctgccaaacaaattttcgtatggaaaggtaaagatgctaatccccaagagaggaaggctgcaatgaagacagctgaagaatttctacagcaaatgaattattccaagaatacccaaattcaagttcttccagaaggaggtgaaacaccaatcttcaaacagttttttaaggactggagagataaagatcagagtgatggcttcgggaaagtttatgtcacagagaaagtggctcaaataaaacaaattccctttgatgcctcaaaattacacagttctccgcagatggcagcccagcacaatatggtggatgatggttctggcaaagtggagatttggcgtgtagaaaacaatggtaggatccaagttgaccaaaactcatatggtgaattctatggtggtgactgctacatcatactctacacctatcccagaggacagattatctacacgtggcaaggagcaaatgccacacgagatgagctgacaacatctgcgttcctgactgttcagttggatcggtcccttggaggacaggctgtgcagatccgagtctcccaaggcaaagagcctgttcacctactgagtttgttcaaagacaaaccgctcattatttacaagaatggaacatcaaagaaaggaggtcaggcacctgctccccctacacgcctctttcaagtccggagaaacctggcatctatcaccagaattgtggaggttgatgttgatgcaaattcactgaattctaacgatgtttttgtcctgaaactgccacaaaatagtggctacatctgggtaggaaaaggtgctagccaggaggaggagaaaggagcagagtatgtagcaagtgtcctaaagtgcaaaaccttaaggatccaagaaggcgaggagccagaggagttctggaattcccttggagggaaaaaagactaccagacctcaccactactggaaacccaggctgaagaccatccacctcggctttacggctgctctaacaaaactggaagatttgttattgaagagattccaggagagttcacccaggatgatttagctgaagatgatgtcatgttactagatgcttgggaacagatatttatttggattggcaaagatgctaatgaagttgagaaaaaagaatctctgaagtctgccaaaatgtaccttgagacagacccttctggaagagacaagaggacaccaattgtcatcataaaacagggccatgagccacccacattcacaggctggttcctgggctgggattccagcaagtggtaaattggtatttgtaaaaagcaaacaaacattacaaggcagttatctcattgctgttttgggagaggaacgggaaaagctttttgcttatttgtcttttgaaaattaaggctgggcgcggtggctcacacctgtaatcccagcactttgagaggatgaggtaggcggatcactggggtcaggatttcgagaccagcctggccaacatggcgaaacctcgcctctactaaaaatacaaaaaaattagctgcgcgtggtggtgcacgcctgtagtccctgctacttggaaggctgagacaggaaaattgcttgaacccaggaggctgaggttgcagtgagccaggattgcgccaccacactccagcctgggcaacagagactctgtctcaaaaaaaaaaaaaaaaaaaattaacctcaaccaaacgcctattttttaatgcttagttttggcttgaaattcttcttcacctggagttttcttacgttaatacattaaaataacctgaaggaaactttcgttatgggccaatattagctcttatggaaactgatttatatcttttttatgacctttcaaaagtaaaatactatgcataatctagaaagatttgtcagataggaaattttataatgcattagccattagtcagagttgttttttaacatgccagagaaaaagttgtaatgccttggaagttattctcttttctatagattgtgttcaaaagatgtgtatacttgcaataaggtttatgttaaggtggctttaacaattggttgctattttccttctttagtcaatatgactttgatgtcattaactgctaagtgttattttctaagaggaattttatcttttttttaaccttattaaaagcctttgaaaacac

SEQ ID NO: 179085 - DNA, 5087 bp, Homo sapiens
  Payload ID: 15299
  Gene Symbol: STIL
  Gene Name: SCL/TAL1 interrupting locus
  ENST ID: ENST00000337817
  CDS Start-End: 365-4090
agttcccgcgaccccaacgtcccagaggcggggccggagtcggcggtggcgctccttggagccggctcccgctcctaccctgcaaacagacctcagctccgcggaagttgcgagacggggtttcaccatgttggtcgggctggtctggaaatcctgacttcaggtgatccacccgcctcggcctcccaaaatgctgggattacaagcgtgagccaccgcccctgacatgagccattgacttttaaagcaggagaataatttgatcagatttatatggaaacactcttctagcagcattatggggacttttccataagtctggatactgaggatttggaattaaagaaatcattcaccagacatcatggagcctatatatccttttgcacggccccagatgaataccaggtttccttcaagcaggatggtacctttccactttcctccatcaaaatgtgcactttggaacccaacgccaactggagatttcatctacttacatctcagttactacagaaatccaaagcttgtggtgactgagaagaccatccgacttgcttatcgtcatgctaagcagaataaaaaaaattcgtcatgctttttacttggttctctgacagcagacgaagatgaagaaggtgtaacattgacagtagatcgctttgatcctggtcgagaagtacctgaatgcctagaaataacccctactgcttctcttcctggggactttttgattccatgcaaagttcatactcaagaactttgttcaagagaaatgatagttcacagtgtagatgacttcagttcagctttaaaggctctacagtgccatatatgtagcaaagattccttggactgtgctctggcaagaaacttgagcagtaatctgaatatttctcaagttcaagggacttataaatatggatatcttaccatggatgaaacacgcaaattgttacttttgttggaatctgatcccaaggtttattctctaccattggtgggaatttggctgtctggaattacacatatctatagtcctcaggtatgggcttgctgtttgcgatacatattcaattcttctgttcaagaaagggttttttcagaatctggaaatttcatcatagttctctattctatgacacataaggaacctgagttttatgaatgcttcccttgtgatggcaagatacctgactttcggtttcagttgctaaccagtaaggaaacattacatcttttcaaaaatgttgaacctcctgacaaaaatccaatccgttgtgaactgagcgctgaaagccaaaatgcagaaacagagtttttcagtaaggcttccaagaatttttcaattaagaggtcttcccaaaagttatcttctgggaagatgccaatacatgatcacgactctggtgttgaagatgaagatttttctccaagaccaattcctagtcctcatccagtgagtcagaagatttctaagatccaaccatcagttcctgaactttcacttgtgttggatggcaatttcatagaatcaaaccctctgcctactccattggaaatggtgaataatgaaaatcctcctttgattaaccacttggaacacttgaagccattgcaaccccagctttatgatgagaaacacagtccagaagttgaagctggagagccttccttgagaggaataccaaatcagttaaaccaggataaaccagctcttttgagacactgcaaagtaagacagccacctgcctataagaaagggaacccccataccaggaacagtattaaaccatcttctcataatgggccatctcatgatatatttgaaaagctccaaacagtttctgctggaaatgtacaaaacgaagagtatcctataagaccctccacacttaattctaggcagtcttctcttgccccgcagtcccaaccacacgattttgttttttcaccccataattcaggaagaccaatggaacttcagatacctactcccccactgccatcttactgttccacaaacgtttgcaggtgttgtcagcatcatagtcatattcaatatagtccgctaaattcttggcaaggagcaaacacagttggatccattcaagatgtccagtctgaagcccttcaaaagcattcattatttcacccaagtggatgtccagccctgtactgtaatgcattctgttcttcaagtagtcctatagccttgagacctcagggagatatgggcagttgttctccccacagcaatattgaaccatcgcctgtggcaagaccgccttcacatatggacttatgtaacccacagccttgcacagtgtgcatgcacacacccaagactgagtcagataatggaatgatgggactatctccagatgcatatcggttcctcacagaacaagacagacagctaagactacttcaggcacagattcagcgtttgttggaagcacagtctctgatgccctgttcccctaagacaactgctgttgaagacacagtgcaagctggaagacaaatggagttggtttctgtggaagcacagtcttcccctggcttgcacatgagaaaaggtgtaagcattgctgtgagcacaggtgctagcttgttttggaatgcagcaggtgaggatcaagagcctgactctcaaatgaagcaagatgataccaaaatttccagtgaggacatgaatttttctgtcgatattaataatgaagtcacaagtcttccaggtagtgcatcttcattaaaagcagttgatattcccagttttgaagagagcaacattgctgtggaagaagaatttaaccagccactttctgtatccaacagctcttctctagttgtgagaaaagaacctgatgtacctgtgttctttccaagtggccagctggcagaaagtgtaagcatgtgtttacagactggaccaacagggggtgccagtaacaattctgaaacatcagaggaaccaaaaattgagcatgtaatgcaacccttgcttcatcaaccatcagataaccagaaaatttaccaggatttattgggtcaagtaaaccacctattaaatagttcctccaaggaaactgagcagccgtctaccaaagcagtaattatcagtcatgaatgcaccagaacccaaaacgtttaccatacaaagaaaaaaacacatcattcaagactggtggacaaagattgtgtccttaatgcaactcttaagcaactaagaagccttggagtaaaaattgattctcccactaaagtgaagaaaaatgcacataacgtggatcacgccagtgtgttggcatgcatcagcccagaagcagtgatctctggattaaactgcatgtcatttgctaatgttggcatgagcggcttaagccccaatggtgtggatttgagcatggaggcaaatgctatagctctgaaatatttaaatgaaaatcagctgtcacaactgtctgtcactcgatcgaaccaaaataattgtgacccattcagccttctccatattaatacagacagaagcacagtggggcttagtttaatttcaccaaacaacatgtcatttgcaaccaaaaaatatatgaagagatatggactcctacaaagcagtgacaatagtgaagatgaagaggaacctcccgacaatgcagatagcaagagtgaatatttattgaatcagaaccttaggtccatacctgaacagcttggtggtcagaaagagccttctaagaatgaccatgaaataattaattgttctaactgtgaatctgtggggaccaacgcagatacgccagtattgagaaatattacaaatgaagttttgcagacaaaagcaaaacagcagttgactgaaaagccagctttcttagtaaagaaccttaaaccaagtcctgcagtgaaccttcgaaccgggaaagcagagttcactcaacatcctgagaaagaaaatgaaggggacattacaatttttcctgaaagtttgcaaccttctgaaacgctaaagcagatgaatagcatgaattcagtaggcaccttcttagatgtaaaacgtctcagacagttaccaaaattattttaaccttttaactccctgcccttttaatacagggacagggtgtctcctgaagatacttagggaaaacaggagcctaccacaaggctcctgatcattctggagtcactgtttcttggtagcagccaattgggaagagtgacttctgtgagatggctggctggtgataggactaagttctcattgttcaaatagagctgttcaacatcactgaaacctttaagaaaagccctgagatcagttattcctacaagtttaagtagtagacagatactatccagctctaagtctcaactgctcttttatactgtacttttttttttgagacggagttttgctcttgtagcccaggctggagtgcaatggcaggatctcagatcactgcaacctctgcctcctgggttcaagcgattttcctgcttcatcttcccaggtagctgggattacaggcatgtgccacaacgcctggctaattttgtatttttagtagagactggtttctccatgttggtcaggctggtctcaaactcccgacctcaggtgatccgcccgcctcggcctcctaaagtgctgggattacaggcgtgagccactgcgcccagctatactgtatattttaagaagttccagcatgttgcatctctgcatttatcctatatcattaaaagaacataagttatcatggtgttgggtaaattagcgaaatcaacccttcctaagtttaagggaaaagttatttttaaaaacaacttaataaaaacttacactcttttatacaagagtgtatttccccttaattaggatgcatgttgattaaactcgagatacagctttttgcagtatggtgggttggttttggtgtaacatcttcaacatgtcacactggctatcaaagaataagaaaattattgagtatgagtgtgttttataaactttctgagtttttcagatgtcttaatattttttaatagaacttaataaaatgtctagattgactattttc

SEQ ID NO: 179086 - DNA, 5225 bp, Homo sapiens
  Payload ID: 15299
  Gene Symbol: STIL
  Gene Name: SCL/TAL1 interrupting locus
  Uniprot ID: Q15468
  ENST ID: ENST00000360380
  CDS Start-End: 365-4228
agttcccgcgaccccaacgtcccagaggcggggccggagtcggcggtggcgctccttggagccggctcccgctcctaccctgcaaacagacctcagctccgcggaagttgcgagacggggtttcaccatgttggtcgggctggtctggaaatcctgacttcaggtgatccacccgcctcggcctcccaaaatgctgggattacaagcgtgagccaccgcccctgacatgagccattgacttttaaagcaggagaataatttgatcagatttatatggaaacactcttctagcagcattatggggacttttccataagtctggatactgaggatttggaattaaagaaatcattcaccagacatcatggagcctatatatccttttgcacggccccagatgaataccaggtttccttcaagcaggatggtacctttccactttcctccatcaaaatgtgcactttggaacccaacgccaactggagatttcatctacttacatctcagttactacagaaatccaaagcttgtggtgactgagaagaccatccgacttgcttatcgtcatgctaagcagaataaaaaaaattcgtcatgctttttacttggttctctgacagcagacgaagatgaagaaggtgtaacattgacagtagatcgctttgatcctggtcgagaagtacctgaatgcctagaaataacccctactgcttctcttcctggggactttttgattccatgcaaagttcatactcaagaactttgttcaagagaaatgatagttcacagtgtagatgacttcagttcagctttaaaggctctacagtgccatatatgtagcaaagattccttggactgtggtaagctgctttccctaagagttcatatcacttccagggagagtttggacagtgtggaatttgacttgcattgggcagcagtaactctagcaaataactttaaatgcacacctgtgaagcccatccccattattccaacagctctggcaagaaacttgagcagtaatctgaatatttctcaagttcaagggacttataaatatggatatcttaccatggatgaaacacgcaaattgttacttttgttggaatctgatcccaaggtttattctctaccattggtgggaatttggctgtctggaattacacatatctatagtcctcaggtatgggcttgctgtttgcgatacatattcaattcttctgttcaagaaagggttttttcagaatctggaaatttcatcatagttctctattctatgacacataaggaacctgagttttatgaatgcttcccttgtgatggcaagatacctgactttcggtttcagttgctaaccagtaaggaaacattacatcttttcaaaaatgttgaacctcctgacaaaaatccaatccgttgtgaactgagcgctgaaagccaaaatgcagaaacagagtttttcagtaaggcttccaagaatttttcaattaagaggtcttcccaaaagttatcttctgggaagatgccaatacatgatcacgactctggtgttgaagatgaagatttttctccaagaccaattcctagtcctcatccagtgagtcagaagatttctaagatccaaccatcagttcctgaactttcacttgtgttggatggcaatttcatagaatcaaaccctctgcctactccattggaaatggtgaataatgaaaatcctcctttgattaaccacttggaacacttgaagccattgcaaccccagctttatgatgagaaacacagtccagaagttgaagctggagagccttccttgagaggaataccaaatcagttaaaccaggataaaccagctcttttgagacactgcaaagtaagacagccacctgcctataagaaagggaacccccataccaggaacagtattaaaccatcttctcataatgggccatctcatgatatatttgaaaagctccaaacagtttctgctggaaatgtacaaaacgaagagtatcctataagaccctccacacttaattctaggcagtcttctcttgccccgcagtcccaaccacacgattttgttttttcaccccataattcaggaagaccaatggaacttcagatacctactcccccactgccatcttactgttccacaaacgtttgcaggtgttgtcagcatcatagtcatattcaatatagtccgctaaattcttggcaaggagcaaacacagttggatccattcaagatgtccagtctgaagcccttcaaaagcattcattatttcacccaagtggatgtccagccctgtactgtaatgcattctgttcttcaagtagtcctatagccttgagacctcagggagatatgggcagttgttctccccacagcaatattgaaccatcgcctgtggcaagaccgccttcacatatggacttatgtaacccacagccttgcacagtgtgcatgcacacacccaagactgagtcagataatggaatgatgggactatctccagatgcatatcggttcctcacagaacaagacagacagctaagactacttcaggcacagattcagcgtttgttggaagcacagtctctgatgccctgttcccctaagacaactgctgttgaagacacagtgcaagctggaagacaaatggagttggtttctgtggaagcacagtcttcccctggcttgcacatgagaaaaggtgtaagcattgctgtgagcacaggtgctagcttgttttggaatgcagcaggtgaggatcaagagcctgactctcaaatgaagcaagatgataccaaaatttccagtgaggacatgaatttttctgtcgatattaataatgaagtcacaagtcttccaggtagtgcatcttcattaaaagcagttgatattcccagttttgaagagagcaacattgctgtggaagaagaatttaaccagccactttctgtatccaactcttctctagttgtgagaaaagaacctgatgtacctgtgttctttccaagtggccagctggcagaaagtgtaagcatgtgtttacagactggaccaacagggggtgccagtaacaattctgaaacatcagaggaaccaaaaattgagcatgtaatgcaacccttgcttcatcaaccatcagataaccagaaaatttaccaggatttattgggtcaagtaaaccacctattaaatagttcctccaaggaaactgagcagccgtctaccaaagcagtaattatcagtcatgaatgcaccagaacccaaaacgtttaccatacaaagaaaaaaacacatcattcaagactggtggacaaagattgtgtccttaatgcaactcttaagcaactaagaagccttggagtaaaaattgattctcccactaaagtgaagaaaaatgcacataacgtggatcacgccagtgtgttggcatgcatcagcccagaagcagtgatctctggattaaactgcatgtcatttgctaatgttggcatgagcggcttaagccccaatggtgtggatttgagcatggaggcaaatgctatagctctgaaatatttaaatgaaaatcagctgtcacaactgtctgtcactcgatcgaaccaaaataattgtgacccattcagccttctccatattaatacagacagaagcacagtggggcttagtttaatttcaccaaacaacatgtcatttgcaaccaaaaaatatatgaagagatatggactcctacaaagcagtgacaatagtgaagatgaagaggaacctcccgacaatgcagatagcaagagtgaatatttattgaatcagaaccttaggtccatacctgaacagcttggtggtcagaaagagccttctaagaatgaccatgaaataattaattgttctaactgtgaatctgtggggaccaacgcagatacgccagtattgagaaatattacaaatgaagttttgcagacaaaagcaaaacagcagttgactgaaaagccagctttcttagtaaagaaccttaaaccaagtcctgcagtgaaccttcgaaccgggaaagcagagttcactcaacatcctgagaaagaaaatgaaggggacattacaatttttcctgaaagtttgcaaccttctgaaacgctaaagcagatgaatagcatgaattcagtaggcaccttcttagatgtaaaacgtctcagacagttaccaaaattattttaaccttttaactccctgcccttttaatacagggacagggtgtctcctgaagatacttagggaaaacaggagcctaccacaaggctcctgatcattctggagtcactgtttcttggtagcagccaattgggaagagtgacttctgtgagatggctggctggtgataggactaagttctcattgttcaaatagagctgttcaacatcactgaaacctttaagaaaagccctgagatcagttattcctacaagtttaagtagtagacagatactatccagctctaagtctcaactgctcttttatactgtacttttttttttgagacggagttttgctcttgtagcccaggctggagtgcaatggcaggatctcagatcactgcaacctctgcctcctgggttcaagcgattttcctgcttcatcttcccaggtagctgggattacaggcatgtgccacaacgcctggctaattttgtatttttagtagagactggtttctccatgttggtcaggctggtctcaaactcccgacctcaggtgatccgcccgcctcggcctcctaaagtgctgggattacaggcgtgagccactgcgcccagctatactgtatattttaagaagttccagcatgttgcatctctgcatttatcctatatcattaaaagaacataagttatcatggtgttgggtaaattagcgaaatcaacccttcctaagtttaagggaaaagttatttttaaaaacaacttaataaaaacttacactcttttatacaagagtgtatttccccttaattaggatgcatgttgattaaactcgagatacagctttttgcagtatggtgggttggttttggtgtaacatcttcaacatgtcacactggctatcaaagaataagaaaattattgagtatgagtgtgttttataaactttctgagtttttcagatgtcttaatattttttaatagaacttaataaaatgtctagattgactattttc

SEQ ID NO: 179087 - DNA, 5009 bp, Homo sapiens
  Payload ID: 15299
  Gene Symbol: STIL
  Gene Name: SCL/TAL1 interrupting locus
  Uniprot ID: Q15468
  ENST ID: ENST00000371877
  CDS Start-End: 149-4015
gcgaccccaacgtcccagaggcggggccggagtcggcggtggcgctccttggagccggctcccgctcctaccctgcaaacagacctcagctccgcggaagttgcggatactgaggatttggaattaaagaaatcattcaccagacatcatggagcctatatatccttttgcacggccccagatgaataccaggtttccttcaagcaggatggtacctttccactttcctccatcaaaatgtgcactttggaacccaacgccaactggagatttcatctacttacatctcagttactacagaaatccaaagcttgtggtgactgagaagaccatccgacttgcttatcgtcatgctaagcagaataaaaaaaattcgtcatgctttttacttggttctctgacagcagacgaagatgaagaaggtgtaacattgacagtagatcgctttgatcctggtcgagaagtacctgaatgcctagaaataacccctactgcttctcttcctggggactttttgattccatgcaaagttcatactcaagaactttgttcaagagaaatgatagttcacagtgtagatgacttcagttcagctttaaaggctctacagtgccatatatgtagcaaagattccttggactgtggtaagctgctttccctaagagttcatatcacttccagggagagtttggacagtgtggaatttgacttgcattgggcagcagtaactctagcaaataactttaaatgcacacctgtgaagcccatccccattattccaacagctctggcaagaaacttgagcagtaatctgaatatttctcaagttcaagggacttataaatatggatatcttaccatggatgaaacacgcaaattgttacttttgttggaatctgatcccaaggtttattctctaccattggtgggaatttggctgtctggaattacacatatctatagtcctcaggtatgggcttgctgtttgcgatacatattcaattcttctgttcaagaaagggttttttcagaatctggaaatttcatcatagttctctattctatgacacataaggaacctgagttttatgaatgcttcccttgtgatggcaagatacctgactttcggtttcagttgctaaccagtaaggaaacattacatcttttcaaaaatgttgaacctcctgacaaaaatccaatccgttgtgaactgagcgctgaaagccaaaatgcagaaacagagtttttcagtaaggcttccaagaatttttcaattaagaggtcttcccaaaagttatcttctgggaagatgccaatacatgatcacgactctggtgttgaagatgaagatttttctccaagaccaattcctagtcctcatccagtgagtcagaagatttctaagatccaaccatcagttcctgaactttcacttgtgttggatggcaatttcatagaatcaaaccctctgcctactccattggaaatggtgaataatgaaaatcctcctttgattaaccacttggaacacttgaagccattgcaaccccagctttatgatgagaaacacagtccagaagttgaagctggagagccttccttgagaggaataccaaatcagttaaaccaggataaaccagctcttttgagacactgcaaagtaagacagccacctgcctataagaaagggaacccccataccaggaacagtattaaaccatcttctcataatgggccatctcatgatatatttgaaaagctccaaacagtttctgctggaaatgtacaaaacgaagagtatcctataagaccctccacacttaattctaggcagtcttctcttgccccgcagtcccaaccacacgattttgttttttcaccccataattcaggaagaccaatggaacttcagatacctactcccccactgccatcttactgttccacaaacgtttgcaggtgttgtcagcatcatagtcatattcaatatagtccgctaaattcttggcaaggagcaaacacagttggatccattcaagatgtccagtctgaagcccttcaaaagcattcattatttcacccaagtggatgtccagccctgtactgtaatgcattctgttcttcaagtagtcctatagccttgagacctcagggagatatgggcagttgttctccccacagcaatattgaaccatcgcctgtggcaagaccgccttcacatatggacttatgtaacccacagccttgcacagtgtgcatgcacacacccaagactgagtcagataatggaatgatgggactatctccagatgcatatcggttcctcacagaacaagacagacagctaagactacttcaggcacagattcagcgtttgttggaagcacagtctctgatgccctgttcccctaagacaactgctgttgaagacacagtgcaagctggaagacaaatggagttggtttctgtggaagcacagtcttcccctggcttgcacatgagaaaaggtgtaagcattgctgtgagcacaggtgctagcttgttttggaatgcagcaggtgaggatcaagagcctgactctcaaatgaagcaagatgataccaaaatttccagtgaggacatgaatttttctgtcgatattaataatgaagtcacaagtcttccaggtagtgcatcttcattaaaagcagttgatattcccagttttgaagagagcaacattgctgtggaagaagaatttaaccagccactttctgtatccaacagctcttctctagttgtgagaaaagaacctgatgtacctgtgttctttccaagtggccagctggcagaaagtgtaagcatgtgtttacagactggaccaacagggggtgccagtaacaattctgaaacatcagaggaaccaaaaattgagcatgtaatgcaacccttgcttcatcaaccatcagataaccagaaaatttaccaggatttattgggtcaagtaaaccacctattaaatagttcctccaaggaaactgagcagccgtctaccaaagcagtaattatcagtcatgaatgcaccagaacccaaaacgtttaccatacaaagaaaaaaacacatcattcaagactggtggacaaagattgtgtccttaatgcaactcttaagcaactaagaagccttggagtaaaaattgattctcccactaaagtgaagaaaaatgcacataacgtggatcacgccagtgtgttggcatgcatcagcccagaagcagtgatctctggattaaactgcatgtcatttgctaatgttggcatgagcggcttaagccccaatggtgtggatttgagcatggaggcaaatgctatagctctgaaatatttaaatgaaaatcagctgtcacaactgtctgtcactcgatcgaaccaaaataattgtgacccattcagccttctccatattaatacagacagaagcacagtggggcttagtttaatttcaccaaacaacatgtcatttgcaaccaaaaaatatatgaagagatatggactcctacaaagcagtgacaatagtgaagatgaagaggaacctcccgacaatgcagatagcaagagtgaatatttattgaatcagaaccttaggtccatacctgaacagcttggtggtcagaaagagccttctaagaatgaccatgaaataattaattgttctaactgtgaatctgtggggaccaacgcagatacgccagtattgagaaatattacaaatgaagttttgcagacaaaagcaaaacagcagttgactgaaaagccagctttcttagtaaagaaccttaaaccaagtcctgcagtgaaccttcgaaccgggaaagcagagttcactcaacatcctgagaaagaaaatgaaggggacattacaatttttcctgaaagtttgcaaccttctgaaacgctaaagcagatgaatagcatgaattcagtaggcaccttcttagatgtaaaacgtctcagacagttaccaaaattattttaaccttttaactccctgcccttttaatacagggacagggtgtctcctgaagatacttagggaaaacaggagcctaccacaaggctcctgatcattctggagtcactgtttcttggtagcagccaattgggaagagtgacttctgtgagatggctggctggtgataggactaagttctcattgttcaaatagagctgttcaacatcactgaaacctttaagaaaagccctgagatcagttattcctacaagtttaagtagtagacagatactatccagctctaagtctcaactgctcttttatactgtacttttttttttgagacggagttttgctcttgtagcccaggctggagtgcaatggcaggatctcagatcactgcaacctctgcctcctgggttcaagcgattttcctgcttcatcttcccaggtagctgggattacaggcatgtgccacaacgcctggctaattttgtatttttagtagagactggtttctccatgttggtcaggctggtctcaaactcccgacctcaggtgatccgcccgcctcggcctcctaaagtgctgggattacaggcgtgagccactgcgcccagctatactgtatattttaagaagttccagcatgttgcatctctgcatttatcctatatcattaaaagaacataagttatcatggtgttgggtaaattagcgaaatcaacccttcctaagtttaagggaaaagttatttttaaaaacaacttaataaaaacttacactcttttatacaagagtgtatttccccttaattaggatgcatgttgattaaactcgagatacagctttttgcagtatggtgggttggttttggtgtaacatcttcaacatgtcacactggctatcaaagaataagaaaattattgagtatgagtgtgttttataaactttctgagtttttcagatgtcttaatattttttaatagaacttaataaaatgtctagattgactatt

SEQ ID NO: 179088 - DNA, 4558 bp, Homo sapiens
  Payload ID: 15299
  Gene Symbol: STIL
  Gene Name: SCL/TAL1 interrupting locus
  ENST ID: ENST00000396221
  CDS Start-End: 232-4044
gtcgggctggtctggaaatcctgacttcaggtgatccacccgcctcggcctcccaaaatgctgggattacaagcgtgagccaccgcccctgacatgagccattgacttttaaagcaggagaataatttgatcagatttatatggaaacactcttctagcagcattatggggacttttccataagtctggatactgaggatttggaattaaagaaatcattcaccagacatcatggagcctatatatccttttgcacggccccagatgaataccaggtttccttcaagcaggatggtacctttccactttcctccatcaaaatgtgcactttggaacccaacgccaactggagatttcatctacttacatctcagttactacagaaatccaaagcttgtggtgactgagaagaccatccgacttgcttatcgtcatgctaagcagaataaaaaaaattcgtcatgctttttacttggttctctgacagcagacgaagatgaagaaggtgtaacattgacagtagatcgctttgatcctggtcgagaagtacctgaatgcctagaaataacccctactgcttctcttcctggggactttttgattccatgcaaagttcatactcaagaactttgttcaagagaaatgatagttcacagtgtagatgacttcagttcagctttaaaggctctacagtgccatatatgtagcaaagattccttggactgtggtaagctgctttccctaagagttcatatcacttccagggagagtttggacagtgtggaatttgacttgcattgggcagcagtaactctagcaaataactttaaatgcacacctgtgaagcccatccccattattccaacagctctggcaagaaacttgagcagtaatctgaatatttctcaagttcaagggacttataaatatggatatcttaccatggatgaaacacgcaaattgttacttttgttggaatctgatcccaaggtttattctctaccattggtgggaatttggctgtctggaattacacatatctatagtcctcaggtatgggcttgctgtttgcgatacatattcaattcttctgttcaagaaagggttttttcagaatctggaaatttcatcatagttctctattctatgacacataaggaacctgagttttatgaatgcttcccttgtgatggcaagatacctgactttcggtttcagttgctaaccagtaaggaaacattacatcttttcaaaaatgttgaacctcctgacaaaaatccaatccgttgtgaactgagcgctgaaagccaaaatgcagaaacagagtttttcagtaaggcttccaagaatttttcaattaagaggtcttcccaaaagttatcttctgggaagatgccaatacatgatcacgactctggtgttgaagatgaagatttttctccaagaccaattcctagtcctcatccagtgagtcagaagatttctaagatccaaccatcagttcctgaactttcacttgtgttggatggcaatttcatagaatcaaaccctctgcctactccattggaaatggtgaataatgaaaatcctcctttgattaaccacttggaacacttgaagccattgcaaccccagctttatgatgagaaacacagtccagaagttgaagctggagagccttccttgagaggaataccaaatcagttaaaccaggataaaccagctcttttgagacactgcaaagtaagacagccacctgcctataagaaagggaacccccataccaggaacagtattaaaccatcttctcataatgggccatctcatgatatatttgaaaagctccaaacagtttctgctggaaatgtacaaaacgaagagtatcctataagaccctccacacttaattctaggcagtcttctcttgccccgcagtcccaaccacacgattttgttttttcaccccataattcaggaagaccaatggaacttcagatacctactcccccactgccatcttactgttccacaaacgtttgcaggtgttgtcagcatcatagtcatattcaatatagtccgctaaattcttggcaaggagcaaacacagttggatccattcaagatgtccagtctgaagcccttcaaaagcattcattatttcacccaagtggatgtccagccctgtactgtaatgcattctgttcttcaagtagtcctatagccttgagacctcagggagatatgggcagttgttctccccacagcaatattgaaccatcgcctgtggcaagaccgccttcacatatggacttatgtaacccacagccttgcacagtgtgcatgcacacacccaagactgagtcagataatggaatgatgggactatctccagatgcatatcggttcctcacagaacaagacagacagctaagactacttcaggcacagattcagcgtttgttggaagcacagtctctgatgccctgttcccctaagacaactgctgttgaagacacagtgcaagctggaagacaaatggagttggtttctgtggaagcacagtcttcccctggcttgcacatgagaaaaggtgtaagcattgctgtgagcacaggtgctagcttgttttggaatgcagcaggtgaggatcaagagcctgactctcaaatgaagcaagatgataccaaaatttccagtgaggacatgaatttttctgtcgatattaataatgaagtcacaagtcttccaggtagtgcatcttcattaaaagcagttgatattcccagttttgaagagagcaacattgctgtggaagaagaatttaaccagccactttctgtatccaatggccagctggcagaaagtgtaagcatgtgtttacagactggaccaacagggggtgccagtaacaattctgaaacatcagaggaaccaaaaattgagcatgtaatgcaacccttgcttcatcaaccatcagataaccagaaaatttaccaggatttattgggtcaagtaaaccacctattaaatagttcctccaaggaaactgagcagccgtctaccaaagcagtaattatcagtcatgaatgcaccagaacccaaaacgtttaccatacaaagaaaaaaacacatcattcaagactggtggacaaagattgtgtccttaatgcaactcttaagcaactaagaagccttggagtaaaaattgattctcccactaaagtgaagaaaaatgcacataacgtggatcacgccagtgtgttggcatgcatcagcccagaagcagtgatctctggattaaactgcatgtcatttgctaatgttggcatgagcggcttaagccccaatggtgtggatttgagcatggaggcaaatgctatagctctgaaatatttaaatgaaaatcagctgtcacaactgtctgtcactcgatcgaaccaaaataattgtgacccattcagccttctccatattaatacagacagaagcacagtggggcttagtttaatttcaccaaacaacatgtcatttgcaaccaaaaaatatatgaagagatatggactcctacaaagcagtgacaatagtgaagatgaagaggaacctcccgacaatgcagatagcaagagtgaatatttattgaatcagaaccttaggtccatacctgaacagcttggtggtcagaaagagccttctaagaatgaccatgaaataattaattgttctaactgtgaatctgtggggaccaacgcagatacgccagtattgagaaatattacaaatgaagttttgcagacaaaagcaaaacagcagttgactgaaaagccagctttcttagtaaagaaccttaaaccaagtcctgcagtgaaccttcgaaccgggaaagcagagttcactcaacatcctgagaaagaaaatgaaggggacattacaatttttcctgaaagtttgcaaccttctgaaacgctaaagcagatgaatagcatgaattcagtaggcaccttcttagatgtaaaacgtctcagacagttaccaaaattattttaaccttttaactccctgcccttttaatacagggacagggtgtctcctgaagatacttagggaaaacaggagcctaccacaaggctcctgatcattctggagtcactgtttcttggtagcagccaattgggaagagtgacttctgtgagatggctggctggtgataggactaagttctcattgttcaaatagagctgttcaacatcactgaaacctttaagaaaagccctgagatcagttattcctacaagtttaagtagtagacagatactatccagctctaagtctcaactgctcttttatactgtacttttttttttgagacggagttttgctcttgtagcccaggctggagtgcaatggcaggatctcagatcactgcaacctctgcctcctgggttcaagcgattttcctgcttcatcttcccaggtagctgggattacaggcatgtgccacaacgcctggctaattttgtatttttagtagagactggtttctccatgttggtcaggctgg

SEQ ID NO: 179089 - DNA, 633 bp, Homo sapiens
  Payload ID: 15299
  Gene Symbol: STIL
  Gene Name: SCL/TAL1 interrupting locus
  ENST ID: ENST00000436811
  CDS Start-End: 1-633
ccagctttatgatgagaaacacagtccagaagttgaagctggagagccttccttgagaggaataccaaatcagttaaaccaggataaaccagctcttttgagacactgcaaaccttgcacagtgtgcatgcacacacccaagactgagtcagataatggaatgatgggactatctccagatgcatatcggttcctcacagaacaagacagacagctaagactacttcaggcacagattcagcgtttgttggaagcacagtctctgatgccctgttcccctaagacaactgctgttgaagacacagtgcaagctggaagacaaatggagttggtttctgtggaagcacagtcttcccctggcttgcacatgagaaaaggtgtaagcattgctgtgagcacaggtgctagcttgttttggaatgcagcaggtgaggatcaagagcctgactctcaaatgaagcaagatgataccaaaatttccagtgaggacatgaatttttctgtcgatattaataatgaagtcacaagtcttccaggtagtgcatcttcattaaaagcagttgatattcccagttttgaagagagcaacattgctgtggaagaagaatttaaccagccactttctgtatccaa

SEQ ID NO: 179090 - DNA, 2984 bp, Homo sapiens
  Payload ID: 15299
  Gene Symbol: STIL
  Gene Name: SCL/TAL1 interrupting locus
  ENST ID: ENST00000447475
  CDS Start-End: 230-2984
agttcccgcgaccccaacgtcccagaggcggggccggagtcggcggtggcgctccttggagccggctcccgctcctaccctgcaaacagacctcagctccgcggaagttgcgcaggagaataatttgatcagatttatatggaaacactcttctagcagcattatggggacttttccataagtctggatactgaggatttggaattaaagaaatcattcaccagacatcatggagcctatatatccttttgcacggccccagatgaataccaggtttccttcaagcaggatggtacctttccactttcctccatcaaaatgtgcactttggaacccaacgccaactggagatttcatctacttacatctcagttactacagaaatccaaagcttgtggtgactgagaagaccatccgacttgcttatcgtcatgctaagcagaataaaaaaaattcgtcatgctttttacttggttctctgacagcagacgaagatgaagaaggtgtaacattgacagtagatcgctttgatcctggtcgagaagtacctgaatgcctagaaataacccctactgcttctcttcctggggactttttgattccatgcaaagttcatactcaagaactttgttcaagagaaatgatagttcacagtgtagatgacttcagttcagctttaaaggctctacagtgccatatatgtagcaaagattccttggactgtgctctggcaagaaacttgagcagtaatctgaatatttctcaagttcaagggacttataaatatggatatcttaccatggatgaaacacgcaaattgttacttttgttggaatctgatcccaaggtttattctctaccattggtgggaatttggctgtctggaattacacatatctatagtcctcaggtatgggcttgctgtttgcgatacatattcaattcttctgttcaagaaagggttttttcagaatctggaaatttcatcatagttctctattctatgacacataaggaacctgagttttatgaatgcttcccttgtgatggcaagatacctgactttcggtttcagttgctaaccagtaaggaaacattacatcttttcaaaaatgttgaacctcctgacaaaaatccaatccgttgtgaactgagcgctgaaagccaaaatgcagaaacagagtttttcagtaaggcttccaagaatttttcaattaagaggtcttcccaaaagttatcttctgggaagatgccaatacatgatcacgactctggtgttgaagatgaagatttttctccaagaccaattcctagtcctcatccagtgagtcagaagatttctaagatccaaccatcagttcctgaactttcacttgtgttggatggcaatttcatagaatcaaaccctctgcctactccattggaaatggtgaataatgaaaatcctcctttgattaaccacttggaacacttgaagccattgcaaccccagctttatgatgagaaacacagtccagaagttgaagctggagagccttccttgagaggaataccaaatcagttaaaccaggataaaccagctcttttgagacactgcaaagtaagacagccacctgcctataagaaagggaacccccataccaggaacagtattaaaccatcttctcataatgggccatctcatgatatatttgaaaagctccaaacagtttctgctggaaatgtacaaaacgaagagtatcctataagaccctccacacttaattctaggcagtcttctcttgccccgcagtcccaaccacacgattttgttttttcaccccataattcaggaagaccaatggaacttcagatacctactcccccactgccatcttactgttccacaaacgtttgcaggtgttgtcagcatcatagtcatattcaatatagtccgctaaattcttggcaaggagcaaacacagttggatccattcaagatgtccagtctgaagcccttcaaaagcattcattatttcacccaagtggatgtccagccctgtactgtaatgcattctgttcttcaagtagtcctatagccttgagacctcagggagatatgggcagttgttctccccacagcaatattgaaccatcgcctgtggcaagaccgccttcacatatggacttatgtaacccacagccttgcacagtgtgcatgcacacacccaagactgagtcagataatggaatgatgggactatctccagatgcatatcggttcctcacagaacaagacagacagctaagactacttcaggcacagattcagcgtttgttggaagcacagtctctgatgccctgttcccctaagacaactgctgttgaagacacagtgcaagctggaagacaaatggagttggtttctgtggaagcacagtcttcccctggcttgcacatgagaaaaggtgtaagcattgctgtgagcacaggtgctagcttgttttggaatgcagcaggtgaggatcaagagcctgactctcaaatgaagcaagatgataccaaaatttccagtgaggacatgaatttttctgtcgatattaataatgaagtcacaagtcttccaggtagtgcatcttcattaaaagcagttgatattcccagttttgaagagagcaacattgctgtggaagaagaatttaaccagccactttctgtatccaatggccagctggcagaaagtgtaagcatgtgtttacagactggaccaacagggggtgccagtaacaattctgaaacatcagaggaaccaaaaattgagcatgtaatgcaacccttgcttcatcaaccatcagataaccagaaaatttaccaggatttattgggtcaagtaaaccacctattaaatagttcctccaaggaaactgagcagccgtctaccaaagcagtaattatcagtcatgaatgcaccagaacccaaaacgtttaccatacaaagaaaaaaa

SEQ ID NO: 179091 - DNA, 542 bp, Homo sapiens
  Payload ID: 15299
  Gene Symbol: STIL
  Gene Name: SCL/TAL1 interrupting locus
  ENST ID: ENST00000413565
  CDS Start-End: 266-542
cccgtctctactaaaaatacaaaaagtagccgggtgtggtggtgcactcctgtaatctcagctactcaggaagctcaggcaggggaattgcttgaacccaggaggcagaggttgcagtgagctgagatcacgccactgcactccagcctgggtgatggagtgagactttgtctcaaaaaaaatatatatatataaactctttgaaaattacaaaagtagtctgaaaataccatcaccttaaagatagttagttgtttcctaccaaatgtctaccaagtttgctattccttgtgctttaattttacattgttttttcaaaaggtttccttcaagcaggatggtacctttccactttcctccatcaaaatgtgcactttggaacccaacgccaactggagatttcatctacttacatctcagttactacagaaatccaaagcttgtggtgactgagaagaccatccgacttgcttatcgtcatgctaagcagaataaaaaaaattcgtcatgctttttacttggttctctgacagcagacgaag

SEQ ID NO: 179092 - DNA, 999 bp, Homo sapiens
  Payload ID: 15300
  Gene Symbol: SCX
  Gene Name: scleraxis bHLH transcription factor
  Uniprot ID: Q7RTU7
  ENST ID: ENST00000567180
  CDS Start-End: 55-660
ggaggcggcatgagcagcgcgcgacagagctgacgccgcgcccccgccggccccatgtccttcgccacgctgcgcccggcgccgccgggccgctacctgtaccccgaggtgagcccgctgtcggaggacgaggaccgcggcagcgacagctcgggctccgacgagaaaccctgtcgcgtgcacgcggcgcgctgcggcctccagggcgcccggcggagggcggggggccggcgggccgggggcggggggccagggggccggccaggccgtgagccccggcagcggcacacggcgaacgcgcgcgagcgagaccgcaccaacagcgtgaacacggccttcacggcgctgcgcacgctgatccccaccgagcccgccgaccgcaagctctccaagattgagacgctgcgcctggcctccagctacatctcgcacctgggcaacgtgctgctggcgggcgaggcctgcggcgacggacagccctgccactccgggcccgccttcttccacgcggcgcgcgccggcagccccccgccgccgcccccgccgcctcccgcccgcgacggcgagaacacccagcccaaacagatctgcaccttctgcctcagcaaccagagaaagttgagcaaggaccgcgacagaaagacagcgattcgcagttaggaggtggccggcagcagccaggaggcagacgctgctgggggaggtggacgcccggggtgactgcagacagcccccaccttggacctgagctgggcaaggcccaccgcaagcatgcccccaggccagccctggctgcgagcggggccgagggacagacggacgtacagacaggcgccggcagcgggactctgcgctggccccagcacctgcccgggcccactggaactttctgcgctggcttttcttccggccactgtgtgatggcatcttgtgtttttgatatgataatataaagtctgaaaattttgtataattaaaaacaaaacagtatcttccaaa

SEQ ID NO: 179093 - DNA, 2300 bp, Homo sapiens
  Payload ID: 15301
  Gene Symbol: SOST
  Gene Name: sclerostin
  Uniprot ID: Q9BQB4
  ENST ID: ENST00000301691
  CDS Start-End: 48-689
agagcctgtgctactggaaggtggcgtgccctcctctggctggtaccatgcagctcccactggccctgtgtctcgtctgcctgctggtacacacagccttccgtgtagtggagggccaggggtggcaggcgttcaagaatgatgccacggaaatcatccccgagctcggagagtaccccgagcctccaccggagctggagaacaacaagaccatgaaccgggcggagaacggagggcggcctccccaccacccctttgagaccaaagacgtgtccgagtacagctgccgcgagctgcacttcacccgctacgtgaccgatgggccgtgccgcagcgccaagccggtcaccgagctggtgtgctccggccagtgcggcccggcgcgcctgctgcccaacgccatcggccgcggcaagtggtggcgacctagtgggcccgacttccgctgcatccccgaccgctaccgcgcgcagcgcgtgcagctgctgtgtcccggtggtgaggcgccgcgcgcgcgcaaggtgcgcctggtggcctcgtgcaagtgcaagcgcctcacccgcttccacaaccagtcggagctcaaggacttcgggaccgaggccgctcggccgcagaagggccggaagccgcggccccgcgcccggagcgccaaagccaaccaggccgagctggagaacgcctactagagcccgcccgcgcccctccccaccggcgggcgccccggccctgaacccgcgccccacatttctgtcctctgcgcgtggtttgattgtttatatttcattgtaaatgcctgcaacccagggcagggggctgagaccttccaggccctgaggaatcccgggcgccggcaaggcccccctcagcccgccagctgaggggtcccacggggcaggggagggaattgagagtcacagacactgagccacgcagccccgcctctggggccgcctacctttgctggtcccacttcagaggaggcagaaatggaagcattttcaccgccctggggttttaagggagcggtgtgggagtgggaaagtccagggactggttaagaaagttggataagattcccccttgcacctcgctgcccatcagaaagcctgaggcgtgcccagagcacaagactgggggcaactgtagatgtggtttctagtcctggctctgccactaacttgctgtgtaaccttgaactacacaattctccttcgggacctcaatttccactttgtaaaatgagggtggaggtgggaataggatctcgaggagactattggcatatgattccaaggactccagtgccttttgaatgggcagaggtgagagagagagagagaaagagagagaatgaatgcagttgcattgattcagtgccaaggtcacttccagaattcagagttgtgatgctctcttctgacagccaaagatgaaaaacaaacagaaaaaaaaaagtaaagagtctatttatggctgacatatttacggctgacaaactcctggaagaagctatgctgcttcccagcctggcttccccggatgtttggctacctccacccctccatctcaaagaaataacatcatccattggggtagaaaaggagagggtccgagggtggtgggagggatagaaatcacatccgccccaacttcccaaagagcagcatccctcccccgacccatagccatgttttaaagtcaccttccgaagagaagtgaaaggttcaaggacactggccttgcaggcccgagggagcagccatcacaaactcacagaccagcacatcccttttgagacaccgccttctgcccaccactcacggacacatttctgcctagaaaacagcttcttactgctcttacatgtgatggcatatcttacactaaaagaatattattgggggaaaaactacaagtgctgtacatatgctgagaaactgcagagcataatactgccacccaaaaatctttttgaaaatcatttccagacaacctcttactttctgtgtagtttttaattgttaaaaaaaaaaagttttaaacagaagcacatgacatatgaaagcctgcaggactggtcgtttttttggcaattcttccacgtgggacttgtccacaagaatgaaagtagtggtttttaaagagttaagttacatatttattttctcacttaagttatttatgcaaaagtttttcttgtagagaatgacaatgttaatattgctttatgaattaacagtctgttcttccagagtccagagacattgttaataaagacaatgaatcatgaccgaaag

SEQ ID NO: 179094 - DNA, 1869 bp, Homo sapiens
  Payload ID: 15302
  Gene Symbol: SOSTDC1
  Gene Name: sclerostin domain containing 1
  Uniprot ID: Q6X4U4
  ENST ID: ENST00000307068
  CDS Start-End: 182-802
agggatcccaccccttctctgtgttttcactctgaagctctacacaactttacacctgaatgaacgccaaacctctatggatatataaagggaagcttgaggaggaatttcacagttacagtgcagaagcagaagcaaaagaattaaccagctcttcagtcaagcaaatcctctactcaccatgcttcctcctgccattcatttctatctccttccccttgcatgcatcctaatgaaaagctgtttggcttttaaaaatgatgccacagaaatcctttattcacatgtggttaaacctgttccagcacaccccagcagcaacagcacgttgaatcaagccagaaatggaggcaggcatttcagtaacactggactggatcggaacactcgggttcaagtgggttgccgggaactgcgttccaccaaatacatctctgatggccagtgcaccagcatcagccctctgaaggagctggtgtgtgctggcgagtgcttgcccctgccagtgctccctaactggattggaggaggctatggaacaaagtactggagcaggaggagctcccaggagtggcggtgtgtcaatgacaaaacccgtacccagagaatccagctgcagtgccaagatggcagcacacgcacctacaaaatcacagtagtcactgcctgcaagtgcaagaggtacacccggcagcacaacgagtccagtcacaactttgagagcatgtcacctgccaagccagtccagcatcacagagagcggaaaagagccagcaaatccagcaagcacagcatgagttagaactcagactcccataactagacttactagtaaccatctgctttacagatttgattgcttggaagactcaagcctgccactgctgttttctcacttgaaagtatatgctttctgctttgatcaaacccagcaagctgtcttaagtatcaggaccttctttgggaatagtttttccttttcaagtttttcaagatgtaggtatatccatgaatgcaatttgcatttaaattccacgtatcctgtagttttaattcctcattgttcttaaaagactgttgatactataaacatcagtgaatcattatattttaaaacagaaaagggcttctcagataccctccatctactggcccatcccctctcctaaacaaaactccttcaaaacaggttaaaaaaaatatgttgtcatgaatcttcacagtaacatttcagaaaggtgcttttttggtactcttcatgggaacagtttagcagccatgagtgatcttcctttgaaagagaatgaaagaccctgtgacatttcacttcaaaaataagccctgtagctctttacggtcgcatagtatgaaattataccctgcatgctgaccctcgcttggaatggaatgccagaaatgcatggcagcagctaataagtaaagctgattaactatttatttgtcaatgttattatttaatgagctttcacatgtgatttgtttcaaaactttaattttttaatgttttgaaactttttcatggacctaaatattttcctatatgatttgtggttgattagaaatatgaaatacatgttgtagatatgtaaaatgaatattttagtctccttattacatatatgttcatggtgaactttatcaatagtatggatctttttaaatcaataagatgctttgtaaagttgaaataagtaatactttcttgtttaatctgtgcaatcagaaggtgtcttgaccttcaattcaattggtttcttttaacaaaaataaacactgctaaaagttattgttgttgcctctaacatgtataaagggtgcaaaaattgtagaataaatgtataagggtaa

SEQ ID NO: 179095 - DNA, 2411 bp, Homo sapiens
  Payload ID: 15302
  Gene Symbol: SOSTDC1
  Gene Name: sclerostin domain containing 1
  Uniprot ID: Q6X4U4
  ENST ID: ENST00000396652
  CDS Start-End: 714-1406
aaaatatagagaagtggtctgatggttaattttatatataaatttgactggactaggggatgcccagaagctggtaaaacattatttatgggtgtgtttctgaggatgtttttggaagagattagcattagtattagtggactgagtaaacaagatcaccctcgccaacaggggtggatattatccaatccactgagggccccaatagaacagaaaaacagaggaatgtgaattcatgcttgcttctggagttaggacatccatcttctgccttcagacatcagcattcctagttctcaggtctctgggcttggactaaactacattactggctctctcctgggctccagattgcagacagcagattgtgggacttctcagcctccgtaatcaatcctgtcttggaacctgcttcttagagggcctggactaacatactctggtagtgcatgaagcatctgtgatcacagcgtgacaagaaaatagcacaaacaaacctatgaggacttgagagaattcaaaagggtcatgtagggatcccaccccttctctgtgttttcactctgaagctctacacaactttacacctgaatgaacgccaaacctctatggatatataaagggaagcttgaggaggaatttcacagttacagtgcagaagcagaagcaaaagaattaaccagctcttcagtcaagcaaatcctctactcaccatgcttcctcctgccattcatttctatctccttccccttgcatgcatcctaatgaaaagctgtttggcttttaaaaatgatgccacagaaatcctttattcacatgtggttaaacctgttccagcacaccccagcagcaacagcacgttgaatcaagccagaaatggaggcaggcatttcagtaacactggactggatcggaacagaacagaaagcttgacgagacaaaattatttctggctatttccaggtgcattcctgaggcagctgcaggaagctcgggttcaagtgggttgccgggaactgcgttccaccaaatacatctctgatggccagtgcaccagcatcagccctctgaaggagctggtgtgtgctggcgagtgcttgcccctgccagtgctccctaactggattggaggaggctatggaacaaagtactggagcaggaggagctcccaggagtggcggtgtgtcaatgacaaaacccgtacccagagaatccagctgcagtgccaagatggcagcacacgcacctacaaaatcacagtagtcactgcctgcaagtgcaagaggtacacccggcagcacaacgagtccagtcacaactttgagagcatgtcacctgccaagccagtccagcatcacagagagcggaaaagagccagcaaatccagcaagcacagcatgagttagaactcagactcccataactagacttactagtaaccatctgctttacagatttgattgcttggaagactcaagcctgccactgctgttttctcacttgaaagtatatgctttctgctttgatcaaacccagcaagctgtcttaagtatcaggaccttctttgggaatagtttttccttttcaagtttttcaagatgtaggtatatccatgaatgcaatttgcatttaaattccacgtatcctgtagttttaattcctcattgttcttaaaagactgttgatactataaacatcagtgaatcattatattttaaaacagaaaagggcttctcagataccctccatctactggcccatcccctctcctaaacaaaactccttcaaaacaggttaaaaaaaatatgttgtcatgaatcttcacagtaacatttcagaaaggtgcttttttggtactcttcatgggaacagtttagcagccatgagtgatcttcctttgaaagagaatgaaagaccctgtgacatttcacttcaaaaataagccctgtagctctttacggtcgcatagtatgaaattataccctgcatgctgaccctcgcttggaatggaatgccagaaatgcatggcagcagctaataagtaaagctgattaactatttatttgtcaatgttattatttaatgagctttcacatgtgatttgtttcaaaactttaattttttaatgttttgaaactttttcatggacctaaatattttcctatatgatttgtggttgattagaaatatgaaatacatgttgtagatatgtaaaatgaatattttagtctccttattacatatatgttcatggtgaactttatcaatagtatggatctttttaaatcaataagatgctttgtaaagttgaaataagtaatactttcttgtttaatctgtgcaatcagaaggtgtcttgaccttcaattcaattggtttcttttaacaaaaataaacactgctaaaagtta

SEQ ID NO: 179096 - DNA, 4548 bp, Homo sapiens
  Payload ID: 15303
  Gene Symbol: SFMBT1
  Gene Name: Scm-like with four mbt domains 1
  Uniprot ID: Q9UHJ3
  ENST ID: ENST00000394752
  CDS Start-End: 384-2984
ggaatgagtcggagcgcggagcgccgccgccgcctccgccggagcgcgggtggaggggggcggggagagctgccggccgccccgctccgccgaacccagcaggaaggagggcgcgagcgggcgagcgcgggcagcacgggaggaaaaagcttccgcgcgggggagcgaaaagacggaaagaaagaaagaaaacgagcgcgagagggggaaaagcgagcgatcgagcgagcgcgcgcgcgaaaactccgggcagcactttcatttggacccgtggatacccattgaacagatgcttgaaacctgcaagtaatcttcagatcctagcagaaccataggcctttcctttgttttgggaggatatagcctgcctatatgctgtggaaatgaacggggagcagcagcttgatgcagatgccggctctggtatggaagaggtagaattaagctgggaagattatctagaagaaacagggtccacagcagttccctatgggtcttttaaacatgtggacacacgtttgcaaaatggatttgctcctgggatgaagctggaggtggctgtgagaacagatcctgagacctactgggttgccaccgttatcactacctgtgagcagttgctccttctccgctatgatggctatggggaggatcggagagcagatttctggtgtgacatcaggaaggctgatctctaccccattgggtggtgtgagcagaataagaagacccttgaagccccagaaggcatcagagataaagtatctgactgggatgagtttctgcggcagaccctgataggagcatgtagtcctcctgttccgctgctagagggcctccgtaatgggaggaatcctttagatctcattgctccaggatccagactagaatgtcaagctttccaggactctttaagcacttggattgttactgtagtagaaaacattggaggaaggctgaagctacgttatgaaggacttgaaagttctgacaattatgaacattggttgtattacttggatccatttcttcatcacgttggttgggctgctcaacagggatatgagcttcagcccccttcagccattagacatctaaaaaatgaagctgagtggcaagagattttggccaaagtgaaagaggaagaggaagagccattaccatcttacttatttaaggacaaacaagttattggcattcatacattctctgtaaacatgaaattggaagctgtagacccctggtctccttttgggatctctcctgctacagttgttaaggtttttgatgagaagtactttctggtggaaatggatgacttgcgtcctgagaaccacgcacggcgatcctttgtgtgccacgccgacagtcctggcatcttccctgtgcagtggagtctgaagaatggcctacacatcagcccccctccaggctacccaagccaggactttgactgggctgactacctcaaacagtgtggtgctgaagctgctccccagaggtgcttccctccgttaatttctgaacatgaatttaaggagaacatgaagctcgaggcggtgaaccccattctccctgaagaagtgtgtgttgctaccatcactgcagtgagaggctcctacctgtggctccagctggagggttctaagaagcctatacctgaatgtattgtgagtgtggaatccatggatatatttcctttgggctggtgtgaaaccaacggccaccccctcagcactcctcgccgagcacgagtatataaacagaggaaaattgcagtggttcagccagaaaaacaagtaccatcctcgaggactgtccacgagggcctgaggaatcaggagctgaactccacagagtcagttatgattaatggaaaatattgctgtccaaagatatacttcaaccaccgttgcttctcagggccatatcttaacaaaggaagaattgctgagctgcctcaatgtgtaggacctgggaactgtgttctggtccttagagaggtcctcactttacttatcaatgcagcctacaaacccagccgtgtccttcgggagctccagctggacaaagactctgtgtggcacggatgtggggaagtcctaaaagccaaatataaaggaaagagttatcgggctactgttgagatagtgaaaacagcagatcgggtgactgaattctgccggcaaacctgtatcaaactggaatgctgtcctaacctcttcggtccacggatggttctggataagtgttctgagaactgttctgtacttacaaagaccaaatacacacactattacggaaagaagaaaaataaaagaattgggaggccacctggtgggcatagtaacttagcttgtgccctgaaaaaagccagtaagaggagaaagaggcggaaaaatgtttttgttcataagaagaaacgctcctctgcatctgttgataataccccagcgggctctccccagggaagtgggggtgaagatgaggatgacccagatgaaggggatgatgattccctaagtgaaggcagtacatccgagcagcaggatgagctacaggaagaatcagaaatgtcagaaaaaaagtcatgctcctcttctcccacccaaagtgagatatccacatcgctgcctccagatagacaaaggagaaaaagggagcttcgcaccttttcattttctgacgatgaaaataaacctccttcaccaaaggaaataaggatcgaagttgctgaaaggcttcacctggacagtaaccccttgaagtggagtgtggcagacgttgtgcggttcatcagatccactgactgtgctccattagcaagaatattcctagaccaggaaattgatgggcaggccctgttgctccttacccttcccactgttcaagaatgcatggacttaaaattgggccctgccatcaaactttgccatcacatagagaggatcaagtttgctttttatgagcagtttgccaactgagaaggacaaccaaagtgagctggatctttgaagcacaaatgcagcaaatccttcaccctgctttataagtggagctggaatagtcctggggctctggggcctgcaggtatcagcttgctctctttgcactttcggggaaggaggactcacagtgaggaagcaaaaactgtgcacagaagtggatcacctgctggtggaaatgtggacatctcttgttcagcagatggcagtttttaaaaaataaaggttgtgaggaaaagacttatataagaagaaaagcatttccagtggtgtggcctgaaaacaaagaataacctaggctgctggaaagcacccttttggttgttttcattctgttccctcccattgtagattgaactttgttctctgctttctttttcttggaaagagaggacttagctttaagtcagcactgatttgggactgttcctaaggcatatcagtgcttcattgtcattgtgtttttaaactttttaaaattaaaacagttcattttggggatgattatgtggctctagggttttgaatgtatagtcacactttgatcattttaaaatcgattcttaggagttcctttgtttactacctctgttgataattgagcttacagccatgtatgaggttttttgtatgatgccatttttaagctacataaacactaaaattatgacagaatttggagggggggaaactgtttgctttcttaaaaacattatatggggcacttacaccagttccttaactgacctgatctgagaactctactgttactgttctccatcttgacccagccgaggctgcctgtgttaagtaacatcaccaagactgttagtatttctgtttaattgccctcttcctattcattctcagagggacttcagtgacttttattttgtgtttacttttctctagagttgtttgtctacctctgtttcatttctaaggtctttactttgggtgaaaatcagtaagtgttccatggacccacagcgaagcccatttgtccttctttccaggtgtctccagtgtagaagcacagcacagaaaacatgttttggagggtaacgcagagcatggagtttctgttagcagtgtcctcagtggcaggataaatactgagatgtggttaaggattctggaaacctctttgcctagccacacttagacttttttcagctaatcctttaaattgaatataatctttagtccgaggattcccatttaaacaactcagtattcttttaagtgtgtcttttagcccagctcaagttaacatgaaactccaggtgaattttcacttactattccattgctagctattatagaataatagcgtttgctgcactattctagtcatgaggagtgaggaaaaacatacataggttgtctcccttaaatggtttgctttgctgaattttttttatcctaatcacctgcaaatttataacccaatcattcttcctcaagatttgaaaatgttttaatcctgcaaactgggtgaattctaaacagctctacaaatataaggaaatattacagcaaa

SEQ ID NO: 179097 - DNA, 850 bp, Homo sapiens
  Payload ID: 15303
  Gene Symbol: SFMBT1
  Gene Name: Scm-like with four mbt domains 1
  ENST ID: ENST00000482396
  CDS Start-End: 487-850
cggagcgccgccgccgcctccgccggagcgcgggtggaggggggcggggagagctgccggccgccccgctccgccgaacccagcaggaaggagggcgcgagcgggcgagcgcgggcagcacgggaggaaaaagcttccgcgcgggggagcgaaaagacggaaagaaagaaagaaaacgagcgcgagagggggaaaagcgagcgatcgagcgagcgcgcgcgcgaaaactccgggcaggaaggtggacttttaaatattctccactgaagcaaatgctgcaacaatttgcatttccttcaccaatgtcgtcttgtgccttttcttgttcctactgtaaaggagatgggttagatgttcactttcatttggacccgtggatacccattgaacagatgcttgaaacctgcaagtaatcttcagatcctagcagaaccataggcctttcctttgttttgggaggatatagcctgcctatatgctgtggaaatgaacggggagcagcagcttgatgcagatgccggctctggtatggaagaggtagaattaagctgggaagattatctagaagaaacagggtccacagcagttccctatgggtcttttaaacatgtggacacacgtttgcaaaatggatttgctcctgggatgaagctggaggtggctgtgagaacagatcctgagacctactgggttgccaccgttatcactacctgtgagcagttgctccttctccgctatgatggctatggggaggatcggagagcagatttctggtgtgacatcaggaaggctgatctctaccccattgggtggtgtgagcagaataagaagacccttgaagccccagaag

SEQ ID NO: 179098 - DNA, 617 bp, Homo sapiens
  Payload ID: 15303
  Gene Symbol: SFMBT1
  Gene Name: Scm-like with four mbt domains 1
  ENST ID: ENST00000483069
  CDS Start-End: 335-617
cgatccccgacgaggggcaggcaaacgggcgcagtgcccgcggcggcggcacgcgcgcatctgggatccggccgcttctccgctcatgccatcttgtccgagccagtcacgtgcgggcgacagcggcgcgcttcgccgggccggtactccaggtccgacccgcgaacccctctgggatccccgccgctctgtctacaacccgagcactttcatttggacccgtggatacccattgaacagatgcttgaaacctgcaagtaatcttcagatcctagcagaaccataggcctttcctttgttttgggaggatatagcctgcctatatgctgtggaaatgaacggggagcagcagcttgatgcagatgccggctctggtatggaagaggtagaattaagctgggaagattatctagaagaaacagggtccacagcagttccctatgggtcttttaaacatgtggacacacgtttgcaaaatggatttgctcctgggatgaagctggaggtggctgtgagaacagatcctgagacctactgggttgccaccgttatcactacctgtgagcagttgctccttctccgctatgatggctatggggaggatcggagagcagatt

SEQ ID NO: 179099 - DNA, 699 bp, Homo sapiens
  Payload ID: 15303
  Gene Symbol: SFMBT1
  Gene Name: Scm-like with four mbt domains 1
  ENST ID: ENST00000497586
  CDS Start-End: 549-699
aaacgggcgcagtgcccgcggcggcggcacgcgcgcatctgggatccggccgcttctccgctcatgccatcttgtccgagccagtcacgtgcgggcgacagcggcgcgcttcgccgggccggtactccaggtccgacccgcgaacccctctgggatccccgccgctctgtctacaacccgagaaacgaagtctcactgtgttgtccaggctggtctcaagctcctgggctcaagcaatacttccacctcagcctcccaaaatgctgggattacagatggagtcttgctctgtcgcccaggctggagtgcagtgatgcgatctcggctcactgcaacctccacctcccctggttcaagtgattctcctgcctcagcctcccaagtagctgggactacaagcccgtgccaccatgcccagcactttcatttggacccgtggatacccattgaacagatgcttgaaacctgcaagtaatcttcagatcctagcagaaccataggcctttcctttgttttgggaggatatagcctgcctatatgctgtggaaatgaacggggagcagcagcttgatgcagatgccggctctggtatggaagaggtagaattaagctgggaagattatctagaagaaacagggtccacagcagttccctatgggtcttttaaacatgtggacacacgtttgcaaaatggatttg

SEQ ID NO: 179100 - DNA, 7922 bp, Homo sapiens
  Payload ID: 15304
  Gene Symbol: SFMBT2
  Gene Name: Scm-like with four mbt domains 2
  Uniprot ID: Q5VUG0
  ENST ID: ENST00000361972
  CDS Start-End: 92-2776
cgccttgtgtgtgctggatcctgcgcgggtagatccccgagtaattttttctgcaggatgaattaagagaagagacacttgctcatcaggcatggagagcactttgtcagcttccaatatgcaagacccttcatcttcacccttggaaaagtgtctcggctcagctaatggaaatggagaccttgattctgaagaaggctcaagcttggaggaaactggctttaactggggagaatatttggaagagacaggagcaagtgctgctccccacacatcattcaaacacgttgaaatcagcattcagagcaacttccagccaggaatgaaattggaagtggctaataagaacaacccggacacgtactgggtggccacgatcattaccacgtgcgggcagctgctgcttctgcgctactgcggttacggggaggaccgcagggccgacttctggtgtgacgtagtcatcgcggatttgcaccccgtggggtggtgcacacagaacaacaaggtgttgatgccgccggacgcaatcaaagagaagtacacagactggacagaatttctcatacgtgacttgactggttcgaggacagcacccgccaacctcctggaaggtcctctgcgagggaaaggccctatagacctcattacagttggttccttaatagaacttcaggattcccagaacccttttcagtactggatagttagtgtgattgaaaatgttggaggaagattacgccttcgctatgtgggattggaggacactgaatcctatgaccagtggttgttttacttggattacagacttcgaccagttggttggtgtcaagagaataaatacagaatggacccaccttcagaaatctatcctttgaagatggcctctgaatggaaatgtactctggaaaaatcccttattgatgctgccaaatttcctcttccaatggaagtgtttaaggatcacgcagatttgcgaagccatttcttcacagttgggatgaagcttgagacagtgaatatgtgcgagcccttttacatctctcctgcgtcggtgactaaggtttttaacaatcacttttttcaagtgactattgatgacctaagacctgaaccaagtaaactgtcaatgctgtgccatgcagattctttggggattttgccagtacagtggtgccttaaaaatggagtcagcctcactcctcccaaaggttactctggccaggacttcgactgggcagattatcacaagcagcatggggcgcaggaagcccctcccttctgcttccgaaatacatcattcagtcgaggtttcacaaagaacatgaaacttgaagctgtgaaccccaggaatccaggagaactgtgtgtggcctccgttgtgagtgtgaaggggcggctaatgtggcttcacctggaagggctgcagactcctgttccagaggtcattgttgatgtggaatccatggacatcttcccagtgggctggtgtgaagccaattcttatcctttgactgcaccacacaaaacagtctcacaaaagaagagaaagattgcagtcgtgcaaccagagaaacaattgccgcccacagtgcctgttaagaaaatacctcatgacctttgtttattccctcacctggacaccacaggaaccgtcaacgggaaatactgctgtcctcagctcttcatcaaccacaggtgtttctcaggcccttacctgaacaaaggaaggattgcagagctacctcagtcggtgggaccgggcaaatgcgtgctggttcttaaagaggttcttagcatgataatcaacgcagcctacaagcctggaagggtattaagagaattacagctggtagaagatccccactggaatttccaggaagagacgctgaaggccaaatacagaggcaaaacatacagggctgtggtcaaaatcgtacggacatctgaccaagtcgcaaatttctgccgccgagtctgtgccaagctagagtgctgtccaaatttgtttagtcctgtgctgatatctgaaaactgcccagagaactgctccattcataccaaaaccaaatacacctattactatggaaagagaaagaagatctccaagccccccatcggggaaagcaaccccgacagcggacaccccaaacccgccaggcggaggaagcgacggaaatccattttcgtgcagaagaaacggaggtcttctgccgtggacttcaccgcgggctcgggggaggaaagtgaagaggaggacgctgacgccatggacgatgacaccgccagtgaggagaccggctccgagctccgggatgaccagacggacacctcgtcggcggaggtgccctcggcccggccccggagggccgtcaccctgcggagcggctcagagcccgtgcgccggccacccccagagaggacacgaaggggccgcggggcgccggctgcctcctcagcagaggaaggggagaagtgcccgccgaccaagcccgaggggacagaggacacgaaacaggaggaggaggagagactggttctggagagcaacccgttggagtggacggtcaccgacgtggtgaggttcattaagctgacagactgtgcccccttggccaagatatttcaggagcaggatattgacggccaagcactcctgcttctgacccttccgacggtgcaggagtgcatggagctgaagctggggcctgccatcaagttatgccaccagatcgagagagtcaaagtggctttctacgcccagtacgccaactgagtctgccctcgggaggtggcccattattgctgggatgcggtgttggtaaaggtttccaggactgaaactttgattttccgggatatgttaaatggtacagccactaagtatcaccagaaaaccagaagcccaggatcttctgcctccgccagcctgtgagctgtttccatgttttcaaagcacagcagcagtcgcttctggggagtgccagttaaagtcatgcatcagaccctgccagacgtgggcctgcttcttggctcacccacgttttgcctttctcctgccccaaatcaggcagctcccttggagcagggtttcctcagatgaggactgcattctttgaaaacaaagaatgtcgccaaggaagaaacctcacgccatgctgtagtgtttcctgtaatcacacgagcacatttatatatgcagtttcccatggataggcgtgtgaccctggttgagtggcacttgcggtttcatcttggtggcaactcctttgcaatgcagctggcagcgacatccttataaaaacatgtgctaaagctctgtcctctgttagaggtgccttttaggaatacggggagtgaaggaaggccggcaggcatctccatgcaactagatggtttgtttgtttgtttgtttgtttgttgttcattttgttgtgttttttgagacagggtcttgctctgtcgcccaggttgtaatgcagtggcgcaatctcagctcactgcaacctctctctcccgggttcaagtgattctcctgcctcagcctcccaagtagctgggattacaggcacccaccaccatgcctggctaatttttgtatttttggtagagacagggtttcaccatgttggtcaggctagtcttgaactcccaacctcaagtgatctgcccgcctcggcctcccaacgtgctgggattacaggtgtgagccactacgccccggcccaactggatggtttttgattgaagcctagaacatctgtagagacaaactctacccagtcttttctagaccctcaactatctccagtgttgttgtttaatcgtagccggatcagggagtgagtcttttaggcaaatgttggattatatatcaaaggaaaagcttagtttcagagaggaggaagggaaagagatgtgagggaagcatttcatcaaccagctacgtcccccttagaaggatcactgcagcaggtcaccgagcaggagtccctctgagcgtcccttctgtctcgttctgccctagctggcagcatatgaaccaggcatgatgcagcaggagcagtgaatctggagtcagccacttggcaccctggtttcgctgagaacaaactctgagatcttgggtgacttctcatcactctggacctccattcctgtgaagtgacaggtgtggaccctgagggtgcggtggtgagcacactgtctcctgctggcattcaccccactcatgctggaaaggaagatccagatcgtacaaaaattagaaaaagaaagaataagaagggtctggtcccagttctgactcggccattcttacagctctttctggctttgagtttgcttgtggaatttcctgggcagttgtgttaaatccgccaggtcacgtgcagacaaagctgtggctgcgagagttggctggcctcttggaccagaagccatctccatatcctcatgagcgattccatatctccactcagaccctgtggactacagtgttccgctgtggtggctgccaagatgccttcttaaacttatgcaaggaaaccaaaccctcccacagttcccaagcagacactggaagcagaggcttctcacccttcctgctttttcaccacaatcaccttgagctcgtcccttggactagagtctccacagttccagtaaaattctgcggtgggctgatgagctgcttgcatttctgtgacatttccagatatgattctcagtgggattttggaaactttgattgctcaagctcacccttcttaacattctgtaatggttacagatgagaatggaaaacacatattttatggatgaggcgttttggtctcccctgcagtcgatttctagaatcaagttttagagttcggctgatgcatctgcctggggacctcagatgggaggagtgtgtcagttgtaccccgacagaaatgtctctgggatctgtggctggcttgccccgggcatctctcctttaagctcaagttttgaactctctgcggttttccacccctgccttctcagccacatgcttttggccttaaacgctcagtcttgtggagttcaactctgtcaaacgattggaaagggcatccatttccagatctttggcattttccccgcgctgactctttgatgatccttcactgtggccttttcaagctcagctgttcctgttgtatttgagacgagggtgagggaatgtggtggccacaaaagaacagggacttgcagcacaaatgtcacttctgtctcccttttcagtggtagcacggaggaggaggtgctgcgttggagggaggggatcctccaggagctctctggagcccatctaggaagctagagtgtgtggcccgccaggagctcaggaaggatacagccactgtcgcaggggaaagtgtttgcttcccgtggagccaagcgcccaagactctccgtatccttcaccctgacagtttaacttcagcgtttctctgtgcagttgcggtcaccatgggtgagcactgtctgtgcacgtgccagggaggagatggctgggaccactgcacaggagggcgcagcctggcgtcgccatgaaagttgtctctgtgccatctctccggtccttgaggagagcccagaaagattttaggacccaggaggtgcttttcctccagctgttgccagtgtccttctgagcctggattctccggggatttccgtcgtggtggatggacttcacatcagcagcagttctggtacagaattgtaatgtgttttcatttctctgtaggattcacctctcaccagcgtctgtcttaaaggtagggccaatttcatggagcatttttctgtgtgtgtccttgttgcttttgccagaaaaagtggatttgacatgcgtgccccgatgccaccatagcccctaggccaacaatgtcatggtctaaacaccaaaaagtgatgccccgcattccttccctggatggtaccgtttcttctccgtctctctttgatgattctttgggaccaaagtcctctccttagtgcgcctacttcctgtgggcatcatgccacttggaacttattggaactggcccgggagactctgcagtctgcgccgtttgaaaaccctgagaaagagatgccacctcaacttgaatcatgacagcccatcgctcagtctcaccctaaactcatggagcttgtttcagctcctcacttcttgactgtatttgtactatgttgaaaaaatatcctgtccacaaagacataagcctaacaacctagaaaaacaacagggtactactggcattacagaacttctttgcctttcaaaacaaaagcaaaacacagtgaacttcaccacggagctgcacagcgtggggaactcatccatcactttcaaaattagagtcatttgatccaagttggagtcagacacagtatttgagctgcacggcttctgggttctcccaccttatttgatcatattcgaaagattatttcctgtgtttgctttgatttgttcctcagtacattaaaatgatccacaccttgaacactgccctctctagaaggttgattttgatcagccttttgaagatgggtgtcgtttccctaacttatctcacagaattttgagtgttgtatttggcaagttctgagatttgccttctgtcttatgccaaacacccctttctaagagctgtccccgcttagttttagaagtactaggggttttcatacttattttatagaacacccatttatatttatttctgtatatagaactaaaaaaaacagtagtgttaaaaatctttgttgtggtttgagcatctttgctgcttttggattgagatggcgaatcaaggcttcacttcctctctcttctgtctttagaaagctgtgatcgtgcgtgcaattatttgaaaggcaacatagtcaattaagaaacctgtagttgttaaggaagaaattgttggcaagatatccatactgcccatatctcgttggtgcaataattaaatagcaaaggaaatctgtattggcaactattataattcaataattcttttgtttactgcccttttctgttcaagaattttctggaaattactccctttcacatggttgaactcttaagttgaccagttctcatagctctatcactagaatggtttgcagataccccaaacatactatgataaaatcaaattgtgctacttttgacccatgtaatttacctaaaagttgtaattgctgacagagtactgccttgaattttggtttaaaacctctctagtttcaatgacaagtaacaactcaaataattccatattgtttgaggaagaggccataatccttctgaattgttggcactaagtaatgggatttggcccagtaagtatgacggtcgtgtcgcctaaccaacgcagagcagtgctttttgtgtggctgaagcgatgtgctgacgaaaaaaggaaaattctaggacaatcgttggctaaaaatcaccttaggatgaaaaatttgaggcaaatttttttaaatgacagaaaaagataatcatctcacttgcttgaaacaggagccagcatgatctctggaagcatcaactatccctcgtcgtgattgttgaaagctctttcactgttttgcattctagtttgaatagtttgtattgaaattggattcctatcttgtgtatgtttttggtgcgtaaaagggaaaaattggtgtcattacttttgaaatttgcaggacgaagggcatgcttttggtttgctgtaagattgtattctgtatatatgttttcatgtaaataaatgaaaatctatatcagagttatattttaatttttattctaaatgaaaaaaaccctttttacttcaaaaaaattgtaagccacattgttaataaagtaaaaataaattcta

SEQ ID NO: 179101 - DNA, 692 bp, Homo sapiens
  Payload ID: 15304
  Gene Symbol: SFMBT2
  Gene Name: Scm-like with four mbt domains 2
  ENST ID: ENST00000379711
  CDS Start-End: 65-547
aacgcgagctcgggtaattttttctgcaggatgaattaagagaagagacacttgctcatcaggcatggagagcactttgtcagcttccaatatgcaagacccttcatcttcacccttggaaaagtgtctcggctcagctaatggaaatggagaccttgattctgaagaaggctcaagcttggaggaaactggctttaactggggagaatatttggaagagacaggagcaagtgctgctccccacacatcattcaaacacgttgaaatcagcattcagagcaacttccagccaggaatgaaattggaagtggctaataagaacaacccggacacgtactgggtggccacgatcattaccacgtgcgggcagctgctgcttctgcgctactgcggttacggggaggaccgcagggccgacttctggtgtgacgtagtcatcgcggatttgcaccccgtggggtggtgcacacagaacaacaaggtgttgatgccgccggacgtagagagtgatgtcaagccatcagcttctgttcaacatatttcttagaaaaggatgtctcaaaacttcttcgagaccgtcacgaaatgaaacaactccccgatcccacacgaacctctcccaccaccctcaaacataaaccaacccaaaccctttgaaaagctccaaagaaaataaaatgtttttagaactt

SEQ ID NO: 179102 - DNA, 2402 bp, Homo sapiens
  Payload ID: 15304
  Gene Symbol: SFMBT2
  Gene Name: Scm-like with four mbt domains 2
  ENST ID: ENST00000379713
  CDS Start-End: 194-754
aaagcgcaagtttgtgcacacggtcgactgagccattggaaacccagctcacgaaccgcagccagggaaacgggagtttgcccagttgtccttgcggaggggtgtgcggaaacgcccgcgatgggaactttctgcagatcatgtaattttttctgcaggatgaattaagagaagagacacttgctcatcaggcatggagagcactttgtcagcttccaatatgcaagacccttcatcttcacccttggaaaagtgtctcggctcagctaatggaaatggagaccttgattctgaagaaggctcaagcttggaggaaactggctttaactggggagaatatttggaagagacaggagcaagtgctgctccccacacatcattcaaacacgttgaaatcagcattcagagcaacttccagccaggaatgaaattggaagtggctaataagaacaacccggacacgtactgggtggccacgatcattaccacgtgcgggcagctgctgcttctgcgctactgcggttacggggaggaccgcagggccgacttctggtgtgacgtagtcatcgcggatttgcaccccgtggggtggtgcacacagaacaacaaggtgttgatgccgccggacgcaatcaaagagaagtacacagactggacagaatttctcatacgtgacttgactggttcgaggacagcacccgccaacctcctggaaggtgtatgtattgttgttatacatctaatgtatctctgaagcaccccagttacgtgagctcagacctgacagcacctttgcatatatccttcagcagatgcgtgctttctgcagacactgccatccaaatagcctcccttcctcttttgtcctgaattacttaggtgactgatttgaatggcattgatgaaacttcccctgtgatgcaatcagcaaatggaaaatttgctctatgtgaatccaatttttaaatcacaatatgctaggatgtcttcctactgtcctatatctttaagcctctttcctatgtgagtgaatataaatcaaatcctgtagaatcactgttttgaacaggtgacaagatcatgtatgtgctaatatagtctcttggagtacattgataagtcgttccattaaatgttctattttgacgcataaccccaagatttgaacatacacacgttaaccaataattgaattaacttctcttgtaaaaacaagaggagaaatggcagatcgtatttcagtgtagccaaggaaattttaatgtattgaagaaaacatagtttaatctgaaatcttgatggtttatttgaaaataattttatgttgaaacatcttagtatgtatatgtagtatttgtatttgtataatggaacaggaagagaaaggcactgtgtcataagtaattattgaattacctagtctgtttttcttaagaatgcccctaaaaaggggaaaacttaatgaataacaagtaataaggtgtggattttgacagtatcatattctcttaaccttaaactttccctcttttcataaatgatattgacattttagaacgtcatagtctaatatagttaacgggttttgttttgtgaagattttgcctgatgtatttgttatatatcattagagatactattttaattgttcattaacaaatcaaaatgatgatagttcatcctttcaaaaggacaaattgtctcactatgttaattttctaaaacatatttgcctacaaagctggctgaacaaacacccttttcatatgctatcataggctaagaaggtttcttagaaggggcagtaattatacattctgtaaaccaattaccagcttaagtgtagaaataattttacatagtagtctaatttagctgatcattactgtgtgttagacatgtcattgacacacactcatgccttcgtcacataatcaaagtatgagagcattttggtcattagagtagcggccagtagagtaagatgaatgtctgggaaaccgtcatggtgtaaattgaatgctctgtattagaattatctgtctgttggaaaagtagaccgtttgctaccacgttttctaggtccaggcaaatttgggtagaactcttcttaaaagcatactgattgttaacaaaagcaattttatctgggaagggtgatttgtttggtgagaacttagcacaaactgttattttctattgacttgtgatttttttgttgttggatacggaatggggtacatggatgtgtgggagggaggaaagggaaggggtggggcatgggctgggcaaggatggggtggagggaacgccagactgttcgccagtaccttggatgatggtgtgaaaaaatattatcttctgctgtcatctgtttccatgagaaccttaaaataaagttt

SEQ ID NO: 179103 - DNA, 8024 bp, Homo sapiens
  Payload ID: 15304
  Gene Symbol: SFMBT2
  Gene Name: Scm-like with four mbt domains 2
  Uniprot ID: Q5VUG0
  ENST ID: ENST00000397167
  CDS Start-End: 194-2878
aaagcgcaagtttgtgcacacggtcgactgagccattggaaacccagctcacgaaccgcagccagggaaacgggagtttgcccagttgtccttgcggaggggtgtgcggaaacgcccgcgatgggaactttctgcagatcatgtaattttttctgcaggatgaattaagagaagagacacttgctcatcaggcatggagagcactttgtcagcttccaatatgcaagacccttcatcttcacccttggaaaagtgtctcggctcagctaatggaaatggagaccttgattctgaagaaggctcaagcttggaggaaactggctttaactggggagaatatttggaagagacaggagcaagtgctgctccccacacatcattcaaacacgttgaaatcagcattcagagcaacttccagccaggaatgaaattggaagtggctaataagaacaacccggacacgtactgggtggccacgatcattaccacgtgcgggcagctgctgcttctgcgctactgcggttacggggaggaccgcagggccgacttctggtgtgacgtagtcatcgcggatttgcaccccgtggggtggtgcacacagaacaacaaggtgttgatgccgccggacgcaatcaaagagaagtacacagactggacagaatttctcatacgtgacttgactggttcgaggacagcacccgccaacctcctggaaggtcctctgcgagggaaaggccctatagacctcattacagttggttccttaatagaacttcaggattcccagaacccttttcagtactggatagttagtgtgattgaaaatgttggaggaagattacgccttcgctatgtgggattggaggacactgaatcctatgaccagtggttgttttacttggattacagacttcgaccagttggttggtgtcaagagaataaatacagaatggacccaccttcagaaatctatcctttgaagatggcctctgaatggaaatgtactctggaaaaatcccttattgatgctgccaaatttcctcttccaatggaagtgtttaaggatcacgcagatttgcgaagccatttcttcacagttgggatgaagcttgagacagtgaatatgtgcgagcccttttacatctctcctgcgtcggtgactaaggtttttaacaatcacttttttcaagtgactattgatgacctaagacctgaaccaagtaaactgtcaatgctgtgccatgcagattctttggggattttgccagtacagtggtgccttaaaaatggagtcagcctcactcctcccaaaggttactctggccaggacttcgactgggcagattatcacaagcagcatggggcgcaggaagcccctcccttctgcttccgaaatacatcattcagtcgaggtttcacaaagaacatgaaacttgaagctgtgaaccccaggaatccaggagaactgtgtgtggcctccgttgtgagtgtgaaggggcggctaatgtggcttcacctggaagggctgcagactcctgttccagaggtcattgttgatgtggaatccatggacatcttcccagtgggctggtgtgaagccaattcttatcctttgactgcaccacacaaaacagtctcacaaaagaagagaaagattgcagtcgtgcaaccagagaaacaattgccgcccacagtgcctgttaagaaaatacctcatgacctttgtttattccctcacctggacaccacaggaaccgtcaacgggaaatactgctgtcctcagctcttcatcaaccacaggtgtttctcaggcccttacctgaacaaaggaaggattgcagagctacctcagtcggtgggaccgggcaaatgcgtgctggttcttaaagaggttcttagcatgataatcaacgcagcctacaagcctggaagggtattaagagaattacagctggtagaagatccccactggaatttccaggaagagacgctgaaggccaaatacagaggcaaaacatacagggctgtggtcaaaatcgtacggacatctgaccaagtcgcaaatttctgccgccgagtctgtgccaagctagagtgctgtccaaatttgtttagtcctgtgctgatatctgaaaactgcccagagaactgctccattcataccaaaaccaaatacacctattactatggaaagagaaagaagatctccaagccccccatcggggaaagcaaccccgacagcggacaccccaaacccgccaggcggaggaagcgacggaaatccattttcgtgcagaagaaacggaggtcttctgccgtggacttcaccgcgggctcgggggaggaaagtgaagaggaggacgctgacgccatggacgatgacaccgccagtgaggagaccggctccgagctccgggatgaccagacggacacctcgtcggcggaggtgccctcggcccggccccggagggccgtcaccctgcggagcggctcagagcccgtgcgccggccacccccagagaggacacgaaggggccgcggggcgccggctgcctcctcagcagaggaaggggagaagtgcccgccgaccaagcccgaggggacagaggacacgaaacaggaggaggaggagagactggttctggagagcaacccgttggagtggacggtcaccgacgtggtgaggttcattaagctgacagactgtgcccccttggccaagatatttcaggagcaggatattgacggccaagcactcctgcttctgacccttccgacggtgcaggagtgcatggagctgaagctggggcctgccatcaagttatgccaccagatcgagagagtcaaagtggctttctacgcccagtacgccaactgagtctgccctcgggaggtggcccattattgctgggatgcggtgttggtaaaggtttccaggactgaaactttgattttccgggatatgttaaatggtacagccactaagtatcaccagaaaaccagaagcccaggatcttctgcctccgccagcctgtgagctgtttccatgttttcaaagcacagcagcagtcgcttctggggagtgccagttaaagtcatgcatcagaccctgccagacgtgggcctgcttcttggctcacccacgttttgcctttctcctgccccaaatcaggcagctcccttggagcagggtttcctcagatgaggactgcattctttgaaaacaaagaatgtcgccaaggaagaaacctcacgccatgctgtagtgtttcctgtaatcacacgagcacatttatatatgcagtttcccatggataggcgtgtgaccctggttgagtggcacttgcggtttcatcttggtggcaactcctttgcaatgcagctggcagcgacatccttataaaaacatgtgctaaagctctgtcctctgttagaggtgccttttaggaatacggggagtgaaggaaggccggcaggcatctccatgcaactagatggtttgtttgtttgtttgtttgtttgttgttcattttgttgtgttttttgagacagggtcttgctctgtcgcccaggttgtaatgcagtggcgcaatctcagctcactgcaacctctctctcccgggttcaagtgattctcctgcctcagcctcccaagtagctgggattacaggcacccaccaccatgcctggctaatttttgtatttttggtagagacagggtttcaccatgttggtcaggctagtcttgaactcccaacctcaagtgatctgcccgcctcggcctcccaacgtgctgggattacaggtgtgagccactacgccccggcccaactggatggtttttgattgaagcctagaacatctgtagagacaaactctacccagtcttttctagaccctcaactatctccagtgttgttgtttaatcgtagccggatcagggagtgagtcttttaggcaaatgttggattatatatcaaaggaaaagcttagtttcagagaggaggaagggaaagagatgtgagggaagcatttcatcaaccagctacgtcccccttagaaggatcactgcagcaggtcaccgagcaggagtccctctgagcgtcccttctgtctcgttctgccctagctggcagcatatgaaccaggcatgatgcagcaggagcagtgaatctggagtcagccacttggcaccctggtttcgctgagaacaaactctgagatcttgggtgacttctcatcactctggacctccattcctgtgaagtgacaggtgtggaccctgagggtgcggtggtgagcacactgtctcctgctggcattcaccccactcatgctggaaaggaagatccagatcgtacaaaaattagaaaaagaaagaataagaagggtctggtcccagttctgactcggccattcttacagctctttctggctttgagtttgcttgtggaatttcctgggcagttgtgttaaatccgccaggtcacgtgcagacaaagctgtggctgcgagagttggctggcctcttggaccagaagccatctccatatcctcatgagcgattccatatctccactcagaccctgtggactacagtgttccgctgtggtggctgccaagatgccttcttaaacttatgcaaggaaaccaaaccctcccacagttcccaagcagacactggaagcagaggcttctcacccttcctgctttttcaccacaatcaccttgagctcgtcccttggactagagtctccacagttccagtaaaattctgcggtgggctgatgagctgcttgcatttctgtgacatttccagatatgattctcagtgggattttggaaactttgattgctcaagctcacccttcttaacattctgtaatggttacagatgagaatggaaaacacatattttatggatgaggcgttttggtctcccctgcagtcgatttctagaatcaagttttagagttcggctgatgcatctgcctggggacctcagatgggaggagtgtgtcagttgtaccccgacagaaatgtctctgggatctgtggctggcttgccccgggcatctctcctttaagctcaagttttgaactctctgcggttttccacccctgccttctcagccacatgcttttggccttaaacgctcagtcttgtggagttcaactctgtcaaacgattggaaagggcatccatttccagatctttggcattttccccgcgctgactctttgatgatccttcactgtggccttttcaagctcagctgttcctgttgtatttgagacgagggtgagggaatgtggtggccacaaaagaacagggacttgcagcacaaatgtcacttctgtctcccttttcagtggtagcacggaggaggaggtgctgcgttggagggaggggatcctccaggagctctctggagcccatctaggaagctagagtgtgtggcccgccaggagctcaggaaggatacagccactgtcgcaggggaaagtgtttgcttcccgtggagccaagcgcccaagactctccgtatccttcaccctgacagtttaacttcagcgtttctctgtgcagttgcggtcaccatgggtgagcactgtctgtgcacgtgccagggaggagatggctgggaccactgcacaggagggcgcagcctggcgtcgccatgaaagttgtctctgtgccatctctccggtccttgaggagagcccagaaagattttaggacccaggaggtgcttttcctccagctgttgccagtgtccttctgagcctggattctccggggatttccgtcgtggtggatggacttcacatcagcagcagttctggtacagaattgtaatgtgttttcatttctctgtaggattcacctctcaccagcgtctgtcttaaaggtagggccaatttcatggagcatttttctgtgtgtgtccttgttgcttttgccagaaaaagtggatttgacatgcgtgccccgatgccaccatagcccctaggccaacaatgtcatggtctaaacaccaaaaagtgatgccccgcattccttccctggatggtaccgtttcttctccgtctctctttgatgattctttgggaccaaagtcctctccttagtgcgcctacttcctgtgggcatcatgccacttggaacttattggaactggcccgggagactctgcagtctgcgccgtttgaaaaccctgagaaagagatgccacctcaacttgaatcatgacagcccatcgctcagtctcaccctaaactcatggagcttgtttcagctcctcacttcttgactgtatttgtactatgttgaaaaaatatcctgtccacaaagacataagcctaacaacctagaaaaacaacagggtactactggcattacagaacttctttgcctttcaaaacaaaagcaaaacacagtgaacttcaccacggagctgcacagcgtggggaactcatccatcactttcaaaattagagtcatttgatccaagttggagtcagacacagtatttgagctgcacggcttctgggttctcccaccttatttgatcatattcgaaagattatttcctgtgtttgctttgatttgttcctcagtacattaaaatgatccacaccttgaacactgccctctctagaaggttgattttgatcagccttttgaagatgggtgtcgtttccctaacttatctcacagaattttgagtgttgtatttggcaagttctgagatttgccttctgtcttatgccaaacacccctttctaagagctgtccccgcttagttttagaagtactaggggttttcatacttattttatagaacacccatttatatttatttctgtatatagaactaaaaaaaacagtagtgttaaaaatctttgttgtggtttgagcatctttgctgcttttggattgagatggcgaatcaaggcttcacttcctctctcttctgtctttagaaagctgtgatcgtgcgtgcaattatttgaaaggcaacatagtcaattaagaaacctgtagttgttaaggaagaaattgttggcaagatatccatactgcccatatctcgttggtgcaataattaaatagcaaaggaaatctgtattggcaactattataattcaataattcttttgtttactgcccttttctgttcaagaattttctggaaattactccctttcacatggttgaactcttaagttgaccagttctcatagctctatcactagaatggtttgcagataccccaaacatactatgataaaatcaaattgtgctacttttgacccatgtaatttacctaaaagttgtaattgctgacagagtactgccttgaattttggtttaaaacctctctagtttcaatgacaagtaacaactcaaataattccatattgtttgaggaagaggccataatccttctgaattgttggcactaagtaatgggatttggcccagtaagtatgacggtcgtgtcgcctaaccaacgcagagcagtgctttttgtgtggctgaagcgatgtgctgacgaaaaaaggaaaattctaggacaatcgttggctaaaaatcaccttaggatgaaaaatttgaggcaaatttttttaaatgacagaaaaagataatcatctcacttgcttgaaacaggagccagcatgatctctggaagcatcaactatccctcgtcgtgattgttgaaagctctttcactgttttgcattctagtttgaatagtttgtattgaaattggattcctatcttgtgtatgtttttggtgcgtaaaagggaaaaattggtgtcattacttttgaaatttgcaggacgaagggcatgcttttggtttgctgtaagattgtattctgtatatatgttttcatgtaaataaatgaaaatctatatcagagttatattttaatttttattctaaatgaaaaaaaccctttttacttcaaaaaaattgtaagccacattgttaataaagtaaaaataaattcta

SEQ ID NO: 179104 - DNA, 9612 bp, Homo sapiens
  Payload ID: 15305
  Gene Symbol: SCO1
  Gene Name: SCO1 cytochrome c oxidase assembly protein
  Uniprot ID: O75880
  ENST ID: ENST00000255390
  CDS Start-End: 62-967
ggaagcggaacgctaccggaaatcgcggggagggtcaaaggagacccggtctccgaggctcatggcgatgctggtcctagtacccggacgagttatgcggcctctgggtggccaactttggcgcttcttgcctcgcggactcgagttttggggcccagccgaggggactgcgagagtcttgctgaggcagttctgcgcgcggcaagcggaggcgtggcgtgcctcggggcgccctggctattgcctgggaacccggcccctcagcactgcgaggccgccacccccgtggtcgcagaagggccccggagactccacgcgcccctcgaagcccgggcctgtttcctggaagtctttagcaatcacatttgctattggaggagctttactggctggaatgaagcacgtcaagaaagaaaaggcagagaagttagagaaggaacggcagcgacacatcggcaagcctttacttgggggaccgttttccctcacaactcatactggggagcgtaaaactgacaaggactacttgggtcagtggttattgatttattttggcttcactcattgccctgatgtctgtccagaagaactagaaaagatgattcaagtcgtggatgaaatagatagcattacaactctgccagatctaactccacttttcatcagcattgacccagagagggacacaaaagaagccatcgcaaattatgtgaaagaattttctcccaaactggttggcttgactggcacgagagaagaggtcgatcaagtggccagagcatacagagtgtattacagccctggccccaaggacgaagatgaagactacatagtggatcacacaataataatgtacttgattggaccagatggtgagtttctagattattttggccagaacaagaggaagggagaaatagctgcttcaattgccacacacatgaggccatacagaaaaaagagctagccaaagcagtgttgctggatgcagtattctcttgctaagaggaaggaaactgtctcgcataggagcctatataaatataaacatatatacgtgcactctacagaatggccttcataccatgagaacatttctgttttggatggggatgttacccttgcgttcaaccaaaattgattcttggaactgtaaagattacaacccaaagtctcccaggaagctgtggggagaccagaggatcaagctgaagtgaagccagtgaagagcccacctgtggaaggacatggcggggcgaggcacagccagtgcattcctgcctgcgaacaggccctcccagcagctttgccgcctctccatcgtcttgggcccttgctcaaatagctgtgggactgaatttcacagaaaagaatataatttccatagtgctcttgcttgcctcttcttgagttctttgctcttctgagttcttggtggctaataacagtcagattagggtctctgccattcagagttgatgcttgaaaactttagttttccttattaatgaatatcactatcagatttgactaatgaagaggaaatctattgtttgggggaaaaaaaacatcagtttgatttctctaggggttcttttatgtgatttttagctaagtggtgtgccaggttttcagtgacataccaaatggaaataagaggatattgatcacgagtgtgatgctgagtacctttctgcatatactggattgtactttgtgtaaagtaaacatactcagttttgctgttcagacaagcgtgatctttttcatgggtgatgagtgggtacatagatggctgcacacagttctcaggaaagagacccacaggctccagcgggcaggtgggtgggacgcttgctgaagtgcagttccccagacccagagctgaattcactgaatctgcagtatgatgcagagacctgcttccatgacagataccccaggtgactcggatgctggcggactgggaccatcccttaagaaagtgttttttggggaaataacttgcctggcacaatggctaatgcctataatcccaaaactttgggaggccagggcctgaggattgctagaggttaggtattcaagacaagcctgggcaacatagtgagaccccccccccccgcccccatctctacagaagatttttttggcatggtggcacatgcctgtagtcctggctactcaggagactgaaatggagtatcacttgagcccaggaattcaaggcttcagtgagctataatcacaccactgcattccagcctgggcaacagagtgagaccctctagatatatctatgtagagatacagaaattaaaatgaatttaaaaataaataaatttgacccttcttttggtgtgtcagccattgaagaaaatgattattgagtgatagaatgaatcttggcttttgtttctaaatttaactgccctagaatcctgggtttggcctttttctgccagaagctgctgccctaggggcaaagttctccaaaagtttttcagtaaatcctaagatgcaacaaatataatgcctagatagacaacagattctttttacatgatatgtttctacacgcacatgatagaggtcttttggtttttaaattctcaatacttaaacctaaatatatcaaagtaaaagtatgtgaaaaaaaactatgctagttataggttgaataatgtcccccaaaatttatacattgaagccctaatctcagtacttcagaatgtgactgtaattggagatagggtctttagagagatagttaaattaaaatgaggctgctaggttggccctaattctatatgactggtgttcttaaaataatagattagctgggcacagtggcttatgcctgtaatcccagcactttgggaggccgaggcgtgcagatcacctaaggtcaggagttcgagaccagcctggccaacatggtgaaacgtcgtctctctcctaaaaatacaaaaattagccgggcatggtagcgggtgcctgtaatctcagttactccggaggctgaggcaggagaatcgcttgaacccaggaggcagaggtggcagtgaggcaagattgcgccatcgtactccagcctgggcgacagagcaagactccgtctcaaaaagaataggagacacagtgagacgaccatgagaagccagagagaaaacagccatcttacaagccaagagagaagttgtgagaaaaaaaaaaaaaaacaaaccctgctgactccttgatttttgccttccaagctccagaactgtgaggaaataaatgtctgttgttttagccaccaaacctggtaaggcagtcctagcaagctaatacaatagcctgttccttaataaacaactgcaagatttagtttatagaaaccagctcggaagcagttggtttagaatgactttcctaggaatctggtcaagaaaggaacttactaaaagactattctcatttaacaaaagagatattaagtatctcaaaggccaaatctttaaaaagattatctgttttaagccacaaaacatttgtgtggatccctttgcagcaagtttgctcttagataagattcagtcttcgttctcagctgttgcaggttaaggcttgtgaaatgatccaaaaagggaacagcagcttttggagaaaacttttatttgttcttcattctagtgtcaagtttaaaggcttgaagtcagaatgttagaagtggggaaggggaccttagaggtgacgtcttccagatgttcctgtttatgcacaaggggacagtctcggagaattaaggcgcaaaactcgggtcccaatttctaggtaggttcctgtttgttctgctgctatcgtgcgcttatggtgactgtgtgaatccaaccaaaacggaggttccgtatgccagtggggcaacgtttttcagctgcaaatcttgggaaatcaaaagcaaggctgttttttttttcttttcttttttgagacagagtttcactcttgttgcccaggctggagtgcaatggcgcaatctcagctcactgcaacctccacctcccaggttcaagcaattctcctgcctcagcctcccaagtagctgggattacaagcatgtgccaccacacccggctaattttgtatttttagtagagactgggtttctctatgttggtcagactggtctcaaactcccgacctcaggtgatccgccgcctcggcctcccaaagtgctgggattacaggtgtgagccaccacgcccggcctcaaggctgtgtttcagtgaaatatcccttgcaaatctttacctgggtgggttacagtgttttcactagactcttcaatagaattaatattttaagaaatgccacttgtttatttgaaaagtataagaatcctatcaatgcagtaggcatgaatgtattcatgtgtctggctgttcatgaagcagctgatatcttaagtgtaagaggtgagatttactgactaccagtaaaatatgcgagttgggaggctaatgattttaaattgtaaatgcgtctgcataagatcctttaaaatagcttttattgttcttaaatttatgtttaaaagaaattgacattaatattttcaaatcatccataatctcccaaaccttttttggttttctgtttagtaccatttaaatctttgtgtatgtgtatatgagctacctttaaaagagcagtcacccatgcgagcatttgttacccaattagtttgtacttttttttggtttttattttgttgttgttatttgtttctttttgagatggagtctcgctcttctcacgcaggctggaatgcaataatggcataatcttggctcactgcaacctccgcctcccaggttcaagcgattctccagcctgagtctcccgagtagctgggattacaggcgcccaccagcacacccagctaaatttttgtatttttagtagagacgggtttctccatgttggtcaggctggtctcgaactctcaacctcaggtgatccgcccgccttggcctcccaaagtgctgggattacacgcgtgagccactgcgcccggcctagtttgtgctttttacttaccagttaggggttatattactgtgtaacaaaatggacggttatttctattcattaacaagattcaagtaatagcctctttagccacatattccttaataacacctttagaccttataggggtaattattttctatatacttttccaatgtatttgaaagtttgttggctcttcttccgtaattatactatatcctcagtaaagaaagtttggcatacagaaaagttgaaggaagaaaattttcaatcactgttgttccactaccaagaaataatacttggaggtatttcctttcaatcttcaacatgaggatgctaatgtccccctcataaggggccttaaagtcactgactctgtgcactatttcatgagaacattgatgtgggtatttaaccgaaagaaaacttgagttttctttttttcctttttattgtgaaaatttggaaacttattcaaaaagtagaatagttaactaattgatgtacccatcagcaagcttcagtgattaccaccatttaattttgtctgcacccccccacccactgccaccccagcccattcccagcatgtgcctctgaaagagaccaactttgtcctttaaaaacaaccacagttggctgggcacggtggctcatgcctgtaatcccagtactttgggaagcaaaggcgggtggatcacctgaggttgagagttcgagactggcctgaccaacatggagaaacccgtctctactaaaaataccaaagttagccgggcgtggtggcgggtgcctgtaatcccagctactcgggaggctgaggtaggagaatcgtgtgaatctgggaggcggaggttgcagtgagccgagatcacgccactgcactccagcctgggcaacaagagttgtctcaaaaaacaaaaaagaaagaaagaaaaaaacaaccacagtttcatcagcacagcaaaaaggtttttgtttttgctcttggattttgtcgtttggtttttgcttaatatcaaatatccagtcagtgtaaactcgtttataatttggtcctttgatttcaaggagctatgatgcagttcgttgtggggatgtgttgtctccatgtcatacatgtgactttgtccatgtttgcacccagttcaaggaagacacaaccctagggaaagacaaccctccccgccaagcctctcttcccattcttaaacatagggtggcgttattcaggttggaccagtttaaaaagactaacgcatttgtcctcgttgttgggtgttttttttctttaaatttgtaaaacaggaataattgtgttaggatgaagtatgatactaggagaacagggaaaactaacccatcgtgttaaaagtcagaatagtgcttaactctggcaggaggtgagatggttagtaattcagaagggggtgccaggagagcttccagagccattgaaatgttcagtagcttgatctgggtgatgatttacatacataaaaacatattaaactttgaacttaagatttatgccttttactgtttgcaccctataactccaaaagaaaagtagaggggaaaaagagtccctgcaaaaggcagtcttgaaagaaagcaagtctgtgatgtggagaatgcattggacagctctcagcaatttgctgtagcttgggcagagagataaaagctaatgccagcatcaggttgcccaggcgagagaaggcctgaaagaagacagcgtggagaaagtgtcagcaagcttcagcaacagcaggaggcagatggtaggagagtgggcctcaggtgtggtgtggcagagcagagtagccacacttaggccccagagacagtgtcttctcaccctcagttgaaggggcaggaaatcaatcgctctagtcacccctaagctggaggacggacctaaagttgccacagctttgagaggcaaagaagtttgctcagtggcttttagagacttctagggccctgggaccctgacactgaggaggagcaaactgaaggggagagtgggcacattccttgttggctgctgtggtgagcagcagctggtcgttgtcagtcaagctccggaccactctgatgatgctcactgcattttgatggagtaagccagggacattaccactgtgtttgagccatctgaagtattcctgggtgggtctgcagttggcagcccgtgatcctttttccattcaaggatgatgcaaaggtaaggggccaaggctgagctctgtagatgcctgtgagagcctcctggtctcaagaggtcataccaagggccttggccaccaaggtttcgtgaggaccttgaggtggtttcgccatcacaatgtcagacgtgtcacacaccatctggtatgtcctcactgtatagaggaagaagggcccaagtggtgaattatctacaagtttgtagcaaagctaatactcagactccctctacagccttgctactcagtgtagtctgtggtccggcagtgtcacaccactggggtacttagcagaaatgcagcttctcaggctccactccagctctcctcaatcacagtctgtttttttgtttgtttgtttgtttgttttgagatggagtttcgctcttgttgcctaggctggagagcagtggtgcgatcttggctcactgcaacctccacctccctggttcaagtgattctgctgcctcagcctcccaagtagctgggattacaggcgcccgccaccatgcccggtggcgtgcatggtaatttttgtatttttagtagaaacaggatctcgccatgttggccaggctggtcttgaactcctgacctcaggtgatccacccgccttggcctcccaaagtactggggattacagatgtgagccaccacgcctggcccacagtctgtattttaacaagatccccacctcagtcttaggcacatggattctcctcaacccccaataccacagagtctattaatttttacccaatagggaaggggaaaaagtcaagaaagaataatgaattaagtaatctttccccctccaggaagctctttatttaatttcgctcccatgaaacacaatttgaagagtctctcaaataaacaaattccattttctgataattatttaattgccccacttttgaaatttttgtcaaagacgactgtcactccctgtcagaacttctattcagcacagtataccaagcgtttctccatcgagttgttataatatgatcaaaaagcagggagagatgctgcttggttaccctgtggggccttatcggggctcagtgcagtctttccatgtaggcattctcaaatactcaattgaaacctgattgaggatcatttgatctctgttggccctagtgcagtaggctgctgagaaccactgatgcaatagactgagagactaactgcctgcttccctgtcagcccaggctctgctaaggccgtcttagttacagaagaaagtggggcagagagccctgcaaggattacattccattcctaacggagacaggcaagcgttcagtgcccgaagcagggcaggcctttgtatggctcacttttccctgtaccagcctcagccccgtacattcagaaagccctgtcgggaacgtgcgggatcacagcacaagacagtcattcactgattgattgacgacgtcaacattgcggaatacctatgttaagctgagtacgagggatataaaaagtaggccctggagagtgcctctgggatgcacataaccagacaagataaagaaaaggcagatcacgagatcaagagatcgagatcatcctggccaacatggtgaaaccccatctctactaaaattacaaaaatcagctagacgtggtggcgggcgcctgtagtcccagctactcaggaggctgaggcaggagaatcgcttgaacccgggaggcagagattgcactgagctgaggtcatgccactgcactccagcctggcaacagggcaagactccatctcaaaaaaaaaaaaaaagaaaaaaaagaaaaattagggcagcttttagacatgaggccccaaagtgccaactagtgcacctaaacttcaactctcttttgagtgttttatgtatctactcagcatccagttgtaaatatgcaaaaatcaatgcctactgtatttaaaaattactaaattcacaataaccacacagaatctataataaatagaatcaatgtaataatgactcagatccaggggaagaaaattataaaattttggaaaaaatgatgagctattaattaagaaaatagtttgttccttggtgagaagactcaatgtaaatatgtcagttttctcctgacttaagtcttcaacacaggcctaataatattgcagtggcaaatgattgccaggggcaggaggggatttggggaagtggtaaaaatgatctgtgtcttggtagtggtcgctgcacaactgcatacatctgtgaaaactcactgaactgcgcactttaaaagggtgaattgtaatatacatacctcaataaaccttacttaaaaatta

SEQ ID NO: 179105 - DNA, 1601 bp, Homo sapiens
  Payload ID: 15305
  Gene Symbol: SCO1
  Gene Name: SCO1 cytochrome c oxidase assembly protein
  ENST ID: ENST00000577427
  CDS Start-End: 24-836
aggagacccggtctccgaggctcatggcgatgctggtcctagtacccggacgagttatgcggcctctgggtggccaactttggcgcttcttgcctcgcggactcgagttttggggcccagccgaggggactgcgagagtcttgctgaggcagttctgcgcgcggcaagcggaggcgtggcgtgcctcggggcgccctggctattgcctgggaacccggcccctcagcactgcgaggccgccacccccgtggtcgcagaagggccccggagactccacgcgcccctcgaagcccgggcctgtttcctggaagtctttagcaatcacatttgctattggaggagctttactggctggaatgaagcacgtcaagaaagaaaaggcagagaagttagagaaggaacggcagcgacacatcggcaagcctttacttgggggaccgttttccctcacaactcatactggggagcgtaaaactgacaaggactacttggatagcattacaactctgccagatctaactccacttttcatcagcattgacccagagagggacacaaaagaagccatcgcaaattatgtgaaagaattttctcccaaactggttggcttgactggcacgagagaagaggtcgatcaagtggccagagcatacagagtgtattacagccctggccccaaggacgaagatgaagactacatagtggatcacacaataataatgtacttgattggaccagatggtgagtttctagattattttggccagaacaagaggaagggagaaatagctgcttcaattgccacacacatgaggccatacagaaaaaagagctagccaaagcagtgttgctggatgcagtattctcttgctaagaggaaggaaactgtctcgcataggagcctatataaatataaacatatatacgtgcactctacagaatggccttcataccatgagaacatttctgttttggatggggatgttacccttgcgttcaaccaaaattgattcttggaactgtaaagattacaacccaaagtctcccaggaagctgtggggagaccagaggatcaagctgaagtgaagccagtgaagagcccacctgtggaaggacatggcggggcgaggcacagccagtgcattcctgcctgcgaacaggccctcccagcagctttgccgcctctccatcgtcttgggcccttgctcaaatagctgtgggactgaatttcacagaaaagaatataatttccatagtgctcttgcttgcctcttcttgagttctttgctcttctgagttcttggtggctaataacagtcagattagggtctctgccattcagagttgatgcttgaaaactttagttttccttattaatgaatatcactatcagatttgactaatgaagaggaaatctattgtttgggggaaaaaaaacatcagtttgatttctctaggggttcttttatgtgatttttagctaagtggtgtgccaggttttcagtgacataccaaatggaaataagaggatattgatcacgagtgtgatgctgagtacctttctgcatatactggattgtactttgtgtaaagtaaacata

SEQ ID NO: 179106 - DNA, 571 bp, Homo sapiens
  Payload ID: 15305
  Gene Symbol: SCO1
  Gene Name: SCO1 cytochrome c oxidase assembly protein
  ENST ID: ENST00000577335
  CDS Start-End: 26-301
aaaggagacccggtctccgaggctcatggcgatgctggtcctagtacccggacgagttatgcggcctctgggtggccaactttggcgcttcttgcctcgcggactcgagttttggggcccagccgaggggactgcgagagtcttgctgaggcagttctgcgcgcggcaagcggaggcgtggcgtgcctcggggcgccctggctattgcctgggaacccggcccctcagcactgcgaggccgccacccccgtggtcgcagaagggccccggagactccacgcgcccctcgaagcccgggtagcctgtttcctggaagtctttagcaatcacatttgctattggaggagctttactggctggaatgaagcacgtcaagaaagaaaaggcagagaagttagagaaggaacggcagcgacacatcggcaagcctttacttgggggaccgttttccctcacaactcatactggggagcgtaaaactgacaaggactacttgggtcagtggttattgatttattttggcttcactcattgccctgatgtctgtccagaagaactagaaaagatgatt

SEQ ID NO: 179107 - DNA, 992 bp, Homo sapiens
  Payload ID: 15306
  Gene Symbol: SCO2
  Gene Name: SCO2 cytochrome c oxidase assembly protein
  Uniprot ID: O43819
  ENST ID: ENST00000252785
  CDS Start-End: 177-977
tccggggacgcctgcgccctgcctgtgagcgtgtggcgcccgctttccctgagccggcggggcagagcgcagggagctggaggtcggcgcttcctctcgtgcttggtccactgacgcgcggccccgccgcgaggtgcggacgccggggctgggaggggaggaggagcatcagatccatgctgctgctgactcggagccccacagcttggcacaggctctctcagctcaagcctcgggtcctccctgggaccctgggaggccaggccctgcatctgaggtcctggcttttgtcaaggcagggccctgcagagacaggtgggcagggccagccccagggccctgggcttcgaacccggctgctgatcacaggcctgttcggggctggactcggtggggcctggctggccctgagggctgagaaggagaggctgcagcagcaaaagcgaacagaagccctgcgccaggcagctgtgggccagggcgacttccacctgctggatcacagaggccgggctcgctgcaaggctgacttccggggccagtgggtgctgatgtactttggcttcactcactgccctgacatctgcccagacgagctggagaagctggtgcaggtggtgcggcagctggaagcagagcctggtttgcctccagtgcagcctgtcttcatcactgtggaccccgagcgggacgacgttgaagccatggcccgctacgtccaggacttccacccaagactgttgggtctgaccggctccaccaaacaggttgcccaggctagtcacagttaccgcgtgtactacaatgcaggccccaaggatgaggaccaggactacatcgtggaccactccattgccatctacctgctcaaccctgacggcctcttcacggattactacggccggagcagatcggctgagcagatctcagacagtgtgcggcggcacatggcggctttccgcagtgtcctgtcttgagccactgcagtctgg

SEQ ID NO: 179108 - DNA, 992 bp, Homo sapiens
  Payload ID: 15306
  Gene Symbol: SCO2
  Gene Name: SCO2 cytochrome c oxidase assembly protein
  Uniprot ID: O43819
  ENST ID: ENST00000395693
  CDS Start-End: 149-949
gctccggggacgcctgcgccctgcctgtgagcgtgtggcgcccgctttccctgagccggcggggcagagcgcagggagctggaggtcggcgcttcctctcgtgcttggtccactgacgcgcggccccgccgcgaggagcatcagatccatgctgctgctgactcggagccccacagcttggcacaggctctctcagctcaagcctcgggtcctccctgggaccctgggaggccaggccctgcatctgaggtcctggcttttgtcaaggcagggccctgcagagacaggtgggcagggccagccccagggccctgggcttcgaacccggctgctgatcacaggcctgttcggggctggactcggtggggcctggctggccctgagggctgagaaggagaggctgcagcagcaaaagcgaacagaagccctgcgccaggcagctgtgggccagggcgacttccacctgctggatcacagaggccgggctcgctgcaaggctgacttccggggccagtgggtgctgatgtactttggcttcactcactgccctgacatctgcccagacgagctggagaagctggtgcaggtggtgcggcagctggaagcagagcctggtttgcctccagtgcagcctgtcttcatcactgtggaccccgagcgggacgacgttgaagccatggcccgctacgtccaggacttccacccaagactgttgggtctgaccggctccaccaaacaggttgcccaggctagtcacagttaccgcgtgtactacaatgcaggccccaaggatgaggaccaggactacatcgtggaccactccattgccatctacctgctcaaccctgacggcctcttcacggattactacggccggagcagatcggctgagcagatctcagacagtgtgcggcggcacatggcggctttccgcagtgtcctgtcttgagccactgcagtctgggccccatcattaaacgggctgcgtttaa

SEQ ID NO: 179109 - DNA, 617 bp, Homo sapiens
  Payload ID: 15306
  Gene Symbol: SCO2
  Gene Name: SCO2 cytochrome c oxidase assembly protein
  ENST ID: ENST00000423348
  CDS Start-End: 208-617
tcaggcccagggcgctgcccgggtggccgcggcgctggacgacggctcggcccttggccgcttcgagcggatgctggcggcgcagggcgtggatcccggtctggcccgagccctgtgctcgggaagtcccgcagaacgccggcagctgctgcctcgcgcccgggagcaggaggagctgctggcgcccgcagatggagcatcagatccatgctgctgctgactcggagccccacagcttggcacaggctctctcagctcaagcctcgggtcctccctgggaccctgggaggccaggccctgcatctgaggtcctggcttttgtcaaggcagggccctgcagagacaggtgggcagggccagccccagggccctgggcttcgaacccggctgctgatcacaggcctgttcggggctggactcggtggggcctggctggccctgagggctgagaaggagaggctgcagcagcaaaagcgaacagaagccctgcgccaggcagctgtgggccagggcgacttccacctgctggatcacagaggccgggctcgctgcaaggctgacttccggggccagtgggtgctgatgtactttggcttcactcactgccctgacatctg

SEQ ID NO: 179110 - DNA, 568 bp, Homo sapiens
  Payload ID: 15306
  Gene Symbol: SCO2
  Gene Name: SCO2 cytochrome c oxidase assembly protein
  ENST ID: ENST00000439934
  CDS Start-End: 159-568
gcaggcaccgtggagctggtccgggcgctgccgctggcgctggtgctgcacgagctcggggccgggcgcagccgcgctggggagccgctccgcctgggggtgggcgcagagctgctggtcgacgtgggtcagaggctgcgccgtggagcatcagatccatgctgctgctgactcggagccccacagcttggcacaggctctctcagctcaagcctcgggtcctccctgggaccctgggaggccaggccctgcatctgaggtcctggcttttgtcaaggcagggccctgcagagacaggtgggcagggccagccccagggccctgggcttcgaacccggctgctgatcacaggcctgttcggggctggactcggtggggcctggctggccctgagggctgagaaggagaggctgcagcagcaaaagcgaacagaagccctgcgccaggcagctgtgggccagggcgacttccacctgctggatcacagaggccgggctcgctgcaaggctgacttccggggccagtgggtgctgatgtactttggcttcactcactgccctgacatctg

SEQ ID NO: 179111 - DNA, 1002 bp, Homo sapiens
  Payload ID: 15306
  Gene Symbol: SCO2
  Gene Name: SCO2 cytochrome c oxidase assembly protein
  Uniprot ID: O43819
  ENST ID: ENST00000535425
  CDS Start-End: 159-959
gcaggcaccgtggagctggtccgggcgctgccgctggcgctggtgctgcacgagctcggggccgggcgcagccgcgctggggagccgctccgcctgggggtgggcgcagagctgctggtcgacgtgggtcagaggctgcgccgtggagcatcagatccatgctgctgctgactcggagccccacagcttggcacaggctctctcagctcaagcctcgggtcctccctgggaccctgggaggccaggccctgcatctgaggtcctggcttttgtcaaggcagggccctgcagagacaggtgggcagggccagccccagggccctgggcttcgaacccggctgctgatcacaggcctgttcggggctggactcggtggggcctggctggccctgagggctgagaaggagaggctgcagcagcaaaagcgaacagaagccctgcgccaggcagctgtgggccagggcgacttccacctgctggatcacagaggccgggctcgctgcaaggctgacttccggggccagtgggtgctgatgtactttggcttcactcactgccctgacatctgcccagacgagctggagaagctggtgcaggtggtgcggcagctggaagcagagcctggtttgcctccagtgcagcctgtcttcatcactgtggaccccgagcgggacgacgttgaagccatggcccgctacgtccaggacttccacccaagactgttgggtctgaccggctccaccaaacaggttgcccaggctagtcacagttaccgcgtgtactacaatgcaggccccaaggatgaggaccaggactacatcgtggaccactccattgccatctacctgctcaaccctgacggcctcttcacggattactacggccggagcagatcggctgagcagatctcagacagtgtgcggcggcacatggcggctttccgcagtgtcctgtcttgagccactgcagtctgggccccatcattaaacgggctgcgtttaa

SEQ ID NO: 179112 - DNA, 1051 bp, Homo sapiens
  Payload ID: 15306
  Gene Symbol: SCO2
  Gene Name: SCO2 cytochrome c oxidase assembly protein
  Uniprot ID: O43819
  ENST ID: ENST00000543927
  CDS Start-End: 208-1008
tcaggcccagggcgctgcccgggtggccgcggcgctggacgacggctcggcccttggccgcttcgagcggatgctggcggcgcagggcgtggatcccggtctggcccgagccctgtgctcgggaagtcccgcagaacgccggcagctgctgcctcgcgcccgggagcaggaggagctgctggcgcccgcagatggagcatcagatccatgctgctgctgactcggagccccacagcttggcacaggctctctcagctcaagcctcgggtcctccctgggaccctgggaggccaggccctgcatctgaggtcctggcttttgtcaaggcagggccctgcagagacaggtgggcagggccagccccagggccctgggcttcgaacccggctgctgatcacaggcctgttcggggctggactcggtggggcctggctggccctgagggctgagaaggagaggctgcagcagcaaaagcgaacagaagccctgcgccaggcagctgtgggccagggcgacttccacctgctggatcacagaggccgggctcgctgcaaggctgacttccggggccagtgggtgctgatgtactttggcttcactcactgccctgacatctgcccagacgagctggagaagctggtgcaggtggtgcggcagctggaagcagagcctggtttgcctccagtgcagcctgtcttcatcactgtggaccccgagcgggacgacgttgaagccatggcccgctacgtccaggacttccacccaagactgttgggtctgaccggctccaccaaacaggttgcccaggctagtcacagttaccgcgtgtactacaatgcaggccccaaggatgaggaccaggactacatcgtggaccactccattgccatctacctgctcaaccctgacggcctcttcacggattactacggccggagcagatcggctgagcagatctcagacagtgtgcggcggcacatggcggctttccgcagtgtcctgtcttgagccactgcagtctgggccccatcattaaacgggctgcgtttaa

SEQ ID NO: 179113 - DNA, 15589 bp, Homo sapiens
  Payload ID: 15307
  Gene Symbol: SSPO
  Gene Name: SCO-spondin
  ENST ID: ENST00000378016
  CDS Start-End: 1-15453
atgctactccctgccctcctctttgggatggcgtgggccctggctgacgggcggtggtgtgagtggacagagaccatccgtgtggaggaggaagtggcaccccgtcaggaggacctggtaccctgtgccagcctcgaccattacagccgcctgggctggcggctggacctgccctggagtggccgctcggggcttacccggtccccagcgcctgggctctgtcctatctacaaacctccagaaacccggcctgccaagtggaaccggacagtgaggacttgttgcccaggctgggggggcgcccactgcactgaggcccttgccaaagccagtcctgaaggccactgctttgccatgtggcagtgccagctacaggcaggctcagctaatgcctcagcaggaagcctggaggagtgctgcgcccggccctggggacaaagctggtgggatggcagctcccaggcctgccgcagctgctccagccgacacctgccaggcagtgcctcttctccagccctcctgcagcccctggcaggggctgtgggccagctctggagccagcaccagcgtccctcggccacctgtgcctcctggtcgggcttccactaccgcacctttgatggccgccactatcacttcctgggccgctgcacctacctgctggcgggtgctgcggactccacctgggctgtccacctaacacccggggaccgctgcccccagcctggacactgtcagcgggtgactatgggacccgaggaggtgctgatccaggctggaaatgtgtctgtgaaggggcagctggtacctgaagggcagtcttggctgctccacgggctgagcctgcaatggctgggggactggctggtgctgtcaggaggcctgggggtcgtggtgcggctggacaggactggctccatctccatctctgtggaccacgagctctggggacagacacaaggcctctgtgggctctacaatggctggccagaggatgacttcatggagccaggcggagggctggccatgttagcagccacctttggaaattcctggaggctccctggctcggagtctgggtgtctggatgcagtggaggtggcccagggctgtgacagccccctggggctcatagacgcagatgtagaacctggccacctgcgggctgaagcccaggacgtgtgccatcagctgctggaaggtccattcgggcagtgccatgcccaggtttcccctgctgagtaccacgaggcctgtctctttgcctactgcgcaggggccatggcaggcagtgggcaagaggggcggcagcaggctgtttgtgccacctttgccagctatgtccaggcctgtgccaggcggcacatccacattcgctggaggaagcctggcttctgcgagcgcctgtgccccgggggccagctctactccgactgcgtctccctctgcccacccagctgcgaggcggtgggtcagggagaggaggagtcctgcagggaagagtgtgtgagtggctgtgagtgcccgcgaggcctcttctggaatggcaccctctgtgtgcctgctgcccactgcccctgctactactgccgccagcgctatgtacccggtgacaccgtgcgccagctgtgtaacccctgcgtgtgcagggatggccgctggcactgtgcccaggcactgtgccccgccgagtgtgcagtgggtggggacgggcactacctcaccttcgatgggcggagctactccttctggggtggtcaaggttgccgctacagcctggtgcaggactatgtgaagggacagctactgatcctactggagcatggggcctgcgacgctgggagctgcctgcacgccatctccgtctccctggaggacacccacatccagctcagggactcaggagctgtgctggtcaatgggcaggatgtgggcttgccctggattggcgctgagggcctcagtgtgcgccgagcttcctctgcctttctgctgctgcgctggcctggggcccaggtgctctggggactgtctgaccctgtagcctacatcaccctggacccccgccatgcccaccaggtgcagggtctgtgtggcaccttcacccagaaccagcaggacgacttcctgacaccagccggagatgtggaaactagcattgctgcctttgctagcaagttccaggtggccggcaagggaagatgcccctctgaggacagtgccctgctgtctccctgcaccacccactcccagcgccacgccttcgcagaggcggcctgtgccatcctgcacagctctgtcttccaggaatgccacaggctggtggacaaagagccattctatctgcgctgcctggcagccgtgtgtggctgtgatcccggcagtgactgcctgtgcccggtgctgtctgcctatgcgcgtcgctgtgcccaggaaggtgcctcacctccctggaggaaccagaccctctgccctgttatgtgtcctggtggccaggagtaccgagagtgtgccccagcatgcggtcaacactgcgggaaaccagaggactgtggagagctgggcagctgtgtggctggttgtaactgtcctctggggctgctgtgggaccctgagggccagtgtgtgccccccagcttgtgcccctgccagctcggagcccgtcgctatgcccctggcagtgccaccatgaaggagtgcaaccgctgcatctgccaggaaaggggcctctggaattgcacggctcgccactgcccttcacaggcattctgccccagggagcttgtctatgcccctggtgcctgtctcctcacctgtgacagccccagcgccaatcactcctgccctgcaggcagtactgatggctgtgtctgtccaccaggcacggtgctgctggacgagcgctgtgtgcctcctgacctctgtccctgccgtcacagtgggcagtggtacctgcccaacgccaccatccaggaagactgcaacgtttgcgtgtgccggggccggcagtggcactgcacaggccagcggcgcagtgggcggtgccaggcatcaggcgccccccactatgtgacatttgacggactggccttcacctatcctggggcctgcgagtatctgctggtgcgagaggccagtggcctattcacagtctctgcccagaacctgccctgtggggccagcggtctcacctgcaccaaagcgctggccgtgcgtctggagggcactgttgtgcacatgctcagaggccgggcagtgacggtgaatggggtgagcgtgacgccccccaaggtctacacaggccctgggctgagcctgcgtcgtgctggcctcttcctgctgctctcgacccacctgggcctcaccctgctctgggatggagggactcgggtcctggtgcaactgtcccctcagttccgtggtcgcgtggctgggctgtgtggtgactttgatggagatgccagtaatgatctgcggagccgccagggcgtcctggagcccacagctgaactggctgcccactcctggcgcctcagccccctctgccctgagccaggagacctgccacacccctgcacgatgaacacacaccgggctggttgggctcgggcccgctgtggggcgctgctgcagccgctcttcacattatgccacgcggaggtccccccgcagcagcactatgagtggtgcctgtatgacgcctgcggctgcgactcggggggtgactgtgagtgcctctgctcggccattgccacctatgcagatgagtgtgcccggcatgggcaccacgtgcgctggcgtagccaggagctctgctccctgcagtgtgaagggggacaggtatatgaggcctgtggccccacgtgtccccccacctgccatgagcagcatcctgagcccgggtggcactgccaggtggtggcctgtgtggagggctgcttctgccccgaggggactctgctgcacggaggagcctgcttggagccagcttcctgcccctgtgagtggggccgcaactccttcccgccggggtctgtgctgcaaaaggactgcgggaactgcacgtgccaggaaggtcaatggcattgtgggggtgacggtggccactgtgaggagcttgtgcctgcctgtgcagagggagaggccctgtgccaagagaatgggcactgtgtgccccatgggtggctttgtgacaaccaggacgactgtggcgatggctctgatgaggagggttgtgccgccccaggctgtggggaggggcagatgacttgcagctccggccactgcctgcccctggccctgctctgtgaccgccaggatgactgtggagatggcacggatgagccgagctatccgtgcccccagggcttgctggcctgtgccgatggacgctgcctgccgccggccctgctctgcgatgggcatcctgactgtctggatgccgccgacgaggagtcctgtctggggcaggtgacctgcgtccccggggaggtgtcctgtgttgatggcacctgcctgggggccatccagctgtgtgacggagtctgggactgcccagatggagccgatgaggggccgggacactgccccctaccttctctgcccacacctcctgccagcaccttgcctggcccctccccaggctccctggacactgcgtcaagtcccctggccagcgccagccctgcgccaccctgcggccccttcgagtttcggtgcggcagcggcgagtgcaccccgcggggctggcgctgcgaccaggaggaagactgcgccgacggcagcgacgagcgcggctgcggagggccctgcgcgccgcaccacgcgccctgcgcccgcggccctcactgcgtgtcccccgagcagctgtgcgacggcgtgcggcagtgtcccgacggctcggacgagggccccgacgcctgcggggggctgccagccctgggaggccccaacaggacagggcttccctgcccagaatacacctgccccaatggcacctgcataggcttccagctggtgtgtgatgggcagcctgactgtggaaggccagggcaggtgggcccctccccagaagagcagggttgtggggcctggggcccctggagcccatgggggccctgcagccggacgtgtgggccctggggccagggccggagccgccgctgctccccactcggcctcctggtgctacagaactgcccagggcctgagcaccagtctcaggcctgcttcacggcagcctgcccagtggacggtgaatggagcacctggtccccctggtctgtgtgctctgagccgtgcaggggcaccatgacgcggcaacggcagtgccactcaccccagaatgggggccgcacctgtgctgcactgcccggaggcctgcacagcacccgccagaccaagccttgccctcaggacggctgccccaatgccacttgctctggggagctgatgttccagccctgtgccccctgcccactgacctgtgatgacatctctggccaggtcacgtgcccacctgattggccctgcggcagcccgggctgctggtgcccagaagggcaggtgctgggcagcgaggggtggtgtgtgtggccccggcagtgcccctgcctggtggacggtgcccgctactggcctgggcaacgcatcaaggccgactgccagctctgcatctgccaagacggacggccccgacgctgccgactcaacccggactgcgctgtggactgtggctggtcctcctggtcaccctgggccaagtgcctgggcccctgtggaagccagagcatccagtggtccttccggagctccaacaacccccgcccctccggccgaggtcgccagtgccgtggcatccaccgcaaggcacgcaggtgccagacggagccctgtgaggggtgtgagcatcagggccaggtccaccgtgtcggggaacgctggcatgggggcccctgcagggtgtgccagtgtctgcacaacctcaccgcacactgctcaccctactgcccgctcggcagctgcccccagggctgggtcttggtggaggggacgggagaatcatgctgccactgtgccctacctggagagaaccagacggtccagcccatggccactcctgccgcagctccggctcccagtccccagatcagattccctttggccacttacattctgcctccgtcaggagacccctgctattctcccctggggctggccggactggctgaggggagtctgcatgcatcgtcccagcagctggaacaccccacccaggctgccctcctgggggctcccacccaggggcccagccctcagggatggcacgctggaggggatgcttatgccaagtggcacactcggccccattacctgcagctggacctgcttcagcctcggaacctcactggcatcctagtgccggagactggctcctccaacgcatatgccagcagcttctcactccagttcagcagcaatggtctacactggcatgactatcgtgacctcctgcctggcatcttgcccctgcccaagcttttccccagaaactgggatgacctggaccctgccgtatggactttcggccgcatggtgcaggcgaggtttgtcagggtgtggccccacgatgtccaccacagcgatgtccccctgcaggtggagctgctgggctgcgagccagggtccccaccggcacctctgtgcccaggggttggactccgctgtgccagtggtgagtgtgtcctgagagggggcccttgtgacggtgttctggactgcgaggatggctcggatgaggagggctgtgtgttgctgcctgagggcactggcagattccattccacagccaagaccctggccctctcctctgcccagccggggcagctgctgcactggcccagggagggcctggcagagactgagcactggccccctgggcaggaatcccccacgtccccgacagagacaaggcccgtgagtcctggcccagcctccggggtgcctcaccatggggaatctgtgcagatggtgaccaccacccccataccccagatggaggccaggaccctgccaccaggtatggcagctgtgacggtggtgcccccacaccctgtgactccagcgacccctgctggccagagcgtcgccccaggacccttcccacctgtgcagtgtggccccggccagacgccctgtgaggtgctgggctgcgtggaacaggcgcaggtgtgtgatggcagggaggattgcctcgacggctccgacgagaggcactgcgccaggaatctacttatgtggctcccttctctccctgccttgtgggcagcgagcactgtgcccttcatgatgcctaccatggccctgcctgggcttccagcctcaagggccctctgttccccgagccagctgagctgtggcagcggggagtgtctgtctgctgagcggcgctgtgacctgcggcctgactgccaggatggctcggacgaggatggctgtgtggactgcgtgctggccccctggtctgtctggagcagctgcagccgcagctgtggcctgggcctcaccttccagcgccaggagctgctgcggcctcctctgccagggggcagctgcccgcgtgaccggttccgaagccagtcctgctttgtgcaggcctgcccagtggctggggcatgggccatgtgggaggcctggggaccctgcagcgtctcctgcgggggtggccatcagagtcgccagagaagctgtgtggaccccccacccaagaatggcggtgccccctgccccggggcctcccaagagagggcaccctgcggcttgcagccctgctcaggtggcacagactgcgagctgggccgtgtgtatgtgagtgccgatctgtgccagaaggggctggtgcccccatgcccaccctcctgcctggatcccaaggccaacagaagctgcagtgggcattgtgtggaaggatgccgctgtcccccggggctccttctgcatgacactcgctgcctgcccctctctgagtgcccctgcctggtgggcgaagagctgaagtggccaggggtgtccttcctcctgggcaactgcagccaatgcgtgtgtgagaagggggagttgctgtgccaaccagggggctgccccctgccctgcggctggtcagcctggtcctcctgggctccctgcgaccgctcctgtggctctggagtgagggccaggttcaggtctccctccaaccctccggcagcctgggggggtgccccgtgtgaaggtgaccggcaggaactgcagggctgccacacagtgtgtgggacagaggtgttcggctggacgccctggacttcctggtcctcctgctcccaaagctgccttgccccgggagggggccctggctggcgcagtcgttcccgactctgccccagccctggggattcatcctgcccaggagatgccacccaggaggagccctgcagcccccctgtatgcccagtgccaagcatctggggtctgtgggctccctggtccacttgctcagccccctgtgatggaggcatccagacacgtgggcgcagctgctccagcttggctccaggggacaccacgtgcccaggaccccacagtcagaccagggactgcaacacgcagccctgcacagcccagtgcccagagaacatgttgttccgctcagcagagcagtgtcaccaggaggggggtccttgccctcggctatgcctgacgcagggccccgggatagagtgtacgggcttctgcgcccccggctgcacctgcccccctggtcttttcctgcacaatgctagctgcctgccccgcagccagtgcccctgccagctgcacgggcagctctatgcatcaggagcaatggctcgcctggactcctgcaacaactgcacctgtgtctctggtaagatggcatgcacctcggagcgctgcccagtggcctgtggctggagtccctggaccctgtggagtctctgtagctgcagctgcaacgtgggcattcggcgccgcttccgggcaggcactgcacccccagctgcctttgggggtgctgagtgccaaggccccaccatggaggctgaattctgcagcctgcggccatgtccaggtcctggtggggagtggggcccttggtctccgtgctccgtgccctgtggtggtggctacaggaaccgcacccgaggcagcagccgcagcctcatggagttttccacctgtggcctgcagccctgcgcagggccagtgcctggcatgtgtcccagggacaagcagtggctggactgtgcccagggccctgcctcttgtgcagagctcagcgccccaagagggactaaccagacctgccaccctggctgccactgcccctctgggatgcttctgctgaacaacgtgtgtgtgcccacccaggactgcccctgtgcccacgaggggcacctctaccccccgggcagcactgtggttcgtccatgtgaaaactgctcctgtgtctccgggctcatcgccaactgcagctcctggccttgtgcggagggtgagcccacgtggtcaccctggaccccttggagccagtgttcagcctcctgtggccctgcccggtgccatcggcaccggttctgtgccaggtcccccagtgcagtgccatccaccgtggctccgctgcccctgccagccacccccacacctctctgctcaggccccgaggctgaagaggagccatgtctcctgcaggggtgtgatcgagctgggggatggggtccatgggggccctggtcccactgtagccggagctgtgggggaggcctgcggagccggacccgggcctgtgaccagcccccaccccagggcctgggggattactgcgaggggccacgggcacagggggaggtctgccaggctctgccctgcccagtgaccaactgcactgccattgaaggggccgagtatagcccctgtggccctccgtgccctcgctcctgtgatgacctagtgcactgcgtgtggcgctgccagcctggctgctactgcccaccaggccaggtactgagttccaacggggccatctgcgtgcagccgggtcactgcagctgcctggacctgctgaccgggcagcggcaccatccgggtgctcggctggcaaggcctgacggctgcaaccactgcacctgcctggaggggaggctgaactgcacagacctgccctgcccagtgcccggaggctggtgcccgtggtcggagtggacaatgtgctcccagccctgcaggggccagaccaggagccgctccagggcctgtgcctgccccactcctcagcacggtggtgccccgtgcactggagaggctggggaggcaggggcccagcatcagagggaggcctgccccagctacgccacgtgcccagtggacggagcctggggcccatgggggccatggtctccctgcgacatgtgcttggggcagtcccaccggagccgggcgtgcagccggccccccacccctgagggagggaggccctgccctgggaaccacacgcagagtcgcccttgccaggaaaattccacccagtgcacagactgcgggggtggccagagtctgcatccctgtgggcagccctgcccccgctcctgccaggacctgtcccctgggagtgtgtgccagccaggctctgtgggctgccagcccacttgtgggtgccccctgggccagctctcccaggacgggctgtgcgtgcccccagcccactgccgctgccagtaccagcctggagccatggggatccctgagaaccagagccgctcagcagggtctaggtttagctcctgggagagcctggaacccggagaggtggtcactgggccatgtgacaactgcacctgtgtggcaggcattctgcaatgccaggaggtgcctgactgcccggaccctggggtgtggagctcttggggcccttgggaagactgcagtgtttcgtgtgggggcggggagcagctgcgctcccggcgctgtgctcgtcctccctgcccagggcctgcccgccagagccgcacatgcagcacacaggtctgcagagaggcaggctgcccggctggccgcctgtaccgtgaatgccagcccggcgagggatgccccttctcctgcgcccacgtcacgcagcaggtgggctgcttctctgagggctgcgaggagggctgccactgccccgagggcaccttccagcaccgcctggcctgtgtgcaggagtgcccttgtgtgctgacagcctggctgctgcaggagctgggagccaccataggtgaccctggtcagcccctcgggcctggagatgagctggactcaggccagacacttcgtacaagctgtggcaactgctcgtgtgcacacgggaagctgtcttgctccctggacgactgcttcgaggccgatggtggtttcggtccctggagcccgtggggcccgtgctcccgctcctgtggagggctgggcacccgtacccgcagccgccagtgtgtgctcaccatgcccaccctcagtggtcagggctgccgtgggccccgccaggacctcgagtactgccccagcccagactgccctggggctgaagggtccacggtggagccagtaacaggccttccaggtggctggggcccatggtcctcctggtccccctgctccagaagctgcacggaccccgctcgccctgcatggcgcagccgcacccgcctctgcctggctaactgcaccatgggggacccattacaggagcgcccctgcaacctgccctcatgcacagagctgcccgtgtgccctggccctggctgtggggctgggaactgttcctggacctcctgggccccgtgggaaccttgctcccgcagctgcggagtgggccagcagcgccgcctgcgggcataccgtccccctgggcccggcgggcactggtgccccaacatccttactgcctaccaagagcgccgcttctgcaacctgcgagcctgcccagtgcccgggggctggtcacgctggagtccctggtcctggtgtgaccgcagctgtgggggaggccaatccctgagaagccgcagctgctcaagccccccatccaagaacgggggagccccctgtgctggggagcggcaccaggcccgcctctgcaatcccatgccttgtgaggccggctgcccagcaggcatggaggtggtcacctgtgccaaccgctgcccccgccgctgctcagacctccaggagggaattgtgtgtcaggacgaccaggtctgccagaagggctgccgctgcccaaaggggtccctggagcaggatggtggctgcgtgccaattgggcactgtgactgcaccgatgcccagggccacagctgggccccggggagccagcaccaggatgcctgcaacaactgctcatgccaagctgggcagctctcctgcacggctcagccctgcccgcctcccacccactgtgcctggagccactggtcggcctggagtccctgcagccactcatgcgggcccagagggcagcagagccgcttccggtcctccacgtcgggctcgtgggccccagagtgtcgggaggagcagtcccagagccagccctgccctcagccctcgtgcccacccctgtgcctgcagggcactcgctcccgcaccctgggggacagctggctgcagggggagtgccagcggtgctcctgcaccccggagggtgtgatctgcgaagatacggagtgtgcagtgcctgaggcttggacgctgtggtcctcctggtccgactgccctgtctcctgtggaggtggaaaccaggtccgaacccgggcctgcagggccgcagcccctcaccacaggagcccaccctgcctgggccctgacacccagaccaggcagcagccttgcccagggctgctggaggcctgctcctggggcccgtgggggccctgttcccgcagctgcggcccgggcctggcctctcgctctgggtcctgcccctgcctgatggccaaggccgaccccacctgcaacagcaccttcctccacctggacacccagggctgctactcagggccctgcccagaggagtgtgtgtggagcagctggagcagctggacgcgctgctcttgccgggtgctggtgcagcagcgctaccgacaccagggcccggcgtcccgaggggccagggcaggcgccccctgcacgcggctggatggccacttccggccttgccttatcagcaactgctctgaggacagctgcacgcctccctttgagttccatgcctgcggctccccctgtgctgggctctgtgccacacacctgagccatcagctctgccaggacctgccaccctgccagccgggctgctactgccccaaggggctgctggagcaggctgggggctgcattcccccagaggagtgtaactgctggcatacctcagcagcaggagccgggatgaccctggcccctggggaccgcctgcagctgggctgtaaggagtgtgaatgccggcgtggggagctgcactgcaccagccagggctgtcaaggtcttctgcctctgagtgagtggtccgagtggtcgccctgtgggccctgcctgccgcccagcgccctggcccctgcctccaggactgccctagaggagcactggctccgagacccaactggcctctcccccaccttggccccgctgctggcttcagagcagcaccgccaccggctctgtctggatcctgcgacagggaggccctggactggagcccctcacctctgcaccgcacccctcagccagcagcgcctctgccctgaccctggagcctgccctgactcatgccagtggagtctgtgggggccatggagcccctgccaggtgccctgcagtggggggttcaggctacgctggagagaggcagaggccctctgtggaggaggctgccgggagccatgggctcaagaaagctgcaacggagggccctgcccagagagctgcgaggcccaagacactgtattcaccctggactgtgccaaccagtgcccacacagctgtgccgacctctgggaccgcgttcagtgtctgcagggaccctgccgcccaggctgccgctgtccccctggccagctggtccaggatgggcgctgtgtgccgatctcctcttgccgctgtggcctccccagtgccaatgcctcttgggagctggccccggcccaggcggtgcagctggactgccaaaactgcacctgtgtcaacgagtccctggtgtgcccacaccaggagtgtccagtccttgggccttggtcagcctggagcagttgctcggccccctgtggtgggggcactatggagcgacatcggacttgtgaggggggtcctggggtggcaccatgccaggcccaggacacagagcaacggcaggagtgtaacctgcagccctgccctgagtgcccccctggccaggtgcttagtgcctgtgccacctcatgcccgtgcctctgctggcatctgcagcctggtgccatctgtgtgcaggagccctgccagcctggctgtggctgccctggagggcagctgctgcacaatggcacgtgtgtgcctcccactgcctgcccctgcacccagcattctctgccctggggcctcaccctgaccctggaagagcaggcccaggagctgcccccagggactgtgctcacccggaactgcacccgctgtgtctgccacggtggagccttcagctgctccctcgttgactgtcaggtgccccctggggaaacgtggcagcaggtggccccgggggagctggggctctgcgagcagacgtgcctggagatgaacgccacaaagacccagagtaactgcagttcagctcgagcctcgggctgcgtgtgccagcccgggcacttccgcagccaggcaggcccctgcgtccccgaagaccactgcgagtgctggcaccttgggcgtccccacctgcctggatctgaatggcaggaggcctgtgagagctgcctctgcctcagtgggaggcctgtctgcacccagcactgctccccactcacctgtgctcagggcgaggagatggtgctggagccagggagctgctgtccctcttgccgcagggaggctccggaggagcagtcgccctcctgccagctcctcacggagcttcgaaacttcaccaaagggacctgttacctggaccaggtagaagtgagctactgcagtgggtactgcccatccagcacccatgtcatgccagaggagccatacctgcagagccagtgtgactgctgcagctaccgtctagacccggagagccctgtgcggatcctgaacctgcgctgtctgggtggccacacagagcccgtggtgctgccggtcatccacagctgccagtgcagctcctgccagggtggtgacttctcaaagcgctaacaggctccgctgggtgagtccacagctgtccctcttgtgatcatgggactcagcagcactgaccacgtccttccacgctctctcacctgcccccaactgggggcccatgacttggcattagcatgttccaaataaa

SEQ ID NO: 179114 - DNA, 667 bp, Homo sapiens
  Payload ID: 15308
  Gene Symbol: SCP2D1
  Gene Name: SCP2 sterol-binding domain containing 1
  Uniprot ID: Q9UJQ7
  ENST ID: ENST00000377428
  CDS Start-End: 91-561
ctttgatgtcacaatctgacctgtgggtattaatctggtcacagctgctcacagactagatggcaaggtccaggggactagcacaggaagatgtggaagagaagtgaccatcaacccaagatcaaagcagaggatggacctctggtgggccagttcgaggttctgggttcagttccagaacctgccatgccacatcctctagagctgtcagaatttgagagcttcccagtgtttcaggacattaggcttcacatcagggaagtgggagctcaattggtcaagaaagtcaatgccgtctttcagctggacatcaccaaaaatgggaagaccattttgcggtggaccattgatctgaagaatggttctggggacatgtatccgggacctgccaggctcccagcagacactgtctttacaatcccggagtctgtctttatggagctggttttgggcaaaatgaacccgcagaaggctttccttgccggaaagttcaaagtgagtggcaaggttctgcttagctggaagctggaaagggttttcaaagactgggctaaattttaagcatgcaaaaataccaaggaagaacttctcttcgatgataatgtcgagtggaaatcatgcttaatctgaagattaaagtaaaaagtatccaatatttttactcaaa

SEQ ID NO: 179115 - DNA, 3779 bp, Homo sapiens
  Payload ID: 15309
  Gene Symbol: SCRT1
  Gene Name: scratch family zinc finger 1
  Uniprot ID: Q9BWW7
  ENST ID: ENST00000569446
  CDS Start-End: 113-1159
gtggggacccgcgctgcctccgccgctcctcggatggtgacggggccctgccgccgcagcccccccaagccccggctccgcaggcccacagcgccggagccccgcaggaatcatgcccaggtccttcctggtcaagaaggtcaaacttgacgcgttctcttcggccgacctggagagcgcctacggacgcgcccgcagcgacctcggcgcgccactgcacgataaagggtacctcagcgactacgtggggccctcgtccgtctacgatggcgacgccgaggctgcgctgctcaaagggccgtcgccggagcccatgtacgcagcagctgtgcgtggagagctgggtccggcggctgcagggtctgcgccgccgcccaccccgcgcccggagctggccaccgctgcgggcggctacatcaacggcgacgcggccgtcagcgagggctacgcggcggacgccttcttcatcaccgacgggcgctcgcggcgtaaggcttccaatgccggcgctgccgccgctccctccacagcctcggcggcggcccccgacggcgacgccggaggcgggggcggggcgggcgggcgcagcttgggatccgggccggggggccggggcggcacgcgcgcgggggcaggcaccgaggcgcgcgcggggccaggggccgcaggtgctggcggccggcacgcgtgcggcgagtgcggcaaaacatacgccacgtcgtcgaacctgagccgccacaagcagacgcaccgcagcctggacagccagctggcgcggcgctgcccgacgtgcggcaaggtgtacgtgtccatgccggccatggccatgcacctgctcacgcacgacctgcgccacaagtgcggcgtgtgcggcaaagccttctcgcggccctggctgctgcagggccacatgcgctcgcacaccggcgagaaacccttcggctgcgcgcactgcggcaaggccttcgccgaccgctccaacctgcgcgcgcacatgcagacgcattcggccttcaagcacttccagtgcaagcgctgcaagaagagcttcgcgctcaagtcctatctcaacaagcactacgagtcggcctgcttcaagggcggcgccggaggccccgcggctcctgcgccgccacagctcagccctgtgcaggcctagggcggcggggcctcccccagccaggtcggctctcagcaatacggccccccagggaagtcttcgctggcgtccgggtggaggggccggagggcgggcccctcctcacagcaatagggggaggggggcccggtcccaccccgccccgcccgccaggggccttgccggccccttcaagcaatagggtcccgaggggagacccaccccgagccccctcccctcccctccagggtgcccccggctttctcccagcaatagggtcgacgagacctagaaccgaacctcatctccgagttgggtctctgaagacgggggtgaggtgaggtagggagcgccctccttctcccgcctctgcgcccctggatcgcgtcgcagggactcaggtcttccccaccccttcccaagccttctagcgcagggcctgcggcccagacgtccagggagccggcccctccccggcagcaggccggggcggagcaggagcgggcgggcctgcagggacgcccctgcctagcagccttcgcggaactcccggcagtgttagacgcgttgtgggtcggggagaggggcggacggcggcaccccctccctcgggttgcttctggggcctcagtcggagccgccctcctaccctcgcctcgcatcctctgccaaatccgaattcttccagcccagcttcccgggctctgtcctccatatcgaataataatgacacatatcgaatcgcatggacttatccgacctcctcagaccccgcttccgccctgccccgggcccccaccccccacccccgtaccccaggcattcgtgttggaggacggattcccggggccggcaggcaggcctgggcgctgccctctacacacctctgtcttcgctttgcgggtaaagccccctgggggggttgcggacgcgtcgggtttctttttctgtatttgtacgttttatttatgaacggattgcactcgggtcagggagggggcgctgaacccccatcttgcccgccgacgccgggggcctgggatgtccgggattactttccacgccccgaggcccgcccctagctgggagcctctagggagcctcaggccccgcctctccgaggcaggcccctcccctgagacccaggccccgcccctgagacccaggccccgcccccactcggttgccaactttcgcccgtctatgccaaagcctcggcggcgaccccgccccaagggcccgccccattggccgccgcctttgtgacgtcactgcatgcagccccacccctcctcccgatcctacccggggctgcccgctccccctccctcttaggtagtccgaagccgactatagagcaataatgcgcactgcatgcgaagctgccgccgcctctagagttactgagaatcaggtatcccctcgccctacccaccccataggcccctagatcagggacgctgcgcggggccggccgcgcagactttctccccacccctccccgacccccacggcagagcccggcggctgtaatggttccatgggcgggggtggggtggttgcccccaagacccctccttcaggcattaatcattcactgaccgttcattgagcacctactatgtgccaggccaattgctgagtccgccaggagcgcagccacctgctgggaggtgtgtttgcaggacaggggtccaaccggcttgggtgggccagggaagaacggcagatgcagagagaccaggtccctaggttcacatgccccctacactcctccccacctcaaccagtccctgctgggcacaactgggctctacctttgagttaggccttttgactccagctgagggggacagatccagggctcctgggcccccacacaggtggccacttctctgatcctctggccaacacacatctgccatgtccagccaggggcagagccatggctggagaagaaggtgccagctgtagcctatggtgtggccagcctcacccccagcagcaagcgtggctgcccccacaaggatgacccaccgctctgcacagcagtgcccacatccaaacaccctacacaaccaggtgtggtgcctgcacagctcccaagctggggcctgcccacctgtgccgcatgcacacgcacacacaggcgcccccacctcaccccaccccatactcctgtctacctacctaaggagaaagctggagggctgtgggcccgtcagggtctcctgcttccccctacaccccgccgccgtggaaagccatgggccccctcccgcccccataactaagcagcacaataaccgacttagcgaattcaggtagaaggaacgtttaggtagcacctattttgtactgattctacaagtagggcccgaggtgcgggggccctcgggtgggggctgcggccgccggcccgcccgcccccacccccgcctgtgccccgccgccttgtacatattcccacccggaataggccgggatttttactcgggccgtgcccctcttccgcccccatttggggccaggccggccggacagacggacggacggacagacctccttcctaagcacaatagcaccagctccccggagcaccgcacctccacaaggagaataaatgccactcttgatagaa

SEQ ID NO: 179116 - DNA, 3577 bp, Homo sapiens
  Payload ID: 15310
  Gene Symbol: SCRT2
  Gene Name: scratch family zinc finger 2
  Uniprot ID: Q9NQ03
  ENST ID: ENST00000246104
  CDS Start-End: 579-1502
ctttcttctctctctgtttctctcttgtgtctttttgtccttatcttggtctctctgcttctatttctacctctctcagcgtgtgcgtctctctttccctgtatgtctctgtctttctccgagtctctcttcttctccccgcccccctcactcccctttctccgtccctctctgtctctgcgcctttctcgccctcactttctcccctcctgcctgctccgggcctgcccccaccgccgccggttcaggggaacgtgtgcggagcgattgtcctgggggacatttgatggattagagcgccgagcggttccattgctaggggaccacctgatctccagcctgcgtcccatataaagccggcagccggagtgctgagcgcagctcccgcgatcccctgtctgcgcgccgccgccgccaagcccgagcccgagccggggccgccgccaccggtgccggctccgagcggcctcccgcgctccagcccgctgggagctgtccagtgctgaaaacccgcgcggacacagccgatcgcgcccggccggccgcctccccgcaccgagccccgcgccggccgcgccatgccgcgctccttcctggtaaagaagatcaaaggggacggcttccagtgcagcggggtgccggcccccacctaccaccccttggagacagcctacgtgctgcctggcgcccgggggcctcccggggacaacgggtacgccccgcaccgcctgcccccgagcagctacgatgcggaccagaagccgggcctggagctggccccggccgagcccgcgtacccgccggcggcgccggaggagtacagcgaccccgaaagcccgcagtcgagcctgtcggcgcgctacttccgaggggaggcggcagtgaccgacagctactccatggacgccttcttcatctcggacgggcgctcgcggcggcggcggggcgggggcggcggggacgcggggggctcgggagacgcggggggcgccggggggcgcgcggggcgcgcgggggcgcaggcgggcggcgggcaccggcacgcgtgcgccgagtgcggcaagacctacgccacgtcgtcgaacctgagccgccacaagcagacgcaccgcagcctggacagccagctggcgcgcaaatgcccgacgtgcggcaaggcctacgtgtccatgcccgcgctcgccatgcacctgctcacgcacaacctgcgccacaagtgcggcgtctgcggcaaggccttctcgcggccctggctgctgcagggtcacatgcgctcgcacaccggcgaaaagccgttcggctgcgcgcactgcggcaaggccttcgccgaccgctccaacctgcgcgcgcacatgcagacgcactcggccttcaagcactaccgctgccgccagtgcgacaagagcttcgcgctcaagtcctacctccacaagcactgcgaggcggcctgcgccaaggcggccgagccacccccgccgacccccgccggcccggccagctgagccttccgcctcgccctcgcgcccggaactcgctctccacgcgccccgggccccctacctgcgcccgcagcgccctcgcccagccccggctgcgtttccctgcccatgaccctctcgtggggacccccggcccggcccggaacttttctccccaacccccaaacccacgactcacttccacaccgtcttccccagcgtcccccgacccacttcatcctttccggccatccctcggaccttgacccccctgtccgcgccttcaaggctcccaactcaggcaccaggtccgcacctctcccgcgccccagagccggaaatttctccctcccagaccccgcgctgctcttctaacttctagatcttttctctcgcttctcagctgaatctctctgaccattcctctactggagcccccaatgaaagccgcaaacctatacccttgacgcccatacctgcctcagtttccccatccacacctggacgcaggccctgccgccctgagaccacagtccaaccccagaccatccctctggcctctgctgaatctcccagagtgtgtccatctggggatctaatcttcacccttcttgaagtctccgatctgtccctgatcccatccatgctcaggccttaggtctggccattcacacacacacacacccccacaccccactcccacacacagttcctactgtcttcagtccatggggatctcatcacccactcccagccccagctccagctgccctcacctctctagcagctctcacccctctgagtctacctaacctggagggggcttgaggggcacttcagggccctgccccctaatgtaacccctctctcaccccggcacaacctgggcttccacagtctggagctgccctacccccagattctctgagcactttcccccatccccagggccacagatccccttccttacttgttggggggaggtctggagcacctcgccaatgcccttcccccatccggctgggtccttccagttatttatttgtgtatttatttatttatctatttattattctatttaatctcttggcctcacccagggaccgtctggcttccccagctggactgggaggtcaggaagccaggcaaggagagggacagcacaggccacagagggctgcccccaccacacacacccccgcgtctcgggagaaacccaccctcttcagagcctgcactcgctaaggaaggggactcgagaatgggggggcagcttgctgaccctcaactgggggggtgagggagcatcaggaggtccaggcgtggggcaggtccccaccttcctgaaccttcccctgccactccaggcggcccggagagaggagcctcttcgatttgtttcctgtttattcttcttcccgagggaccccaggttccagggaccgactgagccccggacccgctggggcctctggcctgctccccgggaggggcgctctctcccggccatgtctatgcaactctcccggacagaggggccgggctgccagccacccgcccgttggccgccactacctcctccgctgcgcttttgcatgcccgggcgaggaccgaagcacacacctccacgcgcacgggccctggccccctccgctttaagcacacgcctctgccccattgctctgcagccagcttgggggcaggagtcctggactctcagatcctcctctcccctcctcttagccacaaaagaggggggagactggaggcacccctgcagcaggggcacttccctagggctccagaggggtgaatgggcctttgctcagctccaggcccagcgggaagggaggctgcagggatggtgggagggagaggggtagcagaagcaattatggaggcgttgaccctgtaaatagcaacttctgacagcaataattttccatgcatgctaagccttttggccatattttgtatgagcgcttggcgctcctcctccgtcctatcccaactcacccccaaacccccatcccttccccacctccagcagtattacttgtaacgcaattcagggatattaaagggactttggccactca

SEQ ID NO: 179117 - DNA, 5143 bp, Homo sapiens
  Payload ID: 15311
  Gene Symbol: SCRIB
  Gene Name: scribbled planar cell polarity protein
  Uniprot ID: Q14160
  ENST ID: ENST00000320476
  CDS Start-End: 8-4900
ccgcaccatgctcaagtgcatcccgctgtggcgctgcaaccggcacgtggagtcggtggacaagcggcactgttcgctgcaggccgtgccggaggagatctaccgctacagccgcagcctggaggagctgctgctcgacgccaaccagctgcgcgagctgcccaagccttttttccggctgctgaacttgcgcaagctgggcctgagcgacaacgagatccagcggttgcctcccgaggtggccaacttcatgcagctggtggagctggacgtgtcccggaacgatatccctgagatcccggagagcatcaagttctgcaaggctctggagatcgcggacttcagcgggaaccccctctccaggctccctgatggcttcactcagctgcgcagcctggctcacctggccctgaatgatgtgtctctgcaggcactgcccggggacgtgggcaacctcgccaacctggtgaccctggagctccgggagaacctgctcaagtccctgccagcgtccctgtcatttctggtcaagctggaacagctggatctgggaggcaacgatctggaagtgctgccagacactctgggggctctgcccaatcttcgggagctgtggcttgaccggaaccagctgtcagcactgcccccggagctcgggaacctgcggcgcctggtgtgcctggacgtgtcggaaaaccggctggaggagctgcctgctgagctcggcgggctggtgctgctcactgacctgctgctgtcccagaacctgctgcggaggctgcccgacggcatcggtcagctgaagcagctatccatcctaaaggtagaccagaatcggctgtgcgaggtgaccgaggccatcggggactgtgagaacctctctgagctgatcctcacggagaacctgctgatggccctgccccgctccctgggaaagctgactaagctgaccaacctcaacgtggaccggaaccacctcgaggcgctgccgcccgagatcgggggctgtgtggcactcagcgtcctctccttgagggacaaccgcctggccgtcctgccaccagagctggcccacacgacagagctgcacgtgctggacgtggcggggaaccgcctgcagagtctgccgttcgcgctcacccacctcaatctcaaggccctgtggctggcagagaaccaggcgcagcccatgctccggttccagacggaggatgatgcccggaccggcgagaaggtgctcacctgctacttgctgccccagcagcccccacccagcctcgaggatgctgggcagcaggggagcctctcggagacctggagcgatgccccgccgagccgcgtcagcgtcatccagttcctggaggcccccataggtgatgaggacgctgaggaagctgcagctgagaagcggggcctacagcgccgggccacacctcaccccagcgagctcaaggtgatgaagaggagcatcgaggggcggcggagcgaggcctgcccttgccagccagactctgggtcgcccttgcctgcagaggaggagaagcggctgagtgccgagtctggcctgagtgaagactctcgcccatctgccagcacagtctctgaggctgagcccgagggcccgtcggctgaggcacagggtgggagccagcaggaagccacgactgctggcggggaggaagacgccgaagaggactaccaggagcccacggtgcatttcgcagaggacgcactgctgcccggggatgacagggagatcgaggaggggcagcctgaggccccctggaccctgccaggcgggaggcagcggctcatccgcaaggacacacctcactacaaaaagcacttcaagatctccaagctgccccagcccgaggccgttgtggctctgctgcagggcatgcagcctgatggggagggccctgtggctcccgggggctggcacaatggcccccacgcaccctgggctcctcgggcccagaaggaggaggaggaggaggaagagggtagtcctcaggaggaggaggaagaggaggaggaggaaaacagggctgaagaggaagaggccagcactgaggaggaggacaaggagggggccgtggtttctgcgccctctgtcaagggagtgtcgtttgaccaggccaataacctgctgatagagcctgctcgcattgaggaggaagagctgaccctcactatcctgcggcagactgggggcctgggcatcagcattgcgggcggcaagggctccacaccctataagggggacgacgagggcatattcatctctcgggtgtccgaggaaggccctgcggcccgggctggagtccgtgtgggtgacaagctcctggaggtgaatggtgtggctctgcagggcgccgagcaccacgaggccgtggaggcgctccggggggccggcactgccgtgcagatgcgagtgtggcgggagcgcatggtggagcctgagaacgcggtcaccatcacgccgctgcggcccgaggatgattacagcccccgagagcggcggggaggggggctgcgcctgcccctgctcccgcctgagagccccgggcccctccgtcagcgccacgtggcctgcctggcacgcagcgagagggggctgggcttcagcattgctggtgggaaaggctccacaccctacagggctggtgatgcgggcatcttcgtctcccgcattgccgagggcggtgctgctcaccgcgcgggcacactgcaggttggcgaccgcgtcctctctattaatggagtggacgtgactgaggccaggcatgaccacgccgtctccctgctgaccgctgcctcccccaccatcgccctgctgttggagcgggaggctgggggccctcttcctcccagccctctgccacattcctcaccccccaccgctgctgttgccaccaccagcataaccactgccacccccggggtgcctgggttgccgagcctggcccccagcctgctggctgccgcgttggaagggccatacccagtggaggagatccgtctgccaagagctgggggccctctggggcttagtattgtcggaggctccgaccattccagccacccgtttggtgtccaggagcctggtgtgttcatctccaaggtgctcccgcggggcctggccgctcgcagcggcctgcgggttggggaccgcatcctggcagtgaacgggcaagacgtgcgggatgccacgcaccaagaagcagtcagtgccctgctccggccctgcctggagctgtcgctgctggtgcggagggacccggcacccccgggcctacgggaactgtgcatccagaaggcacctggggagaggctgggcatcagcatccgcgggggtgccaggggccacgctggcaacccccgcgaccccacagacgagggcatcttcatctccaaggtgagccccacgggggcagccgggcgcgacggtcggctgcgtgtgggtttgcggctgttggaggtgaaccagcagagcctgctgggcctgacgcacggcgaggcggtgcagctgctccgcagtgtgggcgacaccctcaccgtgctggtctgtgacggctttgaggccagcaccgacgcagccctggaggtgtccccaggtgtcattgccaacccctttgcggcaggcatcggccaccggaacagcctggagagcatctcttccatcgaccgggagctgagccctgagggcccaggcaaggagaaggagctgcctggacagaccctgcactgggggcccgaggccacagaagccgcaggtcggggtctgcagcccctgaagctggactaccgcgccctggccgccgtgcccagcgctggcagcgtgcagagggtaccgtctggagcagctggagggaagatggctgaatctccctgctcccctagtggccagcagccgccctccccgccttctccggatgagctgcccgccaatgtgaagcaggcctacagggccttcgcggccgtgcccacttctcacccgcctgaggatgcccctgcccagccccccacgcctgggcctgcagcctccccggagcagctgtccttccgggagcggcagaagtactttgagctggaggtgcgcgtgccccaggccgagggcccccctaagcgcgtgtccctggtgggtgctgacgacctgcggaagatgcaggaggaggaagccagaaaactacagcagaagagagcgcagatgctgcgggaggcggcagaggctggggccgaagcgaggctcgccctggacggggagacgctgggcgaggaggaacaggaggatgagcagccaccctgggccagcccgagccccacctcaaggcagagcccggcgtcccccccacccctgggaggtggcgccccggtgcggacggccaaagctgaacggcgccaccaggagcggctgcgcgtgcagagtccggagccaccggcacccgagcgtgccctgtcccctgccgagctccgggccctggaggccgagaagcgtgcgctgtggagggcagccaggatgaagtcattggaacaggacgctctccgagcacagatggtcctcagcaggtcccaggaaggccggggcacgcgggggcccctggagcgactggccgaggccccttcccctgcgcccaccccgtcgcccacccctgtggaagacctcggcccccagaccagcacctccccgggacgcctgtcaccggactttgctgaggagttgaggtccctggaaccatctcccagccctggcccgcaggaggaggatggagaagtggctctggtgcttctgggcaggccctcacccggcgctgtgggccctgaagatgtggcactgtgcagcagccgccgccccgtaaggcctgggcgccgtggcctgggccctgtgccctcctagaggagcaggcacctcccccagacttggggtgggggccctgccagctccagcaccacccttgccccaagtcttttaacctgggtgttagcattttaaagagaccccacaggagttctggcctgtgactaactaactgccccaccccagccgagacctcggcgagactgtaactagtgatgtttgtacaaccaaagactctattttgtggtttaaggagaataaagttgactacattttacctcc

SEQ ID NO: 179118 - DNA, 5218 bp, Homo sapiens
  Payload ID: 15311
  Gene Symbol: SCRIB
  Gene Name: scribbled planar cell polarity protein
  Uniprot ID: Q14160
  ENST ID: ENST00000356994
  CDS Start-End: 8-4975
ccgcaccatgctcaagtgcatcccgctgtggcgctgcaaccggcacgtggagtcggtggacaagcggcactgttcgctgcaggccgtgccggaggagatctaccgctacagccgcagcctggaggagctgctgctcgacgccaaccagctgcgcgagctgcccaagccttttttccggctgctgaacttgcgcaagctgggcctgagcgacaacgagatccagcggttgcctcccgaggtggccaacttcatgcagctggtggagctggacgtgtcccggaacgatatccctgagatcccggagagcatcaagttctgcaaggctctggagatcgcggacttcagcgggaaccccctctccaggctccctgatggcttcactcagctgcgcagcctggctcacctggccctgaatgatgtgtctctgcaggcactgcccggggacgtgggcaacctcgccaacctggtgaccctggagctccgggagaacctgctcaagtccctgccagcgtccctgtcatttctggtcaagctggaacagctggatctgggaggcaacgatctggaagtgctgccagacactctgggggctctgcccaatcttcgggagctgtggcttgaccggaaccagctgtcagcactgcccccggagctcgggaacctgcggcgcctggtgtgcctggacgtgtcggaaaaccggctggaggagctgcctgctgagctcggcgggctggtgctgctcactgacctgctgctgtcccagaacctgctgcggaggctgcccgacggcatcggtcagctgaagcagctatccatcctaaaggtagaccagaatcggctgtgcgaggtgaccgaggccatcggggactgtgagaacctctctgagctgatcctcacggagaacctgctgatggccctgccccgctccctgggaaagctgactaagctgaccaacctcaacgtggaccggaaccacctcgaggcgctgccgcccgagatcgggggctgtgtggcactcagcgtcctctccttgagggacaaccgcctggccgtcctgccaccagagctggcccacacgacagagctgcacgtgctggacgtggcggggaaccgcctgcagagtctgccgttcgcgctcacccacctcaatctcaaggccctgtggctggcagagaaccaggcgcagcccatgctccggttccagacggaggatgatgcccggaccggcgagaaggtgctcacctgctacttgctgccccagcagcccccacccagcctcgaggatgctgggcagcaggggagcctctcggagacctggagcgatgccccgccgagccgcgtcagcgtcatccagttcctggaggcccccataggtgatgaggacgctgaggaagctgcagctgagaagcggggcctacagcgccgggccacacctcaccccagcgagctcaaggtgatgaagaggagcatcgaggggcggcggagcgaggcctgcccttgccagccagactctgggtcgcccttgcctgcagaggaggagaagcggctgagtgccgagtctggcctgagtgaagactctcgcccatctgccagcacagtctctgaggctgagcccgagggcccgtcggctgaggcacagggtgggagccagcaggaagccacgactgctggcggggaggaagacgccgaagaggactaccaggagcccacggtgcatttcgcagaggacgcactgctgcccggggatgacagggagatcgaggaggggcagcctgaggccccctggaccctgccaggcgggaggcagcggctcatccgcaaggacacacctcactacaaaaagcacttcaagatctccaagctgccccagcccgaggccgttgtggctctgctgcagggcatgcagcctgatggggagggccctgtggctcccgggggctggcacaatggcccccacgcaccctgggctcctcgggcccagaaggaggaggaggaggaggaagagggtagtcctcaggaggaggaggaagaggaggaggaggaaaacagggctgaagaggaagaggccagcactgaggaggaggacaaggagggggccgtggtttctgcgccctctgtcaagggagtgtcgtttgaccaggccaataacctgctgatagagcctgctcgcattgaggaggaagagctgaccctcactatcctgcggcagactgggggcctgggcatcagcattgcgggcggcaagggctccacaccctataagggggacgacgagggcatattcatctctcgggtgtccgaggaaggccctgcggcccgggctggagtccgtgtgggtgacaagctcctggaggtgaatggtgtggctctgcagggcgccgagcaccacgaggccgtggaggcgctccggggggccggcactgccgtgcagatgcgagtgtggcgggagcgcatggtggagcctgagaacgcggtcaccatcacgccgctgcggcccgaggatgattacagcccccgagagcggcggggaggggggctgcgcctgcccctgctcccgcctgagagccccgggcccctccgtcagcgccacgtggcctgcctggcacgcagcgagagggggctgggcttcagcattgctggtgggaaaggctccacaccctacagggctggtgatgcgggcatcttcgtctcccgcattgccgagggcggtgctgctcaccgcgcgggcacactgcaggttggcgaccgcgtcctctctattaatggagtggacgtgactgaggccaggcatgaccacgccgtctccctgctgaccgctgcctcccccaccatcgccctgctgttggagcgggaggctgggggccctcttcctcccagccctctgccacattcctcaccccccaccgctgctgttgccaccaccagcataaccactgccacccccggggtgcctgggttgccgagcctggcccccagcctgctggctgccgcgttggaagggccatacccagtggaggagatccgtctgccaagagctgggggccctctggggcttagtattgtcggaggctccgaccattccagccacccgtttggtgtccaggagcctggtgtgttcatctccaaggtgctcccgcggggcctggccgctcgcagcggcctgcgggttggggaccgcatcctggcagtgaacgggcaagacgtgcgggatgccacgcaccaagaagcagtcagtgccctgctccggccctgcctggagctgtcgctgctggtgcggagggacccggcacccccgggcctacgggaactgtgcatccagaaggcacctggggagaggctgggcatcagcatccgcgggggtgccaggggccacgctggcaacccccgcgaccccacagacgagggcatcttcatctccaaggtgagccccacgggggcagccgggcgcgacggtcggctgcgtgtgggtttgcggctgttggaggtgaaccagcagagcctgctgggcctgacgcacggcgaggcggtgcagctgctccgcagtgtgggcgacaccctcaccgtgctggtctgtgacggctttgaggccagcaccgacgcagccctggaggtgtccccaggtgtcattgccaacccctttgcggcaggcatcggccaccggaacagcctggagagcatctcttccatcgaccgggagctgagccctgagggcccaggcaaggagaaggagctgcctggacagaccctgcactgggggcccgaggccacagaagccgcaggtcggggtctgcagcccctgaagctggactaccgcgccctggccgccgtgcccagcgctggcagcgtgcagagggtaccgtctggagcagctggagggaagatggctgaatctccctgctcccctagtggccagcagccgccctccccgccttctccggatgagctgcccgccaatgtgaagcaggcctacagggccttcgcggccgtgcccacttctcacccgcctgaggatgcccctgcccagccccccacgcctgggcctgcagcctccccggagcagctgtccttccgggagcggcagaagtactttgagctggaggtgcgcgtgccccaggccgagggcccccctaagcgcgtgtccctggtgggtgctgacgacctgcggaagatgcaggaggaggaagccagaaaactacagcagaagagagcgcagatgctgcgggaggcggcagaggctggggccgaagcgaggctcgccctggacggggagacgctgggcgaggaggaacaggaggatgagcagccaccctgggccagcccgagccccacctcaaggcagagcccggcgtcccccccacccctgggaggtggcgccccggtgcggacggccaaagctgaacggcgccaccaggagcggctgcgcgtgcagagtccggagccaccggcacccgagcgtgccctgtcccctgccgagctccgggccctggaggccgagaagcgtgcgctgtggagggcagccaggatgaagtcattggaacaggacgctctccgagcacagatggtcctcagcaggtcccaggaaggccggggcacgcgggggcccctggagcgactggccgaggccccttcccctgcgcccaccccgtcgcccacccctgtggaagacctcggcccccagaccagcacctccccgggacgcctgcccttgtctggaaagaagtttgactacagggcctttgcggccctgccttcttccagacctgtctatgacatccagtcaccggactttgctgaggagttgaggtccctggaaccatctcccagccctggcccgcaggaggaggatggagaagtggctctggtgcttctgggcaggccctcacccggcgctgtgggccctgaagatgtggcactgtgcagcagccgccgccccgtaaggcctgggcgccgtggcctgggccctgtgccctcctagaggagcaggcacctcccccagacttggggtgggggccctgccagctccagcaccacccttgccccaagtcttttaacctgggtgttagcattttaaagagaccccacaggagttctggcctgtgactaactaactgccccaccccagccgagacctcggcgagactgtaactagtgatgtttgtacaaccaaagactctattttgtggtttaaggagaataaagttgactacattttacctcc

SEQ ID NO: 179119 - DNA, 5108 bp, Homo sapiens
  Payload ID: 15311
  Gene Symbol: SCRIB
  Gene Name: scribbled planar cell polarity protein
  Uniprot ID: Q14160
  ENST ID: ENST00000377533
  CDS Start-End: 222-4871
gagtgaaacccgtggggattcagggaggtggatggggttagggtggaacttggattcaggtggctgatgagtactagcttcttgggccgctctggaggtgggtccagacctcctctccttttttgctgggtgcagggccttttttccggctgctgaacttgcgcaagctgggcctgagcgacaacgagatccagcggttgcctcccgaggtggccaacttcatgcagctggtggagctggacgtgtcccggaacgatatccctgagatcccggagagcatcaagttctgcaaggctctggagatcgcggacttcagcgggaaccccctctccaggctccctgatggcttcactcagctgcgcagcctggctcacctggccctgaatgatgtgtctctgcaggcactgcccggggacgtgggcaacctcgccaacctggtgaccctggagctccgggagaacctgctcaagtccctgccagcgtccctgtcatttctggtcaagctggaacagctggatctgggaggcaacgatctggaagtgctgccagacactctgggggctctgcccaatcttcgggagctgtggcttgaccggaaccagctgtcagcactgcccccggagctcgggaacctgcggcgcctggtgtgcctggacgtgtcggaaaaccggctggaggagctgcctgctgagctcggcgggctggtgctgctcactgacctgctgctgtcccagaacctgctgcggaggctgcccgacggcatcggtcagctgaagcagctatccatcctaaaggtagaccagaatcggctgtgcgaggtgaccgaggccatcggggactgtgagaacctctctgagctgatcctcacggagaacctgctgatggccctgccccgctccctgggaaagctgactaagctgaccaacctcaacgtggaccggaaccacctcgaggcgctgccgcccgagatcgggggctgtgtggcactcagcgtcctctccttgagggacaaccgcctggccgtcctgccaccagagctggcccacacgacagagctgcacgtgctggacgtggcggggaaccgcctgcagagtctgccgttcgcgctcacccacctcaatctcaaggccctgtggctggcagagaaccaggcgcagcccatgctccggttccagacggaggatgatgcccggaccggcgagaaggtgctcacctgctacttgctgccccagcagcccccacccagcctcgaggatgctgggcagcaggggagcctctcggagacctggagcgatgccccgccgagccgcgtcagcgtcatccagttcctggaggcccccataggtgatgaggacgctgaggaagctgcagctgagaagcggggcctacagcgccgggccacacctcaccccagcgagctcaaggtgatgaagaggagcatcgaggggcggcggagcgaggcctgcccttgccagccagactctgggtcgcccttgcctgcagaggaggagaagcggctgagtgccgagtctggcctgagtgaagactctcgcccatctgccagcacagtctctgaggctgagcccgagggcccgtcggctgaggcacagggtgggagccagcaggaagccacgactgctggcggggaggaagacgccgaagaggactaccaggagcccacggtgcatttcgcagaggacgcactgctgcccggggatgacagggagatcgaggaggggcagcctgaggccccctggaccctgccaggcgggaggcagcggctcatccgcaaggacacacctcactacaaaaagcacttcaagatctccaagctgccccagcccgaggccgttgtggctctgctgcagggcatgcagcctgatggggagggccctgtggctcccgggggctggcacaatggcccccacgcaccctgggctcctcgggcccagaaggaggaggaggaggaggaagagggtagtcctcaggaggaggaggaagaggaggaggaggaaaacagggctgaagaggaagaggccagcactgaggaggaggacaaggagggggccgtggtttctgcgccctctgtcaagggagtgtcgtttgaccaggccaataacctgctgatagagcctgctcgcattgaggaggaagagctgaccctcactatcctgcggcagactgggggcctgggcatcagcattgcgggcggcaagggctccacaccctataagggggacgacgagggcatattcatctctcgggtgtccgaggaaggccctgcggcccgggctggagtccgtgtgggtgacaagctcctggaggtgaatggtgtggctctgcagggcgccgagcaccacgaggccgtggaggcgctccggggggccggcactgccgtgcagatgcgagtgtggcgggagcgcatggtggagcctgagaacgcggtcaccatcacgccgctgcggcccgaggatgattacagcccccgagagcggcggggaggggggctgcgcctgcccctgctcccgcctgagagccccgggcccctccgtcagcgccacgtggcctgcctggcacgcagcgagagggggctgggcttcagcattgctggtgggaaaggctccacaccctacagggctggtgatgcgggcatcttcgtctcccgcattgccgagggcggtgctgctcaccgcgcgggcacactgcaggttggcgaccgcgtcctctctattaatggagtggacgtgactgaggccaggcatgaccacgccgtctccctgctgaccgctgcctcccccaccatcgccctgctgttggagcgggaggctgggggccctcttcctcccagccctctgccacattcctcaccccccaccgctgctgttgccaccaccagcataaccactgccacccccggggtgcctgggttgccgagcctggcccccagcctgctggctgccgcgttggaagggccatacccagtggaggagatccgtctgccaagagctgggggccctctggggcttagtattgtcggaggctccgaccattccagccacccgtttggtgtccaggagcctggtgtgttcatctccaaggtgctcccgcggggcctggccgctcgcagcggcctgcgggttggggaccgcatcctggcagtgaacgggcaagacgtgcgggatgccacgcaccaagaagcagtcagtgccctgctccggccctgcctggagctgtcgctgctggtgcggagggacccggcacccccgggcctacgggaactgtgcatccagaaggcacctggggagaggctgggcatcagcatccgcgggggtgccaggggccacgctggcaacccccgcgaccccacagacgagggcatcttcatctccaaggtgagccccacgggggcagccgggcgcgacggtcggctgcgtgtgggtttgcggctgttggaggtgaaccagcagagcctgctgggcctgacgcacggcgaggcggtgcagctgctccgcagtgtgggcgacaccctcaccgtgctggtctgtgacggctttgaggccagcaccgacgcagccctggaggtgtccccaggtgtcattgccaacccctttgcggcaggcatcggccaccggaacagcctggagagcatctcttccatcgaccgggagctgagccctgagggcccaggcaaggagaaggagctgcctggacagaccctgcactgggggcccgaggccacagaagccgcaggtcggggtctgcagcccctgaagctggactaccgcgccctggccgccgtgcccagcgctggcagcgtgcagagggtaccgtctggagcagctggagggaagatggctgaatctccctgctcccctagtggccagcagccgccctccccgccttctccggatgagctgcccgccaatgtgaagcaggcctacagggccttcgcggccgtgcccacttctcacccgcctgaggatgcccctgcccagccccccacgcctgggcctgcagcctccccggagcagctgtccttccgggagcggcagaagtactttgagctggaggtgcgcgtgccccaggccgagggcccccctaagcgcgtgtccctggtgggtgctgacgacctgcggaagatgcaggaggaggaagccagaaaactacagcagaagagagcgcagatgctgcgggaggcggcagaggctggggccgaagcgaggctcgccctggacggggagacgctgggcgaggaggaacaggaggatgagcagccaccctgggccagcccgagccccacctcaaggcagagcccggcgtcccccccacccctgggaggtggcgccccggtgcggacggccaaagctgaacggcgccaccaggagcggctgcgcgtgcagagtccggagccaccggcacccgagcgtgccctgtcccctgccgagctccgggccctggaggccgagaagcgtgcgctgtggagggcagccaggatgaagtcattggaacaggacgctctccgagcacagatggtcctcagcaggtcccaggaaggccggggcacgcgggggcccctggagcgactggccgaggccccttcccctgcgcccaccccgtcgcccacccctgtggaagacctcggcccccagaccagcacctccccgggacgcctgtcaccggactttgctgaggagttgaggtccctggaaccatctcccagccctggcccgcaggaggaggatggagaagtggctctggtgcttctgggcaggccctcacccggcgctgtgggccctgaagatgtggcactgtgcagcagccgccgccccgtaaggcctgggcgccgtggcctgggccctgtgccctcctagaggagcaggcacctcccccagacttggggtgggggccctgccagctccagcaccacccttgccccaagtcttttaacctgggtgttagcattttaaagagaccccacaggagttctggcctgtgactaactaactgccccaccccagccgagacctcggcgagactgtaactagtgatgtttgtacaaccaaagactctattttgtggtttaaggagaataaagttgactacatttt

SEQ ID NO: 179120 - DNA, 2189 bp, Homo sapiens
  Payload ID: 15311
  Gene Symbol: SCRIB
  Gene Name: scribbled planar cell polarity protein
  ENST ID: ENST00000526832
  CDS Start-End: 1-1951
ccgtctgccaagagctgggggccctctggggcttagtattgtcggaggctccgaccattccagccacccgtttggtgtccaggagcctggtgtgttcatctccaaggtgctcccgcggggcctggccgctcgcagcggcctgcgggttggggaccgcatcctggcagtgaacgggcaagacgtgcgggatgccacgcaccaagaagcagtcagtgccctgctccggccctgcctggagctgtcgctgctggtgcggagggacccggcacccccgggcctacgggaactgtgcatccagaaggcacctggggagaggctgggcatcagcatccgcgggggtgccaggggccacgctggcaacccccgcgaccccacagacgagggcatcttcatctccaaggtgagccccacgggggcagccgggcgcgacggtcggctgcgtgtgggtttgcggctgttggaggtgaaccagcagagcctgctgggcctgacgcacggcgaggcggtgcagctgctccgcagtgtgggcgacaccctcaccgtgctggtctgtgacggctttgaggccagcaccgacgcagccctggaggtgtccccaggtgtcattgccaacccctttgcggcaggcatcggccaccggaacagcctggagagcatctcttccatcgaccgggagctgagccctgagggcccaggcaaggagaaggagctgcctggacagaccctgcactgggggcccgaggccacagaagccgcaggtcggggtctgcagcccctgaagctggactaccgcgccctggccgccgtgcccagcgctggcagcgtgcagagggtaccgtctggagcagctggagggaagatggctgaatctccctgctcccctagtggccagcagccgccctccccgccttctccggatgagctgcccgccaatgtgaagcaggcctacagggccttcgcggccgtgcccacttctcacccgcctgaggatgcccctgcccagccccccacgcctgggcctgcagcctccccggagcagctgtccttccgggagcggcagaagtactttgagctggaggtgcgcgtgccccaggccgagggcccccctaagcgcgtgtccctggtgggtgctgacgacctgcggaagatgcaggaggaggaaggtgaggggcacggaagtggggtgggggttgggtctcggctggtctggcctgacccaccctgccctccggcagccagaaaactacagcagaagagagcgcagatgctgcgggaggcggcagaggctggggccgaagcgaggctcgccctggacggggagacgctgggcgaggaggaacaggaggatgagcagccaccctgggccagcccgagccccacctcaaggcagagcccggcgtcccccccacccctgggaggtggcgccccggtgcggacggccaaagctgaacggcgccaccaggagcggctgcgcgtgcagagtccggagccaccggcacccgagcgtgccctgtcccctgccgagctccgggccctggaggccgagaagcgtgcgctgtggagggcagccaggatgaagtcattggaacaggacgctctccgagcacagatggtcctcagcaggtcccaggaaggccggggcacgcgggggcccctggagcgactggccgaggccccttcccctgcgcccaccccgtcgcccacccctgtggaagacctcggcccccagaccagcacctccccgggacgcctgtcaccggactttgctgaggagttgaggtccctggaaccatctcccagccctggcccgcaggaggaggatggagaagtggctctggtgcttctgggcaggccctcacccggcgctgtgggccctgaagatgtggcactgtgcagcagccgccgccccgtaaggcctgggcgccgtggcctgggccctgtgccctcctagaggagcaggcacctcccccagacttggggtgggggccctgccagctccagcaccacccttgccccaagtcttttaacctgggtgttagcattttaaagagaccccacaggagttctggcctgtgactaactaactgccccaccccagccgagacctcggcgagactgtaactagtgatgtttgtacaaccaaagactctattttgtggtttaaggagaataaagttgactacatttta

SEQ ID NO: 179121 - DNA, 421 bp, Homo sapiens
  Payload ID: 15311
  Gene Symbol: SCRIB
  Gene Name: scribbled planar cell polarity protein
  ENST ID: ENST00000531942
  CDS Start-End: 1-421
gaagaggaagaggccagcactgaggaggaggacaaggagggggccgtggtttctgcgccctctgtcaagctgaccctcactatcctgcggcagactgggggcctgggcatcagcattgcgggcggcaagggctccacaccctataagggggacgacgagggcatattcatctctcgggtgtccgaggaaggccctgcggcccgggctggagtccgtgtgggtgacaagctcctggaggtgaatggtgtggctctgcagggcgccgagcaccacgaggccgtggaggcgctccggggggccggcactgccgtgcagatgcgagtgtggcgggagcgcatggtggagcctgagaacgcggtcaccatcacgccgctgcggcccgaggatgattacagcccccgagagcggcggggaggggggc

SEQ ID NO: 179122 - DNA, 5108 bp, Homo sapiens; identical to SEQ ID NO: 179119
  Payload ID: 15311
  Gene Symbol: SCRIB
  Gene Name: scribbled planar cell polarity protein
  ENST ID: ENST00000611528
  CDS Start-End: 222-4871

SEQ ID NO: 179123 - DNA, 5143 bp, Homo sapiens; identical to SEQ ID NO: 179117
  Payload ID: 15311
  Gene Symbol: SCRIB
  Gene Name: scribbled planar cell polarity protein
  ENST ID: ENST00000622455
  CDS Start-End: 8-4900

SEQ ID NO: 179124 - DNA, 5218 bp, Homo sapiens; identical to SEQ ID NO: 179118
  Payload ID: 15311
  Gene Symbol: SCRIB
  Gene Name: scribbled planar cell polarity protein
  ENST ID: ENST00000612204
  CDS Start-End: 8-4975

SEQ ID NO: 179125 - DNA, 2189 bp, Homo sapiens; identical to SEQ ID NO: 179120
  Payload ID: 15311
  Gene Symbol: SCRIB
  Gene Name: scribbled planar cell polarity protein
  ENST ID: ENST00000634208
  CDS Start-End: 1-1951

SEQ ID NO: 179126 - DNA, 421 bp, Homo sapiens; identical to SEQ ID NO: 179121
  Payload ID: 15311
  Gene Symbol: SCRIB
  Gene Name: scribbled planar cell polarity protein
  ENST ID: ENST00000633098
  CDS Start-End: 1-421

SEQ ID NO: 179127 - DNA, 2642 bp, Homo sapiens
  Payload ID: 15312
  Gene Symbol: SCYL1
  Gene Name: SCY1-like, kinase-like 1
  Uniprot ID: Q96KG9
  ENST ID: ENST00000270176
  CDS Start-End: 78-2504
ctctccgccccgccccggctcgggcggccggaggacccggagctaaggcgcccgaacccgcggcggcggtggggacgatgtggttctttgcccgggacccggtccgggactttccgttcgagctcatcccggagcccccagagggcggcctgcccgggccctgggccctgcaccgcggccgcaagaaggccacaggcagccccgtgtccatcttcgtctatgatgtgaagcctggcgcggaagagcagacccaggtggccaaagctgccttcaagcgcttcaaaactctacggcaccccaacatcctggcttacatcgatggactggagacagaaaaatgcctccacgtcgtgacagaggctgtgaccccgttgggaatatacctcaaggcgagagtggaggctggtggcctgaaggagctggagatctcctgggggctacaccagatcgtgaaagccctcagcttcctggtcaacgactgcagcctcatccacaacaatgtctgcatggccgccgtgttcgtggaccgagctggcgagtggaagcttgggggcctggactacatgtattcggcccagggcaacggtgggggacctccccgcaaggggatccccgagcttgagcagtatgaccccccggagttggctgacagcagtggcagagtggtcagagagaagtggtcagcagacatgtggcgcttgggctgcctcatttgggaagtcttcaatgggcccctacctcgggcagcagccctacgcaaccctgggaagatccccaaaacgctggtgccccattactgtgagctggtgggagcaaaccccaaggtgcgtcccaacccagcccgcttcctgcagaactgccgggcacctggtggcttcatgagcaaccgctttgtagaaaccaacctcttcctggaggagattcagatcaaagagccagccgagaagcaaaaattcttccaggagctgagcaagagcctggacgcattccctgaggatttctgtcggcacaaggtgctgccccagctgctgaccgccttcgagttcggcaatgctggggccgttgtcctcacgcccctcttcaaggtgggcaagttcctgagcgctgaggagtatcagcagaagatcatccctgtggtggtcaagatgttctcatccactgaccgggccatgcgcatccgcctcctgcagcagatggagcagttcatccagtaccttgacgagccaacagtcaacacccagatcttcccccacgtcgtacatggcttcctggacaccaaccctgccatccgggagcagacggtcaagtccatgctgctcctggccccaaagctgaacgaggccaacctcaatgtggagctgatgaagcactttgcacggctacaggccaaggatgaacagggccccatccgctgcaacaccacagtctgcctgggcaaaatcggctcctacctcagtgctagcaccagacacagggtccttacctctgccttcagccgagccactagggacccgtttgcaccgtcccgggttgcgggtgtcctgggctttgctgccacccacaacctctactcaatgaacgactgtgcccagaagatcctgcctgtgctctgcggtctcactgtagatcctgagaaatccgtgcgagaccaggccttcaaggccattcggagcttcctgtccaaattggagtctgtgtcggaggacccgacccagctggaggaagtggagaaggatgtccatgcagcctccagccctggcatgggaggagccgcagctagctgggcaggctgggccgtgaccggggtctcctcactcacctccaagctgatccgttcgcacccaaccactgccccaacagaaaccaacattccccaaagacccacgcctgaaggagttcctgccccagcccccacccctgttcctgccacccctacaacctcaggccactgggagacgcaggaggaggacaaggacacagcagaggacagcagcactgctgacagatgggacgacgaagactggggcagcctggagcaggaggccgagtctgtgctggcccagcaggacgactggagcaccgggggccaagtgagccgtgctagtcaggtcagcaactccgaccacaaatcctccaaatccccagagtccgactggagcagctgggaagctgagggctcctgggaacagggctggcaggagccaagctcccaggagccacctcctgacggtacacggctggccagcgagtataactggggtggcccagagtccagcgacaagggcgaccccttcgctaccctgtctgcacgtcccagcacccagccgaggccagactcttggggtgaggacaactgggagggcctcgagactgacagtcgacaggtcaaggctgagctggcccggaagaagcgcgaggagcggcggcgggagatggaggccaaacgcgccgagaggaaggtggccaagggccccatgaagctgggagcccggaagctggactgaaccgtggcggtggcccttcccggctgcggagagcccgccccacagatgtatttattgtacaaaccatgtgagcccggccggcccagccaggccatctcacgtgtacataatcagagccacaataaattctatttcaca

SEQ ID NO: 179128 - DNA, 1659 bp, Homo sapiens
  Payload ID: 15312
  Gene Symbol: SCYL1
  Gene Name: SCY1-like, kinase-like 1
  ENST ID: ENST00000279270
  CDS Start-End: 210-1022
cagccgagaagcaaaaattcttccaggagctgagcaagagcctggacgcattccctgaggatttctgtcggcacaaggtgctgccccagctgctgaccgccttcgagttcggcaatgctggggccgttgtcctcacgcccctcttcaaggtgggcaagttcctgagcgctgaggagtatcagcagaagatcatccctgtggtggtcaagatgttctcatccactgaccgggccatgcgcatccgcctcctgcagcagatggagcagttcatccagtaccttgacgagccaacagtcaacacccagatcttcccccacgtcgtacatggcttcctggacaccaaccctgccatccgggagcagacggtcaagtccatgctgctcctggccccaaagctgaacgaggccaacctcaatgtggagctgatgaagcactttgcacggctacaggccaaggatgaacagggccccatccgctgcaacaccacagtctgcctgggcaaaatcggctcctacctcagtgctagcaccagacacagggtccttacctctgccttcagccgagccactagggacccgtttgcaccgtcccgggttgcgggtgtcctgggctttgctgccacccacaacctctactcaatgaacgactgtgcccagaagatcctgcctgtgctctgcggtctcactgtagatcctgagaaatccgtgcgagaccaggccttcaaggccattcggagcttcctgtccaaattggagtctgtgtcggaggacccgacccagctggaggaagtggagaaggatgtccatgcagcctccagccctggcatgggaggagccgcagctagctgggcaggctgggccgtgaccggggtctcctcactcacctccaagctgatccgttcgcacccaaccactgccccaacagaaaccaacattccccaaagacccacgcctcctacactcaggccactgggagacgcaggaggaggacaaggacacagcagaggacagcagcactgctgacagatgggacgacgaagactggggcagcctggagcaggaggccgagtctgtgctggcccagcaggacgactggagcaccgggggccaagtgagccgtgctagtcaggtcagcaactccgaccacaaatcctccaaatccccagagtccgactggagcagctgggaagctgagggctcctgggaacagggctggcaggagccaagctcccaggagccacctcctgacggtacacggctggccagcgagtataactggggtggcccagagtccagcgacaagggcgaccccttcgctaccctgtctgcacgtcccagcacccagccgaggccagactcttggggtgaggacaactgggagggcctcgagactgacagtcgacaggtcaaggctgagctggcccggaagaagcgcgaggagcggcggcgggagatggaggccaaacgcgccgagaggaaggtggccaagggccccatgaagctgggagcccggaagctggactgaaccgtggcggtggcccttcccggctgcggagagcccgccccacagatgtatttattgtacaaaccatgtgagcccggccggcccagccaggccatctcacgtgtacataatcagagccacaataaattctatttc

SEQ ID NO: 179129 - DNA, 2583 bp, Homo sapiens
  Payload ID: 15312
  Gene Symbol: SCYL1
  Gene Name: SCY1-like, kinase-like 1
  Uniprot ID: Q96KG9
  ENST ID: ENST00000420247
  CDS Start-End: 70-2445
cccgccccggctcgggcggccggaggacccggagctaaggcgcccgaacccgcggcggcggtggggacgatgtggttctttgcccgggacccggtccgggactttccgttcgagctcatcccggagcccccagagggcggcctgcccgggccctgggccctgcaccgcggccgcaagaaggccacaggcagccccgtgtccatcttcgtctatgatgtgaagcctggcgcggaagagcagacccaggtggccaaagctgccttcaagcgcttcaaaactctacggcaccccaacatcctggcttacatcgatggactggagacagaaaaatgcctccacgtcgtgacagaggctgtgaccccgttgggaatatacctcaaggcgagagtggaggctggtggcctgaaggagctggagatctcctgggggctacaccagatcgtgaaagccctcagcttcctggtcaacgactgcagcctcatccacaacaatgtctgcatggccgccgtgttcgtggaccgagctggcgagtggaagcttgggggcctggactacatgtattcggcccagggcaacggtgggggacctccccgcaaggggatccccgagcttgagcagtatgaccccccggagttggctgacagcagtggcagagtggtcagagagaagtggtcagcagacatgtggcgcttgggctgcctcatttgggaagtcttcaatgggcccctacctcgggcagcagccctacgcaaccctgggaagatccccaaaacgctggtgccccattactgtgagctggtgggagcaaaccccaaggtgcgtcccaacccagcccgcttcctgcagaactgccgggcacctggtggcttcatgagcaaccgctttgtagaaaccaacctcttcctggaggagattcagatcaaagagccagccgagaagcaaaaattcttccaggagctgagcaagagcctggacgcattccctgaggatttctgtcggcacaaggtgctgccccagctgctgaccgccttcgagttcggcaatgctggggccgttgtcctcacgcccctcttcaaggtgggcaagttcctgagcgctgaggagtatcagcagaagatcatccctgtggtggtcaagatgttctcatccactgaccgggccatgcgcatccgcctcctgcagcagatggagcagttcatccagtaccttgacgagccaacagtcaacacccagatcttcccccacgtcgtacatggcttcctggacaccaaccctgccatccgggagcagacggtcaagtccatgctgctcctggccccaaagctgaacgaggccaacctcaatgtggagctgatgaagcactttgcacggctacaggccaaggatgaacagggccccatccgctgcaacaccacagtctgcctgggcaaaatcggctcctacctcagtgctagcaccagacacagggtccttacctctgccttcagccgagccactagggacccgtttgcaccgtcccgggttgcgggtgtcctgggctttgctgccacccacaacctctactcaatgaacgactgtgcccagaagatcctgcctgtgctctgcggtctcactgtagatcctgagaaatccgtgcgagaccaggccttcaaggccattcggagcttcctgtccaaattggagtctgtgtcggaggacccgacccagctggaggaagtggagaaggatgtccatgcagcctccagccctggcatgggaggagccgcagctagctgggcaggctgggccgtgaccggggtctcctcactcacctccaagctgatccgttcgcacccaaccactgccccaacagaaaccaacattccccaaagacccacgcctgaaggccactgggagacgcaggaggaggacaaggacacagcagaggacagcagcactgctgacagatgggacgacgaagactggggcagcctggagcaggaggccgagtctgtgctggcccagcaggacgactggagcaccgggggccaagtgagccgtgctagtcaggtcagcaactccgaccacaaatcctccaaatccccagagtccgactggagcagctgggaagctgagggctcctgggaacagggctggcaggagccaagctcccaggagccacctcctgacggtacacggctggccagcgagtataactggggtggcccagagtccagcgacaagggcgaccccttcgctaccctgtctgcacgtcccagcacccagccgaggccagactcttggggtgaggacaactgggagggcctcgagactgacagtcgacaggtcaaggctgagctggcccggaagaagcgcgaggagcggcggcgggagatggaggccaaacgcgccgagaggaaggtggccaagggccccatgaagctgggagcccggaagctggactgaaccgtggcggtggcccttcccggctgcggagagcccgccccacagatgtatttattgtacaaaccatgtgagcccggccggcccagccaggccatctcacgtgtacataatcagagccacaataaattctatttcaca

SEQ ID NO: 179130 - DNA, 2584 bp, Homo sapiens
  Payload ID: 15312
  Gene Symbol: SCYL1
  Gene Name: SCY1-like, kinase-like 1
  ENST ID: ENST00000525364
  CDS Start-End: 78-2420
ctctccgccccgccccggctcgggcggccggaggacccggagctaaggcgcccgaacccgcggcggcggtggggacgatgtggttctttgcccgggacccggtccgggactttccgttcgagctcatcccggagcccccagagggcggcctgcccgggccctgggccctgcaccgcggccgcaagaaggccacaggcagccccgtgtccatcttcgtctatgatgtgaagcctggcgcggaagagcagacccaggtggccaaagctgccttcaagcgcttcaaaactctacggcaccccaacatcctggcttacatcgatggactggagacagaaaaatgcctccacgtcgtgacagaggctgtgaccccgttgggaatatacctcaaggcgagagtggaggctggtggcctgaaggagctggagatctcctgggggctacaccagatcgtgaaagccctcagcttcctggtcaacgactgcagcctcatccacaacaatgtctgcatggccgccgtgttcgtggaccgagctggcgagtggaagcttgggggcctggactacatgtattcggcccagggcaacggtgggggacctccccgcaaggggatccccgagcttgagcagtatgaccccccggagttggctgacagcagtggcagagtggtcagagagaagtggtcagcagacatgtggcgcttgggctgcctcatttgggaagtcttcaatgggcccctacctcgggcagcagccctacgcaaccctgggaagatccccaaaacgctggtgccccattactgtgagctggtgggagcaaaccccaaggtgcgtcccaacccagcccgcttcctgcagaactgccgggcacctggtggcttcatgagcaaccgctttgtagaaaccaacctcttcctggaggagattcagatcaaagagccagccgagaagcaaaaattcttccaggagctgagcaagagcctggacgcattccctgaggatttctgtcggcacaaggtgctgccccagctgctgaccgccttcgagttcggcaatgctggggccgttgtcctcacgcccctcttcaaggtgggcaagttcctgagcgctgaggagtatcagcagaagatcatccctgtggtggtcaagatgttctcatccactgaccgggccatgcgcatccgcctcctgcagcagatggagcagttcatccagtaccttgacgagccaacagtcaacacccagatcttcccccacgtcgtacatggcttcctggacaccaaccctgccatccgggagcagacggtcaagtccatgctgctcctggccccaaagctgaacgaggccaacctcaatgtggagctgatgaagcactttgcacggctacaggccaaggatgaacagggccccatccgctgcaacaccacagtctgcctgggcaaaatcggctcctacctcagtgctagcaccagacacagggtccttacctctgccttcagccgagccactagggacccgtttgcaccgtcccgggttgcgggtgtcctgggctttgctgccacccacaacctctactcaatgaacgactgtgcccagaagatcctgcctgtgctctgcggtctcactgtagatcctgagaaatccgtgcgagaccaggccttcaaggccattcggagcttcctgtccaaattggagtctgtgtcggaggacccgacccagctggaggaagtggagaaggatgtccatgcagcctccagccctggcatgggaggagccgcagctagctgggcaggctgggccgtgaccggggtctcctcactcacctccaagctgatccgttcgcacccaaccactgccccaacagaaaccaacattccccaaagacccacgcctgaaggagttcctgccccagcccccacccctgttcctgccacccctacaacctcaggccactgggagacgcaggaggaggacaaggacacagcagaggacagcagcactgctgacagatgggacgacgaagactggggcagcctggaggaggccgagtctgtgctggcccagcaggacgactggagcaccgggggccaagtgagccgtgctagtcaggtcagcaactccgaccacaaatcctccaaatccccagagtccgactggagcagctgggaagctgagggctcctgggaacagggctggcaggagccaagctcccaggagccacctcctgacggtacacggctggccagcgagtataactggggtggcccagagtccagcgacaagggcgaccccttcgctaccctgtctgcacgtcccagcacccaggacaggtcaaggctgagctggcccggaagaagcgcgaggagcggcggcgggagatggaggccaaacgcgccgagaggaaggtggccaagggccccatgaagctgggagcccggaagctggactgaaccgtggcggtggcccttcccggctgcggagagcccgccccacagatgtatttattgtacaaaccatgtgagcccggccggcccagccaggccatctcacgtgtacataatcagagccacaataaattctatttcaca

SEQ ID NO: 179131 - DNA, 896 bp, Homo sapiens
  Payload ID: 15312
  Gene Symbol: SCYL1
  Gene Name: SCY1-like, kinase-like 1
  ENST ID: ENST00000531601
  CDS Start-End: 1-526
ccacgtcgtacatggcttcctggacaccaaccctgccatccgggagcagacggtcaagtccatgctgctcctggccccaaagctgaacgaggccaacctcaatgtggagctgatgaagcactttgcacggctacaggccaaggatgaacagggccccatccgctgcaacaccacagtctgcctgggcaaaatcggctcctacctcagtgctagcaccagacacagggtccttacctctgccttcagccgagccactagggacccgtttgcaccgtcccgggttgcgggtgtcctgggctttgctgccacccacaacctctactcaatgaacgactgtgcccagaagatcctgcctgtgctctgcggtctcactgtagatcctgagaaatccgtgcgagaccaggccttcaaggccattcggagcttcctgtccaaattggagtctgtgtcggaggacccgacccagctggaggaagtgggatgtccatgcagcctccagccctggcatgggaggagccgcagctagctgggcaggctgggccgtgaccggggtctcctcactcacctccaagctgatccgttcgcacccaaccactgccccaacagaaaccaacattccccaaagacccacgcctgaaggagttcctgccccagcccccacccctgttcctgccacccctacaacctcaggccactgggagacgcaggaggaggacaaggacacagcagaggacagcagcactgctgacagatgggacgacgaagactggggcagcctggagcaggaggccgagtctgtgctggcccagcaggacgactggagcaccgggggccaagtgagccgtgctagtcaggtcagcaactccgaccacaaatcctccaaatccccagagtcc

SEQ ID NO: 179132 - DNA, 2715 bp, Homo sapiens
  Payload ID: 15312
  Gene Symbol: SCYL1
  Gene Name: SCY1-like, kinase-like 1
  ENST ID: ENST00000524944
  CDS Start-End: 34-2361
aaggcgcccgaacccgcggcggcggtggggacgatgtggttctttgcccgggacccggtccgggactttccgttcgagctcatcccggagcccccagagggcggcctgcccgggccctgggccctgcaccgcggccgcaagaaggccacaggcagccccgtgtccatcttcgtctatgatgtgaagcctggcgcggaagagcagacccaggtggccaaagctgccttcaagcgcttcaaaactctacggcaccccaacatcctggcttacatcgatggactggagacagaaaaatgcctccacgtcgtgacagaggctgtgaccccgttgggaatatacctcaaggcgagagtggaggctggtggcctgaaggagctggagatctcctgggggctacaccagatcgtgaaagccctcagcttcctggtcaacgactgcagcctcatccacaacaatgtctgcatggccgccgtgttcgtggaccgagctggcgagtggaagcttgggggcctggactacatgtattcggcccagggcaacggtgggggacctccccgcaaggggatccccgagcttgagcagtatgaccccccggagttggctgacagcagtggcagagtggtcagagagaagtggtcagcagacatgtggcgcttgggctgcctcatttgggaagtcttcaatgggcccctacctcgggcagcagccctacgcaaccctgggaagatccccaaaacgctggtgccccattactgtgagctggtgggagcaaaccccaaggtgcgtcccaacccagcccgcttcctgcagaactgccgggcacctggtggcttcatgagcaaccgctttgtagaaaccaacctcttcctggaggagattcagatcaaagagccagccgagaagcaaaaattcttccaggagctgagcaagagcctggacgcattccctgaggatttctgtcggcacaaggtgctgccccagctgctgaccgccttcgagttcggcaatgctggggccgttgtcctcacgcccctcttcaaggtgggcaagttcctgagcgctgaggagtatcagcagaagatcatccctgtggtggtcaagatgttctcatccactgaccgggccatgcgcatccgcctcctgcagcagatggagcagttcatccagtaccttgacgagccaacagtcaacacccagatcttcccccacgtcgtacatggcttcctggacaccaaccctgccatccgggagcagacggtcaagtccatgctgctcctggccccaaagctgaacgaggccaacctcaatgtggagctgatgaagcactttgcacggctacaggccaaggatgaacagggccccatccgctgcaacaccacagtctgcctgggcaaaatcggctcctacctcagtgctagcaccagacacagggtccttacctctgccttcagccgagccactagggacccgtttgcaccgtcccgggttgcgggtgtcctgggctttgctgccacccacaacctctactcaatgaacgactgtgcccagaagatcctgcctgtgctctgcggtctcactgtagatcctgagaaatccgtgcgagaccaggccttcaaggccattcggagcttcctgtccaaattggagtctgtgtcggaggacccgacccagctggaggaagtggagaaggatgtccatgcagcctccagccctggcatgggaggagccgcagctagctgggcaggctgggccgtgaccggggtctcctcactcacctccaagctgatccgttcgcacccaaccactgccccaacagaaaccaacattccccaaagacccacgcctgaaggagttcctgccccagcccccacccctgttcctgccacccctacaacctcaggccactgggagacgcaggaggaggacaaggacacagcagaggacagcagcactgctgacagatgggacgacgaagactggggcagcctggagcaggaggccgagtctgtgctggcccagcaggacgactggagcaccgggggccaagtgagccgtgctagtcaggtcagcaactccgaccacaaatcctccaaatccccagagtccgactggagcagctgggaagctgagggctcctgggaacagggctggcaggagccaagctcccaggagccacctcctgacggtacacggctggccagcgagtataactggggtggcccagagtccagcgacaagggcgaccccttcgctaccctgtctgcacgtcccagcacccagccgaggccagactcttggggtgaggacaactgggagggcctcgagactgacagtcgtaagtgcttcccctgggtgggctgaagactagggctccccgactagcccgcccctacaggcccccggcaggcactggctggagagctgagaccggggctccccttcctgacgccaggacaggtcaaggctgagctggcccggaagaagcgcgaggagcggcggcgggagatggaggccaaacgcgccgagaggaaggtggccaagggccccatgaagctgggagcccggaagctggactgaaccgtggcggtggcccttcccggctgcggagagcccgccccacagatgtatttattgtacaaaccatgtgagcccggccggcccagccaggccatctcacgtgtacataatcagagccacaataaattctatttcaca

SEQ ID NO: 179133 - DNA, 981 bp, Homo sapiens
  Payload ID: 15312
  Gene Symbol: SCYL1
  Gene Name: SCY1-like, kinase-like 1
  ENST ID: ENST00000528545
  CDS Start-End: 1-843
aaggccattcggagcttcctgtccaaattggagtctgtgtcggaggacccgacccagctggaggaagtggagaaggatgtccatgcagcctccagccctggcatgggaggagccgcagctagctgggcaggctgggccgtgaccggggtctcctcactcacctccaagctgatccgttcgcacccaaccactgccccaacagaaaccaacattccccaaagacccacgcctgaaggagttcctgccccagcccccacccctgttcctgccacccctacaacctcaggccactgggagacgcaggaggaggacaaggacacagcagaggacagcagcactgctgacagatgggacgacgaagactggggcagcctggaggaggccgagtctgtgctggcccagcaggacgactggagcaccgggggccaagtgagccgtgctagtcaggtcagcaactccgaccacaaatcctccaaatccccagagtccgactggagcagctgggaagctgagggctcctgggaacagggctggcaggagccaagctcccaggagccacctcctgacggtacacggctggccagcgagtataactggggtggcccagagtccagcgacaagggcgaccccttcgctaccctgtctgcacgtcccagcacccagccgaggccagactcttggggtgaggacaactgggagggcctcgagactgacagtcgacaggtcaaggctgagctggcccggaagaagcgcgaggagcggcggcgggagatggaggccaaacgcgccgagaggaaggtggccaagggccccatgaagctgggagcccggaagctggactgaaccgtggcggtggcccttcccggctgcggagagcccgccccacagatgtatttattgtacaaaccatgtgagcccggccggcccagccaggccatctcacgtgtacataatcagagccacaataaattctatttcaca

SEQ ID NO: 179134 - DNA, 2586 bp, Homo sapiens
  Payload ID: 15312
  Gene Symbol: SCYL1
  Gene Name: SCY1-like, kinase-like 1
  ENST ID: ENST00000527009
  CDS Start-End: 480-2477
ggcggagggaccgagggaccgacaggcggacagggccggggtcacgtgggcccggcgaagtgtccctaaggctgacctggggagagacctggctgcgggcccttgtcttccggccacacaacagctctgggaccatctcaggccccgctgccctcccctaggccacaggcagccccgtgtccatcttcgtctatgatgtgaagcctggcgcggaagagcagacccaggtggccaaagctgccttcaagcgcttcaaaactctacggcaccccaacatcctggcttacatcgatggactggagacagaaaaatgcctccacgtcgtgacagaggctgtgaccccgttgggaatatacctcaaggcgagagtggaggctggtggcctgaaggagctggagatctcctgggggctacaccagatcgtgaaagccctcagcttcctggtcaacgactgcagcctcatccacaacaatgtctgcatggccgccgtgttcgtggaccgagctggcgagtggaagcttgggggcctggactacatgtattcggcccagggcaacggtgggggacctccccgcaaggggatccccgagcttgagcagtatgaccccccggagttggctgacagcagtggcagagtggtcagagagaagtggtcagcagacatgtggcgcttgggctgcctcatttgggaagtcttcaatgggcccctacctcgggcagcagccctacgcaaccctgggaagatccccaaaacgctggtgccccattactgtgagctggtgggagcaaaccccaaggtgcgtcccaacccagcccgcttcctgcagaactgccgggcacctggtggcttcatgagcaaccgctttgtagaaaccaacctcttcctggaggagattcagatcaaagagccagccgagaagcaaaaattcttccaggagctgagcaagagcctggacgcattccctgaggatttctgtcggcacaaggtgctgccccagctgctgaccgccttcgagttcggcaatgctggggccgttgtcctcacgcccctcttcaaggtgggcaagttcctgagcgctgaggagtatcagcagaagatcatccctgtggtggtcaagatgttctcatccactgaccgggccatgcgcatccgcctcctgcagcagatggagcagttcatccagtaccttgacgagccaacagtcaacacccagatcttcccccacgtcgtacatggcttcctggacaccaaccctgccatccgggagcagacggtcaagtccatgctgctcctggccccaaagctgaacgaggccaacctcaatgtggagctgatgaagcactttgcacggctacaggccaaggatgaacagggccccatccgctgcaacaccacagtctgcctgggcaaaatcggctcctacctcagtgctagcaccagacacagggtccttacctctgccttcagccgagccactagggacccgtttgcaccgtcccgggttgcgggtgtcctgggctttgctgccacccacaacctctactcaatgaacgactgtgcccagaagatcctgcctgtgctctgcggtctcactgtagatcctgagaaatccgtgcgagaccaggccttcaaggccattcggagcttcctgtccaaattggagtctgtgtcggaggacccgacccagctggaggaagtggagaaggatgtccatgcagcctccagccctggcatgggaggagccgcagctagctgggcaggctgggccgtgaccggggtctcctcactcacctccaagctgatccgttcgcacccaaccactgccccaacagaaaccaacattccccaaagacccacgcctgaaggagttcctgccccagcccccacccctgttcctgccacccctacaacctcaggccactgggagacgcaggaggaggacaaggacacagcagaggacagcagcactgctgacagatgggacgacgaagactggggcagcctggagcaggaggccgagtctgtgctggcccagcaggacgactggagcaccgggggccaagtgagccgtgctagtcaggtcagcaactccgaccacaaatcctccaaatccccagagtccgactggagcagctgggaagctgagggctcctgggaacagggctggcaggagccaagctcccaggagccacctcctgacggtacacggctggccagcgagtataactggggtggcccagagtccagcgacaagggcgaccccttcgctaccctgtctgcacgtcccagcacccagccgaggccagactcttggggtgaggacaactgggagggcctcgagactgacagtcgacaggtcaaggctgagctggcccggaagaagcgcgaggagcggcggcgggagatggaggccaaacgcgccgagaggaaggtggccaagggccccatgaagctgggagcccggaagctggactgaaccgtggcggtggcccttcccggctgcggagagcccgccccacagatgtatttattgtacaaaccatgtgagcccggccggcccagccaggccatctcacgtgtacata

SEQ ID NO: 179135 - DNA, 2570 bp, Homo sapiens
  Payload ID: 15312
  Gene Symbol: SCYL1
  Gene Name: SCY1-like, kinase-like 1
  Uniprot ID: Q96KG9
  ENST ID: ENST00000533862
  CDS Start-End: 43-2406
cccggagctaaggcgcccgaacccgcggcggcggtggggacgatgtggttctttgcccgggacccggtccgggactttccgttcgagctcatcccggagcccccagagggcggcctgcccgggccctgggccctgcaccgcggccgcaagaaggccacaggcagccccgtgtccatcttcgtctatgatgtgaagcctggcgcggaagagcagacccaggtggccaaagctgccttcaagcgcttcaaaactctacggcaccccaacatcctggcttacatcgatggactggagacagaaaaatgcctccacgtcgtgacagaggctgtgaccccgttgggaatatacctcaaggcgagagtggaggctggtggcctgaaggagctggagatctcctgggggctacaccagatcgtgaaagccctcagcttcctggtcaacgactgcagcctcatccacaacaatgtctgcatggccgccgtgttcgtggaccgagctggcgagtggaagcttgggggcctggactacatgtattcggcccagggcaacggtgggggacctccccgcaaggggatccccgagcttgagcagtatgaccccccggagttggctgacagcagtggcagagtggtcagagagaagtggtcagcagacatgtggcgcttgggctgcctcatttgggaagtcttcaatgggcccctacctcgggcagcagccctacgcaaccctgggaagatccccaaaacgctggtgccccattactgtgagctggtgggagcaaaccccaaggtgcgtcccaacccagcccgcttcctgcagaactgccgggcacctggtggcttcatgagcaaccgctttgtagaaaccaacctcttcctggaggagattcagatcaaagagccagccgagaagcaaaaattcttccaggagctgagcaagagcctggacgcattccctgaggatttctgtcggcacaaggtgctgccccagctgctgaccgccttcgagttcggcaatgctggggccgttgtcctcacgcccctcttcaaggtgggcaagttcctgagcgctgaggagtatcagcagaagatcatccctgtggtggtcaagatgttctcatccactgaccgggccatgcgcatccgcctcctgcagcagatggagcagttcatccagtaccttgacgagccaacagtcaacacccagatcttcccccacgtcgtacatggcttcctggacaccaaccctgccatccgggagcagacggtcaagtccatgctgctcctggccccaaagctgaacgaggccaacctcaatgtggagctgatgaagcactttgcacggctacaggccaaggatgaacagggccccatccgctgcaacaccacagtctgcctgggcaaaatcggctcctacctcagtgctagcaccagacacagggtccttacctctgccttcagccgagccactagggacccgtttgcaccgtcccgggttgcgggtgtcctgggctttgctgccacccacaacctctactcaatgaacgactgtgcccagaagatcctgcctgtgctctgcggtctcactgtagatcctgagaaatccgtgcgagaccaggccttcaaggccattcggagcttcctgtccaaattggagtctgtgtcggaggacccgacccagctggaggaagtggagaaggatgtccatgcagcctccagccctggcatgggaggagccgcagctagctgggcaggctgggccgtgaccggggtctcctcactcacctccaagctgatccgttcgcacccaaccactgccccaacagaaaccaacattccccaaagacccacgcctgaaggagttcctgccccagcccccacccctgttcctgccacccctacaacctcaggccactgggagacgcaggaggaggacaaggacacagcagaggacagcagcactgctgacagatgggacgacgaagactggggcagcctggagcaggaggccgagtctgtgctggcccagcaggacgactggagcaccgggggccaagtgagccgtgctagtcagagtccgactggagcagctgggaagctgagggctcctgggaacagggctggcaggagccaagctcccaggagccacctcctgacggtacacggctggccagcgagtataactggggtggcccagagtccagcgacaagggcgaccccttcgctaccctgtctgcacgtcccagcacccagccgaggccagactcttggggtgaggacaactgggagggcctcgagactgacagtcgacaggtcaaggctgagctggcccggaagaagcgcgaggagcggcggcgggagatggaggccaaacgcgccgagaggaaggtggccaagggccccatgaagctgggagcccggaagctggactgaaccgtggcggtggcccttcccggctgcggagagcccgccccacagatgtatttattgtacaaaccatgtgagcccggccggcccagccaggccatctcacgtgtacataatcagagccacaataaattctatttcaca

SEQ ID NO: 179136 - DNA, 5779 bp, Homo sapiens
  Payload ID: 15313
  Gene Symbol: SCYL2
  Gene Name: SCY1-like, kinase-like 2
  Uniprot ID: Q6P3W7
  ENST ID: ENST00000360820
  CDS Start-End: 438-3227
gaagaaggaagaggtaagtgaccggccgccggcaccgaccgacctccctcaccggcggctctctcgcctgggctcccggagccggcgaggagggaatggaggactcgcgcccgggttaggcctcccagggccgctcaggctggtgggtgttgcctggtgacgggcctgccggcggccggccgggcgatcggcggtcggcgcccgcgcaaagcggggctggacgagcagcgagctccggggagcggatccgagagggccgagtcctcgaaagaggccttgaggcgacgggagacccgggatcgaagtcagctgccggagggagagccccccatgccggctcgagagctcgggtttcggtggtggagaacgtagtacctttcggggacattggacactactctaggaccgggtaactataactacccaatattgcagccatggagtccatgcttaataaattgaagagtactgttacaaaagtaacagctgatgtcactagtgctgtaatgggaaatcctgtcactagagaatttgatgttggtcgacacattgccagtggtggcaatgggctagcttggaagatttttaatggcacaaaaaagtcaacaaagcaggaagtggcagtttttgtctttgataaaaaactgattgacaagtatcaaaaatttgaaaaggatcaaatcattgattctctaaaacgaggagtccaacagttaactcggcttcgacaccctcgacttcttactgtccagcatcctttagaagaatccagggattgcttggcattttgtacagaaccagtttttgccagtttagccaatgttcttggtaactgggaaaatctaccttcccctatatctccagacattaaggattataaactttatgatgtagaaaccaaatatggtttgcttcaggtttctgaaggattgtcattcttgcatagcagtgtgaaaatggtgcatggaaatatcactcctgaaaatataattttgaataaaagtggagcctggaaaataatgggttttgatttttgtgtatcatcaaccaatccttctgaacaagagcctaaatttccttgtaaagaatgggacccaaatttaccttcattgtgtcttccaaatcctgaatatttggctcctgaatacatactttctgtgagctgtgaaacagccagtgatatgtattctttaggaactgttatgtatgctgtatttaataaagggaaacctatatttgaagtcaacaagcaagatatttacaagagtttcagtaggcagttggatcagttgagtcgtttaggatctagttcacttacaaatatacctgaggaagttcgtgaacatgtaaagctactgttaaatgtaactccgactgtaagaccagatgcagatcaaatgacaaagattcccttctttgatgatgttggtgcagtaacactgcaatattttgataccttattccaaagagataatcttcagaaatcacagtttttcaaaggactgccaaaggttctaccaaaactgcccaagcgtgtcattgtgcagagaattttgccttgtttgacttcagaatttgtaaaccctgacatggtaccttttgttttgcccaatgttctacttattgctgaggaatgcaccaaagaagaatatgtcaaattaattcttcctgaacttggccctgtgtttaagcagcaggagccaatccagattttgttaattttcctacaaaaaatggatttgctactaaccaaaacccctcctgatgagataaagaacagtgttctacccatggtttacagagcactagaagctccttccattcagatccaggagctctgtctaaacatcattccaacctttgcaaatcttatagactacccatccatgaaaaacgctttgataccaagaattaaaaatgcttgtctacaaacatcttcccttgcggttcgtgtaaattcattagtgtgcttaggaaagattttggaatacttggataagtggtttgtacttgatgatatcctacccttcttacaacaaattccatccaaggaacctgcggtcctcatgggaattttaggtatttacaaatgtacttttactcataagaagttgggaatcaccaaagagcagctggccggaaaagtgttgcctcatcttattcccctgagtattgaaaacaatcttaatcttaatcagttcaattctttcatttccgtcataaaagaaatgcttaatagattggagtctgaacataagactaaactggagcaacttcatataatgcaagaacagcagaaatctttggatataggaaatcaaatgaatgtttctgaggagatgaaagttacaaatattgggaatcagcaaattgacaaagtttttaacaacattggagcagaccttctgactggcagtgagtccgaaaataaagaggacgggttacagaataaacataaaagagcatcacttacacttgaagaaaaacaaaaattagcaaaagaacaagagcaggcacagaagctgaaaagccagcagcctcttaaaccccaagtgcacacacctgttgctactgttaaacagactaaggacttgacagacacactgatggataatatgtcatccttgaccagcctttctgttagtacccctaaatcttctgcttcaagtactttcacttctgttccttccatgggcattggtatgatgttttctacaccaactgataatacaaagagaaatttgacaaatggcctaaatgccaatatgggctttcagacttcaggattcaacatgcccgttaatacaaaccagaacttctacagtagtccaagcacagttggagtgaccaagatgactctgggaacacctcccactttgccaaacttcaatgctttgagtgttcctcctgctggtgcaaagcagacccaacaaagacccacagatatgtctgcccttaataatctctttggccctcagaaacccaaagttagcatgaaccagttatcacaacagaaaccaaatcagtggcttaatcagtttgtacctcctcaaggttctccaactatgggcagttcagtaatggggacacagatgaacgtgataggacaatctgcttttggtatgcagggtaatcctttctttaacccacagaactttgcacagccaccaactactatgaccaatagcagttcagctagcaatgatttaaaagatctttttgggtgaggtgtcttacttctattttgaaggattatttcagtttcaatcatgggtgagctgatttacatctttatatagttggcttggaggaagtacttctatgggaaagtgaacagttctgtgacaggaaacatctctgtccatgccagcatagtagttgtatggacttctaaccagttgagttttttaaagcattgaggattttttcctcttaccaactcctcttcaggtttttaaagacccagcccttcccaatctcaaagagaaaaaggaaactgagttatcttgaataacataactttttaatcaaatgtttattttggcttgtggatcttggtgttatttaaaaaattgaggtgatggtcattgcaagctcatctattaagtactatatggtacacagtctatgagtcattagtcttcattttaatatgtaaaaaatcttgatgctgtattgatttgtttgcatttaagatgacagtgagaaaatgataagcataaagagaagtatcaggttatttgctttttccaaacttttcagatgaactattgtttagtacagagactgagcaaatactacaaaattcaacttaaccttcatttcattggtttaaatgcgttattaaccatcttaagtgcaaactaatcattgtaaattatattttagcatggtctgcctcaaatagtaatgtatttttctgcattcacttggatatatttagaatcacttttttcctcctgtatcaaggaagaggtatgtgctgatttgtttggatatttgacaaggcactctgatgtgacttccctgactactaccttcatatttcatttcaaattcaaacttctgaggttgcagcatatatgaattgcattttcaaaagaagatttgtaagaattaaactatatttatgagtaaacttttgaggtttctgctgtattgtttcaaatgtaataaactttacttctgtaaaaattgagcagttgtatcttctgaccaccaacagattttcagcttgccatgatagtctgacctcattaattactgctactgaagttcaatttttttctaggaattttaggaaccttttgtttaaatattttaatttctattagccatttttaggaaggaaagaatcaattctcttaacaggaaacatgctttatttttcaaaacctttctctgatatttttctttaatttgctgattattcaaccacagagccttatgctataaatgtcatttgtattttaaaaaataatattccactcataaaactttaaaaccatctttcaacgaactatatatgtattatagttgctgccatagagttgatggtttttaattatctggaaccagcaatcatttaaaataaaccatattaagtttagtatgctggtattgtttattcattttatatgaatattcattgaaaatatatacacaatatatgtaatacacagcacttgattacaaaatgtaatttaattatattattgctggcagcattcagttaagagggtactttaaaaaatagaagtcagctttcacatctgatttctgtatgggctgtacttggttaacttgattttagaaaaaggactaacagaattgctaaagaaatgcatccaataaatgaaaaacagtaggaagatcaaatgtttttgtcaaatatattcacaacttgaccagattagctgtcctgtttgtaatgcaatattaatatgtcttttgggaaaaagcctacatatggaataaaataagtattgaagaatttttctttgtaacaatttagtagtcactgtttattgagaaattgttttttattttgtaaaataacatgatgttagtgttgaactcttaaacagaaagaaagcttaatataacagcttatagaacttgaactactaaatatgaaaataagtcatttgaaaaaaatacagtatgtaaaatttgttcattcgttgaggtaatggtgctatgtttttacaaaattgttcctacaccttttttctacttcaggtattttatttcaaccatttccatcaattgaactgttaccattgcctttttctgttgagaaattgcctctgaaaaatagtgctatttttcagcttaagtgttcttaagtgaatgaaattttcaaagtactagatcaccttaaaattatttcacgtactgaagacaattaagtccgttatgtttagagtagaaaatgtttaggttaaagagcatctgtcaacagaatctacaaaaaagattcccttgcatttgaattagttctctattctcctattgctaaatgtgtgatatatagagaggatgtataaaaggaaatggaaatagactatgtacttgtctggtttttgtttgtttttattttggaatgcttataagcctcctttacactgaataaggaagtagtttttgttttcttttgacctgtaaaatacctcacatggttgtttttacacatgaaagaaaaaggtatatgcgaacatacctgatatcaagaggagtatgcaccaaataaattttagctttgataaaactttccata

SEQ ID NO: 179137 - DNA, 2328 bp, Homo sapiens
  Payload ID: 15313
  Gene Symbol: SCYL2
  Gene Name: SCY1-like, kinase-like 2
  ENST ID: ENST00000549687
  CDS Start-End: 286-2328
aggaagtgacgtcatgcccccggccggcaggtcttttagtctttttccccctcccttactcttcgtccccggtccctcccctccccacccctttccttctagctccgacgtttgcggccgcgggggcggcggaggatatggagtaaagccagagtcagtggccaggcacgaaggcagagcaggaacagccaggaggcgtttattaggggggcggggggaaagagccccagcaccgcccctcctggaagaaggaagaggtaactataactacccaatattgcagccatggagtccatgcttaataaattgaagagtactgttacaaaagtaacagctgatgtcactagtgctgtaatgggaaatcctgtcactagagaatttgatgttggtcgacacattgccagtggtggcaatgggctagcttggaagatttttaatggcacaaaaaagtcaacaaagcaggaagtggcagtttttgtctttgataaaaaactgattgacaagtatcaaaaatttgaaaaggatcaaatcattgattctctaaaacgaggagtccaacagttaactcggcttcgacaccctcgacttcttactgtccagcatcctttagaagaatccagggattgcttggcattttgtacagaaccagtttttgccagtttagccaatgttcttggtaactgggaaaatctaccttcccctatatctccagacattaaggattataaactttatgatgtagaaaccaaatatggtttgcttcaggtttctgaaggattgtcattcttgcatagcagtgtgaaaatggtgcatggaaatatcactcctgaaaatataattttgaataaaagtggagcctggaaaataatgggttttgatttttgtgtatcatcaaccaatccttctgaacaagagcctaaatttccttgtaaagaatgggacccaaatttaccttcattgtgtcttccaaatcctgaatatttggctcctgaatacatactttctgtgagctgtgaaacagccagtgatatgtattctttaggaactgttatgtatgctgtatttaataaagggaaacctatatttgaagtcaacaagcaagatatttacaagagtttcagtaggcagttggatcagttgagtcgtttaggatctagttcacttacaaatatacctgaggaagttcgtgaacatgtaaagctactgttaaatgtaactccgactgtaagaccagatgcagatcaaatgacaaagattcccttctttgatgatgttggtgcagtaacactgcaatattttgataccttattccaaagagataatcttcagaaatcacagtttttcaaaggactgccaaaggttctaccaaaactgcccaagcgtgtcattgtgcagagaattttgccttgtttgacttcagaatttgtaaaccctgacatggtaccttttgttttgcccaatgttctacttattgctgaggaatgcaccaaagaagaatatgtcaaattaattcttcctgaacttggccctgtgtttaagcagcaggagccaatccagattttgttaattttcctacaaaaaatggatttgctactaaccaaaacccctcctgatgagataaagaacagtgttctacccatggtttacagagcactagaagctccttccattcagatccaggagctctgtctaaacatcattccaacctttgcaaatcttatagactacccatccatgaaaaacgctttgataccaagaattaaaaatgcttgtctacaaacatcttcccttgcggttcgtgtaaattcattagtgtgcttaggaaagattttggaatacttggataagtggtttgtacttgatgatatcctacccttcttacaacaaattccatccaaggaacctgcggtcctcatgggaattttaggtatttacaaatgtacttttactcataagaagttgggaatcaccaaagagcagctggccggaaaagtgttgcctcatcttattcccctgagtattgaaaacaatcttaatcttaatcagttcaattctttcatttccgtcataaaagaaatgcttaatagattggagtctgaacataagactaaactggagcaacttcatataatgcaagaacagcagaaatctttggatataggaaatcaaatgaatgtttctgaggagatgaaagttacaaatattgggaatcagcaaattgacaaagtttttaacaacattggagcagaccttctgactggcagtgagtccgaaaataaagaggacgggttacagaataaacataaaagagcatcacttacacttgaa

SEQ ID NO: 179138 - DNA, 429 bp, Homo sapiens
  Payload ID: 15313
  Gene Symbol: SCYL2
  Gene Name: SCY1-like, kinase-like 2
  ENST ID: ENST00000548871
  CDS Start-End: 1-182
caagaattaaaaatgcttgtctacaaacatcttcccttgcggttcgtgtaaattcattagtgtgcttaggaaagattttggaatacttggataagtggtttgtacttgatgatatcctacccttcttacaacaaattccatccaaggaacctgcggtcctcatgggaattttaggaaactgaggctcagagaggtaaaataagtgattcaagatcatataagtggtatttacaaatgtacttttactcataagaagttgggaatcaccaaagagcagctggccggaaaagtgttgcctcatcttattcccctgagtattgaaaacaatcttaatcttaatcagttcaattctttcatttccgtcataaaagaaatgcttaatagattggagtctgaacataagactaaactggagcaacttcatataat

SEQ ID NO: 179139 - DNA, 501 bp, Homo sapiens
  Payload ID: 15313
  Gene Symbol: SCYL2
  Gene Name: SCY1-like, kinase-like 2
  ENST ID: ENST00000550251
  CDS Start-End: 1-345
cgtgtcattgtgcagagaattttgccttgtttgacttcagaatttgtaaaccctgacatggtaccttttgttttgcccaatgttctacttattgctgaggaatgcaccaaagaagaatatgtcaaattaattcttcctgaacttggccctgtgtttaagcagcaggagccaatccagattttgttaattttcctacaaaaaatggatttgctactaaccaaaacccctcctgatgagataaagaacagtgttctacccatggtttacagagcactagaagctccttccattcagatccagatttgccttcttaaaggtgagggtatgctgcctttgtccaaatgacatggatgagtggggaaggagctctgtctaaacatcattccaacctttgcaaatcttatagactacccatccatgaaaaacgctttgataccaagaattaaaaatgcttgtctacaaacatcttcccttgcggttcgtgtaaattcattagtgtgc

SEQ ID NO: 179140 - DNA, 790 bp, Homo sapiens
  Payload ID: 15313
  Gene Symbol: SCYL2
  Gene Name: SCY1-like, kinase-like 2
  ENST ID: ENST00000548392
  CDS Start-End: 563-790
agtctttttccccctcccttactcttcgtccccggtccctcccctccccacccctttccttctagctccgacgtttgcggccgcgggggcggcggaggatatggagtaaagccagagtcagtggccaggcacgaaggcagagcaggaacagccaggaggcgtttattaggggggcggggggaaagagccccagcaccgcccctcctggaagaaggaagaggaagtggcagtttttgtctttgataaaaaactgattgacaagtatcaaaaatttgaaaaggatcaaatcattgattctctaaaacgaggagtccaacagttaactcggcttcgacaccctcgacttcttactgtccagcatcctttagaagaatccagggattgcttggcattttgtacagaaccagtttttgccagtttagccaatgttcttggtaactgggaaaatctaccttcccctatatctccagacattaaggattataaactttatgatgtagaaaccaaatatggtttgcttcaggtttctgaaggattgtcattcttgcatagcagtgtgaaaatggtgcatggaaatatcactcctgaaaatataattttgaataaaagtggagcctggaaaataatgggttttgatttttgtgtatcatcaaccaatccttctgaacaagagcctaaatttccttgtaaagaatgggacccaaatttaccttcattgtgtcttccaaatcctgaatatttggctcctgaatacatactttctgtgagctgtgaaacagccagtgatatg

SEQ ID NO: 179141 - DNA, 3948 bp, Homo sapiens
  Payload ID: 15313
  Gene Symbol: SCYL2
  Gene Name: SCY1-like, kinase-like 2
  ENST ID: ENST00000635101
  CDS Start-End: 180-2981
gacgtttgcggccgcgggggcggcggaggatatggagtaaagccagagtcagtggccaggcacgaaggcagagcaggaacagccaggaggcgtttattaggggggcggggggaaagagccccagcaccgcccctcctggaagaaggaagaggtaactataactacccaatattgcagccatggagtccatgcttaataaattgaagagtactgttacaaaagtaacagctgatgtcactagtgctgtaatgggaaatcctgtcactagagaatttgatgttggtcgacacattgccagtggtggcaatgggctagcttggaagatttttaatggcacaaaaaagtcaacaaagcaggaagtggcagtttttgtctttgataaaaaactgattgacaagtatcaaaaatttgaaaaggatcaaatcattgattctctaaaacgaggagtccaacagttaactcggcttcgacaccctcgacttcttactgtccagcatcctttagaagaatccagggattgcttggcattttgtacagaaccagtttttgccagtttagccaatgttcttggtaactgggaaaatctaccttcccctatatctccagacattaaggattataaactttatgatgtagaaaccaaatatggtttgcttcaggtttctgaaggattgtcattcttgcatagcagtgtgaaaatggtgcatggaaatatcactcctgaaaatataattttgaataaaagtggagcctggaaaataatgggttttgatttttgtgtatcatcaaccaatccttctgaacaagagcctaaatttccttgtaaagaatgggacccaaatttaccttcattgtgtcttccaaatcctgaatatttggctcctgaatacatactttctgtgagctgtgaaacagccagtgatatgtattctttaggaactgttatgtatgctgtatttaataaagggaaacctatatttgaagtcaacaagcaagatatttacaagagtttcagtaggcagttggatcagttgagtcgtttaggatctagttcacttacaaatatacctgaggaagttcgtgaacatgtaaagctactgttaaatgtaactccgactgtaagaccagatgcagatcaaatgacaaagattcccttctttgatgatgttggtgcagtaacactgcaatattttgataccttattccaaagagataatcttcagaaatcacagtttttcaaaggactgccaaaggttctaccaaaactgcccaagcgtgtcattgtgcagagaattttgccttgtttgacttcagaatttgtaaaccctgacatggtaccttttgttttgcccaatgttctacttattgctgaggaatgcaccaaagaagaatatgtcaaattaattcttcctgaacttggccctgtgtttaagcagcaggagccaatccaggctagcaacatgattttgttaattttcctacaaaaaatggatttgctactaaccaaaacccctcctgatgagataaagaacagtgttctacccatggtttacagagcactagaagctccttccattcagatccaggagctctgtctaaacatcattccaacctttgcaaatcttatagactacccatccatgaaaaacgctttgataccaagaattaaaaatgcttgtctacaaacatcttcccttgcggttcgtgtaaattcattagtgtgcttaggaaagattttggaatacttggataagtggtttgtacttgatgatatcctacccttcttacaacaaattccatccaaggaacctgcggtcctcatgggaattttaggtatttacaaatgtacttttactcataagaagttgggaatcaccaaagagcagctggccggaaaagtgttgcctcatcttattcccctgagtattgaaaacaatcttaatcttaatcagttcaattctttcatttccgtcataaaagaaatgcttaatagattggagtctgaacataagactaaactggagcaacttcatataatgcaagaacagcagaaatctttggatataggaaatcaaatgaatgtttctgaggagatgaaagttacaaatattgggaatcagcaaattgacaaagtttttaacaacattggagcagaccttctgactggcagtgagtccgaaaataaagaggacgggttacagaataaacataaaagagcatcacttacacttgaagaaaaacaaaaattagcaaaagaacaagagcaggcacagaagctgaaaagccagcagcctcttaaaccccaagtgcacacacctgttgctactgttaaacagactaaggacttgacagacacactgatggataatatgtcatccttgaccagcctttctgttagtacccctaaatcttctgcttcaagtactttcacttctgttccttccatgggcattggtatgatgttttctacaccaactgataatacaaagagaaatttgacaaatggcctaaatgccaatatgggctttcagacttcaggattcaacatgcccgttaatacaaaccagaacttctacagtagtccaagcacagttggagtgaccaagatgactctgggaacacctcccactttgccaaacttcaatgctttgagtgttcctcctgctggtgcaaagcagacccaacaaagacccacagatatgtctgcccttaataatctctttggccctcagaaacccaaagttagcatgaaccagttatcacaacagaaaccaaatcagtggcttaatcagtttgtacctcctcaaggttctccaactatgggcagttcagtaatggggacacagatgaacgtgataggacaatctgcttttggtatgcagggtaatcctttctttaacccacagaactttgcacagccaccaactactatgaccaatagcagttcagctagcaatgatttaaaagatctttttgggtgaggtgtcttacttctattttgaaggattatttcagtttcaatcatgggtgagctgatttacatctttatatagttggcttggaggaagtacttctatgggaaagtgaacagttctgtgacaggaaacatctctgtccatgccagcatagtagttgtatggacttctaaccagttgagttttttaaagcattgaggattttttcctcttaccaactcctcttcaggtttttaaagacccagcccttcccaatctcaaagagaaaaaggaaactgagttatcttgaataacataactttttaatcaaatgtttattttggcttgtggatcttggtgttatttaaaaaattgaggtgatggtcattgcaagctcatctattaagtactatatggtacacagtctatgagtcattagtcttcattttaatatgtaaaaaatcttgatgctgtattgatttgtttgcatttaagatgacagtgagaaaatgataagcataaagagaagtatcaggttatttgctttttccaaacttttcagatgaactattgtttagtacagagactgagcaaatactacaaaattcaacttaaccttcatttcattggtttaaatgcgttattaaccatcttaagtgcaaactaatcattgtaaattatattttagcatggtctgcctcaaatagtaatgtatttttctgcattcacttggatatatttagaatcacttttttcctcctgtatcaaggaagaggtatgtgctgatttgtttggatatttgacaaggcactctgatgtgacttccctgactactaccttcatatttcatttcaaattcaaacttctgaggttgcagcatatatgaattgcattttcaaaagaagatttgtaagaattaaactatatttatgagtaaacttttgaggtttctgctgtattgtttcaaatgtaataaactttacttctgtaaaaa

SEQ ID NO: 179142 - DNA, 2916 bp, Homo sapiens
  Payload ID: 15314
  Gene Symbol: SCYL3
  Gene Name: SCY1-like, kinase-like 3
  Uniprot ID: Q8IZE3
  ENST ID: ENST00000367770
  CDS Start-End: 49-2277
ctgcttggctttgaggaagagtggcagtactgcctcactgcataagggatgggatcagagaacagtgctttaaagagctatacactgagagaaccaccatttaccttaccctctggacttgctgtttatcccgctgtactgcaagatggcaaatttgcttcagtttttgtgtataagagagaaaatgaagacaaggttaataaagctgccaagcatttgaagacacttcgtcacccttgcttgctaagatttttatcttgtactgtggaagcggatggcattcatcttgtcactgagcgagtacagcccctggaagtggctttggaaacattgtcttctgcagaggtctgtgctgggatctatgacatattgctggctcttatcttccttcatgacagaggacacctaacacacaataatgtctgtttatcatctgtgtttgtgagtgaagatggacactggaagctaggaggaatggaaactgtttgtaaagtttctcaggccacaccagagtttctgaggagtattcagtcaataagagacccagcatctatccctcctgaagagatgtctccagaattcacaactctcccagagtgtcatggacatgcccgggatgccttttcatttggaacattggtggaaagtttgctcacaatcttaaatgaacaggtttcagcggatgttctctccagctttcaacagaccttgcactcaactttgctgaatcccattccaaaatgtcggccagcgctctgcaccttactatctcatgacttcttcagaaatgattttctggaagttgtgaatttcttgaaaagtttaacattgaagagtgaagaggagaaaacggaattctttaaatttctgctggacagagtcagctgcttgtcagaggaattgatagcttcaaggttggtgcctcttctgcttaatcagttggtgtttgcagagccagtggctgttaagagttttcttccttatctgcttggccccaaaaaagatcatgcgcagggagaaactccttgcttgctctcaccagccctgttccagtcacgggtgatccccgtgcttctccagttgtttgaagttcatgaagagcatgtgcggatggtgctgctgtctcacatcgaggcctacgtggagcacttcactcaggagcagctgaagaaagtcatcttgccacaggttttgctgggcctgcgtgatactagcgattccattgtggcaattactctgcatagcctagcagtgctggtctctctgcttggaccagaggtggttgtgggaggagaacgaaccaagatcttcaaacgcactgccccaagttttactaaaaatactgacctttctctagaagattctcctatgtgtgtcgtctgcagccatcacagtcagatctcgccaatcttggagaaccccttctctagcatattccctaaatgtttcttttctggcagcacgcccatcaacagcaagaagcacatacagcgagattactacaatactcttttacagacaggcgatccattttctcagcctattaaatttcccataaatggactctcagatgtaaaaaatacttcggaggacagtgaaaacttcccatcaagttctaaaaagtctgaggagtggcctgactggagtgaacctgaggagcctgaaaatcaaactgtcaacatacagatttggcctagagaaccttgtgatgatgtcaagtcccagtgcactaccttggatgtggaagagtcatcttgggatgactgcgagcccagcagcttagatactaaagtaaacccaggaggtggaatcactgctacaaaacctgttacctcaggggagcagaagcctattcctgctttgctttcactcactgaagagtctatgccttggaaatcaagcttaccccaaaagattagccttgtacaaaggggggatgacgcagaccaaatcgagccgccaaaagtgtcatcacaagaaaggccccttaaggttccatcagaacttggtttaggagaggaattcaccattcaagtaaaaaagaagccagtaaaagatcctgagatggattggtttgctgatatgatcccagaaattaagccttctgctgcttttcttatattacctgaactgaggacagaaatggtcccaaaaaaggatgatgtctccccagtgatgcagttttcctcaaaatttgctgcagcagaaattactgagggagaggctgaaggctgggaagaagaaggggagctgaactgggaagataataactggtgacaatagatgtgagttaaactttaggaaaaaggattccctttttttaaaaaaaatcaatacctcaaaagcaggctttgggacaagaaaaccccaaagtggcctgcttttcccatcccaggagctcattatccagtctgtgccaactgaagtaggagactgactgtgagtgctggctaaaagccctgggtggtgaggctcacagtactggtttccaggaggaagagcctttgtgcatttgactgaggccagtttctatgaagagcaagtagctgaggagaggtcgaatttactgctttttccaggacaattctggaagtaaagaaaatgtaattcaagctggttagcttaattttgtgccattctttaacataagagtaagctctattatgaaatacaactttaaaaaattttagctataaattatataaatgattttaaattgctgaggtttccttaggcagcttatttatttgtttacagttagactatctgagtaaatggttctttgtggacctaggcagttcctgactgttccacatgtagtacattgtaccaaagttcttaataagaatattccccacaatcctgttctctaaatgtcaaataaagattattttcactagattcaactttacaaaa

SEQ ID NO: 179143 - DNA, 6364 bp, Homo sapiens
  Payload ID: 15314
  Gene Symbol: SCYL3
  Gene Name: SCY1-like, kinase-like 3
  Uniprot ID: Q8IZE3
  ENST ID: ENST00000367771
  CDS Start-End: 216-2282
tttccggacccgtctctatggtgtaggagaaacccggcccccagaagattgtgggtgtagtggccacagccttacaggcaggcaggggtggttggtgtcaacaggggggccaacagggtaccagagccaagaccctcggcctcctcccccgccgccttcctgcagatctgcttggctttgaggaagagtggcagtactgcctcactgcataagggatgggatcagagaacagtgctttaaagagctatacactgagagaaccaccatttaccttaccctctggacttgctgtttatcccgctgtactgcaagatggcaaatttgcttcagtttttgtgtataagagagaaaatgaagacaaggttaataaagctgccaagcatttgaagacacttcgtcacccttgcttgctaagatttttatcttgtactgtggaagcggatggcattcatcttgtcactgagcgagtacagcccctggaagtggctttggaaacattgtcttctgcagaggtctgtgctgggatctatgacatattgctggctcttatcttccttcatgacagaggacacctaacacacaataatgtctgtttatcatctgtgtttgtgagtgaagatggacactggaagctaggaggaatggaaactgtttgtaaagtttctcaggccacaccagagtttctgaggagtattcagtcaataagagacccagcatctatccctcctgaagagatgtctccagaattcacaactctcccagagtgtcatggacatgcccgggatgccttttcatttggaacattggtggaaagtttgctcacaatcttaaatgaacaggtttcagcggatgttctctccagctttcaacagaccttgcactcaactttgctgaatcccattccaaaatgtcggccagcgctctgcaccttactatctcatgacttcttcagaaatgattttctggaagttgtgaatttcttgaaaagtttaacattgaagagtgaagaggagaaaacggaattctttaaatttctgctggacagagtcagctgcttgtcagaggaattgatagcttcaaggttggtgcctcttctgcttaatcagttggtgtttgcagagccagtggctgttaagagttttcttccttatctgcttggccccaaaaaagatcatgcgcagggagaaactccttgcttgctctcaccagccctgttccagtcacgggtgatccccgtgcttctccagttgtttgaagttcatgaagagcatgtgcggatggtgctgctgtctcacatcgaggcctacgtggagcacttcactcaggagcagctgaagaaagtcatcttgccacaggttttgctgggcctgcgtgatactagcgattccattgtggcaattactctgcatagcctagcagtgctggtctctctgcttggaccagaggtggttgtgggaggagaacgaaccaagatcttcaaacgcactgccccaagttttactaaaaatactgacctttctctagaaggcgatccattttctcagcctattaaatttcccataaatggactctcagatgtaaaaaatacttcggaggacagtgaaaacttcccatcaagttctaaaaagtctgaggagtggcctgactggagtgaacctgaggagcctgaaaatcaaactgtcaacatacagatttggcctagagaaccttgtgatgatgtcaagtcccagtgcactaccttggatgtggaagagtcatcttgggatgactgcgagcccagcagcttagatactaaagtaaacccaggaggtggaatcactgctacaaaacctgttacctcaggggagcagaagcctattcctgctttgctttcactcactgaagagtctatgccttggaaatcaagcttaccccaaaagattagccttgtacaaaggggggatgacgcagaccaaatcgagccgccaaaagtgtcatcacaagaaaggccccttaaggttccatcagaacttggtttaggagaggaattcaccattcaagtaaaaaagaagccagtaaaagatcctgagatggattggtttgctgatatgatcccagaaattaagccttctgctgcttttcttatattacctgaactgaggacagaaatggtcccaaaaaaggatgatgtctccccagtgatgcagttttcctcaaaatttgctgcagcagaaattactgagggagaggctgaaggctgggaagaagaaggggagctgaactgggaagataataactggtgacaatagatgtgagttaaactttaggaaaaaggattccctttttttaaaaaaaatcaatacctcaaaagcaggctttgggacaagaaaaccccaaagtggcctgcttttcccatcccaggagctcattatccagtctgtgccaactgaagtaggagactgactgtgagtgctggctaaaagccctgggtggtgaggctcacagtactggtttccaggaggaagagcctttgtgcatttgactgaggccagtttctatgaagagcaagtagctgaggagaggtcgaatttactgctttttccaggacaattctggaagtaaagaaaatgtaattcaagctggttagcttaattttgtgccattctttaacataagagtaagctctattatgaaatacaactttaaaaaattttagctataaattatataaatgattttaaattgctgaggtttccttaggcagcttatttatttgtttacagttagactatctgagtaaatggttctttgtggacctaggcagttcctgactgttccacatgtagtacattgtaccaaagttcttaataagaatattccccacaatcctgttctctaaatgtcaaataaagattattttcactagattcaactttacaaaatttgttttatatctgttagaaaatgtacagacataagtattttcagttgacaaagcatcaaacccagttctgcctagtgataagtttcaccctagagtatgtatgtaacgttttagcttatccatcctttcttggagcgcctccatttccattgaaagccaggctggagcaggacccttttggagtagtgactcagttgcttccaaagcccctgctattgtatgcagcgctgacctgtactcttcttcccaggggaactcctgacgagctctttttgcataaggctggaaaaaaaacataagtaatatcacaatatccattctaaatataaagaaccttccttttggactggagtaaagcttacatgcaaattttattctagtcattggatcacaagggtaggaggatgcaccccaaaacccctacacagtcatctagaaaaatatgtaaaggcattttggtttatcatagcaattcagagtgctactaccagtgtcttagtttgtatgtggtatacaacaagtatcctgtcccaaagggctcccaatgagaagtgctgcatagtccaagcttacatgtcttataaacaagttcataaatgtattttctttttatgagagtttgactaaaacttatcagaatgttgttcttcatgaattactactatactaattactatactaatagtgctcaaaacaatattttgaatatccttattggtgtcaaattctgccttttaataagtagatgtgatcttcagttactgccaaaaattattaggagactcatttgattaataaggcaaggaatcaaactaaacatttaggagtaagtttctttcattttcttctgtggttcagtaaagactgcatttatagcatcactggtacaatatgtaacttcccttaaaggttactaccaataattcaaacatactgaaagaatatatttgatatggtgtagtcccacttcttaattttaaaagcaactaccataaaacagaattttacatgtctagatctatttgatttgaaattcagcataaggctggaaaccacactggtttgtttcgtcagtaagtaaaaagggcagaatttgccttgttaaagtttggcccctattgaaatcagcccatacctgtaaagatgacctctttgcttcttctacagtcacattagcaaagggttcccagaaaatacctttttcctgtttcacacgttccactttggcagcttcagtttcatctacaaacccagtctgccagggaccatgaaaaaccaagcaaatagcaacatgttagcactctactagatatgaaatggccacataatttaagtgctgagtgttcaaccatactaggcaaattctggaagtcacatggactgatctataaatactcttagtataatctggattaaatcactctactgtgttcttccttacaaaatagttagttatagagttgtctttgcaggaaaaaatgatagtctgctaacctttactgtataagctaagaaactggcaacagcagtgtatacacatgtacttaaaatccagcttagatgtaatataagtaggccaagtgtggtggctcatgcctctaatcccaggactttggtgggaggaatgcttgagcccaggagtttgaggttatagcgagctatgatcacaccaccacactccaatctgggcgacagagcgagactctgtctaaaaaataaagttcagtgagtcaagtgggcccatttcacctaaaaaaatatatatgtaatatatgtaaaatatataacgtgcatcattacatgtaatatatcaaataattcagtttctcctggtagtctaaatttgtggtttaacagttccactagtatttcaattaactattatttcctcacactaagttcccaagtatgcatagacataggaaccttgtgattcaaaattttggttttaattgtaaaaacaggtcttggctgcaaagagaataaaaaagccatgccaaaaaaaaaaaaaaaaaaaaaaaaaaaagggccctgagcttaccctggcttgggaggctgcccaaataaaaaaaaaaaaaaaaaaaaaaaaaagccatgcctaaattatacccaaaatatggtagtaaacatcctctcaggcctacctaattatgtgatcaagtgtatttaattatgattattaatagcttagggatcctcattagtcatctcactgcctggataatcagtgctattacaccccaaactacaggcagaggaactacaagtgtccttttttgagacagtctcactctgtcgctcaggctggagtgcagtggcatgatcttggcttactgcaatctctacctccccagttcaagcaattctcctgcctcagcctcccgagtagctgggactgcaggcgcgtaccaccatgcccggctaatttttgtatttttagtagaaacagggtttccccatgttggccaggctggtcttgaactcctgacctcatgatccacccaccttggcctcccaaagtgctgggattacaggcatgagccgccgcgcctggccccaagtgttttacttctgtggcctcaattgcttagtaaaagtcgtcagcactgtgctcagcactgtgaaaagtttaagctaagaagacactcaggttggttacagttacataatttcggaaaaaaaaaaataggacaaagaataaaacatgagccatgtaaagaaagtaccttctccagaaaggatacaactttgttcttagtttcttcagaactgagacactgtggaactatctcttcatgatttgttccctattaaaaaattgatgaacaagaccaattttaacatttcaacaacttgcaaagacaaatagatgagttttatgagctaccttaaccaaaaattcattttaagtaagagtcccagaggatcctcaaaggtgataaactcatgattccttcagggtccctaaggataatacaaaattaacttctgtacaagtgttgtaagctttaattacttctgctgggtcatactaatgcttctggactcccttatgatcataggcatgactatacagcaaatgcagtaagagtaaaggagcaacccatcttacaggtttaggttcatcagcctaacccttatgactgatagcacaaaatgaaatgtattatcatttgacccaaaaatactatctgctggaagactgtgtctgtgtctgtctgtatcagtaggcctgctgtgtatgcctgttctggtccttgtttattcagaggaccttacgaaattcacttcatttatctaagcctcattttgagaagctgtaaaagagataacgagtaatgtacccttcagacaattttccgattgcaatacagaagcagttcaataaatgttttgggattgttctggaatatttgaaatattaaaatggtttgaaagtca

SEQ ID NO: 179144 - DNA, 3090 bp, Homo sapiens
  Payload ID: 15314
  Gene Symbol: SCYL3
  Gene Name: SCY1-like, kinase-like 3
  Uniprot ID: Q8IZE3
  ENST ID: ENST00000367772
  CDS Start-End: 223-2451
tgtcccgtttccggacccgtctctatggtgtaggagaaacccggcccccagaagattgtgggtgtagtggccacagccttacaggcaggcaggggtggttggtgtcaacaggggggccaacagggtaccagagccaagaccctcggcctcctcccccgccgccttcctgcagatctgcttggctttgaggaagagtggcagtactgcctcactgcataagggatgggatcagagaacagtgctttaaagagctatacactgagagaaccaccatttaccttaccctctggacttgctgtttatcccgctgtactgcaagatggcaaatttgcttcagtttttgtgtataagagagaaaatgaagacaaggttaataaagctgccaagcatttgaagacacttcgtcacccttgcttgctaagatttttatcttgtactgtggaagcggatggcattcatcttgtcactgagcgagtacagcccctggaagtggctttggaaacattgtcttctgcagaggtctgtgctgggatctatgacatattgctggctcttatcttccttcatgacagaggacacctaacacacaataatgtctgtttatcatctgtgtttgtgagtgaagatggacactggaagctaggaggaatggaaactgtttgtaaagtttctcaggccacaccagagtttctgaggagtattcagtcaataagagacccagcatctatccctcctgaagagatgtctccagaattcacaactctcccagagtgtcatggacatgcccgggatgccttttcatttggaacattggtggaaagtttgctcacaatcttaaatgaacaggtttcagcggatgttctctccagctttcaacagaccttgcactcaactttgctgaatcccattccaaaatgtcggccagcgctctgcaccttactatctcatgacttcttcagaaatgattttctggaagttgtgaatttcttgaaaagtttaacattgaagagtgaagaggagaaaacggaattctttaaatttctgctggacagagtcagctgcttgtcagaggaattgatagcttcaaggttggtgcctcttctgcttaatcagttggtgtttgcagagccagtggctgttaagagttttcttccttatctgcttggccccaaaaaagatcatgcgcagggagaaactccttgcttgctctcaccagccctgttccagtcacgggtgatccccgtgcttctccagttgtttgaagttcatgaagagcatgtgcggatggtgctgctgtctcacatcgaggcctacgtggagcacttcactcaggagcagctgaagaaagtcatcttgccacaggttttgctgggcctgcgtgatactagcgattccattgtggcaattactctgcatagcctagcagtgctggtctctctgcttggaccagaggtggttgtgggaggagaacgaaccaagatcttcaaacgcactgccccaagttttactaaaaatactgacctttctctagaagattctcctatgtgtgtcgtctgcagccatcacagtcagatctcgccaatcttggagaaccccttctctagcatattccctaaatgtttcttttctggcagcacgcccatcaacagcaagaagcacatacagcgagattactacaatactcttttacagacaggcgatccattttctcagcctattaaatttcccataaatggactctcagatgtaaaaaatacttcggaggacagtgaaaacttcccatcaagttctaaaaagtctgaggagtggcctgactggagtgaacctgaggagcctgaaaatcaaactgtcaacatacagatttggcctagagaaccttgtgatgatgtcaagtcccagtgcactaccttggatgtggaagagtcatcttgggatgactgcgagcccagcagcttagatactaaagtaaacccaggaggtggaatcactgctacaaaacctgttacctcaggggagcagaagcctattcctgctttgctttcactcactgaagagtctatgccttggaaatcaagcttaccccaaaagattagccttgtacaaaggggggatgacgcagaccaaatcgagccgccaaaagtgtcatcacaagaaaggccccttaaggttccatcagaacttggtttaggagaggaattcaccattcaagtaaaaaagaagccagtaaaagatcctgagatggattggtttgctgatatgatcccagaaattaagccttctgctgcttttcttatattacctgaactgaggacagaaatggtcccaaaaaaggatgatgtctccccagtgatgcagttttcctcaaaatttgctgcagcagaaattactgagggagaggctgaaggctgggaagaagaaggggagctgaactgggaagataataactggtgacaatagatgtgagttaaactttaggaaaaaggattccctttttttaaaaaaaatcaatacctcaaaagcaggctttgggacaagaaaaccccaaagtggcctgcttttcccatcccaggagctcattatccagtctgtgccaactgaagtaggagactgactgtgagtgctggctaaaagccctgggtggtgaggctcacagtactggtttccaggaggaagagcctttgtgcatttgactgaggccagtttctatgaagagcaagtagctgaggagaggtcgaatttactgctttttccaggacaattctggaagtaaagaaaatgtaattcaagctggttagcttaattttgtgccattctttaacataagagtaagctctattatgaaatacaactttaaaaaattttagctataaattatataaatgattttaaattgctgaggtttccttaggcagcttatttatttgtttacagttagactatctgagtaaatggttctttgtggacctaggcagttcctgactgttccacatgtagtacattgtaccaaagttcttaataagaatattccccacaatcctgttctctaaatgtcaaataaagattattttcactagattcaactttacaaaa

SEQ ID NO: 179145 - DNA, 2077 bp, Homo sapiens
  Payload ID: 15314
  Gene Symbol: SCYL3
  Gene Name: SCY1-like, kinase-like 3
  ENST ID: ENST00000423670
  CDS Start-End: 312-2077
gcacctctactgtttgctacaagtggccagcagccattttggatttgggcggaaatgaaattaaaactgtgctgttaaaagcctaaaaattcaagtcaagacaaacttaagcattcgaccaacacatctagaaagggggcatcttcgtggactaactagaccactggggcagtgagtgaaactcggtatcgtcgcggcgcccacacttaagatggcaccggcctgagactcagctgtgcggcctctctacctcggttcctgatctgcttggctttgaggaagagtggcagtactgcctcactgcataagggatgggatcagagaacagtgctttaaagagctatacactgagagaaccaccatttaccttaccctctggacttgctgtttatcccgctgtactgcaagatggcaaatttgcttcagtttttgtgtataagagagaaaatgaagacaaggttaataaagctgccaagcatttgaagacacttcgtcacccttgcttgctaagatttttatcttgtactgtggaagcggatggcattcatcttgtcactgagcgagtacagcccctggaagtggctttggaaacattgtcttctgcagaggtctgtgctgggatctatgacatattgctggctcttatcttccttcatgacagaggacacctaacacacaataatgtctgtttatcatctgtgtttgtgagtgaagatggacactggaagctaggaggaatggaaactgtttgtaaagtttctcaggccacaccagagtttctgaggagtattcagtcaataagagacccagcatctatccctcctgaagagatgtctccagaattcacaactctcccagagtgtcatggacatgcccgggatgccttttcatttggaacattggtggaaagtttgctcacaatcttaaatgaacaggtttcagcggatgttctctccagctttcaacagaccttgcactcaactttgctgaatcccattccaaaatgtcggccagcgctctgcaccttactatctcatgacttcttcagaaatgattttctggaagttgtgaatttcttgaaaagtttaacattgaagagtgaagaggagaaaacggaattctttaaatttctgctggacagagtcagctgcttgtcagaggaattgatagcttcaaggttggtgcctcttctgcttaatcagttggtgtttgcagagccagtggctgttaagagttttcttccttatctgcttggccccaaaaaagatcatgcgcagggagaaactccttgcttgctctcaccagccctgttccagtcacgggtgatccccgtgcttctccagttgtttgaagttcatgaagagcatgtgcggatggtgctgctgtctcacatcgaggcctacgtggagcacttcactcaggagcagctgaagaaagtcatcttgccacaggttttgctgggcctgcgtgatactagcgattccattgtggcaattactctgcatagcctagcagtgctggtctctctgcttggaccagaggtggttgtgggaggagaacgaaccaagatcttcaaacgcactgccccaagttttactaaaaatactgacctttctctagaaggcgatccattttctcagcctattaaatttcccataaatggactctcagatgtaaaaaatacttcggaggacagtgaaaacttcccatcaagttctaaaaagtctgaggagtggcctgactggagtgaacctgaggagcctgaaaatcaaactgtcaacatacagatttggcctagagaaccttgtgatgatgtcaagtcccagtgcactaccttggatgtggaagagtcatcttgggatgactgcgagcccagcagcttagatactaaagtaaacccaggaggtggaatcactgctacaaaacctgttacctcaggggagcagaagcctattcctgctttgctttcactcactgaagagtctatgccttggaaatcaagcttaccccaaaagattagccttgtacaaaggggggatgacgcagaccaaatcgagccgccaaaagtgtcatcaca

SEQ ID NO: 179146 - DNA, 3017 bp, Homo sapiens
  Payload ID: 15315
  Gene Symbol: SDAD1
  Gene Name: SDA1 domain containing 1
  Uniprot ID: Q9NVU7
  ENST ID: ENST00000356260
  CDS Start-End: 120-2183
gcgctatttccggtcatacccggaaacacgagtccaagctgcagctggcagggattgcggggtgccggccgtctgagtttttttaaaactgctcgccgcgaagtctgtctgcagccaaaatgtccaacagaaacaacaacaagcttcccagcaacctgccgcagttacagaatctaatcaagcgagacccgccggcctacatcgaggagtttctacagcagtataatcactacaaatccaatgtggagattttcaaattgcaaccaaataaacccagcaaagaactagcagagctggtgatgtttatggcacagattagtcactgctacccagagtacctaagtaattttcctcaagaggtgaaagatcttctctcctgcaatcataccgtattggatccagatctgcgaatgacattttgcaaagctttgatcttgctgagaaataagaatctcatcaatccatcaagcctgctagaactcttctttgaactttttcgttgccatgataaacttctgcgaaagactttatacacacatattgtgactgatatcaagaatataaatgcaaaacacaagaacaataaagtgaatgtagtattgcaaaatttcatgtacaccatgttaagagatagcaatgcaaccgcagccaagatgtctttagatgtaatgattgaactctacagaaggaacatctggaatgatgcaaaaactgtcaatgttatcacaactgcatgtttctctaaggtcaccaagatattagttgccgctttgacattctttcttgggaaagatgaagatgaaaaacaggacagtgactccgaatctgaggatgatggaccaacagcaagagacctgctagtacaatatgctacagggaagaaaagttccaaaaacaagaaaaagttggaaaaggcaatgaaagtgctcaagaaacaaaaaaagaagaaaaaaccagaggtgtttaacttttcagccattcacttgattcatgatccccaagattttgcggaaaaactactaaagcagcttgagtgctgtaaggagaggtttgaagtgaagatgatgctcatgaaccttatctccagattggtgggaattcatgagcttttcctcttcaatttctatccctttttgcaaaggtttctgcagccccaccaaagagaagtaaccaagatccttctgtttgctgcacaagcatctcatcacctagtacccccagagattattcaatcattgcttatgactgtggcaaacaattttgttaccgacaagaactctggagaagtcatgacagtaggaatcaatgctataaaggagataacagctcgatgtcctctggccatgactgaagaacttctccaagacctggctcagtataaaacacacaaggataagaatgtaatgatgtctgctagaactttgattcacctcttccgaacactgaatcctcagatgctgcagaagaaattccggggtaagcctacagaggcctccatagaagcaagagtacaagaatatggagaattagatgctaaagattacattccaggagcagaagttctggaagttgagaaagaagagaatgctgaaaatgatgaagatggatgggaaagtaccagtctcagtgaggaggaggatgctgatggtgaatggattgatgtgcaacactcttccgatgaagaacagcaagaaatctccaagaagctgaacagcatgcccatggaggagcggaaggccaaagctgcagccatcagcactagccgagttttaactcaggaagacttccagaaaatccgcatggcccaaatgagaaaagaacttgatgctgcccccgggaaatcccagaagaggaaatacattgaaatagacagtgatgaagagcccaggggtgaattactttctcttcgggacattgaacgccttcataaaaagccaaagtctgacaaagagacaagactagcaactgcaatggctggaaagacagaccgaaaagaatttgtgaggaagaaaaccaaaacaaatccattttccagttcgacaaataaagagaagaaaaaacagaagaactttatgatgatgcggtatagccagaatgtccggtcaaaaaataagcgttccttccgagaaaaacagttggcactacgagatgcacttttgaaaaagagaaaaagaatgaagtaacttcctggcaagttttccattcctagaagaatgctaagtttgtgtccttgctctgaaaattggtaaatcaagcatgtttgtttacattaaaaagtccagacacactgtattgtgaaaactgctgaacatgtggcagcaattttgtgtttttattttggagacggctaatggtaggaatgttaatgtaaatagtggtggtaatgtaaaatcatttcatttatcattcatgcaaaaaaaagtatgtattgagtgcctattcattgtcactgtagatgcaaaacgaatgagctgtaaccccttcactcaaggcattgacagcttagctgtgagggtggacacacatatgtgtatttacagtgcagtgtaaatagttctgtagtagaggttaactccatatttctgtgaggtcactgaggccttatggactaactctgtgaggataggagttatatattcttataagacaaaacaaaacaggacaatgttacaagagtaagaggttcttacttgtacataggctttcctgctgaaaacaggcccctgctgtacagattttgggtacataatttagctcttttagtcaatccaagagatttaagtgacccccccccccccgtgttttttttgtttttgtttttgttttgaatgccatgtaaaggctttttggttaagacctcacttttaaaactgccttaagtataaatagtacctttggaatatatttagttcatcatttgagctgccttcatactggtttcctcagccttccttcagcctgtaatattttcagcccactgtttaccttgtctcaataaaaggtttctaatgccaaat

SEQ ID NO: 179147 - DNA, 3080 bp, Homo sapiens
  Payload ID: 15315
  Gene Symbol: SDAD1
  Gene Name: SDA1 domain containing 1
  ENST ID: ENST00000395710
  CDS Start-End: 98-316
gaaacacgagtccaagctgcagctggcagggattgcggggtgccggccgtctgagtttttttaaaactgctcgccgcgaagtctgtctgcagccaaaatgtccaacagaaacaacaacaagcttcccagcaacctgccgcagttacagaatctaatcaagcgagacccgccggcctacatcgaggagtttctacagcagtataatcactacaaatccaatgtggagattttcaaattgcaaccaaataaacccagcaaagaactagcagagctggtgatgtttatggcacagaacatcctaaatgtatgcatctgaattataggagagaaagagagcaacttcagaagagcctttgctttgttacagattagtcactgctacccagagtacctaagtaattttcctcaagaggtgaaagatcttctctcctgcaatcataccgtattggatccagatctgcgaatgacattttgcaaagctttgatcttgctgagaaataagaatctcatcaatccatcaagcctgctagaactcttctttgaactttttcgttgccatgataaacttctgcgaaagactttatacacacatattgtgactgatatcaagaatataaatgcaaaacacaagaacaataaagtgaatgtagtattgcaaaatttcatgtacaccatgttaagagatagcaatgcaaccgcagccaagatgtctttagatgtaatgattgaactctacagaaggaacatctggaatgatgcaaaaactgtcaatgttatcacaactgcatgtttctctaaggtcaccaagatattagttgccgctttgacattctttcttgggaaagatgaagatgaaaaacaggacagtgactccgaatctgaggatgatggaccaacagcaagagacctgctagtacaatatgctacagggaagaaaagttccaaaaacaagaaaaagttggaaaaggcaatgaaagtgctcaagaaacaaaaaaagaagaaaaaaccagaggtgtttaacttttcagccattcacttgattcatgatccccaagattttgcggaaaaactactaaagcagcttgagtgctgtaaggagaggtttgaagtgaagatgatgctcatgaaccttatctccagattggtgggaattcatgagcttttcctcttcaatttctatccctttttgcaaaggtttctgcagccccaccaaagagaagtaaccaagatccttctgtttgctgcacaagcatctcatcacctagtacccccagagattattcaatcattgcttatgactgtggcaaacaattttgttaccgacaagaactctggagaagtcatgacagtaggaatcaatgctataaaggagataacagctcgatgtcctctggccatgactgaagaacttctccaagacctggctcagtataaaacacacaaggataagaatgtaatgatgtctgctagaactttgattcacctcttccgaacactgaatcctcagatgctgcagaagaaattccggggtaagcctacagaggcctccatagaagcaagagtacaagaatatggagaattagatgctaaagattacattccaggagcagaagttctggaagttgagaaagaagagaatgctgaaaatgatgaagatggatgggaaagtaccagtctcagtgaggaggaggatgctgatggtgaatggattgatgtgcaacactcttccgatgaagaacagcaagaaatctccaagaagctgaacagcatgcccatggaggagcggaaggccaaagctgcagccatcagcactagccgagttttaactcaggaagacttccagaaaatccgcatggcccaaatgagaaaagaacttgatgctgcccccgggaaatcccagaagaggaaatacattgaaatagacagtgatgaagagcccaggggtgaattactttctcttcgggacattgaacgccttcataaaaagccaaagtctgacaaagagacaagactagcaactgcaatggctggaaagacagaccgaaaagaatttgtgaggaagaaaaccaaaacaaatccattttccagttcgacaaataaagagaagaaaaaacagaagaactttatgatgatgcggtatagccagaatgtccggtcaaaaaataagcgttccttccgagaaaaacagttggcactacgagatgcacttttgaaaaagagaaaaagaatgaagtaacttcctggcaagttttccattcctagaagaatgctaagtttgtgtccttgctctgaaaattggtaaatcaagcatgtttgtttacattaaaaagtccagacacactgtattgtgaaaactgctgaacatgtggcagcaattttgtgtttttattttggagacggctaatggtaggaatgttaatgtaaatagtggtggtaatgtaaaatcatttcatttatcattcatgcaaaaaaaagtatgtattgagtgcctattcattgtcactgtagatgcaaaacgaatgagctgtaaccccttcactcaaggcattgacagcttagctgtgagggtggacacacatatgtgtatttacagtgcagtgtaaatagttctgtagtagaggttaactccatatttctgtgaggtcactgaggccttatggactaactctgtgaggataggagttatatattcttataagacaaaacaaaacaggacaatgttacaagagtaagaggttcttacttgtacataggctttcctgctgaaaacaggcccctgctgtacagattttgggtacataatttagctcttttagtcaatccaagagatttaagtgacccccccccccccgtgttttttttgtttttgtttttgttttgaatgccatgtaaaggctttttggttaagacctcacttttaaaactgccttaagtataaatagtacctttggaatatatttagttcatcatttgagctgccttcatactggtttcctcagccttccttcagcctgtaatattttcagcccactgtttaccttgtctcaataaaaggtttctaatgccaaatacgtaccttt

SEQ ID NO: 179148 - DNA, 2513 bp, Homo sapiens
  Payload ID: 15315
  Gene Symbol: SDAD1
  Gene Name: SDA1 domain containing 1
  ENST ID: ENST00000395711
  CDS Start-End: 97-2049
aaacacgagtccaagctgcagctggcagggattgcggggtgccggccgtctgagtttttttaaaactgctcgccgcgaagtctgtctgcagccaaaatgtccaacagaaacaacaacaagcttcccagcaacctgccgcagttacagaatctaatcaagcgagacccgccggcctacatcgaggagtttctacagcagtataatcactacaaatccaatgtggagattttcaaattgcaaccaaataaacccagcaaagaactagcagagctggtgatgtttatggcacagattagtcactgctacccagagtacctaagtaattttcctcaagaggtgaaagatcttctctcctgcaatcataccgtattggatccagatctgcgaatgactttatacacacatattgtgactgatatcaagaatataaatgcaaaacacaagaacaataaagtgaatgtagtattgcaaaatttcatgtacaccatgttaagagatagcaatgcaaccgcagccaagatgtctttagatgtaatgattgaactctacagaaggaacatctggaatgatgcaaaaactgtcaatgttatcacaactgcatgtttctctaaggtcaccaagatattagttgccgctttgacattctttcttgggaaagatgaagatgaaaaacaggacagtgactccgaatctgaggatgatggaccaacagcaagagacctgctagtacaatatgctacagggaagaaaagttccaaaaacaagaaaaagttggaaaaggcaatgaaagtgctcaagaaacaaaaaaagaagaaaaaaccagaggtgtttaacttttcagccattcacttgattcatgatccccaagattttgcggaaaaactactaaagcagcttgagtgctgtaaggagaggtttgaagtgaagatgatgctcatgaaccttatctccagattggtgggaattcatgagcttttcctcttcaatttctatccctttttgcaaaggtttctgcagccccaccaaagagaagtaaccaagatccttctgtttgctgcacaagcatctcatcacctagtacccccagagattattcaatcattgcttatgactgtggcaaacaattttgttaccgacaagaactctggagaagtcatgacagtaggaatcaatgctataaaggagataacagctcgatgtcctctggccatgactgaagaacttctccaagacctggctcagtataaaacacacaaggataagaatgtaatgatgtctgctagaactttgattcacctcttccgaacactgaatcctcagatgctgcagaagaaattccggggtaagcctacagaggcctccatagaagcaagagtacaagaatatggagaattagatgctaaagattacattccaggagcagaagttctggaagttgagaaagaagagaatgctgaaaatgatgaagatggatgggaaagtaccagtctcagtgaggaggaggatgctgatggtgaatggattgatgtgcaacactcttccgatgaagaacagcaagaaatctccaagaagctgaacagcatgcccatggaggagcggaaggccaaagctgcagccatcagcactagccgagttttaactcaggaagacttccagaaaatccgcatggcccaaatgagaaaagaacttgatgctgcccccgggaaatcccagaagaggaaatacattgaaatagacagtgatgaagagcccaggggtgaattactttctcttcgggacattgaacgccttcataaaaagccaaagtctgacaaagagacaagactagcaactgcaatggctggaaagacagaccgaaaagaatttgtgaggaagaaaaccaaaacaaatccattttccagttcgacaaataaagagaagaaaaaacagaagaactttatgatgatgcggtatagccagaatgtccggtcaaaaaataagcgttccttccgagaaaaacagttggcactacgagatgcacttttgaaaaagagaaaaagaatgaagtaacttcctggcaagttttccattcctagaagaatgctaagtttgtgtccttgctctgaaaattggtaaatcaagcatgtttgtttacattaaaaagtccagacacactgtattgtgaaaactgctgaacatgtggcagcaattttgtgtttttattttggagacggctaatggtaggaatgttaatgtaaatagtggtggtaatgtaaaatcatttcatttatcattcatgcaaaaaaaagtatgtattgagtgcctattcattgtcactgtagatgcaaaacgaatgagctgtaaccccttcactcaaggcattgacagcttagctgtgagggtggacacacatatgtgtatttacagtgcagtgtaaatagttctgtagtagaggttaactccatatttctgtgaggtcactgaggccttatggactaactctgtgaggataggagttatatattcttataaga

SEQ ID NO: 179149 - DNA, 802 bp, Homo sapiens
  Payload ID: 15315
  Gene Symbol: SDAD1
  Gene Name: SDA1 domain containing 1
  ENST ID: ENST00000503411
  CDS Start-End: 91-357
gagtccaagctgcagctggcagggattgcggggtgccggccgtctgagtttttttaaaactgctcgccgcgaagtctgtctgcagccaaaatgtccaacagaaacaacaacaagcttcccagcaacctgccgcagttacagaatctaatcaagcgagacccgccggcctacatcgaggagtttctacagcagtataatcactacaaatccaatgtggagattttcaaattgcaaccaaataaacccagcaaagaactagcagagctggtgatgtttatggcacaggagagaaagagagcaacttcagaagagcctttgctttgttacagattagtcactgctacccagagtacctaagtaattttcctcaagaggtgaaagatcttctctcctgcaatcataccgtattggatccagatctgcgaatgacattttgcaaagctttgatcttgctgagaaataagaatctcatcaatccatcaagcctgctagaactcttctttgaactttttcgttgccatgataaacttctgcgaaagactttatacacacatattgtgactgatatcaagaatataaatgcaaaacacaagaacaataaagtgaatgtagtattgcaaaatttcatgtacaccatgttaagagatagcaatgcaaccgcagccaagatgtctttagatgtaatgattgaactctacagaaggaacatctggaatgatgcaaaaactgtcaatgttatcacaactgcatgtttctctaaggtcaccaagatattagttgccgctttgacattctttcttgg

SEQ ID NO: 179150 - DNA, 563 bp, Homo sapiens
  Payload ID: 15315
  Gene Symbol: SDAD1
  Gene Name: SDA1 domain containing 1
  ENST ID: ENST00000514710
  CDS Start-End: 236-379
atacccggaaacacgagtccaagctgcagctggcagggattgcggggtgccggccgtctgagtttttttaaaactgctcgccgcgaagtctgtctgcagccaaaatgtccaacagaaacaacaacaagcttcccagcaacctgccgcagttacagaatctaatcaagcgagacccgccggcctacatcgaggaggtgggagtgcggcgcggcagacgctagaggccggatagtggatggttgagacgccgtttctacagcagtataatcactacaaatccaatgtggagattttcaaattgcaaccaaataaacccagcaaagaactagcagagctggtgatgtttatggcacagaacatcctaaatgtatgcatctgaattataggagagaaagagagcaacttcagaagagcctttgctttgttacagattagtcactgctacccagagtacctaagtaattttcctcaagaggtgaaagatcttctctcctgcaatcataccgtattggatccagatctgcgaatgacattttgcaaagctttgatcttgctgagaaata

SEQ ID NO: 179151 - DNA, 3975 bp, Homo sapiens
  Payload ID: 15316
  Gene Symbol: SDE2
  Gene Name: SDE2 telomere maintenance homolog (S. pombe)
  Uniprot ID: Q6IQ49
  ENST ID: ENST00000272091
  CDS Start-End: 20-1375
ggttcgggtagtcggtgacatggcggaggccgcggcgctggtgtggattcgcggccctggcttcgggtgcaaggcggtgcggtgtgcctcgggtcggtgcaccgtccgggattttatccaccggcactgccaagatcagaatgttccagtggaaaacttctttgtgaaatgcaatggagcactcattaacaccagtgacacagtgcagcatggagctgtttatagtttggaacccagactttgcggtggaaaaggaggttttggatctatgctccgagcacttggtgctcagattgagaagacaaccaatcgagaagcttgtcgggatctcagtggaaggagactacgcgatgtcaatcatgaaaaagcaatggctgaatgggtaaaacaacaagccgagcgagaggctgaaaaggagcagaagcggctggagcgactgcagcggaagcttgtagaacccaagcactgcttcaccagccccgactaccagcagcagtgccatgagatggctgagcgtctggaggattccgtcctcaaaggtatgcaggctgcctccagcaagatggtttcagcagaaatcagtgagaatcggaaacggcaatggcctactaaatctcaaacagacagaggagccagtgcgggaaagaggagatgcttctggttgggcatggagggactagagactgcagaagggtccaactctgagagttcagatgatgacagtgaagaagcaccaagcacttcaggaatgggtttccatgctccaaaaattggtagcaatggtgtcgagatggcagccaaatttcccagtggttctcagagggcgagagtagtgaatacagaccatggatcaccagaacaactgcagatcccggtgactgactctgggaggcatattttagaagactcatgtgctgagctgggggagtccaaagagcacatggaaagcaggatggttacagaaacagaagagacccaggagaagaaggcagagagtaaagaacccatagaagaggagcccactggggctggactgaataaggataaagagacagaagaaaggactgatggggaaagagttgctgaggtagcacctgaagaaagggaaaacgttgccgttgccaaactgcaggaaagccagccaggaaacgcagttattgataaggaaactatagatttattggcgttcacctctgttgcagaactggagttgctgggtttggagaagctcaaatgtgaactgatggcccttggactgaaatgtgggggcactctgcaggagcgggcagcaagactcttctctgtcagaggactggcaaaggagcaaattgacccggctttatttgccaagcctttgaaagggaagaaaaaatgagtatcatcagagctgattcctatttgtttatagtgtctaccatttacaacctgcataatgtggactcttgaccagtattcctgttgatattaaaagctaactttttagtaacccaattctaactatcccctttttccttgtcagggctgtagaattaatgtctgaaaccatctgggccttaaattttctttgtctggttttctatagtgtatttaataaatatagggctattcacattttttggtttgatcttggtgtcatttaggtaatgaatctatccaagaaatctatccttttgacccaggttatcaaatttgtagacataaggttatttataatggtcccttcttacccttttaatgtctttaggagctgtgttgataatttccttttcattatgatactggtaatttctgttctcactttcctaatcaggttgggtaggggtttatcagttttactgatctgactttttattttattttattttttttgagacagtcttacactgtctcccaggctggagtgcagtggcgcgatctcggcttactgcaagctctgccttccgggttcatgccattctcctgcctcagcctccccagtagctgggactacaggctcccaccaccacgcccggctaattttttatatttttagtggagactgggtttcactgtgttagccaggatggtctcgatctctttacctcgtggtccacccgcctcagcctcccagagtgctgggattacaggcgtgagccaccgtgcctggccgacgatataacttttaaagaaccaacctttggttttatttttctcaattgtttatataattaatttctgttattttctttcttctatttagcttgagtctcctttgatcttttttctttagttccttaagataagccttaggtcattgatcttagacgttatttaaaatacatatttaaagctatacattttcttttaagcattactttagttgcgactttacaattttattatgtcgtatttttattattcagttctaattttcttttttttttctttttgagatggaatttcgcttttgttgcccaggctagagtgcaatggtacgatctcagctcactgcaacctctgcctcctgggttcaagcgattctcctgcctcagcctcctcagtagctgggattacaggctccagccaccatacctggctgatttttgtatttttagtagagatggggtttcaccacattggccaggctggtctcgaactcctgacctcaggtgatccacccactttggcctcccaaagtgctgggattacaggtgtgagccaccatgcccagcctctgattattttctaatttcctccctcagttcttctttgacccatggattatcagaagtgggttgtctgatcagcaaacatttgttttttttcctcttaatatcttcttgttgctgatttctactttaattccattgaggtcagaaaatatcctctttatgatttcaatcctcttagttttattgagactcgttttatgacccaatatgttgtctgtcatggtgagtgtaccatacacagtttaaaagaatgcgtattttaggccaggtgtggtggctcatgcctgtaatccagcatgagattacatgctgagattacagctgtaatctgtaatttgagaggctgaggtgggaggatcatttcgagaccagcctgggcaatgtatagtgagaccatgtctctaagaaaaacaatatgtaatttgaattgttgggttaatatgttttgtaatatcgatgagattaagtggttgatagtattgttcagatcttctatgtctttactgatccttttgtttatttctatcaggtgctgagaaaggatgttaaaatcttcaattatgattgtggaattgtctatttcttaaattctaccagtttttgtatgaagctctaataacttatgtcttcctaatgtattgaccattttatcattatgaaatttccctctgtctctggtaatttgggtttgaaatctactttatcttatgtgaatatagccactgcagccttcttaagcttagtgtttgcacagtatacctctttctattaatttactttgtgcttctgtgcctatttaaagtagtttctttaaacaacatatacttgagacttgcatttttatctgttctctctgtatcttttaataagtttaacattaaatgtaattattaataggtttctaatttacatgtttcctgtttagataagattattttataattgtattttaatttattggctctttagctatactgttttaataatttttttaagttggatgttctagtgattacaatatacattcttaatttttcagtctacctagagttgatgtgccacttcacataaaatgtagaaatcttgtaagtatgtacatccatttatcatacctgtcttttatgctgtagttgtcatacatattaaatctacatatttaaatattgtaagtcctgtcataagttacaatttctgctttaaataatgatatgtattttaaagaaattaagaggaaaaaataaaatcttttgtatttattcacata

SEQ ID NO: 179152 - DNA, 4897 bp, Homo sapiens
  Payload ID: 15317
  Gene Symbol: SUDS3
  Gene Name: SDS3 homolog, SIN3A corepressor complex component
  Uniprot ID: Q9H7L9
  ENST ID: ENST00000543473
  CDS Start-End: 313-1299
ggattttaagacggcgatgaaagggctgaggttgtggcgacgggggcgtccagcggcatctccactcccccaaggatggcggaatcaggccgttgtcgggcagctctcgacccggaagtcgctcgcggcgcgaggcccccgttgccgagcgcgggcgcggggggcggagctcggcggagacggggaaggggtcgccgtggctgccggtcctcgagttgggggctgccgcggacactgctaggcagacggcgagtaccgagcgcgggtggccgcggtgtccgtgggccacgctcagctgcggtcagaggcgacatgagtgccgcggggctgctggccccggccccggcccaggctggagcgccgccggcccccgagtactaccccgaggaggatgaagagctggagagcgccgaggacgacgagcgcagctgtcggggccgcgagtcggacgaagacactgaggatgctagtgaaactgacctggcaaagcatgatgaagaagactatgtagaaatgaaggaacagatgtatcaggacaaactggcttctctcaagaggcagttgcaacaactgcaagaaggtacattacaggaatatcagaagagaatgaaaaaactagatcagcagtacaaagagaggatacggaatgcagaactcttcctccagctggaaactgaacaagtggaacgaaattacattaaagaaaagaaggcagcagtgaaagaatttgaagacaagaaggttgagctgaaagagaacctgattgctgagctagaagaaaagaagaaaatgattgaaaatgaaaagctgacaatggaactgactggagattctatggaggtgaaacctatcatgaccagaaagttgcggaggcgaccaaatgatcccgtccccatcccagacaagaggaggaaacctgctccagcccagctaaactatttgttaacagatgaacagatcatggaggatctgagaacattaaataagcttaagtcacccaagagaccagcatctccatcctctcctgagcacttgcctgcaacacccgcggaatctccagcccagaggttcgaagctcggatagaagatggcaaactgtactatgacaaaagatggtaccacaagagccaggccatctatctggagtcaaaggacaaccagaaactgagctgcgtgatcagttctgtaggagccaatgagatctgggtgaggaagacaagtgacagcaccaagatgaggatctacctgggccagcttcagcgcgggctcttcgtgatccgccggcgctcagctgcttgactttctacagtgctcttctcttgaccctttttctggagtgggttttatttttgttttgtttcgttttctccttaatagaaaaatgttaacttactgggaatagctactcagccttggaaatggagagcactgcagtgaattctttagggcacttttgtggccggatgcttccaactttgtcagtcttttctgcctcaacttcttccagacatcagtcaccatgagactgttttactttcaggcgtattggggggtttgatttactttccttttatttctttattttttgcttatacttgtttttgaaaacctcctctgagtttgaagggacagctatttttattgattatctttaagtctctctaccatggagaagagcaggaagggatacactctccagtgcattttcatgttttgaatctgattagtggatcacgtagctactttccctgtcgcgtccaattcactatttgcccagaagcttggggcagaggtcctagcaggagatgatgaattctcgtggctctcggccttctcagagaaataaatgctttgtgtaacatctgtgcacaccatccattccgctcgctgagcgatggaaaagcttgcctggaagactatgtgcactgaagtaaatggggttgggggaggggacatttcatatttataatgtgctgaaggtaccatattttaaatgttatttaatgcaggtgatttattcaaacatttgttctagcttaagctggaataagcagtggtcatttcagaagttttcatttgtaattccttcctctcccttgttcccaagtaggtagtagtaagtatgtgccacaggctgattatctgggtaatcttttacgggtgggaggtgagattgatagtgcaataatcagtgatctatagaccctcatgcacgattcaagtttcactcttgtggctgatgccattattgcacattggccattccaaacctgtggagaactttgttgtcaggccctgagcgctcacagcttcatttggcccaggttgaagacaaggaaagctctgctgtggctgcctctggactgacaccctccctaatgagtcctgatgaaacagcctttcctacatccttccctcactcccatgattggagaaatgattcattgggtgatgagtgttggggttttctatactcatgttgccatcttgagatgttcaaaaaatttggggttagagcaactgttagcgtctctatgagcaatcagtagaacttacacatcctaggaaatctttctttgtaagtaattcttttggtctcaagtgattctcttcatgttgtctcttgatgtacatacccccaagcaagttggggggactgtgatgacaattaaatcaccttctctgaagttctggctctgcagagaccaaaccttactgacttgtacagacttgtacaagtaaagacttatacagatagatttttgttttaacttacaatccgttttttcctcttttttttttttttttctggtgttggagtcttatttagaaaacaggataaatgacgctgttatcaaaagttgcctggggttctgtatttcttctctgccctccaatccccgactgctatgatgtttactacagtgaacccagcccatggtaaacacaggcttcacctgttcttgtttgttagccttgactgtgaggcaggacttccctcgcttgaactgttacacatacgatgtgtgtgtcacatcacatattgtgcagctgttggttttcatgtagtgccctgcgatggaaattagatatatttcatgtatttttccattgaaggtggagtttttcaatgatcatgtgttttgtcctcctaaacagtataccaaagtttgtttttatagttgaggattgtattgataaccactggggttccgcattgaagcaggaacaaattgcctctttttctggccttctctgtgggacctctgcttttgtgaagcaactatttatttgaagaccagggtatgggcacttttgccttctctcctctctgacttttgagggtattgagggcgcccttagtcatagtctcgactccgccattgccttctcctcggcgtcctcacaactcttaattgggcctagtgaaaatgggggcaggtgagaagtccattttgagaatcagcatagtaaattacatttctaatcccagaggacttaatattttcttttgtcaccccagaggtgaaaaatcagcagttgaagcctgacaggcctcagtggtgaccaggaacagaagcagccttcctgttagtagatgggggtacttctgtggtgggcagaagccttactaaaggggaagacagactttgaagtttctagacgagaaggaggctagcttctagcctgggtggccattattccaaaaggtcattgtttctcactagaccccagggcaccagatgaatttccaagtttaaactctttcctgcaggtgattactttgaaaaaggttggtccagaccattttgatcaagaacctgtatatgtgttgtgttagaggcatctgcctcaagtctatgtacagtgtttgctgcgggtgtgttccaatattcattttacctctgcttgggggttttgtgtgttcccctccccccatgccctgcctacccccttttccctgaaccacgtccttttgaataatttccagatggatttctgtagccataccaaagccagggtgttttcattcatgcggatactagtatttatagatgtctgactacctaacttaatttttgtttttgaacttctaattggggccagtgtaaggtcgatcccagaggctgatctgcaaatcaagctacatgtatttgtgtataagaccctgtgttcaggactgggtgacttttctaagaaatatggggtttagaatggggttgactgtattttttaacctaattctggagagaagattgtattttttacagttttttgggtttggcttccttctcacatttctttagctttgaatttttactaaataaatttcctcctgattaattttttttttctcatctgggaatttgaaatctcggtgcttactgttacaccaatttgtccaaagagttgaaatcactttaatgccagaacatggtaaatttgcagccatttcaagcaggtgatggtctttttttataacatcgttaacgggtaccattaaatattctgagaggtgaatgtaaaatataaaaggtataggtttttttttttttttaaagaaaacaataaactttcaaagagaaaaccagcatgaagtctgtattgtatccattgacttgataagtgatagaaatttattttaggtttttgatccattgcttatggggaaaggaagttagggcagaggaagggatattctagacatttaattcttagtgaagactaagatacagaatgatgtcaggctaatactcagttttgtaaagagcaatctggggtgttgacccttaaatgtttgtgcactcttcttgttgcagataaaagtcattaaaaatcaagtgaatagaatggatcttgggtggaaaaacaatcttgaaataaacttgtgattgag

SEQ ID NO: 179153 - DNA, 665 bp, Homo sapiens
  Payload ID: 15318
  Gene Symbol: SEBOX
  Gene Name: SEBOX homeobox
  Uniprot ID: Q9HB31
  ENST ID: ENST00000438614
  CDS Start-End: 15-665
atgataaaacccaaatgggggggtctggtgtgggcacagcctggcatggccctctggcacggccctctggcaccttaccctttgccagctccatgcccagccctgtggatgcatcctcagcagacggtggcagcgggttgggttcccaccggagaaagcggaccaccttcagcaaagggcagctactggagctggagagggcgtttgcagcatggccctaccccaacatcagcacccatgagcacctggcctgggtcacttgccttcctgaggccaaggtacaggtgtggttccagaagcgctgggccaaaataatcaagaacaggaagtcaggaattctaagccctgggtctgagtgcccccagagctcctgttctcttccagacaccctccagcagccctgggatccccaaatgccaggccaacctccaccctccagcggcacacctcagcgcacctcagtgtgtcgacatagctcctgtccagctcctggcttgagtccacggcagggctgggaaggggctaaagctgtagccccatggggatcagctggggcttcagaggtccacccttctttagagcgagctactccccagacttcactaggcagcctgtctgacctcatctatgccttggccattgtcgtcaatgtggaccactcctag

SEQ ID NO: 179154 - DNA, 666 bp, Homo sapiens
  Payload ID: 15318
  Gene Symbol: SEBOX
  Gene Name: SEBOX homeobox
  ENST ID: ENST00000536498
  CDS Start-End: 94-666
atgataaaacccaaatgggggggtctggtgtgggcacagccctggcatggccctctggcacggccctctggcaccttaccctttgccagctccatgcccagccctgtggatgcatcctcagcagacggtggcagcgggttgggttcccaccggagaaagcggaccaccttcagcaaagggcagctactggagctggagagggcgtttgcagcatggccctaccccaacatcagcacccatgagcacctggcctgggtcacttgccttcctgaggccaaggtacaggtgtggttccagaagcgctgggccaaaataatcaagaacaggaagtcaggaattctaagccctgggtctgagtgcccccagagctcctgttctcttccagacaccctccagcagccctgggatccccaaatgccaggccaacctccaccctccagcggcacacctcagcgcacctcagtgtgtcgacatagctcctgtccagctcctggcttgagtccacggcagggctgggaaggggctaaagctgtagccccatggggatcagctggggcttcagaggtccacccttctttagagcgagctactccccagacttcactaggcagcctgtctgacctcatctatgccttggccattgtcgtcaatgtggaccactcctag

SEQ ID NO: 179155 - DNA, 2016 bp, Homo sapiens
  Payload ID: 15319
  Gene Symbol: SCFD1
  Gene Name: sec1 family domain containing 1
  ENST ID: ENST00000311943
  CDS Start-End: 13-504
gtgggagccaagatggcggcggcggcggcagcgacagcagcagcagcagccagtattcgggaaaggcagacagtggctttgaagcgtatgttgaatttcaatgtgcctcatattaaaaacagcacaggagaaccagtatggaaggtactcatttatgacagatttggccaagatataatctctcctctgctatctgtgaaggagctaagagacatgggaatcactctgcatctgcttttacactctgatcgagatcctattccagatgttcctgcagtatactttgtaatgccaactgaagaaaatattgacagaatgtgccaggatcttcgaaatcaactatatgaatcatattatttaaattttatttctgctatttcaagaagtaaactggaagatattgcaaatgcagcgttagcagctagtgcagtaacacaagtagccaagccattaacaggccagatatcacagacacggaaatggaaactgttatggacactatagttgacagcctcttctgcttttttgttactctgggtgctgttcctataatcagatgttcaagaggaacagcagcagaaatggtagcagtgaaactagacaagaaacttcgagaaaatctaagagatgcaagaaacagtctttttacaggtgatacacttggagctggccaattcagcttccagaggcccttattagtccttgttgacagaaacatagatttggcaactcctttacatcatacttggacatatcaagcattggtgcacgatgtactggatttccatttaaacagggttaatttggaagaatcttcaggagtggaaaactctccagctggtgctagaccaaagagaaaaaacaagaagtcttatgatttaactccggttgataaattttggcaaaaacataaaggaagtccattcccagaagttgcagaatcagttcagcaagaactagaatcttacagagcacaggaagatgaggtcaaacgacttaaaagcattatgggactagaaggggaagatgaaggagccataagtatgctttctgacaataccgctaagctaacatcagctgttagttctttgccagaactccttgagaaaaaaagacttattgatctccatacaaatgttgccactgctgttttagaacatataaaggcaagaaaattggatgtatattttgaatatgaagaaaaaataatgagcaaaactactctggataaatctcttctagatataatatcagaccctgatgcaggaactccagaagataaaatgaggttgtttcttatctattatataagcacacagcaagcaccttctgaggctgatttggagcaatataaaaaagctttaactgatgcaggatgcaaccttaatcctttacaatatatcaaacagtggaaggcttttaccaagatggcctcagctccggccagctatggcagcactaccactaaaccaatgggtcttttatcacgagtcatgaatacaggatcacagtttgtgatggaaggagtgaagaacctggttttgaaacagcaaaatctacctgttactcgtattttggacaatcttatggagatgaagtcaaaccccgaaactgatgactatagatattttgatcccaaaatgctgcggggcaatgacagctcagttcccagaaataaaaatccattccaagaggccattgtttttgtggtgggaggaggcaactacattgaatatcagaatcttgttgactacataaaggggaaacaaggcaaacacattttatatggctgcagtgagctttttaatgctacacagttcataaaacagttgtcacaacttggacaaaagtaacacagaagaaccttactatgataatctacttggaatgtggataaatgtaaaaagaagaaaagttagaagagcaatatgtttccttctctgtaacagtgtcctaacagtgaaaatcagagttatttgttaatttttaaggaaattatatacttaatatgtattg

SEQ ID NO: 179156 - DNA, 2021 bp, Homo sapiens
  Payload ID: 15319
  Gene Symbol: SCFD1
  Gene Name: sec1 family domain containing 1
  Uniprot ID: Q8WVM8
  ENST ID: ENST00000396629
  CDS Start-End: 187-1839
agccaagatggcggcggcggcggcagcgacagcagcagcagcagccagtattcgggaaaggcagacaggtactgacttattctcttctccttgaagcttcgtgactgccccgacgacatccttctcctctggcttttacactctgatcgagatcctattccagatgttcctgcagtatactttgtaatgccaactgaagaaaatattgacagaatgtgccaggatcttcgaaatcaactatatgaatcatattatttaaattttatttctgctatttcaagaagtaaactggaagatattgcaaatgcagcgttagcagctagtgcagtaacacaagtagccaaggtttttgaccaatatctcaattttattactttggaagatgatatgtttgtattatgtaatcaaaataaggagcttgtttcatatcgtgccattaacaggccagatatcacagacacggaaatggaaactgttatggacactatagttgacagcctcttctgcttttttgttactctgggtgctgttcctataatcagatgttcaagaggaacagcagcagaaatggtagcagtgaaactagacaagaaacttcgagaaaatctaagagatgcaagaaacagtctttttacaggtgatacacttggagctggccaattcagcttccagaggcccttattagtccttgttgacagaaacatagatttggcaactcctttacatcatacttggacatatcaagcattggtgcacgatgtactggatttccatttaaacagggttaatttggaagaatcttcaggagtggaaaactctccagctggtgctagaccaaagagaaaaaacaagaagtcttatgatttaactccggttgataaattttggcaaaaacataaaggaagtccattcccagaagttgcagaatcagttcagcaagaactagaatcttacagagcacaggaagatgaggtcaaacgacttaaaagcattatgggactagaaggggaagatgaaggagccataagtatgctttctgacaataccgctaagctaacatcagctgttagttctttgccagaactccttgagaaaaaaagacttattgatctccatacaaatgttgccactgctgttttagaacatataaaggcaagaaaattggatgtatattttgaatatgaagaaaaaataatgagcaaaactactctggataaatctcttctagatataatatcagaccctgatgcaggaactccagaagataaaatgaggttgtttcttatctattatataagcacacagcaagcaccttctgaggctgatttggagcaatataaaaaagctttaactgatgcaggatgcaaccttaatcctttacaatatatcaaacagtggaaggcttttaccaagatggcctcagctccggccagctatggcagcactaccactaaaccaatgggtcttttatcacgagtcatgaatacaggatcacagtttgtgatggaaggagtgaagaacctggttttgaaacagcaaaatctacctgttactcgtattttggacaatcttatggagatgaagtcaaaccccgaaactgatgactatagatattttgatcccaaaatgctgcggggcaatgacagctcagttcccagaaataaaaatccattccaagaggccattgtttttgtggtgggaggaggcaactacattgaatatcagaatcttgttgactacataaaggggaaacaaggcaaacacattttatatggctgcagtgagctttttaatgctacacagttcataaaacagttgtcacaacttggacaaaagtaacacagaagaaccttactatgataatctacttggaatgtggataaatgtaaaaagaagaaaagttagaagagcaatatgtttccttctctgtaacagtgtcctaacagtgaaaatcagagttatttgttaatttttaaggaaattatatacttaatatgtattgattaaaagaaacatttcag

SEQ ID NO: 179157 - DNA, 2359 bp, Homo sapiens
  Payload ID: 15319
  Gene Symbol: SCFD1
  Gene Name: sec1 family domain containing 1
  Uniprot ID: Q8WVM8
  ENST ID: ENST00000458591
  CDS Start-End: 228-2156
aggataaaaactcttagtattcgcctaacattacgggccactgaattaacctgcaccgggtctcccagttctaccgagagtggaggtcttcctggaggaggtggggtccggaactcaggcacaccctttggccccgcccttccgggctttgcttccggggcggtaagggcagccacgtcatccccccgctccgctccccagccgggcagtggctcgtgggagccaagatggcggcggcggcggcagcgacagcagcagcagcagccagtattcgggaaaggcagacagtggctttgaagcgtatgttgaatttcaatgtgcctcatattaaaaacagcacaggagaaccagtatggaaggtactcatttatgacagatttggccaagatataatctctcctctgctatctgtgaaggagctaagagacatgggaatcactctgcatctgcttttacactctgatcgagatcctattccagatgttcctgcagtatactttgtaatgccaactgaagaaaatattgacagaatgtgccaggatcttcgaaatcaactatatgaatcatattatttaaattttatttctgctatttcaagaagtaaactggaagatattgcaaatgcagcgttagcagctagtgcagtaacacaagtagccaaggtttttgaccaatatctcaattttattactttggaagatgatatgtttgtattatgtaatcaaaataaggagcttgtttcatatcgtgccattaacaggccagatatcacagacacggaaatggaaactgttatggacactatagttgacagcctcttctgcttttttgttactctgggtgctgttcctataatcagatgttcaagaggaacagcagcagaaatggtagcagtgaaactagacaagaaacttcgagaaaatctaagagatgcaagaaacagtctttttacaggtgatacacttggagctggccaattcagcttccagaggcccttattagtccttgttgacagaaacatagatttggcaactcctttacatcatacttggacatatcaagcattggtgcacgatgtactggatttccatttaaacagggttaatttggaagaatcttcaggagtggaaaactctccagctggtgctagaccaaagagaaaaaacaagaagtcttatgatttaactccggttgataaattttggcaaaaacataaaggaagtccattcccagaagttgcagaatcagttcagcaagaactagaatcttacagagcacaggaagatgaggtcaaacgacttaaaagcattatgggactagaaggggaagatgaaggagccataagtatgctttctgacaataccgctaagctaacatcagctgttagttctttgccagaactccttgagaaaaaaagacttattgatctccatacaaatgttgccactgctgttttagaacatataaaggcaagaaaattggatgtatattttgaatatgaagaaaaaataatgagcaaaactactctggataaatctcttctagatataatatcagaccctgatgcaggaactccagaagataaaatgaggttgtttcttatctattatataagcacacagcaagcaccttctgaggctgatttggagcaatataaaaaagctttaactgatgcaggatgcaaccttaatcctttacaatatatcaaacagtggaaggcttttaccaagatggcctcagctccggccagctatggcagcactaccactaaaccaatgggtcttttatcacgagtcatgaatacaggatcacagtttgtgatggaaggagtgaagaacctggttttgaaacagcaaaatctacctgttactcgtattttggacaatcttatggagatgaagtcaaaccccgaaactgatgactatagatattttgatcccaaaatgctgcggggcaatgacagctcagttcccagaaataaaaatccattccaagaggccattgtttttgtggtgggaggaggcaactacattgaatatcagaatcttgttgactacataaaggggaaacaaggcaaacacattttatatggctgcagtgagctttttaatgctacacagttcataaaacagttgtcacaacttggacaaaagtaacacagaagaaccttactatgataatctacttggaatgtggataaatgtaaaaagaagaaaagttagaagagcaatatgtttccttctctgtaacagtgtcctaacagtgaaaatcagagttatttgttaatttttaaggaaattatatacttaatatgtattgattaaaagaaacatttcagaaataaaatttcaacattgtt

SEQ ID NO: 179158 - DNA, 2058 bp, Homo sapiens
  Payload ID: 15319
  Gene Symbol: SCFD1
  Gene Name: sec1 family domain containing 1
  Uniprot ID: Q8WVM8
  ENST ID: ENST00000544052
  CDS Start-End: 151-1878
agtggctcgtgggagccaagatggcggcggcggcggcagcgacagcagcagcagcagccagtattcgggaaaggcagacaggtactcatttatgacagatttggccaagatataatctctcctctgctatctgtgaaggagctaagagacatgggaatcactctgcatctgcttttacactctgatcgagatcctattccagatgttcctgcagtatactttgtaatgccaactgaagaaaatattgacagaatgtgccaggatcttcgaaatcaactatatgaatcatattatttaaattttatttctgctatttcaagaagtaaactggaagatattgcaaatgcagcgttagcagctagtgcagtaacacaagtagccaaggtttttgaccaatatctcaattttattactttggaagatgatatgtttgtattatgtaatcaaaataaggagcttgtttcatatcgtgccattaacaggccagatatcacagacacggaaatggaaactgttatggacactatagttgacagcctcttctgcttttttgttactctgggtgctgttcctataatcagatgttcaagaggaacagcagcagaaatggtagcagtgaaactagacaagaaacttcgagaaaatctaagagatgcaagaaacagtctttttacaggtgatacacttggagctggccaattcagcttccagaggcccttattagtccttgttgacagaaacatagatttggcaactcctttacatcatacttggacatatcaagcattggtgcacgatgtactggatttccatttaaacagggttaatttggaagaatcttcaggagtggaaaactctccagctggtgctagaccaaagagaaaaaacaagaagtcttatgatttaactccggttgataaattttggcaaaaacataaaggaagtccattcccagaagttgcagaatcagttcagcaagaactagaatcttacagagcacaggaagatgaggtcaaacgacttaaaagcattatgggactagaaggggaagatgaaggagccataagtatgctttctgacaataccgctaagctaacatcagctgttagttctttgccagaactccttgagaaaaaaagacttattgatctccatacaaatgttgccactgctgttttagaacatataaaggcaagaaaattggatgtatattttgaatatgaagaaaaaataatgagcaaaactactctggataaatctcttctagatataatatcagaccctgatgcaggaactccagaagataaaatgaggttgtttcttatctattatataagcacacagcaagcaccttctgaggctgatttggagcaatataaaaaagctttaactgatgcaggatgcaaccttaatcctttacaatatatcaaacagtggaaggcttttaccaagatggcctcagctccggccagctatggcagcactaccactaaaccaatgggtcttttatcacgagtcatgaatacaggatcacagtttgtgatggaaggagtgaagaacctggttttgaaacagcaaaatctacctgttactcgtattttggacaatcttatggagatgaagtcaaaccccgaaactgatgactatagatattttgatcccaaaatgctgcggggcaatgacagctcagttcccagaaataaaaatccattccaagaggccattgtttttgtggtgggaggaggcaactacattgaatatcagaatcttgttgactacataaaggggaaacaaggcaaacacattttatatggctgcagtgagctttttaatgctacacagttcataaaacagttgtcacaacttggacaaaagtaacacagaagaaccttactatgataatctacttggaatgtggataaatgtaaaaagaagaaaagttagaagagcaatatgtttccttctctgtaacagtgtcctaacagtgaaaatcagagttatttgttaatttttaaggaaattatatacttaatatgtattgattaaaagaaacatttc

SEQ ID NO: 179159 - DNA, 688 bp, Homo sapiens
  Payload ID: 15319
  Gene Symbol: SCFD1
  Gene Name: sec1 family domain containing 1
  ENST ID: ENST00000554437
  CDS Start-End: 1-108
gcttttaccaagatggcctcagctccggccagctatggcagcactaccactaaaccaatgggctgtgatacccatggcagcagaaattctcaagacccttctgtttagtgaaaacaaaggtgtcttttatcacgagtcatgaatacaggatcacagtttgtgatggaaggagtgaagaacctggttttgaaacagcaaaatctacctgttactcgtattttggacaatcttatggagatgaagtcaaaccccgaaactgatgactatagatattttgatcccaaaatgctgcggggcaatgacagctcagttcccagaaataaaaatccattccaagaggccattgtttttgtggtgggaggaggcaactacattgaatatcagaatcttgttgactacataaaggggaaacaaggcaaacacattttatatggctgcagtgagctttttaatgctacacagttcataaaacagttgtcacaacttggacaaaagtaacacagaagaaccttactatgataatctacttggaatgtggataaatgtaaaaagaagaaaagttagaagagcaatatgtttccttctctgtaacagtgtcctaacagtgaaaatcagagttatttgttaatttttaaggaaattatatacttaatatgtattgattaaaagaaacatttcagaaataaaa

SEQ ID NO: 179160 - DNA, 743 bp, Homo sapiens
  Payload ID: 15319
  Gene Symbol: SCFD1
  Gene Name: sec1 family domain containing 1
  ENST ID: ENST00000557076
  CDS Start-End: 150-743
tgggagccaagatggcggcggcggcggcagcgacagcagcagcagcagccagtattcgggaaaggcagacaggtactgacttattctcttctccttgaagcttcgtgactgccccgacgacatccttctcctctgtggctttgaagcgtatgttgaatttcaatgtgcctcatattaaaaacagcacaggagaaccagtatggaaggtactcatttatgacagatttggccaagatataatctctcctctgctatctgtgaaggagctaagagacatgggaatcactctgcatctgcttttacactctgatcgagatcctattccagatgttcctgcagtatactttgtaatgccaactgaagaaaatattgacagaatgtgccaggatcttcgaaatcaactatatgaatcatattatttaaattttatttctgctatttcaagaagtaaactggaagatattgcaaatgcagcgttagcagctagtgcagtaacacaagtagccaaggtttttgaccaatatctcaattttattactttggaagatgatatgtttgtattatgtaatcaaaataaggagcttgtttcatatcgtgccattaacaggccagatatcacagacacggaaatggaaactgttatggacactatagttgacagcctcttctgcttttttgttactctgggtgctgttcctataatcagatgttcaagaggaacagcagcagaaatggtagcagtg

SEQ ID NO: 179161 - DNA, 556 bp, Homo sapiens
  Payload ID: 15319
  Gene Symbol: SCFD1
  Gene Name: sec1 family domain containing 1
  ENST ID: ENST00000557713
  CDS Start-End: 158-436
gtggctcgtgggagccaagatggcggcggcggcggcagcgacagcagcagcagcagccagtattcgggaaaggcagacaggtactgacttattctcttctccttgaagcttcgtgactgccccgacgacatccttctcctctgtggctttgaagcgtatgttgaatttcaatgtgcctcatattaaaaacagcacaggagaaccagtatggaaggtactcatttatgacagatttggccaagatataatctctcctctgctatctgtgaaggagctaagagacatgggaatcactctgcatctgcttttacactctgatcgagatcctattccagatgttcctgcagtatactttgtaatgccaactgaagaaaatattgacagaatgtgccaggtagaatcagttacaagggtggctgcaaaagtcaatatttagatgagtcaccccaaagaaaatctagcaagattcttttagcaaggaaaaggagaaaagtagatattggataggatcttcgaaatcaactatatgaatcatattatttaaattttatttctg

SEQ ID NO: 179162 - DNA, 1943 bp, Homo sapiens
  Payload ID: 15319
  Gene Symbol: SCFD1
  Gene Name: sec1 family domain containing 1
  ENST ID: ENST00000463622
  CDS Start-End: 21-167
agtggctcgtgggagccaagatggcggcggcggcggcagcgacagcagcagcagcagccagtattcgggaaaggcagacagtggctttgaagcgtatgttgaatttcaatgtgcctcatattaaaaacagcacaggagaaccagtatggaaggcttttacactctgatcgagatcctattccagatgttcctgcagtatactttgtaatgccaactgaagaaaatattgacagaatgtgccaggatcttcgaaatcaactatatgaatcatattatttaaattttatttctgctatttcaagaagtaaactggaagatattgcaaatgcagcgttagcagctagtgcagtaacacaagtagccaaggtttttgaccaatatctcaattttattactttggaagatgatatgtttgtattatgtaatcaaaataaggagcttgtttcatatcgtgccattaacaggccagatatcacagacacggaaatggaaactgttatggacactatagttgacagcctcttctgcttttttgttactctgggtgctgttcctataatcagatgttcaagaggaacagcagcagaaatggtagcagtgaaactagacaagaaacttcgagaaaatctaagagatgcaagaaacagtctttttacaggtgatacacttggagctggccaattcagcttccagaggcccttattagtccttgttgacagaaacatagatttggcaactcctttacatcatacttggacatatcaagcattggtgcacgatgtactggatttccatttaaacagggttaatttggaagaatcttcaggagtggaaaactctccagctggtgctagaccaaagagaaaaaacaagaagtcttatgatttaactccggttgataaattttggcaaaaacataaaggaagtccattcccagaagttgcagaatcagttcagcaagaactagaatcttacagagcacaggaagatgaggtcaaacgacttaaaagcattatgggactagaaggggaagatgaaggagccataagtatgctttctgacaataccgctaagctaacatcagctgttagttctttgccagaactccttgagaaaaaaagacttattgatctccatacaaatgttgccactgctgttttagaacatataaaggcaagaaaattggatgtatattttgaatatgaagaaaaaataatgagcaaaactactctggataaatctcttctagatataatatcagaccctgatgcaggaactccagaagataaaatgaggttgtttcttatctattatataagcacacagcaagcaccttctgaggctgatttggagcaatataaaaaagctttaactgatgcaggatgcaaccttaatcctttacaatatatcaaacagtggaaggcttttaccaagatggcctcagctccggccagctatggcagcactaccactaaaccaatgggtcttttatcacgagtcatgaatacaggatcacagtttgtgatggaaggagtgaagaacctggttttgaaacagcaaaatctacctgttactcgtattttggacaatcttatggagatgaagtcaaaccccgaaactgatgactatagatattttgatcccaaaatgctgcggggcaatgacagctcagttcccagaaataaaaatccattccaagaggccattgtttttgtggtgggaggaggcaactacattgaatatcagaatcttgttgactacataaaggggaaacaaggcaaacacattttatatggctgcagtgagctttttaatgctacacagttcataaaacagttgtcacaacttggacaaaagtaacacagaagaaccttactatgataatctacttggaatgtggataaatgtaaaaagaagaaaagttagaagagcaatatgtttcc

SEQ ID NO: 179163 - DNA, 1829 bp, Homo sapiens
  Payload ID: 15319
  Gene Symbol: SCFD1
  Gene Name: sec1 family domain containing 1
  ENST ID: ENST00000556768
  CDS Start-End: 21-248
agtggctcgtgggagccaagatggcggcggcggcggcagcgacagcagcagcagcagccagtattcgggaaaggcagacagtggctttgaagcgtatgttgaatttcaatgtgcctcatattaaaaacagcacaggagaaccagtatggaaggtactcatttatgacagatttggccaagatataatctctcctctgctatctgtgaaggagctaagagacatgggaatcactctgcatctccattaacaggccagatatcacagacacggaaatggaaactgttatggacactatagttgacagcctcttctgcttttttgttactctgggtgctgttcctataatcagatgttcaagaggaacagcagcagaaatggtagcagtgaaactagacaagaaacttcgagaaaatctaagagatgcaagaaacagtctttttacaggtgatacacttggagctggccaattcagcttccagaggcccttattagtccttgttgacagaaacatagatttggcaactcctttacatcatacttggacatatcaagcattggtgcacgatgtactggatttccatttaaacagggttaatttggaagaatcttcaggagtggaaaactctccagctggtgctagaccaaagagaaaaaacaagaagtcttatgatttaactccggttgataaattttggcaaaaacataaaggaagtccattcccagaagttgcagaatcagttcagcaagaactagaatcttacagagcacaggaagatgaggtcaaacgacttaaaagcattatgggactagaaggggaagatgaaggagccataagtatgctttctgacaataccgctaagctaacatcagctgttagttctttgccagaactccttgagaaaaaaagacttattgatctccatacaaatgttgccactgctgttttagaacatataaaggcaagaaaattggatgtatattttgaatatgaagaaaaaataatgagcaaaactactctggataaatctcttctagatataatatcagaccctgatgcaggaactccagaagataaaatgaggttgtttcttatctattatataagcacacagcaagcaccttctgaggctgatttggagcaatataaaaaagctttaactgatgcaggatgcaaccttaatcctttacaatatatcaaacagtggaaggcttttaccaagatggcctcagctccggccagctatggcagcactaccactaaaccaatgggtcttttatcacgagtcatgaatacaggatcacagtttgtgatggaaggagtgaagaacctggttttgaaacagcaaaatctacctgttactcgtattttggacaatcttatggagatgaagtcaaaccccgaaactgatgactatagatattttgatcccaaaatgctgcggggcaatgacagctcagttcccagaaataaaaatccattccaagaggccattgtttttgtggtgggaggaggcaactacattgaatatcagaatcttgttgactacataaaggggaaacaaggcaaacacattttatatggctgcagtgagctttttaatgctacacagttcataaaacagttgtcacaacttggacaaaagtaacacagaagaaccttactatgataatctacttggaatgtggataaatgtaaaaagaagaaaagttagaagagcaatatgtttccttctctgtaacagtgtcctaacagtgaaaatcagagttatttgttaatttttaaggaaattatatacttaatatgtattgattaaaagaaacatttcag

SEQ ID NO: 179164 - DNA, 583 bp, Homo sapiens
  Payload ID: 15319
  Gene Symbol: SCFD1
  Gene Name: sec1 family domain containing 1
  ENST ID: ENST00000554776
  CDS Start-End: 1-308
tggctttgaagcgtatgttgaatttcaatgtgcctcatattaaaaacagcacaggagaaccagtatggaaggtactcatttatgacagatttggccaagatataatctctcctctgctatctgtgaaggagctaagagacatgggaatcactctgcatctgcttttacactctgatcgagatcctattccagatgttcctgcagtatactttgtaatgccaactgaagaaaatattgacagaatgtgccagccattaacaggccagatatcacagacacggaaatggaaactgttatggacactatagttgacagcctcttctgcttttttgttactctgggtgctgttcctataatcagatgttcaagaggaacagcagcagaaatggtagcagtgaaactagacaagaaacttcgagaaaatctaagagatgcaagaaacagtctttttacaggtgatacacttggagctggccaattcagcttccagaggcccttattagtccttgttgacagaaacatagatttggcaactcctttacatcatacttggacatatcaagcattggtgcacgatgtactg

SEQ ID NO: 179165 - DNA, 2308 bp, Homo sapiens
  Payload ID: 15319
  Gene Symbol: SCFD1
  Gene Name: sec1 family domain containing 1
  ENST ID: ENST00000484733
  CDS Start-End: 151-318
agtggctcgtgggagccaagatggcggcggcggcggcagcgacagcagcagcagcagccagtattcgggaaaggcagacaggtactcatttatgacagatttggccaagatataatctctcctctgctatctgtgaaggagctaagagacatgggaatcactctgcatctgcttttacactctgatcgagatcctattccagatgttcctgcagtatactttgtaatgccaactgaagaaaatattgacagaatgtgccaggcatcaaatctatgttcacatcaacaagaagagggacatggactgtgccagccctgactgttgattttgatcaggaatttaagcctttccagaaactcccagaagacctttatttatttctcactaggtagaatcagttacaagggtggctgcaaaagtcaatatttagatgagtcaccccaaagaaaatctagcaagattcttttagcaaggaaaaggagaaaagtagatattggataggatcttcgaaatcaactatatgaatcatattatttaaattttatttctgctatttcaagaagtaaactggaagatattgcaaatgcagcgttagcagctagtgcagtaacacaagtagccaaggtttttgaccaatatctcaattttattactttggaagatgatatgtttgtattatgtaatcaaaataaggagcttgtttcatatcgtgccattaacaggccagatatcacagacacggaaatggaaactgttatggacactatagttgacagcctcttctgcttttttgttactctgggtgctgttcctataatcagatgttcaagaggaacagcagcagaaatggtagcagtgaaactagacaagaaacttcgagaaaatctaagagatgcaagaaacagtctttttacaggtgatacacttggagctggccaattcagcttccagaggcccttattagtccttgttgacagaaacatagatttggcaactcctttacatcatacttggacatatcaagcattggtgcacgatgtactggatttccatttaaacagggttaatttggaagaatcttcaggagtggaaaactctccagctggtgctagaccaaagagaaaaaacaagaagtcttatgatttaactccggttgataaattttggcaaaaacataaaggaagtccattcccagaagttgcagaatcagttcagcaagaactagaatcttacagagcacaggaagatgaggtcaaacgacttaaaagcattatgggactagaaggggaagatgaaggagccataagtatgctttctgacaataccgctaagctaacatcagctgttagttctttgccagaactccttgagaaaaaaagacttattgatctccatacaaatgttgccactgctgttttagaacatataaaggcaagaaaattggatgtatattttgaatatgaagaaaaaataatgagcaaaactactctggataaatctcttctagatataatatcagaccctgatgcaggaactccagaagataaaatgaggttgtttcttatctattatataagcacacagcaagcaccttctgaggctgatttggagcaatataaaaaagctttaactgatgcaggatgcaaccttaatcctttacaatatatcaaacagtggaaggcttttaccaagatggcctcagctccggccagctatggcagcactaccactaaaccaatgggtcttttatcacgagtcatgaatacaggatcacagtttgtgatggaaggagtgaagaacctggttttgaaacagcaaaatctacctgttactcgtattttggacaatcttatggagatgaagtcaaaccccgaaactgatgactatagatattttgatcccaaaatgctgcggggcaatgacagctcagttcccagaaataaaaatccattccaagaggccattgtttttgtggtgggaggaggcaactacattgaatatcagaatcttgttgactacataaaggggaaacaaggcaaacacattttatatggctgcagtgagctttttaatgctacacagttcataaaacagttgtcacaacttggacaaaagtaacacagaagaaccttactatgataatctacttggaatgtggataaatgtaaaaagaagaaaagttagaagagcaatatgtttccttctctgtaacagtgtcctaacagtgaaaatcagagttatttgttaatttttaaggaaattatatacttaatatgtattgattaaaagaaacatttcagaaataaaa

SEQ ID NO: 179166 - DNA, 490 bp, Homo sapiens
  Payload ID: 15319
  Gene Symbol: SCFD1
  Gene Name: sec1 family domain containing 1
  ENST ID: ENST00000553693
  CDS Start-End: 237-490
gggagccaagatggcggcggcggcggcagcgacagcagcagcagcagccagtattcgggaaaggcagacaggatcttcgaaatcaactatatgaatcatattatttaaattttatttctgctatttcaagaagtaaactggaagatattgcaaatgcagcgttagcagctagtgcagtaacacaagtagccaaggtttttgaccaatatctcaattttattactttggaagatgatatgtttgtattatgtaatcaaaataaggagcttgtttcatatcgtgccattaacaggccagatatcacagacacggaaatggaaactgttatggacactatagttgacagcctcttctgcttttttgttactctgggtgctgttcctataatcagatgttcaagaggaacagcagcagaaatggtagcagtgaaactagacaagaaacttcgagaaaatctaagagatgcaagaaacagtctttttacaggtga

SEQ ID NO: 179167 - DNA, 1553 bp, Homo sapiens
  Payload ID: 15319
  Gene Symbol: SCFD1
  Gene Name: sec1 family domain containing 1
  ENST ID: ENST00000555259
  CDS Start-End: 29-394
agccgggcagtggctcgtgggagccaagatggcggcggcggcggcagcgacagcagcagcagcagccagtattcgggaaaggcagacagtggctttgaagcgtatgttgaatttcaatgtgcctcatattaaaaacagcacaggagaaccagtatggaaggtactcatttatgacagatttggccaagatataatctctcctctgctatctgtgaaggagctaagagacatgggaatcactctgcatctgtttttgaccaatatctcaattttattactttggaagatgatatgtttgtattatgtaatcaaaataaggagcttgtttcatatcgtgccattaacaggccagatatcacagacacggaaatggaaactgttatggacactatagttgacagcctcttctgcttttttgttactctgggtttgggggatacatgtgcaagtttgttacatgggtaaattgcgtgtcactggggtttggtgtacaaatgaattcgtcacccaggccatgggcatggtacctgatagggagttttttgaccctcatcctctatgctcaggtgctgttcctataatcagatgttcaagaggaacagcagcagaaatggtagcagtgaaactagacaagaaacttcgagaaaatctaagagatgcaagaaacagtctttttacaggtgatacacttggagctggccaattcagcttccagaggcccttattagtccttgttgacagaaacatagatttggcaactcctttacatcatacttggacatatcaagcattggtgcacgatgtactggatttccatttaaacagggttaatttggaagaatcttcaggagtggaaaactctccagctggtgctagaccaaagagaaaaaacaagaagtcttatgatttaactccggttgataaattttggcaaaaacataaaggaagtccattcccagaagttgcagaatcagttcagcaagaactagaatcttacagagcacaggaagatgaggtcaaacgacttaaaagcattatgggactagaaggggaagatgaaggagccataagtatgctttctgacaataccgctaagctaacatcagctgttagttctttgccagaactccttgagaaaaaaagacttattgatctccatacaaatgttgccactgctgttttagaacatataaaggcaagaaaattggatgtatattttgaatatgaagaaaaaataatgagcaaaactactctggataaatctcttctagatataatatcagaccctgatgcaggaactccagaagataaaatgaggttgtttcttatctattatataagcacacagcaagcaccttctgaggctgatttggagcaatataaaaaagctttaactgatgcaggatgcaaccttaatcctttacaatatatcaaacagtggaaggcttttaccaagatggcctcagctccggccagctatggcagcactaccactaaaccaatgggaatctacctgttactcgtattttggacaatcttatggagatgaagtc

SEQ ID NO: 179168 - DNA, 696 bp, Homo sapiens
  Payload ID: 15319
  Gene Symbol: SCFD1
  Gene Name: sec1 family domain containing 1
  ENST ID: ENST00000469043
  CDS Start-End: 1-435
gtttttgaccaatatctcaattttattactttggaagatgatatgtttgtattatgtaatcaaaataaggagcttgtttcatatcgtgccattaacaggccagatatcacagacacggaaatggaaactgttatggacactatagttgacagcctcttctgcttttttgttactctgggtgctgttcctataatcagatgttcaagaggaacagcagcagaaatggtagcagtgaaactagacaagaaacttcgagaaaatctaagagatgcaagaaacagtctttttacaggtgatacacttggagctggccaattcagcttccagaggcccttattagtccttgttgacagaaacatagatttggcaactcctttacatcatacttggacatatcaagcattggtgcacgatgtactggagaggtggatttgattgttcagctgcagagctgtggacttcagtcaaagggatggacattattttatctctgtttttttacttggcctttattttttcaaatcttaggttctctttttgtacctttcaccctctgctactgactcttattatttgaaacattaaatcggaagttatactaatagacatagggactttaattaaagtttacctttttttccagtcaagaataaaaaaaaaatggtttccaaataaatatgtattttttaaaaggtt

SEQ ID NO: 179169 - DNA, 2221 bp, Homo sapiens
  Payload ID: 15320
  Gene Symbol: SCFD2
  Gene Name: sec1 family domain containing 2
  Uniprot ID: Q8WU76
  ENST ID: ENST00000388940
  CDS Start-End: 121-2040
agaggccgaccacgtgtactgtggagactgtcaaagtctcccggagcccaatttccggaagcggtgagttctgaaagaagttcctgcaccgtagtttcccaagtctgcgaatccccaaccatgagcgcctcgggcgtactgtcctttacccagcaaggatgggagcaggtgctggccaaagtgaaacgggctgtggtttacctggacgccgcctgcgccgagagcctgcactggggctgcggatccacccgtctcctggaggcggtggggggtcctgactgtcacctgcgagagttcgagcccgacgcaattggtggtggagccaagcagcccaaggcagtgtttgtgctgagctgcctgctgaaaggccggaccgtggagatcctacgggacatcatctgccgcagtcacttccagtattgtgtggtggtcacaaccgtgagccacgctgtccacctcacagctaatcatgtcccagcggcggcagcggccgagatggaggggcagcagccggtgttcgagcagctggaggagaagctgtgtgaatggatgggcaacatgaactacacggccgaggtgttccatgtcccgttattgcttgcccctgttgctccccactttgccttgactccagcttttgcatcccttttcccactgctaccccaggatgtgcacctccttaatagcgcccgaccggacaagaggaagctgggaagcctgggtgatgtggactccactacgctaaccccagagctgctgctgcagatcagatgcctagtgtcaggcctcagttctctgtgtgaacatttaggagtacgggaggagtgttttgctgtaggttccttaagtcaggtcatcgctgcggatctggccaattatgcccctgcaaagaacaggaagaagactgctgcaggcagggcatcagtggtttttgtggacagaaccctggatctcacaggagcagttggacatcatggagacaacttagtagagaagatcatttcagcacttccccagctcccaggccacacaaatgatgtgatggttaacatgatagcgctcactgcactccatactgaggaggaaaattataatgtggttgcaccaggctgtctttcacaatccagtgacaccacagccaaagccctatgggaagctttactgaacactaagcacaaagaggcagtgatggaagttcggagacatctagtggaagcggcaagcagagaaaacctgccaatcaagatgagtatggggagagtcacaccgggacagctcatgtcctatattcagctcttcaagaacaacctcaaagctctaatgaatcattgtggcctcctccagcttggactggccacagctcaaacgttgaaacacccacagactgccaagtgggacaactttctggcttttgaaaggctccttcttcagagcattggggagtcagcaatgtccgttgtgttaaatcagctgctgcccatgattaagcctgtaacccagagaaccaacgaggactacagccctgaggaactgctgatccttctcatatatatttattctgtcactggagagctcacggtagacaaagacctgtgtgaagcagaagaaaaagtcaagaaagcattggctcaggtcttctgtgaggaatctggattgtcacctttgctgcaaaaaattacggactgggactcttcaattaatctgacatttcacaaatccaaaattgccgtggatgaactctttacttcacttcgggatattgctggagctcggagtctcctgaaacagtttaagtctgtatatgttcctggaaatcatacccaccaggtgagccggcctcatcctagtgactaccccctcctgatcctctttgtggtaggtggggtcacagtctctgaagtgaaaatggtcaaagatcttgtggcatcgttgaagccaggaacccaggtaatcgtgctgtccacacgactcctgaagccacttaacattcctgagctgttatttgcaactgaccgactgcatccagaccttggcttctgagcatccgctaagaagataagacctactcaagctggaaatgccgatgcaattttctgccaccactccaaatactcctccacaaccagcgtccctgtcactaattgcgagaatgatggaattctgcctgaagggtcttgatacctactcagtgaggtactttgcttggattgctgtgattctt

SEQ ID NO: 179170 - DNA, 3176 bp, Homo sapiens
  Payload ID: 15320
  Gene Symbol: SCFD2
  Gene Name: sec1 family domain containing 2
  Uniprot ID: Q8WU76
  ENST ID: ENST00000401642
  CDS Start-End: 135-2189
tcagggagcgtgtcagaggccgaccacgtgtactgtggagactgtcaaagtctcccggagcccaatttccggaagcggtgagttctgaaagaagttcctgcaccgtagtttcccaagtctgcgaatccccaaccatgagcgcctcgggcgtactgtcctttacccagcaaggatgggagcaggtgctggccaaagtgaaacgggctgtggtttacctggacgccgcctgcgccgagagcctgcactggggctgcggatccacccgtctcctggaggcggtggggggtcctgactgtcacctgcgagagttcgagcccgacgcaattggtggtggagccaagcagcccaaggcagtgtttgtgctgagctgcctgctgaaaggccggaccgtggagatcctacgggacatcatctgccgcagtcacttccagtattgtgtggtggtcacaaccgtgagccacgctgtccacctcacagctaatcatgtcccagcggcggcagcggccgagatggaggggcagcagccggtgttcgagcagctggaggagaagctgtgtgaatggatgggcaacatgaactacacggccgaggtgttccatgtcccgttattgcttgcccctgttgctccccactttgccttgactccagcttttgcatcccttttcccactgctaccccaggatgtgcacctccttaatagcgcccgaccggacaagaggaagctgggaagcctgggtgatgtggactccactacgctaaccccagagctgctgctgcagatcagatgcctagtgtcaggcctcagttctctgtgtgaacatttaggagtacgggaggagtgttttgctgtaggttccttaagtcaggtcatcgctgcggatctggccaattatgcccctgcaaagaacaggaagaagactgctgcaggcagggcatcagtggtttttgtggacagaaccctggatctcacaggagcagttggacatcatggagacaacttagtagagaagatcatttcagcacttccccagctcccaggccacacaaatgatgtgatggttaacatgatagcgctcactgcactccatactgaggaggaaaattataatgtggttgcaccaggctgtctttcacaatccagtgacaccacagccaaagccctatgggaagctttactgaacactaagcacaaagaggcagtgatggaagttcggagacatctagtggaagcggcaagcagagaaaacctgccaatcaagatgagtatggggagagtcacaccgggacagctcatgtcctatattcagctcttcaagaacaacctcaaagctctaatgaatcattgtggcctcctccagcttggactggccacagctcaaacgttgaaacacccacagactgccaagtgggacaactttctggcttttgaaaggctccttcttcagagcattggggagtcagcaatgtccgttgtgttaaatcagctgctgcccatgattaagcctgtaacccagagaaccaacgaggactacagccctgaggaactgctgatccttctcatatatatttattctgtcactggagagctcacggtagacaaagacctgtgtgaagcagaagaaaaagtcaagaaagcattggctcaggtcttctgtgaggaatctggattgtcacctttgctgcaaaaaattacggactgggactcttcaattaatctgacatttcacaaatccaaaattgccgtggatgaactctttacttcacttcgggatattgctggagctcggagtctcctgaaacagtttaagtctgtatatgttcctggaaatcatacccaccaggcatcttataagccattgttgaagcaagttgtggaggaaatatttcatcccgagaggccagattccgttgatattgaacacatgtcttcaggcctcactgatctccttaaaactggatttagcatgttcatgaaggtgagccggcctcatcctagtgactaccccctcctgatcctctttgtggtaggtggggtcacagtctctgaagtgaaaatggtcaaagatcttgtggcatcgttgaagccaggaacccaggtaatcgtgctgtccacacgactcctgaagccacttaacattcctgagctgttatttgcaactgaccgactgcatccagaccttggcttctgagcatccgctaagaagataagacctactcaagctggaaatgccgatgcaattttctgccaccactccaaatactcctccacaaccagcgtccctgtcactaattgcgagaatgatggaattctgcctgaagggtcttgatacctactcagtgaggtactttgcttggattgctgtgattcttaaaaaaaaaaaaaaaaagtttttttattttcctgaaggcgacagtctgtcttttggcgagtccaattagtgatcgtttccatttatccttaaccctctgtttgtgatcttcctgattccacctacaagttcattagttctaaataaaagcctgttggcaagtgttggtagattacaactctttttatttgaagttgctcgagaagttagacatgctttagaattatgagtgtggggaaaatttgatgttccttaggattatataactgaggagggaacattgcaaatagggtctgaggctttgtttctctcttgctctgaaacatttctgaaaaggcaaggaagggaggggtagtgtctggggcagtgctggtagcctgcatgtgttgtaaatcatcctgccataacaaaggactgcattgttctagctggcccactgggcaggtctgccaggctacttggaactgtagtgggaaggtggttgattggagggttatctgtatataaaaggttttctcccctccaaagaaagactccagtacaagatacctggtcccagggagtctaaattgtaacagcaacccctgtggactttgtgggtatgagttttgattgaaatataaagctttcttttctgtaagtttaagttttccatctgaccatagcagaaaaacctagacccacctagtgaaactttgtaagaactccagggcaaaaacgaaccacttgcaacccacatgtttgtaggtgtatggtcgatggaagtttctggcatccatgttggtaataaagagataaaactgaaaa

SEQ ID NO: 179171 - DNA, 529 bp, Homo sapiens
  Payload ID: 15320
  Gene Symbol: SCFD2
  Gene Name: sec1 family domain containing 2
  ENST ID: ENST00000503450
  CDS Start-End: 444-529
gtgtcagaggccgaccacgtgtactgtggagactgtcaaagtctcccggagcccaatttccggaagcggatgtgcacctccttaatagcgcccgaccggacaagaggaagctgggaagcctgggtgatgtggactccactacgctaaccccagagctgctgctgcagatcagatgcctagtgtcaggcctcagttctctgtgtgaacatttaggagtacgggaggagtgttttgctgtaggttccttaagtcaggtcatcgctgcggatctggccaattatgcccctgcaaagaacaggaagaagactgctgcaggcagggcatcagtggtttttgtggacagaaccctggatctcacaggagcagttggacatcatggagacaacttagtagagaagatcatttcagcacttccccagctcccaggccacacaaatgatgtgatggttaacatgatagcgctcactgcactccatactgaggaggaaaattataatgtggttgcaccaggctgtctttcacaatccag

SEQ ID NO: 179172 - DNA, 1320 bp, Homo sapiens
  Payload ID: 15320
  Gene Symbol: SCFD2
  Gene Name: sec1 family domain containing 2
  ENST ID: ENST00000611795
  CDS Start-End: 1-1320
atgagcgcctcgggcgtactgtcctttacccagcaaggatgggagcaggtgctggccaaagtgaaacgggctgtggtttacctggacgccgcctgcgccgagagcctgcactggggctgcggatccacccgtctcctggaggcggtggggggtcctgactgtcacctgcgagagttcgagcccgacgcaattggtggtggagccaagcagcccaaggcagtgtttgtgctgagctgcctgctgaaaggccggaccgtggagatcctacgggacatcatctgccgcagtcacttccagtattgtgtggtggtcacaaccgtgagccacgctgtccacctcacagctaatcatgtcccagcggcggcagcggccgagatggaggggcagcagccggtgttcgagcagctggaggagaagctgtgtgaatggatgggcaacatgaactacacggccgaggtgttccatgtcccgttattgcttgcccctgttgctccccactttgccttgactccagcttttgcatcccttttcccactgctaccccaggatgtgcacctccttaatagcgcccgaccggacaagaggaagctgggaagcctgggtgatgtggactccactacgctaaccccagagctgctgctgcagatcagatgcctagtgtcaggcctcagttctctgtgtgaacatttaggagtacgggaggagtgttttgctgtaggttccttaagtcaggtcatcgctgcggatctggccaattatgcccctgcaaagaacaggaagaagactgctgcaggcagggcatcagtggtttttgtggacagaaccctggatctcacaggagcagttggacatcatggagacaacttagtagagaagatcatttcagcacttccccagctcccaggccacacaaatgatgtgatggttaacatgatagcgctcactgcactccatactgaggaggaaaattataatgtggttgcaccaggctgtctttcacaatccagtgacaccacagccaaagccctatgggaagctttactgaacactaagcacaaagaggcagtgatggaagttcggagacatctagtggaagcggcaagcagagaaaacctgccaatcaagatgagtatggggagagtcacaccgggacagctcatgtcctatattcagctcttcaagaacaacctcaaagctctaatgaatcattgtggcctcctccagcttggactggccacagctcaaacgttgaaacacccacagactgccaagtgggacaactttctggcttttgaaaggctccttcttcagagcattgga

SEQ ID NO: 179173 - DNA, 1656 bp, Homo sapiens
  Payload ID: 15321
  Gene Symbol: SEC11A
  Gene Name: SEC11 homolog A, signal peptidase complex subunit
  Uniprot ID: P67812
  ENST ID: ENST00000268220
  CDS Start-End: 642-1181
agaaagagacagacagacagaaagtaagcaagcaagcaagcaagcacctcaacagagacagagacgtaaagaaagagagacagagacagaaagaaagaaagcacctcctcagcttcccatagcgcaggagacttgctcgaccagagaacctacggtcagacgacacatccactgccacacccatacccaagccgggacgcggaaccgcttctacccgcccacaccggagaggttgctcgcgattggccgggcgggcacagaggcccgccttccgaaggtggcagagcagcctccccaactaagcctgggtcgccgcctcggtgaagggccgcggggccgagcgcgggaagtggcgtccagtcggtttttggcaggcgagagccagagcgtgagaaccctcccacggcgaggccaagccctgagactggactagcaaggtcgtgagtctctctgtcagctctccgcagcgaaggggcgcggggggcggggaccgtgcccgaccgtgccagctcccgccccggaagcggaagtgcaagcactgcggggtcctgtccagtgtgagcccgacccgagctccagtagttccgcccgctggtcatcgcgccctttcccctgccggtgtcctgctcgccgtccccgccatgctgtctctagactttttggacgatgtgcggcggatgaacaagcggcagctctattatcaagtcctaaattttggaatgattgtctcatcggcactaatgatctggaaggggttaatggtaataactggaagtgaaagtccgattgtagtggtgctcagtggcagcatggaacctgcatttcatagaggagatcttctctttctaacaaatcgagttgaagatcccatacgagtgggagaaattgttgtttttaggatagaaggaagagagattcctatagttcaccgagtcttgaagattcatgaaaagcaaaatgggcatatcaagtttttgaccaaaggagataataatgcggttgatgaccgaggcctctataaacaaggacaacattggctagagaaaaaagatgttgtggggagagccaggggatttgttccttatattggaattgtgacgatcctcatgaatgactatcctaaatttaagtatgcagttctctttttgctgggtttattcgtgctggttcatcgtgagtaagaagcctgccttgctgttcctgggaagatgccatagttttcgttactggatgtttggagtagatactggtctgtgattggtggaatggagaacacacgtgttggtgcttctgggtagcactggtttgcattagtttatgtttccatgccagagtttgtgtgggcgggcgcatgtgcaccacagagtgcactcgaggggactttcagtcacaggatttcataattgtcattgtcacactttcaaatttttgtacatcagtgaatttttttatattaaaaggttgagccaaagcccccagtgtttgtattttgaagccaagcttcacttctaaagtgcctacagagacttgtaaatgaaaatgcagctctgcacgagtttgaaaccgtcatacctccttctattaggaatggcatatactgaggtggtcgtaagtcttaacttctaaaattttaaataaaagactttgcacattgaa

SEQ ID NO: 179174 - DNA, 1223 bp, Homo sapiens
  Payload ID: 15321
  Gene Symbol: SEC11A
  Gene Name: SEC11 homolog A, signal peptidase complex subunit
  Uniprot ID: P67812
  ENST ID: ENST00000455959
  CDS Start-End: 303-764
cagtgtgagcccgacccgagctccagtagttccgcccgctggtcatcgcgccctttcccctgccggtgtcctgctcgccgtccccgccatgctgtctctagactttttggacgatgtgcggcggatgaacaagcggcaggtacaatgagagaaatgcaaagatagttaagaaagactcggccttcaaggagcctaaatgtgtagaaaaggactaaggcaaaacaataacttttttgagctcttgccatgtgtgaagcactttatacacctgtaagctctattatcaagtcctaaattttggaatgattgtctcatcggcactaatgatctggaaggggttaatggtaataactggaagtgaaagtccgattgtagtggtgctcagtggcagcatggaacctgcatttcatagaggagatcttctctttctaacaaatcgagttgaagatcccatacgagtgggagaaattgttgtttttaggatagaaggaagagagattcctatagttcaccgagtcttgaagattcatgaaaagcaaaatgggcatatcaagtttttgaccaaaggagataataatgcggttgatgaccgaggcctctataaacaaggacaacattggctagagaaaaaagatgttgtggggagagccaggggatttgttccttatattggaattgtgacgatcctcatgaatgactatcctaaatttaagtatgcagttctctttttgctgggtttattcgtgctggttcatcgtgagtaagaagcctgccttgctgttcctgggaagatgccatagttttcgttactggatgtttggagtagatactggtctgtgattggtggaatggagaacacacgtgttggtgcttctgggtagcactggtttgcattagtttatgtttccatgccagagtttgtgtgggcgggcgcatgtgcaccacagagtgcactcgaggggactttcagtcacaggatttcataattgtcattgtcacactttcaaatttttgtacatcagtgaatttttttatattaaaaggttgagccaaagcccccagtgtttgtattttgaagccaagcttcacttctaaagtgcctacagagacttgtaaatgaaaatgcagctctgcacgagtttgaaaccgtcatacctccttctattaggaatggcatatactgaggtggtcgtaagtcttaacttctaaaattttaaataaaa

SEQ ID NO: 179175 - DNA, 1089 bp, Homo sapiens
  Payload ID: 15321
  Gene Symbol: SEC11A
  Gene Name: SEC11 homolog A, signal peptidase complex subunit
  Uniprot ID: P67812
  ENST ID: ENST00000560266
  CDS Start-End: 37-531
ctttcccctgccggtgtcctgctcgccgtccccgccatgctgtctctagactttttggacgatgtgcggcggatgaacaagcggcagctctattatcaagtcctaaattttggaatgattgtctcatcggcactaatgatctggaaggggttaatggtaataactggaagtgaaagtccgattgtagtggtgctcagtggcagcatggaacctgcatttcatagaggagatcttctctttctaacaaatcgagttgaagatcccatacgagtgggagaaattgttgtttttaggatagaaggaagagagattcctatagttcaccgagtcttgaagattcatgaaaagcaaaatgggcatatcaagtttttgaccaaaggagataataatgcggttgatgaccgaggcctctataaacaaggacaacattggctagagaaaaaagatgttgtggggagagccaggggattttatcaggagaacagttcagtggaggacaggaattatttgttccttatattggaattgtgacgatcctcatgaatgactatcctaaatttaagtatgcagttctctttttgctgggtttattcgtgctggttcatcgtgagtaagaagcctgccttgctgttcctgggaagatgccatagttttcgttactggatgtttggagtagatactggtctgtgattggtggaatggagaacacacgtgttggtgcttctgggtagcactggtttgcattagtttatgtttccatgccagagtttgtgtgggcgggcgcatgtgcaccacagagtgcactcgaggggactttcagtcacaggatttcataattgtcattgtcacactttcaaatttttgtacatcagtgaatttttttatattaaaaggttgagccaaagcccccagtgtttgtattttgaagccaagcttcacttctaaagtgcctacagagacttgtaaatgaaaatgcagctctgcacgagtttgaaaccgtcatacctccttctattaggaatggcatatactgaggtggtcgtaagtcttaacttctaaaattttaaataaaagactttgcacattgaa

SEQ ID NO: 179176 - DNA, 971 bp, Homo sapiens
  Payload ID: 15321
  Gene Symbol: SEC11A
  Gene Name: SEC11 homolog A, signal peptidase complex subunit
  Uniprot ID: P67812
  ENST ID: ENST00000558134
  CDS Start-End: 15-572
tcgccgtccccgccatgctgtctctagactttttggacgatgtgcggcggatgaacaagcggcagctctattatcaagtcctaaattttggaatgattgtctcatcggcactaatgatctggaaggggttaatggtaataactggaagtgaaagtccgattgtagtggtgctcagtggcagcatggaacctgcatttcatagaggagatcttctctttctaacaaatcgagttgaagatcccatacgagtgggagaaattgttgtttttaggatagaaggaagagagattcctatagttcaccgagtcttgaagattcatgaaaagcaaaatgggcatatcaagtttttgaccaaaggagataataatgcggttgatgaccgaggcctctataaacaaggacaacattggctagagaaaaaagatgttgtggggagagccaggggtatgcagttctctttttgctgggtttattcgtgctggttcatcgtgagtaagaagcctgccttgctgttcctgggaagatgccatagttttcgttactggatgtttggagtagatactggtctgtgattggtggaatggagaacacacgtgttggtgcttctgggtagcactggtttgcattagtttatgtttccatgccagagtttgtgtgggcgggcgcatgtgcaccacagagtgcactcgaggggactttcagtcacaggatttcataattgtcattgtcacactttcaaatttttgtacatcagtgaatttttttatattaaaaggttgagccaaagcccccagtgtttgtattttgaagccaagcttcacttctaaagtgcctacagagacttgtaaatgaaaatgcagctctgcacgagtttgaaaccgtcatacctccttctattaggaatggcatatactgaggtggtcgtaagtcttaacttctaaaattttaaataaaagactttgcacattgaa

SEQ ID NO: 179177 - DNA, 1256 bp, Homo sapiens
  Payload ID: 15321
  Gene Symbol: SEC11A
  Gene Name: SEC11 homolog A, signal peptidase complex subunit
  ENST ID: ENST00000559729
  CDS Start-End: 386-775
acagaggcccgccttccgaaggtggcagagcagcctccccaactaagcctgggtcgccgcctcggtgaagggccgcggggccgagcgcgggaagtggcgtccagtcggtttttggcaggcgagagccagagcgtgagaaccctcccacggcgaggccaagccctgagactggactagcaaggtcgtgagtctctctgtcagctctccgcagcgaaggggcgcggggggcggggaccgtgcccgaccgtgccagctcccgccccggaagcggaagtgcaagcactgcggggtcctgtccagtgtgagcccgacccgagctccagtagttccgcccgctggtcatcgcgccctttcccctgccggtgtcctgctcgccgtccccgccatgctgtctctagactttttggacgatgtgcggcggatgaacaagcggcagctctattatcaagtcctaaattttggaatgattgtctcatcggcactaatgatctggaaggggttaatggtaataactggaagtgaaagtccgattgtagtggtgctcaggcaaaatgggcatatcaagtttttgaccaaaggagataataatgcggttgatgaccgaggcctctataaacaaggacaacattggctagagaaaaaagatgttgtggggagagccaggggatttgttccttatattggaattgtgacgatcctcatgaatgactatcctaaatttaagtatgcagttctctttttgctgggtttattcgtgctggttcatcgtgagtaagaagcctgccttgctgttcctgggaagatgccatagttttcgttactggatgtttggagtagatactggtctgtgattggtggaatggagaacacacgtgttggtgcttctgggtagcactggtttgcattagtttatgtttccatgccagagtttgtgtgggcgggcgcatgtgcaccacagagtgcactcgaggggactttcagtcacaggatttcataattgtcattgtcacactttcaaatttttgtacatcagtgaatttttttatattaaaaggttgagccaaagcccccagtgtttgtattttgaagccaagcttcacttctaaagtgcctacagagacttgtaaatgaaaatgcagctctgcacgagtttgaaaccgtcatacctccttctattaggaatggcatatactgaggtggtcgtaagtcttaacttctaaaattttaaataaaagactttgcacattgaacccctt

SEQ ID NO: 179178 - DNA, 882 bp, Homo sapiens
  Payload ID: 15321
  Gene Symbol: SEC11A
  Gene Name: SEC11 homolog A, signal peptidase complex subunit
  ENST ID: ENST00000558217
  CDS Start-End: 1-408
gactttttggacgatgtgcggcggatgaacaagcggcagctctattatcaagtcctaaattttggaatgattgtctcatcggcactaatgatctggaaggggttaatggtaataactggaagtgaaagtccgattgtagtggtgctcagtggcagcatggaacctgcatttcatagaggagatcttctctttctaacaaatcgagttgaagatcccatacgagtgggagaaattgttgtttttaggatagaaggaagagagattcctatagttcaccgagtcttgaagattcatgaaaaatttgttccttatattggaattgtgacgatcctcatgaatgactatcctaaatttaagtatgcagttctctttttgctgggtttattcgtgctggttcatcgtgagtaagaagcctgccttgctgttcctgggaagatgccatagttttcgttactggatgtttggagtagatactggtctgtgattggtggaatggagaacacacgtgttggtgcttctgggtagcactggtttgcattagtttatgtttccatgccagagtttgtgtgggcgggcgcatgtgcaccacagagtgcactcgaggggactttcagtcacaggatttcataattgtcattgtcacactttcaaatttttgtacatcagtgaatttttttatattaaaaggttgagccaaagcccccagtgtttgtattttgaagccaagcttcacttctaaagtgcctacagagacttgtaaatgaaaatgcagctctgcacgagtttgaaaccgtcatacctccttctattaggaatggcatatactgaggtggtcgtaagtcttaacttctaaaattttaaataaaagactttgcacattga

SEQ ID NO: 179179 - DNA, 819 bp, Homo sapiens
  Payload ID: 15321
  Gene Symbol: SEC11A
  Gene Name: SEC11 homolog A, signal peptidase complex subunit
  ENST ID: ENST00000560409
  CDS Start-End: 53-544
cgctggtcatcgcgccctttcccctgccggtgtcctgctcgccgtccccgccatgctgtctctagactttttggacgatgtgcggcggatgaacaagcggcagctctattatcaagtcctaaattttggaatgattgtctcatcggcactaatgatctggaaggggttaatggtaataactggaagtgaaagtccgattgtagtggtgctcagtggcagcatggaacctgcatttcatagaggagatcttctctttctaacaaatcgagttgaagatcccatacgagtgggagaaattgttgtttttaggatagaaggaagagagattcctatagttcaccgagtcttgaagattcatgaaaagcaaaatgggcatatcaagtttttgaccaaaggagataataatgcggttgatgaccgaggcctctataaacaaggacaacattggctagagaaaaaagatgttgtggggagagccagggggtcatcagtgcttctgagaaatactagtccccatcttcctcagttcccaagatgctgctaatatttgttccttatattggaattgtgacgatcctcatgaatgactatcctaaatttaagtatgcagttctctttttgctgggtttattcgtgctggttcatcgtgagtaagaagcctgccttgctgttcctgggaagatgccatagttttcgttactggatgtttggagtagatactggtctgtgattggtggaatggagaacacacgtgttggtgcttctgggtagcactggtttgcattagtttatgtttccatgccagagtttgtgtgggcg

SEQ ID NO: 179180 - DNA, 540 bp, Homo sapiens
  Payload ID: 15321
  Gene Symbol: SEC11A
  Gene Name: SEC11 homolog A, signal peptidase complex subunit
  ENST ID: ENST00000558196
  CDS Start-End: 222-540
tctagactttttggacgatgtgcggcggatgaacaagcggcaggagacagaggttgcagtgagctgagatggcaccactgtactccagcctgggtgactgagcaagagcgaggctccatctcaaaaaaaaaaaaaaaaagaaaaagaaaaagtaatagaggagttcagaagcagagacagattactcttggctgctctattatcaagtcctaaattttggaatgattgtctcatcggcactaatgatctggaaggggttaatggtaataactggaagtgaaagtccgattgtagtggtgctcagtggcagcatggaacctgcatttcatagaggagatcttctctttctaacaaatcgagttgaagatcccatacgagtgggagaaattgttgtttttaggatagaaggaagagagattcctatagttcaccgagtcttgaagattcatgaaaagcaaaatgggcatatcaagtttttgaccaaaggagataataatgcggttgatgaccgaggcctctataaacaaggacaacattggc

SEQ ID NO: 179181 - DNA, 727 bp, Homo sapiens
  Payload ID: 15322
  Gene Symbol: SEC11C
  Gene Name: SEC11 homolog C, signal peptidase complex subunit
  ENST ID: ENST00000299714
  CDS Start-End: 75-374
ggggccggcaggtgctccgcagccgtctgtgccacccagagccggcgggccgctaggtccccggagaccctgctatggtgcgtgcgggcgccgtgggggctcatctccccgcgtccggcttggatatcttcggggacctgaagaagatgaacaagcgccagctctattaccaggttttaaacttcgccatgatcgtgtcttctgcactcatgatatggaaaggcttgatcgtgctcacaggcagtgagagccccatcgtggtggtgctgagtggcagtatggagccggcctttcacagaggagacctcctgttcctcacaaatttccgggaagacccaatcagagctgagataatggagacatcaaatttctgactaaaggagataataatgaagttgatgatagaggcttgtacaaagaaggccagaactggctggaaaagaaggacgtggtgggaagagcaagagggtttttaccatatgttggtatggtcaccataataatgaatgactatccaaaattcaagtatgctcttttggctgtaatgggtgcatatgtgttactaaaacgtgaatcctaaaatgagaagcagttcctgggaccagattgaaatgaattctgttgaaaaagagaaaaactaatatatttgagatgttccattttctgtataaaagggaacagtgtggagatgtttttgtcttgtccaaataaaagattcaccagtaaa

SEQ ID NO: 179182 - DNA, 718 bp, Homo sapiens
  Payload ID: 15322
  Gene Symbol: SEC11C
  Gene Name: SEC11 homolog C, signal peptidase complex subunit
  ENST ID: ENST00000588875
  CDS Start-End: 51-536
gtctgtgccacccagagccggcgggccgctaggtccccggagaccctgctatggtgcgtgcgggcgccgtgggggctcatctccccgcgtccggcttggatatcttcggggacctgaagaagatgaacaagcgccagctctattaccaggttttaaacttcgccatgatcgtgtcttctgcactcatgatatggaaaggcttgatcgtgctcacaggcagtgagagccccatcgtggtggtgctgagtggcagtatggagccggcctttcacagaggagacctcctgttcctcacaaatttccgggaagacccaatcagagctggtgaaatagttgtttttaaagttgaaggacgagacattccaatagttcacagagtaatcaaagttcatgaaaaagataatggagacatcaaatttctgactaaaggagataataatgaagttgatgatagaggcttgtacaaagaaggccagaactggctggaaaagaaggacgtggtgggaagagcaagaggtatgctcttttggctgtaatgggtgcatatgtgttactaaaacgtgaatcctaaaatgagaagcagttcctgggaccagattgaaatgaattctgttgaaaaagagaaaaactaatatatttgagatgttccattttctgtataaaagggaacagtgtggagatgtttttgtcttgtccaaataaaagattcaccagtaaa

SEQ ID NO: 179183 - DNA, 1202 bp, Homo sapiens
  Payload ID: 15322
  Gene Symbol: SEC11C
  Gene Name: SEC11 homolog C, signal peptidase complex subunit
  Uniprot ID: Q9BY50
  ENST ID: ENST00000587834
  CDS Start-End: 473-1051
ctttcctcgctgcagtcatccaatagccaagatacacggctaggtgatttgcgagcgggagttaggtgtcctcttggcgcctgaccagagtcgggaaattcagctcctcttgagtagtcccttccccgagttgccccccgaggtatgcggggtcactcgctgctcgatgttccctccgaagggtcggacaaggctccggagccctgtagctgccctccctaggagccccgggtcttcactggccgaggtgcccaccccgcagcattctgggagtggtagttttcttccttcaggttcattcctggctggccagtgcccaagactggcgagactacgattcccagacgcccaagcgagtcgccggtcacgtggccgcaaggacgctgggccggtgggcgggggccggcaggtgctccgcagccgtctgtgccacccagagccggcgggccgctaggtccccggagaccctgctatggtgcgtgcgggcgccgtgggggctcatctccccgcgtccggcttggatatcttcggggacctgaagaagatgaacaagcgccagctctattaccaggttttaaacttcgccatgatcgtgtcttctgcactcatgatatggaaaggcttgatcgtgctcacaggcagtgagagccccatcgtggtggtgctgagtggcagtatggagccggcctttcacagaggagacctcctgttcctcacaaatttccgggaagacccaatcagagctggtgaaatagttgtttttaaagttgaaggacgagacattccaatagttcacagagtaatcaaagttcatgaaaaagataatggagacatcaaatttctgactaaaggagataataatgaagttgatgatagaggcttgtacaaagaaggccagaactggctggaaaagaaggacgtggtgggaagagcaagagggtttttaccatatgttggtatggtcaccataataatgaatgactatccaaaattcaagtatgctcttttggctgtaatgggtgcatatgtgttactaaaacgtgaatcctaaaatgagaagcagttcctgggaccagattgaaatgaattctgttgaaaaagagaaaaactaatatatttgagatgttccattttctgtataaaagggaacagtgtggagatgtttttgtcttgtccaaataaaagattcaccagtaaagatg

SEQ ID NO: 179184 - DNA, 2054 bp, Homo sapiens
  Payload ID: 15322
  Gene Symbol: SEC11C
  Gene Name: SEC11 homolog C, signal peptidase complex subunit
  ENST ID: ENST00000509791
  CDS Start-End: 84-554
cggtgggcgggggccggcaggtgctccgcagccgtctgtgccacccagagccggcgggccgctaggtccccggagaccctgctatggtgcgtgcgggcgccgtgggggctcatctccccgcgtccggcttggatatcttcggggacctgaagaagatgaacaagcgccagctctattaccaggttttaaacttcgccatgatcgtgtcttctgcactcatgatatggaaaggcttgatcgtgctcacaggcagtgagagccccatcgtggtggtgctgagtggcagtatggagccggcctttcacagaggagacctcctgttcctcacaaatttccgggaagacccaatcagagctggtgaaatagttgtttttaaagttgaaggacgagacattccaatagttcacagagtaatcaaagttcatgaaaaagataatggagacatcaaatttctgactaaaggagataataatgaagttgatgatagaggcttgtacaaagaaggccagaactggctggaaaagaaggacgtggtgggaagagcaagagggtgaggattcacctttaagttatatagaaggttatgaaaaacacttagaaatgaagaaattaaatcaataggctaatgagtcgttaattacaaatatgacatatcaggagagttttaagcagttctagtttatcctgtgaagactaaatacaacttagaaattcctaaagacctaaaatctaaaactgaacccaattatattatctatatgatgggttcaaatctgtttcaaaataaatccagccaggcgcagtggctcacacctgtaatcccagcacctttgggaggctgaggcaggaggatcacttgagcccaggagttccagaccagcctgagtaacatagggataccccatctctattaataaaaattttaaaaaatttgttctaaaaaaagaagaaatataaatcctcactgagagattagttatttgtggattttaaataaccattacaagaaagtctcccagagataaccactgtttaacatttcagggaatgctgtaggtactctctgggctggtacagatgtgtgttatgcatatatataattttacttagaatttgattatttttcacccaacaggaagttggaaatagcttttcgtgtcaaatctacatctgtatctttttaagtggctacaagctgttttattgcgaataattatttatttaaccaatccccttttggtggacacttagattatttcctgtttttcgcaactaaaaacatttctgtgatacatcttttagtattcatctttgtatagttgtccagcaatgagttctgcttctgattgacataacagagaatgtatcctcattaaaaaccaaacaagggaattcttcccctctcttggcaaccctttttatgtttaacagccattagaaatgtttttttatcttacctaaatctcactagctttttaaggctggagagactggctcccattttgtcaggtttagcgttattagtcagattgtggcttacagcttcttcctcctcctttaaccatttttctttgttgcattttcacttgaacatctccggggggaccaggagggcttccagttagtccatcctgtctttccagacactctggtgaaaggctttggataagagagaggatggaactactgatttataaaagactggagggtacctatgggtgtgttaccttgtttcccatgagcagagatgattgagacctgggtccatctgattacatattgctgttgattttgtgagcataatcgttggctggtttatgcactgaacctccttgctctgggatcataatcatatttgagtataagttatggtattcacatttgtatttgctacccaatacatttatttgttatatctgacaagcactgggaaatgaaaataattatttgcattacaaactcattattcatgtactttgaaagctttatctaacagcagtttttatatgggctatctgaatcttatcttctaaataaaaactagatttgtgaaa

SEQ ID NO: 179185 - DNA, 1425 bp, Homo sapiens
  Payload ID: 15323
  Gene Symbol: SEC13
  Gene Name: SEC13 homolog, nuclear pore and COPII coat complex component
  Uniprot ID: P55735
  ENST ID: ENST00000350697
  CDS Start-End: 127-1095
ccgagcgcgttgctgcccggaggctcctacgccacggcccgtcgggcccggcgccggaagtgagctgttccgaggcgccgccgggagctgccacgtccgagacctggagcagccaccgccgcaatcatggtgtcagtaattaacactgtggatacctcccatgaggacatgattcacgacgcccagatggactactatggcacccgcctggcaacctgctcatcagacaggtccgtcaaaatctttgatgtgcgcaatggagggcagatccttatcgccgacctcaggggtcatgagggtcctgtgtggcaagtggcctgggctcaccccatgtacggcaacatcctggcatcgtgctcctatgaccggaaagtcattatctggagagaggaaaacggcacctgggagaagagccacgagcatgcgggacacgactcctcagtgaactcggtgtgctgggccccccatgactacggcctgatcctggcctgtgggagctcggatggggccatctccctgctgacttacaccggggaaggccaatgggaagtaaagaagatcaacaacgctcacaccattggctgcaatgccgtcagctgggcccctgctgttgtacctggaagcctcatagaccacccatcggggcagaaacccaattacatcaagaggtttgcatcaggtggctgtgacaacctcatcaagctgtggaaggaggaggaggacggccagtggaaggaggagcagaagctagaagcgcacagtgactgggttcgagatgtggcctgggccccctccatcggcctgcccaccagcaccatcgccagctgctcccaggatggtcgtgtgttcatttggacctgtgatgatgcctcaagcaatacgtggtcccctaaattgttgcacaagttcaacgatgtggtgtggcatgtgagctggtccatcacagccaacatcctggctgtctctggtggagacaataaggtgaccctgtggaaggagtcagttgatgggcagtgggtgtgcatcagtgatgtcaacaagggccagggctccgtatcagcatcagtgacagagggccagcagaacgagcagtgacaagacaggtggggcctggctccccacccgccagctccaggactgccccttcctgggccaactaaccagacaactgggaagagcccccaactccaacaggattattttcccaggaggagttacagatgcagccacagattgatcatctgccttaacgtgatcggagatgctttgtaatctactgtccagctgaaagcactcatgttacgaggaagaaactacaagtgatgttcaaatctattttgggtcatttttatgtacctttgggttcaggcattatttggggggttttgtttccaaaggaactaaataaagtcatattgcttataa

SEQ ID NO: 179186 - DNA, 1363 bp, Homo sapiens
  Payload ID: 15323
  Gene Symbol: SEC13
  Gene Name: SEC13 homolog, nuclear pore and COPII coat complex component
  ENST ID: ENST00000337354
  CDS Start-End: 56-1033
ccgagacctggagcagccaccgccgcaatcatgggcttgtgctggaaaagatgaaatggggaaaatggtgtcagtaattaacactgtggatacctcccatgaggacatgattcacgacgcccagatggactactatggcacccgcctggcaacctgctcatcagacaggtccgtcaaaatctttgatgtgcgcaatggagggcagatccttatcgccgacctcaggggtcatgagggtcctgtgtggcaagtggcctgggctcaccccatgtacggcaacatcctggcatcgtgctcctatgaccggaaagtcattatctggagagaggaaaacggcacctgggagaagagccacgagcatgcgggacacgactcctcagtgaactcggtgtgctgggccccccatgactacggcctgatcctggcctgtgggagctcggatggggccatctccctgctgacttacaccggggaaggccaatgggaagtaaagaagatcaacaacgctcacaccattggctgcaatgccgtcagctgggcccctgctgttgtacctggaagcctcatagaccacccatcggggcagaaacccaattacatcaagaggtttgcatcaggtggctgtgacaacctcatcaagctgtggaaggaggaggaggacggccagtggaaggaggagcagaagctagaagcgcacagtgactgggttcgagatgtggcctgggccccctccatcggcctgcccaccagcaccatcgccagctgctcccaggatggtcgtgtgttcatttggacctgtgatgatgcctcaagcaatacgtggtcccctaaattgttgcacaagttcaacgatgtggtgtggcatgtgagctggtccatcacagccaacatcctggctgtctctggtggagacaataaggtgaccctgtggaaggagtcagttgatgggcagtgggtgtgcatcagtgatgtcaacaagggccagggctccgtatcagcatcagtgacagagggccagcagaacgagcagtgacaagacaggtggggcctggctccccacccgccagctccaggactgccccttcctgggccaactaaccagacaactgggaagagcccccaactccaacaggattattttcccaggaggagttacagatgcagccacagattgatcatctgccttaacgtgatcggagatgctttgtaatctactgtccagctgaaagcactcatgttacgaggaagaaactacaagtgatgttcaaatctattttgggtcatttttatgtacctttgggttcaggcattatttggggggttttgtttccaaaggaactaaataaagtcatattgcttataa

SEQ ID NO: 179187 - DNA, 1479 bp, Homo sapiens
  Payload ID: 15323
  Gene Symbol: SEC13
  Gene Name: SEC13 homolog, nuclear pore and COPII coat complex component
  Uniprot ID: P55735
  ENST ID: ENST00000383801
  CDS Start-End: 73-1179
gtccgagacctggagcagccaccgccgcaatcatgacttcggggacctggtttttagagagtctagaatctgatgagagaacctgtgcttacttggtgtgtacctcttgaactgctttgcagccatcctcttccactgtctgcctttctgaaatcacaagtcaaactttatacctacagggcttgtgctggaaaagatgaaatggggaaaatggtgtcagtaattaacactgtggatacctcccatgaggacatgattcacgacgcccagatggactactatggcacccgcctggcaacctgctcatcagacaggtccgtcaaaatctttgatgtgcgcaatggagggcagatccttatcgccgacctcaggggtcatgagggtcctgtgtggcaagtggcctgggctcaccccatgtacggcaacatcctggcatcgtgctcctatgaccggaaagtcattatctggagagaggaaaacggcacctgggagaagagccacgagcatgcgggacacgactcctcagtgaactcggtgtgctgggccccccatgactacggcctgatcctggcctgtgggagctcggatggggccatctccctgctgacttacaccggggaaggccaatgggaagtaaagaagatcaacaacgctcacaccattggctgcaatgccgtcagctgggcccctgctgttgtacctggaagcctcatagaccacccatcggggcagaaacccaattacatcaagaggtttgcatcaggtggctgtgacaacctcatcaagctgtggaaggaggaggaggacggccagtggaaggaggagcagaagctagaagcgcacagtgactgggttcgagatgtggcctgggccccctccatcggcctgcccaccagcaccatcgccagctgctcccaggatggtcgtgtgttcatttggacctgtgatgatgcctcaagcaatacgtggtcccctaaattgttgcacaagttcaacgatgtggtgtggcatgtgagctggtccatcacagccaacatcctggctgtctctggtggagacaataaggtgaccctgtggaaggagtcagttgatgggcagtgggtgtgcatcagtgatgtcaacaagggccagggctccgtatcagcatcagtgacagagggccagcagaacgagcagtgacaagacaggtggggcctggctccccacccgccagctccaggactgccccttcctgggccaactaaccagacaactgggaagagcccccaactccaacaggattattttcccaggaggagttacagatgcagccacagattgatcatctgccttaacgtgatcggagatgctttgtaatctactgtccagctgaaagcactcatgttacgaggaagaaactacaagtgatgttcaaatctattttgggtcatttttatgtacctttgggttcaggcattatttggggggttttgtttccaa

SEQ ID NO: 179188 - DNA, 1467 bp, Homo sapiens
  Payload ID: 15323
  Gene Symbol: SEC13
  Gene Name: SEC13 homolog, nuclear pore and COPII coat complex component
  Uniprot ID: P55735
  ENST ID: ENST00000397109
  CDS Start-End: 211-1137
tggtactgaggaggcctagcagggtgaaggccacggtcgcggccttcacgggttcctcggccgtcctgagtcccaaatcccaagctggagccgttcagctcccctccaccgcttagagatttggggggctctggccccgtccttgcggaccattccgaggggagtccagaggtgtcagtaattaacactgtggatacctcccatgaggacatgattcacgacgcccagatggactactatggcacccgcctggcaacctgctcatcagacaggtccgtcaaaatctttgatgtgcgcaatggagggcagatccttatcgccgacctcaggggtcatgagggtcctgtgtggcaagtggcctgggctcaccccatgtacggcaacatcctggcatcgtgctcctatgaccggaaagtcattatctggagagaggaaaacggcacctgggagaagagccacgagcatgcgggacacgactcctcagtgaactcggtgtgctgggccccccatgactacggcctgatcctggcctgtgggagctcggatggggccatctccctgctgacttacaccggggaaggccaatgggaagtaaagaagatcaacaacgctcacaccattggctgcaatgccgtcagctgggcccctgctgttgtacctggaagcctcatagaccacccatcggggcagaaacccaattacatcaagaggtttgcatcaggtggctgtgacaacctcatcaagctgtggaaggaggaggaggacggccagtggaaggaggagcagaagctagaagcgcacagtgactgggttcgagatgtggcctgggccccctccatcggcctgcccaccagcaccatcgccagctgctcccaggatggtcgtgtgttcatttggacctgtgatgatgcctcaagcaatacgtggtcccctaaattgttgcacaagttcaacgatgtggtgtggcatgtgagctggtccatcacagccaacatcctggctgtctctggtggagacaataaggtgaccctgtggaaggagtcagttgatgggcagtgggtgtgcatcagtgatgtcaacaagggccagggctccgtatcagcatcagtgacagagggccagcagaacgagcagtgacaagacaggtggggcctggctccccacccgccagctccaggactgccccttcctgggccaactaaccagacaactgggaagagcccccaactccaacaggattattttcccaggaggagttacagatgcagccacagattgatcatctgccttaacgtgatcggagatgctttgtaatctactgtccagctgaaagcactcatgttacgaggaagaaactacaagtgatgttcaaatctattttgggtcatttttatgtacctttgggttcaggcattatttggggggttttgtttccaaaggaactaaataaagtcatattgcttataa

SEQ ID NO: 179189 - DNA, 1603 bp, Homo sapiens
  Payload ID: 15323
  Gene Symbol: SEC13
  Gene Name: SEC13 homolog, nuclear pore and COPII coat complex component
  ENST ID: ENST00000397117
  CDS Start-End: 593-1447
gccgcaatcatggtgagtgttggtactgaggaggcctagcagggtgaaggccacggtcgcggccttcacgggttcctcggccgtcctgagtcccaaatcccaagctggagccgttcagctcccctccaccgcttagagatttggggggctctggccccgtccttgcggaccattccgaggggagtccagaggtgaggccgaggaacctccctgactttgcggggcgcgccgctcctgcgtctcctgccagtctcccttccttcttttcggtcaacaattgaaaacaaaacgaggaacagcagaggagctactgtataccgagccctcagcattgttcgtaatctccgcctgctaacagccttgtgaagaaggtgctattcttctcaacactttacagatgaggacacttgaggttcggagacgtggagcctcttgcacagctgcttaagtggtagtagagccgagatttgaaccctcctaaccattcctttctgccgcctactgcagctcccagcagagatgattgaactgttgctcggggtagggcccccaggtgtcagtaattaacactgtggatacctcccatgaggacatgattcacgacgcccagatggactactatggcacccgcctggcaacctgctcatcagacaggtccgtcaaaatctttgatgtgcgcaatggagggcagatccttatcgccgacctcaggggtcatgagggtcctgtgtggcaagtggcctgggctcaccccatgtacggcaacatcctggcatcgtgctcctatgaccggaaagtcattatctggagagaggaaaacggcacctgggagaagagccacgagcatgcgggacacgactcctcagtgaactcggtgtgctgggccccccatgactacggcctgatcctggcctgtgggagctcggatggggccatctccctgctgacttacaccggggaaggccaatgggaagtaaagaagatcaacaacgctcacaccattggctgcaatgccgtcagctgggcccctgctgttgtacctggaagcctcatagaccacccatcggggcagaaacccaattacatcaagaggtttgcatcaggtggctgtgacaacctcatcaagctgtggaaggaggaggaggacggccagtggaaggaggagcagaagctagaagcgcacagtgactgggttcgagatgtggcctgggccccctccatcggcctgcccaccagcaccatcgccagctgctcccaggatggtcgtgtgttcatttggacctgtgatgatgcctcaagcaatacgtggtcccctaaattgttgcacaagttcaacgatgtggtgtggcatgtgagctggtccatcacagccaacatcctggctgtctctggtggagacaataaggaggagttacagatgcagccacagattgatcatctgccttaacgtgatcggagatgctttgtaatctactgtccagctgaaagcactcatgttacgaggaagaaactacaagtgatgttcaaatctattttgggtcatttttatgtacctttgggttcaggcattatttggggggttttgtttccaaaggaactaaat

SEQ ID NO: 179190 - DNA, 669 bp, Homo sapiens
  Payload ID: 15323
  Gene Symbol: SEC13
  Gene Name: SEC13 homolog, nuclear pore and COPII coat complex component
  ENST ID: ENST00000445064
  CDS Start-End: 588-669
gcaatcatggtgagtgttggtactgaggaggcctagcagggtgaaggccacggtcgcggccttcacgggttcctcggccgtcctgagtcccaaatcccaagctggagccgttcagctcccctccaccgcttagagatttggggggctctggccccgtccttgcggaccattccgaggggagtccagaggtgaggccgaggaacctccctgactttgcggggcgcgccgctcctgcgtctcctgccagtctcccttccttcttttcggtcaacaattgaaaacaaaacgaggaacagcagaggagctactgtataccgagccctcagcattgttcgtaatctccgcctgctaacagccttgtgaagaaggtgctattcttctcaacactttacagatgaggacacttgaggttcggagacgtggagcctcttgcacagctgcttaagtggtagtagagccgagatttgaaccctcctaaccattcctttctgccgcctactgcagctcccagcagagatgattgaactgttgctcggggtagggcccccagacttcggggacctggtttttagagagtctagaatctgatgagagaacctgtgcttacttgggcttgtgctggaaaagatgaaatggggaaaatggtgtcagtaattaacactgtggata

SEQ ID NO: 179191 - DNA, 567 bp, Homo sapiens
  Payload ID: 15323
  Gene Symbol: SEC13
  Gene Name: SEC13 homolog, nuclear pore and COPII coat complex component
  ENST ID: ENST00000428626
  CDS Start-End: 484-567
aatcatggtgagtgttggtactgaggaggcctagcagggtgaaggccacggtcgcggccttcacgggttcctcggccgtcctgagtcccaaatcccaagctggagccgttcagctcccctccaccgcttagagatttggggggctctggccccgtccttgcggaccattccgaggggagtccagaggtgaggccgaggaacctccctgactttgcggggcgcgccgctcctgcgtctcctgccagtctcccttccttcttttcggtcaacaattgaaaacaaaacgaggaacagcagaggagctactgtataccgagccctcagcattgttcgtaatctccgcctgctaacagccttgtgaagaaggtgctattcttctcaacactttacagatgaggacacttgaggttcggagacgtggagcctcttgcacagctgcttaagtgacttcggggacctggtttttagagagtctagaatctgatgagagaacctgtgcttacttgggcttgtgctggaaaagatgaaatggggaaaatggtgtcagtaattaacactgtggatacc

SEQ ID NO: 179192 - DNA, 832 bp, Homo sapiens
  Payload ID: 15323
  Gene Symbol: SEC13
  Gene Name: SEC13 homolog, nuclear pore and COPII coat complex component
  ENST ID: ENST00000431352
  CDS Start-End: 575-832
ccgcaatcatggtgagtgttggtactgaggaggcctagcagggtgaaggccacggtcgcggccttcacgggttcctcggccgtcctgagtcccaaatcccaagctggagccgttcagctcccctccaccgcttagagatttggggggctctggccccgtccttgcggaccattccgaggggagtccagaggtgaggccgaggaacctccctgactttgcggggcgcgccgctcctgcgtctcctgccagtctcccttccttcttttcggtcaacaattgaaaacaaaacgaggaacagcagaggagctactgtataccgagccctcagcattgttcgtaatctccgcctgctaacagccttgtgaagaaggtgctattcttctcaacactttacagatgaggacacttgaggttcggagacgtggagcctcttgcacagctgcttaagtggtagtagagccgagatttgaaccctcctaaccattcctttctgccgcctactgcagctcccagcagagatgattgaactgttgctcggggtagggcccccagggcttgtgctggaaaagatgaaatggggaaaatggtgtcagtaattaacactgtggatacctcccatgaggacatgattcacgacgcccagatggactactatggcacccgcctggcaacctgctcatcagacaggtccgtcaaaatctttgatgtgcgcaatggagggcagatccttatcgccgacctcaggggtcatgagggtcctgtgtggcaagtggcctgggctcaccccatgtacggcaacatcctggcatcgtgctcctatgaccggaaagtc

SEQ ID NO: 179193 - DNA, 594 bp, Homo sapiens
  Payload ID: 15323
  Gene Symbol: SEC13
  Gene Name: SEC13 homolog, nuclear pore and COPII coat complex component
  ENST ID: ENST00000432213
  CDS Start-End: 521-594
agctgccacgtccgagacctggagcagccaccgccgcaatcatggtgagtgttggtactgaggaggcctagcagggtgaaggccacggtcgcggccttcacgggttcctcggccgtcctgagtcccaaatcccaagctggagccgttcagctcccctccaccgcttagagatttggggggctctggccccgtccttgcggaccattccgaggggagtccagaggtgaggccgaggaacctccctgactttgcggggcgcgccgctcctgcgtctcctgccagtctcccttccttcttttcggtcaacaattgaaaacaaaacgaggaacagcagaggagctactgtataccgagccctcagcattgttcgtaatctccgcctgctaacagccttgtgaagaaggtgctattcttctcaacactttacagatgaggacacttgaggttcggagacgtggagcctcttgcacagctgcttaagtgacttcggggacctggtttttagagagtctagaatctgatgagagaacctgtgcttacttggtgtgtacctcttgaactgctttgcagccatcctcttccactgtctgcctt

SEQ ID NO: 179194 - DNA, 1675 bp, Homo sapiens
  Payload ID: 15324
  Gene Symbol: SESTD1
  Gene Name: SEC14 and spectrin domains 1
  ENST ID: ENST00000335289
  CDS Start-End: 1-320
ttacaaaggaatctacatcattattagatgaacttgctttgattaacaatggaagtgataaaggaaatcagcaagagaaagaaaggtctgtggatttaaactttcttccatcggttgatcctgaaacagttcttcagacagggcatgaattgttgtccgaattacagcagcgtcgatttaatggctcagacggaggggtttcatggtctcctatggatgatgaacttcttgcacagccacaggttatgaaattattagattcactccgagagcaatatacccgctaccaggaagtttgtagagaagctgaaaagtgttgatgtgggattgcaaggtttgcgtgaaaaaggtcaaggtctcctggatcagatctccaatcaggcatcctgggcctatggaaaggatgtaaccattgaaaataaagaaaatgtggaccacatacaaggagtgatggaagatatgcagcttagaaaacaaagatgtgaagacatggtagatgtgcgaaggttaaagatgcttcagatggtgcagttgtttaaatgtgaagaagatgctgcccaggcagtagaatggctaagtgaacttctggatgctctgcttaagactcacatcagattgggcgatgatgctcaagaaacgaaagttttgctggaaaagcatagaaaatttgttgatgttgcacagagcacttatgactatggcaggcagttgctacaggccacagttgtgttatgccaatctttgcgctgcacttctcggtcatctggggatacacttcctcgactgaacagagtatggaaacaatttacaatagcatctgaagagagagtacatagattggaaatggctattgcatttcactcaaatgctgaaaagattttgcaggactgtccagaagagcctgaagctattaatgatgaggagcaatttgatgaaattgaagcagttgggaaatcacttttggatagattaactgttccagtagtttatcctgatggaaccgaacaatattttgggagtccaagtgacatggcttctactgcagaaaacatcagagacaggatgaaactagttaatctcaaaaggcagcagctgagacatcctgaaatggtgaccacagagagctaatagctaccagctacctacagatttgcagttcataatcccgcatgttgtcaacatactacagcattagccaccacaccttaagatgcatttcacagccaaaataagtctcatttcttttcatgacacatttctctttacatgttaacaccttgctactaccaaggcataattacttaacatgcttcgaggctgtagattccaagtatcttaaaagaaggaactataaacattgcactgaaaacttgctttaaagctttacctgacctgtcagtttgtagacaaacaactgataataagctttgaatggtgctaataagagtaggaattctctctattaaaaagaaaaaaaaaagttgcccttcctccacaggtgatttagtaaatttagacagtagttaaactcttgttagtagacagtggtgtcctcaaaattttactttgtaattcttcagaattgattatttttattgtgtcaatacagagaaagcctttcagatctttgatatatcatagtcattaaaagaccttttcctatttgtattgataa

SEQ ID NO: 179195 - DNA, 460 bp, Homo sapiens
  Payload ID: 15324
  Gene Symbol: SESTD1
  Gene Name: SEC14 and spectrin domains 1
  ENST ID: ENST00000452991
  CDS Start-End: 153-434
gggcccgctccgcccccagcccgccttcctcccgccgcgccctccgcctccgcccgcacctcgctagcgttcccctgtcttccccaacgccccggagccgccggccgctagcgtcagcgccagccagaattaaggaagttcactggagtaaaatggaggcctcagtaatattacccattctgaagaaaaaactagccttcctttcaggaggaaaagacagacggagtggcctcattttgacaattccattatgcctcgaacagacaaatatggatgagctgagtgtcaccttagactacctactcagcattccaagtgagaagtgtaaggctagaggatttaccgtgattgtggatggcagaaaatcacagtggaatgtggtgaaaacagtagtcgtaatgctacagatgagctgtttgggacttgctgtttgaactggactttgatcagtggcagtttt

SEQ ID NO: 179196 - DNA, 724 bp, Homo sapiens
  Payload ID: 15324
  Gene Symbol: SESTD1
  Gene Name: SEC14 and spectrin domains 1
  ENST ID: ENST00000426988
  CDS Start-End: 1-678
aggtctgtggatttaaactttcttccatcggttgatcctgaaacagttcttcagacagggcatgaattgttgtccgaattacagcagcgtcgatttaatggctcagacggaggggtttcatggtctcctatggatgatgaacttcttgcacagccacaggttatgaaattattagattcactccgagagcaatatacccgctaccaggaagtttgtaggcaacgtagcaagcgcacacagttagaagagattcaacagaaggtaatgcaggtggtgaactggctagaagggcctggatcagaacaactaagagcccagtggggcattggagactccattagggcctcccaggccctacagcagaaacacgaagagattgagagccagcacagtgaatggtttgcagtgtatgtggaacttaatcagcaaattgcagcactcttgaatgctggcgatgaggaagatcttgtggaactaaagtcactgcagcaacaacttagtgatgtttgttatcgacaggccagtcagctggaatttaggcaaaatctcttacaagcagctcttgaatttcatggtgttgcccaagatatgtgggattgcaaggtttgcgtgaaaaaggtcaaggtctcctggatcagatctccaatcaggcatcctgggcctatggaaaggatgtaaccattgaaaataaagaaaatgtggaccacatacaaggagtgatgga

SEQ ID NO: 179197 - DNA, 681 bp, Homo sapiens
  Payload ID: 15324
  Gene Symbol: SESTD1
  Gene Name: SEC14 and spectrin domains 1
  ENST ID: ENST00000435047
  CDS Start-End: 253-681
ggcccgcagagaccgggccgcgcgcttttccgttcctgagcgcccttgttcatttctgggtgaaagggacccgaattgtgcaacaggtttgggcgttagtccttattttccagcgggtctcttttgccagcgtgcaggaaccagatgtggctccctgctctcgggcgagtcccgcgtccagcgcccgcgactggctcctttgtgtgaccggtgaccggccctgtcggaattaaggaagttcactggagtaaaatggaggcctcagtaatattacccattctgaagaaaaaactagccttcctttcaggaggaaaagacagacggagtggcctcattttgacaattccattatgcctcgaacagacaaatatggatgagctgagtgtcaccttagactacctactcagcattccaagtgagaagtgtaaggctagaggatttaccgtgattgtggatggcagaaaatcacagtggaatgtggtgaaaacagtagtcgtaatgctacagaatgttgttccagctgaggtgtcccttgtttgtgtggtaaagccagatgaattctgggataagaaagtaacgcatttttgtttttggaaggagaaggatagacttggctttgaggttattttagtgtccgccaacaaattgactcgttatatagaaccatgccaattaacagaa

SEQ ID NO: 179198 - DNA, 1699 bp, Homo sapiens
  Payload ID: 15324
  Gene Symbol: SESTD1
  Gene Name: SEC14 and spectrin domains 1
  ENST ID: ENST00000446758
  CDS Start-End: 1-632
tgcagcaacaacttagtgatgtttgttatcgacaggccagtcagctggaatttaggcaaaatctcttacaagcagctcttgaatttcatggtgttgcccaagatttgtctcagcagttggatggcttattagggatgttgtgcgtagatgtagcaccagctgatggagcatcgattcagcaaactttaaaactgcttgaagagaagctgaaaagtgttgatgtgggattgcaaggtttgcgtgaaaaaggtcaaggtctcctggatcagatctccaatcaggcatcctgggcctatggaaaggatgtaaccattgaaaataaagaaaatgtggaccacatacaaggagtgatggaagatatgcagcttagaaaacaaagatgtgaagacatggtagatgtgcgaaggttaaagatgcttcagatggtgcagttgtttaaatgtgaagaagatgctgcccaggcagtagaatggctaagtgaacttctggatgctctgcttaagactcacatcagattgggcgatgatgctcaagaaacgaaagttttgctggaaaagcatagaaaatttgttgatgttgcacaggtgcaaaactggttatcttccttttccacaagctcagtgtttgaatagctttctgcatgattataatgtaactttaccttccaagtacaagaagagcacttatgactatggcaggcagttgctacaggccacagttgtgttatgccaatctttgcgctgcacttctcggtcatctggggatacacttcctcgactgaacagagtatggaaacaatttacaatagcatctgaagagagagtacatagattggaaatggctattgcatttcactcaaatgctgaaaagattttgcaggactgtccagaagagcctgaagctattaatgatgaggagcaatttgatgaaattgaagcagttgggaaatcacttttggatagattaactgttccagtagtttatcctgatggaaccgaacaatattttgggagtccaagtgacatggcttctactgcagaaaacatcagagacaggatgaaactagttaatctcaaaaggcagcagctgagacatcctgaaatggtgaccacagagagctaatagctaccagctacctacagatttgcagttcataatcccgcatgttgtcaacatactacagcattagccaccacaccttaagatgcatttcacagccaaaataagtctcatttcttttcatgacacatttctctttacatgttaacaccttgctactaccaaggcataattacttaacatgcttcgaggctgtagattccaagtatcttaaaagaaggaactataaacattgcactgaaaacttgctttaaagctttacctgacctgtcagtttgtagacaaacaactgataataagctttgaatggtgctaataagagtaggaattctctctattaaaaagaaaaaaaaaagttgcccttcctccacaggtgatttagtaaatttagacagtagttaaactcttgttagtagacagtggtgtcctcaaaattttactttgtaattcttcagaattgattatttttattgtgtcaatacagagaaagcctttcagatctttgatatatcatagtcattaaaagaccttttcctatttgtattgataatgtattaaaagttgtttgtgcttaataaaa

SEQ ID NO: 179199 - DNA, 10615 bp, Homo sapiens
  Payload ID: 15324
  Gene Symbol: SESTD1
  Gene Name: SEC14 and spectrin domains 1
  Uniprot ID: Q86VW0
  ENST ID: ENST00000428443
  CDS Start-End: 318-2408
cccgggcgcgcgcggggtcgcgcggacgcggctcgggccgcgggtgccgagaggtcgccgggccacccgcacccccgctccccgcctgacgcacggaggggccgggacgcgatttgccgcgagtgactggagccgcagccgtcgccgctgctgccgccgccgcccgggcccgctccgcccccagcccgccttcctcccgccgcgccctccgcctccgcccgcacctcgctagcgttcccctgtcttccccaacgccccggagccgccggccgctagcgtcagcgccagccagaattaaggaagttcactggagtaaaatggaggcctcagtaatattacccattctgaagaaaaaactagccttcctttcaggaggaaaagacagacggagtggcctcattttgacaattccattatgcctcgaacagacaaatatggatgagctgagtgtcaccttagactacctactcagcattccaagtgagaagtgtaaggctagaggatttaccgtgattgtggatggcagaaaatcacagtggaatgtggtgaaaacagtagtcgtaatgctacagaatgttgttccagctgaggtgtcccttgtttgtgtggtaaagccagatgaattctgggataagaaagtaacgcatttttgtttttggaaggagaaggatagacttggctttgaggttattttagtgtccgccaacaaattgactcgttatatagaaccatgccaattaacagaagattttggtgggagtctcacctatgatcacatggactggttaaataagaggctggtttttgagaagtttacaaaggaatctacatcattattagatgaacttgctttgattaacaatggaagtgataaaggaaatcagcaagagaaagaaaggtctgtggatttaaactttcttccatcggttgatcctgaaacagttcttcagacagggcatgaattgttgtccgaattacagcagcgtcgatttaatggctcagacggaggggtttcatggtctcctatggatgatgaacttcttgcacagccacaggttatgaaattattagattcactccgagagcaatatacccgctaccaggaagtttgtaggcaacgtagcaagcgcacacagttagaagagattcaacagaaggtaatgcaggtggtgaactggctagaagggcctggatcagaacaactaagagcccagtggggcattggagactccattagggcctcccaggccctacagcagaaacacgaagagattgagagccagcacagtgaatggtttgcagtgtatgtggaacttaatcagcaaattgcagcactcttgaatgctggcgatgaggaagatcttgtggaactaaagtcactgcagcaacaacttagtgatgtttgttatcgacaggccagtcagctggaatttaggcaaaatctcttacaagcagctcttgaatttcatggtgttgcccaagatttgtctcagcagttggatggcttattagggatgttgtgcgtagatgtagcaccagctgatggagcatcgattcagcaaactttaaaactgcttgaagagaagctgaaaagtgttgatgtgggattgcaaggtttgcgtgaaaaaggtcaaggtctcctggatcagatctccaatcaggcatcctgggcctatggaaaggatgtaaccattgaaaataaagaaaatgtggaccacatacaaggagtgatggaagatatgcagcttagaaaacaaagatgtgaagacatggtagatgtgcgaaggttaaagatgcttcagatggtgcagttgtttaaatgtgaagaagatgctgcccaggcagtagaatggctaagtgaacttctggatgctctgcttaagactcacatcagattgggcgatgatgctcaagaaacgaaagttttgctggaaaagcatagaaaatttgttgatgttgcacagagcacttatgactatggcaggcagttgctacaggccacagttgtgttatgccaatctttgcgctgcacttctcggtcatctggggatacacttcctcgactgaacagagtatggaaacaatttacaatagcatctgaagagagagtacatagattggaaatggctattgcatttcactcaaatgctgaaaagattttgcaggactgtccagaagagcctgaagctattaatgatgaggagcaatttgatgaaattgaagcagttgggaaatcacttttggatagattaactgttccagtagtttatcctgatggaaccgaacaatattttgggagtccaagtgacatggcttctactgcagaaaacatcagagacaggatgaaactagttaatctcaaaaggcagcagctgagacatcctgaaatggtgaccacagagagctaatagctaccagctacctacagatttgcagttcataatcccgcatgttgtcaacatactacagcattagccaccacaccttaagatgcatttcacagccaaaataagtctcatttcttttcatgacacatttctctttacatgttaacaccttgctactaccaaggcataattacttaacatgcttcgaggctgtagattccaagtatcttaaaagaaggaactataaacattgcactgaaaacttgctttaaagctttacctgacctgtcagtttgtagacaaacaactgataataagctttgaatggtgctaataagagtaggaattctctctattaaaaagaaaaaaaaaagttgcccttcctccacaggtgatttagtaaatttagacagtagttaaactcttgttagtagacagtggtgtcctcaaaattttactttgtaattcttcagaattgattatttttattgtgtcaatacagagaaagcctttcagatctttgatatatcatagtcattaaaagaccttttcctatttgtattgataatgtattaaaagttgtttgtgcttaataaaagacttctttaaacatcttatttaatttagtagttacatcctatttccaaacatgagtgccttatttaaaagggcattcttaggactgtgaggatggtttaatatttgttttttcatggtggttgcatgtattttagacaggaaatacatatgtaagcatgtgtatataataaataagcatgttttatcatgaaaaattattgtgaacaatttagatctttaagaacttattaataatggaatactatttctaatttttctctttttcaacttgaaaaatattctcaaaattattaactaccctgaagatactttgtctttaggggaggagggctgaggaagaaggcatacataattacttcagtgtaatcctttatatcagagtaatctttcaggaactaaaatagcaattgttaataaaatttagtttctcattatagtctaaaagcaaaataaattctgaagtagtccaataacagaactgtatgacccctttagaaataaaatttatcatgaaatgctagttcttttaagtttgtattaagtttaaatggtaaaatgcatataatttaaattttatgtatttttatttcagaacattttttaaaatattaaaaattattttttagtcttgtagtcattacaaaattataaacgagttgtatactggttcctttttgaggtctacaaacatgctcgtgtatcttccaatgcaaaaaaaaaacccctcccttttaacctgctagtttttccagccttcttcactgactgacagacttcttggagaaatccacatccagtgcccctacatcctcatcactcactactcagcaccttgcagtctggttttacacagcactctactgaaactgttcttttgaaagtcagcaatggcctcccagttaccaaactgaatggtttttttctccgtctgaatcccttacccttttctctgcaacatttacaccattgagcaacctttcctagacagtgtctccttccttgaagatgctatcctctgaaataactgtgagtacagtcgcataaccctaatttaagatgtgcctgctgaacatgtgctctctcagatcctgtcctcagaatgcttttggctcttttctcggtatctcatccttagagtttttattttataccaatgttctggattacatacctggtccagaaatctagacttgtacttctttttaattgcctagttgacatttcaaccttgattaaagattgacaatatttatcaccttttcctcctggaacaatttaggttaatggtgcagccttttttcctagtcaaacatgccaggaagttcagggcaaagttcaactgctccctcttgtcttatgtggtcactgcttctgagaacatccaggaagttctttctatacttgaatcatcttctcagtcctttggggctttactgctatgagtatgaacttttgtgattatttatttcagtcttcatgatggtgctatcacattctacagttgtttatgtctgtacccagtaagctcttttgagggaaggaatcttgtcttctcctattcccagtcttgctcatgcataacagatgcccattcctcctaaatatgaatgctgtattataggcattagtaataatccctgttacattgcagtctgaagtatgttttaaacatacttttttaaagttagaactgacttacaagtgaatctattcttagattcttagatactaactactttagatatttagttatactcaataactaaatatcaatactcaatatctgtttcttctgaatttcagagtagttagaatgtttttcttaagactttgctagaaaggaactggtttgttagtaattctgccatcaactcatggagttataattgccaaatgagttaatttttatataccttaagctatcttgcctacaaaaagtaaaataaggcaggattcataaatgttacttgtaaattgagtgtttcacatgaggccaagtatgattttaacataatgaatatcattgctcctcatctgtaaatttgctgctgctttcatatgtgtatctgtacatagagttatgaatgaaaatccagtaatgccctaaagcaactttcttccatagggtcaaagctcacttaaggtaaacgtgtgaaaaaagtgactgcagtgtgtttgaaaccacaagctgtttctatgtcataaattaacatcagcttgcaagtctctgaaagaaccactcatttgtaattggtatatatgtcacaacctcccacattcctttagcccatctcagggaattattgaaacgctggcagggttagtttcattttgttttggtttttttgggtttttttgtttgtttgaggattttttttttcttttatcatttgtttgctcctgtgtaagcttaatatataatggcagtttggcatctgttcttcgcacatgtctaacccagcagagttatgcaaaaatgatgacttcattttaggtcaaattggctttgttcccagtcctcattgttggtcactttgttcagttctggtgactcattggtgatgttgatgaaactgctcagcctgccagctgggatattgatggcaggtctaggcttcattgttaggtagaagattgaatacttctcactttatacaaatttacattggctattgctcccatgtgttagctagtcttaacatgtttgttatttcgttatcttattagctgacatacggagtggtattattagtgtcgtactccttagcgtgagcatgacaattaagttaccttactaacagtgatgagtaaaccatactctgatctaaacccattgttaccaatgatgtgattatgaagttagctgaatctatggtctacatttgaagaaatagttcagaattctctactacattgtaagttacttgctaatagagattgggcattattatgtactactccccttctcacatcctacccaaagtacacaaggccgtagtaaaatactgttgctactaaaaactaaacatactgtggttgctaatgtcctttacatcttcagcctatagggaatggtacaggcagaaacaagcaccattaagtatattatcatcagtagtgagatctgtatgattaggatatctttgcttaagcccccaaaggaaaaattctctagcattaaaaacatggctggaacatagctaagcagttaacctaattagtagacttattgttaacgttcagtcctaaaaatgaaaagcttcagttgggagtagaaaatatactatgctggtatatagagcaacaaataccctgatgagataaaatgaagtagaaacttaccatttgacattatttgactttcatacatgctactgaaaagtctaggtttagctaagaagcataaataatggcagtacttgtagaggaaagaacataccagctaaaacaagaactgtaatgaatataatggaaagtgtttggagcttgaatacttggcttcaaaaatctggctttgccatttactgttaaaaaaatatctgagaatttatctcaggctgtaaaacagagaagtcataccaatttcaagaataaaatatgatataaagaattgttgaagccaaaatatccagaaataaacagaatggaaggtatcattgctataattatcttttcagaataaaaaatagagtattctttatcctttctgttgtctcacatgacaagcatgggatggtgaggaaatggcatattgcctatgttcgccgccccacccccttagttccaccaccccttcaccgtcacccccagttcactagtgtatcagaatgcatcttcagaattacacactgaagatacaaaaggtccagttggtaagctcatcagtaaataacaaggctttgaaatctgacaaattagctatttttgtaggaagataatagaacagcaagatggaagacaagtgatgagtatcatctgttttgaggttgacaaggtgtgacataaccctgttaatagacacaagtaaaagaaaatcatactaggattggatattagtgagcgagcaccgaccagtagaaacaacaacagcataaatctgttatttaagtatcccaataatgaggttaaaaaaaaaaaaaaaacagaacaaagcatgaaaagaccacaattagtgctggctatgcttagagaggagcagtctcttggtaaactcaggcagtgatgatgaacagaaaatggccgactgatactgtaatagaggcatagaactaaggacactccgtgagctggcataaatacaggggagtctttaagactgaaaaaagttcatgggtatgacacttaatatgactcaacattactgcagaattttaaagcaaacatgaaagcttgagaataaacactagtccctctacttcaagaaaaagcagaacctgtactagaacatgaagaacttagagatcaaaagacagccagaactatgatgaaatattttgaaagcagtgggcacatttttaaagattttttttggagaactttatgaggctgtatgtataattcctatatgtaattttataggaattcttaactgaaagtagttatcaactgctacttatcaggagcagtgttattagggattttaagttaggcatgtagaaaactttctgacaaaagggctattgaactccagccagttcccagtgaatctccaggaggcaccttagaagtcttcacaagctgaataccatgtctttagggtgtccaaatgcttctgtcttgggggagagatgagagatgactgggtgcctttccactcagaacacagtagaccactcactatttatgaccaagcctcacttcttttctattacagttacagattcttttttagtctggaagttagggtaaataaaatttgtatgtttgatttttctcttaggaatgttttctcatcttaactcttatgttatctttatggccaacagatttgctcagaatatatcatcaaaatatatgtattgtattttgtaaaggtgaaaggatcgaaataccactttgacagttataaaccagagtagatttgagaactgattgctcacatcacacttacgaatagtctcagaagcctttaagagaaacttacttctcaatggacacttagaagaatttgatgatcttactgtcataaaatcagtaatgaaattctcagcaaaactatttggtaaacattgcaccctgtatttttacccaacatcttgttatgaaaattatcaaatacattaaaaagttaaaataattttatagtgtactcactacctagatgctaattagcattacctatgcttgctttgtcacatatccattcatcatttcatattattatttgatgcattttaaattgcatatcattaactagagttcattgttggcttttttacataaaattagcatgcaatgaagtgcatagaaatatgtgttcactgaggtttggcaaatgcatatagtgctatggaaataggaaacgttatcaccaccctagaaagtttccacactgccctttccagtcaattcctgtccctacttgaccctcaaaggcaaccactgttcctttttctaccataagatttttctgttctaaaactttatataaatagagtcacgcaacatgtacgcttttctacaaggcttcatttttttattgctgttcttttttattgctgagtagtattccactgtatgacaatattacagtttgttttcttaatttcctattattgatagatacctgggctgtttccaggattggccattataaataaagctgctatgaccattcttacgtaagtctttgtgaacataggttttcatttctttgcagtaaattccttggattagaattgctgggtcacagggtagttttaaaagaaactgccatacctttttccagttcagttttattgtgccctgtattttgtattttgatgtgcataaaggtgtaaactatttttatgatccatattgaagtattagaagaagtgagtttggaataacaatggcattgttcatggtcaaggatgacaattggaactatctgaggaaagcaaagacctgtctgccccagacagctcctcaaggggttcctatgcctgaaactttagcaatatttcactccttgaaaggttaaagcccaaccatggtgatatgttagctagaagaaacagcactggtttgtttatgttactaactttcaccacccgttttcagtaggtaaagtaagactgatcattgaacagaaaaggttatttctgtgatgaggttgagggggtagtggaaagcatgtattgctagtaagccccaggtacagctatgtgagagagagtcacctggacagggaagtcccccaaatggtggccagaagagcagaaaacggggtgggaaaaattctacctcacagttttgcataggggatagctatgcttttacgggacattttagcgtttaaaaatattttcaatattgtctctttattcaataccacccagctgtagttttttcacactctgatgactctcttatccactcttttacctctcccagctgttctattacatacagcattcacctgtattagtctatagaattataatcatctgtgtgtttctaatgctcattttcaaaaatatgtatggtttattcgatttttcctattaaaattttaagggctgggaaatttggcttctactgtaaatccttataatgttccacacattgtaaatatgcaataaaaatgttaacaactataatggcagcaggttttggtatgtatttctttgatatattgtcactttggacaataagtttgatttctgttaataaaagttgttcataaaatctagggagaattaagtcacactggtctctataagataatctgatgaattctgcatctttgaatcaatttgagttattttttgtaaaggtttaaattgtttctaacagtgttacctaaaacctttcattaaatcaaaaatgtaacttgtatattctgaaataacctggagtcttagaagacagaggcttctgcttccctctcccgtgaccccaacaatcccttcccacaggcttggcacagaagttcagtgctttctctacgtctcatgttgtcagaaataggttctcaccataatagacagtggtgaaatttccattgttcctactgagaagtccatttttaaggcatcaaaggtgaatgtgtatttagggatggaggaggcatattacaacaaagctgtatttaaaataacacaatcatatcatgctataaacaatagcagttccagaatggctactaaggattttggactgccagactttggaaattggcaagccttataccttgtccaatgaagttaagtacatttgagtgacagttcaacatacaagcaaaaaaatatatagaagacattgtacatttgttattaatggacatgtttactttacatgttagagtatccatccatctctaggttttccattagatgcttcattgtatccacaaacctgtttcaaaccattgaagtgatcttaccattgtgtttgttcaaaataaaattgggagaaaatgtgaa

SEQ ID NO: 179200 - DNA, 619 bp, Homo sapiens
  Payload ID: 15324
  Gene Symbol: SESTD1
  Gene Name: SEC14 and spectrin domains 1
  ENST ID: ENST00000440010
  CDS Start-End: 182-619
agacaaagcgccggaggtgggagccctgcgggccgcctttgcctccgcgccgtctgccgggtgcggccgcggcccgcagagaccgggccgcgcgcttttccgttcctgagcgcccttgttcatttctgggtgaaagggacccgaattgtgcaacagaattaaggaagttcactggagtaaaatggaggcctcagtaatattacccattctgaagaaaaaactagccttcctttcaggaggaaaagacagacggagtggcctcattttgacaattccattatgcctcgaacagacaaatatggatgagctgagtgtcaccttagactacctactcagcattccaagtgagaagtgtaaggctagaggatttaccgtgattgtggatggcagaaaatcacagtggaatgtggtgaaaacagtagtcgtaatgctacagaatgttgttccagctgaggtgtcccttgtttgtgtggtaaagccagatgaattctgggataagaaagtaacgcatttttgtttttggaaggagaaggatagacttggctttgaggttattttagtgtccgccaacaaattgactcgttatatagaaccatgccaattaacagaagattttggt

SEQ ID NO: 179201 - DNA, 2957 bp, Homo sapiens
  Payload ID: 15325
  Gene Symbol: SEC14L1
  Gene Name: SEC14-like lipid binding 1
  Uniprot ID: Q92503
  ENST ID: ENST00000392476
  CDS Start-End: 560-2719
actcgcagtccgcaggatgactcagggcagccctgaccacagttccgccgccatcggccctagcctgcggaattgggctcgccccgggacgataacagagctctgccgggggctggaggcactgaccgggtgaccagagacccagagaccagaccccctccacggcgcccgggatttcggggacggcttctcccatcgcaagtttcaacagaaaatgagaaatatcccccgacgattggctgaaaacatgcagcaaccactattttcttcctgcccctcgttgatgagagcattcgaagtgacctcagcagggcatccaggtcagtttctggaagacttgtgtgtgtgatgaatgaatatctggttttgtctctgctgggcctgtgtgcctggaaaggaattgttttggcctaggatcatccagctagacttcgggctccttgaggatattcagttttgtatgtttgaatatcctctcaccatgttcagcataaagtaccattcttaatgattatcctcaacaagacaggtgtgagagggttgctgttgtattgcaatcatggtgcagaaataccagtccccagtgagggtgtacaaatacccctttgaattaattatggctgcctatgaaaggaggttccctacatgtcctttgattccgatgttcgtgggcagtgacactgtgaatgaattcaagagcgaagatggggctattcatgtcattgaaaggcgctgcaagctggatgtagatgcacccagactgctgaagaagattgcaggagttgattatgtttattttgtccagaaaaactcactgaattctcgggaacgtactttgcacattgaggcttataatgaaacgttttccaatcgggtcatcattaatgagcattgctgctacaccgttcaccctgaaaatgaagattggacctgttttgaacagtctgcaagtttagatattaaatctttctttggttttgaaagtacagtggaaaaaattgcaatgaaacaatataccagcaacattaaaaaaggaaaggaaatcatcgaatactaccttcgccaattagaagaagaaggcataacctttgtgccccgttggagtccgccttccatcacgacctcttcagagacatcttcatcatcctccaagaaacaagcagcgtccatggccgtcgtcatcccagaagctgccctcaaggaggggctgagtggtgatgccctcagcagccccagcgcacctgagcccgtggtgggcacccctgacgacaaactagatgccgactacatcaagagatacctgggcgatttgactccgctgcaggagagctgcctcattagacttcgccagtggctccaggagacccacaagggcaaaattccaaaagatgagcatattcttcggttcctccgtgcacgggattttaatattgacaaagccagagagatcatgtgtcagtctttgacgtggagaaagcagcatcaggtagactacattcttgaaacctggacccctcctcaggtccttcaggattactacgcgggaggctggcatcatcacgacaaagatgggcggcccctctacgtgctcaggctggggcagatggacaccaaaggcttggtgagagcgctcggggaggaagccctgctgagatacgttctctccataaatgaagaagggctaaggcgatgcgaagagaatacaaaagtctttggtcggcctatcagctcatggacctgcctggtggacttggaagggctgaacatgcgccacttgtggagacctggtgtgaaagcgctgctgcggatcatcgaggtggtggaggccaactaccctgagacactgggccgccttctcatcctgcgggcgcccagggtatttcctgtgctctggacgctggttagtccgttcattgatgacaacaccagaaggaagttcctcatttatgcaggaaatgactaccagggtcctggaggcctgctggattacatcgacaaagagattattccagatttcctgagtggggagtgcatgtgcgaagtgccagagggtggactggtccccaaatctctgtaccggactgcagaggagctggagaacgaagacctgaagctctggactgagaccatctaccagtctgcaagcgtcttcaaaggagccccacatgagattctcattcagattgtggatgcctcgtcagtcatcacttgggatttcgacgtgtgcaaaggggacattgtgtttaacatctatcactccaagaggtcgccacaaccacccaaaaaggactccctgggagcccacagcatcacctctccgggtgggaacaatgtgcagctcatagacaaagtctggcagctgggccgcgactacagcatggtggagtcgcctctgatctgcaaagaaggagaaagcgtgcagggttcccatgtgaccaggtggccgggcttctacatcctgcagtggaaattccacagcatgcctgcgtgcgccgccagcagccttccccgggtggacgacgtgcttgcgtccctgcaggtctcttcgcacaagtgtaaagtgatgtactacaccgaggtgatcggctcggaggatttcagaggttccatgacgagcctggagtccagccacagcggcttctcccagctgagtgccgccaccacctcctccagccagtcccactccagctccatgatctccagatggcgattttgctgacagctgccaagaaaatgcttcactcaacagtcctcatgtgcccagagatgtttatagaactgtttgaattgcagccatcccctgccccctcccaggctgaagatctgttctttttaagttgattcgggagtggcattcttttatacccaaagactgtagtgcatcttgaagagctcaaagcacatgaccgcacaaatgcttacagggtttcctcccgagtaatccaatctcactcccc

SEQ ID NO: 179202 - DNA, 2504 bp, Homo sapiens
  Payload ID: 15325
  Gene Symbol: SEC14L1
  Gene Name: SEC14-like lipid binding 1
  Uniprot ID: Q92503
  ENST ID: ENST00000431431
  CDS Start-End: 211-2256
agtgcatttggtggcagagtgacaggcttggaagagaatgtggagggagtaagggaggcgcttgctaactgcccctgacgctgacagagctctggagaggtcagtgcagcttctgagttagctgctccttagcctggataccttaaatgccatctggttgggcatgccaaggcctatgaaaggaggttccctacatgtcctttgattccgatgttcgtgggcagtgacactgtgaatgaattcaagagcgaagatggggctattcatgtcattgaaaggcgctgcaagctggatgtagatgcacccagactgctgaagaagattgcaggagttgattatgtttattttgtccagaaaaactcactgaattctcgggaacgtactttgcacattgaggcttataatgaaacgttttccaatcgggtcatcattaatgagcattgctgctacaccgttcaccctgaaaatgaagattggacctgttttgaacagtctgcaagtttagatattaaatctttctttggttttgaaagtacagtggaaaaaattgcaatgaaacaatataccagcaacattaaaaaaggaaaggaaatcatcgaatactaccttcgccaattagaagaagaaggcataacctttgtgccccgttggagtccgccttccatcacgacctcttcagagacatcttcatcatcctccaagaaacaagcagcgtccatggccgtcgtcatcccagaagctgccctcaaggaggggctgagtggtgatgccctcagcagccccagcgcacctgagcccgtggtgggcacccctgacgacaaactagatgccgactacatcaagagatacctgggcgatttgactccgctgcaggagagctgcctcattagacttcgccagtggctccaggagacccacaagggcaaaattccaaaagatgagcatattcttcggttcctccgtgcacgggattttaatattgacaaagccagagagatcatgtgtcagtctttgacgtggagaaagcagcatcaggtagactacattcttgaaacctggacccctcctcaggtccttcaggattactacgcgggaggctggcatcatcacgacaaagatgggcggcccctctacgtgctcaggctggggcagatggacaccaaaggcttggtgagagcgctcggggaggaagccctgctgagatacgttctctccataaatgaagaagggctaaggcgatgcgaagagaatacaaaagtctttggtcggcctatcagctcatggacctgcctggtggacttggaagggctgaacatgcgccacttgtggagacctggtgtgaaagcgctgctgcggatcatcgaggtggtggaggccaactaccctgagacactgggccgccttctcatcctgcgggcgcccagggtatttcctgtgctctggacgctggttagtccgttcattgatgacaacaccagaaggaagttcctcatttatgcaggaaatgactaccagggtcctggaggcctgctggattacatcgacaaagagattattccagatttcctgagtggggagtgcatgtgcgaagtgccagagggtggactggtccccaaatctctgtaccggactgcagaggagctggagaacgaagacctgaagctctggactgagaccatctaccagtctgcaagcgtcttcaaaggagccccacatgagattctcattcagattgtggatgcctcgtcagtcatcacttgggatttcgacgtgtgcaaaggggacattgtgtttaacatctatcactccaagaggtcgccacaaccacccaaaaaggactccctgggagcccacagcatcacctctccgggtgggaacaatgtgcagctcatagacaaagtctggcagctgggccgcgactacagcatggtggagtcgcctctgatctgcaaagaaggagaaagcgtgcagggttcccatgtgaccaggtggccgggcttctacatcctgcagtggaaattccacagcatgcctgcgtgcgccgccagcagccttccccgggtggacgacgtgcttgcgtccctgcaggtctcttcgcacaagtgtaaagtgatgtactacaccgaggtgatcggctcggaggatttcagaggttccatgacgagcctggagtccagccacagcggcttctcccagctgagtgccgccaccacctcctccagccagtcccactccagctccatgatctccaggtagtgccgcgctgcctgcacctagtgtgcagaggggacggccgcccctcctcggacagccagctgcacccgcccacccagcggcgacattgtacagactcctctcacctctagatagcaaatagctctcagatggtaaacgtagtcgtttgatcccaaaactaccttggcaggtagttttaactctgatcctaacttaactcaatagccatagattttgtatacgttgtgcacaaaatccaaccagagcgc

SEQ ID NO: 179203 - DNA, 5295 bp, Homo sapiens
  Payload ID: 15325
  Gene Symbol: SEC14L1
  Gene Name: SEC14-like lipid binding 1
  Uniprot ID: Q92503
  ENST ID: ENST00000436233
  CDS Start-End: 265-2412
cggccccctccccggaaccggcggtcgagctacggtcgcggagcagtggaaccgagactgccccgcggagccgccggtatgagcgcccctcgccaccccgtgtcccaggcccggcctttctgacaagagctagacttcgggctccttgaggatattcagttttgtatgtttgaatatcctctcaccatgttcagcataaagtaccattcttaatgattatcctcaacaagacaggtgtgagagggttgctgttgtattgcaatcatggtgcagaaataccagtccccagtgagggtgtacaaatacccctttgaattaattatggctgcctatgaaaggaggttccctacatgtcctttgattccgatgttcgtgggcagtgacactgtgaatgaattcaagagcgaagatggggctattcatgtcattgaaaggcgctgcaagctggatgtagatgcacccagactgctgaagaagattgcaggagttgattatgtttattttgtccagaaaaactcactgaattctcgggaacgtactttgcacattgaggcttataatgaaacgttttccaatcgggtcatcattaatgagcattgctgctacaccgttcaccctgaaaatgaagattggacctgttttgaacagtctgcaagtttagatattaaatctttctttggttttgaaagtacagtggaaaaaattgcaatgaaacaatataccagcaacattaaaaaaggaaaggaaatcatcgaatactaccttcgccaattagaagaagaaggcataacctttgtgccccgttggagtccgccttccatcacgacctcttcagagacatcttcatcatcctccaagaaacaagcagcgtccatggccgtcgtcatcccagaagctgccctcaaggaggggctgagtggtgatgccctcagcagccccagcgcacctgagcccgtggtgggcacccctgacgacaaactagatgccgactacatcaagagatacctgggcgatttgactccgctgcaggagagctgcctcattagacttcgccagtggctccaggagacccacaagggcaaaattccaaaagatgagcatattcttcggttcctccgtgcacgggattttaatattgacaaagccagagagatcatgtgtcagtctttgacgtggagaaagcagcatcaggtagactacattcttgaaacctggacccctcctcaggtccttcaggattactacgcgggaggctggcatcatcacgacaaagatgggcggcccctctacgtgctcaggctggggcagatggacaccaaaggcttggtgagagcgctcggggaggaagccctgctgagatacgttctctccataaatgaagaagggctaaggcgatgcgaagagaatacaaaagtctttggtcggcctatcagctcatggacctgcctggtggacttggaagggctgaacatgcgccacttgtggagacctggtgtgaaagcgctgctgcggatcatcgaggtggtggaggccaactaccctgagacactgggccgccttctcatcctgcgggcgcccagggtatttcctgtgctctggacgctggttagtccgttcattgatgacaacaccagaaggaagttcctcatttatgcaggaaatgactaccagggtcctggaggcctgctggattacatcgacaaagagattattccagatttcctgagtggggagtgcatgtgcgaagtgccagagggtggactggtccccaaatctctgtaccggactgcagaggagctggagaacgaagacctgaagctctggactgagaccatctaccagtctgcaagcgtcttcaaaggagccccacatgagattctcattcagattgtggatgcctcgtcagtcatcacttgggatttcgacgtgtgcaaaggggacattgtgtttaacatctatcactccaagaggtcgccacaaccacccaaaaaggactccctgggagcccacagcatcacctctccgggtgggaacaatgtgcagctcatagacaaagtctggcagctgggccgcgactacagcatggtggagtcgcctctgatctgcaaagaaggagaaagcgtgcagggttcccatgtgaccaggtggccgggcttctacatcctgcagtggaaattccacagcatgcctgcgtgcgccgccagcagccttccccgggtggacgacgtgcttgcgtccctgcaggtctcttcgcacaagtgtaaagtgatgtactacaccgaggtgatcggctcggaggatttcagaggttccatgacgagcctggagtccagccacagcggcttctcccagctgagtgccgccaccacctcctccagccagtcccactccagctccatgatctccaggtagtgccgcgctgcctgcacctagtgtgcagaggggacggccgcccctcctcggacagccagctgcacccgcccacccagcggcgacattgtacagactcctctcacctctagatagcaaatagctctcagatggtaaacgtagtcgtttgatcccaaaactaccttggcaggtagttttaactctgatcctaacttaactcaatagccatagattttgtatacgttgtgcacaaaatccaaccagagcgcaagggctctcttgaaagaaaagtagtttctgtaccaattaaaggattgacgtggtctcagatattgatgcaaaaaatttttccaacgaactccgcattgtccattagtgaatgaattcctgtgacatcctccagagatggcccctcctcacctgggacggaagctgccagctcgcttcccccaagctgcctcatggcccgcacgccgcctcacggcccccatgcttcccgccagtcaagatggtctgtggacttagggccagcccttgaggtccttatcctctgaggattcagaggttgcctgcggagtaccttgtcccagggccagacacacccacaccacccactgtcctgcagtggggccgggggctcaggaggggctctcagggactcctggtgactccaggaaaatgctgccatcgttaaacattactttctctttcctccttttcaaatctttttgatactttttagagcaggatttttctgtatgtgaacttgggtgggggggttcttcccgtttccttccgtgcgtcgcccctctcacctgcagtcagctcccagcccagtgtaggccatctcctctgtgccctctggtggctcattgtcctcagagcccagacagttccagccactaggaggccgtcttggaaccagcaagtcgcatttgccacttgacactgtccatggggttttattagtagctaagcagcagctctcgcatccacttcagggtggcgtgtggcatgtaggagtcctgcttctttgtacatgggaattgtggactcatgcgtgtgtgtgtgtgcatgtgctgtgtgtgtgcatgtgtgcatgacggtgggggtgctggggggacggggtgagtggaaacttagtttgagtaatgaaggaatcttcacagaagcaaatcagaatatgggatttgtttgccttttacattttgtttaattcctgattttaaagcctgctctatctggtacaggcccttattttttcagctttttatgggaaaagcaggttatttgagaatctgtccagaagttgcataggggatggcctccacgataaggacatgcaacacgtgtttctgtgtgcagcagaggccgtgtttttcatgccaaaccccacgcggctgtcaactgtgtgcgtggtaggcatggagatcctggttgtgccgtctcagctccgctctgaaggcactgtgtgggtgctgcgtgactggagagctgtgtggaggccatgtgtgccccgtgcagggatcaggagggcgggggagggaccgagcagccctcttgcccggtcgggtcagccctagtggctgcctgcacactgtagacgtcccagggcctgtgctgtgatcacctgcctttggaccacatttgtgtttgctcttagagatcgagctcctcagtggtacctgaagcctttgcttccggaaagcgcggtagggttcgtaggtagggctagtaggtagggttagtaggtagggctagtaggtagggctagtaggtagggttcgtaggtagggttcgtaggtagggctggtaggtagggttagtaggtagggctagtaggtagggttagtaggtagggttcgtaggtagggttcgtaggtagggttcgtaggtagggctagtaggtagggttagtaggtagggttcgtaggtagggttcgtaggtagggttaggtagggttcgtaggtagggttagtaggtagggctagtaggtagggttcgtaggtagggttcgtaggtagggctagtaggtagggttagtaggtagggctagtaggtagggctagtaggtagggttagtaggtagggctagtaggtagggttcgtaggtagggttagtaggtagggctagtaggtagggttcgtaggtagggttcgtaggtagggctagtaggtagggttagtaggtagggctagtaggtagggctagtaggtagggttcgtaggtagggttcgtaggtagggttcgtaggtagggttcgtaggtagggttagtaggtagggttcgtaggtagggctagtaggtagggctagtaggtagggctagtaggtagggttagtaggtagggctagtaggtagggctagtaggtagggctagtaggtagggctagtaggtagggttcgtaggtagggttcgtaggtagggttcgtaggtagggttagtagcgcgtctgtgctgcttccacctggtgcttcctgttcccaaatcacaagggcctgaaggtggtccctgctttctctttctctttctctgtgtctcagatggcgattttgctgacagctgccaagaaaatgcttcactcaacagtcctcatgtgcccagagatgtttatagaactgtttgaattgcagccatcccctgccccctcccaggctgaagatctgttctttttaagttgattcgggagtggcattcttttatacccaaagactgtagtgcatcttgaagagctcaaagcacatgaccgcacaaatgcttacagggtttcctcccgagtaatccaatctcactccccttgtaagggaattctggggcagctatggtttgagtatgcagtttgcatcgtgtttctacctttagtaccttgccactcttttaaaacgctgctgtcatttccca

SEQ ID NO: 179204 - DNA, 2908 bp, Homo sapiens
  Payload ID: 15325
  Gene Symbol: SEC14L1
  Gene Name: SEC14-like lipid binding 1
  Uniprot ID: Q92503
  ENST ID: ENST00000443798
  CDS Start-End: 212-2371
gagactgccccgcggagccgccggtatgagcgcccctcgccaccccgtgtcccaggcccggcctttctgacaagagctagacttcgggctccttgaggatattcagttttgtatgtttgaatatcctctcaccatgttcagcataaagtaccattcttaatgattatcctcaacaagacaggtgtgagagggttgctgttgtattgcaatcatggtgcagaaataccagtccccagtgagggtgtacaaatacccctttgaattaattatggctgcctatgaaaggaggttccctacatgtcctttgattccgatgttcgtgggcagtgacactgtgaatgaattcaagagcgaagatggggctattcatgtcattgaaaggcgctgcaagctggatgtagatgcacccagactgctgaagaagattgcaggagttgattatgtttattttgtccagaaaaactcactgaattctcgggaacgtactttgcacattgaggcttataatgaaacgttttccaatcgggtcatcattaatgagcattgctgctacaccgttcaccctgaaaatgaagattggacctgttttgaacagtctgcaagtttagatattaaatctttctttggttttgaaagtacagtggaaaaaattgcaatgaaacaatataccagcaacattaaaaaaggaaaggaaatcatcgaatactaccttcgccaattagaagaagaaggcataacctttgtgccccgttggagtccgccttccatcacgacctcttcagagacatcttcatcatcctccaagaaacaagcagcgtccatggccgtcgtcatcccagaagctgccctcaaggaggggctgagtggtgatgccctcagcagccccagcgcacctgagcccgtggtgggcacccctgacgacaaactagatgccgactacatcaagagatacctgggcgatttgactccgctgcaggagagctgcctcattagacttcgccagtggctccaggagacccacaagggcaaaattccaaaagatgagcatattcttcggttcctccgtgcacgggattttaatattgacaaagccagagagatcatgtgtcagtctttgacgtggagaaagcagcatcaggtagactacattcttgaaacctggacccctcctcaggtccttcaggattactacgcgggaggctggcatcatcacgacaaagatgggcggcccctctacgtgctcaggctggggcagatggacaccaaaggcttggtgagagcgctcggggaggaagccctgctgagatacgttctctccataaatgaagaagggctaaggcgatgcgaagagaatacaaaagtctttggtcggcctatcagctcatggacctgcctggtggacttggaagggctgaacatgcgccacttgtggagacctggtgtgaaagcgctgctgcggatcatcgaggtggtggaggccaactaccctgagacactgggccgccttctcatcctgcgggcgcccagggtatttcctgtgctctggacgctggttagtccgttcattgatgacaacaccagaaggaagttcctcatttatgcaggaaatgactaccagggtcctggaggcctgctggattacatcgacaaagagattattccagatttcctgagtggggagtgcatgtgcgaagtgccagagggtggactggtccccaaatctctgtaccggactgcagaggagctggagaacgaagacctgaagctctggactgagaccatctaccagtctgcaagcgtcttcaaaggagccccacatgagattctcattcagattgtggatgcctcgtcagtcatcacttgggatttcgacgtgtgcaaaggggacattgtgtttaacatctatcactccaagaggtcgccacaaccacccaaaaaggactccctgggagcccacagcatcacctctccgggtgggaacaatgtgcagctcatagacaaagtctggcagctgggccgcgactacagcatggtggagtcgcctctgatctgcaaagaaggagaaagcgtgcagggttcccatgtgaccaggtggccgggcttctacatcctgcagtggaaattccacagcatgcctgcgtgcgccgccagcagccttccccgggtggacgacgtgcttgcgtccctgcaggtctcttcgcacaagtgtaaagtgatgtactacaccgaggtgatcggctcggaggatttcagaggttccatgacgagcctggagtccagccacagcggcttctcccagctgagtgccgccaccacctcctccagccagtcccactccagctccatgatctccagatggcgattttgctgacagctgccaagaaaatgcttcactcaacagtcctcatgtgcccagagatgtttatagaactgtttgaattgcagccatcccctgccccctcccaggctgaagatctgttctttttaagttgattcgggagtggcattcttttatacccaaagactgtagtgcatcttgaagagctcaaagcacatgaccgcacaaatgcttacagggtttcctcccgagtaatccaatctcactccccttgtaagggaattctggggcagctatggtttgagtatgcagtttgcatcgtgtttctacctttagtaccttgccactcttttaaaacgctgctgtcatttcccatttcttagtactaatgattctttgattctccctctattatgtcttaattcactttccttcctaaatttgttatttgcatatcaaattctgtaaatgttttgtaaacatattacctcacttggtaatacaatactgatagtctttaaaagatttttttattgttatcaataataaatgtgaactatttaaagaaaa

SEQ ID NO: 179205 - DNA, 5283 bp, Homo sapiens
  Payload ID: 15325
  Gene Symbol: SEC14L1
  Gene Name: SEC14-like lipid binding 1
  Uniprot ID: Q92503
  ENST ID: ENST00000430767
  CDS Start-End: 357-2504
ttcaacagaaaatgagaaatatcccccgacgattggctgaaaacatgcagcaaccactattttcttcctgcccctcgttgatgagagcattcgaagtgacctcagcagggcatccaggtcagtttctggaagacttgtgtgtgtgatgaatgaatatctggttttgtctctgctgggcctgtgtgcctggaaaggaattgttttggcctaggatcatccagctagacttcgggctccttgaggatattcagttttgtatgtttgaatatcctctcaccatgttcagcataaagtaccattcttaatgattatcctcaacaagacaggtgtgagagggttgctgttgtattgcaatcatggtgcagaaataccagtccccagtgagggtgtacaaatacccctttgaattaattatggctgcctatgaaaggaggttccctacatgtcctttgattccgatgttcgtgggcagtgacactgtgaatgaattcaagagcgaagatggggctattcatgtcattgaaaggcgctgcaagctggatgtagatgcacccagactgctgaagaagattgcaggagttgattatgtttattttgtccagaaaaactcactgaattctcgggaacgtactttgcacattgaggcttataatgaaacgttttccaatcgggtcatcattaatgagcattgctgctacaccgttcaccctgaaaatgaagattggacctgttttgaacagtctgcaagtttagatattaaatctttctttggttttgaaagtacagtggaaaaaattgcaatgaaacaatataccagcaacattaaaaaaggaaaggaaatcatcgaatactaccttcgccaattagaagaagaaggcataacctttgtgccccgttggagtccgccttccatcacgacctcttcagagacatcttcatcatcctccaagaaacaagcagcgtccatggccgtcgtcatcccagaagctgccctcaaggaggggctgagtggtgatgccctcagcagccccagcgcacctgagcccgtggtgggcacccctgacgacaaactagatgccgactacatcaagagatacctgggcgatttgactccgctgcaggagagctgcctcattagacttcgccagtggctccaggagacccacaagggcaaaattccaaaagatgagcatattcttcggttcctccgtgcacgggattttaatattgacaaagccagagagatcatgtgtcagtctttgacgtggagaaagcagcatcaggtagactacattcttgaaacctggacccctcctcaggtccttcaggattactacgcgggaggctggcatcatcacgacaaagatgggcggcccctctacgtgctcaggctggggcagatggacaccaaaggcttggtgagagcgctcggggaggaagccctgctgagatacgttctctccataaatgaagaagggctaaggcgatgcgaagagaatacaaaagtctttggtcggcctatcagctcatggacctgcctggtggacttggaagggctgaacatgcgccacttgtggagacctggtgtgaaagcgctgctgcggatcatcgaggtggtggaggccaactaccctgagacactgggccgccttctcatcctgcgggcgcccagggtatttcctgtgctctggacgctggttagtccgttcattgatgacaacaccagaaggaagttcctcatttatgcaggaaatgactaccagggtcctggaggcctgctggattacatcgacaaagagattattccagatttcctgagtggggagtgcatgtgcgaagtgccagagggtggactggtccccaaatctctgtaccggactgcagaggagctggagaacgaagacctgaagctctggactgagaccatctaccagtctgcaagcgtcttcaaaggagccccacatgagattctcattcagattgtggatgcctcgtcagtcatcacttgggatttcgacgtgtgcaaaggggacattgtgtttaacatctatcactccaagaggtcgccacaaccacccaaaaaggactccctgggagcccacagcatcacctctccgggtgggaacaatgtgcagctcatagacaaagtctggcagctgggccgcgactacagcatggtggagtcgcctctgatctgcaaagaaggagaaagcgtgcagggttcccatgtgaccaggtggccgggcttctacatcctgcagtggaaattccacagcatgcctgcgtgcgccgccagcagccttccccgggtggacgacgtgcttgcgtccctgcaggtctcttcgcacaagtgtaaagtgatgtactacaccgaggtgatcggctcggaggatttcagaggttccatgacgagcctggagtccagccacagcggcttctcccagctgagtgccgccaccacctcctccagccagtcccactccagctccatgatctccaggtagtgccgcgctgcctgcacctagtgtgcagaggggacggccgcccctcctcggacagccagctgcacccgcccacccagcggcgacattgtacagactcctctcacctctagatagcaaatagctctcagatggtaaacgtagtcgtttgatcccaaaactaccttggcaggtagttttaactctgatcctaacttaactcaatagccatagattttgtatacgttgtgcacaaaatccaaccagagcgcaagggctctcttgaaagaaaagtagtttctgtaccaattaaaggattgacgtggtctcagatattgatgcaaaaaatttttccaacgaactccgcattgtccattagtgaatgaattcctgtgacatcctccagagatggcccctcctcacctgggacggaagctgccagctcgcttcccccaagctgcctcatggcccgcacgccgcctcacggcccccatgcttcccgccagtcaagatggtctgtggacttagggccagcccttgaggtccttatcctctgaggattcagaggttgcctgcggagtaccttgtcccagggccagacacacccacaccacccactgtcctgcagtggggccgggggctcaggaggggctctcagggactcctggtgactccaggaaaatgctgccatcgttaaacattactttctctttcctccttttcaaatctttttgatactttttagagcaggatttttctgtatgtgaacttgggtgggggggttcttcccgtttccttccgtgcgtcgcccctctcacctgcagtcagctcccagcccagtgtaggccatctcctctgtgccctctggtggctcattgtcctcagagcccagacagttccagccactaggaggccgtcttggaaccagcaagtcgcatttgccacttgacactgtccatggggttttattagtagctaagcagcagctctcgcatccacttcagggtggcgtgtggcatgtaggagtcctgcttctttgtacatgggaattgtggactcatgcgtgtgtgtgtgtgcatgtgctgtgtgtgtgcatgtgtgcatgacggtgggggtgctggggggacggggtgagtggaaacttagtttgagtaatgaaggaatcttcacagaagcaaatcagaatatgggatttgtttgccttttacattttgtttaattcctgattttaaagcctgctctatctggtacaggcccttattttttcagctttttatgggaaaagcaggttatttgagaatctgtccagaagttgcataggggatggcctccacgataaggacatgcaacacgtgtttctgtgtgcagcagaggccgtgtttttcatgccaaaccccacgcggctgtcaactgtgtgcgtggtaggcatggagatcctggttgtgccgtctcagctccgctctgaaggcactgtgtgggtgctgcgtgactggagagctgtgtggaggccatgtgtgccccgtgcagggatcaggagggcgggggagggaccgagcagccctcttgcccggtcgggtcagccctagtggctgcctgcacactgtagacgtcccagggcctgtgctgtgatcacctgcctttggaccacatttgtgtttgctcttagagatcgagctcctcagtggtacctgaagcctttgcttccggaaagcgcggtagggttcgtaggtagggctagtaggtagggttagtaggtagggctagtaggtagggctagtaggtagggttcgtaggtagggttcgtaggtagggctggtaggtagggttagtaggtagggctagtaggtagggttagtaggtagggttcgtaggtagggttcgtaggtagggttcgtaggtagggctagtaggtagggttagtaggtagggttcgtaggtagggttcgtaggtagggttaggtagggttcgtaggtagggttagtaggtagggctagtaggtagggttcgtaggtagggttcgtaggtagggctagtaggtagggttagtaggtagggctagtaggtagggctagtaggtagggttagtaggtagggctagtaggtagggttcgtaggtagggttagtaggtagggctagtaggtagggttcgtaggtagggttcgtaggtagggctagtaggtagggttagtaggtagggctagtaggtagggctagtaggtagggttcgtaggtagggttcgtaggtagggttcgtaggtagggttcgtaggtagggttagtaggtagggttcgtaggtagggctagtaggtagggctagtaggtagggctagtaggtagggttagtaggtagggctagtaggtagggctagtaggtagggctagtaggtagggctagtaggtagggttcgtaggtagggttcgtaggtagggttcgtaggtagggttagtagcgcgtctgtgctgcttccacctggtgcttcctgttcccaaatcacaagggcctgaaggtggtccctgctttctctttctctttctctgtgtctcagatggcgattttgctgacagctgccaagaaaatgcttcactcaacagtcctcatgtgcccagagatgtttatagaactgtttgaattgcagccatcccctgccccctcccaggctgaagatctgttctttttaagttgattcgggagtggcattcttttatacccaaagactgtagtgcatcttgaagagctcaaagcacatgaccgcacaaatgcttacagggtttcctcccgagtaatccaatctcactcccc

SEQ ID NO: 179206 - DNA, 705 bp, Homo sapiens
  Payload ID: 15325
  Gene Symbol: SEC14L1
  Gene Name: SEC14-like lipid binding 1
  ENST ID: ENST00000588488
  CDS Start-End: 1-357
tacatcgacaaagagattattccagatttcctgagtggggagtgcatgtgcgaagtgccagagggtggactggtccccaaatctctgtaccggactgcagaggagctggagaacgaagacctgaagctctggactgagaccatctaccagtctgcaagcgtcttcaaaggagccccacatgagattctcattcagattgtggatgcctcgtcagtcatcacttgggatttcgacgtgtgcaaaggggacattgtgtttaacatctatcactccaagaggtcgccacaaccacccaaaaaggactccctgggagcccacagcatcacctctccggccagtcccactccagctccatgatctccaggtagtgccgcgctgcctgcacctagtgtgcagaggggacggccgcccctcctcggacagccagctgcacccgcccacccagcggcgacattgtacagactcctctcacctctagatagcaaatagctctcagatggtaaacgtagtcgtttgatcccaaaactaccttggcaggtagttttaactctgatcctaacttaactcaatagccatagattttgtatacgttgtgcacaaaatccaaccagagcgcaagggctctcttgaaagaaaagtagtttctgtaccaattaaaggattgacgtggtctcagatattgatgcaaaaaatttttccaacgaa

SEQ ID NO: 179207 - DNA, 1791 bp, Homo sapiens
  Payload ID: 15325
  Gene Symbol: SEC14L1
  Gene Name: SEC14-like lipid binding 1
  ENST ID: ENST00000589827
  CDS Start-End: 456-1791
actcgcagtccgcaggatgactcagggcagccctgaccacagttccgccgccatcggccctagcctgcggaattgggctcgccccgggacgataacagagctctgccgggggctggaggcactgaccgggtgaccagagacccagagaccagaccccctccacggcgcccgggatttcggggacggcttctcccatcgcaagtttcaacagaaaatgagaaatatcccccgacgattggctgaaaacatgcagcaaccactattttcttcctgcccctcgttgatgagagcattcgaagtgacctcagcagggcatccagctagacttcgggctccttgaggatattcagttttgtatgtttgaatatcctctcaccatgttcagcataaagtaccattcttaatgattatcctcaacaagacaggtgtgagagggttgctgttgtattgcaatcatggtgcagaaataccagtccccagtgagggtgtacaaatacccctttgaattaattatggctgcctatgaaaggaggttccctacatgtcctttgattccgatgttcgtgggcagtgacactgtgaatgaattcaagagcgaagatggggctattcatgtcattgaaaggcgctgcaagctggatgtagatgcacccagactgctgaagaagattgcaggagttgattatgtttattttgtccagaaaaactcactgaattctcgggaacgtactttgcacattgaggcttataatgaaacgttttccaatcgggtcatcattaatgagcattgctgctacaccgttcaccctgaaaatgaagattggacctgttttgaacagtctgcaagtttagatattaaatctttctttggttttgaaagtacagtggaaaaaattgcaatgaaacaatataccagcaacattaaaaaaggaaaggaaatcatcgaatactaccttcgccaattagaagaagaaggcataacctttgtgccccgttggagtccgccttccatcacgacctcttcagagacatcttcatcatcctccaagaaacaagcagcgtccatggccgtcgtcatcccagaagctgccctcaaggaggggctgagtggtgatgccctcagcagccccagcgcacctgagcccgtggtgggcacccctgacgacaaactagatgccgactacatcaagagatacctgggcgatttgactccgctgcaggagagctgcctcattagacttcgccagtggctccaggagacccacaagggcaaaattccaaaagatgagcatattcttcggttcctccgtgcacgggattttaatattgacaaagccagagagatcatgtgtcagtctttgacgtggagaaagcagcatcaggtagactacattcttgaaacctggacccctcctcaggtccttcaggattactacgcgggaggctggcatcatcacgacaaagatgggcggcccctctacgtgctcaggctggggcagatggacaccaaaggcttggtgagagcgctcggggaggaagccctgctgagatacgttctctccataaatgaagaagggctaaggcgatgcgaagagaatacaaaagtctttggtcggcctatcagctcatggacctgcctggtggacttggaagggctgaacatgcgccacttgtggagacctggtgtgaaagcgctgctgcggatcatcgaggtggtggaggccaactaccctgagacactgggccgccttctcatcctgcgggcgcccagggtatttcctgtgctctgga

SEQ ID NO: 179208 - DNA, 553 bp, Homo sapiens
  Payload ID: 15325
  Gene Symbol: SEC14L1
  Gene Name: SEC14-like lipid binding 1
  ENST ID: ENST00000588880
  CDS Start-End: 508-553
gcgacggggccggcgccttctccgagctcctcccacgctcgcgggtcggagctcgcgcctgcgcagttcgggccccgggtgtcctcccccctcccctttcttagcaaccatcgcccgctcccgcccccgctccctcggccgcggccgcgcacgcgcgcccctcccggcgcccggccccgcccaccccgtcacccgtaacaaccacaagtgccgtcgccgcgccccttccccctcccgcctccccggccccctccccggaaccggcggtcgagctacggtcgcggagcagtggaaccgagactgccccgcggagccgccggtatgagcgcccctcgccaccccgtgtcccaggcccggcctttctgacaagagctagacttcgggctccttgaggatattcagttttgtatgtttgaatatcctctcaccatgttcagcataaagtaccattcttaatgattatcctcaacaagacaggtgtgagagggttgctgttgtattgcaatcatggtgcagaaataccagtccccagtgagggtgtacaaatacccct

SEQ ID NO: 179209 - DNA, 637 bp, Homo sapiens
  Payload ID: 15325
  Gene Symbol: SEC14L1
  Gene Name: SEC14-like lipid binding 1
  ENST ID: ENST00000561721
  CDS Start-End: 596-637
actcgcagtccgcaggatgactcagggcagccctgaccacagttccgccgccatcggccctagcctgcggaattgggctcgccccgggacgataacagagctctgccgggggctggaggcactgaccgggtgaccagagacccagagaccagaccccctccacggcgcccgggatttcggggacggcttctcccatcgcaagtagggcttggacgggaggcgacaaaagagaacttggtttcaacagaaaatgagaaatatcccccgacgattggctgaaaacatgcagcaaccactattttcttcctgcccctcgttgatgagagcattcgaagtgacctcagcagggcatccaggtcagtttctggaagacttgtgtgtgtgatgaatgaatatctggttttgtctctgctgggcctgtgtgcctggaaaggaattgttttggcctaggatcatccagctagacttcgggctccttgaggatattcagttttgtatgtttgaatatcctctcaccatgttcagcataaagtaccattcttaatgattatcctcaacaagacaggtgtgagagggttgctgttgtattgcaatcatggtgcagaaataccagtccccagtgagggtgtacaaatac

SEQ ID NO: 179210 - DNA, 578 bp, Homo sapiens
  Payload ID: 15325
  Gene Symbol: SEC14L1
  Gene Name: SEC14-like lipid binding 1
  ENST ID: ENST00000588616
  CDS Start-End: 150-578
ttcgatgtttatttgcttggagtttcagcagcagaccgcggtgcttgaagctgttcatggaatgaccgcttgtgtctgagccagcgtctgaggaaactgatgttctataagcctatgaaaggaggttccctacatgtcctttgattccgatgttcgtgggcagtgacactgtgaatgaattcaagagcgaagatggggctattcatgtcattgaaaggcgctgcaagctggatgtagatgcacccagactgctgaagaagattgcaggagttgattatgtttattttgtccagaaaaactcactgaattctcgggaacgtactttgcacattgaggcttataatgaaacgttttccaatcgggtcatcattaatgagcattgctgctacaccgttcaccctgaaaatgaagattggacctgttttgaacagtctgcaagtttagatattaaatctttctttggttttgaaagtacagtggaaaaaattgcaatgaaacaatataccagcaacattaaaaaaggaaaggaaatcatcgaatactaccttcgccaattagaagaagaaggcataaccttt

SEQ ID NO: 179211 - DNA, 575 bp, Homo sapiens
  Payload ID: 15325
  Gene Symbol: SEC14L1
  Gene Name: SEC14-like lipid binding 1
  ENST ID: ENST00000586429
  CDS Start-End: 363-575
acacaagggagaaggtggaagtggagactagcgagaggtggccgcaagccaaggaacacccagggcaaccagcagccggaagaagccagaacagaccttcccagagctgcaggagggagcacagctctgccgacactttgatttcacctccagagcttacggcctccagaacagtgagagaatgagtttctgttgccctcagccaccagttcgtggtaatttcttggaacaacttcgggctccttgaggatattcagttttgtatgtttgaatatcctctcaccatgttcagcataaagtaccattcttaatgattatcctcaacaagacaggtgtgagagggttgctgttgtattgcaatcatggtgcagaaataccagtccccagtgagggtgtacaaatacccctttgaattaattatggctgcctatgaaaggaggttccctacatgtcctttgattccgatgttcgtgggcagtgacactgtgaatgaattcaagagcgaagatggggctattcatgtcattgaaaggcgctgcaagctggatgtagatgcacccagactgctgaagaag

SEQ ID NO: 179212 - DNA, 2712 bp, Homo sapiens
  Payload ID: 15325
  Gene Symbol: SEC14L1
  Gene Name: SEC14-like lipid binding 1
  Uniprot ID: Q92503
  ENST ID: ENST00000585618
  CDS Start-End: 259-2406
aacaaccacaagtgccgtcgccgcgccccttccccctcccgcctccccggccccctccccggaaccggcggtcgagctacggtcgcggagcagtggaaccgagactgccccgcggagccgccgctagacttcgggctccttgaggatattcagttttgtatgtttgaatatcctctcaccatgttcagcataaagtaccattcttaatgattatcctcaacaagacaggtgtgagagggttgctgttgtattgcaatcatggtgcagaaataccagtccccagtgagggtgtacaaatacccctttgaattaattatggctgcctatgaaaggaggttccctacatgtcctttgattccgatgttcgtgggcagtgacactgtgaatgaattcaagagcgaagatggggctattcatgtcattgaaaggcgctgcaagctggatgtagatgcacccagactgctgaagaagattgcaggagttgattatgtttattttgtccagaaaaactcactgaattctcgggaacgtactttgcacattgaggcttataatgaaacgttttccaatcgggtcatcattaatgagcattgctgctacaccgttcaccctgaaaatgaagattggacctgttttgaacagtctgcaagtttagatattaaatctttctttggttttgaaagtacagtggaaaaaattgcaatgaaacaatataccagcaacattaaaaaaggaaaggaaatcatcgaatactaccttcgccaattagaagaagaaggcataacctttgtgccccgttggagtccgccttccatcacgacctcttcagagacatcttcatcatcctccaagaaacaagcagcgtccatggccgtcgtcatcccagaagctgccctcaaggaggggctgagtggtgatgccctcagcagccccagcgcacctgagcccgtggtgggcacccctgacgacaaactagatgccgactacatcaagagatacctgggcgatttgactccgctgcaggagagctgcctcattagacttcgccagtggctccaggagacccacaagggcaaaattccaaaagatgagcatattcttcggttcctccgtgcacgggattttaatattgacaaagccagagagatcatgtgtcagtctttgacgtggagaaagcagcatcaggtagactacattcttgaaacctggacccctcctcaggtccttcaggattactacgcgggaggctggcatcatcacgacaaagatgggcggcccctctacgtgctcaggctggggcagatggacaccaaaggcttggtgagagcgctcggggaggaagccctgctgagatacgttctctccataaatgaagaagggctaaggcgatgcgaagagaatacaaaagtctttggtcggcctatcagctcatggacctgcctggtggacttggaagggctgaacatgcgccacttgtggagacctggtgtgaaagcgctgctgcggatcatcgaggtggtggaggccaactaccctgagacactgggccgccttctcatcctgcgggcgcccagggtatttcctgtgctctggacgctggttagtccgttcattgatgacaacaccagaaggaagttcctcatttatgcaggaaatgactaccagggtcctggaggcctgctggattacatcgacaaagagattattccagatttcctgagtggggagtgcatgtgcgaagtgccagagggtggactggtccccaaatctctgtaccggactgcagaggagctggagaacgaagacctgaagctctggactgagaccatctaccagtctgcaagcgtcttcaaaggagccccacatgagattctcattcagattgtggatgcctcgtcagtcatcacttgggatttcgacgtgtgcaaaggggacattgtgtttaacatctatcactccaagaggtcgccacaaccacccaaaaaggactccctgggagcccacagcatcacctctccgggtgggaacaatgtgcagctcatagacaaagtctggcagctgggccgcgactacagcatggtggagtcgcctctgatctgcaaagaaggagaaagcgtgcagggttcccatgtgaccaggtggccgggcttctacatcctgcagtggaaattccacagcatgcctgcgtgcgccgccagcagccttccccgggtggacgacgtgcttgcgtccctgcaggtctcttcgcacaagtgtaaagtgatgtactacaccgaggtgatcggctcggaggatttcagaggttccatgacgagcctggagtccagccacagcggcttctcccagctgagtgccgccaccacctcctccagccagtcccactccagctccatgatctccaggtagtgccgcgctgcctgcacctagtgtgcagaggggacggccgcccctcctcggacagccagctgcacccgcccacccagcggcgacattgtacagactcctctcacctctagatagcaaatagctctcagatggtaaacgtagtcgtttgatcccaaaactaccttggcaggtagttttaactctgatcctaacttaactcaatagccatagattttgtatacgttgtgcacaaaatccaaccagagcgcaagggctctcttgaaagaaaagtagtttctgtaccaattaaaggattgacgtggtctc

SEQ ID NO: 179213 - DNA, 484 bp, Homo sapiens
  Payload ID: 15325
  Gene Symbol: SEC14L1
  Gene Name: SEC14-like lipid binding 1
  ENST ID: ENST00000589202
  CDS Start-End: 1-471
gttcaccctgaaaatgaagattggacctgttttgaacagtctgcaagtttagatattaaatctttctttggttttgaaagtacagtggaaaaaattgcaatgaaacaatataccagcaacattaaaaaaggaaaggaaatcatcgaatactaccttcgccaattagaagaagaaggcataacctttgtgccccgttggagtccgccttccatcacgacctcttcagagacatcttcatcatcctccaagaaacaagcagcgtccatggccgtcgtcatcccagaagctgccctcaaggaggggctgagtggtgatgccctcagcagccccagcgcacctgagcccgtggtgggcacccctgacggtgggtctggcaggggcttcatcccgagagcaaggctagggaagtcggcgttgccgttttctctctgtttgctctgcctgttcccgcttccttggaacattagataactcagaaaggaaa

SEQ ID NO: 179214 - DNA, 652 bp, Homo sapiens
  Payload ID: 15325
  Gene Symbol: SEC14L1
  Gene Name: SEC14-like lipid binding 1
  ENST ID: ENST00000587820
  CDS Start-End: 472-652
tttttgctgagagcggagtttcgggtccggagccagtgcccgcccctctctcccgtcggtcggggctttggccccgtggggctcagccgcgcgggacccctgctgagcagccccgggcgccggccgcccctcgagcctgctcgggatgcgttcagtgggtctggcctttggctcctgtttaaacagcgattgtcatgcaatggaggccgtccggctcctggatgccacttggtcgttgtcactccggatgcccgcgtagggcgtttatctggaccagagcatcggcagctgagacctggctgtggttcacaagctcgtgaattagcaggttcttaactagacttcgggctccttgaggatattcagttttgtatgtttgaatatcctctcaccatgttcagcataaagtaccattcttaatgattatcctcaacaagacaggtgtgagagggttgctgttgtattgcaatcatggtgcagaaataccagtccccagtgagggtgtacaaatacccctttgaattaattatggctgcctatgaaaggaggttccctacatgtcctttgattccgatgttcgtgggcagtgacactgtgaatgaattcaagagcgaagatggggctattcatgtcattgaaaggcgctgcaagc

SEQ ID NO: 179215 - DNA, 2828 bp, Homo sapiens
  Payload ID: 15325
  Gene Symbol: SEC14L1
  Gene Name: SEC14-like lipid binding 1
  Uniprot ID: Q92503
  ENST ID: ENST00000591437
  CDS Start-End: 446-2491
tctgtcactcaggctggattgtagtggcgcgatctcagctcactgcaacctccatctcctgggttcaagcgattcttctgcctcagcctcccaaatagctgggattacagacctgcactaccatgcccgctaatttttgtatttttagtagagatggggtttctctatgttggccaggctggtctcgaactcctgacctcaggtgatccacccgccttggtctcccagagtgctgggattacaggcgtgagccacctctcctggtctatttttatttttattttttgagacggagttttgctctcgtccaggctggagtgcagtgacgcgatcttggcttactgcagcctctgcctcctgagttcaagcgattctgcatcagcctcccgaatagctgcgattacaggcctatgaaaggaggttccctacatgtcctttgattccgatgttcgtgggcagtgacactgtgaatgaattcaagagcgaagatggggctattcatgtcattgaaaggcgctgcaagctggatgtagatgcacccagactgctgaagaagattgcaggagttgattatgtttattttgtccagaaaaactcactgaattctcgggaacgtactttgcacattgaggcttataatgaaacgttttccaatcgggtcatcattaatgagcattgctgctacaccgttcaccctgaaaatgaagattggacctgttttgaacagtctgcaagtttagatattaaatctttctttggttttgaaagtacagtggaaaaaattgcaatgaaacaatataccagcaacattaaaaaaggaaaggaaatcatcgaatactaccttcgccaattagaagaagaaggcataacctttgtgccccgttggagtccgccttccatcacgacctcttcagagacatcttcatcatcctccaagaaacaagcagcgtccatggccgtcgtcatcccagaagctgccctcaaggaggggctgagtggtgatgccctcagcagccccagcgcacctgagcccgtggtgggcacccctgacgacaaactagatgccgactacatcaagagatacctgggcgatttgactccgctgcaggagagctgcctcattagacttcgccagtggctccaggagacccacaagggcaaaattccaaaagatgagcatattcttcggttcctccgtgcacgggattttaatattgacaaagccagagagatcatgtgtcagtctttgacgtggagaaagcagcatcaggtagactacattcttgaaacctggacccctcctcaggtccttcaggattactacgcgggaggctggcatcatcacgacaaagatgggcggcccctctacgtgctcaggctggggcagatggacaccaaaggcttggtgagagcgctcggggaggaagccctgctgagatacgttctctccataaatgaagaagggctaaggcgatgcgaagagaatacaaaagtctttggtcggcctatcagctcatggacctgcctggtggacttggaagggctgaacatgcgccacttgtggagacctggtgtgaaagcgctgctgcggatcatcgaggtggtggaggccaactaccctgagacactgggccgccttctcatcctgcgggcgcccagggtatttcctgtgctctggacgctggttagtccgttcattgatgacaacaccagaaggaagttcctcatttatgcaggaaatgactaccagggtcctggaggcctgctggattacatcgacaaagagattattccagatttcctgagtggggagtgcatgtgcgaagtgccagagggtggactggtccccaaatctctgtaccggactgcagaggagctggagaacgaagacctgaagctctggactgagaccatctaccagtctgcaagcgtcttcaaaggagccccacatgagattctcattcagattgtggatgcctcgtcagtcatcacttgggatttcgacgtgtgcaaaggggacattgtgtttaacatctatcactccaagaggtcgccacaaccacccaaaaaggactccctgggagcccacagcatcacctctccgggtgggaacaatgtgcagctcatagacaaagtctggcagctgggccgcgactacagcatggtggagtcgcctctgatctgcaaagaaggagaaagcgtgcagggttcccatgtgaccaggtggccgggcttctacatcctgcagtggaaattccacagcatgcctgcgtgcgccgccagcagccttccccgggtggacgacgtgcttgcgtccctgcaggtctcttcgcacaagtgtaaagtgatgtactacaccgaggtgatcggctcggaggatttcagaggttccatgacgagcctggagtccagccacagcggcttctcccagctgagtgccgccaccacctcctccagccagtcccactccagctccatgatctccaggtagtgccgcgctgcctgcacctagtgtgcagaggggacggccgcccctcctcggacagccagctgcacccgcccacccagcggcgacattgtacagactcctctcacctctagatagcaaatagctctcagatggtaaacgtagtcgtttgatcccaaaactaccttggcaggtagttttaactctgatcctaacttaactcaatagccatagattttgtatacgttgtgcacaaaatccaaccagagcgcaagggctctcttgaaagaaaagtagtttctgtaccaattaaaggattgacgtggtctcagatattgatgcaaaaaatttttccaacgaa

SEQ ID NO: 179216 - DNA, 548 bp, Homo sapiens
  Payload ID: 15325
  Gene Symbol: SEC14L1
  Gene Name: SEC14-like lipid binding 1
  ENST ID: ENST00000591786
  CDS Start-End: 1-252
atggtgcagaaataccagtccccagtgagggtgtacaaatacccctttgaattaattatggctgcctatgaaaggaggttccctacatgtcctttgattccgatgttcgtgggcagtgacactgtgaatgaattcaagagcgaagatggggctattcatgtcattgaaaggcgctgcaagctggatgtagatgcacccagactgctgaagaaggagttgattatgtttattttgtccagaaaaactcactgaattctcgggaacgtactttgcacattgaggcttataatgaaacgttttccaatcgggtcatcattaatgagcattgctgctacaccgttcaccctgaaaatgaagattggacctgttttgaacagtctgcaagtttagatattaaatctttctttggttttgaaagtacagtggaaaaaattgcaatgaaacaatataccagcaacattaaaaaaggaaaggaaatcatcgaatactaccttcgccaattagaagaagaaggcataacctttgtgccccgttggagtccgccttcc

SEQ ID NO: 179217 - DNA, 388 bp, Homo sapiens
  Payload ID: 15325
  Gene Symbol: SEC14L1
  Gene Name: SEC14-like lipid binding 1
  ENST ID: ENST00000590483
  CDS Start-End: 1-270
gcctatgaaaggaggttccctacatgtcctttgattccgatgttcgtgggcagtgacactgtgaatgaattcaagagcgaagatggggctattcatgtcattgaaaggcgctgcaagctggatgtagatgcacccagactgctgaagaagattgcaggagttgattatgtttattttgtccagaaaaactcactgaattctcgggaacgtactttgcacattgaggcttataatgaaactgctttctctttatctgcaggttcaccctgaaaatgaagattggacctgttttgaacagtctgcaagtttagatattaaatctttctttggttttgaaagtacagtggaaaaaattgcaatgaaacaatataccagcaacattaaaaaa

SEQ ID NO: 179218 - DNA, 1229 bp, Homo sapiens
  Payload ID: 15326
  Gene Symbol: SEC14L2
  Gene Name: SEC14-like lipid binding 2
  Uniprot ID: O76054
  ENST ID: ENST00000402592
  CDS Start-End: 73-1035
gagtctgtgctccatcagctgccgcacccgccgcctcccgcccccaaaccccatccccgcggttgagccacgatgagcggcagagtcggcgatctgagccccaggcagaaggaggcattggccaagtttcgggagaatgtccaggatgtgctgccggccctgccgaatccagatgactattttctcctgcgttggctccgagccagaagcttcgacctgcagaagtcggaggccatgctccggaagttggggaggaaggtggagaccatcaccataatttatgactgcgaggggcttggcctcaagcatctctggaagcctgctgtggaggcctatggagagtttctctgcatgtttgaggaaaattatcccgaaacactgaagcgtctttttgttgttaaagcccccaaactgtttcctgtggcctataacctcatcaaacccttcctgagtgaggacactcgtaagaagatcatggtcctgggagcaaattggaaggaggttttactgaaacatatcagccctgaccaggtgcctgtggagtatgggggcaccatgactgaccctgatggaaaccccaagtgcaaatccaagatcaactacgggggtgacatccccaggaagtattatgtgcgagaccaggtgaaacagcagtatgaacacagcgtgcagatttcccgtggctcctcccaccaagtggagtatgagatcctcttccctggctgtgtcctcaggtggcagtttatgtcagatggagcggatgttggttttgggattttcctgaagaccaagatgggagagaggcagcgggcaggggagatgacagaggtgctgcccaaccagaggtacaactcccacctggtccctgaagatgggaccctcacctgcagtgatcctggcatctatgtcctgcggtttgacaacacctacagcttcattcatgccaagaaggtcaatttcactgtggaggtcctgcttccagacaaagcctcagaagagaagatgaaacagctgggggcaggcaccccgaaataacaccttctcctatagcaggcctggccccctcagtgtctccctgtcaatttctaccccttgtagcagtcattttcgcacaaccctgaagcccaaagaaactgggctggaggacagacctcaggagctttcatttcagttaggcagaggaagagcgactgcagtgggtctccgtgtctatcaaatacctaaggagt

SEQ ID NO: 179219 - DNA, 1733 bp, Homo sapiens
  Payload ID: 15326
  Gene Symbol: SEC14L2
  Gene Name: SEC14-like lipid binding 2
  Uniprot ID: O76054
  ENST ID: ENST00000405717
  CDS Start-End: 81-1259
gcgaggacgagtctgtgctccatcagctgccgcacccgccgcctcccgcccccaaaccccatccccgcggttgagccacgatgagcggcagagtcggcgatctgagccccaggcagaaggaggcattggccaagtttcgggagaatgtccaggatgtgctgccggccctgccgaatccagatgactattttctcctgcgttggctccgagccagaagcttcgacctgcagaagtcggaggccatgctccggaagcatgtggagttccgaaagcaaaaggacattgacaacatcattagctggcagcctccagaggtgatccaacagtatctgtcagggggtatgtgtggctatgacctggatggctgcccagtctggtacgacataattggacctctggatgccaagggtctgctgttctcagcctccaaacaggacctgctgaggaccaagatgcgggagtgtgagctgcttctgcaagagtgtgcccaccagaccacaaagttggggaggaaggtggagaccatcaccataatttatgactgcgaggggcttggcctcaagcatctctggaagcctgctgtggaggcctatggagagtttctctgcatgtttgaggaaaattatcccgaaacactgaagcgtctttttgttgttaaagcccccaaactgtttcctgtggcctataacctcatcaaacccttcctgagtgaggacactcgtaagaagatcatggtcctgggagcaaattggaaggaggttttactgaaacatatcagccctgaccaggtgcctgtggagtatgggggcaccatgactgaccctgatggaaaccccaagtgcaaatccaagatcaactacgggggtgacatccccaggaagtattatgtgcgagaccaggtgaaacagcagtatgaacacagcgtgcagatttcccgtggctcctcccaccaagtggagtatgagatcctcttccctggctgtgtcctcaggtggcagtttatgtcagatggagcggatgttggttttgggattttcctgaagaccaagatgggagagaggcagcgggcaggggagatgacagaggtgctgcccaaccagaggtacaactcccacctggtccctgaagatgggaccctcacctgcagtgatcctggcatctgtaagtatctctgccttggcaatgccttgaagccccatgtccagctttctgcctgtgaggttcctcttcctccatggatttttggctctgagtgttagaactagaagtggaatgccatcagttcaatcctctccttgtatagatgaagaaatctagccttggagacttgtttatggtgacccaactggttaacagcagggtgggactttgatctcatactcctaggtatgggtgagtcacagtcctaggcgatcacaggggttcaacacgtctgctttctggtccaggtctaactgggtctgtgactggacagatatttcttggggatgctccttcccagaggtcacagagacagaactggctgggtgggcatgggatcacaaggtaagcagatgctcaaaagtgcagccttcacccctgagtttcactcatctcccagctgaccaaagaatggacacagactatgagcaggcagtttacacaagaatataagaatgggaaacagacatttgaaaaggtgcttaatctctcttaactttgtaataccattaaaattccccttgactcagcaa

SEQ ID NO: 179220 - DNA, 871 bp, Homo sapiens
  Payload ID: 15326
  Gene Symbol: SEC14L2
  Gene Name: SEC14-like lipid binding 2
  ENST ID: ENST00000428195
  CDS Start-End: 263-871
gctccctactccgcctctcgggatcctttaagaggcggggcttggctgccagctccgcggcccgggcaaaaggctgggactttactccgggtggcggcgaggacgagtctgtgctccatcagctgccgcacccgccgcctcccgcccccaaaccccatccccgcggttgagccacgatgagcggcagagtcggcgatctgagccccaggcagaaggaggcattggccaagccagaagcttcgacctgcagaagtcggaggccatgctccggaagcatgtggagttccgaaagcaaaaggacattgacaacatcattagctggcagcctccagaggtgatccaacagtatctgtcagggggtatgtgtggctatgacctggatggctgcccagtctggtacgacataattggacctctggatgccaagggtctgctgttctcagcctccaaacaggacctgctgaggaccaagatgcgggagtgtgagctgcttctgcaagagtgtgcccaccagaccacaaagttggggaggaaggtggagaccatcaccataatttatgactgcgaggggcttggcctcaagcatctctggaagcctgctgtggaggcctatggagagtttctctgcatgtttgaggaaaattatcccgaaacactgaagcgtctttttgttgttaaagcccccaaactgtttcctgtggcctataacctcatcaaacccttcctgagtgaggacactcgtaagaagatcatggtcctgggagcaaattggaaggaggttttactgaaacatatcagccctgaccaggtgcctgtggagtatgggggcaccatgactgaccctgatggaaaccccaagtgcaaatccaag

SEQ ID NO: 179221 - DNA, 556 bp, Homo sapiens
  Payload ID: 15326
  Gene Symbol: SEC14L2
  Gene Name: SEC14-like lipid binding 2
  ENST ID: ENST00000437022
  CDS Start-End: 100-354
gactttactccgggtggcggcgaggacgagtctgtgctccatcagctgccgcacccgccgcctcccgcccccaaaccccatccccgcggttgagccacgatgagcggcagagtcggcgatctgagccccaggcagaaggaggcattggccaagtttcgggagaatgtccaggatgtgctgccggccctgccgaatccagatgactattttctcctgcgttggctccgagccagaagcttcgacctgcagaagtcggaggccatgctccggaagcatgtggagttccgaaagcaaaaggacattgacaacatcattagctggcagcctccagagcctccaaacaggacctgctgaggaccaagatgcgggagtgtgagctgcttctgcaagagtgtgcccaccagaccacaaagtgcaatcatttggcctggactggaacgggcttctgaagtaggacagcctgacaagacttcctgctctctgttccctgcagttggggaggaaggtggagaccatcaccataatttatgactgcgaggggcttggcctcaagcat

SEQ ID NO: 179222 - DNA, 674 bp, Homo sapiens
  Payload ID: 15326
  Gene Symbol: SEC14L2
  Gene Name: SEC14-like lipid binding 2
  ENST ID: ENST00000452649
  CDS Start-End: 100-261
gactttactccgggtggcggcgaggacgagtctgtgctccatcagctgccgcacccgccgcctcccgcccccaaaccccatccccgcggttgagccacgatgagcggcagagtcggcgatctgagccccaggcagaaggaggcattggccaagccagaagcttcgacctgcagaagtcggaggccatgctccggaagcatgtggagttccgaaagcaaaaggacattgacaacatcattagctggcagcctccagaggtgatccaacagtatctgtcagggggtatgtgtggctatgacctggatggctgcccagtctggtacgacataattggacctctggatgccaagggtctgctgttctcagcctccaaacaggacctgctgaggaccaagatgcgggagtgtgagctgcttctgcaagagtgtgcccaccagaccacaaagtgcaatcatttggcctggactggaacgggcttctgaagtaggacagcctgacaagacttcctgctctctgttccctgcagttggggaggaaggtggagaccatcaccataatttatgactgcgaggggcttggcctcaagcatctctggaagcctgctgtggaggcctatggagagtttctctgcatgtttgaggaaaattatcccgaaacactgaagcgtctttttg

SEQ ID NO: 179223 - DNA, 485 bp, Homo sapiens
  Payload ID: 15326
  Gene Symbol: SEC14L2
  Gene Name: SEC14-like lipid binding 2
  ENST ID: ENST00000415072
  CDS Start-End: 111-485
actacctgcactttcccgcttcctggcttcccctactggaactgttccctccacctgagttgcccacctctctcccccgctgcctttgaagtccttcaagcccagcacaaatgccatgttttataggaagccgtgtgagaccacctctttcttccctctgctccccagcaaactcctcatccttccatggggcagaagaccatggtggaaagagtgtgtgctctggactcagacagacccggtttcgggagaatgtccaggatgtgctgccggccctgccgaatccagatgactattttctcctgcgttggctccgagccagaagcttcgacctgcagaagtcggaggccatgctccggaagcatgtggagttccgaaagcaaaaggacattgacaacatcattagctggcagcctccagaggtgatccaacagtatctgtcagggggtatgtgtggctatgacctggatggctgcccagtctgg

SEQ ID NO: 179224 - DNA, 565 bp, Homo sapiens
  Payload ID: 15326
  Gene Symbol: SEC14L2
  Gene Name: SEC14-like lipid binding 2
  ENST ID: ENST00000429917
  CDS Start-End: 312-565
tttccgggaggctttcttcttgtagggtcagtggcacgatggaaagggctctggatagctccttgggagacttggatagctcctgccccggcaccaagccgctgtgcgaccttgggcaaaaccctgcccttctctttgctcctcgatgccatggaatgaggaggttggaccagatgatgttgaagggaacacctccgtgtgtgaattccaggctccccccatgaggcactgggttggtgttagtttgagctgagaccagccgtcccctatcttgcatcccagacccctgcctggttcaggacttaaggtttatgctcctcagaaggcaagaagccagaagcttcgacctgcagaagtcggaggccatgctccggaagcatgtggagttccgaaagcaaaaggacattgacaacatcattagctggcagcctccagaggtgatccaacagtatctgtcagggggtatgtgtggctatgacctggatggctgcccagtctggtacgacataattggacctctggatgccaagggtctgctgttctcagcctccaaacaggacctgct

SEQ ID NO: 179225 - DNA, 4382 bp, Homo sapiens
  Payload ID: 15326
  Gene Symbol: SEC14L2
  Gene Name: SEC14-like lipid binding 2
  Uniprot ID: O76054
  ENST ID: ENST00000615189
  CDS Start-End: 261-1472
acacttgctcgcctcctgcctgggtctctgacttcaggagggcggagggggcccgtgtcagagccttccgcgccccagcgcatcgctccctactccgcctctcgggatcctttaagaggcggggcttggctgccagctccgcggcccgggcaaaaggctgggactttactccgggtggcggcgaggacgagtctgtgctccatcagctgccgcacccgccgcctcccgcccccaaaccccatccccgcggttgagccacgatgagcggcagagtcggcgatctgagccccaggcagaaggaggcattggccaagtttcgggagaatgtccaggatgtgctgccggccctgccgaatccagatgactattttctcctgcgttggctccgagccagaagcttcgacctgcagaagtcggaggccatgctccggaagcatgtggagttccgaaagcaaaaggacattgacaacatcattagctggcagcctccagaggtgatccaacagtatctgtcagggggtatgtgtggctatgacctggatggctgcccagtctggtacgacataattggacctctggatgccaagggtctgctgttctcagcctccaaacaggacctgctgaggaccaagatgcgggagtgtgagctgcttctgcaagagtgtgcccaccagaccacaaagttggggaggaaggtggagaccatcaccataatttatgactgcgaggggcttggcctcaagcatctctggaagcctgctgtggaggcctatggagagtttctctgcatgtttgaggaaaattatcccgaaacactgaagcgtctttttgttgttaaagcccccaaactgtttcctgtggcctataacctcatcaaacccttcctgagtgaggacactcgtaagaagatcatggtcctgggagcaaattggaaggaggttttactgaaacatatcagccctgaccaggtgcctgtggagtatgggggcaccatgactgaccctgatggaaaccccaagtgcaaatccaagatcaactacgggggtgacatccccaggaagtattatgtgcgagaccaggtgaaacagcagtatgaacacagcgtgcagatttcccgtggctcctcccaccaagtggagtatgagatcctcttccctggctgtgtcctcaggtggcagtttatgtcagatggagcggatgttggttttgggattttcctgaagaccaagatgggagagaggcagcgggcaggggagatgacagaggtgctgcccaaccagaggtacaactcccacctggtccctgaagatgggaccctcacctgcagtgatcctggcatctatgtcctgcggtttgacaacacctacagcttcattcatgccaagaaggtcaatttcactgtggaggtcctgcttccagacaaagcctcagaagagaagatgaaacagctgggggcaggcaccccgaaataacaccttctcctatagcaggcctggccccctcagtgtctccctgtcaatttctaccccttgtagcagtcattttcgcacaaccctgaagcccaaagaaactgggctggaggacagacctcaggagctttcatttcagttaggcagaggaagagcgactgcagtgggtctccgtgtctatcaaatacctaaggagtccccaggagctggctggccatcgtgataggatctgtctgtcctgtaaactgtgccaacttcacctgtccagggacagcgaagctgggggtggcggggggcatgtaccacagggtggcagcagggaaaaaaattagaaaagggtgaaagattgggacttaacacttcagggaagtcagctgccggggagaaacttgctcctaaatgaacacataagtttagatcgcaatgaggagtagcagggtagctggttgctagagttacggtggggatcagaaactcttccaaacattttagcactgaggctggggtagcttttggcttttcccaggtctcaggaggtggcctgagtcagcacacatcttcccactcggtagacaggctggcctctccctcactttgagactttggcaactcctgggccacacggcctgcctctttgattactaatgattgtcagtgactcagagcttcctgggacttcgggtacccacccgctgttctccatgcaaacaaagcgccagggaaatgacccacagggatcgcagctgcagggagggccagggaggttgggggtgggagtgaatgctaaaagcagatcgtccagtgcccttttcagtgctaccggcctctcaccaagcagtcctccatgtgagcaaccccgagacaaaaatgctaagtgggatcaagagagcagcactcggagagggtgtttgccagtctgagtgtcccgcggtgcccgccaacccgcttcctgactgacctgagcaaggtcttactaagcagtcccatctctgtgggaggcatgcaacgcgtgcagggagttcaggtgccggtcggcgtagccaggcctggaggccccccaggcaggaggccgcccaaaggcggggccggcgtctcgcagactaggggctgggggcggccacagacggcctcgaaaccacagcccttaccccaatcccacgagccccgccaacgaaccacaggtgctgggctttagagaacatgggaaggcggccccagacctggcgggaacgcctttccctcagagccaggccccggccccgtctgggaagctcatcttgcgaagctgagggagctcagggcaaaggccaggctagcgcggaccggaaggggccgaggctgcacgggcctctgccagaacgctcaggacatcccggcctgggtttacaacgctgttaggaaaattaaccaatgaataaagcaacgttcagtgcgcagggagtgaaattcaatgcccaccgctaggctcctcgctgcctctcactcaagaggcccaaactcagacggcgtcagggacccggacccagcagccgtttcacgccaatagatagggcgcatgcgcagaaatcctcctcggctctctagcgtgagctttcccaaggggccacgcccagcttgccttctgattggtccagctggtgggttgtcttccgccatctttgatcagggcactaaggatgctccccacggccttcacagtgacggcggagaccctgccccgccagctgctcagtacgtgccgcgtagcccgtgcgagccaagtgtgagtccgggcgagcgcctgcggagctagcactgggcccagaatgagagggaggcggaggagcagcgatcacgtggttttagggactgtctaataattccacgccagcattgccggtgtttcagggggtgggaaccgctgcgttccccatcaacttttctcccacccaccaccctccccaacctacaagcccagctcagcttgaggtaactgctgaccggactgtcctatacagccctacaagacagaggcgcctagggctgaaagcgggggcctccgtagggagccagcgggggcctcaatagttactcattttctctacctttgatgaaaataagagctaattcttaataaggcctaccgggtatcacgcaaaaaccctgtgcttactattacactttgggttgttgcaaagattaaaggaaataagccgtgcaaagcgcttaagagcttggtataagtaagtgctcgtcaatgttggctactctcattttttttgcagacgtgggaactggggctcagggaggctaacagccagtaggcggcacagctaggatttgaacccaggattgtctccaacgccgctcaattatacccgccaaggagtcacagagacttagtgaagtgcacacattgctcacctgggtgaactgaggtccagcgggggaaggcttcctcctgttgtaatcactaaccccaactctgtctcccttgcccgattcattcattcgttaattaattcatccaacatcctgtccccaagaagctcagtctggggacatactgatccagttaaatgcgagtgcttcctagttatacatggcgactgctgagaagggactccagagtccaggcacctacctcccaggggctcaccgttcactcctctagcctcatttagagctcgcattaagagcacgggatctggatccacactgtttggattcaaatcacaacttcaccacttagcagctgtgtgttctgggaaaatgacccaccttctctgtgcctccattttctcacctgtaaaacgggctcccaggctggtgggagggtttcaggtgtaagacatggagagtcctttagcgaacatgtagactggcaataaactcaataaatggtgactgttataattaatcctcggaaccatc

SEQ ID NO: 179226 - DNA, 2632 bp, Homo sapiens
  Payload ID: 15326
  Gene Symbol: SEC14L2
  Gene Name: SEC14-like lipid binding 2
  ENST ID: ENST00000617837
  CDS Start-End: 212-1201
gctccgcggcccgggcaaaaggctgggactttactccgggtggcggcgaggacgagtctgtgctccatcagctgccgcacccgccgcctcccgcccccaaaccccatccccgcggttgagccacgatgagcggcagagtcggcgatctgagccccaggcagaaggaggcattggccaagccagaagcttcgacctgcagaagtcggaggccatgctccggaaggtgatccaacagtatctgtcagggggtatgtgtggctatgacctggatggctgcccagtctggtacgacataattggacctctggatgccaagggtctgctgttctcagcctccaaacaggacctgctgaggaccaagatgcgggagtgtgagctgcttctgcaagagtgtgcccaccagaccacaaagttggggaggaaggtggagaccatcaccataatttatgactgcgaggggcttggcctcaagcatctctggaagcctgctgtggaggcctatggagagtttctctgcatgtttgaggaaaattatcccgaaacactgaagcgtctttttgttgttaaagcccccaaactgtttcctgtggcctataacctcatcaaacccttcctgagtgaggacactcgtaagaagatcatggtcctgggagcaaattggaaggaggttttactgaaacatatcagccctgaccaggtgcctgtggagtatgggggcaccatgactgaccctgatggaaaccccaagtgcaaatccaagatcaactacgggggtgacatccccaggaagtattatgtgcgagaccaggtgaaacagcagtatgaacacagcgtgcagatttcccgtggctcctcccaccaagtggagtatgagatcctcttccctggctgtgtcctcaggtggcagtttatgtcagatggagcggatgttggttttgggattttcctgaagaccaagatgggagagaggcagcgggcaggggagatgacagaggtgctgcccaaccagaggtacaactcccacctggtccctgaagatgggaccctcacctgcagtgatcctggcatctatgtcctgcggtttgacaacacctacagcttcattcatgccaagaaggtcaatttcactgtggaggtcctgcttccagacaaagcctcagaagagaagatgaaacagctgggggcaggcaccccgaaataacaccttctcctatagcaggcctggccccctcagtgtctccctgtcaatttctaccccttgtagcagtcattttcgcacaaccctgaagcccaaagaaactgggctggaggacagacctcaggagctttcatttcagttaggcagaggaagagcgactgcagtgggtctccgtgtctatcaaatacctaaggagtccccaggagctggctggccatcgtgataggatctgtctgtcctgtaaactgtgccaacttcacctgtccagggacagcgaagctgggggtggcggggggcatgtaccacagggtggcagcagggaaaaaaattagaaaagggtgaaagattgggacttaacacttcagggaagtcagctgccggggagaaacttgctcctaaatgaacacataagtttagatcgcaatgaggagtagcagggtagctggttgctagagttacggtggggatcagaaactcttccaaacattttagcactgaggctggggtagcttttggcttttcccaggtctcaggaggtggcctgagtcagcacacatcttcccactcggtagacaggctggcctctccctcactttgagactttggcaactcctgggccacacggcctgcctctttgattactaatgattgtcagtgactcagagcttcctgggacttcgggtacccacccgctgttctccatgcaaacaaagcgccagggaaatgacccacagggatcgcagctgcagggagggccagggaggttgggggtgggagtgaatgctaaaagcagatcgtccagtgcccttttcagtgctaccggcctctcaccaagcagtcctccatgtgagcaaccccgagacaaaaatgctaagtgggatcaagagagcagcactcggagagggtgtttgccagtctgagtgtcccgcggtgcccgccaacccgcttcctgactgacctgagcaaggtcttactaagcagtcccatctctgtgggaggcatgcaacgcgtgcagggagttcaggtgccggtcggcgtagccaggcctggaggccccccaggcaggaggccgcccaaaggcggggccggcgtctcgcagactaggggctgggggcggccacagacggcctcgaaaccacagcccttaccccaatcccacgagccccgccaacgaaccacaggtgctgggctttagagaacatgggaaggcggccccagacctggcgggaacgcctttccctcagagccaggccccggccccgtctgggaagctcatcttgcgaagctgagggagctcagggcaaaggccaggctagcgcggaccggaaggggccgaggctgcacgggcctctgccagaacgctcaggacatcccggcctgggtttacaacgctgttaggaaaattaaccaatgaataaagcaacgttcagtgcg

SEQ ID NO: 179227 - DNA, 2086 bp, Homo sapiens
  Payload ID: 15327
  Gene Symbol: SEC14L3
  Gene Name: SEC14-like lipid binding 3
  Uniprot ID: Q9UDX4
  ENST ID: ENST00000215812
  CDS Start-End: 92-1294
gggcaaaaggacccagctgggtcagggctgacaaactaggcttggcctcttgcctatagtggccaccactcctcaagccccagccagcaccatgagcggccgagttggagacctgagccccaaacaggcagagaccctggccaagttccgagaaaacgtccaggatgtgcttcctgccctgcccaaccctgatgattatttccttctacgctggctccgagctcggaattttgacttgcagaagtcggaggctttgctccgcaagtacatggagttccggaagaccatggatattgaccatatccttgattggcagcccccagaggtgatccagaagtacatgcctgggggcctgtgtggctatgaccgtgatggctgccccgtgtggtatgacatcattgggccacttgatcccaaggggttgctcttctcagtcaccaagcaggacctgctcaagaccaagatgagggactgtgagcgcatcctgcatgagtgtgacctgcagacagagaggctagggaagaagattgagaccatcgtgatgatatttgactgtgagggcctgggactgaaacacttctggaaacctctggtagaagtgtaccaggagttctttggcctccttgaagagaattacccagagaccctgaagttcatgctcatcgtgaaagctaccaaactgttccctgtgggctacaacctcatgaagccattcctgagtgaggacactcgcaggaaaattattgtgttgggaaataactggaaggaaggtttgctgaaactcatcagtcctgaggaactgcctgcccagtttgggggcaccctgactgacccagatgggaaccccaaatgtttaaccaagattaactatggcggggagatccccaagtccatgtacgtgcgggaccaggtgaagactcagtacgagcactcggtgcagatcaaccgcggctcatcacaccaagtggaatacgagatcctatttccaggctgcgttctcaggtggcagttctcatctgatggtgcggacatcggcttcggagttttcctgaagaccaagatgggggagcgacagcgggcaggggagatgacagatgttctacccagccagcgctataacgcccacatggtgcccgaggatgggaacctcacctgctcagaggccggcgtctatgtcctacgcttcgacaacacctatagctttgtccacgccaagaaggtcagcttcacagtggaggtcctgctccctgacgagggcatgcagaaatatgataaggagctcacccctgtctaggtggctccctcatttctcagagacctcctaaccctttgatttctctgtttatatcctacactccctccctccctgaaattgattgttagtcctcctgactctgtgacgttagtgagtacagaaagagatgccctggggaaaactcatctactgtggtcagatcaagaaaggtatgagaggcacaaccttggagggtaccaaggttgcagaagaggaaaaagcaagggtaaaggcaagaagtgggtgtcatgaaactcaataaatagcaaaatgaatcccctagcctttgtcctcacctaccctaaggcaggtgtgtatgcttgaattccttccgtatggctgtgagcaacttgggttggagacatatctaaatcctttttacttccactccctatatatagtagatgctcagtgtatatttgtggcattgaatggaggaccagaaggtagggtgcaggtgactcaacagctgtacatgattaggaggagcctatgtggggtggatttcagcaccttggacaggagcagatgtgtggtggggttggactctcttctggagacccagacaattcagtctccagatttctggcagtggctgtcttttgagggccccagccacaaaggccacatgcctctgataggagctgcctacatcaggctttgtctgacttgcacgctcagcttcccaccctaacccacttcccttgttgcacatagcttatgttttagggactttcctggaagcaaaggcagtcacatctggcataatcataataaagaaaacaactatca

SEQ ID NO: 179228 - DNA, 1794 bp, Homo sapiens
  Payload ID: 15327
  Gene Symbol: SEC14L3
  Gene Name: SEC14-like lipid binding 3
  Uniprot ID: Q9UDX4
  ENST ID: ENST00000401751
  CDS Start-End: 254-1279
caccactcctcaagccccagccagcaccatgagcggccgagttggagacctgagccccaaacaggcagagaccctggccaaggttcaagcaattctcctgcctcagcctcctgagtagctgggattacagttccgagaaaacgtccaggatgtgcttcctgccctgcccaaccctgatgattatttccttctacgctggctccgagctcggaattttgacttgcagaagtcggaggctttgctccgcaagtacatggagttccggaagaccatggatattgaccatatccttgattggcagcccccagaggtgatccagaagtacatgcctgggggcctgtgtggctatgaccgtgatggctgccccgtgtggtatgacatcattgggccacttgatcccaaggggttgctcttctcagtcaccaagcaggacctgctcaagaccaagatgagggactgtgagcgcatcctgcatgagtgtgacctgcagacagagaggctagggaagaagattgagaccatcgtgatgatatttgactgtgagggcctgggactgaaacacttctggaaacctctggtagaagtgtaccaggagttctttggcctccttgaagagaattacccagagaccctgaagttcatgctcatcgtgaaagctaccaaactgttccctgtgggctacaacctcatgaagccattcctgagtgaggacactcgcaggaaaattattgtgttgggaaataactggaaggaaggtttgctgaaactcatcagtcctgaggaactgcctgcccagtttgggggcaccctgactgacccagatgggaaccccaaatgtttaaccaagattaactatggcggggagatccccaagtccatgtacgtgcgggaccaggtgaagactcagtacgagcactcggtgcagatcaaccgcggctcatcacaccaagtggaatacgagatcctatttccaggctgcgttctcaggtggcagttctcatctgatggtgcggacatcggcttcggagttttcctgaagaccaagatgggggagcgacagcgggcaggggagatgacagatgttctacccagccagcgctataacgcccacatggtgcccgaggatgggaacctcacctgctcagaggccggcgtctatgtcctacgcttcgacaacacctatagctttgtccacgccaagaaggtcagcttcacagtggaggtcctgctccctgacgagggcatgcagaaatatgataaggagctcacccctgtctaggtggctccctcatttctcagagacctcctaaccctttgatttctctgtttatatcctacactccctccctccctgaaattgattgttagtcctcctgactctgtgacgttagtgagtacagaaagagatgccctggggaaaactcatctactgtggtcagatcaagaaaggtatgagaggcacaaccttggagggtaccaaggttgcagaagaggaaaaagcaagggtaaaggcaagaagtgggtgtcatgaaactcaataaatagcaaaatgaatcccctagcctttgtcctcacctaccctaaggcaggtgtgtatgcttgaattccttccgtatggctgtgagcaacttgggttggagacatatctaaatcctttttacttccactccctatatatagtagatgctcagtgtatatttgtggcattgaatggaggaccagaaggtagggtgcaggtgactcaacagctgtacatgattaggaggagcctatgtggggtggatttcagcacct

SEQ ID NO: 179229 - DNA, 1964 bp, Homo sapiens
  Payload ID: 15327
  Gene Symbol: SEC14L3
  Gene Name: SEC14-like lipid binding 3
  Uniprot ID: Q9UDX4
  ENST ID: ENST00000402286
  CDS Start-End: 478-1449
caccactcctcaagccccagccagcaccatgagcggccgagttggagacctgagccccaaacaggcagagaccctggccaaggttcaagcaattctcctgcctcagcctcctgagtagctgggattacagttccgagaaaacgtccaggatgtgcttcctgccctgcccaaccctgatgattatttccttctacgctggctccgagctcggaattttgacttgcagaagtcggaggctttgctccgcaagtacatggagttccggaagaccatggatattgaccatatccttgattggcagcccccagagaaagggacacgggagacatcaggggcagacctaagaagtccaagggcctgctgagacctggctttgccatttaccctctgtgagcaaggccctcccctgcaggacctcagctttctcacctgagacaatagcactgtcttccagggagggacagtgctttttataccatggtgatccagaagtacatgcctgggggcctgtgtggctatgaccgtgatggctgccccgtgtggtatgacatcattgggccacttgatcccaaggggttgctcttctcagtcaccaagcaggacctgctcaagaccaagatgagggactgtgagcgcatcctgcatgagtgtgacctgcagacagagaggctagggaagaagattgagaccatcgtgatgatatttgactgtgagggcctgggactgaaacacttctggaaacctctggtagaagtgtaccaggagttctttggcctccttgaagagaattacccagagaccctgaagttcatgctcatcgtgaaagctaccaaactgttccctgtgggctacaacctcatgaagccattcctgagtgaggacactcgcaggaaaattattgtgttgggaaataactggaaggaaggtttgctgaaactcatcagtcctgaggaactgcctgcccagtttgggggcaccctgactgacccagatgggaaccccaaatgtttaaccaagattaactatggcggggagatccccaagtccatgtacgtgcgggaccaggtgaagactcagtacgagcactcggtgcagatcaaccgcggctcatcacaccaagtggaatacgagatcctatttccaggctgcgttctcaggtggcagttctcatctgatggtgcggacatcggcttcggagttttcctgaagaccaagatgggggagcgacagcgggcaggggagatgacagatgttctacccagccagcgctataacgcccacatggtgcccgaggatgggaacctcacctgctcagaggccggcgtctatgtcctacgcttcgacaacacctatagctttgtccacgccaagaaggtcagcttcacagtggaggtcctgctccctgacgagggcatgcagaaatatgataaggagctcacccctgtctaggtggctccctcatttctcagagacctcctaaccctttgatttctctgtttatatcctacactccctccctccctgaaattgattgttagtcctcctgactctgtgacgttagtgagtacagaaagagatgccctggggaaaactcatctactgtggtcagatcaagaaaggtatgagaggcacaaccttggagggtaccaaggttgcagaagaggaaaaagcaagggtaaaggcaagaagtgggtgtcatgaaactcaataaatagcaaaatgaatcccctagcctttgtcctcacctaccctaaggcaggtgtgtatgcttgaattccttccgtatggctgtgagcaacttgggttggagacatatctaaatcctttttacttccactccctatatatagtagatgctcagtgtatatttgtggcattgaatggaggaccagaaggtagggtgcaggtgactcaacagctgtacatgattaggaggagcctatgtggggtggatttcagcacct

SEQ ID NO: 179230 - DNA, 2474 bp, Homo sapiens
  Payload ID: 15327
  Gene Symbol: SEC14L3
  Gene Name: SEC14-like lipid binding 3
  ENST ID: ENST00000403066
  CDS Start-End: 285-1346
aaactaggcttggcctcttgcctatagtggccaccactcctcaagccccagccagcaccatgagcggccgagttggagacctgagccccaaacaggcagagaccctggccaaggttcaagcaattctcctgcctcagcctcctgagtagctgggattacagttccgagaaaacgtccaggatgtgcttcctgccctgcccaaccctgatgattatttccttctacgctggctccgagctcggaattttgacttgcagaagtcggaggctttgctccgcaagtacatggagttccggaagaccatggatattgaccatatccttgattggcagcccccagaggtgatccagaagtacatgcctgggggcctgtgtggctatgaccgtgatggctgccccgtgtggtatgacatcattgggccacttgatcccaaggggttgctcttctcagtcaccaagcaggacctgctcaagaccaagatgagggactgtgagcgcatcctgcatgagtgtgacctgcagacagagaggctagggaagaagattgagaccatcgtgatgatatttgactgtgagggcctgggactgaaacacttctggaaacctctggtagaagtgtaccaggagttctttggcctccttgaagagaattacccagagaccctgaagttcatgctcatcgtgaaagctaccaaactgttccctgtgggctacaacctcatgaagccattcctgagtgaggacactcgcaggaaaattattgtgttgggaaataactggaaggaaggtttgctgaaactcatcagtcctgaggaactgcctgcccagtttgggggcaccctgactgacccagatgggaaccccaaatgtttaaccaagattaactatggcggggagatccccaagtccatgtacgtgcgggaccaggtgaagactcagtacgagcactcggtgcagatcaaccgcggctcatcacaccaagtggaatacgagatcctatttccaggctgcgttctcaggtggcagttctcatctgatggtgcggacatcggcttcggagttttcctgaagaccaagatgggggagcgacagcgggcaggggagatgacagatgttctacccagccagcgctataacgcccacatggtgcccgaggatgggaacctcacctgctcagaggccggcgtctatgtggaaagtgagtctgggaagtcttgctgtcatctgcccgtgattatatgcagccatgagctacagaactcacactcaaactcgcaagtgatggcataccaaatggtacgaaaatgcaagctaagtaggcctttacccctccctgccagtaactaatttttgtctgtgtgagtaactggcctgtgtgtaagaggactcaccccctacgtggtctccagttaattctttttcccatttgggctcctgaccgccttgccatgctgcttctaagaggggttatctatactcagagggcctagggcagaccaaggaagggaaagaagttttggaggtttgtttgtttgttttttagagacagggctttgctttgtggcccaggctggagtgcagtggtgcgatcatagctcactgcaaccttgagctcttgggctcaagtgattctcccctctcagcctcctgagtggctgagaccacaggtacacatcaccatgcctgggttttttttctttctttctttctttcttttttttttttggtagagatgaggtattgttacattgcccaggctggtctcaaattcctgacctcaagcaatcctcctaccttggcctcccagtgctaggattacatgtgtgagccaccactcctggtctgggctttttttttttttttttttaggagaatgtaaggcatttgtttagtgtttactgagcatctactgcatgccaagctctgctcaggaggccaagagagcaggataggagtgagccctgcacctggggtttggcctggctggggagccctagcctcaggaagcaggactgccctggaccccaggaggcccctgctcaacctgcgacaagactgaaaggctccccagatgcactgtgacggtcaagggagagaaatgggtgacctgggatcctggtggcttcagatctcattgggggaaggagcaagggaccccaggggtcagaggcattgggggggtagggctgtcagagggcacccagcagagtgactcacaggctatgaggaaagaagtctcctcttgcttgtatcttcaggatgccaagacctgcagcccaggcctggggtggtggttatcccggagcggccttaccaggtgcacagctggccaagggaggcttggtcatgggcagagagggcaggaggaaggcccttgctccaccaccccctctcccaagggagtcctatgcccagaacttaccaagtagcaagactagagcaaccagcagaagacccttgggggcagccatcatg

SEQ ID NO: 179231 - DNA, 693 bp, Homo sapiens
  Payload ID: 15327
  Gene Symbol: SEC14L3
  Gene Name: SEC14-like lipid binding 3
  ENST ID: ENST00000435069
  CDS Start-End: 1-693
agaaaacgtccaggatgtgcttcctgccctgcccaaccctgatgattatttccttctacgctggctccgagtacatggagttccggaagaccatggatattgaccatatccttgattggcagcccccagaggtgatccagaagtacatgcctgggggcctgtgtggctatgaccgtgatggctgccccgtgtggtatgacatcattgggccacttgatcccaaggggttgctcttctcagtcaccaagcaggacctgctcaagaccaagatgagggactgtgagcgcatcctgcatgagtgtgacctgcagacagagaggctagggaagaagattgagaccatcgtgatgatatttgactgtgagggcctgggactgaaacacttctggaaacctctggtagaagtgtaccaggagttctttggcctccttgaagagaattacccagagaccctgaagttcatgctcatcgtgaaagctaccaaactgttccctgtgggctacaacctcatgaagccattcctgagtgaggacactcgcaggaaaattattgtgttgggaaataactggaaggaaggtttgctgaaactcatcagtcctgaggaactgcctgcccagtttgggggcaccctgactgacccagatgggaaccccaaatgtttaaccaagattaactatggcggggagatcccca

SEQ ID NO: 179232 - DNA, 1864 bp, Homo sapiens
  Payload ID: 15327
  Gene Symbol: SEC14L3
  Gene Name: SEC14-like lipid binding 3
  ENST ID: ENST00000434642
  CDS Start-End: 29-184
caccactcctcaagccccagccagcaccatgagcggccgagttggagacctgagccccaaacaggcagagaccctggccaagatggagtctctgtcatccaggctggagtgctgtggagcgatctcagctcactgcagcctctgtctcccaggttcaagcaattctcctgcctcagcctcctgagtagctgggattacagttccgagaaaacgtccaggatgtgcttcctgccctgcccaaccctgatgattatttccttctacgctggctccgagctcggaattttgacttgcagaagtcggaggctttgctccgcaagtacatggagttccggaagaccatggatattgaccatatccttgattggcagcccccagaggtgatccagaagtacatgcctgggggcctgtgtggctatgaccgtgatggctgccccgtgtggtatgacatcattgggccacttgatcccaaggggttgctcttctcagtcaccaagcaggacctgctcaagaccaagatgagggactgtgagcgcatcctgcatgagtgtgacctgcagacagagaggctagggaagaagattgagaccatcgtgatgatatttgactgtgagggcctgggactgaaacacttctggaaacctctggtagaagtgtaccaggagttctttggcctccttgaagagaattacccagagaccctgaagttcatgctcatcgtgaaagctaccaaactgttccctgtgggctacaacctcatgaagccattcctgagtgaggacactcgcaggaaaattattgtgttgggaaataactggaaggaaggtttgctgaaactcatcagtcctgaggaactgcctgcccagtttgggggcaccctgactgacccagatgggaaccccaaatgtttaaccaagattaactatggcggggagatccccaagtccatgtacgtgcgggaccaggtgaagactcagtacgagcactcggtgcagatcaaccgcggctcatcacaccaagtggaatacgagatcctatttccaggctgcgttctcaggtggcagttctcatctgatggtgcggacatcggcttcggagttttcctgaagaccaagatgggggagcgacagcgggcaggggagatgacagatgttctacccagccagcgctataacgcccacatggtgcccgaggatgggaacctcacctgctcagaggccggcgtctatgtcctacgcttcgacaacacctatagctttgtccacgccaagaaggtcagcttcacagtggaggtcctgctccctgacgagggcatgcagaaatatgataaggagctcacccctgtctaggtggctccctcatttctcagagacctcctaaccctttgatttctctgtttatatcctacactccctccctccctgaaattgattgttagtcctcctgactctgtgacgttagtgagtacagaaagagatgccctggggaaaactcatctactgtggtcagatcaagaaaggtatgagaggcacaaccttggagggtaccaaggttgcagaagaggaaaaagcaagggtaaaggcaagaagtgggtgtcatgaaactcaataaatagcaaaatgaatcccctagcctttgtcctcacctaccctaaggcaggtgtgtatgcttgaattccttccgtatggctgtgagcaacttgggttggagacatatctaaatcctttttacttccactccctatatatagtagatgctcagtgtatatttgtggcattgaatggaggaccagaaggtagggtgcaggtgactcaacagctgtacatgattaggaggagcctatgtggggtggatttcagcacct

SEQ ID NO: 179233 - DNA, 2113 bp, Homo sapiens
  Payload ID: 15327
  Gene Symbol: SEC14L3
  Gene Name: SEC14-like lipid binding 3
  Uniprot ID: Q9UDX4
  ENST ID: ENST00000540910
  CDS Start-End: 351-1322
cagttccgagaaaacgtccaggatgtgcttcctgccctgcccaaccctgatgattatttccttctacgctggctccgagctcggaattttgacttgcagaagtcggaggctttgctccgcaagtacatggagttccggaagaccatggatattgaccatatccttgattggcagcccccagagaaagggacacgggagacatcaggggcagacctaagaagtccaagggcctgctgagacctggctttgccatttaccctctgtgagcaaggccctcccctgcaggacctcagctttctcacctgagacaatagcactgtcttccagggagggacagtgctttttataccatggtgatccagaagtacatgcctgggggcctgtgtggctatgaccgtgatggctgccccgtgtggtatgacatcattgggccacttgatcccaaggggttgctcttctcagtcaccaagcaggacctgctcaagaccaagatgagggactgtgagcgcatcctgcatgagtgtgacctgcagacagagaggctagggaagaagattgagaccatcgtgatgatatttgactgtgagggcctgggactgaaacacttctggaaacctctggtagaagtgtaccaggagttctttggcctccttgaagagaattacccagagaccctgaagttcatgctcatcgtgaaagctaccaaactgttccctgtgggctacaacctcatgaagccattcctgagtgaggacactcgcaggaaaattattgtgttgggaaataactggaaggaaggtttgctgaaactcatcagtcctgaggaactgcctgcccagtttgggggcaccctgactgacccagatgggaaccccaaatgtttaaccaagattaactatggcggggagatccccaagtccatgtacgtgcgggaccaggtgaagactcagtacgagcactcggtgcagatcaaccgcggctcatcacaccaagtggaatacgagatcctatttccaggctgcgttctcaggtggcagttctcatctgatggtgcggacatcggcttcggagttttcctgaagaccaagatgggggagcgacagcgggcaggggagatgacagatgttctacccagccagcgctataacgcccacatggtgcccgaggatgggaacctcacctgctcagaggccggcgtctatgtcctacgcttcgacaacacctatagctttgtccacgccaagaaggtcagcttcacagtggaggtcctgctccctgacgagggcatgcagaaatatgataaggagctcacccctgtctaggtggctccctcatttctcagagacctcctaaccctttgatttctctgtttatatcctacactccctccctccctgaaattgattgttagtcctcctgactctgtgacgttagtgagtacagaaagagatgccctggggaaaactcatctactgtggtcagatcaagaaaggtatgagaggcacaaccttggagggtaccaaggttgcagaagaggaaaaagcaagggtaaaggcaagaagtgggtgtcatgaaactcaataaatagcaaaatgaatcccctagcctttgtcctcacctaccctaaggcaggtgtgtatgcttgaattccttccgtatggctgtgagcaacttgggttggagacatatctaaatcctttttacttccactccctatatatagtagatgctcagtgtatatttgtggcattgaatggaggaccagaaggtagggtgcaggtgactcaacagctgtacatgattaggaggagcctatgtggggtggatttcagcaccttggacaggagcagatgtgtggtggggttggactctcttctggagacccagacaattcagtctccagatttctggcagtggctgtcttttgagggccccagccacaaaggccacatgcctctgataggagctgcctacatcaggctttgtctgacttgcacgctcagcttcccaccctaacccacttcccttgttgcacatagcttatgttttagggactttcctggaagcaaaggcagtcacatctggcataatcataataaagaaaacaactatc

SEQ ID NO: 179234 - DNA, 2499 bp, Homo sapiens
  Payload ID: 15328
  Gene Symbol: SEC14L4
  Gene Name: SEC14-like lipid binding 4
  Uniprot ID: Q9UDX3
  ENST ID: ENST00000255858
  CDS Start-End: 85-1305
acaaccaggcggcagcggatacaaggccaggcggcggcgggcgggcggacctgcgccctgagcctttctgcgcccgcgggcaccatgagcagccgagtcggggacctgagcccccagcagcaggaagcgctggccaggttccgggagaacctccaggacctgctgcccatactgcccaatgctgatgactacttcctcctgcgctggctgcgagctcgaaactttgacctgcagaaatccgaagacatgctccgaaggcacatggagttccggaagcaacaagacctggacaacattgtcacatggcagccccctgaggtcatccagctgtatgactcgggtggtctttgtggctacgactacgaaggctgccctgtgtacttcaacatcattgggtccctcgaccccaagggtctcctgctgtcagcctccaagcaggatatgatccggaagcgcatcaaagtctgtgagctgctgttgcatgagtgtgagctgcaaactcagaagctgggcaggaagatcgagatggcgctgatggtgtttgacatggaggggctgagcctgaaacacctgtggaagccagctgtggaggtctaccagcagttttttagcatcctggaagcaaattatcctgagaccctgaagaatttaattgttattcgagccccaaaactgttccccgtggccttcaacttggtcaagtcgttcatgagtgaggagacacgcaggaagattgtgattctgggagacaactggaagcaggagctgacaaaattcatcagccccgaccagctgcctgtggagtttggggggaccatgactgaccccgatggcaaccccaagtgcctgaccaagatcaactatgggggtgaggtgcccaagagctactacctgtgcgagcaggtgaggctgcagtatgagcacacgaggtccgtgggccgcggctcctccctgcaggtggagaacgagatcctgttcccgggctgtgtgctcaggtggcagtttgcttcagatggtggggacatcggctttggggttttcctgaagaccaagatgggggagcagcagagtgctagggagatgacggaggtgctgcccagccagcgctacaatgcccacatggtgcctgaggatgggagcctcacctgcctccaggctggcgtctatgtcctgcgcttcgacaacacctacagccggatgcatgccaagaagctcagctacactgtggaggtgctgcttcccgacaaggcctctgaggagacgctgcagagtctcaaggcgatgagaccctccccaacacagtgaagaccccagccacctctacctgtgcactccaaccccttcacacccacccctctgacccctgccttcccaggcagggtggtgctggaggtggctgcagagagccacttgtcccacgtcaccatttcatctcattgtaggctcacctggcacagtggccaagcaggaaggggccaccagtgcatagcccatgctgaagattcagacaggaacctctttccctgttcccagagaatgcggctgagaatgagaacgctgaagatgatccagtccactgaggatgggtcctgcttgcagaagctgccctttcacccatcttgacaagatccagccacccaggactcacccatgcctggtgttccagcttcagggggtgtgcgtggttcctaggtcctgtggacatcacagcttcaggcctgaagagcagagaagccctgttctctgcatgtaggaggtcagcaggggtgggcaggcccagctggaggcagctgggtgagggtcctggttccagcagagcactggggcccatccaagtttgttctgccaccactggatggaaaattggaaatggactgggcgtggtggctcacgcctataatcccagcagtttgggaggctgagttgggcagatcacctgagatcaggagttcgggaccagcctgggcaacatggtgaaaccctgtctctactaaaaatacaaaaattagccgggcatggtggcgtgcacctgtaatcccagctactcaggaggctgaggcaggagaatcgcttgtacccaggaggcggaggttgtagtgagctgagatcgtgccactgcactccagcctgggcaacagagccagactccgtctctaaacaaacaaacaaacaaacaaacaaataaagaaagaacattggacatggagaggtggggcctggcatgggtaaccatcagaggaaaaagccatgctcagccttccagttgagtgggtaacgactgagtctccagggaattcccagtgacctcccctccacacctgctgtgatcctgccaacatttagctttggttctcttggcagctgcaccattcatgggtgcatatacgtagagtctgaacaggtgctctgctgctagaaacagcaaaccatctagattaaactcctaaagccagtgccacgaggcattcctgttccaactgggtgtttgagcagattggc

SEQ ID NO: 179235 - DNA, 2575 bp, Homo sapiens
  Payload ID: 15328
  Gene Symbol: SEC14L4
  Gene Name: SEC14-like lipid binding 4
  ENST ID: ENST00000320982
  CDS Start-End: 101-217
atctggcccaggaggcacaaccaggcggcagcggatacaaggccaggcggcggcgggcgggcggacctgcgccctgagcctttctgcgcccgcgggcaccatgagcagccgagtcggggacctgagcccccagcagcaggaagcgctggccaggatcctcctccgctcagttccgggagaacctccaggacctgctgcccatactgcccaatgctgatgactacttcctcctgcgctggctgcgagctcgaaactttgacctgcagaaatccgaagacatgctccgaaggcacatggagttccggaagcaacaagacctggacaacattgtcacatggcagccccctgaggtcatccagctgtatgactcgggtggtctttgtggctacgactacgaaggctgccctgtgtacttcaacatcattgggtccctcgaccccaagggtctcctgctgtcagcctccaagcaggatatgatccggaagcgcatcaaagtctgtgagctgctgttgcatgagtgtgagctgcaaactcagaagctgggcaggaagatcgagatggcgctgatggtgtttgacatggaggggctgagcctgaaacacctgtggaagccagctgtggaggtctaccagcagttttttagcatcctggaagcaaattatcctgagaccctgaagaatttaattgttattcgagccccaaaactgttccccgtggccttcaacttggtcaagtcgttcatgagtgaggagacacgcaggaagattgtgattctgggagacaactggaagcaggagctgacaaaattcatcagccccgaccagctgcctgtggagtttggggggaccatgactgaccccgatggcaaccccaagtgcctgaccaagatcaactatgggggtgaggtgcccaagagctactacctgtgcgagcaggtgaggctgcagtatgagcacacgaggtccgtgggccgcggctcctccctgcaggtggagaacgagatcctgttcccgggctgtgtgctcaggtggcagtttgcttcagatggtggggacatcggctttggggttttcctgaagaccaagatgggggagcagcagagtgctagggagatgacggaggtgctgcccagccagcgctacaatgcccacatggtgcctgaggatgggagcctcacctgcctccaggctggcgtctatgtgcggggtttgtgctccctgatcacctctccatcactgcagatgtcctgcgcttcgacaacacctacagccggatgcatgccaagaagctcagctacactgtggaggtgctgcttcccgacaaggcctctgaggagacgctgcagagtctcaaggcgatgagaccctccccaacacagtgaagaccccagccacctctacctgtgcactccaaccccttcacacccacccctctgacccctgccttcccaggcagggtggtgctggaggtggctgcagagagccacttgtcccacgtcaccatttcatctcattgtaggctcacctggcacagtggccaagcaggaaggggccaccagtgcatagcccatgctgaagattcagacaggaacctctttccctgttcccagagaatgcggctgagaatgagaacgctgaagatgatccagtccactgaggatgggtcctgcttgcagaagctgccctttcacccatcttgacaagatccagccacccaggactcacccatgcctggtgttccagcttcagggggtgtgcgtggttcctaggtcctgtggacatcacagcttcaggcctgaagagcagagaagccctgttctctgcatgtaggaggtcagcaggggtgggcaggcccagctggaggcagctgggtgagggtcctggttccagcagagcactggggcccatccaagtttgttctgccaccactggatggaaaattggaaatggactgggcgtggtggctcacgcctataatcccagcagtttgggaggctgagttgggcagatcacctgagatcaggagttcgggaccagcctgggcaacatggtgaaaccctgtctctactaaaaatacaaaaattagccgggcatggtggcgtgcacctgtaatcccagctactcaggaggctgaggcaggagaatcgcttgtacccaggaggcggaggttgtagtgagctgagatcgtgccactgcactccagcctgggcaacagagccagactccgtctctaaacaaacaaacaaacaaacaaacaaataaagaaagaacattggacatggagaggtggggcctggcatgggtaaccatcagaggaaaaagccatgctcagccttccagttgagtgggtaacgactgagtctccagggaattcccagtgacctcccctccacacctgctgtgatcctgccaacatttagctttggttctcttggcagctgcaccattcatgggtgcatatacgtagagtctgaacaggtgctctgctgctagaaacagcaaaccatctagattaaactcctaaagccagtgccacgaggcattcctgttccaactgggtgtttgagcagattggc

SEQ ID NO: 179236 - DNA, 2564 bp, Homo sapiens
  Payload ID: 15328
  Gene Symbol: SEC14L4
  Gene Name: SEC14-like lipid binding 4
  ENST ID: ENST00000321205
  CDS Start-End: 101-382
atctggcccaggaggcacaaccaggcggcagcggatacaaggccaggcggcggcgggcgggcggacctgcgccctgagcctttctgcgcccgcgggcaccatgagcagccgagtcggggacctgagcccccagcagcaggaagcgctggccaggttccgggagaacctccaggacctgctgcccatactgcccaatgctgatgactacttcctcctgcgctggctgcgagctcgaaactttgacctgcagaaatccgaagacatgctccgaaggacccaagtccccccagcccacctcctgtccccacgctctgagagcctggcacatggagttccggaagcaacaagacctggacaacattgtcacatggcagccccctgaggtcatccagctgtatgactcgggtggtctttgtggctacgactacgaaggctgccctgtgtacttcaacatcattgggtccctcgaccccaagggtctcctgctgtcagcctccaagcaggatatgatccggaagcgcatcaaagtctgtgagctgctgttgcatgagtgtgagctgcaaactcagaagctgggcaggaagatcgagatggcgctgatggtgtttgacatggaggggctgagcctgaaacacctgtggaagccagctgtggaggtctaccagcagttttttagcatcctggaagcaaattatcctgagaccctgaagaatttaattgttattcgagccccaaaactgttccccgtggccttcaacttggtcaagtcgttcatgagtgaggagacacgcaggaagattgtgattctgggagacaactggaagcaggagctgacaaaattcatcagccccgaccagctgcctgtggagtttggggggaccatgactgaccccgatggcaaccccaagtgcctgaccaagatcaactatgggggtgaggtgcccaagagctactacctgtgcgagcaggtgaggctgcagtatgagcacacgaggtccgtgggccgcggctcctccctgcaggtggagaacgagatcctgttcccgggctgtgtgctcaggtggcagtttgcttcagatggtggggacatcggctttggggttttcctgaagaccaagatgggggagcagcagagtgctagggagatgacggaggtgctgcccagccagcgctacaatgcccacatggtgcctgaggatgggagcctcacctgcctccaggctggcgtctatgtcctgcgcttcgacaacacctacagccggatgcatgccaagaagctcagctacactgtggaggtgctgcttcccgacaaggcctctgaggagacgctgcagagtctcaaggcgatgagaccctccccaacacagtgaagaccccagccacctctacctgtgcactccaaccccttcacacccacccctctgacccctgccttcccaggcagggtggtgctggaggtggctgcagagagccacttgtcccacgtcaccatttcatctcattgtaggctcacctggcacagtggccaagcaggaaggggccaccagtgcatagcccatgctgaagattcagacaggaacctctttccctgttcccagagaatgcggctgagaatgagaacgctgaagatgatccagtccactgaggatgggtcctgcttgcagaagctgccctttcacccatcttgacaagatccagccacccaggactcacccatgcctggtgttccagcttcagggggtgtgcgtggttcctaggtcctgtggacatcacagcttcaggcctgaagagcagagaagccctgttctctgcatgtaggaggtcagcaggggtgggcaggcccagctggaggcagctgggtgagggtcctggttccagcagagcactggggcccatccaagtttgttctgccaccactggatggaaaattggaaatggactgggcgtggtggctcacgcctataatcccagcagtttgggaggctgagttgggcagatcacctgagatcaggagttcgggaccagcctgggcaacatggtgaaaccctgtctctactaaaaatacaaaaattagccgggcatggtggcgtgcacctgtaatcccagctactcaggaggctgaggcaggagaatcgcttgtacccaggaggcggaggttgtagtgagctgagatcgtgccactgcactccagcctgggcaacagagccagactccgtctctaaacaaacaaacaaacaaacaaacaaataaagaaagaacattggacatggagaggtggggcctggcatgggtaaccatcagaggaaaaagccatgctcagccttccagttgagtgggtaacgactgagtctccagggaattcccagtgacctcccctccacacctgctgtgatcctgccaacatttagctttggttctcttggcagctgcaccattcatgggtgcatatacgtagagtctgaacaggtgctctgctgctagaaacagcaaaccatctagattaaactcctaaagccagtgccacgaggcattcctgttccaactgggtgtttgagcagattggc

SEQ ID NO: 179237 - DNA, 1603 bp, Homo sapiens
  Payload ID: 15328
  Gene Symbol: SEC14L4
  Gene Name: SEC14-like lipid binding 4
  Uniprot ID: Q9UDX3
  ENST ID: ENST00000381982
  CDS Start-End: 40-1122
cggacctgcgccctgagcctttctgcgcccgcgggcaccatgagcagccgagtcggggacctgagcccccagcagcaggaagcgctggccaggttccgggagaacctccaggacctgctgcccatactgcccaatgctgatgactacttcctcctgcgctggctgcgagctcgaaactttgacctgcagaaatccgaagacatgctccgaaggcacatggagttccggaagcaacaagacctggacaacattgtcacatggcagccccctgaggtcatccagctgtatgactcgggtggtctttgtggctacgactacgaaggctgccctgtgtacttcaacatcattgggtccctcgaccccaagggtctcctgctgtcagcctccaagcaggatatgatccggaagcgcatcaaagtctgtgagctgctgttgcatgagtgtgagctgcaaactcagaagctgggcaggaagatcgagatggcgctgatggtgtttgacatggaggggctgagcctgaaacacctgtggaagccagctgtggaggtctaccagcagttttttagcatcctggaagcaaattatcctgagaccctgaagaatttaattgttattcgagccccaaaactgttccccgtggccttcaacttggtcaagtcgttcatgagtgaggagacacgcaggaagattgtgattctgggagacaactggaagcaggagctgacaaaattcatcagccccgaccagctgcctgtggagtttggggggaccatgactgaccccgatggcaaccccaagtgcctgaccaagatcaactatgggggtgaggtgcccaagagctactacctgtgcgagcaggtgaggctgcagtatgagcacacgaggtccgtgggccgcggctcctccctgcaggtggagaacgagatcctgttcccgggctgtgtgctcaggtggcagtttgcttcagatggtggggacatcggctttggggttttcctgaagaccaagatgggggagcagcagagtgctagggagatgacggaggtgctgcccagccagcgctacaatgcccacatggtgcctgaggatgggagcctcacctgcctccaggctggcgtctagaatgcggctgagaatgagaacgctgaagatgatccagtccactgaggatgggtcctgcttgcagaagctgccctttcacccatcttgacaagatccagccacccaggactcacccatgcctggtgttccagcttcagggggtgtgcgtggttcctaggtcctgtggacatcacagcttcaggcctgaagagcagagaagccctgttctctgcatgtaggaggtcagcaggggtgggcaggcccagctggaggcagctgggtgagggtcctggttccagcagagcactggggcccatccaagtttgttctgccaccactggatggaaaattggaaatggactgggcgtggtggctcacgcctataatcccagcagtttgggaggctgagttgggcagatcacctgagatcaggagttcgggaccagcctgggcaacatggtgaaaccctgtctctactaaaaatacaaaaattagccgggca

SEQ ID NO: 179238 - DNA, 6459 bp, Homo sapiens
  Payload ID: 15329
  Gene Symbol: SEC14L5
  Gene Name: SEC14-like lipid binding 5
  Uniprot ID: O43304
  ENST ID: ENST00000251170
  CDS Start-End: 181-2271
gggtcctggagctctctcggcccggcaggtttcgctcccgcccctccggccttccacagctgtcctggccgcagggtgttcaaggcgggacacaccaggctagagatccgcgatcgggccccgcctcaggctctgtgcacacccctgcctggtgacctccattggtgctccagcgtgaacatggtgcaaagataccagtctcctgtccgagtctacaagtacccgtttgagctggtcatggcggcctacgagaagcgtttccccacgtgcccacagatcccagtcttcctgggcagcgaggtcttgcgcgagtcccgcagcccggacggggctgtgcacgtggtggagcggagctgccggctgcgcgtggacgccccgcggctgctgcggaagatcgcaggtgttgagcacgtggtcttcgtgcagacaaacatcttgaactggaaggagaggacgctcctcatcgaagcgcacaatgagaccttcgccaaccgcgtggtggtgaacgagcactgcagctacacggtccaccctgagaatgaagactggacttgcttcgagcagtctgcctcactggacattcggtctttctttggctttgaaaatgccttggagaagatcgccatgaagcagtacaccgccaacgtcaagagggggaaggaggtgattgagcattacctgaatgagctcatctcccagggtacctcgcacattccgcgctggacgcctgccccagtccgtgaggaggatgcccgcaaccaggctggaccgagggaccccagctccctggaggcccacgggccccgtagcaccctggggcccgctctggaggcggtcagtatggacggggacaagctggatgcggactacattgagaggtgcctgggccacctcacgcccatgcaggagagctgcctgatccagcttcggcactggttacaggagacccacaaaggcaagattcccaaagatgagcacatccttcggttcctgcgggctcatgacttccacctggacaaggcccgggaaatgctgcgccagtccttgagctggcgcaagcagcaccaggtggatctcctccttcagacctggcaaccccctgccctgctggaggagttctatgcagggggctggcattaccaggacatagatggccgccccctctacatcctccgcctgggccagatggacaccaaaggcttgatgaaggccgtgggggaggaggcgctgctgcggcatgttctctccgtcaacgaggaaggacagaagcggtgtgaggggagcacaaggcagctgggccgtcccatcagctcctggacctgcctgctagacctggagggactcaacatgcggcacctgtggcggccgggggtgaaggccctgctgcggatgattgaggtggttgaggacaattacccagagaccctgggtcggctgctcatcgtgcgagccccccgagtcttccccgtgctctggacactgatcagccccttcatcaatgagaacaccaggcggaagttcctcatctacagtggcagcaactaccagggacccggaggccttgtggactatctggatagagaagtgatccctgacttccttgggggagagagtgtgtgtaatgtccccgaaggagggctggtccccaagtccctctacatgacagaagaggagcaggagcacacggaccagctgtggcagtggagtgagacctaccattcagccagcgtgctccgcggagccccccacgaggtggccgtggagatcctggaaggagagtcggtcatcacctgggactttgacatcctgcgaggggacgtggtgttcagcctgtaccacaccaagcaggcgcccaggctgggcgcccgggaaccggggaccagggccagcgggcagctgatcgacaaaggctgggtcctgggcagggattacagccgtgtggaggctccccttgtctgccgggagggggagagcatccagggctcccatgtgacccggtggcccggcgtctacctgctccagtggcaaatgcacagcccccccagcagcgtggcctgcagcctcccgggtgtggacgatgtcctgacggctctgcacagccccgggcccaagtgcaaacttctctactactgtgaggtgctcgcctctgaggacttcaggggctccatgtccagcctggaatcctgcaccagcggcttctcccagctcagcgccgccacctcgtcctcctcctccggccagtctcatagcagctccctggtctccagatagccgggcccagtgtttcagggccgcccgctcgcctccagtgtccagaaatgtccagaatgagaagccagctaactgcagggcctgggaccatgtgggctggagccccaggcctagatgctgcccaagttggggtgtctggagcggatggcaaggatccagaactggcctgtgggtggtgtcagggctcttgaaattgcaaggacagaaccatctccttccggcttcgtgtaaggaagaccaagccaaggccaaggtgtctaccataccacacctttgggacatccgggcttagcgacgtcagccaggcccatctcctctctgtccacctcttgctctgctttcgccatgcaggggaccatcactatcaggtgcccttctcctccctgcagcttgcctgcataagagagcctcttcctcccaaaggctccagcccacttcccagagctgagtcttagcctggaagggggagcgattgccaggtcaattcctgaaccaatcacagttgccaggcacactggagaatgctgattggccagcagggtcatgcccaatctggaccaatcaccgtgatccagggttgcagtgaggtgcagtgattggccagcctggatcacatgcacatctctggaaccaaccacctgctctcaaaagcactagtgggtgcctcgaggagtactggggtcccccctaagaagaaggaggaaggatgctggggaggcagaaatgaagggtgtttaccttggcatctgattgcataacgttctgttatgcagtatcaagatgtgcttggtgagcagttaagtgagttacaggcgctgctctttgtggggaacagcacatcctgaagtgaaaatccatgttccctgcacttggccagcatggcctaagcctgaccatccctgattggagagggtgggagagccctgggtttctgctaagttccaggcagtgatggggtgactgaggctgtctgtataccccactggagatgcctttctctcctagggaactgtttaattatgactgtttttggttgtaagccacagagacccatgcccaggtgcttcaacacaaaagcatgatcattcatgggtgcatagaactggccagtccaggagggcttgcttcaggtaaggctagatccagggtctcaacatggagtctcgattccccccgcgagtggaggctgctgtgtttgccctggggcagatatgactctggaactaggttcaatattgacatgagttcccctagttactacacaggagcgtcttgggtctccttggggcctgaggacatttctcctttcctttcctggactccccaaaaggcagccagtcaggggtcaccaacttgaagcctgatctggcctgcttttagtgttgcttttttgcctttagaatggtttaaaaattgaggcatttcgcatcgaaatcaggatttctggcttcccttaggcatttgggagcaccagcagaatggggtcactattgttgcatgaagacaacacctctgcacccctggatgtggccacgccagtccctaccccattgacttgcgcccagcccacattacacatcctcatgacctgcgtggcaggagtctcactgacatggctctgtcagcagtggctggtacccttgtctcctggccttgcttagagttggggctcatctctgctgcagtaactgagccaaggggtggttttgtggccacaagaatcatctttatgcaggctcagcaatgcagggccaggaaacttatatctacgccagcctcaaccccaaacccaaggaagagagaaagtgtcatcttttcagatacatccttcttcctgctgggagagagccttgcccaccttcctgttggctctctgtccgcttctcaggtatctgaacaaaatagattgctttgcactctgcgtcaaggtgtgtgtgcacatgtgtgcataagagaccgactgattggaaggagacgttctcaaaactaattgctcccatatcaccaggcatttattgctgagagcaacttgcaatattttcaactatctttaagtgaatttctagcttttctcttaaaaactaggtgttatcctacaagtatgctgggataagctgccctggcagtctttatacatttattgtctagccccagagaaggacacagaagccttttacggaaggaagctggaactgcctgttccagaggcgggtggggggaggggagtctgctatcagctgtccacccttaacagtgggggtgaggaacctcaggccctttcagttctgctcttgagagtgctctctccctagggaaaaccagcccaaactggcttaagcaacaaagcaaattccctgggtcctgtactagggatggctgaaggtgggtgctgcttcagatatggctggatccaggagcttaatgtcctcaggcctctcaactgcacccaggcctcttgactctgcatctctttgcatgctgacctcattctttcttccacctggcgggaaagatggctgccagcagccccaagcctataatttcaggattcacactctaagagatgcttttccatctcaaatctcatggaaggctctgattggcccagctcgagtcacatgcttattcctgtgggccacactggcaaggaactagggtcccgtgattgacattccctgcagaagccgcagcaggattggggagggccattcccccaatggacaagagaagctggaccacagaaccagcaggtatccatggtggcatctgctacggccggctctcctcccatgtggaggtctcggggacccacgtggaagcattatcaaggtcattcttcttgccttcgggaggactggaattaaaaataatccaaggaagggattgccaagcttttggcttttgaatttcccctgagccacaaaggctggaagtgccttggcttgggcttcttgcatcattagttcattaatccattgtgaccaggacagaagcaacccacaagcagcattactgttggtgtttgggcacctgggccttgaatttaggccaggactcaaaccccagccttcctttcactagctgtgtaaccttgaccaggtgacttaacctctctgtgcctcagtttcctcatctgtaaagtgaggatagcagtgcctacctcaataggttgtagtgggacgaaatgagggagtagctgtaaagctttcagcacagctcccagaacacagaaagcgctccattaatgtcagtggtcattctgattacttaatgcttcgcatccaaagactcgttttcttcctgaggtcgcctatccctgtttttcgttattgcacccagagaaaagtaggtgtcaagaattattgccctctgagttgggtgtgcagtctttctcttttagaaactgcttgtgtgggcggggcgtggtggctcatgcctataatcccaacactttgggaggctgaggccggctgatcgcttgagtgcaggagttcaagaccagcctgggcaacatagtgagaccctgtctctacaaaaaattaaaaaatgagccaggcgtggtggtgcgtgcctatagtctcagctgctcgggaggctgaggcagaaggattgcttggaggtcaaggctggagtgagccatgatctcacccctgtacttcatcctgggtgacaaagcaagaccctgtctcaaaaaaagaagaaagaagctgcttgtgttttctgggtaagtccacccatctgagggagtgtattctgagtggtatttcccttggcagttagaaaatgttttttcccagaggttgaagtatggagagtttgagactctttttttctaccctgcactctctggaattccccctccctgctgtaaaatttattgtccaatgagaatagtataattgttttcaacaaagtctctttgagccagtgaaacacgatgggtttttttgtttgcctgatcacttgctccaaccagcagcattaaatgttttccatttggataaacttgcatcgtcagcttcctaaaaccctggaggtttcccgtgggctcgttcaagaactttccagctgttgtttaaaagactttagagctagcttgttcagcctgtggcctgcaggctgcacgcggccccggactgctttgaatgtgctccaacacgagttcgtaaactttcttaaaatactgag

SEQ ID NO: 179239 - DNA, 576 bp, Homo sapiens
  Payload ID: 15329
  Gene Symbol: SEC14L5
  Gene Name: SEC14-like lipid binding 5
  ENST ID: ENST00000587469
  CDS Start-End: 70-576
agtcactcctcgccccaggctctgtgcacacccctgcctggtgacctccattggtgctccagcgtgaacatggtgcaaagataccagtctcctgtccgagtctacaagtacccgtttgagctggtcatggcggcctacgagaagcgtttccccacgtgcccacagatcccagtcttcctgggcagcgaggtcttgcgcgagtcccgcagcccggacggggctgtgcacgtggtggagcggagctgccggctgcgcgtggacgccccgcggctgctgcggaagatcgcaggtgttgagcacgtggtcttcgtgcagacaaacatcttgaactggaaggagaggacgctcctcatcgaagcgcacaatgagaccttcgccaaccgcgtggtggtgaacgagcactgcagctacacggtccaccctgagaatgaagactggacttgcttcgagcagtctgcctcactggacattcggtctttctttggctttgaaaatgccttggagaagatcgccatgaagcagtacaccgccaacgtcaagagggggaaggaggtgattgagcattacctgaatgag

SEQ ID NO: 179240 - DNA, 3392 bp, Homo sapiens
  Payload ID: 15330
  Gene Symbol: SEC14L6
  Gene Name: SEC14-like lipid binding 6
  Uniprot ID: B5MCN3
  ENST ID: ENST00000402034
  CDS Start-End: 1-1194
atgagtggacaagtgggtgacctgagcccatcgcaggagaagtcgctggcccagttccgggagaacatccaagatgtgctatctgcgctgcccaatcctgatgactacttcctcctgcgctggctccaagctcggagctttgacctgcagaaatcagaggacatgctgaggaagcatatggagttccggaagcaacaagacctggccaacatccttgcctggcagcccccagaggtggtcaggctgtacaacgctaacggcatatgcggccacgacggtgagggcagccctgtctggtaccacattgtgggaagcctggaccccaaaggcctcttgctctcagcctccaaacaggagttgctcagggacagcttccggagctgcgagctgctcctgcgggagtgtgagctgcagagtcagaagctggggaagagggtggagaaaatcatagctatttttggtctcgaagggctgggcctgagggatctgtggaagccaggaatagagcttctccaggagtttttctcagcacttgaagcaaattaccctgagatcttgaagagtttaattgttgtgagagcccccaagctattcgccgtagccttcaacctggtcaagtcttacatgagtgaagagacacgcaggaaggtggtgattctcggagacaactggaagcaggagctgacaaaattcatcagccccgaccagctgcccgtggagtttggggggaccatgactgaccccgatggcaaccccaagtgcctgaccaagatcaactacgggggtgaggtgcccaagagctactacctgtgcaagcaggtgaggctgcagtatgagcacacgaggtccgtgggccgcggctcctccctgcaggtggagaacgagatcctgttcccgggctgtgtgctcaggtggcagtttgcttcagatggtggggacattggctttggggttttcctgaagaccaagatgggggagcggcagagggctagggagatgacagaggtgctgcccagccagcgctacaatgcccacatggtgcctgaagatgggattctcacctgcctccaggccggcagctatgtcctgaggttttacaacacctacagcctggttcattctaaacgcatcagctacaccgtggaggtactgctcccagaccaaaccttcatggagaagatggagaaattctaggtgaacctcatggtccccacaccctcctctttgatctctgaatccacaatgagttcacagccttccctggccagaccctgttcaacctctcaggaacagggattctacaacagcaggtcacagcctatgcatcacagctggcccactcctcaggaacggctgggacagtgtcctagtggtggcccgatggtcacagcaaagcaacacagacactccatccccactatgacctgctgtgacctcaagctcagcaaaaaccccaggcttttttctatcaaccaataccaagaaataagttactcttctaaaatatagtattaggccaggcatggtggctcatacctgtaatcccagcactttgggaagccaaggcgggcagatcatttgaggtcaggagttcgagaccagcctggccaacatggtgaaaccctcatctcaactaaaaatacaaaaattagccaggtgtgatggtgcctgcttgtaattccagctacttgggaggctgaggcaggagagtcgcctgaacttggtaggcagaggttgcagtgagccgaaatcatgccactgcactccagtctgggtgacagagtgagactctgtctcaaaaaaataaaataaaatagtattaataggaaatttgaaatatagtatagctgacagatcaggaaataattaccattgaaaagatagtttattactcacagttcccaagaggaggggccgctgtgccatagggggaagaggaggggtccccagggaggcatcagggccgaacatgacgcacatgagacagaaaaactctggacaaagcaactttacttttatgatggtttctgcaggaaggaactggtgaggcagggtaagcaggcttgagatttgctagtttgaataatttcagcaggctccgtggaataagggctgtcactagctgtctggtatcttgccctggggtgattacagcaggtggatagtggcctggagtgtgagaatctgataaaggaggtagttggaatatggtttatatcagttggtttgcattcgaaaagtgcatttgtgggcaagttgctgtatctctaggagaggcaggccctccaggattagcaaaacctcagatgttaaagcatgcagaaaataaaagacatggttcaaatagttccctaacaagcagttgtgcaatgctgctctgaatggaaatccaacctcacagtttcccatctagaaagaattttaaactctctattctgtcttccacatacacgttccctcccactgttatagcatctgagaatctgcttgagctctggatcttcatccaatctcctgattaagatttcaaactggccaggtgcagtggctcacacctgtaatcccagcactttgggaggctgaggcatgtggattgctcgaggccaggagtttgagaccagcctggacaacatggcgaaaccccgtctctacgaaacatacacaaattagttgggtgtggtggcggcgagtgcctgcagtcccagctacttgggaggctgaggtgggagaatctgtggaacccaggaggcggaggttgcagtgagttgagattgcaccactgcactccagcctgggaaacagagcaagaccctgtcttaaaaaaaaaaaattcagactgagcctcacagtgggacactaggtcggtgtcagcccacagtcctactagagtgctgtcctgcgatcaggcctctttgggtctggctatgctgtcagctgagattctgcccaggatcctgtcactcacatgttgtcccagcttgttctcaatgtggcagccccaaatgacagccaaagttcttccctaattgcctactttacaggaatcctgtccaaaaatggaaacacgggcattcagcagcccttgctctccctcagcccctcccctgacagccactgatctgttcttcatccctacacttttgattttttccagagtgtcatataaatggaatcgtgcaatatttagccttttgattctggctttctttagtcagcataatgcctctgagattcattcactttgttgcatgtgttaatatttagttgcttttcgttgctgagtaatataccactgtatggatggaccacactgtgtttatcccttcccctgttaaaggctggttgagtcgcttccagtttgggggcgattatgaataaagctgttgtaagca

SEQ ID NO: 179241 - DNA, 788 bp, Homo sapiens
  Payload ID: 15330
  Gene Symbol: SEC14L6
  Gene Name: SEC14-like lipid binding 6
  ENST ID: ENST00000437871
  CDS Start-End: 1-367
gctattcgccgtagccttcaacctggtcaagtcttacatgagtgaagagacacgcaggaaggtggtgattctcggagacaactggaagcaggagctgacaaaattcatcagccccgaccagctgcccgtggagtttggggggaccatgactgaccccgatggcaaccccaagtgcctgaccaagatcaactacgggggtgaggtgcccaagagctactacctgtgcaagcaggtgaggctgcagtatgagcacacgaggtccgtgggccgcggctcctccctgcaggtggagaacgagatcctgttcccgggctgtgtgctcagatgtcctgaggttttacaacacctacagcctggttcattctaaacgcatcagctacaccgtggaggtactgctcccagaccaaaccttcatggagaagatggagaaattctaggtgaacctcatggtccccacaccctcctctttgatctctgaatccacaatgagttcacagccttccctggccagaccctgttcaacctctcaggaacagggattctacaacagcaggtcacagcctatgcatcacagctggcccactcctcaggaacggctgggacagtgtcctagtggtggcccgatggtcacagcaaagcaacacagacactccatccccactatgacctgctgtgacctcaagctcagcaaaaaccccaggcttttttctatcaaccaataccaagaaataagttactcttctaaaatatagtattaggccaggcatggtggctcatacctgtaatcc

SEQ ID NO: 179242 - DNA, 3910 bp, Homo sapiens
  Payload ID: 15331
  Gene Symbol: SEC16A
  Gene Name: SEC16 homolog A, endoplasmic reticulum export factor
  ENST ID: ENST00000277537
  CDS Start-End: 1-2256
ccggcggctgccgccagctcgctcgagagagagaccgagaggttcagggagctgttgctgtatggccgtaagaaggatgctttggagtctgcaatgaagaatggcctgtggggtcacgctctgctacttgcaagtaagatggacagccggacacacgcccgagtcatgaccaggtttgctaacagcctcccaatcaacgaccctctgcagacagtctaccagctcatgtccggacggatgcctgccgcgtccacgtgctgtggagacgagaaatggggagattggaggccgcacctcgccatggtcttgtccaacttgaacaacaacatggacgtcgagtccaggacgatggctaccatgggcgacactctggcttcaaggggcctcttggatgcggcccacttctgctacctcatggcccaggcgggatttggtgtttacacgaagaaaactacaaagcttgtcttaatcggatccaatcacagtttgccattcttaaagttcgcaaccaacgaagcaatccagaggacggaagcctatgagtacgcccagtccctgggtgccgagacctgccccctgcctagtttccaggtgtttaagttcatctactcctgccgcctggcggaaatggggctggccacgcaagccttccactactgtgaggccatcgcgaagagcatcctgacgcagccgcacctgtattccccggtgttgatcagccagcttgtgcagatggcttcccagttacgactcttcgatccccagctgaaagagaagccagaagaggagtccttggccgcacccacgtggctggttcacctgcagcaggtggagcggcagattaaggagggggctggagtatggcatcaggatggagccctcccgcagcagtgtcctggcactccgagttccgagatggagcagttggacaggccaggactcagtcagccaggagccctggggatcgccaaccctctgctggcggtgcctgcaccgagccctgagcactcgagcccgagcgtgcggctgctgccctcagctccgcagacgctccctgacggcccattggccagtcctgccagagtgccgatgttcccagtgccactgcccccggggcccctggagccgggtcctggctgtgtgaccccagggcctgcacttggcttcctggagccctccgggcctggcctcccacctggtgtgccacctctgcaggaaaggagacacttgctccaggaagccaggagcccagacccagggatagtgccgcaggaggcgcctgttggaaactcactttccgagctaagcgaagaaaattttgatggaaaatttgctaatctgaccccctcgaggacggtgccagactcggaggcccccccagggtgggatcgtgccgactcgggtcccacgcagccacctctgtctctctcacccgctcccgaaacaaagagacccggacaggcagccaagaaagaaacgaaggaacctaagaagggtgaatcctggttctttcgttggctacctggaaagaaaaagacagaagcttatttgccagatgacaagaacaaatcgattgtttgggatgaaaagaaaaaccagtgggtgaatttaaatgagccagaagaggagaagaaagccccgcccccacctccaacctcgatgcccaagactgtgcaagctgccccgcctgccctcccagggcctcctggagcccccgtgaacatgtactctagaagagcagcaggaaccagagctcgctacgttgacgtcctgaacccaagcgggacccagcggagcgagccggctctcgctcctgcggactttgtcgctccactcgcgccactcccaattccttctaacttgttcgtgccaaccccagatgcagaagaaccacagcttccagacgggactggcagggaagggcctgcagcagctaggggcctggccaatccagagcctgccccagagcccaaggttttaagctctgcagcgtcactccctggctctgaactcccctcctccaggcctgagggttcccagggaggagagctttcgcgctgtagttcaatgagttcattatcacgtgaagtgagccagcattttaatcaggctcctggcgacctccctgctgcagggggccctcccagcggggccatgcccttctacaaccctgctcagctggcacaggcctgcgccacctccgggagctcaaggctagggaggattggccagaggaagcacctggtgctgaactaggcttgccctgctgtgaacttgcacttggagccctgacgctgctgttctccccgaagaacccgaccgacctccgcgatctccgtcccgcccccagggagacacagcagtgactcagagctggtcgcacactgtgcctccctcctcaccgcccatcgtaatgaattattttgaaaattaattccaccatcctttcagattctggatggaaagactgaatctttgactcagaattgtttgccgaaaagaatgatgtgactttcttagtcatttaggatgatttaaggatatagtattcctggtcatttaagaatgttcattcattgaagccggagctgtctctgccacaggagagccacatggtcggtagtaaccagggcctctccaagcccagctgtgagtcactgcccagtgagtcccgcgcttcctttaaggtgctgggagcaaagagagggtgactgaggcagaccccaacccctgctctgcaccatctgggccctcgccgtgtttgaacctggctgaatgagtggagggcgctgtgttctcaatcagcgcctccgaggagccgtggggttccttcggcattagttcacggtttttgagagaggccttagttactgcagtgaatttctttcctgttgcaaagacgcttccagcctcactttactttctgtggcctgatgaggaccatgggtgattttgtgtacccaaagcgctggggactgcccaccgtgtggcccagtcactgggaaggagccccagagagccggctgtctgacatgatggctcagggtggtcatccaggttgaaaactgaccgtgtgatgtttgatttgggcttcatttcgtgtgtaggagcacggttagactcactgttaaggaagctggatgcacttctctaaaaggctgcactttccgtgagcacttttcgtggtacaatccacatgacccactttctcccctgggggacgttggttcagaggttggtagcacttggggagagtatcttaacacagtttcttgacagcagctctggaacttagtatttctgccccgagttttgccacactgagactttgagtagctcctggtggactcaaccctgttcaactcagagacgggcctcctctcactgatgcaaagctttaaggcttctctgactgttctgaaactcttcgtattcttgtcaagtctaaagagactgaagaaaagatttaaatactaataaaaatcagtagataatttctgtaggttctgctggaggaatacaaactgtttggtgttttaaatttaagtgtagaaattgtagaatgtggaattagcacagatccttcctggctttctgtttcacttgatcatttagcccagaccacccaggatgttttccaaaatgttccacaggcgtgtcccgctggatccatttgtccttgtcacttggagaaaggccagtccctgtgacggggcagccctctctgtccctcggtcagctcgtgtgaatcctgggacctcttccggtcggctctgcccgctgttctggggtcgactgccacgacttttgattcaagaagcttcctccaggcgggagcggctatttttcctaaatgagaattgttacattgcaaattgttgaataaaatattttgcgctccttcaagcac

SEQ ID NO: 179243 - DNA, 8982 bp, Homo sapiens
  Payload ID: 15331
  Gene Symbol: SEC16A
  Gene Name: SEC16 homolog A, endoplasmic reticulum export factor
  ENST ID: ENST00000290037
  CDS Start-End: 320-7324
gcgaggagcgcgcccgcgtcagggccccgcgcttctcagctgggcggagtagccgttctcggtgcgtgagcctgctggcatcggtcctgcagactgatttcccgcttgtggccttgattgaagaatcccatctcttctcacatcttaaaacgaaaaaagactgggagaaagagccagcgtaaacagggcgacgtactgggacggccccggcgcgcctggccgggcaggtggcgaggggcggggccaagcgctccaattaaggaacagctatatcctgcttccttctgtaagcagcatcgacttgtgcaagggttcagtcatgcagccaccgccccagacggtcccgtctggcatggctgggccacctccagccgggaatcctcggagcgtgttctgggctagcagcccttacaggagacgggctaataataatgcagcagtggctccgacaacttgcccgttgcagccggtcacggatccatttgcttttagtagacaggcgctccaaagtacaccactgggcagttcgtccaaaagcagtccacctgtcttgcaaggcccagcccccgcagggttttctcagcaccccggtttgcttgttcctcacacacatgccagagatagctctcagggaccctgtgagcccctgcctggacctctgacacagcccagagcacatgccagtccgttttctggtgcattgacaccttcagcacctcctgggcctgagatgaacaggagtgcagaggtcggtcccagttcagagcctgaagttcagactctgccatatcttcctcactacattccaggagtggatcctgaaacgtctcatgggggccaccctcatgggaacatgcctgggctcgaccgacccctgagcaggcaaaacccacatgacggtgtggtcaccccagcagcatccccttccctccctcagcctggtctgcagatgccaggacagtgggggccagtgcagggaggcccacagccctcggggcaacatcgttcaccctgccctgaaggacctgttcccagcggggtgccctgtgccaccagcgttcctcatttccccaccccgtccatcctacatcagggccctggtcatgagcaacacagccctctggtggctcccccagcagccttgcccagtgacggaagagacgaggtgagccacttgcaaagtggaagccacctggccaataactctgatcctgaaagtacattcaggcaaaatcccagaattgtgaatcactgggcaagcccagagctcaggcagaatccaggagtgaagaatgagcaccggcccgcctctgctcttgtgaaccccctcgcccggggagatagcccagaaaaccgtacgcaccacccactgggggctggggccgggtctggctgtgccccgctagaagcagactcaggagcttcaggagctctggcgatgtttttccaagggggagagacagaaaatgaggagaatctctcatctgaaaaagcaggcttatctggtcaagcggactttgacgatttctgctccagccctgggctaggccgtccgcccgcacctacacacgtgggggcaggcagcctctgccaggcccttctcccaggccccagcaatgaggctgctggtgatgtgtggggtgacacagcgagcacaggggtgccggatgccagcggctcgcagtatgagaatgttgagaacttagaatttgttcagaatcaagaagttctgccaagtgagcccctcaatttggacccttcctccccgagtgaccagttcagatatgggccccttcctgggccagctgtgcccaggcatggtgctgtgtgccacaccggagcccctgatgccacactgcatacagtgcaccctgacagcgtgtcatccagctatagcagcagaagccacggaaggctctcaggctcagccaggccccaggagctggttggcacattcattcagcaagaagttggaaaacccgaggatgaagcttcaggtagtttttttaagcaaatcgattcttctcccgtaggaggtgaaacagacgagaccactgtgagccagaattaccgtggcagcgtgtcccagccctcaaccccgagccccccgaaacctacaggaatatttcagacaagtgcaaatagttctttcgaaccggtaaaatctcacttagttggggtaaaaccatttgaggcagatcgcgccaacgtggttggtgaagtaagggagacctgtgtccgccagaagcagtgcagaccagctgccgccctgcccgatgcttcccctggcaacctggagcagccaccagacaacatggagaccctctgtgcaccccaggtctgtcccctgcctcttaactccaccacggaagctgtgcacatgcttccgcacgcaggggcaccgcccttggatactgtgtatccagcacccgagaagaggccttcagccaggacccaggggcccgtgaagtgtgagagcccagcaacgactctgtgggcgcaaagtgagctgccagattttggaggcaacgtccttctggcccctgcagccccggcgctttatgtgtgtgcaaaacctcagccacctgttgttcagcctccagaagaggcgatgtccgggcagcagtcacggaacccaagctcggcggccccggtgcagagccgaggtggcattggtgcttctgagaaccttgagaatcctcccaaaatgggagaggaggaggcccttcagtcccaggcgagttctggttatgcaagtttattatcctcaccgcccactgagtctctgcagaatcctccagtcttgattgctcagcctgatcacagctataatctggctcagcccattaacttttctgtgtccttatcgaactctcatgagaagaatcagtcctggagagaggctttggtgggggatagacctgcagtcagcagttgggctctcggtggtgattctggggagaacacttctttgtctgggattccaaccagctctgtccttagcttgtctctgcctagcagtgttgcccaaagtaattttccacaaggttctggtgcttccgaaatggtttctaatcagcctgctaatttgctggttcaaccaccatcccagccagttccagagaacttggttccagaaagtcaaaaggatcgtaaggcaggaagtgctcttcccggatttgctaatagccctgctggaagcacaagtgtggtgttagttccacctgcacacggcaccctggtgcctgatggtaataaggcaaaccattccagtcatcaggaagacacttacggagccctagactttaccttaagcaggactttggaaaatcctgtaaacgtgtacaacccgtcccattctgacagcctcgcttctcagcaaagtgttgccagtcatcccagacaatctgggcctggggcgcctaaccttgaccgtttttatcagcaggtcacgaaagatgcccagggccagcctggcctcgaaagagcccagcaggagctggtgccaccccagcaacaggcttctcccccacaactacccaaagccatgttttcggagctgtcaaatccagaaagtctgcccgcacagggacaggcccagaactcagcacagtcaccagcaagtctggttctggtcgacgcgggtcagcagctgccccctcggcctcctcagtcctctagcgtgtctctggtgtccagtggctccggccaggcagctgtgccgtcagagcagccgtggccacagccagtgcctgcacttgcccccggcccaccgcctcaggacctggccgcctactactactaccggcctttgtacgatgcctaccagcctcagtactctttgccgtacccaccggagcctggcgcagcctccctctattaccaggatgtctacagcctctatgagcctcgatacaggccctatgatggtgctgcgtctgcttacgcccagaactaccgctatcccgagcccgagcggcccagctcccgagccagccactcctcggaacggccacctcccaggcaaggatatcctgaaggatactatagttccaaaagtggatggagcagtcagagcgattactatgcaagctattactccagccagtacgattatggagatccaggtcactgggatcgttaccactacagtgctagagtcagggacccccgcacctatgaccggaggtattggtgtgatgcagagtatgacgcatacaggagagagcactctgccttcggggacaggcccgagaaacgtgacaacaactggaggtacgatcctcgcttcacggggagttttgacgatgaccccgatccgcacagagacccttatggggaagaggtggaccggcgcagcgtccacagcgagcactcggcacggagcctgcacagcgcacacagcctggccagccgccgcagcagcctcagctcccactcgcaccagagtcagatttacagaagccacaatgtggctgccggttcctacgaggccccgcttcctccaggctcctttcacggcgattttgcctacggcacctaccgcagcaatttcagcagtggccccggcttcccagagtatggctaccctgccgacaccgtctggcctgccatggagcaagtttcatcaagaccaacttctcctgaaaaattttcagtgcctcatgtctgtgccaggtttggccctggcggtcagcttatcaaagtgattcccaatctgccttcagaaggacagccggccttggtggaggtccacagcatggaggccttgctgcagcacacgtctgagcaggaggagatgcgggcgttcccgggacccctggccaaagacgacacccataaggtggatgtcattaattttgcacagaacaaagctatgaaatgtttgcagaatgaaaacttaattgacaaagagtctgcaagtcttctttggaattttattgttctcttatgcagacaaaatgggaccgtggtagggaccgacattgcggagcttctgttacgagaccacagaacagtgtggcttcctgggaagtcgcccaatgaagcaaacctgattgatttcacgaatgaggcagtggagcaggtggaagaggaggagtctggtgaggcccagctctctttcctcactggtggtccggcggctgccgccagctcgctcgagagagagaccgagaggttcagggagctgttgctgtatggccgtaagaaggatgctttggagtctgcaatgaagaatggcctgtggggtcacgctctgctacttgcaagtaagatggacagccggacacacgcccgagtcatgaccaggtttgctaacagcctcccaatcaacgaccctctgcagacagtctaccagctcatgtccggacggatgcctgccgcgtccacgtgctgtggagacgagaaatggggagattggaggccgcacctcgccatggtcttgtccaacttgaacaacaacatggacgtcgagtccaggacgatggctaccatgggcgacactctggcttcaaggggcctcttggatgcggcccacttctgctacctcatggcccaggcgggatttggtgtttacacgaagaaaactacaaagcttgtcttaatcggatccaatcacagtttgccattcttaaagttcgcaaccaacgaagcaatccagaggacggaagcctatgagtacgcccagtccctgggtgccgagacctgccccctgcctagtttccaggtgtttaagttcatctactcctgccgcctggcggaaatggggctggccacgcaagccttccactactgtgaggccatcgcgaagagcatcctgacgcagccgcacctgtattccccggtgttgatcagccagcttgtgcagatggcttcccagttacgactcttcgatccccagctgaaagagaagccagaagaggagtccttggccgcacccacgtggctggttcacctgcagcaggtggagcggcagattaaggagggggctggagtatggcatcaggatggagccctcccgcagcagtgtcctggcactccgagttccgagatggagcagttggacaggccaggactcagtcagccaggagccctggggatcgccaaccctctgctggcggtgcctgcaccgagccctgagcactcgagcccgagcgtgcggctgctgccctcagctccgcagacgctccctgacggcccattggccagtcctgccagagtgccgatgttcccagtgccactgcccccggggcccctggagccgggtcctggctgtgtgaccccagggcctgcacttggcttcctggagccctccgggcctggcctcccacctggtgtgccacctctgcaggaaaggagacacttgctccaggaagccaggagcccagacccagggatagtgccgcaggaggcgcctgttggaaactcactttccgagctaagcgaagaaaattttgatggaaaatttgctaatctgaccccctcgaggacggtgccagactcggaggcccccccagggtgggatcgtgccgactcgggtcccacgcagccacctctgtctctctcacccgctcccgaaacaaagagacccggacaggcagccaagaaagaaacgaaggaacctaagaagggtgaatcctggttctttcgttggctacctggaaagaaaaagacagaagcttatttgccagatgacaagaacaaatcgattgtttgggatgaaaagaaaaaccagtgggtgaatttaaatgagccagaagaggagaagaaagccccgcccccacctccaacctcgatgcccaagactgtgcaagctgccccgcctgccctcccagggcctcctggagcccccgtgaacatgtactctagaagagcagcaggaaccagagctcgctacgttgacgtcctgaacccaagcgggacccagcggagcgagccggctctcgctcctgcggactttgtcgctccactcgcgccactcccaattccttctaacttgttcgtgccaaccccagtgtcttcagtgagaccccagggacgttcgggacggaatgatggcctcctcgctctctcatccccagatgcagaagaaccacagcttccagacgggactggcagggaagggcctgcagcagctaggggcctggccaatccagagcctgccccagagcccaaggctcctggcgacctccctgctgcagggggccctcccagcggggccatgcccttctacaaccctgctcagctggcacaggcctgcgccacctccgggagctcaaggctagggaggattggccagaggaagcacctggtgctgaactaggcttgccctgctgtgaacttgcacttggagccctgacgctgctgttctccccgaagaacccgaccgacctccgcgatctccgtcccgcccccagggagacacagcagtgactcagagctggtcgcacactgtgcctccctcctcaccgcccatcgtaatgaattattttgaaaattaattccaccatcctttcagattctggatggaaagactgaatctttgactcagaattgtttgccgaaaagaatgatgtgactttcttagtcatttaggatgatttaaggatatagtattcctggtcatttaagaatgttcattcattgaagccggagctgtctctgccacaggagagccacatggtcggtagtaaccagggcctctccaagcccagctgtgagtcactgcccagtgagtcccgcgcttcctttaaggtgctgggagcaaagagagggtgactgaggcagaccccaacccctgctctgcaccatctgggccctcgccgtgtttgaacctggctgaatgagtggagggcgctgtgttctcaatcagcgcctccgaggagccgtggggttccttcggcattagttcacggtttttgagagaggccttagttactgcagtgaatttctttcctgttgcaaagacgcttccagcctcactttactttctgtggcctgatgaggaccatgggtgattttgtgtacccaaagcgctggggactgcccaccgtgtggcccagtcactgggaaggagccccagagagccggctgtctgacatgatggctcagggtggtcatccaggttgaaaactgaccgtgtgatgtttgatttgggcttcatttcgtgtgtaggagcacggttagactcactgttaaggaagctggatgcacttctctaaaaggctgcactttccgtgagcacttttcgtggtacaatccacatgacccactttctcccctgggggacgttggttcagaggttggtagcacttggggagagtatcttaacacagtttcttgacagcagctctggaacttagtatttctgccccgagttttgccacactgagactttgagtagctcctggtggactcaaccctgttcaactcagagacgggcctcctctcactgatgcaaagctttaaggcttctctgactgttctgaaactcttcgtattcttgtcaagtctaaagagactgaagaaaagatttaaatactaataaaaatcagtagataatttctgtaggttctgctggaggaatacaaactgtttggtgttttaaatttaagtgtagaaattgtagaatgtggaattagcacagatccttcctggctttctgtttcacttgatcatttagcccagaccacccaggatgttttccaaaatgttccacaggcgtgtcccgctggatccatttgtccttgtcacttggagaaaggccagtccctgtgacggggcagccctctctgtccctcggtcagctcgtgtgaatcctgggacctcttccggtcggctctgcccgctgttctggggtcgactgccacgacttttgattcaagaagcttcctccaggcgggagcggctatttttcctaaatgagaattgttacattgcaaattgttgaataaaatattttgcgctccttcaagcaccttc

SEQ ID NO: 179244 - DNA, 3073 bp, Homo sapiens
  Payload ID: 15331
  Gene Symbol: SEC16A
  Gene Name: SEC16 homolog A, endoplasmic reticulum export factor
  ENST ID: ENST00000313084
  CDS Start-End: 264-1421
gtctctggatctgcttcccacctccatcctcctggtgtctctgtggatctgctccccacctccatcctcctggtgtctctgtggatctgccccccacctccatcctcctggtgtctctgtggatctgcccccgacctccattctcctggtgtctctggatctgctccccacctccatcctcctggtgtctctgtggatctgctccccacctccatcctcctggtgtgtctggatctgctccccacctccatcctggtgtctctatggatctgctccccacctccatcctcctggcgtctctgtggatctgctcccacctccatcctcctggtgtctctgtggatctgccccccacctccatcctcctggtgtctctgtggatctgctcccacctccatcctcctggtgtctctgtggatcgccccccacctccatcctcctggtgtctctgtggatcgccccccacctccatcctcctggtgtctctgtggatctgctccccacctccatcctcctggtgtctctgtggatctgctcccacctccattctcctggtgtctctgtggatctggcgactctggggcctcacagaaggtgaatcctggttctttcgttggctacctggaaagaaaaagacagaagcttatttgccagatgacaagaacaaatcgattgtttgggatgaaaagaaaaaccagtgggtgaatttaaatgagccagaagaggagaagaaagccccgcccccacctccaacctcgatgcccaagactgtgcaagctgccccgcctgccctcccagggcctcctggagcccccgtgaacatgtactctagaagagcagcaggaaccagagctcgctacgttgacgtcctgaacccaagcgggacccagcggagcgagccggctctcgctcctgcggactttgtcgctccactcgcgccactcccaattccttctaacttgttcgtgccaaccccagtgtcttcagtgagaccccagggacgttcgggacggaatgatggcctcctcgctctctcatccccagatgcagaagaaccacagcttccagacgggactggcagggaagggcctgcagcagctaggggcctggccaatccagagcctgccccagagcccaaggttttaagctctgcagcgtcactccctggctctgaactcccctcctccaggcctgagggttcccagggaggagagctttcgcgctgtagttcaatgagttcattatcacgtgaagtgagccagcattttaatcaggctcctggcgacctccctgctgcagggggccctcccagcggggccatgcccttctacaaccctgctcagctggcacaggcctgcgccacctccgggagctcaaggctagggaggattggccagaggaagcacctggtgctgaactaggcttgccctgctgtgaacttgcacttggagccctgacgctgctgttctccccgaagaacccgaccgacctccgcgatctccgtcccgcccccagggagacacagcagtgactcagagctggtcgcacactgtgcctccctcctcaccgcccatcgtaatgaattattttgaaaattaattccaccatcctttcagattctggatggaaagactgaatctttgactcagaattgtttgccgaaaagaatgatgtgactttcttagtcatttaggatgatttaaggatatagtattcctggtcatttaagaatgttcattcattgaagccggagctgtctctgccacaggagagccacatggtcggtagtaaccagggcctctccaagcccagctgtgagtcactgcccagtgagtcccgcgcttcctttaaggtgctgggagcaaagagagggtgactgaggcagaccccaacccctgctctgcaccatctgggccctcgccgtgtttgaacctggctgaatgagtggagggcgctgtgttctcaatcagcgcctccgaggagccgtggggttccttcggcattagttcacggtttttgagagaggccttagttactgcagtgaatttctttcctgttgcaaagacgcttccagcctcactttactttctgtggcctgatgaggaccatgggtgattttgtgtacccaaagcgctggggactgcccaccgtgtggcccagtcactgggaaggagccccagagagccggctgtctgacatgatggctcagggtggtcatccaggttgaaaactgaccgtgtgatgtttgatttgggcttcatttcgtgtgtaggagcacggttagactcactgttaaggaagctggatgcacttctctaaaaggctgcactttccgtgagcacttttcgtggtacaatccacatgacccactttctcccctgggggacgttggttcagaggttggtagcacttggggagagtatcttaacacagtttcttgacagcagctctggaacttagtatttctgccccgagttttgccacactgagactttgagtagctcctggtggactcaaccctgttcaactcagagacgggcctcctctcactgatgcaaagctttaaggcttctctgactgttctgaaactcttcgtattcttgtcaagtctaaagagactgaagaaaagatttaaatactaataaaaatcagtagataatttctgtaggttctgctggaggaatacaaactgtttggtgttttaaatttaagtgtagaaattgtagaatgtggaattagcacagatccttcctggctttctgtttcacttgatcatttagcccagaccacccaggatgttttccaaaatgttccacaggcgtgtcccgctggatccatttgtccttgtcacttggagaaaggccagtccctgtgacggggcagccctctctgtccctcggtcagctcgtgtgaatcctgggacctcttccggtcggctctgcccgctgttctggggtcgactgccacgacttttgattcaagaagcttcctccaggcgggagcggctatttttcctaaatgagaattgttacattgcaaattgttgaataaaatattttgcgctccttcaagc

SEQ ID NO: 179245 - DNA, 8806 bp, Homo sapiens
  Payload ID: 15331
  Gene Symbol: SEC16A
  Gene Name: SEC16 homolog A, endoplasmic reticulum export factor
  ENST ID: ENST00000313050
  CDS Start-End: 75-7148
tccagctccaattaaggaacagctatatcctgcttccttctgtaagcagcatcgacttgtgcaagggttcagtcatgcagccaccgccccagacggtcccgtctggcatggctgggccacctccagccgggaatcctcggagcgtgttctgggctagcagcccttacaggagacgggctaataataatgcagcagtggctccgacaacttgcccgttgcagccggtcacggatccatttgcttttagtagacaggcgctccaaagtacaccactgggcagttcgtccaaaagcagtccacctgtcttgcaaggcccagcccccgcagggttttctcagcaccccggtttgcttgttcctcacacacatgccagagatagctctcagggaccctgtgagcccctgcctggacctctgacacagcccagagcacatgccagtccgttttctggtgcattgacaccttcagcacctcctgggcctgagatgaacaggagtgcagaggtcggtcccagttcagagcctgaagttcagactctgccatatcttcctcactacattccaggagtggatcctgaaacgtctcatgggggccaccctcatgggaacatgcctgggctcgaccgacccctgagcaggcaaaacccacatgacggtgtggtcaccccagcagcatccccttccctccctcagcctggtctgcagatgccaggacagtgggggccagtgcagggaggcccacagccctcggggcaacatcgttcaccctgccctgaaggacctgttcccagcggggtgccctgtgccaccagcgttcctcatttccccaccccgtccatcctacatcagggccctggtcatgagcaacacagccctctggtggctcccccagcagccttgcccagtgacggaagagacgaggtgagccacttgcaaagtggaagccacctggccaataactctgatcctgaaagtacattcaggcaaaatcccagaattgtgaatcactgggcaagcccagagctcaggcagaatccaggagtgaagaatgagcaccggcccgcctctgctcttgtgaaccccctcgcccggggagatagcccagaaaaccgtacgcaccacccactgggggctggggccgggtctggctgtgccccgctagaagcagactcaggagcttcaggagctctggcgatgtttttccaagggggagagacagaaaatgaggagaatctctcatctgaaaaagcaggcttatctggtcaagcggactttgacgatttctgctccagccctgggctaggccgtccgcccgcacctacacacgtgggggcaggcagcctctgccaggcccttctcccaggccccagcaatgaggctgctggtgatgtgtggggtgacacagcgagcacaggggtgccggatgccagcggctcgcagtatgagaatgttgagaacttagaatttgttcagaatcaagaagttctgccaagtgagcccctcaatttggacccttcctccccgagtgaccagttcagatatgggccccttcctgggccagctgtgcccaggcatggtgctgtgtgccacaccggagcccctgatgccacactgcatacagtgcaccctgacagcgtgtcatccagctatagcagcagaagccacggaaggctctcaggctcagccaggccccaggagctggttggcacattcattcagcaagaagttggaaaacccgaggatgaagcttcaggtagtttttttaagcaaatcgattcttctcccgtaggaggtgaaacagacgagaccactgtgagccagaattaccgtggcagcgtgtcccagccctcaaccccgagccccccgaaacctacaggaatatttcagacaagtgcaaatagttctttcgaaccggtaaaatctcacttagttggggtaaaaccatttgaggcagatcgcgccaacgtggttggtgaagtaagggagacctgtgtccgccagaagcagtgcagaccagctgccgccctgcccgatgcttcccctggcaacctggagcagccaccagacaacatggagaccctctgtgcaccccaggtctgtcccctgcctcttaactccaccacggaagctgtgcacatgcttccgcacgcaggggcaccgcccttggatactgtgtatccagcacccgagaagaggccttcagccaggacccaggggcccgtgaagtgtgagagcccagcaacgactctgtgggcgcaaagtgagctgccagattttggaggcaacgtccttctggcccctgcagccccggcgctttatgtgtgtgcaaaacctcagccacctgttgttcagcctccagaagaggcgatgtccgggcagcagtcacggaacccaagctcggcggccccggtgcagagccgaggtggcattggtgcttctgagaaccttgagaatcctcccaaaatgggagaggaggaggcccttcagtcccaggcgagttctggttatgcaagtttattatcctcaccgcccactgagtctctgcagaatcctccagtcttgattgctcagcctgatcacagctataatctggctcagcccattaacttttctgtgtccttatcgaactctcatgagaagaatcagtcctggagagaggctttggtgggggatagacctgcagtcagcagttgggctctcggtggtgattctggggagaacacttctttgtctgggattccaaccagctctgtccttagcttgtctctgcctagcagtgttgcccaaagtaattttccacaaggttctggtgcttccgaaatggtttctaatcagcctgctaatttgctggttcaaccaccatcccagccagttccagagaacttggttccagaaagtcaaaaggatcgtaaggcaggaagtgctcttcccggatttgctaatagccctgctggaagcacaagtgtggtgttagttccacctgcacacggcaccctggtgcctgatggtaataaggcaaaccattccagtcatcaggaagacacttacggagccctagactttaccttaagcaggactttggaaaatcctgtaaacgtgtacaacccgtcccattctgacagcctcgcttctcagcaaagtgttgccagtcatcccagacaatctgggcctggggcgcctaaccttgaccgtttttatcagcaggtcacgaaagatgcccagggccagcctggcctcgaaagagcccagcaggagctggtgccaccccagcaacaggcttctcccccacaactacccaaagccatgttttcggagctgtcaaatccagaaagtctgcccgcacagggacaggcccagaactcagcacagtcaccagcaagtctggttctggtcgacgcgggtcagcagctgccccctcggcctcctcagtcctctagcgtgtctctggtgtccagtggctccggccaggcagctgtgccgtcagagcagccgtggccacagccagtgcctgcacttgcccccggcccaccgcctcaggacctggccgcctactactactaccggcctttgtacgatgcctaccagcctcagtactctttgccgtacccaccggagcctggcgcagcctccctctattaccaggatgtctacagcctctatgagcctcgatacaggccctatgatggtgctgcgtctgcttacgcccagaactaccgctatcccgagcccgagcggcccagctcccgagccagccactcctcggaacggccacctcccaggcaaggatatcctgaaggatactatagttccaaaagtggatggagcagtcagagcgattactatgcaagctattactccagccagtacgattatggagatccaggtcactgggatcgttaccactacagtgctagagtcagggacccccgcacctatgaccggaggtattggtgtgatgcagagtatgacgcatacaggagagagcactctgccttcggggacaggcccgagaaacgtgacaacaactggaggtacgatcctcgcttcacggggagttttgacgatgaccccgatccgcacagagacccttatggggaagaggtggaccggcgcagcgtccacagcgagcactcggcacggagcctgcacagcgcacacagcctggccagccgccgcagcagcctcagctcccactcgcaccagagtcagatttacagaagccacaatgtggctgccggttcctacgaggccccgcttcctccaggctcctttcacggcgattttgcctacggcacctaccgcagcaatttcagcagtggccccggcttcccagagtatggctaccctgccgacaccgtctggcctgccatggagcaagtttcatcaagaccaacttctcctgaaaaattttcagtgcctcatgtctgtgccaggtttggccctggcggtcagcttatcaaagtgattcccaatctgccttcagaaggacagccggccttggtggaggtccacagcatggaggccttgctgcagcacacgtctgagcaggaggagatgcgggcgttcccgggacccctggccaaagacgacacccataaggtggatgtcattaattttgcacagaacaaagctatgaaatgtttgcagaatgaaaacttaattgacaaagagtctgcaagtcttctttggaattttattgttctcttatgcagacaaaatgggaccgtggtagggaccgacattgcggagcttctgttacgagaccacagaacagtgtggcttcctgggaagtcgcccaatgaagcaaacctgattgatttcacgaatgaggcagtggagcaggtggaagaggaggagtctggtgaggcccagctctctttcctcactggtggtccggcggctgccgccagctcgctcgagagagagaccgagaggttcagggagctgttgctgtatggccgtaagaaggatgctttggagtctgcaatgaagaatggcctgtggggtcacgctctgctacttgcaagtaagatggacagccggacacacgcccgagtcatgaccaggtttgctaacagcctcccaatcaacgaccctctgcagacagtctaccagctcatgtccggacggatgcctgccgcgtccacgtgctgtggagacgagaaatggggagattggaggccgcacctcgccatggtcttgtccaacttgaacaacaacatggacgtcgagtccaggacgatggctaccatgggcgacactctggcttcaaggggcctcttggatgcggcccacttctgctacctcatggcccaggcgggatttggtgtttacacgaagaaaactacaaagcttgtcttaatcggatccaatcacagtttgccattcttaaagttcgcaaccaacgaagcaatccagaggacggaagcctatgagtacgcccagtccctgggtgccgagacctgccccctgcctagtttccaggtgtttaagttcatctactcctgccgcctggcggaaatggggctggccacgcaagccttccactactgtgaggccatcgcgaagagcatcctgacgcagccgcacctgtattccccggtgttgatcagccagcttgtgcagatggcttcccagttacgactcttcgatccccagctgaaagagaagccagaagaggagtccttggccgcacccacgtggctggttcacctgcagcaggtggagcggcagattaaggagggggctggagtatggcatcaggatggagccctcccgcagcagtgtcctggcactccgagttccgagatggagcagttggacaggccaggactcagtcagccaggagccctggggatcgccaaccctctgctggcggtgcctgcaccgagccctgagcactcgagcccgagcgtgcggctgctgccctcagctccgcagacgctccctgacggcccattggccagtcctgccagagtgccgatgttcccagtgccactgcccccggggcccctggagccgggtcctggctgtgtgaccccagggcctgcacttggcttcctggagccctccgggcctggcctcccacctggtgtgccacctctgcaggaaaggagacacttgctccaggaagccaggagcccagacccagggatagtgccgcaggaggcgcctgttggaaactcactttccgagctaagcgaagaaaattttgatggaaaatttgctaatctgaccccctcgaggacggtgccagactcggaggcccccccagggtgggatcgtgccgactcgggtcccacgcagccacctctgtctctctcacccgctcccgaaacaaagagacccggacaggcagccaagaaagaaacgaaggaacctaagaagggtgaatcctggttctttcgttggctacctggaaagaaaaagacagaagcttatttgccagatgacaagaacaaatcgattgtttgggatgaaaagaaaaaccagtgggtgaatttaaatgagccagaagaggagaagaaagccccgcccccacctccaacctcgatgcccaagactgtgcaagctgccccgcctgccctcccagggcctcctggagcccccgtgaacatgtactctagaagagcagcaggaaccagagctcgctacgttgacgtcctgaacccaagcgggacccagcggagcgagccggctctcgctcctgcggactttgtcgctccactcgcgccactcccaattccttctaacttgttcgtgccaaccccagatgcagaagaaccacagcttccagacgggactggcagggaagggcctgcagcagctaggggcctggccaatccagagcctgccccagagcccaaggttttaagctctgcagcgtcactccctggctctgaactcccctcctccaggcctgagggttcccagggaggagagctttcgcgctgtagttcaatgagttcattatcacgtgaagtgagccagcattttaatcaggctcctggcgacctccctgctgcagggggccctcccagcggggccatgcccttctacaaccctgctcagctggcacaggcctgcgccacctccgggagctcaaggctagggaggattggccagaggaagcacctggtgctgaactaggcttgccctgctgtgaacttgcacttggagccctgacgctgctgttctccccgaagaacccgaccgacctccgcgatctccgtcccgcccccagggagacacagcagtgactcagagctggtcgcacactgtgcctccctcctcaccgcccatcgtaatgaattattttgaaaattaattccaccatcctttcagattctggatggaaagactgaatctttgactcagaattgtttgccgaaaagaatgatgtgactttcttagtcatttaggatgatttaaggatatagtattcctggtcatttaagaatgttcattcattgaagccggagctgtctctgccacaggagagccacatggtcggtagtaaccagggcctctccaagcccagctgtgagtcactgcccagtgagtcccgcgcttcctttaaggtgctgggagcaaagagagggtgactgaggcagaccccaacccctgctctgcaccatctgggccctcgccgtgtttgaacctggctgaatgagtggagggcgctgtgttctcaatcagcgcctccgaggagccgtggggttccttcggcattagttcacggtttttgagagaggccttagttactgcagtgaatttctttcctgttgcaaagacgcttccagcctcactttactttctgtggcctgatgaggaccatgggtgattttgtgtacccaaagcgctggggactgcccaccgtgtggcccagtcactgggaaggagccccagagagccggctgtctgacatgatggctcagggtggtcatccaggttgaaaactgaccgtgtgatgtttgatttgggcttcatttcgtgtgtaggagcacggttagactcactgttaaggaagctggatgcacttctctaaaaggctgcactttccgtgagcacttttcgtggtacaatccacatgacccactttctcccctgggggacgttggttcagaggttggtagcacttggggagagtatcttaacacagtttcttgacagcagctctggaacttagtatttctgccccgagttttgccacactgagactttgagtagctcctggtggactcaaccctgttcaactcagagacgggcctcctctcactgatgcaaagctttaaggcttctctgactgttctgaaactcttcgtattcttgtcaagtctaaagagactgaagaaaagatttaaatactaataaaaatcagtagataatttctgtaggttctgctggaggaatacaaactgtttggtgttttaaatttaagtgtagaaattgtagaatgtggaattagcacagatccttcctggctttctgtttcacttgatcatttagcccagaccacccaggatgttttccaaaatgttccacaggcgtgtcccgctggatccatttgtccttgtcacttggagaaaggccagtccctgtgacggggcagccctctctgtccctcggtcagctcgtgtgaatcctgggacctcttccggtcggctctgcccgctgttctggggtcgactgccacgacttttgattcaagaagcttcctccaggcgggagcggctatttttcctaaatgagaattgttacattgcaaattgttgaataaaatattttgcgctccttcaagcaccttc

SEQ ID NO: 179246 - DNA, 8093 bp, Homo sapiens
  Payload ID: 15331
  Gene Symbol: SEC16A
  Gene Name: SEC16 homolog A, endoplasmic reticulum export factor
  Uniprot ID: O15027
  ENST ID: ENST00000371706
  CDS Start-End: 35-6439
tgaaacgtctcatgggggccaccctcatgggaacatgcctgggctcgaccgacccctgagcaggcaaaacccacatgacggtgtggtcaccccagcagcatccccttccctccctcagcctggtctgcagatgccaggacagtgggggccagtgcagggaggcccacagccctcggggcaacatcgttcaccctgccctgaaggacctgttcccagcggggtgccctgtgccaccagcgttcctcatttccccaccccgtccatcctacatcagggccctggtcatgagcaacacagccctctggtggctcccccagcagccttgcccagtgacggaagagacgaggtgagccacttgcaaagtggaagccacctggccaataactctgatcctgaaagtacattcaggcaaaatcccagaattgtgaatcactgggcaagcccagagctcaggcagaatccaggagtgaagaatgagcaccggcccgcctctgctcttgtgaaccccctcgcccggggagatagcccagaaaaccgtacgcaccacccactgggggctggggccgggtctggctgtgccccgctagaagcagactcaggagcttcaggagctctggcgatgtttttccaagggggagagacagaaaatgaggagaatctctcatctgaaaaagcaggcttatctggtcaagcggactttgacgatttctgctccagccctgggctaggccgtccgcccgcacctacacacgtgggggcaggcagcctctgccaggcccttctcccaggccccagcaatgaggctgctggtgatgtgtggggtgacacagcgagcacaggggtgccggatgccagcggctcgcagtatgagaatgttgagaacttagaatttgttcagaatcaagaagttctgccaagtgagcccctcaatttggacccttcctccccgagtgaccagttcagatatgggccccttcctgggccagctgtgcccaggcatggtgctgtgtgccacaccggagcccctgatgccacactgcatacagtgcaccctgacagcgtgtcatccagctatagcagcagaagccacggaaggctctcaggctcagccaggccccaggagctggttggcacattcattcagcaagaagttggaaaacccgaggatgaagcttcaggtagtttttttaagcaaatcgattcttctcccgtaggaggtgaaacagacgagaccactgtgagccagaattaccgtggcagcgtgtcccagccctcaaccccgagccccccgaaacctacaggaatatttcagacaagtgcaaatagttctttcgaaccggtaaaatctcacttagttggggtaaaaccatttgaggcagatcgcgccaacgtggttggtgaagtaagggagacctgtgtccgccagaagcagtgcagaccagctgccgccctgcccgatgcttcccctggcaacctggagcagccaccagacaacatggagaccctctgtgcaccccaggtctgtcccctgcctcttaactccaccacggaagctgtgcacatgcttccgcacgcaggggcaccgcccttggatactgtgtatccagcacccgagaagaggccttcagccaggacccaggggcccgtgaagtgtgagagcccagcaacgactctgtgggcgcaaagtgagctgccagattttggaggcaacgtccttctggcccctgcagccccggcgctttatgtgtgtgcaaaacctcagccacctgttgttcagcctccagaagaggcgatgtccgggcagcagtcacggaacccaagctcggcggccccggtgcagagccgaggtggcattggtgcttctgagaaccttgagaatcctcccaaaatgggagaggaggaggcccttcagtcccaggcgagttctggttatgcaagtttattatcctcaccgcccactgagtctctgcagaatcctccagtcttgattgctcagcctgatcacagctataatctggctcagcccattaacttttctgtgtccttatcgaactctcatgagaagaatcagtcctggagagaggctttggtgggggatagacctgcagtcagcagttgggctctcggtggtgattctggggagaacacttctttgtctgggattccaaccagctctgtccttagcttgtctctgcctagcagtgttgcccaaagtaattttccacaaggttctggtgcttccgaaatggtttctaatcagcctgctaatttgctggttcaaccaccatcccagccagttccagagaacttggttccagaaagtcaaaaggatcgtaaggcaggaagtgctcttcccggatttgctaatagccctgctggaagcacaagtgtggtgttagttccacctgcacacggcaccctggtgcctgatggtaataaggcaaaccattccagtcatcaggaagacacttacggagccctagactttaccttaagcaggactttggaaaatcctgtaaacgtgtacaacccgtcccattctgacagcctcgcttctcagcaaagtgttgccagtcatcccagacaatctgggcctggggcgcctaaccttgaccgtttttatcagcaggtcacgaaagatgcccagggccagcctggcctcgaaagagcccagcaggagctggtgccaccccagcaacaggcttctcccccacaactacccaaagccatgttttcggagctgtcaaatccagaaagtctgcccgcacagggacaggcccagaactcagcacagtcaccagcaagtctggttctggtcgacgcgggtcagcagctgccccctcggcctcctcagtcctctagcgtgtctctggtgtccagtggctccggccaggcagctgtgccgtcagagcagccgtggccacagccagtgcctgcacttgcccccggcccaccgcctcaggacctggccgcctactactactaccggcctttgtacgatgcctaccagcctcagtactctttgccgtacccaccggagcctggcgcagcctccctctattaccaggatgtctacagcctctatgagcctcgatacaggccctatgatggtgctgcgtctgcttacgcccagaactaccgctatcccgagcccgagcggcccagctcccgagccagccactcctcggaacggccacctcccaggcaaggatatcctgaaggatactatagttccaaaagtggatggagcagtcagagcgattactatgcaagctattactccagccagtacgattatggagatccaggtcactgggatcgttaccactacagtgctagagtcagggacccccgcacctatgaccggaggtattggtgtgatgcagagtatgacgcatacaggagagagcactctgccttcggggacaggcccgagaaacgtgacaacaactggaggtacgatcctcgcttcacggggagttttgacgatgaccccgatccgcacagagacccttatggggaagaggtggaccggcgcagcgtccacagcgagcactcggcacggagcctgcacagcgcacacagcctggccagccgccgcagcagcctcagctcccactcgcaccagagtcagatttacagaagccacaatgtggctgccggttcctacgaggccccgcttcctccaggctcctttcacggcgattttgcctacggcacctaccgcagcaatttcagcagtggccccggcttcccagagtatggctaccctgccgacaccgtctggcctgccatggagcaagtttcatcaagaccaacttctcctgaaaaattttcagtgcctcatgtctgtgccaggtttggccctggcggtcagcttatcaaagtgattcccaatctgccttcagaaggacagccggccttggtggaggtccacagcatggaggccttgctgcagcacacgtctgagcaggaggagatgcgggcgttcccgggacccctggccaaagacgacacccataaggtggatgtcattaattttgcacagaacaaagctatgaaatgtttgcagaatgaaaacttaattgacaaagagtctgcaagtcttctttggaattttattgttctcttatgcagacaaaatgggaccgtggtagggaccgacattgcggagcttctgttacgagaccacagaacagtgtggcttcctgggaagtcgcccaatgaagcaaacctgattgatttcacgaatgaggcagtggagcaggtggaagaggaggagtctggtgaggcccagctctctttcctcactggtggtccggcggctgccgccagctcgctcgagagagagaccgagaggttcagggagctgttgctgtatggccgtaagaaggatgctttggagtctgcaatgaagaatggcctgtggggtcacgctctgctacttgcaagtaagatggacagccggacacacgcccgagtcatgaccaggtttgctaacagcctcccaatcaacgaccctctgcagacagtctaccagctcatgtccggacggatgcctgccgcgtccacgtgctgtggagacgagaaatggggagattggaggccgcacctcgccatggtcttgtccaacttgaacaacaacatggacgtcgagtccaggacgatggctaccatgggcgacactctggcttcaaggggcctcttggatgcggcccacttctgctacctcatggcccaggcgggatttggtgtttacacgaagaaaactacaaagcttgtcttaatcggatccaatcacagtttgccattcttaaagttcgcaaccaacgaagcaatccagaggacggaagcctatgagtacgcccagtccctgggtgccgagacctgccccctgcctagtttccaggtgtttaagttcatctactcctgccgcctggcggaaatggggctggccacgcaagccttccactactgtgaggccatcgcgaagagcatcctgacgcagccgcacctgtattccccggtgttgatcagccagcttgtgcagatggcttcccagttacgactcttcgatccccagctgaaagagaagccagaagaggagtccttggccgcacccacgtggctggttcacctgcagcaggtggagcggcagattaaggagggggctggagtatggcatcaggatggagccctcccgcagcagtgtcctggcactccgagttccgagatggagcagttggacaggccaggactcagtcagccaggagccctggggatcgccaaccctctgctggcggtgcctgcaccgagccctgagcactcgagcccgagcgtgcggctgctgccctcagctccgcagacgctccctgacggcccattggccagtcctgccagagtgccgatgttcccagtgccactgcccccggggcccctggagccgggtcctggctgtgtgaccccagggcctgcacttggcttcctggagccctccgggcctggcctcccacctggtgtgccacctctgcaggaaaggagacacttgctccaggaagccaggagcccagacccagggatagtgccgcaggaggcgcctgttggaaactcactttccgagctaagcgaagaaaattttgatggaaaatttgctaatctgaccccctcgaggacggtgccagactcggaggcccccccagggtgggatcgtgccgactcgggtcccacgcagccacctctgtctctctcacccgctcccgaaacaaagagacccggacaggcagccaagaaagaaacgaaggaacctaagaagggtgaatcctggttctttcgttggctacctggaaagaaaaagacagaagcttatttgccagatgacaagaacaaatcgattgtttgggatgaaaagaaaaaccagtgggtgaatttaaatgagccagaagaggagaagaaagccccgcccccacctccaacctcgatgcccaagactgtgcaagctgccccgcctgccctcccagggcctcctggagcccccgtgaacatgtactctagaagagcagcaggaaccagagctcgctacgttgacgtcctgaacccaagcgggacccagcggagcgagccggctctcgctcctgcggactttgtcgctccactcgcgccactcccaattccttctaacttgttcgtgccaaccccagatgcagaagaaccacagcttccagacgggactggcagggaagggcctgcagcagctaggggcctggccaatccagagcctgccccagagcccaaggctcctggcgacctccctgctgcagggggccctcccagcggggccatgcccttctacaaccctgctcagctggcacaggcctgcgccacctccgggagctcaaggctagggaggattggccagaggaagcacctggtgctgaactaggcttgccctgctgtgaacttgcacttggagccctgacgctgctgttctccccgaagaacccgaccgacctccgcgatctccgtcccgcccccagggagacacagcagtgactcagagctggtcgcacactgtgcctccctcctcaccgcccatcgtaatgaattattttgaaaattaattccaccatcctttcagattctggatggaaagactgaatctttgactcagaattgtttgccgaaaagaatgatgtgactttcttagtcatttaggatgatttaaggatatagtattcctggtcatttaagaatgttcattcattgaagccggagctgtctctgccacaggagagccacatggtcggtagtaaccagggcctctccaagcccagctgtgagtcactgcccagtgagtcccgcgcttcctttaaggtgctgggagcaaagagagggtgactgaggcagaccccaacccctgctctgcaccatctgggccctcgccgtgtttgaacctggctgaatgagtggagggcgctgtgttctcaatcagcgcctccgaggagccgtggggttccttcggcattagttcacggtttttgagagaggccttagttactgcagtgaatttctttcctgttgcaaagacgcttccagcctcactttactttctgtggcctgatgaggaccatgggtgattttgtgtacccaaagcgctggggactgcccaccgtgtggcccagtcactgggaaggagccccagagagccggctgtctgacatgatggctcagggtggtcatccaggttgaaaactgaccgtgtgatgtttgatttgggcttcatttcgtgtgtaggagcacggttagactcactgttaaggaagctggatgcacttctctaaaaggctgcactttccgtgagcacttttcgtggtacaatccacatgacccactttctcccctgggggacgttggttcagaggttggtagcacttggggagagtatcttaacacagtttcttgacagcagctctggaacttagtatttctgccccgagttttgccacactgagactttgagtagctcctggtggactcaaccctgttcaactcagagacgggcctcctctcactgatgcaaagctttaaggcttctctgactgttctgaaactcttcgtattcttgtcaagtctaaagagactgaagaaaagatttaaatactaataaaaatcagtagataatttctgtaggttctgctggaggaatacaaactgtttggtgttttaaatttaagtgtagaaattgtagaatgtggaattagcacagatccttcctggctttctgtttcacttgatcatttagcccagaccacccaggatgttttccaaaatgttccacaggcgtgtcccgctggatccatttgtccttgtcacttggagaaaggccagtccctgtgacggggcagccctctctgtccctcggtcagctcgtgtgaatcctgggacctcttccggtcggctctgcccgctgttctggggtcgactgccacgacttttgattcaagaagcttcctccaggcgggagcggctatttttcctaaatgagaattgttacattgcaaattgttgaataaaatattttgcgctccttcaagcac

SEQ ID NO: 179247 - DNA, 6465 bp, Homo sapiens
  Payload ID: 15331
  Gene Symbol: SEC16A
  Gene Name: SEC16 homolog A, endoplasmic reticulum export factor
  Uniprot ID: O15027
  ENST ID: ENST00000431893
  CDS Start-End: 1-6465
atgcctgggctcgaccgacccctgagcaggcaaaacccacatgacggtgtggtcaccccagcagcatccccttccctccctcagcctggtctgcagatgccaggacagtgggggccagtgcagggaggcccacagccctcggggcaacatcgttcaccctgccctgaaggacctgttcccagcggggtgccctgtgccaccagcgttcctcatttccccaccccgtccatcctacatcagggccctggtcatgagcaacacagccctctggtggctcccccagcagccttgcccagtgacggaagagacgaggtgagccacttgcaaagtggaagccacctggccaataactctgatcctgaaagtacattcaggcaaaatcccagaattgtgaatcactgggcaagcccagagctcaggcagaatccaggagtgaagaatgagcaccggcccgcctctgctcttgtgaaccccctcgcccggggagatagcccagaaaaccgtacgcaccacccactgggggctggggccgggtctggctgtgccccgctagaagcagactcaggagcttcaggagctctggcgatgtttttccaagggggagagacagaaaatgaggagaatctctcatctgaaaaagcaggcttatctggtcaagcggactttgacgatttctgctccagccctgggctaggccgtccgcccgcacctacacacgtgggggcaggcagcctctgccaggcccttctcccaggccccagcaatgaggctgctggtgatgtgtggggtgacacagcgagcacaggggtgccggatgccagcggctcgcagtatgagaatgttgagaacttagaatttgttcagaatcaagaagttctgccaagtgagcccctcaatttggacccttcctccccgagtgaccagttcagatatgggccccttcctgggccagctgtgcccaggcatggtgctgtgtgccacaccggagcccctgatgccacactgcatacagtgcaccctgacagcgtgtcatccagctatagcagcagaagccacggaaggctctcaggctcagccaggccccaggagctggttggcacattcattcagcaagaagttggaaaacccgaggatgaagcttcaggtagtttttttaagcaaatcgattcttctcccgtaggaggtgaaacagacgagaccactgtgagccagaattaccgtggcagcgtgtcccagccctcaaccccgagccccccgaaacctacaggaatatttcagacaagtgcaaatagttctttcgaaccggtaaaatctcacttagttggggtaaaaccatttgaggcagatcgcgccaacgtggttggtgaagtaagggagacctgtgtccgccagaagcagtgcagaccagctgccgccctgcccgatgcttcccctggcaacctggagcagccaccagacaacatggagaccctctgtgcaccccaggtctgtcccctgcctcttaactccaccacggaagctgtgcacatgcttccgcacgcaggggcaccgcccttggatactgtgtatccagcacccgagaagaggccttcagccaggacccaggggcccgtgaagtgtgagagcccagcaacgactctgtgggcgcaaagtgagctgccagattttggaggcaacgtccttctggcccctgcagccccggcgctttatgtgtgtgcaaaacctcagccacctgttgttcagcctccagaagaggcgatgtccgggcagcagtcacggaacccaagctcggcggccccggtgcagagccgaggtggcattggtgcttctgagaaccttgagaatcctcccaaaatgggagaggaggaggcccttcagtcccaggcgagttctggttatgcaagtttattatcctcaccgcccactgagtctctgcagaatcctccagtcttgattgctcagcctgatcacagctataatctggctcagcccattaacttttctgtgtccttatcgaactctcatgagaagaatcagtcctggagagaggctttggtgggggatagacctgcagtcagcagttgggctctcggtggtgattctggggagaacacttctttgtctgggattccaaccagctctgtccttagcttgtctctgcctagcagtgttgcccaaagtaattttccacaaggttctggtgcttccgaaatggtttctaatcagcctgctaatttgctggttcaaccaccatcccagccagttccagagaacttggttccagaaagtcaaaaggatcgtaaggcaggaagtgctcttcccggatttgctaatagccctgctggaagcacaagtgtggtgttagttccacctgcacacggcaccctggtgcctgatggtaataaggcaaaccattccagtcatcaggaagacacttacggagccctagactttaccttaagcaggactttggaaaatcctgtaaacgtgtacaacccgtcccattctgacagcctcgcttctcagcaaagtgttgccagtcatcccagacaatctgggcctggggcgcctaaccttgaccgtttttatcagcaggtcacgaaagatgcccagggccagcctggcctcgaaagagcccagcaggagctggtgccaccccagcaacaggcttctcccccacaactacccaaagccatgttttcggagctgtcaaatccagaaagtctgcccgcacagggacaggcccagaactcagcacagtcaccagcaagtctggttctggtcgacgcgggtcagcagctgccccctcggcctcctcagtcctctagcgtgtctctggtgtccagtggctccggccaggcagctgtgccgtcagagcagccgtggccacagccagtgcctgcacttgcccccggcccaccgcctcaggacctggccgcctactactactaccggcctttgtacgatgcctaccagcctcagtactctttgccgtacccaccggagcctggcgcagcctccctctattaccaggatgtctacagcctctatgagcctcgatacaggccctatgatggtgctgcgtctgcttacgcccagaactaccgctatcccgagcccgagcggcccagctcccgagccagccactcctcggaacggccacctcccaggcaaggatatcctgaaggatactatagttccaaaagtggatggagcagtcagagcgattactatgcaagctattactccagccagtacgattatggagatccaggtcactgggatcgttaccactacagtgctagagtcagggacccccgcacctatgaccggaggtattggtgtgatgcagagtatgacgcatacaggagagagcactctgccttcggggacaggcccgagaaacgtgacaacaactggaggtacgatcctcgcttcacggggagttttgacgatgaccccgatccgcacagagacccttatggggaagaggtggaccggcgcagcgtccacagcgagcactcggcacggagcctgcacagcgcacacagcctggccagccgccgcagcagcctcagctcccactcgcaccagagtcagatttacagaagccacaatgtggctgccggttcctacgaggccccgcttcctccaggctcctttcacggcgattttgcctacggcacctaccgcagcaatttcagcagtggccccggcttcccagagtatggctaccctgccgacaccgtctggcctgccatggagcaagtttcatcaagaccaacttctcctgaaaaattttcagtgcctcatgtctgtgccaggtttggccctggcggtcagcttatcaaagtgattcccaatctgccttcagaaggacagccggccttggtggaggtccacagcatggaggccttgctgcagcacacgtctgagcaggaggagatgcgggcgttcccgggacccctggccaaagacgacacccataaggtggatgtcattaattttgcacagaacaaagctatgaaatgtttgcagaatgaaaacttaattgacaaagagtctgcaagtcttctttggaattttattgttctcttatgcagacaaaatgggaccgtggtagggaccgacattgcggagcttctgttacgagaccacagaacagtgtggcttcctgggaagtcgcccaatgaagcaaacctgattgatttcacgaatgaggcagtggagcaggtggaagaggaggagtctggtgaggcccagctctctttcctcactggtggtccggcggctgccgccagctcgctcgagagagagaccgagaggttcagggagctgttgctgtatggccgtaagaaggatgctttggagtctgcaatgaagaatggcctgtggggtcacgctctgctacttgcaagtaagatggacagccggacacacgcccgagtcatgaccaggtttgctaacagcctcccaatcaacgaccctctgcagacagtctaccagctcatgtccggacggatgcctgccgcgtccacgtgctgtggagacgagaaatggggagattggaggccgcacctcgccatggtcttgtccaacttgaacaacaacatggacgtcgagtccaggacgatggctaccatgggcgacactctggcttcaaggggcctcttggatgcggcccacttctgctacctcatggcccaggcgggatttggtgtttacacgaagaaaactacaaagcttgtcttaatcggatccaatcacagtttgccattcttaaagttcgcaaccaacgaagcaatccagaggacggaagcctatgagtacgcccagtccctgggtgccgagacctgccccctgcctagtttccaggtgtttaagttcatctactcctgccgcctggcggaaatggggctggccacgcaagccttccactactgtgaggccatcgcgaagagcatcctgacgcagccgcacctgtattccccggtgttgatcagccagcttgtgcagatggcttcccagttacgactcttcgatccccagctgaaagagaagccagaagaggagtccttggccgcacccacgtggctggttcacctgcagcaggtggagcggcagattaaggagggggctggagtatggcatcaggatggagccctcccgcagcagtgtcctggcactccgagttccgagatggagcagttggacaggccaggactcagtcagccaggagccctggggatcgccaaccctctgctggcggtgcctgcaccgagccctgagcactcgagcccgagcgtgcggctgctgccctcagctccgcagacgctccctgacggcccattggccagtcctgccagagtgccgatgttcccagtgccactgcccccggggcccctggagccgggtcctggctgtgtgaccccagggcctgcacttggcttcctggagccctccgggcctggcctcccacctggtgtgccacctctgcaggaaaggagacacttgctccaggaagccaggagcccagacccagggatagtgccgcaggaggcgcctgttggaaactcactttccgagctaagcgaagaaaattttgatggaaaatttgctaatctgaccccctcgaggacggtgccagactcggaggcccccccagggtgggatcgtgccgactcgggtcccacgcagccacctctgtctctctcacccgctcccgaaacaaagagacccggacaggcagccaagaaagaaacgaaggaacctaagaagggtgaatcctggttctttcgttggctacctggaaagaaaaagacagaagcttatttgccagatgacaagaacaaatcgattgtttgggatgaaaagaaaaaccagtgggtgaatttaaatgagccagaagaggagaagaaagccccgcccccacctccaacctcgatgcccaagactgtgcaagctgccccgcctgccctcccagggcctcctggagcccccgtgaacatgtactctagaagagcagcaggaaccagagctcgctacgttgacgtcctgaacccaagcgggacccagcggagcgagccggctctcgctcctgcggactttgtcgctccactcgcgccactcccaattccttctaacttgttcgtgccaaccccagatgcagaagaaccacagcttccagacgggactggcagggaagggcctgcagcagctaggggcctggccaatccagagcctgccccagagcccaagctttcgcgctgtagttcaatgagttcattatcacgtgaagtgagccagcattttaatcaggctcctggcgacctccctgctgcagggggccctcccagcggggccatgcccttctacaaccctgctcagctggcacaggcctgcgccacctccgggagctcaaggctagggaggattggccagaggaagcacctggtgctgaactag

SEQ ID NO: 179248 - DNA, 4834 bp, Homo sapiens
  Payload ID: 15331
  Gene Symbol: SEC16A
  Gene Name: SEC16 homolog A, endoplasmic reticulum export factor
  ENST ID: ENST00000453963
  CDS Start-End: 1-3180
gctagagtcagggacccccgcacctatgaccggaggtattggtgtgatgcagagtatgacgcatacaggagagagcactctgccttcggggacaggcccgagaaacgtgacaacaactggaggtacgatcctcgcttcacggggagttttgacgatgaccccgatccgcacagagacccttatggggaagaggtggaccggcgcagcgtccacagcgagcactcggcacggagcctgcacagcgcacacagcctggccagccgccgcagcagcctcagctcccactcgcaccagagtcagatttacagaagccacaatgtggctgccggttcctacgaggccccgcttcctccaggctcctttcacggcgattttgcctacggcacctaccgcagcaatttcagcagtggccccggcttcccagagtatggctaccctgccgacaccgtctggcctgccatggagcaagtttcatcaagaccaacttctcctgaaaaattttcagtgcctcatgtctgtgccaggtttggccctggcggtcagcttatcaaagtgattcccaatctgccttcagaaggacagccggccttggtggaggtccacagcatggaggccttgctgcagcacacgtctgagcaggaggagatgcgggcgttcccgggacccctggccaaagacgacacccataaggtggatgtcattaattttgcacagaacaaagctatgaaatgtttgcagaatgaaaacttaattgacaaagagtctgcaagtcttctttggaattttattgttctcttatgcagacaaaatgggaccgtggtagggaccgacattgcggagcttctgttacgagaccacagaacagtgtggcttcctgggaagtcgcccaatgaagcaaacctgattgatttcacgaatgaggcagtggagcaggtggaagaggaggagtctggtgaggcccagctctctttcctcactggtggtccggcggctgccgccagctcgctcgagagagagaccgagaggttcagggagctgttgctgtatggccgtaagaaggatgctttggagtctgcaatgaagaatggcctgtggggtcacgctctgctacttgcaagtaagatggacagccggacacacgcccgagtcatgaccaggtttgctaacagcctcccaatcaacgaccctctgcagacagtctaccagctcatgtccggacggatgcctgccgcgtccacgtgctgtggagacgagaaatggggagattggaggccgcacctcgccatggtcttgtccaacttgaacaacaacatggacgtcgagtccaggacgatggctaccatgggcgacactctggcttcaaggggcctcttggatgcggcccacttctgctacctcatggcccaggcgggatttggtgtttacacgaagaaaactacaaagcttgtcttaatcggatccaatcacagtttgccattcttaaagttcgcaaccaacgaagcaatccagaggacggaagcctatgagtacgcccagtccctgggtgccgagacctgccccctgcctagtttccaggtgtttaagttcatctactcctgccgcctggcggaaatggggctggccacgcaagccttccactactgtgaggccatcgcgaagagcatcctgacgcagccgcacctgtattccccggtgttgatcagccagcttgtgcagatggcttcccagttacgactcttcgatccccagctgaaagagaagccagaagaggagtccttggccgcacccacgtggctggttcacctgcagcaggtggagcggcagattaaggagggggctggagtatggcatcaggatggagccctcccgcagcagtgtcctggcactccgagttccgagatggagcagttggacaggccaggactcagtcagccaggagccctggggatcgccaaccctctgctggcggtgcctgcaccgagccctgagcactcgagcccgagcgtgcggctgctgccctcagctccgcagacgctccctgacggcccattggccagtcctgccagagtgccgatgttcccagtgccactgcccccggggcccctggagccgggtcctggctgtgtgaccccagggcctgcacttggcttcctggagccctccgggcctggcctcccacctggtgtgccacctctgcaggaaaggagacacttgctccaggaagccaggagcccagacccagggatagtgccgcaggaggcgcctgttggaaactcactttccgagctaagcgaagaaaattttgatggaaaatttgctaatctgaccccctcgaggacggtgccagactcggaggcccccccagggtgggatcgtgccgactcgggtcccacgcagccacctctgtctctctcacccgctcccgaaacaaagagacccggacaggcagccaagaaagaaacgaaggaacctaagaagggtgaatcctggttctttcgttggctacctggaaagaaaaagacagaagcttatttgccagatgacaagaacaaatcgattgtttgggatgaaaagaaaaaccagtgggtgaatttaaatgagccagaagaggagaagaaagccccgcccccacctccaacctcgatgcccaagactgtgcaagctgccccgcctgccctcccagggcctcctggagcccccgtgaacatgtactctagaagagcagcaggaaccagagctcgctacgttgacgtcctgaacccaagcgggacccagcggagcgagccggctctcgctcctgcggactttgtcgctccactcgcgccactcccaattccttctaacttgttcgtgccaaccccagatgcagaagaaccacagcttccagacgggactggcagggaagggcctgcagcagctaggggcctggccaatccagagcctgccccagagcccaaggttttaagctctgcagcgtcactccctggctctgaactcccctcctccaggcctgagggttcccagggaggagaggctcctggcgacctccctgctgcagggggccctcccagcggggccatgcccttctacaaccctgctcagctggcacaggcctgcgccacctccgggagctcaaggctagggaggattggccagaggaagcacctggtgctgaactaggcttgccctgctgtgaacttgcacttggagccctgacgctgctgttctccccgaagaacccgaccgacctccgcgatctccgtcccgcccccagggagacacagcagtgactcagagctggtcgcacactgtgcctccctcctcaccgcccatcgtaatgaattattttgaaaattaattccaccatcctttcagattctggatggaaagactgaatctttgactcagaattgtttgccgaaaagaatgatgtgactttcttagtcatttaggatgatttaaggatatagtattcctggtcatttaagaatgttcattcattgaagccggagctgtctctgccacaggagagccacatggtcggtagtaaccagggcctctccaagcccagctgtgagtcactgcccagtgagtcccgcgcttcctttaaggtgctgggagcaaagagagggtgactgaggcagaccccaacccctgctctgcaccatctgggccctcgccgtgtttgaacctggctgaatgagtggagggcgctgtgttctcaatcagcgcctccgaggagccgtggggttccttcggcattagttcacggtttttgagagaggccttagttactgcagtgaatttctttcctgttgcaaagacgcttccagcctcactttactttctgtggcctgatgaggaccatgggtgattttgtgtacccaaagcgctggggactgcccaccgtgtggcccagtcactgggaaggagccccagagagccggctgtctgacatgatggctcagggtggtcatccaggttgaaaactgaccgtgtgatgtttgatttgggcttcatttcgtgtgtaggagcacggttagactcactgttaaggaagctggatgcacttctctaaaaggctgcactttccgtgagcacttttcgtggtacaatccacatgacccactttctcccctgggggacgttggttcagaggttggtagcacttggggagagtatcttaacacagtttcttgacagcagctctggaacttagtatttctgccccgagttttgccacactgagactttgagtagctcctggtggactcaaccctgttcaactcagagacgggcctcctctcactgatgcaaagctttaaggcttctctgactgttctgaaactcttcgtattcttgtcaagtctaaagagactgaagaaaagatttaaatactaataaaaatcagtagataatttctgtaggttctgctggaggaatacaaactgtttggtgttttaaatttaagtgtagaaattgtagaatgtggaattagcacagatccttcctggctttctgtttcacttgatcatttagcccagaccacccaggatgttttccaaaatgttccacaggcgtgtcccgctggatccatttgtccttgtcacttggagaaaggccagtccctgtgacggggcagccctctctgtccctcggtcagctcgtgtgaatcctgggacctcttccggtcggctctgcccgctgttctggggtcgactgccacgacttttgattcaagaagcttcctccaggcgggagcggctatttttcctaaatgagaattgttacattgcaaattgttgaataaaatattttgcgctccttcaagcac

SEQ ID NO: 179249 - DNA, 3985 bp, Homo sapiens
  Payload ID: 15332
  Gene Symbol: SEC16B
  Gene Name: SEC16 homolog B, endoplasmic reticulum export factor
  Uniprot ID: Q96JE7
  ENST ID: ENST00000308284
  CDS Start-End: 91-3273
cgctgaaggaaggtgggaagccatcagagcaggaagataaaataactgcacaacttactcaaaacccaggacaaattcagagagtcaaggatggaactttgggctccccagaggctgccccagacacgagggaaggccacagcaccctcaaaggatccagaccgagggtttcggagagatggacatcatcggcctgtccctcactcttggcacaatggagagaggtttcaccaatggcaagacaaccgtgggagcccccagccacagcaggagcccagggcagaccatcagcagcagccccattatgcatccaggccaggggactggcatcagcctgtgtctggagttgactattacgaaggtggttatcgcaatcagttgtattcaaggccaggttatgagaattcatatcagagctatcagtctcccacaatgagggaggaatatgcttatggaagttattactatcatggacacccacagtggctgcaggaagaaagagtgccaaggcaacggagtccttatatctggcacgaagattaccgagagcaaaagtaccttgatgaacatcattatgaaaaccagcacagtccatttggaacaaatagtgagacccacttccaatctaacagtaggaacccttgtaaagacagccctgcttccaactctggacaggagtggccgggggagctgtttccagggagcctgcttgctgaggcccagaaaaataagccatcattggctagtgagtccaaccttctccagcagcgtgagtctggtctcagctccagcagctatgagctcagtcagtacatcagagatgccccggagcgggatgatcccccagcttcagcagcttggagtccagttcaggctgatgtctcctcagctggtcccaaagcacccatgaagttctacatccctcatgttcctgtgagtttcgggccaggaggtcagctggtgcatgtaggtcccagctctcccactgacgggcaagcagcccttgttgaactgcacagcatggaggttattcttaatgattccgaagagcaagaggagatgagaagtttctcaggacccttgattagggaagatgtacataaggtggatattatgacgttttgccagcagaaagcagctcagagctgcaaatctgagacactggggagcagagactcagctctactgtggcagctcttggttctcctttgtcgccagaatgggtccatggtggggtctgacatcgctgagctgctaatgcaagactgcaagaagctggagaagtacaagcggcagccccctgtggccaacctcatcaacctgaccgatgaggactggccagtgctgagctctgggaccccgaacctgctcacgggagagatcccccccagtgtggagacacctgcgcagatcgtggagaaattcactaggctgctctactatggaaggaagaaggaagccttggagtgggccatgaagaaccacttgtggggccatgctttgttcctgtccagcaagatggacccacagacctacagctgggtcatgagtggcttcaccagcacgctggcgctcaatgacccactgcagaccctcttccagctcatgtcggggaggattccacaggcagccacgtgttgtggagaaaagcagtggggagactggaggcctcacttggctgtgattctgtcgaatcaggctggggacccagagctgtatcagcgtgcgattgttgccattggggacaccctggctgggaaggggcttgtggaggcagctcacttctgctatctcatggctcacgtgccctttggccactacaccgtgaagacagaccatctggtcttgctgggcagcagccacagtcaagagtttttgaaatttgcaacaactgaggcaatccagaggacggaaatcttcgagtactgtcagatgctgggccgccccaaatccttcatcccttctttccaggtgtataagctcctttatgcttcccgtctggcagattatggcctcgtgtcccaggctttgcattactgcgaagccattggtgcagctgtcttgagccagggagagagcagtcaccctgtgctattagtggaactcatcaagctagcagagaaactgaagctgtcagatcctctggttttagaaagacgcagtggagacagggacctggagccagattggctagcgcaacttcggaggcagctggagcaaaaggtagcaggagacattggggatcctcatcctactcgctcagatatttcgggagccggaggaacaacaacagaaaacactttctaccaggacttttctggatgtcaaggctactctgaagcccctgggtaccgctcagctctgtggctgacacctgagcagacctgcctgctccagcccagcccacagcagccctttcccctccagccgggctcctacccagcaggagggggtgcagggcagacagggacaccgaggcctttttactcagttcctgagacccatctaccagggactggcagcagcgtggcagtgacagaggccactggaggaacagtctgggaggaaatgctgcagacacacctgggccctggagagaacacagtgtctcaagaaacttcccagcctcctgatggccaagaggtcatttccaaaccacagacaccattggctgctagaccacgaagtatttctgagagttccgccagttcagccaaggaggatgagaaggagtcctctgatgaggctgataaaaactctccccgaaatactgcccagagaggcaagctcggagatgggaaggagcatacaaagagctcagggtttggctggttcagctggtttcgatcgaagcccaccaagaacgcatcccccgctggagacgaggactcctcagacagccctgactctgaggagacccccagagcatcttctccccaccaggctggcctgggcctctcactgacaccttcccctgagtccccacctctgccggatgttagtgccttctccaggggcagaggtgggggtgaaggccgaggatccgcatccagcgggggagcagctgcgggcgctggggttggaggcttgtctggaccagagagtgtttcctttgagctctgctccaaccctggtgttcttcttcctccacctgccttaaaaggggctgttcctctttacaacccatctcaggtgcctcagctgcccacggccactagcctgaatcggccaaatcgcctagctcagcgtcgctatcccacccagccatgctgagaataaacacacgtcccaggctcatctcccaggactgaaactttcttgctctctttttctcaatctcccagcccctctctaccatattgggaccctcaagaggtttgtgctagcccgatgcctccaccgggcacttagaaggcaagaggacaggatctctcaagacacagcacaattcagtctcttaagattagcttcacaatgatggaaattatttcatcaggtggaaagtctgggtctaatagcagactgcacatgagcagagtgacatggtggtggcacttatggtggtggcttgagagccttggggaaattagggccctaacagctagaatcaaagatgataccgcagggccctgtagcaagaaatgggaagcagggggaggggcaggggctcagaacaatattctagaccaactttgactacttcctgtcttagtaatagaccaatacatggctctatttagcaaagtttttatactgaaacttgattattgctgccctttataatttcctcttcaatgatatttcagcagtttccctcttggtcctagttttgtgcacatttttttgaatgtggttcagattaattatatttctctcactttcttagctggtcctattttttcacattctggcatgtggctatcaagttagattgctgtaggcatcatattgtcatggtaactactgaacctaatgatgcagatgg

SEQ ID NO: 179250 - DNA, 2948 bp, Homo sapiens
  Payload ID: 15332
  Gene Symbol: SEC16B
  Gene Name: SEC16 homolog B, endoplasmic reticulum export factor
  ENST ID: ENST00000464631
  CDS Start-End: 83-1960
gtgggaatttggatgatttctcatgaagataaaataactgcacaacttactcaaaacccaggacaaattcagagagtcaaggatggaactttgggctccccagaggctgccccagacacgagggaaggccacagcaccctcaaaggatccagaccgagggtttcggagagatggacatcatcggcctgtccctcactcttggcacaatggagagaggtttcaccaatggcaagacaaccgtgggagcccccagccacagcaggagcccagggcagaccatcagcagcagccccattatgcatccaggccaggggactggcatcagcctgtgtctggagttgactattacgaaggtggttatcgcaatcagttgtattcaaggccaggttatgagaattcatatcagagctatcagtctcccacaatgagggaggaatatgcttatggaagttattactatcatggacacccacagtggctgcaggaagaaagagtgccaaggcaacggagtccttatatctggcacgaagattaccgagagcaaaagtaccttgatgaacatcattatgaaaaccagcacagtccatttggaacaaatagtgagacccacttccaatctaacagtaggaacccttgtaaagacagccctgcttccaactctggacaggagtggccgggggagctgtttccagggagcctgcttgctgaggcccagaaaaataagccatcattggctagtgagtccaaccttctccagcagcgtgagtctggtctcagctccagcagctatgagctcagtcagtacatcagagatgccccggagcgggatgatcccccagcttcagcagcttggagtccagttcaggctgaagatgtctcctcagctggtcccaaagcacccatgaagttctacatccctcatgttcctgtgagtttcgggccaggaggtcagctggtgcatgtaggtcccagctctcccactgacgggcaagcagcccttgttgaactgcacagcatggaggttattcttaatgattccgaagagcaagaggagatgagaagtttctcaggacccttgattagggaagatgtacataaggtggatattatgacgttttgccagcagaaagcagctcagagctgcaaatctgagacactggggagcagagactcagctctactgtggcagctcttggttctcctttgtcgccagaatgggtccatggtggggtctgacatcgctgagctgctaatgcaagactgcaagaagctggagaagtacaagcggcagccccctgtggccaacctcatcaacctgaccgatgaggactggccagtgctgagctctgggaccccgaacctgctcacgggagagatcccccccagtgtggagacacctgcgcagatcgtggagaaattcactaggctgctctactatggaaggaagaaggaagccttggagtgggccatgaagaaccacttgtggggccatgctttgttcctgtccagcaagatggacccacagacctacagctgggtcatgagtggcttcaccagcacgctggcgctcaatgacccactgcagaccctcttccagctcatgtcggggaggattccacaggcagccacgtgttgtggagaaaagcagtggggagactggaggcctcacttggctgtgattctgtcgaatcaggctggggacccagagctgtatcagcgtgcgattgttgccattggggacaccctggctgggaaggggcttgtggaggcagctcacttctgctatctcatggctcacgtgccctttggccactacaccgtgaagacagaccatctggtcttgctgggcagcagccacaggtatgcgacctgggagaaaggaaacagtaaggacattttccaagggactgttttagcccttgttgggttttatggatccatttttcattttctcatgtgaatttcagctaccgccggctcccttatttgggattgttatctgtgcaggtctgtgcaaggagatgccccgtgggccccacattacagcattggcgggggcctcaggccacaggtcctcctctgcaaagaggtgggctgatgcctttgtgtggtattgtgccctttggccactgggtggcaccctggctccacaagctaactttgttcctttaaaaaaacaacattttacatgtggaggcttgtgggtccgtgttaggcagccctgggcctgttctgagagcctacccaggcaaaactggaaaatggaagaagtttatgtttagtccctctttggggccctagcatccctacaatgacttggtgcacaagctacttagagtcccactggtgacattctctgttggccatagcattaggcttttcctgcaggaggccctcaatcagctctcagtgaatgaatgcatggacagaacgatttgctccctagaggccctccctgttctgtatctctctatccccctccccatacgtgttaagagtcactaagctcttacgttgtgccaggcattttctttgcactatttcctttaattattacacatttaccctatgaagaagtgaagtgaagcaaagattttaatcgtcacttatggaggaggaaaaccaaggcacagggagatgaaataacttgtctcagatggtacagtgagggtgtgggtgagttggattcggaatccaggcagtcagcctgcaaagcccttttaactgttgcaccacactgcctaccactgaggcagtgtacccagctcattgcctgttccttccaggttcctggtctctgatagcacatggctagcttgtcaaagaatcccttctgtgccaaatgtacaataagtgtgtatgggctaatatgtctcccctcctatgtttacgttggtttatgttgaatgaggaaattcttggaaataaagtcctacccccaggaataa

SEQ ID NO: 179251 - DNA, 525 bp, Homo sapiens
  Payload ID: 15332
  Gene Symbol: SEC16B
  Gene Name: SEC16 homolog B, endoplasmic reticulum export factor
  ENST ID: ENST00000527976
  CDS Start-End: 1-525
actggggagcagagactcagctctactgtggcagctcttggttctcctttgtcgccagaatgggtccatggtggggtctgacatcgctgagctgctaatgcaagactgcaagaagctggagaagtacaagcggcagccccctgtggccaacctcatcaacctgaccgatgaggactggccagtgctgagctctgggaccccgaacctgctcacgggagagatcccccccagtgtggagacacctgcgcagatcgtggagaaattcactaggctgctctactatggaaggaagaagtgttgtggagaaaagcagtggggagactggaggcctcacttggctgtgattctgtcgaatcaggctggggacccagagctgtatcagcgtgcgattgttgccattggggacaccctggctgggaaggggcttgtggaggcagctcacttctgctatctcatggctcacgtgccctttggccactacaccgtgaagacagaccatctggtcttgctgggcagcagccacag

SEQ ID NO: 179252 - DNA, 3277 bp, Homo sapiens
  Payload ID: 15332
  Gene Symbol: SEC16B
  Gene Name: SEC16 homolog B, endoplasmic reticulum export factor
  ENST ID: ENST00000528461
  CDS Start-End: 157-1107
acagtttacagtatctgccagctgtgagtaacagcaggctgtcatgatgggatatagcagaagcagcagcagcaactcctgatttaggggcaatcgatgaagataaaataactgcacaacttactcaaaacccaggacaaattcagagagtcaaggatggaactttgggctccccagaggctgccccagacacgagggaaggccacagcaccctcaaaggatccagaccgagggtttcggagagatggacatcatcggcctgtccctcactcttggcacaatggagagaggtttcaccaatggcaagacaaccgtgggagcccccagccacagcaggagcccagggcagaccatcagcagcagccccattatgcatccaggccaggggactggcatcagcctgtgtctggagttgactattacgaaggtggttatcgcaatcagttgtattcaaggccaggttatgagaattcatatcagagctatcagtctcccacaatgagggaggaatatgcttatggaagttattactatcatggacacccacagtggctgcaggaagaaagagtgccaaggcaacggagtccttatatctggcacgaagattaccgagagcaaaagtaccttgatgaacatcattatgaaaaccagcacagtccatttggaacaaatagtgagacccacttccaatctaacagtaggaacccttgtaaagacagccctgcttccaactctggacaggagtggccgggggagctgtttccagggagcctgcttgctgaggcccagaaaaataagccatcattggctagtgagtccaaccttctccagcagcgtgagtctggtctcagctccagcagctatgagctcagtcagtacatcagagatgccccggagcgggatgatcccccagcttcagcagcttggagtccagttcaggctgatgtctcctcagctggtcccaaagcacccatgaagttctacatccctcatgttcctgtgagtttcgggccaggaggtcagctggtgcatgtaggtcccagctctcccactgacgggcaagcagcccttgttgaactgcacagcatggagggaagatgtacataaggtggatattatgacgttttgccagcagaaagcagctcagagctgcaaatctgagacactggggagcagagactcagctctactgtggcagctcttggttctcctttgtcgccagaatgggtccatggtggggtctgacatcgctgagctgctaatgcaagactgcaagaagctggagaagtacaagcggcagccccctgtggccaacctcatcaacctgaccgatgaggactggccagtgctgagctctgggaccccgaacctgctcacgggagagatcccccccagtgtggagacacctgcgcagatcgtggagaaattcactaggctgctctactatggaaggaagaaggaagccttggagtgggccatgaagaaccacttgtggggccatgctttgttcctgtccagcaagatggacccacagacctacagctgggtcatgagtggcttcaccagcacgctggcgctcaatgacccactgcagaccctcttccagctcatgtcggggaggattccacaggcagccacgtgttgtggagaaaagcagtggggagactggaggcctcacttggctgtgattctgtcgaatcaggctggggacccagagctgtatcagcgtgcgattgttgccattggggacaccctggctgggaaggggcttgtggaggcagctcacttctgctatctcatggctcacgtgccctttggccactacaccgtgaagacagaccatctggtcttgctgggcagcagccacagtcaagagtttttgaaatttgcaacaactgaggcaatccagaggacggaaatcttcgagtactgtcagatgctgggccgccccaaatccttcatcccttctttccaggtgtataagctcctttatgcttcccgtctggcagattatggcctcgtgtcccaggctttgcattactgcgaagccattggtgcagctgtcttgagccagggagagagcagtcaccctgtgctattagtggaactcatcaagctagcagagaaactgaagctgtcagatcctctggttttagaaagacgcagtggagacagggacctggagccagattggctagcgcaacttcggaggcagctggagcaaaaggtagcaggagacattggggatcctcatcctactcgctcagatatttcgggagccggaggaacaacaacagaaaacactttctaccaggacttttctggatgtcaaggctactctgaagcccctgggtaccgctcagctctgtggctgacacctgagcagacctgcctgctccagcccagcccacagcagccctttcccctccagccgggctcctacccagcaggagggggtgcagggcagacagggacaccgaggcctttttactcagttcctgagacccatctaccagggactggcagcagcgtggcagtgacagaggccactggaggaacagtctgggaggaaatgctgcagacacacctgggccctggagagaacacagtgtctcaagaaacttcccagcctcctgatggccaagaggtcatttccaaaccacagacaccattggctgctagaccacgaagtatttctgagagttccgccagttcagccaaggaggatgagaaggagtcctctgatgaggctgataaaaactctccccgaaatactgcccagagaggcaagctcggagatgggaaggagcatacaaagagctcagggtttggctggttcagctggtttcgatcgaagcccaccaagaacgcatcccccgctggagacgaggactcctcagacagccctgactctgaggagacccccagagcatcttctccccaccaggctggcctgggcctctcactgacaccttcccctgagtccccacctctgccggatgttagtgccttctccaggggcagaggtgggggtgaaggccgaggatccgcatccagcgggggagcagctgcgggcgctggggttggaggcttgtctggaccagagagtgtttcctttgagctctgctccaaccctggtgttcttcttcctccacctgccttaaaaggggctgttcctctttacaacccatctcaggtgcctcagctgcccacggccactagcctgaatcggccaaatcgcctagctcagcgtcgctatcccacccagccatgctga

SEQ ID NO: 179253 - DNA, 4228 bp, Homo sapiens
  Payload ID: 15333
  Gene Symbol: SEC22A
  Gene Name: SEC22 homolog A, vesicle trafficking protein
  Uniprot ID: Q96IW7
  ENST ID: ENST00000309934
  CDS Start-End: 897-1820
ctttctgtttaaaattttgcctggatttctgattatttttctcaagacaggtatatatttaaatttattgaggttaaaaggtatgccttcagactcttgttgaaattgccaaatcattttgagaactgtttgtaccagtttttacttccatctgtacttatgagaatgccagacagaagtattattttttaaaaagctaatgtggctgggtgtggtggctcatgcctgtaatcccagcactgtggcaggcgcctatagtcccagccacatcctatgctgtggcatgggaacccaggctgaggcatgagaattgcttgaaccctggatgggggatgttgcagtcagccaagatggcgccactgcactccagcctgggtgacagagcaagatgctgtctcaaaaaaaaaaacaaaaaacaaaaaacaaaagctatatgttaagtgaagcatagtatgttgttttaattagttttttgttttttttttcctcctgagacggagtctcactctgtcgcccaggctggagctcagtgacgcgatttcggctcactgcaacctctgcctcccgggttcaagcaattctcctgcctcggcctcctgagtagctgggattacaggtgtgcaccaccacgcctggctaatttttgtatttttagtagagaaggggtttcatcatgttggccaggctggtctcaaactcctgatcttgtgatccaccctcctcagccacccaaagtgctgggattacaggtgtgagccaccacacctggccattttaattactattcttatattactagtaagttgaacatttttacatatgcttatcaagtttggctttaatttttatgtaacccaaattgttcattttgttttaggtcttctctgttggttgaaatgtctatgattttatctgcctcagtcattcgtgtcagagatggactgccactttctgcttctactgattatgaacaaagcacaggaatgcaggagtgcagaaagtattttaaaatgctttcgaggaaacttgctcaacttcctgatagatgtacactgaaaactggacattataacattaattttattagctctctgggagtgagctacatgatgttgtgcactgaaaattacccaaatgttctcgccttctctttcctggatgagcttcagaaggagttcattactacttataacatgatgaagacaaatactgctgtcagaccatactgtttcattgaatttgataacttcattcagaggaccaagcagcgatataataatcccaggtctctttcaacaaagataaatctttctgacatgcagacggaaatcaagctgaggcctccttatcaaatttccatgtgcgaactggggtcagccaatggagtcacatcagcattttctgttgactgtaaaggtgctggtaagatttcttctgctcaccagcgactggaaccagcaactctgtcagggattgtaggatttatccttagtcttttatgtggagctctgaatttaattcgaggctttcatgctatagaaagtctcctgcagagtgatggtgatgattttaattacatcattgcatttttccttggaacagcagcctgcctttaccagtgttatttacttgtctactacaccggctggcggaatgtcaaatcttttttgacttttggcttaatctgtctatgcaacatgtatctctatgaactgcgcaacctctggcagcttttctttcatgtgactgtgggagcatttgttacactacagatctggctaaggcaagcccagggcaaggctcccgattatgatgtctgacaccatccttcagatctattgccttggcttcagggggataaggagggaacatatcataactgcactgtgatgaagaagctgttccccacagaggagaagctctgctttctttctctccaactttccttttttaaaatcagcatgatgtgcctgtgagcatggaagagtcctctcagaagaatgttggccatgagactatcattcagaggaggaggggatttctctcttcaaggccgtaacagtggaagaacagtcatatgccattggaagtcttggccagcagtcctgaatccttcctgaagagttcagaaaatagatgtggtattgctctgaggaccaggcaggaggaactctacaacctgagtttgcctttgtgaggcattagtatagaccaaataaaaagctgcagaaattggaaagtttatgttttaaataaatgactgtgataaatatcagattatttgcacacttatggtactacgagtttataaagtccaagatggtgtgaaattggttctttttacttttatatttttgcttgaatcttaactctggaaatcacctgatgtagaagaagactgtgatgagctcgtctgtggaacatcacaagtatcgaaaatacagtaatggatgtttcctttctaatccacatttattgtttcttttgaaatcacgtctaaaaaatatgactcacactatagccgttgtttcccaaacttcagtctctttagtactacttgtattattttcttaatatttatcttttaaattttaaagtttttttaaaaaaatgaatcctgctccaagtggaaaaccagtatcagtttgccataaataaaaggtaaccacaaaataagtaagatgaacacaaaaaatgttgttcagttctagctagaaactaatgcctagaaaggctccgaatcttaggctctttctttgtggcagtgagggagatgttaccagcaccagcatgaggcactgtctctggaatagtcagaggataaaaggaaactgtaaagggaatgacattctcactgtgattcagcattattctatgttgtgcatcacttaaagacatgttgtgtgccaccagtggcatgggtccgcactatggaaatgcttgactgtagtaagaatcagaaggtggctttcctagcaactcattattttatggctttgaggaattaagcccctagtatctgagagaacttacttgttttttgataacgttttaaagattgtttaagcagttatgaattaataatataggaagcacagttggattccactagcaaaatctataactctcatggttttggaagtcatcttcatgggtgattttcctttgttttttaaagaaaatatttcaaacaaggaattcataggatactgaaatttgatatcatccagaaaaacagatcccattacattgtaattgttgttactaggcatatttattaagtagagaaatagagggtaaaaagttagtgaactgtcttgtttgcgtgaaccagtatttgtggatatgtctagaactgtaaaatcttgcttaactagaaccttagtctgcaccctccttttaggagaatgaggtaaaaggaagacaataagcttatgatatcagggattcatgtaaaacaggaaatagtagttggctccagtcttctcctctaacaaaagtatgcatattctgagagataccccaaggcatcacaagatcctgaatcatcaaaacaccattgaattgtgttgggcattttgtagccaggaaagtgaagtggttcaatttagaaagggtttcaggccaggcacggtgactcaggcctgtaatcccagcactttgggaggccgagacaggcagatcacttgagaccagtagtttgagaatcagcctggccaacgtggtgaaacctcatctctactaaaaatacaaaatttagctgggtgtggttgcgcgtgcctttagtcccagctactcgggaggctgaggcaggagaatcgcttgaacccaggaggtggaagttggcagtgagccaagatcacgccactgtactccagcctggccaacagagcgagactctgtctcaaaaaagaaaggttttctaaactaatggttaaaacagaattttcttgtaaatagggaagttggagcattctggttgagattttgctctgtattgacacagctcgcaccagtttggttcaggagctacctccttgtcattgaattgacgagttacaatgtttggtattcggatacattcagcaagaacacttgaaaactcctcaccaactatttttaaaggcttactttgtttttgtttttattttttcactggctattttggataagaggatgtttacatcttaatgtaaaaaaatgaaaacaggtataaatgttttatgta

SEQ ID NO: 179254 - DNA, 565 bp, Homo sapiens
  Payload ID: 15333
  Gene Symbol: SEC22A
  Gene Name: SEC22 homolog A, vesicle trafficking protein
  ENST ID: ENST00000466950
  CDS Start-End: 78-293
aggccccacaatgcacttcggggcgcgtcactcggagcggcgggtcccgtctcgacaggtcttctctgttggttgaaatgtctatgattttatctgcctcagtcattcgtgtcagagatggactgccactttctgcttctactgattatgaacaaagcacaggaatgcaggagtgcagaaagtattttaaaatgctttcgaggaaacttgctcaacttcctgatagatgtacactgaaaactggacattataacattaacttcagaaggagttcattactacttataacatgatgaagacaaatactgctgtcagaccatactgtttcattgaatttgataacttcattcagaggaccaagcagcgatataataatcccaggtctctttcaacaaagataaatctttctgacatgcagacggaaatcaagctgaggcctccttatcaaatttccatgtgcgaactggggtcagccaatggagtcacatcagcattttctgttgactgtaaaggtgctggtaagatttcttctgctcaccagcgactggaaccagcaactctgtca

SEQ ID NO: 179255 - DNA, 482 bp, Homo sapiens
  Payload ID: 15333
  Gene Symbol: SEC22A
  Gene Name: SEC22 homolog A, vesicle trafficking protein
  ENST ID: ENST00000491366
  CDS Start-End: 179-482
tttcttaggggtcgttcgaatccctgccggcctctcccctcccgctccctgcctctcgccacagcctcggccttcgccctcgggattgaagacctaccccacgggcaggagccaagtccgtgcctttgggatgggagtcggggccgcggagctctggaggtcttctctgttggttgaaatgtctatgattttatctgcctcagtcattcgtgtcagagatggactgccactttctgcttctactgattatgaacaaagcacaggaatgcaggagtgcagaaagtattttaaaatgctttcgaggaaacttgctcaacttcctgatagatgtacactgaaaactggacattataacattaattttattagctctctgggagtgagctacatgatgttgtgcactgaaaattacccaaatgttctcgccttctctttcctggatgagcttcagaaggagttcattactacttataacatgatga

SEQ ID NO: 179256 - DNA, 972 bp, Homo sapiens
  Payload ID: 15333
  Gene Symbol: SEC22A
  Gene Name: SEC22 homolog A, vesicle trafficking protein
  Uniprot ID: Q96IW7
  ENST ID: ENST00000492595
  CDS Start-End: 49-972
actcggagcggcgggtcccgtctcgacaggtcttctctgttggttgaaatgtctatgattttatctgcctcagtcattcgtgtcagagatggactgccactttctgcttctactgattatgaacaaagcacaggaatgcaggagtgcagaaagtattttaaaatgctttcgaggaaacttgctcaacttcctgatagatgtacactgaaaactggacattataacattaattttattagctctctgggagtgagctacatgatgttgtgcactgaaaattacccaaatgttctcgccttctctttcctggatgagcttcagaaggagttcattactacttataacatgatgaagacaaatactgctgtcagaccatactgtttcattgaatttgataacttcattcagaggaccaagcagcgatataataatcccaggtctctttcaacaaagataaatctttctgacatgcagacggaaatcaagctgaggcctccttatcaaatttccatgtgcgaactggggtcagccaatggagtcacatcagcattttctgttgactgtaaaggtgctggtaagatttcttctgctcaccagcgactggaaccagcaactctgtcagggattgtaggatttatccttagtcttttatgtggagctctgaatttaattcgaggctttcatgctatagaaagtctcctgcagagtgatggtgatgattttaattacatcattgcatttttccttggaacagcagcctgcctttaccagtgttatttacttgtctactacaccggctggcggaatgtcaaatcttttttgacttttggcttaatctgtctatgcaacatgtatctctatgaactgcgcaacctctggcagcttttctttcatgtgactgtgggagcatttgttacactacagatctggctaaggcaagcccagggcaaggctcccgattatgatgtctga

SEQ ID NO: 179257 - DNA, 572 bp, Homo sapiens
  Payload ID: 15333
  Gene Symbol: SEC22A
  Gene Name: SEC22 homolog A, vesicle trafficking protein
  ENST ID: ENST00000466519
  CDS Start-End: 247-572
agtcctcttcttcctttcttaggggtcgttcgaatccctgccggcctctcccctcccgctccctgcctctcgccacagcctcggccttcgccctcgggattgaagacctaccccacgggcaggagccaattgctgatggggagaggaaaaaatagccactattcaggttccctgtgagttaactgctgctgtacaaaggcaggtgtaatattttctctgtattaaaggtcttctctgttggttgaaatgtctatgattttatctgcctcagtcattcgtgtcagagatggactgccactttctgcttctactgattatgaacaaagcacaggaatgcaggagtgcagaaagtattttaaaatgctttcgaggaaacttgctcaacttcctgatagatgtacactgaaaactggacattataacattaattttattagctctctgggagtgagctacatgatgttgtgcactgaaaattacccaaatgttctcgccttctctttcctggatgagcttcagaaggagttcattactacttataacatgatgaagacaaatactgctgtcagacc

SEQ ID NO: 179258 - DNA, 870 bp, Homo sapiens
  Payload ID: 15333
  Gene Symbol: SEC22A
  Gene Name: SEC22 homolog A, vesicle trafficking protein
  ENST ID: ENST00000487572
  CDS Start-End: 217-870
ctctcccctcccgctccctgcctctcgccacagcctcggccttcgccctcgggattgaagacctaccccacgggcaggagccaagtccgtgcctttgggatgggagtcggggccgcggagctctggagttgctgatggggagaggaaaaaatagccactattcaggttccctgtgagttaactgctgctgtacaaaggtcttctctgttggttgaaatgtctatgattttatctgcctcagtcattcgtgtcagagatggactgccactttctgcttctactgattatgaacaaagcacaggaatgcaggagtgcagaaagtattttaaaatgctttcgaggaaacttgctcaacttcctgatagatgtacactgaaaactggacattataacattaattttattagctctctgggagtgagctacatgatgttgtgcactgaaaattacccaaatgttctcgccttctctttcctggatgagcttcagaaggagttcattactacttataacatgatgaagacaaatactgctgtcagaccatactgtttcattgaatttgataacttcattcagaggaccaagcagcgatataataatcccaggtctctttcaacaaagataaatctttctgacatgcagacggaaatcaagctgaggcctccttatcaaatttccatgtgcgaactggggtcagccaatggagtcacatcagcattttctgttgactgtaaaggtgctggtaagatttcttctgctcaccagcgactggaaccagcaactctgtcagggattgtaggatttatccttagtcttttatgtggagctctgaatttaattcgaggctttcatgctatagaaagtctcctg

SEQ ID NO: 179259 - DNA, 673 bp, Homo sapiens
  Payload ID: 15333
  Gene Symbol: SEC22A
  Gene Name: SEC22 homolog A, vesicle trafficking protein
  ENST ID: ENST00000481965
  CDS Start-End: 38-337
cgggtcccgtctcgacaggtcttctctgttggttgaaatgtctatgattttatctgcctcagtcattcgtgtcagagatggactgccactttctgcttctactgattatgaacaaagcacaggaatgcaggagtgcagaaagtattttaaaatgctttcgaggaaacttgctcaacttcctgatagatgtacactgaaaactggacattataacattaaagtgatggtgatgattttaattacatcattgcatttttccttggaacagcagcctgcctttaccagtgttatttacttgtctactacaccggctggcggaatgtcaaatcttttttgacttttggcttaatctgtctatgcaacatgtatctctatgaactgcgcaacctctggcagcttttctttcatgtgactgtgggagcatttgttacactacagatctggctaaggcaagcccagggcaaggctcccgattatgatgtctgacaccatccttcagatctattgccttggcttcagggggataaggagggaacatatcataactgcactgtgatgaagaagctgttccccacagaggagaagctctgctttctttctctccaactttccttttttaaaatcagcatgatgtgcctgtgagcatggaagagtcctctcagaagaatgttgg

SEQ ID NO: 179260 - DNA, 1011 bp, Homo sapiens
  Payload ID: 15333
  Gene Symbol: SEC22A
  Gene Name: SEC22 homolog A, vesicle trafficking protein
  ENST ID: ENST00000473494
  CDS Start-End: 146-1011
ctcggagcggcgggtcccgtctcgacagttgctgatggggagaggaaaaaatagccactattcaggttccctgtgagttaactgctgctgtacaaaggcaggtgtaatattttctctgtattaaaggtcttctctgttggttgaaatgtctatgattttatctgcctcagtcattcgtgtcagagatggactgccactttctgcttctactgattatgaacaaagcacaggaatgcaggagtgcagaaagtattttaaaatgctttcgaggaaacttgctcaacttcctgatagatgtacactgaaaactggacattataacattaattttattagctctctgggagtgagctacatgatgttgtgcactgaaaattacccaaatgttctcgccttctctttcctggatgagcttcagaaggagttcattactacttataacatgatgaagacaaatactgctgtcagaccatactgtttcattgaatttgataacttcattcagaggaccaagcagcgatataataatcccaggtctctttcaacaaagataaatctttctgacatgcagacggaaatcaagctgaggcctccttatcaaatttccatgtgcgaactggggtcagccaatggagtcacatcagcattttctgttgactgtaaaggtgctggtaagatttcttctgctcaccagcgactggaaccagcaactctgtcagggattgtaggatttatccttagtcttttatgtggagctctgaatttaattcgaggctttcatgctatagaaagtctcctgcagagtgatggtgatgattttaattacatcattgcatttttccttggaacagcagcctgcctttaccagtgttatttacttgtctactacaccggctggcggaatgtcaaatcttttttgacttttggcttaatctgtctatgcaacatgtatctctatgaactgcgcaacctctggcagcttttctttcatgtgactgtgggagcatttgt

SEQ ID NO: 179261 - DNA, 550 bp, Homo sapiens
  Payload ID: 15333
  Gene Symbol: SEC22A
  Gene Name: SEC22 homolog A, vesicle trafficking protein
  ENST ID: ENST00000480631
  CDS Start-End: 136-550
ctttcttaggggtcgttcgaatccctgccggcctctcccctcccgctccctgcctctcgccacagcctcggccttcgccctcgggattgaagacctaccccacgggcaggagccaagtcttctctgttggttgaaatgtctatgattttatctgcctcagtcattcgtgtcagagatggactgccactttctgcttctactgattatgaacaaagcacaggaatgcaggagtgcagaaagtattttaaaatgctttcgaggaaacttgctcaacttcctgatagatgtacactgaaaactggacattataacattaattttattagctctctgggagtgagctacatgatgttgtgcactgaaaattacccaaatgttctcgccttctctttcctggatgagcttcagaaggagttcattactacttataacatgatgaagacaaatactgctgtcagaccatactgtttcattgaatttgataacttcattcagaggaccaagcagcgatataataatcccaggtctctttcaacaaagataaatcttt

SEQ ID NO: 179262 - DNA, 6922 bp, Homo sapiens
  Payload ID: 15334
  Gene Symbol: SEC22B
  Gene Name: SEC22 homolog B, vesicle trafficking protein (gene/pseudogene)
  Uniprot ID: O75396
  ENST ID: ENST00000578049
  CDS Start-End: 135-782
agcgggaagcggagacgcaagcagctggatctccggtaactgagacatagggtataactgttgtcgcggcggaggaagtgaggacggcgccaagggccttccgggccagtgttggatccctgtagtttgtgaagatggtgttgctaacaatgatcgcccgagtggcggacgggctcccgctggccgcctcgatgcaggaggacgaacagtctggccgggaccttcaacaatatcagagtcaggctaagcaactctttcgaaagttgaatgaacagtcccctaccagatgtaccttggaagcaggagccatgacttttcactacattattgagcagggggtgtgttatttggttttatgtgaagctgccttccctaagaagttggcttttgcctacctagaagatttgcactcagaatttgatgaacagcatggaaagaaggtgcccactgtgtcccgaccctattcctttattgaatttgatactttcattcagaaaaccaagaagctctacattgacagtcgtgctcgaagaaatctaggctccatcaacactgaattgcaagatgtgcagaggatcatggtggccaatattgaagaagtgttacaacgaggagaagcactctcagcattggattcaaaggctaacaatttgtccagtctgtccaagaaataccgccaggatgcgaagtacttgaacatgcgttccacttatgccaaacttgcagcagtagctgtatttttcatcatgttaatagtgtatgtccgattctggtggctgtgaaataatgaatacagtcactggtaagggagaacctagaacccagtaggtgtatattttcaggaaactgagctcacagagatgtgtattagaatccaagtggaacttctgcctctaaagaccttgcaagaaaagagatgccctgaaaatgaaaggttgcacctcatttaatgaagcttaaccctatgtagaaagtctctttcgggggcagaggctttctctgggtgccaagccatatatattagggaatagtagattgttaatttcgttttttccctcccagtgcattttaaaaacagcactggctggggcattctcattctctgatggagccatcaatgagatttaacttagtcaacctgtgctagcaacattctgaaattccttcaaagaaggcagtcctttgggaaggtgtttttttttttttttttttttttgactctaatcaacattccttttgttggtgacatttgtgattttcagtaatctgagtttttgatggccttttaaacaagactccagtatgtgaaggttaattgctgtgctccacagatcttgtctattggcccctgtagaaagttaacctttgttgttttccttttataatttgcttattgcacaattgctttagggtaagtgaattatattaagatgccttgaaattatagcactccttgattaagaagctaaaatgtttctctcatttactccttaaacaaaagacttaaattagtttgggtcattattacttttattttgcagcatttggtttgttattagcgtaagagcaagtataggatatggagaggcccctggcttcatgagaacaaaggcaggcccaggttataattacagctttctcctgccccttctttactttctctaccacagttttctccactgtttgttttcctcttgccacaatttgctaacatttaaaaaattttcctgcacccagtagtttcatatcctgtagacatcctcttaggacattctcaaatttcaaaataaaaaatattcatctatgtagttaattaaagttaaagtttttgcagatcaactactcaaactactaaatacatttacctgagaaaaagtctctgagagcacttcattcctgttttagttcgtgtaaattctctgagaatgttctggagatagataactcatttacagtggtttctattaactaattaaagtacccatgattttttccttttctgctcagggatgatggagatttccttttaccttctgaggtagaattttttaatggggaaaataggccttttaaatattattgccagggtctgcaatataacttaaaattcctgtacatactgcaaatatttctttaaattgcacaggaaaatgagcgaactttttatttcttaatatctttggcaaaaaactttaaccagtaagcaattttataaccctgagggatcatcaaagatactatcctgattcctggtaaggaaaaatatattatttccttataacaaggcaaggagaaatgctattttattcctgataatttatataactagaataatttttttcctttcttttatggacctaaatctgccaattgggaattttgtgcatgaaatatgaagttactttttatagataatcagtgcttttaagtccctaaaaggctcctgctgaagtaatgatgatgttaataataaaagcctttgaaaggctgaaaacctacatagtggtaccatagtatttggagcttctataggagtggagaggggcagctcattgttgagagttgcatgctgcaacctaatggtcagcaatgaaataaatacttgtagaatgttcacttcagtgtgaagttttgttatctagttaatttatatacatatatcctttgtagatacatttctatctaatcttgttgggctaattaagaaataaggggtggggtaattgtcaacaaagggagaagaaagtggtttaagatcagggcagcagaaaaattagagaacaagaatatcataatatggctcctggttttctttataagaggcagtgggaagatctgactagatgaaatgtatcatcaaccaaactggcatctaaaatagaatgggataaatactgtatggggttattggaggcatattaagaaaggacacctaatttattttgggaagaagtatgttaagagaagactttctagagaaggagaatggggcattctaggaagagtcaatggcatgtgcaaaggcatgaataaagacagtgaggcatattttggaaatgtaacagcttgattcagcttagcccatagggtaagcatagacaacagaggagacttgaggaatgagaactagatgggtacactatcataaagggacttgtctatcatgctgaggagtttagaccatcttaatggtagtggccaaggatggcatcagatttatagtttcaagtgatcataatattggcataaaagatatattagggaggaagcctgaagtagggagatgaaaataaggagccatcaaaggcagaatgaaacttaggcagatttcaagtgattttcaaaaatgttgtgatcagaggtaccagataataactattacataacactttctttgttaggagcttatttctcacactgaccaaagcttttgaagtaagtactctttacaccactatataaataaaccttacaaaggattctgctttgaggcatgagagagttaagtcatttgcccaaagtcacagagttagaaagtaatagagctaagatttgaacctaggcagtttggctccagagtctgtgctcttacgctatattaccaccaagaggtcaaataaataccaaagaatgtattttcgaatttaacaatgaggaacttaatcatacaggcagaagtaattccagagcactggagacagaagccagattgccatatgggttaaagagtgtgtaaaccactaggaagtaaagacatagaactactctcacaagtgcttttctggttattgtgacgctgaacttcatggcttgttttaattaagacatcttacaagtgtcaaaatttggaaatatttggacactgtacactctggttatttaaatatctaacaatggttcttgagcattttgagaaacctttgaaaatctgatgaaaggtatgtgccattactctagaaaaatgttcctgtgtacatgcacatcaagtatcacatactgtttcaggctgttcaaagactacaaagtctgttcatgacctaatggtccatgttccctcagttaagagctccagagataaaggatgtggaactcaaaggtaagtacccagagccttgaaaactccatctgtgacttggaagaattctacaatttgaattaactttgtggagagagatatatttttgaaaaattgtgtgtaccaaaaaaatttcatatcaaataatattttcctgtagtgcattcaaggatctggttccacagcaaaaaattgttttggtctcagttcctcaaaatcacatttaaggagcttgagatttatattttctacttaataagtcttacaaaagcaagttaagaaggaaaatggacaatcatttctgcacatatagggtttaataaaacatgtataataaaatatctcatattttaaatttccaccttattggtagctttcatgacaaagggctagggtgctgatggccatacaattaaggtttttggttagttagttagcagaactaactgactcctacctggtgggtttttcttttgtttggttggttggttggttggttttttcccagatggctcaggaggaaggtaaatagcagtcattgtatgtgtgacagagtttgagatagaatgagcatattgaatctcacatcctattcttattactgtcaggcagcgttgacctagcagtataaaactatctgaagcaatgtagtcactcagttctcataaagtttatttcaagtactgtaacaattcatgtttggattagaaaagtcactagaaatttgacttccatatagtaatctatacttttttctctcatttccttcattttttgagccgtaagtgtaaggcattttgctggtattattacaatggttatgaggagtttctttgcttgcccaaggtcacatagctagcaagttaaagtagattcaaatccaggcctgctagataccaaattattatttaagagtacttttcactactcctaaataatgacacagatacgtttgtcttacacatttcactttattgtcaagttattagtatgtttattttcaaaagttattttttgcaatttctttttattattccgtactttttaaatttacttcattatcacgtcttcctttattctttttaaatagtttttgcttttgttattttgttttcccttttttactcttggtttgtaatacctctttccttatttgctcctttctcatttgatctcaatgttaatccaactgttttccacatctgattcactaaaattttagcccttaaaaaaaaaattcctgtttttcctatctccttttgtccattctcttctccttgcctcacttcttttatctttttccattttactttcattttttgtttctctagatgttgttttgacatatgagttaatgtactggtacaattttgcatctgtaaattagagcttcagaatcaactgagtgtatttattctttatttttaggcctaaatttatcttaccttttattgattttataatatactatactctttcattttagtctgcatatgttagccaaagaagatatgcccctgttttaagaaatctctgtaaaaaatgtcaagtgtgacaagaattcttcaagaaacaagctcctctagtttgtcttctatatttagagcttcaacagttacctatattactggtaactcccaaatataccttcaaacttgttttttgggcccaagttttttgcttcatatatatctgttttgaatatcccataaataattgcatctaaagcatacctccactccattgttctcaaagataaaaccaaacctgtgctgcttcttatatttctagtatttaagcgtcacctgccacccctttacctgagctacaagtcacgcattgcattagactcctctgctttcttctttcacctctaactagactattaaccaaaaattttttaatataactttcaaaaggtattttattacatcatttccatcctttatgtttgggttcaagccctcattaactttaacatggattcttggagtaccctccttactgattttgttacacatgtccctcttttagtcagtactaccatgataataccatggataataattttttcatttttatttttagtcttgctctgtcgccgaggctagagtgcagtggcgcgatctcagctcactgcaacctccacctcccgggttcaagtgattctcctgcctcagcctactgagtagctgggattacaggcacctgccacagctcctggctaatttttgtatttttagtagagatggagtttcaccgtcttgaactcctgacctcatgatccaccctcctcggcctcccaaagtgctgggattacaggcatgggccactgcgcccggccaataatttttgtgtgtgtgtgtgctaatcatactacattttctttagaataaaagatcacatacttgtttgccattcgcagtctggccccattgtgccattctagacttacctcctgccactccccaccagctttgttttgtcttagccacacaaaataatctagcgtctctaaccagtcaaacattttaccttgtgccttggctcactctgtgccttttctccagaatatctttctgtgtacttttctcccatccttttacctttaaacctgctgctatggtttgcatgttgtttggcccctccaaaactcatgttgtagttcaattgccaatgtaatagtgttgggagatggtacttttaagaggtaattaggttgctaagatggattaacatctttctcttgacactgagactgggttctcctgggaatggttagttcccaagagagtgagttgttataaaacaatgctgcctcttctattttgcgctttttgtttgcac

SEQ ID NO: 179263 - DNA, 2230 bp, Homo sapiens
  Payload ID: 15334
  Gene Symbol: SEC22B
  Gene Name: SEC22 homolog B, vesicle trafficking protein (gene/pseudogene)
  ENST ID: ENST00000618538
  CDS Start-End: 1-240
tacattgacagtcgtgctcgaagaaatctaggctccatcaacactgaattgcaagatgtgcagaggatcatggtggccaatattgaagaagtgttacaacgaggagaagcactctcaggctggagtgcaatggcacgatcttggctcactgcaaccaccatctcctgggttcaagcgatcttcccaccttatcctcctgagtacctggggctacaggcatgtgccaccacgcctggctaatttttgtattttcttagtagagatggggttttgccatgttgttccggctggtcacaaactccagggctcaagcaatccactcacttcagcttcccaaagtgctgggattacaggcatgagccacaacacccagccctttatataattttaaaagtgtaggtaattaggtaaaattaggttaaaagtatatgtatatttacctgatatttaaatattacctaagtgtttaatgtggacatgtaagctctttaaagatagtgcttatgtattttatatctgtttcacatactccttatatatcccccacagaaatggtcacaaataggttccttaataagtatttttgaattcagccatgctatatattcattagtaagtgagttttcttttattatgaactacaaactttaacctttttttgagtagtgagcagttattcatttaccttcacactctttaaataccaaattttgagtgagtgagtgtgtaaggttttgtcatacagacttgcaattcctatatgggataaagtagactagcacaggaatttttcttgtatcactcatgcaagactctaaattccttaaaggcagggatcatgtatattttgatcactgttgtatcctcagcacttcacatggtgcctgtcacataaatatttgttaaatgacttctccaagcaatagctttgtctttatgttatcctgtatttcaaaacgttcatatataaattctctcaactatgacttgtttcatagggtctaataattgttcctctgctgagttattctcagcagatttagattcatttagcaaatgtttattgagcactaactatataccaggccctgttctgggcattcaggatatagcagcaaacacaataatttaaaatccctgtccagtgaagtgtatattcttgtaggctctgtaaaaagatgccctgtgcattgtcatggttgtttctcagtccctgactcttcttccgtgactagatgtttttcttactcatgtgatcagttgctaattcagacgtggctgtcatgcctgtgttattaagtaacgccatgtttcccaatcaaaaccagtctctattaagcaactccaaatattccaaaagcattctttaaggaagaaacaaccggattgcaaaatagttttttctgaaatttcaagaagtgaaaagtttgatcagaatttattatgtcaaatggagagtttgtgtttattattaaaatatgccttatattttaatatggtctagcttgtgtctatctggctatttctctaagtgtttagttaactgttataagaagataacaacattacaaatgtccttgggggtgaaaaaacttgccagaaaatactaaaaagcttaatttacttgcgtttttttttgtagtacttattgtattttagttacaactttcctatgtctattgaaatataaatcctgatagctttaacttcatagtagtctctactatgtggagaatcttagaaatgttagcagtcatcattgaagtatagcttaagactgtgtttggttaattgaattttctggttatctgagtttgttttacatgggttatcattatcgtttttcaaaatataagagaatatgattcagaccattagaagattatgaagataataattattaacatgtaataattattataatttatcatgtgcaggcattgttgctcactttacaggcaatctcatgtacatacaactttatgacatagttactgttattatccccaattatagatgaagaaactaggttttaaataggttacatgacttgaccaatgtcacataacttgtacaggtgatatctgaaccaaagagtctgaggccagaacctgcacttctaaccaccttactatatagcctcaaaaattcagacatcatctgatcagcatcatcagttaattagtatatgcaatgttagccttaaaataaaaatgatgatttaagattc

SEQ ID NO: 179264 - DNA, 1380 bp, Homo sapiens
  Payload ID: 15335
  Gene Symbol: SEC22C
  Gene Name: SEC22 homolog C, vesicle trafficking protein
  Uniprot ID: Q9BRL7
  ENST ID: ENST00000264454
  CDS Start-End: 145-1056
ctacctgcgcctgggctgccggtgacctgggccgagccctcccggtcggctaagattgctgaggaggcggcgggtagctggcaggcgccgacttccgaaggccgccgtccgggcgaggtgtcctcatgacttctcttgtggaccatgtccgtgatcttttttgcctgcgtggtacgggtaagggatggactgcccctctcagcctctactgatttttaccacacccaagattttttggaatggaggagacggctcaagagtttagccttgcgactggcccagtatccaggtcgaggttctgcagaaggttgtgactttagtatacatttttcttctttcggggacgtggcctgcatggctatctgctcctgccagtgtccagcagccatggccttctgcttcctggagaccctgtggtgggaattcacagcttcctatgacactacctgcattggcctagcctccaggccatacgcttttcttgagtttgacagcatcattcagaaagtgaagtggcattttaactatgtaagttcctctcagatggagtgcagcttggaaaaaattcaggaggagctcaagttgcagcctccagcggttctcactctggaggacacagatgtggcaaatggggtgatgaatggtcacacaccgatgcacttggagcctgctcctaatttccgaatggaaccagtgacagccctgggtatcctctccctcattctcaacatcatgtgtgctgccctgaatctcattcgaggagttcaccttgcagaacattctttacaggttgcccatgaggaaattggaaacattctggcttttcttgttcctttcgtagcctgcattttccagtgttatttgtacctgttctacagtccagccaggactatgaaggtggtgcttatgctgctctttatttgcctgggcaacatgtacctgcacgggctgaggaacctctggcaaatccttttccacataggagtggcttttctgtcttcatatcagatactaacaaggcagcttcaggagaagcagtctgactgtggagtatgaggatgacactgtgatgaatggattctttgattttcttttgaggatcaatctatgtttctctttctgcttctctactttacactccagtttccatccttttcagccaactggactgaaaaaccaggaattggggatgttaaacagttgcagtggaagtcatgaggttgcttgatacccagccttggttctgtgccaagcattactgcaggatctccagccagttcagcacgtttacctaggacagctggatctgggggctcatccagaaagagctttattggaagagagaaaggaaatattttggtcttttaagttgaatgatac

SEQ ID NO: 179265 - DNA, 1608 bp, Homo sapiens
  Payload ID: 15335
  Gene Symbol: SEC22C
  Gene Name: SEC22 homolog C, vesicle trafficking protein
  Uniprot ID: Q9BRL7
  ENST ID: ENST00000273156
  CDS Start-End: 211-963
agcagcagcgaatgcggggtaggggggaggtggggtggctcaagactcgcgcacgcgcaccacggcctacctgcgcctgggctgccggtgacctgggccgagccctcccggtcggctaagattgctgaggaggcggcgggtagctggcaggcgccgacttccgaaggccgccgtccgggcgaggtgtcctcatgacttctcttgtggaccatgtccgtgatcttttttgcctgcgtggtacgggtaagggatggactgcccctctcagcctctactgatttttaccacacccaagattttttggaatggaggagacggctcaagagtttagccttgcgactggcccagtatccaggtcgaggttctgcagaaggttgtgactttagtatacatttttcttctttcggggacgtggcctgcatggctatctgctcctgccagtgtccagcagccatggccttctgcttcctggagaccctgtggtgggaattcacagcttcctatgacactacctgcattggcctagcctccaggccatacgcttttcttgagtttgacagcatcattcagaaagtgaagtggcattttaactatgtaagttcctctcagatggagtgcagcttggaaaaaattcaggaggagctcaagttgcagcctccagcggttctcactctggaggacacagatgtggcaaatggggtgatgaatggtcacacaccgatgcacttggagcctgctcctaatttccgaatggaaccagtgacagccctgggtatcctctccctcattctcaacatcatgtgtgctgccctgaatctcattcgaggagttcaccttgcagaacattctttacaggttgcccatgaggaaattggaaacattctggcttttcttgttcctttcgtagcctgcattttccaggatccaaggagctggttctgctggttggaccaaacctcgtgagccagccacccctgacccaaatgaggagagctctgattctcccatccgggagcagtgatgtcaaacttctgctgctggggaaatctcatcagcagggagcctgtggaaaagggcatgtcagtgaaatctgggaatggctggattcggaaacatctgcccatgtgtattgatggcagagctgttgcccacaagcgccttttatttagggtaaaattaacaaatccattctattcctctgacccatgcttagtacatatgacctttaacccttacatttatatgattctggggttgcttcagaagtgttatttcatgaatcattcatatgatttgatcccccaggattctattttgtttaatgggcttttctactaaaagcataaaatactgaggctgatttagtcagggcaaaaccatttactttacatattcgttttcaatacttgctgttcatgttacacaagcttcttacggttttcttgtaacaataaatattttgagtaaataatgggtacattttaacaaactcagtagtacaacctaaacttgtataaaagtgtgtaaaaatgtatagccatttatatcctatgtataaattaaatgaggtggcttcagaaatggcagaataaatctaaagtgtttatt

SEQ ID NO: 179266 - DNA, 752 bp, Homo sapiens
  Payload ID: 15335
  Gene Symbol: SEC22C
  Gene Name: SEC22 homolog C, vesicle trafficking protein
  ENST ID: ENST00000383750
  CDS Start-End: 134-352
tgggctgccggtgacctgggccgagccctcccggtcggctaagattgctgaggaggcggcgggtagctggcaggcgccgacttccgaaggccgccgtccgggcgaggtgtcctcatgacttctcttgtggaccatgtccgtgatcttttttgcctgcgtggtacgggtaagggatggactgcccctctcagcctctactgatttttaccacacccaagattttttggaatggaggagacggctcaagagtttagccttgcgactggcccagtatccaggtcgaggttctgcagaaggttgtgactttagtatacaagacaaggtcttgccatgttgcccaggctggtcttaaactcctaggctcaagtgatcctcccgccttggccttccaaagccctgggattatagtttttcttctttcggggacgtggcctgcatggctatctgctcctgccagtgtccagcagccatggccttctgcttcctggagaccctgtggtgggaattcacagcttcctatgacactacctgcattggcctagcctccaggccatacgcttttcttgagtttgacagcatcattcagaaagtgaagtggcattttaactatgtaagttcctctcagatggagtgcagcttggaaaaaattcaggaggagctcaagttgcagcctccagcggttctcactctggaggacacagatgtggcaaatggggtgatgaatggtcacacaccgatgcacttggagcctg

SEQ ID NO: 179267 - DNA, 1446 bp, Homo sapiens
  Payload ID: 15335
  Gene Symbol: SEC22C
  Gene Name: SEC22 homolog C, vesicle trafficking protein
  ENST ID: ENST00000449617
  CDS Start-End: 145-576
ctacctgcgcctgggctgccggtgacctgggccgagccctcccggtcggctaagattgctgaggaggcggcgggtagctggcaggcgccgacttccgaaggccgccgtccgggcgaggtgtcctcatgacttctcttgtggaccatgtccgtgatcttttttgcctgcgtggtacgggtaagggatggactgcccctctcagcctctactgatttttaccacacccaagattttttggaatggaggagacggctcaagagtttagccttgcgactggcccagtatccaggtcgaggttctgcagaaggttgtgactttagtatacaacattttaaaggaagcggaagaaagacagtctcaggaataggtcgaactgaagagacaatatacctgcagcaaacagctacaggactgtttaaagccaagcaagtgcagaattcagtttttcttctttcggggacgtggcctgcatggctatctgctcctgccagtgtccagcagccatggccttctgcttcctggagaccctgtggtgggaattcacagcttcctatgacactacctgcattggcctagcctccaggccatacgcttttcttgagtttgacagcatcattcagaaagtgaagtggcattttaactatgtaagttcctctcagatggagtgcagcttggaaaaaattcaggaggagctcaagttgcagcctccagcggttctcactctggaggacacagatgtggcaaatggggtgatgaatggtcacacaccgatgcacttggagcctgctcctaatttccgaatggaaccagtgacagccctgggtatcctctccctcattctcaacatcatgtgtgctgccctgaatctcattcgaggagttcaccttgcagaacattctttacaggttgcccatgaggaaattggaaacattctggcttttcttgttcctttcgtagcctgcattttccaggatccaaggagctggttctgctggttggaccaaacctcgtgagccagccacccctgacccaaatgaggagagctctgattctcccatccgggagcagtgatgtcaaacttctgctgctggggaaatctcatcagcagggagcctgtggaaaagggcatgtcagtgaaatctgggaatggctggattcggaaacatctgcccatgtgtattgatggcagagctgttgcccacaagcgccttttatttagggtaaaattaacaaatccattctattcctctgacccatgcttagtacatatgacctttaacccttacatttatatgattctggggttgcttcagaagtgttatttcatgaatcattcatatgatttgatcccccaggattctattttgtttaatgggcttttctactaaaagcataaaatactgaggctgatttagtcagggcaaaaccatttactttacatattcg

SEQ ID NO: 179268 - DNA, 872 bp, Homo sapiens
  Payload ID: 15335
  Gene Symbol: SEC22C
  Gene Name: SEC22 homolog C, vesicle trafficking protein
  ENST ID: ENST00000456515
  CDS Start-End: 163-872
actctgtcacgcggagcctccccgcctccagacgtcagtccggttgctaccccggcaggaatcgagcttagatcacgaaggctccttctcacctccggacgtgagaattacaggcttggatctcaaaccgccgcggtgtcctcatgacttctcttgtggaccatgtccgtgatcttttttgcctgcgtggtacgggtaagggatggactgcccctctcagcctctactgatttttaccacacccaagattttttggaatggaggagacggctcaagagtttagccttgcgactggcccagtatccaggtcgaggttctgcagaaggttgtgactttagtatacatttttcttctttcggggacgtggcctgcatggctatctgctcctgccagtgtccagcagccatggccttctgcttcctggagaccctgtggtgggaattcacagcttcctatgacactacctgcattggcctagcctccaggccatacgcttttcttgagtttgacagcatcattcagaaagtgaagtggcattttaactatgtaagttcctctcagatggagtgcagcttggaaaaaattcaggaggagctcaagttgcagcctccagcggttctcactctggaggacacagatgtggcaaatggggtgatgaatggtcacacaccgatgcacttggagcctgctcctaatttccgaatggaaccagtgacagccctgggtatcctctccctcattctcaacatcatgtgtgctgccctgaatctcattcgaggagttcaccttgcagaacattctttacaggttgcccatgaggaaattggaaacattctggcttttcttgttcctttcgtagcctgcattttcca

SEQ ID NO: 179269 - DNA, 527 bp, Homo sapiens
  Payload ID: 15335
  Gene Symbol: SEC22C
  Gene Name: SEC22 homolog C, vesicle trafficking protein
  ENST ID: ENST00000416880
  CDS Start-End: 206-527
acctgcgcctgggctgccggtgacctgggccgagccctcccggtcggctaagattgctgaggaggcggcgggtagctggcaggcgccgacttccgaaggccgccgtccgggcgagcaacttggagccttaatagaatctacagatttggtaaccagttctcaagtcctgtggctgaaggtgtcctcatgacttctcttgtggaccatgtccgtgatcttttttgcctgcgtggtacgggtaagggatggactgcccctctcagcctctactgatttttaccacacccaagattttttggaatggaggagacggctcaagagtttagccttgcgactggcccagtatccaggtcgaggttctgcagaaggttgtgactttagtatacatttttcttctttcggggacgtggcctgcatggctatctgctcctgccagtgtccagcagccatggccttctgcttcctggagaccctgtggtgggaattcacagcttcctatgacactacctgcattggcctagcctcca

SEQ ID NO: 179270 - DNA, 721 bp, Homo sapiens
  Payload ID: 15335
  Gene Symbol: SEC22C
  Gene Name: SEC22 homolog C, vesicle trafficking protein
  ENST ID: ENST00000450981
  CDS Start-End: 294-721
gaggagcctccagccagcgctcctatacctgcgcgttccctgtttgcccccccctttgaagtcagtcgcccaatctgaaagccgtggatgcgcctgcgccctccatctcgtcagtagagacggggttccactgtgttagccaggatggtctcgatttcctgacctcgtgatccgcctgcctcggcctcccaaagtgctgggattacaggcgtgagccaccgcacctggactgattggttttttaacatcattaaagtttctatcaggtgtcctcatgacttctcttgtggaccatgtccgtgatcttttttgcctgcgtggtacgggtaagggatggactgcccctctcagcctctactgatttttaccacacccaagattttttggaatggaggagacggctcaagagtttagccttgcgactggcccagtatccaggtcgaggttctgcagaaggttgtgactttagtatacatttttcttctttcggggacgtggcctgcatggctatctgctcctgccagtgtccagcagccatggccttctgcttcctggagaccctgtggtgggaattcacagcttcctatgacactacctgcattggcctagcctccaggccatacgcttttcttgagtttgacagcatcattcagaaagtgaagtggcattttaactatgtaagttcctctcagatggagtgcagcttggaaaaaattcagga

SEQ ID NO: 179271 - DNA, 823 bp, Homo sapiens
  Payload ID: 15335
  Gene Symbol: SEC22C
  Gene Name: SEC22 homolog C, vesicle trafficking protein
  ENST ID: ENST00000445388
  CDS Start-End: 170-388
aagactcgcgcacgcgcaccacggcctacctgcgcctgggctgccggtgacctgggccgagccctcccggtcggctaagattgctgaggaggcggcgggtagctggcaggcgccgacttccgaaggccgccgtccgggcgaggtgtcctcatgacttctcttgtggaccatgtccgtgatcttttttgcctgcgtggtacgggtaagggatggactgcccctctcagcctctactgatttttaccacacccaagattttttggaatggaggagacggctcaagagtttagccttgcgactggcccagtatccaggtcgaggttctgcagaaggttgtgactttagtatacaagacaaggtcttgccatgttgcccaggctggtcttaaactcctaggctcaagtgatcctcccgccttggccttccaaagccctgggattatagatgtggagaagtctgaggctaattcccccaatagaatatgcatccctcatgcatgaataaataagagtgatcacaggctgtcattgattaagactactagacattttaaaggaagcggaagaaagacagtctcaggaataggtcgaactgaagagacaatatacctgcagcaaacagctacaggactgtttaaagccaagcaagtgcagaattcagtttttcttctttcggggacgtggcctgcatggctatctgctcctgccagtgtccagcagccatggccttctgcttcctggagaccctgtggtgggaattcacagcttcctatgacactacctgcattggcctagcctccaggccatacgcttttcttgagttt

SEQ ID NO: 179272 - DNA, 1513 bp, Homo sapiens
  Payload ID: 15335
  Gene Symbol: SEC22C
  Gene Name: SEC22 homolog C, vesicle trafficking protein
  Uniprot ID: Q9BRL7
  ENST ID: ENST00000417572
  CDS Start-End: 149-901
ccagtttccagctcacccggctcccggttgatctcgatgtcgaagtggcactgcggccggtcctgcgcccccatcgcgaccgaggtggcggcaagagctgggagagagggggagaaaagcggtgtcctcatgacttctcttgtggaccatgtccgtgatcttttttgcctgcgtggtacgggtaagggatggactgcccctctcagcctctactgatttttaccacacccaagattttttggaatggaggagacggctcaagagtttagccttgcgactggcccagtatccaggtcgaggttctgcagaaggttgtgactttagtatacatttttcttctttcggggacgtggcctgcatggctatctgctcctgccagtgtccagcagccatggccttctgcttcctggagaccctgtggtgggaattcacagcttcctatgacactacctgcattggcctagcctccaggccatacgcttttcttgagtttgacagcatcattcagaaagtgaagtggcattttaactatgtaagttcctctcagatggagtgcagcttggaaaaaattcaggaggagctcaagttgcagcctccagcggttctcactctggaggacacagatgtggcaaatggggtgatgaatggtcacacaccgatgcacttggagcctgctcctaatttccgaatggaaccagtgacagccctgggtatcctctccctcattctcaacatcatgtgtgctgccctgaatctcattcgaggagttcaccttgcagaacattctttacaggttgcccatgaggaaattggaaacattctggcttttcttgttcctttcgtagcctgcattttccaggatccaaggagctggttctgctggttggaccaaacctcgtgagccagccacccctgacccaaatgaggagagctctgattctcccatccgggagcagtgatgtcaaacttctgctgctggggaaatctcatcagcagggagcctgtggaaaagggcatgtcagtgaaatctgggaatggctggattcggaaacatctgcccatgtgtattgatggcagagctgttgcccacaagcgccttttatttagggtaaaattaacaaatccattctattcctctgacccatgcttagtacatatgacctttaacccttacatttatatgattctggggttgcttcagaagtgttatttcatgaatcattcatatgatttgatcccccaggattctattttgtttaatgggcttttctactaaaagcataaaatactgaggctgatttagtcagggcaaaaccatttactttacatattcgttttcaatacttgctgttcatgttacacaagcttcttacggttttcttgtaacaataaatattttgagtaaataatgggtacattttaacaaactcagtagtacaacctaaacttgtataaaagtgtgtaaaaatgtatagccatttatatcctatgtataaattaaatgaggtggctt

SEQ ID NO: 179273 - DNA, 553 bp, Homo sapiens
  Payload ID: 15335
  Gene Symbol: SEC22C
  Gene Name: SEC22 homolog C, vesicle trafficking protein
  ENST ID: ENST00000420163
  CDS Start-End: 328-553
cggtgacctgggccgagccctcccggtcggctaagattgctgaggaggcggcgggtagctggcaggcgccgacttccgaaggccgccgtccgggcgagatttacacatgtacctccagagccagaaggataaagcactcggggaaaaattagttttgttttttgtttttttgtttttgacggagtctcgctctgtagcccaggatggagtgcagtggtgtgatcttggctcactgccatctcagcctcccggattcaagcgattctcctgcctcagcctcccaagtatctgagactacaggtgtcctcatgacttctcttgtggaccatgtccgtgatcttttttgcctgcgtggtacgggtaagggatggactgcccctctcagcctctactgatttttaccacacccaagattttttggaatggaggagacggctcaagagtttagccttgcgactggcccagtatccaggtcgaggttctgcagaaggttgtgactttagtatacaactactagacattttaaaggaagcggaagaaagacagtctcagg

SEQ ID NO: 179274 - DNA, 780 bp, Homo sapiens
  Payload ID: 15335
  Gene Symbol: SEC22C
  Gene Name: SEC22 homolog C, vesicle trafficking protein
  ENST ID: ENST00000454141
  CDS Start-End: 133-318
gggctgccggtgacctgggccgagccctcccggtcggctaagattgctgaggaggcggcgggtagctggcaggcgccgacttccgaaggccgccgtccgggcgaggtgtcctcatgacttctcttgtggaccatgtccgtgatcttttttgcctgcgtggtacgggtaagggatggactgcccctctcagcctctactgatttttaccacacccaagattttttggaatggaggagacggctcaagagtttagccttgcgactggcccagtatccaggtcgaggttctgcagaaggttgtgactttagtatacagtgagcagtaccatagcttttaatagtaaggagtgtgttagttccctaaggctgccataacaaatgaccacaaactggcttcaaacaacagaattcgttctctcacagatgtggagaagtctgaggctaattcccccaatagaatatgcatccctcatgcatgaataaataagagtgatcacaggctgtcattgattaagactactagacattttaaaggaagcggaagaaagacagtctcaggaataggtcgaactgaagagacaatatacctgcagcaaacagctacaggactgtttaaagccaagcaagtgcagaattcagtttttcttctttcggggacgtggcctgcatggctatctgctcctgccagtgtccagcagccatggccttctgcttcctggagaccctgtggtgggaattcacagcttcctatgacactacctgcattggcctagcctccagg

SEQ ID NO: 179275 - DNA, 1458 bp, Homo sapiens
  Payload ID: 15335
  Gene Symbol: SEC22C
  Gene Name: SEC22 homolog C, vesicle trafficking protein
  Uniprot ID: Q9BRL7
  ENST ID: ENST00000423701
  CDS Start-End: 125-811
ggtgacctgggccgagccctcccggtcggctaagattgctgaggaggcggcgggtagctggcaggcgccgacttccgaaggccgccgtccgggcgaggtgtcctcatgacttctcttgtggaccatgtccgtgatcttttttgcctgcgtggtacgggtaagggatggactgcccctctcagcctctactgatttttaccacacccaagattttttggaatggaggagacggctcaagagtttagccttgcgactggcccagtatccaggtcgaggttctgcagaaggttgtgactttagtatacatttttcttctttcggggacgtggcctgcatggctatctgctcctgccagtgtccagcagccatggccttctgcttcctggagaccctgtggtgggaattcacagcttcctatgacactacctgcattggcctagcctccaggccatacgcttttcttgagtttgacagcatcattcagaaagtgaagtggcattttaactatgtaagttcctctcagatggagtgcagcttggaaaaaattcaggaggagctcaagttgcagcctccagcggttctcactctggaggacacagatgtggcaaatggggtgatgaatggtcacacaccgatgcacttggagcctgctcctaatttccgaatggaaccagtgacagccctgggtatcctctccctcattctcaacatcatgtgtgctgccctgaatctcattcgaggagttcaccttgcagaacattctttacaggatccaaggagctggttctgctggttggaccaaacctcgtgagccagccacccctgacccaaatgaggagagctctgattctcccatccgggagcagtgatgtcaaacttctgctgctggggaaatctcatcagcagggagcctgtggaaaagggcatgtcagtgaaatctgggaatggctggattcggaaacatctgcccatgtgtattgatggcagagctgttgcccacaagcgccttttatttagggtaaaattaacaaatccattctattcctctgacccatgcttagtacatatgacctttaacccttacatttatatgattctggggttgcttcagaagtgttatttcatgaatcattcatatgatttgatcccccaggattctattttgtttaatgggcttttctactaaaagcataaaatactgaggctgatttagtcagggcaaaaccatttactttacatattcgttttcaatacttgctgttcatgttacacaagcttcttacggttttcttgtaacaataaatattttgagtaaataatgggtacattttaacaaactcagtagtacaacctaaacttgtataaaagtgtgtaaaaatgtatagccatttatatcctatgtataaattaaatgaggtggcttcagaaatggcagaataaatctaaagtgtttattaa

SEQ ID NO: 179276 - DNA, 5955 bp, Homo sapiens
  Payload ID: 15335
  Gene Symbol: SEC22C
  Gene Name: SEC22 homolog C, vesicle trafficking protein
  ENST ID: ENST00000451653
  CDS Start-End: 1-676
agcagccatggccttctgcttcctggagaccctgtggtgggaattcacagcttcctatgacactacctgcattggcctagcctccaggccatacgcttttcttgagtttgacagcatcattcagaaagtgaagtggcattttaactatgtaagttcctctcagatggagtgcagcttggaaaaaattcaggaggagctcaagttgcagcctccagcggttctcactctggaggacacagatgtggcaaatggggtgatgaatggtcacacaccgatgcacttggagcctgctcctaatttccgaatggaaccagtgacagccctgggtatcctctccctcattctcaacatcatgtgtgctgccctgaatctcattcgaggagttcaccttgcagaacattctttacaggttgcccatgaggaaattggaaacattctggcttttcttgttcctttcgtagcctgcattttccagtgttatttgtacctgttctacagtccagccaggactatgaaggtggtgcttatgctgctctttatttgcctgggcaacatgtacctgcacgggctgaggaacctctggcaaatccttttccacataggagtggcttttctgtcttcatatcagatactaacaaggcagcttcaggagaagcagtctgactgtggagtatgaggatgacactgtgatgaatggattctttgattttcttttgaggatcaatctatgtttctctttctgcttctctactttacactccagtttccatccttttcagccaactggactgaaaaaccaggaattggggatgttaaacagttgcagtggaagtcatgaggttgcttgatacccagccttggttctgtgccaagcattactgcaggatctccagccagttcagcacgtttacctaggacagctggatctgggggctcatccagaaagagctttattggaagagagaaaggaaatattttggtcttttaagttgaatgatacagtaaaccacttgattcaataacactggttttagtcattgagagttgtctccaaggaaccactttaaaatccaaatcagctttcagtctaaacataacttgattagttttttttttcagagggtcagtacaggatgaattaaaaacctaaaaatatggttcataaatgtaagctagataaattttgtttacattttttcaatatcttaggttcgatatacctttggaatatttaattatattttggatataaattggacttcatttagggtgagggcaaacttaagctgagaaaatggttaagaaatctgagtttatttaatttatatgtaaccttttatagtggtgggactgtttgggtacagagatgttttatatttatttgcagggtatatccgaatattttaaaaattaattgaataaccagtacttctagatgataagtttgtcagcatgagcagaaatgagaatttcaggattacttacaattgaccacaacctggagtaggtgaatgaacatggattcagtggcactttacagatccgcttgggaggggctgctgtcatcagccttttcagtagagctgagtgcctgttgttttaatgatgatgactactgtaccctgtgtacctgttcccagagcgcctccaaaattaattactcctctgcacctttcccagtcatcttaattagcttgagggcctcattttttatgaacaagagttaagtatctgttaactttttaaagcttgatagagatataattaacacatactctggaaagttactctctttcactgtcaaaaaattgattgatcacagttttccaaaatatggttctggataagatcccttaggtttcccgaaatttcagcctggcttgttttgtaccacgcaggaggtcattttgggagtttgctctttggattgttcttggtagaagtctggaatctgaatagttcaaccacagttgcatggaacactttgagtgttcaactgcattatgtggtcttgataaatttttaaaaatcctattttgatagtttttaaaagtggaaaaccattacaagagttgagtggatagggaatgtaagaatgtagttttagaaaaattcaattatatttggttatcactggtattgtattgttattgagctaccttgttatcattttaagaaaaataagtttatatactgggaactatgttgggaaaatgttgccatagtaactttattttttataatagaattttctatttttgaccaaacataaaatatttggatatgggccaggcatgatggctcatgcctgtattcccagcactttggaaggccaaagcaggagactcggttgaggccagtagtttgagaccagcctggacaacatagtaagattcatctctacaaaaaaaaaaattagccggatgtgatggcacatgcctgtaatcccagcactttgggagtctgaggcaggaggatcccttgagtccaggagtttgaggcttccatgagctataatcacaccactgcaccccagcctgcatgacagagtgaaaccctgtctctaaaaagtctgaatatgaaaattatattggcagcatactcagacataaactccaaagttgtctctacactgatttcacatctgcataattttctgcatacccagcaggtgaattttcagtttttctgggagacaattttgaagagatggtgaaatagaatgggaagttaaggaggggaggtaaaatgttttaaatgagaagaacaaaaaagctttaaaagtcaataacactttgggaagctgaggtgggcagatcacgaggtcaagagatcgagaccatcctggctaacatggtgaaaccccatctctactaaaaatacaaaaattagctgggcacggtggcttgtgcctgtagccccagctactcaggaggctgaggcaggagaatctcttgaacccgggaggtggaggttgcagtgagccgagatcgagccactgcactccagcctggtgacaaagcaagactccgtctcaaaaaaaaaaaaaaaaaaagtcggtaagaacggcttaaaaatggactgttttcttttcctatgtggcattgggttgccatgtagacctgtaccccaggtgctttgggcatctgagcctatgatccatattcagcaggcagtaaagaaacggtccttgaagatgagtccttcctggtaatgcttcctgaccaccgaggcactaccagagatgttatccacaccaggtcgaatgtgtggatatcagttaacatctacatggggtgagattgacttttgcaaacaaaagggaaaagatgcactagaaaaacagtacaagtaatgaccacaaaaacattgtttgactgaaatccagctagctaaaagaatcctcagctcactgaaggaagagactgaaaataggaaagaagttctggtgatttcatccgagggaaatccccaggcttaggtttgacttggttcagggttggaggtttatagcctcttgtgtgatccttgataccagcaaactggttccaaatcccaggagttatcctcactccaccatggactcactgttgttgtagcacttttgttttcccagtagttaaatgctacctgtgcagctgacatcactggactagatctgggaatagatgaaataatgttgaaaacaaaactttagaggtgccttctggtatcagatgctgcaaggccttgagcatcagagtgtgttaagtcccatctactgtatcaaggccagagtgtggctccatgctcttaggaagggtttcccaaccacggggccagagcccaaaaggtttccccttccctaatatgctaatgaacgaaacatgtaaatctgttttcccctgttaggctagtcttactgtgatgagaagtgtacctggctttccttttcctgggtggagacagctggggcatattcgggtggcattccctctcagtaccagaggccccactgcctgcagctggaggcatgtgaccataagctcctgcttttgctttttgggcttgcatccctcttttctgtgaactctggagaatgctggaattaaaacatttaagcattttgattaaatgagcttgagctcctctgttcttttctaggtgctcttgttctccaactctcctgcctctttctacctctgccctatacattccagctctggagacagagtctgaaactggagtctctggagggatgagaaaaccatctttaattgtaacaaatggggtgggtagacgagcttcagagtgggagcagattgcattgaggttcaactctcccacccatgcctgggagtcaagtcttggagaggagtaacacttggtggtcagcacagctcagagtcagagacaatagccagcaggccagcaaggctggctgtgtgaggcacaggaagcagggcataggtagggagcagagctgggggttctctctctgctggaagatagcagctgccccttggcatatgggggttgcacactgcaccttgtagccagggctgctatttgctgttctgtgaaggagttggccactcattgtgacatgcaggacagtggccttctgagaacctgctgcttgcttgcatagtgcagcacaagtgaggacaggcaggggtgggagcatttatggtgatcagatgtgcctggcaagcccctgttcagacattgctcacattccaaatgttttcgtgtagaatattgcacaggtctggggacgctctacctgtgccctgtgagtgttaataatggtggagaaagagtgtagctgtgcccttgagagagaaggtgagggaaagagtgcaccagtcagctgaccgtcagctggctaggctcttcactgagtcctatgtcgcagtgcacaaatcactgcccatcaggcctcagtttcctcatctggtaaatggtgataacatcaatctgcccccccgccagggtgctgttatgagggtcaaaagtggtagtggagggtaatactgggtgagtccattgtgtgtgggaggagaaaggctttacattcacctggtacatgaaggtttttctgcttcaggcagcacagcacagccatttcttctggcctttacaaaaaggcattttgttatactacagtgtaaacctcatttttttcactccaaaaggtagcagcccctcttcttcccaccctggacctgcctttcactccctgggcacagagcgcatggtaccattgatgtttggtttattccaggatccaaggagctggttctgctggttggaccaaacctcgtgagccagccacccctgacccaaatgaggagagctctgattctcccatccgggagcagtgatgtcaaacttctgctgctggggaaatctcatcagcagggagcctgtggaaaagggcatgtcagtgaaatctgggaatggctggattcggaaacatctgcccatgtgtattgatggcagagctgttgcccacaagcgccttttatttagggtaaaattaacaaatccattctattcctctgacccatgcttagtacatatgacctttaacccttacatttatatgattctggggttgcttcagaagtgttatttcatgaatcattcatatgatttgatcccccaggattctattttgtttaatgggcttttctactaaaagcataaaatactgaggctgatttagtcagggcaaaaccatttactttacatattcgttttcaatacttgctgttcatgttacacaagcttcttacggttttcttgtaacaataaatattttgagtaaataatgggtacattttaacaaactcagtagtacaacctaaacttgtataaaagtgtgtaaaaatgtatagccatttatatcctatgtataaattaaatgaggtggcttcagaaatggcagaataaatctaaagtgtttattaa

SEQ ID NO: 179277 - DNA, 4135 bp, Homo sapiens
  Payload ID: 15336
  Gene Symbol: SEC23A
  Gene Name: Sec23 homolog A, COPII coat complex component
  Uniprot ID: Q15436
  ENST ID: ENST00000307712
  CDS Start-End: 519-2816
acgctgtggctttagggagctgggaaaggcgctctctcccggtcccgctctgcccggtcccacgcccctcggccgtccggctgcctgggtcttccgggttcttccgcccctctggctcggtccccgctacctctcctccctcctcccctctcggtaccttcgcccgccgcgcgcctttctcaaatcctccggttattaagcaagctcaggggtccggtggcctgccctggtaactctgcgcccgccccttcctgcccccttcctgccctcacgccccgtcccctcctcttgacgtggcagaggcggcgccagccatgttggccgggcggaggtcttcgctgaggcccggggcggggtggcgccacccctgattgcggtgccacggactgctcctgctgggcggagaggacagattttgcaaagcggaggctgcgacgggtcctgcagggggacagtgaggaaagggccgcctcgtctccgctcctgggggaccgcagaaataagaatcaaactccacaatgacaacctatttggaattcattcaacaaaatgaagaacgagatggagtccgatttagttggaatgtttggccatcaagtcgactggaagctacaagaatggttgttcctgtggcagccctgtttacaccactgaaagagagacctgacttaccacctattcaatatgaacctgttctgtgtagtaggaccacttgccgtgcagttttgaatcctttatgtcaagtggattatcgagcaaaactttgggcttgcaacttttgttaccaaaggaatcagtttccacctagttatgctggtatatctgaactgaatcagcctgctgaacttttacctcagttttctagcattgaatatgtagttctgcgtggtcctcagatgcctttgatattcctctatgtggttgatacttgcatggaagatgaagatttacaagccctgaaagaatccatgcagatgtcattaagtcttttaccacctacagctttggttggacttattacttttgggagaatggttcaggttcatgaacttggatgtgaaggcatttcaaaaagctatgtcttcagaggaacaaaagatttgtctgccaaacaactgcaggaaatgctggggctctctaaagtaccacttactcaagcaacacgtggtcctcaggtacagcagccacctccttccaacagattcttacaaccagtacagaaaatagacatgaatctcacagatcttctgggagaactccagcgagacccttggcctgtaccacagggaaagagacctttgcgttcctctggggtggcactttccatagctgtaggactgctggagtgtacttttcccaacactggtgctcgtatcatgatgttcattggtggtcctgctactcaggggcctggaatggtggttggagatgagttgaagacacctataagatcgtggcatgacattgacaaagacaatgccaaatatgttaaaaagggaactaagcattttgaagcattggctaatcgagctgctacaactggccatgttattgatatctatgcgtgtgcattagatcagacaggtctcctggagatgaaatgctgtcccaaccttactggaggatacatggtaatgggtgattctttcaatacttccttattcaaacaaacttttcaaagagtctttaccaaagacatgcatggacagtttaaaatgggctttggtggtacgctagaaataaagacctcaagggaaataaagatttcaggagctattggaccctgtgtgtcactcaattctaaaggaccctgtgtgtctgaaaatgagataggaacaggtggcacatgtcagtggaagatatgtggacttagtcccactacaaccttagccatatattttgaggttgtcaatcagcataatgctccaattcctcaaggagggcgtggtgcaatccagtttgtgactcagtatcagcattcaagtgggcagagacgcatccgagtgaccaccattgctaggaactgggcagatgctcaaactcaaatccaaaacattgctgcatcttttgaccaggaggcagctgccattcttatggcccggctagcaatatatagagcagaaacagaagaaggtccagatgtgcttaggtggctggacagacagctcattcgactgtgtcagaaatttggagaatatcataaagatgacccaagttccttcagattttcagaaactttctccctttatccacagtttatgtttcatttaagaagatcttctttcctgcaagtttttaacaatagtcctgatgagagttcatattatcgtcaccattttatgcgtcaagatctgacccagtctctaattatgattcagcctatcctgtatgcgtattcttttagtggaccaccagagccggttcttcttgatagcagtagcattcttgcagatcgtattcttctcatggacacattcttccagattttgatttatcatggtgagaccatagcacagtggcggaagtcaggataccaggatatgcctgagtatgaaaatttccgccaccttctgcaagccccagtggatgatgcacaggaaattcttcactccagatttccaatgccaagatacattgacactgaacatggaggcagccaggcccgtttcctcctttcaaaagtcaacccttcacagactcataataatatgtatgcctgggggcaggagtctggagcacctattcttacagatgatgttagtttacaagtgtttatggatcacttgaagaaacttgctgtgtccagtgctgcttgaagtgctaataatgttaaagacacttaagaagatgaaataatattcaaatttcattttttcctttttccatttatctgtggaaaccaacagatattgctctatattttttgtattagtatggtttgagacaacatatggaaaatgttcacatttgtagattaagctggaattataatgagagcaataagaacaaatttattttgcttaccacagtgttatagctggttctagaaatttgaagtctttataacttaattatgtttaataaaaaatagagtctgcctcgtactacagatgtaactcatttgtatattgcagacagacccaaagtggcactgaattttcttgctcaccttttaaaaacttgttccttaattttagccagaaagcaaaaaaacaatagtaatgataaatgtgaacatttttgcttattcattgaatatttttctgtaattttcagcacttatgtatacactttttctgtacttactaggttaaggcagatttatttttatgatttgtttaggaattatttgattttataatggtaattttcatgatgataatgtttttggttatttggaaagatagtttagagatgaaaggtttttttgggtaacaatcccgcagctgacaaaaaatgtgaaatttccacaaaatatccaacttatgtgactaaacgcagtagtttttttaaaaggggagatagaaaataaatggttttgttggagtgcattttagtaagcctttgcagtaaaatgacggttgtaactactaaaccaaatttagttttcacagcatggttttgttgttttccccttgtttttcagaggtaaattttgcattatatccttcagtattttaacactattttggcagtttacacattactttttgtttttccttcctttttgtgaaatgtattaagttgtggttcttattgaaacagtattatataatgtttgcttaattatatcatgtgatgctcagttctattttgatttattcattagtattcacttttacctttaaagtttacttgtagcaaatatgtttacattgataaagccagatatgttttgacaatgaaatttacatatcaagtactgcaaataaaaggtggtgctatgatatatgcttaggaggacagttttaatgattgtacttgcatgaacacaatcatatgatggtaaagcagaaacttaagaaaaaattgtttatgtgttatattcaattagcttaaataagttgctttgttatattttatttgaattgaactacgctaggcctaaatgccaataaaatatacttttcactgt

SEQ ID NO: 179278 - DNA, 4215 bp, Homo sapiens
  Payload ID: 15336
  Gene Symbol: SEC23A
  Gene Name: Sec23 homolog A, COPII coat complex component
  Uniprot ID: Q15436
  ENST ID: ENST00000537403
  CDS Start-End: 1204-2895
tctcgctctgtcacccgggctggagtgcggtggcacgatctcagctcactgcaacctctgcctcttgggttcaagcgcttctcttgcctcagcctcccaagtagctgggattacaggagcataccaccatgccttactaatttttgtatttttagtagagttggtgcttcaccatgttagccaaggttggtcttgaacttctgaccttgtgatttgcccaccttgacctcccaaagtgctgggattacaggcatgatccaccgcacctggccctaatttttgtatttttagtagacatggggtttcaccatgttggccaggctggtcttgaactcctgacctcaggtgatccacccgcctcggcctcccaaaatactgggattacagctgtgattcactgcgcctggccacatcttccttttttcaataggcaagtgaatgcctgcagactgaattttttttctccattgaaacatgtttattttctttccctatttagattaaatttccctattctttccctattattagttgaaaagagcctggcctttgctccccagatagtcctggattcaaatcttaaactcttctggttgtatgatcctgggtttttgtctttgctgattgtgtcatccttcatagaaaggaataaactacctattttgccaggttattagtactaaatatgaaattctcaatatggtgtaaacccttatagagctttatagaaaaacctggatttaaaatcttgctttgttacttactgattgtgtaacctcagacaaattacttagtctttctgattgtcaattttcatttataaagtagaatttaagaagaaatctatttcattattgttttgtgaggaaatagtatatataaaggttttagcatagaatatggaacatattaagttcttagtaaagagttgctgtttctgctaacagtataggaaatattgcaggattagttcactaattttatctttgtacatctttagacttcagttttctgttacacagttttataactccagtacttcatgactaagcatttctagattcaagaaaaatttagtataacattattttcatttgtctagagagaaattgtgcacatatctgaaattcaaaacaaaggtggcagttcgtagtttggttatgaattacattagaaaatcaagatgtatataggtacaaagaaatgctggggctctctaaagtaccacttactcaagcaacacgtggtcctcaggtacagcagccacctccttccaacagattcttacaaccagtacagaaaatagacatgaatctcacagatcttctgggagaactccagcgagacccttggcctgtaccacagggaaagagacctttgcgttcctctggggtggcactttccatagctgtaggactgctggagtgtacttttcccaacactggtgctcgtatcatgatgttcattggtggtcctgctactcaggggcctggaatggtggttggagatgagttgaagacacctataagatcgtggcatgacattgacaaagacaatgccaaatatgttaaaaagggaactaagcattttgaagcattggctaatcgagctgctacaactggccatgttattgatatctatgcgtgtgcattagatcagacaggtctcctggagatgaaatgctgtcccaaccttactggaggatacatggtaatgggtgattctttcaatacttccttattcaaacaaacttttcaaagagtctttaccaaagacatgcatggacagtttaaaatgggctttggtggtacgctagaaataaagacctcaagggaaataaagatttcaggagctattggaccctgtgtgtcactcaattctaaaggaccctgtgtgtctgaaaatgagataggaacaggtggcacatgtcagtggaagatatgtggacttagtcccactacaaccttagccatatattttgaggttgtcaatcagcataatgctccaattcctcaaggagggcgtggtgcaatccagtttgtgactcagtatcagcattcaagtgggcagagacgcatccgagtgaccaccattgctaggaactgggcagatgctcaaactcaaatccaaaacattgctgcatcttttgaccaggaggcagctgccattcttatggcccggctagcaatatatagagcagaaacagaagaaggtccagatgtgcttaggtggctggacagacagctcattcgactgtgtcagaaatttggagaatatcataaagatgacccaagttccttcagattttcagaaactttctccctttatccacagtttatgtttcatttaagaagatcttctttcctgcaagtttttaacaatagtcctgatgagagttcatattatcgtcaccattttatgcgtcaagatctgacccagtctctaattatgattcagcctatcctgtatgcgtattcttttagtggaccaccagagccggttcttcttgatagcagtagcattcttgcagatcgtattcttctcatggacacattcttccagattttgatttatcatggtgagaccatagcacagtggcggaagtcaggataccaggatatgcctgagtatgaaaatttccgccaccttctgcaagccccagtggatgatgcacaggaaattcttcactccagatttccaatgccaagatacattgacactgaacatggaggcagccaggcccgtttcctcctttcaaaagtcaacccttcacagactcataataatatgtatgcctgggggcaggagtctggagcacctattcttacagatgatgttagtttacaagtgtttatggatcacttgaagaaacttgctgtgtccagtgctgcttgaagtgctaataatgttaaagacacttaagaagatgaaataatattcaaatttcattttttcctttttccatttatctgtggaaaccaacagatattgctctatattttttgtattagtatggtttgagacaacatatggaaaatgttcacatttgtagattaagctggaattataatgagagcaataagaacaaatttattttgcttaccacagtgttatagctggttctagaaatttgaagtctttataacttaattatgtttaataaaaaatagagtctgcctcgtactacagatgtaactcatttgtatattgcagacagacccaaagtggcactgaattttcttgctcaccttttaaaaacttgttccttaattttagccagaaagcaaaaaaacaatagtaatgataaatgtgaacatttttgcttattcattgaatatttttctgtaattttcagcacttatgtatacactttttctgtacttactaggttaaggcagatttatttttatgatttgtttaggaattatttgattttataatggtaattttcatgatgataatgtttttggttatttggaaagatagtttagagatgaaaggtttttttgggtaacaatcccgcagctgacaaaaaatgtgaaatttccacaaaatatccaacttatgtgactaaacgcagtagtttttttaaaaggggagatagaaaataaatggttttgttggagtgcattttagtaagcctttgcagtaaaatgacggttgtaactactaaaccaaatttagttttcacagcatggttttgttgttttccccttgtttttcagaggtaaattttgcattatatccttcagtattttaacactattttggcagtttacacattactttttgtttttccttcctttttgtgaaatgtattaagttgtggttcttattgaaacagtattatataatgtttgcttaattatatcatgtgatgctcagttctattttgatttattcattagtattcacttttacctttaaagtttacttgtagcaaatatgtttacattgataaagccagatatgttttgacaatgaaatttacatatcaagtactgcaaataaaaggtggtgctatgatatatgcttaggaggacagttttaatgattgtacttgcatgaacacaatcatatgatggtaaagcagaaacttaagaaaaaattgtttatgtgttatattcaattagcttaaataagttgctttgttatattttatttgaattgaactacgctaggcctaaatgccaataaaatatacttttcactgtt

SEQ ID NO: 179279 - DNA, 2734 bp, Homo sapiens
  Payload ID: 15336
  Gene Symbol: SEC23A
  Gene Name: Sec23 homolog A, COPII coat complex component
  ENST ID: ENST00000545328
  CDS Start-End: 226-2436
gtggcagaggcggcgccagccatgttggccgggcggaggtcttcgctgaggcccggggcggggtggcgccacccctgattgcggtgccacggactgctcctgctgggcggagaggacagattttgcaaagcggaggctgcgacgggtcctgcagggggacagtgaggaaagggccgcctcgtctccgctcctgggggaccgcagaaataagaatcaaactccacaatgacaacctatttggaattcattcaacaaaatgaagaacgagatggagtccgatttagttggaatgtttggccatcaagtcgactggaagctacaagaatggttgttcctgtggcagccctgtttacaccactgaaagagagacctgacttaccacctattcaatatgaacctgttctgtgtagtaggaccacttgccgtgcagttttgaatcctttatgtcaagtggattatcgagcaaaactttgggcttgcaacttttgttaccaaaggaatcagcgtggtcctcagatgcctttgatattcctctatgtggttgatacttgcatggaagatgaagatttacaagccctgaaagaatccatgcagatgtcattaagtcttttaccacctacagctttggttggacttattacttttgggagaatggttcaggttcatgaacttggatgtgaaggcatttcaaaaagctatgtcttcagaggaacaaaagatttgtctgccaaacaactgcaggaaatgctggggctctctaaagtaccacttactcaagcaacacgtggtcctcaggtacagcagccacctccttccaacagattcttacaaccagtacagaaaatagacatgaatctcacagatcttctgggagaactccagcgagacccttggcctgtaccacagggaaagagacctttgcgttcctctggggtggcactttccatagctgtaggactgctggagtgtacttttcccaacactggtgctcgtatcatgatgttcattggtggtcctgctactcaggggcctggaatggtggttggagatgagttgaagacacctataagatcgtggcatgacattgacaaagacaatgccaaatatgttaaaaagggaactaagcattttgaagcattggctaatcgagctgctacaactggccatgttattgatatctatgcgtgtgcattagatcagacaggtctcctggagatgaaatgctgtcccaaccttactggaggatacatggtaatgggtgattctttcaatacttccttattcaaacaaacttttcaaagagtctttaccaaagacatgcatggacagtttaaaatgggctttggtggtacgctagaaataaagacctcaagggaaataaagatttcaggagctattggaccctgtgtgtcactcaattctaaaggaccctgtgtgtctgaaaatgagataggaacaggtggcacatgtcagtggaagatatgtggacttagtcccactacaaccttagccatatattttgaggttgtcaatcagcataatgctccaattcctcaaggagggcgtggtgcaatccagtttgtgactcagtatcagcattcaagtgggcagagacgcatccgagtgaccaccattgctaggaactgggcagatgctcaaactcaaatccaaaacattgctgcatcttttgaccaggaggcagctgccattcttatggcccggctagcaatatatagagcagaaacagaagaaggtccagatgtgcttaggtggctggacagacagctcattcgactgtgtcagaaatttggagaatatcataaagatgacccaagttccttcagattttcagaaactttctccctttatccacagtttatgtttcatttaagaagatcttctttcctgcaagtttttaacaatagtcctgatgagagttcatattatcgtcaccattttatgcgtcaagatctgacccagtctctaattatgattcagcctatcctgtatgcgtattcttttagtggaccaccagagccggttcttcttgatagcagtagcattcttgcagatcgtattcttctcatggacacattcttccagattttgatttatcatggtgagaccatagcacagtggcggaagtcaggataccaggatatgcctgagtatgaaaatttccgccaccttctgcaagccccagtggatgatgcacaggaaattcttcactccagatttccaatgccaagatacattgacactgaacatggaggcagccaggcccgtttcctcctttcaaaagtcaacccttcacagactcataataatatgtatgcctgggggcaggagtctggagcacctattcttacagatgatgttagtttacaagtgtttatggatcacttgaagaaacttgctgtgtccagtgctgcttgaagtgctaataatgttaaagacacttaagaagatgaaataatattcaaatttcattttttcctttttccatttatctgtggaaaccaacagatattgctctatattttttgtattagtatggtttgagacaacatatggaaaatgttcacatttgtagattaagctggaattataatgagagcaataagaacaaatttattttgcttaccacagtgttatagctggttctagaaatttgaagtctttataacttaattatgtttaataaaaaatagagtctgcctcgtactacagatgt

SEQ ID NO: 179280 - DNA, 907 bp, Homo sapiens
  Payload ID: 15336
  Gene Symbol: SEC23A
  Gene Name: Sec23 homolog A, COPII coat complex component
  ENST ID: ENST00000548032
  CDS Start-End: 203-529
gttggccgggcggaggtcttcgctgaggcccggggcggggtggcgccacccctgattgcggtgccacggactgctcctgctgggcggagaggacagattttgcaaagcggaggctgcgacgggtcctgcagggggacagtgaggaaagggccgcctcgtctccgctcctgggggaccgcagaaataagaatcaaactccacaatgacaacctatttggaattcattcaacaaaatgaagaacgagatggagtccgatttagttggaatgtttggccatcaagtcgactggaagctacaagaatggttgttcctgtggcagccctgtttacaccactgaaagagagacctgacttaccacctattcaatatgaacctgttctgtgtagtaggaccacttgccgtgcagttttgaatcctttatgtcaagtggattatcgagcaaaactttgggcttgcaacttttgttaccaaaggaatcaggtaagaaaacatccattgcatgccgggcgcagtggctcatgcctgtaatcccagcactttgggaggccgaggcgggtggatcacgaggtcaggagattgagaccatcctggctaacacagtgaaaccccgtctctactaaaaatacaaaaaaaaaattagctgggcgtggtggcaggcgcctgtagtcccagctactcgtgaggctgaggcaggagaatggcatgaacccgggaggtggagcttgcagtgagccgagattgcaccactctactccagcctgggcaacagagcaagactccgtctcaaaaacaaacaaacaaaacaaacaaacaaacaaatgaaaaaaaacccataaaacatccattgcagatgttaatgccaaaatactagtcatgtagaaaaatgcatatttaaaaaaagataca

SEQ ID NO: 179281 - DNA, 588 bp, Homo sapiens
  Payload ID: 15336
  Gene Symbol: SEC23A
  Gene Name: Sec23 homolog A, COPII coat complex component
  ENST ID: ENST00000555017
  CDS Start-End: 82-588
gtgattctcggaatcaaccagggtcctaagatgtcctggaggccgtctccatttctctcgaaataagaatcaaactccacaatgacaacctatttggaattcattcaacaaaatgaagaacgagatggagtccgatttagttggaatgtttggccatcaagtcgactggaagctacaagaatggttgttcctgtggcagccctgtttacaccactgaaagagagacctgacttaccacctattcaatatgaacctgttctgtgtagtaggaccacttgccgtgcagttttgaatcctttatgtcaagtggattatcgagcaaaactttgggcttgcaacttttgttaccaaaggaatcagtttccacctagttatgctggtatatctgaactgaatcagcctgctgaacttttacctcagttttctagcattgaatatgtagttctgcgtggtcctcagatgcctttgatattcctctatgtggttgatacttgcatggaagatgaagatttacaagccctgaaagaatccatgcagatgtcattaagtcttttaccacctacagctttggttggacttattactttt

SEQ ID NO: 179282 - DNA, 571 bp, Homo sapiens
  Payload ID: 15336
  Gene Symbol: SEC23A
  Gene Name: Sec23 homolog A, COPII coat complex component
  ENST ID: ENST00000556092
  CDS Start-End: 150-571
ggcagaggcggcgccagccatgttggccgggcggagaggacagattttgcaaagcggaggctgcgacgggtcctgcagggggacagtgaggaaagggccgcctcgtctccgctcctgggggaccgcagaaataagaatcaaactccacaatgacaacctatttggaattcattcaacaaaatgaagaacgagatggagtccgatttagttggaatgtttggccatcaagtcgactggaagctacaagaatggttgttcctgtggcagccctgtttacaccactgaaagagagacctgacttaccacctattcaatatgaacctgttctgtgtagtaggaccacttgccgtgcagttttgaatcctttatgtcaagtggattatcgagcaaaactttgggcttgcaacttttgttaccaaaggaatcagtttccacctagttatgctggtatatctgaactgaatcagcctgctgaacttttacctcagttttctagcattgaatatgtagttctgcgtggtcctcagatgcctttgatattcctctatgtggttgatacttgcatggaaga

SEQ ID NO: 179283 - DNA, 574 bp, Homo sapiens
  Payload ID: 15336
  Gene Symbol: SEC23A
  Gene Name: Sec23 homolog A, COPII coat complex component
  ENST ID: ENST00000553970
  CDS Start-End: 234-494
ctcttgacgtggcagaggcggcgccagccatgttggccgggcggaggtcttcgctgaggcccggggcggggtggcgccacccctgattgcggtgccacggactgctcctgctgggcggagaggacagattttgcaaagcggaggctgcgacgggtcctgcagggggacagtgaggaaagggccgcctcgtctccgctcctgggggaccgcagaaataagaatcaaactccacaatgacaacctatttggaattcattcaacaaaatgaagaacgagatggagtccgatttagttggaatgtttggccatcaagtcgactggaagctacaagaatggttgttcctgtggcagccctgtttacaccactgaaagagagacctgacttaccacctattcaatatgaacctgttctgtgtagtaggaccacttgccgtgcagttttgaatcctttatgcagtctgttctctacccagaagctagagttttatgaatgaaaatcagatgatgaacatcttccagtagtagcttcttattcttggaatgagaaatacaaactccttatcaagatctataa

SEQ ID NO: 179284 - DNA, 547 bp, Homo sapiens
  Payload ID: 15336
  Gene Symbol: SEC23A
  Gene Name: Sec23 homolog A, COPII coat complex component
  ENST ID: ENST00000555425
  CDS Start-End: 267-547
gttctccttcctcagcctccggagtagctgggattacaggcgcatgtcaccatgcccggctaatttttgtatttttagtagagacggggtttcactgtgttagccaggatggtctcgatctcctgacctcatgatccgcctgcctcggcctcccaaagtgctgggattacagatagatgtgatttgtgattctcggaatcaaccagggtcctaagatgtcctggaggccgtctccatttctctcgaaataagaatcaaactccacaatgacaacctatttggaattcattcaacaaaatgaagaacgagatggagtccgatttagttggaatgtttggccatcaagtcgactggaagctacaagaatggttgttcctgtggcagccctgtttacaccactgaaagagagacctgacttaccacctattcaatatgaacctgttctgtgtagtaggaccacttgccgtgcagttttgaatcctttatgtcaagtggattatcgagcaaaactttgggcttgcaacttttgttaccaaaggaatcaggt

SEQ ID NO: 179285 - DNA, 575 bp, Homo sapiens
  Payload ID: 15336
  Gene Symbol: SEC23A
  Gene Name: Sec23 homolog A, COPII coat complex component
  ENST ID: ENST00000557437
  CDS Start-End: 456-575
aggctgactaaaatacataaatagtacgtgaattctttcgggccagggatctgggcctactttgcctgcatcatattaccagcatctcaattgtgtctggcacatagtaagtttcagtaaacatttgttgcactaagtgaaagaatgaacttttcacttttttcagagatgtgatttgtgattctcggaatcaaccagggtcctaagatgtcctggaggccgtctccatttctctcgaggcggcgccagccatgttggccgggcggaggtcttcgctgaggcccggggcggggtggcgccacccctgattgcggtgccacggactgctcctgctgggcggagaggacagattttgcaaagcggaggctgcgacgggtcctgcagggggacagtgaggaaagggccgcctcgtctccgctcctgggggaccgcagaaataagaatcaaactccacaatgacaacctatttggaattcattcaacaaaatgaagaacgagatggagtccgatttagttggaatgtttggccatcaagtcgactggaagctacaagaatggttgttcctgtggcagcc

SEQ ID NO: 179286 - DNA, 561 bp, Homo sapiens
  Payload ID: 15336
  Gene Symbol: SEC23A
  Gene Name: Sec23 homolog A, COPII coat complex component
  ENST ID: ENST00000557280
  CDS Start-End: 224-481
ggcagaggcggcgccagccatgttggccgggcggaggtcttcgctgaggcccggggcggggtggcgccacccctgattgcggtgccacggactgctcctgctgggcggagaggacagattttgcaaagcggaggctgcgacgggtcctgcagggggacagtgaggaaagggccgcctcgtctccgctcctgggggaccgcagaaataagaatcaaactccacaatgacaacctatttggaattcattcaacaaaatgaagaacgagatggagtccgatttagttggaatgtttggccatcaagtcgactggaagctacaagaatggttgttcctgtggcagccctgtttacaccactgaaagagagacctgacttaccacctattcaatatgaacctgttctgtgtagtaggaccacttgccgtgcagttttgaatcctttatgtctgttctctacccagaagctagagttttatgaatgaaaatcagatgatgaacatcttccagtagtagcttcttattcttggaatgagaaatacaaactccttatcaagatctataa

SEQ ID NO: 179287 - DNA, 261 bp, Homo sapiens
  Payload ID: 15336
  Gene Symbol: SEC23A
  Gene Name: Sec23 homolog A, COPII coat complex component
  ENST ID: ENST00000625395
  CDS Start-End: 1-261
atgacaacctatttggaattcattcaacaaaatgaagaacgagatggagtccgatttagttggaatgtttggccatcaagtcgactggaagctacaagaatggttgttcctgtggcagccctgtttacaccactgaaagagagacctgacttaccacctattcaatatgaacctgttctgtgtagtaggaccacttgccgtgcagttttgaatcctttatgcagtctgttctctacccagaagctagagttttatgaatga

SEQ ID NO: 179288 - DNA, 3176 bp, Homo sapiens
  Payload ID: 15337
  Gene Symbol: SEC23B
  Gene Name: Sec23 homolog B, COPII coat complex component
  Uniprot ID: Q15437
  ENST ID: ENST00000262544
  CDS Start-End: 491-2794
atcgttctcgctttccggtagctaaggcgatcagcgggacttcccactgagacgagcggatgtcatattgtatcagggcgaacctctgaggagcgctggctgcgcttaggcaacggtgcggcaggcgccggggttttctgaaacagaaacgtttaggggtggggaaacgtgttccgaggaactctcgttttgaagtgcgacatacacctgtcttgccctgttccaagatggtggcagagcttctctgagtctctcgcttcctccagtccgtcggagaagcgctctttgattggccagtggacagcgccgtggcatgacgcgctggggcgctggccaatcggttgagagctgagctggacttggcggtgggagccggagcctgcttgttgcagctgtgggtgaggacggctctagctaggtgagcggctccggccaggtgagcggggcgcataggtgacggagggccgagggcacggttcccttttagactatggcgacatacctggagttcatccagcagaatgaagaacgggatggtgtgcgttttagttggaacgtgtggccttccagccggctggaggctacaagaatggttgtacccctggcttgtctccttactcctttgaaagaacgtccagacctacctcctgtacaatatgaacctgtgctttgcagcaggccaacttgtaaagctgttctcaacccactttgtcaggttgattatcgagcaaaactttgggcctgtaatttctgttttcaaagaaatcagtttcctccagcttatggaggcatatctgaggtgaatcaacctgccgaattgatgccccagttttctacaattgagtacgtgatacagcgaggtgctcagtcccctctgatctttctctatgtggttgacacatgcctggaggaagatgaccttcaagcactcaaagagtccctgcagatgtccctgagtcttcttcctccagatgctctggtgggtctgatcacatttggaaggatggtgcaggttcatgagctaagctgtgaaggaatctccaaaagttatgtcttccgagggaccaaggatttaactgcaaagcaaatacaggatatgttgggcctgaccaagccagccatgcccatgcagcaagcacgacctgcacaaccacaggagcacccttttgcttcaagcagatttctgcagcctgttcacaagattgatatgaacctcactgatcttcttggggagctacagagggacccatggccagtaactcaggggaagagacctttgcgatccactggtgtggctttgtccattgctgttggcttgctggagggcacttttccaaacacaggagccaggatcatgctgtttactggaggtccccctacccaagggcctggcatggtggttggagatgaattaaagattcctattcgttcttggcatgatattgagaaagataatgcacgattcatgaaaaaggcaaccaagcactatgagatgcttgctaatcgaacagctgcaaatggtcactgcattgatatttatgcttgtgcccttgatcaaactggacttttggagatgaagtgttgtgcaaatcttactggaggctacatggtaatgggagattctttcaacacttctctcttcaagcagacattccaaagaatctttactaaagattttaatggagatttccgaatggcatttggtgctactttggacgtaaagacctctcgggaactgaagattgcaggagccattggtccatgcgtatctctgaatgtgaaaggaccgtgtgtgtcagaaaatgagcttggtgttggtggcacgagtcagtggaaaatctgtggcctagatcctacatctacacttggcatctattttgaagttgtcaatcagcacaacaccccgatcccccaaggaggcagaggagccatccagtttgtcacgcattatcagcactccagcacccagagacgcatccgcgtgaccaccatcgcccgaaattgggcagatgtacagagtcagctcaggcacatagaagcagcatttgaccaggaggctgcggcagtgttgatggcacggcttggggtgttccgagcggagtcagaggaggggcccgatgtgctccggtggctggaccgacaactcatccgactgtgtcaaaagtttggacagtataacaaagaagaccccacttcttttaggttatcagattccttttctctatatcctcagtttatgttccatctgagaagatctccatttcttcaagtgtttaacaacagtcctgatgagtcgtcatattacagacatcattttgcccggcaggacctgacccagtccctcatcatgatccagcccattctctactcttactcctttcatgggccaccagagccagtactcttggatagcagcagcattctagctgacagaattttgctgatggatactttctttcaaattgtcatttatcttggtgagaccatagcccagtggcgtaaagctggctaccaggacatgcccgagtatgaaaacttcaagcaccttctgcaggcaccactggatgatgctcaagaaattctgcaagcacgcttcccgatgccacgttacatcaacacggagcatggaggcagtcaggctcgattccttttgtccaaagtgaacccatctcagacacacaataacctgtatgcttggggacaggaaactggagcacccatcctaactgatgatgttagcctgcaggtgttcatggaccatttgaagaagctggctgtctccagtgcctgttaagctgaggatacaaccaggaaatgcaacggtgtcagattgtgttcaaaatgtctagaaaggcttgataacattcctgttacttttctagcagattttaacaaataatcaaggacattttatatgtaactctttagattataatttatttgtattcctgtctttgtcctttttcttgcactataaaattataaggtcataaatgttttggtacttgtagatgtttatgtgctttttgtatcctaacttttagaatctaaataaaatcagaggtaatgtattttggcagcttgtttaggtgagaatcttaatgatcataaaggaaataaatctagatgcagaaagtactggctaaaatattgctaatacaaatgtgatttcctga

SEQ ID NO: 179289 - DNA, 3411 bp, Homo sapiens
  Payload ID: 15337
  Gene Symbol: SEC23B
  Gene Name: Sec23 homolog B, COPII coat complex component
  Uniprot ID: Q15437
  ENST ID: ENST00000336714
  CDS Start-End: 433-2736
atcgttctcgctttccggtagctaaggcgatcagcgggacttcccactgagacgagcggatgtcatattgtatcagggcgaacctctgaggagcgctggctgcgcttaggcaacggtgcggcaggcgccggggttttctgaaacagaaacgtttaggggtggggaaacgtgttccgaggaactctcgttttgaagtgcgacatacacctgtcttgccctgttccaagatggtggcagagcttctctgagtctctcgcttcctccagtccgtcggagaagcgctctttgattggccagtggacagcgccgtggcatgacgcgctggggcgctggccaatcggttgagagctgagctggacttggcggtgggagccggagcctgcttgttgcagctgtgggtgaggacggctctagctagttcccttttagactatggcgacatacctggagttcatccagcagaatgaagaacgggatggtgtgcgttttagttggaacgtgtggccttccagccggctggaggctacaagaatggttgtacccctggcttgtctccttactcctttgaaagaacgtccagacctacctcctgtacaatatgaacctgtgctttgcagcaggccaacttgtaaagctgttctcaacccactttgtcaggttgattatcgagcaaaactttgggcctgtaatttctgttttcaaagaaatcagtttcctccagcttatggaggcatatctgaggtgaatcaacctgccgaattgatgccccagttttctacaattgagtacgtgatacagcgaggtgctcagtcccctctgatctttctctatgtggttgacacatgcctggaggaagatgaccttcaagcactcaaagagtccctgcagatgtccctgagtcttcttcctccagatgctctggtgggtctgatcacatttggaaggatggtgcaggttcatgagctaagctgtgaaggaatctccaaaagttatgtcttccgagggaccaaggatttaactgcaaagcaaatacaggatatgttgggcctgaccaagccagccatgcccatgcagcaagcacgacctgcacaaccacaggagcacccttttgcttcaagcagatttctgcagcctgttcacaagattgatatgaacctcactgatcttcttggggagctacagagggacccatggccagtaactcaggggaagagacctttgcgatccactggtgtggctttgtccattgctgttggcttgctggagggcacttttccaaacacaggagccaggatcatgctgtttactggaggtccccctacccaagggcctggcatggtggttggagatgaattaaagattcctattcgttcttggcatgatattgagaaagataatgcacgattcatgaaaaaggcaaccaagcactatgagatgcttgctaatcgaacagctgcaaatggtcactgcattgatatttatgcttgtgcccttgatcaaactggacttttggagatgaagtgttgtgcaaatcttactggaggctacatggtaatgggagattctttcaacacttctctcttcaagcagacattccaaagaatctttactaaagattttaatggagatttccgaatggcatttggtgctactttggacgtaaagacctctcgggaactgaagattgcaggagccattggtccatgcgtatctctgaatgtgaaaggaccgtgtgtgtcagaaaatgagcttggtgttggtggcacgagtcagtggaaaatctgtggcctagatcctacatctacacttggcatctattttgaagttgtcaatcagcacaacaccccgatcccccaaggaggcagaggagccatccagtttgtcacgcattatcagcactccagcacccagagacgcatccgcgtgaccaccatcgcccgaaattgggcagatgtacagagtcagctcaggcacatagaagcagcatttgaccaggaggctgcggcagtgttgatggcacggcttggggtgttccgagcggagtcagaggaggggcccgatgtgctccggtggctggaccgacaactcatccgactgtgtcaaaagtttggacagtataacaaagaagaccccacttcttttaggttatcagattccttttctctatatcctcagtttatgttccatctgagaagatctccatttcttcaagtgtttaacaacagtcctgatgagtcgtcatattacagacatcattttgcccggcaggacctgacccagtccctcatcatgatccagcccattctctactcttactcctttcatgggccaccagagccagtactcttggatagcagcagcattctagctgacagaattttgctgatggatactttctttcaaattgtcatttatcttggtgagaccatagcccagtggcgtaaagctggctaccaggacatgcccgagtatgaaaacttcaagcaccttctgcaggcaccactggatgatgctcaagaaattctgcaagcacgcttcccgatgccacgttacatcaacacggagcatggaggcagtcaggctcgattccttttgtccaaagtgaacccatctcagacacacaataacctgtatgcttggggacaggaaactggagcacccatcctaactgatgatgttagcctgcaggtgttcatggaccatttgaagaagctggctgtctccagtgcctgttaagctgaggatacaaccaggaaatgcaacggtgtcagattgtgttcaaaatgtctagaaaggcttgataacattcctgttacttttctagcagattttaacaaataatcaaggacattttatatgtaactctttagattataatttatttgtattcctgtctttgtcctttttcttgcactataaaattataaggtcataaatgttttggtacttgtagatgtttatgtgctttttgtatcctaacttttagaatctaaataaaatcagaggtaatgtattttggcagcttgtttaggtgagaatcttaatgatcataaaggaaataaatctagatgcagaaagtactggctaaaatattgctaatacaaatgtgatttcctgaggtctctgtgtgagtgtgtatgtgttttaagtgacttccttaagaggtgtttcctgaacctaattctcataattaaagtaatgtatatgcaggatcaaaatgaaacaaatataccttatcctaaagagctcataacaaataagttacctccactctataaactcagacctactttttgaagataactgcttttaacctctccttacaagatttttgttgttgatgtatttaattttagcccatgtctcaattctcattttcaaagaatcaatatattaatatacctttggtca

SEQ ID NO: 179290 - DNA, 3229 bp, Homo sapiens
  Payload ID: 15337
  Gene Symbol: SEC23B
  Gene Name: Sec23 homolog B, COPII coat complex component
  Uniprot ID: Q15437
  ENST ID: ENST00000377465
  CDS Start-End: 251-2554
gcttctgggaggaggccttttcttgacagtttagggtagcgggggaatggatgatccgggagtcccctgcggatgtcgtcccgcaccaggccgggaccgatttctggctccagtttccccagaattgcggagtgcgcacacctggaaggacccaagtcccgttttatagttgagaaactcaagactcagacaagtgaaacgacttttgcttcatgacagctggaactggaacccagttcccttttagactatggcgacatacctggagttcatccagcagaatgaagaacgggatggtgtgcgttttagttggaacgtgtggccttccagccggctggaggctacaagaatggttgtacccctggcttgtctccttactcctttgaaagaacgtccagacctacctcctgtacaatatgaacctgtgctttgcagcaggccaacttgtaaagctgttctcaacccactttgtcaggttgattatcgagcaaaactttgggcctgtaatttctgttttcaaagaaatcagtttcctccagcttatggaggcatatctgaggtgaatcaacctgccgaattgatgccccagttttctacaattgagtacgtgatacagcgaggtgctcagtcccctctgatctttctctatgtggttgacacatgcctggaggaagatgaccttcaagcactcaaagagtccctgcagatgtccctgagtcttcttcctccagatgctctggtgggtctgatcacatttggaaggatggtgcaggttcatgagctaagctgtgaaggaatctccaaaagttatgtcttccgagggaccaaggatttaactgcaaagcaaatacaggatatgttgggcctgaccaagccagccatgcccatgcagcaagcacgacctgcacaaccacaggagcacccttttgcttcaagcagatttctgcagcctgttcacaagattgatatgaacctcactgatcttcttggggagctacagagggacccatggccagtaactcaggggaagagacctttgcgatccactggtgtggctttgtccattgctgttggcttgctggagggcacttttccaaacacaggagccaggatcatgctgtttactggaggtccccctacccaagggcctggcatggtggttggagatgaattaaagattcctattcgttcttggcatgatattgagaaagataatgcacgattcatgaaaaaggcaaccaagcactatgagatgcttgctaatcgaacagctgcaaatggtcactgcattgatatttatgcttgtgcccttgatcaaactggacttttggagatgaagtgttgtgcaaatcttactggaggctacatggtaatgggagattctttcaacacttctctcttcaagcagacattccaaagaatctttactaaagattttaatggagatttccgaatggcatttggtgctactttggacgtaaagacctctcgggaactgaagattgcaggagccattggtccatgcgtatctctgaatgtgaaaggaccgtgtgtgtcagaaaatgagcttggtgttggtggcacgagtcagtggaaaatctgtggcctagatcctacatctacacttggcatctattttgaagttgtcaatcagcacaacaccccgatcccccaaggaggcagaggagccatccagtttgtcacgcattatcagcactccagcacccagagacgcatccgcgtgaccaccatcgcccgaaattgggcagatgtacagagtcagctcaggcacatagaagcagcatttgaccaggaggctgcggcagtgttgatggcacggcttggggtgttccgagcggagtcagaggaggggcccgatgtgctccggtggctggaccgacaactcatccgactgtgtcaaaagtttggacagtataacaaagaagaccccacttcttttaggttatcagattccttttctctatatcctcagtttatgttccatctgagaagatctccatttcttcaagtgtttaacaacagtcctgatgagtcgtcatattacagacatcattttgcccggcaggacctgacccagtccctcatcatgatccagcccattctctactcttactcctttcatgggccaccagagccagtactcttggatagcagcagcattctagctgacagaattttgctgatggatactttctttcaaattgtcatttatcttggtgagaccatagcccagtggcgtaaagctggctaccaggacatgcccgagtatgaaaacttcaagcaccttctgcaggcaccactggatgatgctcaagaaattctgcaagcacgcttcccgatgccacgttacatcaacacggagcatggaggcagtcaggctcgattccttttgtccaaagtgaacccatctcagacacacaataacctgtatgcttggggacaggaaactggagcacccatcctaactgatgatgttagcctgcaggtgttcatggaccatttgaagaagctggctgtctccagtgcctgttaagctgaggatacaaccaggaaatgcaacggtgtcagattgtgttcaaaatgtctagaaaggcttgataacattcctgttacttttctagcagattttaacaaataatcaaggacattttatatgtaactctttagattataatttatttgtattcctgtctttgtcctttttcttgcactataaaattataaggtcataaatgttttggtacttgtagatgtttatgtgctttttgtatcctaacttttagaatctaaataaaatcagaggtaatgtattttggcagcttgtttaggtgagaatcttaatgatcataaaggaaataaatctagatgcagaaagtactggctaaaatattgctaatacaaatgtgatttcctgaggtctctgtgtgagtgtgtatgtgttttaagtgacttccttaagaggtgtttcctgaacctaattctcataattaaagtaatgtatatgcaggatcaaaatgaaacaaatataccttatcctaaagagctcataacaaataagttacctccactctataaactcagacctactttttgaagataactgcttttaacctctccttacaagatttttgttgttgatgtatttaattttagcccatgtctcaattctcattttcaaagaatcaatatattaatatacctttggtca

SEQ ID NO: 179291 - DNA, 3405 bp, Homo sapiens
  Payload ID: 15337
  Gene Symbol: SEC23B
  Gene Name: Sec23 homolog B, COPII coat complex component
  Uniprot ID: Q15437
  ENST ID: ENST00000377475
  CDS Start-End: 427-2730
aggcgatcagcgggacttcccactgagacgagcggatgtcatattgtatcagggcgaacctctgaggagcgctggctgcgcttaggcaacggtgcggcaggcgccggggttttctgaaacagaaacgtttaggggtggggaaacgtgttccgaggaactctcgttttgaagtgcgacatacacctgtcttgccctgttccaagatggtggcagagcttctctgagtctctcgcttcctccagtccgtcggagaagcgctctttgattggccagtggacagcgccgtggcatgacgcgctggggcgctggccaatcggttgagagctgagctggacttggcggtgggagccggagcctgcttgttgcagctgtgggtgaggacggctctagctaggtgagcggctccggccagttcccttttagactatggcgacatacctggagttcatccagcagaatgaagaacgggatggtgtgcgttttagttggaacgtgtggccttccagccggctggaggctacaagaatggttgtacccctggcttgtctccttactcctttgaaagaacgtccagacctacctcctgtacaatatgaacctgtgctttgcagcaggccaacttgtaaagctgttctcaacccactttgtcaggttgattatcgagcaaaactttgggcctgtaatttctgttttcaaagaaatcagtttcctccagcttatggaggcatatctgaggtgaatcaacctgccgaattgatgccccagttttctacaattgagtacgtgatacagcgaggtgctcagtcccctctgatctttctctatgtggttgacacatgcctggaggaagatgaccttcaagcactcaaagagtccctgcagatgtccctgagtcttcttcctccagatgctctggtgggtctgatcacatttggaaggatggtgcaggttcatgagctaagctgtgaaggaatctccaaaagttatgtcttccgagggaccaaggatttaactgcaaagcaaatacaggatatgttgggcctgaccaagccagccatgcccatgcagcaagcacgacctgcacaaccacaggagcacccttttgcttcaagcagatttctgcagcctgttcacaagattgatatgaacctcactgatcttcttggggagctacagagggacccatggccagtaactcaggggaagagacctttgcgatccactggtgtggctttgtccattgctgttggcttgctggagggcacttttccaaacacaggagccaggatcatgctgtttactggaggtccccctacccaagggcctggcatggtggttggagatgaattaaagattcctattcgttcttggcatgatattgagaaagataatgcacgattcatgaaaaaggcaaccaagcactatgagatgcttgctaatcgaacagctgcaaatggtcactgcattgatatttatgcttgtgcccttgatcaaactggacttttggagatgaagtgttgtgcaaatcttactggaggctacatggtaatgggagattctttcaacacttctctcttcaagcagacattccaaagaatctttactaaagattttaatggagatttccgaatggcatttggtgctactttggacgtaaagacctctcgggaactgaagattgcaggagccattggtccatgcgtatctctgaatgtgaaaggaccgtgtgtgtcagaaaatgagcttggtgttggtggcacgagtcagtggaaaatctgtggcctagatcctacatctacacttggcatctattttgaagttgtcaatcagcacaacaccccgatcccccaaggaggcagaggagccatccagtttgtcacgcattatcagcactccagcacccagagacgcatccgcgtgaccaccatcgcccgaaattgggcagatgtacagagtcagctcaggcacatagaagcagcatttgaccaggaggctgcggcagtgttgatggcacggcttggggtgttccgagcggagtcagaggaggggcccgatgtgctccggtggctggaccgacaactcatccgactgtgtcaaaagtttggacagtataacaaagaagaccccacttcttttaggttatcagattccttttctctatatcctcagtttatgttccatctgagaagatctccatttcttcaagtgtttaacaacagtcctgatgagtcgtcatattacagacatcattttgcccggcaggacctgacccagtccctcatcatgatccagcccattctctactcttactcctttcatgggccaccagagccagtactcttggatagcagcagcattctagctgacagaattttgctgatggatactttctttcaaattgtcatttatcttggtgagaccatagcccagtggcgtaaagctggctaccaggacatgcccgagtatgaaaacttcaagcaccttctgcaggcaccactggatgatgctcaagaaattctgcaagcacgcttcccgatgccacgttacatcaacacggagcatggaggcagtcaggctcgattccttttgtccaaagtgaacccatctcagacacacaataacctgtatgcttggggacaggaaactggagcacccatcctaactgatgatgttagcctgcaggtgttcatggaccatttgaagaagctggctgtctccagtgcctgttaagctgaggatacaaccaggaaatgcaacggtgtcagattgtgttcaaaatgtctagaaaggcttgataacattcctgttacttttctagcagattttaacaaataatcaaggacattttatatgtaactctttagattataatttatttgtattcctgtctttgtcctttttcttgcactataaaattataaggtcataaatgttttggtacttgtagatgtttatgtgctttttgtatcctaacttttagaatctaaataaaatcagaggtaatgtattttggcagcttgtttaggtgagaatcttaatgatcataaaggaaataaatctagatgcagaaagtactggctaaaatattgctaatacaaatgtgatttcctgaggtctctgtgtgagtgtgtatgtgttttaagtgacttccttaagaggtgtttcctgaacctaattctcataattaaagtaatgtatatgcaggatcaaaatgaaacaaatataccttatcctaaagagctcataacaaataagttacctccactctataaactcagacctactttttgaagataactgcttttaacctctccttacaagatttttgttgttgatgtatttaattttagcccatgtctcaattctcattttcaaagaatcaatatattaatatacctttggtca

SEQ ID NO: 179292 - DNA, 1184 bp, Homo sapiens
  Payload ID: 15337
  Gene Symbol: SEC23B
  Gene Name: Sec23 homolog B, COPII coat complex component
  ENST ID: ENST00000450074
  CDS Start-End: 192-1184
cttcttccggcagccttagtttcttccaaccagtgcagctccctgttccgcgagcatacgtcatcgttctcgctttccggtagctaaggcgatcagcgggacttcccactgagacgagcggatgtcatattgtatcagggcgaacctctgaggagcgctggctgcgcttaggcaacgttcccttttagactatggcgacatacctggagttcatccagcagaatgaagaacgggatggtgtgcgttttagttggaacgtgtggccttccagccggctggaggctacaagaatggttgtacccctggcttgtctccttactcctttgaaagaacgtccagacctacctcctgtacaatatgaacctgtgctttgcagcaggccaacttgtaaagctgttctcaacccactttgtcaggttgattatcgagcaaaactttgggcctgtaatttctgttttcaaagaaatcagtttcctccagcttatggaggcatatctgaggtgaatcaacctgccgaattgatgccccagttttctacaattgagtacgtgatacagcgaggtgctcagtcccctctgatctttctctatgtggttgacacatgcctggaggaagatgaccttcaagcactcaaagagtccctgcagatgtccctgagtcttcttcctccagatgctctggtgggtctgatcacatttggaaggatggtgcaggttcatgagctaagctgtgaaggaatctccaaaagttatgtcttccgagggaccaaggatttaactgcaaagcaaatacaggatatgttgggcctgaccaagccagccatgcccatgcagcaagcacgacctgcacaaccacaggagcacccttttgcttcaagcagatttctgcagcctgttcacaagattgatatgaacctcactgatcttcttggggagctacagagggacccatggccagtaactcaggggaagagacctttgcgatccactggtgtggctttgtccattgctgttggcttgctggagggcacttttccaaacacaggagccaggatcatgctgtttactggaggtccccctacccaagggcctggcatggtggttggagatgaattaaagattcctattcgttcttggcatgatattgagaaagataatgcacgattcatgaaaaaggcaaccaag

SEQ ID NO: 179293 - DNA, 834 bp, Homo sapiens
  Payload ID: 15337
  Gene Symbol: SEC23B
  Gene Name: Sec23 homolog B, COPII coat complex component
  ENST ID: ENST00000422877
  CDS Start-End: 1-741
cagagacgcatccgcgtgaccaccatcgcccgaaattgggcagatgtacagagtcagctcaggcacatagaagcagcatttgaccaggaggctgcggcagtgttgatggcacggcttggggtgttccgagcggagtcagaggaggggcccgatgtgctccggtggctggaccgacaactcatccgactgtgtcaaaagtttggacagtataacaaagaagaccccacttcttttaggttatcagattccttttctctatatcctcagtttatgttccatctgagaagatctccatttcttcaagtgtttaacaacagtcctgatgagtcgtcatattacagacatcattttgcccggcaggacctgacccagtccctcatcatgatccagcccattctctactcttactcctttcatgggccaccagagaccatagcccagtggcgtaaagctggctaccaggacatgcccgagtatgaaaacttcaagcaccttctgcaggcaccactggatgatgctcaagaaattctgcaagcacgcttcccgatgccacgttacatcaacacggagcatggaggcagtcaggctcgattccttttgtccaaagtgaacccatctcagacacacaataacctgtatgcttggggacaggaaactggagcacccatcctaactgatgatgttagcctgcaggtgttcatggaccatttgaagaagctggctgtctccagtgcctgttaagctgaggatacaaccaggaaatgcaacggtgtcagattgtgttcaaaatgtctagaaaggcttgataacattcctgttacttttctagcagat

SEQ ID NO: 179294 - DNA, 7168 bp, Homo sapiens
  Payload ID: 15338
  Gene Symbol: SEC23IP
  Gene Name: SEC23 interacting protein
  Uniprot ID: Q9Y6Y8
  ENST ID: ENST00000369075
  CDS Start-End: 73-3075
gcgtgatcggtttccggtcagtggtgtggtaccgggtacccggagacgtgtatcggacggtgggccgcagccatggccgagagaaaacctaacggtggcagcggcggcgcctccacttcctcatcgggcactaacttacttttctcctcctcggccacggagttcagcttcaatgtgcccttcatcccagtcacccaggcctccgcttctccggcctccctgctcttaccgggagaggattccacagatgttggtgaggaggacagcttccttggtcagacttctattcacacatctgccccacagacatttagttacttctctcaggtatcaagcagcagtgatccttttgggaatattggacagtcaccattaacaactgcagcaacctcagttggacaatcaggattccccaagcccctgactgctctcccttttacaactggatcccaagatgtctcgaatgcattttcaccatccatttcgaaggctcaacctggtgctccaccttcctcactgatgggaataaattcttatctgccttctcagccaagtagtctccctccttcatattttgggaaccaaccccaaggaattccccaaccaggatacaatccatatcgccatacccctggcagcagcagggctaatccttacattgcaccaccccagctgcagcagtgccaaacaccaggccctcctgctcatcctccaccttctggaccccctgttcagatgtaccagatgcctccaggatctttgccaccggttccttcttcagtgcagtcaccggcacagcagcaggtacctgccagacctggggctccctctgttcaagtgccatctccttttctacttcaaaaccaatatgagcctgttcagccccactggttttactgcaaggaggtagaatacaaacaactgtggatgccttttagtgtgttcgactctttgaatcttgaagaaatctataattcagttcagccagatccggagagcgtggttcttggcacggatggagggcgctacgatgtttacctctatgaccgaataaggaaggctgcctactgggaagaggagccagccgaagtgagacgctgtacttggttttacaagggggacacagatagtcgatttattccctatactgaggagttcagtgaaaaactagaggctgaatataaaaaagctgtaaccactaatcagtggcaccgaagattagagtttccaagtggagagacaattgttatgcacaatccaaaggttattgttcagttccagccctcctcagtgccagatgaatggggcaccacgcaagatggacagacaaggcccagggttgtaaagcgtggaattgatgataaccttgatgaaattcccgacggggagatgcctcaagttgaccatttggtgtttgtggtgcatggcattggacctgtgtgtgacttacgctttaggagcattattgagtgtgtggatgattttagggtggtttctctcaaattgctgcggacacatttcaagaaatctttagatgacgggaaagtaagcagagtggagttccttccagttcattggcatagttctttgggtggggacgccacaggtgtggacaggaatattaagaaaatcactttgccaagtattggtcgatttcgtcactttaccaatgaaactttgctagatattttattttataacagccccacctactgtcagacaattgtggaaaaagtaggaatggagataaaccatctgcatgcactctttatgagtcggaacccagacttcaaaggaggtgtctctgttgctggtcacagtttaggttctttaatattgtttgacatcctgtctaatcaaaaagatttgaatttatcaaagtgccctggacctcttgctgttgctaatggagttgtgaagcagctacattttcaggaaaagcagatgcctgaagagccaaagctgactttggatgagtcgtatgaccttgttgttgaaaataaagaagtcctaactttgcaagaaactctggaagcacttagcctctctgaatattttagcacttttgaaaaggaaaagattgatatggagtccctgcttatgtgtacagttgatgacctgaaggaaatggggataccccttggacccagaaagaagatagctaactttgtagaacataaagcagccaaactgaaaaaagcagcgtcagaaaagaaggcagtggcggccacttctacaaaaggacaagagcaaagtgcccagaagactaaagacatggcttccctcccctcagaatccaatgagccaaagaggaaacttccagttggtgcttgcgtgtcttctgtgtgtgtgaattatgaatcttttgaagttggcgccggacaggtttctgttgcttacaactcattagattttgaaccagagatattctttgccttggggtctccaattgctatgtttctcactattcgaggagttgataggatagatgagaattacagccttcctacctgtaaagggttcttcaatatttatcatccgcttgatccagtggcatatagattagaacctatgattgttccagatttggacctaaaagctgttctcattccacatcacaaaggcagaaaaagacttcatttagaattgaaagagagtctctctcgtatgggatctgatttgaagcagggttttattagctctctcaaaagtgcttggcagacattaaatgagtttgcccgtgctcatacgtcttcaacccagttgcaagaagaattggagaaggtggccaatcagatcaaagaagaagaagaaaagcaagtagttgaagcagaaaaggttgttgaaagtccagatttttccaaggatgaggactacttaggaaaggttggaatgttaaatggaggccgccgaattgactacgttctccaagaaaaaccaatagagagttttaatgaataccttttcgctcttcagagtcacttatgctattgggaatctgaagatactgctctgttactacttaaagaaatttatcgaacaatgaacattagtccagaacagccccagcattgatcaaacttcagttttactgtactttcttgtctgcacagaaagtcccagtacaacttccattgctgagaaaatcctcagaggactttcccacttcgctcctgtgatggatgacagaagagtgattcattaacaattgctcagccacaattctcggatatagggattcaaaagacaggacacagaactaacacagtgaaaaaaatcagtaccacatttggacagtataggtgagaaaacataattataaaaatgatgccatgaaaaattccacagatcagtttagttgtatagttgtcaaagttatatgtgatatcaatgaagaaatatttgtagcatgtaaacggttatttctgtttcttaaaaagtattgttagtgggctattaaacttggatttttctttttattaatgcagtatgttctttttattcaagtatgaacttgttgagaaactatagtaatatgatttttaagagatttatgttctacttaaaatgtgaattgtacttctgagctgccttaatgcaaggtcatttatatttgttaagaggaaataatcaagatcactcatatcccaactgaatctgaggttttataaatccctcaaacgattgctgagagcctgattgtggaaagaagtgagatgcaccttattttcaagaagtcctgggaagcgctctcctagcacgtccatttccaggaggagaagcaagcagatgagaggttttccattttgtcatccaaggtagctgtgcacttgccttgttgctgaagttccaataatgtgaaaaccaaagtagaggtttttttcttcttctttttgttttctattaatttcacttataccaaagtgtttgaaagtatgaaatgtgttgcttctgagttatataaggctacttcatgacaagactgctttgtaatatttcactttgttttactacaaattcagatcactttgttttactataaattcagattatccaaatattttcctaatactatgtgggaatgctgattttcttttgttacgtagtggaaacattttgcattgtttacatagttctcatggaacatggaaatttttgaaagtgatatatgatacacattttttgtgtatgtattctaattagtgtgaataaagcagtaacattaatgcattttttaagcagcaaacttatgtatttctcttgtcttccttaaaagtgtccccatgaactcagtgtttattcccttttcattttgagtacctgcttatatggtcagtatgtaacgttagcattggctcctaatggtagaattagaacagcaagattgtagagctgtaattgactccagacaacatagatttcagccacctcattctacagctgaggccaggacaataaatgcctttcccagactgggtagtggcagatctgggatggaatatggttttcttgattccctttcagccttcatttctctctctcaggactactactttttaattacttttcacttaatttcccaatactgatgaaataaagaaaaatgagggttatttatatacatttcaataaaatccaatttgatttttcaacttacatctgatttttgtttgtgtcattcagcctgtcttctgagtaatgggcagagaaggaccagggttcgtagaagaagcatgtggcagctgagtggcagcagtcttgccctttcattttaatacttgagtacacagaaaatagaatttttgagtgactctgcctgtggatatatatactcatacatacatatatatatatacacacacacatatgtatgtatgtatgtattactattcagtctcttaaaaaccaaaaaacagtagatcccctgagggtagagtctttatgtatgaacatattgttcactgttgtaaccaccttgcaggatttcagtctataaactaggtgagaatccagctgctgagtgaagcttgatctctgcctcttcctcaggagcagctcatcccctgacaacctcccctcccagcccctaatctggtttaatgccctccttttccccagataaagaaagtcatgtctgtagttattccaaaagtgtttcatgtgtagagtttggcacaaaaagtaaaaagcgccagcatctgaagtcaaaggtgaaagagtcatcacagtactgatgaagacacccaggcctcgtcagctatgttaacgtgctgtatgacaagaggaacctgctttctaagtctgctggacacgcgtgcttcttgaatccaaccagacaagcatgttttctcaaaaccacagtataagacaaggaaactgcacagattcgagtgatttttgaggtaagtatgttattggaaaggtgtgatctatatagaaccctgtacatgaaaaggaggagatgccgctatcttggcagggatgatcatgtatttgaaatagtaactcacagcatttggtctcatgataagagtactgaagattatcccagaaaacctaggatgattggtatttatagtaccattgtttcaggtttttatgacttgaggcatctaactatcttaatgctgtactttagtgtttaccaagcagctttctggtggaaacttgaactgcagacactgagtgttttggttttcctccaagttatagttctcattgtaacttaataagttggcattccagcttagtttgagtcagtttcccagggctgggtcctcagaggagagtggatagaattcagttcctctatgagctggggtgctgacattgtgttcctgctgttgactgtccctgcggtgcacgggacagactgtcagctaacctgtcttcatgacatttctataatactcctcagggggttaaccccatctctactaaaaataaaaaaaattagctgggcatggtggcatgtgcctgtagtcccagctacaggaggctgaggcaggagaattgcttgaacccaggaggtggaggttgcagtgagttgggatctcgccactgcactctagcctgagtgacagagcgagactctgtctcaaaaaaaaataaatgaataaaaaataaaacagcaactcttgcagatttcccgaatgtattggtcccagagaacactgaaaataatgtcatgttgttaacaccagtgggagtttgggaaataattccagctctttaatacttctttcagcttcagattaagtgaaatgagtttcacatatttcaatatatgaaattttatgatgacacataaaacaggccaggggttattgaggacacatctgtgagatagtgggcaatgctacatattcgttagtggatgtgctgcagttcaggttcatggacaggtgggactggtgtggttgggataacccaccatgtttgtctttcatttcttgtataaagagtggtttttaaaagaccttactatggaattttcacaaatactcaaaagtatggagaatggtacagtgaatccccatgtgcccttttcccagcttcaggggtggtgtcagtgataatgatttggctctgtgtccccacccaaatctcatcttgaattgtaatccccacgtgtcaggggagggacctggtgggaggtgattggatcatgggggctgtttccccatgctgttcttgtgatagtgagggagttctcacaagatctgatggttttaaaagtggcagttttccctgcactctctcctgccaccttgtgaagaaggtgcctgcttcccctttgcctttcgtcacaattgtaagttccccgaggttcgtcatgattgtaagtttcctgaggtctccccaaccatgcagaactgtgagtcacttgaaccccttttgtttataaattgcccagtctcaggtagtaccttgatagcagtgtgaaaatggactaatacagtcagggacctaaaagacaggtaaagagatgtggccaggtgaagacggaaaaaggacagtgcattccagacctgtggaaagacgcgaggttggaaagaacatcacaactggggcgactgaagaaattatgttgttaagcacgaaatgcagagagagagctatgtgaatgtgttgagtgtgattttcattaaacaatttttaaagaaag

SEQ ID NO: 179295 - DNA, 582 bp, Homo sapiens
  Payload ID: 15338
  Gene Symbol: SEC23IP
  Gene Name: SEC23 interacting protein
  ENST ID: ENST00000446561
  CDS Start-End: 1-582
gagcctgttcagccccactggttttactgcaaggaggtagaatacaaacaactgtggatgccttttagtgtgttcgactctttgaatcttgaagaaatctataattcagttcagccagatccggagagcgtggttcttggcacggatggagggcgctacgatgtttacctctatgaccgaataaggaaggctgcctactgggaagaggagccagccgaagtgagacgctgtacttggttttacaagggggacacagatagtcgatttattccctatactgaggagttcagtgaaaaactagaggttattgttcagttccagccctcctcagtgccagatgaatggggcaccacgcaagatggacagacaaggcccagggttgtaaagcgtggaattgatgataaccttgatgaaattcccgacggggagatgcctcaagttgaccatttggtgtttgtggtgcatggcattggacctgtgtgtgacttacgctttaggagcattattgagtgtgtggatgattttagggtggtttctctcaaattgctgcggacacatttcaagaaatctttagatgacggg

SEQ ID NO: 179296 - DNA, 782 bp, Homo sapiens
  Payload ID: 15338
  Gene Symbol: SEC23IP
  Gene Name: SEC23 interacting protein
  ENST ID: ENST00000442952
  CDS Start-End: 1-460
ttcagtgcagtcaccggcacagcagcaggtacctgccagacctggggctccctctgttcaagtgccatctccttttctacttcaaaaccaatatgagcctgttcagccccactggttttactgcaaggaggtagaatacaaacaactgtggatgccttttagtgtgttcgactctttgaatcttgaagaaatctataattcagttcagccagatccggagagcgtggttcttggcacggatggagggcgctacgatgtttacctctatgaccgaataaggaaggctgcctactgggaagaggagccagccgaagtgagacgctgtacttggttttacaagggggacacagatagtcgatttattccctatactgaggagttcagtgaaaaactagaggtacgggtgctttatttctttatgagtttctttaaaaaatgtaggtcctatatacattggtgagtaacatcattcacagtggagcggactttacttacaagacagcttgttttgatgctgttcacagagaagattactttttaagtggtgtcatcactcatgaggtgctaatcgtggcatctgtgtctaaagatagaatatgatttgcagagacacatcacagatctaataaggtgcttgtgtcaagccttcaatagaacctaggccgctgggatttgttgttgatagaagatgccaagcatatggacattttcaaattagtattcagtaaaaggcttgaaattaacctctgatttgtgaaaataaataaatagaattggaagaa

SEQ ID NO: 179297 - DNA, 1461 bp, Homo sapiens
  Payload ID: 15338
  Gene Symbol: SEC23IP
  Gene Name: SEC23 interacting protein
  ENST ID: ENST00000543134
  CDS Start-End: 1-1461
atggccgagagaaaacctaacggtggcagcggcggcgcctccacttcctcatcgggcactaacttacttttctcctcctcggccacggagttcagcttcaatgtgcccttcatcccagtcacccaggcctccgcttctccggcctccctgctcttaccgggagaggattccacagatgttggtgaggaggacagcttccttggtcagacttctattcacacatctgccccacagacatttagttacttctctcaggtatcaagcagcagtgatccttttgggaatattggacagtcaccattaacaactgcagcaacctcagttggacaatcaggattccccaagcccctgactgctctcccttttacaactggatcccaagatgtctcgaatgcattttcaccatccatttcgaaggctcaacctggtgctccaccttcctcactgatgggaataaattcttatctgccttctcagccaagtagtctccctccttcatattttgggaaccaaccccaaggaattccccaaccaggatacaatccatatcgccatacccctggcagcagcagggctaatccttacattgcaccaccccagctgcagcagtgccaaacaccaggccctcctgctcatcctccaccttctggaccccctgttcagatgtaccagatgcctccaggatctttgccaccggttccttcttcagtgcagtcaccggcacagcagcaggtacctgccagacctggggctccctctgttcaagtgccatctccttttctacttcaaaaccaatatgagcctgttcagccccactggttttactgcaaggaggtagaatacaaacaactgtggatgccttttagtgtgttcgactctttgaatcttgaagaaatctataattcagttcagccagatccggagagcgtggttcttggcacggatggagggcgctacgatgtttacctctatgaccgaataaggaaggctgcctactgggaagaggagccagccgaagtgagacgctgtacttggttttacaagggggacacagatagtcgatttattccctatactgaggagttcagtgaaaaactagaggctgaatataaaaaagctgtaaccactaatcagtggcaccgaagattagagtttccaagtggagagacaattgttatgcacaatccaaaggttattgttcagttccagccctcctcagtgccagatgaatggggcaccacgcaagatggacagacaaggcccagggttgtaaagcgtggaattgatgataaccttgatgaaattcccgacggggagatgcctcaagttgaccatttggtgtttgtggtgcatggcattggacctgtgtgtgacttacgctttaggagcattattgagtgtgtggatgatttagggtggtttctctcaaattgctgcggacacatttcaagaaatctttag

SEQ ID NO: 179298 - DNA, 2700 bp, Homo sapiens
  Payload ID: 15339
  Gene Symbol: SEC24A
  Gene Name: SEC24 homolog A, COPII coat complex component
  Uniprot ID: O95486
  ENST ID: ENST00000322887
  CDS Start-End: 254-2095
ctgccgccttctagccgggcgttcgcggccccgccggcccgactctcaagcctcagctcccaggctaggctgtggccgccggtggcctggggagagtgcggcgccatgcctcgggcttaatgcgcccccccctcttctcccagtcttcagtcttaagtcgttagcctcctccctccgctttcagcagtggtctttcagctctcttcttgtgcgctgttgtcgaccccgaccagccccttccaacccagtcatcatgtcccagccgggaataccggcctccggcggcgccccagccagcctccaggcccagaacggagccgccttggcctcggggtctccctacaccaacggtcctgtccaaaatgcattgctgtcttcacaagagtcagtgagccaaggatacaatttccagcttccaggatcctaccctcatccaataccagcaaagactttgaatccagtctctggacagtctaactatggtggttctcagggatctgggcagactcttaatagaccacctgtggcctctaatccagtgacaccttcgcttcatagtggtcctgctccccgaatgccattacctgcttctcagaacccagctactacaccaatgccttctagtagctttcttcctgaagccaacctgccaccacctttgaattggcaatataactatccatccacagcctcacaaacaaaccattgtcctcgtgcatcatcccaaccaactgtatctggaaatacaagtttaaccacaaatcatcaatatgtttcttctggatatccttcacttcaaaatagcttcataaagtcaggtccttctgtacctcccttagtgaatccacctctgcctacaacttttcaaccaggagctcctcatgggccccctccagctggaggcccacccccagtgagggccctcacgcccctgacatcatcatatagagatgtaccccagcccttatttaattcagctgtcaaccaagaaggtattacatcaaataccaataacggatctatggtggtccacagtagttacgacgagattgaaggaggtggcttattggcaacaccacagcttactaacaagaatcccaaaatgagccgaagtgttggatattcatatccctccttaccacctggttatcagaacacaacaccacctggtgcaactggagtaccaccctcttccttgaattacccaagtgggccacaagcctttactcagactcccttaggtgctaatcatttaaccacaagcatgagtggattaagtctacaaccagagggtctaagagttgtcaatcttcttcaagaaagaaacatgcttccgtcaacacctttgaagcctccagttccaaatttgcatgaagacatccagaaactcaactgtaacccagagttatttcgatgcacgctgactagcattcctcagacgcaggccttattgaataaagccaaacttcctttggggctgctgcttcatcctttcaaagacttagtgcaattgcctgtggttacctccagtacaattgtgagatgccgttcatgcaggacgtacatcaatcctttcgtcagctttcttgatcaaaggagatggaagtgtaacttatgttatcgagtcaatgatgttcctgaagaattcttgtacaaccctttgaccagagtttatggagaacctcacagaagaccagaagttcaaaatgctactattgagtttatggctccttcagaatacatgttacgaccacctcagcctccagtgtatctctttgtatttgatgtgtctcacaatgcagtcgaaactggatacttgaattcagtttgccagagtttgttagacaatctggatttgcttcctggcaacactagaacaaaaattggcttcataacatttgacagtacaatccatttctacggtcttcaggaaagtctctctcaacctcagatgctaatagtttcagatattgaagatgtttttatacctatgccagagaacttattagtaaacttaaatgaaagtaaagagagtgtcattggggtcagttcagaagaaactcttattacctgcctggaaattgccatgagataatacagtgagaggtgaacagaatgtgtctgaaggggggatgttgtctaccctgtacatgcatatatgccgtaggggtaacattttaactagcaagtctatggtctctgctgttggcaatggtgactgtgccatagtgcgaagtatttttttccccattaactctatttgtacaacctaacctgtaaaggtagttgtttttcttttgtagtgatattactagttggcaaagttactggatatcttagatttgcaacagggaagagctaaactcgctttggaacttacaagaataaagtatgtagaggtgatggagaaggccatatttcatggcattaaaatacatcaaatctctaaactgtgatggttcttttggatacattttggacttatagtcttgctggactactgcatgtgcaagaactgtaaggcccaactttgatttgtcttgcttgccaatttataatgttgacttaaaatggctttcttgtcatttgaccaacttcattgtttagtgtctgtagattctctgaccatcatcatgactcaatgtcttgtctattgtatgagatactgacttaatgtgaaataaaattttaattatgaca

SEQ ID NO: 179299 - DNA, 6299 bp, Homo sapiens
  Payload ID: 15339
  Gene Symbol: SEC24A
  Gene Name: SEC24 homolog A, COPII coat complex component
  Uniprot ID: O95486
  ENST ID: ENST00000398844
  CDS Start-End: 289-3570
ccggccagggcctccctccttctctctaggtttggctgccgccttctagccgggcgttcgcggccccgccggcccgactctcaagcctcagctcccaggctaggctgtggccgccggtggcctggggagagtgcggcgccatgcctcgggcttaatgcgcccccccctcttctcccagtcttcagtcttaagtcgttagcctcctccctccgctttcagcagtggtctttcagctctcttcttgtgcgctgttgtcgaccccgaccagccccttccaacccagtcatcatgtcccagccgggaataccggcctccggcggcgccccagccagcctccaggcccagaacggagccgccttggcctcggggtctccctacaccaacggtcctgtccaaaatgcattgctgtcttcacaagagtcagtgagccaaggatacaatttccagcttccaggatcctaccctcatccaataccagcaaagactttgaatccagtctctggacagtctaactatggtggttctcagggatctgggcagactcttaatagaccacctgtggcctctaatccagtgacaccttcgcttcatagtggtcctgctccccgaatgccattacctgcttctcagaacccagctactacaccaatgccttctagtagctttcttcctgaagccaacctgccaccacctttgaattggcaatataactatccatccacagcctcacaaacaaaccattgtcctcgtgcatcatcccaaccaactgtatctggaaatacaagtttaaccacaaatcatcaatatgtttcttctggatatccttcacttcaaaatagcttcataaagtcaggtccttctgtacctcccttagtgaatccacctctgcctacaacttttcaaccaggagctcctcatgggccccctccagctggaggcccacccccagtgagggccctcacgcccctgacatcatcatatagagatgtaccccagcccttatttaattcagctgtcaaccaagaaggtattacatcaaataccaataacggatctatggtggtccacagtagttacgacgagattgaaggaggtggcttattggcaacaccacagcttactaacaagaatcccaaaatgagccgaagtgttggatattcatatccctccttaccacctggttatcagaacacaacaccacctggtgcaactggagtaccaccctcttccttgaattacccaagtgggccacaagcctttactcagactcccttaggtgctaatcatttaaccacaagcatgagtggattaagtctacaaccagagggtctaagagttgtcaatcttcttcaagaaagaaacatgcttccgtcaacacctttgaagcctccagttccaaatttgcatgaagacatccagaaactcaactgtaacccagagttatttcgatgcacgctgactagcattcctcagacgcaggccttattgaataaagccaaacttcctttggggctgctgcttcatcctttcaaagacttagtgcaattgcctgtggttacctccagtacaattgtgagatgccgttcatgcaggacgtacatcaatcctttcgtcagctttcttgatcaaaggagatggaagtgtaacttatgttatcgagtcaatgatgttcctgaagaattcttgtacaaccctttgaccagagtttatggagaacctcacagaagaccagaagttcaaaatgctactattgagtttatggctccttcagaatacatgttacgaccacctcagcctccagtgtatctctttgtatttgatgtgtctcacaatgcagtcgaaactggatacttgaattcagtttgccagagtttgttagacaatctggatttgcttcctggcaacactagaacaaaaattggcttcataacatttgacagtacaatccatttctacggtcttcaggaaagtctctctcaacctcagatgctaatagtttcagatattgaagatgtttttatacctatgccagagaacttattagtaaacttaaatgaaagtaaagagctcgtgcaagatttactgaaaactttgccacaaatgtttaccaagactctggagacccagagtgccttgggtcctgcactgcaggctgcctttaagctgatgtctccaactggtggtcgaatgtctgtctttcaaacacaactcccaactcttggagtgggagccctgaaaccacgagaggaaccaaaccacaggtcatctgctaaggatatacacatgacaccatccactgacttctataagaaattagccttggactgttctggtcagcaagttgctgttgacttattccttctcagtggacagtattctgatttggcttctctgggttgtatttctcggtattcagcaggtagtgtctattactatccctcttaccatcatcagcacaacccagtccaagtacagaaattacagaaggaactacagagataccttactcggaagattggctttgaggcagtcatgaggattcggtgcaccaaaggtctttccattcatactttccatggaaacttctttgttaggtcaaccgacttactgtctttgcctaacgtcaacccagacgctgggtatgcagtacagatgtcagtggaagagagtcttactgacactcagttggtttcttttcagtcagcactcttgtatacatccagcaaaggcgaaagaagaattcgtgttcatactttgtgtttgccagtagtttcgactctgaatgatgtctttcttggagctgatgttcaagcaatttcagggttattggccaatatggctgttgacagatctatgactgccagtctgagtgacgctcgggatgctctagtgaatgcagtcattgactccctttcagcttaccgttcttcagtcttaagtaaccagcagcctggactcatggttcctttttctttgcggcttttcccactttttgtgttggctctccttaaacagaaatcattccagactgggacaaatgcacgtctagatgaacgcatttttgctatgtgtcaagtgaaaaaccagcccttggtttaccttatgctcacaactcatcccagtttgtatagagttgacaatctctcagatgagggagcactcaacatcagtgatagaaccatacctcagccccccattcttcagctttcagtggagaagctgagcagagatggagctttcctcatggatgcaggctctgtactgatgctttgggttggaaaaaattgtacacagaattttctcagccaagttctaggagttcaaaactatgcatcaattccacagcctatgacagaccttccagaacttgatacaccagaatctgccagaataatagctttcatctcttggcttagagagcagagaccatttttcccaatactttatgtaataagggatgagagtccaatgaaagcaaacttccttcaaaacatgatagaagacagaacagaatctgcattatcatattatgaattcctgttgcatatacagcaacaagtgaataaatgaatgaatgaagaaatttgacttatttttaaggaatgtcacgatagtgcagaatacctggaaatgtgtaataccttctttttctattatgtttgtggactaatgtgatgattgagatgttctcactgtgatttcaacaacctatagcaaataaaagaccacagcagagaatcaaacatgcaactctgaaatactgtatttttcaaatcagaatatagctacgtatgattggatacttttttcttgccaattatgtttgagttgttatggattaaaataagaatattgcagaggcaaagtacattttgtaaaataaagatttctgtgttctacatgtatatttctcatttttaatttttctgaatctttggctgctacatttaaaacctcacaaacctaagtgttgcagggaagttacaaattgattggtagtgatgtttttaaaataaaaacaatggaaagtaaatataatgtaggaaaactagaattcattccccacacgtgtcttttttttttctttgttaagggaaaggatcatgttgactaaaactaaactaattctagtatagcttgagaaaaatatgaagaaacacattcaagctttaaaatctgtcagtattctttatgcttgaagaacaaagtcactttgatttgaagtgagaactatcattaggtggttttctgatttcctgatgaagagttggacatactgtcttaatctatagtgaaaagaatttgagctgtcttcataaacactgggactagcaatgataatagggagataagaaactttaattatcttgatcctttaagtggattttatttggtgcatttctgctctgggtatataataaaagtgggggtttttggtgaaatgagtgaagaaatgaaaggtttctaaagtgctatccaaatacatcagtaacatttttctaaggagtttaattgttaaattggaagtcattcataagaaatatttatgcttgaatatgaaaatctatgaaagcataaatgctgctgtttgatttggtggatattaagattatacacatccaacatattaaagttatgaaagaaacttgacttctgaaaatccttaagagactgctttcttgattcagctagagaaatattatagtcaaaactattgagtgaattttgtttacaaataggtaaattatacatttgtatatttaaagtgctgtgacatagtatctttaagagtttggctcagttttcacagattcattttgtcttaagaatttcttaaatatgttcatgtataatacttgatcaaaatatttttgggttttttgttttgttttaatgggttagaaaatgtttacaatcttggtcttatatgatcaccaatggaatagtaacttccaggtttatatcaatatgagctgactttaactgagttgtttgggatagggaagaagcagtccctctacagtatacaactactgcttgccagctggatcaaaataatcatgttttatgaaaatatctcccttaagcagtgttaaggttggtttgcagtgtgtaagtggcacattgaactggaagttttcttgaaagctgcttcatctattaagaagcaattttcaaattgtagcgaattatattatcccctcttttaaagaaacagtcgttatatgctgatgtttcttaaaataactaaaatgttcctcttaatgtgattttaaatggagttatttgtaggtcctttcttagtagtaaagaatcttctagagggaaacatttgtgcttttagggataatcttccttgtgcctcactacatccctaagtgggtatgactcttgttattaccacatgcttttttagtatatttcacaaatttacttttaaatattattttagatacggtgtaacatgtgcaattcagaataattttataacaggtcatgaaaaacataactttagttaggattcacaatatttgttctccacataatgagagaatgaatgagcctttggagatactgatataaggcaattattttttgcaatgttgaatgtgttttttagtttgattctttttttttcccccaatagggcactacctgccatatcatcttgtattactttttgatgtaaagcgactaatatttacactatgccatattttttttaattatagttgtaaattatgaaagatccttgaattttctacagatctacaactactaatgtaacagacaagggcaatcttggtatttaaatctgagcatggcagttctaccataaaaagtactctatttttctaatttctaggatttttaaaataacatttctgtaagtctgacatactaatagtcactcaagcagtaccatttattttagtttgcatatattttcactgtttttaatttaatgtattgagtctaatagactgttttgcaataattagaataaagatttatttcttctaatcaaagatgcataacagctattatctaggggaccaccaaatgtgatttcaaaattttgttaactattacaaatgtaatccttatatagaaattttaattttgtaaagtagtgtataatattgtaatattaaattcttgttcttaaattcaaatatgtattgatcttcaatgtgctgtgttaaatcttgcttctctgaaaagttggagacaagatttgtcttcctttttacagtttgtaattttcactgttttattcctgttaaaaaaaaaaaaaa

SEQ ID NO: 179300 - DNA, 650 bp, Homo sapiens
  Payload ID: 15339
  Gene Symbol: SEC24A
  Gene Name: SEC24 homolog A, COPII coat complex component
  ENST ID: ENST00000513123
  CDS Start-End: 1-452
gttatcgagtcaatgatgttcctgaagaattcttgtacaaccctttgaccagagtttatggagaacctcacagaagaccagaagttcaaaatgctactattgagtttatggctccttcagaatacatgttacgaccacctcagcctccagtgtatctctttgtatttgatgtgtctcacaatgcagtcgaaactggatacttgaattcagtttgccagagtttgttagacaatctggatttgcttcctggcaacactagaacaaaaattggcttcataacatttgacagtacaatccatttctacggtcttcaggaaagtctctctcaacctcagatgctaatagtttcagatattgaagatgtttttatacctatgccagagaacttattagtaaacttaaatgaaagtaaagaggtaaggcacattttcctacctgacatgtttaattgaaatattgaaggaatatgtttttgaaatgaactttaagtaaaattttgattatttctgtgacatttctaagatgtgtagcattttatatttgctcttataattagatgaacagctcttgagttcaaccttgagctgatcatttttaagtctaatgaagcaagttatttgtagtagggtagaaaataagcatattccata

SEQ ID NO: 179301 - DNA, 5083 bp, Homo sapiens
  Payload ID: 15340
  Gene Symbol: SEC24B
  Gene Name: SEC24 homolog B, COPII coat complex component
  Uniprot ID: O95487
  ENST ID: ENST00000265175
  CDS Start-End: 56-3862
cccttccctccgcccacctccctgaagcggagccgccgtcgccaccagcgccgtcatgtcggcccccgccgggtcctctcacccggccgccagcgcccggatcccgcccaagttcggcggagcggccgtctcaggagccgcagcgcccgcgggcccgggtgcgggcccggcgccgcaccagcagaacggtccagcccagaatcaaatgcaggttccatctggatatggattgcatcatcaaaactatattgctccctcaggacattactctcaaggacctgggaaaatgacctcattgccattggatacccagtgtggtgattactactctgctctctatacagtaccaacacaaaatgtgactcctaacacagtgaaccagcaaccaggagcacagcagttgtacagcaggggtcctcctgcccctcatattgtgggatccactctaggatctttccaaggtgctgcatcgtcagcatcccatttgcatacgagtgcctcccaaccatactcctcttttgtgaatcactacaatagtccagccatgtactctgccagctcttctgttgcgtctcagggatttccctctacttgtggtcattatgctatgtcaactgtttctaatgccgcgtatcctagtgtttcatatccctctctgcctgctggtgatacatatgggcaaatgtttacctcacagaatgctccgactgttaggccagttaaagataattcattctctggtcaaaatacagctatcagccatccatcgccacttccacctctaccatcacaacagcaccaccagcagcaaagtctttcaggatacagtactctaacgtggtcatctccaggccttccatcgactcaagacaatctcatccgaaaccacacaggatccctggctgtagcgaacaacaacccaaccattactgttgcagattctttatcctgtcctgttatgcaaaatgttcagcctcccaagtccagcccagtggtatccactgttttatcaggatcctcaggatcctcatcaacaagaacacctcccactgcaaatcacccagttgagcctgtgacctcagttacacagccatcagagctattacaacaaaaaggcgtgcagtatggtgaatatgttaataaccaagctagctccgcaccaactcccttgtcatcaacttccgatgatgaggaagaggaggaggaggatgaggaagcaggtgttgacagctcttctaccacaagcagtgcttctccaatgcccaacagttatgatgccctggaaggaggcagttacccagatatgctttcttcatcagcaagcagtcctgctcctgatcccgcccctgaacctgatcctgcttctgctccagctccagcttcagctccagctcctgtcgtccctcagccttcaaaaatggctaagccttttggctatggctatccaacacttcagcctggttatcagaatgctacagcaccacttatttctggagtacagcccagtaacccggtatattctggattccagcagtatcctcaacagtatcctggtgtgaaccagctatcctccagtataggaggattgagtcttcagagttctccacaaccagaaagcctgagacctgtaaaccttactcaggagaggaatattttacctatgactcctgtttgggctcctgtacctaacttgaatgcagacctcaaaaaattaaactgtagcccagattcatttcggtgtactttgacaaatattccacagacacaggctttactgaataaagctaagcttcctttaggattgttgttacatcccttcagagacctaacgcaattaccagtgataacatcaaataccattgtgaggtgccgatcctgtcgaacgtatattaacccctttgtatccttcattgatcaacgtagatggaaatgcaatttgtgctatagagtaaacgatgttcctgaagaatttatgtataacccccttacccgatcttatggagagcctcataaacgaccagaagttcagaattcaactgtggagttcattgcttcttcagattacatgctgcgtcctcctcaacctgcagtttacttgtttgttttagatgtgtctcataatgcagtggaagctggatatttgacaattttgtgccagtcactcctagaaaatctagacaagcttcctggagattcacgaacaagaataggattcatgacctttgatagcactattcatttctacaatttacaagaaggattatcacagcctcaaatgttgattgtgtctgatatagatgatgtttttctacctacaccggatagtttacttgtgaatctatatgaaagtaaagagcttataaaagacttactgaatgcattaccaaacatgttcaccaatacaagagaaacacacagtgcccttggtcctgcacttcaggctgcctttaaattaatgtctccaacaggtggccgtgtgtctgtatttcagacacagttaccttccttgggtgcaggacttctgcaatccagagaagatcctaatcagagatcaagtacaaaggtggtacaacatcttggccctgcaactgatttttataagaaacttgcattagattgctcgggacagcaaactgcagtggatttgttccttttaagttcacagtattctgatcttgcttctctagcttgcatgtccaagtattctgcagggtgcatctattattatccatcattccactatactcacaatccttcacaagcagaaaagttacaaaaagacctaaaacggtatctcacaagaaaaattgggtttgaagctgttatgagaataaggtgtactaaaggtctttcaatgcacacttttcacggtaacttctttgtccgttctactgatttgttatcccttgccaacatcaatcctgatgctggatttgcggtgcagttgtcaattgaagaaagtttaacagatacttccttagtatgttttcaaacagccctattatatacatcaagcaaaggtgagcggagaattagagtacatacactttgtttgccagtggtaagttcactagcagatgtatatgcgggagtggatgtacaagctgccatctgccttctggcaaacatggctgtggatcggtccgtttcatcaagtctgtcagatgcaagagatgccttagtgaatgctgtagtggactcattgtctgcatatggctcaactgtctcaaatttacagcactctgcattgatggcgcccagctccctcaagttgtttcctctctatgttttggcccttctcaaacagaaagcatttagaacgggtacaagcacacggctggatgatcgtgtatatgccatgtgtcagataaagtctcagccacttgttcatctaatgaaaatgattcatcccaacttatacaggatagacagattgacagatgagggtgcagtacatgttaatgacaggattgtaccacagccacctcttcaaaaattgtctgcagagaagctgacaagagaaggtgctttccttatggactgtggctctgttttttacatttgggttgggaaaggctgtgacaataacttcatagaggatgtgcttggatatactaattttgcatcaataccacagaaaatgacacatcttccagagctagatacactttcatcagaaagagccagatccttcataacttggcttagagacagcagaccattaagtccaatccttcacatagtaaaagatgagagtcctgccaaagcagaattttttcagcatttgattgaagaccggacagaggctgcattttcttactatgaatttttgcttcatgttcagcagcagatttgtaagtgaagtagaataaaattgaataagaaaaagatctataacctaggtaaagcataatctgtcagagaagcgcgtgagaaatttgaaatgaaggcatttgttaatacaagatgcaacgcacagcactctgtctgaggctttggtaaaaagtaaaggggaagaaagaacttgacagatctttttcaactcaaattaatggtaacgatgatgctgtttcaccaagtatattttgaattggtttctacacatttccagtagtatggcagtacagtgctctgttcattgcaagctggcaaatttatgtagctatgtggaatgatatgtcataatgtaaaattagataaattcttttttcttataattaatataacatttctggacttgaactctggcaagagatgccaaaaggcattggtaccgtgttatttgtttatatgaattactttttaacaaggaatgtttcttattcattaaatgaattcaacattttctctgtaaaaacaatagagtttcagtacatgaactatagaaaaaaatctatatataatgtacataaatgttacatttgtaaagaaaatgtaaaaatgtaactatagcatatgaattgcttaaactgtgctgcattgttggatgacaactctttttgtcacagttagagaatgaggttgactaatgcatattatgaattgagtccacaaaggaacacaaaactctttgtaattctgttaaatcttttatgtagatttatttatgatcagcctactaattaaaactatttcgcttgacagtatggtttggtgattttttggggtttttgtttgattggttttttgtggggattggtgggtttttttacatacaggatgtattgaatttactaattggggaagtgcagtgatactgcatttcagttagtaatatatatgaatcaggccaggcgcggtggctcacgcctgtaatcccagcgctttgggaggccaaggtgggcagatgacttgaggtcaggtgttcatgacctgcctgaccaacatgatgaaaccccatctctgctaaaaataccaaaattagccaggggtgctggcgggcacctgtaatcccagctactcaggaggctgaagcagtagaatcgcttgaacctggaggctgaggttgcagtgagctaagatcacgccactgcactccagcctgggcaacagagtgagactccatcttaaaaaaaaaaaaaaa

SEQ ID NO: 179302 - DNA, 3780 bp, Homo sapiens
  Payload ID: 15340
  Gene Symbol: SEC24B
  Gene Name: SEC24 homolog B, COPII coat complex component
  Uniprot ID: O95487
  ENST ID: ENST00000399100
  CDS Start-End: 58-3759
ttcccttccctccgcccacctccctgaagcggagccgccgtcgccaccagcgccgtcatgtcggcccccgccgggtcctctcacccggccgccagcgcccggatcccgcccaagttcggcggagcggccgtctcaggagccgcagcgcccgcgggcccgggtgcgggcccggcgccgcaccagcagaacggtccagcccagaatcaaatgcaggttccatctggatatggattgcatcatcaaaactatattgctccctcaggacattactctcaaggacctgggaaaatgacctcattgccattggatacccagtgtggtgattactactctgctctctatacagtaccaacacaaaatgtgactcctaacacagtgaaccagcaaccaggagcacagcagttgtacagcaggggtcctcctgcccctcatattgtgggatccactctaggatctttccaaggtgctgcatcgtcagcatcccatttgcatacgagtgcctcccaaccatactcctcttttgtgaatcactacaatagtccagccatgtactctgccagctcttctgttgcgtctcagggatttccctctacttgtggtcattatgctatgtcaactgtttctaatgccgcgtatcctagtgtttcatatccctctctgcctgctggtgatacatatgggcaaatgtttacctcacagaatgctccgactgttaggccagttaaagataattcattctctggtcaaaatacagctatcagccatccatcgccacttccacctctaccatcacaacagcaccaccagcagcaaagtctttcaggatacagtactctaacgtggtcatctccaggccttccatcgactcaagacaatctcatccgaaaccacacaggatccctggctgtagcgaacaacaacccaaccattactgttgcagattctttatcctgtcctgttatgcaaaatgttcagcctcccaagtccagcccagtggtatccactgttttatcaggatcctcaggatcctcatcaacaagaacacctcccactgcaaatcacccagttgagcctgtgacctcagttacacagccatcagagctattacaacaaaaaggtgttgacagctcttctaccacaagcagtgcttctccaatgcccaacagttatgatgccctggaaggaggcagttacccagatatgctttcttcatcagcaagcagtcctgctcctgatcccgcccctgaacctgatcctgcttctgctccagctccagcttcagctccagctcctgtcgtccctcagccttcaaaaatggctaagccttttggctatggctatccaacacttcagcctggttatcagaatgctacagcaccacttatttctggagtacagcccagtaacccggtatattctggattccagcagtatcctcaacagtatcctggtgtgaaccagctatcctccagtataggaggattgagtcttcagagttctccacaaccagaaagcctgagacctgtaaaccttactcaggagaggaatattttacctatgactcctgtttgggctcctgtacctaacttgaatgcagacctcaaaaaattaaactgtagcccagattcatttcggtgtactttgacaaatattccacagacacaggctttactgaataaagctaagcttcctttaggattgttgttacatcccttcagagacctaacgcaattaccagtgataacatcaaataccattgtgaggtgccgatcctgtcgaacgtatattaacccctttgtatccttcattgatcaacgtagatggaaatgcaatttgtgctatagagtaaacgatgttcctgaagaatttatgtataacccccttacccgatcttatggagagcctcataaacgaccagaagttcagaattcaactgtggagttcattgcttcttcagattacatgctgcgtcctcctcaacctgcagtttacttgtttgttttagatgtgtctcataatgcagtggaagctggatatttgacaattttgtgccagtcactcctagaaaatctagacaagcttcctggagattcacgaacaagaataggattcatgacctttgatagcactattcatttctacaatttacaagaaggattatcacagcctcaaatgttgattgtgtctgatatagatgatgtttttctacctacaccggatagtttacttgtgaatctatatgaaagtaaagagcttataaaagacttactgaatgcattaccaaacatgttcaccaatacaagagaaacacacagtgcccttggtcctgcacttcaggctgcctttaaattaatgtctccaacaggtggccgtgtgtctgtatttcagacacagttaccttccttgggtgcaggacttctgcaatccagagaagatcctaatcagagatcaagtacaaaggtggtacaacatcttggccctgcaactgatttttataagaaacttgcattagattgctcgggacagcaaactgcagtggatttgttccttttaagttcacagtattctgatcttgcttctctagcttgcatgtccaagtattctgcagggtgcatctattattatccatcattccactatactcacaatccttcacaagcagaaaagttacaaaaagacctaaaacggtatctcacaagaaaaattgggtttgaagctgttatgagaataaggtgtactaaaggtctttcaatgcacacttttcacggtaacttctttgtccgttctactgatttgttatcccttgccaacatcaatcctgatgctggatttgcggtgcagttgtcaattgaagaaagtttaacagatacttccttagtatgttttcaaacagccctattatatacatcaagcaaaggtgagcggagaattagagtacatacactttgtttgccagtggtaagttcactagcagatgtatatgcgggagtggatgtacaagctgccatctgccttctggcaaacatggctgtggatcggtccgtttcatcaagtctgtcagatgcaagagatgccttagtgaatgctgtagtggactcattgtctgcatatggctcaactgtctcaaatttacagcactctgcattgatggcgcccagctccctcaagttgtttcctctctatgttttggcccttctcaaacagaaagcatttagaacgggtacaagcacacggctggatgatcgtgtatatgccatgtgtcagataaagtctcagccacttgttcatctaatgaaaatgattcatcccaacttatacaggatagacagattgacagatgagggtgcagtacatgttaatgacaggattgtaccacagccacctcttcaaaaattgtctgcagagaagctgacaagagaaggtgctttccttatggactgtggctctgttttttacatttgggttgggaaaggctgtgacaataacttcatagaggatgtgcttggatatactaattttgcatcaataccacagaaaatgacacatcttccagagctagatacactttcatcagaaagagccagatccttcataacttggcttagagacagcagaccattaagtccaatccttcacatagtaaaagatgagagtcctgccaaagcagaattttttcagcatttgattgaagaccggacagaggctgcattttcttactatgaatttttgcttcatgttcagcagcagatttgtaagtgaagtagaataaaattgaataag

SEQ ID NO: 179303 - DNA, 4066 bp, Homo sapiens
  Payload ID: 15340
  Gene Symbol: SEC24B
  Gene Name: SEC24 homolog B, COPII coat complex component
  Uniprot ID: O95487
  ENST ID: ENST00000504968
  CDS Start-End: 99-3995
ggcgcgttccttcctcttcctctctcctctccggccccgccttcccttccctccgcccacctccctgaagcggagccgccgtcgccaccagcgccgtcatgtcggcccccgccgggtcctctcacccggccgccagcgcccggatcccgcccaagttcggcggagcggccgtctcaggagccgcagcgcccgcgggcccgggtgcgggcccggcgccgcaccagcagaacgagacgggatttcaccatgttgcccaagctagtcttgaactcctggacccaagcaatctgcccgcctcggcctcccaaattgctgggagtacaggtccagcccagaatcaaatgcaggttccatctggatatggattgcatcatcaaaactatattgctccctcaggacattactctcaaggacctgggaaaatgacctcattgccattggatacccagtgtggtgattactactctgctctctatacagtaccaacacaaaatgtgactcctaacacagtgaaccagcaaccaggagcacagcagttgtacagcaggggtcctcctgcccctcatattgtgggatccactctaggatctttccaaggtgctgcatcgtcagcatcccatttgcatacgagtgcctcccaaccatactcctcttttgtgaatcactacaatagtccagccatgtactctgccagctcttctgttgcgtctcagggatttccctctacttgtggtcattatgctatgtcaactgtttctaatgccgcgtatcctagtgtttcatatccctctctgcctgctggtgatacatatgggcaaatgtttacctcacagaatgctccgactgttaggccagttaaagataattcattctctggtcaaaatacagctatcagccatccatcgccacttccacctctaccatcacaacagcaccaccagcagcaaagtctttcaggatacagtactctaacgtggtcatctccaggccttccatcgactcaagacaatctcatccgaaaccacacaggatccctggctgtagcgaacaacaacccaaccattactgttgcagattctttatcctgtcctgttatgcaaaatgttcagcctcccaagtccagcccagtggtatccactgttttatcaggatcctcaggatcctcatcaacaagaacacctcccactgcaaatcacccagttgagcctgtgacctcagttacacagccatcagagctattacaacaaaaaggcgtgcagtatggtgaatatgttaataaccaagctagctccgcaccaactcccttgtcatcaacttccgatgatgaggaagaggaggaggaggatgaggaagcaggtgttgacagctcttctaccacaagcagtgcttctccaatgcccaacagttatgatgccctggaaggaggcagttacccagatatgctttcttcatcagcaagcagtcctgctcctgatcccgcccctgaacctgatcctgcttctgctccagctccagcttcagctccagctcctgtcgtccctcagccttcaaaaatggctaagccttttggctatggctatccaacacttcagcctggttatcagaatgctacagcaccacttatttctggagtacagcccagtaacccggtatattctggattccagcagtatcctcaatatcctggtgtgaaccagctatcctccagtataggaggattgagtcttcagagttctccacaaccagaaagcctgagacctgtaaaccttactcaggagaggaatattttacctatgactcctgtttgggctcctgtacctaacttgaatgcagacctcaaaaaattaaactgtagcccagattcatttcggtgtactttgacaaatattccacagacacaggctttactgaataaagctaagcttcctttaggattgttgttacatcccttcagagacctaacgcaattaccagtgataacatcaaataccattgtgaggtgccgatcctgtcgaacgtatattaacccctttgtatccttcattgatcaacgtagatggaaatgcaatttgtgctatagagtaaacgatgttcctgaagaatttatgtataacccccttacccgatcttatggagagcctcataaacgaccagaagttcagaattcaactgtggagttcattgcttcttcagattacatgctgcgtcctcctcaacctgcagtttacttgtttgttttagatgtgtctcataatgcagtggaagctggatatttgacaattttgtgccagtcactcctagaaaatctagacaagcttcctggagattcacgaacaagaataggattcatgacctttgatagcactattcatttctacaatttacaagaaggattatcacagcctcaaatgttgattgtgtctgatatagatgatgtttttctacctacaccggatagtttacttgtgaatctatatgaaagtaaagagcttataaaagacttactgaatgcattaccaaacatgttcaccaatacaagagaaacacacagtgcccttggtcctgcacttcaggctgcctttaaattaatgtctccaacaggtggccgtgtgtctgtatttcagacacagttaccttccttgggtgcaggacttctgcaatccagagaagatcctaatcagagatcaagtacaaaggtggtacaacatcttggccctgcaactgatttttataagaaacttgcattagattgctcgggacagcaaactgcagtggatttgttccttttaagttcacagtattctgatcttgcttctctagcttgcatgtccaagtattctgcagggtgcatctattattatccatcattccactatactcacaatccttcacaagcagaaaagttacaaaaagacctaaaacggtatctcacaagaaaaattgggtttgaagctgttatgagaataaggtgtactaaaggtctttcaatgcacacttttcacggtaacttctttgtccgttctactgatttgttatcccttgccaacatcaatcctgatgctggatttgcggtgcagttgtcaattgaagaaagtttaacagatacttccttagtatgttttcaaacagccctattatatacatcaagcaaaggtgagcggagaattagagtacatacactttgtttgccagtggtaagttcactagcagatgtatatgcgggagtggatgtacaagctgccatctgccttctggcaaacatggctgtggatcggtccgtttcatcaagtctgtcagatgcaagagatgccttagtgaatgctgtagtggactcattgtctgcatatggctcaactgtctcaaatttacagcactctgcattgatggcgcccagctccctcaagttgtttcctctctatgttttggcccttctcaaacagaaagcatttagaacgggtacaagcacacggctggatgatcgtgtatatgccatgtgtcagataaagtctcagccacttgttcatctaatgaaaatgattcatcccaacttatacaggatagacagattgacagatgagggtgcagtacatgttaatgacaggattgtaccacagccacctcttcaaaaattgtctgcagagaagctgacaagagaaggtgctttccttatggactgtggctctgttttttacatttgggttgggaaaggctgtgacaataacttcatagaggatgtgcttggatatactaattttgcatcaataccacagaaaatgacacatcttccagagctagatacactttcatcagaaagagccagatccttcataacttggcttagagacagcagaccattaagtccaatccttcacatagtaaaagatgagagtcctgccaaagcagaattttttcagcatttgattgaagaccggacagaggctgcattttcttactatgaatttttgcttcatgttcagcagcagatttgtaagtgaagtagaataaaattgaataagaaaaagatctataacctaggtaaagcataatctgtcagagaagcgcgtga

SEQ ID NO: 179304 - DNA, 4433 bp, Homo sapiens
  Payload ID: 15341
  Gene Symbol: SEC24C
  Gene Name: SEC24 homolog C, COPII coat complex component
  Uniprot ID: P53992
  ENST ID: ENST00000345254
  CDS Start-End: 83-3367
ggagcctgggagccttgacgttaggaacgaagtctaacctggatctggagccgggtgagatcaaattgggaatgctttcataatgaacgtcaaccagtcagttccacctgtgccaccatttgggcagccccagcccatctacccagggtatcatcagtccagctatggtgggcaatcagggtccacagcccccgccattccctatggagcctacaatggcccagtaccaggctatcagcaaacacctccccaaggtatgtcaagagccccaccttcctcgggggcacctccagcctcaacagcacaggctccttgtggccaggctgcatatggccagtttggccaaggagatgtacagaatgggccaagctccactgttcagatgcaaaggctgcctgggtctcagccatttgggtccccattggcccctgtgggcaaccagccacctgtgcttcagccctatggccctcccccgacaagtgcacaggtggctacgcagctgtctggaatgcagatcagcggtgctgtggccccagcccctccttcttcagggctgggctttggcccaccaacatcgctggcttcagcctcaggaagtttccctaactctggtctgtatggctcctatcctcagggccaggctcctccccttagccaggcccaaggtcatcctgggatccagactccccagcgatctgccccatcacaggcctccagcttcacacccccagcttcagggggtcctcggctgccttcgatgactggtccactcctgcctggacagagttttggagggccctcagtgagccagcccaaccatgtgtcttcacctcctcaagctctgccccctggcacccagatgactgggcccctgggaccactgccacctatgcactccccgcagcagccaggctatcagccccaacaaaatggttccttcggaccagcccggggccctcagtctaattatggaggcccctacccagcagcacccacctttggcagtcagcctgggcctcctcagccactgcctcctaagcgcctggaccctgatgccatcccaagccctattcaggtcattgaagatgacaggaacaaccggggtacagagccatttgttactggagtacggggccaggtgccacccttagtcactaccaacttcctggtgaaagaccaagggaatgcaagtccccgatacatccgatgtacatcctataatatcccttgcacatctgacatggctaagcaggctcaggtgcccctggcagcagtcatcaaaccgctggcaaggctgcccccagaggaggcttcaccgtatgttgtggaccatggggaatctggccctttgcgctgcaaccgctgcaaagcatacatgtgtcccttcatgcagttcattgaaggagggaggcgtttccagtgctgtttttgcagctgtatcaatgatgttcccccccagtattttcagcacctggatcataccggcaaacgtgtggatgcttatgaccgccctgagctatccctgggctcttatgaattcttggccactgtagattactgcaagaacaataagttccccagccctcctgcctttatcttcatgattgacgtctcctacaatgccatcaggactggtcttgttaggctcctctgtgaggagctcaagtcactgttagactttctacctagggagggtggggcagaagagtcagcaatccgcgttggctttgtcacctacaataaggtgctccacttctataatgtgaagagctcattggcccagccacagatgatggttgtgtctgatgtggctgacatgtttgtgccactgctggatggcttcctggtcaacgtcaatgagtctcgggcagttatcaccagcttattggatcagattccagaaatgtttgcagacacaagggaaacagagacagtatttgtaccagttatccaggctggaatggaggctctgaaggctgctgagtgtgcagggaagctctttctattccatacatccctgcccattgcagaggccccagggaaactgaagaacagagatgacaggaagctgatcaatacagacaaggagaagactctgttccagcctcagacaggtgcctatcagaccctggccaaagagtgtgtggcccaaggctgctgtgtagatctctttctcttccctaaccagtatgtggatgtggccacactctctgttgtgccccagctcactggtggctctgtctacaaatatgcttcctttcaggtggagaacgaccaggagcggttcctgagtgacctgcgtcgtgatgtccagaaggttgttggctttgatgctgtgatgcgggtccggacaagcactggtatccgtgctgtagatttctttggagctttctacatgagcaacacgacagatgtggagctggctgggctagatggggacaaaacagtgactgtggagttcaagcatgacgatcggctcaatgaagagagcggagctctcctgcagtgtgccctgctttacaccagctgtgcagggcagcgtcggctccgcatccataatctggccctgaactgctgcacccagctggctgatctatatcgaaactgtgagactgacacgctcatcaactacatggccaagtttgcatatcggggagtcctgaatagccctgtgaaggctgttcgtgacacgctcatcacccagtgtgcccagatcctggcctgttacagaaagaactgtgctagcccctcctctgcaggacagttgatccttcctgagtgcatgaagctactcccagtttacctgaactgtgtgttgaagagtgatgtcctgcagcctggagctgaagtcactactgatgaccgtgcctatgtccgacagctagttacctccatggatgtgactgagaccaatgtcttcttctaccctcggctcttacctttgacaaagtctcccgttgagagtactaccgaaccaccagcagttcgagcctctgaagagcgtctaagcaatggggatatatatttactggagaatgggctcaacctcttcctctgggtgggagcaagcgtccaacagggtgttgtccagagccttttcagcgtctcctccttcagtcagatcaccagtggtttgagtgttctgccagttctggataatccactgtccaagaaggttcgaggcctcattgatagcttacgggcacagagatcccggtacatgaagcttaccgtggtgaaacaggaagacaagatggagatgctgttcaagcacttcctggtggaagacaagagtctgagtgggggagcatcttatgtggactttctctgtcatatgcacaaggagattcggcagctactgagctaaagcaagtgggtaaatggcatagggcccaggctagcttccagaaagcaccccaggatgtcagagaaattgggacagtaacatatcttatgtaagctgacctcagtctctctggggggagggggagatataaggagacaccttctttctgggctcaagtatcctgccactctgtcatgtcctgctgatggaaggtgcccctgttccctcattctaccctctttttcctgctaatcctgtcataatgaatgtagcttctcagttcactgtatatgattcggtattgggggtttggaggcacccagaccctggcaatattatgtgtccctttggaccagtctcccaagaggagaggggcaggcaggaaagagtggggatcctaaggttactacagggggctcagtgtcatccacaacttcctatattagggataaaacatataggtgcacaagagctggggtatagcccataggtggtggagagaaaagtggtcagtccttcttgggcctggaggttagcagtcaagtttctctgctttcactgctcgctcgctctctcctgcaatgattgatgatcactccgtggatagagaggcacactgtcagaggtgaccggagaactgagttgcaaaatatattaagatctggtagaggtaccagcttcctttccagctggagaggccccaacactggatggttctgtagggagcctagggagcctggtcatcaacttgcaatacctcacagagccagttcacatcccactctgagctcccacgagaaacactgcttctccaggcccggggttgttggggagagaggcagaggcagctggagcgccgttctctcctgctgggacaccgcttgggctttggtattgactgagtggctgacagttatcttccaaccccaactggcttgggggcaggacaagggctaggcttgatggtggccaggcttgcctgctccccacctgggatgcccctgctctggacctctcatttctcttcattggtttatttttcaatgcatctttaatttgtaaagaaataaaataaattaagatgtaa

SEQ ID NO: 179305 - DNA, 4513 bp, Homo sapiens
  Payload ID: 15341
  Gene Symbol: SEC24C
  Gene Name: SEC24 homolog C, COPII coat complex component
  Uniprot ID: P53992
  ENST ID: ENST00000339365
  CDS Start-End: 163-3447
gggagccttgacgttaggaacgaagtctaacctggatctggagccgggagataatctgaatgctggctggggcagaaaattactaagatcctgtggaagtgtgaggattattaaactgatcactgtctgataaggtgagatcaaattgggaatgctttcataatgaacgtcaaccagtcagttccacctgtgccaccatttgggcagccccagcccatctacccagggtatcatcagtccagctatggtgggcaatcagggtccacagcccccgccattccctatggagcctacaatggcccagtaccaggctatcagcaaacacctccccaaggtatgtcaagagccccaccttcctcgggggcacctccagcctcaacagcacaggctccttgtggccaggctgcatatggccagtttggccaaggagatgtacagaatgggccaagctccactgttcagatgcaaaggctgcctgggtctcagccatttgggtccccattggcccctgtgggcaaccagccacctgtgcttcagccctatggccctcccccgacaagtgcacaggtggctacgcagctgtctggaatgcagatcagcggtgctgtggccccagcccctccttcttcagggctgggctttggcccaccaacatcgctggcttcagcctcaggaagtttccctaactctggtctgtatggctcctatcctcagggccaggctcctccccttagccaggcccaaggtcatcctgggatccagactccccagcgatctgccccatcacaggcctccagcttcacacccccagcttcagggggtcctcggctgccttcgatgactggtccactcctgcctggacagagttttggagggccctcagtgagccagcccaaccatgtgtcttcacctcctcaagctctgccccctggcacccagatgactgggcccctgggaccactgccacctatgcactccccgcagcagccaggctatcagccccaacaaaatggttccttcggaccagcccggggccctcagtctaattatggaggcccctacccagcagcacccacctttggcagtcagcctgggcctcctcagccactgcctcctaagcgcctggaccctgatgccatcccaagccctattcaggtcattgaagatgacaggaacaaccggggtacagagccatttgttactggagtacggggccaggtgccacccttagtcactaccaacttcctggtgaaagaccaagggaatgcaagtccccgatacatccgatgtacatcctataatatcccttgcacatctgacatggctaagcaggctcaggtgcccctggcagcagtcatcaaaccgctggcaaggctgcccccagaggaggcttcaccgtatgttgtggaccatggggaatctggccctttgcgctgcaaccgctgcaaagcatacatgtgtcccttcatgcagttcattgaaggagggaggcgtttccagtgctgtttttgcagctgtatcaatgatgttcccccccagtattttcagcacctggatcataccggcaaacgtgtggatgcttatgaccgccctgagctatccctgggctcttatgaattcttggccactgtagattactgcaagaacaataagttccccagccctcctgcctttatcttcatgattgacgtctcctacaatgccatcaggactggtcttgttaggctcctctgtgaggagctcaagtcactgttagactttctacctagggagggtggggcagaagagtcagcaatccgcgttggctttgtcacctacaataaggtgctccacttctataatgtgaagagctcattggcccagccacagatgatggttgtgtctgatgtggctgacatgtttgtgccactgctggatggcttcctggtcaacgtcaatgagtctcgggcagttatcaccagcttattggatcagattccagaaatgtttgcagacacaagggaaacagagacagtatttgtaccagttatccaggctggaatggaggctctgaaggctgctgagtgtgcagggaagctctttctattccatacatccctgcccattgcagaggccccagggaaactgaagaacagagatgacaggaagctgatcaatacagacaaggagaagactctgttccagcctcagacaggtgcctatcagaccctggccaaagagtgtgtggcccaaggctgctgtgtagatctctttctcttccctaaccagtatgtggatgtggccacactctctgttgtgccccagctcactggtggctctgtctacaaatatgcttcctttcaggtggagaacgaccaggagcggttcctgagtgacctgcgtcgtgatgtccagaaggttgttggctttgatgctgtgatgcgggtccggacaagcactggtatccgtgctgtagatttctttggagctttctacatgagcaacacgacagatgtggagctggctgggctagatggggacaaaacagtgactgtggagttcaagcatgacgatcggctcaatgaagagagcggagctctcctgcagtgtgccctgctttacaccagctgtgcagggcagcgtcggctccgcatccataatctggccctgaactgctgcacccagctggctgatctatatcgaaactgtgagactgacacgctcatcaactacatggccaagtttgcatatcggggagtcctgaatagccctgtgaaggctgttcgtgacacgctcatcacccagtgtgcccagatcctggcctgttacagaaagaactgtgctagcccctcctctgcaggacagttgatccttcctgagtgcatgaagctactcccagtttacctgaactgtgtgttgaagagtgatgtcctgcagcctggagctgaagtcactactgatgaccgtgcctatgtccgacagctagttacctccatggatgtgactgagaccaatgtcttcttctaccctcggctcttacctttgacaaagtctcccgttgagagtactaccgaaccaccagcagttcgagcctctgaagagcgtctaagcaatggggatatatatttactggagaatgggctcaacctcttcctctgggtgggagcaagcgtccaacagggtgttgtccagagccttttcagcgtctcctccttcagtcagatcaccagtggtttgagtgttctgccagttctggataatccactgtccaagaaggttcgaggcctcattgatagcttacgggcacagagatcccggtacatgaagcttaccgtggtgaaacaggaagacaagatggagatgctgttcaagcacttcctggtggaagacaagagtctgagtgggggagcatcttatgtggactttctctgtcatatgcacaaggagattcggcagctactgagctaaagcaagtgggtaaatggcatagggcccaggctagcttccagaaagcaccccaggatgtcagagaaattgggacagtaacatatcttatgtaagctgacctcagtctctctggggggagggggagatataaggagacaccttctttctgggctcaagtatcctgccactctgtcatgtcctgctgatggaaggtgcccctgttccctcattctaccctctttttcctgctaatcctgtcataatgaatgtagcttctcagttcactgtatatgattcggtattgggggtttggaggcacccagaccctggcaatattatgtgtccctttggaccagtctcccaagaggagaggggcaggcaggaaagagtggggatcctaaggttactacagggggctcagtgtcatccacaacttcctatattagggataaaacatataggtgcacaagagctggggtatagcccataggtggtggagagaaaagtggtcagtccttcttgggcctggaggttagcagtcaagtttctctgctttcactgctcgctcgctctctcctgcaatgattgatgatcactccgtggatagagaggcacactgtcagaggtgaccggagaactgagttgcaaaatatattaagatctggtagaggtaccagcttcctttccagctggagaggccccaacactggatggttctgtagggagcctagggagcctggtcatcaacttgcaatacctcacagagccagttcacatcccactctgagctcccacgagaaacactgcttctccaggcccggggttgttggggagagaggcagaggcagctggagcgccgttctctcctgctgggacaccgcttgggctttggtattgactgagtggctgacagttatcttccaaccccaactggcttgggggcaggacaagggctaggcttgatggtggccaggcttgcctgctccccacctgggatgcccctgctctggacctctcatttctcttcattggtttatttttcaatgcatctttaatttgtaaagaaataaaataaattaagatgtaa

SEQ ID NO: 179306 - DNA, 4668 bp, Homo sapiens
  Payload ID: 15341
  Gene Symbol: SEC24C
  Gene Name: SEC24 homolog C, COPII coat complex component
  ENST ID: ENST00000465076
  CDS Start-End: 83-3211
ggagcctgggagccttgacgttaggaacgaagtctaacctggatctggagccgggtgagatcaaattgggaatgctttcataatgaacgtcaaccagtcagttccacctgtgccaccatttgggcagccccagcccatctacccagggtatcatcagtccagctatggtgggcaatcagggtccacagcccccgccattccctatggagcctacaatggcccagtaccaggctatcagcaaacacctccccaaggtatgtcaagagccccaccttcctcgggggcacctccagcctcaacagcacaggctccttgtggccaggctgcatatggccagtttggccaaggagatgtacagaatgggccaagctccactgttcagatgcaaaggctgcctgggtctcagccatttgggtccccattggcccctgtgggcaaccagccacctgtgcttcagccctatggccctcccccgacaagtgcacaggtggctacgcagctgtctggaatgcagatcagcggtgctgtggccccagcccctccttcttcagggctgggctttggcccaccaacatcgctggcttcagcctcaggaagtttccctaactctggtctgtatggctcctatcctcagggccaggctcctccccttagccaggcccaaggtcatcctgggatccagactccccagcgatctgccccatcacaggcctccagcttcacacccccagcttcagggggtcctcggctgccttcgatgactggtccactcctgcctggacagagttttggagggccctcagtgagccagcccaaccatgtgtcttcacctcctcaagctctgccccctggcacccagatgactgggcccctgggaccactgccacctatgcactccccgcagcagccaggctatcagccccaacaaaatggttccttcggaccagcccggggccctcagtctaattatggaggcccctacccagcagcacccacctttggcagtcagcctgggcctcctcagccactgcctcctaagcgcctggaccctgatgccatcccaagccctattcaggtcattgaagatgacaggaacaaccggggtacagagccatttgttactggagtacggggccaggtgccacccttagtcactaccaacttcctggtgaaagaccaagggaatgcaagtccccgatacatccgatgtacatcctataatatcccttgcacatctgacatggctaagcaggctcaggtgcccctggcagcagtcatcaaaccgctggcaaggctgcccccagaggaggcttcaccgtatgttgtggaccatggggaatctggccctttgcgctgcaaccgctgcaaagcatacatgtgtcccttcatgcagttcattgaaggagggaggcgtttccagtgctgtttttgcagctgtatcaatgatgttcccccccagtattttcagcacctggatcataccggcaaacgtgtggatgcttatgaccgccctgagctatccctgggctcttatgaattcttggccactgtagattactgcaagaacaataagttccccagccctcctgcctttatcttcatgattgacgtctcctacaatgccatcaggactggtcttgttaggctcctctgtgaggagctcaagtcactgttagactttctacctagggagggtggggcagaagagtcagcaatccgcgttggctttgtcacctacaataaggtgctccacttctataatgtgaagagctcattggcccagccacagatgatggttgtgtctgatgtggctgacatgtttgtgccactgctggatggcttcctggtcaacgtcaatgagtctcgggcagttatcaccagcttattggatcagattccagaaatgtttgcagacacaagggaaacagagacagtatttgtaccagttatccaggctggaatggaggctctgaaggctgctgagtgtgcagggaagctctttctattccatacatccctgcccattgcagaggccccagggaaactgaagaacagagatgacaggaagctgatcaatacagacaaggagaagactctgttccagcctcagacaggtgcctatcagaccctggccaaagagtgtgtggcccaaggctgctgtgtagatctctttctcttccctaaccagtatgtggatgtggccacactctctgttgtgccccagctcactggtggctctgtctacaaatatgcttcctttcaggtggagaacgaccaggagcggttcctgagtgacctgcgtcgtgatgtccagaaggttgttggctttgatgctgtgatgcgggtccggacaagcactggtatccgtgctgtagatttctttggagctttctacatgagcaacacgacagatgtggagctggctgggctagatggggacaaaacagtgactgtggagttcaagcatgacgatcggctcaatgaagagagcggagctctcctgcagtgtgccctgctttacaccagctgtgcagggcagcgtcggctccgcatccataatctggccctgaactgctgcacccagctggctgatctatatcgaaactgtgagactgacacgctcatcaactacatggccaagtttgcatatcggggagtcctgaatagccctgtgaaggctgttcgtgacacgctcatcacccagtgtgcccagatcctggcctgttacagaaagaactgtgctagcccctcctctgcaggacagttgatccttcctgagtgcatgaagctactcccagtttacctgaactgtgtgttgaagagtgatgtcctgcagcctggagctgaagtcactactgatgaccgtgcctatgtccgacagctagttacctccatggatgtgactgagaccaatgtcttcttctaccctcggctcttacctttgacaaagtctcccgttgagagtactaccgaaccaccagcagttcgagcctctgaagagcgtctaagcaatggggatatatatttactggagaatgggctcaacctcttcctctgggtgggagcaagcgtccaacagggtgttgtccagagccttttcagcgtctcctccttcagtcagatcaccagtggtttggtgagggcagggagtcaaggagaatatgggtgtggaagtatactttgtgaaacaattgggagccaatatagttagtgtgctagtaccctcaaatatcagggaacacttggggacaagggcagttgctgtcattcttcccaggtttgcctgtttcagatgatgcatacatgtatgctgccccaccttgactgaactcagagtgccttaccataaggataaatgaattttgtgttctagagtgttctgccagttctggataatccactgtccaagaaggttcgaggcctcattgatagcttacgggcacagagatcccggtacatgaagcttaccgtggtgaaacaggaagacaagatggagatgctgttcaagcacttcctggtggaagacaagagtctgagtgggggagcatcttatgtggactttctctgtcatatgcacaaggagattcggcagctactgagctaaagcaagtgggtaaatggcatagggcccaggctagcttccagaaagcaccccaggatgtcagagaaattgggacagtaacatatcttatgtaagctgacctcagtctctctggggggagggggagatataaggagacaccttctttctgggctcaagtatcctgccactctgtcatgtcctgctgatggaaggtgcccctgttccctcattctaccctctttttcctgctaatcctgtcataatgaatgtagcttctcagttcactgtatatgattcggtattgggggtttggaggcacccagaccctggcaatattatgtgtccctttggaccagtctcccaagaggagaggggcaggcaggaaagagtggggatcctaaggttactacagggggctcagtgtcatccacaacttcctatattagggataaaacatataggtgcacaagagctggggtatagcccataggtggtggagagaaaagtggtcagtccttcttgggcctggaggttagcagtcaagtttctctgctttcactgctcgctcgctctctcctgcaatgattgatgatcactccgtggatagagaggcacactgtcagaggtgaccggagaactgagttgcaaaatatattaagatctggtagaggtaccagcttcctttccagctggagaggccccaacactggatggttctgtagggagcctagggagcctggtcatcaacttgcaatacctcacagagccagttcacatcccactctgagctcccacgagaaacactgcttctccaggcccggggttgttggggagagaggcagaggcagctggagcgccgttctctcctgctgggacaccgcttgggctttggtattgactgagtggctgacagttatcttccaaccccaactggcttgggggcaggacaagggctaggcttgatggtggccaggcttgcctgctccccacctgggatgcccctgctctggacctctcatttctcttcattggtttatttttcaatgcatctttaatttgtaaagaaataaaataaattaagatgt

SEQ ID NO: 179307 - DNA, 549 bp, Homo sapiens
  Payload ID: 15341
  Gene Symbol: SEC24C
  Gene Name: SEC24 homolog C, COPII coat complex component
  ENST ID: ENST00000634508
  CDS Start-End: 1-549
caggcccaaggtcatcctgggatccagactccccagcgatctgccccatcacaggcctccagcttcacacccccagcttcagggggtcctcggctgccttcgatgactggtccactcctgcctggacagagttttggagggccctcagtgagccagcccaaccatgtgtcttcacctcctcaagctctgccccctggcacccagatgactgggcccctgggaccactgccacctatgcactccccgcagcagccaggctatcagccccaacaaaatggttccttcggaccagcccggggccctcagtctaattatggaggcccctacccagcagcacccacctttggcagtcagcctgggcctcctcagccactgcctcctaagcgcctggaccctgatgccatcccaagccctcaactcagtgagctgcctcctcagcagaaaaccaggcacagaatagaccccgatgccattcctagtccaattcaggtcattgaagatgacaggaacaaccggggtacagagccatttgttactggagtacggggc

SEQ ID NO: 179308 - DNA, 3424 bp, Homo sapiens
  Payload ID: 15341
  Gene Symbol: SEC24C
  Gene Name: SEC24 homolog C, COPII coat complex component
  ENST ID: ENST00000635550
  CDS Start-End: 67-609
gacgttaggaacgaagtctaacctggatctggagccgggtgagatcaaattgggaatgctttcataatgaacgtcaaccagtcagttccacctgtgccaccatttgggcagccccagcccatctacccagggtatcatcagtccagctatggtgggcaatcagggtccacagcccccgccattccctatggagcctacaatggcccagtaccaggctatcagcaaacacctccccaaggctgcctgggtctcagccatttgggtccccattggcccctgtgggcaaccagccacctgtgcttcagccctatggccctcccccgacaagtgcacaggtggctacgcagctgtctggaatgcagatcagcggtgctgtggccccagcccctccttcttcagggctgggctttggcccaccaacatcgctggcttcagcctcaggaagtttccctaactctggtctgtatggctcctatcctcagggccaggctcctccccttagccaggcccaaggtcatcctgggatccagactccccagcgatctgccccatcacaggcctccagcttcacacccccagcttcagggggtcctcggctgccttcgatgactggtccactcctgcctggacagagttttggagggccctcagtgagccagcccaaccatgtgtcttcacctcctcaagctctgccccctggcacccagatgactgggcccctgggaccactgccacctatgcactccccgcagcagccaggctatcagccccaacaaaatggttccttcggaccagcccggggccctcagtctaattatggaggcccctacccagcagcacccacctttggcagtcagcctgggcctcctcagccactgcctcctaagcgcctggaccctgatgccatcccaagccctcaactcagtgagctgcctcctcagcagaaaaccaggcacagaatagaccccgatgccattcctagtccaattcaggtcattgaagatgacaggaacaaccggggtacagagccatttgttactggagtacggggccaggtgccacccttagtcactaccaacttcctggtgaaagaccaagggaatgcaagtccccgatacatccgatgtacatcctataatatcccttgcacatctgacatggctaagcaggctcaggtgcccctggcagcagtcatcaaaccgctggcaaggctgcccccagaggaggcttcaccgtatgttgtggaccatggggaatctggccctttgcgctgcaaccgctgcaaagcatacatgtgtcccttcatgcagttcattgaaggagggaggcgtttccagtgctgtttttgcagctgtatcaatgatgttcccccccagtattttcagcacctggatcataccggcaaacgtgtggatgcttatgaccgccctgagctatccctgggctcttatgaattcttggccactgtagattactgcaagaacaataagttccccagccctcctgcctttatcttcatgattgacgtctcctacaatgccatcaggactggtcttgttaggctcctctgtgaggagctcaagtcactgttagactttctacctagggagggtggggcagaagagtcagcaatccgcgttggctttgtcacctacaataaggtgctccacttctataatgtgaagagctcattggcccagccacagatgatggttgtgtctgatgtggctgacatgtttgtgccactgctggatggcttcctggtcaacgtcaatgagtctcgggcagttatcaccagcttattggatcagattccagaaatgtttgcagacacaagggaaacagagacagtatttgtaccagttatccaggctggaatggaggctctgaaggctgctgagtgtgcagggaagctctttctattccatacatccctgcccattgcagaggccccagggaaactgaagaacagagatgacaggaagctgatcaatacagacaaggagaagactctgttccagcctcagacaggtgcctatcagaccctggccaaagagtgtgtggcccaaggctgctgtgtagatctctttctcttccctaaccagtatgtggatgtggccacactctctgttgtgccccagctcactggtggctctgtctacaaatatgcttcctttcaggtggagaacgaccaggagcggttcctgagtgacctgcgtcgtgatgtccagaaggttgttggctttgatgctgtgatgcgggtccggacaagcactggtatccgtgctgtagatttctttggagctttctacatgagcaacacgacagatgtggagctggctgggctagatggggacaaaacagtgactgtggagttcaagcatgacgatcggctcaatgaagagagcggagctctcctgcagtgtgccctgctttacaccagctgtgcagggcagcgtcggctccgcatccataatctggccctgaactgctgcacccagctggctgatctatatcgaaactgtgagactgacacgctcatcaactacatggccaagtttgcatatcggggagtcctgaatagccctgtgaaggctgttcgtgacacgctcatcacccagtgtgcccagatcctggcctgttacagaaagaactgtgctagcccctcctctgcaggacagttgatccttcctgagtgcatgaagctactcccagtttacctgaactgtgtgttgaagagtgatgtcctgcagcctggagctgaagtcactactgatgaccgtgcctatgtccgacagctagttacctccatggatgtgactgagaccaatgtcttcttctaccctcggctcttacctttgacaaagtctcccgttgagagtactaccgaaccaccagcagttcgagcctctgaagagcgtctaagcaatggggatatatatttactggagaatgggctcaacctcttcctctgggtgggagcaagcgtccaacagggtgttgtccagagccttttcagcgtctcctccttcagtcagatcaccagtggtttgagtgttctgccagttctggataatccactgtccaagaaggttcgaggcctcattgatagcttacgggcacagagatcccggtacatgaagcttaccgtggtgaaacaggaagacaagatggagatgctgttcaagcacttcctggtggaagacaagagtctgagtgggggagcatcttatgtggactttctctgtcatatgcacaaggagattcggcagctactgagctaaagcaagtgggtaaatggcatagggcccaggctagcttccagaaagcaccccaggatgtcagagaaattgggacagtaacatatcttatgtaagctgacctcagtctctctggggggagggggagatataaggagacacct

SEQ ID NO: 179309 - DNA, 4030 bp, Homo sapiens
  Payload ID: 15342
  Gene Symbol: SEC24D
  Gene Name: SEC24 homolog D, COPII coat complex component
  Uniprot ID: O94855
  ENST ID: ENST00000280551
  CDS Start-End: 240-3338
agccgagaaagggtttgacgtggcagttcccagcccagctgcaactccgagcgtgagtccaggctaaggggacgccggccggggaagaggcgcggcgggagaagcgaccgcagcgggagcccggccaccgagggctgccggcactaggcgcagagccgccagcgctcggaagcccgcggggtgcgggagcgggaacagacttcttttgtagaattatcctatggaatgatattttcataatgagtcaacaaggttacgtggctacacctccgtattctcagcctcagcctggaataggcctttctccacctcattatgggcactatggggatccgtcgcacacagcatctccaacaggtatgatgaagccagcagggcctttgggggccaccgccactaggggaatgttgcctccgggtcccccacctcctggaccccatcagtttggtcagaatggagctcatgccactggtcaccctccccaaagatttccaggccctccacctgtcaacaatgtggcatcctcacatgcaccataccaaccctctgcacaatcttcttatccaggtcctatatccacttcatctgtcacccagctgggcagccagctcagtgctatgcaaatcaacagctatggttcaggcatggctcctccaagccagggaccccctggccctctgtcagccacatcattgcagactcctccacgacctccacagccttccattttgcagcctggatctcaagttcttccaccaccacccaccacactcaatggtcctggtgcctcacctttgcctctaccaatgtacagaccagatgggctctctgggcctcctcctccaaatgcccagtaccagcccccacctcttccaggccagaccttgggtgctggatatcctccgcagcaggccaactctggtccccagatggcaggcgcacaactgtcttacccaggaggcttccctggaggtcctgcacagatggctggtccgccacagccccagaagaagctggatcctgactctatccctagcccaatccaggtgattgagaatgatagagccagcagaggaggacaagtttatgccaccaacaccagaggccagatccctcccctggtcactacagattgcatgatacaagaccaaggaaatgccagtcctcgattcatccgttgtacaacatactgttttccatgcacgtcagatatggctaagcaagctcagattccattagctgctgtcatcaagccctttgccaccattccttcaaatgagagtcccctttacttggtaaatcacggcgagagtggaccagtcagatgcaacaggtgcaaggcctacatgtgcccatttatgcagttcatcgaaggaggaaggagatatcagtgtggattttgcaactgtgtgaatgatgttccaccattctatttccaacatctggaccacattggaagaagactggaccactatgagaaaccagagttatctctaggatcttatgaatatgttgccactttggattattgcagaaagagtaagcctcccaacccaccagcctttatcttcatgattgatgtttcatatagtaacataaagaatggacttgtcaagctcatatgtgaagaactgaagaccatgctggaaaaaattccaaaggaagagcaagaagagacgtctgcaattcgagtgggttttatcacatataacaaagttctccatttctttaatgtgaagagtaatctggcccagcctcagatgatggtggtgactgatgttggagaagtctttgttcctttgttggatggtttccttgtcaactatcaagaatcccaatctgtgattcataatttgttggaccagattccagacatgtttgcagactctaatgaaaatgagactgtctttgctcctgtcatccaggctggcatggaagcactaaaggcagcagactgtcctgggaagctgttcatcttccattcttccttgccaactgctgaagcaccagggaagctcaaaaacagagatgacaaaaaactggttaatacagacaaagagaagatacttttccagccccaaacaaatgtctatgactcattggccaaggactgcgtggctcacggctgctctgtgacactcttcctctttcctagtcagtatgtggacgtggcctcgctggggctggttcctcagctcactggaggaaccctttacaaatacaacaatttccagatgcacttggatagacaacaatttttgaacgacctcagaaatgatattgaaaagaaaataggctttgatgctattatgagggttcgtaccagcacaggtttcagagccactgatttctttggtggaatcttgatgaacaacaccaccgatgtagaaatggctgccatcgattgtgacaaggcagtgaccgtggagttcaagcacgatgacaaactcagtgaagacagtggagccttaatccagtgtgctgtgctttacacgacaatcagtggtcaaagaagacttcggattcacaatcttggcttaaactgcagctctcagctagctgatctttataagagctgtgagacagatgctcttatcaacttctttgccaagtcagcttttaaagcagttctccaccagcctttgaaggtcatccgggaaattctagttaatcagactgcccatatgttggcatgttaccggaagaattgtgcaagtccttctgcagcaagccagcttattctaccagattccatgaaagtattgccagtgtacatgaattgcttgttgaaaaactgtgtactactcagcagaccagagatctcaactgatgaacgagcataccagagacagctggtcatgaccatgggtgtggctgactctcagcttttcttctacccacaacttctgcccatacacacgttagatgtcaagagtacaatgttacctgctgccgttcgttgctctgagtcccgtctttcagaagaaggaatattcttactggctaatggtctacacatgttcctgtggttgggagtaagcagcccaccagaactgatccaaggaatatttaatgtgccatcttttgcacatatcaacacagatatgacattgctgcctgaagtgggaaacccatactctcaacaactcagaatgataatgggtattatccaacaaaagaggccatattcaatgaagctcacaattgtaaagcagcgagaacaaccagaaatggttttccgacagttcctggtagaagacaaaggactttacggaggctcttcttatgtggatttcctttgttgtgttcacaaggagatctgtcagctgcttaattaattgaaacttctctgtcattgatgttgcatttccaaggagataatctccttcttggtgcctaattttctagatgataataggctagttttgatttcttgctcattttcagaataactttccaggaagagatggcatttagaacttcagctttggtgctcaggtataaagccaattaaggtacaattgtaccataaagggaacaatctgtttctgattgcacagtttctaatttttaaaactgatgtggtttgcatttcataaaaggcaaagtttacagaaccataaacattctcaattttctttatgctagacatataaattatttttcaaactgtatagatttggggtaaaaagttgtctcagttcctctcccaattgcaatgagaaaaaaaagcttaatttttacattatacttaattttctaaaaccatgtaactccattgaacacatttttcaacttaaggtctgcatagcagacttttaataaccttgggatttatctggtagaacaatatgtgttctacatttttttcataattatatattgtgtatgttaaaactattttccagttgttttgtctgtaaaactgtctttatcaatatgcttaatggttctttgtacaattttgaaagtttctacctgtatataatggatgttaaccagtatcaataaatcacttcgtataatctta

SEQ ID NO: 179310 - DNA, 2786 bp, Homo sapiens
  Payload ID: 15342
  Gene Symbol: SEC24D
  Gene Name: SEC24 homolog D, COPII coat complex component
  ENST ID: ENST00000419654
  CDS Start-End: 1605-2786
gcggctggtccaagcccggcgctgggggcgcgcagccgagaaagggtttgacgtggcagttcccagcccagctgcaactccgagcgtgagtccaggctaaggggacgccggccggggaagaggcgcggcgggagaagcgaccgcagcgggagcccggccaccgagggctgccggcactaggcgcagagccgccagcgctcggaagcccgcggggtgcgggagcgggaacagacttcttttgtagaattatcctatggaatgatattttcataatgagtcaacaaggttacgtggctacacctccgtattctcagcctcagcctggaataggcctttctccacctcattatgggcactatggggatccgtcgcacacagcatctccaacaggtatgatgaagccagcagggcctttgggggccaccgccactaggggaatgttgcctccgggtcccccacctcctggaccccatcagtttggtcagaatggagctcatgccactggtcaccctccccaaagatttccaggccctccacctgtcaacaatgtggcatcctcacatgcaccataccaaccctctgcacaatcttcttatccaggtcctatatccacttcatctgtcacccagctgggcagccagctcagtgctatgcaaatcaacagctatggttcaggcatggctcctccaagccagggaccccctggccctctgtcagccacatcattgcagactcctccacgacctccacagccttccattttgcagcctggatctcaagttcttccaccaccacccaccacactcaatggtcctggtgcctcacctttgcctctaccaatgtacagaccagatgggctctctgggcctcctcctccaaatgcccagtaccagcccccacctcttccaggccagaccttgggtgctggatatcctccgcagcaggccaactctggtccccagatggcaggcgcacaactgtcttacccaggaggcttccctggaggtcctgcacagatggctggtccgccacagccccagaagaagctggatcctgactctatccctagcccaatccaggtgattgagaatgatagagccagcagaggaggacaagtttatgccaccaacaccagaggccagatccctcccctggtcactacagattgcatgatacaagaccaaggaaatgccagtcctcgattcatccgttgtacaacatactgttttccatgcacgtcagatatggctaagcaagctcagattccattagctgctgtcatcaagccctttgccaccattccttcaaatgagagtcccctttacttggtaaatcacggcgagagtggaccagtcagatgcaacaggtgcaaggcctacatgtgcccatttatgcagttcatcgaaggaggaaggagatatcagtgtggattttgcaactgtgtgaatgatgttccaccattctatttccaacatctggaccacattggaagaagactggaccactatgagaaaccagagttatctctaggatcttatgaatatgttgccactttggattattgcagaaagagtaagcctcccaacccaccagcctttatcttcatgattgatgtttcatatagtaacataaagaatggacttgtcaagctcatatgtgaagaactgaagaccatgctggaaaaaattccaaaggaagagcaagaagagacgtctgcaattcgagtgggttttatcacatataacaaagttctccatttctttaatgtgaagagtaatctggcccagcctcagatgatggtggtgactgatgttggagaagtctttgttcctttgttggatggtttccttgtcaactatcaagaatcccaatctgtgattcataatttgttggaccagattccagacatgtttgcagactctaatgaaaatgagactgtctttgctcctgtcatccaggctggcatggaagcactaaaggcagcagactgtcctgggaagctgttcatcttccattcttccttgccaactgctgaagcaccagggaagctcaaaaacagagatgacaaaaaactggttaatacagacaaagagaagatacttttccagccccaaacaaatgtctatgactcattggccaaggactgcgtggctcacggctgctctgtgacactcttcctctttcctagtcagtatgtggacgtggcctcgctggggctggttcctcagctcactggaggaaccctttacaaatacaacaatttccagatgcacttggatagacaacaatttttgaacgacctcagaaatgatattgaaaagaaaataggctttgatgctattatgagggttcgtaccagcacaggtttcagagccactgatttctttggtggaatcttgatgaacaacaccaccgatgtagaaatggctgccatcgattgtgacaaggcagtgaccgtggagttcaagcacgatgacaaactcagtgaagacagtggagccttaatccagtgtgctgtgctttacacgacaatcagtggtcaaagaagacttcggattcacaatcttggcttaaactgcagctctcagctagctgatctttataagagctgtgagacagatgctcttatcaacttctttgccaagtcagcttttaaagcagttctccaccagcctttgaaggtcatccgggaaattctagttaatcagactgcccatatgttggcatgttaccggaagaattgtgcaagtccttctgcagcaagccagttcacttgtgaaaaataa

SEQ ID NO: 179311 - DNA, 3806 bp, Homo sapiens
  Payload ID: 15342
  Gene Symbol: SEC24D
  Gene Name: SEC24 homolog D, COPII coat complex component
  ENST ID: ENST00000514561
  CDS Start-End: 159-362
atggaacatcagaggctaagctcaggtggcaacaggatgggtcagatcaaggaagactgagactccggaccaagcctcacggctggtgagggccagggactcaatcacaggaacaagacttcttttgtagaattatcctatggaatgatattttcataatgagtcaacaaggttacgtggctacacctccgtattctcagcctcagcctggaataggcctttctccacctcattatgggcactatggggatccgtcgcacacagcatctccaacaggaagaaaactgaggtccttaaagataagcttcttgcccaggttcatacaactaataagtaaccagtggggccttgaactactctaacccaagcccagtgatttctctcctttactgcaatttctcaagaagaaaagagagaaatgtctgaagacagttccaaagagaagtctttaaaggtatgatgaagccagcagggcctttgggggccaccgccactaggggaatgttgcctccgggtcccccacctcctggaccccatcagtttggtcagaatggagctcatgccactggtcaccctccccaaagatttccaggccctccacctgtcaacaatgtggcatcctcacatgcaccataccaaccctctgcacaatcttcttatccaggtcctatatccacttcatctgtcacccagctgggcagccagctcagtgctatgcaaatcaacagctatggttcaggcatggctcctccaagccagggaccccctggccctctgtcagccacatcattgcagactcctccacgacctccacagccttccattttgcagcctggatctcaagttcttccaccaccacccaccacactcaatggtcctggtgcctcacctttgcctctaccaatgtacagaccagatgggctctctgggcctcctcctccaaatgcccagtaccagcccccacctcttccaggccagaccttgggtgctggatatcctccgcagcaggccaactctggtccccagatggcaggcgcacaactgtcttacccaggaggcttccctggaggtcctgcacagatggctggtccgccacagccccagaagaagctggatcctgactctatccctagcccaatccaggtgattgagaatgatagagccagcagaggaggacaagtttatgccaccaacaccagaggccagatccctcccctggtcactacagattgcatgatacaagaccaaggaaatgccagtcctcgattcatccgttgtacaacatactgttttccatgcacgtcagatatggctaagcaagctcagattccattagctgctgtcatcaagccctttgccaccattccttcaaatgagagtcccctttacttggtaaatcacggcgagagtggaccagtcagatgcaacaggtgcaaggcctacatgtgcccatttatgcagttcatcgaaggaggaaggagatatcagtgtggattttgcaactgtgtgaatgatgttccaccattctatttccaacatctggaccacattggaagaagactggaccactatgagaaaccagagttatctctaggatcttatgaatatgttgccactttggattattgcagacagtattcacaatagccaaaaggaggaagcaaccaggtgtctatggaagaagaatggataagcaaaatgtggtatatacgtacaatggaatatcattcagcctcaaaaaggaagaaaagtctgacccatgctacaacatggatgaatgttgaggatgttatgctaagtaaaataagccagccacaaaaaggataaatatggaatgattctatatgaggtcactaaagttgtttgcctgtggctctcttttctaaatattttgtaagatgcaactgaaggatcacttcctaaaagctgtttgaacaccagccagtaaagggaccaacaactaaaaaacatgttcgtagcagctgctttatgtcacagtgattattttaaacagataaagaaaacgcctgacgttctatgttaccgcaaatatgtaaaaaactagaagagtaagcctcccaacccaccagcctttatcttcatgattgatgtttcatatagtaacataaagaatggacttgtcaagctcatatgtgaagaactgaagaccatgctggaaaaaattccaaaggaagagcaagaagagacgtctgcaattcgagtgggttttatcacatataacaaagttctccatttctttaatgtgaagagtaatctggcccagcctcagatgatggtggtgactgatgttggagaagtctttgttcctttgttggatggtttccttgtcaactatcaagaatcccaatctgtgattcataatttgttggaccagattccagacatgtttgcagactctaatgaaaatgagactgtctttgctcctgtcatccaggctggcatggaagcactaaaggcagcagactgtcctgggaagctgttcatcttccattcttccttgccaactgctgaagcaccagggaagctcaaaaacagagatgacaaaaaactggttaatacagacaaagagaagatacttttccagccccaaacaaatgtctatgactcattggccaaggactgcgtggctcacggctgctctgtgacactcttcctctttcctagtcagtatgtggacgtggcctcgctggggctggttcctcagctcactggaggaaccctttacaaatacaacaatttccagatgcacttggatagacaacaatttttgaacgacctcagaaatgatattgaaaagaaaataggctttgatgctattatgagggttcgtaccagcacaggtttcagagccactgatttctttggtggaatcttgatgaacaacaccaccgatgtagaaatggctgccatcgattgtgacaaggcagtgaccgtggagttcaagcacgatgacaaactcagtgaagacagtggagccttaatccagtgtgctgtgctttacacgacaatcagtggtcaaagaagacttcggattcacaatcttggcttaaactgcagctctcagctagctgatctttataagagctgtgagacagatgctcttatcaacttctttgccaagtcagcttttaaagcagttctccaccagcctttgaaggtcatccgggaaattctagttaatcagactgcccatatgttggcatgttaccggaagaattgtgcaagtccttctgcagcaagccagttcacttgtgaaaaataatatctatgaagatggagagattcctaaaggaattccactattttaccatagagcccaaagtttccttgacccaagcaagaccatcaaggagctatctggattgtatgatactggacctcagtagaactacttttactgaattgctggagccaaaactaggctgcagcaagagaaggcaattagggtacaaaatctaaggaagctgtcattctgaggatcatatgatagatgctgggttaagacatatggctgggcatggtggctcatgcctgtaatcccagccctttgagaggccaaggcaggtggatcacttgaggtcaggagttcaagaccagcctgggcaacatggtgaaaccccacatctactaaaaatacaaaaacagctgggcgtggtggcatggacctctaatcccagttacttaggaggctgaggcaggagaatagcttgaacccaggaggtggacgttgcagtgagccgagatcatgccactcgactccagcgtgggcaaaaaaaaaaaaaaaa

SEQ ID NO: 179312 - DNA, 1870 bp, Homo sapiens
  Payload ID: 15342
  Gene Symbol: SEC24D
  Gene Name: SEC24 homolog D, COPII coat complex component
  ENST ID: ENST00000509818
  CDS Start-End: 161-796
atatggaacatcagaggctaagctcaggtggcaacaggatgggtcagatcaaggaagactgagactccggaccaagcctcacggctggtgagggccagggactcaatcacaggaacaagacttcttttgtagaattatcctatggaatgatattttcataatgagtcaacaaggttacgtggctacacctccgtattctcagcctcagcctggaataggcctttctccacctcattatgggcactatggggatccgtcgcacacagcatctccaacaggtatgatgaagccagcagggcctttgggggccaccgccactaggggaatgttgcctccgggtcccccacctcctggaccccatcagtttggtcagaatggagctcatgccactggtcaccctccccaaaggttcaggcatggctcctccaagccagggaccccctggccctctgtcagccacatcattgcagactcctccacgacctccacagccttccattttgcagcctggatctcaagttcttccaccaccacccaccacactcaatggtcctggtgcctcacctttgcctctaccaatgtacagaccagatgggctctctgggcctcctcctccaaatgcccagtaccagcccccacctcttccaggccagaccttgggtgctggatatcctccgcagcaggccaactctggtccccagatggcaggcgcacaactgtcttacccaggaggcttccctggaggtcctgcacagatggctggtccgccacagccccagaagaagctggatcctgactctatccctagcccaatccaggtgattgagaatgatagagccagcagaggaggacaagtttatgccaccaacaccagaggccagatccctcccctggtcactacagattgcatgatacaagaccaaggaaatgccagtcctcgattcatccgttgtacaacatactgttttccatgcacgtcagatatggctaagcaagctcagattccattagctgctgtcatcaagccctttgccaccattccttcaaatgagagtcccctttacttggtaaatcacggcgagagtggaccagtcagatgcaacaggtgcaaggcctacatgtgcccatttatgcagttcatcgaaggaggaaggagatatcagtgtggattttgcaactgtgtgaatgatgttttagaggaaaaaatcctgagaagggacagaggcttctcccaaagcatttggacaaagtcctccagcgagcccaccagctcctcagatgtcttcacccaagcccccagctttcttagaaaggtgaccaaaatcatacccaccatgaagagcagcaaggatcttcagtttgctgtgactctttggcctcctacccaaagtgtcggctcagggccttaaaaggcccagccacttccaggaagagaaaaacgactcagaattcttgtgtctcaacacagcagattatgttccctcagttccaccattctatttccaacatctggaccacattggaagaagactggaccactatgagaaaccagagttatctctaggatcttatgaatatgttgccactttggattattgcagaaagagtaagcctcccaacccaccagcctttatcttcatgattgatgtttcatatagtaacataaagaatggacttgtcaagctcatatgtgaagaactgaagaccatgctggaaaaaattccaaaggaagagcaagaagagacgtctgcaattcgagtgggttttatcacatataacaaagttctccatttctttaatgtgaagagtaatctggcccagcctcagatgatggtggtgactgatgttggagaagtctttgttcctttgt

SEQ ID NO: 179313 - DNA, 2626 bp, Homo sapiens
  Payload ID: 15342
  Gene Symbol: SEC24D
  Gene Name: SEC24 homolog D, COPII coat complex component
  ENST ID: ENST00000511481
  CDS Start-End: 144-2135
accagagccaggcccatgctgtggatcagaagcgaccataaacaagaaaatccaatctgtcttctggctttcttgagagtcccctttacttggtaaatcacggcgagagtggaccagtcagatgcaacaggtgcaaggcctacatgtgcccatttatgcagttcatcgaaggaggaaggagatatcagtgtggattttgcaactgtgtgaatgatgttccaccattctatttccaacatctggaccacattggaagaagactggaccactatgagaaaccagagttatctctaggatcttatgaatatgttgccactttggattattgcagaaagagtaagcctcccaacccaccagcctttatcttcatgattgatgtttcatatagtaacataaagaatggacttgtcaagctcatatgtgaagaactgaagaccatgctggaaaaaattccaaaggaagagcaagaagagacgtctgcaattcgagtgggttttatcacatataacaaagttctccatttctttaatgtgaagagtaatctggcccagcctcagatgatggtggtgactgatgttggagaagtctttgttcctttgttggatggtttccttgtcaactatcaagaatcccaatctgtgattcataatttgttggaccagattccagacatgtttgcagactctaatgaaaatgagactgtctttgctcctgtcatccaggctggcatggaagcactaaaggcagcagactgtcctgggaagctgttcatcttccattcttccttgccaactgctgaagcaccagggaagctcaaaaacagagatgacaaaaaactggttaatacagacaaagagaagatacttttccagccccaaacaaatgtctatgactcattggccaaggactgcgtggctcacggctgctctgtgacactcttcctctttcctagtcagtatgtggacgtggcctcgctggggctggttcctcagctcactggaggaaccctttacaaatacaacaatttccagatgcacttggatagacaacaatttttgaacgacctcagaaatgatattgaaaagaaaataggctttgatgctattatgagggttcgtaccagcacaggtttcagagccactgatttctttggtggaatcttgatgaacaacaccaccgatgtagaaatggctgccatcgattgtgacaaggcagtgaccgtggagttcaagcacgatgacaaactcagtgaagacagtggagccttaatccagtgtgctgtgctttacacgacaatcagtggtcaaagaagacttcggattcacaatcttggcttaaactgcagctctcagctagctgatctttataagagctgtgagacagatgctcttatcaacttctttgccaagtcagcttttaaagcagttctccaccagcctttgaaggtcatccgggaaattctagttaatcagactgcccatatgttggcatgttaccggaagaattgtgcaagtccttctgcagcaagccagcttattctaccagattccatgaaagtattgccagtgtacatgaattgcttgttgaaaaactgtgtactactcagcagaccagagatctcaactgatgaacgagcataccagagacagctggtcatgaccatgggtgtggctgactctcagcttttcttctacccacaacttctgcccatacacacgttagatgtcaagagtacaatgttacctgctgccgttcgttgctctgagtcccgtctttcagaagaaggaatattcttactggctaatggtctacacatgttcctgtggttgggagtaagcagcccaccagaactgatccaaggaatatttaatgtgccatcttttgcacatatcaacacagatatgacattgctgcctgaagtgggaaacccatactctcaacaactcagaatgataatgggtattatccaacaaaagaggccatattcaatgaagctcacaattgtaaagcagcgagaacaaccagaaatggttttccgacagttcctggtagaagacaaaggactttacggaggctcttcttatgtggatttcctttgttgtgttcacaaggagatctgtcagctgcttaattaattgaaacttctctgtcattgatgttgcatttccaaggagataatctccttcttggtgcctaattttctagatgataataggctagttttgatttcttgctcattttcagaataactttccaggaagagatggcatttagaacttcagctttggtgctcaggtataaagccaattaaggtacaattgtaccataaagggaacaatctgtttctgattgcacagtttctaatttttaaaactgatgtggtttgcatttcataaaaggcaaagtttacagaaccataaacattctcaattttctttatgctagacatataaattatttttcaaactgtatagatttggggtaaaaagttgtctcagttcctctcccaattgcaatgagaaaaaaaagcttaatttttacattatacttaattttctaaaaccatgtaactccattgaacacatttttcaacttaaggtctgcatagcagacttttaataacctt

SEQ ID NO: 179314 - DNA, 602 bp, Homo sapiens
  Payload ID: 15342
  Gene Symbol: SEC24D
  Gene Name: SEC24 homolog D, COPII coat complex component
  ENST ID: ENST00000503683
  CDS Start-End: 106-602
gtagtgcattgcacgggtacgtcatcaaatgtgcgtgtacacgtgccagattcgcctttaaacgacttcttttgtagaattatcctatggaatgatattttcataatgagtcaacaaggttacgtggctacacctccgtattctcagcctcagcctggaataggcctttctccacctcattatgggcactatggggatccgtcgcacacagcatctccaacaggtatgatgaagccagcagggcctttgggggccaccgccactaggggaatgttgcctccgggtcccccacctcctggaccccatcagtttggtcagaatggagctcatgccactggtcaccctccccaaagatttccaggccctccacctgtcaacaatgtggcatcctcacatgcaccataccaaccctctgcacaatcttcttatccaggtcctatatccacttcatctgtcacccagctgggcagccagctcagtgctatgcaaatcaacagctatggttcaggcatggctcctccaagccagggaccccctggccctctgtcagccacatcattgcagactcctccacgacctccacagccttccattttgcagcc

SEQ ID NO: 179315 - DNA, 1319 bp, Homo sapiens
  Payload ID: 15342
  Gene Symbol: SEC24D
  Gene Name: SEC24 homolog D, COPII coat complex component
  ENST ID: ENST00000506622
  CDS Start-End: 172-1089
aagttaattacatatggaacatcagaggctaagctcaggtggcaacaggatgggtcagatcaaggaagactgagactccggaccaagcctcacggctggtgagggccagggactcaatcacaggaacaagacttcttttgtagaattatcctatggaatgatattttcataatgagtcaacaaggttacgtggctacacctccgtattctcagcctcagcctggaataggcctttctccacctcattatgggcactatggggatccgtcgcacacagcatctccaacaggtatgatgaagccagcagggcctttgggggccaccgccactaggggaatgttgcctccgggtcccccacctcctggaccccatcagtttggtcagaatggagctcatgccactggtcaccctccccaaagatttccaggccctccacctgtcaacaatgtggcatcctcacatgcaccataccaaccctctgcacaatcttcttatccaggtcctatatccacttcatctgtcacccagctgggcagccagctcagtgctatgcaaatcaacagctatgatcatggaaagagtggaagctcagatgttgtgaggcagaaaagagaagataggagaggaaagagtcacagtactgagatttacatcaacagaaatgctgtatatcctgttcaggcatggctcctccaagccagggaccccctggccctctgtcagccacatcattgcagactcctccacgacctccacagccttccattttgcagcctggatctcaagttcttccaccaccacccaccacactcaatggtcctggtgcctcacctttgcctctaccaatgtacagaccagatgggctctctgggcctcctcctccaaatgcccagtaccagcccccacctcttccaggccagaccttgggtgctggatatcctccgcagcaggccaactctggtccccagatggcaggcgcacaactgtcttacccaggaggcttccctggaggtcctgcacagatggctggtccgccacagccccagaagaagctggatcctgactctatccctagcccaatccaggtgattgagaatgatagagccagcagaggaggacaagtttatgccaccaacaccagaggccagatccctcccctggtcactacagattgcatgatacaagaccaaggaaatgccagtcctcgattcatccgttgtacaacatactgttttccatgcacgtcagatatggctaagcaagctcagattccattagctgctgtcatcaagccctttgccaccattccttcaaatgag

SEQ ID NO: 179316 - DNA, 3447 bp, Homo sapiens
  Payload ID: 15343
  Gene Symbol: SEC31A
  Gene Name: SEC31 homolog A, COPII coat complex component
  ENST ID: ENST00000264405
  CDS Start-End: 486-3395
atgccaggtatcgtgctgctgttacaaagaacttgatttgtttattttctgaacatgtcggtgatgttttcgtgaccagaaatacaccataggacacaggaacttttttttttagatggagttttgctctgtcacttaggctggagtgcagtggcaagatcttggctcactgcaacctctgcctcccaggttcaaacgattctcctgcctcagcctcctgagtagctgggattacaggcgcaagccaccatgccaggaaatttttatagttttataaaaattttatagctgggattacatgcatgcgccaccacgcccagctaattttcatagttttagtagagatggggttttaccatgttggccaggctggtctcaaacttctgacctcaagtgatctgcccacctttgcctcccaaagtgctgggaatacaggcatgggccaccgtaggaacttaatgtttatgtcagttatcagttagtctatggtaaaattggttttgttatccattgttttgcttaaagtcacagttcctaaattaagtaacgacttactgcagttagatttcatgcccatccatagggggattttggcaattgcttggagcatggcagatcctgaattgttactgagctgtggaaaagatgctaagattctctgctccaatccaaacacaggagaggtgttatatgaacttcccaccaacacacagtggtgcttcgatattcagtggtgtccccgaaatcctgctgtcttatcagctgcttcgtttgatgggcgtatcagtgtttattctatcatgggaggtagcacagatggtttaagacagaaacaagttgacaagctttcatcatcttttgggaatcttgatccctttggcacaggacagccccttcctccgttacaaattccacagcagactgctcagcatagtatagtgctgcctctgaagaagccgcccaagtggattcgaaggcctgttggtgcttctttttcatttggaggcaaactggttacgtttgagaatgtcagaatgccttctcatcagggagctgagcagcagcagcagcagcaccatgtgttcattagtcaggttgtaacagaaaaggagttcctcagccgatcagaccaacttcagcaggctgtgcagtcacaaggatttatcaattattgccaaaaaaaaattgatgcttctcagactgaatttgagaaaaatgtgtggtcctttttgaaggtaaactttgaggatgattctcgtggaaaataccttgaacttctaggatacagaaaagaagatctaggaaagaagcacattaaagaggaaaaagaagaatctgaatttctaccctcatctggaggaacatttaatatctctgtcagtggggacattgatggtttaattactcaggctttgctgacgggcaattttgagagtgctgttgacctttgtttacatgataaccgcatggccgatgccattatattggccatagcaggtggacaagaactcttggctcgaacccagaaaaaatacttcgcaaaatcccaaagcaaaattaccaggctcatcactgcagtggtgatgaagaactggaaagagattgttgagtcttgtgatcttaaaaattggagagaggctttagctgcagtattgacttatgcaaagccggatgaattttcagccctttgtgatcttttgggaaccaggcttgaaaatgaaggagatagcctcctgcagactcaagcatgtctctgctatatttgtgcagggaatgtagagaaattagttgcatgttggactaaagctcaagatggaagccaccctttgtcacttcaggatctgattgagaaagttgtcatcctgcgaaaagctgtgcaactcactcaagccatggacactagtactgtaggagttctcttggctgcgaagatgagtcagtatgccaatttgttggcagctcagggcagtattgctgcagccttggcttttcttcctgacaacaccaaccagccaaatatcatgcagcttcgtgacagactttgtagagcacaaggagagcctgtagcaggacatgaatcacctaaaattccgtacgagaaacagcagctccccaagggcaggcctggaccagttgctggccaccaccagatgccaagagttcaaactcaacaatattatccccatgttagaattgcccctactgtcactacctggagtaacaaaactcctactgcccttcccagccatccacctgcagcctctccctctgacacacagggagaaaatcctccacctccgggtttcataatgcatggaaatgttaatccaaatgctgctggtcagcttcccacatctccaggtcatatgcacacccaggtaccaccttatccacagccacagccttatcaaccagcccagccgtatcccttcggaacaggggggtcagcaatgtatcgacctcagcagcctgttgctcctcctacttcaaacgcttaccctaacaccccttacatatcttctgcttcttcctatactgggcagtctcagctgtacgcagcacagcaccaggcctcttcacctacctccagccctgctacttctttccctcctcccccttcctctggagcatccttccagcatggcggaccaggagctccaccatcatcttcagcttatgcactgcctcctggaacaacaggtcctcagaatggttggaatgaccctccagctttgaacagagtacccaaaaagaagaagatgcctgaaaacttcatgcctcctgttcccatcacatcaccaatcatgaacccgttgggtgacccccagtcacaaatgctgcagcaacagccttcagctccagtaccactgtcaagccagtcttcattcccacagccacatcttccaggtggccagcccttccatggcgtacagcaacctcttggtcaaacaggcatgccaccatctttttcaaagcccaatattgaaggtgccccaggggctcctattggaaataccttccagcatgtgcagtctttgccaacaaaaaaaattaccaagaaacctattccagatgagcacctcattctaaagaccacatttgaggatcttattcagcgctgcctttcttcagcaacagaccctcaaaccaagaggaagctagatgatgccagcaaacgtttggagtttctgtatgataaacttagggaacagacactttcaccaacaatcaccagtggtttacacaacattgcaaggagcattgaaactcgaaactactcagaaggattgaccatgcatacccacatagttagcaccagcaacttcagtgagacctctgctttcatgccagttctcaaagttgttctcacccaggccaataagctgggtgtctaaaaggacagcttctcttccactcaatattgccatttttccaaagaaacatgtt

SEQ ID NO: 179317 - DNA, 3909 bp, Homo sapiens
  Payload ID: 15343
  Gene Symbol: SEC31A
  Gene Name: SEC31 homolog A, COPII coat complex component
  Uniprot ID: O94979
  ENST ID: ENST00000311785
  CDS Start-End: 177-3497
agatgtcgctcccggaagtgttgggcgcagggcgtggctgcggctgcggctgccacgttggaacggaacgtggaggtggccctggccggggaggaggggcggcggcgaatgctgggagagtccgacgagcgctgcactaacgcaggatccggctgccgaaggtcctcgccagcaggatgaagttaaaggaagtagatcgtacagccatgcaggcatggagccctgcccagaatcaccccatttacctagcaacaggaacatctgctcagcaattggatgcaacatttagtacgaatgcttcccttgagatatttgaattagacctctctgatccatccttggatatgaaatcttgtgccacattctcctcttctcacaggtaccacaagttgatttgggggccttataaaatggattccaaaggagatgtctctggagttctgattgcaggtggtgaaaatggaaatattattctctatgatccttctaaaattatagctggagacaaggaagttgtgattgcccagaatgacaagcatactggcccagtgagagccttggatgtgaacattttccagactaatctggtagcttctggtgctaatgaatctgaaatctacatatgggatctaaataattttgcaaccccaatgacaccaggagccaaaacacagccgccagaagatatcagctgcattgcatggaacagacaagttcagcatattttagcatcagccagtcccagtggccgggccactgtatgggatcttagaaaaaatgagccaatcatcaaagtcagtgaccatagtaacagaatgcattgttctgggttggcatggcatcctgatgttgctactcagatggtccttgcctccgaggatgaccggttaccagtgatccagatgtgggatcttcgatttgcttcctctccacttcgtgtcctggaaaaccatgccagggggattttggcaattgcttggagcatggcagatcctgaattgttactgagctgtggaaaagatgctaagattctctgctccaatccaaacacaggagaggtgttatatgaacttcccaccaacacacagtggtgcttcgatattcagtggtgtccccgaaatcctgctgtcttatcagctgcttcgtttgatgggcgtatcagtgtttattctatcatgggaggtagcacagatggtttaagacagaaacaagttgacaagctttcatcatcttttgggaatcttgatccctttggcacaggacagccccttcctccgttacaaattccacagcagactgctcagcatagtatagtgctgcctctgaagaagccgcccaagtggattcgaaggcctgttggtgcttctttttcatttggaggcaaactggttacgtttgagaatgtcagaatgccttctcatcagggagctgagcagcagcagcagcagcaccatgtgttcattagtcaggttgtaacagaaaaggagttcctcagccgatcagaccaacttcagcaggctgtgcagtcacaaggatttatcaattattgccaaaaaaaaattgatgcttctcagactgaatttgagaaaaatgtgtggtcctttttgaaggtaaactttgaggatgattctcgtggaaaataccttgaacttctaggatacagaaaagaagatctaggaaagaagattgctttggccttgaacaaagtggatggagccaatgtggctcttaaagactctgaccaagtagcacagagtgatggggaggagagccctgctgctgaagagcagctcttgggagagcacattaaagaggaaaaagaagaatctgaatttctaccctcatctggaggaacatttaatatctctgtcagtggggacattgatggtttaattactcaggctttgctgacgggcaattttgagagtgctgttgacctttgtttacatgataaccgcatggccgatgccattatattggccatagcaggtggacaagaactcttggctcgaacccagaaaaaatacttcgcaaaatcccaaagcaaaattaccaggctcatcactgcagtggtgatgaagaactggaaagagattgttgagtcttgtgatcttaaaaattggagagaggctttagctgcagtattgacttatgcaaagccggatgaattttcagccctttgtgatcttttgggaaccaggcttgaaaatgaaggagatagcctcctgcagactcaagcatgtctctgctatatttgtgcagggaatgtagagaaattagttgcatgttggactaaagctcaagatggaagccaccctttgtcacttcaggatctgattgagaaagttgtcatcctgcgaaaagctgtgcaactcactcaagccatggacactagtactgtaggagttctcttggctgcgaagatgagtcagtatgccaatttgttggcagctcagggcagtattgctgcagccttggcttttcttcctgacaacaccaaccagccaaatatcatgcagcttcgtgacagactttgtagagcacaaggagagcctgtagcaggacatgaatcacctaaaattccgtacgagaaacagcagctccccaagggcaggcctggaccagttgctggccaccaccagatgccaagagttcaaactcaacaatattatccccatggagaaaatcctccacctccgggtttcataatgcatggaaatgttaatccaaatgctgctggtcagcttcccacatctccaggtcatatgcacacccaggtaccaccttatccacagccacagcgtcctcagaatggttggaatgaccctccagctttgaacagagtacccaaaaagaagaagatgcctgaaaacttcatgcctcctgttcccatcacatcaccaatcatgaacccgttgggtgacccccagtcacaaatgctgcagcaacagccttcagctccagtaccactgtcaagccagtcttcattcccacagccacatcttccaggtggccagcccttccatggcgtacagcaacctcttggtcaaacaggcatgccaccatctttttcaaagcccaatattgaaggtgccccaggggctcctattggaaataccttccagcatgtgcagtctttgccaacaaaaaaaattaccaagaaacctattccagatgagcacctcattctaaagaccacatttgaggatcttattcagcgctgcctttcttcagcaacagaccctcaaaccaagaggaagctagatgatgccagcaaacgtttggagtttctgtatgataaacttagggaacagacactttcaccaacaatcaccagtggtttacacaacattgcaaggagcattgaaactcgaaactactcagaaggattgaccatgcatacccacatagttagcaccagcaacttcagtgagacctctgctttcatgccagttctcaaagttgttctcacccaggccaataagctgggtgtctaaaaggacagcttctcttccactcaatattgccatttttccaaagaaacatgttaaaaaaaaaaattataagacatggactagtcctcattagcatgtttgcatagcaaccagtcaagagcatttacactatttctgctgatatactcaccttagaactgctcagaaccctggtgctttatttttgttttaatcttttgttgccagtgatgattttcctattctgcaaatagtgtatttcctggattacacatagtatggtttcctgaagtattctgataaatgtgttttttaaaacctcaatatactttttagaaaaggagcatctggttatgcataaagcagagctaaaactaaatttctttcatgtcctccctacttcctcagtgtcaatcagattaaagtgtgtaatcct

SEQ ID NO: 179318 - DNA, 4012 bp, Homo sapiens
  Payload ID: 15343
  Gene Symbol: SEC31A
  Gene Name: SEC31 homolog A, COPII coat complex component
  Uniprot ID: O94979
  ENST ID: ENST00000348405
  CDS Start-End: 54-3599
gacgagcgctgcactaacgcaggatccggctgccgaaggtcctcgccagcaggatgaagttaaaggaagtagatcgtacagccatgcaggcatggagccctgcccagaatcaccccatttacctagcaacaggaacatctgctcagcaattggatgcaacatttagtacgaatgcttcccttgagatatttgaattagacctctctgatccatccttggatatgaaatcttgtgccacattctcctcttctcacaggtaccacaagttgatttgggggccttataaaatggattccaaaggagatgtctctggagttctgattgcaggtggtgaaaatggaaatattattctctatgatccttctaaaattatagctggagacaaggaagttgtgattgcccagaatgacaagcatactggcccagtgagagccttggatgtgaacattttccagactaatctggtagcttctggtgctaatgaatctgaaatctacatatgggatctaaataattttgcaaccccaatgacaccaggagccaaaacacagccgccagaagatatcagctgcattgcatggaacagacaagttcagcatattttagcatcagccagtcccagtggccgggccactgtatgggatcttagaaaaaatgagccaatcatcaaagtcagtgaccatagtaacagaatgcattgttctgggttggcatggcatcctgatgttgctactcagatggtccttgcctccgaggatgaccggttaccagtgatccagatgtgggatcttcgatttgcttcctctccacttcgtgtcctggaaaaccatgccagggggattttggcaattgcttggagcatggcagatcctgaattgttactgagctgtggaaaagatgctaagattctctgctccaatccaaacacaggagaggtgttatatgaacttcccaccaacacacagtggtgcttcgatattcagtggtgtccccgaaatcctgctgtcttatcagctgcttcgtttgatgggcgtatcagtgtttattctatcatgggaggtagcacagatggtttaagacagaaacaagttgacaagctttcatcatcttttgggaatcttgatccctttggcacaggacagccccttcctccgttacaaattccacagcagactgctcagcatagtatagtgctgcctctgaagaagccgcccaagtggattcgaaggcctgttggtgcttctttttcatttggaggcaaactggttacgtttgagaatgtcagaatgccttctcatcagggagctgagcagcagcagcagcagcaccatgtgttcattagtcaggttgtaacagaaaaggagttcctcagccgatcagaccaacttcagcaggctgtgcagtcacaaggatttatcaattattgccaaaaaaaaattgatgcttctcagactgaatttgagaaaaatgtgtggtcctttttgaaggtaaactttgaggatgattctcgtggaaaataccttgaacttctaggatacagaaaagaagatctaggaaagaagcacattaaagaggaaaaagaagaatctgaatttctaccctcatctggaggaacatttaatatctctgtcagtggggacattgatggtttaattactcaggctttgctgacgggcaattttgagagtgctgttgacctttgtttacatgataaccgcatggccgatgccattatattggccatagcaggtggacaagaactcttggctcgaacccagaaaaaatacttcgcaaaatcccaaagcaaaattaccaggctcatcactgcagtggtgatgaagaactggaaagagattgttgagtcttgtgatcttaaaaattggagagaggctttagctgcagtattgacttatgcaaagccggatgaattttcagccctttgtgatcttttgggaaccaggcttgaaaatgaaggagatagcctcctgcagactcaagcatgtctctgctatatttgtgcagggaatgtagagaaattagttgcatgttggactaaagctcaagatggaagccaccctttgtcacttcaggatctgattgagaaagttgtcatcctgcgaaaagctgtgcaactcactcaagccatggacactagtactgtaggagttctcttggctgcgaagatgagtcagtatgccaatttgttggcagctcagggcagtattgctgcagccttggcttttcttcctgacaacaccaaccagccaaatatcatgcagcttcgtgacagactttgtagagcacaaggagagcctgtagcaggacatgaatcacctaaaattccgtacgagaaacagcagctccccaagggcaggcctggaccagttgctggccaccaccagatgccaagagttcaaactcaacaatattatccccatggagaaaatcctccacctccgggtttcataatgcatggaaatgttaatccaaatgctgctggtcagcttcccacatctccaggtcatatgcacacccaggtaccaccttatccacagccacagccttatcaaccagcccagccgtatcccttcggaacaggggggtcagcaatgtatcgacctcagcagcctgttgctcctcctacttcaaacgcttaccctaacaccccttacatatcttctgcttcttcctatactgggcagtctcagctgtacgcagcacagcaccaggcctcttcacctacctccagccctgctacttctttccctcctcccccttcctctggagcatccttccagcatggcggaccaggagctccaccatcatcttcagcttatgcactgcctcctggaacaacaggtacactgcctgctgccagtgagctgcctgcgtcccaaagaacaggtcctcagaatggttggaatgaccctccagctttgaacagagtacccaaaaagaagaagatgcctgaaaacttcatgcctcctgttcccatcacatcaccaatcatgaacccgttgggtgacccccagtcacaaatgctgcagcaacagccttcagctccagtaccactgtcaagccagtcttcattcccacagccacatcttccaggtggccagcccttccatggcgtacagcaacctcttggtcaaacaggcatgccaccatctttttcaaagcccaatattgaaggtgccccaggggctcctattggaaataccttccagcatgtgcagtctttgccaacaaaaaaaattaccaagaaacctattccagatgagcacctcattctaaagaccacatttgaggatcttattcagcgctgcctttcttcagcaacagaccctcaaaccaagaggaagctagatgatgccagcaaacgtttggagtttctgtatgataaacttagggaacagacactttcaccaacaatcaccagtggtttacacaacattgcaaggagcattgaaactcgaaactactcagaaggattgaccatgcatacccacatagttagcaccagcaacttcagtgagacctctgctttcatgccagttctcaaagttgttctcacccaggccaataagctgggtgtctaaaaggacagcttctcttccactcaatattgccatttttccaaagaaacatgttaaaaaaaaaaattataagacatggactagtcctcattagcatgtttgcatagcaaccagtcaagagcatttacactatttctgctgatatactcaccttagaactgctcagaaccctggtgctttatttttgttttaatcttttgttgccagtgatgattttcctattctgcaaatagtgtatttcctggattacacatagtatggtttcctgaagtattctgataaatgtgttttttaaaacctcaatatactttttagaaaaggagcatctggttatgcataaagcagagctaaaactaaatttctttcatgtcctccctacttcctcagtgtcaatcagattaaagtgtgtaatccta

SEQ ID NO: 179319 - DNA, 4104 bp, Homo sapiens
  Payload ID: 15343
  Gene Symbol: SEC31A
  Gene Name: SEC31 homolog A, COPII coat complex component
  Uniprot ID: O94979
  ENST ID: ENST00000355196
  CDS Start-End: 379-4041
gcggaatagtgggttttgctgcaaccggtttattttccttctgttttcacccattctggcacaatctggcgccatcgtccttcttgtgaggccaagcctgaaaatgcgaagcagagaggcaggaccaaaattgaggcgaatccaggaacctgccaatgggtctccgggtgcggtctctgaaactggaggatatcgggaggaaaggctctccgatgcggagataatggggaagctcttggcatggttggctgtaggtatgtgataccggaggagcaggagtcaaataggatacgccgacttttaattcaaggaacccttttctgaaacactttgccacaatgaaggaaataagattacagccgaagatacatattaaggatgaagttaaaggaagtagatcgtacagccatgcaggcatggagccctgcccagaatcaccccatttacctagcaacaggaacatctgctcagcaattggatgcaacatttagtacgaatgcttcccttgagatatttgaattagacctctctgatccatccttggatatgaaatcttgtgccacattctcctcttctcacaggtaccacaagttgatttgggggccttataaaatggattccaaaggagatgtctctggagttctgattgcaggtggtgaaaatggaaatattattctctatgatccttctaaaattatagctggagacaaggaagttgtgattgcccagaatgacaagcatactggcccagtgagagccttggatgtgaacattttccagactaatctggtagcttctggtgctaatgaatctgaaatctacatatgggatctaaataattttgcaaccccaatgacaccaggagccaaaacacagccgccagaagatatcagctgcattgcatggaacagacaagttcagcatattttagcatcagccagtcccagtggccgggccactgtatgggatcttagaaaaaatgagccaatcatcaaagtcagtgaccatagtaacagaatgcattgttctgggttggcatggcatcctgatgttgctactcagatggtccttgcctccgaggatgaccggttaccagtgatccagatgtgggatcttcgatttgcttcctctccacttcgtgtcctggaaaaccatgccagggggattttggcaattgcttggagcatggcagatcctgaattgttactgagctgtggaaaagatgctaagattctctgctccaatccaaacacaggagaggtgttatatgaacttcccaccaacacacagtggtgcttcgatattcagtggtgtccccgaaatcctgctgtcttatcagctgcttcgtttgatgggcgtatcagtgtttattctatcatgggaggtagcacagatggtttaagacagaaacaagttgacaagctttcatcatcttttgggaatcttgatccctttggcacaggacagccccttcctccgttacaaattccacagcagactgctcagcatagtatagtgctgcctctgaagaagccgcccaagtggattcgaaggcctgttggtgcttctttttcatttggaggcaaactggttacgtttgagaatgtcagaatgccttctcatcagggagctgagcagcagcagcagcagcaccatgtgttcattagtcaggttgtaacagaaaaggagttcctcagccgatcagaccaacttcagcaggctgtgcagtcacaaggatttatcaattattgccaaaaaaaaattgatgcttctcagactgaatttgagaaaaatgtgtggtcctttttgaaggtaaactttgaggatgattctcgtggaaaataccttgaacttctaggatacagaaaagaagatctaggaaagaagattgctttggccttgaacaaagtggatggagccaatgtggctcttaaagactctgaccaagtagcacagagtgatggggaggagagccctgctgctgaagagcagctcttgggagagcacattaaagaggaaaaagaagaatctgaatttctaccctcatctggaggaacatttaatatctctgtcagtggggacattgatggtttaattactcaggctttgctgacgggcaattttgagagtgctgttgacctttgtttacatgataaccgcatggccgatgccattatattggccatagcaggtggacaagaactcttggctcgaacccagaaaaaatacttcgcaaaatcccaaagcaaaattaccaggctcatcactgcagtggtgatgaagaactggaaagagattgttgagtcttgtgatcttaaaaattggagagaggctttagctgcagtattgacttatgcaaagccggatgaattttcagccctttgtgatcttttgggaaccaggcttgaaaatgaaggagatagcctcctgcagactcaagcatgtctctgctatatttgtgcagggaatgtagagaaattagttgcatgttggactaaagctcaagatggaagccaccctttgtcacttcaggatctgattgagaaagttgtcatcctgcgaaaagctgtgcaactcactcaagccatggacactagtactgtaggagttctcttggctgcgaagatgagtcagtatgccaatttgttggcagctcagggcagtattgctgcagccttggcttttcttcctgacaacaccaaccagccaaatatcatgcagcttcgtgacagactttgtagagcacaaggagagcctgtagcaggacatgaatcacctaaaattccgtacgagaaacagcagctccccaagggcaggcctggaccagttgctggccaccaccagatgccaagagttcaaactcaacaatattatccccatggagaaaatcctccacctccgggtttcataatgcatggaaatgttaatccaaatgctgctggtcagcttcccacatctccaggtcatatgcacacccaggtaccaccttatccacagccacagccttatcaaccagcccagccgtatcccttcggaacaggggggtcagcaatgtatcgacctcagcagcctgttgctcctcctacttcaaacgcttaccctaacaccccttacatatcttctgcttcttcctatactgggcagtctcagctgtacgcagcacagcaccaggcctcttcacctacctccagccctgctacttctttccctcctcccccttcctctggagcatccttccagcatggcggaccaggagctccaccatcatcttcagcttatgcactgcctcctggaacaacaggtacactgcctgctgccagtgagctgcctgcgtcccaaagaacaggtcctcagaatggttggaatgaccctccagctttgaacagagtacccaaaaagaagaagatgcctgaaaacttcatgcctcctgttcccatcacatcaccaatcatgaacccgttgggtgacccccagtcacaaatgctgcagcaacagccttcagctccagtaccactgtcaagccagtcttcattcccacagccacatcttccaggtggccagcccttccatggcgtacagcaacctcttggtcaaacaggcatgccaccatctttttcaaagcccaatattgaaggtgccccaggggctcctattggaaataccttccagcatgtgcagtctttgccaacaaaaaaaattaccaagaaacctattccagatgagcacctcattctaaagaccacatttgaggatcttattcagcgctgcctttcttcagcaacagaccctcaaaccaagaggaagctagatgatgccagcaaacgtttggagtttctgtatgataaacttagggaacagacactttcaccaacaatcaccagtggtttacacaacattgcaaggagcattgaaactcgaaactactcagaaggattgaccatgcatacccacatagttagcaccagcaacttcagtgagacctctgctttcatgccagttctcaaagttgttctcacccaggccaataagctgggtgtctaaaaggacagcttctcttccactcaatattgccatttttccaaagaaacatgttaaaaaaaaaaa

SEQ ID NO: 179320 - DNA, 4259 bp, Homo sapiens
  Payload ID: 15343
  Gene Symbol: SEC31A
  Gene Name: SEC31 homolog A, COPII coat complex component
  Uniprot ID: O94979
  ENST ID: ENST00000395310
  CDS Start-End: 184-3846
cggggaaagatgtcgctcccggaagtgttgggcgcagggcgtggctgcggctgcggctgccacgttggaacggaacgtggaggtggccctggccggggaggaggggcggcggcgaatgctgggagagtccgacgagcgctgcactaacgcaggatccggctgccgaaggtcctcgccagcaggatgaagttaaaggaagtagatcgtacagccatgcaggcatggagccctgcccagaatcaccccatttacctagcaacaggaacatctgctcagcaattggatgcaacatttagtacgaatgcttcccttgagatatttgaattagacctctctgatccatccttggatatgaaatcttgtgccacattctcctcttctcacaggtaccacaagttgatttgggggccttataaaatggattccaaaggagatgtctctggagttctgattgcaggtggtgaaaatggaaatattattctctatgatccttctaaaattatagctggagacaaggaagttgtgattgcccagaatgacaagcatactggcccagtgagagccttggatgtgaacattttccagactaatctggtagcttctggtgctaatgaatctgaaatctacatatgggatctaaataattttgcaaccccaatgacaccaggagccaaaacacagccgccagaagatatcagctgcattgcatggaacagacaagttcagcatattttagcatcagccagtcccagtggccgggccactgtatgggatcttagaaaaaatgagccaatcatcaaagtcagtgaccatagtaacagaatgcattgttctgggttggcatggcatcctgatgttgctactcagatggtccttgcctccgaggatgaccggttaccagtgatccagatgtgggatcttcgatttgcttcctctccacttcgtgtcctggaaaaccatgccagggggattttggcaattgcttggagcatggcagatcctgaattgttactgagctgtggaaaagatgctaagattctctgctccaatccaaacacaggagaggtgttatatgaacttcccaccaacacacagtggtgcttcgatattcagtggtgtccccgaaatcctgctgtcttatcagctgcttcgtttgatgggcgtatcagtgtttattctatcatgggaggtagcacagatggtttaagacagaaacaagttgacaagctttcatcatcttttgggaatcttgatccctttggcacaggacagccccttcctccgttacaaattccacagcagactgctcagcatagtatagtgctgcctctgaagaagccgcccaagtggattcgaaggcctgttggtgcttctttttcatttggaggcaaactggttacgtttgagaatgtcagaatgccttctcatcagggagctgagcagcagcagcagcagcaccatgtgttcattagtcaggttgtaacagaaaaggagttcctcagccgatcagaccaacttcagcaggctgtgcagtcacaaggatttatcaattattgccaaaaaaaaattgatgcttctcagactgaatttgagaaaaatgtgtggtcctttttgaaggtaaactttgaggatgattctcgtggaaaataccttgaacttctaggatacagaaaagaagatctaggaaagaagattgctttggccttgaacaaagtggatggagccaatgtggctcttaaagactctgaccaagtagcacagagtgatggggaggagagccctgctgctgaagagcagctcttgggagagcacattaaagaggaaaaagaagaatctgaatttctaccctcatctggaggaacatttaatatctctgtcagtggggacattgatggtttaattactcaggctttgctgacgggcaattttgagagtgctgttgacctttgtttacatgataaccgcatggccgatgccattatattggccatagcaggtggacaagaactcttggctcgaacccagaaaaaatacttcgcaaaatcccaaagcaaaattaccaggctcatcactgcagtggtgatgaagaactggaaagagattgttgagtcttgtgatcttaaaaattggagagaggctttagctgcagtattgacttatgcaaagccggatgaattttcagccctttgtgatcttttgggaaccaggcttgaaaatgaaggagatagcctcctgcagactcaagcatgtctctgctatatttgtgcagggaatgtagagaaattagttgcatgttggactaaagctcaagatggaagccaccctttgtcacttcaggatctgattgagaaagttgtcatcctgcgaaaagctgtgcaactcactcaagccatggacactagtactgtaggagttctcttggctgcgaagatgagtcagtatgccaatttgttggcagctcagggcagtattgctgcagccttggcttttcttcctgacaacaccaaccagccaaatatcatgcagcttcgtgacagactttgtagagcacaaggagagcctgtagcaggacatgaatcacctaaaattccgtacgagaaacagcagctccccaagggcaggcctggaccagttgctggccaccaccagatgccaagagttcaaactcaacaatattatccccatggagaaaatcctccacctccgggtttcataatgcatggaaatgttaatccaaatgctgctggtcagcttcccacatctccaggtcatatgcacacccaggtaccaccttatccacagccacagccttatcaaccagcccagccgtatcccttcggaacaggggggtcagcaatgtatcgacctcagcagcctgttgctcctcctacttcaaacgcttaccctaacaccccttacatatcttctgcttcttcctatactgggcagtctcagctgtacgcagcacagcaccaggcctcttcacctacctccagccctgctacttctttccctcctcccccttcctctggagcatccttccagcatggcggaccaggagctccaccatcatcttcagcttatgcactgcctcctggaacaacaggtacactgcctgctgccagtgagctgcctgcgtcccaaagaacaggtcctcagaatggttggaatgaccctccagctttgaacagagtacccaaaaagaagaagatgcctgaaaacttcatgcctcctgttcccatcacatcaccaatcatgaacccgttgggtgacccccagtcacaaatgctgcagcaacagccttcagctccagtaccactgtcaagccagtcttcattcccacagccacatcttccaggtggccagcccttccatggcgtacagcaacctcttggtcaaacaggcatgccaccatctttttcaaagcccaatattgaaggtgccccaggggctcctattggaaataccttccagcatgtgcagtctttgccaacaaaaaaaattaccaagaaacctattccagatgagcacctcattctaaagaccacatttgaggatcttattcagcgctgcctttcttcagcaacagaccctcaaaccaagaggaagctagatgatgccagcaaacgtttggagtttctgtatgataaacttagggaacagacactttcaccaacaatcaccagtggtttacacaacattgcaaggagcattgaaactcgaaactactcagaaggattgaccatgcatacccacatagttagcaccagcaacttcagtgagacctctgctttcatgccagttctcaaagttgttctcacccaggccaataagctgggtgtctaaaaggacagcttctcttccactcaatattgccatttttccaaagaaacatgttaaaaaaaaaaattataagacatggactagtcctcattagcatgtttgcatagcaaccagtcaagagcatttacactatttctgctgatatactcaccttagaactgctcagaaccctggtgctttatttttgttttaatcttttgttgccagtgatgattttcctattctgcaaatagtgtatttcctggattacacatagtatggtttcctgaagtattctgataaatgtgttttttaaaacctcaatatactttttagaaaaggagcatctggttatgcataaagcagagctaaaactaaatttctttcatgtcctccctacttcctcagtgtcaatcagattaaagtgtgtaatccta

SEQ ID NO: 179321 - DNA, 4255 bp, Homo sapiens
  Payload ID: 15343
  Gene Symbol: SEC31A
  Gene Name: SEC31 homolog A, COPII coat complex component
  Uniprot ID: O94979
  ENST ID: ENST00000448323
  CDS Start-End: 181-3843
cggggaaagatgtcgctcccggaagtgttgggcgcagggcgtggctgcggctgcggctgccacgttggaacggaacgtggaggtggccctggccggggaggaggggcggcggcgaatgctgggagagtccgacgagcgctgcactaacgcaggatccggctgccgaaggtcctcgccaggatgaagttaaaggaagtagatcgtacagccatgcaggcatggagccctgcccagaatcaccccatttacctagcaacaggaacatctgctcagcaattggatgcaacatttagtacgaatgcttcccttgagatatttgaattagacctctctgatccatccttggatatgaaatcttgtgccacattctcctcttctcacaggtaccacaagttgatttgggggccttataaaatggattccaaaggagatgtctctggagttctgattgcaggtggtgaaaatggaaatattattctctatgatccttctaaaattatagctggagacaaggaagttgtgattgcccagaatgacaagcatactggcccagtgagagccttggatgtgaacattttccagactaatctggtagcttctggtgctaatgaatctgaaatctacatatgggatctaaataattttgcaaccccaatgacaccaggagccaaaacacagccgccagaagatatcagctgcattgcatggaacagacaagttcagcatattttagcatcagccagtcccagtggccgggccactgtatgggatcttagaaaaaatgagccaatcatcaaagtcagtgaccatagtaacagaatgcattgttctgggttggcatggcatcctgatgttgctactcagatggtccttgcctccgaggatgaccggttaccagtgatccagatgtgggatcttcgatttgcttcctctccacttcgtgtcctggaaaaccatgccagggggattttggcaattgcttggagcatggcagatcctgaattgttactgagctgtggaaaagatgctaagattctctgctccaatccaaacacaggagaggtgttatatgaacttcccaccaacacacagtggtgcttcgatattcagtggtgtccccgaaatcctgctgtcttatcagctgcttcgtttgatgggcgtatcagtgtttattctatcatgggaggtagcacagatggtttaagacagaaacaagttgacaagctttcatcatcttttgggaatcttgatccctttggcacaggacagccccttcctccgttacaaattccacagcagactgctcagcatagtatagtgctgcctctgaagaagccgcccaagtggattcgaaggcctgttggtgcttctttttcatttggaggcaaactggttacgtttgagaatgtcagaatgccttctcatcagggagctgagcagcagcagcagcagcaccatgtgttcattagtcaggttgtaacagaaaaggagttcctcagccgatcagaccaacttcagcaggctgtgcagtcacaaggatttatcaattattgccaaaaaaaaattgatgcttctcagactgaatttgagaaaaatgtgtggtcctttttgaaggtaaactttgaggatgattctcgtggaaaataccttgaacttctaggatacagaaaagaagatctaggaaagaagattgctttggccttgaacaaagtggatggagccaatgtggctcttaaagactctgaccaagtagcacagagtgatggggaggagagccctgctgctgaagagcagctcttgggagagcacattaaagaggaaaaagaagaatctgaatttctaccctcatctggaggaacatttaatatctctgtcagtggggacattgatggtttaattactcaggctttgctgacgggcaattttgagagtgctgttgacctttgtttacatgataaccgcatggccgatgccattatattggccatagcaggtggacaagaactcttggctcgaacccagaaaaaatacttcgcaaaatcccaaagcaaaattaccaggctcatcactgcagtggtgatgaagaactggaaagagattgttgagtcttgtgatcttaaaaattggagagaggctttagctgcagtattgacttatgcaaagccggatgaattttcagccctttgtgatcttttgggaaccaggcttgaaaatgaaggagatagcctcctgcagactcaagcatgtctctgctatatttgtgcagggaatgtagagaaattagttgcatgttggactaaagctcaagatggaagccaccctttgtcacttcaggatctgattgagaaagttgtcatcctgcgaaaagctgtgcaactcactcaagccatggacactagtactgtaggagttctcttggctgcgaagatgagtcagtatgccaatttgttggcagctcagggcagtattgctgcagccttggcttttcttcctgacaacaccaaccagccaaatatcatgcagcttcgtgacagactttgtagagcacaaggagagcctgtagcaggacatgaatcacctaaaattccgtacgagaaacagcagctccccaagggcaggcctggaccagttgctggccaccaccagatgccaagagttcaaactcaacaatattatccccatggagaaaatcctccacctccgggtttcataatgcatggaaatgttaatccaaatgctgctggtcagcttcccacatctccaggtcatatgcacacccaggtaccaccttatccacagccacagccttatcaaccagcccagccgtatcccttcggaacaggggggtcagcaatgtatcgacctcagcagcctgttgctcctcctacttcaaacgcttaccctaacaccccttacatatcttctgcttcttcctatactgggcagtctcagctgtacgcagcacagcaccaggcctcttcacctacctccagccctgctacttctttccctcctcccccttcctctggagcatccttccagcatggcggaccaggagctccaccatcatcttcagcttatgcactgcctcctggaacaacaggtacactgcctgctgccagtgagctgcctgcgtcccaaagaacaggtcctcagaatggttggaatgaccctccagctttgaacagagtacccaaaaagaagaagatgcctgaaaacttcatgcctcctgttcccatcacatcaccaatcatgaacccgttgggtgacccccagtcacaaatgctgcagcaacagccttcagctccagtaccactgtcaagccagtcttcattcccacagccacatcttccaggtggccagcccttccatggcgtacagcaacctcttggtcaaacaggcatgccaccatctttttcaaagcccaatattgaaggtgccccaggggctcctattggaaataccttccagcatgtgcagtctttgccaacaaaaaaaattaccaagaaacctattccagatgagcacctcattctaaagaccacatttgaggatcttattcagcgctgcctttcttcagcaacagaccctcaaaccaagaggaagctagatgatgccagcaaacgtttggagtttctgtatgataaacttagggaacagacactttcaccaacaatcaccagtggtttacacaacattgcaaggagcattgaaactcgaaactactcagaaggattgaccatgcatacccacatagttagcaccagcaacttcagtgagacctctgctttcatgccagttctcaaagttgttctcacccaggccaataagctgggtgtctaaaaggacagcttctcttccactcaatattgccatttttccaaagaaacatgttaaaaaaaaaaattataagacatggactagtcctcattagcatgtttgcatagcaaccagtcaagagcatttacactatttctgctgatatactcaccttagaactgctcagaaccctggtgctttatttttgttttaatcttttgttgccagtgatgattttcctattctgcaaatagtgtatttcctggattacacatagtatggtttcctgaagtattctgataaatgtgttttttaaaacctcaatatactttttagaaaaggagcatctggttatgcataaagcagagctaaaactaaatttctttcatgtcctccctacttcctcagtgtcaatcagattaaagtgtgtaatcct

SEQ ID NO: 179322 - DNA, 4042 bp, Homo sapiens
  Payload ID: 15343
  Gene Symbol: SEC31A
  Gene Name: SEC31 homolog A, COPII coat complex component
  Uniprot ID: O94979
  ENST ID: ENST00000443462
  CDS Start-End: 28-3630
ctggccggggaggaggggcggcggcgaatgctgggagagtccgacgagcgctgcactaacgcaggatccggctgccgaaggtcctcgccaggaacatctgctcagcaattggatgcaacatttagtacgaatgcttcccttgagatatttgaattagacctctctgatccatccttggatatgaaatcttgtgccacattctcctcttctcacaggtaccacaagttgatttgggggccttataaaatggattccaaaggagatgtctctggagttctgattgcaggtggtgaaaatggaaatattattctctatgatccttctaaaattatagctggagacaaggaagttgtgattgcccagaatgacaagcatactggcccagtgagagccttggatgtgaacattttccagactaatctggtagcttctggtgctaatgaatctgaaatctacatatgggatctaaataattttgcaaccccaatgacaccaggagccaaaacacagccgccagaagatatcagctgcattgcatggaacagacaagttcagcatattttagcatcagccagtcccagtggccgggccactgtatgggatcttagaaaaaatgagccaatcatcaaagtcagtgaccatagtaacagaatgcattgttctgggttggcatggcatcctgatgttgctactcagatggtccttgcctccgaggatgaccggttaccagtgatccagatgtgggatcttcgatttgcttcctctccacttcgtgtcctggaaaaccatgccagggggattttggcaattgcttggagcatggcagatcctgaattgttactgagctgtggaaaagatgctaagattctctgctccaatccaaacacaggagaggtgttatatgaacttcccaccaacacacagtggtgcttcgatattcagtggtgtccccgaaatcctgctgtcttatcagctgcttcgtttgatgggcgtatcagtgtttattctatcatgggaggtagcacagatggtttaagacagaaacaagttgacaagctttcatcatcttttgggaatcttgatccctttggcacaggacagccccttcctccgttacaaattccacagcagactgctcagcatagtatagtgctgcctctgaagaagccgcccaagtggattcgaaggcctgttggtgcttctttttcatttggaggcaaactggttacgtttgagaatgtcagaatgccttctcatcagggagctgagcagcagcagcagcagcaccatgtgttcattagtcaggttgtaacagaaaaggagttcctcagccgatcagaccaacttcagcaggctgtgcagtcacaaggatttatcaattattgccaaaaaaaaattgatgcttctcagactgaatttgagaaaaatgtgtggtcctttttgaaggtaaactttgaggatgattctcgtggaaaataccttgaacttctaggatacagaaaagaagatctaggaaagaagattgctttggccttgaacaaagtggatggagccaatgtggctcttaaagactctgaccaagtagcacagagtgatggggaggagagccctgctgctgaagagcagctcttgggagagcacattaaagaggaaaaagaagaatctgaatttctaccctcatctggaggaacatttaatatctctgtcagtggggacattgatggtttaattactcaggctttgctgacgggcaattttgagagtgctgttgacctttgtttacatgataaccgcatggccgatgccattatattggccatagcaggtggacaagaactcttggctcgaacccagaaaaaatacttcgcaaaatcccaaagcaaaattaccaggctcatcactgcagtggtgatgaagaactggaaagagattgttgagtcttgtgatcttaaaaattggagagaggctttagctgcagtattgacttatgcaaagccggatgaattttcagccctttgtgatcttttgggaaccaggcttgaaaatgaaggagatagcctcctgcagactcaagcatgtctctgctatatttgtgcagggaatgtagagaaattagttgcatgttggactaaagctcaagatggaagccaccctttgtcacttcaggatctgattgagaaagttgtcatcctgcgaaaagctgtgcaactcactcaagccatggacactagtactgtaggagttctcttggctgcgaagatgagtcagtatgccaatttgttggcagctcagggcagtattgctgcagccttggcttttcttcctgacaacaccaaccagccaaatatcatgcagcttcgtgacagactttgtagagcacaaggagagcctgtagcaggacatgaatcacctaaaattccgtacgagaaacagcagctccccaagggcaggcctggaccagttgctggccaccaccagatgccaagagttcaaactcaacaatattatccccatggagaaaatcctccacctccgggtttcataatgcatggaaatgttaatccaaatgctgctggtcagcttcccacatctccaggtcatatgcacacccaggtaccaccttatccacagccacagccttatcaaccagcccagccgtatcccttcggaacaggggggtcagcaatgtatcgacctcagcagcctgttgctcctcctacttcaaacgcttaccctaacaccccttacatatcttctgcttcttcctatactgggcagtctcagctgtacgcagcacagcaccaggcctcttcacctacctccagccctgctacttctttccctcctcccccttcctctggagcatccttccagcatggcggaccaggagctccaccatcatcttcagcttatgcactgcctcctggaacaacaggtcctcagaatggttggaatgaccctccagctttgaacagagtacccaaaaagaagaagatgcctgaaaacttcatgcctcctgttcccatcacatcaccaatcatgaacccgttgggtgacccccagtcacaaatgctgcagcaacagccttcagctccagtaccactgtcaagccagtcttcattcccacagccacatcttccaggtggccagcccttccatggcgtacagcaacctcttggtcaaacaggcatgccaccatctttttcaaagcccaatattgaaggtgccccaggggctcctattggaaataccttccagcatgtgcagtctttgccaacaaaaaaaattaccaagaaacctattccagatgagcacctcattctaaagaccacatttgaggatcttattcagcgctgcctttcttcagcaacagaccctcaaaccaagaggaagctagatgatgccagcaaacgtttggagtttctgtatgataaacttagggaacagacactttcaccaacaatcaccagtggtttacacaacattgcaaggagcattgaaactcgaaactactcagaaggattgaccatgcatacccacatagttagcaccagcaacttcagtgagacctctgctttcatgccagttctcaaagttgttctcacccaggccaataagctgggtgtctaaaaggacagcttctcttccactcaatattgccatttttccaaagaaacatgttaaaaaaaaaaattataagacatggactagtcctcattagcatgtttgcatagcaaccagtcaagagcatttacactatttctgctgatatactcaccttagaactgctcagaaccctggtgctttatttttgttttaatcttttgttgccagtgatgattttcctattctgcaaatagtgtatttcctggattacacatagtatggtttcctgaagtattctgataaatgtgttttttaaaacctcaatatactttttagaaaaggagcatctggttatgcataaagcagagctaaaactaaatttctttcatgtcctccctacttcctcagtgtcaatcagattaaagtgtgtaatcct

SEQ ID NO: 179323 - DNA, 546 bp, Homo sapiens
  Payload ID: 15343
  Gene Symbol: SEC31A
  Gene Name: SEC31 homolog A, COPII coat complex component
  ENST ID: ENST00000507816
  CDS Start-End: 123-401
acgttggaacggaacgtggaggtggccctggccggggaggaggggcggcggcgaatgctgggagagtccgacgagcgctgcactaacgcaggatccggctgccgaaggtcctcgccagcaggatgaagttaaaggaagtagatcgtacagccatgcaggcatggagccctgcccagaatcaccccatttacctagcaacaggaacatctgctcagcaattggatgcaacatttagtacgaatgcttcccttgagatatttgaattagacctctctgatccatccttggatatgaaatcttgtgccacattctcctcttctcacaggtaccacaagttgatttgggggccttataaaatggattccaaaggagatgtctctggagttctgattgcagactaatctggtagcttctggtgctaatgaatctgaaatctacatatgggatctaaataattttgcaaccccaatgacaccaggagccaaaacacagccgccagaagatatcagctgcattgcatggaacagacaagttcagcatatttta

SEQ ID NO: 179324 - DNA, 3610 bp, Homo sapiens
  Payload ID: 15343
  Gene Symbol: SEC31A
  Gene Name: SEC31 homolog A, COPII coat complex component
  Uniprot ID: O94979
  ENST ID: ENST00000500777
  CDS Start-End: 5-3208
caggatgaagttaaaggaagtagatcgtacagccatgcaggcatggagccctgcccagaatcaccccatttacctagcaacaggaacatctgctcagcaattggatgcaacatttagtacgaatgcttcccttgagatatttgaattagacctctctgatccatccttggatatgaaatcttgtgccacattctcctcttctcacaggtaccacaagttgatttgggggccttataaaatggattccaaaggagatgtctctggagttctgattgcaggtggtgaaaatggaaatattattctctatgatccttctaaaattatagctggagacaaggaagttgtgattgcccagaatgacaagcatactggcccagtgagagccttggatgtgaacattttccagactaatctggtagcttctggtgctaatgaatctgaaatctacatatgggatctaaataattttgcaaccccaatgacaccaggagccaaaacacagccgccagaagatatcagctgcattgcatggaacagacaagttcagcatattttagcatcagccagtcccagtggccgggccactgtatgggatcttagaaaaaatgagccaatcatcaaagtcagtgaccatagtaacagaatgcattgttctgggttggcatggcatcctgatgttgctactcagatggtccttgcctccgaggatgaccggttaccagtgatccagatgtgggatcttcgatttgcttcctctccacttcgtgtcctggaaaaccatgccagggggattttggcaattgcttggagcatggcagatcctgaattgttactgagctgtggaaaagatgctaagattctctgctccaatccaaacacaggagaggtgttatatgaacttcccaccaacacacagtggtgcttcgatattcagtggtgtccccgaaatcctgctgtcttatcagctgcttcgtttgatgggcgtatcagtgtttattctatcatgggaggtagcacagatggtttaagacagaaacaagttgacaagctttcatcatcttttgggaatcttgatccctttggcacaggacagccccttcctccgttacaaattccacagcagactgctcagcatagtatagtgctgcctctgaagaagccgcccaagtggattcgaaggcctgttggtgcttctttttcatttggaggcaaactggttacgtttgagaatgtcagaatgccttctcatcagggagctgagcagcagcagcagcagcaccatgtgttcattagtcaggttgtaacagaaaaggagttcctcagccgatcagaccaacttcagcaggctgtgcagtcacaaggatttatcaattattgccaaaaaaaaattgatgcttctcagactgaatttgagaaaaatgtgtggtcctttttgaaggtaaactttgaggatgattctcgtggaaaataccttgaacttctaggatacagaaaagaagatctaggaaagaagcacattaaagaggaaaaagaagaatctgaatttctaccctcatctggaggaacatttaatatctctgtcagtggggacattgatggtttaattactcaggctttgctgacgggcaattttgagagtgctgttgacctttgtttacatgataaccgcatggccgatgccattatattggccatagcaggtggacaagaactcttggctcgaacccagaaaaaatacttcgcaaaatcccaaagcaaaattaccaggctcatcactgcagtggtgatgaagaactggaaagagattgttgagtcttgtgatcttaaaaattggagagaggctttagctgcagtattgacttatgcaaagccggatgaattttcagccctttgtgatcttttgggaaccaggcttgaaaatgaaggagatagcctcctgcagactcaagcatgtctctgctatatttgtgcagggaatgtagagaaattagttgcatgttggactaaagctcaagatggaagccaccctttgtcacttcaggatctgattgagaaagttgtcatcctgcgaaaagctgtgcaactcactcaagccatggacactagtactgtaggagttctcttggctgcgaagatgagtcagtatgccaatttgttggcagctcagggcagtattgctgcagccttggcttttcttcctgacaacaccaaccagccaaatatcatgcagcttcgtgacagactttgtagagcacaaggagagcctgtagcaggacatgaatcacctaaaattccgtacgagaaacagcagctccccaagggcaggcctggaccagttgctggccaccaccagatgccaagagttcaaactcaacaatattatccccatggagaaaatcctccacctccgggtttcataatgcatggaaatgttaatccaaatgctgctggtcagcttcccacatctccaggtcatatgcacacccaggtaccaccttatccacagccacagcgtcctcagaatggttggaatgaccctccagctttgaacagagtacccaaaaagaagaagatgcctgaaaacttcatgcctcctgttcccatcacatcaccaatcatgaacccgttgggtgacccccagtcacaaatgctgcagcaacagccttcagctccagtaccactgtcaagccagtcttcattcccacagccacatcttccaggtggccagcccttccatggcgtacagcaacctcttggtcaaacaggcatgccaccatctttttcaaagcccaatattgaaggtgccccaggggctcctattggaaataccttccagcatgtgcagtctttgccaacaaaaaaaattaccaagaaacctattccagatgagcacctcattctaaagaccacatttgaggatcttattcagcgctgcctttcttcagcaacagaccctcaaaccaagaggaagctagatgatgccagcaaacgtttggagtttctgtatgataaacttagggaacagacactttcaccaacaatcaccagtggtttacacaacattgcaaggagcattgaaactcgaaactactcagaaggattgaccatgcatacccacatagttagcaccagcaacttcagtgagacctctgctttcatgccagttctcaaagttgttctcacccaggccaataagctgggtgtctaaaaggacagcttctcttccactcaatattgccatttttccaaagaaacatgttaaaaaaaaaaattataagacatggactagtcctcattagcatgtttgcatagcaaccagtcaagagcatttacactatttctgctgatatactcaccttagaactgctcagaaccctggtgctttatttttgttttaatcttttgttgccagtgatgattttcctattctgcaaatagtgtatttcctggattacacatagtatggtttcctgaagtattctgataaatgtgttttttaaaacctcaatatactttttagaaaaggagcatctggttatgcataaagcagagctaaaactaaatttctttcatgtcctccctacttcctcagtgtcaatcagattaaagt

SEQ ID NO: 179325 - DNA, 4159 bp, Homo sapiens
  Payload ID: 15343
  Gene Symbol: SEC31A
  Gene Name: SEC31 homolog A, COPII coat complex component
  ENST ID: ENST00000505472
  CDS Start-End: 2-3757
gatgaagttaaaggaagtagatcgtacagccatgcaggcatggagccctgcccagaatcaccccatttacctagcaacaggaacatctgctcagcaattggatgcaacatttagtacgaatgcttcccttgagatatttgaattagacctctctgatccatccttggatatgaaatcttgtgccacattctcctcttctcacaggtaccacaagttgatttgggggccttataaaatggattccaaaggagatgtctctggagttctgattgcaggtggtgaaaatggaaatattattctctatgatccttctaaaattatagctggagacaaggaagttgtgattgcccagaatgacaagcatactggcccagtgagagccttggatgtgaacattttccagactaatctggtagcttctggtgctaatgaatctgaaatctacatatgggatctaaataattttgcaaccccaatgacaccaggagccaaaacacagccgccagaagatatcagctgcattgcatggaacagacaagttcagcatattttagcatcagccagtcccagtggccgggccactgtatgggatcttagaaaaaatgagccaatcatcaaagtcagtgaccatagtaacagaatgcattgttctgggttggcatggcatcctgatgttgctactcagatggtccttgcctccgaggatgaccggttaccagtgatccagatgtgggatcttcgatttgcttcctctccacttcgtgtcctggaaaaccatgccagggggattttggcaattgcttggagcatggcagatcctgaattgttactgagctgtggaaaagatgctaagattctctgctccaatccaaacacaggagaggtgttatatgaacttcccaccaacacacagtggtgcttcgatattcagtggtgtccccgaaatcctgctgtcttatcagctgcttcgtttgatgggcgtatcagtgtttattctatcatgggaggtagcacagatggtttaagacagaaacaagttgacaagctttcatcatcttttgggaatcttgatccctttggcacaggacagccccttcctccgttacaaattccacagcagactgctcagcatagtatagtgctgcctctgaagaagccgcccaagtggattcgaaggcctgttggtgcttctttttcatttggaggcaaactggttacgtttgagaatgtcagaatgccttctcatcagggagctgagcagcagcagcagcagcaccatgtgttcattagtcaggttgtaacagaaaaggagttcctcagccgatcagaccaacttcagcaggctgtgcagtcacaaggatttatcaattattgccaaaaaaaaattgatgcttctcagactgaatttgagaaaaatgtgtggtcctttttgaaggtaaactttgaggatgattctcgtggaaaataccttgaacttctaggatacagaaaagaagatctaggaaagaagattgctttggccttgaacaaagtggatggagccaatgtggctcttaaagactctgaccaagtagcacagagtgatggggaggagagccctgctgctgaagagcagctcttgggagagcacattaaagaggaaaaagaagaatctgaatttctaccctcatctggaggaacatttaatatctctgtcagtggggacattgatggtttaattactcaggctttgctgacgggcaattttgagagtgctgttgacctttgtttacatgataaccgcatggccgatgccattatattggccatagcaggtggacaagaactcttggctcgaacccagaaaaaatacttcgcaaaatcccaaagcaaaattaccaggctcatcactgcagtggtgatgaagaactggaaagagattgttgagtcttgtgatcttaaaaattggagagaggctttagctgcagtattgacttatgcaaagccggatgaattttcagccctttgtgatcttttgggaaccaggcttgaaaatgaaggagatagcctcctgcagactcaagcatgtctctgctatatttgtgcagggaatgtagagaaattagttgcatgttggactaaagctcaagatggaagccaccctttgtcacttcaggatctgattgagaaagttgtcatcctgcgaaaagctgtgcaactcactcaagccatggacactagtactgtaggagttctcttggctgcgaagatgagtcagtatgccaatttgttggcagctcagggcagtattgctgcagccttggcttttcttcctgacaacaccaaccagccaaatatcatgcagcttcgtgacagactttgtagagcacaaggagagcctgtagcaggacatgaatcacctaaaattccgtacgagaaacagcagctccccaagggcaggcctggaccagttgctggccaccaccagatgccaagagttcaaactcaacaatattatccccatgttagaattgcccctactgtcactacctggagtaacaaaactcctactgcccttcccagccatccacctgcagcctctccctctgacacacagggagaaaatcctccacctccgggtttcataatgcatggaaatgttaatccaaatgctgctggtcagcttcccacatctccaggtcatatgcacacccaggtaccaccttatccacagccacagccttatcaaccagcccagccgtatcccttcggaacaggggggtcagcaatgtatcgacctcagcagcctgttgctcctcctacttcaaacgcttaccctaacaccccttacatatcttctgcttcttcctatactgggcagtctcagctgtacgcagcacagcaccaggcctcttcacctacctccagccctgctacttctttccctcctcccccttcctctggagcatccttccagcatggcggaccaggagctccaccatcatcttcagcttatgcactgcctcctggaacaacaggtacactgcctgctgccagtgagctgcctgcgtcccaaagaacaggtcctcagaatggttggaatgaccctccagctttgaacagagtacccaaaaagaagaagatgcctgaaaacttcatgcctcctgttcccatcacatcaccaatcatgaacccgttgggtgacccccagtcacaaatgctgcagcaacagccttcagctccagtaccactgtcaagccagtcttcattcccacagccacatcttccaggtggccagcccttccatggcgtacagcaacctcttggtcaaacaggcatgccaccatctttttcaaagcccaatattgaaggtgccccaggggctcctattggaaataccttccagcatgtgcagtctttgccaacaaaaaaaattaccaagaaacctattccagatgagcacctcattctaaagaccacatttgaggatcttattcagcgctgcctttcttcagcaacagaccctcaaaccaagaggaagctagatgatgccagcaaacgtttggagtttctgtatgataaacttagggaacagacactttcaccaacaatcaccagtggtttacacaacattgcaaggagcattgaaactcgaaactactcagaaggattgaccatgcatacccacatagttagcaccagcaacttcagtgagacctctgctttcatgccagttctcaaagttgttctcacccaggccaataagctgggtgtctaaaaggacagcttctcttccactcaatattgccatttttccaaagaaacatgttaaaaaaaaaaattataagacatggactagtcctcattagcatgtttgcatagcaaccagtcaagagcatttacactatttctgctgatatactcaccttagaactgctcagaaccctggtgctttatttttgttttaatcttttgttgccagtgatgattttcctattctgcaaatagtgtatttcctggattacacatagtatggtttcctgaagtattctgataaatgtgttttttaaaacctcaatatactttttagaaaaggagcatctggttatgcataaagcagagctaaaactaaatttctttcatgtcctccctacttcctcagtgtcaatcagattaaagt

SEQ ID NO: 179326 - DNA, 857 bp, Homo sapiens
  Payload ID: 15343
  Gene Symbol: SEC31A
  Gene Name: SEC31 homolog A, COPII coat complex component
  ENST ID: ENST00000510167
  CDS Start-End: 1-857
tttggaggcaaactggttacgtttgagaatgtcagaatgccttctcatcagggagctgagcagcagcagcagcagcaccatgtgttcattagtcaggttgtaacagaaaaggagttcctcagccgatcagaccaacttcagcaggctgtgcagtcacaaggatttatcaattattgccaaaaaaaaattgatgcttctcagactgaatttgagaaaaatgtgtggtcctttttgaaggtaaactttgaggatgattctcgtggaaaataccttgaacttctaggatacagaaaagaagatctaggaaagaaggctcttaaagactctgaccaagtagcacagagtgatggggaggagagccctgctgctgaagagcagctcttgggagagcacattaaagaggaaaaagaagaatctgaatttctaccctcatctggaggaacatttaatatctctgtcagtggggacattgatggtttaattactcaggctttgctgacgggcaattttgagagtgctgttgacctttgtttacatgataaccgcatggccgatgccattatattggccatagcaggtggacaagaactcttggctcgaacccagaaaaaatacttcgcaaaatcccaaagcaaaattaccaggctcatcactgcagtggtgatgaagaactggaaagagattgttgagtcttgtgatcttaaaaattggagagaggctttagctgcagtattgacttatgcaaagccggatgaattttcagccctttgtgatcttttgggaaccaggcttgaaaatgaaggagatagcctcctgcagactcaagcatgtctctgctatatttgtgcagggaatgt

SEQ ID NO: 179327 - DNA, 1564 bp, Homo sapiens
  Payload ID: 15343
  Gene Symbol: SEC31A
  Gene Name: SEC31 homolog A, COPII coat complex component
  ENST ID: ENST00000503937
  CDS Start-End: 1-1151
caaatgctgctggtcagcttcccacatctccaggtcatatgcacacccaggtaccaccttatccacagccacagccttatcaaccagcccagccgtatcccttcggaacaggggggtcagcaatgtatcgacctcagcagcctgttgctcctcctacttcaaacgcttaccctaacaccccttacatatcttctgcttcttcctatactgggcagtctcagctgtacgcagcacagcaccaggcctcttcacctacctccagccctgctacttctttccctcctcccccttcctctggagcatccttccagcatggcggaccaggagctccaccatcatcttcagcttatgcactgcctcctggaacaacaggtacactgcctgctgccagtgagctgcctgcgtcccaaagaacagaaaaccagtctatccaagaccaggcacctatgttggaaggtcctcagaatggttggaatgaccctccagctttgaacagagtacccaaaaagaagaagatgcctgaaaacttcatgcctcctgttcccatcacatcaccaatcatgaacccgttgggtgacccccagtcacaaatgctgcagcaacagccttcagctccagtaccactgtcaagccagtcttcattcccacagccacatcttccaggtggccagcccttccatggcgtacagcaacctcttggtcaaacaggcatgccaccatctttttcaaagcccaatattgaaggtgccccaggggctcctattggaaataccttccagcatgtgcagtctttgccaacaaaaaaaattaccaagaaacctattccagatgagcacctcattctaaagaccacatttgaggatcttattcagcgctgcctttcttcagcaacagaccctcaaaccaagaggaagctagatgatgccagcaaacgtttggagtttctgtatgataaacttagggaacagacactttcaccaacaatcaccagtggtttacacaacattgcaaggagcattgaaactcgaaactactcagaaggattgaccatgcatacccacatagttagcaccagcaacttcagtgagacctctgctttcatgccagttctcaaagttgttctcacccaggccaataagctgggtgtctaaaaggacagcttctcttccactcaatattgccatttttccaaagaaacatgttaaaaaaaaaaattataagacatggactagtcctcattagcatgtttgcatagcaaccagtcaagagcatttacactatttctgctgatatactcaccttagaactgctcagaaccctggtgctttatttttgttttaatcttttgttgccagtgatgattttcctattctgcaaatagtgtatttcctggattacacatagtatggtttcctgaagtattctgataaatgtgttttttaaaacctcaatatactttttagaaaaggagcatctggttatgcataaagcagagctaaaactaaatttctttcatgtcctccctacttcctcagtgtcaatcagattaaagtgtgtaatccta

SEQ ID NO: 179328 - DNA, 553 bp, Homo sapiens
  Payload ID: 15343
  Gene Symbol: SEC31A
  Gene Name: SEC31 homolog A, COPII coat complex component
  ENST ID: ENST00000503210
  CDS Start-End: 310-553
aataagaccatccaattaatggaggactcctttcgcgtaactctccttaaagcggtaggcggtgcgagaaccggctattcagagctctccgatgcggagataatggggaagctcttggcatggttggctgtaggtatgtgataccggaggagcaggagtcaaataggatacgccgacttttaattcaaggaacccttttctgaaacactttgccacaatgaaggaaataaggaattgtactctcagagatgttgagaaaagatacatgggtcttggaagataattactcaaaatatgcagggaagcaggatgaagttaaaggaagtagatcgtacagccatgcaggcatggagccctgcccagaatcaccccatttacctagcaacaggaacatctgctcagcaattggatgcaacatttagtacgaatgcttcccttgagatatttgaattagacctctctgatccatccttggatatgaaatcttgtgccacattctcctcttctcacaggtaccacaagttgatttgggggccttataaaatggattcca

SEQ ID NO: 179329 - DNA, 587 bp, Homo sapiens
  Payload ID: 15343
  Gene Symbol: SEC31A
  Gene Name: SEC31 homolog A, COPII coat complex component
  ENST ID: ENST00000507340
  CDS Start-End: 158-364
gttgggcgcagggcgtggctgcggctgcggctgccacgttggaacggaacgtggaggtggccctggccggggaggaggggcggcggcgaatgctgggagagtccgacgagcgctgcactaacgcaggatccggctgccgaaggtcctcgccagcaggatgaagttaaaggaagtagatcgtacagccatgcaggcatggagccctgcccagaatcaccccatttacctagcaacaggaacatctgctcagcaattggatgcaacatttagtacgaatgcttcccttgagatatttgaattagacctctctgatccatccttggatatgaaatcttgtgccacattctcctcttctcacagttgatttgggggccttataaaatggattccaaaggagatgtctctggagttctgattgcaggtggtgaaaatggaaatattattctctatgatccttctaaaattatagctggagacaaggaagttgtgattgcccagaatgacaagcatactggcccagtgagagccttggatgtgaacattttccagactaatctggtagcttctggtgctaatgaatctgaaat

SEQ ID NO: 179330 - DNA, 710 bp, Homo sapiens
  Payload ID: 15343
  Gene Symbol: SEC31A
  Gene Name: SEC31 homolog A, COPII coat complex component
  ENST ID: ENST00000512664
  CDS Start-End: 1-710
ggctgtgcagtcacaaggatttatcaattattgccaaaaaaaaattgatgcttctcagactgaatttgagaaaaatgtgtggtcctttttgaaggtaaactttgaggatgattctcgtggaaaataccttgaacttctaggatacagaaaagaagatctaggaaagaagcacattaaagaggaaaaagaagaatctgaatttctaccctcatctggaggaacatttaatatctctgtcagtggggacattgatggtttaattactcaggctttgctgacgggcaattttgagagtgctgttgacctttgtttacatgataaccgcatggccgatgccattatattggccatagcaggtggacaagaactcttggctcgaacccagaaaaaatacttcgcaaaatcccaaagcaaaattaccaggctcatcactgcagtggtgatgaagaactggaaagagattgttgagtcttgtgatcttaaaaattggagagaggctttagctgcagtattgacttatgcaaagccggatgaattttcagccctttgtgggaatgtagagaaattagttgcatgttggactaaagctcaagatggaagccaccctttgtcacttcaggatctgattgagaaagttgtcatcctgcgaaaagctgtgcaactcactcaagccatggacactagtactgtaggagttctcttggctgcga

SEQ ID NO: 179331 - DNA, 3596 bp, Homo sapiens
  Payload ID: 15343
  Gene Symbol: SEC31A
  Gene Name: SEC31 homolog A, COPII coat complex component
  Uniprot ID: O94979
  ENST ID: ENST00000505984
  CDS Start-End: 66-3566
ctgggagagtccgacgagcgctgcactaacgcaggatccggctgccgaaggtcctcgccagcaggatgaagttaaaggaagtagatcgtacagccatgcaggcatggagccctgcccagaatcaccccatttacctagcaacaggaacatctgctcagcaattggatgcaacatttagtacgaatgcttcccttgagatatttgaattagacctctctgatccatccttggatatgaaatcttgtgccacattctcctcttctcacaggtaccacaagttgatttgggggccttataaaatggattccaaaggagatgtctctggagttctgattgcaggtggtgaaaatggaaatattattctctatgatccttctaaaattatagctggagacaaggaagttgtgattgcccagaatgacaagcatactggcccagtgagagccttggatgtgaacattttccagactaatctggtagcttctggtgctaatgaatctgaaatctacatatgggatctaaataattttgcaaccccaatgacaccaggagccaaaacacagccgccagaagatatcagctgcattgcatggaacagacaagttcagcatattttagcatcagccagtcccagtggccgggccactgtatgggatcttagaaaaaatgagccaatcatcaaagtcagtgaccatagtaacagaatgcattgttctgggttggcatggcatcctgatgttgctactcagatggtccttgcctccgaggatgaccggttaccagtgatccagatgtgggatcttcgatttgcttcctctccacttcgtgtcctggaaaaccatgccagggggattttggcaattgcttggagcatggcagatcctgaattgttactgagctgtggaaaagatgctaagattctctgctccaatccaaacacaggagaggtgttatatgaacttcccaccaacacacagtggtgcttcgatattcagtggtgtccccgaaatcctgctgtcttatcagctgcttcgtttgatgggcgtatcagtgtttattctatcatgggaggtagcacagatggtttaagacagaaacaagttgacaagctttcatcatcttttgggaatcttgatccctttggcacaggacagccccttcctccgttacaaattccacagcagactgctcagcatagtatagtgctgcctctgaagaagccgcccaagtggattcgaaggcctgttggtgcttctttttcatttggaggcaaactggttacgtttgagaatgtcagaatgccttctcatcagggagctgagcagcagcagcagcagcaccatgtgttcattagtcaggttgtaacagaaaaggagttcctcagccgatcagaccaacttcagcaggctgtgcagtcacaaggatttatcaattattgccaaaaaaaaattgatgcttctcagactgaatttgagaaaaatgtgtggtcctttttgaaggtaaactttgaggatgattctcgtggaaaataccttgaacttctaggatacagaaaagaagatctaggaaagaagcacattaaagaggaaaaagaagaatctgaatttctaccctcatctggaggaacatttaatatctctgtcagtggggacattgatggtttaattactcaggctttgctgacgggcaattttgagagtgctgttgacctttgtttacatgataaccgcatggccgatgccattatattggccatagcaggtggacaagaactcttggctcgaacccagaaaaaatacttcgcaaaatcccaaagcaaaattaccaggctcatcactgcagtggtgatgaagaactggaaagagattgttgagtcttgtgatcttaaaaattggagagaggctttagctgcagtattgacttatgcaaagccggatgaattttcagccctttgtgatcttttgggaaccaggcttgaaaatgaaggagatagcctcctgcagactcaagcatgtctctgctatatttgtgcagggaatgtagagaaattagttgcatgttggactaaagctcaagatggaagccaccctttgtcacttcaggatctgattgagaaagttgtcatcctgcgaaaagctgtgcaactcactcaagccatggacactagtactgtaggagttctcttggctgcgaagatgagtcagtatgccaatttgttggcagctcagggcagtattgctgcagccttggcttttcttcctgacaacaccaaccagccaaatatcatgcagcttcgtgacagactttgtagagcacaaggagagcctgtagcaggacatgaatcacctaaaattccgtacgagaaacagcagctccccaagggcaggcctggaccagttgctggccaccaccagatgccaagagttcaaactcaacaatattatccccatggagaaaatcctccacctccgggtttcataatgcatggaaatgttaatccaaatgctgctggtcagcttcccacatctccaggtcatatgcacacccaggtaccaccttatccacagccacagccttatcaaccagcccagccgtatcccttcggaacaggggggtcagcaatgtatcgacctcagcagcctgttgctcctcctacttcaaacgcttaccctaacaccccttacatatcttctgcttcttcctatactgggcagtctcagctgtacgcagcacagcaccaggcctcttcacctacctccagccctgctacttctttccctcctcccccttcctctggagcatccttccagcatggcggaccaggagctccaccatcatcttcagcttatgcactgcctcctggaacaacaggtcctcagaatggttggaatgaccctccagctttgaacagagtacccaaaaagaagaagatgcctgaaaacttcatgcctcctgttcccatcacatcaccaatcatgaacccgttgggtgacccccagtcacaaatgctgcagcaacagccttcagctccagtaccactgtcaagccagtcttcattcccacagccacatcttccaggtggccagcccttccatggcgtacagcaacctcttggtcaaacaggcatgccaccatctttttcaaagcccaatattgaaggtgccccaggggctcctattggaaataccttccagcatgtgcagtctttgccaacaaaaaaaattaccaagaaacctattccagatgagcacctcattctaaagaccacatttgaggatcttattcagcgctgcctttcttcagcaacagaccctcaaaccaagaggaagctagatgatgccagcaaacgtttggagtttctgtatgataaacttagggaacagacactttcaccaacaatcaccagtggtttacacaacattgcaaggagcattgaaactcgaaactactcagaaggattgaccatgcatacccacatagttagcaccagcaacttcagtgagacctctgctttcatgccagttctcaaagttgttctcacccaggccaataagctgggtgtctaaaaggacagcttctcttccactcaatattgc

SEQ ID NO: 179332 - DNA, 3801 bp, Homo sapiens
  Payload ID: 15343
  Gene Symbol: SEC31A
  Gene Name: SEC31 homolog A, COPII coat complex component
  Uniprot ID: O94979
  ENST ID: ENST00000508502
  CDS Start-End: 121-3738
gttggaacggaacgtggaggtggccctggccggggaggaggggcggcggcgaatgctgggagagtccgacgagcgctgcactaacgcaggatccggctgccgaaggtcctcgccagcaggatgaagttaaaggaagtagatcgtacagccatgcaggcatggagccctgcccagaatcaccccatttacctagcaacaggaacatctgctcagcaattggatgcaacatttagtacgaatgcttcccttgagatatttgaattagacctctctgatccatccttggatatgaaatcttgtgccacattctcctcttctcacaggtaccacaagttgatttgggggccttataaaatggattccaaaggagatgtctctggagttctgattgcaggtggtgaaaatggaaatattattctctatgatccttctaaaattatagctggagacaaggaagttgtgattgcccagaatgacaagcatactggcccagtgagagccttggatgtgaacattttccagactaatctggtagcttctggtgctaatgaatctgaaatctacatatgggatctaaataattttgcaaccccaatgacaccaggagccaaaacacagccgccagaagatatcagctgcattgcatggaacagacaagttcagcatattttagcatcagccagtcccagtggccgggccactgtatgggatcttagaaaaaatgagccaatcatcaaagtcagtgaccatagtaacagaatgcattgttctgggttggcatggcatcctgatgttgctactcagatggtccttgcctccgaggatgaccggttaccagtgatccagatgtgggatcttcgatttgcttcctctccacttcgtgtcctggaaaaccatgccagggggattttggcaattgcttggagcatggcagatcctgaattgttactgagctgtggaaaagatgctaagattctctgctccaatccaaacacaggagaggtgttatatgaacttcccaccaacacacagtggtgcttcgatattcagtggtgtccccgaaatcctgctgtcttatcagctgcttcgtttgatgggcgtatcagtgtttattctatcatgggaggtagcacagatggtttaagacagaaacaagttgacaagctttcatcatcttttgggaatcttgatccctttggcacaggacagccccttcctccgttacaaattccacagcagactgctcagcatagtatagtgctgcctctgaagaagccgcccaagtggattcgaaggcctgttggtgcttctttttcatttggaggcaaactggttacgtttgagaatgtcagaatgccttctcatcagggagctgagcagcagcagcagcagcaccatgtgttcattagtcaggttgtaacagaaaaggagttcctcagccgatcagaccaacttcagcaggctgtgcagtcacaaggatttatcaattattgccaaaaaaaaattgatgcttctcagactgaatttgagaaaaatgtgtggtcctttttgaaggtaaactttgaggatgattctcgtggaaaataccttgaacttctaggatacagaaaagaagatctaggaaagaagattgctttggccttgaacaaagtggatggagccaatgtggctcttaaagactctgaccaagtagcacagagtgatggggaggagagccctgctgctgaagagcagctcttgggagagcacattaaagaggaaaaagaagaatctgaatttctaccctcatctggaggaacatttaatatctctgtcagtggggacattgatggtttaattactcaggctttgctgacgggcaattttgagagtgctgttgacctttgtttacatgataaccgcatggccgatgccattatattggccatagcaggtggacaagaactcttggctcgaacccagaaaaaatacttcgcaaaatcccaaagcaaaattaccaggctcatcactgcagtggtgatgaagaactggaaagagattgttgagtcttgtgatcttaaaaattggagagaggctttagctgcagtattgacttatgcaaagccggatgaattttcagccctttgtgatcttttgggaaccaggcttgaaaatgaaggagatagcctcctgcagactcaagcatgtctctgctatatttgtgcagggaatgtagagaaattagttgcatgttggactaaagctcaagatggaagccaccctttgtcacttcaggatctgattgagaaagttgtcatcctgcgaaaagctgtgcaactcactcaagccatggacactagtactgtaggagttctcttggctgcgaagatgagtcagtatgccaatttgttggcagctcagggcagtattgctgcagccttggcttttcttcctgacaacaccaaccagccaaatatcatgcagcttcgtgacagactttgtagagcacaaggagagcctgtagcaggacatgaatcacctaaaattccgtacgagaaacagcagctccccaagggcaggcctggaccagttgctggccaccaccagatgccaagagttcaaactcaacaatattatccccatggagaaaatcctccacctccgggtttcataatgcatggaaatgttaatccaaatgctgctggtcagcttcccacatctccaggtcatatgcacacccaggtaccaccttatccacagccacagccttatcaaccagcccagccgtatcccttcggaacaggggggtcagcaatgtatcgacctcagcagcctgttgctcctcctacttcaaacgcttaccctaacaccccttacatatcttctgcttcttcctatactgggcagtctcagctgtacgcagcacagcaccaggcctcttcacctacctccagccctgctacttctttccctcctcccccttcctctggagcatccttccagcatggcggaccaggagctccaccatcatcttcagcttatgcactgcctcctggaacaacaggtcctcagaatggttggaatgaccctccagctttgaacagagtacccaaaaagaagaagatgcctgaaaacttcatgcctcctgttcccatcacatcaccaatcatgaacccgttgggtgacccccagtcacaaatgctgcagcaacagccttcagctccagtaccactgtcaagccagtcttcattcccacagccacatcttccaggtggccagcccttccatggcgtacagcaacctcttggtcaaacaggcatgccaccatctttttcaaagcccaatattgaaggtgccccaggggctcctattggaaataccttccagcatgtgcagtctttgccaacaaaaaaaattaccaagaaacctattccagatgagcacctcattctaaagaccacatttgaggatcttattcagcgctgcctttcttcagcaacagaccctcaaaccaagaggaagctagatgatgccagcaaacgtttggagtttctgtatgataaacttagggaacagacactttcaccaacaatcaccagtggtttacacaacattgcaaggagcattgaaactcgaaactactcagaaggattgaccatgcatacccacatagttagcaccagcaacttcagtgagacctctgctttcatgccagttctcaaagttgttctcacccaggccaataagctgggtgtctaaaaggacagcttctcttccactcaatattgccatttttccaaagaaacatgttaaaaaaaaaaa

SEQ ID NO: 179333 - DNA, 706 bp, Homo sapiens
  Payload ID: 15343
  Gene Symbol: SEC31A
  Gene Name: SEC31 homolog A, COPII coat complex component
  ENST ID: ENST00000503058
  CDS Start-End: 1-706
acgcaggatccggctgccgaaggtcctcgccagcaggatgaagttaaaggaagtagatcgtacagccatgcaggcatggagccctgcccagaatcaccccatttacctagcaacaggtaccacaagttgatttgggggccttataaaatggattccaaaggagatgtctctggagttctgattgcaggtggtgaaaatggaaatattattctctatgatccttctaaaattatagctggagacaaggaagttgtgattgcccagaatgacaagcatactggcccagtgagagccttggatgtgaacattttccagactaatctggtagcttctggtgctaatgaatctgaaatctacatatgggatctaaataattttgcaaccccaatgacaccaggagccaaaacacagccgccagaagatatcagctgcattgcatggaacagacaagttcagcatattttagcatcagccagtcccagtggccgggccactgtatgggatcttagaaaaaatgagccaatcatcaaagtcagtgaccatagtaacagaatgcattgttctgggttggcatggcatcctgatgttgctactcagatggtccttgcctccgaggatgaccggttaccagtgatccagatgtgggatcttcgatttgcttcctctccacttcgtgtcctggaaaaccatgccaggtatcgtgctg

SEQ ID NO: 179334 - DNA, 541 bp, Homo sapiens
  Payload ID: 15343
  Gene Symbol: SEC31A
  Gene Name: SEC31 homolog A, COPII coat complex component
  ENST ID: ENST00000506495
  CDS Start-End: 462-541
gcatttgaccgctcctccctccgcgttggaggcggaatagtgggttttgctgcaaccggtttattttccttctgttttcacccattctggcacaatctggcgccatcgtccttcttgtgaggccaagcctgaaaatgcgaagcagagaggcaggaccaaaattgaggcgaatccaggaacctgccaatgggtctccgggtgcggtctctgaaactggaggatatcgggaggaaaggctctccgatgcggagataatggggaagctcttggcatggttggctgtaggtatgtgataccggaggagcaggagtcaaataggatacgccgacttttaattcaaggaacccttttctgaaacactttgccacaatgaaggaaataaggaattgtactctcagagatgttgagaaaagatacatgggtcttggaagataattactcaaaatatgcagggaagcaggatgaagttaaaggaagtagatcgtacagccatgcaggcatggagccctgcccagaatcaccccatttacctagcaacagg

SEQ ID NO: 179335 - DNA, 569 bp, Homo sapiens
  Payload ID: 15343
  Gene Symbol: SEC31A
  Gene Name: SEC31 homolog A, COPII coat complex component
  ENST ID: ENST00000505434
  CDS Start-End: 372-569
gaaggtcctcgccaggtgcgtccgcccgttgctttttgtcctcttcgccggtccttaagctttgaggtagagcccaggccaaaactgggaccgcagcctgggtctccgctgccccgcaccagcctgaggcccggtctctggtgacggcgcgcccctagtcttggtttcgggcccggcggaacaacgcctggcatctggactccagtgatcgcgcccgtccgcattcgccgacgtctccactgctgagcaaaagccacccgaggctggcgacagtgtcttgccggggagtagtagccgggctggtaactggagtttgagattaggagactttcagacccttgtgcacaaagaggtgcggtccccgaggcaggatgaagttaaaggaagtagatcgtacagccatgcaggcatggagccctgcccagaatcaccccatttacctagcaacaggaacatctgctcagcaattggatgcaacatttagtacgaatgcttcccttgagatatttgaattagacctctctgatccatccttggatatgaaatcttgtgccacattctcctcttct

SEQ ID NO: 179336 - DNA, 657 bp, Homo sapiens
  Payload ID: 15343
  Gene Symbol: SEC31A
  Gene Name: SEC31 homolog A, COPII coat complex component
  ENST ID: ENST00000511338
  CDS Start-End: 1-657
ccagatgccaagagttcaaactcaacaatattatccccatgttagaattgcccctactgtcactacctggagtaacaaaactcctactgcccttcccagccatccacctgcagcctctccctctgacacacagggagaaaatcctccacctccgggtttcataatgcatggaaatgttaatccaaatgctgctggtcagcttcccacatctccaggtcatatgcacacccaggtaccaccttatccacagccacagcgtcctcagaatggttggaatgaccctccagctttgaacagagtacccaaaaagaagaagatgcctgaaaacttcatgcctcctgttcccatcacatcaccaatcatgaacccgttgggtgacccccagtcacaaatgctgcagcaacagccttcagctccagtaccactgtcaagccagtcttcattcccacagccacatcttccaggtggccagcccttccatggcgtacagcaacctcttggtcaaacaggcatgccaccatctttttcaaagcccaatattgaaggtgccccaggggctcctattggaaataccttccagcatgtgcagtctttgccaacaaaaaaaattaccaagaaacctattccagatgagcacctcattctaaagaccacatt

SEQ ID NO: 179337 - DNA, 847 bp, Homo sapiens
  Payload ID: 15343
  Gene Symbol: SEC31A
  Gene Name: SEC31 homolog A, COPII coat complex component
  ENST ID: ENST00000514326
  CDS Start-End: 350-847
ctcgccaggtgcgtccgcccgttgctttttgtcctcttcgccggtccttaagctttgaggtagagcccaggccaaaactgggaccgcagcctgggtctccgctgccccgcaccagcctgaggcccggtctctggtgacggcgcgcccctagtcttggtttcgggcccggcggaacaacgcctggcatctggactccagtgatcgcgcccgtccgcattcgccgacgtctccactgctgagcaaaagccacccgaggctggcgacagtgtcttgccggggagtagtagccgggctggtaactggagtttgagattaggagactttcagacccttgtgcacaaagagcaggatgaagttaaaggaagtagatcgtacagccatgcaggcatggagccctgcccagaatcaccccatttacctagcaacaggaacatctgctcagcaattggatgcaacatttagtacgaatgcttcccttgagatatttgaattagacctctctgatccatccttggatatgaaatcttgtgccacattctcctcttctcacaggtaccacaagttgatttgggggccttataaaatggattccaaaggagatgtctctggagttctgattgcaggtggtgaaaatggaaatattattctctatgatccttctaaaattatagctggagacaaggaagttgtgattgcccagaatgacaagcatactggcccagtgagagccttggatgtgaacattttccagactaatctggtagcttctggtgctaatgaatctgaaatctacatatgggatctaaataattttgcaaccccaatgacaccaggagccaaaacacag

SEQ ID NO: 179338 - DNA, 3397 bp, Homo sapiens
  Payload ID: 15343
  Gene Symbol: SEC31A
  Gene Name: SEC31 homolog A, COPII coat complex component
  ENST ID: ENST00000508479
  CDS Start-End: 71-2704
gaatgctgggagagtccgacgagcgctgcactaacgcaggatccggctgccgaaggtcctcgccagcaggatgaagttaaaggaagtagatcgtacagccatgcaggcatggagccctgcccagaatcaccccatttacctagcaacaggaacatctgctcagcaattggatgcaacatttagtacgaatgcttcccttgagatatttgaattagacctctctgatccatccttggatatgaaatcttgtgccacattctcctcttctcacaggtaccacaagttgatttgggggccttataaaatggattccaaaggagatgtctctggagttctgattgcaggtggtgaaaatggaaatattattctctatgatccttctaaaattatagctggagacaaggaagttgtgattgcccagaatgacaagcatactggcccagtgagagccttggatgtgaacattttccagactaatctggtagcttctggtgctaatgaatctgaaatctacatatgggatctaaataattttgcaaccccaatgacaccaggagccaaaacacagccgccagaagatatcagctgcattgcatggaacagacaagttcagcatattttagcatcagccagtcccagtggccgggccactgtatgggatcttagaaaaaatgagccaatcatcaaagtcagtgaccatagtaacagaatgcattgttctgggttggcatggcatcctgatgttgctactcagatggtccttgcctccgaggatgaccggttaccagtgatccagatgtgggatcttcgatttgcttcctctccacttcgtgtcctggaaaaccatgccagggggattttggcaattgcttggagcatggcagatcctgaattgttactgagctgtggaaaagatgctaagattctctgctccaatccaaacacaggagaggtgttatatgaacttcccaccaacacacagtggtgcttcgatattcagtggtgtccccgaaatcctgctgtcttatcagctgcttcgtttgatgggcgtatcagtgtttattctatcatgggaggtagcacagatggtttaagacagaaacaagttgacaagctttcatcatcttttgggaatcttgatccctttggcacaggacagccccttcctccgttacaaattccacagcagactgctcagcatagtatagtgctgcctctgaagaagccgcccaagtggattcgaaggcctgttggtgcttctttttcatttggaggcaaactggttacgtttgagaatgtcagaatgccttctcatcagggagctgagcagcagcagcagcagcaccatgtgttcattagtcaggttgtaacagaaaaggagttcctcagccgatcagaccaacttcagcaggctgtgcagtcacaaggatttatcaattattgccaaaaaaaaattgatgcttctcagactgaatttgagaaaaatgtgtggtcctttttgaaggtaaactttgaggatgattctcgtggaaaataccttgaacttctaggatacagaaaagaagatctaggaaagaagattgctttggccttgaacaaagtggatggagccaatgtggctcttaaagactctgaccaagtagcacagagtgatggggaggagagccctgctgctgaagagcagctcttgggagagcacattaaagaggaaaaagaagaatctgaatttctaccctcatctggaggaacatttaatatctctgtcagtggggacattgatggtttaattactcaggctttgctgacgggcaattttgagagtgctgttgacctttgtttacatgataaccgcatggccgatgccattatattggccatagcaggtggacaagaactcttggctcgaacccagaaaaaatacttcgcaaaatcccaaagcaaaattaccaggctcatcactgcagtggtgatgaagaactggaaagagattgttgagtcttgtgatcttaaaaattggagagaggctttagctgcagtattgacttatgcaaagccggatgaattttcagccctttgtgatcttttgggaaccaggcttgaaaatgaaggagatagcctcctgcagactcaagcatgtctctgctatatttgtgcagggaatgtagagaaattagttgcatgttggactaaagctcaagatggaagccaccctttgtcacttcaggatctgattgagaaagttgtcatcctgcgaaaagctgtgcaactcactcaagccatggacactagtactgtaggagttctcttggctgcgaagatgagtcagtatgccaatttgttggcagctcagggcagtattgctgcagccttggcttttcttcctgacaacaccaaccagccaaatatcatgcagcttcgtgacagactttgtagagcacaaggagagcctgtagcaggacatgaatcacctaaaattccgtacgagaaacagcagctccccaagggcaggcctggaccagttgctggccaccaccagatgccaagagttcaaactcaacaatattatccccatggagaaaatcctccacctccgggtttcataatgcatggaaatgttaatccaaatgctgctggtcagcttcccacatctccaggtcatatgcacacccaggtaccaccttatccacagccacagcgtaagtagtgtgaccccaaagtcctttcagagcagtatttatgatctaatttagtaactttactttgaagccccaaagtcattgtcaaatcaataagtaagaaccattgtgcataggattcctgagtccctgctacaaagagacatgtttttttaggaggtggcctgaatcactatgctaggaagtagctcctttgtcacactgttcagagtagttgactcctgttcctcagccattactaagacttgttaaagataatcaagtgtcccatgattttggtataaagaaacagaattttagaaattattttttacatattctttttcttcaggcaagatgacacaaattatttttggaaaaatggtttcaaggggcatttgttattactgtttttccattttatttatttatttaatagactttgtattttagagcagtcttaggttcagaacaaaattgagcagaaagtacagagtgcccccactattgacatcctacgccacagtggtgtatttgttacaatcgatgaacctacatcaatgtctcattatcacccaaagtccacagtttacactctcagtgttgtacattctgtggattttaacaaatgtgtaatgacatgtatctattagtggcatttttaaaagaaaataattatacctggaaagtgaaatattgccactatttgaaaatttaaatgc

SEQ ID NO: 179339 - DNA, 1329 bp, Homo sapiens
  Payload ID: 15343
  Gene Symbol: SEC31A
  Gene Name: SEC31 homolog A, COPII coat complex component
  ENST ID: ENST00000507828
  CDS Start-End: 1-1329
ctttggcacaggacagccccttcctccgttacaaattccacagcagactgctcagcatagtatagtgctgcctctgaagaagccgcccaagtggattcgaaggcctgttggtgcttctttttcatttggaggcaaactggttacgtttgagaatgtcagaatgccttctcatcagggagctgagcagcagcagcagcagcaccatgtgttcattagtcaggttgtaacagaaaaggagttcctcagccgatcagaccaacttcagcaggctgtgcagtcacaaggatttatcaattattgccaaaaaaaaattgatgcttctcagactgaatttgagaaaaatgtgtggtcctttttgaaggtaaactttgaggatgattctcgtggaaaataccttgaacttctaggatacagaaaagaagatctaggaaagaagattgctttggccttgaacaaagtggatggagccaatgtgcacattaaagaggaaaaagaagaatctgaatttctaccctcatctggaggaacatttaatatctctgtcagtggggacattgatggtttaattactcaggctttgctgacgggcaattttgagagtgctgttgacctttgtttacatgataaccgcatggccgatgccattatattggccatagcaggtggacaagaactcttggctcgaacccagaaaaaatacttcgcaaaatcccaaagcaaaattaccaggctcatcactgcagtggtgatgaagaactggaaagagattgttgagtcttgtgatcttaaaaattggagagaggctttagctgcagtattgacttatgcaaagccggatgaattttcagccctttgtgatcttttgggaaccaggcttgaaaatgaaggagatagcctcctgcagactcaagcatgtctctgctatatttgtgcagggaatgtagagaaattagttgcatgttggactaaagctcaagatggaagccaccctttgtcacttcaggatctgattgagaaagttgtcatcctgcgaaaagctgtgcaactcactcaagccatggacactagtactgtaggagttctcttggctgcgaagatgagtcagtatgccaatttgttggcagctcagggcagtattgctgcagccttggcttttcttcctgacaacaccaaccagccaaatatcatgcagcttcgtgacagactttgtagagcacaaggagagcctgtagcaggacatgaatcacctaaaattccgtacgagaaacagcagctccccaagggcaggcctggaccagttgctggccaccaccagatgccaagagttca

SEQ ID NO: 179340 - DNA, 3861 bp, Homo sapiens
  Payload ID: 15343
  Gene Symbol: SEC31A
  Gene Name: SEC31 homolog A, COPII coat complex component
  Uniprot ID: O94979
  ENST ID: ENST00000509142
  CDS Start-End: 129-3449
gcggctgccacgttggaacggaacgtggaggtggccctggccggggaggaggggcggcggcgaatgctgggagagtccgacgagcgctgcactaacgcaggatccggctgccgaaggtcctcgccaggatgaagttaaaggaagtagatcgtacagccatgcaggcatggagccctgcccagaatcaccccatttacctagcaacaggaacatctgctcagcaattggatgcaacatttagtacgaatgcttcccttgagatatttgaattagacctctctgatccatccttggatatgaaatcttgtgccacattctcctcttctcacaggtaccacaagttgatttgggggccttataaaatggattccaaaggagatgtctctggagttctgattgcaggtggtgaaaatggaaatattattctctatgatccttctaaaattatagctggagacaaggaagttgtgattgcccagaatgacaagcatactggcccagtgagagccttggatgtgaacattttccagactaatctggtagcttctggtgctaatgaatctgaaatctacatatgggatctaaataattttgcaaccccaatgacaccaggagccaaaacacagccgccagaagatatcagctgcattgcatggaacagacaagttcagcatattttagcatcagccagtcccagtggccgggccactgtatgggatcttagaaaaaatgagccaatcatcaaagtcagtgaccatagtaacagaatgcattgttctgggttggcatggcatcctgatgttgctactcagatggtccttgcctccgaggatgaccggttaccagtgatccagatgtgggatcttcgatttgcttcctctccacttcgtgtcctggaaaaccatgccagggggattttggcaattgcttggagcatggcagatcctgaattgttactgagctgtggaaaagatgctaagattctctgctccaatccaaacacaggagaggtgttatatgaacttcccaccaacacacagtggtgcttcgatattcagtggtgtccccgaaatcctgctgtcttatcagctgcttcgtttgatgggcgtatcagtgtttattctatcatgggaggtagcacagatggtttaagacagaaacaagttgacaagctttcatcatcttttgggaatcttgatccctttggcacaggacagccccttcctccgttacaaattccacagcagactgctcagcatagtatagtgctgcctctgaagaagccgcccaagtggattcgaaggcctgttggtgcttctttttcatttggaggcaaactggttacgtttgagaatgtcagaatgccttctcatcagggagctgagcagcagcagcagcagcaccatgtgttcattagtcaggttgtaacagaaaaggagttcctcagccgatcagaccaacttcagcaggctgtgcagtcacaaggatttatcaattattgccaaaaaaaaattgatgcttctcagactgaatttgagaaaaatgtgtggtcctttttgaaggtaaactttgaggatgattctcgtggaaaataccttgaacttctaggatacagaaaagaagatctaggaaagaagattgctttggccttgaacaaagtggatggagccaatgtggctcttaaagactctgaccaagtagcacagagtgatggggaggagagccctgctgctgaagagcagctcttgggagagcacattaaagaggaaaaagaagaatctgaatttctaccctcatctggaggaacatttaatatctctgtcagtggggacattgatggtttaattactcaggctttgctgacgggcaattttgagagtgctgttgacctttgtttacatgataaccgcatggccgatgccattatattggccatagcaggtggacaagaactcttggctcgaacccagaaaaaatacttcgcaaaatcccaaagcaaaattaccaggctcatcactgcagtggtgatgaagaactggaaagagattgttgagtcttgtgatcttaaaaattggagagaggctttagctgcagtattgacttatgcaaagccggatgaattttcagccctttgtgatcttttgggaaccaggcttgaaaatgaaggagatagcctcctgcagactcaagcatgtctctgctatatttgtgcagggaatgtagagaaattagttgcatgttggactaaagctcaagatggaagccaccctttgtcacttcaggatctgattgagaaagttgtcatcctgcgaaaagctgtgcaactcactcaagccatggacactagtactgtaggagttctcttggctgcgaagatgagtcagtatgccaatttgttggcagctcagggcagtattgctgcagccttggcttttcttcctgacaacaccaaccagccaaatatcatgcagcttcgtgacagactttgtagagcacaaggagagcctgtagcaggacatgaatcacctaaaattccgtacgagaaacagcagctccccaagggcaggcctggaccagttgctggccaccaccagatgccaagagttcaaactcaacaatattatccccatggagaaaatcctccacctccgggtttcataatgcatggaaatgttaatccaaatgctgctggtcagcttcccacatctccaggtcatatgcacacccaggtaccaccttatccacagccacagcgtcctcagaatggttggaatgaccctccagctttgaacagagtacccaaaaagaagaagatgcctgaaaacttcatgcctcctgttcccatcacatcaccaatcatgaacccgttgggtgacccccagtcacaaatgctgcagcaacagccttcagctccagtaccactgtcaagccagtcttcattcccacagccacatcttccaggtggccagcccttccatggcgtacagcaacctcttggtcaaacaggcatgccaccatctttttcaaagcccaatattgaaggtgccccaggggctcctattggaaataccttccagcatgtgcagtctttgccaacaaaaaaaattaccaagaaacctattccagatgagcacctcattctaaagaccacatttgaggatcttattcagcgctgcctttcttcagcaacagaccctcaaaccaagaggaagctagatgatgccagcaaacgtttggagtttctgtatgataaacttagggaacagacactttcaccaacaatcaccagtggtttacacaacattgcaaggagcattgaaactcgaaactactcagaaggattgaccatgcatacccacatagttagcaccagcaacttcagtgagacctctgctttcatgccagttctcaaagttgttctcacccaggccaataagctgggtgtctaaaaggacagcttctcttccactcaatattgccatttttccaaagaaacatgttaaaaaaaaaaattataagacatggactagtcctcattagcatgtttgcatagcaaccagtcaagagcatttacactatttctgctgatatactcaccttagaactgctcagaaccctggtgctttatttttgttttaatcttttgttgccagtgatgattttcctattctgcaaatagtgtatttcctggattacacatagtatggtttcctgaagtattctgataaatgtgttttttaaaacctcaatatactttttagaaaaggagcatctggttatgcataaagcagagctaaaactaaatttctttcatgtcctccctacttcctcagtgtcaatcagattaaagtgtgtaatcct

SEQ ID NO: 179341 - DNA, 3687 bp, Homo sapiens
  Payload ID: 15343
  Gene Symbol: SEC31A
  Gene Name: SEC31 homolog A, COPII coat complex component
  Uniprot ID: O94979
  ENST ID: ENST00000513858
  CDS Start-End: 71-3274
gaatgctgggagagtccgacgagcgctgcactaacgcaggatccggctgccgaaggtcctcgccagcaggatgaagttaaaggaagtagatcgtacagccatgcaggcatggagccctgcccagaatcaccccatttacctagcaacaggaacatctgctcagcaattggatgcaacatttagtacgaatgcttcccttgagatatttgaattagacctctctgatccatccttggatatgaaatcttgtgccacattctcctcttctcacaggtaccacaagttgatttgggggccttataaaatggattccaaaggagatgtctctggagttctgattgcaggtggtgaaaatggaaatattattctctatgatccttctaaaattatagctggagacaaggaagttgtgattgcccagaatgacaagcatactggcccagtgagagccttggatgtgaacattttccagactaatctggtagcttctggtgctaatgaatctgaaatctacatatgggatctaaataattttgcaaccccaatgacaccaggagccaaaacacagccgccagaagatatcagctgcattgcatggaacagacaagttcagcatattttagcatcagccagtcccagtggccgggccactgtatgggatcttagaaaaaatgagccaatcatcaaagtcagtgaccatagtaacagaatgcattgttctgggttggcatggcatcctgatgttgctactcagatggtccttgcctccgaggatgaccggttaccagtgatccagatgtgggatcttcgatttgcttcctctccacttcgtgtcctggaaaaccatgccagggggattttggcaattgcttggagcatggcagatcctgaattgttactgagctgtggaaaagatgctaagattctctgctccaatccaaacacaggagaggtgttatatgaacttcccaccaacacacagtggtgcttcgatattcagtggtgtccccgaaatcctgctgtcttatcagctgcttcgtttgatgggcgtatcagtgtttattctatcatgggaggtagcacagatggtttaagacagaaacaagttgacaagctttcatcatcttttgggaatcttgatccctttggcacaggacagccccttcctccgttacaaattccacagcagactgctcagcatagtatagtgctgcctctgaagaagccgcccaagtggattcgaaggcctgttggtgcttctttttcatttggaggcaaactggttacgtttgagaatgtcagaatgccttctcatcagggagctgagcagcagcagcagcagcaccatgtgttcattagtcaggttgtaacagaaaaggagttcctcagccgatcagaccaacttcagcaggctgtgcagtcacaaggatttatcaattattgccaaaaaaaaattgatgcttctcagactgaatttgagaaaaatgtgtggtcctttttgaaggtaaactttgaggatgattctcgtggaaaataccttgaacttctaggatacagaaaagaagatctaggaaagaagcacattaaagaggaaaaagaagaatctgaatttctaccctcatctggaggaacatttaatatctctgtcagtggggacattgatggtttaattactcaggctttgctgacgggcaattttgagagtgctgttgacctttgtttacatgataaccgcatggccgatgccattatattggccatagcaggtggacaagaactcttggctcgaacccagaaaaaatacttcgcaaaatcccaaagcaaaattaccaggctcatcactgcagtggtgatgaagaactggaaagagattgttgagtcttgtgatcttaaaaattggagagaggctttagctgcagtattgacttatgcaaagccggatgaattttcagccctttgtgatcttttgggaaccaggcttgaaaatgaaggagatagcctcctgcagactcaagcatgtctctgctatatttgtgcagggaatgtagagaaattagttgcatgttggactaaagctcaagatggaagccaccctttgtcacttcaggatctgattgagaaagttgtcatcctgcgaaaagctgtgcaactcactcaagccatggacactagtactgtaggagttctcttggctgcgaagatgagtcagtatgccaatttgttggcagctcagggcagtattgctgcagccttggcttttcttcctgacaacaccaaccagccaaatatcatgcagcttcgtgacagactttgtagagcacaaggagagcctgtagcaggacatgaatcacctaaaattccgtacgagaaacagcagctccccaagggcaggcctggaccagttgctggccaccaccagatgccaagagttcaaactcaacaatattatccccatggagaaaatcctccacctccgggtttcataatgcatggaaatgttaatccaaatgctgctggtcagcttcccacatctccaggtcatatgcacacccaggtaccaccttatccacagccacagcgtcctcagaatggttggaatgaccctccagctttgaacagagtacccaaaaagaagaagatgcctgaaaacttcatgcctcctgttcccatcacatcaccaatcatgaacccgttgggtgacccccagtcacaaatgctgcagcaacagccttcagctccagtaccactgtcaagccagtcttcattcccacagccacatcttccaggtggccagcccttccatggcgtacagcaacctcttggtcaaacaggcatgccaccatctttttcaaagcccaatattgaaggtgccccaggggctcctattggaaataccttccagcatgtgcagtctttgccaacaaaaaaaattaccaagaaacctattccagatgagcacctcattctaaagaccacatttgaggatcttattcagcgctgcctttcttcagcaacagaccctcaaaccaagaggaagctagatgatgccagcaaacgtttggagtttctgtatgataaacttagggaacagacactttcaccaacaatcaccagtggtttacacaacattgcaaggagcattgaaactcgaaactactcagaaggattgaccatgcatacccacatagttagcaccagcaacttcagtgagacctctgctttcatgccagttctcaaagttgttctcacccaggccaataagctgggtgtctaaaaggacagcttctcttccactcaatattgccatttttccaaagaaacatgttaaaaaaaaaaattataagacatggactagtcctcattagcatgtttgcatagcaaccagtcaagagcatttacactatttctgctgatatactcaccttagaactgctcagaaccctggtgctttatttttgttttaatcttttgttgccagtgatgattttcctattctgcaaatagtgtatttcctggattacacatagtatggtttcctgaagtattctgataaatgtgttttttaaaacctcaatatactttttagaaaaggagcatctggttatgcataaagcagagctaaaactaaatttctttcatgtcctccctacttcctcagtgtcaatcagattaaagtgtgtaatccta

SEQ ID NO: 179342 - DNA, 597 bp, Homo sapiens
  Payload ID: 15343
  Gene Symbol: SEC31A
  Gene Name: SEC31 homolog A, COPII coat complex component
  ENST ID: ENST00000515062
  CDS Start-End: 1-544
tcctgttcccatcacatcaccaatcatgaacccgttgggtgacccccagtcacaaatgctgcagcaacagccttcagctccagtaccactgtcaagccagtcttcattcccacagccacatcttccaggtggccagcccttccatggcgtacagcaacctcttggtcaaacaggcatgccaccatctttttcaaagcccaatattgaaggtgccccaggggctcctattggaaataccttccagcatgtgcagtctttgccaacaaaaaaaattaccaagaaacctattccagatgagcacctcattctaaagaccacatttgaggatcttattcagcgctgcctttcttcagcaacagaccctctttcaccaacaatcaccagtggtttacacaacattgcaaggagcattgaaactcgaaactactcagaaggattgaccatgcatacccacatagttagcaccagcaacttcagtgagacctctgctttcatgccagttctcaaagttgttctcacccaggccaataagctgggtgtctaaaaggacagcttctcttccactcaatattgccatttttccaaagaaacatgtta

SEQ ID NO: 179343 - DNA, 822 bp, Homo sapiens
  Payload ID: 15343
  Gene Symbol: SEC31A
  Gene Name: SEC31 homolog A, COPII coat complex component
  ENST ID: ENST00000513323
  CDS Start-End: 329-822
ctgggaccgcagcctgggtctccgctgccccgcaccagcctgaggcccggtctctggtgacggcgcgcccctagtcttggtttcgggcccggcggaacaacgcctggcatctggactccagtgatcgcgcccgtccgcattcgccgacgtctccactgctgagcaaaagccacccgaggctggcgacagtgtcttgccggggagtagtagccgggctggtaactggagtttgagattaggagactttcagacccttgtgcacaaagaggtgcggtccccgagggtgaggagaggaaaaaaaatctcaggattactttggctttgcaggatgaagttaaaggaagtagatcgtacagccatgcaggcatggagccctgcccagaatcaccccatttacctagcaacaggaacatctgctcagcaattggatgcaacatttagtacgaatgcttcccttgagatatttgaattagacctctctgatccatccttggatatgaaatcttgtgccacattctcctcttctcacaggtaccacaagttgatttgggggccttataaaatggattccaaaggagatgtctctggagttctgattgcaggtggtgaaaatggaaatattattctctatgatccttctaaaattatagctggagacaaggaagttgtgattgcccagaatgacaagcatactggcccagtgagagccttggatgtgaacattttccagactaatctggtagcttctggtgctaatgaatctgaaatctacatatgggatctaaataattttgcaaccccaatgacaccaggagccaaaac

SEQ ID NO: 179344 - DNA, 551 bp, Homo sapiens
  Payload ID: 15343
  Gene Symbol: SEC31A
  Gene Name: SEC31 homolog A, COPII coat complex component
  ENST ID: ENST00000507676
  CDS Start-End: 357-551
gcggaatagtgggttttgctgcaaccggtttattttccttctgttttcacccattctggcacaatctggcgccatcgtccttcttgtgaggccaagcctgaaaatgcgaagcagagaggcaggaccaaaattgaggcgaatccaggaacctgccaatgggtctccgggtgcggtctctgaaactggaggatatcgggaggaaaggctctccgatgcggagataatggggaagctcttggcatggttggctgtaggtatgtgataccggaggagcaggagtcaaataggatacgccgacttttaattcaaggaacccttttctgaaacactttgccacaatgaaggaaataagcaggatgaagttaaaggaagtagatcgtacagccatgcaggcatggagccctgcccagaatcaccccatttacctagcaacaggaacatctgctcagcaattggatgcaacatttagtacgaatgcttcccttgagatatttgaattagacctctctgatccatccttggatatgaaatcttgtgccacattctcctct

SEQ ID NO: 179345 - DNA, 458 bp, Homo sapiens
  Payload ID: 15343
  Gene Symbol: SEC31A
  Gene Name: SEC31 homolog A, COPII coat complex component
  ENST ID: ENST00000507051
  CDS Start-End: 424-458
gcatttgaccgctcctccctccgcgttggaggcggaatagtgggttttgctgcaaccggtttattttccttctgttttcacccattctggcacaatctggcgccatcgtccttcttgtgaggccaagcctgaaaatgcgaagcagagaggcaggaccaaaattgaggcgaatccaggaacctgccaatgggtctccggctctccgatgcggagataatggggaagctcttggcatggttggctgtaggtatgtgataccggaggagcaggagtcaaataggatacgccgacttttaattcaaggaacccttttctgaaacactttgccacaatgaaggaaataaggaattgtactctcagagatgttgagaaaagatacatgggtcttggaagataattactcaaaatatgcagggaagcaggatgaagttaaaggaagtagatcgtacagccatgca

SEQ ID NO: 179346 - DNA, 4612 bp, Homo sapiens
  Payload ID: 15344
  Gene Symbol: SEC31B
  Gene Name: SEC31 homolog B, COPII coat complex component
  Uniprot ID: Q9NQW1
  ENST ID: ENST00000370345
  CDS Start-End: 99-3638
gaggagcggctccggccgccgcgcctgacccttgtccggggtcttccgcacagtgggctgagggccatgtcagttttctgccacctacaggatagaccatgaagctgaaggaacttgagcggccagctgtccaggcatggagcccagccagccaataccctttgtatctggccacaggaacatctgcccaacagctagattcctccttcagcacaaatggcacattggaaatatttgaggttgatttcagggacccttctctggacttgaaacacagaggagtcctttctgccttgagcaggtttcacaagctggtctgggggagctttggcagtgggcttctggaaagctccggggttattgttggcggcggggacaatggcatgcttattctatacaatgtgacccacatcctgtcttcggggaaggagcctgtgattgctcagaaacagaagcacacgggggctgtcagagccctcgacttgaatcctttccagggcaacctcctggcttcaggggccagcgattctgaaatcttcatttgggatctgaataacttgaatgtgccaatgaccctgggatccaagtcacagcagcctccagaggacatcaaggcactgtcttggaaccggcaagcccaacacattctgtcttctgctcaccccagtggcaaggcagttgtgtgggatctcaggaagaatgaacctatcatcaaagtcagtgatcacagcaacaggatgcactgctcaggcctggcctggcatcctgacatagccacccagttagtgctgtgctcagaggatgatcgacttcccgtgattcagctgtgggacttgcgctttgcctcctcgcccttgaaggtgctggagagccacagcagggggatcttgtcagtgtcatggagccaggctgatgctgagctgctgctcactagtgctaaggacagccagatcttgtgccggaacctggggagcagtgaggtggtatataagctaccaacacagagcagctggtgctttgatgtgcagtggtgccctcgggacccttcagtgttctctgctgcctccttcaacggctggatcagtttgtactctgtgatgggtaggagctgggaagtccagcatatgagacaggctgacaagatctcctcttccttcagcaaaggccagcctctcccaccactgcaggtgccagagcaagtggcacaagcaccactgatacctcccctgaaaaaaccccccaaatggattagaagaccaacaggtgtttcatttgcttttggagggaagctggttacttttggcctccccagcacccctgcccatctggtgccacagccttgcccccgcctagtcttcatcagtcaagtcaccacagaatctgaattcctgatgcgatcagctgagctgcaggaggccttgggatcaggaaatctactgaattactgtcagaacaagagccagcaagctttactgcaaagtgaaaagatgctgtggcagttcctgaaggtgaccttagagcaagactccagaatgaaattcctaaagcttttaggatacagtaaagatgagcttcagaagaaggtggccacatggttgaagagtgacgtggggctaggtgagagtcctcagcccaagggaaatgacctcaacagtgacagacaacaggccttctgcagccaggcctccaaacacaccacaaaggaagcctctgcttcctcagccttctttgatgagctggtccctcagaacatgactccttgggagatccccatcacaaaagatattgatggactcctaagccaggctctcctgcttggggaactgggtccggccgtggagctgtgtctgaaggaggagcgctttgctgatgccattatcctggcccaggctgggggtacagatctgctgaagcaaacacaggagcgctacttggccaagaagaaaaccaaaatctcctcgcttctagcctgtgttgtgcaaaagaattggaaggatgtggtgtgtacctgtagcctgaagaactggagagaggcactggctttgctactgacatactcaggcacagagaaatttcccgagctctgtgacatgctgggaactcgcatggaacaggagggcagcagggcactaacctccgaagccagactctgttatgtgtgctcagggagtgtggagcggctggtggagtgctgggcaaaatgccaccaggctttgtcccccatggctctgcaggacctgatggagaaggtgatggttcttaacaggagcttggagcaactgcggggtcctcatggggtgagcccaggccctgccacaacctacagggtcactcagtatgccaacctcctggcagcccagggcagcctggccactgccatgagctttctacccagggactgtgctcagccaccagttcagcagctaagagatcggctttttcatgctcaaggttctgctgtcttgggccaacagtctccccctttccccttcccccggattgttgtgggagctaccctccactctaaagagacatcatcttacagattgggatcccagccttctcaccaggtcccaactccatctccaaggccaagggttttcacccctcagtcatcaccagcgatgcccttggcaccttcccatcctagcccttatcagggtcccaggacacagaatataagtgactacagggcacctgggccccaggccatccagcctttgcctttgagccctggggtaaggcctgcttcatctcagccacagctattaggagggcaaagggtgcaagttcctaacccggtgggattccctgggacatggcctcttcctggttcccctctacccatggcatgcccaggcatcatgcgacctggctctacctccctgcctgagactcctagactgttccctctgcttcctctgagaccactaggtcccggccgcatggtctcccacaccccagcccctcctgcaagcttccctgtgccataccttccaggggacccaggtgccccatgctctagtgtcctcccaaccactggcatcttgactcctcacccaggacctcaagattcctggaaagaagccccagcccccaggggaaacctccagaggaacaagctgccagagacatttatgcccccagcaccaattactgctccagttatgagcctcacccctgagctacaagggattcttccctcacagccccctgtctccagtgtgagtcatgctcccccaggagttccaggagaactcagcctgcagcttcagcacctgccacctgagaagatggaaaggaaggagctgcccccagagcatcagtccttgaagagcagctttgaggcgcttctccaacgctgctccctgtctgcaactgacttaaagacaaaaaggaagctggaagaggcagcccagcgtctggagtatctatatgagaagctctgtgaggggacactctcacctcatgtcgtggctgggctccatgaggttgcccgatgtgtggatgcaggaagctttgagcagggccttgcagtgcatgcccaggtggcgggctgtagcagcttcagcgaggtgtccagcttcatgcctatcctgaaggctgtcctcatcatcgctcataagctgctggtctaaaccaggcagcctctcttgctaggaggccacttctgctgttacataactcctccctgcagaagaggggacttctgcaacagattctgtttctttttcccgactcttttccttgctgccaggtatgtgatgctgtaggcttggctccaaaccagctgagtgcctgctttttactcctttatgtctggccttctaggatctgtccaagacactctcaggcctggaggcagggcatagaatcagttcttcactctccctaatactacactctgtaaggacctggggcaggatatcttctcccccagggatcttctatttaagtggcttctgagagggtgaacaggattgttacttttaagcctacctctgctgtgacccatcatgtgggtcttttgtttctcccttctgtggtttatgagcctgcccttaccttttccctgcctctgacttggtatttccaggtccgtatttctctgtagcccagggtctggggtagagctgactgctgttcaccctttgaacaactcatggacgtgagggatgggtgctgagcagaaccaagagaggaaactttggcgctgttaaaatggaatttctcatctgccggcattattaagggtgggctaggttggatggaaggtgaaagggatgaactgccttttgctggaagctgtcttaggctgtgagacaggagcaggggaaccacagcctatggggaactgcccttgactccacctatgttggagccttagcccaaggccattccttctgtgatgataaagcccagttctggaattggagccatattaaggaatgattctcttccagcgctgctcctcaagggttgggggtccttctccctcgcagccaccacatgtctcagggctaccttctccgattggatttgcatttgtggcactgtctttgatgcagtgatgtacttaatggtgcaataaagctgcttcgatttggtttcc

SEQ ID NO: 179347 - DNA, 3916 bp, Homo sapiens
  Payload ID: 15344
  Gene Symbol: SEC31B
  Gene Name: SEC31 homolog B, COPII coat complex component
  ENST ID: ENST00000482456
  CDS Start-End: 146-403
agaggagcggctccggccgccgcgcctgacccttgtccggggtcttccgcacagatgctccctggatctggctgttaagtttgctggtttctattttcagtgggctgagggccatgtcagttttctgccacctacaggatagaccatgaagctgaaggaacttgagcggccagctgtccaggcatggagcccagccagccaataccctttgtatctggccacaggaacatctgcccaacagctagattcctccttcagcacaaatggcacattggaaatatttgaggttgatttcagggacccttctctggacttgaaacacagaggagtcctttctgccttgagcagggcaacctcctggcttcaggggccagcgattctgaaatcttcatttgggatctgaataacttgaatgtgccaatgaccctgggatccaagtcacagcctccagaggacatcaaggcactgtcttggaaccggcaagcccaacacattctgtcttctgctcaccccagtggcaaggcagttgtgtgggatctcaggaagaatgaacctatcatcaaagtcagtgatcacagcaacaggatgcactgctcaggcctggcctggcatcctgacatagccacccagttagtgctgtgctcagaggatgatcgacttcccgtgattcagctgtgggacttgcgctttgcctcctcgcccttgaaggtgctggagagccacagcagggggatcttgtcagtgtcatggagccaggctgatgctgagctgctgctcactagtgctaaggacagccagatcttgtgccggaacctggggagcagtgaggtggtatataagctaccaacacagagcagctggtgctttgatgtgcagtggtgccctcgggacccttcagtgttctctgctgcctccttcaacggctggatcagtttgtactctgtgatgggtaggagctgggaagtccagcatatgagacaggctgacaagatctcctcttccttcagcaaaggccagcctctcccaccactgcaggtgccagagcaagtggcacaagcaccactgatacctcccctgaaaaaaccccccaaatggattagaagaccaacaggtgtttcatttgcttttggagggaagctggttacttttggcctccccagcacccctgcccatctggtgccacagccttgcccccgcctagtcttcatcagtcaagtcaccacagaatctgaattcctgatgcgatcagctgagctgcaggaggccttgggatcaggaaatctactgaattactgtcagaacaagagccagcaagctttactgcaaagtgaaaagatgctgtggcagttcctgaagcccgccagagacagctcaggtgcaaggagatgagactatacatcaggcaggtgaccttagagcaagactccagaatgaaattcctaaagcttttaggatacagtaaagatgagcttcagaagaaggtggccacatggttgaagagtgacgtggggctaggtgagagtcctcagcccaagggaaatgacctcaacagtgacagacaacaggccttctgcagccaggcctccaaacacaccacaaaggaagcctctgcttcctcagccttctttgatgagctggtccctcagaacatgactccttgggagatccccatcacaaaagatattgatggactcctaagccaggctctcctgcttggggaactgggtccggccgtggagctgtgtctgaaggaggagcgctttgctgatgccattatcctggcccaggctgggggtacagatctgctgaagcaaacacaggagcgctacttggccaagaagaaaaccaaaatctcctcgcttctagcctgtgttgtgcaaaagaattggaaggatgtggtgtgtacctgtagcctgaagaactggagagaggcactggctttgctactgacatactcaggcacagagaaatttcccgagctctgtgacatgctgggaactcgcatggaacaggagggcagcagggcactaacctccgaagccagactctgttatgtgtgctcagggagtgtggagcggctggtggagtgctgggcaaaatgccaccaggctttgtcccccatggctctgcaggacctgatggagaaggtgatggttcttaacaggagcttggagcaactgcggggtcctcatggggtgagcccaggccctgccacaacctacagggtcactcagtatgccaacctcctggcagcccagggcagcctggccactgccatgagctttctacccagggactgtgctcagccaccagttcagcagctaagagatcggctttttcatgctcaaggttctgctgtcttgggccaacagtctccccctttccccttcccccggattgttgtgggagctaccctccactctaaagagacatcatcttacagattgggatcccagccttctcaccaggtcccaactccatctccaaggccaagggttttcacccctcagtcatcaccagcgatgcccttggcaccttcccatcctagcccttatcagggtcccaggacacagaatataagtgactacagggcacctgggccccaggccatccagcctttgcctttgagccctggggtaaggcctggacctcaagattcctggaaagaagccccagcccccaggggaaacctccagaggaacaagctgccagagacatttatgcccccagcaccaattactgctccagttatgagcctcacccctgagctacaagggattcttccctcacagccccctgtctccagtgtgagtcatgctcccccaggagttccaggagaactcagcctgcagcagcttcagcacctgccacctgagaagatggaaaggaaggagctgcccccagagcatcagtccttgaagagcagctttgaggcgcttctccaacgctgctccctgtctgcaactgacttaaagacaaaaaggaagctggaagaggcagcccagcgtctggagtatctatatgagaagctctgtgaggggacactctcacctcatgtcgtggctgggctccatgaggttgcccgatgtgtggatgcaggaagctttgagcagggccttgcagtgcatgcccaggtggcgggctgtagcagcttcagcgaggtgtccagcttcatgcctatcctgaaggctgtcctcatcatcgctcataagctgctggtctaaaccaggcagcctctcttgctaggaggccacttctgctgttacataactcctccctgcagaagaggggacttctgcaacagattctgtttctttttcccgactcttttccttgctgccaggtatgtgatgctgtaggcttggctccaaaccagctgagtgcctgctttttactcctttatgtctggccttctaggatctgtccaagacactctcaggcctggaggcagggcatagaatcagttcttcactctccctaatactacactctgtaaggacctggggcaggatatcttctcccccagggatcttctatttaagtggcttctgagagggtgaacaggattgttacttttaagcctacctctgctgtgacccatcatgtgggtcttttgtttctcccttctgtggtttatgagcctgcccttaccttttccctgcctctgacttggtatttccaggtccgtatttctctgtagcccagggtctggggtagagctgactgctgttcaccctttgaacaactcatggacgtgagggatgggtgctgagcagaaccaagagaggaaactttggcgctgttaaaatggaatttctcatctgccggcattattaagggtgggctaggttggatggaaggtgaaagggatgaactgccttttgctggaagctgtcttaggctgtgagacaggagc

SEQ ID NO: 179348 - DNA, 4396 bp, Homo sapiens
  Payload ID: 15344
  Gene Symbol: SEC31B
  Gene Name: SEC31 homolog B, COPII coat complex component
  ENST ID: ENST00000469546
  CDS Start-End: 44-1093
ggctgagggccatgtcagttttctgccacctacaggatagaccatgaagctgaaggaacttgagcggccagctgtccaggcatggagcccagccagccaataccctttgtatctggccacaggaacatctgcccaacagctagattcctccttcagcacaaatggcacattggaaatatttgaggttgatttcagggacccttctctggacttgaaacacagaggagtcctttctgccttgagcaggtttcacaagctggtctgggggagctttggcagtgggcttctggaaagctccggggttattgttggcggcggggacaatggcatgcttattctatacaatgtgacccacatcctgtcttcggggaaggagcctgtgattgctcagaaacagaagcacacgggggctgtcagagccctcgacttgaatcctttccagggcaacctcctggcttcaggggccagcgattctgaaatcttcatttgggatctgaataacttgaatgtgccaatgaccctgggatccaagtcacagcagcctccagaggacatcaaggcactgtcttggaaccggcaagcccaacacattctgtcttctgctcaccccagtggcaaggcagttgtgtgggatctcaggaagaatgaacctatcatcaaagtcagtgatcacagcaacaggatgcactgctcaggcctggcctggcatcctgacatagccacccagttagtgctgtgctcagaggatgatcgacttcccgtgattcagctgtgggacttgcgctttgcctcctcgcccttgaaggtgctggagagccacagcagggggatcttgtcagtgtcatggagccaggctgatgctgagctgctgctcactagtgctaaggacagccagatcttgtgccggaacctggggagcagtgaggtggtatataagctaccaacacagagcagctggtgctttgatgtgcagtggtgccctcgggacccttcagtgttctctgctgcctccttcaacggctggatcagtttgtactctgtgatgggtaggagctgggaagtccagcatatgagacaggctgacaaggtttgaagggcttggtagagaatgctggagggaaggggctgtctctgtttgtgggagagagacatatggcttgagaagcggagatattggagattgggagaccagggcccggggtttgggagggctgcacctttgccctagtgcccatcttcctgaaaggatgttagtttctgccacaatgtgaagaaggccttcaccttgactcttgttattggatgggccctgtagtatttcagggaccgtgggacccctttgctgggacagttatttcaagagtatgactcttatctttctctcttctatagatccattttgtgccacactccattgtagactttgaatgtagtagtctttccaagagcctacttgcatgggagtcccaccctcgctaccactcacttccccatcccctggaatatgggagtctgacctttctaggtcaaattgggtgtctcaaggattcctcccaaaatggagtttgtaggtggagttcctgactaaactgccactttaggatggcgatgcaggtgtcttttccccccagatctcctcttccttcagcaaaggccagcctctcccaccactgcaggtgccagagcaagtggcacaagcaccactgatacctcccctgaaaaaaccccccaaatggattagaagaccaacaggtgtttcatttgcttttggagggaagctggttacttttggcctccccagcacccctgcccatctggtgccacagccttgcccccgcctagtcttcatcagtcaagtcaccacagaatctgaattcctgatgcgatcagctgagctgcaggaggccttgggatcaggaaatctactgaattactgtcagaacaagagccagcaagctttactgcaaagtgaaaagatgctgtggcagttcctgaaggtgaccttagagcaagactccagaatgaaattcctaaagcttttaggatacagtaaagatgagcttcagaagaaggtggccacatggttgaagagtgacgtggggctaggtgagagtcctcagcccaagggaaatgacctcaacagtgacagacaacaggccttctgcagccagatattgatggactcctaagccaggctctcctgcttggggaactgggtccggccgtggagctgtgtctgaaggaggagcgctttgctgatgccattatcctggcccaggctgggggtacagatctgctgaagcaaacacaggagcgctacttggccaagaagaaaaccaaaatctcctcgcttctagcctgtgttgtgcaaaagaattggaaggatgtggtgtgtacctgtagcctgaagaactggagagaggcactggctttgctactgacatactcaggcacagagaaatttcccgagctctgtgacatgctgggaactcgcatggaacaggagggcagcagggcactaacctccgaagccagactctgttatgtgtgctcagggagtgtggagcggctggtggagtgctgggcaaaatgccaccaggctttgtcccccatggctctgcaggacctgatggagaaggtgatggttcttaacaggagcttggagcaactgcggggtcctcatggggtgagcccaggccctgccacaacctacagggtcactcagtatgccaacctcctggcagcccagggcagcctggccactgccatgagctttctacccagggactgtgctcagccaccagttcagcagctaagagatcggctttttcatgctcaaggttctgctgtcttgggccaacagtctccccctttccccttcccccggattgttgtgggagctaccctccactctaaagagacatcatcttacagattgggatcccagccttctcaccaggtcccaactccatctccaaggccaagggttttcacccctcagtcatcaccagcgatgcccttggcaccttcccatcctagcccttatcagggtcccaggacacagaatataagtgactacagggcacctgggccccaggccatccagcctttgcctttgagccctggggtaaggcctggacctcaagattcctggaaagaagccccagcccccaggggaaacctccagaggaacaagcttcagcacctgccacctgagaagatggaaaggaaggagctgcccccagagcatcagtccttgaagagcagctttgaggcgcttctccaacgctgctccctgtctgcaactgacttaaagacaaaaaggaagctggaagaggcagcccagcgtctggagtatctatatgagaagctctgtgaggggacactctcacctcatgtcgtggctgggctccatgaggttgcccgatgtgtggatgcaggaagctttgagcagggccttgcagtgcatgcccaggtggcgggctgtagcagcttcagcgaggtgtccagcttcatgcctatcctgaaggctgtcctcatcatcgctcataagctgctggtctaaaccaggcagcctctcttgctaggaggccacttctgctgttacataactcctccctgcagaagaggggacttctgcaacagattctgtttctttttcccgactcttttccttgctgccaggtatgtgatgctgtaggcttggctccaaaccagctgagtgcctgctttttactcctttatgtctggccttctaggatctgtccaagacactctcaggcctggaggcagggcatagaatcagttcttcactctccctaatactacactctgtaaggacctggggcaggatatcttctcccccagggatcttctatttaagtggcttctgagagggtgaacaggattgttacttttaagcctacctctgctgtgacccatcatgtgggtcttttgtttctcccttctgtggtttatgagcctgcccttaccttttccctgcctctgacttggtatttccaggtccgtatttctctgtagcccagggtctggggtagagctgactgctgttcaccctttgaacaactcatggacgtgagggatgggtgctgagcagaaccaagagaggaaactttggcgctgttaaaatggaatttctcatctgccggcattattaagggtgggctaggttggatggaaggtgaaagggatgaactgccttttgctggaagctgtcttaggctgtgagacaggagcaggggaaccacagcctatggggaactgcccttgactccacctatgttggagccttagcccaaggccattccttctgtgatgataaagcccagttctggaattggagccatattaaggaatgattctcttccagcgctgc

SEQ ID NO: 179349 - DNA, 799 bp, Homo sapiens
  Payload ID: 15344
  Gene Symbol: SEC31B
  Gene Name: SEC31 homolog B, COPII coat complex component
  ENST ID: ENST00000480905
  CDS Start-End: 129-386
agcgcccggctccgcgcgagagccctgccagaggagcggctccggccgccgcgcctgacccttgtccggggtcttccgcacagtgggctgagggccatgtcagttttctgccacctacaggatagaccatgaagctgaaggaacttgagcggccagctgtccaggcatggagcccagccagccaataccctttgtatctggccacaggaacatctgcccaacagctagattcctccttcagcacaaatggcacattggaaatatttgaggttgatttcagggacccttctctggacttgaaacacagaggagtcctttctgccttgagcagggcaacctcctggcttcaggggccagcgattctgaaatcttcatttgggatctgaataacttgaatgtgccaatgaccctgggatccaagtcacagcagcctccagaggacatcaaggcactgtcttggaaccggcaagcccaacacattctgtcttctgctcaccccagtggcaaggcagttgtgtgggatctcaggaagaatgaacctatcatcaaagtcagtgatcacagcaacaggatgcactgctcaggcctggcctggcatcctgacatagccacccagttagtgctgtgctcagaggatgatcgacttcccgtgattcagctgtgggacttgcgctttgcctcctcgcccttgaaggtgctggagagccacagcagggggatcttgtcagtgtcatggagccaggctgatgctgagctgctgctcactagtgctaaggacagccagatcttgtgccggaac

SEQ ID NO: 179350 - DNA, 5087 bp, Homo sapiens
  Payload ID: 15344
  Gene Symbol: SEC31B
  Gene Name: SEC31 homolog B, COPII coat complex component
  ENST ID: ENST00000479697
  CDS Start-End: 124-381
ccggctccgcgcgagagccctgccagaggagcggctccggccgccgcgcctgacccttgtccggggtcttccgcacagtgggctgagggccatgtcagttttctgccacctacaggatagaccatgaagctgaaggaacttgagcggccagctgtccaggcatggagcccagccagccaataccctttgtatctggccacaggaacatctgcccaacagctagattcctccttcagcacaaatggcacattggaaatatttgaggttgatttcagggacccttctctggacttgaaacacagaggagtcctttctgccttgagcagggcaacctcctggcttcaggggccagcgattctgaaatcttcatttgggatctgaataacttgaatgtgccaatgaccctgggatccaagtcacagcagcctccagaggacatcaaggcactgtcttggaaccggcaagcccaacacattctgtcttctgctcaccccagtggcaaggcagttgtgtgggatctcaggaagaatgaacctatcatcaaagtcagtgatcacagcaacaggatgcactgctcaggcctggcctggcatcctgacatagccacccagttagtgctgtgctcagaggatgatcgacttcccgtgattcagctgtgggacttgcgctttgcctcctcgcccttgaaggtgctggagagccacagcagggggatcttgtcagtgtcatggagccaggctgatgctgagctgctgctcactagtgctaaggacagccagatcttgtgccggaacctggggagcagtgaggtggtatataagctaccaacacagagcagctggtgctttgatgtgcagtggtgccctcgggacccttcagtgttctctgctgcctccttcaacggctggatcagtttgtactctgtgatgggtaggagctgggaagtccagcatatgagacaggctgacaaggtttgaagggcttggtagagaatgctggagggaaggggctgtctctgtttgtgggagagagacatatggcttgagaagcggagatattggagattgggagaccagggcccggggtttgggagggctgcacctttgccctagtgcccatcttcctgaaaggatgttagtttctgccacaatgtgaagaaggccttcaccttgactcttgttattggatgggccctgtagtatttcagggaccgtgggacccctttgctgggacagttatttcaagagtatgactcttatctttctctcttctatagatccattttgtgccacactccattgtagactttgaatgtagtagtctttccaagagcctacttgcatgggagtcccaccctcgctaccactcacttccccatcccctggaatatgggagtctgacctttctaggtcaaattgggtgtctcaaggattcctcccaaaatggagtttgtaggtggagttcctgactaaactgccactttaggatggcgatgcaggtgtcttttccccccagatctcctcttccttcagcaaaggccagcctctcccaccactgcaggtgccagagcaagtggcacaagcaccactgatacctcccctgaaaaaaccccccaaatggattagaagaccaacaggtgtttcatttgcttttggagggaagctggttacttttggcctccccagcacccctgcccatctggtgccacagccttgcccccgcctagtcttcatcagtcaagtcaccacagaatctgaattcctgatgcgatcagctgagctgcaggaggccttgggatcaggaaatctactgaattactgtcagaacaagagccagcaagctttactgcaaagtgaaaagatgctgtggcagttcctgaaggaggagtactatacctatcaaaggaaatgagcaagtgagagatctgaaggaagaaagcccgccagagacagctcaggtgcaaggagatgagactatacatcaggcaggtgaccttagagcaagactccagaatgaaattcctaaagcttttaggatacagtaaagatgagcttcagaagaaggtggccacatggttgaagagtgacgtggggctaggtgagagtcctcagcccaagggaaatgacctcaacagtgacagacaacaggccttctgcagccaggcctccaaacacaccacaaaggaagcctctgcttcctcagccttctttgatgagctggtccctcagaacatgactccttgggagatccccatcacaaaagatattgatggactcctaagccaggctctcctgcttggggaactgggtccggccgtggagctgtgtctgaaggaggagcgctttgctgatgccattatcctggcccaggctgggggtacagatctgctgaagcaaacacaggagcgctacttggccaagaagaaaaccaaaatctcctcgcttctagcctgtgttgtgcaaaagaattggaaggatgtggtgtgtacctgtagcctgaagaactggagagaggcactggctttgctactgacatactcaggcacagagaaatttcccgagctctgtgacatgctgggaactcgcatggaacaggagggcagcagggcactaacctccgaagccagactctgttatgtgtgctcagggagtgtggagcggctggtggagtgctgggcaaaatgccaccaggctttgtcccccatggctctgcaggacctgatggagaaggtgatggttcttaacaggagcttggagcaactgcggggtcctcatggggtgagcccaggccctgccacaacctacagggtcactcagtatgccaacctcctggcagcccagggcagcctggccactgccatgagctttctacccagggactgtgctcagccaccagttcagcagctaagagatcggctttttcatgctcaaggttctgctgtcttgggccaacagtctccccctttccccttcccccggattgttgtgggagctaccctccactctaaagagacatcatcttacagattgggatcccagccttctcaccaggtcccaactccatctccaaggccaagggttttcacccctcagtcatcaccagcgatgcccttggcaccttcccatcctagcccttatcagggtcccaggacacagaatataagtgactacagggcacctgggccccaggccatccagcctttgcctttgagccctggggtaaggcctgcttcatctcagccacagctattaggagggcaaagggtgcaagttcctaacccggtgggattccctgggacatggcctcttcctggttcccctctacccatggcatgcccaggcatcatgcgacctggctctacctccctgcctgagactcctagactgttccctctgcttcctctgagaccactaggtcccggccgcatggtctcccacaccccagcccctcctgcaagcttccctgtgccataccttccaggggacccaggtgccccatgctctagtgtcctcccaaccactggcatcttgactcctcacccaggacctcaagattcctggaaagaagccccagcccccaggggaaacctccagaggaacaagctgccagagacatttatgcccccagcaccaattactgctccagttatgagcctcacccctgagctacaagggattcttccctcacagccccctgtctccagtgtgagtcatgctcccccaggagttccaggagaactcagcctgcagcttcagcacctgccacctgagaagatggaaaggaaggagctgcccccagagcatcagtccttgaagagcagctttgaggcgcttctccaacgctgctccctgtctgcaactgacttaaagacaaaaaggaagctggaagaggcagcccagcgtctggagtatctatatgagaagctctgtgaggggacactctcacctcatgtcgtggctgggctccatgaggttgcccgatgtgtggatgcaggaagctttgagcagggccttgcagtgcatgcccaggtggcgggctgtagcagcttcagcgaggtgtccagcttcatgcctatcctgaaggctgtcctcatcatcgctcataagctgctggtctaaaccaggcagcctctcttgctaggaggccacttctgctgttacataactcctccctgcagaagaggggacttctgcaacagattctgtttctttttcccgactcttttccttgctgccaggtatgtgatgctgtaggcttggctccaaaccagctgagtgcctgctttttactcctttatgtctggccttctaggatctgtccaagacactctcaggcctggaggcagggcatagaatcagttcttcactctccctaatactacactctgtaaggacctggggcaggatatcttctcccccagggatcttctatttaagtggcttctgagagggtgaacaggattgttacttttaagcctacctctgctgtgacccatcatgtgggtcttttgtttctcccttctgtggtttatgagcctgcccttaccttttccctgcctctgacttggtatttccaggtccgtatttctctgtagcccagggtctggggtagagctgactgctgttcaccctttgaacaactcatggacgtgagggatgggtgctgagcagaaccaagagaggaaactttggcgctgttaaaatggaatttctcatctgccggcattattaagggtgggctaggttggatggaaggtgaaagggatgaactgccttttgctggaagctgtcttaggctgtgagacaggagcaggggaaccacagcctatggggaactgcccttgactccacctatgttggagccttagcccaaggccattccttctgtgatgataaagcccagttctggaattggagccatattaaggaatgattctcttccagcgctgctcctcaagggttgggggtccttctccctcgcagccaccacatgtctcagggctaccttctccgattggatttgcatttgtggcactgtctttgatgcagtgatgtacttaatggtgcaataaagctgcttcgatttgg

SEQ ID NO: 179351 - DNA, 4849 bp, Homo sapiens
  Payload ID: 15344
  Gene Symbol: SEC31B
  Gene Name: SEC31 homolog B, COPII coat complex component
  Uniprot ID: Q9NQW1
  ENST ID: ENST00000462434
  CDS Start-End: 66-1112
gccagaggagcggctccggccgccgcgcctgacccttgtccggggtcttccgcacaggatagaccatgaagctgaaggaacttgagcggccagctgtccaggcatggagcccagccagccaataccctttgtatctggccacaggaacatctgcccaacagctagattcctccttcagcacaaatggcacattggaaatatttgaggttgatttcagggacccttctctggacttgaaacacagaggagtcctttctgccttgagcaggtttcacaagctggtctgggggagctttggcagtgggcttctggaaagctccggggttattgttggcggcggggacaatggcatgcttattctatacaatgtgacccacatcctgtcttcggggaaggagcctgtgattgctcagaaacagaagcacacgggggctgtcagagccctcgacttgaatcctttccagggcaacctcctggcttcaggggccagcgattctgaaatcttcatttgggatctgaataacttgaatgtgccaatgaccctgggatccaagtcacagcctccagaggacatcaaggcactgtcttggaaccggcaagcccaacacattctgtcttctgctcaccccagtggcaaggcagttgtgtgggatctcaggaagaatgaacctatcatcaaagtcagtgatcacagcaacaggatgcactgctcaggcctggcctggcatcctgacatagccacccagttagtgctgtgctcagaggatgatcgacttcccgtgattcagctgtgggacttgcgctttgcctcctcgcccttgaaggtgctggagagccacagcagggggatcttgtcagtgtcatggagccaggctgatgctgagctgctgctcactagtgctaaggacagccagatcttgtgccggaacctggggagcagtgaggtggtatataagctaccaacacagagcagctggtgctttgatgtgcagtggtgccctcgggacccttcagtgttctctgctgcctccttcaacggctggatcagtttgtactctgtgatgggtaggagctgggaagtccagcatatgagacaggctgacaaggtttgaagggcttggtagagaatgctggagggaaggggctgtctctgtttgtgggagagagacatatggcttgagaagcggagatattggagattgggagaccagggcccggggtttgggagggctgcacctttgccctagtgcccatcttcctgaaaggatgttagtttctgccacaatgtgaagaaggccttcaccttgactcttgttattggatgggccctgtagtatttcagggaccgtgggacccctttgctgggacagttatttcaagagtatgactcttatctttctctcttctatagatccattttgtgccacactccattgtagactttgaatgtagtagtctttccaagagcctacttgcatgggagtcccaccctcgctaccactcacttccccatcccctggaatatgggagtctgacctttctaggtcaaattgggtgtctcaaggattcctcccaaaatggagtttgtaggtggagttcctgactaaactgccactttaggatggcgatgcaggtgtcttttccccccagatctcctcttccttcagcaaaggccagcctctcccaccactgcaggtgccagagcaagtggcacaagcaccactgatacctcccctgaaaaaaccccccaaatggattagaagaccaacaggtgtttcatttgcttttggagggaagctggttacttttggcctccccagcacccctgcccatctggtgccacagccttgcccccgcctagtcttcatcagtcaagtcaccacagaatctgaattcctgatgcgatcagctgagctgcaggaggccttgggatcaggaaatctactgaattactgtcagaacaagagccagcaagctttactgcaaagtgaaaagatgctgtggcagttcctgaagcccgccagagacagctcaggtgcaaggagatgagactatacatcaggcaggtgaccttagagcaagactccagaatgaaattcctaaagcttttaggatacagtaaagatgagcttcagaagaaggtggccacatggttgaagagtgacgtggggctaggtgagagtcctcagcccaagggaaatgacctcaacagtgacagacaacaggccttctgcagccaggcctccaaacacaccacaaaggaagcctctgcttcctcagccttctttgatgagctggtccctcagaacatgactccttgggagatccccatcacaaaagatattgatggactcctaagccaggctctcctgcttggggaactgggtccggccgtggagctgtgtctgaaggaggagcgctttgctgatgccattatcctggcccaggctgggggtacagatctgctgaagcaaacacaggagcgctacttggccaagaagaaaaccaaaatctcctcgcttctagcctgtgttgtgcaaaagaattggaaggatgtggtgtgtacctgtagcctgaagaactggagagaggcactggctttgctactgacatactcaggcacagagaaatttcccgagctctgtgacatgctgggaactcgcatggaacaggagggcagcagggcactaacctccgaagccagactctgttatgtgtgctcagggagtgtggagcggctggtggagtgctgggcaaaatgccaccaggctttgtcccccatggctctgcaggacctgatggagaaggtgatggttcttaacaggagcttggagcaactgcggggtcctcatggggtgagcccaggccctgccacaacctacagggtcactcagtatgccaacctcctggcagcccagggcagcctggccactgccatgagctttctacccagggactgtgctcagccaccagttcagcagctaagagatcggctttttcatgctcaaggttctgctgtcttgggccaacagtctccccctttccccttcccccggattgttgtgggagctaccctccactctaaagagacatcatcttacagattgggatcccagccttctcaccaggtcccaactccatctccaaggccaagggttttcacccctcagtcatcaccagcgatgcccttggcaccttcccatcctagcccttatcagggtcccaggacacagaatataagtgactacagggcacctgggccccaggccatccagcctttgcctttgagccctggggtaaggcctggacctcaagattcctggaaagaagccccagcccccaggggaaacctccagaggaacaagctgccagagacatttatgcccccagcaccaattactgctccagttatgagcctcacccctgagctacaagggattcttccctcacagccccctgtctccagtgtgagtcatgctcccccaggagttccaggagaactcagcctgcagcttcagcacctgccacctgagaagatggaaaggaaggagctgcccccagagcatcagtccttgaagagcagctttgaggcgcttctccaacgctgctccctgtctgcaactgacttaaagacaaaaaggaagctggaagaggcagcccagcgtctggagtatctatatgagaagctctgtgaggggacactctcacctcatgtcgtggctgggctccatgaggttgcccgatgtgtggatgcaggaagctttgagcagggccttgcagtgcatgcccaggtggcgggctgtagcagcttcagcgaggtgtccagcttcatgcctatcctgaaggctgtcctcatcatcgctcataagctgctggtctaaaccaggcagcctctcttgctaggaggccacttctgctgttacataactcctccctgcagaagaggggacttctgcaacagattctgtttctttttcccgactcttttccttgctgccaggtatgtgatgctgtaggcttggctccaaaccagctgagtgcctgctttttactcctttatgtctggccttctaggatctgtccaagacactctcaggcctggaggcagggcatagaatcagttcttcactctccctaatactacactctgtaaggacctggggcaggatatcttctcccccagggatcttctatttaagtggcttctgagagggtgaacaggattgttacttttaagcctacctctgctgtgacccatcatgtgggtcttttgtttctcccttctgtggtttatgagcctgcccttaccttttccctgcctctgacttggtatttccaggtccgtatttctctgtagcccagggtctggggtagagctgactgctgttcaccctttgaacaactcatggacgtgagggatgggtgctgagcagaaccaagagaggaaactttggcgctgttaaaatggaatttctcatctgccggcattattaagggtgggctaggttggatggaaggtgaaagggatgaactgccttttgctggaagctgtcttaggctgtgagacaggagcaggggaaccacagcctatggggaactgcccttgactccacctatgttggagccttagcccaaggccattccttctgtgatgataaagcccagttctggaattggagccatattaaggaatgattctcttccagcgctgctcctcaagggttgggggtccttctccctcgcagccaccacatgtctcagggctaccttctccgattggatttgcatttgtggcactgtctttgatgcagtgatgtacttaatggtgcaataaagctgcttcgatttg

SEQ ID NO: 179352 - DNA, 3635 bp, Homo sapiens
  Payload ID: 15345
  Gene Symbol: SEC61A1
  Gene Name: Sec61 translocon alpha 1 subunit
  Uniprot ID: P61619
  ENST ID: ENST00000243253
  CDS Start-End: 185-1615
agcgatccgaggcccggccccggccccgccccgcgccgcgccgcgccgcttgccgccgggctagcactgacgtgtctctcggcggagctgctgtgcagtggaacgcgctgggccgcgggcagcgtcgcctcacgcggagcagagctgagctgaagcgggacccggagcccgagcagccgccgccatggcaatcaaatttctggaagtcatcaagcccttctgtgtcatcctgccggaaattcagaagccagagaggaagattcagtttaaggagaaagtgctgtggaccgctatcaccctctttatcttcttagtgtgctgccagattcccctgtttgggatcatgtcttcagattcagctgaccctttctattggatgagagtgattctagcctctaacagaggcacattgatggagctagggatctctcctattgtcacgtctggccttataatgcaactcttggctggcgccaagataattgaagttggtgacaccccaaaagaccgagctctcttcaacggagcccaaaagttatttggcatgatcattactatcggccagtctatcgtgtatgtgatgaccgggatgtatggggacccttctgaaatgggtgctggaatttgcctgctaatcaccattcagctctttgttgctggcttaattgtcctacttttggatgaactcctgcaaaaaggatatggccttggctctggtatttctctcttcattgcaactaacatctgtgaaaccatcgtatggaaggcattcagccccactactgtcaacactggccgaggaatggaatttgaaggtgctatcatcgcacttttccatctgctggccacacgcacagacaaggtccgagcccttcgggaggcgttctaccgccagaatcttcccaacctcatgaatctcatcgccaccatctttgtctttgcagtggtcatctatttccagggcttccgagtggacctgccaatcaagtcggcccgctaccgtggccagtacaacacctatcccatcaagctcttctatacgtccaacatccccatcatcctgcagtctgccctggtgtccaacctttatgtcatctcccaaatgctctcagctcgcttcagtggcaacttgctggtcagcctgctgggcacctggtcggacacgtcttctgggggcccagcacgtgcttatccagttggtggcctttgctattacctgtcccctccagaatcttttggctccgtgttagaagacccggtccatgcagttgtatacatagtgttcatgctgggctcctgtgcattcttctccaaaacgtggattgaggtctcaggttcctctgccaaagatgttgcaaagcagctgaaggagcagcagatggtgatgagaggccaccgagagacctccatggtccatgaactcaaccggtacatccccacagccgcggcctttggtgggctgtgcatcggggccctctcggtcctggctgacttcctaggcgccattgggtctggaaccgggatcctgctcgcagtcacaatcatctaccagtactttgagatcttcgttaaggagcaaagcgaggttggcagcatgggggccctgctcttctgagcccgtctcccggacaggttgaggaagctgctccagaagcgcctcggaaggggagctctcatcatggcgcgtgctgctgcggcatatggacttttaataatgtttttgaatttcgtattctttcattccactgtgtaaagtgctagacattttccaatttaaaattttgctttttatcctggcactggcaaaaagaactgtgaaagtgaaattttattcagccgactgccagagaagtgggaatggtataggattgtccccaagtgtccatgtaacttttgttttaacctttgcaccttctcagtgctgtatgcggctgcagccgtctcacctgtttccccacaaagggaatttctcactctggttggaagcacaaacactgaaatgtctacgtttcattttggcagtagggtgtgaagctgggagcagatcatgtatttcccggagacgtgggaccttgctggcatgtctccttcacaatcaggcgtgggaatatctggcttaggactgtttctctctaagacaccattgttttcccttattttaaaagtgatttttttaaggacagaacttcttccaaaagagagggatggctttcccagaagacactcctggccatctgtggatttgtctgtgcacctattggctcttctagctgactcttctggttgggcttagagtctgcctgtttctgctagctccgtgtttagtccacttgggtcatcagctctgccaagctgagcctggccaagctaggtggacagacccttgcagtgatgtccgtttgtccagattctgccagtcatcactggacacgtctcctcgcagctgccctagcaaggggagacattgtggtagctatcagacatggacagaaactgacttagtgctcacaagcccctacaccttctgggctgaagatcacccagctgtgttcagaattttcttactgtgcttaggactgcacgcaagtgagcagacaccaccgacttcctttctgcgtcaccagtgtcgtcagcagagagaggacagcacaggctcaaggttggtagtgaagtcaggttcggggtgcatgggctgtggtggtgttgatcagttgctccagtgtttgaaataagaagactcatgtttatgtctggaataagttctgtttgtgctgacaggtggcctaggtcctggagatgagcaccctctctctggcctttagggagtcccctcttaggacaggcactgcccagcagcaagggcagcagagttgggtgctaagatcctgaggagctcgaggtttcgagctggctttagacattggtgggaccaaggatgttttgcaggatgccctgatcctaagaagggggcctgggggtgcgtgcagcctgtcggggagaccccactctgacagtgggcacacggcagcctgcaaagcacagggccaccgccacagcccggcagaggggcacactctggagaccttgctggcagtgctagccaggaaacagagtgaccaagggacaagaagggacttgcctaaagccacccagcaactcagcagcagaaccaagatgggccccaggctcctccatatggcccagggcttaccaccctatcacacgtggccttgtctagacccagtcctgagcaggggagaggctcttgagacctgatgccctcctacccacatggttctcccactgccctgtctgctctgctgctacagaggggcagggcctcccccagcccacgcttaggaatgcttggcctctggcaggcaggcagctgtacccaagctggtgggcagggggctggaaggcaccaggcctcaggaggagccccatagtcccgcctgcagcctgtaaccatcggctgggccctgcaaggcccacactcacgccctgtgggtgatggtcacggtgggtgggtgggggctgaccccagcttccaggggactgtcactgtggacgccaaaatggcataactgagataaggtgaataagtgacaaataaagccagttttttacaaggt

SEQ ID NO: 179353 - DNA, 3238 bp, Homo sapiens
  Payload ID: 15345
  Gene Symbol: SEC61A1
  Gene Name: Sec61 translocon alpha 1 subunit
  Uniprot ID: P61619
  ENST ID: ENST00000424880
  CDS Start-End: 153-1223
agaaggcgtccctgggtagcgcggaaggttacttctctgtgtcccaactcttcctgttttgtttctcccatcaaagtcaaatttctggaagtcatcaagcccttctgtgtcatcctgccggaaattcagaagccagagaggaagtatttggcatgatcattactatcggccagtctatcgtgtatgtgatgaccgggatgtatggggacccttctgaaatgggtgctggaatttgcctgctaatcaccattcagctctttgttgctggcttaattgtcctacttttggatgaactcctgcaaaaaggatatggccttggctctggtatttctctcttcattgcaactaacatctgtgaaaccatcgtatggaaggcattcagccccactactgtcaacactggccgaggaatggaatttgaaggtgctatcatcgcacttttccatctgctggccacacgcacagacaaggtccgagcccttcgggaggcgttctaccgccagaatcttcccaacctcatgaatctcatcgccaccatctttgtctttgcagtggtcatctatttccagggcttccgagtggacctgccaatcaagtcggcccgctaccgtggccagtacaacacctatcccatcaagctcttctatacgtccaacatccccatcatcctgcagtctgccctggtgtccaacctttatgtcatctcccaaatgctctcagctcgcttcagtggcaacttgctggtcagcctgctgggcacctggtcggacacgtcttctgggggcccagcacgtgcttatccagttggtggcctttgctattacctgtcccctccagaatcttttggctccgtgttagaagacccggtccatgcagttgtatacatagtgttcatgctgggctcctgtgcattcttctccaaaacgtggattgaggtctcaggttcctctgccaaagatgttgcaaagcagctgaaggagcagcagatggtgatgagaggccaccgagagacctccatggtccatgaactcaaccggtacatccccacagccgcggcctttggtgggctgtgcatcggggccctctcggtcctggctgacttcctaggcgccattgggtctggaaccgggatcctgctcgcagtcacaatcatctaccagtactttgagatcttcgttaaggagcaaagcgaggttggcagcatgggggccctgctcttctgagcccgtctcccggacaggttgaggaagctgctccagaagcgcctcggaaggggagctctcatcatggcgcgtgctgctgcggcatatggacttttaataatgtttttgaatttcgtattctttcattccactgtgtaaagtgctagacattttccaatttaaaattttgctttttatcctggcactggcaaaaagaactgtgaaagtgaaattttattcagccgactgccagagaagtgggaatggtataggattgtccccaagtgtccatgtaacttttgttttaacctttgcaccttctcagtgctgtatgcggctgcagccgtctcacctgtttccccacaaagggaatttctcactctggttggaagcacaaacactgaaatgtctacgtttcattttggcagtagggtgtgaagctgggagcagatcatgtatttcccggagacgtgggaccttgctggcatgtctccttcacaatcaggcgtgggaatatctggcttaggactgtttctctctaagacaccattgttttcccttattttaaaagtgatttttttaaggacagaacttcttccaaaagagagggatggctttcccagaagacactcctggccatctgtggatttgtctgtgcacctattggctcttctagctgactcttctggttgggcttagagtctgcctgtttctgctagctccgtgtttagtccacttgggtcatcagctctgccaagctgagcctggccaagctaggtggacagacccttgcagtgatgtccgtttgtccagattctgccagtcatcactggacacgtctcctcgcagctgccctagcaaggggagacattgtggtagctatcagacatggacagaaactgacttagtgctcacaagcccctacaccttctgggctgaagatcacccagctgtgttcagaattttcttactgtgcttaggactgcacgcaagtgagcagacaccaccgacttcctttctgcgtcaccagtgtcgtcagcagagagaggacagcacaggctcaaggttggtagtgaagtcaggttcggggtgcatgggctgtggtggtgttgatcagttgctccagtgtttgaaataagaagactcatgtttatgtctggaataagttctgtttgtgctgacaggtggcctaggtcctggagatgagcaccctctctctggcctttagggagtcccctcttaggacaggcactgcccagcagcaagggcagcagagttgggtgctaagatcctgaggagctcgaggtttcgagctggctttagacattggtgggaccaaggatgttttgcaggatgccctgatcctaagaagggggcctgggggtgcgtgcagcctgtcggggagaccccactctgacagtgggcacacggcagcctgcaaagcacagggccaccgccacagcccggcagaggggcacactctggagaccttgctggcagtgctagccaggaaacagagtgaccaagggacaagaagggacttgcctaaagccacccagcaactcagcagcagaaccaagatgggccccaggctcctccatatggcccagggcttaccaccctatcacacgtggccttgtctagacccagtcctgagcaggggagaggctcttgagacctgatgccctcctacccacatggttctcccactgccctgtctgctctgctgctacagaggggcagggcctcccccagcccacgcttaggaatgcttggcctctggcaggcaggcagctgtacccaagctggtgggcagggggctggaaggcaccaggcctcaggaggagccccatagtcccgcctgcagcctgtaaccatcggctgggccctgcaaggcccacactcacgccctgtgggtgatggtcacggtgggtgggtgggggctgaccccagcttccaggggactgtcactgtggacgccaaaatggcataactgagataaggtgaataagtgacaaataaagccagttttttac

SEQ ID NO: 179354 - DNA, 1871 bp, Homo sapiens
  Payload ID: 15345
  Gene Symbol: SEC61A1
  Gene Name: Sec61 translocon alpha 1 subunit
  ENST ID: ENST00000464451
  CDS Start-End: 246-1694
aatcacaccgccatgctttgcccacaacagtctcctcaacctgttccctcattccttctcgccagaatctatcaaggctcggcacaaaggtactctcccaggaggccttcctgaattcttctgtgaggcagactacttcccgagctgccccggcccttctccggccaagtctctccagaaactcatcccattcgttctcagatggaaggggacccacacccacgacaagcctccgggtttgcttaatgactcagacagcgagggtgctcgtcaaatttctggaagtcatcaagcccttctgtgtcatcctgccggaaattcagaagccagagaggaagattcagtttaaggagaaagtgctgtggaccgctatcaccctctttatcttcttagtgtgctgccagattcccctgtttgggatcatgtcttcagattcagctgaccctttctattggatgagagtgattctagcctctaacagaggcacattgatggagctagggatctctcctattgtcacgtctggccttataatgcaactcttggctggcgccaagataattgaagttggtgacaccccaaaagaccgagctctcttcaacggagcccaaaagttatttggcatgatcattactatcggccagtctatcgtgtatgtgatgaccgggatgtatggggacccttctgaaatgggtgctggaatttgcctgctaatcaccattcagctctttgttgctggcttaattgtcctacttttggatgaactcctgcaaaaaggatatggccttggctctggtatttctctcttcattgcaactaacatctgtgaaaccatcgtatggaaggcattcagccccactactgtcaacactggccgaggaatggaatttgaaggtgctatcatcgcacttttccatctgctggccacacgcacagacaaggtccgagcccttcgggaggcgttctaccgccagaatcttcccaacctcatgaatctcatcgccaccatctttgtctttgcagtggtcatctatttccagggcttccgagtggacctgccaatcaagtcggcccgctaccgtggccagtacaacacctatcccatcaagctcttctatacgtccaacatccccatcatcctgcagtctgccctggtgtccaacctttatgtcatctcccaaatgctctcagctcgcttcagtggcaacttgctggtcagcctgctgggcacctggtcggacacgtcttctgggggcccagcacgtgcttatccagttggtggcctttgctattacctgtcccctccagaatcttttggctccgtgttagaagacccggtccatgcagttgtatacatagtgttcatgctgggctcctgtgcattcttctccaaaacgtggattgaggtctcaggttcctctgccaaagatgttgcaaagcagctgaaggagcagcagatggtgatgagaggccaccgagagacctccatggtccatgaactcaaccggtacatccccacagccgcggcctttggtgggctgtgcatcggggccctctcggtcctggctgacttcctaggcgccattgggtctggaaccgggatcctgctcgcagtcacaatcatctaccagtactttgagatcttcgttaaggagcaaagcgaggttggcagcatgggggccctgctcttctgagcccgtctcccggacaggttgaggaagctgctccagaagcgcctcggaaggggagctctcatcatggcgcgtgctgctgcggcatatggacttttaataatgtttttgaatttcgtattctttcattccactgtgtaaagtgctagacattttccaatttaaaattttgctttttat

SEQ ID NO: 179355 - DNA, 521 bp, Homo sapiens
  Payload ID: 15345
  Gene Symbol: SEC61A1
  Gene Name: Sec61 translocon alpha 1 subunit
  ENST ID: ENST00000481210
  CDS Start-End: 219-521
gggctagcactgacgtgtctctcggcggagctgctgtgcagtggaacgcgctgggccgcgggcagcgtcgcctcacgcggagcagagctgagctgaagcgggacccggagcccgagcagccgccgccatggcaaattcagtttaaggagaaagtgctgtggaccgctatcaccctctttatcttcttagtgtgctgccagattcccctgtttgggatcatgtcttcagattcagctgaccctttctattggatgagagtgattctagcctctaacagaggcacattgatggagctagggatctctcctattgtcacgtctggccttataatgcaactcttggctggcgccaagataattgaagttggtgacaccccaaaagaccgagctctcttcaacggagcccaaaagttatttggcatgatcattactatcggccagtctatcgtgtatgtgatgaccgggatgtatggggacccttctgaaatgggtgctggaatttgcctgctaatcaccattcag

SEQ ID NO: 179356 - DNA, 1893 bp, Homo sapiens
  Payload ID: 15346
  Gene Symbol: SEC61A2
  Gene Name: Sec61 translocon alpha 2 subunit
  Uniprot ID: Q9H9S3
  ENST ID: ENST00000298428
  CDS Start-End: 90-1520
gggagccggtaccgaggcccgagccgcgggagtcgagcgaaggcagcgccgaggccgcggtttccccctgggcctccccagcagcagccatgggcatcaaatttttagaagttatcaaaccattctgtgcagttctaccagaaattcagaaaccggaaaggaaaatccagtttagagagaaggttctgtggactgctataacgctcttcattttcttagtgtgttgtcagatcccactgtttggaatcatgtcatcagattctgcagatcctttctactggatgagagttattctggcttccaatagaggaactttaatggaattgggtatctccccaattgtaacatctggtttgattatgcagttgttagctggagccaaaatcattgaagttggagatacaccgaaagatagagctttattcaatggagcccagaaactgtttggtatgatcattaccattgggcaagccattgtgtatgtcatgacggggatgtatggggaccctgcagaaatgggtgccggaatctgtctcctgatcatcattcagttgtttgttgctggtttgattgtgctgctgttagatgagctgctacagaagggttacggcttggggtctgggatttccctctttattgccaccaacatctgtgagaccattgtctggaaggcctttagtcccactaccattaacactggcagaggtactgagtttgagggtgcagtcatagctctgttccatttgttggccaccaggacggacaaagtccgagctttacgggaggctttttatcggcagaacttacccaatctcatgaacctcattgctacagtttttgtgtttgctgttgttatatatttccaaggatttcgcgttgatctgcccattaagtcggcccgttaccgaggacagtacagcagctaccccatcaaactcttctacacctccaacatccccatcatcctccagtcggccctggtgtccaacctgtatgttatttcccagatgctgtctgttcgatttagtggcaactttttagtaaatttactaggacagtgggccgatgtcagtgggggaggacccgcacgttcttacccagttggaggcctttgttactatctttctcctcctgagtccatgggcgccatctttgaggatcctgtccatgtcgttgtttatatcatcttcatgttggggtcatgtgcattcttctctaagacatggattgaagtgtctggttcctcagccaaagatgtagctaaacagctgaaagaacagcagatggtaatgaggggccaccgagatacctctatggttcatgagcttaataggtacatccccaccgcagctgcgtttggcggtttgtgcattggcgccctgtcagtgctggctgacttcctgggggccattggatctggcactggaattctgctagcagtcactattatttaccagtattttgaaatatttgttaaagaacaggccgaagttggtgggatgggtgctttgtttttctaaatgttcaaatatttcattttgtgcgtgtgaaagggaaaacactttgacggatcgtttttgtcagatgacactggtggctccccttttctcccctcacagtttcttgtttcgagtgctgactgacccgtttctgaaatgggcaccgagctaagtctgtgtgcagcattagtacccgctgccttaaaactcaagtttacattattcattaaaaaaagtacatctagtgttgcctgtaatgctggaaaccagtgtatctaccttgctgtgttaaatcatgacagtgagacggtgagatggattcgttttgcacacaacattcaaaacacttcatattgcccccacttgttgaaaaataaatgtagttcaaattgcc

SEQ ID NO: 179357 - DNA, 2030 bp, Homo sapiens
  Payload ID: 15346
  Gene Symbol: SEC61A2
  Gene Name: Sec61 translocon alpha 2 subunit
  Uniprot ID: Q9H9S3
  ENST ID: ENST00000304267
  CDS Start-End: 88-1401
gagccggtaccgaggcccgagccgcgggagtcgagcgaaggcagcgccgaggccgcggtttccccctgggcctccccagcagcagccatgggcatcaaatttttagaagttatcaaaccattctgtgcagttctaccagaaattcagaaaccggaaaggaaaatccagtttagagagaaggttctgtggactgctataacgctcttcattttcttagtgtgttgtcagatcccactgtttggaatcatgtcatcagattctgcagatcctttctactggatgagagttattctggcttccaatagaggaactttaatggaattgggtatctccccaattgtaacatctggtttgattatgcagttgttagctggagccaaaatcattgaagttggagatacaccgaaagatagagctttattcaatggagcccagaaactgtttggtatgatcattaccattgggcaagccattgtgtatgtcatgacggggatgtatggggaccctgcagaaatgggtgccggaatctgtctcctgatcatcattcagttgtttgttgctggtttgattgtgctgctgttagatgagctgctacagaagggttacggcttggggtctgggatttccctctttattgccaccaacatctgtgagaccattgtctggaaggcctttagtcccactaccattaacactggcagaggtactgagtttgagggtgcagtcatagctctgttccatttgttggccaccaggacggacaaagtccgagctttacgggaggctttttatcggcagaacttacccaatctcatgaacctcattgctacagtttttgtgtttgctgttgttatatatttccaaggatttcgcgttgatctgcccattaagtcggcccgttaccgaggacagtacagcagctaccccatcaaactcttctacacctccaacatccccatcatcctccagtcggccctggtgtccaacctgtatgttatttcccagatgctgtctgttcgatttagtggcaactttttagtaaatttactaggacagtgggccgatgtcagtgggggaggacccgcacgttcttacccagttggaggcctttgttactatctttctcctcctgagtccatgggcgccatctttgaggatcctgtccatgtcgttgtttatatcatcttcatgttggggtcatgtgcattcttctctaagacatggattgaagtgtctggttcctcagccaaagatgtagctaaacagctgaaagaacagcagatggtaatgaggggccaccgagatacctctatggttcatgagcttaatagaccaaaagtgaagttaagaaggtggaagggagaaggaagacattttacaaaaaggatactcttctactaaaagataaccccgcacggcatttcacacttgcctacgtcaccctgctttccacgcacctcctcagagggaggggctgttattgttcctgttttatgaaaaaagccgagagaggctacagaacctgtttgatgtgatagctaattatggtccgcggagcctcaaaccgagtcgggcctgtgactccgagctgcgctgcctcgtattgattgtcatgcctttctccaaatacgcaccagataaactattgtatctattcagtatgattgttctaactctggctttgagctgtcgaggtggcttctaccttaggtctagtttttggaaaggtgaagcaggagtggaagctctctaagggatacgaaatctgattttatccaaagaaatcacagcagcctttgaaagacacattcagattttcaaacaaacaacagacaattcaaaaccaggcgctctgcttattcactgaaaccgtaagctgctgaaactcagggaaaagcttaagaaactggtcttaaagcttcaggccaaacaatgcttcaaatcacatttgaagtaatcacttaaaaacagtagaaaaatcagttatcaattacctaaaacacttatacccaataaaatattcccatgat

SEQ ID NO: 179358 - DNA, 600 bp, Homo sapiens
  Payload ID: 15346
  Gene Symbol: SEC61A2
  Gene Name: Sec61 translocon alpha 2 subunit
  ENST ID: ENST00000379017
  CDS Start-End: 56-562
gagcgaaggcagcgccgaggccgcggtttccccctgggcctccccagcagcagccatgggcatcaaatttttagaagttatcaaaccattctgtgcagttctaccagaaattcagaaaccggaaaggaaaatccagtttagagagaaggttctgtggactgctataacgctcttcattttcttagtgtgttgtcagatcccactgtttggaatcatgtcatcagattctgcagatcctttctactggatgagagttattctggcttccaatagaggaactttaatggaattgggtatctccccaattgtaacatctggtttgattatgcagttgttagctggagccaaaatcattgaagttggagatacaccgaaagatagagctttattcaatggagcccagaaactgtttggtatgatcattaccattgggcaagccattgtgtatgtcatgacggggatgtatggggaccctgcagaaatgggtgccggaatctgtctcctgatcatcattcaggcgttactaacattgaaaatatgtggatacactgaagagctatgattggatcagtgtgtttcacccagaaacataggttttga

SEQ ID NO: 179359 - DNA, 2252 bp, Homo sapiens
  Payload ID: 15346
  Gene Symbol: SEC61A2
  Gene Name: Sec61 translocon alpha 2 subunit
  ENST ID: ENST00000379020
  CDS Start-End: 62-1294
ggagtcgagcgaaggcagcgccgaggccgcggtttccccctgggcctccccagcagcagccatgggcatcaaatttttagaagttatcaaaccattctgtgcagttctaccagaaattcagaaaccggaaaggaaaatccagtttagagagaaggttctgtggactgctataacgctcttcattttcttagtgtgttgtcagatcccactgtttggaatcatgtcatcagattctgcagatcctttctactggatgagagttattctggcttccaatagaggaactttaatggaattgggtatctccccaattgtaacatctggtttgattatgcagttgttagctggagccaaaatcattgaagttggagatacaccgaaagatagagctttattcaatggagcccagaaactgtttggtatgatcattaccattgggcaagccattgtgtatgtcatgacggggatgtatggggaccctgcagaaatgggtgccggaatctgtctcctgatcatcattcagttgtttgttgctggtttgattgtgctgctgttagatgagctgctacagaagggttacggcttggggtctgggatttccctctttattgccaccaacatctgtgagaccattgtctggaaggcctttagtcccactaccattaacactggcagaggtactgagtttgagggtgcagtcatagctctgttccatttgttggccaccaggacggacaaagtccgagctttacgggaggctttttatcggcagaacttacccaatctcatgaacctcattgctacagtttttgtgtttgctgttgttatatatttccaagatgtcagtgggggaggacccgcacgttcttacccagttggaggcctttgttactatctttctcctcctgagtccatgggcgccatctttgaggatcctgtccatgtcgttgtttatatcatcttcatgttggggtcatgtgcattcttctctaagacatggattgaagtgtctggttcctcagccaaagatgtagctaaacagctgaaagaacagcagatggtaatgaggggccaccgagatacctctatggttcatgagcttaataggtacatccccaccgcagctgcgtttggcggtttgtgcattggcgccctgtcagtgctggctgacttcctgggggccattggatctggcactggaattctgctagcagtcactattatttaccagtattttgaaatatttgttaaagaacaggccgaagttggtgggatgggtgctttgtttttctaaatgttcaaatatttcattttgtgcgtgtgaaagggaaaacactttgacggatcgtttttgtcagatgacactggtggctccccttttctcccctcacagtttcttgtttcgagtgctgactgacccgtttctgaaatgggcaccgagctaagtctgtgtgcagcattagtacccgctgccttaaaactcaagtttacattattcattaaaaaaagtacatctagtgttgcctgtaatgctggaaaccagtgtatctaccttgctgtgttaaatcatgacagtgagacggtgagatggattcgttttgcacacaacattcaaaacacttcatattgcccccacttgttgaaaaataaatgtagttcaaattgccactttccagtatttttgagcttatttaatgagttctggaacatttatatctaatctatattttagataattactttttatacttttttaactcatggtatccccactccccacccccacctcatttttatttgtcccttctcaaagcagccacttagcccacatgggcgaaatcaagtctccagttatttctgccacaactgcttctaaggcctcctccttctcctcctcctcttcctcttcctccttttccttctcctcctcctctcttcccagtgacagcatcatcgtgctgtttgcctgtattggctatgccttctaactccaaccagtcacttgagaatattctttcaagattctgggccccgattcttttctgtttaaatccctaaagcaaagatctaattctcaagcaatgtctgtagttcagtgggggtgaacaatgaatatattcatgctaggaatttgtgtctgttgttgtactcacagcagcaacatgagtgtaaacagtagacaataaacttttatttaagaaaactgattcagttgtgttggaaaaaataaagaaatctgatattaaacgttt

SEQ ID NO: 179360 - DNA, 2462 bp, Homo sapiens
  Payload ID: 15346
  Gene Symbol: SEC61A2
  Gene Name: Sec61 translocon alpha 2 subunit
  Uniprot ID: Q9H9S3
  ENST ID: ENST00000379033
  CDS Start-End: 148-1512
aagggcggagtctgcgcggggttgggcggagcctgcgcggggccggtaggatcgcgtcgggagccggtaccgaggcccgagccgcgggagtcgagcgaaggcagcgccgaggccgcggtttccccctgggcctccccagcagcagccatgggcatcaaatttttagaagttatcaaaccattctgtgcagttctaccagaaattcagaaaccggaaaggaaaatcccactgtttggaatcatgtcatcagattctgcagatcctttctactggatgagagttattctggcttccaatagaggaactttaatggaattgggtatctccccaattgtaacatctggtttgattatgcagttgttagctggagccaaaatcattgaagttggagatacaccgaaagatagagctttattcaatggagcccagaaactgtttggtatgatcattaccattgggcaagccattgtgtatgtcatgacggggatgtatggggaccctgcagaaatgggtgccggaatctgtctcctgatcatcattcagttgtttgttgctggtttgattgtgctgctgttagatgagctgctacagaagggttacggcttggggtctgggatttccctctttattgccaccaacatctgtgagaccattgtctggaaggcctttagtcccactaccattaacactggcagaggtactgagtttgagggtgcagtcatagctctgttccatttgttggccaccaggacggacaaagtccgagctttacgggaggctttttatcggcagaacttacccaatctcatgaacctcattgctacagtttttgtgtttgctgttgttatatatttccaaggatttcgcgttgatctgcccattaagtcggcccgttaccgaggacagtacagcagctaccccatcaaactcttctacacctccaacatccccatcatcctccagtcggccctggtgtccaacctgtatgttatttcccagatgctgtctgttcgatttagtggcaactttttagtaaatttactaggacagtgggccgatgtcagtgggggaggacccgcacgttcttacccagttggaggcctttgttactatctttctcctcctgagtccatgggcgccatctttgaggatcctgtccatgtcgttgtttatatcatcttcatgttggggtcatgtgcattcttctctaagacatggattgaagtgtctggttcctcagccaaagatgtagctaaacagctgaaagaacagcagatggtaatgaggggccaccgagatacctctatggttcatgagcttaataggtacatccccaccgcagctgcgtttggcggtttgtgcattggcgccctgtcagtgctggctgacttcctgggggccattggatctggcactggaattctgctagcagtcactattatttaccagtattttgaaatatttgttaaagaacaggccgaagttggtgggatgggtgctttgtttttctaaatgttcaaatatttcattttgtgcgtgtgaaagggaaaacactttgacggatcgtttttgtcagatgacactggtggctccccttttctcccctcacagtttcttgtttcgagtgctgactgacccgtttctgaaatgggcaccgagctaagtctgtgtgcagcattagtacccgctgccttaaaactcaagtttacattattcattaaaaaaagtacatctagtgttgcctgtaatgctggaaaccagtgtatctaccttgctgtgttaaatcatgacagtgagacggtgagatggattcgttttgcacacaacattcaaaacacttcatattgcccccacttgttgaaaaataaatgtagttcaaattgccactttccagtatttttgagcttatttaatgagttctggaacatttatatctaatctatattttagataattactttttatacttttttaactcatggtatccccactccccacccccacctcatttttatttgtcccttctcaaagcagccacttagcccacatgggcgaaatcaagtctccagttatttctgccacaactgcttctaaggcctcctccttctcctcctcctcttcctcttcctccttttccttctcctcctcctctcttcccagtgacagcatcatcgtgctgtttgcctgtattggctatgccttctaactccaaccagtcacttgagaatattctttcaagattctgggccccgattcttttctgtttaaatccctaaagcaaagatctaattctcaagcaatgtctgtagttcagtgggggtgaacaatgaatatattcatgctaggaatttgtgtctgttgttgtactcacagcagcaacatgagtgtaaacagtagacaataaacttttatttaagaaaactgattcagttgtgttggaaaaaataaagaaatctgatatt

SEQ ID NO: 179361 - DNA, 707 bp, Homo sapiens
  Payload ID: 15346
  Gene Symbol: SEC61A2
  Gene Name: Sec61 translocon alpha 2 subunit
  ENST ID: ENST00000379051
  CDS Start-End: 152-631
ggcgaagggcggagtctgcgcggggttgggcggagcctgcgcggggccggtaggatcgcgtcgggagccggtaccgaggcccgagccgcgggagtcgagcgaaggcagcgccgaggccgcggtttccccctgggcctccccagcagcagccatgggcatcaaatttttagaagttatcaaaccattctgtgcagttctaccagaaattcagaaaccggaaaggaaaatccagtttagagagaaggttctgtggactgctataacgctcttcattttcttagtgtgttgtcagatcccactgtttggaatcatgtcatcagattctgcagatcctttctactggatgagagttattctggcttccaatagaggaactttaatggaattgggtatctccccaattgtaacatctggtttgattatgcagttgttagctggagccaaaatcattgaagttggagatacaccgaaagatagagctttattcaatggagcccagaaactgtttggtatgatcattaccattgggcaagccattgtgtatgtcatgacggggatgtatggggaccctgcagaaatgggtgccggaatctgtctcctgatcatcattcaggatcaacacagcccttagacttatcctttgatggcagtgtacatttccatcttgctattataccagaattcatctgactttttacttccttgga

SEQ ID NO: 179362 - DNA, 434 bp, Homo sapiens
  Payload ID: 15346
  Gene Symbol: SEC61A2
  Gene Name: Sec61 translocon alpha 2 subunit
  ENST ID: ENST00000418772
  CDS Start-End: 1-434
atcagattctgcagatcctttctactggatgagagttattctggcttccaatagaggaactttaatggaattgggtatctccccaattgtaacatctggtttgattatgcagttgttagctggagccaaaatcattgaagttggagatacaccgaaagatagagctttattcaatggagcccagaaactgtttggtatgatcattaccattgggcaagccattgtgtatgtcatgacggggatgtatggggaccctgcagaaatgggtgccggaatctgtctcctgatcatcattcagggatttcgcgttgatctgcccattaagtcggcccgttaccgaggacagtacagcagctaccccatcaaactcttctacacctccaacatccccatcatcctccagtcggccctggtgtccaacctgtatgttattt

SEQ ID NO: 179363 - DNA, 314 bp, Homo sapiens
  Payload ID: 15346
  Gene Symbol: SEC61A2
  Gene Name: Sec61 translocon alpha 2 subunit
  ENST ID: ENST00000457034
  CDS Start-End: 1-284
agtttagagagaaggttctgtggactgctataacgctcttcattttcttagtgtgttgtcagatcccactgtttggaatcatgtcatcagattctgcagatcctttctactggatgagagttattctggcttccaatagaggaactttaatggaattgggtatctccccaattgtaacatctggtttgattatgcagttgttagctggagccaaaatcattgaagttggagatacaccgaaagatagagctttattcaatggagcccagaaacgtgagcattaatgcaattaaagagcattctccaaatttgag

SEQ ID NO: 179364 - DNA, 778 bp, Homo sapiens
  Payload ID: 15346
  Gene Symbol: SEC61A2
  Gene Name: Sec61 translocon alpha 2 subunit
  ENST ID: ENST00000419021
  CDS Start-End: 1-685
tggtatgatcattaccattgggcaagccattgtgtatgtcatgacggggatgtatggggaccctgcagaaatgggtgccggaatctgtctcctgatcatcattcagttgtttgttgctggtttgattgtgctgctgttagatgagctgctacagaagggttacggcttggggtctgggatttccctctttattgccaccaacatctgtgagaccattgtctggaaggcctttagtcccactaccattaacactggcagaggtactgagtttgagggtgcagtcatagctctgttccatttgttggccaccaggacggacaaagtccgagctttacgggaggctttttatcggcagaacttacccaatctcatgaacctcattgctacagtttttgtgtttgctgttgttatatatttccaagtagctaaacagctgaaagaacagcagatggtaatgaggggccaccgagatacctctatggttcatgagcttaataggtacatccccaccgcagctgcgtttggcggtttgtgcattggcgccctgtcagtgctggctgacttcctgggggccattggatctggcactggaattctgctagcagtcactattatttaccagtattttgaaatatttgttaaagaacaggccgaagttggtgggatgggtgctttgtttttctaaatgttcaaatatttcattttgtgcgtgtgaaagggaaaacactttgacggatcgtttttgtcagatgacactggtggctccccttttctcccc

SEQ ID NO: 179365 - DNA, 691 bp, Homo sapiens
  Payload ID: 15346
  Gene Symbol: SEC61A2
  Gene Name: Sec61 translocon alpha 2 subunit
  ENST ID: ENST00000441368
  CDS Start-End: 123-691
gcggagcctgcgcggggccggtaggatcgcgtcgggagccggtaccgaggcccgagccgcgggagtcgagcgaaggcagcgccgaggccgcggtttccccctgggcctccccagcagcagccatgggcatcaaatttttagaagttatcaaaccattctgtgcagttctaccagaaattcagaaaccggaaaggaaaatccagtttagagagaaggttctgtggactgctataacgctcttcattttcttagtgtgttgtcagatcccactgtttggaatcatgtcatcagattctgcagatcctttctactggatgagagttattctggcttccaatagaggaactttaatggaattgggtatctccccaattgtaacatctggtttgattatgcagttgttagctggagccaaaatcattgaagttggagatacaccgaaagatagagctttattcaatggagcccagaaacgtactgagtttgagggtgcagtcatagctctgttccatttgttggccaccaggacggacaaagtccgagctttacgggaggctttttatcggcagaacttacccaatctcatgaacctcattgctacagtttttgtgtttgctgttgttatatatttccaaggatttcgcgttgatctgcccattaagtcggcccgttaccgaggacagtacagcag

SEQ ID NO: 179366 - DNA, 850 bp, Homo sapiens
  Payload ID: 15346
  Gene Symbol: SEC61A2
  Gene Name: Sec61 translocon alpha 2 subunit
  ENST ID: ENST00000472221
  CDS Start-End: 87-575
agccggtaccgaggcccgagccgcgggagtcgagcgaaggcagcgccgaggccgcggtttccccctgggcctccccagcagcagccatgggcatcaaatttttagaagttatcaaaccattctgtgcagttctaccagaaattcagaaaccggaaaggaaaatccagtttagagagaaggttctgtggactgctataacgctcttcattttcttagtgtgttgtcagatcccactgtttggaatcatgtcatcagattctgcagatcctttctactggatgagagttattctggcttccaatagaggaactttaatggaattgggtatctccccaattgtaacatctggtttgattatgcagttgttagctggagccaaaatcattgaagttggagatacaccgaaagatagagctttattcaatggagcccagaaactgtttggtatgatcattaccattgggcaagccattgtgtatgtcatgacggggatgtatggggaccctgcagaaatgggtgccggaatctgtctcctgatcatcattcaggtactgagtttgagggtgcagtcatagctctgttccatttgttggccaccaggacggacaaagtccgagctttacgggaggctttttatcggcagaacttacccaatctcatgaacctcattgctacagtttttgtgtttgctgttgttatatatttccaaggatttcgcgttgatctgcccattaagtcggcccgttaccgaggacagtacagcagctaccccatcaaactcttctacacctccaacatccccatcatcctccagtcggccctggtgtccaacctgtatgttatttcccag

SEQ ID NO: 179367 - DNA, 2183 bp, Homo sapiens
  Payload ID: 15346
  Gene Symbol: SEC61A2
  Gene Name: Sec61 translocon alpha 2 subunit
  ENST ID: ENST00000475268
  CDS Start-End: 95-1351
gcgtcgggagccggtaccgaggcccgagccgcgggagtcgagcgaaggcagcgccgaggccgcggtttccccctgggcctccccagcagcagccatgggcatcaaatttttagaagttatcaaaccattctgtgcagttctaccagaaattcagaaaccggaaaggaaaatccagtttagagagaaggttctgtggactgctataacgctcttcattttcttagtgtgttgtcagatcccactgtttggaatcatgtcatcagattctgcagatcctttctactggatgagagttattctggcttccaatagaggaactttaatggaattgggtatctccccaattgtaacatctggtttgattatgcagttgttagctggagccaaaatcattgaagttggagatacaccgaaagatagagctttattcaatggagcccagaaactgtttggtatgatcattaccattgggcaagccattgtgtatgtcatgacggggatgtatggggaccctgcagaaatgggtgccggaatctgtctcctgatcatcattcagttgtttgttgctggtttgattgtgctgctgttagatgagctgctacagaagggttacggcttggggtctgggatttccctctttattgccaccaacatctgtgagaccattgtctggaaggcctttagtcccactaccattaacactggcagaggtactgagtttgagggtgcagtcatagctctgttccatttgttggccaccaggacggacaaagtccgagctttacgggaggctttttatcggcagaacttacccaatctcatgaacctcattgctacagtttttgtgtttgctgttgttatatatttccaaggatttcgcgttgatctgcccattaagtcggcccgttaccgaggacagtacagcagctaccccatcaaactcttctacacctccaacatccccatcatcctccagtcggccctggtgtccaacctgtatgttatttcccagatgctgtctgttcgatttagtggcaactttttagtaaatttactaggacagtgggccgatgtcagtgggggaggacccgcacgttcttacccagttggaggcctttgttactatctttctcctcctgagtccatgggcgccatctttgaggatcctgtccatgtcgttgtttatatcatcttcatgttggggtcatgtgcattcttctctaagacatggattgaagtgtctggttcctcagccaaagatgtagctaaacagctgaaagaacagcagatggtaatgaggggccaccgagatacctctatggttcatgagcttaatagtgctagagcgtaggaatagaccctggcgtccactgtgagatgttcttcagctaccagagctgtggaaagcaaagaaaacaacttagatcatgccgttaaggaaggacaaaacatcttattcaatcagtgtttgcgcagcagaccaaaagtgaagttaagaaggtggaagggagaaggaagacattttacaaaaaggatactcttctactaaaagataaccccgcacggcatttcacacttgcctacgtcaccctgctttccacgcacctcctcagagggaggggctgttattgttcctgttttatgaaaaaagccgagagaggctacagaacctgtttgatgtgatagctaattatggtccgcggagcctcaaaccgagtcgggcctgtgactccgagctgcgctgcctcgtattgattgtcatgcctttctccaaatacgcaccagataaactattgtatctattcagtatgattgttctaactctggctttgagctgtcgaggtggcttctaccttaggtctagtttttggaaaggtgaagcaggagtggaagctctctaagggatacgaaatctgattttatccaaagaaatcacagcagcctttgaaagacacattcagattttcaaacaaacaacagacaattcaaaaccaggcgctctgcttattcactgaaaccgtaagctgctgaaactcagggaaaagcttaagaaactggtcttaaagcttcaggccaaacaatgcttcaaatcacatttgaagtaatcacttaaaaacagtagaaaaatcagttatcaattacctaaaacacttatacccaataaaatattcccatgatgacaa

SEQ ID NO: 179368 - DNA, 545 bp, Homo sapiens
  Payload ID: 15347
  Gene Symbol: SEC61B
  Gene Name: Sec61 translocon beta subunit
  Uniprot ID: P60468
  ENST ID: ENST00000223641
  CDS Start-End: 64-354
ctttcgggggctccgtaactttctatccgtccgcgtcagcgccttgccaccctcatctccaatatgcctggtccgacccccagtggcactaacgtgggatcctcagggcgctctcccagcaaagcagtggccgcccgggcggcgggatccactgtccggcagaggaaaaatgccagctgtgggacaaggagtgcaggccgcacaacctcggcaggcaccggggggatgtggcgattctacacagaagattcacctgggctcaaagttggccctgttccagtattggttatgagtcttctgttcatcgcttctgtatttatgttgcacatttggggcaagtacactcgttcgtagattcagttacatccatctgtcatctgaagaaggaggaaaaaacccaacatttcttggaccaaaagtatagtgactatctgttcatgagagaaattttctgtaagcttgctgttttacaggggatttatcaataattgattttgaggaatcagtttttttctatggctaataaactttttaattcacttata

SEQ ID NO: 179369 - DNA, 587 bp, Homo sapiens
  Payload ID: 15347
  Gene Symbol: SEC61B
  Gene Name: Sec61 translocon beta subunit
  ENST ID: ENST00000498603
  CDS Start-End: 268-396
atcttgtctgaccccggttatatttttccttcggtagggattggactttctgaaggacgttgtgatccaaaggaaggaggccggaggtctctacttcccatacagcagcctggtccgacccccagtggcactaacgtgggatcctcagggcgctctcccagcaaagcagtggccgcccgggcggcgggatccactgtccggcagaggaaaaatgccagctgtgggacaaggagtgcaggccgcacaacctcggcaggcaccggggggatgtggcgattctacacagaagattcacctgggctcaaagttggccctgttccagtattggttatgagtcttctgttcatcgcttctgtatttatgttgcacatttggggcaagtacactcgttcgtagattcagttacatccatctgtcatctgaagaaggaggaaaaaacccaacatttcttggaccaaaagtatagtgactatctgttcatgagagaaattttctgtaagcttgctgttttacaggggatttatcaataattgattttgaggaatcagtttttttctatggctaataaactttttaattcacttata

SEQ ID NO: 179370 - DNA, 462 bp, Homo sapiens
  Payload ID: 15348
  Gene Symbol: SEC61G
  Gene Name: Sec61 translocon gamma subunit
  Uniprot ID: P60059
  ENST ID: ENST00000352861
  CDS Start-End: 96-302
ggcagaaacccggattccggttccggtgggcctccatcagcaagctccagtgctacgtgtccctggcattttaggtgtcggttgggtaggcagtcatggatcaggtaatgcagtttgttgagccaagtcggcagtttgtaaaggactccattcggctggttaaaagatgcactaaacctgatagaaaagaattccagaagattgccatggcaacagcaataggatttgctataatgggattcattggcttctttgtgaaattgatccatattcctattaataacatcattgttggtggctgaatacattttggaagagagtttttcatcttagagattggtgaacaagtgtgagggtgtgagaaactcacagaatacaaatttgcctgtatgttttgtgggtttttttttttcctttcaagatgttttctatttctaaattaaagtaatttcaaagtaaatg

SEQ ID NO: 179371 - DNA, 459 bp, Homo sapiens
  Payload ID: 15348
  Gene Symbol: SEC61G
  Gene Name: Sec61 translocon gamma subunit
  Uniprot ID: P60059
  ENST ID: ENST00000395535
  CDS Start-End: 92-298
ggcagaaacccggattccggttccggtgggcctccatcagcaagctccagtgctacgtgtccctggcattttaggtgtcggttgggcagtcatggatcaggtaatgcagtttgttgagccaagtcggcagtttgtaaaggactccattcggctggttaaaagatgcactaaacctgatagaaaagaattccagaagattgccatggcaacagcaataggatttgctataatgggattcattggcttctttgtgaaattgatccatattcctattaataacatcattgttggtggctgaatacattttggaagagagtttttcatcttagagattggtgaacaagtgtgagggtgtgagaaactcacagaatacaaatttgcctgtatgttttgtgggtttttttttttcctttcaagatgttttctatttctaaattaaagtaatttcaaagtaaatga

SEQ ID NO: 179372 - DNA, 732 bp, Homo sapiens
  Payload ID: 15348
  Gene Symbol: SEC61G
  Gene Name: Sec61 translocon gamma subunit
  Uniprot ID: P60059
  ENST ID: ENST00000415949
  CDS Start-End: 368-574
attgctaaaaggaaacatggccgggcgcggtggctcacgtctgtaatcccagcactttgggaggccgaggcgggtggatcgcgaggtcaggagttcaagaccagcctggccaatatggtgaaaccccgtctctactgacggtttcagccatccggcggggggttcctggaatgcatccttgtgggaagcgtggccgggcgcacgtcgcgctgcgcttgcgcactgaggtttcgcgtaaggaaccaataggacggaggagtgggcgggctgttggcagaaacccggattccggttccggtgggcctccatcagcaagctccagtgctacgtgtccctggcattttaggtgtcggttgggtaggcagtcatggatcaggtaatgcagtttgttgagccaagtcggcagtttgtaaaggactccattcggctggttaaaagatgcactaaacctgatagaaaagaattccagaagattgccatggcaacagcaataggatttgctataatgggattcattggcttctttgtgaaattgatccatattcctattaataacatcattgttggtggctgaatacattttggaagagagtttttcatcttagagattggtgaacaagtgtgagggtgtgagaaactcacagaatacaaatttgcctgtatgttttgtgggtttttttttttcctttcaagatgttttctatttctaaattaaagtaatttcaaagtaaa

SEQ ID NO: 179373 - DNA, 512 bp, Homo sapiens
  Payload ID: 15348
  Gene Symbol: SEC61G
  Gene Name: Sec61 translocon gamma subunit
  Uniprot ID: P60059
  ENST ID: ENST00000450622
  CDS Start-End: 152-358
ggcattttaggtgtcggttgggtaggtgagtttcttcccaccggtcggtacgggcgaacggggcggccacacctttgcgactcttgggggcagcgggcgtgggcgagccggcgtgtctccccgggcggccgtcgcggggcgggcggcagtcatggatcaggtaatgcagtttgttgagccaagtcggcagtttgtaaaggactccattcggctggttaaaagatgcactaaacctgatagaaaagaattccagaagattgccatggcaacagcaataggatttgctataatgggattcattggcttctttgtgaaattgatccatattcctattaataacatcattgttggtggctgaatacattttggaagagagtttttcatcttagagattggtgaacaagtgtgagggtgtgagaaactcacagaatacaaatttgcctgtatgttttgtgggtttttttttttcctttcaagatgttttctatttctaaattaaagtaatttcaaag

SEQ ID NO: 179374 - DNA, 6568 bp, Homo sapiens
  Payload ID: 15349
  Gene Symbol: SEC62
  Gene Name: SEC62 homolog, preprotein translocation factor
  Uniprot ID: Q99442
  ENST ID: ENST00000337002
  CDS Start-End: 59-1258
aggtttccaccgccccctcctcgctccacgtcagagggaaccgggcggagcggccaacatggcggaacgcaggagacacaagaagcggatccaggaagttggtgaaccatctaaagaagagaaggctgtggccaagtatcttcgattcaactgtccaacaaagtccaccaatatgatgggtcaccgggttgattattttattgcttcaaaagcagtggactgtcttttggattcaaagtgggcaaaggccaagaaaggagaggaagctttatttacaaccagggagtctgtggttgactactgcaacaggcttttaaagaagcagttttttcaccgagccctaaaagtaatgaaaatgaaatatgataaagacataaagaaagaaaaagataaaggaaaagctgaaagtggaaaagaagaagataaaaagagcaagaaagaaaatataaaggatgagaagacaaaaaaagaaaaagagaaaaaaaaagatggtgaaaaggaagaatccaaaaaggaggaaactccaggaactcctaaaaagaaggaaactaagaaaaaattcaaacttgagccacatgatgatcaggtttttctggatggaaatgaggtgtatgtatggatctatgacccagttcactttaaaacatttgtcatgggattaattcttgtgattgcagtaatagcggccaccctcttccccctttggccagcagaaatgagagtaggtgtttattacctcagtgtgggtgcaggctgttttgtagccagtattcttctccttgctgttgctcgatgcattctatttctcatcatttggctcataactggaggaaggcaccacttttggttcttgccaaatctgactgctgatgtgggcttcattgactccttcaggcctctgtacacacatgaatacaaaggaccaaaagcagacttaaagaaagatgagaagtctgaaaccaaaaagcaacagaagtccgacagtgaggaaaagtcagacagtgagaaaaaggaagatgaggaggggaaagtaggaccaggaaatcatggaacagaaggctcggggggagaacggcattcagacacggacagtgacaggagggaagatgatcgatcccagcacagtagtggaaatggaaatgattttgaaatgataacaaaagaggaactggaacagcaaacagatggggattgtgaagaggatgaggaagaggaaaatgatggagaaacacctaaatcttcacatgaaaaatcataatctgactaattttgggactgaatgaataagtacaagaggttggattttctatgttggctgattaccatattgaacacatggcatttgtagcattctttaaatctatctactgaaatgtatttgacattcaagcagttatattcggtccttcattttatagaatattggcactattattggtacagtttaaagccattaatatgttttatccatttgataattttacagtaagtaggtctcattcattttgacagttatcaaagatgtactttccacagttaaatttacattaatggcaatttttgatagttttatggctttttactgttagactaatcaaaaataactttaaaaggaacaaagaaactccaacatttcacattatgcatagttatgtagccatttcacagtttctttaagatgtgtaaactcattgtccttgatagtttttatttttcattataaaattataccaggagatttcttttaagattctgagttagcagagttcaaaactattttgtggaaacaagccaactagtaacaatgcagcaacacttctggtttagctaaattatttttccaatgtaggaaatccacactgatttgtacgtctgactgagagaaagatggtcgtctccagcagagaaagtgaacagcatttgttggaaggtgatggctctccctcctccctccccatttcattggcgtaacgtaaagtgtattctgtacataatttacaaataaaacattttattttaattgttacttattatttagatatttctcaacacttaaattcataaaattaagaccatgtaagggtatgtttttagagaaatggaagtttgagtaacccacagaacatctgtgatctttctacagcagcttcagttttgtgccaacattccatgtattttgaatatgagcaaaaactgatcttaagagcagacttaaagtagctttgtacgccttaatgttcattttgatttattttaaatctttacattcagaaatgagatactgtattatcagaccaggaggcattgctgtgaaagataatttcctattctaaaatatcaaatttaaaataaagataatgaaagaaaacataagagaactattggactctaattgctttgaactagttttgcagtttgactttacgtcttatacatcttagttacaagtctttggaaactcttgtttacttatgagcataatcattccttggagttatactaactaataatgaatattaaatgatttttcttcagtcacagtgagagcatcttgctttgtggttgaaataggtagtgtatgtcagtctttgctttaggctgtttctcatctaagtgtttgaattaaagatgttaaatttttctaattgtgaaaaatatgttttctgtatcgacacattttattaaacttggcttgattgcttctttatagtagtccctgtaagtggacataaatgtggctatttgatgttaatgcaactatgtcaaggctgcaatcactttaatagtttctttttagcaaataaatgttcattgatgaagtgcctgggtattttcccgtcccatttgcagagctctactacttcatttccacagtaagcatatatataatgatcacttctgagtttatcaccagtaacattgatacctattttggggtataaacatggtgtttttcagaaataaaaattatttcattaacctttactattactgtgataatacccaggcactcaatattcatcctgaaattttttataatatatgtaatttgtctagtcttaaagacatttggagcatggccaacaggaaggtcagcttcttactgatgtgtgtggattcttacagaatgttagtacaaatttttataaatatttggtgatccctggggggaaatatcattcttactatggttagaaagtgaattagaaatttcagctcagtttctattttactattcaagttgtgtactttaaacaaatataaaaatcaaaaggctgcctctattacaatcctcagtggaatagatggctatctttcttggctaacattaaatattcttgtaccagagcatggaaaatcgtttataattgttaatagaatggcgatttttttttaagaacttcagatttgctatgctgctgtaagtagaaagcatgaagctttttgatcatgtagggcttattgtagagggtatcaattggcctaactaagcaggattgaatttaccagaggctaagttcagatagtaagaataatgcatatgtgattgttcttaaagtcaatgtattaaataaggtatttttccttttccctcttactggatttttcaattttcaaaccatatggcctaggtaactttaattgaaataatatagatttagttgaatactattcaggaagtaataaattttaatatatcacattgaaattatgcagtggtgatgaattttggtgtttcccccctctttctggttttacatcatgaggatcagttagctgctgacaagaaaagtcatcttgtgtcttttgtaaattgaattttttttttaaatctattaggaactggaaaacagcaagtatggttgattctcattattcaaggtagttacgttctataaagtcactgcgaacactgaattagcaaatatagaacctaggggaaatacaaggctagatttctgcaagccactggtcacattttcatcaagcagtcaacatgtaaatttctgttgtaaagacaccttatttaatataatcgattcattaacattgaagtcatgaccaacaacactgtaactcatgcctgaatgaagcttatctgacacataagcttcataaggcacacaacagcctttttacccttaggaacagctttttgcccttagcactatgcttgggggccattttaaacagtgaaatcaaaaaaagaacagaaatgcaaaaaccatggcattagcgtaaaaaggacacgtttatagtatgaaagctggaacatggccttgttcaacctcagctcagaatatgtgtacagcaagttttttgctgtaccacaaaattttaggttaggcaaattcacaaatacggaatccatgaataacgaggatcaactgtacttaactatattttaaagctgtgacatttatctacctggtttatggaatagaatttattgctgaatcatgctccagtatttgagtgatgttttaaatatcctatgtctgaaaataattcctcctaattgtgtggtaatttgcttttactgtttccacagtatttcaggtctttgctcattcactcagtaatactgagcacttaccatgtaccagaattttactaggcacaaccatgaataaaaatacaattctcttgcaccattaaatagtgtgttaagtgctacggcagcaaattgctacatgtgctggatatctcttgttttcccctccagctccactctgctcttgcccacaaagctgacccgaatggaccacagcagtgggctcctatgcctcctggcttctgagtgggtttggccaaggagtgtcctggccagagatcagaggatggtagggtgcctattctcggctcttctcctggggttggggggctgccttagcagccaaaggtcacttctcccaaactccttccctgctttccaggttgccagtccctgcactcttcctttctggccaaggatgatgtcagttctgctgctactagcctggagttgcagaagctactgtgcttcctctttgggtagcctatacctatacttatctcctcataatatcttcatgtaaagaaccatctgtttcttattggaatcaagaccaataccaaggagaaattcctagggaacaaaaattccaatgaggaattgacctctttgtcagatccttatcaccaaacattagaaaagatctcataactttatacagcatgttgtaagcattttgataactaaaatcctgttctagtgaatgtcatgcagataactacacaaggagattaatttaaatttgccttctttggcaagcccttaaaccaatggctaaagcagttagttgtgagtttctgagtaggtcccaatgcgtttatttcatttgtccaacctagcacagagatcctttgatactttaattgcatggcttttccaatcagacgaaatttcagtctgagagaggacatattttctgaggtttatagttttaggattgtccaaaaggcctatgatctcttcttagcatgacagaaagagggaaagataagttaaatttcaagggggtcatatcatcacactttggtcttatttcattttcaatgatttcctagatcactttaacttttttgtgtcatggactcctcagaataatgggttttttttgtttgtttgtttgtttgagatggagtctcactctgtcacccaggctggagtgcagtggcgaaatctcagctcactgcaacctccgcctcctgaggttcaagtgatcctcctgcctcagcctcccaagtagctgggattacaggcacatgccaccacacccagctaatttttgtattttttagtagagacagggtttcaccgtgttggcgagactgatcttgaactcctgacatcaggtgatccacctgcctcggcctcccaaagtgctgggattacaggcatgagccaccatgcctggccagaataatgtttttaaatgcagaaaaggaaatgcatggggttacaagggaaacgaattacactgaagtgtaagctaccaaataatttatgatgtggtagttataggtgtgcatttaatagccagatctacgagtggatgtaataactgctatgatgttgaagtagcataaaacatatattagatatctgcaacaactgtgatgtaacatgaaaatacctgatttctgttgacaaagttactgctagtacaactgtggattgttgtctgcactcgtcattgaaggaaatactaaattttagttttaggctagtgaaattaaagttaatttttcccatccaagttcatgtatcttctgaattctatccgtgaatcccttagaggtctgtgaattgtaggttaagaacccctgccctagctaatcagatccaccaatgtttcaaataggactataacttattcaaaggccaatgatacttcgcataattcaattttaatattattcacatttcatgtcacaaatttagtaagttacatgtgttatgtgatgttttgttttgatagattatatcttactcctaaataaaaagtcaagatttttgtagcaa

SEQ ID NO: 179375 - DNA, 785 bp, Homo sapiens
  Payload ID: 15349
  Gene Symbol: SEC62
  Gene Name: SEC62 homolog, preprotein translocation factor
  ENST ID: ENST00000469515
  CDS Start-End: 9-314
cggccaacatggcggaacgcaggagacacaagaagcggatccaggaagttggtgaaccatctaaagaagagaaggctgtggccaagtatcttcgattcaactgtccaacaaagtccaccaatatgatgggtcaccgggttgattattttattgcttcaaaagcagtggactgtcttttggattcaaagtgggcaaaggccaagaaaggagaggaagctttatttacaaccagggagtctgtggttgactactgcaacagtctctatctatatggggagtgtaatgccatacctgtttttcccaaaggcttttaaagaagcagttttttcaccgagccctaaaagtaatgaaaatgaaatatgataaagacataaagaaagaaaaagataaaggaaaagctgaaagtggaaaagaagaagataaaaagagcaagaaagaaaatataaaggatgagaagacaaaaaaagaaaaagagaaaaaaaaagatggtgaaaaggaagaatccaaaaaggaggaaactccaggaactcctaaaaagaaggaaactaagaaaaaattcaaacttgagccacatgatgatcaggtttttctggatggaaatgaggtgtatgtatggatctatgacccagttcactttaaaacatttgtcatgggattaattcttgtgattgcagtaatagcggccaccctcttccccctttggccagcagaaatgagagtaggtgtttattacctcagtgtgggtgcaggctgttttgtagccagtattcttctccttgctgttg

SEQ ID NO: 179376 - DNA, 641 bp, Homo sapiens
  Payload ID: 15349
  Gene Symbol: SEC62
  Gene Name: SEC62 homolog, preprotein translocation factor
  ENST ID: ENST00000460513
  CDS Start-End: 23-280
ggaaccgggcggagcggccaacatggcggaacgcaggagacacaagaagcggatccaggaagttggtgaaccatctaaagaagagaaggctgtggccaagtatcttcgattcaactgtccaacaaagtccaccaatatgatgggtcaccgggttgattattttattgcttcaaaagcagtggactgtcttttggattcaaagtgggcaaaggccaagaaaggagaggaagctttatttacaaccagggagtctgtggttgactactgcaacaggtcttgatatttttgcttttcagtctctatctatatggggagtgtaatgccatacctgtttttcccaaaggcttttaaagaagcagttttttcaccgagccctaaaagtaatgaaaatgaaatatgataaagacataaagaaagaaaaagataaaggaaaagctgaaagtggaaaagaagaagataaaaagagcaagaaagaaaatataaaggatgagaagacaaaaaaagaaaaagagaaaaaaaaagatggtgaaaaggaagaatccaaaaaggaggaaactccaggaactcctaaaaagaaggaaactaagaaaaaattcaaacttgagccacatgatgatcaggtttttctggatggaaatgag

SEQ ID NO: 179377 - DNA, 508 bp, Homo sapiens
  Payload ID: 15349
  Gene Symbol: SEC62
  Gene Name: SEC62 homolog, preprotein translocation factor
  ENST ID: ENST00000487736
  CDS Start-End: 10-153
gcggccaacatggcggaacgcaggagacacaagaagcggatccagtataatttcagattctcgtgtcccatcgaagtttctagcaagaggactgttgtcacatttccttcttggactcattactggtcactgaaaaccagaagaagttggtgaaccatctaaagaagagaaggctgtggccaagtatcttcgattcaactgtccaacaaagtccaccaatatgatgggtcaccgggttgattattttattgcttcaaaagcagtggactgtcttttggattcaaagtgggcaaaggccaagaaaggagaggaagctttatttacaaccagggagtctgtggttgactactgcaacaggcttttaaagaagcagttttttcaccgagccctaaaagtaatgaaaatgaaatatgataaagacataaagaaagaaaaagataaaggaaaagctgaaagtggaaaagaagaagataaaaagagcaagaaagaaaatataaaggatgagaag

SEQ ID NO: 179378 - DNA, 1430 bp, Homo sapiens
  Payload ID: 15349
  Gene Symbol: SEC62
  Gene Name: SEC62 homolog, preprotein translocation factor
  Uniprot ID: Q99442
  ENST ID: ENST00000480708
  CDS Start-End: 16-1215
ggcggagcggccaacatggcggaacgcaggagacacaagaagcggatccaggaagttggtgaaccatctaaagaagagaaggctgtggccaagtatcttcgattcaactgtccaacaaagtccaccaatatgatgggtcaccgggttgattattttattgcttcaaaagcagtggactgtcttttggattcaaagtgggcaaaggccaagaaaggagaggaagctttatttacaaccagggagtctgtggttgactactgcaacaggcttttaaagaagcagttttttcaccgagccctaaaagtaatgaaaatgaaatatgataaagacataaagaaagaaaaagataaaggaaaagctgaaagtggaaaagaagaagataaaaagagcaagaaagaaaatataaaggatgagaagacaaaaaaagaaaaagagaaaaaaaaagatggtgaaaaggaagaatccaaaaaggaggaaactccaggaactcctaaaaagaaggaaactaagaaaaaattcaaacttgagccacatgatgatcaggtttttctggatggaaatgaggtgtatgtatggatctatgacccagttcactttaaaacatttgtcatgggattaattcttgtgattgcagtaatagcggccaccctcttccccctttggccagcagaaatgagagtaggtgtttattacctcagtgtgggtgcaggctgttttgtagccagtattcttctccttgctgttgctcgatgcattctatttctcatcatttggctcataactggaggaaggcaccacttttggttcttgccaaatctgactgctgatgtgggcttcattgactccttcaggcctctgtacacacatgaatacaaaggaccaaaagcagacttaaagaaagatgagaagtctgaaaccaaaaagcaacagaagtccgacagtgaggaaaagtcagacagtgagaaaaaggaagatgaggaggggaaagtaggaccaggaaatcatggaacagaaggctcggggggagaacggcattcagacacggacagtgacaggagggaagatgatcgatcccagcacagtagtggaaatggaaatgattttgaaatgataacaaaagaggaactggaacagcaaacagatggggattgtgaagaggatgaggaagaggaaaatgatggagaaacacctaaatcttcacatgaaaaatcataatctgactaattttgggactgaatgaataagtacaagaggaaatccacactgatttgtacgtctgactgagagaaagatggtcgtctccagcagagaaagtgaacagcatttgttggaaggtgatggctctccctcctccctccccatttcattggcgtaacgtaaagtgtattctgtacataatttacaaataaaacattttattttaattgtta

SEQ ID NO: 179379 - DNA, 6411 bp, Homo sapiens
  Payload ID: 15350
  Gene Symbol: SEC63
  Gene Name: SEC63 homolog, protein translocation regulator
  Uniprot ID: Q9UGP8
  ENST ID: ENST00000369002
  CDS Start-End: 181-2463
cggcggcggcagcggcagaggtggcggcggcgtgtccgtgagagtggcgtgggggcggggaggagaggcggcggcggcagtgtccaagctacgccactcgggccggggcgttgggagcgggagtgcagagcgtggtcgtggcggcggcggtgagaagagcgaggcggaggagggggtgccatggccgggcagcagttccagtacgatgacagtgggaacaccttcttctacttcctcacctccttcgtggggctcatcgtgatcccggcgacatactacctctggccccgagatcagaatgccgagcaaattcgattaaagaatatcagaaaagtatatggaaggtgtatgtggtatcgtttacggttattaaaaccccagccaaatattattcctacagtaaagaaaatagttctgcttgcaggatgggcattgttcttattccttgcatataaagtttccaaaacagaccgagaataccaagaatacaatccttatgaagtattaaatttggatcctggagccacagtagcagaaattaaaaaacaatatcgtttgctgtcacttaaatatcatccagataaaggaggtgatgaggttatgttcatgaggatagcaaaagcttatgctgctttaacggatgaagagtcccggaaaaattgggaagaatttggaaatccagatgggcctcaagccacaagctttggaattgccctgccagcttggatagttgaccagaaaaactcaattctggttttacttgtatatggattggcatttatggttatccttccagttgttgtgggctcttggtggtatcgctcaatacgctatagtggagaccagattctaatacgcacaacacagatttatacatactttgtttataaaacccgaaatatggatatgaaacgtcttatcatggttttggctggagcttctgaatttgatcctcagtataataaagatgccacaagcagaccaacggataatattctaataccacagctaatcagagaaattggcagcattaatttaaagaagaatgagcctccacttacctgcccatatagcctgaaggccagagttcttttactgtctcatcttgctagaatgaaaattcctgagacccttgaagaagatcagcaattcatgctaaaaaagtgtcctgccctacttcaagaaatggttaatgtaatctgccaactaatagtaatggcccggaaccgtgaagaaagggagtttcgtgctccaactttggcatccctagaaaactgcatgaagctttctcagatggccgttcagggacttcagcaatttaagtctccccttctgcagctccctcatattgaagaggacaatcttagacgggtttctaatcataagaagtataaaattaaaactatccaggatttggtgagtttaaaagaatcagatcgtcacactctactgcacttccttgaagatgaaaaatatgaagaggttatggctgtccttgggagttttccatatgtgaccatggatataaaatcacaggtgttagatgatgaagatagcaacaacatcacagtaggatccttagttacagtgttggttaagttgacaaggcaaacaatggctgaagtatttgaaaaggagcagtccatctgtgctgcagaggaacagccagcagaagatgggcagggtgaaactaacaagaacaggacaaaaggaggatggcaacagaagagtaaaggacccaagaaaactgctaaatcaaaaaaaaagaaacctttaaaaaaaaaacctacacctgtgctattaccacagtcaaagcaacagaaacaaaagcaggcaaatggagtcgttgggaatgaagctgcagtaaaggaagatgaagaagaagtttcagataagggcagtgattctgaagaagaagaaaccaatagagattcccaaagtgagaaagatgatggtagtgacagagactctgatagagagcaagatgaaaaacaaaacaaagatgatgaagcagagtggcaagaattacaacaaagcatacagcgaaaagagagagctctattggaaaccaaatcaaaaataacacatcctgtgtatagcctttactttcctgaggaaaaacaagaatggtggtggctttacattgcagataggaaggagcagacattaatatccatgccatatcatgtgtgtacgctgaaagatacagaggaggtagagctgaagtttcctgcaccaggcaagcctggaaattatcagtatactgtgtttctgagatcagactcctatatgggtttggatcagattaaaccattgaagttggaagttcatgaggctaagcctgtgccagaaaatcacccacagtgggatacagcaatagagggggatgaagaccaggaggacagtgagggctttgaagatagctttgaggaagaagaggaggaagaagaagatgatgactaagcagtactctgaatggaccacagtgtttgcacatatttgcaattttttgctgttttggaagtgtatcataaaccagaaacagtacagaactgatgttgagggaggtgtagtttttttactcttgaaatgggtgcataatataactaggcagtggcggtgccttggtacaacctgaaaaatgttaaggcttattgaaacctttcaagtaggggatggtacatttatttcatctgcaaatgataataaatcctttgttattataactgtccagaagtgtgggctatgtattatctgatcagtctatggtcccagtaaaagtaaagatgcaggaaacacagtctgtaaatgagcgacttttctttgttcagctttagttttagcaaacaccacaaatatgttttaagtaacatcgctcaagtttaagtaacatcgctcaagttgataatctcttgataagctctgttgttgacattttgcagtgatacaacagctccactcatagatttaaacttttatttttacttatcttggtcataagttggcattctctcacattccacatgatatagagggctacgttttggaattttccttttcttaattgcccagagttatcagacagattataaaaatggcttttaatggcttaaaccatttctaaacctctatcttagcagatcaatgcaggatctaattcttttgataagttctagctctaaaagtgatagtgggactgtatgttttctgatactggtggcttatgttattaaaccttttttaaaaaaggttcactctaaaagctgaactacatccttagttttcagtctacttgactctatcaggagctttttaaggaaagtaagtataacatgcaaaggaagctttttttgtattcattttggactcctgtcaataaaaatagaagtttgttgactcgttttatgtttcaatggtgtgtgtctttttactatcaggacataaatagggcaatccacttctttatttttcaactaaagattgaatagtattgtacattactgctaaagtgactgctatttctgtatactgtagaaaaacccaggagtgagagggatttcccctcatagtacaactggaaggatagtgcttgtaaagagtagagatgtgtacatgatgaatcattgagggagggtggatatttttattcctagatatggaggaaacataagtctgtagtattataaaactgattgtaataattctttcctatcaaaatctccataggtcaaaatattgttggaatactaaaatttgcaaccttgtttactttaaaaggttgccactttcagtgcagaatactaccggcatcttgttactgcaatagttggaaataaaatgtgaaaattagcaaaaccatgaatggtttttttggttctaaatttaagatgtaatatttcctataaaagggtgaaagcagtttctttctctataacctcaatcaccagtttagtgagagcctttcttggcaggcaggaggcagtgtcactgaggatttttttcatttacttcattgtacaagtaggagggtgggtttaattttcaaatcaggttctgctgtgaagcaccagtgtcttgaggcagctactgattacctaagtgtggtggcagggggtaagccagctggtgtcaagtgaaaggagggattagagaaaacaggtgtggcacgaaggcaaggaaactgagcagacaagacagaacaatgtgtagaatgcatatttcctagttttcttgaaagatttcaagaaaagttgtttttttttttctagtggctactttgccttaaagaggctttataagttcattcacacagctggcttctctggttttaagattctggagaggatgataacctagtaacaccacagtgcttaaaaaaaaaaaaaaaaaaaaaactaccatcaccagaaaattccaccagtttgttttccttttctctttgtgtgatgtgtatgtacttcccaactaagtaaaataaaatttcctctagtgagtgctttaggtaacctctttccatatggcagtagtgaaagaactgagccttcagttgatagttcttctctctccagcaagtcgctaaactccacatcccttcgtttttcctctggaatgagaataacaaactatcctagtttgcatttaatctaatggaaacttgagcaaagtttcaattttcttcctataaagaaactgacattttgtcaacaattgatgagcctatagatcatacagtgtataggaagtgaaattgaaacagttaaattatgtgatatttttctctaattggtaaagtacctattaaaatacagctgttcatgaggagacttaccacaattcaaagtgtagcagttgtgtattttagcattataatatttgattgaggccctgaggtgttaatatctcaatctcagagttagatgttcatgtcctttttgaattttttaaacatttttcataattttttttttaagttagggagcacattgagtgaagttctctgtgtagaacaataccttctgctctgcttctcccagctttcactgagggctggaaaaggacaggcctgtccagctgtactgtcccactgtgtatggggaagctcaggctctggtggaagcagggggcgtggatgtcaaacaactgatgtggaaacagggagggagagatataatgaggctctctaggcatgttatttttgaccacaagttttgttcagtttgcttcagccaatccaaaccatatactagagtgttctgtagtcacaattcttatttcaaatgtaattcagcaccttacataatttttgagaggttgtcattcatcacatatttactgagtttctatgtgccaggctctgtgactggatactggagctatcaaaatgaaaaaaatagtgttaagaactcactcgctggtgttagagcaggtagatgagtggcaatccatttaaatccatttgccttggctattatttggaatgcctttttttttttttagtctatctactgtaggcagaagaattatttctttaggggctagctgtttattttgctggcctttttttctctctttctctttttcttcttaagacggagtctcgctctgtcctccaggctggaggagtgcagtggcacgatctcagctcactgcaacctccgcctcccagcttcaagcgattcttctgcctcagcctcctgagtagctgggactgcaggtgcatgccaccacacccagctaattttttaatttttagtagagatgggattttgccacgttgtccagcctggtctcgaactcctggcctcaagtgatcagccctcctcagcctcccaaagtgctggcattacaggcatgagccactgcgcccagcctgttgggtttttttggaaaaaaaacaaaaacaacaaatcatcatcctttcctttaaaatgtttttttttttttaagaaacaattttcccacaaacggtctgatttaactccatgaaatcctctatttagactgccttaaagtgaaataactgttggtgaaccataacattttgccagctgtgtagtgattagtccaaatatgtctcaagaagttagcaccaagcattctcatccatttaaacttgatgctagggctattttgcaaaacttaaaaagatgcgatcttgtacatatttctgtaacctgagctgaaaacccaaataacaatcattgacatactttagggctattgtttcaggtgggggtgtatacatcccaggggcgtggagatgatcaatccattgaggaagtattaagatgattatttgtatttaatctcatccttttaaatttctatttttgtgtgttttataatgtacataatatattgtacaattgtacacttctattatttataaataaacatttattggtgcattaa

SEQ ID NO: 179380 - DNA, 647 bp, Homo sapiens
  Payload ID: 15350
  Gene Symbol: SEC63
  Gene Name: SEC63 homolog, protein translocation regulator
  ENST ID: ENST00000429168
  CDS Start-End: 164-647
tttcatttgttcactcactgtgggggttggaagcaatgccgttattcctcttagcaaaaataggcttttttctatttccttttcttcggagtttcctgtttgtgacggaaaaagtgcaaagcaaattcgattaaagaatatcagaaaagtatatggaaggtgtatgtggtatcgtttacggttattaaaaccccagccaaatattattcctacagtaaagaaaatagttctgcttgcaggatgggcattgttcttattccttgcatataaagtttccaaaacagaccgagaataccaagaatacaatccttatgaagtattaaatttggatcctggagccacagtagcagaaattaaaaaacaatatcgtttgctgtcacttaaatatcatccagataaaggaggtgatgaggttatgttcatgaggatagcaaaagcttatgctgctttaacggatgaagagtcccggaaaaattgggaagaatttggaaatccagatgggcctcaagccacaagctttggaattgccctgccagcttggatagttgaccagaaaaactcaattctggttttacttgtatatggattggcatttatggttatccttccagttgttgtgggctcttggtggtatcgctcaatacgct

SEQ ID NO: 179381 - DNA, 583 bp, Homo sapiens
  Payload ID: 15350
  Gene Symbol: SEC63
  Gene Name: SEC63 homolog, protein translocation regulator
  ENST ID: ENST00000446496
  CDS Start-End: 103-345
agtgtccaagctacgccactcgggccggggcgttgggagcgggagtgcagagcgtggtcgtggcggcggcggtgagaagagcgaggcggaggagggggtgccatggccgggcagcagttccagtacgatgacagtgggaacaccttcttctacttcctcacctccttcgtggggctcatcgtgatcccggcgacatactacctctggccccgagatcagaatgccgcggggagagtctcatttacccaggctggtcttgaacttgcttcaagtcatcctcccgcttcagccccccgagtagctggccttacagacttgagccactgtgtcaggatggatttttgaaatttgaaagtcatattttcatgagcaaattcgattaaagaatatcagaaaagtatatggaaggtgtatgtggtatcgtttacggttattaaaaccccagccaaatattattcctacagtaaagaaaatagttctgcttgcaggatgggcattgttcttattccttgcatataaagtttccaaaacagaccgagaataccaagaatacaatccttatgaagtattaaatttggatcct

SEQ ID NO: 179382 - DNA, 5257 bp, Homo sapiens
  Payload ID: 15351
  Gene Symbol: SCRN1
  Gene Name: secernin 1
  Uniprot ID: Q12765
  ENST ID: ENST00000242059
  CDS Start-End: 159-1403
tctgggtagggggaagcgcccggcggccgcctccgccactgcagctgcagcccccgaggtcgccgcagtaatccggacccggcagcacccgcaccctcggcggccgcagcctcagcaccgcagagcggagagcggagcccggagcccgccgccccaggatggctgcagctcctccaagttactgttttgttgccttccctccacgtgctaaggatggtctggtggtatttgggaaaaattcagcccggcccagagatgaagtgcaagaggttgtgtatttctcggctgctgatcacgaaccggagagcaaggttgagtgcacttacatttcaatcgaccaagttccaaggacctatgccataatgataagcagacccgcctggctctggggagcagaaatgggagccaatgaacatggagtgtgcatagccaatgaagccatcaacaccagagagccagctgccgagatagaagccttgctggggatggatctggtcaggcttggtttagaaagaggggaaacagctaaagaagccttagatgtcattgtctccttgttggaagaacatggacaaggtgggaattactttgaagatgcaaactcctgccacagcttccaaagtgcatatctgattgtggatcgtgatgaagcctgggtgctcgagaccatagggaagtactgggctgccgagaaagtcacagagggagtgaggtgcatttgcagtcagctttcgctcaccactaagatggatgcagagcatccggaactcaggagttacgctcagagccaaggttggtggacgggagagggcgagttcaatttttccgaagtcttttctccagttgaggatcatctagactgcggtgctggcaaagacagcttagaaaaacaagaagaaagcatcacagtgcagactatgatgaacaccttacgggacaaagccagcggagtgtgcatagactctgagtttttcctcaccacagccagtggagtgtctgtcctgccgcagaatagaagctctccgtgcattcactacttcactggaacccctgatccttccaggtccatattcaagcctttcatctttgttgatgacgtaaaacttgtccccaaaacacagtctccctgttttggggatgacgaccctgccaaaaaggagcctcggttccaggagaaaccagaccgccggcatgagctgtacaaagcccacgagtgggcacgtgccatcatcgaaagtgaccaggagcaaggtcgcaagctgaggagcaccatgctggagctggagaagcaaggcctggaagccatggaagaaatcctgaccagctccgagccactggaccctgcggaagtgggggaccttttctatgactgtgttgacacggagattaagttctttaagtgaagtaagcgttccctttccccttcttatttaagacttcccaccttactaaattaccagcaaaacaaaccactctcctgtttgagtaaaatgagaaagttaatatgtggcctccttttctgaagccagatcaaactgttaccttgtgttccaccttgaatctcacagcgtccccttctgcaatgtaggtctccttcctgtgcagtgtaacatgtatcccgttgcctgttgttcggttgtgtgactaattgtggattttaagctgctattattgtatttcagtggcaatggacacattagccttttacaagaggactagagttcatcaagccttgaaaggcaggcttcacagtgccgagttggcgggaaaagcaaattcttttgaagtcttagtctttccctcagtagcggtttctttcaggttaacaagaggcatttgtgcacacacacagggctcttgtgtgtgttgtcaaggggaccctccgtggcctcccgtgagtgcatgcctgtagtgcacagtgtctctacaggtgtcttctggggggcagaaccaattggaaggaagaaagggacccctctccagtcctggctccttcctacatcctgggctcctgaagaagctgtcttcccattttccatgcgctgtgcttatgtgtggtggactgcagagctgcttccacttacaggagagctgataatttgttagctggaacctattcacttccgagattcagacatagccatgctggtggccttctgaatcactgcatggatgtcccaggaggcagctctccccacacagcagcacagccatcacaggattccttgtgtagaaatgattcccagtctagttaccaacagctagtctaggagtaattgaatggccctatggcacagttccacccacagagtagtgaatctctcagccaaggagggaaagaaaaggaagaactcttgactatttagattctagttaaatatctggaatcctagcagtcactacattatctcagcagagagactttaattaaactgatttgtttccaatgtcgggttcacttaaaggatttgacttaccaccagagcatagaaaagcatgcaaggaagaccagatgggcttagcattgggaagacagagggcaaggaggtgatagatggatatagaagcatttctctgcaggataccagttcaggccccaccattcctgccaaggccattacatcccacaaacccaaatacaaagcagctgacttccctggatcttccccccactcctcacacctcacatgtcccaggagctgccttcattcaggcgggtagctgcactgggcatggggtggtggtgggagcttaccgccacctattcaagctctcagctactcctgaaacgggcagagatgatgaacagaagtgtatgtaaatacagcagctagtgggagagcaccagttgggcctaatcctgcctcatcattcttggcaggaatctgcaaatggaaacattgtgagtatcagcaatctgggaagtgacagggttaataactccttcccagaagctgtatcatgagattttgaggggaccgagccctgttacatggatgtgaacagtgaggatcagaggttttatcagaacacattctttttttctaccaactctccagagcgtgagtataggagtgccatgagctttttagtcagcagttttgtaaactctgtatataaaatcattaaccacacattgtgggtgatgggaagacgatttcagctgacagagttaatggcaaccaataatggtggcctgtagctgctaagagcttcacgcaggtttggcctgggctttcactgttggtgaatttagagtgtccttttaggtggggcggctattctaaaagtgtctttctatcactgttaagggggggggaaagtgaggttcgaggatgacgtaggtaactctcccctcccaagtccatgttccaagtggctatgtaaagcaagatgatacagaaagctgctctaaaatctcactgagtgatttcaccttcgcctactatgaaatgtctcatcagacctgacatgtctgagataaccaaggtgattcaggatttgatcaaaagaagtctagtaagaattaattacacagaagcctcctttcatttctatgggccaaacaaaggccatggataaccctacccgctttatgtcattacccattgggaaacacaatggctacttctgttagggtacattgaccttggtcaagcatcttaaagaaggcaaccctaattgagagctgtcttggctaatactctgcaccacaattgtgatgtcctagtcctaccactagagggcatggtacagcctggcaaaagttaaaaggggtgtggcagctcccatcaggtctggaggtggtctataagcacagttgacagttgtgcattgggatgggtggagaaagacgacaagagagcagagaatctgctgatgtggctgcgcttacttttagtgactttatgtacttatattaacagctggaaataggttgttgggttttgagcaggctgttatagtgaggaatgttcatttttaaatgttcctaacagattttgcttttgaaaaatgcttgttacatgaataatttgtggaccagggattgcttttctgaaggcagtatagggaacatgaatattcaagatgaaatacaaaaattatgtttaagggtcatagtgtataagtagcttcctaggaaaccctttgtgtatcttttcagactggggtgggggctgagcatgcttgtgcagaaagaagccatagccagaaaggacagaatctctcccccactcccttgccccataaccaaacataagctagctagtcttgtctaatagatgggatttactataggtgaagatagccctcatattcaaggacagaagctctggcaggagtaaattagcaaagcagaaatagtaccctttcattcttggaggtgctttgaaattttaggtagaatataatcgaaattatggaggttccttagtgctcaataatataagacctggtgttattagaacgagtctttcttataaactaacagagcaggtatatgcctgttagaccttagctgtggggttcctttactattgggtgaatcattaggtataaaaaataatcatcaaccaggcaaattactttgcttcctagctgatgtcatcccacattggtacaggtgttattcagtactgggtggttcagcagggaagccgggtgggaccagtgtgtctgtcatgaaaccactaactgcattcctgactgaagagccatctgtcatttattggggaaggtcttcagttgagctctcagccttaggaaggaagcacgtggaggagggacggaggaggttcccttgctgggcatgcttcgtagagggccaggagcagcaggtcatgtgcacatgccgttgcagcacaagcttatgcttcccgtagccgtggcttttcattctgcacagtcccaggtcccagctcccctcttatggtttctgtcataatgtgctttatctgattgactccaaacatcccgaaatgtcacctgcagatttctcgtgggaaccaatatgtacatgtttgcaattatgctgtgagaatttaaatgtgttagatggaaaatgctattggcagggaataataataaaaaaaaaagaaaatcattctgtttcctgcagtgggaactggccatgtagtcttaacagtcttttgtacaaatatctacaaagcagataatatccctatccagtgcttgcccttggaattgtctctaaatgcatcaagcatacaataaaaaaaactgaaattaacatcca

SEQ ID NO: 179383 - DNA, 1732 bp, Homo sapiens
  Payload ID: 15351
  Gene Symbol: SCRN1
  Gene Name: secernin 1
  Uniprot ID: Q12765
  ENST ID: ENST00000409497
  CDS Start-End: 205-1449
attaaacaatatctggtctcggtggctctgtcattccactgcaggcgtcccaccttcatttgccagctgggatctcttaatgagctagctgtgcacagttcaatagtaaaacccttttagctggtgaaatatgtttgaagaactcactgttggagtgttccatgtgaggcctgcttccactcttgctggcattctcttttcaggatggctgcagctcctccaagttactgttttgttgccttccctccacgtgctaaggatggtctggtggtatttgggaaaaattcagcccggcccagagatgaagtgcaagaggttgtgtatttctcggctgctgatcacgaaccggagagcaaggttgagtgcacttacatttcaatcgaccaagttccaaggacctatgccataatgataagcagacccgcctggctctggggagcagaaatgggagccaatgaacatggagtgtgcatagccaatgaagccatcaacaccagagagccagctgccgagatagaagccttgctggggatggatctggtcaggcttggtttagaaagaggggaaacagctaaagaagccttagatgtcattgtctccttgttggaagaacatggacaaggtgggaattactttgaagatgcaaactcctgccacagcttccaaagtgcatatctgattgtggatcgtgatgaagcctgggtgctcgagaccatagggaagtactgggctgccgagaaagtcacagagggagtgaggtgcatttgcagtcagctttcgctcaccactaagatggatgcagagcatccggaactcaggagttacgctcagagccaaggttggtggacgggagagggcgagttcaatttttccgaagtcttttctccagttgaggatcatctagactgcggtgctggcaaagacagcttagaaaaacaagaagaaagcatcacagtgcagactatgatgaacaccttacgggacaaagccagcggagtgtgcatagactctgagtttttcctcaccacagccagtggagtgtctgtcctgccgcagaatagaagctctccgtgcattcactacttcactggaacccctgatccttccaggtccatattcaagcctttcatctttgttgatgacgtaaaacttgtccccaaaacacagtctccctgttttggggatgacgaccctgccaaaaaggagcctcggttccaggagaaaccagaccgccggcatgagctgtacaaagcccacgagtgggcacgtgccatcatcgaaagtgaccaggagcaaggtcgcaagctgaggagcaccatgctggagctggagaagcaaggcctggaagccatggaagaaatcctgaccagctccgagccactggaccctgcggaagtgggggaccttttctatgactgtgttgacacggagattaagttctttaagtgaagtaagcgttccctttccccttcttatttaagacttcccaccttactaaattaccagcaaaacaaaccactctcctgtttgagtaaaatgagaaagttaatatgtggcctccttttctgaagccagatcaaactgttaccttgtgttccaccttgaatctcacagcgtccccttctgcaatgtaggtctccttcctgtgcagtgtaacatgtatcccgttgcctgttgttcggttgtgtgactaattgtggattttaagctgctattattgtatttcagtggc

SEQ ID NO: 179384 - DNA, 535 bp, Homo sapiens
  Payload ID: 15351
  Gene Symbol: SCRN1
  Gene Name: secernin 1
  ENST ID: ENST00000409570
  CDS Start-End: 91-513
taatccggacccggcagcacccgcaccctcggcggccgcagcctcagcaccgcagagcggagagcggagcccggagcccgccgccccaggatggctgcagctcctccaagttactgttttgttgccttccctccacgtgctaaggatggtctggtggtatttgggaaaaattcagcccggcccagagatgaagtgcaagaggttgtgtatttctcggctgctgatcacgaaccggagagcaaggttgagtgcacttacatttcaatcgaccaagttccaaggacctatgccataatgataagcagacccgcctggctctggggagcagaaatgggagccaatgaacatggagtgtgcatagccaatgaagccatcaacaccagagagccagctgccgagatagaagccttgctggggatggatctggtcaggaacgggcagggtgagcttgacatacctgtgagaaggtcatgggctcccagggaaagattttcctataaaactaggaattgaattcaggagcatctaattccca

SEQ ID NO: 179385 - DNA, 1454 bp, Homo sapiens
  Payload ID: 15351
  Gene Symbol: SCRN1
  Gene Name: secernin 1
  Uniprot ID: Q12765
  ENST ID: ENST00000434476
  CDS Start-End: 50-1354
ctctaggccacaatgtccaagtacctgggacagggtctggcttaccaacatggtacaggacggcacttttaaaaccagggactcgacttggacgtgcgagtcaacaaggatggctgcagctcctccaagttactgttttgttgccttccctccacgtgctaaggatggtctggtggtatttgggaaaaattcagcccggcccagagatgaagtgcaagaggttgtgtatttctcggctgctgatcacgaaccggagagcaaggttgagtgcacttacatttcaatcgaccaagttccaaggacctatgccataatgataagcagacccgcctggctctggggagcagaaatgggagccaatgaacatggagtgtgcatagccaatgaagccatcaacaccagagagccagctgccgagatagaagccttgctggggatggatctggtcaggcttggtttagaaagaggggaaacagctaaagaagccttagatgtcattgtctccttgttggaagaacatggacaaggtgggaattactttgaagatgcaaactcctgccacagcttccaaagtgcatatctgattgtggatcgtgatgaagcctgggtgctcgagaccatagggaagtactgggctgccgagaaagtcacagagggagtgaggtgcatttgcagtcagctttcgctcaccactaagatggatgcagagcatccggaactcaggagttacgctcagagccaaggttggtggacgggagagggcgagttcaatttttccgaagtcttttctccagttgaggatcatctagactgcggtgctggcaaagacagcttagaaaaacaagaagaaagcatcacagtgcagactatgatgaacaccttacgggacaaagccagcggagtgtgcatagactctgagtttttcctcaccacagccagtggagtgtctgtcctgccgcagaatagaagctctccgtgcattcactacttcactggaacccctgatccttccaggtccatattcaagcctttcatctttgttgatgacgtaaaacttgtccccaaaacacagtctccctgttttggggatgacgaccctgccaaaaaggagcctcggttccaggagaaaccagaccgccggcatgagctgtacaaagcccacgagtgggcacgtgccatcatcgaaagtgaccaggagcaaggtcgcaagctgaggagcaccatgctggagctggagaagcaaggcctggaagccatggaagaaatcctgaccagctccgagccactggaccctgcggaagtgggggaccttttctatgactgtgttgacacggagattaagttctttaagtgaagtaagcgttccctttccccttcttatttaagacttcccaccttactaaattaccagcaaaacaaaccactctcctgtttgagtaaaatgagaaagttaa

SEQ ID NO: 179386 - DNA, 560 bp, Homo sapiens
  Payload ID: 15351
  Gene Symbol: SCRN1
  Gene Name: secernin 1
  ENST ID: ENST00000438497
  CDS Start-End: 137-560
atattagataatggagaagcaaatggcaaggatggttaccttggctaccaagataaagaaccttgaaaagggaagaagatgaaatcagcttcggatatcaggcaggcagctgggtctgtgggtcagaggcttaaggatggctgcagctcctccaagttactgttttgttgccttccctccacgtgctaaggatggtctggtggtatttgggaaaaattcagcccggcccagagatgaagtgcaagaggttgtgtatttctcggctgctgatcacgaaccggagagcaaggttgagtgcacttacatttcaatcgaccaagttccaaggacctatgccataatgataagcagacccgcctggctctggggagcagaaatgggagccaatgaacatggagtgtgcatagccaatgaagccatcaacaccagagagccagctgccgagatagaagccttgctggggatggatctggtcaggcttggtttagaaagaggggaaacagctaaagaagccttagatgtcattgtctccttgttggaagaacatggacaaggtggga

SEQ ID NO: 179387 - DNA, 5275 bp, Homo sapiens
  Payload ID: 15351
  Gene Symbol: SCRN1
  Gene Name: secernin 1
  Uniprot ID: Q12765
  ENST ID: ENST00000426154
  CDS Start-End: 178-1422
aaacgtcgggaagaggcgccaaaaggatgctgggcctggctccttgaagcccgggttttcccttttgagagccacaaccaagaaataaaaatctagcaaagagggggccactttctgcggcgagatacgccctctcggccgctcctccagctcccaggccccctccctactcgacggatggctgcagctcctccaagttactgttttgttgccttccctccacgtgctaaggatggtctggtggtatttgggaaaaattcagcccggcccagagatgaagtgcaagaggttgtgtatttctcggctgctgatcacgaaccggagagcaaggttgagtgcacttacatttcaatcgaccaagttccaaggacctatgccataatgataagcagacccgcctggctctggggagcagaaatgggagccaatgaacatggagtgtgcatagccaatgaagccatcaacaccagagagccagctgccgagatagaagccttgctggggatggatctggtcaggcttggtttagaaagaggggaaacagctaaagaagccttagatgtcattgtctccttgttggaagaacatggacaaggtgggaattactttgaagatgcaaactcctgccacagcttccaaagtgcatatctgattgtggatcgtgatgaagcctgggtgctcgagaccatagggaagtactgggctgccgagaaagtcacagagggagtgaggtgcatttgcagtcagctttcgctcaccactaagatggatgcagagcatccggaactcaggagttacgctcagagccaaggttggtggacgggagagggcgagttcaatttttccgaagtcttttctccagttgaggatcatctagactgcggtgctggcaaagacagcttagaaaaacaagaagaaagcatcacagtgcagactatgatgaacaccttacgggacaaagccagcggagtgtgcatagactctgagtttttcctcaccacagccagtggagtgtctgtcctgccgcagaatagaagctctccgtgcattcactacttcactggaacccctgatccttccaggtccatattcaagcctttcatctttgttgatgacgtaaaacttgtccccaaaacacagtctccctgttttggggatgacgaccctgccaaaaaggagcctcggttccaggagaaaccagaccgccggcatgagctgtacaaagcccacgagtgggcacgtgccatcatcgaaagtgaccaggagcaaggtcgcaagctgaggagcaccatgctggagctggagaagcaaggcctggaagccatggaagaaatcctgaccagctccgagccactggaccctgcggaagtgggggaccttttctatgactgtgttgacacggagattaagttctttaagtgaagtaagcgttccctttccccttcttatttaagacttcccaccttactaaattaccagcaaaacaaaccactctcctgtttgagtaaaatgagaaagttaatatgtggcctccttttctgaagccagatcaaactgttaccttgtgttccaccttgaatctcacagcgtccccttctgcaatgtaggtctccttcctgtgcagtgtaacatgtatcccgttgcctgttgttcggttgtgtgactaattgtggattttaagctgctattattgtatttcagtggcaatggacacattagccttttacaagaggactagagttcatcaagccttgaaaggcaggcttcacagtgccgagttggcgggaaaagcaaattcttttgaagtcttagtctttccctcagtagcggtttctttcaggttaacaagaggcatttgtgcacacacacagggctcttgtgtgtgttgtcaaggggaccctccgtggcctcccgtgagtgcatgcctgtagtgcacagtgtctctacaggtgtcttctggggggcagaaccaattggaaggaagaaagggacccctctccagtcctggctccttcctacatcctgggctcctgaagaagctgtcttcccattttccatgcgctgtgcttatgtgtggtggactgcagagctgcttccacttacaggagagctgataatttgttagctggaacctattcacttccgagattcagacatagccatgctggtggccttctgaatcactgcatggatgtcccaggaggcagctctccccacacagcagcacagccatcacaggattccttgtgtagaaatgattcccagtctagttaccaacagctagtctaggagtaattgaatggccctatggcacagttccacccacagagtagtgaatctctcagccaaggagggaaagaaaaggaagaactcttgactatttagattctagttaaatatctggaatcctagcagtcactacattatctcagcagagagactttaattaaactgatttgtttccaatgtcgggttcacttaaaggatttgacttaccaccagagcatagaaaagcatgcaaggaagaccagatgggcttagcattgggaagacagagggcaaggaggtgatagatggatatagaagcatttctctgcaggataccagttcaggccccaccattcctgccaaggccattacatcccacaaacccaaatacaaagcagctgacttccctggatcttccccccactcctcacacctcacatgtcccaggagctgccttcattcaggcgggtagctgcactgggcatggggtggtggtgggagcttaccgccacctattcaagctctcagctactcctgaaacgggcagagatgatgaacagaagtgtatgtaaatacagcagctagtgggagagcaccagttgggcctaatcctgcctcatcattcttggcaggaatctgcaaatggaaacattgtgagtatcagcaatctgggaagtgacagggttaataactccttcccagaagctgtatcatgagattttgaggggaccgagccctgttacatggatgtgaacagtgaggatcagaggttttatcagaacacattctttttttctaccaactctccagagcgtgagtataggagtgccatgagctttttagtcagcagttttgtaaactctgtatataaaatcattaaccacacattgtgggtgatgggaagacgatttcagctgacagagttaatggcaaccaataatggtggcctgtagctgctaagagcttcacgcaggtttggcctgggctttcactgttggtgaatttagagtgtccttttaggtggggcggctattctaaaagtgtctttctatcactgttaagggggggggaaagtgaggttcgaggatgacgtaggtaactctcccctcccaagtccatgttccaagtggctatgtaaagcaagatgatacagaaagctgctctaaaatctcactgagtgatttcaccttcgcctactatgaaatgtctcatcagacctgacatgtctgagataaccaaggtgattcaggatttgatcaaaagaagtctagtaagaattaattacacagaagcctcctttcatttctatgggccaaacaaaggccatggataaccctacccgctttatgtcattacccattgggaaacacaatggctacttctgttagggtacattgaccttggtcaagcatcttaaagaaggcaaccctaattgagagctgtcttggctaatactctgcaccacaattgtgatgtcctagtcctaccactagagggcatggtacagcctggcaaaagttaaaaggggtgtggcagctcccatcaggtctggaggtggtctataagcacagttgacagttgtgcattgggatgggtggagaaagacgacaagagagcagagaatctgctgatgtggctgcgcttacttttagtgactttatgtacttatattaacagctggaaataggttgttgggttttgagcaggctgttatagtgaggaatgttcatttttaaatgttcctaacagattttgcttttgaaaaatgcttgttacatgaataatttgtggaccagggattgcttttctgaaggcagtatagggaacatgaatattcaagatgaaatacaaaaattatgtttaagggtcatagtgtataagtagcttcctaggaaaccctttgtgtatcttttcagactggggtgggggctgagcatgcttgtgcagaaagaagccatagccagaaaggacagaatctctcccccactcccttgccccataaccaaacataagctagctagtcttgtctaatagatgggatttactataggtgaagatagccctcatattcaaggacagaagctctggcaggagtaaattagcaaagcagaaatagtaccctttcattcttggaggtgctttgaaattttaggtagaatataatcgaaattatggaggttccttagtgctcaataatataagacctggtgttattagaacgagtctttcttataaactaacagagcaggtatatgcctgttagaccttagctgtggggttcctttactattgggtgaatcattaggtataaaaaataatcatcaaccaggcaaattactttgcttcctagctgatgtcatcccacattggtacaggtgttattcagtactgggtggttcagcagggaagccgggtgggaccagtgtgtctgtcatgaaaccactaactgcattcctgactgaagagccatctgtcatttattggggaaggtcttcagttgagctctcagccttaggaaggaagcacgtggaggagggacggaggaggttcccttgctgggcatgcttcgtagagggccaggagcagcaggtcatgtgcacatgccgttgcagcacaagcttatgcttcccgtagccgtggcttttcattctgcacagtcccaggtcccagctcccctcttatggtttctgtcataatgtgctttatctgattgactccaaacatcccgaaatgtcacctgcagatttctcgtgggaaccaatatgtacatgtttgcaattatgctgtgagaatttaaatgtgttagatggaaaatgctattggcagggaataataataaaaaaaaaagaaaatcattctgtttcctgcagtgggaactggccatgtagtcttaacagtcttttgtacaaatatctacaaagcagataatatccctatccagtgcttgcccttggaattgtctctaaatgcatcaagcatacaataaaaaaaactgaaattaacatcc

SEQ ID NO: 179388 - DNA, 1001 bp, Homo sapiens
  Payload ID: 15351
  Gene Symbol: SCRN1
  Gene Name: secernin 1
  ENST ID: ENST00000421434
  CDS Start-End: 265-1001
gacttggacgtgcgagtcaacaaggtacaggacacatttctctccggggaaatcttgtgtgggcgccgaggcccggacgtagcaaccaaacgtcgggaagaggcgccaaaaggatgctgggcctggctccttgaagcccgggttttcccttttgagagccacaaccaagaaataaaaatctagcaaagagggggccactttctgcggcgagatacgccctctcggccgctcctccagctcccaggccccctccctactcgacggatggctgcagctcctccaagttactgttttgttgccttccctccacgtgctaaggatggtctggtggtatttgggaaaaattcagcccggcccagagatgaagtgcaagaggttgtgtatttctcggctgctgatcacgaaccggagagcaaggttgagtgcacttacatttcaatcgaccaagttccaaggacctatgccataatgataagcagacccgcctggctctggggagcagaaatgggagccaatgaacatggagtgtgcatagccaatgaagccatcaacaccagagagccagctgccgagatagaagccttgctggggatggatctggtcaggcttggtttagaaagaggggaaacagctaaagaagccttagatgtcattgtctccttgttggaagaacatggacaaggtgggaattactttgaagatgcaaactcctgccacagcttccaaagtgcatatctgattgtggatcgtgatgaagcctgggtgctcgagaccatagggaagtactgggctgccgagaaagtcacagagggagtgaggtgcatttgcagtcagctttcgctcaccactaagatggatgcagagcatccggaactcaggagttacgctcagagccaaggttggtggacgggagagggcgagttcaatttttccgaagtcttttctccagttgaggatcatctagactgcggtgctggcaaagacagcttagaaaaacaaga

SEQ ID NO: 179389 - DNA, 1552 bp, Homo sapiens
  Payload ID: 15351
  Gene Symbol: SCRN1
  Gene Name: secernin 1
  Uniprot ID: Q12765
  ENST ID: ENST00000425819
  CDS Start-End: 117-1157
acccgcaccctcggcggccgcagcctcagcaccgcagagcggagagcggagcccggagcccgccgccccagtgcacttacatttcaatcgaccaagttccaaggacctatgccataatgataagcagacccgcctggctctggggagcagaaatgggagccaatgaacatggagtgtgcatagccaatgaagccatcaacaccagagagccagctgccgagatagaagccttgctggggatggatctggtcaggcttggtttagaaagaggggaaacagctaaagaagccttagatgtcattgtctccttgttggaagaacatggacaaggtgggaattactttgaagatgcaaactcctgccacagcttccaaagtgcatatctgattgtggatcgtgatgaagcctgggtgctcgagaccatagggaagtactgggctgccgagaaagtcacagagggagtgaggtgcatttgcagtcagctttcgctcaccactaagatggatgcagagcatccggaactcaggagttacgctcagagccaaggttggtggacgggagagggcgagttcaatttttccgaagtcttttctccagttgaggatcatctagactgcggtgctggcaaagacagcttagaaaaacaagaagaaagcatcacagtgcagactatgatgaacaccttacgggacaaagccagcggagtgtgcatagactctgagtttttcctcaccacagccagtggagtgtctgtcctgccgcagaatagaagctctccgtgcattcactacttcactggaacccctgatccttccaggtccatattcaagcctttcatctttgttgatgacgtaaaacttgtccccaaaacacagtctccctgttttggggatgacgaccctgccaaaaaggagcctcggttccaggagaaaccagaccgccggcatgagctgtacaaagcccacgagtgggcacgtgccatcatcgaaagtgaccaggagcaaggtcgcaagctgaggagcaccatgctggagctggagaagcaaggcctggaagccatggaagaaatcctgaccagctccgagccactggaccctgcggaagtgggggaccttttctatgactgtgttgacacggagattaagttctttaagtgaagtaagcgttccctttccccttcttatttaagacttcccaccttactaaattaccagcaaaacaaaccactctcctgtttgagtaaaatgagaaagttaatatgtggcctccttttctgaagccagatcaaactgttaccttgtgttccaccttgaatctcacagcgtccccttctgcaatgtaggtctccttcctgtgcagtgtaacatgtatcccgttgcctgttgttcggttgtgtgactaattgtggattttaagctgctattattgtatttcagtggcaatggacacattagccttttacaagaggactagagttcatcaagccttgaaaggcaggcttcacagtgccgagttggcgggaaaagcaaattcttttgaagtcttagtcttt

SEQ ID NO: 179390 - DNA, 423 bp, Homo sapiens
  Payload ID: 15351
  Gene Symbol: SCRN1
  Gene Name: secernin 1
  ENST ID: ENST00000631335
  CDS Start-End: 1-423
atggctgcagctcctccaagttactgttttgttgccttccctccacgtgctaaggatggtctggtggtatttgggaaaaattcagcccggcccagagatgaagtgcaagaggttgtgtatttctcggctgctgatcacgaaccggagagcaaggttgagtgcacttacatttcaatcgaccaagttccaaggacctatgccataatgataagcagacccgcctggctctggggagcagaaatgggagccaatgaacatggagtgtgcatagccaatgaagccatcaacaccagagagccagctgccgagatagaagccttgctggggatggatctggtcaggaacgggcagggtgagcttgacatacctgtgagaaggtcatgggctcccagggaaagattttcctataaaactaggaattga

SEQ ID NO: 179391 - DNA, 1548 bp, Homo sapiens
  Payload ID: 15352
  Gene Symbol: SCRN2
  Gene Name: secernin 2
  Uniprot ID: Q96FV2
  ENST ID: ENST00000290216
  CDS Start-End: 127-1404
ccggctccgaccccgaggccgaaggccttccaggtcacctgagagtctccgcccaatggggcggccctggccagaagcggaggaggtggcacccgggaccgagctggggtcttggaggaagagaggatggcgtcgtcgagccctgactccccatgttcctgcgactgctttgtctccgtgcccccggcctcagccatcccggctgtgatctttgccaagaactcggaccgaccccgggacgaggtgcaggaggtggtgtttgtccccgcaggcactcacactcctgggagccggctccagtgcacctacattgaagtggaacaggtgtcgaagacgcacgctgtgattctgagccgtccttcttggctatggggggctgagatgggcgccaacgagcatggtgtctgcattggcaacgaggctgtgtggacgaaggagccagttggggagggggaagccctgctgggcatggacctactcaggctggctttggaacggagcagctctgcccaggaggccttgcatgtgatcacagggttactggagcactatgggcaggggggcaactgcctggaggatgctgcgccattctcctaccatagcaccttcctgctggctgaccgcactgaggcgtgggtgctggagacagctgggaggctctgggctgcacagaggatccaggagggggcccgcaacatctccaaccagctgagcattggcacggacatctcggcccaacacccggagctgcggactcatgcccaggccaagggctggtgggatgggcagggtgcctttgactttgctcagatcttctccctgacccagcagcctgtgcgcatggaggctgccaaggcccgcttccaggcagggcgggagctgctgcggcaacggcaagggggcatcacggcagaggtgatgatgggcatcctcagagacaaggagagtggtatctgtatggactcgggaggctttcgcaccacggccagcatggtgtctgtcctgccccaggatcccacgcagccctgcgtgcactttcttaccgccacgccagacccatccaggtctgtgttcaaacctttcatcttcgggatgggggtggcccaggccccccaggtgctgtcccccacttttggagcacaagaccctgttcggaccctgccccgattccagactcaggtagatcgtcggcataccctctaccgtggacaccaggcagccctggggctgatggagagagatcaggatcgggggcagcagctccagcagaaacagcaggatctggagcaggaaggcctcgaggccacacaggggctgctggccggcgagtgggccccacccctctgggagctgggcagcctcttccaggccttcgtgaagagggagagccaggcttatgcgtaagcttcatagcttctgctggcctggggtggacccaggacccctggggcctgggtgccctgagtggtggtaaagtggagcaatcccttcacgctccttggccatgttctgagcggccagcttggcctttgccttaataaatgtgct

SEQ ID NO: 179392 - DNA, 1779 bp, Homo sapiens
  Payload ID: 15352
  Gene Symbol: SCRN2
  Gene Name: secernin 2
  Uniprot ID: Q96FV2
  ENST ID: ENST00000407215
  CDS Start-End: 83-1219
gtctccgcccaatggggcggccctggccagaagcggaggaggtggcacccgggaccgagctggggtcttggaggaagagaggatggcgtcgtcgagccctgactccccatgttcctgcgactgctttgtctccgtgcccccggcctcagccatcccggctgtgatctttgccaagaactcggaccgaccccgggacgaggtgcaggaggtggtgtttgtccccgcaggcactcacactcctgggagccggctccagtgcacctacattgaagtggaacaggtgtcgaagacgcacgctgtgattctgagccgtccttcttggctatggggggctgagatgggcgccaacgagcatggtgtctgcattggcaacgaggctgtgtggacgaaggagccagttggggagggggaagccctgctgggcatggacctactcaggctggctttggaacggagcagctctgcccaggaggccttgcatgtgatcacagggttactggagcactatgggcaggggggcaactgcctggaggatgctgcgccattctcctaccatagcaccttcctgctggctgaccgcactgaggcgtgggtgctggagacagctgggaggctctgggctgcacagaggatccaggagggggcccgcaacatctccaaccagctgagcattggcacggacatctcggcccaacacccggagctgcggactcatgcccaggccaagggctggtgggatgggcagggtgcctttgactttgctcagatcttctccctgacccagcagcctgtgcgcatggaggctgccaaggcccgcttccaggcagggcgggagctgctgcggcaacggcaagggggcatcacggcagaggtgatgatgggcatcctcagagacaaggagagtggtatctgtatggactcgggaggctttcgcaccacggccagcatggtgtctgtcctgccccaggatcccacgcagccctgcgtgcactttcttaccgccacgccagacccatccaggtctgtgttcaaacctttcatcttcgggatgggggtggcccaggccccccaggtgctgtcccccacttttggagcacaagaccctgttcggaccctgccccgattccagactcaggtagatcgtcggcataccctctaccgtggacaccaggcagccctggggctgatggagagagatcaggtatcccccagggagtaggggctaccttgaggggatgatagacctcccccactcccagtgggactctggaaatatgaaggaactagggagtggaagagatttcagagctggggagaggagttcctcccttcaaagccagcaactgcctttggggaatgtcggggggtatctcctttctcctgcttgtgtgaggtggtacacagtccccccttcacctggcgggaagcctgtcccggacagactcatctcagctttcccttggggcaggatcgggggcagcagctccagcagaaacagcaggatctggagcaggaaggcctcgaggccacacaggggctgctggccggcgagtgggccccacccctctgggagctgggcagcctcttccaggccttcgtgaagagggagagccaggcttatgcgtaagcttcatagcttctgctggcctggggtggacccaggacccctggggcctgggtgccctgagtggtggtaaagtggagcaatcccttcacgctccttggccatgttctgagcggccagcttggcctttgccttaataaatgtgctttattttc

SEQ ID NO: 179393 - DNA, 952 bp, Homo sapiens
  Payload ID: 15352
  Gene Symbol: SCRN2
  Gene Name: secernin 2
  ENST ID: ENST00000579856
  CDS Start-End: 59-352
ggccagaagcggaggaggtggcacccgggaccgagctggggtcttggaggaagagaggatggcgtcgtcgagccctgactccccatgttcctgcgactgctttgtctccgtgcccccggcctcagccatcccggctgtgatctttgccaagaactcggaccgaccccgggacgaggtgcaggaggtggtgtttgtccccgcaggcactcacactcctgggagccggctccaggctggctttggaacggagcagctctgcccaggaggccttgcatgtgatcacagggttactggagcactatgggcaggggggcaactgcctggaggatgctgcgccattctcctaccatagcaccttcctgctggctgaccgcactgaggcgtgggtgctggagacagctgggaggctctgggctgcacagaggatccaggagggggcccgcaacatctccaaccagctgagcattggcacggacatctcggcccaacacccggagctgcggactcatgcccaggccaagggctggtgggatgggcagggtgcctttgactttgctcagatcttctccctgacccagcagcctgtgcgcatggaggctgccaaggcccgcttccaggcagggcgggagctgctgcggcaacggcaagggggcatcacggcagaggtgatgatgggcatcctcagagacaaggagagtggtatctgtatggactcgggaggctttcgcaccacggccagcatggtgtctgtcctgccccaggatcccacgcagccctgcgtgcactttcttaccgccacgccagacccatccaggtctgtgttcaaacctttcatcttcgggatgggggtggcccaggccccccaggtgctgtcccccacttttggagcacaagaccctgttcggaccctgccccgattccagactcaggtagatcgtcggcataccctcta

SEQ ID NO: 179394 - DNA, 1624 bp, Homo sapiens
  Payload ID: 15352
  Gene Symbol: SCRN2
  Gene Name: secernin 2
  ENST ID: ENST00000582459
  CDS Start-End: 8-391
tccccagatggcgtcgtcgagccctgactccccatgttcctgcgactgctttgtctccgtgcccccggcctcagccatcccggctgtgatctttgccaagaactcggaccgaccccgggacgaggtgcaggaggtggtgtttgtccccgcaggcactcacactcctgggagccggctccagtgcacctacattgaagtggaacaggtgtcgaagacgcacgctgtgattctgagccgtccttcttggctatggggggctgagatgggcgccaacgagcatggtgtctgcattggcaacgaggctgtgtggacgaaggagccagttggggagggggaagccctgctgggcatggacctactcaggccttttcatggaaccctcaaagcatagcacatggaaccagagcattgaaagccactggcataattgcatttgatacgatcagtgccagcagatttgctgtgtgacttgggcctatcaccaaacctctccgggcctcttctgtcccctggagcttctgccaccagccattgatccctctgtcacccttctgtcccttggccctctcttttgccaggctggctttggaacggagcagctctgcccaggaggccttgcatgtgatcacagggttactggagcactatgggcaggggggcaactgcctggaggatgctgcgccattctcctaccatagcaccttcctgctggctgaccgcactgaggcgtgggtgctggagacagctgggaggctctgggctgcacagaggatccaggagggggcccgcaacatctccaaccagctgagcattggcacggacatctcggcccaacacccggagctgcggactcatgcccaggccaagggctggtgggatgggcagggtgcctttgactttgctcagatcttctccctgacccagcagcctgtgcgcatggaggctgccaaggcccgcttccaggcagggcgggagctgctgcggcaacggcaagggggcatcacggcagaggtgatgatgggcatcctcagagacaaggagagtggtatctgtatggactcgggaggctttcgcaccacggccagcatggtgtctgtcctgccccaggatcccacgcagccctgcgtgcactttcttaccgccacgccagacccatccaggtctgtgttcaaacctttcatcttcgggatgggggtggcccaggccccccaggtgctgtcccccacttttggagcacaagaccctgttcggaccctgccccgattccagactcaggtagatcgtcggcataccctctaccgtggacaccaggcagccctggggctgatggagagagatcaggatcgggggcagcagctccagcagaaacagcaggatctggagcaggaaggcctcgaggccacacaggggctgctggccggcgagtgggccccacccctctgggagctgggcagcctcttccaggccttcgtgaagagggagagccaggcttatgcgtaagcttcatagcttctgctggcctggggtggacccaggacccctggggcctgggtgccctgagtggtggtaaagtggagcaatcccttcacgctccttggccatgttctgagcggccagcttggcc

SEQ ID NO: 179395 - DNA, 1745 bp, Homo sapiens
  Payload ID: 15352
  Gene Symbol: SCRN2
  Gene Name: secernin 2
  ENST ID: ENST00000584123
  CDS Start-End: 307-1608
gttggacagaagagggtcgggtatctgggcatgcgcagggccgcaggactcttggtggggtagcgagggggacggtcccacgactgctccgaagggccgggactcccagtgggggcgggacccccggagtgcccgcctgcggactcccaagcctggagcctggggagagggtgggcacctccgttcccgcacacccgtccatggtgtgtgcgccgagcgtccaggagccacggcggtgtcttccttgcgcgtcttttacacgtgtgggggtaggctgctcctcggggctgagccgtggccagggttatggagaggcccgcctctccccagatggcgtcgtcgagccctgactccccatgttcctgcgactgctttgtctccgtgcccccggcctcagccatcccggctgtgatctttgccaagaactcggaccgaccccgggacgaggtgcaggaggtggtgtttgtccccgcaggcactcacactcctgggagccggctccagtgcacctacattgaagtggaacaggtgtcgaagacgcacgctgtgattctgagccgtccttcttggctatggggggctgagatgggcgccaacgagcatggtgtctgcattggcaacgaggctgtgtggacgaaggagccagttggggagggggaagccctgctgggcatggacctactcaggctggctttggaacggagcagctctgcccaggaggccttgcatgtgatcacagggttactggagcactatgggcaggggggcaactgcctggaggatgctgcgccattctcctaccatagcaccttcctgctggctgaccgcactgaggcgtgggtgctggagacagctgggaggctctgggctgcacagaggatccaggagggggcccgcaacatctccaaccagctgagcattggcacggacatctcggcccaacacccggagctgcggactcatgcccaggccaagggctggtgggatgggcagggtgcctttgactttgctcagatcttctccctgacccagcagcctgtgcgcatggaggctgccaaggcccgcttccaggcagggcgggagctgctgcggcaacggcaagggggcatcacggcagaggtgatgatgggcatcctcagagacaaggagagtggtatctgtatggactcgggaggctttcgcaccacggccagcatggtgtctgtcctgccccaggatcccacgcagccctgcgtgcactttcttaccgccacgccagacccatccaggtctgtgttcaaacctttcatcttcgggatgggggtggcccaggccccccaggtgctgtcccccacttttggagcacaagaccctgttcggaccctgccccgattccagactcaggtagatcgtcggcataccctctaccgtggacaccaggcagccctggggctgatggagagagatcaggatcgggggcagcagctccagcagaaacagcaggatctggagcaggaaggcctcgaggccacacaggggctgctggccggcgagtgggccccacccctctgggagctgggcagcctcttccaggccttcgtgaagagggagagccaggcttatgcgtaagcttcatagcttctgctggcctggggtggacccaggacccctggggcctgggtgccctgagtggtggtaaagtggagcaatcccttcacgctccttggccatgttctgagcggccagcttggcctttgccttaataa

SEQ ID NO: 179396 - DNA, 932 bp, Homo sapiens
  Payload ID: 15352
  Gene Symbol: SCRN2
  Gene Name: secernin 2
  ENST ID: ENST00000584567
  CDS Start-End: 1-808
cacagggttactggagcactatgggcaggggggcaactgcctggaggatgctgcgccattctcctaccatagcaccttcctgctggctgaccgcactgaggcgtgggtgctggagacagctgggaggctctgggctgcacagaggatccaggagggggcccgcaacatctccaaccagctgagcattggcacggacatctcggcccaacacccggagctgcggactcatgcccaggccaagggctggtgggatgggcagggtgcctttgactttgctcagatcttctccctgacccagcagcctgtgcgcatggaggctgccaaggcccgcttccaggcagggcgggagctgctgcggcaacggcaagggggcatcacggcagaggtgatgatgggcatcctcagagacaaggagagtggtatctgtatggactcgggaggctttcgcaccacggccagcatggtgtctgtcctgccccaggatcccacgcagccctgcgtgcactttcttaccgccacgccagacccatccaggtctgtgttcaaacctttcatcttcgggatgggggtggcccaggccccccaggtgctgtcccccacttttggagcacaagaccctgttcggaccctgccccgattccagactcaggatcgggggcagcagctccagcagaaacagcaggatctggagcaggaaggcctcgaggccacacaggggctgctggccggcgagtgggccccacccctctgggagctgggcagcctcttccaggccttcgtgaagagggagagccaggcttatgcgtaagcttcatagcttctgctggcctggggtggacccaggacccctggggcctgggtgccctgagtggtggtaaagtggagcaatcccttcacgctccttggccatgttctgagcggccagcttggcc

SEQ ID NO: 179397 - DNA, 624 bp, Homo sapiens
  Payload ID: 15352
  Gene Symbol: SCRN2
  Gene Name: secernin 2
  ENST ID: ENST00000578323
  CDS Start-End: 84-624
ctggccagaagcggaggaggtggcacccgggaccgagctggggtcttggaggaagagagggtgaggggaatacagtactggggatggcgtcgtcgagccctgactccccatgttcctgcgactgctttgtctccgtgcccccggcctcagccatcccggctgtgatctttgccaagaactcggaccgaccccgggacgaggtgcaggaggtggtgtttgtccccgcaggcactcacactcctgggagccggctccagtgcacctacattgaagtggaacaggtgtcgaagacgcacgctgtgattctgagccgtccttcttggctatggggggctgagatgggcgccaacgagcatggtgtctgcattggcaacgaggctgtgtggacgaaggagccagttggggagggggaagccctgctgggcatggacctactcaggctggctttggaacggagcagctctgcccaggaggccttgcatgtgatcacagggttactggagcactatgggcaggggggcaactgcctggaggatgctgcgccattctcctaccatagcaccttcctgctggctgaccgcactgaggcgtgggtgctggagacagctgggaggctctgggctg

SEQ ID NO: 179398 - DNA, 683 bp, Homo sapiens
  Payload ID: 15352
  Gene Symbol: SCRN2
  Gene Name: secernin 2
  ENST ID: ENST00000583090
  CDS Start-End: 262-555
ggacggtcccacgactgctccgaagggccgggactcccagtgggggcgggacccccggagtgcccgcctgcggactcccaagcctggagcctggggagagggtgggcacctccgttcccgcacacccgtccatggtgtgtgcgccgagcgtccaggagccacggcggtgtcttccttgcgcgtcttttacacgtgtgggggtaggctgctcctcggggctgagccgtggccagggttatggagaggcccgcctctccccagatggcgtcgtcgagccctgactccccatgttcctgcgactgctttgtctccgtgcccccggcctcagccatcccggctgtgatctttgccaagaactcggaccgaccccgggacgaggtgcaggaggtggtgtttgtccccgcaggcactcacactcctgggagccggctccaggctggctttggaacggagcagctctgcccaggaggccttgcatgtgatcacagggttactggagcactatgggcaggggggcaactgcctggaggatgctgcgccattctcctaccatagcaccttcctgctggctgaccgcactgaggcgtgggtgctggagacagctgggaggctctgggctgcacagaggatccaggagggggcccgcaacatctccaaccagctgagcattggcacggacatct

SEQ ID NO: 179399 - DNA, 1477 bp, Homo sapiens
  Payload ID: 15352
  Gene Symbol: SCRN2
  Gene Name: secernin 2
  ENST ID: ENST00000581645
  CDS Start-End: 41-856
tggcacccgggaccgagctggggtcttggaggaagagaggatggcgtcgtcgagccctgactccccatgttcctgcgactgctttgtctccgtgcccccggcctcagccatcccggctgtgatctttgccaagaactcggaccgaccccgggacgaggtgcaggaggtggtgtttgtccccgcaggcactcacactcctgggagccggctccagtgcacctacattgaagtggaacaggtgtcgaagacgcacgctgtgattctgagccgtccttcttggctatggggggctgagatgggcgccaacgagcatggtgtctgcattggcaacgaggctgtgtggacgaaggagccagttggggagggggaagccctgctgggcatggacctactcaggctggctttggaacggagcagctctgcccaggaggccttgcatgtgatcacagggttactggagcactatgggcaggggggcaactgcctggaggatgctgcgccattctcctaccatagcaccttcctgctggctgaccgcactgaggcgtgggtgctggagacagctgggaggctctgggctgcacagaggatccaggagggggcccgcaacatctccaaccagctgagcattggcacggacatctcggcccaacacccggagctgcggactcatgcccaggccaagggctggtgggatgggcagggtgcctttgactttgctcagatcttctccctgacccagcagcctgtgcgcatggaggctgccaaggcccgcttccaggcagggcgggagctgctgcggcaacggcaagcttccccctctactccttggcagggggcatcacggcagaggtgatgatgggcatcctcagagacaaggagagtggtatctgtatggactcgggaggctttcgcaccacggccagcatggtgtctgtcctgccccaggatcccacgcagccctgcgtgcactttcttaccgccacgccagacccatccaggtctgtgttcaaacctttcatcttcgggatgggggtggcccaggccccccaggtgctgtcccccacttttggagcacaagaccctgttcggaccctgccccgattccagactcaggtagatcgtcggcataccctctaccgtggacaccaggcagccctggggctgatggagagagatcaggatcgggggcagcagctccagcagaaacagcaggatctggagcaggaaggcctcgaggccacacaggggctgctggccggcgagtgggccccacccctctgggagctgggcagcctcttccaggccttcgtgaagagggagagccaggcttatgcgtaagcttcatagcttctgctggcctggggtggacccaggacccctggggcctgggtgccctgagtggtggtaaagtggagcaatcccttcacgctccttggccatgttctgagcggccagcttggcctttgccttaata

SEQ ID NO: 179400 - DNA, 3037 bp, Homo sapiens
  Payload ID: 15353
  Gene Symbol: SCRN3
  Gene Name: secernin 3
  Uniprot ID: Q0VDG4
  ENST ID: ENST00000272732
  CDS Start-End: 83-1357
ttccggcaactgatgcctccactggccactcctccctccgtccacctgtcacttcgggtagctgggaggccagttaaaaaaaatggaacctttttcctgtgacactttcgtggcattacctccagcaacagtcgataacaggattatttttggaaaaaattcagatagactctatgatgaagtacaagaggtggtttattttcctgctgtagttcatgataacctgggagaacgtcttaagtgtacatatatagaaattgatcaagttcctgaaacatatgctgttgtcctgagtcgcccagcgtggttgtggggggcagaaatgggagccaatgagcatggagtttgcattgggaatgaagctgtatggggaagagaagaagtttgtgatgaagaagcactattaggaatggaccttgtcagacttggccttgaaagagctgatacagctgaaaaagccctcaatgtcattgttgacttactagaaaaatatggccagggtggaaattgcacagagggtagaatggtatttagctatcacaacagtttcctgatagctgataggaatgaagcctggattctggagactgcagggaagtactgggcagcagaaaaagtacaagagggagttcgtaatatttctaatcaactttccataacaaccaagattgcccgggaacacccagacatgagaaactatgctaagcggaaaggttggtgggatggtaaaaaggagtttgattttgctgcagcatattcctatcttgacacagccaagatgatgacttcatcaggcagatactgtgagggctacaagcttctaaataagcacaaaggaaatataacttttgaaacaatgatggaaattcttcgagataaaccaagtggcattaatatggagggagaattcctgaccactgcaagcatggtttctattttacctcaagactccagccttccttgcattcacttctttacagggactcctgatcctgagagatctgtttttaagcctttcatatttgtgccacatatttcacaactattggataccagttcaccaacatttgaacttgaagatctagttaaaaagaaatcacattttaagcctgacagaagacacccactctaccaaaaacatcaacaggcattggaagtagtaaataataatgaggaaaaagccaaaataatgttggacaacatgaggaaactggagaaagaactattcagagagatggaatcaatccttcaaaacaagcatcttgatgtggagaaaattgttaatctctttcctcagtgtacaaaagatgaaattcaaatttatcagtcaaatttatcagtcaaagttagttcttagtgatcatatggtcagctaatattagttcttagtgatcagtggtcagtaatcttcaaagtcagaatctatcaccttggtaaattatataaacctaacttgagcagatctgattattcttggatagtattcaagtggtatcttgactattaaactacgtatagtgttgctgaaatagaaagaaaacagcattggaattggattcatgtatcgtgggatacaggtgttatttcaggtgatgtacttgcattattttctttagccatagtaactttttgtcacaataactaagtattcaattatatataaagagtgaaacattaaaatgacgcatggatttatatttattataattatgtagtaccctcaaatcattttgtcagttacatcaagaaagcagatttttctttagtcatgaaaaatatctcaagtggtaagttgtttgtgctttaggcaaacattaaccagctctaacaagaaaaatgtctagatttacacattgtcaatacagtatattagttctgcaaatgcacttttgttaaactcaaacatgctctttgtcaagacttggctaaccagtgagcttgtagctctgattatctagcatttttagggtcattctccttaataggcttttatgttaataagatatatttttagaagagcttgtttgggagattagagaataagataaaagaaccaaaaccttaggatatactgtttctgggtctgaaatctctctcattgtttacttctgttcactcagtgaaaacagaaacaagaatgaggtagtggcaatgaaatagaattattagtatattatgaacattataacattttgaacactataatgcattatatattatgaacttttatgaactttatacatgagtaatagcttcctaaagtttataaaacattgtttaggttacataaagattaccaagtaagactcaaaattgcaaatataaacaaaagaaaaatccaactgaaaataacactaagtatttttgagttcctagaatgtccattttggtatttggttacattatcatatttactagtcactatcagcacaattaggttaataaagaagtgggtcattatattcaaagagtgctcaggaagttatgtgttcaaagttctctcataaataccatcgtctgcctgatactgctcttgtctaatagagggttgacattacaaaagaaaagatgtctgactcaagaactcagttgattctgtttgccttaagtttggttcagtgataggctgtcttctaacccctatactcctcttctctcctttaatagatgaggaaactaagggcaaacagttcgttacacttacgggaatcttatttccctctctaggggcagcatgttttcaccttctcctttgctgccaccttggcctaaactagcaccgtcttttagctagaccattgcgttaactgttctcctacacccatttttgttctttatttccacccacatgagtcactgcagccaatctattacaaatttaaatctgattatgaattcccctcctaaaactcttttttaaaagagactttattttttggagcagttttaggttcacagcaaaattgaacagaaagtacagagttccaatacagcccctatcagcatacatgcatagcctcccccactatcaacatcc

SEQ ID NO: 179401 - DNA, 1788 bp, Homo sapiens
  Payload ID: 15353
  Gene Symbol: SCRN3
  Gene Name: secernin 3
  Uniprot ID: Q0VDG4
  ENST ID: ENST00000409673
  CDS Start-End: 13-1266
ttccggcaactgatgcctccactggccactcctccctccgtccacctgtcacttcgggtagctgggaggccagatagactctatgatgaagtacaagaggtggtttattttcctgctgtagttcatgataacctgggagaacgtcttaagtgtacatatatagaaattgatcaagttcctgaaacatatgctgttgtcctgagtcgcccagcgtggttgtggggggcagaaatgggagccaatgagcatggagtttgcattgggaatgaagctgtatggggaagagaagaagtttgtgatgaagaagcactattaggaatggaccttgtcagacttggccttgaaagagctgatacagctgaaaaagccctcaatgtcattgttgacttactagaaaaatatggccagggtggaaattgcacagagggtagaatggtatttagctatcacaacagtttcctgatagctgataggaatgaagcctggattctggagactgcagggaagtactgggcagcagaaaaagtacaagagggagttcgtaatatttctaatcaactttccataacaaccaagattgcccgggaacacccagacatgagaaactatgctaagcggaaaggttggtgggatggtaaaaaggagtttgattttgctgcagcatattcctatcttgacacagccaagatgatgacttcatcaggcagatactgtgagggctacaagcttctaaataagcacaaaggaaatataacttttgaaacaatgatggaaattcttcgagataaaccaagtggcattaatatggagggagaattcctgaccactgcaagcatggtttctattttacctcaagactccagccttccttgcattcacttctttacagggactcctgatcctgagagatctgtttttaagcctttcatatttgtgccacatatttcacaactattggataccagttcaccaacatttgaacttgaagatctagttaaaaagaaatcacattttaagcctgacagaagacacccactctaccaaaaacatcaacaggcattggaagtagtaaataataatgaggaaaaagccaaaataatgttggacaacatgaggaaactggagaaagaactattcagagagatggaatcaatccttcaaaacaagcatcttgatgtggagaaaattgttaatctctttcctcagtgtacaaaagatgaaattcaaatttatcagtcaaatttatcagtcaaagttagttcttagtgatcatatggtcagctaatattagttcttagtgatcagtggtcagtaatcttcaaagtcagaatctatcaccttggtaaattatataaacctaacttgagcagatctgattattcttggatagtattcaagtggtatcttgactattaaactacgtatagtgttgctgaaatagaaagaaaacagcattggaattggattcatgtatcgtgggatacaggtgttatttcaggtgatgtacttgcattattttctttagccatagtaactttttgtcacaataactaagtattcaattatatataaagagtgaaacattaaaatgacgcatggatttatatttattataattatgtagtaccctcaaatcattttgtcagttacatcaagaaagcagatttttctttagtcatgaaaaatatctcaagtggtaagttgtttgtgctttaggcaaacattaaccagctctaacaagaaaaatgtctagatttacacattgtcaatacagtatattagttctgc

SEQ ID NO: 179402 - DNA, 582 bp, Homo sapiens
  Payload ID: 15353
  Gene Symbol: SCRN3
  Gene Name: secernin 3
  ENST ID: ENST00000435964
  CDS Start-End: 552-582
aactgatgcctccactggccactcctccctccgtccacctgtcacttcgggtagctgggaggccaggtgaggggcgcgcacgggggaggggcgtgcatagttgagacagaaacccggaagacccaactgtggcgcggcactgcttgaccgaggggctccggagcccagctgcaccggctgcggtttgagcgcccagggccggggtgcggggtggaccgcggcggcccttcgaccaaaggtgcttgaagctcgagcccattactttctgtggactctgactcgagctgcaaaagcttttctgcactgtttttctcatctatgttatgaagataataattccggccctaaccgtagtatgcttgcgagaatccaacaatatgatgtttctgaaagcgccggctgaactaagagcgcgtgaaatagaatgacagacagctctgcaagaacggaggccctgtctattttgtacccagctgtacggtactggcgccgaaagacgttcaataaatacttattgaatgacgaatacgcgttaggagttgttaaaaaaaatggaacctttttcctgtgacactttcgtgg

SEQ ID NO: 179403 - DNA, 804 bp, Homo sapiens
  Payload ID: 15353
  Gene Symbol: SCRN3
  Gene Name: secernin 3
  ENST ID: ENST00000458563
  CDS Start-End: 156-804
cagcttccggcaactgatgcctccactggccactcctccctccgtccacctgtcacttcgggtagctgggaggccagcaaaataaggacctttaggtgttctattataagtgaagatctaagattttccaagttacaactgaagagttaaaaaaaatggaacctttttcctgtgacactttcgtggcattacctccagcaacagtcgataacaggattatttttggaaaaaattcagatagactctatgatgaagtacaagaggtggtttattttcctgctgtagttcatgataacctgggagaacgtcttaagtgtacatatatagaaattgatcaagttcctgaaacatatgctgttgtcctgagtcgcccagcgtggttgtggggggcagaaatgggagccaatgagcatggagtttgcattgggaatgaagctgtatggggaagagaagaagtttgtgatgaagaagcactattaggaatggaccttgtcagacttggccttgaaagagctgatacagctgaaaaagccctcaatgtcattgttgacttactagaaaaatatggccagggtggaaattgcacagagggtagaatggtatttagctatcacaacagtttcctgatagctgataggaatgaagcctggattctggagactgcagggaagtactgggcagcagaaaaagtacaagagggagttcgtaatatttctaatcaactttccataacaaccaagattgcccgggaacacccagacatgagaaactatgctaagcggaaaggttggtgggatggtaaaa

SEQ ID NO: 179404 - DNA, 1141 bp, Homo sapiens
  Payload ID: 15353
  Gene Symbol: SCRN3
  Gene Name: secernin 3
  ENST ID: ENST00000437944
  CDS Start-End: 98-451
atcaaaggtgacagcttccggcaactgatgcctccactggccactcctccctccgtccacctgtcacttcgggtagctgggaggccagttaaaaaaaatggaacctttttcctgtgacactttcgtggcattacctccagcaacagtcgataacaggattatttttggaaaaaattcagatagactctatgatgaagtacaagaggtggtttattttcctgctgtagttcatgataacctgggagaacgtcttaagtgtacatatatagaaattgatcaagttcctgaaacatatgctgttgtcctgagtcgcccagcgtggttgtggggggcagaaatgggagccaatgagcatggagtttgcattgggaatgaagctgtatggggaagagaagaagtttgtgatgaagaagcactattaggaatggaccttgtcagagggagttcgtaatatttctaatcaactttccataacaaccaagattgcccgggaacacccagacatgagaaactatgctaagcggaaaggttggtgggatggtaaaaaggagtttgattttgctgcagcatattcctatcttgacacagccaagatgatgacttcatcaggcagatactgtgagggctacaagcttctaaataagcacaaaggaaatataacttttgaaacaatgatggaaattcttcgagataaaccaagtggcattaatatggagggagaattcctgaccactgcaagcatggtttctattttacctcaagactccagccttccttgcattcacttctttacagggactcctgatcctgagagatctgtttttaagcctttcatatttgtgccacatatttcacaactattggataccagttcaccaacatttgaacttgaagatctagttaaaaagaaatcacattttaagcctgacagaagacacccactctaccaaaaacatcaacaggcattggaagtagtaaataataatgaggaaaaagccaaaataatgttggacaacatgaggaaactggagaaagaactattcagagagatggaatcaatccttcaaaacaagcatcttgatgtggagaaaattgttaatctctttcctcagtgtacaaaagatgaaattcaaatttatca

SEQ ID NO: 179405 - DNA, 548 bp, Homo sapiens
  Payload ID: 15353
  Gene Symbol: SCRN3
  Gene Name: secernin 3
  ENST ID: ENST00000424069
  CDS Start-End: 208-548
gtcacttcgggtagctgggaggccaggtgaggggcgcgcacgggggaggggcgtgcatagttgagacagaaacccggaagacccaactgtggcgcggcactgcttgaccgaggggctccggagcccagctgcaccggctgcggtttgagcgcccagggccggggtgcggggtggaccgcggcggcccttcgaccaaagttaaaaaaaatggaacctttttcctgtgacactttcgtggcattacctccagcaacagtcgataacaggattatttttggaaaaaattcagatagactctatgatgaagtacaagaggtggtttattttcctgctgtagttcatgataacctgggagaacgtcttaagtgtacatatatagaaattgatcaagttcctgaaacatatgctgttgtcctgagtcgcccagcgtggttgtggggggcagaaatgggagccaatgagcatggagtttgcattgggaatgaagctgtatggggaagagaagaagtttgtgatgaagaagcactattaggaatggaccttgtcag

SEQ ID NO: 179406 - DNA, 839 bp, Homo sapiens
  Payload ID: 15353
  Gene Symbol: SCRN3
  Gene Name: secernin 3
  ENST ID: ENST00000427038
  CDS Start-End: 434-839
gggaggccaggtgaggggcgcgcacgggggaggggcgtgcatagttgagacagaaacccggaagacccaactgtggcgcggcactgcttgaccgaggggctccggagcccagctgcaccggctgcggtttgagcgcccagggccggggtgcggggtggaccgcggcggcccttcgaccaaaggtgcttgaagctcgagcccattactttctgtggactctgactcgagctgcaaaagcttttctgcactgtttttctcatctatgttatgaagataataattccggccctaaccgtagtatgcttgcgagaatccaacaatatgatgtttctgaaagcgccggctgaactaagagcgcgtgaaatagaatgacagacagctctgcaagaacggaggccctgtctattttgtacccagctgtacgttaaaaaaaatggaacctttttcctgtgacactttcgtggcattacctccagcaacagtcgataacaggattatttttggaaaaaattcagatagactctatgatgaagtacaagaggtggtttattttcctgctgtagttcatgataacctgggagaacgtcttaagtgtacatatatagaaattgatcaagttcctgaaacatatgctgttgtcctgagtcgcccagcgtggttgtggggggcagaaatgggagccaatgagcatggagtttgcattgggaatgaagctgtatggggaagagaagaagtttgtgatgaagaagcactattaggaatggaccttgtcagacttggccttgaaagagctgatacagctgaaaaagccctcaatgtcattgttgacttactagaaa

SEQ ID NO: 179407 - DNA, 718 bp, Homo sapiens
  Payload ID: 15353
  Gene Symbol: SCRN3
  Gene Name: secernin 3
  ENST ID: ENST00000548031
  CDS Start-End: 90-718
tttggtcattgagtaaaactctttatttttatatacttaaaagtgttctttttattttaaaacatctgtataatttttagttaaaaaaaatggaacctttttcctgtgacactttcgtggcattacctccagcaacagtcgataacaggattatttttggaaaaaattcagatagactctatgatgaagtacaagaggtggtttattttcctgctgtagttcatgataacctgggagaacgtcttaagtgtacatatatagaaattgatcaagttcctgaaacatatgctgttgtcctgagtcgcccagcgtggttgtggggggcagaaatgggagccaatgagcatggagtttgcattgggaatgaagctgtatggggaagagaagaagtttgtgatgaagaagcactattaggaatggaccttgtcagacttggccttgaaagagctgatacagctgaaaaagccctcaatgtcattgttgacttactagaaaaatatggccagggtggaaattgcacagagggtagaatggtatttagctatcacaacagtttcctgatagctgataggaatgaagcctggattctggagactgcagggaagtactgggcagcagaaaaagtacaagagggagttcgtaatatttctaatcaactttccataacaaccaagattgcccgggaacacccagacatgagaaactatgctaagcggaa

SEQ ID NO: 179408 - DNA, 1594 bp, Homo sapiens
  Payload ID: 15353
  Gene Symbol: SCRN3
  Gene Name: secernin 3
  ENST ID: ENST00000548868
  CDS Start-End: 98-451
atcaaaggtgacagcttccggcaactgatgcctccactggccactcctccctccgtccacctgtcacttcgggtagctgggaggccagttaaaaaaaatggaacctttttcctgtgacactttcgtggcattacctccagcaacagtcgataacaggattatttttggaaaaaattcagatagactctatgatgaagtacaagaggtggtttattttcctgctgtagttcatgataacctgggagaacgtcttaagtgtacatatatagaaattgatcaagttcctgaaacatatgctgttgtcctgagtcgcccagcgtggttgtggggggcagaaatgggagccaatgagcatggagtttgcattgggaatgaagctgtatggggaagagaagaagtttgtgatgaagaagcactattaggaatggaccttgtcagagggagttcgtaatatttctaatcaactttccataacaaccaagattgcccgggaacacccagacatgagaaactatgctaagcggaaaggttggtgggatggtaaaaaggagtttgattttgctgcagcatattcctatcttgacacagccaagatgatgacttcatcaggcagatactgtgagggctacaagcttctaaataagcacaaaggaaatataacttttgaaacaatgatggaaattcttcgagataaaccaagtggcattaatatggagggagaattcctgaccactgcaagcatggtttctattttacctcaagactccagccttccttgcattcacttctttacagggactcctgatcctgagagatctgtttttaagcctttcatatttgtgccacatatttcacaactattggataccagttcaccaacatttgaacttgaagatctagttaaaaagaaatcacattttaagcctgacagaagacacccactctaccaaaaacatcaacaggcattggaagtagtaaataataatgaggaaaaagccaaaataatgttggacaacatgaggaaactggagaaagaactattcagagagatggaatcaatccttcaaaacaagcatcttgatgtggagaaaattgttaatctctttcctcagtgtacaaaagatgaaattcaaatttatcagtcaaatttatcagtcaaagttagttcttagtgatcatatggtcagctaatattagttcttagtgatcagtggtcagtaatcttcaaagtcagaatctatcaccttggtaaattatataaacctaacttgagcagatctgattattcttggatagtattcaagtggtatcttgactattaaactacgtatagtgttgctgaaatagaaagaaaacagcattggaattggattcatgtatcgtgggatacaggtgttatttcaggtgatgtacttgcattattttctttagccatagtaactttttgtcacaataactaagtattcaattatatataaagagtgaaacattaaaatgacgcatggatttatatttattataattatgtagtaccctcaaatcattttgtcagttacatcaagaaagcagatttttctttagtcatgaaaaatat

SEQ ID NO: 179409 - DNA, 1553 bp, Homo sapiens
  Payload ID: 15353
  Gene Symbol: SCRN3
  Gene Name: secernin 3
  ENST ID: ENST00000610561
  CDS Start-End: 50-1339
ccctccgtccacctgtcacttcgggtagctgggaggccagttaaaaaaaatggaacctttttcctgtgacactttcgtggcattacctccagcaacagtcgataacaggattatttttggaaaaaattcagatagactctatgatgaagtacaagaggtggtttattttcctgctgtagttcatgataacctgggagaacgtcttaagtgtacatatatagaaattgatcaagttcctgaaacatatgctgttgtcctgagtcgcccagcgtggttgtggggggcagaaatgggagccaatgagcatggagtttgcattgggaatgaagctgtatggggaagagaagaagtttgtgatgaagaagcactattaggaatggaccttgtcagacttggccttgaaagagctgatacagctgaaaaagccctcaatgtcattgttgacttactagaaaaatatggccagggtggaaattgcacagagggtagaatggtatttagctatcacaacagtttcctgatagctgataggaatgaagcctggattctggagactgcagggaagtactgggcagcagaaaaagtacaagagggagttcgtaatatttctaatcaactttccataacaaccaagattgcccgggaacacccagacatgagaaactatgctaagcggaaaggttggtgggatggtaaaaaggagtttgattttgctgcagcatattcctatcttgacacagccaagatgatgacttcatcaggcagatactgtgagggctacaagcttctaaataagcacaaaggaaatataacttttgaaacaatgatggaaattcttcgagataaaccaagtggcattaatatggagggagaattcctgaccactgcaagcatggtttctattttacctcaagactccagccttccttgcattcacttctttacagggactcctgatcctgagagatctgtttttaagcctttcatatttgtgccacatatttcacaactattggataccagttcaccaacatttgaacttgaagatctagttaaaaagaaatcacattttaagcctgacagaagacacccactctaccaaaaacatcaacaggcattggaagtagtaaataataatgaggaaaaagccaaaataatgttggacaacatgaggaaactggagaaagaactattcagagagatggaatcaatccttcaaaacaagcatcttgatgtggagaaaattgttaatctctttcctcagtgtacaaaagatgaaattcaaatttatcagtcaaatttatcaaagttagttcttagtgatcatatggtcagctaatattagttcttagtgatcagtggtcagtaatcttcaaagtcagaatctatcaccttggtaaattatataaacctaacttgagcagatctgattattcttggatagtattcaagtggtatcttgactattaaactacgtatagtgttgctgaaatagaaagaaaacagcattggaattggattcatgtatcgtgggatacaggtgttatttcagg

SEQ ID NO: 179410 - DNA, 3320 bp, Homo sapiens
  Payload ID: 15354
  Gene Symbol: SECISBP2
  Gene Name: SECIS binding protein 2
  Uniprot ID: Q96T21
  ENST ID: ENST00000339901
  CDS Start-End: 157-2502
ggcaagccgacggcccgctgctggcctccgtgacgcggcctcctccgcgcctcgcggcatggcgtcggaggggccgcgggagcccgaaagcgagggcatcaagttatcagcagatgtcaaaccatttgtccccagatttgccgggctcaatgtggcatggttagagtcctcagaagcatgtgtcttccccagctctgcagccacatactatccgtttgttcaggaaccaccagtgacagaaatgtttactcagtgcctggctcccagtatctttataaccaacccagttgttaccgaggttttcaaacagtgaagcatcgaaatgagaacacatgccctctcccacaagaaatgaaagctctgtttaagaagaaaacctatgatgagaaaaaaacgtatgatcagcaaaagtttgacagtgaaagggctgatggaactatatcatctgagataaaatcagctagaggttcacatcatttgtccatttacgctgagaatagtttgaaatcagatggttaccataagcgaacagacaggaaatccagaatcattgcaaaaaatgtatctacctccaaacctgagtttgaatttaccacactggactttcctgaactgcaaggtgcagagaacaatatgtcagagatacagaagcaacccaagtggggacctgtccactctgtctctaccgacatttctcttctaagagaagtagtaaaaccagctgcagtgttatcaaagggtgaaatagtggtgaaaaataacccaaatgaatctgtaactgctaatgccgctaccaattctccttcatgtacaagagagttatcttggacaccaatgggttatgttgttcgacagacattatctacagaactgtcagcagcccctaaaaatgttacttctatgataaacttaaagaccattgcttcatcagcagatcctaaaaatgttagtataccatcttctgaagctttatcttcggatccttcctacaacaaagaaaaacacattattcatcctacccaaaagtctaaagcatcacaaggtagtgaccttgaacaaaatgaagcctcaagaaagaataagaaaaagaaagaaaaatctacatcaaaatatgaagtcctgacagttcaagagcctccaaggattgaagatgccgaggaatttcccaacctggcagttgcatctgaaagaagagacagaatagagacaccgaaatttcaatctaagcagcagccacaggataattttaaaaataatgtaaagaagagccagcttccagtgcagttggacttggggggcatgctgacagccctggagaagaagcagcactctcagcatgcaaagcagtcctccaaaccagtggtagtctcagttggagcagtgccagtcctttccaaagaatgtgcatcaggggagagaggccgccgcatgagtcaaatgaagaccccgcacaatcccttggactccagcgccccactgatgaagaaagggaagcagagggagatccccaaggccaagaagccaacctcactgaagaagattattttgaaagaacggcaagagagaaagcagcgtctccaagaaaatgctgtgagtccagcttttaccagtgatgacacacaagatggagagagtggtggtgatgaccagtttcccgagcaggcagagctgtcagggccagaggggatggacgaactgatctccactccttcggttgaggacaagtctgaagagccaccaggcacagagctccagagggacacagaggcctcccaccttgctcccaatcacaccaccttccctaagatccacagccgcagattcagggattactgcagccagatgcttagtaaagaagtggatgcttgtgttaccgacctactcaaagaactggtccgtttccaagaccgtatgtaccagaaagatccagtcaaggccaagactaaacgtcgacttgtgttggggttgagggaggttctcaaacacctgaagctcaaaaaactgaaatgtgtcattatttctcccaactgtgagaagatacagtcaaaaggtgggctggatgacactttgcacacaattattgattatgcctgtgagcagaacattccctttgtgtttgctctcaaccgcaaagctctggggcgcagtttgaataaggcagttcctgtcagtgtggtggggatcttcagctatgatggggcccaggatcagttccacaagatggttgagctgacagtggcggcccgacaggcgtacaagaccatgctggagaatgtgcagcaggagctggtgggagagcccaggcctcaggcacctcccagcctacccacacagggccccagctgccctgcagaagatggccccccagccctgaaagaaaaagaagagccacactacattgaaatctggaaaaaacatctggaagcatacagtggatgtaccctggagctagaagaatccttggaggcttcaacctctcaaatgatgaatttgaatttatgagagttcttgcctgtgtgtctgtattttgggtaaggaggggaggtctgaaaaagactttggggctttttcttctgtttttcatgacaatgtaatttgtgtaactgttgaatctggaaattgatcagcattaaagggcacatgaagcagtgtctgcaggcgttcagtgctgcggagcctgttaaaggtcactcagatgtgcaggtgttaatcttctctaaaagcctggtgatacagctctggctttctgagcacactacggatctggaaaatactggaaaatgtgatacttagaatactttggctgctaaggaaacttcctctccattgcagaatagctgagccaagtgagtgagtttgcagaaagcaggtggtgagctcctgcctgctggaggttgccatggagggccattcctgcccggcaacagcaccgtcctgcagggagccacttggcagaagggtgcagggctgctggtgtcagagcaagagggctacagggaaagggccctttctcaggggatgtagcttttttaaaagatttgggaacacttggaggatttgctaaaatgagcctcagaaggaaaattggttttctaacctgtgactttttgaaatgaattattcctttcagtctttatttttcaaagaaacaatgtgtattgaagtacctagatttgtttgataatcaacaaatctttcctttttcaatgaacatattctgaatgtggtttctgtcttagaccaggaggacagagtttgctttcatattttccctgtaagtaagagggcttatttattttaaataaagagtaattattaaa

SEQ ID NO: 179411 - DNA, 3462 bp, Homo sapiens
  Payload ID: 15354
  Gene Symbol: SECISBP2
  Gene Name: SECIS binding protein 2
  Uniprot ID: Q96T21
  ENST ID: ENST00000375807
  CDS Start-End: 72-2636
gctttgtctgtccggcaagccgacggcccgctgctggcctccgtgacgcggcctcctccgcgcctcgcggcatggcgtcggaggggccgcgggagcccgaaagcgagggcatcaagttatcagcagatgtcaaaccatttgtccccagatttgccgggctcaatgtggcatggttagagtcctcagaagcatgtgtcttccccagctctgcagccacatactatccgtttgttcaggaaccaccagtgacagagcagaaaatatatactgaagacatggcctttggagcttcaacttttccacctcagtatttatcttctgagataactcttcatccatatgcctattctccttatacccttgactccacacagaatgtttactcagtgcctggctcccagtatctttataaccaacccagttgttaccgaggttttcaaacagtgaagcatcgaaatgagaacacatgccctctcccacaagaaatgaaagctctgtttaagaagaaaacctatgatgagaaaaaaacgtatgatcagcaaaagtttgacagtgaaagggctgatggaactatatcatctgagataaaatcagctagaggttcacatcatttgtccatttacgctgagaatagtttgaaatcagatggttaccataagcgaacagacaggaaatccagaatcattgcaaaaaatgtatctacctccaaacctgagtttgaatttaccacactggactttcctgaactgcaaggtgcagagaacaatatgtcagagatacagaagcaacccaagtggggacctgtccactctgtctctaccgacatttctcttctaagagaagtagtaaaaccagctgcagtgttatcaaagggtgaaatagtggtgaaaaataacccaaatgaatctgtaactgctaatgccgctaccaattctccttcatgtacaagagagttatcttggacaccaatgggttatgttgttcgacagacattatctacagaactgtcagcagcccctaaaaatgttacttctatgataaacttaaagaccattgcttcatcagcagatcctaaaaatgttagtataccatcttctgaagctttatcttcggatccttcctacaacaaagaaaaacacattattcatcctacccaaaagtctaaagcatcacaaggtagtgaccttgaacaaaatgaagcctcaagaaagaataagaaaaagaaagaaaaatctacatcaaaatatgaagtcctgacagttcaagagcctccaaggattgaagatgccgaggaatttcccaacctggcagttgcatctgaaagaagagacagaatagagacaccgaaatttcaatctaagcagcagccacaggataattttaaaaataatgtaaagaagagccagcttccagtgcagttggacttggggggcatgctgacagccctggagaagaagcagcactctcagcatgcaaagcagtcctccaaaccagtggtagtctcagttggagcagtgccagtcctttccaaagaatgtgcatcaggggagagaggccgccgcatgagtcaaatgaagaccccgcacaatcccttggactccagcgccccactgatgaagaaagggaagcagagggagatccccaaggccaagaagccaacctcactgaagaagattattttgaaagaacggcaagagagaaagcagcgtctccaagaaaatgctgtgagtccagcttttaccagtgatgacacacaagatggagagagtggtggtgatgaccagtttcccgagcaggcagagctgtcagggccagaggggatggacgaactgatctccactccttcggttgaggacaagtctgaagagccaccaggcacagagctccagagggacacagaggcctcccaccttgctcccaatcacaccaccttccctaagatccacagccgcagattcagggattactgcagccagatgcttagtaaagaagtggatgcttgtgttaccgacctactcaaagaactggtccgtttccaagaccgtatgtaccagaaagatccagtcaaggccaagactaaacgtcgacttgtgttggggttgagggaggttctcaaacacctgaagctcaaaaaactgaaatgtgtcattatttctcccaactgtgagaagatacagtcaaaaggtgggctggatgacactttgcacacaattattgattatgcctgtgagcagaacattccctttgtgtttgctctcaaccgcaaagctctggggcgcagtttgaataaggcagttcctgtcagtgtggtggggatcttcagctatgatggggcccaggatcagttccacaagatggttgagctgacagtggcggcccgacaggcgtacaagaccatgctggagaatgtgcagcaggagctggtgggagagcccaggcctcaggcacctcccagcctacccacacagggccccagctgccctgcagaagatggccccccagccctgaaagaaaaagaagagccacactacattgaaatctggaaaaaacatctggaagcatacagtggatgtaccctggagctagaagaatccttggaggcttcaacctctcaaatgatgaatttgaatttatgagagttcttgcctgtgtgtctgtattttgggtaaggaggggaggtctgaaaaagactttggggctttttcttctgtttttcatgacaatgtaatttgtgtaactgttgaatctggaaattgatcagcattaaagggcacatgaagcagtgtctgcaggcgttcagtgctgcggagcctgttaaaggtcactcagatgtgcaggtgttaatcttctctaaaagcctggtgatacagctctggctttctgagcacactacggatctggaaaatactggaaaatgtgatacttagaatactttggctgctaaggaaacttcctctccattgcagaatagctgagccaagtgagtgagtttgcagaaagcaggtggtgagctcctgcctgctggaggttgccatggagggccattcctgcccggcaacagcaccgtcctgcagggagccacttggcagaagggtgcagggctgctggtgtcagagcaagagggctacagggaaagggccctttctcaggggatgtagcttttttaaaagatttgggaacacttggaggatttgctaaaatgagcctcagaaggaaaattggttttctaacctgtgactttttgaaatgaattattcctttcagtctttatttttcaaagaaacaatgtgtattgaagtacctagatttgtttgataatcaacaaatctttcctttttcaatgaacatattctgaatgtggtttctgtcttagaccaggaggacagagtttgctttcatattttccctgtaagtaagagggcttatttattttaaataaagagtaattattaaattttgttt

SEQ ID NO: 179412 - DNA, 547 bp, Homo sapiens
  Payload ID: 15354
  Gene Symbol: SECISBP2
  Gene Name: SECIS binding protein 2
  ENST ID: ENST00000440898
  CDS Start-End: 367-547
gctgcttccaagttgtggcagttatgagtaaagctgctataaacatccatgtgcaggtttttgtgtggacataagttttcacctcctttggataattaccaaggagtgcagtggctaaatcatatggtaagagtatggttagttttgtaaggaattgctaaactattaaatatctcccaaagtggctgtaacgtttttcattcttaccagcaatggataaggatttctgttgtcaaagtgttctggattttgatatgtagtgttatctccttgttttaatttgcatttctctgatgacatctaatgtgtttgctttttagggtgaaatagtggtgaaaaataacccaaatgaatctgtaactgctaatgccgctaccaattctccttcatgtacaagagcagatcctaaaaatgttagtataccatcttctgaagctttatcttcggatccttcctacaacaaagaaaaacacattattcatcctacccaaaagtctaaagcatcacaaggtagtgaccttgaacaaaatgaagcctcaagaaagaa

SEQ ID NO: 179413 - DNA, 826 bp, Homo sapiens
  Payload ID: 15354
  Gene Symbol: SECISBP2
  Gene Name: SECIS binding protein 2
  ENST ID: ENST00000425851
  CDS Start-End: 1-826
ggaactatatcatctgagataaaatcagctagaggttcacatcatttgtccatttacgctgagaatagtttgaaatcagatggttaccataagcgaacagacaggaaatccagaatcattgcaaaaaatgtatctacctccaaacctgagtttgaatttaccacactggactttcctgaactgcaaggtgcagagaacaatatgtcagagatacagaagcaacccaagtggggacctgtccactctgtctctaccgacatttctcttctaagagaagtagtaaaaccagctgcagtgttatcaaagggtgaaatagtggtgaaaaataacccaaatgaatctgtaactgctaatgccgctaccaattctccttcatgtacaagagcagatcctaaaaatgttagtataccatcttctgaagctttatcttcggatccttcctacaacaaagaaaaacacattattcatcctacccaaaagtctaaagcatcacaaggtagtgaccttgaacaaaatgaagcctcaagaaagaataagaaaaagaaagaaaaatctacatcaaaatatgaagtcctgacagttcaagagcctccaaggattgaagatgccgaggaatttcccaacctggcagttgcatctgaaagaagagacagaatagagacaccgaaatttcaatctaagcagcagccacaggataattttaaaaataatgtaaagaagagccagcttccagtgcagttggacttggggggcatgctgacagccctggagaagaagcagcactctcagcatgcaaagcagtcctccaaaccagtggtagtctcag

SEQ ID NO: 179414 - DNA, 3584 bp, Homo sapiens
  Payload ID: 15354
  Gene Symbol: SECISBP2
  Gene Name: SECIS binding protein 2
  Uniprot ID: Q96T21
  ENST ID: ENST00000534113
  CDS Start-End: 386-2746
acccagcgcagtgactgcggcccagcccggcgctccccgcagtcggggcggggggactctggcgagcttcccgcgctcttgggaacggatagattgttttaaaggatcctgcgtttttctgaacgtcattctccgctctacgtactcagcattaccactagatggagccctggcgatcgcttgcatcatttttagacccataaaattctcggtgaaaggcatcaagttatcagcagatgtcaaaccatttgtccccagatttgccgggctcaatgtggcatggttagagtcctcagaagcatgtgtcttccccagctctgcagccacatactatccgtttgttcaggaaccaccagtgacagagcagaaaatatatactgaagacatggcctttggagcttcaacttttccacctcagtatttatcttctgagataactcttcatccatatgcctattctccttatacccttgactccacacagaatgtttactcagtgcctggctcccagtatctttataaccaacccagttgttaccgaggttttcaaacagtgaagcatcgaaatgagaacacatgccctctcccacaagaaatgaaagctctgtttaagaagaaaacctatgatgagaaaaaaacgtatgatcagcaaaagtttgacagtgaaagggctgatggaactatatcatctgagataaaatcagctagaggttcacatcatttgtccatttacgctgagaatagtttgaaatcagatggttaccataagcgaacagacaggaaatccagaatcattgcaaaaaatgtatctacctccaaacctgagtttgaatttaccacactggactttcctgaactgcaaggtgcagagaacaatatgtcagagatacagaagcaacccaagtggggacctgtccactctgtctctaccgacatttctcttctaagagaagtagtaaaaccagctgcagtgttatcaaagggtgaaatagtggtgaaaaataacccaaatgaatctgtaactgctaatgccgctaccaattctccttcatgtacaagagagttatcttggacaccaatgggttatgttgttcgacagacattatctacagaactgtcagcagcccctaaaaatgttacttctatgataaacttaaagaccattgcttcatcagcagatcctaaaaatgttagtataccatcttctgaagctttatcttcggatccttcctacaacaaagaaaaacacattattcatcctacccaaaagtctaaagcatcacaaggtagtgaccttgaacaaaatgaagcctcaagaaagaataagaaaaagaaagaaaaatctacatcaaaatatgaagtcctgacagttcaagagcctccaaggattgaagatgccgaggaatttcccaacctggcagttgcatctgaaagaagagacagaatagagacaccgaaatttcaatctaagcagcagccacaggataattttaaaaataatgtaaagaagagccagcttccagtgcagttggacttggggggcatgctgacagccctggagaagaagcagcactctcagcatgcaaagcagtcctccaaaccagtggtagtctcagttggagcagtgccagtcctttccaaagaatgtgcatcaggggagagaggccgccgcatgagtcaaatgaagaccccgcacaatcccttggactccagcgccccactgatgaagaaagggaagcagagggagatccccaaggccaagaagccaacctcactgaagaagattattttgaaagaacggcaagagagaaagcagcgtctccaagaaaatgctgtgagtccagcttttaccagtgatgacacacaagatggagagagtggtggtgatgaccagtttcccgagcaggcagagctgtcagggccagaggggatggacgaactgatctccactccttcggttgaggacaagtctgaagagccaccaggcacagagctccagagggacacagaggcctcccaccttgctcccaatcacaccaccttccctaagatccacagccgcagattcagggattactgcagccagatgcttagtaaagaagtggatgcttgtgttaccgacctactcaaagaactggtccgtttccaagaccgtatgtaccagaaagatccagtcaaggccaagactaaacgtcgacttgtgttggggttgagggaggttctcaaacacctgaagctcaaaaaactgaaatgtgtcattatttctcccaactgtgagaagatacagtcaaaaggtgggctggatgacactttgcacacaattattgattatgcctgtgagcagaacattccctttgtgtttgctctcaaccgcaaagctctggggcgcagtttgaataaggcagttcctgtcagtgtggtggggatcttcagctatgatggggcccaggatcagttccacaagatggttgagctgacagtggcggcccgacaggcgtacaagaccatgctggagaatgtgcagcaggagctggtgggagagcccaggcctcaggcacctcccagcctacccacacagggccccagctgccctgcagaagatggccccccagccctgaaagaaaaagaagagccacactacattgaaatctggaaaaaacatctggaagcatacagtggatgtaccctggagctagaagaatccttggaggcttcaacctctcaaatgatgaatttgaatttatgagagttcttgcctgtgtgtctgtattttgggtaaggaggggaggtctgaaaaagactttggggctttttcttctgtttttcatgacaatgtaatttgtgtaactgttgaatctggaaattgatcagcattaaagggcacatgaagcagtgtctgcaggcgttcagtgctgcggagcctgttaaaggtcactcagatgtgcaggtgttaatcttctctaaaagcctggtgatacagctctggctttctgagcacactacggatctggaaaatactggaaaatgtgatacttagaatactttggctgctaaggaaacttcctctccattgcagaatagctgagccaagtgagtgagtttgcagaaagcaggtggtgagctcctgcctgctggaggttgccatggagggccattcctgcccggcaacagcaccgtcctgcagggagccacttggcagaagggtgcagggctgctggtgtcagagcaagagggctacagggaaagggccctttctcaggggatgtagcttttttaaaagatttgggaacacttggaggatttgctaaaatgagcctcagaaggaaaattggttttctaacctgtgactttttgaaatgaattattcctttcagtctttatttttcaaagaaacaatgtgtattgaagtacctagatttgtttgataatcaacaaatctttcctttttcaatgaacatattctgaatgtggtttctgtcttagaccaggaggacagagtttgctttcatattttccctgtaagtaagagggcttatttattttaaataaagagtaattattaaattttgtttcagactctggtg

SEQ ID NO: 179415 - DNA, 6779 bp, Homo sapiens
  Payload ID: 15355
  Gene Symbol: SECISBP2L
  Gene Name: SECIS binding protein 2-like
  Uniprot ID: Q93073
  ENST ID: ENST00000261847
  CDS Start-End: 135-3305
aatcggtgtcgcggccagccagataggggcggaggtccggaacccagtctggacccgagcggggggccatggagaaagcggcccgaggcgctgtttacaccgactagcgcgggcccgttgcggctgcaggcaccatggaccgagcccccacggagcagaatgtcaagctgtcagctgaggtggagccatttattccccagaagaagagtcctgatacatttatgatccctatggctctcccaaatgataatggaagtgtttctggtgtggaaccaactccaattcccagctacctgattacttgttacccatttgtgcaggaaaaccagtccaatagacagtttcctttatataacaatgatatacgatggcaacaacccaatccaaaccctactggaccatactttgcctatcccattatatctgctcagccgcctgtttctacagagtatacatattatcagctgatgccagcaccatgtgcccaggttatgggtttctatcatccttttcctacaccttactccaacacctttcaggctgcaaatactgtaaatgctatcaccacagaatgcactgagcgtccaagtcagcttggacaggtcttcccattgtccagccatcgaagcagaaacagtaacagaggatcagtggtcccaaaacaacagcttttacaacagcacataaaaagcaaaaggccgctggtgaaaaatgtagctactcagaaagaaacaaatgcagcaggtcctgatagtcgatcaaaaattgtgcttctggtagatgcttcacagcaaactgatttcccatcagatatcgctaacaagtctctctcagagaccactgcaacaatgctctggaagtccaagggcaggagaagaagagcatcccaccctactgctgaatcttctagtgagcagggggctagtgaagccgacattgacagtgatagtggttactgcagtcccaaacacagcaacaaccagcctgcagcaggggctttgagaaatcctgattctgggaccatgaatcatgtggaatcatctatgtgtgcaggtggtgtaaattggtccaatgtaacttgccaggcaactcagaaaaaaccttggatggaaaaaaatcagacattttctagaggtggaaggcaaactgaacaaagaaataattcacaggatgaagatgggtttcaagaactaaatgagaatggaaatgctaaggatgagaatattcaacaaaaactttcttctaaagtattggatgatttacctgaaaactcaccaatcaatatagttcagactccaattcctattaccacctcagttcccaaacgtgcaaaaagtcagaagaagaaagctttagcagcagcccttgccacagctcaagagtattcagaaataagtatggagcaaaaaaaattacaggaagctttatcaaaagcagctggaaaaaagaataaaacacctgtgcagctagatttaggggacatgttagctgctctggaaaaacaacagcaagcaatgaaagcacggcaaattactaacaccagacctctgtcatatacagtggttactgcagcttcttttcacactaaagactctactaatagaaaacctttaaccaaaagtcagccctgtttgacatcctttaattctgtggacattgcttcttctaaagcaaaaaaaggaaaagagaaggaaattgcaaaactaaaacgacccacagcacttaaaaaggttattttaaaagaaagagaggaaaagaaggggcgcttaactgtggaccacaatcttttgggatccgaggaaccaacagaaatgcacttagattttattgatgacttgccacaggagattgtttcccaggaagatactggactaagcatgcccagtgatacttcactctctccagcaagtcagaactctccatactgtatgacacctgtgtcacaaggctctcctgctagttctggaataggcagtccaatggcatcttcaacaataaccaaaatccacagcaaaagatttagagagtattgtaatcaggttctttgtaaagagattgatgaatgtgtgactcttcttctccaagagcttgtcagtttccaggaacgcatctaccaaaaagatcctgtaagagcaaaagcaaggagacgactcgttatgggtctaagagaagttaccaaacatatgaagttaaacaagatcaagtgtgttataatttctccaaactgtgaaaaaatccagtcaaaaggtggtctggatgaggctctctataatgttatagccatggcacgggaacaagaaattccttttgtgtttgcccttggaaggaaagctctaggacgctgtgtgaacaagctggttcctgttagcgtagtgggaatcttcaactactttggtgctgagagcctgtttaataaattagtagaactcactgaggaggccaggaaagcatataaagatatggttgcagcaatggaacaggagcaggctgaggaagccttaaagaatgtgaagaaggtaccacaccacatgggacattctcggaatccctctgcagcaagtgccatttctttctgcagtgttatttctgaaccgatctctgaagtaaatgaaaaggaatatgaaacaaattggagaaacatggtggaaacttcagatggactggaagcatcagaaaatgagaaagaggtatcctgtaagcacagcacttctgaaaaacccagtaaacttccatttgacacacccccaattggtaagcagccatcattagtggctacaggcagtactacctcagctacaagtgctgggaaatccacagcaagtgataaagaggaagtgaagccagatgacctggaatgggcctcacagcagagtacagagactggctctttggatggcagttgccgagatcttttgaattcctccatcaccagcaccaccagcactcttgtacctggcatgcttgaagaagaagaagatgaagatgaggaggaggaggaagattatactcatgaacccatatctgtagaagtgcagctcaatagtagaattgagtcttgggtctcagagacccagagaactatggaaacccttcagcttggaaaaacccttaatggttctgaggaagacaatgtagagcaaagtggagaagaggaagcagaggcgcctgaggtgctggagccagggatggacagtgaggcatggactgctgaccagcaggccagtcctgggcagcagaagtccagcaactgcagctcgctcaacaaagagcactctgattctaattacacaacgcaaactacgtaactcaggaaatgtcggctctctatctccagctgtggaagggttgcagccattaccttttatgcttcatctcaacattttgcactgtccagtatttaatatacgtatttaattcccaacaaatatttttgtagcttttacttgttatgatctgtagcttagcttttaattagtatctaagtgtctttctaagaactgtgtggaaaattcagatctgtttcagcttattttgtaatcaaaaacagtgataaaaagaagaccagatcttaaagaaaataaatttcaaatgcttacttaaaagacattttgaaagttaaagaacaaggttctaaggatagaagcagttatcagtgtttgcttcaggactccacctcctctactctaatttgaccaaaaaattgtttgggcttctttaaaaaagaactgggggtggagtcagaaaattaaatgaaaggctgagggtaactaagtccaccagtgttgtatgttaaaaaatcaatgcaacttttatgtggtccacaaatgtttagtcagaagtcactgattattgtaattaattagtgttgggatgggctaaaacagagccttcaaaacttcggctagcagtggagccaccatcttagattatagctagctagcctcatttgtggaaagtgatagatgctgtctataatagtgaacagtcacccatgataggacctccaggttctgtctcatatttgcttcttacttacctcaggaatgctcttgtacatagacttatttacaaaaagctaggcacatgttgacaggtgaataactgtaaccgattgtatgactgctgcacttacatgtaaactcttcagaaacagagtcttatactggtgtgttctcttgcatgcttctggttcaggactcttgatttgagatatggatttgattgagtatccaaacttgtcctgagtgcaaaactgtttcaccttttaaaaaatacctattttgcacctagccttgagcaccttccacatagcaatgaccatagttactgtcaggaggtcaaggaaaggaactttgcacaacttgtgacatgtatcctgataatcaaggcttagaggaggaagttttagaagataagagaaagttgttctaattgtgctgaaactattagatgatttagagtatacagatatgtaggtattaattctctattcactattatttatctctgcccttctctaggagtttgtatacctgcttaggagacaataaatgagctaaatgttttatttgctagtcagtcaccacctggacttcagtgactttacaagtttatgtaatggtggaagaatgacaaactatgtaatttttttgtcttccatccaactccccaccacccccaactgtcccccccacccccctcacacacatgcacacatccgtacgtgtgtgtgttttccacttacaagcttccataagcaggcacaaaactgagaaggaaggggtattatccctgccctgattatctggggcagggctttgcctcacagaggcaggagagaagaattgggcagattctttactgaactcattgggactactgtgctagttttgatgttttataatgctggcatttaattactggagagattggattcttggttgatgatttagtatttgtgaattgtgaaagttcaggagctgtgtagaaaatgttagtcaatcaactttattattgtgctaaaaggggacattcttatactgtcctgtctaaactgttctccagtatagacttcctaggcactaaatatccaatatttaaaggaacacagcaggtaaggaatgaagcctctgaaatagtactcatggatttatacatggcagatcttactgtctctacacatttggaagtgttcgttggtttaaagaaatgatagaggttttgaactactgacagtcttaaaagtgaatttaaaaactgttcatactttttatggtgtaaatttcctttgctcgatgtcagtgattcagataactcttgaccttgagatgatggcttttcacaggtttcttatattttatatctcttctgaacatgaattgtcattttagatttttgacatttgtatcaaaagagaagttgaggaaatcttcagaacactggtaacttttagttttgctatagacttcagaagtgtttatttatatgttcggtaaatgctctcgcatatgcagtacctcttctgccagcaaatccaagggaccatagcctttttatgagacaggtcacctctagaggacaacccaagaattattaaaggaaatgttaccattttgagagcatgcttaaataaatattaataatgtctttataacttgtttcctttaaattttggaatattgaattacaggctttggaggagttgtgaaaattaggaaagtttttatatattttttgaagtgggcatggttggctctttgaagacctataaagagatccagtgggaagagtaagggttggttcatcatcacaagaaataaaaaacatagtgattttttctcttaatgtgtagaggtggttttactggcaataattaataatagatttctatttcagtatgtaagcatattaactaaaatatgaattacacttccaaagttagatttctgcttcagtaggtttgtttgctgtgaagattacttctcaaaagacagatgttcatattagcttaattttcggtttaaatatgtttgtaaatgatgtaatatatttcttttgactaaatgtggaaaagtaatgtgtgttatacattgagaagtttttactggctttgactggaggttgtttttgcagagatggtattttatatgattccagtatttggaaaagaattagtcaaaaggaattcacatagtttaaatactgagaaattaatatccaaatatgtacttgtctgatttctaaataagctgggggaggagggaggggtgggaattgaaatgtgcaaatgagtagtgaatgctacactcattttcaactctttaacatgaaactgttcaatcttaacacattgttactttaatatatgtataaagaagtattactgtttgtaaagctgctgtttgcttaaaaaaaaaaaacacccttgtcatgtattttctgtatgttgggccaacaggttagaacatcaactcatttaaaaatttttatctttttttgatttaaaaaaattctgtgaaataatttatttacagacatcttcctcctccctcatcccttccaacctttacatacatcacagaatcaaccaaactgtttgcctaatctgaaatctgaatcctaatgagaaaaatttaaattttgttggcacatcacaccttgaaagtatttgtattattttataatttaatttctaaatataccacataagtttataatttaatgtcttaattgtaatgctctaataaaaaactagcaaaattagtgtgagttataacatg

SEQ ID NO: 179416 - DNA, 2551 bp, Homo sapiens
  Payload ID: 15355
  Gene Symbol: SECISBP2L
  Gene Name: SECIS binding protein 2-like
  ENST ID: ENST00000380927
  CDS Start-End: 660-2551
agtggcgtagccgaatcggtgtcgcggccagccagataggggcggaggtccggaacccagtctggacccgagcggggggccatggagaaagcggcccgaggcgctgtttacaccgactagcgcgggcccgttgcggctgcaggcaccatggaccgagcccccacggagcagaatgtcaagctgtcagctgaggtggagccatttattccccagaagaagagtcctgatacatttatgatccctatggctctcccaaatgataatggaagtgtttctggtgtggaaccaactccaattcccagctacctgattacttgttacccatttgtgcaggaaaaccagtccaataggctgcaaatactgtaaatgctatcaccacagaatgcactgagcgtccaagtcagcttggacaggtcttcccattgtccagccatcgaagcagaaacagtaacagaggatcagtggtcccaaaacaacagcttttacaacagcacataaaaagcaaaaggccgctggtgaaaaatgtagctactcagaaagaaacaaatgcagcaggtcctgatagtcgatcaaaaattgtgcttctggtagatgcttcacagcaaactgatttcccatcagatatcgctaacaagtctctctcagagaccactgcaacaatgctctggaagtccaagggcaggagaagaagagcatcccaccctactgctgaatcttctagtgagcagggggctagtgaagccgacattgacagtgatagtggttactgcagtcccaaacacagcaacaaccagcctgcagcaggggctttgagaaatcctgattctgggaccatgaatcatgtggaatcatctatgtgtgcaggtggtgtaaattggtccaatgtaacttgccaggcaactcagaaaaaaccttggatggaaaaaaatcagacattttctagaggtggaaggcaaactgaacaaagaaataattcacaggttggattcagatgccgaggacacagtacttcctcagaaagaagacagaatttgcaaaagagaccagataataagcatttaagctctagtcaatcccatagaagcgatccaaattctgagtctttatattttgaggatgaagatgggtttcaagaactaaatgagaatggaaatgctaaggatgagaatattcaacaaaaactttcttctaaagtattggatgatttacctgaaaactcaccaatcaatatagttcagactccaattcctattaccacctcagttcccaaacgtgcaaaaagtcagaagaagaaagctttagcagcagcccttgccacagctcaagagtattcagaaataagtatggagcaaaaaaaattacaggaagctttatcaaaagcagctggaaaaaagaataaaacacctgtgcagctagatttaggggacatgttagctgctctggaaaaacaacagcaagcaatgaaagcacggcaaattactaacaccagacctctgtcatatacagtggttactgcagcttcttttcacactaaagactctactaatagaaaacctttaaccaaaagtcagccctgtttgacatcctttaattctgtggacattgcttcttctaaagcaaaaaaaggaaaagagaaggaaattgcaaaactaaaacgacccacagcacttaaaaaggttattttaaaagaaagagaggaaaagaaggggcgcttaactgtggaccacaatcttttgggatccgaggaaccaacagaaatgcacttagattttattgatgacttgccacaggagattgtttcccaggaagatactggactaagcatgcccagtgatacttcactctctccagcaagtcagaactctccatactgtatgacacctgtgtcacaaggctctcctgctagttctggaataggcagtccaatggcatcttcaacaataaccaaaatccacagcaaaagatttagagagtattgtaatcaggttctttgtaaagagattgatgaatgtgtgactcttcttctccaagagcttgtcagtttccaggaacgcatctaccaaaaagatcctgtaagagcaaaagcaaggagacgactcgttatgggtctaagagaagttaccaaacatatgaagttaaacaagatcaagtgtgttataatttctccaaactgtgaaaaaatccagtcaaaaggtggtctggatgaggctctctataatgttatagccatggcacgggaacaagaaattccttttgtgtttgcccttggaaggaaagctctaggacgctgtgtgaacaagctggttcctgttagcgtagtgggaatcttcaactactttggtgctgagagcctgtttaataaattagtagaactcactgaggaggccaggaaagcatataaagatatggttgcagcaatggaacaggagcaggctgaggaagccttaaagaatgtgaagaaggtaccacaccacatgggacattctcggaatccctctgcagcaagtgccatttctttctgcagtgttatttctgaaccgatctctgaagt

SEQ ID NO: 179417 - DNA, 1084 bp, Homo sapiens
  Payload ID: 15355
  Gene Symbol: SECISBP2L
  Gene Name: SECIS binding protein 2-like
  ENST ID: ENST00000559424
  CDS Start-End: 149-1084
cagtggcgtagccgaatcggtgtcgcggccagccagataggggcggaggtccggaacccagtctggacccgagcggggggccatggagaaagcggcccgaggcgctgtttacaccgactagcgcgggcccgttgcggctgcaggcaccatggaccgagcccccacggagcagaatgtcaagctgtcagctgaggtggagccatttattccccagaagaagagtcctgatacatttatgatccctatggctctcccaaatgataatggaagtgtttctggtgtggaaccaactccaattcccagctacctgattacttgttacccatttgtgcaggaaaaccagtccaatagacagtttcctttatataacaatgatatacgatggcaacaacccaatccaaaccctactggaccatactttgcctatcccattatatctgctcagccgcctgtttctacagagtatacatattatcagctgatgccagcaccatgtgcccaggttatgggtttctatcatccttttcctacaccttactccaacacctttcaggctgcaaatactgtaaatgctatcaccacagaatgcactgagcgtccaagtcagcttggacaggtcttcccattgtccagccatcgaagcagaaacagtaacagaggatcagtggtcccaaaacaacagcttttacaacagcacataaaaagcaaaaggccgctggtgaaaaatgtagctactcagaaagaaacaaatgcagcaggggctttgagaaatcctgattctgggaccatgaatcatgtggaatcatctatgtgtgcaggtggtgtaaattggtccaatgtaacttgccaggcaactcagaaaaaaccttggatggaaaaaaatcagacattttctagaggtggaaggcaaactgaacaaagaaataattcacaggatgaagatgggtttcaagaactaaatgagaatggaaatgctaaggatgagaatattcaacaaaaactttcttctaaagtattggatgatttacctgaaaactcaccaatcaatatagttcagactccaattcctattaccacctcagtt

SEQ ID NO: 179418 - DNA, 7176 bp, Homo sapiens
  Payload ID: 15355
  Gene Symbol: SECISBP2L
  Gene Name: SECIS binding protein 2-like
  Uniprot ID: Q93073
  ENST ID: ENST00000559471
  CDS Start-End: 265-3570
atttctaactacgcctccagcccattcgggccctcctcggcttccgtcccagatgatccctccccgaagctgccaccgcctcctccatctcccggagctggagccgcctcctcggccagtggcgtagccgaatcggtgtcgcggccagccagataggggcggaggtccggaacccagtctggacccgagcggggggccatggagaaagcggcccgaggcgctgtttacaccgactagcgcgggcccgttgcggctgcaggcaccatggaccgagcccccacggagcagaatgtcaagctgtcagctgaggtggagccatttattccccagaagaagagtcctgatacatttatgatccctatggctctcccaaatgataatggaagtgtttctggtgtggaaccaactccaattcccagctacctgattacttgttacccatttgtgcaggaaaaccagtccaatagacagtttcctttatataacaatgatatacgatggcaacaacccaatccaaaccctactggaccatactttgcctatcccattatatctgctcagccgcctgtttctacagagtatacatattatcagctgatgccagcaccatgtgcccaggttatgggtttctatcatccttttcctacaccttactccaacacctttcaggctgcaaatactgtaaatgctatcaccacagaatgcactgagcgtccaagtcagcttggacaggtcttcccattgtccagccatcgaagcagaaacagtaacagaggatcagtggtcccaaaacaacagcttttacaacagcacataaaaagcaaaaggccgctggtgaaaaatgtagctactcagaaagaaacaaatgcagcaggtcctgatagtcgatcaaaaattgtgcttctggtagatgcttcacagcaaactgatttcccatcagatatcgctaacaagtctctctcagagaccactgcaacaatgctctggaagtccaagggcaggagaagaagagcatcccaccctactgctgaatcttctagtgagcagggggctagtgaagccgacattgacagtgatagtggttactgcagtcccaaacacagcaacaaccagcctgcagcaggggctttgagaaatcctgattctgggaccatgaatcatgtggaatcatctatgtgtgcaggtggtgtaaattggtccaatgtaacttgccaggcaactcagaaaaaaccttggatggaaaaaaatcagacattttctagaggtggaaggcaaactgaacaaagaaataattcacaggttggattcagatgccgaggacacagtacttcctcagaaagaagacagaatttgcaaaagagaccagataataagcatttaagctctagtcaatcccatagaagcgatccaaattctgagtctttatattttgaggatgaagatgggtttcaagaactaaatgagaatggaaatgctaaggatgagaatattcaacaaaaactttcttctaaagtattggatgatttacctgaaaactcaccaatcaatatagttcagactccaattcctattaccacctcagttcccaaacgtgcaaaaagtcagaagaagaaagctttagcagcagcccttgccacagctcaagagtattcagaaataagtatggagcaaaaaaaattacaggaagctttatcaaaagcagctggaaaaaagaataaaacacctgtgcagctagatttaggggacatgttagctgctctggaaaaacaacagcaagcaatgaaagcacggcaaattactaacaccagacctctgtcatatacagtggttactgcagcttcttttcacactaaagactctactaatagaaaacctttaaccaaaagtcagccctgtttgacatcctttaattctgtggacattgcttcttctaaagcaaaaaaaggaaaagagaaggaaattgcaaaactaaaacgacccacagcacttaaaaaggttattttaaaagaaagagaggaaaagaaggggcgcttaactgtggaccacaatcttttgggatccgaggaaccaacagaaatgcacttagattttattgatgacttgccacaggagattgtttcccaggaagatactggactaagcatgcccagtgatacttcactctctccagcaagtcagaactctccatactgtatgacacctgtgtcacaaggctctcctgctagttctggaataggcagtccaatggcatcttcaacaataaccaaaatccacagcaaaagatttagagagtattgtaatcaggttctttgtaaagagattgatgaatgtgtgactcttcttctccaagagcttgtcagtttccaggaacgcatctaccaaaaagatcctgtaagagcaaaagcaaggagacgactcgttatgggtctaagagaagttaccaaacatatgaagttaaacaagatcaagtgtgttataatttctccaaactgtgaaaaaatccagtcaaaaggtggtctggatgaggctctctataatgttatagccatggcacgggaacaagaaattccttttgtgtttgcccttggaaggaaagctctaggacgctgtgtgaacaagctggttcctgttagcgtagtgggaatcttcaactactttggtgctgagagcctgtttaataaattagtagaactcactgaggaggccaggaaagcatataaagatatggttgcagcaatggaacaggagcaggctgaggaagccttaaagaatgtgaagaaggtaccacaccacatgggacattctcggaatccctctgcagcaagtgccatttctttctgcagtgttatttctgaaccgatctctgaagtaaatgaaaaggaatatgaaacaaattggagaaacatggtggaaacttcagatggactggaagcatcagaaaatgagaaagaggtatcctgtaagcacagcacttctgaaaaacccagtaaacttccatttgacacacccccaattggtaagcagccatcattagtggctacaggcagtactacctcagctacaagtgctgggaaatccacagcaagtgataaagaggaagtgaagccagatgacctggaatgggcctcacagcagagtacagagactggctctttggatggcagttgccgagatcttttgaattcctccatcaccagcaccaccagcactcttgtacctggcatgcttgaagaagaagaagatgaagatgaggaggaggaggaagattatactcatgaacccatatctgtagaagtgcagctcaatagtagaattgagtcttgggtctcagagacccagagaactatggaaacccttcagcttggaaaaacccttaatggttctgaggaagacaatgtagagcaaagtggagaagaggaagcagaggcgcctgaggtgctggagccagggatggacagtgaggcatggactgctgaccagcaggccagtcctgggcagcagaagtccagcaactgcagctcgctcaacaaagagcactctgattctaattacacaacgcaaactacgtaactcaggaaatgtcggctctctatctccagctgtggaagggttgcagccattaccttttatgcttcatctcaacattttgcactgtccagtatttaatatacgtatttaattcccaacaaatatttttgtagcttttacttgttatgatctgtagcttagcttttaattagtatctaagtgtctttctaagaactgtgtggaaaattcagatctgtttcagcttattttgtaatcaaaaacagtgataaaaagaagaccagatcttaaagaaaataaatttcaaatgcttacttaaaagacattttgaaagttaaagaacaaggttctaaggatagaagcagttatcagtgtttgcttcaggactccacctcctctactctaatttgaccaaaaaattgtttgggcttctttaaaaaagaactgggggtggagtcagaaaattaaatgaaaggctgagggtaactaagtccaccagtgttgtatgttaaaaaatcaatgcaacttttatgtggtccacaaatgtttagtcagaagtcactgattattgtaattaattagtgttgggatgggctaaaacagagccttcaaaacttcggctagcagtggagccaccatcttagattatagctagctagcctcatttgtggaaagtgatagatgctgtctataatagtgaacagtcacccatgataggacctccaggttctgtctcatatttgcttcttacttacctcaggaatgctcttgtacatagacttatttacaaaaagctaggcacatgttgacaggtgaataactgtaaccgattgtatgactgctgcacttacatgtaaactcttcagaaacagagtcttatactggtgtgttctcttgcatgcttctggttcaggactcttgatttgagatatggatttgattgagtatccaaacttgtcctgagtgcaaaactgtttcaccttttaaaaaatacctattttgcacctagccttgagcaccttccacatagcaatgaccatagttactgtcaggaggtcaaggaaaggaactttgcacaacttgtgacatgtatcctgataatcaaggcttagaggaggaagttttagaagataagagaaagttgttctaattgtgctgaaactattagatgatttagagtatacagatatgtaggtattaattctctattcactattatttatctctgcccttctctaggagtttgtatacctgcttaggagacaataaatgagctaaatgttttatttgctagtcagtcaccacctggacttcagtgactttacaagtttatgtaatggtggaagaatgacaaactatgtaatttttttgtcttccatccaactccccaccacccccaactgtcccccccacccccctcacacacatgcacacatccgtacgtgtgtgtgttttccacttacaagcttccataagcaggcacaaaactgagaaggaaggggtattatccctgccctgattatctggggcagggctttgcctcacagaggcaggagagaagaattgggcagattctttactgaactcattgggactactgtgctagttttgatgttttataatgctggcatttaattactggagagattggattcttggttgatgatttagtatttgtgaattgtgaaagttcaggagctgtgtagaaaatgttagtcaatcaactttattattgtgctaaaaggggacattcttatactgtcctgtctaaactgttctccagtatagacttcctaggcactaaatatccaatatttaaaggaacacagcaggtaaggaatgaagcctctgaaatagtactcatggatttatacatggcagatcttactgtctctacacatttggaagtgttcgttggtttaaagaaatgatagaggttttgaactactgacagtcttaaaagtgaatttaaaaactgttcatactttttatggtgtaaatttcctttgctcgatgtcagtgattcagataactcttgaccttgagatgatggcttttcacaggtttcttatattttatatctcttctgaacatgaattgtcattttagatttttgacatttgtatcaaaagagaagttgaggaaatcttcagaacactggtaacttttagttttgctatagacttcagaagtgtttatttatatgttcggtaaatgctctcgcatatgcagtacctcttctgccagcaaatccaagggaccatagcctttttatgagacaggtcacctctagaggacaacccaagaattattaaaggaaatgttaccattttgagagcatgcttaaataaatattaataatgtctttataacttgtttcctttaaattttggaatattgaattacaggctttggaggagttgtgaaaattaggaaagtttttatatattttttgaagtgggcatggttggctctttgaagacctataaagagatccagtgggaagagtaagggttggttcatcatcacaagaaataaaaaacatagtgattttttctcttaatgtgtagaggtggttttactggcaataattaataatagatttctatttcagtatgtaagcatattaactaaaatatgaattacacttccaaagttagatttctgcttcagtaggtttgtttgctgtgaagattacttctcaaaagacagatgttcatattagcttaattttcggtttaaatatgtttgtaaatgatgtaatatatttcttttgactaaatgtggaaaagtaatgtgtgttatacattgagaagtttttactggctttgactggaggttgtttttgcagagatggtattttatatgattccagtatttggaaaagaattagtcaaaaggaattcacatagtttaaatactgagaaattaatatccaaatatgtacttgtctgatttctaaataagctgggggaggagggaggggtgggaattgaaatgtgcaaatgagtagtgaatgctacactcattttcaactctttaacatgaaactgttcaatcttaacacattgttactttaatatatgtataaagaagtattactgtttgtaaagctgctgtttgcttaaaaaaaaaaaacacccttgtcatgtattttctgtatgttgggccaacaggttagaacatcaactcatttaaaaatttttatctttttttgatttaaaaaaattctgtgaaataatttatttacagacatcttcctcctccctcatcccttccaacctttacatacatcacagaatcaaccaaactgtttgcctaatctgaaatctgaatcctaatgagaaaaatttaaattttgttggcacatcacaccttgaaagtatttgtattattttataatttaatttctaaatataccacataagtttataatttaatgtcttaattgtaatgctctaataaaaaactagcaaaattagtgtgagttataacatgaagggattttcatcttttgctgtatgaaggataattgttatatcacatttggggggtaataacagcttttttgcactatgtaaatactagtggggattcttctgtactaataaaatgattattgaaatgaaa

SEQ ID NO: 179419 - DNA, 398 bp, Homo sapiens
  Payload ID: 15355
  Gene Symbol: SECISBP2L
  Gene Name: SECIS binding protein 2-like
  ENST ID: ENST00000561428
  CDS Start-End: 1-287
taaagaatgtgaagaaggtaccacaccacatgggacattctcggaatccctctgcagcaagtgccatttctttctgcagtgttatttctgaaccgatctctgaagtaaatgaaaaggaatatgaaacaaattggagaaacatggtggaaacttcagatggactggaagcatcagaaaatgagaaagaggtatcctgtaagcacagcacttctgaaaaacccagtaaacttccatttgacacacccccaattgagatacttcaagagttcatgactccccacaagtagaagacagaaaaaagagtccagcttgagtattgattggtggtcatatggagttgccaaaaaaggctgtaaaatcgtcacgaaggagttaagaataaaaatctccatctggga

SEQ ID NO: 179420 - DNA, 704 bp, Homo sapiens
  Payload ID: 15356
  Gene Symbol: SCGN
  Gene Name: secretagogin, EF-hand calcium binding protein
  ENST ID: ENST00000334979
  CDS Start-End: 1-150
atggacagctcccgggaaccgactctggggcgcttggacgccgctggcttctggcaggtctggcagcgctttgatgcggatggacacggtcatgaaagcaaatttgcacaaggtgaaacagcagtttatgactacccaagatgcctctaaagatggtcgcattcggatgaaagagcttgctggtatgttcttatctgaggatgaaaactttcttctgctctttcgccgggaaaacccactggacagcagcgtggagtttatgcagatttggcgcaaatatgacgctgacagcagtggctttatatcagctgctgagctccgcaacttcctccgagacctctttcttcaccacaaaaaggccatttctgaggctaaactggaagaatacactggcaccatggattctggctcttcaggaaaacttccttctccaatttaaaatggatgcttgttctactgaagaaaggaaaagggactttgagaaaatctttgcctactatgatgttagtaaaacaggagccctggaaggcccagaagtggatgggtttgtcaaagacatgatggagcttgtccagcccagcatcagcggggtggaccttgataagttccgcgagattctcctgcgtcactgcgacgtgaacaaggatggaaaaattcagaagtctgagctggctttgtgtcttgggctgaaaatcaacccataa

SEQ ID NO: 179421 - DNA, 1447 bp, Homo sapiens
  Payload ID: 15356
  Gene Symbol: SCGN
  Gene Name: secretagogin, EF-hand calcium binding protein
  Uniprot ID: O76038
  ENST ID: ENST00000377961
  CDS Start-End: 169-999
cagcgacgccacggccagcagcgctcgcgtcctccccagcaacagttactcaaagctaatcagatagcgaaagaagcaggagagcaagtcaagaaatacggtgaaggagtccttcccaaagttgtctaggtccttccgcgccggtgcctggtcttcgtcgtcaacaccatggacagctcccgggaaccgactctggggcgcttggacgccgctggcttctggcaggtctggcagcgctttgatgcggatgaaaaaggttacatagaagagaaggaactcgatgctttctttctccacatgttgatgaaactgggtactgatgacacggtcatgaaagcaaatttgcacaaggtgaaacagcagtttatgactacccaagatgcctctaaagatggtcgcattcggatgaaagagcttgctggtatgttcttatctgaggatgaaaactttcttctgctctttcgccgggaaaacccactggacagcagcgtggagtttatgcagatttggcgcaaatatgacgctgacagcagtggctttatatcagctgctgagctccgcaacttcctccgagacctctttcttcaccacaaaaaggccatttctgaggctaaactggaagaatacactggcaccatgatgaagatttttgacagaaataaagatggtcggttggatctaaatgacttagcaaggattctggctcttcaggaaaacttccttctccaatttaaaatggatgcttgttctactgaagaaaggaaaagggactttgagaaaatctttgcctactatgatgttagtaaaacaggagccctggaaggcccagaagtggatgggtttgtcaaagacatgatggagcttgtccagcccagcatcagcggggtggaccttgataagttccgcgagattctcctgcgtcactgcgacgtgaacaaggatggaaaaattcagaagtctgagctggctttgtgtcttgggctgaaaatcaacccataatcccagactgctttgccttttgctcttactatgtttctgtgatcttgctggtagaattgtatctgtgcattgatgttgggaacacagtgggcaaactcacaaatggtgtgctattcttgggcaagaacagggacgctagggccttccttccaccggcgtgatctatccctgtctcactgaaagcccctgtgtagtgtctgtgttgttttcccttgaccctgggctttcctatcctcccaaagactcagctcccctgttagatggctctgcctgtccttccccagtcaccagggtgggggggacaggggcagctgagtgcattcattttgtgcttttcttgtgggctttctgcttagtctgaaaggtgtgtggcattcatggcaatcctgtaacttcaacatagatttttttgtgtgtgtggaaataaatctgcaattggaaacaaaaa

SEQ ID NO: 179422 - DNA, 1402 bp, Homo sapiens
  Payload ID: 15356
  Gene Symbol: SCGN
  Gene Name: secretagogin, EF-hand calcium binding protein
  ENST ID: ENST00000612225
  CDS Start-End: 204-353
cagccgctggttttgctgagggctgagggacggctcagcgacgccacggccagcagcgctcgcgtcctccccagcaacagttactcaaagctaatcagatagcgaaagaagcaggagagcaagtcaagaaatacggtgaaggagtccttcccaaagttgtctaggtccttccgcgccggtgcctggtcttcgtcgtcaacaccatggacagctcccgggaaccgactctggggcgcttggacgccgctggcttctggcaggtctggcagcgctttgatgcggatggacacggtcatgaaagcaaatttgcacaaggtgaaacagcagtttatgactacccaagatgcctctaaagatggtcgcattcggatgaaagagcttgctggtatgttcttatctgaggatgaaaactttcttctgctctttcgccgggaaaacccactggacagcagcgtggagtttatgcagatttggcgcaaatatgacgctgacagcagtggctttatatcagctgctgagctccgcaacttcctccgagacctctttcttcaccacaaaaaggccatttctgaggctaaactggaagaatacactggcaccatgatgaagatttttgacagaaataaagatggtcggttggatctaaatgacttagcaaggattctggctcttcaggaaaacttccttctccaatttaaaatggatgcttgttctactgaagaaaggaaaagggactttgagaaaatctttgcctactatgatgttagtaaaacaggagccctggaaggcccagaagtggatgggtttgtcaaagacatgatggagcttgtccagcccagcatcagcggggtggaccttgataagttccgcgagattctcctgcgtcactgcgacgtgaacaaggatggaaaaattcagaagtctgagctggctttgtgtcttgggctgaaaatcaacccataatcccagactgctttgccttttgctcttactatgtttctgtgatcttgctggtagaattgtatctgtgcattgatgttgggaacacagtgggcaaactcacaaatggtgtgctattcttgggcaagaacagggacgctagggccttccttccaccggcgtgatctatccctgtctcactgaaagcccctgtgtagtgtctgtgttgttttcccttgaccctgggctttcctatcctcccaaagactcagctcccctgttagatggctctgcctgtccttccccagtcaccagggtgggggggacaggggcagctgagtgcattcattttgtgcttttcttgtgggctttctgcttagtctgaaaggtgtgtggcattcatggcaatcctgtaacttcaacatagatttttttgtgtgtgtggaaataaatctgcaattgg

SEQ ID NO: 179423 - DNA, 2235 bp, Homo sapiens
  Payload ID: 15357
  Gene Symbol: SECTM1
  Gene Name: secreted and transmembrane 1
  Uniprot ID: Q8WVN6
  ENST ID: ENST00000269389
  CDS Start-End: 352-1098
aggcacgaactctcctggaaaaatgctcccggcggctttcctgcttcctttagcgtgaaccgcgggtgcggtgcctcccgtgaaaataataaattcaccgtcacgcttgttgtgaacgcgggtggttcccgaaacttggaggcttcccgtaaacccagctccttcctcatctgggaggtgggtcccgcgcgggtccgccgcctcctccctggcccctccctctcgtgtctttcattttcctggggctccggggcgcggagaagctgcatcccagaggagcgcgtccaggagcggacccgggagtgtttcaagagccagtgacaaggaccaggggcccaagtcccaccagccatgcagacctgccccctggcattccctggccacgtttcccaggcccttgggaccctcctgtttttggctgcctccttgagtgctcagaatgaaggctgggacagccccatctgcacagagggggtagtctctgtgtcttggggcgagaacaccgtcatgtcctgcaacatctccaacgccttctcccatgtcaacatcaagctgcgtgcccacgggcaggagagcgccatcttcaatgaggtggctccaggctacttctcccgggacggctggcagctccaggttcagggaggcgtggcacagctggtgatcaaaggcgcccgggactcccatgctgggctgtacatgtggcacctcgtgggacaccagagaaataacagacaagtcacgctggaggtttcaggtgcagaaccccagtccgcccccgacactgggttctggcctgtgccagcggtggtcactgctgtcttcatcctcttggtcgctctggtcatgttcgcctggtacaggtgccgctgttcccagcaacgccgggagaagaagttcttcctcctagaaccccagatgaaggtcgcagccctcagagcgggagcccagcagggcctgagcagagcctccgctgaactgtggaccccagactccgagcccaccccaaggccgctggcactggtgttcaaaccctcaccacttggagccctggagctgctgtccccccaacccttgtttccatatgccgcagacccatagccgcctgcaaggcagagaggacacaggagagccagccctgagtgccgaccttgggtggcggggcctgggtctctcgtcccacccggagggcacagacaccggcttgcttggcaggctgggcctctgtgtcacccactcctgggtgcgtgcagacccttcccctccaccccccaggtcttccaagctctgcttcctcagtttccaaaatggaaccacctcacctccgcagcacccgacttaccaggacgcatgcccctccctctgccctcatcaaacccacagacccggactccctttctgccaccccaggctggtccggccccaggtgtggggtccgctctctccactcccagggctccgcgcccaagtgagggggcccctgccggagcctcagacacactccagttcagggctgtggggggccttggccacatacctgtcccttggctatgagcaggctttgggggcccttccgcggcagccccgggggccgaggtagggtcgggggcttagaggctgggatggctcctggccccaccgccagggggcagcgcaggccgggctgggaggcggcggcggcggctcgggctggggggtcaggtggacgccgccctccggggctggacgcgcatccctcagtccctcggccacccgggggtcgctccctcgtgcccaccgcacctgccgagcctctttggacccagatctgttcatgcttttgtcttcgtcactgcggcggggccctttgatgtcttcatctgtatggggtggaaaaatcaccgggaatcccccttcagttctttgaaaaagttccatgactcgaatatctgaaatgaagaaaacaaaccgactcacaaacctccaagtagctccaaatgcaatttttaaaatggaaaacaaaaatctgaaagaaacgtctttagtggctttaagccccaaaacgtccctaaggcgtcctcgagatgaagacgggggggagcccccagccaggtggagaccccgcagggacgcggcggcgcccggtgaccgaggcctcgcacagccggccgccctgagggtcgggccggagccagggtccaagaggggcgcgtttgtgtctcgggttaaaataaggttccgtccgcgtgctgggtcaga

SEQ ID NO: 179424 - DNA, 583 bp, Homo sapiens
  Payload ID: 15357
  Gene Symbol: SECTM1
  Gene Name: secreted and transmembrane 1
  ENST ID: ENST00000582290
  CDS Start-End: 328-583
cattttcctggggctccggggcgcggagaagctgcatcccagaggagcgcgtccaggagcggacccgaagggactggacttgtactgagcatagcggctgcctggagtggggaacccagacctcaggacacggcacccgcagcctgcgccaatgtgggaccatccctgagcctcagcagcacctcggggttggtgacgtgcctcccagcagtgacagtgtccccacacctgcactctgcggctggcagggtcttccacgtggaggcaggaccatgggagtgtttcaagagccagtgacaaggaccaggggcccaagtcccaccagccatgcagacctgccccctggcattccctggccacgtttcccaggcccttgggaccctcctgtttttggctgcctccttgagtgctcagaatgaaggctgggacagccccatctgcacagagggggtagtctctgtgtcttggggcgagaacaccgtcatgtcctgcaacatctccaacgccttctcccatgtcaacatcaagctgcgtgcccacgggcaggagagcgccatcttcaatgaggtggctccaggctact

SEQ ID NO: 179425 - DNA, 556 bp, Homo sapiens
  Payload ID: 15357
  Gene Symbol: SECTM1
  Gene Name: secreted and transmembrane 1
  ENST ID: ENST00000583093
  CDS Start-End: 117-556
tttcctggggctccggggcgcggagaagctgcatcccagaggagcgcgtccaggagcggacccgggagtgtttcaagagccagtgacaaggaccaggggcccaagtcccaccagccatgcagacctgccccctggcattccctggccacgtttcccaggcccttgggaccctcctgtttttggctgcctccttgagtgctcagaatgaaggctgggacagccccatctgcacagagggggtagtctctgtgtcttggggcgagaacaccgtcatgtcctgcaacatctccaacgccttctcccatgtcaacatcaagctgcgtgcccacgggcaggagagcgccatcttcaatgaggtggctccaggctacttctcccgggacggctggcagctccaggttcagggaggcgtggcacagctggtgatcaaaggcgcccgggactcccatgctgggctgtacatgtggcacctcgtgggacaccagagaaataacagacaagtcacgctggaggtttcagaaccccgaggcctgaaggaccgggccagcgcgcagct

SEQ ID NO: 179426 - DNA, 841 bp, Homo sapiens
  Payload ID: 15357
  Gene Symbol: SECTM1
  Gene Name: secreted and transmembrane 1
  ENST ID: ENST00000581691
  CDS Start-End: 306-841
acagactcgaggcctccaggagcggagccaaacagccccgcggggaacgcgcgccgcacgcgagctggacccgcccaggcacgaactctcctggaaaaatgctcccggcggctttcctgcttcctttagcgtgaaccgcgggtgcggtgcctcccgtgaaaataataaattcaccgtcacgcttgttgtgaacgcgggtggttcccgaaacttggaggcttcccgtaaacccagctccttcctcatctgggagggagtgtttcaagagccagtgacaaggaccaggggcccaagtcccaccagccatgcagacctgccccctggcattccctggccacgtttcccaggcccttgggaccctcctgtttttggctgcctccttgagtgctcagaatgaaggctgggacagccccatctgcacagagggggtagtctctgtgtcttggggcgagaacaccgtcatgtcctgcaacatctccaacgccttctcccatgtcaacatcaagctgcgtgcccacgggcaggagagcgccatcttcaatgaggtggctccaggctacttctcccgggacggctggcagctccaggttcagggaggcgtggcacagctggtgatcaaaggcgcccgggactcccatgctgggctgtacatgtggcacctcgtgggacaccagagaaataacagacaagtcacgctggaggtttcaggtgcagaaccccagtccgcccccgacactgggttctggcctgtgccagcggtggtcactgctgtcttcatcctcttggtcgctctggtcatgttcgcctggtacaggtgccgctgttcccagcaacgccggga

SEQ ID NO: 179427 - DNA, 637 bp, Homo sapiens
  Payload ID: 15357
  Gene Symbol: SECTM1
  Gene Name: secreted and transmembrane 1
  ENST ID: ENST00000582563
  CDS Start-End: 128-637
tttcattttcctggggctccggggcgcggagaagctgcatcccagaggagcgcgtccaggagcggacccggtgagggagtgtttcaagagccagtgacaaggaccaggggcccaagtcccaccagccatgcagacctgccccctggcattccctggccacgtttcccaggcccttgggaccctcctgtttttggctgcctccttgagtgctcagaatgaaggctgggacagccccatctgcacagagggggtagtctctgtgtcttggggcgagaacaccgtcatgtcctgcaacatctccaacgccttctcccatgtcaacatcaagctgcgtgcccacgggcaggagagcgccatcttcaatgaggtggctccaggctacttctcccgggacggctggcagctccaggttcagggaggcgtggcacagctggtgatcaaaggcgcccgggactcccatgctgggctgtacatgtggcacctcgtgggacaccagagaaataacagacaagtcacgctggaggtttcagaaccccgaggcctgaaggaccgggccagcgcgcagctcctgggacctggcacatccaggggtgcagaaccccagtccgcccccgacactgggttctggcctgtgcca

SEQ ID NO: 179428 - DNA, 1030 bp, Homo sapiens
  Payload ID: 15357
  Gene Symbol: SECTM1
  Gene Name: secreted and transmembrane 1
  ENST ID: ENST00000580437
  CDS Start-End: 116-565
ttcctggggctccggggcgcggagaagctgcatcccagaggagcgcgtccaggagcggacccgggagtgtttcaagagccagtgacaaggaccaggggcccaagtcccaccagccatgcagacctgccccctggcattccctggccacgtttcccaggcccttgggaccctcctgtttttggctgcctccttgagtgctcagaatgaaggctgggacagccccatctgcacagagggggtagtctctgtgtcttggggcgagaacaccgtcatgtcctgcaacatctccaacgccttctcccatgtcaacatcaagctgcgtgcccacgggcaggagagcgccatcttcaatgaggtggctccaggctacttctcccgggacggctggcagctccaggttcagggaggcgtggcacagctggtgatcaaaggcgcccgggactcccatgctgggctgtacatgtggcacctcgtgggacaccagagaaataacagacaagtcacgctggaggtttcaggtgccgctgttcccagcaacgccgggagaagaagttcttcctcctagaaccccagatgaaggtcgcagccctcagagcgggagcccagcagggcctgagcagagcctccgctgaactgtggaccccagactccgagcccaccccaaggccgctggcactggtgttcaaaccctcaccacttggagccctggagctgctgtccccccaacccttgtttccatatgccgcagacccatagccgcctgcaaggcagagaggacacaggagagccagccctgagtgccgaccttgggtggcggggcctgggtctctcgtcccacccggagggcacagacaccggcttgcttggcaggctgggcctctgtgtcacccactcctgggtgcgtgcagacccttcccctccaccccccaggtcttccaagctctgcttcctcagtttccaaaatggaaccacctcacctccgcagcacccgacttaccaggacgcatgcccctccctctgccctcatcaa

SEQ ID NO: 179429 - DNA, 787 bp, Homo sapiens
  Payload ID: 15357
  Gene Symbol: SECTM1
  Gene Name: secreted and transmembrane 1
  ENST ID: ENST00000581864
  CDS Start-End: 102-233
gggcgcggagaagctgcatcccagaggagcgcgtccaggagcggacccgggagtgtttcaagagccagtgacaaggaccaggggcccaagtcccaccagccatgcagacctgccccctggcattccctggccacgtttcccaggcccttgggaccctcctgtttttggctgcctccttgagtgctcagaatgaagctgcgtgcccacgggcaggagagcgccatcttcaatgaggtggctccaggctacttctcccgggacggctggcagctccaggttcagggaggcgtggcacagctggtgatcaaaggcgcccgggactcccatgctgggctgtacatgtggcacctcgtgggacaccagagaaataacagacaagtcacgctggaggtttcaggtgcagaaccccagtccgcccccgacactgggttctggcctgtgccagcggtggtcactgctgtcttcatcctcttggtcgctctggtcatgttcgcctggtacaggtgccgctgttcccagcaacgccgggagaagaagttcttcctcctagaaccccagatgaaggtcgcagccctcagagcgggagcccagcagggcctgagcagagcctccgctgaactgtggaccccagactccgagcccaccccaaggccgctggcactggtgttcaaaccctcaccacttggagccctggagctgctgtccccccaacccttgtttccatatgccgcagacccatagccgcctgcaaggcagagaggacacaggagagccagccctgagtgcc

SEQ ID NO: 179430 - DNA, 561 bp, Homo sapiens
  Payload ID: 15357
  Gene Symbol: SECTM1
  Gene Name: secreted and transmembrane 1
  ENST ID: ENST00000581954
  CDS Start-End: 430-561
tgtgcaaggctgagctcctgcgtggaggcaggtggggctttgtggagcttccacacagggaccctcatcccccagccactctcaggggatccagatccacacggatccagcacctcctgtatgcagggcatgagtggggaccccgtgggaagcacagaagcggcgacctcgctggggcctgtgagaggctcatcactgcctgtggggccctcccccagcaccgtgggtgtgtgccctggagccgcctctgcctggcgggagaggagccacacagctagggggcccctagtgtttgcaggcctgagacaagatggcacaaggaggctcgcctgctggaagctgcccagcagcctgccttgccagtgagagcagcagagggagtgtttcaagagccagtgacaaggaccaggggcccaagtcccaccagccatgcagacctgccccctggcattccctggccacgtttcccaggcccttgggaccctcctgtttttggctgcctccttgagtgctcagaatgaaggctgggacagccccatctgcacagagggggtagtctct

SEQ ID NO: 179431 - DNA, 4492 bp, Homo sapiens
  Payload ID: 15358
  Gene Symbol: SFRP1
  Gene Name: secreted frizzled-related protein 1
  Uniprot ID: Q8N474
  ENST ID: ENST00000220772
  CDS Start-End: 339-1283
cgagggctcggccgtaggagccccgcgcactccagccctgcagcctccggagtcagtgccgcgcgcccgccgccccgcgccttcctgctcgccgcacctccgggagccggggcgcacccagcccgcagcgccgcctccccgcccgcgccgcctccgaccgcaggccgagggccgccactggccggggggaccgggcagcagcttgcggccgcggagccgggcaacgctggggactgcgccttttgtccccggaggtccctggaagtttgcggcaggacgcgcgcggggaggcggcggaggcagccccgacgtcgcggagaacagggcgcagagccggcatgggcatcgggcgcagcgaggggggccgccgcggggcagccctgggcgtgctgctggcgctgggcgcggcgcttctggccgtgggctcggccagcgagtacgactacgtgagcttccagtcggacatcggcccgtaccagagcgggcgcttctacaccaagccacctcagtgcgtggacatccccgcggacctgcggctgtgccacaacgtgggctacaagaagatggtgctgcccaacctgctggagcacgagaccatggcggaggtgaagcagcaggccagcagctgggtgcccctgctcaacaagaactgccacgccggcacccaggtcttcctctgctcgctcttcgcgcccgtctgcctggaccggcccatctacccgtgtcgctggctctgcgaggccgtgcgcgactcgtgcgagccggtcatgcagttcttcggcttctactggcccgagatgcttaagtgtgacaagttccccgagggggacgtctgcatcgccatgacgccgcccaatgccaccgaagcctccaagccccaaggcacaacggtgtgtcctccctgtgacaacgagttgaaatctgaggccatcattgaacatctctgtgccagcgagtttgcactgaggatgaaaataaaagaagtgaaaaaagaaaatggcgacaagaagattgtccccaagaagaagaagcccctgaagttggggcccatcaagaagaaggacctgaagaagcttgtgctgtacctgaagaatggggctgactgtccctgccaccagctggacaacctcagccaccacttcctcatcatgggccgcaaggtgaagagccagtacttgctgacggccatccacaagtgggacaagaaaaacaaggagttcaaaaacttcatgaagaaaatgaaaaaccatgagtgccccacctttcagtccgtgtttaagtgattctcccgggggcagggtggggagggagcctcgggtggggtgggagcgggggggacagtgccccgggaacccggtgggtcacacacacgcactgcgcctgtcagtagtggacattgtaatccagtcggcttgttcttgcagcattcccgctcccttccctccatagccacgctccaaaccccagggtagccatggccgggtaaagcaagggccatttagattaggaaggtttttaagatccgcaatgtggagcagcagccactgcacaggaggaggtgacaaaccatttccaacagcaacacagccactaaaacacaaaaagggggattgggcggaaagtgagagccagcagcaaaaactacattttgcaacttgttggtgtggatctattggctgatctatgcctttcaactagaaaattctaatgattggcaagtcacgttgttttcaggtccagagtagtttctttctgtctgctttaaatggaaacagactcataccacacttacaattaaggtcaagcccagaaagtgataagtgcagggaggaaaagtgcaagtccattatgtaatagtgacagcaaagggaccaggggagaggcattgccttctctgcccacagtctttccgtgtgattgtctttgaatctgaatcagccagtctcagatgccccaaagtttcggttcctatgagcccggggcatgatctgatccccaagacatgtggaggggcagcctgtgcctgcctttgtgtcagaaaaaggaaaccacagtgagcctgagagagacggcgattttcgggctgagaaggcagtagttttcaaaacacatagttaaaaaagaaacaaatgaaaaaaattttagaacagtccagcaaattgctagtcagggtgaattgtgaaattgggtgaagagcttaggattctaatctcatgttttttccttttcacatttttaaaagaacaatgacaaacacccacttatttttcaaggttttaaaacagtctacattgagcatttgaaaggtgtgctagaacaaggtctcctgatccgtccgaggctgcttcccagaggagcagctctccccaggcatttgccaagggaggcggatttccctggtagtgtagctgtgtggctttccttcctgaagagtccgtggttgccctagaacctaacaccccctagcaaaactcacagagctttccgtttttttctttcctgtaaagaaacatttcctttgaacttgattgcctatggatcaaagaaattcagaacagcctgcctgtccccccgcactttttacatatatttgtttcatttctgcagatggaaagttgacatgggtggggtgtccccatccagcgagagagtttcaaaagcaaaacatctctgcagtttttcccaagtaccctgagatacttcccaaagcccttatgtttaatcagcgatgtatataagccagttcacttagacaactttacccttcttgtccaatgtacaggaagtagttctaaaaaaaatgcatattaatttcttcccccaaagccggattcttaattctctgcaacactttgaggacatttatgattgtccctctgggccaatgcttatacccagtgaggatgctgcagtgaggctgtaaagtggccccctgcggccctagcctgacccggaggaaaggatggtagattctgttaactcttgaagactccagtatgaaaatcagcatgcccgcctagttacctaccggagagttatcctgataaattaacctctcacagttagtgatcctgtccttttaacaccttttttgtggggttctctctgacctttcatcgtaaagtgctggggaccttaagtgatttgcctgtaattttggatgattaaaaaatgtgtatatatattagctaattagaaatattctacttctctgttgtcaaactgaaattcagagcaagttcctgagtgcgtggatctgggtcttagttctggttgattcactcaagagttcagtgctcatacgtatctgctcattttgacaaagtgcctcatgcaaccgggccctctctctgcggcagagtccttagtggaggggtttacctggaacattagtagttaccacagaatacggaagagcaggtgactgtgctgtgcagctctctaaatgggaattctcaggtaggaagcaacagcttcagaaagagctcaaaataaattggaaatgtgaatcgcagctgtgggttttaccaccgtctgtctcagagtcccaggaccttgagtgtcattagttactttattgaaggttttagacccatagcagctttgtctctgtcacatcagcaatttcagaaccaaaagggaggctctctgtaggcacagagctgcactatcacgagcctttgtttttctccacaaagtatctaacaaaaccaatgtgcagactgattggcctggtcattggtctccgagagaggaggtttgcctgtgatttcctaattatcgctagggccaaggtgggatttgtaaagctttacaataatcattctggatagagtcctgggaggtccttggcagaactcagttaaatctttgaagaatatttgtagttatcttagaagatagcatgggaggtgaggattccaaaaacattttatttttaaaatatcctgtgtaacacttggctcttggtacctgtgggttagcatcaagttctccccagggtagaattcaatcagagctccagtttgcatttggatgtgtaaattacagtaatcccatttcccaaacctaaaatctgtttttctcatcagactctgagtaactggttgctgtgtcataacttcatagatgcaggaggctcaggtgatctgtttgaggagagcaccctaggcagcctgcagggaataacatactggccgttctgacctgttgccagcagatacacaggacatggatgaaattcccgtttcctctagtttcttcctgtagtactcctcttttagatcctaagtctcttacaaaagctttgaatactgtgaaaatgttttacattccatttcatttgtgttgtttttttaactgcattttaccagatgttttgatgttatcgcttatgttaatagtaattcccgtacgtgttcattttattttcatgctttttcagccatgtatcaatattcacttgactaaaatcactcaattaatcaatgat

SEQ ID NO: 179432 - DNA, 3873 bp, Homo sapiens
  Payload ID: 15358
  Gene Symbol: SFRP1
  Gene Name: secreted frizzled-related protein 1
  ENST ID: ENST00000379845
  CDS Start-End: 134-670
agacatgagtggacaccttagggggctcggctgcggaaaaggtgctgcagtccacagggaacatggggggattggacgggttgcctgaagaagagaggaaagaatccctcaccccagcccccaaaaggctgtgatgggatggggaaaccccataatcgctgtcttccggacaccttttgccccttggctgcagttccactggtcggcgcccttctcagcctggcttggaaccgtcctcactcacctccactcctcccagcagcgctcaggcacaacggtgtgtcctccctgtgacaacgagttgaaatctgaggccatcattgaacatctctgtgccagcgagtttgcactgaggatgaaaataaaagaagtgaaaaaagaaaatggcgacaagaagattgtccccaagaagaagaagcccctgaagttggggcccatcaagaagaaggacctgaagaagcttgtgctgtacctgaagaatggggctgactgtccctgccaccagctggacaacctcagccaccacttcctcatcatgggccgcaaggtgaagagccagtacttgctgacggccatccacaagtgggacaagaaaaacaaggagttcaaaaacttcatgaagaaaatgaaaaaccatgagtgccccacctttcagtccgtgtttaagtgattctcccgggggcagggtggggagggagcctcgggtggggtgggagcgggggggacagtgccccgggaacccggtgggtcacacacacgcactgcgcctgtcagtagtggacattgtaatccagtcggcttgttcttgcagcattcccgctcccttccctccatagccacgctccaaaccccagggtagccatggccgggtaaagcaagggccatttagattaggaaggtttttaagatccgcaatgtggagcagcagccactgcacaggaggaggtgacaaaccatttccaacagcaacacagccactaaaacacaaaaagggggattgggcggaaagtgagagccagcagcaaaaactacattttgcaacttgttggtgtggatctattggctgatctatgcctttcaactagaaaattctaatgattggcaagtcacgttgttttcaggtccagagtagtttctttctgtctgctttaaatggaaacagactcataccacacttacaattaaggtcaagcccagaaagtgataagtgcagggaggaaaagtgcaagtccattatgtaatagtgacagcaaagggaccaggggagaggcattgccttctctgcccacagtctttccgtgtgattgtctttgaatctgaatcagccagtctcagatgccccaaagtttcggttcctatgagcccggggcatgatctgatccccaagacatgtggaggggcagcctgtgcctgcctttgtgtcagaaaaaggaaaccacagtgagcctgagagagacggcgattttcgggctgagaaggcagtagttttcaaaacacatagttaaaaaagaaacaaatgaaaaaaattttagaacagtccagcaaattgctagtcagggtgaattgtgaaattgggtgaagagcttaggattctaatctcatgttttttccttttcacatttttaaaagaacaatgacaaacacccacttatttttcaaggttttaaaacagtctacattgagcatttgaaaggtgtgctagaacaaggtctcctgatccgtccgaggctgcttcccagaggagcagctctccccaggcatttgccaagggaggcggatttccctggtagtgtagctgtgtggctttccttcctgaagagtccgtggttgccctagaacctaacaccccctagcaaaactcacagagctttccgtttttttctttcctgtaaagaaacatttcctttgaacttgattgcctatggatcaaagaaattcagaacagcctgcctgtccccccgcactttttacatatatttgtttcatttctgcagatggaaagttgacatgggtggggtgtccccatccagcgagagagtttcaaaagcaaaacatctctgcagtttttcccaagtaccctgagatacttcccaaagcccttatgtttaatcagcgatgtatataagccagttcacttagacaactttacccttcttgtccaatgtacaggaagtagttctaaaaaaaatgcatattaatttcttcccccaaagccggattcttaattctctgcaacactttgaggacatttatgattgtccctctgggccaatgcttatacccagtgaggatgctgcagtgaggctgtaaagtggccccctgcggccctagcctgacccggaggaaaggatggtagattctgttaactcttgaagactccagtatgaaaatcagcatgcccgcctagttacctaccggagagttatcctgataaattaacctctcacagttagtgatcctgtccttttaacaccttttttgtggggttctctctgacctttcatcgtaaagtgctggggaccttaagtgatttgcctgtaattttggatgattaaaaaatgtgtatatatattagctaattagaaatattctacttctctgttgtcaaactgaaattcagagcaagttcctgagtgcgtggatctgggtcttagttctggttgattcactcaagagttcagtgctcatacgtatctgctcattttgacaaagtgcctcatgcaaccgggccctctctctgcggcagagtccttagtggaggggtttacctggaacattagtagttaccacagaatacggaagagcaggtgactgtgctgtgcagctctctaaatgggaattctcaggtaggaagcaacagcttcagaaagagctcaaaataaattggaaatgtgaatcgcagctgtgggttttaccaccgtctgtctcagagtcccaggaccttgagtgtcattagttactttattgaaggttttagacccatagcagctttgtctctgtcacatcagcaatttcagaaccaaaagggaggctctctgtaggcacagagctgcactatcacgagcctttgtttttctccacaaagtatctaacaaaaccaatgtgcagactgattggcctggtcattggtctccgagagaggaggtttgcctgtgatttcctaattatcgctagggccaaggtgggatttgtaaagctttacaataatcattctggatagagtcctgggaggtccttggcagaactcagttaaatctttgaagaatatttgtagttatcttagaagatagcatgggaggtgaggattccaaaaacattttatttttaaaatatcctgtgtaacacttggctcttggtacctgtgggttagcatcaagttctccccagggtagaattcaatcagagctccagtttgcatttggatgtgtaaattacagtaatcccatttcccaaacctaaaatctgtttttctcatcagactctgagtaactggttgctgtgtcataacttcatagatgcaggaggctcaggtgatctgtttgaggagagcaccctaggcagcctgcagggaataacatactggccgttctgacctgttgccagcagatacacaggacatggatgaaattcccgtttcctctagtttcttcctgtagtactcctcttttagatcctaagtctcttacaaaagctttgaatactgtgaaaatgttttacattccatttcatttgtgttgtttttttaactgcattttaccagatgttttgatgttatcgcttatgttaatagtaattcccgtacgtgttcattttattttcatgctttttcagccatgtatcaatattcacttgactaaaatcactcaattaatc

SEQ ID NO: 179433 - DNA, 2032 bp, Homo sapiens
  Payload ID: 15359
  Gene Symbol: SFRP2
  Gene Name: secreted frizzled-related protein 2
  Uniprot ID: Q96HF1
  ENST ID: ENST00000274063
  CDS Start-End: 286-1173
agatttgcataaaaaaggccaagaaaactctggctgtgccccagcaacggctcattctgctcccccgggtcggagccccccggagctgcgcgcgggcttgcagcgcctcgcccgcgctgtcctcccggtgtcccgcttctccgcgccccagccgccggctgccagcttttcggggccccgagtcgcacccagcgaagagagcgggcccgggacaagctcgaactccggccgcctcgcccttccccggctccgctccctctgccccctcggggtcgcgcgcccacgatgctgcagggccctggctcgctgctgctgctcttcctcgcctcgcactgctgcctgggctcggcgcgcgggctcttcctctttggccagcccgacttctcctacaagcgcagcaattgcaagcccatccctgccaacctgcagctgtgccacggcatcgaataccagaacatgcggctgcccaacctgctgggccacgagaccatgaaggaggtgctggagcaggccggcgcttggatcccgctggtcatgaagcagtgccacccggacaccaagaagttcctgtgctcgctcttcgcccccgtctgcctcgatgacctagacgagaccatccagccatgccactcgctctgcgtgcaggtgaaggaccgctgcgccccggtcatgtccgccttcggcttcccctggcccgacatgcttgagtgcgaccgtttcccccaggacaacgacctttgcatccccctcgctagcagcgaccacctcctgccagccaccgaggaagctccaaaggtatgtgaagcctgcaaaaataaaaatgatgatgacaacgacataatggaaacgctttgtaaaaatgattttgcactgaaaataaaagtgaaggagataacctacatcaaccgagataccaaaatcatcctggagaccaagagcaagaccatttacaagctgaacggtgtgtccgaaagggacctgaagaaatcggtgctgtggctcaaagacagcttgcagtgcacctgtgaggagatgaacgacatcaacgcgccctatctggtcatgggacagaaacagggtggggagctggtgatcacctcggtgaagcggtggcagaaggggcagagagagttcaagcgcatctcccgcagcatccgcaagctgcagtgctagtcccggcatcctgatggctccgacaggcctgctccagagcacggctgaccatttctgctccgggatctcagctcccgttccccaagcacactcctagctgctccagtctcagcctgggcagcttccccctgccttttgcacgtttgcatccccagcatttcctgagttataaggccacaggagtggatagctgttttcacctaaaggaaaagcccacccgaatcttgtagaaatattcaaactaataaaatcatgaatatttttatgaagtttaaaaatagctcactttaaagctagttttgaataggtgcaactgtgacttgggtctggttggttgttgtttgttgttttgagtcagctgattttcacttcccactgaggttgtcataacatgcaaattgcttcaattttctctgtggcccaaacttgtgggtcacaaaccctgttgagataaagctggctgttatctcaacatcttcatcagctccagactgagactcagtgtctaagtcttacaacaattcatcattttataccttcaatgggaacttaaactgttacatgtatcacattccagctacaatacttccatttattagaagcacattaaccatttctatagcatgatttcttcaagtaaaaggcaaaagatataaattttataattgacttgagtactttaagccttgtttaaaacatttcttacttaacttttgcaaattaaacccattgtagcttacctgtaatatacatagtagtttacctttaaaagttgtaaaaatattgctttaaccaacactgtaaatatttcagataaacattatattcttgtatataaactttacatcctgttttacct

SEQ ID NO: 179434 - DNA, 849 bp, Homo sapiens
  Payload ID: 15360
  Gene Symbol: SFRP4
  Gene Name: secreted frizzled-related protein 4
  ENST ID: ENST00000447200
  CDS Start-End: 439-849
ctgattttcagatttttaaatcatttttatttgtgcacggctttactttcttttcaccattctctggatatgatagctaaaactggactctactccctggatgtgggtagactatgtaaggtctactgtctcctcactatatttaggtacatatctgtcattatgattttccagtctgacatgtaaagagcttggaagtcatcactcatcttctcacaaaaagacaaaaactgaacaaactgaaaatcaacaactcttcttagaggcatcagataattgagagcagaccgctgctgcaaacactggagagagagtcagatactaagaatcatagtttacaggagctgaagctgaggagcagaagccagaggctggagccggtgctgtgaagaaggctggcagacaacagtcaatcaggtgatcaaagtgaacatcaggatgcaattggaacagagtattatccctgatattcctgccaaagatgttaagtggatagacatcacaccagacatgatggtacaggaaaggcctcttgatgttgactgtaaacgcctaagccccgatcggtgcaagtgtaaaaaggtgaagccaactttggcaacgtatctcagcaaaaactacagctatgttattcatgccaaaataaaagctgtgcagaggagtggctgcaatgaggtcacaacggtggtggatgtaaaagagatcttcaagtcctcatcacccatccctcgaactcaagtcccgctcattacaaattcttcttgccagtgtccacacatcctgccccatcaagatgttctcatcatgtgttacgagtggcgctcaaggatgatgcttcttgaaaattgc

SEQ ID NO: 179435 - DNA, 2966 bp, Homo sapiens
  Payload ID: 15360
  Gene Symbol: SFRP4
  Gene Name: secreted frizzled-related protein 4
  Uniprot ID: Q6FHJ7
  ENST ID: ENST00000436072
  CDS Start-End: 379-1419
gggggagcccgcgccgcggctgcagctgccaagggagcgttccgagcccacgtcaggggaggtgtcgggataaatagggtcccgcaatggccgtggctggctgcgctccgagctgcggagtccgggactggagctgcccgggcgggttcgcgccccgaaggctgagagctggcgctgctcgtgccctgtgtgccagacggcggagctccgcggccggaccccgcggccccgctttgctgccgactggagtttgggggaagaaactctcctgcgccccagaggatttcttcctcggcgaagggacagcgaaagatgagggtggcaggaagagaagggcgctttctgtctgccggggtcgcagcgcgagagggcagtgccatgttcctctccatcctagtggcgctgtgcctgtggctgcacctggcgctgggcgtgcgcggcgcgccctgcgaggcggtgcgcatccctatgtgccggcacatgccctggaacatcacgcggatgcccaaccacctgcaccacagcacgcaggagaacgccatcctggccatcgagcagtacgaggagctggtggacgtgaactgcagcgccgtgctgcgcttcttcctctgtgccatgtacgcgcccatttgcaccctggagttcctgcacgaccctatcaagccgtgcaagtcggtgtgccaacgcgcgcgcgacgactgcgagcccctcatgaagatgtacaaccacagctggcccgaaagcctggcctgcgacgagctgcctgtctatgaccgtggcgtgtgcatctcgcctgaagccatcgtcacggacctcccggaggatgttaagtggatagacatcacaccagacatgatggtacaggaaaggcctcttgatgttgactgtaaacgcctaagccccgatcggtgcaagtgtaaaaaggtgaagccaactttggcaacgtatctcagcaaaaactacagctatgttattcatgccaaaataaaagctgtgcagaggagtggctgcaatgaggtcacaacggtggtggatgtaaaagagatcttcaagtcctcatcacccatccctcgaactcaagtcccgctcattacaaattcttcttgccagtgtccacacatcctgccccatcaagatgttctcatcatgtgttacgagtggcgctcaaggatgatgcttcttgaaaattgcttagttgaaaaatggagagatcagcttagtaaaagatccatacagtgggaagagaggctgcaggaacagcggagaacagttcaggacaagaagaaaacagccgggcgcaccagtcgtagtaatccccccaaaccaaagggaaagcctcctgctcccaaaccagccagtcccaagaagaacattaaaactaggagtgcccagaagagaacaaacccgaaaagagtgtgagctaactagtttccaaagcggagacttccgacttccttacaggatgaggctgggcattgcctgggacagcctatgtaaggccatgtgccccttgccctaacaactcactgcagtgctcttcatagacacatcttgcagcatttttcttaaggctatgcttcagtttttctttgtaagccatcacaagccatagtggtaggtttgccctttggtacagaaggtgagttaaagctggtggaaaaggcttattgcattgcattcagagtaacctgtgtgcatactctagaagagtagggaaaataatgcttgttacaattcgacctaatatgtgcattgtaaaataaatgccatatttcaaacaaaacacgtaatttttttacagtatgttttattaccttttgatatctgttgttgcaatgttagtgatgttttaaaatgtgatcgaaaatataatgcttctaagaaggaacagtagtggaatgaatgtctaaaagatctttatgtgtttatggtctgcagaaggatttttgtgatgaaaggggattttttgaaaaatctagagaagtagcatatggaaaactataatgtgtcttttttacaatgacttcagctctgtttttagctagaaactctaaaaacaaaaataataataaagaaaaataaataaaaaggagaggcagacaatgtctggattcctgttttttggttacctgatttcatgatcatgatgcttcttgtcaacaccctcttaagcagcaccagaaacagtgagtttgtctgtaccattaggagttaggtactaattagttggctaatgctcaagtattttatacccacaagagaggtatgtcactcatcttacttcccaggacatccaccctgagaataatttgacaagcttaaaaatggccttcatgtgagtgccaaattttgttttcttcatttaaatattttctttgcctaaatacatgtgagaggagttaaatataaatgtacagagaggaaagttgaggttccacctctgaaatgagaattacttgacagttgggatactttaatcagaaaaaaagaacttatcttgcagcattttatcaacaaatttcataattgtggacaattggaggcatttattttaaaaaacaattttattggccttttgctaacacagtaagcatgtattctctataaggcattcaataaatgcacaacgcccaaaggaaataaaatcctatctaatcctactctccactacacagaggtaatcactattagtattttggcatattattctccaggtgtttcttatgcacttataaaatgatttgaacaaataaaactaggaacctgctatacatgtgtttcataacctgcctcctttgcttggccctttattgagataagttttcctgtcaagaaagcagaaaccatctcatttctaacagctgtgttatattccatagtatgcattactcaacaaactgttgtgctattggatacttaggtggtttcttcactgacaatactgaataaacatctcaatagtcaaa

SEQ ID NO: 179436 - DNA, 1836 bp, Homo sapiens
  Payload ID: 15361
  Gene Symbol: SFRP5
  Gene Name: secreted frizzled-related protein 5
  Uniprot ID: Q5T4F7
  ENST ID: ENST00000266066
  CDS Start-End: 120-1073
gcggcggcggcggcggcggctgggtagagtcagggccgggggcgcacgccggaacacctgggccgccgggcaccgagcgtcggggggctgcgcggcgcgcacctggagagggcgcagccatgcgggcggcggcggcgggggggggcgtgcggacggccgcgctggcgctgctgctgggggcgctgcactgggcgccggcgcgctgcgaggagtacgactactatggctggcaggccgagccgctgcacggccgctcctactccaagccgccgcagtgccttgacatccctgccgacctgccgctctgccacacggtgggctacaagcgcatgcggctgcccaacctgctggagcacgagagcctggccgaagtgaagcagcaggcgagcagctggctgccgctgctggccaagcgctgccactcggatacgcaggtcttcctgtgctcgctctttgcgcccgtctgtctcgaccggcccatctacccgtgccgctcgctgtgcgaggccgtgcgcgccggctgcgcgccgctcatggaggcctacggcttcccctggcctgagatgctgcactgccacaagttccccctggacaacgacctctgcatcgccgtgcagttcgggcacctgcccgccaccgcgcctccagtgaccaagatctgcgcccagtgtgagatggagcacagtgctgacggcctcatggagcagatgtgctccagtgactttgtggtcaaaatgcgcatcaaggagatcaagatagagaatggggaccggaagctgattggagcccagaaaaagaagaagctgctcaagccgggccccctgaagcgcaaggacaccaagcggctggtgctgcacatgaagaatggcgcgggctgcccctgcccacagctggacagcctggcgggcagcttcctggtcatgggccgcaaagtggatggacagctgctgctcatggccgtctaccgctgggacaagaagaataaggagatgaagtttgcagtcaaattcatgttctcctacccctgctccctctactaccctttcttctacggggcggcagagccccactgaagggcactcctccttgccctgccagctgtgccttgcttgccctctggccccgccccaacttccaggctgacccggccctactggagggtgttttcacgaatgttgttactggcacaaggcctaagggatgggcacggagcccaggctgtcctttttgacccaggggtcctggggtccctgggatgttgggcttcctctctcaggagcagggcttcttcatctgggtgaagacctcagggtctcagaaagtaggcaggggaggagagggtaagggaaaggtggaggggctcagggcaccctgaggcggaggtttcagagtagaaggtggtgtcagctccagctcccctctgtcggtggtggggcctcaccttgaagagggaagtctcaatattaggctaagctatttgggaaagttctccccaccgcccctgtacgcgtcatcctagccccccttaggaaaggagttagggtctcagtgcctccagccacaccccctgccttccccagcttgcccatttccctgccccaaggcccagagctccccccagactggagagcaagcccagcccagcctcggcatagacccccttctggtccgcccgcggctcgattcccgggattcattcctcagcctctgcttctcccttttatcccaataagttattgctactgctgtgaggccataggtactagacaaccaatacatgcagggttgggttttctaatttttttaactttttaattaaatcaaagaaaacaataa

SEQ ID NO: 179437 - DNA, 537 bp, Homo sapiens
  Payload ID: 15362
  Gene Symbol: SLURP1
  Gene Name: secreted LY6/PLAUR domain containing 1
  Uniprot ID: P55000
  ENST ID: ENST00000246515
  CDS Start-End: 27-338
ctctcatcacttctgagcacggagcaatggcctctcgctgggctgtgcagctgctgctcgtggcagcctggagcatgggctgtggtgaggccctcaagtgctacacctgcaaggagcccatgaccagtgcttcctgcaggaccattacccgctgcaagccagaggacacagcctgcatgaccacgctggtgacggtggaggcagagtaccccttcaaccagagccccgtggtgacccgctcctgctccagctcctgtgtggccaccgaccccgacagcatcggggccgcccacctgatcttctgctgcttccgagacctctgcaactcggaactctgaacccagggcggcagggcggaaggtgctcctcaggcacctcctctctgacggggcctggctccacctgtgatcacctccccctgcttcctgctgctgtggcacagctcactcatggggtctgaggggagagaagcacaccaggggcgccctctgccttccataccccacgcttataaaacataactaagccaagagtgga

SEQ ID NO: 179438 - DNA, 1581 bp, Homo sapiens
  Payload ID: 15363
  Gene Symbol: SPP1
  Gene Name: secreted phosphoprotein 1
  Uniprot ID: P10451
  ENST ID: ENST00000237623
  CDS Start-End: 149-1051
ggatgtctgcagcagcatttaaattctgggagggcttggttgtcagcagcagcaggaggaggcagagcacagcatcgtcgggaccagactcgtctcaggccagttgcagccttctcagccaaacgccgaccaaggaaaactcactaccatgagaattgcagtgatttgcttttgcctcctaggcatcacctgtgccataccagttaaacaggctgattctggaagttctgaggaaaagcagctttacaacaaatacccagatgctgtggccacatggctaaaccctgacccatctcagaagcagaatctcctagccccacagacccttccaagtaagtccaacgaaagccatgaccacatggatgatatggatgatgaagatgatgatgaccatgtggacagccaggactccattgactcgaacgactctgatgatgtagatgacactgatgattctcaccagtctgatgagtctcaccattctgatgaatctgatgaactggtcactgattttcccacggacctgccagcaaccgaagttttcactccagttgtccccacagtagacacatatgatggccgaggtgatagtgtggtttatggactgaggtcaaaatctaagaagtttcgcagacctgacatccagtaccctgatgctacagacgaggacatcacctcacacatggaaagcgaggagttgaatggtgcatacaaggccatccccgttgcccaggacctgaacgcgccttctgattgggacagccgtgggaaggacagttatgaaacgagtcagctggatgaccagagtgctgaaacccacagccacaagcagtccagattatataagcggaaagccaatgatgagagcaatgagcattccgatgtgattgatagtcaggaactttccaaagtcagccgtgaattccacagccatgaatttcacagccatgaagatatgctggttgtagaccccaaaagtaaggaagaagataaacacctgaaatttcgtatttctcatgaattagatagtgcatcttctgaggtcaattaaaaggagaaaaaatacaatttctcactttgcatttagtcaaaagaaaaaatgctttatagcaaaatgaaagagaacatgaaatgcttctttctcagtttattggttgaatgtgtatctatttgagtctggaaataactaatgtgtttgataattagtttagtttgtggcttcatggaaactccctgtaaactaaaagcttcagggttatgtctatgttcattctatagaagaaatgcaaactatcactgtattttaatatttgttattctctcatgaatagaaatttatgtagaagcaaacaaaatacttttacccacttaaaaagagaatataacattttatgtcactataatcttttgttttttaagttagtgtatattttgttgtgattatctttttgtggtgtgaataaatcttttatcttgaatgtaataagaatttggtggtgtcaattgcttatttgttttcccacggttgtccagcaattaataaaacataaccttttttactgcctatataatgtttttaaa

SEQ ID NO: 179439 - DNA, 1196 bp, Homo sapiens
  Payload ID: 15363
  Gene Symbol: SPP1
  Gene Name: secreted phosphoprotein 1
  Uniprot ID: P10451
  ENST ID: ENST00000360804
  CDS Start-End: 102-965
agcagcaggaggaggcagagcacagcatcgtcgggaccagactcgtctcaggccagttgcagccttctcagccaaacgccgaccaaggaaaactcactaccatgagaattgcagtgatttgcttttgcctcctaggcatcacctgtgccataccagttaaacaggctgattctggaagttctgaggaaaagcagaatgctgtgtcctctgaagaaaccaatgactttaaacaagagacccttccaagtaagtccaacgaaagccatgaccacatggatgatatggatgatgaagatgatgatgaccatgtggacagccaggactccattgactcgaacgactctgatgatgtagatgacactgatgattctcaccagtctgatgagtctcaccattctgatgaatctgatgaactggtcactgattttcccacggacctgccagcaaccgaagttttcactccagttgtccccacagtagacacatatgatggccgaggtgatagtgtggtttatggactgaggtcaaaatctaagaagtttcgcagacctgacatccagtaccctgatgctacagacgaggacatcacctcacacatggaaagcgaggagttgaatggtgcatacaaggccatccccgttgcccaggacctgaacgcgccttctgattgggacagccgtgggaaggacagttatgaaacgagtcagctggatgaccagagtgctgaaacccacagccacaagcagtccagattatataagcggaaagccaatgatgagagcaatgagcattccgatgtgattgatagtcaggaactttccaaagtcagccgtgaattccacagccatgaatttcacagccatgaagatatgctggttgtagaccccaaaagtaaggaagaagataaacacctgaaatttcgtatttctcatgaattagatagtgcatcttctgaggtcaattaaaaggagaaaaaatacaatttctcactttgcatttagtcaaaagaaaaaatgctttatagcaaaatgaaagagaacatgaaatgcttctttctcagtttattggttgaatgtgtatctatttgagtctggaaataactaatgtgtttgataattagtttagtttgtggcttcatggaaactccctgtaaactaaaagcttcagggttatgtctatgttcattctatagaaga

SEQ ID NO: 179440 - DNA, 1473 bp, Homo sapiens
  Payload ID: 15363
  Gene Symbol: SPP1
  Gene Name: secreted phosphoprotein 1
  Uniprot ID: P10451
  ENST ID: ENST00000395080
  CDS Start-End: 128-1072
aattctgggagggcttggttgtcagcagcagcaggaggaggcagagcacagcatcgtcgggaccagactcgtctcaggccagttgcagccttctcagccaaacgccgaccaaggaaaactcactaccatgagaattgcagtgatttgcttttgcctcctaggcatcacctgtgccataccagttaaacaggctgattctggaagttctgaggaaaagcagctttacaacaaatacccagatgctgtggccacatggctaaaccctgacccatctcagaagcagaatctcctagccccacagaatgctgtgtcctctgaagaaaccaatgactttaaacaagagacccttccaagtaagtccaacgaaagccatgaccacatggatgatatggatgatgaagatgatgatgaccatgtggacagccaggactccattgactcgaacgactctgatgatgtagatgacactgatgattctcaccagtctgatgagtctcaccattctgatgaatctgatgaactggtcactgattttcccacggacctgccagcaaccgaagttttcactccagttgtccccacagtagacacatatgatggccgaggtgatagtgtggtttatggactgaggtcaaaatctaagaagtttcgcagacctgacatccagtaccctgatgctacagacgaggacatcacctcacacatggaaagcgaggagttgaatggtgcatacaaggccatccccgttgcccaggacctgaacgcgccttctgattgggacagccgtgggaaggacagttatgaaacgagtcagctggatgaccagagtgctgaaacccacagccacaagcagtccagattatataagcggaaagccaatgatgagagcaatgagcattccgatgtgattgatagtcaggaactttccaaagtcagccgtgaattccacagccatgaatttcacagccatgaagatatgctggttgtagaccccaaaagtaaggaagaagataaacacctgaaatttcgtatttctcatgaattagatagtgcatcttctgaggtcaattaaaaggagaaaaaatacaatttctcactttgcatttagtcaaaagaaaaaatgctttatagcaaaatgaaagagaacatgaaatgcttctttctcagtttattggttgaatgtgtatctatttgagtctggaaataactaatgtgtttgataattagtttagtttgtggcttcatggaaactccctgtaaactaaaagcttcagggttatgtctatgttcattctatagaagaaatgcaaactatcactgtattttaatatttgttattctctcatgaatagaaatttatgtagaagcaaacaaaatacttttacccacttaaaaagagaatataacattttatgtcactataatcttttgttttttaagttagtgtatattttgttgtgattatctttttgt

SEQ ID NO: 179441 - DNA, 825 bp, Homo sapiens
  Payload ID: 15363
  Gene Symbol: SPP1
  Gene Name: secreted phosphoprotein 1
  ENST ID: ENST00000508233
  CDS Start-End: 102-825
agcagcaggaggaggcagagcacagcatcgtcgggaccagactcgtctcaggccagttgcagccttctcagccaaacgccgaccaaggaaaactcactaccatgagaattgcagtgatttgcttttgcctcctaggcatcacctgtgccataccagttaaacaggctgattctggaagttctgaggaaaagcagacccttccaagtaagtccaacgaaagccatgaccacatggatgatatggatgatgaagatgatgatgaccatgtggacagccaggactccattgactcgaacgactctgatgatgtagatgacactgatgattctcaccagtctgatgagtctcaccattctgatgaatctgatgaactggtcactgattttcccacggacctgccagcaaccgaagttttcactccagttgtccccacagtagacacatatgatggccgaggtgatagtgtggtttatggactgaggtcaaaatctaagaagtttcgcagacctgacatccagtaccctgatgctacagacgaggacatcacctcacacatggaaagcgaggagttgaatggtgcatacaaggccatccccgttgcccaggacctgaacgcgccttctgattgggacagccgtgggaaggacagttatgaaacgagtcagctggatgaccagagtgctgaaacccacagccacaagcagtccagattatataagcggaaagccaatgatgagagcaatgagcattccgatgtgattgatagtcaggaactttccaaagtcagccgtgaattccacagccatgaatttcacagccatgaag

SEQ ID NO: 179442 - DNA, 1558 bp, Homo sapiens
  Payload ID: 15363
  Gene Symbol: SPP1
  Gene Name: secreted phosphoprotein 1
  Uniprot ID: P10451
  ENST ID: ENST00000614857
  CDS Start-End: 166-1044
ctccctgtgttggtggaggatgtctgcagcagcatttaaattctgggagggcttggttgtcagcagcagcaggaggaggcagagcacagcatcgtcgggaccagactcgtctcaggccagttgcagccttctcagccaaacgccgaccaaggaaaactcactaccatgagaattgcagtgatttgcttttgcctcctaggcatcacctgtgccataccagttaaacaggctgattctggaagttctgaggaaaagcagctttacaacaaatacccagatgctgtggccacatggctaaaccctgacccatctcagaagcagaatctcctagccccacagaatgctgtgtcctctgaagaaaccaatgactttaaacaagagacccttccaagtaagtccaacgaaagccatgaccacatggatgatatggatgatgaagatgatgattctcaccagtctgatgagtctcaccattctgatgaatctgatgaactggtcactgattttcccacggacctgccagcaaccgaagttttcactccagttgtccccacagtagacacatatgatggccgaggtgatagtgtggtttatggactgaggtcaaaatctaagaagtttcgcagacctgacatccagtaccctgatgctacagacgaggacatcacctcacacatggaaagcgaggagttgaatggtgcatacaaggccatccccgttgcccaggacctgaacgcgccttctgattgggacagccgtgggaaggacagttatgaaacgagtcagctggatgaccagagtgctgaaacccacagccacaagcagtccagattatataagcggaaagccaatgatgagagcaatgagcattccgatgtgattgatagtcaggaactttccaaagtcagccgtgaattccacagccatgaatttcacagccatgaagatatgctggttgtagaccccaaaagtaaggaagaagataaacacctgaaatttcgtatttctcatgaattagatagtgcatcttctgaggtcaattaaaaggagaaaaaatacaatttctcactttgcatttagtcaaaagaaaaaatgctttatagcaaaatgaaagagaacatgaaatgcttctttctcagtttattggttgaatgtgtatctatttgagtctggaaataactaatgtgtttgataattagtttagtttgtggcttcatggaaactccctgtaaactaaaagcttcagggttatgtctatgttcattctatagaagaaatgcaaactatcactgtattttaatatttgttattctctcatgaatagaaatttatgtagaagcaaacaaaatacttttacccacttaaaaagagaatataacattttatgtcactataatcttttgttttttaagttagtgtatattttgttgtgattatctttttgtggtgtgaataaatcttttatcttgaatgtaataagaatttggtggtgtcaattgcttatttgttttcccacggttgtccagcaattaataaaacataaccttttttactgcct

SEQ ID NO: 179443 - DNA, 1024 bp, Homo sapiens
  Payload ID: 15364
  Gene Symbol: SPP2
  Gene Name: secreted phosphoprotein 2, 24kDa
  Uniprot ID: Q13103
  ENST ID: ENST00000168148
  CDS Start-End: 89-724
gccagtgtttgataaagacagctcctcttaggaagaactgtcatccccaaacacatagagagacactctctgtctctcgattacaatcatgatttccagaatggagaagatgacgatgatgatgaagatattgattatgtttgctcttggaatgaactactggtcttgctcaggtttcccagtgtacgactacgatccatcctccttaagggatgccctcagtgcctctgtggtaaaagtgaattcccagtcactgagtccgtatctgtttcgggcattcagaagctcattaaaaagagttgaggtcctagatgagaacaacttggtcatgaatttagagttcagcatccgggagactacatgcaggaaggattctggagaagatcccgctacatgtgccttccagagggactactatgtgtccacagctgtttgcagaagcaccgtgaaggtatctgcccagcaggtgcagggcgtgcatgctcgctgcagctggtcctcctccacgtctgagtcttacagcagcgaagagatgatttttggggacatgttgggatctcataaatggagaaacaattatctatttggtctcatttcagacgagtccataagtgaacaattttatgatcggtcacttgggatcatgagaagggtattgcctcctggaaacagaaggtacccaaaccaccggcacagagcaagaataaatactgactttgagtaacggccttgaggtgtccctcgcccttttggtttgttcaaggagctgctgctttgcatagctgctctagtgtctggtatcatcggatctggttttgaataattcccaggagtcctgggtccctggcctccaaagctggaatgtgaacgcatgccacggtggtctgaccctcacactccttttctcttaacagcaaaatgcaatggaaggaagaaaagttccaacaaagaatgattttgtgaattctgtgatttttcttctgatcagtttcaatctgtaataaatgccttatttttcctgtaa

SEQ ID NO: 179444 - DNA, 860 bp, Homo sapiens
  Payload ID: 15364
  Gene Symbol: SPP2
  Gene Name: secreted phosphoprotein 2, 24kDa
  Uniprot ID: Q13103
  ENST ID: ENST00000373368
  CDS Start-End: 109-744
tgctgcagtcaaaataagcagccagtgtttgataaagacagctcctcttaggaagaactgtcatccccaaacacatagagagacactctctgtctctcgattacaatcatgatttccagaatggagaagatgacgatgatgatgaagatattgattatgtttgctcttggaatgaactactggtcttgctcaggtttcccagtgtacgactacgatccatcctccttaagggatgccctcagtgcctctgtggtaaaagtgaattcccagtcactgagtccgtatctgtttcgggcattcagaagctcattaaaaagagttgaggtcctagatgagaacaacttggtcatgaatttagagttcagcatccgggagactacatgcaggaaggattctggagaagatcccgctacatgtgccttccagagggactactatgtgtccacagctgtttgcagaagcaccgtgaaggtatctgcccagcaggtgcagggcgtgcatgctcgctgcagctggtcctcctccacgtctgagtcttacagcagcgaagagatgatttttggggacatgttgggatctcataaatggagaaacaattatctatttggtctcatttcagacgagtccataagtgaacaattttatgatcggtcacttgggatcatgagaagggtattgcctcctggaaacagaaggtacccaaaccaccggcacagagcaagaataaatactgactttgagtaacggccttgagcaaaatgcaatggaaggaagaaaagttccaacaaagaatgattttgtgaattctgtgatttttcttctgatcagtttcaatctgtaataaatgccttatttttcct

SEQ ID NO: 179445 - DNA, 508 bp, Homo sapiens
  Payload ID: 15364
  Gene Symbol: SPP2
  Gene Name: secreted phosphoprotein 2, 24kDa
  ENST ID: ENST00000425558
  CDS Start-End: 116-508
atgatttccagaatggagaagatgacgatgatgatgaagatattgattatgtttgctcttggaatgaactactggtcttgctcaggttgaggtcctagatgagaacaacttggtcatgaatttagagttcagcatccgggagactacatgcaggaaggattctggagaagatcccgctacatgtgccttccagagggactactatgtgtccacagctgtttgcagaagcaccgtgaaggtatctgcccagcaggtgcagggcgtgcatgctcgctgcagctggtcctcctccacgtctgagtcttacagcagcgaagagatgatttttggggacatgttgggatctcataaatggagaaacaattatctatttggtctcatttcagacgagtccataagtgaacaattttatgatcggtcacttgggatcatgagaagggtattgcctcctggaaacagaaggtacccaaaccaccggcacagagcaagaataaatactgactttgag

SEQ ID NO: 179446 - DNA, 3701 bp, Homo sapiens
  Payload ID: 15365
  Gene Symbol: SPARC
  Gene Name: secreted protein, acidic, cysteine-rich (osteonectin)
  Uniprot ID: P09486
  ENST ID: ENST00000231061
  CDS Start-End: 315-1226
taggcagcagccccggaacagatgaggcaggcagggttgggacgtttggtcaggacagcccaccgcaaaaagaggaggaaagaaatgaaagacagagacagctttggctatgggagaaggaggaggccgggggaaggaggagacaggaggaggagggaccacggggtggaggggagatagacccagcccagagctctgagtggtttcctgttgcctgtctctaaacccctccacattcccgcggtccttcagactgcccggagagcgcgctctgcctgccgcctgcctgcctgccactgagggttcccagcaccatgagggcctggatcttctttctcctttgcctggccgggagggccttggcagcccctcagcaagaagccctgcctgatgagacagaggtggtggaagaaactgtggcagaggtgactgaggtatctgtgggagctaatcctgtccaggtggaagtaggagaatttgatgatggtgcagaggaaaccgaagaggaggtggtggcggaaaatccctgccagaaccaccactgcaaacacggcaaggtgtgcgagctggatgagaacaacacccccatgtgcgtgtgccaggaccccaccagctgcccagcccccattggcgagtttgagaaggtgtgcagcaatgacaacaagaccttcgactcttcctgccacttctttgccacaaagtgcaccctggagggcaccaagaagggccacaagctccacctggactacatcgggccttgcaaatacatccccccttgcctggactctgagctgaccgaattccccctgcgcatgcgggactggctcaagaacgtcctggtcaccctgtatgagagggatgaggacaacaaccttctgactgagaagcagaagctgcgggtgaagaagatccatgagaatgagaagcgcctggaggcaggagaccaccccgtggagctgctggcccgggacttcgagaagaactataacatgtacatcttccctgtacactggcagttcggccagctggaccagcaccccattgacgggtacctctcccacaccgagctggctccactgcgtgctcccctcatccccatggagcattgcaccacccgctttttcgagacctgtgacctggacaatgacaagtacatcgccctggatgagtgggccggctgcttcggcatcaagcagaaggatatcgacaaggatcttgtgatctaaatccactccttccacagtaccggattctctctttaaccctccccttcgtgtttcccccaatgtttaaaatgtttggatggtttgttgttctgcctggagacaaggtgctaacatagatttaagtgaatacattaacggtgctaaaaatgaaaattctaacccaagacatgacattcttagctgtaacttaactattaaggccttttccacacgcattaatagtcccatttttctcttgccatttgtagctttgcccattgtcttattggcacatgggtggacacggatctgctgggctctgccttaaacacacattgcagcttcaacttttctctttagtgttctgtttgaaactaatacttaccgagtcagactttgtgttcatttcatttcagggtcttggctgcctgtgggcttccccaggtggcctggaggtgggcaaagggaagtaacagacacacgatgttgtcaaggatggttttgggactagaggctcagtggtgggagagatccctgcagaacccaccaaccagaacgtggtttgcctgaggctgtaactgagagaaagattctggggctgtgttatgaaaatatagacattctcacataagcccagttcatcaccatttcctcctttacctttcagtgcagtttcttttcacattaggctgttggttcaaacttttgggagcacggactgtcagttctctgggaagtggtcagcgcatcctgcagggcttctcctcctctgtcttttggagaaccagggctcttctcaggggctctagggactgccaggctgtttcagccaggaaggccaaaatcaagagtgagatgtagaaagttgtaaaatagaaaaagtggagttggtgaatcggttgttctttcctcacatttggatgattgtcataaggtttttagcatgttcctccttttcttcaccctccccttttttcttctattaatcaagagaaacttcaaagttaatgggatggtcggatctcacaggctgagaactcgttcacctccaagcatttcatgaaaaagctgcttcttattaatcatacaaactctcaccatgatgtgaagagtttcacaaatccttcaaaataaaaagtaatgacttagaaactgccttcctgggtgatttgcatgtgtcttagtcttagtcaccttattatcctgacacaaaaacacatgagcatacatgtctacacatgactacacaaatgcaaacctttgcaaacacattatgcttttgcacacacacacctgtacacacacaccggcatgtttatacacagggagtgtatggttcctgtaagcactaagttagctgttttcatttaatgacctgtggtttaacccttttgatcactaccaccattatcagcaccagactgagcagctatatccttttattaatcatggtcattcattcattcattcattcacaaaatatttatgatgtatttactctgcaccaggtcccatgccaagcactggggacacagttatggcaaagtagacaaagcatttgttcatttggagcttagagtccaggaggaatacattagataatgacacaatcaaatataaattgcaagatgtcacaggtgtgatgaagggagagtaggagagaccatgagtatgtgtaacaggaggacacagcattattctagtgctgtactgttccgtacggcagccactacccacatgtaactttttaagatttaaatttaaattagttaacattcaaaacgcagctccccaatcacactagcaacatttcaagtgcttgagagccatgcatgattagtggttaccctattgaataggtcagaagtagaatcttttcatcatcacagaaagttctattggacagtgctcttctagatcatcataagactacagagcacttttcaaagctcatgcatgttcatcatgttagtgtcgtattttgagctggggttttgagactccccttagagatagagaaacagacccaagaaatgtgctcaattgcaatgggccacatacctagatctccagatgtcatttcccctctcttattttaagttatgttaagattactaaaacaataaaagctcctaaaaaatcaaactgtattctggtgttctcttctacacagtgggagggcgagcagtaggagagattggcccatttggtgctggccatttgaggaatgcaagcccagcactagtctcataatctctaggaatctgtagagagaggaattgaagtaaatttcagcattggctcattcagtcattcggcgacattcatcaggtacctgcaatgtgttaggggatcttatgagtaggcagcgtgcgtgatccttgctcccctggagctttctaacattctagcaggcagaccacacataaatttgcaatactgtttctgataaaaacgtgctgtaaaggaaataaagcagagaactatcatggaaaa

SEQ ID NO: 179447 - DNA, 602 bp, Homo sapiens
  Payload ID: 15365
  Gene Symbol: SPARC
  Gene Name: secreted protein, acidic, cysteine-rich (osteonectin)
  ENST ID: ENST00000521569
  CDS Start-End: 258-602
gagtggtttcctgttgcctgtctctaaacccctccacattcccgcggtccttcagactgcccggagagcgcgctctgcctgccgcctgcctgcctgccactgaggtatctgtgggagctaatcctgtccaggtggaagtaggagaatttgatgatggtgcagaggaaaccgaagaggaggtggtggcggaaaatccctgccagaaccaccactgcaaacacggcaaggtgtgcgagctggatgagaacaacacccccatgtgcgtgtgccaggaccccaccagctgcccagcccccattggcgagtttgagaaggtgtgcagcaatgacaacaagaccttcgactcttcctgccacttctttgccacaaagtgcaccctggagggcaccaagaagggccacaagctccacctggactacatcgggccttgcaaatacatccccccttgcctggactctgagctgaccgaattccccctgcgcatgcgggactggctcaagaacgtcctggtcaccctgtatgagagggatgaggacaacaaccttctgactgagaagcagaagctgcgggtgaagaagatccatgagaatgagaagcgcctg

SEQ ID NO: 179448 - DNA, 497 bp, Homo sapiens
  Payload ID: 15365
  Gene Symbol: SPARC
  Gene Name: secreted protein, acidic, cysteine-rich (osteonectin)
  ENST ID: ENST00000522348
  CDS Start-End: 339-497
gtttcctgttgcctgtctctaaacccctccacattcccgcggtccttcagactgcccggagagcgcgctctgcctgccgcctgcctgcctgccactgaggccttggtcttctcatctgtactattgggcagaaatatgtgacttgagcccccagtggggtgctggattatgaaaacaccctgaaaatgataaatgtatgcatcatcacagactaaagaaatacaaaggagggagtttttgtttaatattggtcatttatatgaagggaatttaaattttcgccaggcacgctacacctaggtttgattggcaaaggatcacagctggttcccagcaccatgagggcctggatcttctttctcctttgcctggccgggagggccttggcagcccctcagcaagaagccctgcctgatgagacagaggtggtggaagaaactgtggcagaggtgactgaggtatctgtgggagctaatcctgtccaggtggaagtagga

SEQ ID NO: 179449 - DNA, 576 bp, Homo sapiens
  Payload ID: 15365
  Gene Symbol: SPARC
  Gene Name: secreted protein, acidic, cysteine-rich (osteonectin)
  ENST ID: ENST00000538026
  CDS Start-End: 128-576
gtttcctgttgcctgtctctaaacccctccacattcccgcggtccttcagactgcccggagaatccctgccagaaccaccactgcaaacacggcaaggtgtgcgagctggatgagaacaacacccccatgtgcgtgtgccaggaccccaccagctgcccagcccccattggcgagtttgagaaggtgtgcagcaatgacaacaagaccttcgactcttcctgccacttctttgccacaaagtgcaccctggagggcaccaagaagggccacaagctccacctggactacatcgggccttgcaaatacatccccccttgcctggactctgagctgaccgaattccccctgcgcatgcgggactggctcaagaacgtcctggtcaccctgtatgagagggatgaggacaacaaccttctgactgagaagcagaagctgcgggtgaagaagatccatgagaatgagaagcgcctggaggcaggagaccaccccgtggagctgctggcccgggacttcgagaagaactataacatgtacatcttccctgtacactggcagttcggccagctggaccagca

SEQ ID NO: 179450 - DNA, 511 bp, Homo sapiens
  Payload ID: 15365
  Gene Symbol: SPARC
  Gene Name: secreted protein, acidic, cysteine-rich (osteonectin)
  ENST ID: ENST00000539687
  CDS Start-End: 179-511
agctatcagctgccacatcgacatagcctagagcaaagagggggagggaggagaagaagggggttgcctggagaaggaatcaacttttgaaactttctccaagtcccacccaccagaaggctcttctctgcctgactcactctccgaggaatgcgagttgccacgggttcccagcaccatgagggcctggatcttctttctcctttgcctggccgggagggccttggcagcccctcagcaagaagccctgcctgatgagacagaggtggtggaagaaactgtggcagaggtgactgaggtatctgtgggagctaatcctgtccaggtggaagtaggagaatttgatgatggtgcagaggaaaccgaagaggaggtggtggcggaaaatccctgccagaaccaccactgcaaacacggcaaggtgtgcgagctggatgagaacaacacccccatgtgcgtgtgccaggaccccaccagctgcccagcccccattggcgagtttgagaaggtg

SEQ ID NO: 179451 - DNA, 366 bp, Homo sapiens
  Payload ID: 15366
  Gene Symbol: SCT
  Gene Name: secretin
  Uniprot ID: P09683
  ENST ID: ENST00000176195
  CDS Start-End: 1-366
atggccccccggcccctcctgctgctgctgctgctcctcgggggctccgccgcgcgccccgcgccccccagggcccggcgacactcagacgggacgttcaccagcgagctcagccgcctgcgggagggcgcgcggctccagcggctgctacagggcctggtggggaagcgcagcgagcaggacgcagagaacagcatggcctggaccaggctcagcgcgggtctgctctgcccgtcagggtccaacatgcccatcctgcaggcctggatgcccctggacgggacctggtctccctggctgccccctgggcctatggtttcagaaccagctggcgctgctgcagaaggaaccttgcggcccagatga

SEQ ID NO: 179452 - DNA, 366 bp, Homo sapiens; identical to SEQ ID NO: 179451
  Payload ID: 15366
  Gene Symbol: SCT
  Gene Name: secretin
  Uniprot ID: P09683
  ENST ID: ENST00000622382
  CDS Start-End: 1-366

SEQ ID NO: 179453 - DNA, 1865 bp, Homo sapiens
  Payload ID: 15367
  Gene Symbol: SCTR
  Gene Name: secretin receptor
  Uniprot ID: P47872
  ENST ID: ENST00000019103
  CDS Start-End: 269-1591
gaccccgcgccagtccctgccgggtggaggaggcgcgccggcaaagccgcgtcctgatcaatggggcgggcggcttagcgcgcgcggccacctggtccgaggaggagcagtcccggggcccgccgcaggtcgggtggctcagccatggctcctcggggcgcagcggccggccggagcccgggaccctgcgcggggcgctgagctcccgagcgggcagagggcacgggcaggcggacgtcggggcgccctcggggaacgtgcgggcaccatgcgtccccacctgtcgccgccgctgcagcagctactactgccggtgctgctcgcctgcgccgcgcactcgactggagcccttccccgactatgtgacgtgctacaagtgctgtgggaagagcaagaccagtgcctgcaggaactctccagagagcagacaggagacctgggcacggagcagccagtgccaggttgtgaggggatgtgggacaacataagctgctggccctcttctgtgccgggccggatggtggaggtggaatgcccgagattcctccggatgctcaccagcagaaatggttccttgttccgaaactgcacacaggatggctggtcagaaaccttccccaggcctaatctggcctgtggcgttaatgtgaacgactcttccaacgagaagcggcactcctacctgctgaagctgaaagtcatgtacaccgtgggctacagctcctccctggtcatgctcctggtcgcccttggcatcctctgtgctttccggaggctccactgcactcgcaactacatccacatgcacctgttcgtgtccttcatccttcgtgccctgtccaacttcatcaaggacgccgtgctcttctcctcagatgatgtcacctactgcgatgcccacagggcgggctgcaagctggtcatggtgctgttccagtactgcatcatggccaactactcctggctgctggtggaaggcctctaccttcacacactcctcgccatctccttcttctctgaaagaaagtacctccagggatttgtggcattcggatggggttctccagccatttttgttgctttgtgggctattgccagacactttctggaagatgttgggtgctgggacatcaatgccaacgcatccatctggtggatcattcgtggtcctgtgatcctctccatcctgattaatttcatccttttcataaacattctaagaatcctgatgagaaaacttagaacccaagaaacaagaggaaatgaagtcagccattataagcgcctggccaggtccactctcctgctgatccccctctttggcatccactacatcgtcttcgccttctccccagaggacgctatggagatccagctgttttttgaactagcccttggctcattccagggactggtggtggccgtcctctactgcttcctcaatggggaggtgcagctggaggttcagaagaagtggcagcaatggcacctccgtgagttcccactgcaccccgtggcctccttcagcaacagcaccaaggccagccacttggagcagagccagggcacctgcaggaccagcatcatctgagaggctggagcagggtcacccacggacagagaccaagagaggtcctgcgaaggctgggcactgctgtgggacagccagtcttcccagcagacaccctgtgtcctccttcagctgaagatgcccctccccaggccttggactcttccgaagggatgtgaggcactgtggggcaggacaagggcctgggatttggttcgtttgctcttctgggaagagaagttcaggggtcccagaaagggacagggaaataaatggtgcctgggatgagattcaa

SEQ ID NO: 179454 - DNA, 920 bp, Homo sapiens
  Payload ID: 15367
  Gene Symbol: SCTR
  Gene Name: secretin receptor
  ENST ID: ENST00000630739
  CDS Start-End: 471-920
ggatacacagcaccgatggagagggctactgggactacctgcctgaggcttaaatagcctcccagggggttcatcctcaggacggtccccagatgcctgagtgtaccacagatcctccttggtcatcatcaaaggaggagttcatgggagtgaaacttcatggaattagcgctaatgacttcaataatgaaaaaatcggaaataaagtgcaagactggagcccttccccgactatgtgacgtgctacaagtgctgtgggaagagcaagaccagtgcctgcaggaactctccagagagcagacaggagacctgggcacggagcagccagtgccagctcatttctagccccttccaagcctgaccccagcgatgacctctcagagggcacgggttccagaagtctgttgcaggaagcagtttccctgtgtggctgcccttggatcaactttgggagaattggttgtgaggggatgtgggacaacataagctgctggccctcttctgtgccgggccggatggtggaggtggaatgcccgagattcctccggatgctcaccagcagaaatggttccttgttccgaaactgcacacaggatggctggtcagaaaccttccccaggcctaatctggcctgtggcgttaatgtgaacgactcttccaacgagaagcggcactcctacctgctgaagctgaaagtcatgtacaccgtgggctacagctcctccctggtcatgctcctggtcgcccttggcatcctctgtgctttccggaggctccactgcactcgcaactacatccacatgcacctgttcgtgtccttcatccttcgtgccctgtccaacttcatcaaggacgccgtgctcttctcctcagatgatgtcacctactgcgatgcccacagggcgggctgcaagctggtc

SEQ ID NO: 179455 - DNA, 770 bp, Homo sapiens
  Payload ID: 15367
  Gene Symbol: SCTR
  Gene Name: secretin receptor
  ENST ID: ENST00000627145
  CDS Start-End: 42-770
ttgagtttgcaagacccatctagtgctgggcccagtggctcatgcctgtaatcccagcactttgggaggccgaggtgagaggatctcttgagcccaagagttcaagaccagcctgggcaacatgggtcttctctccctgctccattatgttggaatttccagagactatgggcttcagcaagaaccagactggagcccttccccgactatgtgacgtgctacaagtgctgtgggaagagcaagaccagtgcctgcaggaactctccagagagcagacaggagacctgggcacggagcagccagtgccaggttgtgaggggatgtgggacaacataagctgctggccctcttctgtgccgggccggatggtggaggtggaatgcccgagattcctccggatgctcaccagcagaaatggttccttgttccgaaactgcacacaggatggctggtcagaaaccttccccaggcctaatctggcctgtggcgttaatgtgaacgactcttccaacgagaagcggcactcctacctgctgaagctgaaagtcatgtacaccgtgggctacagctcctccctggtcatgctcctggtcgcccttggcatcctctgtgctttccggaggctccactgcactcgcaactacatccacatgcacctgttcgtgtccttcatccttcgtgccctgtccaacttcatcaaggacgccgtgctcttctcctcagatgatgtcacctactgcgatgcccacagggcgggctgcaagctggtc

SEQ ID NO: 179456 - DNA, 437 bp, Homo sapiens
  Payload ID: 15368
  Gene Symbol: SAR1A
  Gene Name: secretion associated, Ras related GTPase 1A
  ENST ID: ENST00000373236
  CDS Start-End: 1-366
atgtctttcatctttgagtggatctacaatggcttcagcagtgtgctccagttcctaggactgtacaagaaatctggaaaacttgtattcttaggtttggataatgcaggcaaaaccactcttcttcacatgctcaaagatgacagattgggccaacatgttccaacactacatccgacatcagaagagctaacaattgctggaatgacctttacaacttttgatcttggtgggcacgagcaagcacgtcgcgtttggaaaaattatctcccagcaattaatgggattgtctttctggtggactgtgcagatcattctcgcctcgtggaatccaaagttgagcttaatgtatgttttgtcctttaatgtgtattttaatgtatattttgttcttttttggcctctatttttttttaaggaatatagctcagtagtgc

SEQ ID NO: 179457 - DNA, 3227 bp, Homo sapiens
  Payload ID: 15368
  Gene Symbol: SAR1A
  Gene Name: secretion associated, Ras related GTPase 1A
  Uniprot ID: Q9NR31
  ENST ID: ENST00000373238
  CDS Start-End: 359-955
cctgttactttcacttggagaatagggaggcttggggtgggggcaggactgtggaggaagtcaagtttgctgtcttctatggttgtggtttgtggcacaacaaaacaattatactagtaataccaaagatcactgatcatagatcatgatgacagatataagaataatgaaaaagtttgaaatattgtgtgagaattaccaaaatgtaacatagagacatgaagggagcacatgctgttagaagatggtactgatacacttactcaactcagggctgcttccaaccttcaatttgtaaaaaaaccagaaaacctcaggatccacaaagtatcatcaaatgaggtagtaagcattaataatgtctttcatctttgagtggatctacaatggcttcagcagtgtgctccagttcctaggactgtacaagaaatctggaaaacttgtattcttaggtttggataatgcaggcaaaaccactcttcttcacatgctcaaagatgacagattgggccaacatgttccaacactacatccgacatcagaagagctaacaattgctggaatgacctttacaacttttgatcttggtgggcacgagcaagcacgtcgcgtttggaaaaattatctcccagcaattaatgggattgtctttctggtggactgtgcagatcattctcgcctcgtggaatccaaagttgagcttaatgctttaatgactgatgaaacaatatccaatgtgccaatccttatcttgggtaacaaaattgacagaacagatgcaatcagtgaagaaaaactccgtgagatatttgggctttatggacagaccacaggaaaggggaatgtgaccctgaaggagctgaatgctcgccccatggaagtgttcatgtgcagtgtgctcaagaggcaaggttacggcgagggtttccgctggctctcccagtatattgactgatgtttggacggtgaaaataaaagagttttacttctctggactgatcctattcacagcttcctcatgaacttttctaatagaacaaggaaagctctccaaccatgtctggcgttgagaagccaagagtctctgtcaactctctcattgcccagtggtgacatgtgctcttctccacactgttgggaggtaatgctgccccacgtgctggtgcaggtcagtatcctgggacttggaagctggcaggatttgccgggtaaagctgtatgccatcatggggcacctgaaaagaaaaacacgtctcaccactgtggttgattcaaaagaaagtgattctattttttaaagaaagcgttgttaatgtaattggtatccctcctaactttttgagttcacaatttacttggtccagagttttctattcttttttttttttaaactaatgaatgacatttagatacttcataaaattatgaacagatatggaggccagagctcatttgggtaaacttactcctgctgagttagcaggttggtgagagaagctcccctgagctcacctgtctctctgactgccttggagtaggtggcataaccttgtgcacagagaactagaaaaggggcagaaccccggccttgcagttgtggcaggtttccactgtggtaagctaggttcattcctcatcaaggaatgtgtagcagattgttcactgtggaggagttaattatagaatgggttattgttgttattcttactcatgaagttacagattttagccagtctttgcttttatacttttgtgaaatttaatttctctctatagcaccttcctttttcgttttcagttatcaaaagtgactttgacctcataaaagagttgagaacatctctcgtgtcacatactgcaggtgcatcagttacttttgcacagattctagggggacatttttctgaataggaagacaggacaaagttaacagcttaagggctcttaattctgtgagttgaggacttaaaagtattgtagcatttgtttggatccatgaaaaatgtattcagtgggctttaaaatttccatttgcagaatttggtctctcaggctgtttgggagctcttttttttacattttttctcctttgacacctattttattggtgtttaaagtaaaggttaacatctgtagcttttccaggtttttttttttttttttttttttttggtatgaaattgtctttctccattgcagaaataagctagggaaacactaacccaaaaactttctgtagagctgttcctttggaggcagcatcacttattggcagtaaagactcagtataaaagcaccggcatccctacttgggtgatggggattaattttatagcattccattttcctagtgccacatgtgaaattggattttgatgatcttaatctatattctacccttataataaaagatcaaaagatatatctcctatgaacagattggagataggagatgaaaagttgggaggatgtctttattctaatgtgagggtagggaaaatgtggataacattactggggtgagggaggcattgttctttagttggagttctcattcttattctccagtactgacttgtggggaaagcatactttttcactgccaggtactgaatgcagaggctcagtgaagtatatatgtgggaagtgcatgcatttcgtttattagcaaacatagctggattaagacaaagttgttggtttggaaaggggttaaagccttaagtgaacaaatctagctaacagtgaatgaactaggtaatataacttgcatatttttaatttcctttggttaaaggtcccccatacttctctgttcggagacatgagaagtatgattacttcagtgttagttttcttaattttttttttcccctatttgtcccttgtcactttgttgcaagctagaaatctgtgggttatacatagggcagctctttgtgaaagtggtttattccactggagaaaggggattgaaaatcagttagaaccaatgtatttcttgccccacggaacactattcctataagatagctgaaagaagctgctgtgaggagctcagctccaaacacaggatcagcaccttgtataggaattcccatgaattatgacttctcattctgttttatcagagtgcatatatgtcctacttcaggaaaagtaaaacagtcatttacgaaagaaagtcaatctgtatcctaagcattttaataaaaagttaaaacaaa

SEQ ID NO: 179458 - DNA, 468 bp, Homo sapiens
  Payload ID: 15368
  Gene Symbol: SAR1A
  Gene Name: secretion associated, Ras related GTPase 1A
  ENST ID: ENST00000373239
  CDS Start-End: 317-468
acatccggcgagtagctggcggtcccgggtgctgctggttagtgtgctctgagggagggtccgagccagccgctgttttgccggaggagcccctcaggccgttcaagcgtttctcctgcctcagccttctgcatagctgggattacaagcaagcgctgccgcgcccagctgttcattttattcttcatctggcattctttgaatagatgcaggtctctctatgttacccaggctggtcttgaactcctgaggtcagggaggaatcccccacctcagccttgcaaaatgctgggattacaggtagtaagcattaataatgtctttcatctttgagtggatctacaatggcttcagcagtgtgctccagttcctaggactgtacaagaaatctggaaaacttgtattcttaggtttggataatgcaggcaaaaccactcttcttcacatgctcaaagatgacagattggg

SEQ ID NO: 179459 - DNA, 2996 bp, Homo sapiens
  Payload ID: 15368
  Gene Symbol: SAR1A
  Gene Name: secretion associated, Ras related GTPase 1A
  Uniprot ID: Q9NR31
  ENST ID: ENST00000373241
  CDS Start-End: 128-724
gggtgtgacgtacatccggcgagtagctggcggtcccgggtgctgctggttagtgtgctctgagggagggtccgagccagccgctgttttgccggaggagcccctcaggccgtagtaagcattaataatgtctttcatctttgagtggatctacaatggcttcagcagtgtgctccagttcctaggactgtacaagaaatctggaaaacttgtattcttaggtttggataatgcaggcaaaaccactcttcttcacatgctcaaagatgacagattgggccaacatgttccaacactacatccgacatcagaagagctaacaattgctggaatgacctttacaacttttgatcttggtgggcacgagcaagcacgtcgcgtttggaaaaattatctcccagcaattaatgggattgtctttctggtggactgtgcagatcattctcgcctcgtggaatccaaagttgagcttaatgctttaatgactgatgaaacaatatccaatgtgccaatccttatcttgggtaacaaaattgacagaacagatgcaatcagtgaagaaaaactccgtgagatatttgggctttatggacagaccacaggaaaggggaatgtgaccctgaaggagctgaatgctcgccccatggaagtgttcatgtgcagtgtgctcaagaggcaaggttacggcgagggtttccgctggctctcccagtatattgactgatgtttggacggtgaaaataaaagagttttacttctctggactgatcctattcacagcttcctcatgaacttttctaatagaacaaggaaagctctccaaccatgtctggcgttgagaagccaagagtctctgtcaactctctcattgcccagtggtgacatgtgctcttctccacactgttgggaggtaatgctgccccacgtgctggtgcaggtcagtatcctgggacttggaagctggcaggatttgccgggtaaagctgtatgccatcatggggcacctgaaaagaaaaacacgtctcaccactgtggttgattcaaaagaaagtgattctattttttaaagaaagcgttgttaatgtaattggtatccctcctaactttttgagttcacaatttacttggtccagagttttctattcttttttttttttaaactaatgaatgacatttagatacttcataaaattatgaacagatatggaggccagagctcatttgggtaaacttactcctgctgagttagcaggttggtgagagaagctcccctgagctcacctgtctctctgactgccttggagtaggtggcataaccttgtgcacagagaactagaaaaggggcagaaccccggccttgcagttgtggcaggtttccactgtggtaagctaggttcattcctcatcaaggaatgtgtagcagattgttcactgtggaggagttaattatagaatgggttattgttgttattcttactcatgaagttacagattttagccagtctttgcttttatacttttgtgaaatttaatttctctctatagcaccttcctttttcgttttcagttatcaaaagtgactttgacctcataaaagagttgagaacatctctcgtgtcacatactgcaggtgcatcagttacttttgcacagattctagggggacatttttctgaataggaagacaggacaaagttaacagcttaagggctcttaattctgtgagttgaggacttaaaagtattgtagcatttgtttggatccatgaaaaatgtattcagtgggctttaaaatttccatttgcagaatttggtctctcaggctgtttgggagctcttttttttacattttttctcctttgacacctattttattggtgtttaaagtaaaggttaacatctgtagcttttccaggtttttttttttttttttttttttttggtatgaaattgtctttctccattgcagaaataagctagggaaacactaacccaaaaactttctgtagagctgttcctttggaggcagcatcacttattggcagtaaagactcagtataaaagcaccggcatccctacttgggtgatggggattaattttatagcattccattttcctagtgccacatgtgaaattggattttgatgatcttaatctatattctacccttataataaaagatcaaaagatatatctcctatgaacagattggagataggagatgaaaagttgggaggatgtctttattctaatgtgagggtagggaaaatgtggataacattactggggtgagggaggcattgttctttagttggagttctcattcttattctccagtactgacttgtggggaaagcatactttttcactgccaggtactgaatgcagaggctcagtgaagtatatatgtgggaagtgcatgcatttcgtttattagcaaacatagctggattaagacaaagttgttggtttggaaaggggttaaagccttaagtgaacaaatctagctaacagtgaatgaactaggtaatataacttgcatatttttaatttcctttggttaaaggtcccccatacttctctgttcggagacatgagaagtatgattacttcagtgttagttttcttaattttttttttcccctatttgtcccttgtcactttgttgcaagctagaaatctgtgggttatacatagggcagctctttgtgaaagtggtttattccactggagaaaggggattgaaaatcagttagaaccaatgtatttcttgccccacggaacactattcctataagatagctgaaagaagctgctgtgaggagctcagctccaaacacaggatcagcaccttgtataggaattcccatgaattatgacttctcattctgttttatcagagtgcatatatgtcctacttcaggaaaagtaaaacagtcatttacgaaagaaagtcaatctgtatcctaagcattttaataaaaagttaaaacaaa

SEQ ID NO: 179460 - DNA, 5981 bp, Homo sapiens
  Payload ID: 15368
  Gene Symbol: SAR1A
  Gene Name: secretion associated, Ras related GTPase 1A
  Uniprot ID: Q9NR31
  ENST ID: ENST00000373242
  CDS Start-End: 198-794
gggtgtgacgtacatccggcgagtagctggcggtcccgggtgctgctggttagtgtgctctgagggagggtccgagccagccgctgttttgccggaggagcccctcaggccggctgcttccaaccttcaatttgtaaaaaaaccagaaaacctcaggatccacaaagtatcatcaaatgaggtagtaagcattaataatgtctttcatctttgagtggatctacaatggcttcagcagtgtgctccagttcctaggactgtacaagaaatctggaaaacttgtattcttaggtttggataatgcaggcaaaaccactcttcttcacatgctcaaagatgacagattgggccaacatgttccaacactacatccgacatcagaagagctaacaattgctggaatgacctttacaacttttgatcttggtgggcacgagcaagcacgtcgcgtttggaaaaattatctcccagcaattaatgggattgtctttctggtggactgtgcagatcattctcgcctcgtggaatccaaagttgagcttaatgctttaatgactgatgaaacaatatccaatgtgccaatccttatcttgggtaacaaaattgacagaacagatgcaatcagtgaagaaaaactccgtgagatatttgggctttatggacagaccacaggaaaggggaatgtgaccctgaaggagctgaatgctcgccccatggaagtgttcatgtgcagtgtgctcaagaggcaaggttacggcgagggtttccgctggctctcccagtatattgactgatgtttggacggtgaaaataaaagagttttacttctctggactgatcctattcacagcttcctcatgaacttttctaatagaacaaggaaagctctccaaccatgtctggcgttgagaagccaagagtctctgtcaactctctcattgcccagtggtgacatgtgctcttctccacactgttgggaggtaatgctgccccacgtgctggtgcaggtcagtatcctgggacttggaagctggcaggatttgccgggtaaagctgtatgccatcatggggcacctgaaaagaaaaacacgtctcaccactgtggttgattcaaaagaaagtgattctattttttaaagaaagcgttgttaatgtaattggtatccctcctaactttttgagttcacaatttacttggtccagagttttctattcttttttttttttaaactaatgaatgacatttagatacttcataaaattatgaacagatatggaggccagagctcatttgggtaaacttactcctgctgagttagcaggttggtgagagaagctcccctgagctcacctgtctctctgactgccttggagtaggtggcataaccttgtgcacagagaactagaaaaggggcagaaccccggccttgcagttgtggcaggtttccactgtggtaagctaggttcattcctcatcaaggaatgtgtagcagattgttcactgtggaggagttaattatagaatgggttattgttgttattcttactcatgaagttacagattttagccagtctttgcttttatacttttgtgaaatttaatttctctctatagcaccttcctttttcgttttcagttatcaaaagtgactttgacctcataaaagagttgagaacatctctcgtgtcacatactgcaggtgcatcagttacttttgcacagattctagggggacatttttctgaataggaagacaggacaaagttaacagcttaagggctcttaattctgtgagttgaggacttaaaagtattgtagcatttgtttggatccatgaaaaatgtattcagtgggctttaaaatttccatttgcagaatttggtctctcaggctgtttgggagctcttttttttacattttttctcctttgacacctattttattggtgtttaaagtaaaggttaacatctgtagcttttccaggtttttttttttttttttttttttttggtatgaaattgtctttctccattgcagaaataagctagggaaacactaacccaaaaactttctgtagagctgttcctttggaggcagcatcacttattggcagtaaagactcagtataaaagcaccggcatccctacttgggtgatggggattaattttatagcattccattttcctagtgccacatgtgaaattggattttgatgatcttaatctatattctacccttataataaaagatcaaaagatatatctcctatgaacagattggagataggagatgaaaagttgggaggatgtctttattctaatgtgagggtagggaaaatgtggataacattactggggtgagggaggcattgttctttagttggagttctcattcttattctccagtactgacttgtggggaaagcatactttttcactgccaggtactgaatgcagaggctcagtgaagtatatatgtgggaagtgcatgcatttcgtttattagcaaacatagctggattaagacaaagttgttggtttggaaaggggttaaagccttaagtgaacaaatctagctaacagtgaatgaactaggtaatataacttgcatatttttaatttcctttggttaaaggtcccccatacttctctgttcggagacatgagaagtatgattacttcagtgttagttttcttaattttttttttcccctatttgtcccttgtcactttgttgcaagctagaaatctgtgggttatacatagggcagctctttgtgaaagtggtttattccactggagaaaggggattgaaaatcagttagaaccaatgtatttcttgccccacggaacactattcctataagatagctgaaagaagctgctgtgaggagctcagctccaaacacaggatcagcaccttgtataggaattcccatgaattatgacttctcattctgttttatcagagtgcatatatgtcctacttcaggaaaagtaaaacagtcatttacgaaagaaagtcaatctgtatcctaagcattttaataaaaagttaaaacaaatacgctatttccttttttttttttcattggtttgttctgagctctgagtttgaacaatgccgtttatttggggaggcaaccaaaagttccctgcatagaggaagagacatttagggtgcgtgtgagatacttgaattttgccaccaggagggggaaaaaggctggggtactagaagtaatagatttagtactacttgagagatttggaacatgctgtggacccagggttgttggtcatctctgcaacaggatggggatggcagatgtttgagcaaaatctatattaacatgctagcaaggactagttctagtttagctgtgtttcactcattttacacagaattagaattggccaggtgtggtggctcacgctgtaatcctagcactttgggaggctgaggtgggtggattgtctgagctcaggagtttgagaccagcctggggaacagggtgaaaccccatcactactaaaatacaaaaaaattagctgggcattgtggtacatggagtagctcccagctactctggaggctgaggcggagaatcgcttgaactaggaggtggagattgaagtgagccgagatcatgccactgtactcctgcctgggtgacagagcaagactctctctagctcaaaaaaaaaaaaaaaaaaaaaatcaattaaatgctacatttggcaaaatgagaaagaaagaatttcctttactaggcttgtaggaagactgcttttacaaaaacccaaatgagatcataaaactaaagtactgggacaaacagtgggaaacagtgcaatgggttcttttcaaccaagtattaaagtattggagatattgccgggcgcggtggctcacgtctgtaatcctagcgctttgggaggccaaggcgggcgggtcatgaggtcaggagttcaaggccagcctgaccaacatggcagagctccgtctctactaaaaatacaaaaattagccaggcacggtgggacgcacctttaatcccagctactcaggaggctgaagcaggagaatcgcttgaatcggggaagcggaggttgcagtgagccgagatcgcgccactgcactccagcctgggtgactcccatctcaaaaaaaataaaaagtactggaggtgtcctgttgtccttgttactgtgaaaggatgccatgggttgtatgggcaaatgagttgttttgtttgaggcagagtggaaaataagattaggctcagtccatgagcctagcactcaacagatcttactttggcgttctggctgtgacttgggacttctttttaccatggtctgctgtaaacacagaaaaacccaatgcctaacagttcatgctggagtcttgagcgttgagggagaatcactggactcgagagagaaagtttgtttgtttgtttgtttgtttgttttttgagttggtctcactctgtcgcccaggctggagtgcagtggtatgaacataggtcactgcagccttgacctcctgggcttaagtgatcctcccatctcagcctcccaagtagcttgggaccacagggttgcaccaccgtgctcagctagttttcaaaatttttgtagagttaaggtctcatcatgttgcccaggctggtctcaaactcctgggctcaggaaattctcctacctcagcctcccaacgtgctgggattccaagtgtgagcccctgtgctccaccaagagaaaaactctttgattgctaggaagttgggataaagaaattgtgctgtgatcaagccaccttctgtgtcatagaaccaaaagaagaccgcctgctatggcaagatggcctaattttattcctgcctcatactatcatggataatcgttttcctttctctagcaggtttgtgtcactgggagtactgggagcattatcctgtgttgtgctggggttataccaagcagtgttaactttatttaaagaattcaggcagaaagattagagaatttaagtagcaattgtatatggtaagcaatacagtaaccttaataaaaattaatgatggccgggtacggtggctcacgcctgtaatcccagcactttgggaggccgaggcgggcggatcacaaggtcaggagatcgagaccatcctggctaacacggtgaaaccccgtctctactaaaaatacaaaaaattagctgggcgtggtggcaggcgcctgtagtcccagcgactggggaggctgaggcaggagaatagcgtgaacccaggaggcggagtttgcagtgagcggagatcgcaccattgcactccagcctgggcgacagagcgagactccgtctcaaaaaaataaataaataaataaaaaataatgtgtattttatcaattcagtgataaagcagacctttgtaaactgtctagcttgtggtgactgattgagggtatcatgaagctccgcgcccccccactccccgacatactcgttcatcctcctctgtcctaaagcgtacttctttggaaaagtagagcagtttatgttagtgtacactagagatggtaaactatgccttgtgggtcaaatcgggcctgctgcctgtgtttgtatggcctgtgagcaaagaaaggtttttacatatttaaatggttggaaaaaatatttaaagaatgctatttttggacacaaaaaattgtatgaaattaaaatttcaatgtctgtatctttttattgggacacagccaccgccattcctttagcttttgtatgcaacagctgcagagttgactatttgagacaagttgtatggtccccccaaactggaactgtttccattctggccttctacagaaagtatttggaccctggcctagataaatcctggctggtggttatgttatgtgaaatgtgcacactgtaaaatataggcctgtatgattaaaatttttgatttca

SEQ ID NO: 179461 - DNA, 672 bp, Homo sapiens
  Payload ID: 15368
  Gene Symbol: SAR1A
  Gene Name: secretion associated, Ras related GTPase 1A
  ENST ID: ENST00000452767
  CDS Start-End: 1-346
gtctttctggtggactgtgcagatcattctcgcctcgtggaatccaaagttgagcttaatgatatattgcagctcacttctcacactggcccctaatgctttaatgactgatgaaacaatatccaatgtgccaatccttatcttgggtaacaaaattgacagaacagatgcaatcagtgaagaaaaactccgtgagatatttgggctttatggacagaccacaggaaaggggaatgtgaccctgaaggagctgaatgctcgccccatggaagtgttcatgtgcagtgtgctcaagaggcaaggttacggcgagggtttccgctggctctcccagtatattgactgatgtttggacggtgaaaataaaagagttttacttctctggactgatcctattcacagcttcctcatgaacttttctaatagaacaaggaaagctctccaaccatgtctggcgttgagaagccaagagtctctgtcaactctctcattgcccagtggtgacatgtgctcttctccacactgttgggaggtaatgctgccccacgtgctggtgcaggtcagtatcctgggacttggaagctggcaggatttgccgggtaaagctgtatgccatcatggggcacctgaaaagaaaaacacgtctcaccactgtggttgattcaaaagaaa

SEQ ID NO: 179462 - DNA, 2810 bp, Homo sapiens
  Payload ID: 15368
  Gene Symbol: SAR1A
  Gene Name: secretion associated, Ras related GTPase 1A
  Uniprot ID: Q9NR31
  ENST ID: ENST00000431664
  CDS Start-End: 1-597
atgtctttcatctttgagtggatctacaatggcttcagcagtgtgctccagttcctaggactgtacaagaaatctggaaaacttgtattcttaggtttggataatgcaggcaaaaccactcttcttcacatgctcaaagatgacagattgggccaacatgttccaacactacatccgacatcagaagagctaacaattgctggaatgacctttacaacttttgatcttggtgggcacgagcaagcacgtcgcgtttggaaaaattatctcccagcaattaatgggattgtctttctggtggactgtgcagatcattctcgcctcgtggaatccaaagttgagcttaatgctttaatgactgatgaaacaatatccaatgtgccaatccttatcttgggtaacaaaattgacagaacagatgcaatcagtgaagaaaaactccgtgagatatttgggctttatggacagaccacaggaaaggggaatgtgaccctgaaggagctgaatgctcgccccatggaagtgttcatgtgcagtgtgctcaagaggcaaggttacggcgagggtttccgctggctctcccagtatattgactgatgtttggacggtgaaaataaaagagttttacttctctggactgatcctattcacagcttcctcatgaacttttctaatagaacaaggaaagctctccaaccatgtctggcgttgagaagccaagagtctctgtcaactctctcattgcccagtggtgacatgtgctcttctccacactgttgggaggtaatgctgccccacgtgctggtgcaggtcagtatcctgggacttggaagctggcaggatttgccgggtaaagctgtatgccatcatggggcacctgaaaagaaaaacacgtctcaccactgtggttgattcaaaagaaagtgattctattttttaaagaaagcgttgttaatgtaattggtatccctcctaactttttgagttcacaatttacttggtccagagttttctattcttttttttttttaaactaatgaatgacatttagatacttcataaaattatgaacagatatggaggccagagctcatttgggtaaacttactcctgctgagttagcaggttggtgagagaagctcccctgagctcacctgtctctctgactgccttggagtaggtggcataaccttgtgcacagagaactagaaaaggggcagaaccccggccttgcagttgtggcaggtttccactgtggtaagctaggttcattcctcatcaaggaatgtgtagcagattgttcactgtggaggagttaattatagaatgggttattgttgttattcttactcatgaagttacagattttagccagtctttgcttttatacttttgtgaaatttaatttctctctatagcaccttcctttttcgttttcagttatcaaaagtgactttgacctcataaaagagttgagaacatctctcgtgtcacatactgcaggtgcatcagttacttttgcacagattctagggggacatttttctgaataggaagacaggacaaagttaacagcttaagggctcttaattctgtgagttgaggacttaaaagtattgtagcatttgtttggatccatgaaaaatgtattcaggctgtttgggagctcttttttttacattttttctcctttgacacctattttattggtgtttaaagtaaaggttaacatctgtagcttttccaggtttttttttttttttttttttttttggtatgaaattgtctttctccattgcagaaataagctagggaaacactaacccaaaaactttctgtagagctgttcctttggaggcagcatcacttattggcagtaaagactcagtataaaagcaccggcatccctacttgggtgatggggattaattttatagcattccattttcctagtgccacatgtgaaattggattttgatgatcttaatctatattctacccttataataaaagatcaaaagatatatctcctatgaacagattggagataggagatgaaaagttgggaggatgtctttattctaatgtgagggtagggaaaatgtggataacattactggggtgagggaggcattgttctttagttggagttctcattcttattctccagtactgacttgtggggaaagcatactttttcactgccaggtactgaatgcagaggctcagtgaagtatatatgtgggaagtgcatgcatttcgtttattagcaaacatagctggattaagacaaagttgttggtttggaaaggggttaaagccttaagtgaacaaatctagctaacagtgaatgaactaggtaatataacttgcatatttttaatttcctttggttaaaggtcccccatacttctctgttcggagacatgagaagtatgattacttcagtgttagttttcttaattttttttttcccctatttgtcccttgtcactttgttgcaagctagaaatctgtgggttatacatagggcagctctttgtgaaagtggtttattccactggagaaaggggattgaaaatcagttagaaccaatgtatttcttgccccacggaacactattcctataagatagctgaaagaagctgctgtgaggagctcagctccaaacacaggatcagcaccttgtataggaattcccatgaattatgacttctcattctgttttatcagagtgcatatatgtcctacttcaggaaaagtaaaacagtcatttacgaaagaaagtcaatctgtatcctaagcatttt

SEQ ID NO: 179463 - DNA, 6682 bp, Homo sapiens
  Payload ID: 15369
  Gene Symbol: SAR1B
  Gene Name: secretion associated, Ras related GTPase 1B
  Uniprot ID: Q9Y6B6
  ENST ID: ENST00000402673
  CDS Start-End: 280-876
gagaccaggcggctgggagacccaggcggtgttaggggttgcgagcagcctcgctcaactggggaattggcggcaagactgccaggaggcggaacctagggcgctcggcgacgcggtcctgcggactgtcgctagtgaggcacccgccggcccggaaggggctgatgcgaactggggccacggcagccatcgcgctttgcagttcggtctcctggtgtacggccaacgccaagtaggggattgcgttccctccagtcgcagaccctatcagatttggatatgtccttcatatttgattggatttacagtggtttcagcagtgtgctacagtttttaggattatataagaaaactggtaaactggtatttcttggattggataatgcaggaaaaacaacattgctacacatgctaaaagatgacagacttggacaacatgtcccaacattacatcccacttccgaagaactgaccattgctggcatgacgtttacaacttttgatctgggtggacatgttcaagctcgaagagtgtggaaaaactaccttcctgctatcaatggcattgtatttctggtggattgtgcagaccacgaaaggctgttagagtcaaaagaagaacttgattcactaatgacagatgaaaccattgctaatgtgcctatactgattcttgggaataagatcgacagacctgaagccatcagtgaagagaggttgcgagagatgtttggtttatatggtcagacaacaggaaaggggagtatatctctgaaagaactgaatgcccgacccttagaagttttcatgtgtagtgtgctcaaaagacaaggttacggagaaggcttccgctggatggcacagtacattgattaacacaaactcacattggttccaggtctcaacgttcaggcttactcagagatttgattgctcaacatgcataacttgaattcaatagacttttgctggttataaaacagatgttttttagattattaatattaaatcaacttaatttgaatgagaattgaaaactgattcaagtaagtttgagtatcacaatgttagctttctaattccataaaagtacttggtttttacagtttataatctgacatcaccccagcgccatttgtaaagagcaactttccagcagtacatttgaagcactttttaacaacatgaaactataaaccatatttaaaagctcatcatgttaaattttttatgtacttttctggaactagtttttaaattttagattatatgtccacctatcttaagtgtacagttaataattagcttattcaatgattgcatgatgccttacagttttcaataactttttttcttatgcaaacgtcatgcaataaaacaaactctaatgtttggcatccttgttgggcaaatgtttcatttaaatgtgtcttatctagctagtatactctgaaaatttgagtatttaatattaggcatatgaagtggttgttgggaaaggagattccttcagaatatttagaatagcgtttaaggctctcaaggcttaggtatttaccatgagatggttgtggtcagttgcacctgataccatgtatccctgaatcatgtgtatttttattagtaatgcagccactaccattgctgatggggtctgtgtcctagtccctgtgggattggccttctgaagaaaagcacatttatggtacacaaggttgattctcagtttggtaggctctatagttccatcccagctgtctaattctgaagtgctccagtcttattggtgcccaatggggtaatctgtgcctcttccccaaaagcaatgacaggcaccagtgtctccacatttagatatattcccagtctctgtacatttaacagtactctctggggcaagcaataagtaggaccttgtgtgcagtttcattgtagagacatgtatatctgaggaataaaacagcttgttctgtgtcagtctgagatatgtggagattttgttcctatcctatagctcttttgtattctttggcatattttatatcctggtagaagaaaacaagtgcttgtttccaattttcttttttcttatttgctctcaggtagttcttactccatacaacaaagactttttgtttgttgggctttttttttttttttttttttgctctgtttcattttgttttagagacggggtttcaccatgttgtccaggctggtctcaaactcctgacctcaagtgatctgcccgccttggcctcccaaagttctgggattataggcgtgagctaccatgcctgacctgacttttgtttttagatattatgcttgccatgtgatagggcctgcaagcctcattgctaggcttactaagaaaattttagtttttcaaaagcattataatttcctaagaaactgaattctttttttatatgtttgagattcccatcattagtaatataagatgaaaggtaagtgccaaaaatgtatttttaaagaccctcaagtttaagatttatcctgattataagccaagttttatagtatatttaaccaattccatcaagaataattttaatatcaaaaattagtgttttctgtagccattgtccatgtcagagttacagtcctttttgtcattgataatataacctatgaagcagataaggattgaggaatatgactggaaggaattactatttagctaagctgacaaggtcgcttcttaagatgacatttggtttcagtaatctgactattctgttttcactttcatcttctttctaaatgaaaacaaaagtgctccctcccttcctggaaacctcagtaacactatgggaaaagtagaacatgacattgcagcctattgatttcttcttccagataggtttaaagtactccttaagttctgactaaatagaactaagccttattaaaaataactgcctcttgttcatgttatctgtaccttcagggacctgcctttcttcaagtatttcctagagtatctattatgatactgaagaagctaattatttgtgttgtaaatgggtataaatgaaaaaaaaacatactggtttctctagccaggaaaaatgctttctggtgtaatatatcttgctccagaaccctcattctaattgtaacactaggatcaaagaaacaaagtcactttgtggaccacagctaaactgtggatattttcccaaagacataagatttttatggcccgagcctctagaaaggaagccatgtttaggagcaaccagctttcctcccagctttagggggcagagttcctgagccagaggacttactgtccagctttgagaacctctccagagtatatgcactgggtactgctctttttcaagagaaccaaattaagaggatggcaagaaacagtagaagcacagaggaaagacaactctgcatgtgcctgtgtgaatgtgtgcatccatggagtatttcccaggtaaatactagtactggggacataggctaattgtgtgtcccacactgcaagatgctagggcgtagttaacactgtggtatacatacaaatcaggcactgtccaaaagattttttaaaatctaaagtctgaaatgtaaaaatataaggtctcaacccacttttacacttttaaagagatcccatacctgtttcactgactgccgttaattacacttttggatcacagctggttaaattgatagatttcagtttatctcagtgaatttttagaatggagattatagcattttttaattggagaacagacatttcctaaagtatatgaaaaaaaattattcactgttggtttaaaccagtatctttgtatgagtgccaaagatatatgaacacagatactgcctgtgcagacctaaattttagttttgtgtacctggatccatatacaaattttttgtggtttatagcataaaagcagaacgttgtttctttcttagttttcaaccggctcatcttttgtttttgttttttgtttttttgttttttgttttttttgagatggagtcttgctttgttgcccaggctagagtgcagtggcacaatctctgcttactgcaacctccacctccggggttcaagtgattctcctgcctcagcctcctgagtagctgggactacaggcgcgcaccaccatgcccggctaatttttgtatttttagtagagatggggtttcactatgttggccaggctggtctcgaactcctgacctcgtgatctgcccacctcagcctcccaaagtgctgggattacaggcgtgagccgccatgcccggccaattttcaactggcccatactttatagtgatggaaagcgcataaactacttgtaaatcattaaaatagggtgataactgtgataatagtgtttcttgcattctagaaaattattttattaactacattcaaaacccagcatttcacaggttccatcattagaaacagtatagttctagttaacatgattggagagtttcaggggaaaggtttacattttctgaaactgtatttggtatgtgactcaatgtggtatttcagtcttgttagtcacttacatgactgacgtttgcaaggatttattgccaagtaaaatttgaccagagtgcactgagaatagctacataaggggaaatctctcaaaattccttctgttcatttaatttggagcatattgtttaaatcattttaaacatatgtaaaaagttgaagcattaaaaaatcttcaagaaacaatgaaaaaatagaaattagcaaacataagtttcttaatgcaaaattaatagtgaataaaatatagcctacattaaaagccagaggctttgctataaatataagagtttagaaaaacagtgtgcttcaattaaggactaaattatcaaaactgcatgtttgttttttcttttcttttcttttttttttgagatgaagtctcactctgttgcccaggctggagtgcagtggtgcgatcttggctcactgcaacctctgcttcccaggttcaagcgattctcgtgcctcaccatcccgagtagctgggattacaggtgcaccacaccatgcccagttaatttttgtatttttagtagagacagggtttcattatttggccaggctggtctcgagctcctgatcttaagtgatccactcgcctcggcctcccaaagtgctgggattatacacatgagccactgtgcccagcctaaaactacatgttgaagcttccggtcatttccattattatccttcttttgaaattcaagttagtgctttttaaccaaataaaagaagaaccagctcttgggatatgtgactctgcctctgtataaagtgactggaattttgttaaaaccgtgtttccacttctgaaccctgttaccattccccctcacaaatccccacccaacacctggattttaaagatcctccagtgtcaagggaagccacagagtctattaaagaggcagttctgaaccaattaatttttgtccttataatttagagcattaaatagctaatatatttaatggcactaattgttgttcacggctttcatcatacttttaaacagaatccaaagtattcaaaggaaagtaagcgaagttatccaaagccaactttgtttcaggtgtgtcccctgccccaaatagattttagggcagaaatagaaaactgagtttacacagaactatttttggaaaagctgcactggagtagatggattcttcttcagcatacttttttgtttgtttgtttgagatggagtcttgctttgtcacccaggctggagtgcagtggtgtgatctccactcactgcaacctccacctcccagcttcaagtgattctcctgcctcaaccttccaagtagcttggattacaggcgtgcgccaccacagctggctaatatttgtattgttagtagagacagggtttcaccatgttgtccaggcttgtcgaacttctgacctcacgtgatccacctgcctcagcctcccaaagtgctagattataggcgtgaaccactgcgcccggccagcatgcattttaaaagtggcttagatttagttttaaatattttggggtgaaaggcaggaacagttctgtttttgacatacaggttttctttgggattgttttcattttcaagtatagattcatgtcagaatggccaacttaacgtgggtttctgtattccctggtgttgctcttaacctgaactcataatcagttgccatactgaggcaagagcactcagggtgaacatagtcaagttactttaaaagtgataaaagtgtttttccatggtgaaaccttcagtatttggctgaatgtaaagtatgttgaagtggtatattgatggtaagttgttaatcactaaccttgtttgcacttttgtacaccactgcttgcactaggatcttggtgtgaattttcaattgttttacagtgtatacagattattaaggataatttatataaagatgtttctgtttaactttgtgtgttttacaacaaagagctataatagatggttaaacgtttttgaattgtgtttatatgttagtttgattatgttctattatcttttcacctgccatgaatttgagtgttaggaagggaaaaataaaatactaatctggtcttgaagaactcta

SEQ ID NO: 179464 - DNA, 929 bp, Homo sapiens
  Payload ID: 15369
  Gene Symbol: SAR1B
  Gene Name: secretion associated, Ras related GTPase 1B
  Uniprot ID: Q9Y6B6
  ENST ID: ENST00000439578
  CDS Start-End: 185-781
gtgtacggccaacgccaagtaggggattgcgttccctccagtcgcagagtttccctcttgtcgcccaggctggagtgaagtggcacgatctcggcttactgcaagctccgcctcccgggttcacgccattctcctgcctcagcctcccgagtagctgggactacagaccctatcagatttggatatgtccttcatatttgattggatttacagtggtttcagcagtgtgctacagtttttaggattatataagaaaactggtaaactggtatttcttggattggataatgcaggaaaaacaacattgctacacatgctaaaagatgacagacttggacaacatgtcccaacattacatcccacttccgaagaactgaccattgctggcatgacgtttacaacttttgatctgggtggacatgttcaagctcgaagagtgtggaaaaactaccttcctgctatcaatggcattgtatttctggtggattgtgcagaccacgaaaggctgttagagtcaaaagaagaacttgattcactaatgacagatgaaaccattgctaatgtgcctatactgattcttgggaataagatcgacagacctgaagccatcagtgaagagaggttgcgagagatgtttggtttatatggtcagacaacaggaaaggggagtatatctctgaaagaactgaatgcccgacccttagaagttttcatgtgtagtgtgctcaaaagacaaggttacggagaaggcttccgctggatggcacagtacattgattaacacaaactcacattggttccaggtctcaacgttcaggcttactcagagatttgattgctcaacatgcataacttgaattcaatagacttttgctggttataaaacagatgttttttagattattaatattaaatcaacttaatttgaa

SEQ ID NO: 179465 - DNA, 548 bp, Homo sapiens
  Payload ID: 15369
  Gene Symbol: SAR1B
  Gene Name: secretion associated, Ras related GTPase 1B
  ENST ID: ENST00000502286
  CDS Start-End: 240-548
gatgcgaactggggccacggcagccatcgcgctttgcagttcggtctcctggtgtacggccaacgccaagtaggggattgcgttccctccagtcgcagacagagtttccctcttgtcgcccaggctggagtgaagtggcacgatctcggcttactgcaagctccgcctcccgggttcacgccattctcctgcctcagcctcccgagtagctgggactacagaccctatcagatttggatatgtccttcatatttgattggatttacagtggtttcagcagtgtgctacagtttttaggattatataagaaaactggtaaactggtatttcttggattggataatgcaggaaaaacaacattgctacacatgctaaaagatgacagacttggacaacatgtcccaacattacatcccacttccgaagaactgaccattgctggcatgacgtttacaacttttgatctgggtggacatgttcaagctcgaagagtgtggaaaaactaccttcctgctatcaatggcattgtatttctggtggattgtgca

SEQ ID NO: 179466 - DNA, 506 bp, Homo sapiens
  Payload ID: 15369
  Gene Symbol: SAR1B
  Gene Name: secretion associated, Ras related GTPase 1B
  ENST ID: ENST00000509730
  CDS Start-End: 151-506
aaagaggcaaaggcagaggagaacaaaggaaggaggaagtaacttgtggaatgctgagaaaggtaaaaacaccttcaaataaggaagaggaacaggctatgacctaatgcttgcttggaccagtcttccgaagaactgaccattgctggcatgacgtttacaacttttgatctgggtggacatgttcaagctcgaagagtgtggaaaaactaccttcctgctatcaatggcattgtatttctggtggattgtgcagaccacgaaaggctgttagagtcaaaagaagaacttgattcactaatgacagatgaaaccattgctaatgtgcctatactgattcttgggaataagatcgacagacctgaagccatcagtgaagagaggttgcgagagatgtttggtttatatggtcagacaacaggaaaggggagtatatctctgaaagaactgaatgcccgacccttagaagttttcatgtgtagtgtgctcaaaagacaaggttacgg

SEQ ID NO: 179467 - DNA, 455 bp, Homo sapiens
  Payload ID: 15369
  Gene Symbol: SAR1B
  Gene Name: secretion associated, Ras related GTPase 1B
  ENST ID: ENST00000509937
  CDS Start-End: 62-454
ggaaggaggaagtaacttgtggaatgctgagaaagcttccgaagaactgaccattgctggcatgacgtttacaacttttgatctgggtggacatgttcaagctcgaagagtgtggaaaaactaccttcctgctatcaatggcattgtatttctggtggattgtgcagaccacgaaaggctgttagagtcaaaagaagaacttgattcactaatgacagatgaaaccattgctaatgtgcctatactgattcttgggaataagatcgacagacctgaagccatcagtgaagagaggttgcgagagatgtttggtttatatggtcagacaacaggaaaggggagtatatctctgaaagaactgaatgcccgacccttagaagttttcatgtgtagtgtgctcaaaagacaaggttacggagaaggcttccgctggatggcacagtacattgattaac

SEQ ID NO: 179468 - DNA, 2287 bp, Homo sapiens
  Payload ID: 15369
  Gene Symbol: SAR1B
  Gene Name: secretion associated, Ras related GTPase 1B
  ENST ID: ENST00000507419
  CDS Start-End: 1374-1766
gaggtcactctctctatctatgtcgcctcaagcagcagtggcacgcaaaggtcagtcagccctggccaggctgcgccctccccccggacagcactcaccgttggtgtagggagaccccgaggccaaggcggctccgttctgggcctggaggctggctggggcgccgccggaggccggtattcccggctgggacatgatgactgggttggaaggggctggtcggggtcgacaacagcgcacaagaagagagctgaaagaccactgctgaaagcggagggaggaggctaacgacttaagactgaagactgggagaagaggggggggcgcattaagcccgaggcatggcgccgcactctccccaggccaccggcggccacagcctagcctgggagctgaggcttgagagtcgggccggcggggccgcgaacgcccggctagaaggcggcagccaaacctagagagaaggagggaggccctggccggaagtgcctgtcagccgccggccgcgcagccgcaatcaggacacgtggcacttccggctccgggctcgcagcagccgccgccgcgccggcgaactcttctctgccagccgggctgccccgaggccacctgacagctcctggtgccccgaccccgacgaccgtgcccggcctcgccgccacgtcaccgactctcacggccggccggaagtgccgtgtgtcaccgctacggaaattcccgccgttgtgaacgtgacctcgctcgcagagccaggatcgtggggcaatctgagattcagtagccgctttcgtggggtgggactgacagttcctctcctcgggttttgtgaagattacctgagaccatagaagtcatcgtcctctgttgagaccgtaccaccactgggagctggggcggttaatgttcatcgcagtatttcattcacatttcgtcttcgtgtttcagatgtaaattataaggggttttaaaaagaggtggttaaatatgtgtacatgttaatagtgtgatcaagccaagaaggaggcctttgtctttgactggaggactcagaggaattttaattttgaaactcgctgattcacagcatagtcacgctcaagttcattagcacatttaaatggcagttttgtttcctcttctaagagtttacagtaaggaaaaacaacattgctacacatgctaaaagatgacagacttggacaacatgtcccaacattacatcccaatggagtctcgctctgtcacccaggctggagtgcagtggcacgatctcgactcactgcaacctccgcctcccaagttcacaccattctcctgcctcagcttcccgagtagctggaactacagcttccgaagaactgaccattgctggcatgacgtttacaacttttgatctgggtggacatgttcaagctcgaagagtgtggaaaaactaccttcctgctatcaatggcattgtatttctggtggattgtgcagaccacgaaaggctgttagagtcaaaagaagaacttgattcactaatgacagatgaaaccattgctaatgtgcctatactgattcttgggaataagatcgacagacctgaagccatcagtgaagagaggttgcgagagatgtttggtttatatggtcagacaacaggaaaggggagtatatctctgaaagaactgaatgcccgacccttagaagttttcatgtgtagtgtgctcaaaagacaaggttacggagaaggcttccgctggatggcacagtacattgattaacacaaactcacattggttccaggtctcaacgttcaggcttactcagagatttgattgctcaacatgcataacttgaattcaatagacttttgctggttataaaacagatgttttttagattattaatattaaatcaacttaatttgaatgagaattgaaaactgattcaagtaagtttgagtatcacaatgttagctttctaattccataaaagtacttggtttttacagtttataatctgacatcaccccagcgccatttgtaaagagcaactttccagcagtacatttgaagcactttttaacaacatgaaactataaaccatatttaaaagctcatcatgttaaattttttatgtacttttctggaactagtttttaaattttagattatatgtccacctatcttaagtgtacagttaataattagcttattcaatgattgcatgatgccttacagttttcaataactttttttcttatgcaaacgtcatgcaataaaacaaactctaatgtttggca

SEQ ID NO: 179469 - DNA, 733 bp, Homo sapiens
  Payload ID: 15369
  Gene Symbol: SAR1B
  Gene Name: secretion associated, Ras related GTPase 1B
  ENST ID: ENST00000503318
  CDS Start-End: 19-453
accctatcagatttggatatgtccttcatatttgattggatttacagtggtttcagcagtgtgctacagtttttaggattatataagaaaactggtaaactggtatttcttggattggataatgcaggaaaaacaacattgctacacatgctaaaagatgacagacttggacaacatgtcccaacattacatcccacttccgaagaactgaccattgctggcatgacgtttacaacttttgatctgggtggacatgttcaagctcgaagagtgtggaaaaactaccttcctgctatcaatggcattgtatttctggtggattgtgcagaccacgaaaggctgttagagtcaaaagaagaacttgatgtcagatattttgtaaaggggcccaacagcagcaggcaaggtcagcaccagatctggggccacagagtaagcaggtccatgatttgattgaaggttgatcataccatggctctgcccagagcaggcaaacaaatacttgtacgtgtggaaaagtccagtcactaatgacagatgaaaccattgctaatgtgcctatactgattcttgggaataagatcgacagacctgaagccatcagtgaagagaggttgcgagagatgtttggtttatatggtcagacaacaggaaaggggagtatatctctgaaagaactgaatgcccgacccttagaagttttcatgtgtagtgtgctcaaaagacaaggtta

SEQ ID NO: 179470 - DNA, 670 bp, Homo sapiens
  Payload ID: 15369
  Gene Symbol: SAR1B
  Gene Name: secretion associated, Ras related GTPase 1B
  ENST ID: ENST00000505758
  CDS Start-End: 161-670
cggccaacgccaagtaggggattgcgttccctccagtcgcaggcttttcaccattctttagctctcacctaccaacaatcatcttcagtgaggactttgccacttgattcacagtctgtatcagtgccctccagtcttccagaccctatcagatttggatatgtccttcatatttgattggatttacagtggtttcagcagtgtgctacagtttttaggattatataagaaaactggtaaactggtatttcttggattggataatgcaggaaaaacaacattgctacacatgctaaaagatgacagacttggacaacatgtcccaacattacatcccacttccgaagaactgaccattgctggcatgacgtttacaacttttgatctgggtggacatgttcaagctcgaagagtgtggaaaaactaccttcctgctatcaatggcattgtatttctggtggattgtgcagaccacgaaaggctgttagagtcaaaagaagaacttgattcactaatgacagatgaaaccattgctaatgtgcctatactgattcttgggaataagatcgacagacctgaagccatcagtgaagagaggttgcgagagatgtttggtttatatggtcagacaacaggaaaggggagtatatctctgaaagaactgaatgcc

SEQ ID NO: 179471 - DNA, 708 bp, Homo sapiens
  Payload ID: 15369
  Gene Symbol: SAR1B
  Gene Name: secretion associated, Ras related GTPase 1B
  ENST ID: ENST00000502539
  CDS Start-End: 104-496
tgctgagaaaggtaaaaacaccttcaaataaggaagaggaacaggctatgacctaatgcttgcttggaccagtgtaacttccgaagaactgaccattgctggcatgacgtttacaacttttgatctgggtggacatgttcaagctcgaagagtgtggaaaaactaccttcctgctatcaatggcattgtatttctggtggattgtgcagaccacgaaaggctgttagagtcaaaagaagaacttgattcactaatgacagatgaaaccattgctaatgtgcctatactgattcttgggaataagatcgacagacctgaagccatcagtgaagagaggttgcgagagatgtttggtttatatggtcagacaacaggaaaggggagtatatctctgaaagaactgaatgcccgacccttagaagttttcatgtgtagtgtgctcaaaagacaaggttacggagaaggcttccgctggatggcacagtacattgattaacacaaactcacattggttccaggtctcaacgttcaggcttactcagagatttgattgctcaacatgcataacttgaattcaatagacttttgctggttataaaacagatgttttttagattattaatattaaatcaacttaatttgaatgagaattgaaaactgattcaagtaagtttgagtatcacaatgttagctttctaattccataaa

SEQ ID NO: 179472 - DNA, 1566 bp, Homo sapiens
  Payload ID: 15370
  Gene Symbol: SERGEF
  Gene Name: secretion regulating guanine nucleotide exchange factor
  Uniprot ID: Q9UGK8
  ENST ID: ENST00000265965
  CDS Start-End: 153-1529
ctctctcccggcctgcgggccgcttcccaccacagaccccgccccgcgccctacccatcacgcgtccccggtccggctccggcgctcacctacccccggcaggcgccgcccccgtgccgtccctcccggaagcgccggcggagcgtcctcgcatggagcgcgagcccagcgcctcggaggccgcccccgcggcggccgcgctcttcgcctggggtgcaaatagctatgggcaacttggcctcggccataaggaagatgtgctgttgccccagcaactgaatgacttctgtaaacccaggagtgtcaggaggatcacaggaggagggggccactctgcagttgtcacagatggaggagacctctttgtttgtggcctgaacaaagatgggcaactggggcttggtcacacagaggatatcccatattttaccccctgcaaatccctctttggctgtcccatccaacaggtggcctgtggctgggattttacgattatgctcacagaaaatggtcaagttctatcatgtggatccaactcctttggccagttaggagttcctcatggacctcgaagatgtgtggttccccaggccattgagctccataaagagaaggttgtttgtattgctgctggactgaggcatgcagtagctgctacagcgagtggcatcgtgttccagtgggggactggtttggcatcatgtggacgacggttgtgccctgggcagactcttccattgtttttcacagcaaaggaaccaagcagagtgacaggtctagagaattctaaagcaatgtgtgttcttgctggctcagaccactcagcttcattaacagatgcaggagaggtgtatgtttggggaagcaacaagcatgggcaactggctaatgaggctgctttccttcctgtgccccagaaaatagaagcacattgtttccagaatgaaaaggtcactgccatctggagtggatggacacacctggttgctcagacagaaactggcaagatgtttacctggggccgagcagactatggtcagctagggaggaagttggagacttatgaaggctggaaactagaaaagcaagattcatttctcccctgttcaagaccaccgaacagcatgccttcgtctccgcattgcttaactggagcaactgaggtctcttgtggctcagagcataatttggcaataattggtggagtgtgttactcttggggctggaatgagcatggcatgtgcggagatggcactgaagccaacgtctgggccccaaagccggtgcaggctctgctgtcatcgtcaggactccttgtgggctgtggggctggccactccttggccctctgccagctgccagctcaccctgcattggtccaggaccccaaggtcacctacctttccccagatgccatcgaggacactgaatctcagaaagccatggacaaagagagaaactggaaggaaagacaatcagaaacttcaacccaaagccaatctgactggtccagaaatgggggactgtgatagagaatctttaataaagtggcttttcccaccaaaa

SEQ ID NO: 179473 - DNA, 1124 bp, Homo sapiens
  Payload ID: 15370
  Gene Symbol: SERGEF
  Gene Name: secretion regulating guanine nucleotide exchange factor
  ENST ID: ENST00000532265
  CDS Start-End: 386-910
tgggtacgtgactccgcccccgggccggtgcaggccctgaggggcgccgagatgtgggagctgctggccgcggcgtgggcagttcaggggctgggcggctgagggtgcaaatagctatgggcaacttggcctcggccataaggaagatgtgctgttgccccagcaactgaatgacttctgtaaacccaggagtgtcaggaggatcacaggaggagggggccactctgcagttgtcacagatggaggagacctctttgtttgtggcctgaacaaagatgggcaactggggcttggtcacacagaggatatcccatattttaccccctgcaaatccctctttggctgtcccatccaacaggtggcctgtggctgggattttacgattatgctcacagaaaatggtcaagttctatcatgtggatccaactcctttggccagttaggagttcctcatggacctcgaagatgtgtggttccccaggccattgagctccataaagagaaggttgtttgtattgctgctggactgaggcatgcagtagctgctacagcgagtggcatcgtgttccagtgggggactggtttggcatcatgtggacgacggttgtgccctgggcagactcttccattgtttttcacagcaaaggaaccaagcagagtgacaggtctagagaattctaaagcaatgtgtgttcttgctggctcagaccactcagcttcattaacagatgcaggagaggtgtatgtttggggaagcaacaagcatgggcaactggctaatgaggctgctttccttcctgtgccccagaaaatagaagcacattgtttccagaatgaaaaggtcactgccatctggagtggatggacacacctggttgctcagacaggtctcttgtggctcagagcataatttggcaataattgtatctctgcaaggtaagtattattatcccagttttgctgatgtggaaatggagttgcagagaaattaagagatatactcaagatcacagtgttcatgtgtcatggagccatttttgaatcctgtgagagacttcagtgctgatgatcggatgaccagaccatcaaaccatgctggaggtgattttttaattaccattctg

SEQ ID NO: 179474 - DNA, 1314 bp, Homo sapiens
  Payload ID: 15370
  Gene Symbol: SERGEF
  Gene Name: secretion regulating guanine nucleotide exchange factor
  ENST ID: ENST00000527494
  CDS Start-End: 331-507
gggagctgctggccgcggcgtgggcagttcaggggctgggcggctgagggtgcaaatagctatgggcaacttggcctcggccataaggaagatgtgctgttgccccagcaactgaatgacttctgtaaacccaggagtgtcaggaggatcacaggaggagggggccactctgcagttgtcacagatggaggagacctctttgtttgtggcctgaacaaagatgggcaactggggcttggtcacacagaggatatcccatattttaccccctgcaaatccctctttggctgtcccatccaacaggtggcctgtggctgggattttacgattatgctcacagaaaatggtcaagttctatcatgtggatccaactcctttggccagttaggagttcctcatggacctcgaagatgtgtggttccccaggccattgagctccataaagagaaggttgtttgtattgctgctggactgaggcatgcagtagctgctacaggacagcactaattggctgtggcagctgaggctcaggtgcttcgtgagtccacttgtggagtggaggaaggagagaggagcgagtggcatcgtgttccagtgggggactggtttggcatcatgtggacgacggttgtgccctgggcagactcttccattgtttttcacagcaaaggaaccaagcagagtgacaggtctagagaattctaaagcaatgtgtgttcttgctggctcagaccactcagcttcattaacagatgcaggagaggtgtatgtttggggaagcaacaagcatgggcaactggctaatgaggctgctttccttcctgtgccccagaaaatagaagcacattgtttccagaatgaaaaggtcactgccatctggagtggatggacacacctggttgctcagacaggtctcttgtggctcagagcataatttggcaataattggtggagtgtgttactcttggggctggaatgagcatggcatgtgcggagatggcactgaagccaacgtctgggccccaaagccggtgcaggctctgctgtcatcgtcaggactccttgtgggctgtggggctggccactccttggccctctgccagctgccagctcaccctgcattggtccaggaccccaaggtcacctacctttccccagatgccatcgaggacactgaatctcagaaagccatggacaaagagagaaactggaaggaaagacaatcagaaacttcaacccaaagccaatctgactggtccagaaatgggggactgtgatagagaatctttaataaagtggcttttcccaccaaaa

SEQ ID NO: 179475 - DNA, 833 bp, Homo sapiens
  Payload ID: 15370
  Gene Symbol: SERGEF
  Gene Name: secretion regulating guanine nucleotide exchange factor
  ENST ID: ENST00000532546
  CDS Start-End: 1-381
ggacgacggttgtgccctgggcagactcttccattgtttttcacagcaaaggaaccaagcagagtgacaggtctagagaattctaaagcaatgtgtgttcttgctggctcagaccactcagcttcattaacagatgcaggagaggtgtatgtttggggaagcaacaagcatgggcaactggctaatgaggctgctttccttcctgtgccccagaaaatagaagcacattgtttccagaatgaaaaggtcactgccatctggagtggatggacacacctggttgctcagacagatactgaactgcacagtgggagatgtggagatgaattcctagagctctggtctcaggaggccctccaggtggattctgcatcaagatagtcttttggagtaatagcaaggtctcttgtggctcagagcataatttggcaataattgtatctctgcaaggtaagtattattatcccagttttgctgatgtggaaatggagttgcagagaaattaagagatatactcaagatcacagtgttcatgtgtcatggagccatttttgaatcctgtgagagacttcagtgctgatgatcggatgaccagaccatcaaaccatgctggaggtggagtgtgttactcttggggctggaatgagcatggcatgtgcggagatggcactgaagccaacgtctgggccccaaagccggtgcaggctctgctgtcatcgtcaggactccttgtgggctgtggggctggccactccttggccctctgccagctgccagctcaccctgcattggtccaggaccccaaggtcacctacctttccccagatgccatc

SEQ ID NO: 179476 - DNA, 541 bp, Homo sapiens
  Payload ID: 15370
  Gene Symbol: SERGEF
  Gene Name: secretion regulating guanine nucleotide exchange factor
  ENST ID: ENST00000533328
  CDS Start-End: 1-135
cctgaggggcgccgagatgtgggagctgctggccgcggcgtgggcagttcaggggctgggcggctgagggtgcaaatagctatgggcaacttggcctcggccataaggaagatgtgctgttgccccagcaactgaatgacttctgtaaacccaggagtgtcaggaggatcacaggaggagggggccactctgcagttgtcacagatggaggagacctctttgtttgtggcctgaacaaagatgggcaactggggcttggtcacacagaggatatcccatattttaccccctgcaaatccctctttggctgtcccatccaacaggtggcctgtggctgggattttacgattatgctcacagctccataaagagaaggttgtttgtattgctgctggactgaggcatgcagtagctgctacagcgagtggcatcgtgttccagtgggggactggtttggcatcatgtggacgacggttgtgccctgggcagactcttccattgtttttcacagcaaaggaaccaagcagagtgacaggtctag

SEQ ID NO: 179477 - DNA, 793 bp, Homo sapiens
  Payload ID: 15370
  Gene Symbol: SERGEF
  Gene Name: secretion regulating guanine nucleotide exchange factor
  ENST ID: ENST00000530925
  CDS Start-End: 357-572
gcaggccctgaggggcgccgagatgtgggagctgctggccgcggcgtgggcagttcaggggctgggcggctgagggtgcaaatagctatgggcaacttggcctcggccataaggaagatgtgctgttgccccagcaactgaatgacttctgtaaacccaggagtgtcaggaggatcacaggaggagggggccactctgcagttgtcacagatggaggagacctctttgtttgtggcctgaacaaagatgggcaactggggcttggtcacacagaggatatcccatattttaccccctgcaaatccctctttggctgtcccatccaacaggtggcctgtggctgggattttacgattatgctcacagaaaatggtcaagttctatcatgtggatccaactcctttggccagttaggagttcctcatggacctcgaagatgtgtggttccccaggccattgagaagtatagtttccagaagaaggaaggccaaagctcagccctttctgctgttcagcctgcatctgggatgttgtgttttgttgtggatttggtgcttaggccctgggcataaagctccataaagagaaggttgtttgtattgctgctggactgaggcatgcagtagctgctacagcgagtggcatcgtgttccagtgggggactggtttggcatcatgtggacgacggttgtgccctgggcagactcttccattgtttttcacagcaaaggaaccaagcagagtgacaggtctagagaattctaaagcaatgtgtgttcttgctggctcagac

SEQ ID NO: 179478 - DNA, 548 bp, Homo sapiens
  Payload ID: 15370
  Gene Symbol: SERGEF
  Gene Name: secretion regulating guanine nucleotide exchange factor
  ENST ID: ENST00000524716
  CDS Start-End: 3-125
gcatggagcgcgagcccagcgcctcggaggccgcccccgcggcggccgcgctcttcgcctgggtgtcttcaaaaacaaacatatttaaaagattttacttctcatctccaggaagaaccagctaggaggtgcaaatagctatgggcaacttggcctcggccataaggaagatgtgctgttgccccagcaactgaatgacttctgtaaacccaggagtgtcaggaggatcacaggaggagggggccactctgcagttgtcacagatggaggagacctctttgtttgtggcctgaacaaagatgggcaactggggcttggtcacacagaggatatcccatattttaccccctgcaaatccctctttggctgtcccatccaacaggtggcctgtggctgggattttacgattatgctcacagaaaatggtcaagttctatcatgtggatccaactcctttggccagttaggagttcctcatggacctcgaagatgtgtggttccccaggccattgagctccataaagagaaggttgtttgtattgctgctg

SEQ ID NO: 179479 - DNA, 1264 bp, Homo sapiens
  Payload ID: 15370
  Gene Symbol: SERGEF
  Gene Name: secretion regulating guanine nucleotide exchange factor
  Uniprot ID: Q9UGK8
  ENST ID: ENST00000528200
  CDS Start-End: 19-885
ccggcggagcgtcctcgcatggagcgcgagcccagcgcctcggaggccgcccccgcggcggccgcgctcttcgcctggggtgcaaatagctatgggcaacttggcctcggccataaggaagatgtgctgttgccccagcaactgaatgacttctgtaaacccaggagtgtcaggaggatcacaggaggagggggccactctgcagttgtcacagatggaggagacctctttgtttgtggcctgaacaaagatgggcaactggggcttggtcacacagaggatatcccatattttaccccctgcaaatccctctttggctgtcccatccaacaggtggcctgtggctgggattttacgattatgctcacagaaaatggtcaagttctatcatgtggatccaactcctttggccagttaggagttcctcatggacctcgaagatgtgtggttccccaggccattgagctccataaagagaaggttgtttgtattgctgctggactgaggcatgcagtagctgctacagcgagtggcatcgtgttccagtgggggactggtttggcatcatgtggacgacggttgtgccctgggcagactcttccattgtttttcacagcaaaggaaccaagcagagtgacaggtctagagaattctaaagcaatgtgtgttcttgctggctcagaccactcagcttcattaacagatgcaggagaggtgtatgtttggggaagcaacaagcatgggcaactggctaatgaggctgctttccttcctgtgccccagaaaatagaagcacattgtttccagaatgaaaaggtcactgccatctggagtggatggacacacctggttgctcagacaggtctcttgtggctcagagcataatttggcaataattggtggagtgtgttactcttggggctggaatgagcatggcatgtgcggagatggcactgaagccaacgtctgggccccaaagccggtgcaggctctgctgtcatcgtcaggactccttgtgggctgtggggctggccactccttggccctctgccagctgccagctcaccctgcattggtccaggaccccaaggtcacctacctttccccagatgccatcgaggacactgaatctcagaaagccatggacaaagagagaaactggaaggaaagacaatcagaaacttcaacccaaagccaatctgactggtccagaaatgggggactgtgatagagaatctttaataaagtggcttttcccaccaaa

SEQ ID NO: 179480 - DNA, 1525 bp, Homo sapiens
  Payload ID: 15370
  Gene Symbol: SERGEF
  Gene Name: secretion regulating guanine nucleotide exchange factor
  ENST ID: ENST00000525422
  CDS Start-End: 27-1091
cggaagcgccggcggagcgtcctcgcatggagcgcgagcccagcgcctcggaggccgcccccgcggcggccgcgctcttcgcctggggtgcaaatagctatgggcaacttggcctcggccataaggaagatgtgctgttgccccagcaactgaatgacttctgtaaacccaggagtgtcaggaggatcacaggaggagggggccactctgcagttgtcacagatggaggagacctctttgtttgtggcctgaacaaagatgggcaactggggcttggtcacacagaggatatcccatattttaccccctgcaaatccctctttggctgtcccatccaacaggtggcctgtggctgggattttacgattatgctcacagaaaatggtcaagttctatcatgtggatccaactcctttggccagttaggagttcctcatggacctcgaagatgtgtggttccccaggccattgagctccataaagagaaggttgtttgtattgctgctggactgaggcatgcagtagctgctacagcgagtggcatcgtgttccagtgggggactggtttggcatcatgtggacgacggttgtgccctgggcagactcttccattgtttttcacagcaaaggaaccaagcagagtgacaggtctagagaattctaaagcaatgtgtgttcttgctggctcagaccactcagcttcattaacagatgcaggagaggtgtatgtttggggaagcaacaagcatgggcaactggctaatgaggctgctttccttcctgtgccccagaaaatagaagcacattgtttccagaatgaaaaggtcactgccatctggagtggatggacacacctggttgctcagacagaaactggcaagatgtttacctggggccgagcagactatggtcagctagggaggaagttggagacttatgaaggctggaaactagaaaagcaagattcatttctcccctgttcaagaccaccgaacagcatgccttcgtctccgcattgcttaactggagcaactgagactagctttagatggcatctccttggaaagtcttccctgatgtccaggtcctaattgatcacttcattctctgaacttccagtaggtctcttgtggctcagagcataatttggcaataattggtggagtgtgttactcttggggctggaatgagcatggcatgtgcggagatggcactgaagccaacgtctgggccccaaagccggtgcaggctctgctgtcatcgtcaggactccttgtgggctgtggggctggccactccttggccctctgccagctgccagctcaccctgcattggtccaggaccccaaggtcacctacctttccccagatgccatcgaggacactgaatctcagaaagccatggacaaagagagaaactggaaggaaagacaatcagaaacttcaacccaaagccaatctgactggtccagaaatgggggactgtgatagagaatctttaataaagtggcttttcccaccaaaa

SEQ ID NO: 179481 - DNA, 539 bp, Homo sapiens
  Payload ID: 15370
  Gene Symbol: SERGEF
  Gene Name: secretion regulating guanine nucleotide exchange factor
  ENST ID: ENST00000533241
  CDS Start-End: 1-433
agatgcaggagaggtgtatgtttggggaagcaacaagcatgggcaactggctaatgaggctgctttccttcctgtgccccagaaaatagaagcacattgtttccagaatgaaaaggtcactgccatctggagtggatggacacacctggttgctcagacagaaactggcaagatgtttacctggggccgagcagactatggtcagctagggaggaagttggagacttatgaaggctggaaactagaaaagcaagattcatttctcccctgttcaagaccaccgaacagcatgccttcgtctccgcattgcttaactggagcaactgaggtctcttgtggctcagagcataatttggcaataattgtatctctgcaaggtaagtattattatcccagttttgctgatgtggaaatggagttgcagagaaattaagagatatactcaagatcacagtgttcatgtgtcatggagccatttttgaatcctgtgagagacttcagtgctgatgatcggatgaccagaccatcaaaccatgctg

SEQ ID NO: 179482 - DNA, 833 bp, Homo sapiens
  Payload ID: 15370
  Gene Symbol: SERGEF
  Gene Name: secretion regulating guanine nucleotide exchange factor
  ENST ID: ENST00000532389
  CDS Start-End: 422-833
gcaggccctgaggggcgccgagatgtgggagctgctggccgcggcgtgggcagttcaggggctgggcggctgaggtgtcttcaaaaacaaacatatttaaaagattttacttctcatctccaggaagaaccagctaggaggtgcaaatagctatgggcaacttggcctcggccataaggaagatgtgctgttgccccagcaactgaatgacttctgtaaacccaggagtgtcaggaggatcacaggaggagggggccactctgcagttgtcacagatggaggagacctctttgtttgtggcctgaacaaagatgggcaactggggcttggtcacacagaggatatcccatattttaccccctgcaaatccctctttggctgtcccatccaacaggtggcctgtggctgggattttacgattatgctcacagaaaatggtcaagttctatcatgtggatccaactcctttggccagttaggagttcctcatggacctcgaagatgtgtggttccccaggccattgagctccataaagagaaggttgtttgtattgctgctggactgaggcatgcagtagctgctacagcgagtggcatcgtgttccagtgggggactggtttggcatcatgtggacgacggttgtgccctgggcagactcttccattgtttttcacagcaaaggaaccaagcagagtgacaggtctagagaattctaaagcaatgtgtgttcttgctggctcagaccactcagcttcattaacagatgcaggagaggtgtatgtttggggaagcaacaagcatgggcaactggctaatgaggctgctttccttc

SEQ ID NO: 179483 - DNA, 893 bp, Homo sapiens
  Payload ID: 15370
  Gene Symbol: SERGEF
  Gene Name: secretion regulating guanine nucleotide exchange factor
  ENST ID: ENST00000530613
  CDS Start-End: 400-893
gggagctgctggccgcggcgtgggcagttcaggggctgggcggctgaggtgtcttcaaaaacaaacatatttaaaagattttacttctcatctccaggaagaaccagctaggagtagggtgcaaatagctatgggcaacttggcctcggccataaggaagatgtgctgttgccccagcaactgaatgacttctgtaaacccaggagtgtcaggaggatcacaggaggagggggccactctgcagttgtcacagatggaggagacctctttgtttgtggcctgaacaaagatgggcaactggggcttggtcacacagaggatatcccatattttaccccctgcaaatccctctttggctgtcccatccaacaggtggcctgtggctgggattttacgattatgctcacagaaaatggtcaagttctatcatgtggatccaactcctttggccagttaggagttcctcatggacctcgaagatgtgtggttccccaggccattgagctccataaagagaaggttgtttgtattgctgctggactgaggcatgcagtagctgctacagcgagtggcatcgtgttccagtgggggactggtttggcatcatgtggacgacggttgtgccctgggcagactcttccattgtttttcacagcaaaggaaccaagcagagtgacaggtctagagaattctaaagcaatgtgtgttcttgctggctcagaccactcagcttcattaacagatgcaggagaggtgtatgtttggggaagcaacaagcatgggcaactggctaatgaggctgctttccttcctgtgccccagaaaatagaagcacattgtttccagaatgaaaaggtcactgccatctggagtggatggacacacctggttgc

SEQ ID NO: 179484 - DNA, 898 bp, Homo sapiens
  Payload ID: 15370
  Gene Symbol: SERGEF
  Gene Name: secretion regulating guanine nucleotide exchange factor
  ENST ID: ENST00000529151
  CDS Start-End: 1-898
tagaagtgcctcccagccctgagagttgttgtcatatgctccataaagagaaggttgtttgtattgctgctggactgaggcatgcagtagctgctacagcgagtggcatcgtgttccagtgggggactggtttggcatcatgtggacgacggttgtgccctgggcagactcttccattgtttttcacagcaaaggaaccaagcagagtgacaggtctagagaattctaaagcaatgtgtgttcttgctggctcagaccactcagcttcattaacagatgcaggagaggtgtatgtttggggaagcaacaagcatgggcaactggctaatgaggctgctttccttcctgtgccccagaaaatagaagcacattgtttccagaatgaaaaggtcactgccatctggagtggatggacacacctggttgctcagacagaaactggcaagatgtttacctggggccgagcagactatggtcagctagggaggaagttggagacttatgaaggctggaaactagaaaagcaagattcatttctcccctgttcaagaccaccgaacagcatgccttcgtctccgcattgcttaactggagcaactgaggtctcttgtggctcagagcataatttggcaataattggtggagtgtgttactcttggggctggaatgagcatggcatgtgcggagatggcactgaagccaacgtctgggccccaaagccggtgcaggctctgctgtcatcgtcaggactccttgtgggctgtggggctggccactccttggccctctgccagctgccagctcaccctgcattggtccaggaccccaaggtcacctacctttccccagatgccatcgaggacactgaatctcagaaagccatggacaaagagagaaa

SEQ ID NO: 179485 - DNA, 497 bp, Homo sapiens
  Payload ID: 15370
  Gene Symbol: SERGEF
  Gene Name: secretion regulating guanine nucleotide exchange factor
  ENST ID: ENST00000525920
  CDS Start-End: 1-318
ggccagttaggagttcctcatggacctcgaagatgtgtggttccccaggccattgagctccataaagagaaggttgtttgtattgctgctggactgaggcatgcagtagctgctacagcgagtggcatcgtgttccagtgggggactggtttggcatcatgtggacgacggttgtgccctgggcagactcttccattgtttttcacagcaaaggaaccaagcagagtgacaggtctagagaattctaaagcaatgtgtgttcttgctggctcagaccactcagcttcattaacaggtctcttgtggctcagagcataatttggcaataattggtggagtgtgttactcttggggctggaatgagcatggcatgtgcggagatggcactgaagccaacgtctgggccccaaagccggtgcaggctctgctgtcatcgtcaggactccttgtgggctgtggggctggccactccttggccctctgccagctgccagctc

SEQ ID NO: 179486 - DNA, 1396 bp, Homo sapiens
  Payload ID: 15370
  Gene Symbol: SERGEF
  Gene Name: secretion regulating guanine nucleotide exchange factor
  ENST ID: ENST00000529728
  CDS Start-End: 711-1396
ccggtgcaggccctgaggggcgccgagatgtgggagctgctggccgcggcgtgggcagttcaggggctgggcggctgaggtccgagccgggctctgggttgaaggatcctgggctgggagcggagggggagcggaggaggagcgggcgggcggggaaggaagggtcttcgcggtcgacttaggggcctgccggctggcggggtcagggccggaggggctgtggcgccgcgggaagaacctgcctcggggcagagcgtctggttccgcgagagccctccagcccgaatagcgcctggaagacagcgcggagggctcggtggagaggatcgcccggtcccagagctccgtggggccacctgtgccccccacactcctgatgcctggaggagggagaccctgtcccagcctggcgaaagcatcctttagatggtgcaaatagctatgggcaacttggcctcggccataaggaagatgtgctgttgccccagcaactgaatgacttctgtaaacccaggagtgtcaggaggatcacaggaggagggggccactctgcagttgtcacagatggaggagacctctttgtttgtggcctgaacaaagatgggcaactggggcttggtcacacagaggatatcccatattttaccccctgcaaatccctctttggctgtcccatccaacaggtggcctgtggctgggattttacgattatgctcacagaaaatggtcaagttctatcatgtggatccaactcctttggccagttaggagttcctcatggacctcgaagatgtgtggttccccaggccattgagctccataaagagaaggttgtttgtattgctgctggactgaggcatgcagtagctgctacagcgagtggcatcgtgttccagtgggggactggtttggcatcatgtggacgacggttgtgccctgggcagactcttccattgtttttcacagcaaaggaaccaagcagagtgacaggtctagagaattctaaagcaatgtgtgttcttgctggctcagaccactcagcttcattaacagatgcaggagaggtgtatgtttggggaagcaacaagcatgggcaactggctaatgaggctgctttccttcctgtgccccagaaaatagaagcacattgtttccagaatgaaaaggtcactgccatctggagtggatggacacacctggttgctcagacagaaactggcaagatgtttacctggggccgagcagactatggtcagctagggaggaagttggagacttatgaaggctggaaactagaaaagcaagattcatttctcccctgttcaagaccaccgaacagcatgccttcgtctccgcattgcttaactggagcaactgaggtaggaagtgacttctc

SEQ ID NO: 179487 - DNA, 441 bp, Homo sapiens
  Payload ID: 15371
  Gene Symbol: SCGB1A1
  Gene Name: secretoglobin, family 1A, member 1 (uteroglobin)
  Uniprot ID: P11684
  ENST ID: ENST00000278282
  CDS Start-End: 62-337
actagcccaccagactcagagacggaaccagagacgggccagagcatccccctcctccaccatgaaactcgctgtcaccctcaccctggtcacactggctctctgctgcagctccgcttctgcagagatctgcccgagctttcagcgtgtcatcgaaaccctcctcatggacacaccctccagttatgaggctgccatggaacttttcagccctgatcaagacatgagggaggcaggggctcagctgaagaagctggtggacaccctcccccaaaagcccagagaaagcatcattaagctcatggaaaaaatagcccaaagctcactgtgtaattagcatttagaagctgaagatccccaactgctccagcctctgccgctgccatgctttgagtccacgcccaccagccttgctctcttcaataaaccacaagcatctca

SEQ ID NO: 179488 - DNA, 466 bp, Homo sapiens
  Payload ID: 15371
  Gene Symbol: SCGB1A1
  Gene Name: secretoglobin, family 1A, member 1 (uteroglobin)
  ENST ID: ENST00000534397
  CDS Start-End: 192-362
ggcagggcaggcagaggggaaacgagtgaaggccggaggtgctctgagggtgtcccttaccctggagtctgccttggagatcatttcaccatcagctcagaagatcttctttctctgttttcagccacacagcgtttcattcttctgcagagatctgcccgagctttcagcgtgtcatcgaaaccctcctcatggacacaccctccagttatgaggctgccatggaacttttcagccctgatcaagacatgagggaggcaggggctcagctgaagaagctggtggacaccctcccccaaaagcccagagaaagcatcattaagctcatggaaaaaatagcccaaagctcactgtgtaattagcatttagaagctgaagatccccaactgctccagcctctgccgctgccatgctttgagtccacgcccaccagccttgctctcttcaataaaccacaagcatctca

SEQ ID NO: 179489 - DNA, 431 bp, Homo sapiens
  Payload ID: 15372
  Gene Symbol: SCGB1C1
  Gene Name: secretoglobin, family 1C, member 1
  Uniprot ID: Q8TD33
  ENST ID: ENST00000342878
  CDS Start-End: 21-308
cagctcctgagactgctggcatgaaggggagccgtgccctcctgctggtggccctcaccctgttctgcatctgccggatggccacaggggaggacaacgatgagtttttcatggacttcctgcaaacactactggtggggaccccagaggagctctatgaggggaccttgggcaagtacaatgtcaacgaagatgccaaggcagcaatgactgaactcaagtcctgtatagatggcctgcagccaatgcacaaggcggagctggtcaagctgctggtgcaagtgctgggcagtcaggacggtgcctaagtggacctcagacatggctcagccataggacctgccacacaagcagccgtggacacaacgcccactaccacctcccacatggaaatgtatcctcaaaccgtttaatcaataaagcctcttccg

SEQ ID NO: 179490 - DNA, 478 bp, Homo sapiens
  Payload ID: 15373
  Gene Symbol: SCGB1C2
  Gene Name: secretoglobin, family 1C, member 2
  Uniprot ID: P0DMR2
  ENST ID: ENST00000595228
  CDS Start-End: 66-353
ggtgctgtccggtgaggcataaaatcccgggattctggctggaggcagctcctgagactgccggcatgaaggggagccgtgccctcctgctggtggccctcaccctgttctgcatctgccggatggccacgggggaggacaacgatgagtttttcatggacttcctgcaaacactactggtggggaccccagaggagctctatgaggggaccttgggcaagtacaatgtcaacgaagatgccaaggcagcaatgactgaactcaagtcctgcagagatggcctgcagccaatgcacaaggcggagctggtcaagctgctggtgcaagtgctgggcagtcaggacggtgcctaagtggacctcagacatggctcagccataggacctgccacacaagcagccgtggacacaacgcccactaccacctcccacatggaaatgtatcctcaaaccgtttaatcaataaagcctcttccgca

SEQ ID NO: 179491 - DNA, 478 bp, Homo sapiens; identical to SEQ ID NO: 179490
  Payload ID: 15373
  Gene Symbol: SCGB1C2
  Gene Name: secretoglobin, family 1C, member 2
  Uniprot ID: P0DMR2
  ENST ID: ENST00000613221
  CDS Start-End: 66-353

SEQ ID NO: 179492 - DNA, 453 bp, Homo sapiens
  Payload ID: 15374
  Gene Symbol: SCGB1D1
  Gene Name: secretoglobin, family 1D, member 1
  Uniprot ID: O95968
  ENST ID: ENST00000306238
  CDS Start-End: 70-342
aggctcccggggctgagtctaaatcactcatcattggttaaagccgagctcacagcagaataagccaccatgaggctgtcggtgtgtctcctgctgctcacgctggccctttgctgctaccgggcaaatgcagtggtctgccaagctcttggttctgaaatcacaggcttcttattagctggaaaacctgtgttcaagttccaacttgccaaatttaaggcacctctggaagctgttgcagccaagatggaagtgaagaaatgcgtggatacgatggcctatgagaaaagagtgctaattacaaaaacattgggaaaaatagcagagaaatgtgatcgctgagatgtaaaaagtttttaatgctagtttccaccatctttcaatgataccctgatcttcactgcagaatgtaaaggtttcaacgtcttgctctaataaatcacttgccctgaa

SEQ ID NO: 179493 - DNA, 480 bp, Homo sapiens
  Payload ID: 15375
  Gene Symbol: SCGB1D2
  Gene Name: secretoglobin, family 1D, member 2
  Uniprot ID: O95969
  ENST ID: ENST00000244926
  CDS Start-End: 99-371
acaaatagccctgggctctgcagctccacaggctcctggggtggagtccaaatcactcattgtttgtgaaagctgagctcacagcaaaacaagccaccatgaagctgtcggtgtgtctcctgctggtcacgctggccctctgctgctaccaggccaatgccgagttctgcccagctcttgtttctgagctgttagacttcttcttcattagtgaacctctgttcaagttaagtcttgccaaatttgatgcccctccggaagctgttgcagccaagttaggagtgaagagatgcacggatcagatgtcccttcagaaacgaagcctcattgcggaagtcctggtgaaaatattgaagaaatgtagtgtgtgacatgtaaaaactttcatcctggtttccactgtctttcaatgacaccctgatcttcactgcagaatgtaaaggtttcaacgtcttgctttaataaatcacttgctctcca

SEQ ID NO: 179494 - DNA, 439 bp, Homo sapiens
  Payload ID: 15376
  Gene Symbol: SCGB1D4
  Gene Name: secretoglobin, family 1D, member 4
  Uniprot ID: Q6XE38
  ENST ID: ENST00000358585
  CDS Start-End: 55-306
gtcgaatccaaatcactcattgtgaaagctgagctcacagccgaataagccaccatgaggctgtcagtgtgtctcctgatggtctcgctggccctttgctgctaccaggcccatgctcttgtctgcccagctgttgcttctgagatcacagtcttcttattcttaagtgacgctgcggtaaacctccaagttgccaaacttaatccacctccagaagctcttgcagccaagttggaagtgaagcactgcaccgatcagatatcttttaagaaacgactctcattgaaaaagtcctggtggaaatagtgaaaaaatgtggtgtgtgacatgtaaaaatgctcaacctggtttccaaagtctttcaacgacaccctgatcttcactaaaaattgtaaaggtttcaacacgttgctttaataaatcacttgccctgcacatc

SEQ ID NO: 179495 - DNA, 521 bp, Homo sapiens
  Payload ID: 15377
  Gene Symbol: SCGB2A1
  Gene Name: secretoglobin, family 2A, member 1
  Uniprot ID: O75556
  ENST ID: ENST00000244930
  CDS Start-End: 65-352
cctccacagcaacttccttgatccctgccacgcacgactgaacacagacagcagccgcctcgccatgaagctgctgatggtcctcatgctggcggccctcctcctgcactgctatgcagattctggctgcaaactcctggaggacatggttgaaaagaccatcaattccgacatatctatacctgaatacaaagagcttcttcaagagttcatagacagtgatgccgctgcagaggctatggggaaattcaagcagtgtttcctcaaccagtcacatagaactctgaaaaactttggactgatgatgcatacagtgtacgacagcatttggtgtaatatgaagagtaattaactttacccaaggcgtttggctcagagggctacagactatggccagaactcatctgttgattgctagaaaccacttttctttcttgtgttgtctttttatgtggaaactgctagacaactgttgaaacctcaaattcatttccatttcaataaactaactgcaaatcact

SEQ ID NO: 179496 - DNA, 505 bp, Homo sapiens
  Payload ID: 15378
  Gene Symbol: SCGB2A2
  Gene Name: secretoglobin, family 2A, member 2
  Uniprot ID: Q13296
  ENST ID: ENST00000227918
  CDS Start-End: 63-344
tccacagcggcttccttgatccttgccacccgcgactgaacaccgacagcagcagcctcaccatgaagttgctgatggtcctcatgctggcggccctctcccagcactgctacgcaggctctggctgccccttattggagaatgtgatttccaagacaatcaatccacaagtgtctaagactgaatacaaagaacttcttcaagagttcatagacgacaatgccactacaaatgccatagatgaattgaaggaatgttttcttaaccaaacggatgaaactctgagcaatgttgaggtgtttatgcaattaatatatgacagcagtctttgtgatttattttaactttctgcaagacctttggctcacagaactgcagggtatggtgagaaaccaactacggattgctgcaaaccacaccttctctttcttatgtctttttactacaaactacaagacaattgttgaaacctgctatacatgtttattttaataaattgatggca

SEQ ID NO: 179497 - DNA, 1305 bp, Homo sapiens
  Payload ID: 15378
  Gene Symbol: SCGB2A2
  Gene Name: secretoglobin, family 2A, member 2
  ENST ID: ENST00000525380
  CDS Start-End: 60-422
acagcggcttccttgatccttgccacccgcgactgaacaccgacagcagcagcctcaccatgaagttgctgatggtcctcatgctggcggccctctcccagcactgctacgcaggctctggctgccccttattggagaatgtgatttccaagacaatcaatccacaagtgtctaagactgaatacaaagaacttcttcaagagttcatagacgacaatgccactacaaatgccatagatgaattgaaggaatgttttcttaaccaaacggatgaaactctgagcaatgttgaggtgtttatggtaatttcattttcttcctataagctttttaaatcccctgaccagggacaagtgggctcttcatttctcactgacaatgccaaagccactagtgaacaagccttttcttacattggttaatttagttgaatggttagtctaatgactttgccatcaagaaaaacatccagtgtccctgtgttgtcactctacccagagaatcctcagtggatgataaatgaatagggcaagagaggaaaaggaaaggtcggtagaagtcttacctatccccagagctctctaattcatgctcacaaacacagacacaatcacacaaacacagaaacacacatacacacatccagacacatgcaaacacacagacacagtcacaatcacacaaacacacacacattcagacatacacaaacatagacagacaggcaaagacacagacacagacacagacacaatcacaccagcacacaatcatccagacacaaacacaaacacacagacagaaccacacaaccacagaaacacagagacacacacaaacacactcagacacacacatacaaacatatgttcactctctacagaaaaaacaattttccagaagacccgcacctatagaccaatctgcagagaaaacttctcttcttcaaaaaaaagtaaaagtgttctttcttaaaaaatgccctatttttcaacagtttggaaaataccatttgagcaagattctatacatctcaaataaaaagaatttaaaatgcacttccaggcaatcataatttgctagcataaatgatgagaaaccttggactatccaataggcaactgtagatcatgggtatgaaaccaccatggaggaagaattgcctcaaacaaaaaccaatagttttgtatttctttctaactatacatgtatattgttgagggttttctttagcatttattccctatgttaaattcttctttaatccttccctggtaaaaaaaaaaaaaaaaaaaaagttagaaa

SEQ ID NO: 179498 - DNA, 426 bp, Homo sapiens
  Payload ID: 15379
  Gene Symbol: SCGB2B2
  Gene Name: secretoglobin, family 2B, member 2
  Uniprot ID: Q4G0G5
  ENST ID: ENST00000379204
  CDS Start-End: 23-313
gctgggaccagactccgctgtcatgagggtgacatccgccacctgtgctcttctgctggctctgatctgcagcgtccagctgggggatgcctgcctggatatcgataaactgcttgcgaatgttgtgtttgatgtgtcccaagacctcctgaaggaggagcttgctcgttacaaccccagtcccctgacagaggagtccttcctcaatgtccagcaatgctttgccaatgtctccgtgacagaaagatttgctcattcagttgttattaagaagatccttcagagcaacgattgcatagaagcagccttctgatctgaggacccctgcagatcagatattggccctcctgccttccttggggctccccgcgttcctggcctggctctgttcatcactacagagaccccaatgaacacctgcagctc

SEQ ID NO: 179499 - DNA, 2505 bp, Homo sapiens
  Payload ID: 15379
  Gene Symbol: SCGB2B2
  Gene Name: secretoglobin, family 2B, member 2
  Uniprot ID: Q4G0G5
  ENST ID: ENST00000601241
  CDS Start-End: 2102-2392
agccagaccaggaacccaccagaaggaaccaattccggacacataacaagcagcagtgaggacaccaaagacacagacccagatgcagaggcagaggcagccacacagcccctcccagccacaatcacaacctcatattcatataatcacagaccctccaccccacatagtgggtggaatcctgccagcgcattccactcacacacacacaaaatcccattctcacacacgtgcacccaagcctcgtcccgcacacacaacatgacaggccacagagccggctgagagtctcagcacgcatggacgcctgcactgcgcaggttgcagcccaggctgcaggaccacaggtggcagggacgacacagcaggtggccggccagggagtggcagtggcctccatcctccctgctcagccacagcccctgcttcagcgtctgccagtccaactgtcaactcatccactcaactttacaactggaatgtgggggcgttcagggccctgccactggtgacggccactctaagtcctacccaatgctgggtaggtcctttaagaggcccaagtcctgggcgctactatgaggttctgtacgtgcacagtgatggctcatgcctggccgaggtgagcccactcagtctgggtggcacagcctaatctaggaactgctctgcggttctacatggctctcagcagcccagtgagtgtcctctgcaccgggcgtgtccctcaggtgctcctagccagaccctcccttgacacagtagggcacaaaccgctattggagcggcactggcacccgagtgtacaagcgtcagcatccctgctgccttccccacccccagctgtccccacctgctgattctgcccctggggtcacacttacaatttagggtcctgtcaggagacaaaaatcacgtgagtgacatcagctccctcatatgtaggtgctgggaaaagggcttgtggggtgcctgtataaactggccataaaaatacgggaataagttgtggaaagccacaaaaggcctctgaggaggaaagcctcctaattgccatcatgttcccatgctcagagcaagacccgctgtcttctctgtaaacactgtgctcagggagaaagacacttctttgaaacactggaatgtggacagacgtgcaggctcccagtcaaggccgctcctactagctactctccaacaagttaaagttatgctgtttgagcacaaaggagactcatttaaactgctattgctatagattatgcctgtgatgcactgccaccctttcactgtttctccctgaacatctgcttcttagatcgaagggactgtactcaataaatagtgtggagaccagagctcggcaccttttgcagcctccacattttgcactggccccctggctccccacctttcactcttaacttgtcttttctcaatcctttgtcaccaccagacttcgggtaccctacgggtagtgttgaggctggtccccaacatgtaggatcccttcactgtgtcacatgtgtccctaacacacttgctacatctcatgtcctttaggttctgtgttttactccagataatgttctttgaatctaaattacagtttactgatttctcaaaagctgcacctaatgtgctatccattcagacagacatactcacttagcaaatgtttgttgagccagcactcagtggcagattctgtgctagggcgtgccaagtgcagacacacgtttgccaagacacagggtcacatgtgcatgcacactcagacttgcaggcttacaccagtgttcagcctgctcccaatcccagggagctccagggaggacagagagaatgtcacaacacccaacccctcccactgcatgctgagtccagttcccgatacgctgccaccccaacagcatggcccagggccgagggtctctctgcagacctgccctgaccacattcacacacacacacacacacacacacacacacacacacacacacacacacacgaagaggcatgtgccttgttcagatatacataaagctcacccatcgccaaattccctgcctgtgcctgctgggaccagactccgctgtcatgagggtgacatccgccacctgtgctcttctgctggctctgatctgcagcgtccagctgggggatgcctgcctggatatcgataaactgcttgcgaatgttgtgtttgatgtgtcccaagacctcctgaaggaggagcttgctcgttacaaccccagtcccctgacagaggagtccttcctcaatgtccagcaatgctttgccaatgtctccgtgacagaaagatttgctcattcagttgttattaagaagatccttcagagcaacgattgcatagaagcagccttctgatctgaggacccctgcagatcagatattggccctcctgccttccttggggctccccgcgttcctggcctggctctgttcatcactacagagaccccaatgaacacctgcagctc

SEQ ID NO: 179500 - DNA, 521 bp, Homo sapiens
  Payload ID: 15380
  Gene Symbol: SCGB3A1
  Gene Name: secretoglobin, family 3A, member 1
  Uniprot ID: Q96QR1
  ENST ID: ENST00000292641
  CDS Start-End: 79-393
gcgaggaccgggtataagaagcctcgtggccttgcccgggcagccgcaggttccccgcgcgccccgagcccccgcgccatgaagctcgccgccctcctggggctctgcgtggccctgtcctgcagctccgctgctgctttcttagtgggctcggccaagcctgtggcccagcctgtcgctgcgctggagtcggcggcggaggccggggccgggaccctggccaaccccctcggcaccctcaacccgctgaagctcctgctgagcagcctgggcatccccgtgaaccacctcatagagggctcccagaagtgtgtggctgagctgggtccccaggccgtgggggccgtgaaggccctgaaggccctgctgggggccctgacagtgtttggctgagccgagactggagcatctacacctgaggacaagacgctgcccacccgcgagggctgaaaaccccgccgcggggaggaccgtccatccccttcccccggcccctctcaataaacgtggttaagagcagc

SEQ ID NO: 179501 - DNA, 515 bp, Homo sapiens
  Payload ID: 15381
  Gene Symbol: SCGB3A2
  Gene Name: secretoglobin, family 3A, member 2
  Uniprot ID: Q96PL1
  ENST ID: ENST00000296694
  CDS Start-End: 94-375
acactttgtatggcaagtggaaccactggcttggtggattttgctagatttttctgatttttaaactcctgaaaaatatcccagataactgtcatgaagctggtaactatcttcctgctggtgaccatcagcctttgtagttactctgctactgccttcctcatcaacaaagtgccccttcctgttgacaagttggcacctttacctctggacaacattcttccctttatggatccattaaagcttcttctgaaaactctgggcatttctgttgagcaccttgtggaggggctaaggaagtgtgtaaatgagctgggaccagaggcttctgaagctgtgaagaaactgctggaggcgctatcacacttggtgtgacatcaagataaagagcggaggtggatggggatggaagatgatgctcctatcctccctgcctgaaacctgttctaccaattatagatcaaatgccctaaaatgtagtgacccgtgaaaaggacaaataaagcaatgaatac

SEQ ID NO: 179502 - DNA, 440 bp, Homo sapiens
  Payload ID: 15381
  Gene Symbol: SCGB3A2
  Gene Name: secretoglobin, family 3A, member 2
  ENST ID: ENST00000504320
  CDS Start-End: 154-300
cataacctgcctttgctggtgtgtggcgattaggcctggtggaaccaccatcaataaatcaagcgtgatcaggctactgccttcctcatcaacaaagtgccccttcctgttgacaagttggcacctttacctctggacaacattcttccctttatggatccattaaagcttcttctgaaaactctgggcatttctgttgagcaccttgtggaggggctaaggaagtgtgtaaatgagctgggaccagaggcttctgaagctgtgaagaaactgctggaggcgctatcacacttggtgtgacatcaagataaagagcggaggtggatggggatggaagatgatgctcctatcctccctgcctgaaacctgttctaccaattatagatcaaatgccctaaaatgtagtgacccgtgaaaaggacaaataaagcaatgaatac

SEQ ID NO: 179503 - DNA, 2576 bp, Homo sapiens
  Payload ID: 15382
  Gene Symbol: SCG2
  Gene Name: secretogranin II
  Uniprot ID: P13521
  ENST ID: ENST00000305409
  CDS Start-End: 234-2087
aaatataaagtgattattttctcttggttctttgaaaaacctcgcttgtgctggggtttgtggctgaacccggtgacgtcagtgtggcagtgcggagtcaggcgcagcggctccctataagcagaggagctgtccgtgtgctgaaacggcccgagaagctcgcccggagaacggggaggaatatgctgtggagctcctctgccatataaacaaaaagaggaaatctttcaaacatggctgaagcaaagacccactggcttggagcagccctgtctcttatccctttaattttcctcatctctggggctgaagcagcttcatttcagagaaaccagctgcttcagaaagaaccagacctcaggttggaaaatgtccaaaagtttcccagtcctgaaatgatcagggctttggagtacatagaaaacctccgacaacaagctcataaggaagaaagcagcccagattataatccctaccaaggtgtctctgtcccccttcagcaaaaagaaaatggcgatgaaagccacttgcccgagagggattcactgagtgaagaagactggatgagaataatactcgaagctttgagacaggctgaaaatgagcctcagtctgcaccaaaagaaaataagccctatgccttgaattcagaaaagaactttccaatggacatgagtgatgattatgagacacagcagtggccagaaagaaagcttaagcacatgcaattccctcctatgtatgaagagaattccagggataacccctttaaacgcacaaatgaaatagtggaggaacaatatactcctcaaagccttgctacattggaatctgtcttccaagagctggggaaactgacaggaccaaacaaccagaaacgtgagaggatggatgaggagcaaaaactttatacggatgatgaagatgatatctacaaggctaataacattgcctatgaagatgtggtcgggggagaagactggaacccagtagaggagaaaatagagagtcaaacccaggaagaggtgagagacagcaaagagaatatagaaaaaaatgaacaaatcaacgatgagatgaaacgctcagggcagcttggcatccaggaagaagatcttcggaaagagagtaaagaccaactctcagatgatgtctccaaagtaattgcctatttgaaaaggttagtaaatgctgcaggaagtgggaggttacagaatgggcaaaatggggaaagggccaccaggctttttgagaaacctcttgattctcagtctatttatcagctgattgaaatctcaaggaatttacagatacccccagaagacttaattgagatgctcaaaactggggagaagccgaatggatcagtggaaccggagcgggagcttgaccttcctgttgacctagatgacatctcagaggctgacttagaccatccagacctgttccaaaataggatgctctccaagagtggctaccctaaaacacctggtcgtgctgggactgaggccctaccagacgggctcagtgttgaggatattttaaatcttttagggatggagagtgcagcaaatcagaaaacgtcgtattttcccaatccatataaccaggagaaagttctgccaaggctcccttatggtgctggaagatctagatcgaaccagcttcccaaagctgcctggattccacatgttgaaaacagacagatggcatatgaaaacctgaacgacaaggatcaagaattaggtgagtacttggccaggatgctagttaaataccctgagatcattaattcaaaccaagtgaagcgagttcctggtcaaggctcatctgaagatgacctgcaggaagaggaacaaattgagcaggccatcaaagagcatttgaatcaaggcagctctcaggagactgacaagctggccccggtgagcaaaaggttccctgtggggcccccgaagaatgatgataccccaaataggcagtactgggatgaagatctgttaatgaaagtgctggaatacctcaaccaagaaaaggcagaaaagggaagggagcatattgctaagagagcaatggaaaatatgtaagctgctttcattaattaccctactttcattcctcccaccccaagcaaatcccaacatttctcttcagtgtgttgacttctatcctgttaacactgtaatatctttaaatgatgtacaggcagatgaaaccaggtcactggggagtctgcttcatttcctctgagctgttatcttgtgtatggatatgtgtaaatgttatgactccttgataaaaaatttattatgtccattattcaagaaagatatctatgactgtgtttaatagtatatctaatggctgtggcattgttgatgctcacatatgataaaaaagtgtcctataattctattgaaagtttttaatatttattgaattattttgttactgtctgtagtgttttgtggagtactggaccaaaaaaataaagcattataaatatatagttttatttataaggccttttctattgtgtgttttactgttgattaataaatgttatttctggacaa

SEQ ID NO: 179504 - DNA, 589 bp, Homo sapiens
  Payload ID: 15382
  Gene Symbol: SCG2
  Gene Name: secretogranin II
  ENST ID: ENST00000421386
  CDS Start-End: 158-589
gtaaggctgcttttctctttgatttattggaaagttccaaattgcatgctcttcttttaattcctagctgagaagaaaaagactgtttggcaagcttatgtcgataggataactgaatagcaacctgctgctcatcagccaatgaaatctttcaaacatggctgaagcaaagacccactggcttggagcagccctgtctcttatccctttaattttcctcatctctggggctgaagcagcttcatttcagagaaaccagctgcttcagaaagaaccagacctcaggttggaaaatgtccaaaagtttcccagtcctgaaatgatcagggctttggagtacatagaaaacctccgacaacaagctcataaggaagaaagcagcccagattataatccctaccaaggtgtctctgtcccccttcagcaaaaagaaaatggcgatgaaagccacttgcccgagagggattcactgagtgaagaagactggatgagaataatactcgaagctttgagacaggctgaaaatgagcctcagtctgcaccaaaagaaaataagccctatgccttgaattcagaaaagaactttcca

SEQ ID NO: 179505 - DNA, 544 bp, Homo sapiens
  Payload ID: 15382
  Gene Symbol: SCG2
  Gene Name: secretogranin II
  ENST ID: ENST00000433889
  CDS Start-End: 168-544
gaaacggcccgagaagctcgcccggagaacggggaggaatatgctgtggagctcctctgccatataaacaaaaagagctgagaagaaaaagactgtttggcaagcttatgtcgataggataactgaatagcaacctgctgctcatcagccaatgaaatctttcaaacatggctgaagcaaagacccactggcttggagcagccctgtctcttatccctttaattttcctcatctctggggctgaagcagcttcatttcagagaaaccagctgcttcagaaagaaccagacctcaggttggaaaatgtccaaaagtttcccagtcctgaaatgatcagggctttggagtacatagaaaacctccgacaacaagctcataaggaagaaagcagcccagattataatccctaccaaggtgtctctgtcccccttcagcaaaaagaaaatggcgatgaaagccacttgcccgagagggattcactgagtgaagaagactggatgagaataatactcgaagctttgagacaggctgaaaatgagcctca

SEQ ID NO: 179506 - DNA, 3315 bp, Homo sapiens
  Payload ID: 15383
  Gene Symbol: SCG3
  Gene Name: secretogranin III
  Uniprot ID: Q8WXD2
  ENST ID: ENST00000220478
  CDS Start-End: 404-1810
gttccattcccgggggattggagtagcgttggagtcaccgacgccatcccctcccgcctctggcgtgcatggagcatgcgcttccttcctcacttcctctgcaggagggagcgagagtaaagctacgccctggcgcgcagtctccgcgtcacaggaacttcagcacccacagggcggacagcgctcccctctacctggagacttgactcccgcgcgccccaaccctgcttatcccttgaccgtcgagtgtcagagatcctgcagccgcccagtcccggcccctctcccgccccacacccaccctcctggctcttcctgtttttactcctccttttcattcataacaaaagctacagctccaggagcccagcgccgggctgtgacccaagccgagcgtggaagaatggggttcctcgggaccggcacttggattctggtgttagtgctcccgattcaagctttccccaaacctggaggaagccaagacaaatctctacataatagagaattaagtgcagaaagacctttgaatgaacagattgctgaagcagaagaagacaagattaaaaaaacatatcctccagaaaacaagccaggtcagagcaactattcttttgttgataacttgaacctgctaaaggcaataacagaaaaggaaaaaattgagaaagaaagacaatctataagaagctccccacttgataataagttgaatgtggaagatgttgattcaaccaagaatcgaaaactgatcgatgattatgactctactaagagtggattggatcataaatttcaagatgatccagatggtcttcatcaactagacgggactcctttaaccgctgaagacattgtccataaaatcgctgccaggatttatgaagaaaatgacagagccgtgtttgacaagattgtttctaaactacttaatctcggccttatcacagaaagccaagcacatacactggaagatgaagtagcagaggttttacaaaaattaatctcaaaggaagccaacaattatgaggaggatcccaataagcccacaagctggactgagaatcaggctggaaaaataccagagaaagtgactccaatggcagcaattcaagatggtcttgctaagggagaaaacgatgaaacagtatctaacacattaaccttgacaaatggcttggaaaggagaactaaaacctacagtgaagacaactttgaggaactccaatatttcccaaatttctatgcgctactgaaaagtattgattcagaaaaagaagcaaaagagaaagaaacactgattactatcatgaaaacactgattgactttgtgaagatgatggtgaaatatggaacaatatctccagaagaaggtgtttcctaccttgaaaacttggatgaaatgattgctcttcagaccaaaaacaagctagaaaaaaatgctactgacaatataagcaagcttttcccagcaccatcagagaagagtcatgaagaaacagacagtaccaaggaagaagcagctaagatggaaaaggaatatggaagcttgaaggattccacaaaagatgataactccaacccaggaggaaagacagatgaacccaaaggaaaaacagaagcctatttggaagccatcagaaaaaatattgaatggttgaagaaacatgacaaaaagggaaataaagaagattatgacctttcaaagatgagagacttcatcaataaacaagctgatgcttatgtggagaaaggcatccttgacaaggaagaagccgaggccatcaagcgcatttatagcagcctgtaaaaatggcaaaagatccaggagtctttcaactgtttcagaaaacataatatagcttaaaacacttctaattctgtgattaaaattttttgacccaagggttattagaaagtgctgaatttacagtagttaaccttttacaagtggttaaaacatagctttcttcccgtaaaaactatctgaaagtaaagttgtatgtaagctgagattttgtatacagaatccttatttcctcatagacttatattttataatcagaatatgttgctttgaaaaagcctctaatggactgaccttaaaactcatccttcttccactgtctcatccacataagcactccccgaagaattaagggggttctgttttcaaggcatgccaagtactaaagcaccttgcagagcgtgtctattacaagatgtcatttccaccagcagttcccttaggggagctgaaataaattcacattttctcaaagtctcatagctttggaggagccatctgcttttttggctgctctttttagctggctttttattaggctcagtgacataaaaaggatccaggtaaatgggtataggatttgctggatttactaacaatttccccctgttcttaacacttcctattagtgacttttcagacattgagtttacttataaagagagatatttatgtactctctaagaagacaaatgaggtcataaacactgcataaagcaaggcaaaaatgtatgccacatctcagttatctaaactagattagatccaagccaagttttctcaacagagagcaaagggccaggcagtaaggtagaaatagagataaaaatcattccttccttgtgatccaaagctggtcgagcagctttcctggaggaaaaggttaatgaacttcaggtccctgcaactcagcccccaccacaaacacagccctggaaacatacagtggcgcaaggtcctcttgaaatgttaatggttaatgttcccaaaccagagaatgctttgaaaatgtatcattcagtgtaaattaattacatacatatttttctatatatttgtttcaaactgtaaaaataacataatatgtaatttgtgtattagtgagaggtgaagccagctggacttcctgggtcgagtggggccttggagaacttttctgtcttacaagaggattgtaaaatgcacccatcagtgctctgtaaaacacaccaatcagcgctctgtagctagcaataggtttgtaaaatgcacccatcagcactctgtaaaacgcaccaatcagcactctgtaaaatgcaccaatcagcaggattctaaaagtagacaatcacagggaggattgaaaaaaagggcactctgatagggcaaaaacggaacatgggaggggacaaataagggaataaaatctggccaccccagccagcagcagcaacctgttcaggtcgcctgccgctgtggaagctttgtccttttgctcttcataataaaccttgctactgttcactctt

SEQ ID NO: 179507 - DNA, 2163 bp, Homo sapiens
  Payload ID: 15383
  Gene Symbol: SCG3
  Gene Name: secretogranin III
  Uniprot ID: Q8WXD2
  ENST ID: ENST00000542355
  CDS Start-End: 908-1618
gtctccgcgtcacaggaacttcagcacccacagggcggacagcgctcccctctacctggagacttgactcccgcgcgccccaaccctgcttatcccttgaccgtcgagtgtcagagatcctgcagccgcccagtcccggcccctctcccgccccacacccaccctcctggctcttcctgtttttactcctccttttcattcataacaaaagctacagctccaggagcccagcgccgggctgtgacccaagccgagcgtggaagaatggggttcctcgggaccggcacttggattctggtgttagtgctcccgattcaagctttccccaaacctggaggaagccaagattgctgaagcagaagaagacaagattaaaaaaacatatcctccagaaaacaagccaggtcagagcaactattcttttgttgataacttgaacctgctaaaggcaataacagaaaaggaaaaaattgagaaagaaagacaatctataagaagctccccacttgataataagttgaatgtggaagatgttgattcaaccaagaatcgaaaactgatcgatgattatgactctactaagagtggattggatcataaatttcaagatgatccagatggtcttcatcaactagacgggactcctttaaccgctgaagacattgtccataaaatcgctgccaggatttatgaagaaaatgacagagccgtgtttgacaagattgtttctaaactacttaatctcggccttatcacagaaagccaagcacatacactggaagatgaagtagcagaggttttacaaaaattaatctcaaaggaagccaacaattatgaggaggatcccaataagcccacaagctggactgagaatcaggctggaaaaataccagagaaagtgactccaatggcagcaattcaagatggtcttgctaagggagaaaacgatgaaacagtatctaacacattaaccttgacaaatggcttggaaaggagaactaaaacctacagtgaagacaactttgaggaactccaatatttcccaaatttctatgcgctactgaaaagtattgattcagaaaaagaagcaaaagagaaagaaacactgattactatcatgaaaacactgattgactttgtgaagatgatggtgaaatatggaacaatatctccagaagaaggtgtttcctaccttgaaaacttggatgaaatgattgctcttcagaccaaaaacaagctagaaaaaaatgctactgacaatataagcaagcttttcccagcaccatcagagaagagtcatgaagaaacagacagtaccaaggaagaagcagctaagatggaaaaggaatatggaagcttgaaggattccacaaaagatgataactccaacccaggaggaaagacagatgaacccaaaggaaaaacagaagcctatttggaagccatcagaaaaaatattgaatggttgaagaaacatgacaaaaagggaaataaagaagattatgacctttcaaagatgagagacttcatcaataaacaagctgatgcttatgtggagaaaggcatccttgacaaggaagaagccgaggccatcaagcgcatttatagcagcctgtaaaaatggcaaaagatccaggagtctttcaactgtttcagaaaacataatatagcttaaaacacttctaattctgtgattaaaattttttgacccaagggttattagaaagtgctgaatttacagtagttaaccttttacaagtggttaaaacatagctttcttcccgtaaaaactatctgaaagtaaagttgtatgtaagctgagattttgtatacagaatccttatttcctcatagacttatattttataatcagaatatgttgctttgaaaaagcctctaatggactgaccttaaaactcatccttcttccactgtctcatccacataagcactccccgaagaattaagggggttctgttttcaaggcatgccaagtactaaagcaccttgcagagcgtgtctattacaagatgtcatttccaccagcagttcccttaggggagctgaaataaattcacattttctcaaagtctcatagctttggaggagccatctgcttttttggctgctctttttagctggctttttattaggctcagtgac

SEQ ID NO: 179508 - DNA, 896 bp, Homo sapiens
  Payload ID: 15383
  Gene Symbol: SCG3
  Gene Name: secretogranin III
  ENST ID: ENST00000558709
  CDS Start-End: 725-896
agcgctcccctctacctggagacttgactcccgcgcgccccaaccctgcttatcccttgaccgtcgagtgtcagagatcctgcagccgcccagtcccggcccctctcccgccccacacccaccctcctggctcttcctgtttttactcctccttttcattcataacaaaagctacagctccaggagcccagcgccgggctgtgacccaagccgagcgtggaagaatggggttcctcgggaccggcacttggattctggtgttagtgctcccgattcaagctttccccaaacctggaggaagccaagattgctgaagcagaagaagacaagattaaaaaaacatatcctccagaaaacaagccaggtcagagcaactattcttttgttgataacttgaacctgctaaaggcaataacagaaaaggaaaaaattgagaaagaaagacaatctataagaagctccccacttgataataagttgaatgtggaagatgttgattcaaccaagaatcgaaaactgatcgatgattatgactctactaagagtggattggatcataaatttcaagatcacagaaagccaagcacatacactggaagatgaagtagcagaggttttacaaaaattaatctcaaaggaagccaacaattatgaggaggatcccaataagcccacaagctggactgagaatcaggctggaaaaataccagagaaagtgactccaatggcagcaattcaagatggtcttgctaagggagaaaacgatgaaacagtatctaacacattaaccttgacaaatggcttggaaaggagaactaaaacctacagtgaagacaactttgaggaactccaatatttcccaaatttctatgcgctactgaaaagtattgattcag

SEQ ID NO: 179509 - DNA, 1238 bp, Homo sapiens
  Payload ID: 15384
  Gene Symbol: SCG5
  Gene Name: secretogranin V
  Uniprot ID: P05408
  ENST ID: ENST00000300175
  CDS Start-End: 111-749
taagatgcggaggagggtgacgcactagctctccagttcgcccgttcctggcctgacccccaccaaggcccataccgcagtaggctcctcgggctgcccctcggttgacaatggtctccaggatggtctctaccatgctatctggcctactgttttggctggcatctggatggactccagcatttgcttacagcccccggacccctgaccgggtctcagaagcagatatccagaggctgcttcatggtgttatggagcaattgggcattgccaggccccgagtggaatatccagctcaccaggccatgaatcttgtgggcccccagagcattgaaggtggagctcatgaaggacttcagcatttgggtccttttggcaacatccccaacatcgtggcagagttgactggagacaacattcctaaggactttagtgaggatcaggggtacccagaccctccaaatccctgtcctgttggaaaaacagcagatgatggatgtctagaaaacacccctgacactgcagagttcagtcgagagttccagttgcaccagcatctctttgatccggaacatgactatccaggcttgggcaagtggaacaagaaactcctttacgagaagatgaagggaggagagagacgaaagcggaggagtgtcaatccatatctacaaggacagagactggataatgttgttgcaaagaagtctgtcccccatttttcagatgaggataaggatccagagtaaagagaagatgctagacgaaaacccacattacctgttaggcctcagcatggcttatgtgcacgtgtaaatggagtccctgtgaatgacagcatgtttcttacatagataattatggatacaaagcagctgtatgtagatagtgtattgtcttcacaccgatgattctgctttttgctaaattagaataagagcttttttgtttcttgggtttttaaaatgtgaatctgcaatgatcataaaaattaaaatgtgaatgtcaacaataaaaagcaagactatgaaaggctcagatttcttgcagtttaaaatggtgtctgaggttgtactattttggccaagtctgtagaaagctgtcatttgattttgattatgtagttcatccagcccttgggcattgttatacaccagtaaagaaggctgtactcaagaggaggagctgacacatttcacttggctgcgtcttaataaacatgaatgcaagcattggca

SEQ ID NO: 179510 - DNA, 1235 bp, Homo sapiens
  Payload ID: 15384
  Gene Symbol: SCG5
  Gene Name: secretogranin V
  Uniprot ID: P05408
  ENST ID: ENST00000413748
  CDS Start-End: 111-746
taagatgcggaggagggtgacgcactagctctccagttcgcccgttcctggcctgacccccaccaaggcccataccgcagtaggctcctcgggctgcccctcggttgacaatggtctccaggatggtctctaccatgctatctggcctactgttttggctggcatctggatggactccagcatttgcttacagcccccggacccctgaccgggtctcagaagcagatatccagaggctgcttcatggtgttatggagcaattgggcattgccaggccccgagtggaatatccagctcaccaggccatgaatcttgtgggcccccagagcattgaaggtggagctcatgaaggacttcagcatttgggtccttttggcaacatccccaacatcgtggcagagttgactggagacaacattcctaaggactttagtgaggatcaggggtacccagaccctccaaatccctgtcctgttggaaaaacagatgatggatgtctagaaaacacccctgacactgcagagttcagtcgagagttccagttgcaccagcatctctttgatccggaacatgactatccaggcttgggcaagtggaacaagaaactcctttacgagaagatgaagggaggagagagacgaaagcggaggagtgtcaatccatatctacaaggacagagactggataatgttgttgcaaagaagtctgtcccccatttttcagatgaggataaggatccagagtaaagagaagatgctagacgaaaacccacattacctgttaggcctcagcatggcttatgtgcacgtgtaaatggagtccctgtgaatgacagcatgtttcttacatagataattatggatacaaagcagctgtatgtagatagtgtattgtcttcacaccgatgattctgctttttgctaaattagaataagagcttttttgtttcttgggtttttaaaatgtgaatctgcaatgatcataaaaattaaaatgtgaatgtcaacaataaaaagcaagactatgaaaggctcagatttcttgcagtttaaaatggtgtctgaggttgtactattttggccaagtctgtagaaagctgtcatttgattttgattatgtagttcatccagcccttgggcattgttatacaccagtaaagaaggctgtactcaagaggaggagctgacacatttcacttggctgcgtcttaataaacatgaatgcaagcattggca

SEQ ID NO: 179511 - DNA, 1148 bp, Homo sapiens
  Payload ID: 15384
  Gene Symbol: SCG5
  Gene Name: secretogranin V
  ENST ID: ENST00000494364
  CDS Start-End: 88-669
actagctctccagttcgcccgttcctggcctgacccccaccaaggcccataccgcagtaggctcctcgggctgcccctcggttgacaatggtctccaggatggtctctaccatgctatctggcctactgttttggctggcatctggatggactccagcatttgcttacagcccccggacccctgaccgggtctcagaagcagatatccagaggctgcttcatggtgttatggagcaattgggcattgccaggccccgagtggaatatccagctcaccaggccatgaatcttgtgggcccccagagcattgaaggtggagctcatgaaggacttcagcatttgggtccttttggcaacatccccaacatcgtggcagagttgactggagacaacattcctaaggactttagtgaggatcaggggtacccagaccctccaaatccctgtcctgttggaaaaacagatgatggatgtctagaaaacacccctgacactgcagagttcagtcgagagttccagttgcaccagcatctctttgatccggaacatgactatccaggcttgggcaagtggagtgtcaatccatatctacaaggacagagactggataatgttgttgcaaagaagtctgtcccccatttttcagatgaggataaggatccagagtaaagagaagatgctagacgaaaacccacattacctgttaggcctcagcatggcttatgtgcacgtgtaaatggagtccctgtgaatgacagcatgtttcttacatagataattatggatacaaagcagctgtatgtagatagtgtattgtcttcacaccgatgattctgctttttgctaaattagaataagagcttttttgtttcttgggtttttaaaatgtgaatctgcaatgatcataaaaattaaaatgtgaatgtcaacaataaaaagcaagactatgaaaggctcagatttcttgcagtttaaaatggtgtctgaggttgtactattttggccaagtctgtagaaagctgtcatttgattttgattatgtagttcatccagcccttgggcattgttatacaccagtaaagaaggctgtactcaagaggaggagctgacacatttcacttggctgcgtcttaataaacatgaatgca

SEQ ID NO: 179512 - DNA, 659 bp, Homo sapiens
  Payload ID: 15384
  Gene Symbol: SCG5
  Gene Name: secretogranin V
  ENST ID: ENST00000471027
  CDS Start-End: 1-651
tctggcctactgttttggctggcatctggatggactccagcatttgcttacagcccccggacccctgaccgggtctcagaagcagatatccagaggctgcttcatggtgttatggagcaattgggcattgccaggccccgagtggaatatccagctcaccaggccatgaatcttgtgggcccccagagcattgaaggtggagctcatgaaggacttcagcatttgggtccttttggcaacatccccaacatcgtggcagagttgactggagacaacattcctaaggactttagtgaggatcaggggtacccagaccctccaaatccctgtcctgttggaaaaacagcagatgatggatgtctagaaaacacccctgacactgcagagttcagtcgagagttccagttgcaccagcatctctttgatccggaacatgactatccaggcttgggcaagtggaacaagaaactcctttacgagaagatgaagggaggagagagacgaaagcggagggtaacacgtgcctggctggattgttgcggggatgcttggagctttctgagtggggcagtgaacaggctgaaaccctcgcttgttgggaagtcacagaatcctcccttgtgtagtcctgagaaacactggtccatgtgacaagggcc

SEQ ID NO: 179513 - DNA, 949 bp, Homo sapiens
  Payload ID: 15384
  Gene Symbol: SCG5
  Gene Name: secretogranin V
  ENST ID: ENST00000497208
  CDS Start-End: 85-669
agctctccagttcgcccgttcctggcctgacccccaccaaggcccataccgcagtaggctcctcgggctgcccctcggttgacaatggtctccaggatggtctctaccatgctatctggcctactgttttggctggcatctggatggactccagcatttgcttacagcccccggacccctgaccgggtctcagaagcagatatccagaggctgcttcatggtgttatggagcaattgggcattgccaggccccgagtggaatatccagctcaccaggccatgaatcttgtgggcccccagagcattgaaggtggagctcatgaaggacttcagcatttgggtccttttggcaacatccccaacatcgtggcagagttgactggagacaacattcctaaggactttagtgaggatcaggggtacccagaccctccaaatccctgtcctgttggaaaaacagcagatgatggatgtctagaaaacacccctgacactgcagagttcagtcgagagttccagttgcaccagcatctctttgatccggaacatgactatccaggcttgggcaagtggagtgtcaatccatatctacaaggacagagactggataatgttgttgcaaagaagtctgtcccccatttttcagatgaggataaggatccagagtaaagagaagatgctagacgaaaacccacattacctgttaggcctcagcatggcttatgtgcacgtgtaaatggagtccctgtgaatgacagcatgtttcttacatagataattatggatacaaagcagctgtatgtagatagtgtattgtcttcacaccgatgattctgctttttgctaaattagaataagagcttttttgtttcttgggtttttaaaatgtgaatctgcaatgatcataaaaattaaaatgtgaatgtcaacaataaaaagcaagactatg

SEQ ID NO: 179514 - DNA, 1244 bp, Homo sapiens
  Payload ID: 15384
  Gene Symbol: SCG5
  Gene Name: secretogranin V
  ENST ID: ENST00000614359
  CDS Start-End: 118-756
gcggagctaagatgcggaggagggtgacgcactagctctccagttcgcccgttcctggcctgacccccaccaaggcccataccgcagtaggctcctcgggctgcccctcggttgacaatggtctccaggatggtctctaccatgctatctggcctactgttttggctggcatctggatggactccagcatttgcttacagcccccggacccctgaccgggtctcagaagcagatatccagaggctgcttcatggtgttatggagcaattgggcattgccaggccccgagtggaatatccagctcaccaggccatgaatcttgtgggcccccagagcattgaaggtggagctcatgaaggacttcagcatttgggtccttttggcaacatccccaacatcgtggcagagttgactggagacaacattcctaaggactttagtgaggatcaggggtacccagaccctccaaatccctgtcctgttggaaaaacagcagatgatggatgtctagaaaacacccctgacactgcagagttcagtcgagagttccagttgcaccagcatctctttgatccggaacatgactatccaggcttgggcaagtggaacaagaaactcctttacgagaagatgaagggaggagagagacgaaagcggaggagtgtcaatccatatctacaaggacagagactggataatgttgttgcaaagaagtctgtcccccatttttcagatgaggataaggatccagagtaaagagaagatgctagacgaaaacccacattacctgttaggcctcagcatggcttatgtgcacgtgtaaatggagtccctgtgaatgacagcatgtttcttacatagataattatggatacaaagcagctgtatgtagatagtgtattgtcttcacaccgatgattctgctttttgctaaattagaataagagcttttttgtttcttgggtttttaaaatgtgaatctgcaatgatcataaaaattaaaatgtgaatgtcaacaataaaaagcaagactatgaaaggctcagatttcttgcagtttaaaatggtgtctgaggttgtactattttggccaagtctgtagaaagctgtcatttgattttgattatgtagttcatccagcccttgggcattgttatacaccagtaaagaaggctgtactcaagaggaggagctgacacatttcacttggctgcgtcttaataaacatgaatgcaagcattggc

SEQ ID NO: 179515 - DNA, 659 bp, Homo sapiens; identical to SEQ ID NO: 179512
  Payload ID: 15384
  Gene Symbol: SCG5
  Gene Name: Secretogranin V
  ENST ID: ENST00000633221
  CDS Start-End: 1-651

SEQ ID NO: 179516 - DNA, 1238 bp, Homo sapiens
  Payload ID: 15384
  Gene Symbol: SCG5
  Gene Name: Secretogranin V
  ENST ID: ENST00000632219
  CDS Start-End: 111-749
taagatgcggaggagggtgacgcactagctctccagttcgcccgttcctggcctgacccccaccaaggcccataccgctgtaggctcctcgggctgcccctcggttgacaatggtctccaggatggtctctaccatgctatctggcctactgttttggctggcatctggatggactccagcatttgcttacagcccccggacccctgaccgggtctcagaagcagatatccagaggctgcttcatggtgttatggagcaattgggcattgccaggccccgagtggaatatccagctcaccaggccatgaatcttgtgggcccccagagcattgaaggtggagctcatgaaggacttcagcatttgggtccttttggcaacatccccaacatcgtggcagagttgactggagacaacattcctaaggactttagtgaggatcaggggtacccagaccctccaaatccctgtcctgttggaaaaacagcagatgatggatgtctagaaaacacccctgacactgcagagttcagtcgagagttccagttgcaccagcatctctttgatccggaacatgactatccaggcttgggcaagtggaacaagaaactcctttacgagaagatgaagggaggagagagacgaaagcggaggagtgtcaatccatatctacaaggacagagactggataatgttgttgcaaagaagtctgtcccccatttttcagatgaggataaggatccagagtaaagagaagatgctagacgaaaacccacattacctgttaggcctcagcatggcttatgtgcacgtgtaaatggagtccctgtgaatgacagcatgtttcttacatagataattatggatacaaagcagctgtatgtagatagtgtattgtcttcacaccgatgattctgctttttgctaaattagaataagagcttttttgtttcttgggtttttaaaatgtgaatctgcaatgatcataaaaattaaaatgtgaatgtcaacaataaaaagcaagactatgaaaggctcagatttcttgcagtttaaaatggtgtctgaggttgtactattttggccaagtctgtagaaagctgtcatttgattttgattatgtagttcatccagcccttgggcattgttatacaccagtaaagaaggctgtactcaagaggaggagctgacacatttcacttggctgcgtcttaataaacatgaatgcaagcattggca

SEQ ID NO: 179517 - DNA, 1235 bp, Homo sapiens
  Payload ID: 15384
  Gene Symbol: SCG5
  Gene Name: Secretogranin V
  ENST ID: ENST00000632674
  CDS Start-End: 111-746
taagatgcggaggagggtgacgcactagctctccagttcgcccgttcctggcctgacccccaccaaggcccataccgctgtaggctcctcgggctgcccctcggttgacaatggtctccaggatggtctctaccatgctatctggcctactgttttggctggcatctggatggactccagcatttgcttacagcccccggacccctgaccgggtctcagaagcagatatccagaggctgcttcatggtgttatggagcaattgggcattgccaggccccgagtggaatatccagctcaccaggccatgaatcttgtgggcccccagagcattgaaggtggagctcatgaaggacttcagcatttgggtccttttggcaacatccccaacatcgtggcagagttgactggagacaacattcctaaggactttagtgaggatcaggggtacccagaccctccaaatccctgtcctgttggaaaaacagatgatggatgtctagaaaacacccctgacactgcagagttcagtcgagagttccagttgcaccagcatctctttgatccggaacatgactatccaggcttgggcaagtggaacaagaaactcctttacgagaagatgaagggaggagagagacgaaagcggaggagtgtcaatccatatctacaaggacagagactggataatgttgttgcaaagaagtctgtcccccatttttcagatgaggataaggatccagagtaaagagaagatgctagacgaaaacccacattacctgttaggcctcagcatggcttatgtgcacgtgtaaatggagtccctgtgaatgacagcatgtttcttacatagataattatggatacaaagcagctgtatgtagatagtgtattgtcttcacaccgatgattctgctttttgctaaattagaataagagcttttttgtttcttgggtttttaaaatgtgaatctgcaatgatcataaaaattaaaatgtgaatgtcaacaataaaaagcaagactatgaaaggctcagatttcttgcagtttaaaatggtgtctgaggttgtactattttggccaagtctgtagaaagctgtcatttgattttgattatgtagttcatccagcccttgggcattgttatacaccagtaaagaaggctgtactcaagaggaggagctgacacatttcacttggctgcgtcttaataaacatgaatgcaagcattggca

SEQ ID NO: 179518 - DNA, 949 bp, Homo sapiens
  Payload ID: 15384
  Gene Symbol: SCG5
  Gene Name: Secretogranin V
  ENST ID: ENST00000633420
  CDS Start-End: 85-669
agctctccagttcgcccgttcctggcctgacccccaccaaggcccataccgctgtaggctcctcgggctgcccctcggttgacaatggtctccaggatggtctctaccatgctatctggcctactgttttggctggcatctggatggactccagcatttgcttacagcccccggacccctgaccgggtctcagaagcagatatccagaggctgcttcatggtgttatggagcaattgggcattgccaggccccgagtggaatatccagctcaccaggccatgaatcttgtgggcccccagagcattgaaggtggagctcatgaaggacttcagcatttgggtccttttggcaacatccccaacatcgtggcagagttgactggagacaacattcctaaggactttagtgaggatcaggggtacccagaccctccaaatccctgtcctgttggaaaaacagcagatgatggatgtctagaaaacacccctgacactgcagagttcagtcgagagttccagttgcaccagcatctctttgatccggaacatgactatccaggcttgggcaagtggagtgtcaatccatatctacaaggacagagactggataatgttgttgcaaagaagtctgtcccccatttttcagatgaggataaggatccagagtaaagagaagatgctagacgaaaacccacattacctgttaggcctcagcatggcttatgtgcacgtgtaaatggagtccctgtgaatgacagcatgtttcttacatagataattatggatacaaagcagctgtatgtagatagtgtattgtcttcacaccgatgattctgctttttgctaaattagaataagagcttttttgtttcttgggtttttaaaatgtgaatctgcaatgatcataaaaattaaaatgtgaatgtcaacaataaaaagcaagactatg

SEQ ID NO: 179519 - DNA, 1148 bp, Homo sapiens
  Payload ID: 15384
  Gene Symbol: SCG5
  Gene Name: Secretogranin V
  ENST ID: ENST00000632955
  CDS Start-End: 88-669
actagctctccagttcgcccgttcctggcctgacccccaccaaggcccataccgctgtaggctcctcgggctgcccctcggttgacaatggtctccaggatggtctctaccatgctatctggcctactgttttggctggcatctggatggactccagcatttgcttacagcccccggacccctgaccgggtctcagaagcagatatccagaggctgcttcatggtgttatggagcaattgggcattgccaggccccgagtggaatatccagctcaccaggccatgaatcttgtgggcccccagagcattgaaggtggagctcatgaaggacttcagcatttgggtccttttggcaacatccccaacatcgtggcagagttgactggagacaacattcctaaggactttagtgaggatcaggggtacccagaccctccaaatccctgtcctgttggaaaaacagatgatggatgtctagaaaacacccctgacactgcagagttcagtcgagagttccagttgcaccagcatctctttgatccggaacatgactatccaggcttgggcaagtggagtgtcaatccatatctacaaggacagagactggataatgttgttgcaaagaagtctgtcccccatttttcagatgaggataaggatccagagtaaagagaagatgctagacgaaaacccacattacctgttaggcctcagcatggcttatgtgcacgtgtaaatggagtccctgtgaatgacagcatgtttcttacatagataattatggatacaaagcagctgtatgtagatagtgtattgtcttcacaccgatgattctgctttttgctaaattagaataagagcttttttgtttcttgggtttttaaaatgtgaatctgcaatgatcataaaaattaaaatgtgaatgtcaacaataaaaagcaagactatgaaaggctcagatttcttgcagtttaaaatggtgtctgaggttgtactattttggccaagtctgtagaaagctgtcatttgattttgattatgtagttcatccagcccttgggcattgttatacaccagtaaagaaggctgtactcaagaggaggagctgacacatttcacttggctgcgtcttaataaacatgaatgca

SEQ ID NO: 179520 - DNA, 1276 bp, Homo sapiens
  Payload ID: 15385
  Gene Symbol: SCAMP1
  Gene Name: secretory carrier membrane protein 1
  Uniprot ID: O15126
  ENST ID: ENST00000614488
  CDS Start-End: 62-535
ggcctcgcctcgtctctctctctgcgcctgggtcgggtgggtgacgccgagagccagagagatgtcggatttcgacagtaacccgtttgccgacccggatctcaacaatcccttcaaggatccatcagttacacaagtgacaagaaatgttccaccaggacttgatgaatataatccattctcggattctagaacacctccaccaggcggtgtgaagatgcctaatgtacccaatacacaaccagcaataatgaaaccaacagaggaacatccagcttatacacagattgcaaaggaacatgcattggcccaagctgaacttcttaagcgccaggaagaactagaaagaaaagccgcagaattagatcgtcgggaacgagaaatgcaaaacctcagtcaacatggtagaaaaaataattggccacctcttcctagcaattttcctgtcggaccttgtttctatcaggatttttctgtagacattcctgtagaattccaaaagacagtaaagcttatgtactacttgtggatgtgagtgacagttcatttagattctttgtattcttcttcgtctatatttgtcagtttgctgtacatgtactccaagctgcaggatttcataactggggcaattgtggttggatttcatcccttactggtctcaaccaaaatattcctgttggaatcatgatgataatcatagcagcacttttcacagcatcagcagtcatctcactagttatgttcaaaaaagtacatggactatatcgcacaacaggtgctagttttgagaaggcccaacaggagtttgcaacaggtgtgatgtccaacaaaactgtccagaccgcagctgcaaatgcagcttcaactgcagcatctagtgcagctcagaatgctttcaagggtaaccagatttaagaatcttcaaacaatacactgttaccttttgactgtacctttttctccagttactgtattctacaaatatttttatgttcaaaacacacagtacagacagcatggatatttcctgttcacttgtgcatgggctaaaaccaggaaaacttccttgtcttattactttacctaatagtttcttaatatttcagtgccccttgcagaaaaaatattacatgctaaataaatattctccatatttttgggggatgacattcagtgaattatttcagtggtgacccactgaaaattaataatggtacttatgattaaaaacgcatttaatactaactgcagtagttctttcaagaatctttag

SEQ ID NO: 179521 - DNA, 477 bp, Homo sapiens
  Payload ID: 15385
  Gene Symbol: SCAMP1
  Gene Name: secretory carrier membrane protein 1
  ENST ID: ENST00000510030
  CDS Start-End: 352-477
actgcgtctgcccctcggctccccttagcagcccagagaggggcgcggggccgccgtcctccatttggggtcgcgccccggccccgtgtcactcctttgggttttggggcttgggggtggaacctcctcagctcgtgcccggtcgcccttccacacgtccccgactggtgagggtcgtgtctgcagccgggactgggcccgcgcgcccggaggggtcctggcccgcctctcaggagagaaagccgagggcaggatccatcagttacacaagtgacaagaaatgttccaccaggacttgatgaatataatccattctcggattctagaacacctccaccaggcggtgtgaagatgcctaatgtacccaatacacaaccagcaataatgaaaccaacagaggaacatccagcttatacacagattgcaaaggaacatgcattggcccaagctgaacttcttaagcgccaggaagaacta

SEQ ID NO: 179522 - DNA, 3766 bp, Homo sapiens
  Payload ID: 15385
  Gene Symbol: SCAMP1
  Gene Name: secretory carrier membrane protein 1
  ENST ID: ENST00000320280
  CDS Start-End: 1-619
agaattagatcgtcgggaacgagaaatgcaaaacctcagtcaacatggtagaaaaaataattggccacctcttcctagcaattttcctgtcggaccttgtttctatcaggatttttctgtagacattcctgtagaattccaaaagacagtaaagcttatgtactacttgtggatgttccatgcagtaacactgtttctaaatatcttcggatgcttggcttggttttgtgttgattctgcaagagcggttgattttggattgagtatcctgtggttcttgctttttactccttgttcatttgtctgttggtacagaccactttatggagctttcagtggttggatttcatcccttactggtctcaaccaaaatattcctgttggaatcatgatgataatcatagcagcacttttcacagcatcagcagtcatctcactagttatgttcaaaaaagtacatggactatatcgcacaacaggtgctagttttgagaaggcccaacaggagtttgcaacaggtgtgatgtccaacaaaactgtccagaccgcagctgcaaatgcagcttcaactgcagcatctagtgcagctcagaatgctttcaagggtaaccagatttaagaatcttcaaacaatacactgttaccttttgactgtacctttttctccagttactgtattctacaaatatttttatgttcaaaacacacagtacagacagcatggatatttcctgttcacttgtgcatgggctaaaaccaggaaaacttccttgtcttattactttacctaatagtttcttaatatttcagtgccccttgcagaaaaaatattacatgctaaataaatattctccatatttttgggggatgacattcagtgaattatttcagtggtgacccactgaaaattaataatggtacttatgattaaaaacgcatttaatactaactgcagtagttctttcaagaatctttagagataaggattgcacattggaaaagtaaaccatgtttcattcctttttccctatttatattgaaagaaataggccagcagagacttagggattttaaattggcttgctttttagctgtttcagtcaccagtgaagagcctatgtgcattttgtagtagataatgtaaaatttgtcatctttttcttttcttttttttagaatagctgatattttgataacaatctctaatttgcatgggcaccacatttcttatattaaaagaattagtgttttggcttctgtactgcttatggttgtaggattcaggggttaatggaatcacagaaatgatattctgcaagaatttcttttaaataaaaagtttgggggtgcaatataagaagtttatataatatgcagtacattatccaaaagagaaggtagttaatgcagtagaaagtagtggtaataattcctttttaaaaaaatttcggtagtcatatagtaacattttgctatatgaaaactttggtatattctgtggttacaactaagattgtgtctggcagctcttttttggggatgtgtgtgtgtgatttttaacagaggtattaaaggctagcctaactgttgtctaaaaagattgtacagtatttaagggattttccttttagcttttcatctccagtggcattaaacataaaaagaccctggcattttttcacatacttgaatccctaaatgcacctgtctttcactttttgagacagactgaatatatctaaaatttccagcaataaaaaaaaaagcatttaacttgcaccaagcaagaaaatataaatacagttaactgcattaagataatcacgttaaaattgttactatgcagcacagaacttcattcttatagtattcttgggttcaacctttgaatcaattttaccactgattaaataaatgactcaaagacatctgtaagtcatgctgctgtgttttgaaagtctttaactaaattaagattgcagaatgatagtgattattcaattagattttaagtaaggattgtgatattagaggctggaaatccttattttttaaaaaatcagataggcataaatagttaaatcactttcattctccccaaacctgtagttacagaaaaagttttatgctagaggtgggatgccaagttttcactatccatgaagcagcgctgcatgtcactaggtaacacagatccatccagatggtgtttacatttgatttatttgggatcttattgacatcaggtatacttggaagacatttcttttattcttcagcgtatgaatttaaagctattttttgtaaatatttctaatcagcgataatttctacctatgttctcaaccaacttagccagtttgtttttcagagcctgtagtcttattggaaatctattttatcagtgtgctttattgagtgtggattttgcatacattcaaaacattaaccacaaaatacagcaagtgcacctatattcaccattaacttatatcccaagtccattttttcctgtacactacaaacaaaagatatattagagacttttgaaaaatgctgaaatactttgcttcagaattggaatgtttatattatgtagaaatcttcaaaggtagcattattaaatagcaaagaataattagaacccacatatctttttttgtgtggatggggaaaatgttttaaaatccagttatttaatatgagtttgagagagaaaattgttttttaaaaatatatgtgcattgaaatgatggcaatgcttatagtatgatcaagtatgaaaggaactttaaattcttatatttacttttctctcagtaaattgttaaattttcactcagcaaaagattggcatttgttaagtgttctatatttagtactaaaatcacagtcatgaaatcatagtcataaaatggtcttcacacagcagtcatccgtgtcatttatcattttgtaatattaaattatggcaattttatttcaaactaaagtttgaacaccggaaagtcattactcagtgatttgtaatttgggacttggattatttatctagagatgtttgtatattttgtcagtaactaatactgcgctgccatcatggtgactgtcatggttctacagaaatgccctccatgtgtccctctaatgttgcatgtttcagtgggttggaagttttgtatatttattgtattaacacagagtgtcataaaataaaatgctgtttactggatgtttgtttgtataattttgaacactataatagcaattcagagacagacattgttaaaggtttgatgtatatagaaattccatgtttgattttttaaaatatgtgtataagtctgtcatgtgctaaacaaaataatatgaaagacctagttaaaaattctaaccaatgtaaaatgaccatttttctgttgcattagacctttacaggtaatggaacatgagcttcacccatattaaatattttggcccctttaaggtcaaaatacagatcatctagaagttagattcaaaatggaaaacctattcatggctcagatttttcattgtgggttaaaaatgggtgtctctgtactagtattgtatttattcaattgaacttgtattctgatttctatccttgctacctattgctgttttatgtactgatgaaagtacctatttgtgtatattggatttttcacttggttagctaaagaagatgtaaaaatatctaaaataatgttcatggtgaatcttattttgagaaatacatgtt

SEQ ID NO: 179523 - DNA, 1358 bp, Homo sapiens
  Payload ID: 15385
  Gene Symbol: SCAMP1
  Gene Name: secretory carrier membrane protein 1
  ENST ID: ENST00000618166
  CDS Start-End: 62-1000
ggcctcgcctcgtctctctctctgcgcctgggtcgggtgggtgacgccgagagccagagagatgtcggatttcgacagtaacccgtttgccgacccggatctcaacaatcccttcaagcctccaccaggcggtgtgaagatgcctaatgtacccaatacacaaccagcaataatgaaaccaacagaggaacatccagcttatacacagattgcaaaggaacatgcattggcccaagctgaacttcttaagcgccaggaagaactagaaagaaaagccgcagaattagatcgtcgggaacgagaaatgcaaaacctcagtcaacatggtagaaaaaataattggccacctcttcctagcaattttcctgtcggaccttgtttctatcaggatttttctgtagacattcctgtagaattccaaaagacagtaaagcttatgtactacttgtggatgttccatgcagtaacactgtttctaaatatcttcggatgcttggcttggttttgtgttgattctgcaagagcggttgattttggattgagtatcctgtggttcttgctttttactccttgttcatttgtctgttggtacagaccactttatggagctttcaggagtgacagttcatttagattctttgtattcttcttcgtctatatttgtcagtttgctgtacatgtactccaagctgcaggatttcataactggggcaattgtggttggatttcatcccttactggtctcaaccaaaatattcctgttggaatcatgatgataatcatagcagcacttttcacagcatcagcagtcatctcactagttatgttcaaaaaagtacatggactatatcgcacaacaggtgctagttttgagaaggcccaacaggagtttgcaacaggtgtgatgtccaacaaaactgtccagaccgcagctgcaaatgcagcttcaactgcagcatctagtgcagctcagaatgctttcaagggtaaccagatttaagaatcttcaaacaatacactgttaccttttgactgtacctttttctccagttactgtattctacaaatatttttatgttcaaaacacacagtacagacagcatggatatttcctgttcacttgtgcatgggctaaaaccaggaaaacttccttgtcttattactttacctaatagtttcttaatatttcagtgccccttgcagaaaaaatattacatgctaaataaatattctccatatttttgggggatgacattcagtgaattatttcagtggtgacccactgaaaattaataatggtacttatgattaaaaacgcatttaatactaactgcagtagttctttcaagaatctttag

SEQ ID NO: 179524 - DNA, 4509 bp, Homo sapiens
  Payload ID: 15385
  Gene Symbol: SCAMP1
  Gene Name: secretory carrier membrane protein 1
  Uniprot ID: O15126
  ENST ID: ENST00000621999
  CDS Start-End: 90-1106
cggcgacgtgagcgcgcaggggggcggcggcctcgcctcgtctctctctctgcgcctgggtcgggtgggtgacgccgagagccagagagatgtcggatttcgacagtaacccgtttgccgacccggatctcaacaatcccttcaaggatccatcagttacacaagtgacaagaaatgttccaccaggacttgatgaatataatccattctcggattctagaacacctccaccaggcggtgtgaagatgcctaatgtacccaatacacaaccagcaataatgaaaccaacagaggaacatccagcttatacacagattgcaaaggaacatgcattggcccaagctgaacttcttaagcgccaggaagaactagaaagaaaagccgcagaattagatcgtcgggaacgagaaatgcaaaacctcagtcaacatggtagaaaaaataattggccacctcttcctagcaattttcctgtcggaccttgtttctatcaggatttttctgtagacattcctgtagaattccaaaagacagtaaagcttatgtactacttgtggatgttccatgcagtaacactgtttctaaatatcttcggatgcttggcttggttttgtgttgattctgcaagagcggttgattttggattgagtatcctgtggttcttgctttttactccttgttcatttgtctgttggtacagaccactttatggagctttcaggagtgacagttcatttagattctttgtattcttcttcgtctatatttgtcagtttgctgtacatgtactccaagctgcaggatttcataactggggcaattgtggttggatttcatcccttactggtctcaaccaaaatattcctgttggaatcatgatgataatcatagcagcacttttcacagcatcagcagtcatctcactagttatgttcaaaaaagtacatggactatatcgcacaacaggtgctagttttgagaaggcccaacaggagtttgcaacaggtgtgatgtccaacaaaactgtccagaccgcagctgcaaatgcagcttcaactgcagcatctagtgcagctcagaatgctttcaagggtaaccagatttaagaatcttcaaacaatacactgttaccttttgactgtacctttttctccagttactgtattctacaaatatttttatgttcaaaacacacagtacagacagcatggatatttcctgttcacttgtgcatgggctaaaaccaggaaaacttccttgtcttattactttacctaatagtttcttaatatttcagtgccccttgcagaaaaaatattacatgctaaataaatattctccatatttttgggggatgacattcagtgaattatttcagtggtgacccactgaaaattaataatggtacttatgattaaaaacgcatttaatactaactgcagtagttctttcaagaatctttagagataaggattgcacattggaaaagtaaaccatgtttcattcctttttccctatttatattgaaagaaataggccagcagagacttagggattttaaattggcttgctttttagctgtttcagtcaccagtgaagagcctatgtgcattttgtagtagataatgtaaaatttgtcatctttttcttttcttttttttagaatagctgatattttgataacaatctctaatttgcatgggcaccacatttcttatattaaaagaattagtgttttggcttctgtactgcttatggttgtaggattcaggggttaatggaatcacagaaatgatattctgcaagaatttcttttaaataaaaagtttgggggtgcaatataagaagtttatataatatgcagtacattatccaaaagagaaggtagttaatgcagtagaaagtagtggtaataattcctttttaaaaaaatttcggtagtcatatagtaacattttgctatatgaaaactttggtatattctgtggttacaactaagattgtgtctggcagctcttttttggggatgtgtgtgtgtgatttttaacagaggtattaaaggctagcctaactgttgtctaaaaagattgtacagtatttaagggattttccttttagcttttcatctccagtggcattaaacataaaaagaccctggcattttttcacatacttgaatccctaaatgcacctgtctttcactttttgagacagactgaatatatctaaaatttccagcaataaaaaaaaaagcatttaacttgcaccaagcaagaaaatataaatacagttaactgcattaagataatcacgttaaaattgttactatgcagcacagaacttcattcttatagtattcttgggttcaacctttgaatcaattttaccactgattaaataaatgactcaaagacatctgtaagtcatgctgctgtgttttgaaagtctttaactaaattaagattgcagaatgatagtgattattcaattagattttaagtaaggattgtgatattagaggctggaaatccttattttttaaaaaatcagataggcataaatagttaaatcactttcattctccccaaacctgtagttacagaaaaagttttatgctagaggtgggatgccaagttttcactatccatgaagcagcgctgcatgtcactaggtaacacagatccatccagatggtgtttacatttgatttatttgggatcttattgacatcaggtatacttggaagacatttcttttattcttcagcgtatgaatttaaagctattttttgtaaatatttctaatcagcgataatttctacctatgttctcaaccaacttagccagtttgtttttcagagcctgtagtcttattggaaatctattttatcagtgtgctttattgagtgtggattttgcatacattcaaaacattaaccacaaaatacagcaagtgcacctatattcaccattaacttatatcccaagtccattttttcctgtacactacaaacaaaagatatattagagacttttgaaaaatgctgaaatactttgcttcagaattggaatgtttatattatgtagaaatcttcaaaggtagcattattaaatagcaaagaataattagaacccacatatctttttttgtgtggatggggaaaatgttttaaaatccagttatttaatatgagtttgagagagaaaattgttttttaaaaatatatgtgcattgaaatgatggcaatgcttatagtatgatcaagtatgaaaggaactttaaattcttatatttacttttctctcagtaaattgttaaattttcactcagcaaaagattggcatttgttaagtgttctatatttagtactaaaatcacagtcatgaaatcatagtcataaaatggtcttcacacagcagtcatccgtgtcatttatcattttgtaatattaaattatggcaattttatttcaaactaaagtttgaacaccggaaagtcattactcagtgatttgtaatttgggacttggattatttatctagagatgtttgtatattttgtcagtaactaatactgcgctgccatcatggtgactgtcatggttctacagaaatgccctccatgtgtccctctaatgttgcatgtttcagtgggttggaagttttgtatatttattgtattaacacagagtgtcataaaataaaatgctgtttactggatgtttgtttgtataattttgaacactataatagcaattcagagacagacattgttaaaggtttgatgtatatagaaattccatgtttgattttttaaaatatgtgtataagtctgtcatgtgctaaacaaaataatatgaaagacctagttaaaaattctaaccaatgtaaaatgaccatttttctgttgcattagacctttacaggtaatggaacatgagcttcacccatattaaatattttggcccctttaaggtcaaaatacagatcatctagaagttagattcaaaatggaaaacctattcatggctcagatttttcattgtgggttaaaaatgggtgtctctgtactagtattgtatttattcaattgaacttgtattctgatttctatccttgctacctattgctgttttatgtactgatgaaagtacctatttgtgtatattggatttttcacttggttagctaaagaagatgtaaaaatatctaaaataatgttcatggtgaatcttattttgagaaatacatgttaaaaaaggaacagtattctttattttctgggtgttatatttaaaaaagcaagtttggatttttacacctaatttactaggaaaatattttattctgtaattcatgttaagattatgtatggtttgcattttaaggggatttatgttaggttaattagttgtttctgtaaatcatttgtaatagcatagtgctttttactcattgctgtatctttttctgaaaacactgttgttaacatctaattcagtatccttat

SEQ ID NO: 179525 - DNA, 559 bp, Homo sapiens
  Payload ID: 15385
  Gene Symbol: SCAMP1
  Gene Name: secretory carrier membrane protein 1
  ENST ID: ENST00000511551
  CDS Start-End: 201-559
ctctctgcgcctgggtcgggtgggtgacgccgagagccagagagatgtcggatttcgacagtaacccgtttgccgacccggatctcaacaatcccttcaagataatgtgtctataaacattcctgtacaagtgttctgtttgatcacctgttttaaattcttttggggatatatacctacaagtggaattgcctagtcatatggtaactctgtttaatcatggaggagcttccagacccttttccaaagtggctgtaccattttatattcctgctagcagtgtatgggatccatcagttacacaagtgacaagaaatgttccaccaggacttgatgaatataatccattctcggattctagaacacctccaccaggcggtgtgaagatgcctaatgtacccaatacacaaccagcaataatgaaaccaacagaggaacatccagcttatacacagattgcaaaggaacatgcattggcccaagctgaacttcttaagcgccaggaagaactagaaagaaaagccgcagaattagatcgtcgggaacgagaaatgcaaaa

SEQ ID NO: 179526 - DNA, 2453 bp, Homo sapiens
  Payload ID: 15386
  Gene Symbol: SCAMP2
  Gene Name: secretory carrier membrane protein 2
  Uniprot ID: O15127
  ENST ID: ENST00000268099
  CDS Start-End: 111-1100
agaaccgctgcctcgctcccggaagtggagggtctacacgaagcgccgctgggtctgggtgcccggaggcagcagcgttcgcggagttcgcccgctggcccccgatcaccatgtcggctttcgacaccaaccccttcgcggacccagtggatgtaaaccccttccaggatccctctgtgacccagctgaccaacgccccgcagggcggcctggcggaattcaaccccttctcagagacaaatgcagcgacaacagttcctgtcacccaactccctgggtcctcacagccagcggttctccagccatcagtggaaccaacccagccgaccccccaggccgtggtgtctgcagcccaggcaggcctgctccggcagcaggaagaactggacaggaaagctgccgagctggaacgcaaggagcgggagctgcagaacactgtagccaacttgcatgtgagacagaacaactggccccctctgccctcgtggtgccctgtgaagccctgcttctatcaggatttctccacagagatccctgccgactaccagcggatatgcaagatgctctactatctgtggatgttgcattcagtgactctgtttctgaacctgcttgcctgcctggcctggttctcgggcaacagctccaagggagtggactttggcctctccatcctgtggtttctgatcttcactccctgtgccttcctttgttggtaccgacccatctataaggcctttaggtccgacaactctttcagcttctttgtgttcttctttgtatttttttgtcaaatagggatctacatcatccagttggttggcatccctggcctgggggacagcggttggattgcagccctgtctacactggataatcattccctggccatatcagtcatcatgatggtggtggctggcttcttcaccctctgtgccgtgctctcagtcttcctcctgcagcgggtgcactccctctaccgacggacaggggccagcttccagcaggcccaggaggagttttcccagggcatcttcagcagcagaaccttccacagagctgcttcatctgctgcccaaggagccttccaggggaattagtcctcctctcttctctccccctcagcctttctctcgcctgccttctgagctgcactttccgtgggtgccttatgtggtggtggttgtgcccagcacagacctggcagggttcttgccgtggctcttcctcctccctcagcgaccagctctccctggaacgggagggacagggaattttttccccctctatgtacaaaaaaaaacaaagctctctttccttctctggtgatggtttggtaggattcttttgtctctggaagcagtgggactgaagttctcttcgtcctgtgcacacacagacacccccacacagttgggatcacaggctgacctgggcccatcccagctggagctttctgccagggtcctgggccttgactcccccaccctgcaggcctggcctgaatctggcttcttagacacagcccagtccttcctgcctgggctgggaataagcctctcacaggttctggtggacagatctgttccccaggtcactccagtggtctccaggcttccagagaaggctggttgcctcaagctcttctctgcctcataaacggatccagagaaggctggttgccttaagctcttccctgcctcgtgttcctgagaaacggattaatagccctttatccccctgcaccctcctgcaggggatggcactttgagccctctggagccctccccttgctgagccttactctcttcagactttctgaatgtacaatgccgttggttgggatttggggactggaagggaccaaggacactgaccccaagctgtcctgcctagcgtccagcgtcttctaggagggtggggtctgcctgtcctggtgtggttggtttggccctgtttgctgtgactacccccccccctccccgaaccgagggacggctgcctttgtctctgcctcagatgccacctgccccgcccatgctccccatcagcagcatccagactttcaggaagggcagggccagccagtccagaaccgcatccctcagcagggactgataagccatctctcggagggccccctaatacccagtggagtctggttcacaccctggggggtgtgtcactgtgatgggacacgtaggagtccacccttaaaaccagcaccctgtccctcgaggctgccgagtgggtgtgtggactggggtgccttcccacaaaactagcctccggctctgggcccgagacagccgcaggccccagccactgaatgatactggcagcggctggggttttatgaactcctttctggtattttttcccctctatgtacaaatgtatatgttacgtctcaatttttgtgcttaagtaaaaataaaaacattttcagacaa

SEQ ID NO: 179527 - DNA, 790 bp, Homo sapiens
  Payload ID: 15386
  Gene Symbol: SCAMP2
  Gene Name: secretory carrier membrane protein 2
  ENST ID: ENST00000565345
  CDS Start-End: 511-790
ggggcgcgactagcagcaggtggaactgcagaggaggcggggcgctgaagtgttggagacagtggggtcttctagcacccggaggctgggctgtgctagggaaggggactggagcaggatccctctgtgacccagctgaccaacgccccgcagggcggcctggcggaattcaaccccttctcagagacaaatgcagcgacaacagttcctgtcacccaactccctgggtcctcacagccagcggttctccagccatcagtggaaccaacccagccgaccccccaggccgtggtgtctgcagcccaggcaggcctgctccggcagcaggaagaactggacaggaaagctgccgagctggaacgcaaggagcgggagctgcagaacactgtagccaacttgcatgtgagacagaacaactggccccctctgccctcgtggtgccctgtgaagccctgcttctatcaggatttctccacagagatccctgccgactaccagcggatatgcaagatgctctactatctgtggatgttgcattcagtgactctgtttctgaacctgcttgcctgcctggcctggttctcgggcaacagctccaagggagtggactttggcctctccatcctgtggtttctgatcttcactccctgtgccttcctttgttggtaccgacccatctataaggcctttaggtccgacaactctttcagcttctttgtgttcttctttgtatttttttgtcaaatagggatctacatcatccagttggttggcatccctggcctggggg

SEQ ID NO: 179528 - DNA, 858 bp, Homo sapiens
  Payload ID: 15386
  Gene Symbol: SCAMP2
  Gene Name: secretory carrier membrane protein 2
  ENST ID: ENST00000569904
  CDS Start-End: 48-758
cggaggcagcagcgttcgcggagttcgcccgctggcccccgatcaccatgtcggctttcgacaccaaccccttcgcggacccagtggatgtaaaccccttccaggatccctctgtgacccagctgaccaacgccccgcagggcggcctggcggaattcaaccccttctcagagacaaatgcagcgacaacagttcctgtcacccaactccctgggtcctcacagccagcggttctccagccatcagtggaaccaacccagccgaccccccaggccgtggtgtctgcagcccaggcaggcctgctccggcagcaggaagaactggacaggaaagctgccgagctggaacgcaaggagcgggagctgcagaacactgtagccaacttgcatgtgagacagaacaactggccccctctgccctcgtggtgccctgtgaagccctgcttctatcaggatttctccacagagatccctgccgactaccagcggatatgcaagatgctctactatctgtggatgttgcattcagtgactctgtttctgaacctgcttgcctgcctggcctggttctcgggcaacagctccaagggagtggactttggcctctccatcctgtggtttctgatcttcactccctgtgccttcctttgttggtaccgacccatctataaggcctttagggatctacatcatccagttggttggcatccctggcctgggggacagcggttggattgcagccctgtctacactggataatcattccctggccatatcagtcatcatgatggtggtggctggcttcttcaccctctgtgccgtgctctcagtcttcctcctgcagcgggtgcactccctc

SEQ ID NO: 179529 - DNA, 2476 bp, Homo sapiens
  Payload ID: 15386
  Gene Symbol: SCAMP2
  Gene Name: secretory carrier membrane protein 2
  ENST ID: ENST00000566480
  CDS Start-End: 1-837
tcagagacaaatgcagcgacaacagttcctgtcacccaactccctgggtcctcacagccagcggttctccagccatcagtggaaccaacccagccgaccccccaggccgtggtgtctgcagcccaggcaggcctgctccggcagcaggaagaactggacaggaaagctgccgagctggaacgcaaggagcgggagctgcagaacactgtagccaacttgcatgtgagacagaacaactggccccctctgccctcgtggtgccctgtgaagccctgcttctatcaggatttctccacagagatccctgccgactaccagcggatatgcaagatgctctactatctgtggatgttgcattcagtgactctgtttctgaacctgcttgcctgcctggcctggttctcgggcaacagctccaagggagtggactttggcctctccatcctgtggtttctgatcttcactccctgtgccttcctttgttggtaccgacccatctataaggcctttaggtccgacaactctttcagcttctttgtgttcttctttgtatttttttgtcaaatagggatctacatcatccagttggttggcatccctggcctgggggacagcggttggattgcagccctgtctacactggataatcattccctggccatatcagtcatcatgatggtggtggctggcttcttcaccctctgtgccgtgctctcagtcttcctcctgcagcgggtgagtggtgtgggcagggctgacagcaaatgggaggaggcaggcaaccgtttcctgcccttgccacgagatgtttttcaccactgcagttgggcatcctaggcccccaaaggtccagtacctttctccagggatctgggtggggggtcaggcagtgccaggcttctggtgacccctttgggagtataacctggatggctggcttcctggtgggcccaaaggacaggcttctctcaccccacccctcttcgccaggtgcactccctctaccgacggacaggggccagcttccagcaggcccaggaggagttttcccagggcatcttcagcagcagaaccttccacagagctgcttcatctgctgcccaaggagccttccaggggaattagtcctcctctcttctctccccctcagcctttctctcgcctgccttctgagctgcactttccgtgggtgccttatgtggtggtggttgtgcccagcacagacctggcagggttcttgccgtggctcttcctcctccctcagcgaccagctctccctggaacgggagggacagggaattttttccccctctatgtacaaaaaaaaacaaagctctctttccttctctggtgatggtttggtaggattcttttgtctctggaagcagtgggactgaagttctcttcgtcctgtgcacacacagacacccccacacagttgggatcacaggctgacctgggcccatcccagctggagctttctgccagggtcctgggccttgactcccccaccctgcaggcctggcctgaatctggcttcttagacacagcccagtccttcctgcctgggctgggaataagcctctcacaggttctggtggacagatctgttccccaggtcactccagtggtctccaggcttccagagaaggctggttgcctcaagctcttctctgcctcataaacggatccagagaaggctggttgccttaagctcttccctgcctcgtgttcctgagaaacggattaatagccctttatccccctgcaccctcctgcaggggatggcactttgagccctctggagccctccccttgctgagccttactctcttcagactttctgaatgtacaatgccgttggttgggatttggggactggaagggaccaaggacactgaccccaagctgtcctgcctagcgtccagcgtcttctaggagggtggggtctgcctgtcctggtgtggttggtttggccctgtttgctgtgactacccccccccctccccgaaccgagggacggctgcctttgtctctgcctcagatgccacctgccccgcccatgctccccatcagcagcatccagactttcaggaagggcagggccagccagtccagaaccgcatccctcagcagggactgataagccatctctcggagggccccctaatacccagtggagtctggttcacaccctggggggtgtgtcactgtgatgggacacgtaggagtccacccttaaaaccagcaccctgtccctcgaggctgccgagtgggtgtgtggactggggtgccttcccacaaaactagcctccggctctgggcccgagacagccgcaggccccagccactgaatgatactggcagcggctggggttttatgaactcctttctggtattttttcccctctatgtacaaatgtatatgttacgtctcaatttttgtgcttaagtaaaaataaaaacattttcagac

SEQ ID NO: 179530 - DNA, 1787 bp, Homo sapiens
  Payload ID: 15386
  Gene Symbol: SCAMP2
  Gene Name: secretory carrier membrane protein 2
  ENST ID: ENST00000563663
  CDS Start-End: 101-274
cctcgctcccggaagtggagggtctacacgaagcgccgctgggtctgggtgcccggaggcagcagcgttcgcggagttcgcccgctggcccccgatcaccatgtcggctttcgacaccaaccccttcgcggacccagtggatgtaaaccccttccaggatccctctgtgacccagctgaccaacgccccgcagggcggcctggcggaattcaaccccttctcagagccctgtctacactggataatcattccctggccatatcagtcatcatgatggtggtggctggcttcttcaccctctgtgccgtgctctcagtcttcctcctgcagcgggtgcactccctctaccgacggacaggggccagcttccagcaggcccaggaggagttttcccagggcatcttcagcagcagaaccttccacagagctgcttcatctgctgcccaaggagccttccaggggaattagtcctcctctcttctctccccctcagcctttctctcgcctgccttctgagctgcactttccgtgggtgccttatgtggtggtggttgtgcccagcacagacctggcagggttcttgccgtggctcttcctcctccctcagcgaccagctctccctggaacgggagggacagggaattttttccccctctatgtacaaaaaaaaacaaagctctctttccttctctggtgatggtttggtaggattcttttgtctctggaagcagtgggactgaagttctcttcgtcctgtgcacacacagacacccccacacagttgggatcacaggctgacctgggcccatcccagctggagctttctgccagggtcctgggccttgactcccccaccctgcaggcctggcctgaatctggcttcttagacacagcccagtccttcctgcctgggctgggaataagcctctcacaggttctggtggacagatctgttccccaggtcactccagtggtctccaggcttccagagaaggctggttgcctcaagctcttctctgcctcataaacggatccagagaaggctggttgccttaagctcttccctgcctcgtgttcctgagaaacggattaatagccctttatccccctgcaccctcctgcaggggatggcactttgagccctctggagccctccccttgctgagccttactctcttcagactttctgaatgtacaatgccgttggttgggatttggggactggaagggaccaaggacactgaccccaagctgtcctgcctagcgtccagcgtcttctaggagggtggggtctgcctgtcctggtgtggttggtttggccctgtttgctgtgactacccccccccctccccgaaccgagggacggctgcctttgtctctgcctcagatgccacctgccccgcccatgctccccatcagcagcatccagactttcaggaagggcagggccagccagtccagaaccgcatccctcagcagggactgataagccatctctcggagggccccctaatacccagtggagtctggttcacaccctggggggtgtgtcactgtgatgggacacgtaggagtccacccttaaaaccagcaccctgtccctcgaggctgccgagtgggtgtgtggactggggtgccttcccacaaaactagcctccggctctgggcccgagacagccgcaggccccagccactgaatgatactggcagcggctggggttttatgaactcctttctggtattttttcccctctatgtacaaatgtatatgttacgtctcaattttt

SEQ ID NO: 179531 - DNA, 866 bp, Homo sapiens
  Payload ID: 15386
  Gene Symbol: SCAMP2
  Gene Name: secretory carrier membrane protein 2
  ENST ID: ENST00000564529
  CDS Start-End: 104-866
ctgcctcgctcccggaagtggagggtctacacgaagcgccgctgggtctgggtgcccggaggcagcagcgttcgcggagttcgcccgctggcccccgatcaccatgtcggctttcgacaccaaccccttcgcggacccagtggatgtaaaccccttccaggatccctctgtgacccagctgaccaacgccccgcagggcggcctggcggaattcaaccccttctcagagacaaatgcagcgacaacagttcctgtcacccaactccctgggtcctcacagccagcggttctccagccatcagtggaaccaacccagccgaccccccagctcctgcttagacaggccagcaagttcccgcctgcccaattcctggcagtgagcgagctctcagagaggcagatgctcctaggaggagaaagtattctcagagacagctacatgcgaaagcttccgaaggccgtggtgtctgcagcccaggcaggcctgctccggcagcaggaagaactggacaggaaagctgccgagctggaacgcaaggagcgggagctgcagaacactgtagccaacttgcatgtgagacagaacaactggccccctctgccctcgtggtgccctgtgaagccctgcttctatcaggatttctccacagagatccctgccgactaccagcggatatgcaagatgctctactatctgtggatgttgcattcagtgactctgtttctgaacctgcttgcctgcctggcctggttctcgggcaacagctccaagggagtggactttggcctctccatcctgtggtttctgatcttcactccctgtgccttcctttgttggtaccgacccatctataaggcctttaggt

SEQ ID NO: 179532 - DNA, 638 bp, Homo sapiens
  Payload ID: 15386
  Gene Symbol: SCAMP2
  Gene Name: secretory carrier membrane protein 2
  ENST ID: ENST00000562363
  CDS Start-End: 56-638
tgggtgcccggaggcagcagcgttcgcggagttcgcccgctggcccccgatcaccatgtcggctttcgacaccaaccccttcgcggacccagtggatgtaaaccccttccagacaaatgcagcgacaacagttcctgtcacccaactccctgggtcctcacagccagcggttctccagccatcagtggaaccaacccagccgaccccccaggccgtggtgtctgcagcccaggcaggcctgctccggcagcaggaagaactggacaggaaagctgccgagctggaacgcaaggagcgggagctgcagaacactgtagccaacttgcatgtgagacagaacaactggccccctctgccctcgtggtgccctgtgaagccctgcttctatcaggatttctccacagagatccctgccgactaccagcggatatgcaagatgctctactatctgtggatgttgcattcagtgactctgtttctgaacctgcttgcctgcctggcctggttctcgggcaacagctccaagggagtggactttggcctctccatcctgtggtttctgatcttcactccctgtgccttcctttgttggtaccgacccatctataaggcctttaggtccgacaactctttcagct

SEQ ID NO: 179533 - DNA, 1446 bp, Homo sapiens
  Payload ID: 15387
  Gene Symbol: SCAMP3
  Gene Name: secretory carrier membrane protein 3
  Uniprot ID: O14828
  ENST ID: ENST00000302631
  CDS Start-End: 109-1152
agcggggcgaactgaggcgagtgaagtggactctgagggctaccgctaccgccactgctgcggcaggggcgtggagggcagagggccgcggaggccgcagttgcaaacatggctcagagcagagacggcggaaacccgttcgccgagcccagcgagcttgacaacccctttcaggacccagctgtgatccagcaccgacccagccggcagtatgccacgcttgacgtctacaacccttttgagacccgggagccaccaccagcctatgagcctccagcccctgccccattgcctccaccctcagctccctccttgcagccctcgagaaagctcagccccacagaacctaagaactatggctcatacagcactcaggcctcagctgcagcagccacagctgagctgctgaagaaacaggaggagctcaaccggaaggcagaggagttggaccgaagggagcgagagctgcagcatgctgccctggggggcacagctactcgacagaacaattggccccctctaccttctttttgtccagttcagccctgctttttccaggacatctccatggagatcccccaagaatttcagaagactgtatccaccatgtactacctctggatgtgcagcacgctggctcttctcctgaacttcctcgcctgcctggccagcttctgtgtggaaaccaacaatggcgcaggctttgggctttctatcctctgggtcctccttttcactccctgctcctttgtctgctggtaccgccccatgtataaggctttccggagtgacagttcattcaatttcttcgttttcttcttcattttcttcgtccaggatgtgctctttgtcctccaggccattggtatcccaggttggggattcagtggctggatctctgctctggtggtgccgaagggcaacacagcagtatccgtgctcatgctgctggtcgccctgctcttcactggcattgctgtgctaggaattgtcatgctgaaacggatccactccttataccgccgcacaggtgccagctttcagaaggcccagcaagaatttgctgctggtgtcttctccaaccctgcggtgcgaaccgcagctgccaatgcagccgctggggctgctgaaaatgccttccgggccccgtgacccctgactgggatgccctggccctgctacttgagggagctgacttagctcccgtccctaaggtctctgggacttggagagacatcactaactgatggctcctccgtagtgctcccaatcctatggccatgactgctgaacctgacaggcgtgtggggagttcactgtgacctagtccccccatcaggccacactgctgccacctctcacacgccccaacccagcttccctctgctgtgccacggctgttgcttcggttatttaaataaaaagaaagtggaactggaactgaca

SEQ ID NO: 179534 - DNA, 1537 bp, Homo sapiens
  Payload ID: 15387
  Gene Symbol: SCAMP3
  Gene Name: secretory carrier membrane protein 3
  Uniprot ID: O14828
  ENST ID: ENST00000355379
  CDS Start-End: 280-1245
ggaaggaagtcacatggaagaggggcggtagttggttgtgggcactgggttagaggtatcacgtgggggcactttcgtcttagcttttggacaagacgcaggcgcaacccacggctgctgcggggatccttgtggcccttccggtcggtggaaccaatccgtgcacagagaagcggggcgaactgaggcgagtgaagtggactctgagggctaccgctaccgccactgctgcggcaggggcgtggagggcagagggccgcggaggccgcagttgcaaacatggctcagagcagagacggcggaaacccgttcgccgagcccagcgagcttgacaacccctttcagccaccaccagcctatgagcctccagcccctgccccattgcctccaccctcagctccctccttgcagccctcgagaaagctcagccccacagaacctaagaactatggctcatacagcactcaggcctcagctgcagcagccacagctgagctgctgaagaaacaggaggagctcaaccggaaggcagaggagttggaccgaagggagcgagagctgcagcatgctgccctggggggcacagctactcgacagaacaattggccccctctaccttctttttgtccagttcagccctgctttttccaggacatctccatggagatcccccaagaatttcagaagactgtatccaccatgtactacctctggatgtgcagcacgctggctcttctcctgaacttcctcgcctgcctggccagcttctgtgtggaaaccaacaatggcgcaggctttgggctttctatcctctgggtcctccttttcactccctgctcctttgtctgctggtaccgccccatgtataaggctttccggagtgacagttcattcaatttcttcgttttcttcttcattttcttcgtccaggatgtgctctttgtcctccaggccattggtatcccaggttggggattcagtggctggatctctgctctggtggtgccgaagggcaacacagcagtatccgtgctcatgctgctggtcgccctgctcttcactggcattgctgtgctaggaattgtcatgctgaaacggatccactccttataccgccgcacaggtgccagctttcagaaggcccagcaagaatttgctgctggtgtcttctccaaccctgcggtgcgaaccgcagctgccaatgcagccgctggggctgctgaaaatgccttccgggccccgtgacccctgactgggatgccctggccctgctacttgagggagctgacttagctcccgtccctaaggtctctgggacttggagagacatcactaactgatggctcctccgtagtgctcccaatcctatggccatgactgctgaacctgacaggcgtgtggggagttcactgtgacctagtccccccatcaggccacactgctgccacctctcacacgccccaacccagcttccctctgctgtgccacggctgttgcttcggttatttaaataaaaagaaagtggaactggaactga

SEQ ID NO: 179535 - DNA, 1537 bp, Homo sapiens; identical to SEQ ID NO: 179534
  Payload ID: 15387
  Gene Symbol: SCAMP3
  Gene Name: secretory carrier membrane protein 3
  Uniprot ID: O14828
  ENST ID: ENST00000573013
  CDS Start-End: 280-1245

SEQ ID NO: 179536 - DNA, 1446 bp, Homo sapiens; identical to SEQ ID NO: 179533
  Payload ID: 15387
  Gene Symbol: SCAMP3
  Gene Name: secretory carrier membrane protein 3
  Uniprot ID: O14828
  ENST ID: ENST00000570831
  CDS Start-End: 109-1152

SEQ ID NO: 179537 - DNA, 2684 bp, Homo sapiens
  Payload ID: 15388
  Gene Symbol: SCAMP4
  Gene Name: secretory carrier membrane protein 4
  Uniprot ID: Q969E2
  ENST ID: ENST00000316097
  CDS Start-End: 268-957
catgtgagcgcagtgccggagcggggcggggcgaggcggcggcgcgcagtgcctactagcaattgtagtccttgccccaccttggcctggcgaagatcccgcccctggaactacgctcccgtcgtgctccgcggctccaggcggagacgaggcggggtgaggtgggttgggccgggccggttgctaagacttggcgaagcgctgcgctcgcgcccggatccctcaggcggctgcaggcttcagcctgcgctggttggtgaaacagagatgtcagaaaaggagaacaacttcccgccactgcccaagttcatccctgtgaagccctgcttctaccagaacttctccgacgagatcccagtggagcaccaggtcctggtgaagaggatctaccggctgtggatgttttactgcgccaccctcggcgtcaacctcattgcctgcctggcctggtggatcggcggaggctcggggaccaacttcggcctggccttcgtgtggctgctcctgttcacgccttgcggctacgtgtgctggttccggcctgtctacaaggccttccgagccgacagctcctttaatttcatggcgtttttcttcatcttcggagcccagtttgtcctgaccgtcatccaggcgattggcttctccggctggggcgcgtgcggctggctgtcggcaattggattcttccagtacagcccgggcgctgccgtggtcatgctgcttccagccatcatgttctccgtgtcggctgccatgatggccatcgcgatcatgaaggtgcacaggatctaccgaggggctggcggaagcttccagaaggcacagacggagtggaacacgggcacttggcggaacccaccgtcgagggaggcccagtacaacaacttctcaggcaacagcctgcccgagtaccccactgtgcccagctacccgggcagtggccagtggccttagagggagcctgccctgcccccaccgcccaccacctcctccccttcattcctgctgctacccctggtcccgagggctgggagtacctggggccccatccccccagctgggatggtggaagccggtggtggccacggaccgcccccctcctgccagggccacagaacccgtgttcatctcatccgagagcggagttcctcacaagcactccccagcagcccttggcctctgccgtccacaggacgccctcttgctcccggaaacgtgtggtcacccgccgtccactgcacggctggtacggccttgtcttcaggtctcgaggcctgactccgggggacaggtggcagcaggtcggccgccctcccgtcctcccagagctgctggcgctgaggtcagagcgggtctgatggggagctccgtctcaccggccacccgccgtcaccatggcagatgcccttggccggaactaataagaggcgtcggggccagcttccggtcccctgcagtgatagagggcttggtgcctagctgagtcctcgctgtccccgccatcccctgatctgtgcggctccagcctcgccccctccccacgtgcaccatacctggggagttcctggtccagggtatcctggggccaccctccctgcctccaaaacagggatccctggcaggctgtctttccacgcccctgagttcagagtcggggacccaggccaggtcgggagcacagccgctccccaaacccagcaaaccggcagagagccggtttcccagcagccggagccctgcaggagaggcctttgtgttttgttttgttttgttttttctcttttgagacaagagtttcactctgtcgcccaggctggagtgcagtggtgtgatctcggctcactgcaacctctgcctcccgtgttcaagcagttctcctgcctcagcctcccaaatagctgggattacagttgcctgccaccacgcccagctaatttttatatttttagtacagatggggtttcaccatgttggccaggctggtctcgaactcctgacctcaagtgatccacccgccttggcctcccaaagtgctgggataataggtgtcagccaccgcgcccagcctggagtggccttttatgagaggggacccgtcaaatctgtgccttatggaggggtccggcagcggccacaattgtcttgtcccctcaccccccaactccccctggaacacctctcccaggcaagacattttcacagcaccattcacaacggttgggccaaaaagaaacttttccttcatcatttcctgcactcgctgaccacaactttggacaccccaggctgccacccctccccacccgttcacccccaggatgctgttgctgtaggacgcctgctgccctggagccctccccaggatgtgagccagtcccctcgctggtacggaatgccgctgggtgcccggaggcggccatggtgtctcgatggacggcagccaggatggagcacccatgggtctcacggccatgcttcagggtcttcaggtcctgcccccggccagtctgccaagaggcacccccttccccagcctctcgcctgcactgatgcagacaaaatctcacctggcaggcccaacccccccccacccctcccccgccgtgtgtggcccctcgccgcatcgttggggttttgttatgtgaaaatatcctggaaataaatacatgtttctgcactta

SEQ ID NO: 179538 - DNA, 2394 bp, Homo sapiens
  Payload ID: 15388
  Gene Symbol: SCAMP4
  Gene Name: secretory carrier membrane protein 4
  Uniprot ID: Q969E2
  ENST ID: ENST00000409472
  CDS Start-End: 78-665
ttggcgaagcgctgcgctcgcgcccggatccctcaggcggctgcaggcttcagcctgcgctggttggtgaaacagagatgtcagaaaaggagaacaacttcccgccactgcccaagttcatccctgtgaagccctgcttctaccagaacttctccgacgagatcccagtggagcaccaggtcctggtgaagaggatctaccggctgtggatgttttactgcgccaccctcggcgtcaacctcattgcctgcctggcctggtggatcggcggaggctcggggaccaacttcggcctggccttcgtgtggctgctcctgttcacgccttgcggctacgtgtgctggttccggcctgtctacaaggccttccgcggctggctgtcggcaattggattcttccagtacagcccgggcgctgccgtggtcatgctgcttccagccatcatgttctccgtgtcggctgccatgatggccatcgcgatcatgaaggtgcacaggatctaccgaggggctggcggaagcttccagaaggcacagacggagtggaacacgggcacttggcggaacccaccgtcgagggaggcccagtacaacaacttctcaggcaacagcctgcccgagtaccccactgtgcccagctacccgggcagtggccagtggccttagagggagcctgccctgcccccaccgcccaccacctcctccccttcattcctgctgctacccctggtcccgagggctgggagtacctggggccccatccccccagctgggatggtggaagccggtggtggccacggaccgcccccctcctgccagggccacagaacccgtgttcatctcatccgagagcggagttcctcacaagcactccccagcagcccttggcctctgccgtccacaggacgccctcttgctcccggaaacgtgtggtcacccgccgtccactgcacggctggtacggccttgtcttcaggtctcgaggcctgactccgggggacaggtggcagcaggtcggccgccctcccgtcctcccagagctgctggcgctgaggtcagagcgggtctgatggggagctccgtctcaccggccacccgccgtcaccatggcagatgcccttggccggaactaataagaggcgtcggggccagcttccggtcccctgcagtgatagagggcttggtgcctagctgagtcctcgctgtccccgccatcccctgatctgtgcggctccagcctcgccccctccccacgtgcaccatacctggggagttcctggtccagggtatcctggggccaccctccctgcctccaaaacagggatccctggcaggctgtctttccacgcccctgagttcagagtcggggacccaggccaggtcgggagcacagccgctccccaaacccagcaaaccggcagagagccggtttcccagcagccggagccctgcaggagaggcctttgtgttttgttttgttttgttttttctcttttgagacaagagtttcactctgtcgcccaggctggagtgcagtggtgtgatctcggctcactgcaacctctgcctcccgtgttcaagcagttctcctgcctcagcctcccaaatagctgggattacagttgcctgccaccacgcccagctaatttttatatttttagtacagatggggtttcaccatgttggccaggctggtctcgaactcctgacctcaagtgatccacccgccttggcctcccaaagtgctgggataataggtgtcagccaccgcgcccagcctggagtggccttttatgagaggggacccgtcaaatctgtgccttatggaggggtccggcagcggccacaattgtcttgtcccctcaccccccaactccccctggaacacctctcccaggcaagacattttcacagcaccattcacaacggttgggccaaaaagaaacttttccttcatcatttcctgcactcgctgaccacaactttggacaccccaggctgccacccctccccacccgttcacccccaggatgctgttgctgtaggacgcctgctgccctggagccctccccaggatgtgagccagtcccctcgctggtacggaatgccgctgggtgcccggaggcggccatggtgtctcgatggacggcagccaggatggagcacccatgggtctcacggccatgcttcagggtcttcaggtcctgcccccggccagtctgccaagaggcacccccttccccagcctctcgcctgcactgatgcagacaaaatctcacctggcaggcccaacccccccccacccctcccccgccgtgtgtggcccctcgccgcatcgttggggttttgttatgtgaaaatatcctggaaataaatacatgtttctgcacttaga

SEQ ID NO: 179539 - DNA, 783 bp, Homo sapiens
  Payload ID: 15388
  Gene Symbol: SCAMP4
  Gene Name: secretory carrier membrane protein 4
  ENST ID: ENST00000411971
  CDS Start-End: 414-783
actgcatctccggttctgtgctttgttgaacgcgtgagcttcgggcagcgctggggccgcttcagcgtgacctccaaggccactggcctggagttccactggctgctggtcccccatctgtggggcgccccggcggctgaggcgtggaccaggcagtgcatgtcgaggagtagcacccacagctgcgcggctgcgaaatgatccagagacacatccctgtctgcgggaggagccgtccataccagcggggatgtgtagtccaggctggcagttcaggatcacccggctggagtcattttaagatcatctgcggcttagccccagcaccatctgaggcagtactgtctgctagaaataactgtgagcacacaggcggctgcaggcttcagcctgcgctggttggtgaaacagagatgtcagaaaaggagaacaacttcccgccactgcccaagttcatccctgtgaagccctgcttctaccagaacttctccgacgagatcccagtggagcaccaggtcctggtgaagaggatctaccggctgtggatgttttactgcgccaccctcggcgtcaacctcattgcctgcctggcctggtggatcggcggaggctcggggaccaacttcggcctggccttcgtgtggctgctcctgttcacgccttgcggctacgtgtgctggttccggcctgtctacaaggccttccgagccgacagctcctttaatttcatggcgtttttcttcatcttcggagcccagtttgtcctgaccgtcatccaggcga

SEQ ID NO: 179540 - DNA, 570 bp, Homo sapiens
  Payload ID: 15388
  Gene Symbol: SCAMP4
  Gene Name: secretory carrier membrane protein 4
  ENST ID: ENST00000590266
  CDS Start-End: 400-570
gcttccaggtgttccgcggggtgctggaggagcagtgccgctggctggaccccgacacgtaggcgccgccctcctgcctccggacccttcccgctcccggccgtggggcgcccctcctggacttccgggcctcgatttcttccgcacaagcctgaccgtggatttcagggacacataccgcctccagcggggagcacgggtgctgccttccgtgcggatcgagctttcctggactcggtcattggggccaccccgtgccagcggtgcccttctgcggccgcccttgctgcgtttgtgtcccctctgtctcgcgggccgggaaactgctctgatgggaaaataaacagcccaaaaccaagcggctgcaggcttcagcctgcgctggttggtgaaacagagatgtcagaaaaggagaacaacttcccgccactgcccaagttcatccctgtgaagccctgcttctaccagaacttctccgacgagatcccagtggagcaccaggtcctggtgaagaggatctaccggctgtggatgttttactgcgccaccctcggcgtcaacctcattgcc

SEQ ID NO: 179541 - DNA, 547 bp, Homo sapiens
  Payload ID: 15388
  Gene Symbol: SCAMP4
  Gene Name: secretory carrier membrane protein 4
  ENST ID: ENST00000588907
  CDS Start-End: 481-547
gtgctttgttgaacgcgtgagcttcgggcagcgctggggccgcttcagcgtgacctccaaggccactggcctggagttccactggctgctggtcccccatctgtggggcgccccggcggctgaggcgtggaccaggcagtgcatgtcgaggagtagcacccacagctgcgcggctgcgaaatgatccagagacacatccctgtctgcgggaggagccgtccataccagcggggatgtgtagtccaggctggcagttcaggatcacccggctggagtcattttaagatcatctgcggcttagccccagcaccatctgaggcagtactgtctgctagaaataactgtgagcacacagaaaaggagaacaacttcccgccactgcccaagttcatccctgtgaagccctgcttctaccagaacttctccgacgagatcccagtggagcaccaggtcctggtgaagaggatctaccggctgtggatgttttactgcgccaccctcggcgtcaacctcattgcctgcctggcctggtggatcggcggaggct

SEQ ID NO: 179542 - DNA, 1172 bp, Homo sapiens
  Payload ID: 15388
  Gene Symbol: SCAMP4
  Gene Name: secretory carrier membrane protein 4
  Uniprot ID: Q969E2
  ENST ID: ENST00000621748
  CDS Start-End: 66-755
agtcgtgggtggatgtcaggccaggcggctgcaggcttcagcctgcgctggttggtgaaacagagatgtcagaaaaggagaacaacttcccgccactgcccaagttcatccctgtgaagccctgcttctaccagaacttctccgacgagatcccagtggagcaccaggtcctggtgaagaggatctaccggctgtggatgttttactgcgccaccctcggcgtcaacctcattgcctgcctggcctggtggatcggcggaggctcggggaccaacttcggcctggccttcgtgtggctgctcctgttcacgccttgcggctacgtgtgctggttccggcctgtctacaaggccttccgagccgacagctcctttaatttcatggcgtttttcttcatcttcggagcccagtttgtcctgaccgtcatccaggcgattggcttctccggctggggcgcgtgcggctggctgtcggcaattggattcttccagtacagcccgggcgctgccgtggtcatgctgcttccagccatcatgttctccgtgtcggctgccatgatggccatcgcgatcatgaaggtgcacaggatctaccgaggggctggcggaagcttccagaaggcacagacggagtggaacacgggcacttggcggaacccaccgtcgagggaggcccagtacaacaacttctcaggcaacagcctgcccgagtaccccactgtgcccagctacccgggcagtggccagtggccttagagggagcctgccctgcccccaccgcccaccacctcctccccttcattcctgctgctacccctggtcccgagggctgggagtacctggggccccatccccccagctgggatggtggaagccggtggtggccacggaccgcccccctcctgccagggccacagaacccgtgttcatctcatccgagagcggagttcctcacaagcactccccagcagcccttggcctctgccgtccacaggacgccctcttgctcccggaaacgtgtggtcacccgccgtccactgcacggctggtacggccttgtcttcaggtctcgaggcctgactccgggggacaggtggcagcaggtcggccgccctcccgtcctcccagagctgctggcgctgaggtcagagcgggtctgatggggagctccgt

SEQ ID NO: 179543 - DNA, 1477 bp, Homo sapiens
  Payload ID: 15388
  Gene Symbol: SCAMP4
  Gene Name: secretory carrier membrane protein 4
  ENST ID: ENST00000414057
  CDS Start-End: 188-609
ggttgggccgggccggttgctaagacttggcgaagcgctgcgctcgcgcccggatccctcagaaaaggagaacaacttcccgccactgcccaagttcatccctgtgaagccctgcttctaccagaacttctccgacgagatcccagtggagcaccaggtcctggtgaagaggatctaccggctgtggatgttttactgcgccaccctcggcgtcaacctcattgcctgcctggcctggtggatcggcggaggctcggggaccaacttcggcctggccttcgtgtggctgctcctgttcacgccttgcggctacgtgtgctggttccggcctgtctacaaggccttccgagccgacagctcctttaatttcatggcgtttttcttcatcttcggagcccagtttgtcctgaccgtcatccaggcgattggcttctccggctggggcgcgtgcggctggctgtcggcaattggattcttccagtacagcccgggcgctgccgtggtcatgctgcttccagccatcatgttctccgtgtcggctgccatgatggccatcgcgatcatgaaggtgcacaggatctaccgaggggctggcggaagcttccagaaggcacagacggagtggaacacgggcacttggcggaacccaccgtcgagggaggcccagtacaacaacttctcaggcaacagcctgcccgagtaccccactgtgcccagctacccgggcagtggccagtggccttagagggagcctgccctgcccccaccgcccaccacctcctccccttcattcctgctgctacccctggtcccgagggctgggagtacctggggccccatccccccagctgggatggtggaagccggtggtggccacggaccgcccccctcctgccagggccacagaacccgtgttcatctcatccgagagcggagttcctcacaagcactccccagcagcccttggcctctgccgtccacaggacgccctcttgctcccggaaacgtgtggtcacccgccgtccactgcacggctggtacggccttgtcttcaggtctcgaggcctgactccgggggacaggtggcagcaggtcggccgccctcccgtcctcccagagctgctggcgctgaggtcagagcgggtctgatggggagctccgtctcaccggccacccgccgtcaccatggcagatgcccttggccggaactaataagaggcgtcggggccagcttccggtcccctgcagtgatagagggcttggtgcctagctgagtcctcgctgtccccgccatcccctgatctgtgcggctccagcctcgccccctccccacgtgcaccatacctggggagttcctggtccagggtatcctggggccaccctccctgcctccaaaacagggatccctggcaggctgtctttccacgcccctgagttcagagtcggggacccaggccaggtcgggagcacagccgct

SEQ ID NO: 179544 - DNA, 569 bp, Homo sapiens
  Payload ID: 15388
  Gene Symbol: SCAMP4
  Gene Name: secretory carrier membrane protein 4
  ENST ID: ENST00000460767
  CDS Start-End: 91-198
cggttgctaagacttggcgaagcgctgcgctcgcgcccggatccctcaggcggctgcaggcttcagcctgcgctggttggtgaaacagagatgtcaggcgcccagggacacttcctcaggcagtgctggctgagcagaagctcctggggggctcccagtgccacgctgagtgccccaaaggctgtgttcccatcttgatccctggaacctaaaaggagaacaacttcccgccactgcccaagttcatccctgtgaagccctgcttctaccagaacttctccgacgagatcccagtggagcaccaggtcctggtgaagaggatctaccggctgtggatgttttactgcgccaccctcggcgtcaacctcattgcctgcctggcctggtggatcggcggaggctcggggaccaacttcggcctggccttcgtgtggctgctcctgttcacgccttgcggctacgtgtgctggttccggcctgtctacaaggccttccgagccgacagctcctttaatttcatggcgtttttcttcatcttcggagcccagtttgtcctgaccgtcatccag

SEQ ID NO: 179545 - DNA, 3427 bp, Homo sapiens
  Payload ID: 15389
  Gene Symbol: SCAMP5
  Gene Name: secretory carrier membrane protein 5
  Uniprot ID: Q8TAC9
  ENST ID: ENST00000361900
  CDS Start-End: 208-915
tccgcgccgcatcgctcgggtgcagcgcagctcagcgcagcgctgcggcctttcggcagccgaacggccgcggcagcatttcctttacaggctgcacttccttccctgctgccagccaggagtttcggaaggtttcctggaggaagtgtgatacagcagttcaggacaaagaggtgtgggcaggccactgggccagctggtaacatcatggcagagaaagtgaacaacttcccaccattgcccaaattcatcccgctgaagccatgtttctaccaagacttcgaggcagatattcctccccagcatgtcagcatgaccaagcgcctctactacctctggatgttgaacagcgtcacgctggccgtgaacctggtgggctgtctcgcgtggctgatcggaggcgggggagccaccaactttggcctcgcctttctctggctcatcctcttcacaccctgctcctacgtctgctggtttcggcccatttacaaggccttcaagactgacagctccttcagtttcatggcattcttctttaccttcatggctcagttggtcatcagcatcatccaggccgtgggcatcccaggctggggcgtctgcggctggattgctaccatctccttcttcggaacgaacattggctcggcggtggtgatgctaattcccactgtcatgttcacagtgatggccgtcttttccttcatcgccctcagcatggttcataaattttaccggggaagtggggggagtttcagcaaagctcaggaggagtggaccacaggggcctggaagaatccacatgtgcagcaggcagcccagaacgcagccatgggggcagcccagggtgccatgaatcagcctcagactcagtattccgccacccccaattacacgtactccaatgagatgtgaaccagccacgcctaccaggtggcagagctggggccattgggacagggggctcaagccacatcgtcatttgtggttaccaagcagggttcccccttcccttttctccttccctactttgtacaaaggaccagagttatatatatatatatatgtatatgtctgtaccccagcccccacctttcagattctgctcttggcactcagctgtgggctgcacgtggagctgtcccgtgcggtagtagctgtgtctgtgtcccctcgtgaaatagtgtgcagtggaggtctcttgtggtgctagatgtgtgtttagagctaaaccagcccccacccccaccctccacctgcccctcttgcctctggcccctctgaccctggcccagggacccctcacggggccaggggaggcatagcagaaagactggccccttcctagggttatgagctggaactgtttctactttcagtcttcctgggaagtaacagtacttagcactcttggtggtgggtgggagggtgggtacaggccagggatattcccttgctcttttgatccctccaggcctcgcctccttcagcctcctcctccctcatctgttccctgatgtcacattccctgtgcaatcttcccttgcccatggtctgtctatctctttcctatgtggcttttctttgtcttccccaaggctgagtgtcccagttttatctgctcctgagactgagcccagatccccaaatctaatctgatttacagttcaaggaagctgatggggagctgggccttacccctgatgtaggaggggcacacagctgggggtgcagagcccacctgggtacctgacccccaggggatgaaaatgcaaggatgagtctgcttgggcctgagagtttgatctgcaggggcaggctcatcttttctctcccctgccttctcctccttctctccccagagcccccttgagcccctctgcctatgtccctctgcctcctccccatgcccccagttgctgtggcttgattctgctaccctgaccccaccatgtgccaggtggcatctgccttactgccttccctgaggagctgggacatgctgggcagttgtcagatgtaaaggcacagctggagcagagggcatgtcagtaatgattggtccctggggaaggtctggctggctccagcacagtgaggcatttaggtatctctcggtgaccgttggattcctggaagcagtagctgttctgtttggatctggtaggacagggctcagagggctaggcacggagggaaggtcagaggagaaggcaggcagggcccagtgagaggggagcatgccttcccccaccctggcttgctcttggtcacagggcggttctgggcacttgaactcagggcccaagcagaagcacaggcccagtcctggctgcaagcacaatagcctgaatgggatttcaggttaggcagggtgggaggggaggctctctggctttagttttgttttgttttccaaatcaaggtaacttgctcccttctgcctacaggccttggtcttggcttgtcctcacccagtcggaactccctaccactttcaggagagtggttttaggcccgtggggctgttctgttccaagcagtgtgagaacatggctggtagaggctctagctgtgtgcggggcctgaaggggagtgggttctcgcccaaagagcatctgcccatttcccaccttcccttctcccaccagaagcttgcctgagctgtttggacaaaaatccaaaccccacttggctactctggcctggcttcagcttggaacccaatacctaggcttacaggccatcctgagccaggggcctctggaaattctcttcctgatggtcctttaggtttgggcacaaaatataattgcctctcccctctcccattttctctcttgggagcaatggtcacagtccctggtacctgaaaaggtacctaggtctaggcccttcttccctttcccttcctctcccctaccccagaactttggctccctttcccttctctctctggtagctccaggaggcctgtgatccagctccctgcctagcatccatgacctgttggatgttacctccaatcagtttcctgtcctacctgcctctttggcttggacctatatggccatgctctggctctacccttgggaagcctgatcccggtgtgtggcccagcttgttcaggccctgggatgctgcatctccaggcaactatgcactttcccggggagagaaccagtatgagaagtgggggcagggcacacattcatctttgtaggaaggtctggcctggggtcgggtgaaggagggcccaggtcagttctggggtcccagtgacctgctttgccattctcctggtgccgctgctgctccctgtttctggagctggatgttccccagctggcagttgagctgcctgagccaatgtgtctgtctttggtaactgagtgaaccataataaaggggaacatttggccctgtg

SEQ ID NO: 179546 - DNA, 3411 bp, Homo sapiens
  Payload ID: 15389
  Gene Symbol: SCAMP5
  Gene Name: secretory carrier membrane protein 5
  Uniprot ID: Q8TAC9
  ENST ID: ENST00000425597
  CDS Start-End: 191-898
ggcctcgggcgcgcgcgcgcgcgcgcgcgctccccgcccccagccccggagcggctcgcggccggctccgcgccgcatcgctcgggtgcagcgcagctcagcgcagcgctgcggcctttcggcagccgaacggccgcggcagttcaggacaaagaggtgtgggcaggccactgggccagctggtaacatcatggcagagaaagtgaacaacttcccaccattgcccaaattcatcccgctgaagccatgtttctaccaagacttcgaggcagatattcctccccagcatgtcagcatgaccaagcgcctctactacctctggatgttgaacagcgtcacgctggccgtgaacctggtgggctgtctcgcgtggctgatcggaggcgggggagccaccaactttggcctcgcctttctctggctcatcctcttcacaccctgctcctacgtctgctggtttcggcccatttacaaggccttcaagactgacagctccttcagtttcatggcattcttctttaccttcatggctcagttggtcatcagcatcatccaggccgtgggcatcccaggctggggcgtctgcggctggattgctaccatctccttcttcggaacgaacattggctcggcggtggtgatgctaattcccactgtcatgttcacagtgatggccgtcttttccttcatcgccctcagcatggttcataaattttaccggggaagtggggggagtttcagcaaagctcaggaggagtggaccacaggggcctggaagaatccacatgtgcagcaggcagcccagaacgcagccatgggggcagcccagggtgccatgaatcagcctcagactcagtattccgccacccccaattacacgtactccaatgagatgtgaaccagccacgcctaccaggtggcagagctggggccattgggacagggggctcaagccacatcgtcatttgtggttaccaagcagggttcccccttcccttttctccttccctactttgtacaaaggaccagagttatatatatatatatatgtatatgtctgtaccccagcccccacctttcagattctgctcttggcactcagctgtgggctgcacgtggagctgtcccgtgcggtagtagctgtgtctgtgtcccctcgtgaaatagtgtgcagtggaggtctcttgtggtgctagatgtgtgtttagagctaaaccagcccccacccccaccctccacctgcccctcttgcctctggcccctctgaccctggcccagggacccctcacggggccaggggaggcatagcagaaagactggccccttcctagggttatgagctggaactgtttctactttcagtcttcctgggaagtaacagtacttagcactcttggtggtgggtgggagggtgggtacaggccagggatattcccttgctcttttgatccctccaggcctcgcctccttcagcctcctcctccctcatctgttccctgatgtcacattccctgtgcaatcttcccttgcccatggtctgtctatctctttcctatgtggcttttctttgtcttccccaaggctgagtgtcccagttttatctgctcctgagactgagcccagatccccaaatctaatctgatttacagttcaaggaagctgatggggagctgggccttacccctgatgtaggaggggcacacagctgggggtgcagagcccacctgggtacctgacccccaggggatgaaaatgcaaggatgagtctgcttgggcctgagagtttgatctgcaggggcaggctcatcttttctctcccctgccttctcctccttctctccccagagcccccttgagcccctctgcctatgtccctctgcctcctccccatgcccccagttgctgtggcttgattctgctaccctgaccccaccatgtgccaggtggcatctgccttactgccttccctgaggagctgggacatgctgggcagttgtcagatgtaaaggcacagctggagcagagggcatgtcagtaatgattggtccctggggaaggtctggctggctccagcacagtgaggcatttaggtatctctcggtgaccgttggattcctggaagcagtagctgttctgtttggatctggtaggacagggctcagagggctaggcacggagggaaggtcagaggagaaggcaggcagggcccagtgagaggggagcatgccttcccccaccctggcttgctcttggtcacagggcggttctgggcacttgaactcagggcccaagcagaagcacaggcccagtcctggctgcaagcacaatagcctgaatgggatttcaggttaggcagggtgggaggggaggctctctggctttagttttgttttgttttccaaatcaaggtaacttgctcccttctgcctacaggccttggtcttggcttgtcctcacccagtcggaactccctaccactttcaggagagtggttttaggcccgtggggctgttctgttccaagcagtgtgagaacatggctggtagaggctctagctgtgtgcggggcctgaaggggagtgggttctcgcccaaagagcatctgcccatttcccaccttcccttctcccaccagaagcttgcctgagctgtttggacaaaaatccaaaccccacttggctactctggcctggcttcagcttggaacccaatacctaggcttacaggccatcctgagccaggggcctctggaaattctcttcctgatggtcctttaggtttgggcacaaaatataattgcctctcccctctcccattttctctcttgggagcaatggtcacagtccctggtacctgaaaaggtacctaggtctaggcccttcttccctttcccttcctctcccctaccccagaactttggctccctttcccttctctctctggtagctccaggaggcctgtgatccagctccctgcctagcatccatgacctgttggatgttacctccaatcagtttcctgtcctacctgcctctttggcttggacctatatggccatgctctggctctacccttgggaagcctgatcccggtgtgtggcccagcttgttcaggccctgggatgctgcatctccaggcaactatgcactttcccggggagagaaccagtatgagaagtgggggcagggcacacattcatctttgtaggaaggtctggcctggggtcgggtgaaggagggcccaggtcagttctggggtcccagtgacctgctttgccattctcctggtgccgctgctgctccctgtttctggagctggatgttccccagctggcagttgagctgcctgagccaatgtgtctgtctttggtaactgagtgaaccataataaaggggaacatttggccctgtgt

SEQ ID NO: 179547 - DNA, 710 bp, Homo sapiens
  Payload ID: 15389
  Gene Symbol: SCAMP5
  Gene Name: secretory carrier membrane protein 5
  ENST ID: ENST00000568081
  CDS Start-End: 126-632
ggaaatccctccctgtgtaatgttgcaacacacaggtctaccacgtggaaacttgcaaagatgtatgggtagaactaaccccttctgacctctcaattaaggcctttaaatgtcttctgtccattatgcacttaaacttggaagggcttgggggccttgaaggcagggaagccctggccctctgcccaggtgacgggagccacctcctctgccgcaggactgacagctccttcagtttcatggcattcttctttaccttcatggctcagttggtcatcagcatcatccaggccgtgggcatcccaggctggggcgtctgcggctggattgctaccatctccttcttcggaacgaacattggctcggcggtggtgatgctaattcccactgtcatgttcacagtgatggccgtcttttccttcatcgccctcagcatggttcataaattttaccggggaagtggggggagtttcagcaaagctcaggaggagtggaccacaggggcctggaagaatccacatgtgcagcaggcagcccagaacgcagccatgggggcagcccagggtgccatgaatcagcctcagactcagtattccgccacccccaattacacgtactccaatgagatgtgaaccagccacgcctaccaggtggcagagctggggccattgggacagggggctcaagccacatcgtcatttgtggttacc

SEQ ID NO: 179548 - DNA, 561 bp, Homo sapiens
  Payload ID: 15389
  Gene Symbol: SCAMP5
  Gene Name: secretory carrier membrane protein 5
  ENST ID: ENST00000566872
  CDS Start-End: 276-561
tccgcgccgcatcgctcgggtgcagcgcagctcagcgcagcgctgcggcctttcggcagccgaacggccgcggcagcatttcctttacaggctgcacttccttccctgctgccagccaggagtttcggaaggtttcctggaggaagtgtgatacagcaggttcaatcaattctcctgcttcaacctcccgagtagctggaactacaggcacatgccaccacgcccagttcaggacaaagaggtgtgggcaggccactgggccagctggtaacatcatggcagagaaagtgaacaacttcccaccattgcccaaattcatcccgctgaagccatgtttctaccaagacttcgaggcagatattcctccccagcatgtcagcatgaccaagcgcctctactacctctggatgttgaacagcgtcacgctggccgtgaacctggtgggctgtctcgcgtggctgatcggaggcgggggagccaccaactttggcctcgcctttctctggctcatcctcttcacaccctgctcctacgtctgctggtttcggcccatttacaagg

SEQ ID NO: 179549 - DNA, 588 bp, Homo sapiens
  Payload ID: 15389
  Gene Symbol: SCAMP5
  Gene Name: secretory carrier membrane protein 5
  ENST ID: ENST00000567920
  CDS Start-End: 218-588
agccccggagcggctcgcggccggctccgcgccgcatcgctcgggtgcagcgcagctcagcgcagcgctgcggcctttcggcagccgaacggccgcggcaggttcaatcaattctcctgcttcaacctcccgagtagctggaactacaggcacatgccaccacgcccagttcaggacaaagaggtgtgggcaggccactgggccagctggtaacatcatggcagagaaagtgaacaacttcccaccattgcccaaattcatcccgctgaagccatgtttctaccaagacttcgaggcagatattcctccccagcatgtcagcatgaccaagcgcctctactacctctggatgttgaacagcgtcacgctggccgtgaacctggtgggctgtctcgcgtggctgatcggaggcgggggagccaccaactttggcctcgcctttctctggctcatcctcttcacaccctgctcctacgtctgctggtttcggcccatttacaaggccttcaagactgacagctccttcagtttcatggcattcttctttaccttcatggctcagttggtcatcagcatcatccaggccgt

SEQ ID NO: 179550 - DNA, 516 bp, Homo sapiens
  Payload ID: 15389
  Gene Symbol: SCAMP5
  Gene Name: secretory carrier membrane protein 5
  ENST ID: ENST00000564779
  CDS Start-End: 72-516
attgcattcacggcactgtgggattcaggacaaagaggtgtgggcaggccactgggccagctggtaacatcatggcagagaaagtgaacaacttcccaccattgcccaaattcatcccgctgaagccatgtttctaccaagacttcgaggcagatattcctccccagcatgtcagcatgaccaagcgcctctactacctctggatgttgaacagcgtcacgctggccgtgaacctggtgggctgtctcgcgtggctgatcggaggcgggggagccaccaactttggcctcgcctttctctggctcatcctcttcacaccctgctcctacgtctgctggtttcggcccatttacaaggccttcaagactgacagctccttcagtttcatggcattcttctttaccttcatggctcagttggtcatcagcatcatccaggccgtgggcatcccaggctggggcgtctgcggctggattgctaccatctccttcttcggaacgaacattggctcggcgg

SEQ ID NO: 179551 - DNA, 966 bp, Homo sapiens
  Payload ID: 15389
  Gene Symbol: SCAMP5
  Gene Name: secretory carrier membrane protein 5
  ENST ID: ENST00000567529
  CDS Start-End: 34-171
tgtgggcaggccactgggccagctggtaacatcatggcagagaaagtgaacaacttcccaccattgcccaaattcatcccgctgaagccatgtttctaccaagacttcgaggcagatattcctccccagcatgtcagcatgaccaagcgcctctactacctctggatgtgactgacagctccttcagtttcatggcattcttctttaccttcatggctcagttggtcatcagcatcatccaggccgtgggcatcccaggctggggcgtctgccccacactggcctcttcctgcagcggctggattgctaccatctccttcttcggaacgaacattggctcggcggtggtgatgctaattcccactgtcatgttcacagtgatggccgtcttttccttcatcgccctcagcatggttcataaattttaccggggaagtggggggagtttcagcaaagctcaggaggagtggaccacaggggcctggaagaatccacatgtgcagcaggcagcccagaacgcagccatgggggcagcccagggtgccatgaatcagcctcagactcagtattccgccacccccaattacacgtactccaatgagatgtgaaccagccacgcctaccaggtggcagagctggggccattgggacagggggctcaagccacatcgtcatttgtggttaccaagcagggttcccccttcccttttctccttccctactttgtacaaaggaccagagttatatatatatatatatgtatatgtctgtaccccagcccccacctttcagattctgctcttggcactcagctgtgggctgcacgtggagctgtcccgtgcggtagtagctgtgtctgtgtcccctcgtgaaatagtgtgcagtggaggtctcttgtggtgctagatgtgtgtttagagctaaaccagcccccacccccaccctccacctgcccctcttgcctct

SEQ ID NO: 179552 - DNA, 3400 bp, Homo sapiens
  Payload ID: 15389
  Gene Symbol: SCAMP5
  Gene Name: secretory carrier membrane protein 5
  Uniprot ID: Q8TAC9
  ENST ID: ENST00000562212
  CDS Start-End: 159-890
cccgcccccagccccggagcggctcgcggccggctccgcgccgcatcgctcgggtgcagcgcagctcagcgcagcgctgcggcctttcggcagccgaacggccgcggcagttcaggacaaagaggtgtgggcaggccactgggccagctggtaacatcatggcagagaaagtgaacaacttcccaccattgcccaaattcatcccgctgaagccatgtttctaccaagacttcgaggcagatattcctccccagcatgtcagcatgaccaagcgcctctactacctctggatgttgaacagcgtcacgctggccgtgaacctggtgggctgtctcgcgtggctgatcggaggcgggggagccaccaactttggcctcgcctttctctggctcatcctcttcacaccctgctcctacgtctgctggtttcggcccatttacaaggccttcaagactgacagctccttcagtttcatggcattcttctttaccttcatggctcagttggtcatcagcatcatccaggccgtgggcatcccaggctggggcgtctgccccacactggcctcttcctgcagcggctggattgctaccatctccttcttcggaacgaacattggctcggcggtggtgatgctaattcccactgtcatgttcacagtgatggccgtcttttccttcatcgccctcagcatggttcataaattttaccggggaagtggggggagtttcagcaaagctcaggaggagtggaccacaggggcctggaagaatccacatgtgcagcaggcagcccagaacgcagccatgggggcagcccagggtgccatgaatcagcctcagactcagtattccgccacccccaattacacgtactccaatgagatgtgaaccagccacgcctaccaggtggcagagctggggccattgggacagggggctcaagccacatcgtcatttgtggttaccaagcagggttcccccttcccttttctccttccctactttgtacaaaggaccagagttatatatatatatatatgtatatgtctgtaccccagcccccacctttcagattctgctcttggcactcagctgtgggctgcacgtggagctgtcccgtgcggtagtagctgtgtctgtgtcccctcgtgaaatagtgtgcagtggaggtctcttgtggtgctagatgtgtgtttagagctaaaccagcccccacccccaccctccacctgcccctcttgcctctggcccctctgaccctggcccagggacccctcacggggccaggggaggcatagcagaaagactggccccttcctagggttatgagctggaactgtttctactttcagtcttcctgggaagtaacagtacttagcactcttggtggtgggtgggagggtgggtacaggccagggatattcccttgctcttttgatccctccaggcctcgcctccttcagcctcctcctccctcatctgttccctgatgtcacattccctgtgcaatcttcccttgcccatggtctgtctatctctttcctatgtggcttttctttgtcttccccaaggctgagtgtcccagttttatctgctcctgagactgagcccagatccccaaatctaatctgatttacagttcaaggaagctgatggggagctgggccttacccctgatgtaggaggggcacacagctgggggtgcagagcccacctgggtacctgacccccaggggatgaaaatgcaaggatgagtctgcttgggcctgagagtttgatctgcaggggcaggctcatcttttctctcccctgccttctcctccttctctccccagagcccccttgagcccctctgcctatgtccctctgcctcctccccatgcccccagttgctgtggcttgattctgctaccctgaccccaccatgtgccaggtggcatctgccttactgccttccctgaggagctgggacatgctgggcagttgtcagatgtaaaggcacagctggagcagagggcatgtcagtaatgattggtccctggggaaggtctggctggctccagcacagtgaggcatttaggtatctctcggtgaccgttggattcctggaagcagtagctgttctgtttggatctggtaggacagggctcagagggctaggcacggagggaaggtcagaggagaaggcaggcagggcccagtgagaggggagcatgccttcccccaccctggcttgctcttggtcacagggcggttctgggcacttgaactcagggcccaagcagaagcacaggcccagtcctggctgcaagcacaatagcctgaatgggatttcaggttaggcagggtgggaggggaggctctctggctttagttttgttttgttttccaaatcaaggtaacttgctcccttctgcctacaggccttggtcttggcttgtcctcacccagtcggaactccctaccactttcaggagagtggttttaggcccgtggggctgttctgttccaagcagtgtgagaacatggctggtagaggctctagctgtgtgcggggcctgaaggggagtgggttctcgcccaaagagcatctgcccatttcccaccttcccttctcccaccagaagcttgcctgagctgtttggacaaaaatccaaaccccacttggctactctggcctggcttcagcttggaacccaatacctaggcttacaggccatcctgagccaggggcctctggaaattctcttcctgatggtcctttaggtttgggcacaaaatataattgcctctcccctctcccattttctctcttgggagcaatggtcacagtccctggtacctgaaaaggtacctaggtctaggcccttcttccctttcccttcctctcccctaccccagaactttggctccctttcccttctctctctggtagctccaggaggcctgtgatccagctccctgcctagcatccatgacctgttggatgttacctccaatcagtttcctgtcctacctgcctctttggcttggacctatatggccatgctctggctctacccttgggaagcctgatcccggtgtgtggcccagcttgttcaggccctgggatgctgcatctccaggcaactatgcactttcccggggagagaaccagtatgagaagtgggggcagggcacacattcatctttgtaggaaggtctggcctggggtcgggtgaaggagggcccaggtcagttctggggtcccagtgacctgctttgccattctcctggtgccgctgctgctccctgtttctggagctggatgttccccagctggcagttgagctgcctgagccaatgtgtctgtctttggtaactgagtgaaccataataaaggggaacatttggccctg

SEQ ID NO: 179553 - DNA, 1206 bp, Homo sapiens
  Payload ID: 15389
  Gene Symbol: SCAMP5
  Gene Name: secretory carrier membrane protein 5
  ENST ID: ENST00000562765
  CDS Start-End: 150-287
agccccggagcggctcgcggccggctccgcgccgcatcgctcgggtgcagcgcagctcagcgcagcgctgcggcctttcggcagccgaacggccgcggcagttcaggacaaagaggtgtgggcaggccactgggccagctggtaacatcatggcagagaaagtgaacaacttcccaccattgcccaaattcatcccgctgaagccatgtttctaccaagacttcgaggcagatattcctccccagcatgtcagcatgaccaagcgcctctactacctctggatgtgactgacagctccttcagtttcatggcattcttctttaccttcatggctcagttggtcatcagcatcatccaggccgtgggcatcccaggctggggcgtctgcggctggattgctaccatctccttcttcggaacgaacattggctcggcggtggtgatgctaattcccactgtcatgttcacagtgatggccgtcttttccttcatcgccctcagcatggttcataaattttaccggggaagtggggggagtttcagcaaagctcaggaggagtggaccacaggggcctggaagaatccacatgtgcagcaggcagcccagaacgcagccatgggggcagcccagggtgccatgaatcagcctcagactcagtattccgccacccccaattacacgtactccaatgagatgtgaaccagccacgcctaccaggtggcagagctggggccattgggacagggggctcaagccacatcgtcatttgtggttaccaagcagggttcccccttcccttttctccttccctactttgtacaaaggaccagagttatatatatatatatatgtatatgtctgtaccccagcccccacctttcagattctgctcttggcactcagctgtgggctgcacgtggagctgtcccgtgcggtagtagctgtgtctgtgtcccctcgtgaaatagtgtgcagtggaggtctcttgtggtgctagatgtgtgtttagagctaaaccagcccccacccccaccctccacctgcccctcttgcctctggcccctctgaccctggcccagggacccctcacggggccaggggaggcatagcagaaagactggccccttcctagggttatgagctggaactgtttctactttcagtcttcctgggaagtaacagtacttagcactcttggtggtggg

SEQ ID NO: 179554 - DNA, 579 bp, Homo sapiens
  Payload ID: 15389
  Gene Symbol: SCAMP5
  Gene Name: secretory carrier membrane protein 5
  ENST ID: ENST00000562327
  CDS Start-End: 231-579
gcgcgcgcgcgcgcgcgcgctccccgcccccagccccggagcggctcgcggccggctccgcgccgcatcgctcgggtgcagcgcagctcagcgcagcgctgcggcctttcggcagccgaacggccgcggcagaaccccgaccaagaacagatgccgggcccccagtcgctgccccatcaaggttcaggacaaagaggtgtgggcaggccactgggccagctggtaacatcatggcagagaaagtgaacaacttcccaccattgcccaaattcatcccgctgaagccatgtttctaccaagacttcgaggcagatattcctccccagcatgtcagcatgaccaagcgcctctactacctctggatgttgaacagcgtcacgctggccgtgaacctggtgggctgtctcgcgtggctgatcggaggcgggggagccaccaactttggcctcgcctttctctggctcatcctcttcacaccctgctcctacgtctgctggtttcggcccatttacaaggccttcaagactgacagctccttcagtttcatggcattcttctttaccttcatggctcagttgg

SEQ ID NO: 179555 - DNA, 600 bp, Homo sapiens
  Payload ID: 15389
  Gene Symbol: SCAMP5
  Gene Name: secretory carrier membrane protein 5
  ENST ID: ENST00000568018
  CDS Start-End: 308-600
gcgcgctccccgcccccagccccggagcggctcgcggccggctccgcgccgcatcgctcgggtgcagcgcagctcagcgcagcgctgcggcctttcggcagccgaacggccgcggcagacggagtcttgctctgtcgccgggctggagggcagtggcacgatctcggctcactgcaacctctgcctcccaggttcaatcaattctcctgcttcaacctcccgagtagctggaactacaggcacatgccaccacgcccagttcaggacaaagaggtgtgggcaggccactgggccagctggtaacatcatggcagagaaagtgaacaacttcccaccattgcccaaattcatcccgctgaagccatgtttctaccaagacttcgaggcagatattcctccccagcatgtcagcatgaccaagcgcctctactacctctggatgttgaacagcgtcacgctggccgtgaacctggtgggctgtctcgcgtggctgatcggaggcgggggagccaccaactttggcctcgcctttctctggctcatcctcttcacaccctgctcctacgtctgctggtttcggcccatttacaaggccttcaa

SEQ ID NO: 179556 - DNA, 554 bp, Homo sapiens
  Payload ID: 15389
  Gene Symbol: SCAMP5
  Gene Name: secretory carrier membrane protein 5
  ENST ID: ENST00000565989
  CDS Start-End: 347-554
aaccggccttctggagatggcgtgcgcagccggggatgggggcgactggaagggggtgcccgtggcttcctttgggcctttccttccaactagcgcctgcaggtggacccgggttgacttccctcacctccctcgggcggccgacctttggatggcggacctcagccgccccagggttgcgaggcgacgggcgcgctggcccaggccaccaggcgggctccatcagggctttgggtggtgagttgggggcgccggatttggctcatttcaacgctggccggaggtcacgaggatggagttcaggacaaagaggtgtgggcaggccactgggccagctggtaacatcatggcagagaaagtgaacaacttcccaccattgcccaaattcatcccgctgaagccatgtttctaccaagacttcgaggcagatattcctccccagcatgtcagcatgaccaagcgcctctactacctctggatgttgaacagcgtcacgctggccgtgaacctggtgggctgtctcgcgtggctgatcggaggcgggggagccacca

SEQ ID NO: 179557 - DNA, 557 bp, Homo sapiens
  Payload ID: 15389
  Gene Symbol: SCAMP5
  Gene Name: secretory carrier membrane protein 5
  ENST ID: ENST00000568119
  CDS Start-End: 418-557
ggaaaccggccttctggagatggcgtgcgcagccggggatgggggcgactggaagggggtgcccgtggcttcctttgggcctttccttccaactagcgcctgcaggtggacccgggttgacttccctcacctccctcgggcggccgacctttggatggcggacctcagccgccccagggttgcgaggcgacgggcgcgctggcccaggccaccaggcgggctccatcagggctttgggtggtgagttgggggcgccggatttggctcatttcaacgctggccggaggtcacgaggatggaggttcaatcaattctcctgcttcaacctcccgagtagctggaactacaggcacatgccaccacgcccagttcaggacaaagaggtgtgggcaggccactgggccagctggtaacatcatggcagagaaagtgaacaacttcccaccattgcccaaattcatcccgctgaagccatgtttctaccaagacttcgaggcagatattcctccccagcatgtcagcatgaccaagcgcctctactacctctggatgtgtga

SEQ ID NO: 179558 - DNA, 1142 bp, Homo sapiens
  Payload ID: 15389
  Gene Symbol: SCAMP5
  Gene Name: secretory carrier membrane protein 5
  ENST ID: ENST00000568423
  CDS Start-End: 298-435
gctagtgcgcggtcagcagagtgcgggaggagctggctgcggctccactccgcgcctccccgcgggcgattacgtcgcggcgtggtcctcgcggggcgcggaagacccagacttcagcctcgccacgcctgcccggagctcgaggctcccggacccccgtccacccctgggacgtgaggagtgaggctttgggccaggctgttccccgaggcgcgtggggaagcgggcgtgacctcttctgaaaaggcgttcaggacaaagaggtgtgggcaggccactgggccagctggtaacatcatggcagagaaagtgaacaacttcccaccattgcccaaattcatcccgctgaagccatgtttctaccaagacttcgaggcagatattcctccccagcatgtcagcatgaccaagcgcctctactacctctggatgtgactgacagctccttcagtttcatggcattcttctttaccttcatggctcagttggtcatcagcatcatccaggccgtgggcatcccaggctggggcgtctgcggctggattgctaccatctccttcttcggaacgaacattggctcggcggtggtgatgctaattcccactgtcatgttcacagtgatggccgtcttttccttcatcgccctcagcatggttcataaattttaccggggaagtggggggagtttcagcaaagctcaggaggagtggaccacaggggcctggaagaatccacatgtgcagcaggcagcccagaacgcagccatgggggcagcccagggtgccatgaatcagcctcagactcagtattccgccacccccaattacacgtactccaatgagatgtgaaccagccacgcctaccaggtggcagagctggggccattgggacagggggctcaagccacatcgtcatttgtggttaccaagcagggttcccccttcccttttctccttccctactttgtacaaaggaccagagttatatatatatatatatgtatatgtctgtaccccagcccccacctttcagattctgctcttggcactcagctgtgggctgcacgtggagctgtcccgtgcggtagtagctgtgtctgtgtcccctcgtgaaatagtgtgcagtggaggtctcttgtggtg

SEQ ID NO: 179559 - DNA, 532 bp, Homo sapiens
  Payload ID: 15389
  Gene Symbol: SCAMP5
  Gene Name: secretory carrier membrane protein 5
  ENST ID: ENST00000564491
  CDS Start-End: 175-312
tccgcgccgcatcgctcgggtgcagcgcagctcagcgcagcgctgcggcctttcggcagccgaacggccgcggcagaaccccgaccaagaacagatgccgggcccccagtcgctgccccatcaaggttcaggacaaagaggtgtgggcaggccactgggccagctggtaacatcatggcagagaaagtgaacaacttcccaccattgcccaaattcatcccgctgaagccatgtttctaccaagacttcgaggcagatattcctccccagcatgtcagcatgaccaagcgcctctactacctctggatgtgactgacagctccttcagtttcatggcattcttctttaccttcatggctcagttggtcatcagcatcatccaggccgtgggcatcccaggctggggcgtctgcggctggattgctaccatctccttcttcggaacgaacattggctcggcggtggtgatgctaattcccactgtcatgttcacagtgatggccgtcttttccttcatcgccctcagcatggt

SEQ ID NO: 179560 - DNA, 596 bp, Homo sapiens
  Payload ID: 15390
  Gene Symbol: SLPI
  Gene Name: secretory leukocyte peptidase inhibitor
  Uniprot ID: P03973
  ENST ID: ENST00000338380
  CDS Start-End: 22-420
agagtcactcctgccttcaccatgaagtccagcggcctcttccccttcctggtgctgcttgccctgggaactctggcaccttgggctgtggaaggctctggaaagtccttcaaagctggagtctgtcctcctaagaaatctgcccagtgccttagatacaagaaacctgagtgccagagtgactggcagtgtccagggaagaagagatgttgtcctgacacttgtggcatcaaatgcctggatcctgttgacaccccaaacccaacaaggaggaagcctgggaagtgcccagtgacttatggccaatgtttgatgcttaacccccccaatttctgtgagatggatggccagtgcaagcgtgacttgaagtgttgcatgggcatgtgtgggaaatcctgcgtttcccctgtgaaagcttgattcctgccatatggaggaggctctggagtcctgctctgtgtggtccaggtcctttccaccctgagacttggctccaccactgatatcctcctttggggaaaggcttggcacacagcaggctttcaagaagtgccagttgatcaatgaataaataaacgagcctatttctctttgca

SEQ ID NO: 179561 - DNA, 3838 bp, Homo sapiens
  Payload ID: 15391
  Gene Symbol: SHPK
  Gene Name: sedoheptulokinase
  Uniprot ID: Q9UHJ6
  ENST ID: ENST00000225519
  CDS Start-End: 104-1540
gattggcaggcgactccccgcccctgccccgcccccctgggcgaagagcgcggacttgtggggccgctggctgcagactggagctgcgcgggtcagggagataatggctgcgcggccgatcaccctcggcattgacctgggcaccacatctgtgaaggcagctctgctgagggccgcgcccgacgacccatccgggttcgcagtgctggcgagctgtgcccgtgctgcgcgggcagaggcggcggtcgagagcgcggtggccgggccccaggggcgggagcaggatgtgagtagaatcctccaagccctacacgagtgccttgctgcccttccccgaccccagctccggagcgtcgtgggcatcggggtgtcgggccagatgcatggagtcgtgttttggaaaacaggccaaggctgtgaatggacagagggagggattaccccggtgttcgagccccgagctgttagccacctggtcacgtggcaggatggccgatgtagcagcgaattcctggcctctctgccccagccgaagtctcatctcagtgtggccacgggcttcggctgtgcaaccatcttctggcttttgaaatatcgcccagagttcctgaagtcctacgacgcagccggtaccatccacgactatgtggttgccatgctgtgtggcttgccaagacctctgatgtccgaccagaatgctgccagctggggctatttcaacacgcagagccaaagctggaacgtagagacactgaggagctcgggttttcctgtccacctgctcccagacatcgccgagcctggcagtgtggcgggcagaacttcccacatgtggtttgaaatcccaaaggggacgcaggtgggagtggccttgggtgatttacaggcctctgtctattcctgcatggcccagaggacagatgcagttctcaacatcagcacctcggttcagctggcagcctccatgccttcaggattccagcctgcacagactccagaccctacggccccagtcgcctacttcccatacttcaacaggacctacctgggggtggccgcgtcactcaacgggggcaatgtgctggccacgttcgtccacatgctggttcagtggatggcagatctaggcctggaggttgaagaatccactgtgtattcacgcatgattcaggcagctgtgcagcagagagatacccacctgaccatcaccccgacagtgctgggggagaggcacctgccggaccagctggcctcagtgaccagaatctcctcctccgacctctccctggggcacgtgacccgggctctgtgccgaggcattgttcagaacctgcactccatgcttccgattcagcagctccaggagtggggcgtggagagggtgatgggcagtgggagtgcgctgtccaggaatgacgtgctgaagcaggaggtgcagagggctttccctttgcccatgtcctttgggcaggatgtggatgcagctgtcggggcagctctggtcatgctccggagacacctcaaccagaaggaatcttagacagcaaactctttcgccaaacgactgctgtgaattttacctgattaacattcctgacaccatctgtgggtcatcctttccctggaccgttcagtggacagctttcaagcagtgcttgttgtgaggtcccatctcggccaagaacttaccttcagaacatactctaataatgcagccaggagccgtcagccagatcccaaatgagtgccttccgaaattgacccacctgggagctatttacaaatgtccatgtgggagagagagagcatgagagcacagtagcccagcctgctggtcagcaggctcatctgtggttcacctgtagacagagagcagatcaatgtgtacttcagacaccagaaagtctggtggctttggtcccaagtgggaaaagagaactgccccatgcccagcttgtgattatcgtttttggagacctgaagcccacactcgggtcgtatggacttctggaaaagttcttgtctcctggactgaaccatgtgaccggaggcccctttcctagtctcatcctcccctggctgcagatgcttagctgggccagggattgacccaagcgcgatgcagcaggcaggctcagaagacgatgcggggctgtgtgccggccttcttgctgcatgtactcagcctcaggagagcttgctgcacccaggccgcccaggtcttcacagcacaactgcctggaaggcaggttgcgagaaggagaggcggatggcatgagcagcaagggggaccgatgctgtgcagctcacaccactccagaacctgacaaggcaccagcaggaccccttgccaggagcatgtctgtgcagcagtgtttttgcccctgcacattccagaagccctcatgggaagggatgcagccaggcagactcctgccagatggggcaggtagtttattcaaagagaactctgtatcccataggcccaggctctcctttcgcttggcgtgggctttgctggcccagtgtgtgctcctggctcagcagaaacatccatttgagttggcatccctgtagggatcccagagcgttgtaagccttcttgtgattggtagggatggctgtggggtggcttccaggagggggccaccattgccgcatctacttctagactcccaaaggagcccaggctcaggcaggcctggcccagagtcacgctggcaaccacgagtttgggaagcagtcgtattctctctctctctctctctctctctctcagtatccatgacaggtatgaaacatattgtctctttataaatgtcattttacaaattatgtgattatctggaagctctaagatgagagcaaatgcctgatcactctggccaaatgtcagatactaaagcccattcttggccgggcatgttggctcccgcctgtaatcccagcactttgggaagcccaagtgggtgaatcacctgaggtcaggagttcaagaccagcctgaccaacatggggataccccgtctctactaaaaatacaagccgggcgtggtggcgcatgcctgtaatcccagctactcaggaggctgaggcaggaaaatcacttgaactcgggaggcagaggttgcagtgagctgagatcgcgccattgcactccagcctgggtgacagagcaagactctgtctcataaataaatacaaagcccattcttccagagtcttgtgccttaaataaaacacacctctctgctgtgggaagactgtgcaatggcacagccgcagagcttggtttgggaggttgaagtgctctggggagaattcgtagatcatcctcagaaaagccttgccctggtgttctaccagaaaaacgtctcccaatcacccaggaaagctgtccacagtagtccccccttatccacggtgtcactttccatgggttcagttatctgcggtcaaccacggtctgacaatattaaatggaaaattcttcaaacagttcccaagttttcccttgtgcattgttctgagcagtgtgatggagagtctctgccgtgccatctgggatgcaaaccgtccctgtgttccccacgtccaggccgtagatgctccccgccggtcagtcacttagtcgtcagatcgcccgtcctggtatcacagtgcttctgttcaggtcagtctttttttacttcattagggccccaaagcaccagagtagtgatgctggtagtgatgctggctgttcggatatgccaaagagaaaccgtaaggtgcttcctttaagtgaaaagatgggaagaaaacagtcatatgctgaatcttctatctgtgaaattct

SEQ ID NO: 179562 - DNA, 3494 bp, Homo sapiens
  Payload ID: 15392
  Gene Symbol: SEH1L
  Gene Name: SEH1-like nucleoporin
  Uniprot ID: Q96EE3
  ENST ID: ENST00000262124
  CDS Start-End: 128-1210
gtgcgggggcgtgggcagcacaagccgtgcgctcccgggctgcgaggtctggctaggctacgggccacgcgccgccgccgctgccgccgccactgtcctcttcggaggcgcgggcccgacggaaaccatgtttgtggctcgcagcatcgcggcggaccacaaggatctcatccacgatgtctctttcgacttccacgggcggcggatggcaacctgctccagcgatcagagcgttaaggtctgggataaaagtgaaagtggtgattggcattgtactgctagctggaagacacatagtggatctgtatggcgtgtgacatgggcccatcctgaatttgggcaggttttggcttcctgttcttttgaccgaacagctgctgtatgggaagaaatagtaggagaatcaaatgataaactgcgaggacagagccactgggttaaaaggacaactctggtggatagcagaacatctgttactgatgtgaagtttgctcccaagcacatgggtcttatgttagcaacctgttccgcagatggtatagtaagaatctatgaggcaccagatgttatgaatctcagccagtggtctttgcagcatgagatctcatgtaagctaagctgtagttgtatttcttggaacccttcaagctctcgtgctcattcccccatgatcgccgtaggaagtgatgacagtagccccaacgcaatggccaaggttcagatttttgaatataatgaaaacaccaggaaatatgcaaaagctgaaactcttatgacagtcactgatcctgttcatgatattgcattcgctccaaatttgggaagatctttccatattctagcaatagcgaccaaagatgtgagaatttttacattaaagcctgtgaggaaagaactgacttcctctggtgggccaacaaagtttgaaatccatatagtggctcagttcgataatcataattctcaggtctggcgagtgagttggaatataacaggaacggtgctagcatcttcaggagatgatgggtgtgtaagattgtggaaagctaattatatggacaattggaagtgtactggtattttgaaaggtaatgggagcccagtcaatgggagttctcagcagggaacctcaaatccttccctaggttcaactattccaagtcttcagaattcattaaatggatcttctgctggcagaaagcacagctgagtacaagctaactggagtaactttgctgttttgctgcttgttgcatgcacacaggaatggaaagcgagctccttttccccttccccagcgccgtttgacctctcccaagatacaccagcagcctgcttactactaaacgcaatccaaaaggcctttaaaaatacagtgtatattttttgtactagtcagtttattgacactatttgaaacttttgaaatataaacggagaggctttctgttgagacattgtcaccaaaacaattttttgaaatgttcctgaaactaatttgggtttaaagattaaaagggttgttaccattcttatctgagtagttgggaggaggggaataccactttagttcatttggaaaatatagacatatttcttttgctttcttaaaacagcttaaaatgatgaacttttataattttaatttgaagattgaataaatattttttataaagattgttttgagtgctgatttgtttactttttgtagatttgctttatccatgatattcagtacaactctgtcatttctttgtaatatttaaaaaatattagtaaaggagtgaattaataaagtagtaatagtaaaatgaaaggaacttgactgtacagtttgtagccaggttaagcatttggtattgtttcatttacaatttgggactaagatggaaacactttttttataagtttttaattcatagtcactaaagagataaatgtttcttatatacatttgtgtatttttatggtgttatttattccatggcttagcttccttcaaatcaaaatttggacacacactattaagagaagccattaaaattttactaaaattgtgcatgtaaattaattgtcagcattccatgtctcaagattttcttaatttagttcgctgtttaaattaattcatgtcctgtaaagttctgaccttgataacaaagctataaatatttaagtttgctaatatgcgtaagtattatcggtaagttacaagatggaagaagaataacagtagggcacagtcattctgtgaatccttttacttatcaaaatttggtagctattctaaggcttttgcagaaaaataagtgttcaatgtttgtagttcttcaaaagcatgttgcagtagccagccatactatgtgtattcccagtatcatgtacgcactaaaaaaaatgtgtgcttgctgctgctgtgagtgaaccattgcttaagataaaaaacttaactagatctgtaaatgtacagaatagcatcagatgtttctgagagattagaaaatgttttgaatttataaaattaatgtttttctttgtaacatttatatatattttttaacattttaagtttaacagattgtattcctttcaagtttctatacttgcttaagcaatcttgatttgagtaagggtcttgatttgtgctattatgttctgttagttttggcatgaatatactaaagcttttttttttttttctagcatgtgttttctcctctttggttctctttgtatttactacttttctctttttcttgtgttttttttttcctgtttttgttttgtttggtgttttgttcctgtcttcattgtttcaggtatttctttacccctctggattccccacgggctggatcgagatggtccagttatgcccagctccttcctcctcctcctcctcctctggtagagcactcttgcgatgctgacactgccaacctccagtatcctcaccctcgcagacgatatctctctcggcctcttaatcccttacctgagaatgaagggatttaaaacactgatttaacattgaaaggccttattcaagtgcttgtaaatgctttcatttctggctgctttttgtttttcattttctttcagaagatttttctaacttagggtctgtcttgcatgtattacaaccagaatacagtgtttggaacctaaatctgtttgtgcgtctgcatcaaaggaacatttgcttcactgggtgataacctttgatgaaatgagatatgtccaagtaacgttaactgtgaagttacacacagtagctgacttcaaagtgcctgttctgtaaattttattttaaactgttaccatagtcttaagttgtttatgctttatcagactggctaatgtgaaagcataatattatgaagtttattctgccttatgagaccttaaaaaatggatttcattttacaggctaatgttgtaactgactagtatgtaaaataaatcattcctgtgtataaagcagcaaaacctaa

SEQ ID NO: 179563 - DNA, 1846 bp, Homo sapiens
  Payload ID: 15392
  Gene Symbol: SEH1L
  Gene Name: SEH1-like nucleoporin
  Uniprot ID: Q96EE3
  ENST ID: ENST00000399892
  CDS Start-End: 102-1367
gtgcgctcccgggctgcgaggtctggctaggctacgggccacgcgccgccgccgctgccgccgccactgtcctcttcggaggcgcgggcccgacggaaaccatgtttgtggctcgcagcatcgcggcggaccacaaggatctcatccacgatgtctctttcgacttccacgggcggcggatggcaacctgctccagcgatcagagcgttaaggtctgggataaaagtgaaagtggtgattggcattgtactgctagctggaagacacatagtggatctgtatggcgtgtgacatgggcccatcctgaatttgggcaggttttggcttcctgttcttttgaccgaacagctgctgtatgggaagaaatagtaggagaatcaaatgataaactgcgaggacagagccactgggttaaaaggacaactctggtggatagcagaacatctgttactgatgtgaagtttgctcccaagcacatgggtcttatgttagcaacctgttccgcagatggtatagtaagaatctatgaggcaccagatgttatgaatctcagccagtggtctttgcagcatgagatctcatgtaagctaagctgtagttgtatttcttggaacccttcaagctctcgtgctcattcccccatgatcgccgtaggaagtgatgacagtagccccaacgcaatggccaaggttcagatttttgaatataatgaaaacaccaggaaatatgcaaaagctgaaactcttatgacagtcactgatcctgttcatgatattgcattcgctccaaatttgggaagatctttccatattctagcaatagcgaccaaagatgtgagaatttttacattaaagcctgtgaggaaagaactgacttcctctggtgggccaacaaagtttgaaatccatatagtggctcagttcgataatcataattctcaggtctggcgagtgagttggaatataacaggaacggtgctagcatcttcaggagatgatgggtgtgtaagattgtggaaagctaattatatggacaattggaagtgtactggtattttgaaaggtaatgggagcccagtcaatgggagttctcagcagggaacctcaaatccttccctaggttcaactattccaagtcttcagaattcattaaatggatcttctgctggcaggtatttctttacccctctggattccccacgggctggatcgagatggtccagttatgcccagctccttcctcctcctcctcctcctctggtagagcactcttgcgatgctgacactgccaacctccagtatcctcaccctcgcagacgatatctctctcggcctcttaatcccttacctgagaatgaagggatttaaaacactgatttaacattgaaaggccttattcaagtgcttgtaaatgctttcatttctggctgctttttgtttttcattttctttcagaagatttttctaacttagggtctgtcttgcatgtattacaaccagaatacagtgtttggaacctaaatctgtttgtgcgtctgcatcaaaggaacatttgcttcactgggtgataacctttgatgaaatgagatatgtccaagtaacgttaactgtgaagttacacacagtagctgacttcaaagtgcctgttctgtaaattttattttaaactgttaccatagtcttaagttgtttatgctttatcagactggctaatgtgaaagcataatattatgaagtttattctgccttatgagaccttaaaaaatggatttcattttacaggctaatgttgtaactgactagtatgtaaaataaatcattcctgtgtataaagcagcaaaacctaa

SEQ ID NO: 179564 - DNA, 863 bp, Homo sapiens
  Payload ID: 15392
  Gene Symbol: SEH1L
  Gene Name: SEH1-like nucleoporin
  ENST ID: ENST00000587761
  CDS Start-End: 75-863
taggctacgggccacgcgccgccgccgctgccgccgccactgtcctcttcggaggcgcgggcccgacggaaaccatgtttgtggctcgcagcatcgcggcggaccacaaggatctcatccacgatgtctctttcgacttccacgggcggcggatggcaacctgctccagcgatcagagcgttaaggtctgggataaaagtgaaagtggtgattggcattgtactgctagctggaagacacatagtggatctgtatggcgtgtgacatgggcccatcctgaatttgggcaggttttggcttcctgttcttttgaccgaacagctgctgtatgggaagaaatagtaggagaatcaaatgataaactgcgaggacagagccactgggttaaaaggacaactctggtggatagcagaacatctgttactgatgtgaagtttgctcccaagcacatgggtcttatgttagcaacctgttccgcagatggtatagtaagaatctatgaggcaccagatgttatgaatctcagccagtggtctttgcagcatgagatctcatgtaagctaagctgtagttgtatttcttggaacccttcaagaatatccaaactgatagaaaagatgaatagagcacatttatacaacttccacatcccaagctctcgtgctcattcccccatgatcgccgtaggaagtgatgacagtagccccaacgcaatggccaaggttcagatttttgaatataatgaaaacaccaggaaatatgcaaaagctgaaactcttatgacagtcactgatcctgttcatgatattgcattcgctccaaatttgggaagatctttccatattctagcaatagcgaccaaa

SEQ ID NO: 179565 - DNA, 582 bp, Homo sapiens
  Payload ID: 15392
  Gene Symbol: SEH1L
  Gene Name: SEH1-like nucleoporin
  ENST ID: ENST00000585730
  CDS Start-End: 109-582
acaagccgtgcgctcccgggctgcgaggtctggctaggctacgggccacgcgccgccgccgctgccgccgccactgtcctcttcggaggcgcgggcccgacggaaaccatgtttgtggctcgcagcatcgcggcggaccacaaggatctcatccacgatgtctctttcgacttccacgggcggcggatggcaacctgctccagcgatcagagcgttaaggtctgggataaaagtgaaagtggtgattggcattgtactgctagctggaaggttaaaaggacaactctggtggatagcagaacatctgttactgatgtgaagtttgctcccaagcacatgggtcttatgttagcaacctgttccgcagatggtatagtaagaatctatgaggcaccagatgttatgaatctcagccagtggtctttgcagcatgagatctcatgtaagctaagctgtagttgtatttcttggaacccttcaagctctcgtgctcattcccccatgatcgccgtaggaagtgatgacagtagccccaacgcaatggccaaggttcagatttttgaatataatgaaaacaccagg

SEQ ID NO: 179566 - DNA, 655 bp, Homo sapiens
  Payload ID: 15392
  Gene Symbol: SEH1L
  Gene Name: SEH1-like nucleoporin
  ENST ID: ENST00000589446
  CDS Start-End: 87-655
gcgaggtctggctaggctacgggccacgcgccgccgccgctgccgccgccactgtcctcttcggaggcgcgggcccgacggaaaccatgtttgtggctcgcagcatcgcggcggaccacaaggatctcatccacgatgtctctttcgacttccacgggcggcggatggcaacctgctccagcgatcagagcgttaagacacatagtggatctgtatggcgtgtgacatgggcccatcctgaatttgggcaggttttggcttcctgttcttttgaccgaacagctgctgtatgggaagaaatagtaggagaatcaaatgataaactgcgaggacagagccactgggttaaaaggacaactctggtggatagcagaacatctgttactgatgtgaagtttgctcccaagcacatgggtcttatgttagcaacctgttccgcagatggtatagtaagaatctatgaggcaccagatgttatgaatctcagccagtggtctttgcagcatgagatctcatgtaagctaagctgtagttgtatttcttggaacccttcaagctctcgtgctcattcccccatgatcgccgtaggaagtgatgacagtagccccaacgcaatggccaaggttcagatttttgaatataatgaaaacaccag

SEQ ID NO: 179567 - DNA, 787 bp, Homo sapiens
  Payload ID: 15392
  Gene Symbol: SEH1L
  Gene Name: SEH1-like nucleoporin
  ENST ID: ENST00000592170
  CDS Start-End: 556-787
ttttccccggaggactctggctcccgggtagcaagcagcccacttccccggccgcttccttcccccgggatgacacgtttctacaggcggactcttctaattcatactatttccctacccccgtggtggctcctagcacccccaggcctgttctacctgtaaaatcttgacacatttaaactactacttctgatcctttcctccccgtccagccttcgctcttaggctgccgagcctggactgcttgtcatcccctcaggcgtctccccggccctccctgctcttcagccgtcccgacggagcgcggctcctgaccaaacccacggttcgtcttctccacctgctccgcgcgcctcgcatgtgtctggggggaaacacatccaaacgtcgacttaaatgattcagggccgaggaccgtgagaggcagtcttcactttttcatctttcttcatttgcacagtataccaataagctcttactacttctcagcacagcatcgcggcggaccacaaggatctcatccacgatgtctctttcgacttccacgggcggcggatggcaacctgctccagcgatcagagcgttaaggtctgggataaaagtgaaagtggtgattggcattgtactgctagctggaagacacatagtggatctgtatggcgtgtgacatgggcccatcctgaatttgggcaggttttggcttcctgttcttttgaccgaacagctgctgtatgggaagaaatagtaggagaatcaaatgataaactgcgaggacagagccactggg

SEQ ID NO: 179568 - DNA, 4471 bp, Homo sapiens
  Payload ID: 15393
  Gene Symbol: SEZ6
  Gene Name: seizure related 6 homolog (mouse)
  Uniprot ID: Q53EL9
  ENST ID: ENST00000317338
  CDS Start-End: 430-3414
agaaggctacagtgagctattaattgaggttccttagcaggccgttaacgggaaagagggtggcatgcttggctgggggtgggcagcgcagaagggcaggggccgtgtgcccacatgagtagggcagtcgcggtggagcgggagcctgggctcctgcccctgggtctctgcgcctttgcatgagactttacggtaagccgctcctcccgcgcccccgcccccagccccgctcggcgatccccggcgccgtcgccaggcgctggccgtggtgctgattctgtcaggcgctggcggcggcagcggcggtgacggctgcggccccgctccctctacccggccggacccggctctgcccccgcgcccaagccccaccaagccccccgccctcccgccgcggtcccagcccagggcgcggccgcaaccagcaccatgcgcccggtagccctgctgctcctgccctcgctgctggcgctcctggctcacggactctctttagaggccccaaccgtggggaaaggacaagccccaggcatcgaggagacagatggcgagctgacagcagcccccacacctgagcagccagaacgaggcgtccactttgtcacaacagcccccaccttgaagctgctcaaccaccacccgctgcttgaggaattcctacaagaggggctggaaaagggagatgaggagctgaggccagcactgcccttccagcctgacccacctgcacccttcaccccaagtccccttccccgcctggccaaccaggacagccgccctgtctttaccagccccactccagccatggctgcggtacccactcagccccagtccaaggagggaccctggagtccggagtcagagtcccctatgcttcgaatcacagctcccctacctccagggcccagcatggcagtgcccaccctaggcccaggggagatagccagcactacaccccccagcagagcctggacaccaacccaagagggtcctggagacatgggaaggccgtgggttgcagaggttgtgtcccagggcgcagggatcgggatccaggggaccatcacctcctccacagcttcaggagatgatgaggagaccaccactaccaccaccatcatcaccaccaccatcaccacagtccagacaccaggcccttgtagctggaatttctcaggcccagagggctctctggactcccctacagacctcagctcccccactgatgttggcctggactgcttcttctacatctctgtctaccctggctatggcgtggaaatcaaggtccagaatatcagcctccgggaaggggagacagtgactgtggaaggcctgggggggcctgacccactgcccctggccaaccagtctttcctgctgcggggccaagtcatccgcagccccacccaccaagcggccctgaggttccagagcctcccgccaccggctggccctggcaccttccatttccattaccaagcctatctcctgagctgccactttccccgtcgtccagcttatggagatgtgactgtcaccagcctccacccagggggtagtgcccgcttccattgtgccactggctaccagctgaagggcgccaggcatctcacctgtctcaatgccacccagcccttctgggattcaaaggagcccgtctgcatcgctgcttgcggcggagtgatccgcaatgccaccaccggccgcatcgtctctccaggcttcccgggcaactacagcaacaacctcacctgtcactggctgcttgaggctcctgagggccagcggctacacctgcactttgagaaggtttccctggcagaggatgatgacaggctcatcattcgcaatggggacaacgtggaggccccaccagtgtatgattcctatgaggtggaatacctgcccattgagggcctgctcagctctggcaaacacttctttgttgagctcagtactgacagcagcggggcagctgcaggcatggccctgcgctatgaggccttccagcagggccattgctatgagccctttgtcaaatacggtaacttcagcagcagcacacccacctaccctgtgggtaccactgtggagttcagctgcgaccctggctacaccctggagcagggctccatcatcatcgagtgtgttgacccccacgacccccagtggaatgagacagagccagcctgccgagccgtgtgcagcggggagatcacagactcggctggcgtggtactctctcccaactggccagagccctacggtcgtgggcaggattgtatctggggtgtgcatgtggaagaggacaagcgcatcatgctggacatccgagtgctgcgcataggccctggtgatgtgcttaccttctatgatggggatgacctgacggcccgggttctgggccagtactcagggccccgtagccacttcaagctctttacctccatggctgatgtcaccattcagttccagtcggaccccgggacctcagtgctgggctaccagcagggcttcgtcatccacttctttgaggtgccccgcaatgacacatgtccggagctgcctgagatccccaatggctggaagagcccatcgcagcctgagctagtgcacggcaccgtggtcacttaccagtgctaccctggctaccaggtagtgggatccagtgtcctcatgtgccagtgggacctaacttggagtgaggacctgccctcatgccagagggtgacttcctgccacgatcctggagatgtggagcacagccgacgcctcatatccagccccaagtttcccgtgggggccaccgtgcaatatatctgtgaccagggttttgtgctgatgggcagctccatcctcacctgccatgatcgccaggctggcagccccaagtggagtgaccgggcccctaaatgtctcctggaacagctcaagccatgccatggtctcagtgcccctgagaatggtgcccgaagtcctgagaagcagctacacccagcaggggccaccatccacttctcgtgtgcccctggctatgtgctgaagggccaggccagcatcaagtgtgtgcctgggcacccctcgcattggagtgaccccccacccatctgtagggctgcctctctggatgggttctacaacagtcgcagcctggatgttgccaaggcacctgctgcctccagcaccctggatgctgcccacattgcagctgccatcttcttgccactggtggcgatggtgttgttggtaggaggtgtatacttctacttctccaggctccagggaaaaagctccctgcagctgccccgcccccgcccccgcccctacaaccgcattaccatagagtcagcgtttgacaatccaacttacgagactggatctctttcctttgcaggagacgagagaatatgaagtctccatctaggtgggggcagtctagggaagtcaactcagacttgcaccacagtccagcagcaaggctccttgcttcctgctgtccctccacctcctgtatataccacctaggaggagatgccaccaagccctcaagaagttgtgcccttccccgcctgcgatgcccaccatggcctattttcttggtgtcattgcccacttggggcccttcattgggcccatgtcagggggcatctacctgtgggaagaacatagctggagcacaagcatcaacagccagcatcctgagcctcctcatgccctggaccagcctggaacacactagcagagcaggagtacctttctccacatgaccaccatcccgccctggcatggcaacctgcagcaggattaacttgaccatggtgggaactgcaccagggtactcctcacagcgccatcaccaatggccaaaactcctctcaacggtgacctctgggtagtcctggcatgccaacatcagcctcttgggaggtctctagttctctaaagttctggacagttctgcctcctgccctgtcccagtggaggcagtaattctaggagatcctaaggggttcagggggaccctacccccacctcaggttgggcttccctgggcactcatgctccacaccaaagcaggacacgccattttccactgaccaccctataccctgaggaaagggagactttcctccgatgtttatttagctgttgcaaacatcttcaccctaatagtccctcctccaattccagccacttgtcaggctctcctcttgaccactgtgttatgggataaggggagggggtgggcatattctggagaggagcagaggtccaaggacccaggaatttggcatggaacaggtggtaggagagccccagggagacgcccaggagctggctgaaagccactttgtacatgtaatgtattatatggggtctgggctccagccagagaacaatcttttatttctgttgtttccttattaaaatggtgtttttggaaaaaaaaaaaaaaaaaaaaaaaaaa

SEQ ID NO: 179569 - DNA, 4195 bp, Homo sapiens
  Payload ID: 15393
  Gene Symbol: SEZ6
  Gene Name: seizure related 6 homolog (mouse)
  ENST ID: ENST00000335960
  CDS Start-End: 180-3164
cgccaggcgctggccgtggtgctgattctgtcaggcgctggcggcggcagcggcggtgacggctgcggccccgctccctctacccggccggacccggctctgcccccgcgcccaagccccaccaagccccccgccctcccgccgcggtcccagcccagggcgcggccgcaaccagcaccatgcgcccggtagccctgctgctcctgccctcgctgctggcgctcctggctcacggactctctttagaggccccaaccgtggggaaaggacaagccccaggcatcgaggagacagatggcgagctgacagcagcccccacacctgagcagccagaacgaggcgtccactttgtcacaacagcccccaccttgaagctgctcaaccaccacccgctgcttgaggaattcctacaagaggggctggaaaagggagatgaggagctgaggccagcactgcccttccagcctgacccacctgcacccttcaccccaagtccccttccccgcctggccaaccaggacagccgccctgtctttaccagccccactccagccatggctgcggtacccactcagccccagtccaaggagggaccctggagtccggagtcagagtcccctatgcttcgaatcacagctcccctacctccagggcccagcatggcagtgcccaccctaggcccaggggagatagccagcactacaccccccagcagagcctggacaccaacccaagagggtcctggagacatgggaaggccgtgggttgcagaggttgtgtcccagggcgcagggatcgggatccaggggaccatcacctcctccacagcttcaggagatgatgaggagaccaccactaccaccaccatcatcaccaccaccatcaccacagtccagacaccaggcccttgtagctggaatttctcaggcccagagggctctctggactcccctacagacctcagctcccccactgatgttggcctggactgcttcttctacatctctgtctaccctggctatggcgtggaaatcaaggtccagaatatcagcctccgggaaggggagacagtgactgtggaaggcctgggggggcctgacccactgcccctggccaaccagtctttcctgctgcggggccaagtcatccgcagccccacccaccaagcggccctgaggttccagagcctcccgccaccggctggccctggcaccttccatttccattaccaagcctatctcctgagctgccactttccccgtcgtccagcttatggagatgtgactgtcaccagcctccacccagggggtagtgcccgcttccattgtgccactggctaccagctgaagggcgccaggcatctcacctgtctcaatgccacccagcccttctgggattcaaaggagcccgtctgcatcggtgagtgcccaggggtgatccgcaatgccaccaccggccgcatcgtctctccaggcttcccgggcaactacagcaacaacctcacctgtcactggctgcttgaggctcctgagggccagcggctacacctgcactttgagaaggtttccctggcagaggatgatgacaggctcatcattcgcaatggggacaacgtggaggccccaccagtgtatgattcctatgaggtggaatacctgcccattgagggcctgctcagctctggcaaacacttctttgttgagctcagtactgacagcagcggggcagctgcaggcatggccctgcgctatgaggccttccagcagggccattgctatgagccctttgtcaaatacggtaacttcagcagcagcacacccacctaccctgtgggtaccactgtggagttcagctgcgaccctggctacaccctggagcagggctccatcatcatcgagtgtgttgacccccacgacccccagtggaatgagacagagccagcctgccgagccgtgtgcagcggggagatcacagactcggctggcgtggtactctctcccaactggccagagccctacggtcgtgggcaggattgtatctggggtgtgcatgtggaagaggacaagcgcatcatgctggacatccgagtgctgcgcataggccctggtgatgtgcttaccttctatgatggggatgacctgacggcccgggttctgggccagtactcagggccccgtagccacttcaagctctttacctccatggctgatgtcaccattcagttccagtcggaccccgggacctcagtgctgggctaccagcagggcttcgtcatccacttctttgaggtgccccgcaatgacacatgtccggagctgcctgagatccccaatggctggaagagcccatcgcagcctgagctagtgcacggcaccgtggtcacttaccagtgctaccctggctaccaggtagtgggatccagtgtcctcatgtgccagtgggacctaacttggagtgaggacctgccctcatgccagagggtgacttcctgccacgatcctggagatgtggagcacagccgacgcctcatatccagccccaagtttcccgtgggggccaccgtgcaatatatctgtgaccagggttttgtgctgatgggcagctccatcctcacctgccatgatcgccaggctggcagccccaagtggagtgaccgggcccctaaatgtctcctggaacagctcaagccatgccatggtctcagtgcccctgagaatggtgcccgaagtcctgagaagcagctacacccagcaggggccaccatccacttctcgtgtgcccctggctatgtgctgaagggccaggccagcatcaagtgtgtgcctgggcacccctcgcattggagtgaccccccacccatctgtagggctgcctctctggatggttctacaacagtcgcagcctggatggttgccaaggcacctgctgcctccagcaccctggatgctgcccacattgcagctgccatcttcttgccactggtggcgatggtgttgttggtaggaggtgtatacttctacttctccaggctccagggaaaaagctccctgcagctgccccgcccccgcccccgcccctacaaccgcattaccatagagtcagcgtttgacaatccaacttacgagactggatctctttcctttgcaggagacgagagaatatgaagtctccatctaggtgggggcagtctagggaagtcaactcagacttgcaccacagtccagcagcaaggctccttgcttcctgctgtccctccacctcctgtatataccacctaggaggagatgccaccaagccctcaagaagttgtgcccttccccgcctgcgatgcccaccatggcctattttcttggtgtcattgcccacttggggcccttcattgggcccatgtcagggggcatctacctgtgggaagaacatagctggagcacaagcatcaacagccagcatcctgagcctcctcatgccctggaccagcctggaacacactagcagagcaggagtacctttctccacatgaccaccatcccgccctggcatggcaacctgcagcaggattaacttgaccatggtgggaactgcaccagggtactcctcacagcgccatcaccaatggccaaaactcctctcaacggtgacctctgggtagtcctggcatgccaacatcagcctcttgggaggtctctagttctctaaagttctggacagttctgcctcctgccctgtcccagtggaggcagtaattctaggagatcctaaggggttcagggggaccctacccccacctcaggttgggcttccctgggcactcatgctccacaccaaagcaggacacgccattttccactgaccaccctataccctgaggaaagggagactttcctccgatgtttatttagctgttgcaaacatcttcaccctaatagtccctcctccaattccagccacttgtcaggctctcctcttgaccactgtgttatgggataaggggagggggtgggcatattctggagaggagcagaggtccaaggacccaggaatttggcatggaacaggtggtaggagagccccagggagacgcccaggagctggctgaaagccactttgtacatgtaatgtattatatggggtctgggctccagccagagaacaatcttttatttctgttgtttccttattaaaatggtgtttttgg

SEQ ID NO: 179570 - DNA, 4306 bp, Homo sapiens
  Payload ID: 15393
  Gene Symbol: SEZ6
  Gene Name: seizure related 6 homolog (mouse)
  Uniprot ID: Q53EL9
  ENST ID: ENST00000360295
  CDS Start-End: 277-3258
ctgcccctgggtctctgcgcctttgcatgagactttacggtaagccgctcctcccgcgcccccgcccccagccccgctcggcgatccccggcgccgtcgccaggcgctggccgtggtgctgattctgtcaggcgctggcggcggcagcggcggtgacggctgcggccccgctccctctacccggccggacccggctctgcccccgcgcccaagccccaccaagccccccgccctcccgccgcggtcccagcccagggcgcggccgcaaccagcaccatgcgcccggtagccctgctgctcctgccctcgctgctggcgctcctggctcacggactctctttagaggccccaaccgtggggaaaggacaagccccaggcatcgaggagacagatggcgagctgacagcagcccccacacctgagcagccagaacgaggcgtccactttgtcacaacagcccccaccttgaagctgctcaaccaccacccgctgcttgaggaattcctacaagaggggctggaaaagggagatgaggagctgaggccagcactgcccttccagcctgacccacctgcacccttcaccccaagtccccttccccgcctggccaaccaggacagccgccctgtctttaccagccccactccagccatggctgcggtacccactcagccccagtccaaggagggaccctggagtccggagtcagagtcccctatgcttcgaatcacagctcccctacctccagggcccagcatggcagtgcccaccctaggcccaggggagatagccagcactacaccccccagcagagcctggacaccaacccaagagggtcctggagacatgggaaggccgtgggttgcagaggttgtgtcccagggcgcagggatcgggatccaggggaccatcacctcctccacagcttcaggagatgatgaggagaccaccactaccaccaccatcatcaccaccaccatcaccacagtccagacaccaggcccttgtagctggaatttctcaggcccagagggctctctggactcccctacagacctcagctcccccactgatgttggcctggactgcttcttctacatctctgtctaccctggctatggcgtggaaatcaaggtccagaatatcagcctccgggaaggggagacagtgactgtggaaggcctgggggggcctgacccactgcccctggccaaccagtctttcctgctgcggggccaagtcatccgcagccccacccaccaagcggccctgaggttccagagcctcccgccaccggctggccctggcaccttccatttccattaccaagcctatctcctgagctgccactttccccgtcgtccagcttatggagatgtgactgtcaccagcctccacccagggggtagtgcccgcttccattgtgccactggctaccagctgaagggcgccaggcatctcacctgtctcaatgccacccagcccttctgggattcaaaggagcccgtctgcatcgctgcttgcggcggagtgatccgcaatgccaccaccggccgcatcgtctctccaggcttcccgggcaactacagcaacaacctcacctgtcactggctgcttgaggctcctgagggccagcggctacacctgcactttgagaaggtttccctggcagaggatgatgacaggctcatcattcgcaatggggacaacgtggaggccccaccagtgtatgattcctatgaggtggaatacctgcccattgagggcctgctcagctctggcaaacacttctttgttgagctcagtactgacagcagcggggcagctgcaggcatggccctgcgctatgaggccttccagcagggccattgctatgagccctttgtcaaatacggtaacttcagcagcagcacacccacctaccctgtgggtaccactgtggagttcagctgcgaccctggctacaccctggagcagggctccatcatcatcgagtgtgttgacccccacgacccccagtggaatgagacagagccagcctgccgagccgtgtgcagcggggagatcacagactcggctggcgtggtactctctcccaactggccagagccctacggtcgtgggcaggattgtatctggggtgtgcatgtggaagaggacaagcgcatcatgctggacatccgagtgctgcgcataggccctggtgatgtgcttaccttctatgatggggatgacctgacggcccgggttctgggccagtactcagggccccgtagccacttcaagctctttacctccatggctgatgtcaccattcagttccagtcggaccccgggacctcagtgctgggctaccagcagggcttcgtcatccacttctttgaggtgccccgcaatgacacatgtccggagctgcctgagatccccaatggctggaagagcccatcgcagcctgagctagtgcacggcaccgtggtcacttaccagtgctaccctggctaccaggtagtgggatccagtgtcctcatgtgccagtgggacctaacttggagtgaggacctgccctcatgccagagggtgacttcctgccacgatcctggagatgtggagcacagccgacgcctcatatccagccccaagtttcccgtgggggccaccgtgcaatatatctgtgaccagggttttgtgctgatgggcagctccatcctcacctgccatgatcgccaggctggcagccccaagtggagtgaccgggcccctaaatgtctcctggaacagctcaagccatgccatggtctcagtgcccctgagaatggtgcccgaagtcctgagaagcagctacacccagcaggggccaccatccacttctcgtgtgcccctggctatgtgctgaagggccaggccagcatcaagtgtgtgcctgggcacccctcgcattggagtgaccccccacccatctgtagggctgcctctctggatgggttctacaacagtcgcagcctggatgttgccaaggcacctgctgcctccagcaccctggatgctgcccacattgcagctgccatcttcttgccactggtggcgatggtgttgttggtaggaggtgtatacttctacttctccaggctccagggaaaaagctccctgcagctgccccgcccccgcccccgcccctacaaccgcattaccatagagtcagcgtttgacaatccaacttacgagactggagagacgagagaatatgaagtctccatctaggtgggggcagtctagggaagtcaactcagacttgcaccacagtccagcagcaaggctccttgcttcctgctgtccctccacctcctgtatataccacctaggaggagatgccaccaagccctcaagaagttgtgcccttccccgcctgcgatgcccaccatggcctattttcttggtgtcattgcccacttggggcccttcattgggcccatgtcagggggcatctacctgtgggaagaacatagctggagcacaagcatcaacagccagcatcctgagcctcctcatgccctggaccagcctggaacacactagcagagcaggagtacctttctccacatgaccaccatcccgccctggcatggcaacctgcagcaggattaacttgaccatggtgggaactgcaccagggtactcctcacagcgccatcaccaatggccaaaactcctctcaacggtgacctctgggtagtcctggcatgccaacatcagcctcttgggaggtctctagttctctaaagttctggacagttctgcctcctgccctgtcccagtggaggcagtaattctaggagatcctaaggggttcagggggaccctacccccacctcaggttgggcttccctgggcactcatgctccacaccaaagcaggacacgccattttccactgaccaccctataccctgaggaaagggagactttcctccgatgtttatttagctgttgcaaacatcttcaccctaatagtccctcctccaattccagccacttgtcaggctctcctcttgaccactgtgttatgggataaggggagggggtgggcatattctggagaggagcagaggtccaaggacccaggaatttggcatggaacaggtggtaggagagccccagggagacgcccaggagctggctgaaagccactttgtacatgtaatgtattatatggggtctgggctccagccagagaacaatcttttatttctgttgtttccttattaaaatggtgtttttggaaaaaaaaaaaaaaaaaaaaaaaaaagcaa

SEQ ID NO: 179571 - DNA, 3805 bp, Homo sapiens
  Payload ID: 15393
  Gene Symbol: SEZ6
  Gene Name: seizure related 6 homolog (mouse)
  ENST ID: ENST00000442608
  CDS Start-End: 45-2987
ctcccgccgcggtcccagcccagggcgcggccgcaaccagcaccatgcgcccggtagccctgctgctcctgccctcgctgctggcgctcctggctcacggactctctttagaggccccaaccgtggggaaaggacaagccccaggcatcgaggagacagatggcgagctgacagcagcccccacacctgagcagccagaacgaggcgtccactttgtcacaacagcccccaccttgaagctgctcaaccaccacccgctgcttgaggaattcctacaagaggggctggaaaagggagatgaggagctgaggccagcactgcccttccagcctgacccacctgcacccttcaccccaagtccccttccccgcctggccaaccaggacagccgccctgtctttaccagccccactccagccatggctgcggtacccactcagccccagtccaaggagggaccctggagtccggagtcagagtcccctatgcttcgaatcacagctcccctacctccagggcccagcatggcagtgcccaccctaggcccaggggagatagccagcactacaccccccagcagagcctggacaccaacccaagagggtcctggagacatgggaaggccgtgggttgcagaggttgtgtcccagggcgcagggatcgggatccaggggaccatcacctcctccacagcttcaggagatgatgaggagaccaccactaccaccaccatcatcaccaccaccatcaccacagtccagacaccaggcccttgtagctggaatttctcaggcccagagggctctctggactcccctacagacctcagctcccccactgatgttggcctggactgcttcttctacatctctgtctaccctggctatggcgtggaaatcaaggtccagaatatcagcctccgggaaggggagacagtgactgtggaaggcctgggggggcctgacccactgcccctggccaaccagtctttcctgctgcggggccaagtcatccgcagccccacccaccaagcggccctgaggttccagagcctcccgccaccggctggccctggcaccttccatttccattaccaagcctatctcctgagctgccactttccccgtcgtccagcttatggagatgtgactgtcaccagcctccacccagggggtagtgcccgcttccattgtgccactggctaccagctgaagggcgccaggcatctcacctgtctcaatgccacccagcccttctgggattcaaaggagcccgtctgcatcgctgcttgcggcggagtgatccgcaatgccaccaccggccgcatcgtctctccaggcttcccgggcaactacagcaacaacctcacctgtcactggctgcttgaggctcctgagggccagcggctacacctgcactttgagaaggtttccctggcagaggatgatgacaggctcatcattcgcaatggggacaacgtggaggccccaccagtgtatgattcctatgaggtggaatacctgcccattgagggcctgctcagctctggcaaacacttctttgttgagctcagtactgacagcagcggggcagctgcaggcatggccctgcgctatgaggccttccagcagggccattgctatgagccctttgtcaaatacggtaacttcagcagcagcacacccacctaccctgtgggtaccactgtggagttcagctgcgaccctggctacaccctggagcagggctccatcatcatcgagtgtgttgacccccacgacccccagtggaatgagacagagccagcctgccgagccgtgtgcagcggggagatcacagactcggctggcgtggtactctctcccaactggccagagccctacggtcgtgggcaggattgtatctggggtgtgcatgtggaagaggacaagcgcatcatgctggacatccgagtgctgcgcataggccctggtgatgtgcttaccttctatgatggggatgacctgacggcccgggttctgggccagtactcagggccccgtagccacttcaagctctttacctccatggctgatgtcaccattcagttccagtcggaccccgggacctcagtgctgggctaccagcagggcttcgtcatccacttctttgaggtgccccgcaatgacacatgtccggagctgcctgagatccccaatggctggaagagcccatcgcagcctgagctagtgcacggcaccgtggtcacttaccagtgctaccctggctaccaggtagtgggatccagtgtcctcatgtgccagtgggacctaacttggagtgaggacctgccctcatgccagagggtgacttcctgccacgatcctggagatgtggagcacagccgacgcctcatatccagccccaagtttcccgtgggggccaccgtgcaatatatctgtgaccagggttttgtgctgatgggcagctccatcctcacctgccatgatcgccaggctggcagccccaagtggagtgaccgggcccctaaatgtctcctggaacagctcaagccatgccatggtctcagtgcccctgagaatggtgcccgaagtcctgagaagcagctacacccagcaggggccaccatccacttctcgtgtgcccctggctatgtgctgaagggccaggccagcatcaagtgtgtgcctgggcacccctcgcattggagtgaccccccacccatctgtagggctgttgccaaggcacctgctgcctccagcaccctggatgctgcccacattgcagctgccatcttcttgccactggtggcgatggtgttgttggtaggaggtgtatacttctacttctccaggctccagggaaaaagctccctgcagctgccccgcccccgcccccgcccctacaaccgcattaccatagagtcagcgtttgacaatccaacttacgagactggagagacgagagaatatgaagtctccatctaggtgggggcagtctagggaagtcaactcagacttgcaccacagtccagcagcaaggctccttgcttcctgctgtccctccacctcctgtatataccacctaggaggagatgccaccaagccctcaagaagttgtgcccttccccgcctgcgatgcccaccatggcctattttcttggtgtcattgcccacttggggcccttcattgggcccatgtcagggggcatctacctgtgggaagaacatagctggagcacaagcatcaacagccagcatcctgagcctcctcatgccctggaccagcctggaacacactagcagagcaggagtacctttctccacatgaccaccatcccgccctggcatggcaacctgcagcaggattaacttgaccatggtgggaactgcaccagggtactcctcacagcgccatcaccaatggccaaaactcctctcaacggtgacctctgggtagtcctggcatgccaacatcagcctcttgggaggtctctagttctctaaagttctggacagttctgcctcctgccctgtcccagtggaggcagtaattctaggagatcctaaggggttcagggggaccctacccccacctcaggttgggcttccctgggcactcatgctccacaccaaagcaggacacgccattttccactgaccaccctataccctgaggaaagggagactttcctccgatgtttatttagctgttgcaaacatcttcaccctaatagtccctcctccaattccagccacttgtcaggctctcctcttgaccactgtgttatgggataaggggaggg

SEQ ID NO: 179572 - DNA, 3804 bp, Homo sapiens
  Payload ID: 15393
  Gene Symbol: SEZ6
  Gene Name: seizure related 6 homolog (mouse)
  ENST ID: ENST00000540632
  CDS Start-End: 1-2760
gaattcctacaagaggggctggaaaagggagatgaggagctgaggccagcactgcccttccagcctgacccacctgcacccttcaccccaagtccccttccccgcctggccaaccaggacagccgccctgtctttaccagccccactccagccatggctgcggtacccactcagccccagtccaaggagggaccctggagtccggagtcagagtcccctatgcttcgaatcacagctcccctacctccagggcccagcatggcagtgcccaccctaggcccaggggagatagccagcactacaccccccagcagagcctggacaccaacccaagagggtcctggagacatgggaaggccgtgggttgcagaggttgtgtcccagggcgcagggatcgggatccaggggaccatcacctcctccacagcttcaggagatgatgaggagaccaccactaccaccaccatcatcaccaccaccatcaccacagtccagacaccaggcccttgtagctggaatttctcaggcccagagggctctctggactcccctacagacctcagctcccccactgatgttggcctggactgcttcttctacatctctgtctaccctggctatggcgtggaaatcaaggtccagaatatcagcctccgggaaggggagacagtgactgtggaaggcctgggggggcctgacccactgcccctggccaaccagtctttcctgctgcggggccaagtcatccgcagccccacccaccaagcggccctgaggttccagagcctcccgccaccggctggccctggcaccttccatttccattaccaagcctatctcctgagctgccactttccccgtcgtccagcttatggagatgtgactgtcaccagcctccacccagggggtagtgcccgcttccattgtgccactggctaccagctgaagggcgccaggcatctcacctgtctcaatgccacccagcccttctgggattcaaaggagcccgtctgcatcgctgcttgcggcggagtgatccgcaatgccaccaccggccgcatcgtctctccaggcttcccgggcaactacagcaacaacctcacctgtcactggctgcttgaggctcctgagggccagcggctacacctgcactttgagaaggtttccctggcagaggatgatgacaggctcatcattcgcaatggggacaacgtggaggccccaccagtgtatgattcctatgaggtggaatacctgcccattgagggcctgctcagctctggcaaacacttctttgttgagctcagtactgacagcagcggggcagctgcaggcatggccctgcgctatgaggccttccagcagggccattgctatgagccctttgtcaaatacggtaacttcagcagcagcacacccacctaccctgtgggtaccactgtggagttcagctgcgaccctggctacaccctggagcagggctccatcatcatcgagtgtgttgacccccacgacccccagtggaatgagacagagccagcctgccgagccgtgtgcagcggggagatcacagactcggctggcgtggtactctctcccaactggccagagccctacggtcgtgggcaggattgtatctggggtgtgcatgtggaagaggacaagcgcatcatgctggacatccgagtgctgcgcataggccctggtgatgtgcttaccttctatgatggggatgacctgacggcccgggttctgggccagtactcagggccccgtagccacttcaagctctttacctccatggctgatgtcaccattcagttccagtcggaccccgggacctcagtgctgggctaccagcagggcttcgtcatccacttctttgaggtgccccgcaatgacacatgtccggagctgcctgagatccccaatggctggaagagcccatcgcagcctgagctagtgcacggcaccgtggtcacttaccagtgctaccctggctaccaggtagtgggatccagtgtcctcatgtgccagtgggacctaacttggagtgaggacctgccctcatgccagagggtgacttcctgccacgatcctggagatgtggagcacagccgacgcctcatatccagccccaagtttcccgtgggggccaccgtgcaatatatctgtgaccagggttttgtgctgatgggcagctccatcctcacctgccatgatcgccaggctggcagccccaagtggagtgaccgggcccctaaatgtctcctggaacagctcaagccatgccatggtctcagtgcccctgagaatggtgcccgaagtcctgagaagcagctacacccagcaggggccaccatccacttctcgtgtgcccctggctatgtgctgaagggccaggccagcatcaagtgtgtgcctgggcacccctcgcattggagtgaccccccacccatctgtagggctgcctctctggatgggttctacaacagtcgcagcctggatgttgccaaggcacctgctgcctccagcaccctggatgctgcccacattgcagctgccatcttcttgccactggtggcgatggtgttgttggtaggaggtgtatacttctacttctccaggctccagggaaaaagctccctgcagctgccccgcccccgcccccgcccctacaaccgcattaccatagagtcagcgtttgacaatccaacttacgagactggagagacgagagaatatgaagtctccatctaggtgggggcagtctagggaagtcaactcagacttgcaccacagtccagcagcaaggctccttgcttcctgctgtccctccacctcctgtatataccacctaggaggagatgccaccaagccctcaagaagttgtgcccttccccgcctgcgatgcccaccatggcctattttcttggtgtcattgcccacttggggcccttcattgggcccatgtcagggggcatctacctgtgggaagaacatagctggagcacaagcatcaacagccagcatcctgagcctcctcatgccctggaccagcctggaacacactagcagagcaggagtacctttctccacatgaccaccatcccgccctggcatggcaacctgcagcaggattaacttgaccatggtgggaactgcaccagggtactcctcacagcgccatcaccaatggccaaaactcctctcaacggtgacctctgggtagtcctggcatgccaacatcagcctcttgggaggtctctagttctctaaagttctggacagttctgcctcctgccctgtcccagtggaggcagtaattctaggagatcctaaggggttcagggggaccctacccccacctcaggttgggcttccctgggcactcatgctccacaccaaagcaggacacgccattttccactgaccaccctataccctgaggaaagggagactttcctccgatgtttatttagctgttgcaaacatcttcaccctaatagtccctcctccaattccagccacttgtcaggctctcctcttgaccactgtgttatgggataaggggagggggtgggcatattctggagaggagcagaggtccaaggacccaggaatttggcatggaacaggtggtaggagagccccagggagacgcccaggagctggctgaaagccactttgtacatgtaatgtattatatggggtctgggctccagccagagaacaatcttttatttctgttgtttccttattaaaatggtgtttttggaaaaaaaaaaaaaaaaaaaaaaaaaa

SEQ ID NO: 179573 - DNA, 807 bp, Homo sapiens
  Payload ID: 15393
  Gene Symbol: SEZ6
  Gene Name: seizure related 6 homolog (mouse)
  ENST ID: ENST00000535262
  CDS Start-End: 1-304
cctggatgctgcccacattgcagctgccatcttcttgccactggtggcgatggtgttgttggtaggaggtgtatacttctacttctccaggaggagatgccaccaagccctcaagaagttgtgcccttccccgcctgcgatgcccaccatggcctattttcttggtgtcattgcccacttggggcccttcattgggcccatgtcagggggcatctacctgtgggaagaacatagctggagcacaagcatcaacagccagcatcctgagcctcctcatgccctggaccagcctggaacacactagcagagcaggagtacctttctccacatgaccaccatcccgccctggcatggcaacctgcagcaggattaacttgaccatggtgggaactgcaccagggtactcctcacagcgccatcaccaatggccaaaactcctctcaacggtgacctctgggtagtcctggcatgccaacatcagcctcttgggaggtctctagttctctaaagttctggacagttctgcctcctgccctgtcccagtggaggcagtaattctaggagatcctaaggggttcagggggaccctacccccacctcaggttgggcttccctgggcactcatgctccacaccaaagcaggacacgccattttccactgaccaccctataccctgaggaaagggagactttcctccgatgtttatttagctgttgcaaacatcttcaccctaatagtccctcctccaattccagccacttgtcaggctctcctcttgaccactgtgttatgggataaggggaggg

SEQ ID NO: 179574 - DNA, 3468 bp, Homo sapiens
  Payload ID: 15393
  Gene Symbol: SEZ6
  Gene Name: seizure related 6 homolog (mouse)
  ENST ID: ENST00000540419
  CDS Start-End: 1-1364
caggggagatagccagcactacaccccccagcagagcctggacaccaacccaagagggtcctggagacatgggaaggccgtgggttgcagaggttgtgtcccagggcgcagggatcgggatccaggggaccatcacctcctccacagcttcaggagatgatgaggagaccaccactaccaccaccatcatcaccaccaccatcaccacagtccagacaccaggcccttgtagctggaatttctcaggcccagagggctctctggactcccctacagacctcagctcccccactgatgttggcctggactgcttcttctacatctctgtctaccctggctatggcgtggaaatcaaggtccagaatatcagcctccgggaaggggagacagtgactgtggaaggcctgggggggcctgacccactgcccctggccaaccagtctttcctgctgcggggccaagtcatccgcagccccacccaccaagcggccctgaggttccagagcctcccgccaccggctggccctggcaccttccatttccattaccaagcctatctcctgagctgccactttccccgtcgtccagcttatggagatgtgactgtcaccagcctccacccagggggtagtgcccgcttccattgtgccactggctaccagctgaagggcgccaggcatctcacctgtctcaatgccacccagcccttctgggattcaaaggagcccgtctgcatcgctgcttgcggcggagtgatccgcaatgccaccaccggccgcatcgtctctccaggcttcccgggcaactacagcaacaacctcacctgtcactggctgcttgaggctcctgagggccagcggctacacctgcactttgagaaggtttccctggcagaggatgatgacaggctcatcattcgcaatggggacaacgtggaggccccaccagtgtatgattcctatgaggtggaatacctgcccattgagggcctgctcagctctggcaaacacttctttgttgagctcagtactgacagcagcggggcagctgcaggcatggccctgcgctatgaggcagcacacccacctaccctgtgggtaccactgtggagttcagctgcgaccctggctacaccctggagcagggctccatcatcatcgagtgtgttgacccccacgacccccagtggaatgagacagagccagcctgccgagccgtgtgcagcggggagatcacagactcggctggcgtggtactctctcccaactggccagagccctacggtcgtgggcaggattgtatctggggtgtgcatgtggaagaggacaagcgcatcatgctggacatccgagtgctgcgcataggccctggtgatgtgcttaccttctatgatggggatgacctgacggcccgggttctgggccagtactcagggccccgtagccacttcaagctctttacctccatggctgatgtcaccattcagttccagtcggaccccgggacctcagtgctgggctaccagcagggcttcgtcatccacttctttgaggtgccccgcaatgacacatgtccggagctgcctgagatccccaatggctggaagagcccatcgcagcctgagctagtgcacggcaccgtggtcacttaccagtgctaccctggctaccaggtagtgggatccagtgtcctcatgtgccagtgggacctaacttggagtgaggacctgccctcatgccagagggtgacttcctgccacgatcctggagatgtggagcacagccgacgcctcatatccagccccaagtttcccgtgggggccaccgtgcaatatatctgtgaccagggttttgtgctgatgggcagctccatcctcacctgccatgatcgccaggctggcagccccaagtggagtgaccgggcccctaaatgtctcctggaacagctcaagccatgccatggtctcagtgcccctgagaatggtgcccgaagtcctgagaagcagctacacccagcaggggccaccatccacttctcgtgtgcccctggctatgtgctgaagggccaggccagcatcaagtgtgtgcctgggcacccctcgcattggagtgaccccccacccatctgtagggctgcctctctggatgggttctacaacagtcgcagcctggatgttgccaaggcacctgctgcctccagcaccctggatgctgcccacattgcagctgccatcttcttgccactggtggcgatggtgttgttggtaggaggtgtatacttctacttctccaggctccagggaaaaagctccctgcagctgccccgcccccgcccccgcccctacaaccgcattaccatagagtcagcgtttgacaatccaacttacgagactggagagacgagagaatatgaagtctccatctaggtgggggcagtctagggaagtcaactcagacttgcaccacagtccagcagcaaggctccttgcttcctgctgtccctccacctcctgtatataccacctaggaggagatgccaccaagccctcaagaagttgtgcccttccccgcctgcgatgcccaccatggcctattttcttggtgtcattgcccacttggggcccttcattgggcccatgtcagggggcatctacctgtgggaagaacatagctggagcacaagcatcaacagccagcatcctgagcctcctcatgccctggaccagcctggaacacactagcagagcaggagtacctttctccacatgaccaccatcccgccctggcatggcaacctgcagcaggattaacttgaccatggtgggaactgcaccagggtactcctcacagcgccatcaccaatggccaaaactcctctcaacggtgacctctgggtagtcctggcatgccaacatcagcctcttgggaggtctctagttctctaaagttctggacagttctgcctcctgccctgtcccagtggaggcagtaattctaggagatcctaaggggttcagggggaccctacccccacctcaggttgggcttccctgggcactcatgctccacaccaaagcaggacacgccattttccactgaccaccctataccctgaggaaagggagactttcctccgatgtttatttagctgttgcaaacatcttcaccctaatagtccctcctccaattccagccacttgtcaggctctcctcttgaccactgtgttatgggataaggggagggggtgggcatattctggagaggagcagaggtccaaggacccaggaatttggcatggaacaggtggtaggagagccccagggagacgcccaggagctggctgaaagccactttgtacatgtaatgtattatatggggtctgggctccagccagagaacaatcttttatttctgttgtttccttattaaaatggtgtttttggaaaaaaaaaaaaaaaaaaaaaaaaa

SEQ ID NO: 179575 - DNA, 601 bp, Homo sapiens
  Payload ID: 15393
  Gene Symbol: SEZ6
  Gene Name: seizure related 6 homolog (mouse)
  ENST ID: ENST00000539265
  CDS Start-End: 1-395
ctgcttgcggcggagtgatccgcaatgccaccaccggccgcatcgtctctccaggcttcccgggcaactacagcaacaacctcacctgtcactggctgcttgaggctcctgagggccagcggctacacctgcactttgagaaggtttccctggcagaggatgatgacaggctcatcattcgcaatggggacaacgtggaggccccaccagtgtatgattcctatgaggtggaatacctgcccattgagggcctgctcagctctggcaaacacttctttgttgagctcagtactgacagcagcggggcagctgcaggcatggccctgcgctatgagggtgagcctgctggggcctcactgggggtggcgggtccacggggatgggctcgggcctagggtctttctcccacaccctacccctctctgcctccatgctgtcactccttccaagtcagcccctgctcactcagtacttaggccccctttccctgcccctctctttgggtccgggatccctaccacagctttgcaggaaacctctgcctggacccaggccctatggtccaagggaataaattctccagattttgaaaagcaaaaaa

SEQ ID NO: 179576 - DNA, 575 bp, Homo sapiens
  Payload ID: 15393
  Gene Symbol: SEZ6
  Gene Name: seizure related 6 homolog (mouse)
  ENST ID: ENST00000585644
  CDS Start-End: 406-575
aagacggaactgccacaagggcacgcgggcctcaccagctgcctcactctcggatgtcttcccaggtcacccttgacgccctcaggactctctttagaggccccaaccgtggggaaaggacaagccccaggcatcgaggagacagatggcgagctgacagcagcccccacacctgagcagccagaacgaggcgtccactttgtcacaacagcccccaccttgaagctgctcaaccaccacccgctgcttgaggaattcctacaagaggggctggaaaagggagatgaggagctgaggccagcactgcccttccagcctgacccacctgcacccttcaccccaagtccccttccccgcctggccaaccaggacagccgccctgtctttaccagccccactccagccatggctgcggtacccactcagccccagtccaaggagggaccctggagtccggagtcagagtcccctatgcttcgaatcacagctcccctacctccagggcccagcatggcagtgcccaccctaggcccaggggagatagccagcactacaccccccagcagagcctggac

SEQ ID NO: 179577 - DNA, 3248 bp, Homo sapiens
  Payload ID: 15394
  Gene Symbol: SEZ6L
  Gene Name: seizure related 6 homolog (mouse)-like
  Uniprot ID: Q9BYH1
  ENST ID: ENST00000248933
  CDS Start-End: 96-3170
gcttcccctttctcgctcaccgccgccctccttccccagctccctcgccgtccgcccgccccacagccagcggctccgcgccccctgcagccacgatgcccgcggcccggccgcccgccgcgggactccgcgggatctcgctgttcctcgctctgctcctggggagcccggcggcagcgctggagcgagatgctcttcccgagggagatgctagccctttgggtccttacctcctgccctcaggagccccggagagaggcagtcctggcaaagagcaccctgaagagagagtggtaacagcgccccccagttcctcacagtcggcggaagtgctgggcgagctggtgctggatgggaccgcaccctctgcacatcacgacatcccagccctgtcaccgctgcttccagaggaggcccgccccaagcacgccttgccccccaagaagaaactgccttcgctcaagcaggtgaactctgccaggaagcagctgaggcccaaggccacctccgcagccactgtccaaagggcagggtcccagccagcgtcccagggcctagatctcctctcctcctccacggagaagcctggcccaccgggggacccggaccccatcgtggcctccgaggaggcatcagaagtgcccctttggctggaccgaaaggagagtgcggtccctacaacacccgcacccctgcaaatctcccccttcacttcgcagccctatgtggcccacacactcccccagaggccagaacccggggagcctgggcctgacatggcccaggaggccccccaggaggacaccagccccatggccctgatggacaaaggtgagaatgagctgactgggtcagcctcagaggagagccaggagaccactacctccaccattatcaccaccacggtcatcaccaccgagcaggcaccagctctctgcagtgtgagcttctccaatcctgaggggtacattgactccagcgactacccactgctgcccctcaacaactttctggagtgcacatacaacgtgacagtctacactggctatggggtggagctccaggtgaagagtgtgaacctgtccgatggggaactgctctccatccgcggggtggacggccctaccctgaccgtcctggccaaccagacactcctggtggaggggcaggtaatccgaagccccaccaacaccatctccgtctacttccggaccttccaggacgacggccttgggaccttccagcttcactaccaggccttcatgctgagctgcaactttccccgccggcctgactctggggatgtcacggtgatggacctgcactcaggtggggtggcccactttcactgccacctgggctatgagctccagggcgctaagatgctgacatgcatcaatgcctccaagccgcactggagcagccaggagcccatctgctcagctccttgtggaggggcagtgcacaatgccaccatcggccgcgtcctctccccaagttaccctgaaaacacaaatgggagccaattctgcatctggacgattgaagctccagagggccagaagctgcacctgcactttgagaggctgttgctgcatgacaaggacaggatgacggttcacagcgggcagaccaacaagtcagctcttctctacgactcccttcaaaccgagagtgtcccttttgagggcctgctgagcgaaggcaacaccatccgcatcgagttcacgtccgaccaggcccgggcggcctccaccttcaacatccgatttgaagcgtttgagaaaggccactgctatgagccctacatccagaatgggaacttcactacatccgacccgacctataacattgggactatagtggagttcacctgcgaccccggccactccctggagcagggcccggccatcatcgaatgcatcaatgtgcgggacccatactggaatgacacagagcccctgtgcagagccatgtgtggtggggagctctctgctgtggctggggtggtattgtccccaaactggcccgagccctacgtggaaggtgaagattgtatctggaagatccacgtgggagaagagaaacggatcttcttagatatccagttcctgaatctgagcaacagtgacatcttgaccatctacgatggcgacgaggtcatgccccacatcttggggcagtaccttgggaacagtggcccccagaaactgtactcctccacgccagacttaaccatccagttccattcggaccctgctggcctcatctttggaaagggccagggatttatcatgaactacatagaggtatcaaggaatgactcctgctcggatttacccgagatccagaatggctggaaaaccacttctcacacggagttggtgcggggagccagaatcacctaccagtgtgaccccggctatgacatcgtggggagtgacaccctcacctgccagtgggacctcagctggagcagcgaccccccattttgtgagaaaattatgtactgcaccgaccccggagaggtggatcactcgacccgcttaatttcggatcctgtgctgctggtggggaccaccatccaatacacctgcaaccccggttttgtgcttgaagggagttctcttctgacctgctacagccgtgaaacagggactcccatctggacgtctcgcctgccccactgcgtttcggaggagtccctggcatgtgacaacccagggctgcctgaaaatggataccaaatcctgtacaagcgactctacctgccaggagagtccctcaccttcatgtgctacgaaggctttgagctcatgggtgaagtgaccatccgctgcatcctgggacagccatcccactggaacgggcccctgcccgtgtgtaaagttaatcaagacagttttgaacatgctttagaagtagcagaagcggcagcagagacgtcgctggaaggggggaacatggccctggctatcttcatcccggtcctcatcatctccttactgctgggaggagcctacatttacatcacaagatgtcgctactattccaacctccgcctgcctctgatgtactcccacccctacagccagatcaccgtggaaaccgagtttgacaaccccatttacgagacaggggaaaccagagagtatgaggtttctatctaaagagagctacacttgagaaggggacttgtgaactcaaccacaatctcctcgagacattcatccagagaccatgtggca

SEQ ID NO: 179578 - DNA, 2898 bp, Homo sapiens
  Payload ID: 15394
  Gene Symbol: SEZ6L
  Gene Name: seizure related 6 homolog (mouse)-like
  Uniprot ID: Q9BYH1
  ENST ID: ENST00000343706
  CDS Start-End: 13-2859
cctgcagccacgatgcccgcggcccggccgcccgccgcgggactccgcgggatctcgctgttcctcgctctgctcctggggagcccggcggcagcgctggagcgagatgctcttcccgagggagatgctagccctttgggtccttacctcctgccctcaggagccccggagagaggcagtcctggcaaagagcaccctgaagagagagtggtaacagcgccccccagttcctcacagtcggcggaagtgctgggcgagctggtgctggatgggaccgcaccctctgcacatcacgacatcccagccctgtcaccgctgcttccagaggaggcccgccccaagcacgccttgccccccaagaagaaactgccttcgctcaagcaggtgaactctgccaggaagcagctgaggcccaaggccacctccgcagccactgtccaaagggcagggtcccagccagcgtcccagggcctagatctcctctcctcctccacggagaagcctggcccaccgggggacccggaccccatcgtggcctccgaggaggcatcagaagtgcccctttggctggaccgaaaggagagtgcggtccctacaacacccgcacccctgcaaatctcccccttcacttcgcagccctatgtggcccacacactcccccagaggccagaacccggggagcctgggcctgacatggcccaggaggccccccaggaggacaccagccccatggccctgatggacaaaggtgagaatgagctgactgggtcagcctcagaggagagccaggagaccactacctccaccattatcaccaccacggtcatcaccaccgagcaggcaccagctctctgcagtgtgagcttctccaatcctgaggggtacattgactccagcgactacccactgctgcccctcaacaactttctggagtgcacatacaacgtgacagtctacactggctatggggtggagctccaggtgaagagtgtgaacctgtccgatggggaactgctctccatccgcggggtggacggccctaccctgaccgtcctggccaaccagacactcctggtggaggggcaggtaatccgaagccccaccaacaccatctccgtctacttccggaccttccaggacgacggccttgggaccttccagcttcactaccaggccttcatgctgagctgcaactttccccgccggcctgactctggggatgtcacggtgatggacctgcactcaggtggggtggcccactttcactgccacctgggctatgagctccagggcgctaagatgctgacatgcatcaatgcctccaagccgcactggagcagccaggagcccatctgctcagctccttgtggaggggcagtgcacaatgccaccatcggccgcgtcctctccccaagttaccctgaaaacacaaatgggagccaattctgcatctggacgattgaagctccagagggccagaagctgcacctgcactttgagaggctgttgctgcatgacaaggacaggatgacggttcacagcgggcagaccaacaagtcagctcttctctacgactcccttcaaaccgagagtgtcccttttgagggcctgctgagcgaaggcaacaccatccgcatcgagttcacgtccgaccaggcccgggcggcctccaccttcaacatccgatttgaagcgtttgagaaaggccactgctatgagccctacatccagaatgggaacttcactacatccgacccgacctataacattgggactatagtggagttcacctgcgaccccggccactccctggagcagggcccggccatcatcgaatgcatcaatgtgcgggacccatactggaatgacacagagcccctgtgcagagccatgtgtggtggggagctctctgctgtggctggggtggtattgtccccaaactggcccgagccctacgtggaaggtgaagattgtatctggaagatccacgtgggagaagagaaacggatcttcttagatatccagttcctgaatctgagcaacagtgacatcttgaccatctacgatggcgacgaggtcatgccccacatcttggggcagtaccttgggaacagtggcccccagaaactgtactcctccacgccagacttaaccatccagttccattcggaccctgctggcctcatctttggaaagggccagggatttatcatgaactacatagaggtatcaaggaatgactcctgctcggatttacccgagatccagaatggctggaaaaccacttctcacacggagttggtgcggggagccagaatcacctaccagtgtgaccccggctatgacatcgtggggagtgacaccctcacctgccagtgggacctcagctggagcagcgaccccccattttgtgagaaaattatgtactgcaccgaccccggagaggtggatcactcgacccgcttaatttcggatcctgtgctgctggtggggaccaccatccaatacacctgcaaccccggttttgtgcttgaagggagttctcttctgacctgctacagccgtgaaacagggactcccatctggacgtctcgcctgccccactgcgttttagcagaagcggcagcagagacgtcgctggaaggggggaacatggccctggctatcttcatcccggtcctcatcatctccttactgctgggaggagcctacatttacatcacaagatgtcgctactattccaacctccgcctgcctctgatgtactcccacccctacagccagatcaccgtggaaaccgagtttgacaaccccatttacgagacaggggaaaccagagagtatgaggtttctatctaaagagagctacacttgagaaggggacttgtgaactcaacc

SEQ ID NO: 179579 - DNA, 6307 bp, Homo sapiens
  Payload ID: 15394
  Gene Symbol: SEZ6L
  Gene Name: seizure related 6 homolog (mouse)-like
  Uniprot ID: Q9BYH1
  ENST ID: ENST00000360929
  CDS Start-End: 157-3006
cgcgcgtccgcccagggggctccggaagctgccccggcccgcggcctcctccctcgctcccgcttcccctttctcgctcaccgccgccctccttccccagctccctcgccgtccgcccgccccacagccagcggctccgcgccccctgcagccacgatgcccgcggcccggccgcccgccgcgggactccgcgggatctcgctgttcctcgctctgctcctggggagcccggcggcagcgctggagcgagatgctcttcccgagggagatgctagccctttgggtccttacctcctgccctcaggagccccggagagaggcagtcctggcaaagagcaccctgaagagagagtggtaacagcgccccccagttcctcacagtcggcggaagtgctgggcgagctggtgctggatgggaccgcaccctctgcacatcacgacatcccagccctgtcaccgctgcttccagaggaggcccgccccaagcacgccttgccccccaagaagaaactgccttcgctcaagcaggtgaactctgccaggaagcagctgaggcccaaggccacctccgcagccactgtccaaagggcagggtcccagccagcgtcccagggcctagatctcctctcctcctccacggagaagcctggcccaccgggggacccggaccccatcgtggcctccgaggaggcatcagaagtgcccctttggctggaccgaaaggagagtgcggtccctacaacacccgcacccctgcaaatctcccccttcacttcgcagccctatgtggcccacacactcccccagaggccagaacccggggagcctgggcctgacatggcccaggaggccccccaggaggacaccagccccatggccctgatggacaaaggtgagaatgagctgactgggtcagcctcagaggagagccaggagaccactacctccaccattatcaccaccacggtcatcaccaccgagcaggcaccagctctctgcagtgtgagcttctccaatcctgaggggtacattgactccagcgactacccactgctgcccctcaacaactttctggagtgcacatacaacgtgacagtctacactggctatggggtggagctccaggtgaagagtgtgaacctgtccgatggggaactgctctccatccgcggggtggacggccctaccctgaccgtcctggccaaccagacactcctggtggaggggcaggtaatccgaagccccaccaacaccatctccgtctacttccggaccttccaggacgacggccttgggaccttccagcttcactaccaggccttcatgctgagctgcaactttccccgccggcctgactctggggatgtcacggtgatggacctgcactcaggtggggtggcccactttcactgccacctgggctatgagctccagggcgctaagatgctgacatgcatcaatgcctccaagccgcactggagcagccaggagcccatctgctcagctccttgtggaggggcagtgcacaatgccaccatcggccgcgtcctctccccaagttaccctgaaaacacaaatgggagccaattctgcatctggacgattgaagctccagagggccagaagctgcacctgcactttgagaggctgttgctgcatgacaaggacaggatgacggttcacagcgggcagaccaacaagtcagctcttctctacgactcccttcaaaccgagagtgtcccttttgagggcctgctgagcgaaggcaacaccatccgcatcgagttcacgtccgaccaggcccgggcggcctccaccttcaacatccgatttgaagcgtttgagaaaggccactgctatgagccctacatccagaatgggaacttcactacatccgacccgacctataacattgggactatagtggagttcacctgcgaccccggccactccctggagcagggcccggccatcatcgaatgcatcaatgtgcgggacccatactggaatgacacagagcccctgtgcagagccatgtgtggtggggagctctctgctgtggctggggtggtattgtccccaaactggcccgagccctacgtggaaggtgaagattgtatctggaagatccacgtgggagaagagaaacggatcttcttagatatccagttcctgaatctgagcaacagtgacatcttgaccatctacgatggcgacgaggtcatgccccacatcttggggcagtaccttgggaacagtggcccccagaaactgtactcctccacgccagacttaaccatccagttccattcggaccctgctggcctcatctttggaaagggccagggatttatcatgaactacatagaggtatcaaggaatgactcctgctcggatttacccgagatccagaatggctggaaaaccacttctcacacggagttggtgcggggagccagaatcacctaccagtgtgaccccggctatgacatcgtggggagtgacaccctcacctgccagtgggacctcagctggagcagcgaccccccattttgtgagaaaacggaggagtccctggcatgtgacaacccagggctgcctgaaaatggataccaaatcctgtacaagcgactctacctgccaggagagtccctcaccttcatgtgctacgaaggctttgagctcatgggtgaagtgaccatccgctgcatcctgggacagccatcccactggaacgggcccctgcccgtgtgtaaagtagcagaagcggcagcagagacgtcgctggaaggggggaacatggccctggctatcttcatcccggtcctcatcatctccttactgctgggaggagcctacatttacatcacaagatgtcgctactattccaacctccgcctgcctctgatgtactcccacccctacagccagatcaccgtggaaaccgagtttgacaaccccatttacgagacaggggaaaccagagagtatgaggtttctatctaaagagagctacacttgagaaggggacttgtgaactcaaccacaatctcctcgagacattcatccagagaccatgtggcacttgattgaaaccccagaatgtcgactgtcttttgtttagactctttatcaaaggtttactgttttcttccctgtatttattatatttaaaagtgaaataggtgtgggtttggatgtttcgcggcctcagccaaattcatgttacagcctcaattctgaaggcaggtggaagacttgcaaaatggcaaaccgcggcagcaaaaacacaaaacagcagatggagtttctcccatcagcaatgccatgctaaggctgcattgaattgcatgcatctttgggaaccatgcccatgatgttttcagtacaaatctaagtcccaagattaggttggaaagggtatttcttgttggcttagtttgggttggaatttagcatgggtacttaaacccatttggagagctgtgctcctaaacaaattctgtgtcctctcttcccattttgccagcttctgaaaggtttttccacagcccctccctctcacggttcttctgaaggtagcaaaggtgttatataaacattgtcttttaccactctggcctcgctggacagtgacaaaacaagaaaacgttttctttctagaaaggtgataaacgaccaaaggcaatttttcagagacaaatgagagatttgagagttccaatgaagaattgggtgagggggatcattgggtaagggaattgggttaaaatgttcttttctttgacactctttcaatgatgaaagagcgtgtaatttatgctacaagtgccagaatcgatcaccatgttcagcaagccactctcaagctgtggtaataaacacacaggcttgggaggcaccagcggccccactcatacagtgacaaggatttgtgatgggaaaaaggaggtgccatgtttggaaatgcaggggtgagctctggtttctcctggggttctggaatatctcagccctcaaaatagaggagactcaagtgcactgattctctaaaaggtgtcatcttcagaatatacttgccatcaagtatttcagggggcgggagggtcccatgagaagaaactatttttctattctccaaagctgtctggatgttggagggtggtgtgaatgctgactgaggaggtgcagagaacaggggcaggggattttaaatcacagcagaccatccagtggaatcctgtatcatctgatctgaacatcaatgaagacagagagaggaatttcattcagaaaggattccatagccccacatctagtcacacgggcattcctcttattttatcagggtctgttttcccccaacccagtgaaaccggtgagtgtgtaactcttgggaagattcttttctaaatacaggtataaagagaaggtggagggtgcgggtgcatggaagaaatactatgtgtgaagcagattcaccttcctgggaccggtgacatggtggtgacagtcaatggcttggacagacagacgggcacagtggcatttggaaccctctttggtgccctcccattctctctggaattgtttcaagtctgctggttttcaaacaagaaaagacctttctggccatagggagaatagcagggagtctatgttttggtggttacattggaaacatcttaagcaagatagggaaagttgattttaggcacacatgtaccctccttgacagcaggaactcagacttcaatcttgggggtctaagaccagaatattttccttctgccagaaaagaatcttgcacatatactcctgaaggcatgagtgtgtggtccatggcaagaaatagctaaaggctgctttccaggacccaaagccccatttaatgcaagaaccagagaagtgttctaggccattagtggacaatgtcatgtttggagaaagataacaacacaaataatgtaacctttccttaaaaggcagaactcaatccattttatttgatgcttattctaaccctaaccctgggtcacctggaatgaagaactctatgaataatatttgattttacaacgtgttatggttatgtgaaaactaaacatttgccttttataaagactgacaaaatataaatctttattctaaccctatccccaaaactagccaggccacaccccagatgttcttattgactattggaaagatagaaaaggcgttgtgttttttgtttttttgttgttgttgtcattgttgtttttttcagaagaccagtgtctcagttctgtcttagtagtaccacacccgtaaccgtgttttaaaagtttgttttagcctagagacagatcatacgagttcaacaatgtacagtgtgattgaaaagacaggttggtgtctatttttctttttaaaatatctgaatgtgtatttgtaatacgtaaaggtaaaaaaaaatagtgccaaaaatgtgcaaggcatctcattacagctcatgtacgtctgtttttataagatcaatattaaaacccattgggattaaatatttttgaataggatacactcttgagaaactcgagaatggactgagccttcctacaagccactctttgtttttaaaacagtggggaaatacgtttacagagattgtgagcttcagagaatgcatgtgatggtgtgtattacatgctaattcatataagctgtatctgtcagctaccaccctgtgctttaaaaatgcacacactcaaccctctttagcttggagctcagctttttgcttttttttttttttttttgtagaattatttagctaacataagtattctgattgctacctgatggccattcttacttagtttcatagatgtgctttaactatgatcctttgaagctcaccccttggagagcctacagaacctcaggctgatagctttgaagactgccaaacagcccagaaggaagcaaagcatctgcataatcaggagggttgtataacaagtagtgatttggcaaatatgtgggtagctttaggctgaggcacgggcctcaggcaaaaatgcccttcgagtgaatccgaagggcatgatcttcctatgtccttgactaggcatgacgagtcatttgaggtcagatattatttgagttgttcagcacccccaaaggtaggcattctcctgggaaattttcatttccattttatcgccaaacaaaataaaaagcaaaacaaactttctaagctagaataatgaaattaagtcattttccactttgtatatattgatgctaataaaacagatgaaaaaga

SEQ ID NO: 179580 - DNA, 3306 bp, Homo sapiens
  Payload ID: 15394
  Gene Symbol: SEZ6L
  Gene Name: seizure related 6 homolog (mouse)-like
  ENST ID: ENST00000402979
  CDS Start-End: 743-3133
aaaggaagggagggagggagaaaggagaagttggtttagaggccagccggacgagctttgggcaccgcccttaggagggccaccctcagagtctgacagcaggtgaaggtcctaaatctccccaaactaactggtgtcttttctcctcttccaagatgctcttcccgagggagatgctagccctttgggtccttacctcctgccctcaggagccccggagagaggcagtcctggcaaagagcaccctgaagagagagtggtaacagcgccccccagttcctcacagtcggcggaagtgctgggcgagctggtgctggatgggaccgcaccctctgcacatcacgacatcccagccctgtcaccgctgcttccagaggaggcccgccccaagcacgccttgccccccaagaagaaactgccttcgctcaagcaggtgaactctgccaggaagcagctgaggcccaaggccacctccgcagccactgtccaaagggcagggtcccagccagcgtcccagggcctagatctcctctcctcctccacggagaagcctggcccaccgggggacccggaccccatcgtggcctccgaggaggcatcagaagtgcccctttggctggaccgaaaggagagtgcggtccctacaacacccgcacccctgcaaatctcccccttcacttcgcagccctatgtggcccacacactcccccagaggccagaacccggggagcctgggcctgacatggcccaggaggccccccaggaggacaccagccccatggccctgatggacaaaggtgagaatgagctgactgggtcagcctcagaggagagccaggagaccactacctccaccattatcaccaccacggtcatcaccaccgagcaggcaccagctctctgcagtgtgagcttctccaatcctgaggggtacattgactccagcgactacccactgctgcccctcaacaactttctggagtgcacatacaacgtgacagtctacactggctatggggtggagctccaggtgaagagtgtgaacctgtccgatggggaactgctctccatccgcggggtggacggccctaccctgaccgtcctggccaaccagacactcctggtggaggggcaggtaatccgaagccccaccaacaccatctccgtctacttccggaccttccaggacgacggccttgggaccttccagcttcactaccaggccttcatgctgagctgcaactttccccgccggcctgactctggggatgtcacggtgatggacctgcactcaggtggggtggcccactttcactgccacctgggctatgagctccagggcgctaagatgctgacatgcatcaatgcctccaagccgcactggagcagccaggagcccatctgctcagctccttgtggaggggcagtgcacaatgccaccatcggccgcgtcctctccccaagttaccctgaaaacacaaatgggagccaattctgcatctggacgattgaagctccagagggccagaagctgcacctgcactttgagaggctgttgctgcatgacaaggacaggatgacggttcacagcgggcagaccaacaagtcagctcttctctacgactcccttcaaaccgagagtgtcccttttgagggcctgctgagcgaaggcaacaccatccgcatcgagttcacgtccgaccaggcccgggcggcctccaccttcaacatccgatttgaagcgtttgagaaaggccactgctatgagccctacatccagaatgggaacttcactacatccgacccgacctataacattgggactatagtggagttcacctgcgaccccggccactccctggagcagggcccggccatcatcgaatgcatcaatgtgcgggacccatactggaatgacacagagcccctgtgcagagccatgtgtggtggggagctctctgctgtggctggggtggtattgtccccaaactggcccgagccctacgtggaaggtgaagattgtatctggaagatccacgtgggagaagagaaacggatcttcttagatatccagttcctgaatctgagcaacagtgacatcttgaccatctacgatggcgacgaggtcatgccccacatcttggggcagtaccttgggaacagtggcccccagaaactgtactcctccacgccagacttaaccatccagttccattcggaccctgctggcctcatctttggaaagggccagggatttatcatgaactacatagaggtatcaaggaatgactcctgctcggatttacccgagatccagaatggctggaaaaccacttctcacacggagttggtgcggggagccagaatcacctaccagtgtgaccccggctatgacatcgtggggagtgacaccctcacctgccagtgggacctcagctggagcagcgaccccccattttgtgagaaaattatgtactgcaccgaccccggagaggtggatcactcgacccgcttaatttcggatcctgtgctgctggtggggaccaccatccaatacacctgcaaccccggttttgtgcttgaagggagttctcttctgacctgctacagccgtgaaacagggactcccatctggacgtctcgcctgccccactgcgtttcggaggagtccctggcatgtgacaacccagggctgcctgaaaatggataccaaatcctgtacaagcgactctacctgccaggagagtccctcaccttcatgtgctacgaaggctttgagctcatgggtgaagtgaccatccgctgcatcctgggacagccatcccactggaacgggcccctgcccgtgtgtaaagttaatcaagacagttttgaacatgctttagaagcagaagcggcagcagagacgtcgctggaaggggggaacatggccctggctatcttcatcccggtcctcatcatctccttactgctgggaggagcctacatttacatcacaagatgtcgctactattccaacctccgcctgcctctgatgtactcccacccctacagccagatcaccgtggaaaccgagtttgacaaccccatttacgagacaggggaaaccagagagtatgaggtttctatctaaagagagctacacttgagaaggggacttgtgaactcaaccacaatctcctcgagacattcatccagagaccatgtggcacttgattgaaaccccagaatgtcgactgtcttttgtttagactctttatcaaaggtttactgttttcttccctgtatttattatatttaaaagtg

SEQ ID NO: 179581 - DNA, 3444 bp, Homo sapiens
  Payload ID: 15394
  Gene Symbol: SEZ6L
  Gene Name: seizure related 6 homolog (mouse)-like
  Uniprot ID: Q9BYH1
  ENST ID: ENST00000404234
  CDS Start-End: 197-3268
gcgcccggcgcagctcggccagagcgaccgcggggctgagcgcgcgtccgcccagggggctccggaagctgccccggcccgcggcctcctccctcgctcccgcttcccctttctcgctcaccgccgccctccttccccagctccctcgccgtccgcccgccccacagccagcggctccgcgccccctgcagccacgatgcccgcggcccggccgcccgccgcgggactccgcgggatctcgctgttcctcgctctgctcctggggagcccggcggcagcgctggagcgagatgctcttcccgagggagatgctagccctttgggtccttacctcctgccctcaggagccccggagagaggcagtcctggcaaagagcaccctgaagagagagtggtaacagcgccccccagttcctcacagtcggcggaagtgctgggcgagctggtgctggatgggaccgcaccctctgcacatcacgacatcccagccctgtcaccgctgcttccagaggaggcccgccccaagcacgccttgccccccaagaagaaactgccttcgctcaagcaggtgaactctgccaggaagcagctgaggcccaaggccacctccgcagccactgtccaaagggcagggtcccagccagcgtcccagggcctagatctcctctcctcctccacggagaagcctggcccaccgggggacccggaccccatcgtggcctccgaggaggcatcagaagtgcccctttggctggaccgaaaggagagtgcggtccctacaacacccgcacccctgcaaatctcccccttcacttcgcagccctatgtggcccacacactcccccagaggccagaacccggggagcctgggcctgacatggcccaggaggccccccaggaggacaccagccccatggccctgatggacaaaggtgagaatgagctgactgggtcagcctcagaggagagccaggagaccactacctccaccattatcaccaccacggtcatcaccaccgagcaggcaccagctctctgcagtgtgagcttctccaatcctgaggggtacattgactccagcgactacccactgctgcccctcaacaactttctggagtgcacatacaacgtgacagtctacactggctatggggtggagctccaggtgaagagtgtgaacctgtccgatggggaactgctctccatccgcggggtggacggccctaccctgaccgtcctggccaaccagacactcctggtggaggggcaggtaatccgaagccccaccaacaccatctccgtctacttccggaccttccaggacgacggccttgggaccttccagcttcactaccaggccttcatgctgagctgcaactttccccgccggcctgactctggggatgtcacggtgatggacctgcactcaggtggggtggcccactttcactgccacctgggctatgagctccagggcgctaagatgctgacatgcatcaatgcctccaagccgcactggagcagccaggagcccatctgctcagctccttgtggaggggcagtgcacaatgccaccatcggccgcgtcctctccccaagttaccctgaaaacacaaatgggagccaattctgcatctggacgattgaagctccagagggccagaagctgcacctgcactttgagaggctgttgctgcatgacaaggacaggatgacggttcacagcgggcagaccaacaagtcagctcttctctacgactcccttcaaaccgagagtgtcccttttgagggcctgctgagcgaaggcaacaccatccgcatcgagttcacgtccgaccaggcccgggcggcctccaccttcaacatccgatttgaagcgtttgagaaaggccactgctatgagccctacatccagaatgggaacttcactacatccgacccgacctataacattgggactatagtggagttcacctgcgaccccggccactccctggagcagggcccggccatcatcgaatgcatcaatgtgcgggacccatactggaatgacacagagcccctgtgcagagccatgtgtggtggggagctctctgctgtggctggggtggtattgtccccaaactggcccgagccctacgtggaaggtgaagattgtatctggaagatccacgtgggagaagagaaacggatcttcttagatatccagttcctgaatctgagcaacagtgacatcttgaccatctacgatggcgacgaggtcatgccccacatcttggggcagtaccttgggaacagtggcccccagaaactgtactcctccacgccagacttaaccatccagttccattcggaccctgctggcctcatctttggaaagggccagggatttatcatgaactacatagaggtatcaaggaatgactcctgctcggatttacccgagatccagaatggctggaaaaccacttctcacacggagttggtgcggggagccagaatcacctaccagtgtgaccccggctatgacatcgtggggagtgacaccctcacctgccagtgggacctcagctggagcagcgaccccccattttgtgagaaaattatgtactgcaccgaccccggagaggtggatcactcgacccgcttaatttcggatcctgtgctgctggtggggaccaccatccaatacacctgcaaccccggttttgtgcttgaagggagttctcttctgacctgctacagccgtgaaacagggactcccatctggacgtctcgcctgccccactgcgtttcggaggagtccctggcatgtgacaacccagggctgcctgaaaatggataccaaatcctgtacaagcgactctacctgccaggagagtccctcaccttcatgtgctacgaaggctttgagctcatgggtgaagtgaccatccgctgcatcctgggacagccatcccactggaacgggcccctgcccgtgtgtaaagttaatcaagacagttttgaacatgctttagaagcagaagcggcagcagagacgtcgctggaaggggggaacatggccctggctatcttcatcccggtcctcatcatctccttactgctgggaggagcctacatttacatcacaagatgtcgctactattccaacctccgcctgcctctgatgtactcccacccctacagccagatcaccgtggaaaccgagtttgacaaccccatttacgagacaggggaaaccagagagtatgaggtttctatctaaagagagctacacttgagaaggggacttgtgaactcaaccacaatctcctcgagacattcatccagagaccatgtggcacttgattgaaaccccagaatgtcgactgtcttttgtttagactctttatcaaaggtttactgttttcttccctgtatttattatatttaaaagtgaaa

SEQ ID NO: 179582 - DNA, 3078 bp, Homo sapiens
  Payload ID: 15394
  Gene Symbol: SEZ6L
  Gene Name: seizure related 6 homolog (mouse)-like
  ENST ID: ENST00000403121
  CDS Start-End: 743-2905
aaaggaagggagggagggagaaaggagaagttggtttagaggccagccggacgagctttgggcaccgcccttaggagggccaccctcagagtctgacagcaggtgaaggtcctaaatctccccaaactaactggtgtcttttctcctcttccaagatgctcttcccgagggagatgctagccctttgggtccttacctcctgccctcaggagccccggagagaggcagtcctggcaaagagcaccctgaagagagagtggtaacagcgccccccagttcctcacagtcggcggaagtgctgggcgagctggtgctggatgggaccgcaccctctgcacatcacgacatcccagccctgtcaccgctgcttccagaggaggcccgccccaagcacgccttgccccccaagaagaaactgccttcgctcaagcaggtgaactctgccaggaagcagctgaggcccaaggccacctccgcagccactgtccaaagggcagggtcccagccagcgtcccagggcctagatctcctctcctcctccacggagaagcctggcccaccgggggacccggaccccatcgtggcctccgaggaggcatcagaagtgcccctttggctggaccgaaaggagagtgcggtccctacaacacccgcacccctgcaaatctcccccttcacttcgcagccctatgtggcccacacactcccccagaggccagaacccggggagcctgggcctgacatggcccaggaggccccccaggaggacaccagccccatggccctgatggacaaaggtgagaatgagctgactgggtcagcctcagaggagagccaggagaccactacctccaccattatcaccaccacggtcatcaccaccgagcaggcaccagctctctgcagtgtgagcttctccaatcctgaggggtacattgactccagcgactacccactgctgcccctcaacaactttctggagtgcacatacaacgtgacagtctacactggctatggggtggagctccaggtgaagagtgtgaacctgtccgatggggaactgctctccatccgcggggtggacggccctaccctgaccgtcctggccaaccagacactcctggtggaggggcaggtaatccgaagccccaccaacaccatctccgtctacttccggaccttccaggacgacggccttgggaccttccagcttcactaccaggccttcatgctgagctgcaactttccccgccggcctgactctggggatgtcacggtgatggacctgcactcaggtggggtggcccactttcactgccacctgggctatgagctccagggcgctaagatgctgacatgcatcaatgcctccaagccgcactggagcagccaggagcccatctgctcagctccttgtggaggggcagtgcacaatgccaccatcggccgcgtcctctccccaagttaccctgaaaacacaaatgggagccaattctgcatctggacgattgaagctccagagggccagaagctgcacctgcactttgagaggctgttgctgcatgacaaggacaggatgacggttcacagcgggcagaccaacaagtcagctcttctctacgactcccttcaaaccgagagtgtcccttttgagggcctgctgagcgaaggcaacaccatccgcatcgagttcacgtccgaccaggcccgggcggcctccaccttcaacatccgatttgaagcgtttgagaaaggccactgctatgagccctacatccagaatgggaacttcactacatccgacccgacctataacattgggactatagtggagttcacctgcgaccccggccactccctggagcagggcccggccatcatcgaatgcatcaatgtgcgggacccatactggaatgacacagagcccctgtgcagagccatgtgtggtggggagctctctgctgtggctggggtggtattgtccccaaactggcccgagccctacgtggaaggtgaagattgtatctggaagatccacgtgggagaagagaaacggatcttcttagatatccagttcctgaatctgagcaacagtgacatcttgaccatctacgatggcgacgaggtcatgccccacatcttggggcagtaccttgggaacagtggcccccagaaactgtactcctccacgccagacttaaccatccagttccattcggaccctgctggcctcatctttggaaagggccagggatttatcatgaactacatagaggtatcaaggaatgactcctgctcggatttacccgagatccagaatggctggaaaaccacttctcacacggagttggtgcggggagccagaatcacctaccagtgtgaccccggctatgacatcgtggggagtgacaccctcacctgccagtgggacctcagctggagcagcgaccccccattttgtgagaaaattatgtactgcaccgaccccggagaggtggatcactcgacccgcttaatttcggatcctgtgctgctggtggggaccaccatccaatacacctgcaaccccggttttgtgcttgaagggagttctcttctgacctgctacagccgtgaaacagggactcccatctggacgtctcgcctgccccactgcgtttcagaagcggcagcagagacgtcgctggaaggggggaacatggccctggctatcttcatcccggtcctcatcatctccttactgctgggaggagcctacatttacatcacaagatgtcgctactattccaacctccgcctgcctctgatgtactcccacccctacagccagatcaccgtggaaaccgagtttgacaaccccatttacgagacaggggaaaccagagagtatgaggtttctatctaaagagagctacacttgagaaggggacttgtgaactcaaccacaatctcctcgagacattcatccagagaccatgtggcacttgattgaaaccccagaatgtcgactgtcttttgtttagactctttatcaaaggtttactgttttcttccctgtatttattatatttaaaagtg

SEQ ID NO: 179583 - DNA, 6534 bp, Homo sapiens
  Payload ID: 15394
  Gene Symbol: SEZ6L
  Gene Name: seizure related 6 homolog (mouse)-like
  ENST ID: ENST00000529632
  CDS Start-End: 197-3232
gcgcccggcgcagctcggccagagcgaccgcggggctgagcgcgcgtccgcccagggggctccggaagctgccccggcccgcggcctcctccctcgctcccgcttcccctttctcgctcaccgccgccctccttccccagctccctcgccgtccgcccgccccacagccagcggctccgcgccccctgcagccacgatgcccgcggcccggccgcccgccgcgggactccgcgggatctcgctgttcctcgctctgctcctggggagcccggcggcagcgctggagcgagatgctcttcccgagggagatgctagccctttgggtccttacctcctgccctcaggagccccggagagaggcagtcctggcaaagagcaccctgaagagagagtggtaacagcgccccccagttcctcacagtcggcggaagtgctgggcgagctggtgctggatgggaccgcaccctctgcacatcacgacatcccagccctgtcaccgctgcttccagaggaggcccgccccaagcacgccttgccccccaagaagaaactgccttcgctcaagcaggtgaactctgccaggaagcagctgaggcccaaggccacctccgcagccactgtccaaagggcagggtcccagccagcgtcccagggcctagatctcctctcctcctccacggagaagcctggcccaccgggggacccggaccccatcgtggcctccgaggaggcatcagaagtgcccctttggctggaccgaaaggagagtgcggtccctacaacacccgcacccctgcaaatctcccccttcacttcgcagccctatgtggcccacacactcccccagaggccagaacccggggagcctgggcctgacatggcccaggaggccccccaggaggacaccagccccatggccctgatggacaaaggtgagaatgagctgactgggtcagcctcagaggagagccaggagaccactacctccaccattatcaccaccacggtcatcaccaccgagcaggcaccagctctctgcagtgtgagcttctccaatcctgaggggtacattgactccagcgactacccactgctgcccctcaacaactttctggagtgcacatacaacgtgacagtctacactggctatggggtggagctccaggtgaagagtgtgaacctgtccgatggggaactgctctccatccgcggggtggacggccctaccctgaccgtcctggccaaccagacactcctggtggaggggcaggtaatccgaagccccaccaacaccatctccgtctacttccggaccttccaggacgacggccttgggaccttccagcttcactaccaggccttcatgctgagctgcaactttccccgccggcctgactctggggatgtcacggtgatggacctgcactcaggtggggtggcccactttcactgccacctgggctatgagctccagggcgctaagatgctgacatgcatcaatgcctccaagccgcactggagcagccaggagcccatctgctcagctccttgtggaggggcagtgcacaatgccaccatcggccgcgtcctctccccaagttaccctgaaaacacaaatgggagccaattctgcatctggacgattgaagctccagagggccagaagctgcacctgcactttgagaggctgttgctgcatgacaaggacaggatgacggttcacagcgggcagaccaacaagtcagctcttctctacgactcccttcaaaccgagagtgtcccttttgagggcctgctgagcgaaggcaacaccatccgcatcgagttcacgtccgaccaggcccgggcggcctccaccttcaacatccgatttgaagcgtttgagaaaggccactgctatgagccctacatccagaatgggaacttcactacatccgacccgacctataacattgggactatagtggagttcacctgcgaccccggccactccctggagcagggcccggccatcatcgaatgcatcaatgtgcgggacccatactggaatgacacagagcccctgtgcagagccatgtgtggtggggagctctctgctgtggctggggtggtattgtccccaaactggcccgagccctacgtggaaggtgaagattgtatctggaagatccacgtgggagaagagaaacggatcttcttagatatccagttcctgaatctgagcaacagtgacatcttgaccatctacgatggcgacgaggtcatgccccacatcttggggcagtaccttgggaacagtggcccccagaaactgtactcctccacgccagacttaaccatccagttccattcggaccctgctggcctcatctttggaaagggccagggatttatcatgaactacatagaggtatcaaggaatgactcctgctcggatttacccgagatccagaatggctggaaaaccacttctcacacggagttggtgcggggagccagaatcacctaccagtgtgaccccggctatgacatcgtggggagtgacaccctcacctgccagtgggacctcagctggagcagcgaccccccattttgtgagaaaattatgtactgcaccgaccccggagaggtggatcactcgacccgcttaatttcggatcctgtgctgctggtggggaccaccatccaatacacctgcaaccccggttttgtgcttgaagggagttctcttctgacctgctacagccgtgaaacagggactcccatctggacgtctcgcctgccccactgcgtttcggaggagtccctggcatgtgacaacccagggctgcctgaaaatggataccaaatcctgtacaagcgactctacctgccaggagagtccctcaccttcatgtgctacgaaggctttgagctcatgggtgaagtgaccatccgctgcatcctgggacagccatcccactggaacgggcccctgcccgtgtgtaaagaagcggcagcagagacgtcgctggaaggggggaacatggccctggctatcttcatcccggtcctcatcatctccttactgctgggaggagcctacatttacatcacaagatgtcgctactattccaacctccgcctgcctctgatgtactcccacccctacagccagatcaccgtggaaaccgagtttgacaaccccatttacgagacaggggaaaccagagagtatgaggtttctatctaaagagagctacacttgagaaggggacttgtgaactcaaccacaatctcctcgagacattcatccagagaccatgtggcacttgattgaaaccccagaatgtcgactgtcttttgtttagactctttatcaaaggtttactgttttcttccctgtatttattatatttaaaagtgaaataggtgtgggtttggatgtttcgcggcctcagccaaattcatgttacagcctcaattctgaaggcaggtggaagacttgcaaaatggcaaaccgcggcagcaaaaacacaaaacagcagatggagtttctcccatcagcaatgccatgctaaggctgcattgaattgcatgcatctttgggaaccatgcccatgatgttttcagtacaaatctaagtcccaagattaggttggaaagggtatttcttgttggcttagtttgggttggaatttagcatgggtacttaaacccatttggagagctgtgctcctaaacaaattctgtgtcctctcttcccattttgccagcttctgaaaggtttttccacagcccctccctctcacggttcttctgaaggtagcaaaggtgttatataaacattgtcttttaccactctggcctcgctggacagtgacaaaacaagaaaacgttttctttctagaaaggtgataaacgaccaaaggcaatttttcagagacaaatgagagatttgagagttccaatgaagaattgggtgagggggatcattgggtaagggaattgggttaaaatgttcttttctttgacactctttcaatgatgaaagagcgtgtaatttatgctacaagtgccagaatcgatcaccatgttcagcaagccactctcaagctgtggtaataaacacacaggcttgggaggcaccagcggccccactcatacagtgacaaggatttgtgatgggaaaaaggaggtgccatgtttggaaatgcaggggtgagctctggtttctcctggggttctggaatatctcagccctcaaaatagaggagactcaagtgcactgattctctaaaaggtgtcatcttcagaatatacttgccatcaagtatttcagggggcgggagggtcccatgagaagaaactatttttctattctccaaagctgtctggatgttggagggtggtgtgaatgctgactgaggaggtgcagagaacaggggcaggggattttaaatcacagcagaccatccagtggaatcctgtatcatctgatctgaacatcaatgaagacagagagaggaatttcattcagaaaggattccatagccccacatctagtcacacgggcattcctcttattttatcagggtctgttttcccccaacccagtgaaaccggtgagtgtgtaactcttgggaagattcttttctaaatacaggtataaagagaaggtggagggtgcgggtgcatggaagaaatactatgtgtgaagcagattcaccttcctgggaccggtgacatggtggtgacagtcaatggcttggacagacagacgggcacagtggcatttggaaccctctttggtgccctcccattctctctggaattgtttcaagtctgctggttttcaaacaagaaaagacctttctggccatagggagaatagcagggagtctatgttttggtggttacattggaaacatcttaagcaagatagggaaagttgattttaggcacacatgtaccctccttgacagcaggaactcagacttcaatcttgggggtctaagaccagaatattttccttctgccagaaaagaatcttgcacatatactcctgaaggcatgagtgtgtggtccatggcaagaaatagctaaaggctgctttccaggacccaaagccccatttaatgcaagaaccagagaagtgttctaggccattagtggacaatgtcatgtttggagaaagataacaacacaaataatgtaacctttccttaaaaggcagaactcaatccattttatttgatgcttattctaaccctaaccctgggtcacctggaatgaagaactctatgaataatatttgattttacaacgtgttatggttatgtgaaaactaaacatttgccttttataaagactgacaaaatataaatctttattctaaccctatccccaaaactagccaggccacaccccagatgttcttattgactattggaaagatagaaaaggcgttgtgttttttgtttttttgttgttgttgtcattgttgtttttttcagaagaccagtgtctcagttctgtcttagtagtaccacacccgtaaccgtgttttaaaagtttgttttagcctagagacagatcatacgagttcaacaatgtacagtgtgattgaaaagacaggttggtgtctatttttctttttaaaatatctgaatgtgtatttgtaatacgtaaaggtaaaaaaaaatagtgccaaaaatgtgcaaggcatctcattacagctcatgtacgtctgtttttataagatcaatattaaaacccattgggattaaatatttttgaataggatacactcttgagaaactcgagaatggactgagccttcctacaagccactctttgtttttaaaacagtggggaaatacgtttacagagattgtgagcttcagagaatgcatgtgatggtgtgtattacatgctaattcatataagctgtatctgtcagctaccaccctgtgctttaaaaatgcacacactcaaccctctttagcttggagctcagctttttgcttttttttttttttttttgtagaattatttagctaacataagtattctgattgctacctgatggccattcttacttagtttcatagatgtgctttaactatgatcctttgaagctcaccccttggagagcctacagaacctcaggctgatagctttgaagactgccaaacagcccagaaggaagcaaagcatctgcataatcaggagggttgtataacaagtagtgatttggcaaatatgtgggtagctttaggctgaggcacgggcctcaggcaaaaatgcccttcgagtgaatccgaagggcatgatcttcctatgtccttgactaggcatgacgagtcatttgaggtcagatattatttgagttgttcagcacccccaaaggtaggcattctcctgggaaattttcatttccattttatcgccaaacaaaataaaaagcaaaacaaactttctaagctagaataatgaaattaagtcattttccactttgtatatattgatgctaataaaacagatgaaaaagac

SEQ ID NO: 179584 - DNA, 3215 bp, Homo sapiens
  Payload ID: 15394
  Gene Symbol: SEZ6L
  Gene Name: seizure related 6 homolog (mouse)-like
  Uniprot ID: Q9BYH1
  ENST ID: ENST00000629590
  CDS Start-End: 96-3137
gcttcccctttctcgctcaccgccgccctccttccccagctccctcgccgtccgcccgccccacagccagcggctccgcgccccctgcagccacgatgcccgcggcccggccgcccgccgcgggactccgcgggatctcgctgttcctcgctctgctcctggggagcccggcggcagcgctggagcgagatgctcttcccgagggagatgctagccctttgggtccttacctcctgccctcaggagccccggagagaggcagtcctggcaaagagcaccctgaagagagagtggtaacagcgccccccagttcctcacagtcggcggaagtgctgggcgagctggtgctggatgggaccgcaccctctgcacatcacgacatcccagccctgtcaccgctgcttccagaggaggcccgccccaagcacgccttgccccccaagaagaaactgccttcgctcaagcaggtgaactctgccaggaagcagctgaggcccaaggccacctccgcagccactgtccaaagggcagggtcccagccagcgtcccagggcctagatctcctctcctcctccacggagaagcctggcccaccgggggacccggaccccatcgtggcctccgaggaggcatcagaagtgcccctttggctggaccgaaaggagagtgcggtccctacaacacccgcacccctgcaaatctcccccttcacttcgcagccctatgtggcccacacactcccccagaggccagaacccggggagcctgggcctgacatggcccaggaggccccccaggaggacaccagccccatggccctgatggacaaaggtgagaatgagctgactgggtcagcctcagaggagagccaggagaccactacctccaccattatcaccaccacggtcatcaccaccgagcaggcaccagctctctgcagtgtgagcttctccaatcctgaggggtacattgactccagcgactacccactgctgcccctcaacaactttctggagtgcacatacaacgtgacagtctacactggctatggggtggagctccaggtgaagagtgtgaacctgtccgatggggaactgctctccatccgcggggtggacggccctaccctgaccgtcctggccaaccagacactcctggtggaggggcaggtaatccgaagccccaccaacaccatctccgtctacttccggaccttccaggacgacggccttgggaccttccagcttcactaccaggccttcatgctgagctgcaactttccccgccggcctgactctggggatgtcacggtgatggacctgcactcaggtggggtggcccactttcactgccacctgggctatgagctccagggcgctaagatgctgacatgcatcaatgcctccaagccgcactggagcagccaggagcccatctgctcagctccttgtggaggggcagtgcacaatgccaccatcggccgcgtcctctccccaagttaccctgaaaacacaaatgggagccaattctgcatctggacgattgaagctccagagggccagaagctgcacctgcactttgagaggctgttgctgcatgacaaggacaggatgacggttcacagcgggcagaccaacaagtcagctcttctctacgactcccttcaaaccgagagtgtcccttttgagggcctgctgagcgaaggcaacaccatccgcatcgagttcacgtccgaccaggcccgggcggcctccaccttcaacatccgatttgaagcgtttgagaaaggccactgctatgagccctacatccagaatgggaacttcactacatccgacccgacctataacattgggactatagtggagttcacctgcgaccccggccactccctggagcagggcccggccatcatcgaatgcatcaatgtgcgggacccatactggaatgacacagagcccctgtgcagagccatgtgtggtggggagctctctgctgtggctggggtggtattgtccccaaactggcccgagccctacgtggaaggtgaagattgtatctggaagatccacgtgggagaagagaaacggatcttcttagatatccagttcctgaatctgagcaacagtgacatcttgaccatctacgatggcgacgaggtcatgccccacatcttggggcagtaccttgggaacagtggcccccagaaactgtactcctccacgccagacttaaccatccagttccattcggaccctgctggcctcatctttggaaagggccagggatttatcatgaactacatagaggtatcaaggaatgactcctgctcggatttacccgagatccagaatggctggaaaaccacttctcacacggagttggtgcggggagccagaatcacctaccagtgtgaccccggctatgacatcgtggggagtgacaccctcacctgccagtgggacctcagctggagcagcgaccccccattttgtgagaaaattatgtactgcaccgaccccggagaggtggatcactcgacccgcttaatttcggatcctgtgctgctggtggggaccaccatccaatacacctgcaaccccggttttgtgcttgaagggagttctcttctgacctgctacagccgtgaaacagggactcccatctggacgtctcgcctgccccactgcgtttcggaggagtccctggcatgtgacaacccagggctgcctgaaaatggataccaaatcctgtacaagcgactctacctgccaggagagtccctcaccttcatgtgctacgaaggctttgagctcatgggtgaagtgaccatccgctgcatcctgggacagccatcccactggaacgggcccctgcccgtgtgtaaagtagcagaagcggcagcagagacgtcgctggaaggggggaacatggccctggctatcttcatcccggtcctcatcatctccttactgctgggaggagcctacatttacatcacaagatgtcgctactattccaacctccgcctgcctctgatgtactcccacccctacagccagatcaccgtggaaaccgagtttgacaaccccatttacgagacaggggaaaccagagagtatgaggtttctatctaaagagagctacacttgagaaggggacttgtgaactcaaccacaatctcctcgagacattcatccagagaccatgtggca

SEQ ID NO: 179585 - DNA, 3173 bp, Homo sapiens
  Payload ID: 15395
  Gene Symbol: SEZ6L2
  Gene Name: seizure related 6 homolog (mouse)-like 2
  Uniprot ID: Q6UXD5
  ENST ID: ENST00000350527
  CDS Start-End: 72-2633
cggagacggaggaaaggtggcagccagattacttagagaggcacagaggagagagatcggggtgagtcgccatggggactcccagggcccagcacccgccgcctccccagctgctgttcctaattctgctgagctgtccctggatccagggtctgcccctgaaggaggaggagatattgccagagcctggaagtgagacccccacggtggcctctgaggccctggctgaactgcttcatggggccctgctgaggaggggcccagagatgggctacctgccagggcctccccttgggcctgagggaggagaggaggagacgacgaccaccatcatcaccacgacaactgttaccactacggtgaccagcccagttctgtgtaataacaacatctccgagggcgaagggtatgtggagtctccagatctggggagccccgtcagccgcaccctggggctcctggactgcacttacagcatccatgtctaccctggctacggcattgagatccaggtgcagacgctgaacctgtcacaggaagaggagctcctggtgctggctggtgggggatccccaggcctggccccccgactcctggccaactcatccatgcttggagaaggacaagtccttcggagcccaaccaaccggctgcttctgcacttccagagcccacgggtcccaaggggcggtggcttcaggatccactatcaggcctacctcctgagctgtggcttccctccccggccggcccatggggacgtgagtgtgacggacctgcaccctgggggcactgccacctttcactgtgattcgggctaccagctgcagggagaggagaccctcatctgcctcaatggcacccggccatcctggaacggtgaaacccccagctgcatggcatcctgtggtggcaccatccacaatgccaccctgggccgcatcgtgtccccagagcctgggggagccgtagggcccaacctcacctgccgttgggtcattgaagcagctgaggggcgccggctgcacctgcactttgaaagggtctcgctggatgaggacaatgaccggctgatggtgcgctcagggggcagccccctatcccccgtgatctatgattcggacatggacgatgtccccgagcggggtctcatcagtgacgcccagtccctctacgtggagctgctgtcagagacacctgccaatcccctgctgttaagccttcgatttgaagcctttgaggaggatcgctgcttcgcccccttcctggcacatggaaatgtcactaccacggaccctgagtatcgcccaggggcactggcaaccttctcgtgcctcccaggatatgccctggagccccctgggccccccaatgccatcgaatgtgtggatcccacagaaccccactggaacgacacagagccggcctgcaaagccatgtgtggaggggagctgtcggaaccagctggcgtggtcctctctcccgactggccccagagctatagcccgggccaagactgcgtgtggggcgtgcacgtccaggaagagaagcgcatcttgctccaagttgagatattgaatgtgcgggaaggggacatgctgacgctgttcgacggggacggtcccagcgcccgagtcttggcccagctgcggggacctcagccgcgccgccgccttctctcctctgggcccgacctcacactgcagtttcaggcaccgcccgggcccccaaatccaggcctgggccagggcttcgtattgcacttcaaagaggtcccgaggaacgacacgtgccccgagctgccacctccggagtggggctggagaacggcatcccacggggacctgatccggggcacggtgctcacctaccagtgcgagcctggctacgagctgctaggctccgacattctcacttgccagtgggacctgtcttggagcgccgcgccgcccgcctgccaaaagatcatgacttgtgctgaccctggcgagattgccaacgggcaccgcaccgcctcggacgccggcttccccgttggctcccacgtccagtaccgctgcctgccagggtacagcctcgagggggcagccatgctcacctgctacagccgggacacaggcacacccaagtggagcgatagggtccccaaatgcgccttgaagtacgagccgtgcctgaacccgggggttcccgagaatggctaccagacgctgtacaagcaccactaccaggcgggcgagtctctgcgcttcttctgctatgagggctttgagcttatcggcgaggtcaccatcacctgtgtgcccggccacccctcccagtggaccagccagcccccactctgcaaagttgcctatgaggagctcctggacaaccgaaaactggaagtgacccagaccacagatccatcacggcagctggaaggggggaacctggccctggccatcctgctgcctctaggcttggtcattgtcctcggcagtggcgtttacatctactacaccaagcttcagggaaagtcccttttcggcttctcgggctcccactcctacagccccatcaccgtggagtcggacttcagcaacccgctgtatgaagctggggatacgcgggagtatgaagtttccatctgaaccccaagactacagctgcaggacccaggacgcccctcccctcctcattcgggcagagggaaatacgggacccggtctctgcctcctggctgccctcctccctggctgtgtaaatagtctccctatcccacgagggggctttgatggccctggagatcctacagtaaataaaccagcatcctgccgcccaaagccgcctcttctcagttgccaaacgaggggcctgccccccgccctaccggcttttggattctgggaggggaactctgcctccctgcaaatcttgcagcccctcctgcccagggcacccctcaaggactgcccccgatagctctactgttcccttggccacgaaggtgcccccctcccagatgccctggccctaggcctgactccggccaggagggtcagaagaaggacaaaggggagagctgggacaaggccttgcccccttcctgccatctccccaacccacagtctctccacctttgcttctgaattcttgtttttgagcaataaacagaaaatcgccacttgtaa

SEQ ID NO: 179586 - DNA, 3801 bp, Homo sapiens
  Payload ID: 15395
  Gene Symbol: SEZ6L2
  Gene Name: seizure related 6 homolog (mouse)-like 2
  Uniprot ID: Q6UXD5
  ENST ID: ENST00000308713
  CDS Start-End: 529-3261
agcttctccctcccgcagctccagtgcccgagcttcggctctcccagttccccaacccaccccttcccctccccgacaagccccgctagagcccagtggagaccccctcgatcctcgaccccaccctaaacccccagaagctgtctttctcctccccagtcccctagcttggggtccagacagcccagtggacccaggcgcctgagcaggagggtaacccaggccacccggccccttcggccctctcggccccaccccctgcagccggagccgcgccccctccaccacagagccgcgagaagaggacagaggagactgagcaaaggggggtgggctccaggcgacccctagcccaattctgcccctccatcccaaggggcagagaaattgtctttctttgctgactcctacgaggaaaaaaaaaaaaaaaaaaaaaacaattaaagggaaagataaacggagacggaggaaaggtggcagccagattacttagagaggcacagaggagagagatcggggtgagtcgccatggggactcccagggcccagcacccgccgcctccccagctgctgttcctaattctgctgagctgtccctggatccagggtctgcccctgaaggaggaggagatattgccagagcctggaagtgagacccccacggtggcctctgaggccctggctgaactgcttcatggggccctgctgaggaggggcccagagatgggctacctgccaggatctgatcgggaccccacgctagccacccctccggccggccagactctcgcagtgccctccctgccacgggccactgagccggggacagggcctctgacaacagccgtcacccctaacggggtcaggggggcaggccccactgcgccagaactgctgaccccgcccccaggaaccacagccccacccccacccagccctgcctccccagggcctccccttgggcctgagggaggagaggaggagacgacgaccaccatcatcaccacgacaactgttaccactacggtgaccagcccagttctgtgtaataacaacatctccgagggcgaagggtatgtggagtctccagatctggggagccccgtcagccgcaccctggggctcctggactgcacttacagcatccatgtctaccctggctacggcattgagatccaggtgcagacgctgaacctgtcacaggaagaggagctcctggtgctggctggtgggggatccccaggcctggccccccgactcctggccaactcatccatgcttggagaaggacaagtccttcggagcccaaccaaccggctgcttctgcacttccagagcccacgggtcccaaggggcggtggcttcaggatccactatcaggcctacctcctgagctgtggcttccctccccggccggcccatggggacgtgagtgtgacggacctgcaccctgggggcactgccacctttcactgtgattcgggctaccagctgcagggagaggagaccctcatctgcctcaatggcacccggccatcctggaacggtgaaacccccagctgcatggcatcctgtggtggcaccatccacaatgccaccctgggccgcatcgtgtccccagagcctgggggagccgtagggcccaacctcacctgccgttgggtcattgaagcagctgaggggcgccggctgcacctgcactttgaaagggtctcgctggatgaggacaatgaccggctgatggtgcgctcagggggcagccccctatcccccgtgatctatgattcggacatggacgatgtccccgagcggggtctcatcagtgacgcccagtccctctacgtggagctgctgtcagagacacctgccaatcccctgctgttaagccttcgatttgaagcctttgaggaggatcgctgcttcgcccccttcctggcacatggaaatgtcactaccacggaccctgagtatcgcccaggggcactggcaaccttctcgtgcctcccaggatatgccctggagccccctgggccccccaatgccatcgaatgtgtggatcccacagaaccccactggaacgacacagagccggcctgcaaagccatgtgtggaggggagctgtcggaaccagctggcgtggtcctctctcccgactggccccagagctatagcccgggccaagactgcgtgtggggcgtgcacgtccaggaagagaagcgcatcttgctccaagttgagatattgaatgtgcgggaaggggacatgctgacgctgttcgacggggacggtcccagcgcccgagtcttggcccagctgcggggacctcagccgcgccgccgccttctctcctctgggcccgacctcacactgcagtttcaggcaccgcccgggcccccaaatccaggcctgggccagggcttcgtattgcacttcaaagaggtcccgaggaacgacacgtgccccgagctgccacctccggagtggggctggagaacggcatcccacggggacctgatccggggcacggtgctcacctaccagtgcgagcctggctacgagctgctaggctccgacattctcacttgccagtgggacctgtcttggagcgccgcgccgcccgcctgccaaaagatcatgacttgtgctgaccctggcgagattgccaacgggcaccgcaccgcctcggacgccggcttccccgttggctcccacgtccagtaccgctgcctgccagggtacagcctcgagggggcagccatgctcacctgctacagccgggacacaggcacacccaagtggagcgatagggtccccaaatgcgccttgaagtacgagccgtgcctgaacccgggggttcccgagaatggctaccagacgctgtacaagcaccactaccaggcgggcgagtctctgcgcttcttctgctatgagggctttgagcttatcggcgaggtcaccatcacctgtgtgcccggccacccctcccagtggaccagccagcccccactctgcaaagtgacccagaccacagatccatcacggcagctggaaggggggaacctggccctggccatcctgctgcctctaggcttggtcattgtcctcggcagtggcgtttacatctactacaccaagcttcagggaaagtcccttttcggcttctcgggctcccactcctacagccccatcaccgtggagtcggacttcagcaacccgctgtatgaagctggggatacgcgggagtatgaagtttccatctgaaccccaagactacagctgcaggacccaggacgcccctcccctcctcattcgggcagagggaaatacgggacccggtctctgcctcctggctgccctcctccctggctgtgtaaatagtctccctatcccacgagggggctttgatggccctggagatcctacagtaaataaaccagcatcctgccgcccaaagccgcctcttctcagttgccaaacgaggggcctgccccccgccctaccggcttttggattctgggaggggaactctgcctccctgcaaatcttgcagcccctcctgcccagggcacccctcaaggactgcccccgatagctctactgttcccttggccacgaaggtgcccccctcccagatgccctggccctaggcctgactccggccaggagggtcagaagaaggacaaaggggagagctgggacaaggccttgcccccttcctgccatctccccaacccacagtctctccacctttgcttctgaattcttgtttttgagcaataaacagaaaatcgccacttgtaa

SEQ ID NO: 179587 - DNA, 3015 bp, Homo sapiens
  Payload ID: 15395
  Gene Symbol: SEZ6L2
  Gene Name: seizure related 6 homolog (mouse)-like 2
  Uniprot ID: Q6UXD5
  ENST ID: ENST00000346932
  CDS Start-End: 46-2475
gattacttagagaggcacagaggagagagatcggggtgagtcgccatggggactcccagggcccagcacccgccgcctccccagctgctgttcctaattctgctgagctgtccctggatccagggtctgcccctgaaggaggaggagatattgccagagcctggaagtgagacccccacggtggcctctgaggccctggctgaactgcttcatggggccctgctgaggaggggcccagagatgggctacctgccaggatctgatcgggaccccacgctagccacccctccggccggccagactctcgcagtgccctccctgccacgggccactgagccggggacagggcctctgacaacagccgtcacccctaacggggtcaggggggcaggccccactgcgccagaactgctgaccccgcccccaggaaccacagccccacccccacccagccctgcctccccagggcctccccttgggcctgagggaggagaggaggagacgacgaccaccatcatcaccacgacaactgttaccactacggtgaccagcccagcctacctcctgagctgtggcttccctccccggccggcccatggggacgtgagtgtgacggacctgcaccctgggggcactgccacctttcactgtgattcgggctaccagctgcagggagaggagaccctcatctgcctcaatggcacccggccatcctggaacggtgaaacccccagctgcatggcatcctgtggtggcaccatccacaatgccaccctgggccgcatcgtgtccccagagcctgggggagccgtagggcccaacctcacctgccgttgggtcattgaagcagctgaggggcgccggctgcacctgcactttgaaagggtctcgctggatgaggacaatgaccggctgatggtgcgctcagggggcagccccctatcccccgtgatctatgattcggacatggacgatgtccccgagcggggtctcatcagtgacgcccagtccctctacgtggagctgctgtcagagacacctgccaatcccctgctgttaagccttcgatttgaagcctttgaggaggatcgctgcttcgcccccttcctggcacatggaaatgtcactaccacggaccctgagtatcgcccaggggcactggcaaccttctcgtgcctcccaggatatgccctggagccccctgggccccccaatgccatcgaatgtgtggatcccacagaaccccactggaacgacacagagccggcctgcaaagccatgtgtggaggggagctgtcggaaccagctggcgtggtcctctctcccgactggccccagagctatagcccgggccaagactgcgtgtggggcgtgcacgtccaggaagagaagcgcatcttgctccaagttgagatattgaatgtgcgggaaggggacatgctgacgctgttcgacggggacggtcccagcgcccgagtcttggcccagctgcggggacctcagccgcgccgccgccttctctcctctgggcccgacctcacactgcagtttcaggcaccgcccgggcccccaaatccaggcctgggccagggcttcgtattgcacttcaaagaggtcccgaggaacgacacgtgccccgagctgccacctccggagtggggctggagaacggcatcccacggggacctgatccggggcacggtgctcacctaccagtgcgagcctggctacgagctgctaggctccgacattctcacttgccagtgggacctgtcttggagcgccgcgccgcccgcctgccaaaagatcatgacttgtgctgaccctggcgagattgccaacgggcaccgcaccgcctcggacgccggcttccccgttggctcccacgtccagtaccgctgcctgccagggtacagcctcgagggggcagccatgctcacctgctacagccgggacacaggcacacccaagtggagcgatagggtccccaaatgcgccttgaagtacgagccgtgcctgaacccgggggttcccgagaatggctaccagacgctgtacaagcaccactaccaggcgggcgagtctctgcgcttcttctgctatgagggctttgagcttatcggcgaggtcaccatcacctgtgtgcccggccacccctcccagtggaccagccagcccccactctgcaaagttgcctatgaggagctcctggacaaccgaaaactggaagtgacccagaccacagatccatcacggcagctggaaggggggaacctggccctggccatcctgctgcctctaggcttggtcattgtcctcggcagtggcgtttacatctactacaccaagcttcagggaaagtcccttttcggcttctcgggctcccactcctacagccccatcaccgtggagtcggacttcagcaacccgctgtatgaagctggggatacgcgggagtatgaagtttccatctgaaccccaagactacagctgcaggacccaggacgcccctcccctcctcattcgggcagagggaaatacgggacccggtctctgcctcctggctgccctcctccctggctgtgtaaatagtctccctatcccacgagggggctttgatggccctggagatcctacagtaaataaaccagcatcctgccgcccaaagccgcctcttctcagttgccaaacgaggggcctgccccccgccctaccggcttttggattctgggaggggaactctgcctccctgcaaatcttgcagcccctcctgcccagggcacccctcaaggactgcccccgatagctctactgttcccttggccacgaaggtgcccccctcccagatgccctggccctaggcctgactccggccaggagggtcagaagaaggacaaaggggagagctgggacaaggccttgcccccttcctgccatctccccaacccacagtctctccacctttgcttctgaattcttgtttttgagcaataaacagaaaatcgccacttgtaa

SEQ ID NO: 179588 - DNA, 3423 bp, Homo sapiens
  Payload ID: 15395
  Gene Symbol: SEZ6L2
  Gene Name: seizure related 6 homolog (mouse)-like 2
  Uniprot ID: Q6UXD5
  ENST ID: ENST00000537485
  CDS Start-End: 246-2885
accacagagccgcgagaagaggacagaggagactgagcaaaggggggtgggctccaggcgacccctagcccaattctgcccctccatcccaaggggcagagaaattgtctttctttgctgactcctacgaggaaaaaaaaaaaaaaaaaaaaaacaattaaagggaaagataaacggagacggaggaaaggtggcagccagattacttagagaggcacagaggagagagatcggggtgagtcgccatggggactcccagggcccagcacccgccgcctccccagctgctgttcctaattctgctgagctgtccctggatccagggatctgatcgggaccccacgctagccacccctccggccggccagactctcgcagtgccctccctgccacgggccactgagccggggacagggcctctgacaacagccgtcacccctaacggggtcaggggggcaggccccactgcgccagaactgctgaccccgcccccaggaaccacagccccacccccacccagccctgcctccccagggcctccccttgggcctgagggaggagaggaggagacgacgaccaccatcatcaccacgacaactgttaccactacggtgaccagcccagttctgtgtaataacaacatctccgagggcgaagggtatgtggagtctccagatctggggagccccgtcagccgcaccctggggctcctggactgcacttacagcatccatgtctaccctggctacggcattgagatccaggtgcagacgctgaacctgtcacaggaagaggagctcctggtgctggctggtgggggatccccaggcctggccccccgactcctggccaactcatccatgcttggagaaggacaagtccttcggagcccaaccaaccggctgcttctgcacttccagagcccacgggtcccaaggggcggtggcttcaggatccactatcaggcctacctcctgagctgtggcttccctccccggccggcccatggggacgtgagtgtgacggacctgcaccctgggggcactgccacctttcactgtgattcgggctaccagctgcagggagaggagaccctcatctgcctcaatggcacccggccatcctggaacggtgaaacccccagctgcatggcatcctgtggtggcaccatccacaatgccaccctgggccgcatcgtgtccccagagcctgggggagccgtagggcccaacctcacctgccgttgggtcattgaagcagctgaggggcgccggctgcacctgcactttgaaagggtctcgctggatgaggacaatgaccggctgatggtgcgctcagggggcagccccctatcccccgtgatctatgattcggacatggacgatgtccccgagcggggtctcatcagtgacgcccagtccctctacgtggagctgctgtcagagacacctgccaatcccctgctgttaagccttcgatttgaagcctttgaggaggatcgctgcttcgcccccttcctggcacatggaaatgtcactaccacggaccctgagtatcgcccaggggcactggcaaccttctcgtgcctcccaggatatgccctggagccccctgggccccccaatgccatcgaatgtgtggatcccacagaaccccactggaacgacacagagccggcctgcaaagccatgtgtggaggggagctgtcggaaccagctggcgtggtcctctctcccgactggccccagagctatagcccgggccaagactgcgtgtggggcgtgcacgtccaggaagagaagcgcatcttgctccaagttgagatattgaatgtgcgggaaggggacatgctgacgctgttcgacggggacggtcccagcgcccgagtcttggcccagctgcggggacctcagccgcgccgccgccttctctcctctgggcccgacctcacactgcagtttcaggcaccgcccgggcccccaaatccaggcctgggccagggcttcgtattgcacttcaaagaggtcccgaggaacgacacgtgccccgagctgccacctccggagtggggctggagaacggcatcccacggggacctgatccggggcacggtgctcacctaccagtgcgagcctggctacgagctgctaggctccgacattctcacttgccagtgggacctgtcttggagcgccgcgccgcccgcctgccaaaagatcatgacttgtgctgaccctggcgagattgccaacgggcaccgcaccgcctcggacgccggcttccccgttggctcccacgtccagtaccgctgcctgccagggtacagcctcgagggggcagccatgctcacctgctacagccgggacacaggcacacccaagtggagcgatagggtccccaaatgcgccttgaagtacgagccgtgcctgaacccgggggttcccgagaatggctaccagacgctgtacaagcaccactaccaggcgggcgagtctctgcgcttcttctgctatgagggctttgagcttatcggcgaggtcaccatcacctgtgtgcccggccacccctcccagtggaccagccagcccccactctgcaaagttgcctatgaggagctcctggacaaccgaaaactggaagtgacccagaccacagatccatcacggcagctggaaggggggaacctggccctggccatcctgctgcctctaggcttggtcattgtcctcggcagtggcgtttacatctactacaccaagcttcagggaaagtcccttttcggcttctcgggctcccactcctacagccccatcaccgtggagtcggacttcagcaacccgctgtatgaagctggggatacgcgggagtatgaagtttccatctgaaccccaagactacagctgcaggacccaggacgcccctcccctcctcattcgggcagagggaaatacgggacccggtctctgcctcctggctgccctcctccctggctgtgtaaatagtctccctatcccacgagggggctttgatggccctggagatcctacagtaaataaaccagcatcctgccgcccaaagccgcctcttctcagttgccaaacgaggggcctgccccccgccctaccggcttttggattctgggaggggaactctgcctccctgcaaatcttgcagcccctcctgcccagggcacccctcaaggactgcccccgatagctctactgttcccttggccacgaaggtgcccccctcccagatgccctggccctaggcctgactccggccaggagggtcagaagaaggacaaaggggagagctgggacaaggccttgcccccttcctgccatctccccaacccacagtctctccacctttgcttctgaattcttgtttttgagcaataaacagaaaatcgccacttgt

SEQ ID NO: 179589 - DNA, 909 bp, Homo sapiens
  Payload ID: 15395
  Gene Symbol: SEZ6L2
  Gene Name: seizure related 6 homolog (mouse)-like 2
  ENST ID: ENST00000563118
  CDS Start-End: 1-909
tctgcctcaatggcacccggccatcctggaacggtgaaacccccagctgcatggcatcctgtggtggcaccatccacaatgccaccctgggccgcatcgtgtccccagagcctgggggagccgtagggcccaacctcacctgccgttgggtcattgaagcagctgaggggcgccggctgcacctgcactttgaaagggtctcgctggatgaggacaatgaccggctgatggtgcgctcagggggcagccccctatcccccgtgatctatgattcggacatggacgatgtccccgagcggggtctcatcagtgacgcccagtccctctacgtggagctgctgtcagagacacctgccaatcccctgctgttaagccttcgatttgaagccatgtgtggaggggagctgtcggaaccagctggcgtggtcctctctcccgactggccccagagctatagcccgggccaagactgcgtgtggggcgtgcacgtccaggaagagaagcgcatcttgctccaagttgagatattgaatgtgcgggaaggggacatgctgacgctgttcgacggggacggtcccagcgcccgagtcttggcccagctgcggggacctcagccgcgccgccgccttctctcctctgggcccgacctcacactgcagtttcaggcaccgcccgggcccccaaatccaggcctgggccagggcttcgtattgcacttcaaagaggtcccgaggaacgacacgtgccccgagctgccacctccggagtggggctggagaacggcatcccacggggacctgatccggggcacggtgctcacctaccagtgcgagcctggctacgagctgctaggctccgacattctcacttgccagtgggacctgtcttggagcgccgcgccgcccgcct

SEQ ID NO: 179590 - DNA, 332 bp, Homo sapiens
  Payload ID: 15395
  Gene Symbol: SEZ6L2
  Gene Name: seizure related 6 homolog (mouse)-like 2
  ENST ID: ENST00000568380
  CDS Start-End: 91-332
aattaaagggaaagataaacggagacggaggaaaggtggcagccagattacttagagaggcacagaggagagagatcggggtgagtcgccatggggactcccagggcccagcacccgccgcctccccagctgctgttcctaattctgctgagctgtccctggatccagggatctgatcgggaccccacgctagccacccctccggccggccagactctcgcagtgccctccctgccacgggccactgagccggggacagggcctctgacaacagccgtcacccctaacggggtcaggggggcaggccccactgcgccagaactgctgacccc

SEQ ID NO: 179591 - DNA, 3555 bp, Homo sapiens
  Payload ID: 15395
  Gene Symbol: SEZ6L2
  Gene Name: seizure related 6 homolog (mouse)-like 2
  ENST ID: ENST00000617533
  CDS Start-End: 246-3017
accacagagccgcgagaagaggacagaggagactgagcaaaggggggtgggctccaggcgacccctagcccaattctgcccctccatcccaaggggcagagaaattgtctttctttgctgactcctacgaggaaaaaaaaaaaaaaaaaaaaaacaattaaagggaaagataaacggagacggaggaaaggtggcagccagattacttagagaggcacagaggagagagatcggggtgagtcgccatggggactcccagggcccagcacccgccgcctccccagctgctgttcctaattctgctgagctgtccctggatccagggtctgcccctgaaggaggaggagatattgccagagcctggaagtgagacccccacggtggcctctgaggccctggctgaactgcttcatggggccctgctgaggaggggcccagagatgggctacctgccaggatctgatcgggaccccacgctagccacccctccggccggccagactctcgcagtgccctccctgccacgggccactgagccggggacagggcctctgacaacagccgtcacccctaacggggtcaggggggcaggccccactgcgccagaactgctgaccccgcccccaggaaccacagccccacccccacccagccctgcctccccagggcctccccttgggcctgagggaggagaggaggagacgacgaccaccatcatcaccacgacaactgttaccactacggtgaccagcccagttctgtgtaataacaacatctccgagggcgaagggtatgtggagtctccagatctggggagccccgtcagccgcaccctggggctcctggactgcacttacagcatccatgtctaccctggctacggcattgagatccaggtgcagacgctgaacctgtcacaggaagaggagctcctggtgctggctggtgggggatccccaggcctggccccccgactcctggccaactcatccatgcttggagaaggacaagtccttcggagcccaaccaaccggctgcttctgcacttccagagcccacgggtcccaaggggcggtggcttcaggatccactatcaggcctacctcctgagctgtggcttccctccccggccggcccatggggacgtgagtgtgacggacctgcaccctgggggcactgccacctttcactgtgattcgggctaccagctgcagggagaggagaccctcatctgcctcaatggcacccggccatcctggaacggtgaaacccccagctgcatggcatcctgtggtggcaccatccacaatgccaccctgggccgcatcgtgtccccagagcctgggggagccgtagggcccaacctcacctgccgttgggtcattgaagcagctgaggggcgccggctgcacctgcactttgaaagggtctcgctggatgaggacaatgaccggctgatggtgcgctcagggggcagccccctatcccccgtgatctatgattcggacatggacgatgtccccgagcggggtctcatcagtgacgcccagtccctctacgtggagctgctgtcagagacacctgccaatcccctgctgttaagccttcgatttgaagcctttgaggaggatcgctgcttcgcccccttcctggcacatggaaatgtcactaccacggaccctgagtatcgcccaggggcactggcaaccttctcgtgcctcccaggatatgccctggagccccctgggccccccaatgccatcgaatgtgtggatcccacagaaccccactggaacgacacagagccggcctgcaaagccatgtgtggaggggagctgtcggaaccagctggcgtggtcctctctcccgactggccccagagctatagcccgggccaagactgcgtgtggggcgtgcacgtccaggaagagaagcgcatcttgctccaagttgagatattgaatgtgcgggaaggggacatgctgacgctgttcgacggggacggtcccagcgcccgagtcttggcccagctgcggggacctcagccgcgccgccgccttctctcctctgggcccgacctcacactgcagtttcaggcaccgcccgggcccccaaatccaggcctgggccagggcttcgtattgcacttcaaagaggtcccgaggaacgacacgtgccccgagctgccacctccggagtggggctggagaacggcatcccacggggacctgatccggggcacggtgctcacctaccagtgcgagcctggctacgagctgctaggctccgacattctcacttgccagtgggacctgtcttggagcgccgcgccgcccgcctgccaaaagatcatgacttgtgctgaccctggcgagattgccaacgggcaccgcaccgcctcggacgccggcttccccgttggctcccacgtccagtaccgctgcctgccagggtacagcctcgagggggcagccatgctcacctgctacagccgggacacaggcacacccaagtggagcgatagggtccccaaatgcgccttgaagtacgagccgtgcctgaacccgggggttcccgagaatggctaccagacgctgtacaagcaccactaccaggcgggcgagtctctgcgcttcttctgctatgagggctttgagcttatcggcgaggtcaccatcacctgtgtgcccggccacccctcccagtggaccagccagcccccactctgcaaagttgcctatgaggagctcctggacaaccgaaaactggaagtgacccagaccacagatccatcacggcagctggaaggggggaacctggccctggccatcctgctgcctctaggcttggtcattgtcctcggcagtggcgtttacatctactacaccaagcttcagggaaagtcccttttcggcttctcgggctcccactcctacagccccatcaccgtggagtcggacttcagcaacccgctgtatgaagctggggatacgcgggagtatgaagtttccatctgaaccccaagactacagctgcaggacccaggacgcccctcccctcctcattcgggcagagggaaatacgggacccggtctctgcctcctggctgccctcctccctggctgtgtaaatagtctccctatcccacgagggggctttgatggccctggagatcctacagtaaataaaccagcatcctgccgcccaaagccgcctcttctcagttgccaaacgaggggcctgccccccgccctaccggcttttggattctgggaggggaactctgcctccctgcaaatcttgcagcccctcctgcccagggcacccctcaaggactgcccccgatagctctactgttcccttggccacgaaggtgcccccctcccagatgccctggccctaggcctgactccggccaggagggtcagaagaaggacaaaggggagagctgggacaaggccttgcccccttcctgccatctccccaacccacagtctctccacctttgcttctgaattcttgtttttgagcaataaacagaaaatcgccacttgt

SEQ ID NO: 179592 - DNA, 1191 bp, Homo sapiens
  Payload ID: 15396
  Gene Symbol: SZT2
  Gene Name: seizure threshold 2 homolog (mouse)
  Uniprot ID: Q5T011
  ENST ID: ENST00000372450
  CDS Start-End: 88-624
ggttcctgctgggtgccgaggtagcgaggtcaggggtcaagagtggaacaccctcactggcccgggccggcgcgggagggctgtgtgatggcctcggagcgcccggagccggaggtggaagaagctgggcaggtgttcctgttaatgaaaaaggattatcgaatctcccgaaatgttcgcctggcttggttcctcagtcatctgcaccaaactgtgcaggccacaccccaggagatgctgtctgaacaggaattggaagtcctcagtgtcctgccccctgggtggcagccagatgaaccagtggtcccaaggccattcctcctggtaccttccacccgggtcaccttcctggcttggcagtatcggtttgtcattgagttggaccttagcccatctactggcattgtggatgattccacaggggagatcttgtttgatgaagttttccatgccctgtcccgctgcttaggcgggctgcttcggcccttccgagtgcctggatcttgcatcgacttccagcctgagatctatgtaactatccaggcctactcctccatcattggactgcagtcccaccagagacagggtttcaccatgttggccaggctgccctcgaacttctgacctcaagtgatccacctgcctcagcctcccaaagtgctgggattacaggcatgagctactgtgcctggcccaaagcagcatttgaactgagttttgaagaaagaattgaggttaaccattcaaagaaggggaaatggacttttctgacagagggaccagcaaaagcaaatacatggtactatgaacctgtactctcaatcacaggtgttttagggaactacatattattcagtgtcaacagagtaaaatttgaatgtggaaagggatggtaaagaggagactgtagacataagtgggagctggttatgaaaggccatgaatgtgacactaaggactttgtgctttattctatgggggagttcagtgtggaggataagagcactggatctggaatcacattgcctgtgtttgcttcctggcagtaccacttactggttgtgtgtccttgagcaagttacttaacctttctgtgcatctgtgacctttttccaaaggggatattaacattgcttatatcatatggtgattgaattaatacatgtcaagcacttagaactgtgcttgcca

SEQ ID NO: 179593 - DNA, 2133 bp, Homo sapiens
  Payload ID: 15396
  Gene Symbol: SZT2
  Gene Name: seizure threshold 2 homolog (mouse)
  ENST ID: ENST00000406439
  CDS Start-End: 6-512
gtgtgatggcctcggagcgcccggagccggaggtggaagaagctgggcaggtgttcctgttaatgaaaaaggattatcgaatctcccgaaatgttcgcctggcttggttcctcagtcatctgcaccaaactgtgcaggccacaccccaggagatgctgcttcagtctgaacaggaattggaagtcctcagtgtcctgccccctgggtggcagccagatgaaccagtggtcccaaggccattcctcctggtaccttccacccgggtcaccttcctggcttggcagtatcggtttgtcattgagttggaccttagcccatctactggcattgtggatgattccacaggggagatcttgtttgatgaagttttccatgccctgtcccgctgcttaggcgggctgcttcggcccttccgagtgcctggatcttgcatcgacttccagcctgagatctatgtaactatccaggcctactcctccatcattggactgcagtcccaccagatgatatgatcttttatttggaaaaacctaatggctccaccaaaaaactattagaactgataaacaaattcagtaaagttgcaagatacaaaatcaacatacagaaaatcagtagcatttctgtatgtcagcagcagacaatgtgaagaagaaatcaagaaagtaatcccatttacgatagtttaaaataaaatacctaggaattaaccaaagaagtgaaagatctctacaatgaaaactataaaacatcgatgagagaaattgaagtggactccaaaaattggaatgatattccatgttcatggattggaagaatcagtattgttaaaatgcccacactgcctaaagcagtctacagattcagtacaattcctatcaaaataccaatgacattcttcatagaaatagagaaaacaatcctaaaatttatatggaaccacaaaagacccagaatagccaaagctattctgagcaaaacaaacaaaactggaggaatcacattacctgacttcagattatactacaaagctatagtaaccaaaaacagcatggtactggcataaaaacagacacatagaccaatggaacagaatagagaacccagaagccatatatctacaatgaactcatttttgacagatgccaagaacatacattggggaaagaacagtctcttcaataaatggttctgggaagactggatattcatatgcagaagaatgaaactagactcctatctcacaaaaatcaaatcaaaatggattaaagacttaaatctggccaggcgcagtggctcacacctgtaatcccaacactttgggaggccaaggctggtcttgaactcttgacatcatgatttgcccgcctcagcctcccaaagtgctgggattacaggcgtgagccaccacacccggcgacttcatccactgtctgtccgcttcctgtgtaaggccgaccacccagcccccaaacaacccttaaaatgagacccaaaccaaagacctaacatataagcctcaaatcagtaaacctctcctgaaacaggcagaggaactgcctgcccagaaatactcacaataggctgtgcagattgtaaagagatcaacagcttcacccacgctctgcataaactctggtactggctgtgttctccatagaaggtctcgctgtgttgcctgggctggagtgcagtggtgtgaacacagctcactgcagccttgatctcttgggcttaagtgattctcctgcctcagactcctgagtagctgagaccacaggtgcatttcaccactcagctaatttttagtttttttgtagagatgaggtctctaccaagctggtctctaactcctgggctcaagcgatcttcccatcttggcctcccaaagtgctgggattacacatgtgaaccactatgcttggctcaaagatttattgataataccctgcaagcacaagcgtgcaaagcaaaaatggacaaataggatcacatcaagttaaaaagctgcacagcaaaggaaacaataaacaaagtgaggaaacaaccacagaatgggagaaaatatttgcaaaccacccatctgacaagggattaattaccagaatatataaggagctcaaacaactctat

SEQ ID NO: 179594 - DNA, 12281 bp, Homo sapiens
  Payload ID: 15396
  Gene Symbol: SZT2
  Gene Name: seizure threshold 2 homolog (mouse)
  Uniprot ID: Q5T011
  ENST ID: ENST00000562955
  CDS Start-End: 1-10128
atggcctcggagcgcccggagccggaggtggaagaagctgggcaggtgttcctgttaatgaaaaaggattatcgaatctcccgaaatgttcgcctggcttggttcctcagtcatctgcaccaaactgtgcaggccacaccccaggagatgctgcttcagtctgaacaggaattggaagtcctcagtgtcctgccccctgggtggcagccagatgaaccagtggtcccaaggccattcctcctggtaccttccacccgggtcaccttcctggcttggcagtatcggtttgtcattgagttggaccttagcccatctactggcattgtggatgattccacaggggagatcttgtttgatgaagttttccatgccctgtcccgctgcttaggcgggctgcttcggcccttccgagtgcctggatcttgcatcgacttccagcctgagatctatgtaactatccaggcctactcctccatcattggactgcagtcccaccaggtgctggtacagggctgcctcttggacccttcccagcgggaggtgttcctgcagcagatatatgagcagctctgcctctttgaggataaggtggccaccatgctgcagcagcagtacgatccccagagccaggcagaagaccagtccccagactcaggggacctactgggccggaaggtaggcgtctccatggtgacagctgatcttgggctggtcagtatgattcgtcagggcatcttggcactgcagttactaccctcgaactctagtgcagggattatcgtgatcacggatggggtgaccagtgtacctgatgttgctgtctgtgagacactgctgaaccagcttcgcagtggcactgtggcttgttcctttgtccaggtgggaggagtttactcttatgactgcagttttggccatgtgcccaatgtggaattaatgaagttcatcgcaatggcaacatttgggtcctacctgtccacttgtcctgagccggagccaggcaacctgggtctgactgtctaccaccgggcatttctcctctattccttcctgcgcagtggggaagcactgaaccctgaatattactgcggctctcagcaccgcctatttaatgagcacctggtctctgcaagcagcaaccctgccctggccttgcgccggaagaagcacactgagaaggaggtgccagccgacttggtcagcactgtgtccgtacggcttcgagagggctacagtgtccgagaggtcacactggccaaaggagggtcccaattggaggtaaagctggtgctgctgtggaaacacaacatgcgcattgagtatgtggctatggcaccctggcccctggagcctgagggccctcgagtaacacgggtggaagtgacgatggaaggcggctacgacattttgcatgatgtgtcctgtgcactaaggcagcccattcgttcattgtatcgtacccatgttatccggcgtttctggaacacgctgcagagcatcaaccagacagaccagatgcttgcccaccttcagtccttctcctcagtgcctgagcatttcacgcttcctgacagcaccaagagcggagtgccactcttctacatccctccaggctccaccaccccggtgctctccctccagcccagtggttctgactcatcccatgcccagtttgctgcctactggaagccagtgctgtccatggatgcaaattcctggcagcgatggctgcacatgcatcgcctggtgctaatcctggagcatgacacaccaatccccaagcacttgcacaccccgggcagcaatgggcgctacagcactatccagtgcaggatctcccactcctccctgacctctctgctgcgggactggagcagcttcgtactagtcgagggctattcttatgttaagctgctctccagtgccccagaccagccccccaattccttctacatggtccgtatcatttccaaggccccatgcatggttcttcgcctgggttttcccattggcacaccagcaccggcccggcacaagattgtgtcaggcttgagggaagagatcctgcggctgcgtttcccccaccgggtacaaagcaaggagccaacgcccaaggtgaaacgaaaagggctagggggtgctggtgggggcagctctccctccaagtcaccccccgtgctggggccacagcaggccctgtctgaccggccctgccttgtggtcctgcataagccactggacaaactgctcatcaggtatgagaagctgcccttggactaccgggcacccttcttgctgacattggagccaccaggtccactgcccttggtgtcaggccgctcagcctcttctagcctggcgtcactgtcccgctacctctaccatcagcgctggctttggagtgtcccgtcaggactggcccctgcgctgcctctcagtgccattgcccagctcctctccatcctcactgaagtccgactttctgaaggattccacttcgcctgcagtggggaaggaatcatcaacatggttctggagcttccaattcagaatgaaccaccagggcaggctgcagctgaagagaagcacacctgtgttgtccagtacatcctcttccccccacactctacctccaccaaagacagcttctcgacagatgatgacaatgatgtggaagtggaggccctggagggagactcagagctcaatctggtcactgaggtgtgggtggagccacagtatgggcgagtgggacctggccctggaatctggaagcacctccaggacctgacgtattctgagatcccgcaagctctccacccacgggatgctgcctgcataggctccatgctgagctttgaatacctgatacagctgtgtcagagcaaggaatggggtcctctgcccccagagccgagggtctctgatggattggatcagggaggagacacctgcgtccatgagatccctttccattttgacctaatgggattgctgccacagtgccagcagctccagatgttcttcctcttgcttgccagaggtgccgaggggccactgctgggggttcatgggatcccgaaggagcaagcagtcggcagcacccaggccacaggagactccgcttttacttccctgagtgtaggtcttcctgaaactctcaagcctctcatctctgcccagccccctcagtggcgctgctatgcaaggcttgtgaacccccagcatgtgtttctgacttttctcccagctaccttctcagatgtccagcgtctggctgcctgtggcctggagggaccccctcaagaggagacaaagcctaagtttggggattggagtggggctcccagtctgaaagatctaggaggaactgggatcaaagctacaaagtcccacgtccctgtcctcagtgtgaccctggctagtgacaatgcccagaatcaaggagagctaagtccaccattccgtcgagacttacaggcttacgctgggcgtcaggcttcccagacagagagtgcggatgggccccggacccggtgtcctgtctacatctacagctgttcactggaagcgctgagggaacaaatggttggcatgcagccccctcaggcgccccgagacctcatcttccggactcagttcctcgaccacccctccccatcctcagcctggatggaaccccggtacaaggaggcagctaaccactgtgccctgctgcaggagcatgcacagcggtgctatgtccgtgggctattccgcagcttgcagcaagcacagagtgtgacctcccaggatttgctgacagcggtagatgcctgtgaggagctactacaagaaatagacatcaccccatttctccttgcattgtgtggccacacttggggtttgcctcatgcacccccaagtcctggtcctctcagccctgggcccttcagcagcagcatggaggagggtgctgaacctcgggaacgagctatcctagcttctgaatccagcatagagaccgaggacctaagcgagcctgagtttcagagcacccgtgtccctggcattccagaccctgggccagagatctctctgacagatgtctgccagctcagaggagaggcccatggtgcccttcatagcgtcatccaggagaagttcctagagatcagtcgtctccacttccgcacagtgccttccaatccccactacttcttctattgccctccatccagcaggcgagaagatgaggggcctcgggacacagtagacagaaaaatcagtgacctggagttttcagaggctgagcttatgggagaagaaggagacacatctgcctgctgtgtggtcactgagagtgacccagagctagaggtagaataccgggagagccgtgaatcagacctggggcctgctgggctagactctgcctcgctgtcagacgtagacactgtgaatcctgatgaagactccttcagtatcttggggggcgactcacccactgggcctgagagcttccttcatgacctgccaccgctcttcctgcacctcacgtgctccgtgcggctacgtgggcagcacagctcagtacctgtgtgcagcctgcctacctgcctgggccaggtgctttccagtctggagggccccccagttggaggccgagttcccttgagggacctcagtgtgactctggatgtcttcatgctgactttgcccctggaagtggagctccccacggcctcggaccctcagcaccaccggtcaacatctgaaagcagtgcttcatttccacgatccccagggcagccatcatctttaaggtcagatgatggcctcgggcccccactgccacccccagaagaggagaggcacccaggactatccaatttggccacgccccacagactggctattgagaccaccatgaatgagatccgctggttgttggaagatgagatggtgggggcactccgaagagggggcatcccacagagtcctgccctgcaccgcgcagctgcccatatccatagttctcctggacgctccacctgccttcgccaaactctgccactgagttttgtatttgggccagagcgttccctcacacaattcaaggaggagttccgccgcctccatctccctggccatgttcttcttgaagaccctgacagtggcttcttctttgtggcagctggccaacagccaggtgggtcccatggggagccttcttcagcggcctgggcttggcacagtcatgaggacagggctgaaggcatcgaaggggagaccctgacagccagcccccaagcacctgggtccccagaggattctgagggtgtccccctcatcagcctgccccgcgtgccacagggagggagtcagcctgggcccagccggggattaagtctcatgtccagtcagggcagtgtggactcagaccacctaggttatgatggtggcagcagtggctcagacagtgagggtcccaatgacacccttggtgagaaggcccccttcacattgcggactccacctgggccagcacctccacagccttcactctcaggcctccctgggccctgcctgcctgacttctggctcattgtccgggtcctgcaggaccgtgtggaagtgtatgcacatgcacggagcctgattcgggaggatggggggccgggcactgagtgtcgccacctgcagcagctcctggtgaggcgagttggggagatctgcagggaggtcaaccagcgactgcttcttcaagaccttcatgacagccacgtgtgtaactctcttctggtggccgagagtgaagaagatctgtggcgcagtgagactcccttccactcccgtcagcgggcaccactgcccagtgatgattatgctgctgatgagagctgtgcgccccgtgggtacctggcagccacaatgcagtttgtccctggccatttctcctgtgacgttgtgtggggaactgtgatccgagtccattcacgcctcaaaatggggcccagcatgggggtctctcgggccatccaggccctgcgctctgtgctcaatgccttctctgtggtgaaccggaaaaacatgtttgtttaccaggagcgagcaacaaaggctgtgtactatcttcggctcctagagacatcctgcagtgaccggccatggaaaggggatgcgctgcccccttccctcgctctgtcccgaagccaagagcccatctactctgaggaagcctcgggtcctcgttctcccttagacatggtctctagccgcagttcagatgctgctcgtcctgtgggccaagtggacagacatatccagctgctggtccatggtgttgggcaggcaggtcctgagatcacggatgagctcgtgcgagttctatgtcggcgcctggatgaggccacgctggacgtcatcacagttatgcttgttcggaactgcaagctgacaccagctgatgtggagttcatccagccccctggaagtctcccctcagaggtgctgcatctggccctacccacctcctgcaggccctggcttccagccctggcatggtacctacggcagaacttgctcatcttcctgcactctcccaagtacacagatagcaacagccggaaccacttccaacatccactcccaccacagggtggcctccctgacttggacatctacttgtataacaagcctggtggacagggcactgggggcaaaggggttgcctgcatcactctagcctttgtggatgaaggaggggcccccttgtcactggcgttgtggcccccctcctctccggggcccccagacccactgcgagaggaggaatttgagcaactgacccaggtcatccgctgcccggttgttgtggacagttcttcagctcagaatggggccccacggcttcgattggatgtgtgggaaaaggggaacattagtattgtgcagctggaggagaaactccgaggagcagctcgccaggccctggccgatgccatcatcgagcttcagctgctgccagcttcactatgtacagaggacacacccacaggaagtctcaggaacggatcgttggaaactaagagctctgcaggccgagctagcacctttccccctgcccctgtccctggggagcctgtgactccacccagcaaagcgggccggcgtagcttctgggatatgctgagtaaaacagaatgtggggatttgggttcccccaaaacaactgatgacattgtcctggatcggccagaagacactcggggccggaggcgtcacaaaaccgagagtgttcggactcctggtggagctgagcgggcgccaggctcagattctggagcccagagacaaaagcgccggacaacacagctagaagagggtgaggtggggacccttcatcctgtgtttgcccgtgttgctcagcgctggatggagtttatggttcagattggttgtgcctcagtgtccagaagctctgcccacatggtgtcccggttcctccttccatccatcctgtctgagttcaccgcactggtcacctcaatggctggagacaccagtgtccgcatctttgagcagcatttgggttcagagccagagatcttcggcccttgttcccctgggcaactgggcccctctccccgccctgcagctgagcggcatctgctgcttctgggaaggaacttcttgcagtggaggagaccaacacagcaggctgccaaagccatgcagcgcttcgagccaggaggtgatgggagctcagggcgaaatgctccccggcagaggctcttgctactagaggttgtggacaagaagctacagctgctgacctacaactgggctccagacctgggggcagcattgggccgagcgctggttcgcctggtgcagtggcagaatgcacgagcccatctcatcttctgcctactcagccagaagcttggcctcttccatcattatggccagttggacttccccgtgcgagatgaaaaggagccaaacccattcctgctgccgaccatggaagtggagaccctcatccggagtgcaagtcccccgctgagccgtgagcagggccgactgagtgggtcctctcgtggtgggggtcctcttcccctggacacattcccctttgacgaggccctaagggatatcacggctgcccgccccagctccgtacttggtcctgtgcccagacctcctgatcctgtcacctaccatggacaacagttcctagagatcaagatggcagagcgcagagagctggagcgccagatgaagatggaaaacctgtttgtaacctggcagcagcgttctaccccagccaccatgcccatcagtgctggagagctggagaccctgaagcagtcatcccgcctggtgcattactgtgcaacagccatgctcttcgacccagctgcctggctgcatgggcccccagagacctctggaccccctgacgggcagcggcgccatcgccctgagtcagggtctgggagccgagaggcccccacaagctgtgaatccttggatgtgtcgcccccgggagcccgtgaggagccttggctgaaggagctgagcttggctttcctgcagcaatatgtgcagtatctgcagagcataggttttgtgctggtaccactgcggcccccctcacccgcccgcagcaccagccggccacgggccatggctatccttggaacagagggtcgaggctccttctcctgccctaaaaccaagactgatgggagccccaagagcactagctctccggtaaccacctaccacctgcagcgggcactgcctgggggcatcatcctcatggaactggcattccagggctgttacttctgtgtcaaacagtttgccctggaatgttcccgaatcccaatggggcaggctgtcaactcacagctgtccatgctgttcacagaggagtgtgacaaggtgcgggacctgatgcacgtgcactcgttcagctatgacttccatctgcgcctcgtgcatcagcacgtgctaggtgcccatctggtgctgcggcacggctaccacctcaccacctttctgcgacacttcctggcccaccaccctgacggaccccactttggccgcaatcacatttaccaagggacattggagctccccacaccactcattgctgcccaccagctatacaactacgtggctgatcacgccagctcttaccacatgaagccattgcgaatggcccggccagggggcccagaacacaacgagtatgccctggtgtcggcatggcacagttctggctcctacctggactctgagggacttcgacaccaggatgactttgatgtgtctctgcttgtctgtcactgtgctgcaccctttgaggagcaaggagaggctgagcggcacgttctgcggctacagttcttcgtggtgctcaccagccagcgagagctcttccccaggctcactgctgacatgcgccgcttccggaagccacccagactgccccctgagccagaggctcctgggagttcagctggcagccctggggaggcctcagggcttattctagcgcctggaccggctcctctgttcccaccactggctgcagaggtgggcatggcacgagcacggctggctcagctggtgcggctggctggagggcactgccgtcgggacaccctttggaagcgcctcttcttgctggagccaccggggcctgatcgactgcggctaggggggcgcctggccctggcagagctggaggaactcctagaagcagtccatgccaaatccattggggacatcgacccccagctggactgcttcctatccatgacggtctcctggtaccagagcctgatcaaagttctcctaagccgcttcccccagagctgtcgccatttccaaagcccagacttgggaactcagtacctggttgtgctgaatcagaagttcactgactgctttgtgctagtgtttctggactcccacttaggaaagacgtctctgacagtggttttccgagagcccttcccagtacagccccaggacagcgagagcccccctgcccaactggtctccacctaccaccacctggagtctgtcatcaacacagcctgtttcaccctctggacccgcctcctctgagggagtggactggaccactgaatgtcactgttccttgaatcatgggcctaccagattgcctgccagaggcaggactgaccagcccttctgggccccagggcaagccagacactgagtgacaccaaaggctttgtaactatgtcttgagggtctgctgccccagcctggcagcaggaaccgccctccccaaacacccacagccactgacccatccaggactccagagagtcaggtcaaccccgaggaccccttgggcccttctggggtactcctttcggcccccctggtagagtctcgggagttcacacagggtggcaaacaccccctagagctcctctgcctgaatcctgccccctagcctttgaccactgtcagccacctgtgtcccttgagccttcgggtcttcacttcccacttggacatcactgctggacattcccatcgagatgacacctgggttccaatcccagctctgcctttgaagcacttgtggccaccgtcaagtccctttgctctcggaccctgggtttctcatcctttaatgaggtgggttcagaagctctcccatcttcacagcaaccctggcactggcttctcaatgggagggaagcagcagagaaactgaagtgttagacactatgtgtcccaccaccccattacagagacatatgacaatgttcagcaggtcatctttaatgcagaggaggagatgggatgtcactcgctgtctggaggcacgtgggtggtgtgcgggccctcactggccagcctctgggtggccccgcctatcccagtatgaacgtagccaactcaagccctctactgtgtctcctgcagggagagggaggcctcggcacctcagcccacaaggagaaaacagcccctgtccgggtccctccagagctcccttccccagggccacgcctcacctcgaggctgatactcacagcccacgaagcctttgtagccttcatcttccagcagttgaaacagataggggaaattcagctctccggggctgctgggctcccctcggcctgggacctgtgccacctgcacatgccctggggacagatgtggacaaatgtggggtccaggctcctgccagggcctgaaggacagatgtggggattgaaagggtgggagggcaaaggaaggtcctctcaccaacaatgggcaggaactcccggatgtttcctgtcaggttcccatccatgatctgccagtggaatatgtcctagggaagaggatactacattccgagaccccgcaggccccgccctccttccgatctgcgaagtacccccttccacttaccatttgtaattggaggttgggtcttcctaccttctgtaagatggctgccgctgtaagagaagccagggaggggaccgtgagcctcaagagcacaggaatcaaaagggacagaaggagagacagggctggggtcgtaccctgctggggcgtgtccaggaagtactgggggtcagtgatgcgggtgttgatgggctccagcagtcccacgaggtcctcctagcagcatgtcgggtgctgtgaatagagctccttcccaagtttgtcccccatcagtcagtcactggtcaaggccctcacctgttcctctgacctaggctggcagcctcacgtgctgtccccactgtgcacccccttctccgcacacccacagagacatgtaagtacgtgtgtgtttccacctttctcacctgagccaaaaccccagctgcatgcctcaggttctccagaaaaacggcctccatctcagccttgactgctattcgatcagctccctggggtactcggccagccatcaggtggatcctgtggggaagatggactggaggccttgcctcccttggctctctctgcacctcttccaggattccctgactgtgccagccctcgtccgtctccccaggtctccagtccatggcacctgggtcacgatgcccaggtatcccagcactttcagagacacttcagtgatggctgaggggcaagccctttcccagacatctcagtgtccacccaccgcctcctgcctccagtactttccaaaacctttccttccctcggtccttctccgcaacctgtaacctgctaaattctcacctttaaaaattgtcctgaccttt

SEQ ID NO: 179595 - DNA, 10299 bp, Homo sapiens
  Payload ID: 15396
  Gene Symbol: SZT2
  Gene Name: seizure threshold 2 homolog (mouse)
  ENST ID: ENST00000634258
  CDS Start-End: 1-10299
atggcctcggagcgcccggagccggaggtggaagaagctgggcaggtgttcctgttaatgaaaaaggattatcgaatctcccgaaatgttcgcctggcttggttcctcagtcatctgcaccaaactgtgcaggccacaccccaggagatgctgcttcagtctgaacaggaattggaagtcctcagtgtcctgccccctgggtggcagccagatgaaccagtggtcccaaggccattcctcctggtaccttccacccgggtcaccttcctggcttggcagtatcggtttgtcattgagttggaccttagcccatctactggcattgtggatgattccacaggggagatcttgtttgatgaagttttccatgccctgtcccgctgcttaggcgggctgcttcggcccttccgagtgcctggatcttgcatcgacttccagcctgagatctatgtaactatccaggcctactcctccatcattggactgcagtcccaccaggtgctggtacagggctgcctcttggacccttcccagcgggaggtgttcctgcagcagatatatgagcagctctgcctctttgaggataaggtggccaccatgctgcagcagcagtacgatccccagagccaggcagaagaccagtccccagactcaggggacctactgggccggaaggtaggcgtctccatggtgacagctgatcttgggctggtcagtatgattcgtcagggcatcttggcactgcagttactaccctcgaactctagtgcagggattatcgtgatcacggatggggtgaccagtgtacctgatgttgctgtctgtgagacactgctgaaccagcttcgcagtggcactgtggcttgttcctttgtccaggtgggaggagtttactcttatgactgcagttttggccatgtgcccaatgtggaattaatgaagttcatcgcaatggcaacatttgggtcctacctgtccacttgtcctgagccggagccaggcaacctgggtctgactgtctaccaccgggcatttctcctctattccttcctgcgcagtggggaagcactgaaccctgaatattactgcggctctcagcaccgcctatttaatgagcacctggtctctgcaagcagcaaccctgccctggccttgcgccggaagaagcacactgagaaggaggtgccagccgacttggtcagcactgtgtccgtacggcttcgagagggctacagtgtccgagaggtcacactggccaaaggagggtcccaattggaggtaaagctggtgctgctgtggaaacacaacatgcgcattgagtatgtggctatggcaccctggcccctggagcctgagggccctcgagtaacacgggtggaagtgacgatggaaggcggctacgacattttgcatgatgtgtcctgtgcactaaggcagcccattcgttcattgtatcgtacccatgttatccggcgtttctggaacacgctgcagagcatcaaccagacagaccagatgcttgcccaccttcagtccttctcctcagtgcctgagcatttcacgcttcctgacagcaccaagagcggagtgccactcttctacatccctccaggctccaccaccccggtgctctccctccagcccagtggttctgactcatcccatgcccagtttgctgcctactggaagccagtgctgtccatggatgcaaattcctggcagcgatggctgcacatgcatcgcctggtgctaatcctggagcatgacacaccaatccccaagcacttgcacaccccgggcagcaatgggcgctacagcactatccagtgcaggatctcccactcctccctgacctctctgctgcgggactggagcagcttcgtactagtcgagggctattcttatgttaagctgctctccagtgccccagaccagccccccaattccttctacatggtccgtatcatttccaaggccccatgcatggttcttcgcctgggttttcccattggcacaccagcaccggcccggcacaagattgtgtcaggcttgagggaagagatcctgcggctgcgtttcccccaccgggtacaaagcaaggagccaacgcccaaggtgaaacgaaaagggctagggggtgctggtgggggcagctctccctccaagtcaccccccgtgctggggccacagcaggccctgtctgaccggccctgccttgtggtcctgcataagccactggacaaactgctcatcaggtatgagaagctgcccttggactaccgggcacccttcttgctgacattggagccaccaggtccactgcccttggtgtcaggccgctcagcctcttctagcctggcgtcactgtcccgctacctctaccatcagcgctggctttggagtgtcccgtcaggactggcccctgcgctgcctctcagtgccattgcccagctcctctccatcctcactgaagtccgactttctgaaggattccacttcgcctgcagtggggaaggaatcatcaacatggttctggagcttccaattcagaatgaaccaccagggcaggctgcagctgaagagaagcacacctgtgttgtccagtacatcctcttccccccacactctacctccaccaaagacagcttctcgacagatgatgacaatgatgtggaagtggaggccctggagggagactcagagctcaatctggtcactgaggtgtgggtggagccacagtatgggcgagtgggacctggccctggaatctggaagcacctccaggacctgacgtattctgagatcccgcaagctctccacccacgggatgctgcctgcataggctccatgctgagctttgaatacctgatacagctgtgtcagagcaaggaatggggtcctctgcccccagagccgagggtctctgatggattggatcagggaggagacacctgcgtccatgagatccctttccattttgacctaatgggattgctgccacagtgccagcagctccagatgttcttcctcttgcttgccagagagccagagggtgtccctttcgccgaggggtcctgtcctgccaacgacatggtgctgtgcctgctgcacagctgcctggggcaggagctgagtgaccgggagatcccactgacccccgttgaccaggctgccttcttgagtgaggtgctgcggcggacctgccacgttccaggtgccgaggggccactgctgggggttcatgggatcccgaaggagcaagcagtcggcagcacccaggccacaggagactccgcttttacttccctgagtgtaggtcttcctgaaactctcaagcctctcatctctgcccagccccctcagtggcgctgctatgcaaggcttgtgaacccccagcatgtgtttctgacttttctcccagctaccttctcagatgtccagcgtctggctgcctgtggcctggagggaccccctcaagaggagacaaagcctaagtttggggattggagtggggctcccagtctgaaagatctaggaggaactgggatcaaagctacaaagtcccacgtccctgtcctcagtgtgaccctggctagtgacaatgcccagaatcaaggagagctaagtccaccattccgtcgagacttacaggcttacgctgggcgtcaggcttcccagacagagagtgcggatgggccccggacccggtgtcctgtctacatctacagctgttcactggaagcgctgagggaacaaatggttggcatgcagccccctcaggcgccccgagacctcatcttccggactcagttcctcgaccacccctccccatcctcagcctggatggaaccccggtacaaggaggcagctaaccactgtgccctgctgcaggagcatgcacagcggtgctatgtccgtgggctattccgcagcttgcagcaagcacagagtgtgacctcccaggatttgctgacagcggtagatgcctgtgaggagctactacaagaaatagacatcaccccatttctccttgcattgtgtggccacacttggggtttgcctcatgcacccccaagtcctggtcctctcagccctgggcccttcagcagcagcatggaggagggtgctgaacctcgggaacgagctatcctagcttctgaatccagcatagagaccgaggacctaagcgagcctgagtttcagagcacccgtgtccctggcattccagaccctgggccagagatctctctgacagatgtctgccagctcagaggagaggcccatggtgcccttcatagcgtcatccaggagaagttcctagagatcagtcgtctccacttccgcacagtgccttccaatccccactacttcttctattgccctccatccagcaggcgagaagatgaggggcctcgggacacagtagacagaaaaatcagtgacctggagttttcagaggctgagcttatgggagaagaaggagacacatctgcctgctgtgtggtcactgagagtgacccagagctagaggtagaataccgggagagccgtgaatcagacctggggcctgctgggctagactctgcctcgctgtcagacgtagacactgtgaatcctgatgaagactccttcagtatcttggggggcgactcacccactgggcctgagagcttccttcatgacctgccaccgctcttcctgcacctcacgtgctccgtgcggctacgtgggcagcacagctcagtacctgtgtgcagcctgcctacctgcctgggccaggtgctttccagtctggagggccccccagttggaggccgagttcccttgagggacctcagtgtgactctggatgtcttcatgctgactttgcccctggaagtggagctccccacggcctcggaccctcagcaccaccggtcaacatctgaaagcagtgcttcatttccacgatccccagggcagccatcatctttaaggtcagatgatggcctcgggcccccactgccacccccagaagaggagaggcacccaggactatccaatttggccacgccccacagactggctattgagaccaccatgaatgagatccgctggttgttggaagatgagatggtgggggcactccgaagagggggcatcccacagagtcctgccctgcaccgcgcagctgcccatatccatagttctcctggacgctccacctgccttcgccaaactctgccactgagttttgtatttgggccagagcgttccctcacacaattcaaggaggagttccgccgcctccatctccctggccatgttcttcttgaagaccctgacagtggcttcttctttgtggcagctggccaacagccaggtgggtcccatggggagccttcttcagcggcctgggcttggcacagtcatgaggacagggctgaaggcatcgaaggggagaccctgacagccagcccccaagcacctgggtccccagaggattctgagggtgtccccctcatcagcctgccccgcgtgccacagggagggagtcagcctgggcccagccggggattaagtctcatgtccagtcagggcagtgtggactcagaccacctaggttatgatggtggcagcagtggctcagacagtgagggtcccaatgacacccttggtgagaaggcccccttcacattgcggactccacctgggccagcacctccacagccttcactctcaggcctccctgggccctgcctgcctgacttctggctcattgtccgggtcctgcaggaccgtgtggaagtgtatgcacatgcacggagcctgattcgggaggatggggggccgggcactgagtgtcgccacctgcagcagctcctggtgaggcgagttggggagatctgcagggaggtcaaccagcgactgcttcttcaagaccttcatgacagccacgtgtgtaactctcttctggtggccgagagtgaagaagatctgtggcgcagtgagactcccttccactcccgtcagcgggcaccactgcccagtgatgattatgctgctgatgagagctgtgcgccccgtgggtacctggcagccacaatgcagtttgtccctggccatttctcctgtgacgttgtgtggggaactgtgatccgagtccattcacgcctcaaaatggggcccagcatgggggtctctcgggccatccaggccctgcgctctgtgctcaatgccttctctgtggtgaaccggaaaaacatgtttgtttaccaggagcgagcaacaaaggctgtgtactatcttcggctcctagagacatcctgcagtgaccggccatggaaaggggatgcgctgcccccttccctcgctctgtcccgaagccaagagcccatctactctgaggaagcctcgggtcctcgttctcccttagacatggtctctagccgcagttcagatgctgctcgtcctgtgggccaagtggacagacatatccagctgctggtccatggtgttgggcaggcaggtcctgagatcacggatgagctcgtgcgagttctatgtcggcgcctggatgaggccacgctggacgtcatcacagttatgcttgttcggaactgcaagctgacaccagctgatgtggagttcatccagccccctggaagtctcccctcagaggtgctgcatctggccctacccacctcctgcaggccctggcttccagccctggcatggtacctacggcagaacttgctcatcttcctgcactctcccaagtacacagatagcaacagccggaaccacttccaacatccactcccaccacagggtggcctccctgacttggacatctacttgtataacaagcctggtggacagggcactgggggcaaaggggttgcctgcatcactctagcctttgtggatgaaggaggggcccccttgtcactggcgttgtggcccccctcctctccggggcccccagacccactgcgagaggaggaatttgagcaactgacccaggtcatccgctgcccggttgttgtggacagttcttcagctcagaatggggccccacggcttcgattggatgtgtgggaaaaggggaacattagtattgtgcagctggaggagaaactccgaggagcagctcgccaggccctggccgatgccatcatcgagcttcagctgctgccagcttcactatgtacagaggacacacccacaggaagtctcaggaacggatcgttggaaactaagagctctgcaggccgagctagcacctttccccctgcccctgtccctggggagcctgtgactccacccagcaaagcgggccggcgtagcttctgggatatgctgagtaaaacagaatgtggggatttgggttcccccaaaacaactgatgacattgtcctggatcggccagaagacactcggggccggaggcgtcacaaaaccgagagtgttcggactcctggtggagctgagcgggcgccaggctcagattctggagcccagagacaaaagcgccggacaacacagctagaagagggtgaggtggggacccttcatcctgtgtttgcccgtgttgctcagcgctggatggagtttatggttcagattggttgtgcctcagtgtccagaagctctgcccacatggtgtcccggttcctccttccatccatcctgtctgagttcaccgcactggtcacctcaatggctggagacaccagtgtccgcatctttgagcagcatttgggttcagagccagagatcttcggcccttgttcccctgggcaactgggcccctctccccgccctgcagctgagcggcatctgctgcttctgggaaggaacttcttgcagtggaggagaccaacacagcaggctgccaaagccatgcagcgcttcgagccaggaggtgatgggagctcagggcgaaatgctccccggcagaggctcttgctactagaggttgtggacaagaagctacagctgctgacctacaactgggctccagacctgggggcagcattgggccgagcgctggttcgcctggtgcagtggcagaatgcacgagcccatctcatcttctgcctactcagccagaagcttggcctcttccatcattatggccagttggacttccccgtgcgagatgaaaaggagccaaacccattcctgctgccgaccatggaagtggagaccctcatccggagtgcaagtcccccgctgagccgtgagcagggccgactgagtgggtcctctcgtggtgggggtcctcttcccctggacacattcccctttgacgaggccctaagggatatcacggctgcccgccccagctccgtacttggtcctgtgcccagacctcctgatcctgtcacctaccatggacaacagttcctagagatcaagatggcagagcgcagagagctggagcgccagatgaagatggaaaacctgtttgtaacctggcagcagcgttctaccccagccaccatgcccatcagtgctggagagctggagaccctgaagcagtcatcccgcctggtgcattactgtgcaacagccatgctcttcgacccagctgcctggctgcatgggcccccagagacctctggaccccctgacgggcagcggcgccatcgccctgagtcagggtctgggagccgagaggcccccacaagctgtgaatccttggatgtgtcgcccccgggagcccgtgaggagccttggctgaaggagctgagcttggctttcctgcagcaatatgtgcagtatctgcagagcataggttttgtgctggtaccactgcggcccccctcacccgcccgcagcaccagccggccacgggccatggctatccttggaacagagggtcgaggctccttctcctgccctaaaaccaagactgatgggagccccaagagcactagctctccggtaaccacctaccacctgcagcgggcactgcctgggggcatcatcctcatggaactggcattccagggctgttacttctgtgtcaaacagtttgccctggaatgttcccgaatcccaatggggcaggctgtcaactcacagctgtccatgctgttcacagaggagtgtgacaaggtgcgggacctgatgcacgtgcactcgttcagctatgacttccatctgcgcctcgtgcatcagcacgtgctaggtgcccatctggtgctgcggcacggctaccacctcaccacctttctgcgacacttcctggcccaccaccctgacggaccccactttggccgcaatcacatttaccaagggacattggagctccccacaccactcattgctgcccaccagctatacaactacgtggctgatcacgccagctcttaccacatgaagccattgcgaatggcccggccagggggcccagaacacaacgagtatgccctggtgtcggcatggcacagttctggctcctacctggactctgagggacttcgacaccaggatgactttgatgtgtctctgcttgtctgtcactgtgctgcaccctttgaggagcaaggagaggctgagcggcacgttctgcggctacagttcttcgtggtgctcaccagccagcgagagctcttccccaggctcactgctgacatgcgccgcttccggaagccacccagactgccccctgagccagaggctcctgggagttcagctggcagccctggggaggcctcagggcttattctagcgcctggaccggctcctctgttcccaccactggctgcagaggtgggcatggcacgagcacggctggctcagctggtgcggctggctggagggcactgccgtcgggacaccctttggaagcgcctcttcttgctggagccaccggggcctgatcgactgcggctaggggggcgcctggccctggcagagctggaggaactcctagaagcagtccatgccaaatccattggggacatcgacccccagctggactgcttcctatccatgacggtctcctggtaccagagcctgatcaaagttctcctaagccgcttcccccagagctgtcgccatttccaaagcccagacttgggaactcagtacctggttgtgctgaatcagaagttcactgactgctttgtgctagtgtttctggactcccacttaggaaagacgtctctgacagtggttttccgagagcccttcccagtacagccccaggacagcgagagcccccctgcccaactggtctccacctaccaccacctggagtctgtcatcaacacagcctgtttcaccctctggacccgcctcctctga

SEQ ID NO: 179596 - DNA, 7925 bp, Homo sapiens
  Payload ID: 15397
  Gene Symbol: SEL1L
  Gene Name: sel-1 suppressor of lin-12-like (C. elegans)
  Uniprot ID: Q9UBV2
  ENST ID: ENST00000336735
  CDS Start-End: 118-2502
gcggaggaaggagactagagcaggaagagcagcggcgaggcggcggtggtggctgagtccgtggtggcagaggcgaaggcgacagctctaggggttggcaccggccccgagaggaggatgcgggtccggatagggctgacgctgctgctgtgtgcggtgctgctgagcttggcctcggcgtcctcggatgaagaaggcagccaggatgaatccttagattccaagactactttgacatcagatgagtcagtaaaggaccatactactgcaggcagagtagttgctggtcaaatatttcttgattcagaagaatctgaattagaatcctctattcaagaagaggaagacagcctcaagagccaagagggggaaagtgtcacagaagatatcagctttctagagtctccaaatccagaaaacaaggactatgaagagccaaagaaagtacggaaaccagctttgaccgccattgaaggcacagcacatggggagccctgccacttcccttttcttttcctagataaggagtatgatgaatgtacatcagatgggagggaagatggcagactgtggtgtgctacaacctatgactacaaagcagatgaaaagtggggcttttgtgaaactgaagaagaggctgctaagagacggcagatgcaggaagcagaaatgatgtatcaaactggaatgaaaatccttaatggaagcaataagaaaagccaaaaaagagaagcatatcggtatctccaaaaggcagcaagcatgaaccataccaaagccctggagagagtgtcatatgctcttttatttggtgattacttgccacagaatatccaggcagcgagagagatgtttgagaagctgactgaggaaggctctcccaagggacagactgctcttggctttctgtatgcctctggacttggtgttaattcaagtcaggcaaaggctcttgtatattatacatttggagctcttgggggcaatctaatagcccacatggttttgggttacagatactgggctggcatcggcgtcctccagagttgtgaatctgccctgactcactatcgtcttgttgccaatcatgttgctagtgatatctcgctaacaggaggctcagtagtacagagaatacggctgcctgatgaagtggaaaatccaggaatgaacagtggaatgctagaagaagatttgattcaatattaccagttcctagctgaaaaaggtgatgtacaagcacaggttggtcttggacaactgcacctgcacggagggcgtggagtagaacagaatcatcagagagcatttgactacttcaatttagcagcaaatgctggcaattcacatgccatggcctttttgggaaagatgtattcggaaggaagtgacattgtacctcagagtaatgagacagctctccactactttaagaaagctgctgacatgggcaacccagttggacagagtgggcttggaatggcctacctctatgggagaggagttcaagttaattatgatctagcccttaagtatttccagaaagctgctgaacaaggctgggtggatgggcagctacagcttggttccatgtactataatggcattggagtcaagagagattataaacaggccttgaagtattttaatttagcttctcagggaggccatatcttggctttctataacctagctcagatgcatgccagtggcaccggcgtgatgcgatcatgtcacactgcagtggagttgtttaagaatgtatgtgaacgaggccgttggtctgaaaggcttatgactgcctataacagctataaagatggcgattacaatgctgcagtgatccagtacctcctcctggctgaacagggctatgaagtggcacaaagcaatgcagcctttattcttgatcagagagaagcaagcattgtaggtgagaatgaaacttatcccagagctttgctacattggaacagggccgcctctcaaggctatactgtggctagaattaagctcggagactaccatttctatgggtttggcaccgatgtagattatgaaactgcatttattcattaccgtctggcttctgagcagcaacacagtgcacaagctatgtttaatctgggatatatgcatgagaaaggactgggcattaaacaggatattcaccttgcgaaacgtttttatgacatggcagctgaagccagcccagatgcacaagttccagtcttcctagccctctgcaaattgggcgtcgtctatttcttgcagtacatacgggaaacaaacattcgagatatgttcacccaacttgatatggaccagcttttgggacctgagtgggacctttacctcatgaccatcattgcgctgctgttgggaacagtcatagcttacaggcaaaggcagcaccaagacatgcctgcacccaggcctccagggccacggccagctccaccccagcaggaggggccaccagagcagcagccaccacagtaataggcactgggtccagccttgatcagtgacagcgaaggaagttatctgctgggaacacttgcatttgatttaggaccttggatcagtggtcacctcccagaagaggcacggcacaaggaagcattgaattcctaaagctgcttagaatctgatgcctttattttcagggataagtaactcttacctaaactgagctgaatgtttgtttcagtgccatatggaataacaactttcagtggcttttttttttcttttctggaaacatatgtgagacactcagagtaatgtctactgtatccagctatctttcttggatccttttggtcattatttcagtgtgcataagttcttaatgtcaaccatctttaaggtattgtgcatcgacactaaaaactgatcagtgtaaaaaggaaaacccagttgcaagtttaaacgtgttcgaaagtctgaaaatagaacttgccttttaagttaaaaaaaaaaaaagctatcttgaaaatgttttggaactgcgataactgagaaactcttaccagtccacatgcaattagacatattcagcatatttgttattttaaaagggagggttgggaggtttcttattggtgattgtcacacggtataccatactcctctccttcaaagaatgaaaggccttgttaaggagttttttgtgagctttacttctttggaatggaatatacttatgcaaaaccttgtgaactgactccttgcactaacgcgagtttgccccacctactctgtaatttgcttgtttgttttgaatatacagagccttgatccagaagccagaggatggactaagtgggagaaattagaaaacaaaacgaactctggttggggtactacgatcacagacacagacatacttttcctaaagttgaagcatttgttcccaggatttattttactttgcatttctttttgcacaaagaacacatcaccttcctgaattctttaaatatgaaatatcattgccagggtatggcttacagtgactactattataatactaaaactcagagaatcaaagatggattaaactcagtggttgatgaaagccaaaacctgtttgtactgttctatactattcaggtatctttttatttctgatagttttatattataatagaaagccagccactgcttagctatcatagtcaccattttctcactgttaacattaggaaaatcaaggctactatgcttcaggattgtctggttaaatagtatgggaaaaaaactgaagagtttcacataattacacacgtgaaataattaaagcttaaactgaatttgtatttcattttattgtcagatggtggtgttcaccagcctgtatcttgtctgagactgcattcgtatctgagcaggttttctatgcctactgatgtcagtatgtttatactaaccttcatgcttttttcccagaatccctcatctgccagaaaacttgaaaagtttattgcttgtagagttgtactgctttgatttttgaagttggggtagtagttagaactagatttaactagtctataatgaacatgaaggcttttatatatgaagttgtatacctttttgtgtttagagaattatgggaaacctggtaagcaaaactttcctcccagataattgcttccaaattcgaagagttagtcaccaagagagccatatgtatgaaagcgtatctgtgaaaggtaggaaacttaccccccctaagtgtaatgttgctttaggcaactcttgtaaatagtgagacttgtttggtctcttacatgtagagatttgagtgcagttggtacagtactttggtgtctccaccactgtcccttctccccgcttcaaaataagtgtaatccacggtagcagccacacttcctttagaaggaactgttataatttatttaaaagttgaaaaaccacccaagatgactaccaactttcacttttttcttctgccatccaccctcatttttcctttagcaagatttttatatctaactttccttccctccattgagtacgtgctttgagaaaacatttcttaaaacagtgtgtgccacctaaggctggatgggaaagtgcagtcttgttgttcatataaaaacacacttcttattagtttaccacttgcctttttctattgttaatgttctgaatttccttttcttggcttgtttctacttcattttaccctgggtcacttgctgccagcagtttgtgaatggtgtctttcaaataacttagttcttatggcttcacttaaagactgtctcaaaaatactttgctctcttcttcttttttgttcatgggacatggtacctaagcaaataggagttgggtttggtttttctcctaaaataatgctcaatacttacctaatcaaatggcatccatttgaataaaatgacaataactaaagctagttaatgtcagtgacattaaactaactccaggattcaggagttttaatgttagaatttagatttaacagatagagtgtggcttcatttgtccatggtagcccatctctcctaagaccttttctagtctgtcttcctgccttcgaacttgatgacagtaaaaccctgtttagtattctcttgtgcatttggtttgttggttagccgactgtcttgaaactattcattttgcttctagttttattttacagaggtagcattggtgggtttttttttttttttctgtctctgtgtttgaagtttcagtttctgttttctaggtaaggcttatttttgattagcagtcaatggcaaagaaaaagtaaatcaaagatgacttcttttcaaaatgtattgtttagcacttaactcagatgaatttataaattattaatcttgatactaaggatttgttacttttttgcatattaggttaatttttaccttacatgtgagagtcttaccactaagccattctgtctctgtactgttgggaagttttggaaacccctgccagtgatctggtgatgatctgatgatttatttaaagagccgttgatgcctccaggaaacttaagtattttattaatatatatataggaatttttttttattttgctttgtctttctctcccttcttttatcctcatgttcattcttcaaaccagtgttttggaagtatgcatgcaggcctataaatgaaaaacacaattctttatgtgtatagcatgtgtattaatgtctaactacatacgcaaaaacttcctttacagaggttcggactaacatttcacatgcacatttcaaaacaagatgtgtcatgaaaacagcccctttacctgccaagacaagcagggctatatttcagtgacagctgatatttgttttgaaagtgaatctcataatatatatatgtattacacattattatgactagaagtatgtaagaaatgatcagaacaaaagaaaatttctattttcatgcaaatatttttcatcagtcatcactctcaaatataaattaaaatataacactcctgaatgcctgaggcacgatctggattttaaatgtgtggtattcattgaaaagaagctctccacccacttggtatttcaagaaaatttaaaacgatcccaaggaaagatgatttgtatgttaaagtgactgcacaagtaaaagtccaatgttgtgtgcatgaaaaggattccttggttatgtgcagggaatcatctcacatgctgtttttcctatttggtttgagaaacaggctgacactattctctttgattagaaaataaactcataaaactcataatgttgatataatcaagatgtaaccactataaatatgtagaagaggaagttttaaaagaccttaagctggcattgtgaaggaacaccatggtagactctttttgtaaatgtattttgtatttaatgaaatgcagtataaaggttggtgaagtgtaatataattgtgtaaacaaatcctgttaatagagagatgtacagaatcgttttgtactgtatcttgaaacttgtgaaataaagattccacctctggttatcctgtatgctgtaatataccacaaccaagcacctttccagacagactttttttaagctgaatgattcaattttttaatgttttttggaaattcagaagcttctgaaaacattcacttgtggcaatttgaatttatctttcattttaaactcctgaaattcagatttttacaagtccaatattgccctagggagaacatgaatttgctaagaaatgttatcttttaaatctctgatatctttgtcttgaagcagccttgatatgtagtaagcgtgattcactttagcctgattataatattatttatctaaagtttgtttatgcattgccttgtcccaggaattttttaagaggacttgcagagacacgtaccacacagtaacatttagactaaatatgctctgagtaaaggagaaatgaaaaaatattaaatcaagagtgaacatgtacacaaagtgcaattggaagtgggctacaaatttggcccccagcttcccagcaggcaactcaaagaggtaactgaggtaaaatgttccagctcagaagcattggatcttggataaaaagcctacatgatgcaaactgtggcaactgagatgtcagatctcaagatctcaaattgtacttgtgggagcacagtcagtgaccccagatgaccttgactgacctaaaagttgtgggggaagtcggatgtcagagccttaacaccagcaggtgaccatccaacctggggcaatgcctgcctgttcaccacttagcctctttctggcaagtcattagaatgtcctccatcttcattggctgcaacttgatgagctacagcctctttcctaacttcctttatgatgctagtttaggttggttataccagcttggaagtatgcttagattaagttacagcagatacacaaattagatgcaagtaaaaaaaatcagaatttctgtagtagaaactacgaaaaataaaaaggaaagtttttactttttgggtatttttttacgaataagaaaaagtgagcgttaatcagttcaaaaggaggtactgctgtgtaatgggctttgtacgttccttctcatgtcacttacgtcactacttcgccatcaaattgaacaagcttttaattagatcctgaaaattcactatgctagtagtttattggtagtattatattttgagtagaactctgattttccctagaggccaaattctttttatctgggttaatttcttttaaacataacaatgttaatgctgaattgtatattaaatcccatttctaaaaaccacacaattttttctcatgtaagttgagtggaatgtggttagttaactgaatttggaatgttcatataaataatttgttgctgctc

SEQ ID NO: 179597 - DNA, 1631 bp, Homo sapiens
  Payload ID: 15397
  Gene Symbol: SEL1L
  Gene Name: sel-1 suppressor of lin-12-like (C. elegans)
  Uniprot ID: Q9UBV2
  ENST ID: ENST00000555824
  CDS Start-End: 90-995
gcagcggcgaggcggcggtggtggctgagtccgtggtggcagaggcgaaggcgacagctctaggggttggcaccggccccgagaggaggatgcgggtccggatagggctgacgctgctgctgtgtgcggtgctgctgagcttggcctcggcgtcctcggatgaagaaggcagccaggatgaatccttagattccaagactactttgacatcagatgagtcagtaaaggaccatactactgcaggcagagtagttgctggtcaaatatttcttgattcagaagaatctgaattagaatcctctattcaagaagaggaagacagcctcaagagccaagagggggaaagtgtcacagaagatatcagctttctagagtctccaaatccagaaaacaaggactatgaagagccaaagaaagtacggaaaccagctttgaccgccattgaaggcacagcacatggggagccctgccacttcccttttcttttcctagataaggagtatgatgaatgtacatcagatgggagggaagatggcagactgtggtgtgctacaacctatgactacaaagcagatgaaaagtggggcttttgtgaaactgaagaagaggctgctaagagacggcagatgcaggaagcagaaatgatgtatcaaactggaatgaaaatccttaatggaagcaataagaaaagccaaaaaagagaagcatatcggtatctccaaaaggcagcaagcatgaaccataccaaagccctggagagagtgtcatatgctcttttatttggtgattacttgccacagaatatccaggcagcgagagagatgtttgagaagctgactgaggaaggctctcccaagggacagactgctcttggctttctgtatgcctctggacttggtgttaattcaagtcaggcaaaggctcttgtatattatacatttggagctcttgggggcaatctaatagcccacatggttttggtaagtagactttagtggaaggctaataatattaacatcagaagaatttgtggtttatagcggccacaactttttcagctttcatgatccagatttgcttgtattaagaccaaatattcagttgaacttccttcaaattcttgttaatggatataacacatggaatctacatgtaaatgaaagttggtggagtccacaatttttctttaaaatgattagtttggctgattgcccctaaaaagagagatctgataaatggctctttttaaattttctctgagttggaattgtcagaatcattttttacattagattatcataattttaaaaatttttctttagtttttcaaaattttgtaaatggtggctatagaaaaacaacatgaaatattatacaatattttgcaacaatgccctaagaattgttaaaattcatggagttatttgtgcagaatgactccagagagctctactttctgttttttacttttcatgattggctgtcttcccatttattctggtcatttattgctagtgacactgtgcctgcttccagtagtctcattttccctattttgctaatttgttactttttctttgctaatttggaagattaactcatttttaataaaattatgtctaagattaaaa

SEQ ID NO: 179598 - DNA, 594 bp, Homo sapiens
  Payload ID: 15397
  Gene Symbol: SEL1L
  Gene Name: sel-1 suppressor of lin-12-like (C. elegans)
  ENST ID: ENST00000557372
  CDS Start-End: 106-594
gactagagcaggaagagcagcggcgaggcggcggtggtggctgagtccgtggtggcagaggcgaaggcgacagctctaggggttggcaccggccccgagaggaggatgcgggtccggatagggctgacgctgctgctgtgtgcggtgctgctgagcttggcctcggcgtcctcggatgaagaaggcagccaggatgaatccttagattccaagactactttgacatcagatgagtcagtaaaggaccatactactgcaggcagagtagttgctggtcaaatatttcttgattcagaagaatctgaattagaatcctctattcaagaagaggaagacagcctcaagagccaagagggggaaagtgtcacagaagatatcagctttctagagtctccaaatccagaaaacaaggactatgaagagccaaagaaagtacggaaaccagataaggagtatgatgaatgtacatcagatgggagggaagatggcagactgtggtgtgctacaacctatgactacaaagcagatgaaaagtggggcttttgtgaaactgaagaagaggctgctaagagacggcagatgcaggaagcagaa

SEQ ID NO: 179599 - DNA, 2224 bp, Homo sapiens
  Payload ID: 15398
  Gene Symbol: SEL1L2
  Gene Name: sel-1 suppressor of lin-12-like 2 (C. elegans)
  Uniprot ID: Q5TEA6
  ENST ID: ENST00000284951
  CDS Start-End: 76-2142
ctgagaagaggagctcttgggccaatcacctagtttctgcctgtgttacagtgaagagaagctgcttaagagaagatgaagcccttgtctctgttaatagagatattgataattcttggggtcacaattaaaactatcaaagcagaggaacataataaaagacaaaaggaaagaaatgtcaccacacaggtatcagtgaacgaaatcaaacaatatttatcacacatattggaacaaagaacatctagtaatgtaatcaataaaagagaaaatctcctggagaaaaagaagaatcaacgtaaaataagaataaaaggaattcaaaataaagatatcttgaagagaaataagaatcatttacaaaagcaagcagagaaaaattttacagatgaaggagaccagctatttaagatgggcatcaaggttctccagcagtctaaaagccaaaaacaaaaagaagaagcctacctactttttgccaaagcagctgacatgggaaacttgaaagctatggagaaaatggctgacgctttgctatttggaaattttggcgtgcaaaatataacagcagctatccaattatatgagtccttggctaaagaaggatcatgtaaagcccaaaacgcattaggatttttgtcttcttatggaataggaatggaatatgatcaagctaaggcactgatatattacacctttggaagtgctggaggaaacatgatgtcccagatgattttggggtacagatatttgtcgggaatcaatgttctacagaattgtgaagttgccctaagttattacaagaaagtggcagattatattgctgacacatttgaaaaaagtgaaggtgttccagtggaaaaagtgagactaacggaaagacctgaaaatctgagttctaacagtgagattttggattgggacatataccaatactataaatttttggcagaaagaggagatgttcagatacaagtctctcttggacaattacatctaattggcaggaaaggtctagatcaggattactacaaagcattacactacttcttaaaggcagcaaaggccgggagtgcaaatgccatggcatttataggaaagatgtatttagaggggaatgctgccgtgccgcaaaataacgctactgccttcaagtacttttccatggcagccagtaagggcaatgcaatcggccttcatgggcttggtcttctttactttcatggaaaaggagttcccctgaattatgccgaagcacttaaatactttcagaaagctgcggaaaaagggtggcccgacgcacagttccagttaggcttcatgtactactctggctctggaatatggaaggattataaacttgccttcaaatatttttacctggcatctcagagtgggcagccccttgccatttattatctggccaagatgtatgcaacaggaacaggagtagtaagatcatgcagaactgctgtggagctttataaaggtgtctgtgaactaggccactgggctgagaaattcctgacagcttactttgcctataaggatggtgatatagattcttctcttgttcagtatgcactgcttgcagaaatggggtatgaagtagctcaaagcaattcagcattcattttggaatctaaaaaggctaacattcttgaaaaagagaagatgtatccaatggcgcttctcctatggaatcgagctgccattcaaggcaatgcatttgctagagtaaaaattggagattaccattactatggctatgggactaagaaagactatcaaacagcagccacacactacagcattgcagccaacaaataccacaacgcgcaagccatgttcaatctggcttatatgtatgaacacggcttaggcatcacaaaggacattcacttggccagaagattgtacgacatggctgctcaaacgagtccagatgcccacatacctgtgctctttgccgtcatgaaactggaaactacgcatttgctccgggatatcctgttttttaatttcacaacgagatggaactggctgaaactggacaacaccattggaccacactgggacttatttgtgattggcctcattgttcctgggctgattttgttgcttagaaatcaccatgggtaggatgcggatcacaggaaaacctgctcacgggaatcagttcactccaaggtatccccactaaataaacagtttcccatccaaa

SEQ ID NO: 179600 - DNA, 1892 bp, Homo sapiens
  Payload ID: 15398
  Gene Symbol: SEL1L2
  Gene Name: sel-1 suppressor of lin-12-like 2 (C. elegans)
  Uniprot ID: Q5TEA6
  ENST ID: ENST00000378072
  CDS Start-End: 83-1810
acagtccctgagaagaggagctcttgggccaatcacctagtttctgcctgtgttacagtgaagagaagctgcttaagagaagatgaagcccttgtctctgttaatagagatattgataattcttggggtcacaattaaaactatcaaagcagaggaacataataaaagacaaaaggaaagaaatgtcaccacacaggtatcagtgaacgaaatcaaacaatatttatcacacatattggaacaaagaacatctagtaatgtaatcaataaaagagaaaatctcctggagaaaaagaagaatcaacgtaaaataagaataaaaggaattcaaaataaagatatcttgaagagaaataagaatcatttacaaaagcaagcagagaaaaattttacagatgaaggagaccagctatttaagatgggcatcaaggttctccagcagtctaaaagccaaaaacaaaaagaagaagcctacctactttttgccaaagcagctgacatgggaaacttgaaagctatggagaaaatggctgacgctttgctatttggaaattttggcgtgcaaaatataacagcagctatccaattatatgagtccttggctaaagaaggatcatgtaaagcccaaaacgcattaggatttttgtcttcttatggaataggaatggaatatgatcaagctaaggcactgatatattacacctttggaagtgctggaggaaacatgatgtcccagatgattttggggtacagatatttgtcgggaatcaatgttctacagaattgtgaagttgccctaagttattacaagaaagtggcagattatattgctgacacatttgaaaaaagtgaaggtgttccagtggaaaaagtgagactaacggaaagacctgaaaatctgagttctaacagtgagattttggattgggacatataccaatactataaatttttggcagaaagaggagatgttcagatacaagtctctcttggacaattacatctaattggcaggaaaggtctagatcaggattactacaaagcattacactacttcttaaaggcagcaaaggccgggagtgcaaatgccatggcatttataggaaagatgtatttagaggggaatgctgccgtgccgcaaaataacgctactgccttcaagtacttttccatggcagccagtaagggcaatgcaatcggccttcatgggcttggtcttctttactttcatggaaaaggagttcccctgaattatgccgaagcacttaaatactttcagaaagctgcggaaaaagggtggcccgacgcacagttccagttaggcttcatgtactactctggctctggaatatggaaggattataaacttgccttcaaatatttttacctggcatctcagagtgggcagccccttgccatttattatctggccaagatgtatgcaacaggaacaggagtagtaagatcatgcagaactgctgtggagaaaaggctaacattcttgaaaaagagaagatgtatccaatggcgcttctcctatggaatcgagctgccattcaaggacattcacttggccagaagattgtacgacatggctgctcaaacgagtccagatgcccacatacctgtgctctttgccgtcatgaaactggaaactacgcatttgctccgggatatcctgttttttaatttcacaacgagatggaactggctgaaactggacaacaccattggaccacactgggacttatttgtgattggcctcattgttcctgggctgattttgttgcttagaaatcaccatgggtaggatgcggatcacaggaaaacctgctcacgggaatcagttcactccaaggtatccccactaaataaacagtttcccatccaaa

SEQ ID NO: 179601 - DNA, 2348 bp, Homo sapiens
  Payload ID: 15398
  Gene Symbol: SEL1L2
  Gene Name: sel-1 suppressor of lin-12-like 2 (C. elegans)
  ENST ID: ENST00000423870
  CDS Start-End: 79-615
tccctgagaagaggagctcttgggccaatcacctagtttctgcctgtgttacagtgaagagaagctgcttaagagaagatgaagcccttgtctctgttaatagagatattgataattcttggggtcacaattaaaactatcaaagcagaggaacataataaaagacaaaaggaaagaaatgtcaccacacaggtatcagtgaacgaaatcaaacaatatttatcacacatattggaacaaagaacatctagtaatgtaatcaataaaagagaaaatctcctggagaaaaagaagaatcaacgtaaaataagaataaaaggaattcaaaataaagatatcttgaagagaaataagaatcatttacaaaagcaagcagagaaaaattttacagatgaaggagaccagctatttaagatgggcatcaaggttctccagcagtctaaaagccaaaaacaaaaagaagagattctaatgcctacctggatgtttctctgtctgaggtccttcttgcctggactactctgctccagcttctgcccaagagcagcttattttagcctcagcatggatgggctgtacataaagagcctacctactttttgccaaagcagctgacatgggaaacttgaaagctatggagaaaatggctgacgctttgctatttggaaattttggcgtgcaaaatataacagcagctatccaattatatgagtccttggctaaagaaggatcatgtaaagcccaaaacgcattaggatttttgtcttcttatggaataggaatggaatatgatcaagctaaggcactgatatattacacctttggaagtgctggaggaaacatgatgtcccagatgattttggggtacagatatttgtcgggaatcaatgttctacagaattgtgaagttgccctaagttattacaagaaagtggcagattatattgctgacacatttgaaaaaagtgaaggtgttccagtggaaaaagtgagactaacggaaagacctgaaaatctgagttctaacagtgagattttggattgggacatataccaatactataaatttttggcagaaagaggagatgttcagatacaagtctctcttggacaattacatctaattggcaggaaaggtctagatcaggattactacaaagcattacactacttcttaaaggcagcaaaggccgggagtgcaaatgccatggcatttataggaaagatgtatttagaggggaatgctgccgtgccgcaaaataacgctactgccttcaagtacttttccatggcagccagtaagggcaatgcaatcggccttcatgggcttggtcttctttactttcatggaaaaggagttcccctgaattatgccgaagcacttaaatactttcagaaagctgcggaaaaagggtggcccgacgcacagttccagttaggcttcatgtactactctggctctggaatatggaaggattataaacttgccttcaaatatttttacctggcatctcagagtgggcagccccttgccatttattatctggccaagatgtatgcaacaggaacaggagtagtaagatcatgcagaactgctgtggagctttataaaggtgtctgtgaactaggccactgggctgagaaattcctgacagcttactttgcctataaggatggtgatatagattcttctcttgttcagtatgcactgcttgcagaaatggggtatgaagtagctcaaagcaattcagcattcattttggaatctaaaaaggctaacattcttgaaaaagagaagatgtatccaatggcgcttctcctatggaatcgagctgccattcaaggcaatgcatttgctagagtaaaaattggagattaccattactatggctatgggactaagaaagactatcaaacagcagccacacactacagcattgcagccaacaaataccacaacgcgcaagccatgttcaatctggcttatatgtatgaacacggcttaggcatcacaaaggacattcacttggccagaagattgtacgacatggctgctcaaacgagtccagatgcccacatacctgtgctctttgccgtcatgaaactggaaactacgcatttgctccgggatatcctgttttttaatttcacaacgagatggaactggctgaaactggacaacaccattggaccacactgggacttatttgtgattggcctcattgttcctgggctgattttgttgcttagaaatcaccatgggtaggatgcggatcacaggaaaacctgctcacgggaatcagttcactccaaggtatccccactaaataaacagtttcccatccaaa

SEQ ID NO: 179602 - DNA, 543 bp, Homo sapiens
  Payload ID: 15398
  Gene Symbol: SEL1L2
  Gene Name: sel-1 suppressor of lin-12-like 2 (C. elegans)
  ENST ID: ENST00000475649
  CDS Start-End: 1-134
atgggcttggtcttctttactttcatggaaaaggagttcccctgaattatgccgaagcacttaaatactttcagaaagctgcggaaaaagggtggcccgacgcacagttccagttaggcttcatgtactactaaaaggctaacattcttgaaaaagagaagatgtatccaatggcgcttctcctatggaatcgagctgccattcaaggacattcacttggccagaagattgtacgacatggctgctcaaacgagtccagatgcccacatacctgtgctctttgccgtcatgaaactggaaactacgcatttgctccgggatatcctgttttttaatttcacaacgagatggaactggctgaaactggacaacaccattggaccacactgggacttatttgtgattggcctcattgttcctgggctgattttgttgcttagaaatcaccatgggtaggatgcggatcacaggaaaacctgctcacgggaatcagttcactccaaggtatccccactaaataaacagtttcccatccaaatcaag

SEQ ID NO: 179603 - DNA, 535 bp, Homo sapiens
  Payload ID: 15398
  Gene Symbol: SEL1L2
  Gene Name: sel-1 suppressor of lin-12-like 2 (C. elegans)
  ENST ID: ENST00000473203
  CDS Start-End: 403-535
ctctgaaggcacttatcctcacggacaacacgctcgttttagggctcccctagagttccaggtttcaaaagtcacgctgcggcagcgaaggaaggaaacctagacaaggggtaaacacccgatgctatcaaagcagaggaacataataaaagacaaaaggaaagaaatgtcaccacacaggtatcagtgaacgaaatcaaacaatatttatcacacatattggaacaaagaacatctagtaatgtaatcaataaaagagaaaatctcctggagaaaaagaagaatcaacgtaaaataagaataaaaggaattcaaaataaagatatcttgaagagaaataagaatcatttacaaaagcaagcagagaaaaattttacagatgaaggagaccagctatttaagatgggcatcaaggttctccagcagtctaaaagccaaaaacaaaaagaagaagcctacctactttttgccaaagcagctgacatgggaaacttgaaagctatggagaaaatggctgacgctttgctatttggaa

SEQ ID NO: 179604 - DNA, 4369 bp, Homo sapiens
  Payload ID: 15399
  Gene Symbol: SEL1L3
  Gene Name: sel-1 suppressor of lin-12-like 3 (C. elegans)
  Uniprot ID: Q68CR1
  ENST ID: ENST00000264868
  CDS Start-End: 84-3377
tcaaaatccatcctgaaggcctgggagccgggcagctgcgcggcacaactccagggggcacactcgccctgcgccctgcgggaatggcgccccggccaaaaaagcaaccagacaaaaacccattgcacgggcgggaactgaatgttgtaccatctttgggtaggcagacttccctgacgacatcagtgatacccaaagctgagcagagcgtggcttacaaagactttatttattttactgtctttgaaggaaacgttcgcaacgtttctgaagtctcggttgagtatttatgctctcagccttgtgttgtcaatttggaagcagttgtttcatctgagttcagaagtagcattcccgtgtacaaaaaaaggtggaagaatgagaaacatcttcacaccagcaggacacaaatagtacatgtgaaatttccaagcattatggtttacagagatgattatttcatcagacattccatctctgtatctgcagtgatagtacgcgcctggattactcacaaatacagtggcagagactggaatgttaaatgggaggaaaacttgctccatgctgtagcaaagaattataccctcctgcagaccatcccgccttttgaacgccctttcaaagatcatcaagtgtgccttgagtggaacatgggttatatttggaaccttcgggcaaacaggattccacagtgtcctctggaaaatgatgtggttgccctgcttggctttccttatgcctccagtggagaaaacacaggcattgtcaagaagttcccgaggtttcggaaccgagagctggaggccactcgacgccagaggatggattacccagtgtttactgtttcattgtggctttatttactccattattgcaaggccaacctctgtgggattctgtactttgttgactctaatgagatgtacggcacaccttctgtatttcttacggaagagggctatttgcatattcagatgcatcttgtcaaaggggaagaccttgctgtaaaaactaaattcatcatacctttgaaggagtggtttcgactggatatctcttttaacggaggccagatagtagtaaccactagcattggacaggatttgaaaagctaccacaatcagaccattagcttccgggaggatttccattataatgacacagctgggtacttcattattggagggagcaggtatgtggctggcattgaagggttttttggacccctgaagtactatcgccttcgcagtctgcaccccgcccagatttttaatcccctccttgagaagcaacttgctgaacaaatcaagttatattatgaaaggtgtgctgaggttcaagaaatagtatctgtgtatgcatctgcagcaaagcacgggggcgagagacaagaagcatgccacctccacaactcctacctggacctccagcgcaggtatgggagaccctcgatgtgcagagccttcccctgggagaaggagctgaaagacaaacaccccagcttgttccaggcattgctggagatggatctgctgaccgtgccaaggaaccaaaatgaatctgtatcagaaatcggtgggaagatatttgagaaggctgtaaagagactctctagcattgatggtcttcaccaaattagctctatcgtcccctttctgacggattccagctgctgtggataccataaagcatcctactaccttgcagtcttttatgagactggattaaatgttcctcgggatcagctgcagggcatgttgtatagtttggttggaggccaggggagtgagaggctgtcttcaatgaatcttgggtataaacactaccagggtattgacaactaccccctggactgggaactgtcgtatgcctactacagcaacattgccaccaagacaccccttgaccagcacacactgcaaggagatcaggcatatgttgaaacaattagactaaaagatgatgaaatactcaaggtacaaaccaaagaagatggagatgtctttatgtggttgaagcatgaagctacccgaggcaatgcagcagctcagcaacgattggcccagatgctgttctgggggcagcaaggtgtggccaagaatcccgaagcagcaattgagtggtacgccaagggcgccctggagacggaggatcctgcgttaatctatgactatgccattgtgctattcaagggtcaaggagtaaaaaagaacagacggcttgccttagagctgatgaagaaagcagcttccaagggattgcatcaggcagtcaatggcctgggatggtattaccacaaattcaagaaaaattacgccaaagcagcaaagtactggttaaaagcagaagaaatggggaacccagatgcgtcatacaatcttggagtcctgcatttggatggcatcttccctggagttcctggaaggaatcaaactttagctggtgaatatttccataaggctgcgcaaggtggacacatggaagggaccttgtggtgttctctctactatatcacaggcaacctggagacattccctagagatcctgagaaagctgttgtatgggcaaaacatgtagctgagaaaaatggctacttgggccatgtcatccgcaaaggcctcaatgcctacctggaaggttcatggcatgaagctttgctgtattatgttttagcagcagaaactggaattgaagtgtcacagacaaatttagcacacatctgtgaggagaggccagacctggccaggagatacttgggtgttaactgtgtttggagatactataatttctctgtttttcaaatcgatgctccttcctttgcatatttgaagatgggagacctttactactatggccaccaaaaccagtcacaagacctggagttgtctgtgcagatgtacgcccaagccgccctggatggagactcccagggattttttaacctggccctgctaatcgaggaaggtacgataatcccacaccatatcttggatttcttggaaattgactcaactctccattctaataacatctccattctccaggaactgtacgaaaggtgctggagccacagtaacgaggagtccttcagcccctgctccttggcctggctttacctgcacttgcggcttctctggggtgctatcctgcactcagccctgatctactttctgggaacctttctgctatccatattgatcgcctggactgtgcagtatttccagtctgtctcagcaagcgatccccctccaagaccatcccaggcctccccagacactgccacgtccactgcaagtccagctgtgactccagctgcagatgcctctgaccaagaccagcccacagtaactaataacccggagccacgtgggtgaactgtgcactccagttctctccagatgagagagaatcttttcaacagctggtattgggaagctggggccagggcatgatcctgataaacaccttaaatgtcttgtcaactggatgcaaattttgcaattggtgtcattttttttaaagtcaaattacaaggaagtacccagatcaggcagtggtaataccaaaggtcatcaaacacatacaaggaacatcttgatcatagggcatgtggggaagtttactgggccatcacagacttttgttctagtgattgtatgtattaggagtcatagcatgccctacggcagatctggattcttatacactaagatgtgtcttaagaatcacagtgcgtgcttcatccctttattgaagaacagaaaattatgactactctacaaggtggataatattttggtacctgtgcttgccacagccctgttcctcaaagctgaattgatagatttctctttgacttccaagacctagcagttataaggcaccttgaaataaattgtttgtgcctggaaatgcagggagggcaatagctttgtaaattggtttacatttttctccttgaatttttctagggtcctagtgcttccgaatcatttaatggcattgtcggatatcttttacatttcaattgcaatccatgaaattacatttagaagattcttagtacttaactgtagtcttctccatgaattacacgttagaatagactggcagcaacggaatatgcagcaagtaagcctctagcttatagtttcatccctacccctcatgcctgcgtgagtctgtacagggatatgtgtgtgtgtgtgtgtgtgtgtgtgttagagaggaagaggaagagcagaatgtctgtatactacatgctgctaaggtagtgaataaatcagtaatgcaatattgtgggtccaaactactctttgcactactttatttacagtagtaaataaaattatttttatacaattga

SEQ ID NO: 179605 - DNA, 4520 bp, Homo sapiens
  Payload ID: 15399
  Gene Symbol: SEL1L3
  Gene Name: sel-1 suppressor of lin-12-like 3 (C. elegans)
  Uniprot ID: Q68CR1
  ENST ID: ENST00000399878
  CDS Start-End: 124-3522
cggcaggtggccccgcgcgcggcggccggcccggccgggggcgggcgggaaggtggcgcctcgggcgggggccggtccctgcaccaggtgacctgttccggcccggatccgggcggcctcgccatgcagcggcgcggcgcggggctcgggtggccgcggcagcagcagcagcaacccccgccgctcgcggtcggcccccgggccgcagccatggtcccgagtggcggcgtcccccagggcctcggcggccgctctgcctgcgcgctgctcctgctctgctacctgaatgttgtaccatctttgggtaggcagacttccctgacgacatcagtgatacccaaagctgagcagagcgtggcttacaaagactttatttattttactgtctttgaaggaaacgttcgcaacgtttctgaagtctcggttgagtatttatgctctcagccttgtgttgtcaatttggaagcagttgtttcatctgagttcagaagtagcattcccgtgtacaaaaaaaggtggaagaatgagaaacatcttcacaccagcaggacacaaatagtacatgtgaaatttccaagcattatggtttacagagatgattatttcatcagacattccatctctgtatctgcagtgatagtacgcgcctggattactcacaaatacagtggcagagactggaatgttaaatgggaggaaaacttgctccatgctgtagcaaagaattataccctcctgcagaccatcccgccttttgaacgccctttcaaagatcatcaagtgtgccttgagtggaacatgggttatatttggaaccttcgggcaaacaggattccacagtgtcctctggaaaatgatgtggttgccctgcttggctttccttatgcctccagtggagaaaacacaggcattgtcaagaagttcccgaggtttcggaaccgagagctggaggccactcgacgccagaggatggattacccagtgtttactgtttcattgtggctttatttactccattattgcaaggccaacctctgtgggattctgtactttgttgactctaatgagatgtacggcacaccttctgtatttcttacggaagagggctatttgcatattcagatgcatcttgtcaaaggggaagaccttgctgtaaaaactaaattcatcatacctttgaaggagtggtttcgactggatatctcttttaacggaggccagatagtagtaaccactagcattggacaggatttgaaaagctaccacaatcagaccattagcttccgggaggatttccattataatgacacagctgggtacttcattattggagggagcaggtatgtggctggcattgaagggttttttggacccctgaagtactatcgccttcgcagtctgcaccccgcccagatttttaatcccctccttgagaagcaacttgctgaacaaatcaagttatattatgaaaggtgtgctgaggttcaagaaatagtatctgtgtatgcatctgcagcaaagcacgggggcgagagacaagaagcatgccacctccacaactcctacctggacctccagcgcaggtatgggagaccctcgatgtgcagagccttcccctgggagaaggagctgaaagacaaacaccccagcttgttccaggcattgctggagatggatctgctgaccgtgccaaggaaccaaaatgaatctgtatcagaaatcggtgggaagatatttgagaaggctgtaaagagactctctagcattgatggtcttcaccaaattagctctatcgtcccctttctgacggattccagctgctgtggataccataaagcatcctactaccttgcagtcttttatgagactggattaaatgttcctcgggatcagctgcagggcatgttgtatagtttggttggaggccaggggagtgagaggctgtcttcaatgaatcttgggtataaacactaccagggtattgacaactaccccctggactgggaactgtcgtatgcctactacagcaacattgccaccaagacaccccttgaccagcacacactgcaaggagatcaggcatatgttgaaacaattagactaaaagatgatgaaatactcaaggtacaaaccaaagaagatggagatgtctttatgtggttgaagcatgaagctacccgaggcaatgcagcagctcagcaacgattggcccagatgctgttctgggggcagcaaggtgtggccaagaatcccgaagcagcaattgagtggtacgccaagggcgccctggagacggaggatcctgcgttaatctatgactatgccattgtgctattcaagggtcaaggagtaaaaaagaacagacggcttgccttagagctgatgaagaaagcagcttccaagggattgcatcaggcagtcaatggcctgggatggtattaccacaaattcaagaaaaattacgccaaagcagcaaagtactggttaaaagcagaagaaatggggaacccagatgcgtcatacaatcttggagtcctgcatttggatggcatcttccctggagttcctggaaggaatcaaactttagctggtgaatatttccataaggctgcgcaaggtggacacatggaagggaccttgtggtgttctctctactatatcacaggcaacctggagacattccctagagatcctgagaaagctgttgtatgggcaaaacatgtagctgagaaaaatggctacttgggccatgtcatccgcaaaggcctcaatgcctacctggaaggttcatggcatgaagctttgctgtattatgttttagcagcagaaactggaattgaagtgtcacagacaaatttagcacacatctgtgaggagaggccagacctggccaggagatacttgggtgttaactgtgtttggagatactataatttctctgtttttcaaatcgatgctccttcctttgcatatttgaagatgggagacctttactactatggccaccaaaaccagtcacaagacctggagttgtctgtgcagatgtacgcccaagccgccctggatggagactcccagggattttttaacctggccctgctaatcgaggaaggtacgataatcccacaccatatcttggatttcttggaaattgactcaactctccattctaataacatctccattctccaggaactgtacgaaaggtgctggagccacagtaacgaggagtccttcagcccctgctccttggcctggctttacctgcacttgcggcttctctggggtgctatcctgcactcagccctgatctactttctgggaacctttctgctatccatattgatcgcctggactgtgcagtatttccagtctgtctcagcaagcgatccccctccaagaccatcccaggcctccccagacactgccacgtccactgcaagtccagctgtgactccagctgcagatgcctctgaccaagaccagcccacagtaactaataacccggagccacgtgggtgaactgtgcactccagttctctccagatgagagagaatcttttcaacagctggtattgggaagctggggccagggcatgatcctgataaacaccttaaatgtcttgtcaactggatgcaaattttgcaattggtgtcattttttttaaagtcaaattacaaggaagtacccagatcaggcagtggtaataccaaaggtcatcaaacacatacaaggaacatcttgatcatagggcatgtggggaagtttactgggccatcacagacttttgttctagtgattgtatgtattaggagtcatagcatgccctacggcagatctggattcttatacactaagatgtgtcttaagaatcacagtgcgtgcttcatccctttattgaagaacagaaaattatgactactctacaaggtggataatattttggtacctgtgcttgccacagccctgttcctcaaagctgaattgatagatttctctttgacttccaagacctagcagttataaggcaccttgaaataaattgtttgtgcctggaaatgcagggagggcaatagctttgtaaattggtttacatttttctccttgaatttttctagggtcctagtgcttccgaatcatttaatggcattgtcggatatcttttacatttcaattgcaatccatgaaattacatttagaagattcttagtacttaactgtagtcttctccatgaattacacgttagaatagactggcagcaacggaatatgcagcaagtaagcctctagcttatagtttcatccctacccctcatgcctgcgtgagtctgtacagggatatgtgtgtgtgtgtgtgtgtgtgtgtgttagagaggaagaggaagagcagaatgtctgtatactacatgctgctaaggtagtgaataaatcagtaatgcaatattgtgggtccaaactactctttgcactactttatttacagtagtaaataaaattatttttatacaattgactacca

SEQ ID NO: 179606 - DNA, 558 bp, Homo sapiens
  Payload ID: 15399
  Gene Symbol: SEL1L3
  Gene Name: sel-1 suppressor of lin-12-like 3 (C. elegans)
  ENST ID: ENST00000514872
  CDS Start-End: 452-558
aaagagcgcagtggtggcggtggcggcggcaccacacaaaaccctcgggaaacatccagaacgtgccgcgaaccagccggcagggtggggcgcagcccggctgcaaacatgccagcaaggaggcagtcccaaccccgcaggtggacaggtggagaatgttgtaccatctttgggtaggcagacttccctgacgacatcagtgatacccaaagctgagcagagcgtggcttacaaagactttatttattttactgtctttgaaggaaacgttcgcaacgtttctgaagtctcggttgagtatttatgctctcagccttgtgttgtcaatttggaagcagttgtttcatctgagttcagaagtagcattcccgtgtacaaaaaaaggtggaagaatgagaaacatcttcacaccagcaggacacaaatagtacatgtgaaatttccaagcattatggtttacagagatgattatttcatcagacattccatctctgtatctgcagtgatagtacgcgcctggattactcacaaatacagtggcagagactggaatgttaa

SEQ ID NO: 179607 - DNA, 605 bp, Homo sapiens
  Payload ID: 15399
  Gene Symbol: SEL1L3
  Gene Name: sel-1 suppressor of lin-12-like 3 (C. elegans)
  ENST ID: ENST00000513691
  CDS Start-End: 420-605
ggtggcggcggcaccacacaaaaccctcgggaaacatccagaacgtgccgcgaaccagccggcagggtggggcgcagcccggctgcaaacatgccagcaaggaggcagtcccaaccccgcagaatgttgtaccatctttgggtaggcagacttccctgacgacatcagtgatacccaaagctgagcagagcgtggcttacaaagactttatttattttactgtctttgaaggaaacgttcgcaacgtttctgaagtctcggttgagtatttatgctctcagccttgtgttgtcaatttggaagcagttgtttcatctgagttcagaagtagcattcccgtgtacaaaaaaaggtggaagaatgagaaacatcttcacaccagcaggacacaaatagtacatgtgaaatttccaagcattatggtttacagagatgattatttcatcagacattccatctctgtatctgcagtgatagtacgcgcctggattactcacaaatacagtggcagagactggaatgttaaatgggaggaaaacttgctccatgctgtagcaaagaattataccctcctgcagaccatcccgccttttgaacgccctttc

SEQ ID NO: 179608 - DNA, 1326 bp, Homo sapiens
  Payload ID: 15399
  Gene Symbol: SEL1L3
  Gene Name: sel-1 suppressor of lin-12-like 3 (C. elegans)
  ENST ID: ENST00000510448
  CDS Start-End: 1-392
tgtacgcccaagccgccctggatggagactcccagggattttttaacctggccctgctaatcgaggaaggtacgataatcccacaccatatcttggatttcttggaaattgactcaactctccattctaataacatctccattctccaggaactgtacgaaaggtgctggagccacagtaacgaggagtccttcagcccctgctccttggcctggctttacctgcacttgcggcttctctggggtgctatcctgcactcagccctgatctactttctgggaacctttctgctatccatattgatcgcctggactgtgcagtatttccagtctgtctcagaattctgcctctgtgtgcctgaaaacacagcgccaaagctcctggcagcatgaagtcttccctttcatttcagtcaagcaatcagatgtgtaagaggataaacaaacactcgtaatgaataaaaatcctcggccacacggactcagagggagggactgagcaggaatcgtaaagtgggcatttagctgagcatggtttccactaatcattgttatttttctgagccagtatagaatagttaaggacaagggagccctgcttgcttctgtttgggcttagagtccaggcttggctactcattagctgtatgactcatggcaagttatttaaccttcctgatccccaaatttctcatcaatacaatgaggttatgagagtagctacttcctaggaacataaaatgaaaaaaatattaagtgaaaaaaaatgcacgtaagatacttaccaaaatgacggctgtagttaaacgttagctgttatatttatctggcatataaaaccttctcaataaatgttagctcttacatttactcctctattagaccataagctgagtaagaggaaggccccagtcgtgtcatttgtgataactcatgcatagtaggtactcacacccacagacgactccggtctctcaagagacaagaaaactgattttttaccatctcggacggctacaaaagggtataataactcatgaaggcaaacagagacatttacaaatgggtagattaggactggacatggcattggagcatttgcgtagctgttatttctgtagcagataatggaaagtgaaaggggtgcacgtcagcgtctcttccacggtgagaaggaagtcactgttgcaagaagctaatgcgaaatcatttctctctgatttacctgaggaggttaacaaggacccatcaaaaccttccaggcttgatgccccatagtctgctggttaataaacttcactcatgcaaattctgtcccatccttaaa

SEQ ID NO: 179609 - DNA, 553 bp, Homo sapiens
  Payload ID: 15399
  Gene Symbol: SEL1L3
  Gene Name: sel-1 suppressor of lin-12-like 3 (C. elegans)
  ENST ID: ENST00000510880
  CDS Start-End: 329-553
ttgcaaaggacacaaaaggccgacttaaaagaatgttgtaccatctttgggtaggcagacttccctgacgacatcagtgatacccaaagctgagcagagcgtggcttacaaagactttatttattttactgtctttgaaggaaacgttcgcaacgtttctgaagtctcggttgagtatttatgctctcagccttgtgttgtcaatttggaagcagttgtttcatctgagttcagaagtagcattcccgtgtacaaaaaaaggtggaagaatgagaaacatcttcacaccagcaggacacaaatagtacatgtgaaatttccaagcattatggtttacagagatgattatttcatcagacattccatctctgtatctgcagtgatagtacgcgcctggattactcacaaatacagtggcagagactggaatgttaaatgggaggaaaacttgctccatgctgtagcaaagaattataccctcctgcagaccatcccgccttttgaacgccctttcaaagatcatcaagtgtgccttgagtggaacatgggttat

SEQ ID NO: 179610 - DNA, 404 bp, Homo sapiens
  Payload ID: 15399
  Gene Symbol: SEL1L3
  Gene Name: sel-1 suppressor of lin-12-like 3 (C. elegans)
  ENST ID: ENST00000514321
  CDS Start-End: 1-234
actttagctggtgaatatttccataaggctgcgcaaggtggacacatggaagggaccttgtggtgttctctctactatatcacaggcaacctggagacattccctagagatcctgagaaagctgttgtaaaaagtttgtcgacctctgttttaggccaccctcacactgataccctggctctccaaaagattgttcttcataacacatttgggttcaaattcaacctgacctgaccttggtgataaacttgacttagactgacttgaagttttttatcattgttatttagtatatttgacatgaatattcatgttttgtggattttctgttatcctcttgttaatgatttctagcttaatttcactgtgatcagagaatatattctgaatgattccaatccttt

SEQ ID NO: 179611 - DNA, 3500 bp, Homo sapiens
  Payload ID: 15399
  Gene Symbol: SEL1L3
  Gene Name: sel-1 suppressor of lin-12-like 3 (C. elegans)
  Uniprot ID: Q68CR1
  ENST ID: ENST00000502949
  CDS Start-End: 402-3341
cacactcgccctgcgccctgcgggaatggcgccccggccaaaaaagcaaccagacaaaaacccattgcacgggcgggaactggtctgtgcgacccgcaaaagggaatgttgtaccatctttgggtaggcagacttccctgacgacatcagtgatacccaaagctgagcagagcgtggcttacaaagactttatttattttactgtctttgaaggaaacgttcgcaacgtttctgaagtctcggttgagtatttatgctctcagccttgtgttgtcaatttggaagcagttgtttcatctgagttcagaagtagcattcccgtgtacaaaaaaaggtggaagaatgagaaacatcttcacaccagcaggacacaaatagtacatgtgaaatttccaagcattatggtttacagagatgattatttcatcagacattccatctctgtatctgcagtgatagtacgcgcctggattactcacaaatacagtggcagagactggaatgttaaatgggaggaaaacttgctccatgctgtagcaaagaattataccctcctgcagaccatcccgccttttgaacgccctttcaaagatcatcaagtgtgccttgagtggaacatgggttatatttggaaccttcgggcaaacaggattccacagtgtcctctggaaaatgatgtggttgccctgcttggctttccttatgcctccagtggagaaaacacaggcattgtcaagaagttcccgaggtttcggaaccgagagctggaggccactcgacgccagaggatggattacccagtgtttactgtttcattgtggctttatttactccattattgcaaggccaacctctgtgggattctgtactttgttgactctaatgagatgtacggcacaccttctgtatttcttacggaagagggctatttgcatattcagatgcatcttgtcaaaggggaagaccttgctgtaaaaactaaattcatcatacctttgaaggagtggtttcgactggatatctcttttaacggaggccagatagtagtaaccactagcattggacaggatttgaaaagctaccacaatcagaccattagcttccgggaggatttccattataatgacacagctgggtacttcattattggagggagcaggtatgtggctggcattgaagggttttttggacccctgaagtactatcgccttcgcagtctgcaccccgcccagatttttaatcccctccttgagaagcaacttgctgaacaaatcaagttatattatgaaaggtgtgctgaggttcaagaaatagtatctgtgtatgcatctgcagcaaagcacgggggcgagagacaagaagcatgccacctccacaactcctacctggacctccagcgcaggtatgggagaccctcgatgtgcagagccttcccctgggagaaggagctgaaagacaaacaccccagcttgttccaggcattgctggagatggatctgctgaccgtgccaaggaaccaaaatgaatctgtatcagaaatcggtgggaagatatttgagaaggctgtaaagagactctctagcattgatggtcttcaccaaattagctctatcgtcccctttctgacggattccagctgctgtggataccataaagcatcctactaccttgcagtcttttatgagactggattaaatgttcctcgggatcagctgcagggcatgttgtatagtttggttggaggccaggggagtgagaggctgtcttcaatgaatcttgggtataaacactaccagggtattgacaactaccccctggactgggaactgtcgtatgcctactacagcaacattgccaccaagacaccccttgaccagcacacactgcaaggagatcaggcatatgttgaaacaattagactaaaagatgatgaaatactcaaggtacaaaccaaagaagatggagatgtctttatgtggttgaagcatgaagctacccgaggcaatgcagcagctcagcaacgattggcccagatgctgttctgggggcagcaaggtgtggccaagaatcccgaagcagcaattgagtggtacgccaagggcgccctggagacggaggatcctgcgttaatctatgactatgccattgtgctattcaagggtcaaggagtaaaaaagaacagacggcttgccttagagctgatgaagaaagcagcttccaagggattgcatcaggcagtcaatggcctgggatggtattaccacaaattcaagaaaaattacgccaaagcagcaaagtactggttaaaagcagaagaaatggggaacccagatgcgtcatacaatcttggagtcctgcatttggatggcatcttccctggagttcctggaaggaatcaaactttagctggtgaatatttccataaggctgcgcaaggtggacacatggaagggaccttgtggtgttctctctactatatcacaggcaacctggagacattccctagagatcctgagaaagctgttgtatgggcaaaacatgtagctgagaaaaatggctacttgggccatgtcatccgcaaaggcctcaatgcctacctggaaggttcatggcatgaagctttgctgtattatgttttagcagcagaaactggaattgaagtgtcacagacaaatttagcacacatctgtgaggagaggccagacctggccaggagatacttgggtgttaactgtgtttggagatactataatttctctgtttttcaaatcgatgctccttcctttgcatatttgaagatgggagacctttactactatggccaccaaaaccagtcacaagacctggagttgtctgtgcagatgtacgcccaagccgccctggatggagactcccagggattttttaacctggccctgctaatcgaggaaggtacgataatcccacaccatatcttggatttcttggaaattgactcaactctccattctaataacatctccattctccaggaactgtacgaaaggtgctggagccacagtaacgaggagtccttcagcccctgctccttggcctggctttacctgcacttgcggcttctctggggtgctatcctgcactcagccctgatctactttctgggaacctttctgctatccatattgatcgcctggactgtgcagtatttccagtctgtctcagcaagcgatccccctccaagaccatcccaggcctccccagacactgccacgtccactgcaagtccagctgtgactccagctgcagatgcctctgaccaagaccagcccacagtaactaataacccggagccacgtgggtgaactgtgcactccagttctctccagatgagagagaatcttttcaacagctggtattgggaagctggggccagggcatgatcctgataaacaccttaaatgtcttgtcaactggatgcaaattttgcaattggtgtcattttttttaaagtcaaattacaa

SEQ ID NO: 179612 - DNA, 429 bp, Homo sapiens
  Payload ID: 15399
  Gene Symbol: SEL1L3
  Gene Name: sel-1 suppressor of lin-12-like 3 (C. elegans)
  ENST ID: ENST00000507618
  CDS Start-End: 1-393
acaaatttagcacacatctgtgaggagaggccagacctggccaggagatacttgggtgttaactgtgtttggagatactataatttctctgtttttcaaatcgatgctccttcctttgcatatttgaagatgggagacctttactactatggccaccaaaaccagtcacaagacctggagttgtctgtgcagatgtacgcccaagccgccctggatggagactcccagggattttttaacctggccctgctaatcgaggaaggtacgataatcccacaccatatcttggatttcttggaaattgactcaactctccattctaataacatctccattctccaggaactgtacgaaagatctactttctgggaacctttctgctatccatattgatcgcctggactgtgcagtatttccagtctgtctcag

SEQ ID NO: 179613 - DNA, 3857 bp, Homo sapiens
  Payload ID: 15400
  Gene Symbol: SELE
  Gene Name: selectin E
  Uniprot ID: P16581
  ENST ID: ENST00000333360
  CDS Start-End: 141-1973
ttcacatcaaaactcctatactgacctgagacagaggcagcagtgatacccacctgagagatcctgtgtttgaacaactgcttcccaaaacggaaagtatttcaagcctaaacctttgggtgaaaagaactcttgaagtcatgattgcttcacagtttctctcagctctcactttggtgcttctcattaaagagagtggagcctggtcttacaacacctccacggaagctatgacttatgatgaggccagtgcttattgtcagcaaaggtacacacacctggttgcaattcaaaacaaagaagagattgagtacctaaactccatattgagctattcaccaagttattactggattggaatcagaaaagtcaacaatgtgtgggtctgggtaggaacccagaaacctctgacagaagaagccaagaactgggctccaggtgaacccaacaataggcaaaaagatgaggactgcgtggagatctacatcaagagagaaaaagatgtgggcatgtggaatgatgagaggtgcagcaagaagaagcttgccctatgctacacagctgcctgtaccaatacatcctgcagtggccacggtgaatgtgtagagaccatcaataattacacttgcaagtgtgaccctggcttcagtggactcaagtgtgagcaaattgtgaactgtacagccctggaatcccctgagcatggaagcctggtttgcagtcacccactgggaaacttcagctacaattcttcctgctctatcagctgtgataggggttacctgccaagcagcatggagaccatgcagtgtatgtcctctggagaatggagtgctcctattccagcctgcaatgtggttgagtgtgatgctgtgacaaatccagccaatgggttcgtggaatgtttccaaaaccctggaagcttcccatggaacacaacctgtacatttgactgtgaagaaggatttgaactaatgggagcccagagccttcagtgtacctcatctgggaattgggacaacgagaagccaacgtgtaaagctgtgacatgcagggccgtccgccagcctcagaatggctctgtgaggtgcagccattcccctgctggagagttcaccttcaaatcatcctgcaacttcacctgtgaggaaggcttcatgttgcagggaccagcccaggttgaatgcaccactcaagggcagtggacacagcaaatcccagtttgtgaagctttccagtgcacagccttgtccaaccccgagcgaggctacatgaattgtcttcctagtgcttctggcagtttccgttatgggtccagctgtgagttctcctgtgagcagggttttgtgttgaagggatccaaaaggctccaatgtggccccacaggggagtgggacaacgagaagcccacatgtgaagctgtgagatgcgatgctgtccaccagcccccgaagggtttggtgaggtgtgctcattcccctattggagaattcacctacaagtcctcttgtgccttcagctgtgaggagggatttgaattacatggatcaactcaacttgagtgcacatctcagggacaatggacagaagaggttccttcctgccaagtggtaaaatgttcaagcctggcagttccgggaaagatcaacatgagctgcagtggggagcccgtgtttggcactgtgtgcaagttcgcctgtcctgaaggatggacgctcaatggctctgcagctcggacatgtggagccacaggacactggtctggcctgctacctacctgtgaagctcccactgagtccaacattcccttggtagctggactttctgctgctggactctccctcctgacattagcaccatttctcctctggcttcggaaatgcttacggaaagcaaagaaatttgttcctgccagcagctgccaaagccttgaatcagatggaagctaccaaaagccttcttacatcctttaagttcaaaagaatcagaaacaggtgcatctggggaactagagggatacactgaagttaacagagacagataactctcctcgggtctctggcccttcttgcctactatgccagatgcctttatggctgaaaccgcaacacccatcaccacttcaatagatcaaagtccagcaggcaaggacggccttcaactgaaaagactcagtgttccctttcctactctcaggatcaagaaagtgttggctaatgaagggaaaggatattttcttccaagcaaaggtgaagagaccaagactctgaaatctcagaattccttttctaactctcccttgctcgctgtaaaatcttggcacagaaacacaatattttgtggctttctttcttttgcccttcacagtgtttcgacagctgattacacagttgctgtcataagaatgaataataattatccagagtttagaggaaaaaaatgactaaaaatattataacttaaaaaaatgacagatgttgaatgcccacaggcaaatgcatggagggttgttaatggtgcaaatcctactgaatgctctgtgcgagggttactatgcacaatttaatcactttcatccctatgggattcagtgcttcttaaagagttcttaaggattgtgatatttttacttgcattgaatatattataatcttccatacttcttcattcaatacaagtgtggtagggacttaaaaaacttgtaaatgctgtcaactatgatatggtaaaagttacttattctagattaccccctcattgtttattaacaaattatgttacatctgttttaaatttatttcaaaaagggaaactattgtcccctagcaaggcatgatgttaaccagaataaagttctgagtgtttttactacagttgttttttgaaaacatggtagaattggagagtaaaaactgaatggaaggtttgtatattgtcagatattttttcagaaatatgtggtttccacgatgaaaaacttccatgaggccaaacgttttgaactaataaaagcataaatgcaaacacacaaaggtataattttatgaatgtctttgttggaaaagaatacagaaagatggatgtgctttgcattcctacaaagatgtttgtcagatatgatatgtaaacataattcttgtatattatggaagattttaaattcacaatagaaactcaccatgtaaaagagtcatctggtagatttttaacgaatgaagatgtctaatagttattccctatttgttttcttctgtatgttagggtgctctggaagagaggaatgcctgtgtgagcaagcatttatgtttatttataagcagatttaacaattccaaaggaatctccagttttcagttgatcactggcaatgaaaaattctcagtcagtaattgccaaagctgctctagccttgaggagtgtgagaatcaaaactctcctacacttccattaacttagcatgtgttgaaaaaaaagtttcagagaagttctggctgaacactggcaacaacaaagccaacagtcaaaacagagatgtgataaggatcagaacagcagaggttcttttaaaggggcagaaaaactctgggaaataagagagaacaactactgtgatcaggctatgtatggaatacagtgttattttctttgaaattgtttaagtgttgtaaatatttatgtaaactgcattagaaattagctgtgtgaaataccagtgtggtttgtgtttgagttttattgagaattttaaattataacttaaaatattttataatttttaaagtatatatttatttaagcttatgtcagacctatttgacataacactataaaggttgacaataaatgtgcttatgttt

SEQ ID NO: 179614 - DNA, 1518 bp, Homo sapiens
  Payload ID: 15400
  Gene Symbol: SELE
  Gene Name: selectin E
  ENST ID: ENST00000367774
  CDS Start-End: 49-1503
gaaagtatttcaagcctaaacctttgggtgaaaagaactcttgaagtcatgattgcttcacagtttctctcagctctcactttggtgcttctcattaaagagagtggagcctggtcttacaacacctccacggaagctatgacttatgatgaggccagtgcttattgtcagcaaaggtacacacacctggttgcaattcaaaacaaagaagagattgagtacctaaactccatattgagctattcaccaagttattactggattggaatcagaaaagtcaacaatgtgtgggtctgggtaggaacccagaaacctctgacagaagaagccaagaactgggctccaggtgaacccaacaataggcaaaaagatgaggactgcgtggagatctacatcaagagagaaaaagatgtgggcatgtggaatgatgagaggtgcagcaagaagaagcttgccctatgctacacagctgcctgtaccaatacatcctgcagtggccacggtgaatgtgtagagaccatcaataattacacttgcaagtgtgaccctggcttcagtggactcaagtgtgagcaaattgtgaactgtacagccctggaatcccctgagcatggaagcctggtttgcagtcacccactgggaaacttcagctacaattcttcctgctctatcagctgtgataggggttacctgccaagcagcatggagaccatgcagtgtatgtcctctggagaatggagtgctcctattccagcctgcaatgtggttgagtgtgatgctgtgacaaatccagccaatgggttcgtggaatgtttccaaaaccctggaagcttcccatggaacacaacctgtacatttgactgtgaagaaggatttgaactaatgggagcccagagccttcagtgtacctcatctgggaattgggacaacgagaagccaacgtgtaaagctgtgacatgcagggccgtccgccagcctcagaatggctctgtgaggtgcagccattcccctgctggagagttcaccttcaaatcatcctgcaacttcacctgtgaggaaggcttcatgttgcagggaccagcccaggttgaatgcaccactcaagggcagtggacacagcaaatcccagtttgtgaagtggtaaaatgttcaagcctggcagttccgggaaagatcaacatgagctgcagtggggagcccgtgtttggcactgtgtgcaagttcgcctgtcctgaaggatggacgctcaatggctctgcagctcggacatgtggagccacaggacactggtctggcctgctacctacctgtgaagctcccactgagtccaacattcccttggtagctggactttctgctgctggactctccctcctgacattagcaccatttctcctctggcttcggaaatgcttacggaaagcaaagaaatttgttcctgccagcagctgccaaagccttgaatcagatggaagctaccaaaagccttcttacatcctttaagttcaaaagaatcag

SEQ ID NO: 179615 - DNA, 3389 bp, Homo sapiens
  Payload ID: 15400
  Gene Symbol: SELE
  Gene Name: selectin E
  ENST ID: ENST00000367775
  CDS Start-End: 48-1505
aaagtatttcaagcctaaacctttgggtgaaaagaactcttgaagtcatgattgcttcacagtttctctcagctctcactttggtgcttctcattaaagagagtggagcctggtcttacaacacctccacggaagctatgacttatgatgaggccagtgcttattgtcagcaaaggtacacacacctggttgcaattcaaaacaaagaagagattgagtacctaaactccatattgagctattcaccaagttattactggattggaatcagaaaagtcaacaatgtgtgggtctgggtaggaacccagaaacctctgacagaagaagccaagaactgggctccaggtgaacccaacaataggcaaaaagatgaggactgcgtggagatctacatcaagagagaaaaagatgtgggcatgtggaatgatgagaggtgcagcaagaagaagcttgccctatgctacacagctgcctgtaccaatacatcctgcagtggccacggtgaatgtgtagagaccatcaataattacacttgcaagtgtgaccctggcttcagtggactcaagtgtgagcaaatggttgagtgtgatgctgtgacaaatccagccaatgggttcgtggaatgtttccaaaaccctggaagcttcccatggaacacaacctgtacatttgactgtgaagaaggatttgaactaatgggagcccagagccttcagtgtacctcatctgggaattgggacaacgagaagccaacgtgtaaagctgtgacatgcagggccgtccgccagcctcagaatggctctgtgaggtgcagccattcccctgctggagagttcaccttcaaatcatcctgcaacttcacctgtgaggaaggcttcatgttgcagggaccagcccaggttgaatgcaccactcaagggcagtggacacagcaaatcccagtttgtgaagctgtgagatgcgatgctgtccaccagcccccgaagggtttggtgaggtgtgctcattcccctattggagaattcacctacaagtcctcttgtgccttcagctgtgaggagggatttgaattacatggatcaactcaacttgagtgcacatctcagggacaatggacagaagaggttccttcctgccaagtggtaaaatgttcaagcctggcagttccgggaaagatcaacatgagctgcagtggggagcccgtgtttggcactgtgtgcaagttcgcctgtcctgaaggatggacgctcaatggctctgcagctcggacatgtggagccacaggacactggtctggcctgctacctacctgtgaagctcccactgagtccaacattcccttggtagctggactttctgctgctggactctccctcctgacattagcaccatttctcctctggcttcggaaatgcttacggaaagcaaagaaatttgttcctgccagcagctgccaaagccttgaatcagatggaagctaccaaaagccttcttacatcctttaagttcaaaagaatcagaaacaggtgcatctggggaactagagggatacactgaagttaacagagacagataactctcctcgggtctctggcccttcttgcctactatgccagatgcctttatggctgaaaccgcaacacccatcaccacttcaatagatcaaagtccagcaggcaaggacggccttcaactgaaaagactcagtgttccctttcctactctcaggatcaagaaagtgttggctaatgaagggaaaggatattttcttccaagcaaaggtgaagagaccaagactctgaaatctcagaattccttttctaactctcccttgctcgctgtaaaatcttggcacagaaacacaatattttgtggctttctttcttttgcccttcacagtgtttcgacagctgattacacagttgctgtcataagaatgaataataattatccagagtttagaggaaaaaaatgactaaaaatattataacttaaaaaaatgacagatgttgaatgcccacaggcaaatgcatggagggttgttaatggtgcaaatcctactgaatgctctgtgcgagggttactatgcacaatttaatcactttcatccctatgggattcagtgcttcttaaagagttcttaaggattgtgatatttttacttgcattgaatatattataatcttccatacttcttcattcaatacaagtgtggtagggacttaaaaaacttgtaaatgctgtcaactatgatatggtaaaagttacttattctagattaccccctcattgtttattaacaaattatgttacatctgttttaaatttatttcaaaaagggaaactattgtcccctagcaaggcatgatgttaaccagaataaagttctgagtgtttttactacagttgttttttgaaaacatggtagaattggagagtaaaaactgaatggaaggtttgtatattgtcagatattttttcagaaatatgtggtttccacgatgaaaaacttccatgaggccaaacgttttgaactaataaaagcataaatgcaaacacacaaaggtataattttatgaatgtctttgttggaaaagaatacagaaagatggatgtgctttgcattcctacaaagatgtttgtcagatatgatatgtaaacataattcttgtatattatggaagattttaaattcacaatagaaactcaccatgtaaaagagtcatctggtagatttttaacgaatgaagatgtctaatagttattccctatttgttttcttctgtatgttagggtgctctggaagagaggaatgcctgtgtgagcaagcatttatgtttatttataagcagatttaacaattccaaaggaatctccagttttcagttgatcactggcaatgaaaaattctcagtcagtaattgccaaagctgctctagccttgaggagtgtgagaatcaaaactctcctacacttccattaacttagcatgtgttgaaaaaaaagtttcagagaagttctggctgaacactggcaacaacaaagccaacagtcaaaacagagatgtgataaggatcagaacagcagaggttcttttaaaggggcagaaaaactctgggaaataagagagaacaactactgtgatcaggctatgtatggaatacagtgttattttctttgaaattgtttaagtgttgtaaatatttatgtaaactgcattagaaattagctgtgtgaaataccagtgtggtttgtgtttgagttttattgagaattttaaattataacttaaaatattttataatttttaaagtatatatttatttaagcttatgtcagacctatttgacataacactataaaggttgacaataaatgtgcttatgttt

SEQ ID NO: 179616 - DNA, 3576 bp, Homo sapiens
  Payload ID: 15400
  Gene Symbol: SELE
  Gene Name: selectin E
  ENST ID: ENST00000367776
  CDS Start-End: 49-1692
gaaagtatttcaagcctaaacctttgggtgaaaagaactcttgaagtcatgattgcttcacagtttctctcagctctcactttggtgcttctcattaaagagagtggagcctggtcttacaacacctccacggaagctatgacttatgatgaggccagtgcttattgtcagcaaaggtacacacacctggttgcaattcaaaacaaagaagagattgagtacctaaactccatattgagctattcaccaagttattactggattggaatcagaaaagtcaacaatgtgtgggtctgggtaggaacccagaaacctctgacagaagaagccaagaactgggctccaggtgaacccaacaataggcaaaaagatgaggactgcgtggagatctacatcaagagagaaaaagatgtgggcatgtggaatgatgagaggtgcagcaagaagaagcttgccctatgctacacagctgcctgtaccaatacatcctgcagtggccacggtgaatgtgtagagaccatcaataattacacttgcaagtgtgaccctggcttcagtggactcaagtgtgagcaaattgtgaactgtacagccctggaatcccctgagcatggaagcctggtttgcagtcacccactgggaaacttcagctacaattcttcctgctctatcagctgtgataggggttacctgccaagcagcatggagaccatgcagtgtatgtcctctggagaatggagtgctcctattccagcctgcaatgtggttgagtgtgatgctgtgacaaatccagccaatgggttcgtggaatgtttccaaaaccctggaagcttcccatggaacacaacctgtacatttgactgtgaagaaggatttgaactaatgggagcccagagccttcagtgtacctcatctgggaattgggacaacgagaagccaacgtgtaaagctgtgacatgcagggccgtccgccagcctcagaatggctctgtgaggtgcagccattcccctgctggagagttcaccttcaaatcatcctgcaacttcacctgtgaggaaggcttcatgttgcagggaccagcccaggttgaatgcaccactcaagggcagtggacacagcaaatcccagtttgtgaagctgtgagatgcgatgctgtccaccagcccccgaagggtttggtgaggtgtgctcattcccctattggagaattcacctacaagtcctcttgtgccttcagctgtgaggagggatttgaattacatggatcaactcaacttgagtgcacatctcagggacaatggacagaagaggttccttcctgccaagtggtaaaatgttcaagcctggcagttccgggaaagatcaacatgagctgcagtggggagcccgtgtttggcactgtgtgcaagttcgcctgtcctgaaggatggacgctcaatggctctgcagctcggacatgtggagccacaggacactggtctggcctgctacctacctgtgaagctcccactgagtccaacattcccttggtagctggactttctgctgctggactctccctcctgacattagcaccatttctcctctggcttcggaaatgcttacggaaagcaaagaaatttgttcctgccagcagctgccaaagccttgaatcagatggaagctaccaaaagccttcttacatcctttaagttcaaaagaatcagaaacaggtgcatctggggaactagagggatacactgaagttaacagagacagataactctcctcgggtctctggcccttcttgcctactatgccagatgcctttatggctgaaaccgcaacacccatcaccacttcaatagatcaaagtccagcaggcaaggacggccttcaactgaaaagactcagtgttccctttcctactctcaggatcaagaaagtgttggctaatgaagggaaaggatattttcttccaagcaaaggtgaagagaccaagactctgaaatctcagaattccttttctaactctcccttgctcgctgtaaaatcttggcacagaaacacaatattttgtggctttctttcttttgcccttcacagtgtttcgacagctgattacacagttgctgtcataagaatgaataataattatccagagtttagaggaaaaaaatgactaaaaatattataacttaaaaaaatgacagatgttgaatgcccacaggcaaatgcatggagggttgttaatggtgcaaatcctactgaatgctctgtgcgagggttactatgcacaatttaatcactttcatccctatgggattcagtgcttcttaaagagttcttaaggattgtgatatttttacttgcattgaatatattataatcttccatacttcttcattcaatacaagtgtggtagggacttaaaaaacttgtaaatgctgtcaactatgatatggtaaaagttacttattctagattaccccctcattgtttattaacaaattatgttacatctgttttaaatttatttcaaaaagggaaactattgtcccctagcaaggcatgatgttaaccagaataaagttctgagtgtttttactacagttgttttttgaaaacatggtagaattggagagtaaaaactgaatggaaggtttgtatattgtcagatattttttcagaaatatgtggtttccacgatgaaaaacttccatgaggccaaacgttttgaactaataaaagcataaatgcaaacacacaaaggtataattttatgaatgtctttgttggaaaagaatacagaaagatggatgtgctttgcattcctacaaagatgtttgtcagatatgatatgtaaacataattcttgtatattatggaagattttaaattcacaatagaaactcaccatgtaaaagagtcatctggtagatttttaacgaatgaagatgtctaatagttattccctatttgttttcttctgtatgttagggtgctctggaagagaggaatgcctgtgtgagcaagcatttatgtttatttataagcagatttaacaattccaaaggaatctccagttttcagttgatcactggcaatgaaaaattctcagtcagtaattgccaaagctgctctagccttgaggagtgtgagaatcaaaactctcctacacttccattaacttagcatgtgttgaaaaaaaagtttcagagaagttctggctgaacactggcaacaacaaagccaacagtcaaaacagagatgtgataaggatcagaacagcagaggttcttttaaaggggcagaaaaactctgggaaataagagagaacaactactgtgatcaggctatgtatggaatacagtgttattttctttgaaattgtttaagtgttgtaaatatttatgtaaactgcattagaaattagctgtgtgaaataccagtgtggtttgtgtttgagttttattgagaattttaaattataacttaaaatattttataatttttaaagtatatatttatttaagcttatgtcagacctatttgacataacactataaaggttgacaataaatgtgcttatgttt

SEQ ID NO: 179617 - DNA, 3576 bp, Homo sapiens
  Payload ID: 15400
  Gene Symbol: SELE
  Gene Name: selectin E
  ENST ID: ENST00000367777
  CDS Start-End: 49-1692
gaaagtatttcaagcctaaacctttgggtgaaaagaactcttgaagtcatgattgcttcacagtttctctcagctctcactttggtgcttctcattaaagagagtggagcctggtcttacaacacctccacggaagctatgacttatgatgaggccagtgcttattgtcagcaaaggtacacacacctggttgcaattcaaaacaaagaagagattgagtacctaaactccatattgagctattcaccaagttattactggattggaatcagaaaagtcaacaatgtgtgggtctgggtaggaacccagaaacctctgacagaagaagccaagaactgggctccaggtgaacccaacaataggcaaaaagatgaggactgcgtggagatctacatcaagagagaaaaagatgtgggcatgtggaatgatgagaggtgcagcaagaagaagcttgccctatgctacacagctgcctgtaccaatacatcctgcagtggccacggtgaatgtgtagagaccatcaataattacacttgcaagtgtgaccctggcttcagtggactcaagtgtgagcaaattgtgaactgtacagccctggaatcccctgagcatggaagcctggtttgcagtcacccactgggaaacttcagctacaattcttcctgctctatcagctgtgataggggttacctgccaagcagcatggagaccatgcagtgtatgtcctctggagaatggagtgctcctattccagcctgcaatgtggttgagtgtgatgctgtgacaaatccagccaatgggttcgtggaatgtttccaaaaccctggaagcttcccatggaacacaacctgtacatttgactgtgaagaaggatttgaactaatgggagcccagagccttcagtgtacctcatctgggaattgggacaacgagaagccaacgtgtaaagctgtgacatgcagggccgtccgccagcctcagaatggctctgtgaggtgcagccattcccctgctggagagttcaccttcaaatcatcctgcaacttcacctgtgaggaaggcttcatgttgcagggaccagcccaggttgaatgcaccactcaagggcagtggacacagcaaatcccagtttgtgaagctttccagtgcacagccttgtccaaccccgagcgaggctacatgaattgtcttcctagtgcttctggcagtttccgttatgggtccagctgtgagttctcctgtgagcagggttttgtgttgaagggatccaaaaggctccaatgtggccccacaggggagtgggacaacgagaagcccacatgtgaagtggtaaaatgttcaagcctggcagttccgggaaagatcaacatgagctgcagtggggagcccgtgtttggcactgtgtgcaagttcgcctgtcctgaaggatggacgctcaatggctctgcagctcggacatgtggagccacaggacactggtctggcctgctacctacctgtgaagctcccactgagtccaacattcccttggtagctggactttctgctgctggactctccctcctgacattagcaccatttctcctctggcttcggaaatgcttacggaaagcaaagaaatttgttcctgccagcagctgccaaagccttgaatcagatggaagctaccaaaagccttcttacatcctttaagttcaaaagaatcagaaacaggtgcatctggggaactagagggatacactgaagttaacagagacagataactctcctcgggtctctggcccttcttgcctactatgccagatgcctttatggctgaaaccgcaacacccatcaccacttcaatagatcaaagtccagcaggcaaggacggccttcaactgaaaagactcagtgttccctttcctactctcaggatcaagaaagtgttggctaatgaagggaaaggatattttcttccaagcaaaggtgaagagaccaagactctgaaatctcagaattccttttctaactctcccttgctcgctgtaaaatcttggcacagaaacacaatattttgtggctttctttcttttgcccttcacagtgtttcgacagctgattacacagttgctgtcataagaatgaataataattatccagagtttagaggaaaaaaatgactaaaaatattataacttaaaaaaatgacagatgttgaatgcccacaggcaaatgcatggagggttgttaatggtgcaaatcctactgaatgctctgtgcgagggttactatgcacaatttaatcactttcatccctatgggattcagtgcttcttaaagagttcttaaggattgtgatatttttacttgcattgaatatattataatcttccatacttcttcattcaatacaagtgtggtagggacttaaaaaacttgtaaatgctgtcaactatgatatggtaaaagttacttattctagattaccccctcattgtttattaacaaattatgttacatctgttttaaatttatttcaaaaagggaaactattgtcccctagcaaggcatgatgttaaccagaataaagttctgagtgtttttactacagttgttttttgaaaacatggtagaattggagagtaaaaactgaatggaaggtttgtatattgtcagatattttttcagaaatatgtggtttccacgatgaaaaacttccatgaggccaaacgttttgaactaataaaagcataaatgcaaacacacaaaggtataattttatgaatgtctttgttggaaaagaatacagaaagatggatgtgctttgcattcctacaaagatgtttgtcagatatgatatgtaaacataattcttgtatattatggaagattttaaattcacaatagaaactcaccatgtaaaagagtcatctggtagatttttaacgaatgaagatgtctaatagttattccctatttgttttcttctgtatgttagggtgctctggaagagaggaatgcctgtgtgagcaagcatttatgtttatttataagcagatttaacaattccaaaggaatctccagttttcagttgatcactggcaatgaaaaattctcagtcagtaattgccaaagctgctctagccttgaggagtgtgagaatcaaaactctcctacacttccattaacttagcatgtgttgaaaaaaaagtttcagagaagttctggctgaacactggcaacaacaaagccaacagtcaaaacagagatgtgataaggatcagaacagcagaggttcttttaaaggggcagaaaaactctgggaaataagagagaacaactactgtgatcaggctatgtatggaatacagtgttattttctttgaaattgtttaagtgttgtaaatatttatgtaaactgcattagaaattagctgtgtgaaataccagtgtggtttgtgtttgagttttattgagaattttaaattataacttaaaatattttataatttttaaagtatatatttatttaagcttatgtcagacctatttgacataacactataaaggttgacaataaatgtgcttatgttt

SEQ ID NO: 179618 - DNA, 560 bp, Homo sapiens
  Payload ID: 15400
  Gene Symbol: SELE
  Gene Name: selectin E
  ENST ID: ENST00000609271
  CDS Start-End: 525-560
acatccgggaactcagagtgttaaaacttgagctcattattttcccctagacaccaattattccttttttattttccgtctttattaacgaaagtgtttactgcctaagccagacactgagagccaccatgtattcctctctctctctcacctattcccatgtttaatccattatttggattggtccattttatctccattttctcaaatacaggaaaagacagatcatcatcaaccagcaattgtgactatctacatattcacataaggatttcccaacttggggtatttttgtcaagttgagaccaggcatcttggagttagaagcaatccctcctataaaagggcctcagccgaagtagtgttcagctgttcttggctgacttcacatcaaaactcctatactgacctgagacagaggcagcagtgatacccacctgagagatcctgtgtttgaacaactgcttcccaaaacggaaagtatttcaagcctaaacctttgggtgaaaagaactcttgaagtcatgattgcttcacagtttctctcagctctcactttg

SEQ ID NO: 179619 - DNA, 2436 bp, Homo sapiens
  Payload ID: 15401
  Gene Symbol: SELL
  Gene Name: selectin L
  Uniprot ID: P14151
  ENST ID: ENST00000236147
  CDS Start-End: 162-1319
ggaaggggagggaaaaggggaggaggaggaggatgtgagactgggttagagaaatgaaagaaagcaaggctttctgttgacattcagtgcagtctacctgcagcacagcacactccctttgggcaaggacctgagacccttgtgctaagtcaagaggctcaatgggctgcagaagaactagagaaggaccaagcaaagccatgatatttccatggaaatgtcagagcacccagagggacttatggaacatcttcaagttgtgggggtggacaatgctctgttgtgatttcctggcacatcatggaaccgactgctggacttaccattattctgaaaaacccatgaactggcaaagggctagaagattctgccgagacaattacacagatttagttgccatacaaaacaaggcggaaattgagtatctggagaagactctgcctttcagtcgttcttactactggataggaatccggaagataggaggaatatggacgtgggtgggaaccaacaaatctcttactgaagaagcagagaactggggagatggtgagcccaacaacaagaagaacaaggaggactgcgtggagatctatatcaagagaaacaaagatgcaggcaaatggaacgatgacgcctgccacaaactaaaggcagccctctgttacacagcttcttgccagccctggtcatgcagtggccatggagaatgtgtagaaatcatcaataattacacctgcaactgtgatgtggggtactatgggccccagtgtcagtttgtgattcagtgtgagcctttggaggccccagagctgggtaccatggactgtactcaccctttgggaaacttcagcttcagctcacagtgtgccttcagctgctctgaaggaacaaacttaactgggattgaagaaaccacctgtggaccatttggaaactggtcatctccagaaccaacctgtcaagtgattcagtgtgagcctctatcagcaccagatttggggatcatgaactgtagccatcccctggccagcttcagctttacctctgcatgtaccttcatctgctcagaaggaactgagttaattgggaagaagaaaaccatttgtgaatcatctggaatctggtcaaatcctagtccaatatgtcaaaaattggacaaaagtttctcaatgattaaggagggtgattataaccccctcttcattccagtggcagtcatggttactgcattctctgggttggcatttatcatttggctggcaaggagattaaaaaaaggcaagaaatccaagagaagtatgaatgacccatattaaatcgcccttggtgaaagaaaattcttggaatactaaaaatcatgagatcctttaaatccttccatgaaacgttttgtgtggtggcacctcctacgtcaaacatgaagtgtgtttccttcagtgcatctgggaagatttctacctgaccaacagttccttcagcttccatttcgcccctcatttatccctcaacccccagcccacaggtgtttatacagctcagctttttgtcttttctgaggagaaacaaataagaccataaagggaaaggattcatgtggaatataaagatggctgactttgctctttcttgactcttgttttcagtttcaattcagtgctgtacttgatgacagacacttctaaatgaagtgcaaatttgatacatatgtgaatatggactcagttttcttgcagatcaaatttcacgtcgtcttctgtatactgtggaggtacactcttatagaaagttcaaaaagtctacgctctcctttctttctaactccagtgaagtaatggggtcctgctcaagttgaaagagtcctatttgcactgtagcctcgccgtctgtgaattggaccatcctatttaactggcttcagcctccccaccttcttcagccacctctctttttcagttggctgacttccacacctagcatctcatgagtgccaagcaaaaggagagaagagagaaatagcctgcgctgttttttagtttgggggttttgctgtttccttttatgagacccattcctatttcttatagtcaatgtttcttttatcacgatattattagtaagaaaacatcactgaaatgctagctgcaagtgacatctctttgatgtcatatggaagagttaaaacaggtggagaaattccttgattcacaatgaaatgctctcctttcccctgcccccagaccttttatccacttacctagattctacatattctttaaatttcatctcaggcctccctcaaccccaccacttcttttataactagtcctttactaatccaacccatgatgagctcctcttcctggcttcttactgaaaggttaccctgtaacatgcaattttgcatttgaataaagcctgctttttaagtgttaa

SEQ ID NO: 179620 - DNA, 3142 bp, Homo sapiens
  Payload ID: 15402
  Gene Symbol: SELP
  Gene Name: selectin P (granule membrane protein 140kDa, antigen CD62)
  Uniprot ID: P16109
  ENST ID: ENST00000263686
  CDS Start-End: 39-2531
tgggcagaaggcagaaaaccagcagagtcacagaggagatggccaactgccaaatagccatcttgtaccagagattccagagagtggtctttggaatttcccaactcctttgcttcagtgccctgatctctgaactaacaaaccagaaagaagtggcagcatggacttatcattacagcacaaaagcatactcatggaatatttcccgtaaatactgccagaatcgctacacagacttagtggccatccagaataaaaatgaaattgattacctcaataaggtcctaccctactacagctcctactactggattgggatccgaaagaacaataagacatggacatgggtgggaaccaaaaaggctctcaccaacgaggctgagaactgggctgataatgaacctaacaacaaaaggaacaacgaggactgcgtggagatatacatcaagagtccgtcagcccctggcaagtggaatgatgagcactgcttgaagaaaaagcacgcattgtgttacacagcctcctgccaggacatgtcctgcagcaaacaaggagagtgcctcgagaccatcgggaactacacctgctcctgttaccctggattctatgggccagaatgtgaatacgtgagagagtgtggagaacttgagctccctcaacacgtgctcatgaactgcagccaccctctgggaaacttctcttttaactcgcagtgcagcttccactgcactgacgggtaccaagtaaatgggcccagcaagctggaatgcttggcttctggaatctggacaaataagcctccacagtgtttagctgcccagtgcccacccctgaagattcctgaacgaggaaacatgacctgccttcattctgcaaaagcattccagcatcagtctagctgcagcttcagttgtgaagagggatttgcattagttggaccggaagtggtgcaatgcacagcctcgggggtatggacagccccagccccagtgtgtaaagctgtgcagtgtcagcacctggaagcccccagtgaaggaaccatggactgtgttcatccgctcactgcttttgcctatggctccagctgtaaatttgagtgccagcccggctacagagtgaggggcttggacatgctccgctgcattgactctggacactggtctgcacccttgccaacctgtgaggctatttcgtgtgagccgctggagagtcctgtccacggaagcatggattgctctccatccttgagagcgtttcagtatgacaccaactgtagcttccgctgtgctgaaggtttcatgctgagaggagccgatatagttcggtgtgataacttgggacagtggacagcaccagccccagtctgtcaagctttgcagtgccaggatctcccagttccaaatgaggcccgggtgaactgctcccaccccttcggtgcctttaggtaccagtcagtctgcagcttcacctgcaatgaaggcttgctcctggtgggagcaagtgtgctacagtgcttggctactggaaactggaattctgttcctccagaatgccaagccattccctgcacacctttgctaagccctcagaatggaacaatgacctgtgttcaacctcttggaagttccagttataaatccacatgtcaattcatctgtgacgagggatattctttgtctggaccagaaagattggattgtactcgatcgggacgctggacagactccccaccaatgtgtgaagccatcaagtgcccagaactctttgccccagagcagggcagcctggattgttctgacactcgtggagaattcaatgttggctccacctgccatttctcttgtgacaacggctttaagctggaggggcccaataatgtggaatgcacaacttctggaagatggtcagctactccaccaacctgcaaaggcatagcatcacttcctactccaggggtgcaatgtccagccctcaccactcctgggcagggaaccatgtactgtaggcatcatccgggaacctttggttttaataccacttgttactttggctgcaacgctggattcacactcataggagacagcactctcagctgcagaccttcaggacaatggacagcagtaactccagcatgcagagctgtgaaatgctcagaactacatgttaataagccaatagcgatgaactgctccaacctctggggaaacttcagttatggatcaatctgctctttccattgtctagagggccagttacttaatggctctgcacaaacagcatgccaagagaatggccactggtcaactaccgtgccaacctgccaagcaggaccattgactatccaggaagccctgacttactttggtggagcggtggcttctacgataggtctgataatgggtgggacgctcctggctttgctaagaaagcgtttcagacaaaaagatgatgggaaatgccccttgaatcctcacagccacctaggaacatatggagtttttacaaacgctgcatttgacccgagtccttaaggtttccataaacacccatgaatcaaagacatggaattaccttagattagctctggaccagcctgttggacccgctctggaccaaccctgtttcctgagtttgggattgtggtacaatctcaaattctcaacctaccaccccttcctgtcccacctcttctcttcctgtaacacaagccacagaagccaggagcaaatgtttctgcagtagtctctgtgctttgactcacctgttacttgaaataccagtgaaccaaagagactggagcatctgactcacaagaagaccagactgtggagaaataaaaatacctctttattttttgattgaaggaaggttttctccactttgttggaaagcaggtggcatctctaattggaagaaattcctgtagcatcttctggagtctccagtggttgctgttgatgaggcctcttggacctctgctctgaggcttccagagagtcctctggatggcaccagaggctgcagaaggccaagaatcaagctagaaggccacatgtcaccgtggaccttcctgccaccagtcactgtccctcaaatgacccaaagaccaatattcaaatgcgtaattaaaagaattttcccc

SEQ ID NO: 179621 - DNA, 2402 bp, Homo sapiens
  Payload ID: 15402
  Gene Symbol: SELP
  Gene Name: selectin P (granule membrane protein 140kDa, antigen CD62)
  ENST ID: ENST00000367786
  CDS Start-End: 3-2309
agatggccaactgccaaatagccatcttgtaccagagattccagagagtggtctttggaatttcccaactcctttgcttcagtgccctgatctctgaactaacaaaccagaaagaagtggcagcatggacttatcattacagcacaaaagcatactcatggaatatttcccgtaaatactgccagaatcgctacacagacttagtggccatccagaataaaaatgaaattgattacctcaataaggtcctaccctactacagctcctactactggattgggatccgaaagaacaataagacatggacatgggtgggaaccaaaaaggctctcaccaacgaggctgagaactgggctgataatgaacctaacaacaaaaggaacaacgaggactgcgtggagatatacatcaagagtccgtcagcccctggcaagtggaatgatgagcactgcttgaagaaaaagcacgcattgtgttacacagcctcctgccaggacatgtcctgcagcaaacaaggagagtgcctcgagaccatcgggaactacacctgctcctgttaccctggattctatgggccagaatgtgaatacgtgagagagtgtggagaacttgagctccctcaacacgtgctcatgaactgcagccaccctctgggaaacttctcttttaactcgcagtgcagcttccactgcactgacgggtaccaagtaaatgggcccagcaagctggaatgcttggcttctggaatctggacaaataagcctccacagtgtttagctgcccagtgcccacccctgaagattcctgaacgaggaaacatgacctgccttcattctgcaaaagcattccagcatcagtctagctgcagcttcagttgtgaagagggatttgcattagttggaccggaagtggtgcaatgcacagcctcgggggtatggacagccccagccccagtgtgtaaagctatttcgtgtgagccgctggagagtcctgtccacggaagcatggattgctctccatccttgagagcgtttcagtatgacaccaactgtagcttccgctgtgctgaaggtttcatgctgagaggagccgatatagttcggtgtgataacttgggacagtggacagcaccagccccagtctgtcaagctttgcagtgccaggatctcccagttccaaatgaggcccgggtgaactgctcccaccccttcggtgcctttaggtaccagtcagtctgcagcttcacctgcaatgaaggcttgctcctggtgggagcaagtgtgctacagtgcttggctactggaaactggaattctgttcctccagaatgccaagccattccctgcacacctttgctaagccctcagaatggaacaatgacctgtgttcaacctcttggaagttccagttataaatccacatgtcaattcatctgtgacgagggatattctttgtctggaccagaaagattggattgtactcgatcgggacgctggacagactccccaccaatgtgtgaagccatcaagtgcccagaactctttgccccagagcagggcagcctggattgttctgacactcgtggagaattcaatgttggctccacctgccatttctcttgtgacaacggctttaagctggaggggcccaataatgtggaatgcacaacttctggaagatggtcagctactccaccaacctgcaaaggcatagcatcacttcctactccaggggtgcaatgtccagccctcaccactcctgggcagggaaccatgtactgtaggcatcatccgggaacctttggttttaataccacttgttactttggctgcaacgctggattcacactcataggagacagcactctcagctgcagaccttcaggacaatggacagcagtaactccagcatgcagagctgtgaaatgctcagaactacatgttaataagccaatagcgatgaactgctccaacctctggggaaacttcagttatggatcaatctgctctttccattgtctagagggccagttacttaatggctctgcacaaacagcatgccaagagaatggccactggtcaactaccgtgccaacctgccaagcaggaccattgactatccaggaagccctgacttactttggtggagcggtggcttctacgataggtctgataatgggtgggacgctcctggctttgctaagaaagcgtttcagacaaaaagatgatgggaaatgccccttgaatcctcacagccacctaggaacatatggagtttttacaaacgctgcatttgacccgagtccttaaggaaatgataattatttaaatttctttggtctcatttccagagacctgtccttttcctggtctcctcattcagcctccatatgatcctgttgt

SEQ ID NO: 179622 - DNA, 2427 bp, Homo sapiens
  Payload ID: 15402
  Gene Symbol: SELP
  Gene Name: selectin P (granule membrane protein 140kDa, antigen CD62)
  ENST ID: ENST00000367788
  CDS Start-End: 120-2426
tttctggaatgtgaataggaagttgtttttctaaacagcctgacactgaggggaggcagtgagactgtaagcagtctgggttgggcagaaggcagaaaaccagcagagtcacagaggagatggccaactgccaaatagccatcttgtaccagagattccagagagtggtctttggaatttcccaactcctttgcttcagtgccctgatctctgaactaacaaaccagaaagaagtggcagcatggacttatcattacagcacaaaagcatactcatggaatatttcccgtaaatactgccagaatcgctacacagacttagtggccatccagaataaaaatgaaattgattacctcaataaggtcctaccctactacagctcctactactggattgggatccgaaagaacaataagacatggacatgggtgggaaccaaaaaggctctcaccaacgaggctgagaactgggctgataatgaacctaacaacaaaaggaacaacgaggactgcgtggagatatacatcaagagtccgtcagcccctggcaagtggaatgatgagcactgcttgaagaaaaagcacgcattgtgttacacagcctcctgccaggacatgtcctgcagcaaacaaggagagtgcctcgagaccatcgggaactacacctgctcctgttaccctggattctatgggccagaatgtgaatacgtgagagagtgtggagaacttgagctccctcaacacgtgctcatgaactgcagccaccctctgggaaacttctcttttaactcgcagtgcagcttccactgcactgacgggtaccaagtaaatgggcccagcaagctggaatgcttggcttctggaatctggacaaataagcctccacagtgtttagctgtgcagtgtcagcacctggaagcccccagtgaaggaaccatggactgtgttcatccgctcactgcttttgcctatggctccagctgtaaatttgagtgccagcccggctacagagtgaggggcttggacatgctccgctgcattgactctggacactggtctgcacccttgccaacctgtgaggctatttcgtgtgagccgctggagagtcctgtccacggaagcatggattgctctccatccttgagagcgtttcagtatgacaccaactgtagcttccgctgtgctgaaggtttcatgctgagaggagccgatatagttcggtgtgataacttgggacagtggacagcaccagccccagtctgtcaagctttgcagtgccaggatctcccagttccaaatgaggcccgggtgaactgctcccaccccttcggtgcctttaggtaccagtcagtctgcagcttcacctgcaatgaaggcttgctcctggtgggagcaagtgtgctacagtgcttggctactggaaactggaattctgttcctccagaatgccaagccattccctgcacacctttgctaagccctcagaatggaacaatgacctgtgttcaacctcttggaagttccagttataaatccacatgtcaattcatctgtgacgagggatattctttgtctggaccagaaagattggattgtactcgatcgggacgctggacagactccccaccaatgtgtgaagccatcaagtgcccagaactctttgccccagagcagggcagcctggattgttctgacactcgtggagaattcaatgttggctccacctgccatttctcttgtgacaacggctttaagctggaggggcccaataatgtggaatgcacaacttctggaagatggtcagctactccaccaacctgcaaaggcatagcatcacttcctactccaggggtgcaatgtccagccctcaccactcctgggcagggaaccatgtactgtaggcatcatccgggaacctttggttttaataccacttgttactttggctgcaacgctggattcacactcataggagacagcactctcagctgcagaccttcaggacaatggacagcagtaactccagcatgcagagctgtgaaatgctcagaactacatgttaataagccaatagcgatgaactgctccaacctctggggaaacttcagttatggatcaatctgctctttccattgtctagagggccagttacttaatggctctgcacaaacagcatgccaagagaatggccactggtcaactaccgtgccaacctgccaagcaggaccattgactatccaggaagccctgacttactttggtggagcggtggcttctacgataggtctgataatgggtgggacgctcctggctttgctaagaaagcgtttcagacaaaaagatgatgggaaatgccccttgaatcctcacagccacctaggaacatatggagtttttacaaacgctgcatttgacccgagtccttaag

SEQ ID NO: 179623 - DNA, 1345 bp, Homo sapiens
  Payload ID: 15402
  Gene Symbol: SELP
  Gene Name: selectin P (granule membrane protein 140kDa, antigen CD62)
  ENST ID: ENST00000367795
  CDS Start-End: 13-1345
gtcacagaggagatggccaactgccaaatagccatcttgtaccagagattccagagagtggtctttggaatttcccaactcctttgcttcagtgccctgatctctgaactaacaaaccagaaagaagtggcagcatggacttatcattacagcacaaaagcatactcatggaatatttcccgtaaatactgccagaatcgctacacagacttagtggccatccagaataaaaatgaaattgattacctcaataaggtcctaccctactacagctcctactactggattgggatccgaaagaacaataagacatggacatgggtgggaaccaaaaaggctctcaccaacgaggctgagaactgggctgataatgaacctaacaacaaaaggaacaacgaggactgcgtggagatatacatcaagagtccgtcagcccctggcaagtggaatgatgagcactgcttgaagaaaaagcacgcattgtgttacacagcctcctgccaggacatgtcctgcagcaaacaaggagagtgcctcgagaccatcgggaactacacctgctcctgttaccctggattctatgggccagaatgtgaatacgtgagagagtgtggagaacttgagctccctcaacacgtgctcatgaactgcagccaccctctgggaaacttctcttttaactcgcagtgcagcttccactgcactgacgggtaccaagtaaatgggcccagcaagctggaatgcttggcttctggaatctggacaaataagcctccacagtgtttagctgcccagtgcccacccctgaagattcctgaacgaggaaacatgacctgccttcattctgcaaaagcattccagcatcagtctagctgcagcttcagttgtgaagagggatttgcattagttggaccggaagtggtgcaatgcacagcctcgggggtatggacagccccagccccagtgtgtaaagctttgcagtgccaggatctcccagttccaaatgaggcccgggtgaactgctcccaccccttcggtgcctttaggtaccagtcagtctgcagcttcacctgcaatgaaggcttgctcctggtgggagcaagtgtgctacagtgcttggctactggaaactggaattctgttcctccagaatgccaagccattccctgcacacctttgctaagccctcagaatggaacaatgacctgtgttcaacctcttggaagttccagttataaatccacatgtcaattcatctgtgacgagggatattctttgtctggaccagaaagattggattgtactcgatcgggacgctggacagactccccaccaatgtgtgaag

SEQ ID NO: 179624 - DNA, 3088 bp, Homo sapiens
  Payload ID: 15402
  Gene Symbol: SELP
  Gene Name: selectin P (granule membrane protein 140kDa, antigen CD62)
  ENST ID: ENST00000426706
  CDS Start-End: 1-2370
gccaactgccaaatagccatcttgtaccagagattccagagagtggtctttggaatttcccaactcctttgcttcagtgccctgatctctgaactaacaaaccagaaagaagtggcagcatggacttatcattacagcacaaaagcatactcatggaatatttcccgtaaatactgccagaatcgctacacagacttagtggccatccagaataaaaatgaaattgattacctcaataaggtcctaccctactacagctcctactactggattgggatccgaaagaacaataagacatggacatgggtgggaaccaaaaaggctctcaccaacgaggctgagaactgggctgataatgaacctaacaacaaaaggaacaacgaggactgcgtggagatatacatcaagagtccgtcagcccctggcaagtggaatgatgagcactgcttgaagaaaaagcacgcattgtgttacacagcctcctgccaggacatgtcctgcagcaaacaaggagagtgcctcgagaccatcgggaactacacctgctcctgttaccctggattctatgggccagaatgtgaatacgtgagagagtgtggagaacttgagctccctcaacacgtgctcatgaactgcagccaccctctgggaaacttctcttttaactcgcagtgcagcttccactgcactgacgggtaccaagtaaatgggcccagcaagctggaatgcttggcttctggaatctggacaaataagcctccacagtgtttagctgcccagtgcccacccctgaagattcctgaacgaggaaacatgacctgccttcattctgcaaaagcattccagcatcagtctagctgcagcttcagttgtgaagagggatttgcattagttggaccggaagtggtgcaatgcacagcctcgggggtatggacagccccagccccagtgtgtaaagctgtgcagtgtcagcacctggaagcccccagtgaaggaaccatggactgtgttcatccgctcactgcttttgcctatggctccagctgtaaatttgagtgccagcccggctacagagtgaggggcttggacatgctccgctgcattgactctggacactggtctgcacccttgccaacctgtgaggctatttcgtgtgagccgctggagagtcctgtccacggaagcatggattgctctccatccttgagagcgtttcagtatgacaccaactgtagcttccgctgtgctgaaggtttcatgctgagaggagccgatatagttcggtgtgataacttgggacagtggacagcaccagccccagtctgtcaagctttgcagtgccaggatctcccagttccaaatgaggcccgggtgaactgctcccaccccttcggtgcctttaggtaccagtcagtctgcagcttcacctgcaatgaaggcttgctcctggtgggagcaagtgtgctacagtgcttggctactggaaactggaattctgttcctccagaatgccaagccattccctgcacacctttgctaagccctcagaatggaacaatgacctgtgttcaacctcttggaagttccagttataaatccacatgtcaattcatctgtgacgagggatattctttgtctggaccagaaagattggattgtactcgatcgggacgctggacagactccccaccaatgtgtgaagccatcaagtgcccagaactctttgccccagagcagggcagcctggattgttctgacactcgtggagaattcaatgttggctccacctgccatttctcttgtgacaacggctttaagctggaggggcccaataatgtggaatgcacaacttctggaagatggtcagctactccaccaacctgcaaaggcatagcatcacttcctactccaggggtgcaatgtccagccctcaccactcctgggcagggaaccatgtactgtaggcatcatccgggaacctttggttttaataccacttgttactttggctgcaacgctggattcacactcataggagacagcactctcagctgcagaccttcaggacaatggacagcagtaactccagcatgcagagctgtgaaatgctcagaactacatgttaataagccaatagcgatgaactgctccaacctctggggaaacttcagttatggatcaatctgctctttccattgtctagagggccagttacttaatggctctgcacaaacagcatgccaagagaatggccactggtcaactaccgtgccaacctgccaagatgatgggaaatgccccttgaatcctcacagccacctaggaacatatggagtttttacaaacgctgcatttgacccgagtccttaagagacctgtccttttcctggtctcctcattcagcctccatatgatcctgttgtgaacatcaagtttcctgctacactggacttaactataatgcatttgctgcaggtttccataaacacccatgaatcaaagacatggaattaccttagattagctctggaccagcctgttggacccgctctggaccaaccctgtttcctgagtttgggattgtggtacaatctcaaattctcaacctaccaccccttcctgtcccacctcttctcttcctgtaacacaagccacagaagccaggagcaaatgtttctgcagtagtctctgtgctttgactcacctgttacttgaaataccagtgaaccaaagagactggagcatctgactcacaagaagaccagactgtggagaaataaaaatacctctttattttttgattgaaggaaggttttctccactttgttggaaagcaggtggcatctctaattggaagaaattcctgtagcatcttctggagtctccagtggttgctgttgatgaggcctcttggacctctgctctgaggcttccagagagtcctctggatggcaccagaggctgcagaaggccaagaatcaagctagaaggccacatgtcaccgtggaccttcctgccaccagtcactgtccctcaaatgacccaaagaccaatattcaaatgcgtaattaaaagaattttccccaaa

SEQ ID NO: 179625 - DNA, 1945 bp, Homo sapiens
  Payload ID: 15402
  Gene Symbol: SELP
  Gene Name: selectin P (granule membrane protein 140kDa, antigen CD62)
  ENST ID: ENST00000458599
  CDS Start-End: 4-1944
gagatggccaactgccaaatagccatcttgtaccagagattccagagagtggtctttggaatttcccaactcctttgcttcagtgccctgatctctgaactaacaaaccagaaagaagtggcagcatggacttatcattacagcacaaaagcatactcatggaatatttcccgtaaatactgccagaatcgctacacagacttagtggccatccagaataaaaatgaaattgattacctcaataaggtcctaccctactacagctcctactactggattgggatccgaaagaacaataagacatggacatgggtgggaaccaaaaaggctctcaccaacgaggctgagaactgggctgataatgaacctaacaacaaaaggaacaacgaggactgcgtggagatatacatcaagagtccgtcagcccctggcaagtggaatgatgagcactgcttgaagaaaaagcacgcattgtgttacacagcctcctgccaggacatgtcctgcagcaaacaaggagagtgcctcgagaccatcgggaactacacctgctcctgttaccctggattctatgggccagaatgtgaatacgtgagagagtgtggagaacttgagctccctcaacacgtgctcatgaactgcagccaccctctgggaaacttctcttttaactcgcagtgcagcttccactgcactgacgggtaccaagtaaatgggcccagcaagctggaatgcttggcttctggaatctggacaaataagcctccacagtgtttagctgcccagtgcccacccctgaagattcctgaacgaggaaacatgacctgccttcattctgcaaaagcattccagcatcagtctagctgcagcttcagttgtgaagagggatttgcattagttggaccggaagtggtgcaatgcacagcctcgggggtatggacagccccagccccagtgtgtaaagctatttcgtgtgagccgctggagagtcctgtccacggaagcatggattgctctccatccttgagagcgtttcagtatgacaccaactgtagcttccgctgtgctgaaggtttcatgctgagaggagccgatatagttcggtgtgataacttgggacagtggacagcaccagccccagtctgtcaagctttgcagtgccaggatctcccagttccaaatgaggcccgggtgaactgctcccaccccttcggtgcctttaggtaccagtcagtctgcagcttcacctgcaatgaaggcttgctcctggtgggagcaagtgtgctacagtgcttggctactggaaactggaattctgttcctccagaatgccaaggtaagagcatagcatcacttcctactccaggggtgcaatgtccagccctcaccactcctgggcagggaaccatgtactgtaggcatcatccgggaacctttggttttaataccacttgttactttggctgcaacgctggattcacactcataggagacagcactctcagctgcagaccttcaggacaatggacagcagtaactccagcatgcagagctgtgaaatgctcagaactacatgttaataagccaatagcgatgaactgctccaacctctggggaaacttcagttatggatcaatctgctctttccattgtctagagggccagttacttaatggctctgcacaaacagcatgccaagagaatggccactggtcaactaccgtgccaacctgccaagcaggaccattgactatccaggaagccctgacttactttggtggagcggtggcttctacgataggtctgataatgggtgggacgctcctggctttgctaagaaagcgtttcagacaaaaagatgatgggaaatgccccttgaatcctcacagccacctaggaacatatggagtttttacaaacgctgcatttgacccgagtccttaag

SEQ ID NO: 179626 - DNA, 1704 bp, Homo sapiens
  Payload ID: 15403
  Gene Symbol: SELPLG
  Gene Name: selectin P ligand
  Uniprot ID: Q14242
  ENST ID: ENST00000228463
  CDS Start-End: 178-1464
aatcatccgagaaccttggagggtggacagtgccccttttacagatgagaaaactgaggcttgaaggggagaagcagctgcctctggcggcatggcttctggctgcaggatgcccatggagttcgtggtgaccctaggcctgtgtctcggcttcctttgctgaacttgaacaggaagatggcagtgggggccagtggtctagaaggagataagatggctggtgccatgcctctgcaactcctcctgttgctgatcctactgggccctggcaacagcttgcagctgtgggacacctgggcagatgaagccgagaaagccttgggtcccctgcttgcccgggaccggagacaggccaccgaatatgagtacctagattatgatttcctgccagaaacggagcctccagaaatgctgaggaacagcactgacaccactcctctgactgggcctggaacccctgagtctaccactgtggagcctgctgcaaggcgttctactggcctggatgcaggaggggcagtcacagagctgaccacggagctggccaacatggggaacctgtccacggattcagcagctatggagatacagaccactcaaccagcagccacggaggcacagaccactcaaccagtgcccacggaggcacagaccactccactggcagccacagaggcacagacaactcgactgacggccacggaggcacagaccactccactggcagccacagaggcacagaccactccaccagcagccacggaagcacagaccactcaacccacaggcctggaggcacagaccactgcaccagcagccatggaggcacagaccactgcaccagcagccatggaagcacagaccactccaccagcagccatggaggcacagaccactcaaaccacagccatggaggcacagaccactgcaccagaagccacggaggcacagaccactcaacccacagccacggaggcacagaccactccactggcagccatggaggccctgtccacagaacccagtgccacagaggccctgtccatggaacctactaccaaaagaggtctgttcatacccttttctgtgtcctctgttactcacaagggcattcccatggcagccagcaatttgtccgtcaactacccagtgggggccccagaccacatctctgtgaagcagtgcctgctggccatcctaatcttggcgctggtggccactatcttcttcgtgtgcactgtggtgctggcggtccgcctctcccgcaagggccacatgtaccccgtgcgtaattactcccccaccgagatggtctgcatctcatccctgttgcctgatgggggtgaggggccctctgccacagccaatgggggcctgtccaaggccaagagcccgggcctgacgccagagcccagggaggaccgtgagggggatgacctcaccctgcacagcttcctcccttagctcactctgccatctgttttggcaagaccccacctccacgggctctcctgggccacccctgagtgcccagaccccattccacagctctgggcttcctcggagacccctggggatggggatcttcagggaaggaactctggccacccaaacaggacaagagcagcctggggccaagcagacgggcaagtggagccacctctttcctccctccgcggatgaagcccagccacatttcagccg

SEQ ID NO: 179627 - DNA, 1613 bp, Homo sapiens
  Payload ID: 15403
  Gene Symbol: SELPLG
  Gene Name: selectin P ligand
  ENST ID: ENST00000388962
  CDS Start-End: 24-1232
cccattgtctcctcctaggtgccatgcctctgcaactcctcctgttgctgatcctactgggccctggcaacagcttgcagctgtgggacacctgggcagatgaagccgagaaagccttgggtcccctgcttgcccgggaccggagacaggccaccgaatatgagtacctagattatgatttcctgccagaaacggagcctccagaaatgctgaggaacagcactgacaccactcctctgactgggcctggaacccctgagtctaccactgtggagcctgctgcaaggcgttctactggcctggatgcaggaggggcagtcacagagctgaccacggagctggccaacatggggaacctgtccacggattcagcagctatggagatacagaccactcaaccagcagccacggaggcacagaccactccactggcagccacagaggcacagacaactcgactgacggccacggaggcacagaccactccactggcagccacagaggcacagaccactccaccagcagccacggaagcacagaccactcaacccacaggcctggaggcacagaccactgcaccagcagccatggaggcacagaccactgcaccagcagccatggaagcacagaccactccaccagcagccatggaggcacagaccactcaaaccacagccatggaggcacagaccactgcaccagaagccacggaggcacagaccactcaacccacagccacggaggcacagaccactccactggcagccatggaggccctgtccacagaacccagtgccacagaggccctgtccatggaacctactaccaaaagaggtctgttcatacccttttctgtgtcctctgttactcacaagggcattcccatggcagccagcaatttgtccgtcaactacccagtgggggccccagaccacatctctgtgaagcagtgcctgctggccatcctaatcttggcgctggtggccactatcttcttcgtgtgcactgtggtgctggcggtccgcctctcccgcaagggccacatgtaccccgtgcgtaattactcccccaccgagatggtctgcatctcatccctgttgcctgatgggggtgaggggccctctgccacagccaatgggggcctgtccaaggccaagagcccgggcctgacgccagagcccagggaggaccgtgagggggatgacctcaccctgcacagcttcctcccttagctcactctgccatctgttttggcaagaccccacctccacgggctctcctgggccacccctgagtgcccagaccccattccacagctctgggcttcctcggagacccctggggatggggatcttcagggaaggaactctggccacccaaacaggacaagagcagcctggggccaagcagacgggcaagtggagccacctctttcctccctccgcggatgaagcccagccacatttcagccgaggtccaaggcaggaggccatttacttgagacagattctctcctttttcctgtcccccatcttctctgggtccctctaacatctcccatggctctccccgcttctcctggtcactggagtctcctccccatgtacccaagg

SEQ ID NO: 179628 - DNA, 2256 bp, Homo sapiens
  Payload ID: 15403
  Gene Symbol: SELPLG
  Gene Name: selectin P ligand
  Uniprot ID: Q14242
  ENST ID: ENST00000550948
  CDS Start-End: 226-1464
aaacaatggggtgtgggctgtcacatggccctgcctaagtaaccacattctcgcttcctccttccacacacagccattgggggttgctcggatccgggactgccgcagggggtgccacagcagtgcctggcagcgtgggctgggaccttgtcactaaagcagagaagccacttcttctgggcccacgaggcagctgtcccatgctctgctgagcacggtggtgccatgcctctgcaactcctcctgttgctgatcctactgggccctggcaacagcttgcagctgtgggacacctgggcagatgaagccgagaaagccttgggtcccctgcttgcccgggaccggagacaggccaccgaatatgagtacctagattatgatttcctgccagaaacggagcctccagaaatgctgaggaacagcactgacaccactcctctgactgggcctggaacccctgagtctaccactgtggagcctgctgcaaggcgttctactggcctggatgcaggaggggcagtcacagagctgaccacggagctggccaacatggggaacctgtccacggattcagcagctatggagatacagaccactcaaccagcagccacggaggcacagaccactcaaccagtgcccacggaggcacagaccactccactggcagccacagaggcacagacaactcgactgacggccacggaggcacagaccactccactggcagccacagaggcacagaccactccaccagcagccacggaagcacagaccactcaacccacaggcctggaggcacagaccactgcaccagcagccatggaggcacagaccactgcaccagcagccatggaagcacagaccactccaccagcagccatggaggcacagaccactcaaaccacagccatggaggcacagaccactgcaccagaagccacggaggcacagaccactcaacccacagccacggaggcacagaccactccactggcagccatggaggccctgtccacagaacccagtgccacagaggccctgtccatggaacctactaccaaaagaggtctgttcatacccttttctgtgtcctctgttactcacaagggcattcccatggcagccagcaatttgtccgtcaactacccagtgggggccccagaccacatctctgtgaagcagtgcctgctggccatcctaatcttggcgctggtggccactatcttcttcgtgtgcactgtggtgctggcggtccgcctctcccgcaagggccacatgtaccccgtgcgtaattactcccccaccgagatggtctgcatctcatccctgttgcctgatgggggtgaggggccctctgccacagccaatgggggcctgtccaaggccaagagcccgggcctgacgccagagcccagggaggaccgtgagggggatgacctcaccctgcacagcttcctcccttagctcactctgccatctgttttggcaagaccccacctccacgggctctcctgggccacccctgagtgcccagaccccattccacagctctgggcttcctcggagacccctggggatggggatcttcagggaaggaactctggccacccaaacaggacaagagcagcctggggccaagcagacgggcaagtggagccacctctttcctccctccgcggatgaagcccagccacatttcagccgaggtccaaggcaggaggccatttacttgagacagattctctcctttttcctgtcccccatcttctctgggtccctctaacatctcccatggctctccccgcttctcctggtcactggagtctcctccccatgtacccaaggaagatggagctcccccatcccacacgcactgcactgccattgtcttttggttgccatggtcaccaaacaggaagtggacattctaagggaggagtactgaagagtgacggacttctgaggctgtttcctgctgctcctctgacttggggcagcttgggtcttcttgggcacctctctgggaaaacccagggtgaggttcagcctgtgagggctgggatgggtttcgtgggcccaagggcagacctttctttgggactgtgtggaccaaggagcttccatctagtgacaagtgacccccagctatcgcctcttgccttcccctgtggccactttccagggtggactctgtcttgttcactgcagtatcccaactgcaggtccagtgcaggcaataaatatgtgatggacaaa

SEQ ID NO: 179629 - DNA, 1752 bp, Homo sapiens
  Payload ID: 15404
  Gene Symbol: SELENBP1
  Gene Name: selenium binding protein 1
  Uniprot ID: Q13228
  ENST ID: ENST00000368868
  CDS Start-End: 93-1511
ataaattccctcccttcgctccttccccggaacagcggcctctgacaccagcacagcaaacccgccgggatcaaagtgtaccagtcggcagcatggctacgaaatgtgggaattgtggacccggctactccacccctctggaggccatgaaaggacccagggaagagatcgtctacctgccctgcatttaccgaaacacaggcactgaggccccagattatctggccactgtggatgttgaccccaagtctccccagtattgccaggtcatccaccggctgcccatgcccaacctgaaggacgagctgcatcactcaggatggaacacctgcagcagctgcttcggtgatagcaccaagtcgcgcaccaagctggtgctgcccagtctcatctcctctcgcatctatgtggtggacgtgggctctgagccccgggccccaaagctgcacaaggtcattgagcccaaggacatccatgccaagtgcgaactggcctttctccacaccagccactgcctggccagcggggaagtgatgatcagctccctgggagacgtcaagggcaatggcaaagggggttttgtgctgctggatggggagacgttcgaggtgaaggggacatgggagagacctgggggtgctgcaccgttgggctatgacttctggtaccagcctcgacacaatgtcatgatcagcactgagtgggcagctcccaatgtcttacgagatggcttcaaccccgctgatgtggaggctggactgtacgggagccacttatatgtatgggactggcagcgccatgagattgtgcagaccctgtctctaaaagatgggcttattcccttggagatccgcttcctgcacaacccagacgctgcccaaggctttgtgggctgcgcactcagctccaccatccagcgcttctacaagaacgagggaggtacatggtcagtggagaaggtgatccaggtgccccccaagaaagtgaagggctggctgctgcccgaaatgccaggcctgatcaccgacatcctgctctccctggacgaccgcttcctctacttcagcaactggctgcatggggacctgaggcagtatgacatctctgacccacagagaccccgcctcacaggacagctcttcctcggaggcagcattgttaagggaggccctgtgcaagtgctggaggacgaggaactaaagtcccagccagagcccctagtggtcaagggaaaacgggtggctggaggccctcagatgatccagctcagcctggatgggaagcgcctctacatcaccacgtcgctgtacagtgcctgggacaagcagttttaccctgatctcatcagggaaggctctgtgatgctgcaggttgatgtagacacagtaaaaggagggctgaagttgaaccccaacttcctggtggacttcgggaaggagccccttggcccagcccttgcccatgagctccgctaccctgggggcgattgtagctctgacatctggatttgaactccaccctcatcacccacactccctattttgggccctcacttccttggggacctggcttcattctgctctctcttggcacccgacccttggcagcatgtaccacacagccaagctgagactgtggcaatgtgttgagtcatatacatttactgaccactgttgcttgttgctcactgtgctgcttttccatgagctcttggaggcaccaagaaataaactcgtaaccctgtccttcaga

SEQ ID NO: 179630 - DNA, 788 bp, Homo sapiens
  Payload ID: 15404
  Gene Symbol: SELENBP1
  Gene Name: selenium binding protein 1
  ENST ID: ENST00000455839
  CDS Start-End: 65-208
ggaacagcggcctctgacaccagcacagcaaacccgccgggatcaaagtgtaccagtcggcagcatggctacgaaatgtgggaattgtggacccggctactccacccctctggaggccatgaaaggtcatccaccggctgcccatgcccaacctgaaggacgagctgcatcactcaggatggaacacctgcagcagctgcttcggtgatagcaccaagtcgcgcaccaagctggtgctgcccagtctcatctcctctcgcatctatgtggtggacgtgggctctgagccccgggccccaaagctgcacaaggtcattgagcccaaggacatccatgccaagtgcgaactggcctttctccacaccagccactgcctggccagcggggaagtgatgatcagctccctgggagacgtcaagggcaatggcaaagagacagagtttcaccatgttggccaggctgatcctgaactcctgacctcaagtgatccgcccgcctcagcctctcaaagggctgggattactggcatgagccactcttcccccagccctggatgcctgaatttaaggaactggcaaatccagcagtggagggggttttgtgctgctggatggggagacgttcgaggtgaaggggacatgggagagacctgggggtgctgcaccgttgggctatgacttctggtaccagcctcgacacaatgtcatgatcagcactgagtgggcagctcccaatgtcttacgagatggcttcaaccccgctgatgtggaggctggactgtacgggag

SEQ ID NO: 179631 - DNA, 1521 bp, Homo sapiens
  Payload ID: 15404
  Gene Symbol: SELENBP1
  Gene Name: selenium binding protein 1
  ENST ID: ENST00000455397
  CDS Start-End: 51-422
tgacaccagcacagcaaacccgccgggatcaaagtgtaccagtcggcagcatggctacgaaatgtgggaattgtggacccggctactccacccctctggaggccatgaaaggacccagggaagagatcgtctacctgccctgcatttaccgaaacacaggcactgaggccccagattatctggccactgtggatgttgaccccaagtctccccagtattgccaggtcatccaccggctgcccatgcccaacctgaaggacgagctgcatcactcaggatggaacacctgcagcagctgcttcggtgatagcaccaagtcgcgcaccaagctggtgctgcccagtctcatctcctctcgcatctatgtggtggacgtgggctctgagccccgggccccaaagctgcacaaggcatgtcattgagcccaaggacatccatgccaagtgcgaactggcctttctccacaccagccactgcctggccagcggggaagtgatgatcagctccctgggagacgtcaagggcaatggcaaaggactgtacgggagccacttatatgtatgggactggcagcgccatgagattgtgcagaccctgtctctaaaagatgggcttattcccttggagatccgcttcctgcacaacccagacgctgcccaaggctttgtgggctgcgcactcagctccaccatccagcgcttctacaagaacgagggaggtacatggtcagtggagaaggtgatccaggtgccccccaagaaagtgaagggctggctgctgcccgaaatgccaggcctgatcaccgacatcctgctctccctggacgaccgcttcctctacttcagcaactggctgcatggggacctgaggcagtatgacatctctgacccacagagaccccgcctcacaggacagctcttcctcggaggcagcattgttaagggaggccctgtgcaagtgctggaggacgaggaactaaagtcccagccagagcccctagtggtcaagggaaaacgggtggctggaggccctcagatgatccagctcagcctggatgggaagcgcctctacatcaccacgtcgctgtacagtgcctgggacaagcagttttaccctgatctcatcagggaaggctctgtgatgctgcaggttgatgtagacacagtaaaaggagggctgaagttgaaccccaacttcctggtggacttcgggaaggagccccttggcccagcccttgcccatgagctccgctaccctgggggcgattgtagctctgacatctggatttgaactccaccctcatcacccacactccctattttgggccctcacttccttggggacctggcttcattctgctctctcttggcacccgacccttggcagcatgtaccacacagccaagctgagactgtggcaatgtgttgagtcatatacatttactgaccactgttgcttgttgctcactgtgctgcttttccatgagctcttggaggcaccaagaaataaactcgtaaccct

SEQ ID NO: 179632 - DNA, 916 bp, Homo sapiens
  Payload ID: 15404
  Gene Symbol: SELENBP1
  Gene Name: selenium binding protein 1
  ENST ID: ENST00000424475
  CDS Start-End: 1-916
ctgcagaacgtgcggagggagccttcaccctccagagcgtggcccagccaatgcgccccattgcttccacagctacgaaatgtgggaattgtggacccggctactccacccctctggaggccatgaaaggacccagggaagagatcgtctacctgccctgcatttaccgaaacacaggcactgaggccccagattatctggccactgtggatgttgaccccaagtctccccagtattgccaggtcattgagcccaaggacatccatgccaagtgcgaactggcctttctccacaccagccactgcctggccagcggggaagtgatgatcagctccctgggagacgtcaagggcaatggcaaagggggttttgtgctgctggatggggagacgttcgaggtgaaggggacatgggagagacctgggggtgctgcaccgttgggctatgacttctggtaccagcctcgacacaatgtcatgatcagcactgagtgggcagctcccaatgtcttacgagatggcttcaaccccgctgatgtggaggctggactgtacgggagccacttatatgtatgggactggcagcgccatgagattgtgcagaccctgtctctaaaagatgggcttattcccttggagatccgcttcctgcacaacccagacgctgcccaaggctttgtgggctgcgcactcagctccaccatccagcgcttctacaagaacgagggaggtacatggtcagtggagaaggtgatccaggtgccccccaagaaagtgaagggctggctgctgcccgaaatgccaggcctgatcaccgacatcctgctctccctggacgaccgcttcctctacttcagcaactggctgcatggggacctgaggcagtatgacatctctgacccacagagaccccgcct

SEQ ID NO: 179633 - DNA, 1928 bp, Homo sapiens
  Payload ID: 15404
  Gene Symbol: SELENBP1
  Gene Name: selenium binding protein 1
  Uniprot ID: Q13228
  ENST ID: ENST00000426705
  CDS Start-End: 146-1690
aacagcggcctctgacaccagcacagcaaacccgccgggatcaaagtgtaccagtcggcagcatgggtcatgtgtctccagctcttcccagcacaacctcaccctcctcagggctctgagggggcggagaggacaggccagagcgatgaggctggagtggggacctaggccagccgcactgccgtggcccgctgggatgtgtgctgcagaacgtgcggagggagccttcaccctccagagcgtggcccagccaatgcgccccattgcttccacagctacgaaatgtgggaattgtggacccggctactccacccctctggaggccatgaaaggacccagggaagagatcgtctacctgccctgcatttaccgaaacacaggcactgaggccccagattatctggccactgtggatgttgaccccaagtctccccagtattgccaggtcatccaccggctgcccatgcccaacctgaaggacgagctgcatcactcaggatggaacacctgcagcagctgcttcggtgatagcaccaagtcgcgcaccaagctggtgctgcccagtctcatctcctctcgcatctatgtggtggacgtgggctctgagccccgggccccaaagctgcacaaggtcattgagcccaaggacatccatgccaagtgcgaactggcctttctccacaccagccactgcctggccagcggggaagtgatgatcagctccctgggagacgtcaagggcaatggcaaagggggttttgtgctgctggatggggagacgttcgaggtgaaggggacatgggagagacctgggggtgctgcaccgttgggctatgacttctggtaccagcctcgacacaatgtcatgatcagcactgagtgggcagctcccaatgtcttacgagatggcttcaaccccgctgatgtggaggctggactgtacgggagccacttatatgtatgggactggcagcgccatgagattgtgcagaccctgtctctaaaagatgggcttattcccttggagatccgcttcctgcacaacccagacgctgcccaaggctttgtgggctgcgcactcagctccaccatccagcgcttctacaagaacgagggaggtacatggtcagtggagaaggtgatccaggtgccccccaagaaagtgaagggctggctgctgcccgaaatgccaggcctgatcaccgacatcctgctctccctggacgaccgcttcctctacttcagcaactggctgcatggggacctgaggcagtatgacatctctgacccacagagaccccgcctcacaggacagctcttcctcggaggcagcattgttaagggaggccctgtgcaagtgctggaggacgaggaactaaagtcccagccagagcccctagtggtcaagggaaaacgggtggctggaggccctcagatgatccagctcagcctggatgggaagcgcctctacatcaccacgtcgctgtacagtgcctgggacaagcagttttaccctgatctcatcagggaaggctctgtgatgctgcaggttgatgtagacacagtaaaaggagggctgaagttgaaccccaacttcctggtggacttcgggaaggagccccttggcccagcccttgcccatgagctccgctaccctgggggcgattgtagctctgacatctggatttgaactccaccctcatcacccacactccctattttgggccctcacttccttggggacctggcttcattctgctctctcttggcacccgacccttggcagcatgtaccacacagccaagctgagactgtggcaatgtgttgagtcatatacatttactgaccactgttgcttgttgctcactgtgctgcttttccatgagctcttggaggcaccaagaaataaactcgtaaccctgtccttc

SEQ ID NO: 179634 - DNA, 377 bp, Homo sapiens
  Payload ID: 15404
  Gene Symbol: SELENBP1
  Gene Name: selenium binding protein 1
  ENST ID: ENST00000427867
  CDS Start-End: 136-377
ctcctcaagaacagccaagggtgcctgggcttcgaccagacaaacacagagctgcacacctactgcaccctcgtgtttacttctcctacgaaatgtgggaattgtggacccggctactccacccctctggaggccatgaaaggacccagggaagagatcgtctacctgccctgcatttaccgaaacacaggcactgaggccccagattatctggccactgtggatgttgaccccaagtctccccagtattgccaggtcatccaccggctgcccatgcccaacctgaaggacgagctgcatcactcaggatggaacacctgcagcagctgcttcggtgatagcaccaagtcgcgcaccaagctggtgctgcccagtct

SEQ ID NO: 179635 - DNA, 1724 bp, Homo sapiens
  Payload ID: 15404
  Gene Symbol: SELENBP1
  Gene Name: selenium binding protein 1
  ENST ID: ENST00000443708
  CDS Start-End: 67-438
ccggaacagcggcctctgacaccagcacagcaaacccgccgggatcaaagtgtaccagtcggcagcatggctacgaaatgtgggaattgtggacccggctactccacccctctggaggccatgaaaggacccagggaagagatcgtctacctgccctgcatttaccgaaacacaggcactgaggccccagattatctggccactgtggatgttgaccccaagtctccccagtattgccaggtcatccaccggctgcccatgcccaacctgaaggacgagctgcatcactcaggatggaacacctgcagcagctgcttcggtgatagcaccaagtcgcgcaccaagctggtgctgcccagtctcatctcctctcgcatctatgtggtggacgtgggctctgagccccgggccccaaagctgcacaaggcatgtcattgagcccaaggacatccatgccaagtgcgaactggcctttctccacaccagccactgcctggccagcggggaagtgatgatcagctccctgggagacgtcaagggcaatggcaaagggggttttgtgctgctggatggggagacgttcgaggtgaaggggacatgggagagacctgggggtgctgcaccgttgggctatgacttctggtaccagcctcgacacaatgtcatgatcagcactgagtgggcagctcccaatgtcttacgagatggcttcaaccccgctgatgtggaggctggactgtacgggagccacttatatgtatgggactggcagcgccatgagattgtgcagaccctgtctctaaaagatgggcttattcccttggagatccgcttcctgcacaacccagacgctgcccaaggctttgtgggctgcgcactcagctccaccatccagcgcttctacaagaacgagggaggtacatggtcagtggagaaggtgatccaggtgccccccaagaaagtgaagggctggctgctgcccgaaatgccaggcctgatcaccgacatcctgctctccctggacgaccgcttcctctacttcagcaactggctgcatggggacctgaggcagtatgacatctctgacccacagagaccccgcctcacaggacagctcttcctcggaggcagcattgttaagggaggccctgtgcaagtgctggaggacgaggaactaaagtcccagccagagcccctagtggtcaagggaaaacgggtggctggaggccctcagatgatccagctcagcctggatgggaagcgcctctacatcaccacgtcgctgtacagtgcctgggacaagcagttttaccctgatctcatcagggaaggctctgtgatgctgcaggttgatgtagacacagtaaaaggagggctgaagttgaaccccaacttcctggtggacttcgggaaggagccccttggcccagcccttgcccatgagctccgctaccctgggggcgattgtagctctgacatctggatttgaactccaccctcatcacccacactccctattttgggccctcacttccttggggacctggcttcattctgctctctcttggcacccgacccttggcagcatgtaccacacagccaagctgagactgtggcaatgtgttgagtcatatacatttactgaccactgttgcttgttgctcactgtgctgcttttccatgagctcttggaggcaccaagaaataaactcgtaaccctgtcc

SEQ ID NO: 179636 - DNA, 929 bp, Homo sapiens
  Payload ID: 15404
  Gene Symbol: SELENBP1
  Gene Name: selenium binding protein 1
  ENST ID: ENST00000458566
  CDS Start-End: 43-929
gcacagcaaacccgccgggatcaaagtgtaccagtcggcagcatggctacgaaatgtgggaattgtggacccggctactccacccctctggaggccatgaaaggcactgaggccccagattatctggccactgtggatgttgaccccaagtctccccagtattgccaggtcatccaccggctgcccatgcccaacctgaaggacgagctgcatcactcaggatggaacacctgcagcagctgcttcggtgatagcaccaagtcgcgcaccaagctggtgctgcccagtctcatctcctctcgcatctatgtggtggacgtgggctctgagccccgggccccaaagctgcacaaggtcattgagcccaaggacatccatgccaagtgcgaactggcctttctccacaccagccactgcctggccagcggggaagtgatgatcagctccctgggagacgtcaagggcaatggcaaagggggttttgtgctgctggatggggagacgttcgaggtgaaggggacatgggagagacctgggggtgctgcaccgttgggctatgacttctggtaccagcctcgacacaatgtcatgatcagcactgagtgggcagctcccaatgtcttacgagatggcttcaaccccgctgatgtggaggctggactgtacgggagccacttatatgtatgggactggcagcgccatgagattgtgcagaccctgtctctaaaagatgggcttattcccttggagatccgcttcctgcacaacccagacgctgcccaaggctttgtgggctgcgcactcagctccaccatccagcgcttctacaagaacgagggaggtacatggtcagtggagaaggtgatccaggtgccccccaagaaagtgaagggctggctgctgcccgaaatgccaggcctgatcaccga

SEQ ID NO: 179637 - DNA, 1611 bp, Homo sapiens
  Payload ID: 15404
  Gene Symbol: SELENBP1
  Gene Name: selenium binding protein 1
  ENST ID: ENST00000427977
  CDS Start-End: 67-438
ccggaacagcggcctctgacaccagcacagcaaacccgccgggatcaaagtgtaccagtcggcagcatggctacgaaatgtgggaattgtggacccggctactccacccctctggaggccatgaaaggacccagggaagagatcgtctacctgccctgcatttaccgaaacacaggcactgaggccccagattatctggccactgtggatgttgaccccaagtctccccagtattgccaggtcatccaccggctgcccatgcccaacctgaaggacgagctgcatcactcaggatggaacacctgcagcagctgcttcggtgatagcaccaagtcgcgcaccaagctggtgctgcccagtctcatctcctctcgcatctatgtggtggacgtgggctctgagccccgggccccaaagctgcacaaggcatgtcattgagcccaaggacatccatgccaagtgcgaactggcctttctccacaccagccactgcctggccagcggggaagtgatgatcagctccctgggagacgtcaagggcaatggcaaagggggttttgtgctgctggatggggagacgttcgaggtgaaggggacatgggagagacctgggggtgctgcaccgttgggctatgacttctggtaccagcctcgacacaatgtcatgatcagcactgagtgggcagctcccaatgtcttacgagatggcttcaaccccgctgatgtggaggctggactgtacgggagccacttatatgtatgggactggcagcgccatgagattgtgcagaccctgtctctaaaagatgggcttattcccttggagatccgcttcctgcacaacccagacgctgcccaaggctttgtgggctgcgcactcagctccaccatccagcgcttctacaagaacgagggaggtacatggtcagtggagaaggtgatccaggtgccccccaagaaagtgaagggctggctgctgcccgaaatgccaggcctgatcaccgacatcctgctctccctggacgaccgcttcctctacttcagcaactggctgcatggggacctgaggcatgctggaggacgaggaactaaagtcccagccagagcccctagtggtcaagggaaaacgggtggctggaggccctcagatgatccagctcagcctggatgggaagcgcctctacatcaccacgtcgctgtacagtgcctgggacaagcagttttaccctgatctcatcagggaaggctctgtgatgctgcaggttgatgtagacacagtaaaaggagggctgaagttgaaccccaacttcctggtggacttcgggaaggagccccttggcccagcccttgcccatgagctccgctaccctgggggcgattgtagctctgacatctggatttgaactccaccctcatcacccacactccctattttgggccctcacttccttggggacctggcttcattctgctctctcttggcacccgacccttggcagcatgtaccacacagccaagctgagactgtggcaatgtgttgagtcatatacatttactgaccactgttgcttgttgctcactgtgctgcttttccatgagctcttggaggca

SEQ ID NO: 179638 - DNA, 1530 bp, Homo sapiens
  Payload ID: 15404
  Gene Symbol: SELENBP1
  Gene Name: selenium binding protein 1
  Uniprot ID: Q13228
  ENST ID: ENST00000447402
  CDS Start-End: 60-1292
agcggcctctgacaccagcacagcaaacccgccgggatcaaagtgtaccagtcggcagcatggctacgaaatgtgggaattgtggacccggctactccacccctctggaggccatgaaaggacccagggaagagatcgtctacctgccctgcatttaccgaaacacaggcactgaggccccagattatctggccactgtggatgttgaccccaagtctccccagtattgccaggtcattgagcccaaggacatccatgccaagtgcgaactggcctttctccacaccagccactgcctggccagcggggaagtgatgatcagctccctgggagacgtcaagggcaatggcaaagggggttttgtgctgctggatggggagacgttcgaggtgaaggggacatgggagagacctgggggtgctgcaccgttgggctatgacttctggtaccagcctcgacacaatgtcatgatcagcactgagtgggcagctcccaatgtcttacgagatggcttcaaccccgctgatgtggaggctggactgtacgggagccacttatatgtatgggactggcagcgccatgagattgtgcagaccctgtctctaaaagatgggcttattcccttggagatccgcttcctgcacaacccagacgctgcccaaggctttgtgggctgcgcactcagctccaccatccagcgcttctacaagaacgagggaggtacatggtcagtggagaaggtgatccaggtgccccccaagaaagtgaagggctggctgctgcccgaaatgccaggcctgatcaccgacatcctgctctccctggacgaccgcttcctctacttcagcaactggctgcatggggacctgaggcagtatgacatctctgacccacagagaccccgcctcacaggacagctcttcctcggaggcagcattgttaagggaggccctgtgcaagtgctggaggacgaggaactaaagtcccagccagagcccctagtggtcaagggaaaacgggtggctggaggccctcagatgatccagctcagcctggatgggaagcgcctctacatcaccacgtcgctgtacagtgcctgggacaagcagttttaccctgatctcatcagggaaggctctgtgatgctgcaggttgatgtagacacagtaaaaggagggctgaagttgaaccccaacttcctggtggacttcgggaaggagccccttggcccagcccttgcccatgagctccgctaccctgggggcgattgtagctctgacatctggatttgaactccaccctcatcacccacactccctattttgggccctcacttccttggggacctggcttcattctgctctctcttggcacccgacccttggcagcatgtaccacacagccaagctgagactgtggcaatgtgttgagtcatatacatttactgaccactgttgcttgttgctcactgtgctgcttttccatgagctcttggaggcaccaagaaataaactcgtaaccctgtccttc

SEQ ID NO: 179639 - DNA, 1887 bp, Homo sapiens
  Payload ID: 15404
  Gene Symbol: SELENBP1
  Gene Name: selenium binding protein 1
  ENST ID: ENST00000423070
  CDS Start-End: 135-632
ctgacaccagcacagcaaacccgccgggatcaaagtgtaccagtcggcagcatgggtcatgtgtctccagctcttcccagcacaacctcaccctcctcagggctctgagggggcggagaggacaggccagagcgatgaggctggagtggggacctaggccagccgcactgccgtggcccgctgggatgtgtgctgcagaacgtgcggagggagccttcaccctccagagcgtggcccagccaatgcgccccattgcttccacagctacgaaatgtgggaattgtggacccggctactccacccctctggaggccatgaaaggacccagggaagagatcgtctacctgccctgcatttaccgaaacacaggcactgaggccccagattatctggccactgtggatgttgaccccaagtctccccagtattgccaggtcatccaccggctgcccatgcccaacctgaaggacgagctgcatcactcaggatggaacacctgcagcagctgcttcggtgatagcaccaagtcgcgcaccaagctggtgctgcccagtctcatctcctctcgcatctatgtggtggacgtgggctctgagccccgggccccaaagctgcacaaggcatgtcattgagcccaaggacatccatgccaagtgcgaactggcctttctccacaccagccactgcctggccagcggggaagtgatgatcagctccctgggagacgtcaagggcaatggcaaagggggttttgtgctgctggatggggagacgttcgaggtgaaggggacatgggagagacctgggggtgctgcaccgttgggctatgacttctggtaccagcctcgacacaatgtcatgatcagcactgagtgggcagctcccaatgtcttacgagatggcttcaaccccgctgatgtggaggctggactgtacgggagccacttatatgtatgggactggcagcgccatgagattgtgcagaccctgtctctaaaagatgggcttattcccttggagatccgcttcctgcacaacccagacgctgcccaaggctttgtgggctgcgcactcagctccaccatccagcgcttctacaagaacgagggaggtacatggtcagtggagaaggtgatccaggtgccccccaagaaagtgaagggctggctgctgcccgaaatgccaggcctgatcaccgacatcctgctctccctggacgaccgcttcctctacttcagcaactggctgcatggggacctgaggcagtatgacatctctgacccacagagaccccgcctcacaggacagctcttcctcggaggcagcattgttaagggaggccctgtgcaagtgctggaggacgaggaactaaagtcccagccagagcccctagtggtcaagggaaaacgggtggctggaggccctcagatgatccagctcagcctggatgggaagcgcctctacatcaccacgtcgctgtacagtgcctgggacaagcagttttaccctgatctcatcagggaaggctctgtgatgctgcaggttgatgtagacacagtaaaaggagggctgaagttgaaccccaacttcctggtggacttcgggaaggagccccttggcccagcccttgcccatgagctccgctaccctgggggcgattgtagctctgacatctggatttgaactccaccctcatcacccacactccctattttgggccctcacttccttggggacctggcttcattctgctctctcttggcacccgacccttggcagcatgtaccacacagccaagctgagactgtggcaatgtgttgagtcatatacatttactgaccactgttgcttgttgctcactgtgctgcttttccatgagctcttgga

SEQ ID NO: 179640 - DNA, 2562 bp, Homo sapiens
  Payload ID: 15405
  Gene Symbol: SCLY
  Gene Name: selenocysteine lyase
  ENST ID: ENST00000254663
  CDS Start-End: 143-1504
cccgctgggggctcggcggccctctgaagcgggtggattggctggggtgcttcgctcagccaatccggacgcgcccgggcgtcgcggccccgcctcctccccggcgctctgggcccgtagcgctccgcgggaaggaggctggatgcccggcagcagtggggcggggatggaggcggccgtggcgccggggagggatgcgccggcacccgcggcgagtcagcccagcggctgcgggaaacacaactcgccggagaggaaagtttatatggactataatgcaacgactcccctggagccagaagttatccaggccatgaccaaggccatgtgggaagcctggggaaatcccagcagcccgtattcagcaggaagaaaggccaaggatattataaatgcagctcgggaaagcctcgcgaagatgataggggggaaacctcaagatataatcttcacttccgggggcactgagtcaaataatttagtaatccattctgtggtgaaacatttccacgcaaaccagacctcaaagggacacacaggtgggcaccacagcccagtgaagggggccaagccccatttcattacttcctcggtggaacacgactccatccggctgcccctggagcacctggtggaagaacaagtggcagcggtcacctttgtcccggtgtccaaggtgagcgggcaggcagaggtggacgacatcctcgcggcagtccgcccgaccacacgcctcgtgaccatcatgctggccaacaatgagactggcattgtcatgcctgtccctgaaatcagtcagcgcattaaagccctgaaccaggaacgggtggcagctgggctacctcccatcctcgtgcacacggatgctgcacaggccttggggaagcagcgcgtggatgtggaggacctgggcgtggacttccttacaatcgtggggcacaagttttatggtcccaggattggcgcactttatatacgaggacttggtgaatttacccctctctaccctatgctatttggaggtggacaagaacggaatttcaggccagggacagagaacaccccaatgattgctggccttgggaaggccgcggagctggtgacccagaactgcgaggcttatgaggcccacatgagggacgtccgcgactacctggaagagaggctggaagctgaattcggtcagaagagaatccatctgaatagccagtttccaggcacccagcggcttcccaatacctgtaacttttccatccggggaccccggcttcaaggccacgtggtgcttgcgcagtgccgagtgctgatggccagtgtgggggccgcgtgccactcggaccacggggaccagccgtccccagtgctgctgagctacggtgtccccttcgacgtggccaggaacgcgctccggctcagcgtgggccgcagcaccaccagggccgaggtggacctcgtcgtgcaggacctgaagcaggccgtggcgcagctggaggaccaggcctagcactggggccgccttccccaccccgcttctgggaagcccgtggcagggcacagggttgtccctccagttccctcctgagggctgtgccaggatgactgtctcatgccccctctgcattttgtcctggagtgccagcgagtgtgcacccccagtttccttccctggacccctgcagagctcacagggcccaggacaccaacgccgcataggactgcccacatgggaccgcccacataggaccgcccacataggaccgcccacatgggaccgcccacatgggaccgcccacatgggaccgcccacatagaaccgtcctccagtggtgaagcggaaacacttagctttatccaccctccccactgggaactgggcacgcctgttgtgagtgccctttcctggaaggtgtttttatctggaagatagaatccaagtatttataactcattgtcagccaaatgctatcatgaacgtaggaaacttgatttttttgttttgatcatggcctctacatgcacctttccagagtggtctcttctcaggccctttttagtccctttccaaagctgcccccaccaccctgctcctctggcctcagtgcacagtggcccccagcctcggccaggcctgctctgctcagcgcccaccgcccaccacccctcctgcttccccgagcctgaccctgttccgcccactggcaatcagggctgcgcacttccctgtccacggtccccaggccttcctgtcttgtcccttttgatcattattaactcagggtttcagctccaacctcgctgagttggtgcagctccaggtcattcctggggtgggaatcggatcatccctgactcagcttttaccttaattttatttgcagaggattcttttctcaaaatgctctggcatttggacacacatcacatgtcgatatttgcataggagtcattttcagtggaataacatttttaatgtgtggttttacggttcaaggaactacttgatgattttgaggaaacacttgccagaaactaaattaacgaataaaagatttcagtgcccga

SEQ ID NO: 179641 - DNA, 1774 bp, Homo sapiens
  Payload ID: 15405
  Gene Symbol: SCLY
  Gene Name: selenocysteine lyase
  Uniprot ID: Q96I15
  ENST ID: ENST00000409736
  CDS Start-End: 25-978
atgcccggcagcagtggggcggggatggaggcggccgtggcgccggggagggatgcgccggcacccgcggcgagtcagcccagcggctgcgggaaacacaactcgccggagaggaaagtttatatggactataatgcaacgactcccctggagccagaagttatccaggccatgaccaaggccatgtgggaagcctggggaaatcccagcagcccgtattcagcaggaagaaaggccaaggatattataaatgcagctcgggaaagcctcgcgaagatgataggggggaaacctcaagatataatcttcacttccgggggcactgagtcaaataatttagtaatccattctgtggtgaaacatttccacgcaaaccagacctcaaagggacacacaggtgggcaccacagcccagtgaagggggccaagccccatttcattacttcctcggtggaacacgactccatccggctgcccctggagcacctggtggaagaacaagtggcagcggtcacctttgtcccggtgtccaaggtgagcgggcaggcagaggtggacgacatcctcgcggcagtccgcccgaccacacgcctcgtgaccatcatgctggccaacaatgagactggcattgtcatgcctgtccctgaaatcagtcagcgcattaaagccctgaaccaggaacgggtggcagctgggctacctcccatcctcgtgcacacggatgctgcacaggccttggggaagcagcgcgtggatgtggaggacctgggcgtggacttccttacaatcgtggggcacaagttttatggtcccaggattggcgcactttatatacgaggacttggtgaatttacccctctctaccctatgctatttggaggtggacaagaacggaatttcaggccagggacagagaacaccccaatgattgctggccttgggaaggtgagccctggtgagcttgaggagatgagttgattgctttgtcatcagtgtccccagcggctctagtaggaatctggggctttagggagatcatattcgtgatctcataagcggactgacaagaaaaagcctggaatctgatttatcaacctggagagctgtactttttcagatctgtggattagtggcacttgtttagcatttaaaagggaaaaactccttgtctgtgtctcttctgacatgagaaacagtgatactgttacagcagaggtgaagtgtcaagctgcaggttcaccattcccaaaggcgtcggcagcccccgcaccatcgacgttctgtccccgattggtctgtggggtggccaatccagcacctgccaccagccctccactggggcctgtcctgcttctgcgacagtaaccaggctcaggttttgccgtgcgaaggcagaggtactggttacacctcggcgtctgcaggctgctccctcactgtgcggcctctggtcaaaggccaccaccttcaagcaaccctccatgaaccacagctacattggttcccccatgtcccctgctgtcaccctctatccctgacactgctttatttcccctatctgatgtttctctgtagtgtgttcagatgtatgccccaccttctgcttccccgagagcaggggcttggccatgtcggcctcagtatccccagtacagagaaagggcttagcgcccaggaggccgggccttgggaagagtatgaatggattccctgttacttagaatattcaaaattatattattaacagtgataactgtggctacatttactagaa

SEQ ID NO: 179642 - DNA, 548 bp, Homo sapiens
  Payload ID: 15405
  Gene Symbol: SCLY
  Gene Name: selenocysteine lyase
  ENST ID: ENST00000446202
  CDS Start-End: 36-257
aaggaggctggatgcccggcagcagtggggcggggatggaggcggccgtggcgccggggagggatgcgccggcacccgcggcgagtcagcccagcggctgcgggaaacacaactcgccggagaggaaagtttatatggactataatgcaacgactcccctggagccagaagttatccaggccatgaccaaggccatgtgggaagcctggggaaatcccagcagcccgtattcagcagaaaggccaaggatattataaatgcagctcgggaaagcctcgcgaagatgataggggggaaacctcaagatataatcttcacttccgggggcactgagtcaaataatttagtaatccattctgtggtgaaacatttccacgcaaaccagacctcaaagggacacacaggtgggcaccacagcccagtgaagggggccaagccccatttcattacttcctcggtggaacacgactccatccggctgcccctggagcacctggtggaagaacaagtggcagcggtcacctttgtcccggtgtccaaggtgagcg

SEQ ID NO: 179643 - DNA, 628 bp, Homo sapiens
  Payload ID: 15405
  Gene Symbol: SCLY
  Gene Name: selenocysteine lyase
  ENST ID: ENST00000423324
  CDS Start-End: 13-228
agtggggcggggatggaggcggccgtggcgccggggagggatgcgccggcacccgcggcgagtcagcccagcggctgcgggaaacacaactcgccggagaggaaagtttatatggactataatgcaacgactcccctggagccagaagttatccaggccatgaccaaggccatgtgggaagcctggggaaatcccagcagcccgtattcagcagcctactcaatgtgaagatgatgaagatgaagacctttatgatgatctgcttccacttaattaatacggtcacctttgtcccggtgtccaaggtgagcgggcaggcagaggtggacgacatcctcgcggcagtccgcccgaccacacgcctcgtgaccatcatgctggccaacaatgagactggcattgtcatgcctgtccctgaaatcagtcagcgcattaaagccctgaaccaggaacgggtggcagctgggctacctcccatcctcgtgcacacggatgctgcacaggccttggggaagcagcgcgtggatgtggaggacctgggcgtggacttccttacaatcgtggggcacaagttttatggtcccaggattggcgcactttatatacgaggacttggtgaatttacccc

SEQ ID NO: 179644 - DNA, 660 bp, Homo sapiens
  Payload ID: 15405
  Gene Symbol: SCLY
  Gene Name: selenocysteine lyase
  ENST ID: ENST00000433750
  CDS Start-End: 1-368
agttttatggtcccaggattggcgcactttatatacgaggacttggtgaatttacccctctctaccctatgctatttggaggtggacaagaacggaatttcaggccagggacagagaacaccccaatgattgctggccttgggaaggccgcggagctggtgacccagaactgcgaggcttatgaggcccacatgagggacgtccgcgactacctggaagagaggctggaagctgaattcggtcagaagagaatccatctgaatagccagtttccaggcacccagcggcttcccaatacctgtaacttttccatccggggaccccggcttcaaggtgatggcccctcaccctggtctttccgagtgtgagcacagctccctcggtgcgtggattctggtccgagccagtgactcccactcgccctgccctgagcatgacacagctcgggctgtcagagggccttgctggggttgccaagagcaggctcgggtggctgtgctgtggtccacagggctctcgccgctggcccctcctctccctgacgtggctcattttgctgctgctgggatgtggactgtggcaaactctcgtgtctggcattagcgccaccccaaaagccgtcagggaaggaagcaacattaaattctagacatttgtcta

SEQ ID NO: 179645 - DNA, 568 bp, Homo sapiens
  Payload ID: 15405
  Gene Symbol: SCLY
  Gene Name: selenocysteine lyase
  ENST ID: ENST00000431487
  CDS Start-End: 1-506
tggtggaagaacaagtggcagcggtcacctttgtcccggtgtccaaggtgagcgggcaggcagaggtggacgacatcctcgcggcagtccgcccgaccacacgcctcgtgaccatcatgctggccaacaatgagactggcattgtcatgcctgtccctgaaatcagtcagcgcattaaagccctgaaccaggaacgggtggcagctgggctacctcccatcctcgtgcacacggatgctgcacaggccttggggaagcagcgcgtggatgtggaggacctgggcgtggacttccttacaatcgtggggcacaaggggagagctgcctgccacagagctgagcacgagagtctagcacctgcgctgcctcctaggttggggttccaccctgccccgaaggcttttgtgactctgcgtgtcaaaaggggtggcactcagaggcgccacaaggaagcagcaggactatgcattgcagagcatttctcctgtgtgcccctaagcacttagcatgtatacagagtaggtccttggaaagttcttgttgaataaatgaccaacttttccttcca

SEQ ID NO: 179646 - DNA, 760 bp, Homo sapiens
  Payload ID: 15405
  Gene Symbol: SCLY
  Gene Name: selenocysteine lyase
  ENST ID: ENST00000437134
  CDS Start-End: 1-754
agaacaagtggcagcggtcacctttgtcccggtgtccaaggtgagcgggcaggcagaggtggacgacatcctcgcggcagtccgcccgaccacacgcctcgtgaccatcatgctggccaacaatgagactggcattgtcatgcctgtccctgaaatcagtcagcgcattaaagccctgaaccaggaacgggtggcagctgggctacctcccatcctcgtgcacacggatgctgcacaggccttggggaagcagcgcgtggatgtggaggacctgggcgtggacttccttacaatcgtggggcacaagttttatggtcccaggattggcgcactttatatacgaggacttggtgaatttacccctctctaccctatgctatttggaggtggacaagaacggaatttcaggccagggacagagaacaccccaatgattgctggccttgggaaggctgaattcggtcagaagagaatccatctgaatagccagtttccaggcacccagcggcttcccaatacctgtaacttttccatccggggaccccggcttcaaggccacgtggtgcttgcgcagtgccgagtgctgatggccagtgtgggggccgcgtgccactcggaccacggggaccaaggattcttttctcaaaatgctctggcatttggacacacatcacatgtcgatatttgcataggagtcattttcagtggaataacatttttaatgtgtggttttacggttcaaggaactacttgatgattt

SEQ ID NO: 179647 - DNA, 807 bp, Homo sapiens
  Payload ID: 15405
  Gene Symbol: SCLY
  Gene Name: selenocysteine lyase
  ENST ID: ENST00000416757
  CDS Start-End: 1-456
gcacccgcggcgagtcagcccagcggctgcgggaaacacaactcgccggagaggaaagtttatatggactataatgcaacgactcccctggagccagaagttatccaggccatgaccaaggccatgtgggaagcctggggaaatcccagcagcccgtattcagcaggaagaaaggccaaggatattataaatgcagctcgggaaagcctcgcgaagatgataggggggaaacctcaagatataatcttcacttccgggggcactgagtcaaataatttagtaatccattctgtggtgaaacatttccacgcaaaccagacctcaaagggacacacaggtgggcaccacagcccagtgaagggggccaagccccatttcattacttcctcggtggaacacgactccatccggctgcccctggagcacctggtggaagaacaagtggcaggtgagtgagtgcagggtggccctgggaccagcctgctgagctccagctgcgaggcgggaagtggcctgcgagcagagcccgggatccgctgcagagatgtagattcagtgtgccactcactgtaactcactggttctgatgaggaggcaggccctggcaccttggtgaatagttgcccctcactgcactgggctccctggctgcccctctcggtgcagaggccagctgccacaagggggttggcaagtgtggccaaactttcccttaggaagttcattgagaatgaatatgtagaactagccatttgtataactgagtgatatttgaaacttgcatgtaataaatatttaacctttaaa

SEQ ID NO: 179648 - DNA, 415 bp, Homo sapiens
  Payload ID: 15405
  Gene Symbol: SCLY
  Gene Name: selenocysteine lyase
  ENST ID: ENST00000440143
  CDS Start-End: 1-179
tgggctacctcccatcctcgtgcacacggatgctgcacaggccttggggaagcagcgcgtggatgtggaggacctgggcgtggacttccttacaatcgtggggcacaaggacagagaacaccccaatgattgctggccttgggaaggtgagccctggtgagcttgaggagatgagttgattgctttgtcatcagtgtccccagcggctctagtaggaatctggggctttagggagatcatattcgtgatctcataagcggactgacaagaaaaagcctggaatctgatttatcaacctggagagctgtactttttcagatctgtggattagtggcacttgtttagcatttaaaagggaaaaactccttgtctgtgtctcttctgacatgagaaacagtgatactgttacagcaga

SEQ ID NO: 179649 - DNA, 968 bp, Homo sapiens
  Payload ID: 15405
  Gene Symbol: SCLY
  Gene Name: selenocysteine lyase
  ENST ID: ENST00000443532
  CDS Start-End: 1-330
gatgcgccggcacccgcggcgagtcagcccagcggctgcgggaaacacaactcgccggagaggtgcgcgcctttagggcagggctggggagcggccggcgcctgtcgccgattgtcccgcgcgggaggacgaagggggctcccggcctgtggccgctctcgcgtggggcgtcccgcgcggggatgtccgcgaggtcggcctaagtcagggatgcgagcttcaaggaggagcgggtgcgagctgtggccccgcaagggcccacggagaggaaagtttatatggactataatgcaacgactcccctggagccagaagttatccaggccatgaccaaggccatgtgggaagcctggggaaatcccagcagcccgtattcagcaggaagaaaggccaaggatattataaatgcagctcgggaaagcctcgcgaagatgataggggggaaacctcaagatataatcttcacttccgggggcactgagtcaaataatttagtaatccattctgtggtgaaacatttccacgcaaaccagacctcaaagggacacacaggtgggcaccacagcccagtgaagggggccaagccccatttcattacttcctcggtggaacacgactccatccggctgcccctggagcacctggtggaagaacaagtggcagcggtcacctttgtcccggtgtccaaggtgagcgggcaggcagaggtggacgacatcctcgcggcagtccgcccgaccacacgcctcgtgaccatcatgctggccaacaatgagactggcattgtcatgcctgtccctgaaatcagtcagcgcattaaagccctgaaccaggaacgggtggcagctgggctacctcccatcctcgtgcacacggatgctgcacaggccttggggaagcagcgcgtggatgtggaggacctgggcgtggacttccttacaatcgtggggcacaaggtaagtctgcag

SEQ ID NO: 179650 - DNA, 1918 bp, Homo sapiens
  Payload ID: 15405
  Gene Symbol: SCLY
  Gene Name: selenocysteine lyase
  ENST ID: ENST00000450965
  CDS Start-End: 1-726
gtgagcgggcaggcagaggtggacgacatcctcgcggcagtccgcccgaccacacgcctcgtgaccatcatgctggccaacaatgagactggcattgtcatgcctgtccctgaaatcagtcagcgcattaaagccctgaaccaggaacgggtggcagctgggctacctcccatcctcgtgcacacggatgctgcacaggccttggggaagcagcgcgtggatgtggaggacctgggcgtggacttccttacaatcgtggggcacaagttttatggtcccaggattggcgcactttatatacgaggacttggtgaatttacccctctctaccctatgctatttggaggtggacaagaacggaatttcaggccagggacagagaacaccccaatgattgctggccttgggaaggccgcggagctggtgacccagaactgcgaggcttatgaggcccacatgagggacgtccgcgactacctggaagagaggctggaagctgaattcggtcagaagagaatccatctgaatagccagtttccaggcacccagcggcttcccaatacctgtaacttttccatccggggaccccggcttcaaggccacgtggtgcttgcgcagtgccgagtgctgatggccagtgtgggggccgcgtgccactcggaccacggggaccacagcagctgcagctcggtctcgccctccccaggccgtccccagtgctgctgagctacggtgtccccttcgacgtggccaggaacgcgctccggctcagcgtgggccgcagcaccaccagggccgaggtggacctcgtcgtgcaggacctgaagcaggccgtggcgcagctggaggaccaggcctagcactggggccgccttccccaccccgcttctgggaagcccgtggcagggcacagggttgtccctccagttccctcctgagggctgtgccaggatgactgtctcatgccccctctgcattttgtcctggagtgccagcgagtgtgcacccccagtttccttccctggacccctgcagagctcacagggcccaggacaccaacgccgcataggactgcccacatgggaccgcccacataggaccgcccacataggaccgcccacatgggaccgcccacatgggaccgcccacatgggaccgcccacatagaaccgtcctccagtggtgaagcggaaacacttagctttatccaccctccccactgggaactgggcacgcctgttgtgagtgccctttcctggaaggtgtttttatctggaagatagaatccaagtatttataactcattgtcagccaaatgctatcatgaacgtaggaaacttgatttttttgttttgatcatggcctctacatgcacctttccagagtggtctcttctcaggccctttttagtccctttccaaagctgcccccaccaccctgctcctctggcctcagtgcacagtggcccccagcctcggccaggcctgctctgctcagcgcccaccgcccaccacccctcctgcttccccgagcctgaccctgttccgcccactggcaatcagggctgcgcacttccctgtccacggtccccaggccttcctgtcttgtcccttttgatcattattaactcagggtttcagctccaacctcgctgagttggtgcagctccaggtcattcctggggtgggaatcggatcatccctgactcagcttttaccttaattttatttgcagaggattcttttctcaaaatgctctggcatttggacacacatcacatgtcgatatttgcataggagtcattttcagtggaataacatttttaatgtgtggttttacggttcaaggaactacttgatgattttgaggaaacacttgccagaaactaaattaacgaataaaagatttcagtgcccga

SEQ ID NO: 179651 - DNA, 542 bp, Homo sapiens
  Payload ID: 15405
  Gene Symbol: SCLY
  Gene Name: selenocysteine lyase
  ENST ID: ENST00000413463
  CDS Start-End: 31-542
gcccgtagcgctccgcgggaaggaggctggatgcccggcagcagtggggcggggatggaggcggccgtggcgccggggagggatgcgccggcacccgcggcgagtcagcccagcggctgcgggaaacacaactcgccggagaggaaagtttatatggactataatgcaacgactcccctggagccagaagttatccaggccatgaccaaggccatgtgggaagcctggggaaatcccagcagcccgtattcagcagcggtcacctttgtcccggtgtccaaggtgagcgggcaggcagaggtggacgacatcctcgcggcagtccgcccgaccacacgcctcgtgaccatcatgctggccaacaatgagactggcattgtcatgcctgtccctgaaatcagtcagcgcattaaagccctgaaccaggaacgggtggcagctgggctacctcccatcctcgtgcacacggatgctgcacaggccttggggaagcagcgcgtggatgtggaggacctgggcgtggacttccttacaatcgtggg

SEQ ID NO: 179652 - DNA, 585 bp, Homo sapiens
  Payload ID: 15405
  Gene Symbol: SCLY
  Gene Name: selenocysteine lyase
  ENST ID: ENST00000412508
  CDS Start-End: 1-585
gatggaggcggccgtggcgccggggagggatgcgccggcacccgcggcgagtcagcccagcggctgcgggaaacacaactcgccggagaggaaagtttatatggactataatgcaacgactcccctggagccagaagttatccaggccatgaccaaggccatgtgggaagcctggggaaatcccagcagcccgtattcagcaggaagaaaggccaaggatattataaatgcagctcgggaaagcctcgcgaagatgataggggggaaacctcaagatataatcttcacttccgggggcactgaggccgcggagctggtgacccagaactgcgaggcttatgaggcccacatgagggacgtccgcgactacctggaagagaggctggaagctgaattcggtcagaagagaatccatctgaatagccagtttccaggcacccagcggcttcccaatacctgtaacttttccatccggggaccccggcttcaaggccacgtggtgcttgcgcagtgccgagtgctgatggccagtgtgggggccgcgtgccactcggaccacggggaccagccgtccccagtgctgct

SEQ ID NO: 179653 - DNA, 2387 bp, Homo sapiens
  Payload ID: 15406
  Gene Symbol: SEPHS1
  Gene Name: selenophosphate synthetase 1
  Uniprot ID: P49903
  ENST ID: ENST00000378614
  CDS Start-End: 360-1325
cagcagccagggccgcctcttaaagggaggtggccggccttaaaggacccccgcgcgcccagccggcgggagcgcggcggcccggctcccgcagggccgcgccgaggcaggcgagcccccgcggcgcccaggcgcgggcccgggcccccgccgccgccgccgccgccgggcgcggcatttttattcaggcgacgcttaagggagcccggccgcgcccggtgcattgtgggagcggcccgcggcccgttttcgggaggaggcggagggcgcaaagcgagccggtggatccataaagaacccagccaacccgcagagggaggggaggggctgagctgtgaggagagcggggcccaagaaccatgtctacgcgggagtcctttaacccggaaagttacgaattggacaaaagcttccggctaaccagattcactgaactgaagggcacaggctgcaaagtgccccaagatgtcctgcaaaaattgctggaatctttacaggagaaccacttccaagaagatgagcagtttctgggagccgttatgccaaggcttggcattggaatggatacttgtgtcattcctttgaggcacggtgggctttccttggttcaaaccacagattacatttacccgatcgtagacgacccttacatgatgggcaggatagcgtgtgccaatgtcctcagtgacctctatgcaatgggggtcacggaatgtgacaatatgctgatgctccttggagtcagtaataaaatgaccgacagggaaagggataaagtgatgcctctgattatccaaggttttaaagacgcagctgaggaagcaggaacatctgtaacaggcggccaaacagtactaaacccctggattgtcctgggaggagtggctaccactgtctgccaacccaatgaatttatcatgccagacaatgcagtgccaggggacgtgctggtgctgacaaaacccctggggacacaggtggcagtggctgtgcaccagtggctggatatccctgagaaatggaataagattaaactagtggtcacccaagaagatgtagagctggcctaccaggaggcgatgatgaacatggcgaggctcaacaggacaggcggccttctgatctgtttaccacgtgagcaagcagctcggttctgtgcagagataaagtcccccaaatatggtgaaggccaccaagcatggattattgggattgtagagaagggcaaccgcacagccagaatcatagacaaaccccggatcatcgaggtcgcaccacaagtggccactcaaaatgtgaatcccacacccggggccacctcttaatctagacagaaatagctgtttggttttgtttttaaatagatctatttcccttatcacttcaattaaagactataaacaacaaaaatctcattgtgtctacacatcggggtgaccttaggtcggtttgtaagtggatacaattaataaaataaaatccattgcctttttttcctgttacattaactgaagatgcacctaatcttgaggcagcttctgagttgagaattatattgttatccaatactgttgattcattttgaatctttagacacttatctcttgccgcataggctttttaaaggtgctttcacatagcacaggcattacccgtagtcgtgtcaaatagcagttggtgtcttcattttatgtatatttatcatataagtctgatttttttttttaagcgtcttgaatggttttctggagagacagcattggtaagtggcacatgacggtatcccagtcataagagggttgcatgattcctttgagtgtttgatttgaaaagcctagtcttgtctctcaagagcatctcggacccagaacattctccagtagtgcattcagttcaacacagcaagtgcttcattgcatggaaaacactttgaagacaaaaaagaaatcttatttctttttttgtagccttcctgatatttacagtaataccattaactgttttatcgatagcaaaaaaggatactttttgcaatgttattagatgttctatagtgctacaaggaattgccttccgaatggaggttcatgtataatactcatttacaattcaatatataattacacaaataatttttaaatataatcaatagtaaagactgttctgtggatggtagtgtttaatacattttctattttgtacagtgatttcaggccttttgttttcttaaaatcagcagctgtttggcctaattcttagcattattttgtcctttgcgccagtacttttttgtgcacgctttttgtgatctgtgttaaaaacctgcattgccaacattgcagctcgaacttaaacttgttattcaaataaatatttaattttttaaa

SEQ ID NO: 179654 - DNA, 3273 bp, Homo sapiens
  Payload ID: 15406
  Gene Symbol: SEPHS1
  Gene Name: selenophosphate synthetase 1
  Uniprot ID: P49903
  ENST ID: ENST00000327347
  CDS Start-End: 377-1555
ggccgcacgccgccacccagcagccagggccgcctcttaaagggaggtggccggccttaaaggacccccgcgcgcccagccggcgggagcgcggcggcccggctcccgcagggccgcgccgaggcaggcgagcccccgcggcgcccaggcgcgggcccgggcccccgccgccgccgccgccgccgggcgcggcatttttattcaggcgacgcttaagggagcccggccgcgcccggtgcattgtgggagcggcccgcggcccgttttcgggaggaggcggagggcgcaaagcgagccggtggatccataaagaacccagccaacccgcagagggaggggaggggctgagctgtgaggagagcggggcccaagaaccatgtctacgcgggagtcctttaacccggaaagttacgaattggacaaaagcttccggctaaccagattcactgaactgaagggcacaggctgcaaagtgccccaagatgtcctgcaaaaattgctggaatctttacaggagaaccacttccaagaagatgagcagtttctgggagccgttatgccaaggcttggcattggaatggatacttgtgtcattcctttgaggcacggtgggctttccttggttcaaaccacagattacatttacccgatcgtagacgacccttacatgatgggcaggatagcgtgtgccaatgtcctcagtgacctctatgcaatgggggtcacggaatgtgacaatatgctgatgctccttggagtcagtaataaaatgaccgacagggaaagggataaagtgatgcctctgattatccaaggttttaaagacgcagctgaggaagcaggaacatctgtaacaggcggccaaacagtactaaacccctggattgtcctgggaggagtggctaccactgtctgccaacccaatgaatttatcatgccagacaatgcagtgccaggggacgtgctggtgctgacaaaacccctggggacacaggtggcagtggctgtgcaccagtggctggatatccctgagaaatggaataagattaaactagtggtcacccaagaagatgtagagctggcctaccaggaggcgatgatgaacatggcgaggctcaacaggacagctgcaggactcatgcacacgttcaatgcccacgccgccactgacatcacgggcttcgggattttgggccatgcgcagaacctggccaagcagcagaggaacgaggtgtcgtttgtaattcacaacctcccggtgctggccaagatggctgcggtgagcaaggcctgcggaaacatgttcggcctcatgcacgggacctgcccggagacttcaggcggccttctgatctgtttaccacgtgagcaagcagctcggttctgtgcagagataaagtcccccaaatatggtgaaggccaccaagcatggattattgggattgtagagaagggcaaccgcacagccagaatcatagacaaaccccggatcatcgaggtcgcaccacaagtggccactcaaaatgtgaatcccacacccggggccacctcttaatctagacagaaatagctgtttggttttgtttttaaatagatctatttcccttatcacttcaattaaagactataaacaacaaaaatctcattgtgtctacacatcggggtgaccttaggtcggtttgtaagtggatacaattaataaaataaaatccattgcctttttttcctgttacattaactgaagatgcacctaatcttgaggcagcttctgagttgagaattatattgttatccaatactgttgattcattttgaatctttagacacttatctcttgccgcataggctttttaaaggtgctttcacatagcacaggcattacccgtagtcgtgtcaaatagcagttggtgtcttcattttatgtatatttatcatataagtctgatttttttttttaagcgtcttgaatggttttctggagagacagcattggtaagtggcacatgacggtatcccagtcataagagggttgcatgattcctttgagtgtttgatttgaaaagcctagtcttgtctctcaagagcatctcggacccagaacattctccagtagtgcattcagttcaacacagcaagtgcttcattgcatggaaaacactttgaagacaaaaaagaaatcttatttctttttttgtagccttcctgatatttacagtaataccattaactgttttatcgatagcaaaaaaggatactttttgcaatgttattagatgttctatagtgctacaaggaattgccttccgaatggaggttcatgtataatactcatttacaattcaatatataattacacaaataatttttaaatataatcaatagtaaagactgttctgtggatggtagtgtttaatacattttctattttgtacagtgatttcaggccttttgttttcttaaaatcagcagctgtttggcctaattcttagcattattttgtcctttgcgccagtacttttttgtgcacgctttttgtgatctgtgttaaaaacctgcattgccaacattgcagctcgaacttaaacttgttattcaaataaatatttaattttttaaattgctcttgtataatcagatgccccttttagtattattttagaagcgttgggagggttttgcctaaagtacaatttatcgggaaaaactagattttagttttataaaacttttaagtctttcatgggacctatattttcttgaattaaattttgtagttctagaataaataggcaatctaaaaaggtgttctctgtgttatgtaaagtggaggcttccttatattttaacctactaagcaatgaggagggattcctgtcattaagcacaagggcgctggatcctcaagtgcccatcttcgtgagagaaaaagcagcacatcctgcccatttctggtgctttctgctcacaggcaccaaagctgcacatgtaaactgacttcttgccaaaggaaatgacccctgggaagttcaagctcctggaagaggctttaactcggacgcgccctcctccaggaaccagtgggcagggcagccttcatgcatgtgtaactggacctccagccataagcatggtgtgcagtatggaagagcctgctacggaactgaaagtgattggacattttataggaattgatagagatgttggtcctcaaaagctacaaaccagtggtctgcaaaataaagtgtgttggaaacctctagtgagataaaccta

SEQ ID NO: 179655 - DNA, 383 bp, Homo sapiens
  Payload ID: 15406
  Gene Symbol: SEPHS1
  Gene Name: selenophosphate synthetase 1
  ENST ID: ENST00000425947
  CDS Start-End: 109-383
cggagctgcttttcagccctaggggcgtgctcaagaatcccccgttactctgatcaaaggacttgctaagtttagaaataaagcgctttacaaatcaaatgcattggaatggatacttgtgtcattcctttgaggcacggtgggctttccttggttcaaaccacagattacatttacccgatcgtagacgacccttacatgatgggcaggatagcgtgtgccaatgtcctcagtgacctctatgcaatgggggtcacggaatgtgacaatatgctgatgctccttggagtcagtaataaaatgaccgacagggaaagggataaagtgatgcctctgattatccaaggttttaaagacgcagctgaggaagcaggaacatctgt

SEQ ID NO: 179656 - DNA, 660 bp, Homo sapiens
  Payload ID: 15406
  Gene Symbol: SEPHS1
  Gene Name: selenophosphate synthetase 1
  ENST ID: ENST00000413411
  CDS Start-End: 161-660
cgggttccttgctcccctccccggccgcctccgacgcgggcgtcctggagagcgcgccccattgtgcggggccggcggggaggtggatccataaagaacccagccaacccgcagagggaggggaggggctgagctgtgaggagagcggggcccaagaaccatgtctacgcgggagtcctttaacccggaaagttacgaattggacaaaagcttccggctaaccagattcactgaactgaagggcacaggctgcaaagtgccccaagatgtcctgcaaaaattgctggaatctttacaggagaaccacttccaagaagatgagcagtttctgggagccgttatgccaaggcttggcattggaatggatacttgtgtcattcctttgaggcacggtgggctttccttggttcaaaccacagattacatttacccgatcgtagacgacccttacatgatgggcaggatagcgtgtgccaatgtcctcagtgacctctatgcaatgggggtcacggaatgtgacaatatgctgatgctccttggagtcagtaataaaatgaccgacagggaaagggataaagtgatgcctctgattatccaaggttttaaagacgcagctgaggaagcaggaacatctgtaacaggcggccaaacagtactaaa

SEQ ID NO: 179657 - DNA, 2988 bp, Homo sapiens
  Payload ID: 15406
  Gene Symbol: SEPHS1
  Gene Name: selenophosphate synthetase 1
  Uniprot ID: P49903
  ENST ID: ENST00000545675
  CDS Start-End: 308-1285
gggccgcacgccgccacccagcagccagggccgcctcttaaagggaggtggccggccttaaaggacccccgcgcgcccagccggcgggagcgcggcggcccggctcccgcagggccgcgccgaggcaggcgagcccccgcggcgcccaggcgcgggcccgggcccccgccgccgccgccgccgccgggcgcggcatttttattcaggcgacgcttaagggagcccggccgcgcccggtgcattgtgggagcggcccgcggcccgttttcgggaggaggcggagggcgcaaagcgagccggcattggaatggatacttgtgtcattcctttgaggcacggtgggctttccttggttcaaaccacagattacatttacccgatcgtagacgacccttacatgatgggcaggatagcgtgtgccaatgtcctcagtgacctctatgcaatgggggtcacggaatgtgacaatatgctgatgctccttggagtcagtaataaaatgaccgacagggaaagggataaagtgatgcctctgattatccaaggttttaaagacgcagctgaggaagcaggaacatctgtaacaggcggccaaacagtactaaacccctggattgtcctgggaggagtggctaccactgtctgccaacccaatgaatttatcatgccagacaatgcagtgccaggggacgtgctggtgctgacaaaacccctggggacacaggtggcagtggctgtgcaccagtggctggatatccctgagaaatggaataagattaaactagtggtcacccaagaagatgtagagctggcctaccaggaggcgatgatgaacatggcgaggctcaacaggacagctgcaggactcatgcacacgttcaatgcccacgccgccactgacatcacgggcttcgggattttgggccatgcgcagaacctggccaagcagcagaggaacgaggtgtcgtttgtaattcacaacctcccggtgctggccaagatggctgcggtgagcaaggcctgcggaaacatgttcggcctcatgcacgggacctgcccggagacttcaggcggccttctgatctgtttaccacgtgagcaagcagctcggttctgtgcagagataaagtcccccaaatatggtgaaggccaccaagcatggattattgggattgtagagaagggcaaccgcacagccagaatcatagacaaaccccggatcatcgaggtcgcaccacaagtggccactcaaaatgtgaatcccacacccggggccacctcttaatctagacagaaatagctgtttggttttgtttttaaatagatctatttcccttatcacttcaattaaagactataaacaacaaaaatctcattgtgtctacacatcggggtgaccttaggtcggtttgtaagtggatacaattaataaaataaaatccattgcctttttttcctgttacattaactgaagatgcacctaatcttgaggcagcttctgagttgagaattatattgttatccaatactgttgattcattttgaatctttagacacttatctcttgccgcataggctttttaaaggtgctttcacatagcacaggcattacccgtagtcgtgtcaaatagcagttggtgtcttcattttatgtatatttatcatataagtctgatttttttttttaagcgtcttgaatggttttctggagagacagcattggtaagtggcacatgacggtatcccagtcataagagggttgcatgattcctttgagtgtttgatttgaaaagcctagtcttgtctctcaagagcatctcggacccagaacattctccagtagtgcattcagttcaacacagcaagtgcttcattgcatggaaaacactttgaagacaaaaaagaaatcttatttctttttttgtagccttcctgatatttacagtaataccattaactgttttatcgatagcaaaaaaggatactttttgcaatgttattagatgttctatagtgctacaaggaattgccttccgaatggaggttcatgtataatactcatttacaattcaatatataattacacaaataatttttaaatataatcaatagtaaagactgttctgtggatggtagtgtttaatacattttctattttgtacagtgatttcaggccttttgttttcttaaaatcagcagctgtttggcctaattcttagcattattttgtcctttgcgccagtacttttttgtgcacgctttttgtgatctgtgttaaaaacctgcattgccaacattgcagctcgaacttaaacttgttattcaaataaatatttaattttttaaattgctcttgtataatcagatgccccttttagtattattttagaagcgttgggagggttttgcctaaagtacaatttatcgggaaaaactagattttagttttataaaacttttaagtctttcatgggacctatattttcttgaattaaattttgtagttctagaataaataggcaatctaaaaaggtgttctctgtgttatgtaaagtggaggcttccttatattttaacctactaagcaatgaggagggattcctgtcattaagcacaagggcgctggatcctcaagtgcccatcttcgtgagagaaaaagcagcacatcctgcccatttctggtgctttctgctcacaggcaccaaagctgcacatgtaaactgacttcttgccaaaggaaatgacccctgggaagttcaagctcctggaagaggctttaactcggacgcgccctcctccaggaaccagtgggcagggcagccttcatgcatgtgtaactggacctccagccataagcatggtgtgcagtatggaagagcctgctacggaactgaaagtgattggacattttataggaattgatagagatgttggtcctcaaaagctacaaaccagtggtctgcaaaataaagtgtgttggaaacctct

SEQ ID NO: 179658 - DNA, 1801 bp, Homo sapiens
  Payload ID: 15407
  Gene Symbol: SEPHS2
  Gene Name: selenophosphate synthetase 2
  ENST ID: ENST00000478753
  CDS Start-End: 455-1801
aatcctgccgatcatgaggtttgccgagtgaccaatcttccctcgtctacaatttgctggacttggaaaagtgactggaagggagcagagttccgtcagccactgccaagaaaccatttaaattactaagagagcgaaggaaagcacgtgacgttctgcaatcccgttgcaagcggttttgcaagccggaggttgttgcaccttttagagtctaggaagcccgcctctcggtggcggagtcgtcattggatgttgcggctgtcaatcgccagggctataaataagggagtccggcggctcctctatcaggaagattgtgcatgccgtgggtctgacggcttgagtagcgctagggagaatccctgcaggtaatatttgacttttgcttcatattaatctgagtggaaaataaaagggccctcttctcctctcgcttccctgccgggcaggcgccatggcggaagcctcggcgacgggcgcctgcggagaggcgatggcagcggcggaaggctcctcgggcccggcgggcttgactctgggccggagcttctcgaactaccggcccttcgagccccaggcgttgggcctcagcccgagctggcggctgacgggcttctccggcatgaagggctgaggctgcaaggtcccgcaggaggcgctgctcaaactcctggcgggactgacgcggccggacgtgcggcccccgctgggccggggcctggtgggtggccaggaagaggcgtcccaggaagccggcctgccggcaggagcgggccccagccccacctttccagccctgggcatcgggatggactcctgcgtcatccccctgaggcacgggggcctgtcactggtgcagaccacggacttcttttaccccttggtagaagatccctacatgatggggcgcatagcttgtgccaacgtgctgagtgacctctacgccatggggattactgagtgtgacaacatgttgatgttactcagcgtcagccagagtatgagtgaggaggaacgcgaaaaggtaacgccactcatggtcaaaggctttcgggatgcggctgaggaaggagggacggcagtgaccggtgggcaaacggtggtcaacccttggattataatcggtggagttgccactgtagtatgccaaccaaatgagttcataatgccggacagcgccgtcgttggggacgtgctggtgttaaccaaaccgttaggaacccaggttgctgtcaatgcccaccaatggctggataatcctgaaagatggaataaagtaaagatggtggtctccagagaagaggtggagctggcctatcaggaagccatgttcaatatggctaccctcaacagaactgctgcaggtttaatgcacacatttaatgcccatgcggccacagatatcacaggctttggcattctaggacactcccagaaccttgcaaaacaacaaagaaatgaagtgtcctttgttattcataatctgccaataattgccaagatggctgccgtcagcaaggccagtggacggtttgggcttcttcaaggaacctcagctgaaacctctgggggattactgatttgtctgccaagagaacaggcggctcgcttttgttctgaaatcaaatcctccaagtacggagagggtcaccaagcgtggatcgttggcattgtggaaaagggaaaccgaacggcccggatcattgacaagccgcgagttattgaagtcctgcctcgtggggccacagctgctgttcttgctcctgacagttcaaatgcctcctctgagcctagctcgtga

SEQ ID NO: 179659 - DNA, 611 bp, Homo sapiens
  Payload ID: 15408
  Gene Symbol:
  Gene Name: selenoprotein K [Source:EntrezGene
  Acc:58515]
  ENST ID: ENST00000488746
  CDS Start-End: 78-296
ggcggggagcagagggagatacagaaaccgacaggggccaggcgcccggtggctccgaagcggggaagtgggacaagatggtttacatctcgaacggacaagtgttggacagccggagtcagtctccatggagattatctttgataacagatttcttctggggaatagctgagtttgtggttttgtttttcaaaactctgcttcagcaagatgtgaaaaaaagaagaagctatggaaactcatctgattccagatatgatgatggaagagggaaaccctccccgaagaatgggtagaatcaatcatctgcgtggccctagtccccctccaatggctggtggatgaggaaggtaaatgtctgctctaagaagcagacaaccggacatgcgcattcatagcagaaggaaaccatcaagaagtggaaggctgaccatgatgagcagtagatgaatgtgtatgtctaaacaaggactgctctgtgtcctcacagatgaatgaggtcatgctgggaattccctctgcagggaactggcctgactgacatgcagttccataaatgcagatgtttgtctcattacctttttgtatagtttattaaagtattaatatag

SEQ ID NO: 179660 - DNA, 1633 bp, Homo sapiens
  Payload ID: 15408
  Gene Symbol:
  Gene Name: selenoprotein K [Source:EntrezGene
  Acc:58515]
  ENST ID: ENST00000495461
  CDS Start-End: 201-485
aagtcgcagatgtgacgatgcaaaaacgcccgtcgggggcgcgtctctttcagcagccaatgggctctgcccaccttcgtcctcgtcagcattttgtctaatcgcggcctgtgacgctcgaagggcggggagcagagggagatacagaaaccgacaggggccaggcgcccggtggctccgaagcggggaagtgggacaagatggtttacatctcgaacggacaagtgttggacagccggagtcagtctccatggagattatctttgataacagatttcttctggggaatagctgagtttgtggttttgtttttcaaaactctgcttcagcaagatgtgaaaaaaagaagaagctatggaaactcatctgattccagatatgatgatggaagagggccaccaggaaaccctccccgaagaatgggtagaatcaatcatctgcgtggccctagtccccctccaatggctggtggatgaggaaggtaaatgtctgctctaagaagcagacaaccggacatgcgcattcatagcagaaggaaaccatcaagaagtggaaggctgaccatgatgagcagtagatgaatgtgtatgtctaaacaaggactgctctgtgtcctcacagatgaatgaggtcatgctgggaattccctctgcagggaactggcctgactgacatgcagttccataaatgcagatgtttgtctcattacctttttgtatagtttattaaagtattaatatagttttaataagtaaatatttttaggttgcagaatggactcctcatctttatattcacgaaaaagcaatctgaagaaaacaaataaaagcctgtgtatttagcactgttagtgtcaccttttcaacttctgaaacactgttcattgttaactttttctcatttataaatcactgtatttattttagtagtatgcatagcatatctgtgctcttgaattaatttttatctttaacatatttgtctcatcaatctttaatacactgtgtctaatttgctaccaaatgtaattatcagggtatttataaaaccatagctaacaaaactgagctacaaaatgaaaatttactaaatagtttttaaaatcatggacttcagcctggcgcggtggctcatgcctgtaatcccagcactgtgggaggctgaggcgggcagatcgcctaagttcacgagtttgagaccagcctgcagcatgacgaaacctaaaataacaaaaattagccaggcgtggtagagtgcacctgtaatccctgctactcaggaggcggaggcaggagaatcgcttcaacccgggaggcggaggttgctgtgagcatgccactgcactcctgcctaggcaacagagtgagaccctgtctcaaaaaaataaataaaaccatgggcttccatgctatcttgacaaatttgcactctatagcatcactcaaaatactgcctattggctttaaactccatctgaatactgataactttcacattctttcactagagtggaagctctgagactaggaattttgttgtctttaccccagtcctttgaatagtgactacatgtaagatagtcatgtagtatttattggaaataaatatttattggaaaaacgaaaacagataa

SEQ ID NO: 179661 - DNA, 814 bp, Homo sapiens
  Payload ID: 15408
  Gene Symbol:
  Gene Name: selenoprotein K [Source:EntrezGene
  Acc:58515]
  ENST ID: ENST00000541726
  CDS Start-End: 175-456
cgcccgtcgggggcgcgtctctttcagcagccaatgggctctgcccaccttcgtcctcgtcagcattttgtctaatcgcggcctgtgacgctcgaagggcggggagcagagggagatacagaaaccgacaggggccaggcgcccggtggctccgaagcggggaagtgggacaagatggtttacatctcgaacggacaagtgttggacagccggagtcagtctccatggagattatctttgataacagatttcttctggggaatagctgagtttgtggttttgtttttcaaaactctgcttcagcaagatgtgaaaaaaagaagaagctatggaaactcatctgattccagatatgatgatggaagagggccaccaggaaaccctccccgaagaatgggtagaatcaatcatctgcgtggccctagtccccctccaatggctggtggaggaaggtaaatgtctgctctaagaagcagacaaccggacatgcgcattcatagcagaaggaaaccatcaagaagtggaaggctgaccatgatgagcagtagatgaatgtgtatgtctaaacaaggactgctctgtgtcctcacagatgaatgaggtcatgctgggaattccctctgcagggaactggcctgactgacatgcagttccataaatgcagatgtttgtctcattacctttttgtatagtttattaaagtattaatatagttttaataagtaaatatttttaggttgcagaatggactcctcatctttatattcacgaaaaagcaatctgaagaaaacaaataaaagcctgtgtatttagc

SEQ ID NO: 179662 - DNA, 694 bp, Homo sapiens
  Payload ID: 15409
  Gene Symbol:
  Gene Name: selenoprotein M [Source:EntrezGene
  Acc:140606]
  ENST ID: ENST00000400299
  CDS Start-End: 64-501
agacgtggcgcagcgactcggaggttcgcctccagcttgcgcatcatctgcggccgggtcccgatgagcctcctgttgcctccgctggcgctgctgctgcttctcgcggcgcttgtggccccagccacagccgccactgcctaccggccggactggaaccgtctgagcggcctaacccgcgcccgggtagagacctgcgggggatgacagctgaaccgcctaaaggaggtgaaggctttcgtcacgcaggacattccattctatcacaacctggtgatgaaacacctccctggggccgaccctgagctcgtgctgctgggccgccgctacgaggaactagagcgcatcccactcagtgaaatgacccgcgaagagatcaatgcgctagtgcaggagctcggcttctaccgcaaggcggcgcccgacgcgcaggtgccccccgagtacgtgtgggcgcccgcgaagcccccagaggaaacttcggaccacgctgacctgtaggtccgggggcgcggcggagctgggacctacctgcctgagtcctggagacagaatgaagcgctcagcatcccgggaatacttctcttgctgagagccgatgcccgtccccgggccagcagggatggggttggggaggttctcccaaccccactttcttccttccccagctccactaaattccctcctgccttaa

SEQ ID NO: 179663 - DNA, 1054 bp, Homo sapiens
  Payload ID: 15409
  Gene Symbol:
  Gene Name: selenoprotein M [Source:EntrezGene
  Acc:140606]
  ENST ID: ENST00000402395
  CDS Start-End: 419-856
ggaagaaaccgaggcccagggattacacagccagtagagagaggacagagcatggagctcctggagaggcagtggataattcttcccgacagaggagctgactgttgaaccccttctttgaaggagagtccgtgctgccaaatcgaagaagagaaacgccctggctggaaagcagagagaacagcagtcgcaggttcggctcagaaactccagtgtccctcagcgtctcgccggcaccctctgccggcgtgaggtggcgctgcctggccgcatcctgggggagcgtccacatcctcggtcgacaaaaggagcgtcgacactctcggacctgggaaagtgacggcccaaacgccagggaggagccaggacctcgccctgagctagcgggagcttgcgcatcatctgcggccgggtcccgatgagcctcctgttgcctccgctggcgctgctgctgcttctcgcggcgcttgtggccccagccacagccgccactgcctaccggccggactggaaccgtctgagcggcctaacccgcgcccgggtagagacctgcgggggatgacagctgaaccgcctaaaggaggtgaaggctttcgtcacgcaggacattccattctatcacaacctggtgatgaaacacctccctggggccgaccctgagctcgtgctgctgggccgccgctacgaggaactagagcgcatcccactcagtgaaatgacccgcgaagagatcaatgcgctagtgcaggagctcggcttctaccgcaaggcggcgcccgacgcgcaggtgccccccgagtacgtgtgggcgcccgcgaagcccccagaggaaacttcggaccacgctgacctgtaggtccgggggcgcggcggagctgggacctacctgcctgagtcctggagacagaatgaagcgctcagcatcccgggaatacttctcttgctgagagccgatgcccgtccccgggccagcagggatggggttggggaggttctcccaaccccactttcttccttccccagctccactaaattccctcctgccttaactgag

SEQ ID NO: 179664 - DNA, 689 bp, Homo sapiens
  Payload ID: 15409
  Gene Symbol:
  Gene Name: selenoprotein M [Source:EntrezGene
  Acc:140606]
  ENST ID: ENST00000611680
  CDS Start-End: 64-498
agacgtggcgcagcgactcggaggttcgcctccagcttgcgcatcatctgcggccgggtcccgatgagcctcctgttgcctccgctggcgctgctgctgcttctcgcggcgcttgtggccccagccacagccgccactgcctaccggccggactggaaccgtctgagcggcctaacccgcgcccgggtagagacctgcgggggacagctgaaccgcctaaaggaggtgaaggctttcgtcacgcaggacattccattctatcacaacctggtgatgaaacacctccctggggccgaccctgagctcgtgctgctgggccgccgctacgaggaactagagcgcatcccactcagtgaaatgacccgcgaagagatcaatgcgctagtgcaggagctcggcttctaccgcaaggcggcgcccgacgcgcaggtgccccccgagtacgtgtgggcgcccgcgaagcccccagaggaaacttcggaccacgctgacctgtaggtccgggggcgcggcggagctgggacctacctgcctgagtcctggagacagaatgaagcgctcagcatcccgggaatacttctcttgctgagagccgatgcccgtccccgggccagcagggatggggttggggaggttctcccaaccccactttcttccttccccagctccactaaattccctcctgcctt

SEQ ID NO: 179665 - DNA, 4227 bp, Homo sapiens
  Payload ID: 15410
  Gene Symbol: SEPN1
  Gene Name: selenoprotein N, 1
  ENST ID: ENST00000354177
  CDS Start-End: 56-1726
ccccgccccgctctttcgcttcccgggccgccggcagccgccgccagccgcagccatgggccgggcccggccgggccaacgcgggccgcccagccccggccccgccgcgcagcctcccgcgccaccgcgccgccgcgcccgttccctggcgctgctcggagccctgctggccgccgccgctgccgccgccgtccgggtctgcgcccgccacgccgaggcccaggcggccgcgcggcaggaactggcgctgaagaccctggggacagatggcctttttctcttttcctccttggacactgacggggatatgtacatcagccctgaggagttcaaacccattgctgagaagctaacagggtcaactcccgcggccagctgcgaggaggaggagttgccccctgaccctagcgaggagacgctcaccatagaagcccgattccagcctctgctcccggagaccatgaccaagagcaaagatggcttcctaggggtctcccgcctcgccctgtccggcctccgaaactggacagccgccgcctcaccaagtgcagtgtttgccacccgccacttccagcccttccttcccccgccaggccaggagctgggtgagccctggtggatcatccccagtgagctgagcatgttcactggctacctgtccaacaaccgcttctatccaccgccgcccaagggcaaggaggtcatcatccaccggctcctgagcatgttccaccctcggccctttgtgaagacccgctttgcccctcagggagctgtggcctgcctgactgccatcagcgacttctactacactgtgatgttccggatccatgccgagttccagctcagtgagccgcccgacttccccttttggttctcccctgctcagttcaccggccacatcatcctctccaaagacgccacccacgtccgcgacttccggctcttcgtgcccaaccacaggtctctgaatgtggacatggagtggctttacggggccagtgaaagcagcaacatggaggtggacatcggctacataccccagatggagctggaggccacgggcccctctgtgccctccgtgatcctggatgaggatggcagcatgatcgacagccacctgccttcaggggagcccctgcagtttgtgtttgaggagatcaagtggcagcaggagctgagctgggaggaggctgcccggcgcctggaggtggccatgtaccccttcaagaaggtctcctacttgccgttcactgaggccttcgaccgagccaaggctgagaacaagctggtgcactcaatcctgctgtggggggccctggatgaccaaagctgtcactgttcagggcggactctccgggagactgtcctggaaagttcgcccatcctcaccctgctcaacgagagcttcatcagcacctggtccctggtgaaggagctggaggaactgcagaacaaccaggagaactcgtcccaccagaagctggctggcctgcacctggagaagtacagcttccccgtggagatgatgatctgcctgcccaatggcaccgtggtccatcacatcaatgccaactacttcttggacatcacctccgtgaagcccgaggaaatcgagagcaatctcttcagcttctcatccacctttgaagacccgtccacggccacctacatgcagttcctgaaggagggactccggcgtggcctgcccctcctccagccctagagtgcctggacgggatctgatgcacaggcccccacgcctcagagccagagtggtcctcagcccatttcagactgcagatgccgcccactcccaccccactcctaggctgccttggagggtacaagatccactgagggtggccaccacagccttggctccatggtggcgggtagacaagggatgcctgggctgactgggcagaggaacctctagctctgactgtcactcggctctccctacccatttggctctggaagctgcttggcccccccagatcagggcctgggtgaactccctggacctttcctagccagccgcacagtctaggcccttgtggggtgaagaatggagggaggagcaggctaggaagacggggccaccaccctctccttgctttcagcccttcccacaggaaacatcaagaagccccagccaggaggggccaggctgccaaggcggctcccctgtttatctagagccttcgttcctggccataccccggactgccctcctgtgcctgatgtccccagctggggtcagtctcaacaggagccagtcttctggagcctctgggcagaaccctccatcagagtggaaatcagacgggaccccctgcagcttccctgaccacgccactgaccagctatctggggaagtttactgtgaaggggtttctgcctttagcaatggggttcactaagggggttcccgaggcccagggccaaggcactcccaccgcctaccttagcacagggtctctgcaggactgcgggagccagcgctcctgccgcccctcttgcccctcagaccttgcatccacagaagcacaacccagccaaacaccacagccttctccagagccggcactgtcccggcaaccaggggtgccccaggctagctcttctacctctggggcaccacggactccccttggccactcttgggactttggtccacgtcctgagccactgaccacggccagtctctctttttatatgtgcagaaaagtgtttttacacaaactttctcatggtttgtaggtatttttttataaccccagtgctgaggagaaaggaggggcagtggcttccccggcagcagccccatgatggctgaatccgaaatcctcgatgggtccagcttgatgtctttgcagctgcacctatgggaagaagtagtcctctcttccttctcctcttcagctttttaaaaacagtcctcagaggatccatgatccccagcactgtcccatcctccacaaaggcccacaggcatgcctgtactctctttcattaaggtcttgaagtcaggctgccccctccccagcccccagttctctccccaccccctcaccccacccggggctcactcagcctggcagaggaagaaggaaggcagacatctccgcagccactcctgggccttttatgtgccgagttaccccacttgccttgggcgtgtccactgagccttccccagccagtcttgttctcaattttgttttgttttgttttgagacggagtcttgctctgtcacccaggctggagtgctatggctcgatcttggctcactgcaacctccacctcccaggttcaagcaattctcttgcctcagcctcccgagtagctgggattacaggtgcatgccaccatggctggctaatttttgtatttttagtagagatggggtttcaccatattggtcaggctgatctggaacttctgacctcaggtgatccacctgcctcagcctcccaaagtgctgggattacaggcgtgagcaatcgtgcccagccttgttcttaattttgtatcatccagtcatcgctaatattacacgcaccttctcacttaatcctcacgacaagcctgtgaggcagatgctcattgttcccatcttgatgaaacttgagtctcagggaagtgaagtgacttgcccagggtcactcaggtagagttgagattcaaacccacatgtggctccaaagtctgcatctggatttgggggtgttttttggcatggcaccctcacctctctccctgcctgttttccccaaagtggaaaggaaggcctttcaaaccagagtgtctcactcccctctgacctccagaccagatggggcatgagccagccagctcagccaggctccctgtgtcctgggaggaagtgtccccatcccccatgccccttatggggagggagggcgtctgatgctctctctctgcctccccccccatcctgtcaggcacaggtgacgggggcagcccatgcgagcccttctcctgctgctctgggagggccagttccacattgagccagcctggtcccatggaaaatgatggcctgggctttctgaggccttatctgatgcctctgcagttcatgtcccccaccaggcctcgaggctcagggtgggagagggccccgggctgccctgtcactcctctaacacttccctcccctgtccccaacatgccctgtaataaaattagagaagact

SEQ ID NO: 179666 - DNA, 4334 bp, Homo sapiens
  Payload ID: 15410
  Gene Symbol: SEPN1
  Gene Name: selenoprotein N, 1
  Uniprot ID: Q9NZV5
  ENST ID: ENST00000361547
  CDS Start-End: 56-1828
ccccgccccgctctttcgcttcccgggccgccggcagccgccgccagccgcagccatgggccgggcccggccgggccaacgcgggccgcccagccccggccccgccgcgcagcctcccgcgccaccgcgccgccgcgcccgttccctggcgctgctcggagccctgctggccgccgccgctgccgccgccgtccgggtctgcgcccgccacgccgaggcccaggcggccgcgcggcaggaactggcgctgaagaccctggggacagatggcctttttctcttttcctccttggacactgacggggatatgtacatcagccctgaggagttcaaacccattgctgagaagctaacagggtcttgttctgtcacccagactggagtgcagtggtgcagtcacagctcactgcagcctcaacttccctggctcaattgatcctcctgcctcagcctcctgaggtcaactcccgcggccagctgcgaggaggaggagttgccccctgaccctagcgaggagacgctcaccatagaagcccgattccagcctctgctcccggagaccatgaccaagagcaaagatggcttcctaggggtctcccgcctcgccctgtccggcctccgaaactggacagccgccgcctcaccaagtgcagtgtttgccacccgccacttccagcccttccttcccccgccaggccaggagctgggtgagccctggtggatcatccccagtgagctgagcatgttcactggctacctgtccaacaaccgcttctatccaccgccgcccaagggcaaggaggtcatcatccaccggctcctgagcatgttccaccctcggccctttgtgaagacccgctttgcccctcagggagctgtggcctgcctgactgccatcagcgacttctactacactgtgatgttccggatccatgccgagttccagctcagtgagccgcccgacttccccttttggttctcccctgctcagttcaccggccacatcatcctctccaaagacgccacccacgtccgcgacttccggctcttcgtgcccaaccacaggtctctgaatgtggacatggagtggctttacggggccagtgaaagcagcaacatggaggtggacatcggctacataccccagatggagctggaggccacgggcccctctgtgccctccgtgatcctggatgaggatggcagcatgatcgacagccacctgccttcaggggagcccctgcagtttgtgtttgaggagatcaagtggcagcaggagctgagctgggaggaggctgcccggcgcctggaggtggccatgtaccccttcaagaaggtctcctacttgccgttcactgaggccttcgaccgagccaaggctgagaacaagctggtgcactcaatcctgctgtggggggccctggatgaccagtcctgctgaggttcagggcggactctccgggagactgtcctggaaagttcgcccatcctcaccctgctcaacgagagcttcatcagcacctggtccctggtgaaggagctggaggaactgcagaacaaccaggagaactcgtcccaccagaagctggctggcctgcacctggagaagtacagcttccccgtggagatgatgatctgcctgcccaatggcaccgtggtccatcacatcaatgccaactacttcttggacatcacctccgtgaagcccgaggaaatcgagagcaatctcttcagcttctcatccacctttgaagacccgtccacggccacctacatgcagttcctgaaggagggactccggcgtggcctgcccctcctccagccctagagtgcctggacgggatctgatgcacaggcccccacgcctcagagccagagtggtcctcagcccatttcagactgcagatgccgcccactcccaccccactcctaggctgccttggagggtacaagatccactgagggtggccaccacagccttggctccatggtggcgggtagacaagggatgcctgggctgactgggcagaggaacctctagctctgactgtcactcggctctccctacccatttggctctggaagctgcttggcccccccagatcagggcctgggtgaactccctggacctttcctagccagccgcacagtctaggcccttgtggggtgaagaatggagggaggagcaggctaggaagacggggccaccaccctctccttgctttcagcccttcccacaggaaacatcaagaagccccagccaggaggggccaggctgccaaggcggctcccctgtttatctagagccttcgttcctggccataccccggactgccctcctgtgcctgatgtccccagctggggtcagtctcaacaggagccagtcttctggagcctctgggcagaaccctccatcagagtggaaatcagacgggaccccctgcagcttccctgaccacgccactgaccagctatctggggaagtttactgtgaaggggtttctgcctttagcaatggggttcactaagggggttcccgaggcccagggccaaggcactcccaccgcctaccttagcacagggtctctgcaggactgcgggagccagcgctcctgccgcccctcttgcccctcagaccttgcatccacagaagcacaacccagccaaacaccacagccttctccagagccggcactgtcccggcaaccaggggtgccccaggctagctcttctacctctggggcaccacggactccccttggccactcttgggactttggtccacgtcctgagccactgaccacggccagtctctctttttatatgtgcagaaaagtgtttttacacaaactttctcatggtttgtaggtatttttttataaccccagtgctgaggagaaaggaggggcagtggcttccccggcagcagccccatgatggctgaatccgaaatcctcgatgggtccagcttgatgtctttgcagctgcacctatgggaagaagtagtcctctcttccttctcctcttcagctttttaaaaacagtcctcagaggatccatgatccccagcactgtcccatcctccacaaaggcccacaggcatgcctgtactctctttcattaaggtcttgaagtcaggctgccccctccccagcccccagttctctccccaccccctcaccccacccggggctcactcagcctggcagaggaagaaggaaggcagacatctccgcagccactcctgggccttttatgtgccgagttaccccacttgccttgggcgtgtccactgagccttccccagccagtcttgttctcaattttgttttgttttgttttgagacggagtcttgctctgtcacccaggctggagtgctatggctcgatcttggctcactgcaacctccacctcccaggttcaagcaattctcttgcctcagcctcccgagtagctgggattacaggtgcatgccaccatggctggctaatttttgtatttttagtagagatggggtttcaccatattggtcaggctgatctggaacttctgacctcaggtgatccacctgcctcagcctcccaaagtgctgggattacaggcgtgagcaatcgtgcccagccttgttcttaattttgtatcatccagtcatcgctaatattacacgcaccttctcacttaatcctcacgacaagcctgtgaggcagatgctcattgttcccatcttgatgaaacttgagtctcagggaagtgaagtgacttgcccagggtcactcaggtagagttgagattcaaacccacatgtggctccaaagtctgcatctggatttgggggtgttttttggcatggcaccctcacctctctccctgcctgttttccccaaagtggaaaggaaggcctttcaaaccagagtgtctcactcccctctgacctccagaccagatggggcatgagccagccagctcagccaggctccctgtgtcctgggaggaagtgtccccatcccccatgccccttatggggagggagggcgtctgatgctctctctctgcctccccccccatcctgtcaggcacaggtgacgggggcagcccatgcgagcccttctcctgctgctctgggagggccagttccacattgagccagcctggtcccatggaaaatgatggcctgggctttctgaggccttatctgatgcctctgcagttcatgtcccccaccaggcctcgaggctcagggtgggagagggccccgggctgccctgtcactcctctaacacttccctcccctgtccccaacatgccctgtaataaaattagagaagactaacta

SEQ ID NO: 179667 - DNA, 4212 bp, Homo sapiens
  Payload ID: 15410
  Gene Symbol: SEPN1
  Gene Name: selenoprotein N, 1
  Uniprot ID: Q9NZV5
  ENST ID: ENST00000374315
  CDS Start-End: 39-1709
gcttcccgggccgccggcagccgccgccagccgcagccatgggccgggcccggccgggccaacgcgggccgcccagccccggccccgccgcgcagcctcccgcgccaccgcgccgccgcgcccgttccctggcgctgctcggagccctgctggccgccgccgctgccgccgccgtccgggtctgcgcccgccacgccgaggcccaggcggccgcgcggcaggaactggcgctgaagaccctggggacagatggcctttttctcttttcctccttggacactgacggggatatgtacatcagccctgaggagttcaaacccattgctgagaagctaacagggtcaactcccgcggccagctgcgaggaggaggagttgccccctgaccctagcgaggagacgctcaccatagaagcccgattccagcctctgctcccggagaccatgaccaagagcaaagatggcttcctaggggtctcccgcctcgccctgtccggcctccgaaactggacagccgccgcctcaccaagtgcagtgtttgccacccgccacttccagcccttccttcccccgccaggccaggagctgggtgagccctggtggatcatccccagtgagctgagcatgttcactggctacctgtccaacaaccgcttctatccaccgccgcccaagggcaaggaggtcatcatccaccggctcctgagcatgttccaccctcggccctttgtgaagacccgctttgcccctcagggagctgtggcctgcctgactgccatcagcgacttctactacactgtgatgttccggatccatgccgagttccagctcagtgagccgcccgacttccccttttggttctcccctgctcagttcaccggccacatcatcctctccaaagacgccacccacgtccgcgacttccggctcttcgtgcccaaccacaggtctctgaatgtggacatggagtggctttacggggccagtgaaagcagcaacatggaggtggacatcggctacataccccagatggagctggaggccacgggcccctctgtgccctccgtgatcctggatgaggatggcagcatgatcgacagccacctgccttcaggggagcccctgcagtttgtgtttgaggagatcaagtggcagcaggagctgagctgggaggaggctgcccggcgcctggaggtggccatgtaccccttcaagaaggtctcctacttgccgttcactgaggccttcgaccgagccaaggctgagaacaagctggtgcactcaatcctgctgtggggggccctggatgaccagtcctgctgaggttcagggcggactctccgggagactgtcctggaaagttcgcccatcctcaccctgctcaacgagagcttcatcagcacctggtccctggtgaaggagctggaggaactgcagaacaaccaggagaactcgtcccaccagaagctggctggcctgcacctggagaagtacagcttccccgtggagatgatgatctgcctgcccaatggcaccgtggtccatcacatcaatgccaactacttcttggacatcacctccgtgaagcccgaggaaatcgagagcaatctcttcagcttctcatccacctttgaagacccgtccacggccacctacatgcagttcctgaaggagggactccggcgtggcctgcccctcctccagccctagagtgcctggacgggatctgatgcacaggcccccacgcctcagagccagagtggtcctcagcccatttcagactgcagatgccgcccactcccaccccactcctaggctgccttggagggtacaagatccactgagggtggccaccacagccttggctccatggtggcgggtagacaagggatgcctgggctgactgggcagaggaacctctagctctgactgtcactcggctctccctacccatttggctctggaagctgcttggcccccccagatcagggcctgggtgaactccctggacctttcctagccagccgcacagtctaggcccttgtggggtgaagaatggagggaggagcaggctaggaagacggggccaccaccctctccttgctttcagcccttcccacaggaaacatcaagaagccccagccaggaggggccaggctgccaaggcggctcccctgtttatctagagccttcgttcctggccataccccggactgccctcctgtgcctgatgtccccagctggggtcagtctcaacaggagccagtcttctggagcctctgggcagaaccctccatcagagtggaaatcagacgggaccccctgcagcttccctgaccacgccactgaccagctatctggggaagtttactgtgaaggggtttctgcctttagcaatggggttcactaagggggttcccgaggcccagggccaaggcactcccaccgcctaccttagcacagggtctctgcaggactgcgggagccagcgctcctgccgcccctcttgcccctcagaccttgcatccacagaagcacaacccagccaaacaccacagccttctccagagccggcactgtcccggcaaccaggggtgccccaggctagctcttctacctctggggcaccacggactccccttggccactcttgggactttggtccacgtcctgagccactgaccacggccagtctctctttttatatgtgcagaaaagtgtttttacacaaactttctcatggtttgtaggtatttttttataaccccagtgctgaggagaaaggaggggcagtggcttccccggcagcagccccatgatggctgaatccgaaatcctcgatgggtccagcttgatgtctttgcagctgcacctatgggaagaagtagtcctctcttccttctcctcttcagctttttaaaaacagtcctcagaggatccatgatccccagcactgtcccatcctccacaaaggcccacaggcatgcctgtactctctttcattaaggtcttgaagtcaggctgccccctccccagcccccagttctctccccaccccctcaccccacccggggctcactcagcctggcagaggaagaaggaaggcagacatctccgcagccactcctgggccttttatgtgccgagttaccccacttgccttgggcgtgtccactgagccttccccagccagtcttgttctcaattttgttttgttttgttttgagacggagtcttgctctgtcacccaggctggagtgctatggctcgatcttggctcactgcaacctccacctcccaggttcaagcaattctcttgcctcagcctcccgagtagctgggattacaggtgcatgccaccatggctggctaatttttgtatttttagtagagatggggtttcaccatattggtcaggctgatctggaacttctgacctcaggtgatccacctgcctcagcctcccaaagtgctgggattacaggcgtgagcaatcgtgcccagccttgttcttaattttgtatcatccagtcatcgctaatattacacgcaccttctcacttaatcctcacgacaagcctgtgaggcagatgctcattgttcccatcttgatgaaacttgagtctcagggaagtgaagtgacttgcccagggtcactcaggtagagttgagattcaaacccacatgtggctccaaagtctgcatctggatttgggggtgttttttggcatggcaccctcacctctctccctgcctgttttccccaaagtggaaaggaaggcctttcaaaccagagtgtctcactcccctctgacctccagaccagatggggcatgagccagccagctcagccaggctccctgtgtcctgggaggaagtgtccccatcccccatgccccttatggggagggagggcgtctgatgctctctctctgcctccccccccatcctgtcaggcacaggtgacgggggcagcccatgcgagcccttctcctgctgctctgggagggccagttccacattgagccagcctggtcccatggaaaatgatggcctgggctttctgaggccttatctgatgcctctgcagttcatgtcccccaccaggcctcgaggctcagggtgggagagggccccgggctgccctgtcactcctctaacacttccctcccctgtccccaacatgccctgtaataaaattagagaagactaa

SEQ ID NO: 179668 - DNA, 2994 bp, Homo sapiens
  Payload ID: 15410
  Gene Symbol: SEPN1
  Gene Name: selenoprotein N, 1
  ENST ID: ENST00000630065
  CDS Start-End: 293-493
ggtctcctacttgccgttcactgaggccttcgaccgagccaaggctgagaacaagctggtgcactcaatcctgctgtggggggccctggatgaccagtcctgctgaggttcagggcggactctccgggagactgtcctggaaagttcgcccatcctcaccctgctcaacgagagcttcatcagcacctggtccctggtgaaggagctggaggaactgcagaacaaccaggagaactcgtcccaccagaagctggctggcctgcacctggagaagtacagcttccccgtggagatgatgatctgcctgcccaatggcaccgtggtccatcacatcaatgccaactacttcttggacatcacctccgtgaagcccgaggaaatcgagagcaatctcttcagcttctcatccacctttgaagacccgtccacggccacctacatgcagttcctgaaggagggactccggcgtggcctgcccctcctccagccctagagtgcctggacgggatctgatgcacaggcccccacgcctcagagccagagtggtcctcagcccatttcagactgcagatgccgcccactcccaccccactcctaggctgccttggagggtacaagatccactgagggtggccaccacagccttggctccatggtggcgggtagacaagggatgcctgggctgactgggcagaggaacctctagctctgactgtcactcggctctccctacccatttggctctggaagctgcttggcccccccagatcagggcctgggtgaactccctggacctttcctagccagccgcacagtctaggcccttgtggggtgaagaatggagggaggagcaggctaggaagacggggccaccaccctctccttgctttcagcccttcccacaggaaacatcaagaagccccagccaggaggggccaggctgccaaggcggctcccctgtttatctagagccttcgttcctggccataccccggactgccctcctgtgcctgatgtccccagctggggtcagtctcaacaggagccagtcttctggagcctctgggcagaaccctccatcagagtggaaatcagacgggaccccctgcagcttccctgaccacgccactgaccagctatctggggaagtttactgtgaaggggtttctgcctttagcaatggggttcactaagggggttcccgaggcccagggccaaggcactcccaccgcctaccttagcacagggtctctgcaggactgcgggagccagcgctcctgccgcccctcttgcccctcagaccttgcatccacagaagcacaacccagccaaacaccacagccttctccagagccggcactgtcccggcaaccaggggtgccccaggctagctcttctacctctggggcaccacggactccccttggccactcttgggactttggtccacgtcctgagccactgaccacggccagtctctctttttatatgtgcagaaaagtgtttttacacaaactttctcatggtttgtaggtatttttttataaccccagtgctgaggagaaaggaggggcagtggcttccccggcagcagccccatgatggctgaatccgaaatcctcgatgggtccagcttgatgtctttgcagctgcacctatgggaagaagtagtcctctcttccttctcctcttcagctttttaaaaacagtcctcagaggatccatgatccccagcactgtcccatcctccacaaaggcccacaggcatgcctgtactctctttcattaaggtcttgaagtcaggctgccccctccccagcccccagttctctccccaccccctcaccccacccggggctcactcagcctggcagaggaagaaggaaggcagacatctccgcagccactcctgggccttttatgtgccgagttaccccacttgccttgggcgtgtccactgagccttccccagccagtcttgttctcaattttgttttgttttgttttgagacggagtcttgctctgtcacccaggctggagtgctatggctcgatcttggctcactgcaacctccacctcccaggttcaagcaattctcttgcctcagcctcccgagtagctgggattacaggtgcatgccaccatggctggctaatttttgtatttttagtagagatggggtttcaccatattggtcaggctgatctggaacttctgacctcaggtgatccacctgcctcagcctcccaaagtgctgggattacaggcgtgagcaatcgtgcccagccttgttcttaattttgtatcatccagtcatcgctaatattacacgcaccttctcacttaatcctcacgacaagcctgtgaggcagatgctcattgttcccatcttgatgaaacttgagtctcagggaagtgaagtgacttgcccagggtcactcaggtagagttgagattcaaacccacatgtggctccaaagtctgcatctggatttgggggtgttttttggcatggcaccctcacctctctccctgcctgttttccccaaagtggaaaggaaggcctttcaaaccagagtgtctcactcccctctgacctccagaccagatggggcatgagccagccagctcagccaggctccctgtgtcctgggaggaagtgtccccatcccccatgccccttatggggagggagggcgtctgatgctctctctctgcctccccccccatcctgtcaggcacaggtgacgggggcagcccatgcgagcccttctcctgctgctctgggagggccagttccacattgagccagcctggtcccatggaaaatgatggcctgggctttctgaggccttatctgatgcctctgcagttcatgtcccccaccaggcctcgaggctcagggtgggagagggccccgggctgccctgtcactcctctaacacttccctcccctgtccccaacatgccctgtaataaaattagagaagact

SEQ ID NO: 179669 - DNA, 2315 bp, Homo sapiens
  Payload ID: 15411
  Gene Symbol:
  Gene Name: selenoprotein O [Source:EntrezGene
  Acc:83642]
  ENST ID: ENST00000380903
  CDS Start-End: 59-2068
gcgcggggcggggcttccgggcggggcaggctggcttccggcgggagcggggccgcggatggccgtatacagggcagcgctcggggcttcgctcgcggctgcccgactcttgcccctcggtcgctgttccccgtcgccggcgccccgctctacgttgtcgggcgccgccatggagcccgcgcctcgctggctggcggggctgcgcttcgacaaccgcgccctgcgcgccctgcccgtggaggcgccgccgcccggtcccgagggcgccccgtccgcgccgcggcccgtgcccggggcctgcttcacccgcgtgcagcccaccccgctgcggcagccgcgcctcgtggcgctgtcagagcccgcgctggcgttgctgggcctgggcgcgccgcccgcgcgcgaggccgaggccgaggccgcgctgttcttcagcggcaacgcgctcctgccgggcgccgagcccgccgcgcactgctactgcggccaccaattcggccagttcgccgggcagctgggcgacggcgccgccatgtacctgggcgaggtgtgcacggcgaccggcgagcgctgggagctgcagctcaagggcgccgggcccacgcccttctccagacaggccgacggtcgcaaggtcctacggtcaagcatccgggagtttctatgcagcgaagccatgttccacctgggagtccccaccacacgggccggcgcctgcgtcacgtccgagtccacggtggtgcgcgacgtgttctatgatggtaatcccaaatatgaacaatgcacggttgtgttgcgtgtagcttccactttcataaggtttggatcctttgagatttttaagtctgcagatgagcacacagggcgtgcaggccccagcgtggggaggaacgacattcgagtgcagctgctcgactatgtcatcagctccttttaccccgagatccaggctgctcatgccagcgacagcgtgcagagaaatgctgccttcttccgggaggtgacgcggcgcacggcgcggatggtggccgagtggcagtgtgtgggcttctgccacggcgtgctcaacaccgacaacatgagcatcctggggctcaccatcgactacgggccctttggcttcctggacaggtacgaccccgaccacgtgtgcaatgcctccgacaacaccggccgctacgcgtacagcaagcagcccgaggtgtgcaggtggaacctgcggaagctggccgaggccctgcagccggaactgcccctggagctgggggaggccatcctggccgaggagtttgacgccgagttccaaaggcactacctgcagaagatgcgcaggaagctgggcctcgtgcaggtggagctggaggaagacggggcgctggtgtccaagctcctggagaccatgcatctgaccggtgccgacttcacaaacaccttctacttgctgagctccttcccagtggagctagagtcgccaggcctggcggaattcctggccaggctgatggagcagtgtgcctccctggaggagctgaggctggccttccggccccagatggatccccggcagctatccatgatgctgatgctggcgcagtcaaacccgcagctgttcgcgcttatgggcacccgggcaggcatcgccagggagctggagcgtgtggagcagcagtctcggctggagcagctgagtgcggcagagctgcagagcaggaaccagggccactgggctgactggctacaggcgtacagagcccggctggacaaggacctggaaggcgctggggacgctgccgcctggcaggctgagcacgtgcgcgtgatgcacgccaacaacccgaagtacgtgctgaggaactacatcgcgcagaatgccatcgaggctgccgagcgcggggacttctcagaggtgcggcgggtgctgaaactactggagaccccttaccactgcgaggcgggggccgccacagacgccgaggccacggaagccgacggggcggacggcaggcagcgctcctacagcagtaagcccccgctctgggcagcagaactgtgcgtgacatgatcttcgtaacggcctcggcacgctccacacccctggagtctcccgaggcccccatgtgctgctgagtggccaagatgatgccaggctgccctatacactgggggattctgccctggcccatgcacacccgtctttccatgatggcagagacatccagtcaggacctgacccgtctctgtctgaggccggctcagcagtgcagcctggtccctgggggctggacccaggctcctaaataaaccagcaactccctcga

SEQ ID NO: 179670 - DNA, 2311 bp, Homo sapiens
  Payload ID: 15411
  Gene Symbol:
  Gene Name: selenoprotein O [Source:EntrezGene
  Acc:83642]
  ENST ID: ENST00000611222
  CDS Start-End: 59-2065
gcgcggggcggggcttccgggcggggcaggctggcttccggcgggagcggggccgcggatggccgtatacagggcagcgctcggggcttcgctcgcggctgcccgactcttgcccctcggtcgctgttccccgtcgccggcgccccgctctacgttgtcgggcgccgccatggagcccgcgcctcgctggctggcggggctgcgcttcgacaaccgcgccctgcgcgccctgcccgtggaggcgccgccgcccggtcccgagggcgccccgtccgcgccgcggcccgtgcccggggcctgcttcacccgcgtgcagcccaccccgctgcggcagccgcgcctcgtggcgctgtcagagcccgcgctggcgttgctgggcctgggcgcgccgcccgcgcgcgaggccgaggccgaggccgcgctgttcttcagcggcaacgcgctcctgccgggcgccgagcccgccgcgcactgctactgcggccaccaattcggccagttcgccgggcagctgggcgacggcgccgccatgtacctgggcgaggtgtgcacggcgaccggcgagcgctgggagctgcagctcaagggcgccgggcccacgcccttctccagacaggccgacggtcgcaaggtcctacggtcaagcatccgggagtttctatgcagcgaagccatgttccacctgggagtccccaccacacgggccggcgcctgcgtcacgtccgagtccacggtggtgcgcgacgtgttctatgatggtaatcccaaatatgaacaatgcacggttgtgttgcgtgtagcttccactttcataaggtttggatcctttgagatttttaagtctgcagatgagcacacagggcgtgcaggccccagcgtggggaggaacgacattcgagtgcagctgctcgactatgtcatcagctccttttaccccgagatccaggctgctcatgccagcgacagcgtgcagagaaatgctgccttcttccgggaggtgacgcggcgcacggcgcggatggtggccgagtggcagtgtgtgggcttctgccacggcgtgctcaacaccgacaacatgagcatcctggggctcaccatcgactacgggccctttggcttcctggacaggtacgaccccgaccacgtgtgcaatgcctccgacaacaccggccgctacgcgtacagcaagcagcccgaggtgtgcaggtggaacctgcggaagctggccgaggccctgcagccggaactgcccctggagctgggggaggccatcctggccgaggagtttgacgccgagttccaaaggcactacctgcagaagatgcgcaggaagctgggcctcgtgcaggtggagctggaggaagacggggcgctggtgtccaagctcctggagaccatgcatctgaccggtgccgacttcacaaacaccttctacttgctgagctccttcccagtggagctagagtcgccaggcctggcggaattcctggccaggctgatggagcagtgtgcctccctggaggagctgaggctggccttccggccccagatggatccccggcagctatccatgatgctgatgctggcgcagtcaaacccgcagctgttcgcgcttatgggcacccgggcaggcatcgccagggagctggagcgtgtggagcagcagtctcggctggagcagctgagtgcggcagagctgcagagcaggaaccagggccactgggctgactggctacaggcgtacagagcccggctggacaaggacctggaaggcgctggggacgctgccgcctggcaggctgagcacgtgcgcgtgatgcacgccaacaacccgaagtacgtgctgaggaactacatcgcgcagaatgccatcgaggctgccgagcgcggggacttctcagaggtgcggcgggtgctgaaactactggagaccccttaccactgcgaggcgggggccgccacagacgccgaggccacggaagccgacggggcggacggcaggcagcgctcctacagcagtaagcccccgctctgggcagcagaactgtgcgtgacatcttcgtaacggcctcggcacgctccacacccctggagtctcccgaggcccccatgtgctgctgagtggccaagatgatgccaggctgccctatacactgggggattctgccctggcccatgcacacccgtctttccatgatggcagagacatccagtcaggacctgacccgtctctgtctgaggccggctcagcagtgcagcctggtccctgggggctggacccaggctcctaaataaaccagcaactccctcg

SEQ ID NO: 179671 - DNA, 2243 bp, Homo sapiens
  Payload ID: 15412
  Gene Symbol: SEPP1
  Gene Name: selenoprotein P, plasma, 1
  Uniprot ID: P49908
  ENST ID: ENST00000514985
  CDS Start-End: 258-1403
gtcaaaatgttttccccatattatgcatggcagcacttgctactttcttttaagttgataacaatcagctcaggggtttgctctgcttgcaaggtcactgcaagaatgaacattgaactttggactatacctgaggggtgaggtaaacaacaggactataaatatcagagtgtgctgctgtggctttgtggagctgccagagtaaagcaaagagaaaggaagcaggcccgttggaagtggttgtgacaaccccagcaatgtggagaagcctggggcttgccctggctctctgtctcctcccatcgggaggaacagagagccaggaccaaagctccttatgtaagcaacccccagcctggagcataagagatcaagatccaatgctaaactccaatggttcagtgactgtggttgctcttcttcaagccagctgatacctgtgcatactgcaggcatctaaattagaagacctgcgagtaaaactgaagaaagaaggatattctaatatttcttatattgttgttaatcatcaaggaatctcttctcgattaaaatacacacatcttaagaataaggtttcagagcatattcctgtttatcaacaagaagaaaaccaaacagatgtctggactcttttaaatggaagcaaagatgacttcctcatatatgatagatgtggccgtcttgtatatcatcttggtttgcctttttccttcctaactttcccatatgtagaagaagccattaagattgcttactgtgaaaagaaatgtggaaactgctctctcacgactctcaaagatgaagacttttgtaaacgtgtatctttggctactgtggataaaacagttgaaactccatcgcctcattaccatcatgagcatcatcacaatcatggacatcagcaccttggcagcagtgagctttcagagaatcagcaaccaggagcaccaaatgctcctactcatcctgctcctccaggccttcatcaccaccataagcacaagggtcagcataggcagggtcacccagagaaccgagatatgccagcaagtgaagatttacaagatttacaaaagaagctctgtcgaaagagatgtataaatcaattactctgtaaattgcccacagattcagagttggctcctaggagctgatgctgccattgtcgacatctgatatttgaaaaaacagggtctgcaatcacctgacagtgtaaagaaaacctcccatctttatgtagctgacagggacttcgggcagaggagaacataactgaatcttgtcagtgacgtttgcctccagctgcctgacaaataagtcagcagcttatacccacagaagccagtgccagttgacgctgaaagaatcaggcaaaaaagtgagaatgaccttcaaactaaatatttaaaataggacatactccccaatttagtctagacacaatttcatttccagcatttttataaactaccaaattagtgaaccaaaaatagaaattagatttgtgcaaacatggagaaatctactgaattggcttccagattttaaattttatgtcatagaaatattgactcaaaccatattttttatgatggagcaactgaaaggtgattgcagcttttggttaatatgtctttttttttctttttccagtgttctatttgctttaatgagaatagaaacgtaaactatgacctaggggtttctgttggataattagcagtttagaatggaggaagaacaacaaagacatgctttccatttttttctttacttatctctcaaaacaatattactttgtcttttcaatcttctacttttaactaataaaataagtggattttgtattttaagatccagaaatacttaacacgtgaatattttgctaaaaaagcatatataactattttaaatatccatttatcttttgtatatctaagactcatcctgatttttactatcacacatgaataaagcctttgtatctttctttctctaatgttgtatcatactcttctaaaacttgagtggctgtcttaaaagatataaggggaaagataatattgtctgtctctatattgcttagtaagtatttccatagtcaatgatggtttaataggtaaaccaaaccctataaacctgacctcctttatggttaatactattaagcaagaatgcagtacagaattggatacagtacggatttgtccaaataaattcaataaaaaccttaaagctga

SEQ ID NO: 179672 - DNA, 1047 bp, Homo sapiens
  Payload ID: 15412
  Gene Symbol: SEPP1
  Gene Name: selenoprotein P, plasma, 1
  ENST ID: ENST00000514218
  CDS Start-End: 116-1047
caggagcatgacgagggagagaggtcatcgaggctggggtgagacatctgacttaccgtcaggagccacgtcagtgcctcataaaatccaatctccattcaggacaaccccagcaatgtggagaagcctggggcttgccctggctctctgtctcctcccatcgggaggaacagagagccaggaccaaagctccttatgtaagcaacccccagcctggagcataagagatcaagatccaatgctaaactccaatggttcagtgactgtggttgctcttcttcaagccagctgatacctgtgcatactgcaggcatctaaattagaagacctgcgagtaaaactgaagaaagaaggatattctaatatttcttatattgttgttaatcatcaaggaatctcttctcgattaaaatacacacatcttaagaataaggtttcagagcatattcctgtttatcaacaagaagaaaaccaaacagatgtctggactcttttaaatggaagcaaagatgacttcctcatatatgatagatgtggccgtcttgtatatcatcttggtttgcctttttccttcctaactttcccatatgtagaagaagccattaagattgcttactgtgaaaagaaatgtggaaactgctctctcacgactctcaaagatgaagacttttgtaaacgtgtatctttggctactgtggataaaacagttgaaactccatcgcctcattaccatcatgagcatcatcacaatcatggacatcagcaccttggcagcagtgagctttcagagaatcagcaaccaggagcaccaaatgctcctactcatcctgctcctccaggccttcatcaccaccataagcacaagggtcagcataggcagggtcacccagagaaccgagatatgccagcaagtgaagatttacaagatttacaaaagaagctctgtcgaaagagatgtataaatcaattactctgtaaattgcccacagattcagagttggctcctaggagctgatgctgccattgtcgacatctgatatttgaaaa

SEQ ID NO: 179673 - DNA, 2204 bp, Homo sapiens
  Payload ID: 15412
  Gene Symbol: SEPP1
  Gene Name: selenoprotein P, plasma, 1
  Uniprot ID: P49908
  ENST ID: ENST00000506577
  CDS Start-End: 470-1615
acagacaggcaggtgcaggagacggggtgagcgcttttgggctctagccccatggcagcatctaggggtgtgttacaattaatgctcttttagcagttgctgttcgcggatggctaagtgttaaaccagctcagtggagagtcagggtggcagccttttacgccctgtcctcttggtacccgggtctttgtctagcatccaggaagaatcaggtcctacagacttgaaggatggtgaatacagagattttattgaatgatggaggaggctttcagcaggatggatggggagctggaaagcggatggagtgagaagataatcttcccctggggtttggccatcccatggctgatctctctgacagtccccagccgaactcctctcgatgttcagacactctttctcctctctcctctgccacactgctctgctgctcttctgctcatggagcctgaggacaaccccagcaatgtggagaagcctggggcttgccctggctctctgtctcctcccatcgggaggaacagagagccaggaccaaagctccttatgtaagcaacccccagcctggagcataagagatcaagatccaatgctaaactccaatggttcagtgactgtggttgctcttcttcaagccagctgatacctgtgcatactgcaggcatctaaattagaagacctgcgagtaaaactgaagaaagaaggatattctaatatttcttatattgttgttaatcatcaaggaatctcttctcgattaaaatacacacatcttaagaataaggtttcagagcatattcctgtttatcaacaagaagaaaaccaaacagatgtctggactcttttaaatggaagcaaagatgacttcctcatatatgatagatgtggccgtcttgtatatcatcttggtttgcctttttccttcctaactttcccatatgtagaagaagccattaagattgcttactgtgaaaagaaatgtggaaactgctctctcacgactctcaaagatgaagacttttgtaaacgtgtatctttggctactgtggataaaacagttgaaactccatcgcctcattaccatcatgagcatcatcacaatcatggacatcagcaccttggcagcagtgagctttcagagaatcagcaaccaggagcaccaaatgctcctactcatcctgctcctccaggccttcatcaccaccataagcacaagggtcagcataggcagggtcacccagagaaccgagatatgccagcaagtgaagatttacaagatttacaaaagaagctctgtcgaaagagatgtataaatcaattactctgtaaattgcccacagattcagagttggctcctaggagctgatgctgccattgtcgacatctgatatttgaaaaaacagggtctgcaatcacctgacagtgtaaagaaaacctcccatctttatgtagctgacagggacttcgggcagaggagaacataactgaatcttgtcagtgacgtttgcctccagctgcctgacaaataagtcagcagcttatacccacagaagccagtgccagttgacgctgaaagaatcaggcaaaaaagtgagaatgaccttcaaactaaatatttaaaataggacatactccccaatttagtctagacacaatttcatttccagcatttttataaactaccaaattagtgaaccaaaaatagaaattagatttgtgcaaacatggagaaatctactgaattggcttccagattttaaattttatgtcatagaaatattgactcaaaccatattttttatgatggagcaactgaaaggtgattgcagcttttggttaatatgtctttttttttctttttccagtgttctatttgctttaatgagaatagaaacgtaaactatgacctaggggtttctgttggataattagcagtttagaatggaggaagaacaacaaagacatgctttccatttttttctttacttatctctcaaaacaatattactttgtcttttcaatcttctacttttaactaataaaataagtggattttgtattttaagatccagaaatacttaacacgtgaatattttgctaaaaaagcatatataactattttaaatatccatttatcttttgtatatctaagactcatcctgatttttactatcacacatgaataaagcctttgtatcttt

SEQ ID NO: 179674 - DNA, 787 bp, Homo sapiens
  Payload ID: 15412
  Gene Symbol: SEPP1
  Gene Name: selenoprotein P, plasma, 1
  ENST ID: ENST00000510965
  CDS Start-End: 160-787
tgtggagctgccagagtaaagcaaagagaaaggaagcaggcccgttggaagtggttgtctacttgcaatatgtgctctgggctggacgcggtggctcacgcttgtaatcccagcactttgggaggccaaggcaggcggatcacgaggacaaccccagcaatgtggagaagcctggggcttgccctggctctctgtctcctcccatcgggaggaacagagagccaggaccaaagctccttatgtaagcaacccccagcctggagcataagagatcaagatccaatgctaaactccaatggttcagtgactgtggttgctcttcttcaagccagctgatacctgtgcatactgcaggcatctaaattagaagacctgcgagtaaaactgaagaaagaaggatattctaatatttcttatattgttgttaatcatcaaggaatctcttctcgattaaaatacacacatcttaagaataaggtttcagagcatattcctgtttatcaacaagaagaaaaccaaacagatgtctggactcttttaaatggaagcaaagatgacttcctcatatatgatagatgtggccgtcttgtatatcatcttggtttgcctttttccttcctaactttcccatatgtagaagaagccattaagattgcttactgtgaaaagaaatgtggaaactgctctctcacgactctcaaagatgaagacttttgtaaacgtgtatctttggctactgtggataaaacagttgaaactccatcgcctcattaccatcatgagcatc

SEQ ID NO: 179675 - DNA, 1853 bp, Homo sapiens
  Payload ID: 15412
  Gene Symbol: SEPP1
  Gene Name: selenoprotein P, plasma, 1
  Uniprot ID: P49908
  ENST ID: ENST00000511224
  CDS Start-End: 100-1245
gtggagctgccagagtaaagcaaagagaaaggaagcaggcccgttggaagtggttgtttaagttcttatcaagatatcatatataggacaaccccagcaatgtggagaagcctggggcttgccctggctctctgtctcctcccatcgggaggaacagagagccaggaccaaagctccttatgtaagcaacccccagcctggagcataagagatcaagatccaatgctaaactccaatggttcagtgactgtggttgctcttcttcaagccagctgatacctgtgcatactgcaggcatctaaattagaagacctgcgagtaaaactgaagaaagaaggatattctaatatttcttatattgttgttaatcatcaaggaatctcttctcgattaaaatacacacatcttaagaataaggtttcagagcatattcctgtttatcaacaagaagaaaaccaaacagatgtctggactcttttaaatggaagcaaagatgacttcctcatatatgatagatgtggccgtcttgtatatcatcttggtttgcctttttccttcctaactttcccatatgtagaagaagccattaagattgcttactgtgaaaagaaatgtggaaactgctctctcacgactctcaaagatgaagacttttgtaaacgtgtatctttggctactgtggataaaacagttgaaactccatcgcctcattaccatcatgagcatcatcacaatcatggacatcagcaccttggcagcagtgagctttcagagaatcagcaaccaggagcaccaaatgctcctactcatcctgctcctccaggccttcatcaccaccataagcacaagggtcagcataggcagggtcacccagagaaccgagatatgccagcaagtgaagatttacaagatttacaaaagaagctctgtcgaaagagatgtataaatcaattactctgtaaattgcccacagattcagagttggctcctaggagctgatgctgccattgtcgacatctgatatttgaaaaaacagggtctgcaatcacctgacagtgtaaagaaaacctcccatctttatgtagctgacagggacttcgggcagaggagaacataactgaatcttgtcagtgacgtttgcctccagctgcctgacaaataagtcagcagcttatacccacagaagccagtgccagttgacgctgaaagaatcaggcaaaaaagtgagaatgaccttcaaactaaatatttaaaataggacatactccccaatttagtctagacacaatttcatttccagcatttttataaactaccaaattagtgaaccaaaaatagaaattagatttgtgcaaacatggagaaatctactgaattggcttccagattttaaattttatgtcatagaaatattgactcaaaccatattttttatgatggagcaactgaaaggtgattgcagcttttggttaatatgtctttttttttctttttccagtgttctatttgctttaatgagaatagaaacgtaaactatgacctaggggtttctgttggataattagcagtttagaatggaggaagaacaacaaagacatgctttccatttttttctttacttatctctcaaaacaatattactttgtcttttcaatcttctacttttaactaataaaataagtggattttgtattttaagatccagaaatacttaacacgtgaatattttgctaaaaaagcatatataactattttaaatatccatttatcttttgtatatctaagactcatcctgatttttactatcacacatgaataaagcctttgtatctttctttctctaatgttgtatc

SEQ ID NO: 179676 - DNA, 786 bp, Homo sapiens
  Payload ID: 15412
  Gene Symbol: SEPP1
  Gene Name: selenoprotein P, plasma, 1
  ENST ID: ENST00000507920
  CDS Start-End: 71-586
gtggagctgccagagtaaagcaaagagaaaggaagcaggcccgttggaagtggttgtgacaaccccagcaatgtggagaagcctggggcttgccctggctctctgtctcctcccatcgggaggaacagagagccaggaccaaagctccttatgtaagcaacccccagcctggagcataagagatcaagatccaatgctaaactccaatggttcagtgactgtggttgctcttcttcaagccagctgatacctgtgcatactgcaggcatctaaactctcaaagatgaagacttttgtaaacgtgtatctttggctactgtggataaaacagttgaaactccatcgcctcattaccatcatgagcatcatcacaatcatggacatcagcaccttggcagcagtgagctttcagagaatcagcaaccaggagcaccaaatgctcctactcatcctgctcctccaggccttcatcaccaccataagcacaagggtcagcataggcagggtcacccagagaaccgagatatgccagcaagtgaagatttacaagatttacaaaagaagctctgtcgaaagagatgtataaatcaattactctgtaaattgcccacagattcagagttggctcctaggagctgatgctgccattgtcgacatctgatatttgaaaaaacagggtctgcaatcacctgacagtgtaaagaaaacctcccatctttatgtagctgacagggacttcgggcagaggagaacataactgaatcttgtcagtgacgtttgcctcca

SEQ ID NO: 179677 - DNA, 819 bp, Homo sapiens
  Payload ID: 15413
  Gene Symbol:
  Gene Name: selenoprotein T [Source:EntrezGene
  Acc:51714]
  ENST ID: ENST00000492132
  CDS Start-End: 36-173
gtctgagggcggccgaagtggctggctcatttaagatgaggcttctgctgcttctcctagtggcggcgtctgcgatggtccggagcgaggcctcggccaatctgggcggcgtgcccagcaagagattaaagatgcagtacgccacggggccgctgctcaagttccagatttgagatggagtctcactgtattgcctaggctggtcttgaactcctgggatcaagtgaacctcctgcctcagcctcccaaagtgctgggattacagattgtttcctgaggttataggcgggtgtttgaggagtacatgcgggttattagccagcggtacccagacatccgcattgaaggagagaattacctccctcaaccaatatatagacacatagcatctttcctgtcagtcttcaaactagtattaataggcttaataattgttggcaaggatccttttgctttctttggcatgcaagctcctagcatctggcagtggggccaagaaaataaggtttatgcatgtatgatggttttcttcttgagcaacatgattgagaaccagtgtatgtcaacaggtgcatttgagataactttaaatgatgtacctgtgtggtctaagctggaatctggtcaccttccatccatgcaacaacttgttcaaattcttgacaatgaaatgaagctcaatgtgcatatggattcaatcccacaccatcgatcatagcaccacctatcagcactgaaaactcttttgcattaagggatcattgcaagagcagcgtgactgacattatgaaggcctgtactgaagacagcaagctgtta

SEQ ID NO: 179678 - DNA, 783 bp, Homo sapiens
  Payload ID: 15413
  Gene Symbol:
  Gene Name: selenoprotein T [Source:EntrezGene
  Acc:51714]
  ENST ID: ENST00000480740
  CDS Start-End: 168-581
caggagaaagcaatattgtaagatcaaagaaaaggccataacagcgcacccaaaaaatttcagcattaccattctgagggtcaggagtctcctcccttccatccgccaacacttgaatcaggactataaatgtttcctgaggttataggcgggtgtttgaggagtacatgcgggttattagccagcggtacccagacatccgcattgaaggagagaattacctccctcaaccaatatatagacacatagcatctttcctgtcagtcttcaaactagtattaataggcttaataattgttggcaaggatccttttgctttctttggcatgcaagctcctagcatctggcagtggggccaagaaaataaggtttatgcatgtatgatggttttcttcttgagcaacatgattgagaaccagtgtatgtcaacaggtgcatttgagataactttaaatgatgtacctgtgtggtctaagctggaatctggtcaccttccatccatgcaacaacttgttcaaattcttgacaatgaaatgaagctcaatgtgcatatggattcaatcccacaccatcgatcatagcaccacctatcagcactgaaaactcttttgcattaagggatcattgcaagagcagcgtgactgacattatgaaggcctgtactgaagacagcaagctgttagtacagaccagatgctttcttggcaggctcgttgtacctcttggaaaacctcaatgcaagatagtgtttcagtgctggcatattttggaattctgcacatt

SEQ ID NO: 179679 - DNA, 944 bp, Homo sapiens
  Payload ID: 15413
  Gene Symbol:
  Gene Name: selenoprotein T [Source:EntrezGene
  Acc:51714]
  ENST ID: ENST00000477889
  CDS Start-End: 467-880
agcagctcgctcctgggctttgggctggctgcagtctgtctgagggcggccgaagtggctggctcatttaagatgaggcttctgctgcttctcctagtggcggcgtctgcgatggtccggagcgaggcctcggccaatctgggcggcgtgcccagcaagagattaaagatgcagtacgccacggggccgctgctcaagttccagatttgagatggagtctcactgtattgcctaggctggtcttgaactcctgggatcaagtgaacctcctgcctcagcctcccaaagtgctgggattacagatgtgagccacgatgcccagcctatgatagactttaaaaagcacaaaaccaatttgaaatagcatggacaagagattttgctgtattttcgaaatttcctttctgttctgcatagatcatctaatattgtttcctgaggttataggcgggtgtttgaggagtacatgcgggttattagccagcggtacccagacatccgcattgaaggagagaattacctccctcaaccaatatatagacacatagcatctttcctgtcagtcttcaaactagtattaataggcttaataattgttggcaaggatccttttgctttctttggcatgcaagctcctagcatctggcagtggggccaagaaaataaggtttatgcatgtatgatggttttcttcttgagcaacatgattgagaaccagtgtatgtcaacaggtgcatttgagataactttaaatgatgtacctgtgtggtctaagctggaatctggtcaccttccatccatgcaacaacttgttcaaattcttgacaatgaaatgaagctcaatgtgcatatggattcaatcccacaccatcgatcatagcaccacctatcagcactgaaaactcttttgcattaagggatcattgcaagagcagcgtgactga

SEQ ID NO: 179680 - DNA, 3469 bp, Homo sapiens
  Payload ID: 15413
  Gene Symbol:
  Gene Name: selenoprotein T [Source:EntrezGene
  Acc:51714]
  ENST ID: ENST00000471696
  CDS Start-End: 76-663
gggagcagctcgctcctgggctttgggctggctgcagtctgtctgagggcggccgaagtggctggctcatttaagatgaggcttctgctgcttctcctagtggcggcgtctgcgatggtccggagcgaggcctcggccaatctgggcggcgtgcccagcaagagattaaagatgcagtacgccacggggccgctgctcaagttccagatttgtgtttcctgaggttataggcgggtgtttgaggagtacatgcgggttattagccagcggtacccagacatccgcattgaaggagagaattacctccctcaaccaatatatagacacatagcatctttcctgtcagtcttcaaactagtattaataggcttaataattgttggcaaggatccttttgctttctttggcatgcaagctcctagcatctggcagtggggccaagaaaataaggtttatgcatgtatgatggttttcttcttgagcaacatgattgagaaccagtgtatgtcaacaggtgcatttgagataactttaaatgatgtacctgtgtggtctaagctggaatctggtcaccttccatccatgcaacaacttgttcaaattcttgacaatgaaatgaagctcaatgtgcatatggattcaatcccacaccatcgatcatagcaccacctatcagcactgaaaactcttttgcattaagggatcattgcaagagcagcgtgactgacattatgaaggcctgtactgaagacagcaagctgttagtacagaccagatgctttcttggcaggctcgttgtacctcttggaaaacctcaatgcaagatagtgtttcagtgctggcatattttggaattctgcacattcatggagtgcaataatactgtatagctttccccacctcccacaaaatcacccagttaatgtgtgtgtgtgttttttttttaaggtaaacattactacttgtaactttttttcttagtcatatttgaaaaagtagaaaattgagttacaatttgattttttttccaaagatgtctgttaaatctgttgtgcttttatatgaatatttgttttttatagtttaaaattgatcctttgggaatccagttgaagttcccaaatactttataagagtttatcagacatctctaatttggccatgtccagtttatacagtttacaaaatatagcagatgcaagattatgggggaaatcctatattcagagtactctataaatttttgtgtatgtgtgtatgtgcgtgtgattaccagagaactactaaaaaaaccaactgctttttaaatcctattgtgtagttaaagtgtcatgccttgaccaatctaatgaattgattaattaactgggcctttatacttaactaaataaaaaactaagcagatatgagttaaatttaaaagtttcaatttattgctcagtgtacctgttaacattatatttaacaattgcttaaatttttgtttttgatttatggataatttcttaagagtacacactttagatacacaaataatcgttcatttaccatctttaggatcattgaaactcatctcactaaagaaagttcacttgaacctctttatagcattgatactaggtgaacagaaattacctgactaataatttgtctaacatcatatatcagaattttattgtatatgatgaacaaaacttaaaattttttaaatttaatttttaaatactgtttcagagttctaaaaaggcagttttttaaaaaacttaagttgataaaaactgtaagaataatttagcagaaatagaaccagaatgtagaagagtagtcatgtaacagcagtaataacatacttcagcttccatataggaatagaagtggtagagccaaaagtgatttaggaaaagttataaggtacaggttgagtatcccttttccaaaaatgcttgggacaagaagtatttcagatttcataatttttttcaaagtttggaatatttgcattatacttaccagttgggcatcccaaatctgaaatctgaaatgttccatgagcatttcctttgagtgtcatgttggcactcaaaaaggttcaacattgagtccacttaacacttaggtgttagaagacctaactttctgtaacaattaaccttatactttgtttgtcatcgaatatttgttgaatgcatgtcaggtaatggtcttgattgtgatagcttcaaggtggaacatactgtaatctccagatgctaggaagttagtctaataattcactgcagaaaattgattaagtggctgtccttttaattaagagtgtggagtcataaacttaagttcttcatatagtgacaagagtccttagagattgttattcaagttccttagaaattgttatttaggtataatatcatcttgtctttgactagagcttgaaaccttgttatctgattgtgtaccactccaaattccctgccttctgcaagttgaatgtcttgctgaatgtgtctaggggttcatcttcagtaatcgacattccactagtgccatagttaacttcatgacatgtagacattcaaaacttgagccttggatgttcctgtggacctgacagttaaaaatataaagaacctaggattcaattccaactttctctgtttgccttgggttgaataacttatcttttggagaatagctttaagtggcttagacactgataaaattcagctgtgttgttgacgctcatctcttttgtcttacgcttagccatatttaaatcttgaatttaatagagtctagtgaaaaaaatgagtgggaagaatgaatataaaagtaataatataaggaaaaagggaaagtaaactatttagaatgtagttttgttatattcccagcatttcaatatttattagttacttgtaaattactgtggctgtgtagtttataaatgtctgtgcactatattaattagaagaccatagaacatgccagcaggttggctaatgctatgggggtttttaccacagttgccattgtggaagaaattatttggtacattaataaaaaaagttggtaaaacatggttttatacctcagtgtataagatgtgcaagacaaatatgcttatttccttttctagaatataagtgatattatttgcttatgacactaacactattaatgacaggagtcaatcagcctttacagctatcaaaatataatgagatcccaatgatgattcttttttactttgaatgttaattagtttgggactttgattggctggcaaacattttatcattgtcagaatttaatttagatttcaaaaatagcttacaggattttaaacatggtgtggtattctaaagccttttttttaaaaaaagagatctttttgagagaaacaaatgaggattgtaaagtttggggacttacctctgtagcattgtgaaaataaactttgattaagctg

SEQ ID NO: 179681 - DNA, 1078 bp, Homo sapiens
  Payload ID: 15413
  Gene Symbol:
  Gene Name: selenoprotein T [Source:EntrezGene
  Acc:51714]
  ENST ID: ENST00000485923
  CDS Start-End: 389-802
gcggccgaagtggctggctcatttaagatgaggcttctgctgcttctcctagtggcggcgtctgcgatggtccggagcgaggcctcggccaatctgggcggcgtgcccagcaagagattaaagatgcagtacgccacggggccgctgctcaagttccagatttggtgagtatgtgcactgggccccggccaccccgccgcgcctctgctcggcgccattggctacgcgaggccccggcttcgcggcctaaatggccgcatcttcgctggcctcgtagaactgtgccggcgcccttccacagccagccttctcgcggccccttagcgcggtcaggccgccctccttttccagtgtttcctgaggttataggcgggtgtttgaggagtacatgcgggttattagccagcggtacccagacatccgcattgaaggagagaattacctccctcaaccaatatatagacacatagcatctttcctgtcagtcttcaaactagtattaataggcttaataattgttggcaaggatccttttgctttctttggcatgcaagctcctagcatctggcagtggggccaagaaaataaggtttatgcatgtatgatggttttcttcttgagcaacatgattgagaaccagtgtatgtcaacaggtgcatttgagataactttaaatgatgtacctgtgtggtctaagctggaatctggtcaccttccatccatgcaacaacttgttcaaattcttgacaatgaaatgaagctcaatgtgcatatggattcaatcccacaccatcgatcatagcaccacctatcagcactgaaaactcttttgcattaagggatcattgcaagagcagcgtgactgacattatgaaggcctgtactgaagacagcaagctgttagtacagaccagatgctttcttggcaggctcgttgtacctcttggaaaacctcaatgcaagatagtgtttcagtgctggcatattttggaattctgcacattcatggagtgcaataatactgtatagctttccccacctcccacaaaatcacccagttaatgtgtgtgtgtgtttt

SEQ ID NO: 179682 - DNA, 3488 bp, Homo sapiens
  Payload ID: 15413
  Gene Symbol:
  Gene Name: selenoprotein T [Source:EntrezGene
  Acc:51714]
  ENST ID: ENST00000615547
  CDS Start-End: 85-672
tgcgcagtggggagcagctcgctcctgggctttgggctggctgcagtctgtctgagggcggccgaagtggctggctcatttaagatgaggcttctgctgcttctcctagtggcggcgtctgcgatggtccggagcgaggcctcggccaatctgggcggcgtgcccagcaagagattaaagatgcagtacgccacggggccgctgctcaagttccagatttgggttagttcaggttataggcgggtgtttgaggagtacatgcgggttattagccagcggtacccagacatccgcattgaaggagagaattacctccctcaaccaatatatagacacatagcatctttcctgtcagtcttcaaactagtattaataggcttaataattgttggcaaggatccttttgctttctttggcatgcaagctcctagcatctggcagtggggccaagaaaataaggtttatgcatgtatgatggttttcttcttgagcaacatgattgagaaccagtgtatgtcaacaggtgcatttgagataactttaaatgatgtacctgtgtggtctaagctggaatctggtcaccttccatccatgcaacaacttgttcaaattcttgacaatgaaatgaagctcaatgtgcatatggattcaatcccacaccatcgatcatagcaccacctatcagcactgaaaactcttttgcattaagggatcattgcaagagcagcgtgactgacattatgaaggcctgtactgaagacagcaagctgttagtacagaccagatgctttcttggcaggctcgttgtacctcttggaaaacctcaatgcaagatagtgtttcagtgctggcatattttggaattctgcacattcatggagtgcaataatactgtatagctttccccacctcccacaaaatcacccagttaatgtgtgtgtgtgttttttttttaaggtaaacattactacttgtaactttttttcttagtcatatttgaaaaagtagaaaattgagttacaatttgattttttttccaaagatgtctgttaaatctgttgtgcttttatatgaatatttgttttttatagtttaaaattgatcctttgggaatccagttgaagttcccaaatactttataagagtttatcagacatctctaatttggccatgtccagtttatacagtttacaaaatatagcagatgcaagattatgggggaaatcctatattcagagtactctataaatttttgtgtatgtgtgtatgtgcgtgtgattaccagagaactactaaaaaaaccaactgctttttaaatcctattgtgtagttaaagtgtcatgccttgaccaatctaatgaattgattaattaactgggcctttatacttaactaaataaaaaactaagcagatatgagttaaatttaaaagtttcaatttattgctcagtgtacctgttaacattatatttaacaattgcttaaatttttgtttttgatttatggataatttcttaagagtacacactttagatacacaaataatcgttcatttaccatctttaggatcattgaaactcatctcactaaagaaagttcacttgaacctctttatagcattgatactaggtgaacagaaattacctgactaataatttgtctaacatcatatatcagaattttattgtatatgatgaacaaaacttaaaattttttaaatttaatttttaaatactgtttcagagttctaaaaaggcagttttttaaaaaacttaagttgataaaaactgtaagaataatttagcagaaatagaaccagaatgtagaagagtagtcatgtaacagcagtaataacatacttcagcttccatataggaatagaagtggtagagccaaaagtgatttaggaaaagttataaggtacaggttgagtatcccttttccaaaaatgcttgggacaagaagtatttcagatttcataatttttttcaaagtttggaatatttgcattatacttaccagttgggcatcccaaatctgaaatctgaaatgttccatgagcatttcctttgagtgtcatgttggcactcaaaaaggttcaacattgagtccacttaacacttaggtgttagaagacctaactttctgtaacaattaaccttatactttgtttgtcatcgaatatttgttgaatgcatgtcaggtaatggtcttgattgtgatagcttcaaggtggaacatactgtaatctccagatgctaggaagttagtctaataattcactgcagaaaattgattaagtggctgtccttttaattaagagtgtggagtcataaacttaagttcttcatatagtgacaagagtccttagagattgttattcaagttccttagaaattgttatttaggtataatatcatcttgtctttgactagagcttgaaaccttgttatctgattgtgtaccactccaaattccctgccttctgcaagttgaatgtcttgctgaatgtgtctaggggttcatcttcagtaatcgacattccactagtgccatagttaacttcatgacatgtagacattcaaaacttgagccttggatgttcctgtggacctgacagttaaaaatataaagaacctaggattcaattccaactttctctgtttgccttgggttgaataacttatcttttggagaatagctttaagtggcttagacactgataaaattcagctgtgttgttgacgctcatctcttttgtcttacgcttagccatatttaaatcttgaatttaatagagtctagtgaaaaaaatgagtgggaagaatgaatataaaagtaataatataaggaaaaagggaaagtaaactatttagaatgtagttttgttatattcccagcatttcaatatttattagttacttgtaaattactgtggctgtgtagtttataaatgtctgtgcactatattaattagaagaccatagaacatgccagcaggttggctaatgctatgggggtttttaccacagttgccattgtggaagaaattatttggtacattaataaaaaaagttggtaaaacatggttttatacctcagtgtataagatgtgcaagacaaatatgcttatttccttttctagaatataagtgatattatttgcttatgacactaacactattaatgacaggagtcaatcagcctttacagctatcaaaatataatgagatcccaatgatgattcttttttactttgaatgttaattagtttgggactttgattggctggcaaacattttatcattgtcagaatttaatttagatttcaaaaatagcttacaggattttaaacatggtgtggtattctaaagccttttttttaaaaaaagagatctttttgagagaaacaaatgaggattgtaaagtttggggacttacctctgtagcattgtgaaaataaactttgattaagctgatttgaaagg

SEQ ID NO: 179683 - DNA, 1704 bp, Homo sapiens
  Payload ID: 15414
  Gene Symbol:
  Gene Name: selenoprotein V [Source:EntrezGene
  Acc:348303]
  ENST ID: ENST00000335426
  CDS Start-End: 101-1141
cgccgcgtctcagaacccggtgcgggagacgctctccccgcccaaagagggaaggcgggcgggactccccaaccggcttgccccggtccccctgggccccatgaataaccaggcgcggaccccagccccctcctcggcgcggacttcaacctcagtccgggcttctaccccgacccggacaccgactccactccggaccccgactccggtccggactcggacccccatccggaccctgactccagtcctgactccgtctccagccgggacttcccctctggtcctgactcctgctccagcccagattcccactctggtccccactcccgctctggcccggatcccccgtctggttccgcctcctgctccggcctggatccctactccggtgccgactcccgttcccgtccggaacccaactccggtcccgactccggctcggaccctgactcctccagtccgggtcccagccccagccccagcccagctcctggcagggattcgggccgcgctccccgtcttggactcctacctggccccggccctacctttggatccgcccccggaacctgctccggagctgcctttgttgcccgaggaggaccctgagccggcgccgagcctgaagctcatcccgtcggtctccagcgaggccgggcccgccccggggccccttcccacgcgcaccccgctggccgcgaactcacccgggcccaccctggacttcaccttcagggcagacccgtcggccatcgggctggcggatccccccattcccagtcctgtcccctcgcccatcctggggaccatcccgtcggccatctccttacagaattgtacggaaaccttcccctcctccagcgagaacttcgcgctggacaagagggtcctgattcgagtgacctactgtggcctctgaagctatagccttcggtacattctactgaaaaagagcctggagcagcaatttccgaatcacctactctttgaggaggacagagctgcccaggctacaggggagtttgaggtgtttgtgaacgggagactggtccattccaagaagaggggtgatggctttgtgaacgagtccaggctgcagaaaattgtgagcgttatcgatgaggaaatcaagaaaaggtagccggcaaggggtggagctggaggagtctcagctggatgatgagaagggctgaaatgttgccaagtcaggtccttttctgatggtggctggggctggggtgagctcagggaggggaagaggagaatacatgcagagtcagcacccctgtgtccagtctgactgtgtctgctgtcgccacactcacctctgaggtctgtggaagtcacctgatattctggccccaggggtgggagggaggggagcttggaaggctagtcctgtagctccagtcctctgtctggcctccactcctcttgctcctgagggcagtttgtttcttttgtggattcgtcatttcccatgccctggttccagatacattttgaaaaccttccatcttattggcattttctggggttgtgagggaaacggggatggcagtcagactcaaacccgtgacactccaaactcgattatgctccagggcccactttctaaacctgtaagatctatgttccagcctgcgcaacatagtgagaccccaactctacaaaaaataaaaaattagccaggtgtggtggtgt

SEQ ID NO: 179684 - DNA, 1701 bp, Homo sapiens
  Payload ID: 15414
  Gene Symbol:
  Gene Name: selenoprotein V [Source:EntrezGene
  Acc:348303]
  ENST ID: ENST00000423711
  CDS Start-End: 101-1138
cgccgcgtctcagaacccggtgcgggagacgctctccccgcccaaagagggaaggcgggcgggactccccaaccggcttgccccggtccccctgggccccatgaataaccaggcgcggaccccagccccctcctcggcgcggacttcaacctcagtccgggcttctaccccgacccggacaccgactccactccggaccccgactccggtccggactcggacccccatccggaccctgactccagtcctgactccgtctccagccgggacttcccctctggtcctgactcctgctccagcccagattcccactctggtccccactcccgctctggcccggatcccccgtctggttccgcctcctgctccggcctggatccctactccggtgccgactcccgttcccgtccggaacccaactccggtcccgactccggctcggaccctgactcctccagtccgggtcccagccccagccccagcccagctcctggcagggattcgggccgcgctccccgtcttggactcctacctggccccggccctacctttggatccgcccccggaacctgctccggagctgcctttgttgcccgaggaggaccctgagccggcgccgagcctgaagctcatcccgtcggtctccagcgaggccgggcccgccccggggccccttcccacgcgcaccccgctggccgcgaactcacccgggcccaccctggacttcaccttcagggcagacccgtcggccatcgggctggcggatccccccattcccagtcctgtcccctcgcccatcctggggaccatcccgtcggccatctccttacagaattgtacggaaaccttcccctcctccagcgagaacttcgcgctggacaagagggtcctgattcgagtgacctactgtggcctcagctatagccttcggtacattctactgaaaaagagcctggagcagcaatttccgaatcacctactctttgaggaggacagagctgcccaggctacaggggagtttgaggtgtttgtgaacgggagactggtccattccaagaagaggggtgatggctttgtgaacgagtccaggctgcagaaaattgtgagcgttatcgatgaggaaatcaagaaaaggtagccggcaaggggtggagctggaggagtctcagctggatgatgagaagggctgaaatgttgccaagtcaggtccttttctgatggtggctggggctggggtgagctcagggaggggaagaggagaatacatgcagagtcagcacccctgtgtccagtctgactgtgtctgctgtcgccacactcacctctgaggtctgtggaagtcacctgatattctggccccaggggtgggagggaggggagcttggaaggctagtcctgtagctccagtcctctgtctggcctccactcctcttgctcctgagggcagtttgtttcttttgtggattcgtcatttcccatgccctggttccagatacattttgaaaaccttccatcttattggcattttctggggttgtgagggaaacggggatggcagtcagactcaaacccgtgacactccaaactcgattatgctccagggcccactttctaaacctgtaagatctatgttccagcctgcgcaacatagtgagaccccaactctacaaaaaataaaaaattagccaggtgtggtggtgt

SEQ ID NO: 179685 - DNA, 481 bp, Homo sapiens
  Payload ID: 15414
  Gene Symbol:
  Gene Name: selenoprotein V [Source:EntrezGene
  Acc:348303]
  ENST ID: ENST00000600586
  CDS Start-End: 1-221
actcacccgggcccaccctggacttcaccttcagggcagacccgtcggccatcgggctggcggatccccccattcccagtcctgtcccctcgcccatcctggggaccatcccgtcggccatctccttacagaattgtacggaaaccttcccctcctccagcgagaacttcgcgctggacaagagggtcctgattcgagtgacctactgtacattctactgaaaaagagcctggagcagcaatttccgaatcacctactctttaggggtgatggctttgtgaacgagtccaggctgcagaaaattgtgagcgttatcgatgaggaaatcaagaaaaggtagccggcaaggggtggagctggaggagtctcagctggatgatgagaagggctgaaatgttgccaagtcaggtccttttctgatggtggctggggctggggtgagctcagggaggggaagaggagaatacatgcagagtcagca

SEQ ID NO: 179686 - DNA, 1704 bp, Homo sapiens
  Payload ID: 15414
  Gene Symbol:
  Gene Name: selenoprotein V [Source:EntrezGene
  Acc:348303]
  ENST ID: ENST00000622070
  CDS Start-End: 101-1141
cgccgcgtctcagaacccggtgcgggagacgctctccccgcccaaagagggaaggcgggcgggactccccaaccggcttgccccggtccccctgggccccatgaataaccaggcgcggaccccagccccctcctcggcgcggacttcaacctcagtccgggcttctaccccgacccggacaccgactccactccggaccccgactccggtccggactcggacccccatccggaccctgactccagtcctgactccgtctccagccgggacttcccctctggtcctgactcctgctccagcccagattcccactctggtccccactcccgctctggcccggatcccccgtctggttccgcctcctgctccggcctggatccctactccggtgccgactcccgttcccgtccggaacccaactccggtcccgactccggctcggaccctgactcctccagtccgggtcccagccccagccccagcccagctcctggcagggattcgggccgcgctccccgtcttggactcctacctggccccggccctacctttggatccgcccccggaacctgctccggagctgcctttgttgcccgaggaggaccctgagccggcgccgagcctgaagctcatcccgtcggtctccagcgaggccgggcccgccccggggccccttcccacgcgcaccccgctggccgcgaactcacccgggcccaccctggacttcaccttcagggcagacccgtcggccatcgggctggcggatccccccattcccagtcctgtcccctcgcccatcctggggaccatcccgtcggccatctccttacagaattgtacggaaaccttcccctcctccagcgagaacttcgcgctggacaagagggtcctgattcgagtgacctactggattctgaacagctatagccttcggtacattctactgaaaaagagcctggagcagcaatttccgaatcacctactctttgaggaggacagagctgcccaggctacaggggagtttgaggtgtttgtgaacgggagactggtccattccaagaagaggggtgatggctttgtgaacgagtccaggctgcagaaaattgtgagcgttatcgatgaggaaatcaagaaaaggtagccggcaaggggtggagctggaggagtctcagctggatgatgagaagggctgaaatgttgccaagtcaggtccttttctgatggtggctggggctggggtgagctcagggaggggaagaggagaatacatgcagagtcagcacccctgtgtccagtctgactgtgtctgctgtcgccacactcacctctgaggtctgtggaagtcacctgatattctggccccaggggtgggagggaggggagcttggaaggctagtcctgtagctccagtcctctgtctggcctccactcctcttgctcctgagggcagtttgtttcttttgtggattcgtcatttcccatgccctggttccagatacattttgaaaaccttccatcttattggcattttctggggttgtgagggaaacggggatggcagtcagactcaaacccgtgacactccaaactcgattatgctccagggcccactttctaaacctgtaagatctatgttccagcctgcgcaacatagtgagaccccaactctacaaaaaataaaaaattagccaggtgtggtggtgt

SEQ ID NO: 179687 - DNA, 881 bp, Homo sapiens
  Payload ID: 15415
  Gene Symbol: SEPW1
  Gene Name: selenoprotein W, 1
  ENST ID: ENST00000509570
  CDS Start-End: 202-468
gcgggttccttatcctccgccttggcgcctctccgcccaccgcccaccgcccctccctggcattggttggcgccaggggaagccgaggctccatcctttctgcgcaggttcccgccgcactcgcgcagacctagcgcgtccaggtgggaggttagtgtggcccgggcgtccgctcctcagcggatgtggcagccccgagccatggctctcgccgtccgagtcgtttattgctgcggggccggaggctacaagtccaagtatcttcagctcaagaagaagttagaagatgagttccccggccgcctggacatctgcggcgagggaactccccaggccaccgggttctttgaagtgatggtagccgggaagttgattcactctaagaagaaaggcgatggctacgtggacacagaaagcaagtttctgaagttggtggccgccatcaaagccgccttggctcagggctaatgcgccctgaaggcagagtccagggaccttgacccagcccctctcagcagacgcttcatgataggaaggactgaaaagtcttgtggacacctggtctttccctgatgttctcgtggctgctgttgggggcagagattgacgcccccggtctttgcctctgagcgggagagtctgtgtgtatgtgtcttccccggaatccacaccaccccaccctcctcctgtcccgtggtttcatcatatctctttgcataccccatgtcttccccagttgtcccctggagtttggggggacatcccgcctcaggcatccttctcaaggggaagccaagagaggcatcaggatgggtgggtttctgattgtggcaacgtttgcaaccgttcacgattcaataaatattggatgaatttaactg

SEQ ID NO: 179688 - DNA, 636 bp, Homo sapiens
  Payload ID: 15415
  Gene Symbol: SEPW1
  Gene Name: selenoprotein W, 1
  ENST ID: ENST00000599874
  CDS Start-End: 86-343
tctgcgcaggttcccgccgcactcgcgcagacctagcgcgtccaggtgggaggttagtgtggcccgggcgtccgctcctcagcggatgtggcagccccgagccatggctctcgccgtccgagtcgtttattgtggcgcttgaggctacaagtccaagtatcttcagctcaagaagaagttagaagatgagttccccggccgcctggacatcgtgagtcttgggatggggagaaagacttgagcacagccactgtgtcggtccgttaggcctggatggcactgcaggggggttagtgcggcgagggaactccccaggccaccgggttctttgaagtgatggtagccgggaagttgattcactctaagaagaaaggcgatggctacgtggacacagaaagcaagtttctgaagttggtggccgccatcaaagccgccttggctcagggctaatgcgccctgaaggcagagtccagggaccttgacccagcccctctcagcagacgcttcatgataggaaggactgaaaagtcttgtggacacctggtctttccctgatgttctcgtggctgctgttgggggcagagattgacgcccccggtctttgcctctgagcgggagagtctgtgtgtatgtgtc

SEQ ID NO: 179689 - DNA, 535 bp, Homo sapiens
  Payload ID: 15415
  Gene Symbol: SEPW1
  Gene Name: selenoprotein W, 1
  Uniprot ID: P63302
  ENST ID: ENST00000595615
  CDS Start-End: 86-349
gcactcgcgcagacctagcgcgtccaggtgggaggttagtgtggcccgggcgtccgctcctcagcggatgtggcagccccgagccatggctctcgccgtccgagtcgtttattgtggcgcttgaggctacaagtccaagtatcttcagctcaagaagaagttagaagatgagttccccggccgcctggacatctgcggcgagggaactccccaggccaccgggttctttgaagtgatggtagccgggaagttgattcactctaagaagaaaggcgatggctacgtggacacagaaagcaagtttctgaagttggtggccgccatcaaagccgccttggctcagggctaatgcgccctgaaggcagaggtgagggggcccactagacagggacaccaccctttggatcttctccctgccccatgctctgactccttggcccagggtggagagcctgggagatgggggggacatcacgtgtgtccccagagcgagcgggataaagttagacccggttggtggaggacaacaactgag

SEQ ID NO: 179690 - DNA, 550 bp, Homo sapiens
  Payload ID: 15415
  Gene Symbol: SEPW1
  Gene Name: selenoprotein W, 1
  Uniprot ID: P63302
  ENST ID: ENST00000593892
  CDS Start-End: 110-373
atcctttctgcgcaggttcccgccgcactcgcgcagacctagcgcgtccaggtgggaggttagtgtggcccgggcgtccgctcctcagcggatgtggcagccccgagccatggctctcgccgtccgagtcgtttattgtggcgcttgaggctacaagtccaagtatcttcagctcaagaagaagttagaagatgagttccccggccgcctggacatctgcggcgagggaactccccaggccaccgggttctttgaagtgatggtagccgggaagttgattcactctaagaagaaaggcgatggctacgtggacacagaaagcaagtttctgaagttggtggccgccatcaaagccgccttggctcagggctaatgcgccctgaaggcagagattgacgcccccggtctttgcctctgagcgggagagtctgtgtgtatgtgtcttccccggaatccacaccaccccaccctcctcctgtcccgtggtttcatcatatctctttgcataccccatgtcttccccagttgtcccctggagtttggggggaca

SEQ ID NO: 179691 - DNA, 888 bp, Homo sapiens
  Payload ID: 15415
  Gene Symbol: SEPW1
  Gene Name: selenoprotein W, 1
  Uniprot ID: P63302
  ENST ID: ENST00000601048
  CDS Start-End: 215-478
gggctggcgggtcgcgggttccttatcctccgccttggcgcctctccgcccaccgcccaccgcccctccctggcattggttggcgccaggggaagccgaggctccatcctttctgcgcaggttcccgccgcactcgcgcagacctagcgcgtccaggtgggaggttagtgtggcccgggcgtccgctcctcagcggatgtggcagccccgagccatggctctcgccgtccgagtcgtttattgtggcgcttgaggctacaagtccaagtatcttcagctcaagaagaagttagaagatgagttccccggccgcctggacatctgcggcgagggaactccccaggccaccgggttctttgaagtgatggtagccgggaagttgattcactctaagaagaaaggcgatggctacgtggacacagaaagcaagtttctgaagttggtggccgccatcaaagccgccttggctcagggctaatgcgccctgaaggcagagtccagggaccttgacccagcccctctcagcagacgcttcatgataggaaggactgaaaagtcttgtggacacctggtctttccctgatgttctcgtggctgctgttgggggcagagattgacgcccccggtctttgcctctgagcgggagagtctgtgtgtatgtgtcttccccggaatccacaccaccccaccctcctcctgtcccgtggtttcatcatatctctttgcataccccatgtcttccccagttgtcccctggagtttggggggacatcccgcctcaggcatccttctcaaggggaagccaagagaggcatcaggatgggtgggtttctgattgtggcaacgtttgcaaccgttcacgattcaataaatattggatgaatttaa

SEQ ID NO: 179692 - DNA, 875 bp, Homo sapiens
  Payload ID: 15415
  Gene Symbol: SEPW1
  Gene Name: selenoprotein W, 1
  ENST ID: ENST00000612212
  CDS Start-End: 202-462
gcgggttccttatcctccgccttggcgcctctccgcccaccgcccaccgcccctccctggcattggttggcgccaggggaagccgaggctccatcctttctgcgcaggttcccgccgcactcgcgcagacctagcgcgtccaggtgggaggttagtgtggcccgggcgtccgctcctcagcggatgtggcagccccgagccatggctctcgccgtccgagtcgtttattgtggcgctggctacaagtccaagtatcttcagctcaagaagaagttagaagatgagttccccggccgcctggacatctgcggcgagggaactccccaggccaccgggttctttgaagtgatggtagccgggaagttgattcactctaagaagaaaggcgatggctacgtggacacagaaagcaagtttctgaagttggtggccgccatcaaagccgccttggctcagggctaatgcgccctgaaggcagagtccagggaccttgacccagcccctctcagcagacgcttcatgataggaaggactgaaaagtcttgtggacacctggtctttccctgatgttctcgtggctgctgttgggggcagagattgacgcccccggtctttgcctctgagcgggagagtctgtgtgtatgtgtcttccccggaatccacaccaccccaccctcctcctgtcccgtggtttcatcatatctctttgcataccccatgtcttccccagttgtcccctggagtttggggggacatcccgcctcaggcatccttctcaaggggaagccaagagaggcatcaggatgggtgggtttctgattgtggcaacgtttgcaaccgttcacgattcaataaatattggatgaatttaactg

SEQ ID NO: 179693 - DNA, 8225 bp, Homo sapiens
  Payload ID: 15416
  Gene Symbol: SEMA3A
  Gene Name: sema domain, immunoglobulin domain (Ig), short basic domain, secreted, (semaphorin) 3A
  Uniprot ID: Q14563
  ENST ID: ENST00000265362
  CDS Start-End: 316-2631
aagcaccactgcagcagaccttgttaattttttttttttttctttccacacaacagttgtgcctcattatccggtgcctggctcggaatttttttttttttttttctttttggagggtttgaagtttctgtgcttcagtgactgttacagaagaagaggtgttagtgttgccatgaggtcttgattgtctgcatttatgaatgaaactgacctaaatcacctgttacctccagtttccagattgtttgaacttctctggccgcacaatacaggaaggaagactaaagcagcaaagggacctacagcgtctgcagcatgggctggttaactaggattgtctgtcttttctggggagtattacttacagcaagagcaaactatcagaatgggaagaacaatgtgccaaggctgaaattatcctacaaagaaatgttggaatccaacaatgtgatcactttcaatggcttggccaacagctccagttatcataccttccttttggatgaggaacggagtaggctgtatgttggagcaaaggatcacatattttcattcgacctggttaatatcaaggattttcaaaagattgtgtggccagtatcttacaccagaagagatgaatgcaagtgggctggaaaagacatcctgaaagaatgtgctaatttcatcaaggtacttaaggcatataatcagactcacttgtacgcctgtggaacgggggcttttcatccaatttgcacctacattgaaattggacatcatcctgaggacaatatttttaagctggagaactcacattttgaaaacggccgtgggaagagtccatatgaccctaagctgctgacagcatcccttttaatagatggagaattatactctggaactgcagctgattttatggggcgagactttgctatcttccgaactcttgggcaccaccacccaatcaggacagagcagcatgattccaggtggctcaatgatccaaagttcattagtgcccacctcatctcagagagtgacaatcctgaagatgacaaagtatactttttcttccgtgaaaatgcaatagatggagaacactctggaaaagctactcacgctagaataggtcagatatgcaagaatgactttggagggcacagaagtctggtgaataaatggacaacattcctcaaagctcgtctgatttgctcagtgccaggtccaaatggcattgacactcattttgatgaactgcaggatgtattcctaatgaactttaaagatcctaaaaatccagttgtatatggagtgtttacgacttccagtaacattttcaagggatcagccgtgtgtatgtatagcatgagtgatgtgagaagggtgttccttggtccatatgcccacagggatggacccaactatcaatgggtgccttatcaaggaagagtcccctatccacggccaggaacttgtcccagcaaaacatttggtggttttgactctacaaaggaccttcctgatgatgttataacctttgcaagaagtcatccagccatgtacaatccagtgtttcctatgaacaatcgcccaatagtgatcaaaacggatgtaaattatcaatttacacaaattgtcgtagaccgagtggatgcagaagatggacagtatgatgttatgtttatcggaacagatgttgggaccgttcttaaagtagtttcaattcctaaggagacttggtatgatttagaagaggttctgctggaagaaatgacagtttttcgggaaccgactgctatttcagcaatggagctttccactaagcagcaacaactatatattggttcaacggctggggttgcccagctccctttacaccggtgtgatatttacgggaaagcgtgtgctgagtgttgcctcgcccgagacccttactgtgcttgggatggttctgcatgttctcgctattttcccactgcaaagagacgcacaagacgacaagatataagaaatggagacccactgactcactgttcagacttacaccatgataatcaccatggccacagccctgaagagagaatcatctatggtgtagagaatagtagcacatttttggaatgcagtccgaagtcgcagagagcgctggtctattggcaattccagaggcgaaatgaagagcgaaaagaagagatcagagtggatgatcatatcatcaggacagatcaaggccttctgctacgtagtctacaacagaaggattcaggcaattacctctgccatgcggtggaacatgggttcatacaaactcttcttaaggtaaccctggaagtcattgacacagagcatttggaagaacttcttcataaagatgatgatggagatggctctaagaccaaagaaatgtccaatagcatgacacctagccagaaggtctggtacagagacttcatgcagctcatcaaccaccccaatctcaacacaatggatgagttctgtgaacaagtttggaaaagggaccgaaaacaacgtcggcaaaggccaggacataccccagggaacagtaacaaatggaagcacttacaagaaaataagaaaggtagaaacaggaggacccacgaatttgagagggcacccaggagtgtctgagctgcattacctctagaaacctcaaacaagtagaaacttgcctagacaataactggaaaaacaaatgcaatatacatgaacttttttcatggcattatgtggatgtttacaatggtgggaaattcagctgagttccaccaattataaattaaatccatgagtaactttcctaataggctttttttcctaataccaccacctaacagagaacacaggtgaatgcagatgttcactttagcagacttaatgtttcctatgagatttcactgtacaggtttgtctttcttctttgcctgagaaataaaaatgtcatttgccatattgccatctaaaggagaaaaactgcatcagcaaagccattgtattgaactaaaagtttaaaatgaactgcatggatttactaagctgatgaatattccaaaacgtggttggattcaaggatatattttgtctaccggccctcatgtttgtatgtacttgaggagtaaaatgagtaaaatgatactgaatgaaatgttctgtggaaatattaaaaaaaaaaaaaaacataagccatccatcatccagaagaaaaatggaatacactgatctactactgatgtcttctttcagctttgatctaaagatgtattttattaaaactataatttaaatgtaccatgaaaaatatgcagtaaaaattagttgttttctaagctagagtaggatttgtcttacaattattgtgctatgtagtttttgttttaaaaattccaatggtgtgctgctttctttggacattttattttcaattctataagagggatagatgacattgttctagaaacacatatacatcattaagagtgaatctctaaaaccaggatataaattatgctttatttctctgagaaaatcaaacaaatggaagctgttcacacctccccttctttaagcattatctaaattaatttttacttgcataatgttcttagaaaaaaaaacagaacatttaagcaggaaaaaaggaagaaacaagttgatttttaagtgcattttactataatgaatcaatgaagggaaaaggaactgcatatttcatgaaaataataagcattgtcttaatatactgttaatagaaaatgtgtcttaattccgtgcttgaatccctgcatgatatttgagactaagatctctcttatgattctaccaagaattatatctgtgtcacttaatttttttaaaagagagagatcaataactattcagagcaacatgttaaaggcaaagtttccaatcatttacatctgtatcaggtgcctcttacctttccttatttaagacaattatttgtacaagaaacacatgactcttttcatatcaatgggagggacttttctacaaagtattttccaggatgcaacccacatttaaacaatgtaaaattctttgtttcctgcaacaacttacaaaataaggtaaaagactaaaattcaagatttgcttccttcattgtcctaagacgattcgttgagaatcactgactttgagatatttaaaactttcagcattatactgtggtttcttttgcactgcactcacctattcaggactcctcccccaggttcctcatcatgcacaaaaatgcaaagaaaacatcttattagtaattaatgaagcaacattgaaattctaactctagctgtctttggattctaattaactcagcatcaatttctcacctcagactacagtgaatttttatttcctatcagctgaaatatttcacagatggaagctcatgtttcagttttaatgactgccttgaataaacaagttgttgccacttgtttcaaacaaaagcctaaaaataatctacattcaattttaggctccattgactaatatggtgttgcttttggaagtactgtatatcctcacatggaagccaaattgttaaattatttgaaggacacaccactgtacagaaagtagtgtttcaaatataaatcgaagaacaaagagtgctccaaaaaataggtcattcttttattttcataaagtatctaaactgtactaacattcagtgttgtgtttcattctaaatttgcagctgaaataaatttatttgcgatagcagaaatatcttattattcatcctcagaaataaaggatttgaagggatagagattatatgataaatttatagaagactttcagaatttgaatgcattttgtttagtgttatgaaatgacaatagaaaaaagtctcgacttcaattaaaagttacacaaacaaacaaatctacaggcatgtctttatataccatcaggtctaagttttcaaagaaaattgtagatataacttgcagataactcattacagtcataatctctgcccatgtgtattgagagggggcagtttgcacgaaaaagaattattggcccatttaataattcagctttaaatagactttgtcatatgcatgaatcatcagagatgaaactgtttgagagactcatgtgaccttacgaaaattacaacagcagtcttaaagtatgaaaaagatgcatcacagcagagacattatggcccagttgatatcaaatgtaaaatgtaaatgcatgtaaatgcacacttcattttatgtattatttagtaatttgcagtggtatgtgtttaatatttttgctacctacacattaggcaaaaaaaagatgtaaataatttgggagaaaaagaggaagaacagtgtaaaataaaactttctataagtactccatttcaatgtgttcaacatcatcctaaaaggcaagattttcccacgcaggtgacaaggtggtttatgtactatttaagggcggaaggtgcgtgcccgttcaataagcatgttttttgccaggtaggaaatatgttccatatctttacttatcattgcatttcagatgggaactagaaaaactggagagaaaaatgtaatgaaactgctgctgtaaattattccttttagcatgtattcacttgctaaatacacatttcttcaaaatatttgaattcagatgtctttactgttccctataacatatggtgttaaggaacataagctcataaaatgttgagaaccagagtcaggttgctacataattagctaacagatttcttcattgtagtcatctgtaaactgggttctatatttatggtgatgatgtgaatttttatgccctttaaattaagtattgttctttttaatgtcatacctaaaaaggaaatgtagggataaatttttataatgtgtcattttcataatcagtttggttttattcaggatccacaaagatgtcagatgactgttattgaaattgcttatcttaaaggtcacagacaagcattttattaatatggagccactagtataatatgttaaaatctttgttttattagctcattttaaaacacaatttccattcaatttaatgaaactgtatcaggtttcatggtttcaaagacagacttaaataggattcaacacccccgtatcgtgtaataacatgttaaactggtctaacaccaaggacatctatacttttaacttgatttgtaataattatttgaagtcaatgttaatgtttgcaaatacatgtttccataaagaagaaaacattatttttcaaaaatctgtaaaatctcattagtttgtttgatctctaaaaattttcttaaactagttaattaaatgaacataatttttcaagttaataaattaagaaaatatctaaatgaaagagagaataaaatcagcatatgtgacagcccatatagtaaggacagtttcgcaatcaacgtaaccaaggaaaacagctttgttatcatttcaaacatgcaggcacacacaggcagaggcaaagctggaaccaaaccaaacaaaaagaagattttgaatattaaaaaactgggcctctagacactttgccttttagaaccagcttcctacacgttcaagtaaattccactgatagatcttgactatctacaatgtgctaggtattatgttaggtgatgaggacactaaagtgaataagacataacccttgttctcaaagagctcacaatgaaattaaggaaacagagcgagatgacttatcatcatctaatccagcaagtctttcctaatcctcccatccctagttcaagctagggaccttctctatgctaaacctgtgccttgtatataccttttattgtcacactaccccaatgtgtgatttatttgtttatgtttccatctccatttctagactgtgagctccttgagggcaggatttgtatctaattgatctctgtccccagtgtctagcatgatgcctggcacaaagagggagcccaataaatcactgttgaaaagaaccaagttacgatatgacaattgccaaatacaagctcacaataagagcggtatggatcaaagaaaaaaaaaaggaggaattaacttgtggagagagatcatggggtgcttcagagaataagtgactttccagctgtgaatcagtcagatatgcctagatgaagaaacaaaatggcaatctgagtagaagaaataaggagaaaggaggagaggtgtgaaaaaaagtcctttttctgagaacaagcattcaaacagataaaacacaggtttcataaagaaaagttaaatgtcccactactatgagtcaaaatggtgcatttgctttttcctgggttttgatttattgccctctgtttgtaccccacattcgcatccttggcacagactgtcatatgtcacacattcagcctcctacacttccaccccacaatctctttaccttccttcttaatgttcacctcatttatctttactcagctaaagtcatagcactagacagtgttcccacaaccgtcttcaaactcatctgtatttcataatctctcctctagttcaaaccagcacaggtcagctgaaactctgaattctacaaataaatatttagaggaagctaacttcatcagacactcccctatgctctcagttcaaacgaaagtttctgttacatttcacctacctacagccttacctcactcagctagcattagactactcagcaatgagttccaacattgccttgctaaaaagcaaggtggctcacaaacaagacttcagcaaagatagcattaaaatgtgaagtctgcatttgttcaaggcataccttagatggagtaattcatggccaagcaatgctgcaggtgtggtcagcacatgtagttgataggcagactcctattattttaaacaaacaaaccaaaaaagttttttaaaaaatgagacccaccttcatcttgaatatgtcaaccccgcaccaccgttgtattaatctgtcatgtttttctcatataacaaaagaatggattttctttcttttaatctaaacactatacttgtatatacaatgtttatttatataggacctaagcaaaagtttttatagatgtgttcatgtcatcacaattcaggtaatgtgaaggctcaacttccgtcttctctctttgtaaatctcactgaagcattagatctcaagtaaatacatttgtaaaatatcca

SEQ ID NO: 179694 - DNA, 553 bp, Homo sapiens
  Payload ID: 15416
  Gene Symbol: SEMA3A
  Gene Name: sema domain, immunoglobulin domain (Ig), short basic domain, secreted, (semaphorin) 3A
  ENST ID: ENST00000420047
  CDS Start-End: 107-553
gttctcccattgtcagccagtctatttccagattgtttgaacttctctggccgcacaatacaggaaggaagactaaagcagcaaagggacctacagcgtctgcagcatgggctggttaactaggattgtctgtcttttctggggagtattacttacagcaagagcaaactatcagaatgggaagaacaatgtgccaaggctgaaattatcctacaaagaaatgttggaatccaacaatgtgatcactttcaatggcttggccaacagctccagttatcataccttccttttggatgaggaacggagtaggctgtatgttggagcaaaggatcacatattttcattcgacctggttaatatcaaggattttcaaaagattgtgtggccagtatcttacaccagaagagatgaatgcaagtgggctggaaaagacatcctgaaagaatgtgctaatttcatcaaggtacttaaggcatataatcagactcacttgtacgcctgtggaacgggggcttttcatccaatttgcacctacattgaaattggacatcat

SEQ ID NO: 179695 - DNA, 534 bp, Homo sapiens
  Payload ID: 15416
  Gene Symbol: SEMA3A
  Gene Name: sema domain, immunoglobulin domain (Ig), short basic domain, secreted, (semaphorin) 3A
  ENST ID: ENST00000448879
  CDS Start-End: 423-534
atttatccctaatctggagggcaacctggagctaggtaagaacagaacagccctttgacttcaacgcatggacaaaggacaacaaaggcacactcattctgtctcctgctaccctgtgaaaaggtgccttctgccattattgtaagcttcctgaggcctcctcagccatgtggaactaatatttaaaaaaaccatccatgggacagtctaacataacaaagggaattattcatcaagaagaggccctttagcagggtatttaaagtgcccaggtacttacaataacaagttggactgaacacattgtatctcaggaattaagaatttttcctaaaagaagtttccagattgtttgaacttctctggccgcacaatacaggaaggaagactaaagcagcaaagggacctacagcgtctgcagcatgggctggttaactaggattgtctgtcttttctggggagtattacttacagcaagagcaaactatcagaatgggaagaacaatgtgccaaggctgaaattatcctacaaag

SEQ ID NO: 179696 - DNA, 568 bp, Homo sapiens
  Payload ID: 15416
  Gene Symbol: SEMA3A
  Gene Name: sema domain, immunoglobulin domain (Ig), short basic domain, secreted, (semaphorin) 3A
  ENST ID: ENST00000424555
  CDS Start-End: 511-568
gagatgaagcctgatagatccgcccaggtgtaggtgaaatggtagagcctcaggggtaatagattctgtgctctcatgctgaagtttagtgctgtgtcttgactggctctctagcatcagtgtgatgggctgctcctggtacagttacaaagtgaacatgcttcttgctgctcacatttatccctaatctggagggcaacctggagctaggtaagaacagaacagccctttgacttcaacgcatggacaaaggacaacaaaggcaaatatttaaaaaaaccatccatgggacagtctaacataacaaagggaattattcatcaagaagaggccctttagcagggtatttaaagtgcccaggtacttacaataacaagttggactgaacacattgtatctcaggaattaagaatttttcctaaaagaagtttccagattgtttgaacttctctggccgcacaatacaggaaggaagactaaagcagcaaagggacctacagcgtctgcagcatgggctggttaactaggattgtctgtcttttctggggagtattacttacagcaagag

SEQ ID NO: 179697 - DNA, 2550 bp, Homo sapiens
  Payload ID: 15416
  Gene Symbol: SEMA3A
  Gene Name: sema domain, immunoglobulin domain (Ig), short basic domain, secreted, (semaphorin) 3A
  Uniprot ID: Q14563
  ENST ID: ENST00000436949
  CDS Start-End: 165-2480
cacacacacacacacacacacacgcacacatacaatgcacaagttcagcaggattgtataatgagcatgaattgtaaatttttttccagattgtttgaacttctctggccgcacaatacaggaaggaagactaaagcagcaaagggacctacagcgtctgcagcatgggctggttaactaggattgtctgtcttttctggggagtattacttacagcaagagcaaactatcagaatgggaagaacaatgtgccaaggctgaaattatcctacaaagaaatgttggaatccaacaatgtgatcactttcaatggcttggccaacagctccagttatcataccttccttttggatgaggaacggagtaggctgtatgttggagcaaaggatcacatattttcattcgacctggttaatatcaaggattttcaaaagattgtgtggccagtatcttacaccagaagagatgaatgcaagtgggctggaaaagacatcctgaaagaatgtgctaatttcatcaaggtacttaaggcatataatcagactcacttgtacgcctgtggaacgggggcttttcatccaatttgcacctacattgaaattggacatcatcctgaggacaatatttttaagctggagaactcacattttgaaaacggccgtgggaagagtccatatgaccctaagctgctgacagcatcccttttaatagatggagaattatactctggaactgcagctgattttatggggcgagactttgctatcttccgaactcttgggcaccaccacccaatcaggacagagcagcatgattccaggtggctcaatgatccaaagttcattagtgcccacctcatctcagagagtgacaatcctgaagatgacaaagtatactttttcttccgtgaaaatgcaatagatggagaacactctggaaaagctactcacgctagaataggtcagatatgcaagaatgactttggagggcacagaagtctggtgaataaatggacaacattcctcaaagctcgtctgatttgctcagtgccaggtccaaatggcattgacactcattttgatgaactgcaggatgtattcctaatgaactttaaagatcctaaaaatccagttgtatatggagtgtttacgacttccagtaacattttcaagggatcagccgtgtgtatgtatagcatgagtgatgtgagaagggtgttccttggtccatatgcccacagggatggacccaactatcaatgggtgccttatcaaggaagagtcccctatccacggccaggaacttgtcccagcaaaacatttggtggttttgactctacaaaggaccttcctgatgatgttataacctttgcaagaagtcatccagccatgtacaatccagtgtttcctatgaacaatcgcccaatagtgatcaaaacggatgtaaattatcaatttacacaaattgtcgtagaccgagtggatgcagaagatggacagtatgatgttatgtttatcggaacagatgttgggaccgttcttaaagtagtttcaattcctaaggagacttggtatgatttagaagaggttctgctggaagaaatgacagtttttcgggaaccgactgctatttcagcaatggagctttccactaagcagcaacaactatatattggttcaacggctggggttgcccagctccctttacaccggtgtgatatttacgggaaagcgtgtgctgagtgttgcctcgcccgagacccttactgtgcttgggatggttctgcatgttctcgctattttcccactgcaaagagacgcacaagacgacaagatataagaaatggagacccactgactcactgttcagacttacaccatgataatcaccatggccacagccctgaagagagaatcatctatggtgtagagaatagtagcacatttttggaatgcagtccgaagtcgcagagagcgctggtctattggcaattccagaggcgaaatgaagagcgaaaagaagagatcagagtggatgatcatatcatcaggacagatcaaggccttctgctacgtagtctacaacagaaggattcaggcaattacctctgccatgcggtggaacatgggttcatacaaactcttcttaaggtaaccctggaagtcattgacacagagcatttggaagaacttcttcataaagatgatgatggagatggctctaagaccaaagaaatgtccaatagcatgacacctagccagaaggtctggtacagagacttcatgcagctcatcaaccaccccaatctcaacacaatggatgagttctgtgaacaagtttggaaaagggaccgaaaacaacgtcggcaaaggccaggacataccccagggaacagtaacaaatggaagcacttacaagaaaataagaaaggtagaaacaggaggacccacgaatttgagagggcacccaggagtgtctgagctgcattacctctagaaacctcaaacaagtagaaacttgcctagacaataactggaaaaacaaatgcaa

SEQ ID NO: 179698 - DNA, 2292 bp, Homo sapiens
  Payload ID: 15417
  Gene Symbol: SEMA3B
  Gene Name: sema domain, immunoglobulin domain (Ig), short basic domain, secreted, (semaphorin) 3B
  ENST ID: ENST00000611067
  CDS Start-End: 28-2292
gaaccctgagcaccctgagctgctgagatggggcgggccggggctgccgccgtgatcccgggcctggccctgctctgggcagtggggctggggagtgccgcccccagccccccacgccttcggctctccttccaagagctccaggcctggcatggtctccagactttcagcctggagcgaacctgctgctaccaggccttgctggtggatgaggagcgtggacgcctgtttgtgggtgccgagaaccatgtggcctccctcaacctggacaacatcagcaagcgggccaagaagctggcctggccggcccctgtggaatggcgagaggagtgcaactgggcagggaaggacattggtactgagtgcatgaacttcgtgaagttgctgcatgcctacaaccgcacccatttgctggcctgtggcacgggagccttccacccaacctgtgcctttgtggaagtgggccaccgggcagaggagcccgtcctccggctggacccaggaaggatagaggatggcaaggggaagagtccttatgaccccaggcatcgggctgcctccgtgctggtgggggaggagctatactcaggggtggcagcagacctcatgggacgagactttaccatctttcgcagcctagggcaacgtccaagtctccgaacagagccacacgactcccgctggctcaatgagcccaagtttgtcaaggtattttggatcccggagagcgagaacccagacgacgacaaaatctacttcttctttcgtgagacggcggtagaggcggcgccggcactgggacgcctgtccgtgtcccgcgttggccagatctgccggaacgacgtgggcggccagcgcagcctggtcaacaagtggacgacgttcctgaaggcgcggctggtgtgctcggtgcccggcgtcgagggcgacacccacttcgatcagctccgccccttccccgcagaggatgtgtttctgttgtcctcgcgggaccaccggaccccgctgctctatgccgtcttctccacgtccagcagcatcttccagggctctgcggtgtgcgtgtacagcatgaacgacgtgcgccgggccttcttgggaccctttgcacacaaggaggggcccatgcaccagtgggtgtcataccagggtcgcgtcccctacccgcggccaggcatgtgccccagcaagacctttggcaccttcagttccaccaaggacttcccagacgatgtcatccagtttgcgcggaaccaccccctcatgtacaactctgtcctgcccactggggggcgccctcttttcctacaagttggagccaattacaccttcactcaaattgccgcggaccgggttgcagccgctgacggacactatgacgtcctcttcattggcacagacgttggcacggtgctgaaggtgatctcggtccccaagggcagtaggcccagcgcagaggggctgctcctggaggagctgcacgtgtttgaggactcggccgctgtcaccagcatgcaaatttcttccaagaggcaccagctgtacgtagcctcgcggagcgcggtggcccagatcgcgttgcaccgctgcgctgcccacggccgcgtctgcaccgaatgctgtctggcgcgtgacccctactgcgcctgggacggggtcgcgtgcacgcgcttccagcccagtgccaagaggcggttccggcggcaagacgtaaggaatggcgaccccagcacgttgtgctccggagactcgtctcgtcccgcgctgctggaacacaaggtgttcggcgtggagggcagcagcgcctttctggagtgtgagccccgctcgctgcaggcgcgcgtggagtggactttccagcgcgcaggggtgacagcccacacccaggtgctggcagaggagcgcaccgagcgcaccgcccggggactactgctgcgcaggctgcggcgccgggactcgggcgtgtacttgtgcgccgccgtcgagcagggctttacgcaaccgctgcgtcgcctgtcgctgcacgtgttgagtgctacgcaggccgaacgactggcgcgggccgaggaggctgcgcccgccgcgccgccgggccccaaactctggtaccgggactttctgcagctggtggagccgggcggaggtggcagcgcgaactccctgcgcatgtgccgcccgcagcctgcgctgcagtcactgcccctggagtcgcggagaaagggccgtaaccggaggacccacgcccctgagcctcgcgctgagcgggggccgcgcagcgcaacgcactggtga

SEQ ID NO: 179699 - DNA, 2925 bp, Homo sapiens
  Payload ID: 15417
  Gene Symbol: SEMA3B
  Gene Name: sema domain, immunoglobulin domain (Ig), short basic domain, secreted, (semaphorin) 3B
  Uniprot ID: Q13214
  ENST ID: ENST00000618865
  CDS Start-End: 243-2492
gggcgggggctgcttcttaaaggagccgtcagagggtccccagcggccccagggtgggaaggggccagagtggagagatgctgctgcggaagtcctcggtggagtgtgagaaggcagccagtgttggcctggaagacctctagaacctgagaagaggcagcgatcctggggcagagtccagggcagctcaaggctcctccacacacacacccgctgaaccctgagcaccctgagctgctgagatggggcgggccggggctgccgccgtgatcccgggcctggccctgctctgggcagtggggctggggagtgccgcccccagccccccacgccttcggctctccttccaagagctccaggcctggcatggtctccagactttcagcctggagcgaacctgctgctaccaggccttgctggtggatgaggagcgtggacgcctgtttgtgggtgccgagaaccatgtggcctccctcaacctggacaacatcagcaagcgggccaagaagctggcctggccggcccctgtggaatggcgagaggagtgcaactgggcagggaaggacattggtactgagtgcatgaacttcgtgaagttgctgcatgcctacaaccgcacccatttgctggcctgtggcacgggagccttccacccaacctgtgcctttgtggaagtgggccaccgggcagaggagcccgtcctccggctggacccaggaaggatagaggatggcaaggggaagagtccttatgaccccaggcatcgggctgcctccgtgctggtgggggaggagctatactcaggggtggcagcagacctcatgggacgagactttaccatctttcgcagcctagggcaacgtccaagtctccgaacagagccacacgactcccgctggctcaatgagcccaagtttgtcaaggtattttggatcccggagagcgagaacccagacgacgacaaaatctacttcttctttcgtgagacggcggtagaggcggcgccggcactgggacgcctgtccgtgtcccgcgttggccagatctgccggaacgacgtgggcggccagcgcagcctggtcaacaagtggacgacgttcctgaaggcgcggctggtgtgctcggtgcccggcgtcgagggcgacacccacttcgatcagctccaggatgtgtttctgttgtcctcgcgggaccaccggaccccgctgctctatgccgtcttctccacgtccagcagcatcttccagggctctgcggtgtgcgtgtacagcatgaacgacgtgcgccgggccttcttgggaccctttgcacacaaggaggggcccatgcaccagtgggtgtcataccagggtcgcgtcccctacccgcggccaggcatgtgccccagcaagacctttggcaccttcagttccaccaaggacttcccagacgatgtcatccagtttgcgcggaaccaccccctcatgtacaactctgtcctgcccactggggggcgccctcttttcctacaagttggagccaattacaccttcactcaaattgccgcggaccgggttgcagccgctgacggacactatgacgtcctcttcattggcacagacgttggcacggtgctgaaggtgatctcggtccccaagggcagtaggcccagcgcagaggggctgctcctggaggagctgcacgtgtttgaggactcggccgctgtcaccagcatgcaaatttcttccaagaggcaccagctgtacgtagcctcgcggagcgcggtggcccagatcgcgttgcaccgctgcgctgcccacggccgcgtctgcaccgaatgctgtctggcgcgtgacccctactgcgcctgggacggggtcgcgtgcacgcgcttccagcccagtgccaagaggcggttccggcggcaagacgtaaggaatggcgaccccagcacgttgtgctccggagactcgtctcgtcccgcgctgctggaacacaaggtgttcggcgtggagggcagcagcgcctttctggagtgtgagccccgctcgctgcaggcgcgcgtggagtggactttccagcgcgcaggggtgacagcccacacccaggtgctggcagaggagcgcaccgagcgcaccgcccggggactactgctgcgcaggctgcggcgccgggactcgggcgtgtacttgtgcgccgccgtcgagcagggctttacgcaaccgctgcgtcgcctgtcgctgcacgtgttgagtgctacgcaggccgaacgactggcgcgggccgaggaggctgcgcccgccgcgccgccgggccccaaactctggtaccgggactttctgcagctggtggagccgggcggaggtggcagcgcgaactccctgcgcatgtgccgcccgcagcctgcgctgcagtcactgcccctggagtcgcggagaaagggccgtaaccggaggacccacgcccctgagcctcgcgctgagcgggggccgcgcagcgcaacgcactggtgaccagactgtccccacgccgggaaccaagcaggagacgacaggcgagagaggagccagacagaccctgaaaagaaggacgggttggggccgggcacattgggggtcaccggccgatggagacaccaaccgacaggccctggctgagggcagctgcgcgggcttatttattaacaggataacccttgaatgtagcagccccgggagggcggcacaggtcgggcgcaggattcagccggagggaagggacggggaagccgagctccagagcaacgaccagggccgaggaggtgcctggagtgcccaccctgggagacagaccccacctccttgggtagtgagcagtgagcagaaagctgtgaacaggctgggctgctggaggtggggcgaggcaggccgactgtactaaagtaacgcaataaacgcattatcagcc

SEQ ID NO: 179700 - DNA, 934 bp, Homo sapiens
  Payload ID: 15417
  Gene Symbol: SEMA3B
  Gene Name: sema domain, immunoglobulin domain (Ig), short basic domain, secreted, (semaphorin) 3B
  ENST ID: ENST00000621029
  CDS Start-End: 293-934
aaactttacggcacggcgggcggtgcgtggggcggtggctggcctggtgggggcgggggctgcttcttaaaggagccgtcagagggtccccagcggccccagggtgggaaggggccagagtggagagatgctgctgcggaagtcctcggtggagtgtgagaaggcagccagtgttggcctggaagacctctagaacctgagaagaggcagcgatcctggggcagagtccagggcagctcaaggctcctccacacacacacccgctgaaccctgagcaccctgagctgctgagatggggcgggccggggctgccgccgtgatcccgggcctggccctgctctgggcagtggggctggggagtgccgcccccagccccccacgccttcggctctccttccaagagctccaggcctggcatggtctccagactttcagcctggagcgaacctgctgctaccaggccttgctggtggatgaggagcgtggacgcctgtttgtgggtgccgagaaccatgtggcctccctcaacctggacaacatcagcaagcgggccaagaagctggcctggccggcccctgtggaatggcgagaggagtgcaactgggcagggaaggacattggtactgagtgcatgaacttcgtgaagttgctgcatgcctacaaccgcacccatttgctggcctgtggcacgggagccttccacccaacctgtgcctttgtggaagtgggccaccgggcagaggagcccgtcctccggctggacccaggaaggatagaggatggcaaggggaagagtccttatgaccccaggcatcgggctgcctccgtgctggtgggggaggagctatactcaggggtggcagcagacctcatgggacgagactttaccatctttcgcagcctagggcaacgtccaagtctccgaacagagcca

SEQ ID NO: 179701 - DNA, 2958 bp, Homo sapiens
  Payload ID: 15417
  Gene Symbol: SEMA3B
  Gene Name: sema domain, immunoglobulin domain (Ig), short basic domain, secreted, (semaphorin) 3B
  Uniprot ID: Q13214
  ENST ID: ENST00000616701
  CDS Start-End: 236-2485
tctgtgattgtggccaggcggggcaccctcggaggggagggttcggaagtggaatgcgaccccccagcctctttcccctaggggctgtaatctgatccctggggactccccccctagcctcccgccctcgccctcactgctgactcctcttccagatcctggggcagagtccagggcagctcaaggctcctccacacacacacccgctgaaccctgagcaccctgagctgctgagatggggcgggccggggctgccgccgtgatcccgggcctggccctgctctgggcagtggggctggggagtgccgcccccagccccccacgccttcggctctccttccaagagctccaggcctggcatggtctccagactttcagcctggagcgaacctgctgctaccaggccttgctggtggatgaggagcgtggacgcctgtttgtgggtgccgagaaccatgtggcctccctcaacctggacaacatcagcaagcgggccaagaagctggcctggccggcccctgtggaatggcgagaggagtgcaactgggcagggaaggacattggtactgagtgcatgaacttcgtgaagttgctgcatgcctacaaccgcacccatttgctggcctgtggcacgggagccttccacccaacctgtgcctttgtggaagtgggccaccgggcagaggagcccgtcctccggctggacccaggaaggatagaggatggcaaggggaagagtccttatgaccccaggcatcgggctgcctccgtgctggtgggggaggagctatactcaggggtggcagcagacctcatgggacgagactttaccatctttcgcagcctagggcaacgtccaagtctccgaacagagccacacgactcccgctggctcaatgagcccaagtttgtcaaggtattttggatcccggagagcgagaacccagacgacgacaaaatctacttcttctttcgtgagacggcggtagaggcggcgccggcactgggacgcctgtccgtgtcccgcgttggccagatctgccggaacgacgtgggcggccagcgcagcctggtcaacaagtggacgacgttcctgaaggcgcggctggtgtgctcggtgcccggcgtcgagggcgacacccacttcgatcagctccaggatgtgtttctgttgtcctcgcgggaccaccggaccccgctgctctatgccgtcttctccacgtccagcagcatcttccagggctctgcggtgtgcgtgtacagcatgaacgacgtgcgccgggccttcttgggaccctttgcacacaaggaggggcccatgcaccagtgggtgtcataccagggtcgcgtcccctacccgcggccaggcatgtgccccagcaagacctttggcaccttcagttccaccaaggacttcccagacgatgtcatccagtttgcgcggaaccaccccctcatgtacaactctgtcctgcccactggggggcgccctcttttcctacaagttggagccaattacaccttcactcaaattgccgcggaccgggttgcagccgctgacggacactatgacgtcctcttcattggcacagacgttggcacggtgctgaaggtgatctcggtccccaagggcagtaggcccagcgcagaggggctgctcctggaggagctgcacgtgtttgaggactcggccgctgtcaccagcatgcaaatttcttccaagaggcaccagctgtacgtagcctcgcggagcgcggtggcccagatcgcgttgcaccgctgcgctgcccacggccgcgtctgcaccgaatgctgtctggcgcgtgacccctactgcgcctgggacggggtcgcgtgcacgcgcttccagcccagtgccaagaggcggttccggcggcaagacgtaaggaatggcgaccccagcacgttgtgctccggagactcgtctcgtcccgcgctgctggaacacaaggtgttcggcgtggagggcagcagcgcctttctggagtgtgagccccgctcgctgcaggcgcgcgtggagtggactttccagcgcgcaggggtgacagcccacacccaggtgctggcagaggagcgcaccgagcgcaccgcccggggactactgctgcgcaggctgcggcgccgggactcgggcgtgtacttgtgcgccgccgtcgagcagggctttacgcaaccgctgcgtcgcctgtcgctgcacgtgttgagtgctacgcaggccgaacgactggcgcgggccgaggaggctgcgcccgccgcgccgccgggccccaaactctggtaccgggactttctgcagctggtggagccgggcggaggtggcagcgcgaactccctgcgcatgtgccgcccgcagcctgcgctgcagtcactgcccctggagtcgcggagaaagggccgtaaccggaggacccacgcccctgagcctcgcgctgagcgggggccgcgcagcgcaacgcactggtgaccagactgtccccacgccgggaaccaagcaggagacgacaggcgagagaggagccagacagaccctgaaaagaaggacgggttggggccgggcacattgggggtcaccggccgatggagacaccaaccgacaggccctggctgagggcagctgcgcgggcttatttattaacaggataacccttgaatgtagcagccccgggagggcggcacaggtcgggcgcaggattcagccggagggaagggacggggaagccgagctccagagcaacgaccagggccgaggaggtgcctggagtgcccaccctgggagacagaccccacctccttgggtagtgagcagtgagcagaaagctgtgaacaggctgggctgctggaggtggggcgaggcaggccgactgtactaaagtaacgcaataaacgcattatcagccaaagctggaatggccccagcagaaaaccccagtcctcggc

SEQ ID NO: 179702 - DNA, 2738 bp, Homo sapiens
  Payload ID: 15417
  Gene Symbol: SEMA3B
  Gene Name: sema domain, immunoglobulin domain (Ig), short basic domain, secreted, (semaphorin) 3B
  ENST ID: ENST00000611418
  CDS Start-End: 57-1430
ctcaaggctcctccacacacacacccgctgaaccctgagcaccctgagctgctgagatggggcgggccggggctgccgccgtgatcccgggcctggccctgctctgggcagtggggctggggagtgccgcccccagccccccacgccttcggctctccttccaagagctccaggcctggcatggtctccagactttcagcctggagcgaacctgctgctaccaggccttgctggtggatgaggagcgtggacgcctgtttgtgggtgccgagaaccatgtggcctccctcaacctggacaacatcagcaagcgggccaagaagctggcctggccggcccctgtggaatggcgagaggagtgcaactgggcagggaaggacattggtactgagtgcatgaacttcgtgaagttgctgcatgcctacaaccgcacccatttgctggcctgtggcacgggagccttccacccaacctgtgcctttgtggaagtgggccaccgggcagaggagcccgtcctccggctggacccaggaaggatagaggatggcaaggggaagagtccttatgaccccaggcatcgggctgcctccgtgctggtgggggaggagctatactcaggggtggcagcagacctcatgggacgagactttaccatctttcgcagcctagggcaacgtccaagtctccgaacagagccacacgactcccgctggctcaatgagcccaagtttgtcaaggtattttggatcccggagagcgagaacccagacgacgacaaaatctacttcttctttcgtgagacggcggtagaggcggcgccggcactgggacgcctgtccgtgtcccgcgttggccagatctgccggaacgacgtgggcggccagcgcagcctggtcaacaagtggacgacgttcctgaaggcgcggctggtgtgctcggtgcccggcgtcgagggcgacacccacttcgatcagctccaggatgtgtttctgttgtcctcgcgggaccaccggaccccgctgctctatgccgtcttctccacgtccagcagcatcttccagggctctgcggtgtgcgtgtacagcatgaacgacgtgcgccgggccttcttgggaccctttgcacacaaggaggggcccatgcaccagtgggtgtcataccagggtcgcgtcccctacccgcggcaggcatgtgccccagcaagacctttggcaccttcagttccaccaaggacttcccagacgatgtcatccagtttgcgcggaaccaccccctcatgtacaactctgtcctgcccactggggggcgccctcttttcctacaagttggagccaattacaccttcactcaaattgccgcggaccgggttgcagccgctgacggacactatgacgtcctcttcattggcacagacgttggcacggtgctgaaggtgatctcggtccccaagggcagtaggcccagcgcagaggggctgctcctggaggagctgcacgtgtttgaggactcggccgctgtcaccagcatgcaaatttcttccaagaggcaccagctgtacgtagcctcgcggagcgcggtggcccagatcgcgttgcaccgctgcgctgcccacggccgcgtctgcaccgaatgctgtctggcgcgtgacccctactgcgcctgggacggggtcgcgtgcacgcgcttccagcccagtgccaagaggcggttccggcggcaagacgtaaggaatggcgaccccagcacgttgtgctccggagactcgtctcgtcccgcgctgctggaacacaaggtgttcggcgtggagggcagcagcgcctttctggagtgtgagccccgctcgctgcaggcgcgcgtggagtggactttccagcgcgcaggggtgacagcccacacccaggtgctggcagaggagcgcaccgagcgcaccgcccggggactactgctgcgcaggctgcggcgccgggactcgggcgtgtacttgtgcgccgccgtcgagcagggctttacgcaaccgctgcgtcgcctgtcgctgcacgtgttgagtgctacgcaggccgaacgactggcgcgggccgaggaggctgcgcccgccgcgccgccgggccccaaactctggtaccgggactttctgcagctggtggagccgggcggaggtggcagcgcgaactccctgcgcatgtgccgcccgcagcctgcgctgcagtcactgcccctggagtcgcggagaaagggccgtaaccggaggacccacgcccctgagcctcgcgctgagcgggggccgcgcagcgcaacgcactggtgaccagactgtccccacgccgggaaccaagcaggagacgacaggcgagagaggagccagacagaccctgaaaagaaggacgggttggggccgggcacattgggggtcaccggccgatggagacaccaaccgacaggccctggctgagggcagctgcgcgggcttatttattaacaggataacccttgaatgtagcagccccgggagggcggcacaggtcgggcgcaggattcagccggagggaagggacggggaagccgagctccagagcaacgaccagggccgaggaggtgcctggagtgcccaccctgggagacagaccccacctccttgggtagtgagcagtgagcagaaagctgtgaacaggctgggctgctggaggtggggcgaggcaggccgactgtactaaagtaacgcaataaacgcattatcagcc

SEQ ID NO: 179703 - DNA, 1765 bp, Homo sapiens
  Payload ID: 15417
  Gene Symbol: SEMA3B
  Gene Name: sema domain, immunoglobulin domain (Ig), short basic domain, secreted, (semaphorin) 3B
  ENST ID: ENST00000418576
  CDS Start-End: 375-1595
atggtgctagaggttgggtggtcagacactgtgatcccgggtgctgtgcccgcactacgggaaggggaagcagcgcgtgggtctcgcatcaggaggcaaggccaggacccgctgacccatgcctcctgccgcggtcagagcccaagtttgtcaagaacgacgtgggcggccagcgcagcctggtcaacaagtggacgacgttcctgaaggcgcggctggtgtgctcggtgcccggcgtcgagggcgacacccacttcgatcagctccaggatgtgtttctgttgtcctcgcgggaccaccggaccccgctgctctatgccgtcttctccacgtccagcagcatcttccagggctctgcggtgtgcgtgtacagcatgaacgacgtgcgccgggccttcttgggaccctttgcacacaaggaggggcccatgcaccagtgggtgtcataccagggtcgcgtcccctacccgcggccaggcatgtgccccagcaagacctttggcaccttcagttccaccaaggacttcccagacgatgtcatccagtttgcgcggaaccaccccctcatgtacaactctgtcctgcccactggggggcgccctcttttcctacaagttggagccaattacaccttcactcaaattgccgcggaccgggttgcagccgctgacggacactatgacgtcctcttcattggcacagacgttggcacggtgctgaaggtgatctcggtccccaagggcagtaggcccagcgcagaggggctgctcctggaggagctgcacgtgtttgaggactcggccgctgtcaccagcatgcaaatttcttccaagaggcaccagctgtacgtagcctcgcggagcgcggtggcccagatcgcgttgcaccgctgcgctgcccacggccgcgtctgcaccgaatgctgtctggcgcgtgacccctactgcgcctgggacggggtcgcgtgcacgcgcttccagcccagtgccaagaggcggttccggcggcaagacgtaaggaatggcgaccccagcacgttgtgctccggagactcgtctcgtcccgcgctgctggaacacaaggtgttcggcgtggagggcagcagcgcctttctggagtgtgagccccgctcgctgcaggcgcgcgtggagtggactttccagcgcgcaggggtgacagcccacacccaggtgctggcagaggagcgcaccgagcgcaccgcccggggactactgctgcgcaggctgcggcgccgggactcgggcgtgtacttgtgcgccgccgtcgagcagggctttacgcaaccgctgcgtcgcctgtcgctgcacgtgttgagtgctacgcaggccgaacgactggcgcgggccgaggaggctgcgcccgccgcgccgccgggccccaaactctggtaccgggactttctgcagctggtggagccgggcggaggtggcagcgcgaactccctgcgcatgtgccgcccgcagcctgcgctgcagtcactgcccctggagtcgcggagaaagggccgtaaccggaggacccacgcccctgagcctcgcgctgagcgggggccgcgcagcgcaacgcactggtgaccagactgtccccacgccgggaaccaagcaggagacgacaggcgagagaggagccagacagaccctgaaaagaaggacgggttggggccgggcacattgggggtcaccggccgatggagacaccaaccgacaggccctggctgagggcagctgcgcgggcttatttatta

SEQ ID NO: 179704 - DNA, 2755 bp, Homo sapiens
  Payload ID: 15417
  Gene Symbol: SEMA3B
  Gene Name: sema domain, immunoglobulin domain (Ig), short basic domain, secreted, (semaphorin) 3B
  Uniprot ID: Q13214
  ENST ID: ENST00000433753
  CDS Start-End: 73-2319
gcagagtccagggcagctcaaggctcctccacacacacacccgctgaaccctgagcaccctgagctgctgagatggggcgggccggggctgccgccgtgatcccgggcctggccctgctctgggcagtggggctggggagtgccgcccccagccccccacgccttcggctctccttccaagagctccaggcctggcatggtctccagactttcagcctggagcgaacctgctgctaccaggccttgctggtggatgaggagcgtggacgcctgtttgtgggtgccgagaaccatgtggcctccctcaacctggacaacatcagcaagcgggccaagaagctggcctggccggcccctgtggaatggcgagaggagtgcaactgggcagggaaggacattggtactgagtgcatgaacttcgtgaagttgctgcatgcctacaaccgcacccatttgctggcctgtggcacgggagccttccacccaacctgtgcctttgtggaagtgggccaccgggcagaggagcccgtcctccggctggacccaggaaggatagaggatggcaaggggaagagtccttatgaccccaggcatcgggctgcctccgtgctggtgggggaggagctatactcaggggtggcagcagacctcatgggacgagactttaccatctttcgcagcctagggcaacgtccaagtctccgaacagagccacacgactcccgctggctcaatgagcccaagtttgtcaaggtattttggatcccggagagcgagaacccagacgacgacaaaatctacttcttctttcgtgagacggcggtagaggcggcgccggcactgggacgcctgtccgtgtcccgcgttggccagatctgccggaacgacgtgggcggccagcgcagcctggtcaacaagtggacgacgttcctgaaggcgcggctggtgtgctcggtgcccggcgtcgagggcgacacccacttcgatcagctccaggatgtgtttctgttgtcctcgcgggaccaccggaccccgctgctctatgccgtcttctccacgtccagcatcttccagggctctgcggtgtgcgtgtacagcatgaacgacgtgcgccgggccttcttgggaccctttgcacacaaggaggggcccatgcaccagtgggtgtcataccagggtcgcgtcccctacccgcggccaggcatgtgccccagcaagacctttggcaccttcagttccaccaaggacttcccagacgatgtcatccagtttgcgcggaaccaccccctcatgtacaactctgtcctgcccactggggggcgccctcttttcctacaagttggagccaattacaccttcactcaaattgccgcggaccgggttgcagccgctgacggacactatgacgtcctcttcattggcacagacgttggcacggtgctgaaggtgatctcggtccccaagggcagtaggcccagcgcagaggggctgctcctggaggagctgcacgtgtttgaggactcggccgctgtcaccagcatgcaaatttcttccaagaggcaccagctgtacgtagcctcgcggagcgcggtggcccagatcgcgttgcaccgctgcgctgcccacggccgcgtctgcaccgaatgctgtctggcgcgtgacccctactgcgcctgggacggggtcgcgtgcacgcgcttccagcccagtgccaagaggcggttccggcggcaagacgtaaggaatggcgaccccagcacgttgtgctccggagactcgtctcgtcccgcgctgctggaacacaaggtgttcggcgtggagggcagcagcgcctttctggagtgtgagccccgctcgctgcaggcgcgcgtggagtggactttccagcgcgcaggggtgacagcccacacccaggtgctggcagaggagcgcaccgagcgcaccgcccggggactactgctgcgcaggctgcggcgccgggactcgggcgtgtacttgtgcgccgccgtcgagcagggctttacgcaaccgctgcgtcgcctgtcgctgcacgtgttgagtgctacgcaggccgaacgactggcgcgggccgaggaggctgcgcccgccgcgccgccgggccccaaactctggtaccgggactttctgcagctggtggagccgggcggaggtggcagcgcgaactccctgcgcatgtgccgcccgcagcctgcgctgcagtcactgcccctggagtcgcggagaaagggccgtaaccggaggacccacgcccctgagcctcgcgctgagcgggggccgcgcagcgcaacgcactggtgaccagactgtccccacgccgggaaccaagcaggagacgacaggcgagagaggagccagacagaccctgaaaagaaggacgggttggggccgggcacattgggggtcaccggccgatggagacaccaaccgacaggccctggctgagggcagctgcgcgggcttatttattaacaggataacccttgaatgtagcagccccgggagggcggcacaggtcgggcgcaggattcagccggagggaagggacggggaagccgagctccagagcaacgaccagggccgaggaggtgcctggagtgcccaccctgggagacagaccccacctccttgggtagtgagcagtgagcagaaagctgtgaacaggctgggctgctggaggtggggcgaggcaggccgactgtactaaagtaacgcaataaacgcattatcagccaaa

SEQ ID NO: 179705 - DNA, 2221 bp, Homo sapiens
  Payload ID: 15417
  Gene Symbol: SEMA3B
  Gene Name: sema domain, immunoglobulin domain (Ig), short basic domain, secreted, (semaphorin) 3B
  ENST ID: ENST00000456560
  CDS Start-End: 542-1762
ctgatcctttggattcggtccgcgcagagcgccaactggacatggtgctagaggttgggtggtcagacactgtgatcccgggtgctgtgcccgcactacgggaaggggaagcagcgcgtgggtctcgcatcaggaggcaaggccaggacccgctgacccatgcctcctgccgcggtcagagcccaagtttgtcaaggtattttggatcccggagagcgagaacccagacgacgacaaaatctacttcttctttcgtgagacggcggtagaggcggcgccggcactgggacgcctgtccgtgtcccgcgttggccagatctgccggaacgacgtgggcggccagcgcagcctggtcaacaagtggacgacgttcctgaaggcgcggctggtgtgctcggtgcccggcgtcgagggcgacacccacttcgatcagctccaggatgtgtttctgttgtcctcgcgggaccaccggaccccgctgctctatgccgtcttctccacgtccagcatcttccagggctctgcggtgtgcgtgtacagcatgaacgacgtgcgccgggccttcttgggaccctttgcacacaaggaggggcccatgcaccagtgggtgtcataccagggtcgcgtcccctacccgcggccaggcatgtgccccagcaagacctttggcaccttcagttccaccaaggacttcccagacgatgtcatccagtttgcgcggaaccaccccctcatgtacaactctgtcctgcccactggggggcgccctcttttcctacaagttggagccaattacaccttcactcaaattgccgcggaccgggttgcagccgctgacggacactatgacgtcctcttcattggcacagacgttggcacggtgctgaaggtgatctcggtccccaagggcagtaggcccagcgcagaggggctgctcctggaggagctgcacgtgtttgaggactcggccgctgtcaccagcatgcaaatttcttccaagaggcaccagctgtacgtagcctcgcggagcgcggtggcccagatcgcgttgcaccgctgcgctgcccacggccgcgtctgcaccgaatgctgtctggcgcgtgacccctactgcgcctgggacggggtcgcgtgcacgcgcttccagcccagtgccaagaggcggttccggcggcaagacgtaaggaatggcgaccccagcacgttgtgctccggagactcgtctcgtcccgcgctgctggaacacaaggtgttcggcgtggagggcagcagcgcctttctggagtgtgagccccgctcgctgcaggcgcgcgtggagtggactttccagcgcgcaggggtgacagcccacacccaggtgctggcagaggagcgcaccgagcgcaccgcccggggactactgctgcgcaggctgcggcgccgggactcgggcgtgtacttgtgcgccgccgtcgagcagggctttacgcaaccgctgcgtcgcctgtcgctgcacgtgttgagtgctacgcaggccgaacgactggcgcgggccgaggaggctgcgcccgccgcgccgccgggccccaaactctggtaccgggactttctgcagctggtggagccgggcggaggtggcagcgcgaactccctgcgcatgtgccgcccgcagcctgcgctgcagtcactgcccctggagtcgcggagaaagggccgtaaccggaggacccacgcccctgagcctcgcgctgagcgggggccgcgcagcgcaacgcactggtgaccagactgtccccacgccgggaaccaagcaggagacgacaggcgagagaggagccagacagaccctgaaaagaaggacgggttggggccgggcacattgggggtcaccggccgatggagacaccaaccgacaggccctggctgagggcagctgcgcgggcttatttattaacaggataacccttgaatgtagcagccccgggagggcggcacaggtcgggcgcaggattcagccggagggaagggacggggaagccgagctccagagcaacgaccagggccgaggaggtgcctggagtgcccaccctgggagacagaccccacctccttgggtagtgagcagtgagcagaaagctgtgaacaggctgggctgctggaggtggggcgaggcaggccgactgtactaaagtaacgcaataaacgcattatcagccaaagctggaatggccccagcagaaaa

SEQ ID NO: 179706 - DNA, 5174 bp, Homo sapiens
  Payload ID: 15418
  Gene Symbol: SEMA3C
  Gene Name: sema domain, immunoglobulin domain (Ig), short basic domain, secreted, (semaphorin) 3C
  Uniprot ID: Q99985
  ENST ID: ENST00000265361
  CDS Start-End: 563-2818
ggactgcgaaaggagcagggttgcggagctagggctccagcctgcggccgcgcattcttgcgtctggccagccgcgagctctaagggtcggccccgcccggtccgcccccgcggctccctgccaggctctcgcgggcgcgctcggggtggggcctcgcggctggcggagatgcggccggggctgcgcggtggtgatgcgagcctgcagggcggcgcgccggggcagccggagccgcgcgccgcggcgctgtaatcggacaccaagagcgctcgcccccggcctccggccactttccattcactccgaggtgcttgattgagcgacgcggagaagagctccgggtgccgcggcactgcagcgctgagattcctttacaaagaaactcagaggaccgggaagaaagaatttcacctttgcgacgtgctagaaaataaggtcgtctgggaaaaggactggagacacaagcgcatccaaccccggtagcaaactgatgacttttccgtgctgatttctttcaacctcggtattttcccttggatattaacttgcatatctgaagaaatggcattccggacaatttgcgtgttggttggagtatttatttgttctatctgtgtgaaaggatcttcccagccccaagcaagagtttatttaacatttgatgaacttcgagaaaccaagacctctgaatacttcagcctttcccaccatcctttagactacaggattttattaatggatgaagatcaggaccggatatatgtgggaagcaaagatcacattctttccctgaatattaacaatataagtcaagaagctttgagtgttttctggccagcatctacaatcaaagttgaagaatgcaaaatggctggcaaagatcccacacacggctgtgggaactttgtccgtgtaattcagactttcaatcgcacacatttgtatgtctgtgggagtggcgctttcagtcctgtctgtacttacttgaacagagggaggagatcagaggaccaagttttcatgattgactccaagtgtgaatctggaaaaggacgctgctctttcaaccccaacgtgaacacggtgtctgttatgatcaatgaggagcttttctctggaatgtatatagatttcatggggacagatgctgctatttttcgaagtttaaccaagaggaatgcggtcagaactgatcaacataattccaaatggctaagtgaacctatgtttgtagatgcacatgtcatcccagatggtactgatccaaatgatgctaaggtgtacttcttcttcaaagaaaaactgactgacaataacaggagcacgaaacagattcattccatgattgctcgaatatgtcctaatgacactggtggactgcgtagccttgtcaacaagtggaccactttcttaaaggcgaggctggtgtgctcggtaacagatgaagacggcccagaaacacactttgatgaattagaggatgtgtttctgctggaaactgataacccgaggacaacactagtgtatggcatttttacaacatcaagctcagttttcaaaggatcagccgtgtgtgtgtatcatttatctgatatacagactgtgtttaatgggccttttgcccacaaagaagggcccaatcatcagctgatttcctatcagggcagaattccatatcctcgccctggaacttgtccaggaggagcatttacacccaatatgcgaaccaccaaggagttcccagatgatgttgtcacttttattcggaaccatcctctcatgtacaattccatctacccaatccacaaaaggcctttgattgttcgtattggcactgactacaagtatacaaagatagctgtggatcgagtgaacgctgctgatgggagataccatgtcctgtttctcggaacagatcggggtactgtgcaaaaagtggttgttcttcctactaacaactctgtcagtggcgagctcattctggaggagctggaagtctttaagaatcatgctcctataacaacaatgaaaatttcatctaaaaagcaacagttgtatgtgagttccaatgaaggggtttcccaggtatctctgcaccgctgccacatctatggtacagcctgtgctgactgctgcctggcgcgggacccttattgcgcctgggatggccattcctgttccagattctacccaactgggaaacggaggagccgaagacaagatgtgagacatggaaacccactgactcaatgcagaggatttaatctaaaagcatacagaaatgcagctgaaattgtccagtatggagtaaaaaataacaccacttttctggagtgtgcccccaagtctccgcaggcatctatcaagtggctgttacagaaagacaaagacaggaggaaagaggttaagctgaatgaacgaataatagccacttcacagggactcctgatccgctctgttcagggttctgaccaaggactttatcactgcattgctacagaaaatagtttcaagcagaccatagccaagatcaacttcaaagttttagattcagaaatggtggctgttgtgacggacaaatggtccccatggacctgggccagctctgtgagggctttacccttccacccgaaggacatcatgggggcattcagccactcagaaatgcagatgattaaccaatattgcaaagacactcggcagcaacatcagcagggagatgaatcacagaaaatgagaggggactatggcaagttaaaggccctcatcaatagtcggaaaagtagaaacaggaggaatcagttgccagagtcataatattttcttatgtgggtcttatgcttccattaacaaatgctctgtcttcaatgatcaaattttgagcaaagaaacttgtgctttaccaaggggaattactgaaaaaggtgattactcctgaagtgagttttacacgaactgaaatgagcatgcattttcttgtatgatagtgactagcactagacatgtcatggtcctcatggtgcatataaatatatttaacttaacccagattttatttatatctttattcaccttttcttcaaaatcgatatggtggctgcaaaactagaattgttgcatccctcaattgaatgagggccatatccctgtggtattcctttcctgctttggggctttagaattctaattgtcagtgattttgtatatgaaaacaagttccaaatccacagcttttacgtagtaaaagtcataaatgcatatgacagaatggctatcaaaagaaatagaaaaggaagacagcatttaaagttgtataaaaacatgagttattcataaagagaaaatgatgagtttttatggttccaatgaaatatgttggggtttttttaagattgtaaaaataatcagttactggtatctgtcactgacctttgtttccttattcaggaagataaaaatcagtaacctaccccatgaagatatttggtgggagttatatcagtgaagcagtttggtttatattcttatgttatcaccttccaaacaaaagcacttactttttttggaagttatttattttagactcaaagaatataatctggcactactcagttattactgtttgttctcttattccctagtctgtgtggcaaattaaacaatataagaaggaaaaatttgaagtattagacttctaaataaggtgtgaaatcatcaaaaagaaaaatcaaagtagaaactactaattttttaagaggaatttataacaaatatggctagttttcaacttcagtactcaaattcaatgattcttccttttattaaaaccagtctcagatatcatactgatttttaagtcaacactatatattttatgatcttttcagtgtgatggcaaggtgcttgttatgtctagaaagtaagaaaacaatatgaggagacattctgtctttcaaaaggtaatggtacatacgttcactggtctctaagtgtaaaagtagtaaattttgtgatgaataaaataattatctcctaattgtatgttagaataattttattagaataatttcatactgaaattattttctccaaataaaaattagatggaaaaatgtgaaaaaaattattcatgctctcatatatattttaaaaacactacttttgcttttttatttaccttttaagacattttcatgcttccaggtaaaaacagatattgtaccatgtacctaatccaaatatcatataaacattttatttatagttaataatctatgatgaaggtaattaaagtagattatggcctttttaagtattgcagtctaaaacttcaaaaactaaaatcattgtcaaaattaatatgattattaatcagaatatcagaatatgattcactatttaaactatgataaattatgataatatatgaggaggcctcgctatagcaaaaatagttaaaatgctgacataacaccaaacttcattttttaaaaaatctgttgttccaaatgtgtataattttaaagtaatttctaaagcagtttattataatggtttgcctgcttaaaaggtataattaaacttcttttctcttctacattgacacacagaaatgtgtcaatgtaaagccaaaaccatcttctgtgtttatggccaatctattctcaaagttaaaagtaaaattgtttcagagtcacagttccctttatttcacataagcccaaactgatagacagtaacggtgtttagttttatactatatttgtgctatttaattctttctattttcacaattattaaattgtgtacactttcattacttttaaaaatgtagaaattcttcatgaacataactctgctgaatgtaaaagaaaattttttttcaaaaatgctgttaatgtatactactggtggttgattggttttattttatgtagcttgacaattcagtgacttaatatctattccatttgtattgtacataaaattttctagaaatacacttttttccaaagtgtaagtttgtgaatagattttagcatgatgaaactgtcataatggtgaatgttcaatctgtgtaagaaaacaaactaaatgtagttgtcacactaaaatttaattggatattgatgaaatcattggcctggcaaaataaaacatgttgaattcccca

SEQ ID NO: 179707 - DNA, 1318 bp, Homo sapiens
  Payload ID: 15418
  Gene Symbol: SEMA3C
  Gene Name: sema domain, immunoglobulin domain (Ig), short basic domain, secreted, (semaphorin) 3C
  ENST ID: ENST00000458729
  CDS Start-End: 395-517
gatgcggccggggctgcgcggtggtgatgcgagcctgcagggcggcgcgccggggcagccggagccgcgcgccgcggcgctgtaatcggacaccaagagcgctcgcccccggcctccggccactttccattcactccgaggtgcttgattgagcgacgcggagaagagctccgggtgccgcggcactgcagcgctgagattcctttacaaagaaactcagaggaccgggaagaaagaatttcacctttgcgacgtgctagaaaataaggtcgtctgggaaaaggactggagacacaagcgcatccaaccccggtagcaaactgatgacttttccgtgctgatttctttcaacctcggtattttcccttggatattaacttgcatatctgaagaaatggcattccggacaatttgcgtgttggttggagtatttatttgttctatctgtgtgaaaggatcttcccagccccaagcaagagtttatttaacatttgatggaccaagttttcatgattgactccaagtgtgaatctggaaaaggacgctgctctttcaaccccaacgtgaacacggtgtctgttatgatcaatgaggagcttttctctggaatgtatatagatttcatggggacagatgctgctatttttcgaagtttaaccaagaggaatgcggtcagaactgatcaacataattccaaatggctaagtgaacctatgtttgtagatgcacatgtcatcccagatggtactgatccaaatgatgctaaggtgtacttcttcttcaaagaaaaactgactgacaataacaggagcacgaaacagattcattccatgattgctcgaatatgtcctaatgacactggtggactgcgtagccttgtcaacaagtggaccactttcttaaaggcgaggctggtgtgctcggtaacagatgaagacggcccagaaacacactttgatgaattagaggatgtgtttctgctggaaactgataacccgaggacaacactagtgtatggcatttttacaacatcaagctcagttttcaaaggatcagccgtgtgtgtgtatcatttatctgatatacagactgtgtttaatgggccttttgcccacaaagaagggcccaatcatcagctgatttcctatcagggcagaattccatatcctcgccctggaactaatacttgtgtctgaagataacagtaattttttattcttgtgtcccctactgggcacatcaaagtgctttttggataaaatatgctcaagtaatggatacgtatattaacatataagtatattctgaaaactgacct

SEQ ID NO: 179708 - DNA, 577 bp, Homo sapiens
  Payload ID: 15418
  Gene Symbol: SEMA3C
  Gene Name: sema domain, immunoglobulin domain (Ig), short basic domain, secreted, (semaphorin) 3C
  ENST ID: ENST00000411788
  CDS Start-End: 168-359
tttcactcctcatcactaggtgggatgtaaatcaaattgccctgtagactatcttcgtttcacctgccattgtatcaccagtattctttgcaattggttgtatatgtacttttgggagaaacatataaggtattttcccttggatattaacttgcatatctgaagaaatggcattccggacaatttgcgtgttggttggagtatttatttgttctatctgtgtgaaaggatcttcccagccccaagcaagagtttatttaacatttgatgagcctaccttgtacaatgctgtgtgctacatctgtgggtacaaaaagaagtgtggcgtgaatttggtcctcagcaaccacctactctaaacttcgagaaaccaagacctctgaatacttcagcctttcccaccatcctttagactacaggattttattaatggatgaagatcaggaccggatatatgtgggaagcaaagatcacattctttccctgaatattaacaatataagtcaagaagctttgagtgttttctggccagcatctacaatcaaagttgaagaatgcaaaatggctggcaaagatc

SEQ ID NO: 179709 - DNA, 785 bp, Homo sapiens
  Payload ID: 15418
  Gene Symbol: SEMA3C
  Gene Name: sema domain, immunoglobulin domain (Ig), short basic domain, secreted, (semaphorin) 3C
  ENST ID: ENST00000427167
  CDS Start-End: 395-586
gatgcggccggggctgcgcggtggtgatgcgagcctgcagggcggcgcgccggggcagccggagccgcgcgccgcggcgctgtaatcggacaccaagagcgctcgcccccggcctccggccactttccattcactccgaggtgcttgattgagcgacgcggagaagagctccgggtgccgcggcactgcagcgctgagattcctttacaaagaaactcagaggaccgggaagaaagaatttcacctttgcgacgtgctagaaaataaggtcgtctgggaaaaggactggagacacaagcgcatccaaccccggtagcaaactgatgacttttccgtgctgatttctttcaacctcggtattttcccttggatattaacttgcatatctgaagaaatggcattccggacaatttgcgtgttggttggagtatttatttgttctatctgtgtgaaaggatcttcccagccccaagcaagagtttatttaacatttgatgagcctaccttgtacaatgctgtgtgctacatctgtgggtacaaaaagaagtgtggcgtgaatttggtcctcagcaaccacctactctaaacttcgagaaaccaagacctctgaatacttcagcctttcccaccatcctttagactacaggattttattaatggatgaagatcaggaccggatatatgtgggaagcaaagatcacattctttccctgaatattaacaatataagtcaagaagctttgagtgttttctggccagcatctacaatcaaagttgaagaatgc

SEQ ID NO: 179710 - DNA, 2415 bp, Homo sapiens
  Payload ID: 15418
  Gene Symbol: SEMA3C
  Gene Name: sema domain, immunoglobulin domain (Ig), short basic domain, secreted, (semaphorin) 3C
  Uniprot ID: Q99985
  ENST ID: ENST00000419255
  CDS Start-End: 134-2389
acagttcaggaaacttaaaaggatggcatatggaagttgagtgaaggagaaagagagggaagtagaaaagaggagaaaaatgttaagcaaaaaaggtattttcccttggatattaacttgcatatctgaagaaatggcattccggacaatttgcgtgttggttggagtatttatttgttctatctgtgtgaaaggatcttcccagccccaagcaagagtttatttaacatttgatgaacttcgagaaaccaagacctctgaatacttcagcctttcccaccatcctttagactacaggattttattaatggatgaagatcaggaccggatatatgtgggaagcaaagatcacattctttccctgaatattaacaatataagtcaagaagctttgagtgttttctggccagcatctacaatcaaagttgaagaatgcaaaatggctggcaaagatcccacacacggctgtgggaactttgtccgtgtaattcagactttcaatcgcacacatttgtatgtctgtgggagtggcgctttcagtcctgtctgtacttacttgaacagagggaggagatcagaggaccaagttttcatgattgactccaagtgtgaatctggaaaaggacgctgctctttcaaccccaacgtgaacacggtgtctgttatgatcaatgaggagcttttctctggaatgtatatagatttcatggggacagatgctgctatttttcgaagtttaaccaagaggaatgcggtcagaactgatcaacataattccaaatggctaagtgaacctatgtttgtagatgcacatgtcatcccagatggtactgatccaaatgatgctaaggtgtacttcttcttcaaagaaaaactgactgacaataacaggagcacgaaacagattcattccatgattgctcgaatatgtcctaatgacactggtggactgcgtagccttgtcaacaagtggaccactttcttaaaggcgaggctggtgtgctcggtaacagatgaagacggcccagaaacacactttgatgaattagaggatgtgtttctgctggaaactgataacccgaggacaacactagtgtatggcatttttacaacatcaagctcagttttcaaaggatcagccgtgtgtgtgtatcatttatctgatatacagactgtgtttaatgggccttttgcccacaaagaagggcccaatcatcagctgatttcctatcagggcagaattccatatcctcgccctggaacttgtccaggaggagcatttacacccaatatgcgaaccaccaaggagttcccagatgatgttgtcacttttattcggaaccatcctctcatgtacaattccatctacccaatccacaaaaggcctttgattgttcgtattggcactgactacaagtatacaaagatagctgtggatcgagtgaacgctgctgatgggagataccatgtcctgtttctcggaacagatcggggtactgtgcaaaaagtggttgttcttcctactaacaactctgtcagtggcgagctcattctggaggagctggaagtctttaagaatcatgctcctataacaacaatgaaaatttcatctaaaaagcaacagttgtatgtgagttccaatgaaggggtttcccaggtatctctgcaccgctgccacatctatggtacagcctgtgctgactgctgcctggcgcgggacccttattgcgcctgggatggccattcctgttccagattctacccaactgggaaacggaggagccgaagacaagatgtgagacatggaaacccactgactcaatgcagaggatttaatctaaaagcatacagaaatgcagctgaaattgtccagtatggagtaaaaaataacaccacttttctggagtgtgcccccaagtctccgcaggcatctatcaagtggctgttacagaaagacaaagacaggaggaaagaggttaagctgaatgaacgaataatagccacttcacagggactcctgatccgctctgttcagggttctgaccaaggactttatcactgcattgctacagaaaatagtttcaagcagaccatagccaagatcaacttcaaagttttagattcagaaatggtggctgttgtgacggacaaatggtccccatggacctgggccagctctgtgagggctttacccttccacccgaaggacatcatgggggcattcagccactcagaaatgcagatgattaaccaatattgcaaagacactcggcagcaacatcagcagggagatgaatcacagaaaatgagaggggactatggcaagttaaaggccctcatcaatagtcggaaaagtagaaacaggaggaatcagttgccagagtcataatattttcttatgtgggtcttatgctt

SEQ ID NO: 179711 - DNA, 6265 bp, Homo sapiens
  Payload ID: 15419
  Gene Symbol: SEMA3D
  Gene Name: sema domain, immunoglobulin domain (Ig), short basic domain, secreted, (semaphorin) 3D
  Uniprot ID: O95025
  ENST ID: ENST00000284136
  CDS Start-End: 45-2378
ttagattaaattaacaccatttgaaagagaacattgttttcatcatgaatgctaataaagatgaaagacttaaagccagaagccaagattttcacctttttcctgctttgatgatgctaagcatgaccatgttgtttcttccagtcactggcactttgaagcaaaatattccaagactcaagctaacctacaaagacttgctgctttcaaatagctgtattccctttttgggttcatcagaaggactggattttcaaactcttctcttagatgaggaaagaggcaggctgctcttgggagccaaagaccacatctttctactcagtctggttgacttaaacaaaaattttaagaagatttattggcctgctgcaaaggaacgggtggaattatgtaaattagctgggaaagatgccaatacagaatgtgcaaatttcatcagagtacttcagccctataacaaaactcacatatatgtgtgtggaactggagcatttcatccaatatgtgggtatattgatcttggagtctacaaggaggatattatattcaaactagacacacataatttggagtctggcagactgaaatgtcctttcgatcctcagcagccttttgcttcagtaatgacagatgagtacctctactctggaacagcttctgatttccttggcaaagatactgcattcactcgatcccttgggcctactcatgaccaccactacatcagaactgacatttcagagcactactggctcaatggagcaaaatttattggaactttcttcataccagacacctacaatccagatgatgataaaatatatttcttctttcgtgaatcatctcaagaaggcagtacctccgataaaaccatcctttctcgagttggaagagtttgtaagaatgatgtaggaggacaacgcagcctgataaacaagtggacgacttttcttaaggccagactgatttgctcaattcctggaagtgatggggcagatacttactttgatgagcttcaagatatttatttactccccacaagagatgaaagaaatcctgtagtatatggagtctttactacaaccagctccatcttcaaaggctctgctgtttgtgtgtatagcatggctgacatcagagcagtttttaatggtccatatgctcataaggaaagtgcagaccatcgttgggtgcagtatgatgggagaattccttatccacggcctggtacatgtccaagcaaaacctatgacccactgattaagtccacccgagattttccagatgatgtcatcagtttcataaagcggcactctgtgatgtataagtccgtatacccagttgcaggaggaccaacgttcaagagaatcaatgtggattacagactgacacagatagtggtggatcatgtcattgcagaagatggccagtacgatgtaatgtttcttggaacagacattggaactgtcctcaaagttgtcagcatttcaaaggaaaagtggaatatggaagaggtagtgctggaggagttgcagatattcaagcactcatcaatcatcttgaacatggaattgtctctgaagcagcaacaattgtacattggttcccgagatggattggttcagctctccttgcacagatgcgacacttatgggaaagcttgcgcagactgttgtcttgccagagacccctactgtgcctgggatggaaatgcatgctctcgatatgctcctacttctaaaaggagagctagacgccaagatgtaaaatatggcgacccaatcacccagtgctgggacatcgaagacagcattagtcatgaaactgctgatgaaaaggtgatttttggcattgaatttaactcaacctttctggaatgtatacctaaatcccaacaagcaactattaaatggtatatccagaggtcaggggatgagcatcgagaggagttgaagcccgatgaaagaatcatcaaaacggaatatgggctactgattcgaagtttgcagaagaaggattctgggatgtattactgcaaagcccaggagcacactttcatccacaccatagtgaagctgactttgaatgtcattgagaatgaacagatggaaaatacccagagggcagagcatgaggaggggaaggtcaaggatctattggctgagtcacggttgagatacaaagactacatccaaatccttagcagcccaaacttcagcctcgaccagtactgcgaacagatgtggcacagggagaagcggagacagagaaacaaggggggcccaaagtggaagcacatgcaggaaatgaagaagaaacgaaatcgaagacatcacagagacctggatgagctccctagagctgtagccacgtagttttctacttaatttaaagaaaagaattccttacctataaaaacattgccttctgttttgtatatcccttatagtaattcataaatgcttcccatggagttttgctaaggcacaagacaataatctgaataagacaatatgtgatgaatataagaaagggcaaaaaattcatttgaaccagttttccaagaacaaatcttgcacaagcaaagtataagaattatcctaaaaatagggggtttacagttgtaaatgttttatgttttgagttttggaatttattgtcatgtaaatagttgagctaagcaagccccgaatttgatagtgtataaggtgctttattccctcgaatgtccattaagcatggaatttaccatgcagttgtgctatgttcttatgaacagatatatcattcctattgagaaccagctaccttgtggtagggaataagaggtcagacacaaattaagacaactcccattatcaacaggaactttctcagtgagccattcactcctggagaatggtataggaatttggagaggtgcattatttctttctggccactggggttaaatttagtgtactacaacattgatttactgaagggcactaatgtttcccccaggatttctattgactagtcaggagtaacaggttcacagagagaagttggtgcttagttatgtgttttttagagtatatactaagctctacagggacagaatgcttaataaatactttaataagatatgggaaaatattttaataaaacaaggaaaacataatgatgtataatgcatcctgatgggaaggcatgcagatgggatttgttagaagacagaaggaaagacagccataaattctggctttggggaaaactcatatccccatgaaaaggaagaacaatcacaaataaagtgagagtaatgtaatggagctcttttcactagggtataagtagctgccaatttgtaattcatctgttaaaaaaaatctagattataacaaactgctagcaaaatctgaggaaacataaattcttctgaagaatcataggaagagtagacattttatttataaccaatgatatttcagtatatattttctctcttttaaaaaatatttatcatactctgtatattatttctttttactgcctttattctctcctgtatattggattttgtgattatatttgagtgaataggagaaaacaatatataacacacagagaattaagaaaatgacatttctggggagtggggatatatatttgttgaataacagaacgagtgtaaaattttaacaacggaaagggttaaattaactctttgacatcttcactcaaccttttctcattgctgagttaatctgttgtaattgtagtattgtttttgtaatttaacaataaataagcctgctacatgtaaaaagaaccaaactcacaatattaacataaacatctttcatattttgttagtactttcaaatgttttcaatttgactttccctctgaatatgcatggtgtgtttcctgtctgtttaagcagaactcacctttccttcttgtaacacagaacccttagccttcttctgttttgccttttcacgccctttatagtgtgaaatgaaaaattagtcacttcctcacatggaaggcagcttttcagaaaataacagacattgctcgtttctcatgcattctacatatcttgaaagaaaagtctgtgagaaaaccctgtgattagagggcaacttaatgcaagatctgtggctctatgttgagagcattctctctctgttatttttattttatttgcattgcttacctatctcaaagtagtcaaactgatatatgagattgagtactcccttttgatattatactgatgaatatttgtaggtgtttcactataaggaacagctaaggaataattttaataaaagtgaaccagaacaaatcactcatttaaaaagtaattcagaagaacagtgtggcatgatcagacttctaattgaatagcgtaacaacagtgtttgtaattatagatttgcttggacaaaatattccaggaactcatagcgagctcaaagcaattaagtgggaacatttttaatttaaaaaaaatttccaaatatttgtgggtccgacagtaatgatcaaaatatgaatgactttggaaaatttacatgaagctcaagtgttaggattgacttatgaaaataaattttatttctatccaaatttgaatgtccaaaccattttttagttacttctttctaatcctagttattcagacaaaatttggaaacttattttatgaccacatctaatattctggctgctttggatacaatactcttgatttatgataattagttaaaatatattaaaaatattattagtaaaataaaatttcacacaataaaaaacaacatagagtacacatatttatatgtatttttaaagataaagaatatctaaaatgtgtttttttcttagctttttagttgtctagaacatttagagaaagagtatgaatatattaaatccacaaacacactatatacttcctcaccactgactattttatcaaatttgccttaaaataatgaaaaagaaaagtatagttaatggtttcaaatatgctaagaaattgactctgcggaggggatcttaaaatgcctgtttactcatgttttcgtatttttcttgtctctaatacttttgtctttgtctgccttgtgtgttcttttctgaatttcatttcagcaatttatgctgctaaatagaatcccgcatgtctgcattcatttacattcaacttattgtaaattttgagattttatttagaaatgaattgtctaattaatttatgtagagtccttttttccaaagagctcaaaacactacatccacattattgacttttggaaaccaaccaaattacttaagaaatggaaaagtagtcacagagaaatttagtaatttgcaaaagccacaacagtagtggaagaattaaaattcataaagtctcatcattctgttggctaaaataatgctctttacaatatgctggctacaaaatggtcttactcttgaattttgcttttggttcatattttggttcttcatattctagtatgttttgttcctgctgaattttacagactcagctaaacaataagttattagtagtcacttgttttcattatcataattgaatttccaagaacaacttgatatcattcagctgtccaaaaaataataagagcattcattaaatactgattttcttaaacttaaatgttgtatttcatatttatttatataatacaaatggaaatcaaaactgaaatagcctccctttagaatgtcacatttttcttagaaaacattttggaattggttaaccttattgggaatggataatttagaaacaaaccaaaaaaaaaaaaagatatttgaagtgtttttataggagatgtatttttatcatagtaaatgatcacaattttaaataattcatcttacaagtcaggtaaaataaaatcgattcccagattccatacattaggagtgcaaagacaggatcatacacatgacttatacctctcatttaaatattttatagtataaagtatttatggaaagggtttgagatagatgatttttgggaaagggcaaaatgtgtcagatgccctagttaatcatgtaatttaattctggtattgtgagtggttagcaatcaattttgaatttataattctgctattttaaaagaaatgtagtcttgtagtatgaaataattaaaaattgttaaatgtatattttggttgtattataataaaatgcaaacatgactgttctatgattataaaaa

SEQ ID NO: 179712 - DNA, 1605 bp, Homo sapiens
  Payload ID: 15419
  Gene Symbol: SEMA3D
  Gene Name: sema domain, immunoglobulin domain (Ig), short basic domain, secreted, (semaphorin) 3D
  ENST ID: ENST00000444867
  CDS Start-End: 351-1235
agcttcccggctctgccagggctgccggcggctccgcttgctcagccagggctgcggctcagaggaacgcgcgccggtgccccgggttgccgcgccgctggacctcagcctgcatcccgttcccctctccctgaaaaggcaccaggaaaagagagagggagagaagagttcacagcaggtctttacacttggactagaactgtaacatctgctgtcctggttgccaggcttttgaacatacactgttggttctcctggatcttcaccttaccaactgcagatcttgggactcatcagcctcaataattatattaaattaacaccatttgaaagagaacattgttttcatcatgaatgctaataaagatgaaagacttaaagccagaagccaagattttcacctttttcctgctttgatgatgctaagcatgaccatgttgtttcttccagtcactggcactttgaagcaaaatattccaagactcaagctaacctacaaagacttgctgctttcaaatagctgtattccctttttgggttcatcagaaggactggattttcaaactcttctcttagatgaggaaagaggcaggctgctcttgggagccaaagaccacatctttctactcagtctggttgacttaaacaaaaattttaagaagatttattggcctgctgcaaaggaacgggtggaattatgtaaattagctgggaaagatgccaatacagaatgtgcaaatttcatcagagtacttcagccctataacaaaactcacatatatgtgtgtggaactggagcatttcatccaatatgtgggtatattgatcttggagtctacaaggaggatattatattcaaactagacacacataatttggagtctggcagactgaaatgtcctttcgatcctcagcagccttttgcttcagtaatgacagatgagtacctctactctggaacagcttctgatttccttggcaaagatactgcattcactcgatcccttgggcctactcatgaccaccactacatcagaactgacatttcagagcactactggctcaatggagcaaaatttattggaactttcttcataccagacacctacaatccagatgatgataaaatatatttcttctttcgtgaatcatctcaagaaggcagtacctccgataaaaccatcctttctcgagttggaagagtttgtaaggagaatttgtgctttgaagattgatcttatttctgaacatagtcaaagtaatttggagctgtatttggagaaagttgcataaatgatttgaacaatgcaaattttggtcaagagatatcaatgaagagagacacaataaataaactgacttaaaagataattttactgggcaatattgatcaatgagagcctgaggcgaataagtgccttcatccacagaatatcttttaaacttaatatgtttataattatacatggtagagcacatttcctaatgaattatttttagtagtgttcctactttccagtcaaactacttactctatttttccaataaattgtttaaccttgaaggatttctaaagtccttgtcaagctctacagttctttcatt

SEQ ID NO: 179713 - DNA, 6476 bp, Homo sapiens
  Payload ID: 15420
  Gene Symbol: SEMA3E
  Gene Name: sema domain, immunoglobulin domain (Ig), short basic domain, secreted, (semaphorin) 3E
  Uniprot ID: O15041
  ENST ID: ENST00000307792
  CDS Start-End: 469-2796
cagtttggcaagtcagtgcaagaggctgacttctgagaggcttccaggagcccgaagagaggacctccacgggagaagggagtgcgtgtgctcggttttgtttttttctctcttttttttttttttttctgaatgaacagctttgcccaagtgactgaaaaatacagcttcttcctgaatctaccggcgtagttgctgaagagcgctctagacaggacatggctctgaagactcactctttggaatgtcctcttgctcccggcttataaacaactgtcccgaggaaagaaaggttttacatagccaaatacagcctgacaaatggcacttcggaactgtgctttctgatgacaacgcgttcgatttctgacaaagcctctcgcacgctgcccctggagggaagtcctaagtaaaactcagaccctccttaaagtgaggagcgagggcttggacggtgaacacggcagcatggcatccgcggggcacattatcaccttgctcctgtggggttacttactggagctttggacaggaggtcatacagctgatactacccacccccggttacgcctgtcacataaagagctcttgaatctgaacagaacatcaatatttcatagcccttttggatttcttgatctccatacaatgctgctggatgaatatcaagagaggctcttcgtgggaggcagggaccttgtatattccctcagcttggagagaatcagtgacggctataaagagatacactggccgagtacagctctaaaaatggaagaatgcataatgaagggaaaagatgcgggtgaatgtgcaaattatgttcgggttttgcatcactataacaggacacaccttctgacctgtggtactggagcttttgatccagtttgtgccttcatcagagttggatatcatttggaggatcctctgtttcacctggaatcacccagatctgagagaggaaggggcagatgtccttttgaccccagctcctccttcatctccactttaattggtagtgaattgtttgctggactctacagtgactactggagcagagacgctgcgatcttccgcagcatggggcgactggcccatatccgcactgagcatgacgatgagcgtctgttgaaagaaccaaaatttgtaggttcatacatgattcctgacaatgaagacagagatgacaacaaagtatatttcttttttactgagaaggcactggaggcagaaaacaatgctcacgcaatttacaccagggtcgggcgactctgtgtgaatgatgtaggagggcagagaatactggtgaataagtggagcactttcctaaaagcgagactcgtttgctcagtaccaggaatgaatggaattgacacatattttgatgaattagaggacgtttttttgctacctaccagagatcataagaatccagtgatatttggactctttaacactaccagtaatatttttcgagggcatgctatatgtgtctatcacatgtctagcattcgggcagccttcaacggaccatatgcacataaggaaggacctgaataccactggtcagtctatgaaggaaaagtcccttatccaaggcctggttcttgtgccagcaaagtaaatggagggagatacggaaccaccaaggactatcctgatgatgccatccgatttgcaagaagtcatccactaatgtaccaggccataaaacctgcccataaaaaaccaatattggtaaaaacagatggaaaatataacctgaaacaaatagcagtagatcgagtggaagctgaggatggccaatatgacgtcttgtttattgggacagataatggaattgtgctgaaagtaatcacaatttacaaccaagaaatggaatcaatggaagaagtaattctagaagaacttcagatattcaaggatccagttcctattatttctatggagatttcttcaaagcggcaacagctgtatattggatctgcttctgctgtggctcaagtcagattccatcactgtgacatgtatggaagtgcttgtgctgactgctgcctggctcgagacccttactgtgcctgggatggcatatcctgctcccggtattacccaacaggcacacatgcaaaaaggcgtttccggagacaagatgttcgacatggaaatgcagctcagcagtgctttggacaacagtttgttggggatgctttggataagactgaagaacatctggcttatggcatagagaacaacagtactttgctggaatgtaccccacgatctttacaagcgaaagttatctggtttgtacagaaaggacgtgagacaagaaaagaggaggtgaagacagatgacagagtggttaagatggaccttggtttactcttcctaaggttacacaaatcagatgctgggacctatttttgccagacagtagagcatagctttgtccatacggtccgtaaaatcaccttggaggtagtggaagaggagaaagtcgaggatatgtttaacaaggacgatgaggaggacaggcatcacaggatgccttgtcctgctcagagtagcatctcgcagggagcaaaaccatggtacaaggaattcttgcagctgatcggttatagcaacttccagagagtggaagaatactgcgagaaagtatggtgcacagatagaaagaggaaaaagcttaaaatgtcaccctccaagtggaagtatgccaaccctcaggaaaagaagctccgttccaaacctgagcattaccgcctgcccaggcacacgctggactcctgatggggtgagactatctactgtcttttgaagaatttatatttggaaagtaaaaaagtaaaaaaataaatcatccaacttctttgcattacttaaaagagatttctgtaatacaggaatgactatgaaggtgttataataaattattctacatactcatttgactggataaactttacataaaattaactaattttttaaataaatgcattgcttaatggtttctcattatgtttatcaaaaaacaactgtagctgttattttcagtacttggctgcttttctgtgaaaattattattttacttttggaagacaagattattagaatattgaagaaaaattggagacttataatcatggtaaatataaaactaaatatgttttaatatttctgaatttttcttttccatcacaatgtaagatatgcagaatacaagatactttggcattctcatgtgaactttctgtactctttaaggattattttattagtgttgtttaagccatgagtgttaagtagcaggtgtgttgtgagtgctgtaacccatgaaaggaaaaatgtcattctgaggcttgtgcccttcgtaaaatattcattaaagtacattcacactatttttgctttataacacagtctttaattttcactcactgtggaaataaaaactaaggtaacttctcagaaagatatcaaatctcagaaagaatgtcaaatcagatgaagttatagttaggattctaactactgtaaaagatttttgcttccctcttgtggtaaaaaaaattatattctcacacatttcttttttctctacagacggatatctgtttaggaaagatttgaaagcagattatcagtaggtacatggatacatcaagttcatttgcagaaacaaataactgaaataaaaaacatgttaatccttgtatcatactttaatatgaaagtattgtttatagataatttatctcacaagtcaaaaatgaagattttgcagcactgaaaatctattaaagctccaaattttaagtttctaaataatcttcgctgaaatctaaaatatactataacaaccgtgttttatttgtgaaaaaaatattaaagtgatttgctctcaaatatcaaattttcttctctcttttatattaagagacagaaaattgtttcatgagttcacttaactactgagatattcagagcatttttacctctctcttaaatgttataaaaaacaattgtatttttaagaatgtttatttatcaaagtctttccttcttctattaaatatttagcaattacctttctaaaatatgaaattttgtaagatgttttcacctaaataaaaattgaaagcaagtggattacacaggagaaccattatgaacatttatttagatattaatcttaaacagtgtttatttcagttttcaaagttagcttataggttatacatttaagttaaagtgctcataatcacttgcaatttcattgtaaaatgaacaaatacataaatattttaagaaaaatttaagtttattcagataagtcaccatgcttcaaaagatctaagaaatgcaaatatactgaaaattgacatcctctgaaaattccacttgctatttacccaagaatccactggaggtcattactgccattaaataataactgaaaagactatgtagtgaaatgtatttttaaaaactatattcagtaaaagcctgctcaatttggagaaatagaaccacaaacacagatcacaggggccttacaaagtttatgtctgaacaaataagtcaattaagtacactttattgaaaattgccttccattaacacacaagaaagaaagcaggattttctcctgtatctgaattttaaaattaaaaaggcagataagacataaatagttatcattttaattgcaataacacagacaagtagttaatgatgataacaatggtgtaacttgtaaactaaatatttggtaactgaagcaataggcagaggaaaatagcttttctatgacacaagtcataagaagtccatatactgaagagcgtttgattaaaataaagtgactattaaccagaaaagaaacattttacataaaatgctaaaatttattataggaaaataaatcaaacccaaagaaagtttattcaatgctaatttgaaagaaaattgataagaaaactttgagggcccaagtccacaatttggtgagaccactaaattttacatataattatacacacacatatgtacatatatatgtatataatcttgcttcccgcctgtttatggcagtactgaagagaaatgggaaagaagagggagggagagagaaagacgaagggagagagaaagcagtttccaaggatatgtttcatgtcccaccattttctcagtttctccctctctctcccaacacacacacacacacacccctcacatactataaaataaatcttcactgccctatcaaaatacaaataaatcaatctatgctgttctgtccttcttgagaatctaaaacataccacaaaaatacatccccagtcttttgttctgtctgaggttagaattaattcaaattcagaatctgttgtgagaaatgcccaggctttaaaaattaaaaatggatggatcttctctgaactcagggagggcacatacttagatacctacaagacttggaggaattaagagttcacccttcatctcaccaaattttccccatttttctctttcttgtagaaggagagaaaccatgctctctagcaacattgagcaaaaatcataaccactcatctaatttctaagaggcacctccatcgagggccggtctcctgcttctttagacctcttctatctttgttacaggagaggacctgtggatagacttagttttgacataaaacaatgcccattcacctcctccttcagcacaacgtcacccattgggcaagagatccagatttgttaacaaaaaagattttacttcgtgattccacgtctataattctatattgctaattttttcttttgtgtgaattactgaatatttcagagcaaagctatcaacttggagaaacagggattaaaaataaggataaacactaataagagctctagaaaaaagggaacagaaagtctgcctgtttagtaagtggcaattccatacatattttagagttttttctatctaaaattagttaaatacttagaatgtttgtaatgagtgttcgatatttgctataggttttagggttttgtaaatcttcatagtaattataaacatttgtaaaatttgtaaaatactataagtcattttgagtgttggtgttaagcatgaaacaaacagcagctgttgtccttaaaaatgaattgacctggccgggcgcggtggctcacgcctgtaatcccagcactttgggaggccgaggcgggtggatcatgaggtcaggagatcgagaccatcctggctaacaaggtgaaaccccgtctctactaaaaatacaaaaaattagccgggcgcggtggcgggcgcctgtagtcccagctacttgggaggctgaggcaggagaatggcgtgaacccgggaagcggagcttgcagtgagccgagattgcgccactgcagtccgcagtccggcctgggcgacagagcgagactccgtctc

SEQ ID NO: 179714 - DNA, 2414 bp, Homo sapiens
  Payload ID: 15420
  Gene Symbol: SEMA3E
  Gene Name: sema domain, immunoglobulin domain (Ig), short basic domain, secreted, (semaphorin) 3E
  Uniprot ID: O15041
  ENST ID: ENST00000427262
  CDS Start-End: 166-2313
aaactaaacagtgtcctataggcagctatcagctcagcatgtgttgtttacttggaaagtgaaagaaagtctcccactttgccttcccttagatgaacagagctcttgaatctgaacagaacatcaatatttcatagcccttttggatttcttgatctccatacaatgctgctggatgaatatcaagagaggctcttcgtgggaggcagggaccttgtatattccctcagcttggagagaatcagtgacggctataaagagatacactggccgagtacagctctaaaaatggaagaatgcataatgaagggaaaagatgcgggtgaatgtgcaaattatgttcgggttttgcatcactataacaggacacaccttctgacctgtggtactggagcttttgatccagtttgtgccttcatcagagttggatatcatttggaggatcctctgtttcacctggaatcacccagatctgagagaggaaggggcagatgtccttttgaccccagctcctccttcatctccactttaattggtagtgaattgtttgctggactctacagtgactactggagcagagacgctgcgatcttccgcagcatggggcgactggcccatatccgcactgagcatgacgatgagcgtctgttgaaagaaccaaaatttgtaggttcatacatgattcctgacaatgaagacagagatgacaacaaagtatatttcttttttactgagaaggcactggaggcagaaaacaatgctcacgcaatttacaccagggtcgggcgactctgtgtgaatgatgtaggagggcagagaatactggtgaataagtggagcactttcctaaaagcgagactcgtttgctcagtaccaggaatgaatggaattgacacatattttgatgaattagaggacgtttttttgctacctaccagagatcataagaatccagtgatatttggactctttaacactaccagtaatatttttcgagggcatgctatatgtgtctatcacatgtctagcattcgggcagccttcaacggaccatatgcacataaggaaggacctgaataccactggtcagtctatgaaggaaaagtcccttatccaaggcctggttcttgtgccagcaaagtaaatggagggagatacggaaccaccaaggactatcctgatgatgccatccgatttgcaagaagtcatccactaatgtaccaggccataaaacctgcccataaaaaaccaatattggtaaaaacagatggaaaatataacctgaaacaaatagcagtagatcgagtggaagctgaggatggccaatatgacgtcttgtttattgggacagataatggaattgtgctgaaagtaatcacaatttacaaccaagaaatggaatcaatggaagaagtaattctagaagaacttcagatattcaaggatccagttcctattatttctatggagatttcttcaaagcggcaacagctgtatattggatctgcttctgctgtggctcaagtcagattccatcactgtgacatgtatggaagtgcttgtgctgactgctgcctggctcgagacccttactgtgcctgggatggcatatcctgctcccggtattacccaacaggcacacatgcaaaaaggcgtttccggagacaagatgttcgacatggaaatgcagctcagcagtgctttggacaacagtttgttggggatgctttggataagactgaagaacatctggcttatggcatagagaacaacagtactttgctggaatgtaccccacgatctttacaagcgaaagttatctggtttgtacagaaaggacgtgagacaagaaaagaggaggtgaagacagatgacagagtggttaagatggaccttggtttactcttcctaaggttacacaaatcagatgctgggacctatttttgccagacagtagagcatagctttgtccatacggtccgtaaaatcaccttggaggtagtggaagaggagaaagtcgaggatatgtttaacaaggacgatgaggaggacaggcatcacaggatgccttgtcctgctcagagtagcatctcgcagggagcaaaaccatggtacaaggaattcttgcagctgatcggttatagcaacttccagagagtggaagaatactgcgagaaagtatggtgcacagatagaaagaggaaaaagcttaaaatgtcaccctccaagtggaagtatgccaaccctcaggaaaagaagctccgttccaaacctgagcattaccgcctgcccaggcacacgctggactcctgatggggtgagactatctactgtcttttgaagaatttatatttggaaagtaaaaaagtaaaaaaataaatcatccaacttctttgcattacttaaaagagatt

SEQ ID NO: 179715 - DNA, 626 bp, Homo sapiens
  Payload ID: 15420
  Gene Symbol: SEMA3E
  Gene Name: sema domain, immunoglobulin domain (Ig), short basic domain, secreted, (semaphorin) 3E
  ENST ID: ENST00000442159
  CDS Start-End: 137-626
gttcaaactggacgaacctacaattatcaaaatctcctcttagcattaagaaggcagtcaggactcagcagagctcttgaatctgaacagaacatcaatatttcatagcccttttggatttcttgatctccatacaatgctgctggatgaatatcaagagaggctcttcgtgggaggcagggaccttgtatattccctcagcttggagagaatcagtgacggctataaagagatacactggccgagtacagctctaaaaatggaagaatgcataatgaagggaaaagatgcgggtgaatgtgcaaattatgttcgggttttgcatcactataacaggacacaccttctgacctgtggtactggagcttttgatccagtttgtgccttcatcagagttggatatcatttggaggatcctctgtttcacctggaatcacccagatctgagagaggaaggggcagatgtccttttgaccccagctcctccttcatctccactttaattggtagtgaattgtttgctggactctacagtgactactggagcagagacgctgcgatcttccgcagcatggggcgactggcccatatccgcactgagcatgacgatgagcgtctgttgaaag

SEQ ID NO: 179716 - DNA, 571 bp, Homo sapiens
  Payload ID: 15420
  Gene Symbol: SEMA3E
  Gene Name: sema domain, immunoglobulin domain (Ig), short basic domain, secreted, (semaphorin) 3E
  ENST ID: ENST00000453333
  CDS Start-End: 269-388
gagcgctctagacaggacatggctctgaagactcactctttggaatgtcctcttgctcccggcttataaacaactgtcccgaggaaagaaaggttttacatagccaaatacagcctgacaaatggcacttcggaactgtgctttctgatgacaacgcgttcgatttctgacaaagcctctcgcacgctgcccctggagggaagtcctaagtaaaactcagaccctccttaaagtgaggagcgagggcttggacggtgaacacggcagcatggcatccgcggggcacattatcaccttgctcctgtggggttacttactggagctttggacaggaggtcatacagctgatactacccacccccggttacgcctgtcacataaagaatgaagagtgtttcttgtcagaggtgggatctcatctgggccttcacaacttgaatgaagaaaagacatggaggaggaaactgcaggctcaagtaaaaagagctcttgaatctgaacagaacatcaatatttcatagcccttttggatttcttgatctccatacaatgctgctggatgaatatcaag

SEQ ID NO: 179717 - DNA, 3802 bp, Homo sapiens
  Payload ID: 15421
  Gene Symbol: SEMA3F
  Gene Name: sema domain, immunoglobulin domain (Ig), short basic domain, secreted, (semaphorin) 3F
  Uniprot ID: Q13275
  ENST ID: ENST00000002829
  CDS Start-End: 485-2842
agcgcagcgcaggacctgggtacgccgcgaggaaccgtgcagcccagcgcggccgcccggcccgggtccagcagccaggagagcgcagcgcttcgaagccgagtgcgcgccaccgcccgcgccccgcgctggggaatgcgccctcggcgcgccggccagggggcgcccgcagcccaccccaggggaggcggccccgagcgcccctgagccttcccatggcccgggctggggcccgggccctcggctgctgacgcgcccgaagcccgcggaaccggttaagccgcggccgcggcgccgatcccggctgaggcgcagcggcgagaggtcgcgggcagggccatggccccggggggccgctagcgcggaccggcccaacgggagccgctccgtgccgccgccgccgcccgggcgcccaggccccgccgctgcggaagaggtttctagagagtggagcctgcttcctgggccctaggcccctcccacaatgcttgtcgccggtcttcttctctgggcttccctactgaccggggcctggccatccttccccacccaggaccacctcccggccacgccccgggtccggctctcattcaaagagctgaaggccacaggcaccgcccacttcttcaacttcctgctcaacacaaccgactaccgaatcttgctcaaggacgaggaccacgaccgcatgtacgtgggcagcaaggactacgtgctgtccctggacctgcacgacatcaaccgcgagcccctcattatacactgggcagcctccccacagcgcatcgaggaatgcgtgctctcaggcaaggatgtcaacggcgagtgtgggaacttcgtcaggctcatccagccctggaaccgaacacacctgtatgtgtgcgggacaggtgcctacaaccccatgtgcacctatgtgaaccgcggacgccgcgcccaggccacaccatggacccagactcaggcggtcagaggccgcggcagcagagccacggatggtgccctccgcccgatgcccacagccccacgccaggattacatcttctacctggagcctgagcgactcgagtcagggaagggcaagtgtccgtacgatcccaagctggacacagcatcggccctcatcaatgaggagctctatgctggtgtgtacatcgattttatgggcactgatgcagccatcttccgcacacttggaaagcagacagccatgcgcacggatcagtacaactcccggtggctgaacgacccgtcgttcatccatgctgagctcattcctgacagtgcggagcgcaatgatgataagctttacttcttcttccgtgagcggtcggcagaggcgccgcagagccccgcggtgtacgcccgcatcgggcgcatttgcctgaacgatgacggtggtcactgttgcctggtcaacaagtggagcacattcctgaaggcgcggctcgtctgctctgtcccgggcgaggatggcattgagactcactttgatgagctccaggacgtgtttgtccagcagacccaggacgtgaggaaccctgtcatttacgctgtctttacctcctctggctccgtgttccgaggctctgccgtgtgtgtctactccatggctgatattcgcatggtcttcaacgggccctttgcccacaaagaggggcccaactaccagtggatgcccttctcagggaagatgccctacccacggccgggcacgtgccctggtggaaccttcacgccatctatgaagtccaccaaggattatcctgatgaggtgatcaacttcatgcgcagccacccactcatgtaccaggccgtgtaccctctgcagcggcggcccctggtagtccgcacaggtgctccctaccgccttaccactattgccgtggaccaggtggatgcagccgacgggcgctatgaggtgcttttcctgggcacagaccgcgggacagtgcagaaggtcattgtgctgcccaaggatgaccaggagttggaggagctcatgctggaggaggtggaggtcttcaaggatccagcacccgtcaagaccatgaccatctcttctaagaggcaacaactctacgtggcgtcagccgtgggtgtcacacacctgagcctgcaccgctgccaggcgtatggggctgcctgtgctgactgctgccttgcccgggacccttactgtgcctgggatggccaggcctgctcccgctatacagcatcctccaagaggcggagccgccggcaggacgtccggcacggaaaccccatcaggcagtgccgtgggttcaactccaatgccaacaagaatgccgtggagtctgtgcagtatggcgtggccggcagcgcagccttccttgagtgccagccccgctcgccccaagccactgttaagtggctgttccagcgagatcctggtgaccggcgccgagagattcgtgcagaggaccgcttcctgcgcacagagcagggcttgttgctccgtgcactgcagctcagcgatcgtggcctctactcctgcacagccactgagaacaactttaagcacgtcgtcacacgagtgcagctgcatgtactgggccgggacgccgtccatgctgccctcttcccaccactgtccatgagcgccccgccacccccaggcgcaggccccccaacgcctccttaccaggagttagcccagctgctggcccagccagaagtgggcctcatccaccagtactgccagggttactggcgccatgtgccccccagccccagggaggctccaggggcaccccggtctcctgagccccaggaccagaaaaagccccggaaccgccggcaccaccctccggacacatgaggccagctgcctgtgcctgccatgggccagcctagcccttgtcccttttaatataaaagatatatatatatatatatatatataaaatatctatattctatacacaccctgcccctgcaaagacagtatttattggtgggttgaatatagcctgcctcagtggcagcatcctccaaaacttagacccatgctggtcagagacggcagaaaacagagcctgcctaaccaggcccagccagttggtggggccaggccaggaccacacagtccccagactcagctggaagtctacctgctggacagcctccgccaagatctacaggacaaagggagggagcaagccctactcggatggggcacggactgtccaccttttctgatgtgtgttgtcagcctgtgctgtggcatagacatggatgcgaggaccactttggagactggggtggcctcaagagcacacagagaagggaagaaggggccatcacaggatgccagcccctgcctgggttgggggcactcagccacgaccagccccttcctgggtatttattctctatttattggggataggagaagaggcatcctgcctgggtgggacagcctcttcagccccttctcccctccccgcctggccagggcagggccaccccactctacctccttagctttccctgtgccactttgactcagaggctgggagcatagcagaggggccaggcccaggcagagctgacgggaggccccagctctgaggggagggggtccgtggtagaggcctggggccggtagaggctccccagggctcccttatgtccaccacttcaggggatgggtgtggatgtaattagctctggggggcagttgggtagatgggtgggggctcctggtggccttctgctgcccaggccacagccgcctttgggttccatcttgctaataaacactggctctgggactaga

SEQ ID NO: 179718 - DNA, 3212 bp, Homo sapiens
  Payload ID: 15421
  Gene Symbol: SEMA3F
  Gene Name: sema domain, immunoglobulin domain (Ig), short basic domain, secreted, (semaphorin) 3F
  ENST ID: ENST00000413852
  CDS Start-End: 193-2253
gagcgagcgaacgaaccgcggcggtccggagagccccgagcgcagcgcaggacctgggaccacctcccggccacgccccgggtccggctctcattcaaagagctgaaggccacaggcaccgcccacttcttcaacttcctgctcaacacaaccgactaccgaatcttgctcaaggacgaggaccacgaccgcatgtacgtgggcagcaaggactacgtgctgtccctggacctgcacgacatcaaccgcgagcccctcattatacactgggcagcctccccacagcgcatcgaggaatgcgtgctctcaggcaaggatgtcaacggcgagtgtgggaacttcgtcaggctcatccagccctggaaccgaacacacctgtatgtgtgcgggacaggtgcctacaaccccatgtgcacctatgtgaaccgcggacgccgcgcccaggattacatcttctacctggagcctgagcgactcgagtcagggaagggcaagtgtccgtacgatcccaagctggacacagcatcggccctcatcaatgaggagctctatgctggtgtgtacatcgattttatgggcactgatgcagccatcttccgcacacttggaaagcagacagccatgcgcacggatcagtacaactcccggtggctgaacgacccgtcgttcatccatgctgagctcattcctgacagtgcggagcgcaatgatgataagctttacttcttcttccgtgagcggtcggcagaggcgccgcagagccccgcggtgtacgcccgcatcgggcgcatttgcctgaacgatgacggtggtcactgttgcctggtcaacaagtggagcacattcctgaaggcgcggctcgtctgctctgtcccgggcgaggatggcattgagactcactttgatgagctccaggacgtgtttgtccagcagacccaggacgtgaggaaccctgtcatttacgctgtctttacctcctctggctccgtgttccgaggctctgccgtgtgtgtctactccatggctgatattcgcatggtcttcaacgggccctttgcccacaaagaggggcccaactaccagtggatgcccttctcagggaagatgccctacccacggccgggcacgtgccctggtggaaccttcacgccatctatgaagtccaccaaggattatcctgatgaggtgatcaacttcatgcgcagccacccactcatgtaccaggccgtgtaccctctgcagcggcggcccctggtagtccgcacaggtgctccctaccgccttaccactattgccgtggaccaggtggatgcagccgacgggcgctatgaggtgcttttcctgggcacagaccgcgggacagtgcagaaggtcattgtgctgcccaaggatgaccaggagttggaggagctcatgctggaggaggtggaggtcttcaaggatccagcacccgtcaagaccatgaccatctcttctaagaggcaacaactctacgtggcgtcagccgtgggtgtcacacacctgagcctgcaccgctgccaggcgtatggggctgcctgtgctgactgctgccttgcccgggacccttactgtgcctgggatggccaggcctgctcccgctatacagcatcctccaagaggcggagccgccggcaggacgtccggcacggaaaccccatcaggcagtgccgtgggttcaactccaatgccaacaagaatgccgtggagtctgtgcagtatggcgtggccggcagcgcagccttccttgagtgccagccccgctcgccccaagccactgttaagtggctgttccagcgagatcctggtgaccggcgccgagagattcgtgcagaggaccgcttcctgcgcacagagcagggcttgttgctccgtgcactgcagctcagcgatcgtggcctctactcctgcacagccactgagaacaactttaagcacgtcgtcacacgagtgcagctgcatgtactgggccgggacgccgtccatgctgccctcttcccaccactgtccatgagcgccccgccacccccaggcgcaggccccccaacgcctccttaccaggagttagcccagctgctggcccagccagaagtgggcctcatccaccagtactgccagggttactggcgccatgtgccccccagccccagggaggctccaggggcaccccggtctcctgagccccaggaccagaaaaagccccggaaccgccggcaccaccctccggacacatgaggccagctgcctgtgcctgccatgggccagcctagcccttgtcccttttaatataaaagatatatatatatatatatatatataaaatatctatattctatacacaccctgcccctgcaaagacagtatttattggtgggttgaatatagcctgcctcagtggcagcatcctccaaaacttagacccatgctggtcagagacggcagaaaacagagcctgcctaaccaggcccagccagttggtggggccaggccaggaccacacagtccccagactcagctggaagtctacctgctggacagcctccgccaagatctacaggacaaagggagggagcaagccctactcggatggggcacggactgtccaccttttctgatgtgtgttgtcagcctgtgctgtggcatagacatggatgcgaggaccactttggagactggggtggcctcaagagcacacagagaagggaagaaggggccatcacaggatgccagcccctgcctgggttgggggcactcagccacgaccagccccttcctgggtatttattctctatttattggggataggagaagaggcatcctgcctgggtgggacagcctcttcagccccttctcccctccccgcctggccagggcagggccaccccactctacctccttagctttccctgtgccactttgactcagaggctgggagcatagcagaggggccaggcccaggcagagctgacgggaggccccagctctgaggggagggggtccgtggtagaggcctggggccggtagaggctccccagggctcccttatgtccaccacttcaggggatgggtgtggatgtaattagctctggggggcagttgggtagatgggtgggggctcctggtggccttctgctgcccaggccacagccgcctttgggttccatcttgctaataaacactggctctgggactag

SEQ ID NO: 179719 - DNA, 936 bp, Homo sapiens
  Payload ID: 15421
  Gene Symbol: SEMA3F
  Gene Name: sema domain, immunoglobulin domain (Ig), short basic domain, secreted, (semaphorin) 3F
  ENST ID: ENST00000414301
  CDS Start-End: 144-936
cccgcgcggctctgagcgccccgtcccgccggcggccgcgagaccagagcgagcgaacgaaccgcggcggtccggagagccccgagcgcagcgcaggacctggagagtggagcctgcttcctgggccctaggcccctcccacaatgcttgtcgccggtcttcttctctgggcttccctactgaccggggcctggccatccttccccacccaggaccacctcccggccacgccccgggtccggctctcattcaaagagctgaaggccacaggcaccgcccacttcttcaacttcctgctcaacacaaccgactaccgaatcttgctcaaggacgaggaccacgaccgcatgtacgtgggcagcaaggactacgtgctgtccctggacctgcacgacatcaaccgcgagcccctcattatacactgggcagcctccccacagcgcatcgaggaatgcgtgctctcaggcaaggatgtcaacggcgagtgtgggaacttcgtcaggctcatccagccctggaaccgaacacacctgtatgtgtgcgggacaggtgcctacaaccccatgtgcacctatgtgaaccgcggacgccgcgcccaggattacatcttctacctggagcctgagcgactcgagtcagggaagggcaagtgtccgtacgatcccaagctggacacagcatcggccctcatcaatgaggagctctatgctggtgtgtacatcgattttatgggcactgatgcagccatcttccgcacacttggaaagcagacagccatgcgcacggatcagtacaactcccggtggctgaacgacccgtcgttcatccatgctgagctcattcctgacagtgcggagcgcaatgatgataagctttacttcttcttccgtgagcggtcggcagaggcgccgcagagccccgcggtgtacgcccgca

SEQ ID NO: 179720 - DNA, 1693 bp, Homo sapiens
  Payload ID: 15421
  Gene Symbol: SEMA3F
  Gene Name: sema domain, immunoglobulin domain (Ig), short basic domain, secreted, (semaphorin) 3F
  ENST ID: ENST00000450338
  CDS Start-End: 555-1693
agcgccccgtcccgccggcggccgcgagaccagagcgagcgaacgaaccgcggcggtccggagagccccgagcgcagcgcaggacctgggtacgccgcgaggaaccgtgcagcccagcgcggccgcccggcccgggtccagcagccaggagagcgcagcgcttcgaagccgagtgcgcgccaccgcccgcgccccgcgctggggaatgcgccctcggcgcgccggccagggggcgcccgcagcccaccccaggggaggcggccccgagcgcccctgagccttcccatggcccgggctggggcccgggccctcggctgctgacgcgcccgaagcccgcggaaccggttaagccgcggccgcggcgccgatcccggctgaggcgcagcggcgagaggtcgcgggcagggccatggccccggggggccgctagcgcggaccggcccaacgggagccgctccgtgccgccgccgccgcccgggcgcccaggccccgccgctgcggaagaggtttctagagagtggagcctgcttcctgggccctaggcccctcccacaatgcttgtcgccggtcttcttctctgggcttccctactgaccggggcctggccatccttccccacccaggaccacctcccggccacgccccgggtccggctctcattcaaagagctgaaggccacaggcaccgcccacttcttcaacttcctgctcaacacaaccgactaccgaatcttgctcaaggacgaggaccacgaccgcatgtacgtgggcagcaaggactacgtgctgtccctggacctgcacgacatcaaccgcgagcccctcattatacactgggcagcctccccacagcgcatcgaggaatgcgtgctctcaggcaaggatgtcaacggcgagtgtgggaacttcgtcaggctcatccagccctggaaccgaacacacctgtatgtgtgcgggacaggtgcctacaaccccatgtgcacctatgtgaaccgcggacgccgcgcccaggattacatcttctacctggagcctgagcgactcgagtcagggaagggcaagtgtccgtacgatcccaagctggacacagcatcggccctcatcaatgaggagctctatgctggtgtgtacatcgattttatgggcactgatgcagccatcttccgcacacttggaaagcagacagccatgcgcacggatcagtacaactcccggtggctgaacgacccgtcgttcatccatgctgagctcattcctgacagtgcggagcgcaatgatgataagctttacttcttcttccgtgagcggtcggcagaggcgccgcagagccccgcggtgtacgcccgcatcgggcgcatttgcctgaacgatgacggtggtcactgttgcctggtcaacaagtggagcacattcctgaaggcgcggctcgtctgctctgtcccgggcgaggatggcattgagactcactttgatgagctccaggacgtgtttgtccagcagacccaggacgtgaggaaccctgtcatttacgctgtctttacctcctctggctccgtgttccgaggctctgccgtgtgtgtctactccatggctgatattcgcatggtcttcaacgggccctttgcccacaaagaggggcccaactaccagtggatgcccttctcagggaagatgccctacccacggccgggcac

SEQ ID NO: 179721 - DNA, 757 bp, Homo sapiens
  Payload ID: 15421
  Gene Symbol: SEMA3F
  Gene Name: sema domain, immunoglobulin domain (Ig), short basic domain, secreted, (semaphorin) 3F
  ENST ID: ENST00000426511
  CDS Start-End: 482-757
gcggccgcggcgccgatcccggctgaggcgcagcggcgagaggtcgcgggcagggccatggccccggggggccgctagcgcggaccggcccaacgggagccgctccgtgccgccgccgccgcccgggcgcccaggccccgccgctgcggaagaggtgagtgcagcgggaaccgggagggagcgggcaggcggccgggccaccccgcgacccctctgggacccgcggcactgcaactccgcagaagtgtccggggagcgggtctcgtcgagccggggggctgcccgcggacataggggcaacaaggctggggtgggattcttacctgtcctggaggcccggaccccttacctacggggcggcgtatggatgtgtggatgatgtggcctgcggggtcacccatgtgcaaagcaactttttcctgcaaggttctgggtttctagagagtggagcctgcttcctgggccctaggcccctcccacaatgcttgtcgccggtcttcttctctgggcttccctactgaccggggcctggccatccttccccacccaggaccacctcccggccacgccccgggtccggctctcattcaaagagctgaaggccacaggcaccgcccacttcttcaacttcctgctcaacacaaccgactaccgaatcttgctcaaggacgaggaccacgaccgcatgtacgtgggcagcaaggactacgtgctgtccctggacctgcacgacatcaaccgcgagcccctcattgta

SEQ ID NO: 179722 - DNA, 3541 bp, Homo sapiens
  Payload ID: 15421
  Gene Symbol: SEMA3F
  Gene Name: sema domain, immunoglobulin domain (Ig), short basic domain, secreted, (semaphorin) 3F
  Uniprot ID: Q13275
  ENST ID: ENST00000434342
  CDS Start-End: 319-2583
ctgactggtgctccctctcttccatcttgggctgtctgcatgtgtctcattcccccactctctcctgtgcctcccctctaccgtaataatcaggtccaggtttctctgtactgggagaagacctgtggctggagcaggcagggatgcaccctatctgttccccattcctccaggtgggagggagaaggagtaacccactttattggccacagatgcaggggagaaaggagaaagcatgctgggagctggaaagagccctaagatcacctggtttctagagagtggagcctgcttcctgggccctaggcccctcccacaatgcttgtcgccggtcttcttctctgggcttccctactgaccggggcctggccatccttccccacccaggaccacctcccggccacgccccgggtccggctctcattcaaagagctgaaggccacaggcaccgcccacttcttcaacttcctgctcaacacaaccgactaccgaatcttgctcaaggacgaggaccacgaccgcatgtacgtgggcagcaaggactacgtgctgtccctggacctgcacgacatcaaccgcgagcccctcattatacactgggcagcctccccacagcgcatcgaggaatgcgtgctctcaggcaaggatgtcaacggcgagtgtgggaacttcgtcaggctcatccagccctggaaccgaacacacctgtatgtgtgcgggacaggtgcctacaaccccatgtgcacctatgtgaaccgcggacgccgcgcccaggattacatcttctacctggagcctgagcgactcgagtcagggaagggcaagtgtccgtacgatcccaagctggacacagcatcggccctcatcaatgaggagctctatgctggtgtgtacatcgattttatgggcactgatgcagccatcttccgcacacttggaaagcagacagccatgcgcacggatcagtacaactcccggtggctgaacgacccgtcgttcatccatgctgagctcattcctgacagtgcggagcgcaatgatgataagctttacttcttcttccgtgagcggtcggcagaggcgccgcagagccccgcggtgtacgcccgcatcgggcgcatttgcctgaacgatgacggtggtcactgttgcctggtcaacaagtggagcacattcctgaaggcgcggctcgtctgctctgtcccgggcgaggatggcattgagactcactttgatgagctccaggacgtgtttgtccagcagacccaggacgtgaggaaccctgtcatttacgctgtctttacctcctctggctccgtgttccgaggctctgccgtgtgtgtctactccatggctgatattcgcatggtcttcaacgggccctttgcccacaaagaggggcccaactaccagtggatgcccttctcagggaagatgccctacccacggccgggcacgtgccctggtggaaccttcacgccatctatgaagtccaccaaggattatcctgatgaggtgatcaacttcatgcgcagccacccactcatgtaccaggccgtgtaccctctgcagcggcggcccctggtagtccgcacaggtgctccctaccgccttaccactattgccgtggaccaggtggatgcagccgacgggcgctatgaggtgcttttcctgggcacagaccgcgggacagtgcagaaggtcattgtgctgcccaaggatgaccaggagttggaggagctcatgctggaggaggtggaggtcttcaaggatccagcacccgtcaagaccatgaccatctcttctaagaggcaacaactctacgtggcgtcagccgtgggtgtcacacacctgagcctgcaccgctgccaggcgtatggggctgcctgtgctgactgctgccttgcccgggacccttactgtgcctgggatggccaggcctgctcccgctatacagcatcctccaagaggcggagccgccggcaggacgtccggcacggaaaccccatcaggcagtgccgtgggttcaactccaatgccaacaagaatgccgtggagtctgtgcagtatggcgtggccggcagcgcagccttccttgagtgccagccccgctcgccccaagccactgttaagtggctgttccagcgagatcctggtgaccggcgccgagagattcgtgcagaggaccgcttcctgcgcacagagcagggcttgttgctccgtgcactgcagctcagcgatcgtggcctctactcctgcacagccactgagaacaactttaagcacgtcgtcacacgagtgcagctgcatgtactgggccgggacgccgtccatgctgccctcttcccaccactgtccatgagcgccccgccacccccaggcgcaggccccccaacgcctccttaccaggagttagcccagctgctggcccagccagaagtgggcctcatccaccagtactgccagggttactggcgccatgtgccccccagccccagggaggctccaggggcaccccggtctcctgagccccaggaccagaaaaagccccggaaccgccggcaccaccctccggacacatgaggccagctgcctgtgcctgccatgggccagcctagcccttgtcccttttaatataaaagatatatatatatatatatatatataaaatatctatattctatacacaccctgcccctgcaaagacagtatttattggtgggttgaatatagcctgcctcagtggcagcatcctccaaaacttagacccatgctggtcagagacggcagaaaacagagcctgcctaaccaggcccagccagttggtggggccaggccaggaccacacagtccccagactcagctggaagtctacctgctggacagcctccgccaagatctacaggacaaagggagggagcaagccctactcggatggggcacggactgtccaccttttctgatgtgtgttgtcagcctgtgctgtggcatagacatggatgcgaggaccactttggagactggggtggcctcaagagcacacagagaagggaagaaggggccatcacaggatgccagcccctgcctgggttgggggcactcagccacgaccagccccttcctgggtatttattctctatttattggggataggagaagaggcatcctgcctgggtgggacagcctcttcagccccttctcccctccccgcctggccagggcagggccaccccactctacctccttagctttccctgtgccactttgactcagaggctgggagcatagcagaggggccaggcccaggcagagctgacgggaggccccagctctgaggggagggggtccgtggtagaggcctggggccggtagaggctccccagggctcccttatgtccaccacttcaggggatgggtgtggatgtaattagctctggggggcagttgggtagatgggtgggggctcctggtggccttctgctgcccaggccacagccgcctttgggttccatcttgctaataaacactggctctgggacta

SEQ ID NO: 179723 - DNA, 442 bp, Homo sapiens
  Payload ID: 15421
  Gene Symbol: SEMA3F
  Gene Name: sema domain, immunoglobulin domain (Ig), short basic domain, secreted, (semaphorin) 3F
  ENST ID: ENST00000420831
  CDS Start-End: 1-442
ggcaccgcccacttcttcaacttcctgctcaacacaaccgactaccgaatcttgctcaaggacgaggaccacgaccgcatgtacgtgggcagcaaggactacgtgctgtccctggacctgcacgacatcaaccgcgagcccctcattatacactgggcagcctccccacagcgcatcgaggaatgcgtgctctcaggcaaggatgtcaacccttccctgtggccccagggcgagtgtgggaacttcgtcaggctcatccagccctggaaccgaacacacctgtatgtgtgcgggacaggtgcctacaaccccatgtgcacctatgtgaaccgcggacgccgcgcccaggattacatcttctacctggagcctgagcgactcgagtcagggaagggcaagtgtccgtacgatcccaagctggacacagcatcggccctcatca

SEQ ID NO: 179724 - DNA, 4899 bp, Homo sapiens
  Payload ID: 15422
  Gene Symbol: SEMA3G
  Gene Name: sema domain, immunoglobulin domain (Ig), short basic domain, secreted, (semaphorin) 3G
  Uniprot ID: Q9NS98
  ENST ID: ENST00000231721
  CDS Start-End: 1-2349
atggccccctcggcctgggccatttgctggctgctagggggcctcctgctccatgggggtagctctggccccagccccggccccagtgtgccccgcctgcggctctcctaccgagacctcctgtctgccaaccgctctgccatctttctgggcccccagggctccctgaacctccaggccatgtacctagatgagtaccgagaccgcctctttctgggtggcctggacgccctctactctctgcggctggaccaggcatggccagatccccgggaggtcctgtggccaccgcagccaggacagagggaggagtgtgttcgaaagggaagagatcctttgacagagtgcgccaacttcgtgcgggtgctacagcctcacaaccggacccacctgctagcctgtggcactggggccttccagcccacctgtgccctcatcacagttggccaccgtggggagcatgtgctccacctggagcctggcagtgtggaaagtggccgggggcggtgccctcacgagcccagccgtccctttgccagcaccttcatagacggggagctgtacacgggtctcactgctgacttcctggggcgagaggccatgatcttccgaagtggaggtcctcggccagctctgcgttccgactctgaccagagtctcttgcacgacccccggtttgtgatggccgcccggatccctgagaactctgaccaggacaatgacaaggtgtacttcttcttctcggagacggtcccctcgcccgatggtggctcgaaccatgtcactgtcagccgcgtgggccgcgtctgcgtgaatgatgctgggggccagcgggtgctggtgaacaaatggagcactttcctcaaggccaggctggtctgctcggtgcccggccctggtggtgccgagacccactttgaccagctagaggatgtgttcctgctgtggcccaaggccgggaagagcctcgaggtgtacgcgctgttcagcaccgtcagtgccgtgttccagggcttcgccgtctgtgtgtaccacatggcagacatctgggaggttttcaacgggccctttgcccaccgagatgggcctcagcaccagtgggggccctatgggggcaaggtgcccttccctcgccctggcgtgtgccccagcaagatgaccgcacagccaggacggccttttggcagcaccaaggactacccagatgaggtgctgcagtttgcccgagcccaccccctcatgttctggcctgtgcggcctcgacatggccgccctgtccttgtcaagacccacctggcccagcagctacaccagatcgtggtggaccgcgtggaggcagaggatgggacctacgatgtcattttcctggggactgactcagggtctgtgctcaaagtcatcgctctccaggcagggggctcagctgaacctgaggaagtggttctggaggagctccaggtgtttaaggtgccaacacctatcaccgaaatggagatctctgtcaaaaggcaaatgctatacgtgggctctcggctgggtgtggcccagctgcggctgcaccaatgtgagacttacggcactgcctgtgcagagtgctgcctggcccgggacccatactgtgcctgggatggtgcctcctgtacccactaccgccccagccttggcaagcgccggttccgccggcaggacatccggcacggcaaccctgccctgcagtgcctgggccagagccaggaagaagaggcagtgggacttgtggcagccaccatggtctacggcacggagcacaatagcaccttcctggagtgcctgcccaagtctccccaggctgctgtgcgctggctcttgcagaggccaggggatgaggggcctgaccaggtgaagacggacgagcgagtcttgcacacggagcgggggctgctgttccgcaggcttagccgtttcgatgcgggcacctacacctgcaccactctggagcatggcttctcccagactgtggtccgcctggctctggtggtgattgtggcctcacagctggacaacctgttccctccggagccaaagccagaggagcccccagcccggggaggcctggcttccaccccacccaaggcctggtacaaggacatcctgcagctcattggcttcgccaacctgccccgggtggatgagtactgtgagcgcgtgtggtgcaggggcaccacggaatgctcaggctgcttccggagccggagccggggcaagcaggccaggggcaagagctgggcagggctggagctaggcaagaagatgaagagccgggtgcatgccgagcacaatcggacgccccgggaggtggaggccacgtagaagggggcagaggaggggtggtcaggatgggctggggggcccactagcagcccccagcatctcccacccacccagctagggcagaggggtcaggatgtctgtttgcctcttagagacaggtgtctctgcccccacaccgctactggggtctaatggaggggctgggttcttgaagcctgttccctgcccttctctgtgctcttagacccagctggagccagcaccctctggctgctggcagccccaagggatctgccatttgttctcagagatggcctggcttccgcaacacatttccgggtgtgcccagaggcaagagggttgggtggttctttcccagcctacagaacaatggccattctgagtgaccctcagagtgggtgtgtgggtgcgtctagggggtatcccggtagggggcctgcagggagccagagggtggaaatggcctctaagctagcaccccgtaagaagagcctacctgaccgacttggggagggaacacagaggtgttgggaaggtggagcaacaatgcacctcccctcctgtcgcgccgtgatatcttggtggctccctgccactgcccaccgcctcttctccatctgagaatcacggagaggtgtagataatctagaggcatagactgctagagcccccagggatctggggtggtcagggctcaggcttcactttgtaaaccaggtgggggcatctcacagcctgacttcccttccccaggccagggttgctgggatgcctgcccctcctgagaggaccccctccccattgtcaggctctccatgtccacgagcggggaggggtgggttctggggcattgttgtcccttgtgtctgtggactagagatagggtgggggagctggggaagggtgcaggcgggaagagtgggctgtctttcccagggtgatgcaagcatgccgcagccctggaggctgggaatgtggaggctctgtgagccctgcagccctcagaatcagggccagggatgcagaagattgagaggatatggagatggatagagggcaggagacccttaggatagattgtgggacccaggcaggaacaggtgtccacaagaactcaggatggcatcagttagctcagaagccacctggaagacccagtgtttccatctctggaatctctgttttatgctaaatggatttaggaagactgtttttcttttaagggggaaacaaggtagagaaaaggacgaagaagtgtaagtcccgctgattctcgggggtaaggctcggatggcaaggacgcgttctgcctgggcatgtaggggaggtgtttttgccatcaccagtttctcaggctggggagcacagaggggaggaggaggactaaatgaaaagttgttcccagcctgcacatgaacacattcatgacacacaaaactggctggaaggagataagagcactgggtttgagattccctccattaaaacaaccaagacaaagaaaggaggggaaaaaaagataaaaagcaagccagggttccctgccctattgaaactcaaacccagactgccttgggttttatctttcccttacccctggcacctccagagaactgggacctgaaatagtccctccgttctcccctttgaccatgtaataaatgaaccagaagcactgagattaacctatcaacgccctgagaagccttccagcctgcggtgctgtctgctgggaggtcagctggtcaaggcagaggaggagaggaggaaaggatgggggctgaagagcagaagggaggggagacagaggggattaaagaggggaggagagagtgcagagctccaggaaagggtatcagagctgcagccagctctgccctctaccctagggaggccagaaagacacaaacagccctccgggcctttacgctggactctggcttggcaggctccaggcagggtcctctgggaagttactctagaaaacgaagggaggaggagcacaagatcctcagcaacgaacacctgcacttagaaaaagtggacagcttctgccaaccacaccctacccatggtactgtatgctattaactcctggaaacgccccgtaaatgcgagttgtttttgtatttgtgtgttgagatgggccttgtggtttctctgtactcagagcacatttcttgtaattactattgttatttttattgtcatgactgcccctgagctctggtgagaaaagctgaatttacaaggaaagggatgaagttaatatttgcatcacataattatatcattactgtgtatctgtgtattgtactaaatggactgatgctgcgcacatgagctgaaaatgaagagccctcccatccattccatgagaaagaaggtcaccctgagtgacttctgtttcatgatttcccaaacaggttttagagctggaaaaggacttaaagaaagagactgggtggtgctttctagaaaggaggaagatgggtatcaggggaaggaaggagttagagggctttgtacaaagccgagattgctcattaaatgaggaacatcctggcc

SEQ ID NO: 179725 - DNA, 616 bp, Homo sapiens
  Payload ID: 15422
  Gene Symbol: SEMA3G
  Gene Name: sema domain, immunoglobulin domain (Ig), short basic domain, secreted, (semaphorin) 3G
  ENST ID: ENST00000475739
  CDS Start-End: 59-616
agcgggaccagagggcggctctgcaggcaggcggcagcggtgccctcagttccccagcatggccccctcggcctgggccatttgctggctgctagggggcctcctgctccatgggggtagctctggccccagccccggccccagtgtgccccgcctgcggctctcctaccgaggagccatggtccgaaagccttccagcaccatgtggatggaaacattttccagatacctcctgtctgccaaccgctctgccatctttctgggcccccagggctccctgaacctccaggccatgtacctagatgagtaccgagaccgcctctttctgggtggcctggacgccctctactctctgcggctggaccaggcatggccagatccccgggaggtcctgtggccaccgcagccaggacagagggaggagtgtgttcgaaagggaagagatcctttgacagagtgcgccaacttcgtgcgggtgctacagcctcacaaccggacccacctgctagcctgtggcactggggccttccagcccacctgtgccctcatcacagttggccaccgtggggagcatgtgctccacctggagcctggcagtgtggaaagtggccggggg

SEQ ID NO: 179726 - DNA, 848 bp, Homo sapiens
  Payload ID: 15422
  Gene Symbol: SEMA3G
  Gene Name: sema domain, immunoglobulin domain (Ig), short basic domain, secreted, (semaphorin) 3G
  ENST ID: ENST00000465657
  CDS Start-End: 1-299
gtagctctggccccagccccggccccagtgtgccccgcctgcggctctcctaccgagacagagtgcgccaacttcgtgcgggtgctacagcctcacaaccggacccacctgctagcctgtggcactggggccttccagcccacctgtgccctcatcacagttggccaccgtggggagcatgtgctccacctggagcctggcagtgtggaaagtggccgggggcggtgccctcacgagcccagccgtccctttgccagcaccttcatagacggggagctgtacacgggtctcactgctgacttcctggggcgagaggccatgatcttccgaagtggaggtcctcggccagctctgcgttccgactctgaccagagtctcttgcacgacccccggtttgtgatggccgcccggatccctgagaactctgaccaggacaatgacaaggtgtacttcttcttctcggagacggtcccctcgcccgatggtggctcgaaccatgtcactgtcagccgcgtgggccgcgtctgcgtgaatgatgctgggggccagcgggtgctggtgaacaaatggagcactttcctcaaggccaggctggtctgctcggtgcccggccctggtggtgccgagacccactttgaccagctagaggatgtgttcctgctgtggcccaaggccgggaagagcctcgaggtgtacgcgctgttcagcaccgtcagtgccgtgttccagggcttcgccgtctgtgtgtaccacatggcagacatctgggaggttttcaacgggccctttgcccaccgagatgggcctcagcaccagtgggggccctatgggggcaaggtgcccttccc

SEQ ID NO: 179727 - DNA, 3137 bp, Homo sapiens
  Payload ID: 15423
  Gene Symbol: SEMA4A
  Gene Name: sema domain, immunoglobulin domain (Ig), transmembrane domain (TM) and short cytoplasmic domain, (semaphorin) 4A
  Uniprot ID: Q9H3S1
  ENST ID: ENST00000355014
  CDS Start-End: 105-2390
gggctgaggcactgagagaccggaaagcctggcattccagagggagggaaacgcagcggcatccccaggctccagagctccctggtgacagtctgtggctgagcatggccctcccagccctgggcctggacccctggagcctcctgggccttttcctcttccaactgcttcagctgctgctgccgacgacgaccgcggggggaggcgggcaggggcccatgcccagggtcagatactatgcaggggatgaacgtagggcacttagcttcttccaccagaagggcctccaggattttgacactctgctcctgagtggtgatggaaatactctctacgtgggggctcgagaagccattctggccttggatatccaggatccaggggtccccaggctaaagaacatgataccgtggccagccagtgacagaaaaaagagtgaatgtgcctttaagaagaagagcaatgagacacagtgtttcaacttcatccgtgtcctggtttcttacaatgtcacccatctctacacctgcggcaccttcgccttcagccctgcttgtaccttcattgaacttcaagattcctacctgttgcccatctcggaggacaaggtcatggagggaaaaggccaaagcccctttgaccccgctcacaagcatacggctgtcttggtggatgggatgctctattctggtactatgaacaacttcctgggcagtgagcccatcctgatgcgcacactgggatcccagcctgtcctcaagaccgacaacttcctccgctggctgcatcatgacgcctcctttgtggcagccatcccttcgacccaggtcgtctacttcttcttcgaggagacagccagcgagtttgacttctttgagaggctccacacatcgcgggtggctagagtctgcaagaatgacgtgggcggcgaaaagctgctgcagaagaagtggaccaccttcctgaaggcccagctgctctgcacccagccggggcagctgcccttcaacgtcatccgccacgcggtcctgctccccgccgattctcccacagctccccacatctacgcagtcttcacctcccagtggcaggttggcgggaccaggagctctgcggtttgtgccttctctctcttggacattgaacgtgtctttaaggggaaatacaaagagttgaacaaagaaacttcacgctggactacttataggggccctgagaccaacccccggccaggcagttgctcagtgggcccctcctctgataaggccctgaccttcatgaaggaccatttcctgatggatgagcaagtggtggggacgcccctgctggtgaaatctggcgtggagtatacacggcttgcagtggagacagcccagggccttgatgggcacagccatcttgtcatgtacctgggaaccaccacagggtcgctccacaaggctgtggtaagtggggacagcagtgctcatctggtggaagagattcagctgttccctgaccctgaacctgttcgcaacctgcagctggcccccacccagggtgcagtgtttgtaggcttctcaggaggtgtctggagggtgccccgagccaactgtagtgtctatgagagctgtgtggactgtgtccttgcccgggacccccactgtgcctgggaccctgagtcccgaacctgttgcctcctgtctgcccccaacctgaactcctggaagcaggacatggagcgggggaacccagagtgggcatgtgccagtggccccatgagcaggagccttcggcctcagagccgcccgcaaatcattaaagaagtcctggctgtccccaactccatcctggagctcccctgcccccacctgtcagccttggcctcttattattggagtcatggcccagcagcagtcccagaagcctcttccactgtctacaatggctccctcttgctgatagtgcaggatggagttgggggtctctaccagtgctgggcaactgagaatggcttttcataccctgtgatctcctactgggtggacagccaggaccagaccctggccctggatcctgaactggcaggcatcccccgggagcatgtgaaggtcccgttgaccagggtcagtggtggggccgccctggctgcccagcagtcctactggccccactttgtcactgtcactgtcctctttgccttagtgctttcaggagccctcatcatcctcgtggcctccccattgagagcactccgggctcggggcaaggttcagggctgtgagaccctgcgccctggggagaaggccccgttaagcagagagcaacacctccagtctcccaaggaatgcaggacctctgccagtgatgtggacgctgacaacaactgcctaggcactgaggtagcttaaactctaggcacaggccggggctgcggtgcaggcacctggccatgctggctgggcggcccaagcacagccctgactaggatgacagcagcacaaaagaccacctttctcccctgagaggagcttctgctactctgcatcactgatgacactcagcagggtgatgcacagcagtctgcctcccctatgggactcccttctaccaagcacatgagctctctaacagggtgggggctacccccagacctgctcctacactgatattgaagaacctggagaggatccttcagttctggccattccagggaccctccagaaacacagtgtttcaagagaccctaaaaaacctgcctgtcccaggaccctatggtaatgaacaccaaacatctaaacaatcatatgctaacatgccactcctggaaactccactctgaagctgccgctttggacaccaacactcccttctcccagggtcatgcagggatctgctccctcctgcttcccttaccagtcgtgcaccgctgactcccaggaagtctttcctgaagtctgaccacctttcttcttgcttcagttggggcagactctgatcccttctgccctggcagaatggcaggggtaatctgagccttcttcactcctttaccctagctgaccccttcacctctccccctcccttttcctttgttttgggattcagaaaactgcttgtcagagactgtttattttttattaaaaatataaggctta

SEQ ID NO: 179728 - DNA, 3249 bp, Homo sapiens
  Payload ID: 15423
  Gene Symbol: SEMA4A
  Gene Name: sema domain, immunoglobulin domain (Ig), transmembrane domain (TM) and short cytoplasmic domain, (semaphorin) 4A
  Uniprot ID: Q9H3S1
  ENST ID: ENST00000368282
  CDS Start-End: 209-2494
aggatgatgaaagtgagaccgtcttagggcccttccagatagggaaccttctctgccccaatgccccacccctgccaccaatacacacgcttctgctgcctggggctctcctattggtcctcggggggatgtggtaagaactgctcacccagaaagtgcccgggtgcctgtttccccagagctccctggtgacagtctgtggctgagcatggccctcccagccctgggcctggacccctggagcctcctgggccttttcctcttccaactgcttcagctgctgctgccgacgacgaccgcggggggaggcgggcaggggcccatgcccagggtcagatactatgcaggggatgaacgtagggcacttagcttcttccaccagaagggcctccaggattttgacactctgctcctgagtggtgatggaaatactctctacgtgggggctcgagaagccattctggccttggatatccaggatccaggggtccccaggctaaagaacatgataccgtggccagccagtgacagaaaaaagagtgaatgtgcctttaagaagaagagcaatgagacacagtgtttcaacttcatccgtgtcctggtttcttacaatgtcacccatctctacacctgcggcaccttcgccttcagccctgcttgtaccttcattgaacttcaagattcctacctgttgcccatctcggaggacaaggtcatggagggaaaaggccaaagcccctttgaccccgctcacaagcatacggctgtcttggtggatgggatgctctattctggtactatgaacaacttcctgggcagtgagcccatcctgatgcgcacactgggatcccagcctgtcctcaagaccgacaacttcctccgctggctgcatcatgacgcctcctttgtggcagccatcccttcgacccaggtcgtctacttcttcttcgaggagacagccagcgagtttgacttctttgagaggctccacacatcgcgggtggctagagtctgcaagaatgacgtgggcggcgaaaagctgctgcagaagaagtggaccaccttcctgaaggcccagctgctctgcacccagccggggcagctgcccttcaacgtcatccgccacgcggtcctgctccccgccgattctcccacagctccccacatctacgcagtcttcacctcccagtggcaggttggcgggaccaggagctctgcggtttgtgccttctctctcttggacattgaacgtgtctttaaggggaaatacaaagagttgaacaaagaaacttcacgctggactacttataggggccctgagaccaacccccggccaggcagttgctcagtgggcccctcctctgataaggccctgaccttcatgaaggaccatttcctgatggatgagcaagtggtggggacgcccctgctggtgaaatctggcgtggagtatacacggcttgcagtggagacagcccagggccttgatgggcacagccatcttgtcatgtacctgggaaccaccacagggtcgctccacaaggctgtggtaagtggggacagcagtgctcatctggtggaagagattcagctgttccctgaccctgaacctgttcgcaacctgcagctggcccccacccagggtgcagtgtttgtaggcttctcaggaggtgtctggagggtgccccgagccaactgtagtgtctatgagagctgtgtggactgtgtccttgcccgggacccccactgtgcctgggaccctgagtcccgaacctgttgcctcctgtctgcccccaacctgaactcctggaagcaggacatggagcgggggaacccagagtgggcatgtgccagtggccccatgagcaggagccttcggcctcagagccgcccgcaaatcattaaagaagtcctggctgtccccaactccatcctggagctcccctgcccccacctgtcagccttggcctcttattattggagtcatggcccagcagcagtcccagaagcctcttccactgtctacaatggctccctcttgctgatagtgcaggatggagttgggggtctctaccagtgctgggcaactgagaatggcttttcataccctgtgatctcctactgggtggacagccaggaccagaccctggccctggatcctgaactggcaggcatcccccgggagcatgtgaaggtcccgttgaccagggtcagtggtggggccgccctggctgcccagcagtcctactggccccactttgtcactgtcactgtcctctttgccttagtgctttcaggagccctcatcatcctcgtggcctccccattgagagcactccgggctcggggcaaggttcagggctgtgagaccctgcgccctggggagaaggccccgttaagcagagagcaacacctccagtctcccaaggaatgcaggacctctgccagtgatgtggacgctgacaacaactgcctaggcactgaggtagcttaaactctaggcacaggccggggctgcggtgcaggcacctggccatgctggctgggcggcccaagcacagccctgactaggatgacagcagcacaaaagaccacctttctcccctgagaggagcttctgctactctgcatcactgatgacactcagcagggtgatgcacagcagtctgcctcccctatgggactcccttctaccaagcacatgagctctctaacagggtgggggctacccccagacctgctcctacactgatattgaagaacctggagaggatccttcagttctggccattccagggaccctccagaaacacagtgtttcaagagaccctaaaaaacctgcctgtcccaggaccctatggtaatgaacaccaaacatctaaacaatcatatgctaacatgccactcctggaaactccactctgaagctgccgctttggacaccaacactcccttctcccagggtcatgcagggatctgctccctcctgcttcccttaccagtcgtgcaccgctgactcccaggaagtctttcctgaagtctgaccacctttcttcttgcttcagttggggcagactctgatcccttctgccctggcagaatggcaggggtaatctgagccttcttcactcctttaccctagctgaccccttcacctctccccctcccttttcctttgttttgggattcagaaaactgcttgtcagagactgtttattttttattaaaaatataaggcttatgtatgat

SEQ ID NO: 179729 - DNA, 2981 bp, Homo sapiens
  Payload ID: 15423
  Gene Symbol: SEMA4A
  Gene Name: sema domain, immunoglobulin domain (Ig), transmembrane domain (TM) and short cytoplasmic domain, (semaphorin) 4A
  Uniprot ID: Q9H3S1
  ENST ID: ENST00000368284
  CDS Start-End: 346-2235
agctcccagtgctggctttggcatgatgggcacctggagggccgcactcccgttccagccaggctgagccttctgtcccctgcctctggggcctgggaaccccccttcttctttctcctgaatggcacccccgccctagaatccagacaccgagtttcccactgtggctggttcaagggtatgtgaggggatgaacgtagggcacttagcttcttccaccagaagggcctccaggattttgacactctgctcctgagtggtgatggaaatactctctacgtgggggctcgagaagccattctggccttggatatccaggatccaggggtccccaggctaaagaacatgataccgtggccagccagtgacagaaaaaagagtgaatgtgcctttaagaagaagagcaatgaggaacttcaagattcctacctgttgcccatctcggaggacaaggtcatggagggaaaaggccaaagcccctttgaccccgctcacaagcatacggctgtcttggtggatgggatgctctattctggtactatgaacaacttcctgggcagtgagcccatcctgatgcgcacactgggatcccagcctgtcctcaagaccgacaacttcctccgctggctgcatcatgacgcctcctttgtggcagccatcccttcgacccaggtcgtctacttcttcttcgaggagacagccagcgagtttgacttctttgagaggctccacacatcgcgggtggctagagtctgcaagaatgacgtgggcggcgaaaagctgctgcagaagaagtggaccaccttcctgaaggcccagctgctctgcacccagccggggcagctgcccttcaacgtcatccgccacgcggtcctgctccccgccgattctcccacagctccccacatctacgcagtcttcacctcccagtggcaggttggcgggaccaggagctctgcggtttgtgccttctctctcttggacattgaacgtgtctttaaggggaaatacaaagagttgaacaaagaaacttcacgctggactacttataggggccctgagaccaacccccggccaggcagttgctcagtgggcccctcctctgataaggccctgaccttcatgaaggaccatttcctgatggatgagcaagtggtggggacgcccctgctggtgaaatctggcgtggagtatacacggcttgcagtggagacagcccagggccttgatgggcacagccatcttgtcatgtacctgggaaccaccacagggtcgctccacaaggctgtggtaagtggggacagcagtgctcatctggtggaagagattcagctgttccctgaccctgaacctgttcgcaacctgcagctggcccccacccagggtgcagtgtttgtaggcttctcaggaggtgtctggagggtgccccgagccaactgtagtgtctatgagagctgtgtggactgtgtccttgcccgggacccccactgtgcctgggaccctgagtcccgaacctgttgcctcctgtctgcccccaacctgaactcctggaagcaggacatggagcgggggaacccagagtgggcatgtgccagtggccccatgagcaggagccttcggcctcagagccgcccgcaaatcattaaagaagtcctggctgtccccaactccatcctggagctcccctgcccccacctgtcagccttggcctcttattattggagtcatggcccagcagcagtcccagaagcctcttccactgtctacaatggctccctcttgctgatagtgcaggatggagttgggggtctctaccagtgctgggcaactgagaatggcttttcataccctgtgatctcctactgggtggacagccaggaccagaccctggccctggatcctgaactggcaggcatcccccgggagcatgtgaaggtcccgttgaccagggtcagtggtggggccgccctggctgcccagcagtcctactggccccactttgtcactgtcactgtcctctttgccttagtgctttcaggagccctcatcatcctcgtggcctccccattgagagcactccgggctcggggcaaggttcagggctgtgagaccctgcgccctggggagaaggccccgttaagcagagagcaacacctccagtctcccaaggaatgcaggacctctgccagtgatgtggacgctgacaacaactgcctaggcactgaggtagcttaaactctaggcacaggccggggctgcggtgcaggcacctggccatgctggctgggcggcccaagcacagccctgactaggatgacagcagcacaaaagaccacctttctcccctgagaggagcttctgctactctgcatcactgatgacactcagcagggtgatgcacagcagtctgcctcccctatgggactcccttctaccaagcacatgagctctctaacagggtgggggctacccccagacctgctcctacactgatattgaagaacctggagaggatccttcagttctggccattccagggaccctccagaaacacagtgtttcaagagaccctaaaaaacctgcctgtcccaggaccctatggtaatgaacaccaaacatctaaacaatcatatgctaacatgccactcctggaaactccactctgaagctgccgctttggacaccaacactcccttctcccagggtcatgcagggatctgctccctcctgcttcccttaccagtcgtgcaccgctgactcccaggaagtctttcctgaagtctgaccacctttcttcttgcttcagttggggcagactctgatcccttctgccctggcagaatggcaggggtaatctgagccttcttcactcctttaccctagctgaccccttcacctctccccctcccttttcctttgttttgggattcagaaaactgcttgtcagagactgtttattttttattaaaaatataaggctt

SEQ ID NO: 179730 - DNA, 3300 bp, Homo sapiens
  Payload ID: 15423
  Gene Symbol: SEMA4A
  Gene Name: sema domain, immunoglobulin domain (Ig), transmembrane domain (TM) and short cytoplasmic domain, (semaphorin) 4A
  Uniprot ID: Q9H3S1
  ENST ID: ENST00000368285
  CDS Start-End: 268-2553
ccaggatctgtcacaactcgagaggtggaaattccggtttccctggcctagagctcccagtgctggctttggcatgatgggcacctggagggccgcactcccgttccagccaggctgagccttctgtcccctgcctctggggcctgggaaccccccttcttctttctcctgaatggcacccccgccctagaatccagacaccgagtttcccactgtggctggttcaagggtatgtgagagctccctggtgacagtctgtggctgagcatggccctcccagccctgggcctggacccctggagcctcctgggccttttcctcttccaactgcttcagctgctgctgccgacgacgaccgcggggggaggcgggcaggggcccatgcccagggtcagatactatgcaggggatgaacgtagggcacttagcttcttccaccagaagggcctccaggattttgacactctgctcctgagtggtgatggaaatactctctacgtgggggctcgagaagccattctggccttggatatccaggatccaggggtccccaggctaaagaacatgataccgtggccagccagtgacagaaaaaagagtgaatgtgcctttaagaagaagagcaatgagacacagtgtttcaacttcatccgtgtcctggtttcttacaatgtcacccatctctacacctgcggcaccttcgccttcagccctgcttgtaccttcattgaacttcaagattcctacctgttgcccatctcggaggacaaggtcatggagggaaaaggccaaagcccctttgaccccgctcacaagcatacggctgtcttggtggatgggatgctctattctggtactatgaacaacttcctgggcagtgagcccatcctgatgcgcacactgggatcccagcctgtcctcaagaccgacaacttcctccgctggctgcatcatgacgcctcctttgtggcagccatcccttcgacccaggtcgtctacttcttcttcgaggagacagccagcgagtttgacttctttgagaggctccacacatcgcgggtggctagagtctgcaagaatgacgtgggcggcgaaaagctgctgcagaagaagtggaccaccttcctgaaggcccagctgctctgcacccagccggggcagctgcccttcaacgtcatccgccacgcggtcctgctccccgccgattctcccacagctccccacatctacgcagtcttcacctcccagtggcaggttggcgggaccaggagctctgcggtttgtgccttctctctcttggacattgaacgtgtctttaaggggaaatacaaagagttgaacaaagaaacttcacgctggactacttataggggccctgagaccaacccccggccaggcagttgctcagtgggcccctcctctgataaggccctgaccttcatgaaggaccatttcctgatggatgagcaagtggtggggacgcccctgctggtgaaatctggcgtggagtatacacggcttgcagtggagacagcccagggccttgatgggcacagccatcttgtcatgtacctgggaaccaccacagggtcgctccacaaggctgtggtaagtggggacagcagtgctcatctggtggaagagattcagctgttccctgaccctgaacctgttcgcaacctgcagctggcccccacccagggtgcagtgtttgtaggcttctcaggaggtgtctggagggtgccccgagccaactgtagtgtctatgagagctgtgtggactgtgtccttgcccgggacccccactgtgcctgggaccctgagtcccgaacctgttgcctcctgtctgcccccaacctgaactcctggaagcaggacatggagcgggggaacccagagtgggcatgtgccagtggccccatgagcaggagccttcggcctcagagccgcccgcaaatcattaaagaagtcctggctgtccccaactccatcctggagctcccctgcccccacctgtcagccttggcctcttattattggagtcatggcccagcagcagtcccagaagcctcttccactgtctacaatggctccctcttgctgatagtgcaggatggagttgggggtctctaccagtgctgggcaactgagaatggcttttcataccctgtgatctcctactgggtggacagccaggaccagaccctggccctggatcctgaactggcaggcatcccccgggagcatgtgaaggtcccgttgaccagggtcagtggtggggccgccctggctgcccagcagtcctactggccccactttgtcactgtcactgtcctctttgccttagtgctttcaggagccctcatcatcctcgtggcctccccattgagagcactccgggctcggggcaaggttcagggctgtgagaccctgcgccctggggagaaggccccgttaagcagagagcaacacctccagtctcccaaggaatgcaggacctctgccagtgatgtggacgctgacaacaactgcctaggcactgaggtagcttaaactctaggcacaggccggggctgcggtgcaggcacctggccatgctggctgggcggcccaagcacagccctgactaggatgacagcagcacaaaagaccacctttctcccctgagaggagcttctgctactctgcatcactgatgacactcagcagggtgatgcacagcagtctgcctcccctatgggactcccttctaccaagcacatgagctctctaacagggtgggggctacccccagacctgctcctacactgatattgaagaacctggagaggatccttcagttctggccattccagggaccctccagaaacacagtgtttcaagagaccctaaaaaacctgcctgtcccaggaccctatggtaatgaacaccaaacatctaaacaatcatatgctaacatgccactcctggaaactccactctgaagctgccgctttggacaccaacactcccttctcccagggtcatgcagggatctgctccctcctgcttcccttaccagtcgtgcaccgctgactcccaggaagtctttcctgaagtctgaccacctttcttcttgcttcagttggggcagactctgatcccttctgccctggcagaatggcaggggtaatctgagccttcttcactcctttaccctagctgaccccttcacctctccccctcccttttcctttgttttgggattcagaaaactgcttgtcagagactgtttattttttattaaaaatataaggctta

SEQ ID NO: 179731 - DNA, 3135 bp, Homo sapiens
  Payload ID: 15423
  Gene Symbol: SEMA4A
  Gene Name: sema domain, immunoglobulin domain (Ig), transmembrane domain (TM) and short cytoplasmic domain, (semaphorin) 4A
  ENST ID: ENST00000368286
  CDS Start-End: 218-2389
agtgctggctttggcatgatgggcacctggagggccgcactcccgttccagccaggctgagccttctgtcccctgcctctggggcctgggaaccccccttcttctttctcctgaatggcacccccgccctagaatccagacaccgagtttcccactgtggctggttcaagggtatgtgagagctccctggtgacagtctgtggctgagcatgggcccatgcccagggtcagatactatgcaggggatgaacgtagggcacttagcttcttccaccagaagggcctccaggattttgacactctgctcctgagtggtgatggaaatactctctacgtgggggctcgagaagccattctggccttggatatccaggatccaggggtccccaggctaaagaacatgataccgtggccagccagtgacagaaaaaagagtgaatgtgcctttaagaagaagagcaatgagacacagtgtttcaacttcatccgtgtcctggtttcttacaatgtcacccatctctacacctgcggcaccttcgccttcagccctgcttgtaccttcattgaacttcaagattcctacctgttgcccatctcggaggacaaggtcatggagggaaaaggccaaagcccctttgaccccgctcacaagcatacggctgtcttggtggatgggatgctctattctggtactatgaacaacttcctgggcagtgagcccatcctgatgcgcacactgggatcccagcctgtcctcaagaccgacaacttcctccgctggctgcatcatgacgcctcctttgtggcagccatcccttcgacccaggtcgtctacttcttcttcgaggagacagccagcgagtttgacttctttgagaggctccacacatcgcgggtggctagagtctgcaagaatgacgtgggcggcgaaaagctgctgcagaagaagtggaccaccttcctgaaggcccagctgctctgcacccagccggggcagctgcccttcaacgtcatccgccacgcggtcctgctccccgccgattctcccacagctccccacatctacgcagtcttcacctcccagtggcaggttggcgggaccaggagctctgcggtttgtgccttctctctcttggacattgaacgtgtctttaaggggaaatacaaagagttgaacaaagaaacttcacgctggactacttataggggccctgagaccaacccccggccaggcagttgctcagtgggcccctcctctgataaggccctgaccttcatgaaggaccatttcctgatggatgagcaagtggtggggacgcccctgctggtgaaatctggcgtggagtatacacggcttgcagtggagacagcccagggccttgatgggcacagccatcttgtcatgtacctgggaaccaccacagggtcgctccacaaggctgtggtaagtggggacagcagtgctcatctggtggaagagattcagctgttccctgaccctgaacctgttcgcaacctgcagctggcccccacccagggtgcagtgtttgtaggcttctcaggaggtgtctggagggtgccccgagccaactgtagtgtctatgagagctgtgtggactgtgtccttgcccgggacccccactgtgcctgggaccctgagtcccgaacctgttgcctcctgtctgcccccaacctgaactcctggaagcaggacatggagcgggggaacccagagtgggcatgtgccagtggccccatgagcaggagccttcggcctcagagccgcccgcaaatcattaaagaagtcctggctgtccccaactccatcctggagctcccctgcccccacctgtcagccttggcctcttattattggagtcatggcccagcagcagtcccagaagcctcttccactgtctacaatggctccctcttgctgatagtgcaggatggagttgggggtctctaccagtgctgggcaactgagaatggcttttcataccctgtgatctcctactgggtggacagccaggaccagaccctggccctggatcctgaactggcaggcatcccccgggagcatgtgaaggtcccgttgaccagggtcagtggtggggccgccctggctgcccagcagtcctactggccccactttgtcactgtcactgtcctctttgccttagtgctttcaggagccctcatcatcctcgtggcctccccattgagagcactccgggctcggggcaaggttcagggctgtgagaccctgcgccctggggagaaggccccgttaagcagagagcaacacctccagtctcccaaggaatgcaggacctctgccagtgatgtggacgctgacaacaactgcctaggcactgaggtagcttaaactctaggcacaggccggggctgcggtgcaggcacctggccatgctggctgggcggcccaagcacagccctgactaggatgacagcagcacaaaagaccacctttctcccctgagaggagcttctgctactctgcatcactgatgacactcagcagggtgatgcacagcagtctgcctcccctatgggactcccttctaccaagcacatgagctctctaacagggtgggggctacccccagacctgctcctacactgatattgaagaacctggagaggatccttcagttctggccattccagggaccctccagaaacacagtgtttcaagagaccctaaaaaacctgcctgtcccaggaccctatggtaatgaacaccaaacatctaaacaatcatatgctaacatgccactcctggaaactccactctgaagctgccgctttggacaccaacactcccttctcccagggtcatgcagggatctgctccctcctgcttcccttaccagtcgtgcaccgctgactcccaggaagtctttcctgaagtctgaccacctttcttcttgcttcagttggggcagactctgatcccttctgccctggcagaatggcaggggtaatctgagccttcttcactcctttaccctagctgaccccttcacctctccccctcccttttcctttgttttgggattcagaaaactgcttgtcagagactgtttattttttattaaaaatataaggctt

SEQ ID NO: 179732 - DNA, 897 bp, Homo sapiens
  Payload ID: 15423
  Gene Symbol: SEMA4A
  Gene Name: sema domain, immunoglobulin domain (Ig), transmembrane domain (TM) and short cytoplasmic domain, (semaphorin) 4A
  ENST ID: ENST00000438830
  CDS Start-End: 188-897
gcacctggagggccgcactcccgttccagccaggctgagccttctgtcccctgcctctggggcctgggaaccccccttcttctttctcctgaatggcacccccgccctagaatccagacaccgagtttcccactgtggctggttcaagggtatgtgagagctccctggtgacagtctgtggctgagcatggccctcccagccctgggcctggacccctggagcctcctgggccttttcctcttccaactgcttcagctgctgctgccgacgacgaccgcggggggaggcgggcaggggcccatgcccagggtcagatactatgcaggggatgaacgtagggcacttagcttcttccaccagaagggcctccaggattttgacactctgctcctgagtggtgatggaaatactctctacgtgggggctcgagaagccattctggccttggatatccaggatccaggggtccccaggctaaagaacatgataccgtggccagccagtgacagaaaaaagagtgaatgtgcctttaagaagaagagcaatgaggaacttcaagattcctacctgttgcccatctcggaggacaaggtcatggagggaaaaggccaaagcccctttgaccccgctcacaagcatacggctgtcttggtggatgggatgctctattctggtactatgaacaacttcctgggcagtgagcccatcctgatgcgcacactgggatcccagcctgtcctcaagaccgacaacttcctccgctggctgcatcatgacgcctcctttgtggcagccatcccttcgacccaggtcgtctacttcttcttcgaggagacagccagcgagtttgacttctttgagaggctccacacatcgcgggtggctagagtctgcaa

SEQ ID NO: 179733 - DNA, 975 bp, Homo sapiens
  Payload ID: 15423
  Gene Symbol: SEMA4A
  Gene Name: sema domain, immunoglobulin domain (Ig), transmembrane domain (TM) and short cytoplasmic domain, (semaphorin) 4A
  ENST ID: ENST00000414683
  CDS Start-End: 315-975
cccctgaacccaggtggtgacatgtgcacggtggtgcctgctgaaggtgggcaagggagctgagcagggaccgggggctactgtacctccttttcacctcctcccgcatctggagcccctcctcctccacatgtgcgaatccaggagccacagaaggggatgaacgtagggcacttagcttcttccaccagaagggcctccaggattttgacactctgctcctgagtggtgatggaaatactctctacgtgggggctcgagaagccattctggccttggatatccaggatccaggggtccccaggctaaagaacatgataccgtggccagccagtgacagaaaaaagagtgaatgtgcctttaagaagaagagcaatgagacacagtgtttcaacttcatccgtgtcctggtttcttacaatgtcacccatctctacacctgcggcaccttcgccttcagccctgcttgtaccttcattgaacttcaagattcctacctgttgcccatctcggaggacaaggtcatggagggaaaaggccaaagcccctttgaccccgctcacaagcatacggctgtcttggtggatgggatgctctattctggtactatgaacaacttcctgggcagtgagcccatcctgatgcgcacactgggatcccagcctgtcctcaagaccgacaacttcctccgctggctgcatcatgacgcctcctttgtggcagccatcccttcgacccaggtcgtctacttcttcttcgaggagacagccagcgagtttgacttctttgagaggctccacacatcgcgggtggctagagtctgcaagaatgacgtgggcggcgaaaagctgctgcagaagaagtggaccaccttcctgaaggcccagctgctctgcacccagccggggcagctgcccttcaacgtcatccgccacgcggtcctgctccccgccgattctcccacagctccccaca

SEQ ID NO: 179734 - DNA, 1057 bp, Homo sapiens
  Payload ID: 15423
  Gene Symbol: SEMA4A
  Gene Name: sema domain, immunoglobulin domain (Ig), transmembrane domain (TM) and short cytoplasmic domain, (semaphorin) 4A
  ENST ID: ENST00000435124
  CDS Start-End: 95-1057
gtccggtgcagactctgctggaagtcttggacgcctgggttagggtctccacttctgggctggggagctccctggtgacagtctgtggctgagcatggccctcccagccctgggcctggacccctggagcctcctgggccttttcctcttccaactgcttcagctgctgctgccgacgacgaccgcggggggaggcgggcaggggcccatgcccagggtcagatactatgcaggggatgaacgtagggcacttagcttcttccaccagaagggcctccaggattttgacactctgctcctgagtggtgatggaaatactctctacgtgggggctcgagaagccattctggccttggatatccaggatccaggggtccccaggctaaagaacatgataccgtggccagccagtgacagaaaaaagagtgaatgtgcctttaagaagaagagcaatgagacacagtgtttcaacttcatccgtgtcctggtttcttacaatgtcacccatctctacacctgcggcaccttcgccttcagccctgcttgtaccttcattgaacttcaagattcctacctgttgcccatctcggaggacaaggtcatggagggaaaaggccaaagcccctttgaccccgctcacaagcatacggctgtcttggtggatgggatgctctattctggtactatgaacaacttcctgggcagtgagcccatcctgatgcgcacactgggatcccagcctgtcctcaagaccgacaacttcctccgctggctgcatcatgacgcctcctttgtggcagccatcccttcgacccaggtcgtctacttcttcttcgaggagacagccagcgagtttgacttctttgagaggctccacacatcgcgggtggctagagtctgcaagaatgacgtgggcggcgaaaagctgctgcagaagaagtggaccaccttcctgaaggcccagctgctctgcacccagccggggcagctgcccttcaacgtcatccgccacgcggtcctgctccccgccgattctcccacagctccccacatctac

SEQ ID NO: 179735 - DNA, 531 bp, Homo sapiens
  Payload ID: 15423
  Gene Symbol: SEMA4A
  Gene Name: sema domain, immunoglobulin domain (Ig), transmembrane domain (TM) and short cytoplasmic domain, (semaphorin) 4A
  ENST ID: ENST00000633494
  CDS Start-End: 232-531
agactctgctggaagtcttggacgcctgggttagggtctccacttctgggctggggcaagagaagaaaccactgctaggctggttatactggctgtgacatgatggagaggcaggggaatcgctgaaatgacctagaagggcctcttaaactttctggttggaccgagcagaggagggagagagaggtgtgtctcttgtgagagctccctggtgacagtctgtggctgagcatggccctcccagccctgggcctggacccctggagcctcctgggccttttcctcttccaactgcttcagctgctgctgccgacgacgaccgcggggggaggcgggcaggggcccatgcccagggtcagatactatgcaggggatgaacgtagggcacttagcttcttccaccagaagggcctccaggattttgacactctgctcctgagtggtgatggaaatactctctacgtgggggctcgagaagccattctggccttggatatccaggatccaggggtccccaggctaaagaacatg

SEQ ID NO: 179736 - DNA, 3781 bp, Homo sapiens
  Payload ID: 15424
  Gene Symbol: SEMA4B
  Gene Name: sema domain, immunoglobulin domain (Ig), transmembrane domain (TM) and short cytoplasmic domain, (semaphorin) 4B
  ENST ID: ENST00000332496
  CDS Start-End: 241-2754
ctccgggtccccaggggctgcgccgggccggcctggcaagggggacgagtcagtggacactccaggaagagcggccccgcggggggcgatgaccgtgcgctgaccctgactcactccaggtccggaggcgggggcccccggggcgactcgggggcggaccgcggggcggagctgccgcccgtgagtccggccgagccacctgagcccgagccgcgggacaccgtcgctcctgctctccgaatgctgcgcaccgcgatgggcctgaggagctggctcgccgccccatggggcgcgctgccgcctcggccaccgctgctgctgctcctgctgctgctgctcctgctgcagccgccgcctccgacctgggcgctcagcccccggatcagcctgcctctgggctctgaagagcggccattcctcagattcgaagctgaacacatctccaactacacagcccttctgctgagcagggatggcaggaccctgtacgtgggtgctcgagaggccctctttgcactcagtagcaacctcagcttcctgccaggcggggagtaccaggagctgctttggggtgcagacgcagagaagaaacagcagtgcagcttcaagggcaaggacccacagcgcgactgtcaaaactacatcaagatcctcctgccgctcagcggcagtcacctgttcacctgtggcacagcagccttcagccccatgtgtacctacatcaacatggagaacttcaccctggcaagggacgagaaggggaatgtcctcctggaagatggcaagggccgttgtcccttcgacccgaatttcaagtccactgccctggtggttgatggcgagctctacactggaacagtcagcagcttccaagggaatgacccggccatctcgcggagccaaagccttcgccccaccaagaccgagagctccctcaactggctgcaagacccagcttttgtggcctcagcctacattcctgagagcctgggcagcttgcaaggcgatgatgacaagatctactttttcttcagcgagactggccaggaatttgagttctttgagaacaccattgtgtcccgcattgcccgcatctgcaagggcgatgagggtggagagcgggtgctacagcagcgctggacctccttcctcaaggcccagctgctgtgctcacggcccgacgatggcttccccttcaacgtgctgcaggatgtcttcacgctgagccccagcccccaggactggcgtgacacccttttctatggggtcttcacttcccagtggcacaggggaactacagaaggctctgccgtctgtgtcttcacaatgaaggatgtgcagagagtcttcagcggcctctacaaggaggtgaaccgtgagacacagcagtggtacaccgtgacccacccggtgcccacaccccggcctggagcgtgcatcaccaacagtgcccgggaaaggaagatcaactcatccctgcagctcccagaccgcgtgctgaacttcctcaaggaccacttcctgatggacgggcaggtccgaagccgcatgctgctgctgcagccccaggctcgctaccagcgcgtggctgtacaccgcgtccctggcctgcaccacacctacgatgtcctcttcctgggcactggtgacggccggctccacaaggcagtgagcgtgggcccccgggtgcacatcattgaggagctgcagatcttctcatcgggacagcccgtgcagaatctgctcctggacacccacagggggctgctgtatgcggcctcacactcgggcgtagtccaggtgcccatggccaactgcagcctgtacaggagctgtggggactgcctcctcgcccgggacccctactgtgcttggagcggctccagctgcaagcacgtcagcctctaccagcctcagctggccaccaggccgtggatccaggacatcgagggagccagcgccaaggacctttgcagcgcgtcttcggttgtgtccccgtcttttgtaccaacaggggagaagccatgtgagcaagtccagttccagcccaacacagtgaacactttggcctgcccgctcctctccaacctggcgacccgactctggctacgcaacggggcccccgtcaatgcctcggcctcctgccacgtgctacccactggggacctgctgctggtgggcacccaacagctgggggagttccagtgctggtcactagaggagggcttccagcagctggtagccagctactgcccagaggtggtggaggacggggtggcagaccaaacagatgagggtggcagtgtacccgtcattatcagcacatcgcgtgtgagtgcaccagctggtggcaaggccagctggggtgcagacaggtcctactggaaggagttcctggtgatgtgcacgctctttgtgctggccgtgctgctcccagttttattcttgctctaccggcaccggaacagcatgaaagtcttcctgaagcagggggaatgtgccagcgtgcaccccaagacctgccctgtggtgctgccccctgagacccgcccactcaacggcctagggccccctagcaccccgctcgatcaccgagggtaccagtccctgtcagacagccccccggggtcccgagtcttcactgagtcagagaagaggccactcagcatccaagacagcttcgtggaggtatccccagtgtgcccccggccccgggtccgccttggctcggagatccgtgactctgtggtgtgagagctgacttccagaggacgctgccctggcttcaggggctgtgaatgctcggagagggtcaactggacctcccctccgctctgctcttcgtggaacacgaccgtggtgcccggcccttgggagccttggggccagctggcctgctgctctccagtcaagtagcgaagctcctaccacccagacacccaaacagccgtggccccagaggtcctggccaaatatgggggcctgcctaggttggtggaacagtgctccttatgtaaactgagccctttgtttaaaaaacaattccaaatgtgaaactagaatgagagggaagagatagcatggcatgcagcacacacggctgctccagttcatggcctcccaggggtgctggggatgcatccaaagtggttgtctgagacagagttggaaaccctcaccaactggcctcttcaccttccacattatcccgctgccaccggctgccctgtctcactgcagattcaggaccagcttgggctgcgtgcgttctgccttgccagtcagccgaggatgtagttgttgctgccgtcgtcccaccacctcagggaccagagggctaggttggcactgcggccctcaccaggtcctgggctcggacccaactcctggacctttccagcctgtatcaggctgtggccacacgagaggacagcgcgagctcaggagagatttcgtgacaatgtacgcctttccctcagaattcagggaagagactgtcgcctgccttcctccgttgttgcgtgagaacccgtgtgccccttcccaccatatccaccctcgctccatctttgaactcaaacacgaggaactaactgcaccctggtcctctccccagtccccagttcaccctccatccctcaccttcctccactctaagggatatcaacactgcccagcacaggggccctgaatttatgtggtttttatacattttttaataagatgcactttatgtcattttttaataaagtctgaagaattactgtttaatcctggctct

SEQ ID NO: 179737 - DNA, 3807 bp, Homo sapiens
  Payload ID: 15424
  Gene Symbol: SEMA4B
  Gene Name: sema domain, immunoglobulin domain (Ig), transmembrane domain (TM) and short cytoplasmic domain, (semaphorin) 4B
  ENST ID: ENST00000411539
  CDS Start-End: 261-2774
cgccctccgccgcttgcgggtgagctctgcccaagccgaggctgcggggccggcgccggcgggaggactgcggtgccccgcggaggggctgagtttgccagggcccacttgaccctgtttcccacctcccgccccccaggtccggaggcgggggcccccggggcgactcgggggcggaccgcggggcggagctgccgcccgtgagtccggccgagccacctgagcccgagccgcgggacaccgtcgctcctgctctccgaatgctgcgcaccgcgatgggcctgaggagctggctcgccgccccatggggcgcgctgccgcctcggccaccgctgctgctgctcctgctgctgctgctcctgctgcagccgccgcctccgacctgggcgctcagcccccggatcagcctgcctctgggctctgaagagcggccattcctcagattcgaagctgaacacatctccaactacacagcccttctgctgagcagggatggcaggaccctgtacgtgggtgctcgagaggccctctttgcactcagtagcaacctcagcttcctgccaggcggggagtaccaggagctgctttggggtgcagacgcagagaagaaacagcagtgcagcttcaagggcaaggacccacagcgcgactgtcaaaactacatcaagatcctcctgccgctcagcggcagtcacctgttcacctgtggcacagcagccttcagccccatgtgtacctacatcaacatggagaacttcaccctggcaagggacgagaaggggaatgtcctcctggaagatggcaagggccgttgtcccttcgacccgaatttcaagtccactgccctggtggttgatggcgagctctacactggaacagtcagcagcttccaagggaatgacccggccatctcgcggagccaaagccttcgccccaccaagaccgagagctccctcaactggctgcaagacccagcttttgtggcctcagcctacattcctgagagcctgggcagcttgcaaggcgatgatgacaagatctactttttcttcagcgagactggccaggaatttgagttctttgagaacaccattgtgtcccgcattgcccgcatctgcaagggcgatgagggtggagagcgggtgctacagcagcgctggacctccttcctcaaggcccagctgctgtgctcacggcccgacgatggcttccccttcaacgtgctgcaggatgtcttcacgctgagccccagcccccaggactggcgtgacacccttttctatggggtcttcacttcccagtggcacaggggaactacagaaggctctgccgtctgtgtcttcacaatgaaggatgtgcagagagtcttcagcggcctctacaaggaggtgaaccgtgagacacagcagtggtacaccgtgacccacccggtgcccacaccccggcctggagcgtgcatcaccaacagtgcccgggaaaggaagatcaactcatccctgcagctcccagaccgcgtgctgaacttcctcaaggaccacttcctgatggacgggcaggtccgaagccgcatgctgctgctgcagccccaggctcgctaccagcgcgtggctgtacaccgcgtccctggcctgcaccacacctacgatgtcctcttcctgggcactggtgacggccggctccacaaggcagtgagcgtgggcccccgggtgcacatcattgaggagctgcagatcttctcatcgggacagcccgtgcagaatctgctcctggacacccacagggggctgctgtatgcggcctcacactcgggcgtagtccaggtgcccatggccaactgcagcctgtacaggagctgtggggactgcctcctcgcccgggacccctactgtgcttggagcggctccagctgcaagcacgtcagcctctaccagcctcagctggccaccaggccgtggatccaggacatcgagggagccagcgccaaggacctttgcagcgcgtcttcggttgtgtccccgtcttttgtaccaacaggggagaagccatgtgagcaagtccagttccagcccaacacagtgaacactttggcctgcccgctcctctccaacctggcgacccgactctggctacgcaacggggcccccgtcaatgcctcggcctcctgccacgtgctacccactggggacctgctgctggtgggcacccaacagctgggggagttccagtgctggtcactagaggagggcttccagcagctggtagccagctactgcccagaggtggtggaggacggggtggcagaccaaacagatgagggtggcagtgtacccgtcattatcagcacatcgcgtgtgagtgcaccagctggtggcaaggccagctggggtgcagacaggtcctactggaaggagttcctggtgatgtgcacgctctttgtgctggccgtgctgctcccagttttattcttgctctaccggcaccggaacagcatgaaagtcttcctgaagcagggggaatgtgccagcgtgcaccccaagacctgccctgtggtgctgccccctgagacccgcccactcaacggcctagggccccctagcaccccgctcgatcaccgagggtaccagtccctgtcagacagccccccggggtcccgagtcttcactgagtcagagaagaggccactcagcatccaagacagcttcgtggaggtatccccagtgtgcccccggccccgggtccgccttggctcggagatccgtgactctgtggtgtgagagctgacttccagaggacgctgccctggcttcaggggctgtgaatgctcggagagggtcaactggacctcccctccgctctgctcttcgtggaacacgaccgtggtgcccggcccttgggagccttggggccagctggcctgctgctctccagtcaagtagcgaagctcctaccacccagacacccaaacagccgtggccccagaggtcctggccaaatatgggggcctgcctaggttggtggaacagtgctccttatgtaaactgagccctttgtttaaaaaacaattccaaatgtgaaactagaatgagagggaagagatagcatggcatgcagcacacacggctgctccagttcatggcctcccaggggtgctggggatgcatccaaagtggttgtctgagacagagttggaaaccctcaccaactggcctcttcaccttccacattatcccgctgccaccggctgccctgtctcactgcagattcaggaccagcttgggctgcgtgcgttctgccttgccagtcagccgaggatgtagttgttgctgccgtcgtcccaccacctcagggaccagagggctaggttggcactgcggccctcaccaggtcctgggctcggacccaactcctggacctttccagcctgtatcaggctgtggccacacgagaggacagcgcgagctcaggagagatttcgtgacaatgtacgcctttccctcagaattcagggaagagactgtcgcctgccttcctccgttgttgcgtgagaacccgtgtgccccttcccaccatatccaccctcgctccatctttgaactcaaacacgaggaactaactgcaccctggtcctctccccagtccccagttcaccctccatccctcaccttcctccactctaagggatatcaacactgcccagcacaggggccctgaatttatgtggtttttatacattttttaataagatgcactttatgtcattttttaataaagtctgaagaattactgtttaatcctggctcttcctct

SEQ ID NO: 179738 - DNA, 541 bp, Homo sapiens
  Payload ID: 15424
  Gene Symbol: SEMA4B
  Gene Name: sema domain, immunoglobulin domain (Ig), transmembrane domain (TM) and short cytoplasmic domain, (semaphorin) 4B
  ENST ID: ENST00000559300
  CDS Start-End: 240-395
gcatttccggggacgccgcgccggactgaggctgtgcgcccgagactccgggtccccaggggctgcgccgggccggcctggcaagggggacgagtcagtggacactccaggaagagcggccccgcggggggcgatgaccgtgcgctgaccctgactcactccaggctctgaagagcggccattcctcagattcgaagctgaacacatctccaactacacagcccttctgctgagcagggatggcaggaccctgtacgtgggtgctcgagaggccctctttgcactcagtagcaacctcagcttcctgccaggcggggagtaccaggagctgctttggggtgcagacgcagagaagaaacagcagtgcagcttcaagggcaaggacccacaggtgagcccacacctggaagggagctgagctgcaggagggatggagggtggtggacttccatccaggccagaggcgggaggtgggagcagatacagccagcgcgactgtcaaaactacatcaagatcctcctgccgctcagcggcagtcac

SEQ ID NO: 179739 - DNA, 559 bp, Homo sapiens
  Payload ID: 15424
  Gene Symbol: SEMA4B
  Gene Name: sema domain, immunoglobulin domain (Ig), transmembrane domain (TM) and short cytoplasmic domain, (semaphorin) 4B
  ENST ID: ENST00000559322
  CDS Start-End: 219-559
gttaaacggcatcttccttggatggtctcaggatcacagccttctctaaagaagtattcctctccaaagagctgcaggccttcaacagccttattaggtccggaggcgggggcccccggggcgactcgggggcggaccgcggggcggagctgccgcccgtgagtccggccgagccacctgagcccgagccgcgggacaccgtcgctcctgctctccgaatgctgcgcaccgcgatgggcctgaggagctggctcgccgccccatggggcgcgctgccgcctcggccaccgctgctgctgctcctgctgctgctgctcctgctgcagccgccgcctccgacctgggcgctcagcccccggatcagcctgcctctgggctctgaagagcggccattcctcagattcgaagctgaacacatctccaactacacagcccttctgctgagcagggatggcaggaccctgtacgtgggtgctcgagaggccctctttgcactcagtagcaacctcagcttcctgccaggcggggagtaccaggagctgctttggggtgcagacgc

SEQ ID NO: 179740 - DNA, 2804 bp, Homo sapiens
  Payload ID: 15424
  Gene Symbol: SEMA4B
  Gene Name: sema domain, immunoglobulin domain (Ig), transmembrane domain (TM) and short cytoplasmic domain, (semaphorin) 4B
  ENST ID: ENST00000560089
  CDS Start-End: 159-350
gcccacttgaccctgtttcccacctcccgccccccaggtccggaggcgggggcccccggggcgactcgggggcggaccgcggggcggagctgccgcccgtgagtccggccgagccacctgagcccgagccgcgggacaccgtcgctcctgctctccgaatgctgcgcaccgcgatgggcctgaggagctggctcgccgccccatggggcgcgctgccgcctcggccaccgctgctgctgctcctgctgctgctgctcctgctgcagccgccgcctccgacctgggcgctcagcccccggatcagcctgcctctgggctgggggtatgtaaaaacactccacaggctctgaagagcggccattcctcagattcgaagctgaacacatctccaactacacagcccttctgctgagcagggatggcaggaccctgtacgtgggtgctcgagaggccctctttgcactcagtagcaacctcagcttcctgccaggcggggagtaccaggagctgctttggggtgcagacgcagagaagaaacagcagtgcagcttcaagggcaaggacccacagcgcgactgtcaaaactacatcaagatcctcctgccgctcagcggcagtcacctgttcacctgtggcacagcagccttcagccccatgtgtacctacatcaacatggagaacttcaccctggcaagggacgagaaggggaatgtcctcctggaagatggcaagggccgttgtcccttcgacccgaatttcaagtccactgccctggtggttgatggcgagctctacactggaacagtcagcagcttccaagggaatgacccggccatctcgcggagccaaagccttcgccccaccaagaccgagagctccctcaactggctgcaagacccagcttttgtggcctcagcctacattcctgagagcctgggcagcttgcaaggcgatgatgacaagatctactttttcttcagcgagactggccaggaatttgagttctttgagaacaccattgtgtcccgcattgcccgcatctgcaagggcgatgagggtggagagcgggtgctacagcagcgctggacctccttcctcaaggcccagctgctgtgctcacggcccgacgatggcttccccttcaacgtgctgcaggatgtcttcacgctgagccccagcccccaggactggcgtgacacccttttctatggggtcttcacttcccagtggcacaggggaactacagaaggctctgccgtctgtgtcttcacaatgaaggatgtgcagagagtcttcagcggcctctacaaggaggtgaaccgtgagacacagcagtggtacaccgtgacccacccggtgcccacaccccggcctggagcgtgcatcaccaacagtgcccgggaaaggaagatcaactcatccctgcagctcccagaccgcgtgctgaacttcctcaaggaccacttcctgatggacgggcaggtccgaagccgcatgctgctgctgcagccccaggctcgctaccagcgcgtggctgtacaccgcgtccctggcctgcaccacacctacgatgtcctcttcctgggcactggtgacggccggctccacaaggcagtgagcgtgggcccccgggtgcacatcattgaggagctgcagatcttctcatcgggacagcccgtgcagaatctgctcctggacacccacagggggctgctgtatgcggcctcacactcgggcgtagtccaggtgcccatggccaactgcagcctgtacaggagctgtggggactgcctcctcgcccgggacccctactgtgcttggagcggctccagctgcaagcacgtcagcctctaccagcctcagctggccaccaggccgtggatccaggacatcgagggagccagcgccaaggacctttgcagcgcgtcttcggttgtgtccccgtcttttgtaccaacaggggagaagccatgtgagcaagtccagttccagcccaacacagtgaacactttggcctgcccgctcctctccaacctggcgacccgactctggctacgcaacggggcccccgtcaatgcctcggcctcctgccacgtgctacccactggggacctgctgctggtgggcacccaacagctgggggagttccagtgctggtcactagaggagggcttccagcagctggtagccagctactgcccagaggtggtggaggacggggtggcagaccaaacagatgagggtggcagtgtacccgtcattatcagcacatcgcgtgtgagtgcaccagctggtggcaaggccagctggggtgcagacaggtcctactggaaggagttcctggtgatgtgcacgctctttgtgctggccgtgctgctcccagttttattcttgctctaccggcaccggaacagcatgaaagtcttcctgaagcagggggaatgtgccagcgtgcaccccaagacctgccctgtggtgctgccccctgagacccgcccactcaacggcctagggccccctagcaccccgctcgatcaccgagggtaccagtccctgtcagacagccccccggggtcccgagtcttcactgagtcagagaagaggccactcagcatccaagacagcttcgtggaggtatccccagtgtgcccccggccccgggtccgccttggctcggagatccgtgactctgtggtgtgagagctgacttccagaggacgctgccctggcttcaggggctgtgaatgctcggagagggtcaactggacctcccctccgctctgctcttcgtggaacacgaccgt

SEQ ID NO: 179741 - DNA, 585 bp, Homo sapiens
  Payload ID: 15424
  Gene Symbol: SEMA4B
  Gene Name: sema domain, immunoglobulin domain (Ig), transmembrane domain (TM) and short cytoplasmic domain, (semaphorin) 4B
  ENST ID: ENST00000559792
  CDS Start-End: 221-585
aacatgtactgatgctgcagctgagctgctgcccagcccctggggagaagacaccagcagcatgcccagccagggcagggtggagagctgcagctgcaggtccggaggcgggggcccccggggcgactcgggggcggaccgcggggcggagctgccgcccgtgagtccggccgagccacctgagcccgagccgcgggacaccgtcgctcctgctctccgaatgctgcgcaccgcgatgggcctgaggagctggctcgccgccccatggggcgcgctgccgcctcggccaccgctgctgctgctcctgctgctgctgctcctgctgcagccgccgcctccgacctgggcgctcagcccccggatcagcctgcctctgggctctgaagagcggccattcctcagattcgaagctgaacacatctccaactacacagcccttctgctgagcagggatggcaggaccctgtacgtgggtgctcgagaggccctctttgcactcagtagcaacctcagcttcctgccaggcggggagtaccaggagctgctttggggtgcagacgcagagaagaaacagcagtgcagctt

SEQ ID NO: 179742 - DNA, 533 bp, Homo sapiens
  Payload ID: 15424
  Gene Symbol: SEMA4B
  Gene Name: sema domain, immunoglobulin domain (Ig), transmembrane domain (TM) and short cytoplasmic domain, (semaphorin) 4B
  ENST ID: ENST00000558895
  CDS Start-End: 261-533
gagatccgtggcaacccgtctgtgcatccccgctacccacctaggcatacctgttcctgcccactctctgggatcagcatcagaaccaagagcaaggctctgtctgggagtaagagtggcagccaccaggtgacctgaggtccggaggcgggggcccccggggcgactcgggggcggaccgcggggcggagctgccgcccgtgagtccggccgagccacctgagcccgagccgcgggacaccgtcgctcctgctctccgaatgctgcgcaccgcgatgggcctgaggagctggctcgccgccccatggggcgcgctgccgcctcggccaccgctgctgctgctcctgctgctgctgctcctgctgcagccgccgcctccgacctgggcgctcagcccccggatcagcctgcctctgggctctgaagagcggccattcctcagattcgaagctgaacacatctccaactacacagcccttctgctgagcagggatggcaggaccctgtacgtgggtgctcgagaggccctcttt

SEQ ID NO: 179743 - DNA, 1697 bp, Homo sapiens
  Payload ID: 15424
  Gene Symbol: SEMA4B
  Gene Name: sema domain, immunoglobulin domain (Ig), transmembrane domain (TM) and short cytoplasmic domain, (semaphorin) 4B
  ENST ID: ENST00000559074
  CDS Start-End: 1-1384
tgcccgcatctgcaagggcgatgagggtggagagcgggtgctacagcagcgctggacctccttcctcaaggcccagctgctgtgctcacggcccgacgatggcttccccttcaacgtgctgcaggatgtcttcacgctgagccccagcccccaggactggcgtgacacccttttctatggggtcttcacttcccagtggcacaggggaactacagaaggctctgccgtctgtgtcttcacaatgaaggatgtgcagagagtcttcagcggcctctacaaggaggtgaaccgtgagacacagcagtggtacaccgtgacccacccggtgcccacaccccggcctggagcgtgcatcaccaacagtgcccgggaaaggaagatcaactcatccctgcagctcccagaccgcgtgctgaacttcctcaaggaccacttcctgatggacgggcaggtccgaagccgcatgctgctgctgcagccccaggctcgctaccagcgcgtggctgtacaccgcgtccctggcctgcaccacacctacgatgtcctcttcctgggcactggtgacggccggctccacaaggcagtgagcgtgggcccccgggtgcacatcattgaggagctgcagatcttctcatcgggacagcccgtgcagaatctgctcctggacacccacagggggctgctgtatgcggcctcacactcgggcgtagtccaggtgcccatggccaactgcagcctgtacaggagctgtggggactgcctcctcgcccgggacccctactgtgcttggagcggctccagctgcaagcacgtcagcctctaccagcctcagctggccaccaggccgtggatccaggacatcgagggagccagcgccaaggacctttgcagcgcgtcttcggttgtgtccccgtcttttgtaccaacaggggagaagccatgtgagcaagtccagttccagcccaacacagtgaacactttggcctgcccgctcctctccaacctggcgacccgactctggctacgcaacggggcccccgtcaatgcctcggcctcctgccacgtgctacccactggggacctgctgctggtgggcacccaacagctgggggagttccagtgctggtcactagaggagggcttccagcagctggtagccagctactgcccagaggtggtggaggacggggtggcagaccaaacagatgagggtggcagtgtacccgtcattatcagcacatcgcgtgtgagtgcaccagctggtggcaaggccagctggggtgcagacaggtcctgggctcggacccaactcctggacctttccagcctgtatcaggctgtggccacacgagaggacagcgcgagctcaggagagatttcgtgacaatgtacgcctttccctcagaattcagggaagagactgtcgcctgccttcctccgttgttgcgtgagaacccgtgtgccccttcccaccatatccaccctcgctccatctttgaactcaaacacgaggaactaactgcaccctggtcctctccccagtccccagttcaccctccatccctcaccttcctccactctaagggatatcaacactgcccagcacaggggccctgaatttatgtggtttttatacattttttaataagatgcactttatgtcattttttaataaagtctgaagaattactgtttaa

SEQ ID NO: 179744 - DNA, 758 bp, Homo sapiens
  Payload ID: 15424
  Gene Symbol: SEMA4B
  Gene Name: sema domain, immunoglobulin domain (Ig), transmembrane domain (TM) and short cytoplasmic domain, (semaphorin) 4B
  ENST ID: ENST00000559983
  CDS Start-End: 1-758
ccgaagccgcatgctgctgctgcagccccaggctcgctaccagcgcgtggctgtacaccgcgtccctggcctgcaccacacctacgatgtcctcttcctgggcactggtgacggccggctccacaaggcagtgagcgtgggcccccgggtgcacatcattgaggagctgcagatcttctcatcgggacagcccgtgcagaatctgctcctggacacccacagggtgagcaggccaacgaggaatcctggcagggggctgctgtatgcggcctcacactcgggcgtagtccaggtgcccatggccaactgcagcctgtacaggagctgtggggactgcctcctcgcccgggacccctactgtgcttggagcggctccagctgcaagcacgtcagcctctaccagcctcagctggccaccaggccgtggatccaggacatcgagggagccagcgccaaggacctttgcagcgcgtcttcggttgtgtccccgtcttttgtaccaacaggggagaagccatgtgagcaagtccagttccagcccaacacagtgaacactttggcctgcccgctcctctccaacctggcgacccgactctggctacgcaacggggcccccgtcaatgcctcggcctcctgccacgtgctacccactggggacctgctgctggtgggcacccaacagctgggggagttccagtgctggtcactagaggagggcttccagcagctggtagccagctactgcccagaggtggtgg

SEQ ID NO: 179745 - DNA, 582 bp, Homo sapiens
  Payload ID: 15424
  Gene Symbol: SEMA4B
  Gene Name: sema domain, immunoglobulin domain (Ig), transmembrane domain (TM) and short cytoplasmic domain, (semaphorin) 4B
  ENST ID: ENST00000561085
  CDS Start-End: 238-582
atttccggggacgccgcgccggactgaggctgtgcgcccgagactccgggtccccaggggctgcgccgggccggcctggcaagggggacgagtcagtggacactccaggaagagcggccccgcggggggcgatgaccgtgcgctgaccctgactcactccaggctctgaagagcggccattcctcagattcgaagctgaacacatctccaactacacagcccttctgctgagcagggatggcaggaccctgtacgtgggtgctcgagaggccctctttgcactcagtagcaacctcagcttcctgccaggcggggagtaccaggagctgctttggggtgcagacgcagagaagaaacagcagtgcagcttcaagggcaaggacccacagcgcgactgtcaaaactacatcaagatcctcctgccgctcagcggcagtcacctgttcacctgtggcacagcagccttcagccccatgtgtacctacatcaacatggagaacttcaccctggcaagggacgagaaggggaatgtcctcctggaagatggcaagggccgttgtcccttcgacccgaatttcaagt

SEQ ID NO: 179746 - DNA, 850 bp, Homo sapiens
  Payload ID: 15424
  Gene Symbol: SEMA4B
  Gene Name: sema domain, immunoglobulin domain (Ig), transmembrane domain (TM) and short cytoplasmic domain, (semaphorin) 4B
  ENST ID: ENST00000559247
  CDS Start-End: 1-362
tgcacatcattgaggagctgcagatcttctcatcgggacagcccgtgcagaatctgctcctggacacccacagggggctgctgtatgcggcctcacactcgggcgtagtccaggtgcccatggccaactgcagcctgtacaggagctgtggggactgcctcctcgcccgggacccctactgtgcttggagcggctccagctgcaagcacgtcagcctctaccagcctcagctggccaccagaattctctctggccctcaggccgtggatccaggacatcgagggagccagcgccaaggacctttgcagcgcgtcttcggttgtgtccccgtcttttgtaccaacaggggagaagccatgtgagcaagtccagttccagcccaacacagtgaacactttggcctgcccgctcctctccaacctggcgacccgactctggctacgcaacggggcccccgtcaatgcctcggcctcctgccacgtgctacccactggggacctgctgctggtgggcacccaacagctgggggagttccagtgctggtcactagaggagggcttccagcagctggtagccagctactgcccagaggtggtggaggacggggtggcagaccaaacagatgagggtggcagtgtacccgtcattatcagcacatcgcgtgtgagtgcaccagctggtggcaaggccagctggggtgcagacaggtcctactggaaggagttcctggtgatgtgcacgctctttgtgctggccgtgctgctcccagttttattcttgctctaccggcaccggaacagcatgaaagtcttcctgaagcagggggaatgtgccagcgtgcaccccaaga

SEQ ID NO: 179747 - DNA, 3545 bp, Homo sapiens
  Payload ID: 15425
  Gene Symbol: SEMA4C
  Gene Name: sema domain, immunoglobulin domain (Ig), transmembrane domain (TM) and short cytoplasmic domain, (semaphorin) 4C
  Uniprot ID: Q9C0C4
  ENST ID: ENST00000305476
  CDS Start-End: 134-2635
gcgagcgcgggcaggcggcgacgcgggggcaggggtggacggcggtcagagccgaacgcgagggcggcgcccggggactggagctgcgcgcaataggacagctggcctgaagctcagagccggggcgtgcgccatggccccacactgggctgtctggctgctggcagcaaggctgtggggcctgggcattggggctgaggtgtggtggaaccttgtgccgcgtaagacagtgtcttctggggagctggccacggtagtacggcggttctcccagaccggcatccaggacttcctgacactgacgctgacggagcccactgggcttctgtacgtgggcgcccgagaggccctgtttgccttcagcatggaggccctggagctgcaaggagcgatctcctgggaggcccccgtggagaagaagactgagtgtatccagaaagggaagaacaaccagaccgagtgcttcaacttcatccgcttcctgcagccctacaatgcctcccacctgtacgtctgtggcacctacgccttccagcccaagtgcacctacgtcaacatgctcaccttcactttggagcatggagagtttgaagatgggaagggcaagtgtccctatgacccagctaagggccatgctggccttcttgtggatggtgagctgtactcggccacactcaacaacttcctgggcacggaacccattatcctgcgtaacatggggccccaccactccatgaagacagagtacctggccttttggctcaacgaacctcactttgtaggctctgcctatgtacctgagagtgtgggcagcttcacgggggacgacgacaaggtctacttcttcttcagggagcgggcagtggagtccgactgctatgccgagcaggtggtggctcgtgtggcccgtgtctgcaagggcgatatggggggcgcacggaccctgcagaggaagtggaccacgttcctgaaggcgcggctggcatgctctgccccgaactggcagctctacttcaaccagctgcaggcgatgcacaccctgcaggacacctcctggcacaacaccaccttctttggggtttttcaagcacagtggggtgacatgtacctgtcggccatctgtgagtaccagttggaagagatccagcgggtgtttgagggcccctataaggagtaccatgaggaagcccagaagtgggaccgctacactgaccctgtacccagccctcggcctggctcgtgcattaacaactggcatcggcgccacggctacaccagctccctggagctacccgacaacatcctcaacttcgtcaagaagcacccgctgatggaggagcaggtggggcctcggtggagccgccccctgctcgtgaagaagggcaccaacttcacccacctggtggccgaccgggttacaggacttgatggagccacctatacagtgctgttcattggcacaggagacggctggctgctcaaggctgtgagcctggggccctgggttcacctgattgaggagctgcagctgtttgaccaggagcccatgagaagcctggtgctatctcagagcaagaagctgctctttgccggctcccgctctcagctggtgcagctgcccgtggccgactgcatgaagtatcgctcctgtgcagactgtgtcctcgcccgggacccctattgcgcctggagcgtcaacaccagccgctgtgtggccgtgggtggccactctggatctctactgatccagcatgtgatgacctcggacacttcaggcatctgcaacctccgtggcagtaagaaagtcaggcccactcccaaaaacatcacggtggtggcgggcacagacctggtgctgccctgccacctctcctccaacttggcccatgcccgctggacctttgggggccgggacctgcctgcggaacagcccgggtccttcctctacgatgcccggctccaggccctggttgtgatggctgcccagccccgccatgccggggcctaccactgcttttcagaggagcagggggcgcggctggctgctgaaggctaccttgtggctgtcgtggcaggcccgtcggtgaccttggaggcccgggcccccctggaaaacctggggctggtgtggctggcggtggtggccctgggggctgtgtgcctggtgctgctgctgctggtgctgtcattgcgccggcggctgcgggaagagctggagaaaggggccaaggctactgagaggaccttggtgtaccccctggagctgcccaaggagcccaccagtccccccttccggccctgtcctgaaccagatgagaaactttgggatcctgtcggttactactattcagatggctcccttaagatagtacctgggcatgcccggtgccagcccggtggggggcccccttcgccacctccaggcatcccaggccagcctctgccttctccaactcggcttcacctggggggtgggcggaactcaaatgccaatggttacgtgcgcttacaactaggaggggaggaccggggagggctcgggcaccccctgcctgagctcgcggatgaactgagacgcaaactgcagcaacgccagccactgcccgactccaaccccgaggagtcatcagtatgaggggaacccccaccgcgtcggcgggaagcgtgggaggtgtagctcctacttttgcacaggcaccagctacctcagggacatggcacgggcacctgctctgtctgggacagatactgcccagcacccacccggccatgaggacctgctctgctcagcacgggcactgccacttggtgtggctcaccagggcaccagcctcgcagaaggcatcttcctcctctctgtgaatcacagacacgcgggaccccagccgccaaaacttttcaaggcagaagtttcaagatgtgtgtttgtctgtatttgcacatgtgtttgtgtgtgtgtgtatgtgtgtgtgcacgcgcgtgcgcgcttgtggcatagccttcctgtttctgtcaagtcttcccttggcctgggtcctcctggtgagtcattggagctatgaaggggaaggggtcgtatcactttgtctctcctacccccactgccccgagtgtcgggcagcgatgtacatatggaggtggggtggacagggtgctgtgccccttcagagggagtgcagggcttggggtgggcctagtcctgctcctagggctgtgaatgttttcagggtggggggagggagatggagcctcctgtgtgtttggggggaagggtgggtggggcctcccacttggccccggggttcagtggtattttatacttgccttcttcctgtacagggctgggaaaggctgtgtgaggggagagaagggagagggtgggcctgctgtggacaatggcatactctcttccagccctaggaggagggctcctaacagtgtaacttattgtgtccccgcgtatttatttgttgtaaatatttgagtatttttatattgacaaataaaatggagaaaatgaaacgattgctctgatggggctaaga

SEQ ID NO: 179748 - DNA, 839 bp, Homo sapiens
  Payload ID: 15425
  Gene Symbol: SEMA4C
  Gene Name: sema domain, immunoglobulin domain (Ig), transmembrane domain (TM) and short cytoplasmic domain, (semaphorin) 4C
  ENST ID: ENST00000449330
  CDS Start-End: 421-839
tagggctcatgccacttgttaatcagccttccagtggcacgaggagtcattttctggggataggcgctttgcccaaagcgtgagaagcaggagcaggccctttctgttgattgaagggtcttcctggctggtgaagccctttccagacttgagggcagggaccagtggtcctcggggcctagaaagaggcagaattgggggccaaacggcagacccctctggtccgccccaaaagacgcctcggttcccccagcgtgcctcccctggatactcgcctcgacgtggctcgcccgcggtcgttcctgcaactgcacggtcgggagtccctctccccagcccagcccgcccggagtcttcgggggacacttcagaaagatcggcaggacagctggcctgaagctcagagccggggcgtgcgccatggccccacactgggctgtctggctgctggcagcaaggctgtggggcctgggcattggggctgaggtgtggtggaaccttgtgccgcgtaagacagtgtcttctggggagctggccacggtagtacggcggttctcccagaccggcatccaggacttcctgacactgacgctgacggagcccactgggcttctgtacgtgggcgcccgagaggccctgtttgccttcagcatggaggccctggagctgcaaggagcgatctcctgggaggcccccgtggagaagaagactgagtgtatccagaaagggaagaacaaccagaccgagtgcttcaacttcatccgcttcctgcagccctacaatgcctcccacctgtacgtctgtggcacctacgccttccagcccaagtgcacctacgt

SEQ ID NO: 179749 - DNA, 817 bp, Homo sapiens
  Payload ID: 15425
  Gene Symbol: SEMA4C
  Gene Name: sema domain, immunoglobulin domain (Ig), transmembrane domain (TM) and short cytoplasmic domain, (semaphorin) 4C
  ENST ID: ENST00000442264
  CDS Start-End: 214-817
ccctcttgggcaacaaaggggcctcgggaagctgggccccttcgctcccggcccttctcacactcctgccctgctgatgtggaacggggtttggggttctgcagggctattgtctgcgctggggaaggggacaggccgggaccgggacctccgctcgcagccggccgcaccagcaggacagctggcctgaagctcagagccggggcgtgcgccatggccccacactgggctgtctggctgctggcagcaaggctgtggggcctgggcattggggctgaggtgtggtggaaccttgtgccgcgtaagacagtgtcttctggggagctggccacggtagtacggcggttctcccagaccggcatccaggacttcctgacactgacgctgacggagcccactgggcttctgtacgtgggcgcccgagaggccctgtttgccttcagcatggaggccctggagctgcaaggagcgatctcctgggaggcccccgtggagaagaagactgagtgtatccagaaagggaagaacaaccagaccgagtgcttcaacttcatccgcttcctgcagccctacaatgcctcccacctgtacgtctgtggcacctacgccttccagcccaagtgcacctacgtcaacatgctcaccttcactttggagcatggagagtttgaagatgggaagggcaagtgtccctatgacccagctaagggccatgctggccttcttgtggatggtgagctgtactcggccacactcaacaacttcctgggcacggaacccattatcctgcgtaacatggggccccaccactccatga

SEQ ID NO: 179750 - DNA, 4258 bp, Homo sapiens
  Payload ID: 15426
  Gene Symbol: SEMA4D
  Gene Name: sema domain, immunoglobulin domain (Ig), transmembrane domain (TM) and short cytoplasmic domain, (semaphorin) 4D
  Uniprot ID: Q92854
  ENST ID: ENST00000339861
  CDS Start-End: 427-2643
ccccgccaccccctccccggcccggccgcctcccgccgctgccgccgccgccgccgccgccattcctggcgcccgaactcgcccggccgggagccgccgcgggcaggacgcgcgctgcagcaaagatttctgaagacgtctttctagaaatgactggaaagtttcaagaggcataagatacagcatttcttctgaggccctgaagaagtatcaagtgggctttgacattgcggtggtgagagcgacccctcctcacctggagaactgggaaatgtggattctcagggaccgcgctgttcacgagctccaggctgtgctgctggccctggtcctggggcgctgagccgcatctgcaatagcacacctgcccggccacctgctgccgtgagcctttgctgctgaagcccctggggtcgcctctacctgatgaggatgtgcacccccattagggggctgctcatggcccttgcagtgatgtttgggacagcgatggcatttgcacccataccccggatcacctgggagcacagagaggtgcacctggtgcagtttcatgagccagacatctacaactactcagccttgctgctgagcgaggacaaggacaccttgtacataggtgcccgggaggcggtcttcgctgtgaacgcactcaacatctccgagaagcagcatgaggtgtattggaaggtctcagaagacaaaaaagcaaaatgtgcagaaaaggggaaatcaaaacagacagagtgcctcaactacatccgggtgctgcagccactcagcgccacttccctttacgtgtgtgggaccaacgcattccagccggcctgtgaccacctgaacttaacatcctttaagtttctggggaaaaatgaagatggcaaaggaagatgtccctttgacccagcacacagctacacatccgtcatggttgatggagaactttattcggggacgtcgtataattttttgggaagtgaacccatcatctcccgaaattcttcccacagtcctctgaggacagaatatgcaatcccttggctgaacgagcctagtttcgtgtttgctgacgtgatccgaaaaagcccagacagccccgacggcgaggatgacagggtctacttcttcttcacggaggtgtctgtggagtatgagtttgtgttcagggtgctgatcccacggatagcaagagtgtgcaagggggaccagggcggcctgaggaccttgcagaagaaatggacctccttcctgaaagcccgactcatctgctcccggccagacagcggcttggtcttcaatgtgctgcgggatgtcttcgtgctcaggtccccgggcctgaaggtgcctgtgttctatgcactcttcaccccacagctgaacaacgtggggctgtcggcagtgtgcgcctacaacctgtccacagccgaggaggtcttctcccacgggaagtacatgcagagcaccacagtggagcagtcccacaccaagtgggtgcgctataatggcccggtacccaagccgcggcctggagcgtgcatcgacagcgaggcacgggccgccaactacaccagctccttgaatttgccagacaagacgctgcagttcgttaaagaccaccctttgatggatgactcggtaaccccaatagacaacaggcccaggttaatcaagaaagatgtgaactacacccagatcgtggtggaccggacccaggccctggatgggactgtctatgatgtcatgtttgtcagcacagaccggggagctctgcacaaagccatcagcctcgagcacgctgttcacatcatcgaggagacccagctcttccaggactttgagccagtccagaccctgctgctgtcttcaaagaagggcaacaggtttgtctatgctggctctaactcgggcgtggtccaggccccgctggccttctgtgggaagcacggcacctgcgaggactgtgtgctggcgcgggacccctactgcgcctggagcccgcccacagcgacctgcgtggctctgcaccagaccgagagccccagcaggggtttgattcaggagatgagcggcgatgcttctgtgtgcccggcctcgtctcctaagcccctccctcctcctggctcctcttccctgtcctgtctgggccatgtgggggacaggaggctttcctctccctggaccccctggccagcctcgggtgcggggcccgacagcagctcgagggtctccttgctgccgcccttcctgagtgaccaggcacagcacgtgcacgccctggggaacttctacctcttctgccaggccacaggtcctgcagacattcgctttgtctgggagaagaatgggcgagctctggagacctgtgtccctgtgcagacccatgcactgcccgatggcagggcccatgcactcagctggctgcaggacgccatcagggaaagcgctgagtatcgctgctctgtcctctcctcagcagggaacaagacttcgaaggtgcaggttgctgtgatgagacctgaagtgacccaccaggagaggtggaccagagagctctctgcctggagggctgtggctggggagcacgaccggatgatgcagagctggaggaaggcgtgggaaagctgtagcaaggacaccctgtagccaccaggaaggagtccctgacaccgacctcaaccccaacaagaccctgctgccactgaccacagccacccccggagaaggcctggtcccccacaactgtgaactgtcttgcccaagcctgctctgaacacagccattgggccaccacctgatgggcagaggcgggacagtggagaagcctggaacccaagtgggcctgtgacaggaactaagacttaaaaaattaggtgcttacctgggacagtaagttctgtctggcacaagcaggtaaccaggatggctaacaggctttgatagctgctcgtgaactaaaacagcagggtgtgtgcaggttcctcctctacggtcaggcagcaggctctgaaggctgatcctacaccgtcccagtgactccccttgacagagtgcccccaccccctaatagccaacagggttagcatggccagcacagatcgctgcttttattgatgcaaatcaagcctgctgcttctcctccctgcagacttagccaaggaactccaagatgcatgactgggacaagaaaaggtgagactccacatggaaatgccttgccctaaaccttgaatgactgtgagatgcgatctgggagtgcatctgtcaagtctttgtgttttcttcactaacctcagaatactgggctctattttatcaagcgctgcagtttatgcctctgtcccgtcaatgctcagcttctgcaacaggacaccaaacttgatgcagaaagccaaataggtcaattatgcaaatctcctggtgccatattaaatttcttgacgatggaatgagtctcatgagtgttttgttctacctgctttcaagtctctaattattaaagctgtatctctgaagactgtgtcactgtgtgtgtgaacttgtcctaaagctactcagcctttaatcttacacacacgtctcttcttgtctgttgaatgacagttttcatgtctatcataaaaccaaagcctctgttaaaagtcaagccgcacccctctggtgatcctagcaaatactgagtgtcttcccagcagtgtgacaatgacctgttttgcatcccctctttctggagctggacaaattctctaccagcctttgtgtgggatcagcatacatcgcctgctaattccttcaggatccatcacaacaggtgtcctgaagatgctggagacaccctggttgtctccacacgttccccctccgcaccccaagtcgagaggcccagctgcctgtgaggtgtgtgcttgcccatccagccaaggatgccagtcttgctcacggaaccatcacatactcataacctgaagttttcctgtaaaatatccatcagctcactgtggttcttgctttgggtgtggcttcaaccactacaaactgatgagtgaaatgctatgggctttaggcttatattcttggtgctgttttctgtctcttctcctgaagtctggatttcaagcactttcacacttaacaaaataattacatacttgaagttttcgtaatgtggagtgttctactgggaaatggagttatgaggatgaatttctgagtctttctttgctctgctggaaaaaataaaaatagagttgtacattgttca

SEQ ID NO: 179751 - DNA, 4503 bp, Homo sapiens
  Payload ID: 15426
  Gene Symbol: SEMA4D
  Gene Name: sema domain, immunoglobulin domain (Ig), transmembrane domain (TM) and short cytoplasmic domain, (semaphorin) 4D
  Uniprot ID: Q92854
  ENST ID: ENST00000356444
  CDS Start-End: 448-3036
actctgctaacaccagatagtggaaagaaaccatgtgctgaaatgtttgacgacactgatggtttgactctgctaactggaatggcttattgtgcaagaaagtacacctggtcgggtcctggggctcatctctagcaccagcaaagatttctgaagacgtctttctagaaatgactggaaagtttcaagaggcataagatacagcatttcttctgaggccctgaagaagtatcaagtgggctttgacattgcggtggtgagagcgacccctcctcacctggagaactgggaaatgtggattctcagggaccgcgctgttcacgagctccaggctgtgctgctggccctggtcctggggcgctgagccgcatctgcaatagcacacctgcccggccacctgctgccgtgagcctttgctgctgaagcccctggggtcgcctctacctgatgaggatgtgcacccccattagggggctgctcatggcccttgcagtgatgtttgggacagcgatggcatttgcacccataccccggatcacctgggagcacagagaggtgcacctggtgcagtttcatgagccagacatctacaactactcagccttgctgctgagcgaggacaaggacaccttgtacataggtgcccgggaggcggtcttcgctgtgaacgcactcaacatctccgagaagcagcatgaggtgtattggaaggtctcagaagacaaaaaagcaaaatgtgcagaaaaggggaaatcaaaacagacagagtgcctcaactacatccgggtgctgcagccactcagcgccacttccctttacgtgtgtgggaccaacgcattccagccggcctgtgaccacctgaacttaacatcctttaagtttctggggaaaaatgaagatggcaaaggaagatgtccctttgacccagcacacagctacacatccgtcatggttgatggagaactttattcggggacgtcgtataattttttgggaagtgaacccatcatctcccgaaattcttcccacagtcctctgaggacagaatatgcaatcccttggctgaacgagcctagtttcgtgtttgctgacgtgatccgaaaaagcccagacagccccgacggcgaggatgacagggtctacttcttcttcacggaggtgtctgtggagtatgagtttgtgttcagggtgctgatcccacggatagcaagagtgtgcaagggggaccagggcggcctgaggaccttgcagaagaaatggacctccttcctgaaagcccgactcatctgctcccggccagacagcggcttggtcttcaatgtgctgcgggatgtcttcgtgctcaggtccccgggcctgaaggtgcctgtgttctatgcactcttcaccccacagctgaacaacgtggggctgtcggcagtgtgcgcctacaacctgtccacagccgaggaggtcttctcccacgggaagtacatgcagagcaccacagtggagcagtcccacaccaagtgggtgcgctataatggcccggtacccaagccgcggcctggagcgtgcatcgacagcgaggcacgggccgccaactacaccagctccttgaatttgccagacaagacgctgcagttcgttaaagaccaccctttgatggatgactcggtaaccccaatagacaacaggcccaggttaatcaagaaagatgtgaactacacccagatcgtggtggaccggacccaggccctggatgggactgtctatgatgtcatgtttgtcagcacagaccggggagctctgcacaaagccatcagcctcgagcacgctgttcacatcatcgaggagacccagctcttccaggactttgagccagtccagaccctgctgctgtcttcaaagaagggcaacaggtttgtctatgctggctctaactcgggcgtggtccaggccccgctggccttctgtgggaagcacggcacctgcgaggactgtgtgctggcgcgggacccctactgcgcctggagcccgcccacagcgacctgcgtggctctgcaccagaccgagagccccagcaggggtttgattcaggagatgagcggcgatgcttctgtgtgcccggataaaagtaaaggaagttaccggcagcattttttcaagcacggtggcacagcggaactgaaatgctcccaaaaatccaacctggcccgggtcttttggaagttccagaatggcgtgttgaaggccgagagccccaagtacggtcttatgggcagaaaaaacttgctcatcttcaacttgtcagaaggagacagtggggtgtaccagtgcctgtcagaggagagggttaagaacaaaacggtcttccaagtggtcgccaagcacgtcctggaagtgaaggtggttccaaagcccgtagtggcccccaccttgtcagttgttcagacagaaggtagtaggattgccaccaaagtgttggtggcatccacccaagggtcttctcccccaaccccagccgtgcaggccacctcctccggggccatcacccttcctcccaagcctgcgcccaccggcacatcctgcgaaccaaagatcgtcatcaacacggtcccccagctccactcggagaaaaccatgtatcttaagtccagcgacaaccgcctcctcatgtccctcttcctcttcttctttgttctcttcctctgcctctttttctacaactgctataagggatacctgcccagacagtgcttgaaattccgctcggccctactaattgggaagaagaagcccaagtcagatttctgtgaccgtgagcagagcctgaaggagacgttagtagagccagggagcttctcccagcagaatggggagcaccccaagccagccctggacaccggctatgagaccgagcaagacaccatcaccagcaaagtccccacggatagggaggactcacagaggatcgacgacctttctgccagggacaagccctttgacgtcaagtgtgagctgaagttcgctgactcagacgcagatggagactgaggccggctgtgcatccccgctggtgcctcggctgcgacgtgtccaggcgtggagagttttgtgtttctcctgttcagtatccgagtctcgtgcagtgctgcgtaggttagcccgcatcgtgcagacaacctcagtcctcttgtctattttctcttgggttgagcctgtgacttggtttctctttgtccttttggaaaaatgacaagcattgcatcccagtcttgtgttccgaagtcagtcggagtacttgaagaaggcccacgggcggcacggagttcctgagccctttctgtagtgggggaaaggtggctggacctctgttggctgagaagagcatcccttcagcttcccctccccgtagcagccactaaaagattatttaattccagattggaaatgacattttagtttatcagattggtaacttatcgcctgttgtccagattggcacgaaccttttcttccacttaattatttttttaggattttgctttgattgtgtttatgtcatgggtcatttttttttagttacagaagcagttgtgttaatatttagaagaagatgtatatcttccagattttgttatatatttggcataaaatacggcttacgttgcttaagattctcagggataaacttccttttgctaaatgcattctttctgcttttagaaatgtagacataaacactccccggagcccactcaccttttttctttttctttttttttttttaactttattccttgagggaagcattgtttttggagagattttctttctgtacttcgttttacttttctttttttttaacttttactctctcgaagaagaggaccttcccacatccacgaggtgggttttgagcaagggaaggtagcctggatgagctgagtggagccaggctggcccagagctgagatgggagtgcggtacaatctggagcccacagctgtcggtcagaacctcctgtgagacagatggaaccttcacaagggcgcctttggttctctgaacatctcctttctcttcttgcttcaattgcttacccactgcctgcccagactttctatccagcctcactgagctgcccactactggaagggaactgggcctcggtggccggggccgcgagctgtgaccacagcaccctcaagcatacggcgctgttcctgccactgtcctgaagatgtgaatgggtggtacgatttcaacactggttaatttcacactccatctccccgctttgtaaatacccatcgggaagagactttttttccatggtgaagagcaataaactctggatgtttgtgcgcgtgtgtggacagtcttatcttccagcatgataggatttgaccattttggtgtaaacatttgtgttttataagatttaccttgtttttatttttctactttgaattgtatacatttggaaagtacccaaataaatgagaagcttctatcctt

SEQ ID NO: 179752 - DNA, 4382 bp, Homo sapiens
  Payload ID: 15426
  Gene Symbol: SEMA4D
  Gene Name: sema domain, immunoglobulin domain (Ig), transmembrane domain (TM) and short cytoplasmic domain, (semaphorin) 4D
  Uniprot ID: Q92854
  ENST ID: ENST00000422704
  CDS Start-End: 481-3069
agcgctctcgcgcgccgcagcatcccagccgccgctgccgccgccgggcctccccgccaccccctccccggcccggccgcctcccgccgctgccgccgccgccgccgccgccattcctggcgcccgaactcgcccggccgggagccgccgcgggcaggacgcgcgctgcagactctgctaacaccagatagtggaaagaaaccatgtgctgaaatgtttgacgacactgatggtttgcatttcttctgaggccctgaagaagtatcaagtgggctttgacattgcggtggtgagagcgacccctcctcacctggagaactgggaaatgtggattctcagggaccgcgctgttcacgagctccaggctgtgctgctggccctggtcctggggcgctgagccgcatctgcaatagcacacctgcccggccacctgctgccgtgagcctttgctgctgaagcccctggggtcgcctctacctgatgaggatgtgcacccccattagggggctgctcatggcccttgcagtgatgtttgggacagcgatggcatttgcacccataccccggatcacctgggagcacagagaggtgcacctggtgcagtttcatgagccagacatctacaactactcagccttgctgctgagcgaggacaaggacaccttgtacataggtgcccgggaggcggtcttcgctgtgaacgcactcaacatctccgagaagcagcatgaggtgtattggaaggtctcagaagacaaaaaagcaaaatgtgcagaaaaggggaaatcaaaacagacagagtgcctcaactacatccgggtgctgcagccactcagcgccacttccctttacgtgtgtgggaccaacgcattccagccggcctgtgaccacctgaacttaacatcctttaagtttctggggaaaaatgaagatggcaaaggaagatgtccctttgacccagcacacagctacacatccgtcatggttgatggagaactttattcggggacgtcgtataattttttgggaagtgaacccatcatctcccgaaattcttcccacagtcctctgaggacagaatatgcaatcccttggctgaacgagcctagtttcgtgtttgctgacgtgatccgaaaaagcccagacagccccgacggcgaggatgacagggtctacttcttcttcacggaggtgtctgtggagtatgagtttgtgttcagggtgctgatcccacggatagcaagagtgtgcaagggggaccagggcggcctgaggaccttgcagaagaaatggacctccttcctgaaagcccgactcatctgctcccggccagacagcggcttggtcttcaatgtgctgcgggatgtcttcgtgctcaggtccccgggcctgaaggtgcctgtgttctatgcactcttcaccccacagctgaacaacgtggggctgtcggcagtgtgcgcctacaacctgtccacagccgaggaggtcttctcccacgggaagtacatgcagagcaccacagtggagcagtcccacaccaagtgggtgcgctataatggcccggtacccaagccgcggcctggagcgtgcatcgacagcgaggcacgggccgccaactacaccagctccttgaatttgccagacaagacgctgcagttcgttaaagaccaccctttgatggatgactcggtaaccccaatagacaacaggcccaggttaatcaagaaagatgtgaactacacccagatcgtggtggaccggacccaggccctggatgggactgtctatgatgtcatgtttgtcagcacagaccggggagctctgcacaaagccatcagcctcgagcacgctgttcacatcatcgaggagacccagctcttccaggactttgagccagtccagaccctgctgctgtcttcaaagaagggcaacaggtttgtctatgctggctctaactcgggcgtggtccaggccccgctggccttctgtgggaagcacggcacctgcgaggactgtgtgctggcgcgggacccctactgcgcctggagcccgcccacagcgacctgcgtggctctgcaccagaccgagagccccagcaggggtttgattcaggagatgagcggcgatgcttctgtgtgcccggataaaagtaaaggaagttaccggcagcattttttcaagcacggtggcacagcggaactgaaatgctcccaaaaatccaacctggcccgggtcttttggaagttccagaatggcgtgttgaaggccgagagccccaagtacggtcttatgggcagaaaaaacttgctcatcttcaacttgtcagaaggagacagtggggtgtaccagtgcctgtcagaggagagggttaagaacaaaacggtcttccaagtggtcgccaagcacgtcctggaagtgaaggtggttccaaagcccgtagtggcccccaccttgtcagttgttcagacagaaggtagtaggattgccaccaaagtgttggtggcatccacccaagggtcttctcccccaaccccagccgtgcaggccacctcctccggggccatcacccttcctcccaagcctgcgcccaccggcacatcctgcgaaccaaagatcgtcatcaacacggtcccccagctccactcggagaaaaccatgtatcttaagtccagcgacaaccgcctcctcatgtccctcttcctcttcttctttgttctcttcctctgcctctttttctacaactgctataagggatacctgcccagacagtgcttgaaattccgctcggccctactaattgggaagaagaagcccaagtcagatttctgtgaccgtgagcagagcctgaaggagacgttagtagagccagggagcttctcccagcagaatggggagcaccccaagccagccctggacaccggctatgagaccgagcaagacaccatcaccagcaaagtccccacggatagggaggactcacagaggatcgacgacctttctgccagggacaagccctttgacgtcaagtgtgagctgaagttcgctgactcagacgcagatggagactgaggccggctgtgcatccccgctggtgcctcggctgcgacgtgtccaggcgtggagagttttgtgtttctcctgttcagtatccgagtctcgtgcagtgctgcgtaggttagcccgcatcgtgcagacaacctcagtcctcttgtctattttctcttgggttgagcctgtgacttggtttctctttgtccttttggaaaaatgacaagcattgcatcccagtcttgtgttccgaagtcagtcggagtacttgaagaaggcccacgggcggcacggagttcctgagccctttctgtagtgggggaaaggtggctggacctctgttggctgagaagagcatcccttcagcttcccctccccgtagcagccactaaaagattatttaattccagattggaaatgacattttagtttatcagattggtaacttatcgcctgttgtccagattggcacgaaccttttcttccacttaattatttttttaggattttgctttgattgtgtttatgtcatgggtcatttttttttagttacagaagcagttgtgttaatatttagaagaagatgtatatcttccagattttgttatatatttggcataaaatacggcttacgttgcttaagattctcagggataaacttccttttgctaaatgcattctttctgcttttagaaatgtagacataaacactccccggagcccactcaccttttttctttttctttttttttttttaactttattccttgagggaagcattgtttttggagagattttctttctgtacttcgttttacttttctttttttttaacttttactctctcgaagaagaggaccttcccacatccacgaggtgggttttgagcaagggaaggtagcctggatgagctgagtggagccaggctggcccagagctgagatgggagtgcggtacaatctggagcccacagctgtcggtcagaacctcctgtgagacagatggaaccttcacaagggcgcctttggttctctgaacatctcctttctcttcttgcttcaattgcttacccactgcctgcccagactttctatccagcctcactgagctgcccactactggaagggaactgggcctcggtggccggggccgcgagctgtgaccacagcaccctcaagcatacggcgctgttcctgccactgtcctgaagatgtgaatgggtggtacgatttcaacactggttaatttcacactccatctccccgctttgtaaatacccatcgggaagagactttttttccatggtgaagagcaataaactctggatgtttgtg

SEQ ID NO: 179753 - DNA, 907 bp, Homo sapiens
  Payload ID: 15426
  Gene Symbol: SEMA4D
  Gene Name: sema domain, immunoglobulin domain (Ig), transmembrane domain (TM) and short cytoplasmic domain, (semaphorin) 4D
  ENST ID: ENST00000420681
  CDS Start-End: 469-907
agagcccttgaaacccctgcagtcaggacagacgtcccaggcgagcagaggccctgcgtgaggatggggcggcggggccagatggtgtcctgagtatccatcctccctggtggctgaggacacgctgaccagcgtggggtcaggagcatggcccctggaaagcaaagatttctgaagacgtctttctagaaatgactggaaagtttcaagaggcataagatacagcatttcttctgaggccctgaagaagtatcaagtgggctttgacattgcggtggtgagagcgacccctcctcacctggagaactgggaaatgtggattctcagggaccgcgctgttcacgagctccaggctgtgctgctggccctggtcctggggcgctgagccgcatctgcaatagcacacctgcccggccacctgctgccgtgagcctttgctgctgaagcccctggggtcgcctctacctgatgaggatgtgcacccccattagggggctgctcatggcccttgcagtgatgtttgggacagcgatggcatttgcacccataccccggatcacctgggagcacagagaggtgcacctggtgcagtttcatgagccagacatctacaactactcagccttgctgctgagcgaggacaaggacaccttgtacataggtgcccgggaggcggtcttcgctgtgaacgcactcaacatctccgagaagcagcatgaggtgtattggaaggtctcagaagacaaaaaagcaaaatgtgcagaaaaggggaaatcaaaacagacagagtgcctcaactacatccgggtgctgcagccactcagcgccacttccctttacgtgtgtgggaccaacgcattccagccggcctgtgaccacctgaacttaacatcctttaagtttctgg

SEQ ID NO: 179754 - DNA, 4275 bp, Homo sapiens
  Payload ID: 15426
  Gene Symbol: SEMA4D
  Gene Name: sema domain, immunoglobulin domain (Ig), transmembrane domain (TM) and short cytoplasmic domain, (semaphorin) 4D
  Uniprot ID: Q92854
  ENST ID: ENST00000420987
  CDS Start-End: 448-2664
actctgctaacaccagatagtggaaagaaaccatgtgctgaaatgtttgacgacactgatggtttgactctgctaactggaatggcttattgtgcaagaaagtacacctggtcgggtcctggggctcatctctagcaccagcaaagatttctgaagacgtctttctagaaatgactggaaagtttcaagaggcataagatacagcatttcttctgaggccctgaagaagtatcaagtgggctttgacattgcggtggtgagagcgacccctcctcacctggagaactgggaaatgtggattctcagggaccgcgctgttcacgagctccaggctgtgctgctggccctggtcctggggcgctgagccgcatctgcaatagcacacctgcccggccacctgctgccgtgagcctttgctgctgaagcccctggggtcgcctctacctgatgaggatgtgcacccccattagggggctgctcatggcccttgcagtgatgtttgggacagcgatggcatttgcacccataccccggatcacctgggagcacagagaggtgcacctggtgcagtttcatgagccagacatctacaactactcagccttgctgctgagcgaggacaaggacaccttgtacataggtgcccgggaggcggtcttcgctgtgaacgcactcaacatctccgagaagcagcatgaggtgtattggaaggtctcagaagacaaaaaagcaaaatgtgcagaaaaggggaaatcaaaacagacagagtgcctcaactacatccgggtgctgcagccactcagcgccacttccctttacgtgtgtgggaccaacgcattccagccggcctgtgaccacctgaacttaacatcctttaagtttctggggaaaaatgaagatggcaaaggaagatgtccctttgacccagcacacagctacacatccgtcatggttgatggagaactttattcggggacgtcgtataattttttgggaagtgaacccatcatctcccgaaattcttcccacagtcctctgaggacagaatatgcaatcccttggctgaacgagcctagtttcgtgtttgctgacgtgatccgaaaaagcccagacagccccgacggcgaggatgacagggtctacttcttcttcacggaggtgtctgtggagtatgagtttgtgttcagggtgctgatcccacggatagcaagagtgtgcaagggggaccagggcggcctgaggaccttgcagaagaaatggacctccttcctgaaagcccgactcatctgctcccggccagacagcggcttggtcttcaatgtgctgcgggatgtcttcgtgctcaggtccccgggcctgaaggtgcctgtgttctatgcactcttcaccccacagctgaacaacgtggggctgtcggcagtgtgcgcctacaacctgtccacagccgaggaggtcttctcccacgggaagtacatgcagagcaccacagtggagcagtcccacaccaagtgggtgcgctataatggcccggtacccaagccgcggcctggagcgtgcatcgacagcgaggcacgggccgccaactacaccagctccttgaatttgccagacaagacgctgcagttcgttaaagaccaccctttgatggatgactcggtaaccccaatagacaacaggcccaggttaatcaagaaagatgtgaactacacccagatcgtggtggaccggacccaggccctggatgggactgtctatgatgtcatgtttgtcagcacagaccggggagctctgcacaaagccatcagcctcgagcacgctgttcacatcatcgaggagacccagctcttccaggactttgagccagtccagaccctgctgctgtcttcaaagaagggcaacaggtttgtctatgctggctctaactcgggcgtggtccaggccccgctggccttctgtgggaagcacggcacctgcgaggactgtgtgctggcgcgggacccctactgcgcctggagcccgcccacagcgacctgcgtggctctgcaccagaccgagagccccagcaggggtttgattcaggagatgagcggcgatgcttctgtgtgcccggcctcgtctcctaagcccctccctcctcctggctcctcttccctgtcctgtctgggccatgtgggggacaggaggctttcctctccctggaccccctggccagcctcgggtgcggggcccgacagcagctcgagggtctccttgctgccgcccttcctgagtgaccaggcacagcacgtgcacgccctggggaacttctacctcttctgccaggccacaggtcctgcagacattcgctttgtctgggagaagaatgggcgagctctggagacctgtgtccctgtgcagacccatgcactgcccgatggcagggcccatgcactcagctggctgcaggacgccatcagggaaagcgctgagtatcgctgctctgtcctctcctcagcagggaacaagacttcgaaggtgcaggttgctgtgatgagacctgaagtgacccaccaggagaggtggaccagagagctctctgcctggagggctgtggctggggagcacgaccggatgatgcagagctggaggaaggcgtgggaaagctgtagcaaggacaccctgtagccaccaggaaggagtccctgacaccgacctcaaccccaacaagaccctgctgccactgaccacagccacccccggagaaggcctggtcccccacaactgtgaactgtcttgcccaagcctgctctgaacacagccattgggccaccacctgatgggcagaggcgggacagtggagaagcctggaacccaagtgggcctgtgacaggaactaagacttaaaaaattaggtgcttacctgggacagtaagttctgtctggcacaagcaggtaaccaggatggctaacaggctttgatagctgctcgtgaactaaaacagcagggtgtgtgcaggttcctcctctacggtcaggcagcaggctctgaaggctgatcctacaccgtcccagtgactccccttgacagagtgcccccaccccctaatagccaacagggttagcatggccagcacagatcgctgcttttattgatgcaaatcaagcctgctgcttctcctccctgcagacttagccaaggaactccaagatgcatgactgggacaagaaaaggtgagactccacatggaaatgccttgccctaaaccttgaatgactgtgagatgcgatctgggagtgcatctgtcaagtctttgtgttttcttcactaacctcagaatactgggctctattttatcaagcgctgcagtttatgcctctgtcccgtcaatgctcagcttctgcaacaggacaccaaacttgatgcagaaagccaaataggtcaattatgcaaatctcctggtgccatattaaatttcttgacgatggaatgagtctcatgagtgttttgttctacctgctttcaagtctctaattattaaagctgtatctctgaagactgtgtcactgtgtgtgtgaacttgtcctaaagctactcagcctttaatcttacacacacgtctcttcttgtctgttgaatgacagttttcatgtctatcataaaaccaaagcctctgttaaaagtcaagccgcacccctctggtgatcctagcaaatactgagtgtcttcccagcagtgtgacaatgacctgttttgcatcccctctttctggagctggacaaattctctaccagcctttgtgtgggatcagcatacatcgcctgctaattccttcaggatccatcacaacaggtgtcctgaagatgctggagacaccctggttgtctccacacgttccccctccgcaccccaagtcgagaggcccagctgcctgtgaggtgtgtgcttgcccatccagccaaggatgccagtcttgctcacggaaccatcacatactcataacctgaagttttcctgtaaaatatccatcagctcactgtggttcttgctttgggtgtggcttcaaccactacaaactgatgagtgaaatgctatgggctttaggcttatattcttggtgctgttttctgtctcttctcctgaagtctggatttcaagcactttcacacttaacaaaataattacatacttgaagttttcgtaatgtggagtgttctactgggaaatggagttatgaggatgaatttctgagtctttctttgctctgctggaaaaaataaaaatagagttgtacattg

SEQ ID NO: 179755 - DNA, 2895 bp, Homo sapiens
  Payload ID: 15426
  Gene Symbol: SEMA4D
  Gene Name: sema domain, immunoglobulin domain (Ig), transmembrane domain (TM) and short cytoplasmic domain, (semaphorin) 4D
  ENST ID: ENST00000429836
  CDS Start-End: 692-2338
ggcaacccgctcgggtccccttccacactgtggaagctttgttctttcgctcttgctactgctagctctttgggtccacgctgcttttatgagctgtaacactcaccgcgaagatctgcagcttcactcctgagcccagcgagaccacgagcccaccgggaggaacgaacaactccagacgcgctgccttaagagctgtaacactcaccgtgaaggtctgcagcttcactcccgagccagcgagaccacgaacccaccagaaggaagaaactctgaacacatctgaacatcagaagggacagactccagacgcgccaccactctgctaacaccagatagtggaaagaaaccatgtgctgaaatgtttgacgacactgatggtttgcaaagatttctgaagacgtctttctagaaatgactggaaagtttcaagaggcataagatacagcatttcttctgaggccctgaagaagtatcaagtgggctttgacattgcggtggtgagagcgacccctcctcacctggagaactgggaaatgtggattctcagggaccgcgctgttcacgagctccaggctgtgctgctggccctggtcctggggcgctgagccgcatctgcaatagcacacctgcccggccacctgctgccgtgagcctttgctgctgaagcccctggggtcgcctctacctgatgaggatgtgcacccccattagggggctgctcatggcccttgcagtgatgtttgggacagcgatggcatttgcacccataccccggatcacctgggagcacagagaggtgcacctggtgcagtttcatgagccagacatctacaactactcagccttgctgctgagcgaggacaaggacaccttgtacataggtgcccgggaggcggtcttcgctgtgaacgcactcaacatctccgagaagcagcatgaggtgtattggaaggtctcagaagacaaaaaagcaaaatgtgcagaaaaggggaaatcaaaacagacagagtgcctcaactacatccgggtgctgcagccactcagcgccacttccctttacgtgtgtgggaccaacgcattccagccggcctgtgaccacctgaacttaacatcctttaagtttctggggaaaaatgaagatggcaaaggaagatgtccctttgacccagcacacagctacacatccgtcatggttgatggagaactttattcggggacgtcgtataattttttgggaagtgaacccatcatctcccgaaattcttcccacagtcctctgaggacagaatatgcaatcccttggctgaacgagcctagtttcgtgtttgctgacgtgatccgaaaaagcccagacagccccgacggcgaggatgacagggtctacttcttcttcacggaggtgtctgtggagtatgagtttgtgttcagggtgctgatcccacggatagcaagagtgtgcaagggggaccagggcggcctgaggaccttgcagaagaaatggacctccttcctgaaagcccgactcatctgctcccggccagacagcggcttggtcttcaatgtgctgcgggatgtcttcgtgctcaggtccccgggcctgaaggtgcctgtgttctatgcactcttcaccccacagctgaacaacgtggggctgtcggcagtgtgcgcctacaacctgtccacagccgaggaggtcttctcccacgggaagtacatgcagagcaccacagtggagcagtcccacaccaagtgggtgcgctataatggcccggtacccaagccgcggcctggagcgtgcatcgacagcgaggcacgggccgccaactacaccagctccttgaatttgccagacaagacgctgcagttcgttaaagaccaccctttgatggatgactcggtaaccccaatagacaacaggcccaggttaatcaagaaagatgtgaactacacccagatcgtggtggaccggacccaggccctggatgggactgtctatgatgtcatgtttgtcagcacagaccggggagctctgcacaaagccatcagcctcgagcacgctgttcacatcatcgaggagacccagctcttccaggactttgagccagtccagaccctgctgctgtcttcaaagaaggtcctgcagacattcgctttgtctgggagaagaatgggcgagctctggagacctgtgtccctgtgcagacccatgcactgcccgatggcagggcccatgcactcagctggctgcaggacgccatcagggaaagcgctgagtatcgctgctctgtcctctcctcagcagggaacaagacttcgaaggtgcaggttgctgtgatgagacctgaagtgacccaccaggagaggtggaccagagagctctctgcctggagggctgtggctggggagcacgaccggatgatgcagagctggaggaaggcgtgggaaagctgtagcaaggacaccctgtagccaccaggaaggagtccctgacaccgacctcaaccccaacaagaccctgctgccactgaccacagccacccccggagaaggcctggtcccccacaactgtgaactgtcttgcccaagcctgctctgaacacagccattgggccaccacctgatgggcagaggcgggacagtggagaagcctggaacccaagtgggcctgtgacaggaactaagacttaaaaaattaggtgcttacctgggacagtaagttctgtctggcacaagcaggtaaccaggatggctaacaggctttgatagctgctcgtgaactaaaacagcagggtgtgtgcaggttcctcctctacggtcaggcagcaggctctgaaggctgatcctacaccgtcccagtgactccccttgacagagtgcccccaccccctaata

SEQ ID NO: 179756 - DNA, 1837 bp, Homo sapiens
  Payload ID: 15426
  Gene Symbol: SEMA4D
  Gene Name: sema domain, immunoglobulin domain (Ig), transmembrane domain (TM) and short cytoplasmic domain, (semaphorin) 4D
  ENST ID: ENST00000420101
  CDS Start-End: 665-1036
agcccagagaaaaacaacagaggtttgcggcagaagtggccaatgtcgggcccagagtccatgctcaaggctggaagcccatcctggatgtgctgcactcggcagtcctagtgtaattctgcagggcctggcccctgccagggtctgagctctccagcctgtggcatctactcccctccaagcccaccccagtgtctcaattggagagacaggccctcatggtccccactctggcccagccccctctgcacacagctggccgagctctgggcctctccatgctgtggccctggtgatggcagagccttgggatgtctctgtccatgtggtcacaggacatgtgtgtggcagcagggccatggtggggtgggatgctgttccaaggcccagaaccattctgtaagaaaccagcacagcgctgcaagaaagggggtcctaggggacacaggccacacaggtgtgctttgaaaaatggcaattaaggtcaaagagcaggaagtccacaggacgggccaaggccaaggctcccgctggccatggggaagccacctccagggcagtcccagggactgaattggaagttgtcccaagtcacttcaggtccaactgggacagcagaggtaacccccctgcaccctcatggggcagcttctttgggtcctaaatgtggactcagaggtggaaacggtctgtgtccccaggtcctgcagacattcgctttgtctgggagaagaatgggcgagctctggagacctgtgtccctgtgcagacccatgcactgcccgatggcagggcccatgcactcagctggctgcaggacgccatcagggaaagcgctgagtatcgctgctctgtcctctcctcagcagggaacaagacttcgaaggtgcaggttgctgtgatgagacctgaagtgacccaccaggagaggtggaccagagagctctctgcctggagggctgtggctggggagcacgaccggatgatgcagagctggaggaaggcgtgggaaagctgtagcaaggacaccctgtagccaccaggaaggagtccctgacaccgacctcaaccccaacaagaccctgctgccactgaccacagccacccccggagaaggcctggtcccccacaactgtgaactgtcttgcccaagcctgctctgaacacagccattgggccaccacctgatgggcagaggcgggacagtggagaagcctggaacccaagtgggcctgtgacaggaactaagacttaaaaaattaggtgcttacctgggacagtaagttctgtctggcacaagcaggtaaccaggatggctaacaggctttgatagctgctcgtgaactaaaacagcagggtgtgtgcaggttcctcctctacggtcaggcagcaggctctgaaggctgatcctacaccgtcccagtgactccccttgacagagtgcccccaccccctaatagccaacagggttagcatggccagcacagatcgctgcttttattgatgcaaatcaagcctgctgcttctcctccctgcagacttagccaaggaactccaagatgcatgactgggacaagaaaaggtgagactccacatggaaatgccttgccctaaaccttgaatgactgtgagatgcgatctgggagtgcatctgtcaagtctttgtgttttcttcactaacctcagaatactgggctctattttatcaagcgctgcagtttatgcctctgtcccgtcaatgctcagcttctgcaacaggacaccaaacttgatgcagaaagccaaataggtcaattatgcaaatctcctggtgccatattaaatttcttgacgatgg

SEQ ID NO: 179757 - DNA, 4824 bp, Homo sapiens
  Payload ID: 15426
  Gene Symbol: SEMA4D
  Gene Name: sema domain, immunoglobulin domain (Ig), transmembrane domain (TM) and short cytoplasmic domain, (semaphorin) 4D
  Uniprot ID: Q92854
  ENST ID: ENST00000438547
  CDS Start-End: 767-3355
ggcaacccgctcgggtccccttccacactgtggaagctttgttctttcgctcttgctactgctagctctttgggtccacgctgcttttatgagctgtaacactcaccgcgaagatctgcagcttcactcctgagcccagcgagaccacgagcccaccgggaggaacgaacaactccagacgcgctgccttaagagctgtaacactcaccgtgaaggtctgcagcttcactcccgagccagcgagaccacgaacccaccagaaggaagaaactctgaacacatctgaacatcagaagggacagactccagacgcgccaccactctgctaacaccagatagtggaaagaaaccatgtgctgaaatgtttgacgacactgatggtttgactctgctaactggaatggcttattgtgcaagaaagtacacctggtcgggtcctggggctcatctctagcaccagcaaagatttctgaagacgtctttctagaaatgactggaaagtttcaagaggcataagatacagcatttcttctgaggccctgaagaagtatcaagtgggctttgacattgcggtggtgagagcgacccctcctcacctggagaactgggaaatgtggattctcagggaccgcgctgttcacgagctccaggctgtgctgctggccctggtcctggggcgctgagccgcatctgcaatagcacacctgcccggccacctgctgccgtgagcctttgctgctgaagcccctggggtcgcctctacctgatgaggatgtgcacccccattagggggctgctcatggcccttgcagtgatgtttgggacagcgatggcatttgcacccataccccggatcacctgggagcacagagaggtgcacctggtgcagtttcatgagccagacatctacaactactcagccttgctgctgagcgaggacaaggacaccttgtacataggtgcccgggaggcggtcttcgctgtgaacgcactcaacatctccgagaagcagcatgaggtgtattggaaggtctcagaagacaaaaaagcaaaatgtgcagaaaaggggaaatcaaaacagacagagtgcctcaactacatccgggtgctgcagccactcagcgccacttccctttacgtgtgtgggaccaacgcattccagccggcctgtgaccacctgaacttaacatcctttaagtttctggggaaaaatgaagatggcaaaggaagatgtccctttgacccagcacacagctacacatccgtcatggttgatggagaactttattcggggacgtcgtataattttttgggaagtgaacccatcatctcccgaaattcttcccacagtcctctgaggacagaatatgcaatcccttggctgaacgagcctagtttcgtgtttgctgacgtgatccgaaaaagcccagacagccccgacggcgaggatgacagggtctacttcttcttcacggaggtgtctgtggagtatgagtttgtgttcagggtgctgatcccacggatagcaagagtgtgcaagggggaccagggcggcctgaggaccttgcagaagaaatggacctccttcctgaaagcccgactcatctgctcccggccagacagcggcttggtcttcaatgtgctgcgggatgtcttcgtgctcaggtccccgggcctgaaggtgcctgtgttctatgcactcttcaccccacagctgaacaacgtggggctgtcggcagtgtgcgcctacaacctgtccacagccgaggaggtcttctcccacgggaagtacatgcagagcaccacagtggagcagtcccacaccaagtgggtgcgctataatggcccggtacccaagccgcggcctggagcgtgcatcgacagcgaggcacgggccgccaactacaccagctccttgaatttgccagacaagacgctgcagttcgttaaagaccaccctttgatggatgactcggtaaccccaatagacaacaggcccaggttaatcaagaaagatgtgaactacacccagatcgtggtggaccggacccaggccctggatgggactgtctatgatgtcatgtttgtcagcacagaccggggagctctgcacaaagccatcagcctcgagcacgctgttcacatcatcgaggagacccagctcttccaggactttgagccagtccagaccctgctgctgtcttcaaagaagggcaacaggtttgtctatgctggctctaactcgggcgtggtccaggccccgctggccttctgtgggaagcacggcacctgcgaggactgtgtgctggcgcgggacccctactgcgcctggagcccgcccacagcgacctgcgtggctctgcaccagaccgagagccccagcaggggtttgattcaggagatgagcggcgatgcttctgtgtgcccggataaaagtaaaggaagttaccggcagcattttttcaagcacggtggcacagcggaactgaaatgctcccaaaaatccaacctggcccgggtcttttggaagttccagaatggcgtgttgaaggccgagagccccaagtacggtcttatgggcagaaaaaacttgctcatcttcaacttgtcagaaggagacagtggggtgtaccagtgcctgtcagaggagagggttaagaacaaaacggtcttccaagtggtcgccaagcacgtcctggaagtgaaggtggttccaaagcccgtagtggcccccaccttgtcagttgttcagacagaaggtagtaggattgccaccaaagtgttggtggcatccacccaagggtcttctcccccaaccccagccgtgcaggccacctcctccggggccatcacccttcctcccaagcctgcgcccaccggcacatcctgcgaaccaaagatcgtcatcaacacggtcccccagctccactcggagaaaaccatgtatcttaagtccagcgacaaccgcctcctcatgtccctcttcctcttcttctttgttctcttcctctgcctctttttctacaactgctataagggatacctgcccagacagtgcttgaaattccgctcggccctactaattgggaagaagaagcccaagtcagatttctgtgaccgtgagcagagcctgaaggagacgttagtagagccagggagcttctcccagcagaatggggagcaccccaagccagccctggacaccggctatgagaccgagcaagacaccatcaccagcaaagtccccacggatagggaggactcacagaggatcgacgacctttctgccagggacaagccctttgacgtcaagtgtgagctgaagttcgctgactcagacgcagatggagactgaggccggctgtgcatccccgctggtgcctcggctgcgacgtgtccaggcgtggagagttttgtgtttctcctgttcagtatccgagtctcgtgcagtgctgcgtaggttagcccgcatcgtgcagacaacctcagtcctcttgtctattttctcttgggttgagcctgtgacttggtttctctttgtccttttggaaaaatgacaagcattgcatcccagtcttgtgttccgaagtcagtcggagtacttgaagaaggcccacgggcggcacggagttcctgagccctttctgtagtgggggaaaggtggctggacctctgttggctgagaagagcatcccttcagcttcccctccccgtagcagccactaaaagattatttaattccagattggaaatgacattttagtttatcagattggtaacttatcgcctgttgtccagattggcacgaaccttttcttccacttaattatttttttaggattttgctttgattgtgtttatgtcatgggtcatttttttttagttacagaagcagttgtgttaatatttagaagaagatgtatatcttccagattttgttatatatttggcataaaatacggcttacgttgcttaagattctcagggataaacttccttttgctaaatgcattctttctgcttttagaaatgtagacataaacactccccggagcccactcaccttttttctttttctttttttttttttaactttattccttgagggaagcattgtttttggagagattttctttctgtacttcgttttacttttctttttttttaacttttactctctcgaagaagaggaccttcccacatccacgaggtgggttttgagcaagggaaggtagcctggatgagctgagtggagccaggctggcccagagctgagatgggagtgcggtacaatctggagcccacagctgtcggtcagaacctcctgtgagacagatggaaccttcacaagggcgcctttggttctctgaacatctcctttctcttcttgcttcaattgcttacccactgcctgcccagactttctatccagcctcactgagctgcccactactggaagggaactgggcctcggtggccggggccgcgagctgtgaccacagcaccctcaagcatacggcgctgttcctgccactgtcctgaagatgtgaatgggtggtacgatttcaacactggttaatttcacactccatctccccgctttgtaaatacccatcgggaagagactttttttccatggtgaagagcaataaactctggatgtttgtgcgcgtgtgtggacagtcttatcttccagcatgataggatttgaccattttggtgtaaacatttgtgttttataagatttaccttgtttttatttttctactttgaattgtatacatttggaaagtacccaaataaatgagaagcttctatccttga

SEQ ID NO: 179758 - DNA, 433 bp, Homo sapiens
  Payload ID: 15426
  Gene Symbol: SEMA4D
  Gene Name: sema domain, immunoglobulin domain (Ig), transmembrane domain (TM) and short cytoplasmic domain, (semaphorin) 4D
  ENST ID: ENST00000420670
  CDS Start-End: 91-93
tttggtcgcggaggccgcggaccctgtgcactggacccggcgccgcgcactcagacagactctgctaacaccagatagtggaaagaaaccatgtgctgaaatgtttgacgacactgatggtttgcaaagatttctgaagacgtctttctagaaatgactggaaagtttcaagaggcataagatacagcatttcttctgaggccctgaagaagtatcaagtgggctttgacattgcggtggtgagagcgacccctcctcacctggagaactgggaaatgtggattctcagggaccgcgctgttcacgagctccaggctgtgctgctggccctggtcctggggcgctgagccgcatctgcaatagcacacctgcccggccacctgctgccgtgagcctttgctgctgaagcccctggggtcgcctctacctgatg

SEQ ID NO: 179759 - DNA, 3594 bp, Homo sapiens
  Payload ID: 15426
  Gene Symbol: SEMA4D
  Gene Name: sema domain, immunoglobulin domain (Ig), transmembrane domain (TM) and short cytoplasmic domain, (semaphorin) 4D
  Uniprot ID: Q92854
  ENST ID: ENST00000455551
  CDS Start-End: 585-2801
ctgcgcgcccgccccgcgcactccgtccccgcgccggcctcagcgctctcgcgcgccgcagcatcccagccgccgctgccgccgccgggcctccccgccaccccctccccggcccggccgcctcccgccgctgccgccgccgccgccgccgccattcctggcgcccgaactcgcccggccgggagccgccgcgggcaggacgcgcgctgcagactctgctaacaccagatagtggaaagaaaccatgtgctgaaatgtttgacgacactgatggtttgcaaagatttctgaagacgtctttctagaaatgactggaaagtttcaagaggcataagatacagcatttcttctgaggccctgaagaagtatcaagtgggctttgacattgcggtggtgagagcgacccctcctcacctggagaactgggaaatgtggattctcagggaccgcgctgttcacgagctccaggctgtgctgctggccctggtcctggggcgctgagccgcatctgcaatagcacacctgcccggccacctgctgccgtgagcctttgctgctgaagcccctggggtcgcctctacctgatgaggatgtgcacccccattagggggctgctcatggcccttgcagtgatgtttgggacagcgatggcatttgcacccataccccggatcacctgggagcacagagaggtgcacctggtgcagtttcatgagccagacatctacaactactcagccttgctgctgagcgaggacaaggacaccttgtacataggtgcccgggaggcggtcttcgctgtgaacgcactcaacatctccgagaagcagcatgaggtgtattggaaggtctcagaagacaaaaaagcaaaatgtgcagaaaaggggaaatcaaaacagacagagtgcctcaactacatccgggtgctgcagccactcagcgccacttccctttacgtgtgtgggaccaacgcattccagccggcctgtgaccacctgaacttaacatcctttaagtttctggggaaaaatgaagatggcaaaggaagatgtccctttgacccagcacacagctacacatccgtcatggttgatggagaactttattcggggacgtcgtataattttttgggaagtgaacccatcatctcccgaaattcttcccacagtcctctgaggacagaatatgcaatcccttggctgaacgagcctagtttcgtgtttgctgacgtgatccgaaaaagcccagacagccccgacggcgaggatgacagggtctacttcttcttcacggaggtgtctgtggagtatgagtttgtgttcagggtgctgatcccacggatagcaagagtgtgcaagggggaccagggcggcctgaggaccttgcagaagaaatggacctccttcctgaaagcccgactcatctgctcccggccagacagcggcttggtcttcaatgtgctgcgggatgtcttcgtgctcaggtccccgggcctgaaggtgcctgtgttctatgcactcttcaccccacagctgaacaacgtggggctgtcggcagtgtgcgcctacaacctgtccacagccgaggaggtcttctcccacgggaagtacatgcagagcaccacagtggagcagtcccacaccaagtgggtgcgctataatggcccggtacccaagccgcggcctggagcgtgcatcgacagcgaggcacgggccgccaactacaccagctccttgaatttgccagacaagacgctgcagttcgttaaagaccaccctttgatggatgactcggtaaccccaatagacaacaggcccaggttaatcaagaaagatgtgaactacacccagatcgtggtggaccggacccaggccctggatgggactgtctatgatgtcatgtttgtcagcacagaccggggagctctgcacaaagccatcagcctcgagcacgctgttcacatcatcgaggagacccagctcttccaggactttgagccagtccagaccctgctgctgtcttcaaagaagggcaacaggtttgtctatgctggctctaactcgggcgtggtccaggccccgctggccttctgtgggaagcacggcacctgcgaggactgtgtgctggcgcgggacccctactgcgcctggagcccgcccacagcgacctgcgtggctctgcaccagaccgagagccccagcaggggtttgattcaggagatgagcggcgatgcttctgtgtgcccggcctcgtctcctaagcccctccctcctcctggctcctcttccctgtcctgtctgggccatgtgggggacaggaggctttcctctccctggaccccctggccagcctcgggtgcggggcccgacagcagctcgagggtctccttgctgccgcccttcctgagtgaccaggcacagcacgtgcacgccctggggaacttctacctcttctgccaggccacaggtcctgcagacattcgctttgtctgggagaagaatgggcgagctctggagacctgtgtccctgtgcagacccatgcactgcccgatggcagggcccatgcactcagctggctgcaggacgccatcagggaaagcgctgagtatcgctgctctgtcctctcctcagcagggaacaagacttcgaaggtgcaggttgctgtgatgagacctgaagtgacccaccaggagaggtggaccagagagctctctgcctggagggctgtggctggggagcacgaccggatgatgcagagctggaggaaggcgtgggaaagctgtagcaaggacaccctgtagccaccaggaaggagtccctgacaccgacctcaaccccaacaagaccctgctgccactgaccacagccacccccggagaaggcctggtcccccacaactgtgaactgtcttgcccaagcctgctctgaacacagccattgggccaccacctgatgggcagaggcgggacagtggagaagcctggaacccaagtgggcctgtgacaggaactaagacttaaaaaattaggtgcttacctgggacagtaagttctgtctggcacaagcaggtaaccaggatggctaacaggctttgatagctgctcgtgaactaaaacagcagggtgtgtgcaggttcctcctctacggtcaggcagcaggctctgaaggctgatcctacaccgtcccagtgactccccttgacagagtgcccccaccccctaatagccaacagggttagcatggccagcacagatcgctgcttttattgatgcaaatcaagcctgctgcttctcctccctgcagacttagccaaggaactccaagatgcatgactgggacaagaaaaggtgagactccacatggaaatgccttgccctaaaccttgaatgactgtgagatgcgatctgggagtgcatctgtcaagtctttgtgttttcttcactaacctcagaatactgggctctattttatcaagcgctgcagtttatgcctctgtcccgtcaatgctcagcttctgcaacaggacaccaaacttgatgcagaaagccaaataggtcaattatgcaaatctcctggtgccatattaaatttctt

SEQ ID NO: 179760 - DNA, 602 bp, Homo sapiens
  Payload ID: 15426
  Gene Symbol: SEMA4D
  Gene Name: sema domain, immunoglobulin domain (Ig), transmembrane domain (TM) and short cytoplasmic domain, (semaphorin) 4D
  ENST ID: ENST00000433650
  CDS Start-End: 376-602
ggtagctggaggagcgggaagcactgactcctgaagaccctggcttcgctttcctgtgtccgttgggctgtccacttctaagactctctttgtcccccgctgccttccgtattcctcagcagatggacccggcatttcttctgaggccctgaagaagtatcaagtgggctttgacattgcggtggtgagagcgacccctcctcacctggagaactgggaaatgtggattctcagggaccgcgctgttcacgagctccaggctgtgctgctggccctggtcctggggcgctgagccgcatctgcaatagcacacctgcccggccacctgctgccgtgagcctttgctgctgaagcccctggggtcgcctctacctgatgaggatgtgcacccccattagggggctgctcatggcccttgcagtgatgtttgggacagcgatggcatttgcacccataccccggatcacctgggagcacagagaggtgcacctggtgcagtttcatgagccagacatctacaactactcagccttgctgctgagcgaggacaaggacaccttgtacataggtgcccgggaggcggtcttcgctgtgaacgcact

SEQ ID NO: 179761 - DNA, 5684 bp, Homo sapiens
  Payload ID: 15426
  Gene Symbol: SEMA4D
  Gene Name: sema domain, immunoglobulin domain (Ig), transmembrane domain (TM) and short cytoplasmic domain, (semaphorin) 4D
  Uniprot ID: Q92854
  ENST ID: ENST00000450295
  CDS Start-End: 778-3366
attacgtggctcctgtgttaatagaatcatggagggatcagcgtcggctcctgagcgtctgcagtcctgcacgtggctctggttttgcgattctgattctcttgatctaattgttggtgctgctactgcaccccacgatccctgtcttgagactgatctcccacactgcaaaggagtgacagccatgctatggaaccttgccacaccacggtggacaccgttctgtttggctgaaaaccagccatccaaaaataaaggaagatgaacagctctttagtgcttgtaattatgccatatgtgtttctgctttttccttctttgcctcatgaagatgaattttaaaggatacatatctggagctaatagacaattagatagtacttttttggttcacagactctgctaactggaatggcttattgtgcaagaaagtacacctggtcgggtcctggggctcatctctagcaccagcaaagatttctgaagacgtctttctagaaatgactggaaagtttcaagaggcataagatacagcatttcttctgaggccctgaagaagtatcaagtgggctttgacattgcggtggtgagagcgacccctcctcacctggagaactgggaaatgtggattctcagggaccgcgctgttcacgagctccaggctgtgctgctggccctggtcctggggcgctgagccgcatctgcaatagcacacctgcccggccacctgctgccgtgagcctttgctgctgaagcccctggggtcgcctctacctgatgaggatgtgcacccccattagggggctgctcatggcccttgcagtgatgtttgggacagcgatggcatttgcacccataccccggatcacctgggagcacagagaggtgcacctggtgcagtttcatgagccagacatctacaactactcagccttgctgctgagcgaggacaaggacaccttgtacataggtgcccgggaggcggtcttcgctgtgaacgcactcaacatctccgagaagcagcatgaggtgtattggaaggtctcagaagacaaaaaagcaaaatgtgcagaaaaggggaaatcaaaacagacagagtgcctcaactacatccgggtgctgcagccactcagcgccacttccctttacgtgtgtgggaccaacgcattccagccggcctgtgaccacctgaacttaacatcctttaagtttctggggaaaaatgaagatggcaaaggaagatgtccctttgacccagcacacagctacacatccgtcatggttgatggagaactttattcggggacgtcgtataattttttgggaagtgaacccatcatctcccgaaattcttcccacagtcctctgaggacagaatatgcaatcccttggctgaacgagcctagtttcgtgtttgctgacgtgatccgaaaaagcccagacagccccgacggcgaggatgacagggtctacttcttcttcacggaggtgtctgtggagtatgagtttgtgttcagggtgctgatcccacggatagcaagagtgtgcaagggggaccagggcggcctgaggaccttgcagaagaaatggacctccttcctgaaagcccgactcatctgctcccggccagacagcggcttggtcttcaatgtgctgcgggatgtcttcgtgctcaggtccccgggcctgaaggtgcctgtgttctatgcactcttcaccccacagctgaacaacgtggggctgtcggcagtgtgcgcctacaacctgtccacagccgaggaggtcttctcccacgggaagtacatgcagagcaccacagtggagcagtcccacaccaagtgggtgcgctataatggcccggtacccaagccgcggcctggagcgtgcatcgacagcgaggcacgggccgccaactacaccagctccttgaatttgccagacaagacgctgcagttcgttaaagaccaccctttgatggatgactcggtaaccccaatagacaacaggcccaggttaatcaagaaagatgtgaactacacccagatcgtggtggaccggacccaggccctggatgggactgtctatgatgtcatgtttgtcagcacagaccggggagctctgcacaaagccatcagcctcgagcacgctgttcacatcatcgaggagacccagctcttccaggactttgagccagtccagaccctgctgctgtcttcaaagaagggcaacaggtttgtctatgctggctctaactcgggcgtggtccaggccccgctggccttctgtgggaagcacggcacctgcgaggactgtgtgctggcgcgggacccctactgcgcctggagcccgcccacagcgacctgcgtggctctgcaccagaccgagagccccagcaggggtttgattcaggagatgagcggcgatgcttctgtgtgcccggataaaagtaaaggaagttaccggcagcattttttcaagcacggtggcacagcggaactgaaatgctcccaaaaatccaacctggcccgggtcttttggaagttccagaatggcgtgttgaaggccgagagccccaagtacggtcttatgggcagaaaaaacttgctcatcttcaacttgtcagaaggagacagtggggtgtaccagtgcctgtcagaggagagggttaagaacaaaacggtcttccaagtggtcgccaagcacgtcctggaagtgaaggtggttccaaagcccgtagtggcccccaccttgtcagttgttcagacagaaggtagtaggattgccaccaaagtgttggtggcatccacccaagggtcttctcccccaaccccagccgtgcaggccacctcctccggggccatcacccttcctcccaagcctgcgcccaccggcacatcctgcgaaccaaagatcgtcatcaacacggtcccccagctccactcggagaaaaccatgtatcttaagtccagcgacaaccgcctcctcatgtccctcttcctcttcttctttgttctcttcctctgcctctttttctacaactgctataagggatacctgcccagacagtgcttgaaattccgctcggccctactaattgggaagaagaagcccaagtcagatttctgtgaccgtgagcagagcctgaaggagacgttagtagagccagggagcttctcccagcagaatggggagcaccccaagccagccctggacaccggctatgagaccgagcaagacaccatcaccagcaaagtccccacggatagggaggactcacagaggatcgacgacctttctgccagggacaagccctttgacgtcaagtgtgagctgaagttcgctgactcagacgcagatggagactgaggccggctgtgcatccccgctggtgcctcggctgcgacgtgtccaggcgtggagagttttgtgtttctcctgttcagtatccgagtctcgtgcagtgctgcgtaggttagcccgcatcgtgcagacaacctcagtcctcttgtctattttctcttgggttgagcctgtgacttggtttctctttgtccttttggaaaaatgacaagcattgcatcccagtcttgtgttccgaagtcagtcggagtacttgaagaaggcccacgggcggcacggagttcctgagccctttctgtagtgggggaaaggtggctggacctctgttggctgagaagagcatcccttcagcttcccctccccgtagcagccactaaaagattatttaattccagattggaaatgacattttagtttatcagattggtaacttatcgcctgttgtccagattggcacgaaccttttcttccacttaattatttttttaggattttgctttgattgtgtttatgtcatgggtcatttttttttagttacagaagcagttgtgttaatatttagaagaagatgtatatcttccagattttgttatatatttggcataaaatacggcttacgttgcttaagattctcagggataaacttccttttgctaaatgcattctttctgcttttagaaatgtagacataaacactccccggagcccactcaccttttttctttttctttttttttttttaactttattccttgagggaagcattgtttttggagagattttctttctgtacttcgttttacttttctttttttttaacttttactctctcgaagaagaggaccttcccacatccacgaggtgggttttgagcaagggaaggtagcctggatgagctgagtggagccaggctggcccagagctgagatgggagtgcggtacaatctggagcccacagctgtcggtcagaacctcctgtgagacagatggaaccttcacaagggcgcctttggttctctgaacatctcctttctcttcttgcttcaattgcttacccactgcctgcccagactttctatccagcctcactgagctgcccactactggaagggaactgggcctcggtggccggggccgcgagctgtgaccacagcaccctcaagcatacggcgctgttcctgccactgtcctgaagatgtgaatgggtggtacgatttcaacactggttaatttcacactccatctccccgctttgtaaatacccatcgggaagagactttttttccatggtgaagagcaataaactctggatgtttgtgcgcgtgtgtggacagtcttatcttccagcatgataggatttgaccattttggtgtaaacatttgtgttttataagatttaccttgtttttatttttctactttgaattgtatacatttggaaagtacccaaataaatgagaagcttctatccttgatttggggaagacattccttagcggaggctgtgcagcctcccgcccctgcatggcccaggcgggacagctgggctcgctcttttctgtccgtttcctgctgtgttttgccctctctggcctgtgacgtgctcctggcgacttcttcctcagtgccctctcttttctgtcctctctgtctcacagcctcgtctcctaagcccctccctcctcctggctcctcttccctgtcctgtctgggccatgtgggggacaggaggctttcctctccctggaccccctggccagcctcgggtgcggggcccgacagcagctcgagggtctccttgctgccgcccttcctgagtgaccaggcacagcacgtgcacgccctggggaacttctacctcttctgccaggccacaggtgagttgggccctctctgtcccctgtgccctgtccatctgtctcctcccacaggtggggggcgggcgggggcatcctccacatccctccacatgttcctttaccttccttatctgtcctggctgcgtccctcgggttgagccgtttcacgctttcattgtgggtccatcccgagggaaactgtagacagtgtgaagccacttctagtgtacaggggtcaaccagtgttttctgtaaagggctagatatttaggccttgtgggctgcaggctgtgtcacagccactaagctctgctgttgtattgtaaaaccagccatagtcaatacacaacgagtggtcagggctgtgtgccagtaaaactttatttataaaaatgcacggtgggccagatttgccccaaaggccccagtttcccaacctgtggtatataggattgcttctccctt

SEQ ID NO: 179762 - DNA, 563 bp, Homo sapiens
  Payload ID: 15426
  Gene Symbol: SEMA4D
  Gene Name: sema domain, immunoglobulin domain (Ig), transmembrane domain (TM) and short cytoplasmic domain, (semaphorin) 4D
  ENST ID: ENST00000418828
  CDS Start-End: 386-563
agtcaggacagacgtcccaggcgagcagaggccctgcgtgaggatggggcggcggggccagatggtgtcctgagtatccatcctccctggtggctgaggacacgctgaccagcgtggggtcaggagcatggcccctggaaagcatttcttctgaggccctgaagaagtatcaagtgggctttgacattgcggtggtgagagcgacccctcctcacctggagaactgggaaatgtggattctcagggaccgcgctgttcacgagctccaggctgtgctgctggccctggtcctggggcgctgagccgcatctgcaatagcacacctgcccggccacctgctgccgtgagcctttgctgctgaagcccctggggtcgcctctacctgatgaggatgtgcacccccattagggggctgctcatggcccttgcagtgatgtttgggacagcgatggcatttgcacccataccccggatcacctgggagcacagagaggtgcacctggtgcagtttcatgagccagacatctacaactactcagccttgctgctgagcgaggacaagg

SEQ ID NO: 179763 - DNA, 826 bp, Homo sapiens
  Payload ID: 15426
  Gene Symbol: SEMA4D
  Gene Name: sema domain, immunoglobulin domain (Ig), transmembrane domain (TM) and short cytoplasmic domain, (semaphorin) 4D
  ENST ID: ENST00000540475
  CDS Start-End: 629-826
ggcaacccgctcgggtccccttccacactgtggaagctttgttctttcgctcttgctactgctagctctttgggtccacgctgcttttatgagctgtaacactcaccgcgaagatctgcagcttcactcctgagcccagcgagaccacgagcccaccgggaggaacgaacaactccagacgcgctgccttaagagctgtaacactcaccgtgaaggtctgcagcttcactcccgagccagcgagaccacgaacccaccagaaggaagaaactctgaacacatctgaacatcagaagggacagactccagacgcgccaccactctgctaacaccagatagtggaaagaaaccatgtgctgaaatgtttgacgacactgatggtttgcatttcttctgaggccctgaagaagtatcaagtgggctttgacattgcggtggtgagagcgacccctcctcacctggagaactgggaaatgtggattctcagggaccgcgctgttcacgagctccaggctgtgctgctggccctggtcctggggcgctgagccgcatctgcaatagcacacctgcccggccacctgctgccgtgagcctttgctgctgaagcccctggggtcgcctctacctgatgaggatgtgcacccccattagggggctgctcatggcccttgcagtgatgtttgggacagcgatggcatttgcacccataccccggatcacctgggagcacagagaggtgcacctggtgcagtttcatgagccagacatctacaactactcagccttgctgctgagcgaggacaaggacaccttgtacataggtgcc

SEQ ID NO: 179764 - DNA, 2710 bp, Homo sapiens
  Payload ID: 15426
  Gene Symbol: SEMA4D
  Gene Name: sema domain, immunoglobulin domain (Ig), transmembrane domain (TM) and short cytoplasmic domain, (semaphorin) 4D
  ENST ID: ENST00000537934
  CDS Start-End: 767-2413
ggcaacccgctcgggtccccttccacactgtggaagctttgttctttcgctcttgctactgctagctctttgggtccacgctgcttttatgagctgtaacactcaccgcgaagatctgcagcttcactcctgagcccagcgagaccacgagcccaccgggaggaacgaacaactccagacgcgctgccttaagagctgtaacactcaccgtgaaggtctgcagcttcactcccgagccagcgagaccacgaacccaccagaaggaagaaactctgaacacatctgaacatcagaagggacagactccagacgcgccaccactctgctaacaccagatagtggaaagaaaccatgtgctgaaatgtttgacgacactgatggtttgactctgctaactggaatggcttattgtgcaagaaagtacacctggtcgggtcctggggctcatctctagcaccagcaaagatttctgaagacgtctttctagaaatgactggaaagtttcaagaggcataagatacagcatttcttctgaggccctgaagaagtatcaagtgggctttgacattgcggtggtgagagcgacccctcctcacctggagaactgggaaatgtggattctcagggaccgcgctgttcacgagctccaggctgtgctgctggccctggtcctggggcgctgagccgcatctgcaatagcacacctgcccggccacctgctgccgtgagcctttgctgctgaagcccctggggtcgcctctacctgatgaggatgtgcacccccattagggggctgctcatggcccttgcagtgatgtttgggacagcgatggcatttgcacccataccccggatcacctgggagcacagagaggtgcacctggtgcagtttcatgagccagacatctacaactactcagccttgctgctgagcgaggacaaggacaccttgtacataggtgcccgggaggcggtcttcgctgtgaacgcactcaacatctccgagaagcagcatgaggtgtattggaaggtctcagaagacaaaaaagcaaaatgtgcagaaaaggggaaatcaaaacagacagagtgcctcaactacatccgggtgctgcagccactcagcgccacttccctttacgtgtgtgggaccaacgcattccagccggcctgtgaccacctgaacttaacatcctttaagtttctggggaaaaatgaagatggcaaaggaagatgtccctttgacccagcacacagctacacatccgtcatggttgatggagaactttattcggggacgtcgtataattttttgggaagtgaacccatcatctcccgaaattcttcccacagtcctctgaggacagaatatgcaatcccttggctgaacgagcctagtttcgtgtttgctgacgtgatccgaaaaagcccagacagccccgacggcgaggatgacagggtctacttcttcttcacggaggtgtctgtggagtatgagtttgtgttcagggtgctgatcccacggatagcaagagtgtgcaagggggaccagggcggcctgaggaccttgcagaagaaatggacctccttcctgaaagcccgactcatctgctcccggccagacagcggcttggtcttcaatgtgctgcgggatgtcttcgtgctcaggtccccgggcctgaaggtgcctgtgttctatgcactcttcaccccacagctgaacaacgtggggctgtcggcagtgtgcgcctacaacctgtccacagccgaggaggtcttctcccacgggaagtacatgcagagcaccacagtggagcagtcccacaccaagtgggtgcgctataatggcccggtacccaagccgcggcctggagcgtgcatcgacagcgaggcacgggccgccaactacaccagctccttgaatttgccagacaagacgctgcagttcgttaaagaccaccctttgatggatgactcggtaaccccaatagacaacaggcccaggttaatcaagaaagatgtgaactacacccagatcgtggtggaccggacccaggccctggatgggactgtctatgatgtcatgtttgtcagcacagaccggggagctctgcacaaagccatcagcctcgagcacgctgttcacatcatcgaggagacccagctcttccaggactttgagccagtccagaccctgctgctgtcttcaaagaaggtcctgcagacattcgctttgtctgggagaagaatgggcgagctctggagacctgtgtccctgtgcagacccatgcactgcccgatggcagggcccatgcactcagctggctgcaggacgccatcagggaaagcgctgagtatcgctgctctgtcctctcctcagcagggaacaagacttcgaaggtgcaggttgctgtgatgagacctgaagtgacccaccaggagaggtggaccagagagctctctgcctggagggctgtggctggggagcacgaccggatgatgcagagctggaggaaggcgtgggaaagctgtagcaaggacaccctgtagccaccaggaaggagtccctgacaccgacctcaaccccaacaagaccctgctgccactgaccacagccacccccggagaaggcctggtcccccacaactgtgaactgtcttgcccaagcctgctctgaacacagccattgggccaccacctgatgggcagaggc

SEQ ID NO: 179765 - DNA, 2177 bp, Homo sapiens
  Payload ID: 15427
  Gene Symbol: SEMA4F
  Gene Name: sema domain, immunoglobulin domain (Ig), transmembrane domain (TM) and short cytoplasmic domain, (semaphorin) 4F
  Uniprot ID: O95754
  ENST ID: ENST00000339773
  CDS Start-End: 98-1945
gagccgagaggacccgagtggggccgaggccagtagccccggggccctgagcagaggccgtagcttgcgccgcacccgcggccaggcggagccaaagatgccggcctctgctgcgcggccccgcccgggtcccgggcagcctacagcctcgcccttcccgctactgctgctggcggtgctgagcggcccggtatccggccgcgtcccccgctcggtgcccagaacctcgcttccaatctctgaggctgactcctgtctcacccggttcgcagtccctcacacatacaattactctgttctccttgtggatcctgcctcccacacactttatgttggcgcccgggacaccatcttcgctttatccctgcccttctcaggggagagaccccgcaggattgactggatggttcctgaggctcacagacagaactgtaggaagaaaggcaagaaagagggggacctcgggggccggaagaccctccagcagagatggacgacgtttttgaaagctgacctgctctgtccagggcctgagcatggccgggcctccagtgtcctgcaggatgttgctgtgcttcgacctgagcttggggcagggactcccatcttttatggcatcttttcttcccagtgggagggggctactatctctgctgtctgtgccttccgaccacaagacattcggacagtgctgaatggtcccttcagagaactaaaacatgactgcaacagaggactgcctgtcgtggacaatgatgtgccccagcccagacctggagagtgcatcaccaacaacatgaagctccggcactttggctcatctctctccctgcctgaccgcgtactcaccttcatccgggaccacccactcatggacaggccagtgtttccagctgatggccaccccctgctggtcactacagatacagcctatctcagagtcgtggcccacagggtgaccagcctctcagggaaagagtatgatgtgctctacctggggacagaggatggacacctccaccgagcagtgcggatcggagctcagctcagcgttcttgaagatctggccttattcccagagccacagccagttgagaacatgaaattgtaccacagctggctcctggttggctcccgtactgaggtgacacaagtgaatacaaccaactgtggccgtctccagagctgctcagagtgcatcctggcccaggacccagtctgtgcctggagcttccggctggatgagtgtgtggcccatgccggggagcaccgagggttggtccaagacatagagtcagcagatgtctcctctttgtgtcctaaagagcctggagaacgtccagtagtgtttgaagttcccgtggctacagctgcgcatgtggtcttgccatgttctccaagctcagcatgggcatcctgtgtgtggcaccagcccagtggagtgactgcactcaccccccggcgggatggactggaggtggtggtgaccccaggggccatgggcgcttatgcctgtgaatgtcaggagggtggggcagcccatgtggtagcagcttacagcttggtatggggcagccagcgagatgctccgagccgggcccacacagtgggggcgggactggctggcttcttcttggggattctcgcagcatccctgactctcattctgattggtcggcgtcagcagcgacggcgacagagggaacttctggctagagacaaggtgggcctggacctgggggctccaccttctgggaccacaagctacagccaagaccctccctccccctctcctgaagatgagcggttgccgctggccctggccaagaggggcagtggctttggtggattctcaccacccttcctgcttgatccttgcccaagcccagcccacattcggctaactggggctcctctagccacatgtgatgaaacatccatctagagctgggcaaatgaccactagtgtataagtgatcactggaacggagtgaccactgagatgctgggggtcactgggcctggaagaccatcccagcctctgagttctctttgagtatgagtgattacttggattttagtatctgttctctctgagcctggatgggcttggggccagacctttgcctgattcctgattcccatgagaaatcagaactgctttctgcagcaaatca

SEQ ID NO: 179766 - DNA, 4312 bp, Homo sapiens
  Payload ID: 15427
  Gene Symbol: SEMA4F
  Gene Name: sema domain, immunoglobulin domain (Ig), transmembrane domain (TM) and short cytoplasmic domain, (semaphorin) 4F
  Uniprot ID: O95754
  ENST ID: ENST00000357877
  CDS Start-End: 150-2462
gggggcggagccgggcggtgtttcatccctcagcctcaggctgagccggaccgagccgagaggacccgagtggggccgaggccagtagccccggggccctgagcagaggccgtagcttgcgccgcacccgcggccaggcggagccaaagatgccggcctctgctgcgcggccccgcccgggtcccgggcagcctacagcctcgcccttcccgctactgctgctggcggtgctgagcggcccggtatccggccgcgtcccccgctcggtgcccagaacctcgcttccaatctctgaggctgactcctgtctcacccggttcgcagtccctcacacatacaattactctgttctccttgtggatcctgcctcccacacactttatgttggcgcccgggacaccatcttcgctttatccctgcccttctcaggggagagaccccgcaggattgactggatggttcctgaggctcacagacagaactgtaggaagaaaggcaagaaagaggacgaatgtcacaattttgtccagattctcgccattgccaatgcctctcacctcctcacttgtggcaccttcgcttttgatccgaagtgcggggttattgatgtgtccaggttccagcaggttgaaagacttgagagtggccgggggaaatgtccttttgagccagctcagcggtcagcagctgtaatggctgggggggtcctctatgctgccactgtgaaaaactacctggggacggagccaattatcaccagagcagtgggtcgtgccgaggactggattcggacagataccttgccttcctggctgaacgccccagcctttgtcgcagccgtggccttgagcccagccgaatggggggatgaagatggagacgacgaaatctacttcttctttacggagacttcccgagcatttgactcatacgagcgcattaaagtcccacgggtggcccgtgtgtgtgcgggggacctcgggggccggaagaccctccagcagagatggacgacgtttttgaaagctgacctgctctgtccagggcctgagcatggccgggcctccagtgtcctgcaggatgttgctgtgcttcgacctgagcttggggcagggactcccatcttttatggcatcttttcttcccagtgggagggggctactatctctgctgtctgtgccttccgaccacaagacattcggacagtgctgaatggtcccttcagagaactaaaacatgactgcaacagaggactgcctgtcgtggacaatgatgtgccccagcccagacctggagagtgcatcaccaacaacatgaagctccggcactttggctcatctctctccctgcctgaccgcgtactcaccttcatccgggaccacccactcatggacaggccagtgtttccagctgatggccaccccctgctggtcactacagatacagcctatctcagagtcgtggcccacagggtgaccagcctctcagggaaagagtatgatgtgctctacctggggacagaggatggacacctccaccgagcagtgcggatcggagctcagctcagcgttcttgaagatctggccttattcccagagccacagccagttgagaacatgaaattgtaccacagctggctcctggttggctcccgtactgaggtgacacaagtgaatacaaccaactgtggccgtctccagagctgctcagagtgcatcctggcccaggacccagtctgtgcctggagcttccggctggatgagtgtgtggcccatgccggggagcaccgagggttggtccaagacatagagtcagcagatgtctcctctttgtgtcctaaagagcctggagaacgtccagtagtgtttgaagttcccgtggctacagctgcgcatgtggtcttgccatgttctccaagctcagcatgggcatcctgtgtgtggcaccagcccagtggagtgactgcactcaccccccggcgggatggactggaggtggtggtgaccccaggggccatgggcgcttatgcctgtgaatgtcaggagggtggggcagcccatgtggtagcagcttacagcttggtatggggcagccagcgagatgctccgagccgggcccacacagtgggggcgggactggctggcttcttcttggggattctcgcagcatccctgactctcattctgattggtcggcgtcagcagcgacggcgacagagggaacttctggctagagacaaggtgggcctggacctgggggctccaccttctgggaccacaagctacagccaagaccctccctccccctctcctgaagatgagcggttgccgctggccctggccaagaggggcagtggctttggtggattctcaccacccttcctgcttgatccttgcccaagcccagcccacattcggctaactggggctcctctagccacatgtgatgaaacatccatctagagctgggcaaatgaccactagtgtataagtgatcactggaacggagtgaccactgagatgctgggggtcactgggcctggaagaccatcccagcctctgagttctctttgagtatgagtgattacttggattttagtatctgttctctctgagcctggatgggcttggggccagacctttgcctgattcctgattcccatgagaaatcagaactgctttctgcagcaaatcagggcttccccctaacatctgaactcctgtaaaccttcatccctggccccctatcttgggcccattagttttggggatggggcacagggcatagctatgactttgctttctggttggagcctggccggaaggaagagccctggaggtggttgggggcaaatgtgccctgagtccttggggtggttctgcttattcttcaagtttatctgaatctgtggggagtgcatgatccccatgttgcaatatggagtctctgccctgagatcttccccatctcagttttccttccatgaaagagtacgtgtaaatacatagtgttcataagagacctggccacatgtgcatgaatgactgggccgatgcttaggaatatttatgagggatggggagggagacaattggaatgggggcgttgcctgcagaactttagaccctgtagccatagagggaatggcgttcctttctaaaaggaactgaaacactgcccctctccccattgccccacaaccttactctaaatttgagtagagaaaagctcctaaagtgaccttccgggtgggaagggcagcagtacacatgaccccatccttttctttgtttttaccccctggctgccaccactgccatgtcacagctgctttctctggctggagtgtaggctgtaccccatttccttggctcccattaaaaatcaacaacattctaatgattagggaacaacagaaggggaacagtcataggatatacgagcagtataaagatacgtttgcaatcagtgactactcagggtgacacccttgccctaaagcaggagtcccccctacctggggtccatggactccctgaaattgtatgcaaaatgttgtttgtacatgtgtgtctgtatgtctctgtggggaggttttatggcttttgtcagattttcaaggccttaacaaagttaaaggaccactgccctgaggttactgcactgaggccaagttaggatggcatcactctgtggcagctctccctggacttgccctgcctggaacagggtgatttgctggaatggagttaccactgagatgccaaaggttgctgggtctggaagactgttgtggcctctcagttctctttgagtctgactgactgtggccagtccctggactggtagctgctggaggccttcttgtttctccagtccctggaagctgagctctatgtgtatttgatgacattgtcagctcttaccaaacgtcaagacctcttcctgcttgaccactcgcacatggctctaggcttctcctgctgagtcctggtcttggcctgtgaatgtgcctcgttcatccctggtgcttgagcccctcaagctccagtcaatgatccagtccttcccctttgaagttttctgctctactttccttggcagcagcctgtgaactactcaaaagagtccccttgggtttggaattatcagtggctttgccactagtaaatgtgtgatcttcggcaagtaacctaacctagggacatcagtttactcatctgcgaagtggggataataaaacctacctcagggttgcttcaaggattaaatgagaaaatatgtcaacaataaagacctgtctgtaccaata

SEQ ID NO: 179767 - DNA, 531 bp, Homo sapiens
  Payload ID: 15427
  Gene Symbol: SEMA4F
  Gene Name: sema domain, immunoglobulin domain (Ig), transmembrane domain (TM) and short cytoplasmic domain, (semaphorin) 4F
  ENST ID: ENST00000416236
  CDS Start-End: 67-273
agtagccccggggccctgagcagaggccgtagcttgcgccgcacccgcggccaggcggagccaaagatgccggcctctgctgcgcggccccgcccgggtcccgggcagcctacagcctcgcccttcccgctactgctgctggcggtgctgagcggcccggtatccggccgcgtcccccgctcggtgcccagaacctcgcttccaatctctgtcttcagaaggaaaaatagaggagggggatatgatcctttgaaaagatgtggaagaagctaggagacgtcacaaggttaaaagtgatcattggggcgattcacattttagactctgctgagaggctgactcctgtctcacccggttcgcagtccctcacacatacaattactctgttctccttgtggatcctgcctcccacacactttatgttggcgcccgggacaccatcttcgctttatccctgcccttctcaggggagagaccccgcaggattgactggatggttcctgaggctcacagacagaactgtaggaagaa

SEQ ID NO: 179768 - DNA, 578 bp, Homo sapiens
  Payload ID: 15427
  Gene Symbol: SEMA4F
  Gene Name: sema domain, immunoglobulin domain (Ig), transmembrane domain (TM) and short cytoplasmic domain, (semaphorin) 4F
  ENST ID: ENST00000434486
  CDS Start-End: 85-578
ccgagtggggccgaggccagtagccccggggccctgagcagaggccgtagcttgcgccgcacccgcggccaggcggagccaaagatgccggcctctgctgcgcggccccgcccgggtcccgggcagcctacagcctcgcccttcccgctactgctgctggcggtgctgagcggcccggtatccggccgcgtcccccgctcggtgcccagaacctcgcttccaatctctgaggctgactcctgtctcacccggttcgcagtccctcacacatacaattactctgttctccttgtggatcctgcctcccacacactttatgttggcgcccgggacaccatcttcgctttatccctgcccttctcaggggagagaccccgcaggattgactggatggttcctgaggctcacagacagaactgtaggaagaaaggcaagaaagaggatgtgtccaggttccagcaggttgaaagacttgagagtggccgggggaaatgtccttttgagccagctcagcggtcagcagctgtaatggctgggggggtcctctatgctgccactgtgaaaaactacctggggac

SEQ ID NO: 179769 - DNA, 602 bp, Homo sapiens
  Payload ID: 15427
  Gene Symbol: SEMA4F
  Gene Name: sema domain, immunoglobulin domain (Ig), transmembrane domain (TM) and short cytoplasmic domain, (semaphorin) 4F
  ENST ID: ENST00000453930
  CDS Start-End: 67-602
agtagccccggggccctgagcagaggccgtagcttgcgccgcacccgcggccaggcggagccaaagatgccggcctctgctgcgcggccccgcccgggtcccgggcagcctacagcctcgcccttcccgctactgctgctggcggtgctgagcggcccggtatccggccgcgtcccccgctcggtgcccagaacctcgcttccaatctctgaggctgactcctgtctcacccggttcgcagtccctcacacatacaattactctgttctccttgtggatcctgcctcccacacactttatgttggcgcccgggacaccatcttcgctttatccctgcccttctcaggggagagaccccgcaggattgactggatggttcctgaggctcacagacagaactgtaggaagaaaggcaagaaagagggggacctcgggggccggaagaccctccagcagagatggacgacgtttttgaaagctgacctgctctgtccagggcctgagcatggccgggcctccagtgtcctgcaggatgttgctgtgcttcgacctgagcttggggcagggactcccatcttttatggcatcttttcttcccagtg

SEQ ID NO: 179770 - DNA, 577 bp, Homo sapiens
  Payload ID: 15427
  Gene Symbol: SEMA4F
  Gene Name: sema domain, immunoglobulin domain (Ig), transmembrane domain (TM) and short cytoplasmic domain, (semaphorin) 4F
  ENST ID: ENST00000458114
  CDS Start-End: 101-250
accgagccgagaggacccgagtggggccgaggccagtagccccggggccctgagcagaggccgtagcttgcgccgcacccgcggccaggcggagccaaagatgccggcctctgctgcgcggccccgcccgggtcccgggcagcctacagcctcgcccttcccgctactgctgctggcggtgctgagcggcccggtatccggccgcgtcccccgctcggtgcccagaacctcgcttccaatctctgattgactggatggttcctgaggctcacagacagaactgtaggaagaaaggcaagaaagagggggggtcctctatgctgccactgtgaaaaactacctggggacggagccaattatcaccagagcagtgggtcgtgccgaggactggattcggacagataccttgccttcctggctgaacgccccagcctttgtcgcagccgtggccttgagcccagccgaatggggggatgaagatggagacgacgaaatctacttcttctttacggagacttcccgagcatttgactcatacgagcgcattaaagtcccacgggtggcccgtgtgtgtgcg

SEQ ID NO: 179771 - DNA, 2672 bp, Homo sapiens
  Payload ID: 15427
  Gene Symbol: SEMA4F
  Gene Name: sema domain, immunoglobulin domain (Ig), transmembrane domain (TM) and short cytoplasmic domain, (semaphorin) 4F
  ENST ID: ENST00000446927
  CDS Start-End: 16-399
caggcggagccaaagatgccggcctctgctgcgcggccccgcccgggtcccgggcagcctacagcctcgcccttcccgctactgctgctggcggtgctgagcggcccggtatccggccgcgtcccccgctcggtgcccagaacctcgcttccaatctctgaggctgactcctgtctcacccggttcgcagtccctcacacatacaattactctgttctccttgtggatcctgcctcccacacactttatgttggcgcccgggacaccatcttcgctttatccctgcccttctcaggggagagaccccgcaggattgactggatggttcctgaggctcacagacagaactgtaggaagaaaggcaagaaagagggggggtcctctatgctgccactgtgaaaaactacctggggacggagccaattatcaccagagcagtgggtcgtgccgaggactggattcggacagataccttgccttcctggctgaacgccccagcctttgtcgcagccgtggccttgagcccagccgaatggggggatgaagatggagacgacgaaatctacttcttctttacggagacttcccgagcatttgactcatacgagcgcattaaagtcccacgggtggcccgtgtgtgtgcgggggacctcgggggccggaagaccctccagcagagatggacgacgtttttgaaagctgacctgctctgtccagggcctgagcatggccgggcctccagtgtcctgcaggatgttgctgtgcttcgacctgagcttggggcagggactcccatcttttatggcatcttttcttcccagtgggagggggctactatctctgctgtctgtgccttccgaccacaagacattcggacagtgctgaatggtcccttcagagaactaaaacatgactgcaacagaggactgcctgtcgtggacaatgatgtgccccagcccagacctggagagtgcatcaccaacaacatgaagctccggcactttggctcatctctctccctgcctgaccgcgtactcaccttcatccgggaccacccactcatggacaggccagtgtttccagctgatggccaccccctgctggtcactacagatacagcctatctcagagtcgtggcccacagggtgaccagcctctcagggaaagagtatgatgtgctctacctggggacagaggatggacacctccaccgagcagtgcggatcggagctcagctcagcgttcttgaagatctggccttattcccagagccacagccagttgagaacatgaaattgtaccacagctggctcctggttggctcccgtactgaggtgacacaagtgaatacaaccaactgtggccgtctccagagctgctcagagtgcatcctggcccaggacccagtctgtgcctggagcttccggctggatgagtgtgtggcccatgccggggagcaccgagggttggtccaagacatagagtcagcagatgtctcctctttgtgtcctaaagagcctggagaacgtccagtagtgtttgaagttcccgtggctacagctgcgcatgtggtcttgccatgttctccaagctcagcatgggcatcctgtgtgtggcaccagcccagtggagtgactgcactcaccccccggcgggatggactggaggtggtggtgaccccaggggccatgggcgcttatgcctgtgaatgtcaggagggtggggcagcccatgtggtagcagcttacagcttggtatggggcagccagcgagatgctccgagccgggcccacacagtgggggcgggactggctggcttcttcttggggattctcgcagcatccctgactctcattctgattggtcggcgtcagcagcgacggcgacagagggaacttctggctagagacaaggtgggcctggacctgggggctccaccttctgggaccacaagctacagccaagaccctccctccccctctcctgaagatgagcggttgccgctggccctggccaagaggggcagtggctttggtggattctcaccacccttcctgcttgatccttgcccaagcccagcccacattcggctaactggggctcctctagccacatgtgatgaaacatccatctagagctgggcaaatgaccactagtgtataagtgatcactggaacggagtgaccactgagatgctgggggtcactgggcctggaagaccatcccagcctctgagttctctttgagtatgagtgattacttggattttagtatctgttctctctgagcctggatgggcttggggccagacctttgcctgattcctgattcccatgagaaatcagaactgctttctgcagcaaatcagggcttccccctaacatctgaactcctgtaaaccttcatccctggccccctatcttgggcccattagttttggggatggggcacagggcatagctatgactttgctttctggttggagcctggccggaaggaagagccctggaggtggttgggggcaaatgtgccctgagtccttggggtggttctgcttattcttcaagtttatctgaatctgtggggagtgcatgatccccatgttgcaatatggagtctctgccctgagatcttccccatctcagttttccttccatgaaagagtacgtgta

SEQ ID NO: 179772 - DNA, 2192 bp, Homo sapiens
  Payload ID: 15427
  Gene Symbol: SEMA4F
  Gene Name: sema domain, immunoglobulin domain (Ig), transmembrane domain (TM) and short cytoplasmic domain, (semaphorin) 4F
  ENST ID: ENST00000420077
  CDS Start-End: 126-608
atccctcagcctcaggctgagccggaccgagccgagaggacccgagtggggccgaggccagtagccccggggccctgagcagaggccgtagcttgcgccgcacccgcggccaggcggagccaaagatgccggcctctgctgcgcggccccgcccgggtcccgggcagcctacagcctcgcccttcccgctactgctgctggcggtgctgagcggcccggtatccggccgcgtcccccgctcggtgcccagaacctcgcttccaatctctgaggctgactcctgtctcacccggttcgcagtccctcacacatacaattactctgttctccttgtggatcctgcctcccacacactttatgttggcgcccgggacaccatcttcgctttatccctgcccttctcaggggagagaccccgcaggattgactggatggttcctgaggctcacagacagaactgtaggaagaaaggcaagaaagaggacgaatgtcacaattttgtccagattctcgccattgccaatgcctctcacctcctcacttgtggcaccttcgcttttgatccgaagtgcggggttattggggggtcctctatgctgccactgtgaaaaactacctggggacggagccaattatcaccagagcagtgggtcgtgccgaggactggattcggacagataccttgccttcctggctgaacgggggacctcgggggccggaagaccctccagcagagatggacgacgtttttgaaagctgacctgctctgtccagggcctgagcatggccgggcctccagtgtcctgcaggatgttgctgtgcttcgacctgagcttggggcagggactcccatcttttatggcatcttttcttcccagtgggagggggctactatctctgctgtctgtgccttccgaccacaagacattcggacagtgctgaatggtcccttcagagaactaaaacatgactgcaacagaggactgcctgtcgtggacaatgatgtgccccagcccagacctggagagtgcatcaccaacaacatgaagctccggcactttggctcatctctctccctgcctgaccgcgtactcaccttcatccgggaccacccactcatggacaggccagtgtttccagctgatggccaccccctgctggtcactacagatacagcctatctcagagtcgtggcccacagggtgaccagcctctcagggaaagagtatgatgtgctctacctggggacagaggatggacacctccaccgagcagtgcggatcggagctcagctcagcgttcttgaagatctggccttattcccagagccacagccagttgagaacatgaaattgtaccacagctggctcctggttggctcccgtactgaggtgacacaagtgaatacaaccaactgtggccgtctccagagctgctcagagtgcatcctggcccaggacccagtctgtgcctggagcttccggctggatgagtgtgtggcccatgccggggagcaccgagggttggtccaagacatagagtcagcagatgtctcctctttgtgtcctaaagagcctggagaacgtccagtagtgtttgaagttcccgtggctacagctgcgcatgtggtcttgccatgttctccaagctcagcatgggcatcctgtgtgtggcaccagcccagtggagtgactgcactcaccccccggcgggatggactggaggtggtggtgaccccaggggccatgggcgcttatgcctgtgaatgtcaggagggtggggcagcccatgtggtagcagcttacagcttggtatggggcagccagcgagatgctccgagccgggcccacacagtgggggcgggactggctggcttcttcttggggattctcgcagcatccctgactctcattctgattggtcggcgtcagcagcgacggcgacagagggaacttctggctagagacaaggtgggcctggacctgggggctccaccttctgggaccacaagctacagccaagaccctccctccccctctcctgaagatgagcggttgccgctggccctggccaagaggggcagtggctttggtggattctcaccacccttcctgcttgatccttgcccaagcccagcccacattcggctaactggggctcctctagccacatgtgatgaaacatccatctag

SEQ ID NO: 179773 - DNA, 6007 bp, Homo sapiens
  Payload ID: 15427
  Gene Symbol: SEMA4F
  Gene Name: sema domain, immunoglobulin domain (Ig), transmembrane domain (TM) and short cytoplasmic domain, (semaphorin) 4F
  ENST ID: ENST00000611975
  CDS Start-End: 150-2363
gggggcggagccgggcggtgtttcatccctcagcctcaggctgagccggaccgagccgagaggacccgagtggggccgaggccagtagccccggggccctgagcagaggccgtagcttgcgccgcacccgcggccaggcggagccaaagatgccggcctctgctgcgcggccccgcccgggtcccgggcagcctacagcctcgcccttcccgctactgctgctggcggtgctgagcggcccggtatccggccgcgtcccccgctcggtgcccagaacctcgcttccaatctctgaggctgactcctgtctcacccggttcgcagtccctcacacatacaattactctgttctccttgtggatcctgcctcccacacactttatgttggcgcccgggacaccatcttcgctttatccctgcccttctcaggggagagaccccgcaggattgactggatggttcctgaggctcacagacagaactgtaggaagaaaggcaagaaagaggatgtgtccaggttccagcaggttgaaagacttgagagtggccgggggaaatgtccttttgagccagctcagcggtcagcagctgtaatggctgggggggtcctctatgctgccactgtgaaaaactacctggggacggagccaattatcaccagagcagtgggtcgtgccgaggactggattcggacagataccttgccttcctggctgaacgccccagcctttgtcgcagccgtggccttgagcccagccgaatggggggatgaagatggagacgacgaaatctacttcttctttacggagacttcccgagcatttgactcatacgagcgcattaaagtcccacgggtggcccgtgtgtgtgcgggggacctcgggggccggaagaccctccagcagagatggacgacgtttttgaaagctgacctgctctgtccagggcctgagcatggccgggcctccagtgtcctgcaggatgttgctgtgcttcgacctgagcttggggcagggactcccatcttttatggcatcttttcttcccagtgggagggggctactatctctgctgtctgtgccttccgaccacaagacattcggacagtgctgaatggtcccttcagagaactaaaacatgactgcaacagaggactgcctgtcgtggacaatgatgtgccccagcccagacctggagagtgcatcaccaacaacatgaagctccggcactttggctcatctctctccctgcctgaccgcgtactcaccttcatccgggaccacccactcatggacaggccagtgtttccagctgatggccaccccctgctggtcactacagatacagcctatctcagagtcgtggcccacagggtgaccagcctctcagggaaagagtatgatgtgctctacctggggacagaggatggacacctccaccgagcagtgcggatcggagctcagctcagcgttcttgaagatctggccttattcccagagccacagccagttgagaacatgaaattgtaccacagctggctcctggttggctcccgtactgaggtgacacaagtgaatacaaccaactgtggccgtctccagagctgctcagagtgcatcctggcccaggacccagtctgtgcctggagcttccggctggatgagtgtgtggcccatgccggggagcaccgagggttggtccaagacatagagtcagcagatgtctcctctttgtgtcctaaagagcctggagaacgtccagtagtgtttgaagttcccgtggctacagctgcgcatgtggtcttgccatgttctccaagctcagcatgggcatcctgtgtgtggcaccagcccagtggagtgactgcactcaccccccggcgggatggactggaggtggtggtgaccccaggggccatgggcgcttatgcctgtgaatgtcaggagggtggggcagcccatgtggtagcagcttacagcttggtatggggcagccagcgagatgctccgagccgggcccacacagtgggggcgggactggctggcttcttcttggggattctcgcagcatccctgactctcattctgattggtcggcgtcagcagcgacggcgacagagggaacttctggctagagacaaggtgggcctggacctgggggctccaccttctgggaccacaagctacagccaagaccctccctccccctctcctgaagatgagcggttgccgctggccctggccaagaggggcagtggctttggtggattctcaccacccttcctgcttgatccttgcccaagcccagcccacattcggctaactggggctcctctagccacatgtgatgaaacatccatctagagctgggcaaatgaccactagtgtataagtgatcactggaacggagtgaccactgagatgctgggggtcactgggcctggaagaccatcccagcctctgagttctctttgagtatgagtgattacttggattttagtatctgttctctctgagcctggatgggcttggggccagacctttgcctgattcctgattcccatgagaaatcagaactgctttctgcagcaaatcagggcttccccctaacatctgaactcctgtaaaccttcatccctggccccctatcttgggcccattagttttggggatggggcacagggcatagctatgactttgctttctggttggagcctggccggaaggaagagccctggaggtggttgggggcaaatgtgccctgagtccttggggtggttctgcttattcttcaagtttatctgaatctgtggggagtgcatgatccccatgttgcaatatggagtctctgccctgagatcttccccatctcagttttccttccatgaaagagtacgtgtaaatacatagtgttcataagagacctggccacatgtgcatgaatgactgggccgatgcttaggaatatttatgagggatggggagggagacaattggaatgggggcgttgcctgcagaactttagaccctgtagccatagagggaatggcgttcctttctaaaaggaactgaaacactgcccctctccccattgccccacaaccttactctaaatttgagtagagaaaagctcctaaagtgaccttccgggtgggaagggcagcagtacacatgaccccatccttttctttgtttttaccccctggctgccaccactgccatgtcacagctgctttctctggctggagtgtaggctgtaccccatttccttggctcccattaaaaatcaacaacattctaatgattagggaacaacagaaggggaacagtcataggatatacgagcagtataaagatacgtttgcaatcagtgactactcagggtgacacccttgccctaaagcaggagtcccccctacctggggtccatggactccctgaaattgtatgcaaaatgttgtttgtacatgtgtgtctgtatgtctctgtggggaggttttatggcttttgtcagattttcaaggccttaacaaagttaaaggaccactgccctgaggttactgcactgaggccaagttaggatggcatcactctgtggcagctctccctggacttgccctgcctggaacagggtgatttgctggaatggagttaccactgagatgccaaaggttgctgggtctggaagactgttgtggcctctcagttctctttgagtctgactgactgtggccagtccctggactggtagctgctggaggccttcttgtttctccagtccctggaagctgagctctatgtgtatttgatgacattgtcagctcttaccaaacgtcaagacctcttcctgcttgaccactcgcacatggctctaggcttctcctgctgagtcctggtcttggcctgtgaatgtgcctcgttcatccctggtgcttgagcccctcaagctccagtcaatgatccagtccttcccctttgaagttttctgctctactttccttggcagcagcctgtgaactactcaaaagagtccccttgggtttggaattatcagtggctttgccactagtaaatgtgtgatcttcggcaagtaacctaacctagggacatcagtttactcatctgcgaagtggggataataaaacctacctcagggttgcttcaaggattaaatgagaaaatatgtcaacaataaagacctgtctgtaccaatagatgttgttattgcaaaaatgggcttactatccataaccatatagcttaactatatgataaccatgacattcgtaggctgggcatggtggcttacgcctgtaatcccagcactttgggaggccaaggcaggtggatcacaaggtcaggagatcgagaccattctggctaacacggtgaaaccccgtctctactaaaaatacaaaaaattagccgggcgtggtggcgggggcctgtagtcccagctactcgggaggctgaggcaggagaatggcgtgaacccgggaggtggagtttgcagtgagccaagatcacgccactgcactccagcctgggcaacagagcaaaactccgtctcaaaaaaaaaaaaaaaagataaccatgacactcgcaatcatattaagcctcactcagtaaaggacagtcattgtttcacagatatcctgttctgggtcacctctggacagctcatagctgctggtttctaggttttaggaggcagatctatgatttttgtaatcctcagacctgtctgaccttagtggcctgagatccctttgtatagaatggaggaaggctgtgtgttctttggtttaccctcagcctatctttcaaccccactcacttgaggttgtggcctagttcctctttgggggagggaggaaggtggggagatgtcaaaggggactgggcttcctgtggggagtgggagagaagagtttttcaaggaggagagagaccagggctcttatactctgggccactatctgcctgctctaatcacctagggccaggcaccagacaactagggatggcctctttaccccaaagcctgctgaaattactcaaactagccaatcctaagtctgcctaccctgcctcagtcattccttccaatggaaaccacaataagcactcttgcccacgttttccctgctccctctgcatcccaactgaccctggtgcttccccatgtggcccctgtatagtgtgctttgcctcctgtttctagggacctgtgagtatcagctttctcgatgacagtcatttctgtgtctatgtgtcttattataccttattaaaacaaacctgggtacatttgtaagacagcagggattctctgaagattaatgattgagaaggatgattggacctgtctagtcagggaggctgaggcctcaggccttcattaggcacgttgcatgtctgtcaagtaagggccactaatcacctcacatgggttcatctgaactttatgccagcccaaaacacgaggacgtgccacccatcctcagcactctcaagacacacttaagtgtgtttgatacgtaagctccaattccttcctccataagaagagagaaggcagaagtggctttccccgaggtgaggacggggatgggagttttttcttttgagtgatgtagacctatgccctgcttccatgccacttcctcagatgtgacagacctctgctgggatggaatgtgtgtttgctggagacagctgtggcatagaggattgtgagaaagggtccccatgcttggtgtggaaggagggagctgctcaccctctgtatgggcttggatgaggagcttctcagcggcagtcataagaaccagaggattttctgccctttgctgggagccacatgagccccctggattcatgtggaattcttgggagagggatgaccaccctgaagatggctgagatcaaatatctcatcagatgactggatgcttagaatcgggttaacttgattaaataaataaatagaaatagtttttgtacct

SEQ ID NO: 179774 - DNA, 4094 bp, Homo sapiens
  Payload ID: 15428
  Gene Symbol: SEMA4G
  Gene Name: sema domain, immunoglobulin domain (Ig), transmembrane domain (TM) and short cytoplasmic domain, (semaphorin) 4G
  Uniprot ID: Q9NTN9
  ENST ID: ENST00000210633
  CDS Start-End: 79-2610
gcttcccattccccgcccccacaacctgtgactctggctccctttgggggtcttgttagtctgggcctccccaggaagatgtgggggaggctctggcccctcctcctcagcatcctcacagcaactgcagtcccaggaccctcactgcggagaccgtctagagaactagatgccacccctcggatgaccataccctatgaagagctctctgggacccggcacttcaagggccaagcccagaactactcaacactgctgctggaggaggcctcagcaaggctgctggtgggagcccgaggtgccctgttctctctcagtgccaacgacataggagatggggctcacaaagagatccactgggaagcctccccagagatgcaaagcaaatgtcatcaaaaagggaaaaacaaccagacggagtgctttaaccatgtgcggttcctgcagcggctcaattctacccacctctatgcatgtgggactcacgccttccagcccctctgtgcagccattgatgctgaggccttcaccttgccaaccagcttcgaggaggggaaggagaagtgtccttatgacccagcccgtggcttcacaggcctcatcattgatggaggcctctacacagccactaggtatgaattccggagcattcctgacatccgccggagccgccacccacactccctgagaactgaggagacaccaatgcattggctcaatgatgcggagtttgtgttctccgtcctcgtgcgggagagcaaggccagtgcagtgggtgatgatgacaaggtgtactacttcttcacggagcgtgccactgaggagggctctggcagcttcactcagagccgcagcagtcaccgtgtggcccgtgtggctcgtgtctgcaagggagacctgggagggaagaagatcctgcagaagaagtggacttccttcctgaaagcccgtctcatctgccacattccactgtatgagacactgcgtggggtctgcagcctggatgctgaaacctcaagccgtacacacttctatgcagccttcacgctgagcacacagtggaagaccctggaggcctcagccatctgccgctatgacctggcagagatccaggctgtctttgcaggaccctatatggaataccaggatggttcccggcgctggggtcgctatgagggtggggtgcctgagccccggcctggctcgtgtatcacagattcattgcgcagccaaggctacaattcatcccaagacttgccatccctggtcctggactttgtaaagttgcacccactgatggctcggcccgttgtgcccacacgtggacggcccctgctgctcaagcgcaacatacgctacacacaccttacagggacacctgtcaccacgcctgctggacctacctatgacctgctctttctgggcacagctgatggctggatccacaaggccgtagtcctgggctctgggatgcacattattgaagagacacaagtgttcagggagtcccagtctgtggaaaatctagtcatctctctattgcagcacagcctctatgtgggggctcctagcggagtcatccagctaccactctccagctgctcccgctaccgatcctgctatgactgcatcttggcccgagacccctactgtggctgggaccctggcacccatgcctgcgcagcagccaccaccatagccaacaggtcccagggaagcaggacagcactgatacaggacatagagagaggaaatcgaggctgtgagagcagcagggatacagggccaccaccaccactgaagacccgctctgtgctccggggtgatgatgtcctcctgccctgtgaccagccatccaacctggcccgggccttgtggctactcaatgggagcatgggcctgagcgatgggcagggtggctaccgtgtgggcgtggacgggctgctggttacagatgcacagcctgagcacagtggcaactatggctgctatgccgaggaaaatggcctccgcaccctgctggcctcctatagtctcacagtccggccagccactcctgccccagctccaaaagcccctgccacacctggggcacagctggcacctgatgtgagactgctctatgtgctagccattgccgcgcttggtggcctctgcctcatcctggcctcctccctcctctatgtggcctgtctgcgggaaggcagacgagggcgccgacggaaatactcactgggtcgggccagccgggcaggaggatctgcggtgcaactgcagacagtctcaggccagtgtcctggagaggaagatgagggtgatgatgagggggctgggggcctggagggcagctgtctccagatcatccctggggagggagccccagccccaccacccccaccgcccccaccgccaccggctgagctgaccaatggcttggtggcactgcccagccggctgcggaggatgaatggcaatagctatgtgcttctgaggcagagcaacaatggagtaccagcagggccctgctccttcgccgaggaactcagccgcatcctggaaaaaaggaagcacacgcagctcgtggagcagctagatgagagctctgtctgagcccagcctcccagaacaaatgctcttccaagccagcctatctgtcccaggctgggccactgcctccctaacacagccaccctcccttcattacccccactccatacccttctcccaactttttgatgtccctgtagggctggccagtcaggcccagccaaagccccctcctcagtctccacagacccacatgtgagcagcccaggcccatcggtgctcctcagaggtaggtgctccctcaggatcaggtgccctgcagacccagagccagttcctatcccctaacctaaacacttataggtgaggactccatcctcctgttccattcatctgcccaaaccctttctctttctcccaggcagggctctgcaggtccatatgggctcaatgtcaccaccctctgcatggccctgtgtgctggatggtcctgaaaccagacaagacctctgccagccacctaagccctgcgtacattcacatgcacacatggaagaatgtttatcggctgggctgcagtgcccccaccctcaccttctcctggtgcattcttgtttcatccctgcttctggacttggggtaccctcccaattgccacatcctatctggtcctcttccccagccccatgtggtgacctctttgtcaagagcttgggaacgggccagcctggggaggtaagactgcatcactcccctcctctcccttcctgtgtggcccttgtgaatcagcctccccactctccttggtcattctcaagagtatgagagacagagctccaggcatgtcccatccccatgcacatgtggtaacacacacctgtatcacacatgtgcttacatttccactcacatgcacctctgagcctcccttgctgtcttggacctgtctgttgggtttagtccgtggacatttcagagggagatccccctcccatttaactgtcctcacaggcccttgcctaggatggatgaccaacactgcactcaatgagccagcctctcttttgggggaatcaagcatttgcttcctctagactacagcagggaaagggaggagaaatctgatgtctcaactggcacatgaagcccattcttggaactatgcaaagggcagaggctgggagtttggacgcttagctcctacccctgtcctacctcaccggggcactttcaggggccaggggcctctgaagtctctaggcctatatgggacaatcaattctgactgagctcccccattcccctcgggtgaggatgactgttatttttgtagctgagaacgtggaatcccacgggtttttactgcccttcacccaacctctcccacctccaccccacaatgaatgtatttattgtgagaatggctacacttctttaggaatgcccccacttacaaccaggtgggtggaacaggcatgtgacagagtggggagcctgggctcagctcctccccctgccgttggttaataaacaccctttttccccac

SEQ ID NO: 179775 - DNA, 3596 bp, Homo sapiens
  Payload ID: 15428
  Gene Symbol: SEMA4G
  Gene Name: sema domain, immunoglobulin domain (Ig), transmembrane domain (TM) and short cytoplasmic domain, (semaphorin) 4G
  Uniprot ID: Q9NTN9
  ENST ID: ENST00000370250
  CDS Start-End: 374-2890
cagaaaaccaggactagctctactgtcgggggcagggtgaccccatcagtaacctacaacccctctagaacttcacaactccctctcaccatggagtttgcatttgatgcagaaaggcatgtgatccctccctccttctgacctcttagctggggattccatggccacacaaccctgtgactccatgtccccccgattccaggaccccccatggccccatgattccttgactcctatgaccttatgacccctgaccttccaagtgacttccttggactttgacccctgtgactgtgcttcccattccccgcccccacaacctgtgactctggctccctttgggggtcttgttagtctgggcctccccaggaagatgtgggggaggctctggcccctcctcctcagcatcctcacagcaactgcagtcccaggaccctcactgcggagaccgtctagagaactagatgccacccctcggatgaccataccctatgaagagctctctgggacccggcacttcaagggccaagcccagaactactcaacactgctgctggaggaggcctcagcaaggctgctggtgggagcccgaggtgccctgttctctctcagtgccaacgacataggagatggggctcacaaagagatccactgggaagcctccccagagatgcaaagcaaatgtcatcaaaaagggaaaaacaaccagacggagtgctttaaccatgtgcggttcctgcagcggctcaattctacccacctctatgcatgtgggactcacgccttccagcccctctgtgcagccattgatgctgaggccttcaccttgccaaccagcttcgaggaggggaaggagaagtgtccttatgacccagcccgtggcttcacaggcctcatcattgatggaggcctctacacagccactaggtatgaattccggagcattcctgacatccgccggagccgccacccacactccctgagaactgaggagacaccaatgcattggctcaatgatgcggagtttgtgttctccgtcctcgtgcgggagagcaaggccagtgcagtgggtgatgatgacaaggtgtactacttcttcacggagcgtgccactgaggagggctctggcagcttcactcagagccgcagcagtcaccgtgtggcccgtgtggctcgtgtctgcaagggagacctgggagggaagaagatcctgcagaagaagtggacttccttcctgaaagcccgtctcatctgccacattccactgtatgagacactgcgtggggtctgcagcctggatgctgaaacctcaagccgtacacacttctatgcagccttcacgctgagcacacagtggaagaccctggaggcctcagccatctgccgctatgacctggcagagatccaggctgtctttgcaggaccctatatggaataccaggatggttcccggcgctggggtcgctatgagggtggggtgcctgagccccggcctggctcgtgtatcacagattcattgcgcagccaaggctacaattcatcccaagacttgccatccctggtcctggactttgtaaagttgcacccactgatggctcggcccgttgtgcccacacgtggacggcccctgctgctcaagcgcaacatacgctacacacaccttacagggacacctgtcaccacgcctgctggacctacctatgacctgctctttctgggcacagctgatggctggatccacaaggccgtagtcctgggctctgggatgcacattattgaagagacacaagtgttcagggagtcccagtctgtggaaaatctagtcatctctctattgcagcacagcctctatgtgggggctcctagcggagtcatccagctaccactctccagctgctcccgctaccgatcctgctatgactgcatcttggcccgagacccctactgtggctgggaccctggcacccatgcctgcgcagcagccaccaccatagccaacaggacagcactgatacaggacatagagagaggaaatcgaggctgtgagagcagcagggatacagggccaccaccaccactgaagacccgctctgtgctccggggtgatgatgtcctcctgccctgtgaccagccatccaacctggcccgggccttgtggctactcaatgggagcatgggcctgagcgatgggcagggtggctaccgtgtgggcgtggacgggctgctggttacagatgcacagcctgagcacagtggcaactatggctgctatgccgaggaaaatggcctccgcaccctgctggcctcctatagtctcacagtccggccagccactcctgccccagctccaaaagcccctgccacacctggggcacagctggcacctgatgtgagactgctctatgtgctagccattgccgcgcttggtggcctctgcctcatcctggcctcctccctcctctatgtggcctgtctgcgggaaggcagacgagggcgccgacggaaatactcactgggtcgggccagccgggcaggaggatctgcggtgcaactgcagacagtctcaggccagtgtcctggagaggaagatgagggtgatgatgagggggctgggggcctggagggcagctgtctccagatcatccctggggagggagccccagccccaccacccccaccgcccccaccgccaccggctgagctgaccaatggcttggtggcactgcccagccggctgcggaggatgaatggcaatagctatgtgcttctgaggcagagcaacaatggagtaccagcagggccctgctccttcgccgaggaactcagccgcatcctggaaaaaaggaagcacacgcagctcgtggagcagctagatgagagctctgtctgagcccagcctcccagaacaaatgctcttccaagccagcctatctgtcccaggctgggccactgcctccctaacacagccaccctcccttcattacccccactccatacccttctcccaactttttgatgtccctgtagggctggccagtcaggcccagccaaagccccctcctcagtctccacagacccacatgtgagcagcccaggcccatcggtgctcctcagaggtaggtgctccctcaggatcaggtgccctgcagacccagagccagttcctatcccctaacctaaacacttataggtgaggactccatcctcctgttccattcatctgcccaaaccctttctctttctcccaggcagggctctgcaggtccatatgggctcaatgtcaccaccctctgcatggccctgtgtgctggatggtcctgaaaccagacaagacctctgccagccacctaagccctgcgtacattcacatgcacacatggaagaatgtttatcggctgggctgcagtgcccccaccctcaccttctcctggtgcattcttgtttcatccctgcttctggacttggggtaccctcccaattgccacatcctatctggtcctcttccccagccccatgtggtgacctctttgtcaagagcttgggaacgggccagcctggggaggtaagactgcatcactcccctcctctcccttcct

SEQ ID NO: 179776 - DNA, 2024 bp, Homo sapiens
  Payload ID: 15428
  Gene Symbol: SEMA4G
  Gene Name: sema domain, immunoglobulin domain (Ig), transmembrane domain (TM) and short cytoplasmic domain, (semaphorin) 4G
  ENST ID: ENST00000519649
  CDS Start-End: 459-2024
cctctcgcagctggtgctgtggggccgcggagccgcgcgtcgctgtctctatggccccggatccgagcgcaaagaaaacggacctcagaaaaccaggactagctctactgtcgggggcagggtgaccccatcagtaacctacaacccctctagaacttcacaactccctctcaccatggagtttgcatttgatgcagaaaggcatgtgatccctccctccttctgacctcttagctggggattccatggccacacaaccctgtgactccatgtccccccgattccaggaccccccatggccccatgattccttgactcctatgaccttatgacccctgaccttccaagtgacttccttggactttgacccctgtgactgtgcttcccattccccgcccccacaacctgtgactctggctccctttgggggtcttgttagtctgggcctccccaggaagatgtgggggaggctctggcccctcctcctcagcatcctcacagcaactgcagtcccaggaccctcactgcggagaccgtctagagaactagatgccacccctcggatgaccataccctatgaagagctctctgggacccggcacttcaagggccaagcccagaactactcaacactgctgctggaggaggcctcagcaaggctgctggtgggagcccgaggtgccctgttctctctcagtgccaacgacataggagatggggctcacaaagagatccactgggaagcctccccagagatgcaaagcaaatgtcatcaaaaagggaaaaacaaccagacggagtgctttaaccatgtgcggttcctgcagcggctcaattctacccacctctatgcatgtgggactcacgccttccagcccctctgtgcagccattgatgctgaggccttcaccttgccaaccagcttcgaggaggggaaggagaagtgtccttatgacccagcccgtggcttcacaggcctcatcattgatggaggcctctacacagccactaggtatgaattccggagcattcctgacatccgccggagccgccacccacactccctgagaactgaggagacaccaatgcattggctcaatgatgcggagtttgtgttctccgtcctcgtgcgggagagcaaggccagtgcagtgggtgatgatgacaaggtgtactacttcttcacggagcgtgccactgaggagggctctggcagcttcactcagagccgcagcagtcaccgtgtggcccgtgtggctcgtgtctgcaagggagacctgggagggaagaagatcctgcagaagaagtggacttccttcctgaaagcccgtctcatctgccacattccactgtatgagacactgcgtggggtctgcagcctggatgctgaaacctcaagccgtacacacttctatgcagccttcacgctgagcacacagtggaagaccctggaggcctcagccatctgccgctatgacctggcagagatccaggctgtctttgcaggaccctatatggaataccaggatggttcccggcgctggggtcgctatgagggtggggtgcctgagccccggcctggctcgtgtatcacagattcattgcgcagccaaggctacaattcatcccaagacttgccatccctggtcctggactttgtaaagttgcacccactgatggctcggcccgttgtgcccacacgtggacggcccctgctgctcaagcgcaacatacgctacacacaccttacagggacacctgtcaccacgcctgctggacctacctatgacctgctctttctgggcacagctgatggctggatccacaaggccgtagtcctgggctctgggatgcacattattgaagagacacaagtgttcagggagtcccagtctgtggaaaatctagtcatctctctattgcagcacagcctctatgtgggggctcctagcggagtcatccagctaccactctccagctgctcccgctaccgatcctgctatgactgcatcttggcccgagac

SEQ ID NO: 179777 - DNA, 393 bp, Homo sapiens
  Payload ID: 15428
  Gene Symbol: SEMA4G
  Gene Name: sema domain, immunoglobulin domain (Ig), transmembrane domain (TM) and short cytoplasmic domain, (semaphorin) 4G
  ENST ID: ENST00000476171
  CDS Start-End: 1-393
gcgggaaggcagacgagggcgccgacggaaatactcactgggtcgggccagccgggcaggaggatctgcggtgcaactgcagacagtctcaggcagggctctgcaggtccatatgggctcaatgtcaccaccctctgcatggccctgtgtgctggatggtcctgaaaccagacaagacctctgccagccacctaagccctgcgtacattcacatgcacacatggaagaatgtttatcggctgggctgcagtgcccccaccctcaccttctcctggtgcattcttgtttcatccctgcttctggacttggggtaccctcccaattgccacatcctatctggtcctcttccccagccccatgtggtgacctctttgtcaagagcttgggaacggg

SEQ ID NO: 179778 - DNA, 596 bp, Homo sapiens
  Payload ID: 15428
  Gene Symbol: SEMA4G
  Gene Name: sema domain, immunoglobulin domain (Ig), transmembrane domain (TM) and short cytoplasmic domain, (semaphorin) 4G
  ENST ID: ENST00000518124
  CDS Start-End: 85-596
gctggtgctgtggggccgcggagccgcgcgtcgctgtctctatggccccggatccgagcgcaaagtctgggcctccccaggaagatgtgggggaggctctggcccctcctcctcagcatcctcacagcaactgcagtcccaggaccctcactgcggagaccgtctagagaactagatgccacccctcggatgaccataccctatgaagagctctctgggacccggcacttcaagggccaagcccagaactactcaacactgctgctggaggaggcctcagcaaggctgctggtgggagcccgaggtgccctgttctctctcagtgccaacgacataggagatggggctcacaaagagatccactgggaagcctccccagagatgcaaagcaaatgtcatcaaaaagggaaaaacaaccagacggagtgctttaaccatgtgcggttcctgcagcggctcaattctacccacctctatgcatgtgggactcacgccttccagcccctctgtgcagccattgatgctgaggccttcaccttgccaaccagcttcgaggaggggaaggagaagtgtccttatgacccagcccgtggctt

SEQ ID NO: 179779 - DNA, 2675 bp, Homo sapiens
  Payload ID: 15428
  Gene Symbol: SEMA4G
  Gene Name: sema domain, immunoglobulin domain (Ig), transmembrane domain (TM) and short cytoplasmic domain, (semaphorin) 4G
  Uniprot ID: Q9NTN9
  ENST ID: ENST00000517724
  CDS Start-End: 202-2310
ccctgtgactccatgtccccccgattccaggaccccccatggccccatgattccttgactcctatgaccttatgacccctgaccttccaagtgacttccttggactttgacccctgtgactgtgcttcccattccccgcccccacaacctgtgactctggctccctttgggggtcttgttagtctgggcctccccaggaagatgtgggggaggctctggcccctcctcctcagcatcctcacagcaactgcagtcccaggaccctcactgcggagaccgtctagagaactagatgccacccctcggatgaccataccctatgaagagctctctgggacccggcacttcaagggccaagcccagaactactcaacactgctgctggaggaggcctcagcaaggctgctggtgggagcccgaggtgccctgttctctctcagtgccaacgacataggagatggggctcacaaagagatccactgggaagcctccccagagatgcaaagcaaatgtcatcaaaaagggaaaaacaaccagacggagtgctttaaccatgtgcggttcctgcagcggctcaattctacccacctctatgcatgtgggactcacgccttccagcccctctgtgcagccattgatgctgaggccttcaccttgccaaccagcttcgaggaggggaaggagaagtgtccttatgacccagcccgtggcttcacaggcctcatcattgatggaggcctctacacagccactaggtatgaattccggagcattcctgacatccgccggagccgccacccacactccctgagaactgaggagacaccaatgcattggctcaatgatgcggagtttgtgttctccgtcctcgtgcgggagagcaaggccagtgcagtgggtgatgatgacaaggtgtactacttcttcacggagcgtgccactgaggagggctctggcagcttcactcagagccgcagcagtcaccgtgtggcccgtgtggctcgtgtctgcaagggagacctgggagggaagaagatcctgcagaagaagtggacttccttcctgaaagcccgtctcatctgccacattccactgtatgagacactgcgtggggtctgcagcctggatgctgaaacctcaagccgtacacacttctatgcagccttcacgctgagcacacagtggaagaccctggaggcctcagccatctgccgctatgacctggcagagatccaggctgtctttgcaggaccctatatggaataccaggatggttcccggcgctggggtcgctatgagggtggggtgcctgagccccggcctggctcgtgtatcacagattcattgcgcagccaaggctacaattcatcccaagacttgccatccctggtcctggactttgtaaagttgcacccactgatggctcggcccgttgtgcccacacgtggacggcccctgctgctcaagcgcaacatacgctacacacaccttacagggacacctgtcaccacgcctgctggacctacctatgacctgctctttctgggcacagctgatggctggatccacaaggccgtagtcctgggctctgggatgcacattattgaagagacacaagtgttcagggagtcccagtctgtggaaaatctagtcatctctctattgcagcacagcctctatgtgggggctcctagcggagtcatccagctaccactctccagctgctcccgctaccgatcctgctatgactgcatcttggcccgagacccctactgtggctgggaccctggcacccatgcctgcgcagcagccaccaccatagccaacaggtcccagggaagcaggacagcactgatacaggacatagagagaggaaatcgaggctgtgagagcagcagggatacaggcagggctctgcaggtccatatgggctcaatgtcaccaccctctgcatggccctgtgtgctggatggtcctgaaaccagacaagacctctgccagccacctaagccctgcgtacattcacatgcacacatggaagaatgtttatcggctgggctgcagtgcccccaccctcaccttctcctggtgcattcttgtttcatccctgcttctggacttggggtaccctcccaattgccacatcctatctggtcctcttccccagccccatgtggtgacctctttgtcaagagcttgggaacgggccagcctggggaggtaagactgcatcactcccctcctctcccttcctgtgtggcccttgtgaatcagcctccccactctccttggtcattctcaagagtatgagagacagagctccaggcatgtcccatccccatgcacatgtggtaacacacacctgtatcacacatgtgcttacatttccactcacatgcacctctgagcctcccttgctgtcttggacctgtctgttgggtttagtccgtggacatttcagagggagatccccctcccatttaactgtcctcacaggcccttgcctaggatggatgaccaacactgcactcaatgagccagcctctcttttgggggaatcaagcatttgcttcctctagactacagcagggaaagggaggagaaatctgatgtctcaactggcacatgaagcccattcttggaactatgcaaagggcagaggctgggagtttgga

SEQ ID NO: 179780 - DNA, 4656 bp, Homo sapiens
  Payload ID: 15428
  Gene Symbol: SEMA4G
  Gene Name: sema domain, immunoglobulin domain (Ig), transmembrane domain (TM) and short cytoplasmic domain, (semaphorin) 4G
  Uniprot ID: Q9NTN9
  ENST ID: ENST00000521006
  CDS Start-End: 787-3303
cgcagctggtgctgtggggccgcggagccgcgcgtcgctgtctctatggccccggatccgagcgcaaaggtgagcaaggcgaggagtgcgggcggcgccctggcgtgagcctggggctgcgggccgggggtcgggcaaggcctcccccacgtccattctaccctccaagctgggccaggcctttctcaccaccaagtcccccggtcctgcatgacggctctagaggggcgcgggccaggcctcgggctgcgcggggtgcaaaccggccaccacggagtcggggaccagcgcggggagggggccgcgtggcgaacagtgttccccaggatctgggtcacgtctcccggcgtccggcgggatcgaaggagagcttgtcctcgagctgcagcagtagagactgagaaaacggacctcagaaaaccaggactagctctactgtcgggggcagggtgaccccatcagtaacctacaacccctctagaacttcacaactccctctcaccatggagtttgcatttgatgcagaaaggcatgtgatccctccctccttctgacctcttagctggggattccatggccacacaaccctgtgactccatgtccccccgattccaggaccccccatggccccatgattccttgactcctatgaccttatgacccctgaccttccaagtgacttccttggactttgacccctgtgactgtgcttcccattccccgcccccacaacctgtgactctggctccctttgggggtcttgttagtctgggcctccccaggaagatgtgggggaggctctggcccctcctcctcagcatcctcacagcaactgcagtcccaggaccctcactgcggagaccgtctagagaactagatgccacccctcggatgaccataccctatgaagagctctctgggacccggcacttcaagggccaagcccagaactactcaacactgctgctggaggaggcctcagcaaggctgctggtgggagcccgaggtgccctgttctctctcagtgccaacgacataggagatggggctcacaaagagatccactgggaagcctccccagagatgcaaagcaaatgtcatcaaaaagggaaaaacaaccagacggagtgctttaaccatgtgcggttcctgcagcggctcaattctacccacctctatgcatgtgggactcacgccttccagcccctctgtgcagccattgatgctgaggccttcaccttgccaaccagcttcgaggaggggaaggagaagtgtccttatgacccagcccgtggcttcacaggcctcatcattgatggaggcctctacacagccactaggtatgaattccggagcattcctgacatccgccggagccgccacccacactccctgagaactgaggagacaccaatgcattggctcaatgatgcggagtttgtgttctccgtcctcgtgcgggagagcaaggccagtgcagtgggtgatgatgacaaggtgtactacttcttcacggagcgtgccactgaggagggctctggcagcttcactcagagccgcagcagtcaccgtgtggcccgtgtggctcgtgtctgcaagggagacctgggagggaagaagatcctgcagaagaagtggacttccttcctgaaagcccgtctcatctgccacattccactgtatgagacactgcgtggggtctgcagcctggatgctgaaacctcaagccgtacacacttctatgcagccttcacgctgagcacacagtggaagaccctggaggcctcagccatctgccgctatgacctggcagagatccaggctgtctttgcaggaccctatatggaataccaggatggttcccggcgctggggtcgctatgagggtggggtgcctgagccccggcctggctcgtgtatcacagattcattgcgcagccaaggctacaattcatcccaagacttgccatccctggtcctggactttgtaaagttgcacccactgatggctcggcccgttgtgcccacacgtggacggcccctgctgctcaagcgcaacatacgctacacacaccttacagggacacctgtcaccacgcctgctggacctacctatgacctgctctttctgggcacagctgatggctggatccacaaggccgtagtcctgggctctgggatgcacattattgaagagacacaagtgttcagggagtcccagtctgtggaaaatctagtcatctctctattgcagcacagcctctatgtgggggctcctagcggagtcatccagctaccactctccagctgctcccgctaccgatcctgctatgactgcatcttggcccgagacccctactgtggctgggaccctggcacccatgcctgcgcagcagccaccaccatagccaacaggacagcactgatacaggacatagagagaggaaatcgaggctgtgagagcagcagggatacagggccaccaccaccactgaagacccgctctgtgctccggggtgatgatgtcctcctgccctgtgaccagccatccaacctggcccgggccttgtggctactcaatgggagcatgggcctgagcgatgggcagggtggctaccgtgtgggcgtggacgggctgctggttacagatgcacagcctgagcacagtggcaactatggctgctatgccgaggaaaatggcctccgcaccctgctggcctcctatagtctcacagtccggccagccactcctgccccagctccaaaagcccctgccacacctggggcacagctggcacctgatgtgagactgctctatgtgctagccattgccgcgcttggtggcctctgcctcatcctggcctcctccctcctctatgtggcctgtctgcgggaaggcagacgagggcgccgacggaaatactcactgggtcgggccagccgggcaggaggatctgcggtgcaactgcagacagtctcaggccagtgtcctggagaggaagatgagggtgatgatgagggggctgggggcctggagggcagctgtctccagatcatccctggggagggagccccagccccaccacccccaccgcccccaccgccaccggctgagctgaccaatggcttggtggcactgcccagccggctgcggaggatgaatggcaatagctatgtgcttctgaggcagagcaacaatggagtaccagcagggccctgctccttcgccgaggaactcagccgcatcctggaaaaaaggaagcacacgcagctcgtggagcagctagatgagagctctgtctgagcccagcctcccagaacaaatgctcttccaagccagcctatctgtcccaggctgggccactgcctccctaacacagccaccctcccttcattacccccactccatacccttctcccaactttttgatgtccctgtagggctggccagtcaggcccagccaaagccccctcctcagtctccacagacccacatgtgagcagcccaggcccatcggtgctcctcagaggcagggctctgcaggtccatatgggctcaatgtcaccaccctctgcatggccctgtgtgctggatggtcctgaaaccagacaagacctctgccagccacctaagccctgcgtacattcacatgcacacatggaagaatgtttatcggctgggctgcagtgcccccaccctcaccttctcctggtgcattcttgtttcatccctgcttctggacttggggtaccctcccaattgccacatcctatctggtcctcttccccagccccatgtggtgacctctttgtcaagagcttgggaacgggccagcctggggaggtaagactgcatcactcccctcctctcccttcctgtgtggcccttgtgaatcagcctccccactctccttggtcattctcaagagtatgagagacagagctccaggcatgtcccatccccatgcacatgtggtaacacacacctgtatcacacatgtgcttacatttccactcacatgcacctctgagcctcccttgctgtcttggacctgtctgttgggtttagtccgtggacatttcagagggagatccccctcccatttaactgtcctcacaggcccttgcctaggatggatgaccaacactgcactcaatgagccagcctctcttttgggggaatcaagcatttgcttcctctagactacagcagggaaagggaggagaaatctgatgtctcaactggcacatgaagcccattcttggaactatgcaaagggcagaggctgggagtttggacgcttagctcctacccctgtcctacctcaccggggcactttcaggggccaggggcctctgaagtctctaggcctatatgggacaatcaattctgactgagctcccccattcccctcgggtgaggatgactgttatttttgtagctgagaacgtggaatcccacgggtttttactgcccttcacccaacctctcccacctccaccccacaatgaatgtatttattgtgagaatggctacacttctttaggaatgcccccacttacaaccaggtgggtggaacaggcatgtgacagagtggggagcctgggctcagctcctccccctgccgttggttaataaacaccctttttccccaca

SEQ ID NO: 179781 - DNA, 1171 bp, Homo sapiens
  Payload ID: 15428
  Gene Symbol: SEMA4G
  Gene Name: sema domain, immunoglobulin domain (Ig), transmembrane domain (TM) and short cytoplasmic domain, (semaphorin) 4G
  ENST ID: ENST00000613292
  CDS Start-End: 68-451
cacagacccacatgtgagcagcccaggcccatcggtgctcctcagaggcagggctctgcaggtccatatgggctcaatgtcaccaccctctgcatggccctgtgtgctggatggtcctgaaaccagacaagacctctgccagccacctaagccctgcgtacattcacatgcacacatggaagaatgtttatcggctgggctgcagtgcccccaccctcaccttctcctggtgcattcttgtttcatccctgcttctggacttggggtaccctcccaattgccacatcctatctggtcctcttccccagccccatgtggtgacctctttgtcaagagcttgggaacgggccagcctggggaggtaagactgcatcactcccctcctctcccttcctgtgtggcccttgtgaatcagcctccccactctccttggtcattctcaagagtatgagagacagagctccaggcatgtcccatccccatgcacatgtggtaacacacacctgtatcacacatgtgcttacatttccactcacatgcacctctgagcctcccttgctgtcttggacctgtctgttgggtttagtccgtggacatttcagagggagatccccctcccatttaactgtcctcacaggcccttgcctaggatggatgaccaacactgcactcaatgagccagcctctcttttgggggaatcaagcatttgcttcctctagactacagcagggaaagggaggagaaatctgatgtctcaactggcacatgaagcccattcttggaactatgcaaagggcagaggctgggagtttggacgcttagctcctacccctgtcctacctcaccggggcactttcaggggccaggggcctctgaagtctctaggcctatatgggacaatcaattctgactgagctcccccattcccctcgggtgaggatgactgttatttttgtagctgagaacgtggaatcccacgggtttttactgcccttcacccaacctctcccacctccaccccacaatgaatgtatttattgtgagaatggctacacttctttaggaatgcccccacttacaaccaggtgggtggaacaggcatgtgacagagtggggagcctgggctcagctcctccccctgccgttggttaataaacaccctttttcccc

SEQ ID NO: 179782 - DNA, 11762 bp, Homo sapiens
  Payload ID: 15429
  Gene Symbol: SEMA5A
  Gene Name: sema domain, seven thrombospondin repeats (type 1 and type 1-like), transmembrane domain (TM) and short cytoplasmic domain, (semaphorin) 5A
  Uniprot ID: Q13591
  ENST ID: ENST00000382496
  CDS Start-End: 667-3891
acttgccgggaaggcggcgccggtggcggctgctctccctgagcccgctcccgagcgctgctttcccgccgcgggtgggcttcgcagcctcaggccagccgcggcccttggcccgctgcagccccggccctccaccttccccgtgcaggggcggcccggccagtgtcgctcatcccgggacgctcccttctcccacccaggactgccccgcggagctggcttggacacccaactttgccacctcgagggtcgtctctgctgggcgcgaacctgcccacccaccggttggccgcgcgctcggggaccgtgctcgtggcccccaagccggtgcccccattctggaactcagcgagtagggggcggctctggggaagtggcagggggcggctgcagctgctgcctccacttccctagccaggtgctgaagaggatcctcggagccgctctggcccccaggcgctggatgactggcaccagcgctcctcgcacctgtgttggtgtgtgagacttgggctggagtgcccacgtggctgtggagtcagtgtgattcatgattgaggaaacgcgtcctccatcctctctctccttggcactttccacacatgaggagaagaagagcttctgtttagaagacacgtgcccagagtcagaggccccttgcccaccatgaagggaacctgtgttatagcatggctgttctcaagcctggggctgtggagactcgcccacccagaggcccagggtacgactcagtgccagagaaccgagcatccagtcatctcctataaagaaattggcccctggttacgggagttcagagcgaagaatgctgtggatttctcgcagttaacatttgacccaggacagaaagaacttgttgtaggagcaagaaactacctcttcaggttacagcttgaggatctgtctcttatccaggctgtggaatgggagtgtgatgaagctaccaaaaaggcctgttacagcaaaggcaaatcaaaggaggaatgtcagaactacatccgggtgcttctggtgggtggcgaccggttattcacctgtgggaccaatgcattcacgcctgtctgcaccaaccgctcgttgagcaacctgactgagatccatgatcagatcagtggcatggcccgctgtccctacagtccccagcacaattccacagcgctcctcacagctggtggggagctctatgctgctacagccatggattttccaggacgtgatcctgccatttaccgaagcctaggcattttacctcctctccgcacggcgcagtacaactccaaatggctcaatgagccaaactttgtgtcatcttatgacatcggaaattttacctacttctttttccgagaaaatgcagtagagcatgactgtgggaaaacagtgttctccagagctgcccgggtgtgcaagaacgatattggtgggcgcttcctgctggaagacacctggaccacattcatgaaggctcgcctgaactgctcccgtcctggggaagtccccttttactacaacgaattgcagagtactttcttcctgcctgagctggatttgatctatggcatctttaccaccaatgtgaacagcattgcggcctcagctgtgtgcgtcttcaacctgagcgccatcgcgcaggccttctctgggcccttcaagtaccaagaaaactcgcgctcggcctggctaccgtatcccaacccaaacccccacttccagtgtggcaccgtggaccagggcctgtacgtgaacctgaccgagagaaatctgcaggatgctcagaagttcattctgatgcatgaggtggtacagccagtgaccacagtgccctccttcatggaggacaatagccgcttttcccacgtggcagtcgacgtggtgcagggcagagaagcgctcgtccacatcatctatttggccacagattacggaaccattaagaaagtgcgggtacccctgaatcagacctcaagcagctgtttgctggaagagattgagctcttccctgagaggcggagggagcccatcaggagcctgcagatcctgcacagccagagtgtcctgttcgtgggcctgcgggagcacgtggtcaagatccccctgaagaggtgccagttctaccgcacacgcagcacctgcattggggcccaggacccttactgtggctgggatgtggtaatgaagaaatgcacaagcctggaggagagcctgagcatgacgcagtgggaacagagcatctctgcgtgtccgaccaggaatctcaccgtggatgggcactttggtgtgtggtctccgtggacgccttgcacgcacacagatggcagcgccgtgggatcctgcctctgtcgaacccgctcctgcgacagcccggccccgcagtgtggtggctggcagtgcgagggccctggcatggagatcgccaactgttccaggaacggaggctggactccctggacctcgtggtctccctgcagcactacctgtgggatcggcttccaggtgcggcagcgctcctgcagcaaccccactcccaggcacgggggccgggtgtgcgtgggacagaaccgcgaggaaagatactgcaatgaacatttgctatgtcccccacacatgttctggacaggctggggtccttgggaacggtgcacagcccaatgcgggggtggcattcaagctcgccgcaggatctgtgagaatgggcctgactgtgcaggctgcaatgtggagtaccagtcttgcaacaccaacccgtgtcctgagctgaagaagaccacgccctggacaccctggacacctgtcaacatctctgacaacggcggccactatgagcaacgattccgatacacatgcaaagcccgcctggctgatccgaatttgctggaagtgggaagacagagaatcgaaatgcggtactgttctagcgacggcaccagtggctgctccacagatgggctttctggggatttcctgcgtgctgggagatactctgcccacacggtcaacggggcttggtcagcctggacgtcgtggtcacagtgcagccgtgactgcagcaggggcattcggaaccggaagcgtgtttgcaacaaccccgaacccaagtatgggggaatgccttgccttggcccatctctggaataccaggaatgcaacattttgccctgcccagtggatggcgtgtggtcttgctggtccccctggacaaaatgttcagcaacatgcggcggtggacactatatgaggacccgctcttgctccaatccagccccggcctatggaggggacatctgcctggggctgcacacagaagaggcactctgcaacacgcagccctgcccagagagctggtcggagtggtcggactggtctgagtgtgaagcctctggcgtccaagtccgcgcccgccagtgcatcctcctgttccccatgggcagccagtgctccgggaacaccacggagagccggccgtgtgtgtttgactctaatttcatcccagaagtatctgtggcaagatccagtagcgtagaagagaaaaggtgtggagagttcaacatgttccacatgatcgccgtggggctgagcagctccatcctcggctgcctcctcaccctgctcgtctatacttactgccagcggtaccagcagcaatcccacgatgcgactgtcatccaccccgtctcacctgccccccttaataccagcataaccaaccacatcaacaaactggacaagtacgactcggtggaggccatcaaggcatttaacaaaaacaacttgatcctagaggaaagaaacaaatacttcaacccacatctcactgggaagacctattctaatgcctactttacagatctcaataattatgatgagtactaacagctttcatgtttttggcttcttgtaaatccccagttcctcaaggcctgtgccccatgactgcccatgtttctgaggcttcagagtcgaagtttggatacatttcaagtgcatttcaagccaccagagtgtcccattgctgccaaaaatacacgtctttaaaagcaacaaaaattgaaataagacatcgtgaaaatcttgaccattgttgaatgagccagggtgtgaagtttttaattgtgttcatcctatttttctgacaagtccattggtttgttttttgagcattattttataaatgtgccacccacattggaaggagtctttctttagaactttggagtgtaaatcttcatgatgttgtaattcaagaaaataggcactttctctgaaagacctgctccttccacaagaagtgcataggtccataatatttcataaaatgaagaaaaagaatgtggccaaacaattattcaccatggattgcccaactttccaaatctggataaagctgtgggattcttggaagcagcttgagtgttttcatcttgcctgggaagcccaggaattccacctggtccacaccggcagaagttacagtagactgtgaggcaccccaccttgctcctgatgcagtttctgtgccattgctggtgctggtggaggcagcggagcagaggctcaggcacaatgaagcgtggatgtgttctgcaggttgctgcaaaactcaccttattctgacttttggatttcatggcattccaggaagctccttgccatgctgttggcctggaagtccacctgtctggtccatagtgacgtcctgaagagccagtctgtaaaataaccaaccacttacttagcgtttggatagactccatgccttctctctccctgcaaagaaaaatcttgaacatttatgatgtcaattagtgaaagtattgaaaatactaaattataactaaaagcaactttttatgttattgaaaatattgaaagaactgatattaatgataatcattttatttttcatctctctgatatacccaatgtgtggcaatcagcccctaccacgagcattaataccatgtaaagctggctttctggagtctgccaggtccacacgaagtgctacccccagtttctgctgttacttgctgcctccaggccaggggagcaggagatgctcagctctggtgccttttcttttatttcagtgctgccttcccacccacccagtccattcaccctcacctctccctgcatggaggcaacagcatttcaagatgtaccttgggaagtcaggatagctggaagtaagggtttttgggatccctgtggtctcttcactgatcatcgataagcatttaagagtgtgctaacaccattcacagaggtccctggaaaaaaatatataattttctcacaaacaaccaatacataacctatggcagttggttgaataattattgaaaaaaagaacacgactgaaaaagttcatctgatgcctctgagcatgtgataaagtcctgggtagacacggaaacgtgttcttacaaatgaaccttcggatctatgaaagaaaatatagtagggggactaaggaacatagaattttattagcatatgtgattttacccttatctttgtttctaatttaaagaaacaatttcagaaagtgttagaagaattctatgtttaataatgaatattgttgagttcaaaatattctcatatacccagatttacagagatgacacagtattgaaatggcaggtgggctctgtaagttattttggattaatgacattcagggtctttgcagtggggacttcatgttgcctctcactcattcctcatatgtcagagtcttctgtctatatgcacatgctcaaagtccatactcagtaggggaaatctagccggatggttctccaattgttcctcggctggattttcatcatcagatatttcaactcatctcatcagtttcttgtaagaaaaaaacattttcactttgtagcacattttagttatttttgagtcttcttccctaatagtttgtaagcttaaagggacattttattttccctggtaaagaggattctaatatttcaagaatgtttcactggaattgatgggaaatggtttctaaatggcatcgaagctggtctttaatgagtcttttgcaatgacttgggaaaaacaccctccctcactacaggatcttcatgttgttaataatataaacaaacctttgaaattagcattgcaaaagaatcccatttttgtttcgtaccacactgttcaaaggaaaattgtttatctctcttcctttctctctctctcttatttgacagaatagcaagtgtttagataatttcagatatattctaagtattttaccagctgtggaataagttgtgtttgtccatcactgtgtagctaccgttcacatgttctggctctgtactccacgcttatcgcgtgaaccctcacatgttggactttcacagtgtgatctctcacctgtcttggaaactccttcataaagccgctcttccttaggcctgggctgtttggaagtcctggtgaaactttgcggttcacattttaaattcctgaatgaccttttcattctctctttctttatctttgtttttgtccttcattccctccttttgttcttccttcctgccttcttttcttctttcctttcttctttctttaattcttcctttcttcctattttcttggtacaagtggaacaaaaaccaacacatagttttaagctacacctttctgcacctgatgtaaaatgacattaatcactatttaacttctaaaattatttctgaatacagttggagataggctggttttcatgaggaagctggcttggctttagtcttacatttaaattctttgaaagtggctcccagtgctattcagggtcctttcttgaggccagactcatcaccatctactattgattttacagtgcactgacagtttacaggaaggagaagaacagaatttctgcacactacacaacatgtgggcttcctgtagctccagggacatgtagctttggtgaaactggggttttgtaacctctgaatgatatggacttagtgaattctaaggaactcagggggcacgtggtcaggctccaccgcacagaagagccacagtctccagactcatggcgttccctccagaactccccattcccctctgagcatatttctatgctgctgcttcttgtgacttacatgaggcatctcagcttcttcatgtttgtagggatggttccctaagcctgttcaagtaggctctcactagagttaccattcatatttgagaagaaaagaacatttaataaatgtatgtgtggggctgaggttctaaaggaattgaaaagagacgataaacattgaatgagggtgagggcatccctgctggggagaaacctctgtccctaggaagagtccgttcatgtcatgtggtttgggatgaaccaggggtctggccccatcgggtcacaggtgatggcaaatagaaaagaagcaaatggaggaaatagtcggataagtaggtgacgtgaaaggcaggacctggtcaccccagcaagtgctatggacagttcccggaaacggttgcccacttcacaggtccatgggtctgacccttggactctgccaggatcaactgcccagagtgccagagttttagccaaaggtgtacttacttccttatttatctgcaaaaggatggaaactgtgggagtcaaagcctattttgctgagtgttcccactggagtctctggtagaattagcaggtcatgctgtcaaaatcatggacaaaggctgggtgcagtggctcatgcctataatcccagcactttgggaggccaaggtgggcggatcacctgagctcaggagtttgagaccagcctgggcaacatggggaaactccatctctacaaaatatacaaaatattagccagccatcgtggtgcgtgcctgtggtcccagtttcttgggaggctgaggcgggagtatcatttgagccaggaggttgaggttgcagtgagctgagatcacatcactgcactccatcctgggtgacagagagagaccctgtctcaaaaaaaaaaaaaaagaacaaagtcttagcggggggtctctatgtccccaagtggctctctaaggggatccattagcgtataattgaatatcaaagggaattttaccttaaacatatatcaagtctatactcagctaatcgttttgtctaaacacagccttgttagcatttgaatttacaaatattcatttgcttatttgcagtgttccttttgcttttagaataaatcataaatatttccccaatactgtcaagatacttcttcaactttgtccctgaaccatcagctttctttagggtccgggtatcctttacacttcaatggggttttcttgtgtgtgtcattgggggtaactccattgacctcagcatttctatctcaagagatggctctggaacacagaaccagaggcaacaggtactaatggttgataaaattaacagcgactgcataaccattttccacatggcagggctgtgcttaagccccacacctccaataatcaatttctatgacggtactaataaccttaactatatgcaaattcttcaccacttatgatatggtacaaactggagtttacagatggccttggccttgcctagcccatttgttcatcctaacttcttcatcacttcctgatgcacttggggaagcatgttgacacaacgttaccaatatttgattacctatggttatctgcaattacctacgcttatcttatcagaccctagatgccatttgagccccttacttctttgggcagtgggtgaaatgggagaacatagagaaatgttcactttgacctaagaaacgcataaaagggaatgccatgcacaatgtaagataaaatgtttggggacaggggatcatcgtgaaatttatttctgctattctgccctattgaggtcattaattataatggatttaaagatttttttttaaactctacaaacactaagccaaggaattcaggttatctgctatgttaacctaataaagcaaaggaaaataagttgctttaatccttgcttgttaacctaataaagcaaaggaaaatatgttgctttaatccttgcttcttttctcttttggtaatagaaaaggtaaataagatgtaatgttgaactgctggtgatgatttctaaaacgactctttaaatactcctttcctatggacttatattaaagatgcattgtacacattgttttagcagatagatcaaagatatactcagtggtcatctgttgcattatcagaaatttgatacatgttacagaagcatgaggaagggaatcctatccacttttgaaaatagagttcacattgcaagcgacatagggcattatcaaaaccaattcagagcctggcacaaaatgtatacttcctagtgaaagctgtctcaaaacacagcctttttgatggatcatattagctcatatctgccatagaaaggcaatcaagcttactccctgcaatcggagtcaatatcaattcttgctcaagcaaacatgttttacagtgttggcgcaatggcaggaactagtcaagggcactttcagatctggaaagaggaaagaggaggtagaaaatcactcttttgtgtttcttaaactgtcaatcaagcaagaaaatttattccaccccttcatatttgctctaaaatctggggccagtagttgaaatgtgatcttgttctttctcagccttttggcaatttaatgccaaatattccaaatgttagatgaatggcagtaataaaatgattcaaatgtttgataaatacaagctgagagcaaaatctggactctgaaaaatcggaactattttatcatgttgctaaaatgagagcatcattttcttccctctctgtaagtgcggtagtttaatttcctagaaaaagttgctagtgccttgtttaagatgatcatttatcatttcatgtggatattattggtctaattagaaggagaagattgattggatttactttaaagaaaattattctcctatgtctctttgaactcaggaatagaaaatgaccaagaagcacatcatcttcagatgtgatttttgccctcactggggatgtagaaccagaataggtacaacatatgctcagaagagaggtgacttcagtattagccttctagaaactaacatcactttaatttttacatgttccaaaaaaaatcatagtgattgttctgtaataagaatgttaacgtgatgcctatagaagttagaggtttttgtttctgtttctcttcaggcaagtccatagatagaggaaaatcagacacaggctggtgacaactggtatagatacagtgagcatggaatgagaaccacctacaacattgcctgattatttttaagtttatatcaaaactgcttcacaagttcacaaaagttgtcactcttaatttgggttaagaaaagtaatagtattatctctgctgaagttgattgtttttctcttttaccatgactgttggccaaaagcaagctgaacctctgcactttgaaacaaagcacagtatgaatctttaacccaagcacttagtttcaccactgagattctacatcatctgcaagaaaatgcacaaacttttggtccaatgttggattcttcaaaagtgcatagcaaaacttttgtgctatgccgcttgatgtaacttttaaagatgttatcaaatgttaaatgcctcattctgcgttaatttgctgttggctgttttgtgaacacaaaataaacttgagatttttttttttttttttttttgtgaaactcctccaaagccaatttcagcccttggtaagcttgcagacagttactgatcttaaatttaattttaaaagacaatgtatcttaattataatttagctttttaaaacaatgagatagctttacatttcccctttgtttgaatgagaaaatggatcttgggttgctatgctagaacacttgtagattgctgggtcctttgtaagggggccatggacacaccacactttctttcaatccttacatttgaagcattgatattcttcaaaaccttcttgttacatgtgcgcaatagaaatttctaatgttcatgacttttatctttcctgtccatcaattcactggttgtaaatgcttcctgagagctgtctaggtctgtatcccagattgttgcttaatgacatctgacagatgcattgttttctgaaatcagcttaagacaccaattgtggcaactggaaactcattacctgctgcattggatcaactatggaagttggagcaggggtgggcggaggtcacctaaccaatcaatggaaggcaactcacacctgctccaagcctcagctttgagaaacaaacacgtttataagaaaaaatatatagctattattacagaagtgaatatgttgtgctctcttactgctcttggtgcattgacagtttctgtatctcaaccctattcatctttatgaaaaagcattctgaagatctatcctcagcactgctgagtgtgcagtcacactttcctaccaacccccttcttaccatctctagctgccatttgtggggggaacaaaacaagggaatcctgattgtgtacagtataaattgtattatattttttgtacttatgttttatgtaaatagtttgtctcattcaattgtatgtgagcattgaaataaatcctaccatttaggggacaattta

SEQ ID NO: 179783 - DNA, 935 bp, Homo sapiens
  Payload ID: 15429
  Gene Symbol: SEMA5A
  Gene Name: sema domain, seven thrombospondin repeats (type 1 and type 1-like), transmembrane domain (TM) and short cytoplasmic domain, (semaphorin) 5A
  ENST ID: ENST00000513968
  CDS Start-End: 173-935
attcatacacacacacgacctgggatatgactagaaaaatatgctgctctaagccctccaagctctcctctatctccacaaagtgtaaccttaaagcactttccacacatgaggagaagaagagcttctgtttagaagacacgtgcccagagtcagaggccccttgcccaccatgaagggaacctgtgttatagcatggctgttctcaagcctggggctgtggagactcgcccacccagaggcccagggtacgactcagtgccagagaaccgagcatccagtcatctcctataaagaaattggcccctggttacgggagttcagagcgaagaatgctgtggatttctcgcagttaacatttgacccaggacagaaagaacttgttgtaggagcaagaaactacctcttcaggttacagcttgaggatctgtctcttatccaggctgtggaatgggagtgtgatgaagctaccaaaaaggcctgttacagcaaaggcaaatcaaaggaggaatgtcagaactacatccgggtgcttctggtgggtggcgaccggttattcacctgtgggaccaatgcattcacgcctgtctgcaccaaccgctcgttgagcaacctgactgagatccatgatcagatcagtggcatggcccgctgtccctacagtccccagcacaattccacagcgctcctcacagctggtggggagctctatgctgctacagccatggattttccaggacgtgatcctgccatttaccgaagcctaggcattttacctcctctccgcacggcgcagtacaactccaaatggctcaatgagccaaactttgtgtcatcttatgacatcggaaattttacctacttctttttccgagaaaatgcagtagagcatgactgtgggaaaacagtgttctccagagctgcccgggtgtgca

SEQ ID NO: 179784 - DNA, 4523 bp, Homo sapiens
  Payload ID: 15430
  Gene Symbol: SEMA5B
  Gene Name: sema domain, seven thrombospondin repeats (type 1 and type 1-like), transmembrane domain (TM) and short cytoplasmic domain, (semaphorin) 5B
  ENST ID: ENST00000195173
  CDS Start-End: 400-3573
aactcctcccccaccgccccctccctccttctgctcccgcggtctcctcctccctgctctctccgagcgccgggtcgggagctagttggagcgcgggggttggtgccagagcccagctccgccgagccgggcgggtcggcagcgcatccagcggctgctgggagcccgagcgcagcgggcgcgggcccgggtggggactgcaccggagcgctgagagctggaggccgttcctgcgcggccgccccattcccagaccggccgccagcccatctggttagctcccgccgctccgcgccgcccgggagtcgggagccgcggggaaccgggcacctgcacccgcctctgggaggtcttctcccctgtctgcctcccggagctaggactgcagaggggcctatcatggtgcttgcaggccccctggctgtctcgctgttgctgcccagcctcacactgctggtgtcccacctctccagctcccaggatgtctccagtgagcccagcagtgagcagcagctgtgcgcccttagcaagcaccccaccgtggcctttgaagacctgcagccgtgggtctctaacttcacctaccctggagcccgggatttctcccagctggctttggacccctccgggaaccagctcatcgtgggagccaggaactacctcttcagactcagccttgccaatgtctctcttcttcaggccacagagtgggcctccagtgaggacacgcgccgctcctgccaaagcaaagggaagactgaggaggagtgtcagaactacgtgcgagtcctgatcgtcgccggccggaaggtgttcatgtgtggaaccaatgccttttcccccatgtgcaccagcagacaggtggggaacctcagccggactattgagaagatcaatggtgtggcccgctgcccctatgacccacgccacaactccacagctgtcatctcctcccagggggagctctatgcagccacggtcatcgacttctcaggtcgggaccctgccatctaccgcagcctgggcagtgggccaccgcttcgcactgcccaatataactccaagtggcttaatgagccaaacttcgtggcagcctatgatattgggctgtttgcatacttcttcctgcgggagaacgcagtggagcacgactgtggacgcaccgtgtactctcgcgtggcccgcgtgtgcaagaatgacgtggggggccgattcctgctggaggacacatggaccacattcatgaaggcccggctcaactgctcccgcccgggcgaggtccccttctactataacgagctgcagagtgccttccacttgccggagcaggacctcatctatggagttttcacaaccaacgtaaacagcatcgcggcttctgctgtctgcgccttcaacctcagtgctatctcccaggctttcaatggcccatttcgctaccaggagaaccccagggctgcctggctccccatagccaaccccatccccaatttccagtgtggcaccctgcctgagaccggtcccaacgagaacctgacggagcgcagcctgcaggacgcgcagcgcctcttcctgatgagcgaggccgtgcagccggtgacacccgagccctgtgtcacccaggacagcgtgcgcttctcacacctcgtggtggacctggtgcaggctaaagacacgctctaccatgtactctacattggcaccgagtcgggcaccatcctgaaggcgctgtccacggcgagccgcagcctccacggctgctacctggaggagctgcacgtgctgccccccgggcgccgcgagcccctgcgcagcctgcgcatcctgcacagcgcccgcgcgctcttcgtggggctgagagacggcgtcctgcgggtcccactggagaggtgcgccgcctaccgcagccagggggcatgcctgggggcccgggacccgtactgtggctgggacgggaagcagcaacgttgcagcacactcgaggacagctccaacatgagcctctggacccagaacatcaccgcctgtcctgtgcggaatgtgacacgggatgggggcttcggcccatggtcaccatggcaaccatgtgagcacttggatggggacaactcaggctcttgcctgtgtcgagctcgatcctgtgattcccctcgaccccgctgtgggggccttgactgcctggggccagccatccacatcgccaactgctccaggaatggggcgtggaccccgtggtcatcgtgggcgctgtgcagcacgtcctgtggcatcggcttccaggtccgccagcgaagttgcagcaaccctgctccccgccacgggggccgcatctgcgtgggcaagagccgggaggaacggttctgtaatgagaacacgccttgcccggtgcccatcttctgggcttcctggggctcctggagcaagtgcagcagcaactgtggagggggcatgcagtcgcggcgtcgggcctgcgagaacggcaactcctgcctgggctgcggcgtggagttcaagacgtgcaaccccgagggctgccccgaagtgcggcgcaacaccccctggacgccgtggctgcccgtgaacgtgacgcagggcggggcacggcaggagcagcggttccgcttcacctgccgcgcgccccttgcagacccgcacggcctgcagttcggcaggagaaggaccgagacgaggacctgtcccgcggacggctccggctcctgcgacaccgacgccctggtggaggtcctcctgcgcagcgggagcacctccccgcacacggtgagcgggggctgggccgcctggggcccgtggtcgtcctgctcccgggactgcgagctgggcttccgcgtccgcaagagaacgtgcactaacccggagccccgcaacgggggcctgccctgcgtgggcgatgctgccgagtaccaggactgcaacccccaggcttgcccaggtgaggacatctgtctcgggctgcacacggaggaggcactatgtgccacacaggcctgcccagaaggctggtcgccctggtctgagtggagtaagtgcactgacgacggagcccagagccgaagccggcactgtgaggagctcctcccagggtccagcgcctgtgctggaaacagcagccagagccgcccctgcccctacagcgagattcccgtcatcctgccagcctccagcatggaggaggccaccgactgtgcagggttcaatctcatccacttggtggccacgggcatctcctgcttcttgggctctgggctcctgaccctagcagtgtacctgtcttgccagcactgccagcgtcagtcccaggagtccacactggtccatcctgccacccccaaccatttgcactacaagggcggaggcaccccgaagaatgaaaagtacacacccatggaattcaagaccctgaacaagaataacttgatccctgatgacagagccaacttctacccattgcagcagaccaatgtgtacacgactacttactacccaagccccctgaacaaacacagcttccggcccgaggcctcacctggacaacggtgcttccccaacagctgataccgccgtcctggggacttgggcttcttgccttcataaggcacagagcagatggagatgggacagtggagccagtttggttttctccctctgcactaggccaagaacttgctgccttgcctgtggggggtcccatccggcttcagagagctctggctggcattgaccatgggggaaagggctggtttcaggctgacatatggccgcaggtccagttcagcccaggtctctcatggttatcttccaacccactgtcacgctgacactatgctgccatgcctgggctgtggacctactgggcatttgaggaattggagaatggagatggcaagagggcaggcttttaagtttgggttggagacaacttcctgtggcccccacaagctgagtctggccttctccagctggccccaaaaaaggcctttgctacatcctgattatctctgaaagtaatcaatcaagtggctccagtagctctggattttctgccagggctgggccattgtggtgctgccccagtatgacatgggaccaaggccagcgcaggttatccacctctgcctggaagtctatactctacccagggcatccctctggtcagaggcagtgagtactgggaactggaggctgacctgtgcttagaagtcctttaatctgggctggtacaggcctcagccttgccctcaatgcacgaaaggtggcccaggagagaggatcaatgccataggaggcagaagtctggcctctgtgcctctatggagactatcttccagttgctgctcaacagagttgttggctgagacctgcttgggagtctctgctggcccttcatctgttcaggaacacacacacacacacactcacacacgcacacacaatcacaatttgctacagcaacaaaaaagacattgggctgtggcattattaattaaagatgatatccagtctcc

SEQ ID NO: 179785 - DNA, 4792 bp, Homo sapiens
  Payload ID: 15430
  Gene Symbol: SEMA5B
  Gene Name: sema domain, seven thrombospondin repeats (type 1 and type 1-like), transmembrane domain (TM) and short cytoplasmic domain, (semaphorin) 5B
  Uniprot ID: Q9P283
  ENST ID: ENST00000357599
  CDS Start-End: 388-3843
aactcctcccccaccgccccctccctccttctgctcccgcggtctcctcctccctgctctctccgagcgccgggtcgggagctagttggagcgcgggggttggtgccagagcccagctccgccgagccgggcgggtcggcagcgcatccagcggctgctgggagcccgagcgcagcgggcgcgggcccgggtggggactgcaccggagcgctgagagctggaggccgttcctgcgcggccgccccattcccagaccggccgccagcccatctggttagctcccgccgctccgcgccgcccgggagtcgggagccgcggggaaccgggcacctgcacccgcctctgggagtgagtggttccagctggtgcctggcctgtgtctcttggatgccctgtggcttcagtccgtctcctgttgcccaccacctcgtccctgggccgcctgataccccagcccaacagctaaggtgtggatggacagtagggggctggcttctctcactggtcaggggtcttctcccctgtctgcctcccggagctaggactgcagaggggcctatcatggtgcttgcaggccccctggctgtctcgctgttgctgcccagcctcacactgctggtgtcccacctctccagctcccaggatgtctccagtgagcccagcagtgagcagcagctgtgcgcccttagcaagcaccccaccgtggcctttgaagacctgcagccgtgggtctctaacttcacctaccctggagcccgggatttctcccagctggctttggacccctccgggaaccagctcatcgtgggagccaggaactacctcttcagactcagccttgccaatgtctctcttcttcaggccacagagtgggcctccagtgaggacacgcgccgctcctgccaaagcaaagggaagactgaggaggagtgtcagaactacgtgcgagtcctgatcgtcgccggccggaaggtgttcatgtgtggaaccaatgccttttcccccatgtgcaccagcagacaggtggggaacctcagccggactattgagaagatcaatggtgtggcccgctgcccctatgacccacgccacaactccacagctgtcatctcctcccagggggagctctatgcagccacggtcatcgacttctcaggtcgggaccctgccatctaccgcagcctgggcagtgggccaccgcttcgcactgcccaatataactccaagtggcttaatgagccaaacttcgtggcagcctatgatattgggctgtttgcatacttcttcctgcgggagaacgcagtggagcacgactgtggacgcaccgtgtactctcgcgtggcccgcgtgtgcaagaatgacgtggggggccgattcctgctggaggacacatggaccacattcatgaaggcccggctcaactgctcccgcccgggcgaggtccccttctactataacgagctgcagagtgccttccacttgccggagcaggacctcatctatggagttttcacaaccaacgtaaacagcatcgcggcttctgctgtctgcgccttcaacctcagtgctatctcccaggctttcaatggcccatttcgctaccaggagaaccccagggctgcctggctccccatagccaaccccatccccaatttccagtgtggcaccctgcctgagaccggtcccaacgagaacctgacggagcgcagcctgcaggacgcgcagcgcctcttcctgatgagcgaggccgtgcagccggtgacacccgagccctgtgtcacccaggacagcgtgcgcttctcacacctcgtggtggacctggtgcaggctaaagacacgctctaccatgtactctacattggcaccgagtcgggcaccatcctgaaggcgctgtccacggcgagccgcagcctccacggctgctacctggaggagctgcacgtgctgccccccgggcgccgcgagcccctgcgcagcctgcgcatcctgcacagcgcccgcgcgctcttcgtggggctgagagacggcgtcctgcgggtcccactggagaggtgcgccgcctaccgcagccagggggcatgcctgggggcccgggacccgtactgtggctgggacgggaagcagcaacgttgcagcacactcgaggacagctccaacatgagcctctggacccagaacatcaccgcctgtcctgtgcggaatgtgacacgggatgggggcttcggcccatggtcaccatggcaaccatgtgagcacttggatggggacaactcaggctcttgcctgtgtcgagctcgatcctgtgattcccctcgaccccgctgtgggggccttgactgcctggggccagccatccacatcgccaactgctccaggaatggggcgtggaccccgtggtcatcgtgggcgctgtgcagcacgtcctgtggcatcggcttccaggtccgccagcgaagttgcagcaaccctgctccccgccacgggggccgcatctgcgtgggcaagagccgggaggaacggttctgtaatgagaacacgccttgcccggtgcccatcttctgggcttcctggggctcctggagcaagtgcagcagcaactgtggagggggcatgcagtcgcggcgtcgggcctgcgagaacggcaactcctgcctgggctgcggcgtggagttcaagacgtgcaaccccgagggctgccccgaagtgcggcgcaacaccccctggacgccgtggctgcccgtgaacgtgacgcagggcggggcacggcaggagcagcggttccgcttcacctgccgcgcgccccttgcagacccgcacggcctgcagttcggcaggagaaggaccgagacgaggacctgtcccgcggacggctccggctcctgcgacaccgacgccctggtggaggtcctcctgcgcagcgggagcacctccccgcacacggtgagcgggggctgggccgcctggggcccgtggtcgtcctgctcccgggactgcgagctgggcttccgcgtccgcaagagaacgtgcactaacccggagccccgcaacgggggcctgccctgcgtgggcgatgctgccgagtaccaggactgcaacccccaggcttgcccagttcggggtgcttggtcctgctggacctcatggtctccatgctcagcttcctgtggtgggggtcactatcaacgcacccgttcctgcaccagccccgcaccctccccaggtgaggacatctgtctcgggctgcacacggaggaggcactatgtgccacacaggcctgcccagaaggctggtcgccctggtctgagtggagtaagtgcactgacgacggagcccagagccgaagccggcactgtgaggagctcctcccagggtccagcgcctgtgctggaaacagcagccagagccgcccctgcccctacagcgagattcccgtcatcctgccagcctccagcatggaggaggccaccgactgtgcagggttcaatctcatccacttggtggccacgggcatctcctgcttcttgggctctgggctcctgaccctagcagtgtacctgtcttgccagcactgccagcgtcagtcccaggagtccacactggtccatcctgccacccccaaccatttgcactacaagggcggaggcaccccgaagaatgaaaagtacacacccatggaattcaagaccctgaacaagaataacttgatccctgatgacagagccaacttctacccattgcagcagaccaatgtgtacacgactacttactacccaagccccctgaacaaacacagcttccggcccgaggcctcacctggacaacggtgcttccccaacagctgataccgccgtcctggggacttgggcttcttgccttcataaggcacagagcagatggagatgggacagtggagccagtttggttttctccctctgcactaggccaagaacttgctgccttgcctgtggggggtcccatccggcttcagagagctctggctggcattgaccatgggggaaagggctggtttcaggctgacatatggccgcaggtccagttcagcccaggtctctcatggttatcttccaacccactgtcacgctgacactatgctgccatgcctgggctgtggacctactgggcatttgaggaattggagaatggagatggcaagagggcaggcttttaagtttgggttggagacaacttcctgtggcccccacaagctgagtctggccttctccagctggccccaaaaaaggcctttgctacatcctgattatctctgaaagtaatcaatcaagtggctccagtagctctggattttctgccagggctgggccattgtggtgctgccccagtatgacatgggaccaaggccagcgcaggttatccacctctgcctggaagtctatactctacccagggcatccctctggtcagaggcagtgagtactgggaactggaggctgacctgtgcttagaagtcctttaatctgggctggtacaggcctcagccttgccctcaatgcacgaaaggtggcccaggagagaggatcaatgccataggaggcagaagtctggcctctgtgcctctatggagactatcttccagttgctgctcaacagagttgttggctgagacctgcttgggagtctctgctggcccttcatctgttcaggaacacacacacacacacactcacacacgcacacacaatcacaatttgctacagcaacaaaaaagacattgggctgtggcattattaattaaagatgatatccagtctc

SEQ ID NO: 179786 - DNA, 3791 bp, Homo sapiens
  Payload ID: 15430
  Gene Symbol: SEMA5B
  Gene Name: sema domain, seven thrombospondin repeats (type 1 and type 1-like), transmembrane domain (TM) and short cytoplasmic domain, (semaphorin) 5B
  ENST ID: ENST00000393583
  CDS Start-End: 528-3791
agtgcttttgtctggtgctgggagtgaggctcagcagtgtgagggacaattggagatgctcgggggcaggctgccgcgttgtgtcctgcttttctgcggccagaccaagccgtctggagctgctggtcaggttttcttgctgacctcacctgaccacagtggcctgggtggactctacagggaaatgttgttttctccctgggagcagtagcagcagtcctggctcccctggactgagaactcctcatcagccccaggaagcccggaccccctttcagggatctggaaccggtgtgcctgtggccccaggtctgctcccaggcgtgggctgaagtcctgacttctgtcgctgggggcaaggagtgggagagcccagctgctgcctgggctttggcagacagcaggctgatggtgctggcttccccgagactgcttctcctgcctgctgtctgatttccctgcatggtgcccgcagctgagctgctacggtgagtggttccagctggtgcctggcctgtgtctcttggatgccctgtggcttcagtccgtctcctgttgcccaccacctcgtccctgggccgcctgataccccagcccaacagctaaggtgtggatggacagtagggggctggcttctctcactggtcaggggtcttctcccctgtctgcctcccggagctaggactgcagaggggcctatcatggtgcttgcaggccccctggctgtctcgctgttgctgcccagcctcacactgctggtgtcccacctctccagctcccaggatgtctccagtgagcccagcagtgagcagcagctgtgcgcccttagcaagcaccccaccgtggcctttgaagacctgcagccgtgggtctctaacttcacctaccctggagcccgggatttctcccagctggctttggacccctccgggaaccagctcatcgtgggagccaggaactacctcttcagactcagccttgccaatgtctctcttcttcaggccacagagtgggcctccagtgaggacacgcgccgctcctgccaaagcaaagggaagactgaggaggagtgtcagaactacgtgcgagtcctgatcgtcgccggccggaaggtgttcatgtgtggaaccaatgccttttcccccatgtgcaccagcagacaggtggggaacctcagccggactattgagaagatcaatggtgtggcccgctgcccctatgacccacgccacaactccacagctgtcatctcctcccagggggagctctatgcagccacggtcatcgacttctcaggtcgggaccctgccatctaccgcagcctgggcagtgggccaccgcttcgcactgcccaatataactccaagtggcttaatgagccaaacttcgtggcagcctatgatattgggctgtttgcatacttcttcctgcgggagaacgcagtggagcacgactgtggacgcaccgtgtactctcgcgtggcccgcgtgtgcaagaatgacgtggggggccgattcctgctggaggacacatggaccacattcatgaaggcccggctcaactgctcccgcccgggcgaggtccccttctactataacgagctgcagagtgccttccacttgccggagcaggacctcatctatggagttttcacaaccaacgtaaacagcatcgcggcttctgctgtctgcgccttcaacctcagtgctatctcccaggctttcaatggcccatttcgctaccaggagaaccccagggctgcctggctccccatagccaaccccatccccaatttccagtgtggcaccctgcctgagaccggtcccaacgagaacctgacggagcgcagcctgcaggacgcgcagcgcctcttcctgatgagcgaggccgtgcagccggtgacacccgagccctgtgtcacccaggacagcgtgcgcttctcacacctcgtggtggacctggtgcaggctaaagacacgctctaccatgtactctacattggcaccgagtcgggcaccatcctgaaggcgctgtccacggcgagccgcagcctccacggctgctacctggaggagctgcacgtgctgccccccgggcgccgcgagcccctgcgcagcctgcgcatcctgcacagcgcccgcgcgctcttcgtggggctgagagacggcgtcctgcgggtcccactggagaggtgcgccgcctaccgcagccagggggcatgcctgggggcccgggacccgtactgtggctgggacgggaagcagcaacgttgcagcacactcgaggacagctccaacatgagcctctggacccagaacatcaccgcctgtcctgtgcggaatgtgacacgggatgggggcttcggcccatggtcaccatggcaaccatgtgagcacttggatggggacaactcaggctcttgcctgtgtcgagctcgatcctgtgattcccctcgaccccgctgtgggggccttgactgcctggggccagccatccacatcgccaactgctccaggaatggggcgtggaccccgtggtcatcgtgggcgctgtgcagcacgtcctgtggcatcggcttccaggtccgccagcgaagttgcagcaaccctgctccccgccacgggggccgcatctgcgtgggcaagagccgggaggaacggttctgtaatgagaacacgccttgcccggtgcccatcttctgggcttcctggggctcctggagcaagtgcagcagcaactgtggagggggcatgcagtcgcggcgtcgggcctgcgagaacggcaactcctgcctgggctgcggcgtggagttcaagacgtgcaaccccgagggctgccccgaagtgcggcgcaacaccccctggacgccgtggctgcccgtgaacgtgacgcagggcggggcacggcaggagcagcggttccgcttcacctgccgcgcgccccttgcagacccgcacggcctgcagttcggcaggagaaggaccgagacgaggacctgtcccgcggacggctccggctcctgcgacaccgacgccctggtggaggtcctcctgcgcagcgggagcacctccccgcacacggtgagcgggggctgggccgcctggggcccgtggtcgtcctgctcccgggactgcgagctgggcttccgcgtccgcaagagaacgtgcactaacccggagccccgcaacgggggcctgccctgcgtgggcgatgctgccgagtaccaggactgcaacccccaggcttgcccagttcggggtgcttggtcctgctggacctcatggtctccatgctcagcttcctgtggtgggggtcactatcaacgcacccgttcctgcaccagccccgcaccctccccaggtgaggacatctgtctcgggctgcacacggaggaggcactatgtgccacacaggcctgcccagaaggctggtcgccctggtctgagtggagtaagtgcactgacgacggagcccagagccgaagccggcactgtgaggagctcctcccagggtccagcgcctgtgctggaaacagcagccagagccgcccctgcccctacagcgagattcccgtcatcctgccagcctccagcatggaggaggccaccgactgtgcagggttcaatctcatccacttggtggccacgggcatctcctgcttcttgggctctgggctcctgaccctagcagtgtacctgtcttgccagcactgccagcgtcagtcccaggagtccacactggtccatcctgccacccccaaccatttgcactacaagggcggaggcaccccg

SEQ ID NO: 179787 - DNA, 4579 bp, Homo sapiens
  Payload ID: 15430
  Gene Symbol: SEMA5B
  Gene Name: sema domain, seven thrombospondin repeats (type 1 and type 1-like), transmembrane domain (TM) and short cytoplasmic domain, (semaphorin) 5B
  Uniprot ID: Q9P283
  ENST ID: ENST00000451055
  CDS Start-End: 12-3629
gtataaaccacatgctgcatctgtcagcagaggaagccattggctgcgtgagggtcagaaggagcttcatagatgagctggcatttgggagagggcattctacagggacgggcaagcagaagcgaagggatcgagtgagtggttccagctggtgcctggcctgtgtctcttggatgccctgtggcttcagtccgtctcctgttgcccaccacctcgtccctgggccgcctgataccccagcccaacagctaaggtgtggatggacagtagggggctggcttctctcactggtcaggggtcttctcccctgtctgcctcccggagctaggactgcagaggggcctatcatggtgcttgcaggccccctggctgtctcgctgttgctgcccagcctcacactgctggtgtcccacctctccagctcccaggatgtctccagtgagcccagcagtgagcagcagctgtgcgcccttagcaagcaccccaccgtggcctttgaagacctgcagccgtgggtctctaacttcacctaccctggagcccgggatttctcccagctggctttggacccctccgggaaccagctcatcgtgggagccaggaactacctcttcagactcagccttgccaatgtctctcttcttcaggccacagagtgggcctccagtgaggacacgcgccgctcctgccaaagcaaagggaagactgaggaggagtgtcagaactacgtgcgagtcctgatcgtcgccggccggaaggtgttcatgtgtggaaccaatgccttttcccccatgtgcaccagcagacaggtggggaacctcagccggactattgagaagatcaatggtgtggcccgctgcccctatgacccacgccacaactccacagctgtcatctcctcccagggggagctctatgcagccacggtcatcgacttctcaggtcgggaccctgccatctaccgcagcctgggcagtgggccaccgcttcgcactgcccaatataactccaagtggcttaatgagccaaacttcgtggcagcctatgatattgggctgtttgcatacttcttcctgcgggagaacgcagtggagcacgactgtggacgcaccgtgtactctcgcgtggcccgcgtgtgcaagaatgacgtggggggccgattcctgctggaggacacatggaccacattcatgaaggcccggctcaactgctcccgcccgggcgaggtccccttctactataacgagctgcagagtgccttccacttgccggagcaggacctcatctatggagttttcacaaccaacgtaaacagcatcgcggcttctgctgtctgcgccttcaacctcagtgctatctcccaggctttcaatggcccatttcgctaccaggagaaccccagggctgcctggctccccatagccaaccccatccccaatttccagtgtggcaccctgcctgagaccggtcccaacgagaacctgacggagcgcagcctgcaggacgcgcagcgcctcttcctgatgagcgaggccgtgcagccggtgacacccgagccctgtgtcacccaggacagcgtgcgcttctcacacctcgtggtggacctggtgcaggctaaagacacgctctaccatgtactctacattggcaccgagtcgggcaccatcctgaaggcgctgtccacggcgagccgcagcctccacggctgctacctggaggagctgcacgtgctgccccccgggcgccgcgagcccctgcgcagcctgcgcatcctgcacagcgcccgcgcgctcttcgtggggctgagagacggcgtcctgcgggtcccactggagaggtgcgccgcctaccgcagccagggggcatgcctgggggcccgggacccgtactgtggctgggacgggaagcagcaacgttgcagcacactcgaggacagctccaacatgagcctctggacccagaacatcaccgcctgtcctgtgcggaatgtgacacgggatgggggcttcggcccatggtcaccatggcaaccatgtgagcacttggatggggacaactcaggctcttgcctgtgtcgagctcgatcctgtgattcccctcgaccccgctgtgggggccttgactgcctggggccagccatccacatcgccaactgctccaggaatggggcgtggaccccgtggtcatcgtgggcgctgtgcagcacgtcctgtggcatcggcttccaggtccgccagcgaagttgcagcaaccctgctccccgccacgggggccgcatctgcgtgggcaagagccgggaggaacggttctgtaatgagaacacgccttgcccggtgcccatcttctgggcttcctggggctcctggagcaagtgcagcagcaactgtggagggggcatgcagtcgcggcgtcgggcctgcgagaacggcaactcctgcctgggctgcggcgtggagttcaagacgtgcaaccccgagggctgccccgaagtgcggcgcaacaccccctggacgccgtggctgcccgtgaacgtgacgcagggcggggcacggcaggagcagcggttccgcttcacctgccgcgcgccccttgcagacccgcacggcctgcagttcggcaggagaaggaccgagacgaggacctgtcccgcggacggctccggctcctgcgacaccgacgccctggtggaggtcctcctgcgcagcgggagcacctccccgcacacggtgagcgggggctgggccgcctggggcccgtggtcgtcctgctcccgggactgcgagctgggcttccgcgtccgcaagagaacgtgcactaacccggagccccgcaacgggggcctgccctgcgtgggcgatgctgccgagtaccaggactgcaacccccaggcttgcccagttcggggtgcttggtcctgctggacctcatggtctccatgctcagcttcctgtggtgggggtcactatcaacgcacccgttcctgcaccagccccgcaccctccccaggtgaggacatctgtctcgggctgcacacggaggaggcactatgtgccacacaggcctgcccagaaggctggtcgccctggtctgagtggagtaagtgcactgacgacggagcccagagccgaagccggcactgtgaggagctcctcccagggtccagcgcctgtgctggaaacagcagccagagccgcccctgcccctacagcgagattcccgtcatcctgccagcctccagcatggaggaggccaccgactgtgcagggttcaatctcatccacttggtggccacgggcatctcctgcttcttgggctctgggctcctgaccctagcagtgtacctgtcttgccagcactgccagcgtcagtcccaggagtccacactggtccatcctgccacccccaaccatttgcactacaagggcggaggcaccccgaagaatgaaaagtacacacccatggaattcaagaccctgaacaagaataacttgatccctgatgacagagccaacttctacccattgcagcagaccaatgtgtacacgactacttactacccaagccccctgaacaaacacagcttccggcccgaggcctcacctggacaacggtgcttccccaacagctgataccgccgtcctggggacttgggcttcttgccttcataaggcacagagcagatggagatgggacagtggagccagtttggttttctccctctgcactaggccaagaacttgctgccttgcctgtggggggtcccatccggcttcagagagctctggctggcattgaccatgggggaaagggctggtttcaggctgacatatggccgcaggtccagttcagcccaggtctctcatggttatcttccaacccactgtcacgctgacactatgctgccatgcctgggctgtggacctactgggcatttgaggaattggagaatggagatggcaagagggcaggcttttaagtttgggttggagacaacttcctgtggcccccacaagctgagtctggccttctccagctggccccaaaaaaggcctttgctacatcctgattatctctgaaagtaatcaatcaagtggctccagtagctctggattttctgccagggctgggccattgtggtgctgccccagtatgacatgggaccaaggccagcgcaggttatccacctctgcctggaagtctatactctacccagggcatccctctggtcagaggcagtgagtactgggaactggaggctgacctgtgcttagaagtcctttaatctgggctggtacaggcctcagccttgccctcaatgcacgaaaggtggcccaggagagaggatcaatgccataggaggcagaagtctggcctctgtgcctctatggagactatcttccagttgctgctcaacagagttgttggctgagacctgcttgggagtctctgctggcccttcatctgttcaggaacacacacacacacacactcacacacgcacacacaatcacaatttgctacagcaacaaaaaagacattgggctgtggcattattaattaaagatgatatccagtctcc

SEQ ID NO: 179788 - DNA, 1542 bp, Homo sapiens
  Payload ID: 15430
  Gene Symbol: SEMA5B
  Gene Name: sema domain, seven thrombospondin repeats (type 1 and type 1-like), transmembrane domain (TM) and short cytoplasmic domain, (semaphorin) 5B
  ENST ID: ENST00000451541
  CDS Start-End: 1-593
cccgttcctgcaccagccccgcaccctccccagaaggctggtcgccctggtctgagtggagtaagtgcactgacgacggagcccagagccgaagccggcactgtgaggagctcctcccagggtccagcgcctgtgctggaaacagcagccagagccgcccctgcccctacagcgagattcccgtcatcctgccagcctccagcatggaggaggccaccgactgtgcagggttcaatctcatccacttggtggccacgggcatctcctgcttcttgggctctgggctcctgaccctagcagtgtacctgtcttgccagcactgccagcgtcagtcccaggagtccacactggtccatcctgccacccccaaccatttgcactacaagggcggaggcaccccgaagaatgaaaagtacacacccatggaattcaagaccctgaacaagaataacttgatccctgatgacagagccaacttctacccattgcagcagaccaatgtgtacacgactacttactacccaagccccctgaacaaacacagcttccggcccgaggcctcacctggacaacggtgcttccccaacagctgataccgccgtcctggggacttgggcttcttgccttcataaggcacagagcagatggagatgggacagtggagccagtttggttttctccctctgcactaggccaagaacttgctgccttgcctgtggggggtcccatccggcttcagagagctctggctggcattgaccatgggggaaagggctggtttcaggctgacatatggccgcaggtccagttcagcccaggtctctcatggttatcttccaacccactgtcacgctgacactatgctgccatgcctgggctgtggacctactgggcatttgaggaattggagaatggagatggcaagagggcaggcttttaagtttgggttggagacaacttcctgtggcccccacaagctgagtctggccttctccagctggccccaaaaaaggcctttgctacatcctgattatctctgaaagtaatcaatcaagtggctccagtagctctggattttctgccagggctgggccattgtggtgctgccccagtatgacatgggaccaaggccagcgcaggttatccacctctgcctggaagtctatactctacccagggcatccctctggtcagaggcagtgagtactgggaactggaggctgacctgtgcttagaagtcctttaatctgggctggtacaggcctcagccttgccctcaatgcacgaaaggtggcccaggagagaggatcaatgccataggaggcagaagtctggcctctgtgcctctatggagactatcttccagttgctgctcaacagagttgttggctgagacctgcttgggagtctctgctggcccttcatctgttcaggaacacacacacacacacactcacacacgcacacacaatcacaatttgctacagcaacaaaaaagacattgggctgtggcattattaattaaagatgatatccagtctc

SEQ ID NO: 179789 - DNA, 558 bp, Homo sapiens
  Payload ID: 15430
  Gene Symbol: SEMA5B
  Gene Name: sema domain, seven thrombospondin repeats (type 1 and type 1-like), transmembrane domain (TM) and short cytoplasmic domain, (semaphorin) 5B
  ENST ID: ENST00000449546
  CDS Start-End: 307-558
agacatccgtgttccctggctcaggggctcatcgtccttccttcctctgccaaggctgaggcgcagctggacaggggagcatccatcacactcctttcccgccagccagcagcggcagctctcctggcaggcaggggatcagctgtgcctctccttactccactgctcctcacccctggacccagggcccaccctccatctctccttgtctggtgctgcccacgtctgcctgcagaccacacctgtgagcacttgactaagtcttctgtgagtggttccagctggtgcctggcctgtgtctcttggatgccctgtggcttcagtccgtctcctgttgcccaccacctcgtccctgggccgcctgataccccagcccaacagctaaggtgtggatggacagtagggggctggcttctctcactggtcaggggtcttctcccctgtctgcctcccggagctaggactgcagaggggcctatcatggtgcttgcaggccccctggctgtctcgctgttgctgcccagcctcacactgctggtgtcccacctctccagctcc

SEQ ID NO: 179790 - DNA, 716 bp, Homo sapiens
  Payload ID: 15430
  Gene Symbol: SEMA5B
  Gene Name: sema domain, seven thrombospondin repeats (type 1 and type 1-like), transmembrane domain (TM) and short cytoplasmic domain, (semaphorin) 5B
  ENST ID: ENST00000421053
  CDS Start-End: 290-716
gcggccgccccattcccagaccggccgccagcccatctggttagctcccgccgctccgcgccgcccgggagtcgggagccgcggggaaccgggcacctgcacccgcctctgggagccagcttgggtccgggttgcactgggccctgccagggctgtggtcggcgcatctgggctgcagcggcgatggggacccgggacccaggcctggagaaggagacggacgagtgaggctgagggacggagggacagagtgagtggttccagctggtgcctggcctgtgtctcttggatgccctgtggcttcagtccgtctcctgttgcccaccacctcgtccctgggccgcctgataccccagcccaacagctaaggtgtggatggacagtagggggctggcttctctcactggtcaggggtcttctcccctgtctgcctcccggagctaggactgcagaggggcctatcatggtgcttgcaggccccctggctgtctcgctgttgctgcccagcctcacactgctggtgtcccacctctccagctcccaggatgtctccagtgagcccagcagtgagcagcagctgtgcgcccttagcaagcaccccaccgtggcctttgaagacctgcagccgtgggtctctaacttcacctaccctggagcccgggatttctcccagctggctttggacccctccgggaaccagctcatcgtgggagcca

SEQ ID NO: 179791 - DNA, 4733 bp, Homo sapiens
  Payload ID: 15430
  Gene Symbol: SEMA5B
  Gene Name: sema domain, seven thrombospondin repeats (type 1 and type 1-like), transmembrane domain (TM) and short cytoplasmic domain, (semaphorin) 5B
  ENST ID: ENST00000475244
  CDS Start-End: 198-3482
caattcggcctcgctccttgtgattgcgctaaaccttccgtcctcagctgagaacgctccaccacctccccggatcgctcatctcttggctgccctcccactgttcctgatgttattttactccccgtatcccctactcgttcttcacaattctgtaggtgagtggttccagctggtgcctggcctgtgtctcttggatgccctgtggcttcagtccgtctcctgttgcccaccacctcgtccctgggccgcctgataccccagcccaacagctaaggtgtggatggacagtagggggctggcttctctcactggtcaggggtcttctcccctgtctgcctcccggagctaggactgcagaggggcctatcatggtgcttgcaggccccctggctgtctcgctgttgctgcccagcctcacactgctggtgtcccacctctccagctcccaggatgtctccagtgagcccagcagtgagcagcagctgtgcgcccttagcaagcaccccaccgtggcctttgaagacctgcagccgtgggtctctaacttcacctaccctggagcccgggatttctcccagctggctttggacccctccgggaaccagctcatcgtgggagccaggaactacctcttcagactcagccttgccaatgtctctcttcttcaggccacagagtgggcctccagtgaggacacgcgccgctcctgccaaagcaaagggaagactgaggaggagtgtcagaactacgtgcgagtcctgatcgtcgccggccggaaggtgttcatgtgtggaaccaatgccttttcccccatgtgcaccagcagacaggtggggaacctcagccggactattgagaagatcaatggtgtggcccgctgcccctatgacccacgccacaactccacagctgtcatctcctcccagggggagctctatgcagccacggtcatcgacttctcaggtcgggaccctgccatctaccgcagcctgggcagtgggccaccgcttcgcactgcccaatataactccaagtggcttaatgagccaaacttcgtggcagcctatgatattgggctgtttgcatacttcttcctgcgggagaacgcagtggagcacgactgtggacgcaccgtgtactctcgcgtggcccgcgtgtgcaagaatgacgtggggggccgattcctgctggaggacacatggaccacattcatgaaggcccggctcaactgctcccgcccgggcgaggtccccttctactataacgagctgcagagtgccttccacttgccggagcaggacctcatctatggagttttcacaaccaacgtaaacagcatcgcggcttctgctgtctgcgccttcaacctcagtgctatctcccaggctttcaatggcccatttcgctaccaggagaaccccagggctgcctggctccccatagccaaccccatccccaatttccagtgtggcaccctgcctgagaccggtcccaacgagaacctgacggagcgcagcctgcaggacgcgcagcgcctcttcctgatgagcgaggccgtgcagccggtgacacccgagccctgtgtcacccaggacagcgtgcgcttctcacacctcgtggtggacctggtgcaggctaaagacacgctctaccatgtactctacattggcaccgagtcgggcaccatcctgaaggcgctgtccacggcgagccgcagcctccacggctgctacctggaggagctgcacgtgctgccccccgggcgccgcgagcccctgcgcagcctgcgcatcctgcacagcgcccgcgcgctcttcgtggggctgagagacggcgtcctgcgggtcccactggagaggtgcgccgcctaccgcagccagggggcatgcctgggggcccgggacccgtactgtggctgggacgggaagcagcaacgttgcagcacactcgaggacagctccaacatgagcctctggacccagaacatcaccgcctgtcctgtgcggaatgtgacacgggatgggggcttcggcccatggtcaccatggcaaccatgtgagcacttggatggggacaactcaggctcttgcctgtgtcgagctcgatcctgtgattcccctcgaccccgctgtgggggccttgactgcctggggccagccatccacatcgccaactgctccaggaatggggcgtggaccccgtggtcatcgtgggcgctgtgcagcacgtcctgtggcatcggcttccaggtccgccagcgaagttgcagcaaccctgctccccgccacgggggccgcatctgcgtgggcaagagccgggaggaacggttctgtaatgagaacacgccttgcccggtgcccatcttctgggcttcctggggctcctggagcaagtgcagcagcaactgtggagggggcatgcagtcgcggcgtcgggcctgcgagaacggcaactcctgcctgggctgcggcgtggagttcaagacgtgcaaccccgagggctgccccgaagtgcggcgcaacaccccctggacgccgtggctgcccgtgaacgtgacgcagggcggggcacggcaggagcagcggttccgcttcacctgccgcgcgccccttgcagacccgcacggcctgcagttcggcaggagaaggaccgagacgaggacctgtcccgcggacggctccggctcctgcgacaccgacgccctggtggaggtcctcctgcgcagcgggagcacctccccgcacacggtgagcgggggctgggccgcctggggcccgtggtcgtcctgctcccgggactgcgagctgggcttccgcgtccgcaagagaacgtgcactaacccggagccccgcaacgggggcctgccctgcgtgggcgatgctgccgagtaccaggactgcaacccccaggcttgcccagttcggggtgcttggtcctgctggacctcatggtctccatgctcagcttcctgtggtgggggtcactatcaacgcacccgttcctgcaccagccccgcaccctccccaggtgaggacatctgtctcgggctgcacacggaggaggcactatgtgccacacaggcctgcccagaaggctggtcgccctggtctgagtggagtaagtgcactgacgacggagcccagagccgaagccggcactgtgaggagctcctcccagggtccagcgcctgtgctggaaacagcagccagagccgcccctgcccctacagcgagattcccgtcatcctgccagcctccagcatggaggaggccaccgactgtgcaggtaaaagaaaccggacctacctcatgctgcggtcctcccagccctccggcaccccactccaaagtctggactctttccacatcctgctccagacagccaagctttgttggggtccccactgctttgagatgggttcaatctcatccacttggtggccacgggcatctcctgcttcttgggctctgggctcctgaccctagcagtgtacctgtcttgccagcactgccagcgtcagtcccaggagtccacactggtccatcctgccacccccaaccatttgcactacaagggcggaggcaccccgaagaatgaaaagtacacacccatggaattcaagaccctgaacaagaataacttgatccctgatgacagagccaacttctacccattgcagcagaccaatgtgtacacgactacttactacccaagccccctgaacaaacacagcttccggcccgaggcctcacctggacaacggtgcttccccaacagctgataccgccgtcctggggacttgggcttcttgccttcataaggcacagagcagatggagatgggacagtggagccagtttggttttctccctctgcactaggccaagaacttgctgccttgcctgtggggggtcccatccggcttcagagagctctggctggcattgaccatgggggaaagggctggtttcaggctgacatatggccgcaggtccagttcagcccaggtctctcatggttatcttccaacccactgtcacgctgacactatgctgccatgcctgggctgtggacctactgggcatttgaggaattggagaatggagatggcaagagggcaggcttttaagtttgggttggagacaacttcctgtggcccccacaagctgagtctggccttctccagctggccccaaaaaaggcctttgctacatcctgattatctctgaaagtaatcaatcaagtggctccagtagctctggattttctgccagggctgggccattgtggtgctgccccagtatgacatgggaccaaggccagcgcaggttatccacctctgcctggaagtctatactctacccagggcatccctctggtcagaggcagtgagtactgggaactggaggctgacctgtgcttagaagtcctttaatctgggctggtacaggcctcagccttgccctcaatgcacgaaaggtggcccaggagagaggatcaatgccataggaggcagaagtctggcctctgtgcctctatggagactatcttccagttgctgctcaacagagttgttggctgagacctgcttgggagtctctgctggcccttcatctgttcaggaacacacacacacacacactcacacacgcacacacaatcacaatttgctacagcaacaaaaaagacattgggctgtggcattattaattaaagatgatatccagtctc

SEQ ID NO: 179792 - DNA, 4933 bp, Homo sapiens
  Payload ID: 15430
  Gene Symbol: SEMA5B
  Gene Name: sema domain, seven thrombospondin repeats (type 1 and type 1-like), transmembrane domain (TM) and short cytoplasmic domain, (semaphorin) 5B
  Uniprot ID: Q9P283
  ENST ID: ENST00000616742
  CDS Start-End: 528-3983
agtgcttttgtctggtgctgggagtgaggctcagcagtgtgagggacaattggagatgctcgggggcaggctgccgcgttgtgtcctgcttttctgcggccagaccaagccgtctggagctgctggtcaggttttcttgctgacctcacctgaccacagtggcctgggtggactctacagggaaatgttgttttctccctgggagcagtagcagcagtcctggctcccctggactgagaactcctcatcagccccaggaagcccggaccccctttcagggatctggaaccggtgtgcctgtggccccaggtctgctcccaggcgtgggctgaagtcctgacttctgtcgctgggggcaaggagtgggagagcccagctgctgcctgggctttggcagacagcaggctgatggtgctggcttccccgagactgcttctcctgcctgctgtctgatttccctgcatggtgcccgcagctgagctgctacggtgagtggttccagctggtgcctggcctgtgtctcttggatgccctgtggcttcagtccgtctcctgttgcccaccacctcgtccctgggccgcctgataccccagcccaacagctaaggtgtggatggacagtagggggctggcttctctcactggtcaggggtcttctcccctgtctgcctcccggagctaggactgcagaggggcctatcatggtgcttgcaggccccctggctgtctcgctgttgctgcccagcctcacactgctggtgtcccacctctccagctcccaggatgtctccagtgagcccagcagtgagcagcagctgtgcgcccttagcaagcaccccaccgtggcctttgaagacctgcagccgtgggtctctaacttcacctaccctggagcccgggatttctcccagctggctttggacccctccgggaaccagctcatcgtgggagccaggaactacctcttcagactcagccttgccaatgtctctcttcttcaggccacagagtgggcctccagtgaggacacgcgccgctcctgccaaagcaaagggaagactgaggaggagtgtcagaactacgtgcgagtcctgatcgtcgccggccggaaggtgttcatgtgtggaaccaatgccttttcccccatgtgcaccagcagacaggtggggaacctcagccggactattgagaagatcaatggtgtggcccgctgcccctatgacccacgccacaactccacagctgtcatctcctcccagggggagctctatgcagccacggtcatcgacttctcaggtcgggaccctgccatctaccgcagcctgggcagtgggccaccgcttcgcactgcccaatataactccaagtggcttaatgagccaaacttcgtggcagcctatgatattgggctgtttgcatacttcttcctgcgggagaacgcagtggagcacgactgtggacgcaccgtgtactctcgcgtggcccgcgtgtgcaagaatgacgtggggggccgattcctgctggaggacacatggaccacattcatgaaggcccggctcaactgctcccgcccgggcgaggtccccttctactataacgagctgcagagtgccttccacttgccggagcaggacctcatctatggagttttcacaaccaacgtaaacagcatcgcggcttctgctgtctgcgccttcaacctcagtgctatctcccaggctttcaatggcccatttcgctaccaggagaaccccagggctgcctggctccccatagccaaccccatccccaatttccagtgtggcaccctgcctgagaccggtcccaacgagaacctgacggagcgcagcctgcaggacgcgcagcgcctcttcctgatgagcgaggccgtgcagccggtgacacccgagccctgtgtcacccaggacagcgtgcgcttctcacacctcgtggtggacctggtgcaggctaaagacacgctctaccatgtactctacattggcaccgagtcgggcaccatcctgaaggcgctgtccacggcgagccgcagcctccacggctgctacctggaggagctgcacgtgctgccccccgggcgccgcgagcccctgcgcagcctgcgcatcctgcacagcgcccgcgcgctcttcgtggggctgagagacggcgtcctgcgggtcccactggagaggtgcgccgcctaccgcagccagggggcatgcctgggggcccgggacccgtactgtggctgggacgggaagcagcaacgttgcagcacactcgaggacagctccaacatgagcctctggacccagaacatcaccgcctgtcctgtgcggaatgtgacacgggatgggggcttcggcccatggtcaccatggcaaccatgtgagcacttggatggggacaactcaggctcttgcctgtgtcgagctcgatcctgtgattcccctcgaccccgctgtgggggccttgactgcctggggccagccatccacatcgccaactgctccaggaatggggcgtggaccccgtggtcatcgtgggcgctgtgcagcacgtcctgtggcatcggcttccaggtccgccagcgaagttgcagcaaccctgctccccgccacgggggccgcatctgcgtgggcaagagccgggaggaacggttctgtaatgagaacacgccttgcccggtgcccatcttctgggcttcctggggctcctggagcaagtgcagcagcaactgtggagggggcatgcagtcgcggcgtcgggcctgcgagaacggcaactcctgcctgggctgcggcgtggagttcaagacgtgcaaccccgagggctgccccgaagtgcggcgcaacaccccctggacgccgtggctgcccgtgaacgtgacgcagggcggggcacggcaggagcagcggttccgcttcacctgccgcgcgccccttgcagacccgcacggcctgcagttcggcaggagaaggaccgagacgaggacctgtcccgcggacggctccggctcctgcgacaccgacgccctggtggaggtcctcctgcgcagcgggagcacctccccgcacacggtgagcgggggctgggccgcctggggcccgtggtcgtcctgctcccgggactgcgagctgggcttccgcgtccgcaagagaacgtgcactaacccggagccccgcaacgggggcctgccctgcgtgggcgatgctgccgagtaccaggactgcaacccccaggcttgcccagttcggggtgcttggtcctgctggacctcatggtctccatgctcagcttcctgtggtgggggtcactatcaacgcacccgttcctgcaccagccccgcaccctccccaggtgaggacatctgtctcgggctgcacacggaggaggcactatgtgccacacaggcctgcccagaaggctggtcgccctggtctgagtggagtaagtgcactgacgacggagcccagagccgaagccggcactgtgaggagctcctcccagggtccagcgcctgtgctggaaacagcagccagagccgcccctgcccctacagcgagattcccgtcatcctgccagcctccagcatggaggaggccaccgactgtgcagggttcaatctcatccacttggtggccacgggcatctcctgcttcttgggctctgggctcctgaccctagcagtgtacctgtcttgccagcactgccagcgtcagtcccaggagtccacactggtccatcctgccacccccaaccatttgcactacaagggcggaggcaccccgaagaatgaaaagtacacacccatggaattcaagaccctgaacaagaataacttgatccctgatgacagagccaacttctacccattgcagcagaccaatgtgtacacgactacttactacccaagccccctgaacaaacacagcttccggcccgaggcctcacctggacaacggtgcttccccaacagctgataccgccgtcctggggacttgggcttcttgccttcataaggcacagagcagatggagatgggacagtggagccagtttggttttctccctctgcactaggccaagaacttgctgccttgcctgtggggggtcccatccggcttcagagagctctggctggcattgaccatgggggaaagggctggtttcaggctgacatatggccgcaggtccagttcagcccaggtctctcatggttatcttccaacccactgtcacgctgacactatgctgccatgcctgggctgtggacctactgggcatttgaggaattggagaatggagatggcaagagggcaggcttttaagtttgggttggagacaacttcctgtggcccccacaagctgagtctggccttctccagctggccccaaaaaaggcctttgctacatcctgattatctctgaaagtaatcaatcaagtggctccagtagctctggattttctgccagggctgggccattgtggtgctgccccagtatgacatgggaccaaggccagcgcaggttatccacctctgcctggaagtctatactctacccagggcatccctctggtcagaggcagtgagtactgggaactggaggctgacctgtgcttagaagtcctttaatctgggctggtacaggcctcagccttgccctcaatgcacgaaaggtggcccaggagagaggatcaatgccataggaggcagaagtctggcctctgtgcctctatggagactatcttccagttgctgctcaacagagttgttggctgagacctgcttgggagtctctgctggcccttcatctgttcaggaacacacacacacacacactcacacacgcacacacaatcacaatttgctacagcaacaaaaaagacattgggctgtggcattattaattaaagatgatatccagtctcc

SEQ ID NO: 179793 - DNA, 4256 bp, Homo sapiens
  Payload ID: 15431
  Gene Symbol: SEMA6A
  Gene Name: sema domain, transmembrane domain (TM), and cytoplasmic domain, (semaphorin) 6A
  ENST ID: ENST00000257414
  CDS Start-End: 250-3393
gaacacatcgcgtttgcatcccagaaagtagtcgccgcgactatttcccccaaagagacaagcacacatgtaggaatgacaaaggcttgcgaaggagagagcgcagcccgcggcccggagagatcccctcgataatggattactaaatgggatacacgctgtaccagttcgctccgagccccggccgcctgtccgtcgatgcaccgaaaagggtgaagtagagaaataaagtctccccgctgaactactatgaggtcagaagccttgctgctatatttcacactgctacactttgctggggctggtttcccagaagattctgagccaatcagtatttcgcatggcaactatacaaaacagtatccggtgtttgtgggccacaagccaggacggaacaccacacagaggcacaggctggacatccagatgattatgatcatgaacggaaccctctacattgctgctagggaccatatttatactgttgatatagacacatcacacacggaagaaatttattgtagcaaaaaactgacatggaaatctagacaggccgatgtagacacatgcagaatgaagggaaaacataaggatgagtgccacaactttattaaagttcttctaaagaaaaacgatgatgcattgtttgtctgtggaactaatgccttcaacccttcctgcagaaactataagatggatacattggaaccattcggggatgaattcagcggaatggccagatgcccatatgatgccaaacatgccaacgttgcactgtttgcagatggaaaactatactcagccacagtgactgacttccttgccattgacgcagtcatttaccggagtcttggagaaagccctaccctgcggaccgtcaagcacgattcaaaatggttgaaagaaccatactttgttcaagccgtggattacggagattatatctacttcttcttcagggaaatagcagtggagtataacaccatgggaaaggtagttttcccaagagtggctcaggtttgtaagaatgatatgggaggatctcaaagagtcctggagaaacagtggacgtcgttcctgaaggcgcgcttgaactgctcagttcctggagactctcatttttatttcaacattctccaggcagttacagatgtgattcgtatcaacgggcgtgatgttgtcctggcaacgttttctacaccttataacagcatccctgggtctgcagtctgtgcctatgacatgcttgacattgccagtgtttttactgggagattcaaggaacagaagtctcctgattccacctggacaccagttcctgatgaacgagttcctaagcccaggccaggttgctgtgctggctcatcctccttagaaagatatgcaacctccaatgagttccctgatgataccctgaacttcatcaagacgcacccgctcatggatgaggcagtgccctccatcttcaacaggccatggttcctgagaacaatggtcagataccgccttaccaaaattgcagtggacacagctgctgggccatatcagaatcacactgtggtttttctgggatcagagaagggaatcatcttgaagtttttggccagaataggaaatagtggttttctaaatgacagccttttcctggaggagatgagtgtttacaactctgaaaaatgcagctatgatggagtcgaagacaaaaggatcatgggcatgcagctggacagagcaagcagctctctgtatgttgcgttctctacctgtgtgataaaggttccccttggccggtgtgaacgacatgggaagtgtaaaaaaacctgtattgcctccagagacccatattgtggatggataaaggaaggtggtgcctgcagccatttatcacccaacagcagactgacttttgagcaggacatagagcgtggcaatacagatggtctgggggactgtcacaattcctttgtggcactgaatgacatttcaactcctctaccagataatgaaatgtcttacaacacagtgtatgggcattccagttccctcttgcccagcacaaccacatcagattcgacggctcaagaggggtatgagtctaggggaggaatgctggactggaagcatctgcttgactcacctgacagcacagaccctttgggggcagtgtcttcccataatcaccaagacaagaagggagtgattcgggaaagttacctcaaaggccacgaccagctggttcccgtcaccctcttggccattgcagtcatcctggctttcgtcatgggggccgtcttctcgggcatcaccgtctactgcgtctgtgatcatcggcgcaaagacgtggctgtggtgcagcgcaaggagaaggagctcacccactcgcgccggggctccatgagcagcgtcaccaagctcagcggcctctttggggacactcaatccaaagacccaaagccggaggccatcctcacgccactcatgcacaacggcaagctcgccactcccggcaacacggccaagatgctcattaaagcagaccagcaccacctggacctgacggccctccccaccccagagtcaaccccaacgctgcagcagaagcggaagcccagccgcggcagccgcgagtgggagaggaaccagaacctcatcaatgcctgcacaaaggacatgccccccatgggctcccctgtgattcccacggacctgcccctgcgggcctcccccagccacatccccagcgtggtggtcctgcccatcacgcagcagggctaccagcatgagtacgtggaccagcccaaaatgagcgaggtggcccagatggcgctggaggaccaggccgccacactggagtataagaccatcaaggaacatctcagcagcaagagtcccaaccatggggtgaaccttgtggagaacctggacagcctgccccccaaagttccacagcgggaggcctccctgggtcccccgggagcctccctgtctcagaccggtctaagcaagcggctggaaatgcaccactcctcttcctacggggttgactataagaggagctaccccacgaactcgctcacgagaagccaccaggccaccactctcaaaagaaacaacactaactcctccaattcctctcacctctccagaaaccagagctttggcaggggagacaacccgccgcccgccccgcagagggtggactccatccaggtgcacagctcccagccatctggccaggccgtgactgtctcgaggcagcccagcctcaacgcctacaactcactgacaaggtcggggctgaagcgtacgccctcgctaaagccggacgtaccccccaaaccatcctttgctcccctttccacatccatgaagcccaatgatgcgtgtacataatcccagggggagggggtcaggtgtcgaaccagcaggcaaggcgaggtgcccgctcagctcagcaaggttctcaactgcctcgagtacccaccagaccaagaaggcctgcggcagagccgaggacgctgggtcctcctctctgggacacaggggtactcacgaaaactgggccgcgtggtttggtgaaggtttgcaacggcggggactcaccttcattctcttccttcactttcccccacaccctacaacaggtcggacccacaaaagacttcagttatcatcacaaacatgagccaaaagcacatacctaccccatcccccacccccacacacacacacacacacacatgcacacaacacatacacacacacgcacagaggtgaacagaaactgaaacattttgtccacaacttcacgggacgtggccagactgggtttgcgttccaacctgcaaaacacaaatacattttttaaaatcaagaaaatttaaaaagacaaaaaaaaaagaattcattgataattctaactcagactttaacaatggcagaagtttactatgcgcaaatactgtgaaatgcccgccagtgttacagctttctgttgcagcagataaatgccatgttgggcaactatgtcatagatttctgctcctcctctcttttaatgaaataacgtgaccgttaacgcaagtaactctttatttattgttcaccctttttttccttaaggaaaggactcttccaaatatcatcctatgaacagctcttcagaaagcccattgaaagttaaactatttaacgtgaaatccattaactggaataattgagtttctttatttttacaataaattcactgagtaaat

SEQ ID NO: 179794 - DNA, 6878 bp, Homo sapiens
  Payload ID: 15431
  Gene Symbol: SEMA6A
  Gene Name: sema domain, transmembrane domain (TM), and cytoplasmic domain, (semaphorin) 6A
  Uniprot ID: Q9H2E6
  ENST ID: ENST00000343348
  CDS Start-End: 789-3881
gggtcggaggagacgccagccaaagtaggcggagttgcggaaggagagtccgatctgcgcaatccagtccgggacttggctccgcccgggagcggcggcctctccggtgacagaggagtagtgagcggcacggggtgaggctgcagccaactccgctccccgcgcactcggctgcccaggcgctcggaacccagcagcggcgctcctccgcggtgccggtcgcccgcgatgcccgcttagcagcgtgtagcagcggccagcatcaccacacccgcggcaccgcgctgccggccgcagagccgggccagagccttgcacccctgccccagcccccaccccgccccccgccctgaaatgacttgttaatcggcgcagacaccaccaaggggactcaccgaagtggaatccaagtggaatttggatttggagaagagtttcttgaacatttaccctcttccttgttggttttctttttctttttcttctttttttttttggcttcttttttcctctccccttctccgctcgtcattggagatgaacacatcgcgtttgcatcccagaaagtagtcgccgcgactatttcccccaaagagacaagcacacatgtaggaatgacaaaggcttgcgaaggagagagcgcagcccgcggcccggagagatcccctcgataatggattactaaatgggatacacgctgtaccagttcgctccgagccccggccgcctgtccgtcgatgcaccgaaaagggtgaagtagagaaataaagtctccccgctgaactactatgaggtcagaagccttgctgctatatttcacactgctacactttgctggggctggtttcccagaagattctgagccaatcagtatttcgcatggcaactatacaaaacagtatccggtgtttgtgggccacaagccaggacggaacaccacacagaggcacaggctggacatccagatgattatgatcatgaacggaaccctctacattgctgctagggaccatatttatactgttgatatagacacatcacacacggaagaaatttattgtagcaaaaaactgacatggaaatctagacaggccgatgtagacacatgcagaatgaagggaaaacataaggatgagtgccacaactttattaaagttcttctaaagaaaaacgatgatgcattgtttgtctgtggaactaatgccttcaacccttcctgcagaaactataagatggatacattggaaccattcggggatgaattcagcggaatggccagatgcccatatgatgccaaacatgccaacgttgcactgtttgcagatggaaaactatactcagccacagtgactgacttccttgccattgacgcagtcatttaccggagtcttggagaaagccctaccctgcggaccgtcaagcacgattcaaaatggttgaaagaaccatactttgttcaagccgtggattacggagattatatctacttcttcttcagggaaatagcagtggagtataacaccatgggaaaggtagttttcccaagagtggctcaggtttgtaagaatgatatgggaggatctcaaagagtcctggagaaacagtggacgtcgttcctgaaggcgcgcttgaactgctcagttcctggagactctcatttttatttcaacattctccaggcagttacagatgtgattcgtatcaacgggcgtgatgttgtcctggcaacgttttctacaccttataacagcatccctgggtctgcagtctgtgcctatgacatgcttgacattgccagtgtttttactgggagattcaaggaacagaagtctcctgattccacctggacaccagttcctgatgaacgagttcctaagcccaggccaggttgctgtgctggctcatcctccttagaaagatatgcaacctccaatgagttccctgatgataccctgaacttcatcaagacgcacccgctcatggatgaggcagtgccctccatcttcaacaggccatggttcctgagaacaatggtcagataccgccttaccaaaattgcagtggacacagctgctgggccatatcagaatcacactgtggtttttctgggatcagagaagggaatcatcttgaagtttttggccagaataggaaatagtggttttctaaatgacagccttttcctggaggagatgagtgtttacaactctgaaaaatgcagctatgatggagtcgaagacaaaaggatcatgggcatgcagctggacagagcaagcagctctctgtatgttgcgttctctacctgtgtgataaaggttccccttggccggtgtgaacgacatgggaagtgtaaaaaaacctgtattgcctccagagacccatattgtggatggataaaggaaggtggtgcctgcagccatttatcacccaacagcagactgacttttgagcaggacatagagcgtggcaatacagatggtctgggggactgtcacaattcctttgtggcactgaatgggcattccagttccctcttgcccagcacaaccacatcagattcgacggctcaagaggggtatgagtctaggggaggaatgctggactggaagcatctgcttgactcacctgacagcacagaccctttgggggcagtgtcttcccataatcaccaagacaagaagggagtgattcgggaaagttacctcaaaggccacgaccagctggttcccgtcaccctcttggccattgcagtcatcctggctttcgtcatgggggccgtcttctcgggcatcaccgtctactgcgtctgtgatcatcggcgcaaagacgtggctgtggtgcagcgcaaggagaaggagctcacccactcgcgccggggctccatgagcagcgtcaccaagctcagcggcctctttggggacactcaatccaaagacccaaagccggaggccatcctcacgccactcatgcacaacggcaagctcgccactcccggcaacacggccaagatgctcattaaagcagaccagcaccacctggacctgacggccctccccaccccagagtcaaccccaacgctgcagcagaagcggaagcccagccgcggcagccgcgagtgggagaggaaccagaacctcatcaatgcctgcacaaaggacatgccccccatgggctcccctgtgattcccacggacctgcccctgcgggcctcccccagccacatccccagcgtggtggtcctgcccatcacgcagcagggctaccagcatgagtacgtggaccagcccaaaatgagcgaggtggcccagatggcgctggaggaccaggccgccacactggagtataagaccatcaaggaacatctcagcagcaagagtcccaaccatggggtgaaccttgtggagaacctggacagcctgccccccaaagttccacagcgggaggcctccctgggtcccccgggagcctccctgtctcagaccggtctaagcaagcggctggaaatgcaccactcctcttcctacggggttgactataagaggagctaccccacgaactcgctcacgagaagccaccaggccaccactctcaaaagaaacaacactaactcctccaattcctctcacctctccagaaaccagagctttggcaggggagacaacccgccgcccgccccgcagagggtggactccatccaggtgcacagctcccagccatctggccaggccgtgactgtctcgaggcagcccagcctcaacgcctacaactcactgacaaggtcggggctgaagcgtacgccctcgctaaagccggacgtaccccccaaaccatcctttgctcccctttccacatccatgaagcccaatgatgcgtgtacataatcccagggggagggggtcaggtgtcgaaccagcaggcaaggcgaggtgcccgctcagctcagcaaggttctcaactgcctcgagtacccaccagaccaagaaggcctgcggcagagccgaggacgctgggtcctcctctctgggacacaggggtactcacgaaaactgggccgcgtggtttggtgaaggtttgcaacggcggggactcaccttcattctcttccttcactttcccccacaccctacaacaggtcggacccacaaaagacttcagttatcatcacaaacatgagccaaaagcacatacctaccccatcccccacccccacacacacacacacacacacatgcacacaacacatacacacacacgcacagaggtgaacagaaactgaaacattttgtccacaacttcacgggacgtggccagactgggtttgcgttccaacctgcaaaacacaaatacattttttaaaatcaagaaaatttaaaaagacaaaaaaaaaagaattcattgataattctaactcagactttaacaatggcagaagtttactatgcgcaaatactgtgaaatgcccgccagtgttacagctttctgttgcagcagataaatgccatgttgggcaactatgtcatagatttctgctcctcctctcttttaatgaaataacgtgaccgttaacgcaagtaactctttatttattgttcaccctttttttccttaaggaaaggactcttccaaatatcatcctatgaacagctcttcagaaagcccattgaaagttaaactatttaacgtgaaatccattaactggaataattgagtttctttatttttacaataaattcactgagtaaataagttggagctggaattctgagctttgtgtttggactgtctggtctgtagctaaaggaaaaagttaggaggggaatatttatttaaatctatcagttcattgcctggtcaggtctctggcctataaacatgcaaaaaaactaattcatgttaaagtccttccagatcctaatttctaaagcaatcaggagagaaagcttttagaatggcacatcatatctcattgatgccaacatggttttgtccatggttctgactttctgtgaaggcaccagcttgcaatatgccatcccatttcaccttgcatgtgagacagcaaacaaaatccacaaatggtgtgaactaatatgctggctgctaccttgcataaattaatgatttgatcacacgggttcttcgtggggttacatctgtgaatagcctgttttccacatgtaaatttgtgccttacaccttgagttgtgtacacttgtaaactctttatgatcaactgttcccccttttgaaataagtgcagatatttatttaaccctcccttccccaccctctgccccacttccagccctctgaaagattggagtcaagcagatggaagaatgcagtggtgatagttgtcatgcgacagcctgagaacgctgggcagcaccacaccctccaattcacactgccttctagttgtgccaactggaaccaccctttggctgtgctgcgaagcatggaccccagtgttgttgtgggtgtgtcaaatcccctttcatcctcaagagctccctgcttcccttagattatttcaatacggtgatatccttatttgctagcagaaaagggactaacgtcccattcctcttttctgctgcgtccactggctagagagcaggcggtgcgcggttgggcagacacctgggaggagtctccaagccatgtgcacagcacacacgtgcagtgcacacaaagaaatgacatggaaatagatgcaggcaggctggtccctgctgtgattaacgagtaactccaagtacaaggccgaccacaatggatgctgcaaaaacgttgactggggcaaaggattttttattttattttttattttgttaattatgtttttaggggatgggaggtggtgtgtgtttttctcctcttggttttcatttgctcaagcacacaaaagggacttttgtttactctatcatgaacaaaggaactgtccacatactgtaaaccatgagcagtgttgttgttgtttttttaaacagtatatttggtggtctctttgtctgcttttatttccagttcgatcttctgggtttagttttgtctttaaaaagaattcaaaaaaagactgacaatgacagttttgagttggatagtgaaaaagtggagcctccataatcagtgtggttgccttcagacctgagtacttagctgagggtgggtgagagccctttgttccaaaagtccattagttttgctgttgtttaggagtaggtggttgttgttgtttttactttttttttttttggcttttgtaatggaatccatgttcacatcctgtgaactctgtctcctgaaaccctgaagtatttcctagaacctgaaatattgttttcttccttgaattttctctagaaatgcagaaattaggaaggtgatgggtctgtatccccctgcccccttctttcccatgcttgactcccgagagtactggcagtgcagcacccatcattgacgtaagcggctgtcttgtccagtgtttgtaggcatcactgcctcagctgttaaggagacctgtgtcaaaacttacatccacattcctacacccccacaacccatcacttctggtgttaaccctaaaatacccacatgtattgagctggtcttctgcatttaagtatttctccccagtttttttccccactgtgtgtggggggagggtccataaacccgagtgtgcctttgctttccacccttgctagacactggtagatgcaacaaactcagatttatatttgttgtaaagttgtaaaaatattgtgatgtcaccaattttccttccatctccacatcccctaacatctgattcacgacttaatgtatgttgtaagaaaagaaaaaagaaaagaaaaaaagggaaaaaa

SEQ ID NO: 179795 - DNA, 563 bp, Homo sapiens
  Payload ID: 15431
  Gene Symbol: SEMA6A
  Gene Name: sema domain, transmembrane domain (TM), and cytoplasmic domain, (semaphorin) 6A
  ENST ID: ENST00000515009
  CDS Start-End: 85-563
gactcgggctccccaggacaatgtctctttcttcaccaagctgatgggtgaagtagagaaataaagtctccccgctgaactactatgaggtcagaagccttgctgctatatttcacactgctacactttgctggggctggtttcccagaagattctgagccaatcagtatttcgcatggcaactatacaaaacagtatccggtgtttgtgggccacaagccaggacggaacaccacacagaggcacaggctggacatccagatgattatgatcatgaacggaaccctctacattgctgctagggaccatatttatactgttgatatagacacatcacacacggaagaaatttattgtagcaaaaaactgacatggaaatctagacaggccgatgtagacacatgcagaatgaagggaaaacataaggatgagtgccacaactttattaaagttcttctaaagaaaaacgatgatgcattgtttgtctgtggaactaatgccttcaacccttcctgcagaaactataagatggatacattggaaccattcggggatgaattcag

SEQ ID NO: 179796 - DNA, 2116 bp, Homo sapiens
  Payload ID: 15431
  Gene Symbol: SEMA6A
  Gene Name: sema domain, transmembrane domain (TM), and cytoplasmic domain, (semaphorin) 6A
  ENST ID: ENST00000515129
  CDS Start-End: 1-1637
catatcagaatcacactgtggtttttctgggatcagagaagggaatcatcttgaagtttttggccagaataggaaatagtggttttctaaatgacagccttttcctggaggagatgagtgtttacaactctgaaaaatgcagctatgatggagtcgaagacaaaaggatcatgggcatgcagctggacagagcaagcagctctctgtatgttgcgttctctacctgtgtgataaaggttccccttggccggtgtgaacgacatgggaagtgtaaaaaaacctgtattgcctccagagacccatattgtggatggataaaggaaggtggtgcctgcagccatttatcacccaacagcagactgacttttgagcaggacatagagcgtggcaatacagatggtctgggggactgtcacaattcctttgtggcactgaatggagtgattcgggaaagttacctcaaaggccacgaccagctggttcccgtcaccctcttggccattgcagtcatcctggctttcgtcatgggggccgtcttctcgggcatcaccgtctactgcgtctgtgatcatcggcgcaaagacgtggctgtggtgcagcgcaaggagaaggagctcacccactcgcgccggggctccatgagcagcgtcaccaagctcagcggcctctttggggacactcaatccaaagacccaaagccggaggccatcctcacgccactcatgcacaacggcaagctcgccactcccggcaacacggccaagatgctcattaaagcagaccagcaccacctggacctgacggccctccccaccccagagtcaaccccaacgctgcagcagaagcggaagcccagccgcggcagccgcgagtgggagaggaaccagaacctcatcaatgcctgcacaaaggacatgccccccatgggctcccctgtgattcccacggacctgcccctgcgggcctcccccagccacatccccagcgtggtggtcctgcccatcacgcagcagggctaccagcatgagtacgtggaccagcccaaaatgagcgaggtggcccagatggcgctggaggaccaggccgccacactggagtataagaccatcaaggaacatctcagcagcaagagtcccaaccatggggtgaaccttgtggagaacctggacagcctgccccccaaagttccacagcgggaggcctccctgggtcccccgggagcctccctgtctcagaccggtctaagcaagcggctggaaatgcaccactcctcttcctacggggttgactataagaggagctaccccacgaactcgctcacgagaagccaccaggccaccactctcaaaagaaacaacactaactcctccaattcctctcacctctccagaaaccagagctttggcaggggagacaacccgccgcccgccccgcagagggtggactccatccaggtgcacagctcccagccatctggccaggccgtgactgtctcgaggcagcccagcctcaacgcctacaactcactgacaaggtcggggctgaagcgtacgccctcgctaaagccggacgtaccccccaaaccatcctttgctcccctttccacatccatgaagcccaatgatgcgtgtacataatcccagggggagggggtcaggtgtcgaaccagcaggcaaggcgaggtgcccgctcagctcagcaaggttctcaactgcctcgagtacccaccagaccaagaaggcctgcggcagagccgaggacgctgggtcctcctctctgggacacaggggtactcacgaaaactgggccgcgtggtttggtgaaggtttgcaacggcggggactcaccttcattctcttccttcactttcccccacaccctacaacaggtcggacccacaaaagacttcagttatcatcacaaacatgagccaaaagcacatacctaccccatcccccacccccacacacacacacacacacacatgcacacaacacatacacacacacgcacagaggtgaacagaaactgaaacattttgtccacaacttcacgggacgtggccagactgggtttgcgttccaacctgcaaaacacaaatacattttttaaaatc

SEQ ID NO: 179797 - DNA, 3640 bp, Homo sapiens
  Payload ID: 15431
  Gene Symbol: SEMA6A
  Gene Name: sema domain, transmembrane domain (TM), and cytoplasmic domain, (semaphorin) 6A
  ENST ID: ENST00000513137
  CDS Start-End: 1788-3161
tatttctaattatttgcttatgctgggcactgaattttctcttaggctgaccatatattttattaaagtagtcttgaattcaggagtggaaaaaaaaaagttatgttttagacctcaatgtaagctgaaaggaaataaaggaacttctatatttccatttctcaggctgattttccttcccctgttctcttatctgtatcatgacatgagatgtgaacctcagaaatgtaaaaacaaaaagtctagaataaagcattccttgaattttaaatgaacatgcttttagcagctggatacgaagcagactattttcaacaaattgaatgtttcccacttgtgtgagagccaaacaagtgccatacagaaagggacctcttcaatgttaccaaagctttgtggcagcatttaagtgtggtggctccatagaagtcactatagcatggacgagccacttggcttgctttttcctgctaatcaaagttttaagaagataaaaagctatctttgttatatatgttttgtctaatttgcaatattacagtctcctggggggaaatccaacttccaataataattgtaaaaaaaaaaaaagaatgcactgtacttattcttttaatctgtctttctagaggccaatattttatttatcatgtgcatggtgatcatacttcaaggctggagcttttggagttgttgtgagtctgccctactttccaccaaaggcaccaattatacatgcacagtagttgcccttgtatcttttaaaaattgttcaagaggttgttctgtgtaagccaataactccacttgaaaatcacgaggaggtcatattttatttctgccagagagaacaggtatcattgtgccagcttggatcaaagcacctgatacaatctgtatttaaccttgtggaatgatggagggagagcttacaaacgaattcacaggaaatggctagagtttctgctgtaactctcaacctagccattcttctcatattatcctatggtagcttatctgaacctcagaaatctatccttttctaatttgaatcattttagtcaacgcagcctcagaaacggaaaccatctattgaaataatacacaaaagggacagccgtaatagcgtgtagccgttgaagcctccattccaatgaaaagacagtgggaatagatccctttggaaaccactaactaatcccagaaagaggaatgcctgtgaagttgagttgaacctgaagactagacacactgtagaacctccataggaagggtgcagagtaactgagttacttgtgatagggacaagacttacccactaccagaaacctgccccatcggtcacaaatgggattcccagagtggacactttctgtgtttagtgctgccatgggaatatcaaagaaggacactggcctttcttgagcacctatgtgtcagacactgtgcaagatgctttcaccattatgtcactatcctcccaacaccgagaggtatctttatccccactgggtgcacaggaagaggttaagtgattccctgaggcccacccagcaagtatgagagataggatctggcccttcattttctaactacaagttcaatgggctttctgctgaacacaccccacaccaccaccaccaccaccaccaccaccaccactaagccgtgtcatttctagggccatctcctctcagtcttacagccagcttgggtgtcccacctccaggcctctgcgcaaagggaatgtgggtctctctggtgatgttttcctaactgtatttgtgatgaaaacagggcattccagttccctcttgcccagcacaaccacatcagattcgacggctcaagaggggtatgagtctaggggaggaatgctggactggaagcatctgcttgactcacctgacagcacagaccctttgggggcagtgtcttcccataatcaccaagacaagaagggagtgattcgggaaagttacctcaaaggccacgaccagctggttcccgtcaccctcttggccattgcagtcatcctggctttcgtcatgggggccgtcttctcgggcatcaccgtctactgcgtctgtgatcatcggcgcaaagacgtggctgtggtgcagcgcaaggagaaggagctcacccactcgcgccggggctccatgagcagcgtcaccaagctcagcggcctctttggggacactcaatccaaagacccaaagccggaggccatcctcacgccactcatgcacaacggcaagctcgccactcccggcaacacggccaagatgctcattaaagcagaccagcaccacctggacctgacggccctccccaccccagagtcaaccccaacgctgcagcagaagcggaagcccagccgcggcagccgcgagtgggagaggaaccagaacctcatcaatgcctgcacaaaggacatgccccccatgggctcccctgtgattcccacggacctgcccctgcgggcctcccccagccacatccccagcgtggtggtcctgcccatcacgcagcagggctaccagcatgagtacgtggaccagcccaaaatgagcgaggtggcccagatggcgctggaggaccaggccgccacactggagtataagaccatcaaggaacatctcagcagcaagagtcccaaccatggggtgaaccttgtggagaacctggacagcctgccccccaaagttccacagcgggaggcctccctgggtcccccgggagcctccctgtctcagaccggtctaagcaagcggctggaaatgcaccactcctcttcctacggggttgactataagaggagctaccccacgaactcgctcacgagaagccaccaggccaccactctcaaaagaaacaacactaactcctccaattcctctcacctctccagaaaccagagctttggcaggggagacaacccgccgcccgccccgcagagggtggactccatccaggtgcacagctcccagccatctggccaggccgtgactgtctcgaggcagcccagcctcaacgcctacaactcactgacaaggtcggggctgaagcgtacgccctcgctaaagccggacgtaccccccaaaccatcctttgctcccctttccacatccatgaagcccaatgatgcgtgtacataatcccagggggagggggtcaggtgtcgaaccagcaggcaaggcgaggtgcccgctcagctcagcaaggttctcaactgcctcgagtacccaccagaccaagaaggcctgcggcagagccgaggacgctgggtcctcctctctgggacacaggggtactcacgaaaactgggccgcgtggtttggtgaaggtttgcaacggcggggactcaccttcattctcttccttcactttcccccacaccctacaacaggtcggacccacaaaagacttcagttatcatcacaaacatgagccaaaagcacatacctaccccatcccccacccccacacacacacacacacacacatgcacacaacacatacacacacacgcacagaggtgaacagaaactgaaacattttgtccacaacttcacgggacgtggccagactgggtttgcgttccaacctgcaaaacacaaatacattttttaaaatc

SEQ ID NO: 179798 - DNA, 3292 bp, Homo sapiens
  Payload ID: 15431
  Gene Symbol: SEMA6A
  Gene Name: sema domain, transmembrane domain (TM), and cytoplasmic domain, (semaphorin) 6A
  Uniprot ID: Q9H2E6
  ENST ID: ENST00000510263
  CDS Start-End: 200-3292
aatgcgttactgtgtggactgagttcccatgactcgggctccccaggacaatgtctctttcttcaccaagctgatggtaaatatctggttagcttcatctatttaaaaccagccaagcaggaatcctagtgctggagagaggattctttttttttttgtttggtgaagtagagaaataaagtctccccgctgaactactatgaggtcagaagccttgctgctatatttcacactgctacactttgctggggctggtttcccagaagattctgagccaatcagtatttcgcatggcaactatacaaaacagtatccggtgtttgtgggccacaagccaggacggaacaccacacagaggcacaggctggacatccagatgattatgatcatgaacggaaccctctacattgctgctagggaccatatttatactgttgatatagacacatcacacacggaagaaatttattgtagcaaaaaactgacatggaaatctagacaggccgatgtagacacatgcagaatgaagggaaaacataaggatgagtgccacaactttattaaagttcttctaaagaaaaacgatgatgcattgtttgtctgtggaactaatgccttcaacccttcctgcagaaactataagatggatacattggaaccattcggggatgaattcagcggaatggccagatgcccatatgatgccaaacatgccaacgttgcactgtttgcagatggaaaactatactcagccacagtgactgacttccttgccattgacgcagtcatttaccggagtcttggagaaagccctaccctgcggaccgtcaagcacgattcaaaatggttgaaagaaccatactttgttcaagccgtggattacggagattatatctacttcttcttcagggaaatagcagtggagtataacaccatgggaaaggtagttttcccaagagtggctcaggtttgtaagaatgatatgggaggatctcaaagagtcctggagaaacagtggacgtcgttcctgaaggcgcgcttgaactgctcagttcctggagactctcatttttatttcaacattctccaggcagttacagatgtgattcgtatcaacgggcgtgatgttgtcctggcaacgttttctacaccttataacagcatccctgggtctgcagtctgtgcctatgacatgcttgacattgccagtgtttttactgggagattcaaggaacagaagtctcctgattccacctggacaccagttcctgatgaacgagttcctaagcccaggccaggttgctgtgctggctcatcctccttagaaagatatgcaacctccaatgagttccctgatgataccctgaacttcatcaagacgcacccgctcatggatgaggcagtgccctccatcttcaacaggccatggttcctgagaacaatggtcagataccgccttaccaaaattgcagtggacacagctgctgggccatatcagaatcacactgtggtttttctgggatcagagaagggaatcatcttgaagtttttggccagaataggaaatagtggttttctaaatgacagccttttcctggaggagatgagtgtttacaactctgaaaaatgcagctatgatggagtcgaagacaaaaggatcatgggcatgcagctggacagagcaagcagctctctgtatgttgcgttctctacctgtgtgataaaggttccccttggccggtgtgaacgacatgggaagtgtaaaaaaacctgtattgcctccagagacccatattgtggatggataaaggaaggtggtgcctgcagccatttatcacccaacagcagactgacttttgagcaggacatagagcgtggcaatacagatggtctgggggactgtcacaattcctttgtggcactgaatgggcattccagttccctcttgcccagcacaaccacatcagattcgacggctcaagaggggtatgagtctaggggaggaatgctggactggaagcatctgcttgactcacctgacagcacagaccctttgggggcagtgtcttcccataatcaccaagacaagaagggagtgattcgggaaagttacctcaaaggccacgaccagctggttcccgtcaccctcttggccattgcagtcatcctggctttcgtcatgggggccgtcttctcgggcatcaccgtctactgcgtctgtgatcatcggcgcaaagacgtggctgtggtgcagcgcaaggagaaggagctcacccactcgcgccggggctccatgagcagcgtcaccaagctcagcggcctctttggggacactcaatccaaagacccaaagccggaggccatcctcacgccactcatgcacaacggcaagctcgccactcccggcaacacggccaagatgctcattaaagcagaccagcaccacctggacctgacggccctccccaccccagagtcaaccccaacgctgcagcagaagcggaagcccagccgcggcagccgcgagtgggagaggaaccagaacctcatcaatgcctgcacaaaggacatgccccccatgggctcccctgtgattcccacggacctgcccctgcgggcctcccccagccacatccccagcgtggtggtcctgcccatcacgcagcagggctaccagcatgagtacgtggaccagcccaaaatgagcgaggtggcccagatggcgctggaggaccaggccgccacactggagtataagaccatcaaggaacatctcagcagcaagagtcccaaccatggggtgaaccttgtggagaacctggacagcctgccccccaaagttccacagcgggaggcctccctgggtcccccgggagcctccctgtctcagaccggtctaagcaagcggctggaaatgcaccactcctcttcctacggggttgactataagaggagctaccccacgaactcgctcacgagaagccaccaggccaccactctcaaaagaaacaacactaactcctccaattcctctcacctctccagaaaccagagctttggcaggggagacaacccgccgcccgccccgcagagggtggactccatccaggtgcacagctcccagccatctggccaggccgtgactgtctcgaggcagcccagcctcaacgcctacaactcactgacaaggtcggggctgaagcgtacgccctcgctaaagccggacgtaccccccaaaccatcctttgctcccctttccacatccatgaagcccaatgatgcgtgtacataa

SEQ ID NO: 179799 - DNA, 1678 bp, Homo sapiens
  Payload ID: 15431
  Gene Symbol: SEMA6A
  Gene Name: sema domain, transmembrane domain (TM), and cytoplasmic domain, (semaphorin) 6A
  ENST ID: ENST00000503865
  CDS Start-End: 300-1529
aattgaagggaggaggacccttaggaaggaaagaaaaagagaatgtacttttcaggctaaggtttctgggttttaaaaccatcacttcagaaatcaaaatattttagcagaaaaacccccatgagaaagcttcaaggtctcggctgtgacaaagacaacatttcagtagaagtttaaggttgcgtgttgtgggcttgggaaggggtagagatctttatttcctttcattctaattctgtgccactgatacctgccagtaaaatacatgaaacatattccagaaagagttgatttagtagatgaaaaatgcgtctcccgagaccagagaaggagtgattcgggaaagttacctcaaaggccacgaccagctggttcccgtcaccctcttggccattgcagtcatcctggctttcgtcatgggggccgtcttctcgggcatcaccgtctactgcgtctgtgatcatcggcgcaaagacgtggctgtggtgcagcgcaaggagaaggagctcacccactcgcgccggggctccatgagcagcgtcaccaagctcagcggcctctttggggacactcaatccaaagacccaaagccggaggccatcctcacgccactcatgcacaacggcaagctcgccactcccggcaacacggccaagatgctcattaaagcagaccagcaccacctggacctgacggccctccccaccccagagtcaaccccaacgctgcagcagaagcggaagcccagccgcggcagccgcgagtgggagaggaaccagaacctcatcaatgcctgcacaaaggacatgccccccatgggctcccctgtgattcccacggacctgcccctgcgggcctcccccagccacatccccagcgtggtggtcctgcccatcacgcagcagggctaccagcatgagtacgtggaccagcccaaaatgagcgaggtggcccagatggcgctggaggaccaggccgccacactggagtataagaccatcaaggaacatctcagcagcaagagtcccaaccatggggtgaaccttgtggagaacctggacagcctgccccccaaagttccacagcgggaggcctccctgggtcccccgggagcctccctgtctcagaccggtctaagcaagcggctggaaatgcaccactcctcttcctacggggttgactataagaggagctaccccacgaactcgctcacgagaagccaccaggccaccactctcaaaagaaacaacactaactcctccaattcctctcacctctccagaaaccagagctttggcaggggagacaacccgccgcccgccccgcagagggtggactccatccaggtgcacagctcccagccatctggccaggccgtgactgtctcgaggcagcccagcctcaacgcctacaactcactgacaaggtcggggctgaagcgtacgccctcgctaaagccggacgtaccccccaaaccatcctttgctcccctttccacatccatgaagcccaatgatgcgtgtacataatcccagggggagggggtcaggtgtcgaaccagcaggcaaggcgaggtgcccgctcagctcagcaaggttctcaactgcctcgagtacccaccagaccaagaaggcctgcggcagagccgaggacgctgggtcctcctctctgggacaca

SEQ ID NO: 179800 - DNA, 538 bp, Homo sapiens
  Payload ID: 15431
  Gene Symbol: SEMA6A
  Gene Name: sema domain, transmembrane domain (TM), and cytoplasmic domain, (semaphorin) 6A
  ENST ID: ENST00000509665
  CDS Start-End: 197-538
aacaaataaggcaggaatgggctgtatctgctgttgaccatctcaacgcccaagcctgcctttcctggcttagggaggaggccctgttggggaactgagctttctccatagccagagatttttggttccagggcttcttgacatgaaactcccaaaagggtgaagtagagaaataaagtctccccgctgaactactatgaggtcagaagccttgctgctatatttcacactgctacactttgctggggctggtttcccagaagattctgagccaatcagtatttcgcatggcaactatacaaaacagtatccggtgtttgtgggccacaagccaggacggaacaccacacagaggcacaggctggacatccagatgattatgatcatgaacggaaccctctacattgctgctagggaccatatttatactgttgatatagacacatcacacacggaagaaatttattgtagcaaaaaactgacatggaaatctagacaggccgatgtagacacatgcagaatgaagggaaaacataag

SEQ ID NO: 179801 - DNA, 2034 bp, Homo sapiens
  Payload ID: 15432
  Gene Symbol: SEMA6B
  Gene Name: sema domain, transmembrane domain (TM), and cytoplasmic domain, (semaphorin) 6B
  Uniprot ID: Q9H3T3
  ENST ID: ENST00000586965
  CDS Start-End: 1-2034
atgcagaccccgcgagcgtcccctccccgcccggccctgctgcttctgctgctgctactggggggcgcccacggcctctttcctgaggagccgccgccgcttagcgtggcccccagggactacctgaaccactatcccgtgtttgtgggcagcgggcccggacgcctgacccccgcagaaggtgctgacgacctcaacatccagcgagtcctgcgggtcaacaggacgctgttcattggggacagggacaacctctaccgcgtagagctggagccccccacgtccacggagctgcggtaccagaggaagctgacctggagatctaaccccagcgacataaacgtgtgtcggatgaagggcaaacaggagggcgagtgtcgaaacttcgtaaaggtgctgctccttcgggacgagtccacgctctttgtgtgcggttccaacgccttcaacccggtgtgcgccaactacagcatagacaccctgcagcccgtcggagacaacatcagcggtatggcccgctgcccgtacgaccccaagcacgccaatgttgccctcttctctgacgggatgctcttcacagctactgttaccgacttcctagccattgatgctgtcatctaccgcagcctcggggacaggcccaccctgcgcaccgtgaaacatgactccaagtggttcaaagagccttactttgtccatgcggtggagtggggcagccatgtctacttcttcttccgggagattgcgatggagtttaactacctggagaaggtggtggtgtcccgcgtggcccgagtgtgcaagaacgacgtgggaggctccccccgcgtgctggagaagcagtggacgtccttcctgaaggcgcggctcaactgctctgtacccggagactcccatttctacttcaacgtgctgcaggctgtcacgggcgtggtcagcctcgggggccggcccgtggtcctggccgttttttccacgcccagcaacagcatccctggctcggctgtctgcgcctttgacctgacacaggtggcagctgtgtttgaaggccgcttccgagagcagaagtcccccgagtccatctggacgccggtgccggaggatcaggtgcctcgaccccggcccgggtgctgcgcagcccccgggatgcagtacaatgcctccagcgccttgccggatgacatcctcaactttgtcaagacccaccctctgatggacgaggcggtgccctcgctgggccatgcgccctggatcctgcggaccctgatgaggcaccagctgactcgagtggctgtggacgtgggagccggcccctggggcaaccagaccgttgtcttcctgggttctgaggcggggacggtcctcaagttcctcgtccggcccaatgccagcacctcagggacgtctgggctcagtgtcttcctggaggagtttgagacctaccggccggacaggtgtggacggcccggcggtggcgagacagggcagcggctgctgagcttggagctggacgcagcttcggggggcctgctggctgccttcccccgctgcgtggtccgagtgcctgtggctcgctgccagcagtactcggggtgtatgaagaactgtatcggcagtcaggacccctactgcgggtgggcccccgacggctcctgcatcttcctcagcccgggcaccagagccgcctttgagcaggacgtgtccggggccagcacctcaggcttaggggactgcacaggactcctgcgggccagcctctccgaggaccgcgcggggctggtgtcggtgaacctgctggtaacgtcgtcggtggcggccttcgtggtgggagccgtggtgtccggcttcagcgtgggcgtgtgtgtgcgtgccagcgaaggctgctgtgggcgtgtgtgtcaagtgggccacgcgtgcagggtgtgtgtccacgagcgacgatcgtggtggccccagcggcctgggcgttggctgagccgacgctggggcttccagaaggcccgggggtctccgaggtgccggttaggagtttga

SEQ ID NO: 179802 - DNA, 3986 bp, Homo sapiens
  Payload ID: 15432
  Gene Symbol: SEMA6B
  Gene Name: sema domain, transmembrane domain (TM), and cytoplasmic domain, (semaphorin) 6B
  Uniprot ID: Q9H3T3
  ENST ID: ENST00000586582
  CDS Start-End: 312-2978
aaatcctggaagctcagggtcgtgaagaggaagtccagccgcgctatgcgaggtcttcctgtttttggagggggcaggcaccccagggccgattgtcgcgaatcaccttcacctctgggggctcagaatccctgagccagaaggccagggcagggctgggggatacccctgctgctcagacaggaaaatgggctcggagcttgcccaatacttcccagaaggacgaggctgctgaacttctcattcggggctccgggacctggactgtacccctttctggcgtcacctcctcctgtcgcctggccctcgccatgcagaccccgcgagcgtcccctccccgcccggccctgctgcttctgctgctgctactggggggcgcccacggcctctttcctgaggagccgccgccgcttagcgtggcccccagggactacctgaaccactatcccgtgtttgtgggcagcgggcccggacgcctgacccccgcagaaggtgctgacgacctcaacatccagcgagtcctgcgggtcaacaggacgctgttcattggggacagggacaacctctaccgcgtagagctggagccccccacgtccacggagctgcggtaccagaggaagctgacctggagatctaaccccagcgacataaacgtgtgtcggatgaagggcaaacaggagggcgagtgtcgaaacttcgtaaaggtgctgctccttcgggacgagtccacgctctttgtgtgcggttccaacgccttcaacccggtgtgcgccaactacagcatagacaccctgcagcccgtcggagacaacatcagcggtatggcccgctgcccgtacgaccccaagcacgccaatgttgccctcttctctgacgggatgctcttcacagctactgttaccgacttcctagccattgatgctgtcatctaccgcagcctcggggacaggcccaccctgcgcaccgtgaaacatgactccaagtggttcaaagagccttactttgtccatgcggtggagtggggcagccatgtctacttcttcttccgggagattgcgatggagtttaactacctggagaaggtggtggtgtcccgcgtggcccgagtgtgcaagaacgacgtgggaggctccccccgcgtgctggagaagcagtggacgtccttcctgaaggcgcggctcaactgctctgtacccggagactcccatttctacttcaacgtgctgcaggctgtcacgggcgtggtcagcctcgggggccggcccgtggtcctggccgttttttccacgcccagcaacagcatccctggctcggctgtctgcgcctttgacctgacacaggtggcagctgtgtttgaaggccgcttccgagagcagaagtcccccgagtccatctggacgccggtgccggaggatcaggtgcctcgaccccggcccgggtgctgcgcagcccccgggatgcagtacaatgcctccagcgccttgccggatgacatcctcaactttgtcaagacccaccctctgatggacgaggcggtgccctcgctgggccatgcgccctggatcctgcggaccctgatgaggcaccagctgactcgagtggctgtggacgtgggagccggcccctggggcaaccagaccgttgtcttcctgggttctgaggcggggacggtcctcaagttcctcgtccggcccaatgccagcacctcagggacgtctgggctcagtgtcttcctggaggagtttgagacctaccggccggacaggtgtggacggcccggcggtggcgagacagggcagcggctgctgagcttggagctggacgcagcttcggggggcctgctggctgccttcccccgctgcgtggtccgagtgcctgtggctcgctgccagcagtactcggggtgtatgaagaactgtatcggcagtcaggacccctactgcgggtgggcccccgacggctcctgcatcttcctcagcccgggcaccagagccgcctttgagcaggacgtgtccggggccagcacctcaggcttaggggactgcacaggactcctgcgggccagcctctccgaggaccgcgcggggctggtgtcggtgaacctgctggtaacgtcgtcggtggcggccttcgtggtgggagccgtggtgtccggcttcagcgtgggctggttcgtgggcctccgtgagcggcgggagctggcccggcgcaaggacaaggaggccatcctggcgcacggggcgggcgaggcggtgctgagcgtcagccgcctgggcgagcgcagggcgcagggtcccgggggccggggcggaggcggtggcggtggcgccggggttcccccggaggccctgctggcgcccctgatgcagaacggctgggccaaggccacgctgctgcagggcgggccccacgacctggactcggggctgctgcccacgcccgagcagacgccgctgccgcagaagcgcctgcccactccgcacccgcacccccacgccctgggcccccgcgcctgggaccacggccaccccctgctcccggcctccgcttcatcctccctcctgctgctggcgcccgcccgggcccccgagcagccccccgcgcctggggagccgacccccgacggccgcctctatgctgcccggcccggccgcgcctcccacggcgacttcccgctcaccccccacgccagcccggaccgccggcgggtggtgtccgcgcccacgggccccttggacccagcctcagccgccgatggcctcccgcggccctggagcccgcccccgacgggcagcctgaggaggccactgggcccccacgcccctccggccgccaccctgcgccgcacccacacgttcaacagcggcgaggcccggcctggggaccgccaccgcggctgccacgcccggccgggcacagacttggcccacctcctcccctatgggggggcggacaggactgcgccccccgtgccctaggccgggggccccccgatgccttggcagtgccagccacgggaaccaggagcgagagacggtgccagaacgccggggcccggggcaactccgagtgggtgctcaagtcccccccgcgacccacccgcggagtggggggccccctccgccacaaggaagcacaaccagctcgccctccccctacccggggccgcaggacgctgagacggtttgggggtgggtgggcgggaggactttgctatggatttgaggttgaccttatgcgcgtaggttttggttttttttgcagttttggtttcttttgcggttttctaaccaattgcacaactccgttctcggggtggcggcaggcaggggaggcttggacgccggtggggaatggggggccacagctgcagacctaagccctcccccacccctggaaaggtccctccccaacccaggcccctggcgtgtgtgggtgtgcgtgcgtgtgcgtgccgtgttcgtgtgcaaggggccggggaggtgggcgtgtgtgtgcgtgccagcgaaggctgctgtgggcgtgtgtgtcaagtgggccacgcgtgcagggtgtgtgtccacgagcgacgatcgtggtggccccagcggcctgggcgttggctgagccgacgctggggcttccagaaggcccgggggtctccgaggtgccggttaggagtttgaaccccccccactctgcagagggaagcggggacaatgccggggtttcaggcaggagacacgaggagggcctgcccggaagtcacatcggcagcagctgtctaaagggcttgggggcctggggggcggcgaaggtgggtggggcccctctgtaaatacggccccagggtggtgagagagtcccatgccacccgtccccttgtgacctcccccctctgacctccagctgaccatgcatgccacgtggctggctgggtcctctgccctctctggagtttgcctcccccagccccctccccatcaataaaactctgtttacaacca

SEQ ID NO: 179803 - DNA, 5262 bp, Homo sapiens
  Payload ID: 15433
  Gene Symbol: SEMA6C
  Gene Name: sema domain, transmembrane domain (TM), and cytoplasmic domain, (semaphorin) 6C
  Uniprot ID: Q9H3T2
  ENST ID: ENST00000341697
  CDS Start-End: 1693-4485
cgcggctggacttggacccagggctctcccgacagcgccctggaacccaaattcaagcaccatccaattcggacgctcatcgcatctcgcctgagcacaaccacggattgcgaactcagcgcagcgcgtggccgctggccgcccgcggcgatctcgatcccgctgacccgaatcctggagcaagtaccccgggcagggaaggggctgcggggaggcggggagggagcaggagggcgcggccggcggggggcaagcttctgaagcgctaggggaccagggaggtgtcggcgcccggtgtgcctggctgacggagagggtcaacgaaattggggtgcagggaggaaggagggacagtggccgagccccgtaactgtactggtgagagcagagtctgggcacctcgttcaattgggctttcgtcgagtcgcatcccgctggactgggaagcgcgaaaagggattatttgaggcgcgctccgtagagagcgtggaaaacctggccccttgctttcccagcaaggaaactagggctccgagacccacggagaactagaccctcctgacgcccctgaagggatgggaagagggacgcatcgttccggactttgtgtcacgggtgctcctctgtccttgtgcaagccggaatctgagcaccctctgaagggttggctcgtgcaaagaggcggcgaatggggccctcgagcaacatcggtcccagcgcctatctccttccttcagcccgctcggcccggggctttgttagactgaggtctcccaaggaggacatccgagctggcaactgcctcctgagcccacggtccccactgagcgccggcctcaggcccgccctcgtcggttctcagcctctggccctgtttccctggcctgggagacccgcctccgctccccaacccccgctcctatcccctcttcgtctgcgcctgcaggcccctccagcccctcctctcgctaacgtggctctgggacccggtcccggcccagactctgctaccggcccctcctcggagccccggatccggtgagggggagacaggtcgagcccctggccctaggcccacctcttttcgaggctttagacacctggattgtcctggttgggggttgggtgggaaggagggtaggtgctgagtgtggggctaagagctaagagtgggggaaatggcttggagaaaggaaagctccggttccacaggctccttggcgcgaccctgctccctctgaggaaggtggactggggcgggcgaccagcccaaaggcttcctgctattgtccccagcccagtctccccttctccatcccttccacagctctcctagactctggctgtgaccccagccattccccagaggtggcttcggggccaggagagagaagggctgtttcctcttcccagcaacgggaggatctggaaaggggagagtcggccaggtctctcccatgtgcttcagatggggtgtgtgaagcagctcggattcttccagggcagagtgatcttttctccaggccaggagttgaggagctgaccagatgctgcttcccagaaacagctacaagaagccctcttaaaggtcagaggtttcctatccccctcaagcccccacaggagtcaccaacccagggccggcttatgggtgagggggcaccccctggggcctgagctgccccgcacaggatgccccgtgccccccacttcatgcccttgctgctactgctgctgctgctctcacttccccatactcaggccgcctttccccaggaccccctccctctgttgatctctgaccttcaaggtacttccccattatcctggtttcggggcctggaggatgatgctgtggctgcagaacttgggctggactttcagagattcctgaccttgaaccggaccttgctagtggctgcccgggatcacgttttctccttcgatcttcaagccgaagaagaaggggaggggctggtgcccaacaagtatctaacatggagaagccaagatgtggagaactgtgctgtacggggaaagctgacggatgagtgctacaactatattcgtgttcttgttccctgggactcccagacgctccttgcctgtggaacgaactcattcagccctgtgtgccgcagctatgggataacttcgctgcagcaggagggtgaggaactgagtgggcaggctcgatgcccctttgatgccacccagtccaacgtggccatctttgcagagggcagcctgtactcagccacagctgcggatttccaggccagtgatgctgtagtttacagaagccttgggccccagcccccactccgctccgccaagtatgactccaagtggctccgagagccacactttgtccaggccttggagcatggagaccatgtctacttcttcttccgcgaggtctctgtggaggatgctcggctggggagggtgcagttctcccgcgtagcccgagtatgtaaacgtgacatgggcggctcgcctcgggccttggaccgccactggacatccttcctgaagcttcggctcaactgctctgtccctggggactctactttctattttgatgttttacaggccttgactgggcctgtgaacctgcatggccgctctgctctctttggggtcttcaccacccagaccaatagcatccctggctctgccgtctgcgccttctacctggatgagattgagcgtgggtttgagggcaagttcaaggagcagaggagtctggatggggcctggactcctgtgtctgaggacagagttccctcacccaggccaggatcctgtgcaggagtagggggagctgccttgttctcctcttcccgagacctccctgatgatgtcctgaccttcatcaaggctcacccgctgctggaccccgctgtaccacctgtcacccatcagcctctactcactctcactagcagggccctactgacccaagtagctgtggatggcatggctggtccccacagtaacatcacagtcatgttccttggctccaatgatgggacagtgctgaaggtgctgaccccaggtgggcgatccgggggacctgagcccatcctcctggaagagattgatgcctacagccctgcccggtgcagtgggaagcggacagcccaaacagcacgacggatcatagggctggagctggacactgagggtcacaggctttttgtggctttttctggctgtattgtctacctccctctcagccggtgtgcccggcatggggcctgtcagaggagctgtttggcttctcaggacccatactgtggatggcatagctccaggggctgtgtggatatcaggggatctggtgggactgatgtggatcaggctgggaaccaggaatccatggagcatggtgactgccaagatggagctactgggagtcagtctggccctggggattctgcttatggcgtgcgccgggacctgcccccagcctcggcctcccgctccgtccccatcccactcctcctggccagtgtggccgcagcttttgccctgggcgcctcagtctctggcctcctggtctcctgtgcttgtcgccgcgcccaccgacgtcggggcaaggacatcgagactccggggctcccgcgccctctctccctccgcagtttggcccggctccacggtgggggcccagagcccccgccgccctccaaggacggggacgcggtgcagacgccgcagctctacaccaccttcctgccgcctccggagggcgtgcccccgccggagctggcctgcctgcccacccccgagtccacgccggagctgccggtcaagcacctccgcgccgccggggacccctgggagtggaaccagaacaggaacaacgccaaggagggtccgggccgctcacggggcgggcacgcggcgggcgggcccgcgccccgcgtgctggtgaggccaccgccgcccggctgtcccgggcaggccgtggaagtcaccaccctggaggaactgctgcgctacctgcacggcccgcagccgcccagaaagggggccgagccccccgcccctttaacctcgcgggcgctcccgccggagcccgcccccgccctcttgggcggccccagccccaggccccacgagtgcgcctcgccgctgaggctggacgtgccccccgagggcaggtgcgcctctgcccccgcccggcccgcgctctccgcccccgctccccggctgggcgtcggcggaggccggaggttgcctttctccggccaccgggccccccctgccctgctcactcgagtcccctcgggaggtccctccaggtactccgggggtcccgggaagcacctcctgtacctgggccggcccgagggctaccggggccgcgccctgaaaagggtggacgtcgagaagccccagttgtccctgaagcctcccctcgtcgggccctcctcccgccaggccgtcccgaacggcggccgtttcaacttttaaagggagcggcccacggcctccagcgtggggagcgcccgagtcctctcggccacgagctggacgctcttcaggacgtttcaccgccccctcgccccgcacctccagccttcccgactcgcagagtctcccgaggccccttttcgcctcgggtttatttattgactgtctttccccctgtcctcgacagaagagtgggaggtgagaagcccgtctcctcagtgagccagcatttcagggggagctggcggactcccactccccgctcccttccagccaagctgccttaactcgcccctcggggctcccccagagactgtgccccgggcgggccgcgcgcgctgtgtccagagtcctcgggccttctgggtctgggacgtgcctctcctactgtgtaggagcctccgcttcccaatacagccgtgtctgcagccactgcctgacttcactcgggcgggggagggcggcagtcggtcggctcgctctgggcgccctcgctctctgccttcatctgggccctgggctctcccgggtaatgggatggctgcggtcccgccggggggcagtctggaaaggtttcctaaaggagacgagcgaattaacggtgtcgaggtgagccagggccagggggaccccggtaaagtttagttgaggctggggaaggccctcggagctcgtttccagatcgaggtaagagggactttcttaaaggcctagtctatgggatggggcggcggagggaattttttgagaaataaaatgaagctgcagtgtacgtta

SEQ ID NO: 179804 - DNA, 3697 bp, Homo sapiens
  Payload ID: 15433
  Gene Symbol: SEMA6C
  Gene Name: sema domain, transmembrane domain (TM), and cytoplasmic domain, (semaphorin) 6C
  Uniprot ID: Q9H3T2
  ENST ID: ENST00000368912
  CDS Start-End: 130-2898
cgatcccgctgacccgaatcctggagtcagaggtttcctatccccctcaagcccccacaggagtcaccaacccagggccggcttatgggtgagggggcaccccctggggcctgagctgccccgcacaggatgccccgtgccccccacttcatgcccttgctgctactgctgctgctgctctcacttccccatactcaggccgcctttccccaggaccccctccctctgttgatctctgaccttcaaggtacttccccattatcctggtttcggggcctggaggatgatgctgtggctgcagaacttgggctggactttcagagattcctgaccttgaaccggaccttgctagtggctgcccgggatcacgttttctccttcgatcttcaagccgaagaagaaggggaggggctggtgcccaacaagtatctaacatggagaagccaagatgtggagaactgtgctgtacggggaaagctgacggatgagtgctacaactatattcgtgttcttgttccctgggactcccagacgctccttgcctgtggaacgaactcattcagccctgtgtgccgcagctatgggataacttcgctgcagcaggagggtgaggaactgagtgggcaggctcgatgcccctttgatgccacccagtccaacgtggccatctttgcagagccacactttgtccaggccttggagcatggagaccatgtctacttcttcttccgcgaggtctctgtggaggatgctcggctggggagggtgcagttctcccgcgtagcccgagtatgtaaacgtgacatgggcggctcgcctcgggccttggaccgccactggacatccttcctgaagcttcggctcaactgctctgtccctggggactctactttctattttgatgttttacaggccttgactgggcctgtgaacctgcatggccgctctgctctctttggggtcttcaccacccagaccaatagcatccctggctctgccgtctgcgccttctacctggatgagattgagcgtgggtttgagggcaagttcaaggagcagaggagtctggatggggcctggactcctgtgtctgaggacagagttccctcacccaggccaggatcctgtgcaggagtagggggagctgccttgttctcctcttcccgagacctccctgatgatgtcctgaccttcatcaaggctcacccgctgctggaccccgctgtaccacctgtcacccatcagcctctactcactctcactagcagggccctactgacccaagtagctgtggatggcatggctggtccccacagtaacatcacagtcatgttccttggctccaatgatgggacagtgctgaaggtgctgaccccaggtgggcgatccgggggacctgagcccatcctcctggaagagattgatgcctacagccctgcccggtgcagtgggaagcggacagcccaaacagcacgacggatcatagggctggagctggacactgagggtcacaggctttttgtggctttttctggctgtattgtctacctccctctcagccggtgtgcccggcatggggcctgtcagaggagctgtttggcttctcaggacccatactgtggatggcatagctccaggggctgtgtggatatcaggggatctggtgggactgatgtggatcaggctgggaaccaggaatccatggagcatggtgactgccaagatggagctactgggagtcagtctggccctggggattctgcttatgtgcttccgggtcctggcccttcccctgggacccccagtcctcccagtgatgcccacccccggccccagtcttccactcttggagttcacactcggggcgtgcgccgggacctgcccccagcctcggcctcccgctccgtccccatcccactcctcctggccagtgtggccgcagcttttgccctgggcgcctcagtctctggcctcctggtctcctgtgcttgtcgccgcgcccaccgacgtcggggcaaggacatcgagactccggggctcccgcgccctctctccctccgcagtttggcccggctccacggtgggggcccagagcccccgccgccctccaaggacggggacgcggtgcagacgccgcagctctacaccaccttcctgccgcctccggagggcgtgcccccgccggagctggcctgcctgcccacccccgagtccacgccggagctgccggtcaagcacctccgcgccgccggggacccctgggagtggaaccagaacaggaacaacgccaaggagggtccgggccgctcacggggcgggcacgcggcgggcgggcccgcgccccgcgtgctggtgaggccaccgccgcccggctgtcccgggcaggccgtggaagtcaccaccctggaggaactgctgcgctacctgcacggcccgcagccgcccagaaagggggccgagccccccgcccctttaacctcgcgggcgctcccgccggagcccgcccccgccctcttgggcggccccagccccaggccccacgagtgcgcctcgccgctgaggctggacgtgccccccgagggcaggtgcgcctctgcccccgcccggcccgcgctctccgcccccgctccccggctgggcgtcggcggaggccggaggttgcctttctccggccaccgggccccccctgccctgctcactcgagtcccctcgggaggtccctccaggtactccgggggtcccgggaagcacctcctgtacctgggccggcccgagggctaccggggccgcgccctgaaaagggtggacgtcgagaagccccagttgtccctgaagcctcccctcgtcgggccctcctcccgccaggccgtcccgaacggcggccgtttcaacttttaaagggagcggcccacggcctccagcgtggggagcgcccgagtcctctcggccacgagctggacgctcttcaggacgtttcaccgccccctcgccccgcacctccagccttcccgactcgcagagtctcccgaggccccttttcgcctcgggtttatttattgactgtctttccccctgtcctcgacagaagagtgggaggtgagaagcccgtctcctcagtgagccagcatttcagggggagctggcggactcccactccccgctcccttccagccaagctgccttaactcgcccctcggggctcccccagagactgtgccccgggcgggccgcgcgcgctgtgtccagagtcctcgggccttctgggtctgggacgtgcctctcctactgtgtaggagcctccgcttcccaatacagccgtgtctgcagccactgcctgacttcactcgggcgggggagggcggcagtcggtcggctcgctctgggcgccctcgctctctgccttcatctgggccctgggctctcccgggtaatgggatggctgcggtcccgccggggggcagtctggaaaggtttcctaaaggagacgagcgaattaacggtgtcgaggtgagccagggccagggggaccccggtaaagtttagttgaggctggggaaggccctcggagctcgtttccagatcgaggtaagagggactttcttaaaggcctagtctatgggatggggcggcggagggaattttttgagaaataaaatgaagctgcagtgtacgttacttgaagttccacatcagaaaa

SEQ ID NO: 179805 - DNA, 3817 bp, Homo sapiens
  Payload ID: 15433
  Gene Symbol: SEMA6C
  Gene Name: sema domain, transmembrane domain (TM), and cytoplasmic domain, (semaphorin) 6C
  Uniprot ID: Q9H3T2
  ENST ID: ENST00000368913
  CDS Start-End: 130-3018
cgatcccgctgacccgaatcctggagtcagaggtttcctatccccctcaagcccccacaggagtcaccaacccagggccggcttatgggtgagggggcaccccctggggcctgagctgccccgcacaggatgccccgtgccccccacttcatgcccttgctgctactgctgctgctgctctcacttccccatactcaggccgcctttccccaggaccccctccctctgttgatctctgaccttcaaggtacttccccattatcctggtttcggggcctggaggatgatgctgtggctgcagaacttgggctggactttcagagattcctgaccttgaaccggaccttgctagtggctgcccgggatcacgttttctccttcgatcttcaagccgaagaagaaggggaggggctggtgcccaacaagtatctaacatggagaagccaagatgtggagaactgtgctgtacggggaaagctgacggatgagtgctacaactatattcgtgttcttgttccctgggactcccagacgctccttgcctgtggaacgaactcattcagccctgtgtgccgcagctatgggataacttcgctgcagcaggagggtgaggaactgagtgggcaggctcgatgcccctttgatgccacccagtccaacgtggccatctttgcagagggcagcctgtactcagccacagctgcggatttccaggccagtgatgctgtagtttacagaagccttgggccccagcccccactccgctccgccaagtatgactccaagtggctccgagagccacactttgtccaggccttggagcatggagaccatgtctacttcttcttccgcgaggtctctgtggaggatgctcggctggggagggtgcagttctcccgcgtagcccgagtatgtaaacgtgacatgggcggctcgcctcgggccttggaccgccactggacatccttcctgaagcttcggctcaactgctctgtccctggggactctactttctattttgatgttttacaggccttgactgggcctgtgaacctgcatggccgctctgctctctttggggtcttcaccacccagaccaatagcatccctggctctgccgtctgcgccttctacctggatgagattgagcgtgggtttgagggcaagttcaaggagcagaggagtctggatggggcctggactcctgtgtctgaggacagagttccctcacccaggccaggatcctgtgcaggagtagggggagctgccttgttctcctcttcccgagacctccctgatgatgtcctgaccttcatcaaggctcacccgctgctggaccccgctgtaccacctgtcacccatcagcctctactcactctcactagcagggccctactgacccaagtagctgtggatggcatggctggtccccacagtaacatcacagtcatgttccttggctccaatgatgggacagtgctgaaggtgctgaccccaggtgggcgatccgggggacctgagcccatcctcctggaagagattgatgcctacagccctgcccggtgcagtgggaagcggacagcccaaacagcacgacggatcatagggctggagctggacactgagggtcacaggctttttgtggctttttctggctgtattgtctacctccctctcagccggtgtgcccggcatggggcctgtcagaggagctgtttggcttctcaggacccatactgtggatggcatagctccaggggctgtgtggatatcaggggatctggtgggactgatgtggatcaggctgggaaccaggaatccatggagcatggtgactgccaagatggagctactgggagtcagtctggccctggggattctgcttatgtgcttccgggtcctggcccttcccctgggacccccagtcctcccagtgatgcccacccccggccccagtcttccactcttggagttcacactcggggcgtgcgccgggacctgcccccagcctcggcctcccgctccgtccccatcccactcctcctggccagtgtggccgcagcttttgccctgggcgcctcagtctctggcctcctggtctcctgtgcttgtcgccgcgcccaccgacgtcggggcaaggacatcgagactccggggctcccgcgccctctctccctccgcagtttggcccggctccacggtgggggcccagagcccccgccgccctccaaggacggggacgcggtgcagacgccgcagctctacaccaccttcctgccgcctccggagggcgtgcccccgccggagctggcctgcctgcccacccccgagtccacgccggagctgccggtcaagcacctccgcgccgccggggacccctgggagtggaaccagaacaggaacaacgccaaggagggtccgggccgctcacggggcgggcacgcggcgggcgggcccgcgccccgcgtgctggtgaggccaccgccgcccggctgtcccgggcaggccgtggaagtcaccaccctggaggaactgctgcgctacctgcacggcccgcagccgcccagaaagggggccgagccccccgcccctttaacctcgcgggcgctcccgccggagcccgcccccgccctcttgggcggccccagccccaggccccacgagtgcgcctcgccgctgaggctggacgtgccccccgagggcaggtgcgcctctgcccccgcccggcccgcgctctccgcccccgctccccggctgggcgtcggcggaggccggaggttgcctttctccggccaccgggccccccctgccctgctcactcgagtcccctcgggaggtccctccaggtactccgggggtcccgggaagcacctcctgtacctgggccggcccgagggctaccggggccgcgccctgaaaagggtggacgtcgagaagccccagttgtccctgaagcctcccctcgtcgggccctcctcccgccaggccgtcccgaacggcggccgtttcaacttttaaagggagcggcccacggcctccagcgtggggagcgcccgagtcctctcggccacgagctggacgctcttcaggacgtttcaccgccccctcgccccgcacctccagccttcccgactcgcagagtctcccgaggccccttttcgcctcgggtttatttattgactgtctttccccctgtcctcgacagaagagtgggaggtgagaagcccgtctcctcagtgagccagcatttcagggggagctggcggactcccactccccgctcccttccagccaagctgccttaactcgcccctcggggctcccccagagactgtgccccgggcgggccgcgcgcgctgtgtccagagtcctcgggccttctgggtctgggacgtgcctctcctactgtgtaggagcctccgcttcccaatacagccgtgtctgcagccactgcctgacttcactcgggcgggggagggcggcagtcggtcggctcgctctgggcgccctcgctctctgccttcatctgggccctgggctctcccgggtaatgggatggctgcggtcccgccggggggcagtctggaaaggtttcctaaaggagacgagcgaattaacggtgtcgaggtgagccagggccagggggaccccggtaaagtttagttgaggctggggaaggccctcggagctcgtttccagatcgaggtaagagggactttcttaaaggcctagtctatgggatggggcggcggagggaattttttgagaaataaaatgaagctgcagtgtacgttacttgaagttccacatcagaaaa

SEQ ID NO: 179806 - DNA, 3892 bp, Homo sapiens
  Payload ID: 15433
  Gene Symbol: SEMA6C
  Gene Name: sema domain, transmembrane domain (TM), and cytoplasmic domain, (semaphorin) 6C
  Uniprot ID: Q9H3T2
  ENST ID: ENST00000368914
  CDS Start-End: 301-3093
gttttcctccgcggatccgcggctggacttggacccagggctctcccgacagcgccctggaacccaaattcaagcaccatccaattcggacgctcatcgcatctcgcctgagcacaaccacggattgcgaactcagcgcagcgcgtggccgctggccgcccgcggcgatctcgatcccgctgacccgaatcctggagtcagaggtttcctatccccctcaagcccccacaggagtcaccaacccagggccggcttatgggtgagggggcaccccctggggcctgagctgccccgcacaggatgccccgtgccccccacttcatgcccttgctgctactgctgctgctgctctcacttccccatactcaggccgcctttccccaggaccccctccctctgttgatctctgaccttcaaggtacttccccattatcctggtttcggggcctggaggatgatgctgtggctgcagaacttgggctggactttcagagattcctgaccttgaaccggaccttgctagtggctgcccgggatcacgttttctccttcgatcttcaagccgaagaagaaggggaggggctggtgcccaacaagtatctaacatggagaagccaagatgtggagaactgtgctgtacggggaaagctgacggatgagtgctacaactatattcgtgttcttgttccctgggactcccagacgctccttgcctgtggaacgaactcattcagccctgtgtgccgcagctatgggataacttcgctgcagcaggagggtgaggaactgagtgggcaggctcgatgcccctttgatgccacccagtccaacgtggccatctttgcagagggcagcctgtactcagccacagctgcggatttccaggccagtgatgctgtagtttacagaagccttgggccccagcccccactccgctccgccaagtatgactccaagtggctccgagagccacactttgtccaggccttggagcatggagaccatgtctacttcttcttccgcgaggtctctgtggaggatgctcggctggggagggtgcagttctcccgcgtagcccgagtatgtaaacgtgacatgggcggctcgcctcgggccttggaccgccactggacatccttcctgaagcttcggctcaactgctctgtccctggggactctactttctattttgatgttttacaggccttgactgggcctgtgaacctgcatggccgctctgctctctttggggtcttcaccacccagaccaatagcatccctggctctgccgtctgcgccttctacctggatgagattgagcgtgggtttgagggcaagttcaaggagcagaggagtctggatggggcctggactcctgtgtctgaggacagagttccctcacccaggccaggatcctgtgcaggagtagggggagctgccttgttctcctcttcccgagacctccctgatgatgtcctgaccttcatcaaggctcacccgctgctggaccccgctgtaccacctgtcacccatcagcctctactcactctcactagcagggccctactgacccaagtagctgtggatggcatggctggtccccacagtaacatcacagtcatgttccttggctccaatgatgggacagtgctgaaggtgctgaccccaggtgggcgatccgggggacctgagcccatcctcctggaagagattgatgcctacagccctgcccggtgcagtgggaagcggacagcccaaacagcacgacggatcatagggctggagctggacactgagggtcacaggctttttgtggctttttctggctgtattgtctacctccctctcagccggtgtgcccggcatggggcctgtcagaggagctgtttggcttctcaggacccatactgtggatggcatagctccaggggctgtgtggatatcaggggatctggtgggactgatgtggatcaggctgggaaccaggaatccatggagcatggtgactgccaagatggagctactgggagtcagtctggccctggggattctgcttatggcgtgcgccgggacctgcccccagcctcggcctcccgctccgtccccatcccactcctcctggccagtgtggccgcagcttttgccctgggcgcctcagtctctggcctcctggtctcctgtgcttgtcgccgcgcccaccgacgtcggggcaaggacatcgagactccggggctcccgcgccctctctccctccgcagtttggcccggctccacggtgggggcccagagcccccgccgccctccaaggacggggacgcggtgcagacgccgcagctctacaccaccttcctgccgcctccggagggcgtgcccccgccggagctggcctgcctgcccacccccgagtccacgccggagctgccggtcaagcacctccgcgccgccggggacccctgggagtggaaccagaacaggaacaacgccaaggagggtccgggccgctcacggggcgggcacgcggcgggcgggcccgcgccccgcgtgctggtgaggccaccgccgcccggctgtcccgggcaggccgtggaagtcaccaccctggaggaactgctgcgctacctgcacggcccgcagccgcccagaaagggggccgagccccccgcccctttaacctcgcgggcgctcccgccggagcccgcccccgccctcttgggcggccccagccccaggccccacgagtgcgcctcgccgctgaggctggacgtgccccccgagggcaggtgcgcctctgcccccgcccggcccgcgctctccgcccccgctccccggctgggcgtcggcggaggccggaggttgcctttctccggccaccgggccccccctgccctgctcactcgagtcccctcgggaggtccctccaggtactccgggggtcccgggaagcacctcctgtacctgggccggcccgagggctaccggggccgcgccctgaaaagggtggacgtcgagaagccccagttgtccctgaagcctcccctcgtcgggccctcctcccgccaggccgtcccgaacggcggccgtttcaacttttaaagggagcggcccacggcctccagcgtggggagcgcccgagtcctctcggccacgagctggacgctcttcaggacgtttcaccgccccctcgccccgcacctccagccttcccgactcgcagagtctcccgaggccccttttcgcctcgggtttatttattgactgtctttccccctgtcctcgacagaagagtgggaggtgagaagcccgtctcctcagtgagccagcatttcagggggagctggcggactcccactccccgctcccttccagccaagctgccttaactcgcccctcggggctcccccagagactgtgccccgggcgggccgcgcgcgctgtgtccagagtcctcgggccttctgggtctgggacgtgcctctcctactgtgtaggagcctccgcttcccaatacagccgtgtctgcagccactgcctgacttcactcgggcgggggagggcggcagtcggtcggctcgctctgggcgccctcgctctctgccttcatctgggccctgggctctcccgggtaatgggatggctgcggtcccgccggggggcagtctggaaaggtttcctaaaggagacgagcgaattaacggtgtcgaggtgagccagggccagggggaccccggtaaagtttagttgaggctggggaaggccctcggagctcgtttccagatcgaggtaagagggactttcttaaaggcctagtctatgggatggggcggcggagggaattttttgagaaataaaatgaagctgcagtgtacgttacttgaagttccacatcagaaaa

SEQ ID NO: 179807 - DNA, 1950 bp, Homo sapiens
  Payload ID: 15433
  Gene Symbol: SEMA6C
  Gene Name: sema domain, transmembrane domain (TM), and cytoplasmic domain, (semaphorin) 6C
  ENST ID: ENST00000613223
  CDS Start-End: 337-1950
actggggccgagcccagagccccgggcggtcgcattgttttcctccgcggatccgcggctggacttggacccagggctctcccgacagcgccctggaacccaaattcaagcaccatccaattcggacgctcatcgcatctcgcctgagcacaaccacggattgcgaactcagcgcagcgcgtggccgctggccgcccgcggcgatctcgatcccgctgacccgaatcctggagtcagaggtttcctatccccctcaagcccccacaggagtcaccaacccagggccggcttatgggtgagggggcaccccctggggcctgagctgccccgcacaggatgccccgtgccccccacttcatgcccttgctgctactgctgctgctgctctcacttccccatactcaggccgcctttccccaggaccccctccctctgttgatctctgaccttcaaggtacttccccattatcctggtttcggggcctggaggatgatgctgtggctgcagaacttgggctggactttcagagattcctgaccttgaaccggaccttgctagtggctgcccgggatcacgttttctccttcgatcttcaagccgaagaagaaggggaggggctggtgcccaacaagtatctaacatggagaagccaagatgtggagaactgtgctgtacggggaaagctgacggatgagtgctacaactatattcgtgttcttgttccctgggactcccagacgctccttgcctgtggaacgaactcattcagccctgtgtgccgcagctatgggataacttcgctgcagcaggagggtgaggaactgagtgggcaggctcgatgcccctttgatgccacccagtccaacgtggccatctttgcagagggcagcctgtactcagccacagctgcggatttccaggccagtgatgctgtagtttacagaagccttgggccccagcccccactccgctccgccaagtatgactccaagtggctccgagagccacactttgtccaggccttggagcatggagaccatgtctacttcttcttccgcgaggtctctgtggaggatgctcggctggggagggtgcagttctcccgcgtagcccgagtatgtaaacgtgacatgggcggctcgcctcgggccttggaccgccactggacatccttcctgaagcttcggctcaactgctctgtccctggggactctactttctattttgatgttttacaggccttgactgggcctgtgaacctgcatggccgctctgctctctttggggtcttcaccacccagaccaatagcatccctggctctgccgtctgcgccttctacctggatgagattgagcgtgggtttgagggcaagttcaaggagcagaggagtctggatggggcctggactcctgtgtctgaggacagagttccctcacccagccctgcccgctgccctgctcactcgagtcccctcgggaggtccctccaggtactccgggggtcccgggaagcacctcctgtacctgggccggcccgagggctaccggggccgcgccctgaaaagggtggacgtcgagaagccccagttgtccctgaagcctcccctcgtcgggccctcctcccgccaggccgtcccgaacggcggccgtttcaacttttaaagggagcggcccacggcctccagcgtggggagcgcccgagtcctctcggccacgagctggacgctcttcaggacgtttcaccgccccctcgccccgcacctccagccttcccgactcgcagagtctcccgaggccccttttcgcctcgggtttatttattgactgtctttccccctgtcctcgacagaagagtgggaggtgagaagcccgtctcctcagtgagccagcatttcagggggagctggcggactcccactccccgctcccttccagccaagctgccttaa

SEQ ID NO: 179808 - DNA, 1918 bp, Homo sapiens
  Payload ID: 15433
  Gene Symbol: SEMA6C
  Gene Name: sema domain, transmembrane domain (TM), and cytoplasmic domain, (semaphorin) 6C
  ENST ID: ENST00000621728
  CDS Start-End: 77-1690
cccacaggagtcaccaacccagggccggcttatgggtgagggggcaccccctggggcctgagctgccccgcacaggatgccccgtgccccccacttcatgcccttgctgctactgctgctgctgctctcacttccccatactcaggccgcctttccccaggaccccctccctctgttgatctctgaccttcaaggtacttccccattatcctggtttcggggcctggaggatgatgctgtggctgcagaacttgggctggactttcagagattcctgaccttgaaccggaccttgctagtggctgcccgggatcacgttttctccttcgatcttcaagccgaagaagaaggggaggggctggtgcccaacaagtatctaacatggagaagccaagatgtggagaactgtgctgtacggggaaagctgacggatgagtgctacaactatattcgtgttcttgttccctgggactcccagacgctccttgcctgtggaacgaactcattcagccctgtgtgccgcagctatgggataacttcgctgcagcaggagggtgaggaactgagtgggcaggctcgatgcccctttgatgccacccagtccaacgtggccatctttgcagagggcagcctgtactcagccacagctgcggatttccaggccagtgatgctgtagtttacagaagccttgggccccagcccccactccgctccgccaagtatgactccaagtggctccgagagccacactttgtccaggccttggagcatggagaccatgtctacttcttcttccgcgaggtctctgtggaggatgctcggctggggagggtgcagttctcccgcgtagcccgagtatgtaaacgtgacatgggcggctcgcctcgggccttggaccgccactggacatccttcctgaagcttcggctcaactgctctgtccctggggactctactttctattttgatgttttacaggccttgactgggcctgtgaacctgcatggccgctctgctctctttggggtcttcaccacccagaccaatagcatccctggctctgccgtctgcgccttctacctggatgagattgagcgtgggtttgagggcaagttcaaggagcagaggagtctggatggggcctggactcctgtgtctgaggacagagttccctcacccaggccaggatcctgccctgctcactcgagtcccctcgggaggtccctccaggtactccgggggtcccgggaagcacctcctgtacctgggccggcccgagggctaccggggccgcgccctgaaaagggtggacgtcgagaagccccagttgtccctgaagcctcccctcgtcgggccctcctcccgccaggccgtcccgaacggcggccgtttcaacttttaaagggagcggcccacggcctccagcgtggggagcgcccgagtcctctcggccacgagctggacgctcttcaggacgtttcaccgccccctcgccccgcacctccagccttcccgactcgcagagtctcccgaggccccttttcgcctcgggtttatttattgactgtctttccccctgtcctcgacagaagagtgggaggtgagaagcccgtctcctcagtgagccagcatttcagggggagctggcggactcccactccccgctcccttccagccaagctgccttaactcgcccctcggggctcccccagagactgtgccccgggcgggccgcgcgcgctgtgtccagagtcctcgggccttctgggtctgggacgtgcctctcctactgtgtaggagcctccgcttcccaatacagccgtgtctgcagccactgcctgacttcactcgggcgggggagggcggcagtcggtcggctcgctctgggcgccctcgctctctgccttcatctgggcc

SEQ ID NO: 179809 - DNA, 6099 bp, Homo sapiens
  Payload ID: 15434
  Gene Symbol: SEMA6D
  Gene Name: sema domain, transmembrane domain (TM), and cytoplasmic domain, (semaphorin) 6D
  Uniprot ID: Q8NFY4
  ENST ID: ENST00000316364
  CDS Start-End: 440-3661
gcggccgcttcccaccgtccctctccccttactggcagagcgcgctgcgggcggactcccgggcccggagcagcccaccggccaccccaccgcccacccggctcccggtgtctcctcccggccgctctacccagcaactttccgtgctttgttccccgactggaaatgctttacggaagcgtcttggacagggtctccgccaggcgacaagagctcggtgctgagatgtgttacgttctcatctccccatcaattatggatggaaacaaataaggaagagtcaattttgctgagccccttctccggcaacgagaggcgttctgcagccgggagggagccgccgctcgcgccggcagccgctggcaggggcatggtgaggaggaaggtagctcagtggcatttctgagcaggggccaccctgacttcaccttggcccaccatgagggtcttcctgctttgtgcctacatactgctgctgatggtttcccagttgagggcagtcagctttcctgaagatgatgaaccccttaatactgtcgactatcactattcaaggcaatatccggtttttagaggacgcccttcaggcaatgaatcgcagcacaggctggactttcagctgatgttgaaaattcgagacacactttatattgctggcagggatcaagtttatacagtaaacttaaatgaaatgcccaaaacagaagtaatacccaacaagaaactgacatggcgatcaagacaacaggatcgagaaaactgtgctatgaaaggcaagcataaagatgaatgccacaactttatcaaagtatttgttccaagaaacgatgagatggtttttgtttgtggtaccaatgcattcaatcccatgtgtagatactacaggttgagtaccttagaatatgatggggaagaaattagtggcctggcaagatgcccatttgatgccagacaaaccaatgttgccctctttgctgatgggaagctgtattctgccacagtggctgacttcttggccagcgatgccgttatttatcgaagcatgggtgatggatctgcccttcgcacaataaaatatgattccaaatggataaaagagccacactttcttcatgccatagaatatggaaactatgtctatttcttctttcgagaaatcgctgtcgaacataataatttaggcaaggctgtgtattcccgcgtggcccgcatatgtaaaaacgacatgggtggttcccagcgggtcctggagaaacactggacttcatttctaaaggctcggctgaactgttctgtccctggagattcgtttttctactttgatgttctgcagtctattacagacataatacaaatcaatggcatccccactgtggtcggggtgtttaccacgcagctcaatagcatccctggttctgctgtctgtgcatttagcatggatgacattgaaaaagtattcaaaggacggtttaaggaacagaaaactccagattctgtttggacagcagttcccgaagacaaagtgccaaagccaaggcctggctgttgtgcaaaacacggccttgccgaagcttataaaacctccatcgatttcccggatgaaactctgtcattcatcaaatctcatcccctgatggactctgccgttccacccattgccgatgagccctggttcacaaagactcgggtcaggtacagactgacggccatctcagtggaccattcagccggaccctaccagaactacacagtcatctttgttggctctgaagctggcatggtacttaaagttctggcaaagaccagtcctttctctttgaacgacagcgtattactggaagagattgaagcctacaaccatgcaaagtgcagtgctgagaatgaggaagacaaaaaggtcatctcattacagttggataaagatcaccacgctttatatgtggcgttctctagctgcattatccgcatccccctcagtcgctgtgagcgttatggatcatgtaaaaagtcttgtattgcatctcgtgacccgtattgtggctggttaagccagggatcctgtggtagagtgaccccagggatgcttgctgaaggatatgaacaagacacagaattcggcaacacagctcatctaggggactgccatgaaattttgcctacttcaactacaccagattacaaaatatttggcggtccaacatctgacatggaggtatcttcatcttctgttaccacaatggcaagtatcccagaaatcacacctaaagtgattgatacctggagacctaaactgacaagctctcggaaatttgtagttcaagatgatccaaacacttctgattttactgatcctttatcgggtatcccaaagggtgtacgatgggaagtccagtctggagagtccaaccagatggtccacatgaatgtcctcatcacctgtgtctttgctgcttttgttttgggggcattcattgcaggtgtggcagtatactgctatcgagacatgtttgttcggaaaaacagaaagatccataaagatgcagagtccgcccagtcatgcacagactccagtggaagttttgccaaactgaatggtctctttgacagccctgtcaaggaataccaacagaatattgattctcctaaactgtatagtaacctgctaaccagtcggaaagagctaccacccaatggagatactaaatccatggtaatggaccatcgagggcaacctccagagttggctgctcttcctactcctgagtctacacccgtgcttcaccagaagaccctgcaggccatgaagagccactcagaaaaggcccatggccatggagcttcaaggaaagaaacccctcagttttttccgtctagtccgccacctcattccccattaagtcatgggcatatccccagtgccattgttcttccaaatgctacccatgactacaacacgtctttctcaaactccaatgctcacaaagctgaaaagaagcttcaaaacattgatcaccctctcacaaagtcatccagtaagagagatcaccggcgttctgttgattccagaaataccctcaatgatctcctgaagcatctgaatgacccaaatagtaaccccaaagccatcatgggagacatccagatggcacaccagaacttaatgctggatcccatgggatcgatgtctgaggtcccacctaaagtccctaaccgggaggcatcgctatactcccctccttcaactctccccagaaatagcccaaccaagcgagtggatgtccccaccactcctggagtcccaatgacttctctggaaagacaaagaggttatcacaaaaattcctcccagaggcactctatatctgctatgcctaaaaacttaaactcaccaaatggtgttttgttatccagacagcctagtatgaaccgtggaggatatatgcccacccccactggggcgaaggtggactatattcagggaacaccagtgagtgttcatctgcagccttccctctccagacagagcagctacaccagtaatggcactcttcctaggacgggactaaagaggacgccgtccttaaaacctgacgtgccaccaaagccttcctttgttcctcaaaccccatctgtcagaccactgaacaaatacacatactaggcctcaagtgtgctattcccatgtggctttatcctgtccgtgttgttgagaggatgatgttgtaagggtaccttaaaacaagagactcgcttgtattttaagagaaccaagtggccaaagaaactctttctaactttggcaacatcagaacttgccacatgtagctactgcagcaaggcttctgtgtacttgcctgaaaacaaaggaaggtgctggtcattccatttcttttgtttgaagctaaagagatgtgtagctcacaggggctaccttaccagtataaagagctgataacagtactcagaagaatctgtgaacaaatacttgaaaatgggttcaatgtagactgccattatgtgtggtcttcccattaaatgtgaacattttaatatgtatgcattcaccttgcctcttgcacaaatgtcaaaaaaaagatggtaatatctcaaagaaatgaacttgtagattaccaagcagtttgctaaaaattcaatctttgacccaagctgtagcatttttttttcatgtgtggcatctttttcatgccaccaacaaacttgttgtgtgtgtgcgtgtgtgtgtgtgtgtgtgtgtgtgtgtgtgtgttctgtacccactaggatttgtttaggtgcccattgcatctttttgtgctatggagttgtttacattaagcatgaccgaacgagagacaatactatttcccacaggagtccattgggttcagctttgaaagaggaatagaatcgaggctcctttgaccatcaaaatgatgaactttacttatgtggtacccaatgccagaatgtaagagttgcaagtgattttgtgctgctattcattaaaacttgtattccagtcttgccagcttaaggagatcaagatattaagaggtatccttgatttattttccagtattcagtagtaaaattttcctgtccactgtgaatcaaagcctgagtcactctatttaaccttggacacactaataaggttttattttgattgtgttcgtttccccccccccaatagtaaaatttctcctcctttaactcctcctaccccccaaggtaagaaacaaaaaacaaacaaacaaacaaaaatagaagacaaaagaaagacatatgaaaggaattgtaattggcttaacagaaacagtctgtaaaaacctaacagtggtgcaatcatgttgtctgtgttgtgttatgtgagaattttctcctaagtcatgcaggtaatgacaatatactgtaaataccacatgtgagtttacctgaatctgtgcattttgtgccttattcatgagaatgatagaagtactaaaatctgtcaagtgttttcagtatagcacattatttactgagtgccagttgtaaatgtttttcaaccagcacctaaaaagactcttttcaaaaaatcacagaaacaacctaggacaattatttgttacataatccgacctcatagcagcattacattctttgccgtgataaacattccactcctgctttcctaaggatgaaacagtgataatgtgaactcaaatgaggtttcctgggtaatgtgacacctgcagaaactatagagcgtcatttatacgtagtttggcagaaaccacttacggctgatgatgcgcaaccctgctgactgtttcagttaatatgctgcacaccacacacttgtttagtgaaccaaatctagaaagtaccaaggcagaggtatgctcctgctgtaatcaggcaaatgagttcaactggatttcttttgacaatactgttggtacctattacttgggggaggacatgttgcagaagaccagatcatttttatacagaatgtgaaatactgatacagttattcttttttttaaagaacattgttttataaagaacgtgatttccagtgatctctggaagcgctaaagctaaaatttctgttcttgaaacacttcagctttgcaactaaaatattacagattaataataaattaaaccaaccaatgataaacactactcagtccaccaacaacaaacgtgtttgaattcaccttaccaatattaatcccagcgtgtgtaaaacagaacagtaactctatgtgaccccagataacattttgtaacattgtgcttccttgtagtttgtaatgtgagttcaatcagtatttatgttgaaatttctaacattaaatctagtctctatcctgttaatttaatttttaaatgctttatccatttgtgcaaaggtaaacgcagattgtatcttttttaatggtacggcataaaaagtaaccctcaagtgaagtgtctctatactgttttatagagtactttaacatgaatagataccttgtaaacttgtattgtggatgtgtaaataatatgtactttgggtttttaacaccgcatgtaaagtcaaaataaaatatacaaatcattata

SEQ ID NO: 179810 - DNA, 5931 bp, Homo sapiens
  Payload ID: 15434
  Gene Symbol: SEMA6D
  Gene Name: sema domain, transmembrane domain (TM), and cytoplasmic domain, (semaphorin) 6D
  Uniprot ID: Q8NFY4
  ENST ID: ENST00000354744
  CDS Start-End: 440-3493
gcggccgcttcccaccgtccctctccccttactggcagagcgcgctgcgggcggactcccgggcccggagcagcccaccggccaccccaccgcccacccggctcccggtgtctcctcccggccgctctacccagcaactttccgtgctttgttccccgactggaaatgctttacggaagcgtcttggacagggtctccgccaggcgacaagagctcggtgctgagatgtgttacgttctcatctccccatcaattatggatggaaacaaataaggaagagtcaattttgctgagccccttctccggcaacgagaggcgttctgcagccgggagggagccgccgctcgcgccggcagccgctggcaggggcatggtgaggaggaaggtagctcagtggcatttctgagcaggggccaccctgacttcaccttggcccaccatgagggtcttcctgctttgtgcctacatactgctgctgatggtttcccagttgagggcagtcagctttcctgaagatgatgaaccccttaatactgtcgactatcactattcaaggcaatatccggtttttagaggacgcccttcaggcaatgaatcgcagcacaggctggactttcagctgatgttgaaaattcgagacacactttatattgctggcagggatcaagtttatacagtaaacttaaatgaaatgcccaaaacagaagtaatacccaacaagaaactgacatggcgatcaagacaacaggatcgagaaaactgtgctatgaaaggcaagcataaagatgaatgccacaactttatcaaagtatttgttccaagaaacgatgagatggtttttgtttgtggtaccaatgcattcaatcccatgtgtagatactacaggttgagtaccttagaatatgatggggaagaaattagtggcctggcaagatgcccatttgatgccagacaaaccaatgttgccctctttgctgatgggaagctgtattctgccacagtggctgacttcttggccagcgatgccgttatttatcgaagcatgggtgatggatctgcccttcgcacaataaaatatgattccaaatggataaaagagccacactttcttcatgccatagaatatggaaactatgtctatttcttctttcgagaaatcgctgtcgaacataataatttaggcaaggctgtgtattcccgcgtggcccgcatatgtaaaaacgacatgggtggttcccagcgggtcctggagaaacactggacttcatttctaaaggctcggctgaactgttctgtccctggagattcgtttttctactttgatgttctgcagtctattacagacataatacaaatcaatggcatccccactgtggtcggggtgtttaccacgcagctcaatagcatccctggttctgctgtctgtgcatttagcatggatgacattgaaaaagtattcaaaggacggtttaaggaacagaaaactccagattctgtttggacagcagttcccgaagacaaagtgccaaagccaaggcctggctgttgtgcaaaacacggccttgccgaagcttataaaacctccatcgatttcccggatgaaactctgtcattcatcaaatctcatcccctgatggactctgccgttccacccattgccgatgagccctggttcacaaagactcgggtcaggtacagactgacggccatctcagtggaccattcagccggaccctaccagaactacacagtcatctttgttggctctgaagctggcatggtacttaaagttctggcaaagaccagtcctttctctttgaacgacagcgtattactggaagagattgaagcctacaaccatgcaaagtgcagtgctgagaatgaggaagacaaaaaggtcatctcattacagttggataaagatcaccacgctttatatgtggcgttctctagctgcattatccgcatccccctcagtcgctgtgagcgttatggatcatgtaaaaagtcttgtattgcatctcgtgacccgtattgtggctggttaagccagggatcctgtggtagagtgaccccagggatgcttgctgaaggatatgaacaagacacagaattcggcaacacagctcatctaggggactgccatgaaattttgcctacttcaactacaccagattacaaaatatttggcggtccaacatctggtgtacgatgggaagtccagtctggagagtccaaccagatggtccacatgaatgtcctcatcacctgtgtctttgctgcttttgttttgggggcattcattgcaggtgtggcagtatactgctatcgagacatgtttgttcggaaaaacagaaagatccataaagatgcagagtccgcccagtcatgcacagactccagtggaagttttgccaaactgaatggtctctttgacagccctgtcaaggaataccaacagaatattgattctcctaaactgtatagtaacctgctaaccagtcggaaagagctaccacccaatggagatactaaatccatggtaatggaccatcgagggcaacctccagagttggctgctcttcctactcctgagtctacacccgtgcttcaccagaagaccctgcaggccatgaagagccactcagaaaaggcccatggccatggagcttcaaggaaagaaacccctcagttttttccgtctagtccgccacctcattccccattaagtcatgggcatatccccagtgccattgttcttccaaatgctacccatgactacaacacgtctttctcaaactccaatgctcacaaagctgaaaagaagcttcaaaacattgatcaccctctcacaaagtcatccagtaagagagatcaccggcgttctgttgattccagaaataccctcaatgatctcctgaagcatctgaatgacccaaatagtaaccccaaagccatcatgggagacatccagatggcacaccagaacttaatgctggatcccatgggatcgatgtctgaggtcccacctaaagtccctaaccgggaggcatcgctatactcccctccttcaactctccccagaaatagcccaaccaagcgagtggatgtccccaccactcctggagtcccaatgacttctctggaaagacaaagaggttatcacaaaaattcctcccagaggcactctatatctgctatgcctaaaaacttaaactcaccaaatggtgttttgttatccagacagcctagtatgaaccgtggaggatatatgcccacccccactggggcgaaggtggactatattcagggaacaccagtgagtgttcatctgcagccttccctctccagacagagcagctacaccagtaatggcactcttcctaggacgggactaaagaggacgccgtccttaaaacctgacgtgccaccaaagccttcctttgttcctcaaaccccatctgtcagaccactgaacaaatacacatactaggcctcaagtgtgctattcccatgtggctttatcctgtccgtgttgttgagaggatgatgttgtaagggtaccttaaaacaagagactcgcttgtattttaagagaaccaagtggccaaagaaactctttctaactttggcaacatcagaacttgccacatgtagctactgcagcaaggcttctgtgtacttgcctgaaaacaaaggaaggtgctggtcattccatttcttttgtttgaagctaaagagatgtgtagctcacaggggctaccttaccagtataaagagctgataacagtactcagaagaatctgtgaacaaatacttgaaaatgggttcaatgtagactgccattatgtgtggtcttcccattaaatgtgaacattttaatatgtatgcattcaccttgcctcttgcacaaatgtcaaaaaaaagatggtaatatctcaaagaaatgaacttgtagattaccaagcagtttgctaaaaattcaatctttgacccaagctgtagcatttttttttcatgtgtggcatctttttcatgccaccaacaaacttgttgtgtgtgtgcgtgtgtgtgtgtgtgtgtgtgtgtgtgtgtgtgttctgtacccactaggatttgtttaggtgcccattgcatctttttgtgctatggagttgtttacattaagcatgaccgaacgagagacaatactatttcccacaggagtccattgggttcagctttgaaagaggaatagaatcgaggctcctttgaccatcaaaatgatgaactttacttatgtggtacccaatgccagaatgtaagagttgcaagtgattttgtgctgctattcattaaaacttgtattccagtcttgccagcttaaggagatcaagatattaagaggtatccttgatttattttccagtattcagtagtaaaattttcctgtccactgtgaatcaaagcctgagtcactctatttaaccttggacacactaataaggttttattttgattgtgttcgtttccccccccccaatagtaaaatttctcctcctttaactcctcctaccccccaaggtaagaaacaaaaaacaaacaaacaaacaaaaatagaagacaaaagaaagacatatgaaaggaattgtaattggcttaacagaaacagtctgtaaaaacctaacagtggtgcaatcatgttgtctgtgttgtgttatgtgagaattttctcctaagtcatgcaggtaatgacaatatactgtaaataccacatgtgagtttacctgaatctgtgcattttgtgccttattcatgagaatgatagaagtactaaaatctgtcaagtgttttcagtatagcacattatttactgagtgccagttgtaaatgtttttcaaccagcacctaaaaagactcttttcaaaaaatcacagaaacaacctaggacaattatttgttacataatccgacctcatagcagcattacattctttgccgtgataaacattccactcctgctttcctaaggatgaaacagtgataatgtgaactcaaatgaggtttcctgggtaatgtgacacctgcagaaactatagagcgtcatttatacgtagtttggcagaaaccacttacggctgatgatgcgcaaccctgctgactgtttcagttaatatgctgcacaccacacacttgtttagtgaaccaaatctagaaagtaccaaggcagaggtatgctcctgctgtaatcaggcaaatgagttcaactggatttcttttgacaatactgttggtacctattacttgggggaggacatgttgcagaagaccagatcatttttatacagaatgtgaaatactgatacagttattcttttttttaaagaacattgttttataaagaacgtgatttccagtgatctctggaagcgctaaagctaaaatttctgttcttgaaacacttcagctttgcaactaaaatattacagattaataataaattaaaccaaccaatgataaacactactcagtccaccaacaacaaacgtgtttgaattcaccttaccaatattaatcccagcgtgtgtaaaacagaacagtaactctatgtgaccccagataacattttgtaacattgtgcttccttgtagtttgtaatgtgagttcaatcagtatttatgttgaaatttctaacattaaatctagtctctatcctgttaatttaatttttaaatgctttatccatttgtgcaaaggtaaacgcagattgtatcttttttaatggtacggcataaaaagtaaccctcaagtgaagtgtctctatactgttttatagagtactttaacatgaatagataccttgtaaacttgtattgtggatgtgtaaataatatgtactttgggtttttaacaccgcatgtaaagtcaaaataaaatatacaaatcattata

SEQ ID NO: 179811 - DNA, 5908 bp, Homo sapiens
  Payload ID: 15434
  Gene Symbol: SEMA6D
  Gene Name: sema domain, transmembrane domain (TM), and cytoplasmic domain, (semaphorin) 6D
  Uniprot ID: Q8NFY4
  ENST ID: ENST00000355997
  CDS Start-End: 440-2233
gcggccgcttcccaccgtccctctccccttactggcagagcgcgctgcgggcggactcccgggcccggagcagcccaccggccaccccaccgcccacccggctcccggtgtctcctcccggccgctctacccagcaactttccgtgctttgttccccgactggaaatgctttacggaagcgtcttggacagggtctccgccaggcgacaagagctcggtgctgagatgtgttacgttctcatctccccatcaattatggatggaaacaaataaggaagagtcaattttgctgagccccttctccggcaacgagaggcgttctgcagccgggagggagccgccgctcgcgccggcagccgctggcaggggcatggtgaggaggaaggtagctcagtggcatttctgagcaggggccaccctgacttcaccttggcccaccatgagggtcttcctgctttgtgcctacatactgctgctgatggtttcccagttgagggcagtcagctttcctgaagatgatgaaccccttaatactgtcgactatcactattcaaggcaatatccggtttttagaggacgcccttcaggcaatgaatcgcagcacaggctggactttcagctgatgttgaaaattcgagacacactttatattgctggcagggatcaagtttatacagtaaacttaaatgaaatgcccaaaacagaagtaatacccaacaagaaactgacatggcgatcaagacaacaggatcgagaaaactgtgctatgaaaggcaagcataaagatgaatgccacaactttatcaaagtatttgttccaagaaacgatgagatggtttttgtttgtggtaccaatgcattcaatcccatgtgtagatactacaggttgagtaccttagaatatgatggggaagaaattagtggcctggcaagatgcccatttgatgccagacaaaccaatgttgccctctttgctgatgggaagctgtattctgccacagtggctgacttcttggccagcgatgccgttatttatcgaagcatgggtgatggatctgcccttcgcacaataaaatatgattccaaatggataaaagagccacactttcttcatgccatagaatatggaaactatgtctatttcttctttcgagaaatcgctgtcgaacataataatttaggcaaggctgtgtattcccgcgtggcccgcatatgtaaaaacgacatgggtggttcccagcgggtcctggagaaacactggacttcatttctaaaggctcggctgaactgttctgtccctggagattcgtttttctactttgatgttctgcagtctattacagacataatacaaatcaatggcatccccactgtggtcggggtgtttaccacgcagctcaatagcatccctggttctgctgtctgtgcatttagcatggatgacattgaaaaagtattcaaaggacggtttaaggaacagaaaactccagattctgtttggacagcagttcccgaagacaaagtgccaaagccaaggcctggctgttgtgcaaaacacggccttgccgaagcttataaaacctccatcgatttcccggatgaaactctgtcattcatcaaatctcatcccctgatggactctgccgttccacccattgccgatgagccctggttcacaaagactcgggtcaggtacagactgacggccatctcagtggaccattcagccggaccctaccagaactacacagtcatctttgttggctctgaagctggcatggtacttaaagttctggcaaagaccagtcctttctctttgaacgacagcgtattactggaagagattgaagcctacaaccatgcaaagtgcagtgctgagaatgaggaagacaaaaaggtcatctcattacagttggataaagatcaccacgctttatatgtggcgttctctagctgcattatccgcatccccctcagtcgctgtgagcgttatggatcatgtaaaaagtcttgtattgcatctcgtgacccgtattgtggctggttaagccagggatcctgtggtagagtgaccccagggatgcttgctgaaggatatgaacaagacacagaattcggcaacacagctcatctaggggactgccatgacatggaggtatcttcatcttctgttaccacaatggtgtacgatgggaagtccagtctggagagtccaaccagatggtccacatgaatgtcctcatcacctgtgtctttgctgcttttgttttgggggcattcattgcaggtgtggcagtatactgctatcgagacatgtttgttcggaaaaacagaaagatccataaagatgcagagtccgcccagtcatgcacagactccagtggaagttttgccaaactgaatggtctctttgacagccctgtcaaggaataccaacagaatattgattctcctaaactgtatagtaacctgctaaccagtcggaaagagctaccacccaatggagatactaaatccatggtaatggaccatcgagggcaacctccagagttggctgctcttcctactcctgagtctacacccgtgcttcaccagaagaccctgcaggccatgaagagccactcagaaaaggcccatggccatggagcttcaaggaaagaaacccctcagttttttccgtctagtccgccacctcattccccattaagtcatgggcatatccccagtgccattgttcttccaaatgctacccatgactacaacacgtctttctcaaactccaatgctcacaaagctgaaaagaagcttcaaaacattgatcaccctctcacaaagtcatccagtaagagagatcaccggcgttctgttgattccagaaataccctcaatgatctcctgaagcatctgaatgacccaaatagtaaccccaaagccatcatgggagacatccagatggcacaccagaacttaatgctggatcccatgggatcgatgtctgaggtcccacctaaagtccctaaccgggaggcatcgctatactcccctccttcaactctccccagaaatagcccaaccaagcgagtggatgtccccaccactcctggagtcccaatgacttctctggaaagacaaagaggttatcacaaaaattcctcccagaggcactctatatctgctatgcctaaaaacttaaactcaccaaatggtgttttgttatccagacagcctagtatgaaccgtggaggatatatgcccacccccactggggcgaaggtggactatattcagggaacaccagtgagtgttcatctgcagccttccctctccagacagagcagctacaccagtaatggcactcttcctaggacgggactaaagaggacgccgtccttaaaacctgacgtgccaccaaagccttcctttgttcctcaaaccccatctgtcagaccactgaacaaatacacatactaggcctcaagtgtgctattcccatgtggctttatcctgtccgtgttgttgagaggatgatgttgtaagggtaccttaaaacaagagactcgcttgtattttaagagaaccaagtggccaaagaaactctttctaactttggcaacatcagaacttgccacatgtagctactgcagcaaggcttctgtgtacttgcctgaaaacaaaggaaggtgctggtcattccatttcttttgtttgaagctaaagagatgtgtagctcacaggggctaccttaccagtataaagagctgataacagtactcagaagaatctgtgaacaaatacttgaaaatgggttcaatgtagactgccattatgtgtggtcttcccattaaatgtgaacattttaatatgtatgcattcaccttgcctcttgcacaaatgtcaaaaaaaagatggtaatatctcaaagaaatgaacttgtagattaccaagcagtttgctaaaaattcaatctttgacccaagctgtagcatttttttttcatgtgtggcatctttttcatgccaccaacaaacttgttgtgtgtgtgcgtgtgtgtgtgtgtgtgtgtgtgtgtgtgtgtgttctgtacccactaggatttgtttaggtgcccattgcatctttttgtgctatggagttgtttacattaagcatgaccgaacgagagacaatactatttcccacaggagtccattgggttcagctttgaaagaggaatagaatcgaggctcctttgaccatcaaaatgatgaactttacttatgtggtacccaatgccagaatgtaagagttgcaagtgattttgtgctgctattcattaaaacttgtattccagtcttgccagcttaaggagatcaagatattaagaggtatccttgatttattttccagtattcagtagtaaaattttcctgtccactgtgaatcaaagcctgagtcactctatttaaccttggacacactaataaggttttattttgattgtgttcgtttccccccccccaatagtaaaatttctcctcctttaactcctcctaccccccaaggtaagaaacaaaaaacaaacaaacaaacaaaaatagaagacaaaagaaagacatatgaaaggaattgtaattggcttaacagaaacagtctgtaaaaacctaacagtggtgcaatcatgttgtctgtgttgtgttatgtgagaattttctcctaagtcatgcaggtaatgacaatatactgtaaataccacatgtgagtttacctgaatctgtgcattttgtgccttattcatgagaatgatagaagtactaaaatctgtcaagtgttttcagtatagcacattatttactgagtgccagttgtaaatgtttttcaaccagcacctaaaaagactcttttcaaaaaatcacagaaacaacctaggacaattatttgttacataatccgacctcatagcagcattacattctttgccgtgataaacattccactcctgctttcctaaggatgaaacagtgataatgtgaactcaaatgaggtttcctgggtaatgtgacacctgcagaaactatagagcgtcatttatacgtagtttggcagaaaccacttacggctgatgatgcgcaaccctgctgactgtttcagttaatatgctgcacaccacacacttgtttagtgaaccaaatctagaaagtaccaaggcagaggtatgctcctgctgtaatcaggcaaatgagttcaactggatttcttttgacaatactgttggtacctattacttgggggaggacatgttgcagaagaccagatcatttttatacagaatgtgaaatactgatacagttattcttttttttaaagaacattgttttataaagaacgtgatttccagtgatctctggaagcgctaaagctaaaatttctgttcttgaaacacttcagctttgcaactaaaatattacagattaataataaattaaaccaaccaatgataaacactactcagtccaccaacaacaaacgtgtttgaattcaccttaccaatattaatcccagcgtgtgtaaaacagaacagtaactctatgtgaccccagataacattttgtaacattgtgcttccttgtagtttgtaatgtgagttcaatcagtatttatgttgaaatttctaacattaaatctagtctctatcctgttaatttaatttttaaatgctttatccatttgtgcaaaggtaaacgcagattgtatcttttttaatggtacggcataaaaagtaaccctcaagtgaagtgtctctatactgttttatagagtactttaacatgaatagataccttgtaaacttgtattgtggatgtgtaaataatatgtactttgggtttttaacaccgcatgtaaagtcaaaataaaatatacaaatcattat

SEQ ID NO: 179812 - DNA, 5913 bp, Homo sapiens
  Payload ID: 15434
  Gene Symbol: SEMA6D
  Gene Name: sema domain, transmembrane domain (TM), and cytoplasmic domain, (semaphorin) 6D
  Uniprot ID: Q8NFY4
  ENST ID: ENST00000358066
  CDS Start-End: 440-3475
gcggccgcttcccaccgtccctctccccttactggcagagcgcgctgcgggcggactcccgggcccggagcagcccaccggccaccccaccgcccacccggctcccggtgtctcctcccggccgctctacccagcaactttccgtgctttgttccccgactggaaatgctttacggaagcgtcttggacagggtctccgccaggcgacaagagctcggtgctgagatgtgttacgttctcatctccccatcaattatggatggaaacaaataaggaagagtcaattttgctgagccccttctccggcaacgagaggcgttctgcagccgggagggagccgccgctcgcgccggcagccgctggcaggggcatggtgaggaggaaggtagctcagtggcatttctgagcaggggccaccctgacttcaccttggcccaccatgagggtcttcctgctttgtgcctacatactgctgctgatggtttcccagttgagggcagtcagctttcctgaagatgatgaaccccttaatactgtcgactatcactattcaaggcaatatccggtttttagaggacgcccttcaggcaatgaatcgcagcacaggctggactttcagctgatgttgaaaattcgagacacactttatattgctggcagggatcaagtttatacagtaaacttaaatgaaatgcccaaaacagaagtaatacccaacaagaaactgacatggcgatcaagacaacaggatcgagaaaactgtgctatgaaaggcaagcataaagatgaatgccacaactttatcaaagtatttgttccaagaaacgatgagatggtttttgtttgtggtaccaatgcattcaatcccatgtgtagatactacaggttgagtaccttagaatatgatggggaagaaattagtggcctggcaagatgcccatttgatgccagacaaaccaatgttgccctctttgctgatgggaagctgtattctgccacagtggctgacttcttggccagcgatgccgttatttatcgaagcatgggtgatggatctgcccttcgcacaataaaatatgattccaaatggataaaagagccacactttcttcatgccatagaatatggaaactatgtctatttcttctttcgagaaatcgctgtcgaacataataatttaggcaaggctgtgtattcccgcgtggcccgcatatgtaaaaacgacatgggtggttcccagcgggtcctggagaaacactggacttcatttctaaaggctcggctgaactgttctgtccctggagattcgtttttctactttgatgttctgcagtctattacagacataatacaaatcaatggcatccccactgtggtcggggtgtttaccacgcagctcaatagcatccctggttctgctgtctgtgcatttagcatggatgacattgaaaaagtattcaaaggacggtttaaggaacagaaaactccagattctgtttggacagcagttcccgaagacaaagtgccaaagccaaggcctggctgttgtgcaaaacacggccttgccgaagcttataaaacctccatcgatttcccggatgaaactctgtcattcatcaaatctcatcccctgatggactctgccgttccacccattgccgatgagccctggttcacaaagactcgggtcaggtacagactgacggccatctcagtggaccattcagccggaccctaccagaactacacagtcatctttgttggctctgaagctggcatggtacttaaagttctggcaaagaccagtcctttctctttgaacgacagcgtattactggaagagattgaagcctacaaccatgcaaagtgcagtgctgagaatgaggaagacaaaaaggtcatctcattacagttggataaagatcaccacgctttatatgtggcgttctctagctgcattatccgcatccccctcagtcgctgtgagcgttatggatcatgtaaaaagtcttgtattgcatctcgtgacccgtattgtggctggttaagccagggatcctgtggtagagtgaccccagggatgctgctgttaaccgaagacttctttgctttccataaccacagtgctgaaggatatgaacaagacacagaattcggcaacacagctcatctaggggactgccatggtgtacgatgggaagtccagtctggagagtccaaccagatggtccacatgaatgtcctcatcacctgtgtctttgctgcttttgttttgggggcattcattgcaggtgtggcagtatactgctatcgagacatgtttgttcggaaaaacagaaagatccataaagatgcagagtccgcccagtcatgcacagactccagtggaagttttgccaaactgaatggtctctttgacagccctgtcaaggaataccaacagaatattgattctcctaaactgtatagtaacctgctaaccagtcggaaagagctaccacccaatggagatactaaatccatggtaatggaccatcgagggcaacctccagagttggctgctcttcctactcctgagtctacacccgtgcttcaccagaagaccctgcaggccatgaagagccactcagaaaaggcccatggccatggagcttcaaggaaagaaacccctcagttttttccgtctagtccgccacctcattccccattaagtcatgggcatatccccagtgccattgttcttccaaatgctacccatgactacaacacgtctttctcaaactccaatgctcacaaagctgaaaagaagcttcaaaacattgatcaccctctcacaaagtcatccagtaagagagatcaccggcgttctgttgattccagaaataccctcaatgatctcctgaagcatctgaatgacccaaatagtaaccccaaagccatcatgggagacatccagatggcacaccagaacttaatgctggatcccatgggatcgatgtctgaggtcccacctaaagtccctaaccgggaggcatcgctatactcccctccttcaactctccccagaaatagcccaaccaagcgagtggatgtccccaccactcctggagtcccaatgacttctctggaaagacaaagaggttatcacaaaaattcctcccagaggcactctatatctgctatgcctaaaaacttaaactcaccaaatggtgttttgttatccagacagcctagtatgaaccgtggaggatatatgcccacccccactggggcgaaggtggactatattcagggaacaccagtgagtgttcatctgcagccttccctctccagacagagcagctacaccagtaatggcactcttcctaggacgggactaaagaggacgccgtccttaaaacctgacgtgccaccaaagccttcctttgttcctcaaaccccatctgtcagaccactgaacaaatacacatactaggcctcaagtgtgctattcccatgtggctttatcctgtccgtgttgttgagaggatgatgttgtaagggtaccttaaaacaagagactcgcttgtattttaagagaaccaagtggccaaagaaactctttctaactttggcaacatcagaacttgccacatgtagctactgcagcaaggcttctgtgtacttgcctgaaaacaaaggaaggtgctggtcattccatttcttttgtttgaagctaaagagatgtgtagctcacaggggctaccttaccagtataaagagctgataacagtactcagaagaatctgtgaacaaatacttgaaaatgggttcaatgtagactgccattatgtgtggtcttcccattaaatgtgaacattttaatatgtatgcattcaccttgcctcttgcacaaatgtcaaaaaaaagatggtaatatctcaaagaaatgaacttgtagattaccaagcagtttgctaaaaattcaatctttgacccaagctgtagcatttttttttcatgtgtggcatctttttcatgccaccaacaaacttgttgtgtgtgtgcgtgtgtgtgtgtgtgtgtgtgtgtgtgtgtgtgttctgtacccactaggatttgtttaggtgcccattgcatctttttgtgctatggagttgtttacattaagcatgaccgaacgagagacaatactatttcccacaggagtccattgggttcagctttgaaagaggaatagaatcgaggctcctttgaccatcaaaatgatgaactttacttatgtggtacccaatgccagaatgtaagagttgcaagtgattttgtgctgctattcattaaaacttgtattccagtcttgccagcttaaggagatcaagatattaagaggtatccttgatttattttccagtattcagtagtaaaattttcctgtccactgtgaatcaaagcctgagtcactctatttaaccttggacacactaataaggttttattttgattgtgttcgtttccccccccccaatagtaaaatttctcctcctttaactcctcctaccccccaaggtaagaaacaaaaaacaaacaaacaaacaaaaatagaagacaaaagaaagacatatgaaaggaattgtaattggcttaacagaaacagtctgtaaaaacctaacagtggtgcaatcatgttgtctgtgttgtgttatgtgagaattttctcctaagtcatgcaggtaatgacaatatactgtaaataccacatgtgagtttacctgaatctgtgcattttgtgccttattcatgagaatgatagaagtactaaaatctgtcaagtgttttcagtatagcacattatttactgagtgccagttgtaaatgtttttcaaccagcacctaaaaagactcttttcaaaaaatcacagaaacaacctaggacaattatttgttacataatccgacctcatagcagcattacattctttgccgtgataaacattccactcctgctttcctaaggatgaaacagtgataatgtgaactcaaatgaggtttcctgggtaatgtgacacctgcagaaactatagagcgtcatttatacgtagtttggcagaaaccacttacggctgatgatgcgcaaccctgctgactgtttcagttaatatgctgcacaccacacacttgtttagtgaaccaaatctagaaagtaccaaggcagaggtatgctcctgctgtaatcaggcaaatgagttcaactggatttcttttgacaatactgttggtacctattacttgggggaggacatgttgcagaagaccagatcatttttatacagaatgtgaaatactgatacagttattcttttttttaaagaacattgttttataaagaacgtgatttccagtgatctctggaagcgctaaagctaaaatttctgttcttgaaacacttcagctttgcaactaaaatattacagattaataataaattaaaccaaccaatgataaacactactcagtccaccaacaacaaacgtgtttgaattcaccttaccaatattaatcccagcgtgtgtaaaacagaacagtaactctatgtgaccccagataacattttgtaacattgtgcttccttgtagtttgtaatgtgagttcaatcagtatttatgttgaaatttctaacattaaatctagtctctatcctgttaatttaatttttaaatgctttatccatttgtgcaaaggtaaacgcagattgtatcttttttaatggtacggcataaaaagtaaccctcaagtgaagtgtctctatactgttttatagagtactttaacatgaatagataccttgtaaacttgtattgtggatgtgtaaataatatgtactttgggtttttaacaccgcatgtaaagtcaaaataaaatatacaaatcattata

SEQ ID NO: 179813 - DNA, 2318 bp, Homo sapiens
  Payload ID: 15434
  Gene Symbol: SEMA6D
  Gene Name: sema domain, transmembrane domain (TM), and cytoplasmic domain, (semaphorin) 6D
  Uniprot ID: Q8NFY4
  ENST ID: ENST00000389425
  CDS Start-End: 468-1898
atccccatccccggcccaggcccggagggcggccgcttcccaccgtccctctccccttactggcagagcgcgctgcgggcggactcccgggcccggagcagcccaccggccaccccaccgcccacccggctcccggtgtctcctcccggccgctctacccagcaactttccgtgctttgttccccgactggaaatgctttacggaagcgtcttggacagggtctccgccaggcgacaagagctcggtgctgagatgtgttacgttctcatctccccatcaattatggatggaaacaaataaggaagagtcaattttgctgagccccttctccggcaacgagaggcgttctgcagccgggagggagccgccgctcgcgccggcagccgctggcaggggcatggtgaggaggaaggtagctcagtggcatttctgagcaggggccaccctgacttcaccttggcccaccatgagggtcttcctgctttgtgcctacatactgctgctgatggtttcccagttgagggcagtcagctttcctgaagatgatgaaccccttaatactgtcgactatcactattcaaggcaatatccggtttttagaggacgcccttcaggcaatgaatcgcagcacaggctggactttcagctgatgttgaaaattcgagacacactttatattgctggcagggatcaagtttatacagtaaacttaaatgaaatgcccaaaacagaagtaatacccaacaagaaactgacatggcgatcaagacaacaggatcgagaaaactgtgctatgaaaggcaagcataaagatgaatgccacaactttatcaaagtatttgttccaagaaacgatgagatggtttttgtttgtggtaccaatgcattcaatcccatgtgtagatactacaggttgagtaccttagaatatgatggggaagaaattagtggcctggcaagatgcccatttgatgccagacaaaccaatgttgccctctttgctgatgggaagctgtattctgccacagtggctgacttcttggccagcgatgccgttatttatcgaagcatgggtgatggatctgcccttcgcacaataaaatatgattccaaatggataaaagagccacactttcttcatgccatagaatatggaaactatgtctatttcttctttcgagaaatcgctgtcgaacataataatttaggcaaggctgtgtattcccgcgtggcccgcatatgtaaaaacgacatgggtggttcccagcgggtcctggagaaacactggacttcatttctaaaggctcggctgaactgttctgtccctggagattcgtttttctactttgatgttctgcagtctattacagacataatacaaatcaatggcatccccactgtggtcggggtgtttaccacgcagctcaatagcatccctggttctgctgtctgtgcatttagcatggatgacattgaaaaagtattcaaaggacggtttaaggaacagaaaactccagattctgtttggacagcagttcccgaagacaaagtgccaaagccaaggcctggctgttgtgcaaaacacggccttgccgaagcttataaaacctccatcgatttcccggatgaaactctgtcattcatcaaatctcatcccctgatggactctgccgttccacccattgccgatgagccctggttcacaaagactcgggtcaggtacagactgacggccatctcagtggaccattcagccggaccctaccagaactacacagtcatctttgttggctctgaagctggcatggtacttaaagttctggcaaagaccagtcctttctctttgaacgacagcgtattactggaagagattgaagcctacaaccatgcaaagtaggtatatgttacgagaacgcccttcagcactgctcaaaaattttcggcatgtatttcatctagtcatgtccttttggtcctctaaattagcagtggtttggcataatagtgttttgtgttttttttctcattgaaataaatcttgggtttgtttttttcccgagcctgctagggcgaggggggtgaatggttgatgagtttaaaaataatgcagcccttgtttttcacctgtagaatatgagaacattttaacagcacctctcttatcttgcagatatattccaagatgctacatgcagcagacagctgtgagcttgcatacacacacacacaaatatacatgcacatacatacacagaatgcagtactagttaagtatttccttcctatctttaataagtaagagaatatttagaccatt

SEQ ID NO: 179814 - DNA, 5874 bp, Homo sapiens
  Payload ID: 15434
  Gene Symbol: SEMA6D
  Gene Name: sema domain, transmembrane domain (TM), and cytoplasmic domain, (semaphorin) 6D
  Uniprot ID: Q8NFY4
  ENST ID: ENST00000389428
  CDS Start-End: 440-3436
gcggccgcttcccaccgtccctctccccttactggcagagcgcgctgcgggcggactcccgggcccggagcagcccaccggccaccccaccgcccacccggctcccggtgtctcctcccggccgctctacccagcaactttccgtgctttgttccccgactggaaatgctttacggaagcgtcttggacagggtctccgccaggcgacaagagctcggtgctgagatgtgttacgttctcatctccccatcaattatggatggaaacaaataaggaagagtcaattttgctgagccccttctccggcaacgagaggcgttctgcagccgggagggagccgccgctcgcgccggcagccgctggcaggggcatggtgaggaggaaggtagctcagtggcatttctgagcaggggccaccctgacttcaccttggcccaccatgagggtcttcctgctttgtgcctacatactgctgctgatggtttcccagttgagggcagtcagctttcctgaagatgatgaaccccttaatactgtcgactatcactattcaaggcaatatccggtttttagaggacgcccttcaggcaatgaatcgcagcacaggctggactttcagctgatgttgaaaattcgagacacactttatattgctggcagggatcaagtttatacagtaaacttaaatgaaatgcccaaaacagaagtaatacccaacaagaaactgacatggcgatcaagacaacaggatcgagaaaactgtgctatgaaaggcaagcataaagatgaatgccacaactttatcaaagtatttgttccaagaaacgatgagatggtttttgtttgtggtaccaatgcattcaatcccatgtgtagatactacaggttgagtaccttagaatatgatggggaagaaattagtggcctggcaagatgcccatttgatgccagacaaaccaatgttgccctctttgctgatgggaagctgtattctgccacagtggctgacttcttggccagcgatgccgttatttatcgaagcatgggtgatggatctgcccttcgcacaataaaatatgattccaaatggataaaagagccacactttcttcatgccatagaatatggaaactatgtctatttcttctttcgagaaatcgctgtcgaacataataatttaggcaaggctgtgtattcccgcgtggcccgcatatgtaaaaacgacatgggtggttcccagcgggtcctggagaaacactggacttcatttctaaaggctcggctgaactgttctgtccctggagattcgtttttctactttgatgttctgcagtctattacagacataatacaaatcaatggcatccccactgtggtcggggtgtttaccacgcagctcaatagcatccctggttctgctgtctgtgcatttagcatggatgacattgaaaaagtattcaaaggacggtttaaggaacagaaaactccagattctgtttggacagcagttcccgaagacaaagtgccaaagccaaggcctggctgttgtgcaaaacacggccttgccgaagcttataaaacctccatcgatttcccggatgaaactctgtcattcatcaaatctcatcccctgatggactctgccgttccacccattgccgatgagccctggttcacaaagactcgggtcaggtacagactgacggccatctcagtggaccattcagccggaccctaccagaactacacagtcatctttgttggctctgaagctggcatggtacttaaagttctggcaaagaccagtcctttctctttgaacgacagcgtattactggaagagattgaagcctacaaccatgcaaagtgcagtgctgagaatgaggaagacaaaaaggtcatctcattacagttggataaagatcaccacgctttatatgtggcgttctctagctgcattatccgcatccccctcagtcgctgtgagcgttatggatcatgtaaaaagtcttgtattgcatctcgtgacccgtattgtggctggttaagccagggatcctgtggtagagtgaccccagggatgcttgctgaaggatatgaacaagacacagaattcggcaacacagctcatctaggggactgccatggtgtacgatgggaagtccagtctggagagtccaaccagatggtccacatgaatgtcctcatcacctgtgtctttgctgcttttgttttgggggcattcattgcaggtgtggcagtatactgctatcgagacatgtttgttcggaaaaacagaaagatccataaagatgcagagtccgcccagtcatgcacagactccagtggaagttttgccaaactgaatggtctctttgacagccctgtcaaggaataccaacagaatattgattctcctaaactgtatagtaacctgctaaccagtcggaaagagctaccacccaatggagatactaaatccatggtaatggaccatcgagggcaacctccagagttggctgctcttcctactcctgagtctacacccgtgcttcaccagaagaccctgcaggccatgaagagccactcagaaaaggcccatggccatggagcttcaaggaaagaaacccctcagttttttccgtctagtccgccacctcattccccattaagtcatgggcatatccccagtgccattgttcttccaaatgctacccatgactacaacacgtctttctcaaactccaatgctcacaaagctgaaaagaagcttcaaaacattgatcaccctctcacaaagtcatccagtaagagagatcaccggcgttctgttgattccagaaataccctcaatgatctcctgaagcatctgaatgacccaaatagtaaccccaaagccatcatgggagacatccagatggcacaccagaacttaatgctggatcccatgggatcgatgtctgaggtcccacctaaagtccctaaccgggaggcatcgctatactcccctccttcaactctccccagaaatagcccaaccaagcgagtggatgtccccaccactcctggagtcccaatgacttctctggaaagacaaagaggttatcacaaaaattcctcccagaggcactctatatctgctatgcctaaaaacttaaactcaccaaatggtgttttgttatccagacagcctagtatgaaccgtggaggatatatgcccacccccactggggcgaaggtggactatattcagggaacaccagtgagtgttcatctgcagccttccctctccagacagagcagctacaccagtaatggcactcttcctaggacgggactaaagaggacgccgtccttaaaacctgacgtgccaccaaagccttcctttgttcctcaaaccccatctgtcagaccactgaacaaatacacatactaggcctcaagtgtgctattcccatgtggctttatcctgtccgtgttgttgagaggatgatgttgtaagggtaccttaaaacaagagactcgcttgtattttaagagaaccaagtggccaaagaaactctttctaactttggcaacatcagaacttgccacatgtagctactgcagcaaggcttctgtgtacttgcctgaaaacaaaggaaggtgctggtcattccatttcttttgtttgaagctaaagagatgtgtagctcacaggggctaccttaccagtataaagagctgataacagtactcagaagaatctgtgaacaaatacttgaaaatgggttcaatgtagactgccattatgtgtggtcttcccattaaatgtgaacattttaatatgtatgcattcaccttgcctcttgcacaaatgtcaaaaaaaagatggtaatatctcaaagaaatgaacttgtagattaccaagcagtttgctaaaaattcaatctttgacccaagctgtagcatttttttttcatgtgtggcatctttttcatgccaccaacaaacttgttgtgtgtgtgcgtgtgtgtgtgtgtgtgtgtgtgtgtgtgtgtgttctgtacccactaggatttgtttaggtgcccattgcatctttttgtgctatggagttgtttacattaagcatgaccgaacgagagacaatactatttcccacaggagtccattgggttcagctttgaaagaggaatagaatcgaggctcctttgaccatcaaaatgatgaactttacttatgtggtacccaatgccagaatgtaagagttgcaagtgattttgtgctgctattcattaaaacttgtattccagtcttgccagcttaaggagatcaagatattaagaggtatccttgatttattttccagtattcagtagtaaaattttcctgtccactgtgaatcaaagcctgagtcactctatttaaccttggacacactaataaggttttattttgattgtgttcgtttccccccccccaatagtaaaatttctcctcctttaactcctcctaccccccaaggtaagaaacaaaaaacaaacaaacaaacaaaaatagaagacaaaagaaagacatatgaaaggaattgtaattggcttaacagaaacagtctgtaaaaacctaacagtggtgcaatcatgttgtctgtgttgtgttatgtgagaattttctcctaagtcatgcaggtaatgacaatatactgtaaataccacatgtgagtttacctgaatctgtgcattttgtgccttattcatgagaatgatagaagtactaaaatctgtcaagtgttttcagtatagcacattatttactgagtgccagttgtaaatgtttttcaaccagcacctaaaaagactcttttcaaaaaatcacagaaacaacctaggacaattatttgttacataatccgacctcatagcagcattacattctttgccgtgataaacattccactcctgctttcctaaggatgaaacagtgataatgtgaactcaaatgaggtttcctgggtaatgtgacacctgcagaaactatagagcgtcatttatacgtagtttggcagaaaccacttacggctgatgatgcgcaaccctgctgactgtttcagttaatatgctgcacaccacacacttgtttagtgaaccaaatctagaaagtaccaaggcagaggtatgctcctgctgtaatcaggcaaatgagttcaactggatttcttttgacaatactgttggtacctattacttgggggaggacatgttgcagaagaccagatcatttttatacagaatgtgaaatactgatacagttattcttttttttaaagaacattgttttataaagaacgtgatttccagtgatctctggaagcgctaaagctaaaatttctgttcttgaaacacttcagctttgcaactaaaatattacagattaataataaattaaaccaaccaatgataaacactactcagtccaccaacaacaaacgtgtttgaattcaccttaccaatattaatcccagcgtgtgtaaaacagaacagtaactctatgtgaccccagataacattttgtaacattgtgcttccttgtagtttgtaatgtgagttcaatcagtatttatgttgaaatttctaacattaaatctagtctctatcctgttaatttaatttttaaatgctttatccatttgtgcaaaggtaaacgcagattgtatcttttttaatggtacggcataaaaagtaaccctcaagtgaagtgtctctatactgttttatagagtactttaacatgaatagataccttgtaaacttgtattgtggatgtgtaaataatatgtactttgggtttttaacaccgcatgtaaagtcaaaataaaatatacaaatcattata

SEQ ID NO: 179815 - DNA, 5712 bp, Homo sapiens
  Payload ID: 15434
  Gene Symbol: SEMA6D
  Gene Name: sema domain, transmembrane domain (TM), and cytoplasmic domain, (semaphorin) 6D
  Uniprot ID: Q8NFY4
  ENST ID: ENST00000537942
  CDS Start-End: 242-3277
caggatctccaacctgagcatatgccagttgacatgggaacactgaggccagcaatttaaggatttcacatttgcttgcagtgaatgcgtaatcctggatctcttgttcgcaaatcgacagcctgaagccctctggaagcccaagactgctggaggtttttgaccagacaagccaacctttttcaaggtagctcagtggcatttctgagcaggggccaccctgacttcaccttggcccaccatgagggtcttcctgctttgtgcctacatactgctgctgatggtttcccagttgagggcagtcagctttcctgaagatgatgaaccccttaatactgtcgactatcactattcaaggcaatatccggtttttagaggacgcccttcaggcaatgaatcgcagcacaggctggactttcagctgatgttgaaaattcgagacacactttatattgctggcagggatcaagtttatacagtaaacttaaatgaaatgcccaaaacagaagtaatacccaacaagaaactgacatggcgatcaagacaacaggatcgagaaaactgtgctatgaaaggcaagcataaagatgaatgccacaactttatcaaagtatttgttccaagaaacgatgagatggtttttgtttgtggtaccaatgcattcaatcccatgtgtagatactacaggttgagtaccttagaatatgatggggaagaaattagtggcctggcaagatgcccatttgatgccagacaaaccaatgttgccctctttgctgatgggaagctgtattctgccacagtggctgacttcttggccagcgatgccgttatttatcgaagcatgggtgatggatctgcccttcgcacaataaaatatgattccaaatggataaaagagccacactttcttcatgccatagaatatggaaactatgtctatttcttctttcgagaaatcgctgtcgaacataataatttaggcaaggctgtgtattcccgcgtggcccgcatatgtaaaaacgacatgggtggttcccagcgggtcctggagaaacactggacttcatttctaaaggctcggctgaactgttctgtccctggagattcgtttttctactttgatgttctgcagtctattacagacataatacaaatcaatggcatccccactgtggtcggggtgtttaccacgcagctcaatagcatccctggttctgctgtctgtgcatttagcatggatgacattgaaaaagtattcaaaggacggtttaaggaacagaaaactccagattctgtttggacagcagttcccgaagacaaagtgccaaagccaaggcctggctgttgtgcaaaacacggccttgccgaagcttataaaacctccatcgatttcccggatgaaactctgtcattcatcaaatctcatcccctgatggactctgccgttccacccattgccgatgagccctggttcacaaagactcgggtcaggtacagactgacggccatctcagtggaccattcagccggaccctaccagaactacacagtcatctttgttggctctgaagctggcatggtacttaaagttctggcaaagaccagtcctttctctttgaacgacagcgtattactggaagagattgaagcctacaaccatgcaaagtgcagtgctgagaatgaggaagacaaaaaggtcatctcattacagttggataaagatcaccacgctttatatgtggcgttctctagctgcattatccgcatccccctcagtcgctgtgagcgttatggatcatgtaaaaagtcttgtattgcatctcgtgacccgtattgtggctggttaagccagggatcctgtggtagagtgaccccagggatgctgctgttaaccgaagacttctttgctttccataaccacagtgctgaaggatatgaacaagacacagaattcggcaacacagctcatctaggggactgccatggtgtacgatgggaagtccagtctggagagtccaaccagatggtccacatgaatgtcctcatcacctgtgtctttgctgcttttgttttgggggcattcattgcaggtgtggcagtatactgctatcgagacatgtttgttcggaaaaacagaaagatccataaagatgcagagtccgcccagtcatgcacagactccagtggaagttttgccaaactgaatggtctctttgacagccctgtcaaggaataccaacagaatattgattctcctaaactgtatagtaacctgctaaccagtcggaaagagctaccacccaatggagatactaaatccatggtaatggaccatcgagggcaacctccagagttggctgctcttcctactcctgagtctacacccgtgcttcaccagaagaccctgcaggccatgaagagccactcagaaaaggcccatggccatggagcttcaaggaaagaaacccctcagttttttccgtctagtccgccacctcattccccattaagtcatgggcatatccccagtgccattgttcttccaaatgctacccatgactacaacacgtctttctcaaactccaatgctcacaaagctgaaaagaagcttcaaaacattgatcaccctctcacaaagtcatccagtaagagagatcaccggcgttctgttgattccagaaataccctcaatgatctcctgaagcatctgaatgacccaaatagtaaccccaaagccatcatgggagacatccagatggcacaccagaacttaatgctggatcccatgggatcgatgtctgaggtcccacctaaagtccctaaccgggaggcatcgctatactcccctccttcaactctccccagaaatagcccaaccaagcgagtggatgtccccaccactcctggagtcccaatgacttctctggaaagacaaagaggttatcacaaaaattcctcccagaggcactctatatctgctatgcctaaaaacttaaactcaccaaatggtgttttgttatccagacagcctagtatgaaccgtggaggatatatgcccacccccactggggcgaaggtggactatattcagggaacaccagtgagtgttcatctgcagccttccctctccagacagagcagctacaccagtaatggcactcttcctaggacgggactaaagaggacgccgtccttaaaacctgacgtgccaccaaagccttcctttgttcctcaaaccccatctgtcagaccactgaacaaatacacatactaggcctcaagtgtgctattcccatgtggctttatcctgtccgtgttgttgagaggatgatgttgtaagggtaccttaaaacaagagactcgcttgtattttaagagaaccaagtggccaaagaaactctttctaactttggcaacatcagaacttgccacatgtagctactgcagcaaggcttctgtgtacttgcctgaaaacaaaggaaggtgctggtcattccatttcttttgtttgaagctaaagagatgtgtagctcacaggggctaccttaccagtataaagagctgataacagtactcagaagaatctgtgaacaaatacttgaaaatgggttcaatgtagactgccattatgtgtggtcttcccattaaatgtgaacattttaatatgtatgcattcaccttgcctcttgcacaaatgtcaaaaaaaagatggtaatatctcaaagaaatgaacttgtagattaccaagcagtttgctaaaaattcaatctttgacccaagctgtagcatttttttttcatgtgtggcatctttttcatgccaccaacaaacttgttgtgtgtgtgcgtgtgtgtgtgtgtgtgtgtgtgtgtgtgtgtgttctgtacccactaggatttgtttaggtgcccattgcatctttttgtgctatggagttgtttacattaagcatgaccgaacgagagacaatactatttcccacaggagtccattgggttcagctttgaaagaggaatagaatcgaggctcctttgaccatcaaaatgatgaactttacttatgtggtacccaatgccagaatgtaagagttgcaagtgattttgtgctgctattcattaaaacttgtattccagtcttgccagcttaaggagatcaagatattaagaggtatccttgatttattttccagtattcagtagtaaaattttcctgtccactgtgaatcaaagcctgagtcactctatttaaccttggacacactaataaggttttattttgattgtgttcgtttccccccccccaatagtaaaatttctcctcctttaactcctcctaccccccaaggtaagaaacaaaaaacaaacaaacaaacaaaaatagaagacaaaagaaagacatatgaaaggaattgtaattggcttaacagaaacagtctgtaaaaacctaacagtggtgcaatcatgttgtctgtgttgtgttatgtgagaattttctcctaagtcatgcaggtaatgacaatatactgtaaataccacatgtgagtttacctgaatctgtgcattttgtgccttattcatgagaatgatagaagtactaaaatctgtcaagtgttttcagtatagcacattatttactgagtgccagttgtaaatgtttttcaaccagcacctaaaaagactcttttcaaaaaatcacagaaacaacctaggacaattatttgttacataatccgacctcatagcagcattacattctttgccgtgataaacattccactcctgctttcctaaggatgaaacagtgataatgtgaactcaaatgaggtttcctgggtaatgtgacacctgcagaaactatagagcgtcatttatacgtagtttggcagaaaccacttacggctgatgatgcgcaaccctgctgactgtttcagttaatatgctgcacaccacacacttgtttagtgaaccaaatctagaaagtaccaaggcagaggtatgctcctgctgtaatcaggcaaatgagttcaactggatttcttttgacaatactgttggtacctattacttgggggaggacatgttgcagaagaccagatcatttttatacagaatgtgaaatactgatacagttattcttttttttaaagaacattgttttataaagaacgtgatttccagtgatctctggaagcgctaaagctaaaatttctgttcttgaaacacttcagctttgcaactaaaatattacagattaataataaattaaaccaaccaatgataaacactactcagtccaccaacaacaaacgtgtttgaattcaccttaccaatattaatcccagcgtgtgtaaaacagaacagtaactctatgtgaccccagataacattttgtaacattgtgcttccttgtagtttgtaatgtgagttcaatcagtatttatgttgaaatttctaacattaaatctagtctctatcctgttaatttaatttttaaatgctttatccatttgtgcaaaggtaaacgcagattgtatcttttttaatggtacggcataaaaagtaaccctcaagtgaagtgtctctatactgttttatagagtactttaacatgaatagataccttgtaaacttgtattgtggatgtgtaaataatatgtactttgggtttttaacaccgcatgtaaagtcaaaataaaatatacaaatcatt

SEQ ID NO: 179816 - DNA, 3754 bp, Homo sapiens
  Payload ID: 15434
  Gene Symbol: SEMA6D
  Gene Name: sema domain, transmembrane domain (TM), and cytoplasmic domain, (semaphorin) 6D
  Uniprot ID: Q8NFY4
  ENST ID: ENST00000536845
  CDS Start-End: 385-3606
cgtccgtgcccgggggtgggacccgcgccgggagctgccgagtgcgtggagggagccaggctccggctcgcctgatggattgacttggagatggatcgaattacaccatttgccgtgcatcggtttgttttgctcctgctctgtcccgctgctgctgctgctgctgcaaggggtggtggcgagtttcaggattctatcaaggaagccaagacctaaggagacagagggatatctatttttacaatatttttctttattttctttcttccttgcgcgtggcaagcttttttttttctttttcttttttcttaccagcctccccccaatgaggtagctcagtggcatttctgagcaggggccaccctgacttcaccttggcccaccatgagggtcttcctgctttgtgcctacatactgctgctgatggtttcccagttgagggcagtcagctttcctgaagatgatgaaccccttaatactgtcgactatcactattcaaggcaatatccggtttttagaggacgcccttcaggcaatgaatcgcagcacaggctggactttcagctgatgttgaaaattcgagacacactttatattgctggcagggatcaagtttatacagtaaacttaaatgaaatgcccaaaacagaagtaatacccaacaagaaactgacatggcgatcaagacaacaggatcgagaaaactgtgctatgaaaggcaagcataaagatgaatgccacaactttatcaaagtatttgttccaagaaacgatgagatggtttttgtttgtggtaccaatgcattcaatcccatgtgtagatactacaggttgagtaccttagaatatgatggggaagaaattagtggcctggcaagatgcccatttgatgccagacaaaccaatgttgccctctttgctgatgggaagctgtattctgccacagtggctgacttcttggccagcgatgccgttatttatcgaagcatgggtgatggatctgcccttcgcacaataaaatatgattccaaatggataaaagagccacactttcttcatgccatagaatatggaaactatgtctatttcttctttcgagaaatcgctgtcgaacataataatttaggcaaggctgtgtattcccgcgtggcccgcatatgtaaaaacgacatgggtggttcccagcgggtcctggagaaacactggacttcatttctaaaggctcggctgaactgttctgtccctggagattcgtttttctactttgatgttctgcagtctattacagacataatacaaatcaatggcatccccactgtggtcggggtgtttaccacgcagctcaatagcatccctggttctgctgtctgtgcatttagcatggatgacattgaaaaagtattcaaaggacggtttaaggaacagaaaactccagattctgtttggacagcagttcccgaagacaaagtgccaaagccaaggcctggctgttgtgcaaaacacggccttgccgaagcttataaaacctccatcgatttcccggatgaaactctgtcattcatcaaatctcatcccctgatggactctgccgttccacccattgccgatgagccctggttcacaaagactcgggtcaggtacagactgacggccatctcagtggaccattcagccggaccctaccagaactacacagtcatctttgttggctctgaagctggcatggtacttaaagttctggcaaagaccagtcctttctctttgaacgacagcgtattactggaagagattgaagcctacaaccatgcaaagtgcagtgctgagaatgaggaagacaaaaaggtcatctcattacagttggataaagatcaccacgctttatatgtggcgttctctagctgcattatccgcatccccctcagtcgctgtgagcgttatggatcatgtaaaaagtcttgtattgcatctcgtgacccgtattgtggctggttaagccagggatcctgtggtagagtgaccccagggatgcttgctgaaggatatgaacaagacacagaattcggcaacacagctcatctaggggactgccatgaaattttgcctacttcaactacaccagattacaaaatatttggcggtccaacatctgacatggaggtatcttcatcttctgttaccacaatggcaagtatcccagaaatcacacctaaagtgattgatacctggagacctaaactgacaagctctcggaaatttgtagttcaagatgatccaaacacttctgattttactgatcctttatcgggtatcccaaagggtgtacgatgggaagtccagtctggagagtccaaccagatggtccacatgaatgtcctcatcacctgtgtctttgctgcttttgttttgggggcattcattgcaggtgtggcagtatactgctatcgagacatgtttgttcggaaaaacagaaagatccataaagatgcagagtccgcccagtcatgcacagactccagtggaagttttgccaaactgaatggtctctttgacagccctgtcaaggaataccaacagaatattgattctcctaaactgtatagtaacctgctaaccagtcggaaagagctaccacccaatggagatactaaatccatggtaatggaccatcgagggcaacctccagagttggctgctcttcctactcctgagtctacacccgtgcttcaccagaagaccctgcaggccatgaagagccactcagaaaaggcccatggccatggagcttcaaggaaagaaacccctcagttttttccgtctagtccgccacctcattccccattaagtcatgggcatatccccagtgccattgttcttccaaatgctacccatgactacaacacgtctttctcaaactccaatgctcacaaagctgaaaagaagcttcaaaacattgatcaccctctcacaaagtcatccagtaagagagatcaccggcgttctgttgattccagaaataccctcaatgatctcctgaagcatctgaatgacccaaatagtaaccccaaagccatcatgggagacatccagatggcacaccagaacttaatgctggatcccatgggatcgatgtctgaggtcccacctaaagtccctaaccgggaggcatcgctatactcccctccttcaactctccccagaaatagcccaaccaagcgagtggatgtccccaccactcctggagtcccaatgacttctctggaaagacaaagaggttatcacaaaaattcctcccagaggcactctatatctgctatgcctaaaaacttaaactcaccaaatggtgttttgttatccagacagcctagtatgaaccgtggaggatatatgcccacccccactggggcgaaggtggactatattcagggaacaccagtgagtgttcatctgcagccttccctctccagacagagcagctacaccagtaatggcactcttcctaggacgggactaaagaggacgccgtccttaaaacctgacgtgccaccaaagccttcctttgttcctcaaaccccatctgtcagaccactgaacaaatacacatactaggcctcaagtgtgctattcccatgtggctttatcctgtccgtgttgttgagaggatgatgttgtaagggtaccttaaaacaagagactcgcttgtattttaagagaaccaagtggccaaagaaactctttctaactttggcaacatcag

SEQ ID NO: 179817 - DNA, 6028 bp, Homo sapiens
  Payload ID: 15434
  Gene Symbol: SEMA6D
  Gene Name: sema domain, transmembrane domain (TM), and cytoplasmic domain, (semaphorin) 6D
  Uniprot ID: Q8NFY4
  ENST ID: ENST00000558014
  CDS Start-End: 557-3592
gtaaccggtggaagtgtcaaagaggaaggagtggagggctgctgaggtgacagggtgtggtctgtgagggagcggacgaacccggagaagagagcagagagacccaccaggactaggaggcagcggggagcgtgcctgcgtcgctcggagcggtgacagcaaggagcgcagcgcggaggccgggcggcaaggggagtttccagtcctcgataagtggagtccctgctctgcgctgcgccagcgccttccgcctgggcccgcggtgctagacacctgccgagtccgaagcgggagtcaggctgagccttcggcccccaagatctccaacctgagcatatgccagttgacatgggaacactgaggccagcaatttaaggatttcacatttgcttgcagtgaatgcgtaatcctggatctcttgttcgcaaatcgacagcctgaagccctctggaagcccaagactgctggaggtttttgaccagacaagccaacctttttcaaggtagctcagtggcatttctgagcaggggccaccctgacttcaccttggcccaccatgagggtcttcctgctttgtgcctacatactgctgctgatggtttcccagttgagggcagtcagctttcctgaagatgatgaaccccttaatactgtcgactatcactattcaaggcaatatccggtttttagaggacgcccttcaggcaatgaatcgcagcacaggctggactttcagctgatgttgaaaattcgagacacactttatattgctggcagggatcaagtttatacagtaaacttaaatgaaatgcccaaaacagaagtaatacccaacaagaaactgacatggcgatcaagacaacaggatcgagaaaactgtgctatgaaaggcaagcataaagatgaatgccacaactttatcaaagtatttgttccaagaaacgatgagatggtttttgtttgtggtaccaatgcattcaatcccatgtgtagatactacaggttgagtaccttagaatatgatggggaagaaattagtggcctggcaagatgcccatttgatgccagacaaaccaatgttgccctctttgctgatgggaagctgtattctgccacagtggctgacttcttggccagcgatgccgttatttatcgaagcatgggtgatggatctgcccttcgcacaataaaatatgattccaaatggataaaagagccacactttcttcatgccatagaatatggaaactatgtctatttcttctttcgagaaatcgctgtcgaacataataatttaggcaaggctgtgtattcccgcgtggcccgcatatgtaaaaacgacatgggtggttcccagcgggtcctggagaaacactggacttcatttctaaaggctcggctgaactgttctgtccctggagattcgtttttctactttgatgttctgcagtctattacagacataatacaaatcaatggcatccccactgtggtcggggtgtttaccacgcagctcaatagcatccctggttctgctgtctgtgcatttagcatggatgacattgaaaaagtattcaaaggacggtttaaggaacagaaaactccagattctgtttggacagcagttcccgaagacaaagtgccaaagccaaggcctggctgttgtgcaaaacacggccttgccgaagcttataaaacctccatcgatttcccggatgaaactctgtcattcatcaaatctcatcccctgatggactctgccgttccacccattgccgatgagccctggttcacaaagactcgggtcaggtacagactgacggccatctcagtggaccattcagccggaccctaccagaactacacagtcatctttgttggctctgaagctggcatggtacttaaagttctggcaaagaccagtcctttctctttgaacgacagcgtattactggaagagattgaagcctacaaccatgcaaagtgcagtgctgagaatgaggaagacaaaaaggtcatctcattacagttggataaagatcaccacgctttatatgtggcgttctctagctgcattatccgcatccccctcagtcgctgtgagcgttatggatcatgtaaaaagtcttgtattgcatctcgtgacccgtattgtggctggttaagccagggatcctgtggtagagtgaccccagggatgctgctgttaaccgaagacttctttgctttccataaccacagtgctgaaggatatgaacaagacacagaattcggcaacacagctcatctaggggactgccatggtgtacgatgggaagtccagtctggagagtccaaccagatggtccacatgaatgtcctcatcacctgtgtctttgctgcttttgttttgggggcattcattgcaggtgtggcagtatactgctatcgagacatgtttgttcggaaaaacagaaagatccataaagatgcagagtccgcccagtcatgcacagactccagtggaagttttgccaaactgaatggtctctttgacagccctgtcaaggaataccaacagaatattgattctcctaaactgtatagtaacctgctaaccagtcggaaagagctaccacccaatggagatactaaatccatggtaatggaccatcgagggcaacctccagagttggctgctcttcctactcctgagtctacacccgtgcttcaccagaagaccctgcaggccatgaagagccactcagaaaaggcccatggccatggagcttcaaggaaagaaacccctcagttttttccgtctagtccgccacctcattccccattaagtcatgggcatatccccagtgccattgttcttccaaatgctacccatgactacaacacgtctttctcaaactccaatgctcacaaagctgaaaagaagcttcaaaacattgatcaccctctcacaaagtcatccagtaagagagatcaccggcgttctgttgattccagaaataccctcaatgatctcctgaagcatctgaatgacccaaatagtaaccccaaagccatcatgggagacatccagatggcacaccagaacttaatgctggatcccatgggatcgatgtctgaggtcccacctaaagtccctaaccgggaggcatcgctatactcccctccttcaactctccccagaaatagcccaaccaagcgagtggatgtccccaccactcctggagtcccaatgacttctctggaaagacaaagaggttatcacaaaaattcctcccagaggcactctatatctgctatgcctaaaaacttaaactcaccaaatggtgttttgttatccagacagcctagtatgaaccgtggaggatatatgcccacccccactggggcgaaggtggactatattcagggaacaccagtgagtgttcatctgcagccttccctctccagacagagcagctacaccagtaatggcactcttcctaggacgggactaaagaggacgccgtccttaaaacctgacgtgccaccaaagccttcctttgttcctcaaaccccatctgtcagaccactgaacaaatacacatactaggcctcaagtgtgctattcccatgtggctttatcctgtccgtgttgttgagaggatgatgttgtaagggtaccttaaaacaagagactcgcttgtattttaagagaaccaagtggccaaagaaactctttctaactttggcaacatcagaacttgccacatgtagctactgcagcaaggcttctgtgtacttgcctgaaaacaaaggaaggtgctggtcattccatttcttttgtttgaagctaaagagatgtgtagctcacaggggctaccttaccagtataaagagctgataacagtactcagaagaatctgtgaacaaatacttgaaaatgggttcaatgtagactgccattatgtgtggtcttcccattaaatgtgaacattttaatatgtatgcattcaccttgcctcttgcacaaatgtcaaaaaaaagatggtaatatctcaaagaaatgaacttgtagattaccaagcagtttgctaaaaattcaatctttgacccaagctgtagcatttttttttcatgtgtggcatctttttcatgccaccaacaaacttgttgtgtgtgtgcgtgtgtgtgtgtgtgtgtgtgtgtgtgtgtgtgttctgtacccactaggatttgtttaggtgcccattgcatctttttgtgctatggagttgtttacattaagcatgaccgaacgagagacaatactatttcccacaggagtccattgggttcagctttgaaagaggaatagaatcgaggctcctttgaccatcaaaatgatgaactttacttatgtggtacccaatgccagaatgtaagagttgcaagtgattttgtgctgctattcattaaaacttgtattccagtcttgccagcttaaggagatcaagatattaagaggtatccttgatttattttccagtattcagtagtaaaattttcctgtccactgtgaatcaaagcctgagtcactctatttaaccttggacacactaataaggttttattttgattgtgttcgtttccccccccccaatagtaaaatttctcctcctttaactcctcctaccccccaaggtaagaaacaaaaaacaaacaaacaaacaaaaatagaagacaaaagaaagacatatgaaaggaattgtaattggcttaacagaaacagtctgtaaaaacctaacagtggtgcaatcatgttgtctgtgttgtgttatgtgagaattttctcctaagtcatgcaggtaatgacaatatactgtaaataccacatgtgagtttacctgaatctgtgcattttgtgccttattcatgagaatgatagaagtactaaaatctgtcaagtgttttcagtatagcacattatttactgagtgccagttgtaaatgtttttcaaccagcacctaaaaagactcttttcaaaaaatcacagaaacaacctaggacaattatttgttacataatccgacctcatagcagcattacattctttgccgtgataaacattccactcctgctttcctaaggatgaaacagtgataatgtgaactcaaatgaggtttcctgggtaatgtgacacctgcagaaactatagagcgtcatttatacgtagtttggcagaaaccacttacggctgatgatgcgcaaccctgctgactgtttcagttaatatgctgcacaccacacacttgtttagtgaaccaaatctagaaagtaccaaggcagaggtatgctcctgctgtaatcaggcaaatgagttcaactggatttcttttgacaatactgttggtacctattacttgggggaggacatgttgcagaagaccagatcatttttatacagaatgtgaaatactgatacagttattcttttttttaaagaacattgttttataaagaacgtgatttccagtgatctctggaagcgctaaagctaaaatttctgttcttgaaacacttcagctttgcaactaaaatattacagattaataataaattaaaccaaccaatgataaacactactcagtccaccaacaacaaacgtgtttgaattcaccttaccaatattaatcccagcgtgtgtaaaacagaacagtaactctatgtgaccccagataacattttgtaacattgtgcttccttgtagtttgtaatgtgagttcaatcagtatttatgttgaaatttctaacattaaatctagtctctatcctgttaatttaatttttaaatgctttatccatttgtgcaaaggtaaacgcagattgtatcttttttaatggtacggcataaaaagtaaccctcaagtgaagtgtctctatactgttttatagagtactttaacatgaatagataccttgtaaacttgtattgtggatgtgtaaataatatgtactttgggtttttaacaccgcatgtaaagtcaaaataaaatatacaaatcatta

SEQ ID NO: 179818 - DNA, 545 bp, Homo sapiens
  Payload ID: 15434
  Gene Symbol: SEMA6D
  Gene Name: sema domain, transmembrane domain (TM), and cytoplasmic domain, (semaphorin) 6D
  ENST ID: ENST00000559184
  CDS Start-End: 480-545
gcatgctaacattcatggaggcagacatgtgtacccagaatcagagggagccggttatcctcagttggagatcccaaaagacttctgcatacagttcctttcgttggatggagacactgtaagaaccacggagtgttaaacttggggcttgggaatcagagtccatccttgaatttcacaaaagaaacgaccgaaatcaaaagaaggcaagatacagctgttcgcatttgcagacctgtatgatctccaacctgagcatatgccagttgacatgggaacactgaggccagcaatttaaggatttcacatttgcttgcagtgaatgcgtaatcctggatctcttgttcgcaaatcgacagcctgaagccctctggaagcccaagactgctggaggtttttgaccagacaagccaacctttttcaaggtagctcagtggcatttctgagcaggggccaccctgacttcaccttggcccaccatgagggtcttcctgctttgtgcctacatactgctgctgatggtttcccagttgagggcagtcagc

SEQ ID NO: 179819 - DNA, 479 bp, Homo sapiens
  Payload ID: 15434
  Gene Symbol: SEMA6D
  Gene Name: sema domain, transmembrane domain (TM), and cytoplasmic domain, (semaphorin) 6D
  ENST ID: ENST00000560636
  CDS Start-End: 152-155
aggactgggtttggagagctgctggatagctgaacacgtggaggttcctggaaggcggcacacccagagagagcatggtagctccatgctgcttcccccatacctcaccctacacatctcttcatctgtatcctttataataatccactaaatgatctccaacctgagcatatgccagttgacatgggaacactgaggccagcaatttaaggatttcacatttgcttgcagtgaatgcgtaatcctggatctcttgttcgcaaatcgacagcctgaagccctctggaagcccaagactgctggaggtttttgaccagacaagccaacctttttcaaggaacttccaatcctgctttagaacttactccttcaggaaagcaactctcactgaagtgtgggagcggagcagagaaaagactaggtagctcagtggcatttctgagcaggggccaccctgacttcaccttggcccaccatga

SEQ ID NO: 179820 - DNA, 580 bp, Homo sapiens
  Payload ID: 15434
  Gene Symbol: SEMA6D
  Gene Name: sema domain, transmembrane domain (TM), and cytoplasmic domain, (semaphorin) 6D
  ENST ID: ENST00000559064
  CDS Start-End: 1-163
gctgttaaccgaagacttctttgctttccataaccacagtgctgaaggatatgaacaagacacagaattcggcaacacagctcatctaggggactgccatgaaattttgcctacttcaactacaccagattacaaaatatttggcggtccaacatctggttagttttttttaatttttttgaattaacaaccttttctttccttcagttcagcattttcagccccttctcccctccttttgcgcagtttggcagcccttcatttttccgctttgactcatattcccactgatggtaccaaaagacttttcttactgagcacttcacccttgtttatagcatgttaacacttcatcattgaccaagccacatcctttaagaaaattcaaatgggctaacatagactgcattccagctgcacgcacgcccacccaagctttcttctttctcacctctttgcattgtgaatgtttcttctggtcatctgtatttaatggatggcggaatttcattattttccccatctctcctcacctttcctatgacctagtaaacaaatacacatttcccataaatgtgta

SEQ ID NO: 179821 - DNA, 588 bp, Homo sapiens
  Payload ID: 15434
  Gene Symbol: SEMA6D
  Gene Name: sema domain, transmembrane domain (TM), and cytoplasmic domain, (semaphorin) 6D
  ENST ID: ENST00000561133
  CDS Start-End: 145-588
aaggcagaacttcacggaacaactgcgcccgcagctctcctgggctgcagtgatttgtcctctgggttctggaggaaagctctgaaagaagtagctcagtggcatttctgagcaggggccaccctgacttcaccttggcccaccatgagggtcttcctgctttgtgcctacatactgctgctgatggtttcccagttgagggcagtcagctttcctgaagatgatgaaccccttaatactgtcgactatcactattcaaggcaatatccggtttttagaggacgcccttcaggcaatgaatcgcagcacaggctggactttcagctgatgttgaaaattcgagacacactttatattgctggcagggatcaagtttatacagtaaacttaaatgaaatgcccaaaacagaagtaatacccaacaagaaactgacatggcgatcaagacaacaggatcgagaaaactgtgctatgaaaggcaagcataaagatgaatgccacaactttatcaaagtatttgttccaagaaacgatgagatggtttttgtttgtggtaccaatgcattcaatcccatgtgtagatactac

SEQ ID NO: 179822 - DNA, 4419 bp, Homo sapiens
  Payload ID: 15434
  Gene Symbol: SEMA6D
  Gene Name: sema domain, transmembrane domain (TM), and cytoplasmic domain, (semaphorin) 6D
  Uniprot ID: Q8NFY4
  ENST ID: ENST00000558816
  CDS Start-End: 291-2084
atcgaattacaccatttgccgtgcatcggtttgttttgctcctgctctgtcccgctgctgctgctgctgctgcaaggggtggtggcgagtttcaggattctatcaaggaagccaagacctaaggagacagagggatatctatttttacaatatttttctttattttctttcttccttgcgcgtggcaagcttttttttttctttttcttttttcttaccagcctccccccaatgaggtagctcagtggcatttctgagcaggggccaccctgacttcaccttggcccaccatgagggtcttcctgctttgtgcctacatactgctgctgatggtttcccagttgagggcagtcagctttcctgaagatgatgaaccccttaatactgtcgactatcactattcaaggcaatatccggtttttagaggacgcccttcaggcaatgaatcgcagcacaggctggactttcagctgatgttgaaaattcgagacacactttatattgctggcagggatcaagtttatacagtaaacttaaatgaaatgcccaaaacagaagtaatacccaacaagaaactgacatggcgatcaagacaacaggatcgagaaaactgtgctatgaaaggcaagcataaagatgaatgccacaactttatcaaagtatttgttccaagaaacgatgagatggtttttgtttgtggtaccaatgcattcaatcccatgtgtagatactacaggttgagtaccttagaatatgatggggaagaaattagtggcctggcaagatgcccatttgatgccagacaaaccaatgttgccctctttgctgatgggaagctgtattctgccacagtggctgacttcttggccagcgatgccgttatttatcgaagcatgggtgatggatctgcccttcgcacaataaaatatgattccaaatggataaaagagccacactttcttcatgccatagaatatggaaactatgtctatttcttctttcgagaaatcgctgtcgaacataataatttaggcaaggctgtgtattcccgcgtggcccgcatatgtaaaaacgacatgggtggttcccagcgggtcctggagaaacactggacttcatttctaaaggctcggctgaactgttctgtccctggagattcgtttttctactttgatgttctgcagtctattacagacataatacaaatcaatggcatccccactgtggtcggggtgtttaccacgcagctcaatagcatccctggttctgctgtctgtgcatttagcatggatgacattgaaaaagtattcaaaggacggtttaaggaacagaaaactccagattctgtttggacagcagttcccgaagacaaagtgccaaagccaaggcctggctgttgtgcaaaacacggccttgccgaagcttataaaacctccatcgatttcccggatgaaactctgtcattcatcaaatctcatcccctgatggactctgccgttccacccattgccgatgagccctggttcacaaagactcgggtcaggtacagactgacggccatctcagtggaccattcagccggaccctaccagaactacacagtcatctttgttggctctgaagctggcatggtacttaaagttctggcaaagaccagtcctttctctttgaacgacagcgtattactggaagagattgaagcctacaaccatgcaaagtgcagtgctgagaatgaggaagacaaaaaggtcatctcattacagttggataaagatcaccacgctttatatgtggcgttctctagctgcattatccgcatccccctcagtcgctgtgagcgttatggatcatgtaaaaagtcttgtattgcatctcgtgacccgtattgtggctggttaagccagggatcctgtggtagagtgaccccagggatgcttgctgaaggatatgaacaagacacagaattcggcaacacagctcatctaggggactgccatgacatggaggtatcttcatcttctgttaccacaatggtgtacgatgggaagtccagtctggagagtccaaccagatggtccacatgaatgtcctcatcacctgtgtctttgctgcttttgttttgggggcattcattgcaggtgtggcagtatactgctatcgagacatgtttgttcggaaaaacagaaagatccataaagatgcagagtccgcccagtcatgcacagactccagtggaagttttgccaaactgaatggtctctttgacagccctgtcaaggaataccaacagaatattgattctcctaaactgtatagtaacctgctaaccagtcggaaagagctaccacccaatggagatactaaatccatggtaatggaccatcgagggcaacctccagagttggctgctcttcctactcctgagtctacacccgtgcttcaccagaagaccctgcaggccatgaagagccactcagaaaaggcccatggccatggagcttcaaggaaagaaacccctcagttttttccgtctagtccgccacctcattccccattaagtcatgggcatatccccagtgccattgttcttccaaatgctacccatgactacaacacgtctttctcaaactccaatgctcacaaagctgaaaagaagcttcaaaacattgatcaccctctcacaaagtcatccagtaagagagatcaccggcgttctgttgattccagaaataccctcaatgatctcctgaagcatctgaatgacccaaatagtaaccccaaagccatcatgggagacatccagatggcacaccagaacttaatgctggatcccatgggatcgatgtctgaggtcccacctaaagtccctaaccgggaggcatcgctatactcccctccttcaactctccccagaaatagcccaaccaagcgagtggatgtccccaccactcctggagtcccaatgacttctctggaaagacaaagaggttatcacaaaaattcctcccagaggcactctatatctgctatgcctaaaaacttaaactcaccaaatggtgttttgttatccagacagcctagtatgaaccgtggaggatatatgcccacccccactggggcgaaggtggactatattcagggaacaccagtgagtgttcatctgcagccttccctctccagacagagcagctacaccagtaatggcactcttcctaggacgggactaaagaggacgccgtccttaaaacctgacgtgccaccaaagccttcctttgttcctcaaaccccatctgtcagaccactgaacaaatacacatactaggcctcaagtgtgctattcccatgtggctttatcctgtccgtgttgttgagaggatgatgttgtaagggtaccttaaaacaagagactcgcttgtattttaagagaaccaagtggccaaagaaactctttctaactttggcaacatcagaacttgccacatgtagctactgcagcaaggcttctgtgtacttgcctgaaaacaaaggaaggtgctggtcattccatttcttttgtttgaagctaaagagatgtgtagctcacaggggctaccttaccagtataaagagctgataacagtactcagaagaatctgtgaacaaatacttgaaaatgggttcaatgtagactgccattatgtgtggtcttcccattaaatgtgaacattttaatatgtatgcattcaccttgcctcttgcacaaatgtcaaaaaaaagatggtaatatctcaaagaaatgaacttgtagattaccaagcagtttgctaaaaattcaatctttgacccaagctgtagcatttttttttcatgtgtggcatctttttcatgccaccaacaaacttgttgtgtgtgtgcgtgtgtgtgtgtgtgtgtgtgtgtgtgtgtgtgttctgtacccactaggatttgtttaggtgcccattgcatctttttgtgctatggagttgtttacattaagcatgaccgaacgagagacaatactatttcccacaggagtccattgggttcagctttgaaagaggaatagaatcgaggctcctttgaccatcaaaatgatgaactttacttatgtggtacccaatgccagaatgtaagagttgcaagtgattttgtgctgctattcattaaaacttgtattccagtcttgccagcttaaggagatcaagatattaagaggtatccttgatttattttccagtattcagtagtaaaattttcctgtccactgtgaatcaaagcctgagtcactctatttaaccttggacacactaataaggttttattttgattgtgttcgtttccccccccccaatagtaaaatttctcctcctttaactcctcctaccccccaaggtaagaaacaaaaaacaaacaaacaaa

SEQ ID NO: 179823 - DNA, 592 bp, Homo sapiens
  Payload ID: 15434
  Gene Symbol: SEMA6D
  Gene Name: sema domain, transmembrane domain (TM), and cytoplasmic domain, (semaphorin) 6D
  ENST ID: ENST00000560006
  CDS Start-End: 1-592
gttaaccgaagacttctttgctttccataaccacagtgctgaaggatatgaacaagacacagaattcggcaacacagctcatctaggggactgccatgaaattttgcctacttcaactacaccagattacaaaatatttggcggtccaacatctgacatggaggtatcttcatcttctgttaccacaatggcaagtatcccagaaatcacacctaaagtgattgatacctggagacctaaactgacaagctctcggaaatttgtagttcaagatgatccaaacacttctgattttactgatcctttatcgggtatcccaaagggtgtacgatgggaagtccagtctggagagtccaaccagatggtccacatgaatgtcctcatcacctgtgtctttgctgcttttgttttgggggcattcattgcaggtgtggcagtatactgctatcgagacatgtttgttcggaaaaacagaaagatccataaagatgcagagtccgcccagtcatgcacagactccagtggaagttttgccaaactgaatggtctctttgacagccctgtcaaggaataccaacagaatattgattct

SEQ ID NO: 179824 - DNA, 734 bp, Homo sapiens
  Payload ID: 15434
  Gene Symbol: SEMA6D
  Gene Name: sema domain, transmembrane domain (TM), and cytoplasmic domain, (semaphorin) 6D
  ENST ID: ENST00000559196
  CDS Start-End: 77-734
ccaaactgcttctgttttccaggtagctcagtggcatttctgagcaggggccaccctgacttcaccttggcccaccatgagggtcttcctgctttgtgcctacatactgctgctgatggtttcccagttgagggcagtcagctttcctgaagatgatgaaccccttaatactgtcgactatcactattcaaggcaatatccggtttttagaggacgcccttcaggcaatgaatcgcagcacaggctggactttcagctgatgttgaaaattcgagacacactttatattgctggcagggatcaagtttatacagtaaacttaaatgaaatgcccaaaacagaagtaatacccaacaagaaactgacatggcgatcaagacaacaggatcgagaaaactgtgctatgaaaggcaagcataaagatgaatgccacaactttatcaaagtatttgttccaagaaacgatgagatggtttttgtttgtggtaccaatgcattcaatcccatgtgtagatactacaggttgagtaccttagaatatgatggggaagaaattagtggcctggcaagatgcccatttgatgccagacaaaccaatgttgccctctttgctgatgggaagctgtattctgccacagtggctgacttcttggccagcgatgccgttatttatcgaagcatgggtgatggatctgcccttcgcacaataaaatatgattccaaatggataaaag

SEQ ID NO: 179825 - DNA, 3885 bp, Homo sapiens
  Payload ID: 15435
  Gene Symbol: SEMA7A
  Gene Name: semaphorin 7A, GPI membrane anchor (John Milton Hagen blood group)
  Uniprot ID: O75326
  ENST ID: ENST00000261918
  CDS Start-End: 550-2550
aatttccagtgttctcccaggcaaagcaacagcgggtccctgagtgctccccacatatcatcgttgtgcctgctggtaggctcagcagggagccgtgtccacttaggcgaacgcatcctccgaggaccatagtcctcagggtgcgaaccacttagctggccatagcaaggttgttgggtgttggactcctctgcgcccttggagagaggtcctccacgacttctacgccaatctttttacggggtgcggggagtggaactgaggcccagagaggggatagggcctgccgcccctggcagaagaccacaagtctggcttgtccgcagctgggctttccccgtagagttgcccgggagagggtggcgaaggttcccccagcagttccgctctcgctcaggaaagccagtgaggcgagaaaaggctgcgaggggcggggggaggggcggggtggggtcagcgctggctccgcctcctggcgcttgggtctgcctgcggccgggcgctggctcagtctcggctgattgccgctgtcgctcccggggccacgggatgacgcctcctccgcccggacgtgccgcccccagcgcaccgcgcgcccgcgtccctggcccgccggctcggttggggcttccgctgcggctgcggctgctgctgctgctctgggcggccgccgcctccgcccagggccacctaaggagcggaccccgcatcttcgccgtctggaaaggccatgtagggcaggaccgggtggactttggccagactgagccgcacacggtgcttttccacgagccaggcagctcctctgtgtgggtgggaggacgtggcaaggtctacctctttgacttccccgagggcaagaacgcatctgtgcgcacggtgaatatcggctccacaaaggggtcctgtctggataagcgggactgcgagaactacatcactctcctggagaggcggagtgaggggctgctggcctgtggcaccaacgcccggcaccccagctgctggaacctggtgaatggcactgtggtgccacttggcgagatgagaggctacgcccccttcagcccggacgagaactccctggttctgtttgaaggggacgaggtgtattccaccatccggaagcaggaatacaatgggaagatccctcggttccgccgcatccggggcgagagtgagctgtacaccagtgatactgtcatgcagaacccacagttcatcaaagccaccatcgtgcaccaagaccaggcttacgatgacaagatctactacttcttccgagaggacaatcctgacaagaatcctgaggctcctctcaatgtgtcccgtgtggcccagttgtgcaggggggaccagggtggggaaagttcactgtcagtctccaagtggaacacttttctgaaagccatgctggtatgcagtgatgctgccaccaacaagaacttcaacaggctgcaagacgtcttcctgctccctgaccccagcggccagtggagggacaccagggtctatggtgttttctccaacccctggaactactcagccgtctgtgtgtattccctcggtgacattgacaaggtcttccgtacctcctcactcaagggctaccactcaagccttcccaacccgcggcctggcaagtgcctcccagaccagcagccgatacccacagagaccttccaggtggctgaccgtcacccagaggtggcgcagagggtggagcccatggggcctctgaagacgccattgttccactctaaataccactaccagaaagtggccgtccaccgcatgcaagccagccacggggagacctttcatgtgctttacctaactacagacaggggcactatccacaaggtggtggaaccgggggagcaggagcacagcttcgccttcaacatcatggagatccagcccttccgccgcgcggctgccatccagaccatgtcgctggatgctgagcggaggaagctgtatgtgagctcccagtgggaggtgagccaggtgcccctggacctgtgtgaggtctatggcgggggctgccacggttgcctcatgtcccgagacccctactgcggctgggaccaaggccgctgcatctccatctacagctccgaacggtcagtgctgcaatccattaatccagccgagccacacaaggagtgtcccaaccccaaaccagacaaggccccactgcagaaggtttccctggccccaaactctcgctactacctgagctgccccatggaatcccgccacgccacctactcatggcgccacaaggagaacgtggagcagagctgcgaacctggtcaccagagccccaactgcatcctgttcatcgagaacctcacggcgcagcagtacggccactacttctgcgaggcccaggagggctcctacttccgcgaggctcagcactggcagctgctgcccgaggacggcatcatggccgagcacctgctgggtcatgcctgtgccctggccgcctccctctggctgggggtgctgcccacactcactcttggcttgctggtccactagggcctcccgaggctgggcatgcctcaggcttctgcagcccagggcactagaacgtctcacactcagagccggctggcccgggagctccttgcctgccacttcttccaggggacagaataacccagtggaggatgccaggcctggagacgtccagccgcaggcggctgctgggccccaggtggcgcacggatggtgaggggctgagaatgagggcaccgactgtgaagctggggcatcgatgacccaagactttatcttctggaaaatatttttcagactcctcaaacttgactaaatgcagcgatgctcccagcccaagagcccatgggtcggggagtgggtttggataggagagctgggactccatctcgaccctggggctgaggcctgagtccttctggactcttggtacccacattgcctccttcccctccctctctcatggctgggtggctggtgttcctgaagacccagggctaccctctgtccagccctgtcctctgcagctccctctctggtcctgggtcccacaggacagccgccttgcatgtttattgaaggatgtttgctttccggacggaaggacggaaaaagctctatttttatgttaggcttatttcatgtatagctacttccgactgcatctgtatgaaaataccaaaactacatgcgggggggtgggtgggaaagggaggggctgggaagggatgggttggggagcgggggtgatcccagtctgaggctcccggggatgagataagagtctggagacgggcatgggttcttggagagtggcatgagctggctctgccctgggagcccggtctgagggggacgttgttggagcccctagtgttgggggtggttatgggagggggtggggtgagggaaacgggagaatgaaggagaaaactgagccctagtttcaccgtgttcatttggaaggacgagccgggtcctcagggggaggttccaggactctgcccttggcgttgagggttggggggcggggggcctcctcccttcctctcagcccccttccccaggggctgtgcttccatgctcctagcctcccaccttcgctcaggacatgttataacttaggctaaactgtgaaaattccggtggggatggcctgggccgagctctccaggcaggcggccctgcccccagccctgtccatccatttcaggggggagctgggcccttctccggctgtgtctggccacccagggcagtggctggggccagtggccttccagctttggcccctgcacctcttctcaatgcactttaataatgtaacatattactaataaacaagctatttattta

SEQ ID NO: 179826 - DNA, 2304 bp, Homo sapiens
  Payload ID: 15435
  Gene Symbol: SEMA7A
  Gene Name: semaphorin 7A, GPI membrane anchor (John Milton Hagen blood group)
  Uniprot ID: O75326
  ENST ID: ENST00000543145
  CDS Start-End: 38-1996
ctcggctgattgccgctgtcgctcccggggccacgggatgacgcctcctccgcccggacgtgccgcccccagcgcaccgcgcgcccgcgtccctggcccgccggctcggttggggcttccgctgcggctgcggctgctgctgctgctctgggcggccgccgcctccgcccagggccacctaaggagcggaccccgcatcttcgccgtctggaaaggccatgtagggcaggaccgggtggactttggccagactgagccgcacacggtgcttttccacgagccaggcagctcctctgtgtgggtgggaggacgtggcaaggtctacctctttgacttccccgagggcaagaacgcatctgtgcgcacggactgcgagaactacatcactctcctggagaggcggagtgaggggctgctggcctgtggcaccaacgcccggcaccccagctgctggaacctggtgaatggcactgtggtgccacttggcgagatgagaggctacgcccccttcagcccggacgagaactccctggttctgtttgaaggggacgaggtgtattccaccatccggaagcaggaatacaatgggaagatccctcggttccgccgcatccggggcgagagtgagctgtacaccagtgatactgtcatgcagaacccacagttcatcaaagccaccatcgtgcaccaagaccaggcttacgatgacaagatctactacttcttccgagaggacaatcctgacaagaatcctgaggctcctctcaatgtgtcccgtgtggcccagttgtgcaggggggaccagggtggggaaagttcactgtcagtctccaagtggaacacttttctgaaagccatgctggtatgcagtgatgctgccaccaacaagaacttcaacaggctgcaagacgtcttcctgctccctgaccccagcggccagtggagggacaccagggtctatggtgttttctccaacccctggaactactcagccgtctgtgtgtattccctcggtgacattgacaaggtcttccgtacctcctcactcaagggctaccactcaagccttcccaacccgcggcctggcaagtgcctcccagaccagcagccgatacccacagagaccttccaggtggctgaccgtcacccagaggtggcgcagagggtggagcccatggggcctctgaagacgccattgttccactctaaataccactaccagaaagtggccgtccaccgcatgcaagccagccacggggagacctttcatgtgctttacctaactacagacaggggcactatccacaaggtggtggaaccgggggagcaggagcacagcttcgccttcaacatcatggagatccagcccttccgccgcgcggctgccatccagaccatgtcgctggatgctgagcggaggaagctgtatgtgagctcccagtgggaggtgagccaggtgcccctggacctgtgtgaggtctatggcgggggctgccacggttgcctcatgtcccgagacccctactgcggctgggaccaaggccgctgcatctccatctacagctccgaacggtcagtgctgcaatccattaatccagccgagccacacaaggagtgtcccaaccccaaaccagacaaggccccactgcagaaggtttccctggccccaaactctcgctactacctgagctgccccatggaatcccgccacgccacctactcatggcgccacaaggagaacgtggagcagagctgcgaacctggtcaccagagccccaactgcatcctgttcatcgagaacctcacggcgcagcagtacggccactacttctgcgaggcccaggagggctcctacttccgcgaggctcagcactggcagctgctgcccgaggacggcatcatggccgagcacctgctgggtcatgcctgtgccctggccgcctccctctggctgggggtgctgcccacactcactcttggcttgctggtccactagggcctcccgaggctgggcatgcctcaggcttctgcagcccagggcactagaacgtctcacactcagagccggctggcccgggagctccttgcctgccacttcttccaggggacagaataacccagtggaggatgccaggcctggagacgtccagccgcaggcggctgctgggccccaggtggcgcacggatggtgaggggctgagaatgagggcaccgactgtgaagctggggcatcgatgacccaagactttatcttctggaaaatatttttcagactcctcaaacttgactaaatgcagcgatgct

SEQ ID NO: 179827 - DNA, 3228 bp, Homo sapiens
  Payload ID: 15435
  Gene Symbol: SEMA7A
  Gene Name: semaphorin 7A, GPI membrane anchor (John Milton Hagen blood group)
  ENST ID: ENST00000542748
  CDS Start-End: 389-1894
agtgcgtgcgcgcagctctgcgggtcccgggctgtccccgcgctgtccccgcgtggagcgtgtgggtttgggccatgtagggcaggaccgggtggactttggccagactgagccgcacacggtgcttttccacgagccaggcagctcctctgtgtgggtgggaggacgtggcaaggtctacctctttgacttccccgagggcaagaacgcatctgtgcgcacggtgaatatcggctccacaaaggggtcctgtctggataagcgggactgcgagaactacatcactctcctggagaggcggagtgaggggctgctggcctgtggcaccaacgcccggcaccccagctgctggaacctggtgaatggcactgtggtgccacttggcgagatgagaggctacgcccccttcagcccggacgagaactccctggttctgtttgaaggggacgaggtgtattccaccatccggaagcaggaatacaatgggaagatccctcggttccgccgcatccggggcgagagtgagctgtacaccagtgatactgtcatgcagaacccacagttcatcaaagccaccatcgtgcaccaagaccaggcttacgatgacaagatctactacttcttccgagaggacaatcctgacaagaatcctgaggctcctctcaatgtgtcccgtgtggcccagttgtgcaggggggaccagggtggggaaagttcactgtcagtctccaagtggaacacttttctgaaagccatgctggtatgcagtgatgctgccaccaacaagaacttcaacaggctgcaagacgtcttcctgctccctgaccccagcggccagtggagggacaccagggtctatggtgttttctccaacccctggaactactcagccgtctgtgtgtattccctcggtgacattgacaaggtcttccgtacctcctcactcaagggctaccactcaagccttcccaacccgcggcctggcaagtgcctcccagaccagcagccgatacccacagagaccttccaggtggctgaccgtcacccagaggtggcgcagagggtggagcccatggggcctctgaagacgccattgttccactctaaataccactaccagaaagtggccgtccaccgcatgcaagccagccacggggagacctttcatgtgctttacctaactacagacaggggcactatccacaaggtggtggaaccgggggagcaggagcacagcttcgccttcaacatcatggagatccagcccttccgccgcgcggctgccatccagaccatgtcgctggatgctgagcggaggaagctgtatgtgagctcccagtgggaggtgagccaggtgcccctggacctgtgtgaggtctatggcgggggctgccacggttgcctcatgtcccgagacccctactgcggctgggaccaaggccgctgcatctccatctacagctccgaacggtcagtgctgcaatccattaatccagccgagccacacaaggagtgtcccaaccccaaaccagacaaggccccactgcagaaggtttccctggccccaaactctcgctactacctgagctgccccatggaatcccgccacgccacctactcatggcgccacaaggagaacgtggagcagagctgcgaacctggtcaccagagccccaactgcatcctgttcatcgagaacctcacggcgcagcagtacggccactacttctgcgaggcccaggagggctcctacttccgcgaggctcagcactggcagctgctgcccgaggacggcatcatggccgagcacctgctgggtcatgcctgtgccctggccgcctccctctggctgggggtgctgcccacactcactcttggcttgctggtccactagggcctcccgaggctgggcatgcctcaggcttctgcagcccagggcactagaacgtctcacactcagagccggctggcccgggagctccttgcctgccacttcttccaggggacagaataacccagtggaggatgccaggcctggagacgtccagccgcaggcggctgctgggccccaggtggcgcacggatggtgaggggctgagaatgagggcaccgactgtgaagctggggcatcgatgacccaagactttatcttctggaaaatatttttcagactcctcaaacttgactaaatgcagcgatgctcccagcccaagagcccatgggtcggggagtgggtttggataggagagctgggactccatctcgaccctggggctgaggcctgagtccttctggactcttggtacccacattgcctccttcccctccctctctcatggctgggtggctggtgttcctgaagacccagggctaccctctgtccagccctgtcctctgcagctccctctctggtcctgggtcccacaggacagccgccttgcatgtttattgaaggatgtttgctttccggacggaaggacggaaaaagctctatttttatgttaggcttatttcatgtatagctacttccgactgcatctgtatgaaaataccaaaactacatgcgggggggtgggtgggaaagggaggggctgggaagggatgggttggggagcgggggtgatcccagtctgaggctcccggggatgagataagagtctggagacgggcatgggttcttggagagtggcatgagctggctctgccctgggagcccggtctgagggggacgttgttggagcccctagtgttgggggtggttatgggagggggtggggtgagggaaacgggagaatgaaggagaaaactgagccctagtttcaccgtgttcatttggaaggacgagccgggtcctcagggggaggttccaggactctgcccttggcgttgagggttggggggcggggggcctcctcccttcctctcagcccccttccccaggggctgtgcttccatgctcctagcctcccaccttcgctcaggacatgttataacttaggctaaactgtgaaaattccggtggggatggcctgggccgagctctccaggcaggcggccctgcccccagccctgtccatccatttcaggggggagctgggcccttctccggctgtgtctggccacccagggcagtggctggggccagtggccttccagctttggcccctgcacctcttctcaatgcactttaataatgtaacatattactaataaacaagctatttattt

SEQ ID NO: 179828 - DNA, 674 bp, Homo sapiens
  Payload ID: 15435
  Gene Symbol: SEMA7A
  Gene Name: semaphorin 7A, GPI membrane anchor (John Milton Hagen blood group)
  ENST ID: ENST00000567345
  CDS Start-End: 433-674
agacgctgcgcggggcgggtgcggagtgtgctgcacccggagggagtgcgtgcgcgcagctctgcgggtcccgggctgtccccgcgctgtccccgcgtggagcgtgtgggtttgggccatgtagggcaggaccgggtggactttggccagactgagccgcacacggtgcttttccacgagccaggcagctcctctgtgtgggtgggaggacgtggcaaggtctacctctttgacttccccgagggcaagaacgcatctgtgcgcacggtgaatatcggctccacaaaggggtcctgtctggataagcgggactgcgagaactacatcactctcctggagaggcggagtgaggggctgctggcctgtggcaccaacgcccggcaccccagctgctggaacctggtgaatggcactgtggtgccacttggcgagatgagaggctacgcccccttcagcccggacgagaactccctggttctgtttgaaggggacgaggtgtattccaccatccggaagcaggaatacaatgggaagatccctcggttccgccgcatccggggcgagagtgagctgtacaccagtgatactgtcatgcagaacccacagttcatcaaagccaccatcgtgcaccaagaccaggcttacgatgacaagatctactacttcttccgaga

SEQ ID NO: 179829 - DNA, 1662 bp, Homo sapiens
  Payload ID: 15436
  Gene Symbol: SEMG1
  Gene Name: semenogelin I
  Uniprot ID: P04279
  ENST ID: ENST00000372781
  CDS Start-End: 58-1446
aaggaagatataaatgacaaggtcggctcagctctcagacaaggttttccaagcaagatgaagcccaacatcatctttgtactttccctgctcctcatcttggagaagcaagcagctgtgatgggacaaaaaggtggatcaaaaggccgattaccaagtgaattttcccaatttccacacggacaaaagggccagcactattctggacaaaaaggcaagcaacaaactgaatccaaaggcagtttttctattcaatacacatatcatgtagatgccaatgatcatgaccagtcccgaaaaagtcagcaatatgatttgaatgccctacataagacgacaaaatcacaacgacatctaggtggaagtcaacaactgctccataataaacaagaaggcagagaccatgataaatcaaaaggtcattttcacagggtagttatacaccataaaggaggcaaagctcatcgtgggacacaaaatccttctcaagatcaggggaatagcccatctggaaagggaatatccagtcaatattcaaacacagaagaaaggctgtgggttcatggactaagtaaagaacaaacttccgtctctggtgcacaaaaaggtagaaaacaaggcggatcccaaagcagttatgttctccaaactgaagagctagtagctaacaaacaacaacgtgagactaaaaattctcatcaaaataaagggcattaccaaaatgtggttgaagtgagagaggaacattcaagtaaagtacaaacctcactctgtcctgcgcaccaagacaaactccaacatggatccaaagacattttttctacccaagatgagctcctagtatataacaagaatcaacaccagacaaaaaatctcaatcaagatcaacagcatggccgaaaggcaaataaaatatcataccaatcttcaagtacagaagaaagacgactccactatggagaaaatggtgtgcagaaagatgtatcccaaagcagtatttatagccaaactgaagagaaagcacagggcaagtctcaaaaacagataacaattcccagtcaagagcaagagcatagccaaaaggcaaataaaatatcataccaatcttcaagtacggaagaaagacgactccactatggagaaaatggtgtgcagaaagatgtatcccaacgcagtatttatagccaaactgaaaagctagtagcaggcaagtctcaaatccaggcaccaaatcctaagcaagagccatggcatggtgaaaatgcaaaaggagagtctggccaatctacaaatagagaacaagacctactcagtcatgaacaaaaaggcagacaccaacatggatctcatgggggattggatattgtaattatagagcaggaagatgacagtgatcgtcatttggcacaacatcttaacaacgaccgaaacccattatttacataaacctaccattcggtaaccatgtgaaaggatggaccaatatcaaggtgtcagttgacctcagtgaattctgtgatgtttctgagatgcagactcccgtgtagtttcagattcttggtccatggatgacaccacctgcccatgcttccttgaattaggctttcctaacctgaagcgccttcaaacttccaataaagagatcattttctgcttcatctg

SEQ ID NO: 179830 - DNA, 2051 bp, Homo sapiens
  Payload ID: 15437
  Gene Symbol: SEMG2
  Gene Name: semenogelin II
  Uniprot ID: Q02383
  ENST ID: ENST00000372769
  CDS Start-End: 91-1839
gacatttcagctccacccatagcacacccactcaaggaacatataaatgaagagatccgctcagttctcagacaagatttttcaagcaagatgaagtccatcatcctctttgtcctttccctgctccttatcttggagaagcaagcagctgtgatgggacaaaaaggtggatcaaaaggccaattgccaagcggatcttcccaatttccacatggacaaaagggccagcactattttggacaaaaagaccaacaacatactaaatccaaaggcagtttttctattcaacacacatatcatgtagacatcaatgatcatgactggacccgaaaaagtcagcaatatgatttgaatgccctacataaggcgacaaaatcaaaacaacacctaggtggaagtcaacaactgctcaattataaacaagaaggcagagaccatgataaatcaaaaggtcattttcacatgatagttatacatcataaaggaggccaagctcatcatgggacacaaaatccttctcaagatcaggggaatagcccatctggaaagggattatccagtcaatgttcaaacacagaaaaaaggctatgggttcatggactaagtaaagaacaagcttcagcctctggtgcacaaaaaggtagaacacaaggtggatcccaaagcagttatgttctccaaactgaagaactagtagttaacaaacaacaacgtgagactaaaaattctcatcaaaataaagggcattaccaaaatgtggttgacgtgagagaggaacattcaagtaaactacaaacttcactccatcctgcacatcaagacagactccaacatggacccaaagacatttttactacccaagatgagctcctagtatataacaagaatcaacaccagacaaaaaatctcagtcaagatcaagagcatggccggaaggcacataaaatatcatacccgtcttcacgtacagaagaaagacaacttcaccatggagaaaagagtgtacagaaagatgtatccaaaggcagcatttctatccaaactgaagagaaaatacatggcaagtctcaaaaccaggtaacaattcatagtcaagatcaagagcatggccataaggaaaataaaatatcataccaatcttcaagtacagaagaaagacatctcaactgtggagaaaagggcatccagaaaggtgtatccaaaggcagtatttcgatccaaactgaagagcaaatacatggcaagtctcaaaaccaggtaagaattcctagtcaagctcaagagtatggccataaggaaaataaaatatcataccaatcttcgagtacagaagaaagacgtctcaacagtggagaaaaggatgtacagaaaggtgtatccaaaggcagtatttctatccaaactgaagagaaaatacatggcaagtctcaaaaccaggtaacaattcctagtcaagatcaagagcatggccataaggaaaataaaatgtcataccaatcttcaagtacagaagaaagacgactcaactatggaggaaagagcacgcagaaagatgtatcccaaagcagtatttctttccaaattgaaaagctagtagaaggcaagtctcaaatccagacaccaaatcctaatcaagatcaatggtctggccaaaatgcaaaaggaaagtctggtcaatctgcagatagcaaacaagacctactcagtcatgaacaaaaaggcagatacaaacaggaatccagtgagtcacataatattgtaattactgagcatgaggttgcccaagatgatcatttgacacaacaatataatgaagacagaaatccaatatctacatagccctgttgcttagcaaccacttgaaaagctggaccaatagcaaggtgtcacccgacctcagtgaagtctttgatgtttctgagaggcagactcccatgtggtcccagatccttggtccatggatgacaccaccttcccatgcttccttgcattaggctttctaaacccggagccccttcaaacttccaataaagggatcattttctgcttta

SEQ ID NO: 179831 - DNA, 11100 bp, Homo sapiens
  Payload ID: 15438
  Gene Symbol: SETX
  Gene Name: senataxin
  Uniprot ID: Q7Z333
  ENST ID: ENST00000224140
  CDS Start-End: 184-8217
cttccgctggtggcctagagcggggcccggtatggaggtgggctagaggccgacgccagccagagagcgaaatgttcttttggggccagagtctgggcatatatgaatgcaaatccgtgtttgttcacaactaagcccagctgagacgatcacttttctgtaggccatttgtccaggtacagaatgagcacatgttgttggtgtacgccaggtggtgcttccaccattgacttcctaaagcgctatgcttccaacactccgtccggtgaatttcaaacagccgacgaagacctctgctactgcttggagtgtgtggctgagtaccacaaagcaagagatgaattgccattcttgcatgaggttttatgggaattagaaaccttacgtctcataaatcactttgaaaaatccatgaaggcagaaattggagatgatgatgagttatatatagtagacaataatggagagatgccactgtttgacatcactgggcaagactttgaaaataagcttcgagttcctcttcttgaaatactgaaatatccttacttgcttctacatgaacgtgttaacgagttatgtgttgaagcactttgtcggatggaacaagccaattgctcctttcaggtgtttgataaacatccagggatctatttgtttttagtccatcccaatgaaatggttcggcgttgggctatcttgactgcaagaaacttggggaaagtggacagagatgattattatgacttacaagaagttttactttgcctttttaaagtcattgagttggggcttttagagagtccagacatttatacttcttctgtcctagagaagggtaaactgattcttctgccctcacacatgtatgatactaccaactacaaaagctattggttaggtatttgcatgttgctgaccattcttgaggaacaagccatggattccctgttgttgggctcagacaaacaaaatgattttatgcaatcgatacttcacactatggagagggaagcagatgatgatagtgtggatcctttctggccagcgttacactgttttatggtgattctggatcgccttggatctaaggtctggggtcaacttatggatcctattgtggcatttcaaaccattatcaacaacgcaagctacaatagagagatccgacatatacggaacagctctgtaaggaccaagttagaaccggagtcctatttggatgatatggtgacttgcagccagatcgtatacaattataatcctgaaaagaccaaaaaggattctggatggagaacagccatttgcccagattattgtcctaacatgtatgaagaaatggaaacattagccagtgtacttcagtcagatattggtcaagacatgcgtgttcataacagcacatttctatggttcatcccttttgtccagtccctcatggatcttaaggatttgggtgtggcttacatagcacaggttgttaatcatctgtactctgaagtcaaagaagtcctcaaccaaacagatgctgtgtgtgacaaagtcactgaattttttcttctaattttggtatcagtgattgaactgcatagaaataaaaaatgtttgcatttgctgtgggtaagttcccagcaatgggtggaagccgtcgtcaaatgtgccaagcttcctaccactgcgtttacacggagttctgagaaatcatctggaaattgctccaaaggaacagcaatgatatcttcactgtcattgcattccatgccatctaactctgtacaacttgcttatgtgcagctgattagaagtctccttaaagaaggttatcagcttgggcagcagtctctttgcaagcgattctgggataagctcaacttattccttagaggaaatttatctctaggttggcagttgactagtcaggaaacccatgagctacaaagttgcttaaagcaaattattagaaacataaaattcaaagcacctccatgtaacacttttgtggatctgacttctgcatgtaaaatctctcctgcatcttataataaagaagaaagtgaacaaatggggaagacgtctagaaaagatatgcattgtttggaagcttccagcccaacattttctaaagaaccaatgaaagtgcaagacagtgtattgatcaaagcagataacactatagaaggtgacaataatgagcaaaattatataaaggatgtgaaactagaggaccatctcttagctgggtcatgcttaaagcagagtagtaaaaacatttttactgaaagagctgaagatcaaattaaaataagtacaaggaagcagaagtctgtaaaagagatctcttcatatacaccaaaggactgtacttcaagaaatggtccagaaaggggatgtgacagaggaataatagtatcaacacgtttgttgactgattctagcactgatgctttggaaaaagtgtccacatcgaatgaagatttctctttaaaggatgatgctcttgctaaaacctcaaaacgaaaaactaaggtacagaaagatgaaatctgtgcaaagttatcacatgtaataaagaagcaacacaggaagagtactttggtcgataatactatcaatttagatgaaaatttgactgtatctaacattgagagtttctattcaaggaaagatacaggagttcagaaaggagatggtttcatacacaatctttctttagaccctagtggtgttctggatgataagaatggagaacaaaaatctcaaaacaatgtattgccaaaagagaaacaattaaagaatgaagaattagttattttctctttccatgaaaacaattgtaaaatacaggaatttcatgttgatggtaaagaattgatcccttttacagaaatgaccaatgcttcagagaagaaatcatctccctttaaagatcttatgactgtacctgaatcaagagatgaggagatgagtaatagtaccagtgtgatttattctaacttgacaagagaacaggcccctgacatcagtcctaaatctgacaccttaacggattctcagatagacagagaccttcacaaattatctttactagctcaagccagtgttattacgttcccatccgattcacctcagaactcatcgcagctgcaaaggaaagtaaaagaagataaaagatgtttcacagctaaccaaaataatgttggagatacctcccgtggacaggttattattatttcagattctgatgatgatgatgatgaaagaatcctgagtcttgagaaactcactaaacaggacaaaatatgccttgagagggaacatccagagcagcacgtttcaacagttaatagtaaggaggaaaagaatccagtaaaggaagaaaagacagagactctttttcagtttgaggaatctgattctcagtgttttgagtttgaaagttcatctgaagtgttttcagtttggcaagatcatccagacgataataattcagttcaagatggtgagaaaaaatgtttggctcctatagccaatactacaaatggtcagggttgtacagattatgtatctgaagttgttaaaaaaggagcagagggcattgaagaacacacaagaccacggagtatttctgttgaagaattttgtgaaattgaagtaaaaaagcctaagagaaaacgatctgaaaaaccaatggctgaagatcctgtgaggccttcatcttctgtcagaaatgagggccagtctgatactaataagagagatcttgtgggaaatgattttaaaagtattgatagaaggacttcaactcccaattcacgtattcagagagccactacggtttcacaaaagaagtcttcaaagctttgtacttgtacagaacccatcaggaaagttccagtttctaagacccctaagaaaactcattcagatgccaaaaaaggacagaatagaagttcaaattacctaagttgtagaacaactcctgctatagtgccgccaaagaaatttcgtcagtgtcctgagccaacttcaacagctgagaaacttggcctgaaaaagggtcctcgtaaggcatatgagttgtcccagcggtctttggattatgtagctcaattacgtgatcatggcaaaactgttggagtagttgatacccgaaaaaagactaaattaatttctcctcagaacctgtctgtcagaaataataagaaacttctgactagtcaagaacttcagatgcaaaggcagatcagacccaaatcacaaaaaaatagacgaagactttctgattgtgaaagtacagatgttaaaagagcagggtcacatacagcacagaattctgacatatttgtaccagaatctgataggtcagattataattgtacaggaggaactgaggtacttgccaacagtaacagaaaacagttaataaaatgcatgccttctgaaccagaaaccataaaagcaaaacatgggtctccagcaactgatgatgcttgccctttgaaccagtgtgattctgtagtgttaaatggaacagtaccaacaaatgaagtaattgtctccacttcagaagaccctctgggtggaggtgatccaacagcacgtcatatagagatggcagctttgaaagaaggagagcctgactccagcagtgatgcagaggaagataacttatttttaacccaaaatgatcctgaagatatggatttatgttcacaaatggagaatgacaattataaactcattgaactaattcatggaaaagatacagttgaggttgaagaagattctgtaagtcggcctcagttggaatctttgagtggcacaaagtgtaagtacaaagattgtcttgaaaccacaaaaaaccagggtgaatactgcccaaaacactctgaagtgaaagcagcagatgaagatgtatttcgtaaacctggcttgcctcctcctgcatctaaacctttgagacctaccactaagatttttagctcaaagagtacttcacgaattgctggtctttctaaatctttggaaacttcttcagcactttcaccgtctctaaaaaataagtcaaaggggatacagtcgattttgaaagtaccacagccagttcccctcatagctcagaagccagttggtgaaatgaagaattcgtgcaatgttcttcatcctcagtctccgaataattccaacaggcaaggttgcaaagttccatttggtgaaagcaaatattttccatcttcctctccagtaaacattcttttgtcatcacagtctgtctctgacaccttcgttaaagaggtcttaaaatggaaatatgaaatgtttttgaactttggtcagtgtgggccccctgcaagtctttgtcagtccatctcaagacctgtgcctgtcagatttcacaattatggagattattttaatgtttttttccctttgatggtattgaatacttttgaaacagtggcacaagaatggctcaactctccaaatagagagaatttctatcagttgcaagtacgaaaatttcctgccgattatataaaatactgggagtttgcagtttatctggaagaatgtgaactggctaaacagctttatccaaaggaaaacgatttggtgtttttagctcctgagagaataaatgaagagaagaaagatacagagagaaatgacatacaagatctccacgaatatcattctggttatgttcataaatttcgccgcacgtcagtcatgcgtaatgggaaaactgagtgttacctttccatccagactcaagagaactttccggccaatttaaacgaacttgtgaattgtattgtaatcagttctctggtaactacacaaaggaagttgaaagccatgtctctgttgggtagtcggaaccaactggctagagctgttctgaatccaaaccctatggacttctgtacaaaagatttactgactacaacatctgagagaattattgcgtacttaagagatttcaatgaagatcaaaagaaagcaatagaaactgcatatgctatggtgaaacactcaccatcagttgccaaaatctgcttgattcatggaccacctggaacaggaaaatcaaaaactattgttggcctcctctatcgtctactgacagagaaccagaggaaggggcattcagacgaaaactccaatgccaaaatcaaacaaaaccgtgtcctcgtgtgtgcaccttccaatgcagctgttgatgaactcatgaaaaaaattatccttgaattcaaagaaaaatgtaaagacaagaagaatcctttaggaaactgtggagatataaatttagtacgactgggtccagaaaagtctattaatagtgaggttctaaagttcagtttggacagccaagtaaaccacagaatgaaaaaagagttaccttctcatgttcaggcgatgcataaaagaaaggaatttctagattatcagctggatgagctttcccggcagcgagctctatgccgaggtggacgggaaatacagaggcaagaattagatgaaaacatttccaaagtttctaaggaaaggcaggaacttgcttctaaaattaaagaggttcaaggacgcccacagaaaacacagagtatcatcatcttagagtcccatatcatctgctgcacgttgagcacaagtggtggtttactacttgagtctgctttccgtgggcaagggggtgtccccttcagctgtgtcattgttgatgaggctggacagtcttgtgaaattgagactcttactccactcatccatcgctgcaataagctcatcctagtaggagatcctaagcagctccctccgacagtcatctctatgaaagcacaggagtatggctacgaccagtcaatgatggctcgcttctgcagactgctggaagagaatgtagaacacaacatgatcagcaggctgcccattctacagctcactgttcagtacaggatgcatccagacatatgcctcttcccttctaattatgtttataacagaaacttaaaaacaaatagacagacagaagccattcgatgttcatcagattggccatttcagccataccttgtgtttgatgttggagatggttcagaaagacgggataatgactcatatataaatgttcaagaaataaaactggtgatggaaataattaagcttattaaagacaaaagaaaggatgttagttttcgaaacattggcataataactcattacaaggcccagaagacgatgattcagaaggatttggacaaagagttcgatagaaaaggaccagcagaagtagacactgtggatgcattccagggtcggcagaaggattgtgttattgttacgtgtgtcagagcaaatagcatccaaggttcaattggattcctggcaagtttgcagagattgaatgtcaccatcacacgagccaagtacagcctcttcatcctcggacatttgaggaccctgatggaaaaccagcattggaatcagctgattcaggatgctcagaagcgtggtgccattattaagacctgtgacaaaaactatagacatgatgcagtgaagattctgaaactcaagcctgtgctgcagagaagtctcactcaccctcctaccatagccccagaggggtccagaccccagggtggtttgcccagcagcaagctagacagtggatttgccaagacatctgttgctgcttctctataccacacaccctctgactccaaggaaattactcttactgttacttcaaaggaccctgaaagacctcctgttcatgaccaacttcaggacccacgactgctgaagaggatgggcattgaggtcaaaggaggaatattcctttgggatccacaaccctcgagcccccagcatcctggagcaacacctcctacgggcgagccgggcttccctgtcgttcaccaggacctgagccatatacagcagcccgctgctgtagtggctgctctgagcagccacaaacctcccgtgcggggcgaacctccagctgccagtcccgaggcttccacgtgtcagagcaaatgtgatgacccggaagaggagctctgtcacaggagagaggccagggctttcagtgaaggggagcaggagaagtgtggttccgagacccatcacaccaggaggaactctaggtgggacaagaggacactggagcaggaggacagcagttccaagaaaagaaagcttttataggaaagcccagtgacatgggccagcagccacagcatattgtaaactgaagatgaccagctcgtgggaccatctagataagcttgttttttgtaaggagtttgtgtgctgttggaaaacatggaaaatgcatccttaacacctgagcctctggtcatcttcagtattttctgtcatttgcaaaagctttcagagggcattgtgtatccgtaataatgtccttgaagtcagagactggaaatgttgatctcttagtcttctatagacaaggaggtcagactggagtgaatgttgtaaaagttgaaatgtatatttgtatagcaaataacaaaatccttttaaaatttaatctagtagaccgcttttctttccccctgtttaaaatgttaatcagttttcaacagaacaaactttatattaccaaaaaaaaaaagatgggaggagggcgggtcctttcaaccattgttagagcaagacagataattatttaacagcctagcttggaataagctgagttagtgctggtgggtcaggtgtctctggctctattaaaaaaagcaaaaacccccccaaaaacctggagtctcctaggggacactttgggcagcacggttatgttaggtaaagtcttgctgacatggtgcatttttagatagagtgcattggcccagggtattatatttctgtgatgagttcatttacctgtttcagtatgcacatagttccctagctaaaattcctaatcttcttgagagagaagaatatggagtgaaagaataattcttgagctatcattcaaatgctcccagcatattgtgagccttgtgtgactggtgaggtacagacatttggttgccaaatgctagattagcgctgggtcagctgtggaagaatcgcctcagcttacagattgtcagacagatctaactagttttccagaaagcctgggaagctgtgtgttcaacatttcccaagggattctgatcaccaggcagcttgggaaccactggggcaggccaaatagaatattttgggcgggaaagaagcacccgatttaaaatgaagcgtaaccagaggagttcagaactgggaagagagtggtagacttcctgtgatcttcagaaatcatctacctggtaaaaatacatgctgtttagaatatctgataggtgtttccagctactattagaggtgatagtgcttttgtgggggaaaaaattggtcatggtgaatggagatcgaggaagctcgggacaagggaggggtgggctgcctgattttgtccagttttccaaatatccacgcagtgaactggagtatcctaaacatgagaatgtacagttgacagttgtaaaaactagggatctgtagtgaatgctgtgcagccccatatctcatttgggggtaggaaaatagctgaagattcatgtgcattatttgacatttcctttgtcatctgctttttaagcaaaaaagggttttgtgttagaaattctacttgagcagattataaagagctttaaaaaacaactttcggttgccaaaagtttgagcatttgatttcattacctgtgtctccctcactggtgtccagacggtcaactgaatactcctgaaacccagggagcaggtgacttcctggagtgctttgtccccagagtcagccactgcttcctctgtgggggtggagagtttgtctttggccatgcagtgtgcgacagttcaggacgggtagggatgggtcccattctgtctgggtcaagggctctatcagcttcttccatgtgcctttgggaagaaatctcgttactttaagtttgctttcctgttatcttgatgaagtgcccattttagcagacacttgtagtgctgaccacttagggaatgtacaaactcctaagcttctaaagggaggcatggcaaaaacgttggggtcaggatgtctctcacgctgctcatgttaatactattaacacatgatttgagaaataagttttctctaaaatgcatattttgccgccacacactgaacaatattatttccagtgaagtttgatgcctgttcttacgttgtgttcacctgttggttcaccactcagcagatctgattctgcaagaattaatggtagaactagatcatcctttctaacagacgagcctgtgtcctgtgacggcctttcacagcggaatgcagttgtacctcacattacttttgaaacttcactcgttccagttggtacaagtatttgccaaagccatttcctatgttcaccgtggcccctcctgatgtggctgtcagcgcagcgttgttgaacagggctattctttttacaaggtgtgaagtgtggctcttcgcttcgtctttgccatggcattaaaagaaagttccctgtcttctttcaatattagttatttcaaatgaatatgtgctacttaaaagcttgttttgtttctttgtatataatttgccttggatttattgtgcacagtttgttgagttgtatgtttttgtgaattatcaggagtaaatttgacaagtacatgtgaataacctcctgtaaatgaattttataacaaaaatgtactgaactattttttaaagttgtgcagattagcaattttttgctatagctttgacttttctatgctgtgaattaatagctgcgatttggcaaacagccctgttgtctttgttaaaccctaaattttaagaggaaatggcagaattaaaagcagaaacaagaagatggacatggattagaggttatgtattatgaagtaaactacaaggtactaacatcatttcgtctgccatttggtttgctttatgctgaaattacttggtggggatttgtgcaattcagatataaaaagtttcattatcca

SEQ ID NO: 179832 - DNA, 5730 bp, Homo sapiens
  Payload ID: 15438
  Gene Symbol: SETX
  Gene Name: senataxin
  ENST ID: ENST00000436441
  CDS Start-End: 1-2847
gtggcacaagaatggctcaactctccaaatagagagaatttctatcagttgcaagtacgaaaatttcctgccgattatataaaatactgggagtttgcagtttatctggaagaatgtgaactggctaaacagctttatccaaaggaaaacgatttggtgtttttagctcctgagagaataaatgaagagaagaaagatacagagagaaatgacatacaagatctccacgaatatcattctggttatgttcataaatttcgccgcacgtcagtcatgcgtaatgggaaaactgagtgttacctttccatccagactcaagagaactttccggccaatttaaacgaacttgtgaattgtattgtaatcagttctctggtaactacacaaaggaagttgaaagccatgtctctgttgggtagtcggaaccaactggctagagctgttctgaatccaaaccctatggacttctgtacaaaagatttactgactacaacatctgagagaattattgcgtacttaagagatttcaatgaagatcaaaagaaagcaatagaaactgcatatgctatggtgaaacactcaccatcagttgccaaaatctgcttgattcatggaccacctggaacaggaaaatcaaaaactattgttggcctcctctatcgtctactgacagagaaccagaggaaggggcattcagacgaaaactccaatgccaaaatcaaacaaaaccgtgtcctcgtgtgtgcaccttccaatgcagctgttgatgaactcatgaaaaaaattatccttgaattcaaagaaaaatgtaaagacaagaagaatcctttaggaaactgtggagatataaatttagtacgactgggtccagaaaagtctattaatagtgaggttctaaagttcagtttggacagccaagtaaaccacagaatgaaaaaagagttaccttctcatgttcaggcgatgcataaaagaaaggaatttctagattatcagctggatgagctttcccggcagcgagctctatgccgaggtggacgggaaatacagaggcaagaattagatgaaaacatttccaaagtttctaaggaaaggcaggaacttgcttctaaaattaaagaggttcaaggacgcccacagaaaacacagagtatcatcatcttagagtcccatatcatctgctgcacgttgagcacaagtggtggtttactacttgagtctgctttccgtgggcaagggggtgtccccttcagctgtgtcattgttgatgaggctggacagtcttgtgaaattgagactcttactccactcatccatcgctgcaataagctcatcctagtaggagatcctaagcagctccctccgacagtcatctctatgaaagcacaggagtatggctacgaccagtcaatgatggctcgcttctgcagactgctggaagagaatgtagaacacaacatgatcagcaggctgcccattctacagctcactgttcagtacaggatgcatccagacatatgcctcttcccttctaattatgtttataacagaaacttaaaaacaaatagacagacagaagccattcgatgttcatcagattggccatttcagccataccttgtgtttgatgttggagatggttcagaaagacgggataatgactcatatataaatgttcaagaaataaaactggtgatggaaataattaagcttattaaagacaaaagaaaggatgttagttttcgaaacattggcataataactcattacaaggcccagaagacgatgattcagaaggatttggacaaagagttcgatagaaaaggaccagcagaagtagacactgtggatgcattccagggtcggcagaaggattgtgttattgttacgtgtgtcagagcaaatagcatccaaggttcaattggattcctggcaagtttgcagagattgaatgtcaccatcacacgagccaagtacagcctcttcatcctcggacatttgaggaccctgatgcaacttcttcctaggagcttttgtgtacacgtgaaccattcgccttttttcagcccagaacccaagtatctacactgggctctcaaggaaaaccagcattggaatcagctgattcaggatgctcagaagcgtggtgccattattaagacctgtgacaaaaactatagacatgatgcagtgaagattctgaaactcaagcctgtgctgcagagaagtctcactcaccctcctaccatagccccagaggggtccagaccccagggtggtttgcccagcagcaagctagacagtggatttgccaagacatctgttgctgcttctctataccacacaccctctgactccaaggaaattactcttactgttacttcaaaggaccctgaaagacctcctgttcatgaccaacttcaggacccacgactgctgaagaggatgggcattgaggtcaaaggaggaatattcctttgggatccacaaccctcgagcccccagcatcctggagcaacacctcctacgggcgagccgggcttccctgtcgttcaccaggacctgagccatatacagcagcccgctgctgtagtggctgctctgagcagccacaaacctcccgtgcggggcgaacctccagctgccagtcccgaggcttccacgtgtcagagcaaatgtgatgacccggaagaggagctctgtcacaggagagaggccagggctttcagtgaaggggagcaggagaagtgtggttccgagacccatcacaccaggaggaactctaggtgggacaagaggacactggagcaggaggacagcagttccaagaaaagaaagcttttataggaaagcccagtgacatgggccagcagccacagcatattgtaaactgaagatgaccagctcgtgggaccatctagataagcttgttttttgtaaggagtttgtgtgctgttggaaaacatggaaaatgcatccttaacacctgagcctctggtcatcttcagtattttctgtcatttgcaaaagctttcagagggcattgtgtatccgtaataatgtccttgaagtcagagactggaaatgttgatctcttagtcttctatagacaaggaggtcagactggagtgaatgttgtaaaagttgaaatgtatatttgtatagcaaataacaaaatccttttaaaatttaatctagtagaccgcttttctttccccctgtttaaaatgttaatcagttttcaacagaacaaactttatattaccaaaaaaaaaaagatgggaggagggcgggtcctttcaaccattgttagagcaagacagataattatttaacagcctagcttggaataagctgagttagtgctggtgggtcaggtgtctctggctctattaaaaaaagcaaaaacccccccaaaaacctggagtctcctaggggacactttgggcagcacggttatgttaggtaaagtcttgctgacatggtgcatttttagatagagtgcattggcccagggtattatatttctgtgatgagttcatttacctgtttcagtatgcacatagttccctagctaaaattcctaatcttcttgagagagaagaatatggagtgaaagaataattcttgagctatcattcaaatgctcccagcatattgtgagccttgtgtgactggtgaggtacagacatttggttgccaaatgctagattagcgctgggtcagctgtggaagaatcgcctcagcttacagattgtcagacagatctaactagttttccagaaagcctgggaagctgtgtgttcaacatttcccaagggattctgatcaccaggcagcttgggaaccactggggcaggccaaatagaatattttgggcgggaaagaagcacccgatttaaaatgaagcgtaaccagaggagttcagaactgggaagagagtggtagacttcctgtgatcttcagaaatcatctacctggtaaaaatacatgctgtttagaatatctgataggtgtttccagctactattagaggtgatagtgcttttgtgggggaaaaaattggtcatggtgaatggagatcgaggaagctcgggacaagggaggggtgggctgcctgattttgtccagttttccaaatatccacgcagtgaactggagtatcctaaacatgagaatgtacagttgacagttgtaaaaactagggatctgtagtgaatgctgtgcagccccatatctcatttgggggtaggaaaatagctgaagattcatgtgcattatttgacatttcctttgtcatctgctttttaagcaaaaaagggttttgtgttagaaattctacttgagcagattataaagagctttaaaaaacaactttcggttgccaaaagtttgagcatttgatttcattacctgtgtctccctcactggtgtccagacggtcaactgaatactcctgaaacccagggagcaggtgacttcctggagtgctttgtccccagagtcagccactgcttcctctgtgggggtggagagtttgtctttggccatgcagtgtgcgacagttcaggacgggtagggatgggtcccattctgtctgggtcaagggctctatcagcttcttccatgtgcctttgggaagaaatctcgttactttaagtttgctttcctgttatcttgatgaagtgcccattttagcagacacttgtagtgctgaccacttagggaatgtacaaactcctaagcttctaaagggaggcatggcaaaaacgttggggtcaggatgtctctcacgctgctcatgttaatactattaacacatgatttgagaaataagttttctctaaaatgcatattttgccgccacacactgaacaatattatttccagtgaagtttgatgcctgttcttacgttgtgttcacctgttggttcaccactcagcagatctgattctgcaagaattaatggtagaactagatcatcctttctaacagacgagcctgtgtcctgtgacggcctttcacagcggaatgcagttgtacctcacattacttttgaaacttcactcgttccagttggtacaagtatttgccaaagccatttcctatgttcaccgtggcccctcctgatgtggctgtcagcgcagcgttgttgaacagggctattctttttacaaggtgtgaagtgtggctcttcgcttcgtctttgccatggcattaaaagaaagttccctgtcttctttcaatattagttatttcaaatgaatatgtgctacttaaaagcttgttttgtttctttgtatataatttgccttggatttattgtgcacagtttgttgagttgtatgtttttgtgaattatcaggagtaaatttgacaagtacatgtgaataacctcctgtaaatgaattttataacaaaaatgtactgaactattttttaaagttgtgcagattagcaattttttgctatagctttgacttttctatgctgtgaattaatagctgcgatttggcaaacagccctgttgtctttgttaaaccctaaattttaagaggaaatggcagaattaaaagcagaaacaagaagatggacatggattagaggttatgtattatgaagtaaactacaaggtactaacatcatttcgtctgccatttggtttgctttatgctgaaattacttggtggggatttgtgcaattcagatataaaaagtttcattatcca

SEQ ID NO: 179833 - DNA, 3519 bp, Homo sapiens
  Payload ID: 15439
  Gene Symbol: SENP3-EIF4A1
  Gene Name: SENP3-EIF4A1 readthrough (NMD candidate)
  ENST ID: ENST00000614237
  CDS Start-End: 1-1623
gatgcctcagcaagtgaagaggaggaagaagaggaggaggaggaggatgaagatgaagaggaggaagtggcagcttggaggctgcccccaagatggagtcagctgggaacctcccagcggccccgcccttcccgccccactcatcgaaaaacctgctcacagcgccgccgccgagccatgagagccttccggatgctgctctactcaaaaagcacctcgctgacattccactggaagctttgggggcgccaccggggccggcggcggggcctcgcacaccccaagaaccatctttcaccccagcaagggggtgcgacgccacaggtgccatccccctgttgtcgttttgactccccccgggggccacctccaccccggctgggtctgctaggtgctctcatggctgaggatggggtgagagggtctccaccagtgccctctgggccccccatggaggaagatggactcaggtggactccaaagtctcctctggaccctgactcgggcctcctttcatgtactctgcccaacggttttgggggacaatctgggccagaaggggagcgcagcttggcaccccctgatgccagcatcctcatcagcaatgtgtgcagcatcggggaccatgtggcccaggagctttttcagggctcagatttgggcatggcagaagaggcagagaggcctggggagaaagccggccagcacagccccctgcgagaggagcatgtgacctgcgtacagagcatcttggacgaattccttcaaacgtatggcagcctcatacccctcagcactgatgaggtagtagagaagctggaggacattttccagcaggagttttccaccccttccaggaagggcctggtgttgcagctgatccagtcttaccagcggatgccaggcaatgccatggtgaggggcttccgagtggcttataagcggcacgtgctgaccatggatgacttggggaccttgtatggacagaactggctcaatgaccaggtgatgaacatgtatggagacctggtcatggacacagtccctgaaaaggtgcatttcttcaatagtttcttctatgataaactccgtaccaagggttatgatggggtgaaaaggtggaccaaaaacgtggacatcttcaataaggagctactgctaatccccatccacctggaggtgcattggtccctcatctctgttgatgtgaggcgacgcaccatcacctattttgactcgcagcgtaccctaaaccgccgctgccctaagcatattgccaagtatctacaggcagaggcggtaaagaaagaccgactggatttccaccagggctggaaaggttacttcaaaatgaatgtggccaggcagaataatgacagtgactgtggtgcttttgtgttgcagtactgcaagcatctggccctgtctcagccattcagcttcacccagcaggacatgcccaaacttcgtcggcagatctacaaggagctgtgtcactgcaaactcactgtccaggggaatcctcccatccctacgatatcgctgttgattccttcatccctggcacacgtccaggcagtgtcgaatccatctctgctacaggggaaaacaaataacatttgagtccagtggagaccgggagcagaagtaaagggaagtgataacccccagagcccggaagcctctggaggctgagacctcgccccccttgcgtgatagggcctacggagccacatgaccaaggcactgtcgcctccgcacgtgtgagagtgcagggccccaagatggctgccaggcctcgaggcctgactcttctatgtcacttccgtaccggcgagaaaggcgggccctccagccaatgaggctgcggggcgggccttcaccttgataggcactcgagttatccaatggtgcctgcgggccggagcgactaggaactaacgtcatgccgagttgctgagcgccggcaggcggggccggggcggccaaaccaatgcgatggccggggcggagtcgggcgctctataagttgtcgataggcgggcactccgccctagtttctaaggatcatgtctgcgagccaggattcccgatccagagacaatggccccgatgggatggagcccgaaggcgtcatcgagagtaactggaatgagattgttgacagctttgatgacatgaacctctcggagtcccttctccgtggcatctacgcgtatggttttgagaagccctctgccatccagcagcgagccattctaccttgtatcaagggttatgatgtgattgctcaagcccaatctgggactgggaaaacggccacatttgccatatcgattctgcagcagattgaattagatctaaaagccacccaggccttggtcctagcacccactcgagaattggctcagcagatacagaaggtggtcatggcactaggagactacatgggcgcctcctgtcacgcctgtatcgggggcaccaacgtgcgtgctgaggtgcagaaactgcagatggaagctccccacatcatcgtgggtacccctggccgtgtgtttgatatgcttaaccggagatacctgtcccccaaatacatcaagatgtttgtactggatgaagctgacgaaatgttaagccgtggattcaaggaccagatctatgacatattccaaaagctcaacagcaacacccaggtagttttgctgtcagccacaatgccttctgatgtgcttgaggtgaccaagaagttcatgagggaccccattcggattcttgtcaagaaggaagagttgaccctggagggtatccgccagttctacatcaacgtggaacgagaggagtggaagctggacacactatgtgacttgtatgaaaccctgaccatcacccaggcagtcatcttcatcaacacccggaggaaggtggactggctcaccgagaagatgcatgctcgagatttcactgtatccgccatgcatggagatatggaccaaaaggaacgagacgtgattatgagggagtttcgttctggctctagcagagttttgattaccactgacctgctggccagaggcattgatgtgcagcaggtttctttagtcatcaactatgaccttcccaccaacagggaaaactatatccacagaatcggtcgaggtggacggtttggccgtaaaggtgtggctattaacatggtgacagaagaagacaagaggactcttcgagacattgagaccttctacaacacctccattgaggaaatgcccctcaatgttgctgacctcatctgaggggctgtcctgccacccagccccagccagggctcaatctctgggggctgaggagcagcaggaggggggagggaagggagccaagggatggacatcttgtcattttttttctttgaataaatgtcactttttgaggcaaaagaaggaaccgtgaacattttagacacccttttctttggggtaggctcttgccccaggcgccggctcttctcccaaaaaaaaaaaaaaa

SEQ ID NO: 179834 - DNA, 1090 bp, Homo sapiens
  Payload ID: 15440
  Gene Symbol: SNTN
  Gene Name: sentan, cilia apical structure protein
  Uniprot ID: A6NMZ2
  ENST ID: ENST00000343837
  CDS Start-End: 21-464
acaaaacagaagatgagagaatgggtggctgtatgcacagtacccaggacaaatctctccacttggaaggagatcccaatccttctgcagccccaacatccacctgcgcacctaggaaaatgcccaaaaggatttcaatatccaaacaactggcttcagtgaaagctctgaggaagtgctcagatctggaaaaagctattgccaccactgctctgattttcagaaattcttctgactctgatggtaaacttgaaaaagctattgccaaagatctgctgcaaacccaatttaggaatttcgcagagggacaagaaaccaagccaaaatacagagagatcctttctgaacttgatgagcacacagaaaataagctagattttgaagacttcatgatcttgctcttaagcatcactgtcatgtcagatctgctacaaaatatacggaatgtaaaaattatgaaatgaacagttttaaatatgctgtataaaataatggcaaaagacagtgttattaaaatgtttccatcttatttttgattaattgaatatatctatcatgcatctgaaattgcctaggatggttctgattgctggtattcagatccaatgtaactccaaatatttacccatacacttcaagaatgtttgaatgataaggtctctgtgtgctttacaataggatagatttgataccactgaataataaatggcttttgctgagtcagtagcgacctagagcactctacttatagtcattgagtcactcatttattcactaaacatttgttgagcatctacttgatggaactgctgaggatacagtaatgaattggccaggcaattccttccttcagacatgtttgcagaagtctagcagaagagatagacattgaacaatttttaaataattgcatacacagtataattagaattgaaataagggctataggatgctaaaagagattatcacctgatcggagttcaaaggtcagaaaagctttactgacattctataaaaagcaaaaaaaaaaaaattggtccatggatgccagggatatgggtgggaaatggggctgtccacaaatggcaca

SEQ ID NO: 179835 - DNA, 3746 bp, Homo sapiens
  Payload ID: 15440
  Gene Symbol: SNTN
  Gene Name: sentan, cilia apical structure protein
  ENST ID: ENST00000496807
  CDS Start-End: 3-350
gtatgcacagtacccaggacaaatctctccacttggaaggagatcccaatccttctgcagccccaacatccacctgcgcacctaggaaaatgcccaaaaggatttcaatatccaaacaactggcttcagtgaaagctctgaggaagtgctcagatctggaaaaagctattgccaccactgctctgattttcagaaattcttctgactctgatggtaaacttgaaaaagctattgccaaagatctgctgcaaacccaatttaggaatttcgcagagccctgtgaagattcaaggagaagttggccatctgcaaagctggaagagtctacccttagtagacactggatctgaagggcaccttggtcttggacttcccagcctccaaaactgtgagatgctgtttgagccattcatctatggtgggctgttatagtagcccaaattgactatgataaggactaaggtacaaaatgagagttggtggagatcctgagaaagtatcaggcctattcagagatgaggaaagcttattccaggtgaaggtagggagtggcacaggtgagaggaatcttgggtgggtgggtgtttatggtaggtctcgactaacgaatgtattcgtataatgaataaggaattgtggaagtaggaggagatgttgtatttattctgtttatttctacagatctctttactcttttctaccctgccttgtttccagaaaggctgacctgcatggactgcatcaacaggcaatcttgtctttggcttctcattgcattaggccaatgaccttgtagatgattagtggtggaggaacatgaacatataatggctagatggacaaaaggaaagatgaatgaataaaatcagtggcctctgaatgttactattaggtggcttgaccttgactttctagtacatatttgggtagaatcatttgttcatcctctgtgatacttctccgggttttgtttgtttgtttgtttgttttgagatggattctcactttgtcgcccaggctggagtgcagtggcaccatcttggctcattgcaacctacacctctcgggtccaagcaattctcctgcctcaacctcccaagtagtggggactagaggtgcacaccaccacacccagcttaatttttgtatctttagtggagatggggtttcaccacattggccaggctgatcttgaactctttacctcaggtgatcaacctgccttggcctcacaaagtgctgggattacaggtgtgagccactacacccagcctctcagattcttatgtagttctatggctaagttttagaagtcccatttcagggggtaattaatagagtcatatttcttccaacaaagttgtaatctctgagctgtttgtgctcttggcacaaaagaggatgcagacaggaggatatagttgaaaaaagaaattatgagaagcattttgcaaagtaaaattaggaggagggaatgatgaagctaaaataaatgtttcctgttgaagtctgctttgtattacaaatcatgaaggggcttgattggatagcctgctggtgacaaatagcctgcaattcatttctcttactgacatttggccaaaatgctgcaagatacacataaatgttacttgacagtgcctttcagcattttgagggaggataaggcagggctctgctcaaagaaatacctgagtttttggaaccaattctactgcacattacccttaaccctatatgctcctttaccaatcaagggacctacaagatacaagtaacacattcaaacatgctaattgaggagacataacaagagaaccatctacaaagtgctgacagggtttgagagaaccagcaaggtatgatgaagcaccctggacctagtatgaaagcaacacagaagaaaccggaggtgagagaggcagaaagaggggttcatgttgacgctgtacaagcacctggctccagtcttgttggagtgcagcaattcatgaagctagattctccctctacctctcaattatgtaagccagtttgtcatcttttttggcttgagctagttgaagctagtttttatcacttgcaatactgctcatctaggctcccttttccctgagtccatccctacagtgctatcaatcactttgtacagtgccatttattttttgcgggggatgggaatcagactcccccactagactcagagttttcacttttcctctttacctggggcctggtgcaagtttgtaagtgtttaacaaatatggaaagcaagcaatacaagagtcagggttccaagacaaggtagttcagtattcctagtttcttaataaggtaataaggaagatgatgttgattatgatgaccaccaccactaggtggtagttgtggtaatgataatggtaatgatgacatttaccatttattgaggattgcacctttaagggctttacaaacattttctcattacatcatcagaaccaccacctcaagtagctgtgttagaccatgcttctcatcaggaagcagaggctcagagatttcaggcaactcatccaaagtcacacagctagaagtggcagtcacagaatattcactccaaagtccatgctcttatccatcatgtgaatagcccccaagcctttctttctacttcttcattttcctgaataaaactccctatcctgacatgccattcttgactctgcctttgcttgaactctatcagagcaaggaaataggactaagcattttcccgtctcacctccttatgccaggcctggcccctgatataccatgtggcttcatgtcaggctgagcacagaagcatcttcacagaatcactttggggcctgagaaatatggtggcacctgaatcatagagttcatacccaaaagtttaggaggaacaaagcctgattcctacttcagaacgtccaagttaattccccaaaatatccaatgcttccttagggcccagaagcaacctaaagcatcatcgaagcatacagctttgaagtcaaatccacctgggtcttaattctgactctttcacaatctgggtgactttcggcaaattgcatcaactggggaatgcctacctcagaaaaatgatgagagaatggagagaattagcactgaccgtagtaaactaatggtatcttgcatatagcaattattccagcagtagtagctatatttattattatcgaaatctcttgtttttcagatgactgaaagccaaaaaagcttccagaggagttacagggaaatgggggaaagataaagaatcccgttactccacacctctactacctattgttccccatacacacatgtatatgtctccatcttttaacaggcatgcatccttctccaggaagtctttggaccctccttcccccagtggtgttaagagttgcctgatttacgtaataaaaatatggaacacccagtgaaatttgaacttcagataaacagcaaataccttttacagtataaatatgtcccaagcaatattttgaacatacttatactaaaaaagcatgttttgtttatctgaaattcaaatttaactaggcattttatccacagtcctagttatacgctcctctgcagtgtgtcacaactctcctgtgcagtgtttttctttctgtattataattggcctatgtcaggagctgacacctgtcacatctgagttaacgtgtaactttaagatcctctgatattaaagaattaatgtt

SEQ ID NO: 179836 - DNA, 508 bp, Homo sapiens
  Payload ID: 15440
  Gene Symbol: SNTN
  Gene Name: sentan, cilia apical structure protein
  ENST ID: ENST00000469440
  CDS Start-End: 10-508
gatgagagaatgggtggctgtatgcacagtacccaggacaaatctctccacttggaaggagatcccaatccttctgcagccccaacatccacctgcgcacctaggaaaatgcccaaaaggatttcaatatccaaacaactggcttcagtgaaagctctgaggaagtgctcagatctggaaaaagctattgccaccactgctctgattttcagaaattcttctgactctgatggtaaacttgaaaaagctattgccaaagatctgctgcaaacccaatttaggaatttcgcagagctccccttcaccttctaccatgagtggaagcagcctgaggtcctcaccacatgcagatgcctgatcttgaactttccagccatcagaattggacaagaaaccaagccaaaatacagagagatcctttctgaacttgatgagcacacagaaaataagctagattttgaagacttcatgatcttgctcttaagcatcactgtcatgtcagatctgc

SEQ ID NO: 179837 - DNA, 3344 bp, Homo sapiens
  Payload ID: 15441
  Gene Symbol: SEPSECS
  Gene Name: Sep (O-phosphoserine) tRNA:Sec (selenocysteine) tRNA synthase
  ENST ID: ENST00000358971
  CDS Start-End: 26-364
attcgccactgtcgccaccgctgtcatgaaccgcgagagcttcgcggcgggagagcggctggtgtcgccggcttacgtgcggcagggctgtgaggcccgccgctcgcatgagcacctcatacggctgcttctggagaagagtctcgctctttcgcccaggctggaatgcagtgtgacgatctcggctcactgcagcctccgcctcccgggttcacgccattcgcctgcctcagcctcccgagtagctgggactacaggcgcccgccaccacacccgggcaagtgtccagagaatggctgggatgaaagtacacttgaactctttttacatgaacttgcaatcatggacagcaacaatttcttaggcaattgtggtgtgggagaaagggaagggagagtggcatccgcactggttgctcgtcgtcattacaggttcattcatggcattggacgatccggtgatatttctgctgtgcaaccaaaagctgcaggctctagccttttgaacaaaattaccaattctttggtcctggacattataaagctggctggtgtccatacagtagccaactgctttgtagttcctatggcaactggtatgagtctaactctgtgtttcttaacattacgacacaaaagaccaaaggcaaagtatattatatggccacgaatagaccagaagtcctgctttaaatccatgatcactgcaggttttgagcctgtggtgatagaaaatgttttggaaggtgacgagctgcgtacagacctgaaagcagtggaggctaaagtccaggaacttgggcctgattgcattctgtgtattcattctactacatcctgttttgctccaagggtgcctgatagattagaagaactggctgtgatttgtgctaattatgacattccacatatagttaataatgcttatggagtgcagtcttcaaagtgtatgcatctcattcagcagggggctcgagttggtagaatagatgcttttgttcagagcttggacaaaaattttatggttccagtaggtggtgctataattgctggctttaatgattcattcattcaggaaatcagcaagatgtatccaggaagagcttcagcttcaccttctttagatgtccttattactttattgtcacttggatcaaatggctataagaagctactaaaagaaagaaaggaaatgttttcatatttgtccaaccaaataaagaagttgtcagaagcctacaatgaaagactgttgcatacacctcacaatcccatatctttagctatgacacttaaaacactagatgaacaccgtgacaaagctgtcactcagcttggctcgatgctttttaccagacaggtttctggagccagggttgtgcctcttgggtccatgcaaactgtgagtggctatactttcagaggctttatgtcacatacaaataattacccttgtgcttacctcaatgctgcatcagccatcggaatgaagatgcaggatgtggacctgttcataaagagacttgacaggtgtttaaaggcagtaagaaaagaacgaagtaaagagagtgatgacaattatgacaaaactgaagatgtggatattgaagaaatggctttaaaactagataatgtacttcttgacacataccaggatgcttcttcatgacatgcgaagggtttcttcttgatcatttgaaagaaatgataaggctgtagtacaagcaagcagtttaaagataagacttgagatttttgaattgagaatttcatgggaatattcagtcaaggagcagactttggtctgaactagccattgatgattgttaagtttcccattcttagactgcatcaatccttgtgatccttaacaggttataatatacaattagcatttttctaattgttagaatatctgtcaattaagcatcatgactcagataatttttactagtgtaatgacagtaaaattacttcaattctctttgaaatgtagagtgcttcctcctaaccattctttaccgtttctgatcacacagaattgagaaagatctcttaggccactagttactagttgtttgttgagatgtgtaagtcacagtgtgcctgtaaaatgggcattccccaaggaagcagagtcaaggtataaactttcgttttgactcaaaagcagtgggtctcaactggggatgattcgcttatctgaacagcatctgcagacatttttggttgtcacaactggtgggatgctgttaacatctagaggatagaggccagggtgctactcaacatcctacaatgcatgggacaactcccacaacaaagaattatccagcccaaaatgtcattagtgctgaggttgagaaatactcctctaaagtagataaactccttgagtaaagagaagtttaccatagcaactttcagtagtacttcaaagaagatagctgtataaatgtcatcaaactatactatatagagaatcttaagtgataaccagggtcacggattccaaacatgtcattataaattgttttatatggtgctcactggtgcatttttccttttggataagggaaaacattattccacttactgtttttgctttaagcagcctgcatatattggttagtttgttcagatgttgtgcacagacatcatcaaaattagctaacatgggtatttttgaacatatttttgccaggaagatgaaaatcacatagtatgataaacaggtgtattcccctctacttgcccatgtgctcatttttctgagtctgaaattccagacttactggctttaacaataatttttgttgttaatttaagaaatagacttacttaagactattttaagaaatagagatgtcatagcctgaagatttactgaagcttctgaacatgccaccatgccaaagctatgtttctcaaacccagctctgtggatcatgttcctaaaagatgctcatggggagaaaatgtttacagacaaataattttgggagctgcctttgcaaacctgcctgttggcatattgaaggctctaagaattccttcactaaataacccagttttaatatatccttatccaaagagaaactcatttttttaaagtgaaatatttgttaacagcccattgaacatacttttaaaaacactatggtagagaatgctgtgttgccttctgggctgcatttttcttattgatttggaattgtaacctatgtatgagaaagggattttctggtattttggtgacgttgtacattgtcccagactgtttgtaaacatgaggtcagacatgtgtaaggtagacgcctatggccactggcttgaccaccttgg

SEQ ID NO: 179838 - DNA, 5496 bp, Homo sapiens
  Payload ID: 15441
  Gene Symbol: SEPSECS
  Gene Name: Sep (O-phosphoserine) tRNA:Sec (selenocysteine) tRNA synthase
  Uniprot ID: Q9HD40
  ENST ID: ENST00000382103
  CDS Start-End: 74-1579
attctggttccgtcgtgtgtctggcgtgtggagctagtgctcccgcttattcgccactgtcgccaccgctgtcatgaaccgcgagagcttcgcggcgggagagcggctggtgtcgccggcttacgtgcggcagggctgtgaggcccgccgctcgcatgagcacctcatacggctgcttctggagaagggcaagtgtccagagaatggctgggatgaaagtacacttgaactctttttacatgaacttgcaatcatggacagcaacaatttcttaggcaattgtggtgtgggagaaagggaagggagagtggcatccgcactggttgctcgtcgtcattacaggttcattcatggcattggacgatccggtgatatttctgctgtgcaaccaaaagctgcaggctctagccttttgaacaaaattaccaattctttggtcctggacattataaagctggctggtgtccatacagtagccaactgctttgtagttcctatggcaactggtatgagtctaactctgtgtttcttaacattacgacacaaaagaccaaaggcaaagtatattatatggccacgaatagaccagaagtcctgctttaaatccatgatcactgcaggttttgagcctgtggtgatagaaaatgttttggaaggtgacgagctgcgtacagacctgaaagcagtggaggctaaagtccaggaacttgggcctgattgcattctgtgtattcattctactacatcctgttttgctccaagggtgcctgatagattagaagaactggctgtgatttgtgctaattatgacattccacatatagttaataatgcttatggagtgcagtcttcaaagtgtatgcatctcattcagcagggggctcgagttggtagaatagatgcttttgttcagagcttggacaaaaattttatggttccagtaggtggtgctataattgctggctttaatgattcattcattcaggaaatcagcaagatgtatccaggaagagcttcagcttcaccttctttagatgtccttattactttattgtcacttggatcaaatggctataagaagctactaaaagaaagaaaggaaatgttttcatatttgtccaaccaaataaagaagttgtcagaagcctacaatgaaagactgttgcatacacctcacaatcccatatctttagctatgacacttaaaacactagatgaacaccgtgacaaagctgtcactcagcttggctcgatgctttttaccagacaggtttctggagccagggttgtgcctcttgggtccatgcaaactgtgagtggctatactttcagaggctttatgtcacatacaaataattacccttgtgcttacctcaatgctgcatcagccatcggaatgaagatgcaggatgtggacctgttcataaagagacttgacaggtgtttaaaggcagtaagaaaagaacgaagtaaagagagtgatgacaattatgacaaaactgaagatgtggatattgaagaaatggctttaaaactagataatgtacttcttgacacataccaggatgcttcttcatgacatgcgaagggtttcttcttgatcatttgaaagaaatgataaggctgtagtacaagcaagcagtttaaagataagacttgagatttttgaattgagaatttcatgggaatattcagtcaaggagcagactttggtctgaactagccattgatgattgttaagtttcccattcttagactgcatcaatccttgtgatccttaacaggttataatatacaattagcatttttctaattgttagaatatctgtcaattaagcatcatgactcagataatttttactagtgtaatgacagtaaaattacttcaattctctttgaaatgtagagtgcttcctcctaaccattctttaccgtttctgatcacacagaattgagaaagatctcttaggccactagttactagttgtttgttgagatgtgtaagtcacagtgtgcctgtaaaatgggcattccccaaggaagcagagtcaaggtataaactttcgttttgactcaaaagcagtgggtctcaactggggatgattcgcttatctgaacagcatctgcagacatttttggttgtcacaactggtgggatgctgttaacatctagaggatagaggccagggtgctactcaacatcctacaatgcatgggacaactcccacaacaaagaattatccagcccaaaatgtcattagtgctgaggttgagaaatactcctctaaagtagataaactccttgagtaaagagaagtttaccatagcaactttcagtagtacttcaaagaagatagctgtataaatgtcatcaaactatactatatagagaatcttaagtgataaccagggtcacggattccaaacatgtcattataaattgttttatatggtgctcactggtgcatttttccttttggataagggaaaacattattccacttactgtttttgctttaagcagcctgcatatattggttagtttgttcagatgttgtgcacagacatcatcaaaattagctaacatgggtatttttgaacatatttttgccaggaagatgaaaatcacatagtatgataaacaggtgtattcccctctacttgcccatgtgctcatttttctgagtctgaaattccagacttactggctttaacaataatttttgttgttaatttaagaaatagacttacttaagactattttaagaaatagagatgtcatagcctgaagatttactgaagcttctgaacatgccaccatgccaaagctatgtttctcaaacccagctctgtggatcatgttcctaaaagatgctcatggggagaaaatgtttacagacaaataattttgggagctgcctttgcaaacctgcctgttggcatattgaaggctctaagaattccttcactaaataacccagttttaatatatccttatccaaagagaaactcatttttttaaagtgaaatatttgttaacagcccattgaacatacttttaaaaacactatggtagagaatgctgtgttgccttctgggctgcatttttcttattgatttggaattgtaacctatgtatgagaaagggattttctggtattttggtgacgttgtacattgtcccagactgtttgtaaacatgaggtcagacatgtgtaaggtagacgcctatggccactggcttgaccaccttggaagtcaatgactattttgagatgaagtatttaactatgaatatcatgaaggttatttaaaaatgtatttattttatctttggggttcaaacattaaaaaaatttacataggtgtagtaactcatttcaagggaataaatgctggattaaaaagtgtaaatttttcatgagaatttgggactaaattgctgaaccaataaagctgaagagttgcaacctctagagtcaaaaaagggattgaaatgttgttgcaaatgtaaatgctggcagtgcagcttgctatacatgtaagccaaaattgttttatagaacaagtgatctatattgttgtgatcatcatttagcttaagaaaggccagagctgggagagtagcaaatgttttctcatctgcagtgtatcagcagttcttgggcttcagctgctgaatagataataattctaattgaacataaattacatgaactcacatgtgaatgatagatatgttacaatatttcattcctgatgcagaaaatcagctgtggtttttattattaaccctttctttttcagtggttttggaattctagctctattcctcctggcttaaaatttgagggcatagaattcacaagagtttttgaagagttctgtctattcaggctttcctttgtccccaccctagtgtcattttcactcactcccatttctacacataagtattaaaaaggatgtatttattataattcgctagtactgattggtaagcctcataattggcctttgttatctttgtactgtgacgaaggcagtggatgatacattaccaatcattgccgaagataacctcttctatctttttgacccaactacccttattaaaactatcaggtaaaatattggagttaggtttttaaagtcattgggctgtggcagtgtgcttagaaaagaaaatggtggaacatagaatattcttttggtcactacacaatgtgttacttatacatggcagggaagggaattttaaatcaaactcgcagtttggttcttaggtcctctgctgatgaattctcgctctatcagggaatgatatgtgacgccagccttaggaacctggtgttcaactgtaaatctttctatttagctttttgtattagttgaatgaagttatagaatatgaattattgaatacagttctgttcagccaataggcacttgatatacagaatggtaaatttaaatataaattaaatttttctaatattatgatcagcacttcactgtggttctgtgtctttaaccacctcataataagaactgttattgaggactgggctacagaatgtgcttagactacatctatggcttccatagattttagtaaaatttaaacagataatttgtgtttactgctgatgttactttaatattgaattagtagttcatcctgagagttatatttcacagaggaaaataaccaacagctgaaaacaacaataataaagctctggtgagtctgactcatactcggagaaagtttttggaatacatacacatttggtgcatataagagttgggtttccttttcccactttctgagatgtactaacctctgccagacccttaaatgattttgttatgttttgcatttttgaggccaaccttattttgtaactgaaaaaagtccagttttgcatacacagaaatttggtcattttagaagtctcacaacctgaataatttgataataattgaatatgctattaacagctttttaagaaaaggttctattagtcagttttttccttgtctgtcatattatgttggttaatgtctcttatggccaatcttagtaaacagacctaacactcactgcatccttttgtgccttactttttactttccttttgcccttttggtatgtgcgcatgtaagatggtaagtttaaggctaatgaatatatgtttgtaatttcctactcactactctgcagttaaagctaaggccttaggcaaaatctagaaatgtttatattgttttgttttttatcaagtggtgtcaacttgagaaatacaaagaaaggctatgcttaactgtataaccgtgggggattttagccatgagaatatgaagctgatgtcagcctgctaacctgttttaccaaaaggaaaagatgtttccaaaaatgttttcggtgtagactgtttaaagatgaaaataaattatataatttattatatgaaataaatttttgataagtca

SEQ ID NO: 179839 - DNA, 1494 bp, Homo sapiens
  Payload ID: 15441
  Gene Symbol: SEPSECS
  Gene Name: Sep (O-phosphoserine) tRNA:Sec (selenocysteine) tRNA synthase
  Uniprot ID: Q9HD40
  ENST ID: ENST00000514585
  CDS Start-End: 63-206
gtcgtgtgtctggcgtgtggagctagtgctcccgcttattcgccactgtcgccaccgctgtcatgaaccgcgagagcttcgcggcgggagagcggctggtgtcgccggcttacgtgcggcagggctgtgaggcccgccgctcgcatgagcacctcatacggctgcttctggagaaggttcattcatggcattggacgatccggtgatatttctgctgtgcaaccaaaagctgcaggctctagccttttgaacaaaattaccaattctttggtcctggacattataaagctggctggtgtccatacagtagccaactgctttgtagttcctatggcaactggtatgagtctaactctgtgtttcttaacattacgacacaaaagaccaaaggcaaagtatattatatggccacgaatagaccagaagtcctgctttaaatccatgatcactgcaggttttgagcctgtggtgatagaaaatgttttggaaggtgacgagctgcgtacagacctgaaagcagtggaggctaaagtccaggaacttgggcctgattgcattctgtgtattcattctactacatcctgttttgctccaagggtgcctgatagattagaagaactggctgtgatttgtgctaattatgacattccacatatagttaataatgcttatggagtgcagtcttcaaagtgtatgcatctcattcagcagggggctcgagttggtagaatagatgcttttgttcagagcttggacaaaaattttatggttccagtaggtggtgctataattgctggctttaatgattcattcattcaggaaatcagcaagatgtatccaggaagagcttcagcttcaccttctttagatgtccttattactttattgtcacttggatcaaatggctataagaagctactaaaagaaagaaaggaaatgttttcatatttgtccaaccaaataaagaagttgtcagaagcctacaatgaaagactgttgcatacacctcacaatcccatatctttagctatgacacttaaaacactagatgaacaccgtgacaaagctgtcactcagcttggctcgatgctttttaccagacaggtttctggagccagggttgtgcctcttgggtccatgcaaactgtgagtggctatactttcagaggctttatgtcacatacaaataattacccttgtgcttacctcaatgctgcatcagccatcggaatgaagatgcaggatgtggacctgttcataaagagacttgacaggtgtttaaaggcagtaagaaaagaacgaagtaaagagagtgatgacaattatgacaaaactgaagatgtggatattgaagaaatggctttaaaactagataatgtacttcttgacacataccaggatgcttcttcatgacatgcgaagggtttcttcttgatcatttgaaagaaatgataaggctgtagtacaagcaagcagtttaaagataagacttga

SEQ ID NO: 179840 - DNA, 561 bp, Homo sapiens
  Payload ID: 15441
  Gene Symbol: SEPSECS
  Gene Name: Sep (O-phosphoserine) tRNA:Sec (selenocysteine) tRNA synthase
  ENST ID: ENST00000513285
  CDS Start-End: 30-561
gcttattcgccactgtcgccaccgctgtcatgaaccgcgagagcttcgcggcgggagagcggctggtgtcgccggcttacgtgcggcagggctgtgaggcccgccgctcgcatgagcacctcatacggctgcttctggagaagagtctcgctctttcgcccaggctggaatgcagtgtgacgatctcggctcactgcagcctccgcctcccgggttcacgccattcgcctgcctcagcctcccgagtagctgggactacaggcgcccgccaccacacccggttaatgtttgtatttttagtagagatggggtttcaccatgttggccaggctgatctcaaactcctgacttcaagtgatcggccattcttggccttccaaagtgctcggattacaggcggcaagtgtccagagaatggctgggatgaaagtacacttgaactctttttacatgaacttgcaatcatggacagcaacaatttcttaggcaattgtggtgtgggagaaagggaagggagagtggcatccgcactggttgctcgtcgtcattacaggtatcttt

SEQ ID NO: 179841 - DNA, 544 bp, Homo sapiens
  Payload ID: 15441
  Gene Symbol: SEPSECS
  Gene Name: Sep (O-phosphoserine) tRNA:Sec (selenocysteine) tRNA synthase
  ENST ID: ENST00000503150
  CDS Start-End: 1-286
aaagtatattatatggccacgaatagaccagaagtcctgctttaaatccatgatcactgcaggttttgagcctgtggtgatagaaaatgttttggaaggtgacgagctgcgtacagacctgaaagcagtggaggctaaagtccaggaacttgggcctgattgcattctgtgtattcattctactacatcctgttttgctccaagggtgcctgataggaagagcttcagcttcaccttctttagatgtccttattactttattgtcacttggatcaaatggctataagaagctactaaaagaaagaaagctatgacacttaaaacactagatgaacaccgtgacaaagctgtcactcagcttggctcgatgctttttaccagacaggtttctggagccagggttgtgcctcttgggtccatgcaaactgtgagtggctatactttcagaggctttatgtcacatacaaataattacccttgtgcttacctcaatgctgcatcagccatcggaatgaagatgcaggatgtggacctgttcataaag

SEQ ID NO: 179842 - DNA, 1480 bp, Homo sapiens
  Payload ID: 15442
  Gene Symbol: SPR
  Gene Name: sepiapterin reductase (7,8-dihydrobiopterin:NADP+ oxidoreductase)
  Uniprot ID: P35270
  ENST ID: ENST00000234454
  CDS Start-End: 74-859
ggtcccgccccccgcggccgcaccgcctcctgcctggtctcgggtgccagcgccgccggcggagaacaggagcatggagggcgggctggggcgtgctgtgtgcttgctgaccggggcctcccgcggcttcggccggacgctggccccgctcctggcctcgctgctgtcgcccggctccgtgcttgtccttagcgcccgcaacgacgaggcactgcgccagctggaggccgagctgggcgccgagcggtctggcctgcgcgtggtgcgggtgcccgccgacctgggcgccgaggccggcttgcagcagctgctcggcgccctgcgcgagctcccccggcccaaggggctgcagcgactgctgcttatcaacaacgcgggctctcttggggatgtgtccaaaggcttcgtggacctgagtgactccactcaagtgaacaactactgggcactgaacttgacctccatgctctgcctgacttccagcgtcctgaaggccttcccggacagtcctggcctcaacagaaccgtggttaacatctcgtccctctgtgccctgcaacctttcaaaggctgggcgctgtactgtgcaggaaaggctgctcgtgatatgctgttccaggtcctggcgctggaggaacctaatgtgagggtgctgaactatgccccaggtcctctggacacagacatgcagcagttggcccgggagacctccgtggacccagacatgcgaaaagggctgcaggagctgaaggcaaaggggaagctggtggattgcaaggtgtcagcccagaaactgctgagcttactggaaaaggacgagttcaagtctggagcccacgtggacttctatgacaaataagcccatgtttttggcttcctgaacctttttgcccccacttttagacataccccagagccctgtggctccccacaccctgccataggggcagtcctgccttacacatagaagcattcatgcctgctgccctgccctcaggcacagccagctgtgagctcccaggtcattggccttaccagttgtcaggagtctgtgctgtgcaccctgggttataaggaggcttaggagagaggttatgggtattggtgtctctatccccaggaatagaacttaaggggtgggaagaacaggaaaagaagctggaacacagaagagaggaggttgtgtctcttgctcatagcaagcctgtgggtagaggaaagagtgatctggtgtcgaataggaggacccatgtagattcgcagatggcctggatgggaggaagggcagacggtacatgtcccagcccacatagatgccccttgctgagggtagcaggaccttctgttgaactttgtgtcctcactctgatgtctccttccttcagaatctaccacccctcccccaggctgggagaaggggctcctgggtgtctgtatacacgccaaaggcagatacaaataaaatacagattgtcctttc

SEQ ID NO: 179843 - DNA, 1592 bp, Homo sapiens
  Payload ID: 15443
  Gene Symbol: SEPT1
  Gene Name: septin 1
  ENST ID: ENST00000321367
  CDS Start-End: 47-1291
ccctgctaacaaagggagccacttccttcctctctgcacataccccatgtctcaccacgatgatggagctacagtgggacttggaatccagatgtgtgaaggatggagggttgaagccgcactcagcttcctgccccaccagaggaagtggggagagacggcaggtgcagtgatggctggcggagtcatggacaaggagtacgtgggttttgctgccctccccaaccagctgcaccgcaagtctgtcaagaaggggtttgacttcacgctaatggtggcaggggagtcaggcctagggaaatccaccctcatcaacagcctcttcctcaccaacctctatgaggatcgccaggtgccagaggccagtgctcgcttgacacagaccctggccattgagcgccggggcgtagagattgaggaagggggtgtgaaagtgaagctgacccttgtggacacacctggctttggggactcagtggactgctctgactgctggcttccggtggtgaaattcatcgaggagcaatttgagcagtaccttagggatgagagtggcctgaaccggaagaacatccaggactcccgagtccactgctgcctctacttcatctcacccttcggccgggggctccggcccctagatgtggccttcctccgggcagtacacgagaaagtcaacatcatcccagtcattggcaaagcggatgctctgatgccccaggaaacccaggccctcaagcagaagatccgggatcagttgaaggaagaggagatccacatctaccagttccccgaatgtgactctgatgaagatgaagacttcaagaggcaggatgcagagatgaaggaaagcatcccttttgcagtcgtgggatcatgcgaggtggtgagggatggcgggaaccggccggtgaggggacgccgctactcctgggggaccgtggaggtggagaacccacatcactgcgatttcctgaacctgcgacggatgctggtgcagacacacctgcaggacctgaaagaggtgacgcacgatctgctctacgagggctaccgggcccgctgcctacagagcctggcccggcctggggctcgcgatcgagccagccgcagtaagctttcccgccagagcgccacagagatcccgctgcccatgctgcctctggcggacaccgagaagctgatccgcgagaaagacgaagagctgcgccgcatgcaagagatgctggagaagatgcaggcccaaatgcagcagagccaggcccagggcgagcagtcagacgccctctgaggccacgccccgcccggccttacctcggctccgccttcagtcggcctcttgtccaatccccgcgccccacactgcccagcgccccccgggacctccgcgggtgccgccctcgcgcgggctagggggaggttctcccagcctgagtccgtagccccgccccggcgctggtcccgcccacccagacaccgcccacttcccggcccggggcctgcacaatctccgaccgcatcactgtcttccggagtcccccttcttctcccagactctgtcttcaataaaaactgagcttcccgcggccacg

SEQ ID NO: 179844 - DNA, 782 bp, Homo sapiens
  Payload ID: 15443
  Gene Symbol: SEPT1
  Gene Name: septin 1
  ENST ID: ENST00000568577
  CDS Start-End: 10-150
acataccccatgtctcaccacgatgatggagctacagtgggacttggaatccagatgtgtgaaggatggagggttgaaggacaaggagtacgtgggttttgctgccctccccaaccagctgcaccgcaagtctgtcaagaaggggtttgacttcacgctaatggtggcaggggagtcaggcctagggaaatccaccctcatcaacagcctcttcctcaccaacctctatgaggatcgccaggtgccagaggccagtgctcgcttgacacagaccctggccattgagcgccggggcgtagagattgaggaagggggtgtgaaagtgaagctgacccttgtggacacacctggctttggggactcagtggactgctctgactgctggcttccggtggtgaaattcatcgaggagcaatttgagcagtaccttagggatgagagtggcctgaaccggaagaacatccaggactcccgagtccactgctgcctctacttcatctcacccttcggccgggggctccggcccctagatgtggccttcctccgggcagtacacgagaaagtcaacatcatcccagtcattggcaaagcggatgctctgatgccccaggaaacccaggccctcaagcagaagatccgggatcagttgaaggaagaggagatccacatctaccagttccccgaatgtgactctgatgaagatgaagacttcaagaggcaggatgcagagatgaaggaaagcatcccttttgcagtcgtgggatcatgcgaggtggtgaggg

SEQ ID NO: 179845 - DNA, 1279 bp, Homo sapiens
  Payload ID: 15443
  Gene Symbol: SEPT1
  Gene Name: septin 1
  ENST ID: ENST00000572252
  CDS Start-End: 6-218
cagtgatggctggcggagtcatggacaaggagtacgtgggttttgctgccctccccaaccagctgcaccgcaagtctgtcaagaaggggtttgacttcacgctaatggtggcaggggagtcaggcctagggaaatccaccctcatcaacagcctcttcctcaccaacctctatgaggatcgccaggtgccagaggccagtgctggcttccggtggtgaaattcatcgaggagcaatttgagcagtaccttagggatgagagtggcctgaaccggaagaacatccaggactcccgagtccactgctgcctctacttcatctcacccttcggccgggggctccggcccctagatgtggccttcctccgggcagtacacgagaaagtcaacatcatcccagtcattggcaaagcggatgctctgatgccccaggaaacccaggccctcaagcagaagatccgggatcagttgaaggaagaggagatccacatctaccagttccccgaatgtgactctgatgaagatgaagacttcaagaggcaggatgcagagatgaaggaaagcatcccttttgcagtcgtgggatcatgcgaggtggtgagggatggcgggaaccggccggtgaggggacgccgctactcctgggggaccgtggaggtggagaacccacatcactgcgatttcctgaacctgcgacggatgctggtgcagacacacctgcaggacctgaaagaggtgacgcacgatctgctctacgagggctaccgggcccgctgcctacagagcctggcccggcctggggctcgcgatcgagccagccgcagtaagctttcccgccagagcgccacagagatcccgctgcccatgctgcctctggcggacaccgagaagctgatccgcgagaaagacgaagagctgcgccgcatgcaagagatgctggagaagatgcaggcccaaatgcagcagagccaggcccagggcgagcagtcagacgccctctgaggccacgccccgcccggccttacctcggctccgccttcagtcggcctcttgtccaatccccgcgccccacactgcccagcgccccccgggacctccgcgggtgccgccctcgcgcgggctagggggaggttctcccagcctgagtccgtagccccgccccggcgctggtcccgcccacccagacaccgcccacttcccggcccggggcctgcacaatctccgaccgcatcactgtcttccggagtcccccttcttctcccagactctgtcttcaataaa

SEQ ID NO: 179846 - DNA, 3091 bp, Homo sapiens
  Payload ID: 15444
  Gene Symbol: SEPT10
  Gene Name: septin 10
  ENST ID: ENST00000356688
  CDS Start-End: 317-1951
gtcttcctggagtcccagctctccttcagcccgccccaacgctgacgctcagtcctcaggcgtcgagggtagctcctgtgaggggctcgcttggcgcaggcaaaacgctcagcgcgcaccacagggcgtccgccccaaccccgcccccggaggcctccagctcggccccgcccctgtcccttccccgtcgcggaggcagcctagcctcgcgccccgcccgttgcttctgccctccggccttcccgccgccgtcgccgggaccagccgctcggggccgggctgatacagccgcttcaccgtgcccctgcccgcgaccatggcctcctccgaggtggcgcggcacctgctctttcagtctcacatggcaacgaaaacaacttgtatgtcttcacaaggatcagatgatgaacagataaaaagagaaaacattcgttcgttgactatgtctggccatgttggttttgagagtttgcctgatcagctggtgaacagatccattcagcaaggtttctgctttaatattctctgtgtgggggaaactggaattggaaaatcaacactgattgacacattgtttaatactaattttgaagactatgaatcctcacatttttgcccaaatgttaaacttaaagctcagacatatgaactccaggaaagtaatgttcaattgaaattgaccattgtgaatacagtgggatttggtgaccaaataaataaagaagagagctaccaaccaatagttgactacatagatgctcagtttgaggcctatctccaagaagaactgaagattaagcgttctctctttacctaccatgattctcgcatccatgtgtgtctctacttcatttcaccgacaggccactctctgaagacacttgatctcttaaccatgaagaaccttgacagcaaggtaaacattataccagtgattgccaaagcagatacggtttctaaaactgaattacagaagtttaagatcaagctcatgagtgaattggtcagcaatggcgtccagatataccagttcccaacggatgatgacactattgctaaggtcaacgctgcaatgaatggacagttgccgtttgctgttgtgggaagtatggatgaggtaaaagtcggaaacaagatggtcaaagctcgccagtacccttggggtgttgtacaagtggaaaatgaaaaccactgtgactttgtaaagctgcgggaaatgctcatttgtacaaatatggaggacctgcgagagcagacccataccaggcactatgagctttacaggcgctgcaaactggaggaaatgggctttacagatgtgggcccagaaaacaagccagtcagtgttcaagagacctatgaagccaaaagacatgagttccatggtgaacgtcagaggaaggaagaagaaatgaaacagatgtttgtgcagcgagtaaaggagaaagaagccatattgaaagaagctgagagagagctacaggccaaatttgagcaccttaagagacttcaccaagaagagagaatgaagcttgaagaaaagagaagacttttggaagaagaaataattgctttctctaaaaagaaagctacctccgagatatttcacagccagtcctttctggcaacaggcagcaacctgaggaaggacaaggaccgtaagaaggaaccaggctgtcgattcgaactcctgtgcattgatgtcagagcttgtgaaaccaatggtggacgtaaagacgcagagaaagctccaattttttgtaaaacagaagttccagagcacagaaggtcatcatcacaagcaaactttattaaaaaaaaactagaagtgtgctttgattttgctgttatttgttttatcacttctatatttggtgaacagccacagttactgatatttatggaaaagtactttcaagtacaaggtcaatacataagccagagtgaatgatactacaagttgagcatctctaattcaaaaatctgaaatccagaagcttcaaaatctgaatctttttgagcactgacttgaccccacaagtggaaaattccccacccgacacctttgctttctgatggttcagtttaaacagattttgtttcttgcacaaaatttttgtataaattactttcaggctatatgtataaggtggatgtgaaacatgaattatgtaattagagtcgggtcccgttgtgtatatgcagatattccaaacctgaaatccaaaacacttctggtccctagcattttggataagggatactcagcttgtacctatatattcatatatattcactgttgttagaaatgtttaagttgctgttctgtgatgaatctaaatcttttctcttgctaccaagctattgtcactgcagtgcattataccaaagagcgaagtcagtgccactgaaaatacagaacccattaatatcgtggctatctgattacatttatattccaagatgaaccttttttatatatgctaaaaattttggggaatatgttttgggatgtattatggagctaaaactctaacctcttaatagttttatagaacttaaaaattttttatacaattacccaattggtgatatgatcttaagcttttgtgtcagattatttaatatgatgacttcatgctttattatgccttattatggctgacgtattactgtggtgaaacaaaatatctttaaaagttaaaacatccagatatataagctattttttcctaaggataaagtacctttgagcatgagtgtatcacagctttcattaggaaaacttttcattacatacttgtttaaactctgtcttccagggtaaaaataataaggttgaatcattttattaaaaatactttttaagaaaataactatgaacatctgaatattaaagatataaaaatgcacataattcatatttcaggtggtatttgcattcagtgccttactggtattctcagaacattttaatgatttctaacatttcttaacagtcatagatatatacattttcattttttgtacttgaatattctaaataaaactgacatttactcttgacaaataaaacatatatttactaaaa

SEQ ID NO: 179847 - DNA, 3071 bp, Homo sapiens
  Payload ID: 15444
  Gene Symbol: SEPT10
  Gene Name: septin 10
  Uniprot ID: Q9P0V9
  ENST ID: ENST00000397712
  CDS Start-End: 380-1744
cacttccggcctcgcgagggccgcaatcactgctccgcagttcccgcctgcattcctcgcgccgtcttcctggagtcccagctctccttcagcccgccccaacgctgacgctcagtcctcaggcgtcgagggtagctcctgtgaggggctcgcttggcgcaggcaaaacgctcagcgcgcaccacagggcgtccgccccaaccccgcccccggaggcctccagctcggccccgcccctgtcccttccccgtcgcggaggcagcctagcctcgcgccccgcccgttgcttctgccctccggccttcccgccgccgtcgccgggaccagccgctcggggccgggctgatacagccgcttcaccgtgcccctgcccgcgaccatggcctcctccgaggtggcgcggcacctgctctttcagtctcacatggcaacgaaaacaacttgtatgtcttcacaaggatcagatgatgaacagataaaaagagaaaacattcgttcgttgactatgtctggccatgttggttttgagagtttgcctgatcagctggtgaacagatccattcagcaaggtttctgctttaatattctctgtgtgggggaaactggaattggaaaatcaacactgattgacacattgtttaatactaattttgaagactatgaatcctcacatttttgcccaaatgttaaacttaaagctcagacatatgaactccaggaaagtaatgttcaattgaaattgaccattgtgaatacagtgggatttggtgaccaaataaataaagaagagagctaccaaccaatagttgactacatagatgctcagtttgaggcctatctccaagaagaactgaagattaagcgttctctctttacctaccatgattctcgcatccatgtgtgtctctacttcatttcaccgacaggccactctctgaagacacttgatctcttaaccatgaagaaccttgacagcaaggtaaacattataccagtgattgccaaagcagatacggtttctaaaactgaattacagaagtttaagatcaagctcatgagtgaattggtcagcaatggcgtccagatataccagttcccaacggatgatgacactattgctaaggtcaacgctgcaatgaatggacagttgccgtttgctgttgtgggaagtatggatgaggtaaaagtcggaaacaagatggtcaaagctcgccagtacccttggggtgttgtacaagtggaaaatgaaaaccactgtgactttgtaaagctgcgggaaatgctcatttgtacaaatatggaggacctgcgagagcagacccataccaggcactatgagctttacaggcgctgcaaactggaggaaatgggctttacagatgtgggcccagaaaacaagccagtcagtgttcaagagacctatgaagccaaaagacatgagttccatggtgaacgtcagaggaaggaagaagaaatgaaacagatgtttgtgcagcgagtaaaggagaaagaagccatattgaaagaagctgagagagagctacaggccaaatttgagcaccttaagagacttcaccaagaagagagaatgaagcttgaagaaaagagaagacttttggaagaagaaataattgctttctctaaaaagaaagctacctccgagatatttcacagccagtcctttctggcaacaggcagcaacctgaggaaggacaaggaccgtaagaactccaattttttgtaaaacagaagttccagagcacagaaggtcatcatcacaagcaaactttattaaaaaaaaactagaagtgtgctttgattttgctgttatttgttttatcacttctatatttggtgaacagccacagttactgatatttatggaaaagtactttcaagtacaaggtcaatacataagccagagtgaatgatactacaagttgagcatctctaattcaaaaatctgaaatccagaagcttcaaaatctgaatctttttgagcactgacttgaccccacaagtggaaaattccccacccgacacctttgctttctgatggttcagtttaaacagattttgtttcttgcacaaaatttttgtataaattactttcaggctatatgtataaggtggatgtgaaacatgaattatgtaattagagtcgggtcccgttgtgtatatgcagatattccaaacctgaaatccaaaacacttctggtccctagcattttggataagggatactcagcttgtacctatatattcatatatattcactgttgttagaaatgtttaagttgctgttctgtgatgaatctaaatcttttctcttgctaccaagctattgtcactgcagtgcattataccaaagagcgaagtcagtgccactgaaaatacagaacccattaatatcgtggctatctgattacatttatattccaagatgaaccttttttatatatgctaaaaattttggggaatatgttttgggatgtattatggagctaaaactctaacctcttaatagttttatagaacttaaaaattttttatacaattacccaattggtgatatgatcttaagcttttgtgtcagattatttaatatgatgacttcatgctttattatgccttattatggctgacgtattactgtggtgaaacaaaatatctttaaaagttaaaacatccagatatataagctattttttcctaaggataaagtacctttgagcatgagtgtatcacagctttcattaggaaaacttttcattacatacttgtttaaactctgtcttccagggtaaaaataataaggttgaatcattttattaaaaatactttttaagaaaataactatgaacatctgaatattaaagatataaaaatgcacataattcatatttcaggtggtatttgcattcagtgccttactggtattctcagaacattttaatgatttctaacatttcttaacagtcatagatatatacattttcattttttgtacttgaatattctaaataaaactgacatttactcttgacaaataaaacatatatttactaaaa

SEQ ID NO: 179848 - DNA, 2719 bp, Homo sapiens
  Payload ID: 15444
  Gene Symbol: SEPT10
  Gene Name: septin 10
  Uniprot ID: Q9P0V9
  ENST ID: ENST00000397714
  CDS Start-End: 101-1396
cccgttgcttctgccctccggccttcccgccgccgtcgccgggaccagccgctcggggccgggctgatacagccgcttcaccgtgcccctgcccgcgaccatggcctcctccgaggtggcgcggcacctgaaaagagaaaacattcgttcgttgactatgtctggccatgttggttttgagagtttgcctgatcagctggtgaacagatccattcagcaaggtttctgctttaatattctctgtgtgggggaaactggaattggaaaatcaacactgattgacacattgtttaatactaattttgaagactatgaatcctcacatttttgcccaaatgttaaacttaaagctcagacatatgaactccaggaaagtaatgttcaattgaaattgaccattgtgaatacagtgggatttggtgaccaaataaataaagaagagagctaccaaccaatagttgactacatagatgctcagtttgaggcctatctccaagaagaactgaagattaagcgttctctctttacctaccatgattctcgcatccatgtgtgtctctacttcatttcaccgacaggccactctctgaagacacttgatctcttaaccatgaagaaccttgacagcaaggtaaacattataccagtgattgccaaagcagatacggtttctaaaactgaattacagaagtttaagatcaagctcatgagtgaattggtcagcaatggcgtccagatataccagttcccaacggatgatgacactattgctaaggtcaacgctgcaatgaatggacagttgccgtttgctgttgtgggaagtatggatgaggtaaaagtcggaaacaagatggtcaaagctcgccagtacccttggggtgttgtacaagtggaaaatgaaaaccactgtgactttgtaaagctgcgggaaatgctcatttgtacaaatatggaggacctgcgagagcagacccataccaggcactatgagctttacaggcgctgcaaactggaggaaatgggctttacagatgtgggcccagaaaacaagccagtcagtgttcaagagacctatgaagccaaaagacatgagttccatggtgaacgtcagaggaaggaagaagaaatgaaacagatgtttgtgcagcgagtaaaggagaaagaagccatattgaaagaagctgagagagagctacaggccaaatttgagcaccttaagagacttcaccaagaagagagaatgaagcttgaagaaaagagaagacttttggaagaagaaataattgctttctctaaaaagaaagctacctccgagatatttcacagccagtcctttctggcaacaggcagcaacctgaggaaggacaaggaccgtaagaactccaattttttgtaaaacagaagttccagagcacagaaggtcatcatcacaagcaaactttattaaaaaaaaactagaagtgtgctttgattttgctgttatttgttttatcacttctatatttggtgaacagccacagttactgatatttatggaaaagtactttcaagtacaaggtcaatacataagccagagtgaatgatactacaagttgagcatctctaattcaaaaatctgaaatccagaagcttcaaaatctgaatctttttgagcactgacttgaccccacaagtggaaaattccccacccgacacctttgctttctgatggttcagtttaaacagattttgtttcttgcacaaaatttttgtataaattactttcaggctatatgtataaggtggatgtgaaacatgaattatgtaattagagtcgggtcccgttgtgtatatgcagatattccaaacctgaaatccaaaacacttctggtccctagcattttggataagggatactcagcttgtacctatatattcatatatattcactgttgttagaaatgtttaagttgctgttctgtgatgaatctaaatcttttctcttgctaccaagctattgtcactgcagtgcattataccaaagagcgaagtcagtgccactgaaaatacagaacccattaatatcgtggctatctgattacatttatattccaagatgaaccttttttatatatgctaaaaattttggggaatatgttttgggatgtattatggagctaaaactctaacctcttaatagttttatagaacttaaaaattttttatacaattacccaattggtgatatgatcttaagcttttgtgtcagattatttaatatgatgacttcatgctttattatgccttattatggctgacgtattactgtggtgaaacaaaatatctttaaaagttaaaacatccagatatataagctattttttcctaaggataaagtacctttgagcatgagtgtatcacagctttcattaggaaaacttttcattacatacttgtttaaactctgtcttccagggtaaaaataataaggttgaatcattttattaaaaatactttttaagaaaataactatgaacatctgaatattaaagatataaaaatgcacataattcatatttcaggtggtatttgcattcagtgccttactggtattctcagaacattttaatgatttctaacatttcttaacagtcatagatatatacattttcattttttgtacttgaatattctaaataaaactgacatttactcttgacaaataaaacatatatttact

SEQ ID NO: 179849 - DNA, 272 bp, Homo sapiens
  Payload ID: 15444
  Gene Symbol: SEPT10
  Gene Name: septin 10
  ENST ID: ENST00000411469
  CDS Start-End: 100-272
agcggtgtttgtgggtctcttacggctataacggagttgaaggcgcagtgcggactgattgaatagcggtcatcttttgcagccctctttcagtctcacatggcaacgaaaacaacttgtatgtcttcacaaggatcagatgatgaacagataaaaagagaaaacattcgttcgttgactatgtctggccatgttggttttgagagtttgcctgatcagctggtgaacagatccattcagcaaggtttctgctttaatattctctgtgtggg

SEQ ID NO: 179850 - DNA, 1605 bp, Homo sapiens
  Payload ID: 15444
  Gene Symbol: SEPT10
  Gene Name: septin 10
  ENST ID: ENST00000415095
  CDS Start-End: 9-1361
ccgcgaccatggcctcctccgaggtggcgcggcacctgctctttcagtctcacatggcaacgaaaacaacttgtatgtcttcacaaggatcagatgatgaacagataaaaagagaaaacattcgttcgttgactatgtctggccatgttggttttgagagtttgcctgatcagctggtgaacagatccattcagcaaggtttctgctttaatattctctgtgtgggggaaactggaattggaaaatcaacactgattgacacattgtttaatactaattttgaagactatgaatcctcacatttttgcccaaatgttaaacttaaagctcagacatatgaactccaggaaagtaatgttcaattgaaattgaccattgtgaatacagtgggatttggtgaccaaataaataaagaagagagctaccaaccaatagttgactacatagatgctcagtttgaggcctatctccaagaagaactgaagattaagcgttctctctttacctaccatgattctcgcatccatgtgtgtctctacttcatttcaccgacaggccactctctgaagacacttgatctcttaaccatgaagaaccttgacagcaaggtaaacattataccagtgattgccaaagcagatacggtttctaaaactgaattacagaagtttaagatcaagctcatgagtgaattggtcagcaatggcgtccagatataccagttcccaacggatgatgacactattgctaaggtcaacgctgcaatgaatggacagttgccgtttgctgttgtgggaagtatggatgaggtaaaagtcggaaacaagatggtcaaagctcgccagtacccttggggtgttgtacaagtggaaaatgaaaaccactgtgactttgtaaagctgcgggaaatgctcatttgtacaaatatggaggacctgcgagagcagacccataccaggcactatgagctttacaggcgctgcaaactggaggaaatgggctttacagatgtgggcccagaaaacaagccagtcagtgttcaagagacctatgaagccaaaagacatgagttccatggtgaacgtcagaggaaggaagaagaaatgaaacagatgtttgtgcagcgagtaaaggagaaagaagccatattgaaagaagctgagagagagctacaggccaaatttgagcaccttaagagacttcaccaagaagagagaatgaagcttgaagaaaagagaagacttttggaagaagaaataattgctttctctaaaaagaaagctacctccgagatatttcacagccagtcctttctggcaacaggcagcaacctgaggaaggacaaggaccgtaagaagtaagaggcccagccaccctccctggcagccctgcccacacttgtcacattgccctgtcggatcttcctagcgcttcttacttctgcttccttatgctttgtcttccttctccaactaaatgtcagctcctggagaggagagaccttgtccctcttgttcactgctgtttccccagcatccagaacagcacctggcacatgttatgtgttcagtatttgccaaaatgaatgaatgaacaaaataaaaa

SEQ ID NO: 179851 - DNA, 566 bp, Homo sapiens
  Payload ID: 15444
  Gene Symbol: SEPT10
  Gene Name: septin 10
  ENST ID: ENST00000425498
  CDS Start-End: 95-241
gcttctgccctccggccttcccgccgccgtcgccgggaccagccgctcggggccgggctgatacagccgcttcaccgtgcccctgcccgcgaccatggcctcctccgaggtggcgcggcacctgctctttcagtctcacatggcaacgaaaacaacttgtatgtcttcacaaggatcagatgatgaacagatagtgagtaaacattataccagtgattgccaaagcagatacggtttctaaaactgaattacagaagtttaagatcaagctcatgagtgaattggtcagcaatggcgtccagatataccagttcccaacggatgatgacactattgctaaggtcaacgctgcaatgaatggacagttgccgtttgctgttgtgggaagtatggatgaggtaaaagtcggaaacaagatggtcaaagctcgccagtacccttggggtgttgtacaagtggaaaatgaaaaccactgtgactttgtaaagctgcgggaaatgctcatttgtacaaatatggaggacctgcgagagcagacccataccaggcactatgagctttacagg

SEQ ID NO: 179852 - DNA, 1782 bp, Homo sapiens
  Payload ID: 15444
  Gene Symbol: SEPT10
  Gene Name: septin 10
  ENST ID: ENST00000437928
  CDS Start-End: 233-1654
gccctccggccttcccgccgccgtcgccgggaccagccgctcggggccgggctgatacagccgcttcaccgtgcccctgcccgcgaccatggcctcctccgaggtggcgcggcacctgtgacgtctctccagtgaccttagtttgagtcacttggactcagaatcatgaagtcagcttcttgcagcctcaccttttctgctgtccttgcatttacatctctttcagtctcacatggcaacgaaaacaacttgtatgtcttcacaaggatcagatgatgaacagataaaaagagaaaacattcgttcgttgactatgtctggccatgttggttttgagagtttgcctgatcagctggtgaacagatccattcagcaaggtttctgctttaatattctctgtgtgggggaaactggaattggaaaatcaacactgattgacacattgtttaatactaattttgaagactatgaatcctcacatttttgcccaaatgttaaacttaaagctcagacatatgaactccaggaaagtaatgttcaattgaaattgaccattgtgaatacagtgggatttggtgaccaaataaataaagaagagagctaccaaccaatagttgactacatagatgctcagtttgaggcctatctccaagaagaactgaagattaagcgttctctctttacctaccatgattctcgcatccatgtgtgtctctacttcatttcaccgacaggccactctctgaagacacttgatctcttaaccatgaagaaccttgacagcaaggtaaacattataccagtgattgccaaagcagatacggtttctaaaactgaattacagaagtttaagatcaagctcatgagtgaattggtcagcaatggcgtccagatataccagttcccaacggatgatgacactattgctaaggtcaacgctgcaatgaatggacagttgccgtttgctgttgtgggaagtatggatgaggtaaaagtcggaaacaagatggtcaaagctcgccagtacccttggggtgttgtacaagtggaaaatgaaaaccactgtgactttgtaaagctgcgggaaatgctcatttgtacaaatatggaggacctgcgagagcagacccataccaggcactatgagctttacaggcgctgcaaactggaggaaatgggctttacagatgtgggcccagaaaacaagccagtcagtgttcaagagacctatgaagccaaaagacatgagttccatggtgaacgtcagaggaaggaagaagaaatgaaacagatgtttgtgcagcgagtaaaggagaaagaagccatattgaaagaagctgagagagagctacaggccaaatttgagcaccttaagagacttcaccaagaagagagaatgaagcttgaagaaaagagaagacttttggaagaagaaataattgctttctctaaaaagaaagctacctccgagatatttcacagccagtcctttctggcaacaggcagcaacctgaggaaggacaaggaccgtaagaaggaaccaggctgtcgattcgaactcctgtgcattgatgtcagagcttgtgaaaccaatggtggacgtaaagacgcagagaaaggtagagagggccacagtgcaagggggcagccatgagtagcatgtggatgataatcgcaaggcgtgtaggtttgggctccaattttttgtaaaacagaagttccagagcacagaaggtcatcatcacaagcaaactttattaaaaaaaaactagaagtgtgctt

SEQ ID NO: 179853 - DNA, 581 bp, Homo sapiens
  Payload ID: 15444
  Gene Symbol: SEPT10
  Gene Name: septin 10
  ENST ID: ENST00000442746
  CDS Start-End: 397-581
atccacagcggtgtttgtgggtctcttacggctataacggagttgaaggcgcagtgcggactgattgaatagcggtcatcttttgcagccgtgagcacttccgagcctccctgccgccgggagaaagcccggctcccctggcttttcaaaagctctcccgttttatccgatggtgtggtcgtccaagttttcctccattgggattttaaaccgtttttttcccgccttgactcttttgtactctaaaagaacgcgtttgttcactgttttgaacctttccagttacttttgtagatttatctcgcttgttagtaagccagcggttttccaagtgtggttacaactattttcgttaatagtaccaaggtcgtgtacatcgagttttccaaaggctacatgctctttcagtctcacatggcaacgaaaacaacttgtatgtcttcacaaggatcagatgatgaacagataaaaagagaaaacattcgttcgttgactatgtctggccatgttggttttgagagtttgcctgatcagctggtgaacagatccattcagcaaggtttctgctttaatattctctg

SEQ ID NO: 179854 - DNA, 557 bp, Homo sapiens
  Payload ID: 15444
  Gene Symbol: SEPT10
  Gene Name: septin 10
  ENST ID: ENST00000423520
  CDS Start-End: 267-557
agtcctcaggcgtcgagggtagctcctgtgaggggctcgcttggcgcaggcaaaacgctcagcgcgcaccacagggcgtccgccccaaccccgcccccggaggcctccagctcggccccgcccctgtcccttccccgtcgcggaggcagcctagcctcgcgccccgcccgttgcttctgccctccggccttcccgccgccgtcgccgggaccagccgctcggggccgggctgatacagccgcttcaccgtgcccctgcccgcgaccatggcctcctccgaggtggcgcggcacctgctctttcagtctcacatggcaacgaaaacaacttgtatgtcttcacaaggatcagatgatgaacagatagtaaacattataccagtgattgccaaagcagatacggtttctaaaactgaattacagaagtttaagatcaagctcatgagtgaattggtcagcaatggcgtccagatataccagttcccaacggatgatgacactattgctaaggtcaacgctgcaatgaatggacagttgccgtttgctgttgtgggaagt

SEQ ID NO: 179855 - DNA, 581 bp, Homo sapiens
  Payload ID: 15444
  Gene Symbol: SEPT10
  Gene Name: septin 10
  ENST ID: ENST00000461295
  CDS Start-End: 503-581
tcgcgccccgcccgttgcttctgccctccggccttcccgccgccgtcgccgggaccagccgctcggggccgggctgatacagccgcttcaccgtgcccctgcccgcgaccatggcctcctccgaggtggcgcggcacctggggaaactggaattggaaaatcaacactgattgacacattgtttaatactaattttgaagactatgaatcctcacatttttgcccaaatgttaaacttaaagctcagacatatgaactccaggaaagtaatgttcaattgaaattgaccattgtgaatacagtgggatttggtgaccaaataaataaagaagagagctaccaaccaatagttgactacatagatgctcagtttgaggcctatctccaagaagaactgaagattaagcgttctctctttacctaccatgattctcgcatccatgtgtgtctctacttcatttcaccgacaggccactctctgaagacacttgatctcttaaccatgaagaaccttgacagcaaggtaaacattataccagtgattgccaaagcagatacggtttctaaaactgaattacaga

SEQ ID NO: 179856 - DNA, 583 bp, Homo sapiens
  Payload ID: 15444
  Gene Symbol: SEPT10
  Gene Name: septin 10
  ENST ID: ENST00000493445
  CDS Start-End: 288-583
tctgccctccggccttcccgccgccgtcgccgggaccagccgctcggggccgggctgatacagccgcttcaccgtgcccctgcccgcgaccatggcctcctccgaggtggcgcggcacctgctaccaaccaatagttgactacatagatgctcagtttgaggcctatctccaagaagaactgaagattaagcgttctctctttacctaccatgattctcgcatccatgtgtgtctctacttcatttcaccgacaggccactctctgaagacacttgatctcttaaccatgaagaaccttgacagcaaggtaaacattataccagtgattgccaaagcagatacggtttctaaaactgaattacagaagtttaagatcaagctcatgagtgaattggtcagcaatggcgtccagatataccagttcccaacggatgatgacactattgctaaggtcaacgctgcaatgaatggacagttgccgtttgctgttgtgggaagtatggatgaggtaaaagtcggaaacaagatggtcaaagctcgccagtacccttggggtgttgtacaagtggaaaatgaaaacca

SEQ ID NO: 179857 - DNA, 980 bp, Homo sapiens
  Payload ID: 15444
  Gene Symbol: SEPT10
  Gene Name: septin 10
  ENST ID: ENST00000486678
  CDS Start-End: 267-383
agtcctcaggcgtcgagggtagctcctgtgaggggctcgcttggcgcaggcaaaacgctcagcgcgcaccacagggcgtccgccccaaccccgcccccggaggcctccagctcggccccgcccctgtcccttccccgtcgcggaggcagcctagcctcgcgccccgcccgttgcttctgccctccggccttcccgccgccgtcgccgggaccagccgctcggggccgggctgatacagccgcttcaccgtgcccctgcccgcgaccatggcctcctccgaggtggcgcggcacctgctctttcagtctcacatggcaacgaaaacaacttgtatgtcttcacaaggatcagatgatgaacagatactaccaaccaatagttgactacatagatgctcagtttgaggcctatctccaagaagaactgaagattaagcgttctctctttacctaccatgattctcgcatccatgtgtgtctctacttcatttcaccgacaggccactctctgaagacacttgatctcttaaccatgaagaaccttgacagcaaggtaaacattataccagtgattgccaaagcagatacggtttctaaaactgaattacagaagtttaagatcaagctcatgagtgaattggtcagcaatggcgtccagatataccagttcccaacggatgatgacactattgctaaggtcaacgctgcaatgaatggacagttgccgtttgctgttgtgggaagtatggatgaggtaaaagtcggaaacaagatggtcaaagctcgccagtacccttggggtgttgtacaagtggaaaatgaaaaccactgtgactttgtaaagctgcgggaaatgctcatttgtacaaatatggaggacctgcgagagcagacccataccaggcactatgagctttacaggcgctgcaaactggaggaaatgggctttacagatgtgggcccagaaaacaagccagtcag

SEQ ID NO: 179858 - DNA, 5593 bp, Homo sapiens
  Payload ID: 15445
  Gene Symbol: SEPT11
  Gene Name: septin 11
  Uniprot ID: Q9NVA2
  ENST ID: ENST00000264893
  CDS Start-End: 202-1491
cgggtggccatgttgctctaataaagcgggaggggcggcggcgtggggggagcagatgccgctggctgccagcgggacgccggcgagcagagcgcagccgcgagggaggcgcgagggaggcgagccggagcccgagcactagcagcagccggagtcggcgtaaagcacccgggcgcagccggagccggtgccgcagctgcgatggccgtggccgtggggagaccgtctaatgaagagcttcgaaacttgtctttgtctggccatgtgggatttgacagcctccctgaccagctggtcaacaagtctacttctcaaggattctgtttcaacatcctttgtgttggtgagacaggcattggcaaatccacgttaatggacactttgttcaacaccaaatttgaaagtgacccagctactcacaatgaaccaggtgttcggttaaaagccagaagttatgagcttcaggaaagcaatgtacggctgaagttaaccattgttgacaccgtgggatttggagaccagataaataaagatgacagctataagccgatagtagaatatattgatgcccagttcgaggcctacctgcaagaggaattgaagattaaacgttctctcttcaactaccatgacacgaggatccatgcctgcctctactttattgcccctactggacattcactaaagtccctggatctggtcaccatgaaaaagctggacagtaaggtgaacatcattccaataattgcaaaagctgacaccattgccaagaatgaactgcacaaattcaagagtaagatcatgagtgaactggtcagcaatggggtccagatatatcagtttcccactgatgaagaaacggtggcagagattaacgcaacaatgagtgtccatctcccatttgcagtggttggcagcaccgaagaggtgaagattggcaacaagatggcaaaggccaggcagtacccctggggtgtggtgcaggttgagaatgaaaatcattgcgattttgtgaaacttcgagagatgctgatccgcgtgaacatggaggacttgcgagagcagactcacacccgccactatgaattgtaccgacgctgtaagcttgaagagatggggttcaaggacactgaccctgacagcaaacccttcagtcttcaggagacatatgaagcaaaaaggaatgaattcctgggagaactgcagaagaaagaagaagaaatgagacaaatgtttgttatgagagtgaaggagaaagaagctgaacttaaggaggcagagaaagagcttcacgagaagtttgaccttctaaagcggacacaccaagaagaaaagaagaaagtggaagacaagaagaaggagcttgaggaggaggtgaacaacttccagaagaagaaagcagcggctcagttactacagtcccaggcccagcaatctggggcccagcaaaccaagaaagacaaggataagaaaaatgcaagcttcacataaagcctggcaagccaaggatgttcccgcattcacctgcttttgcagtaatatcgtatctctgccatgtgtgttctttagttttattttattttattttatttttttacccttcctcaaacaccagtaactattattaactcgttttgctgaatgttgttgggtggtagaaaatgatagaacaagggaataaccgcgaatgctctgtgcagctggactctgtttccggaaagtaaatgatttgctttttatgcctgttctgaatggcagcacgaagcaggcctgttacttgtatgtcgctttggacagaggaaagtggggtaaaatgctacctgtacgtctgacatgaaaacttctcaccgcctcagcagctgaactaaaaacctgaatagccatgacaagagtttgcattttcttgatgattcatctccatgagtgcacaatccctgaactcactgtcttttctccacacttgtcctaagccaaggtagatttgtacgtagacagactggtgagcaagcattatattttatttttacccttgcatgacattttcattttaatcaataacattatttggcctgagcttgtgggtctgttcagactgtctcctctcatggtttgaaactgcatctgaatgcctgccttcaatcctggccaagttggagtagactggtatgagaaaactatgattagttcacatttactggtgcatccttgatcctctcacagatagaggtcttaaaggttggatcatgtaacattgcttagtagaagaatcttcttctaaggatgatgggctttctacagcctgcttaccactaacagtaaggaatctttcataaacacacctcagtttgttcccagtgggcttagagggaggacctgatgactgattccaggatacttgtacttctaataacatttttcatgaatcatgagaaaatttccacagatacttcccttagaaaatttgctataaactctgtatcattggtagcacaaatttgagcgaggccttgtcaattttaaggtggaaataggaaggaccacaacatgacccgtaagtcaagaaggtagacatttcatatccagcttccttgcttagtctcctttcagtatttggcaataaaagaaagaagaaatagaacagctgaagtctcaaatcattgtctggaattttcctcaccttggctagctccacctgctctttgtctaaggcccttgcctcatcagggattagaactggcccatatgccagaacctgtactaaatgcctaatttgtatggaagagtgcatatttaatctcttttctatactgctcctttctgatgcttatcctttcatctgtgtgattgttttttcccctctactaacaagatcctcccagctttctctctacatgtagaaaggataacatttctcatgaacccactgcccctctgcattttcctcactggttagagattaagtaaataggatagaatatgctgcgtctcccctgacacacactttcttttttgaatgagcaagtctccattttgatttcagcaaagattttttctccttttctttgtcctcaaccatacttagaggaaagaaggaatggtcttccatgaactgattatgcttaattaagcaaagtaaggaaattagtttcatggaagcctaaacaaagctggaatagaaactacacactagacacagcagtagtcatagtcttcacaggtttaggagctactggaccaacattcttgtttttgcttttgtttttttaaataattctagtctggagctaactgtggagcagccaaatagtagctggcatgttgattcaaaccatgggctgaatttgctcataggctgtgcatcagacaaaagcttgaatatttgtgttgtatgcttgttccaaccaccgcttgtgtgagcatttttgtggcttgtacagaaagtacacttttaaattgtctcttgcatcactaaaatttttttaaaatgagcataacaacgaaaggcatccagctgactttttgattccaagattattgattggattgacttttttgcattaaatttttcccagcaaaataaatcatatggcgagtcagggaataaaaagtcaaaagaaacaaatagaagcttttttttttaaaaaatgtattgcttctgaacttttttctgccactgctccctagccctgtttagtttgttattgctgcttttcttttttctttctgtatctatgcctttttttcacagtagtccttggctctgcacggaataaatgataccctcaaatctaattggatgtgctttcgcctttgcatgtaagtacggtagtaagaaacctttgagatctttctgacttttcaaaattagagaaagcaaatgggatggatagattttttttttcttttcaaggggggcaggaaggtaatggtttgagtagcctttgtttaaaaaaaagactaaatatatttaaaaggccacatttatatttttttcacaagaaccacataataaattccacttcttgacctgaatttggaaatccgaaattactaatccaggccaggtgtggtggctcatgcctgtaatcccagcactttgagaggccgaggtgggcagatcacttgaggcctggagttcaagaccaccttggcgaacacggtgaaaccccgtctctacaaaaaatacaaaaattagccaggcgtggtggcacgtgcctgtagtcccagctacttgggaggctaagtcaggagaattgcttgaacttgggagatggaggttgcagtgagccaagattgcaccactgcattccaacctgggtgatgaagtgagactctccaaaaaaaaaaaagaaattattaatccctgcctgtgctctacatagcctcatgggcatcattggatagctcagagggcccttgattctggcaaggcaaataaagccagaatgagaaattaccatcttctactagagaaaaccaagagaaaaatttttatgctaggatgcctttatgaccacttaattttttaatcttagtttaatggtctctccctggtgctaactgctgacagtggccacctcttttttggggattgaggggcctacataactagctggccttaccccatatcttttgttcaaacataataccatctttttgcttcttctgaactttagatctccataacacatgtactgtagaatgtgatggaaaagcattgatgagaatttattggcagttcagattgtgttttcccaacttaggctctttattaattggttaaggttttctccaaaaagggcatttcaacaatgggaattatttaatgtaacagtgggcacagattacttatcttccttctctgctttgtgactcaccagcagtaacacacacaatccacatcttgtgcacctcaaatgaacagacttggtttccttgctttcttgacatttccatgactgtttcacatacaaactattgggtgaggtttttcagctgttaccgacccacgtcctgctgtctctgtgtggtcctacaaaaactgtccattcccacccctttgctttgccatttgcaagagtctggaattgtcaggtctcagcttcgaaaagtcctggttccactgacaggacacattctttagtgggaattaagacctacaaagtctagtttgtatgtaggtatgaagggaattttttaaataaattgaaaagctgtgaacagcattagaactttgtctatttcttaattttaaaatatgctgatatgccttaaactgtagttgtagatccttgtcattttgctgtttgaaaataaccaatgtgttttctaaaactgtcgtgtaatctactttcattgttaatgcagaattgtcatatatgtaagctgcatgttagacatttgtcttttttaaactaaagtaattgtattgatgtgaagcatatcattttttcaaatatgaaagtgatcacttagcaacatgcttggtaatttggcatctgttaaggtaggagagtggtgaacagataatctatgcatatatcactagtgccaagacataaagcgggggaaaatatatttttacccaaacatt

SEQ ID NO: 179859 - DNA, 1870 bp, Homo sapiens
  Payload ID: 15445
  Gene Symbol: SEPT11
  Gene Name: septin 11
  ENST ID: ENST00000510641
  CDS Start-End: 755-1870
ggctgccagcgggacgccggcgagcagagcgcagccgcgagggaggcgcgagggaggcgagccggagcccgagcactagcagcagccggagtcggcgtaaagcacccgggcgcagccggagccggtgccgcagctgcgatggccgtggccgtggggagaccgtctaaggggcaagaacatagcaactgctaagaaacacagttcattcacccagtgggagaagtactgaactaataaattagaagcaactcaaagaaagcaaacagcttggaacctaaggcatgaaaaggaagagcactcaggaatccagcctttttagttggggcaggcaattaatgctctgtgatttgaagaaatgtttatgaggtgcccaaatgtgatgttacacatttttaaaaataaaaagtagatgagaagaaaccgggtgagaaagaagccaagacccaggagagtgagtgacctgcttaagacccataggctcagaactggagccaaatcccctgacacttgcccacactacaaacccaaggacagtagaactaaggcgttctagataggtcatttgtagacagattcttcagtcgtttcacactgccaagtggagaaaacccaaactccccttctagtcaccgatcttgtgtttaggaccctggacactggtttatttatggtgaaaagaatctcactgttggagctgggctgcagatggaatgaatcaagtttaacttaggtcctcaatgcagttggatattttatgaatgaagagcttcgaaacttgtctttgtctggccatgtgggatttgacagcctccctgaccagctggtcaacaagtctacttctcaaggattctgtttcaacatcctttgtgttggtgagacaggcattggcaaatccacgttaatggacactttgttcaacaccaaatttgaaagtgacccagctactcacaatgaaccaggtgttcggttaaaagccagaagttatgagcttcaggaaagcaatgtacggctgaagttaaccattgttgacaccgtgggatttggagaccagataaataaagatgacagctataagccgatagtagaatatattgatgcccagttcgaggcctacctgcaagaggaattgaagattaaacgttctctcttcaactaccatgacacgaggatccatgcctgcctctactttattgcccctactggacattcactaaagtccctggatctggtcaccatgaaaaagctggacagtaaggtgaacatcattccaataattgcaaaagctgacaccattgccaagaatgaactgcacaaattcaagagtaagatcatgagtgaactggtcagcaatggggtccagatatatcagtttcccactgatgaagaaacggtggcagagattaacgcaacaatgagtgtccatctcccatttgcagtggttggcagcaccgaagaggtgaagattggcaacaagatggcaaaggccaggcagtacccctggggtgtggtgcaggttgagaatgaaaatcattgcgattttgtgaaacttcgagagatgctgatccgcgtgaacatggaggacttgcgagagcagactcacacccgccactatgaattgtaccgacgctgtaagcttgaagagatggggttcaaggacactgaccctgacagcaaacccttcagtcttcaggagacatatgaagcaaaaaggaatgaattcctgggagaactgcagaagaaagaagaagaaatgagacaaatgtttgttatgagagtgaaggagaaagaagctgaacttaaggaggcagagaaagagcttcacgagaagtttgaccttctaaagcggacacaccaagaagaaaagaagaaa

SEQ ID NO: 179860 - DNA, 610 bp, Homo sapiens
  Payload ID: 15445
  Gene Symbol: SEPT11
  Gene Name: septin 11
  ENST ID: ENST00000512778
  CDS Start-End: 202-610
gcttccctcccaccctgtcttccttggagtactgcagaatctgtaagcgtccctggaatgcacacgtggaccttgtcattcccaaacagactttctgctgtctacatcggtaaactctgcaaaactccagcagttacagagcctgtgctaggagctacagggtgaagagggggaagaagactcaagaaacctgtaaaactaatggaggagaggaaaccagctcatgtgctgagaagttttaaatatgctgcatttatgaatgaagagcttcgaaacttgtctttgtctggccatgtgggatttgacagcctccctgaccagctggtcaacaagtctacttctcaaggattctgtttcaacatcctttgtgttggtgagacaggcattggcaaatccacgttaatggacactttgttcaacaccaaatttgaaagtgacccagctactcacaatgaaccaggtgttcggttaaaagccagaagttatgagcttcaggaaagcaatgtacggctgaagttaaccattgttgacaccgtgggatttggagaccagataaataaagatgacagctataagccgatagtagaatatattgatgcccagttcgagg

SEQ ID NO: 179861 - DNA, 1886 bp, Homo sapiens
  Payload ID: 15445
  Gene Symbol: SEPT11
  Gene Name: septin 11
  Uniprot ID: Q9NVA2
  ENST ID: ENST00000510515
  CDS Start-End: 258-1577
agcactagcagcagccggagtcggcgtaaagcacccgggcgcagccggagccggtgccgcagctgcgatggccgtggccgtggggagaccgtctctcagaggcgtctgtactactgaaataggacctcagaaaaagacatgacctaagatgaagggtctacatcggtaaactctgcaaaactccagcagttacagagcctgtgctaggagctacagggtgaagagggggaagaagactcaagaaacctgtaaaactaatggaggagaggaaaccagctcatgtgctgagaagttttaaatatgctgcatttatgaatgaagagcttcgaaacttgtctttgtctggccatgtgggatttgacagcctccctgaccagctggtcaacaagtctacttctcaaggattctgtttcaacatcctttgtgttggtgagacaggcattggcaaatccacgttaatggacactttgttcaacaccaaatttgaaagtgacccagctactcacaatgaaccaggtgttcggttaaaagccagaagttatgagcttcaggaaagcaatgtacggctgaagttaaccattgttgacaccgtgggatttggagaccagataaataaagatgacagctataagccgatagtagaatatattgatgcccagttcgaggcctacctgcaagaggaattgaagattaaacgttctctcttcaactaccatgacacgaggatccatgcctgcctctactttattgcccctactggacattcactaaagtccctggatctggtcaccatgaaaaagctggacagtaaggtgaacatcattccaataattgcaaaagctgacaccattgccaagaatgaactgcacaaattcaagagtaagatcatgagtgaactggtcagcaatggggtccagatatatcagtttcccactgatgaagaaacggtggcagagattaacgcaacaatgagtgtccatctcccatttgcagtggttggcagcaccgaagaggtgaagattggcaacaagatggcaaaggccaggcagtacccctggggtgtggtgcaggttgagaatgaaaatcattgcgattttgtgaaacttcgagagatgctgatccgcgtgaacatggaggacttgcgagagcagactcacacccgccactatgaattgtaccgacgctgtaagcttgaagagatggggttcaaggacactgaccctgacagcaaacccttcagtcttcaggagacatatgaagcaaaaaggaatgaattcctgggagaactgcagaagaaagaagaagaaatgagacaaatgtttgttatgagagtgaaggagaaagaagctgaacttaaggaggcagagaaagagcttcacgagaagtttgaccttctaaagcggacacaccaagaagaaaagaagaaagtggaagacaagaagaaggagcttgaggaggaggtgaacaacttccagaagaagaaagcagcggctcagttactacagtcccaggcccagcaatctggggcccagcaaaccaagaaagacaaggataagaaaaatgcaagcttcacataaagcctggcaagccaaggatgttcccgcattcacctgcttttgcagtaatatcgtatctctgccatgtgtgttctttagttttattttattttattttatttttttacccttcctcaaacaccagtaactattattaactcgttttgctgaatgttgttgggtggtagaaaatgatagaacaagggaataaccgcgaatgctctgtgcagctggactctgtttccggaaagtaaatgatttgctttttatgcctgttctgaatggcagcacgaagcaggcctgttacttgtatgtcgctttggacagagg

SEQ ID NO: 179862 - DNA, 659 bp, Homo sapiens
  Payload ID: 15445
  Gene Symbol: SEPT11
  Gene Name: septin 11
  ENST ID: ENST00000506731
  CDS Start-End: 1-482
aacttcgagagatgctgatccgcgtgaacatggaggacttgcgagagcagactcacacccgccactatgaattgtaccgacgctgtaagcttgaagagatggggttcaaggacactgaccctgacagcaaacccttcagtcttcaggagacatatgaagcaaaaaggaatgaattcctgggagaactgcagaagaaagaagaagaaatgagacaaatgtttgttatgagagtgaaggagaaagaagctgaacttaaggaggcagagaaagagcttcacgagaagtttgaccttctaaagcggacacaccaagaagaaaagaagaaagtggaagacaagaagaaggagcttgaggaggaggtgaacaacttccagaagaagaaagcagcggctcagttactacagtcccaggcccagcaatctggggcccagcaaaccaagaaagacaaggataagaaaaatccttggctctgcacggaataaatgataccctcaaatctaattggatgtgctttcgcctttgcatcttcttctttatgtaaccatcctgttgacaagccctactctctcctaatggacatagagcattagaagagcaggagctgtctgttcacacgtgttggggaagagttacctcatttccaccatcgcctcctgttc

SEQ ID NO: 179863 - DNA, 276 bp, Homo sapiens
  Payload ID: 15445
  Gene Symbol: SEPT11
  Gene Name: septin 11
  ENST ID: ENST00000502401
  CDS Start-End: 1-249
agagtgaaggagaaagaagctgaacttaaggaggcagagaaagagcttcacgagaagtttgaccttctaaagcggacacaccaagaagaaaagaagaaagtggaagacaagaagaaggagcttgaggaggaggtgaacaacttccagaagaagaaagcagcggctcagttactacagtcccaggcccagcaatctggggcccagcaaaccaagaaagacaaggataagaaaaacttcttctttatgtaaccatcctgttgacaagccctactctct

SEQ ID NO: 179864 - DNA, 2079 bp, Homo sapiens
  Payload ID: 15445
  Gene Symbol: SEPT11
  Gene Name: septin 11
  ENST ID: ENST00000505788
  CDS Start-End: 96-1394
aggcgcgagggaggcgagccggagcccgagcactagcagcagccggagtcggcgtaaagcacccgggcgcagccggagccggtgccgcagctgcgatggccgtggccgtggggagaccgtctaatgaagagcttcgaaacttgtctttgtctggccatgtgggatttgacagcctccctgaccagctggtcaacaagtctacttctcaaggattctgtttcaacatcctttgtgttggtgagacaggcattggcaaatccacgttaatggacactttgttcaacaccaaatttgaaagtgacccagctactcacaatgaaccaggtgttcggttaaaagccagaagttatgagcttcaggaaagcaatgtacggctgaagttaaccattgttgacaccgtgggatttggagaccagataaataaagatgacagctataagccgatagtagaatatattgatgcccagttcgaggcctacctgcaagaggaattgaagattaaacgttctctcttcaactaccatgacacgaggatccatgcctgcctctactttattgcccctactggacattcactaaagtccctggatctggtcaccatgaaaaagctggacagtaaggtgaacatcattccaataattgcaaaagctgacaccattgccaagaatgaactgcacaaattcaagagtaagatcatgagtgaactggtcagcaatggggtccagatatatcagtttcccactgatgaagaaacggtggcagagattaacgcaacaatgagtgtccatctcccatttgcagtggttggcagcaccgaagaggtgaagattggcaacaagatggcaaaggccaggcagtacccctggggtgtggtgcaggttgagaatgaaaatcattgcgattttgtgaaacttcgagagatgctgatccgcgtgaacatggaggacttgcgagagcagactcacacccgccactatgaattgtaccgacgctgtaagcttgaagagatggggttcaaggacactgaccctgacagcaaacccttcagtcttcaggagacatatgaagcaaaaaggaatgaattcctgggagaactgcagaagaaagaagaagaaatgagacaaatgtttgttatgagagtgaaggagaaagaagctgaacttaaggaggcagagaaagagcttcacgagaagtttgaccttctaaagcggacacaccaagaagaaaagaagaaagtggaagacaagaagaaggagcttgaggaggaggtgaacaacttccagaagaagaaagcagcggctcagttactacagtcccaggcccagcaatctggggcccagcaaaccaagaaagacaaggataagaaaaatagtccttggctctgcacggaataaatgataccctcaaatctaattggatgtgctttcgcctttgcatctgaccatctgcctcttgagagagagagaagtgggcatccttcctttaaattcaggaaccactgttgttttatttgactttttctgttacttgcatcccttatataagttgttttggatttgggactatgttttgggggagaaaaactccagttagttctgttttttgtattggttattcagcttacttttggtatcaaaattatgccagttttaagctcacttgagtgaagtttaagtcacaagattctgtttaacatgctttccttgttttggaaacaaccaaaaacttcccttttttgttacgggattttgacctacaaatcctaatcatgtttaaaatgtgccggtgttgggtagatgacttttctgcctctggggttcaatttatatttaaagataccttaaaataacttactggcccatccctgcctttttatttgttgtgaagctctgtaccttgtgtccacagctttttaccaagacccatatgtcttggaccatgggaaatgaaccccaaacaagtacatgtctcttctcccagataacagcatcattaacaatggttctgattcacattgtcttctcagagttacctaggtggatttctctacaatatctgcaaaaaaacctgctgagaatc

SEQ ID NO: 179865 - DNA, 548 bp, Homo sapiens
  Payload ID: 15445
  Gene Symbol: SEPT11
  Gene Name: septin 11
  ENST ID: ENST00000504637
  CDS Start-End: 171-548
gtaaagcacccgggcgcagccggagccggtgccgcagctgcgatggccgtggccgtggggagaccgtcttctacatcggtaaactctgcaaaactccagcagttacagagcctgtgctaggagctacagggtgaagagggggaagaagactcaagaaacctgtaaaactaatggaggagaggaaaccagctcatgtgctgagaagttttaaatatgctgcatttatgaatgaagagcttcgaaacttgtctttgtctggccatgtgggatttgacagcctccctgaccagctggtcaacaagtctacttctcaaggattctgtttcaacatcctttgtgttggtgagacaggcattggcaaatccacgttaatggacactttgttcaacaccaaatttgaaagtgacccagctactcacaatgaaccaggtgttcggttaaaagccagaagttatgagcttcaggaaagcaatgtacggctgaagttaaccattgttgacaccgtgggatttggagaccagataaataaagatgacagctataagccg

SEQ ID NO: 179866 - DNA, 2615 bp, Homo sapiens
  Payload ID: 15445
  Gene Symbol: SEPT11
  Gene Name: septin 11
  ENST ID: ENST00000502584
  CDS Start-End: 154-1431
ggagcagatgccgctggctgccagcgggacgccggcgagcagagcgcagccgcgagggaggcgcgagggaggcgagccggagcccgagcactagcagcagccggagtcggcgtaaagcacccgggcgcagccggagccggtgccgcagctgcgatggccgtggccgtggggagaccgtctaatgaagagcttcgaaacttgtctttgtctggccatgtgggatttgacagcctccctgaccagctggtcaacaagtctacttctcaaggattctgtttcaacatcctttgtgttggtgagacaggcattggcaaatccacgttaatggacactttgttcaacaccaaatttgaaagtgacccagctactcacaatgaaccaggtgttcggttaaaagccagaagttatgagcttcaggaaagcaatgtacggctgaagttaaccattgttgacaccgtgggatttggagaccagataaataaagatgacagctataagccgatagtagaatatattgatgcccagttcgaggcctacctgcaagaggaattgaagattaaacgttctctcttcaactaccatgacacgaggatccatgcctgcctctactttattgcccctactggacattcactaaagtccctggatctggtcaccatgaaaaagctggacagtaaggtgaacatcattccaataattgcaaaagctgacaccattgccaagaatgaactgcacaaattcaagagtaagatcatgagtgaactggtcagcaatggggtccagatatatcagtttcccactgatgaagaaacggtggcagagattaacgcaacaatgagtgtccatctcccatttgcagtggttggcagcaccgaagaggtgaagattggcaacaagatggcaaaggccaggcagtacccctggggtgtggtgcaggttgagaatgaaaatcattgcgattttgtgaaacttcgagagatgctgatccgcgtgaacatggaggacttgcgagagcagactcacacccgccactatgaattgtaccgacgctgtaagcttgaagagatggggttcaaggacactgaccctgacagcaaacccttcagtcttcaggagacatatgaagcaaaaaggaatgaattcctgggagaactgcagaagaaagaagaagaaatgagacaaatgtttgttatgagagtgaaggagaaagaagctgaacttaaggaggcagagaaagagcttcacgagaagtttgaccttctaaagcggacacaccaagaagaaaagaagaaagtggaagacaagaagaaggagcttgaggaggaggtgaacaacttccagaagaagaaagcagcggctcagttactacagtcccaggcccagcaatctggggcccagcaaaccaagaaagacaaggataagaaaaagtaagcaggtgtcacccccctgtatcggggacctctaacaatttattcctcttgcatgtctctacttttcccatttacagactggaaactggtcctttaccagaaagataaaagcaagtattttctctacagtgcagggaagatgatgaaggtttttaaatttttttaaaaggtacacaaagattaatttataaaactttaccacaattgaccaagcaatcaggcctggaggaacctgttgtctccagtagcatcttccacaccaacactaggagtctcaaagaagacaggttgatgtctcttcagcaccctctgaagacaattctcatgactcttgatagagagcatcctaaaatcacaattgttaaaattattttcctattctgtgttgtaagacttcgtaagccagtcactgaaattctcgttcccaaaatgaaacatttggaagagctgctagtggccactagtttcctcaaaattcaatatgatgaattgttttattgtgaaatgggatccaaatgcctatccagttgacacctctgccaacctcaagccaaacctaaacccattcataaaaggttttttttaaatagggtcttaatgtcatgtgccaaagggtcagattctgctcttgagttggtcacttcctgtgatactccagtagcagctgcctgaaaccagtgggagatttaggcctcccttgacattctcctgtgatttgaagctctcctttgaatcatcataaagcctagttttatgtcaatgctatcggttttgacaggaagcacgatggtaagaataccactaacgaaaacctttgtggtgtctcaatgacaaatatgcagatgccaccctcctttgtctaatgtacggtgctttagggcagctatttaatataaagcaactcagaacttgtttcaggaagtgttgctctttcgccttacatgccaaggttctagggaaaaagctgaccatatgtaaaaacattgatgctcaagcacataaagaattacattctttaaacatagagtacataggatcaagtctctgcacaataattgagatgtgttatagggaaaagtgagcacagtgctattgtccacttagtcttggtgaatgtgcagtaggctcacccctaaggaatctcatgttgcctgcagtaaaaataaaaatggactgctacaatga

SEQ ID NO: 179867 - DNA, 1469 bp, Homo sapiens
  Payload ID: 15446
  Gene Symbol: SEPT12
  Gene Name: septin 12
  Uniprot ID: Q8IYM1
  ENST ID: ENST00000268231
  CDS Start-End: 265-1341
cttgggcccctggttctacttggggattattgtattattaggctggggtcattgtggggattagaagggtaacagctcctgctcctgctgcagagaagcctccaggtgggggtcacagcaagtgcagatggagctcagattcttcggttaactgtcaccctctcccctcccccatcacacacaccaggccctgccaggacaaggcagctcctggaagctccaccaggacccacgtccaccaggcatctcgaacccttggcccccatggaccccctgaggcgctccccctctccctgcctgtcctcgcagccctccagccccagcaccccaccctgcgagatgcttggtcctgtgggcattgaggctgtgctggaccagctgaagatcaaggctatgaagatggggtttgagttcaacatcatggtggtggggcaaagcgggctgggcaagtccacgatggtgaacacgctgttcaagtccaaagtgtggaagtcaaacccaccgggcttgggggtgcccacaccccagacgctgcagctgcattcactgacccatgtcatagaggagaagggtgtgaagctgaagctgacggtgacggacacgcccggcttcggggaccagatcaacaatgacaactgctgggaccccatcctgggctacatcaacgagcaatacgagcagtacctgcaggaggagatcctcatcacccgccagcgccacatcccagacacccgggtgcactgctgcgtgtactttgtaccacccactgggcactgcctgcggcccctggacattgagttcctgcagcggctgtgccggactgtgaatgtggtgcccgtgattgccagggccgacagcctgaccatggaggagcgagaggccttcaggcgcaggatccagcagaacctgaggacccactgcatcgacgtctacccccagatgtgctttgacgaggacatcaatgacaaaatcctcaacagcaagttacgggaccgaatcccttttgccgtggtaggggctgaccaagagcacctggtgaacgggaggtgtgtcctgggccggaagaccaagtggggcatcattgaagtggagaacatggcgcactgtgaatttcctctcctgagagacctgcttatccgctcccacctccaagacctgaaggacataacccacaacatccactatgagaactaccgcgtcatcagactcaatgaaagccacctgctgccccgcgggcccggctgggtgaacctggccccggcctccccaggacagctgaccaccccccggaccttcaaggtctgcaggggggcccatgacgattctgatgatgagttctgaccaccggcggatcccggggctgctgggcttcctgagtccccagcggctctcaacacacacctatgtaccagagcatctattaaatgtgagccttgctttttatgaaaagctgtgctttgaaaacaaaa

SEQ ID NO: 179868 - DNA, 1156 bp, Homo sapiens
  Payload ID: 15446
  Gene Symbol: SEPT12
  Gene Name: septin 12
  Uniprot ID: Q8IYM1
  ENST ID: ENST00000396693
  CDS Start-End: 90-1028
cacacacaccaggccctgccaggacaaggcagctcctggaagctccaccaggacccacgtccaccaggcatctcgaacccttggcccccatggaccccctgaggcgctccccctctccctgcctgtcctcgcagccctccagccccagcaccccaccctgcgagatgcttggtcctgtgggcattgaggctgtgctggaccagctgaagatcaaggctatgaagatggggtttgagttcaacatcatggtggtggggcaaagcgggctgggcaagtccacgatggtgaacacgctgttcaagtccaaagtgtggaagtcaaacccaccgggcttgggggtgcccacaccccagacgctgcagctgcattcactgacccatgtcatagaggagaagggtgtgaagctgaagctgacggtgacggacacgcccggcttcggggaccagatcaacaatgacaactgcctgcggcccctggacattgagttcctgcagcggctgtgccggactgtgaatgtggtgcccgtgattgccagggccgacagcctgaccatggaggagcgagaggccttcaggcgcaggatccagcagaacctgaggacccactgcatcgacgtctacccccagatgtgctttgacgaggacatcaatgacaaaatcctcaacagcaagttacgggaccgaatcccttttgccgtggtaggggctgaccaagagcacctggtgaacgggaggtgtgtcctgggccggaagaccaagtggggcatcattgaagtggagaacatggcgcactgtgaatttcctctcctgagagacctgcttatccgctcccacctccaagacctgaaggacataacccacaacatccactatgagaactaccgcgtcatcagactcaatgaaagccacctgctgccccgcgggcccggctgggtgaacctggccccggcctccccaggacagctgaccaccccccggaccttcaaggtctgcaggggggcccatgacgattctgatgatgagttctgaccaccggcggatcccggggctgctgggcttcctgagtccccagcggctctcaacacacacctatgtaccagagcatctattaaatgtgagccttgctttttatgaaaagctgtgctttgaaaacaaaa

SEQ ID NO: 179869 - DNA, 509 bp, Homo sapiens
  Payload ID: 15446
  Gene Symbol: SEPT12
  Gene Name: septin 12
  ENST ID: ENST00000588241
  CDS Start-End: 1-55
cttcggggaccagatcaacaatgacaactggaccgaatcccttttgccgtggtaggggctgaccaagagcacctggtgaacgggaggtgtgtcctgggccggaagaccaagtggggcatcattgaagtggagaacatggcgcactgtgaatttcctctcctgagagacctgcttatccgctcccacctccaagacctgaaggacataacccacaacatccactatgagaactaccgcgtcatcagactcaatgaaagccacctgctgccccgcgggcccggctgggtgaacctggccccggcctccccaggacagctgaccaccccccggaccttcaaggtctgcaggggggcccatgacgattctgatgatgagttctgaccaccggcggatcccggggctgctgggcttcctgagtccccagcggctctcaacacacacctatgtaccagagcatctattaaatgtgagccttgctttttatgaaaagctgtgctttgaaaacaaaa

SEQ ID NO: 179870 - DNA, 1436 bp, Homo sapiens
  Payload ID: 15446
  Gene Symbol: SEPT12
  Gene Name: septin 12
  ENST ID: ENST00000587603
  CDS Start-End: 91-927
tcacacacaccaggccctgccaggacaaggcagctcctggaagctccaccaggacccacgtccaccaggcatctcgaacccttggcccccatggaccccctgaggcgctccccctctccctgcctgtcctcgcagccctccagccccagcaccccaccctgcgagatgcttggtcctgtgggcattgaggctgtgctggaccagctgaagatcaaggctatgaagatggggtttgagttcaacatcatggtggtggggcaaagcgggctgggcaagtccacgatggtgaacacgctgttcaagtccaaagtgtggaagtcaaacccaccgggcttgggggtgcccacaccccagacgctgcagctgcattcactgacccatgtcatagaggagaagggtgtgaagctgaagctgacggtgacggacacgcccggcttcggggaccagatcaacaatgacaactgctgggaccccatcctgggctacatcaacgagcaatacgagcagtacctgcaggaggagatcctcatcacccgccagcgccacatcccagacacccgggtgcactgctgcgtgtactttgtaccacccactgggcactgcctgcggcccctggacattgagttcctgcagcggctgtgccggactgtgaatgtggtgcccgtgattgccagggccgacagcctgaccatggaggagcgagaggccttcaggcgcaggatccagcagaacctgaggacccactgcatcgacgtctacccccagatgtgctttgacgaggacatcaatgacaaaatcctcaacagcaagttacgggtgagaggctgtggggcgggaggcgggcgaggtgatttccttcccacacatcctttccatccaaagactcatctttctctacatctcagggaaatgtgcacatattcctagcagatatgattctctactcatccacaagctcaaggaccgaatcccttttgccgtggtaggggctgaccaagagcacctggtgaacgggaggtgtgtcctgggccggaagaccaagtggggcatcattgaagtggagaacatggcgcactgtgaatttcctctcctgagagacctgcttatccgctcccacctccaagacctgaaggacataacccacaacatccactatgagaactaccgcgtcatcagactcaatgaaagccacctgctgccccgcgggcccggctgggtgaacctggccccggcctccccaggacagctgaccaccccccggaccttcaaggtctgcaggggggcccatgacgattctgatgatgagttctgaccaccggcggatcccggggctgctgggcttcctgagtccccagcggctctcaacacacacctatgtaccagagcatctattaaatgtgagccttgctttttatgaaaagctgtgctttgaaaac

SEQ ID NO: 179871 - DNA, 554 bp, Homo sapiens
  Payload ID: 15446
  Gene Symbol: SEPT12
  Gene Name: septin 12
  ENST ID: ENST00000591624
  CDS Start-End: 361-554
ctctctgccccccgtgggctcttcgcaccgctccctcccagccatcttccctgcctgaccttggtctctctctctctgtctccgtcaccttcatgcctgtgccgtctttctcgctctctatcaactctgctgtgtgtccccctggggaaagtgggggcacctcctcctgagccccctgcccaagtttcctgctgggacgggagccacttcaccccatacacactccctgaagcccctccaggactccagcctggctgcaaacacccatcctggactttgcctggccctccaggctctgctgggggaagcgacctgagaggcccctgcctgggctgtaggcatctcgaacccttggcccccatggaccccctgaggcgctccccctctccctgcctgtcctcgcagccctccagccccagcaccccaccctgcgagatgcttggtcctgtgggcattgaggctgtgctggaccagctgaagatcaaggctatgaagatggggtttgagttcaacatcatggtggtggggcaaagcgggctgggcaagtccacgat

SEQ ID NO: 179872 - DNA, 618 bp, Homo sapiens
  Payload ID: 15446
  Gene Symbol: SEPT12
  Gene Name: septin 12
  ENST ID: ENST00000590741
  CDS Start-End: 96-269
ccccatcacacacaccaggccctgccaggacaaggcagctcctggaagctccaccaggacccacgtccaccaggcatctcgaacccttggcccccatggaccccctgaggcgctccccctctccctgcctgtcctcgcagccctccagccccagcaccccaccctgcgagatgcttggtcctgtgggcattgaggctgtgctggaccagctgaagatcaaggctatgaagatggggtttgagttcaacatcatggtggtgggtgagtgagagggcaaagcgggctgggcaagtccacgatggtgaacacgctgttcaagtccaaagtgtggaagtcaaacccaccgggcttgggggtgcccacaccccagacgctgcagctgcattcactgacccatgtcatagaggagaagggtgtgaagctgaagctgacggtgacggacacgcccggcttcggggaccagatcaacaatgacaactgctgggaccccatcctgggctacatcaacgagcaatacgagcagtacctgcaggaggagatcctcatcacccgccagcgccacatcccagacacccgggtgcactgctgcgtgtactttgtaccacccactgggcactg

SEQ ID NO: 179873 - DNA, 3785 bp, Homo sapiens
  Payload ID: 15447
  Gene Symbol: SEPT14
  Gene Name: septin 14
  Uniprot ID: Q6ZU15
  ENST ID: ENST00000388975
  CDS Start-End: 118-1416
acagtgaatatttatttggtccacaactggggacagtagaaaggacaccagcttggaatcagttcggacctgtgtctgctgcacagctgaatccctgggaaactcttttagtgtagcatggcagaaagaacaatggctatgcccacacaaatacctgctgatggagatacacaaaaagaaaataatattcgttgtttaactacgattggacattttggttttgaatgtttgcccaatcagttggtgagcagatctatccgacaaggattcacttttaatattctctgtgtgggggagactggaattggaaaatcgacactgatagacacattgtttaatactaacttgaaagataacaaatcctcacatttttactcaaatgttggacttcaaattcagacatatgaacttcaggaaagcaatgttcagttgaaattgactgttgtggagacagtagggtatggtgatcaaatagacaaagaagccagctaccaaccaatagttgactacatagatgcccaatttgaggcctatcttcaagaagaactgaagattaaacgttccttgtttgagtaccatgattctcgcgtccacgtgtgtctttacttcatttcacctacaggacattccctgaagtctcttgatctattaacaatgaagaaccttgacagtaaggtgaatattataccactgattgccaaagcagacactatttctaaaaatgatttacagacgtttaagaataagataatgagtgaattgattagcaatggcatccagatatatcagctcccaacagatgaagaaactgctgctcaagcgaactcctcagttagtgggctgttaccctttgctgtggtagggagtacagatgaagtgaaagttggaaaaaggatggtcagaggccgtcactacccttggggagttttgcaagtggaaaatgaaaatcactgtgacttcgttaagctccgagatatgcttctttgtaccaatatggaaaatctaaaagaaaaaacccacactcagcactatgaatgttataggtaccaaaaactgcagaaaatgggctttacagatgtgggtccaaacaaccagccagttagttttcaagaaatctttgaagccaaaagacaagagttctatgatcaatgtcagagggaagaagaagagttgaaacagagatttatgcagcgagtcaaggagaaagaagcaacatttaaagaagctgaaaaagagctgcaggacaagttcgagcatcttaaaatgattcaacaggaggagataaggaagctcgaggaagagaaaaaacaactggaaggagaaatcatagatttttataaaatgaaagctgcctccgaagcactgcagactcagctgagcaccgatacaaagaaagacaaacatcgtaagaaataatagtttctcttactattctgagagccctatcattctacatcgcaacttcctgtgagattgtctttgtagcatttaactctgaagttctcattttaaaaattggcttgcttattgtatattttccccaactaaagtgtgaactcctagcggggtgtggtggctcatgcctgtaatcccagcactttgggaggctgaggcgggtggaccacctgaggtcaggagttcaaaaccagcctgaccaaaatgatgaaaccctgcctctactaaaaatacaaaaattagctgggtttggtggccggtacctgtaatcccagccacttgggaggctgaggcaggagaatcacttgaaccccggaggtggaggttgcagtgagccaagatctcaccattgtactccagcctgggtgacaagagcaaaactccgcctcaaaaaaaaaaaaaaaaaaaaaagtatgaactcccagaaggcagatcctgtgtccctcttttcagattctgtatcttggcacttaggacgtacactaacacaaatatgactttcaatcaatatttgccaaaatgaaaaaacaaaagaaacacgtagcatcatgtaaaaggagctggttaggtggagaaatttatttaccatagtcctgcttttggatccagtagtgacttttaacttttatatccaaatagaagctggaggctttgttggggactcataggcataaaatgttaagttatacaaatctaattaataggcctattttcctttttaagttctactactgataatttcttgacagtttttatgataaaaggttggaatttgataagaactcccatgcttttgtgtcagacttaaaactgatattagaataaagaattcaaaagctagagaaagagttgcatttgaatgataatattatgtgttacagatttggggtatatgccaaagttatcaaagttgtagaaaataaggccaggtgtggtggctcacacctgtaatcccagcactttgggaggccgaggtgggcggatcacttgcggtcaggagcttgagaacagcccggccaacatgacgaaaccccatctctactaataatacaaaagttagccgggtgtggtgttgtgcacctgtagtccctgctactcggaaagctgaggcaggagaatcgcttgtagccaggaggcagaggttgtagtgagcagagattgcgccactgcactccagcctgggtgacagagcgctgagtcaccacacctggtataagccactgtgcctgacccacaatgacttttatacatattgttaaatcatcttacagattttataatttgggggaagaaaaattttactaaatgatcttttaatggaaactctacaagaaccagaatctttgctttgttcacttatgtatccattcctaggcctagaaaaatgtctgacgcatagcagcaattattcattgaataaatggacccagcaatagtacattagctatgccatatgcatacattaaaaatgtagattattgactttcaaaagataattaatgtaacttcttactgcttctgaacatgtttgtgagttatattgctgagggacctttatcttctcattctttcatcttaatccaatgttattaaaactgaaactgaaatcaccaatattattccatatttaaaaataacatctaccttataaaaattatcattgtgctgcatttgagaatagactttttaggtaataatggtataatccatagggtttttgagggcacagaaggattcatgctaacagaacattttattttctattttccaagagctataaaacatgatattatatgatactataaggcatatttttattttccataattttttctaaaaaaaattagtgttggttttccatataacttttaactttataagtaaatatttgtctctttcagctccagtttcatgtgaaatagagtttccagatttatgtagcatggaaagttttaatacgtcagttactgatttttgccagtcattttctcaattatttacttcttttatctttagttgattttttttgtagtgacaagttttgtttctattctcatttccttttgtgtatattctatgtagatttcgtttttggttactatgaaaattacatataacatcctggagttataacattctgatttgaatttatttcaacttaacttcaatcacataccaaaattctactgctatataggtctactctttttaggttattgatgtaacaaattgtatctttattcattgtacaccacctaacagatttataattacattttatgcatttgtcttttaaatcctgtagaaaataaaaagcggagttacaaacc

SEQ ID NO: 179874 - DNA, 3613 bp, Homo sapiens
  Payload ID: 15448
  Gene Symbol: SEPT2
  Gene Name: septin 2
  Uniprot ID: Q15019
  ENST ID: ENST00000360051
  CDS Start-End: 441-1526
gatcatcgagacggcggcggtggtgggctagacgagtttcgcgcggccgctcgccgtcccccgcccagtcgtactcggcgccccagctcggtgctgccgccatcttcttggaggacaggaggagaggcgaaggctccccctccccgtgatcgctccgcactcccgccaccacctgccctcccgcgaccgcctctctcctcctcagtgggcacttgtctccttctaacaaacggccttccccccactccagttacccaccgcaaggcgaagattctcattacctgttccactcttataagcataagaaaaccgagctcataagcatacagaaactgctgtaaaagaagaagttgtgggtatttttttttttttttttgtctggaggaatggggacaccaaaactcatttggcagcagaggtgagacgaagcttcacaaaagatgtctaagcaacagccaactcagtttataaatccagaaacacctggctatgttggatttgcaaacctccccaatcaagttcaccgaaaatcagtgaaaaaaggttttgagttcacactgatggtggtcggtgaatcaggtctaggaaaatcgactctcataaacagcctattcctaactgatctgtacccagaaagagtcatacctggagcagcagaaaaaattgaaagaactgtccagattgaggcttcaactgttgaaattgaagagcgaggggtcaagctacgcctgacagtggtagatacccctggctatggtgacgctatcaactgcagagattgttttaagacaattatctcctatattgatgagcaatttgagaggtacctgcatgacgagagcggcttgaacaggcggcacatcattgataatagggtgcattgttgcttttactttatttcaccttttggacatggacttaagcccttagatgtggcgtttatgaaggcaatacacaacaaggtgaatattgtgcctgtcattgcaaaagctgacactctcaccctgaaggaacgggagcggctgaagaaaaggattctggatgaaattgaagaacataacatcaaaatctatcacttacctgatgcagaatcagatgaagatgaagattttaaagagcagactagacttctcaaggctagcatcccattctctgtggttggatccaatcagttgattgaagccaaaggaaagaaggtcagaggccgcctctacccctggggtgttgtggaagtggagaacccagagcacaatgactttctgaagctgagaaccatgctcatcacccacatgcaggatctccaggaggtgacccaggaccttcattatgaaaacttccgttctgagagactcaagagaggcggcaggaaagtggagaatgaggacatgaataaagaccagatcttgctggaaaaagaagctgagctccgccgcatgcaagagatgattgcaaggatgcaggcgcagatgcagatgcagatgcagggcggggatggcgatggcggggctctcgggcaccacgtgtaaggtgatgtgcacatatcaagaagtcagagaaaacactttcctggataaaaaagaaaacattccagatgcatgatccagctgtgtgttttcaatccttgggagggtgccatccacattttaacagtacctgtgcctgagaatttaatttttaaaagactttgatgtgtttttgtatgaagtacttttaacgtatgtatttcattgctgtgtcacactctgtgttttgtgaggtgaatgtcttccttttctttctccctaaccactaatgttagaattgatttccaagaatcggcatgtatacttaatactgaatttctttgatttaactgacttaacaactgactaaccattgatgagcactcctgatttttatctagaacattcagatttaccataatgttccttagtggtagaggtgtgtgcctagtgatgtagaaagatacactgacttggtgcaaggccatctgcttaccacatcacaccacttggagatctttgcttccttgcttttatgtttgtacacaacacctaaaaccagttttgctgctataattctatactgttgattcgtctgcgattttatctgttaaccaaataaaacataatagaatttcctaatgagatatatctttatacttaaacagcttttttagaggtgagttttaaagaagtctcttaattctgatgctaggttgtttttaaaaccactatgcaaagaactcaccacaagccaccttttgtagtgttctccactaatactggttatcctgtgctacagagaaaatcaaagcagtcataagctccagttttcgtattgcaaataagactcttacctacaaaatgagattcagtgaactaatttggtttttactcaaccaaattaaaaatttttttaaggaaaattagcagttggtctattcagaatcaaacctttttatattttatactgcactttagtgtattttctgtcactgtaggtatagaagatctgcctcccctgtggaaattggggtctgttggtgggcgtgcccctgaagcctggcttgggttgaaaagtgttcccgccctaaggccttggtgccctgaacctctgatgcctaccgggttctcctgatttgagtttcctttaaatactccctttttgagtaattttctgatgggaggaaagtagcagtcatcatctttttgtgtgcaggctgtctcatttatttttagccattgtcgtttcattcattttgtgtaatataaaccgtgtgtcatgtcaaagtgaaagacatttcaaatctgtagcataggctagtgggcaggtccgcacagtcgaagccacacctggtctgttttctgtgcactgtagccttagtgtcacctttcttcttgtgtctccttatggtacactccagcggttgccttttttatcatttctactgaagttgggaaattcaaccccagaaattgacagatgaaaggagacaatggttgtgtagggagatggagaaaatgcttaatctgaggatgagacagggttttttcatttttgtgggggctagaaaaaacataaaatgaggcagttaaataataatagttaatgaaggtgtgctacagaaaataatctggtgttcttgctaactttgcccttcactgttgcttaattgtgaacagccaaaagctatatgttatggcttattgtgtgaaggtaactaagaagtggtgttccatgacttcagagtacatccatgcggagtccattatttgagtttgacatttaataactttgctggaaaatctgtaaaaaagaaaaacaagtttgctagtgactaagccccgcatatgtgagtgaaagtacttcaggcacgctgcctcctggtaacagctatgcagggagggaggacccacactgctacacttctgatcccctttggttttactacccaaatctaaatagatacttttgataatagataactgctcttttactaagacatagtctctacctatagaaatgtattttgaaaacacttattttacacagcaattttgtatccatttaaactaaccttttatcaataaagcactattgtttagatatt

SEQ ID NO: 179875 - DNA, 3315 bp, Homo sapiens
  Payload ID: 15448
  Gene Symbol: SEPT2
  Gene Name: septin 2
  Uniprot ID: Q15019
  ENST ID: ENST00000391971
  CDS Start-End: 140-1225
gacgcaatccgcctgcgcgctgggcggggcggggcgggctggggcgggctgtgagcggaccgcgagcgctgggcgggtccgcggcgcggtcggtcggcgcctgttctcgggctgtttggcggacgaagcttcacaaaagatgtctaagcaacagccaactcagtttataaatccagaaacacctggctatgttggatttgcaaacctccccaatcaagttcaccgaaaatcagtgaaaaaaggttttgagttcacactgatggtggtcggtgaatcaggtctaggaaaatcgactctcataaacagcctattcctaactgatctgtacccagaaagagtcatacctggagcagcagaaaaaattgaaagaactgtccagattgaggcttcaactgttgaaattgaagagcgaggggtcaagctacgcctgacagtggtagatacccctggctatggtgacgctatcaactgcagagattgttttaagacaattatctcctatattgatgagcaatttgagaggtacctgcatgacgagagcggcttgaacaggcggcacatcattgataatagggtgcattgttgcttttactttatttcaccttttggacatggacttaagcccttagatgtggcgtttatgaaggcaatacacaacaaggtgaatattgtgcctgtcattgcaaaagctgacactctcaccctgaaggaacgggagcggctgaagaaaaggattctggatgaaattgaagaacataacatcaaaatctatcacttacctgatgcagaatcagatgaagatgaagattttaaagagcagactagacttctcaaggctagcatcccattctctgtggttggatccaatcagttgattgaagccaaaggaaagaaggtcagaggccgcctctacccctggggtgttgtggaagtggagaacccagagcacaatgactttctgaagctgagaaccatgctcatcacccacatgcaggatctccaggaggtgacccaggaccttcattatgaaaacttccgttctgagagactcaagagaggcggcaggaaagtggagaatgaggacatgaataaagaccagatcttgctggaaaaagaagctgagctccgccgcatgcaagagatgattgcaaggatgcaggcgcagatgcagatgcagatgcagggcggggatggcgatggcggggctctcgggcaccacgtgtaaggtgatgtgcacatatcaagaagtcagagaaaacactttcctggataaaaaagaaaacattccagatgcatgatccagctgtgtgttttcaatccttgggagggtgccatccacattttaacagtacctgtgcctgagaatttaatttttaaaagactttgatgtgtttttgtatgaagtacttttaacgtatgtatttcattgctgtgtcacactctgtgttttgtgaggtgaatgtcttccttttctttctccctaaccactaatgttagaattgatttccaagaatcggcatgtatacttaatactgaatttctttgatttaactgacttaacaactgactaaccattgatgagcactcctgatttttatctagaacattcagatttaccataatgttccttagtggtagaggtgtgtgcctagtgatgtagaaagatacactgacttggtgcaaggccatctgcttaccacatcacaccacttggagatctttgcttccttgcttttatgtttgtacacaacacctaaaaccagttttgctgctataattctatactgttgattcgtctgcgattttatctgttaaccaaataaaacataatagaatttcctaatgagatatatctttatacttaaacagcttttttagaggtgagttttaaagaagtctcttaattctgatgctaggttgtttttaaaaccactatgcaaagaactcaccacaagccaccttttgtagtgttctccactaatactggttatcctgtgctacagagaaaatcaaagcagtcataagctccagttttcgtattgcaaataagactcttacctacaaaatgagattcagtgaactaatttggtttttactcaaccaaattaaaaatttttttaaggaaaattagcagttggtctattcagaatcaaacctttttatattttatactgcactttagtgtattttctgtcactgtaggtatagaagatctgcctcccctgtggaaattggggtctgttggtgggcgtgcccctgaagcctggcttgggttgaaaagtgttcccgccctaaggccttggtgccctgaacctctgatgcctaccgggttctcctgatttgagtttcctttaaatactccctttttgagtaattttctgatgggaggaaagtagcagtcatcatctttttgtgtgcaggctgtctcatttatttttagccattgtcgtttcattcattttgtgtaatataaaccgtgtgtcatgtcaaagtgaaagacatttcaaatctgtagcataggctagtgggcaggtccgcacagtcgaagccacacctggtctgttttctgtgcactgtagccttagtgtcacctttcttcttgtgtctccttatggtacactccagcggttgccttttttatcatttctactgaagttgggaaattcaaccccagaaattgacagatgaaaggagacaatggttgtgtagggagatggagaaaatgcttaatctgaggatgagacagggttttttcatttttgtgggggctagaaaaaacataaaatgaggcagttaaataataatagttaatgaaggtgtgctacagaaaataatctggtgttcttgctaactttgcccttcactgttgcttaattgtgaacagccaaaagctatatgttatggcttattgtgtgaaggtaactaagaagtggtgttccatgacttcagagtacatccatgcggagtccattatttgagtttgacatttaataactttgctggaaaatctgtaaaaaagaaaaacaagtttgctagtgactaagccccgcatatgtgagtgaaagtacttcaggcacgctgcctcctggtaacagctatgcagggagggaggacccacactgctacacttctgatcccctttggttttactacccaaatctaaatagatacttttgataatagataactgctcttttactaagacatagtctctacctatagaaatgtattttgaaaacacttattttacacagcaattttgtatccatttaaactaaccttttatcaataaagcactattgtttagatattaaa

SEQ ID NO: 179876 - DNA, 3701 bp, Homo sapiens
  Payload ID: 15448
  Gene Symbol: SEPT2
  Gene Name: septin 2
  Uniprot ID: Q15019
  ENST ID: ENST00000391973
  CDS Start-End: 529-1614
acctcgggccccacaccagaaggagaaagctaggggccgcgccagctccgccctcccccgcggggcggcgggccccagcccgggcacaggaaggccacgtccccggggagggacgcccgactcgatggtctgcgcagggcccgtcggccccacgtgacgtgcgcgcagccaatcccagagaggccccccgatcatcgagacggcggcggtggtgggctagacgagtttcgcgcggccgctcgccgtcccccgcccagtcgtactcggcgccccagctcggtgctgccgccatcttcttggaggacaggaggagaggcgaaggctccccctccccgtgatcgctccgcactcccgccaccacctgccctcccgcgaccgcctctctcctcctcagtgggcacttgtctccttctaacaaacggccttccccccactccagttacccaccgcaaggcgaagattctcattacctgttccactcttataagcataagaaaaccgagctcataagacgaagcttcacaaaagatgtctaagcaacagccaactcagtttataaatccagaaacacctggctatgttggatttgcaaacctccccaatcaagttcaccgaaaatcagtgaaaaaaggttttgagttcacactgatggtggtcggtgaatcaggtctaggaaaatcgactctcataaacagcctattcctaactgatctgtacccagaaagagtcatacctggagcagcagaaaaaattgaaagaactgtccagattgaggcttcaactgttgaaattgaagagcgaggggtcaagctacgcctgacagtggtagatacccctggctatggtgacgctatcaactgcagagattgttttaagacaattatctcctatattgatgagcaatttgagaggtacctgcatgacgagagcggcttgaacaggcggcacatcattgataatagggtgcattgttgcttttactttatttcaccttttggacatggacttaagcccttagatgtggcgtttatgaaggcaatacacaacaaggtgaatattgtgcctgtcattgcaaaagctgacactctcaccctgaaggaacgggagcggctgaagaaaaggattctggatgaaattgaagaacataacatcaaaatctatcacttacctgatgcagaatcagatgaagatgaagattttaaagagcagactagacttctcaaggctagcatcccattctctgtggttggatccaatcagttgattgaagccaaaggaaagaaggtcagaggccgcctctacccctggggtgttgtggaagtggagaacccagagcacaatgactttctgaagctgagaaccatgctcatcacccacatgcaggatctccaggaggtgacccaggaccttcattatgaaaacttccgttctgagagactcaagagaggcggcaggaaagtggagaatgaggacatgaataaagaccagatcttgctggaaaaagaagctgagctccgccgcatgcaagagatgattgcaaggatgcaggcgcagatgcagatgcagatgcagggcggggatggcgatggcggggctctcgggcaccacgtgtaaggtgatgtgcacatatcaagaagtcagagaaaacactttcctggataaaaaagaaaacattccagatgcatgatccagctgtgtgttttcaatccttgggagggtgccatccacattttaacagtacctgtgcctgagaatttaatttttaaaagactttgatgtgtttttgtatgaagtacttttaacgtatgtatttcattgctgtgtcacactctgtgttttgtgaggtgaatgtcttccttttctttctccctaaccactaatgttagaattgatttccaagaatcggcatgtatacttaatactgaatttctttgatttaactgacttaacaactgactaaccattgatgagcactcctgatttttatctagaacattcagatttaccataatgttccttagtggtagaggtgtgtgcctagtgatgtagaaagatacactgacttggtgcaaggccatctgcttaccacatcacaccacttggagatctttgcttccttgcttttatgtttgtacacaacacctaaaaccagttttgctgctataattctatactgttgattcgtctgcgattttatctgttaaccaaataaaacataatagaatttcctaatgagatatatctttatacttaaacagcttttttagaggtgagttttaaagaagtctcttaattctgatgctaggttgtttttaaaaccactatgcaaagaactcaccacaagccaccttttgtagtgttctccactaatactggttatcctgtgctacagagaaaatcaaagcagtcataagctccagttttcgtattgcaaataagactcttacctacaaaatgagattcagtgaactaatttggtttttactcaaccaaattaaaaatttttttaaggaaaattagcagttggtctattcagaatcaaacctttttatattttatactgcactttagtgtattttctgtcactgtaggtatagaagatctgcctcccctgtggaaattggggtctgttggtgggcgtgcccctgaagcctggcttgggttgaaaagtgttcccgccctaaggccttggtgccctgaacctctgatgcctaccgggttctcctgatttgagtttcctttaaatactccctttttgagtaattttctgatgggaggaaagtagcagtcatcatctttttgtgtgcaggctgtctcatttatttttagccattgtcgtttcattcattttgtgtaatataaaccgtgtgtcatgtcaaagtgaaagacatttcaaatctgtagcataggctagtgggcaggtccgcacagtcgaagccacacctggtctgttttctgtgcactgtagccttagtgtcacctttcttcttgtgtctccttatggtacactccagcggttgccttttttatcatttctactgaagttgggaaattcaaccccagaaattgacagatgaaaggagacaatggttgtgtagggagatggagaaaatgcttaatctgaggatgagacagggttttttcatttttgtgggggctagaaaaaacataaaatgaggcagttaaataataatagttaatgaaggtgtgctacagaaaataatctggtgttcttgctaactttgcccttcactgttgcttaattgtgaacagccaaaagctatatgttatggcttattgtgtgaaggtaactaagaagtggtgttccatgacttcagagtacatccatgcggagtccattatttgagtttgacatttaataactttgctggaaaatctgtaaaaaagaaaaacaagtttgctagtgactaagccccgcatatgtgagtgaaagtacttcaggcacgctgcctcctggtaacagctatgcagggagggaggacccacactgctacacttctgatcccctttggttttactacccaaatctaaatagatacttttgataatagataactgctcttttactaagacatagtctctacctatagaaatgtattttgaaaacacttattttacacagcaattttgtatccatttaaactaaccttttatcaataaagcactattgtttagatatt

SEQ ID NO: 179877 - DNA, 3267 bp, Homo sapiens
  Payload ID: 15448
  Gene Symbol: SEPT2
  Gene Name: septin 2
  ENST ID: ENST00000407971
  CDS Start-End: 212-1177
ggcggggcggggcgggctggggcgggctgtgagcggaccgcgagcgctgggcgggtccgcggcgcggtcggtcggcgcctgttctcgggctgtttggcggcaacagccaactcagtttataaatccagaaacacctggctatgttggatttgcaaacctccccaatcaagttcaccgaaaatcagtgaaaaaaggttttgagttcacactgatggtggtcggtgaatcaggtctaggaaaatcgactctcataaacagcctattcctaactgatctgtacccagaaagagtcatacctggagcagcagaaaaaattgaaagaactgtccagattgaggcttcaactgttgaaattgaagagcgaggggtcaagctacgcctgacagtggtagatacccctggctatggtgacgctatcaactgcagagattgttttaagacaattatctcctatattgatgagcaatttgagaggtacctgcatgacgagagcggcttgaacaggcggcacatcattgataatagggtgcattgttgcttttactttatttcaccttttggacatggacttaagcccttagatgtggcgtttatgaaggcaatacacaacaaggtgaatattgtgcctgtcattgcaaaagctgacactctcaccctgaaggaacgggagcggctgaagaaaaggattctggatgaaattgaagaacataacatcaaaatctatcacttacctgatgcagaatcagatgaagatgaagattttaaagagcagactagacttctcaaggctagcatcccattctctgtggttggatccaatcagttgattgaagccaaaggaaagaaggtcagaggccgcctctacccctggggtgttgtggaagtggagaacccagagcacaatgactttctgaagctgagaaccatgctcatcacccacatgcaggatctccaggaggtgacccaggaccttcattatgaaaacttccgttctgagagactcaagagaggcggcaggaaagtggagaatgaggacatgaataaagaccagatcttgctggaaaaagaagctgagctccgccgcatgcaagagatgattgcaaggatgcaggcgcagatgcagatgcagatgcagggcggggatggcgatggcggggctctcgggcaccacgtgtaaggtgatgtgcacatatcaagaagtcagagaaaacactttcctggataaaaaagaaaacattccagatgcatgatccagctgtgtgttttcaatccttgggagggtgccatccacattttaacagtacctgtgcctgagaatttaatttttaaaagactttgatgtgtttttgtatgaagtacttttaacgtatgtatttcattgctgtgtcacactctgtgttttgtgaggtgaatgtcttccttttctttctccctaaccactaatgttagaattgatttccaagaatcggcatgtatacttaatactgaatttctttgatttaactgacttaacaactgactaaccattgatgagcactcctgatttttatctagaacattcagatttaccataatgttccttagtggtagaggtgtgtgcctagtgatgtagaaagatacactgacttggtgcaaggccatctgcttaccacatcacaccacttggagatctttgcttccttgcttttatgtttgtacacaacacctaaaaccagttttgctgctataattctatactgttgattcgtctgcgattttatctgttaaccaaataaaacataatagaatttcctaatgagatatatctttatacttaaacagcttttttagaggtgagttttaaagaagtctcttaattctgatgctaggttgtttttaaaaccactatgcaaagaactcaccacaagccaccttttgtagtgttctccactaatactggttatcctgtgctacagagaaaatcaaagcagtcataagctccagttttcgtattgcaaataagactcttacctacaaaatgagattcagtgaactaatttggtttttactcaaccaaattaaaaatttttttaaggaaaattagcagttggtctattcagaatcaaacctttttatattttatactgcactttagtgtattttctgtcactgtaggtatagaagatctgcctcccctgtggaaattggggtctgttggtgggcgtgcccctgaagcctggcttgggttgaaaagtgttcccgccctaaggccttggtgccctgaacctctgatgcctaccgggttctcctgatttgagtttcctttaaatactccctttttgagtaattttctgatgggaggaaagtagcagtcatcatctttttgtgtgcaggctgtctcatttatttttagccattgtcgtttcattcattttgtgtaatataaaccgtgtgtcatgtcaaagtgaaagacatttcaaatctgtagcataggctagtgggcaggtccgcacagtcgaagccacacctggtctgttttctgtgcactgtagccttagtgtcacctttcttcttgtgtctccttatggtacactccagcggttgccttttttatcatttctactgaagttgggaaattcaaccccagaaattgacagatgaaaggagacaatggttgtgtagggagatggagaaaatgcttaatctgaggatgagacagggttttttcatttttgtgggggctagaaaaaacataaaatgaggcagttaaataataatagttaatgaaggtgtgctacagaaaataatctggtgttcttgctaactttgcccttcactgttgcttaattgtgaacagccaaaagctatatgttatggcttattgtgtgaaggtaactaagaagtggtgttccatgacttcagagtacatccatgcggagtccattatttgagtttgacatttaataactttgctggaaaatctgtaaaaaagaaaaacaagtttgctagtgactaagccccgcatatgtgagtgaaagtacttcaggcacgctgcctcctggtaacagctatgcagggagggaggacccacactgctacacttctgatcccctttggttttactacccaaatctaaatagatacttttgataatagataactgctcttttactaagacatagtctctacctatagaaatgtattttgaaaacacttattttacacagcaattttgtatccatttaaactaaccttttatcaataaagcactattgtttagatattaaa

SEQ ID NO: 179878 - DNA, 1734 bp, Homo sapiens
  Payload ID: 15448
  Gene Symbol: SEPT2
  Gene Name: septin 2
  Uniprot ID: Q15019
  ENST ID: ENST00000401990
  CDS Start-End: 447-1562
gggcggggcggggcgggctggggcgggctgtgagcggaccgcgagcgctgggcgggtccgcggcgcggtcggtcggcgcctgttctcgggctgtttggcgggcgtggaggactggccagcccccaaacctccaagcccatcggctggatgccgtggataagcgaggggagagcgactaggccctgtctgcgggtaccttcggcgaggagaggcgacgaagcatacagaaactgctgtaaaagaagaagttgtgggtatttttttttttttttttgtctggaggaatggggacaccaaaactcatttggcagcagaggtgagggttcagtgaggctgaggggttctgtggaggtgcgggagaggtgctctatggtatttctatgttgcactgtgtgggtttgaaatcagatacatgtaataggtgataagacgaagcttcacaaaagatgtctaagcaacagccaactcagtttataaatccagaaacacctggctatgttggatttgcaaacctccccaatcaagttcaccgaaaatcagtgaaaaaaggttttgagttcacactgatggtggtcggtgaatcaggtctaggaaaatcgactctcataaacagcctattcctaactgatctgtacccagaaagagtcatacctggagcagcagctttgaacacaaggaaaacacttttatgggaaaaaattgaaagaactgtccagattgaggcttcaactgttgaaattgaagagcgaggggtcaagctacgcctgacagtggtagatacccctggctatggtgacgctatcaactgcagagattgttttaagacaattatctcctatattgatgagcaatttgagaggtacctgcatgacgagagcggcttgaacaggcggcacatcattgataatagggtgcattgttgcttttactttatttcaccttttggacatggacttaagcccttagatgtggcgtttatgaaggcaatacacaacaaggtgaatattgtgcctgtcattgcaaaagctgacactctcaccctgaaggaacgggagcggctgaagaaaaggattctggatgaaattgaagaacataacatcaaaatctatcacttacctgatgcagaatcagatgaagatgaagattttaaagagcagactagacttctcaaggctagcatcccattctctgtggttggatccaatcagttgattgaagccaaaggaaagaaggtcagaggccgcctctacccctggggtgttgtggaagtggagaacccagagcacaatgactttctgaagctgagaaccatgctcatcacccacatgcaggatctccaggaggtgacccaggaccttcattatgaaaacttccgttctgagagactcaagagaggcggcaggaaagtggagaatgaggacatgaataaagaccagatcttgctggaaaaagaagctgagctccgccgcatgcaagagatgattgcaaggatgcaggcgcagatgcagatgcagatgcagggcggggatggcgatggcggggctctcgggcaccacgtgtaaggtgatgtgcacatatcaagaagtcagagaaaacactttcctggataaaaaagaaaacattccagatgcatgatccagctgtgtgttttcaatccttgggagggtgccatccacattttaacagtacctgtgcctgagaatttaatttttaaaagactttgatgtgtttttg

SEQ ID NO: 179879 - DNA, 3333 bp, Homo sapiens
  Payload ID: 15448
  Gene Symbol: SEPT2
  Gene Name: septin 2
  Uniprot ID: Q15019
  ENST ID: ENST00000402092
  CDS Start-End: 158-1243
gctgggcgggtccgcggcgcggtcggtcggcgcctgttctcgggctgtttggcggaggcttggaatagttaaatgactttggtcttgtccaaggttagatggagttcaactctaacgtcaagtcttggtccttttcattgacgaagcttcacaaaagatgtctaagcaacagccaactcagtttataaatccagaaacacctggctatgttggatttgcaaacctccccaatcaagttcaccgaaaatcagtgaaaaaaggttttgagttcacactgatggtggtcggtgaatcaggtctaggaaaatcgactctcataaacagcctattcctaactgatctgtacccagaaagagtcatacctggagcagcagaaaaaattgaaagaactgtccagattgaggcttcaactgttgaaattgaagagcgaggggtcaagctacgcctgacagtggtagatacccctggctatggtgacgctatcaactgcagagattgttttaagacaattatctcctatattgatgagcaatttgagaggtacctgcatgacgagagcggcttgaacaggcggcacatcattgataatagggtgcattgttgcttttactttatttcaccttttggacatggacttaagcccttagatgtggcgtttatgaaggcaatacacaacaaggtgaatattgtgcctgtcattgcaaaagctgacactctcaccctgaaggaacgggagcggctgaagaaaaggattctggatgaaattgaagaacataacatcaaaatctatcacttacctgatgcagaatcagatgaagatgaagattttaaagagcagactagacttctcaaggctagcatcccattctctgtggttggatccaatcagttgattgaagccaaaggaaagaaggtcagaggccgcctctacccctggggtgttgtggaagtggagaacccagagcacaatgactttctgaagctgagaaccatgctcatcacccacatgcaggatctccaggaggtgacccaggaccttcattatgaaaacttccgttctgagagactcaagagaggcggcaggaaagtggagaatgaggacatgaataaagaccagatcttgctggaaaaagaagctgagctccgccgcatgcaagagatgattgcaaggatgcaggcgcagatgcagatgcagatgcagggcggggatggcgatggcggggctctcgggcaccacgtgtaaggtgatgtgcacatatcaagaagtcagagaaaacactttcctggataaaaaagaaaacattccagatgcatgatccagctgtgtgttttcaatccttgggagggtgccatccacattttaacagtacctgtgcctgagaatttaatttttaaaagactttgatgtgtttttgtatgaagtacttttaacgtatgtatttcattgctgtgtcacactctgtgttttgtgaggtgaatgtcttccttttctttctccctaaccactaatgttagaattgatttccaagaatcggcatgtatacttaatactgaatttctttgatttaactgacttaacaactgactaaccattgatgagcactcctgatttttatctagaacattcagatttaccataatgttccttagtggtagaggtgtgtgcctagtgatgtagaaagatacactgacttggtgcaaggccatctgcttaccacatcacaccacttggagatctttgcttccttgcttttatgtttgtacacaacacctaaaaccagttttgctgctataattctatactgttgattcgtctgcgattttatctgttaaccaaataaaacataatagaatttcctaatgagatatatctttatacttaaacagcttttttagaggtgagttttaaagaagtctcttaattctgatgctaggttgtttttaaaaccactatgcaaagaactcaccacaagccaccttttgtagtgttctccactaatactggttatcctgtgctacagagaaaatcaaagcagtcataagctccagttttcgtattgcaaataagactcttacctacaaaatgagattcagtgaactaatttggtttttactcaaccaaattaaaaatttttttaaggaaaattagcagttggtctattcagaatcaaacctttttatattttatactgcactttagtgtattttctgtcactgtaggtatagaagatctgcctcccctgtggaaattggggtctgttggtgggcgtgcccctgaagcctggcttgggttgaaaagtgttcccgccctaaggccttggtgccctgaacctctgatgcctaccgggttctcctgatttgagtttcctttaaatactccctttttgagtaattttctgatgggaggaaagtagcagtcatcatctttttgtgtgcaggctgtctcatttatttttagccattgtcgtttcattcattttgtgtaatataaaccgtgtgtcatgtcaaagtgaaagacatttcaaatctgtagcataggctagtgggcaggtccgcacagtcgaagccacacctggtctgttttctgtgcactgtagccttagtgtcacctttcttcttgtgtctccttatggtacactccagcggttgccttttttatcatttctactgaagttgggaaattcaaccccagaaattgacagatgaaaggagacaatggttgtgtagggagatggagaaaatgcttaatctgaggatgagacagggttttttcatttttgtgggggctagaaaaaacataaaatgaggcagttaaataataatagttaatgaaggtgtgctacagaaaataatctggtgttcttgctaactttgcccttcactgttgcttaattgtgaacagccaaaagctatatgttatggcttattgtgtgaaggtaactaagaagtggtgttccatgacttcagagtacatccatgcggagtccattatttgagtttgacatttaataactttgctggaaaatctgtaaaaaagaaaaacaagtttgctagtgactaagccccgcatatgtgagtgaaagtacttcaggcacgctgcctcctggtaacagctatgcagggagggaggacccacactgctacacttctgatcccctttggttttactacccaaatctaaatagatacttttgataatagataactgctcttttactaagacatagtctctacctatagaaatgtattttgaaaacacttattttacacagcaattttgtatccatttaaactaaccttttatcaataaagcactattgtttagatattaaa

SEQ ID NO: 179880 - DNA, 650 bp, Homo sapiens
  Payload ID: 15448
  Gene Symbol: SEPT2
  Gene Name: septin 2
  ENST ID: ENST00000407017
  CDS Start-End: 368-650
agtcgtactcggcgccccagctcggtgctgccgccatcttcttggaggacaggaggagaggcgaaggctccccctccccgtgatcgctccgcactcccgccaccacctgccctcccgcgaccgcctctctcctcctcagtgggcacttgtctccttctaacaaacggccttccccccactccagttacccaccgcaaggcgaagattctcattacctgttccactcttataagcataagaaaaccgagctcataagcaacagccaactcagtttataaatccagaaacacctggctatgttggatttgcaaacctccccaatcaagttcaccgaaaatcagtgaaaaaaggttttgagttcacactgatggtggtcggtgaatcaggtctaggaaaatcgactctcataaacagcctattcctaactgatctgtacccagaaagagtcatacctggagcagcagaaaaaattgaaagaactgtccagattgaggcttcaactgttgaaattgaagagcgaggggtcaagctacgcctgacagtggtagatacccctggctatggtgacgctatcaactgcagagattggtatgctcccccatgcccagggatctgcatttgtttacttaatatacttcataaatttatag

SEQ ID NO: 179881 - DNA, 644 bp, Homo sapiens
  Payload ID: 15448
  Gene Symbol: SEPT2
  Gene Name: septin 2
  ENST ID: ENST00000428524
  CDS Start-End: 494-644
agtcgtactcggcgccccagctcggtgctgccgccatcttcttggaggacaggaggagaggcgaaggctccccctccccgtgatcgctccgcactcccgccaccacctgccctcccgcgaccgcctctctcctcctcagtgggcacttgtctccttctaacaaacggccttccccccactccagttacccaccgcaaggcgaagattctcattacctgttccactcttataagcataagaaaaccgagctcataaggcgtggaggactggccagcccccaaacctccaagcccatcggctggatgccgtggataagcgaggggagagcgactaggccctgtctgcgggtaccttcggcgaggagaggcgacgaagcatacagaaactgctgtaaaagaagaagttgtgggtatttttttttttttttttgtctggaggaatggggacaccaaaactcatttggcagcagaggtgagacgaagcttcacaaaagatgtctaagcaacagccaactcagtttataaatccagaaacacctggctatgttggatttgcaaacctccccaatcaagttcaccgaaaatcagtgaaaaaaggttttgagttcacactgatggtggtcggtgaatcaggtctaggaaaat

SEQ ID NO: 179882 - DNA, 599 bp, Homo sapiens
  Payload ID: 15448
  Gene Symbol: SEPT2
  Gene Name: septin 2
  ENST ID: ENST00000449239
  CDS Start-End: 80-599
tgcgtatacatacatactatgtatgtgcgtttatgtgtgtctgtgtgttttttttttaacagacgaagcttcacaaaagatgtctaagcaacagccaactcagtttataaatccagaaacacctggctatgttggatttgcaaacctccccaatcaagttcaccgaaaatcagtgaaaaaaggttttgagttcacactgatggtggtcggtgaatcaggtctaggaaaatcgactctcataaacagcctattcctaactgatctgtacccagaaagagtcatacctggagcagcagaaaaaattgaaagaactgtccagattgaggcttcaactgttgaaattgaagagcgaggggtcaagctacgcctgacagtggtagatacccctggctatggtgacgctatcaactgcagagattgttttaagacaattatctcctatattgatgagcaatttgagaggtacctgcatgacgagagcggcttgaacaggcggcacatcattgataatagggtgcattgttgcttttactttatttcaccttttggacatggacttaagcccttagatgtggcgtttatgaaggcaatacacaaca

SEQ ID NO: 179883 - DNA, 561 bp, Homo sapiens
  Payload ID: 15448
  Gene Symbol: SEPT2
  Gene Name: septin 2
  ENST ID: ENST00000411484
  CDS Start-End: 121-561
gggctgtgagcggaccgcgagcgctgggcgggtccgcggcgcggtcggtcggcgcctgttctcgggctgtttggcggaggcttggaatagttaaatgactttggtcttgtccaaggttagatggagttcaactctaacgtcaagtcttggtccttttcattgcaacagccaactcagtttataaatccagaaacacctggctatgttggatttgcaaacctccccaatcaagttcaccgaaaatcagtgaaaaaaggttttgagttcacactgatggtggtcggtgaatcaggtctaggaaaatcgactctcataaacagcctattcctaactgatctgtacccagaaagagtcatacctggagcagcagaaaaaattgaaagaactgtccagattgaggcttcaactgttgaaattgaagagcgaggggtcaagctacgcctgacagtggtagatacccctggctatggtgacgctatcaactgcagagattgttttaagacaattatctcctatattgatgagcaatttgagaggtacctgcatgacgagagcggcttg

SEQ ID NO: 179884 - DNA, 1005 bp, Homo sapiens
  Payload ID: 15448
  Gene Symbol: SEPT2
  Gene Name: septin 2
  ENST ID: ENST00000428282
  CDS Start-End: 453-1005
aatcccagagaggccccccgatcatcgagacggcggcggtggtgggctagacgagtttcgcgcggccgctcgccgtcccccgcccagtcgtactcggcgccccagctcggtgctgccgccatcttcttggaggacaggaggagaggcgaaggctccccctccccgtgatcgctccgcactcccgccaccacctgccctcccgcgaccgcctctctcctcctcagtgggcacttgtctccttctaacaaacggccttccccccactccagttacccaccgcaaggcgaagattctcattacctgttccactcttataagcataagaaaaccgagctcataagcaacagccaactcagtttataaatccagaaacacctggctatgttggatttgcaaacctccccaatcaagttcaccgaaaatcagtgaaaaaaggttttgagttcacactgatggtggtcggtgaatcaggtctaggaaaatcgactctcataaacagcctattcctaactgatctgtacccagaaagagtcatacctggagcagcagaaaaaattgaaagaactgtccagattgaggcttcaactgttgaaattgaagagcgaggggtcaagctacgcctgacagtggtagatacccctggctatggtgacgctatcaactgcagagattgttttaagacaattatctcctatattgatgagcaatttgagaggtacctgcatgacgagagcggcttgaacaggcggcacatcattgataatagggtgcattgttgcttttactttatttcaccttttggacatggacttaagcccttagatgtggcgtttatgaaggcaatacacaacaaggtgaatattgtgcctgtcattgcaaaagctgacactctcaccctgaaggaacgggagcggctgaagaaaaggattctggatgaaattgaagaacataacatcaaaatctatcacttacctgatgcagaatcagatgaagatgaagatttta

SEQ ID NO: 179885 - DNA, 570 bp, Homo sapiens
  Payload ID: 15448
  Gene Symbol: SEPT2
  Gene Name: septin 2
  ENST ID: ENST00000457335
  CDS Start-End: 100-342
ggggcgggctgtgagcggaccgcgagcgctgggcgggtccgcggcgcggtcggtcggcgcctgttctcgggctgtttggcggacgaagcttcacaaaagatgtctaagcaacagccaactcagtttataaatccagaaacacctggctatgttggatttgcaaacctccccaatcaagttcaccgaaaatcagtgaaaaaaggttttgagttcacactgatggtggtcggtgaatcaggtctaggaaaatcgactctcataaacagcctattcctaactgatctgtacccagaaagagtcatacctggagcagcagtttgtttcttttctagaaaaaattgaaagaactgtccagattgaggcttcaactgttgaaattgaagagcgaggggtcaagctacgcctgacagtggtagatacccctggctatggtgacgctatcaactgcagagattgttttaagacaattatctcctatattgatgagcaatttgagaggtacctgcatgacgagagcggcttgaacaggcggcacatcattgataatagggtgcattgttgcttttactt

SEQ ID NO: 179886 - DNA, 558 bp, Homo sapiens
  Payload ID: 15448
  Gene Symbol: SEPT2
  Gene Name: septin 2
  ENST ID: ENST00000443492
  CDS Start-End: 196-558
cggtcggcgcctgttctcgggctgtttggcggacgaagcttcacaaaagatgtctaagtttgtttgttttttaatcttatttagcaacagccaactcagtttataaatccagaaacacctggctatgttggatttgcaaacctccccaatcaagttcaccgaaaatcagtgaaaaaaggttttgagttcacactgatggtggtcggtgaatcaggtctaggaaaatcgactctcataaacagcctattcctaactgatctgtacccagaaagagtcatacctggagcagcagaaaaaattgaaagaactgtccagattgaggcttcaactgttgaaattgaagagcgaggggtcaagctacgcctgacagtggtagatacccctggctatggtgacgctatcaactgcagagattgttttaagacaattatctcctatattgatgagcaatttgagaggtacctgcatgacgagagcggcttgaacaggcggcacatcattgataatagggtgcattgttgcttttactttatttcaccttttggacatggacttaag

SEQ ID NO: 179887 - DNA, 480 bp, Homo sapiens
  Payload ID: 15448
  Gene Symbol: SEPT2
  Gene Name: septin 2
  ENST ID: ENST00000434955
  CDS Start-End: 165-480
cgcgagcgctgggcgggtccgcggcgcggtcggtcggcgcctgttctcgggctgtttggcggaggcttggaatagttaaatgactttggtcttgtccaaggttagatggagttcaactctaacgtcaagtcttggtccttttcattgacgaagcttcacaaaagatgtctaagcaacagccaactcagtttataaatccagaaacacctggctatgttggatttgcaaacctccccaatcaagttcaccgaaaatcagtgaaaaaaggttttgagttcacactgatggtggtcggtgaatcaggtctaggaaaatcgactctcataaacagcctattcctaactgatctgtacccagaaagagtcatacctggagcagcagaaaaaattgaaagaactgtccagattgaggcttcaactgttgaaattgaagagcgaggggtcaagctacgcctgacagtggtagatacccctggctatg

SEQ ID NO: 179888 - DNA, 801 bp, Homo sapiens
  Payload ID: 15448
  Gene Symbol: SEPT2
  Gene Name: septin 2
  ENST ID: ENST00000451310
  CDS Start-End: 1-88
agagatgattgcaaggatgcaggcgcagatgcagatgcagatgcagggcggggatggcgatggcggggctctcgggcaccacgtgtaaggtgatgtgcacatatcaagaagtcagagtgtgttttgttttcttttttctagaaaacactttcctggataaaaaagaaaacattccagatgcatgatccagctgtgtgttttcaatccttgggagggtgccatccacattttaacagtacctgtgcctgagaatttaatttttaaaagactttgatgtgtttttgtatgaagtacttttaacgtatgtatttcattgctgtgtcacactctgtgttttgtgaggtgaatgtcttccttttctttctccctaaccactaatgttagaattgatttccaagaatcggcatgtatacttaatactgaatttctttgatttaactgacttaacaactgactaaccattgatgagcactcctgatttttatctagaacattcagatttaccataatgttccttagtggtagaggtgtgtgcctagtgatgtagaaagatacactgacttggtgcaaggccatctgcttaccacatcacaccacttggagatctttgcttccttgcttttatgtttgtacacaacacctaaaaccagttttgctgctataattctatactgttgattcgtctgcgattttatctgttaaccaaataaaacataatagaatttcctaatgagatatatctttatacttaaacagcttttttagaggtgagttttaaagaagtctcttaattctgatgct

SEQ ID NO: 179889 - DNA, 738 bp, Homo sapiens
  Payload ID: 15448
  Gene Symbol: SEPT2
  Gene Name: septin 2
  ENST ID: ENST00000425899
  CDS Start-End: 156-380
gcggtcggtcggcgcctgttctcgggctgtttggcggcatacagaaactgctgtaaaagaagaagttgtgggtatttttttttttttttttgtctggaggaatggggacaccaaaactcatttggcagcagaggtgagacgaagcttcacaaaagatgtctaagacgggagtcttgttctgtcaccaggctggagtgcagtggcatgatctcagctcactgcaacttctgcctcccacgttcaagcgattcccctggctcagcctccggagtagctgggactgcagacacgtgccaccacgctggctaattttttggattttagtaaattcggggtttcaccgtgttggccaggatggccttgatctgttgacctcgtgatccacccgctttggccccccgaagtgttgggattacagcaacagccaactcagtttataaatccagaaacacctggctatgttggatttgcaaacctccccaatcaagttcaccgaaaatcagtgaaaaaaggttttgagttcacactgatggtggtcggtgaatcaggtctaggaaaatcgactctcataaacagcctattcctaactgatctgtacccagaaagagtcatacctggagcagcagtttgtttcttttctagaaaaaattgaaagaactgtccagattgaggcttcaactgttgaaattgaagagcgaggggtcaagctacgcctgacagtggtagatacccctggct

SEQ ID NO: 179890 - DNA, 724 bp, Homo sapiens
  Payload ID: 15448
  Gene Symbol: SEPT2
  Gene Name: septin 2
  ENST ID: ENST00000429791
  CDS Start-End: 657-724
ccccgcacaagttgtgggccggccctcccgaggagctgcgggggacgcgccgctcgtcccatactctcgggcggtggtcggctggctctggggtgccggcggggcggtgtgggggaggggcggccgagcccaggctcttcggcacttatcgtgggctcccccgtcccgggcggtcctagtgccggcgacagtggctccgacacgggcaggcccgggcgcgggagtggggattccggtgaccccttgttgaccctgcgggaattcctctgcactgtcgtcggtgctgggcctcggggcgtcgagtgcggtcgaggtcgggaggtttggtgcttggagggaggatacaggtttaggcccgacaaacacttagagcttgtgtggccatcttgtctttctaacggtgccatttcctccctgaggcgtggaggactggccagcccccaaacctccaagcccatcggctggatgccgtggataagcgaggggagagcgactaggccctgtctgcgggtaccttcggcgaggagaggcgacgaagcatacagaaactgctgtaaaagaagaagttgtgggtatttttttttttttttttgtctggaggaatggggacaccaaaactcatttggcagcagaggtgagacgaagcttcacaaaagatgtctaagcaacagccaactcagtttataaatccagaaacacctggctatgttggatttgcaaacct

SEQ ID NO: 179891 - DNA, 575 bp, Homo sapiens
  Payload ID: 15448
  Gene Symbol: SEPT2
  Gene Name: septin 2
  ENST ID: ENST00000445030
  CDS Start-End: 359-575
agtcgtactcggcgccccagctcggtgctgccgccatcttcttggaggacaggaggagaggcgaaggctccccctccccgtgatcgctccgcactcccgccaccacctgccctcccgcgaccgcctctctcctcctcagtgggcacttgtctccttctaacaaacggccttccccccactccagttacccaccgcaaggcgaagattctcattacctgttccactcttataagcataagaaaaccgagctcataagaggcttggaatagttaaatgactttggtcttgtccaaggttagatggagttcaactctaacgtcaagtcttggtccttttcattgacgaagcttcacaaaagatgtctaagcaacagccaactcagtttataaatccagaaacacctggctatgttggatttgcaaacctccccaatcaagttcaccgaaaatcagtgaaaaaaggttttgagttcacactgatggtggtcggtgaatcaggtctaggaaaatcgactctcataaacagcctattcctaactgatctgtacccagaaagagtcatacctggagcagcag

SEQ ID NO: 179892 - DNA, 775 bp, Homo sapiens
  Payload ID: 15448
  Gene Symbol: SEPT2
  Gene Name: septin 2
  ENST ID: ENST00000436795
  CDS Start-End: 331-775
cgggctgtgagcggaccgcgagcgctgggcgggtccgcggcgcggtcggtcggcgcctgttctcgggctgtttggcgggcgtggaggactggccagcccccaaacctccaagcccatcggctggatgccgtggataagcgaggggagagcgactaggccctgtctgcgggtaccttcggcgaggagaggcgacgaaggtctgcaccagcgagcatacagaaactgctgtaaaagaagaagttgtgggtatttttttttttttttttgtctggaggaatggggacaccaaaactcatttggcagcagaggtgagacgaagcttcacaaaagatgtctaagcaacagccaactcagtttataaatccagaaacacctggctatgttggatttgcaaacctccccaatcaagttcaccgaaaatcagtgaaaaaaggttttgagttcacactgatggtggtcggtgaatcaggtctaggaaaatcgactctcataaacagcctattcctaactgatctgtacccagaaagagtcatacctggagcagcagaaaaaattgaaagaactgtccagattgaggcttcaactgttgaaattgaagagcgaggggtcaagctacgcctgacagtggtagatacccctggctatggtgacgctatcaactgcagagattgttttaagacaattatctcctatattgatgagcaatttgagaggtacctgcatgacgagagcggcttgaacaggcggcacatcattgataatagggtgcattgtt

SEQ ID NO: 179893 - DNA, 818 bp, Homo sapiens
  Payload ID: 15448
  Gene Symbol: SEPT2
  Gene Name: septin 2
  ENST ID: ENST00000421717
  CDS Start-End: 1-567
gtgcattgttgcttttactttatttcaccttttggacatggacttaagcccttagatgtggcgtttatgaaggcaatacacaacaaggtgaatattgtgcctgtcattgcaaaagctgacactctcaccctgaaggaacgggagcggctgaagaaaaggattctggatgaaattgaagaacataacatcaaaatctatcacttacctgatgcagaatcagatgaagatgaagattttaaagagcagactagacttctcaaggctagcatcccattctctgtggttggatccaatcagttgattgaagccaaaggaaagaaggtcagaggccgcctctacccctggggtgttgtggaagtggagaacccagagcacaatgactttctgaagctgagaaccatgctcatgaaagtggagaatgaggacatgaataaagaccagatcttgctggaaaaagaagctgagctccgccgcatgcaagagatgattgcaaggatgcaggcgcagatgcagatgcagatgcagggcggggatggcgatggcggggctctcgggcaccacgtgtaaggtgatgtgcacatatcaagaagtcagagaaaacactttcctggataaaaaagaaaacattccagatgcatgatccagctgtgtgttttcaatccttgggagggtgccatccacattttaacagtacctgtgcctgagaatttaatttttaaaagactttgatgtgtttttgtatgaagtacttttaacgtatgtatttcattgctgtgtcacactctgtgttttgtgaggtgaatgtcttccttttcttt

SEQ ID NO: 179894 - DNA, 484 bp, Homo sapiens
  Payload ID: 15448
  Gene Symbol: SEPT2
  Gene Name: septin 2
  ENST ID: ENST00000457874
  CDS Start-End: 1-484
aatccccatggtatctttggagaacctacctctgtagagaggcagtagactctgaagtcacctgtcgtaagaacgtgagctttcctcttcacatgctgcttatattccctattaagtttgtttcttttctagaaaaaattgaaagaactgtccagattgaggcttcaactgttgaaattgaagagcgaggggtcaagctacgcctgacagtggtagatacccctggctatggtgacgctatcaactgcagagattgttttaagacaattatctcctatattgatgagcaatttgagaggtacctgcatgacgagagcggcttgaacaggcggcacatcattgataatagggtgcattgttgcttttactttatttcaccttttggacatggacttaagcccttagatgtggcgtttatgaaggcaatacacaacaaggtgaatattgtgcctgtcattgcaaaagctgacactctcaccctgaa

SEQ ID NO: 179895 - DNA, 539 bp, Homo sapiens
  Payload ID: 15448
  Gene Symbol: SEPT2
  Gene Name: septin 2
  ENST ID: ENST00000420786
  CDS Start-End: 384-539
gggcggtcctagtgccggcgacagtggctccgacacgggcaggcccgggcgcgggagtggggattccggtgaccccttgttgaccctgcgggaattcctctgcactgtcgtcggtgctgggcctcggggcgtcgagtgcggtcgaggcgtggaggactggccagcccccaaacctccaagcccatcggctggatgccgtggataagcgaggggagagcgactaggccctgtctgcgggtaccttcggcgaggagaggcgacgaagcatacagaaactgctgtaaaagaagaagttgtgggtatttttttttttttttttgtctggaggaatggggacaccaaaactcatttggcagcagaggtgagacgaagcttcacaaaagatgtctaagcaacagccaactcagtttataaatccagaaacacctggctatgttggatttgcaaacctccccaatcaagttcaccgaaaatcagtgaaaaaaggttttgagttcacactgatggtggtcggtgaatcaggtctaggaaaatcgact

SEQ ID NO: 179896 - DNA, 574 bp, Homo sapiens
  Payload ID: 15448
  Gene Symbol: SEPT2
  Gene Name: septin 2
  ENST ID: ENST00000437066
  CDS Start-End: 182-574
gtcggcgcctgttctcgggctgtttggcgggcgtggaggactggccagcccccaaacctccaagcccatcggctggatgccgtggataagcgaggggagagcgactaggccctgtctgcgggtaccttcggcgaggagaggcgacgaaggtctgcaccagcgagacgaagcttcacaaaagatgtctaagcaacagccaactcagtttataaatccagaaacacctggctatgttggatttgcaaacctccccaatcaagttcaccgaaaatcagtgaaaaaaggttttgagttcacactgatggtggtcggtgaatcaggtctaggaaaatcgactctcataaacagcctattcctaactgatctgtacccagaaagagtcatacctggagcagcagaaaaaattgaaagaactgtccagattgaggcttcaactgttgaaattgaagagcgaggggtcaagctacgcctgacagtggtagatacccctggctatggtgacgctatcaactgcagagattgttttaagacaattatctcctatattgatgagcaatttgagaggtacctgcat

SEQ ID NO: 179897 - DNA, 372 bp, Homo sapiens
  Payload ID: 15448
  Gene Symbol: SEPT2
  Gene Name: septin 2
  ENST ID: ENST00000441533
  CDS Start-End: 158-372
gcgcggtcggtcggcgcctgttctcgggctgtttggcggcatacagaaactgctgtaaaagaagaagttgtgggtatttttttttttttttttgtctggaggaatggggacaccaaaactcatttggcagcagaggtgagacgaagcttcacaaaagatgtctaagcaacagccaactcagtttataaatccagaaacacctggctatgttggatttgcaaacctccccaatcaagttcaccgaaaatcagtgaaaaaaggttttgagttcacactgatggtggtcggtgaatcaggtctaggaaaatcgactctcataaacagcctattcctaactgatctgtacccagaaagagtcatacctggagcagc

SEQ ID NO: 179898 - DNA, 3446 bp, Homo sapiens
  Payload ID: 15448
  Gene Symbol: SEPT2
  Gene Name: septin 2
  Uniprot ID: Q15019
  ENST ID: ENST00000616972
  CDS Start-End: 169-1359
gacgcaatccgcctgcgcgctgggcggggcggggcgggctggggcgggctgtgagcggaccgcgagcgctgggcgggtccgcggcgcggtcggtcggcgcctgttctcgggctgtttggcgggcgtggaggactggccagcccccaaacctccaagcccatcggctggatgccgtggataagcgaggggagagcgactaggccctgtctgcgggtaccttcggcgaggagaggcgacgaaggtctgcaccagcgagacgaagcttcacaaaagatgtctaagcaacagccaactcagtttataaatccagaaacacctggctatgttggatttgcaaacctccccaatcaagttcaccgaaaatcagtgaaaaaaggttttgagttcacactgatggtggtcggtgaatcaggtctaggaaaatcgactctcataaacagcctattcctaactgatctgtacccagaaagagtcatacctggagcagcagaaaaaattgaaagaactgtccagattgaggcttcaactgttgaaattgaagagcgaggggtcaagctacgcctgacagtggtagatacccctggctatggtgacgctatcaactgcagagattgttttaagacaattatctcctatattgatgagcaatttgagaggtacctgcatgacgagagcggcttgaacaggcggcacatcattgataatagggtgcattgttgcttttactttatttcaccttttggacatggacttaagcccttagatgtggcgtttatgaaggcaatacacaacaaggtgaatattgtgcctgtcattgcaaaagctgacactctcaccctgaaggaacgggagcggctgaagaaaaggattctggatgaaattgaagaacataacatcaaaatctatcacttacctgatgcagaatcagatgaagatgaagattttaaagagcagactagacttctcaaggctagcatcccattctctgtggttggatccaatcagttgattgaagccaaaggaaagaaggtcagaggccgcctctacccctggggtgttgtggaagtggagaacccagagcacaatgactttctgaagctgagaaccatgctcatcacccacatgcaggatctccaggaggtgacccaggaccttcattatgaaaacttccgttctgagagactcaagagaggcggcaggaaagtggagaatgaggacatgaataaagaccagatcttgctggaaaaagaagctgagctccgccgcatgcaagagatgattgcaaggatgcaggcgcagatgcagatgcagatgcagggcggggatggcgatggcggggctctcgggcaccacgtgtaaggtgatgtgcacatatcaagaagtcagagaaaacactttcctggataaaaaagaaaacattccagatgcatgatccagctgtgtgttttcaatccttgggagggtgccatccacattttaacagtacctgtgcctgagaatttaatttttaaaagactttgatgtgtttttgtatgaagtacttttaacgtatgtatttcattgctgtgtcacactctgtgttttgtgaggtgaatgtcttccttttctttctccctaaccactaatgttagaattgatttccaagaatcggcatgtatacttaatactgaatttctttgatttaactgacttaacaactgactaaccattgatgagcactcctgatttttatctagaacattcagatttaccataatgttccttagtggtagaggtgtgtgcctagtgatgtagaaagatacactgacttggtgcaaggccatctgcttaccacatcacaccacttggagatctttgcttccttgcttttatgtttgtacacaacacctaaaaccagttttgctgctataattctatactgttgattcgtctgcgattttatctgttaaccaaataaaacataatagaatttcctaatgagatatatctttatacttaaacagcttttttagaggtgagttttaaagaagtctcttaattctgatgctaggttgtttttaaaaccactatgcaaagaactcaccacaagccaccttttgtagtgttctccactaatactggttatcctgtgctacagagaaaatcaaagcagtcataagctccagttttcgtattgcaaataagactcttacctacaaaatgagattcagtgaactaatttggtttttactcaaccaaattaaaaatttttttaaggaaaattagcagttggtctattcagaatcaaacctttttatattttatactgcactttagtgtattttctgtcactgtaggtatagaagatctgcctcccctgtggaaattggggtctgttggtgggcgtgcccctgaagcctggcttgggttgaaaagtgttcccgccctaaggccttggtgccctgaacctctgatgcctaccgggttctcctgatttgagtttcctttaaatactccctttttgagtaattttctgatgggaggaaagtagcagtcatcatctttttgtgtgcaggctgtctcatttatttttagccattgtcgtttcattcattttgtgtaatataaaccgtgtgtcatgtcaaagtgaaagacatttcaaatctgtagcataggctagtgggcaggtccgcacagtcgaagccacacctggtctgttttctgtgcactgtagccttagtgtcacctttcttcttgtgtctccttatggtacactccagcggttgccttttttatcatttctactgaagttgggaaattcaaccccagaaattgacagatgaaaggagacaatggttgtgtagggagatggagaaaatgcttaatctgaggatgagacagggttttttcatttttgtgggggctagaaaaaacataaaatgaggcagttaaataataatagttaatgaaggtgtgctacagaaaataatctggtgttcttgctaactttgcccttcactgttgcttaattgtgaacagccaaaagctatatgttatggcttattgtgtgaaggtaactaagaagtggtgttccatgacttcagagtacatccatgcggagtccattatttgagtttgacatttaataactttgctggaaaatctgtaaaaaagaaaaacaagtttgctagtgactaagccccgcatatgtgagtgaaagtacttcaggcacgctgcctcctggtaacagctatgcagggagggaggacccacactgctacacttctgatcccctttggttttactacccaaatctaaatagatacttttgataatagataactgctcttttactaagacatagtctctacctatagaaatgtattttgaaaacacttattttacacagcaattttgtatccatttaaactaaccttttatcaataaagcactattgtttagatatt

SEQ ID NO: 179899 - DNA, 1896 bp, Homo sapiens
  Payload ID: 15449
  Gene Symbol: SEPT3
  Gene Name: septin 3
  Uniprot ID: Q9UH03
  ENST ID: ENST00000396417
  CDS Start-End: 16-267
gacaaaggaggattcatgtccaaagggctcccagagaccaggacggacgcagccatgtcagagctggtgcctgagcccaggcctaagccagcggtgcccatgaagcccatgagcatcaactccaacctgctgggctacatcggcatcgacaccatcatcgagcagatgcgcaagaagaccatgaagaccggtttcgacttcaacatcatggtcgttgctgggagcccattgagaagtacatcaatgagcagtacgagaagttcctgaaggaggaggtcaacatcgccaggaagaaacgcatccctgacactcgtgtccactgctgcctttacttcatctctcccacaggacactccttgcgacctctggatcttgagttcatgaaacacctcagcaaggagcttgaagtaaatggcattgaattctacccccagaaggaatttgatgaggatttggaggataagacggagaatgacaaaatcaggcaggagagcatgccttttgctgtggtgggaagtgacaaggagtaccaagtgaatggcaagagggtcctcggccgaaaaactccatgggggatcatcgaagtggaaaacctcaaccactgtgagtttgccctgcttcgagactttgtcatcaggacccacctccaggacctcaaggaagtgacacacaacatccactatgagacttacagggccaagcggctcaatgacaatggaggcctccctccgggagaaggcctcctgggcactgtccttccacctgtgccagccaccccctgccccactgctgaatgaaggccatttcaagcgctgcttctcactccattcctctcagctgttattgctgcagggccaagccctttttagtgctgtgctcgtccagctcaccaccacagcccctctcagccctcagtaggtgggaggggccagctgcctctttaggccagttgcatcctccatttatccaaaccactcctctcctcccagtggagtggggttctgccagtacagccctactgcatcatctgcgtcagccggtcctagcccatctgcagggtgaaagaactcatcaagagctccttctgcccttgtaagcccatcccagctacttgtaaccatctctaagggcaatggcattgctccctacccattcatctgcatgagctactcttggcttccttaaagggtcaagaaagcaatttttctgcttactagattcattgagatcagctgtgtgagccccaaagtgggacaagggtgtctccttcattacttaaagatattcatgagggtgggtcactacagatgttggggagcaagggctaggatcactttttaaaaaatcaccacttgtggctgtcccagagtgcggttgtacatcctccccacctcataacgcagccactgaggaagagtggttttcctaagaagacattgctggagttgactttcttctgtccaaacaaacaaacaaaaactaaacacacacacaaacccccagaaacccacaatatgtacacgctaaggaaaaactagcacccttctgtccactcagcaataagagggatctcttcccacctaccctacctactcctacccccaacccccttccccattaatgtgagtaatgaattagcctgaccacaggtggtcactgtaggctaatggaaaatacccaagggagggcaaagccccccatcagatgcatgaatgtttgcgaatgttgactgccactgccccacacactgtgtctttatagaattcccctttgcccaccctcttcctgtctccacctggacacaacttgctcaaaggctggtgacttgtgggccattcatctacaaccaagtcctgatggagcaagaggcccacgcctaggggatgcaagaacaac

SEQ ID NO: 179900 - DNA, 4649 bp, Homo sapiens
  Payload ID: 15449
  Gene Symbol: SEPT3
  Gene Name: septin 3
  Uniprot ID: Q9UH03
  ENST ID: ENST00000396425
  CDS Start-End: 132-1184
tgggaggagagcgcgaaggggcgaggcccgtttgcaggggccgctcggcccggggaagcccgcgccccgctcagccttgcagccccgcgcccggagcatctccctggaggaacggagacaaaggaggattcatgtccaaagggctcccagagaccaggacggacgcagccatgtcagagctggtgcctgagcccaggcctaagccagcggtgcccatgaagcccatgagcatcaactccaacctgctgggctacatcggcatcgacaccatcatcgagcagatgcgcaagaagaccatgaagaccggtttcgacttcaacatcatggtcgttggccagagtggactgggcaaatcaacgctggtcaacacgctcttcaaatcccaagtgagccgcaaggcctccagctggaaccgggaggagaagatccccaagacagtggagatcaaagctatcgggcatgtgatagaggaaggcggtgtcaaaatgaagctgaccgtcatcgacaccccaggctttggagaccaaatcaacaatgaaaactgctgggagcccattgagaagtacatcaatgagcagtacgagaagttcctgaaggaggaggtcaacatcgccaggaagaaacgcatccctgacactcgtgtccactgctgcctttacttcatctctcccacaggacactccttgcgacctctggatcttgagttcatgaaacacctcagcaaggttgtgaacatcatccctgtcattgctaaggctgacaccatgaccctggaggagaagtctgaattcaagcaaagggttcgcaaggagcttgaagtaaatggcattgaattctacccccagaaggaatttgatgaggatttggaggataagacggagaatgacaaaatcaggcaggagagcatgccttttgctgtggtgggaagtgacaaggagtaccaagtgaatggcaagagggtcctcggccgaaaaactccatgggggatcatcgaagtggaaaacctcaaccactgtgagtttgccctgcttcgagactttgtcatcaggacccacctccaggacctcaaggaagtgacacacaacatccactatgagacttacagggccaagcggctcaatgacaatggaggcctccctccggtgagcgtggacacagaggaaagccacgacagtaacccatgacgaccacttctctgtgtcatcacacatacccacttcacacacacacatcccaaataccaccaccaaccaccttcttcctctcaactctgtcccacaggcctgtctggtatttgtggagcatcttgtctgtgtgtgtgtgtgtgtgtgtgtgtgtgtgtgtgtgtgtgacagagagagagcgagagagcctgtgtgtgtgcatgcaggggtgaggtattttcactgccctccctggagagtcccttgtaagtttggctcctccatgcctgtccattatctgtctcctttccttgtgtcccaaaacaaagctgtttgcctcactcaggagatctgggggaggtttcatttaaaagtgctgggagcaggtgagccacaggcaactcttctctcggaacctgcacacaaactggggctatagagattctccaaggacagatggcagtggagctagacctgagtagggggcagggagttcaggacaaccctcctgtaagttgggggtggtctgggggtaaggctggggcttcctgggaaaaggaaggccatgagaaggcagagaagtaggccagagctgggttcttgcagaaagcatcagtgcctacaaatggagctccacccttcagtctgtgtcgtgttcagtgtcacaaagctaccacctgtcaccagagcctactgctgctctccactcaactggcctctgctgccaggccactgcctgtctctgcttccgactttgtcttctttctccctttccctccttccctcatacattgctttctctccctctcctgcgtgtctctgacatctctcacttccttttagatgaatctactttaggttcattcctatatttagcatttatgcccagtctacttccagaaatgactttagactgcctttcacataaaatcacaaaactacaggacagtacaaacagattgccagagaaatctgggtcaaagaaaggaataggaaagaaagtttctgtagtcaagcacctgaacaggccctgagctcacaggcagccaatgtaaagagggaaacacagtgagttatgcagttcccagtgtccagttaaaggaagcacacatgctagtcatgtgagacaaccttttattgggacatcaggttctagaactaattctaaagaagtatcagaaacaatatacataatttgtctttcttagtaatttggcttcaaagacaaatttttgaccacacctccgttttctccgtcagacttctctcccttctaagcaggcttctctgttgctccatttgcttcatacatacttgacctctcttttctattccccatcacttttgtgctgaagctaatcatatttatgtctgtctttctctacttttccctaattccctctcctcctgactcctgtagacattcccaatgatacccaccgtcatacatttaggcttttcttgcctttccctgaagccctgtatttattaatgcatatatttcccctgcttgttgtacaagtaagttactcttttcctttaatctgtaagattcatgaaattcggggccagggaaacagtttagccttagggaagggaaaacactaagtgaaactgtttacaataacctcatacaaccttctgtcccatctcctggttcagcctaggtgtttcactggtcctctatgaatcccagcacttataatcccagtcttttatcactcaggtgctaggaaaaaaaacatagactcaagacccaagattcaatggaccaggagaaaggggggcggtgatcaggtcaccagtgaccccaacctatgctctcggtctttcctggaggctgccaacccagccctcatcctcccttgctcacaaagttacagggtaggcacctgtcaggacagaacagcagcagcgctacagcccagaggttatacatttcaacagaacagggatccttggctactgtagaagcagtcctgtatggagaccttggaccagcaggggaagatctatgggcatgggaggtgggcgttggaaaggctgagtaggaatggtgcctggcacccctgaaccatgatctgagcctccctggagaaggtattttatatgtctgctgccagctgctggtctccacaccctcaaccgttctcaacccccctgcagggagaaggcctcctgggcactgtccttccacctgtgccagccaccccctgccccactgctgaatgaaggccatttcaagcgctgcttctcactccattcctctcagctgttattgctgcagggccaagccctttttagtgctgtgctcgtccagctcaccaccacagcccctctcagccctcagtaggtgggaggggccagctgcctctttaggccagttgcatcctccatttatccaaaccactcctctcctcccagtggagtggggttctgccagtacagccctactgcatcatctgcgtcagccggtcctagcccatctgcagggtgaaagaactcatcaagagctccttctgcccttgtaagcccatcccagctacttgtaaccatctctaagggcaatggcattgctccctacccattcatctgcatgagctactcttggcttccttaaagggtcaagaaagcaatttttctgcttactagattcattgagatcagctgtgtgagccccaaagtgggacaagggtgtctccttcattacttaaagatattcatgagggtgggtcactacagatgttggggagcaagggctaggatcactttttaaaaaatcaccacttgtggctgtcccagagtgcggttgtacatcctccccacctcataacgcagccactgaggaagagtggttttcctaagaagacattgctggagttgactttcttctgtccaaacaaacaaacaaaaactaaacacacacacaaacccccagaaacccacaatatgtacacgctaaggaaaaactagcacccttctgtccactcagcaataagagggatctcttcccacctaccctacctactcctacccccaacccccttccccattaatgtgagtaatgaattagcctgaccacaggtggtcactgtaggctaatggaaaatacccaagggagggcaaagccccccatcagatgcatgaatgtttgcgaatgttgactgccactgccccacacactgtgtctttatagaattcccctttgcccaccctcttcctgtctccacctggacacaacttgctcaaaggctggtgacttgtgggccattcatctacaaccaagtcctgatggagcaagaggcccacgcctaggggatgcaagaacaacccgtttcttaaatgttaccagtcccagccaatcttacggtgacattacagttaaatttcccaattgaaaacaagcaaacagacactcaaactggtcctgtaattgttgctagactttatgtgttgtacaactaaacattgctgtttgaacagtaa

SEQ ID NO: 179901 - DNA, 2586 bp, Homo sapiens
  Payload ID: 15449
  Gene Symbol: SEPT3
  Gene Name: septin 3
  Uniprot ID: Q9UH03
  ENST ID: ENST00000396426
  CDS Start-End: 256-1332
ggcggcggcaacggtgcgcgcggacaggggcggcgcggcgccgagcgagccgaggcgaggtcccggggagggcgcggcggcgcggggcgcaggggcggcgcggcggggccgcgggccgggcgggtgggaggagagcgcgaaggggcgaggcccgtttgcaggggccgctcggcccggggaagcccgcgccccgctcagccttgcagccccgcgcccggagcatctccctggaggaacggagacaaaggaggattcatgtccaaagggctcccagagaccaggacggacgcagccatgtcagagctggtgcctgagcccaggcctaagccagcggtgcccatgaagcccatgagcatcaactccaacctgctgggctacatcggcatcgacaccatcatcgagcagatgcgcaagaagaccatgaagaccggtttcgacttcaacatcatggtcgttggccagagtggactgggcaaatcaacgctggtcaacacgctcttcaaatcccaagtgagccgcaaggcctccagctggaaccgggaggagaagatccccaagacagtggagatcaaagctatcgggcatgtgatagaggaaggcggtgtcaaaatgaagctgaccgtcatcgacaccccaggctttggagaccaaatcaacaatgaaaactgctgggagcccattgagaagtacatcaatgagcagtacgagaagttcctgaaggaggaggtcaacatcgccaggaagaaacgcatccctgacactcgtgtccactgctgcctttacttcatctctcccacaggacactccttgcgacctctggatcttgagttcatgaaacacctcagcaaggttgtgaacatcatccctgtcattgctaaggctgacaccatgaccctggaggagaagtctgaattcaagcaaagggttcgcaaggagcttgaagtaaatggcattgaattctacccccagaaggaatttgatgaggatttggaggataagacggagaatgacaaaatcaggcaggagagcatgccttttgctgtggtgggaagtgacaaggagtaccaagtgaatggcaagagggtcctcggccgaaaaactccatgggggatcatcgaagtggaaaacctcaaccactgtgagtttgccctgcttcgagactttgtcatcaggacccacctccaggacctcaaggaagtgacacacaacatccactatgagacttacagggccaagcggctcaatgacaatggaggcctccctccgggagaaggcctcctgggcactgtccttccacctgtgccagccaccccctgccccactgctgaatgaaggccatttcaagcgctgcttctcactccattcctctcagctgttattgctgcagggccaagccctttttagtgctgtgctcgtccagctcaccaccacagcccctctcagccctcagtaggtgggaggggccagctgcctctttaggccagttgcatcctccatttatccaaaccactcctctcctcccagtggagtggggttctgccagtacagccctactgcatcatctgcgtcagccggtcctagcccatctgcagggtgaaagaactcatcaagagctccttctgcccttgtaagcccatcccagctacttgtaaccatctctaagggcaatggcattgctccctacccattcatctgcatgagctactcttggcttccttaaagggtcaagaaagcaatttttctgcttactagattcattgagatcagctgtgtgagccccaaagtgggacaagggtgtctccttcattacttaaagatattcatgagggtgggtcactacagatgttggggagcaagggctaggatcactttttaaaaaatcaccacttgtggctgtcccagagtgcggttgtacatcctccccacctcataacgcagccactgaggaagagtggttttcctaagaagacattgctggagttgactttcttctgtccaaacaaacaaacaaaaactaaacacacacacaaacccccagaaacccacaatatgtacacgctaaggaaaaactagcacccttctgtccactcagcaataagagggatctcttcccacctaccctacctactcctacccccaacccccttccccattaatgtgagtaatgaattagcctgaccacaggtggtcactgtaggctaatggaaaatacccaagggagggcaaagccccccatcagatgcatgaatgtttgcgaatgttgactgccactgccccacacactgtgtctttatagaattcccctttgcccaccctcttcctgtctccacctggacacaacttgctcaaaggctggtgacttgtgggccattcatctacaaccaagtcctgatggagcaagaggcccacgcctaggggatgcaagaacaacccgtttcttaaatgttaccagtcccagccaatcttacggtgacattacagttaaatttcccaattgaaaacaagcaaacagacactcaaactggtcctgtaattgttgctagactttatgtgttgtacaactaaacattgctgtttgaacagtaa

SEQ ID NO: 179902 - DNA, 1866 bp, Homo sapiens
  Payload ID: 15449
  Gene Symbol: SEPT3
  Gene Name: septin 3
  ENST ID: ENST00000406029
  CDS Start-End: 221-1105
cggcgccgagcgagccgaggcgaggtcccggggagggcgcggcggcgcggggcgcaggggcggcgcggcggggccgcgggccgggcgggtgggaggagagcgcgaaggggcgaggcccgtttgcaggggccgctcggcccggggaagcccgcgccccgctcagccttgcagccccgcgcccggagcatctccctggaggaacggagacaaaggaggattcatgtccaaaggccagagtggactgggcaaatcaacgctggtcaacacgctcttcaaatcccaagtgagccgcaaggcctccagctggaaccgggaggagaagatccccaagacagtggagatcaaagctatcgggcatgtgatagaggaaggcggtgtcaaaatgaagctgaccgtcatcgacaccccaggctttggagaccaaatcaacaatgaaaactgctgggagcccattgagaagtacatcaatgagcagtacgagaagttcctgaaggaggaggtcaacatcgccaggaagaaacgcatccctgacactcgtgtccactgctgcctttacttcatctctcccacaggacactccttgcgacctctggatcttgagttcatgaaacacctcagcaaggttgtgaacatcatccctgtcattgctaaggctgacaccatgaccctggaggagaagtctgaattcaagcaaagggttcgcaaggagcttgaagtaaatggcattgaattctacccccagaaggaatttgatgaggatttggaggataagacggagaatgacaaaatcaggcaggagagcatgccttttgctgtggtgggaagtgacaaggagtaccaagtgaatggcaagagggtcctcggccgaaaaactccatgggggatcatcgaagtggaaaacctcaaccactgtgagtttgccctgcttcgagactttgtcatcaggacccacctccaggacctcaaggaagtgacacacaacatccactatgagacttacagggccaagcggctcaatgacaatggaggcctccctccgggagaaggcctcctgggcactgtccttccacctgtgccagccaccccctgccccactgctgaatgaaggccatttcaagcgctgcttctcactccattcctctcagctgttattgctgcagggccaagccctttttagtgctgtgctcgtccagctcaccaccacagcccctctcagccctcagtaggtgggaggggccagctgcctctttaggccagttgcatcctccatttatccaaaccactcctctcctcccagtggagtggggttctgccagtacagccctactgcatcatctgcgtcagccggtcctagcccatctgcagggtgaaagaactcatcaagagctccttctgcccttgtaagcccatcccagctacttgtaaccatctctaagggcaatggcattgctccctacccattcatctgcatgagctactcttggcttccttaaagggtcaagaaagcaatttttctgcttactagattcattgagatcagctgtgtgagccccaaagtgggacaagggtgtctccttcattacttaaagatattcatgagggtgggtcactacagatgttggggagcaagggctaggatcactttttaaaaaatcaccacttgtggctgtcccagagtgcggttgtacatcctccccacctcataacgcagccactgaggaagagtggttttcctaagaagacattgctggagttgactttcttctgtccaaacaaacaaacaaaaactaaacacacacacaaacccccagaaacccacaatatgtacacgctaaggaaaaactagcacccttctgtccactcagc

SEQ ID NO: 179903 - DNA, 876 bp, Homo sapiens
  Payload ID: 15449
  Gene Symbol: SEPT3
  Gene Name: septin 3
  ENST ID: ENST00000449288
  CDS Start-End: 342-876
actagacccagaaccttcgaggggagggatggttgtcctcacccctgtgaggcaatatgctgtccattagtatccactgaatgcgtgaaatttttttctaatgggcaaactgaggctcagagaagttcctgtctggctcaaggttattggttcatcattctggagcagggcctggaacccgggcccctgactcggctctacaggcacccgcgcaacaccccagcccccgcgtgactcacgcgcgctcacggccgcccgcagctgccactggtcccctgcgcccctccgcccgtccccgccgcagcccagtggggctcccagagaccaggacggacgcagccatgtcagagctggtgcctgagcccaggcctaagccagcggtgcccatgaagcccatgagcatcaactccaacctgctgggctacatcggcatcgacaccatcatcgagcagatgcgcaagaagaccatgaagaccggtttcgacttcaacatcatggtcgttggccagagtggactgggcaaatcaacgctggtcaacacgctcttcaaatcccaagtgagccgcaaggcctccagctggaaccgggaggagaagatccccaagacagtggagatcaaagctatcgggcatgtgatagaggaaggcggtgtcaaaatgaagctgaccgtcatcgacaccccaggctttggagaccaaatcaacaatgaaaactgctgggagcccattgagaagtacatcaatgagcagtacgagaagttcctgaaggaggaggtcaacatcgccaggaagaaacgcatccctgacactcgtgtccactgctgcctttacttcatctctcccacaggacactccttgcgacctctggatcttgagt

SEQ ID NO: 179904 - DNA, 1530 bp, Homo sapiens
  Payload ID: 15450
  Gene Symbol: SEPT4
  Gene Name: septin 4
  Uniprot ID: O43236
  ENST ID: ENST00000317256
  CDS Start-End: 84-1463
ggtgctgcgaggtcggcgcgcagctccgccgcgggtcgctcgggcgctgtccaggcggagccggccccgcccgggctgcagccatgatcaagcgtttcctggaggacaccacggatgatggagaactgagcaagttcgtgaaggatttctcaggaaatgcgagctgccacccaccagaggctaagacctgggcatccaggccccaagtcccggagccaaggccccaggccccggacctctatgatgatgacctggagttcagacccccctcgcggccccagtcctctgacaaccagcagtacttctgtgccccagcccctctcagcccatctgccaggccccgcagcccatggggcaagcttgatccctatgattcctctgaggatgacaaggagtatgtgggctttgcaaccctccccaaccaagtccaccgaaagtccgtgaagaaaggctttgactttaccctcatggtggcaggagagtctggcctgggcaaatccacacttgtcaatagcctcttcctcactgatctgtaccgggaccggaaacttcttggtgctgaagagaggatcatgcaaactgtggagatcactaagcatgcagtggacatagaagagaagggtgtgaggctgcggctcaccattgtggacacaccaggttttggggatgcagtcaacaacacagagtgctggaagcctgtggcagaatacattgatcagcagtttgagcagtatttccgagacgagagtggcctgaaccgaaagaacatccaagacaacagggtgcactgctgcctgtacttcatctcacccttcggccatgggctccggccattggatgttgaattcatgaaggccctgcatcagcgggtcaacatcgtgcctatcctggctaaggcagacacactgacacctcccgaagtggaccacaagaaacgcaaaatccgggaggagattgagcattttggaatcaagatctatcaattcccagactgtgactctgatgaggatgaggacttcaaattgcaggaccaagccctaaaggaaagcatcccatttgcagtaattggcagcaacactgtagtagaggccagagggcggcgagttcggggtcgactctacccctggggcatcgtggaagtggaaaacccagggcactgcgactttgtgaagctgaggacaatgctggtacgtacccacatgcaggacctgaaggatgtgacacgggagacacattatgagaactaccgggcacagtgcatccagagcatgacccgcctggtggtgaaggaacggaatcgcaacaaactgactcgggaaagtggtaccgacttccccatccctgctgtcccaccagggacagatccagaaactgagaagcttatccgagagaaagatgaggagctgcggcggatgcaggagatgctacacaaaatacaaaaacagatgaaggagaactattaactggctttcagccctggatatttaaatctcctcctcttcttcctgtccatgccggcccctcccagca

SEQ ID NO: 179905 - DNA, 1784 bp, Homo sapiens
  Payload ID: 15450
  Gene Symbol: SEPT4
  Gene Name: septin 4
  Uniprot ID: O43236
  ENST ID: ENST00000317268
  CDS Start-End: 178-1614
caggcttttttggcccctgccagagacagaagggggtcaaagagaaagggaaaggagcaagccaggaagccagacaacaacagcatcaaaacaaggctgtttctgtgtgtgaggaactttgcctgggagataaaattagacctagagctttctgacagggagtctgaagcgtgggacatggaccgttcactgggatggcaagggaattctgtccctgaggacaggactgaagctgggatcaagcgtttcctggaggacaccacggatgatggagaactgagcaagttcgtgaaggatttctcaggaaatgcgagctgccacccaccagaggctaagacctgggcatccaggccccaagtcccggagccaaggccccaggccccggacctctatgatgatgacctggagttcagacccccctcgcggccccagtcctctgacaaccagcagtacttctgtgccccagcccctctcagcccatctgccaggccccgcagcccatggggcaagcttgatccctatgattcctctgaggatgacaaggagtatgtgggctttgcaaccctccccaaccaagtccaccgaaagtccgtgaagaaaggctttgactttaccctcatggtggcaggagagtctggcctgggcaaatccacacttgtcaatagcctcttcctcactgatctgtaccgggaccggaaacttcttggtgctgaagagaggatcatgcaaactgtggagatcactaagcatgcagtggacatagaagagaagggtgtgaggctgcggctcaccattgtggacacaccaggttttggggatgcagtcaacaacacagagtgctggaagcctgtggcagaatacattgatcagcagtttgagcagtatttccgagacgagagtggcctgaaccgaaagaacatccaagacaacagggtgcactgctgcctgtacttcatctcacccttcggccatgggctccggccattggatgttgaattcatgaaggccctgcatcagcgggtcaacatcgtgcctatcctggctaaggcagacacactgacacctcccgaagtggaccacaagaaacgcaaaatccgggaggagattgagcattttggaatcaagatctatcaattcccagactgtgactctgatgaggatgaggacttcaaattgcaggaccaagccctaaaggaaagcatcccatttgcagtaattggcagcaacactgtagtagaggccagagggcggcgagttcggggtcgactctacccctggggcatcgtggaagtggaaaacccagggcactgcgactttgtgaagctgaggacaatgctggtacgtacccacatgcaggacctgaaggatgtgacacgggagacacattatgagaactaccgggcacagtgcatccagagcatgacccgcctggtggtgaaggaacggaatcgcaacaaactgactcgggaaagtggtaccgacttccccatccctgctgtcccaccagggacagatccagaaactgagaagcttatccgagagaaagatgaggagctgcggcggatgcaggagatgctacacaaaatacaaaaacagatgaaggagaactattaactggctttcagccctggatatttaaatctcctcctcttcttcctgtccatgccggcccctcccagcaccagctctgctcaggccccttcagctactgccacttcgccttacatccctgctgactgcccagagactcagaggaaataaagtttaataaatctgtaggtggc

SEQ ID NO: 179906 - DNA, 1556 bp, Homo sapiens
  Payload ID: 15450
  Gene Symbol: SEPT4
  Gene Name: septin 4
  Uniprot ID: O43236
  ENST ID: ENST00000393086
  CDS Start-End: 1-1380
atgatcaagcgtttcctggaggacaccacggatgatggagaactgagcaagttcgtgaaggatttctcaggaaatgcgagctgccacccaccagaggctaagacctgggcatccaggccccaagtcccggagccaaggccccaggccccggacctctatgatgatgacctggagttcagacccccctcgcggccccagtcctctgacaaccagcagtacttctgtgccccagcccctctcagcccatctgccaggccccgcagcccatggggcaagcttgatccctatgattcctctgaggatgacaaggagtatgtgggctttgcaaccctccccaaccaagtccaccgaaagtccgtgaagaaaggctttgactttaccctcatggtggcaggagagtctggcctgggcaaatccacacttgtcaatagcctcttcctcactgatctgtaccgggaccggaaacttcttggtgctgaagagaggatcatgcaaactgtggagatcactaagcatgcagtggacatagaagagaagggtgtgaggctgcggctcaccattgtggacacaccaggttttggggatgcagtcaacaacacagagtgctggaagcctgtggcagaatacattgatcagcagtttgagcagtatttccgagacgagagtggcctgaaccgaaagaacatccaagacaacagggtgcactgctgcctgtacttcatctcacccttcggccatgggctccggccattggatgttgaattcatgaaggccctgcatcagcgggtcaacatcgtgcctatcctggctaaggcagacacactgacacctcccgaagtggaccacaagaaacgcaaaatccgggaggagattgagcattttggaatcaagatctatcaattcccagactgtgactctgatgaggatgaggacttcaaattgcaggaccaagccctaaaggaaagcatcccatttgcagtaattggcagcaacactgtagtagaggccagagggcggcgagttcggggtcgactctacccctggggcatcgtggaagtggaaaacccagggcactgcgactttgtgaagctgaggacaatgctggtacgtacccacatgcaggacctgaaggatgtgacacgggagacacattatgagaactaccgggcacagtgcatccagagcatgacccgcctggtggtgaaggaacggaatcgcaacaaactgactcgggaaagtggtaccgacttccccatccctgctgtcccaccagggacagatccagaaactgagaagcttatccgagagaaagatgaggagctgcggcggatgcaggagatgctacacaaaatacaaaaacagatgaaggagaactattaactggctttcagccctggatatttaaatctcctcctcttcttcctgtccatgccggcccctcccagcaccagctctgctcaggccccttcagctactgccacttcgccttacatccctgctgactgcccagagactcagaggaaataaagtttaataaatctgtaggtggcttctgg

SEQ ID NO: 179907 - DNA, 1795 bp, Homo sapiens
  Payload ID: 15450
  Gene Symbol: SEPT4
  Gene Name: septin 4
  Uniprot ID: O43236
  ENST ID: ENST00000457347
  CDS Start-End: 146-1627
acttgcactaggaagggattgggccaggtttgcccaagtccactgggcatctttagtaaatttctctttttctcctcctattggcactctctgaattccatttgctgccccctgggaatgcctggcttctactctgttatgacagatgaggagctctccagccctgttcagcagcagagctgctccccagaagccaagaaaagaaggctcccaagcagctgggctgctggtcttctctgactctctggagatcaagcgtttcctggaggacaccacggatgatggagaactgagcaagttcgtgaaggatttctcaggaaatgcgagctgccacccaccagaggctaagacctgggcatccaggccccaagtcccggagccaaggccccaggccccggacctctatgatgatgacctggagttcagacccccctcgcggccccagtcctctgacaaccagcagtacttctgtgccccagcccctctcagcccatctgccaggccccgcagcccatggggcaagcttgatccctatgattcctctgaggatgacaaggagtatgtgggctttgcaaccctccccaaccaagtccaccgaaagtccgtgaagaaaggctttgactttaccctcatggtggcaggagagtctggcctgggcaaatccacacttgtcaatagcctcttcctcactgatctgtaccgggaccggaaacttcttggtgctgaagagaggatcatgcaaactgtggagatcactaagcatgcagtggacatagaagagaagggtgtgaggctgcggctcaccattgtggacacaccaggttttggggatgcagtcaacaacacagagtgctggaagcctgtggcagaatacattgatcagcagtttgagcagtatttccgagacgagagtggcctgaaccgaaagaacatccaagacaacagggtgcactgctgcctgtacttcatctcacccttcggccatgggctccggccattggatgttgaattcatgaaggccctgcatcagcgggtcaacatcgtgcctatcctggctaaggcagacacactgacacctcccgaagtggaccacaagaaacgcaaaatccgggaggagattgagcattttggaatcaagatctatcaattcccagactgtgactctgatgaggatgaggacttcaaattgcaggaccaagccctaaaggaaagcatcccatttgcagtaattggcagcaacactgtagtagaggccagagggcggcgagttcggggtcgactctacccctggggcatcgtggaagtggaaaacccagggcactgcgactttgtgaagctgaggacaatgctggtacgtacccacatgcaggacctgaaggatgtgacacgggagacacattatgagaactaccgggcacagtgcatccagagcatgacccgcctggtggtgaaggaacggaatcgcaacaaactgactcgggaaagtggtaccgacttccccatccctgctgtcccaccagggacagatccagaaactgagaagcttatccgagagaaagatgaggagctgcggcggatgcaggagatgctacacaaaatacaaaaacagatgaaggagaactattaactggctttcagccctggatatttaaatctcctcctcttcttcctgtccatgccggcccctcccagcaccagctctgctcaggccccttcagctactgccacttcgccttacatccctgctgactgcccagagactcagaggaaataaagtttaataaatctgtaggtg

SEQ ID NO: 179908 - DNA, 1906 bp, Homo sapiens
  Payload ID: 15450
  Gene Symbol: SEPT4
  Gene Name: septin 4
  Uniprot ID: O43236
  ENST ID: ENST00000426861
  CDS Start-End: 88-912
cggcggtgctgcgaggtcggcgcgcagctccgccgcgggtcgctcgggcgctgtccaggcggagccggccccgcccgggctgcagccatgatcaagcgtttcctggaggacaccacggatgatggagaactgagcaagttcgtgaaggatttctcaggaaatgcgagctgccacccaccagaggctaagacctgggcatccaggccccaagtcccggagccaaggccccaggccccggacctctatgatgatgacctggagttcagacccccctcgcggccccagtcctctgacaaccagcagtacttctgtgccccagcccctctcagcccatctgccaggccccgcagcccatggggcaagcttgatccctatgattcctctgaggatgacaaggagtatgtgggctttgcaaccctccccaaccaagtccaccgaaagtccgtgaagaaaggctttgactttaccctcatggtggcaggagagtctggcctgggcaaatccacacttgtcaatagcctcttcctcactgatctgtaccgggaccggaaacttcttggtgctgaagagaggatcatgcaaactgtggagatcactaagcatgcagtggacatagaagagaagggtgtgaggctgcggctcaccattgtggacacaccaggttttggggatgcagtcaacaacacagagtgctggaagcctgtggcagaatacattgatcagcagtttgagcagtatttccgagacgagagtggcctgaaccgaaagaacatccaagacaacagggtgcactgctgcctgtacttcatctcacccttcggccatgggtatggtccaagcctgaggctcctggcaccaccgggtgctgtcaagggaacaggccaagagcaccaggggcagggctgccactagcaggtggtcacaggttcctgttccccaggctccggccattggatgttgaattcatgaaggccctgcatcagcgggtcaacatcgtgcctatcctggctaaggcagacacactgacacctcccgaagtggaccacaagaaacgcaaaatccgggaggagattgagcattttggaatcaagatctatcaattcccagactgtgactctgatgaggatgaggacttcaaattgcaggaccaagccctaaaggaaagcatcccatttgcagtaattggcagcaacactgtagtagaggccagagggcggcgagttcggggtcgactctacccctggggcatcgtggaagtggaaaacccagggcactgcgactttgtgaagctgaggacaatgctggtacgtacccacatgcaggacctgaaggatgtgacacgggagacacattatgagaactaccgggcacagtgcatccagagcatgacccgcctggtggtgaaggaacggaatcgcaagtatgaccagaagccaggacaaagctggcagggggagatcccaagcctagccttgggtgagaccaagccctacttttgttcttctataggccctgggctcaatctaagcgggtgctggggtcctcctcgccttatcaacccttttctccctttagcaaactgactcgggaaagtggtaccgacttccccatccctgctgtcccaccagggacagatccagaaactgagaagcttatccgagagaaagatgaggagctgcggcggatgcaggagatgctacacaaaatacaaaaacagatgaaggagaactattaactggctttcagccctggatatttaaatctcctcctcttcttcctgtccatgccggcccctcccagcaccagctctgctcaggccccttcagctactgccacttcgccttacatccctgctgactgcccagagactcagaggaaataaagtttaataaatctgtaggtggct

SEQ ID NO: 179909 - DNA, 1597 bp, Homo sapiens
  Payload ID: 15450
  Gene Symbol: SEPT4
  Gene Name: septin 4
  Uniprot ID: O43236
  ENST ID: ENST00000412945
  CDS Start-End: 118-1530
acttgcactaggaagggattgggccaggtttgcccaagtccactgggcatctttagtaaatttctctttttctcctcctattggcactctctgaattccatttgctgccccctgggaatgcctggcttctactctgttatgacagatgaggagatcaagcgtttcctggaggacaccacggatgatggagaactgagcaagttcgtgaaggatttctcaggaaatgcgagctgccacccaccagaggctaagacctgggcatccaggccccaagtcccggagccaaggccccaggccccggacctctatgatgatgacctggagttcagacccccctcgcggccccagtcctctgacaaccagcagtacttctgtgccccagcccctctcagcccatctgccaggccccgcagcccatggggcaagcttgatccctatgattcctctgaggatgacaaggagtatgtgggctttgcaaccctccccaaccaagtccaccgaaagtccgtgaagaaaggctttgactttaccctcatggtggcaggagagtctggcctgggcaaatccacacttgtcaatagcctcttcctcactgatctgtaccgggaccggaaacttcttggtgctgaagagaggatcatgcaaactgtggagatcactaagcatgcagtggacatagaagagaagggtgtgaggctgcggctcaccattgtggacacaccaggttttggggatgcagtcaacaacacagagtgctggaagcctgtggcagaatacattgatcagcagtttgagcagtatttccgagacgagagtggcctgaaccgaaagaacatccaagacaacagggtgcactgctgcctgtacttcatctcacccttcggccatgggctccggccattggatgttgaattcatgaaggccctgcatcagcgggtcaacatcgtgcctatcctggctaaggcagacacactgacacctcccgaagtggaccacaagaaacgcaaaatccgggaggagattgagcattttggaatcaagatctatcaattcccagactgtgactctgatgaggatgaggacttcaaattgcaggaccaagccctaaaggaaagcatcccatttgcagtaattggcagcaacactgtagtagaggccagagggcggcgagttcggggtcgactctacccctggggcatcgtggaagtggaaaacccagggcactgcgactttgtgaagctgaggacaatgctggtacgtacccacatgcaggacctgaaggatgtgacacgggagacacattatgagaactaccgggcacagtgcatccagagcatgacccgcctggtggtgaaggaacggaatcgcaacaaactgactcgggaaagtggtaccgacttccccatccctgctgtcccaccagggacagatccagaaactgagaagcttatccgagagaaagatgaggagctgcggcggatgcaggagatgctacacaaaatacaaaaacagatgaaggagaactattaactggctttcagccctggatatttaaatctcctcctcttcttcctgtccatgccggcccctcccagca

SEQ ID NO: 179910 - DNA, 632 bp, Homo sapiens
  Payload ID: 15450
  Gene Symbol: SEPT4
  Gene Name: septin 4
  ENST ID: ENST00000581615
  CDS Start-End: 140-307
aaagagaaagggaaaggagcaagccaggaagccagacaacaacagcatcaaaacaaggctgtttctgtgtgtgaggaactttgcctgggagataaaattagacctagagctttctgacagggagtctgaagcgtgggacatggaccgttcactgggatggcaagggaattctgtccctgaggacaggactgaagctgggatcaagcgtttcctggaggacaccacggatgatggagaactgagcaagatgacaaggagtatgtgggctttgcaaccctccccaaccaagtccaccgaaagtccgtgaagaaaggctttgactttaccctcatggtggcaggagagtctggcctgggcaaatccacacttgtcaatagcctcttcctcactgatctgtaccgggaccggaaacttcttggtgctgaagagaggatcatgcaaactgtggagatcactaagcatgcagtggacatagaagagaagggtgtgaggctgcggctcaccattgtggacacaccaggttttggggatgcagtcaacaacacagagtgctggaagcctgtggcagaatacattgatcagcagtttgagcagtatttccgagacgagagtggcctgaaccgaaagaacat

SEQ ID NO: 179911 - DNA, 508 bp, Homo sapiens
  Payload ID: 15450
  Gene Symbol: SEPT4
  Gene Name: septin 4
  ENST ID: ENST00000578131
  CDS Start-End: 103-213
gaggcgggagggtgacggcggtgctgcgaggtcggcgcgcagctccgccgcgggtcgctcgggcgctgtccaggcggagccggccccgcccgggctgcagccatgatcaagcgtttcctggaggacaccacggatgatggagaactgagcaagatgacaaggagtatgtgggctttgcaaccctccccaaccaagtccaccgaaagtccgtgaagaaaggctttgactttaccctcatggtggcaggagagtctggcctgggcaaatccacacttgtcaatagcctcttcctcactgatctgtaccgggaccggaaacttcttggtgctgaagagaggatcatgcaaactgtggagatcactaagcatgcagtggacatagaagagaagggtgtgaggctgcggctcaccattgtggacacaccaggttttggggatgcagtcaacaacacagagtgctggaagcctgtggcagaatacattgatcagcagtttgagcagtatttccg

SEQ ID NO: 179912 - DNA, 1396 bp, Homo sapiens
  Payload ID: 15450
  Gene Symbol: SEPT4
  Gene Name: septin 4
  ENST ID: ENST00000580844
  CDS Start-End: 130-1269
ggaaaggagcaagccaggaagccagacaacaacagcatcaaaacaaggctgtttctgtgtgtgaggaactttgcctgggagataaaattagacctagagctttctgacagggagtctgaagcgtgggacatggaccgttcactgggatggcaagggaattctgtccctgaggacaggactgaagctggggatgacaaggagtatgtgggctttgcaaccctccccaaccaagtccaccgaaagtccgtgaagaaaggctttgactttaccctcatggtggcaggagagtctggcctgggcaaatccacacttgtcaatagcctcttcctcactgatctgtaccgggaccggaaacttcttggtgctgaagagaggatcatgcaaactgtggagatcactaagcatgcagtggacatagaagagaagggtgtgaggctgcggctcaccattgtggacacaccaggttttggggatgcagtcaacaacacagagtgctggaagcctgtggcagaatacattgatcagcagtttgagcagtatttccgagacgagagtggcctgaaccgaaagaacatccaagacaacagggtgcactgctgcctgtacttcatctcacccttcggccatgggctccggccattggatgttgaattcatgaaggccctgcatcagcgggtcaacatcgtgcctatcctggctaaggcagacacactgacacctcccgaagtggaccacaagaaacgcaaaatccgggaggagattgagcattttggaatcaagatctatcaattcccagactgtgactctgatgaggatgaggacttcaaattgcaggaccaagccctaaaggaaagcatcccatttgcagtaattggcagcaacactgtagtagaggccagagggcggcgagttcggggtcgactctacccctggggcatcgtggaagtggaaaacccagggcactgcgactttgtgaagctgaggacaatgctggtacgtacccacatgcaggacctgaaggatgtgacacgggagacacattatgagaactaccgggcacagtgcatccagagcatgacccgcctggtggtgaaggaacggaatcgcaacaaactgactcgggaaagtggtaccgacttccccatccctgctgtcccaccagggacagatccagaaactgagaagcttatccgagagaaagatgaggagctgcggcggatgcaggagatgctacacaaaatacaaaaacagatgaaggagaactattaactggctttcagccctggatatttaaatctcctcctcttcttcctgtccatgccggcccctcccagcaccagctctgctcaggccccttcagctactgccacttcgccttacatccctgctgactgcc

SEQ ID NO: 179913 - DNA, 789 bp, Homo sapiens
  Payload ID: 15450
  Gene Symbol: SEPT4
  Gene Name: septin 4
  ENST ID: ENST00000583291
  CDS Start-End: 113-789
cgcactcggggaggcgggagggtgacggcggtgctgcgaggtcggcgcgcagctccgccgcgggtcgctcgggcgctgtccaggcggagccggccccgcccgggctgcagccatggggccagtaccaacttcatttggaaaacgcagaggaggcccacaaacactgcctgcctcaccaggagggatgatcaagcgtttcctggaggacaccacggatgatggagaactgagcaagttcgtgaaggatttctcaggaaatgcgagctgccacccaccagaggctaagacctgggcatccaggccccaagtcccggagccaaggccccaggccccggacctctatgatgatgacctggagttcagacccccctcgcggccccagtcctctgacaaccagcagtacttctgtgccccagcccctctcagcccatctgccaggccccgcagcccatggggcaagcttgatccctatgattcctctgaggatgacaaggagtatgtgggctttgcaaccctccccaaccaagtccaccgaaagtccgtgaagaaaggctttgactttaccctcatggtggcaggagagtctggcctgggcaaatccacacttgtcaatagcctcttcctcactgatctgtaccgggaccggaaacttcttggtgctgaagagaggatcatgcaaactgtggagatcactaagcatgcagtggacatagaagagaagggtgtgaggctgcggctcaccattgtggacacaccaggttttggggatgcagtcaacaacacagagtg

SEQ ID NO: 179914 - DNA, 724 bp, Homo sapiens
  Payload ID: 15450
  Gene Symbol: SEPT4
  Gene Name: septin 4
  ENST ID: ENST00000577729
  CDS Start-End: 104-724
ggaggcgggagggtgacggcggtgctgcgaggtcggcgcgcagctccgccgcgggtcgctcgggcgctgtccaggcggagccggccccgcccgggctgcagccatggggccagtaccaacttcatttggaaaacgcagaggaggcccacaaacactgcctgcctcaccaggagggatggatgacaaggagtatgtgggctttgcaaccctccccaaccaagtccaccgaaagtccgtgaagaaaggctttgactttaccctcatggtggcaggagagtctggcctgggcaaatccacacttgtcaatagcctcttcctcactgatctgtaccgggaccggaaacttcttggtgctgaagagaggatcatgcaaactgtggagatcactaagcatgcagtggacatagaagagaagggtgtgaggctgcggctcaccattgtggacacaccaggttttggggatgcagtcaacaacacagagtgctggaagcctgtggcagaatacattgatcagcagtttgagcagtatttccgagacgagagtggcctgaaccgaaagaacatccaagacaacagggtgcactgctgcctgtacttcatctcacccttcggccatgggctccggccattggatgttgaattcatgaaggccctgcatcagcgggtcaacatcgtgcctatcctggctaaggcagacacactgacacctcccgaagtggaccac

SEQ ID NO: 179915 - DNA, 1709 bp, Homo sapiens
  Payload ID: 15450
  Gene Symbol: SEPT4
  Gene Name: septin 4
  Uniprot ID: O43236
  ENST ID: ENST00000583114
  CDS Start-End: 538-1533
gacaatgagagttgggggaaacagttcctcttctgagctgaggatggggtagaacaggcttctacagaggagtcagtccattctctgccttccactccctgtgggtcatggttcaggccaggccctctcgtgcactgccggctctgggcagaggggatcaagcgtttcctggaggacaccacggatgatggagaactgagcaagttcgtgaaggatttctcaggaaatgcgagctgccacccaccagaggctaagacctgggcatccaggccccaagtcccggagccaaggccccaggccccggacctctatgatgatgacctggagttcagacccccctcgcggccccagtcctctgacaaccagcagtacttctgtgccccagcccctctcagcccatctgccaggccccgcagcccatggggcaagcttgatccctatgattcctctgaggatgacaaggagtatgtgggctttgcaaccctccccaaccaagtccaccgaaagtccgtgaagaaaggctttgactttaccctcatggtggcaggagagtctggcctgggcaaatccacacttgtcaatagcctcttcctcactgatctgtaccgggaccggaaacttcttggtgctgaagagaggatcatgcaaactgtggagatcactaagcatgcagtggacatagaagagaagggtgtgaggctgcggctcaccattgtggacacaccaggttttggggatgcagtcaacaacacagagtgctggaagcctgtggcagaatacattgatcagcagtttgagcagtatttccgagacgagagtggcctgaaccgaaagaacatccaagacaacagggtgcactgctgcctgtacttcatctcacccttcggccatgggctccggccattggatgttgaattcatgaaggccctgcatcagcgggtcaacatcgtgcctatcctggctaaggcagacacactgacacctcccgaagtggaccacaagaaacgcaaaatccgggaggagattgagcattttggaatcaagatctatcaattcccagactgtgactctgatgaggatgaggacttcaaattgcaggaccaagccctaaaggaaagcatcccatttgcagtaattggcagcaacactgtagtagaggccagagggcggcgagttcggggtcgactctacccctggggcatcgtggaagtggaaaacccagggcactgcgactttgtgaagctgaggacaatgctggtacgtacccacatgcaggacctgaaggatgtgacacgggagacacattatgagaactaccgggcacagtgcatccagagcatgacccgcctggtggtgaaggaacggaatcgcaacaaactgactcgggaaagtggtaccgacttccccatccctgctgtcccaccagggacagatccagaaactgagaagcttatccgagagaaagatgaggagctgcggcggatgcaggagatgctacacaaaatacaaaaacagatgaaggagaactattaactggctttcagccctggatatttaaatctcctcctcttcttcctgtccatgccggcccctcccagcaccagctctgctcaggccccttcagctactgccacttcgccttacatccctgctgactgcccagagactcagaggaaataaagtttaataaatctgtaggtggcttctgg

SEQ ID NO: 179916 - DNA, 676 bp, Homo sapiens
  Payload ID: 15450
  Gene Symbol: SEPT4
  Gene Name: septin 4
  ENST ID: ENST00000581607
  CDS Start-End: 460-676
gggcgggcgcggggcagggctggggtgcgcagggccggtcgctcccgggcggctgcaaggggacccgcggcaccgcagccgcggctgtgcagggtgggaggcgccgtcgccggccccgggcacaggctggcactgctgccgggcggcggtgcgtcgctgctcccaagtttttccctctgagcagccacggagtgggcgccaacccctgggtgatgcctgcgctctaggacgaaggggtgggtccgtgctgagggaggtgcccgctggtggagacgcgcttgttgggctggggaaggcgcatcagtaataagcggaggtgagggtccccatcctcgcctgggtcagcttttacctgagtaacccctcctcacccacctaccctgggcacaggggccagtaccaacttcatttggaaaacgcagaggaggcccacaaacactgcctgcctcaccaggagggatgatcaagcgtttcctggaggacaccacggatgatggagaactgagcaagttcgtgaaggatttctcaggaaatgcgagctgccacccaccagaggctaagacctgggcatccaggccccaagtcccggagccaaggccccaggccccggacctctatgatgatgacctggagttcagacccccctcgcggccccagtcctctgacaaccagcagt

SEQ ID NO: 179917 - DNA, 1362 bp, Homo sapiens
  Payload ID: 15450
  Gene Symbol: SEPT4
  Gene Name: septin 4
  ENST ID: ENST00000579371
  CDS Start-End: 106-1104
gacaacaacagcatcaaaacaaggctgtttctgtgtgtgaggaactttgcctgggagataaaattagacctagagctttctgacagggagtctgaagcgtgggacatggaccgttcactgggatggcaagggaattctgtccctgaggacaggactgaagctggggatgacaaggagtatgtgggctttgcaaccctccccaaccaagtccaccgaaagtccgtgaagaaaggctttgactttaccctcatggtggcaggagagtctggcctgggcaaatccacacttgtcaatagcctcttcctcactgatctgtaccgggaccggaaacttcttggtgctgaagagaggatcatgcaaactgtggagatcactaagcatgcagtggacatagaagagaagggtgtgaggctgcggctcaccattgtggacacaccaggttttggggatgcagtcaacaacacagagtgctggaagcctgtggcagaatacattgatcagcagtttgagcagtatttccgagacgagagtggcctgaaccgaaagaacatccaagacaacagggtgcactgctgcctgtacttcatctcacccttcggccatgggctccggccattggatgttgaattcatgaaggccctgcatcagcgggtcaacatcgtgcctatcctggctaaggcagacacactgacacctcccgaagtggaccacaagaaacgcaaaatccgggaggagattgagcattttggaatcaagatctatcaattcccagactgtgactctgatgaggatgaggacttcaaattgcaggaccaagccctaaaggaaagcatcccatttgcagtaattggcagcaacactgtagtagaggccagagggcggcgagttcggggtcgactctacccctggggcatcgtggaagtggaaaacccagggcactgcgactttgtgaagctgaggacaatgctggtacgtacccacatgcaggacctgaaggatgtgacacgggagacacattatgagaactaccgggcacagtgcatccagagcatgacccgcctggtggtgaaggaacggaatcgcaaggacagatccagaaactgagaagcttatccgagagaaagatgaggagctgcggcggatgcaggagatgctacacaaaatacaaaaacagatgaaggagaactattaactggctttcagccctggatatttaaatctcctcctcttcttcctgtccatgccggcccctcccagcaccagctctgctcaggccccttcagctactgccacttcgccttacatccctgctgactgcccagagactcagaggaaataaagtttaataaatctgtaggtggc

SEQ ID NO: 179918 - DNA, 952 bp, Homo sapiens
  Payload ID: 15450
  Gene Symbol: SEPT4
  Gene Name: septin 4
  ENST ID: ENST00000580809
  CDS Start-End: 92-619
gtgacggcggtgctgcgaggtcggcgcgcagctccgccgcgggtcgctcgggcgctgtccaggcggagccggccccgcccgggctgcagccatggatgacaaggagtatgtgggctttgcaaccctccccaaccaagtccaccgaaagtccgtgaagaaaggctttgactttaccctcatggtggcaggagagtctggcctgggcaaatccacacttgtcaatagcctcttcctcactgatctgtaccgggaccggaaacttcttggtgctgaagagaggatcatgcaaactgtggagatcactaagcatgcagtggacatagaagagaagggtgtgaggctgcggctcaccattgtggacacaccaggttttggggatgcagtcaacaacacagagtgctggaagcctgtggcagaatacattgatcagcagtttgagcagtatttccgagacgagagtggcctgaaccgaaagaacatccaagacaacagggtgcactgctgcctgtacttcatctcacccttcggccatgggtatggtccaagcctgaggctcctggcaccaccgggtgctgtcaagggaacaggccaagagcaccaggggcagggctgccactagcaggtggtcacaggttcctgttccccaggctccggccattggatgttgaattcatgaaggccctgcatcagcgggtcaacatcgtgcctatcctggctaaggcagacacactgacacctcccgaagtggaccacaagaaacgcaaagtgagggaagctggtggtgggaggggatcaggtgggcttctagaaaggatgtggtccccagaactgtgggcccctcatctgtttgtcagatccgggaggagattgagcattttggaatcaagatctatcaattcccagactgtgactctgatgaggatgaggacttcaaattgcaggaccaagccct

SEQ ID NO: 179919 - DNA, 1588 bp, Homo sapiens
  Payload ID: 15451
  Gene Symbol: SEPT5
  Gene Name: septin 5
  ENST ID: ENST00000383045
  CDS Start-End: 307-1443
cgcgggcgcctgcgacgccccgcctctggctcgggtgcgggagcggggcctgcccggactgcgacgccgccacagcttggggccagttcgcccagtcagggggatggctcggtcggcctcgggggtcgacgatcccccgggtaggcgacgtgccctgtccaggcctcacttcccgcgtccgcaaaacggggtggacaacgcagcctaaggcagagccgcgccaaggtccctcgctgtcgccgggctctggcggcctgaccgggcctggggtccgagcgtgcccccgggcctgggggggtcgccgcgatggactcgctggcagcgccccaggaccgcctggtggagcagctgctgtcgccgcggacccaggcccagaggcggctcaaggacattgacaagcagtacgtgggcttcgccacactgcccaaccaggtgcaccgcaagtcggtgaagaaaggctttgacttcacactcatggtggctggtgagtcaggcctggggaagtccacactggtccacagcctcttcctgacagacttgtacaaggaccggaagctgctcagtgctgaggagcgcatcagccagacggtagagattctaaaacacacggtggacattgaggagaagggagtcaagctgaagctcaccatcgtggacacgccgggattcggggacgctgtcaacaacaccgagtgctggaagcccatcaccgactatgtggaccagcagtttgagcagtacttccgtgatgagagcggcctcaaccgaaagaacatccaagacaaccgagtgcactgctgcctatacttcatctcccccttcgggcatgggctgcggccagtggatgtgggtttcatgaaggcattgcatgagaaggtcaacatcgtgcctctcatcgccaaagctgactgtcttgtccccagtgagatccggaagctgaaggagcggatccgggaggagattgacaagtttgggatccatgtataccagttccctgagtgtgactcggacgaggatgaggacttcaagcagcaggaccgggaactgaaggagagcgcgcccttcgccgttataggcagcaacacggtggtggaggccaaggggcagcgggtccggggccgactgtacccctgggggatcgtggaggtggagaaccaggcgcattgcgacttcgtgaagctgcgcaacatgctcatccgcacgcatatgcacgacctcaaggacgtgacgtgcgacgtgcactacgagaactaccgcgcgcactgcatccagcagatgaccagcaaactgacccaggacagccgcatggagagccccatcccgatcctgccgctgcccaccccggacgccgagactgagaagcttatcaggatgaaggatgaggaactgaggcgcatgcaggagatgctgcagaggatgaagcagcagatgcaggaccagtgacgctcgccgcggacacaccgtccgtctccgggacgccctcgcacccctggacaccagaccggactgttcccgacccggagacgcggggccacagcccccagctgaccctaatttattctcagcaccaccccctcccaggtcattg

SEQ ID NO: 179920 - DNA, 794 bp, Homo sapiens
  Payload ID: 15451
  Gene Symbol: SEPT5
  Gene Name: septin 5
  ENST ID: ENST00000395109
  CDS Start-End: 255-794
atctccaggcttttgcccacgggccctccccttatttttgccaacgaaatgccccaccctgggaaccgtaccctctgctgtctcctcataccgcatttggtaagagacagggtattgggcttctggagaaacctttgtgtccctaccctgttccatcctgtccccaggacattgacaagcagtacgtgggcttcgccacactgcccaaccaggtgcaccgcaagtcggtgaagaaaggctttgacttcacactcatggtggctggtgagtcaggcctggggaagtccacactggtccacagcctcttcctgacagacttgtacaaggaccggaagctgctcagtgctgaggagcgcatcagccagacggtagagattctaaaacacacggtggacattgaggagaagggagtcaagctgaagctcaccatcgtggacacgccgggattcggggacgctgtcaacaacaccgagtgctggaagcccatcaccgactatgtggaccagcagtttgagcagtacttccgtgatgagagcggcctcaaccgaaagaacatccaagacaaccgagtgcactgctgcctatacttcatctcccccttcgggcatgggctgcggccagtggatgtgggtttcatgaaggcattgcatgagaaggtcaacatcgtgcctctcatcgccaaagctgactgtcttgtccccagtgagatccggaagctgaaggagcggatccgggaggagattgacaagtttgggatccatgtataccagttccctgagtgtgactcggacgag

SEQ ID NO: 179921 - DNA, 1974 bp, Homo sapiens
  Payload ID: 15451
  Gene Symbol: SEPT5
  Gene Name: septin 5
  ENST ID: ENST00000406395
  CDS Start-End: 86-1099
ccccgcagcccggcctcggcctccgccgcttgtcgtcgcgccccgcccgcgagcccgccccgcacgtcccccgccggcggccaccatgagcacaggcctgcggtacaagagcaagctggcgaccccagaggacaagcaggacattgacaagcagtacgtgggcttcgccacactgcccaaccaggtgcaccgcaagtcggtgaagaaaggctttgacttcacactcatggtggctggtgagtcaggcctggggaagtccacactggtccacagcctcttcctgacagacttgtacaaggaccggaagctgctcagtgctgaggagcgcatcagccagacggtagagattctaaaacacacggtggacattgaggagaagggagtcaagctgaagctcaccatcgtggacacgccgggattcggggacgctgtcaacaacaccgagtgctggaagcccatcaccgactatgtggaccagcagtttgagcagtacttccgtgatgagagcggcctcaaccgaaagaacatccaagacaaccgagtgcactgctgcctatacttcatctcccccttcgggcatgggctgcggccagtggatgtgggtttcatgaaggcattgcatgagaaggtcaacatcgtgcctctcatcgccaaagctgactgtcttgtccccagtgagatccggaagctgaaggagcggatccgggaggagattgacaagtttgggatccatgtataccagttccctgagtgtgactcggacgaggatgaggacttcaagcagcaggaccgggaactgaaggagagcgcgcccttcgccgttataggcagcaacacggtggtggaggccaaggggcagcgggtccggggccgactgtacccctgggggatcgtggagggcgcattgcgacttcgtgaagctgcgcaacatgctcatccgcacgcatatgcacgacctcaaggacgtgacgtgcgacgtgcactacgagaactaccgcgcgcactgcatccagcagatgaccagcaaactgacccaggacagccgcatggagagccccatcccgatcctgccgctgcccaccccggacgccgagactgagaagcttatcaggatgaaggatgaggaactgaggcgcatgcaggagatgctgcagaggatgaagcagcagatgcaggaccagtgacgctcgccgcggacacaccgtccgtctccgggacgccctcgcacccctggacaccagaccggactgttcccgacccggagacgcggggccacagcccccagctgaccctaatttattctcagcaccaccccctcccaggtcattgtgtctgtttccgaggggcctggaccgtagcccccgcccagctggccctctctgaccttgggggatcaggagcgaagttgggcgggacttcagagatccgcctcccttgcccttcccccgcccccggacggtcacagcacccaaaccgcaggccctgctctggcaggcaggcaaagctaggcagaagaggattcccaggatcctgggtctgttccctgccccagtgctgcagaacggacttgggagccctcctttgcctgctcccgcgggtcacccagcgagtgctgagaccccattttctgtcgaggcgggccgagtcttcccttatccccagacgcctagcgggcagggttgggctgaatcaaatgggagccctccagacataaggaggccagaggctgcaaggagcggggtcgtgaccgcttacaccccttctccacagcccggcccgacctggagggcccccggggcactgggcggtgagccacctcctggcaactctcggtgccgtcccctgccctcgctcgaggcctcttctccccagcaccgctgtggtgtgccgggatcctgagcctaggcctcccgatgttcccacccgcatgatcccttcccgccacacgatgctccgttttcttccgttgtgaat

SEQ ID NO: 179922 - DNA, 1996 bp, Homo sapiens
  Payload ID: 15451
  Gene Symbol: SEPT5
  Gene Name: septin 5
  ENST ID: ENST00000406172
  CDS Start-End: 61-807
ccgcttgtcgtcgcgccccgcccgcgagcccgccccgcacgtcccccgccggcggccaccatgagcacaggcctgcggtacaagagcaagctggcgaccccagaggacaagcaggacattgacaagcagtacgtgggcttcgccacactgcccaaccaggtgcaccgcaagtcggtgaagaaaggctttgacttcacactcatggtggctggtgagtcaggcctggggaagtccacactggtccacagcctcttcctgacagacttgtacaaggaccggaagctgctcagtgctgaggagcgcatcagccagacggtagagattctaaaacacacggtggacattgaggagaagggagtcaagctgaagctcaccatcgtggacacgccgggattcggggacgctgtcaacaacaccgagtgctggaagcccatcaccgactatgtggaccagcagtttgagcagtacttccgtgatgagagcggcctcaaccgaaagaacatccaagacaaccgagtgcactgctgcctatacttcatctcccccttcgggcatgggctgcggccagtggatgtgggtttcatgaaggcattgcatgagaaggtcaacatcgtgcctctcatcgccaaagctgactgtcttgtccccagtgagatccggaagctgaaggagcggatccgggaggagattgacaagtttgggatccatgtataccagttccctgagtgtgactcggacgaggatgaggacttcaagcagcaggaccgggaactgaagtggagaaccaggcgcattgcgacttcgtgaagctgcgcaacatgctcatccgcacgcatatgcacgacctcaaggacgtgacgtgcgacgtgcactacgagaactaccgcgcgcactgcatccagcagatgaccagcaaactgacccaggacagccgcatggagagccccatcccgatcctgccgctgcccaccccggacgccgagactgagaagcttatcaggatgaaggatgaggaagtatgtggggcggcgggggcggcggaggcgggcgtcagggatgctcctccgcggtgctgctcacccgccgggttgtctccgcccgcagctgaggcgcatgcaggagatgctgcagaggatgaagcagcagatgcaggaccagtgacgctcgccgcggacacaccgtccgtctccgggacgccctcgcacccctggacaccagaccggactgttcccgacccggagacgcggggccacagcccccagctgaccctaatttattctcagcaccaccccctcccaggtcattgtgtctgtttccgaggggcctggaccgtagcccccgcccagctggccctctctgaccttgggggatcaggagcgaagttgggcgggacttcagagatccgcctcccttgcccttcccccgcccccggacggtcacagcacccaaaccgcaggccctgctctggcaggcaggcaaagctaggcagaagaggattcccaggatcctgggtctgttccctgccccagtgctgcagaacggacttgggagccctcctttgcctgctcccgcgggtcacccagcgagtgctgagaccccattttctgtcgaggcgggccgagtcttcccttatccccagacgcctagcgggcagggttgggctgaatcaaatgggagccctccagacataaggaggccagaggctgcaaggagcggggtcgtgaccgcttacaccccttctccacagcccggcccgacctggagggcccccggggcactgggcggtgagccacctcctggcaactctcggtgccgtcccctgccctcgctcgaggcctcttctccccagcaccgctgtggtgtgccgggatcctgagcctaggcctcccgatgttcccacccgcatgatcccttcccgccacacgatgctccgttttcttccgttgtgaatgccgcgtcctgtcctggtgacaggagaacaatgttggtgaacgtc

SEQ ID NO: 179923 - DNA, 2070 bp, Homo sapiens
  Payload ID: 15451
  Gene Symbol: SEPT5
  Gene Name: septin 5
  Uniprot ID: Q99719
  ENST ID: ENST00000455784
  CDS Start-End: 126-1235
ggagcgggcggcggcggcggcggcgcggaggggccgctcaccccgcagcccggcctcggcctccgccgcttgtcgtcgcgccccgcccgcgagcccgccccgcacgtcccccgccggcggccaccatgagcacaggcctgcggtacaagagcaagctggcgaccccagaggacaagcaggacattgacaagcagtacgtgggcttcgccacactgcccaaccaggtgcaccgcaagtcggtgaagaaaggctttgacttcacactcatggtggctggtgagtcaggcctggggaagtccacactggtccacagcctcttcctgacagacttgtacaaggaccggaagctgctcagtgctgaggagcgcatcagccagacggtagagattctaaaacacacggtggacattgaggagaagggagtcaagctgaagctcaccatcgtggacacgccgggattcggggacgctgtcaacaacaccgagtgctggaagcccatcaccgactatgtggaccagcagtttgagcagtacttccgtgatgagagcggcctcaaccgaaagaacatccaagacaaccgagtgcactgctgcctatacttcatctcccccttcgggcatgggctgcggccagtggatgtgggtttcatgaaggcattgcatgagaaggtcaacatcgtgcctctcatcgccaaagctgactgtcttgtccccagtgagatccggaagctgaaggagcggatccgggaggagattgacaagtttgggatccatgtataccagttccctgagtgtgactcggacgaggatgaggacttcaagcagcaggaccgggaactgaaggagagcgcgcccttcgccgttataggcagcaacacggtggtggaggccaaggggcagcgggtccggggccgactgtacccctgggggatcgtggaggtggagaaccaggcgcattgcgacttcgtgaagctgcgcaacatgctcatccgcacgcatatgcacgacctcaaggacgtgacgtgcgacgtgcactacgagaactaccgcgcgcactgcatccagcagatgaccagcaaactgacccaggacagccgcatggagagccccatcccgatcctgccgctgcccaccccggacgccgagactgagaagcttatcaggatgaaggatgaggaactgaggcgcatgcaggagatgctgcagaggatgaagcagcagatgcaggaccagtgacgctcgccgcggacacaccgtccgtctccgggacgccctcgcacccctggacaccagaccggactgttcccgacccggagacgcggggccacagcccccagctgaccctaatttattctcagcaccaccccctcccaggtcattgtgtctgtttccgaggggcctggaccgtagcccccgcccagctggccctctctgaccttgggggatcaggagcgaagttgggcgggacttcagagatccgcctcccttgcccttcccccgcccccggacggtcacagcacccaaaccgcaggccctgctctggcaggcaggcaaagctaggcagaagaggattcccaggatcctgggtctgttccctgccccagtgctgcagaacggacttgggagccctcctttgcctgctcccgcgggtcacccagcgagtgctgagaccccattttctgtcgaggcgggccgagtcttcccttatccccagacgcctagcgggcagggttgggctgaatcaaatgggagccctccagacataaggaggccagaggctgcaaggagcggggtcgtgaccgcttacaccccttctccacagcccggcccgacctggagggcccccggggcactgggcggtgagccacctcctggcaactctcggtgccgtcccctgccctcgctcgaggcctcttctccccagcaccgctgtggtgtgccgggatcctgagcctaggcctcccgatgttcccacccgcatgatcccttcccgccacacgatgctccgttttcttccgttgtgaatgccgcgtcctgtcctggtgacaggagaacaatgttggtgaacgtc

SEQ ID NO: 179924 - DNA, 4113 bp, Homo sapiens
  Payload ID: 15451
  Gene Symbol: SEPT5
  Gene Name: septin 5
  ENST ID: ENST00000455843
  CDS Start-End: 1519-2655
gttctaatgtgcaggggcttggcctgaccagtcctaccctggaacctttccaggccccatgtcctgctccgctgggcttgcctgttgggattctactggggtcatggaggtgggtggcccacagagcggagctcgggagacccccgcagtccctggagtagccacatgggagggaggcccggctggcaggagctcccagtccctccaatcctgtgggtcagagctggtgaggatgctcagagggcaagggaatgtccacagaagcacgtgggagatgggtcccatcccacccccacccctgtctctgagggcagggccacctgagggctgcagggcagcgcatgggtggccggcgtttattcagcaggctggcgggggcttccaagttttgcagggacctccagtactccggcagcctgcacccttcctttcccttcccttcccttctgtccaccctaagcctcctaggggacaggcaggctggacttcagaaaaggtgggctctgccctcctccggtcccccgaatgtcttgggaaagagtccaccaaacacacatgcacacacccgcgcacacgcacatacccaatgcatgcacacacgtacacacacacgcatacacgcatgtatacacgcgcacacacgcaggcattacacacacacacattacacacacacacccgcacggacgcgcacacacaaacgcgcgcacgcacgcacgcacgcacgggggaggtcagccccaagcagggctggggaggggtgcagggcgcggcgtgtctgtgggcacttggggcgtcgagacgccgccgggaggttttcgggcaagtctgcgagaagacggcgggccctgaactgggcgggtacccgcgctgttgcgcgtgggtcccgggagcggcctccggcgccctctggcgggcggaagccgcgcagcacctcttgggggcgggacgcgcggtggctaccgactcccggcccgccccggcccgcgtgcaggacccggtcgtcccctcctgctgtcctggagcccggactgaggccccgggggcgcggcagggctcccggtccacgcgagccatggcccgaccgcgcctcggctcagccctgccctccgcagccgctttcgggtggctccgcccgcggcccaatttccaggcgaccgtttcccggcgacggcgggcggggccgtctctgccgccccccgccgcgcgctccgcgggcgcctgcgacgccccgcctctggctcgggtgcgggagcggggcctgcccggactgcgacgccgccacagcttggggccagttcgcccagtcagggggatggctcggtcggcctcgggggtcgacgatcccccgggtaggcgacgtgccctgtccaggcctcacttcccgcgtccgcaaaacggggtggacaacgcagcctaaggcagagccgcgccaaggtccctcgctgtcgccgggctctggcggcctgaccgggcctggggtccgagcgtgcccccgggcctgggggggtcgccgcgatggactcgctggcagcgccccaggaccgcctggtggagcagctgctgtcgccgcggacccaggcccagaggcggctcaaggacattgacaagcagtacgtgggcttcgccacactgcccaaccaggtgcaccgcaagtcggtgaagaaaggctttgacttcacactcatggtggctggtgagtcaggcctggggaagtccacactggtccacagcctcttcctgacagacttgtacaaggaccggaagctgctcagtgctgaggagcgcatcagccagacggtagagattctaaaacacacggtggacattgaggagaagggagtcaagctgaagctcaccatcgtggacacgccgggattcggggacgctgtcaacaacaccgagtgctggaagcccatcaccgactatgtggaccagcagtttgagcagtacttccgtgatgagagcggcctcaaccgaaagaacatccaagacaaccgagtgcactgctgcctatacttcatctcccccttcgggcatgggctgcggccagtggatgtgggtttcatgaaggcattgcatgagaaggtcaacatcgtgcctctcatcgccaaagctgactgtcttgtccccagtgagatccggaagctgaaggagcggatccgggaggagattgacaagtttgggatccatgtataccagttccctgagtgtgactcggacgaggatgaggacttcaagcagcaggaccgggaactgaaggagagcgcgcccttcgccgttataggcagcaacacggtggtggaggccaaggggcagcgggtccggggccgactgtacccctgggggatcgtggaggtggagaaccaggcgcattgcgacttcgtgaagctgcgcaacatgctcatccgcacgcatatgcacgacctcaaggacgtgacgtgcgacgtgcactacgagaactaccgcgcgcactgcatccagcagatgaccagcaaactgacccaggacagccgcatggagagccccatcccgatcctgccgctgcccaccccggacgccgagactgagaagcttatcaggatgaaggatgaggaactgaggcgcatgcaggagatgctgcagaggatgaagcagcagatgcaggaccagtgacgctcgccgcggacacaccgtccgtctccgggacgccctcgcacccctggacaccagaccggactgttcccgacccggagacgcggggccacagcccccagctgaccctaatttattctcagcaccaccccctcccaggtcattgtgtctgtttccgaggggcctggaccgtagcccccgcccagctggccctctctgaccttgggggatcaggagcgaagttgggcgggacttcagagatccgcctcccttgcccttcccccgcccccggacggtcacagcacccaaaccgcaggccctgctctggcaggcaggcaaagctaggcagaagaggattcccaggatcctgggtctgttccctgccccagtgctgcagaacggacttgggagccctcctttgcctgctcccgcgggtcacccagcgagtgctgagaccccattttctgtcgaggcgggccgagtcttcccttatccccagacgcctagcgggcagggttgggctgaatcaaatgggagccctccagacataaggaggccagaggctgcaaggagcggggtcgtgaccgcttacaccccttctccacagcccggcccgacctggagggcccccggggcactgggcggtgagccacctcctggcaactctcggtgccgtcccctgccctcgctcgaggcctcttctccccagcaccgctgtggtgtgccgggatcctgagcctaggcctcccgatgttcccacccgcatgatcccttcccgccacacgatgctccgttttcttccgttgtgaatgccgcgtcctgtcctggtgacaggagaacaatgttggtgaacgtcgcagcgggtgtccgagtgctccgtgtgcccctgagagcgggtgggagcggaagcctgagcggcctgcggcctccggcgatagtgtgctatctgccgctgcagcgcgcgtccgcgcggcctctgggctatttctggccaggccgcagcactgtggtcggtgcgggcgtggcaggggcggggcggccttatcgctcggctctcccgcctacgcctcccgctgcagagtaagccgggctgccgtcttctcgccatgggctccgggccgcgcggggcgctgagcttactgctcctgctgctggccccgccgagccgcccggccgcaggttgcccggcgccctgtagctgcgcggggacgctcgtggactgcgggcgccgcgggctgacttgggcctcgctgccgaccgccttccctgtcgacacaaccgagctggtgctgaccggcaacaacctgacggcgctgccgccggggctgctggacgcgctgcccgcgctgcgcaccgcacacctgggcgccaacccctggcgctgcgactgccgccttgtgccgctgcgcgcctggctggccggccgccccgagcgtgcgccctaccgcgacctgcgttgcgtggcgcccccagcgctgc

SEQ ID NO: 179925 - DNA, 2241 bp, Homo sapiens
  Payload ID: 15451
  Gene Symbol: SEPT5
  Gene Name: septin 5
  Uniprot ID: Q99719
  ENST ID: ENST00000438754
  CDS Start-End: 281-1321
tggctcgggtgcgggagcggggcctgcccggactgcgacgccgccacagcttggggccagttcgcccagtcagggggatggctcggtcggcctcgggggtcgacgatcccccgggtaggcgacgtgccctgtccaggcctcacttcccgcgtccgcaaaacggggtggacaacgcagcctaaggcagagccgcgccaaggtccctcgctgtcgccgggctctggcggcctgaccgggcctggggtccgagcgtgcccccgggcctgggggggtcgccgcgatggactcgctggcagcgccccaggaccgcctggtggagcagctgctgtcgccgcggacccaggcccagaggcggctcaaggacattgacaagcagtacgtgggcttcgccacactgcccaaccaggtgcaccgcaagtcggtgaagaaaggctttgacttcacactcatggtggctggtgagtcaggcctggggaagtccacactggtccacagcctcttcctgacagacttgtacaaggaccggaagctgctcagtgctgaggagcgcatcagccagacggtagagattctaaaacacacggtggacattgaggagaagggagtcaagctgaagctcaccatcgtggacacgccgggattcggggacgctgtcaacaacaccgagtgctggaagcccatcaccgactatgtggaccagcagtttgagcagtacttccgtgatgagagcggcctcaaccgaaagaacatccaagacaaccgagtgcactgctgcctatacttcatctcccccttcgggcatgggctgcggccagtggatgtgggtttcatgaaggcattgcatgagaaggtcaacatcgtgcctctcatcgccaaagctgactgtcttgtccccagtgagatccggaagctgaaggagcggatccgggaggagattgacaagtttgggatccatgtataccagttccctgagtgtgactcggacgaggatgaggacttcaagcagcaggaccgggaactgaaggagagcgcgcccttcgccgttataggcagcaacacggtggtggaggccaaggggcagcgggtccggggccgactgtacccctgggggatcgtggagggcgcattgcgacttcgtgaagctgcgcaacatgctcatccgcacgcatatgcacgacctcaaggacgtgacgtgcgacgtgcactacgagaactaccgcgcgcactgcatccagcagatgaccagcaaactgacccaggacagccgcatggagagccccatcccgatcctgccgctgcccaccccggacgccgagactgagaagcttatcaggatgaaggatgaggaactgaggcgcatgcaggagatgctgcagaggatgaagcagcagatgcaggaccagtgacgctcgccgcggacacaccgtccgtctccgggacgccctcgcacccctggacaccagaccggactgttcccgacccggagacgcggggccacagcccccagctgaccctaatttattctcagcaccaccccctcccaggtcattgtgtctgtttccgaggggcctggaccgtagcccccgcccagctggccctctctgaccttgggggatcaggagcgaagttgggcgggacttcagagatccgcctcccttgcccttcccccgcccccggacggtcacagcacccaaaccgcaggccctgctctggcaggcaggcaaagctaggcagaagaggattcccaggatcctgggtctgttccctgccccagtgctgcagaacggacttgggagccctcctttgcctgctcccgcgggtcacccagcgagtgctgagaccccattttctgtcgaggcgggccgagtcttcccttatccccagacgcctagcgggcagggttgggctgaatcaaatgggagccctccagacataaggaggccagaggctgcaaggagcggggtcgtgaccgcttacaccccttctccacagcccggcccgacctggagggcccccggggcactgggcggtgagccacctcctggcaactctcggtgccgtcccctgccctcgctcgaggcctcttctccccagcaccgctgtggtgtgccgggatcctgagcctaggcctcccgatgttcccacccgcatgatcccttcccgccacacgatgctccgttttcttccgttgtgaatgccgcgtcctgtcctggtgacaggagaacaatgttggtgaacgtc

SEQ ID NO: 179926 - DNA, 3173 bp, Homo sapiens
  Payload ID: 15451
  Gene Symbol: SEPT5
  Gene Name: septin 5
  ENST ID: ENST00000431044
  CDS Start-End: 191-1159
cgggagcggggcctgcccggactgcgacgccgccacagcttggggccagttcgcccagtcagggggatggctcggtcggcctcgggggtcgacgatcccccgggacattgacaagcagtacgtgggcttcgccacactgcccaaccaggtgcaccgcaagtcggtgaagaaaggctttgacttcacactcatggtggctggtgagtcaggcctggggaagtccacactggtccacagcctcttcctgacagacttgtacaaggaccggaagctgctcagtgctgaggagcgcatcagccagacggtagagattctaaaacacacggtggacattgaggagaagggagtcaagctgaagctcaccatcgtggacacgccgggattcggggacgctgtcaacaacaccgagtgctggaagcccatcaccgactatgtggaccagcagtttgagcagtacttccgtgatgagagcggcctcaaccgaaagaacatccaagacaaccgagtgcactgctgcctatacttcatctcccccttcgggcatgggctgcggccagtggatgtgggtttcatgaaggcattgcatgagaaggtcaacatcgtgcctctcatcgccaaagctgactgtcttgtccccagtgagatccggaagctgaaggagcggatccgggaggagattgacaagtttgggatccatgtataccagttccctgagtgtgactcggacgaggatgaggacttcaagcagcaggaccgggaactgaaggagagcgcgcccttcgccgttataggcagcaacacggtggtggaggccaaggggcagcgggtccggggccgactgtacccctgggggatcgtggaggtggagaaccaggcgcattgcgacttcgtgaagctgcgcaacatgctcatccgcacgcatatgcacgacctcaaggacgtgacgtgcgacgtgcactacgagaactaccgcgcgcactgcatccagcagatgaccagcaaactgacccaggacagccgcatggagagccccatcccgatcctgccgctgcccaccccggacgccgagactgagaagcttatcaggatgaaggatgaggaactgaggcgcatgcaggagatgctgcagaggatgaagcagcagatgcaggaccagtgacgctcgccgcggacacaccgtccgtctccgggacgccctcgcacccctggacaccagaccggactgttcccgacccggagacgcggggccacagcccccagctgaccctaatttattctcagcaccaccccctcccaggtcattgtgtctgtttccgaggggcctggaccgtagcccccgcccagctggccctctctgaccttgggggatcaggagcgaagttgggcgggacttcagagatccgcctcccttgcccttcccccgcccccggacggtcacagcacccaaaccgcaggccctgctctggcaggcaggcaaagctaggcagaagaggattcccaggatcctgggtctgttccctgccccagtgctgcagaacggacttgggagccctcctttgcctgctcccgcgggtcacccagcgagtgctgagaccccattttctgtcgaggcgggccgagtcttcccttatccccagacgcctagcgggcagggttgggctgaatcaaatgggagccctccagacataaggaggccagaggctgcaaggagcggggtcgtgaccgcttacaccccttctccacagcccggcccgacctggagggcccccggggcactgggcggtgagccacctcctggcaactctcggtgccgtcccctgccctcgctcgaggcctcttctccccagcaccgctgtggtgtgccgggatcctgagcctaggcctcccgatgttcccacccgcatgatcccttcccgccacacgatgctccgttttcttccgttgtgaatgccgcgtcctgtcctggtgacaggagaacaatgttggtgaacgtcgcagcgggtgtccgagtgctccgtgtgcccctgagagcgggtgggagcggaagcctgagcggcctgcggcctccggcgatagtgtgctatctgccgctgcagcgcgcgtccgcgcggcctctgggctatttctggccaggccgcagcactgtggtcggtgcgggcgtggcaggggcggggcggccttatcgctcggctctcccgcctacgcctcccgctgcagagtaagccgggctgccgtcttctcgccatgggctccgggccgcgcggggcgctgagcttactgctcctgctgctggccccgccgagccgcccggccgcaggttgcccggcgccctgtagctgcgcggggacgctcgtggactgcgggcgccgcgggctgacttgggcctcgctgccgaccgccttccctgtcgacacaaccgagctggtgctgaccggcaacaacctgacggcgctgccgccggggctgctggacgcgctgcccgcgctgcgcaccgcacacctgggcgccaacccctggcgctgcgactgccgccttgtgccgctgcgcgcctggctggccggccgccccgagcgtgcgccctaccgcgacctgcgttgcgtggcgcccccagcgctgcgcggccgcctgctgccctatctggccgaggacgagctgcgcgccgcttgcgctcccggcccgctctgctggggggcgctggcggcgcagcttgcgctgctgggccttgggctgctgcacgcgttgctgctggtgctgctgctgtgccgcctgcggaggctgcgggcccgggcccgcgctcgcgccgcagcccggctgtcgctgaccgacccgctggtggccgagcgagccggaaccgacgagtcctgaggagagaaccggtgcgtcctgaggagagaaccggcgctgggcaacacgggcctgcaaactcgacaggaccctgcccgaggggccctcgcgccaacctggaccggtccccgcctcctccgctgcccaatctctcagacccaccccacctgcaggcccagaccacgtgggacagaactcctgcccaccctaccccgagggaggcgaacccgcacttccaggcttgggaggaccatggggcacaatgcggtccagaccctgctgcgtctcccttccaaactctggtgctgaataaacccttctgatctggt

SEQ ID NO: 179927 - DNA, 318 bp, Homo sapiens
  Payload ID: 15451
  Gene Symbol: SEPT5
  Gene Name: septin 5
  ENST ID: ENST00000413258
  CDS Start-End: 1-318
caccatcgtggacacgccgggattcggggacgctgtcaacaacaccgagtgctggaagcccatcaccgactatgtggaccagcagtttgagcagtacttccgtgatgagagcggcctcaaccgaaagaacatccaagacaaccgagtgcactgctgcctatacttcatctcccccttcgggcatggtgagatccggaagctgaaggagcggatccgggaggagattgacaagtttgggatccatgtataccagttccctgagtgtgactcggacgaggatgaggacttcaagcagcaggaccgggaactgaaggtgaa

SEQ ID NO: 179928 - DNA, 1108 bp, Homo sapiens
  Payload ID: 15451
  Gene Symbol: SEPT5
  Gene Name: septin 5
  ENST ID: ENST00000412544
  CDS Start-End: 205-1108
ccgccgcccgcgcgcctctcaccgtgtctctccgtctctcccccgcccgccggcccggacccgctcggaaccggacccggactcgaccccgaccccgaccccgcagaggacaagcaggacattgacaagcagtacgtgggcttcgccacactgcccaaccaggtgcaccgcaagtcggtgaagaaaggctttgacttcacactcatggtggctggtgagtcaggcctggggaagtccacactggtccacagcctcttcctgacagacttgtacaaggaccggaagctgctcagtgctgaggagcgcatcagccagacggtagagattctaaaacacacggtggacattgaggagaagggagtcaagctgaagctcaccatcgtggacacgccgggattcggggacgctgtcaacaacaccgagtgctggaagcccatcaccgactatgtggaccagcagtttgagcagtacttccgtgatgagagcggcctcaaccgaaagaacatccaagacaaccgagtgcactgctgcctatacttcatctcccccttcgggcatgggctgcggccagtggatgtgggtttcatgaaggcattgcatgagaaggtcaacatcgtgcctctcatcgccaaagctgactgtcttgtccccagtgagatccggaagctgaaggagcggatccgggaggagattgacaagtttgggatccatgtataccagttccctgagtgtgactcggacgaggatgaggacttcaagcagcaggaccgggaactgaaggagagcgcgcccttcgccgttataggcagcaacacggtggtggaggccaaggggcagcgggtccggggccgactgtacccctgggggatcgtggaggtggagaaccaggcgcattgcgacttcgtgaagctgcgcaacatgctcatccgcacgcatatgcacgacctcaaggacgtgacgtgcgacgtgcactacgagaactaccgcgcgcactgcatccagcagatgaccagcaaactgacccaggacagccgcatggagagccccatcccgatcctgccgctgcccaccccggacgccgagactgagaagcttatcaggatgaagg

SEQ ID NO: 179929 - DNA, 920 bp, Homo sapiens
  Payload ID: 15451
  Gene Symbol: SEPT5
  Gene Name: septin 5
  ENST ID: ENST00000431124
  CDS Start-End: 9-920
caggccccatgtcctgctccgctgggcttgcctgttgggattctactggggtcatggaggtgggtggcccacagagcggagctcgggagacccccgcagtccctggagtagccacatgggagggaggcccggctggcaggagctcccagtccctccaatcctgtgggtcagagctggacattgacaagcagtacgtgggcttcgccacactgcccaaccaggtgcaccgcaagtcggtgaagaaaggctttgacttcacactcatggtggctggtgagtcaggcctggggaagtccacactggtccacagcctcttcctgacagacttgtacaaggaccggaagctgctcagtgctgaggagcgcatcagccagacggtagagattctaaaacacacggtggacattgaggagaagggagtcaagctgaagctcaccatcgtggacacgccgggattcggggacgctgtcaacaacaccgagtgctggaagcccatcaccgactatgtggaccagcagtttgagcagtacttccgtgatgagagcggcctcaaccgaaagaacatccaagacaaccgagtgcactgctgcctatacttcatctcccccttcgggcatgggctgcggccagtggatgtgggtttcatgaaggcattgcatgagaaggtcaacatcgtgcctctcatcgccaaagctgactgtcttgtccccagtgagatccggaagctgaaggagcggatccgggaggagattgacaagtttgggatccatgtataccagttccctgagtgtgactcggacgaggatgaggacttcaagcagcaggaccgggaactgaaggagagcgcgcccttcgccgttataggcagcaacacggtggtggaggccaaggggcagcgggtccggggccgactgtacccc

SEQ ID NO: 179930 - DNA, 662 bp, Homo sapiens
  Payload ID: 15451
  Gene Symbol: SEPT5
  Gene Name: septin 5
  ENST ID: ENST00000622227
  CDS Start-End: 126-662
ggagcgggcggcggcggcggcggcgcggaggggccgctcaccccgcagcccggcctcggcctccgccgcttgtcgtcgcgccccgcccgcgagcccgccccgcacgtcccccgccggcggccaccatgagcacaggcctgcggtacaagagcaagctggcgaccccagaggacaagcaggacattgacaagcagtacgtgggcttcgccacactgcccaaccaggtgcaccgcaagtcggtgaagaaaggctttgacttcacactcatggtggctggtgagtcaggcctggggaagtccacactggtccacagcctcttcctgacagacttgtacaaggaccggaagctgctcagtgctgaggagcgcatcagccagacggtagagattctaaaacacacggtggacattgaggagaagggagtcaagctgaagctcaccatcgtggacacgccgggattcggggacgctgtcaacaacaccgagtgctggaagcccatcaccgactatgtggaccagcagtttgagcagtacttccgtgatgagagcggcctcaaccgaaagaacatccaagacaaccgagtgcactgctgcctatacttcatctcccccttcgggcatgggctgcggccagtggatgggtttcatgaaggcattgcatga

SEQ ID NO: 179931 - DNA, 2693 bp, Homo sapiens
  Payload ID: 15452
  Gene Symbol: SEPT6
  Gene Name: septin 6
  Uniprot ID: Q14141
  ENST ID: ENST00000343984
  CDS Start-End: 266-1570
gaagaactggaactggtctggccatagggggaagcggcgcgttaaatccgccccctctccataccctactttcaaggggtgggcggtagaggggaggttggggttggagcagcggcgagggggcccctcccttgcacctccccccaccggacttggtcgcgcccgaagtgtaacactttctctttgtcggaggagctcctctgtttcctgtgcagtagctcccgttgcggcggcacccgtggcagccctggcggacgcaggagcgatggcagcgaccgatatagctcgccaggtgggtgaaggttgccgaactgtccccctggctggacatgtggggtttgacagcttgcctgaccagctggtgaataagtccgtcagccagggcttctgcttcaacatcctgtgcgtgggagagacaggtttgggcaagtccaccctcatggacaccctgttcaacaccaaattcgaaggggagccagccacccacacacagccgggtgtccagctccagtctaatacctatgacctccaagagagcaacgtgaggctaaagctcacgatcgttagcacagttggctttggggaccagatcaacaaagaggacagctacaagcctatcgtggaattcatcgatgcacaattcgaggcctacctgcaggaagagctaaagatccgaagagtgctacacacctaccatgactcccgaatccatgtctgcttgtatttcattgcccccacgggtcattccctgaagtctctggacctagtgactatgaagaagctggacagtaaggtgaacatcatccccatcattgccaaagcagatgccatttcgaagagtgagctaacaaagttcaaaatcaaaatcaccagcgagcttgtcagcaacggagtccagatctatcagtttcctacagatgatgagtcggtggcagagatcaatggaaccatgaacgcccacctgccgtttgctgtcattggcagcacagaagaactgaagataggcaacaagatgatgagggcgcggcagtatccttggggcactgtgcaggttgaaaacgaggcccactgcgactttgtgaagctgcgggagatgctgattcgggtcaacatggaggatctgcgggagcagacccacacccggcactatgagctgtatcgccgctgtaagctggaggagatgggcttcaaggacaccgaccctgacagcaaacccttcagtttacaggagacatatgaggccaaaaggaacgagttcctaggggaactccagaaaaaagaagaggagatgagacagatgttcgtccagcgagtcaaagagaaagaagcggagctcaaagaggcagagaaagagctgcacgagaagtttgaccgtctgaagaaactgcaccaggacgagaagaagaaactggaggataagaagaaatccctggatgatgaagtgaatgctttcaagcaaagaaagacggcggctgagctgctccagtcccagggctcccaggctggaggctcacagactctgaagagagacaaagagaagaaaaataatccatggctgtgtactgaatagtattccccgctacagctggactggactccatttagccttttaagccgaggttcctattttaactgacagctttcctttggggtgccaggcagcgaggccccccacccctatcctgccatgtacttcaagctcacttcttctttttgagttccgcaacttgctcctgcctcccagccccactggcactgaccatgaccacctacttctattttttttttagagtttctttttttgatcacttactttcaaagcacacagtcaaacaaggttatgccaaatttccaggcctttttgaagtattgagaaggggaaggggatttctcacttcaattatagatcataataggaagcaaaaagaaaaaaatgaaaagcaaacatatgcacgcacttttcttgttgacaaagcaagaatataggtttgctgtgtaggtttggtgctctattgattggtgagtgaccagagcaagtatgaaggtgatgctgccaaagcacaagccagtttcttgggaaaattcaagttacagtggagtatttttttgaagaccatatgcttggaggtagaaacaaaccaacgaccaaaaaaaaaaaaaaaaaaatctgctcagatactcagccagtagctcagagagatgctgagttaggcctgtcaggtctccttgggaaaggcttcatatttgcaactttgatgattctatgtccagcttcagagctgctttcccagaaattcacgcttaaacaaccaaccggtaaccaccacttccccacaccgccgcccggtaattatttgcattacaaaccggaggcgccctcatttgcatttgtgtacagattaactagttaaggcttgagaagctctgaataattcaaaagtattagacccacacagccttggagagaccttcagaaactaaggaggagttttatattaagggagacattttagtcagtaagacgatataacctacttactccgtaaggggaaatgaaggcccagagaagggaagggacttgaccgaggtcccacttctgtttcgaggcagaagccagactaattttcatgcctcctgactcccaatcagtttcacaaagggattcaatctgtttatatacgttacattcctgg

SEQ ID NO: 179932 - DNA, 1576 bp, Homo sapiens
  Payload ID: 15452
  Gene Symbol: SEPT6
  Gene Name: septin 6
  Uniprot ID: Q14141
  ENST ID: ENST00000354228
  CDS Start-End: 266-1555
gaagaactggaactggtctggccatagggggaagcggcgcgttaaatccgccccctctccataccctactttcaaggggtgggcggtagaggggaggttggggttggagcagcggcgagggggcccctcccttgcacctccccccaccggacttggtcgcgcccgaagtgtaacactttctctttgtcggaggagctcctctgtttcctgtgcagtagctcccgttgcggcggcacccgtggcagccctggcggacgcaggagcgatggcagcgaccgatatagctcgccaggtgggtgaaggttgccgaactgtccccctggctggacatgtggggtttgacagcttgcctgaccagctggtgaataagtccgtcagccagggcttctgcttcaacatcctgtgcgtgggagagacaggtttgggcaagtccaccctcatggacaccctgttcaacaccaaattcgaaggggagccagccacccacacacagccgggtgtccagctccagtctaatacctatgacctccaagagagcaacgtgaggctaaagctcacgatcgttagcacagttggctttggggaccagatcaacaaagaggacagctacaagcctatcgtggaattcatcgatgcacaattcgaggcctacctgcaggaagagctaaagatccgaagagtgctacacacctaccatgactcccgaatccatgtctgcttgtatttcattgcccccacgggtcattccctgaagtctctggacctagtgactatgaagaagctggacagtaaggtgaacatcatccccatcattgccaaagcagatgccatttcgaagagtgagctaacaaagttcaaaatcaaaatcaccagcgagcttgtcagcaacggagtccagatctatcagtttcctacagatgatgagtcggtggcagagatcaatggaaccatgaacgcccacctgccgtttgctgtcattggcagcacagaagaactgaagataggcaacaagatgatgagggcgcggcagtatccttggggcactgtgcaggttgaaaacgaggcccactgcgactttgtgaagctgcgggagatgctgattcgggtcaacatggaggatctgcgggagcagacccacacccggcactatgagctgtatcgccgctgtaagctggaggagatgggcttcaaggacaccgaccctgacagcaaacccttcagtttacaggagacatatgaggccaaaaggaacgagttcctaggggaactccagaaaaaagaagaggagatgagacagatgttcgtccagcgagtcaaagagaaagaagcggagctcaaagaggcagagaaagagctgcacgagaagtttgaccgtctgaagaaactgcaccaggacgagaagaagaaactggaggataagaagaaatccctggatgatgaagtgaatgctttcaagcaaagaaagacggcggctgagctgctccagtcccagggctcccaggctggaggctcacagactctgaagagagacaaagagaagaaaaactttttttaatcttgtcttcagcagctgcac

SEQ ID NO: 179933 - DNA, 4652 bp, Homo sapiens
  Payload ID: 15452
  Gene Symbol: SEPT6
  Gene Name: septin 6
  ENST ID: ENST00000354416
  CDS Start-End: 266-1561
gaagaactggaactggtctggccatagggggaagcggcgcgttaaatccgccccctctccataccctactttcaaggggtgggcggtagaggggaggttggggttggagcagcggcgagggggcccctcccttgcacctccccccaccggacttggtcgcgcccgaagtgtaacactttctctttgtcggaggagctcctctgtttcctgtgcagtagctcccgttgcggcggcacccgtggcagccctggcggacgcaggagcgatggcagcgaccgatatagctcgccaggtgggtgaaggttgccgaactgtccccctggctggacatgtggggtttgacagcttgcctgaccagctggtgaataagtccgtcagccagggcttctgcttcaacatcctgtgcgtgggagagacaggtttgggcaagtccaccctcatggacaccctgttcaacaccaaattcgaaggggagccagccacccacacacagccgggtgtccagctccagtctaatacctatgacctccaagagagcaacgtgaggctaaagctcacgatcgttagcacagttggctttggggaccagatcaacaaagaggacagctacaagcctatcgtggaattcatcgatgcacaattcgaggcctacctgcaggaagagctaaagatccgaagagtgctacacacctaccatgactcccgaatccatgtctgcttgtatttcattgcccccacgggtcattccctgaagtctctggacctagtgactatgaagaagctggacagtaaggtgaacatcatccccatcattgccaaagcagatgccatttcgaagagtgagctaacaaagttcaaaatcaaaatcaccagcgagcttgtcagcaacggagtccagatctatcagtttcctacagatgatgagtcggtggcagagatcaatggaaccatgaacgcccacctgccgtttgctgtcattggcagcacagaagaactgaagataggcaacaagatgatgagggcgcggcagtatccttggggcactgtgcaggttgaaaacgaggcccactgcgactttgtgaagctgcgggagatgctgattcgggtcaacatggaggatctgcgggagcagacccacacccggcactatgagctgtatcgccgctgtaagctggaggagatgggcttcaaggacaccgaccctgacagcaaacccttcagtttacaggagacatatgaggccaaaaggaacgagttcctaggggaactccagaaaaaagaagaggagatgagacagatgttcgtccagcgagtcaaagagaaagaagcggagctcaaagaggcagagaaagagctgcacgagaagtttgaccgtctgaagaaactgcaccaggacgagaagaagaaactggaggataagaagaaatccctggatgatgaagtgaatgctttcaagcaaagaaagacggcggctgagctgctccagtcccagggctcccaggctggaggctcacagactctgaagagagacaaagagaagaaaaatttgggcttcctgtagacacccttttcctgcgcaacagagctgggcctccctttctctaatttcccccttaacatgcctggggggcatacaatccaacccgcgccctctcctctcttcctgccaaggtttatagaaacctgagaatctgagggtgatgtctggccgctggtcaagaagccaacagtcatgtggctcgcagatgcatcctgcatcccagtccccctcccagcacccccagccatcccccctgtcttcccccacatctttgccagaggtgtgacatggtcagggggcccatctgctactctttcccaccagctcccctgttccagttctggttgctgttagtttccctgaggtatttgcaaccaccatggctgggtaaccaccgatcagcacagctgtccccttggtctcctgtatcccagtcactagtcctccctggtccaccccaccctcatcctcaggagccacagccatttcttagagggtttcaaaaggacagcctttggcgccttttccttctaacctttgagtccagccctttccagttttcattcactcgaagtaactgcactcaagctgtgctcaaaatcggcaacgcatttatttacaccaagcccttcccataaaacacaactgctgaagaaaatagcagacgtttcccctctctctaactctgggtatcccacagatgcaaaagggagaataaacctgaatattattaccagcctagagtcttgaatgatagccttaccgaattcttcttgtgaggtatttcagcatctcggggggtaatttccggaagggctccatactgtcccaataaggtgaggccagtagcaggaataataaatcccactttgtaggctggaaaactgagctgtcaaaagaatcaagtgtttgggggtttgctctgatgagtcttctagttcatttggtgaatgtcatgatgatttttaacatgcattttgcatgcatcccccaataagaagagatgagactcggccggagagaagaaaaggcccttaactttctttccaatttaaggagttgagagtttaaaaatattccagccctaagtttttatcatgggtcccatctgatagtggctttgggaacctctgtgaagtagagagccctcccttgtcagggttatgaggcacagtggcctttggtgtttggccagtgacagtgtgagagatggagttgacctggcaatgatctgtggctaacatgccgtctctctgcccttcctttgcagtaatccatggctgtgtactgaatagtattccccgctacagctggactggactccatttagccttttaagccgaggttcctattttaactgacagctttcctttggggtgccaggcagcgaggccccccacccctatcctgccatgtacttcaagctcacttcttctttttgagttccgcaacttgctcctgcctcccagccccactggcactgaccatgaccacctacttctattttttttttagagtttctttttttgatcacttactttcaaagcacacagtcaaacaaggttatgccaaatttccaggcctttttgaagtattgagaaggggaaggggatttctcacttcaattatagatcataataggaagcaaaaagaaaaaaatgaaaagcaaacatatgcacgcacttttcttgttgacaaagcaagaatataggtttgctgtgtaggtttggtgctctattgattggtgagtgaccagagcaagtatgaaggtgatgctgccaaagcacaagccagtttcttgggaaaattcaagttacagtggagtatttttttgaagaccatatgcttggaggtagaaacaaaccaacgaccaaaaaaaaaaaaaaaaaaatctgctcagatactcagccagtagctcagagagatgctgagttaggcctgtcaggtctccttgggaaaggcttcatatttgcaactttgatgattctatgtccagcttcagagctgctttcccagaaattcacgcttaaacaaccaaccggtaaccaccacttccccacaccgccgcccggtaattatttgcattacaaaccggaggcgccctcatttgcatttgtgtacagattaactagttaaggcttgagaagctctgaataattcaaaagtattagacccacacagccttggagagaccttcagaaactaaggaggagttttatattaagggagacattttagtcagtaagacgatataacctacttactccgtaaggggaaatgaaggcccagagaagggaagggacttgaccgaggtcccacttctgtttcgaggcagaagccagactaattttcatgcctcctgactcccaatcagtttcacaaagggattcaatctgtttatatacgttacattcctggatacgaggtcttttgatgttcagagtaactgactagttagtattagaagaccctcgaggtttttttccacagaaaaacatctgaagatggattgggtgagggctggcaaaacgaaggcatgccgggccagctccttaacccaatgacccagtgatgctgcaaggctggaacggggtccaggagactgtgtgtaacaggtgccctaggtgacccttataatcagggaagtttggtgaacaaaaatcgaacccatgagtgaacataaattaaaaagttgatcaacctattaaaatgtgtatttcattgggtagcttttctcactgtagacagattttttccttcttcaatgaaaaggcttttaaattagtacaactgttactatttaaaaaaaaaataccctaagtactctgtttacttctggtgaaacaaaaccagtcattagaaatggtctgtgcttttattttcccagactggagtggcttttctgaaacacacacacacacacacacacacacacacacacacacacacacacacacgtacacacatccctcacttctcttaagccaagaagtttgctttccctagctgcagtgtagatggctcttgtttttgtttttttgttttaatcatttggcattcacatgtggctgttaatatgtgcttgtttttaattaaaacaagaagctttaaa

SEQ ID NO: 179934 - DNA, 2609 bp, Homo sapiens
  Payload ID: 15452
  Gene Symbol: SEPT6
  Gene Name: septin 6
  Uniprot ID: Q14141
  ENST ID: ENST00000360156
  CDS Start-End: 266-1549
gaagaactggaactggtctggccatagggggaagcggcgcgttaaatccgccccctctccataccctactttcaaggggtgggcggtagaggggaggttggggttggagcagcggcgagggggcccctcccttgcacctccccccaccggacttggtcgcgcccgaagtgtaacactttctctttgtcggaggagctcctctgtttcctgtgcagtagctcccgttgcggcggcacccgtggcagccctggcggacgcaggagcgatggcagcgaccgatatagctcgccaggtgggtgaaggttgccgaactgtccccctggctggacatgtggggtttgacagcttgcctgaccagctggtgaataagtccgtcagccagggcttctgcttcaacatcctgtgcgtgggagagacaggtttgggcaagtccaccctcatggacaccctgttcaacaccaaattcgaaggggagccagccacccacacacagccgggtgtccagctccagtctaatacctatgacctccaagagagcaacgtgaggctaaagctcacgatcgttagcacagttggctttggggaccagatcaacaaagaggacagctacaagcctatcgtggaattcatcgatgcacaattcgaggcctacctgcaggaagagctaaagatccgaagagtgctacacacctaccatgactcccgaatccatgtctgcttgtatttcattgcccccacgggtcattccctgaagtctctggacctagtgactatgaagaagctggacagtaaggtgaacatcatccccatcattgccaaagcagatgccatttcgaagagtgagctaacaaagttcaaaatcaaaatcaccagcgagcttgtcagcaacggagtccagatctatcagtttcctacagatgatgagtcggtggcagagatcaatggaaccatgaacgcccacctgccgtttgctgtcattggcagcacagaagaactgaagataggcaacaagatgatgagggcgcggcagtatccttggggcactgtgcaggttgaaaacgaggcccactgcgactttgtgaagctgcgggagatgctgattcgggtcaacatggaggatctgcgggagcagacccacacccggcactatgagctgtatcgccgctgtaagctggaggagatgggcttcaaggacaccgaccctgacagcaaacccttcagtttacaggagacatatgaggccaaaaggaacgagttcctaggggaactccagaaaaaagaagaggagatgagacagatgttcgtccagcgagtcaaagagaaagaagcggagctcaaagaggcagagaaagagctgcacgagaagtttgaccgtctgaagaaactgcaccaggacgagaagaagaaactggaggataagaagaaatccctggatgatgaagtgaatgctttcaagcaaagaaagacggcggctgagctgctccagtcccagggctcccaggctggaggctcacagactctgaagagagacaaagagaagaaaaattaactctgctgtttgctgcatgctgcatgagacccagggtcctgctttttttaatcttgtcttcagcagctgcactaagtctaaaggagaagactgccattatagaagagttagggttccatattgtctcaaatcagaaatcaaccaatttcctctcccctcaaactgcaagcacacacacatacaccacaccactcaacaagtgttcatgtgtccctgtgtccaggcaagaagctctcttcctgactcacatggtattttaaatggaagtgtcttgtcctaactaacaaggcaggaaaagaaccatcagagctggaaaatggacgaaatgtaacctcagagaaacaactacaggaccactcacccaagtgtaagtgactggggcaggacacctcagctgtgggtatgaaagtactgttctgttcacaaggttttgtttgagttttatgtttttcttttaaacatttctctggttcgatgggttgactgtctacagccactgttaaacatttctgaatatgcaagagaaagtcaagtgacatttgtatcttcttcagcattcgcagaccttctatagattccagcaaagggggaaaatgtatccactatctaacacttaggtagagaagggagggggtttaagcttagtgagggcaaaattactccattccaccttccgagaccagttagggttttgagagaggtttctgctcaacctgggatctggagggagagctttgatgttggtaaatctgccttgaattcattggtttaacttgcatcaaaataccatgtgagtgtgctcattctcatatatcccctaccaccatcaccaccattctgctgttcagtgtctcttgagagagcctctttgcatgttttccagaatctgtgtgtgtttttcctttcttctcctttgttctttttgctcaaaggtgtgaccagtcattgcccctctggggctttcattctccaggagaaacatcccagaaccagcactgtttagcctgatacctttctaatgtccatgtcaattttcaataaaattcaaagaaatgctaaa

SEQ ID NO: 179935 - DNA, 4694 bp, Homo sapiens
  Payload ID: 15452
  Gene Symbol: SEPT6
  Gene Name: septin 6
  Uniprot ID: Q14141
  ENST ID: ENST00000394610
  CDS Start-End: 266-1549
gaagaactggaactggtctggccatagggggaagcggcgcgttaaatccgccccctctccataccctactttcaaggggtgggcggtagaggggaggttggggttggagcagcggcgagggggcccctcccttgcacctccccccaccggacttggtcgcgcccgaagtgtaacactttctctttgtcggaggagctcctctgtttcctgtgcagtagctcccgttgcggcggcacccgtggcagccctggcggacgcaggagcgatggcagcgaccgatatagctcgccaggtgggtgaaggttgccgaactgtccccctggctggacatgtggggtttgacagcttgcctgaccagctggtgaataagtccgtcagccagggcttctgcttcaacatcctgtgcgtgggagagacaggtttgggcaagtccaccctcatggacaccctgttcaacaccaaattcgaaggggagccagccacccacacacagccgggtgtccagctccagtctaatacctatgacctccaagagagcaacgtgaggctaaagctcacgatcgttagcacagttggctttggggaccagatcaacaaagaggacagctacaagcctatcgtggaattcatcgatgcacaattcgaggcctacctgcaggaagagctaaagatccgaagagtgctacacacctaccatgactcccgaatccatgtctgcttgtatttcattgcccccacgggtcattccctgaagtctctggacctagtgactatgaagaagctggacagtaaggtgaacatcatccccatcattgccaaagcagatgccatttcgaagagtgagctaacaaagttcaaaatcaaaatcaccagcgagcttgtcagcaacggagtccagatctatcagtttcctacagatgatgagtcggtggcagagatcaatggaaccatgaacgcccacctgccgtttgctgtcattggcagcacagaagaactgaagataggcaacaagatgatgagggcgcggcagtatccttggggcactgtgcaggttgaaaacgaggcccactgcgactttgtgaagctgcgggagatgctgattcgggtcaacatggaggatctgcgggagcagacccacacccggcactatgagctgtatcgccgctgtaagctggaggagatgggcttcaaggacaccgaccctgacagcaaacccttcagtttacaggagacatatgaggccaaaaggaacgagttcctaggggaactccagaaaaaagaagaggagatgagacagatgttcgtccagcgagtcaaagagaaagaagcggagctcaaagaggcagagaaagagctgcacgagaagtttgaccgtctgaagaaactgcaccaggacgagaagaagaaactggaggataagaagaaatccctggatgatgaagtgaatgctttcaagcaaagaaagacggcggctgagctgctccagtcccagggctcccaggctggaggctcacagactctgaagagagacaaagagaagaaaaattaactctgctgtttgctgcatgctgcatgagacccagggtcctgtttgggcttcctgtagacacccttttcctgcgcaacagagctgggcctccctttctctaatttcccccttaacatgcctggggggcatacaatccaacccgcgccctctcctctcttcctgccaaggtttatagaaacctgagaatctgagggtgatgtctggccgctggtcaagaagccaacagtcatgtggctcgcagatgcatcctgcatcccagtccccctcccagcacccccagccatcccccctgtcttcccccacatctttgccagaggtgtgacatggtcagggggcccatctgctactctttcccaccagctcccctgttccagttctggttgctgttagtttccctgaggtatttgcaaccaccatggctgggtaaccaccgatcagcacagctgtccccttggtctcctgtatcccagtcactagtcctccctggtccaccccaccctcatcctcaggagccacagccatttcttagagggtttcaaaaggacagcctttggcgccttttccttctaacctttgagtccagccctttccagttttcattcactcgaagtaactgcactcaagctgtgctcaaaatcggcaacgcatttatttacaccaagcccttcccataaaacacaactgctgaagaaaatagcagacgtttcccctctctctaactctgggtatcccacagatgcaaaagggagaataaacctgaatattattaccagcctagagtcttgaatgatagccttaccgaattcttcttgtgaggtatttcagcatctcggggggtaatttccggaagggctccatactgtcccaataaggtgaggccagtagcaggaataataaatcccactttgtaggctggaaaactgagctgtcaaaagaatcaagtgtttgggggtttgctctgatgagtcttctagttcatttggtgaatgtcatgatgatttttaacatgcattttgcatgcatcccccaataagaagagatgagactcggccggagagaagaaaaggcccttaactttctttccaatttaaggagttgagagtttaaaaatattccagccctaagtttttatcatgggtcccatctgatagtggctttgggaacctctgtgaagtagagagccctcccttgtcagggttatgaggcacagtggcctttggtgtttggccagtgacagtgtgagagatggagttgacctggcaatgatctgtggctaacatgccgtctctctgcccttcctttgcagtaatccatggctgtgtactgaatagtattccccgctacagctggactggactccatttagccttttaagccgaggttcctattttaactgacagctttcctttggggtgccaggcagcgaggccccccacccctatcctgccatgtacttcaagctcacttcttctttttgagttccgcaacttgctcctgcctcccagccccactggcactgaccatgaccacctacttctattttttttttagagtttctttttttgatcacttactttcaaagcacacagtcaaacaaggttatgccaaatttccaggcctttttgaagtattgagaaggggaaggggatttctcacttcaattatagatcataataggaagcaaaaagaaaaaaatgaaaagcaaacatatgcacgcacttttcttgttgacaaagcaagaatataggtttgctgtgtaggtttggtgctctattgattggtgagtgaccagagcaagtatgaaggtgatgctgccaaagcacaagccagtttcttgggaaaattcaagttacagtggagtatttttttgaagaccatatgcttggaggtagaaacaaaccaacgaccaaaaaaaaaaaaaaaaaaatctgctcagatactcagccagtagctcagagagatgctgagttaggcctgtcaggtctccttgggaaaggcttcatatttgcaactttgatgattctatgtccagcttcagagctgctttcccagaaattcacgcttaaacaaccaaccggtaaccaccacttccccacaccgccgcccggtaattatttgcattacaaaccggaggcgccctcatttgcatttgtgtacagattaactagttaaggcttgagaagctctgaataattcaaaagtattagacccacacagccttggagagaccttcagaaactaaggaggagttttatattaagggagacattttagtcagtaagacgatataacctacttactccgtaaggggaaatgaaggcccagagaagggaagggacttgaccgaggtcccacttctgtttcgaggcagaagccagactaattttcatgcctcctgactcccaatcagtttcacaaagggattcaatctgtttatatacgttacattcctggatacgaggtcttttgatgttcagagtaactgactagttagtattagaagaccctcgaggtttttttccacagaaaaacatctgaagatggattgggtgagggctggcaaaacgaaggcatgccgggccagctccttaacccaatgacccagtgatgctgcaaggctggaacggggtccaggagactgtgtgtaacaggtgccctaggtgacccttataatcagggaagtttggtgaacaaaaatcgaacccatgagtgaacataaattaaaaagttgatcaacctattaaaatgtgtatttcattgggtagcttttctcactgtagacagattttttccttcttcaatgaaaaggcttttaaattagtacaactgttactatttaaaaaaaaaataccctaagtactctgtttacttctggtgaaacaaaaccagtcattagaaatggtctgtgcttttattttcccagactggagtggcttttctgaaacacacacacacacacacacacacacacacacacacacacacacacacacgtacacacatccctcacttctcttaagccaagaagtttgctttccctagctgcagtgtagatggctcttgtttttgtttttttgttttaatcatttggcattcacatgtggctgttaatatgtgcttgtttttaattaaaacaagaagcttt

SEQ ID NO: 179936 - DNA, 1617 bp, Homo sapiens
  Payload ID: 15452
  Gene Symbol: SEPT6
  Gene Name: septin 6
  Uniprot ID: Q14141
  ENST ID: ENST00000489216
  CDS Start-End: 266-1549
gaagaactggaactggtctggccatagggggaagcggcgcgttaaatccgccccctctccataccctactttcaaggggtgggcggtagaggggaggttggggttggagcagcggcgagggggcccctcccttgcacctccccccaccggacttggtcgcgcccgaagtgtaacactttctctttgtcggaggagctcctctgtttcctgtgcagtagctcccgttgcggcggcacccgtggcagccctggcggacgcaggagcgatggcagcgaccgatatagctcgccaggtgggtgaaggttgccgaactgtccccctggctggacatgtggggtttgacagcttgcctgaccagctggtgaataagtccgtcagccagggcttctgcttcaacatcctgtgcgtgggagagacaggtttgggcaagtccaccctcatggacaccctgttcaacaccaaattcgaaggggagccagccacccacacacagccgggtgtccagctccagtctaatacctatgacctccaagagagcaacgtgaggctaaagctcacgatcgttagcacagttggctttggggaccagatcaacaaagaggacagctacaagcctatcgtggaattcatcgatgcacaattcgaggcctacctgcaggaagagctaaagatccgaagagtgctacacacctaccatgactcccgaatccatgtctgcttgtatttcattgcccccacgggtcattccctgaagtctctggacctagtgactatgaagaagctggacagtaaggtgaacatcatccccatcattgccaaagcagatgccatttcgaagagtgagctaacaaagttcaaaatcaaaatcaccagcgagcttgtcagcaacggagtccagatctatcagtttcctacagatgatgagtcggtggcagagatcaatggaaccatgaacgcccacctgccgtttgctgtcattggcagcacagaagaactgaagataggcaacaagatgatgagggcgcggcagtatccttggggcactgtgcaggttgaaaacgaggcccactgcgactttgtgaagctgcgggagatgctgattcgggtcaacatggaggatctgcgggagcagacccacacccggcactatgagctgtatcgccgctgtaagctggaggagatgggcttcaaggacaccgaccctgacagcaaacccttcagtttacaggagacatatgaggccaaaaggaacgagttcctaggggaactccagaaaaaagaagaggagatgagacagatgttcgtccagcgagtcaaagagaaagaagcggagctcaaagaggcagagaaagagctgcacgagaagtttgaccgtctgaagaaactgcaccaggacgagaagaagaaactggaggataagaagaaatccctggatgatgaagtgaatgctttcaagcaaagaaagacggcggctgagctgctccagtcccagggctcccaggctggaggctcacagactctgaagagagacaaagagaagaaaaattaactctgctgtttgctgcatgctgcatgagacccagggtcctgctttttttaatcttgtcttcagcagct

SEQ ID NO: 179937 - DNA, 1393 bp, Homo sapiens
  Payload ID: 15452
  Gene Symbol: SEPT6
  Gene Name: septin 6
  Uniprot ID: Q14141
  ENST ID: ENST00000460411
  CDS Start-End: 266-1069
gaagaactggaactggtctggccatagggggaagcggcgcgttaaatccgccccctctccataccctactttcaaggggtgggcggtagaggggaggttggggttggagcagcggcgagggggcccctcccttgcacctccccccaccggacttggtcgcgcccgaagtgtaacactttctctttgtcggaggagctcctctgtttcctgtgcagtagctcccgttgcggcggcacccgtggcagccctggcggacgcaggagcgatggcagcgaccgatatagctcgccaggtgggtgaaggttgccgaactgtccccctggctggacatgtggggtttgacagcttgcctgaccagctggtgaataagtccgtcagccagggcttctgcttcaacatcctgtgcgtgggagagacaggtttgggcaagtccaccctcatggacaccctgttcaacaccaaattcgaaggggagccagccacccacacacagccgggtgtccagctccagtctaatacctatgacctccaagagagcaacgtgaggctaaagctcacgatcgttagcacagttggctttggggaccagatcaacaaagaggacagctacaagcctatcgtggaattcatcgatgcacaattcgaggcctacctgcaggaagagctaaagatccgaagagtgctacacacctaccatgactcccgaatccatgtctgcttgtatttcattgcccccacgggtcattccctgaagtctctggacctagtgactatgaagaagctggacagtaaggtgaacatcatccccatcattgccaaagcagatgccatttcgaagagtgagctaacaaagttcaaaatcaaaatcaccagcgagcttgtcagcaacggagtccagatctatcagtttcctacagatgatgagtcggtggcagagatcaatggaaccatgaacgcccacctgccgtttgctgtcattggcagcacagaagaactgaagataggcaacaagatgatgagggcgcggcagtatccttggggcactgtgcaggctgcacgagaagtttgaccgtctgaagaaactgcaccaggacgagaagaagaaactggaggataagaagaaatccctggatgatgaagtgaatgctttcaagcaaagaaagacggcggctgagctgctccagtcccagggctcccaggctggaggctcacagactctgaagagagacaaagagaagaaaaattaactctgctgtttgctgcatgctgcatgagacccagggtcctgtaatccatggctgtgtactgaatagtattccccgctacagctggactggactccatttagccttttaagccgagctttttttaatcttgtcttcagcagctgcac

SEQ ID NO: 179938 - DNA, 4350 bp, Homo sapiens
  Payload ID: 15453
  Gene Symbol: SEPT7
  Gene Name: septin 7
  ENST ID: ENST00000350320
  CDS Start-End: 225-1538
gagatggaagccagcctccgctaggcccggaagcctcgtctgagggggcgggggacggaggagggagcgggagtcgagcgagagcctgtggaggagtccgcctgctgtagcgtgcgtaagcaaggcagctacgccgggcggctacgctgcggaatcggcgtaggcgcctttggagaatcggcgggctgcgctccgctggggctggtcgcggagggggggaggggatgtcggtcagtgcgagatccgctgctgctgaggagaggagcgtcaacagcagcaccatgggtcagcaacagaagaaccttgaaggctatgtgggatttgccaatctcccaaatcaagtatacagaaaatcggtgaagagaggttttgaattcacgcttatggtagtgggtgaatctggattgggaaagtcgacattaatcaactcattattcctcacagatttgtattctccagagtatccaggtccttctcatagaattaaaaagactgtacaggtggaacaatccaaagttttaatcaaagaaggtggtgttcagttgctgctcacaatagttgataccccaggatttggagatgcagtggataatagtaattgctggcagcctgttatcgactacattgatagtaaatttgaggactacctaaatgcagaatcacgagtgaacagacgtcagatgcctgataacagggtgcagtgttgtttatacttcattgctccttcaggacatggacttaaaccattggatattgagtttatgaagcgtttgcatgaaaaagtgaatatcatcccacttattgccaaagcagacacactcacaccagaggaatgccaacagtttaaaaaacagataatgaaagaaatccaagaacataaaattaaaatatacgaatttccagaaacagatgatgaagaagaaaataaacttgttaaaaagataaaggaccgtttacctcttgctgtggtaggtagtaatactatcattgaagttaatggcaaaagggtcagaggaaggcagtatccttggggtgttgctgaagttgaaaatggtgaacattgtgattttacaatcctaagaaatatgttgataagaacacacatgcaggacttgaaagatgttactaataatgtccactatgagaactacagaagcagaaaacttgcagctgtgacttataatggagttgataacaacaagaataaagggcagctgactaagagccctctggcacaaatggaagaagaaagaagggagcatgtagctaaaatgaagaagatggagatggagatggagcaggtgtttgagatgaaggtcaaagaaaaagttcaaaaactgaaggactctgaagctgagctccagcggcgccatgagcaaatgaaaaagaatttggaagcacagcacaaagaattggaggaaaaacgtcgtcagttcgaggatgagaaagcaaactgggaagctcaacaacgtattttagaacaacagaactcttcaagaaccttggaaaagaacaagaagaaagggaagatcttttaaactctctattgaccaccagttaacgtattagttgccaatatgccagcttggacatcagtgtttgttggatccgtttgaccaatttgcaccagttttatccataatgatggatttaacagcatgacaaaaattatttttttttttgttcttgatggagattaagatgccttgaattgtctagggtgttctgtacttagaaagtaagagctctaagtacctttcctacattttctttttttattaaacagatatcttcagtttaatgcaagagaacattttactgttgtacaatcatgttctggtggtttgattgtttacaggatattccaaaataaaaggactctggaagattttcattgaggataaattgccataatatgatgcaaactgtgcttctctatgataattacaatacaaaggttccattcagtgcagcatatacaataatgtaatttagtctaacacagttgaccctattttttgacacttccattgtttaaaaatacacatggaaaaaaaaaaaaccctatatgcttactgtgcacctagagcttttttataacaacgtctttttgtttgtttgttttggattctttaaatatatattattctcatttagtgccctctttagccagaatctcattactgcttcatttttgtaataacatttaatttagatattttccatatattggcactgctaaaatagaatatagcatctttcatatggtaggaaccaacaaggaaactttcctttaactccctttttacactttatggtaagtagcagggggggaaatgcatttatagatcatttctaggcaaaattgtgaagctaatgaccaacctgtttctacctatatgcagtctctttattttactagaaatgggaatcatggcctcttgaagagaaaaaagtcaccattctgcatttagctgtattcatatattgcatttctgtattttttgtttgtattgtaaaaaattcacataataaacgatgttgtgatgtaatattgtgtgaggtcttaaatatcctacagtcgatgtacaagagtagagtatgtttgggaagaaacttttcagcttaagtttgcctcctctacaatgacatcttttatatgcttgtctcatttagaatgcatatgtgctgattttctaatttaagagataccatatctctctattcatttctatctctcatttgtatgcttatttttctgagaacattttttttttcccccagacagggtcttgcttcattgcccaggctggagtgcggtggcacaaacacgacttgactgcagcctcaaccctctgggctcaagcagtcctcctgcctcagccccctgagtatctgggattgcaggcgtgcaccaccacgcctggctaatttttgtattttttgcagcctcccaaagttctgggattacaggcatgagccgtcatgcctggcctctgagaacagtttctgactcattcagattaggtatactctcaagtccctggaaactgaaattttttttaactgtaaagagggtagtgtcatttcttttcttaaggtcaagtgacatagattttaatgtaatgcataatttaggtaagaaattaattaatgtagcctagtttattatcttgaaatgttttaccctatttactttttaaaattaatgacctaagcggagggaataattataagtcaatagcagagagattgttgtttgggtgtttatttttttcagtttttgttttgagagattgggttaacacctctagccaaaattgtttggttttagggaggctaacaataacctactgaatttggaaaatgcaaaggtaaaaaatgtatatagactgcctgctgaactggttaagtactactgcttctgggaaatactatttcaaaattctatgtattataataataaatttgtaagacattcattattctaccatcctaatgaaaactttcagaagtctttctttatccatggcatgcccagggttttacctgaatctgatacaggatctatataactttactaggacttttgattgttgactccaggcttaggtatatcagaaggttctttttgccatttggcctgtggatgtctgagaagatcattcacaatacatgtaaaattcaggtaggcctaaggaaaggccagcctgtagaaagcaaaatggcagtgtctgttctccactgttggaggcattatgtaatttaagtatcctgttagccactgtctttctgctaattaagtggggctgaacaagtaagcactaataataccagtgaaccacttgggcaccttgtgggtagagttttgctgccacctagtggaatgggatatcattgcttccatatcaggttcacaagcaagttaagtgggcacagtttatttctgtgtagctcaggctgtaatcttgaaagctgaggagatacccatgcctctcagactcattagctgggtgtcacattaccacctgcacattctgacccaccgcatcttaatatgttttgtcctcttggagaaactaggagtagaagtcaggatatggtaggtaagggggaaaaaggaaagacggcttgatagctatgaatgcatgaggagcgaaatgttgactcagttatctagatcatggtctccaaacctgatgctatttccttacaaaaatatttgttgagcatgtgtccataattatatgtattgaacaatgaaaatatgtgtcaacaaatgtactgctacactaatgtgaacattatggaacaaaatttgaaagagtgaaataaaaggtttacactttc

SEQ ID NO: 179939 - DNA, 4399 bp, Homo sapiens
  Payload ID: 15453
  Gene Symbol: SEPT7
  Gene Name: septin 7
  Uniprot ID: Q16181
  ENST ID: ENST00000399034
  CDS Start-End: 433-1587
aagtcatgctcgaaatggagcgaggcggcggagctggggaggcggtaatctcgcgagatggaagccagcctccgctaggcccggaagcctcgtctgagggggcgggggacggaggagggagcgggagtcgagcgagagcctgtggaggagtccgcctgctgtagcgtgcgtaagcaaggcagctacgccgggcggctacgctgcggaatcggcgtaggcgcctttggagaatcggcgggctgcgctccgctggggctggtcgcggagggggggaggggatgtcggtcagtgcgagatccgctgctgctgaggagaggagcgtcaacagcagcaccatggcaacagaagaaccttgaaggctatgtgggatttgccaatctcccaaatcaagtatacagaaaatcggtgaagagaggttttgaattcacgcttatggtagtgggtgaatctggattgggaaagtcgacattaatcaactcattattcctcacagatttgtattctccagagtatccaggtccttctcatagaattaaaaagactgtacaggtggaacaatccaaagttttaatcaaagaaggtggtgttcagttgctgctcacaatagttgataccccaggatttggagatgcagtggataatagtaattgctggcagcctgttatcgactacattgatagtaaatttgaggactacctaaatgcagaatcacgagtgaacagacgtcagatgcctgataacagggtgcagtgttgtttatacttcattgctccttcaggacatggacttaaaccattggatattgagtttatgaagcgtttgcatgaaaaagtgaatatcatcccacttattgccaaagcagacacactcacaccagaggaatgccaacagtttaaaaaacagataatgaaagaaatccaagaacataaaattaaaatatacgaatttccagaaacagatgatgaagaagaaaataaacttgttaaaaagataaaggaccgtttacctcttgctgtggtaggtagtaatactatcattgaagttaatggcaaaagggtcagaggaaggcagtatccttggggtgttgctgaagttgaaaatggtgaacattgtgattttacaatcctaagaaatatgttgataagaacacacatgcaggacttgaaagatgttactaataatgtccactatgagaactacagaagcagaaaacttgcagctgtgacttataatggagttgataacaacaagaataaagggcagctgactaagagccctctggcacaaatggaagaagaaagaagggagcatgtagctaaaatgaagaagatggagatggagatggagcaggtgtttgagatgaaggtcaaagaaaaagttcaaaaactgaaggactctgaagctgagctccagcggcgccatgagcaaatgaaaaagaatttggaagcacagcacaaagaattggaggaaaaacgtcgtcagttcgaggatgagaaagcaaactgggaagctcaacaacgtattttagaacaacagaactcttcaagaaccttggaaaagaacaagaagaaagggaagatcttttaaactctctattgaccaccagttaacgtattagttgccaatatgccagcttggacatcagtgtttgttggatccgtttgaccaatttgcaccagttttatccataatgatggatttaacagcatgacaaaaattatttttttttttgttcttgatggagattaagatgccttgaattgtctagggtgttctgtacttagaaagtaagagctctaagtacctttcctacattttctttttttattaaacagatatcttcagtttaatgcaagagaacattttactgttgtacaatcatgttctggtggtttgattgtttacaggatattccaaaataaaaggactctggaagattttcattgaggataaattgccataatatgatgcaaactgtgcttctctatgataattacaatacaaaggttccattcagtgcagcatatacaataatgtaatttagtctaacacagttgaccctattttttgacacttccattgtttaaaaatacacatggaaaaaaaaaaaaccctatatgcttactgtgcacctagagcttttttataacaacgtctttttgtttgtttgttttggattctttaaatatatattattctcatttagtgccctctttagccagaatctcattactgcttcatttttgtaataacatttaatttagatattttccatatattggcactgctaaaatagaatatagcatctttcatatggtaggaaccaacaaggaaactttcctttaactccctttttacactttatggtaagtagcagggggggaaatgcatttatagatcatttctaggcaaaattgtgaagctaatgaccaacctgtttctacctatatgcagtctctttattttactagaaatgggaatcatggcctcttgaagagaaaaaagtcaccattctgcatttagctgtattcatatattgcatttctgtattttttgtttgtattgtaaaaaattcacataataaacgatgttgtgatgtaatattgtgtgaggtcttaaatatcctacagtcgatgtacaagagtagagtatgtttgggaagaaacttttcagcttaagtttgcctcctctacaatgacatcttttatatgcttgtctcatttagaatgcatatgtgctgattttctaatttaagagataccatatctctctattcatttctatctctcatttgtatgcttatttttctgagaacattttttttttcccccagacagggtcttgcttcattgcccaggctggagtgcggtggcacaaacacgacttgactgcagcctcaaccctctgggctcaagcagtcctcctgcctcagccccctgagtatctgggattgcaggcgtgcaccaccacgcctggctaatttttgtattttttgcagcctcccaaagttctgggattacaggcatgagccgtcatgcctggcctctgagaacagtttctgactcattcagattaggtatactctcaagtccctggaaactgaaattttttttaactgtaaagagggtagtgtcatttcttttcttaaggtcaagtgacatagattttaatgtaatgcataatttaggtaagaaattaattaatgtagcctagtttattatcttgaaatgttttaccctatttactttttaaaattaatgacctaagcggagggaataattataagtcaatagcagagagattgttgtttgggtgtttatttttttcagtttttgttttgagagattgggttaacacctctagccaaaattgtttggttttagggaggctaacaataacctactgaatttggaaaatgcaaaggtaaaaaatgtatatagactgcctgctgaactggttaagtactactgcttctgggaaatactatttcaaaattctatgtattataataataaatttgtaagacattcattattctaccatcctaatgaaaactttcagaagtctttctttatccatggcatgcccagggttttacctgaatctgatacaggatctatataactttactaggacttttgattgttgactccaggcttaggtatatcagaaggttctttttgccatttggcctgtggatgtctgagaagatcattcacaatacatgtaaaattcaggtaggcctaaggaaaggccagcctgtagaaagcaaaatggcagtgtctgttctccactgttggaggcattatgtaatttaagtatcctgttagccactgtctttctgctaattaagtggggctgaacaagtaagcactaataataccagtgaaccacttgggcaccttgtgggtagagttttgctgccacctagtggaatgggatatcattgcttccatatcaggttcacaagcaagttaagtgggcacagtttatttctgtgtagctcaggctgtaatcttgaaagctgaggagatacccatgcctctcagactcattagctgggtgtcacattaccacctgcacattctgacccaccgcatcttaatatgttttgtcctcttggagaaactaggagtagaagtcaggatatggtaggtaagggggaaaaaggaaagacggcttgatagctatgaatgcatgaggagcgaaatgttgactcagttatctagatcatggtctccaaacctgatgctatttccttacaaaaatatttgttgagcatgtgtccataattatatgtattgaacaatgaaaatatgtgtcaacaaatgtactgctacactaatgtgaacattatggaacaaaatttgaaagagtgaaataaaaggtttacactttc

SEQ ID NO: 179940 - DNA, 4066 bp, Homo sapiens
  Payload ID: 15453
  Gene Symbol: SEPT7
  Gene Name: septin 7
  ENST ID: ENST00000399035
  CDS Start-End: 1-1254
atgaaacaacagaagaaccttgaaggctatgtgggatttgccaatctcccaaatcaagtatacagaaaatcggtgaagagaggttttgaattcacgcttatggtagtgggtgaatctggattgggaaagtcgacattaatcaactcattattcctcacagatttgtattctccagagtatccaggtccttctcatagaattaaaaagactgtacaggtggaacaatccaaagttttaatcaaagaaggtggtgttcagttgctgctcacaatagttgataccccaggatttggagatgcagtggataatagtaattgctggcagcctgttatcgactacattgatagtaaatttgaggactacctaaatgcagaatcacgagtgaacagacgtcagatgcctgataacagggtgcagtgttgtttatacttcattgctccttcaggacatggacttaaaccattggatattgagtttatgaagcgtttgcatgaaaaagtgaatatcatcccacttattgccaaagcagacacactcacaccagaggaatgccaacagtttaaaaaacagataatgaaagaaatccaagaacataaaattaaaatatacgaatttccagaaacagatgatgaagaagaaaataaacttgttaaaaagataaaggaccgtttacctcttgctgtggtaggtagtaatactatcattgaagttaatggcaaaagggtcagaggaaggcagtatccttggggtgttgctgaagttgaaaatggtgaacattgtgattttacaatcctaagaaatatgttgataagaacacacatgcaggacttgaaagatgttactaataatgtccactatgagaactacagaagcagaaaacttgcagctgtgacttataatggagttgataacaacaagaataaagggcagctgactaagagccctctggcacaaatggaagaagaaagaagggagcatgtagctaaaatgaagaagatggagatggagatggagcaggtgtttgagatgaaggtcaaagaaaaagttcaaaaactgaaggactctgaagctgagctccagcggcgccatgagcaaatgaaaaagaatttggaagcacagcacaaagaattggaggaaaaacgtcgtcagttcgaggatgagaaagcaaactgggaagctcaacaacgtattttagaacaacagaactcttcaagaaccttggaaaagaacaagaagaaagggaagatcttttaaactctctattgaccaccagttaacgtattagttgccaatatgccagcttggacatcagtgtttgttggatccgtttgaccaatttgcaccagttttatccataatgatggatttaacagcatgacaaaaattatttttttttttgttcttgatggagattaagatgccttgaattgtctagggtgttctgtacttagaaagtaagagctctaagtacctttcctacattttctttttttattaaacagatatcttcagtttaatgcaagagaacattttactgttgtacaatcatgttctggtggtttgattgtttacaggatattccaaaataaaaggactctggaagattttcattgaggataaattgccataatatgatgcaaactgtgcttctctatgataattacaatacaaaggttccattcagtgcagcatatacaataatgtaatttagtctaacacagttgaccctattttttgacacttccattgtttaaaaatacacatggaaaaaaaaaaaaccctatatgcttactgtgcacctagagcttttttataacaacgtctttttgtttgtttgttttggattctttaaatatatattattctcatttagtgccctctttagccagaatctcattactgcttcatttttgtaataacatttaatttagatattttccatatattggcactgctaaaatagaatatagcatctttcatatggtaggaaccaacaaggaaactttcctttaactccctttttacactttatggtaagtagcagggggggaaatgcatttatagatcatttctaggcaaaattgtgaagctaatgaccaacctgtttctacctatatgcagtctctttattttactagaaatgggaatcatggcctcttgaagagaaaaaagtcaccattctgcatttagctgtattcatatattgcatttctgtattttttgtttgtattgtaaaaaattcacataataaacgatgttgtgatgtaatattgtgtgaggtcttaaatatcctacagtcgatgtacaagagtagagtatgtttgggaagaaacttttcagcttaagtttgcctcctctacaatgacatcttttatatgcttgtctcatttagaatgcatatgtgctgattttctaatttaagagataccatatctctctattcatttctatctctcatttgtatgcttatttttctgagaacattttttttttcccccagacagggtcttgcttcattgcccaggctggagtgcggtggcacaaacacgacttgactgcagcctcaaccctctgggctcaagcagtcctcctgcctcagccccctgagtatctgggattgcaggcgtgcaccaccacgcctggctaatttttgtattttttgcagcctcccaaagttctgggattacaggcatgagccgtcatgcctggcctctgagaacagtttctgactcattcagattaggtatactctcaagtccctggaaactgaaattttttttaactgtaaagagggtagtgtcatttcttttcttaaggtcaagtgacatagattttaatgtaatgcataatttaggtaagaaattaattaatgtagcctagtttattatcttgaaatgttttaccctatttactttttaaaattaatgacctaagcggagggaataattataagtcaatagcagagagattgttgtttgggtgtttatttttttcagtttttgttttgagagattgggttaacacctctagccaaaattgtttggttttagggaggctaacaataacctactgaatttggaaaatgcaaaggtaaaaaatgtatatagactgcctgctgaactggttaagtactactgcttctgggaaatactatttcaaaattctatgtattataataataaatttgtaagacattcattattctaccatcctaatgaaaactttcagaagtctttctttatccatggcatgcccagggttttacctgaatctgatacaggatctatataactttactaggacttttgattgttgactccaggcttaggtatatcagaaggttctttttgccatttggcctgtggatgtctgagaagatcattcacaatacatgtaaaattcaggtaggcctaaggaaaggccagcctgtagaaagcaaaatggcagtgtctgttctccactgttggaggcattatgtaatttaagtatcctgttagccactgtctttctgctaattaagtggggctgaacaagtaagcactaataataccagtgaaccacttgggcaccttgtgggtagagttttgctgccacctagtggaatgggatatcattgcttccatatcaggttcacaagcaagttaagtgggcacagtttatttctgtgtagctcaggctgtaatcttgaaagctgaggagatacccatgcctctcagactcattagctgggtgtcacattaccacctgcacattctgacccaccgcatcttaatatgttttgtcctcttggagaaactaggagtagaagtcaggatatggtaggtaagggggaaaaaggaaagacggcttgatagctatgaatgcatgaggagcgaaatgttgactcagttatctagatcatggtctccaaacctgatgctatttccttacaaaaatatttgttgagcatgtgtccataattatatgtattgaacaatgaaaatatgtgtcaacaaatgtactgctacactaatgtgaacattatggaacaaaatttgaaagagtgaaataaaaggtttacactttc

SEQ ID NO: 179941 - DNA, 1584 bp, Homo sapiens
  Payload ID: 15453
  Gene Symbol: SEPT7
  Gene Name: septin 7
  ENST ID: ENST00000435235
  CDS Start-End: 172-1377
gacggaggagggagcgggagtcgagcgagagcctgtggaggagtccgcctgctgtagcgtgcgtaagcaaggcagctacgccgggcggctacgctgcggaatcggcgtaggcgcctttggagaatcggcgggctgcgctccgctggggctggtcgcggagggggggaggggatgtcggtcagtgcgagatccgctgctgctgaggagaggagcgtcaacagcagcaccatgggtgaatctggattgggaaagtcgacattaatcaactcattattcctcacagatttgtattctccagagtatccaggtccttctcatagaattaaaaagactgtacaggtggaacaatccaaagttttaatcaaagaaggtggtgttcagttgctgctcacaatagttgataccccaggatttggagatgcagtggataatagtaattgctggcagcctgttatcgactacattgatagtaaatttgaggactacctaaatgcagaatcacgagtgaacagacgtcagatgcctgataacagggtgcagtgttgtttatacttcattgctccttcaggacatggacttaaaccattggatattgagtttatgaagcgtttgcatgaaaaagtgaatatcatcccacttattgccaaagcagacacactcacaccagaggaatgccaacagtttaaaaaacagataatgaaagaaatccaagaacataaaattaaaatatacgaatttccagaaacagatgatgaagaagaaaataaacttgttaaaaagataaaggaccgtttacctcttgctgtggtaggtagtaatactatcattgaagttaatggcaaaagggtcagaggaaggcagtatccttggggtgttgctgaagttgaaaatggtgaacattgtgattttacaatcctaagaaatatgttgataagaacacacatgcaggacttgaaagatgttactaataatgtccactatgagaactacagaagcagaaaacttgcagctgtgacttataatggagttgataacaacaagaataaagggcagctgactaagagccctctggcacaaatggaagaagaaagaagggagcatgtagctaaaatgaagaagatggagatggagatggagcaggtgtttgagatgaaggtcaaagaaaaagttcaaaaactgaaggactctgaagctgagctccagcggcgccatgagcaaatgaaaaagaatttggaagcacagcacaaagaattggaggaaaaacgtcgtcagttcgaggatgagaaagcaaactgggaagctcaacaacgtattttagaacaacagaactcttcaagaaccttggaaaagaacaagaagaaagggaagatcttttaaactctctattgaccaccagttaacgtattagttgccaatatgccagcttggacatcagtgtttgttggatccgtttgaccaatttgcaccagttttatccataatgatggatttaacagcatgacaaaaattatttttttttttgttcttgatggagattaagatgccttgaattgtctagggtgttctgtacttagaaagtaagag

SEQ ID NO: 179942 - DNA, 1362 bp, Homo sapiens
  Payload ID: 15453
  Gene Symbol: SEPT7
  Gene Name: septin 7
  ENST ID: ENST00000432293
  CDS Start-End: 84-350
ggaatgccaacagtttaaaaaacagataatgaaagaaatccaagaacataaaattaaaatatacgaatttccagaaacagatgatgaagaagatggagatggagatggagcaggtgtttgagatgaaggtcaaagaaaaagttcaaaaactgaaggactctgaagctgagctccagcggcgccatgagcaaatgaaaaagaatttggaagcacagcacaaagaattggaggaaaaacgtcgtcagttcgaggatgagaaagcaaactgggaagctcaacaacgtattttagaacaacagaactcttcaagaaccttggaaaagaacaagaagaaagggaagatcttttaaactctctattgaccaccagttaacgtattagttgccaatatgccagcttggacatcagtgtttgttggatccgtttgaccaatttgcaccagttttatccataatgatggatttaacagcatgacaaaaattatttttttttttgttcttgatggagattaagatgccttgaattgtctagggtgttctgtacttagaaagtaagagctctaagtacctttcctacattttctttttttattaaacagatatcttcagtttaatgcaagagaacattttactgttgtacaatcatgttctggtggtttgattgtttacaggatattccaaaataaaaggactctggaagattttcattgaggataaattgccataatatgatgcaaactgtgcttctctatgataattacaatacaaaggttccattcagtgcagcatatacaataatgtaatttagtctaacacagttgaccctattttttgacacttccattgtttaaaaatacacatggaaaaaaaaaaaaccctatatgcttactgtgcacctagagcttttttataacaacgtctttttgtttgtttgttttggattctttaaatatatattattctcatttagtgccctctttagccagaatctcattactgcttcatttttgtaataacatttaatttagatattttccatatattggcactgctaaaatagaatatagcatctttcatatggtaggaaccaacaaggaaactttcctttaactccctttttacactttatggtaagtagcagggggggaaatgcatttatagatcatttctaggcaaaattgtgaagctaatgaccaacctgtttctacctatatgcagtctctttattttactagaaatgggaatcatggcctcttgaagagaaaaaagtcaccattctgcatttagctgtattcatatattgcatttctgtattttttgtttgtattgtaaaaaattcacataataaacgatgttgtgatgt

SEQ ID NO: 179943 - DNA, 506 bp, Homo sapiens
  Payload ID: 15453
  Gene Symbol: SEPT7
  Gene Name: septin 7
  ENST ID: ENST00000635476
  CDS Start-End: 279-506
aagtcatgctcgaaatggagcgaggcggcggagctggggaggcggtaatctcgcgagatggaagccagcctccgctaggcccggaagcctcgtctgagggggcgggggacggaggagggagcgggagtcgagcgagagcctgtggaggagtccgcctgctgtagcgtgcgtaagcaaggcagctacgccgggcggctacgctgcggaatcggcgtaggcgcctttggagaatcggcgggctgcgctccgctggggctggtcgcggagggggggaggggatgtcggtcagtgcgagatccgctgctgctgaggagaggagcgtcaacagcagcaccatggctcaacagaagaaccttgaaggctatgtgggatttgccaatctcccaaatcaagtatacagaaaatcggtgaagagaggttttgaattcacgcttatggtagtgggtgaatctggattgggaaagtcgacattaatcaactcattattcctcacagatttgtattct

SEQ ID NO: 179944 - DNA, 1464 bp, Homo sapiens
  Payload ID: 15453
  Gene Symbol: SEPT7
  Gene Name: septin 7
  ENST ID: ENST00000635175
  CDS Start-End: 1-141
agtgcgagatccgctgctgctgaggagaggagcgtcaacagcagcaccatggttcctctgtggatttcttctgttggaatctggaacactggaatgatggaaatgtgttctttacaaagtagctcaacagaagaaccttgaaggctatgtgggatttgccaatctcccaaatcaagtatacagaaaatcggtgaagagaggttttgaattcacgcttatggtagtgggtgaatctggattgggaaagtcgacattaatcaactcattattcctcacagatttgtattctccagagtatccaggtccttctcatagaattaaaaagactgtacaggtggaacaatccaaagttttaatcaaagaaggtggtgttcagttgctgctcacaatagttgataccccaggatttggagatgcagtggataatagtaattgctggcagcctgttatcgactacattgatagtaaatttgaggactacctaaatgcagaatcacgagtgaacagacgtcagatgcctgataacagggtgcagtgttgtttatacttcattgctccttcaggacatggacttaaaccattggatattgagtttatgaagcgtttgcatgaaaaagtgaatatcatcccacttattgccaaagcagacacactcacaccagaggaatgccaacagtttaaaaaacagataatgaaagaaatccaagaacataaaattaaaatatacgaatttccagaaacagatgatgaagaagaaaataaacttgttaaaaagataaaggaccgtttacctcttgctgtggtaggtagtaatactatcattgaagttaatggcaaaagggtcagaggaaggcagtatccttggggtgttgctgaagttgaaaatggtgaacattgtgattttacaatcctaagaaatatgttgataagaacacacatgcaggacttgaaagatgttactaataatgtccactatgagaactacagaagcagaaaacttgcagctgtgacttataatggagttgataacaacaagaataaagggcagctgactaagagccctctggcacaaatggaagaagaaagaagggagcatgtagctaaaatgaagaagatggagatggagatggagcaggtgtttgagatgaaggtcaaagaaaaagttcaaaaactgaaggactctgaagctgagctccagcggcgccatgagcaaatgaaaaagaatttggaagcacagcacaaagaattggaggaaaaacgtcgtcagttcgaggatgagaaagcaaactgggaagctcaacaacgtattttagaacaacagaactcttcaagaaccttggaaaagaacaagaagaaagggaagatcttttaaactctctattgaccaccagttaacgtattagttgccaatatgccagcttggacatcagtgtttgttggatccgtttgaccaatttgcaccag

SEQ ID NO: 179945 - DNA, 509 bp, Homo sapiens
  Payload ID: 15453
  Gene Symbol: SEPT7
  Gene Name: septin 7
  ENST ID: ENST00000635172
  CDS Start-End: 279-509
aagtcatgctcgaaatggagcgaggcggcggagctggggaggcggtaatctcgcgagatggaagccagcctccgctaggcccggaagcctcgtctgagggggcgggggacggaggagggagcgggagtcgagcgagagcctgtggaggagtccgcctgctgtagcgtgcgtaagcaaggcagctacgccgggcggctacgctgcggaatcggcgtaggcgcctttggagaatcggcgggctgcgctccgctggggctggtcgcggagggggggaggggatgtcggtcagtgcgagatccgctgctgctgaggagaggagcgtcaacagcagcaccatggtagctcaacagaagaaccttgaaggctatgtgggatttgccaatctcccaaatcaagtatacagaaaatcggtgaagagaggttttgaattcacgcttatggtagtgggtgaatctggattgggaaagtcgacattaatcaactcattattcctcacagatttgtattct

SEQ ID NO: 179946 - DNA, 760 bp, Homo sapiens
  Payload ID: 15453
  Gene Symbol: SEPT7
  Gene Name: septin 7
  ENST ID: ENST00000635047
  CDS Start-End: 290-760
agtgcgagatccgctgctgctgaggagaggagcgtcaacagcagcaccatggtgtttcaatggatttgcctctcctgtttggactgaatatgtcattacaattcttggaattctttgtttactgttcctctgtggatttcttctgttggaatctggaacactggaatgatggaaatgtgttctttacaaagtagctcaacagaagaaccttgaaggctatgtgggatttgccaatctcccaaatcaagtatacagaaaatcggtgaagagaggttttgaattcacgcttatggtagtgggtgaatctggattgggaaagtcgacattaatcaactcattattcctcacagatttgtattctccagagtatccaggtccttctcatagaattaaaaagactgtacaggtggaacaatccaaagttttaatcaaagaaggtggtgttcagttgctgctcacaatagttgataccccaggatttggagatgcagtggataatagtaattgctggcagcctgttatcgactacattgatagtaaatttgaggactacctaaatgcagaatcacgagtgaacagacgtcagatgcctgataacagggtgcagtgttgtttatacttcattgctccttcaggacatggacttaaaccattggatattgagtttatgaagcgtttgcatgaaaaagtgaatatcatcccacttattgccaaagcagacacactcacaccagaggaatgccaacagtttaaaaaacag

SEQ ID NO: 179947 - DNA, 583 bp, Homo sapiens
  Payload ID: 15453
  Gene Symbol: SEPT7
  Gene Name: septin 7
  ENST ID: ENST00000634600
  CDS Start-End: 143-583
gtcagtgcgagatccgctgctgctgaggagaggagcgtcaacagcagcaccatggaagaaccttgaaggctatgtgggatttgccaatctcccaaatcaagtatacagaaaatcggtgaagagaggttttgaattcacgcttatggtagtgggtgaatctggattgggaaagtcgacattaatcaactcattattcctcacagatttgtattctccagagtatccaggtccttctcatagaattaaaaagactgtacaggtggaacaatccaaagttttaatcaaagaaggtggtgttcagttgctgctcacaatagttgataccccaggatttggagatgcagtggataatagtaattgctggcagcctgttatcgactacattgatagtaaatttgaggactacctaaatgcagaatcacgagtgaacagacgtcagatgcctgataacagggtgcagtgttgtttatacttcattgctccttcaggacatggacttaaaccattggatattgagtttatgaagcgtttgcatgaaaaagtgaatatcatcccacttattgccaaagcagacacactcaca

SEQ ID NO: 179948 - DNA, 333 bp, Homo sapiens
  Payload ID: 15453
  Gene Symbol: SEPT7
  Gene Name: septin 7
  ENST ID: ENST00000485569
  CDS Start-End: 1-333
gtgacttataatggagttgataacaacaagaataaagggcagctgactaaacatttaatgattacccttaatattcgtgacaggagccctctggcacaaatggaagaagaaagaagggagcatgtagctaaaatgaagaagatggagatggagatggagcaggtgtttgagatgaaggtcaaagaaaaagttcaaaaactgaaggactctgaagctgagctccagcggcgccatgagcaaatgaaaaagaatttggaagcacagcacaaagaattggaggaaaaacgtcgtcagttcgaggatgagaaagcaaactgggaagctcaacaacgt

SEQ ID NO: 179949 - DNA, 4394 bp, Homo sapiens
  Payload ID: 15454
  Gene Symbol: SEPT8
  Gene Name: septin 8
  Uniprot ID: Q92599
  ENST ID: ENST00000296873
  CDS Start-End: 285-1574
gcagctggcacctcccgcctcgccgcggagacccccggccgtccaagcggcggggctccggctgcgctcgtggccgggccgggcggggaggccggtcccgcgggcgggggcaggggcggctccgcggcttctcccgccgccgccgccaaggggagtttccaggaagtggccatattggatccattcagccgcagccgcccgggcggagcgcgtcccgcagccggctggtccctgtcgctgcccctgcgctcgtcccagcccacccgcccggtgcggagctcgccatggcggccaccgacctggagcgcttctcgaatgcagagccagagccccggagcctctccctgggcggccatgtgggtttcgacagcctccccgaccagctggtcagcaagtcggtcactcagggcttcagcttcaacatcctctgtgtgggggagaccggcattggcaaatccacactgatgaacacactcttcaacacgaccttcgagactgaggaagccagtcaccatgaggcatgcgtgcgcctgcggccccagacctatgacctccaggagagcaacgtgcagctcaagctgaccattgtggatgccgtgggctttggggatcagatcaataaggatgagagttacaggcccatagttgactacatcgatgcgcagtttgaaaattatctgcaggaggagctgaagatccgccgctcgctcttcgactaccatgacacaaggatccacgtttgcctctacttcatcacgcccacagggcactccctgaagtctctagatctagtgaccatgaagaaactagacagcaaggtgaacattattcccatcatcgccaaggctgacaccatctccaagagcgagctccacaagttcaagatcaagatcatgggcgagttggtcagcaacggggtccagatctaccagttccccacggatgatgaggctgttgcagagattaacgcagtcatgaatgcacatctgccctttgccgtggtgggcagcaccgaggaggtgaaggtggggaacaagctggtccgagcacggcagtacccctggggagtggtgcaggtggagaatgagaatcactgcgacttcgtgaagctgcgggagatgttgatccgggtgaacatggaagacctccgcgagcagacccacagccggcactacgagctctaccggcgctgcaagttggaggagatgggctttcaggacagcgatggtgacagccagcccttcagcctacaagagacatacgaggccaagaggaaggagttcctaagtgagctgcagaggaaggaggaagagatgaggcagatgtttgtcaacaaagtgaaggagacagagctggagctgaaggagaaggaaagggagctccatgagaagtttgagcacctgaagcgggtccaccaggaggagaagcgcaaggtggaggaaaagcgccgggaactggaggaggagaccaacgccttcaatcgccggaaggctgcggtggaggccctgcagtcgcaggccttgcacgccacctcgcagcagcccctgaggaaggacaaggacaagaagaattaacgcacgcacagacttacatgtcaagagtggactttagactttcatgtgttaagttgcttgagttacaccttgtgacccttctcccataacatggtgtgaggacggactgggagccggtacagactccagtgtttacagccttgctttcctcccaccgaccctggccccaggctgccccgggcctggcgggccacccctctctatgcaaacacgtaaaagccatgaatgctggaatccaaaactgacgaggtttatttttttcagagccagtggctggtcttccatttacagtgtcactattccctgacggagctgttatgtgccgctctagcgaaggccccagccgggatgctaggcctaattgttcagcgtggagatggcaactcacgtggtgccctaggtgcagctgcgtggtctggtatacatgctgcaaaattcacccagttcccctcattttaatttttctaacctacagcttaattttaataactttaaaacacttctaaatatttattttggcaccagcgtcaagacaaataatatcctctcccattattttcataagtaacacagattccctgatttttaaaaactaaaaatacagctaaacctttcttatgtataaagtatgcctatcatatacagggagaggtgggtaataaacttcctgtaatgacagtgtttggcatttctttatggatggaattggaacatgaacaagaccatgtccagcgtttttactgtgaatgtaaatggaacagcagcccaaagctgttgtctgtgccccagaggtgctacctgtagacagggaccaactccatgtgtgtgtgttaagtgtttgactccaattaagactcccaagcaaatcctgcatattccaaatgtaaagagtactcagtgggaaaaaggttgttacctcaaagtcattgcttctttcctggctgggtcacagggtgaagagatgaaggtgtctgatgtatatagacaattagggaaaaatgagcggcaaaggagctttccccttcagctgcactctaaaggggaacattttaaggaagtactagcagctttgactcttctatgctcctgttggtttacaagccaccaagaatgtcagtgttgagaatacggcctggtaaaatgggagatgtaaaatgactaaatgaaaggaagggtagttttaatgttgaagcaccgtgctgggcactggagctacccagaggaatgcacaacgctcccctcaaggagctcacagtctagcctactccctggctggaagcctcaggaagacgtgctaatttattgtggaattggtagtttgcttttcatgcccctgtcttccttctcatgaccatttccccctttctgtctggcttgcattattgatttccaggaccaagtcctggcttcctcctgccttcctgagatgatgttctgctcagggagaagtggaggggtgagctgtgtgtgtccaccgaggcacggccaggaagaggcagcctttacctgtgaggggctccatgctccagcagcagagcaggttctagtgacaattcaactttttatgctatgaccaggggtggatctaaattttatggggctgaaagcttgaattatttagaaagacttctttaagaaaaacaatgttaatataaaattaggtacagggtcttggaaggggccctgaagattaagcttccttagcgtcacaataagtccgtatctggttgcaattgaaaactgatgcttcagtgagggtatctaaaaaggtaaactggcatatccagggcaaatgtgggctgccaatggctcatctctagggtaattttatgtctgaaagtgtatgcagttgggtcagagcatgacctttaagatagcctctctcagctaacatatttatgaagatgaggcctggtgacccagcaggttcattggatacataagaaatgagaattcctggttcatgggccaacctaggactctggagtatgcagacttggccattcgtccattgtggcctgcgggtcgcaccccaggcatactgaaaggccatactcgtggctggctgcctgcgggcctaagccttcccaggatcttcaggacacttgacagacttgtgttttctggtctgagctgcctccacaggtccctccagcaagcctcactgcacctctcccctgctgtttgtgtttggaattttgtcttctttagctgagaccaaattaaaccttggtgcataaagtgagcttaaaacttgccactgtttagtaagttagcccccatagaatgtgaccctgtctgcagagtctcatttacccctctttttctcattgtcatttgttggctttattagggctgtcttacaggatcatgttggcatttactatcatgtctttatcataaaccatgtttgtttgaggtagaagaatcaccatataattcgttgcccaaattgggactattgagagagaaaggggatgctattaattacaccagatcaaaaggcataaaccagacctgtcccaggccgatgtggaaatatgttctttctagttgtgggtaccctgatctaggtggtttgtaattgtgcattactgactgcatatgtttgtgtatgtgtaaatgtgggctccctgttaagtggggctcatggatacgaggcctgaggaagtgtggcttgctagtctgttacgttaacatgcttttctaaaattgcttcacgtgttaattcatttactcctgcattcattgactgtttttgttcttttccattcactttgtacttatttttttcattaaattttgcatttattttgagtt

SEQ ID NO: 179950 - DNA, 562 bp, Homo sapiens
  Payload ID: 15454
  Gene Symbol: SEPT8
  Gene Name: septin 8
  ENST ID: ENST00000371493
  CDS Start-End: 327-562
tttttcaggctgctgcttctctgattgctcagactattgcttggttgctaagtagggagccacagacctggtccacggagacttggaaagctgtgtcctggcttcatgaatctccagcagttggtgccctttgctacccatctttaatcatccctttcagtcccttgccttctcagaatgcagagccagagccccggagcctctccctgggcggccatgtgggtttcgacagcctccccgaccagctggtcagcaagtcggtcactcagggcttcagcttcaacatcctctgtgtgggggagaccggcattggcaaatccacactgatgaacacactcttcaacacgaccttcgagactgaggaagccagtcaccatgaggcatgcgtgcgcctgcggccccagacctatgacctccaggagagcaacgtgcagctcaagctgaccattgtggatgccgtgggctttggggatcagatcaataaggatgagagttacaggcccatagttgactacatcgatgcgcagtttgaaaattatctgcaggaggagctgaagatccg

SEQ ID NO: 179951 - DNA, 2289 bp, Homo sapiens
  Payload ID: 15454
  Gene Symbol: SEPT8
  Gene Name: septin 8
  Uniprot ID: Q92599
  ENST ID: ENST00000378699
  CDS Start-End: 502-1611
acattcccagaaagagcagagagaaaggcagagggaagagaaagaaacggggtttcagaggatttgggagctgcttttgtatagattgtcagtgagaaggatacagaacctcctgaggcctccgaccctggcgaatcccagcctaaactgcgcatcctgctcgttggttgcacaaggagccgaaggctggtcccttgcccgggaaggccgcctggccggacgcgcgggtcccgccggggttcccgccttagctccggccggagcatcaggtggggcccaagacacccgcagactaggctgccgcggcctctcccggatccgacgggtctcccgcagcttgtccacactctgaatgcagagccagagccccggagcctctccctgggcggccatgtgggtttcgacagcctccccgaccagctggtcagcaagtcggtcactcagggcttcagcttcaacatcctctgtgtgggggagaccggcattggcaaatccacactgatgaacacactcttcaacacgaccttcgagactgaggaagccagtcaccatgaggcatgcgtgcgcctgcggccccagacctatgacctccaggagagcaacgtgcagctcaagctgaccattgtggatgccgtgggctttggggatcagatcaataaggatgagagttacaggcccatagttgactacatcgatgcgcagtttgaaaattatctgcaggaggagctgaagatccgccgctcgctcttcgactaccatgacacaaggatccacgtttgcctctacttcatcacgcccacagggcactccctgaagtctctagatctagtgaccatgaagaaactagacagcaaggtgaacattattcccatcatcgccaaggctgacaccatctccaagagcgagctccacaagttcaagatcaagatcatgggcgagttggtcagcaacggggtccagatctaccagttccccacggatgatgaggctgttgcagagattaacgcagtcatgaatgcacatctgccctttgccgtggtgggcagcaccgaggaggtgaaggtggggaacaagctggtccgagcacggcagtacccctggggagtggtgcaggtggagaatgagaatcactgcgacttcgtgaagctgcgggagatgttgatccgggtgaacatggaagacctccgcgagcagacccacagccggcactacgagctctaccggcgctgcaagttggaggagatgggctttcaggacagcgatggtgacagccagcccttcagcctacaagagacatacgaggccaagaggaaggagttcctaagtgagctgcagaggaaggaggaagagatgaggcagatgtttgtcaacaaagtgaaggagacagagctggagctgaaggagaaggaaagggagctccatgagaagtttgagcacctgaagcgggtccaccaggaggagaagcgcaaggtggaggaaaagcgccgggaactggaggaggagaccaacgccttcaatcgccggaaggctgcggtggaggccctgcagtcgcaggccttgcacgccacctcgcagcagcccctgaggaaggacaaggacaagaagaattaacgcacgcacagacttacatgtcaagagtggactttagactttcatgtgttaagttgcttgagttacaccttgtgacccttctcccataacatggtgtgaggacggactgggagccggtacagactccagtgtttacagccttgctttcctcccaccgaccctggccccaggctgccccgggcctggcgggccacccctctctatgcaaacacgtaaaagccatgaatgctggaatccaaaactgacgaggtttatttttttcagagccagtggctggtcttccatttacagtgtcactattccctgacggagctgttatgtgccgctctagcgaaggccccagccgggatgctaggcctaattgttcagcgtggagatggcaactcacgtggtgccctaggtgcagctgcgtggtctggtatacatgctgcaaaattcacccagttcccctcattttaatttttctaacctacagcttaattttaataactttaaaacacttctaaatatttattttggcaccagcgtcaagacaaataatatcctctcccattattttcataagtaacacagattccctgatttttaaaaactaaaaatacagctaaacctttcttatgtataaagtatgcctatcatatacagggagaggtgggtaataaacttcctgtaatgaca

SEQ ID NO: 179952 - DNA, 1817 bp, Homo sapiens
  Payload ID: 15454
  Gene Symbol: SEPT8
  Gene Name: septin 8
  ENST ID: ENST00000378701
  CDS Start-End: 125-1447
aggaagtggccatattggatccattcagccgcagccgcccgggcggagcgcgtcccgcagccggctggtccctgtcgctgcccctgcgctcgtcccagcccacccgcccggtgcggagctcgccatggcggccaccgacctggagcgcttctcgaatgcagagccagagccccggagcctctccctgggcggccatgtgggtttcgacagcctccccgaccagctggtcagcaagtcggtcactcagggcttcagcttcaacatcctctgtgtgggggagaccggcattggcaaatccacactgatgaacacactcttcaacacgaccttcgagactgaggaagccagtcaccatgaggcatgcgtgcgcctgcggccccagacctatgacctccaggagagcaacgtgcagctcaagctgaccattgtggatgccgtgggctttggggatcagatcaataaggatgagaggcccatagttgactacatcgatgcgcagtttgaaaattatctgcaggaggagctgaagatccgccgctcgctcttcgactaccatgacacaaggatccacgtttgcctctacttcatcacgcccacagggcactccctgaagtctctagatctagtgaccatgaagaaactagacagcaaggtgaacattattcccatcatcgccaaggctgacaccatctccaagagcgagctccacaagttcaagatcaagatcatgggcgagttggtcagcaacggggtccagatctaccagttccccacggatgatgaggctgttgcagagattaacgcagtcatgaatgcacatctgccctttgccgtggtgggcagcaccgaggaggtgaaggtggggaacaagctggtccgagcacggcagtacccctggggagtggtgcaggtggagaatgagaatcactgcgacttcgtgaagctgcgggagatgttgatccgggtgaacatggaagacctccgcgagcagacccacagccggcactacgagctctaccggcgctgcaagttggaggagatgggctttcaggacagcgatggtgacagccagcccttcagcctacaagagacatacgaggccaagaggaaggagttcctaagtgagctgcagaggaaggaggaagagatgaggcagatgtttgtcaacaaagtgaaggagacagagctggagctgaaggagaaggaaagggagctccatgagaagtttgagcacctgaagcgggtccaccaggaggagaagcgcaaggtggaggaaaagcgccgggaactggaggaggagaccaacgccttcaatcgccggaaggctgcggtggaggccctgcagtcgcaggccttgcacgccacctcgcagcagcccctgaggaaggacaaggacaagaagaaagccagtggctggtcttccatttacagtgtcactattccctgacggagctgttatgtgccgctctagcgaaggccccagccgggatgctaggcctaattgttcagcgtggagatggcaactcacgtggtgccctaggtgcagctgcgtggtctggtatacatgctgcaaaattcacccagttcccctcattttaatttttctaacctacagcttaattttaataactttaaaacacttctaaatatttattttggcaccagcgtcaagacaaataatatcctctcccattattttcataagtaacacagattccctgatttttaaaaactaaaaatacagctaaacctttcttatgtataaagtatgcctatcatatacagggagaggtgggtaataaacttcctgtaatgac

SEQ ID NO: 179953 - DNA, 4168 bp, Homo sapiens
  Payload ID: 15454
  Gene Symbol: SEPT8
  Gene Name: septin 8
  ENST ID: ENST00000378706
  CDS Start-End: 208-1500
gccgggcggggaggccggtcccgcgggcgggggcaggggcggctccgcggcttctcccgccgccgccgccaaggggagtttccaggaagtggccatattggatccattcagccgcagccgcccgggcggagcgcgtcccgcagccggctggtccctgtcgctgcccctgcgctcgtcccagcccacccgcccggtgcggagctcgccatggcggccaccgacctggagcgcttctcgaatgcagagccagagccccggagcctctccctgggcggccatgtgggtttcgacagcctccccgaccagctggtcagcaagtcggtcactcagggcttcagcttcaacatcctctgtgtgggggagaccggcattggcaaatccacactgatgaacacactcttcaacacgaccttcgagactgaggaagccagtcaccatgaggcatgcgtgcgcctgcggccccagacctatgacctccaggagagcaacgtgcagctcaagctgaccattgtggatgccgtgggctttggggatcagatcaataaggatgagagttacaggcccatagttgactacatcgatgcgcagtttgaaaattatctgcaggaggagctgaagatccgccgctcgctcttcgactaccatgacacaaggatccacgtttgcctctacttcatcacgcccacagggcactccctgaagtctctagatctagtgaccatgaagaaactagacagcaaggtgaacattattcccatcatcgccaaggctgacaccatctccaagagcgagctccacaagttcaagatcaagatcatgggcgagttggtcagcaacggggtccagatctaccagttccccacggatgatgaggctgttgcagagattaacgcagtcatgaatgcacatctgccctttgccgtggtgggcagcaccgaggaggtgaaggtggggaacaagctggtccgagcacggcagtacccctggggagtggtgcaggtggagaatgagaatcactgcgacttcgtgaagctgcgggagatgttgatccgggtgaacatggaagacctccgcgagcagacccacagccggcactacgagctctaccggcgctgcaagttggaggagatgggctttcaggacagcgatggtgacagccagcccttcagcctacaagagacatacgaggccaagaggaaggagttcctaagtgagctgcagaggaaggaggaagagatgaggcagatgtttgtcaacaaagtgaaggagacagagctggagctgaaggagaaggaaagggagctccatgagaagtttgagcacctgaagcgggtccaccaggaggagaagcgcaaggtggaggaaaagcgccgggaactggaggaggagaccaacgccttcaatcgccggaaggctgcggtggaggccctgcagtcgcaggccttgcacgccacctcgcagcagcccctgaggaaggacaaggacaagaagaaatcttgacccttagcctgggacaccacaaactgaggtgaattctctgctttgctcgtcacaaatgccaaactgactgccctttcacggtgtccatcttgctgtcttttgcttctgtttgatttggtctgcatatcttttaatgtgtctgtttttgttttgtttgttttatttttatttttcagttaacgcacgcacagacttacatgtcaagagtggactttagactttcatgtgttaagttgcttgagttacaccttgtgacccttctcccataacatggtgtgaggacggactgggagccggtacagactccagtgtttacagccttgctttcctcccaccgaccctggccccaggctgccccgggcctggcgggccacccctctctatgcaaacacgtaaaagccatgaatgctggaatccaaaactgacgaggtttatttttttcagagccagtggctggtcttccatttacagtgtcactattccctgacggagctgttatgtgccgctctagcgaaggccccagccgggatgctaggcctaattgttcagcgtggagatggcaactcacgtggtgccctaggtgcagctgcgtggtctggtatacatgctgcaaaattcacccagttcccctcattttaatttttctaacctacagcttaattttaataactttaaaacacttctaaatatttattttggcaccagcgtcaagacaaataatatcctctcccattattttcataagtaacacagattccctgatttttaaaaactaaaaatacagctaaacctttcttatgtataaagtatgcctatcatatacagggagaggtgggtaataaacttcctgtaatgacagtgtttggcatttctttatggatggaattggaacatgaacaagaccatgtccagcgtttttactgtgaatgtaaatggaacagcagcccaaagctgttgtctgtgccccagaggtgctacctgtagacagggaccaactccatgtgtgtgtgttaagtgtttgactccaattaagactcccaagcaaatcctgcatattccaaatgtaaagagtactcagtgggaaaaaggttgttacctcaaagtcattgcttctttcctggctgggtcacagggtgaagagatgaaggtgtctgatgtatatagacaattagggaaaaatgagcggcaaaggagctttccccttcagctgcactctaaaggggaacattttaaggaagtactagcagctttgactcttctatgctcctgttggtttacaagccaccaagaatgtcagtgttgagaatacggcctggtaaaatgggagatgtaaaatgactaaatgaaaggaagggtagttttaatgttgaagcaccgtgctgggcactggagctacccagaggaatgcacaacgctcccctcaaggagctcacagtctagcctactccctggctggaagcctcaggaagacgtgctaatttattgtggaattggtagtttgcttttcatgcccctgtcttccttctcatgaccatttccccctttctgtctggcttgcattattgatttccaggaccaagtcctggcttcctcctgccttcctgagatgatgttctgctcagggagaagtggaggggtgagctgtgtgtgtccaccgaggcacggccaggaagaggcagcctttacctgtgaggggctccatgctccagcagcagagcaggttctagtgacaattcaactttttatgctatgaccaggggtggatctaaattttatggggctgaaagcttgaattatttagaaagacttctttaagaaaaacaatgttaatataaaattaggtacagggtcttggaaggggccctgaagattaagcttccttagcgtcacaataagtccgtatctggttgcaattgaaaactgatgcttcagtgagggtatctaaaaaggtaaactggcatatccagggcaaatgtgggctgccaatggctcatctctagggtaattttatgtctgaaagtgtatgcagttgggtcagagcatgacctttaagatagcctctctcagctaacatatttatgaagatgaggcctggtgacccagcaggttcattggatacataagaaatgagaattcctggttcatgggccaacctaggactctggagtatgcagacttggccattcgtccattgtggcctgcgggtcgcaccccaggcatactgaaaggccatactcgtggctggctgcctgcgggcctaagccttcccaggatcttcaggacacttgacagacttgtgttttctggtctgagctgcctccacaggtccctccagcaagcctcactgcacctctcccctgctgtttgtgtttggaattttgtcttctttagctgagaccaaattaaaccttggtgcataaagtgagcttaaaacttgccactgtttagtaagttagcccccatagaatgtgaccctgtctgcagagtctcatttacccctctttttctcattgtcatttgttggctttattagggctgtcttacaggatcatgttggcatttactatcatgtctttatcataaaccatgtttgtttgaggtagaagaatcaccatataattcgttgcccaaattgggactattgagagagaaaggggatgctattaat

SEQ ID NO: 179954 - DNA, 2889 bp, Homo sapiens
  Payload ID: 15454
  Gene Symbol: SEPT8
  Gene Name: septin 8
  Uniprot ID: Q92599
  ENST ID: ENST00000378719
  CDS Start-End: 239-1690
gcggcggggctccggctgcgctcgtggccgggccgggcggggaggccggtcccgcgggcgggggcaggggcggctccgcggcttctcccgccgccgccgccaaggggagtttccaggaagtggccatattggatccattcagccgcagccgcccgggcggagcgcgtcccgcagccggctggtccctgtcgctgcccctgcgctcgtcccagcccacccgcccggtgcggagctcgccatggcggccaccgacctggagcgcttctcgaatgcagagccagagccccggagcctctccctgggcggccatgtgggtttcgacagcctccccgaccagctggtcagcaagtcggtcactcagggcttcagcttcaacatcctctgtgtgggggagaccggcattggcaaatccacactgatgaacacactcttcaacacgaccttcgagactgaggaagccagtcaccatgaggcatgcgtgcgcctgcggccccagacctatgacctccaggagagcaacgtgcagctcaagctgaccattgtggatgccgtgggctttggggatcagatcaataaggatgagagttacaggcccatagttgactacatcgatgcgcagtttgaaaattatctgcaggaggagctgaagatccgccgctcgctcttcgactaccatgacacaaggatccacgtttgcctctacttcatcacgcccacagggcactccctgaagtctctagatctagtgaccatgaagaaactagacagcaaggtgaacattattcccatcatcgccaaggctgacaccatctccaagagcgagctccacaagttcaagatcaagatcatgggcgagttggtcagcaacggggtccagatctaccagttccccacggatgatgaggctgttgcagagattaacgcagtcatgaatgcacatctgccctttgccgtggtgggcagcaccgaggaggtgaaggtggggaacaagctggtccgagcacggcagtacccctggggagtggtgcaggtggagaatgagaatcactgcgacttcgtgaagctgcgggagatgttgatccgggtgaacatggaagacctccgcgagcagacccacagccggcactacgagctctaccggcgctgcaagttggaggagatgggctttcaggacagcgatggtgacagccagcccttcagcctacaagagacatacgaggccaagaggaaggagttcctaagtgagctgcagaggaaggaggaagagatgaggcagatgtttgtcaacaaagtgaaggagacagagctggagctgaaggagaaggaaagggagctccatgagaagtttgagcacctgaagcgggtccaccaggaggagaagcgcaaggtggaggaaaagcgccgggaactggaggaggagaccaacgccttcaatcgccggaaggctgcggtggaggccctgcagtcgcaggccttgcacgccacctcgcagcagcccctgaggaaggacaaggacaagaagaacagatcagatataggagcacaccagccgggcatgagcctctccagctctaaggtgatgatgaccaaggccagtgtggagcccttgaactgcagcagctggtggcccgccatacagtgctgcagctgcctggtcagggatgcgacgtggagggaaggattcctctgaggcagcagctccaacacatggggccagctcaggaccaccagggcatggaactggagaccatggtttttaatgttagaacagaaaacgccatacttttcctatatcaatgatcaaaagtgcaaacaatttaaatttccatcagggaacatcaaatgttgcccaacccttttcattcctatccatggctccgtaaggggcttgaggcttaatgcccatcctgtggccaagctgagcttccactccgggaccaaaaaaaaaaaaaagtctgctttgtgacatcatcgttatgagcggaaagtacctagatgacaatgtttccattctgaaaaatagaaacatactattcaagaccaaggtagcagaaaagttacttgtatctgcttatcataagacgaaactctgcaacttggcaacggtggccagttttcgtaatgaaacagtctttagtaatttaatcttcatgcttcataacaaaccaaaaccccatgagatttccacattgcataattttgccttactaacagaatcatatccttaaggatgaccatcattcccccaactaaaacaaatacaaactaatgtatgatatttttttaagtgccagatcaatatggtctaaagcttcaataaggattgtgtgtaggtgaataaagacagctaagtgaatgtgtgtaaagtgtagcaaaagcagacagatatttatgtacagtattcatagaatggaaagttaaatatttttgcagtgtgtatttaaaagagaaactcaccataatagtgccgtctaaaaatctttgtaaagttaatttaatgtcctttagaagtgggagtctggtggaactgtgttggatttaagataccttttcactcttccgtatgtcatgagccttgtgcgtcacctcactgtggtgcatgtgcaagggcgtgtgcacgcctgtgctttgccatcccatgttgtaaacagctgttccaaaggcacaaacgagtttagggtagactctgtaaacacctccttactcactatagtcaagaagtccagcggcgtcccaatatagaggtcccagtgcagtctgtccagaatagccagctccatcctcagcagctcattcggggaatagtcagagccatagtgctttgtgaagtcttttacttgtggaataaactgtaaaaagaaaataaagaggccaaagccctacatcatg

SEQ ID NO: 179955 - DNA, 1723 bp, Homo sapiens
  Payload ID: 15454
  Gene Symbol: SEPT8
  Gene Name: septin 8
  ENST ID: ENST00000378721
  CDS Start-End: 102-1484
ttcagccgcagccgcccgggcggagcgcgtcccgcagccggctggtccctgtcgctgcccctgcgctcgtcccagcccacccgcccggtgcggagctcgccatggcggccaccgacctggagcgcttctcgaatgcagagccagagccccggagcctctccctgggcggccatgtgggtttcgacagcctccccgaccagctggtcagcaagtcggtcactcagggcttcagcttcaacatcctctgtgtgggggagaccggcattggcaaatccacactgatgaacacactcttcaacacgaccttcgagactgaggaagccagtcaccatgaggcatgcgtgcgcctgcggccccagacctatgacctccaggagagcaacgtgcagctcaagctgaccattgtggatgccgtgggctttggggatcagatcaataaggatgagaggcccatagttgactacatcgatgcgcagtttgaaaattatctgcaggaggagctgaagatccgccgctcgctcttcgactaccatgacacaaggatccacgtttgcctctacttcatcacgcccacagggcactccctgaagtctctagatctagtgaccatgaagaaactagacagcaaggtgaacattattcccatcatcgccaaggctgacaccatctccaagagcgagctccacaagttcaagatcaagatcatgggcgagttggtcagcaacggggtccagatctaccagttccccacggatgatgaggctgttgcagagattaacgcagtcatgaatgcacatctgccctttgccgtggtgggcagcaccgaggaggtgaaggtggggaacaagctggtccgagcacggcagtacccctggggagtggtgcaggtggagaatgagaatcactgcgacttcgtgaagctgcgggagatgttgatccgggtgaacatggaagacctccgcgagcagacccacagccggcactacgagctctaccggcgctgcaagttggaggagatgggctttcaggacagcgatggtgacagccagcccttcagcctacaagagacatacgaggccaagaggaaggagttcctaagtgagctgcagaggaaggaggaagagatgaggcagatgtttgtcaacaaagtgaaggagacagagctggagctgaaggagaaggaaagggagctccatgagaagtttgagcacctgaagcgggtccaccaggaggagaagcgcaaggtggaggaaaagcgccgggaactggaggaggagaccaacgccttcaatcgccggaaggctgcggtggaggccctgcagtcgcaggccttgcacgccacctcgcagcagcccctgaggaaggacaaggacaagaagaaaggtttgagttggatcagctctcagaatccagctcacatccatagccacctggttaagcagcagatgtcttccagcagttcccctaaagcctgggatgcctaaactggtatgggccctcaggatgtccttctgcctcatgcactgtggtcccacttacactggaaggaaggaggcagagggcactcaacggccaccactggaagctgtgagcagcatggcctcagcatctccatctgtaaaatgggttctggactagaggagagttcttgatatgacctaggagatagtgttccaaatgtatctgactctcgcaaggctaaatgcatggtagctcaaaataa

SEQ ID NO: 179956 - DNA, 1726 bp, Homo sapiens
  Payload ID: 15454
  Gene Symbol: SEPT8
  Gene Name: septin 8
  Uniprot ID: Q92599
  ENST ID: ENST00000458488
  CDS Start-End: 84-1412
ggcggagcgcgtcccgcagccggctggtccctgtcgctgcccctgcgctcgtcccagcccacccgcccggtgcggagctcgccatggcggccaccgacctggagcgcttctcgaatgcagagccagagccccggagcctctccctgggcggccatgtgggtttcgacagcctccccgaccagctggtcagcaagtcggtcactcagggcttcagcttcaacatcctctgtgtgggggagaccggcattggcaaatccacactgatgaacacactcttcaacacgaccttcgagactgaggaagccagtcaccatgaggcatgcgtgcgcctgcggccccagacctatgacctccaggagagcaacgtgcagctcaagctgaccattgtggatgccgtgggctttggggatcagatcaataaggatgagagttacaggcccatagttgactacatcgatgcgcagtttgaaaattatctgcaggaggagctgaagatccgccgctcgctcttcgactaccatgacacaaggatccacgtttgcctctacttcatcacgcccacagggcactccctgaagtctctagatctagtgaccatgaagaaactagacagcaaggtgaacattattcccatcatcgccaaggctgacaccatctccaagagcgagctccacaagttcaagatcaagatcatgggcgagttggtcagcaacggggtccagatctaccagttccccacggatgatgaggctgttgcagagattaacgcagtcatgaatgcacatctgccctttgccgtggtgggcagcaccgaggaggtgaaggtggggaacaagctggtccgagcacggcagtacccctggggagtggtgcaggtggagaatgagaatcactgcgacttcgtgaagctgcgggagatgttgatccgggtgaacatggaagacctccgcgagcagacccacagccggcactacgagctctaccggcgctgcaagttggaggagatgggctttcaggacagcgatggtgacagccagcccttcagcctacaagagacatacgaggccaagaggaaggagttcctaagtgagctgcagaggaaggaggaagagatgaggcagatgtttgtcaacaaagtgaaggagacagagctggagctgaaggagaaggaaagggagctccatgagaagtttgagcacctgaagcgggtccaccaggaggagaagcgcaaggtggaggaaaagcgccgggaactggaggaggagaccaacgccttcaatcgccggaaggctgcggtggaggccctgcagtcgcaggccttgcacgccacctcgcagcagcccctgaggaaggacaaggacaagaagaaagccagtggctggtcttccatttacagtgtcactattccctgacggagctgttatgtgccgctctagcgaaggccccagccgggatgctaggcctaattgttcagcgtggagatggcaactcacgtggtgccctaggtgcagctgcgtggtctggtatacatgctgcaaaattcacccagttcccctcattttaatttttctaacctacagcttaattttaataactttaaaacacttctaaatatttattttggcaccagcgtcaagacaaataatatcctctcccattattttcataagtaacacagattccctgatttttaaaaactaaaaatacagctaaacctttcttatgt

SEQ ID NO: 179957 - DNA, 4270 bp, Homo sapiens
  Payload ID: 15454
  Gene Symbol: SEPT8
  Gene Name: septin 8
  Uniprot ID: Q92599
  ENST ID: ENST00000448933
  CDS Start-End: 345-1454
tgctcgttggttgcacaaggagccgaaggctggtcccttgcccgggaaggccgcctggccggacgcgcgggtcccgccggggttcccgccttagctccggccggagcatcaggtggggcccaagacacccgcagactaggctgccgcggcctctcccggatccgacgggtctcccgcagcttgtccacactctgaatgcagagccagagccccggagcctctccctgggcggccatgtgggtttcgacagcctccccgaccagctggtcagcaagtcggtcactcagggcttcagcttcaacatcctctgtgtgggggagaccggcattggcaaatccacactgatgaacacactcttcaacacgaccttcgagactgaggaagccagtcaccatgaggcatgcgtgcgcctgcggccccagacctatgacctccaggagagcaacgtgcagctcaagctgaccattgtggatgccgtgggctttggggatcagatcaataaggatgagagttacaggcccatagttgactacatcgatgcgcagtttgaaaattatctgcaggaggagctgaagatccgccgctcgctcttcgactaccatgacacaaggatccacgtttgcctctacttcatcacgcccacagggcactccctgaagtctctagatctagtgaccatgaagaaactagacagcaaggtgaacattattcccatcatcgccaaggctgacaccatctccaagagcgagctccacaagttcaagatcaagatcatgggcgagttggtcagcaacggggtccagatctaccagttccccacggatgatgaggctgttgcagagattaacgcagtcatgaatgcacatctgccctttgccgtggtgggcagcaccgaggaggtgaaggtggggaacaagctggtccgagcacggcagtacccctggggagtggtgcaggtggagaatgagaatcactgcgacttcgtgaagctgcgggagatgttgatccgggtgaacatggaagacctccgcgagcagacccacagccggcactacgagctctaccggcgctgcaagttggaggagatgggctttcaggacagcgatggtgacagccagcccttcagcctacaagagacatacgaggccaagaggaaggagttcctaagtgagctgcagaggaaggaggaagagatgaggcagatgtttgtcaacaaagtgaaggagacagagctggagctgaaggagaaggaaagggagctccatgagaagtttgagcacctgaagcgggtccaccaggaggagaagcgcaaggtggaggaaaagcgccgggaactggaggaggagaccaacgccttcaatcgccggaaggctgcggtggaggccctgcagtcgcaggccttgcacgccacctcgcagcagcccctgaggaaggacaaggacaagaagaattaacgcacgcacagacttacatgtcaagagtggactttagactttcatgtgttaagttgcttgagttacaccttgtgacccttctcccataacatggtgtgaggacggactgggagccggtacagactccagtgtttacagccttgctttcctcccaccgaccctggccccaggctgccccgggcctggcgggccacccctctctatgcaaacacgtaaaagccatgaatgctggaatccaaaactgacgaggtttatttttttcagagccagtggctggtcttccatttacagtgtcactattccctgacggagctgttatgtgccgctctagcgaaggccccagccgggatgctaggcctaattgttcagcgtggagatggcaactcacgtggtgccctaggtgcagctgcgtggtctggtatacatgctgcaaaattcacccagttcccctcattttaatttttctaacctacagcttaattttaataactttaaaacacttctaaatatttattttggcaccagcgtcaagacaaataatatcctctcccattattttcataagtaacacagattccctgatttttaaaaactaaaaatacagctaaacctttcttatgtataaagtatgcctatcatatacagggagaggtgggtaataaacttcctgtaatgacagtgtttggcatttctttatggatggaattggaacatgaacaagaccatgtccagcgtttttactgtgaatgtaaatggaacagcagcccaaagctgttgtctgtgccccagaggtgctacctgtagacagggaccaactccatgtgtgtgtgttaagtgtttgactccaattaagactcccaagcaaatcctgcatattccaaatgtaaagagtactcagtgggaaaaaggttgttacctcaaagtcattgcttctttcctggctgggtcacagggtgaagagatgaaggtgtctgatgtatatagacaattagggaaaaatgagcggcaaaggagctttccccttcagctgcactctaaaggggaacattttaaggaagtactagcagctttgactcttctatgctcctgttggtttacaagccaccaagaatgtcagtgttgagaatacggcctggtaaaatgggagatgtaaaatgactaaatgaaaggaagggtagttttaatgttgaagcaccgtgctgggcactggagctacccagaggaatgcacaacgctcccctcaaggagctcacagtctagcctactccctggctggaagcctcaggaagacgtgctaatttattgtggaattggtagtttgcttttcatgcccctgtcttccttctcatgaccatttccccctttctgtctggcttgcattattgatttccaggaccaagtcctggcttcctcctgccttcctgagatgatgttctgctcagggagaagtggaggggtgagctgtgtgtgtccaccgaggcacggccaggaagaggcagcctttacctgtgaggggctccatgctccagcagcagagcaggttctagtgacaattcaactttttatgctatgaccaggggtggatctaaattttatggggctgaaagcttgaattatttagaaagacttctttaagaaaaacaatgttaatataaaattaggtacagggtcttggaaggggccctgaagattaagcttccttagcgtcacaataagtccgtatctggttgcaattgaaaactgatgcttcagtgagggtatctaaaaaggtaaactggcatatccagggcaaatgtgggctgccaatggctcatctctagggtaattttatgtctgaaagtgtatgcagttgggtcagagcatgacctttaagatagcctctctcagctaacatatttatgaagatgaggcctggtgacccagcaggttcattggatacataagaaatgagaattcctggttcatgggccaacctaggactctggagtatgcagacttggccattcgtccattgtggcctgcgggtcgcaccccaggcatactgaaaggccatactcgtggctggctgcctgcgggcctaagccttcccaggatcttcaggacacttgacagacttgtgttttctggtctgagctgcctccacaggtccctccagcaagcctcactgcacctctcccctgctgtttgtgtttggaattttgtcttctttagctgagaccaaattaaaccttggtgcataaagtgagcttaaaacttgccactgtttagtaagttagcccccatagaatgtgaccctgtctgcagagtctcatttacccctctttttctcattgtcatttgttggctttattagggctgtcttacaggatcatgttggcatttactatcatgtctttatcataaaccatgtttgtttgaggtagaagaatcaccatataattcgttgcccaaattgggactattgagagagaaaggggatgctattaattacaccagatcaaaaggcataaaccagacctgtcccaggccgatgtggaaatatgttctttctagttgtgggtaccctgatctaggtggtttgtaattgtgcattactgactgcatatgtttgtgtatgtgtaaatgtgggctccctgttaagtggggctcatggatacgaggcctgaggaagtgtggcttgctagtctgttacgttaacatgcttttctaaaattgcttcacgtgttaattcatttactcctgcattcattgactgtttttgttcttttccattcactttgtacttatttttttcattaaattttgcatttattttg

SEQ ID NO: 179958 - DNA, 773 bp, Homo sapiens
  Payload ID: 15454
  Gene Symbol: SEPT8
  Gene Name: septin 8
  ENST ID: ENST00000453480
  CDS Start-End: 383-773
gactaaagcaggagctcttggtttcataatttctagactcgggtgttttattcccattggagagggggtcgtatgtcagttaagtaagtttaaatacatgaggaacagattcagaggctgggctactcagagattcacttcgccccgtattataaattggaatttatgtaccggaggagggcagtgcctgaatcctaacagacctgctgattagctggaggccaagagacccaatgcagagccagagccccggagcctctccctgggcggccatgtgggtttcgacagcctccccgaccagctggtcagcaagtcggtcactcagggcttcagcttcaacatcctctgtgtgggggagaccggcattggcaaatccacactgatgaacacactcttcaacacgaccttcgagactgaggaagccagtcaccatgaggcatgcgtgcgcctgcggccccagacctatgacctccaggagagcaacgtgcagctcaagctgaccattgtggatgccgtgggctttggggatcagatcaataaggatgagaggcccatagttgactacatcgatgcgcagtttgaaaattatctgcaggaggagctgaagatccgccgctcgctcttcgactaccatgacacaaggatccacgtttgcctctacttcatcacgcccacagggcactccctgaagtctctagatctagtgaccatgaagaaactagacagcaaggtgaacattattcccatcatcgccaaggctgacaccatctcca

SEQ ID NO: 179959 - DNA, 693 bp, Homo sapiens
  Payload ID: 15454
  Gene Symbol: SEPT8
  Gene Name: septin 8
  ENST ID: ENST00000414594
  CDS Start-End: 403-693
ctctttgcacaatggtggaaccattaagacgttgtcccaagcccttgggacaggcagggtgatggacacttgcaatctgacgccttgaccgtcgagctccgcttttctattgcaggaatcccagcctaaactgcgcatcctgctcgttggttgcacaaggagccgaaggctggtcccttgcccgggaaggccgcctggccggacgcgcgggtcccgccggggttcccgccttagctccggccggagcatcagaatgcagagccagagccccggagcctctccctgggcggccatgtgggtttcgacagcctccccgaccagctggtcagcaagtcggtcactcagggcttcagcttcaacatcctctgtgtgggggagaccggcattggcaaatccacactgatgaacacactcttcaacacgaccttcgagactgaggaagccagtcaccatgaggcatgcgtgcgcctgcggccccagacctatgacctccaggagagcaacgtgcagctcaagctgaccattgtggatgccgtgggctttggggatcagatcaataaggatgagagttacaggcccatagttgactacatcgatgcgcagtttgaaaattatctgcaggaggagctgaagatccgccgctcgctcttcgactaccatgacacaaggatccacgtttgcctctacttcatc

SEQ ID NO: 179960 - DNA, 4335 bp, Homo sapiens
  Payload ID: 15454
  Gene Symbol: SEPT8
  Gene Name: septin 8
  ENST ID: ENST00000620483
  CDS Start-End: 239-1519
gcggcggggctccggctgcgctcgtggccgggccgggcggggaggccggtcccgcgggcgggggcaggggcggctccgcggcttctcccgccgccgccgccaaggggagtttccaggaagtggccatattggatccattcagccgcagccgcccgggcggagcgcgtcccgcagccggctggtccctgtcgctgcccctgcgctcgtcccagcccacccgcccggtgcggagctcgccatggcggccaccgacctggagcgcttctcgaatgcagagccagagccccggagcctctccctgggcggccatgtgggtttcgacagcctccccgaccagctggtcagcaagtcggtcactcagggcttcagcttcaacatcctctgtgtgggggagaccggcattggcaaatccacactgatgaacacactcttcaacacgaccttcgagactgaggaagccagtcaccatgaggcatgcgtgcgcctgcggccccagacctatgacctccaggagagcaacgtgcagctcaagctgaccattgtggatgccgtgtctggagaaggggtcagctgcctttacaggcccatagttgactacatcgatgcgcagtttgaaaattatctgcaggaggagctgaagatccgccgctcgctcttcgactaccatgacacaaggatccacgtttgcctctacttcatcacgcccacagggcactccctgaagtctctagatctagtgaccatgaagaaactagacagcaaggtgaacattattcccatcatcgccaaggctgacaccatctccaagagcgagctccacaagttcaagatcaagatcatgggcgagttggtcagcaacggggtccagatctaccagttccccacggatgatgaggctgttgcagagattaacgcagtcatgaatgcacatctgccctttgccgtggtgggcagcaccgaggaggtgaaggtggggaacaagctggtccgagcacggcagtacccctggggagtggtgcaggtggagaatgagaatcactgcgacttcgtgaagctgcgggagatgttgatccgggtgaacatggaagacctccgcgagcagacccacagccggcactacgagctctaccggcgctgcaagttggaggagatgggctttcaggacagcgatggtgacagccagcccttcagcctacaagagacatacgaggccaagaggaaggagttcctaagtgagctgcagaggaaggaggaagagatgaggcagatgtttgtcaacaaagtgaaggagacagagctggagctgaaggagaaggaaagggagctccatgagaagtttgagcacctgaagcgggtccaccaggaggagaagcgcaaggtggaggaaaagcgccgggaactggaggaggagaccaacgccttcaatcgccggaaggctgcggtggaggccctgcagtcgcaggccttgcacgccacctcgcagcagcccctgaggaaggacaaggacaagaagaattaacgcacgcacagacttacatgtcaagagtggactttagactttcatgtgttaagttgcttgagttacaccttgtgacccttctcccataacatggtgtgaggacggactgggagccggtacagactccagtgtttacagccttgctttcctcccaccgaccctggccccaggctgccccgggcctggcgggccacccctctctatgcaaacacgtaaaagccatgaatgctggaatccaaaactgacgaggtttatttttttcagagccagtggctggtcttccatttacagtgtcactattccctgacggagctgttatgtgccgctctagcgaaggccccagccgggatgctaggcctaattgttcagcgtggagatggcaactcacgtggtgccctaggtgcagctgcgtggtctggtatacatgctgcaaaattcacccagttcccctcattttaatttttctaacctacagcttaattttaataactttaaaacacttctaaatatttattttggcaccagcgtcaagacaaataatatcctctcccattattttcataagtaacacagattccctgatttttaaaaactaaaaatacagctaaacctttcttatgtataaagtatgcctatcatatacagggagaggtgggtaataaacttcctgtaatgacagtgtttggcatttctttatggatggaattggaacatgaacaagaccatgtccagcgtttttactgtgaatgtaaatggaacagcagcccaaagctgttgtctgtgccccagaggtgctacctgtagacagggaccaactccatgtgtgtgtgttaagtgtttgactccaattaagactcccaagcaaatcctgcatattccaaatgtaaagagtactcagtgggaaaaaggttgttacctcaaagtcattgcttctttcctggctgggtcacagggtgaagagatgaaggtgtctgatgtatatagacaattagggaaaaatgagcggcaaaggagctttccccttcagctgcactctaaaggggaacattttaaggaagtactagcagctttgactcttctatgctcctgttggtttacaagccaccaagaatgtcagtgttgagaatacggcctggtaaaatgggagatgtaaaatgactaaatgaaaggaagggtagttttaatgttgaagcaccgtgctgggcactggagctacccagaggaatgcacaacgctcccctcaaggagctcacagtctagcctactccctggctggaagcctcaggaagacgtgctaatttattgtggaattggtagtttgcttttcatgcccctgtcttccttctcatgaccatttccccctttctgtctggcttgcattattgatttccaggaccaagtcctggcttcctcctgccttcctgagatgatgttctgctcagggagaagtggaggggtgagctgtgtgtgtccaccgaggcacggccaggaagaggcagcctttacctgtgaggggctccatgctccagcagcagagcaggttctagtgacaattcaactttttatgctatgaccaggggtggatctaaattttatggggctgaaagcttgaattatttagaaagacttctttaagaaaaacaatgttaatataaaattaggtacagggtcttggaaggggccctgaagattaagcttccttagcgtcacaataagtccgtatctggttgcaattgaaaactgatgcttcagtgagggtatctaaaaaggtaaactggcatatccagggcaaatgtgggctgccaatggctcatctctagggtaattttatgtctgaaagtgtatgcagttgggtcagagcatgacctttaagatagcctctctcagctaacatatttatgaagatgaggcctggtgacccagcaggttcattggatacataagaaatgagaattcctggttcatgggccaacctaggactctggagtatgcagacttggccattcgtccattgtggcctgcgggtcgcaccccaggcatactgaaaggccatactcgtggctggctgcctgcgggcctaagccttcccaggatcttcaggacacttgacagacttgtgttttctggtctgagctgcctccacaggtccctccagcaagcctcactgcacctctcccctgctgtttgtgtttggaattttgtcttctttagctgagaccaaattaaaccttggtgcataaagtgagcttaaaacttgccactgtttagtaagttagcccccatagaatgtgaccctgtctgcagagtctcatttacccctctttttctcattgtcatttgttggctttattagggctgtcttacaggatcatgttggcatttactatcatgtctttatcataaaccatgtttgtttgaggtagaagaatcaccatataattcgttgcccaaattgggactattgagagagaaaggggatgctattaattacaccagatcaaaaggcataaaccagacctgtcccaggccgatgtggaaatatgttctttctagttgtgggtaccctgatctaggtggtttgtaattgtgcattactgactgcatatgtttgtgtatgtgtaaatgtgggctccctgttaagtggggctcatggatacgaggcctgaggaagtgtggcttgctagtctgttacgttaacatgcttttctaaaattgcttcacgtgttaattcatttactcctgcattcattgactgtttttgttcttttccattcactttgtacttatttttttcattaaattttgcatttattttg

SEQ ID NO: 179961 - DNA, 4453 bp, Homo sapiens
  Payload ID: 15455
  Gene Symbol: SEPT9
  Gene Name: septin 9
  Uniprot ID: Q9UHD8
  ENST ID: ENST00000329047
  CDS Start-End: 813-2519
tgcctctgtcactgcagactaatgggacggaggggggtgacttctcagggttcctcctgggcaggtgctccggaaccttttctcagcacgctggcctggggcacggccgttcctcctgcccagccacgttggggtacagggtgaagaagggctggggccagcccaggacagaggaaggcgaggcaggcacgcaggaactgggctttttaaacccttaagcccaaggaaatcgtagcatcgcgggacagggaaaatgaaagactttggaagtcgtcaggaatttgactctgtgagttggtttccaagagtctaagttaagcatctccaagtggatattaaaaaggagcagcaagcctcggggcggcgggggctggaggaggtggagagaggaggctgccggaagccgcactcgggacctctgcagccaccgaccagaccgggcggccgggactctgggactctcgcaggcagacccggtggtctgccggactcctcggggcccacttcgggccctctctcctgcctcctatttttggatttctctcctttgctccctttttcctcccgttttgaagagacaatgctacttcagtttggagcacaaacatatgatcagcacatggaaatgtggtaattcggatgcattcgtgattgcaacagattgaagaaattagaccagacaaagagtgtttttagaggaggaggaggaggaggaggaggctgagagagggagggcgacgggggtgagaaaggggaggccgcctctgagcgggacgccgggactcccgccgctgctaaatatatccgtaggaatggagagggaccggatctcagccttgaaaagatcttttgaggtcgaggaggtcgagacacccaactccaccccaccccggagggtccagactcccctactccgagccactgtggccagctccacccagaaattccaggacctgggcgtgaagaactcagaaccctcggcccgccatgtggactccctaagccaacgctcccccaaggcgtccctgcggagggtggagctctcgggccccaaggcggccgagccggtgtcccggcgcactgagctgtccattgacatctcgtccaagcaggtggagaacgccggggccatcggcccgtcccggttcgggctcaagagggccgaggtgttgggccacaagacgccagaaccggcccctcggaggacggagatcaccatcgtcaaaccccaggagtcagcccaccggaggatggagccccctgcctccaaggtccccgaggtgcccactgcccctgccaccgacgcagcccccaagagggtggagatccagatgcccaagcctgctgaggcgcccaccgcccccagcccagcccagaccttggagaattcagagcctgcccctgtgtctcagctgcagagcaggctggagcccaagccccagccccctgtggctgaggctacaccccggagccaggaggccactgaggcggctcccagctgcgttggcgacatggccgacacccccagagatgccgggctcaagcaggcgcctgcatcacggaacgagaaggccccggtggacttcggctacgtggggattgactccatcctggagcagatgcgccggaaggccatgaagcagggcttcgagttcaacatcatggtggtcgggcagagcggcttgggtaaatccaccttaatcaacaccctcttcaaatccaaaatcagccggaagtcggtgcagcccacctcagaggagcgcatccccaagaccatcgagatcaagtccatcacgcacgatattgaggagaaaggcgtccggatgaagctgacagtgattgacacaccagggttcggggaccacatcaacaacgagaactgctggcagcccatcatgaagttcatcaatgaccagtacgagaaatacctgcaggaggaggtcaacatcaaccgcaagaagcgcatcccggacacccgcgtccactgctgcctctacttcatccccgccaccggccactccctcaggcccctggacatcgagtttatgaaacgcctgagcaaggtggtcaacatcgtccctgtcatcgccaaggcggacacactcaccctggaggagagggtccacttcaaacagcggatcaccgcagacctgctgtccaacggcatcgacgtgtacccccagaaggaatttgatgaggactcggaggaccggctggtgaacgagaagttccgggagatgatcccatttgctgtggtgggcagtgaccacgagtaccaggtcaacggcaagaggatccttgggaggaagaccaagtggggtaccatcgaagttgaaaacaccacacactgtgagtttgcctacctgcgggaccttctcatcaggacgcacatgcagaacatcaaggacatcaccagcagcatccacttcgaggcgtaccgtgtgaagcgcctcaacgagggcagcagcgccatggccaacggcatggaggagaaggagccagaagccccggagatgtagacgccaccctgcccacccccgggatcctgcccccaagtcatttccgtccccccccaggccctcccaccaccccattttattttatatgattttctccatttgtcatcgttccccaccccttcgacatgctgccaggaaacaagggaaggggcctccctccgagtgagtcagtgatgaggccgcggcctccccgaggttgtggggaggctgcactggagccacaggcaggggtgagagcacccactgaattgacatgaccctctgtccccaggcctggctccccgagggctcagaagagcagcttcggtgtgcagatcatccgtctgtgtggggttctcagtgccggaggccttggggtgggggccaggcctcgcacttgcagaggagcccagtgggctgcacgctcccctccatccccatcggccctgtcccctggagtgtgtcagagcccaggggagaatgcagcccaccaggagcacctggaccccctgcccgccacatggtgtggccatcactcagcccctacccctgccctgctcctaagggtagaaaactccagggtcccctgccaccgactgcccagccactccaagccccctggcagctgcccctcctggagcagaaagtgcctttatctcagccatccgcagactgcttggccagatgcggggacaggctggaatgagggaggcgtcttcatctccctgccatccccctctcacgccacccccgcccccaccgggctgcaggtgctgctgatgcgctgggatctgattgaggataaaaaggaaggagagatgacccctaccccctcatcccccagttttgaaaaggtctaagcaagtgagtctggtggaggagctgagggagggagccatggaaggtgccagaaggaaggttggcgggggcacgtgtgggccgtggcttgggctggtcagagtggcgtgagctgcccggcgcctgccctgcccaagtgaccagggaagtgtgtgtgtgtccatgtgtatgcgtgtccgtctgtctgtctagtgtctgggtttggcccaagactgggctgtagttacattaatgcccagccagccacccctgccactcacccttcctggcccaggccttgctgactctctgagctggggaggtgggaggccaggcgagcctgactctgttgatctacccgtgcctgggcccctcccctcagagcccatggtaacgaacccctagaaaggagagaacgggcgtcaggggtgcacagtccacagctgaagagcaaggtttcgtggcagcacggcccggcccctcaccctctgtccccacgaggggacccatgggggctgtctttgcagggcacagatgaccaaagtcccttcctgcttcctgttacctgtcttgctcctggggagaaagaggggcctgatgagactccactcaggtgcacacatcaccaggtgcatctgcaggcaccgggctggctgcttgcagccaggagaaggtcagcgagaaggagtgtatgagtgtgagtgtgtgtgcatggaagttggggcactgggcgtctgactccctccccacccaagagaggaaggacccctcaccacccccactggtgagacagtttactttgccaacttgccatgtttttgccaaaaccaagattttgaaggaaatgagtggccagcgccagggcccaggccatgtggcctgcccagcctcaatgtcacttggtggcggggtggggtgggggtgggcagcagcatcccagccttgagatgcttcactttccttctctgtaaccagactttgaaaaattgttcgtttcatcaggctctgttcctcaatggccttttgctacgtgcctcccgagaaatttgtctttttgtataaatgacaaagtgttgaaaatgtatttcctgaaataaatgtttcaaatgcagaaaccc

SEQ ID NO: 179962 - DNA, 3821 bp, Homo sapiens
  Payload ID: 15455
  Gene Symbol: SEPT9
  Gene Name: septin 9
  Uniprot ID: Q9UHD8
  ENST ID: ENST00000427177
  CDS Start-End: 127-1887
actccagacggcgggccgccccctcttcccgccttcctactaccggcccaggattagcgccctgggagcgcgcgccccgctgcctcgccgccacactttcctgggagcggcggccacggaggcaccatgaagaagtcttactcaggaggcacgcggacctccagtggccggctccggaggcttggtgactccagtggcccagccttgaaaagatcttttgaggtcgaggaggtcgagacacccaactccaccccaccccggagggtccagactcccctactccgagccactgtggccagctccacccagaaattccaggacctgggcgtgaagaactcagaaccctcggcccgccatgtggactccctaagccaacgctcccccaaggcgtccctgcggagggtggagctctcgggccccaaggcggccgagccggtgtcccggcgcactgagctgtccattgacatctcgtccaagcaggtggagaacgccggggccatcggcccgtcccggttcgggctcaagagggccgaggtgttgggccacaagacgccagaaccggcccctcggaggacggagatcaccatcgtcaaaccccaggagtcagcccaccggaggatggagccccctgcctccaaggtccccgaggtgcccactgcccctgccaccgacgcagcccccaagagggtggagatccagatgcccaagcctgctgaggcgcccaccgcccccagcccagcccagaccttggagaattcagagcctgcccctgtgtctcagctgcagagcaggctggagcccaagccccagccccctgtggctgaggctacaccccggagccaggaggccactgaggcggctcccagctgcgttggcgacatggccgacacccccagagatgccgggctcaagcaggcgcctgcatcacggaacgagaaggccccggtggacttcggctacgtggggattgactccatcctggagcagatgcgccggaaggccatgaagcagggcttcgagttcaacatcatggtggtcgggcagagcggcttgggtaaatccaccttaatcaacaccctcttcaaatccaaaatcagccggaagtcggtgcagcccacctcagaggagcgcatccccaagaccatcgagatcaagtccatcacgcacgatattgaggagaaaggcgtccggatgaagctgacagtgattgacacaccagggttcggggaccacatcaacaacgagaactgctggcagcccatcatgaagttcatcaatgaccagtacgagaaatacctgcaggaggaggtcaacatcaaccgcaagaagcgcatcccggacacccgcgtccactgctgcctctacttcatccccgccaccggccactccctcaggcccctggacatcgagtttatgaaacgcctgagcaaggtggtcaacatcgtccctgtcatcgccaaggcggacacactcaccctggaggagagggtccacttcaaacagcggatcaccgcagacctgctgtccaacggcatcgacgtgtacccccagaaggaatttgatgaggactcggaggaccggctggtgaacgagaagttccgggagatgatcccatttgctgtggtgggcagtgaccacgagtaccaggtcaacggcaagaggatccttgggaggaagaccaagtggggtaccatcgaagttgaaaacaccacacactgtgagtttgcctacctgcgggaccttctcatcaggacgcacatgcagaacatcaaggacatcaccagcagcatccacttcgaggcgtaccgtgtgaagcgcctcaacgagggcagcagcgccatggccaacggcatggaggagaaggagccagaagccccggagatgtagacgccaccctgcccacccccgggatcctgcccccaagtcatttccgtccccccccaggccctcccaccaccccattttattttatatgattttctccatttgtcatcgttccccaccccttcgacatgctgccaggaaacaagggaaggggcctccctccgagtgagtcagtgatgaggccgcggcctccccgaggttgtggggaggctgcactggagccacaggcaggggtgagagcacccactgaattgacatgaccctctgtccccaggcctggctccccgagggctcagaagagcagcttcggtgtgcagatcatccgtctgtgtggggttctcagtgccggaggccttggggtgggggccaggcctcgcacttgcagaggagcccagtgggctgcacgctcccctccatccccatcggccctgtcccctggagtgtgtcagagcccaggggagaatgcagcccaccaggagcacctggaccccctgcccgccacatggtgtggccatcactcagcccctacccctgccctgctcctaagggtagaaaactccagggtcccctgccaccgactgcccagccactccaagccccctggcagctgcccctcctggagcagaaagtgcctttatctcagccatccgcagactgcttggccagatgcggggacaggctggaatgagggaggcgtcttcatctccctgccatccccctctcacgccacccccgcccccaccgggctgcaggtgctgctgatgcgctgggatctgattgaggataaaaaggaaggagagatgacccctaccccctcatcccccagttttgaaaaggtctaagcaagtgagtctggtggaggagctgagggagggagccatggaaggtgccagaaggaaggttggcgggggcacgtgtgggccgtggcttgggctggtcagagtggcgtgagctgcccggcgcctgccctgcccaagtgaccagggaagtgtgtgtgtgtccatgtgtatgcgtgtccgtctgtctgtctagtgtctgggtttggcccaagactgggctgtagttacattaatgcccagccagccacccctgccactcacccttcctggcccaggccttgctgactctctgagctggggaggtgggaggccaggcgagcctgactctgttgatctacccgtgcctgggcccctcccctcagagcccatggtaacgaacccctagaaaggagagaacgggcgtcaggggtgcacagtccacagctgaagagcaaggtttcgtggcagcacggcccggcccctcaccctctgtccccacgaggggacccatgggggctgtctttgcagggcacagatgaccaaagtcccttcctgcttcctgttacctgtcttgctcctggggagaaagaggggcctgatgagactccactcaggtgcacacatcaccaggtgcatctgcaggcaccgggctggctgcttgcagccaggagaaggtcagcgagaaggagtgtatgagtgtgagtgtgtgtgcatggaagttggggcactgggcgtctgactccctccccacccaagagaggaaggacccctcaccacccccactggtgagacagtttactttgccaacttgccatgtttttgccaaaaccaagattttgaaggaaatgagtggccagcgccagggcccaggccatgtggcctgcccagcctcaatgtcacttggtggcggggtggggtgggggtgggcagcagcatcccagccttgagatgcttcactttccttctctgtaaccagactttgaaaaattgttcgtttcatcaggctctgttcctcaatggccttttgctacgtgcctcccgagaaatttgtctttttgtataaatgacaaagtgttgaaaatgtatttcctgaaataaatgtttcaaatgcagaaaccc

SEQ ID NO: 179963 - DNA, 3996 bp, Homo sapiens
  Payload ID: 15455
  Gene Symbol: SEPT9
  Gene Name: septin 9
  Uniprot ID: Q9UHD8
  ENST ID: ENST00000449803
  CDS Start-End: 794-2062
actgggcggcccttagacccaggctgcctgctgtctctggcaggaactcaagtcgctggtcatcctcagagcggtgttggcccggggccttcagtggcctttgtgtctgggtgagaggaaccctggatggccactctgccctgagtgtgtgggtccccagaagtgctgggttagggggcacggagggccagaaagtcccctttggagcgctggactctctcgctgactcctaccccaccccggcctggggtttcagagaaggggtccaggcaggagtgtcatcttttctcaatggggatgtggcttcagtctctgtccaggaggcacgcggacctccagtggccggctccggaggcttggtgactccagtggcccagccttgaaaagatcttttgaggtcgaggaggtcgagacacccaactccaccccaccccggagggtccagactcccctactccgagccactgtggccagctccacccagaaattccaggacctgggcgtgaagaactcagaaccctcggcccgccatgtggactccctaagccaacgctcccccaaggcgtccctgcggagggtggagctctcgggccccaaggcggccgagccggtgtcccggcgcactgagctgtccattgacatctcgtccaagcaggtggagaacgccggggccatcggcccgtcccggttcgggctcaagagggccgaggtgttgggccacaagacgccagaaccggcccctcggaggacggagatcaccatcgtcaaaccccaggagtcagcccaccggaggatggagccccctgcctccaaggtccccgaggtgcccactgcccctgccaccgacgcagcccccaagagggtggagatccagatgcccaagcctgctgaggcgcccaccgcccccagcccagcccagaccttggagaattcagagcctgcccctgtgtctcagctgcagagcaggctggagcccaagccccagccccctgtggctgaggctacaccccggagccaggaggccactgaggcggctcccagctgcgttggcgacatggccgacacccccagagatgccgggctcaagcaggcgcctgcatcacggaacgagaaggccccggtggacttcggctacgtggggattgactccatcctggagcagatgcgccggaaggccatgaagcagggcttcgagttcaacatcatggtggtcgggcagagcggcttgggtaaatccaccttaatcaacaccctcttcaaatccaaaatcagccggaagtcggtgcagcccacctcagaggagcgcatccccaagaccatcgagatcaagtccatcacgcacgatattgaggagaaaggcgtccggatgaagctgacagtgattgacacaccagggttcggggaccacatcaacaacgagaactgctggcagcccatcatgaagttcatcaatgaccagtacgagaaatacctgcaggaggaggtcaacatcaaccgcaagaagcgcatcccggacacccgcgtccactgctgcctctacttcatccccgccaccggccactccctcaggcccctggacatcgagtttatgaaacgcctgagcaaggtggtcaacatcgtccctgtcatcgccaaggcggacacactcaccctggaggagagggtccacttcaaacagcggatcaccgcagacctgctgtccaacggcatcgacgtgtacccccagaaggaatttgatgaggactcggaggaccggctggtgaacgagaagttccgggagatgatcccatttgctgtggtgggcagtgaccacgagtaccaggtcaacggcaagaggatccttgggaggaagaccaagtggggtaccatcgaagttgaaaacaccacacactgtgagtttgcctacctgcgggaccttctcatcaggacgcacatgcagaacatcaaggacatcaccagcagcatccacttcgaggcgtaccgtgtgaagcgcctcaacgagggcagcagcgccatggccaacggcatggaggagaaggagccagaagccccggagatgtagacgccaccctgcccacccccgggatcctgcccccaagtcatttccgtccccccccaggccctcccaccaccccattttattttatatgattttctccatttgtcatcgttccccaccccttcgacatgctgccaggaaacaagggaaggggcctccctccgagtgagtcagtgatgaggccgcggcctccccgaggttgtggggaggctgcactggagccacaggcaggggtgagagcacccactgaattgacatgaccctctgtccccaggcctggctccccgagggctcagaagagcagcttcggtgtgcagatcatccgtctgtgtggggttctcagtgccggaggccttggggtgggggccaggcctcgcacttgcagaggagcccagtgggctgcacgctcccctccatccccatcggccctgtcccctggagtgtgtcagagcccaggggagaatgcagcccaccaggagcacctggaccccctgcccgccacatggtgtggccatcactcagcccctacccctgccctgctcctaagggtagaaaactccagggtcccctgccaccgactgcccagccactccaagccccctggcagctgcccctcctggagcagaaagtgcctttatctcagccatccgcagactgcttggccagatgcggggacaggctggaatgagggaggcgtcttcatctccctgccatccccctctcacgccacccccgcccccaccgggctgcaggtgctgctgatgcgctgggatctgattgaggataaaaaggaaggagagatgacccctaccccctcatcccccagttttgaaaaggtctaagcaagtgagtctggtggaggagctgagggagggagccatggaaggtgccagaaggaaggttggcgggggcacgtgtgggccgtggcttgggctggtcagagtggcgtgagctgcccggcgcctgccctgcccaagtgaccagggaagtgtgtgtgtgtccatgtgtatgcgtgtccgtctgtctgtctagtgtctgggtttggcccaagactgggctgtagttacattaatgcccagccagccacccctgccactcacccttcctggcccaggccttgctgactctctgagctggggaggtgggaggccaggcgagcctgactctgttgatctacccgtgcctgggcccctcccctcagagcccatggtaacgaacccctagaaaggagagaacgggcgtcaggggtgcacagtccacagctgaagagcaaggtttcgtggcagcacggcccggcccctcaccctctgtccccacgaggggacccatgggggctgtctttgcagggcacagatgaccaaagtcccttcctgcttcctgttacctgtcttgctcctggggagaaagaggggcctgatgagactccactcaggtgcacacatcaccaggtgcatctgcaggcaccgggctggctgcttgcagccaggagaaggtcagcgagaaggagtgtatgagtgtgagtgtgtgtgcatggaagttggggcactgggcgtctgactccctccccacccaagagaggaaggacccctcaccacccccactggtgagacagtttactttgccaacttgccatgtttttgccaaaaccaagattttgaaggaaatgagtggccagcgccagggcccaggccatgtggcctgcccagcctcaatgtcacttggtggcggggtggggtgggggtgggcagcagcatcccagccttgagatgcttcactttccttctctgtaaccagactttgaaaaattgttcgtttcatcaggctctgttcctcaatggccttttgctacgtgcctcccgagaaatttgtctttttgtataaatgacaaagtgttgaaaatgtatttcctgaaataaatgtttcaaatgcagaaaccc

SEQ ID NO: 179964 - DNA, 3937 bp, Homo sapiens
  Payload ID: 15455
  Gene Symbol: SEPT9
  Gene Name: septin 9
  Uniprot ID: Q9UHD8
  ENST ID: ENST00000427674
  CDS Start-End: 733-2001
gtcagtatggaggaggcggaccttgagggagagtaggaattggattgcaagaggaaggagagccttctggccagcagcagccagcagcagtgggggaggctggaatgagctggctggagagggggctggggcataaggaggggcctgcctgtgaagatcatatgggccaggctgcggagggccaggcatgcccgccgggagtgcagctggtccacgggaagcatctggagtggctgggaatgggcgcaggagcagcgccgtgggagcacaggtctctttcccggggcggctcacctggtgtcttggttcctgcaagccttgaaaagatcttttgaggtcgaggaggtcgagacacccaactccaccccaccccggagggtccagactcccctactccgagccactgtggccagctccacccagaaattccaggacctgggcgtgaagaactcagaaccctcggcccgccatgtggactccctaagccaacgctcccccaaggcgtccctgcggagggtggagctctcgggccccaaggcggccgagccggtgtcccggcgcactgagctgtccattgacatctcgtccaagcaggtggagaacgccggggccatcggcccgtcccggttcgggctcaagagggccgaggtgttgggccacaagacgccagaaccggcccctcggaggacggagatcaccatcgtcaaaccccaggagtcagcccaccggaggatggagccccctgcctccaaggtccccgaggtgcccactgcccctgccaccgacgcagcccccaagagggtggagatccagatgcccaagcctgctgaggcgcccaccgcccccagcccagcccagaccttggagaattcagagcctgcccctgtgtctcagctgcagagcaggctggagcccaagccccagccccctgtggctgaggctacaccccggagccaggaggccactgaggcggctcccagctgcgttggcgacatggccgacacccccagagatgccgggctcaagcaggcgcctgcatcacggaacgagaaggccccggtggacttcggctacgtggggattgactccatcctggagcagatgcgccggaaggccatgaagcagggcttcgagttcaacatcatggtggtcgggcagagcggcttgggtaaatccaccttaatcaacaccctcttcaaatccaaaatcagccggaagtcggtgcagcccacctcagaggagcgcatccccaagaccatcgagatcaagtccatcacgcacgatattgaggagaaaggcgtccggatgaagctgacagtgattgacacaccagggttcggggaccacatcaacaacgagaactgctggcagcccatcatgaagttcatcaatgaccagtacgagaaatacctgcaggaggaggtcaacatcaaccgcaagaagcgcatcccggacacccgcgtccactgctgcctctacttcatccccgccaccggccactccctcaggcccctggacatcgagtttatgaaacgcctgagcaaggtggtcaacatcgtccctgtcatcgccaaggcggacacactcaccctggaggagagggtccacttcaaacagcggatcaccgcagacctgctgtccaacggcatcgacgtgtacccccagaaggaatttgatgaggactcggaggaccggctggtgaacgagaagttccgggagatgatcccatttgctgtggtgggcagtgaccacgagtaccaggtcaacggcaagaggatccttgggaggaagaccaagtggggtaccatcgaagttgaaaacaccacacactgtgagtttgcctacctgcgggaccttctcatcaggacgcacatgcagaacatcaaggacatcaccagcagcatccacttcgaggcgtaccgtgtgaagcgcctcaacgagggcagcagcgccatggccaacggcatggaggagaaggagccagaagccccggagatgtagacgccaccctgcccacccccgggatcctgcccccaagtcatttccgtccccccccaggccctcccaccaccccattttattttatatgattttctccatttgtcatcgttccccaccccttcgacatgctgccaggaaacaagggaaggggcctccctccgagtgagtcagtgatgaggccgcggcctccccgaggttgtggggaggctgcactggagccacaggcaggggtgagagcacccactgaattgacatgaccctctgtccccaggcctggctccccgagggctcagaagagcagcttcggtgtgcagatcatccgtctgtgtggggttctcagtgccggaggccttggggtgggggccaggcctcgcacttgcagaggagcccagtgggctgcacgctcccctccatccccatcggccctgtcccctggagtgtgtcagagcccaggggagaatgcagcccaccaggagcacctggaccccctgcccgccacatggtgtggccatcactcagcccctacccctgccctgctcctaagggtagaaaactccagggtcccctgccaccgactgcccagccactccaagccccctggcagctgcccctcctggagcagaaagtgcctttatctcagccatccgcagactgcttggccagatgcggggacaggctggaatgagggaggcgtcttcatctccctgccatccccctctcacgccacccccgcccccaccgggctgcaggtgctgctgatgcgctgggatctgattgaggataaaaaggaaggagagatgacccctaccccctcatcccccagttttgaaaaggtctaagcaagtgagtctggtggaggagctgagggagggagccatggaaggtgccagaaggaaggttggcgggggcacgtgtgggccgtggcttgggctggtcagagtggcgtgagctgcccggcgcctgccctgcccaagtgaccagggaagtgtgtgtgtgtccatgtgtatgcgtgtccgtctgtctgtctagtgtctgggtttggcccaagactgggctgtagttacattaatgcccagccagccacccctgccactcacccttcctggcccaggccttgctgactctctgagctggggaggtgggaggccaggcgagcctgactctgttgatctacccgtgcctgggcccctcccctcagagcccatggtaacgaacccctagaaaggagagaacgggcgtcaggggtgcacagtccacagctgaagagcaaggtttcgtggcagcacggcccggcccctcaccctctgtccccacgaggggacccatgggggctgtctttgcagggcacagatgaccaaagtcccttcctgcttcctgttacctgtcttgctcctggggagaaagaggggcctgatgagactccactcaggtgcacacatcaccaggtgcatctgcaggcaccgggctggctgcttgcagccaggagaaggtcagcgagaaggagtgtatgagtgtgagtgtgtgtgcatggaagttggggcactgggcgtctgactccctccccacccaagagaggaaggacccctcaccacccccactggtgagacagtttactttgccaacttgccatgtttttgccaaaaccaagattttgaaggaaatgagtggccagcgccagggcccaggccatgtggcctgcccagcctcaatgtcacttggtggcggggtggggtgggggtgggcagcagcatcccagccttgagatgcttcactttccttctctgtaaccagactttgaaaaattgttcgtttcatcaggctctgttcctcaatggccttttgctacgtgcctcccgagaaatttgtctttttgtataaatgacaaagtgttgaaaatgtatttcctgaaataaatgtttcaaatgcagaaacccag

SEQ ID NO: 179965 - DNA, 3984 bp, Homo sapiens
  Payload ID: 15455
  Gene Symbol: SEPT9
  Gene Name: septin 9
  Uniprot ID: Q9UHD8
  ENST ID: ENST00000423034
  CDS Start-End: 309-2048
ccccaggcctggccttgacaggcgggcggagcagccagtgcgagacagggaggccggtgcgggtgcgggaacctgatccgcccgggaggcgggggcggggcgggggcgcagcgcgcggggaggggccggcgcccgccttcctcccccattcattcagctgagccagggggcctaggggctcctccggcggctagctctgcactgcaggagcgcgggcgcggcgccccagccagcgcgcagggcccgggccccgccgggggcgcttcctcgccgctgccctccgcgcgacccgctgcccaccagccatcatgtcggaccccgcggtcaacgcgcagctggatgggatcatttcggacttcgaagccttgaaaagatcttttgaggtcgaggaggtcgagacacccaactccaccccaccccggagggtccagactcccctactccgagccactgtggccagctccacccagaaattccaggacctgggcgtgaagaactcagaaccctcggcccgccatgtggactccctaagccaacgctcccccaaggcgtccctgcggagggtggagctctcgggccccaaggcggccgagccggtgtcccggcgcactgagctgtccattgacatctcgtccaagcaggtggagaacgccggggccatcggcccgtcccggttcgggctcaagagggccgaggtgttgggccacaagacgccagaaccggcccctcggaggacggagatcaccatcgtcaaaccccaggagtcagcccaccggaggatggagccccctgcctccaaggtccccgaggtgcccactgcccctgccaccgacgcagcccccaagagggtggagatccagatgcccaagcctgctgaggcgcccaccgcccccagcccagcccagaccttggagaattcagagcctgcccctgtgtctcagctgcagagcaggctggagcccaagccccagccccctgtggctgaggctacaccccggagccaggaggccactgaggcggctcccagctgcgttggcgacatggccgacacccccagagatgccgggctcaagcaggcgcctgcatcacggaacgagaaggccccggtggacttcggctacgtggggattgactccatcctggagcagatgcgccggaaggccatgaagcagggcttcgagttcaacatcatggtggtcgggcagagcggcttgggtaaatccaccttaatcaacaccctcttcaaatccaaaatcagccggaagtcggtgcagcccacctcagaggagcgcatccccaagaccatcgagatcaagtccatcacgcacgatattgaggagaaaggcgtccggatgaagctgacagtgattgacacaccagggttcggggaccacatcaacaacgagaactgctggcagcccatcatgaagttcatcaatgaccagtacgagaaatacctgcaggaggaggtcaacatcaaccgcaagaagcgcatcccggacacccgcgtccactgctgcctctacttcatccccgccaccggccactccctcaggcccctggacatcgagtttatgaaacgcctgagcaaggtggtcaacatcgtccctgtcatcgccaaggcggacacactcaccctggaggagagggtccacttcaaacagcggatcaccgcagacctgctgtccaacggcatcgacgtgtacccccagaaggaatttgatgaggactcggaggaccggctggtgaacgagaagttccgggagatgatcccatttgctgtggtgggcagtgaccacgagtaccaggtcaacggcaagaggatccttgggaggaagaccaagtggggtaccatcgaagttgaaaacaccacacactgtgagtttgcctacctgcgggaccttctcatcaggacgcacatgcagaacatcaaggacatcaccagcagcatccacttcgaggcgtaccgtgtgaagcgcctcaacgagggcagcagcgccatggccaacggcatggaggagaaggagccagaagccccggagatgtagacgccaccctgcccacccccgggatcctgcccccaagtcatttccgtccccccccaggccctcccaccaccccattttattttatatgattttctccatttgtcatcgttccccaccccttcgacatgctgccaggaaacaagggaaggggcctccctccgagtgagtcagtgatgaggccgcggcctccccgaggttgtggggaggctgcactggagccacaggcaggggtgagagcacccactgaattgacatgaccctctgtccccaggcctggctccccgagggctcagaagagcagcttcggtgtgcagatcatccgtctgtgtggggttctcagtgccggaggccttggggtgggggccaggcctcgcacttgcagaggagcccagtgggctgcacgctcccctccatccccatcggccctgtcccctggagtgtgtcagagcccaggggagaatgcagcccaccaggagcacctggaccccctgcccgccacatggtgtggccatcactcagcccctacccctgccctgctcctaagggtagaaaactccagggtcccctgccaccgactgcccagccactccaagccccctggcagctgcccctcctggagcagaaagtgcctttatctcagccatccgcagactgcttggccagatgcggggacaggctggaatgagggaggcgtcttcatctccctgccatccccctctcacgccacccccgcccccaccgggctgcaggtgctgctgatgcgctgggatctgattgaggataaaaaggaaggagagatgacccctaccccctcatcccccagttttgaaaaggtctaagcaagtgagtctggtggaggagctgagggagggagccatggaaggtgccagaaggaaggttggcgggggcacgtgtgggccgtggcttgggctggtcagagtggcgtgagctgcccggcgcctgccctgcccaagtgaccagggaagtgtgtgtgtgtccatgtgtatgcgtgtccgtctgtctgtctagtgtctgggtttggcccaagactgggctgtagttacattaatgcccagccagccacccctgccactcacccttcctggcccaggccttgctgactctctgagctggggaggtgggaggccaggcgagcctgactctgttgatctacccgtgcctgggcccctcccctcagagcccatggtaacgaacccctagaaaggagagaacgggcgtcaggggtgcacagtccacagctgaagagcaaggtttcgtggcagcacggcccggcccctcaccctctgtccccacgaggggacccatgggggctgtctttgcagggcacagatgaccaaagtcccttcctgcttcctgttacctgtcttgctcctggggagaaagaggggcctgatgagactccactcaggtgcacacatcaccaggtgcatctgcaggcaccgggctggctgcttgcagccaggagaaggtcagcgagaaggagtgtatgagtgtgagtgtgtgtgcatggaagttggggcactgggcgtctgactccctccccacccaagagaggaaggacccctcaccacccccactggtgagacagtttactttgccaacttgccatgtttttgccaaaaccaagattttgaaggaaatgagtggccagcgccagggcccaggccatgtggcctgcccagcctcaatgtcacttggtggcggggtggggtgggggtgggcagcagcatcccagccttgagatgcttcactttccttctctgtaaccagactttgaaaaattgttcgtttcatcaggctctgttcctcaatggccttttgctacgtgcctcccgagaaatttgtctttttgtataaatgacaaagtgttgaaaatgtatttcctgaaataaatgtttcaaatgcagaaacccag

SEQ ID NO: 179966 - DNA, 4004 bp, Homo sapiens
  Payload ID: 15455
  Gene Symbol: SEPT9
  Gene Name: septin 9
  Uniprot ID: Q9UHD8
  ENST ID: ENST00000431235
  CDS Start-End: 798-2066
actgggcggcccttagacccaggctgcctgctgtctctggcaggaactcaagtcgctggtcatcctcagagcggtgttggcccggggccttcagtggcctttgtgtctgggtgagaggaaccctggatggccactctgccctgagtgtgtgggtccccagaagtgctgggttagggggcacggagggccagaaagtcccctttggagcgctggactctctcgctgactcctaccccaccccggcctggggtttcagagaaggggtccaggcaggagtgtcatcttttctcaatggggatgtggcttcagtctctgtccaggtgggaggcacgcggacctccagtggccggctccggaggcttggtgactccagtggcccagccttgaaaagatcttttgaggtcgaggaggtcgagacacccaactccaccccaccccggagggtccagactcccctactccgagccactgtggccagctccacccagaaattccaggacctgggcgtgaagaactcagaaccctcggcccgccatgtggactccctaagccaacgctcccccaaggcgtccctgcggagggtggagctctcgggccccaaggcggccgagccggtgtcccggcgcactgagctgtccattgacatctcgtccaagcaggtggagaacgccggggccatcggcccgtcccggttcgggctcaagagggccgaggtgttgggccacaagacgccagaaccggcccctcggaggacggagatcaccatcgtcaaaccccaggagtcagcccaccggaggatggagccccctgcctccaaggtccccgaggtgcccactgcccctgccaccgacgcagcccccaagagggtggagatccagatgcccaagcctgctgaggcgcccaccgcccccagcccagcccagaccttggagaattcagagcctgcccctgtgtctcagctgcagagcaggctggagcccaagccccagccccctgtggctgaggctacaccccggagccaggaggccactgaggcggctcccagctgcgttggcgacatggccgacacccccagagatgccgggctcaagcaggcgcctgcatcacggaacgagaaggccccggtggacttcggctacgtggggattgactccatcctggagcagatgcgccggaaggccatgaagcagggcttcgagttcaacatcatggtggtcgggcagagcggcttgggtaaatccaccttaatcaacaccctcttcaaatccaaaatcagccggaagtcggtgcagcccacctcagaggagcgcatccccaagaccatcgagatcaagtccatcacgcacgatattgaggagaaaggcgtccggatgaagctgacagtgattgacacaccagggttcggggaccacatcaacaacgagaactgctggcagcccatcatgaagttcatcaatgaccagtacgagaaatacctgcaggaggaggtcaacatcaaccgcaagaagcgcatcccggacacccgcgtccactgctgcctctacttcatccccgccaccggccactccctcaggcccctggacatcgagtttatgaaacgcctgagcaaggtggtcaacatcgtccctgtcatcgccaaggcggacacactcaccctggaggagagggtccacttcaaacagcggatcaccgcagacctgctgtccaacggcatcgacgtgtacccccagaaggaatttgatgaggactcggaggaccggctggtgaacgagaagttccgggagatgatcccatttgctgtggtgggcagtgaccacgagtaccaggtcaacggcaagaggatccttgggaggaagaccaagtggggtaccatcgaagttgaaaacaccacacactgtgagtttgcctacctgcgggaccttctcatcaggacgcacatgcagaacatcaaggacatcaccagcagcatccacttcgaggcgtaccgtgtgaagcgcctcaacgagggcagcagcgccatggccaacggcatggaggagaaggagccagaagccccggagatgtagacgccaccctgcccacccccgggatcctgcccccaagtcatttccgtccccccccaggccctcccaccaccccattttattttatatgattttctccatttgtcatcgttccccaccccttcgacatgctgccaggaaacaagggaaggggcctccctccgagtgagtcagtgatgaggccgcggcctccccgaggttgtggggaggctgcactggagccacaggcaggggtgagagcacccactgaattgacatgaccctctgtccccaggcctggctccccgagggctcagaagagcagcttcggtgtgcagatcatccgtctgtgtggggttctcagtgccggaggccttggggtgggggccaggcctcgcacttgcagaggagcccagtgggctgcacgctcccctccatccccatcggccctgtcccctggagtgtgtcagagcccaggggagaatgcagcccaccaggagcacctggaccccctgcccgccacatggtgtggccatcactcagcccctacccctgccctgctcctaagggtagaaaactccagggtcccctgccaccgactgcccagccactccaagccccctggcagctgcccctcctggagcagaaagtgcctttatctcagccatccgcagactgcttggccagatgcggggacaggctggaatgagggaggcgtcttcatctccctgccatccccctctcacgccacccccgcccccaccgggctgcaggtgctgctgatgcgctgggatctgattgaggataaaaaggaaggagagatgacccctaccccctcatcccccagttttgaaaaggtctaagcaagtgagtctggtggaggagctgagggagggagccatggaaggtgccagaaggaaggttggcgggggcacgtgtgggccgtggcttgggctggtcagagtggcgtgagctgcccggcgcctgccctgcccaagtgaccagggaagtgtgtgtgtgtccatgtgtatgcgtgtccgtctgtctgtctagtgtctgggtttggcccaagactgggctgtagttacattaatgcccagccagccacccctgccactcacccttcctggcccaggccttgctgactctctgagctggggaggtgggaggccaggcgagcctgactctgttgatctacccgtgcctgggcccctcccctcagagcccatggtaacgaacccctagaaaggagagaacgggcgtcaggggtgcacagtccacagctgaagagcaaggtttcgtggcagcacggcccggcccctcaccctctgtccccacgaggggacccatgggggctgtctttgcagggcacagatgaccaaagtcccttcctgcttcctgttacctgtcttgctcctggggagaaagaggggcctgatgagactccactcaggtgcacacatcaccaggtgcatctgcaggcaccgggctggctgcttgcagccaggagaaggtcagcgagaaggagtgtatgagtgtgagtgtgtgtgcatggaagttggggcactgggcgtctgactccctccccacccaagagaggaaggacccctcaccacccccactggtgagacagtttactttgccaacttgccatgtttttgccaaaaccaagattttgaaggaaatgagtggccagcgccagggcccaggccatgtggcctgcccagcctcaatgtcacttggtggcggggtggggtgggggtgggcagcagcatcccagccttgagatgcttcactttccttctctgtaaccagactttgaaaaattgttcgtttcatcaggctctgttcctcaatggccttttgctacgtgcctcccgagaaatttgtctttttgtataaatgacaaagtgttgaaaatgtatttcctgaaataaatgtttcaaatgcagaaacccagaa

SEQ ID NO: 179967 - DNA, 3635 bp, Homo sapiens
  Payload ID: 15455
  Gene Symbol: SEPT9
  Gene Name: septin 9
  Uniprot ID: Q9UHD8
  ENST ID: ENST00000427180
  CDS Start-End: 277-1701
agttaccatcgtggggagactgtctggacgcagagagcaggctctgtgtgggagcggggagggcaagccctggttgcgaggcagggcttccccaggattcagcagggatctgaaggactttgcaggcacccagggagataggagaggaggagggagcagccctggccggacactgtcctcctagcattgcctgcatcagggactcactcagctttaagaagcccctttgtgggggacagggagcatctgttagtttataggacctgaagtgcccccatgggctcaagtttctgggaaggcctgcaggtggccgtagggctgccgcaggggtgctggccccagggtctggattcaggggagcctgcagagggagggcagctggaggctgctccagtgtgcattgttacgaggcaaagtaaggagactgctgggcccacgctgggccggggtggatggaggcaaggaagtcttcgccggggcaagggcaccagctgtagatgccggcagctttctcctggacacgggcctggaaggctgacagggtgtggtgagtgccaccggctcccctgccgtggcctggtcagtggcttcacaggcctccgtgggcaggaggaggatgaccttgcattctgcttggccaccattggcagtgacagacaagccactgaggcggctcccagctgcgttggcgacatggccgacacccccagagatgccgggctcaagcaggcgcctgcatcacggaacgagaaggccccggtggacttcggctacgtggggattgactccatcctggagcagatgcgccggaaggccatgaagcagggcttcgagttcaacatcatggtggtcgggcagagcggcttgggtaaatccaccttaatcaacaccctcttcaaatccaaaatcagccggaagtcggtgcagcccacctcagaggagcgcatccccaagaccatcgagatcaagtccatcacgcacgatattgaggagaaaggcgtccggatgaagctgacagtgattgacacaccagggttcggggaccacatcaacaacgagaactgctggcagcccatcatgaagttcatcaatgaccagtacgagaaatacctgcaggaggaggtcaacatcaaccgcaagaagcgcatcccggacacccgcgtccactgctgcctctacttcatccccgccaccggccactccctcaggcccctggacatcgagtttatgaaacgcctgagcaaggtggtcaacatcgtccctgtcatcgccaaggcggacacactcaccctggaggagagggtccacttcaaacagcggatcaccgcagacctgctgtccaacggcatcgacgtgtacccccagaaggaatttgatgaggactcggaggaccggctggtgaacgagaagttccgggagatgatcccatttgctgtggtgggcagtgaccacgagtaccaggtcaacggcaagaggatccttgggaggaagaccaagtggggtaccatcgaagttgaaaacaccacacactgtgagtttgcctacctgcgggaccttctcatcaggacgcacatgcagaacatcaaggacatcaccagcagcatccacttcgaggcgtaccgtgtgaagcgcctcaacgagggcagcagcgccatggccaacggcatggaggagaaggagccagaagccccggagatgtagacgccaccctgcccacccccgggatcctgcccccaagtcatttccgtccccccccaggccctcccaccaccccattttattttatatgattttctccatttgtcatcgttccccaccccttcgacatgctgccaggaaacaagggaaggggcctccctccgagtgagtcagtgatgaggccgcggcctccccgaggttgtggggaggctgcactggagccacaggcaggggtgagagcacccactgaattgacatgaccctctgtccccaggcctggctccccgagggctcagaagagcagcttcggtgtgcagatcatccgtctgtgtggggttctcagtgccggaggccttggggtgggggccaggcctcgcacttgcagaggagcccagtgggctgcacgctcccctccatccccatcggccctgtcccctggagtgtgtcagagcccaggggagaatgcagcccaccaggagcacctggaccccctgcccgccacatggtgtggccatcactcagcccctacccctgccctgctcctaagggtagaaaactccagggtcccctgccaccgactgcccagccactccaagccccctggcagctgcccctcctggagcagaaagtgcctttatctcagccatccgcagactgcttggccagatgcggggacaggctggaatgagggaggcgtcttcatctccctgccatccccctctcacgccacccccgcccccaccgggctgcaggtgctgctgatgcgctgggatctgattgaggataaaaaggaaggagagatgacccctaccccctcatcccccagttttgaaaaggtctaagcaagtgagtctggtggaggagctgagggagggagccatggaaggtgccagaaggaaggttggcgggggcacgtgtgggccgtggcttgggctggtcagagtggcgtgagctgcccggcgcctgccctgcccaagtgaccagggaagtgtgtgtgtgtccatgtgtatgcgtgtccgtctgtctgtctagtgtctgggtttggcccaagactgggctgtagttacattaatgcccagccagccacccctgccactcacccttcctggcccaggccttgctgactctctgagctggggaggtgggaggccaggcgagcctgactctgttgatctacccgtgcctgggcccctcccctcagagcccatggtaacgaacccctagaaaggagagaacgggcgtcaggggtgcacagtccacagctgaagagcaaggtttcgtggcagcacggcccggcccctcaccctctgtccccacgaggggacccatgggggctgtctttgcagggcacagatgaccaaagtcccttcctgcttcctgttacctgtcttgctcctggggagaaagaggggcctgatgagactccactcaggtgcacacatcaccaggtgcatctgcaggcaccgggctggctgcttgcagccaggagaaggtcagcgagaaggagtgtatgagtgtgagtgtgtgtgcatggaagttggggcactgggcgtctgactccctccccacccaagagaggaaggacccctcaccacccccactggtgagacagtttactttgccaacttgccatgtttttgccaaaaccaagattttgaaggaaatgagtggccagcgccagggcccaggccatgtggcctgcccagcctcaatgtcacttggtggcggggtggggtgggggtgggcagcagcatcccagccttgagatgcttcactttccttctctgtaaccagactttgaaaaattgttcgtttcatcaggctctgttcctcaatggccttttgctacgtgcctcccgagaaatttgtctttttgtataaatgacaaagtgttgaaaatgtatttcctgaaataaatgtttcaaatgcagaaaccc

SEQ ID NO: 179968 - DNA, 3026 bp, Homo sapiens
  Payload ID: 15455
  Gene Symbol: SEPT9
  Gene Name: septin 9
  Uniprot ID: Q9UHD8
  ENST ID: ENST00000541152
  CDS Start-End: 83-1090
aggagctggatcagatctgaatccagaggctctcggaggaagagctcaggccactgaggcggctcccagctgcgttggcgacatggccgacacccccagagatgccgggctcaagcaggcgcctgcatcacggaacgagaaggccccggtggacttcggctacgtggggattgactccatcctggagcagatgcgccggaaggccatgaagcagggcttcgagttcaacatcatggtggtcgggcagagcggcttgggtaaatccaccttaatcaacaccctcttcaaatccaaaatcagccggaagtcggtgcagcccacctcagaggagcgcatccccaagaccatcgagatcaagtccatcacgcacgatattgaggagaaaggcgtccggatgaagctgacagtgattgacacaccagggttcggggaccacatcaacaacgagaactgctggcagcccatcatgaagttcatcaatgaccagtacgagaaatacctgcaggaggaggtcaacatcaaccgcaagaagcgcatcccggacacccgcgtccactgctgcctctacttcatccccgccaccggccactccctcaggcccctggacatcgagtttatgaaacgcctgagcaaggtggtcaacatcgtccctgtcatcgccaaggcggacacactcaccctggaggagagggtccacttcaaacagcggatcaccgcagacctgctgtccaacggcatcgacgtgtacccccagaaggaatttgatgaggactcggaggaccggctggtgaacgagaagttccgggagatgatcccatttgctgtggtgggcagtgaccacgagtaccaggtcaacggcaagaggatccttgggaggaagaccaagtggggtaccatcgaagttgaaaacaccacacactgtgagtttgcctacctgcgggaccttctcatcaggacgcacatgcagaacatcaaggacatcaccagcagcatccacttcgaggcgtaccgtgtgaagcgcctcaacgagggcagcagcgccatggccaacggcatggaggagaaggagccagaagccccggagatgtagacgccaccctgcccacccccgggatcctgcccccaagtcatttccgtccccccccaggccctcccaccaccccattttattttatatgattttctccatttgtcatcgttccccaccccttcgacatgctgccaggaaacaagggaaggggcctccctccgagtgagtcagtgatgaggccgcggcctccccgaggttgtggggaggctgcactggagccacaggcaggggtgagagcacccactgaattgacatgaccctctgtccccaggcctggctccccgagggctcagaagagcagcttcggtgtgcagatcatccgtctgtgtggggttctcagtgccggaggccttggggtgggggccaggcctcgcacttgcagaggagcccagtgggctgcacgctcccctccatccccatcggccctgtcccctggagtgtgtcagagcccaggggagaatgcagcccaccaggagcacctggaccccctgcccgccacatggtgtggccatcactcagcccctacccctgccctgctcctaagggtagaaaactccagggtcccctgccaccgactgcccagccactccaagccccctggcagctgcccctcctggagcagaaagtgcctttatctcagccatccgcagactgcttggccagatgcggggacaggctggaatgagggaggcgtcttcatctccctgccatccccctctcacgccacccccgcccccaccgggctgcaggtgctgctgatgcgctgggatctgattgaggataaaaaggaaggagagatgacccctaccccctcatcccccagttttgaaaaggtctaagcaagtgagtctggtggaggagctgagggagggagccatggaaggtgccagaaggaaggttggcgggggcacgtgtgggccgtggcttgggctggtcagagtggcgtgagctgcccggcgcctgccctgcccaagtgaccagggaagtgtgtgtgtgtccatgtgtatgcgtgtccgtctgtctgtctagtgtctgggtttggcccaagactgggctgtagttacattaatgcccagccagccacccctgccactcacccttcctggcccaggccttgctgactctctgagctggggaggtgggaggccaggcgagcctgactctgttgatctacccgtgcctgggcccctcccctcagagcccatggtaacgaacccctagaaaggagagaacgggcgtcaggggtgcacagtccacagctgaagagcaaggtttcgtggcagcacggcccggcccctcaccctctgtccccacgaggggacccatgggggctgtctttgcagggcacagatgaccaaagtcccttcctgcttcctgttacctgtcttgctcctggggagaaagaggggcctgatgagactccactcaggtgcacacatcaccaggtgcatctgcaggcaccgggctggctgcttgcagccaggagaaggtcagcgagaaggagtgtatgagtgtgagtgtgtgtgcatggaagttggggcactgggcgtctgactccctccccacccaagagaggaaggacccctcaccacccccactggtgagacagtttactttgccaacttgccatgtttttgccaaaaccaagattttgaaggaaatgagtggccagcgccagggcccaggccatgtggcctgcccagcctcaatgtcacttggtggcggggtggggtgggggtgggcagcagcatcccagccttgagatgcttcactttccttctctgtaaccagactttgaaaaattgttcgtttcatcaggctctgttcctcaatggccttttgctacgtgcctcccgagaaatttgtctttttgtataaatgacaaagtgttgaaaatgtatttcctgaaataaatgtttcaaatgcagaaacccag

SEQ ID NO: 179969 - DNA, 879 bp, Homo sapiens
  Payload ID: 15455
  Gene Symbol: SEPT9
  Gene Name: septin 9
  ENST ID: ENST00000588958
  CDS Start-End: 253-879
ggcagatcccagcgtccaggcccagcccctatagtgtcagctccctcctctggggacccccttgcttgtgcccctctgggtcccagcacatcccaggcctgcagggagggggagaggaagagactgactcactggccaggtcccccaggggctggagaggctggagaggcaggagctggatcagatctgaatccagaggctctcggaggaagagctcaggccactgaggcggctcccagctgcgttggcgacatggccgacacccccagagatgccgggctcaagcaggcgcctgcatcacggaacgagaaggccccggtggacttcggctacgtggggattgactccatcctggagcagatgcgccggaaggccatgaagcagggcttcgagttcaacatcatggtggtcgggcagagcggcttgggtaaatccaccttaatcaacaccctcttcaaatccaaaatcagccggaagtcggtgcagcccacctcagaggagcgcatccccaagaccatcgagatcaagtccatcacgcacgatattgaggagaaaggcgtccggatgaagctgacagtgattgacacaccagggttcggggaccacatcaacaacgagaactgctggcagcccatcatgaagttcatcaatgaccagtacgagaaatacctgcaggaggaggtcaacatcaaccgcaagaagcgcatcccggacacccgcgtccactgctgcctctacttcatccccgccaccggccactccctcaggcccctggacatcgagtttatgaaacgcctgagcaaggtggtcaacatcgtccctgtcatcgccaaggcggacacactcaccctggaggagagggtccacttcaaacagcgg

SEQ ID NO: 179970 - DNA, 569 bp, Homo sapiens
  Payload ID: 15455
  Gene Symbol: SEPT9
  Gene Name: septin 9
  ENST ID: ENST00000590595
  CDS Start-End: 167-569
acgctggcctggggcacggccgttcctcctgcccagccacgttggggtacagggtgaagaagggctggggccagcccaggacagaggaaggcgaggcaggcacgcaggaactgggctttttaaacccttaagcccaaggaaatcgtagcatcgcgggacagggaaaatgaaagactttggaagtcgtcaggaatttgactctgtggagaacgccggggccatcggcccgtcccggttcgggctcaagagggccgaggtgttgggccacaagacgccagaaccggcccctcggaggacggagatcaccatcgtcaaaccccaggagtcagcccaccggaggatggagccccctgcctccaaggtccccgaggtgcccactgcccctgccaccgacgcagcccccaagagggtggagatccagatgcccaagcctgctgaggcgcccaccgcccccagcccagcccagaccttggagaattcagagcctgcccctgtgtctcagctgcagagcaggctggagcccaagccccagccccctgtggctgaggctacaccccggagccaggagg

SEQ ID NO: 179971 - DNA, 582 bp, Homo sapiens
  Payload ID: 15455
  Gene Symbol: SEPT9
  Gene Name: septin 9
  ENST ID: ENST00000589070
  CDS Start-End: 208-582
aattagtcacttcttcctctgtacgttggaaacaccgctttatcgtggagactttaaggatatccaagtagagagaattcttccgtgcaagttttgcatcctctcaccactgcctgcgttacccgagttgtaaagggcggctccctgtgtctgccccgctgcaccgatacaccgagctgcgcacggtgcccagcgcagggagaacaaatgatcatctgtccaacgcgcccatttacagccttgaaaagatcttttgaggtcgaggaggtcgagacacccaactccaccccaccccggagggtccagactcccctactccgagccactgtggccagctccacccagaaattccaggacctgggcgtgaagaactcagaaccctcggcccgccatgtggactccctaagccaacgctcccccaaggcgtccctgcggagggtggagctctcgggccccaaggcggccgagccggtgtcccggcgcactgagctgtccattgacatctcgtccaagcaggtggagaacgccggggccatcggcccgtcccggttcgggctcaagagggccgaggtgttgggccac

SEQ ID NO: 179972 - DNA, 749 bp, Homo sapiens
  Payload ID: 15455
  Gene Symbol: SEPT9
  Gene Name: septin 9
  ENST ID: ENST00000591704
  CDS Start-End: 164-749
gccagcaagcacctggggtagaggggacaaacccaggtggctgtgttccagccctggctgcaggtctgaatggctttctggggtggctggccatgctccctgagagcccagctgtggcgatgtctgagcagccactgaggcggctcccagctgcgttggcgacatggccgacacccccagagatgccgggctcaagcaggcgcctgcatcacggaacgagaaggccccggtggacttcggctacgtggggattgactccatcctggagcagatgcgccggaaggccatgaagcagggcttcgagttcaacatcatggtggtcgggcagagcggcttgggtaaatccaccttaatcaacaccctcttcaaatccaaaatcagccggaagtcggtgcagcccacctcagaggagcgcatccccaagaccatcgagatcaagtccatcacgcacgatattgaggagaaaggcgtccggatgaagctgacagtgattgacacaccagggttcggggaccacatcaacaacgagaactgctggcagcccatcatgaagttcatcaatgaccagtacgagaaatacctgcaggaggaggtcaacatcaaccgcaagaagcgcatcccggacacccgcgtccactgctgcctctacttcatccccgccaccggccactccctcaggcccctggacatcgagtttatgaaacgcctgagcaaggtggtcaacatcgtccctgtcatcgccaaggcgg

SEQ ID NO: 179973 - DNA, 2816 bp, Homo sapiens
  Payload ID: 15455
  Gene Symbol: SEPT9
  Gene Name: septin 9
  Uniprot ID: Q9UHD8
  ENST ID: ENST00000590294
  CDS Start-End: 813-2519
tgcctctgtcactgcagactaatgggacggaggggggtgacttctcagggttcctcctgggcaggtgctccggaaccttttctcagcacgctggcctggggcacggccgttcctcctgcccagccacgttggggtacagggtgaagaagggctggggccagcccaggacagaggaaggcgaggcaggcacgcaggaactgggctttttaaacccttaagcccaaggaaatcgtagcatcgcgggacagggaaaatgaaagactttggaagtcgtcaggaatttgactctgtgagttggtttccaagagtctaagttaagcatctccaagtggatattaaaaaggagcagcaagcctcggggcggcgggggctggaggaggtggagagaggaggctgccggaagccgcactcgggacctctgcagccaccgaccagaccgggcggccgggactctgggactctcgcaggcagacccggtggtctgccggactcctcggggcccacttcgggccctctctcctgcctcctatttttggatttctctcctttgctccctttttcctcccgttttgaagagacaatgctacttcagtttggagcacaaacatatgatcagcacatggaaatgtggtaattcggatgcattcgtgattgcaacagattgaagaaattagaccagacaaagagtgtttttagaggaggaggaggaggaggaggaggctgagagagggagggcgacgggggtgagaaaggggaggccgcctctgagcgggacgccgggactcccgccgctgctaaatatatccgtaggaatggagagggaccggatctcagccttgaaaagatcttttgaggtcgaggaggtcgagacacccaactccaccccaccccggagggtccagactcccctactccgagccactgtggccagctccacccagaaattccaggacctgggcgtgaagaactcagaaccctcggcccgccatgtggactccctaagccaacgctcccccaaggcgtccctgcggagggtggagctctcgggccccaaggcggccgagccggtgtcccggcgcactgagctgtccattgacatctcgtccaagcaggtggagaacgccggggccatcggcccgtcccggttcgggctcaagagggccgaggtgttgggccacaagacgccagaaccggcccctcggaggacggagatcaccatcgtcaaaccccaggagtcagcccaccggaggatggagccccctgcctccaaggtccccgaggtgcccactgcccctgccaccgacgcagcccccaagagggtggagatccagatgcccaagcctgctgaggcgcccaccgcccccagcccagcccagaccttggagaattcagagcctgcccctgtgtctcagctgcagagcaggctggagcccaagccccagccccctgtggctgaggctacaccccggagccaggaggccactgaggcggctcccagctgcgttggcgacatggccgacacccccagagatgccgggctcaagcaggcgcctgcatcacggaacgagaaggccccggtggacttcggctacgtggggattgactccatcctggagcagatgcgccggaaggccatgaagcagggcttcgagttcaacatcatggtggtcgggcagagcggcttgggtaaatccaccttaatcaacaccctcttcaaatccaaaatcagccggaagtcggtgcagcccacctcagaggagcgcatccccaagaccatcgagatcaagtccatcacgcacgatattgaggagaaaggcgtccggatgaagctgacagtgattgacacaccagggttcggggaccacatcaacaacgagaactgctggcagcccatcatgaagttcatcaatgaccagtacgagaaatacctgcaggaggaggtcaacatcaaccgcaagaagcgcatcccggacacccgcgtccactgctgcctctacttcatccccgccaccggccactccctcaggcccctggacatcgagtttatgaaacgcctgagcaaggtggtcaacatcgtccctgtcatcgccaaggcggacacactcaccctggaggagagggtccacttcaaacagcggatcaccgcagacctgctgtccaacggcatcgacgtgtacccccagaaggaatttgatgaggactcggaggaccggctggtgaacgagaagttccgggagatgatcccatttgctgtggtgggcagtgaccacgagtaccaggtcaacggcaagaggatccttgggaggaagaccaagtggggtaccatcgaagttgaaaacaccacacactgtgagtttgcctacctgcgggaccttctcatcaggacgcacatgcagaacatcaaggacatcaccagcagcatccacttcgaggcgtaccgtgtgaagcgcctcaacgagggcagcagcgccatggccaacggcatggaggagaaggagccagaagccccggagatgtagacgccaccctgcccacccccgggatcctgcccccaagtcatttccgtccccccccaggccctcccaccaccccattttattttatatgattttctccatttgtcatccatcccagccttgagatgcttcactttccttctctgtaaccagactttgaaaaattgttcgtttcatcaggctctgttcctcaatggccttttgctacgtgcctcccgagaaatttgtctttttgtataaatgacaaagtgttgaaaatgtatttcctgaaataaatgtttcaaatgcagaaacccagaa

SEQ ID NO: 179974 - DNA, 583 bp, Homo sapiens
  Payload ID: 15455
  Gene Symbol: SEPT9
  Gene Name: septin 9
  ENST ID: ENST00000590576
  CDS Start-End: 45-116
agatctccccggcctgcccagagggattctgatagccgagggcaatgcacctggcagcggagcattgcgtttgcgacagtccaccttcttcctggaaccaccccccacaagtgtgaccagctcaagccaggacaggaggcacgcggacctccagtggccggctccggaggcttggtgactccagtggcccagccttgaaaagatcttttgaggtcgaggaggtcgagacacccaactccaccccaccccggagggtccagactcccctactccgagccactgtggccagctccacccagaaattccaggacctgggcgtgaagaactcagaaccctcggcccgccatgtggactccctaagccaacgctcccccaaggcgtccctgcggagggtggagctctcgggccccaaggcggccgagccggtgtcccggcgcactgagctgtccattgacatctcgtccaagcaggtggagaacgccggggccatcggcccgtcccggttcgggctcaagagggccgaggtgttgggccacaagacgccagaaccggcccctcggaggacggagatcaccatcgtcaa

SEQ ID NO: 179975 - DNA, 817 bp, Homo sapiens
  Payload ID: 15455
  Gene Symbol: SEPT9
  Gene Name: septin 9
  ENST ID: ENST00000593189
  CDS Start-End: 191-817
tggaagggcctgggaggggacaggctcccaccccaggagcttccaggttccggctgctgcctgtgttagctgcgtgagcgtgagcgagccaggggtcactactgggtggaaggaagaagcgggcatttcttccaggaggtcaccgttggagtcccacaccactgaggcggctcccagctgcgttggcgacatggccgacacccccagagatgccgggctcaagcaggcgcctgcatcacggaacgagaaggccccggtggacttcggctacgtggggattgactccatcctggagcagatgcgccggaaggccatgaagcagggcttcgagttcaacatcatggtggtcgggcagagcggcttgggtaaatccaccttaatcaacaccctcttcaaatccaaaatcagccggaagtcggtgcagcccacctcagaggagcgcatccccaagaccatcgagatcaagtccatcacgcacgatattgaggagaaaggcgtccggatgaagctgacagtgattgacacaccagggttcggggaccacatcaacaacgagaactgctggcagcccatcatgaagttcatcaatgaccagtacgagaaatacctgcaggaggaggtcaacatcaaccgcaagaagcgcatcccggacacccgcgtccactgctgcctctacttcatccccgccaccggccactccctcaggcccctggacatcgagtttatgaaacgcctgagcaaggtggtcaacatcgtccctgtcatcgccaaggcggacacactcaccctggaggagagggtccacttcaaacagcgg

SEQ ID NO: 179976 - DNA, 565 bp, Homo sapiens
  Payload ID: 15455
  Gene Symbol: SEPT9
  Gene Name: septin 9
  ENST ID: ENST00000585638
  CDS Start-End: 133-565
gagctttgctggggaggcagcgtggctgcaggatggcagctttttagaggacaccacggccagggacatccacccgggggaattctcaggggtcgcctggccactgaggcggctcccagctgcgttggcgacatggccgacacccccagagatgccgggctcaagcaggcgcctgcatcacggaacgagaaggccccggtggacttcggctacgtggggattgactccatcctggagcagatgcgccggaaggccatgaagcagggcttcgagttcaacatcatggtggtcgggcagagcggcttgggtaaatccaccttaatcaacaccctcttcaaatccaaaatcagccggaagtcggtgcagcccacctcagaggagcgcatccccaagaccatcgagatcaagtccatcacgcacgatattgaggagaaaggcgtccggatgaagctgacagtgattgacacaccagggttcggggaccacatcaacaacgagaactgctggcagcccatcatgaagttcatcaatgaccagtacgagaaatacctgcaggaggaggtca

SEQ ID NO: 179977 - DNA, 670 bp, Homo sapiens
  Payload ID: 15455
  Gene Symbol: SEPT9
  Gene Name: septin 9
  ENST ID: ENST00000590059
  CDS Start-End: 193-670
attcattcagctgagccagggggcctaggggctcctccggcggctagctctgcactgcaggagcgcgggcgcggcgccccagccagcgcgcagggcccgggccccgccgggggcgcttcctcgccgctgccctccgcgcgacccgctgcccaccagccatcatgtcggaccccgcggtcaacgcgcagctggatgggatcatttcggacttcgaagatgcccaagcctgctgaggcgcccaccgcccccagcccagcccagaccttggagaattcagagcctgcccctgtgtctcagctgcagagcaggctggagcccaagccccagccccctgtggctgaggctacaccccggagccaggaggccactgaggcggctcccagctgcgttggcgacatggccgacacccccagagatgccgggctcaagcaggcgcctgcatcacggaacgagaaggccccggtggacttcggctacgtggggattgactccatcctggagcagatgcgccggaaggccatgaagcagggcttcgagttcaacatcatggtggtcgggcagagcggcttgggtaaatccaccttaatcaacaccctcttcaaatccaaaatcagccggaagtcggtgcagcccacctcagaggagcgcatccccaagaccatcgagatca

SEQ ID NO: 179978 - DNA, 601 bp, Homo sapiens
  Payload ID: 15455
  Gene Symbol: SEPT9
  Gene Name: septin 9
  ENST ID: ENST00000586521
  CDS Start-End: 279-601
agaatgtggcgatttgtctgtatgcagacattagattagagggcaaaggccattatcataacttagcagacagctacaagcagctaaggaattgctatgacatggactgctcgtgattggagctaagaaggagtcagagacagaggtccctgtgctctggcgtgagtccttgggggaggctgagctcccagaatgtggggccgcctgtgcagaggccggaggtgggagacacacctgtgagtgccgccactgaggcggctcccagctgcgttggcgacatggccgacacccccagagatgccgggctcaagcaggcgcctgcatcacggaacgagaaggccccggtggacttcggctacgtggggattgactccatcctggagcagatgcgccggaaggccatgaagcagggcttcgagttcaacatcatggtggtcgggcagagcggcttgggtaaatccaccttaatcaacaccctcttcaaatccaaaatcagccggaagtcggtgcagcccacctcagaggagcgcatccccaagaccatcgagatcaagtccatcacgcacgatattgaggagaaaggcgtccggatgaagctgac

SEQ ID NO: 179979 - DNA, 611 bp, Homo sapiens
  Payload ID: 15455
  Gene Symbol: SEPT9
  Gene Name: septin 9
  ENST ID: ENST00000590938
  CDS Start-End: 205-611
aatgcgaggcacttccacaggaggggacaaccccgtccttaggagccccttctccctgcccccaggcctggtgcagtgtgtggcttccctgccggtgtcaaaggtctcaaggcccctttaagaagcctgtcaccaccaccagcagcttccgttatctggttcttctgtacatccactgaggcggctcccagctgcgttggcgacatggccgacacccccagagatgccgggctcaagcaggcgcctgcatcacggaacgagaaggccccggtggacttcggctacgtggggattgactccatcctggagcagatgcgccggaaggccatgaagcagggcttcgagttcaacatcatggtggtcgggcagagcggcttgggtaaatccaccttaatcaacaccctcttcaaatccaaaatcagccggaagtcggtgcagcccacctcagaggagcgcatccccaagaccatcgagatcaagtccatcacgcacgatattgaggagaaaggcgtccggatgaagctgacagtgattgacacaccagggttcggggaccacatcaacaacgagaactgctggcagcccatcatgaagttcatcaatgaccagta

SEQ ID NO: 179980 - DNA, 1691 bp, Homo sapiens
  Payload ID: 15455
  Gene Symbol: SEPT9
  Gene Name: septin 9
  Uniprot ID: Q9UHD8
  ENST ID: ENST00000591088
  CDS Start-End: 318-1325
gtgccttcaggttgcttctgcgccgggcctgccgctgggcgcccctatctctgcctgccccctcctcctgctcccctcgccctgcccccttggagcaattccccaccgagcctcccttcccaggcagtcgaggtccctccctacctctgccccgcgctctgggaggctccttgttccgcgaccacaaagcccctttgatcctctgctcggctctgagccatgtgacccggtgggcgggccgcggctctcggcgcgtccagcgcagcccgacgttccgctgctgggccactgaggcggctcccagctgcgttggcgacatggccgacacccccagagatgccgggctcaagcaggcgcctgcatcacggaacgagaaggccccggtggacttcggctacgtggggattgactccatcctggagcagatgcgccggaaggccatgaagcagggcttcgagttcaacatcatggtggtcgggcagagcggcttgggtaaatccaccttaatcaacaccctcttcaaatccaaaatcagccggaagtcggtgcagcccacctcagaggagcgcatccccaagaccatcgagatcaagtccatcacgcacgatattgaggagaaaggcgtccggatgaagctgacagtgattgacacaccagggttcggggaccacatcaacaacgagaactgctggcagcccatcatgaagttcatcaatgaccagtacgagaaatacctgcaggaggaggtcaacatcaaccgcaagaagcgcatcccggacacccgcgtccactgctgcctctacttcatccccgccaccggccactccctcaggcccctggacatcgagtttatgaaacgcctgagcaaggtggtcaacatcgtccctgtcatcgccaaggcggacacactcaccctggaggagagggtccacttcaaacagcggatcaccgcagacctgctgtccaacggcatcgacgtgtacccccagaaggaatttgatgaggactcggaggaccggctggtgaacgagaagttccgggagatgatcccatttgctgtggtgggcagtgaccacgagtaccaggtcaacggcaagaggatccttgggaggaagaccaagtggggtaccatcgaagttgaaaacaccacacactgtgagtttgcctacctgcgggaccttctcatcaggacgcacatgcagaacatcaaggacatcaccagcagcatccacttcgaggcgtaccgtgtgaagcgcctcaacgagggcagcagcgccatggccaacggcatggaggagaaggagccagaagccccggagatgtagacgccaccctgcccacccccgggatcctgcccccaagtcatttccgtccccccccaggccctcccaccaccccattttattttatatgattttctccatttgtcatcgttccccaccccttcgacatgctgccaggaaacaagggaaggggcctccctccgagtgagtcagtgatgaggccgcggcctccccgaggttgtggggaggctgcactggagccacaggcaggggtgagagcacccactgaattgacatgaccctctgtccccaggcctggctccccgagggctcagaagagcagcttcggtgtgcagatcatccgtctgtgtggggttctcagtgccggaggccttggggtgggggcca

SEQ ID NO: 179981 - DNA, 580 bp, Homo sapiens
  Payload ID: 15455
  Gene Symbol: SEPT9
  Gene Name: septin 9
  ENST ID: ENST00000589920
  CDS Start-End: 267-580
atggagctttgctggggaggcagcgtggctgcaggatggcagctttttagaggacaccacggccagggacatccacccgggggaattctcaggggtcgcctgggcaagtcgcttagcctttctgagcctcagtgcctcagtttccccatccaaggatgggtgtgacaaccacctggcaggcgcctgtgtgtgagcccctgttccgctctaactcctctgctgttccttccccagccactgaggcggctcccagctgcgttggcgacatggccgacacccccagagatgccgggctcaagcaggcgcctgcatcacggaacgagaaggccccggtggacttcggctacgtggggattgactccatcctggagcagatgcgccggaaggccatgaagcagggcttcgagttcaacatcatggtggtcgggcagagcggcttgggtaaatccaccttaatcaacaccctcttcaaatccaaaatcagccggaagtcggtgcagcccacctcagaggagcgcatccccaagaccatcgagatcaagtccatcacgcacgatattgaggagaaaggcgtccggat

SEQ ID NO: 179982 - DNA, 1793 bp, Homo sapiens
  Payload ID: 15455
  Gene Symbol: SEPT9
  Gene Name: septin 9
  Uniprot ID: Q9UHD8
  ENST ID: ENST00000592951
  CDS Start-End: 404-1411
acatgtaagcctttcccatacaccccggatgtttagggcttccgccctctctccctggccgggagtgtgggaagagggctttatttcaatgcttgagagtagggtcaatggccagggtaagctgtgggggctcctccccgccggcccctctctgcagccctcaccttaacacagagcatcgataccacctgggctttgggaagacctggaggctgaccaccctggaggctcccagcgtcccacagccactctttggggaagaggcttcctgagggacttgtggcccttggctgggactctagtcccagagttctgccttccggcgccgagctttgatttgtttattgagtgccagcccggttcccggacagccactgaggcggctcccagctgcgttggcgacatggccgacacccccagagatgccgggctcaagcaggcgcctgcatcacggaacgagaaggccccggtggacttcggctacgtggggattgactccatcctggagcagatgcgccggaaggccatgaagcagggcttcgagttcaacatcatggtggtcgggcagagcggcttgggtaaatccaccttaatcaacaccctcttcaaatccaaaatcagccggaagtcggtgcagcccacctcagaggagcgcatccccaagaccatcgagatcaagtccatcacgcacgatattgaggagaaaggcgtccggatgaagctgacagtgattgacacaccagggttcggggaccacatcaacaacgagaactgctggcagcccatcatgaagttcatcaatgaccagtacgagaaatacctgcaggaggaggtcaacatcaaccgcaagaagcgcatcccggacacccgcgtccactgctgcctctacttcatccccgccaccggccactccctcaggcccctggacatcgagtttatgaaacgcctgagcaaggtggtcaacatcgtccctgtcatcgccaaggcggacacactcaccctggaggagagggtccacttcaaacagcggatcaccgcagacctgctgtccaacggcatcgacgtgtacccccagaaggaatttgatgaggactcggaggaccggctggtgaacgagaagttccgggagatgatcccatttgctgtggtgggcagtgaccacgagtaccaggtcaacggcaagaggatccttgggaggaagaccaagtggggtaccatcgaagttgaaaacaccacacactgtgagtttgcctacctgcgggaccttctcatcaggacgcacatgcagaacatcaaggacatcaccagcagcatccacttcgaggcgtaccgtgtgaagcgcctcaacgagggcagcagcgccatggccaacggcatggaggagaaggagccagaagccccggagatgtagacgccaccctgcccacccccgggatcctgcccccaagtcatttccgtccccccccaggccctcccaccaccccattttattttatatgattttctccatttgtcatcgttccccaccccttcgacatgctgccaggaaacaagggaaggggcctccctccgagtgagtcagtgatgaggccgcggcctccccgaggttgtggggaggctgcactggagccacaggcaggggtgagagcacccactgaattgacatgaccctctgtccccaggcctggctccccgagggctcagaagagcagcttcggtgtgcagatcatccgtctgtgtggggttctcagtgccggaggccttggggtgggggccaggcctcgcacttgcag

SEQ ID NO: 179983 - DNA, 576 bp, Homo sapiens
  Payload ID: 15455
  Gene Symbol: SEPT9
  Gene Name: septin 9
  ENST ID: ENST00000591833
  CDS Start-End: 100-234
cccgccttcctactaccggcccaggattagcgccctgggagcgcgcgccccgctgcctcgccgccacactttcctgggagcggcggccacggaggcaccatgaagaagtcttactcagatttgcttctggacccgtgcatttcaaatcttgcttctctccactgcgcacgtttttccggcgccaggcaccgcaggatatgttcgtgtcttgtgatttttgattctgcgcggtaggtggaattggaacggaggcacgcggacctccagtggccggctccggaggcttggtgactccagtggcccagccttgaaaagatcttttgaggtcgaggaggtcgagacacccaactccaccccaccccggagggtccagactcccctactccgagccactgtggccagctccacccagaaattccaggacctgggcgtgaagaactcagaaccctcggcccgccatgtggactccctaagccaacgctcccccaaggcgtccctgcggagggtggagctctcgggccccaaggcggccgagccggtgtcccggcgcactgagctgtccattgacatctcgtc

SEQ ID NO: 179984 - DNA, 552 bp, Homo sapiens
  Payload ID: 15455
  Gene Symbol: SEPT9
  Gene Name: septin 9
  ENST ID: ENST00000589140
  CDS Start-End: 97-552
cgtttagactgggccagcagacagttctagagacttcaagtttgttgtcgtttttaaaagtcctgccaatgcccagaaacttagagggacaagaagatgacctcgatgtcagccgggaccataaacaccttgaaaagatcttttgaggtcgaggaggtcgagacacccaactccaccccaccccggagggtccagactcccctactccgagccactgtggccagctccacccagaaattccaggacctgggcgtgaagaactcagaaccctcggcccgccatgtggactccctaagccaacgctcccccaaggcgtccctgcggagggtggagctctcgggccccaaggcggccgagccggtgtcccggcgcactgagctgtccattgacatctcgtccaagcaggtggagaacgccggggccatcggcccgtcccggttcgggctcaagagggccgaggtgttgggccacaagacgccagaaccggcccctcggaggacggagatcaccatcgtcaaaccccaggagtcagcccaccggaggatggagccc

SEQ ID NO: 179985 - DNA, 2588 bp, Homo sapiens
  Payload ID: 15455
  Gene Symbol: SEPT9
  Gene Name: septin 9
  ENST ID: ENST00000592420
  CDS Start-End: 456-1025
actccaccccaccccggagggtccagactcccctactccgagccactgtggccagctccacccagaaattccaggacctgggcgtgaagaactcagaaccctcggcccgccatgtggactccctaagccaacgctcccccaaggcgtccctgcggagggtggagctctcgggccccaaggcggccgagccggtgtcccggcgcactgagctgtccattgacatctcgtccaagcaggtggagaacgccggggccatcggcccgtcccggttcgggctcaagagggccgaggtgttgggccacaagacgccagaaccggcccctcggaggacggagatcaccatcgtcaaaccccaggagtcagcccaccggaggatggagccccctgcctccaaggtccccgaggtgcccactgcccctgccaccgacgcagcccccaagagggtggagatccagatgcccaagcctgctgaggcgcccaccgcccccagcccagcccagaccttggagaattcagagcctgcccctgtgtctcagctgcagagcaggctggagcccaagccccagccccctgtggctgaggctacaccccggagccaggaggccactgaggcggctcccagctgcgttggcgacatggccgacacccccagagatgccgggctcaagcaggcgcctgcatcacggaacgagaaggccccggtggacttcggctacgtggggattgactccatcctggagcagatgcgccggaaggccatgaagcagggcttcgagttcaacatcatggtggtcggtgagtcctcaccttgcatgccactcaaccaatgccggaaaccagcctcagcccccagggcggcccacaagcctttgggcttggtcttcccttctgtaaaatggggcagcaaccctgacctcaaggacggattgccagtgacattgcgtgtgcatgcatgcgcctgggaggagcccacagcctccagcggctcctcagaggggcctgtcctgcacatccagggcccctgagatgactttggggagcccaggccggcctggagcaggtcctgatgagtggtcgctgcctctgagcaatgacgtcagcttgtgcagagggttctgtggcagctgtcccctcactgttgctccagcctggccctccaggctccccaccgcaccccaccgcaccccggccagaggcttcccagcagctcagcttcagctctgccctggaattggggcctcgtggcttccacaccccctggtggccccggagagctggaggtcaccacgggaggtcgtcgatcagcacgacctgggcagggtgagggggccaggctggagtctacagtgggccgcctgttgtttccaaagccccccaggtcccattcaaacctcacagggaccctgtgaagggggcgtcccgttttccaggcagaagcgaggctcagggaaggctgccaaggttccttagctcacagggcagagaaccgcagccaccgttttgactcccagaactgtgttctgcccactccacggggtccagggaggggtctggggaagtgcccccgccaggtcacaccctaaacaaaggtgagcttgcggggtttctgcaaggtgtctgggcacctctcaggccgggcctgtttctctgacctttgccagccgtgcacgtccttcctgcccagctctgtggacgcaaacccacacctgccagcccgacacctttctttcctcttctgcactgatctgggccctggctcccctggggtcttggtgtcctctctgcttcctgtagcctcatgggacccggctgctcatggccctgctgtgctcacagctgcctggaagctggcagcctgcttcaagggagggcggaggtgtggggtcccctcctacggcccccaccctgttctgcctgttgtgggggacgtgcttgtaccctgaggattcagggctgcctcccgggaagatggctggagagaaagagaggggagaggcccaaaggcagtggccaggctgggactcatctctgtgggctacggaggggctgccctgctccctagccagggacagggtgagaaggacctgggaacctctgcgtcccagccatggcacaggccttcttccggagctttggccccaaggagagggagaggcagcccagcagccctcgccttccgtggctgccactgtgacagccttgccctctgggaatggtgcgcaggaggccacttcacctgtctgggcctcttcgccctttcaaccctgagaagaacagtggtcctgattccccacaaaatcactccctcccagggatgccgagtgaggaacaagacgtggggcagctctgctctcctccctcctccctcccatggcagctgtgcccacctgcagaggtgcaggcaaggtggaggggcacctgtttggaggtccacagaccccggggagaatcccagctttgtcctaactcagcggggtgaggcttgtgtgtcttcccctgggctcctcctctgtgagccttagcttcctcgtccataaaatgggatcatcccataaagtgagatcaagcgagctaggccccgggcaggg

SEQ ID NO: 179986 - DNA, 541 bp, Homo sapiens
  Payload ID: 15455
  Gene Symbol: SEPT9
  Gene Name: septin 9
  ENST ID: ENST00000590917
  CDS Start-End: 317-490
aatgcttgagagtagggtcaatggccagggtaagctgtgggggctcctccccgccggcccctctctgcagccctcaccttaacacagagcatcgataccacctgggctttgggaagacctggaggctgaccaccctggaggctcccagcgtcccacagccactctttggggaagaggcttcctgagggacttgtggcccttggctgggactctagtcccagagttctgccttccggcgccgagctttgatttgtttattgagtgccagcccggttcccggacagccactgaggcggctcccagctgcgttggcgacatggccgacacccccagagatgccgggctcaagcaggcgcctgcatcacggaacgagaaggccccggtggacttcggctacgtggggattgactccatcctggagcagatgcgccggaaggccatgaagcagggcttcgagttcaacatcatggtggtcgagcggcttgggtaaatccaccttaatcaacaccctcttcaaatccaaaatcagccggaagtcggt

SEQ ID NO: 179987 - DNA, 906 bp, Homo sapiens
  Payload ID: 15455
  Gene Symbol: SEPT9
  Gene Name: septin 9
  ENST ID: ENST00000585929
  CDS Start-End: 411-906
tttatttcaatgcttgagagtagggtcaatggccagggtaagctgtgggggctcctccccgccggcccctctctgcagccctcaccttaacacagagcatcgataccacctgggctttgggaagacctggaggctgaccaccctggaggctcccagcgtcccacagccactctttggggaagaggcttcctgagggacttgtggcccttggctgggactctagtcccagagttctgccttccggcgccgagctttgatttgtttattgagtgccagcccggttcccggacaggtagggacctgttcccggagctcagcagagccttgggaagctttcccaggagggctcccgagggtggcggccatgcccagtccgctccactgaggcggctcccagctgcgttggcgacatggccgacacccccagagatgccgggctcaagcaggcgcctgcatcacggaacgagaaggccccggtggacttcggctacgtggggattgactccatcctggagcagatgcgccggaaggccatgaagcagggcttcgagttcaacatcatggtggtcgggcagagcggcttgggtaaatccaccttaatcaacaccctcttcaaatccaaaatcagccggaagtcggtgcagcccacctcagaggagcgcatccccaagaccatcgagatcaagtccatcacgcacgatattgaggagaaaggcgtccggatgaagctgacagtgattgacacaccagggttcggggaccacatcaacaacgagaactgctggcagcccatcatgaagttcatcaatgaccagtacgagaaatacctgcaggaggaggtcaacatcaaccgcaagaagcgcatcccggacacccgcgtccactgctgcctctacttcatccccg

SEQ ID NO: 179988 - DNA, 752 bp, Homo sapiens
  Payload ID: 15455
  Gene Symbol: SEPT9
  Gene Name: septin 9
  ENST ID: ENST00000586128
  CDS Start-End: 406-752
cagcgtccaggcccagcccctatagtgtcagctccctcctctggggacccccttgcttgtgcccctctgggtcccagcacatcccaggcctgcagggagggggagaggaagagactgactcactggccaggtcccccaggggctggagaggctggagaggcaggagctggatcagatctgaatccagaggctctcggaggaagagctcagggcagtcgaggtccctccctacctctgccccgcgctctgggaggctccttgttccgcgaccacaaagcccctttgatcctctgctcggctctgagccatgtgacccggtgggcgggccgcggctctcggcgcgtccagcgcagcccgacgttccgctgctgggccactgaggcggctcccagctgcgttggcgacatggccgacacccccagagatgccgggctcaagcaggcgcctgcatcacggaacgagaaggccccggtggacttcggctacgtggggattgactccatcctggagcagatgcgccggaaggccatgaagcagggcttcgagttcaacatcatggtggtcgggcagagcggcttgggtaaatccaccttaatcaacaccctcttcaaatccaaaatcagccggaagtcggtgcagcccacctcagaggagcgcatccccaagaccatcgagatcaagtccatcacgcacgatattgaggagaaaggcgtccggatgaagctgacagtgattgacacaccagggttcgg

SEQ ID NO: 179989 - DNA, 582 bp, Homo sapiens
  Payload ID: 15455
  Gene Symbol: SEPT9
  Gene Name: septin 9
  ENST ID: ENST00000591020
  CDS Start-End: 112-582
gcaaggccccacgcagcctccgactcacccactgcccgtgtgtatttcaggaggctgcatcccccaaggcccccaccagccactgaggcggctcccagctgcgttggcgacatggccgacacccccagagatgccgggctcaagcaggcgcctgcatcacggaacgagaaggccccggtggacttcggctacgtggggattgactccatcctggagcagatgcgccggaaggccatgaagcagggcttcgagttcaacatcatggtggtcgggcagagcggcttgggtaaatccaccttaatcaacaccctcttcaaatccaaaatcagccggaagtcggtgcagcccacctcagaggagcgcatccccaagaccatcgagatcaagtccatcacgcacgatattgaggagaaaggcgtccggatgaagctgacagtgattgacacaccagggttcggggaccacatcaacaacgagaactgctggcagcccatcatgaagttcatcaatgaccagtacgagaaatacctgcaggaggaggtcaacatcaaccgcaagaagcgcatcccggacacccgcgtc

SEQ ID NO: 179990 - DNA, 559 bp, Homo sapiens
  Payload ID: 15455
  Gene Symbol: SEPT9
  Gene Name: septin 9
  ENST ID: ENST00000588575
  CDS Start-End: 177-449
ttttctcagcacgctggcctggggcacggccgttcctcctgcccagccacgttggggtacagggtgaagaagggctggggccagcccaggacagaggaaggcgaggcaggcacgcaggaactgggctttttaaacccttaagcccaaggaaatcgtagcatcgcgggacagggaaaatgaaagactttggaagtcgtcaggaatttgactctgtggagaacgccggggccatcggcccgtcccggttcgggctcaagagggccgaggtgttgggccacaagacgccagaaccggcccctcggaggacggagatcaccatcgtcaaaccccaggagtcagcccaccggaggatggagccccctgcctccaagccggaagtcggtgcagcccacctcagaggagcgcatccccaagaccatcgagatcaagtccatcacgcacgatattgaggagaaaggcgtccggatgaagctgacagtgattgacacaccagggttcggggaccacatcaacaacgagaactgctggcagcccatcatgaagttcatcaatgaccagt

SEQ ID NO: 179991 - DNA, 569 bp, Homo sapiens
  Payload ID: 15455
  Gene Symbol: SEPT9
  Gene Name: septin 9
  ENST ID: ENST00000586433
  CDS Start-End: 115-569
agggcttccgccctctctccctggccgggagtgtgggaagagggctttatttcaatgcttgagagtagggtcaatggccaggccactgaggcggctcccagctgcgttggcgacatggccgacacccccagagatgccgggctcaagcaggcgcctgcatcacggaacgagaaggccccggtggacttcggctacgtggggattgactccatcctggagcagatgcgccggaaggccatgaagcagggcttcgagttcaacatcatggtggtcgggcagagcggcttgggtaaatccaccttaatcaacaccctcttcaaatccaaaatcagccggaagtcggtgcagcccacctcagaggagcgcatccccaagaccatcgagatcaagtccatcacgcacgatattgaggagaaaggcgtccggatgaagctgacagtgattgacacaccagggttcggggaccacatcaacaacgagaactgctggcagcccatcatgaagttcatcaatgaccagtacgagaaatacctgcaggaggaggtcaacatcaaccgcaagaagcgcat

SEQ ID NO: 179992 - DNA, 1387 bp, Homo sapiens
  Payload ID: 15455
  Gene Symbol: SEPT9
  Gene Name: septin 9
  Uniprot ID: Q9UHD8
  ENST ID: ENST00000585930
  CDS Start-End: 16-1104
atctaaatctcggtgatggctggtgctggatgcacagggacgtggtcctggctctgggggacagccactgaggcggctcccagctgcgttggcgacatggccgacacccccagagatgccgggctcaagcaggcgcctgcatcacggaacgagaaggccccggtggacttcggctacgtggggattgactccatcctggagcagatgcgccggaaggccatgaagcagggcttcgagttcaacatcatggtggtcgggcagagcggcttgggtaaatccaccttaatcaacaccctcttcaaatccaaaatcagccggaagtcggtgcagcccacctcagaggagcgcatccccaagaccatcgagatcaagtccatcacgcacgatattgaggagaaaggcgtccggatgaagctgacagtgattgacacaccagggttcggggaccacatcaacaacgagaactgctggcagcccatcatgaagttcatcaatgaccagtacgagaaatacctgcaggaggaggtcaacatcaaccgcaagaagcgcatcccggacacccgcgtccactgctgcctctacttcatccccgccaccggccactccctcaggcccctggacatcgagtttatgaaacgcctgagcaaggtggtcaacatcgtccctgtcatcgccaaggcggacacactcaccctggaggagagggtccacttcaaacagcggatcaccgcagacctgctgtccaacggcatcgacgtgtacccccagaaggaatttgatgaggactcggaggaccggctggtgaacgagaagttccgggagatgatcccatttgctgtggtgggcagtgaccacgagtaccaggtcaacggcaagaggatccttgggaggaagaccaagtggggtaccatcgaagttgaaaacaccacacactgtgagtttgcctacctgcgggaccttctcatcaggacgcacatgcagaacatcaaggacatcaccagcagcatccacttcgaggcgtaccgtgtgaagcgcctcaacgagggcagcagcgccatggccaacggcatggaggagaaggagccagaagccccggagatgtagacgccaccctgcccacccccgggatcctgcccccaagtcatttccgtccccccccaggccctcccaccaccccattttattttatatgattttctccatttgtcatcgttccccaccccttcgacatgctgccaggaaacaagggaaggggcctccctccgagtgagtcagtgatgaggccgcggcctccccgaggttgtggggaggctgcactggagccacaggcaggggtgagagcacccactgaattgacatgaccctctgtccccaggcctggctcccc

SEQ ID NO: 179993 - DNA, 554 bp, Homo sapiens
  Payload ID: 15455
  Gene Symbol: SEPT9
  Gene Name: septin 9
  ENST ID: ENST00000590825
  CDS Start-End: 450-554
agtgcctgagtgcatttggaggaagagagacggccttgaaaagatcttttgaggtcgaggaggtcgagacacccaactccaccccaccccggagggtccagactcccctactccgagccactgtggccagctccacccagaaattccaggacctgggcgtgaagaactcagaaccctcggcccgccatgtggactccctaagccaacgctcccccaaggcgtccctgcggagggtggagctctcgggccccaaggcggccgagccggtgtcccggcgcactgagctgtccattgacatctcgtccaagcaggtggagaacgccggggccatcggcccgtcccggttcgggctcaagagggccgaggtgttgggccacaagacgccagaaccggcccctcggaggacggagatcaccatcgtcaaaccccaggagtcagcccaccggaggatggagccccctgcctccaaggtccccgaggtgcccactgcccctgccaccgacgcagcccccaagagggtggagatccagatgcccaagcctgctgaggcgccc

SEQ ID NO: 179994 - DNA, 2160 bp, Homo sapiens
  Payload ID: 15455
  Gene Symbol: SEPT9
  Gene Name: septin 9
  Uniprot ID: Q9UHD8
  ENST ID: ENST00000591198
  CDS Start-End: 86-1789
accggcccaggattagcgccctgggagcgcgcgccccgctgcctcgccgccacactttcctgggagcggcggccacggaggcaccatgaagaagtcttactcagccttgaaaagatcttttgaggtcgaggaggtcgagacacccaactccaccccaccccggagggtccagactcccctactccgagccactgtggccagctccacccagaaattccaggacctgggcgtgaagaactcagaaccctcggcccgccatgtggactccctaagccaacgctcccccaaggcgtccctgcggagggtggagctctcgggccccaaggcggccgagccggtgtcccggcgcactgagctgtccattgacatctcgtccaagcaggtggagaacgccggggccatcggcccgtcccggttcgggctcaagagggccgaggtgttgggccacaagacgccagaaccggcccctcggaggacggagatcaccatcgtcaaaccccaggagtcagcccaccggaggatggagccccctgcctccaaggtccccgaggtgcccactgcccctgccaccgacgcagcccccaagagggtggagatccagatgcccaagcctgctgaggcgcccaccgcccccagcccagcccagaccttggagaattcagagcctgcccctgtgtctcagctgcagagcaggctggagcccaagccccagccccctgtggctgaggctacaccccggagccaggaggccactgaggcggctcccagctgcgttggcgacatggccgacacccccagagatgccgggctcaagcaggcgcctgcatcacggaacgagaaggccccggtggacttcggctacgtggggattgactccatcctggagcagatgcgccggaaggccatgaagcagggcttcgagttcaacatcatggtggtcgggcagagcggcttgggtaaatccaccttaatcaacaccctcttcaaatccaaaatcagccggaagtcggtgcagcccacctcagaggagcgcatccccaagaccatcgagatcaagtccatcacgcacgatattgaggagaaaggcgtccggatgaagctgacagtgattgacacaccagggttcggggaccacatcaacaacgagaactgctggcagcccatcatgaagttcatcaatgaccagtacgagaaatacctgcaggaggaggtcaacatcaaccgcaagaagcgcatcccggacacccgcgtccactgctgcctctacttcatccccgccaccggccactccctcaggcccctggacatcgagtttatgaaacgcctgagcaaggtggtcaacatcgtccctgtcatcgccaaggcggacacactcaccctggaggagagggtccacttcaaacagcggatcaccgcagacctgctgtccaacggcatcgacgtgtacccccagaaggaatttgatgaggactcggaggaccggctggtgaacgagaagttccgggagatgatcccatttgctgtggtgggcagtgaccacgagtaccaggtcaacggcaagaggatccttgggaggaagaccaagtggggtaccatcgaagttgaaaacaccacacactgtgagtttgcctacctgcgggaccttctcatcaggacgcacatgcagaacatcaaggacatcaccagcagcatccacttcgaggcgtaccgtgtgaagcgcctcaacgagggcagcagcgccatggccaacggcatggaggagaaggagccagaagccccggagatgtagacgccaccctgcccacccccgggatcctgcccccaagtcatttccgtccccccccaggccctcccaccaccccattttattttatatgattttctccatttgtcatcgttccccaccccttcgacatgctgccaggaaacaagggaaggggcctccctccgagtgagtcagtgatgaggccgcggcctccccgaggttgtggggaggctgcactggagccacaggcaggggtgagagcacccactgaattgacatgaccctctgtccccaggcctggctccccgagggctcagaagagcagcttcggtgtgcagatcatccgtctgtgtggggttctcagtgccggaggccttggggtgggggccaggcct

SEQ ID NO: 179995 - DNA, 555 bp, Homo sapiens
  Payload ID: 15455
  Gene Symbol: SEPT9
  Gene Name: septin 9
  ENST ID: ENST00000591472
  CDS Start-End: 174-555
aggctttgtggtgagagggcacagagtggaggaaggtgccgtggctagggcaggccacacgctgtgctaatggattgctgttacctgtcgcctctgtggttttgctgtcaggatcctccagcaccaggtccccaccaccagccactgaggcggctcccagctgcgttggcgacatggccgacacccccagagatgccgggctcaagcaggcgcctgcatcacggaacgagaaggccccggtggacttcggctacgtggggattgactccatcctggagcagatgcgccggaaggccatgaagcagggcttcgagttcaacatcatggtggtcgggcagagcggcttgggtaaatccaccttaatcaacaccctcttcaaatccaaaatcagccggaagtcggtgcagcccacctcagaggagcgcatccccaagaccatcgagatcaagtccatcacgcacgatattgaggagaaaggcgtccggatgaagctgacagtgattgacacaccagggttcggggaccacatcaacaacgagaactgctggcagccca

SEQ ID NO: 179996 - DNA, 553 bp, Homo sapiens
  Payload ID: 15455
  Gene Symbol: SEPT9
  Gene Name: septin 9
  ENST ID: ENST00000591934
  CDS Start-End: 100-553
atatatccgtaggaatggagagggaccggatctcagggcatggctcacgccgcgttgtcaggctgcaagccactgcgagagctgctctgatccccaagcatgctctggcctgaggaggagccatggggaggacgctgtgcctgtgtgacagaggcctgcccggcagatgccggcccgctgacttccagacgtggctccttgaaaagatcttttgaggtcgaggaggtcgagacacccaactccaccccaccccggagggtccagactcccctactccgagccactgtggccagctccacccagaaattccaggacctgggcgtgaagaactcagaaccctcggcccgccatgtggactccctaagccaacgctcccccaaggcgtccctgcggagggtggagctctcgggccccaaggcggccgagccggtgtcccggcgcactgagctgtccattgacatctcgtccaagcaggtggagaacgccggggccatcggcccgtcccggttcgggctcaagagggccgaggtgttgggccacaagacgccagaac

SEQ ID NO: 179997 - DNA, 2919 bp, Homo sapiens
  Payload ID: 15455
  Gene Symbol: SEPT9
  Gene Name: septin 9
  Uniprot ID: Q9UHD8
  ENST ID: ENST00000588690
  CDS Start-End: 478-1746
tgctgggtggccttgagcaagccacttggcagctctgggccgcagttccgtcatctgcaagccttgaaaagatcttttgaggtcgaggaggtcgagacacccaactccaccccaccccggagggtccagactcccctactccgagccactgtggccagctccacccagaaattccaggacctgggcgtgaagaactcagaaccctcggcccgccatgtggactccctaagccaacgctcccccaaggcgtccctgcggagggtggagctctcgggccccaaggcggccgagccggtgtcccggcgcactgagctgtccattgacatctcgtccaagcaggtggagaacgccggggccatcggcccgtcccggttcgggctcaagagggccgaggtgttgggccacaagacgccagaaccggcccctcggaggacggagatcaccatcgtcaaaccccaggagtcagcccaccggaggatggagccccctgcctccaaggtccccgaggtgcccactgcccctgccaccgacgcagcccccaagagggtggagatccagatgcccaagcctgctgaggcgcccaccgcccccagcccagcccagaccttggagaattcagagcctgcccctgtgtctcagctgcagagcaggctggagcccaagccccagccccctgtggctgaggctacaccccggagccaggaggccactgaggcggctcccagctgcgttggcgacatggccgacacccccagagatgccgggctcaagcaggcgcctgcatcacggaacgagaaggccccggtggacttcggctacgtggggattgactccatcctggagcagatgcgccggaaggccatgaagcagggcttcgagttcaacatcatggtggtcgggcagagcggcttgggtaaatccaccttaatcaacaccctcttcaaatccaaaatcagccggaagtcggtgcagcccacctcagaggagcgcatccccaagaccatcgagatcaagtccatcacgcacgatattgaggagaaaggcgtccggatgaagctgacagtgattgacacaccagggttcggggaccacatcaacaacgagaactgctggcagcccatcatgaagttcatcaatgaccagtacgagaaatacctgcaggaggaggtcaacatcaaccgcaagaagcgcatcccggacacccgcgtccactgctgcctctacttcatccccgccaccggccactccctcaggcccctggacatcgagtttatgaaacgcctgagcaaggtggtcaacatcgtccctgtcatcgccaaggcggacacactcaccctggaggagagggtccacttcaaacagcggatcaccgcagacctgctgtccaacggcatcgacgtgtacccccagaaggaatttgatgaggactcggaggaccggctggtgaacgagaagttccgggagatgatcccatttgctgtggtgggcagtgaccacgagtaccaggtcaacggcaagaggatccttgggaggaagaccaagtggggtaccatcgaagttgaaaacaccacacactgtgagtttgcctacctgcgggaccttctcatcaggacgcacatgcagaacatcaaggacatcaccagcagcatccacttcgaggcgtaccgtgtgaagcgcctcaacgagggcagcagcgccatggccaacggcatggaggagaaggagccagaagccccggagatgtagacgccaccctgcccacccccgggatcctgcccccaagtcatttccgtccccccccaggccctcccaccaccccattttattttatatgattttctccatttgtcatcgttccccaccccttcgacatgctgccaggaaacaagggaaggggcctccctccgagtgagtcagtgatgaggccgcggcctccccgaggttgtggggaggctgcactggagccacaggcaggggtgagagcacccactgaattgacatgaccctctgtccccaggcctggctccccgagggctcagaagagcagcttcggtgtgcagatcatccgtctgtgtggggttctcagtgccggaggccttggggtgggggccaggcctcgcacttgcagaggagcccagtgggctgcacgctcccctccatccccatcggccctgtcccctggagtgtgtcagagcccaggggagaatgcagcccaccaggagcacctggaccccctgcccgccacatggtgtggccatcactcagcccctacccctgccctgctcctaagggtagaaaactccagggtcccctgccaccgactgcccagccactccaagccccctggcagctgcccctcctggagcagaaagtgcctttatctcagccatccgcagactgcttggccagatgcggggacaggctggaatgagggaggcgtcttcatctccctgccatccccctctcacgccacccccgcccccaccgggctgcaggtgctgctgatgcgctgggatctgattgaggataaaaaggaaggagagatgacccctaccccctcatcccccagttttgaaaaggtctaagcaaacagtttactttgccaacttgccatgtttttgccaaaaccaagattttgaaggaaatgagtggccagcgccagggcccaggccatgtggcctgcccagcctcaatgtcacttggtggcggggtggggtgggggtgggcagcagcatcccagccttgagatgcttcactttccttctctgtaaccagactttgaaaaattgttcgtttcatcaggctctgttcctcaatggccttttgctacgtgcctcccgagaaatttgtctttttgtataaatgacaaagtgttgaaaatgtatttcctgaaataaatgtttcaaatgcagaaaccca

SEQ ID NO: 179998 - DNA, 238 bp, Homo sapiens
  Payload ID: 15455
  Gene Symbol: SEPT9
  Gene Name: septin 9
  ENST ID: ENST00000633557
  CDS Start-End: 208-238
aattagtcacttcttcctctgtacgttggaaacaccgctttatcgtggagactttaaggatatccaagtagagagaattcttccgtgcaagttttgcatcctctcaccactgcctgcgttacccgagttgtaaagggcggctccctgtgtctgccccgctgcaccgatacaccgagctgcgcacggtgcccagcgcagggagaacaaatgatcatctgtccaacgcgcccatttacag

SEQ ID NO: 179999 - DNA, 145 bp, Homo sapiens
  Payload ID: 15455
  Gene Symbol: SEPT9
  Gene Name: septin 9
  ENST ID: ENST00000634088
  CDS Start-End: 127-145
actccagacggcgggccgccccctcttcccgccttcctactaccggcccaggattagcgccctgggagcgcgcgccccgctgcctcgccgccacactttcctgggagcggcggccacggaggcaccatgaagaagtcttactcag

SEQ ID NO: 180000 - DNA, 248 bp, Homo sapiens
  Payload ID: 15455
  Gene Symbol: SEPT9
  Gene Name: septin 9
  ENST ID: ENST00000633211
  CDS Start-End: 100-234
cccgccttcctactaccggcccaggattagcgccctgggagcgcgcgccccgctgcctcgccgccacactttcctgggagcggcggccacggaggcaccatgaagaagtcttactcagatttgcttctggacccgtgcatttcaaatcttgcttctctccactgcgcacgtttttccggcgccaggcaccgcaggatatgttcgtgtcttgtgatttttgattctgcgcggtaggtggaattggaacg

SEQ ID NO: 180001 - DNA, 104 bp, Homo sapiens
  Payload ID: 15455
  Gene Symbol: SEPT9
  Gene Name: septin 9
  ENST ID: ENST00000632729
  CDS Start-End: 86-104
accggcccaggattagcgccctgggagcgcgcgccccgctgcctcgccgccacactttcctgggagcggcggccacggaggcaccatgaagaagtcttactcag

SEQ ID NO: 180002 - DNA, 2253 bp, Homo sapiens
  Payload ID: 15456
  Gene Symbol: SQSTM1
  Gene Name: sequestosome 1
  Uniprot ID: Q13501
  ENST ID: ENST00000360718
  CDS Start-End: 521-1591
gttagggaaggaagcaggcagatgcccttgtcttctcctttactcccaagccactagaagtctaaggcctttgtggggctgggcccctcaggagcaggtcacaggcagggatctcccacagttgaagacggacatgggcctggtcggatggggaatgaggtggcacgtttctgaaaaggcagctggcccaaggctaaataagtgcagcagccaaagctgctgcccctgtgcacaggccctccgccccctgcatgtggctgtggtccagggcccaggtcggagcactcaccttccaggaggtgccagagcaagggggtagtcttgcctctcactcctgccctctgtggctcaagtaggtgtgtttgtttatagccctgtgagtgtccctttcatacttgcctcagcccattccagcagcttatgtccagctgagaacccctgggtgctcacgtgctgtcttttaaacaatctagatgaggacggggacttggttgccttttccagtgacgaggaattgacaatggccatgtcctacgtgaaggatgacatcttccgaatctacattaaagagaaaaaagagtgccggcgggaccaccgcccaccgtgtgctcaggaggcgccccgcaacatggtgcaccccaatgtgatctgcgatggctgcaatgggcctgtggtaggaacccgctacaagtgcagcgtctgcccagactacgacttgtgtagcgtctgcgagggaaagggcttgcaccgggggcacaccaagctcgcattccccagccccttcgggcacctgtctgagggcttctcgcacagccgctggctccggaaggtgaaacacggacacttcgggtggccaggatgggaaatgggtccaccaggaaactggagcccacgtcctcctcgtgcaggggaggcccgccctggccccacggcagaatcagcttctggtccatcggaggatccgagtgtgaatttcctgaagaacgttggggagagtgtggcagctgcccttagccctctgggcattgaagttgatatcgatgtggagcacggagggaaaagaagccgcctgacccccgtctctccagagagttccagcacagaggagaagagcagctcacagccaagcagctgctgctctgaccccagcaagccgggtgggaatgttgagggcgccacgcagtctctggcggagcagatgaggaagatcgccttggagtccgaggggcgccctgaggaacagatggagtcggataactgttcaggaggagatgatgactggacccatctgtcttcaaaagaagtggacccgtctacaggtgaactccagtccctacagatgccagaatccgaagggccaagctctctggacccctcccaggagggacccacagggctgaaggaagctgccttgtacccacatctcccgccagaggctgacccgcggctgattgagtccctctcccagatgctgtccatgggcttctctgatgaaggcggctggctcaccaggctcctgcagaccaagaactatgacatcggagcggctctggacaccatccagtattcaaagcatcccccgccgttgtgaccacttttgcccacctcttctgcgtgcccctcttctgtctcatagttgtgttaagcttgcgtagaattgcaggtctctgtacgggccagtttctctgccttcttccaggatcaggggttagggtgcaagaagccatttagggcagcaaaacaagtgacatgaagggagggtccctgtgtgtgtgtgtgctgatgtttcctgggtgccctggctccttgcagcagggctgggcctgcgagacccaaggctcactgcagcgcgctcctgacccctccctgcaggggctacgttagcagcccagcacatagcttgcctaatggctttcactttctcttttgttttaaatgactcataggtccctgacatttagttgattattttctgctacagacctggtacactctgattttagataaagtaagcctaggtgttgtcagcaggcaggctggggaggccagtgttgtgggcttcctgctgggactgagaaggctcacgaagggcatccgcaatgttggtttcactgagagctgcctcctggtctcttcaccactgtagttctctcatttccaaaccatcagctgcttttaaaataagatctctttgtagccatcctgttaaatttgtaaacaatctaattaaatggcatcagcactttaaccaat

SEQ ID NO: 180003 - DNA, 2986 bp, Homo sapiens
  Payload ID: 15456
  Gene Symbol: SQSTM1
  Gene Name: sequestosome 1
  Uniprot ID: Q13501
  ENST ID: ENST00000389805
  CDS Start-End: 179-1501
agagtagtgaaggggcctctgcagggcggctctcgcgccgcgacgacggtggcgggggcggggagggcgcgagagactccgcccctctcgaggcggggcggggcctccgcgttcgctacaaaagccgcgcggcggctgcgaccgggacggcccgttttccgccagctcgccgctcgctatggcgtcgctcaccgtgaaggcctaccttctgggcaaggaggacgcggcgcgcgagattcgccgcttcagcttctgctgcagccccgagcctgaggcggaagccgaggctgcggcgggtccgggaccctgcgagcggctgctgagccgggtggccgccctgttccccgcgctgcggcctggcggcttccaggcgcactaccgcgatgaggacggggacttggttgccttttccagtgacgaggaattgacaatggccatgtcctacgtgaaggatgacatcttccgaatctacattaaagagaaaaaagagtgccggcgggaccaccgcccaccgtgtgctcaggaggcgccccgcaacatggtgcaccccaatgtgatctgcgatggctgcaatgggcctgtggtaggaacccgctacaagtgcagcgtctgcccagactacgacttgtgtagcgtctgcgagggaaagggcttgcaccgggggcacaccaagctcgcattccccagccccttcgggcacctgtctgagggcttctcgcacagccgctggctccggaaggtgaaacacggacacttcgggtggccaggatgggaaatgggtccaccaggaaactggagcccacgtcctcctcgtgcaggggaggcccgccctggccccacggcagaatcagcttctggtccatcggaggatccgagtgtgaatttcctgaagaacgttggggagagtgtggcagctgcccttagccctctgggcattgaagttgatatcgatgtggagcacggagggaaaagaagccgcctgacccccgtctctccagagagttccagcacagaggagaagagcagctcacagccaagcagctgctgctctgaccccagcaagccgggtgggaatgttgagggcgccacgcagtctctggcggagcagatgaggaagatcgccttggagtccgaggggcgccctgaggaacagatggagtcggataactgttcaggaggagatgatgactggacccatctgtcttcaaaagaagtggacccgtctacaggtgaactccagtccctacagatgccagaatccgaagggccaagctctctggacccctcccaggagggacccacagggctgaaggaagctgccttgtacccacatctcccgccagaggctgacccgcggctgattgagtccctctcccagatgctgtccatgggcttctctgatgaaggcggctggctcaccaggctcctgcagaccaagaactatgacatcggagcggctctggacaccatccagtattcaaagcatcccccgccgttgtgaccacttttgcccacctcttctgcgtgcccctcttctgtctcatagttgtgttaagcttgcgtagaattgcaggtctctgtacgggccagtttctctgccttcttccaggatcaggggttagggtgcaagaagccatttagggcagcaaaacaagtgacatgaagggagggtccctgtgtgtgtgtgtgctgatgtttcctgggtgccctggctccttgcagcagggctgggcctgcgagacccaaggctcactgcagcgcgctcctgacccctccctgcaggggctacgttagcagcccagcacatagcttgcctaatggctttcactttctcttttgttttaaatgactcataggtccctgacatttagttgattattttctgctacagacctggtacactctgattttagataaagtaagcctaggtgttgtcagcaggcaggctggggaggccagtgttgtgggcttcctgctgggactgagaaggctcacgaagggcatccgcaatgttggtttcactgagagctgcctcctggtctcttcaccactgtagttctctcatttccaaaccatcagctgcttttaaaataagatctctttgtagccatcctgttaaatttgtaaacaatctaattaaatggcatcagcactttaaccaatgacgtttgcatagagagaaatgattgacagtaagtttattgttaatggttcttacagagtatctttaaaagtgccttaggggaaccctgtccctcctaacaagtgtatctcgattaataacctgccagtcccagatcacacatcatcatcgaagtcttccccagttataaagaggtcacatagtcgtgtgggtcgaggattctgtgcctccaggaccaggggcccaccctctgcccagggagtccttgcgtcccatgaggtcttcccgcaaggcctctcagacccagatgtgacggggtgtgtggcccgaggaagctggacagcggcagtgggcctgctgaggccttctcttgaggcctgtgctctgggggtcccttgcttagcctgtgctggaccagctggcctggggtccctctgaagagaccttggctgctcactgtccacatgtgaactttttctaggtggcaggacaaattgcgcccatttagaggatgtggctgtaacctgctggatgggactccatagctccttcccaggacccctcagctccccggcactgcagtctgcagagttctcctggaggcaggggctgctgccttgtttcaccttccatgtcaggccagcctgtccctgaaagagaagatggccatgccctccatgtgtaagaacaatgccagggcccaggaggaccgcctgccctgcctgggccttggctgggcctctggttctgacactttctgctggaagctgtcaggctgggacaggctttgattttgagggttagcaagacaaagcaaataaatgccttccacctcaccgcaaa

SEQ ID NO: 180004 - DNA, 628 bp, Homo sapiens
  Payload ID: 15456
  Gene Symbol: SQSTM1
  Gene Name: sequestosome 1
  ENST ID: ENST00000422245
  CDS Start-End: 208-628
agtggacgcggggagcctgcggggtgggactgcatcgggaaaggggaaggagtcagaggcgagaagggggagagtgtctgtctggctccagccgctgcacgctcttcctgctcaggggactcacggtgaccccggagccactccccagcccagcctccagatgaggacggggacttggttgccttttccagtgacgaggaattgacaatggccatgtcctacgtgaaggatgacatcttccgaatctacattaaagagaaaaaagagtgccggcgggaccaccgcccaccgtgtgctcaggaggcgccccgcaacatggtgcaccccaatgtgatctgcgatggctgcaatgggcctgtggtaggaacccgctacaagtgcagcgtctgcccagactacgacttgtgtagcgtctgcgagggaaagggcttgcaccgggggcacaccaagctcgcattccccagccccttcgggcacctgtctgagggcttctcgcacagccgctggctccggaaggtgaaacacggacacttcgggtggccaggatgggaaatgggtccaccaggaaactggagcccacgtcctcctcgtgcaggggaggcccgccctggccccacggcagaatcag

SEQ ID NO: 180005 - DNA, 572 bp, Homo sapiens
  Payload ID: 15456
  Gene Symbol: SQSTM1
  Gene Name: sequestosome 1
  ENST ID: ENST00000453046
  CDS Start-End: 33-254
acggcccgttttccgccagctcgccgctcgctatggcgtcgctcaccgtgaaggcctaccttctgggcaaggaggacgcggcgcgcgagattcgccgcttcagcttctgctgcagccccgagcctgaggcggaagccgaggctgcggcgggtccgggaccctgcgagcggctgctgagccgggtggccgccctgttccccgcgctgcggcctggcggcttccaggcgcactaccgcggtggtgggttcagataatgccctggaggagccgggcgagcgccggcgaggggagggagtgacgcgggtaaacaagcgcgggggtgcgggggactcgcgagcgccgcgacagcgcctgggagaagggcacggatcgccggcggaacgctccgagccagatgaggacggggacttggttgccttttccagtgacgaggaattgacaatggccatgtcctacgtgaaggatgacatcttccgaatctacattaaagagaaaaaagagtgccggcgggaccaccgcccaccgtgtgctcaggaggcgccccgcaacatggtgcaccccaatgtgatctg

SEQ ID NO: 180006 - DNA, 578 bp, Homo sapiens
  Payload ID: 15456
  Gene Symbol: SQSTM1
  Gene Name: sequestosome 1
  ENST ID: ENST00000508284
  CDS Start-End: 60-269
aaaagccgcgcggcggctgcgaccgggacggcccgttttccgccagctcgccgctcgctatggcgtcgctcaccgtgaaggcctaccttctgggcaaggaggacgcggcgcgcgagattcgccgcttcagcttctgctgcagccccgagcctgaggcggaagccgaggctgcggcgggtccgggaccctgcgagcggctgctgagccgggtggccgccctgttccccgcgctgcggcctggcggcttccaggcgcactaccgcggatgacatcttccgaatctacattaaagagaaaaaagagtgccggcgggaccaccgcccaccgtgtgctcaggaggcgccccgcaacatggtgcaccccaatgtgatctgcgatggctgcaatgggcctgtggtaggaacccgctacaagtgcagcgtctgcccagactacgacttgtgtagcgtctgcgagggaaagggcttgcaccgggggcacaccaagctcgcattccccagccccttcgggcacctgtctgagggcttctcgcacagccgctggctccggaaggtgaaacacggacacttcgggtggcc

SEQ ID NO: 180007 - DNA, 1714 bp, Homo sapiens
  Payload ID: 15456
  Gene Symbol: SQSTM1
  Gene Name: sequestosome 1
  ENST ID: ENST00000510187
  CDS Start-End: 17-1153
cagctcgccgctcgctatggcgtcgctcaccgtgaaggcctaccttctgggcaaggaggacgcggcgcgcgagattcgccgcttcagcttctgctgcagccccgagcctgaggcggaagccgaggctgcggcgggtccgggaccctgcgagcggctgctgagccgggtggccgccctgttccccgcgctgcggcctggcggcttccaggcgcactaccgcgatgaggacggggacttggttgccttttccagtgacgaggaattgacaatggccatgtcctacgtgaaggatgacatcttccgaatctacattaaagagaaaaaagagtgccggcgggaccaccgcccaccgtgtgctcaggaggcgccccgcaacatggtgcaccccaatgtgatctgcgatggctgcaatgggcctgtggtaggaacccgctacaagtgcagcgtctgcccagactacgacttgtgtagcgtctgcgagggaaagggcttgcaccgggggcacaccaagctcgcattccccagccccttcgggcacctgtctgagggcttctcgcacagccgctggctccggaaggtgaaacacggacacttcgggtggccaggatgggaaatgggtccaccaggaaactggagcccacgtcctcctcgtgcaggggaggcccgccctggccccacggcagaatcagcttctggtccatcggaggatccgagtgtgaatttcctgaagaacgttggggagagtgtggcagctgcccttagccctctgggcattgaagttgatatcgatgtggagcacggagggaaaagaagccgcctgacccccgtctctccagagagttccagcacagaggagaagagcagctcacagccaagcagctgctgctctgaccccagcaagccgggtgggaatgttgagggcgccacgcagtctctggcggagcagatgaggaagatcgccttggaatgctgtccatgggcttctctgatgaaggcggctggctcaccaggctcctgcagaccaagaactatgacatcggagcggctctggacaccatccagtattcaaagcatcccccgccgttgtgaccacttttgcccacctcttctgcgtgcccctcttctgtctcatagttgtgttaagcttgcgtagaattgcaggtctctgtacgggccagtttctctgccttcttccaggatcaggggttagggtgcaagaagccatttagggcagcaaaacaagtgacatgaagggagggtccctgtgtgtgtgtgtgctgatgtttcctgggtgccctggctccttgcagcagggctgggcctgcgagacccaaggctcactgcagcgcgctcctgacccctccctgcaggggctacgttagcagcccagcacatagcttgcctaatggctttcactttctcttttgttttaaatgactcataggtccctgacatttagttgattattttctgctacagacctggtacactctgattttagataaagtaagcctaggtgttgtcagcaggcaggctggggaggccagtgttgtgggcttcctgctgggactgagaaggctcacgaagggcatccgcaatgttggtttcactgagagctgcctcctggtctcttcaccactgtagttctctcatttccaaaccatcagctgcttttaaaataagatctctttgtagccatcctgttaaatttgta

SEQ ID NO: 180008 - DNA, 602 bp, Homo sapiens
  Payload ID: 15456
  Gene Symbol: SQSTM1
  Gene Name: sequestosome 1
  ENST ID: ENST00000504627
  CDS Start-End: 33-602
acggcccgttttccgccagctcgccgctcgctatggcgtcgctcaccgtgaaggcctaccttctgggcaaggaggacgcggcgcgcgagattcgccgcttcagcttctgctgcagccccgagcctgaggcggaagccgaggctgcggcgggtccgggaccctgcgagcggctgctgagccgggtggccgccctgttccccgcgctgcggcctggcggcttccaggcgcactaccgcgcccattccagcagcttatgtccagctgagaacccctgggtgctcacgtgctgtcttttaaacaatctagatgaggacggggacttggttgccttttccagtgacgaggaattgacaatggccatgtcctacgtgaaggatgacatcttccgaatctacattaaagagaaaaaagagtgccggcgggaccaccgcccaccgtgtgctcaggaggcgccccgcaacatggtgcaccccaatgtgatctgcgatggctgcaatgggcctgtggtaggaacccgctacaagtgcagcgtctgcccagactacgacttgtgtagcgtctgcgagggaaagggcttgcaccgggggcacaccaagctcgca

SEQ ID NO: 180009 - DNA, 842 bp, Homo sapiens
  Payload ID: 15456
  Gene Symbol: SQSTM1
  Gene Name: sequestosome 1
  ENST ID: ENST00000514093
  CDS Start-End: 341-842
tccgcggccaccgccgggcccgctcccgccgccgacgcccaggtgcgccaggtgcgggccgggcgggggtcgcgctcacctttctggccgctgagtgccgcgtaccaggacagcgagaggaaggcgcacaggcagaagagcagcagcgtcaggaaggtgccattgcggagcctcatctcctcggtgtctgcgagattaatctctcatggccgctgcacaagaacctggcttttagctgaactaaggagaaagtcctacaacagtttggcgtgcaacatggggcttgagaaaggatgaggacggggacttggttgccttttccagtgacgaggaattgacaatggccatgtcctacgtgaaggatgacatcttccgaatctacattaaagagaaaaaagagtgccggcgggaccaccgcccaccgtgtgctcaggaggcgccccgcaacatggtgcaccccaatgtgatctgcgatggctgcaatgggcctgtggtaggaacccgctacaagtgcagcgtctgcccagactacgacttgtgtagcgtctgcgagggaaagggcttgcaccgggggcacaccaagctcgcattccccagccccttcgggcacctgtctgagggcttctcgcacagccgctggctccggaaggtgaaacacggacacttcgggtggccaggatgggaaatgggtccaccaggaaactggagcccacgtcctcctcgtgcaggggaggcccgccctggccccacggcagaatcagcttctggtccatcggaggatccgagtgtgaatttcctgaagaacgttggggagagtgtggcagctgcccttagccctctgg

SEQ ID NO: 180010 - DNA, 274 bp, Homo sapiens
  Payload ID: 15456
  Gene Symbol: SQSTM1
  Gene Name: sequestosome 1
  ENST ID: ENST00000626660
  CDS Start-End: 53-274
gcgcggcggctgcgaccgggacggcccgttttccgccagctcgccgctcgctatggcgtcgctcaccgtgaaggcctaccttctgggcaaggaggacgcggcgcgcgagattcgccgcttcagcttctgctgcagccccgagcctgaggcggaagccgaggctgcggcgggtccgggaccctgcgagcggctgctgagccgggtggccgccctgttccccgcgctgcggcctggcggcttccaggcgcactaccgcggtggtgggttcagataa

SEQ ID NO: 180011 - DNA, 1208 bp, Homo sapiens
  Payload ID: 15457
  Gene Symbol: SRGN
  Gene Name: serglycin
  Uniprot ID: P10124
  ENST ID: ENST00000242465
  CDS Start-End: 41-517
gaagttggcgtgcagctgggagagctagactaagttggtcatgatgcagaagctactcaaatgcagtcggcttgtcctggctcttgccctcatcctggttctggaatcctcagttcaaggttatcctacgcggagagccaggtaccaatgggtgcgctgcaatccagacagtaattctgcaaactgccttgaagaaaaaggaccaatgttcgaactacttccaggtgaatccaacaagatcccccgtctgaggactgacctttttccaaagacgagaatccaggacttgaatcgtatcttcccactttctgaggactactctggatcaggcttcggctccggctccggctctggatcaggatctgggagtggcttcctaacggaaatggaacaggattaccaactagtagacgaaagtgatgctttccatgacaaccttaggtctcttgacaggaatctgccctcagacagccaggacttgggtcaacatggattagaagaggattttatgttataaaagaggattttcccaccttgacaccaggcaatgtagttagcatattttatgtaccatggttatatgattaatcttgggacaaagaattttatagaaatttttaaacatctgaaaaagaagcttaagttttatcatccttttttttctcatgaattcttaaaggattatgctttaatgctgttatctattttattgttcttgaaaatacctgcattttttggtatcatgttcaaccaacatcattatgaaattaattagattcccatggccataaaatggctttaaagaatatatatatatttttaaagtagcttgagaagcaaattggcaggtaatatttcatacctaaattaagactctgacttggattgtgaattataatgatatgccccttttcttataaaaacaaaaaaaaaaataatgaaacacagtgaatttgtagagtgggggtatttgacatattttacagggtggagtgtactatatactattacctttgaatgtgtttgcagagctagtggatgtgtttgtctacaagtatgattgctgttacataacaccccaaattaactcccaaattaaaacacagttgtgctgtcaatacctcatactgctttacctttttttcctggatatctgtgtattttcaaatgttactatatattaaagcagaaatataaccaaaggttaa

SEQ ID NO: 180012 - DNA, 1907 bp, Homo sapiens
  Payload ID: 15458
  Gene Symbol: SERAC1
  Gene Name: serine active site containing 1
  Uniprot ID: Q96JX3
  ENST ID: ENST00000367101
  CDS Start-End: 122-1717
gtcacgagccgccagccgccgggtggagggtcccggccgggagccgcggaaagagtagggctccccagacaacggggtccgacgagcagttgggcacgggctgagtccgcctgccggcagaatgtccctggctgcttattgcgtcatctgttgcagaagaataggaacctctacttccccaccaaaaagtggcacacactggagagatatcagaaatataataaagtttactggatcacttattttaggaggttctttatttcttacatatgaagttctggccctgaagaaggctgtgacattagatactcaagtggtagaacgagaaaaaatgaagtcatatatatatgtgcacacagtttctttagacaaaggagaaaatcatggtattgcctggcaggcaagaaaagaacttcacaaagcagtaagaaaagtattggcaacatcagccaagatactgcggaatccatttgctgatccttttagtacagttgatatagaagatcatgagtgtgctgtgtggctgctcctacggaagagcaagtcagatgacaaaaccacgcgactcgaggctgtgcgggaaatgtcggagacccatcactggcatgattaccagtataggataattgctcaagcctgtgatccgaaaactcttattggtttggcacgaagcgaagagagtgatcttcgcttttttctcctaccacctcctttgccatctttaaaagaagattcttccactgaagaagagctcagacagttgctggcttccttacctcaaacagagctagatgagtgtatccagtattttacatctttggctcttagtgaaagcagtcagagtctagctgctcagaagggtggtttatggtgttttggaggaaatggacttccttatgctgaaagttttggagaagttccttcagcaacagtggaaatgttctgtttagaagctatagtaaaacattctgagatatccacacattgtgataaaatcgaagcaaatggaggcctgcagctacttcagaggctgtaccgacttcacaaggactgccctaaagtacagagaaatataatgcgtgtcattggaaatatggctttgaatgaacatcttcattcttctatagttcgctcaggctgggtttccatcatggcagaagcaatgaaatctccccacattatggagtcctcacacgctgccagaatcctggcaaatctagaccgagaaactgtgcaagaaaaatatcaggatggcgtatatgtgctgcatccccaatatcgaacaagtcagcccattaaagcagatgtcctttttattcatggccttatgggagcagcattcaaaacatggcgccagcaggacagtgagcaggctgtaattgaaaaacctatggaggatgaagacagatatacgacgtgctggcccaagacatggttagcaaaagactgtcctgctctccgaattatatctgtggagtatgacaccagcctcagcgactggagagcaaggtgccctatggaaagaaggagtttgctgtcaataagcagtggaatagtagaaggcttagaaagtccattgcattcagaagcaacgaacttcttaggaagctcagagctgctggtgttggggataggccagtggtttggatatcacatagcatgggaggtcttcttgtcaaaaagatgctgttggaagcctctacgaagccagaaatgagtactgttatcaacaataccagaggaataattttttatagtgtccctcatcatggatcacgtttggctgaatactctgttaatattcgctatcttctcttcccctcgttggaagtcaaagaactcagcaagggtaatactttttgtcataaaggaaattggggttatattaacatcagttacacagagaa

SEQ ID NO: 180013 - DNA, 3948 bp, Homo sapiens
  Payload ID: 15458
  Gene Symbol: SERAC1
  Gene Name: serine active site containing 1
  Uniprot ID: Q96JX3
  ENST ID: ENST00000367104
  CDS Start-End: 133-2097
gagggggcggggtcacgagccgccagccgccgggtggagggtcccggccgggagccgcggaaagagtagggctccccagacaacggggtccgacgagcagttgggcacgggctgagtccgcctgccggcagaatgtccctggctgcttattgcgtcatctgttgcagaagaataggaacctctacttccccaccaaaaagtggcacacactggagagatatcagaaatataataaagtttactggatcacttattttaggaggttctttatttcttacatatgaagttctggccctgaagaaggctgtgacattagatactcaagtggtagaacgagaaaaaatgaagtcatatatatatgtgcacacagtttctttagacaaaggagaaaatcatggtattgcctggcaggcaagaaaagaacttcacaaagcagtaagaaaagtattggcaacatcagccaagatactgcggaatccatttgctgatccttttagtacagttgatatagaagatcatgagtgtgctgtgtggctgctcctacggaagagcaagtcagatgacaaaaccacgcgactcgaggctgtgcgggaaatgtcggagacccatcactggcatgattaccagtataggataattgctcaagcctgtgatccgaaaactcttattggtttggcacgaagcgaagagagtgatcttcgcttttttctcctaccacctcctttgccatctttaaaagaagattcttccactgaagaagagctcagacagttgctggcttccttacctcaaacagagctagatgagtgtatccagtattttacatctttggctcttagtgaaagcagtcagagtctagctgctcagaagggtggtttatggtgttttggaggaaatggacttccttatgctgaaagttttggagaagttccttcagcaacagtggaaatgttctgtttagaagctatagtaaaacattctgagatatccacacattgtgataaaatcgaagcaaatggaggcctgcagctacttcagaggctgtaccgacttcacaaggactgccctaaagtacagagaaatataatgcgtgtcattggaaatatggctttgaatgaacatcttcattcttctatagttcgctcaggctgggtttccatcatggcagaagcaatgaaatctccccacattatggagtcctcacacgctgccagaatcctggcaaatctagaccgagaaactgtgcaagaaaaatatcaggatggcgtatatgtgctgcatccccaatatcgaacaagtcagcccattaaagcagatgtcctttttattcatggccttatgggagcagcattcaaaacatggcgccagcaggacagtgagcaggctgtaattgaaaaacctatggaggatgaagacagatatacgacgtgctggcccaagacatggttagcaaaagactgtcctgctctccgaattatatctgtggagtatgacaccagcctcagcgactggagagcaaggtgccctatggaaagaaagtccattgcattcagaagcaacgaacttcttaggaagctcagagctgctggtgttggggataggccagtggtttggatatcacatagcatgggaggtcttcttgtcaaaaagatgctgttggaagcctctacgaagccagaaatgagtactgttatcaacaataccagaggaataattttttatagtgtccctcatcatggatcacgtttggctgaatactctgttaatattcgctatcttctcttcccctcgttggaagtcaaagaactcagcaaggattctcctgcacttaaaacactacaagatgactttctggagtttgctaaagacaaaaacttccaggtgctgaattttgtggaaacactaccaacctacattggcagcatgattaagctccatgtggtacctgtggaatcagcagatttaggcattggagatctaattcctgtggatgttaaccatttgaacatttgtaagccaaagaaaaaggatgcttttttgtaccagcgtactttacaattcattcgtgaagctttagccaaagaccttgaaaactaacagttgtgctcttccagttttcatatgtgaattcagtgcaagaaacttggtgttctgtttcttcttttaagctctatgcaatcatgcaaacatagtgatcatagcgtcaacatggtctggagtgtgttgcagactacagaacattgttctcccttcaagcgctgtaaagcaccaacccggaagtggcaggcacagaaggaagggctggattgggcccctttggtgtaaagaagtccctgtgtgctgctttatggttcgcagtgttgggcttggtgactggagcaaagctgctgtgagagagtgtcctttcccatctgtgactttcctggtgcatccaggaggggcacggcaggttctgaggtaactcaacttaccataaaaatgccattaagagagtacctaaaatggagagaagaatgaactagaacattcaagactcttttacttctgggtattgatttgctgtacatttttaaagtttgagtttttagctcagttctaccttttatctgacacattattactagtgttaactttgttagacttattgtcatgtctgggtcagttccttgtatctattttcgtattcctgagaacaaatctttttcttagaaaaattctagcttataataattcttttcagactgtagctgcctatgcttggaatttgtcctagataaggataaagtagctaatccattattgatcacagtatgaagtaaaactattctaagccattatatgaattagcaattcttagtatcaagattctcagattctctttggctaaataaacctttcttcttccttgctcatttgcaagtggtattaattgacctctatagcatgtgagtagtagataatcatgtcgatgacctttttttctttagagtaacagcattattgagatataatttacataccataagattcacccttttaaattatacaattcatttttgttttgttttgtttgtttagagacagggtctgactctgttgcccaagctggagtgcagtggcatgatcatagctcattgtaacctcaaactcctgggctcaagagatccttttgcttcagcctcccaagcagctaggactacaggcacatgccaccacacttgggtaattaaaaaataaataaatacttttttgtagagacagggtctcactgtgttgcccaggtctcaaactcccgatctcaagccaccctcccaaaatgctgtgattataggccagagccattgttcccaggctcaattcattggtttttagtatagttcactgagttgtgcaacatcattgctatttaatttcaggctatttcatcatccccaaaagaaccccatacccatgagcagtcagttcccacctctgctttcccaagcctgcggtaaacactaatctgttttctgtctctatggatttgggaattttatgtaaatggaatcatacaatatgtggccctctctgccttcttccttctattagcatgttttcaaggttcattcatgatatagcatgtatcagtactacttcatttctttttatggccgaaattactccattgtatgatatgccatgtttctttatccattcatcagctgatggacatctaggttctgttcatttttgtctatgataaataatgctaccatgatcatttgtgtacaaatttatgtgtggatagatgtttttgattctcttgggtggaattgctggtcaaatggtaagtctatgtttaaattttgaagatggtgaacttttgtagaatgagatagtcgaagctaaaactggagtatggcatctgaaggtaaatggctcatcaataaactcgatatcaacaattaa

SEQ ID NO: 180014 - DNA, 507 bp, Homo sapiens
  Payload ID: 15458
  Gene Symbol: SERAC1
  Gene Name: serine active site containing 1
  ENST ID: ENST00000435180
  CDS Start-End: 1-489
gatgaagacagatatacgacgtgctggcccaagacatggttagcaaaagactgtcctgctctccgaattatatctgtggagtatgacaccagcctcagcgactggagagcaaggtgccctatggaaagaaagtccattgcattcagaagcaacgaacttcttaggaagctcagagctgctggtgttggggataggccagtggtttggatatcacatagcatgggaggtcttcttgtcaaaaagatgctgttggaagcctctacgaagccagaaatgagtactgttatcaacaataccagaggaataattttttatagtgtccctcatcatggatcacgtttggctgaatactctgttaatattcgctatcttctcttcccctcgttggaagtcaaagaactcagcaagggtaatactttttgtcataaaggaaattggggttatattaacatcagttacacagagaagaagaaaaagtttcttccttgaatgtattatctcatttta

SEQ ID NO: 180015 - DNA, 5155 bp, Homo sapiens
  Payload ID: 15458
  Gene Symbol: SERAC1
  Gene Name: serine active site containing 1
  ENST ID: ENST00000607742
  CDS Start-End: 109-237
agccgccgggtggagggtcccggccgggagccgcggaaagagtagggctccccagacaacggggtccgacgagcagttgggcacgggctgagtccgcctgccggcagaatgtccctggctgcttattgcgtcatctgttgcagaagaataggaacctctacttccccaccaaaaagtggcacacactggagagatatcaaggttctttatttcttacatatgaagttctggccctgaagaaggctgtgacattagatactcaagtggtagaacgagaaaaaatgaagtcatatatatatgtgcacacagtttctttagacaaaggagaaaatcatggtattgcctggcaggcaagaaaagaacttcacaaagcagtaagaaaagtattggcaacatcagccaagatactgcggaatccatttgctgatccttttagtacagttgatatagaagatcatgagtgtgctgtgtggctgctcctacggaagagcaagtcagatgacaaaaccacgcgactcgaggctgtgcgggaaatgtcggagacccatcactggcatgattaccagtataggataattgctcaagcctgtgatccgaaaactcttattggtttggcacgaagcgaagagagtgatcttcgcttttttctcctaccacctcctttgccatctttaaaagaagattcttccactgaagaagagctcagacagttgctggcttccttacctcaaacagagctagatgagtgtatccagtattttacatctttggctcttagtgaaagcagtcagagtctagctgctcagaagggtggtttatggtgttttggaggaaatggacttccttatgctgaaagttttggagaagttccttcagcaacagtggaaatgttctgtttagaagctatagtaaaacattctgagatatccacacattgtgataaaatcgaagcaaatggaggcctgcagctacttcagaggctgtaccgacttcacaaggactgccctaaagtacagagaaatataatgcgtgtcattggaaatatggctttgaatgaacatcttcattcttctatagttcgctcaggctgggtttccatcatggcagaagcaatgaaatctccccacattatggagtcctcacacgctgccagaatcctggcaaatctagaccgagaaactgtgcaagaaaaatatcaggatggcgtatatgtgctgcatccccaatatcgaacaagtcagcccattaaagcagatgtcctttttattcatggccttatgggagcagcattcaaaacatggcgccagcaggacagtgagcaggctgtaattgaaaaacctatggaggatgaagacagatatacgacgtgctggcccaagacatggttagcaaaagactgtcctgctctccgaattatatctgtggagtatgacaccagcctcagcgactggagagcaaggtgccctatggaaaggtaacagaggcgactttagaccaggaggacagggaagaattcaggccgcaagtttaggtcctcttggatgggaagtgattttaattttttgatgccacagacaggattttcttatgaagaacaaacctaatcttttttgtcttccttctagaaggagtttgctgtcaataagcagtggaatagtagaaggcttaggtatatcaccaatggtgggctcctaacatggtttatttacaactgttctaatagtgaaggatcgtggattgtctagcagtctccttttctatcagaagtaaaagtgatgtttttttgttcttgtgtccacaatcatactggctaaaggaagcaaagagaaagatgctgagaaatatcagctgctatttcccttgtatgtcatctgtgccagttgtatacatgggaaggagtgctggatttcagagttactggactgagagtagccggatcctacctttgatttgctgtgcagtcttagaccagtcagttaacttttccgggaagctttgtctacagattgacagagttggtctaaatcagtgttatcaaactgctttctgaatgaacctcccgtaggtgcccaagaagggtgtcaaggtgagcaggcaagaccccaggtctccctccccatttcacccagaggagctctggagaacctttattttgaagaaatgtgtctacaaataaacagtttgaaactaccagactagatagttttgaagttcctctttagtttaaaaattacttatttcgaattctgattctattagcatcctgtttatgctagttataaaagcatgcattggaaggaataagtgctaataaacttgactcattctagtttttctaaatagcaccctagtatttctaaagaataaaccaaaattatgaaagcttaatatttttgcagcctaactaccagtagagagaccacagtctttggtgatactttcattgtcaggccttggatgaaaaaggacatccatatcctaagtgttggagggcagttgcagggagacccacatttgacccgaaaaaattgcctgacacaggtgctccaacaatgttcatgcagtaaatgaatggcctgttctgggcttagatattcctaattaggccaatgttaataagttacaaatagagaattaacgatttcaggaattgagcagagagatcccaggcgtggtggctcatgcctataatcctagtgctttgggaggccgaggtgggaggattccttggggccaggagttcaataagagagaataggggtattttatattaagcagagagaatgggggtatttcttactctaaatgtagtatgtagcattggtcctgtagactaaagttcttaactctaaaaattagacagcaaattgaggggatcgatagccttgtgtcatgcctgctgtttttgttttgttcagaaagtccattgcattcagaagcaacgaacttcttaggaagctcagagctgctggtgttggggataggccagtggtttggatatcacatagcatgggaggtcttcttgtcaaaaagatgctgttggaagcctctacgaagccagaaatgagtactgttatcaacaataccagaggaataattttttatagtgtccctcatcatggatcacgtttggctgaatactctgttaatattcgctatcttctcttcccctcgttggaagtcaaagaactcagcaaggattctcctgcacttaaaacactacaagatgactttctggagtttgctaaagacaaaaacttccaggtgctgaattttgtggaaacactaccaacctacattggcagcatgattaagctccatgtggtacctgtggaatcagcagatttaggcattggagatctaattcctgtggatgttaaccatttgaacatttgtaagccaaagaaaaaggatgcttttttgtaccagcgtactttacaattcattcgtgaagctttagccaaagaccttgaaaactaacagttgtgctcttccagttttcatatgtgaattcagtgcaagaaacttggtgttctgtttcttcttttaagctctatgcaatcatgcaaacatagtgatcatagcgtcaacatggtctggagtgtgttgcagactacagaacattgttctcccttcaagcgctgtaaagcaccaacccggaagtggcaggcacagaaggaagggctggattgggcccctttggtgtaaagaagtccctgtgtgctgctttatggttcgcagtgttgggcttggtgactggagcaaagctgctgtgagagagtgtcctttcccatctgtgactttcctggtgcatccaggaggggcacggcaggttctgaggtaactcaacttaccataaaaatgccattaagagagtacctaaaatggagagaagaatgaactagaacattcaagactcttttacttctgggtattgatttgctgtacatttttaaagtttgagtttttagctcagttctaccttttatctgacacattattactagtgttaactttgttagacttattgtcatgtctgggtcagttccttgtatctattttcgtattcctgagaacaaatctttttcttagaaaaattctagcttataataattcttttcagactgtagctgcctatgcttggaatttgtcctagataaggataaagtagctaatccattattgatcacagtatgaagtaaaactattctaagccattatatgaattagcaattcttagtatcaagattctcagattctctttggctaaataaacctttcttcttccttgctcatttgcaagtggtattaattgacctctatagcatgtgagtagtagataatcatgtcgatgacctttttttctttagagtaacagcattattgagatataatttacataccataagattcacccttttaaattatacaattcatttttgttttgttttgtttgtttagagacagggtctgactctgttgcccaagctggagtgcagtggcatgatcatagctcattgtaacctcaaactcctgggctcaagagatccttttgcttcagcctcccaagcagctaggactacaggcacatgccaccacacttgggtaattaaaaaataaataaatacttttttgtagagacagggtctcactgtgttgcccaggtctcaaactcccgatctcaagccaccctcccaaaatgctgtgattataggccagagccattgttcccaggctcaattcattggtttttagtatagttcactgagttgtgcaacatcattgctatttaatttcaggctatttcatcatccccaaaagaaccccatacccatgagcagtcagttcccacctctgctttcccaagcctgcggtaaacactaatctgttttctgtctctatggatttgggaattttatgtaaatggaatcatacaatatgtggccctctctgccttcttccttctattagcatgttttcaaggttcattcatgatatagcatgtatcagtactacttcatttctttttatggccgaaattactccattgtatgatatgccatgtttctttatccattcatcagctgatggacatctaggttctgttcatttttgtctatgataaataatgctaccatgatcatttgtgtacaaa

SEQ ID NO: 180016 - DNA, 2284 bp, Homo sapiens
  Payload ID: 15458
  Gene Symbol: SERAC1
  Gene Name: serine active site containing 1
  Uniprot ID: Q96JX3
  ENST ID: ENST00000607000
  CDS Start-End: 936-1439
ctcctgagctcacgtgatctgcccacctcagcctcccaatgtgctgggattataataatttctagtgttaaatgcatttgtgaaagaacaagaaatgctcatcttaggcattattgaagaagttaggaaaaggacaggatgcacccaaagaaagaaagaagaaaataataaaaagcagaaatagaaaacaaaacaaaagagagaggtaccttcaaggtaccttccttcctttcccttatagcaaaaggaaaaagaaaaaaaaacctcactatccaaagacaacctgatatgggtctagaatactgagttgtgttctgggaatgattgcagcatatgatcatctttactcagttgatgaattaggtggatgacagctctcctttgatagaatgccaacaatgaacaaatttcaaaaattttaaacaacgtgggtactatcctgaaagaactagagaaaagctaaatgcttctatggattctaagtgtaccgtccacatagagcttctcatttctgtggggacttcagtcatcagagataaatacatatatacatatattttcaaagacattaaatttttttcatgcctatattggtattctgattaatagtctgtctattcttgttaccgtttaattcttgtgttctgggaatgattgtatcatatttagatcatctttccaattgtgaaaactatgcacaattggacacagtgtgaggaagaataatgaaaattctaacaaaatattattctaataagtcccttttaagtttttaatggagaattttttttttaattggaaagttttcttcgtagtcttgaaaaagctaactctgtgggtcatccactgtgatggtaacatgttcttgtagttaaaacaagtgttttgatttagatgctaaattaaatttgttgtaattgttctacttacacagaatgtccctggctgcttattgcgtcatctgttgcagaagaataggaacctctacttccccaccaaaaagtggcacacactggagagatatcagaaatataataaagtttactggatcacttattttaggaggttctttatttcttacatatgaagttctggccctgaagaaggctgtgacattagatactcaagtggtagaacgagaaaaaatgaagtcatatatatatgtgcacacagtttctttagacaaaggagaaaatcatggtattgcctggcaggcaagaaaagaacttcacaaagcagtaagaaaagtattggcaacatcagccaagatactgcggaatccatttgctgatccttttagtacagttgatatagaagatcatgagtgtgctgtgtggctgctcctacggaagagcaagtcagatgacaaaaccacgcgactcgaggctgtgcgggaaatgtcggagacccatcactggcatggtaatgagactacctgaacaggtggcatgccttcagctggctcttgattgctgacataaaagacaagggagtggccaggtgcggtggctcacgcctgtaatcccagcactttgggaggccacgctggttggatcacaaggtcaggagttcaagacccaccctggctaacatggtgaaaccccgtctctactaaaaatacaaaaaaattagccaggcatggtggcgggcgtctgtagtcccagctactcgagaggctgaagcaggagaatggcgtgaacccaggaggcagagcttgcagtgagccgagattgcgccactgcactccagcctgggcaacagagcgagactccatctcaaaaaaaaaaaaaaaaaaaaaaaaaaaagacaagggagtgggagtgagattcaggaaggaaaataattcaggcagtgttagtatatatagaaagtatttgaaaaattttaagaagcttcagtgatacggaaagtagaaagcctgctgaactggtagtcaaatgtgtttggtaagaataagctcaaaaatgaggtatatatatttgtgtaactttctaccagaacaaagttttatttggttacatacttctttgagagcaactcttgattctgatagttacctaatgtacttgagttttcttttggtttctatttaatgaagtacatttaattgcttgctacaccatacaattatgtttgcttttacttttacaatctacttggctctaatactaatagtcgaatgtacccaatttgtatttgtgtatatcatttttaatggactatttgaaatatgtaattgtgtttaaaaatcacaaattttacaataaaaatatttttaaaagaa

SEQ ID NO: 180017 - DNA, 1826 bp, Homo sapiens
  Payload ID: 15458
  Gene Symbol: SERAC1
  Gene Name: serine active site containing 1
  ENST ID: ENST00000606965
  CDS Start-End: 34-1263
gttgggcacgggctgagtccgcctgccggcagaatgtccctggctgcttattgcgtcatctgttgcagaagaataggaacctctacttccccaccaaaaagtggcacacactggagagatatcagaaatataataaagtttactggatcacttattttaggaggttctttatttcttacatatgaagttctggccctgaagaaggctgtgacattagatactcaagtggtagaacgagaaaaaatgaagtcatatatatatgtgcacacagtttctttagacaaaggagaaaatcatggtattgcctggcaggcaagaaaagaacttcacaaagcagtaagaaaagtattggcaacatcagccaagatactgcggaatccatttgctgatccttttagtacagttgatatagaagatcatgagtgtgctgtgtggctgctcctacggaagagcaagtcagatgacaaaaccacgcgactcgaggctgtgcgggaaatgtcggagacccatcactggcatgattaccagtataggataattgctcaagcctgtgatccgaaaactcttattggtttggcacgaagcgaagagagtgatcttcgcttttttctcctaccacctcctttgccatctttaaaagaagattcttccactgaagaagagctcagacagttgctggcttccttacctcaaacagagctagatgagtgtatccagtattttacatctttggctcttagtgaaagcagtcagagtctagctgctcagaagatatccacacattgtgataaaatcgaagcaaatggaggcctgcagctacttcagaggctgtaccgacttcacaaggactgccctaaagtacagagaaatataatgcgtgtcattggaaatatggctttgaatgaacatcttcattcttctatagttcgctcaggctgggtttccatcatggcagaagcaatgaaatctccccacattatggagtcctcacacgctgccagaatcctggcaaatctagaccgagaaactgtgcaagaaaaatatcaggatggcgtatatgtgctgcatccccaatatcgaacaagtcagcccattaaagcagatgtcctttttattcatggccttatgggagcagcattcaaaacatggcgccagcaggacagtgagcaggctgtaattgaaaaacctatggaggatgaagacagatatacgacgtgctggcccaagaaagtccattgcattcagaagcaacgaacttcttaggaagctcagagctgctggtgttggggataggccagtggtttggatatcacatagcatgggaggtcttcttgtcaaaaagatgctgttggaagcctctacgaagccagaaatgagtactgttatcaacaataccagaggaataattttttatagtgtccctcatcatggatcacgtttggctgaatactctgttaatattcgctatcttctcttcccctcgttggaagtcaaagaactcagcaagggtaatactttttgtcataaaggaaattggggttatattaacatcagttacacagagaagaagaaaaagtttcttccttgaatgtattatctcattttataatttgtatataattgtgtttagactattcatggaaattttgggttgggcttgatttttctttgataatttctcattttgttcttaagccattatttactcaagcattgtaataattttaatattatcttaaatacttaaaattagaaaaataatcagataatgttttgcttttaagtattattccaaattaccaataaatggcttttttcccccatga

SEQ ID NO: 180018 - DNA, 4035 bp, Homo sapiens
  Payload ID: 15458
  Gene Symbol: SERAC1
  Gene Name: serine active site containing 1
  ENST ID: ENST00000607071
  CDS Start-End: 1269-1397
aacagtttccagataaagacctaaatgtgaatggcacagctgcaaggaatggtaagaagacagacacagagacaactgccttgaaagaagagcttattatgtacagttcccaaggaagagtgggcgtgccacaccatgcaaggccacatggggaagtaccagggtcattcaggaggcataaggagcaatgtgaaagcatgggccagagctttcttttattgtgtttttttgtgggaaggaatgaacgttttttttgtgggaaggaatgagcgagacagggtagacgagctgaacaaacttaggattggatagttcgaataatttggcagaccagagaggtggtctctagctgcctagtacctggctctgaggagatttagagtaagggaagcattggctgtgtgtggtggttgggggtatgcacctgggattggttggtttgcatatgagaagcatgctcacaggcaggttgtttgctacctctagcagttagctatcccagagaggggcagtcactccctgggtccttaaggtcctaagatgtcaaagcattcttaaaaaaaaaaaaaaaattactaatacaagttgtttgtggaattggatttgaaaccaggcagtgtggtcctacagagcacattcttaaacttctttgctattattttgcctacaaagaaacaacagttagacttagatttctcctgagcaacaagaaatatcagtgaaaataccattaatgtaccaaaggaaacctactgttattctaaattctaaacccagaattccaaacccagctattactatttttttttttttttctgagacagagtcttactctgtctcccaggctaaagtgtagtgcgtgatcatggctcactgaaacctctgtctcccaggctcaagcaattcctctgcctcagcctcccgagtagctgggaatacaggcacatgccaacaggcccagctaattttttaaatttttttggagagatgaagtctcactggtcttgaactcctgggctggcctagagctcctgggctcaagcagtctgcccaccttggcctccaagtgctgggattgcaggcatgagtcaccacgcctggcccaaacacaactattttttagtatatctaaaatagagcatttttagacatgctgagagtgagagtgctaactacatatatgccttcatgaaggaactatcaaaggatataccttcatcaagaatgatttgaacctaggaggaagttgtggatgcaagaaacaaaaaatgtccctggctgcttattgcgtcatctgttgcagaagaataggaacctctacttccccaccaaaaagtggcacacactggagagatatcaaggttctttatttcttacatatgaagttctggccctgaagaaggctgtgacattagatactcaagtggtagaacgagaaaaaatgaagtcatatatatatgtgcacacagtttctttagacaaaggagaaaatcatggtattgcctggcaggcaagaaaagaacttcacaaagcagtaagaaaagtattggcaacatcagccaagatactgcggaatccatttgctgatccttttagtacagttgatatagaagatcatgagtgtgctgtgtggctgctcctacggaagagcaagtcagatgacaaaaccacgcgactcgaggctgtgcgggaaatgtcggagacccatcactggcatgggctccattccagacttattgtatcagagaaatcagaggaagtgccctggcccacagattttggaaaagttccccacttgatccagaagtactcacccagattaccagtataggataattgctcaagcctgtgatccgaaaactcttattggtttggcacgaagcgaagagagtgatcttcgcttttttctcctaccacctcctttgccatctttaaaagaagattcttccactgaagaagagctcagacagttgctggcttccttacctcaaacagagctagatgagtgtatccagtattttacatctttggctcttagtgaaagcagtcagagtctagctgctcagaagggtggtttatggtgttttggaggaaatggacttccttatgctgaaagttttggagaagttccttcagcaacagtggaaatgttctgtttagaagctatagtaaaacattctgagatatccacacattgtgataaaatcgaagcaaatggaggcctgcagctacttcagaggctgtaccgacttcacaaggactgccctaaagtacagagaaatataatgcgtgtcattggaaatatggctttgaatgaacatcttcattcttctatagttcgctcaggctgggtttccatcatggcagaagcaatgaaatctccccacattatggagtcctcacacgctgccagaatcctggcaaatctagaccgagaaactgtgcaagaaaaatatcaggatggcgtatatgtgctgcatccccaatatcgaacaagtcagcccattaaagcagatgtcctttttattcatggccttatgggagcagcattcaaaacatggcgccagcaggacagtgagcaggctgtaattgaaaaacctatggaggatgaagacagatatacgacgtgctggcccaagacatggttagcaaaagactgtcctgctctccgaattatatctgtggagtatgacaccagcctcagcgactggagagcaaggtgccctatggaaagaaagtccattgcattcagaagcaacgaacttcttaggaagctcagagctgctggtgttggggataggccagtggtttggatatcacatagcatgggaggtcttcttgtcaaaaagatgctgttggaagcctctacgaagccagaaatgagtactgttatcaacaataccagaggaataattttttatagtgtccctcatcatggatcacgtttggctgaatactctgttaatattcgctatcttctcttcccctcgttggaagtcaaagaactcagcaaggattctcctgcacttaaaacactacaagatgactttctggagtttgctaaagacaaaaacttccaggtgctgaattttgtggaaacactaccaacctacattggcagcatgattaagctccatgtggtacctgtggaatcagcagatttaggcattggagatctaattcctgtggatgttaaccatttgaacatttgtaagccaaagaaaaaggatgcttttttgtaccagcgtactttacaattcattcgtgaagctttagccaaagaccttgaaaactaacagttgtgctcttccagttttcatatgtgaattcagtgcaagaaacttggtgttctgtttcttcttttaagctctatgcaatcatgcaaacatagtgatcatagcgtcaacatggtctggagtgtgttgcagactacagaacattgttctcccttcaagcgctgtaaagcaccaacccggaagtggcaggcacagaaggaagggctggattgggcccctttggtgtaaagaagtccctgtgtgctgctttatggttcgcagtgttgggcttggtgactggagcaaagctgctgtgagagagtgtcctttcccatctgtgactttcctggtgcatccaggaggggcacggcaggttctgaggtaactcaacttaccataaaaatgccattaagagagtacctaaaatggagagaagaatgaactagaacattcaagactcttttacttctgggtattgatttgctgtacatttttaaagtttgagtttttagctcagttctaccttttatctgacacattattactagtgttaactttgttagacttattgtcatgtctgggtcagttccttgtatctattttcgtattcctgagaacaaatctttttcttagaaaaattctagcttataataattcttttcagactgtagctgcctatgcttggaatttgtcctagataaggataaagtagctaatccattattgatcacagtatgaagtaaaactattctaagccatt

SEQ ID NO: 180019 - DNA, 1942 bp, Homo sapiens
  Payload ID: 15459
  Gene Symbol: SCPEP1
  Gene Name: serine carboxypeptidase 1
  Uniprot ID: Q9HB40
  ENST ID: ENST00000262288
  CDS Start-End: 56-1414
acgtgatggggcgccgggtccagcctgttgctgatgctgccgtgcggtacttgtcatggagctggcactgcggcgctctcccgtcccgcggtggttgctgctgctgccgctgctgctgggcctgaacgcaggagctgtcattgactggcccacagaggagggcaaggaagtatgggattatgtgacggtccgcaaggatgcctacatgttctggtggctctattatgccaccaactcctgcaagaacttctcagaactgcccctggtcatgtggcttcagggcggtccaggcggttctagcactggatttggaaactttgaggaaattgggccccttgacagtgatctcaaaccacggaaaaccacctggctccaggctgccagtctcctatttgtggataatcccgtgggcactgggttcagttatgtgaatggtagtggtgcctatgccaaggacctggctatggtggcttcagacatgatggttctcctgaagaccttcttcagttgccacaaagaattccagacagttccattctacattttctcagagtcctatggaggaaaaatggcagctggcattggtctagagctttataaggccattcagcgagggaccatcaagtgcaactttgcgggggttgccttgggtgattcctggatctcccctgttgattcggtgctctcctggggaccttacctgtacagcatgtctcttctcgaagacaaaggtctggcagaggtgtctaaggttgcagagcaagtactgaatgccgtaaataaggggctctacagagaggccacagagctgtgggggaaagcagaaatgatcattgaacagaacacagatggggtgaacttctataacatcttaactaaaagcactcccacgtctacaatggagtcgagtctagaattcacacagagccacctagtttgtctttgtcagcgccacgtgagacacctacaacgagatgccttaagccagctcatgaatggccccatcagaaagaagctcaaaattattcctgaggatcaatcctggggaggccaggctaccaacgtctttgtgaacatggaggaggacttcatgaagccagtcattagcattgtggacgagttgctggaggcagggatcaacgtgacggtgtataatggacagctggatctcatcgtagataccatgggtcaggaggcctgggtgcggaaactgaagtggccagaactgcctaaattcagtcagctgaagtggaaggccctgtacagtgaccctaaatctttggaaacatctgcttttgtcaagtcctacaagaaccttgctttctactggattctgaaagctggtcatatggttccttctgaccaaggggacatggctctgaagatgatgagactggtgactcagcaagaataggatggatggggctggagatgagctggtttggccttggggcacagagctgagctgaggccgctgaagctgtaggaagcgccattcttccctgtatctaactggggctgtgatcaagaaggttctgaccagcttctgcagaggataaaatcattgtctctggaggcaatttggaaattatttctgcttcttaaaaaaacctaagattttttaaaaaattgatttgttttgatcaaaataaaggatgataatagatattattttttcttatgacagaagcaaatgatgtgatttatagaaaaactgggaaatacaggtacccaaagagtaaatcaacatctgtatacccccttcccaggggtaagcactgttaccaatttagcatatgtccttgcagaatttttttttctatatatacatatatattttttaccaaaatgaatcattactctatgttgttttactatttgtttgacatatcagtatatctgaaacaccttttcatgtcaataaatgttcttctctaacatt

SEQ ID NO: 180020 - DNA, 1915 bp, Homo sapiens
  Payload ID: 15459
  Gene Symbol: SCPEP1
  Gene Name: serine carboxypeptidase 1
  Uniprot ID: Q9HB40
  ENST ID: ENST00000576154
  CDS Start-End: 13-903
gcggtacttgtcatggagctggcactgcggcgctctcccgtcccgcggtggttgctgctgctgccgctgctgctgggcctgaacgcaggagctgtcattgactggcccacagaggagggcaaggaagtatgggattatgtgacggtccgcaaggatgcctacatgttctggtggctctattatgccaccaactcctgcaagaacttctcagaactgcccctggtcatgtggcttcagggcggtccaggcggttctagcactggatttggaaactttgaggaaattgggccccttgacagtgatctcaaaccacggaaaaccacctggctccaggctgccagtctcctatttgtggataatcccgtgggcactgggttcagttatgtgaatggtagtggtgcctatgccaaggacctggctatggtggcttcagacatgatggttctcctgaagaccttcttcagttgccacaaagaattccagacagttccattctacattttctcagagtcctatggaggaaaaatggcagctggcattggtctagagctttataaggccattcagcgagggaccatcaagtgcaactttgcgggggttgccttgggtgattcctggatctcccctgttgattcggtgctctcctggggaccttacctgtacagcatgtctcttctcgaagacaaaggtctggcagaggtgtctaaggttgcagagcaagtactgaatgccgtaaataaggggctctacagagaggccacagagctgtgggggaaagcagaaatgatcattgaacagaacacagatggggtgaacttctataacatcttaactaaaagcactcccacgtctacaatggagtcgagtctagaattcacacagagccacctagtttggttttagtttgtctttgtcagcgccacgtgagacacctacaacgagatgccttaagccagctcatgaatggccccatcagaaagaagctcaaaattattcctgaggatcaatcctggggaggccaggctaccaacgtctttgtgaacatggaggaggacttcatgaagccagtcattagcattgtggacgagttgctggaggcagggatcaacgtgacggtgtataatggacagctggatctcatcgtagataccatgggtcaggaggcctgggtgcggaaactgaagtggccagaactgcctaaattcagtcagctgaagtggaaggccctgtacagtgaccctaaatctttggaaacatctgcttttgtcaagtcctacaagaaccttgctttctactggattctgaaagctggtcatatggttccttctgaccaaggggacatggctctgaagatgatgagactggtgactcagcaagaataggatggatggggctggagatgagctggtttggccttggggcacagagctgagctgaggccgctgaagctgtaggaagcgccattcttccctgtatctaactggggctgtgatcaagaaggttctgaccagcttctgcagaggataaaatcattgtctctggaggcaatttggaaattatttctgcttcttaaaaaaacctaagattttttaaaaaattgatttgttttgatcaaaataaaggatgataatagatattattttttcttatgacagaagcaaatgatgtgatttatagaaaaactgggaaatacaggtacccaaagagtaaatcaacatctgtatacccccttcccaggggtaagcactgttaccaatttagcatatgtccttgcagaatttttttttctatatatacatatatattttttaccaaaatgaatcattactctatgttgttttactatttgtttgacatatcagtatatctgaaacaccttttcatgtcaataaatgttcttctctaacatttttaa

SEQ ID NO: 180021 - DNA, 1725 bp, Homo sapiens
  Payload ID: 15459
  Gene Symbol: SCPEP1
  Gene Name: serine carboxypeptidase 1
  ENST ID: ENST00000575423
  CDS Start-End: 32-241
ctgttgctgatgctgccgtgcggtacttgtcatggagctggcactgcggcgctctcccgtcccgcggtggttgctgctgctgccgctgctgctgggcctgaacgcaggaagtatgggattatgtgacggtccgcaaggatgcctacatgttctggtggctctattatgccaccaactcctgcaagaacttctcagaactgcccctggtcatgtggcttcagggcggtccaggcggttctagcactggatttggaaactttgaggaaattgggccccttgacagtgatctcaaaccacggaaaaccacctggctccaggctgccagtctcctatttgtggataatcccgtgggcactgggttcagttatgtgaatggtagtggtgcctatgccaaggacctggctatggtggcttcagacatgatggttctcctgaagaccttcttcagttgccacaaagaattccagacagttccattctacattttctcagagtcctatggaggaaaaatggcagctggcattggtctagagctttataaggccattcagcgagggaccatcaagtgcaactttgcgggggttgccttgggtgattcctggatctcccctgttgattcggtgctctcctggggaccttacctgtacagcatgtctcttctcgaagacaaaggtctggcagaggtgtctaaggttgcagagcaagtactgaatgccgtaaataaggggctctacagagaggccacagagctgtgggggaaagcagaaatgatcattgaacagaacacagatggggtgaacttctataacatcttaactaaaagcactcccacgtctacaatggagtcgagtctagaattcacacagagccacctagtttgtctttgtcagcgccacgtgagacacctacaacgagatgccttaagccagctcatgaatggccccatcagaaagaagctcaaaattattcctgaggatcaatcctggggaggccaggctaccaacgtctttgtgaacatggaggaggacttcatgaagccagtcattagcattgtggacgagttgctggaggcagggatcaacgtgacggtgtataatggacagctggatctcatcgtagataccatgggtcaggaggcctgggtgcggaaactgaagtggccagaactgcctaaattcagtcagctgaagtggaaggccctgtacagtgaccctaaatctttggaaacatctgcttttgtcaagtcctacaagaaccttgctttctactggattctgaaagctggtcatatggttccttctgaccaaggggacatggctctgaagatgatgagactggtgactcagcaagaataggatggatggggctggagatgagctggtttggccttggggcacagagctgagctgaggccgctgaagctgtaggaagcgccattcttccctgtatctaactggggctgtgatcaagaaggttctgaccagcttctgcagaggataaaatcattgtctctggaggcaatttggaaattatttctgcttcttaaaaaaacctaagattttttaaaaaattgatttgttttgatcaaaataaaggatgataatagatattattttttcttatgacagaagcaaatgatgtgatttatagaaaaactgggaaatacaggtacccaaagagtaaatcaacatctgtatacccccttcccaggggtaagcactgtta

SEQ ID NO: 180022 - DNA, 579 bp, Homo sapiens
  Payload ID: 15459
  Gene Symbol: SCPEP1
  Gene Name: serine carboxypeptidase 1
  ENST ID: ENST00000572591
  CDS Start-End: 30-473
gttgctgatgctgccgtgcggtacttgtcatggagctggcactgcggcgctctcccgtcccgcggtggttgctgctgctgccgctgctgctgggcctgaacgcaggagctgtcattgactggcccacagaggagggcaaggaagtatgggattatgtgacggtccgcaaggatgcctacatgttctggtggctctattatgccaccaactcctgcaagaacttctcagaactgcccctggtcatgtggcttcagggcggtccaggcggttctagcactggatttggaaactttgaggaaattgggccattcagcgagggaccatcaagtgcaactttgcgggggttgccttgggtgattcctggatctcccctgttgattcggtgctctcctggggaccttacctgtacagcatgtctcttctcgaagacaaaggtctggcagaggtgtctaaggttgcagagcaagtactgaatgccgtaaataaggggctctacagagaggccacagagctgtgggggaaagcagaaatgatcattgaacagaacacagatggggtgaacttctataacatcttaac

SEQ ID NO: 180023 - DNA, 555 bp, Homo sapiens
  Payload ID: 15459
  Gene Symbol: SCPEP1
  Gene Name: serine carboxypeptidase 1
  ENST ID: ENST00000572710
  CDS Start-End: 27-555
gctgatgctgccgtgcggtacttgtcatggagctggcactgcggcgctctcccgtcccgcggtggttgctgctgctgccgctgctgctgggcctgaacgcaggagctgtcattgactggcccacagaggagggcaaggaagtatgggattatgtgacggtccgcaaggatgcctacatgttctggtggctctattatgccaccaactcctgcaagaacttctcagaactgcccctggtcatgtggcttcagctccaggctgccagtctcctatttgtggataatcccgtgggcactgggttcagttatgtgaatggtagtggtgcctatgccaaggacctggctatggtggcttcagacatgatggttctcctgaagaccttcttcagttgccacaaagaattccagacagttccattctacattttctcagagtcctatggaggaaaaatggcagctggcattggtctagagctttataaggccattcagcgagggaccatcaagtgcaactttgcgggggttgccttgggtgattcctggatctcccctgttg

SEQ ID NO: 180024 - DNA, 930 bp, Homo sapiens
  Payload ID: 15459
  Gene Symbol: SCPEP1
  Gene Name: serine carboxypeptidase 1
  ENST ID: ENST00000573239
  CDS Start-End: 1-407
ctacaatggagtcgagtctagaattcacacagagccacctaggccaggctaccaacgtctttgtgaacatggaggaggacttcatgaagccagtcattagcattgtggacgagttgctggaggcagggatcaacgtgacggtgtataatggacagctggatctcatcgtagataccatgggtcaggaggcctgggtgcggaaactgaagtggccagaactgcctaaattcagtcagctgaagtggaaggccctgtacagtgaccctaaatctttggaaacatctgcttttgtcaagtcctacaagaaccttgctttctactggattctgaaagctggtcatatggttccttctgaccaaggggacatggctctgaagatgatgagactggtgactcagcaagaataggatggatggggctggagatgagctggtttggccttggggcacagagctgagctgaggccgctgaagctgtaggaagcgccattcttccctgtatctaactggggctgtgatcaagaaggttctgaccagcttctgcagaggataaaatcattgtctctggaggcaatttggaaattatttctgcttcttaaaaaaacctaagattttttaaaaaattgatttgttttgatcaaaataaaggatgataatagatattattttttcttatgacagaagcaaatgatgtgatttatagaaaaactgggaaatacaggtacccaaagagtaaatcaacatctgtatacccccttcccaggggtaagcactgttaccaatttagcatatgtccttgcagaatttttttttctatatatacatatatattttttaccaaaatgaatcattactctatgttgttttactatttgtttgacatatcagtatatctgaaacaccttttcatgtcaataaatgttcttctcta

SEQ ID NO: 180025 - DNA, 572 bp, Homo sapiens
  Payload ID: 15459
  Gene Symbol: SCPEP1
  Gene Name: serine carboxypeptidase 1
  ENST ID: ENST00000575395
  CDS Start-End: 286-572
gctgatgctgccgtgcggtacttgtcatggagctggcactgcggcgctctcccgtcccgcggtggttgctgctgctgccgctgctgctgggcctgaacgcagggcggtccaggcggttctagcactggatttggaaactttgaggaaattgggccccttgacagtgatctcaaaccacggaaaaccacctggctccaggctgccagtctcctatttgtggataatcccgtgggcactgggttcagttatgtgaatggtagtggtgcctatgccaaggacctggctatggtggcttcagacatgatggttctcctgaagaccttcttcagttgccacaaagaattccagacagttccattctacattttctcagagtcctatggaggaaaaatggcagctggcattggtctagagctttataaggccattcagcgagggaccatcaagtgcaactttgcgggggttgccttgggtgattcctggatctcccctgttgattcggtgctctcctggggaccttacctgtacagcatgtctcttctcgaagacaaaggtctggcagaggtgtctaa

SEQ ID NO: 180026 - DNA, 444 bp, Homo sapiens
  Payload ID: 15459
  Gene Symbol: SCPEP1
  Gene Name: serine carboxypeptidase 1
  ENST ID: ENST00000631024
  CDS Start-End: 1-444
atggagctggcactgcggcgctctcccgtcccgcggtggttgctgctgctgccgctgctgctgggcctgaacgcaggagctgtcattgactggcccacagaggagggcaaggaagtatgggattatgtgacggtccgcaaggatgcctacatgttctggtggctctattatgccaccaactcctgcaagaacttctcagaactgcccctggtcatgtggcttcagggcggtccaggcggttctagcactggatttggaaactttgaggaaattgggccattcagcgagggaccatcaagtgcaactttgcgggggttgccttgggtgattcctggatctcccctgttgattcggtgctctcctggggaccttacctgtacagcatgtctcttctcgaagacaaaggtctggcagaggtgtctaaggttgcagagcaagtactga

SEQ ID NO: 180027 - DNA, 1606 bp, Homo sapiens
  Payload ID: 15460
  Gene Symbol: SDS
  Gene Name: serine dehydratase
  Uniprot ID: P20132
  ENST ID: ENST00000257549
  CDS Start-End: 124-1110
ggaccattcagaagactgtccacccgtcctcagccccctctcttcgtgggctatctactcagttgatccctccctcgctggcttggctctgactcctgctcagacccatcacctttgccgggaatgatgtctggagaacccctgcacgtgaagacccccatccgtgacagcatggccctgtccaaaatggccggcaccagcgtctacctcaagatggacagtgcccagccctccggctccttcaagatccggggcattgggcacttctgcaagaggtgggccaagcaaggctgtgcacattttgtctgctcctcggcgggcaacgcaggcatggcggctgcatatgcggccaggcaactcggcgtccccgccaccatcgtggtgcccagcaccacacctgctctcaccattgagcgcctcaagaatgaaggtgccacagtcaaggtggtgggtgagttattggatgaagccttcgagctggccaaggccctagcgaagaacaacccgggttgggtctacattcccccctttgatgaccccctcatctgggaaggccacgcttccatcgtgaaagagctgaaggagacactgtgggaaaagccgggggccatcgcgctgtcagtgggcggcgggggcctgctgtgtggagtggtccaggggctgcaggaggtgggctggggggacgtgcctgtcatcgccatggagacttttggtgcccacagcttccacgctgccaccaccgcaggcaaacttgtctccctgcccaagatcaccagtgttgccaaggccctgggcgtgaagactgtgggggctcaggccctgaagctgtttcaggaacaccccattttctctgaagttatctcggaccaggaggctgtggccgccattgagaagttcgtggatgatgagaagatcctggtggagcccgcctgcggggcagccctggccgctgtctatagccacgtgatccagaagctccaactggaggggaatctccgaaccccgctgccatccctcgtggtcatcgtctgcgggggcagcaacatcagcctggcccagctgcgggcgctcaaggaacagctgggcatgacaaataggttgcccaagtgaggacggaccccttaccgatctgtgctctcctagcccaagagacccctggaggggctggagttttatccagcgcctcgtcgtatgtttggctgagcacctgtggcctgggtgcaggttaacttcttgttatcaggagcccactatgcagaggccaaaggtcggcagccagcgaggctatgaattggacctttttggtatctgtgtgactgctctgtgcccatccttagccaacttgctggcgtgacaagtgcccacaagtaacacaccaggtacccagagcagggtggacaggagagacctgaatcacagcagtgaggaattcctcaaagctgtgacctcgcccctgaacttgttcccagtgaaggtcaacagggccaccaaccagggttgaggaaccatctcagccatcctcccaggaagcccacccctgacccttactaatttttctaatgtgcaaactttttcattgaaaaataaaatatatttatgaaacaaa

SEQ ID NO: 180028 - DNA, 736 bp, Homo sapiens
  Payload ID: 15460
  Gene Symbol: SDS
  Gene Name: serine dehydratase
  ENST ID: ENST00000547342
  CDS Start-End: 30-736
ctgtacgttcttgaaaggggaactttgaaatggatgacaggaagagagccaagaggaaaagttcctacagagaacagcagccaggaccacctcgagggagaaatgcactttggggtgccgcggatgcagacagaaggggtttggggcaggagagacggggtttcaccatgttggctggtctcaaactcctgagctcaagtgatctgcccacctcggcctcccgaagtgctgggactacatccgtgagccaccgcgctcagccctttgagaggtttgaagccgaggagctgtgtgtgaatggaccagtgggaatgatgtctggagaacccctgcacgtgaagacccccatccgtgacagcatggccctgtccaaaatggccggcaccagcgtctacctcaagatggacagtgcccagccctccggctccttcaagatccggggcattgggcacttctgcaagaggtgggccaagcaaggctgtgcacattttgtctgctcctcggcgggcaacgcaggcatggcggctgcatatgcggccaggcaactcggcgtccccgccaccatcgtggtgcccagcaccacacctgctctcaccattgagcgcctcaagaatgaaggtgccacagtcaaggtggtgggtgagttattggatgaagccttcgagctggccaaggccctagcgaagaacaacccgggttgggtctacattcccccctttgatgaccccctcatctg

SEQ ID NO: 180029 - DNA, 412 bp, Homo sapiens
  Payload ID: 15460
  Gene Symbol: SDS
  Gene Name: serine dehydratase
  ENST ID: ENST00000552280
  CDS Start-End: 122-412
accattcagaagactgtccacccgtcctcagccccctctcttcgtgggctatctactcagttgatccctccctcgctggcttggctctgactcctgctcagacccatcacctttgccgggaatgatgtctggagaacccctgcacgtgaagacccccatccgtgacagcatggccctgtccaaaatggccggcaccagcgtctacctcaagatggacagtgcccagccctccggctccttcaagatccggggcattgggcacttctgcaagaggggaaggccacgcttccatcgtgaaagagctgaaggagacactgtgggaaaagccgggggccatcgcgctgtcagtgggcggcgggggcctgctgtgtggagtggtccaggggctgcaggaggtgggctggggggacgt

SEQ ID NO: 180030 - DNA, 1397 bp, Homo sapiens
  Payload ID: 15461
  Gene Symbol: SDSL
  Gene Name: serine dehydratase-like
  Uniprot ID: Q96GA7
  ENST ID: ENST00000345635
  CDS Start-End: 211-1200
ctggttccctggcaggctggagggcaggagctggggccacgctggtctgggatagttgggcagggagacggagtctcgatctgtcacccaggctggagtgcagtggcacaaccttggctcactgcaacctccgcctcccaggttcaagtgattctcctgcctcagccttctgagtagctggaattacaagctgtctacctggtctccagaatggacggccctgtggcagagcatgccaagcaggagccctttcacgtggtcacacctctgttggagagctgggcgctgtcccaggtggcgggcatgcctgtcttcctcaagtgtgagaatgtgcagcccagcggctccttcaagattcggggcattgggcatttctgccaggagatggccaagaagggatgcagacacctggtgtgctcctcagggggtaatgcgggcatcgctgctgcctatgctgctaggaagctgggcattcctgccaccatcgtgctccccgagagcacctccctgcaggtggtgcagaggctgcagggggagggggccgaggttcagctgactggaaaggtctgggacgaggccaatctgagggcgcaagagttggccaagagggacggctgggagaatgtccccccgtttgaccaccccctaatatggaaaggccacgccagcctggtgcaggagctgaaagcagtgctgaggaccccaccaggtgccctggtgctggcagttgggggtgggggtctcctggccggggtggtggctggcctgctggaggtgggctggcagcatgtacccatcattgccatggagacccatggggcacactgcttcaatgcggccatcacagccggcaagctggtcacacttccagacatcaccagtgtggccaagagcctgggtgccaagacggtggccgctcgggccctggagtgcatgcaggtgtgcaagattcactctgaagtggtggaggacaccgaggctgtgagcgctgtgcagcagctcctggatgatgagcgtatgctggtggagcctgcctgtggggcagccttagcagccatctactcaggcctcctgcggaggctccaggccgagggctgcctgcccccttccctgacttcagttgtggtaatcgtgtgtggaggcaacaacatcaacagccgagagctgcaggctttgaaaacccacctgggccaggtctgaggggtcccatcctggccccaaagacccctgagaggcccatggacagtcctgtgtctggatgaggaggactcagtgctggcagatggcagtggaagctgccctgtgcaactgtgctggctgcctcctgaaggaagccctcctggactgcttcttttggctctccgacaactccggccaataaacactttctgaattga

SEQ ID NO: 180031 - DNA, 1449 bp, Homo sapiens
  Payload ID: 15461
  Gene Symbol: SDSL
  Gene Name: serine dehydratase-like
  Uniprot ID: Q96GA7
  ENST ID: ENST00000403593
  CDS Start-End: 263-1252
ggtgcatgagtcataggcagtgcccgggaaagcggtgagggttgctctcatcccctctcctcctccgtcttcacccggaggcttagggtctggagctttctctttaacaaaggaggagggaccaaggttgccggaagctgcctgaagctggacagagccggttcctggaaagagctggttccctggcaggctggagggcaggagctggggccacgctggtctgggatagttgggcagggaggctgtctacctggtctccagaatggacggccctgtggcagagcatgccaagcaggagccctttcacgtggtcacacctctgttggagagctgggcgctgtcccaggtggcgggcatgcctgtcttcctcaagtgtgagaatgtgcagcccagcggctccttcaagattcggggcattgggcatttctgccaggagatggccaagaagggatgcagacacctggtgtgctcctcagggggtaatgcgggcatcgctgctgcctatgctgctaggaagctgggcattcctgccaccatcgtgctccccgagagcacctccctgcaggtggtgcagaggctgcagggggagggggccgaggttcagctgactggaaaggtctgggacgaggccaatctgagggcgcaagagttggccaagagggacggctgggagaatgtccccccgtttgaccaccccctaatatggaaaggccacgccagcctggtgcaggagctgaaagcagtgctgaggaccccaccaggtgccctggtgctggcagttgggggtgggggtctcctggccggggtggtggctggcctgctggaggtgggctggcagcatgtacccatcattgccatggagacccatggggcacactgcttcaatgcggccatcacagccggcaagctggtcacacttccagacatcaccagtgtggccaagagcctgggtgccaagacggtggccgctcgggccctggagtgcatgcaggtgtgcaagattcactctgaagtggtggaggacaccgaggctgtgagcgctgtgcagcagctcctggatgatgagcgtatgctggtggagcctgcctgtggggcagccttagcagccatctactcaggcctcctgcggaggctccaggccgagggctgcctgcccccttccctgacttcagttgtggtaatcgtgtgtggaggcaacaacatcaacagccgagagctgcaggctttgaaaacccacctgggccaggtctgaggggtcccatcctggccccaaagacccctgagaggcccatggacagtcctgtgtctggatgaggaggactcagtgctggcagatggcagtggaagctgccctgtgcaactgtgctggctgcctcctgaaggaagccctcctggactgcttcttttggctctccgacaactccggccaataaacactttctgaattga

SEQ ID NO: 180032 - DNA, 544 bp, Homo sapiens
  Payload ID: 15461
  Gene Symbol: SDSL
  Gene Name: serine dehydratase-like
  ENST ID: ENST00000547802
  CDS Start-End: 457-544
tggtctgggatagttgggcagggaggtaaggggtctggggccagctggggcccctggggctcagtgtgtgtgtgaatgagaggctgatgagaggctgcaggagtttgggaggctttgggcaaagtccaagctgagcaggtgggagtgagagggcctgagcgtgttctaggccctcctgggaatgtcgattgaattcagggtgccctgcagaagaaagtgttgtgctggggaccctgaagggcgagagtgggttctgcctgccagaggggcagggttgggcattctgccagccaaggggccagcccgaggtgtcccagccctggcaccagggatttggctgtggagtgccaccaaggtggcctctggggaaaggctttggggacaagtgaggtggacagcactggtggtccttacctcaactcatagatgtgacaggctgtctacctggtctccagaatggacggccctgtggcagagcatgccaagcaggagccctttcacgtggtcacacctctgttggagagctgggcgctgtcccaggtgg

SEQ ID NO: 180033 - DNA, 589 bp, Homo sapiens
  Payload ID: 15461
  Gene Symbol: SDSL
  Gene Name: serine dehydratase-like
  ENST ID: ENST00000553248
  CDS Start-End: 74-589
aaagagctggttccctggcaggctggagggcaggagctggggccacgctggtctgggatagttgggcagggagatggccaagaagggatgcagacacctggtgtgctcctcagggggtaatgcgggcatcgctgctgcctatgctgctaggaagctgggcattcctgccaccatcgtgctccccgagagcacctccctgcaggtggtgcagaggctgcagggggagggggccgaggttcagctgactggaaaggtctgggacgaggccaatctgagggcgcaagagttggccaagagggacggctgggagaatgtccccccgtttgaccaccccctaatatggaaaggccacgccagcctggtgcaggagctgaaagcagtgctgaggaccccaccaggtgccctggtgctggcagttgggggtgggggtctcctggccggggtggtggctggcctgctggaggtgggctggcagcatgtacccatcattgccatggagacccatggggcacactgcttcaatgcggccatcacagccggcaagctggtcacacttccagacatcaccagtgtggccaagagcctgggt

SEQ ID NO: 180034 - DNA, 409 bp, Homo sapiens
  Payload ID: 15461
  Gene Symbol: SDSL
  Gene Name: serine dehydratase-like
  ENST ID: ENST00000551760
  CDS Start-End: 1-183
aatgcggccatcacagccggcaagctggtcacacttccagacatcaccagtgtggccaagagcctgggtgccaagacggtggccgctcgggccctggagtgcatgcaggtgtgcaagattcactctgaagtggtggaggacaccgaggctgtgagcgctgtgcagcagctcctgggtgagtgatccctgtcctccacctgggctcagagacccacgaagtccctgcatcctctagcaagagtgtgttctgtcttatctgtatcctcagcaccaggcactggctaggtgtgcagttactgtgcactaagtgcacgtcgagtagatggaagggggtgaggataaagaaggagtgtatcttgctgtctctagcccccagactttcatacatgctgctcctctctctggctgg

SEQ ID NO: 180035 - DNA, 839 bp, Homo sapiens
  Payload ID: 15461
  Gene Symbol: SDSL
  Gene Name: serine dehydratase-like
  ENST ID: ENST00000546672
  CDS Start-End: 1-677
gatggccaagaagggatgcagacacctggtgtgctcctcaggtctgggacgaggccaatctgagggcgcaagagttggccaagagggacggctgggagaatgtccccccgtttgaccaccccctaatatggaaaggccacgccagcctggtgcaggagctgaaagcagtgctgaggaccccaccaggtgccctggtgctggcagttgggggtgggggtctcctggccggggtggtggctggcctgctggaggtgggctggcagcatgtacccatcattgccatggagacccatggggcacactgcttcaatgcggccatcacagccggcaagctggtcacacttccagacatcaccagtgtggccaagagcctgggtgccaagacggtggccgctcgggccctggagtgcatgcaggtgtgcaagattcactctgaagtggtggaggacaccgaggctgtgagcgctgtgcagcagctcctggatgatgagcgtatgctggtggagcctgcctgtggggcagccttagcagccatctactcaggcctcctgcggaggctccaggccgagggctgcctgcccccttccctgacttcagttgtggtaatcgtgtgtggaggcaacaacatcaacagccgagagctgcaggctttgaaaacccacctgggccaggtctgaggggtcccatcctggccccaaagacccctgagaggcccatggacagtcctgtgtctggatgaggaggactcagtgctggcagatggcagtggaagctgccctgtgcaactgtgctggctgcctcctgaaggaagccctcctggactgcttcttttggctctc

SEQ ID NO: 180036 - DNA, 1374 bp, Homo sapiens
  Payload ID: 15462
  Gene Symbol: SERHL2
  Gene Name: serine hydrolase-like 2
  Uniprot ID: Q9H4I8
  ENST ID: ENST00000327678
  CDS Start-End: 103-1047
ggacagcttggagatagggcccggaattgcgggcgtcactctgctcctgcgacctagccaggcgtgagggagtgacagcagcgcattcgcgggacgagagcgatgagtgagaacgccgcaccaggtctgatctcagagctgaagctggctgtgccctggggccacatcgcagccaaagcctggggctccctgcagggccctccagttctctgcctgcacggctggctggacaatgccagctccttcgacagactcatccctcttctcccgcaagacttttattacgttgccatggatttcggaggtcatgggctctcgtcccattacagcccaggtgtcccatattacctccagacttttgtgagtgagatccgaagagttgtggcagccttgaaatggaatcgattctccattctgggccacagcttcggtggcgtcgtgggcggaatgtttttctgtaccttccccgagatggtggataaacttatcttgctggacacgccgctctttctcctggaatcagatgaaatggagaacttgctgacctacaagcggagagccatagagcacgtgctgcaggtagaggcctcccaggagccctcgcacgtgttcagcctgaagcagctgctgcagaggttactgaagagcaatagccacttgagtgaggagtgcggggagcttctcctgcaaagaggaaccacgaaggtggccacaggtctggttctgaacagagaccagaggctcgcctgggcagagaacagcattgacttcatcagcagggagctgtgtgcgcattccatcaggaagctgcaggcccatgtcctgttgatcaaagcagtccacggatattttgattcaagacagaattactctgagaaggagtccctgtcgttcatgatagacacgatgaaatccaccctcaaagagcagttccagtttgtggaagtcccaggcaatcactgtgtccacatgagcgaaccccagcacgtggccagtatcatcagctccttcttacagtgcacacacatgctcccagcccagctgtagctctgggcctggaactatgaagacctagtgctcccagactcaacactgggactctgagttcctgagccccacaacaaggccagggatggtggggacaggcctcactagtcttgaggcccagcctaggatggtagtcaggggaaggagcgagattccaacttcaacatctgtgacctcaagggggagacagagtctgggttccagggctgctttctcctggctaataataaatatccagccagctggaggaaggaagggcaggctgggcccacctagcctttccctgctgcccaactggatggaaaataaaaggttcttgtattctca

SEQ ID NO: 180037 - DNA, 753 bp, Homo sapiens
  Payload ID: 15462
  Gene Symbol: SERHL2
  Gene Name: serine hydrolase-like 2
  Uniprot ID: Q9H4I8
  ENST ID: ENST00000335879
  CDS Start-End: 1-753
atgagtgagaacgccgcaccagacttttattacgttgccatggatttcggaggtcatgggctctcgtcccattacagcccaggtgtcccatattacctccagacttttgtgagtgagatccgaagagttgtggcaggtggcgtcgtgggcggaatgtttttctgtaccttccccgagatggtggataaacttatcttgctggacacgccgctctttctcctggaatcagatgaaatggagaacttgctgacctacaagcggagagccatagagcacgtgctgcaggtagaggcctcccaggagccctcgcacgtgttcagcctgaagcagctgctgcagaggttactgaagagcaatagccacttgagtgaggagtgcggggagcttctcctgcaaagaggaaccacgaaggtggccacaggtctggttctgaacagagaccagaggctcgcctgggcagagaacagcattgacttcatcagcagggagctgtgtgcgcattccatcaggaagctgcaggcccatgtcctgttgatcaaagcagtccacggatattttgattcaagacagaattactctgagaaggagtccctgtcgttcatgatagacacgatgaaatccaccctcaaagagcagttccagtttgtggaagtcccaggcaatcactgtgtccacatgagcgaaccccagcacgtggccagtatcatcagctccttcttacagtgcacacacatgctcccagcccagctgtag

SEQ ID NO: 180038 - DNA, 1315 bp, Homo sapiens
  Payload ID: 15462
  Gene Symbol: SERHL2
  Gene Name: serine hydrolase-like 2
  ENST ID: ENST00000340239
  CDS Start-End: 160-771
ctgagtgggggcggggactgctggagttgcggggcctgcctggggtagggcggggcaggacagcttggagatagggcccggaattgcgggcgtcactctgctcctgcgacctagccaggcgtgagggagtgacagcagcgcattcgcgggacgagagcgatgagtgagaacgccgcaccaggtctgatctcagagctgaagctggctgtgccctggggccacatcgcagccaaagcctggggctccctgcagggccctccagttctctgcctgcacggctggctggacaatgccagctccttcgacagactcatccctcttctcccgcaagacttttattacgttgccatggatttcggaggtcatgggctctcgtcccattacagcccaggtgtcccatattacctccagacttttgtgagtgagatccgaagagttgtggcagccttgaaatggaatcgattctccattctgggccacagcttcggtggcgtcgtgggcggaatgtttttctgtaccttccccgagatggtggataaacttatcttgctggacacgccgctctttctcctggaatcagatgaaatggagaacttgctgacctacaagcggagagccatagagcacgtgctgcaggtagaggcctcccaggagccctcgcacgtgttcagcctgaagcagctgctgcagaggcagagaacagcattgacttcatcagcagggagctgtgtgcgcattccatcaggaagctgcaggcccatgtcctgttgatcaaagcagtccacggatattttgattcaagacagaattactctgagaaggagtccctgtcgttcatgatagacacgatgaaatccaccctcaaagagcagttccagtttgtggaagtcccaggcaatcactgtgtccacatgagcgaaccccagcacgtggccagtatcatcagctccttcttacagtgcacacacatgctcccagcccagctgtagctctgggcctggaactatgaagacctagtgctcccagactcaacactgggactctgagttcctgagccccacaacaaggccagggatggtggggacaggcctcactagtcttgaggcccagcctaggatggtagtcaggggaaggagcgagattccaacttcaacatctgtgacctcaagggggagacagagtctgggttccagggctgctttctcctggctaataataaatatccagccagctggaggaaggaagggcaggctgggcccacctagcctttccctgctgcccaactggatggaaaataaaaggttcttgtattctc

SEQ ID NO: 180039 - DNA, 521 bp, Homo sapiens
  Payload ID: 15462
  Gene Symbol: SERHL2
  Gene Name: serine hydrolase-like 2
  Uniprot ID: Q9H4I8
  ENST ID: ENST00000407614
  CDS Start-End: 7-411
agagcgatgagtgagaacgccgcaccaggtctgatctcagagcttctcctgcaaagaggaaccacgaaggtggccacaggtctggttctgaacagagaccagaggctcgcctgggcagagaacagcattgacttcatcagcagggagctgtgtgcgcattccatcaggaagctgcaggcccatgtcctgttgatcaaagcagtccacggatattttgattcaagacagaattactctgagaaggagtccctgtcgttcatgatagacacgatgaaatccaccctcaaagagcagttccagtttgtggaagtcccaggcaatcactgtgtccacatgagcgaaccccagcacgtggccagtatcatcagctccttcttacagtgcacacacatgctcccagcccagctgtagctctgggcctggaactatgaagacctagtgctcccagactcaacactgggactctgagttcctgagccccacaacaaggccagggatggtggggacaggcctcactagtc

SEQ ID NO: 180040 - DNA, 563 bp, Homo sapiens
  Payload ID: 15462
  Gene Symbol: SERHL2
  Gene Name: serine hydrolase-like 2
  ENST ID: ENST00000447870
  CDS Start-End: 265-563
aactcgctgtggttgctccccgggtctggtcccgcgcggacgtgggggcggccatcaggactgcccgggggttggcgccctgctgggttccaagccggtctgatctcagagctgaagctggctgtgccctggggccacatcgcagccaaagcctggggctccctgcagggccctccagttctctgcctgcacggctggctggacaatgccagctccttcgacagactcatccctcttctcccgcaagacttttattacgttgccatggatttcggaggtcatgggctctcgtcccattacagcccaggtgtcccatattacctccagacttttgtgagtgagatccgaagagttgtggcagccttgaaatggaatcgattctccattctgggccacagcttcggtggcgtcgtgggcggaatgtttttctgtaccttccccgagatggtggataaacttatcttgctggacacgccgctctttctcctggaatcagatgaaatggagaacttgctgacctacaagcggagagccatagagcacgtgctgcaggtagaggcctc

SEQ ID NO: 180041 - DNA, 1669 bp, Homo sapiens
  Payload ID: 15462
  Gene Symbol: SERHL2
  Gene Name: serine hydrolase-like 2
  ENST ID: ENST00000416156
  CDS Start-End: 104-499
aggacagcttggagatagggcccggaattgcgggcgtcactctgctcctgcgacctagccaggcgtgagggagtgacagcagcgcattcgcgggacgagagcgatgagtgagaacgccgcaccaggtctgatctcagagctgaagctggctgtgccctggggccacatcgcagccaaagcctggggctccctgcagggccctccagttctctgcctgcacggctggctggacaatgccagctccttcgacagactcatccctcttctcccgcaagacttttattacgttgccatggatttcggaggtcatgggctctcgtcccattacagcccaggtgtcccatattacctccagacttttgtgagtgagatccgaagagttgtggcagccttgaaatggaatcgattctccattctgggccacagcttcgctcttttgtcccccaggtggcgtcgtgggcggaatgtttttctgtaccttccccgagatggtggataaacttatcttgctggacacgccgctctttctcctggaatcagatgaaatggagaacttgctgacctacaagcggagagccatagagcacgtgctgcaggtagaggcctcccaggagccctcgcacgtgttcagcctgaagcagctgctgcagaggttactgaagagcaatagccacttgagtgaggagtgcggggagcttctcctgcaaagaggaaccacgaaggtggccacaggcagagaacagcattgacttcatcagcagggagctgtgtgcgcattccatcaggaagctgcaggcccatgtcctgttgatcaagtaagtctggacccatccccttcagccacccgccaaggagacatgggcgccaggaatctccgggagggggccctggcatgaggctccaagttctctgcgtgtcgaccacatcgctaaggctcaagatcttttttgggaagcccccctggcagcagggtcatggaaggaggaaggtcagaggaggggagggctcgggcagcaggggatgggccggggctgtcccatgcctttccacaggtgtcagcggggggcatgcccaggtaaggctccataaccagtgagcccagtctcggctgactgcaacctctgtctcctggattcaaacgattctcctgcctcagcctcccgagtagctgggactacaggcgcccgccaccaggcctggcttatttttgtatttttagtagagacgaggtttcgccatgttggccaggctgctctccatctcctgacctcatgatccgcccgcctcggcctcccagtgttgggattacaggcgtgagccaccgtgcgtggcccaccatagacgatttttaagccataaaaagaaacgaagcactgacacgggctccagcatggatgagcctttaaaacatcgcgctaagtggacgaattcagacacaaccgtctacgtgttgtatggctgcattcacgttcaagtcaagtccaaatagggcacactgcagagacaaagccagagcagtccacggatattttgattcaagacagaattactctgagaaggagtccctgtcgttcatgatagacacgatgaaatccaccctcaaagagcagttccagtttgtggaagtcccaggcaatcactgtgtccacatgagcgaaccccagcacgt

SEQ ID NO: 180042 - DNA, 2096 bp, Homo sapiens
  Payload ID: 15462
  Gene Symbol: SERHL2
  Gene Name: serine hydrolase-like 2
  ENST ID: ENST00000477564
  CDS Start-End: 163-792
cttctgagtgggggcggggactgctggagttgcggggcctgcctggggtagggcggggcaggacagcttggagatagggcccggaattgcgggcgtcactctgctcctgcgacctagccaggcgtgagggagtgacagcagcgcattcgcgggacgagagcgatgagtgagaacgccgcaccaggtctgatctcagagctgaagctggctgtgccctggggccacatcgcagccaaagcctggggctccctgcagggccctccagttctctgcctgcacggctggctggacaatgccagctccttcgacagactcatccctcttctcccgcaagacttttattacgttgccatggatttcggaggtcatgggctctcgtcccattacagcccaggtgtcccatattacctccagacttttgtgagtgagatccgaagagttgtggcagccttgaaatggaatcgattctccattctgggccacagcttcggtggcgtcgtgggcggaatgtttttctgtaccttccccgagatggtggataaacttatcttgctggacacgccgctctttctcctggaatcagatgaaatggagaacttgctgacctacaagcggagagccatagagcacgtgctgcaggtagaggcctcccaggagccctcgcacgtgttcagcctgaagcagctgctgcagaggttactgaagagcaatagccacttgagtgaggagtgcggggagcttctcctgcaaagaggaaccacgaaggtggccacaggcagagaacagcattgacttcatcagcagggagctgtgtgcgcattccatcaggaagctgcaggcccatgtcctgttgatcaagtaagtctggacccatccccttcagccacccgccaaggagacatgggcgccaggaatctccgggagggggccctggcatgaggctccaagttctctgcgtgtcgaccacatcgctaaggctcaagatcttttttgggaagcccccctggcagcagggtcatggaaggaggaaggtcagaggaggggagggctcgggcagcaggggatgggccggggctgtcccatgcctttccacaggtgtcagcggggggcatgcccaggtaaggctccataaccagtgagcccagtctcggctgactgcaacctctgtctcctggattcaaacgattctcctgcctcagcctcccgagtagctgggactacaggcgcccgccaccaggcctggcttatttttgtatttttagtagagacgaggtttcgccatgttggccaggctgctctccatctcctgacctcatgatccgcccgcctcggcctcccagtgttgggattacaggcgtgagccaccgtgcgtggcccaccatagacgatttttaagccataaaaagaaacgaagcactgacacgggctccagcatggatgagcctttaaaacatcgcgctaagtggacgaattcagacacaaccgtctacgtgttgtatggctgcattcacgttcaagtcaagtccaaatagggcacactgcagagacaaagccagagcagtccacggatattttgattcaagacagaattactctgagaaggagtccctgtcgttcatgatagacacgatgaaatccaccctcaaagagcagttccagtttgtggaagtcccaggcaatcactgtgtccacatgagcgaaccccagcacgtggccagtatcatcagctccttcttacagtgcacacacatgctcccagcccagctgtagctctgggcctggaactatgaagacctagtgctcccagactcaacactgggactctgagttcctgagccccacaacaaggccagggatggtggggacaggcctcactagtcttgaggcccagcctaggatggtagtcaggggaaggagcgagattccaacttcaacatctgtgacctcaagggggagacagagtctgggttccagggctgctttctcctggctaataataaatatccagccagctggaggaaggaagggcaggctgggcccacctagcctttccctgctgcccaactggatggaaaataaaaggttcttgtattctc

SEQ ID NO: 180043 - DNA, 1656 bp, Homo sapiens
  Payload ID: 15463
  Gene Symbol: SHMT1
  Gene Name: serine hydroxymethyltransferase 1 (soluble)
  Uniprot ID: P34896
  ENST ID: ENST00000354098
  CDS Start-End: 100-1434
cgcggcggtgcgcggggcgttgggtcagcgggtctgggactggtggcaccggcggcggcgtaggacggaggcgtcgctaggcagcttcgaaccagtgcaatgacgatgccagtcaacggggcccacaaggatgctgacctgtggtcctcacatgacaagatgctggcacaacccctcaaagacagtgatgttgaggtttacaacatcattaagaaggagagtaaccggcagagggttggattggagctgattgcctcggagaatttcgccagccgagcagttttggaggccctaggctcttgcttaaataacaaatactctgaggggtacccgggccagagatactatggcgggactgagtttattgatgaactggagaccctctgtcagaagcgagccctgcaggcctataagctggacccacagtgctggggggtcaacgtccagccctactcaggctcccctgcaaactttgctgtgtacactgccctggtggaaccccatgggcgcatcatgggcctggaccttccggatgggggccacctgacccatgggttcatgacagacaagaagaaaatctctgccacgtccatcttctttgaatctatgccctacaaggtgaacccagatactggctacatcaactatgaccagctggaggagaacgcacgcctcttccacccgaagctgatcatcgcaggaaccagctgctactcccgaaacctggaatatgcccggctacggaagattgcagatgagaacggggcgtatctcatggcggacatggctcacatcagcgggctggtggcggctggcgtggtgccctccccatttgaacactgccatgtggtgaccaccaccactcacaagaccctgcgaggctgccgagctggcatgatcttctacaggaaaggggttgctgtggcactgaagcaagctatgactctggaatttaaagtttatcaacaccaggtggtggccaactgcagggctctgtctgaggccctgacggagctgggctacaaaatagtcacaggtggttctgacaaccatttgatccttgtggatctccgttccaaaggcacagatggtggaagggctgagaaggtgctagaagcctgttctattgcctgcaacaagaacacctgtccaggtgacagaagcgctctgcggcccagtggactgcggctggggaccccagcactgacgtcccgtggacttttggaaaaagacttccaaaaagtagcccactttattcacagagggatagagctgaccctgcagatccagagcgacactggtgtcagagccaccctgaaagagttcaaggagagactggcaggggataagtaccaggcggccgtgcaggctctccgggaggaggttgagagcttcgcctctctcttccctctgcctggcctgcctgacttctaaaggagcgggcccactctggacccacctggcgccacagaggaagctgcctgccggaggacccccacctgagagatggatgagctgctccaaaggggaactgttgacactcgggccctttgagggggtttcttttggacttttttcatgttttcttcacaaatcaaaatttgtttaagtctcattgttagtaattctgggacaggttattaaaggatttaaatt

SEQ ID NO: 180044 - DNA, 2464 bp, Homo sapiens
  Payload ID: 15463
  Gene Symbol: SHMT1
  Gene Name: serine hydroxymethyltransferase 1 (soluble)
  Uniprot ID: P34896
  ENST ID: ENST00000316694
  CDS Start-End: 136-1587
ggtttggggttggagcggctggtcacgtggctggcccgcggcggtgcgcggggcgttgggtcagcgggtctgggactggtggcaccggcggcggcgtaggacggaggcgtcgctaggcagcttcgaaccagtgcaatgacgatgccagtcaacggggcccacaaggatgctgacctgtggtcctcacatgacaagatgctggcacaacccctcaaagacagtgatgttgaggtttacaacatcattaagaaggagagtaaccggcagagggttggattggagctgattgcctcggagaatttcgccagccgagcagttttggaggccctaggctcttgcttaaataacaaatactctgaggggtacccgggccagagatactatggcgggactgagtttattgatgaactggagaccctctgtcagaagcgagccctgcaggcctataagctggacccacagtgctggggggtcaacgtccagccctactcaggctcccctgcaaactttgctgtgtacactgccctggtggaaccccatgggcgcatcatgggcctggaccttccggatgggggccacctgacccatgggttcatgacagacaagaagaaaatctctgccacgtccatcttctttgaatctatgccctacaaggtgaacccagatactggctacatcaactatgaccagctggaggagaacgcacgcctcttccacccgaagctgatcatcgcaggaaccagctgctactcccgaaacctggaatatgcccggctacggaagattgcagatgagaacggggcgtatctcatggcggacatggctcacatcagcgggctggtggcggctggcgtggtgccctccccatttgaacactgccatgtggtgaccaccaccactcacaagaccctgcgaggctgccgagctggcatgatcttctacaggaaaggagtgaaaagtgtggatcccaagactggcaaagagattctgtacaacctggagtctcttatcaattctgctgtgttccctggcctgcagggaggtccccacaaccacgccattgctggggttgctgtggcactgaagcaagctatgactctggaatttaaagtttatcaacaccaggtggtggccaactgcagggctctgtctgaggccctgacggagctgggctacaaaatagtcacaggtggttctgacaaccatttgatccttgtggatctccgttccaaaggcacagatggtggaagggctgagaaggtgctagaagcctgttctattgcctgcaacaagaacacctgtccaggtgacagaagcgctctgcggcccagtggactgcggctggggaccccagcactgacgtcccgtggacttttggaaaaagacttccaaaaagtagcccactttattcacagagggatagagctgaccctgcagatccagagcgacactggtgtcagagccaccctgaaagagttcaaggagagactggcaggggataagtaccaggcggccgtgcaggctctccgggaggaggttgagagcttcgcctctctcttccctctgcctggcctgcctgacttctaaaggagcgggcccactctggacccacctggcgccacagaggaagctgcctgccggaggacccccacctgagagatggatgagctgctccaaaggggaactgttgacactcgggccctttgagggggtttcttttggacttttttcatgttttcttcacaaatcaaaatttgtttaagtctcattgttagtaattctgggacaggttattaaaggatttaaatttgaacctggctttctcacagctggacataattctaggaaaataaaatactatgtcgccacttggtcataatcatttagatggtggtgtagggcaaagctgttagaaagattgtagcgttttactctccctgggctttcctccgccttgctgcaacagagaggaaatgcccatgtccacagcttgtacacactgccccctcactatcttgttatccagtggcatgccaaaggagaactgaattagcttctgaggcttctgctgtaaatcagaagtgtatgttagtcaagagtaaacaagatgcacccagtatggtgggagggttttgctgtcagtagctcaaagtatggtgtagaaatggcctcctccctccatcctgggaagtcccagtcccatcctggtgtgagaatcaaccaggctttcctgctccacctgagataaccaactccctcccgtaatcaggaagccaaatgtcaccttcccaaagaaattttattttcacgtagctgaagtgcaaaacatagatgaccatttttaataagcacaatcaaatttttaaccacagaatgtctacaagaattatagctttaaaaaatacaaccaatttttatatttcaaaaatatttgaactcaaataaattaatttcttaaaaagta

SEQ ID NO: 180045 - DNA, 2437 bp, Homo sapiens
  Payload ID: 15463
  Gene Symbol: SHMT1
  Gene Name: serine hydroxymethyltransferase 1 (soluble)
  Uniprot ID: P34896
  ENST ID: ENST00000352886
  CDS Start-End: 510-1547
cgggggcggggccaagcccaagcctggcgcgcagagtgcaccttcctgagctcgagcggtccagcgccaagttcggggtttggggttggagcggctggtcacgtggctggcccgcggcggtgcgcggggcgttgggtcagcgggtctgggactggtggcaccggcggcggcgtaggacggaggcgtcgctaggcagcttcgaaccagtgcaatgacgatgccagtcaacggggcccacaaggatgctgacctgtggtcctcacatgacaagatgctggcacaacccctcaaagacagtgatgttgaggtttacaacatcattaagaaggagagtaaccggcagagggttggattggagctgattgcctcggagaatttcgccagccgagcagttttggaggccctaggctcttgcttaaataacaaatactctgaggggtacccgggccagaggctcccctgcaaactttgctgtgtacactgccctggtggaaccccatgggcgcatcatgggcctggaccttccggatgggggccacctgacccatgggttcatgacagacaagaagaaaatctctgccacgtccatcttctttgaatctatgccctacaaggtgaacccagatactggctacatcaactatgaccagctggaggagaacgcacgcctcttccacccgaagctgatcatcgcaggaaccagctgctactcccgaaacctggaatatgcccggctacggaagattgcagatgagaacggggcgtatctcatggcggacatggctcacatcagcgggctggtggcggctggcgtggtgccctccccatttgaacactgccatgtggtgaccaccaccactcacaagaccctgcgaggctgccgagctggcatgatcttctacaggaaaggagtgaaaagtgtggatcccaagactggcaaagagattctgtacaacctggagtctcttatcaattctgctgtgttccctggcctgcagggaggtccccacaaccacgccattgctggggttgctgtggcactgaagcaagctatgactctggaatttaaagtttatcaacaccaggtggtggccaactgcagggctctgtctgaggccctgacggagctgggctacaaaatagtcacaggtggttctgacaaccatttgatccttgtggatctccgttccaaaggcacagatggtggaagggctgagaaggtgctagaagcctgttctattgcctgcaacaagaacacctgtccaggtgacagaagcgctctgcggcccagtggactgcggctggggaccccagcactgacgtcccgtggacttttggaaaaagacttccaaaaagtagcccactttattcacagagggatagagctgaccctgcagatccagagcgacactggtgtcagagccaccctgaaagagttcaaggagagactggcaggggataagtaccaggcggccgtgcaggctctccgggaggaggttgagagcttcgcctctctcttccctctgcctggcctgcctgacttctaaaggagcgggcccactctggacccacctggcgccacagaggaagctgcctgccggaggacccccacctgagagatggatgagctgctccaaaggggaactgttgacactcgggccctttgagggggtttcttttggacttttttcatgttttcttcacaaatcaaaatttgtttaagtctcattgttagtaattctgggacaggttattaaaggatttaaatttgaacctggctttctcacagctggacataattctaggaaaataaaatactatgtcgccacttggtcataatcatttagatggtggtgtagggcaaagctgttagaaagattgtagcgttttactctccctgggctttcctccgccttgctgcaacagagaggaaatgcccatgtccacagcttgtacacactgccccctcactatcttgttatccagtggcatgccaaaggagaactgaattagcttctgaggcttctgctgtaaatcagaagtgtatgttagtcaagagtaaacaagatgcacccagtatggtgggagggttttgctgtcagtagctcaaagtatggtgtagaaatggcctcctccctccatcctgggaagtcccagtcccatcctggtgtgagaatcaaccaggctttcctgctccacctgagataaccaactccctcccgtaatcaggaagccaaatgtcaccttcccaaagaaattttattttcacgtagctgaagtgcaaaacatagatgaccatttttaataagcacaatcaaatttttaaccacagaatgtctacaagaattatagctttaaaaaatacaaccaatttttatatttcaaaaatatttgaactcaaataaattaatttcttaaaaagtacacttctcatact

SEQ ID NO: 180046 - DNA, 332 bp, Homo sapiens
  Payload ID: 15463
  Gene Symbol: SHMT1
  Gene Name: serine hydroxymethyltransferase 1 (soluble)
  ENST ID: ENST00000583780
  CDS Start-End: 330-332
gcctggcgcgcagagtgcaccttcctgagctcgagcggtccagcgccaagttcggggtttggggttggagcggctggtcacgtggctggcccgcggcggtgcgcggggcgttgggtcagcgggtctgggactggtggcaccggcggcggcgtaggacggaggcgtcgctagggtcttgttctcttggccaggctggagtgctgtgggaaaatctgggctcactgcagcctcaacctccgggactcaagtgatcatcctgcctcagccacccagagtagctgagaatacaggcgtgcgccaccaggctcgggcagcttcgaaccagtgcaatg

SEQ ID NO: 180047 - DNA, 1759 bp, Homo sapiens
  Payload ID: 15463
  Gene Symbol: SHMT1
  Gene Name: serine hydroxymethyltransferase 1 (soluble)
  ENST ID: ENST00000580002
  CDS Start-End: 144-530
aagttcggggtttggggttggagcggctggtcacgtggctggcccgcggcggtgcgcggggcgttgggtcagcgggtctgggactggtggcaccggcggcggcgtaggacggaggcgtcgctaggcagcttcgaaccagtgcaatgacgatgccagtcaacggggcccacaaggatgctgacctgtggtcctcacatgacaagatgctggcacaacccctcaaagacagtgatgttgaggtttacaacatcattaagaaggagagtaaccggcagagggttggattggagctgattgcctcggagaatttcgccagccgagcagttttggaggccctaggctcttgcttaaataacaaatactctgaggggtacccgggccagaggctcccctgcaaactttgctgtgtacactgccctggtggaaccccatgggcgcatcatgggcctggaccttccggatgggggccacctgacccatgggttcatgacagacaagaagaaaatctctgccacgtccatcttctttgaatctatgccctacaaggtgaacccagatactggctacatcaactatgaccagctggaggagaacgcacgcctcttccacccgaagctgatcatcgcaggaaccagctgctactcccgaaacctggaatatgcccggctacggaagattgcagatgagaacggggcgtatctcatggcggacatggctcacatcagcgggctggtggcggctggcgtggtgccctccccatttgaacactgccatgtggtgaccaccaccactcacaagaccctgcgaggctgccgagctggcatgatcttctacaggaaaggagtgaaaagtgtggatcccaagactggcaaagagattctgtacaacctggagtctcttatcaattctgctgtgttccctggcctgcagggaggtccccacaaccacgccattgctggggttgctgtggcactgaagcaagctatgactctggaatttaaagtttatcaacaccaggtggtggccaactgcagggctctgtctgaggccctgacggagctgggctacaaaatagtcacaggtggttctgacaaccatttgatccttgtggatctccgttccaaaggcacagatggtggaagggctgagaaggtgctagaagcctgttctattgcctgcaacaagaacacctgtccaggtgacagaagcgctctgcggcccagtggactgcggctggggaccccagcactgacgtcccgtggacttttggaaaaagacttccaaaaagtagcccactttattcacagagggatagagctgaccctgcagatccagagcgacactggtgtcagagccaccctgaaagagttcaaggagagactggcaggggataagtaccaggcggccgtgcaggctctccgggaggaggttgagagcttcgcctctctcttccctctgcctggcctgcctgacttctaaaggagcgggcccactctggacccacctggcgccacagaggaagctgcctgccggaggacccccacctgagagatggatgagctgctccaaaggggaactgttgacactcgggccctttgagggggtttcttttggacttttttcatgttttcttcacaaatcaaaatttgtttaagtctcattgttagtaattctgggacaggttattaaaggatttaaatttgaacctggctttctcacagctggacataattctaggaaaataaaatactatgtcgcc

SEQ ID NO: 180048 - DNA, 879 bp, Homo sapiens
  Payload ID: 15463
  Gene Symbol: SHMT1
  Gene Name: serine hydroxymethyltransferase 1 (soluble)
  ENST ID: ENST00000582653
  CDS Start-End: 379-879
aggtgggcggcttcgggtccgagggccgcggcgtcccagagcccggggggtgcttcggcgtcctcgctgtcccccgccgtaccccaccctctgcagccgcaatgacgggaggggagcgcttgggtcgcgcctgggctggggatcgggcggcggccagccgcagcgccccagttccaggcacattcggtatgatggggtggcggcccgtggcctttggcaagaatgcgaaggcttatcggggatgtgagtagtagctctccactgaacacttttctcgttgagcattttcgatttaaacaatcctagctccttcacaacaaagctgcaagtcaagtgctactgtttcccccattttacaggcagcttcgaaccagtgcaatgacgatgccagtcaacggggcccacaaggatgctgacctgtggtcctcacatgacaagatgctggcacaacccctcaaagacagtgatgttgaggtttacaacatcattaagaaggagagtaaccggcagagggttggattggagctgattgcctcggagaatttcgccagccgagcagttttggaggccctaggctcttgcttaaataacaaatactctgaggggtacccgggccagagatactatggcgggactgagtttattgatgaactggagaccctctgtcagaagcgagccctgcaggcctataagctggacccacagtgctggggggtcaacgtccagccctactcaggctcccctgcaaactttgctgtgtacactgccctggtggaaccccatgggcgcatcatgggcctggaccttccggatgggggccacctgacccatgggttcatgacagacaagaagaaaatctctgccacgtccatcttcttt

SEQ ID NO: 180049 - DNA, 378 bp, Homo sapiens
  Payload ID: 15463
  Gene Symbol: SHMT1
  Gene Name: serine hydroxymethyltransferase 1 (soluble)
  ENST ID: ENST00000618902
  CDS Start-End: 1-378
atgagatatttgctccaagttgcacagctggtttggttgactgtagattccagaggcattggtggaacacttgatcatgctggcttcagcatctgcattttcactgtcccacccctaagcttctttggcctctgtgaagcacagactttcggtctgagtggatctaagtctcctgctcttcacagatactatggcgggactgagtttattgatgaactggagaccctctgtcagaagcgagccctgcaggcctataagctggacccacagtgctggggggtcaacgtccctactcaggtgcttgtctcatccatatggcctggtgcagcctcttcatgtgcatcccccagggccgacatgcaccaagaagagtcctaa

SEQ ID NO: 180050 - DNA, 2537 bp, Homo sapiens
  Payload ID: 15464
  Gene Symbol: SHMT2
  Gene Name: serine hydroxymethyltransferase 2 (mitochondrial)
  Uniprot ID: P34897
  ENST ID: ENST00000328923
  CDS Start-End: 453-1967
acggtgctttccagtgttccatagctctttatcttgtgtgggggtctagatctcctggagtctaataatgctagctagatattcagtaggcaccctataaacgtttgtcttgacaacaagcagagagaaaaccctgaaaagcttcaagatagtaaggagagggggcggcactggacctctgtttttgttttttgtttttttccccccaggcaagggcctctaaccctggggctacagacgggaatcataaagaaaaaagcggtgagtgggcgaactacaattcccaaaaggccacaaaggggccaccactacgcatgcgtagatccctcccgttagctttggcgcctcagcgagctcttctcgcgcatgcgttctccgaacggtcttcttccgacagcttgctgccctagaccagagttggtggctggacctcctgcgacttccgagttgcgatgctgtacttctctttgttttgggcggctcggcctctgcagagatgtgggcagctggtcaggatggccattcgggctcagcacagcaacgcagcccagactcagactggggaagcaaacaggggctggacaggccaggagagcctgtcggacagtgatcctgagatgtgggagttgctgcagagggagaaggacaggcagtgtcgtggcctggagctcattgcctcagagaacttctgcagccgagctgcgctggaggccctggggtcctgtctgaacaacaagtactcggagggttatcctggcaagagatactatgggggagcagaggtggtggatgaaattgagctgctgtgccagcgccgggccttggaagcctttgacctggatcctgcacagtggggagtcaatgtccagccctactccgggtccccagccaacctggccgtctacacagcccttctgcaacctcacgaccggatcatggggctggacctgcccgatgggggccatctcacccacggctacatgtctgacgtcaagcggatatcagccacgtccatcttcttcgagtctatgccctataagctcaaccccaaaactggcctcattgactacaaccagctggcactgactgctcgacttttccggccacggctcatcatagctggcaccagcgcctatgctcgcctcattgactacgcccgcatgagagaggtgtgtgatgaagtcaaagcacacctgctggcagacatggcccacatcagtggcctggtggctgccaaggtgattccctcgcctttcaagcacgcggacatcgtcaccaccactactcacaagactcttcgaggggccaggtcagggctcatcttctaccggaaaggggtgaaggctgtggaccccaagactggccgggagatcccttacacatttgaggaccgaatcaactttgccgtgttcccatccctgcaggggggcccccacaatcatgccattgctgcagtagctgtggccctaaagcaggcctgcacccccatgttccgggagtactccctgcaggttctgaagaatgctcgggccatggcagatgccctgctagagcgaggctactcactggtatcaggtggtactgacaaccacctggtgctggtggacctgcggcccaagggcctggatggagctcgggctgagcgggtgctagagcttgtatccatcactgccaacaagaacacctgtcctggagaccgaagtgccatcacaccgggcggcctgcggcttggggccccagccttaacttctcgacagttccgtgaggatgacttccggagagttgtggactttatagatgaaggggtcaacattggcttagaggtgaagagcaagactgccaagctccaggatttcaaatccttcctgcttaaggactcagaaacaagtcagcgtctggccaacctcaggcaacgggtggagcagtttgccagggccttccccatgcctggttttgatgagcattgaaggcacctgggaaatgaggcccacagactcaaagttactctccttccccctacctgggccagtgaaatagaaagcctttctattttttggtgcgggagggaagacctctcacttagggcaagagccaggtatagtctcccttcccagaatttgtaactgagaagatcttttctttttcctttttttggtaacaagacttagaaggagggcccaggcactttctgtttgaacccctgtcatgatcacagtgtcagagacgcgtcctctttcttggggaagttgaggagtgcccttcagagccagtagcaggcaggggtgggtaggcaccctccttcctgtttttatctaataaaatgctaacctgccctgagtttccattactgtgggtggggttcccctgggccaaacagtgatttgtctccctcaatgtgtacaccgctccgctcccaccaccgctaccacaaggacccccggggctgcagcctcctctttctgtctctgatcagagccgacaccagacgtgattagcaggcgcagcaaattcaatttgttaaatgaaattgtattttg

SEQ ID NO: 180051 - DNA, 2006 bp, Homo sapiens
  Payload ID: 15464
  Gene Symbol: SHMT2
  Gene Name: serine hydroxymethyltransferase 2 (mitochondrial)
  Uniprot ID: P34897
  ENST ID: ENST00000414700
  CDS Start-End: 190-1641
gcggacccggtgctggcaaatgagcggagttttcggcctggtctcacaagctgagcctttccggccagctctgagccctgcagatgatgcaaccgagcttcactgcttgcatcaggcaggggtcccggcggcagtgagggctggaaggaggtggaacggcctctgcagagatgtgggcagctggtcaggatggccattcgggctcagcacagcaacgcagcccagactcagactggggaagcaaacaggggctggacaggccaggagagcctgtcggacagtgatcctgagatgtgggagttgctgcagagggagaaggacaggcagtgtcgtggcctggagctcattgcctcagagaacttctgcagccgagctgcgctggaggccctggggtcctgtctgaacaacaagtactcggagggttatcctggcaagagatactatgggggagcagaggtggtggatgaaattgagctgctgtgccagcgccgggccttggaagcctttgacctggatcctgcacagtggggagtcaatgtccagccctactccgggtccccagccaacctggccgtctacacagcccttctgcaacctcacgaccggatcatggggctggacctgcccgatgggggccatctcacccacggctacatgtctgacgtcaagcggatatcagccacgtccatcttcttcgagtctatgccctataagctcaaccccaaaactggcctcattgactacaaccagctggcactgactgctcgacttttccggccacggctcatcatagctggcaccagcgcctatgctcgcctcattgactacgcccgcatgagagaggtgtgtgatgaagtcaaagcacacctgctggcagacatggcccacatcagtggcctggtggctgccaaggtgattccctcgcctttcaagcacgcggacatcgtcaccaccactactcacaagactcttcgaggggccaggtcagggctcatcttctaccggaaaggggtgaaggctgtggaccccaagactggccgggagatcccttacacatttgaggaccgaatcaactttgccgtgttcccatccctgcaggggggcccccacaatcatgccattgctgcagtagctgtggccctaaagcaggcctgcacccccatgttccgggagtactccctgcaggttctgaagaatgctcgggccatggcagatgccctgctagagcgaggctactcactggtatcaggtggtactgacaaccacctggtgctggtggacctgcggcccaagggcctggatggagctcgggctgagcgggtgctagagcttgtatccatcactgccaacaagaacacctgtcctggagaccgaagtgccatcacaccgggcggcctgcggcttggggccccagccttaacttctcgacagttccgtgaggatgacttccggagagttgtggactttatagatgaaggggtcaacattggcttagaggtgaagagcaagactgccaagctccaggatttcaaatccttcctgcttaaggactcagaaacaagtcagcgtctggccaacctcaggcaacgggtggagcagtttgccagggccttccccatgcctggttttgatgagcattgaaggcacctgggaaatgaggcccacagactcaaagttactctccttccccctacctgggccagtgaaatagaaagcctttctattttttggtgcgggagggaagacctctcacttagggcaagagccaggtatagtctcccttcccagaatttgtaactgagaagatcttttctttttcctttttttggtaacaagacttagaaggagggcccaggcactttctgtttgaacccctgtcatgatcacagtgtcagagacgcgtcctctttcttggggaagttgaggagtgcccttcagagccagtagcaggcaggggtgggtaggcaccctccttcctgtttttatctaataaaatgctaacctgc

SEQ ID NO: 180052 - DNA, 2121 bp, Homo sapiens
  Payload ID: 15464
  Gene Symbol: SHMT2
  Gene Name: serine hydroxymethyltransferase 2 (mitochondrial)
  Uniprot ID: P34897
  ENST ID: ENST00000449049
  CDS Start-End: 332-1783
attgctctacaatctgtggcctcagcccttgccaactctgcctcttcccccgctgactggggtatcagtttatggtgccctgcaggaagaccctcttgttcctgtgggtgggaaggttctggaatctcagttgccctctctggagttggggagacataggcttttggaggacaagctttgcagagtggttcatggagtgaggtggtgggagatttctgaggtgcggtgcggtgaatggagcaaatcagaaccaccccttggacgttgatctcaagcttggctccagaactggcttttgaagcctctgcagagatgtgggcagctggtcaggatggccattcgggctcagcacagcaacgcagcccagactcagactggggaagcaaacaggggctggacaggccaggagagcctgtcggacagtgatcctgagatgtgggagttgctgcagagggagaaggacaggcagtgtcgtggcctggagctcattgcctcagagaacttctgcagccgagctgcgctggaggccctggggtcctgtctgaacaacaagtactcggagggttatcctggcaagagatactatgggggagcagaggtggtggatgaaattgagctgctgtgccagcgccgggccttggaagcctttgacctggatcctgcacagtggggagtcaatgtccagccctactccgggtccccagccaacctggccgtctacacagcccttctgcaacctcacgaccggatcatggggctggacctgcccgatgggggccatctcacccacggctacatgtctgacgtcaagcggatatcagccacgtccatcttcttcgagtctatgccctataagctcaaccccaaaactggcctcattgactacaaccagctggcactgactgctcgacttttccggccacggctcatcatagctggcaccagcgcctatgctcgcctcattgactacgcccgcatgagagaggtgtgtgatgaagtcaaagcacacctgctggcagacatggcccacatcagtggcctggtggctgccaaggtgattccctcgcctttcaagcacgcggacatcgtcaccaccactactcacaagactcttcgaggggccaggtcagggctcatcttctaccggaaaggggtgaaggctgtggaccccaagactggccgggagatcccttacacatttgaggaccgaatcaactttgccgtgttcccatccctgcaggggggcccccacaatcatgccattgctgcagtagctgtggccctaaagcaggcctgcacccccatgttccgggagtactccctgcaggttctgaagaatgctcgggccatggcagatgccctgctagagcgaggctactcactggtatcaggtggtactgacaaccacctggtgctggtggacctgcggcccaagggcctggatggagctcgggctgagcgggtgctagagcttgtatccatcactgccaacaagaacacctgtcctggagaccgaagtgccatcacaccgggcggcctgcggcttggggccccagccttaacttctcgacagttccgtgaggatgacttccggagagttgtggactttatagatgaaggggtcaacattggcttagaggtgaagagcaagactgccaagctccaggatttcaaatccttcctgcttaaggactcagaaacaagtcagcgtctggccaacctcaggcaacgggtggagcagtttgccagggccttccccatgcctggttttgatgagcattgaaggcacctgggaaatgaggcccacagactcaaagttactctccttccccctacctgggccagtgaaatagaaagcctttctattttttggtgcgggagggaagacctctcacttagggcaagagccaggtatagtctcccttcccagaatttgtaactgagaagatcttttctttttcctttttttggtaacaagacttagaaggagggcccaggcactttctgtttgaacccctgtcatgatcacagtgtcagagacgcgtcctctttcttggggaagttgaggagtgcccttcagagccagtagcaggcaggggtgggtaggcaccctccttcctg

SEQ ID NO: 180053 - DNA, 542 bp, Homo sapiens
  Payload ID: 15464
  Gene Symbol: SHMT2
  Gene Name: serine hydroxymethyltransferase 2 (mitochondrial)
  ENST ID: ENST00000557703
  CDS Start-End: 117-542
ttttcggcctggtctcacaagctgagcctttccggccagctctgagccctgcagatgatgcaaccgagcttcactgcttgcatcagcctctgcagagatgtgggcagctggtcaggatggccattcgggctcagcacagcaacgcagcccagactcagactggggaagcaaacaggggctggacaggccaggagagcctgtcggacagtgatcctgagatgtgggagttgctgcagagggagaaggacaggcagtgtcgtggcctggagctcattgcctcagagaacttctgcagccgagctgcgctggaggccctggggtcctgtctgaacaacaagtactcggagggttatcctggcaagagatactatgggggagcagaggtggtggatgaaattgagctgctgtgccagcgccgggccttggaagcctttgacctggatcctgcacagtggggagtcaatgtccagccctactccgggtccccagccaacctggccgtctacacagcccttctgcaacctcacgaccggatcatgggg

SEQ ID NO: 180054 - DNA, 1369 bp, Homo sapiens
  Payload ID: 15464
  Gene Symbol: SHMT2
  Gene Name: serine hydroxymethyltransferase 2 (mitochondrial)
  ENST ID: ENST00000557529
  CDS Start-End: 1-793
tggcctcattgactacaaccagctggcactgactgctcgacttttccggccacggctcatcatagctggcaccagcgcctatgctcgcctcattgactacgcccgcatgagagaggtgtgtgatgaagtcaaagcacacctgctggcagacatggcccacatcagtggcctggtggctgccaaggtgattccctcgcctttcaagcacgcggacatcgtcaccaccactactcacaagactcttcgaggggccaggtcagggctcatcttctaccggaaaggggtgaaggctgtggaccccaagactggccgggagatcccttacacatttgaggaccgaatcaactttgccgtgttcccatccctgcaggggggcccccacaatcatgccattgctgcagtagctgtggccctaaagcaggcctgcacccccatgttccgggagtactccctgcaggttctgaagaatgctcgggccatggcagatgccctgctagagcgaggctactcactggtatcaggtggtactgacaaccacctggtgctggtggacctgcggcccaagggcctggatggagctcgggctgagcgggtgctagagcttgtatccatcactgccaacaagaacacctgtcctggagaccgaagtgccatcacaccgggcggcctgcggcttggggccccagccttaacttctcgacagttccgtgaggatgacttccggagagttgtggactttatagatgaaggggtcaacattggcttagaggtgaagagcaagactggtgagtgagcaagaaggagccccgggccagccagttcccactcactgtctgctccctcccccagctgatctcactgccttccctagagctctgaccacttgtttcctcaccctctctctctagccaagctccaggatttcaaatccttcctgcttaaggactcagaaacaagtcagcgtctggccaacctcaggcaacgggtggagcagtttgccagggccttccccatgcctggttttgatgagcattgaaggcacctgggaaatgaggcccacagactcaaagttactctccttccccctacctgggccagtgaaatagaaagcctttctattttttggtgcgggagggaagacctctcacttagggcaagagccaggtatagtctcccttcccagaatttgtaactgagaagatcttttctttttcctttttttggtaacaagacttagaaggagggcccaggcactttctgtttgaacccctgtcatgatcacagtgtcagagacgcgtcctctttcttggggaagttgaggagtgcccttcagagccagtagcaggcaggggtgggtaggcaccctcct

SEQ ID NO: 180055 - DNA, 576 bp, Homo sapiens
  Payload ID: 15464
  Gene Symbol: SHMT2
  Gene Name: serine hydroxymethyltransferase 2 (mitochondrial)
  ENST ID: ENST00000557269
  CDS Start-End: 245-403
agagttggtggctggacctcctgcgacttccgagttgcgatgctgtacttctctttgttttgggcggctcggatactatgggggagcagaggtggtggatgaaattgagctgctgtgccagcgccgggccttggaagcctttgacctggatcctgcacagtggggagtcaatgtccagccctactccgggtccccagccaacctggccgtctacacagcccttctgcaacctcacgaccggatcatggggctggacctgcccgatgggggccatctcacccacggctacatgtctgacgtcaagcggatatcagccacgtccatcttcttcgagtctatgccctataagctcaacggctttagctgtttgtgtgtctgtccagcccaaaactggcctcattgactacaaccagctggcactgactgctcgacttttccggccacggctcatcatagctggcaccagcgcctatgctcgcctcattgactacgcccgcatgagagaggtgtgtgatgaagtcaaagcacacctgctggcagacatggcccacatcagtggcctggtggctgccaagg

SEQ ID NO: 180056 - DNA, 1904 bp, Homo sapiens
  Payload ID: 15464
  Gene Symbol: SHMT2
  Gene Name: serine hydroxymethyltransferase 2 (mitochondrial)
  ENST ID: ENST00000557433
  CDS Start-End: 21-536
cctgcgacttccgagttgcgatgctgtacttctctttgttttgggcggctcggcctctgcagagatgtgggcagctggtcaggatggccattcgggctcagcacagcaacgcagcccagactcagactggggaagcaaacaggggctggacaggccaggagagcctgtcggacagtgatcctgagatgtgggagttgctgcagagggagaaggacaggcagtgtcgtggcctggagctcattgcctcagagaacttctgcagccgagctgcgctggaggccctggggtcctgtctgaacaacaagtactcggagggttatcctggcaagagatactatgggggagcagaggtggtggatgaaattgagctgctgtgccagcgccgggccttggaagcctttgacctggatcctgcacagtggggagtcaatgtccagccctactccgggtccccagccaacctggccgtctacacagcccttctgcaacctcacgaccggatcatggggctggacctgcccgatgggggccagtgatctcacccacggctacatgtctgacgtcaagcggatatcagccacgtccatcttcttcgagtctatgccctataagctcaaccccaaaactggcctcattgactacaaccagctggcactgactgctcgacttttccggccacggctcatcatagctggcaccagcgcctatgctcgcctcattgactacgcccgcatgagagaggtgtgtgatgaagtcaaagcacacctgctggcagacatggcccacatcagtggcctggtggctgccaaggtgattccctcgcctttcaagcacgcggacatcgtcaccaccactactcacaagactcttcgaggggccaggtcagggctcatcttctaccggaaaggggtgaaggctgtggaccccaagactggccgggagatcccttacacatttgaggaccgaatcaactttgccgtgttcccatccctgcaggggggcccccacaatcatgccattgctgcagtagctgtggccctaaagcaggcctgcacccccatgttccgggagtactccctgcaggttctgaagaatgctcgggccatggcagatgccctgctagagcgaggctactcactggtatcaggtggtactgacaaccacctggtgctggtggacctgcggcccaagggcctggatggagctcgggctgagcgggtgctagagcttgtatccatcactgccaacaagaacacctgtcctggagaccgaagtgccatcacaccgggcggcctgcggcttggggccccagccttaacttctcgacagttccgtgaggatgacttccggagagttgtggactttatagatgaaggggtcaacattggcttagaggtgaagagcaagactgccaagctccaggatttcaaatccttcctgcttaaggactcagaaacaagtcagcgtctggccaacctcaggcaacgggtggagcagtttgccagggccttccccatgcctggttttgatgagcattgaaggcacctgggaaatgaggcccacagactcaaagttactctccttccccctacctgggccagtgaaatagaaagcctttctattttttggtgcgggagggaagacctctcacttagggcaagagccaggtatagtctcccttcccagaatttgtaactgagaagatcttttctttttcctttttttggtaacaagacttagaaggagggcccaggcactttctgtttgaacccctgtcatgatcacagtgtcagagacgcgtcctctttcttggggaagttgaggagtgcccttcagagccagtagcaggcaggggtgggtaggcaccctccttcctgtttttatctaataaaatgctaacctgc

SEQ ID NO: 180057 - DNA, 579 bp, Homo sapiens
  Payload ID: 15464
  Gene Symbol: SHMT2
  Gene Name: serine hydroxymethyltransferase 2 (mitochondrial)
  ENST ID: ENST00000554310
  CDS Start-End: 100-579
agatgatgcaaccgagcttcactgcttgcatcaggcaggggtcccggcggcagtgagggctggaaggagcctctgcagagatgtgggcagctggtcaggatggccattcgggctcagcacagcaacgcagcccagactcagactggggaagcaaacaggggctggacaggccaggagagcctgtcggacagtgatcctgagatgtgggagttgctgcagagggagaaggacaggcagtgtcgtggcctggagctcattgcctcagagaacttctgcagccgagctgcgctggaggccctggggtcctgtctgaacaacaagtactcggagggttatcctggcaagagatactatgggggagcagaggtggtggatgaaattgagctgctgtgccagcgccgggccttggaagcctttgacctggatcctgcacagtggggagtcaatgtccagccctactccgggtccccagccaacctggccgtctacacagcccttctgcaacctcacgaccggatcatggggctggacctgcccgatgggggccatctcacccacggctacatgtctgacgtcaag

SEQ ID NO: 180058 - DNA, 1659 bp, Homo sapiens
  Payload ID: 15464
  Gene Symbol: SHMT2
  Gene Name: serine hydroxymethyltransferase 2 (mitochondrial)
  ENST ID: ENST00000557348
  CDS Start-End: 173-370
aaatgagcggagttttcggcctggtctcacaagctgagcctttccggccagctctgagccctgcagatgatgcaaccgagcttcactgcttgcatcaggcaggggtcccggcggcagtgagggctggaaggaggtggaacggcctctgcagagatgtgggcagctggtcaggatggccattcgggctcagcacagcaacgcagcccagactcagactggggaagcaaacaggggctggacaggccaggagagcctgtcggacagtgatcctgagatgtgggagttgctgcagagggagaaggacaggcagtgtcgtggcctggagctcattgcctcagagatactatgggggagcagaggtggtggatgaaattgagctgctgtgccagcgccgggccttggaagcctttgacctggatcctgcacagtggggagtcaatgtccagccctactccgggtccccagccaacctggccgtctacacagcccttctgcaacctcacgaccggatcatggggctggacctgcccgatgggggccatctcacccacggctacatgtctgacgtcaagcggatatcagccacgtccatcttcttcgagtctatgccctataagctcaaccccaaaactggcctcattgactacaaccagctggcactgactgctcgacttttccggccacggctcatcatagctggcaccagcgcctatgctcgcctcattgactacgcccgcatgagagaggtgtgtgatgaagtcaaagcacacctgctggcagacatggcccacatcagtggcctggtggctgccaaggtgattccctcgcctttcaagcacgcggacatcgtcaccaccactactcacaagactcttcgaggggccaggtcagggctcatcttctaccggaaaggggtgaaggctgtggaccccaagactggccgggagatcccttacacatttgaggaccgaatcaactttgccgtgttcccatccctgcaggggggcccccacaatcatgccattgctgcagtagctgtggccctaaagcaggcctgcacccccatgttccgggagtactccctgcaggttctgaagaatgctcgggccatggcagatgccctgctagagcgaggctactcactggtatcaggtggtactgacaaccacctggtgctggtggacctgcggcccaagggcctggatggagctcgggctgagcgggtgctagagcttgtatccatcactgccaacaagaacacctgtcctggagaccgaagtgccatcacaccgggcggcctgcggcttggggccccagccttaacttctcgacagttccgtgaggatgacttccggagagttgtggactttatagatgaaggggtcaacattggcttagaggtgaagagcaagactgccaagctccaggatttcaaatccttcctgcttaaggactcagaaacaagtcagcgtctggccaacctcaggcaacgggtggagcagtttgccagggccttccccatgcctggttttgatgagcattgaaggcacctgggaaatgaggcccacagactcaaagttactctccttccccctacctgggccagtgaaatagaaagcctttctattttttggtgcgggagggaagacctctcactta

SEQ ID NO: 180059 - DNA, 964 bp, Homo sapiens
  Payload ID: 15464
  Gene Symbol: SHMT2
  Gene Name: serine hydroxymethyltransferase 2 (mitochondrial)
  ENST ID: ENST00000555634
  CDS Start-End: 262-964
gcttgctgccctagaccagagttggtggctggacctcctgcgacttccgagttgcgatgctgtacttctctttgttttgggcggctcggatactatgggggagcagaggtggtggatgaaattgagctgctgtgccagcgccgggccttggaagcctttgacctggatcctgcacagtggggagtcaatgtccagccctactccgggtccccagccaacctggccgtctacacagcccttctgcaacctcacgaccggatcatggggctggacctgcccgatgggggccatctcacccacggctacatgtctgacgtcaagcggatatcagccacgtccatcttcttcgagtctatgccctataagctcaaccccaaaactggcctcattgactacaaccagctggcactgactgctcgacttttccggccacggctcatcatagctggcaccagcgcctatgctcgcctcattgactacgcccgcatgagagaggtgtgtgatgaagtcaaagcacacctgctggcagacatggcccacatcagtggcctggtggctgccaaggtgattccctcgcctttcaagcacgcggacatcgtcaccaccactactcacaagactcttcgaggggccaggtcagggctcatcttctaccggaaaggggtgaaggctgtggaccccaagactggccgggagatcccttacacatttgaggaccgaatcaactttgccgtgttcccatccctgcaggggggcccccacaatcatgccattgctgcagtagctgtggccctaaagcaggcctgcacccccatgttccgggagtactccctgcaggttctgaagaatgctcgggccatggcagatgccctgctagagcgaggctactcactggtatcaggtggtactgacaaccacctggtgctggtggacctgcggcccaagggcctggatggagctcggg

SEQ ID NO: 180060 - DNA, 2215 bp, Homo sapiens
  Payload ID: 15464
  Gene Symbol: SHMT2
  Gene Name: serine hydroxymethyltransferase 2 (mitochondrial)
  ENST ID: ENST00000556825
  CDS Start-End: 207-467
ataaagaaaaaagcggtgagtgggcgaactacaattcccaaaaggccacaaaggggccaccactacgcatgcgtagatccctcccgttagctttggcgcctcagcgagctcttctcgcgcatgcgttctccgaacggtcttcttccgacagcttgctgccctagaccagagttggtggctggacctcctgcgacttccgagttgcgatgctgtacttctctttgttttgggcggctcggcctctgcagagatgtgggcagctggtcaggatggccattcgggctcagcacagcaacgcagcccagactcagactggggaagcaaacaggggctggacaggccaggagagcctgtcggacagtgatcctgagatgtgggagttgctgcagagggagaaggacaggcagtgtcgtggcctggagctcattgcctcagagatactatgggggagcagaggtggtggatgaaattgagctgctgtgccagcgccgggccttggaagcctttgacctggatcctgcacagtggggagtcaatgtccagccctactccgggtccccagccaacctggccgtctacacagcccttctgcaacctcacgaccggatcatggggctggacctgcccgatgggggccatctcacccacggctacatgtctgacgtcaagcggatatcagccacgtccatcttcttcgagtctatgccctataagctcaaccccaaaactggcctcattgactacaaccagctggcactgactgctcgacttttccggccacggctcatcatagctggcaccagcgcctatgctcgcctcattgactacgcccgcatgagagaggtgtgtgatgaagtcaaagcacacctgctggcagacatggcccacatcagtggcctggtggctgccaaggtgattccctcgcctttcaagcacgcggacatcgtcaccaccactactcacaagactcttcgaggggccaggtcagggctcatcttctaccggaaaggggtgaaggctgtggaccccaagactggccgggagatcccttacacatttgaggaccgaatcaactttgccgtgttcccatccctgcaggggggcccccacaatcatgccattgctgcagtagctgtggccctaaagcaggcctgcacccccatgttccgggagtactccctgcaggttctgaagaatgctcgggccatggcagatgccctgctagagcgaggctactcactggtatcaggtggtactgacaaccacctggtgctggtggacctgcggcccaagggcctggatggagctcgggctgagcgggtgctagagcttgtatccatcactgccaacaagaacacctgtcctggagaccgaagtgccatcacaccgggcggcctgcggcttggggccccagccttaacttctcgacagttccgtgaggatgacttccggagagttgtggactttatagatgaaggggtcaacattggcttagaggtgaagagcaagactgccaagctccaggatttcaaatccttcctgcttaaggactcagaaacaagtcagcgtctggccaacctcaggcaacgggtggagcagtttgccagggccttccccatgcctggttttgatgagcattgaaggcacctgggaaatgaggcccacagactcaaagttactctccttccccctacctgggccagtgaaatagaaagcctttctattttttggtgcgggagggaagacctctcacttagggcaagagccaggtatagtctcccttcccagaatttgtaactgagaagatcttttctttttcctttttttggtaacaagacttagaaggagggcccaggcactttctgtttgaacccctgtcatgatcacagtgtcagagacgcgtcctctttcttggggaagttgaggagtgcccttcagagccagtagcaggcaggggtgggtaggcaccctccttcctgtttttatctaataaaatgctaacctgccctgagtttccattactgtgggtggggttcccctgggccaaacagtgatttgtctccctcaatgtgtacaccgctccgctcccaccaccgctaccacaaggacccccggggctgcagcctcctctttctgtctctgatcagagccgacaccagacgtgattagcaggcgcagcaaattcaatttgttaaatgaaattgtattttgccca

SEQ ID NO: 180061 - DNA, 2152 bp, Homo sapiens
  Payload ID: 15464
  Gene Symbol: SHMT2
  Gene Name: serine hydroxymethyltransferase 2 (mitochondrial)
  ENST ID: ENST00000553837
  CDS Start-End: 308-886
gcccttgccaactctgcctcttcccccgctgactggggtatcagtttatggtgccctgcaggaagaccctcttgttcctgtgggtgggaaggttctggaatctcagttgccctctctggagttggggagacataggcttttggaggacaagctttgcagagtggttcatggagtgaggtggtgggagatttctgaggtgcggtgcggtgaatggagcaaatcagaaccaccccttggacgttgatctcaagcttggctccagaactggcttttgaagcctctgcagagatgtgggcagctggtcaggatggccattcgggctcagcacagcaacgcagcccagactcagactggggaagcaaacaggggctggacaggccaggagagcctgtcggacagtgatcctgagatgtgggagttgctgcagagggagaaggacaggcagtgtcgtggcctggagctcattgcctcagagaacttctgcagccgagctgcgctggaggccctggggtcctgtctgaacaacaagtactcggagggttatcctggcaagagatactatgggggagcagaggtggtggatgaaattgagctgctgtgccagcgccgggccttggaagcctttgacctggatcctgcacagtggggagtcaatgtccagccctactccgggtccccagccaacctggccgtctacacagcccttctgcaacctcacgaccggatcatggggctggacctgcccgatgggggccatctcacccacggctacatgtctgacgtcaagcggatatcagccacgtccatcttcttcgagtctatgccctataagctcaacggctttagctgtttgtgtgtctgtccagcccaaaactggcctcattgactacaaccagctggcactgactgctcgacttttccggccacggctcatcatagctggcaccagcgcctatgctcgcctcattgactacgcccgcatgagagaggtgtgtgatgaagtcaaagcacacctgctggcagacatggcccacatcagtggcctggtggctgccaaggtgattccctcgcctttcaagcacgcggacatcgtcaccaccactactcacaagactcttcgaggggccaggtcagggctcatcttctaccggaaaggggtgaaggctgtggaccccaagactggccgggagatcccttacacatttgaggaccgaatcaactttgccgtgttcccatccctgcaggggggcccccacaatcatgccattgctgcagtagctgtggccctaaagcaggcctgcacccccatgttccgggagtactccctgcaggttctgaagaatgctcgggccatggcagatgccctgctagagcgaggctactcactggtatcaggtggtactgacaaccacctggtgctggtggacctgcggcccaagggcctggatggagctcgggctgagcgggtgctagagcttgtatccatcactgccaacaagaacacctgtcctggagaccgaagtgccatcacaccgggcggcctgcggcttggggccccagccttaacttctcgacagttccgtgaggatgacttccggagagttgtggactttatagatgaaggggtcaacattggcttagaggtgaagagcaagactgccaagctccaggatttcaaatccttcctgcttaaggactcagaaacaagtcagcgtctggccaacctcaggcaacgggtggagcagtttgccagggccttccccatgcctggttttgatgagcattgaaggcacctgggaaatgaggcccacagactcaaagttactctccttccccctacctgggccagtgaaatagaaagcctttctattttttggtgcgggagggaagacctctcacttagggcaagagccaggtatagtctcccttcccagaatttgtaactgagaagatcttttctttttcctttttttggtaacaagacttagaaggagggcccaggcactttctgtttgaacccctgtcatgatcacagtgtcagagacgcgtcctctttcttggggaagttgaggagtgcccttcagagccagtagcaggcaggggtgggtaggcaccctccttcctgtttttatctaataaaatgctaacctgc

SEQ ID NO: 180062 - DNA, 572 bp, Homo sapiens
  Payload ID: 15464
  Gene Symbol: SHMT2
  Gene Name: serine hydroxymethyltransferase 2 (mitochondrial)
  ENST ID: ENST00000556737
  CDS Start-End: 131-572
aactggcagcttggtgtggccttagaagcatgagtgagggtggccgggagacgatttgtctggactgttgtgatttcaccctgacttttcctgccttcagcctctgcagagatgtgggcagctggtcaggatggccattcgggctcagcacagcaacgcagcccagactcagactggggaagcaaacaggggctggacaggccaggagagcctgtcggacagtgatcctgagatgtgggagttgctgcagagggagaaggacaggcagtgtcgtggcctggagctcattgcctcagagaacttctgcagccgagctgcgctggaggccctggggtcctgtctgaacaacaagtactcggagggttatcctggcaagagatactatgggggagcagaggtggtggatgaaattgagctgctgtgccagcgccgggccttggaagcctttgacctggatcctgcacagtggggagtcaatgtccagccctactccgggtccccagccaacctggccgtctacacagcccttctgcaacctcacgaccggatcatggggctggacctgcccgatg

SEQ ID NO: 180063 - DNA, 895 bp, Homo sapiens
  Payload ID: 15464
  Gene Symbol: SHMT2
  Gene Name: serine hydroxymethyltransferase 2 (mitochondrial)
  ENST ID: ENST00000555563
  CDS Start-End: 31-291
ggctggacctcctgcgacttccgagttgcgatgctgtacttctctttgttttgggcggctcggcctctgcagagatgtgggcagctggtcaggatggccattcgggctcagcacagcaacgcagcccagactcagactggggaagcaaacaggggctggacaggccaggagagcctgtcggacagtgatcctgagatgtgggagttgctgcagagggagaaggacaggcagtgtcgtggcctggagctcattgcctcagagatactatgggggagcagaggtggtggatgaaattgagctgctgtgccagcgccgggccttggaagcctttgacctggatcctgcacagtggggagtcaatgtccagccctactccgggtccccagccaacctggccgtctacacagcccttctgcaacctcacgaccggatcatggggctggacctgcccgatgggggccatctcacccacggctacatgtctgacgtcaagcggatatcagccacgtccatcttcttcgagtctatgccctataagctcaacggctttagctgtttgtgtgtctgtccagcccaaaactggcctcattgactacaaccagctggcactgactgctcgacttttccggccacggctcatcatagctggcaccagcgcctatgctcgcctcattgactacgcccgcatgagagaggtgtgtgatgaagtcaaagcacacctgctggcagacatggcccacatcagtggcctggtggctgccaaggtgattccctcgcctttcaagcacgcggacatcgtcaccaccactactcacaagactcttcgaggggccaggtcagggctcatcttctaccggaaaggggtgaaggctgtggaccccaagactggccggga

SEQ ID NO: 180064 - DNA, 2311 bp, Homo sapiens
  Payload ID: 15464
  Gene Symbol: SHMT2
  Gene Name: serine hydroxymethyltransferase 2 (mitochondrial)
  ENST ID: ENST00000555774
  CDS Start-End: 338-535
attgctctacaatctgtggcctcagcccttgccaactctgcctcttcccccgctgactggggtatcagtttatggtgccctgcaggaagaccctcttgttcctgtgggtgggaaggttctggaatctcagttgccctctctggagttggggagacataggcttttggaggacaagctttgcagagtggttcatggagtgaggtggtgggagatttctgaggtgcggtgcggtgaatggagcaaatcagaaccaccccttggacgttgatctcaagcttggctccagaactggcttttgaaggtggagcctctgcagagatgtgggcagctggtcaggatggccattcgggctcagcacagcaacgcagcccagactcagactggggaagcaaacaggggctggacaggccaggagagcctgtcggacagtgatcctgagatgtgggagttgctgcagagggagaaggacaggcagtgtcgtggcctggagctcattgcctcagagatactatgggggagcagaggtggtggatgaaattgagctgctgtgccagcgccgggccttggaagcctttgacctggatcctgcacagtggggagtcaatgtccagccctactccgggtccccagccaacctggccgtctacacagcccttctgcaacctcacgaccggatcatggggctggacctgcccgatgggggccatctcacccacggctacatgtctgacgtcaagcggatatcagccacgtccatcttcttcgagtctatgccctataagctcaacggctttagctgtttgtgtgtctgtccagcccaaaactggcctcattgactacaaccagctggcactgactgctcgacttttccggccacggctcatcatagctggcaccagcgcctatgctcgcctcattgactacgcccgcatgagagaggtgtgtgatgaagtcaaagcacacctgctggcagacatggcccacatcagtggcctggtggctgccaaggtgattccctcgcctttcaagcacgcggacatcgtcaccaccactactcacaagactcttcgaggggccaggtcagggctcatcttctaccggaaaggggtgaaggctgtggaccccaagactggccgggagatcccttacacatttgaggaccgaatcaactttgccgtgttcccatccctgcaggggggcccccacaatcatgccattgctgcagtagctgtggccctaaagcaggcctgcacccccatgttccgggagtactccctgcaggttctgaagaatgctcgggccatggcagatgccctgctagagcgaggctactcactggtatcaggtggtactgacaaccacctggtgctggtggacctgcggcccaagggcctggatggagctcgggctgagcgggtgctagagcttgtatccatcactgccaacaagaacacctgtcctggagaccgaagtgccatcacaccgggcggcctgcggcttggggccccagccttaacttctcgacagttccgtgaggatgacttccggagagttgtggactttatagatgaaggggtcaacattggcttagaggtgaagagcaagactgccaagctccaggatttcaaatccttcctgcttaaggactcagaaacaagtcagcgtctggccaacctcaggcaacgggtggagcagtttgccagggccttccccatgcctggttttgatgagcattgaaggcacctgggaaatgaggcccacagactcaaagttactctccttccccctacctgggccagtgaaatagaaagcctttctattttttggtgcgggagggaagacctctcacttagggcaagagccaggtatagtctcccttcccagaatttgtaactgagaagatcttttctttttcctttttttggtaacaagacttagaaggagggcccaggcactttctgtttgaacccctgtcatgatcacagtgtcagagacgcgtcctctttcttggggaagttgaggagtgcccttcagagccagtagcaggcaggggtgggtaggcaccctccttcctgtttttatctaataaaatgctaacctgccctgagtttccattactgtgggtggggttcccctgggccaaacagtgatttgtctccctcaatgtgtacaccgctccgctcccaccaccgctaccacaaggacccccggggctgcagcctcctctttctgtctctgatcagagccgacaccagacgtgattagcaggcgcagcaaattcaatttgttaaatgaaattgtattttgccca

SEQ ID NO: 180065 - DNA, 600 bp, Homo sapiens
  Payload ID: 15464
  Gene Symbol: SHMT2
  Gene Name: serine hydroxymethyltransferase 2 (mitochondrial)
  ENST ID: ENST00000555773
  CDS Start-End: 152-600
acctgcattgctctacaatctgtggcctcagcccttgccaactctgcctcttcccccgctgactggggtatcagtttatggtgccctgcaggaagaccctcttgttcctgtgggtgggaagcctctgcagagatgtgggcagctggtcaggatggccattcgggctcagcacagcaacgcagcccagactcagactggggaagcaaacaggggctggacaggccaggagagcctgtcggacagtgatcctgagatgtgggagttgctgcagagggagaaggacaggcagtgtcgtggcctggagctcattgcctcagagaacttctgcagccgagctgcgctggaggccctggggtcctgtctgaacaacaagtactcggagggttatcctggcaagagatactatgggggagcagaggtggtggatgaaattgagctgctgtgccagcgccgggccttggaagcctttgacctggatcctgcacagtggggagtcaatgtccagccctactccgggtccccagccaacctggccgtctacacagcccttctgcaacctcacgaccggatcatggggctggacctgcccgatgggggcca

SEQ ID NO: 180066 - DNA, 768 bp, Homo sapiens
  Payload ID: 15464
  Gene Symbol: SHMT2
  Gene Name: serine hydroxymethyltransferase 2 (mitochondrial)
  ENST ID: ENST00000556689
  CDS Start-End: 56-768
cttgctgccctagaccagagttggtggctggacctcctgcgacttccgagttgcgatgctgtacttctctttgttttgggcggctcggcctctgcagagatgtgggcagctggtcaggatggccattcgggctcagcacagcaacgcagcccagactcagactggggaagcaaacaggggctggacaggccaggagagcctgtcggacagtgatcctgagatgtgggagttgctgcagagggagaaggacaggcagtgtcgtggcctggagctcattgcctcagagaacttctgcagccgagctgcgctggaggccctggggtcctgtctgaacaacaagtactcggagggttatcctggcaagagatactatgggggagcagaggtggtggatgaaattgagctgctgtgccagcgccgggccttggaagcctttgacctggatcctgcacagtggggagtcaatgtccagccctactccgggtccccagccaacctggccgtctacacagcccttctgcaacctcacgaccggatcatggggctggacctgcccgatgggggccatctcacccacggctacatgtctgacgtcaagcggatatcagccacgtccatcttcttcgagtctatgccctataagctcaacgtgtgtgatgaagtcaaagcacacctgctggcagacatggcccacatcagtggcctggtggctgccaaggtgattccctcgcctttcaagcacgcggacatcgtcaccaccactactca

SEQ ID NO: 180067 - DNA, 569 bp, Homo sapiens
  Payload ID: 15464
  Gene Symbol: SHMT2
  Gene Name: serine hydroxymethyltransferase 2 (mitochondrial)
  ENST ID: ENST00000557427
  CDS Start-End: 93-569
actctcgggcagatccccacccccaccactcccacacagctcttcctcacggactgctaaagcctctgcagagatgtgggcagctggtcaggatggccattcgggctcagcacagcaacgcagcccagactcagactggggaagcaaacaggggctggacaggccaggagagcctgtcggacagtgatcctgagatgtgggagttgctgcagagggagaaggacaggcagtgtcgtggcctggagctcattgcctcagagaacttctgcagccgagctgcgctggaggccctggggtcctgtctgaacaacaagtactcggagggttatcctggcaagagatactatgggggagcagaggtggtggatgaaattgagctgctgtgccagcgccgggccttggaagcctttgacctggatcctgcacagtggggagtcaatgtccagccctactccgggtccccagccaacctggccgtctacacagcccttctgcaacctcacgaccggatcatggggctggacctgcccgatgggggccatctcacccacggctacatgtctgacgtc

SEQ ID NO: 180068 - DNA, 562 bp, Homo sapiens
  Payload ID: 15464
  Gene Symbol: SHMT2
  Gene Name: serine hydroxymethyltransferase 2 (mitochondrial)
  ENST ID: ENST00000553529
  CDS Start-End: 121-562
agatgatgcaaccgagcttcactgcttgcatcaggcaggggtcccggcggcagtgagggctggaaggaggtggaacgggtagggggctaacctctgcagagatgtgggcagctggtcaggatggccattcgggctcagcacagcaacgcagcccagactcagactggggaagcaaacaggggctggacaggccaggagagcctgtcggacagtgatcctgagatgtgggagttgctgcagagggagaaggacaggcagtgtcgtggcctggagctcattgcctcagagaacttctgcagccgagctgcgctggaggccctggggtcctgtctgaacaacaagtactcggagggttatcctggcaagagatactatgggggagcagaggtggtggatgaaattgagctgctgtgccagcgccgggccttggaagcctttgacctggatcctgcacagtggggagtcaatgtccagccctactccgggtccccagccaacctggccgtctacacagcccttctgcaacctcacgaccggatcatggggctggacctgcccgatg

SEQ ID NO: 180069 - DNA, 879 bp, Homo sapiens
  Payload ID: 15464
  Gene Symbol: SHMT2
  Gene Name: serine hydroxymethyltransferase 2 (mitochondrial)
  ENST ID: ENST00000554604
  CDS Start-End: 100-678
actctgcctcttcccccgctgactggggtatcagtttatggtgccctgcaggaagaccctcttgttcctcctctgcagagatgtgggcagctggtcaggatggccattcgggctcagcacagcaacgcagcccagactcagactggggaagcaaacaggggctggacaggccaggagagcctgtcggacagtgatcctgagatgtgggagttgctgcagagggagaaggacaggcagtgtcgtggcctggagctcattgcctcagagaacttctgcagccgagctgcgctggaggccctggggtcctgtctgaacaacaagtactcggagggttatcctggcaagagatactatgggggagcagaggtggtggatgaaattgagctgctgtgccagcgccgggccttggaagcctttgacctggatcctgcacagtggggagtcaatgtccagccctactccgggtccccagccaacctggccgtctacacagcccttctgcaacctcacgaccggatcatggggctggacctgcccgatgggggccatctcacccacggctacatgtctgacgtcaagcggatatcagccacgtccatcttcttcgagtctatgccctataagctcaacggctttagctgtttgtgtgtctgtccagcccaaaactggcctcattgactacaaccagctggcactgactgctcgacttttccggccacggctcatcatagctggcaccagcgcctatgctcgcctcattgactacgcccgcatgagagaggtgtgtgatgaagtcaaagcacacctgctggcagacatggcccacatcagtggcctggtggctgccaaggtgattccctcgcctttcaagcacgcgga

SEQ ID NO: 180070 - DNA, 1918 bp, Homo sapiens
  Payload ID: 15464
  Gene Symbol: SHMT2
  Gene Name: serine hydroxymethyltransferase 2 (mitochondrial)
  Uniprot ID: P34897
  ENST ID: ENST00000557487
  CDS Start-End: 69-1553
cttcttccgacagcttgctgccctagaccagagttggtggctggacctcctgcgacttccgagttgcgatgctgtacttctctttgttttgggcggctcggcctctgcagagatgtgggcagctggtcaggatggccattcgggctcagcacagcaacgcagcccagactcagactggggaagcaaacaggggctggacaggccaggagagcctgtcggacagtgatcctgagatgtgggagttgctgcagagggagaaggacaggcagtgtcgtggcctggagctcattgcctcagagaacttctgcagccgagctgcgctggaggccctggggtcctgtctgaacaacaagtactcggagggttatcctggcaagagatactatgggggagcagaggtggtggatgaaattgagctgctgtgccagcgccgggccttggaagcctttgacctggatcctgcacagtggggagtcaatgtccagccctactccgggtccccagccaacctggccgtctacacagcccttctgcaacctcacgaccggatcatggggctggacctgcccgatgggggccatctcacccacggctacatgtctgacgtcaagcggatatcagccacgtccatcttcttcgagtctatgccctataagctcaacctggcactgactgctcgacttttccggccacggctcatcatagctggcaccagcgcctatgctcgcctcattgactacgcccgcatgagagaggtgtgtgatgaagtcaaagcacacctgctggcagacatggcccacatcagtggcctggtggctgccaaggtgattccctcgcctttcaagcacgcggacatcgtcaccaccactactcacaagactcttcgaggggccaggtcagggctcatcttctaccggaaaggggtgaaggctgtggaccccaagactggccgggagatcccttacacatttgaggaccgaatcaactttgccgtgttcccatccctgcaggggggcccccacaatcatgccattgctgcagtagctgtggccctaaagcaggcctgcacccccatgttccgggagtactccctgcaggttctgaagaatgctcgggccatggcagatgccctgctagagcgaggctactcactggtatcaggtggtactgacaaccacctggtgctggtggacctgcggcccaagggcctggatggagctcgggctgagcgggtgctagagcttgtatccatcactgccaacaagaacacctgtcctggagaccgaagtgccatcacaccgggcggcctgcggcttggggccccagccttaacttctcgacagttccgtgaggatgacttccggagagttgtggactttatagatgaaggggtcaacattggcttagaggtgaagagcaagactgccaagctccaggatttcaaatccttcctgcttaaggactcagaaacaagtcagcgtctggccaacctcaggcaacgggtggagcagtttgccagggccttccccatgcctggttttgatgagcattgaaggcacctgggaaatgaggcccacagactcaaagttactctccttccccctacctgggccagtgaaatagaaagcctttctattttttggtgcgggagggaagacctctcacttagggcaagagccaggtatagtctcccttcccagaatttgtaactgagaagatcttttctttttcctttttttggtaacaagacttagaaggagggcccaggcactttctgtttgaacccctgtcatgatcacagtgtcagagacgcgtcctctttcttggggaagttgaggagtgcccttcagagccagtagcaggcaggggtgggtaggcaccctccttcctgtttttatctaataaaatgctaacctgc

SEQ ID NO: 180071 - DNA, 1885 bp, Homo sapiens
  Payload ID: 15464
  Gene Symbol: SHMT2
  Gene Name: serine hydroxymethyltransferase 2 (mitochondrial)
  ENST ID: ENST00000555116
  CDS Start-End: 84-281
acaatctgtggcctcagcccttgccaactctgcctcttcccccgctgactgggcctctgcagagatgtgggcagctggtcaggatggccattcgggctcagcacagcaacgcagcccagactcagactggggaagcaaacaggggctggacaggccaggagagcctgtcggacagtgatcctgagatgtgggagttgctgcagagggagaaggacaggcagtgtcgtggcctggagctcattgcctcagagatactatgggggagcagaggtggtggatgaaattgagctgctgtgccagcgccgggccttggaagcctttgacctggatcctgcacagtggggagtcaatgtccagccctactccgggtccccagccaacctggccgtctacacagcccttctgcaacctcacgaccggatcatggggctggacctgcccgatgggggccatctcacccacggctacatgtctgacgtcaagcggatatcagccacgtccatcttcttcgagtctatgccctataagctcaacggctttagctgtttgtgtgtctgtccagcccaaaactggcctcattgactacaaccagctggcactgactgctcgacttttccggccacggctcatcatagctggcaccagcgcctatgctcgcctcattgactacgcccgcatgagagaggtgtgtgatgaagtcaaagcacacctgctggcagacatggcccacatcagtggcctggtggctgccaaggtgattccctcgcctttcaagcacgcggacatcgtcaccaccactactcacaagactcttcgaggggccaggtcagggctcatcttctaccggaaaggggtgaaggctgtggaccccaagactggccgggagatcccttacacatttgaggaccgaatcaactttgccgtgttcccatccctgcaggggggcccccacaatcatgccattgctgcagtagctgtggccctaaagcaggcctgcacccccatgttccgggagtactccctgcaggttctgaagaatgctcgggccatggcagatgccctgctagagcgaggctactcactggtatcaggtggtactgacaaccacctggtgctggtggacctgcggcccaagggcctggatggagctcgggctgagcgggtgctagagcttgtatccatcactgccaacaagaacacctgtcctggagaccgaagtgccatcacaccgggcggcctgcggcttggggccccagccttaacttctcgacagttccgtgaggatgacttccggagagttgtggactttatagatgaaggggtcaacattggcttagaggtgaagagcaagactgccaagctccaggatttcaaatccttcctgcttaaggactcagaaacaagtcagcgtctggccaacctcaggcaacgggtggagcagtttgccagggccttccccatgcctggttttgatgagcattgaaggcacctgggaaatgaggcccacagactcaaagttactctccttccccctacctgggccagtgaaatagaaagcctttctattttttggtgcgggagggaagacctctcacttagggcaagagccaggtatagtctcccttcccagaatttgtaactgagaagatcttttctttttcctttttttggtaacaagacttagaaggagggcccaggcactttctgtttgaacccctgtcatgatcacagtgtcagagacgcgtcctctttcttggggaagttgaggagtgcccttcagagccagtagcaggcaggggtgggtaggcaccctccttcctgtttttatctaataaaatgctaacctgccctgagtttccattactgtgggtggggttcccctggg

SEQ ID NO: 180072 - DNA, 780 bp, Homo sapiens
  Payload ID: 15464
  Gene Symbol: SHMT2
  Gene Name: serine hydroxymethyltransferase 2 (mitochondrial)
  ENST ID: ENST00000554975
  CDS Start-End: 134-780
attgctctacaatctgtggcctcagcccttgccaactctgcctcttcccccgctgactggggtatcagtttatggtgccctgcaggaagaccctcttgttcctcctctgcagagatgtgggcagctggtcaggatggccattcgggctcagcacagcaacgcagcccagactcagactggggaagcaaacaggggctggacaggccaggagagcctgtcggacagtgatcctgagatgtgggagttgctgcagagggagaaggacaggcagtgtcgtggcctggagctcattgcctcagagaacttctgcagccgagctgcgctggaggccctggggtcctgtctgaacaacaagtactcggagggttatcctggcaagagatactatgggggagcagaggtggtggatgaaattgagctgctgtgccagcgccgggccttggaagcctttgacctggatcctgcacagtggggagtcaatgtccagccctactccgggtccccagccaacctggccgtctacacagcccttctgcaacctcacgaccggatcatggggctggacctgcccgatgggggccatctcacccacggctacatgtctgacgtcaagcggatatcagccacgtccatcttcttcgagtctatgccctataagctcaaccccaaaactggcctcattgactacaaccagctggcactgactgctcgacttttccggccacggctcatcatagctggcaccagcgcctatgctcgcctcattgactacgcccgcat

SEQ ID NO: 180073 - DNA, 1765 bp, Homo sapiens
  Payload ID: 15464
  Gene Symbol: SHMT2
  Gene Name: serine hydroxymethyltransferase 2 (mitochondrial)
  Uniprot ID: P34897
  ENST ID: ENST00000553474
  CDS Start-End: 124-1575
acggactgctaaaggtctcccctcccacctgcattgctctacaatctgtggcctcagcccttgccaactctgcctcttcccccgctgactgggcctctgcagagatgtgggcagctggtcaggatggccattcgggctcagcacagcaacgcagcccagactcagactggggaagcaaacaggggctggacaggccaggagagcctgtcggacagtgatcctgagatgtgggagttgctgcagagggagaaggacaggcagtgtcgtggcctggagctcattgcctcagagaacttctgcagccgagctgcgctggaggccctggggtcctgtctgaacaacaagtactcggagggttatcctggcaagagatactatgggggagcagaggtggtggatgaaattgagctgctgtgccagcgccgggccttggaagcctttgacctggatcctgcacagtggggagtcaatgtccagccctactccgggtccccagccaacctggccgtctacacagcccttctgcaacctcacgaccggatcatggggctggacctgcccgatgggggccatctcacccacggctacatgtctgacgtcaagcggatatcagccacgtccatcttcttcgagtctatgccctataagctcaaccccaaaactggcctcattgactacaaccagctggcactgactgctcgacttttccggccacggctcatcatagctggcaccagcgcctatgctcgcctcattgactacgcccgcatgagagaggtgtgtgatgaagtcaaagcacacctgctggcagacatggcccacatcagtggcctggtggctgccaaggtgattccctcgcctttcaagcacgcggacatcgtcaccaccactactcacaagactcttcgaggggccaggtcagggctcatcttctaccggaaaggggtgaaggctgtggaccccaagactggccgggagatcccttacacatttgaggaccgaatcaactttgccgtgttcccatccctgcaggggggcccccacaatcatgccattgctgcagtagctgtggccctaaagcaggcctgcacccccatgttccgggagtactccctgcaggttctgaagaatgctcgggccatggcagatgccctgctagagcgaggctactcactggtatcaggtggtactgacaaccacctggtgctggtggacctgcggcccaagggcctggatggagctcgggctgagcgggtgctagagcttgtatccatcactgccaacaagaacacctgtcctggagaccgaagtgccatcacaccgggcggcctgcggcttggggccccagccttaacttctcgacagttccgtgaggatgacttccggagagttgtggactttatagatgaaggggtcaacattggcttagaggtgaagagcaagactgccaagctccaggatttcaaatccttcctgcttaaggactcagaaacaagtcagcgtctggccaacctcaggcaacgggtggagcagtttgccagggccttccccatgcctggttttgatgagcattgaaggcacctgggaaatgaggcccacagactcaaagttactctccttccccctacctgggccagtgaaatagaaagcctttctattttttggtgcgggagggaagacctctcacttagggcaagagccaggtatagtctcccttcccagaatttgtaactgagaagatcttttctttttcctttttttggta

SEQ ID NO: 180074 - DNA, 3137 bp, Homo sapiens
  Payload ID: 15465
  Gene Symbol: SERINC1
  Gene Name: serine incorporator 1
  Uniprot ID: Q9NRX5
  ENST ID: ENST00000339697
  CDS Start-End: 86-1447
tcgcagatagtaaataatctcggaaaggcgagaaagaagctgtctccatcttgtctgtatccgctgctcttgtgacgttgtggagatggggagcgtcctggggctgtgctccatggcgagctggataccatgtttgtgtggaagtgccccgtgtttgctatgccgatgctgtcctagtggaaacaactccactgtaactagattgatctatgcacttttcttgcttgttggagtatgtgtagcttgtgtaatgttgataccaggaatggaagaacaactgaataagattcctggattttgtgagaatgagaaaggtgttgtcccttgtaacattttggttggctataaagctgtatatcgtttgtgctttggtttggctatgttctatcttcttctctctttactaatgatcaaagtgaagagtagcagtgatcctagagctgcagtgcacaatggattttggttctttaaatttgctgcagcaattgcaattattattggggcattcttcattccagaaggaacttttacaactgtgtggttttatgtaggcatggcaggtgccttttgtttcatcctcatacaactagtcttacttattgattttgcacattcatggaatgaatcgtgggttgaaaaaatggaagaagggaactcgagatgttggtatgcagccttgttatcagctacagctctgaattatctgctgtctttagttgctatcgtcctgttctttgtctactacactcatccagccagttgttcagaaaacaaggcgttcatcagtgtcaacatgctcctctgcgttggtgcttctgtaatgtctatactgccaaaaatccaagaatcacaaccaagatctggtttgttacagtcttcagtaattacagtctacacaatgtatttgacatggtcagctatgaccaatgaaccagaaacaaattgcaacccaagtctactaagcataattggctacaatacaacaagcactgtcccaaaggaagggcagtcagtccagtggtggcatgctcaaggaattataggactaattctctttttgttgtgtgtattttattccagcatccgtacttcaaacaatagtcaggttaataaactgactctaacaagtgatgaatctacattaatagaagatggtggagctagaagtgatggatcactggaggatggggacgatgttcaccgagctgtagataatgaaagggatggtgtcacttacagttattccttctttcacttcatgcttttcctggcttcactttatatcatgatgacccttaccaactggtacaggtatgaaccctctcgtgagatgaaaagtcagtggacagctgtctgggtgaaaatctcttccagttggattggcatcgtgctgtatgtttggacactcgtggcaccacttgttcttacaaatcgtgattttgactgagtgagacttctagcatgaaagtcccactttgattattgcttatttgaaaacagtattcccaacttttgtaaagttgtgtatgtttttgcttcccatgtaacttctccagtgttctggcatgaattagattttactgcttgtcattttgttattttcttaccaagtgcattgatatgtgaagtagaatgaattgcagaggaaagttttatgaatatggtgatgagttagtaaaagtggccattattgggcttattctctgctctatagttgtgaaatgaagagtaaaaacaaatttgtttgactattttaaaattatattagaccttaagctgttttagcaagcattaaagcaaatgtatggctgccttttgaaatatttgatgtgttgcctggcaggatactgcaaagaacatggtttattttaaaatttataaacaagtcacttaaatgccagttgtctgaaaaatcttataaggttttacccttgatacggaatttacacaggtagggagtgtttagtggacaatagtgtaggttatggatggaggtgtcggtactaaattgaataacgagtaaataatcttacttgggtagagatggcctttgccaacaaagtgaactgttttggttgttttaaactcatgaagtatgggttcagtggaaatgtttggaactctgaaggatttagacaaggttttgaaaaggataatcatgggttagaaggaagtgtttgaaagtcactttgaaagttagttttgggccagcacggtagctcacccttgtaatcccagcactttgggaggctgaggtgggtagattacttgagcccaggaattcaagaccagcctgggcaacatggtgaaaccctgtttctataaaaaataatctgggctttgtagcatatgcctgtggtcccagctactgaggaggctgaggtgggaggattgcttgagcccaggaggcagaggttgcagtgagccaaggtcacgtcactgcactctagcctgggcaacagagtaagacaaaaaaatatatatatattgaaaatcaaaggaggcaaaattttgacagggaaggaagtaactgcaaaacactaggctttagtaggtacttatataaaatctagtccagttctctcatttaaaaaaatgaagacactgaaatacagacttaaatagctcagatagctaattaggaaatttcaagttggccaataatagcattctctctgacatttaaaaataatttctattcaaaatacatgcataattgattttacacctcattactggtggataatttatgtgatgtggattgctggtgtccagcatgacccataaacaggtcagaagaatgatggaatgttttagaataaactcctgcttatagtatactacacagttcaaaagatgtttaaaatgcttttgtatttactgccatgtaattgaaatatatagattattgtaacctttcaacctgaaaatcaagcagtatgagagtttagttatttgtatgtgtcactagtgtctaatgaagcttttaaaatctacaatttcttctttaaaaatatttattaatgtgaatggaatataacaattcagcttaattccccaaccttattctgtgtgtagacattgtattccacaattttgaatggctgtgttttacctctaaataaatgaattcagag

SEQ ID NO: 180075 - DNA, 1997 bp, Homo sapiens
  Payload ID: 15466
  Gene Symbol: SERINC2
  Gene Name: serine incorporator 2
  Uniprot ID: Q96SA4
  ENST ID: ENST00000373709
  CDS Start-End: 151-1518
cgagcgccgccggaaagcgtcgagcggcttcggtaggtggggcggggccggggcggggccggggccggggaggggccaggcccggcacccggatcccgaggtccgcgccccgcgcccggcgccgggcgcccgaagccgggagccgccgccatgggggcctgcctgggagcctgctccctgctcagctgcgcgtcctgcctctgcggctctgccccctgcatcctgtgcagctgctgccccgccagccgcaactccaccgtgagccgcctcatcttcacgttcttcctcttcctgggggtgctggtgtccatcattatgctgagcccgggcgtggagagtcagctctacaagctgccctgggtgtgtgaggagggggccgggatccccaccgtcctgcagggccacatcgactgtggctccctgcttggctaccgcgctgtctaccgcatgtgcttcgccacggcggccttcttcttctttttcaccctgctcatgctctgcgtgagcagcagccgggacccccgggctgccatccagaatgggttttggttctttaagttcctgatcctggtgggcctcaccgtgggtgccttctacattcctgacggctccttcaccaacatctggttctacttcggcgtcgtgggctccttcctcttcatcctcatccagctggtgctgctcatcgactttgcgcactcctggaaccagcggtggctgggcaaggccgaggagtgcgattcccgtgcctggtacgcaggcctcttcttcttcactctcctcttctacttgctgtcgatcgcggccgtggcgctgatgttcatgtactacactgagcccagcggctgccacgagggcaaggtcttcatcagcctcaacctcaccttctgtgtctgcgtgtccatcgctgctgtcctgcccaaggtccaggacgcccagcccaactcgggtctgctgcaggcctcggtcatcaccctctacaccatgtttgtcacctggtcagccctatccagtatccctgaacagaaatgcaacccccatttgccaacccagctgggcaacgagacagttgtggcaggccccgagggctatgagacccagtggtgggatgccccgagcattgtgggcctcatcatcttcctcctgtgcaccctcttcatcagtctgcgctcctcagaccaccggcaggtgaacagcctgatgcagaccgaggagtgcccacctatgctagacgccacacagcagcagcagcaggtggcagcctgtgagggccgggcctttgacaacgagcaggacggcgtcacctacagctactccttcttccacttctgcctggtgctggcctcactgcacgtcatgatgacgctcaccaactggtacaagcccggtgagacccggaagatgatcagcacgtggaccgccgtgtgggtgaagatctgtgccagctgggcagggctgctcctctacctgtggaccctggtagccccactcctcctgcgcaaccgcgacttcagctgaggcagcctcacagcctgccatctggtgcctcctgccacctggtgcctctcggctcagtgacagccaacctgccccctccccacaccaatcagccaggctgagcccccacccctgccccagctccaggacctgcccctgagccgggccttctagtcgtagtgccttcagggtccgaggagcatcaggctcctgcagagccccatccccccgccacacccacacggtggagctgcctcttccttcccctcctccctgttgcccatactcagcatctcggatgaaagggctcccttgtcctcaggctccacgggagcggggctgctggagagagcggggaactcccaccacagtggggcatccggcactgaagccctggtgttcctggtcacgtcccccaggggaccctgcccacttcctggacttcgtgccttactgagtctctaagactttttctaataaacaagccagtgcgtgtacca

SEQ ID NO: 180076 - DNA, 2146 bp, Homo sapiens
  Payload ID: 15466
  Gene Symbol: SERINC2
  Gene Name: serine incorporator 2
  Uniprot ID: Q96SA4
  ENST ID: ENST00000373710
  CDS Start-End: 274-1668
tactttagcctttgctctgaaatcccatgcacgctttgtgaggaaggacagccttggttggggggtgtttatggggagagcagagtggatggtgcgtatgtgaatacctctccccagatgctcccccaatcccaagctctcattatcttatatgcatattcataagggatggccctgctctgtaaatgggtcagaagcaggaaatagaggccagtacagacagcgaagcccaagggataggagggctcaaagccggcacacatctgagtcctcatggacgggaggatgatgagaagcatgaggctgagagaggaggagtcacccggacccagccacacagcgtcctgcctctgcggctctgccccctgcatcctgtgcagctgctgccccgccagccgcaactccaccgtgagccgcctcatcttcacgttcttcctcttcctgggggtgctggtgtccatcattatgctgagcccgggcgtggagagtcagctctacaagctgccctgggtgtgtgaggagggggccgggatccccaccgtcctgcagggccacatcgactgtggctccctgcttggctaccgcgctgtctaccgcatgtgcttcgccacggcggccttcttcttctttttcaccctgctcatgctctgcgtgagcagcagccgggacccccgggctgccatccagaatgggttttggttctttaagttcctgatcctggtgggcctcaccgtgggtgccttctacattcctgacggctccttcaccaacatctggttctacttcggcgtcgtgggctccttcctcttcatcctcatccagctggtgctgctcatcgactttgcgcactcctggaaccagcggtggctgggcaaggccgaggagtgcgattcccgtgcctggtacgcaggcctcttcttcttcactctcctcttctacttgctgtcgatcgcggccgtggcgctgatgttcatgtactacactgagcccagcggctgccacgagggcaaggtcttcatcagcctcaacctcaccttctgtgtctgcgtgtccatcgctgctgtcctgcccaaggtccaggacgcccagcccaactcgggtctgctgcaggcctcggtcatcaccctctacaccatgtttgtcacctggtcagccctatccagtatccctgaacagaaatgcaacccccatttgccaacccagctgggcaacgagacagttgtggcaggccccgagggctatgagacccagtggtgggatgccccgagcattgtgggcctcatcatcttcctcctgtgcaccctcttcatcagtctgcgctcctcagaccaccggcaggtgaacagcctgatgcagaccgaggagtgcccacctatgctagacgccacacagcagcagcagcaggtggcagcctgtgagggccgggcctttgacaacgagcaggacggcgtcacctacagctactccttcttccacttctgcctggtgctggcctcactgcacgtcatgatgacgctcaccaactggtacaagcccggtgagacccggaagatgatcagcacgtggaccgccgtgtgggtgaagatctgtgccagctgggcagggctgctcctctacctgtggaccctggtagccccactcctcctgcgcaaccgcgacttcagctgaggcagcctcacagcctgccatctggtgcctcctgccacctggtgcctctcggctcagtgacagccaacctgccccctccccacaccaatcagccaggctgagcccccacccctgccccagctccaggacctgcccctgagccgggccttctagtcgtagtgccttcagggtccgaggagcatcaggctcctgcagagccccatccccccgccacacccacacggtggagctgcctcttccttcccctcctccctgttgcccatactcagcatctcggatgaaagggctcccttgtcctcaggctccacgggagcggggctgctggagagagcggggaactcccaccacagtggggcatccggcactgaagccctggtgttcctggtcacgtcccccaggggaccctgcccacttcctggacttcgtgccttactgagtctctaagactttttctaataaacaagccagtgcgtgtacc

SEQ ID NO: 180077 - DNA, 2062 bp, Homo sapiens
  Payload ID: 15466
  Gene Symbol: SERINC2
  Gene Name: serine incorporator 2
  Uniprot ID: Q96SA4
  ENST ID: ENST00000536384
  CDS Start-End: 202-1581
gtatttgtctggttcctgtctgtgtccgtcgttcgtccgactgtctttgtccgtctgctgtcttctgtccgtctgcccgtccgcccgtccgtccctcagtctctctgcggtccctttaccgtcctcagtctggctcgcgctgcctctcaggcacttccccagctcgccccggatcatctgggccccagcgcggagactgggatgggagcggagggagccccggactttcttagctgccctcgagtgaggcgggcgtcctgcctctgcggctctgccccctgcatcctgtgcagctgctgccccgccagccgcaactccaccgtgagccgcctcatcttcacgttcttcctcttcctgggggtgctggtgtccatcattatgctgagcccgggcgtggagagtcagctctacaagctgccctgggtgtgtgaggagggggccgggatccccaccgtcctgcagggccacatcgactgtggctccctgcttggctaccgcgctgtctaccgcatgtgcttcgccacggcggccttcttcttctttttcaccctgctcatgctctgcgtgagcagcagccgggacccccgggctgccatccagaatgggttttggttctttaagttcctgatcctggtgggcctcaccgtgggtgccttctacattcctgacggctccttcaccaacatctggttctacttcggcgtcgtgggctccttcctcttcatcctcatccagctggtgctgctcatcgactttgcgcactcctggaaccagcggtggctgggcaaggccgaggagtgcgattcccgtgcctggtacgcaggcctcttcttcttcactctcctcttctacttgctgtcgatcgcggccgtggcgctgatgttcatgtactacactgagcccagcggctgccacgagggcaaggtcttcatcagcctcaacctcaccttctgtgtctgcgtgtccatcgctgctgtcctgcccaaggtccaggacgcccagcccaactcgggtctgctgcaggcctcggtcatcaccctctacaccatgtttgtcacctggtcagccctatccagtatccctgaacagaaatgcaacccccatttgccaacccagctgggcaacgagacagttgtggcaggccccgagggctatgagacccagtggtgggatgccccgagcattgtgggcctcatcatcttcctcctgtgcaccctcttcatcagtctgcgctcctcagaccaccggcaggtgaacagcctgatgcagaccgaggagtgcccacctatgctagacgccacacagcagcagcagcaggtggcagcctgtgagggccgggcctttgacaacgagcaggacggcgtcacctacagctactccttcttccacttctgcctggtgctggcctcactgcacgtcatgatgacgctcaccaactggtacaagcccggtgagacccggaagatgatcagcacgtggaccgccgtgtgggtgaagatctgtgccagctgggcagggctgctcctctacctgtggaccctggtagccccactcctcctgcgcaaccgcgacttcagctgaggcagcctcacagcctgccatctggtgcctcctgccacctggtgcctctcggctcagtgacagccaacctgccccctccccacaccaatcagccaggctgagcccccacccctgccccagctccaggacctgcccctgagccgggccttctagtcgtagtgccttcagggtccgaggagcatcaggctcctgcagagccccatccccccgccacacccacacggtggagctgcctcttccttcccctcctccctgttgcccatactcagcatctcggatgaaagggctcccttgtcctcaggctccacgggagcggggctgctggagagagcggggaactcccaccacagtggggcatccggcactgaagccctggtgttcctggtcacgtcccccaggggaccctgcccacttcctggacttcgtgccttactgagtctctaagactttttctaataaacaagccagtgcgtgtaccatg

SEQ ID NO: 180078 - DNA, 2072 bp, Homo sapiens
  Payload ID: 15466
  Gene Symbol: SERINC2
  Gene Name: serine incorporator 2
  Uniprot ID: Q96SA4
  ENST ID: ENST00000536859
  CDS Start-End: 212-1591
agtatcacatagctgctgactgtgactgtgcttttgggggtgcaagagacagagctactctggccccatgcaggaggttcaaatctgggagtaaaggctgatgggctggccaggacaccaagaaatgaagctctttatccatgtcctcacttcatctcctcagtagtcccctcagatagctggggtaaaaaaacttatctttattttacagatgagaagcatgaggctgagagaggaggagtcacccggacccagccacacagcgtcctgcctctgcggctctgccccctgcatcctgtgcagctgctgccccgccagccgcaactccaccgtgagccgcctcatcttcacgttcttcctcttcctgggggtgctggtgtccatcattatgctgagcccgggcgtggagagtcagctctacaagctgccctgggtgtgtgaggagggggccgggatccccaccgtcctgcagggccacatcgactgtggctccctgcttggctaccgcgctgtctaccgcatgtgcttcgccacggcggccttcttcttctttttcaccctgctcatgctctgcgtgagcagcagccgggacccccgggctgccatccagaatgggttttggttctttaagttcctgatcctggtgggcctcaccgtgggtgccttctacattcctgacggctccttcaccaacatctggttctacttcggcgtcgtgggctccttcctcttcatcctcatccagctggtgctgctcatcgactttgcgcactcctggaaccagcggtggctgggcaaggccgaggagtgcgattcccgtgcctggtacgcaggcctcttcttcttcactctcctcttctacttgctgtcgatcgcggccgtggcgctgatgttcatgtactacactgagcccagcggctgccacgagggcaaggtcttcatcagcctcaacctcaccttctgtgtctgcgtgtccatcgctgctgtcctgcccaaggtccaggacgcccagcccaactcgggtctgctgcaggcctcggtcatcaccctctacaccatgtttgtcacctggtcagccctatccagtatccctgaacagaaatgcaacccccatttgccaacccagctgggcaacgagacagttgtggcaggccccgagggctatgagacccagtggtgggatgccccgagcattgtgggcctcatcatcttcctcctgtgcaccctcttcatcagtctgcgctcctcagaccaccggcaggtgaacagcctgatgcagaccgaggagtgcccacctatgctagacgccacacagcagcagcagcaggtggcagcctgtgagggccgggcctttgacaacgagcaggacggcgtcacctacagctactccttcttccacttctgcctggtgctggcctcactgcacgtcatgatgacgctcaccaactggtacaagcccggtgagacccggaagatgatcagcacgtggaccgccgtgtgggtgaagatctgtgccagctgggcagggctgctcctctacctgtggaccctggtagccccactcctcctgcgcaaccgcgacttcagctgaggcagcctcacagcctgccatctggtgcctcctgccacctggtgcctctcggctcagtgacagccaacctgccccctccccacaccaatcagccaggctgagcccccacccctgccccagctccaggacctgcccctgagccgggccttctagtcgtagtgccttcagggtccgaggagcatcaggctcctgcagagccccatccccccgccacacccacacggtggagctgcctcttccttcccctcctccctgttgcccatactcagcatctcggatgaaagggctcccttgtcctcaggctccacgggagcggggctgctggagagagcggggaactcccaccacagtggggcatccggcactgaagccctggtgttcctggtcacgtcccccaggggaccctgcccacttcctggacttcgtgccttactgagtctctaagactttttctaataaacaagccagtgcgtgtaccatg

SEQ ID NO: 180079 - DNA, 1726 bp, Homo sapiens
  Payload ID: 15467
  Gene Symbol: SERINC3
  Gene Name: serine incorporator 3
  Uniprot ID: Q13530
  ENST ID: ENST00000255175
  CDS Start-End: 135-1556
catccgtgcgtctgtggaaggctgcgtttccggcctgagaaaccgtcatgtttctggggagtcacctcagctggcagttaccaccgtgttagaaagcagcctcaggaccggccacctccatcactggcgtcaccatgggggctgtgctgggtgtcttctccctcgccagctgggttccatgcctctgcagcggtgcctcatgtttgctgtgtagttgctgtcctaacagtaagaattccacggtgactcgcctcatttatgctttcattctcctcctgagcactgtcgtatcctatatcatgcagagaaaagagatggaaacttacttgaagaagattcctggattttgtgaagggggatttaaaatccatgaggctgatataaatgcagataaagattgtgatgtgctggttggttataaagctgtgtatcggatcagctttgccatggccatctttttctttgtcttttctctgctcatgttcaaagtaaaaacaagtaaagatctccgagcggcagtacacaatgggttttggttcttcaaaattgctgcccttattggaatcatggttggctctttctacatccctgggggctatttcagctcagtctggtttgttgttggcatgataggggccgccctcttcatcctcattcagctggtgctgctggtagattttgctcattcttggaatgaatcatgggtaaatcgaatggaagaaggaaacccaaggttgtggtatgctgctttactgtctttcacaagcgccttttatatcctgtcaatcatctgtgtcgggctgctctatacatattacaccaaaccagatggctgcacagaaaacaagttcttcatcagtattaacctgatcctttgcgttgtggcttctattatatcgatccacccaaaaattcaggaacaccagcctcgctccggcctcttgcagtcctccctcatcaccctctacactatgtacctcacctggtcagccatgtccaatgaacctgatcgttcctgcaatcccaacctgatgagctttattacacgcataactgcaccaaccctggctcctggaaattcaactgctgtggtccctacccctactccaccatcaaagagtgggtctttactggattcagataattttattggactgtttgtctttgttctctgcctcttgtattctagcatccgcacttccactaatagccaagtagacaagctgaccctgtcagggagtgacagcgtcatccttggtgatacaactaccagtggtgccagtgatgaagaagatggacagcctcggcgggctgtggacaacgagaaagagggagtgcagtatagctactccttattccacctcatgctctgcttggcttccttgtacatcatgatgaccctgaccagctggtacagccctgatgcaaagtttcagagcatgaccagcaagtggccagctgtgtgggtcaagatcagctccagctgggtctgcctcctgctttacgtctggacccttgtggctccacttgtcctcaccagtcgggacttcagctgaacctctgagtgccaaggacaccactggaactcacaaaggcacccaactcagtgatgtcctaattactgctggatgactcaagccacaccatgcctatgttctcaggtgaagaagaataatagaaaccacatagatgggtaggtgtaccaagcattaaacagacagtatcc

SEQ ID NO: 180080 - DNA, 4445 bp, Homo sapiens
  Payload ID: 15467
  Gene Symbol: SERINC3
  Gene Name: serine incorporator 3
  Uniprot ID: Q13530
  ENST ID: ENST00000342374
  CDS Start-End: 159-1580
ggtgggcggggccacgccgtgacgcatccgtgcgtctgtggaaggctgcgtttccggcctgagaaaccgtcatgtttctggggagtcacctcagctggcagttaccaccgtgttagaaagcagcctcaggaccggccacctccatcactggcgtcaccatgggggctgtgctgggtgtcttctccctcgccagctgggttccatgcctctgcagcggtgcctcatgtttgctgtgtagttgctgtcctaacagtaagaattccacggtgactcgcctcatttatgctttcattctcctcctgagcactgtcgtatcctatatcatgcagagaaaagagatggaaacttacttgaagaagattcctggattttgtgaagggggatttaaaatccatgaggctgatataaatgcagataaagattgtgatgtgctggttggttataaagctgtgtatcggatcagctttgccatggccatctttttctttgtcttttctctgctcatgttcaaagtaaaaacaagtaaagatctccgagcggcagtacacaatgggttttggttcttcaaaattgctgcccttattggaatcatggttggctctttctacatccctgggggctatttcagctcagtctggtttgttgttggcatgataggggccgccctcttcatcctcattcagctggtgctgctggtagattttgctcattcttggaatgaatcatgggtaaatcgaatggaagaaggaaacccaaggttgtggtatgctgctttactgtctttcacaagcgccttttatatcctgtcaatcatctgtgtcgggctgctctatacatattacaccaaaccagatggctgcacagaaaacaagttcttcatcagtattaacctgatcctttgcgttgtggcttctattatatcgatccacccaaaaattcaggaacaccagcctcgctccggcctcttgcagtcctccctcatcaccctctacactatgtacctcacctggtcagccatgtccaatgaacctgatcgttcctgcaatcccaacctgatgagctttattacacgcataactgcaccaaccctggctcctggaaattcaactgctgtggtccctacccctactccaccatcaaagagtgggtctttactggattcagataattttattggactgtttgtctttgttctctgcctcttgtattctagcatccgcacttccactaatagccaagtagacaagctgaccctgtcagggagtgacagcgtcatccttggtgatacaactaccagtggtgccagtgatgaagaagatggacagcctcggcgggctgtggacaacgagaaagagggagtgcagtatagctactccttattccacctcatgctctgcttggcttccttgtacatcatgatgaccctgaccagctggtacagccctgatgcaaagtttcagagcatgaccagcaagtggccagctgtgtgggtcaagatcagctccagctgggtctgcctcctgctttacgtctggacccttgtggctccacttgtcctcaccagtcgggacttcagctgaacctctgagtgccaaggacaccactggaactcacaaaggtctccttcaccgaaaacccatataccttttaagtttgtttcaactaaaatattaagtgaatgctttgcaagtttgactgtatgcaggtttatatcagaaggtgagattgaataatgcttgatgcagaatcgaaacttctcatttatctgtatattatgtttacttctaaggatatagcacaaagggaacattttttgtttaaagtgaactacagctgtgctgtgaagagagttctttataaagcctgtaggttcttttaactttggtttaaaatgtaagataggaaaatgttggatatttgaggccatgcttaatatatttatattgcagtatcctttaaaagcaaaaaaaaaaaaatgcatttatattacagttttcctctatgaaagtccttacttatatgatacaagcactgtgttttgtgcttaaactcttcagcggggtagcatcaaagttcttggggaaggatcgtatatgtgggtcccttccctagaagaatggttgctgatatggctactgcttctacatcttgagttttttaatttactttttttacactgtagcattgagactgcttgattcaagtctggtgctttgccagatgtattaatttccataaatgctttgtgagtttggttaaaatgaagattcacttgggaaaacactgcagctttagtctgtgttactatcttgttatgagtatgtaaaagtaaaatgcatgtgaatttatcatatttgcactatgaaggtatttggttaaaatacaaagacttttaagattttaaggccctttcttccaacagcttttatagttagcagccattctttattttctggatagccaggttttatcacgcttctagtcaggatgctcctattccttctaaaaattacggtctgactagtgagcaaagtcttgaatttattcaaaagtcctaaataccttctctaggtaagacacttggtagatgagagacggaaggcattgtcaagaaccattttcatgagaggtggtgtgcaaaaaggtagaataaaagagttctttcaacaaagatttactgtctattctgtactagaccctgtaggttttggggtacagtgttaaacatgatagaggctctgccgtcttggactttaatagcttagagaagagagcaaatgagctgacaggtggttataatgtgaattagtgctgtggtttaggaattggagagaactcaaaggagaggtatttggtgtaatggtaggctttctggagaaaatgatatttaagccaagaactcttagaagttagctaagagagagatgggaaaatgagacgacattgctggagtagataaaactgcatgttaaaggcaggaagatggggaaaaaaagttcagtaaagctggaatggggaaatgtagtcagggactgaattttaaagggctttatcaacctcagtaaagagtttggaccttatgttgagggtggctgaaaacatattcatagtgtcatgaacaaattttatcttcagtcacttgggctgatatatagagaatggatttagagagatgagaccaggtgcagtccatatgagatgtgaaatagagaagtggaatcgtagggacggggagaaattgacaggtgagggctacttagcaattagaatttttttttttcaattttaatttttttttttgagacggagtcttgctctgtcgcccaggctggagtgcaatggtgcgatctccgctcactgcaggctccgcctcccgggttcacgccattctcccgcctcagcctccctagtagctgggactacaggcacccaccaccacgcctggctaattttttttgtatttttagtagagacagggtttcaccatgttagccaggatggtctcgatctcctgacctcgtgatccacctgccgcggcctcccaaagttctaggattactggcatgagccaccgtgcctggccagcaattagaattttaacactggcagttatgaataatatgaaggagaggtagatttctgagtgattctggtttaaccagctgggtggatggtggttccacgtattcaggtggcaaacaggaaaaacatgtgttcgaagaagaatggaggtaggtggtctcttaagaatggttaagaggcttgggagtcagactgcttgggtttgcatcccagctttgccgttttctggctatcaaacttgtcagctattatttgttgagtacgtactatttgatttatgaccacaggcagctgagcctcagtgttggtgcctagtgtacaagattgttaaagaataaagttattttgcaaagtgtaacccatttttagcactgacatagcactgacagtagctgctgatctcattatgggctaaaataagacaatattcaaaggtcagagatatctagccagaatctgatggaggctggatttcagattttgttacagaattagacagaggaacacagaggggacaggctcagttagggtggaggtgtggggtagggaagcaggacttgatataaattattggaatcattgtcttttaaaccagtggtttatgtcagggtatagcgtttcaagggatttgagggtcagatggggaaatgtagccccttattttgccagtgtgaagcagataccctgcttttctttacagtagcggagtcagcttaagagctttaaaggtcctaaacttcaaaaacattacagtgccccatcctccgccttaatgtaattcaaaatacaaacaatactaaactgtaaaataaatgtaacaaagtccaataaagtttttatttttttctcatgatgataactga

SEQ ID NO: 180081 - DNA, 812 bp, Homo sapiens
  Payload ID: 15467
  Gene Symbol: SERINC3
  Gene Name: serine incorporator 3
  ENST ID: ENST00000411544
  CDS Start-End: 1-639
gaacaccagcctcgctccggcctcttgcagtcctccctcatcaccctctacactatgtacctcacctggtcagccatgtccaatgaacctgatcgttcctgcaatcccaacctgatgagctttattacacgcataactgcaccaaccctggctcctggaaattcaactgctgtggtccctacccctactccaccatcaaagagtgggtctttactggattcagataattttattggactgtttgtctttgttctctgcctcttgtattctagcatccgcacttccactaatagccaagtagacaagctgaccctgtcagggagtgacagcgtcatccttggtgatacaactaccagtggtgccagtgatgaagaagatggacagcctcggcgggctgtggacaacgagaaagagggagtgcagtatagctactccttattccacctcatgctctgcttggcttccttgtacatcatgatgaccctgaccagctggtacagccctgatgcaaagtttcagagcatgaccagcaagtggccagctgtgtgggtcaagatcagctccagctgggtctgcctcctgctttacgtctggacccttgtggctccacttgtcctcaccagtcgggacttcagctgaacctctgagtgccaaggacaccactggaactcacaaaggcacccaactcagtgatgtcctaattactgctggatgactcaagccacaccatgcctatgttctcaggtgaagaagaataatagaaaccacatagatgggtaggtgtaccaagcattaaacagacagtatccaca

SEQ ID NO: 180082 - DNA, 2318 bp, Homo sapiens
  Payload ID: 15468
  Gene Symbol: SERINC4
  Gene Name: serine incorporator 4
  ENST ID: ENST00000299969
  CDS Start-End: 147-1427
gtgttctcttccggacgtctccattctgcccgggaccgggtgctcagccccaacacagtggcagtccaatgggctgaggacagaagcaactgctgctctcatctgccttccatctggtggacctaagcctaatccctgggacaaggatggtgggtgccaaggccggccccagccccggcacctccctgggcctggcacagcagcacagcggaggcagcagtgtcctagtgaaaagtcccttctgtcaggtgtgctgctgtgggcctgctccttgtgccagctgctgccactctaggtggccctctctcaccgcatccacttgcagccgcctgttctacatcctcctccatgtgggggcctcagcaatctgctgcctcctgctgtcaaggacagtagtggaaagggtgtggggcaagacacacaggatccagatgccctcggggttgtgtgcccacctgtttggcctctctgactgtccagtgctcagtggctctggggctgtgtaccgagtatgtgcaggaaccgccaccttccacctgctgcaggctgtgttgctggtccacctccactcccccaccagcccgcgggcacagctgcataatagcttctggctcctcaagctgctgttcctgttaggtctctgtgctattgccttctgcattcctgatgagcatctcttcccagcatggcattacattggcatctgtggaggctttgcattcatcctactgcagttggtgcttattacagcttttgcccattcctggaacaagaactggcagacaggtgcagctcaagactgtagctggttcctggctgtcctgctggccaccctaggattctacagcatggcaggtgtgggagctgtgctcctattccactattatacacacccagctggctgcctgcttaacaagatgctcctcagtctgcacctttgcttctgtggcctcatctccttcctctccatcgctccttgcatccgcctcacaatgaggcctcctacctggctgaggtatttggacccctgtggattgtcaaggtttacagctatgagtttcagaagccctcactgtgtttctgctgccctgaaacagtggaggcagacaaagggcaaaggggtggggctgcgaggccagctgaccaagaaacccctccagctcctccagtccaagtccagcatctttcctacaactattctgccttccacttcgtcttcttccttgcctcactctatgtcatggttacccttaccaactggttcagctatgagggagcagaactggaaaagaccttcatcaagggtagctgggccaccttctgggtcaaggttgcctcatgctgggcctgcgtactcctctatctggggctgttactggcaccactctgttggccccccacccagaaaccccagccccttatcttgaggcgccgccgccaccgcatcatatccccagataacaaatatcctccagtctaagtccttttcacaaactggggttcccctgacattgtactcctagagttggctcaaggggagctgtccagcccagctcaatacctcaaggacacacagggagttatctccgtttgggctgaagtcaatactatgaactggaagaagtggtcaaacacagtctaatgtgctgggcagagtgtctgactcactggagctactgttacatctgcatcccagctcaagagcctaacacccaaatcagcagctcaaagaaccaccgctgatcccagcagacagtgtggcaccagccctttcctggctcttgggctggaagtgggggtggggaaagaccaacagggactgaagactcggctctgcccttggagaaaggaaaataaggagttcagccctgggcacacggatataagaagcccagaaccacagaacaaaccagggcatagaagaaaggagcacagaggctaccccaggttttaatcctgattttgaggtcaagggaagcgggaagacaaaaccaccctcattccatgaggaatgacagaagagaaagtgaacgcttgacagcagctgaccacgggaagtcggtgagcagcaggattttttggccaactttcaagcagacgaacaaactgaggaagaatgaggaaaagaggcataaacacagatcttgcagcattcactcttaggccaactccatcctagagatggtgttcaagggtggggaacaaaaatcacagaaaagaagtctctatggttcttagaggattcctctactgcatatccggagtacttgtttggttgtcattgtataataaaggcttcttctgtgatgtttcactta

SEQ ID NO: 180083 - DNA, 2630 bp, Homo sapiens
  Payload ID: 15468
  Gene Symbol: SERINC4
  Gene Name: serine incorporator 4
  Uniprot ID: A6NH21
  ENST ID: ENST00000319327
  CDS Start-End: 236-1792
gagagaacagcctgagtggccgcagtgttgaggccctaaggacaaagctccttcacagggcatttgcatttaccgcaacctggaggtcagtgttctcttccggacgtctccattctgcccgggaccgggtgctcagccccaacacagtggcagtccaatgggctgaggacagaagcaactgctgctctcatctgccttccatctggtggacctaagcctaatccctgggacaaggatggtgggtgccaaggccggccccagccccggcacctccctgggcctggcacagcagcacagcggaggcagcagtgtcctagtgaaaagtcccttctgtcaggtgtgctgctgtgggcctgctccttgtgccagctgctgccactctaggtggccctctctcaccgcatccacttgcagccgcctgttctacatcctcctccatgtgggggcctcagcaatctgctgcctcctgctgtcaaggacagtagtggaaagggtgtggggcaagacacacaggatccagatgccctcggggttgtgtgcccacctgtttggcctctctgactgtccagtgctcagtggctctggggctgtgtaccgagtatgtgcaggaaccgccaccttccacctgctgcaggctgtgttgctggtccacctccactcccccaccagcccgcgggcacagctgcataatagcttctggctcctcaagctgctgttcctgttaggtctctgtgctattgccttctgcattcctgatgagcatctcttcccagcatggcattacattggcatctgtggaggctttgcattcatcctactgcagttggtgcttattacagcttttgcccattcctggaacaagaactggcagacaggtgcagctcaagactgtagctggttcctggctgtcctgctggccaccctaggattctacagcatggcaggtgtgggagctgtgctcctattccactattatacacacccagctggctgcctgcttaacaagatgctcctcagtctgcacctttgcttctgtggcctcatctccttcctctccatcgctccttgcatccgcctcaagcaaccccgctctggcctcctacaagcttctgtcatcagctgctatatcatgtatctgactttctctgcactgtccagccgtcctccagagagagtaatccttcaaggacagaatcacaccctgtgcctgcctggcctgagtaaaatggaaccccaaacaccagatatctctctagcaatgctgagtgctagcatcatgtatgcttgtgtgctttttgcttgcaatgaggcctcctacctggctgaggtatttggacccctgtggattgtcaaggtttacagctatgagtttcagaagccctcactgtgtttctgctgccctgaaacagtggaggcagacaaagggcaaaggggtggggctgcgaggccagctgaccaagaaacccctccagctcctccagtccaagtccagcatctttcctacaactattctgccttccacttcgtcttcttccttgcctcactctatgtcatggttacccttaccaactggttcagctatgagggagcagaactggaaaagaccttcatcaagggtagctgggccaccttctgggtcaaggttgcctcatgctgggcctgcgtactcctctatctggggctgttactggcaccactctgttggccccccacccagaaaccccagccccttatcttgaggcgccgccgccaccgcatcatatccccagataacaaatatcctccagtctaagtccttttcacaaactggggttcccctgacattgtactcctagagttggctcaaggggagctgtccagcccagctcaatacctcaaggacacacagggagttatctccgtttgggctgaagtcaatactatgaactggaagaagtggtcaaacacagtctaatgtgctgggcagagtgtctgactcactggagctactgttacatctgcatcccagctcaagagcctaacacccaaatcagcagctcaaagaaccaccgctgatcccagcagacagtgtggcaccagccctttcctggctcttgggctggaagtgggggtggggaaagaccaacagggactgaagactcggctctgcccttggagaaaggaaaataaggagttcagccctgggcacacggatataagaagcccagaaccacagaacaaaccagggcatagaagaaaggagcacagaggctaccccaggttttaatcctgattttgaggtcaagggaagcgggaagacaaaaccaccctcattccatgaggaatgacagaagagaaagtgaacgcttgacagcagctgaccacgggaagtcggtgagcagcaggattttttggccaactttcaagcagacgaacaaactgaggaagaatgaggaaaagaggcataaacacagatcttgcagcattcactcttaggccaactccatcctagagatggtgttcaagggtggggaacaaaaatcacagaaaagaagtctctatggttcttagaggattcctctactgcatatccggagtacttgtttggttgtcattgtataataaaggcttcttctgtgatgtttcactta

SEQ ID NO: 180084 - DNA, 2116 bp, Homo sapiens
  Payload ID: 15468
  Gene Symbol: SERINC4
  Gene Name: serine incorporator 4
  ENST ID: ENST00000448553
  CDS Start-End: 1-710
agatgccctcggggttgtgtgcccacctgtttggcctctctgactgtccagtgctcagtggctctggggctgtgtaccgagtatgtgcaggaaccgccaccttccacctgctgcaggctgtgttgctggtccacctccactcccccaccagcccgcgggcacagctgcataatagcttctggctcctcaagctgctgttcctgttaggtctctgtgctattgccttctgcattcctgatgagcatctcttcccagcatggcattacattggcatctgtggaggctttgcattcatcctactgcagttggtgcttattacagcttttgcccattcctggaacaagaactggcagacaggtgcagctcaagactgtagctggttcctggctgtcctgctggccaccctaggattctacagcatggcaggtgtgggagctgtgctcctattccactattatacacacccagctggctgcctgcttaacaagatgctcctcagtctgcacctttgcttctgtggcctcatctccttcctctccatcgctccttgcatccgcctcagtggagcaaccccgctctggcctcctacaagcttctgtcatcagctgctatatcatgtatctgactttctctgcactgtccagccgtcctccagagagagtaatccttcaaggacagaatcacaccctgtgcctgcctggcctgagtaaaatggaaccccaaacaccagatatctctctagcaatgctgagtgctagcatcatgtatgcttgtgtgctttttgcttgcaatgaggcctcctacctggctgaggtatttggacccctgtggattgtcaaggtttacagctatgagtttcagaagccctcactgtgtttctgctgccctgaaacagtggaggcagacaaagggcaaaggggtggggctgcgaggccagctgaccaagaaacccctccagctcctccagtccaagtccagcatctttcctacaactattctgccttccacttcgtcttcttccttgcctcactctatgtcatggttacccttaccaactggttcagctatgagggagcagaactggaaaagaccttcatcaagggtagctgggccaccttctgggtcaaggttgcctcatgctgggcctgcgtactcctctatctggggctgttactggcaccactctgttggccccccacccagaaaccccagccccttatcttgaggcgccgccgccaccgcatcatatccccagataacaaatatcctccagtctaagtccttttcacaaactggggttcccctgacattgtactcctagagttggctcaaggggagctgtccagcccagctcaatacctcaaggacacacagggagttatctccgtttgggctgaagtcaatactatgaactggaagaagtggtcaaacacagtctaatgtgctgggcagagtgtctgactcactggagctactgttacatctgcatcccagctcaagagcctaacacccaaatcagcagctcaaagaaccaccgctgatcccagcagacagtgtggcaccagccctttcctggctcttgggctggaagtgggggtggggaaagaccaacagggactgaagactcggctctgcccttggagaaaggaaaataaggagttcagccctgggcacacggatataagaagcccagaaccacagaacaaaccagggcatagaagaaaggagcacagaggctaccccaggttttaatcctgattttgaggtcaagggaagcgggaagacaaaaccaccctcattccatgaggaatgacagaagagaaagtgaacgcttgacagcagctgaccacgggaagtcggtgagcagcaggattttttggccaactttcaagcagacgaacaaactgaggaagaatgaggaaaagaggcataaacacagatcttgcagcattcactcttaggccaactccatcctagagatggtgttcaagggtggggaacaaaaatcacagaaaagaagtctctatggttcttagaggattcctctactgcatatccggagtacttgtttggttgtcattgtataataaaggcttcttctgtgatgtttcactta

SEQ ID NO: 180085 - DNA, 2335 bp, Homo sapiens
  Payload ID: 15468
  Gene Symbol: SERINC4
  Gene Name: serine incorporator 4
  ENST ID: ENST00000457418
  CDS Start-End: 112-402
ccgggtgctcagccccaacacagtggcagtccaatgggctgaggacagaagcaactgctgctctcatctgccttccatctggtggacctaagcctaatccctgggacaaggatggtgggtgccaaggccggccccagccccggcacctccctgggcctggcacagcagcacagcggaggcagcagtgtcctagtgaaaagtcccttctgtcagcaagtctccacctcgctgccttgcatctgctctactcccaggtgtgctgctgtgggcctgctccttgtgccagctgctgccactctaggtggccctctctcaccgcatccacttgcagccgcctgttctacatcctcctccatgtgggggcctcagcaatctgctgcctcctgctgtcaaggacagtagtggaaagggtgtggggcaagacacacaggatccagatgccctcggggttgtgtgcccacctgtttggcctctctgactgtccagtgctcagtggctctggggctgtgtaccgagtatgtgcaggaaccgccaccttccacctgctgcaggctgtgttgctggtccacctccactcccccaccagcccgcgggcacagctgcataatagcttctggctcctcaagctgctgttcctgttaggtctctgtgctattgccttctgcattcctgatgagcatctcttcccagcatggcattacattggcatctgtggaggctttgcattcatcctactgcagttggtgcttattacagcttttgcccattcctggaacaagaactgagcaaccccgctctggcctcctacaagcttctgtcatcagctgctatatcatgtatctgactttctctgcactgtccagccgtcctccagagagagtaatccttcaaggacagaatcacaccctgtgcctgcctggcctgagtaaaatggaaccccaaacaccagatatctctctagcaatgctgagtgctagcatcatgtatgcttgtgtgctttttgcttgcaatgaggcctcctacctggctgaggtatttggacccctgtggattgtcaaggtttacagctatgagtttcagaagccctcactgtgtttctgctgccctgaaacagtggaggcagacaaagggcaaaggggtggggctgcgaggccagctgaccaagaaacccctccagctcctccagtccaagtccagcatctttcctacaactattctgccttccacttcgtcttcttccttgcctcactctatgtcatggttacccttaccaactggttcagctatgagggagcagaactggaaaagaccttcatcaagggtagctgggccaccttctgggtcaaggttgcctcatgctgggcctgcgtactcctctatctggggctgttactggcaccactctgttggccccccacccagaaaccccagccccttatcttgaggcgccgccgccaccgcatcatatccccagataacaaatatcctccagtctaagtccttttcacaaactggggttcccctgacattgtactcctagagttggctcaaggggagctgtccagcccagctcaatacctcaaggacacacagggagttatctccgtttgggctgaagtcaatactatgaactggaagaagtggtcaaacacagtctaatgtgctgggcagagtgtctgactcactggagctactgttacatctgcatcccagctcaagagcctaacacccaaatcagcagctcaaagaaccaccgctgatcccagcagacagtgtggcaccagccctttcctggctcttgggctggaagtgggggtggggaaagaccaacagggactgaagactcggctctgcccttggagaaaggaaaataaggagttcagccctgggcacacggatataagaagcccagaaccacagaacaaaccagggcatagaagaaaggagcacagaggctaccccaggttttaatcctgattttgaggtcaagggaagcgggaagacaaaaccaccctcattccatgaggaatgacagaagagaaagtgaacgcttgacagcagctgaccacgggaagtcggtgagcagcaggattttttggccaactttcaagcagacgaacaaactgaggaagaatgaggaaaagaggcataaacacagatcttgcagcattcactcttaggccaactccatcctagagatggtgttcaagggtggggaacaaaaatcacagaaaagaagtctctatggttcttagaggattcctctactgcatatccggagtacttgtttggttgtcattgtataataaaggcttcttctgtgatgtttcactta

SEQ ID NO: 180086 - DNA, 1523 bp, Homo sapiens
  Payload ID: 15468
  Gene Symbol: SERINC4
  Gene Name: serine incorporator 4
  ENST ID: ENST00000412697
  CDS Start-End: 1-269
cctcggggttgtgtgcccacctgtttggcctctctgactgtccagtgctcagtggctctggggctgtgtaccgagtatgtgcaggaaccgccaccttccacctgctgcaggctgtgttgctggtccacctccactcccccaccagcccgcgggcacagctgcataatagcatggcattacattggcatctgtggaggctttgcattcatcctactgcagttggtgcttattacagcttttgcccattcctggaacaagaactgcaatgaggcctcctacctggctgaggtatttggacccctgtggattgtcaaggtttacagctatgagtttcagaagccctcactgtgtttctgctgccctgaaacagtggaggcagacaaagggcaaaggggtggggctgcgaggccagctgaccaagaaacccctccagctcctccagtccaagtccagcatctttcctacaactattctgccttccacttcgtcttcttccttgcctcactctatgtcatggttacccttaccaactggttcagctatgagggagcagaactggaaaagaccttcatcaagggtagctgggccaccttctgggtcaaggttgcctcatgctgggcctgcgtactcctctatctggggctgttactggcaccactctgttggccccccacccagaaaccccagccccttatcttgaggcgccgccgccaccgcatcatatccccagataacaaatatcctccagtctaagtccttttcacaaactggggttcccctgacattgtactcctagagttggctcaaggggagctgtccagcccagctcaatacctcaaggacacacagggagttatctccgtttgggctgaagtcaatactatgaactggaagaagtggtcaaacacagtctaatgtgctgggcagagtgtctgactcactggagctactgttacatctgcatcccagctcaagagcctaacacccaaatcagcagctcaaagaaccaccgctgatcccagcagacagtgtggcaccagccctttcctggctcttgggctggaagtgggggtggggaaagaccaacagggactgaagactcggctctgcccttggagaaaggaaaataaggagttcagccctgggcacacggatataagaagcccagaaccacagaacaaaccagggcatagaagaaaggagcacagaggctaccccaggttttaatcctgattttgaggtcaagggaagcgggaagacaaaaccaccctcattccatgaggaatgacagaagagaaagtgaacgcttgacagcagctgaccacgggaagtcggtgagcagcaggattttttggccaactttcaagcagacgaacaaactgaggaagaatgaggaaaagaggcataaacacagatcttgcagcattcactcttaggccaactccatcctagagatggtgttcaagggtggggaacaaaaatcacagaaaagaagtctctatggttcttagaggattcctcta

SEQ ID NO: 180087 - DNA, 1343 bp, Homo sapiens
  Payload ID: 15469
  Gene Symbol: SERINC5
  Gene Name: serine incorporator 5
  ENST ID: ENST00000512721
  CDS Start-End: 93-1343
cggctgagcccagcgctcgaggcgcgaggcagccaggagggcccgtgcggcgcggggagccagcgagcgcgccttcggcattggccgccgcgatgtcagctcagtgctgtgcgggccagctggcctgctgctgtgggtctgcaggctgctctctctgctgtgattgctgccccaggattcggcagtccctcagcacccgcttcatgtacgccctctacttcattctggtcgtcgtcctctgctgcatcatgatgtcaacaaccgtggctcacaagatgaaagagcacattcctttttttgaagatatgtgtaaaggcattaaagctggtgacacctgtgagaagctggtgggatattctgccgtgtatagagtctgttttggaatggcttgtttcttctttatcttctgtctactgaccttgaaaatcaacaacagcaaaagttgtagagctcatattcacaatggcttttggttctttaaacttctgctgttgggggccatgtgctcaggagctttcttcattccagatcaggacacctttctgaacgcctggcgctatgtgggagccgtcggaggcttcctcttcattggcatccagctcctcctgctcgtggagtttgcacataagtggaacaagaactggacagcaggcacagccagtaacaagctgtggtacgcctccctggccctggtgacgctcatcatgtattccattgccactggaggcttggttttgatggcagtgttttatacacagaaagacagctgcatggaaaacaaaattctgctgggagtaaatggaggcctgtgcctgcttatatcattggtagccatctcaccctgggtccaaaatcgacagccacactcggggctcttacaatcaggggtcataagctgctatgtcacctacctcaccttctcagctctgtccagcaaacctgcagaagtagttctagatgaacatgggaaaaatgttacaatctgtgtgcctgactttggtcaagacctgtacagagatgaaaacttggtgactatactggggaccagcctcttaatcggatgtatcttgtattcatgtttgacatcaacaacaagatcgagttctgacgctctgcaggggcgatacgcagctcctgaattggagatagctcgctgttgtttttgcttcagtcctggtggagaggacactgaagagcagcagccggggaaggagggaccacgggtcatttatgacgagaagaaaggcaccgtctacatctactcctacttccacttcgtgttcttcctagcttccctgtatgtgatgatgaccgtcaccaactggttcaagagtggcccattt

SEQ ID NO: 180088 - DNA, 1627 bp, Homo sapiens
  Payload ID: 15469
  Gene Symbol: SERINC5
  Gene Name: serine incorporator 5
  Uniprot ID: Q86VE9
  ENST ID: ENST00000512972
  CDS Start-End: 98-1351
agctgcggctgagcccagcgctcgaggcgcgaggcagccaggagggcccgtgcggcgcggggagccagcgagcgcgccttcggcattggccgccgcgatgtcagctcagtgctgtgcgggccagctggcctgctgctgtgggtctgcaggctgctctctctgctgtgattgctgccccaggattcggcagtccctcagcacccgcttcatgtacgccctctacttcattctggtcgtcgtcctctgctgcatcatgatgtcaacaaccgtggctcacaagatgaaagagcacattcctttttttgaagatatgtgtaaaggcattaaagctggtgacacctgtgagaagctggtgggatattctgccgtgtatagagtctgttttggaatggcttgtttcttctttatcttctgtctactgaccttgaaaatcaacaacagcaaaagttgtagagctcatattcacaatggcttttggttctttaaacttctgctgttgggggccatgtgctcaggagctttcttcattccagatcaggacacctttctgaacgcctggcgctatgtgggagccgtcggaggcttcctcttcattggcatccagctcctcctgctcgtggagtttgcacataagtggaacaagaactggacagcaggcacagccagtaacaagctgtggtacgcctccctggccctggtgacgctcatcatgtattccattgccactggaggcttggttttgatggcagtgttttatacacagaaagacagctgcatggaaaacaaaattctgctgggagtaaatggaggcctgtgcctgcttatatcattggtagccatctcaccctgggtccaaaatcgacagccacactcggggctcttacaatcaggggtcataagctgctatgtcacctacctcaccttctcagctctgtccagcaaacctgcagaagtagttctagatgaacatgggaaaaatgttacaatctgtgtgcctgactttggtcaagacctgtacagagatgaaaacttggtgactatactggggaccagcctcttaatcggatgtatcttgtattcatgtttgacatcaacaacaagatcgagttctgacgctctgcaggggcgatacgcagctcctgaattggagatagctcgctgttgtttttgcttcagtcctggtggagaggacactgaagagcagcagccggggaaggagggaccacgggtcatttatgacgagaagaaaggcaccgtctacatctactcctacttccacttcgtgttcttcctagcttccctgtatgtgatgatgaccgtcaccaactggttcaaaaactatcaatgctgaagacttaaggcctcttaagaataccctttttgcaagaggggatggaaacatctctggccccaactccgacaggaaagcctggttttagcattgaaaagatgattgaatacagcttgccttttctccagggaagagagacaagatggagtgccagagaggcctacggcaagaagtgcctttcacctcctgccatgattctgaggcctccccagccatgtggaactctgagaaacctgaacggactccatttggctccttcatttgcaagacatcaag

SEQ ID NO: 180089 - DNA, 1441 bp, Homo sapiens
  Payload ID: 15469
  Gene Symbol: SERINC5
  Gene Name: serine incorporator 5
  Uniprot ID: Q86VE9
  ENST ID: ENST00000509193
  CDS Start-End: 98-1360
agctgcggctgagcccagcgctcgaggcgcgaggcagccaggagggcccgtgcggcgcggggagccagcgagcgcgccttcggcattggccgccgcgatgtcagctcagtgctgtgcgggccagctggcctgctgctgtgggtctgcaggctgctctctctgctgtgattgctgccccaggattcggcagtccctcagcacccgcttcatgtacgccctctacttcattctggtcgtcgtcctctgctgcatcatgatgtcaacaaccgtggctcacaagatgaaagagcacattcctttttttgaagatatgtgtaaaggcattaaagctggtgacacctgtgagaagctggtgggatattctgccgtgtatagagtctgttttggaatggcttgtttcttctttatcttctgtctactgaccttgaaaatcaacaacagcaaaagttgtagagctcatattcacaatggcttttggttctttaaacttctgctgttgggggccatgtgctcaggagctttcttcattccagatcaggacacctttctgaacgcctggcgctatgtgggagccgtcggaggcttcctcttcattggcatccagctcctcctgctcgtggagtttgcacataagtggaacaagaactggacagcaggcacagccagtaacaagctgtggtacgcctccctggccctggtgacgctcatcatgtattccattgccactggaggcttggttttgatggcagtgttttatacacagaaagacagctgcatggaaaacaaaattctgctgggagtaaatggaggcctgtgcctgcttatatcattggtagccatctcaccctgggtccaaaatcgacagccacactcggggctcttacaatcaggggtcataagctgctatgtcacctacctcaccttctcagctctgtccagcaaacctgcagaagtagttctagatgaacatgggaaaaatgttacaatctgtgtgcctgactttggtcaagacctgtacagagatgaaaacttggtgactatactggggaccagcctcttaatcggatgtatcttgtattcatgtttgacatcaacaacaagatcgagttctgacgctctgcaggggcgatacgcagctcctgaattggagatagctcgctgttgtttttgcttcagtcctggtggagaggacactgaagagcagcagccggggaaggagggaccacgggtcatttatgacgagaagaaaggcaccgtctacatctactcctacttccacttcgtgttcttcctagcttccctgtatgtgatgatgaccgtcaccaactggttcaaaagtgcctttcacctcctgccatgattctgaggcctccccagccatgtggaactctgagaaacctgaacggactccatttggctccttcatttgcaagacatcaag

SEQ ID NO: 180090 - DNA, 6479 bp, Homo sapiens
  Payload ID: 15469
  Gene Symbol: SERINC5
  Gene Name: serine incorporator 5
  Uniprot ID: Q86VE9
  ENST ID: ENST00000507668
  CDS Start-End: 158-1543
gtttttacccaggcctcggcgcctaggcgcttcgccgaggctgatcttcgttcaagtgtgagctgcggctgagcccagcgctcgaggcgcgaggcagccaggagggcccgtgcggcgcggggagccagcgagcgcgccttcggcattggccgccgcgatgtcagctcagtgctgtgcgggccagctggcctgctgctgtgggtctgcaggctgctctctctgctgtgattgctgccccaggattcggcagtccctcagcacccgcttcatgtacgccctctacttcattctggtcgtcgtcctctgctgcatcatgatgtcaacaaccgtggctcacaagatgaaagagcacattcctttttttgaagatatgtgtaaaggcattaaagctggtgacacctgtgagaagctggtgggatattctgccgtgtatagagtctgttttggaatggcttgtttcttctttatcttctgtctactgaccttgaaaatcaacaacagcaaaagttgtagagctcatattcacaatggcttttggttctttaaacttctgctgttgggggccatgtgctcaggagctttcttcattccagatcaggacacctttctgaacgcctggcgctatgtgggagccgtcggaggcttcctcttcattggcatccagctcctcctgctcgtggagtttgcacataagtggaacaagaactggacagcaggcacagccagtaacaagctgtggtacgcctccctggccctggtgacgctcatcatgtattccattgccactggaggcttggttttgatggcagtgttttatacacagaaagacagctgcatggaaaacaaaattctgctgggagtaaatggaggcctgtgcctgcttatatcattggtagccatctcaccctgggtccaaaatcgacagccacactcggggctcttacaatcaggggtcataagctgctatgtcacctacctcaccttctcagctctgtccagcaaacctgcagaagtagttctagatgaacatgggaaaaatgttacaatctgtgtgcctgactttggtcaagacctgtacagagatgaaaacttggtgactatactggggaccagcctcttaatcggatgtatcttgtattcatgtttgacatcaacaacaagatcgagttctgacgctctgcaggggcgatacgcagctcctgaattggagatagctcgctgttgtttttgcttcagtcctggtggagaggacactgaagagcagcagccggggaaggagggaccacgggtcatttatgacgagaagaaaggcaccgtctacatctactcctacttccacttcgtgttcttcctagcttccctgtatgtgatgatgaccgtcaccaactggttcaactacgaaagtgccaacatcgagagcttcttcagcgggagctggtccatcttctgggtcaagatggcctcctgctggatatgcgtgctgttgtacctgtgtacgctggtcgctcccctctgctgccccacccgggagttctctgtgtgatgatatcggcggtcccctgggctttgtgggcctacagcctggaaagtgccatcttttgaacagtgtccccggggcagggactggcgccctgtgcctgagtgggtctgaaaaagctttgagagagaaaaaaaaaaatctcctgattagctttttacttttgaaattcaaaaagaaactaccagtttgtcccaaaggaattgaaattttcaaccaaactgatcatggttgaaatatcttacccctaggaactggataccagttatgttgacttccttctgcatgtttttgccaaaacagaatttggggcacagcatcttttcacagggataaaaatatcttgtggggccagtcattctcatcctcggaatagaaaaacatgccaaaatcttgagtccccagcgcctaacagaatccagacccctctcactcacttccgcctcttagagccttgtccccagggggctttgaggacaggactcagcctgcagggcccctggtatttatagggtccaagaggaggcacctgcttttcaactgcaccctcagtgctgcctcttcacggcccctaaacgtttccctttgaggttgtgatgctgggaatcacagacttcactctctgcctgcacccttccccgaggtctcatcttttctgggtcccacatctttgtaataatgtgaaaaagcacaatttgtctgatcaccccccaggtggttccccaccttattatcactacctgatccgagttactgcaataagtacggcgcttatttatggtgttattcacatgattatagaacaagattcatgttttctctgcctaagcaatggagggctatcattcttacttgtttgtgctgttgataatgataatacttttaggaccttaactgaaaagctgcttcgtgttgaagcctgctgcatgcactgctctttcagttgttgaggtcagcccctcagttttttctccaccttgaggcctttgaaactgtaaaagcggaagtcgttttgtgttctggatctgtaacgtgaccataccgttcaggttcatgctggcatccttggagtaggtttgctaatgtgagaatttctgaggtgaggatctcagacacactgaccagaagaagcttgttaggcaatgtgtggaagtggccgaatatacttaaaaagaggtgcgcagaggcaggcggatcacttgaggtcaggagttgcaagaccagcctggctaacatggtgaaaccctgtctctattaaaaatagaaaaattagccgggcatggtagcgtgtgcctgtaatgccagctactcgaaggctgaggcatgagaatcacttgaacccgggaggcggaggttgcagtgagccgagatcacgctgcacaggaatttccaaaatacgtacttgcaaagtaatacagaaacgtgactttcggcagctacccaagatgatgcctattttcagtgttgatgtattcaggcagggaaaaggtttacttggtggaaactcctgttagaatttcattcggggtggaaagaatcttctcgagctctctgtaagtgaggatctaagaataaaaggctcagcctagtcatttttttctgtgccctactgtatgagttgggcagaattgagtgccacctaagctgggcttctgtgtgccaaaatgctggtgggtgaaattagtgaaattctttctattcattcctttgcccttctcccaagaaaacccatggggaaacaaattacaggggatgaattcctttagaactttccctacttagagtgtttgagattcagtttcaaaaggcactccatctgtgtgtgtggtttagagagccttgttttgtaaattccattaaatttccttttttagggcaggagctctgtactcagcagttaaaagattcatctggagtcgcaaaatgaaaagccgtgttctaacctgaggaatcagttaggggacaggagttccgtgggccaggaatgggctcagggagtggggctgcgtgtcacacacagtagctgtgttgcagtggcctagggccttgggggttgtctttaggaaacaccctgaggggaagcaggtaaagagcctgggcagtattgtgactagtttcattgttttcctcctgctgaggtctagcagagcccttgctttgtcctctcggctgggtctggctgccagctggtgtgatttgagaaactgaccttacgcgcagtcaaggtccagctgacaaggccttgtattccttggctggccgtgattggccctttcctctgcagaaagcagcttagggaagcccaagcaagggagtgtggccggtagaaggccctcgtcgcttccttctggagccagcccagccacacaacgttttccagatgcgtgagtctggtttgtgacatcccgttcccttctgccggttggtctgatgcaagaggaagagttacagttgctctgaattttattctcagctgaaaatgttagcacgtgtatctggatgaacaaaacagatgtggatgtatctgaggattgagggactatcaatgcagagttaatgttaatggttattaattgtgatatacaatactcaggtgaggagtcaacattcctggatttaaagaatctacagttttgtgcaattgtgatttgagaaactggaaacattgtgccaatggctttgagttcctataacaacggtgttaatttgattaactcactgatatcttttaaaaataatagacatttgcttcctacacctttttgtacatgacctaaagagtatattcccagaagctgctggtcagacacatttagggatgacagttgaagaggacttttttaaagctgcatgtgaatatttcctctgtgtgatttgtctgatgtagaaaagttttcccctcatttttatgagtaaaaacactaagtgggtggcaggggggtgggggttcttatgggagtgtcataccgcggcatgttacctgactggagactagagactatttccattataagccttcagaaacccaaccacgtctttactgtgtctagctttttaaatactgattggttagttttatttttgcccacagtttcttgggcaaaaaggttcttcattttgtctgaaaaagaaattatttgccagaggtatttggagcctctttgaaggggagatagagtgggggtgggttgtggggagggtggagttattggggttttggggttctgtttccatacaacattgtttatttccgattcctcagaagatcctttattatgaataacctcagtgtaatgttaatttcctgtccccatgtcaaaattgtcaccctaagcctttttttttttttttttttttttttttggagacgggctcactctgtcagccacgctggagtgcagtgacatgatcttgactcatggcaggcttgacctcctgggctcaaggaccacctcccaagtagctgagaccacaggtttgccccatcacacctggccgatttttatttttttgtagagatggggttgtccaggctggtctcaaactcctgagctcaagcaatgtgcccgccttggcttcccaaagtgctgggattataggcgtaaaccactgcacgcagcctaccctctgcctttttaagatgatgtatttatttaatttttgccatcattggtgcttcaccttcctgcgaaggaaattccagagcctgtatttaagctacctaggcttttacactccctttattgcctttccaaatagtatctcatttggtgtactctagtgtcctatacctcttggaaacgaaagagggcccaacctacaactaagaagggacaaaccttgaactaagtaagaccttacacacccagaaagaacactgggccctccttcttcagggacaatgcagtagccacttggcttgtggaatttactgaaggctatttcctgtaacttgctagttaacttagttttgtatttcaggcagaggtgcgctctgtaatgttgggcctttgacttcacagtactggagagctgttcacacagatgtttagacctttctctctctctctcttttcttctttctcaacaactctttcacagaggcagtcattttgaaaggttgaaatatttggcctttaccaaagagctttttttttccttaagcaaaatcctttcagaaagaaacaaatggggaagggcagattaagaatgcatatgtcccaatccacttctataggagtttaatcatattcacatgagtaaaatgatggaagaactctttaaggtaatcctttgggataaaggatcctgggaagttctctcaggtaaagaaagcttacagcagatttgtaatatatgtctggagagctatttataagaaatttaagaggattgttttgttttcctttattaaagatttaagcctttttactttgcaaaaagaaaactacaaaagttttatagatataactttgctaattttttaaacttttctgaaacgattagctgtagccaaattatgtggttacgttttgctacattagaatttgaaaatgcaatatgtgtggtaaatctactgtttgaaatttataatggtctctgatatgattcgaattttggtaacttttgaaagttattttccccctttagtcatggatttctatttgttttttaatgttaatttttctagaaagcatctgaattgactaggcttttcctatataaaaaactcaaaacttgttaactctgtactttaataaaatttaaaattaaaactgtgttgtttttttctcttctgctagatacatatataattaaagtactcaagttagttgttttgcagagatgttgccttcagatgttaatcaggtctctcaagtttcatggagtctatgctgatcctttaattgacaaataaaagatatatatctgtggtgtgcaa

SEQ ID NO: 180091 - DNA, 1573 bp, Homo sapiens
  Payload ID: 15469
  Gene Symbol: SERINC5
  Gene Name: serine incorporator 5
  ENST ID: ENST00000632581
  CDS Start-End: 98-1468
agctgcggctgagcccagcgctcgaggcgcgaggcagccaggagggcccgtgcggcgcggggagccagcgagcgcgccttcggcattggccgccgcgatgtcagctcagtgctgtgcgggccagctggcctgctgctgtgggtctgcaggctgctctctctgctgtgattgctgccccaggattcggcagtccctcagcacccgcttcatgtacgccctctacttcattctggtcgtcgtcctctgctgcatcatgatgtcaacaaccgtggctcacaagatgaaagagcacattcctttttttgaagatatgtgtaaaggcattaaagctggtgacacctgtgagaagctggtgggatattctgccgtgtatagagtctgttttggaatggcttgtttcttctttatcttctgtctactgaccttgaaaatcaacaacagcaaaagttgtagagctcatattcacaatggcttttggttctttaaacttctgctgttgggggccatgtgctcaggagctttcttcattccagatcaggacacctttctgaacgcctggcgctatgtgggagccgtcggaggcttcctcttcattggcatccagctcctcctgctcgtggagtttgcacataagtggaacaagaactggacagcaggcacagccagtaacaagctgtggtacgcctccctggccctggtgacgctcatcatgtattccattgccactggaggcttggttttgatggcagtgttttatacacagaaagacagctgcatggaaaacaaaattctgctgggagtaaatggaggcctgtgcctgcttatatcattggtagccatctcaccctgggtccaaaatcgacagccacactcggggctcttacaatcaggggtcataagctgctatgtcacctacctcaccttctcagctctgtccagcaaacctgcagaagtagatgaacatgggaaaaatgttacaatctgtgtgcctgactttggtcaagacctgtacagagatgaaaacttggtgactatactggggaccagcctcttaatcggatgtatcttgtattcatgtttgacatcaacaacaagatcgagttctgacgctctgcaggggcgatacgcagctcctgaattggagatagctcgctgttgtttttgcttcagtcctggtggagaggacactgaagagcagcagccggggaaggagggaccacgggtcatttatgacgagaagaaaggcaccgtctacatctactcctacttccacttcgtgttcttcctagcttccctgtatgtgatgatgaccgtcaccaactggttcaaatggagtcccactctgttgcccaggctggagtacagtggcatgatcttggctcactgcaacctccacctcccagatgtcaagcgattctcttgcctcagcctcccaagtagctggggttacaggcatgtgccaccatgaagtgcctttcacctcctgccatgattctgaggcctccccagccatgtggaactctgagaaacctgaacggactccatttggctccttcatttgcaagacatcaag

SEQ ID NO: 180092 - DNA, 1894 bp, Homo sapiens
  Payload ID: 15470
  Gene Symbol: SPTLC1
  Gene Name: serine palmitoyltransferase, long chain base subunit 1
  Uniprot ID: O15269
  ENST ID: ENST00000262554
  CDS Start-End: 7-1428
ctaactatggcgaccgccacggagcagtgggttctggtggagatggtacaggcgctttacgaggctcctgcttaccatcttattttggaagggattctgatcctctggataatcagacttcttttctctaagacttacaaattacaagaacgatctgatcttacagtcaaggaaaaagaagaactgattgaagagtggcaaccagaacctcttgttcctcctgtcccaaaagaccatcctgctctcaactacaacatcgtttcaggccctccaagccacaaaactgtggtgaatggaaaagaatgtataaacttcgcctcatttaattttcttggattgttggataaccctagggttaaggcagcagctttagcatctctaaagaagtatggcgtggggacttgtggacccagaggattttatggcacatttgatgttcatttggatttggaagaccgcctggcaaaatttatgaagacagaagaagccattatatactcatatggatttgccaccatagccagtgctattcctgcttactctaaaagaggggacattgtttttgtagatagagctgcctgctttgctattcagaaaggattacaggcatcccgtagtgacattaagttatttaagcataatgacatggctgacctcgagcgactactaaaagaacaagagatcgaagatcaaaagaatcctcgcaaggctcgtgtaactcggcgtttcattgtagtagaaggattgtatatgaatactggaactatttgtcctcttccagaattggttaagttaaaatacaaatacaaagcaagaatcttcctggaggaaagcctttcatttggagtcctaggagagcatggccgaggagtcactgaacactatggaatcaatattgatgatattgatcttatcagtgccaacatggagaatgcacttgcttctattggaggtttctgctgtggcaggtcttttgtaattgaccatcagcgactttccggccagggatactgcttttcagcttcgttacctcccctgttagctgctgcagcaattgaggccctcaacatcatggaagagaatccaggtatttttgcagtgttgaaggaaaagtgcggacaaattcataaagctttacaaggcatttctggattaaaagtggtgggggagtccctttctccagcctttcacctacaactggaagagagcactgggtctcgcgagcaagatgtcagactgcttcaggaaattgtagatcaatgcatgaacagaagtattgcattaactcaggcgcgctacttggagaaagaagagaagtgtctccctcctcccagcattcgggttgtggtcacggtggaacaaacagaggaagaactggagagagctgcgtccaccatcaaggaggtagcccaggccgtcctgctctaggcagagtcccgggaccatggcctcctgccacacaacacgcagagaggactcaagactcccgctggccatggagtggcctgaaagagagcaagaacatgtggatctttgataggattgttaccaaatggtgtcagtatggaccaattgtgtgaccatgagaaggatgcttattttttttaaaaagaaaacacatctaaaagcccaggaactgatttttttaagaggaaaactaatgacagtgtataactgatgtttaaattgtgcatttagtactatttaaatgttttcttatactagtattttatattcttttgttgtcgtttaaaactggagcttcagtgtctcttccctccctctaatagtaatggttcagtaagcactccttaactccttagtatttcatagaaaaatgactgcaacattaaagctaagaggaacacttcaacatatgtggtacaaatttata

SEQ ID NO: 180093 - DNA, 946 bp, Homo sapiens
  Payload ID: 15470
  Gene Symbol: SPTLC1
  Gene Name: serine palmitoyltransferase, long chain base subunit 1
  Uniprot ID: O15269
  ENST ID: ENST00000337841
  CDS Start-End: 14-445
gaagcggctaactatggcgaccgccacggagcagtgggttctggtggagatggtacaggcgctttacgaggctcctgcttaccatcttattttggaagggattctgatcctctggataatcagacttcttttctctaagacttacaaattacaagaacgatctgatcttacagtcaaggaaaaagaagaactgattgaagagtggcaaccagaacctcttgttcctcctgtcccaaaagaccatcctgctctcaactacaacatcgtttcaggccctccaagccacaaaactgtggtgaatggaaaagaatgtataaacttcgcctcatttaattttcttggattgttggataaccctagggttaaggcagcagctttagcatctctaaagaagtatggcgtggggacttgtggacccagaggattttatggcacatttgaatgaagatgaaggatcattgatttccttgtgtatggataatccgggaacaggccaactaaatatttgatgaatgtatgatttcaaatacagtgaattccctgggagtcatcaaagaagaccggcattttatggttgtttttattaagtgtatattctttgctcctgaaaatgttattaaataattgtttaggccgggcatggtggctcatgcctgtaatcccagcactttcaaaggctgaggcaggcagatcacctgaggtcaggagttcaaaaccagcctggccaacatgctgaaacctcgtctctactaaaaatacaaaaattagctgggcgtggtggtggatacctgtaatcccagctacgtgggaggctgaggtgggagaattgcttcaacctgggaggcagaggttgcagtgagccgagatcatgccactgcactccagcctgggcaacagagcaagactgtctcaaaaataaataaataaataaaattgtttaaatgaa

SEQ ID NO: 180094 - DNA, 8170 bp, Homo sapiens
  Payload ID: 15471
  Gene Symbol: SPTLC2
  Gene Name: serine palmitoyltransferase, long chain base subunit 2
  Uniprot ID: O15270
  ENST ID: ENST00000216484
  CDS Start-End: 195-1883
gcgtggccttggccgagaccggtcctctgcggagagggccccgccctctgtgaaggcccgcccgggaattggcggcggcgctgcagccatttccggtttcggggaggtgggtggggtgcggagcgggacttggagcagccgccgccgctgccaccgcctacagagcctgccttgcgcctggtgctgccaggaagatgcggccggagcccggaggctgctgctgccgccgcacggtgcgggcgaatggctgcgtggcgaacggggaagtacggaacgggtacgtgaggagcagcgctgcagccgcagccgcagccgccgccggccagatccatcatgttacacaaaatggaggactatataaaagaccgtttaatgaagcttttgaagaaacaccaatgctggttgctgtgctcacgtatgtggggtatggcgtactcaccctctttggatatcttcgagatttcttgaggtattggagaattgaaaagtgtcaccatgcaacagaaagagaagaacaaaaggactttgtgtcattgtatcaagattttgaaaacttttatacaaggaatctgtacatgaggataagagacaactggaatcggccaatctgtagtgtgcctggagccagggtggacatcatggagagacagtctcatgattataactggtccttcaagtatacagggaatataataaagggtgttataaacatgggttcctacaactatcttggatttgcacggaatactggatcatgtcaagaagcagccgccaaagtccttgaggagtatggagctggagtgtgcagtactcggcaggaaattggaaacctggacaagcatgaagaactagaggagcttgtagcaaggttcttaggagtagaagctgctatggcgtatggcatgggatttgcaacgaattcaatgaacattcctgctcttgttggcaaaggttgcctgattctgagtgatgaactgaatcatgcatcactggttctgggagccagactgtcaggagcaaccattagaatcttcaaacacaacaatatgcaaagcctagagaagctattgaaagatgccattgtttatggtcagcctcggacacgaaggccctggaagaaaattctcatccttgtggaaggaatatatagcatggagggatctattgttcgtcttcctgaagtgattgccctcaagaagaaatacaaggcatacttgtatctggatgaggctcacagcattggcgccctgggccccacaggccggggtgtggtggagtactttggcctggatcccgaggatgtggatgttatgatgggaacgttcacaaagagttttggtgcttctggaggatatattggaggcaagaaggagctgatagactacctgcgaacacattctcatagtgcagtgtatgccacgtcattgtcacctcctgtagtggagcagatcatcacctccatgaagtgcatcatggggcaggatggcaccagccttggtaaagagtgtgtacaacagttagctgaaaacaccaggtatttcaggagacgcctgaaagagatgggcttcatcatctatggaaatgaagactctccagtagtgcctttgatgctctacatgcctgccaaaattggcgcctttggacgggagatgctgaagcggaacatcggtgtcgttgtggttggatttcctgccaccccaattattgagtccagagccaggttttgcctgtcagcagctcataccaaagaaatacttgatactgctttaaaggagatagatgaagttggggacctattgcagctgaagtattcccgtcatcggttggtacctctactggacaggccctttgacgagacgacgtatgaagaaacagaagactgagcctttttggtgctccctcagaggaactctccctcacccaggacagcctgtggcctttgtgagccagttccaggaaccacacttctgtggccatctcacgtgaaagacattgcctcagctactgaaggtggccacctccactctaaatgacattttgtaaatagtaaaaaactgcttctaatccttcctttgctaaatctcacctttaaaaacgaaggtgactcactttgctttttcagtccattaaaaaaacattttattttgcaaccattctacttgtgaaatcacgctgaccctagcctgtctctggctaaccacacaggccattcccctctcccagcaccttgcagacttgggcccatcaagagctactgctggccctggctccgcagcctggatacttacctggccctcctccctagggagcaagtgccttccacttacttcccatccaggtctcagaggtctcaaggccaaccttggaatccttatttaaccattcaagtaatcaacggaagttttcaccctttaatcttaagtttagccttttaagaaaaacagtaagcgatgactgctgaaaggctcattgtgtaatctcccaagggtttggtcttattccattttcttctggtcaccagatgatttcttcctttaccatcaaatacttcttcataatggtcacagtctgaggatgtgcgcaaattctggttcttcccaagctctaaccgtaacacgtcccaccccctttttaaagcacttactgttttcagagcacccatatcccaccctggtgagaaggccactctcacatctgagtgttgggtacaaagctgctccgtagagtgatgtgcactcctggtgggtgaggggcaggggcagtggcagtgtgcaaagaattgattactccttgcagagcctgtggcttgcatttcctactgctttctacgtttgaaaattatgacagtctctggctaggtctgggtccagattaggatttaaactgataaaggaaactgttggtaaatcctctgctcagaaagcatttatcatgttcctatttaaggattaggtttattaatttaggcctcttagaagctaacccacttaaatattactcttctgaatgctagttctcttttattcttgatgtcctaagtcaattgaatctggcatctggggctagggtctgcctgtctacatattttttatttttttctgagaaattctgaacacatagatctctttcctaaactgacattttctattttgactgttttcatactataaccaggtaaagggacttctttcagagagctttatactgcctgaccaaagaacaaatctgaaaatcaccattttaaagttattttttcagttgaaccaaagtttaagtgaagaggacttttggcatattatacccaggatcagtttgtctttttgtatccatcaagtattacaggagaaggattgggaacagaatggaaaaacagtgtatgaaagtcatgttacaggccgagtgcggtggctcacacctgtaatcctagcactttgggaggctgaggcaggtggctcacttgaggtcaggaattcaagaccagcctggccaacatggtgaaaccccgtctctactaaaaagacaaaaaattagctgggcgtggtggcgggcacctataatcccacctacttggtaggctgaggcaggagaatcgcttgaacccaggaggcggaggttgcagtgagacgagattgtgccactgcactctagcctgggtgacagagcaaaactgtgtctcaaaaaaaaaagtcatgttacacatttaagtttttgaaattgctccttttatcggtaaagattctcaatccaaattctcctgggtgtgttgtcatcagctgtgatatgtttgtgcacattacgtatagcagaggatgtaagcaatattattgtttgtgaagttttgtttttaatgtcttgagtatgagttatgtttagtcactgtcagcatctgagaactttaataagcccttgagatattccaaagttttattttacttttttaaagaacagaaaaagatgaatgaaagaaccaaggagagatgcagagactatatttagcatgtataggttaaagtaagaaggaggttgtggtaactaaataggagtcctataaaatcaaatacattgtcaaccttttctgcacatctagtttcctaccatagaatcccactggaataccacatagcttttgcactgcagttactatttactaatgtaaacgtagggtttgtaaaagtcacaaacttataagcaatgaacttacctgctagtctttttattttggcttgcatgaagtcactgcaaattcaaatgtcagtaccggcatttaaaatatatctatatcactttgttggtacaaagttatttcaagataagtgtaattttgttacaagtttattttgaagagacaaatctcctgtgatctatgcaggacctctgtactttctaaagaacaaaatgttatgtagacattatacatggttggttgtctcttcttgaaactgtaatgtaaatctagggtccagtcatatcctaggtatcatcatttatccaagtacttggaggaatacaagtatatataaatacagtcattgagaataagtcgatttgaggcatacaagagtagtttcttacacagtttaacacggcctgattcaagactctgataggattcaaacagataccggttaaccatgactaccaaaactgatcatctgagtcgattgatagaggtgtgactagtccttagcactttttctcattcctctttttattcagcattgctgttacctatttcaggtttataagacctctttcagcagatcacatcagaagccaggaaatgcatagctaggagatgtcaaaagcccatatgaggagtggaccaagcagcagtggcggtttctcctcgcatctttttttttttaagctttaacttagcaggggcatggactttatagcactttttcaactttttgctttgctttggataagaaatccttacctttaaaaaaagcttctagtctccataacccccaaagtactgcttatttgtttgaagaatccagccatcgtagtgctttagtcactatcgtaaacattcatgatagggcaaggattttaaaacaggattcttgcttctgtagtcatcaaggtgaacagaagcatcctacacaaccactaagggctctatgtttgtgtcatgcctcttcaaacaccaaggagttgaacatgcttccagtgatttgtctccgtaatgccttcttcctttatttggcctttctttctttctgtaccttcaagttcttgatttttaaaattccaactctagagaaaaccaatatatggtggtgctgggctttgaagatagcatatcagacgccttggttctgtttgtacacttagccttacatttcaggaggaggcttttcattaggggcttaagctagctcctttggcttttaaaaaaaattttttttcaaatttcttcattacctaagggagcctgcatctaaatttctcaactagttcagcctagctgaattttctagtgtgttatacactttgcttccttcttattggtgaaaaccagggggatgagtggcttccatggagagatttcctgatttctcagggaggaaaaaagtgatgacatttaccactacttttatgtttttcccctttttccaaattgataaggatttctggttcctagtgatccgggattgggcaacagtgcagaactgccagtcatgccgtaggccgtgaagaaagaatgtgagtaactgttgttttgcaaggatttgtagggttatgggcagttgttgtttgaagcattgctatgacctaattcccaaggtatctttcctctcttggtgttctaggtaagccaatgagctttaatctctacttgctataaccgtgtgcttagaaaaagaggtgagagtagtggttttccttcaaactgtccacattcatgaagattatgaattgttaggacagccagggcaagatagaccctgtctctacaaaaatttttttctaaattaaccgggcatggtggtgcctgcctgtagtcccacctgtgtgggagaatcacttgagcctgggaggtcaaggctgcagtgagccatgattgcacccctgcactccagcctgggtgacagagtgagaccctggctcaataagagggggaaaaaaaattgttaggagctgggtgcggatgcagcctgcaatcccagctacttgagaggctgaggccggaggattgcttaaacccaagaatttgagcgtagcctgggcaacacagcaagaccccatctaagaaaaaaatgttttttaaatcagcttagcccaaaggggttgtgaatggggaggtataaaaagcaaagattattttttggctactaagccaagaacttacagggattttttttttcagtcccagaacctacagataccctgctacttgcttcacgtggatgctcagtgcccagcagccatcttaatacattaaaccagtttaaaaaataccttccatgtggagaaaaacatgtctttttctcgcctcaactttatccacatgaaatatgtgcccatggctgggcgcagtggctcacctgtaatcccaacactttgggaggctgaagcaggcagattgcttgaggccaggagttcgagaacagtctggccaacatggcgaaacctcatctctactaaaattacaaaaattagccgggcatggtggcacatgcctgtaatcccagctacgtcaggaggctgaggcacaggaattgcttgaacccaagaggcagaggatgcaatgagccaagatcacaccactgcactccagccttggcgacagagggagactctgtctcaaaaaaaaaaaaaaaaggtgtgcccaggcccctagccattgccatgtgcccagccagagagccaaattagagggctggcttccctatcacacagaataaatgctagtgctagccaatgatccctttgcttttaatgtatagaaaatactgttgttccttttgtcatttccagtgacatctgttttctaagcagctcttttctagggaggaaaccaaaggggctaggttaagaccctaatagaaatgttttttctaatctctggtgagtctggaagtgtcacattcacagtccacccttgggagtggcttggtggagctggggacaaggttttgtttactacatagtgcacatgataaatggccttaaactgtgattctttctggtaggataagttataataaactgaccctaaagaatgcaatggcttttaaactgcagttactgtgttcttaatgaagcaatacccaaagctctgttcttttggagcacttgaggggagcttgaatgaaaggtgcagataagagcagtaccttgatcttatgctttctgagtgtcctgccttgttgccatctgcatggatgagtgaatgcttctatgcacgaggagactcaagccaactcagagtctgctttttccaacgctcttcccaggtttcttttgcaaagcttggtcatttggcccaggtcttcctggaaagtggagtacatgtcactgactagggtggcgtggtgtctttacccttaacattaagtcttgttacctcagtgatgtgaagccaatggttggaattataaaaagcatccttgctggttcttcacaggacactggaacccaccctgtcaattcagctagcatgtccacacagtcttgatgatccctctctgtaacaggcagctaacattaagagaagggggaaagagaagaagagagcaatagcttatgggagagctgagatcttacttcgttgacccatatttttcccctgaccaagttacctgtaaactggaatttgcaaggggatgctgtgatgataacccctttctattgctgtaatgttcatataacctgggaaactgagagaaggggatgtgtaaataaaagcttaaacattttagtaatgtgttaaaatgtcactctctcttaccctgtttcccttttttgccagatgatgatttttttatttttattttgtactttactggatgactgtgaagcgatgagtattgggttggggtaggtgtgttgattttgagagtgcatgttaagaactgaaggggaactacttgagatgacttaagaagcatcccatgcaaatatcttgttttgccctaataaaatattcagaaagata

SEQ ID NO: 180095 - DNA, 460 bp, Homo sapiens
  Payload ID: 15471
  Gene Symbol: SPTLC2
  Gene Name: serine palmitoyltransferase, long chain base subunit 2
  ENST ID: ENST00000556607
  CDS Start-End: 1-123
catagtgcagtgtatgccacgtcattgtcacctcctgtagtggagcagatcatcacctccatgaagtgcatcatggggcaggatggcaccagccttggattattttgttttctctcaccgtgactttccaggtaaagagtgtgtacaacagttagctgaaaacaccaggtatttcaggagacgcctgaaagagatgggcttcatcatctatggaaatgaagactctccagtagtgcctttgatgctctacatgcctgccaaaattggcgcctttggacgggagatgctgaagcggaacatcggtgtcgttgtggttggatttcctgccaccccaattattgagtccagagccaggttttgcctgtcagcagctcataccaaagaaatacttgatactgctttaaaggagatagatgaagttggggacctattgcagctgaagtattcccgtcatcggttg

SEQ ID NO: 180096 - DNA, 1518 bp, Homo sapiens
  Payload ID: 15471
  Gene Symbol: SPTLC2
  Gene Name: serine palmitoyltransferase, long chain base subunit 2
  ENST ID: ENST00000554901
  CDS Start-End: 1-1222
agaaacaccaatgctggttgctgtgctcacgtatgtggggtatggcgtactcaccctctttggatatcttcgagatttcttgaggtattggagaattgaaaagtgtcaccatgcaacagaaagagaagaacaaaaggactttgtgtcattgtatcaagattttgaaaacttttatacaaggaatctgtacatgaggataagagacaactggaatcggccaatctgtagtgtgcctggagccagggtggacatcatggagagacagtctcatgattataactggtccttcaagtatacagggaatataataaagggtgttataaacatgggttcctacaactatcttggatttgcacggaatactggatcatgtcaagaagcagccgccaaagtccttgaggagtatggagctggagtgtgcagtactcggcaggaaattggaaacctggacaagcatgaagaactagaggagcttgtagcaaggttcttaggagtagaagctgctatggcgtatggcatgggatttgcaacgaattcaatgaacattcctgctcttgttggcaaaggttgcctgattctgagtgatgaactgaatcatgcatcactggttctgggagccagactgtcaggagcaaccattagaatcttcaaacacaacaatatgcaaagcctagagaagctattgaaagatgccattgtttatggtcagcctcggacacgaaggccctggaagaaaattctcatccttgtggaaggaatatatagcatggagggatctattgttcgtcttcctgaagtgattgccctcaagaagaaatacaaggcatacttgtatctggatgaggctcacagcattggcgccctgggccccacaggccggggtgtggtggagtactttggcctggatcccgaggatgtggatgttatgatgggaacgttcacaaagagttttggtgcttctggaggatatattggaggcaagaaggagctgatagactacctgcgaacacattctcatagtgcagtgtatgccacgtcattgtcacctcctgtagtggagcagatcatcacctccatgaagtgcatcatggggcaggatggcaccagccttggtaatggcatcactattcatgaagttgtccaaacaagaaatacctatcatcgtttctctcctttatcccctgtatttagtcaccagtgcctatggatcatgcttccttaatatctttgaacctgtctacttctccatatctcattgttatttacttgacttagatttctgtccactttcacctggttttaatagccagccagtcataatagtagaggaatcagtcaagcaaaaatgctttggaagaattaaataagcaatgctgaacatcaggaattgtagatatccgtacagagagttccagtaaaattttatgagtccacgaccccttttctaagcagtctggtccatgttggtctcatacctcatatgcaggattcattcattcattaaatatttgtttcata

SEQ ID NO: 180097 - DNA, 6169 bp, Homo sapiens
  Payload ID: 15472
  Gene Symbol: SPTLC3
  Gene Name: serine palmitoyltransferase, long chain base subunit 3
  Uniprot ID: Q9NUV7
  ENST ID: ENST00000399002
  CDS Start-End: 275-1933
ggacaatctcctttacagtttcggaagcaggtttgttgccatggagttcacattttgacgggagttgagaagtataaaggtaaccatttgttttagtttcaacgatctgacaaaaagataggctgttgctcttcttctggaaaagcctgattggtaagattcctttaagggctcagccccaaagagctttatcccatcccctcgcagactgaaaactaaagcctgcagagacctctgaaggaaaacctgtcccgggctctgtcacttcacacccatggctaaccctggaggtggtgctgtttgcaacgggaaacttcacaatcacaagaaacagagcaatggctcacaaagcagaaactgcacaaagaatggaatagtgaaggaagcccagcaaaatgggaagccacatttttatgataagctcattgttgaatcgtttgaggaagcaccccttcatgttatggttttcacttacatgggatatggaattggaaccctgtttggctatctcagagactttttaagaaactggggaatagaaaaatgcaacgcagctgtggaaagaaaagaacaaaaagattttgtgccactgtatcaagactttgaaaatttttatacaagaaacctttacatgcgaatcagagacaactggaaccggcccatctgcagtgccccagggcctctgtttgatttgatggagagggtatcagacgactataactggacgtttaggtttactggaagagtcatcaaagatgtcatcaacatgggctcctataacttccttggtcttgcagccaagtatgatgagtctatgaggacaataaaggatgttttagaggtgtatggcacaggcgtggccagcaccaggcatgaaatgggcaccttggataagcacaaggagttggaggaccttgtggctaagttcctgaatgtggaagcagctatggtctttgggatgggattcgcaactaactcaatgaatatcccagcattagttggaaagggatgcctcattttaagtgatgagttaaaccacacatcgcttgtgcttggggcccgactctcaggtgcaaccataagaatcttcaaacacaacaacacacaaagcctagagaagctcctgagagatgctgtcatctatggccagcctcgaacccgcagagcttggaaaaagattctcatcctggtggagggtgtctacagcatggaaggttccatcgtgcatctgccccagatcatagctctaaagaagaaatacaaggcttacctctacatagatgaagctcacagtattggggccgtgggcccaaccggccggggtgtcacggagttctttggactagaccctcatgaagttgatgtgctcatgggcacattcaccaaaagttttggagcttcaggaggttacatagctggaaggaaggacctcgtggattatttacgggttcactcgcatagtgctgtttatgcttcatccatgagcccaccgatagcagagcaaatcatcagatcactaaaacttatcatgggactggatgggaccactcaagggctgcagagagtacagcaacttgcgaaaaacacaagatacttcagacaaagactgcaggaaatgggattcattatctatggcaatgagaatgcttctgttgttcctctgcttctttatatgcctggtaaagtagcggcttttgcaaggcatatgctagagaaaaaaattggagtggtggtcgtgggatttccagccactcccctcgcagaagctcgggctcggttttgtgtttcagcggcacatacccgggagatgttagacacggttttagaagctcttgatgaaatgggtgatctcttgcaactgaaatattcccggcacaagaagtcagcacgtcctgagctctatgatgagacgagctttgaactcgaagattaagtttcctggtcctgaatgacacataaagactttgcgagaaagacctccctccttgcctcacaaggaatataaatggatttctcccccttcctcaggacaattttggttcccagaccagcttgattgaactgagggagacgttgttgtttttaatgtctccagcttggactgcagagacaaaaacatgattccagatttaagtctctcttcttccaagtattctactagaaatacacacacacacacacacacacttctgagaatatttttaatggcaataagcctgtgttttagctgctactgtgcagaccctttcagggattccaaccaaatgcaaatgagagaatttaaaatttttattcagtaagttcactatgtgtttacttattccatctgcagatgtaagtgagtgtggtggacagtagccaccttccttgttccactcataaaagcatcagctagatctcatctgtatcatgggaagttccaggcaggagggtaaagaaatgttgtttctaccatttgtcacatttggacgtttttcacagacaagtgtcaaaagacatagttaatgtttcgagggggaaagcagaactgatcaactgcgactagagacgtctttgaaggaaattttccttttcctcttgctggtctcctacagttttacagctgagcttttgaggtttggaaaattcaagatgtttgtttcataagaaaaggggcagaaagcaagcacaagacacttttaggtctagactaaaatggtagttacaacaatttgaaccttgttggtgcagtgcacggtgaatgcttaccctgcacagcctctattaccttaaggaattagttgtcattttcctattgaattttgagtaaatggtgaaattcagtgtcctttagaatcgactcccaagactatatttgaagaatgcattgattcaagaaggacatttaaaagcaaattctgactttttcaagaccaacacacttgtttaggcctattaaattgtactatcacttgttacatgccctctgaattgggagaaagtgggcttgcacactttgaggtaactaactgtaatttacttgtgttctctctttcttgctctccttctcaacatgaacacaaacctctatggaaaagtagcctcttgttaatctgatctagtttgtatggaaaaagcccatggagaaccttatctttaacaagctcccagagggtgcccagatttggaaattctagagagcagtggtgaccttttagcaaagcttctgtaacagttcgaatgagttgcagaacattccactccatcaaatgacactgtaaacaaatcacttcaagagaggcttggttttgtgtggcacagatggacccaagctttcatgctgtgcactgagatagaaactccacccgcagcgcctgcgatggatggagcagtgtgccctgatgctcaaagcgtattaaaggaaaaaaagtgatcagcatggaaagtttttatggggaaattataactccaagtgggtgcattggtttaaaaatggatcacaatgatagagttcttcatgaatgtttacaagttgtaaggaataccgttagtgaaagaggaaaagaagtgggttctgaaaatgcagtttcccatccaatgattttgataacaaaattccaacttttctcaatgaaactgatgcagtattatttgtgcaaataaaatgtgtcataaatatgcaaagaaagggagacatactgttcttatcttgaatatgtgcatttaaatgaattgtccaaaatgcataaatgccttgcgttctataaaggaaacaggaggtcaaaaagacagcgagatatctagtccttccacaaggtatggaaagcaataaacatcttcctttctttctggatctgtctgtgatgtttacacacaccttcacatctacacttcaagttttaagcccctagacatgtgtcttcatgagcaggaatgtccactattattactttcatggaggatattgggtctaattcattgtgggaaactacttacctacccagcatggaaggcagggaggaagttagtctcttttcatcaagattcaagagtacaggggcaatttattacactgcaatgtacaaaacaaaaggacctgtttctgttagagagtccatgttgaatatacaggtatgagaacaactgttgatatacaggtataatccaagtagaatgcttccacagtgcattagaaggtgcccaagctccacagggccaataatattagagtatatgtcatatagaataaggttaattaggagggtgattgtgaataatgagatttttaatttttttaagaaaaagctctcaaatgctaggctaataagttcatgattttaattcatgattttaattcatgattaaaattatttgattattgagtcttgataattatatcatcaaccattaccctctacatcaccgccccgaccttagctctaattatatcagagccaaaaatgtgtctttggttagatctgttggaaaagagaattttctataatgttatgcgcactcagcccttctgttcacatttacacacatgcacacacacatacacatatgcatttttcctttacggagtaagcaactatgaaaatctggttggttgagaaataaatggaagatgttcttgaaaatgacctcaggaaagcagaagataaaggttccagatgatatttgtaaggaggctatctctgtataataaggaaatggcatagacttattcctaatctcattatgaaacgatggtgtcatggacgtttaaccatattgcctttcagcatgctttgattttacagagacgacaggctttggaatttactaggaagctggctaaaatccatacccctaggccctacaccagacctttactgaaacataatagttgtagtgcccaggaatctacatttttaaccagccttcctgcgtgattctaatctatgccaaaatttaagaacattattcaaactctaatttgataaaccaattgactctaatagcaggaaccttgttctgattctcttgttcataattaagtgtatatatactggtaaaattaatttattccacagtcaaccttctcttctcattgggacattttgttcccattttccaagtaacttctctttctacaaaaattgatccaatattgaagaaccatctgcgattcatttgggtaaaattatgccttcttcagttttctgtatcattccctataagatgcccatttgctttgaatgtggtatctttcttttctttctttctttttttttttttttttgagacagagttttgttcttcttgttgcccaggctatagtgcaatggcaagatctcggctcattgcaacctccacctcccgggttcaagcgattctcctgcctcagcctcctgaggagctgagtttacaggcatgtgccaccaagcatggctaattttctatttttagtagagacaaggtttttccctgttggtcaggctggtctcgaactcctgaccttaggtgatcctcccacctcggcctcccaaagtgctgggattacaggcgtgagccaccgtgcccggcctgaatgtagtatctttcttctgttttcttttcctgctctttaaaaaacaaccttcaacctctgattatttattccaacaacagctcttcagtagggtaaaagtcttaacagttcttcaaacgaacaatattcttttgtatttttcttcagagatagcaaatgttataaatggcctactctgatttaaaaacctaagttccgatgatgatgaaacattaactcttaaatatacattttgatttatagcaataataacaattgtaacaacagcaattaagaacagcatctggtgaattcttggcaatgtttcctggtctcaaaacagtaagaacaatttgaagtctgttctttagaatgccctactcagctgcataatgtttagaaaattaaagagtctgtattttaaatatttttaggtaattattgcgggacattgtcttatggtgtcctgatgtacgtggggtgtgcatgtgtgtgtgtgtgtgtgtgcatgtgtctttgtgtgtgtgagaaggacagagagaaatgtatgtttcactgaaacatttgaaacgaccaatttcactttattgtgcctgtaaaatgttagttttaaaataaataaaaataatatgaaaataa

SEQ ID NO: 180098 - DNA, 572 bp, Homo sapiens
  Payload ID: 15472
  Gene Symbol: SPTLC3
  Gene Name: serine palmitoyltransferase, long chain base subunit 3
  ENST ID: ENST00000434210
  CDS Start-End: 154-572
ccagcatggacaatctcctttacagtttcggaagcaggtttgttgccatggagttcacattttgacgggagttgagaagtataaagactgaaaactaaagcctgcagagacctctgaaggaaaacctgtcccgggctctgtcacttcacacccatggctaaccctggaggtggtgctgtttgcaacgggaaacttcacaatcacaagaaacagagcaatggctcacaaagcagaaactgcacaaagaatggaatagtgaaggaagcccagcaaaatgggaagccacatttttatgataagctcattgttgaatcgtttgaggaagcaccccttcatgttatggttttcacttacatgggatatggaattggaaccctgtttggctatctcagagactttttaagaaactggggaatagaaaaatgcaacgcagctgtggaaagaaaagaacaaaaagattttgtgccactgtatcaagactttgaaaatttttatacaagaaacctttacatgcgaatcagagacaactggaaccggcccatctgcagtgccccagggcctctgtttgattt

SEQ ID NO: 180099 - DNA, 645 bp, Homo sapiens
  Payload ID: 15472
  Gene Symbol: SPTLC3
  Gene Name: serine palmitoyltransferase, long chain base subunit 3
  ENST ID: ENST00000450297
  CDS Start-End: 1-645
aactgcacaaagaatggaatagtgaaggaagcccagcaaaatgggaagccacatttttatgataagctcattgttgaatcgtttgaggaagcaccccttcatgttatggttttcacttacatgggatatggaattggaaccctgtttggctatctcagagactttttaagaaactggggaatagaaaaatgcaacgcagctgtggaaagaaaagaacaaaaagattttgtgccactgtatcaagactttgaaaatttttatacaagaaacctttacatgcgaatcagagacaactggaaccggcccatctgcagtgccccagggcctctgtttgatttgatggagagggtatcagacgactataactggacgtttaggtttactggaagagtcatcaaagatgtcatcaacatgggctcctataacttccttggtcttgcagccaagtatgatgagtctatgaggacaataaaggatgttttagaggtgtatggcacaggcgtggccagcaccaggcatgaaatgggtgaattcacctcatcctggcagaatgccctctgtgtgggaggggtcttgcaagctgactcagtgccacaggggccaccctggtcatggaaaatgggcaggcactcttccctgttggag

SEQ ID NO: 180100 - DNA, 453 bp, Homo sapiens
  Payload ID: 15472
  Gene Symbol: SPTLC3
  Gene Name: serine palmitoyltransferase, long chain base subunit 3
  ENST ID: ENST00000431275
  CDS Start-End: 1-365
tgagcccaccgatagcagagcaaatcatcagatcactaaaacttatcatgggactggatgggaccactcaagggctgcagagagtacagcaacttgcgaaaaacacaagatacttcagacaaagactgcaggaaatgggattcattatctatggcaatgagaatgcttctgttgttcctctgcttctttatatgcctggtaaagtagcggcttttgcaaggcatatgctagagaaaaaaattggagtggtggtcgtgggatttccagccactcccctcgcagaagctcgggctcggttttgtgtttcagcggcacatacccgggagatgttagacacggtgatttgctgtgtcatgaagatataacttcaaatgcattctgcaaccttatctttttcttccacaagactacatataagtcactacattttaaaataaaaccttttaagggtaa

SEQ ID NO: 180101 - DNA, 2777 bp, Homo sapiens
  Payload ID: 15473
  Gene Symbol: SPTSSA
  Gene Name: serine palmitoyltransferase, small subunit A
  Uniprot ID: Q969W0
  ENST ID: ENST00000298130
  CDS Start-End: 150-365
gggtctgggcgtgccgcgggtgacggcggggccgggcgggccaatgggcgctgggtggcgggcgggcgggcctggcggccgggggctttaggacgtgagcgggcggccggccggacagactgacgtgtgagctgcatcgcgggaggcgcatggcggggatggcgctggcgcgggcctggaagcagatgtcctggttctactaccagtacctgctggtcacggcgctctacatgctggagccctgggagcggacggtgttcaattccatgctggtttccattgtggggatggcactatacacaggatacgtcttcatgccccagcacatcatggcgatattgcactactttgaaatcgtacaatgaccaagatgcgaccaggatcagaggttccttggggaagacccaccctacgaagttggaatgagaccatcagatgtgataagaaactcttctagatgtcaacataaccaaccttataaagactaaaattcatgagtagaacaggaaaatcatcctgactcatgtgttgtgttctttatttttaattttcaaagaggctcttgtatagcagtttttgtctattttaacattgtagtcatttgtactttgatatcagtattttcttaacctttgtgactgtttcaatattacccccgtgaaagcttttcttaatgtaactttgagtacattttaattgccttctatttttaaaactcaaaatcattagttgggctttactgttcttgctattgtatggcatatacatctgcctggatatatttctactcttgaccaaagttttgtaaagaacaatataagatttcgggtaggggtatggggagggaagatattttattgagaactacttaacaaaagatttatctgtaagcttgaactcaggagtacagttttagctatctagactctaacagcttttgctttaaaattattaaagtgtttcttaatgaaaaagaaaagatcttgctaaagttaaaataaggaacatttcaccttttaaatatttaattcttatgtggacttatttccagaaaactttggtgataattcttgagacaaaaggtggttaagtagcattattatgtaatgcttatataccatagagtttttaatagaagagaaatccatttcctccgagggtcactattaacaatgtacttccttaaatttagtttaatgattgtaatgggtgctgcatttgcacattgcattaagttatgatgagacgaattgttgttaaaaattatagcaaaaagaaatgtaaacttggttaaaatcctttcactctttgtattgttttttttaaggtttttattccttaaatgtaaaatgactacctaattttttgatgtaaatacattaaattcaaagagaaaaaaaatcagctgatgtagcagtatatcttttccttgatggttaaatattgatctagtatttatattgctgaattattttctgtggaggaccagataagcagtaagtatgtcttatcctatatgttttgcaacataaaaatattgctaattgaaaagaattaggcaattatgtgtgttgctgggttgtttttttgtttttttttttttgagacggagtcttgccctgtcgcccaggatggagtgcaacagcatgatctcggttcactgcaacctccatctcctgggatcaagtgattctcctgcctcagcctcctgaatagctgggattacaggcacctgccaccatgcctggctaattttttgtatctgtagtagagacggggtttcactgtgttggccaggatggtctcaaactcctgacctcctgatccacctgcctcggcctcccaaagtgctgggtttacaggcgtgagccaccgcgcccggccaaaattgaggtattttttgccctacgttttaaggactagacttttgaagtattttatagtctagaggtctcaagtaatatatatgtgtttaatatttttagagccaattgataccacaattagataggagtagtgagaataatatggaattacttggtttgaagtagttaaaaattggatatggttatatctgagctgtagtcatattatctcaagaaaaataatacgaggatttaacataagatttgttctattaatgcccaaatttggctttcctctactatcccccatagagaaccactaacaagtggatgtctaatattcctctggtgagttgaaggcaggagaagttgagaatcattagtttcaatgagtatccaggtgacctatcctggccctctactcagaaaccggcaatttgtcttcactctgagattcattaaattgctgttgtataactgatggttattatgaacactgacctgtgagacatatggaagataaagtttggtcttacaggaaatcttgaggagagtcaaaagagaaatgggagatgtctcttgagaggtgatcagagaagtttatgctcactgtctgatgcaaatgtctggtctatttgttagtaaataacagggaaatcattttcactttttgttaaaaataaggtatttacaagcataccttgtagttattgtgggttcagtttcagaccactgcaataaagtgaatatctcaataaagtgagtcacatgaagttttttggttttcccctgcatataaaagttacatttacaccatcctgtagtctattaagtgtgcagtagcattatggctaaaaaaaaaaaacacccaatatacctatcttaattaaagaattatttattgctgaaaaa

SEQ ID NO: 180102 - DNA, 3103 bp, Homo sapiens
  Payload ID: 15474
  Gene Symbol: SPTSSB
  Gene Name: serine palmitoyltransferase, small subunit B
  Uniprot ID: Q8NFR3
  ENST ID: ENST00000359175
  CDS Start-End: 1572-1802
attcatcaaaagaggctttcgctcccggactcccctgggcctcgagcagaaagcgtctcggccacggagatacagaaccgggagccttcaaggtcctccgccactctcagcaagccctgctctcgatggagaggagatcgctgggtgatggatgtgggcttccagggaaggtgctcgcgctggtcccgagccctccggggaagatattcgagcgcggagcgtaagcgcagggcacgccagccccgggagccgcgggagcaggcgccgcgcgtctctgcaccaccgggccgcctcccagccttctttccccagtttgccctcctgccgcagtccgggccgagattaattctctgcacttgtgagtgggcacacacaagttctccgggcacgatcctttcatctatttccctgggggagtccacctttttaacgattaacctcctagctaccgcgggcaaggtggcaggatgcgagtggggcggggaggggcgtttcacacgttcagaggcaccaaaattagctgccagtgctaaaaggctttgctttcttcggtttttgacaaataaatggggtgggatgcttgcttggccgcccgctgccccagcccgagccctgggctcacttagcagcctgatgccgagtttcagacgcagtcctgctgcgcttacacccgggcttcttcgcccccttgccaaagtctgcagcccgatggatgctgggcgcgggctttccctgagcgctttaacgcagcttaggctaaagccccagagctcccaccttctacctcctgtttatccgcccgcccctctaccaccgccaaaggacgtgccccttcagtagagtcggggatcccagccccagagcgggggagggcgcctccctatcccctcctccccgtccccgcctcggctcggggttttactgcagcagccggaggtgacagcgacgcctcagccgcctctgttgctctcggagccccggcttcccctgcaccgggaaagcgccccctctcgagaggctggtccctggagaactgcgaacgagctgcagaaaaccagattttaaaatgtagaagtcgttgggctgcattcctccgaggaccagtctgatcgcccaggactaagagtggcagcgtatgagaagttgggaccatagagcaagggggggaggggagtgttgcagcaggcattctcttctggaaggagtcgctgggagcagtgcggttggacacaagtttgcgtaggagtgttttccttttgtcaataattaatcaccggaattagccaggtagaatttgagttttagcaagagtcctgagggcggggccgaacacctaactccgggaggctcccaggcgcccggcgcagtgggaagctcgcagcagctggggaggagccaaagcctcggcgctcacctaagccgcagggagatacacccaactgggagatgaggaaacagcaacccagagaggagaactaacccacacaggatcatttcgtgaaggagcaaggctgaagaaccagacctggactttcttaggacaaacttactgcagcttgaaggagccaaccatggatttgaggcgtgtgaaggaatatttctcctggctctactatcaataccaaatcattagctgctgtgctgttttagagccctgggagcgatctatgtttaacaccatcttactaaccattattgctatggtggtatacactgcctatgtctttattccaatccacattcgcctggcttgggaatttttctcaaaaatatgtggatatcacagtacaatttctaattgatcctgttcacattcagtgaaatggcattgcatatttatatgttgcttacagcttattgatttaggtaactattgtgtcttccttcactatctgacctgaaaagcactctcttctctatgcactcttatattctgcctttctgcctggagtttgaaatacatgtctctttagtttcttttgcacatgctacattgtgctttagaccggagataatacagtgactttacctcacaaatcatattctgtcaacacaaatctatgaatttagtttatttaaaatcagaacaatttcctacaaaatttttctggaaaatagactcctaacagacctaccagaatcatgcttaaagtgctcccttgacacttattctatactaaaggataaattttaaaaaatctttataggctactgtcagaagtatcctatccttgtttacgatgtataaaaagatgtgaataaattatatggaccccctaagtcttattttctagtaaactgatgatactggaaattcttttacttcaaatgcaaaagaataagctggaggcaattatttcctttcatacagagttcatgaattgttttaaatgcttcttaaagtctggctttataaccgtttaaaatcaacaatgttgattttagataaccaagtaagtattataatacaaaataattttaagtgtaagaaactaaagtataatcaaagtaaattcagttattgtatttgtggtgttgccttgccttgcatgatgctgggggaaaaagagaaaagaaatggttttctttttgtactttcattcagtgtagagggaaaaaagcatgtattgggccaccggaagacaagctaataaataggctggaagtaatattctaccagcaggaactcaacagctccagttaaatgctttgatatagtggctcctttgcagagccaaaacaagatttattaaatttccttcaaactgtttatctttaaaacaaatataaggttttaattatactgctgaagcaaatgtgaatgccaaagactacgttttgcagttttgctttcctcccaataaatattaatgtatgtaattctagagggtaaaaatgtaaataggtttggacaatatttgcacccttgtttgtgttatgaaaaaaatttttccaaggtgagctagagagaaagatgtttggcatgccaaattaacttgcatgtttgttaaaaaaacaaacacatgttttgaagagaaaccagatctgaacatgtatttgttgagttttgcaaaataaaattaattttgtaagtaaatatcta

SEQ ID NO: 180103 - DNA, 880 bp, Homo sapiens
  Payload ID: 15474
  Gene Symbol: SPTSSB
  Gene Name: serine palmitoyltransferase, small subunit B
  Uniprot ID: Q8NFR3
  ENST ID: ENST00000497137
  CDS Start-End: 332-562
agcagctggggaggagccaaagcctcggcgctcacctaagccgcagggagatacacccaactgggagatgaggaaacagcaacccagagaggagaactaacccacacaggatcatttcgtgaaggagcaaggctgaagaaccagacctggactttcttagtgctcattcctgggccctcgatcactgcatgtttgttacatggtccagtttgctgcttcctggaagagcatctcctgactgtgatgcctttgagaataaagtctttccgaagccattaatattcagaaggagccacatggacaaacttactgcagcttgaaggagccaaccatggatttgaggcgtgtgaaggaatatttctcctggctctactatcaataccaaatcattagctgctgtgctgttttagagccctgggagcgatctatgtttaacaccatcttactaaccattattgctatggtggtatacactgcctatgtctttattccaatccacattcgcctggcttgggaatttttctcaaaaatatgtggatatcacagtacaatttctaattgatcctgttcacattcagtgaaatggcattgcatatttatatgttgcttacagcttattgatttaggtaactattgtgtcttccttcactatctgacctgaaaagcactctcttctctatgcactcttatattctgcctttctgcctggagtttgaaatacatgtctctttagtttcttttgcacatgctacattgtgctttagaccggagataatacagtgactttacctcacaaatcatattctgtcaacacaaatctatgaatttagtttatttaaaatcagaacaatttcctacaaaatttttctggaaaatagac

SEQ ID NO: 180104 - DNA, 231 bp, Homo sapiens
  Payload ID: 15474
  Gene Symbol: SPTSSB
  Gene Name: serine palmitoyltransferase, small subunit B
  Uniprot ID: Q8NFR3
  ENST ID: ENST00000620149
  CDS Start-End: 1-231
atggatttgaggcgtgtgaaggaatatttctcctggctctactatcaataccaaatcattagctgctgtgctgttttagagccctgggagcgatctatgtttaacaccatcttactaaccattattgctatggtggtatacactgcctatgtctttattccaatccacattcgcctggcttgggaatttttctcaaaaatatgtggatatcacagtacaatttctaattga

SEQ ID NO: 180105 - DNA, 1292 bp, Homo sapiens
  Payload ID: 15474
  Gene Symbol: SPTSSB
  Gene Name: serine palmitoyltransferase, small subunit B
  ENST ID: ENST00000617024
  CDS Start-End: 89-781
ggccacggagatacagaaccgggagccttcaaggtcctccgccactctcagcaagccctgctctcgatggagaggagatcgctgggtgatggatgtgggcttccagggaaggtgctcgcgctggtcccgagccctccggggaagatattcgagcgcggagcgtaagcgcagggcacgccagccccgggagccgcgggagcaggcgccgcgcgtctctgcaccaccgggccgcctcccagccttctttccccagtttgccctcctgccgcagtccgggccgagattaattctctgcacttgtgagtgggcacacacaagttctccgggcacgatcctttcatctatttccctgggggagtccacctttttaacgattaacctcctagctaccgcgggcaaggtggcaggatgcgagtggggcggggaggggcgtttcacacgttcagaggcaccaaaattagctgccagtgctaaaaggctttgctttcttcggtttttgacaaataaatggggtgggatgcttgcttggccgcccgctgccccagcccgagccctgggctcacttagcagcctgatgccgagtttcagacgcagtcctgctgcgcttacacccgggcttcttcgcccccttgccaaagtctgcagcccgatggatgctgggcgcgggctttccctgagcgctttaacgcagcttaggctaaagccccagagctcccaccttctacctcctgtttatccgcccgcccctctaccaccgccaaaggacgtgccccttcagtagagtcggggatcccagccccagagcgggggagggcgcctccctatcccctcctccccgtccccgcctcggctcggggttttactgcagcagccggaggtgacagcgacgcctcagccgcctctgttgctctcggagccccggcttcccctgcaccgggaaagcgccccctctcgagaggctggtccctggagaactgcgaacgagctgcagaaaaccagattttaaaatgtagaagtcgttgggctgcattcctccgaggaccagtctgatcgcccaggactaagagtggcagcgtatgagaagttgggaccatagagcaagggggggaggggagtgttgcagcaggcattctcttctggaaggagtcgctgggagcagtgcggttggacacaagtttgcgtaggagtgttttccttttgtcaataattaatcaccggaattagccaggtagaatttgagttttagcaagagtcctgagggcggggccgaacacctaactccgggaggctcc

SEQ ID NO: 180106 - DNA, 542 bp, Homo sapiens
  Payload ID: 15475
  Gene Symbol: SPINK1
  Gene Name: serine peptidase inhibitor, Kazal type 1
  Uniprot ID: P00995
  ENST ID: ENST00000296695
  CDS Start-End: 210-449
ttcacctttcttacacaggtgacattcccagaacctggaggccaggctatgacacagagtcaatcaataaccagggagatctgtgatatagcccagtaggtggggccttgctgccatctgccatatgacccttccagtcccaggcttctgaagagacgtggtaagtgcggtgcagttttcaactgacctctggacgcagaacttcagccatgaaggtaacaggcatctttcttctcagtgccttggccctgttgagtctatctggtaacactggagctgactccctgggaagagaggccaaatgttacaatgaacttaatggatgcaccaagatatatgaccctgtctgtgggactgatggaaatacttatcccaatgaatgcgtgttatgttttgaaaatcggaaacgccagacttctatcctcattcaaaaatctgggccttgctgagaaccaaggttttgaaatcccatcaggtcaccgcgaggcctgactggccttattgttgaataaatgtatctgaatatcccctgttgtttccat

SEQ ID NO: 180107 - DNA, 1188 bp, Homo sapiens
  Payload ID: 15475
  Gene Symbol: SPINK1
  Gene Name: serine peptidase inhibitor, Kazal type 1
  ENST ID: ENST00000510027
  CDS Start-End: 59-256
agagacgtggtaagtgcggtgcagttttcaactgacctctggacgcagaacttcagccatgaaggtaacaggcatctttcttctcagtgccttggccctgttgagtctatctggtaacactggagctgactccctgggaagagaggccaaatgttacaatgaacttaatggatgcaccaagatatatgaccctgtctgtgggactgatggaaatacttatcccaatgaatgcgtgttatgttttgaaaatcggtgagtacaaacttgagtttcttttaaactatatattttaagttagttatcttcaagtgtactgataatatgaatctcaccccgagaaaagcaaactatttactttttccaaaaacagttatctctttcttattctcccttttatatatttagcattaaatattattttttagaagtcacttgtatgataaaagcctatattttttacagcaaaatagtcgatagcttggatttttataaagtacacacaaaatacctttaattaaaaaaattattagtggttgcaatgattgtgttttttaaagccctcagttatgcaaatataaattgtatagattatataaccaaaaatatatttttacttatggatatgaaagccagtttcagtaaagcttcatttcctcagtgaccataagtaggtgatgtgatacagagaaatagattcaacacagatttcctatctcactcagcaactgaaaccttagcatgtctcaagcatcatgctaatattccctgtcttacttgtgcttatgactaagaaaacatcatgagcatgtataggatggcttcttataacttggggcaaatgccagaagatgaggtgtaaataaagtgcaacaggagtgaagcagagatacatattttttattaaaaggggccaagaaaggatccatgaaaagaatagaatgccagccgggtgcagtggctcactcctgtaatcccagcactttgggaggccgatgcaggtggatcacctgagaccagcctggccaacatggtgaaaccccatggtggcgggcgcctataataccagctactcaggaggctgaggcagaagaatcgcttcaatctgggaggcagaggttgcagtgagctgagattgtgccactgcactccaacctgggtgacaagagtgagactccatcttaaaaaaaa

SEQ ID NO: 180108 - DNA, 509 bp, Homo sapiens
  Payload ID: 15476
  Gene Symbol: SPINK13
  Gene Name: serine peptidase inhibitor, Kazal type 13 (putative)
  Uniprot ID: Q1W4C9
  ENST ID: ENST00000398450
  CDS Start-End: 63-347
gcaggcccatattcagccacctcatccaggccttatcaaagaagagtcttatatgagatcaaatggctgcctttccccacaagattatatttttcctggtatgctctactttgacacatgtggctttctcaggaattttcaataaacgtgacttcactaggtggcctaagccccgatgtaaaatgtatatcccactggaccctgattacaatgcagactgccccaatgtgacagcacctgtttgtgcctcaaatggccacactttccagaatgagtgtttcttttgtgttgaacagagggaatttcattatcgtataaaatttgaaaaatatggaaaatgtgattaatgggtaccagagtaactacacttgcttattctttttctacttaattcagaatagtatttcttttagagtgtgagaatgtaaattaaataacatccctatgctgtacttaaatgtcgaacaaaatgagagacaaaaatgaaggaatcaaactgacaagaacca

SEQ ID NO: 180109 - DNA, 1022 bp, Homo sapiens
  Payload ID: 15476
  Gene Symbol: SPINK13
  Gene Name: serine peptidase inhibitor, Kazal type 13 (putative)
  Uniprot ID: Q1W4C9
  ENST ID: ENST00000512953
  CDS Start-End: 532-816
acaaaagagtgctaactactctaggagagattaaagcctgtgaaatagaacttttccagataatggcgagtttttaggcttgctcatgctgaagcttaatataagctaataagtagagaaattaggaggcttggatattgcaaactttattggttggggtgttacccaggctaatagaaaaaaaattatatcctagaaagacagaacaggtgcgacttctgagaagaaaggttagagaagactagaaaggctgggaccaccttgaatttggcacacacacacacacacccacacgcacacacaaaatcaccaaatgatctggaatgtgctatgcgatgagtcagcctccactgctgtacgtccttggctacagactcctggaacagcagctcttctcaaggctagttgtgacagactcctggaacagcagctcttctcaaggctagttgtgacatccaaagtgacaagagcaggcccatattcagccacctcatccaggccttatcaaagaagagtcttatatgagatcaaatggctgcctttccccacaagattatatttttcctggtatgctctactttgacacatgtggctttctcaggaattttcaataaacgtgacttcactaggtggcctaagccccgatgtaaaatgtatatcccactggaccctgattacaatgcagactgccccaatgtgacagcacctgtttgtgcctcaaatggccacactttccagaatgagtgtttcttttgtgttgaacagagggaatttcattatcgtataaaatttgaaaaatatggaaaatgtgattaatgggtaccagagtaactacacttgcttattctttttctacttaattcagaatagtatttcttttagagtgtgagaatgtaaattaaataacatccctatgctgtacttaaatgtcgaacaaaatgagagacaaaaatgaaggaatcaaactgacaagaaccaaatatcacatttgttacaaataaacaacaaaagagctgatattc

SEQ ID NO: 180110 - DNA, 661 bp, Homo sapiens
  Payload ID: 15476
  Gene Symbol: SPINK13
  Gene Name: serine peptidase inhibitor, Kazal type 13 (putative)
  Uniprot ID: Q1W4C9
  ENST ID: ENST00000511106
  CDS Start-End: 335-499
gcaggcccatattcagccacctcatccaggccttatcaaagaagagtcttatatgagatcaaatggctgcctttccccacaagattatatttttcctggtatgctctactttgacacatgtggctttctcaggtggaacaatataatcacaaggattcttatcagagggaggcaggagggcccaagtcagagaagatgtgacaatggaagcagaagttagaatggtgcagtaaaagggccatgggccgaggaactcagacagcctgtagaagctggaaaagcaggaattttcaataaacgtgacttcactaggtggcctaagccccgatgtaaaatgtatatcccactggaccctgattacaatgcagactgccccaatgtgacagcacctgtttgtgcctcaaatggccacactttccagaatgagtgtttcttttgtgttgaacagagggaatttcattatcgtataaaatttgaaaaatatggaaaatgtgattaatgggtaccagagtaactacacttgcttattctttttctacttaattcagaatagtatttcttttagagtgtgagaatgtaaattaaataacatccctatgctgtacttaaatgtcgaacaaaatgagagacaaaaatgaaggaatcaaactgacaagaacca

SEQ ID NO: 180111 - DNA, 294 bp, Homo sapiens
  Payload ID: 15477
  Gene Symbol: SPINK14
  Gene Name: serine peptidase inhibitor, Kazal type 14 (putative)
  Uniprot ID: Q6IE38
  ENST ID: ENST00000356972
  CDS Start-End: 1-294
atggccaaatctttcccagtattctcacttttgtcctttatcttgatacatttggtgttatcttctgtttcaggccctagacactggtggccaccacgtggaattattaaggtgaaatgtccatatgagaaagtaaacttgagctggtacaatggaacggtcaacccctgccctggcttatatcaacccatctgcggcaccaattttataacctatgataatccctgcattctgtgtgttgagagcttgaaatctcatggaagaatcaggttttaccatgatggaaaatgttag

SEQ ID NO: 180112 - DNA, 157 bp, Homo sapiens
  Payload ID: 15477
  Gene Symbol: SPINK14
  Gene Name: serine peptidase inhibitor, Kazal type 14 (putative)
  ENST ID: ENST00000562793
  CDS Start-End: 1-144
atggccaaatctttcccagtattctcacttttgtcctttatcttgatacatttggtgttatcttctgtttcaggccctagacactggtggccaccacgtggaattattaaggaaatctcatggaagaatcaggttttaccatgatggaaaatgttag

SEQ ID NO: 180113 - DNA, 613 bp, Homo sapiens
  Payload ID: 15478
  Gene Symbol: SPINK2
  Gene Name: serine peptidase inhibitor, Kazal type 2 (acrosin-trypsin inhibitor)
  Uniprot ID: P20155
  ENST ID: ENST00000248701
  CDS Start-End: 81-335
cgcgccccgtcgcacgagcgctccctgcgagtggcgcaggtaacagaccgcaggggcaagacagccggcgcgggaggaggatggcgctgtcggtgctgcgcttggcgctgctgctcctggcagttaccttcgcagcctctctgatccctcaatttggtctgttttcaaaatatagaacgccaaactgctctcagtatagattaccaggatgtcccagacactttaaccctgtgtgtggcagtgacatgtccacttatgccaatgaatgtactctgtgcatgaaaatcagggaaggtggtcataatattaaaatcattcgaaatggaccctgctgatggagcagtttacagaaaagaagatggagagaccaccttcactggcagactagataaattgcatttcccctttttctcttttcctgtgtttctttacatgagatttgttaacacacattttctgagagcaggtatggaagacagccatgtgtagtgatggataatttaaagaaaaaaagaatccttgtttcttggcttttgctcctggagttaagcttactgcccaggtgacttgtgcattgctttatttagttgaaataaaatcagcattgaattca

SEQ ID NO: 180114 - DNA, 659 bp, Homo sapiens
  Payload ID: 15478
  Gene Symbol: SPINK2
  Gene Name: serine peptidase inhibitor, Kazal type 2 (acrosin-trypsin inhibitor)
  ENST ID: ENST00000504762
  CDS Start-End: 33-392
cgcaggggcaagacagccggcgcgggaggaggatggcgctgtcggtgctgcgcttggcgctgctgctcctggcagttaccttcgcaggtagcgctcggagcggtcctggcgagcggggacctccggagaaaagcgggtttgggagtcagaccggcggcggaccctgccctgctccgggcggcctcggcgacgcctctctgatccctcaatttggtctgttttcaaaatatagaacgccaaactgctctcagtatagattaccaggatgtcccagacactttaaccctgtgtgtggcagtgacatgtccacttatgccaatgaatgtactctgtgcatgaaaatcagggaaggtggtcataatattaaaatcattcgaaatggaccctgctgatggagcagtttacagaaaagaagatggagagaccaccttcactggcagactagataaattgcatttcccctttttctcttttcctgtgtttctttacatgagatttgttaacacacattttctgagagcaggtatggaagacagccatgtgtagtgatggataatttaaagaaaaaaagaatccttgtttcttggcttttgctcctggagttaagcttactgcccaggtgacttgtgcattgctttatttagttgaaataaaatcag

SEQ ID NO: 180115 - DNA, 763 bp, Homo sapiens
  Payload ID: 15478
  Gene Symbol: SPINK2
  Gene Name: serine peptidase inhibitor, Kazal type 2 (acrosin-trypsin inhibitor)
  ENST ID: ENST00000506738
  CDS Start-End: 81-485
cgcgccccgtcgcacgagcgctccctgcgagtggcgcaggtaacagaccgcaggggcaagacagccggcgcgggaggaggatggcgctgtcggtgctgcgcttggcgctgctgctcctggcagttaccttcgcaggtagcgctcggagcggtcctggcgagcggggacctccggagaaaagcgggtttgggagtcagaccggcggcggaccctgccctgctccgggcggcctcggcgacggtacccgcgcgcccgttactggcggttccccagaggacctgccagcctctctgatccctcaatttggtctgttttcaaaatatagaacgccaaactgctctcagtatagattaccaggatgtcccagacactttaaccctgtgtgtggcagtgacatgtccacttatgccaatgaatgtactctgtgcatgaaaatcagggaaggtggtcataatattaaaatcattcgaaatggaccctgctgatggagcagtttacagaaaagaagatggagagaccaccttcactggcagactagataaattgcatttcccctttttctcttttcctgtgtttctttacatgagatttgttaacacacattttctgagagcaggtatggaagacagccatgtgtagtgatggataatttaaagaaaaaaagaatccttgtttcttggcttttgctcctggagttaagcttactgcccaggtgacttgtgcattgctttatttagttgaaataaaatcagcattgaattca

SEQ ID NO: 180116 - DNA, 608 bp, Homo sapiens
  Payload ID: 15478
  Gene Symbol: SPINK2
  Gene Name: serine peptidase inhibitor, Kazal type 2 (acrosin-trypsin inhibitor)
  ENST ID: ENST00000618802
  CDS Start-End: 81-485
cgcgccccgtcgcacgagcgctccctgcgagtggcgcaggtaacagaccgcaggggcaagacagccggcgcgggaggaggatggcgctgtcggtgctgcgcttggcgctgctgctcctggcagttaccttcgcaggtagcgctcggagcggtcctggcgagcggggacctccggagaaaagcgggtttgggagtcagaccggcggcggaccctgccctgctccgggcggcctcggcgacggtacccgcgcgcccgttactggcggttccccagaggacctgccagggaaggtggtcataatattaaaatcattcgaaatggaccctgctgatggagcagtttacagaaaagaagatggagagaccaccttcactggcagactagataaattgcatttcccctttttctcttttcctgtgtttctttacatgagatttgttaacacacattttctgagagcaggtatggaagacagccatgtgtagtgatggataatttaaagaaaaaaagaatccttgtttcttggcttttgctcctggagttaagcttactgcccaggtgacttgtgcattgctttatttagttgaaataaaatcagcattgaattc

SEQ ID NO: 180117 - DNA, 677 bp, Homo sapiens
  Payload ID: 15478
  Gene Symbol: SPINK2
  Gene Name: serine peptidase inhibitor, Kazal type 2 (acrosin-trypsin inhibitor)
  ENST ID: ENST00000616980
  CDS Start-End: 81-347
cgcgccccgtcgcacgagcgctccctgcgagtggcgcaggtaacagaccgcaggggcaagacagccggcgcgggaggaggatggcgctgtcggtgctgcgcttggcgctgctgctcctggcagttaccttcgcaggtagcgctcggagcggtcctggcgagcggggacctccggagaaaagcgggtttgggagtcagaccggcggcggaccctgccctgctccgggcggcctcggcgacgccagccaaactgctctcagtatagattaccaggatgtcccagacactttaaccctgtgtgtggcagtgacatgtccacttatgccaatgaatgtactctgtgcatgaaaatcagggaaggtggtcataatattaaaatcattcgaaatggaccctgctgatggagcagtttacagaaaagaagatggagagaccaccttcactggcagactagataaattgcatttcccctttttctcttttcctgtgtttctttacatgagatttgttaacacacattttctgagagcaggtatggaagacagccatgtgtagtgatggataatttaaagaaaaaaagaatccttgtttcttggcttttgctcctggagttaagcttactgcccaggtgacttgtgcattgctttatttagttgaaataaaatcagcattgaattc

SEQ ID NO: 180118 - DNA, 392 bp, Homo sapiens
  Payload ID: 15478
  Gene Symbol: SPINK2
  Gene Name: serine peptidase inhibitor, Kazal type 2 (acrosin-trypsin inhibitor)
  ENST ID: ENST00000631082
  CDS Start-End: 81-392
cgcgccccgtcgcacgagcgctccctgcgagtggcgcaggtaacagaccgcaggggcaagacagccggcgcgggaggaggatggcgctgtcggtgctgcgcttggcgctgctgctcctggcagttaccttcgcaggtagcgctcggagcggtcctggcgagcggggacctccggagaaaagcgggtttgggagtcagaccggcggcggaccctgccctgctccgggcggcctcggcgacggtacccgcgcgcccgttactggcggttccccagaggacctgccagatatccaaactgctctcagtatagattaccaggatgtcccagacactttaaccctgtgtgtggcagtgacatgtccacttatgccaatgaatgtactctgtgcatga

SEQ ID NO: 180119 - DNA, 402 bp, Homo sapiens
  Payload ID: 15479
  Gene Symbol: SPINK4
  Gene Name: serine peptidase inhibitor, Kazal type 4
  Uniprot ID: O60575
  ENST ID: ENST00000379721
  CDS Start-End: 46-306
ggcgcaggccccagccagctcaggctacactatcccaggatcagcatggccgtccgccagtgggtaatcgccctggccttggctgccctccttgttgtggacagggaagtgccagtggcagcaggaaagctccctttctcaagaatgcccatctgtgaacacatggtagagtctccaacctgttcccagatgtccaacctggtctgcggcactgatgggctcacatatacgaatgaatgccagctctgcttggcccggataaaaaccaaacaggacatccagatcatgaaagatggcaaatgctgatcccacaggagcacctcaagccatgaagtgtcagctggagaacagtggtgggcatggagaggatatgacatgaaataaaagatccagcccaactga

SEQ ID NO: 180120 - DNA, 533 bp, Homo sapiens
  Payload ID: 15479
  Gene Symbol: SPINK4
  Gene Name: serine peptidase inhibitor, Kazal type 4
  ENST ID: ENST00000379725
  CDS Start-End: 123-452
ttctgcaaatgggaggtactggaaagaacgtgagggcaggaggagagatatgccagggtatttattgccctagctccccctctgccagaccacaggtagaatagcaagaagtctacatcctgatgatcctgggcattgggagctcacctcaccttctctggactctggagggcacacacatatggtccctgctgggggatgcttcgcacacagaccgtcttccagaggcaggggcagggaaactgctgtcagaagtgccagtggcagcaggaaagctccctttctcaagaatgcccatctgtgaacacatggtagagtctccaacctgttcccagatgtccaacctggtctgcggcactgatgggctcacatatacgaatgaatgccagctctgcttggcccggataaaaaccaaacaggacatccagatcatgaaagatggcaaatgctgatcccacaggagcacctcaagccatgaagtgtcagctggagaacagtggtgggcatggagaggatatgacatgaaataaaag

SEQ ID NO: 180121 - DNA, 3535 bp, Homo sapiens
  Payload ID: 15480
  Gene Symbol: SPINK5
  Gene Name: serine peptidase inhibitor, Kazal type 5
  Uniprot ID: Q9NQ38
  ENST ID: ENST00000256084
  CDS Start-End: 43-3237
atgcatggagtggacctgtaggcgacttgcatcgtcttcaacatgaagatagccacagtgtcagtgcttctgcccttggctctttgcctcatacaagatgctgccagtaagaatgaagatcaggaaatgtgccatgaatttcaggcatttatgaaaaatggaaaactgttctgtccccaggataagaaattttttcaaagtcttgatggaataatgttcatcaataaatgtgccacgtgcaaaatgatactggaaaaagaagcaaaatcacagaagagggccaggcatttagcaagagctcccaaggctactgccccaacagagctgaattgtgatgattttaaaaaaggagaaagagatggggattttatctgtcctgattattatgaagctgtttgtggcacagatgggaaaacatatgacaacagatgtgcactgtgtgctgagaatgcgaaaaccgggtcccaaattggtgtaaaaagtgaaggggaatgtaagagcagtaatccagagcaggatgtatgcagtgcttttcggccctttgttagagatggaagacttggatgcacaagggaaaatgatcctgttcttggtcctgatgggaagacgcatggcaataagtgtgcaatgtgtgctgagctgtttttaaaagaagctgaaaatgccaagcgagagggtgaaactagaattcgacgaaatgctgaaaaggatttttgcaaggaatatgaaaaacaagtgagaaatggaaggcttttttgtacacgggagagtgatccagtccgtggccctgacggcaggatgcatggcaacaaatgtgccctgtgtgctgaaattttcaagcagcgtttttcagaggaaaacagtaaaacagatcaaaatttgggaaaagctgaagaaaaaactaaagttaaaagagaaattgtgaaactctgcagtcaatatcaaaatcaggcaaagaatggaatacttttctgtaccagagaaaatgaccctattcgtggtccagatgggaaaatgcatggcaacttgtgttccatgtgtcaagcctacttccaagcagaaaatgaagaaaagaaaaaggctgaagcacgagctagaaacaaaagagaatctggaaaagcaacctcatatgcagagctttgcagtgaatatcgaaagcttgtgaggaacggaaaacttgcttgcaccagagagaacgatcctatccagggcccagatgggaaagtgcatggcaacacctgctccatgtgtgaggtcttcttccaagcagaagaagaagaaaagaaaaagaaggaaggtaaatcaagaaacaaaagacaatctaagagtacagcttcctttgaggagttgtgtagtgaataccgcaaatccaggaaaaacggacggcttttttgcaccagagagaatgaccccatccagggcccagatggaaaaatgcatggcaacacctgctccatgtgtgaggccttctttcaacaagaagaaagagcaagagcaaaggctaaaagagaagctgcaaaggaaatctgcagtgaatttcgggaccaagtgaggaatggaacacttatatgcaccagggagcataatcctgtccgtggcccagatggcaaaatgcatggaaacaagtgtgccatgtgtgccagtgtgttcaaacttgaagaagaagagaagaaaaatgataaagaagaaaaagggaaagtcgaggctgaaaaagttaagagagaagcagttcaggagctgtgcagtgaatatcgtcattatgtgaggaatggacgactcccctgtaccagagagaatgatcctattgagggtctagatgggaaaatccacggcaacacctgctccatgtgtgaagccttcttccagcaagaagcaaaagaaaaagaaagagctgaacccagagcaaaagtcaaaagagaagctgaaaaggagacatgcgatgaatttcggagacttttgcaaaatggaaaacttttctgcacaagagaaaatgatcctgtgcgtggcccagatggcaagacccatggcaacaagtgtgccatgtgtaaggcagtcttccagaaagaaaatgaggaaagaaagaggaaagaagaggaagatcagagaaatgctgcaggacatggttccagtggtggtggaggaggaaacactcaggacgaatgtgctgagtatcgggaacaaatgaaaaatggaagactcagctgtactcgggagagtgatcctgtacgtgatgctgatggcaaatcgtacaacaatcagtgtaccatgtgtaaagcaaaattggaaagagaagcagagagaaaaaatgagtattctcgctccagatcaaatgggactggatcagaatcagggaaggatacatgtgatgagtttagaagccaaatgaaaaatggaaaactcatctgcactcgagaaagtgaccctgtccggggtccagatggcaagacacatggcaataagtgtactatgtgtaaggaaaaactggaaagggaagcagctgaaaaaaaaaagaaagaggatgaagacaggagcaatacaggagaaaggagcaatacaggagaaaggagcaatgacaaagaggatctgtgtcgtgaatttcgaagcatgcagagaaatggaaagcttatctgcaccagagaaaataaccctgttcgaggcccatatggcaagatgcacatcaataaatgtgctatgtgtcagagcatctttgatcgagaagctaatgaaagaaaaaagaaagatgaagagaaatcaagtagcaagccctcaaataatgcaaaggatgagtgcagtgaatttcgaaactatataaggaacaatgaactcatctgccctagagagaatgacccagtgcacggtgctgatggaaagttctatacaaacaagtgctacatgtgcagagctgtctttctaacagaagctttggaaagggcaaagcttcaagaaaagccatcccatgttagagcttctcaagaggaagacagcccagactctttcagttctctggattctgagatgtgcaaagactaccgagtattgcccaggataggttatctttgtccaaaggatttaaagcctgtctgtggtgacgatggccaaacctacaacaatccttgcatgctctgtcatgaaaacctgatacgccaaacaaatacacacatccgcagtacagggaagtgtgaggagagcagcaccccaggaaccaccgcagccagcatgcccccgtctgacgaatgacaggaagattgttgaaagccatgagggaaaaaataaaccccagttctgaatcacctaccttcaccatctgtatatacaaagaattcttcggagcttgtcttatttgctatagaaaacaatacagagcttttgggaatggactcactgattttcagtcttttccatctctttcctcctagactctgtgatctgagggtataaagacatctccaccaagtctgagccctcaaaatgtcctgattacaatgctgtctgtccaactgcctgttcaataaaagtaaactcagcagaacaccct

SEQ ID NO: 180122 - DNA, 3656 bp, Homo sapiens
  Payload ID: 15480
  Gene Symbol: SPINK5
  Gene Name: serine peptidase inhibitor, Kazal type 5
  Uniprot ID: Q9NQ38
  ENST ID: ENST00000359874
  CDS Start-End: 74-3358
ccgagttcagtcatactgcaccagctgagcaatgcatggagtggacctgtaggcgacttgcatcgtcttcaacatgaagatagccacagtgtcagtgcttctgcccttggctctttgcctcatacaagatgctgccagtaagaatgaagatcaggaaatgtgccatgaatttcaggcatttatgaaaaatggaaaactgttctgtccccaggataagaaattttttcaaagtcttgatggaataatgttcatcaataaatgtgccacgtgcaaaatgatactggaaaaagaagcaaaatcacagaagagggccaggcatttagcaagagctcccaaggctactgccccaacagagctgaattgtgatgattttaaaaaaggagaaagagatggggattttatctgtcctgattattatgaagctgtttgtggcacagatgggaaaacatatgacaacagatgtgcactgtgtgctgagaatgcgaaaaccgggtcccaaattggtgtaaaaagtgaaggggaatgtaagagcagtaatccagagcaggatgtatgcagtgcttttcggccctttgttagagatggaagacttggatgcacaagggaaaatgatcctgttcttggtcctgatgggaagacgcatggcaataagtgtgcaatgtgtgctgagctgtttttaaaagaagctgaaaatgccaagcgagagggtgaaactagaattcgacgaaatgctgaaaaggatttttgcaaggaatatgaaaaacaagtgagaaatggaaggcttttttgtacacgggagagtgatccagtccgtggccctgacggcaggatgcatggcaacaaatgtgccctgtgtgctgaaattttcaagcagcgtttttcagaggaaaacagtaaaacagatcaaaatttgggaaaagctgaagaaaaaactaaagttaaaagagaaattgtgaaactctgcagtcaatatcaaaatcaggcaaagaatggaatacttttctgtaccagagaaaatgaccctattcgtggtccagatgggaaaatgcatggcaacttgtgttccatgtgtcaagcctacttccaagcagaaaatgaagaaaagaaaaaggctgaagcacgagctagaaacaaaagagaatctggaaaagcaacctcatatgcagagctttgcagtgaatatcgaaagcttgtgaggaacggaaaacttgcttgcaccagagagaacgatcctatccagggcccagatgggaaagtgcatggcaacacctgctccatgtgtgaggtcttcttccaagcagaagaagaagaaaagaaaaagaaggaaggtaaatcaagaaacaaaagacaatctaagagtacagcttcctttgaggagttgtgtagtgaataccgcaaatccaggaaaaacggacggcttttttgcaccagagagaatgaccccatccagggcccagatggaaaaatgcatggcaacacctgctccatgtgtgaggccttctttcaacaagaagaaagagcaagagcaaaggctaaaagagaagctgcaaaggaaatctgcagtgaatttcgggaccaagtgaggaatggaacacttatatgcaccagggagcataatcctgtccgtggcccagatggcaaaatgcatggaaacaagtgtgccatgtgtgccagtgtgttcaaacttgaagaagaagagaagaaaaatgataaagaagaaaaagggaaagtcgaggctgaaaaagttaagagagaagcagttcaggagctgtgcagtgaatatcgtcattatgtgaggaatggacgactcccctgtaccagagagaatgatcctattgagggtctagatgggaaaatccacggcaacacctgctccatgtgtgaagccttcttccagcaagaagcaaaagaaaaagaaagagctgaacccagagcaaaagtcaaaagagaagctgaaaaggagacatgcgatgaatttcggagacttttgcaaaatggaaaacttttctgcacaagagaaaatgatcctgtgcgtggcccagatggcaagacccatggcaacaagtgtgccatgtgtaaggcagtcttccagaaagaaaatgaggaaagaaagaggaaagaagaggaagatcagagaaatgctgcaggacatggttccagtggtggtggaggaggaaacactcaggacgaatgtgctgagtatcgggaacaaatgaaaaatggaagactcagctgtactcgggagagtgatcctgtacgtgatgctgatggcaaatcgtacaacaatcagtgtaccatgtgtaaagcaaaattggaaagagaagcagagagaaaaaatgagtattctcgctccagatcaaatgggactggatcagaatcagggaaggatacatgtgatgagtttagaagccaaatgaaaaatggaaaactcatctgcactcgagaaagtgaccctgtccggggtccagatggcaagacacatggcaataagtgtactatgtgtaaggaaaaactggaaagggaagcagctgaaaaaaaaaagaaagaggatgaagacaggagcaatacaggagaaaggagcaatacaggagaaaggagcaatgacaaagaggatctgtgtcgtgaatttcgaagcatgcagagaaatggaaagcttatctgcaccagagaaaataaccctgttcgaggcccatatggcaagatgcacatcaataaatgtgctatgtgtcagagcatctttgatcgagaagctaatgaaagaaaaaagaaagatgaagagaaatcaagtagcaagccctcaaataatgcaaaggaccagtgcagacaggttcagaatgaagcggaggatgcaaaatttagacaacctgggcgttccttggcctctgttgccaggatgagtacagatgagtgcagtgaatttcgaaactatataaggaacaatgaactcatctgccctagagagaatgacccagtgcacggtgctgatggaaagttctatacaaacaagtgctacatgtgcagagctgtctttctaacagaagctttggaaagggcaaagcttcaagaaaagccatcccatgttagagcttctcaagaggaagacagcccagactctttcagttctctggattctgagatgtgcaaagactaccgagtattgcccaggataggttatctttgtccaaaggatttaaagcctgtctgtggtgacgatggccaaacctacaacaatccttgcatgctctgtcatgaaaacctgatacgccaaacaaatacacacatccgcagtacagggaagtgtgaggagagcagcaccccaggaaccaccgcagccagcatgcccccgtctgacgaatgacaggaagattgttgaaagccatgagggaaaaaataaaccccagttctgaatcacctaccttcaccatctgtatatacaaagaattcttcggagcttgtcttatttgctatagaaaacaatacagagcttttgggaatggactcactgattttcagtcttttccatctctttcctcctagactctgtgatctgagggtataaagacatctccaccaagtctgagccctcaaaatgtcctgattacaatgctgtctgtccaactgcctgttcaataaaagtaaactcagcagaacaccct

SEQ ID NO: 180123 - DNA, 2915 bp, Homo sapiens
  Payload ID: 15480
  Gene Symbol: SPINK5
  Gene Name: serine peptidase inhibitor, Kazal type 5
  Uniprot ID: Q9NQ38
  ENST ID: ENST00000398454
  CDS Start-End: 74-2824
ccgagttcagtcatactgcaccagctgagcaatgcatggagtggacctgtaggcgacttgcatcgtcttcaacatgaagatagccacagtgtcagtgcttctgcccttggctctttgcctcatacaagatgctgccagtaagaatgaagatcaggaaatgtgccatgaatttcaggcatttatgaaaaatggaaaactgttctgtccccaggataagaaattttttcaaagtcttgatggaataatgttcatcaataaatgtgccacgtgcaaaatgatactggaaaaagaagcaaaatcacagaagagggccaggcatttagcaagagctcccaaggctactgccccaacagagctgaattgtgatgattttaaaaaaggagaaagagatggggattttatctgtcctgattattatgaagctgtttgtggcacagatgggaaaacatatgacaacagatgtgcactgtgtgctgagaatgcgaaaaccgggtcccaaattggtgtaaaaagtgaaggggaatgtaagagcagtaatccagagcaggatgtatgcagtgcttttcggccctttgttagagatggaagacttggatgcacaagggaaaatgatcctgttcttggtcctgatgggaagacgcatggcaataagtgtgcaatgtgtgctgagctgtttttaaaagaagctgaaaatgccaagcgagagggtgaaactagaattcgacgaaatgctgaaaaggatttttgcaaggaatatgaaaaacaagtgagaaatggaaggcttttttgtacacgggagagtgatccagtccgtggccctgacggcaggatgcatggcaacaaatgtgccctgtgtgctgaaattttcaagcagcgtttttcagaggaaaacagtaaaacagatcaaaatttgggaaaagctgaagaaaaaactaaagttaaaagagaaattgtgaaactctgcagtcaatatcaaaatcaggcaaagaatggaatacttttctgtaccagagaaaatgaccctattcgtggtccagatgggaaaatgcatggcaacttgtgttccatgtgtcaagcctacttccaagcagaaaatgaagaaaagaaaaaggctgaagcacgagctagaaacaaaagagaatctggaaaagcaacctcatatgcagagctttgcagtgaatatcgaaagcttgtgaggaacggaaaacttgcttgcaccagagagaacgatcctatccagggcccagatgggaaagtgcatggcaacacctgctccatgtgtgaggtcttcttccaagcagaagaagaagaaaagaaaaagaaggaaggtaaatcaagaaacaaaagacaatctaagagtacagcttcctttgaggagttgtgtagtgaataccgcaaatccaggaaaaacggacggcttttttgcaccagagagaatgaccccatccagggcccagatggaaaaatgcatggcaacacctgctccatgtgtgaggccttctttcaacaagaagaaagagcaagagcaaaggctaaaagagaagctgcaaaggaaatctgcagtgaatttcgggaccaagtgaggaatggaacacttatatgcaccagggagcataatcctgtccgtggcccagatggcaaaatgcatggaaacaagtgtgccatgtgtgccagtgtgttcaaacttgaagaagaagagaagaaaaatgataaagaagaaaaagggaaagtcgaggctgaaaaagttaagagagaagcagttcaggagctgtgcagtgaatatcgtcattatgtgaggaatggacgactcccctgtaccagagagaatgatcctattgagggtctagatgggaaaatccacggcaacacctgctccatgtgtgaagccttcttccagcaagaagcaaaagaaaaagaaagagctgaacccagagcaaaagtcaaaagagaagctgaaaaggagacatgcgatgaatttcggagacttttgcaaaatggaaaacttttctgcacaagagaaaatgatcctgtgcgtggcccagatggcaagacccatggcaacaagtgtgccatgtgtaaggcagtcttccagaaagaaaatgaggaaagaaagaggaaagaagaggaagatcagagaaatgctgcaggacatggttccagtggtggtggaggaggaaacactcaggacgaatgtgctgagtatcgggaacaaatgaaaaatggaagactcagctgtactcgggagagtgatcctgtacgtgatgctgatggcaaatcgtacaacaatcagtgtaccatgtgtaaagcaaaattggaaagagaagcagagagaaaaaatgagtattctcgctccagatcaaatgggactggatcagaatcagggaaggatacatgtgatgagtttagaagccaaatgaaaaatggaaaactcatctgcactcgagaaagtgaccctgtccggggtccagatggcaagacacatggcaataagtgtactatgtgtaaggaaaaactggaaagggaagcagctgaaaaaaaaaagaaagaggatgaagacaggagcaatacaggagaaaggagcaatacaggagaaaggagcaatgacaaagaggatctgtgtcgtgaatttcgaagcatgcagagaaatggaaagcttatctgcaccagagaaaataaccctgttcgaggcccatatggcaagatgcacatcaataaatgtgctatgtgtcagagcatctttgatcgagaagctaatgaaagaaaaaagaaagatgaagagaaatcaagtagcaagccctcaaataatgcaaaggttatttattaaaggataccaaaataaccattttacttttcaccttcagaattttgcattcttctccagctttgggaataataaatatattaatatcttaact

SEQ ID NO: 180124 - DNA, 2674 bp, Homo sapiens
  Payload ID: 15480
  Gene Symbol: SPINK5
  Gene Name: serine peptidase inhibitor, Kazal type 5
  ENST ID: ENST00000508733
  CDS Start-End: 66-2674
agtcatactgcaccagctgagcaatgcatggagtggacctgtaggcgacttgcatcgtcttcaacatgaagatagccacagtgtcagtgcttctgcccttggctctttgcctcatacaagatgctgccagtaagaatgaagatcaggataagaaattttttcaaagtcttgatggaataatgttcatcaataaatgtgccacgtgcaaaatgatactggaaaaagaagcaaaatcacagaagagggccaggcatttagcaagagctcccaaggctactgccccaacagagctgaattgtgatgattttaaaaaaggagaaagagatggggattttatctgtcctgattattatgaagctgtttgtggcacagatgggaaaacatatgacaacagatgtgcactgtgtgctgagaatgcgaaaaccgggtcccaaattggtgtaaaaagtgaaggggaatgtaagagcagtaatccagagcaggatgtatgcagtgcttttcggccctttgttagagatggaagacttggatgcacaagggaaaatgatcctgttcttggtcctgatgggaagacgcatggcaataagtgtgcaatgtgtgctgagctgtttttaaaagaagctgaaaatgccaagcgagagggtgaaactagaattcgacgaaatgctgaaaaggatttttgcaaggaatatgaaaaacaagtgagaaatggaaggcttttttgtacacgggagagtgatccagtccgtggccctgacggcaggatgcatggcaacaaatgtgccctgtgtgctgaaattttcaagcagcgtttttcagaggaaaacagtaaaacagatcaaaatttgggaaaagctgaagaaaaaactaaagttaaaagagaaattgtgaaactctgcagtcaatatcaaaatcaggcaaagaatggaatacttttctgtaccagagaaaatgaccctattcgtggtccagatgggaaaatgcatggcaacttgtgttccatgtgtcaagcctacttccaagcagaaaatgaagaaaagaaaaaggctgaagcacgagctagaaacaaaagagaatctggaaaagcaacctcatatgcagagctttgcagtgaatatcgaaagcttgtgaggaacggaaaacttgcttgcaccagagagaacgatcctatccagggcccagatgggaaagtgcatggcaacacctgctccatgtgtgaggtcttcttccaagcagaagaagaagaaaagaaaaagaaggaaggtaaatcaagaaacaaaagacaatctaagagtacagcttcctttgaggagttgtgtagtgaataccgcaaatccaggaaaaacggacggcttttttgcaccagagagaatgaccccatccagggcccagatggaaaaatgcatggcaacacctgctccatgtgtgaggccttctttcaacaagaagaaagagcaagagcaaaggctaaaagagaagctgcaaaggaaatctgcagtgaatttcgggaccaagtgaggaatggaacacttatatgcaccagggagcataatcctgtccgtggcccagatggcaaaatgcatggaaacaagtgtgccatgtgtgccagtgtgttcaaacttgaagaagaagagaagaaaaatgataaagaagaaaaagggaaagtcgaggctgaaaaagttaagagagaagcagttcaggagctgtgcagtgaatatcgtcattatgtgaggaatggacgactcccctgtaccagagagaatgatcctattgagggtctagatgggaaaatccacggcaacacctgctccatgtgtgaagccttcttccagcaagaagcaaaagaaaaagaaagagctgaacccagagcaaaagtcaaaagagaagctgaaaaggagacatgcgatgaatttcggagacttttgcaaaatggaaaacttttctgcacaagagaaaatgatcctgtgcgtggcccagatggcaagacccatggcaacaagtgtgccatgtgtaaggcagtcttccagaaagaaaatgaggaaagaaagaggaaagaagaggaagatcagagaaatgctgcaggacatggttccagtggtggtggaggaggaaacactcaggacgaatgtgctgagtatcgggaacaaatgaaaaatggaagactcagctgtactcgggagagtgatcctgtacgtgatgctgatggcaaatcgtacaacaatcagtgtaccatgtgtaaagcaaaattggaaagagaagcagagagaaaaaatgagtattctcgctccagatcaaatgggactggatcagaatcagggaaggatacatgtgatgagtttagaagccaaatgaaaaatggaaaactcatctgcactcgagaaagtgaccctgtccggggtccagatggcaagacacatggcaataagtgtactatgtgtaaggaaaaactggaaagggaagcagctgaaaaaaaaaagaaagaggatgaagacaggagcaatacaggagaaaggagcaatacaggagaaaggagcaatgacaaagaggatctgtgtcgtgaatttcgaagcatgcagagaaatggaaagcttatctgcaccagagaaaataaccctgttcgaggcccatatggcaagatgcacatcaataaatgtgctatgtgtcagagcatctt

SEQ ID NO: 180125 - DNA, 1073 bp, Homo sapiens
  Payload ID: 15480
  Gene Symbol: SPINK5
  Gene Name: serine peptidase inhibitor, Kazal type 5
  ENST ID: ENST00000476697
  CDS Start-End: 66-671
agtcatactgcaccagctgagcaatgcatggagtggacctgtaggcgacttgcatcgtcttcaacatgaagatagccacagtgtcagtgcttctgcccttggctctttgcctcatacaagatgctgccagtaagaatgaagatcaggaaatgtgccatgaatttcaggcatttatgaaaaatggaaaactgttctgtccccaggataagaaattttttcaaagtcttgatggaataatgttcatcaataaatgtgccacgtgcaaaatgatactggaaaaagaagcaaaatcacagaagagggccaggcatttagcaagagctcccaaggctactgccccaacagagctgaattgtgatgattttaaaaaaggagaaagagatggggattttatctgtcctgattattatgaagctgtttgtggcacagatgggaaaacatatgacaacagatgtgcactgtgtgctgagaatgcgaaaaccgggtcccaaattggtgtaaaaagtgaaggggaatgtaagagcagtaatccagagcagttttgtgagcctgtgatggtaggggaaggggaaggaagaaaggatctcatacatgtcacacttgtctttttccaggagattgggagcaagttgatggcaaggactgtgctctgtctgagttctggcacatagatgtatgcagtgcttttcggccctttgttagagatggaagacttggatgcacaagggaaaatgatcctgttcttggtcctgatgggaagacgcatggcaataagtgtgcaatgtgtgctgagctgtttttaaaagaagctgaaaatgccaagcgagagggtgaaactagaattcgacgaaatgctgaaaaggatttttgcaaggaatatgaaaaacaagtgagaaatggaaggcttttttgtacacgggagagtgatccagtccgtggccctgacggcaggatgcatggcaacaaatgtgccctgtgtgctgaaattttcaagcagcgtttttcagaggaaaacagtaaaacagatcaaaatttgggaaaagctgaagaaaaaactaaagttaaaagagaaa

SEQ ID NO: 180126 - DNA, 492 bp, Homo sapiens
  Payload ID: 15480
  Gene Symbol: SPINK5
  Gene Name: serine peptidase inhibitor, Kazal type 5
  ENST ID: ENST00000521206
  CDS Start-End: 287-492
acgtgcacattttttgttctcactctaataatgtgataaagctgaattatttccaattttctgacgagagaggtcaagagacttgttcaaggtcttttctcttggatcctaaaggatggaagctaaagtggtgtggtatataagtcccatgaccttgaacaactggttttatgtgggtgtcaccagtgctttataaaagtaaactgcatcgccccgagttcagtcatactgcaccagctgagcaatgcatggagtggacctgtaggcgacttgcatcgtcttcaacatgaagatagccacagtgtcagtgcttctgcccttggctctttgcctcatacaagatgctgccagtaagaatgaagatcaggataagaaattttttcaaagtcttgatggaataatgttcatcaataaatgtgccacgtgcaaaatgatactggaaaaagaagcaaaatcacagaagagggccaggcatttagcaagagctcccaa

SEQ ID NO: 180127 - DNA, 686 bp, Homo sapiens
  Payload ID: 15481
  Gene Symbol: SPINK6
  Gene Name: serine peptidase inhibitor, Kazal type 6
  Uniprot ID: Q6UWN8
  ENST ID: ENST00000325630
  CDS Start-End: 257-499
ggaaaatgtaggctaccagtagaaaatgacattctctattaataagatctgaggtgcgacacacataattgtcccaatttttaagattgatggggagcatgaagcatttttttaatgtgttggcaggccccattaaatgcataaactgcataggactcatgtggtctgaatgtattttagggctttctgggaattgtcttgacagagaacctcagctggacaaagcagccttgatctgagtgagctaactgacacaatgaaactgtcaggcatgtttctgctcctctctctggctcttttctgctttttaacaggtgtcttcagtcagggaggacaggttgactgtggtgagttccaggaccccaaggtctactgcactcgggaatctaacccacactgtggctctgatggccagacatatggcaataaatgtgccttctgtaaggccatagtgaaaagtggtggaaagattagcctaaagcatcctggaaaatgctgagttaaagccaatgtttcttggtgacttgccagcttttgcagccttcttttctcacttctgcttatacttttgctggtggattcctttaattcataaagacatacctactctgcctgggtcttgaggagttcaatgtatgtctatttctcttgattcacttgtcaataaagtacattctgcaaaagca

SEQ ID NO: 180128 - DNA, 300 bp, Homo sapiens
  Payload ID: 15481
  Gene Symbol: SPINK6
  Gene Name: serine peptidase inhibitor, Kazal type 6
  ENST ID: ENST00000514389
  CDS Start-End: 177-300
gtagtgaaactttagaaagaagagccgggaggatgtattggttgttaggaaaatgtaggctaccagtagaaaatgacattctctattaataagatctgagggctttctgggaattgtcttgacagagaacctcagctggacaaagcagccttgatctgagtgagctaactgacacaatgaaactgtcaggcatgtttctgctcctctctctggctcttttctgctttttaacaggtgtcttcagtcagggaggacaggttgactgtggtgagttccaggaccccaaggtctactgcactc

SEQ ID NO: 180129 - DNA, 605 bp, Homo sapiens
  Payload ID: 15481
  Gene Symbol: SPINK6
  Gene Name: serine peptidase inhibitor, Kazal type 6
  Uniprot ID: Q6UWN8
  ENST ID: ENST00000621437
  CDS Start-End: 177-419
gtagtgaaactttagaaagaagagccgggaggatgtattggttgttaggaaaatgtaggctaccagtagaaaatgacattctctattaataagatctgagggctttctgggaattgtcttgacagagaacctcagctggacaaagcagccttgatctgagtgagctaactgacacaatgaaactgtcaggcatgtttctgctcctctctctggctcttttctgctttttaacaggtgtcttcagtcagggaggacaggttgactgtggtgagttccaggaccccaaggtctactgcactcgggaatctaacccacactgtggctctgatggccagacatatggcaataaatgtgccttctgtaaggccatagtgaaaagtggtggaaagattagcctaaagcatcctggaaaatgctgagttaaagccaatgtttcttggtgacttgccagcttttgcagccttcttttctcacttctgcttatacttttgctggtggattcctttaattcataaagacatacctactctgcctgggtcttgaggagttcaatgtatgtctatttctcttgattcacttgtcaataaagtacattctgcaaaagc

SEQ ID NO: 180130 - DNA, 557 bp, Homo sapiens
  Payload ID: 15482
  Gene Symbol: SPINK7
  Gene Name: serine peptidase inhibitor, Kazal type 7 (putative)
  Uniprot ID: P58062
  ENST ID: ENST00000274565
  CDS Start-End: 62-319
atggtcgatgcagctgtagtgacaatctcagagcagcttctacaccacagccatttccagcatgaagatcactgggggtctccttctgctctgtacagtggtctatttctgtagcagctcagaagctgctagtctgtctccaaaaaaagtggactgcagcatttacaagaagtatccagtggtggccatcccctgccccatcacatacctaccagtttgtggttctgactacatcacctatgggaatgaatgtcacttgtgtaccgagagcttgaaaagtaatggaagagttcagtttcttcacgatggaagttgctaaattctccatggacatagagagaaaggaatgatattctcatcatcatcttcatcatcccaggctctgactgagtttctttcagttttactgatgttctgggtgggggacagagccagattcagagtaatcttgactgaatggagaaagtttctgtgctacccctacaaacccatgcctcactgacagaccagcattttttttttaacacgtcaataaaaaaataatctcccagaaagtt

SEQ ID NO: 180131 - DNA, 299 bp, Homo sapiens
  Payload ID: 15482
  Gene Symbol: SPINK7
  Gene Name: serine peptidase inhibitor, Kazal type 7 (putative)
  ENST ID: ENST00000523535
  CDS Start-End: 18-197
aggacatttgcttgtatatgacacaggtggactgcagcatttacaagaagtatccagtggtggccatcccctgccccatcacatacctaccagtttgtggttctgactacatcacctatgggaatgaatgtcacttgtgtaccgagagcttgaaaagtaatggaagagttcagtttcttcacgatggaagttgctaaattctccatggacatagagagaaaggaatgatattctcatcatcatcttcatcatcccaggctctgactgagtttctttcagttttactgatgttctgggtg

SEQ ID NO: 180132 - DNA, 444 bp, Homo sapiens
  Payload ID: 15483
  Gene Symbol: SPINK8
  Gene Name: serine peptidase inhibitor, Kazal type 8 (putative)
  Uniprot ID: P0C7L1
  ENST ID: ENST00000434006
  CDS Start-End: 1-294
atgaaggggatctgctcagacgccatccttgttctagctacctccatgtggatggcctttgcaattgacttcccccttcctatggcctctgaaagaggtcagctagacaaaacaatagttgaatgcctcaagaatgtaaataagtgctggtttttatcctacatcaagcccagtgaacctatttgtggcagtgaccaggttacctacagtagtgactgccatctgtgctccaaaattctatttgaagggcttaacataactaaactgtatgatggacaatgtgaaaactcttgaacgtacgacaaagaattataaaacctactgaatctccagattgccaagtgaaacacaatggttgcctcttcaaatatatcccctttaattactaatggttggatcaaactcgttgatttatgtcttcaataaatgattcttagcagaaaa

SEQ ID NO: 180133 - DNA, 453 bp, Homo sapiens
  Payload ID: 15484
  Gene Symbol: SPINK9
  Gene Name: serine peptidase inhibitor, Kazal type 9
  Uniprot ID: Q5DT21
  ENST ID: ENST00000377906
  CDS Start-End: 56-316
ggacaccaggtcacttcttttccctacatctgactgccttggccacttcagtactatgagagcaacagccatagtcctactcttggctctgacacttgcaaccatgttcagtatagaatgtgccaaacagacgaaacagatggttgactgcagtcattataaaaagttaccaccaggacaacagagattttgtcatcatatgtatgatccaatttgtggatctgatggcaaaacttataaaaatgattgcttcttctgttctaaagttaagaaaactgacggcacacttaaatttgtacattttggaaaatgttaaatctatcttgtgagtccaaaatatcttttaatgcatctattcacaagagtcacatttctgttcccatattatctatgccacattgcctactcatcaccatatgtagatttctttgtagaataaagcagatataaggg

SEQ ID NO: 180134 - DNA, 604 bp, Homo sapiens
  Payload ID: 15484
  Gene Symbol: SPINK9
  Gene Name: serine peptidase inhibitor, Kazal type 9
  ENST ID: ENST00000511717
  CDS Start-End: 271-594
tactccgagctacaggaggaaattcaaaccaaaggcaaagaagttgaaaactttgaaaaaaatttagacgaatgtataactagaataaccaatacagagaagtgcttaaaggagctgatggagctgaaagccaaggctcaagaactacatgaagaatgcaaaagcctcaggagccgatgcgatcaactggaagaaagggttaggtattggagaagaagtgatttcattgagatttgtctctctgtgtgatcaatcagcatttgcatctttatggtctttatgaatccttctcatcattgttttcattataaaactccaccaagcagctcaggagaacacaatgaacccaggagactcatgggcttaacgcaacctgaacatttacaaggtatagaatgtgccaaacagacgaaacagatggttgactgcagtcattataaaaagttaccaccaggacaacagagattttgtcatcatatgtatgatccaatttgtggatctgatggcaaaacttataaaaatgattgcttcttctgttctaaagttaagaaaactgacggcacacttaaatttgtacattttggaaaatgttaaatctatcttg

SEQ ID NO: 180135 - DNA, 3056 bp, Homo sapiens
  Payload ID: 15485
  Gene Symbol: SPINT1
  Gene Name: serine peptidase inhibitor, Kunitz type 1
  Uniprot ID: O43278
  ENST ID: ENST00000344051
  CDS Start-End: 235-1824
atgtcggccccgccccgacggcgctgactcagtttcaccagaaaccagggggagaaggcggccgagccccagctctccgagcaccgggtcggaagccgcgacccgagccgcgcaggaagctgggaccggaacctcggcggacccggccccacccaactcacctgcgcaggtcaccagcaccctcggaacccagaggcccgcgctctgaaggtgacccccctggggaggaaggcgatggcccctgcgaggacgatggcccgcgcccgcctcgccccggccggcatccctgccgtcgccttgtggcttctgtgcacgctcggcctccagggcacccaggccgggccaccgcccgcgccccctgggctgcccgcgggagccgactgcctgaacagctttaccgccggggtgcctggcttcgtgctggacaccaacgcctcggtcagcaacggagctaccttcctggagtcccccaccgtgcgccggggctgggactgcgtgcgcgcctgctgcaccacccagaactgcaacttggcgctagtggagctgcagcccgaccgcggggaggacgccatcgccgcctgcttcctcatcaactgcctctacgagcagaacttcgtgtgcaagttcgcgcccagggagggcttcatcaactacctcacgagggaagtgtaccgctcctaccgccagctgcggacccagggctttggagggtctgggatccccaaggcctgggcaggcatagacttgaaggtacaaccccaggaacccctggtgctgaaggatgtggaaaacacagattggcgcctactgcggggtgacacggatgtcagggtagagaggaaagacccaaaccaggtggaactgtggggactcaaggaaggcacctacctgttccagctgacagtgactagctcagaccacccagaggacacggccaacgtcacagtcactgtgctgtccaccaagcagacagaagactactgcctcgcatccaacaaggtgggtcgctgccggggctctttcccacgctggtactatgaccccacggagcagatctgcaagagtttcgtttatggaggctgcttgggcaacaagaacaactaccttcgggaagaagagtgcattctagcctgtcggggtgtgcaaggtgggcctttgagaggcagctctggggctcaggcgactttcccccagggcccctccatggaaaggcgccatccagtgtgctctggcacctgtcagcccacccagttccgctgcagcaatggctgctgcatcgacagtttcctggagtgtgacgacacccccaactgccccgacgcctccgacgaggctgcctgtgaaaaatacacgagtggctttgacgagctccagcgcatccatttccccagtgacaaagggcactgcgtggacctgccagacacaggactctgcaaggagagcatcccgcgctggtactacaaccccttcagcgaacactgcgcccgctttacctatggtggttgttacggcaacaagaacaactttgaggaagagcagcagtgcctcgagtcttgtcgcggcatctccaagaaggatgtgtttggcctgaggcgggaaatccccattcccagcacaggctctgtggagatggctgtcgcagtgttcctggtcatctgcattgtggtggtggtagccatcttgggttactgcttcttcaagaaccagagaaaggacttccacggacaccaccaccacccaccacccacccctgccagctccactgtctccactaccgaggacacggagcacctggtctataaccacaccacgcggcccctctgagcctgggtctcaccggctctcacctggccctgcttcctgcttgccaaggcagaggcctgggctgggaaaaactttggaaccagactcttgcctgtttcccaggcccactgtgcctcagagaccagggctccagcccctcttggagaagtctcagctaagctcacgtcctgagaaagctcaaaggtttggaaggagcagaaaacccttgggccagaagtaccagactagatggacctgcctgcataggagtttggaggaagttggagttttgtttcctctgttcaaagctgcctgtccctaccccatggtgctaggaagaggagtggggtggtgtcagaccctggaggccccaaccctgtcctcccgagctcctcttccatgctgtgcgcccagggctgggaggaaggacttccctgtgtagtttgtgctgtaaagagttgctttttgtttatttaatgctgtggcatgggtgaagaggaggggaagaggcctgtttggcctctctatcctctcttcctcttcccccaagattgagctctctgcccttgatcagccccaccctggcctagaccagcagacagagccaggagaagctcagctgcattccgcagcccccacccccaaggttctccaacatcacagcccagcccgcccactgggtaataaaagtggtttgtggagtttctggctctgttctgtgggccaggagagggactaggttgctggggggtgatgggaccgtcctgttcagctggttcaggcttcagccaccctgttgagcaggttttcccatcgtctctctcgaaactggcctggcccctgactttggagagcagtgccatgtttgaccaccagaggggaggagtgagcgggccacgggagccacgagtgtggggaggctgcagtgctgctgtgtagcatttcttcctggtgtgagcctctccacaagcctgttgagtggttgagctctccacaattctgctcatttggaggttggggttaggggtgcacaggcaccttggctcctacctccatgttagggcccaggtgactagctgtctccctcccaacagaagccctggcttctgcgctggagtgcagcacccccaaccaggctctgagctccttcccaggagcctttagtagagacacgccactccaacccacacccctgcatttgttcaagctacctcccggtgccaaaaaaaaaaaaaaatcatactttgagctca

SEQ ID NO: 180136 - DNA, 883 bp, Homo sapiens
  Payload ID: 15485
  Gene Symbol: SPINT1
  Gene Name: serine peptidase inhibitor, Kunitz type 1
  ENST ID: ENST00000564375
  CDS Start-End: 1-883
gaactgtggggactcaaggaaggcacctacctgttccagctgacagtgactagctcagaccacccagaggacacggccaacgtcacagtcactgtgctgtccaccaagcagacagaagactactgcctcgcatccaacaaggtgggtcgctgccggggctctttcccacgctggtactatgaccccacggagcagatctgcaagagtttcgtttatggaggctgcttgggcaacaagaacaactaccttcgggaagaagagtgcattctagcctgtcggggtgtgcaagtgtgctctggcacctgtcagcccacccagttccgctgcagcaatggctgctgcatcgacagtttcctggagtgtgacgacacccccaactgccccgacgcctccgacgaggctgcctgtgaaaaatacacgagtggctttgacgagctccagcgcatccatttccccagtgacaaagggcactgcgtggacctgccagacacaggactctgcaaggagagcatcccgcgctggtactacaaccccttcagcgaacactgcgcccgctttacctatggtggttgttacggcaacaagaacaactttgaggaagagcagcagtgcctcgagtcttgtcgcggcatctccaagaaggatgtgtttggcctgaggcgggaaatccccattcccagcacaggctctgtggagatggctgtcgcagtgttcctggtcatctgcattgtggtggtggtagccatcttgggttactgcttcttcaagaaccagagaaaggacttccacggacaccaccaccacccaccacccacccctgccagctccactgtctccactaccgaggacacggagcacctggtctataaccacaccacgcggc

SEQ ID NO: 180137 - DNA, 611 bp, Homo sapiens
  Payload ID: 15485
  Gene Symbol: SPINT1
  Gene Name: serine peptidase inhibitor, Kunitz type 1
  ENST ID: ENST00000569589
  CDS Start-End: 1-611
gcttgggcaacaagaacaactaccttcgggaagaagagtgcattctagcctgtcggggtgtgcaaggtgggcctttgagaggcagctctggggctcaggcgactttcccccagggcccctccatggaaaggcgccatccagacacgagtggctttgacgagctccagcgcatccatttccccagtgacaaagggcactgcgtggacctgccagacacaggactctgcaaggagagcatcccgcgctggtactacaaccccttcagcgaacactgcgcccgctttacctatggtggttgttacggcaacaagaacaactttgaggaagagcagcagtgcctcgagtcttgtcgcggcatctccaagaaggatgtgtttggcctgaggcgggaaatccccattcccagcacaggctctgtggagatggctgtcgcagtgttcctggtcatctgcattgtggtggtggtagccatcttgggttactgcttcttcaagaaccagagaaaggacttccacggacaccaccaccacccaccacccacccctgccagctccactgtctccactaccgaggacacggagcacctggtctataaccacaccacgcggccc

SEQ ID NO: 180138 - DNA, 720 bp, Homo sapiens
  Payload ID: 15485
  Gene Symbol: SPINT1
  Gene Name: serine peptidase inhibitor, Kunitz type 1
  ENST ID: ENST00000566928
  CDS Start-End: 1-720
atgtggaaaacacagattggcgcctactgcggggtgacacggatgtcagggtagagaggaaagacccaaaccaggtggaactgtggggactcaaggaaggcacctacctgttccagctgacagtgactagctcagaccacccagaggacacggccaacgtcacagtcactgtgctgtccaccaagcagacagaagactactgcctcgcatccaacaaggtgggtcgctgccggggctctttcccacgctggtactatgaccccacggagcagatctgcaagagtttcgtttatggaggctgcttgggcaacaagaacaactaccttcgggaagaagagtgcattctagcctgtcggggtgtgcaaggcccctccatggaaaggcgccatccagacacgagtggctttgacgagctccagcgcatccatttccccagtgacaaagggcactgcgtggacctgccagacacaggactctgcaaggagagcatcccgcgctggtactacaaccccttcagcgaacactgcgcccgctttacctatggtggttgttacggcaacaagaacaactttgaggaagagcagcagtgcctcgagtcttgtcgcggcatctccaagaaggatgtgtttggcctgaggcgggaaatccccattcccagcacaggctctgtggagatggctgtcgcagtgttcctggtcatctgcattgtggtggtggtag

SEQ ID NO: 180139 - DNA, 940 bp, Homo sapiens
  Payload ID: 15485
  Gene Symbol: SPINT1
  Gene Name: serine peptidase inhibitor, Kunitz type 1
  ENST ID: ENST00000568823
  CDS Start-End: 1-940
gggagaaggcggccgagccccagctctccgagcaccgggtcggaagccgcgacccgagccgcgcaggaagctgggaccggaacctcggcggacccggccccacccaactcacctgcgcaggtcaccagcaccctcggaacccagaggcccgcgctctgaaggtgacccccctggggaggaaggcgatggcccctgcgaggacgatggcccgcgcccgcctcgccccggccggcatccctgccgtcgccttgtggcttctgtgcacgctcggcctccagggcacccaggccgggccaccgcccgcgccccctgggctgcccgcgggagccgactgcctgaacagctttaccgccggggtgcctggcttcgtgctggacaccaacgcctcggtcagcaacggagctaccttcctggagtcccccaccgtgcgccggggctgggactgcgtgcgcgcctgctgcaccacccagaactgcaacttggcgctagtggagctgcagcccgaccgcggggaggacgccatcgccgcctgcttcctcatcaactgcctctacgagcagaacttcgtgtgcaagttcgcgcccagggagggcttcatcaactacctcacgagggaagtgtaccgctcctaccgccagctgcggacccagggctttggagggtctgggatccccaaggcctgggcaggcatagacttgaaggtacaaccccaggaacccctggtgctgaaggatgtggaaaacacagattggcgcctactgcggggtgacacggatgtcagggtagagctgacagtgactagctcagaccacccagaggacacggccaacgtcacagtcactgtgctgtccaccaagcagacagaagactactgcctcgcatccaacaaggtgggtcgctgccggggctctttcccacgctggtactatgaccccacgga

SEQ ID NO: 180140 - DNA, 2456 bp, Homo sapiens
  Payload ID: 15485
  Gene Symbol: SPINT1
  Gene Name: serine peptidase inhibitor, Kunitz type 1
  Uniprot ID: O43278
  ENST ID: ENST00000562057
  CDS Start-End: 235-1776
atgtcggccccgccccgacggcgctgactcagtttcaccagaaaccagggggagaaggcggccgagccccagctctccgagcaccgggtcggaagccgcgacccgagccgcgcaggaagctgggaccggaacctcggcggacccggccccacccaactcacctgcgcaggtcaccagcaccctcggaacccagaggcccgcgctctgaaggtgacccccctggggaggaaggcgatggcccctgcgaggacgatggcccgcgcccgcctcgccccggccggcatccctgccgtcgccttgtggcttctgtgcacgctcggcctccagggcacccaggccgggccaccgcccgcgccccctgggctgcccgcgggagccgactgcctgaacagctttaccgccggggtgcctggcttcgtgctggacaccaacgcctcggtcagcaacggagctaccttcctggagtcccccaccgtgcgccggggctgggactgcgtgcgcgcctgctgcaccacccagaactgcaacttggcgctagtggagctgcagcccgaccgcggggaggacgccatcgccgcctgcttcctcatcaactgcctctacgagcagaacttcgtgtgcaagttcgcgcccagggagggcttcatcaactacctcacgagggaagtgtaccgctcctaccgccagctgcggacccagggctttggagggtctgggatccccaaggcctgggcaggcatagacttgaaggtacaaccccaggaacccctggtgctgaaggatgtggaaaacacagattggcgcctactgcggggtgacacggatgtcagggtagagaggaaagacccaaaccaggtggaactgtggggactcaaggaaggcacctacctgttccagctgacagtgactagctcagaccacccagaggacacggccaacgtcacagtcactgtgctgtccaccaagcagacagaagactactgcctcgcatccaacaaggtgggtcgctgccggggctctttcccacgctggtactatgaccccacggagcagatctgcaagagtttcgtttatggaggctgcttgggcaacaagaacaactaccttcgggaagaagagtgcattctagcctgtcggggtgtgcaaggcccctccatggaaaggcgccatccagtgtgctctggcacctgtcagcccacccagttccgctgcagcaatggctgctgcatcgacagtttcctggagtgtgacgacacccccaactgccccgacgcctccgacgaggctgcctgtgaaaaatacacgagtggctttgacgagctccagcgcatccatttccccagtgacaaagggcactgcgtggacctgccagacacaggactctgcaaggagagcatcccgcgctggtactacaaccccttcagcgaacactgcgcccgctttacctatggtggttgttacggcaacaagaacaactttgaggaagagcagcagtgcctcgagtcttgtcgcggcatctccaagaaggatgtgtttggcctgaggcgggaaatccccattcccagcacaggctctgtggagatggctgtcgcagtgttcctggtcatctgcattgtggtggtggtagccatcttgggttactgcttcttcaagaaccagagaaaggacttccacggacaccaccaccacccaccacccacccctgccagctccactgtctccactaccgaggacacggagcacctggtctataaccacaccacgcggcccctctgagcctgggtctcaccggctctcacctggccctgcttcctgcttgccaaggcagaggcctgggctgggaaaaactttggaaccagactcttgcctgtttcccaggcccactgtgcctcagagaccagggctccagcccctcttggagaagtctcagctaagctcacgtcctgagaaagctcaaaggtttggaaggagcagaaaacccttgggccagaagtaccagactagatggacctgcctgcataggagtttggaggaagttggagttttgtttcctctgttcaaagctgcctgtccctaccccatggtgctaggaagaggagtggggtggtgtcagaccctggaggccccaaccctgtcctcccgagctcctcttccatgctgtgcgcccagggctgggaggaaggacttccctgtgtagtttgtgctgtaaagagttgctttttgtttatttaatgctgtggcatgggtgaagaggaggggaagaggcctgtttggcctctctatcctctcttcctcttcccccaagattgagctctctgcccttgatcagccccaccctggcctagaccagcagacagagccaggagaagctcagctgcattccgcagcccccacccccaaggttctccaacatcacagcccagcccgcccactgggtaataaaagtggtttgtgga

SEQ ID NO: 180141 - DNA, 1072 bp, Homo sapiens
  Payload ID: 15485
  Gene Symbol: SPINT1
  Gene Name: serine peptidase inhibitor, Kunitz type 1
  ENST ID: ENST00000563656
  CDS Start-End: 168-1072
acctgcgcaggtaacccgggcccccgcgcgcaaggccgaggcgcaggcggagcgggctggagcatgtccggccctttgttctgcgctcgtgcgtgtgtccgggtcaccagcaccctcggaacccagaggcccgcgctctgaaggtgacccccctggggaggaaggcgatggcccctgcgaggacgatggcccgcgcccgcctcgccccggccggcatccctgccgtcgccttgtggcttctgtgcacgctcggcctccagggcacccaggccgggccaccgcccgcgccccctgggctgcccgcgggagccgactgcctgaacagctttaccgccggggtgcctggcttcgtgctggacaccaacgcctcggtcagcaacggagctaccttcctggagtcccccaccgtgcgccggggctgggactgcgtgcgcgcctgctgcaccacccagaactgcaacttggcgctagtggagctgcagcccgaccgcggggaggacgccatcgccgcctgcttcctcatcaactgcctctacgagcagaacttcgtgtgcaagttcgcgcccagggagggcttcatcaactacctcacgagggaagtgtaccgctcctaccgccagctgcggacccagggctttggagggtctgggatccccaaggcctgggcaggcatagacttgaaggtacaaccccaggaacccctggtgctgaaggatgtggaaaacacagattggcgcctactgcggggtgacacggatgtcagggtagagaggaaagacccaaaccaggtggaactgtggggactcaaggaaggcacctacctgttccagctgacagtgactagctcagaccacccagaggacacggccaacgtcacagtcactgtgctgtccaccaagcagacagaagactactgcctcgcatccaacaaggtgggtcgctgccggggctctttcccacgctggtactatgaccccacggagcagatctgcaagagtttcgtttatggaggctgcttgggcaacaagaacaactaccttcgggaagaagagtgcattctagcctgtcgggg

SEQ ID NO: 180142 - DNA, 1417 bp, Homo sapiens
  Payload ID: 15485
  Gene Symbol: SPINT1
  Gene Name: serine peptidase inhibitor, Kunitz type 1
  ENST ID: ENST00000568580
  CDS Start-End: 1-1417
ccccctgggctgcccgcgggagccgactgcctgaacagctttaccgccggggtgcctggcttcgtgctggacaccaacgcctcggtcagcaacggagctaccttcctggagtcccccaccgtgcgccggggctgggactgcgtgcgcgcctgctgcaccacccagaactgcaacttggcgctagtggagctgcagcccgaccgcggggaggacgccatcgccgcctgcttcctcatcaactgcctctacgagcagaacttcgtgtgcaagttcgcgcccagggagggcttcatcaactacctcacgagggaagtgtaccgctcctaccgccagctgcggacccagggctttggagggtctgggatccccaaggcctgggcaggcatagacttgaaggtacaaccccaggaacccctggtgctgaaggatgtggaaaacacagattggcgcctactgcggggtgacacggatgtcagggtagagaggaaagacccaaaccaggtggaactgtggggactcaaggaaggcacctacctgttccagctgacagtgactagctcagaccacccagaggacacggccaacgtcacagtcactgtgctgtccaccaagcagacagaagactactgcctcgcatccaacaaggtgggtcgctgccggggctctttcccacgctggtactatgaccccacggagcagatctgcaagagtttcgtttatggaggctgcttgggcaacaagaacaactaccttcgggaagaagagtgcattctagcctgtcggggtgtgcaaggtgggcctttgagaggcagctctggggctcaggcgactttcccccaggtgtgctctggcacctgtcagcccacccagttccgctgcagcaatggctgctgcatcgacagtttcctggagtgtgacgacacccccaactgccccgacgcctccgacgaggctgcctgtgaaaaatacacgagtggctttgacgagctccagcgcatccatttccccagtgacaaagggcactgcgtggacctgccagacacaggactctgcaaggagagcatcccgcgctggtactacaaccccttcagcgaacactgcgcccgctttacctatggtggttgttacggcaacaagaacaactttgaggaagagcagcagtgcctcgagtcttgtcgcggcatctccaagaaggatgtgtttggcctgaggcgggaaatccccattcccagcacaggctctgtggagatggctgtcgcagtgttcctggtcatctgcattgtggtggtggtagccatcttgggttactgcttcttcaagaaccagagaaaggacttccacggacaccaccaccacccaccacccacccctgccagctccactgtctccactaccgaggacacggagcacctggtct

SEQ ID NO: 180143 - DNA, 512 bp, Homo sapiens
  Payload ID: 15486
  Gene Symbol: SPINT4
  Gene Name: serine peptidase inhibitor, Kunitz type 4
  Uniprot ID: Q6UDR6
  ENST ID: ENST00000279058
  CDS Start-End: 18-317
ctgctgcttgctgcaccatgaagtctgccaagctgggatttcttctaagattcttcatcttctgctcattgaataccctgttattgggtggtgttaataaaattgcggagaagatatgtggagacctcaaagatccctgcaaattggacatgaattttggaagctgctatgaagttcactttagatatttctacaacagaacctccaaaagatgtgaaacttttgtcttctccggctgtaatggcaaccttaacaacttcaagcttaaaatagaacgtgaagtagcctgtgttgcaaaatacaaaccaccgaggtgagaggatgtgaactcatgaagttgtctgctgcaccatccgaaataaagacacaagaaaattcagactgattttgaaatctttgtaatatttccataatgctttaagcttccatatgtttgctattttcctgaccctagttttgtctttcctggaaattaactgtatgatcattagaatgaaagagtctttctgtca

SEQ ID NO: 180144 - DNA, 1802 bp, Homo sapiens
  Payload ID: 15487
  Gene Symbol: SPINT2
  Gene Name: serine peptidase inhibitor, Kunitz type, 2
  Uniprot ID: O43291
  ENST ID: ENST00000301244
  CDS Start-End: 436-1194
gcggccgcgcaggtgcctgccctttgcgcctgcgcccagctcgccctgcctagccaggtgcgccccgccccctgcctgcccggccaccttcgggagccgcttccaataggcgttcgccattggctctggcgacctccgcgcgttgggaggtgtagcgcggctctgaacgcgctgagggccgttgagtgtcgcaggcggcgagggcgcgagtgaggagcagacccaggcatcgcgcgccgagaaggccgggcgtccccacactgaaggtccggaaaggcgacttccgggggctttggcacctggcggaccctcccggagcgtcggcacctgaacgcgaggcgctccattgcgcgtgcgcgttgaggggcttcccgcacctgatcgcgagaccccaacggctggtggcgtcgcctgcgcgtctcggctgagctggccatggcgcagctgtgcgggctgaggcggagccgggcgtttctcgccctgctgggatcgctgctcctctctggggtcctggcggccgaccgagaacgcagcatccacgacttctgcctggtgtcgaaggtggtgggcagatgccgggcctccatgcctaggtggtggtacaatgtcactgacggatcctgccagctgtttgtgtatgggggctgtgacggaaacagcaataattacctgaccaaggaggagtgcctcaagaaatgtgccactgtcacagagaatgccacgggtgacctggccaccagcaggaatgcagcggattcctctgtcccaagtgctcccagaaggcaggattctgaagaccactccagcgatatgttcaactatgaagaatactgcaccgccaacgcagtcactgggccttgccgtgcatccttcccacgctggtactttgacgtggagaggaactcctgcaataacttcatctatggaggctgccggggcaataagaacagctaccgctctgaggaggcctgcatgctccgctgcttccgccagcaggagaatcctcccctgccccttggctcaaaggtggtggttctggcggggctgttcgtgatggtgttgatcctcttcctgggagcctccatggtctacctgatccgggtggcacggaggaaccaggagcgtgccctgcgcaccgtctggagctccggagatgacaaggagcagctggtgaagaacacatatgtcctgtgaccgccctgtcgccaagaggactggggaagggaggggagactatgtgtgagctttttttaaatagagggattgactcggatttgagtgatcattagggctgaggtctgtttctctgggaggtaggacggctgcttcctggtctggcagggatgggtttgctttggaaatcctctaggaggctcctcctcgcatggcctgcagtctggcagcagccccgagttgtttcctcgctgatcgatttctttcctccaggtagagttttctttgcttatgttgaattccattgcctcttttctcatcacagaagtgatgttggaatcgtttcttttgtttgtctgatttatggtttttttaagtataaacaaaagttttttattagcattctgaaagaaggaaagtaaaatgtacaagtttaataaaaaggggccttcccctttagaataaatttcagcatgtgctttctttatgggagtcctaatttcaaccctaccaaaatgatcacaagacactatctgaggtgtcccattctagaaatagacccctcaaaatagcgtctttcagatctttttgaatgaatccacaagatgaaataaatgtcctattactga

SEQ ID NO: 180145 - DNA, 1367 bp, Homo sapiens
  Payload ID: 15487
  Gene Symbol: SPINT2
  Gene Name: serine peptidase inhibitor, Kunitz type, 2
  Uniprot ID: O43291
  ENST ID: ENST00000454580
  CDS Start-End: 318-905
attggctctggcgacctccgcgcgttgggaggtgtagcgcggctctgaacgcgctgagggccgttgagtgtcgcaggcggcgagggcgcgagtgaggagcagacccaggcatcgcgcgccgagaaggccgggcgtccccacactgaaggtccggaaaggcgacttccgggggctttggcacctggcggaccctcccggagcgtcggcacctgaacgcgaggcgctccattgcgcgtgcgcgttgaggggcttcccgcacctgatcgcgagaccccaacggctggtggcgtcgcctgcgcgtctcggctgagctggccatggcgcagctgtgcgggctgaggcggagccgggcgtttctcgccctgctgggatcgctgctcctctctggggtcctggcggccgaccgagaacgcagcatccacgagaatgccacgggtgacctggccaccagcaggaatgcagcggattcctctgtcccaagtgctcccagaaggcaggattctgaagaccactccagcgatatgttcaactatgaagaatactgcaccgccaacgcagtcactgggccttgccgtgcatccttcccacgctggtactttgacgtggagaggaactcctgcaataacttcatctatggaggctgccggggcaataagaacagctaccgctctgaggaggcctgcatgctccgctgcttccgccagcaggagaatcctcccctgccccttggctcaaaggtggtggttctggcggggctgttcgtgatggtgttgatcctcttcctgggagcctccatggtctacctgatccgggtggcacggaggaaccaggagcgtgccctgcgcaccgtctggagctccggagatgacaaggagcagctggtgaagaacacatatgtcctgtgaccgccctgtcgccaagaggactggggaagggaggggagactatgtgtgagctttttttaaatagagggattgactcggatttgagtgatcattagggctgaggtctgtttctctgggaggtaggacggctgcttcctggtctggcagggatgggtttgctttggaaatcctctaggaggctcctcctcgcatggcctgcagtctggcagcagccccgagttgtttcctcgctgatcgatttctttcctccaggtagagttttctttgcttatgttgaattccattgcctcttttctcatcacagaagtgatgttggaatcgtttcttttgtttgtctgatttatggtttttttaagtataaacaaaagttttttattagcattctgaaagaaggaaagtaaaatgtacaagtttaataaaaaggggccttcccctttagaataaatttcagcatgtgctttc

SEQ ID NO: 180146 - DNA, 301 bp, Homo sapiens
  Payload ID: 15487
  Gene Symbol: SPINT2
  Gene Name: serine peptidase inhibitor, Kunitz type, 2
  ENST ID: ENST00000590510
  CDS Start-End: 145-301
ggtgcttggagacaacgtggccacctgggagtacggttcttgggcaagcgcctactgtgcgcccggcgccgttctacacaggaacacagcgcttttcaagacttctgcctggtgtcgaaggtggtgggcagatgccgggcctccatgcctaggtggtggtacaatgtcactgacggatcctgccagctgtttgtgtatgggggctgtgacggaaacagcaataattacctgaccaaggaggagtgcctcaagaaatgtgccactgtcacagagaatgccacgggtgacctggccaccagca

SEQ ID NO: 180147 - DNA, 540 bp, Homo sapiens
  Payload ID: 15487
  Gene Symbol: SPINT2
  Gene Name: serine peptidase inhibitor, Kunitz type, 2
  ENST ID: ENST00000592007
  CDS Start-End: 354-540
agttccatggccaaagctcagggagaggccaggcctgtgagatggtgggggttgggttgggtgacctggtggccgttttagactcggaagaagcccatctcacccctgcctctttggagattggacaagagcctcccctgaagtttttgtagttgagttgcagtaaagtaggtgcccgagaaggagggagcaagaaaggaaacaagctttggggaagaggaagctctgctaaggctcgagagagtattggcgttgagcagctggtgttggggtctttggattggcccttagaagtcggtggtgaataagacttctgcctggtgtcgaaggtggtgggcagatgccgggcctccatgcctaggtggtggtacaatgtcactgacggatcctgccagctgtttgtgtatgggggctgtgacggaaacagcaataattacctgaccaaggaggagtgcctcaagaaatgtgccactgtcacagagaatgccacgggtgacctggccaccagcaggaatgcagcggattcctctgtcccaagtg

SEQ ID NO: 180148 - DNA, 749 bp, Homo sapiens
  Payload ID: 15487
  Gene Symbol: SPINT2
  Gene Name: serine peptidase inhibitor, Kunitz type, 2
  ENST ID: ENST00000587516
  CDS Start-End: 226-749
tgaggagcagacccaggcatcgcgcgccgagaaggccgggcgtccccacactgaaggtccggaaaggcgacttccgggggctttggcacctggcggaccctcccggagcgtcggcacctgaacgcgaggcgctccattgcgcgtgcgcgttgaggggcttcccgcacctgatcgcgagaccccaacggctggtggcgtcgcctgcgcgtctcggctgagctggccatggcgcagctgtgcgggctgaggcggagccgggcgtttctcgccctgctgggatcgctgctcctctctggggtcctggcggccgaccgagaacgcagcatccacgacttctgcctggtgtcgaaggtggtgggcagatgccgggcctccatgcctaggtggtggtacaatgtcactgacggatcctgccagctgtttgtgtatgggggctgtgacggaaacagcaataattacctgaccaaggaggagtgcctcaagaaatgtgccactgtcacagctcccagaaggcaggattctgaagaccactccagcgatatgttcaactatgaagaatactgcaccgccaacgcagtcactgggccttgccgtgcatccttcccacgctggtactttgacgtggagaggaactcctgcaataacttcatctatggaggctgccggggcaataagaacagctaccgctctgaggaggcctgcatgctccgctgcttccgccagcaggagaatcctcccctgccccttgg

SEQ ID NO: 180149 - DNA, 1246 bp, Homo sapiens
  Payload ID: 15487
  Gene Symbol: SPINT2
  Gene Name: serine peptidase inhibitor, Kunitz type, 2
  ENST ID: ENST00000587090
  CDS Start-End: 193-801
attggctctggcgacctccgcgcgttgggaggtgtagcgcggctctgaacgcgctgagggccgttgagtgtcgcaggcggcgagggcgcgagtgaggagcagacccaggcatcgcgcgccgagaaggccgggcgtccccacactgaagacttctgcctggtgtcgaaggtggtgggcagatgccgggcctccatgcctaggtggtggtacaatgtcactgacggatcctgccagctgtttgtgtatgggggctgtgacggaaacagcaataattacctgaccaaggaggagtgcctcaagaaatgtgccactgtcacagagaatgccacgggtgacctggccaccagcaggaatgcagcggattcctctgtcccaagtgctcccagaaggcaggattctgaagaccactccagcgatatgttcaactatgaagaatactgcaccgccaacgcagtcactgggccttgccgtgcatccttcccacgctggtactttgacgtggagaggaactcctgcaataacttcatctatggaggctgccggggcaataagaacagctaccgctctgaggaggcctgcatgctccgctgcttccgccagcaggagaatcctcccctgccccttggctcaaaggtggtggttctggcggggctgttcgtgatggtgttgatcctcttcctgggagcctccatggtctacctgatccgggtggcacggaggaaccaggagcgtgccctgcgcaccgtctggagctccggagatgacaaggagcagctggtgaagaacacatatgtcctgtgaccgccctgtcgccaagaggactggggaagggaggggagactatgtgtgagctttttttaaatagagggattgactcggatttgagtgatcattagggctgaggtctgtttctctgggaggtaggacggctgcttcctggtctggcagggatgggtttgctttggaaatcctctaggaggctcctcctcgcatggcctgcagtctggcagcagccccgagttgtttcctcgctgatcgatttctttcctccaggtagagttttctttgcttatgttgaattccattgcctcttttctcatcacagaagtgatgttggaatcgtttcttttgtttgtctgatttatggtttttttaagtataaacaaaagttttttattagcattctgaaagaaggaaagtaaaatgtacaagtttaataaaaaggggccttcccctttagaataaa

SEQ ID NO: 180150 - DNA, 383 bp, Homo sapiens
  Payload ID: 15487
  Gene Symbol: SPINT2
  Gene Name: serine peptidase inhibitor, Kunitz type, 2
  ENST ID: ENST00000587334
  CDS Start-End: 1-319
gagaggaactcctgcaataacttcatctatggaggctgccggggcaataagaacagctaccgctctgaggaggcctgcatgctccgctgcttccgctgtgtgttctcttccaggccagcaggagaatcctcccctgccccttggctcaaaggtggtggttctggcggggctgttcgtgatggtgttgatcctcttcctgggagcctccatggtctacctgatccgggtggcacggaggaaccaggagcgtgccctgcgcaccgtctggagctccggagatgacaaggagcagctggtgaagaacacatatgtcctgtgaccgccctgtcgccaagaggactggggaagggaggggagactatgtgtgagctttttttaaatag

SEQ ID NO: 180151 - DNA, 567 bp, Homo sapiens
  Payload ID: 15487
  Gene Symbol: SPINT2
  Gene Name: serine peptidase inhibitor, Kunitz type, 2
  ENST ID: ENST00000590738
  CDS Start-End: 1-392
ctcccagaaggcaggattctgaagaccactccagcgatatgttcaactatgaagaatactgcaccgccaacgcagtcactgggccttgccgtgcatccttcccacgctggtactttgacgtggagaggaactcctgcaataacttcatctatggaggctgccggggcaataagaacagctaccgctctgaggaggcctgcatgctccgctgcttccgccagcaggagaatcctcccctgccccttggctcaaagggtaagtggccccttaccctcctcctgccatcagcctgcctcctcccttccttgactgagctcagccctgcccagctgtggtttacattatccttcactgtgaacatcatcttggcagaaagtcatgtttctgcgtgagaatggcgaggtggtggtttgtcccaccgttcagtgtacacagttggggctggagtgagtcagtcacaaggcaggccctgcccaggcggcgtgggtgactggggatgaggtcttcctgttgagcatttgaggactgctgcacacgggcctgaggctggcctgaggtgtggaggga

SEQ ID NO: 180152 - DNA, 476 bp, Homo sapiens
  Payload ID: 15488
  Gene Symbol: SPINT3
  Gene Name: serine peptidase inhibitor, Kunitz type, 3
  Uniprot ID: P49223
  ENST ID: ENST00000217428
  CDS Start-End: 17-286
ctggctgagtggcaccatgcagcttcaggcctctctctcgtttctcctgattctcactctctgcctagagcttcgatcagaactagcacgagacactatcaaggatctcctcccaaatgtatgcgcttttcctatggaaaagggcccttgtcaaacctacatgacgcgatggtttttcaactttgaaactggtgaatgtgagttatttgcttacggaggctgcggaggcaacagcaacaactttttgaggaaagaaaaatgtgagaaattctgcaagttcacctgattttctaacaagaacacagccctccatggattcgggattgctctgagggccatagaaggcatttgcgtgtgtgtgtgtgtgtgtgtgtgaacaagaggttcattcctctacccccacatttattctccctgatgtgctcctacaagtgcttcatctctgtgcctgaaattctataaatgttgcaatcatg

SEQ ID NO: 180153 - DNA, 2728 bp, Homo sapiens
  Payload ID: 15489
  Gene Symbol: SRR
  Gene Name: serine racemase
  Uniprot ID: Q9GZT4
  ENST ID: ENST00000344595
  CDS Start-End: 319-1341
tccagcccttccgccatcttcgcggctgctgctacagccgtagcggctccgccaccgccgcgcgcagccaggaaaccaccacagacgggcggcgcgcgcgctcgcccacctcccggcctttccccgccccctgccgccctccctttccgaacgacggtggccgcgctgggaggaaaagcgcccgccgccggttccagaggggcgggaccggagcgagagcctgggtggggcgggcgggcgctgcgcgtgcgcagaggtgcggccggggaggcgcgcggaggctggagctggaggcgcggcgccggtgagctgagaaccatgtgtgctcagtattgcatctcctttgctgatgttgaaaaagctcatatcaacattcgagattctatccacctcacaccagtgctaacaagctccattttgaatcaactaacagggcgcaatcttttcttcaaatgtgaactcttccagaaaacaggatcttttaagattcgtggtgctctcaatgccgtcagaagcttggttcctgatgctttagaaaggaagccgaaagctgttgttactcacagcagtggaaaccatggccaggctctcacctatgctgccaaattggaaggaattcctgcttatattgtggtgccccagacagctccagactgtaaaaaacttgcaatacaagcctacggagcgtcaattgtatactgtgaacctagtgatgagtccagagaaaatgttgcaaaaagagttacagaagaaacagaaggcatcatggtacatcccaaccaggagcctgcagtgatagctggacaagggacaattgccctggaagtgctgaaccaggttcctttggtggatgcactggtggtacctgtaggtggaggaggaatgcttgctggaatagcaattacagttaaggctctgaaacctagtgtgaaggtatatgctgctgaaccctcaaatgcagatgactgctaccagtccaagctgaaggggaaactgatgcccaatctttatcctccagaaaccatagcagatggtgtcaaatccagcattggcttgaacacctggcctattatcagggaccttgtggatgatatcttcactgtcacagaggatgaaattaagtgtgcaacccagctggtgtgggagaggatgaaactactcattgaacctacagctggtgttggagtggctgctgtgctgtctcaacattttcaaactgtttccccagaagtaaagaacatttgtattgtgctcagtggtggaaatgtagacttaacctcctccataacttgggtgaagcaggctgaaaggccagcttcttatcagtctgtttctgtttaatttacagaaaaggaaatggtgggaattcagtgtctttagatactgaagacattttgtttcctagtattgtcaactcttagttatcagattcttaatggagagtggctatttcattaagatttaatagttttttttggactaagtagtggaaaaacttttatacttaactgagacattttgtcaaggctaaaaaaaagtcttgcaaaatggggcagtggactgacaggctgacatagaaaataaactttgcccaatcacaacttgtgcctcccatccctggagtactgactggcaccggtaagacagaatctctttgaatccattactccatgcccccttgaggcactgttgaagaaatctcacttttcagccagggtactggttctggtacatatggatcataagtccatttggggaagactcgtttatacaggttcatcagtactgtgtcttgagattttagcttcccatcaaagctgcatttcatgtggccatgggtacctagaaagacatcagaacaagtcggtcaaattaaaagtagaaaattttaaagcaatgacttccaacccaacagtcatttagcaacactgcagaaatgcagacatggtctcaaatcccgtgtttccttacctaaaggttccttgatatgtcctctccggccccacttcgttctcagttccactggtttaaaccacagcacatcctcttagaatcaaacacattaaagaccaagatgaaacatttacccacaaaatgtaaacccaacctttataccacaaaggcaatcagatcccatcctcctccttcatacccacctctgttgaagaacatgtaacgtactactgccatcttagtaaaaattttgaaaggatgaccactcagaacaactctcttgatgaccattctgtctggatctactgacataagatggcctgtagcaatgaggctgtgcattcctaaaggacaaaagcaaagaagctatttaggaatttacaggccaaagtcttcatttattgcccagtccatttaaagacccatgcaagagcctggtttgtcatccctgccctagcccaatctgaggctaagattggtaaactgtaagcccacacttaaccttgtcaataggttcttgaaaacttgtacttcaagagaaatgatgtataacaaaaccatactttttctcatcagttgttacaaggaaaggatgttgaacaaaaggcagttatttgaggactggctatacactgtttcacgtaaaagttggagttttcattgttctattaacaatgttaaatgaagacttactgtattttgaaaaccatcattaccttctccataccatttggctcccaaatttaaataaacaagagaaaacggtgttcatcta

SEQ ID NO: 180154 - DNA, 298 bp, Homo sapiens
  Payload ID: 15489
  Gene Symbol: SRR
  Gene Name: serine racemase
  ENST ID: ENST00000572709
  CDS Start-End: 100-298
ggcgagaaagagggtggaggcaggaattcgggccaggctctcccggagctggccaggactggccgagcccgaccccgcactaacccgcgagagagaaccatgtgtgctcagtattgcatctcctttgctgatgttgaaaaagctcatatcaacattcgagattctatccacctcacaccagtgctaacaagctccattttgaatcaactaacagggcgcaatcttttcttcaaatgtgaactcttccagaaaacaggatcttttaagattcgtggtgctctcaatgccgtcagaagct

SEQ ID NO: 180155 - DNA, 586 bp, Homo sapiens
  Payload ID: 15489
  Gene Symbol: SRR
  Gene Name: serine racemase
  ENST ID: ENST00000570662
  CDS Start-End: 287-586
gaagattctcaaagaccagatgcccacttaactatggaaaagatatttgttggtggcattaacgaagacactgaagaatatcacctaagtgattattttgaacagtatggaaaaactgaagtgattgaaatcatgactgaccaaggcagtggcaagaaaaggggctttgcctttgtaacctttgatgatcatgactccgtggataagactgtcattcagaaataccatactgtgaatggccacaactgtgaaattaggaaaggcctgtcaaagcaagagatgaaccatgtgtgctcagtattgcatctcctttgctgatgttgaaaaagctcatatcaacattcgagattctatccacctcacaccagtgctaacaagctccattttgaatcaactaacagggcgcaatcttttcttcaaatgtgaactcttccagaaaacaggatcttttaagattcgtggtgctctcaatgccgtcagaagcttggttcctgatgctttagaaaggaagccgaaagctgttgttactcacagcagtggaaaccatggccaggctctcacctatgctgccaaattggaaggaatt

SEQ ID NO: 180156 - DNA, 522 bp, Homo sapiens
  Payload ID: 15489
  Gene Symbol: SRR
  Gene Name: serine racemase
  ENST ID: ENST00000576620
  CDS Start-End: 73-522
gtgcgcagaggtgcggccggggaggcgcgcggaggctggagctggaggcgcggcgccggtgagctgagaaccatgtgtgctcagtattgcatctcctttgctgatgttgaaaaagctcatatcaacattcgagattctatccacctcacaccagtgctaacaagctccattttgaatcaactaacagggcgcaatcttttcttcaaatgtgaactcttccagaaaacaggatcttttaagattcgtggtgctctcaatgccgtcagaagcttggttcctgatgctttagaaaggaagccgaaagctgttgttactcacagcagtggaaaccatggccaggctctcacctatgctgccaaattggaaggaattcctgcttatattgtggtgccccagacagctccagactgtaaaaaacttgcaatacaagcctacggagcgtcaattgtatactgtgaacctagtgatgagtccaagctgaaggggaaactgatgcccaatctttatcctccagaaaccata

SEQ ID NO: 180157 - DNA, 577 bp, Homo sapiens
  Payload ID: 15489
  Gene Symbol: SRR
  Gene Name: serine racemase
  ENST ID: ENST00000574987
  CDS Start-End: 344-577
gcagaggtgcggccggggaggcgcgcggaggctggagctggaggcgcggcgccggtgagctgagattcgtggtgctctcaatgccgtcagaagcttggttcctgatgctttagaaaggaagccgaaagctgttgttactcacagcagtggaaaccatggccaggctctcacctatgctgccaaattggaaggaattcctgcttatattgtggtgccccagacagctccagactgtaaaaaacttgcaatacaagcctacggagcgtcaattgtatactgtgaacctagtgatgagtccagagaaaatgttgcaaaaagagttacagaagaaacagaaggcatcatggtacatcccaaccaggagcctgcagtgatagctggacaagggacaattgccctggaagtgctgaaccaggttcctttggtggatgcactggtggtacctgtaggtggaggaggaatgcttgctggaatagcaattacagttaaggctctgaaacctagtgtgaaggtatatgctgctgaaccctcaaatgcagatgactgctaccagtccaagctgaaggggaaactgatg

SEQ ID NO: 180158 - DNA, 382 bp, Homo sapiens
  Payload ID: 15489
  Gene Symbol: SRR
  Gene Name: serine racemase
  ENST ID: ENST00000574229
  CDS Start-End: 184-382
aacttcgttcagcttttaagtcaactctcttttagggaaattctgacactccaataatggagaatttccacatgacaccacaggccccaggtctattctgttacgtattttcaaaatctcttcaataaacatactgtctcagactttgctttgacccctttcttattcctgggtttcagaaccatgtgtgctcagtattgcatctcctttgctgatgttgaaaaagctcatatcaacattcgagattctatccacctcacaccagtgctaacaagctccattttgaatcaactaacagggcgcaatcttttcttcaaatgtgaactcttccagaaaacaggatcttttaagattcgtggtgctctcaatgccgtcagaagct

SEQ ID NO: 180159 - DNA, 566 bp, Homo sapiens
  Payload ID: 15489
  Gene Symbol: SRR
  Gene Name: serine racemase
  ENST ID: ENST00000575840
  CDS Start-End: 287-566
gtgcgcagaggtgcggccggggaggcgcgcggaggctggagctggaggcgcggcgccggtgagctgagtgacctcataccctggccactggtcctgggccaagatgggccagagtccttacccagaatttttttaactgaaactgagaaagaaaattccccttcagtgtggaagccataaaatgtaaaacatacgagctgtcagcagccacgtgtcagttggttccatatggaaccaactcgcctgtgtgaaaaagaagccgacgtgcagaaagcagcagagaaccatgtgtgctcagtattgcatctcctttgctgatgttgaaaaagctcatatcaacattcgagattctatccacctcacaccagtgctaacaagctccattttgaatcaactaacagggcgcaatcttttcttcaaatgtgaactcttccagaaaacaggatcttttaagattcgtggtgctctcaatgccgtcagaagcttggttcctgatgctttagaaaggaagccgaaagctgttgttactcacagcagtggaaaccatggccaggctctcacctatg

SEQ ID NO: 180160 - DNA, 588 bp, Homo sapiens
  Payload ID: 15489
  Gene Symbol: SRR
  Gene Name: serine racemase
  ENST ID: ENST00000576848
  CDS Start-End: 153-497
gtgcgcagaggtgcggccggggaggcgcgcggaggctggagctggaggcgcggcgccggtgagctgaggctctgaaacctagtgtgaaggtatatgctgctgaaccctcaaatgcagatgactgctaccagtccaagctgaaggggaaactgatgcccaatctttatcctccagaaaccatagcagatggtgtcaaatccagcattggcttgaacacctggcctattatcagggaccttgtggatgatatcttcactgtcacagaggatgaaattaagtgtgcaacccagctggtgtgggagaggatgaaactactcattgaacctacagctggtgttggagtggctgctgtgctgtctcaacattttcaaactgtttccccagaagtaaagaacatttgtattgtgctcagtggtggaaatgtagacttaacctcctccataacttgggtgaagcaggctgaaaggccagcttcttatcagtctgtttctgtttaatttacagaaaaggaaatggtgggaattcagtgtctttagatactgaagacattttgtttcctagtattgtcaactcttagttatcagattc

SEQ ID NO: 180161 - DNA, 3820 bp, Homo sapiens
  Payload ID: 15490
  Gene Symbol: STK39
  Gene Name: serine threonine kinase 39
  Uniprot ID: Q9UEW8
  ENST ID: ENST00000355999
  CDS Start-End: 707-2344
aaactagaaggactgcgattagattaggcaaggtgggaaagggataccggcaagtaaagcgccggaaacttacaacttgggttattttctaactggcgtcttgcaaagggacaccatgtaggtatcccgctcgtcaacttgtaaatgaacttcaggttctctttggtggcaggagaattctgaatgtgagaacctggcggccgttcaacgaccccgccctcggggtccccagggggcgtcctccggcaagcctgatcgtctggggccaaggcgcagggcgagcagggagggaggaggagaaccagggccggtggccccgaaagcacacacaaagcggcctgactcctttggtgggaacttccccggccgccagcggagcgggagcgggagggggcggcggagagggggggcggcggttcccctcgccgaggcggagaacagcgcgcgctaggctctgggcgcgcggcgagcgcagcggccgccgcctcctcccttccccgcctccgccggcgctgcctcctccctccgcccagctcggcctcccttgctccctcccctcctagctggcttcggcggggacggcggcggcggcggcgggcggggagggcgtgcgccggccgagaggtgtcggcggcgaggcaaaggaagtttcaagtggaaggtcgtccgtcggccggcgcgtcctcctgctctcctccgcagcatcatggcggagccgagcggctcgcccgtgcacgtccagcttccccagcaggcggccccggtgacagcggcggcggcggcggccccggcggccgcgacagcagcgccggccccggcagctcccgcggccccggccccggccccggccccggcggcacaggctgtcggctggcccatctgcagggacgcgtacgagctgcaggaggttatcggcagtggagctactgctgtggttcaggcagccctatgcaaacccaggcaagaacgtgtagcaataaaacggatcaacttggaaaaatgccagaccagtatggatgaactattaaaagaaattcaagccatgagtcagtgcagccatcccaacgtagtgacctattacacctcttttgtggtcaaagatgaactttggctggtcatgaaattactaagtggaggttcaatgttggatatcataaaatacattgtcaaccgaggagaacacaagaatggagttctggaagaggcaataatagcaacaattcttaaagaggttttggaaggcttagactatctacacagaaacggtcagattcacagggatttgaaagctggtaatattcttctgggtgaggatggttcagtacaaatagcagattttggggtaagtgcgttcctagcaacagggggtgatgttacccgaaataaagtaagaaaaacattcgttggcaccccatgttggatggctcctgaagtcatggaacaggtgagaggctatgacttcaaggctgacatgtggagttttggaataactgccattgaattagcaacaggagcagcgccttatcacaaatatcctcccatgaaagtgttaatgttgactttgcaaaatgatccacccactttggaaacaggggtagaggataaagaaatgatgaaaaagtacggcaagtcctttagaaaattactttcactgtgtcttcagaaagatccttccaaaaggcccacagcagcagaacttttaaaatgcaaattcttccagaaagccaagaacagagagtacctgattgagaagctgcttacaagaacaccagacatagcccaaagagccaaaaaggtaagaagagttcctgggtcaagtggtcaccttcataaaaccgaagacggggactgggagtggagtgacgacgagatggatgagaagagcgaagaagggaaagcagctttttctcaggaaaagtcacgaagagtaaaagaagaaaatccagagattgcagtgagtgccagcaccatccccgaacaaatacagtccctctctgtgcacgactctcagggcccacccaatgctaatgaagactacagagaagcttcttcttgtgccgtgaacctcgttttgagattaagaaactccagaaaggaacttaatgacatacgatttgagtttactccaggaagagatacagcagatggtgtatctcaggagctcttctctgctggcttggtggatggtcacgatgtagttatagtggctgctaatttacagaagattgtagatgatcccaaagctttaaaaacattgacatttaagttggcttctggctgtgatgggtcggagattcctgatgaagtgaagctgattgggtttgctcagttgagtgtcagctgatgtatgtcccttgatgtcaccctgatctgtcatgccccaccgccacccctactcccttcaaccctccctctttctgcccatttcctcccaccccctcactcccatttcctagcaaaatcagaagattgtgaagaggccggcttcaacaaaatgggataaaaaaataattttttaaaacttacaacactccgagttctgctttattctctagcaatccacagtacaagaacaagcaaatgccacagctgcacgactgttgctcatttttccaaaagctatttaatattcttagcaatcaatttggatatcccttaagtgaaaagaatctgaaatacactcaggtggtcttatttattggcaacaaaaggaattttctatccagaagcctatttctcctttcattgttgttatttctgttataatactttaattgtacatctgacaatactgcctcttttatgttgtatttagaaattaatatacttataaaattaagatttattagccaaacttgaattctagttttaaaactgactgtgaattttatttttcatatatttatgcattacacaccttagctataagaaaaaaagggttttgattatatgcttcttgcagttaatctcgttatttaaacaaaaagttttgggtctgtctttggagtatttgtaacttctaaattttgaaatgactgaattaggaatttggatgcttattcttttagtctgtttgcctaaaaaccaatttacaatctgactgtctcttgggagagggaggtgccttgcaaactttcacattaagaatgtgcctgaggctgctttactctggaatagtctcagatctaaaatttcctctatataaggtggcatatgttaagttttgcttcattggaccgtttagaatgctatgtaaaatgttgccattctgttagattgctaactatatacccatctctgatttggctctccttaagtgataggatttgttattctaaaggtgataaacttgaaaatatcagaatctgagttttacttgaaattttgcagaatacccaggtggagtgaaaattggaagggttttgtgcaatgactaaaaggtaaaacgctgttaaggttcaagaatcaatactttcaacccaagtagccctctgcttgactgtatattatggaactagtaaaccttaggattttgaaaattggagtctaatctttcaaggaggtgggctcccaggatggtaccattgctctttcctagctaaccctagatatggcagctctttaatgtacttcaaaaagcaaatatatattactaaggaaaaaaagttatttataattgccttgtcataattgttaaggtgttctagagccatttgcatacaatttaatgtaatttcattccattctattgtttacacaacgattactcgaagatgactgcaaaggtaaaaggaaaataaaagtgtattgcacaatgaga

SEQ ID NO: 180162 - DNA, 4011 bp, Homo sapiens
  Payload ID: 15491
  Gene Symbol: SRRM1
  Gene Name: serine/arginine repetitive matrix 1
  Uniprot ID: Q8IYB3
  ENST ID: ENST00000323848
  CDS Start-End: 316-3030
aaaggacttgcagggcggggcgactcgacggccttcccttttgctcccattggctgcggtcgtcaggttcgcctcctccactacctaccggggagtttagggcctgacagaagcccgcccccgctggcgctcgtgcgcacgcgtggcgggctctcggcgcactgagcaggcgcggcctcgtgtcggccggagggggcgggcgcaacgacgcgcgctgcgtcccggcgctcggctttccctccgccggtcccgccctccgtcgcggcggcgcggtgtaccctgggatagggagcgatctccgagcgaggcggcaagatggacgcgggatttttccgcggaacaagtgcagaacaggataatcggttcagcaacaaacagaagaaactactgaagcagctgaaatttgcagaatgcctagaaaaaaaggtggacatgagcaaagtaaatttggaggttataaagccttggataacaaaaagagtaacggaaatccttgggtttgaagatgatgttgtgattgagtttatattcaaccagctggaagtgaagaatccagactccaaaatgatgcaaatcaacctgactggatttttgaatggaaaaaatgctcgagaatttatgggagaactgtggcccctgctgctaagtgcacaagaaaacatcgcgggaatcccttctgctttcctagaactgaagaaagaagaaataaaacaaagacagattgaacaagaaaaactggcatctatgaaaaagcaagatgaagacaaagataaaagagataaggaagaaaaagaaagcagcagagaaaaaagggagcggtctcgtagcccaagaagacgcaaatccagatctccttcccctagaagacgatcttcccctgtcaggagagagagaaagcgcagtcattctcgatctccccgtcacagaaccaagagccggagtccttcccctgctccagaaaagaaggaaaaaactccagagctcccagaaccttcagtgaaagtaaaagaaccttcagtacaagaggctacttctactagtgacattctgaaagttcccaaacctgaacctataccagagcctaaagaaccttctccggaaaaaaattccaaaaaagaaaaggagaaggagaagacccgaccacgatctcggtcacgctccaaatcaagatcccggacgcggtcccgctctccttctcacactcgacctagacggcgccatagatcccgatcaagatcgtattcacctagaaggcggccaagcccaagaaggcggccatctcctcgaagaagaactccgccaagaagaatgcctcctccaccaaggcatagaaggagtagatctccagtaagacgaagaagacgttcgtcagcatccttgtctgggagtagctcatcatcctcttcatctcgttcacggtcaccaccaaagaagcctcccaagaggacatccagcccccctcggaaaactcgtaggttatctccttcagcaagtcctccaaggcgaaggcacaggccatcacctcctgcaactccaccacccaaaactcggcattcccctacaccccagcagtcaaaccgtacaagaaaaagtcgtgtttctgtgtctccagggagaacttcaggtaaagtgacaaaacataaaggtactgagaaaagagaatccccttcaccagcaccgaagcctagaaaagtagagttatctgaatcggaagaagataaaggtggcaaaatggctgcagcagattctgtgcagcagagacgccaatacagacgacaaaaccagcagtcttcatctgactctggctcctcctcctcctcagaagatgaacgacccaagagatcccatgtgaagaatggtgaggttggcaggcggcggagacattccccttcccggagtgcttctccatcaccacgaaagcgccaaaaagagacttcccctcgtggtagacggaggagaagtccatccccaccacccaccagaaggcgacggtctccttctcccgcccctcctcctcgacggcgcaggactcccacaccaccaccacgacgaaggactccttctcctcccccacgtcggcgctcaccttctcctagaagatactctcctccaatacagaggagatactctccttctccacctccaaagagaagaacggcttcacctcctccccctcctaaacgaagagcatcaccatctccaccaccaaagcggcgggtctcccattctccacctcccaaacaaagaagctccccagtcaccaagagacgttcaccttcattatcatccaagcataggaaagggtcttccccaagccgctctacccgggaggcccgatcaccacaaccaaacaaacggcattcgccctcaccacggcctcgagctcctcagacctcctcaagtcctccacccgttcgaagaggagcgtcgtcatcaccccaaagaaggcagtccccgtctccaagtactaggcccattaggagagtctccaggactccggaacctaaaaagataaaaaaggctgcttccccaagcccacagtctgtaagaagggtctcatcctcccgatctgtctccgggtctcctgagccagcagctaaaaagcccccagcacctccatcccccgtccagtctcagtcaccgtctacaaactggtcaccagctgtaccggtcaaaaaggccaaaagcccaacaccgagcccatcaccgccaagaaattcagatcaggaaggaggtggaaagaaaaagaagaaaaagaaggacaagaaacacaaaaaggataagaagcacaagaagcacaaaaaacacaagaaggaaaaggctgtggctgcagctgctgcagctgctgtgacccctgcagccattgcagctgccacaaccacattagcacaggaagagccagtggcagcgccagagccgaagaaggagactgaaagtgaagctgaagataaccttgatgatttagaaaagcacctgcgtgaaaaggccctgagatcaatgaggaaggcccaagtgtccccacagtcttagggggaaatgtttgttatgatgtaaattttatttggtttgtacgcagttcaatttcaaaattgctaaaatgtgtttgagctttagactataacatttgttgtaataattgctaggttgaagttcaacatgtaaaaaaagggggcatggatttacattgcaaaaggtgtccacagtgtattagtgacattctttcattgacagctgacataattcattgagtgaaatattttaagccaaaaaaaaattccctttttaaaaaagggggtttaaatactgttggcatttttatggttcctttaaatgccctagctattcccagaggggtttttttgtttgtttttttggttttgattttctttttgtttttctttcttcttcttatttttttcatttgagtcttagctcccatttaagttatgcttctgaccttgtatggtctgtaagcttgcccagaaataagaccactgttttgaactaccacaaaagtataaatgaatattttaatgccacaatctttcctgttgcctgtggagtctctgctgaaatgaatcaggattcgagctctaggatgagacagaaaatgaaagcatgttgtttgccaggacactgtgggtttatattgatgtgtaacaagttgatttggaacactggactctcattctgttattctggttttgttttttttgttttgttttttttcttttgtaaaggcaatgagctagtcccagaaaggatccttcagttacatacaatttgtttaatgaaatgtcatggctctgttcatatttttgtcttgttcttccaattggtatatacaactttcagagcctcttgtatttggaaggctggaagggcccagactttggaatagtgtcttggtttcactgtttttgttttgattttttttttgttttgattttttttaaactaaagctatataaagcttgtggattaaacagaataaatttctaaatttaaaaa

SEQ ID NO: 180163 - DNA, 3110 bp, Homo sapiens
  Payload ID: 15491
  Gene Symbol: SRRM1
  Gene Name: serine/arginine repetitive matrix 1
  ENST ID: ENST00000374389
  CDS Start-End: 29-2770
gggagcgatctccgagcgaggcggcaagatggacgcgggatttttccgcggaacaagtgcagaacaggataatcggttcagcaacaaacagaagaaactactgaagcagctgaaatttgcagaatgcctagaaaaaaaggtggacatgagcaaagtaaatttggaggttataaagccttggataacaaaaagagtaacggaaatccttgggtttgaagatgatgttgtgattgagtttatattcaaccagctggaagtgaagaatccagactccaaaatgatgcaaatcaacctgactggatttttgaatggaaaaaatgctcgagaatttatgggagaactgtggcccctgctgctaagtgcacaagaaaacatcgcgggaatcccttctgctttcctagaactgaagaaagaagaaataaaacaaagacagattgaacaagaaaaactggcatctatgaaaaagcaagatgaagacaaagataaaagagataaggaagaaaaagaaagcagcagagaaaaaagggagcggtctcgtagcccaagaagacgcaaatccagatctccttcccctagaagacgatcttcccctgtcaggagagagagaaagcgcagtcattctcgatctccccgtcacagaaccaagagccggagtccttcccctgctccagaaaagaaggaaaaaactccagagctcccagaaccttcagtgaaagtaaaagaaccttcagtacaagaggctacttctactagtgacattctgaaagttcccaaacctgaacctataccagagcctaaagaaccttctccggaaaaaaattccaaaaaagaaaaggagaaggagaagacccgaccacgatctcggtcacgctccaaatcaagatcccggacgcggtcccgctctccttctcacactcgacctagacggcgccatagatcccgatcaagaaggcggccaagcccaagaaggcggccatctcctcgaagaagaactccgccaagaagaatgcctcctccaccaaggcatagaaggagtagatctccagtaagacgaagaagacgttcgtcagcatccttgtctgggagtagctcatcatcctcttcatctcgttcacggtcaccaccaaagaagcctcccaagaggacatccagcccccctcggaaaactcgtaggttatctccttcagcaagtcctccaaggcgaaggcacaggccatcacctcctgcaactccaccacccaaaactcggcattcccctacaccccagcagtcaaaccgtacaagaaaaagtcgtgtttctgtgtctccagggagaacttcaggtaaagtgacaaaacataaaggtactgagaaaagagaatccccttcaccagcaccgaagcctagaaaagtagagttatctgaatcggaagaagataaaggtggcaaaatggctgcagcagattctgtgcagcagagacgccaatacagacgacaaaaccagcagtcttcatctgactctggctcctcctcctcctcagaagatgaacgacccaagagatcccatgtgaagaatggtgaggttggcaggcggcggagacattccccttcccggagtgcttctccatcaccacgaaagcgccaaaaagagacttcccctcggatgcagatgggaaagcgatggcaatcgccagtgactaaaagtggtagacggaggagaagtccatccccaccacccaccagaaggcgacggtctccttctcccgcccctcctcctcgacggcgcaggactcccacaccaccaccacgacgaaggactccttctcctcccccacgtcggcgctcaccttctcctagaagatactctcctccaatacagaggagatactctccttctccacctccaaagagaagaacggcttcacctcctccccctcctaaacgaagagcatcaccatctccaccaccaaagcggcgggtctcccattctccacctcccaaacaaagaagctccccagtcaccaagagacgttcaccttcattatcatccaagcataggaaagggtcttccccaagccgctctacccgggaggcccgatcaccacaaccaaacaaacggcattcgccctcaccacggcctcgagctcctcagacctcctcaagtcctccacccgttcgaagaggagcgtcgtcatcaccccaaagaaggcagtccccgtctccaagtactaggcccattaggagagtctccaggactccggaacctaaaaagataaaaaaggctgcttccccaagcccacagtctgtaagaagggtctcatcctcccgatctgtctccgggtctcctgagccagcagctaaaaagcccccagcacctccatcccccgtccagtctcagtcaccgtctacaaactggtcaccagctgtaccggtcaaaaaggccaaaagcccaacaccgagcccatcaccgccaagaaattcagatcaggaaggaggtggaaagaaaaagaagaaaaagaaggacaagaaacacaaaaaggataagaagcacaagaagcacaaaaaacacaagaaggaaaaggctgtggctgcagctgctgcagctgctgtgacccctgcagccattgcagctgccacaaccacattagcacaggaagagccagtggcagcgccagagccgaagaaggagactgaaagtgaagctgaagataaccttgatgatttagaaaagcacctgcgtgaaaaggccctgagatcaatgaggaaggcccaagtgtccccacagtcttagggggaaatgtttgttatgatgtaaattttatttggtttgtacgcagttcaatttcaaaattgctaaaatgtgtttgagctttagactataacatttgttgtaataattgctaggttgaagttcaacatgtaaaaaaagggggcatggatttacattgcaaaaggtgtccacagtgtattagtgacattctttcattgacagctgacataattcattgagtgaaatattttaagccaaaaaaaaattccctttttaaaaaagggggtttaaatactgttggcatttttatggttcctttaaatgccctagctattcccagaggggtttttttgtttgtttt

SEQ ID NO: 180164 - DNA, 3691 bp, Homo sapiens
  Payload ID: 15491
  Gene Symbol: SRRM1
  Gene Name: serine/arginine repetitive matrix 1
  ENST ID: ENST00000447431
  CDS Start-End: 6-2468
gcaagatggacgcgggatttttccgcggaacaagtgcagaacaggataatcggttcagcaacaaacagaagaaactactgaagcagctgaaatttgcagaatgcctagaaaaaaaggtggacatgagcaaagtaaatttggaggttataaagccttggataacaaaaagagtaacggaaatccttgggtttgaagatgatgttgtgattgagtttatattcaaccagctggaagtgaagaatccagactccaaaatgatgcaaatcaacctgactggatttttgaatggaaaaaatgctcgagaatttatgggagaactgtggcccctgctgctaagtgcacaagaaaacatcgcgggaatcccttctgctttcctagaactgaagaaagaagaaataaaacaaagacagattgaacaagaaaaactggcatctatgaaaaagcaagatgaagacaaagataaaagagataaggaagaaaaagaaagcagcagagaaaaaagggagcggtctcgtagcccaagaagacgcaaatccagatctccttcccctagaagacgatcttcccctgtcaggagagagagaaagcgcagtcattctcgatctccccgtcacagaaccaagagccggagtccttcccctgctccagaaaagaaggaaaaaactccagagctcccagaaccttcagtgaaagtaaaagaaccttcagtacaagaggctacttctactagtgacattctgaaagttcccaaacctgaacctataccagagcctaaagaaccttctccggaaaaaaattccaaaaaagaaaaggagaaggagaagacccgaccacgatctcggtcacgctccaaatcaagatcccggacgcggtcccgctctccttctcacactcgacctagacggcgccatagatccgatcaagcgtattcacctagaaggcggccaagcccaagaaggcggccatctcctcgaagaagaactccgccaagaagaatgcctcctccaccaaggcatagaaggagtagatctccagtaagacgaagaagacgttcgtcagcatccttgtctgggagtagctcatcatcctcttcatctcgttcacggtcaccaccaaagaagcctcccaagaggacatccagcccccctcggaaaactcgtaggttatctccttcagcaagtcctccaaggcgaaggcacaggccatcacctcctgcaactccaccacccaaaactcggcattcccctacaccccagcagtcaaaccgtacaagaaaaagtcgtgtttctgtgtctccagggagaacttcaggtaaagtgacaaaacataaaggtactgagaaaagagaatccccttcaccagcaccgaagcctagaaaagtagagttatctgaatcggaagaagataaaggtggcaaaatggctgcagcagattctgtgcagcagagacgccaatacagacgacaaaaccagcagtcttcatctgactctggctcctcctcctcctcagaagatgaacgacccaagagatcccatgtgaagaatggtgaggttggcaggcggcggagacattccccttcccggagtgcttctccatcaccacgaaagcgccaaaaagagacttcccctcgtggtagacggaggagaagtccatccccaccacccaccagaaggcgacggtctccttctcccgcccctcctcctcgacggcgcaggactcccacaccaccaccacgacgaaggactccttctcctcccccacgtcggcgctcaccttctcctagaagatactctcctccaatacagaggagatactctccttctccacctccaaagagaagaacggcttcacctcctccccctcctaaacgaagagcatcaccatctccaccaccaaagcggcgggtctcccattctccacctcccaaacaaagaagctccccagtcaccaagagacgttcaccttcattatcatccaagcataggaaagggtcttccccaagccgctctacccgggaggcccgatcaccacaaccaaacaaacggcattcgccctcaccacggcctcgagctcctcagacctcctcaagtcctccacccgttcgaagaggagcgtcgtcatcaccccaaagaaggcagtccccgtctccaagtactaggcccattaggagagtctccaggactccggaacctaaaaagataaaaaaggctgcttccccaagcccacagtctgtaagaagggtctcatcctcccgatctgtctccgggtctcctgagccagcagctaaaaagcccccagcacctccatcccccgtccagtctcagtcaccgtctacaaactggtcaccagctgtaccggtcaaaggccaaaagcccaacaccgagcccatcaccgccaagaaattcagatcaggaaggaggtggaaagaaaaagaagaaaaagaaggacaagaaacacaaaaaggataagaagcacaagaagcacaaaaaacacaagaaggaaaaggctgtggctgcagctgctgcagctgctgtgacccctgcagccattgcagctgccacaaccacattagcacaggaagagccagtggcagcgccagagccgaagaaggagactgaaagtgaagctgaagataaccttgatgatttagaaaagcacctgcgtgaaaaggccctgagatcaatgaggaaggcccaagtgtccccacagtcttagggggaaatgtttgttatgatgtaaattttatttggtttgtacgcagttcaatttcaaaattgctaaaatgtgtttgagctttagactataacatttgttgtaataattgctaggttgaagttcaacatgtaaaaaaagggggcatggatttacattgcaaaaggtgtccacagtgtattagtgacattctttcattgacagctgacataattcattgagtgaaatattttaagccaaaaaaaaattccctttttaaaaaagggggtttaaatactgttggcatttttatggttcctttaaatgccctagctattcccagaggggtttttttgtttgtttttttggttttgattttctttttgtttttctttcttcttcttatttttttcatttgagtcttagctcccatttaagttatgcttctgaccttgtatggtctgtaagcttgcccagaaataagaccactgttttgaactaccacaaaagtataaatgaatattttaatgccacaatctttcctgttgcctgtggagtctctgctgaaatgaatcaggattcgagctctaggatgagacagaaaatgaaagcatgttgtttgccaggacactgtgggtttatattgatgtgtaacaagttgatttggaacactggactctcattctgttattctggttttgttttttttgttttgttttttttcttttgtaaaggcaatgagctagtcccagaaaggatccttcagttacatacaatttgtttaatgaaatgtcatggctctgttcatatttttgtcttgttcttccaattggtatatacaactttcagagcctcttgtatttggaaggctggaagggcccagactttggaatagtgtcttggtttcactgtttttgttttgattttttttttgttttgattttttttaaactaaagctatataaagcttgtggattaaacagaataaatttctaaattt

SEQ ID NO: 180165 - DNA, 563 bp, Homo sapiens
  Payload ID: 15491
  Gene Symbol: SRRM1
  Gene Name: serine/arginine repetitive matrix 1
  ENST ID: ENST00000593639
  CDS Start-End: 259-563
gaatcgcttgaacccgggaggcagaggttgtagtgagccgagatcgcgccactgcacttcagcctgggcgacagagcgagactcggtctcaaaaaaaaaaaaaaaagatatctggaagtagagcattctagattacatcaaagacgaaatagcgtgcatcagggaacaagtgcagaacaggataatcggttcagcaacaaacagaagaaactactgaagcagctgaaatttgcagaatgcctagaaaaaaaggtggacatgagcaaagtaaatttggaggttataaagccttggataacaaaaagagtaacggaaatccttgggtttgaagatgatgttgtgattgagtttatattcaaccagctggaagtgaagaatccagactccaaaatgatgcaaatcaacctgactggatttttgaatggaaaaaatgctcgagaatttatgggagaactgtggcccctgctgctaagtgcacaagaaaacatcgcgggaatcccttctgctttcctagaactgaagaaagaagaaataaaacaaagacagattgaacaagaaaaact

SEQ ID NO: 180166 - DNA, 2314 bp, Homo sapiens
  Payload ID: 15491
  Gene Symbol: SRRM1
  Gene Name: serine/arginine repetitive matrix 1
  ENST ID: ENST00000596378
  CDS Start-End: 271-2314
acgcggcggcgacggtggccggaaaatggcggcgggaatgggccgggatggtacctcgctgcccgcctgcctggcggggcctgcaggccgagcgccgtgcgtgccgccgggtcctggggcctagcggagccggaggaggaagtcccgagtgggaggccaaaggaaagccctaagggaacaagtgcagaacaggataatcggttcagcaacaaacagaagaaactactgaagcagctgaaatttgcagaatgcctagaaaaaaaggtggacatgagcaaagtaaatttggaggttataaagccttggataacaaaaagagtaacggaaatccttgggtttgaagatgatgttgtgattgagtttatattcaaccagctggaagtgaagaatccagactccaaaatgatgcaaatcaacctgactggatttttgaatggaaaaaatgctcgagaatttatgggagaactgtggcccctgctgctaagtgcacaagaaaacatcgcgggaatcccttctgctttcctagaactgaagaaagaagaaataaaacaaagacagattgaacaagaaaaactggcatctatgaaaaagcaagatgaagacaaagataaaagagataaggaagaaaaagaaagcagcagagaaaaaagggagcggtctcgtagcccaagaagacgcaaatccagatctccttcccctagaagacgatcttcccctgtcaggagagagagaaagcgcagtcattctcgatctccccgtcacagaaccaagagccggagtccttcccctgctccagaaaagaaggaaaaaactccagagctcccagaaccttcagtgaaagtaaaagaaccttcagtacaagaggctacttctactagtgacattctgaaagttcccaaacctgaacctataccagagcctaaagaaccttctccggaaaaaaattccaaaaaagaaaaggagaaggagaagacccgaccacgatctcggtcacgctccaaatcaagatcccggacgcggtcccgctctccttctcacactcgacctagacggcgccatagatcccgatcaagatcgtattcacctagaaggcggccaagcccaagaaggcggccatctcctcgaagaagaactccgccaagaagaatgcctcctccaccaaggcatagaaggagtagatctccagtaagacgaagaagacgttcgtcagcatccttgtctgggagtagctcatcatcctcttcatctcgttcacggtcaccaccaaagaagcctcccaagaggacatccagcccccctcggaaaactcgtaggttatctccttcagcaagtcctccaaggcgaaggcacaggccatcacctcctgcaactccaccacccaaaactcggcattcccctacaccccagcagtcaaaccgtacaagaaaaagtcgtgtttctgtgtctccagggagaacttcagtgacaaaacataaaggtactgagaaaagagaatccccttcaccagcaccgaagcctagaaaagtagagttatctgaatcggaagaagataaaggtggcaaaatggctgcagcagattctgtgcagcagagacgccaatacagacgacaaaaccagcagtcttcatctgactctggctcctcctcctcctcagaagatgaacgacccaagagatcccatgtgaagaatggtgaggttggcaggcggcggagacattccccttcccggagtgcttctccatcaccacgaaagcgccaaaaagagacttcccctcggatgcagatgggaaagcgatggcaatcgccagtgactaaaagtggtagacggaggagaagtccatccccaccacccaccagaaggcgacggtctccttctcccgcccctcctcctcgacggcgcaggactcccacaccaccaccacgacgaaggactccttctcctcccccacgtcggcgctcaccttctcctagaagatactctcctccaatacagaggagatactctccttctccacctccaaagagaagaacggcttcacctcctccccctcctaaacgaagagcatcaccatctccaccaccaaagcggcgggtctcccattctccacctcccaaacaaagaagctccccagtcaccaagagacgttcaccttcattatcatccaagcataggaaagggtcttccccaagccgctctacccgggaggcccgatcaccacaaccaaacaaacggcattcgccctcaccacggcctcgagctcctcagacctcctcaagtcctccacccgttcgaagaggagcgtcgtcatcacccc

SEQ ID NO: 180167 - DNA, 575 bp, Homo sapiens
  Payload ID: 15491
  Gene Symbol: SRRM1
  Gene Name: serine/arginine repetitive matrix 1
  ENST ID: ENST00000600523
  CDS Start-End: 40-279
accctgggatagggagcgatctccgagcgaggcggcaagatggacgcgggatttttccgcggaacaagtgcagaacaggataatcggttcagcaacaaacagaagaaactactgaagcagctgaaatttgcagaatgcctagaaaaaaaggtggacatgagcaaagtaaatttggaggttataaagccttggataacaaaaagagtaacggaaatccttgggtttgaagatgatgttgtgattgagtttatattcaaccagctggaagtgaaggcctgaaccaaaatggaagttattccttgcgtctgaagtatagcaccatcaccttattaggtcacagcagagtgagtgtcccaatgtcgctctgacccaactcccttgatgatgcagtgtgtgtttggagataaatgatataacattaaactcaaggtggttgagttgcagtagggagtcggaagcaagccaagggaacatctttctctacaggggacttggcgattccaaacccccaaggttccaagaagaaactgaagacacctggaatctaatccagactccaaaatgatgcaaatcaa

SEQ ID NO: 180168 - DNA, 9353 bp, Homo sapiens
  Payload ID: 15492
  Gene Symbol: SRRM2
  Gene Name: serine/arginine repetitive matrix 2
  Uniprot ID: Q9UQ35
  ENST ID: ENST00000301740
  CDS Start-End: 550-8808
agaatgctctgcatcgacagcgggagacgagacgcgctcgggcgtcgctttgctgccgctaggccctgtgctcctccccgcagcggaaggcctacgaatacgcggtgtcttacgtcgcttcctccgttcttcgttgcactggccaacgggacgcttagtctttcggcaacggggtgaaaccttccttgtgcctgaaaaaacggtacttcgcggtgtggcttcggcgcctgcgcaaaaggccgcggggcgcactccagttcccggcaggccccgcgacgcgcgtttgcgtgctgacgcacgcagttagtcgtgctgacgtgcagcgcggcccaggcggggtgcgagtggcgcagttggagcccgttgcggcccctgaggaagcgaggaggcgtcggcgtcggctgaggcgggcggaccggcgaggcgaggcggcggccccaggcccgagggactcgggagctcgagcagcggcggcggcaagacctctccccctcggaggcggcgggcggaggcggcgggagcggtggtgccccccccgggcacggggccatgtacaacgggatcgggctgccgacgccccggggcagcggcaccaacggctacgtccagcgcaacctgtccctggtgcggggccgccggggtgagcggcctgactacaagggagaggaggaactgcggcgcctggaggctgccctggtgaagcggcctaatcctgacatcctggaccacgagcgcaagcggcgcgtcgagctgcgatgcctcgagctggaggagatgatggaagagcaggggtacgaggaacagcaaattcaggaaaaagtggcgacctttcgactcatgttgctggagaaggatgtgaaccctgggggcaaggaggagaccccagggcagaggccagcggtcacggagactcaccagttggcagaattaaatgagaagaagaatgaaagactccgtgctgcctttggcatcagtgattcttacgtagatggcagctcttttgatcctcagcgtcgtgcccgagaagctaaacaaccagctcctgagcctcccaaaccttacagccttgttcgggagtctagcagttctcgctcaccaaccccaaagcagaagaagaagaaaaagaagaaagatagaggacgcaggtcagagagcagctctcctcgacgggagagaaagaaaagctcaaagaagaagaagcacaggtcagaatctgagtccaagaaacgtaagcataggtctcccactccaaagagcaaacgtaaatctaaggacaaaaagcgaaagcggtctcgaagtacaacaccagcccccaagagccgccgggcccaccgttcaacttctgctgactctgcttcctcctccgatacttcccgcagtcggtctcgaagtgctgcagctaaaactcatacaactgccttggctgggcgaagtccttcccctgcttcagggcgacgcggggagggagatgcgcctttcagtgaaccaggtactaccagcacacaacggcctagtagcccggagactgctacgaaacagcctagcagcccttatgaagacaaagataaagacaagaaggagaaatctgcaactcgacctagcccctctccggaaaggagcagcacaggcccagaaccacctgctcccactccgctccttgctgagcgacatggcggctccccacaaccccttgcaaccacccccttaagccaggagccagtgaaccccccatctgaggcctctccaactcgggaccgttcaccacctaagtctcccgagaaacttccccagtcttcttcctcagagagcagcccaccatcccctcaacctaccaaagtttctcggcatgccagctcttccccagaaagtcctaaacctgctccagctccagggtcccaccgagagatttcttcttctcccacatctaagaatcgctcacatggccgagcaaaacgggataaatcacattctcataccccctcccgtaggatggggaggtcccgtagccctgccaccgctaagagagggcgatctcggtctcgaacccctaccaagagaggtcattctcgatcccgatctccccagtggcgtaggtccaggtctgcacagaggtggggaagatctagaagcccccagcgacgtggccgctctaggtctcctcagcgaccaggctggtctaggagcagaaatacccagagaagaggcaggtctaggtcagcaaggcgagggaggtcccactctagatccccagccactaggggtagatctcgttctagaacaccagcccgccggggcaggtcccgctctagaacacctgccaggcggagatcacgatccagaactcccaccaggcgtaggtctcggtctagaacaccagcccggaggggcaggtctcggtctagaacacctgctaggcgcagatctaggacccgatcaccagtacgacgcaggtctcgtagtagatcaccagccaggagaagtggcaggtcacgctctagaaccccagctagacgtggccgctcacgctccagaaccccagccagacgtggccgctcacgctctagaaccccagctagacgcagtggtcgctcacgctccagaacaccagccaggagagggaggtctcggtctaggacaccaagacgaggaagatcccgcagtagaagcttagttagacgtggaagatctcactctagaacacctcaaagaagaggcagatctggctcatcttcagagcggaaaaacaaatccagaacatctcaaagaagaagcaggtccaattcaagcccagaaatgaagaaatctcgcatttcttcaaggcggagcaggtctctctcttcaccacggtccaaagcaaaatctcgcttgtctttgaggcgcagcctttcagggtcttccccatgccctaaacaaaagtcacagacaccacccaggcgcagtcgctctggatcctcccaacctaaagctaaatctagaacgccacccagacgcagtcgctccagttcttctccgccacctaaacagaaatctaagacaccatcaagacaaagtcattccagttcatctcctcatcctaaagtgaaatctggaacaccaccgaggcaagggtccataacaagtccccaggccaatgagcaatctgtaacgccacagagacggagctgttttgaatcatcacctgaccctgagttgaaatctaggaccccttctagacatagctgctcagggtcctctcctcctagagtgaaatctagcacacctcccagacagagcccatctaggtcatcatctccacaacccaaagtgaaggcaataatatcaccaagacaaagaagccattctggctcctcttctccaagtcctagtagggtgacgtcgagaacaactccacggcgaagcagatcagtatctccctgctccaatgtggaatccagattgttgccaagatacagtcattctgggtcctcctcaccagataccaaagtgaaacctgaaacaccgccaagacaaagtcactcagggtctatttcaccataccccaaagtaaaggcccaaactccaccggggccaagtctttctggatcaaagtcaccatgtccccaagagaagtctaaagactcactagttcaaagttgccctggatccctctctctctgtgcaggagtaaaatctagcacaccaccaggcgagagctattttggtgtctcatctctgcaactgaaaggacaatctcaaacttcaccagaccacagatctgatacttcaagtccagaagtgagacagagtcattcagaatcaccatctctgcagagcaaatctcaaacatcacctaagggaggtcggtccaggtcttcatctccagtcactgagctggcatccagatctccaataagacaagatagaggtgagttctcagcgagtcctatgttgaaatctggaatgtctcctgagcagagcaggttccagtctgactcttcttcatatcctacagtggactcgaattctctcttggggcagagtagattggagactgctgaatcaaaagagaaaatggccttaccccctcaggaggatgctactgcatcacctcctagacagaaagacaaatttagtccctttccagtacaggataggcctgagtcttcactggtattcaaagacacacttagaaccccgccaagggaaagaagtggtgctgggtcatctccagaaacaaaagagcaaaatagtgcattgcctacgtcaagccaagatgaagagttaatggaggtggtagagaagtctgaagaacccgcaggccaaatcctgtctcatttgtcttcagaacttaaagaaatgtccacaagtaactttgaatcatctcctgaagtagaagaaaggcctgctgtgtctttgactcttgatcagagccagtcacaggcttctttggaagcagtagaagtcccttcaatggcctcatcttggggtgggccacatttttctccagaacataaagaactgtctaactccccactcagggagaacagctttggatcacctttagaatttagaaactcaggcccacttggtacagaaatgaatactggattttcttctgaggttaaagaagatttgaatggaccgtttcttaatcagctggaaacagatccatctctagacatgaaagaacaatcgacaagatcctctggacacagcagttctgagttatccccagatgcagtggaaaaggcagggatgtcttcaaatcagagcatctcttcacctgtgcttgatgctgtacccagaacaccctcgagagaaagaagtagttctgcatcttctcctgaaatgaaagatggtttacccagaactccatcaaggagaagcaggtctgggtcttctccaggacttagagatgggtctgggactccctcgaggcacagcctgtctgggtcctctcctggaatgaaagatatacctagaacgccatctagagggagaagcgaatgtgattcttccccagaaccgaaagctttgcctcagactcctaggccgaggagtcgttctccatcatccccagagctcaacaacaagtgtcttaccccccagagagaaagaagcgggtcagaatcatcagttgatcagaaaactgtggctcggactcccctggggcagagaagtcgttcgggatcctctcaagaacttgatgtgaaacccagtgcatcccctcaggaaagaagtgagtcagactcttctccagattctaaagccaagacaagaaccccacttcggcagaggagtcggtctggatcatctccagaggttgacagcaaatctcgactatcccctcggcgcagtaggtctggttcctcccctgaagtgaaagataagccaagagcagcacccagggcacagagtggttctgattcctctcctgaacctaaagctccagcccctcgggcccttcccagacgaagcagatcaggttcatcaagcaaaggcagaggcccttctcctgaaggaagcagcagtaccgagtcctctcctgaacatccgcccaaatccagaactgctcgcagaggttccaggtcatcaccagagcccaagaccaagtctcgtacaccacctcgacgtcgcagctctcgatcatctccggagctaacaaggaaggccagactgtcccgtagaagccgctctgcctcatcctcaccagaaactcgctctagaactcccccaaggcaccggagaagtccctcagtgtcttccccggagccagccgaaaaatcgaggtcttcacgccgacggcgctcagcttcatctccacgcactaagacaacctcaaggagaggccgctctccttcgccaaagcctcgtggactccagaggtcccgttcccgctcaaggagagagaaaacaagaacaacccgacgtcgagataggtctggatcttctcagtcaacctctcggcgaagacagcggagccggtcaaggtcgcgggttactcggcggcggaggggaggctctggttatcactcaaggtcacctgcccggcaggaaagttcccggacctcctctcgacgccgaagaggccgctctcggacacccccaaccagtcggaagcgttctcgctcacgcacatcaccagccccgtggaaacgctctagatctcgagcctctccagccactcaccggcgatccaggtccagaacccccctgataagccgacgtaggtccagatctcgaacttcaccagtcagccggagacggtcaaggtccaggacttcagtgactcgacgaagatcccggtcaagagcatccccagtgagcagaaggcgatccagatccagaacgccaccagtaacccgccgtcgttcaaggtctagaacgccaacaacacgccgccgctcccgttctagaactccaccagtgactcgcagaaggtccagatccaggactccaccagtaaccaggaggcgatctcgaagcagaacttcgcctatcactcgcagaagatcaagatccagaacatctccggtcacccgaaggagatctcgatctcgcacatctccagtaactcgaagaaggtcccgctctcgaacctcaccagtgacacgccgccgctctaggtcccggacacctccagctattcggcgccgctctagatctcgaacgccactgttaccacgcaaacgttctcgaagtcgctcaccacttgctatccgccgccgctccagatcccgtactccacgaacagctcggggtaaacggtccttaacaagatctcctccagccatccgcaggcgttctgcatctggaagtagttctgatcgttcacgatctgctactcctccagcaacaagaaatcattctggttcacggacacctccagtagcactcaacagttccagaatgagctgcttcagtcgtcctagcatgtccccaacacctcttgatcgctgcagatcacctggaatgcttgaaccccttggcagctctagaacacccatgtctgtcctgcagcaagccggcggctccatgatggatggtccaggtccccgaatacctgaccaccagagaacatctgtgccagaaaatcatgctcagtccaggattgcacttgccctgacagctatcagtcttggcaccgctcggcctcctccgtccatgtctgctgctggccttgctgcaagaatgtcccaggttccagccccggtgcctctcatgagtctcagaaccgcaccagcagccaaccttgccagcaggattcctgcagcctctgcggcagccatgaacctagccagcgccaggacacctgccattccaacagcagtgaacctggctgactctcgaacgccagctgcagcagcggccatgaacttggccagccccagaacagcggtggcaccttcggctgtgaacctggctgaccctcgcactcccacagccccagctgtgaacctagcaggggccagaaccccagctgccttggcagctctgagtctcacaggctctggcacaccaccaactgctgcaaactatccctccagctccagaacaccacaggctccagcctctgcaaacctggtgggtcctcggtctgcacatgccacagctcctgtgaatattgccggctccagaaccgccgcagccttggcccccgcgagcctcaccagtgctaggatggctccagcattgtctggtgcaaacctcaccagccccagggtgcccctttctgcctacgagcgtgtcagtggcagaacctcaccaccgctccttgaccgagctaggtccagaacaccaccgtctgccccaagccaatctaggatgacctctgaacgggctccctccccttcctctagaatgggccaggctccttcacagtctcttctccctccagcacaggatcagccgaggtctcctgtgccttctgctttttcagaccaatcccgttgtttgattgcccagaccacccctgtagcagggtctcagtccctttcctctggggcagtggcaacgaccacgtcctctgctggtgatcacaatggcatgctctctgtccctgcccctggggtgccccactctgatgtgggggagccacctgcctctactggggcccagcagccttctgcattagccgccctgcagccagcaaaggagcggcggagttcctcctcgtcgtcgtcgtcctctagctcctcctcttcttcatcatcgtcgtcgtcgtcctcctcctcctctggctccagttctagtgactcagagggctctagccttcctgtgcaacctgaggtggcactgaagagggtccccagccccaccccagccccaaaggaggctgttcgagagggacgtcctccggagccaaccccagccaaacggaagaggcgctctagcagttccagttccagctcctcctcttcatcttcctcctcctcctcctcctcctcttcttcctcctcctcttcctcttcttcttcttcctcctcatcttcctcctcctcgtcgtcttcctccccttcccctgctaagcctggccctcaggccttgcccaaacctgcaagccccaagaagccaccccctggcgagcggaggtcccgcagcccccggaagccaatagactccctcagggactctcggtccctcagctactcgcctgtggagcgtcgccgtccctcgccccagccctcaccacgggaccagcagagcagcagcagtgagcggggttcccggagaggccagcgtggggacagccgctcccccagccacaagcgcaggagggagacacctagccctcggcccatgagacaccgctcctccaggtctccataaattgtctttgggggattccaccacacccaatgctctggagccacaaggagtgtcccttcttccccagcagagccgtgggagggtccttgtctgctctcctttgaaccttggcagcccttggatggagggctccctttccctccccttttttttttctttgttcctgtgaaatgttaatctccgtgagttcttcctggttcatgtgttctggggggtttggggtgggagggaatgcagatgggagttgggggaggggaggatacagttcaggataccccagcctggagtcagggccagggaggcatggccccacttgtatccagaagttcccaggggtgattgtgatggtggttgggactggaggttgtataaggtgttcttggaaggaaggggcaggagttggaattagttggtccctactgtcccccatgaggttgtgaacccctccccccaacttttcatgtttcttaaaggcattttggttttttaaaatctgtacagcaagagcaactttttctgtcaaataaaaatgagaaatgcaggaa

SEQ ID NO: 180169 - DNA, 579 bp, Homo sapiens
  Payload ID: 15492
  Gene Symbol: SRRM2
  Gene Name: serine/arginine repetitive matrix 2
  ENST ID: ENST00000574340
  CDS Start-End: 235-579
tttgagttgttagtggcggggagaaaccccaaatcttaaaaactgtgaagaaagtgaacgtgttcagtttacatttgtaaggtagaccgtgcgttccctttttacactttttcaacgtctcccgagaattcgtgttcaaactaaggaggcttttggagaccttcgttgggaagaaaacgccagactcatatataagttttctggagcggtggtgccccccccgggcacggggccatgtacaacgggatcgggctgccgacgccccggggcagcggcaccaacggctacgtccagcgcaacctgtccctggtgcggggccgccggggtgagcggcctgactacaagggagaggaggaactgcggcgcctggaggctgccctggtgaagcggcctaatcctgacatcctggaccacgagcgcaagcggcgcgtcgagctgcgatgcctcgagctggaggagatgatggaagagcaggggtacgaggaacagcaaattcaggaaaaagtggcgacctttcgactcatgttgctggagaaggatgtgaaccctgggggcaaggaggagaccccagggcagagg

SEQ ID NO: 180170 - DNA, 2870 bp, Homo sapiens
  Payload ID: 15492
  Gene Symbol: SRRM2
  Gene Name: serine/arginine repetitive matrix 2
  ENST ID: ENST00000571378
  CDS Start-End: 186-2870
ggcgtcggcgtcggctgaggcgggcggaccggcgaggcgaggcggcggccccaggcccgagggactcgggagctcgagcagcggcggcggcaagacctctccccctcggaggcggcgggcggaggcggcgggtgagagggtacgaggaacagcaaattcaggaaaaagtggcgacctttcgactcatgttgctggagaaggatgtgaaccctgggggcaaggaggagaccccagggcagaggccagcggtcacggagactcaccagttggcagaattaaatgagaagaagaatgaaagactccgtgctgcctttggcatcagtgattcttacgtagatggcagctcttttgatcctcagcgtcgtgcccgagaagctaaacaaccagctcctgagcctcccaaaccttacagccttgttcgggagtctagcagttctcgctcaccaaccccaaagcagaagaagaagaaaaagaagaaagatagaggacgcaggtcagagagcagctctcctcgacgggagagaaagaaaagctcaaagaagaagaagcacaggtcagaatctgagtccaagaaacgtaagcataggtctcccactccaaagagcaaacgtaaatctaaggacaaaaagcgaaagcggtctcgaagtacaacaccagcccccaagagccgccgggcccaccgttcaacttctgctgactctgcttcctcctccgatacttcccgcagtcggtctcgaagtgctgcagctaaaactcatacaactgccttggctgggcgaagtccttcccctgcttcagggcgacgcggggagggagatgcgcctttcagtgaaccaggtactaccagcacacaacggcctagtagcccggagactgctacgaaacagcctagcagcccttatgaagacaaagataaagacaagaaggagaaatctgcaactcgacctagcccctctccggaaaggagcagcacaggcccagaaccacctgctcccactccgctccttgctgagcgacatggcggctccccacaaccccttgcaaccacccccttaagccaggagccagtgaaccccccatctgaggcctctccaactcgggaccgttcaccacctaagtctcccgagaaacttccccagtcttcttcctcagagagcagcccaccatcccctcaacctaccaaagtttctcggcatgccagctcttccccagaaagtcctaaacctgctccagctccagggtcccaccgagagatttcttcttctcccacatctaagaatcgctcacatggccgagcaaaacgggataaatcacattctcataccccctcccgtaggatggggaggtcccgtagccctgccaccgctaagagagggcgatctcggtctcgaacccctaccaagagaggtcattctcgatcccgatctccccagtggcgtaggtccaggtctgcacagaggtggggaagatctagaagcccccagcgacgtggccgctctaggtctcctcagcgaccaggctggtctaggagcagaaatacccagagaagaggcaggtctaggtcagcaaggcgagggaggtcccactctagatccccagccactaggggtagatctcgttctagaacaccagcccgccggggcaggtcccgctctagaacacctgccaggcggagatcacgatccagaactcccaccaggcgtaggtctcggtctagaacaccagcccggaggggcaggtctcggtctagaacacctgctaggcgcagatctaggacccgatcaccagtacgacgcaggtctcgtagtagatcaccagccaggagaagtggcaggtcacgctctagaaccccagctagacgtggccgctcacgctccagaaccccagccagacgtggccgctcacgctctagaaccccagctagacgcagtggtcgctcacgctccagaacaccagccaggagagggaggtctcggtctaggacaccaagacgaggaagatcccgcagtagaagcttagttagacgtggaagatctcactctagaacacctcaaagaagaggcagatctggctcatcttcagagcggaaaaacaaatccagaacatctcaaagaagaagcaggtccaattcaagcccagaaatgaagaaatctcgcatttcttcaaggcggagcaggtctctctcttcaccacggtccaaagcaaaatctcgcttgtctttgaggcgcagcctttcagggtcttccccatgccctaaacaaaagtcacagacaccacccaggcgcagtcgctctggatcctcccaacctaaagctaaatctagaacgccacccagacgcagtcgctccagttcttctccgccacctaaacagaaatctaagacaccatcaagacaaagtcattccagttcatctcctcatcctaaagtgaaatctggaacaccaccgaggcaagggtccataacaagtccccaggccaatgagcaatctgtaacgccacagagacggagctgttttgaatcatcacctgaccctgagttgaaatctaggaccccttctagacatagctgctcagggtcctctcctcctagagtgaaatctagcacacctcccagacagagcccatctaggtcatcatctccacaacccaaagtgaaggcaataatatcaccaagacaaagaagccattctggctcctcttctccaagtcctagtagggtgacgtcgagaacaactccacggcgaagcagatcagtatctccctgctccaatgtggaatccagattgttgccaagatacagtcattctgggtcctcctcaccagataccaaagtgaaacctgaaacaccgccaagacaaagtcactcaggg

SEQ ID NO: 180171 - DNA, 461 bp, Homo sapiens
  Payload ID: 15492
  Gene Symbol: SRRM2
  Gene Name: serine/arginine repetitive matrix 2
  ENST ID: ENST00000576415
  CDS Start-End: 180-461
gaggcgtcggcgtcggctgaggcgggcggaccggcgaggcgaggcggcggccccaggcccgagggactcgggagctcgagcagcggcggcggcaagacctctccccctcggaggcggcgggcggaggcggcgggtacgaggaacagcaaattcaggaaaaagtggcgacctttcgactcatgttgctggagaaggatgtgaaccctgggggcaaggaggagaccccagggcagaggccagcggtcacggagactcaccagttggcagaattaaatgagaagaagaatgaaagactccgtgctgcctttggcatcagtgattcttacgtagatggcagctcttttgatcctcagcgtcgtgcccgagaagctaaacaaccagctcctgagcctcccaaaccttacagccttgttcgggagtctagcagttctcgctcaccaaccccaaagcagaagaagaag

SEQ ID NO: 180172 - DNA, 1146 bp, Homo sapiens
  Payload ID: 15492
  Gene Symbol: SRRM2
  Gene Name: serine/arginine repetitive matrix 2
  ENST ID: ENST00000575009
  CDS Start-End: 256-1146
gtgctgacgtgcagcgcggcccaggcggggtgcgagtggcgcagttggagcccgttgcggcccctgaggaagcgaggaggcgtcggcgtcggctgaggcgggcggaccggcgaggcgaggcggcggccccaggcccgagggactcgggagctcgagcagcggcggcggcaagacctctccccctcggaggcggcgggcggaggcggcgggtacgaggaacagcaaattcaggaaaaagtggcgacctttcgactcatgttgctggagaaggatgtgaaccctgggggcaaggaggagaccccagggcagaggccagcggtcacggagactcaccagttggcagaattaaatgagaagaagaatgaaagactccgtgctgcctttggcatcagtgattcttacgtagatggcagctcttttgatcctcagcgtcgtgcccgagaagctaaacaaccagctcctgagcctcccaaaccttacagccttgttcgggagtctagcagttctcgctcaccaaccccaaagcagaagaagaagaaaaagaagaaagatagaggacgcaggtcagagagcagctctcctcgacgggagagaaagaaaagctcaaagaagaagaagcacaggtcagaatctgagtccaagaaacgtaagcataggtctcccactccaaagagcaaacgtaaatctaaggacaaaaagcgaaagcggtctcgaagtacaacaccagcccccaagagccgccgggcccaccgttcaacttctgctgactctgcttcctcctccgatacttcccgcagtcggtctcgaagtgctgcagctaaaactcatacaactgccttggctgggcgaagtccttcccctgcttcagggcgacgcggggagggagatgcgcctttcagtgaaccaggtactaccagcacacaacggcctagtagcccggagactgctacgaaacagcctagcagcccttatgaagacaaagataaagacaagaaggagaaatctgcaactcgacctagcccctctccggaaaggagcagcacaggcccagaaccacctgctcccactccgctccttgctgagcgacatggcggctccccacaaccccttgcaaccacccccttaagccaggagccagtgaacccc

SEQ ID NO: 180173 - DNA, 431 bp, Homo sapiens
  Payload ID: 15492
  Gene Symbol: SRRM2
  Gene Name: serine/arginine repetitive matrix 2
  ENST ID: ENST00000570539
  CDS Start-End: 1-126
caaggagtgtcccttcttccccagcagagccgtgggagggtccttgtctgctctcctttgaaccttggcagcccttggatggagggctccctttccctccccttttttttttctttgttcctgtgaaatgttaatctccgggaggatacagttcaggataccccagcctggagtcagggccagggaggcatggccccacttgtatccagaagttcccaggggtgattgtgatggtggttgggactggaggttgtataaggtgttcttggaaggaaggggcaggagttggaattagttggtccctactgtcccccatgaggttgtgaacccctccccccaacttttcatgtttcttaaaggcattttggttttttaaaatctgtacagcaagagcaactttttctgtcaaataaaaatgagaaatgcaggaa

SEQ ID NO: 180174 - DNA, 887 bp, Homo sapiens
  Payload ID: 15492
  Gene Symbol: SRRM2
  Gene Name: serine/arginine repetitive matrix 2
  ENST ID: ENST00000572883
  CDS Start-End: 1-553
accaccgctccttgaccgagctaggtccagaacaccaccgtctgccccaagccaatctaggatgacctctgaacgggctccctccccttcctctagaatgggccaggctccttcacagtctcttctccctccagcacaggatcagccgaggtctcctgtgccttctgctttttcagaccaatcccgttgtttgattgcccagaccacccctgtagcagggtctcagtccctttcctctggggcagtggcaacgaccacgtcctctgctggtgatcacaatggcatgctctctgtccctgcccctggggtgccccactctgatgtgggggagccacctgcctctactggggcccagcagccttctgcattagccgccctgcagccagcaaaggagcggcggagttcctcctcgtcgtcgtcgtcctctagctcctcctcttcttcatcatcgtcgtcgtcgtcctcctcctcctctggctccagttctagtgactcagagggctctagccttcctgtgcaacctgaggtggcactgaagagaggacagaactagaggaaatggacttaattttacagcaggagggatggcagttagacctcaagaggaactccctgggctggaaggatcttcagagggtccccagccccaccccagccccaaaggaggctgttcgagagggacgtcctccggagccaaccccagccaaacggaagaggcgctctagcagttccagttccagctcctcctcttcatcttcctcctcctcctcctcctcctcttcttcctcctcctcttcctcttcttcttcttcctcctcatcttcctcctcctcgtcgtcttcctccccttcccctgctaagcctggccctcaggccttgcccaaacc

SEQ ID NO: 180175 - DNA, 3314 bp, Homo sapiens
  Payload ID: 15492
  Gene Symbol: SRRM2
  Gene Name: serine/arginine repetitive matrix 2
  ENST ID: ENST00000576924
  CDS Start-End: 261-3314
acgcagttagtcgtgctgacgtgcagcgcggcccaggcggggtgcgagtggcgcagttggagcccgttgcggcccctgaggaagcgaggaggcgtcggcgtcggctgaggcgggcggaccggcgaggcgaggcggcggccccaggcccgagggactcgggagctcgagcagcggcggcggcaagacctctccccctcggaggcggcgggcggaggcggcgggtgagagggagcggtggtgccccccccgggcacggggccatgtacaacgggatcgggctgccgacgccccggggcagcggcaccaacggctacgtccagcgcaacctgtccctggtgcggggccgccggggtgagcggcctgactacaagggagaggaggaactgcggcgcctggaggctgccctggtgaagcggcctaatcctgacatcctggaccacgagcgcaagcggcgcgtcgagctgcgatgcctcgagctggaggagatgatggaagagcaggggtacgaggaacagcaaattcaggaaaaagtggcgacctttcgactcatgttgctggagaaggatgtgaaccctgggggcaaggaggagaccccagggcagaggccagcggtcacggagactcaccagttggcagaattaaatgagaagaagaatgaaagactccgtgctgcctttggcatcagtgattcttacgtagatggcagctcttttgatcctcagcgtcgtgcccgagaagctaaacaaccagctcctgagcctcccaaaccttacagccttgttcgggagtctagcagttctcgctcaccaaccccaaagcagaagaagaagaaaaagaagaaagatagaggacgcaggtcagagagcagctctcctcgacgggagagaaagaaaagctcaaagaagaagaagcacaggtcagaatctgagtccaagaaacgtaagcataggtctcccactccaaagagcaaacgtaaatctaaggacaaaaagcgaaagcggtctcgaagtacaacaccagcccccaagagccgccgggcccaccgttcaacttctgctgactctgcttcctcctccgatacttcccgcagtcggtctcgaagtgctgcagctaaaactcatacaactgccttggctgggcgaagtccttcccctgcttcagggcgacgcggggagggagatgcgcctttcagtgaaccaggtactaccagcacacaacggcctagtagcccggagactgctacgaaacagcctagcagcccttatgaagacaaagataaagacaagaaggagaaatctgcaactcgacctagcccctctccggaaaggagcagcacaggcccagaaccacctgctcccactccgctccttgctgagcgacatggcggctccccacaaccccttgcaaccacccccttaagccaggagccagtgaaccccccatctgaggcctctccaactcgggaccgttcaccacctaagtctcccgagaaacttccccagtcttcttcctcagagagcagcccaccatcccctcaacctaccaaagtttctcggcatgccagctcttccccagaaagtcctaaacctgctccagctccagggtcccaccgagagatttcttcttctcccacatctaagaatcgctcacatggccgagcaaaacgggataaatcacattctcataccccctcccgtaggatggggaggtcccgtagccctgccaccgctaagagagggcgatctcggtctcgaacccctaccaagagaggtcattctcgatcccgatctccccagtggcgtaggtccaggtctgcacagaggtggggaagatctagaagcccccagcgacgtggccgctctaggtctcctcagcgaccaggctggtctaggagcagaaatacccagagaagaggcaggtctaggtcagcaaggcgagggaggtcccactctagatccccagccactaggggtagatctcgttctagaacaccagcccgccggggcaggtcccgctctagaacacctgccaggcggagatcacgatccagaactcccaccaggcgtaggtctcggtctagaacaccagcccggaggggcaggtctcggtctagaacacctgctaggcgcagatctaggacccgatcaccagtacgacgcaggtctcgtagtagatcaccagccaggagaagtggcaggtcacgctctagaaccccagctagacgtggccgctcacgctccagaaccccagccagacgtggccgctcacgctctagaaccccagctagacgcagtggtcgctcacgctccagaacaccagccaggagagggaggtctcggtctaggacaccaagacgaggaagatcccgcagtagaagcttagttagacgtggaagatctcactctagaacacctcaaagaagaggcagatctggctcatcttcagagcggaaaaacaaatccagaacatctcaaagaagaagcaggtccaattcaagcccagaaatgaagaaatctcgcatttcttcaaggcggagcaggtctctctcttcaccacggtccaaagcaaaatctcgcttgtctttgaggcgcagcctttcagggtcttccccatgccctaaacaaaagtcacagacaccacccaggcgcagtcgctctggatcctcccaacctaaagctaaatctagaacgccacccagacgcagtcgctccagttcttctccgccacctaaacagaaatctaagacaccatcaagacaaagtcattccagttcatctcctcatcctaaagtgaaatctggaacaccaccgaggcaagggtccataacaagtccccaggccaatgagcaatctgtaacgccacagagacggagctgttttgaatcatcacctgaccctgagttgaaatctaggaccccttctagacatagctgctcagggtcctctcctcctagagtgaaatctagcacacctcccagacagagcccatctaggtcatcatctccacaacccaaagtgaaggcaataatatcaccaagacaaagaagccattctggctcctcttctccaagtcctagtagggtgacgtcgagaacaactccacggcgaagcagatcagtatctccctgctccaatgtggaatccagattgttgccaagatacagtcattctgggtcctcctcaccagataccaaagtgaaacctgaaacaccgccaagacaaagtcactcagggtctatttcaccataccccaaagtaaaggcccaaactccaccggggccaagtctttctggatcaaagtcaccatgtccccaa

SEQ ID NO: 180176 - DNA, 459 bp, Homo sapiens
  Payload ID: 15492
  Gene Symbol: SRRM2
  Gene Name: serine/arginine repetitive matrix 2
  ENST ID: ENST00000573692
  CDS Start-End: 1-235
ccgcagcccccggaagccaatagactccctcagggactctcggtccctcagctactcgcctgtggagcgtcgccgtccctcgccccagccctcaccacgggaccagcagagcagcagcagtgagcggggttcccggagaggccagcgtggggacagccgctcccccagccacaagcgcaggagggagacacctagccctcggcccatgagacaccgctcctccaggtctccataaattgtctttgggggattccaccacacccaatgctctggagccacaaggagtgtcccttcttccccagcagagccgtgggagggtccttgtctgctctcctttgaaccttggcagcccttggatggagggctccctttccctccccttttttttttctttgttcctgtgaaatgttaatctcccaagagcaactttttctgtcaaataaaaatgagaaatgcagg

SEQ ID NO: 180177 - DNA, 1132 bp, Homo sapiens
  Payload ID: 15492
  Gene Symbol: SRRM2
  Gene Name: serine/arginine repetitive matrix 2
  ENST ID: ENST00000570971
  CDS Start-End: 43-798
gaggaacagcaaattcaggaaaaagtggcgacctttcgactcatgttgctggagaaggatgtgaaccctgggggcaaggaggagaccccagggcagaggccagcggtcacggagactcaccagttggcagaattaaatgagaagaagaatgaaagactccgtgctgcctttggcatcagtgattcttacgtagatggcagctcttttgatcctcagcgtcgtgcccgagaagctaaacaaccagctcctgagcctcccaaaccttacagccttgttcgggagtctagcagttctcgctcaccaaccccaaagcagaagaagaagaaaaagaagaaagatagaggacgcaggtcagagagcagctctcctcgacgggagagaaagaaaagctcaaagaagaagaagcacaggtcagaatctgagtccaagaaacgtaagcataggtctcccactccaaagagcaaacgtaaatctaaggacaaaaagcgaaagcggtctcgaagtacaacaccagcccccaagagccgccgggcccaccgttcaacttctgctgactctgcttcctcctccgatacttcccgcagtcggtctcgaagtgctgcagctaaaactcatacaactgccttggctgggcgaagtccttcccctgcttcagggcgacgcggggagggagatgcgcctttcagtgaaccaggtactaccagcacacaacggcctagtagcccggagactgctacgaaacagcctagcagcccttatgaagacaaagataaagacaagaaggaggtatgttcctgagttggtgatgttcattggattgcaaatgtatagatttaggatagacatgtgatgtgaaagggagaggtaataacttattaaaataaataaattcagttttttttcctgcatttctctcctagttctcttactgcatctgcagaacttttagtgttgttactagactgaattgtgaaccctttagaatcaaatctcactggatgttaggttttatattgtgtcttgtttatacatagatagaactggaacaaacgttgtatcttatctgtgtactccgtatgatgcctctagtttcttctcttttttcattaaatgctggtcatgtctcaccaaa

SEQ ID NO: 180178 - DNA, 1207 bp, Homo sapiens
  Payload ID: 15492
  Gene Symbol: SRRM2
  Gene Name: serine/arginine repetitive matrix 2
  Uniprot ID: Q9UQ35
  ENST ID: ENST00000630499
  CDS Start-End: 219-1154
ggcgcagttggagcccgttgcggcccctgaggaagcgaggaggcgtcggcgtcggctgaggcgggcggaccggcgaggcgaggcggcggccccaggcccgagggactcgggagctcgagcagcggcggcggcaagacctctccccctcggaggcggcgggcggaggcggcgggtacgaggaacagcaaattcaggaaaaagtggcgacctttcgactcatgttgctggagaaggatgtgaaccctgggggcaaggaggagaccccagggcagaggccagcggtcacggagactcaccagttggcagaattaaatgagaagaagaatgaaagactccgtgctgcctttggcatcagtgattcttacgtagatggcagctcttttgatcctcagcgtcgtgcccgagaagctaaacaaccagctcctgagcctcccaaaccttacagccttgttcgggagtctagcagttctcgctcaccaaccccaaagcagaagaagaagaaaaagaagaaagatagaggacgcaggtcagagagcagctctcctcgacgggagagaaagaaaagctcaaagaagaagaagcacaggtcagaatctgagtccaagaaacgtaagcataggtctcccactccaaagagcaaacgtaaatctaaggacaaaaagcgaaagcggtctcgaagtacaacaccagcccccaagagccgccgggcccaccgttcaacttctgctgactctgcttcctcctccgatacttcccgcagtcggtctcgaagtgctgcagctaaaactcatacaactgccttggctgggcgaagtccttcccctgcttcagggcgacgcggggagggagatgcgcctttcagtgaaccaggtactaccagcacacaacggcctagtagcccggagactgctacgaaacagcctagcagcccttatgaagacaaagataaagacaagaaggagaaatctgcaactcgacctagcccctctccggaaaggagcagcacaggcccagaaccacctgctcccactccgctccttgctgagcgacatggcggctccccacaaccccttgcaaccacccccttaagccaggagccagtgaacccctccccccaacttttcatgtttcttaaaggcattttggttttttaaaatctgtacagcaagagcaactttttctgtcaaataaaaatgagaaatgcagg

SEQ ID NO: 180179 - DNA, 3612 bp, Homo sapiens
  Payload ID: 15493
  Gene Symbol: SRRM3
  Gene Name: serine/arginine repetitive matrix 3
  ENST ID: ENST00000611745
  CDS Start-End: 208-2169
agcatttcagcaagcggcggcagcacccgcggggaggcagagggtgcggggccgtgggggccgcggagctgccctgcccaactcagcccagactaggcggcagcccggaccggcgggacccgagggcctggccccagcgcccggtagatcgcggcggtcagcggtgagggccagcggcccaggccagcggctccagggccagccacgatgtcctccaccgtgaacaacggggcggccagcatgcagtccacacccgacgccgcgaacggcttcccgcagcccagctcctcctcggggacctggccgcgggcggaagaggagctgcgcgccgcggagccgggcctggtgaagcgcgcgcaccgcgagatcctggaccacgagcgcaagcggcgggtggagctcaagtgcatggagctgcaggagatgatggaggagcaggggtattcggaggaggagattcggcagaaagtggggacattccggcagatgctgatggagaaggagggagtgctcaccagggaggaccggcctgggggccacattgtggcggagaccccgcggctgaccgagggcgctgagccgggcctggagtacgcgccctttgacgatgacgacggcccagtggactgtgactgcccggcctcctgctaccgcggccaccgcgggtacaggaccaagcattggtctagcagctcggcatcgccccctcccaagaaaaagaagaaaaagaaaggcggccaccggagaagccgcaaaaagaggagactggagtccgaatgcagctgtgggagctcctcacccctccgcaagaagaagaagagtgtgaagaagcatcgccgagacaggtctgattctgggtcccggaggaagagacggcacagatctcgaagctccaagtgcaaaagaaaagagaagaacaaagagaagaagaggcctcacacagagtccccaggccggaggtctcatcgccatagcagtggcagctcccacagcccctccctctcctcccactacagtgattccagatctcccagcaggctgagccccaagcaccgagacgaagggcgaaagacgggcagccagcggtccagcggaagccggtcgccttccccgtcgggcggcagcggatgggggtcgccccagcggaacggcggcagcgggcagcggagcggagcgcacgggggccgccccggctcggcgcacagcccgcccgataagcccagctcgccctcgcccagggtccgtgacaaggcggcggccgccgcacccacgccgcccgcgcgggggaaggagagcccgagcccgcgctcggcgccgtcgtcccaaggtcgcggaggccgcgcggcgggcggggcgggcaggcggcggcggcggcggcgtaggcggcggcgctcgcggtcctcggcgtccgcgccccgccgcaggggtcgccggcgcccccggcccgcgcccccccggggctcgtcgcgctcgctcagcagggcccgctccagcagcgactccggcagcggccgcggcgcccccggccccgggcccgagcccggctctgagcgaggccacggcggacacgggaaacgggccaaggagcggcccccgcgcgcgcggcccgccagcacctctccgtccccgggcgcgcacggccggcgcggcggcccagaagggaagagctcgtcgcgcagccccggcccgcacccccgctcctggagctccagccgctcgccctccaaatctcgctcgcgctctgcggagaagcggccccacagccccagccgctcgccgtcgcccaagaagcccctcagccgggacaaggacggcgagggccgcgcaaggcactctgaggccgaggccacccgcgcccggcgccgctcccgcagctactcgcccatccgcaagcggcgccgggactcgccaagcttcatggagccgcggcgcatcaccagcgcccgcaagcgtcctattccatactaccggcccagcccctcttcctcctccagctgcttgagcagcgactactcgacccggagccacagccgcagccccagccccggccacagccacgggagctacagcagtcgcagccatgggacccgcagccggacacgcagcccctcgaggacccccagtcccagctaccacagccggagcagctctgagagcgggggcttctgagcccagacagactcagcttggtgcccccctggcactgggagaggcgaggggcgggccccaggaccccagtggggagggggctatatctccttgcccccaaggctacaaagaggtctcagggccagtgcacgggcagatgggaccggggaagactttgagggtgggcatccagtggacaaggagaagccagatgtgctgcttctacgggtgtcctctcccacctcctgtccacccactgtgcccggggaacaaagagccgttacgaacacaggaatctccccatcccccttcctgctgatgccaactcaccaggcttgggactgctgccggtggatggtaccagagtccatgatctgctctgtcacttcaccttagctcagtgcagccagggacaccttgcaaggtgccagccctgggagcccctcttccgcactacacagctccctccactcctctcttatcactgggcagacgaggaggtggtacagcacatgggtttggagctagacagaaggaagaacagcctaacccttggtgcacccccatccaagctggggagctgcatccttttgagctggctgcaggaggaccctggctgagggctggtggctggccccacagcctcccccaagctcctccactgacccaggagtgcccagacgggtggcccccaaaatcccagcctggggagctaggcacctcactcttggtctgacctctccaggccaggctctcctcaccccatgccctgggccaaggtcctaccagccatgactactgcatgacaagaggtggggggtacagacctcaggtacatttgaccctgaggttaaaaggggttcaggtcaagaggtgggagaggaaaggggtagatgggaggtggaatctgtaggaaagagaaaaagcaaagtcgttcactgactgagtagcccccagggagtggagacgggtccctggggagggagcagctgacaggtcagcagtgcccccagccccacccaagaggagggcagcgtgtgcctgtggtctgggacgtgggctggatggcagcccagggtcacaggcataggataacatgtgctttggacctgacaagggagtaccttgggggtctgatggggtcatggccagccgagcctctgtagagatggaggctacagccctcagaagggaggggaggaaagagactgagggccctggcctggggcgtcgatggggaagcggtggcccccagtcctcttctgctgctcccagccccctcctcctggggccctcagggatctcatgaagtcttccttggcccaaccaggcagatgccccgggctccagtggggggaggggtctggggtctggtccgggttccccgctttctctatgtcccccctccctctttctccgcagtgcggataaaaattggactcgaataaaacccttggtgcccgg

SEQ ID NO: 180180 - DNA, 2797 bp, Homo sapiens
  Payload ID: 15493
  Gene Symbol: SRRM3
  Gene Name: serine/arginine repetitive matrix 3
  ENST ID: ENST00000464752
  CDS Start-End: 1-330
agtggcagctcccacagcccctccctctcctcccactacagtgattccagatctcccagcaggctgagccccaagcaccgagacgaagggcgaaagacgggcagccagcggtccagcggaagccggtcgccttccccgtcgggcggcagcggatgggggtcgccccagcggaacggcggcagcgggcagcggagcggagcgcacgggggccgccccggctcggcgcacagcccgcccgatgtacgtacgcttcgctttgcggagggttcccgcgccgcgggctgcgccgtgcgtggtcgggcgggtcgccagcggggcagggggcgataagtgtggcatgggggcgggggcgggggcggccgcttcctccctcctcggctccccgctgggcgtcctggctcgggagccgccgggagtgctaggccgttgcgcccacctggccctggtgtcagggtgaggggcgcctgcggtcttgggccacccttgcgcttggcaaactgaaggccagaggggggttgaccgcggggcactgagttgggtacagggctggggaggaatcagggtctcgtgccctccccaggcatattagggtgggaggggcatggacattgataggagtcccaggcaggagcaggattcgagagacaggaccccccactgggcaccacctgggccctgagtctccctcttcccaccaagccctggccccacctctgagcacccccctccccctccctcaatcttctccccagcccctccctccctcagccccctcccccatctcagtccctctgccctctaaagtccctgctctgaggagactctgcccttttccaggcaccgcccacacttggactggtgtctcaaacctgccggctcctcttcccacggccaccctcctgaggcacctgccagcgtgcctcagagaccccacaccaacacccccaaaactgtccccacccttcctccaagaggggcacagatgcccgaagacctacaggcaggtgcaatgggggagctggcagaggagagagacgtctcagcctgtccccagatggatgggctgggcctgggttggggcttctcccagaccccagggaaggtccacatccccttctggtctgttgattatagagtacacagttgagacccctcagagagagggggctgcagtgctggcaggggcactggggtgggtgggggggtggcttggggtggggagacctgcaggttccttcccagacccgcagactgccccccacccaaccccaaagcctcagctgggagtgggagagctgcccctccccagacctcaggtctcagcagcaaacatgtacgtgttggtcagtttcattttgatttttggctgtttcctttcactccctttcttttctcaaacaccctttactcccacggcctcagagaggaaagtcaagggcagctgactgaaggctcttggtctcaaggttaagttttattgaaggacatttacctgtctctagactgtcccacctggaccaggcaccaggctcctgggctctgggggttttggttgggccgcgcagggaggatgacactgatgtccccggatctgtcttgggagggggttgagggcaggcagaggtagctgagggtagcatggcagaggctggagaggattaacaacccacaagaggggcacccaccatcccccacccctgtgggcatggagtcccaagagcacaggacccgaaacaccttcttgccagcttctcatccacccttctggggcctcccaagagacacagagatgcgggttctctgaagtcagggctggaagtgggtcccttcgtacctctggtcctctctccagccctggagtcctgagcaatgatcccacctccaccccctccccaatgcagacaaaatggccacagcatctaggcatccccaggatagggcagtcggggaaggggacccagccaccagccttggggcgggagcttctgaagcacccacatcttgtctccctcccagcatgggactctagtttggcacagccctgggagttttcttggagacggcattttgtgactcctttcaccaagcatggtccccaaatcctatccctcacccttggggccctgggagatctgggacttcagagcatcccgggtctcaaacctgcattcagatccctgcctctctgccttaaaaagacccctgaggagtcaaaagaggctagttcttgctcatatgcagaaaagtgagatgggggatgggagaggggtcccagactttaccatgaacgaaaccgtcttcgggaaaaaatactgggggtggtattcttggacgatacctttaaaaaaaaaaagaaaagaaaaaaagagagagagaaacaaatggaaaaaaaggaaagctcaacattttttaaccccgtctatgtttttgtttgttttttagcctcccatttgaaacgtggtaatactgtgattccatttcttgtttagctggtgagggaagagggtgggcaagtttatgtaactttttctgttgttttgtttttatttccttttcctttctttttttttttccctattttaatgtacagaaatgcaaactatctctctgggttttttttttctatcttctatgttctagaattttctttttgtgtgtgttactgtgggaacctttcctcttaatgcagagatggcttttgaattttaagtgaacattaatcatatacacatctctatatacttttttttcctttgtaatctgaatttaaaagggaagataactctaaaaaaaaaaa

SEQ ID NO: 180181 - DNA, 8477 bp, Homo sapiens
  Payload ID: 15494
  Gene Symbol: SRRM4
  Gene Name: serine/arginine repetitive matrix 4
  Uniprot ID: A7MD48
  ENST ID: ENST00000267260
  CDS Start-End: 389-2224
gtcacattgtgcgagagacaaaacccgggcgcgccggagctcacacgcgcacgcacacacatccgaccccgtcgcctcttctctcctggtgctgcccagaaagccagccctcccttcccttcttggggcgcagaggctcagccagctcagagcgcagcctggagccgacccagaagggcgaagaaagcccagcggacgagcctcctttctctgctgcctgcccgggctggggcgtcccatcccccgccctgaactccgatctctcccaccccacccctctctgggtttcacccggacagagccgggagctgggtgtcgcccccgtttggaatccacgtttcagcactttggacagcgccccggacgccccggcccctttgggttggcgatggcgagcgttcagcaaggcgagaagcagctttttgagaagttctggcgaggaaccttcaaagcggtggccaccccccgtcccgagagcatcattgtcgccagtatcacggcccgcaagccgctgccaaggacagagccccagaataaccccgttgtcccagctcaggatggaccctcagaaaagctgggtcagcatctggccaccgagcccttgggcaccaacagttgggagagagacaagacctgtcgggaactgggtgccaccagaggacacagtgcctctcatgacaaagacttgacaccaccaccttcctccaggggaaagaagaaaaagaagaaatccactcggaagaagagaaggaggtcctcatcctatagcccatcgcctgtcaagaaaaagaagaagaaaagttccaagaaacacaagcgacgcaggtcattctccaagaagagaaggcacagctcctctagcccaaaaagcaaaagaagagatgagaagaggcacaagaaacaatctcgaagccggccccgaaagtctcaccgccaccgccatcaccgctgcccctcgcggtcccagagctcggagtcccgcccctcaagctgtgagagcaggcaccgcggccggtcccctgaggaagggcagaagtcccgccgaaggcactcccgccgctgctccaagaccctctgcaaggacagccctgaggcccagtccagtcgcccgcccagtcaacccctccagatgcttggctacctgtcagccaggggtgtaatcactgggtcggggtctgctgctgacctctttaccaaaacagccagcccgctcaccacctcgcgaggacgttcccaggagtacgactcaggaaatgacacgtcctcgccaccctccacgcaaaccagctcagccaggtctcggggccaggagaaggggagccccagtgggggcttgagcaagagccgggagctcaacagtggcaacacctctgattcagggaactccttcaccacctcctcaccccagaacaagggggccatgttggagaatctctcccccaccagcaggggcagagagtcaaggggatttcagtcaccgtgtctggaatgtgccgaagtgaagaagtccagtttggtcccatccacagcccggagctcacccatgaaagggtgttcccgcagctcctcctatgccagcacccgatcctccagtcactcgtcccgatccccaaatcccagggcttcccccaggtacacccaaagccgatccacctcttctgaaaaaaggtcctactcccgctctcccagctattcctccaagtctggcaagaggagcccgcccagcagaagctctaggtcccgccgcagccctagctactcccgctacagccccagcagggagcgggatcccaaatacagtgagaaggactcgcagcagcgggagcgcgagcgagcgcgtcggagacgtcggtcctactcgcctatgagaaagcgccggagagactccccgagccacctggaggcccggaggataaccagtgcccggaaacgccccatcccctactatcggcccagcccctcctcatccggcagcctcagcagcacctcctcctggtacagcagcagcagtagccgctcggccagccgcagctactcccggagccggagtcggagccggagccggagacggagccggacccgcacgagcagcagctctagctcccgcagccctagtccgggctcccgcagccggagccggagcaggagccggagccggagccggagcaggagccagagccggagctacagctcagcagacagctactccagcacgaggcgctaagtgcccctgagccagctgcccgtgggggccccttcgcgctgccagcctcccccaaccacctgccctccccgccttcttggtgacaaatagtgagggctcctataccttgtccttcctgcttgcctaggggaagaggagaagagggtaagggggcttcactctctagatcagcctgctaggagcctctaccagcatcatcctggggcccagctcaggcctgggcatatggaaagaaccatcatcttgtggcacaaaaaaagaagaaagaaaagaaaacttcaaggttttgtgagaagcaatgggtctgtgactcaaaaattgagccctggccaggaaaatgtggagacagttcttctcctccactgctcacaggaggcccgtggtaattctccccacctccccggatgccccactagtccaacttcatggctgcacgtggatggacccccatgtctgagaggggtgaaagaggagaccaatggcagttcaggttcaagataacggggtcaggcctttaacttcctcaaacaggcccaagcaaaggctggaagacatttgggtcctagaagaagggatatccttgaataccagatggggacgtttgacttggtgggaggtgtcaggagataggagttggttaagatgatagatagaaaaacggaagggttcagctgctgctcccaatacctcagcatggtaaggggacagagcccagcagatcccagctgtgaagaggccactgcatggctgacacaaaacacctcttggccattcacaggggccctgcaacctcacgagaaaggagatagtggaagagtcaggacaggttggtctccagccccacttcccaaatatgcctcagccccactagctggcaccaacttaattccacgggaccatctgctgaacattccccagtgccatggccagttgccaggccccagcgccagccagtctggccttaccctccggttggcgcctgccagccccctcccctctgcccaggctgccacgccctggatgccacccagtgcagcctggcacctacccacccacccttcagcttaagccactccccttgcctctcaggaattttgccaggatggggcacagcagctcaggtttgggggaaaagacccgaatccagagtgcaggggagaggggcttggatatgccatgtcttgggctcctgctggcttctgaggtttcttgtcagcttgggaaagacccacctttatttttgccctcaccccaagtcccccctggctggggctgggcagagagggtaagctgatctccgatccacaaataccaccagctgcttcatccacagaaggcgctaagaacggggaggtgaggaataagatccttaaaataaactcttgggcatccccctcaccagctgactggctttccggaggcttgtgggtgagtttcaagtttgtggtggcaacagcagcaggacagggcacggagggagcgagggagagaggaccggtcccagcttttggatattttgggttatggggaagcaagggccaaacattctttatccctcccaccccagggaaaacatttggaaaatagtcctttttcttggaagcagtgacgtctccctacccaatctttcccatcctatcaacccatggggctagagactgccatgcaaccaccaccacgacagcccttcctccatcagaagacaggagtgagggccccgggcagcagtggacgacccagcctccccataccgggcctctggcccagacctaagccctgcccacaaagactaatggatgccagtgctgtcactgcagaaggccagatggcaggtgcctgggacaggggcaggtgccccggggagggcaagtacagccactgtaaataaccctcgtccctgcccaggaacccagactggacttcagtctccctccatggagacaaaggcttcccagagccaccaaaaaccttcttagcaggacagctgtgagaggcatcagaacctcacgttcggactgccttcatcaagacaactctaggggaccattttgcctggggctcctagcaaacctttttatttattttatttatttatctatttatttatttgatgactgtctctctttctcgccattagcagtattgaattatttatttatacagaggttttgtgtgtgtgtgtgtgtgtgtgtgtgtgtgtgtgtgtgtgtgtgtgtgtgttggggggatctcctaaattatttctgtgcatctcctttttttttctgctgttttttatggatgggatttgagaggccaaaggtgagtgggctattggccttctccctgaaggctctaagcctggaacaccctggggttggcccagaaggaggcacatcagtcccaaaattcatcacttaacccagcgtccaggagggtcaggcctgtaccccagcctcctgtcccccaggaacctcacaggggtatcaaaaagatgtaaacagcccagaggcttatgagctacagtgatgaattgacacagtggagttgcaacttaggtgggggttggagtcgaaagttggcaaatggggccaaggctgcacaaagtcgaaatcccttgtgaatgtcccttagggaggcaccagattggagacagatgtgctatctcctaacagagtgatgaggcttcagttgagtacttgctgaagtagttgccttgtattttgagggccatggtggatgaaaatgatgtctggtttagtactggaattgcacttggggttgacaaggtgctcacaccatgagaatggaggcaggaattgagctgactgagggaagatgcaccttgatctcaccctcactccaaggcacatagcaggatcactccctagcttctctgagcacacctagttggtttcatgtatgttacacatgcttccactccacagtacctaatttctctctgtcccctgagatctgaaggctaccttgggaagaggcatcagccatcttgcttgagaaccaccaagccaaaagcaaaagcttttatctatgatctcttgctgtttcatcaggggaaagcacaaagctatttctgaaattaggaaaaaaaaaaaaaaggtggaaggagcagccagatgttccacaggaccccaccaagaaggtcatttccaaacccatcctggaagggcccaggatccaaaggtcatcagtcctgcttatctgaccaactggcagtgtcttctggctgctggccggagacagctcttgccctttccaaagtcactgtccactgccttgcaattgccagcttgtctggtccagctttgggtttggtgagacttttgcaacatccctggttgtttccctggcaatgtgactatccagccctaacccaaagcaagggagtgcccctttcctgggtgaagtttacaagaaggctgcttaaatgcctgcttcggggaaatctctgcctctctctctctctgtctctctctctgtctctctctctgtctctctctctctctctctctctctctctctctcagtgtatttctctactttcttttacatttcctttttttctatccaaaaacaatgtgcttgttgaggcactggtaaccctgattaaccagaacctcccattcccagtatcgctgttcctacgcccatttcaccctcattaccttctgcttccaaggaatatgacagatcaccaggatgctgctcgtcgtgaggatttatctcaaaaaccaacatccaaaatgggagggagatgtggcttgaggtcaagcgccatgcatcccaagcctttgaccttcccgctatggaagtgcactggatgacagaaactgaatacattgctccctttccctagggcaaagttcgacctctgttaagtggagggatttgtgagataaaaattcaaaatgttggcctgaggcctgagagtgtcaccaaagacagagggagcttcactgagactcagagggaaaaggaaaagagcctcaaacatttttaggaggttgtccatcatgaaagtaaaaacgaaaagcaagatttgatctcccttcagttaattaggcaaggctaagtaactcaaagccccctattagtaacattctggttcactgaggtttgatcatattcctatctgcattccttcccttctttgaaggacagctgatctttcagaagcagaataaaattaagatgttagaacaaaggtctcagtctcagagaaccgcatcacttcatttgctcagacccatcctcttttgcaaaagggtctgcttggagaggccaaaattcagggtgctctcaaaggcaaagaaagcacattgttttccttctccagtccaactttcatcttttcttctgctgttttcttttcccctcttctttttcacaaatgttcaaaatggtctcatgcgcatgtgtcttgccccactttcccctttagctgaacagaaaattttgtctcagtaaaacgaagtcaaaaaacaggattcctccaaacatgcctcctcccgcactggccagccgagtccagctgagaaacttatgctagattcaatgtcattgagcaatgctttattgaagtctcgttcttctcacttctgcaccagtgagccaatgatactgacagaaatgtcatctctcttctatctgtggttgctgtttttggagtaaaagtttctgtgtgtgtttttttagttcttttgatggctgttgttttgcattgtaaataccatgatgggggacccccatcagaacatggcttatttaataatttatttcgtatttattgagtaatattgggaaaagagaaggaccacctctttccctgaattgctattgagaattggtccatctcccagctccaggtgctgctgtctgcagcaagggcattactgcccaggtaaggagtgctagaatcaccaagcaaattgaaattggcagaaatggaggcttcagtcacacaaattagactcaaatggaactaaaacactggttatctccaggaaaacctcatttagatggaaattaatggaagaataaaatgcctacacatgaaccaacttctattaaaaagtcacaactccttgaaaaaaaaaataaagaaaaattgtaaactcttttttttttctggccaaggaaagctatgcctcatcttctaacgagccaagccaaaaagactgcaatggtattcctatgtgtttctttggcctgtgtatcagtctgaatgaaatggaatgggtctctagcctcagtcttgtcatctgtaaaatggggcttgtcctatatattatctgcaagacgtgggaaatgggggctcaagccctgatgctatggactccatactgttggatatattgtctcttgtgtcttctgctgactgcagattaaagggtgtcaaccaaggaaggaaacaaaaaagtagggcctggacttcatttgcagaatgaggtcatagtcgttgagtcccacagtcatatatgggagacctcaagttgctgtcaccttgataactcttgtatcctgggttaaagccctctgtatttagtttgaacttctctctaagccccgtggtccaaagtcatcacgggagagaccaagatgggcttaccttgccctgctctggatttaaccattgttcattgtcaggctatatttttgtacaatcattcaaataacccagtgacataggtcatattgccacttttcagaggagaaaactgaggctcaggagggggagttgacatgcccaagctcccttgagctcagatcagcttgactcaatgtccaacattcccttggtagctttttctccggggtcctgtgctataagaacttctctctgcactgtatttttttttctcccaattcttagctatttcctcaagcaatgattggccaaggacctagcataatccaccacattggccaaggggacgtggtgcaccccaaggccatttctctgcattggaggctgcgaatctcctctggaaaattcccaacccgaggacccaccatgagcccagctcagcctgaccagacagcctctgcctggagcattcacatcagatggaaagaagctgctgtgtcctccagcatcctgggaccctgtcctctgcccagtgacacagcagccatggctagcttgatttctggtctccaaagctaagcataaccttcccggggtttctggtttttcagcctgtacgaaacatgtctctgttctaattaaagttcccatggtatggtgttctca

SEQ ID NO: 180182 - DNA, 2381 bp, Homo sapiens
  Payload ID: 15495
  Gene Symbol: SRRM5
  Gene Name: serine/arginine repetitive matrix 5
  Uniprot ID: B3KS81
  ENST ID: ENST00000417606
  CDS Start-End: 16-2163
ccttttgcgcccaccatgtcttcacctaagagatcttcaaagcccagtatgtctctggcacccagtggatcctccatgcccactgcggatcccaagcctcctgcctccttgaagtccaccaaatcagcaacacccaacagatccttagtgcccaccaaaccagcgacatcccgtaactcagtcatgagcccaagcagttccaagtccaccaaatcgaccagtacaaaaagagccccttctaaccggcccagcagcaggtcccgagtccgcagcaaagcaagaacacccagcagggtgagcaccgacaccaggaccagcaaagccagcaaggccagcgacgtgagatgccaccagcggaggggcacacacagccggggtaggacacctggcagaaggggaagccgcagctccaagaggtcacccagcagggccagcactcctggcaggataagaactcatggtgccagaccaggcatggccagcagggtgagaactcccacttcacagcaaaaagggagccggggaaagagttacggccggcctagaaccagcaacagggaaaggagtgacagccagcctagaaatctgagcaagaagagttaccgcccaccaggaggctcaggtatagggaggagttccgagctggctgtaactcccagtacagccaagtgtcaaaccccgactggaattccctccaaggagaagagtgacaacccatctccatcctcatcaaggaaggtgaagagctacggtcagatgatcatccccagtagggaaaagagttacagccccactgaaatgtccagcagggtcaagagttataaccaggccagcacccgcagcaggccgcaaagtcacagccaatctagaagccccagaaggtcaagaagtggcagtcagaagaggacgcacagcagagtgagaagtcacagttggaagagaaaccatagcagggcaagaagtcgcacccggaagggaattctgagccagatgggaagacacagccagtctagaagccacagcaaggggaaaagtcaaaaccaatctagaacccccagaagaggaagaagtcacaactggtctagaaaccccagcaaggaaagaagtcatagccattccagaagctccagcaaagagagagatcacaggggatctagcagccccaggaaggagagtggtcgcagtcaatcaggaagccccaacaagcagagagatcacagccgatctagaagtcccaacaaggcgagagatcgcagccgatctagaagtccctacaaggcgagagatcgcagccgatctagaagtcccaacaaggcgagagattgcagccgatctagaagtccctacaaggcgagagatcgcagccgatctagaagtcccaacaaggcaagagatcatagccgatctagaagtcccaacaaggcgagagatcgcagccgatctagaagccccagcaaggaaagagatcacagccaacttggaagccccagcaaagagagagatcacagacgatctagaagccccagcaaggagagacagtgcagacaatctagaagctccagcaaagagagagatcacagacgatctagaagccccagcaaggagagacagcgcagacaatctagaagccccaacaaggagagagatcgcagccaatctagaagccccagcgaggagagagagcacagacaatccagaagccccagcaaagagagagatcgcagacgatggagaagccccagcaaggagagagagcgcagacaatctagaagctccagcgaggagagagatcacagccgatctagaagccccaataagcagagtggttacagtcgacctagagcctccagcaaggagaaagctcatagccgatctagaacccccagcaaagaaggaaatcatagccaatctagaacctctagcaaggagagcgaccccagtcaatctacagtccccagaagtcccgactggaagagatcccctactaggacaagcagtctcagtcagaatagaacccctagcaagacaagcagccactccccatcaacatttcccagtgggggccaaaccctaagccaggatgacagtcaagccgacgccaccacctctaaggccaccttacctggggaaaggtcttcatcatcttcttccaagctggcgtagcccccagtctcagctggctcacgggtctctgtcatgaccgggggaggggacaggagacaggagcagagcagcagctgagcagcgtccctccccggccagctctccacagccacacctccggccacaagttctctaatacaggatgttggcaggtagagagggatgctggatagggggaaaggaaagacctgtgatgattcaataaatttttacatagc

SEQ ID NO: 180183 - DNA, 2698 bp, Homo sapiens
  Payload ID: 15495
  Gene Symbol: SRRM5
  Gene Name: serine/arginine repetitive matrix 5
  Uniprot ID: B3KS81
  ENST ID: ENST00000607544
  CDS Start-End: 323-2470
aacctgtaggcagcgcttgagggtagcgggatagcagctgcaagcgcgcgtgggaggcgggggctctgggcggaacaaaaatcacaggatgtcagaggatgtttcccgggaagaactgggataaaggaagggtcccagcaccatggaggacccgaaccctgaagagaacatgaagcagcaggattcacccaaggagagaagtccccagagcccaggaggcaacatctttggcctgtgacaggcaatcaggtcatcgtccacggctaccaggtgtttcatgtctactgtgacttccaggaccacaagcccttttgcgcccaccatgtcttcacctaagagatcttcaaagcccagtatgtctctggcacccagtggatcctccatgcccactgcggatcccaagcctcctgcctccttgaagtccaccaaatcagcaacacccaacagatccttagtgcccaccaaaccagcgacatcccgtaactcagtcatgagcccaagcagttccaagtccaccaaatcgaccagtacaaaaagagccccttctaaccggcccagcagcaggtcccgagtccgcagcaaagcaagaacacccagcagggtgagcaccgacaccaggaccagcaaagccagcaaggccagcgacgtgagatgccaccagcggaggggcacacacagccggggtaggacacctggcagaaggggaagccgcagctccaagaggtcacccagcagggccagcactcctggcaggataagaactcatggtgccagaccaggcatggccagcagggtgagaactcccacttcacagcaaaaagggagccggggaaagagttacggccggcctagaaccagcaacagggaaaggagtgacagccagcctagaaatctgagcaagaagagttaccgcccaccaggaggctcaggtatagggaggagttccgagctggctgtaactcccagtacagccaagtgtcaaaccccgactggaattccctccaaggagaagagtgacaacccatctccatcctcatcaaggaaggtgaagagctacggtcagatgatcatccccagtagggaaaagagttacagccccactgaaatgtccagcagggtcaagagttataaccaggccagcacccgcagcaggccgcaaagtcacagccaatctagaagccccagaaggtcaagaagtggcagtcagaagaggacgcacagcagagtgagaagtcacagttggaagagaaaccatagcagggcaagaagtcgcacccggaagggaattctgagccagatgggaagacacagccagtctagaagccacagcaaggggaaaagtcaaaaccaatctagaacccccagaagaggaagaagtcacaactggtctagaaaccccagcaaggaaagaagtcatagccattccagaagctccagcaaagagagagatcacaggggatctagcagccccaggaaggagagtggtcgcagtcaatcaggaagccccaacaagcagagagatcacagccgatctagaagtcccaacaaggcgagagatcgcagccgatctagaagtccctacaaggcgagagatcgcagccgatctagaagtcccaacaaggcgagagattgcagccgatctagaagtccctacaaggcgagagatcgcagccgatctagaagtcccaacaaggcaagagatcatagccgatctagaagtcccaacaaggcgagagatcgcagccgatctagaagccccagcaaggaaagagatcacagccaacttggaagccccagcaaagagagagatcacagacgatctagaagccccagcaaggagagacagtgcagacaatctagaagctccagcaaagagagagatcacagacgatctagaagccccagcaaggagagacagcgcagacaatctagaagccccaacaaggagagagatcgcagccaatctagaagccccagcgaggagagagagcacagacaatccagaagccccagcaaagagagagatcgcagacgatggagaagccccagcaaggagagagagcgcagacaatctagaagctccagcgaggagagagatcacagccgatctagaagccccaataagcagagtggttacagtcgacctagagcctccagcaaggagaaagctcatagccgatctagaacccccagcaaagaaggaaatcatagccaatctagaacctctagcaaggagagcgaccccagtcaatctacagtccccagaagtcccgactggaagagatcccctactaggacaagcagtctcagtcagaatagaacccctagcaagacaagcagccactccccatcaacatttcccagtgggggccaaaccctaagccaggatgacagtcaagccgacgccaccacctctaaggccaccttacctggggaaaggtcttcatcatcttcttccaagctggcgtagcccccagtctcagctggctcacgggtctctgtcatgaccgggggaggggacaggagacaggagcagagcagcagctgagcagcgtccctccccggccagctctccacagccacacctccggccacaagttctctaatacaggatgttggcaggtagagagggatgctggatagggggaaaggaaagacctgtgatgattcaataaatttttacatagcacccatcccc

SEQ ID NO: 180184 - DNA, 1513 bp, Homo sapiens
  Payload ID: 15496
  Gene Symbol: SRSF1
  Gene Name: serine/arginine-rich splicing factor 1
  Uniprot ID: Q07955
  ENST ID: ENST00000258962
  CDS Start-End: 210-956
gttgcgctcccgcgcgtgcgtgttgggatcgaatcgctgtttccttccgcttctcttcctctgtctcccccccatatccgtgcgccgagctgataaaggcgccattttggaggggccgcgggagacgtggtgccgctgcgggctcgctctgccgtgcgctaggcttggtgggaaggcctgttctcgagtccgcgcttttcgtcaccgccatgtcgggaggtggtgtgattcgtggccccgcagggaacaacgattgccgcatctacgtgggtaacttacctccagacatccgaaccaaggacattgaggacgtgttctacaaatacggcgctatccgcgacatcgacctcaagaatcgccgcgggggaccgcccttcgccttcgttgagttcgaggacccgcgagacgcggaagacgcggtgtatggtcgcgacggctatgattacgatgggtaccgtctgcgggtggagtttcctcgaagcggccgtggaacaggccgaggcggcggcgggggtggaggtggcggagctccccgaggtcgctatggccccccatccaggcggtctgaaaacagagtggttgtctctggactgcctccaagtggaagttggcaggatttaaaggatcacatgcgtgaagcaggtgatgtatgttatgctgatgtttaccgagatggcactggtgtcgtggagtttgtacggaaagaagatatgacctatgcagttcgaaaactggataacactaagtttagatctcatgagggagaaactgcctacatccgggttaaagttgatgggcccagaagtccaagttatggaagatctcgatctcgaagccgtagtcgtagcagaagccgtagcagaagcaacagcaggagtcgcagttactccccaaggagaagcagaggatcaccacgctattctccccgtcatagcagatctcgctctcgtacataagatgattggtgacactttttgtagaacccatgttgtatacagttttcctttattcagtacaatcttttcattttttaattcaaactgttttgttcagaatgggctaaagtgttgaattgcattcttgtaatatccccttgctcctaacatctacattcccttcgtgtctttgataaattgtattttaagtgatgtcatagacaggattgtttaaatttagttaactccatactcttcagactgtgatattgtgtaaatgtctatctgccctggtttgtgtgaactgggatgttgggggtgtttgtggttatcttacctggggaagttcttatgtttatcttgcttttcatgtgtctttctgtagacatatctgaagagatggattaagaatgctttggattaaggattgtggagcacatttcaatcattttaggattgtcaaaaggaggattgaggaggatcagatcaataatggaggcaatggtatgactccaagtgctattgtcacagatgaaattggcagtattgaccttatactaaaaggcaggggttaaaaa

SEQ ID NO: 180185 - DNA, 3117 bp, Homo sapiens
  Payload ID: 15496
  Gene Symbol: SRSF1
  Gene Name: serine/arginine-rich splicing factor 1
  Uniprot ID: Q07955
  ENST ID: ENST00000582730
  CDS Start-End: 125-730
cgagctgataaaggcgccattttggaggggccgcgggagacgtggtgccgctgcgggctcgctctgccgtgcgctaggcttggtgggaaggcctgttctcgagtccgcgcttttcgtcaccgccatgtcgggaggtggtgtgattcgtggccccgcagggaacaacgattgccgcatctacgtgggtaacttacctccagacatccgaaccaaggacattgaggacgtgttctacaaatacggcgctatccgcgacatcgacctcaagaatcgccgcgggggaccgcccttcgccttcgttgagttcgaggacccgcgagacgcggaagacgcggtgtatggtcgcgacggctatgattacgatgggtaccgtctgcgggtggagtttcctcgaagcggccgtggaacaggccgaggcggcggcgggggtggaggtggcggagctccccgaggtcgctatggccccccatccaggcggtctgaaaacagagtggttgtctctggactgcctccaagtggaagttggcaggatttaaaggatcacatgcgtgaagcaggtgatgtatgttatgctgatgtttaccgagatggcactggtgtcgtggagtttgtacggaaagaagatatgacctatgcagttcgaaaactggataacactaagtttagatctcatgaggtaggttatacacgtattcttttctttgaccagaattggatacagtggtcttaacagtggaatttcaaggtaaggattcaggcaaggttgtccaagtaaattgccagatttctggttttagttacattgtattcattcagcatgtctgaagatagatgaaagcttagatctttcaatggaaagttctgtctatccaatagggagaaactgcctacatccgggttaaagttgatgggcccagaagtccaagttatggaagatctcgatctcgaagccgtagtcgtagcagaagccgtagcagaagcaacagcaggagtcgcagttactccccaaggagaagcagaggatcaccacgctattctccccgtcatagcagatctcgctctcgtacataagatgattggtgacactttttgtagaacccatgttgtatacagttttcctttattcagtacaatcttttcattttttaattcaaactgttttgttcagaatgggctaaagtgttgaattgcattcttgtaatatccccttgctcctaacatctacattcccttcgtgtctttgataaattgtattttaagtgatgtcatagacaggattgtttaaatttagttaactccatactcttcagactgtgatattgtgtaaatgtctatctgccctggtttgtgtgaactgggatgttgggggtgtttgtggttatcttacctggggaagttcttatgtttatcttgcttttcatgtgtctttctgtagacatatctgaagagatggattaagaatgctttggattaaggattgtggagcacatttcaatcattttaggattgtcaaaaggaggattgaggaggatcagatcaataatggaggcaatggtatgactccaagtgctattgtcacagatgaaattggcagtattgaccttatactaaaaggcaggggttaaaaatgattatatacattttccttaaaacacttgcaaacattttattcagttgtctttagctacaattgctttgctttttaaaccttggcaattgtggcaaaattatattgcccattttgtagcaacttattttgctcccttccccccatttttgttttaatagggactaatgtgggaagaactggctaatttgtcacagtgcttagttacaactgttaatgtgtgacctgctgttggtgtacatgtgggtacagggtgtttttaaatccaacaagatagagtataatatcaatactgctaaatctgcatgtcctctgtgtgactgatagagcgttgctatttcatttttttaagacaaaatgaaagcaaaatatagagttccaatgtattggtgtagataatctagttgggaatacttttaagtctcaccttcccctttaaactaatattcataattggttcatatgtttaaaagactttaatttacaaattaaattgcaaatgggagcattagatttagttttagacttaggtgggtagcaatgccagtaaacttaaattacgtaacttcttgcaaccacgaaacctgtaatacgctgtacagtaacaagtgttggcattatcagttgaactgtaaatacaaaatgcttcttccaattagtctctatgatgattaagtttctaaaatttatctgaacaccattcagaaacttgttttggggaatttgatagttattgatgtgcatctgttaaactgatgacagacataactcatcattccccagaaaccttttttgattacagtatctaacattttgcctcctcttttttggttttgctggttataaaggtttggattggagagggctcactggatcccaatccttggagctggatcattggattcaaatcataatgtggataggatagggaggatgaattaccaggattcatggagcgggatcagattaccaggaacataggagtggattcctgccccaaccaaaccgcattcgtgtggatttttttattcaacttaattggctattccaaagattttttttttcctatttttgacgattggagcccttaagatgcacgatggaattgtgttttgcgttttttggtaaaaggagcaaagcgaggacctggagataaacgctggagcaatctccttggaaggattcagcacgagtagatggtaaacatttaaaggggaaagggggggtttgtttaaaatagtaaatcagtaagtcacttctaaatttaaagaaaacaaaattggagttgaagaataagtaggtttccaattggctattgccgttttctttgaaaaaataaacattttttaaaaaactatgcatggttgtcctttttcctcttcatgtaagattctaactgggtctatcagttaatctttaaattgttaagtaagataagattttgactcttgtgttaatgtgttagcaaattaaaagttcttaaaaggcaa

SEQ ID NO: 180186 - DNA, 758 bp, Homo sapiens
  Payload ID: 15496
  Gene Symbol: SRSF1
  Gene Name: serine/arginine-rich splicing factor 1
  ENST ID: ENST00000584668
  CDS Start-End: 1-431
gagctccccgaggtcgctatggccccccatccaggcggtctgaaaacagagtggttgtctctggactgcctccaagtggaagttggcaggatttaaaggatcacatgcgtgaagcaggtgatgtatgttatgctgatgtttaccgagatggcactggtgtcgtggagtttgtacggaaagaagatatgacctatgcagttcgaaaactggataacactaagtttagatctcatgagggagaaactgcctacatccgggttaaagttgatgggcccagaagtccaagttatggaagatctcgatctcgaagccgtagtcgtagcagaagccgtagcagaagcaacagcaggagtcgcagttactccccaaggagaagcagaggatcaccacgctattctccccgtcatagcagatctcgctctcgtacataagatgattgacatatctgaagagatggattaagaatgctttggattaaggattgtggagcacatttcaatcattttaggattgtcaaaaggaggattgaggaggatcagatcaataatggaggcaatggtttggattggagagggctcactggatcccaatccttggagctggatcattggattcaaatcataatgtggataggatagggaggatgaattaccaggattcatggagcgggatcagattaccaggaacataggagtggattcctgccccaaccaaaccgcattcgtgtggatttttttattcaacttaattggctattc

SEQ ID NO: 180187 - DNA, 568 bp, Homo sapiens
  Payload ID: 15496
  Gene Symbol: SRSF1
  Gene Name: serine/arginine-rich splicing factor 1
  ENST ID: ENST00000585096
  CDS Start-End: 137-358
atatccgtgcgccgagctgataaaggcgccattttggaggggccgcgggagacgtggtgccgctgcgggctcgctctgccgtgcgctaggcttggtgggaaggcctgttctcgagtccgcgcttttcgtcaccgccatgtcgggaggtggtgtgattcgtggccccgcagggaacaacgattgccgcatctacgtgggtaacttacctccagacatccgaaccaaggacattgaggacgtgttctacaaatacggcgctatccgcgacatcgacctcaagaatcgccgcgggggaccgcccttcgccttcgttgagttcgaggacccgcgagacgcggaagacgcggtacatatctgaagagatggattaagaatgctttggattaaggattgtggagcacatttcaatcattttaggattgtcaaaaggaggattgaggaggatcagatcaataatggaggcaatggtatgactccaagtgctattgtcacagatgaaattggcagtattgaccttatactaaaaggcaggggttaaaaatgattatatacattttccttaaaacac

SEQ ID NO: 180188 - DNA, 1317 bp, Homo sapiens
  Payload ID: 15496
  Gene Symbol: SRSF1
  Gene Name: serine/arginine-rich splicing factor 1
  ENST ID: ENST00000584773
  CDS Start-End: 125-886
cgagctgataaaggcgccattttggaggggccgcgggagacgtggtgccgctgcgggctcgctctgccgtgcgctaggcttggtgggaaggcctgttctcgagtccgcgcttttcgtcaccgccatgtcgggaggtggtgtgattcgtggccccgcagggaacaacgattgccgcatctacgtgggtaacttacctccagacatccgaaccaaggacattgaggacgtgttctacaaatacggcgctatccgcgacatcgacctcaagaatcgccgcgggggaccgcccttcgccttcgttgagttcgaggacccgcgagacgcggaagacgcggtgtatggtcgcgacggctatgattacgatgggtaccgtctgcgggtggagtttcctcgaagcggccgtggaacaggccgaggcggcggcgggggtggaggtggcggagctccccgaggtcgctatggccccccatccaggcggtctgaaaacagagtggttgtctctggactgcctccaagtggaagttggcaggatttaaaggatcacatgcgtgaagcaggtgatgtatgttatgctgatgtttaccgagatggcactggtgtcgtggagtttgtacggaaagaagatatgacctatgcagttcgaaaactggataacactaagtttagatctcatgagggagaaactgcctacatccgggttaaagttgatgggcccagaagtccaagttatggaagatctcgatctcgaagccgtagtcgtagcagaagccgtagcagaagcaacagcaggagtcgcagttactccccaaggagaagcagaggatcaccacgctattctccccgtcatagcagatctcgctctcacatatctgaagagatggattaagaatgctttggattaaggattgtggagcacatttcaatcattttaggattgtcaaaaggaggattgaggaggatcagatcaataatggaggcaatggtatgactccaagtgctattgtcacagatgaaattggcagtattgaccttatactaaaaggcaggggttaaaaatgattatatacattttccttaaaacacttgcaaacattttattcagttgtctttagctacaattgctttgctttttaaaccttggcaattgtggcaaaattatattgcccattttgtagcaacttattttgctcccttccccccatttttgttttaatagggactaatgtgggaagaactggctaatttgtcacagtgcttagttacaactgttaatgtgtgacctgctgttggtgtacatgtgggtacagggtgttttta

SEQ ID NO: 180189 - DNA, 1720 bp, Homo sapiens
  Payload ID: 15496
  Gene Symbol: SRSF1
  Gene Name: serine/arginine-rich splicing factor 1
  Uniprot ID: Q07955
  ENST ID: ENST00000581979
  CDS Start-End: 96-701
gccgcgggagacgtggtgccgctgcgggctcgctctgccgtgcgctaggcttggtgggaaggcctgttctcgagtccgcgcttttcgtcaccgccatgtcgggaggtggtgtgattcgtggccccgcagggaacaacgattgccgcatctacgtgggtaacttacctccagacatccgaaccaaggacattgaggacgtgttctacaaatacggcgctatccgcgacatcgacctcaagaatcgccgcgggggaccgcccttcgccttcgttgagttcgaggacccgcgagacgcggaagacgcggtgtatggtcgcgacggctatgattacgatgggtaccgtctgcgggtggagtttcctcgaagcggccgtggaacaggccgaggcggcggcgggggtggaggtggcggagctccccgaggtcgctatggccccccatccaggcggtctgaaaacagagtggttgtctctggactgcctccaagtggaagttggcaggatttaaaggatcacatgcgtgaagcaggtgatgtatgttatgctgatgtttaccgagatggcactggtgtcgtggagtttgtacggaaagaagatatgacctatgcagttcgaaaactggataacactaagtttagatctcatgaggtaggttatacacgtattcttttctttgaccagaattggatacagtggtcttaacagtggaatttcaaggtaaggattcaggcaaggttgtccaagtaaattgccagatttctggttttagttacattgtattcattcagcatgtctgaagatagatgaaagcttagatctttcaatggaaagttctgtctatccaatagggagaaactgcctacatccgggttaaagttgatgggcccagaagtccaagttatggaagatctcgatctcgaagccgtagtcgtagcagaagccgtagcagaagcaacagcaggagtcgcagttactccccaaggagaagcagaggatcaccacgctattctccccgtcatagcagatctcgctctcgtacataagatgattggtgacactttttgtagaacccatgttgtatacagttttcctttattcagtacaatcttttcattttttaattcaaactgttttgttcagaatgggctaaagtgttgaattgcattcttgtaatatccccttgctcctaacatctacattcccttcgtgtctttgataaattgtattttaagtgatgtcatagacaggattgtttaaatttagttaactccatactcttcagactgtgatattgtgtaaatgtctatctgccctggtttgtgtgaactgggatgttgggggtgtttgtggttatcttacctggggaagttcttatgtttatcttgcttttcatgtgtctttctgtagacatatctgaagagatggattaagaatgctttggattaaggattgtggagcacatttcaatcattttaggattgtcaaaaggaggattgaggaggatcagatcaataatggaggcaatggtttggattggagagggctcactggatcccaatccttggagctggatcattggattcaaatcataatgtggataggatagggaggatgaattaccaggattcatggagcgggatcagattaccaggaacataggagtggattcctgccccaaccaaaccgcattcgtgtggatttttttattcaacttaattggc

SEQ ID NO: 180190 - DNA, 1465 bp, Homo sapiens
  Payload ID: 15496
  Gene Symbol: SRSF1
  Gene Name: serine/arginine-rich splicing factor 1
  ENST ID: ENST00000583741
  CDS Start-End: 125-322
cgagctgataaaggcgccattttggaggggccgcgggagacgtggtgccgctgcgggctcgctctgccgtgcgctaggcttggtgggaaggcctgttctcgagtccgcgcttttcgtcaccgccatgtcgggaggtggtgtgattcgtggccccgcagggaacaacgattgccgcatctacgtgggtaacttacctccagacatccgaaccaaggacattgaggacgtgttctacaaatacggcgctatccgcgacatcgacctcaagaatcgccgcgggggaccgcccttcgccttcgttgagttcgaggacccgcggtgaggcggcatggggcttgcagccttgaggaaatagagacgcggaagacgcggtgtatggtcgcgacggctatgattacgatgggtaccgtctgcgggtggagtttcctcgaagcggccgtggaacaggccgaggcggcggcgggggtggaggtggcggagctccccgaggtcgctatggccccccatccaggcggtctgaaaacagagtggttgtctctggactgcctccaagtggaagttggcaggatttaaaggatcacatgcgtgaagcaggtgatgtatgttatgctgatgtttaccgagatggcactggtgtcgtggagtttgtacggaaagaagatatgacctatgcagttcgaaaactggataacactaagtttagatctcatgagggagaaactgcctacatccgggttaaagttgatgggcccagaagtccaagttatggaagatctcgatctcgaagccgtagtcgtagcagaagccgtagcagaagcaacagcaggagtcgcagttactccccaaggagaagcagaggatcaccacgctattctccccgtcatagcagatctcgctctcgtacataagatgattggtgacactttttgtagaacccatgttgtatacagttttcctttattcagtacaatcttttcattttttaattcaaactgttttgttcagaatgggctaaagtgttgaattgcattcttgtaatatccccttgctcctaacatctacattcccttcgtgtctttgataaattgtattttaagtgatgtcatagacaggattgtttaaatttagttaactccatactcttcagactgtgatattgtgtaaatgtctatctgccctggtttgtgtgaactgggatgttgggggtgtttgtggttatcttacctggggaagttcttatgtttatcttgcttttcatgtgtctttctgtagacatatctgaagagatggattaagaatgctttggattaaggattgtggagcacatttcaatcattttaggattgtcaaaaggaggattgaggaggatcagatcaataatggaggcaatggtatgactccaagtgctattgtcacagatgaaattggcagtattgaccttatactaaaaggcaggggttaaaaa

SEQ ID NO: 180191 - DNA, 3487 bp, Homo sapiens
  Payload ID: 15497
  Gene Symbol: SRSF10
  Gene Name: serine/arginine-rich splicing factor 10
  Uniprot ID: O75494
  ENST ID: ENST00000344989
  CDS Start-End: 77-628
gtctgaggctcggccgcctgagccgcggacggtttgctgagcccgttagtgcgcccggccgagacacgccgccgccatgtcccgctacctgcgtccccccaacacgtctctgttcgtcaggaacgtggccgacgacaccaggtctgaagacttgcggcgtgaatttggtcgttatggtcctatagttgatgtgtatgttccacttgatttctacactcgccgtccaagaggatttgcttatgttcaatttgaggatgttcgtgatgctgaagacgctttacataatttggacagaaagtggatttgtggacggcagattgaaatacagtttgcccagggggatcgaaagacaccaaatcagatgaaagccaaggaagggaggaatgtgtacagttcttcacgctatgatgattatgacagatacagacgttctagaagccgaagttatgaaaggaggagatcaagaagtcggtcttttgattacaactatagaagatcgtatagtcctagaaacagtagaccgactggaagaccacggcgtagcagaagccattccgacaatgatagaccaaactgcagctggaatacccagtacagttctgcttactacacttcaagaaagatctgaaagcggaaaaagaaccaaagaagggcagttcaagcgaccaaagggtgggtggaaggtgctgcagtatgaatactgtacgaatattttgactctggtctgaaaagataaaagaatgttatcgaaaactacatggaataattgaagtcccttcaagtttgaaagtaagcattttaggacaaataaaaggaaattcaactttgtacttgtggaaactaatccctaaatatgaataggtttatattgattcatgggtaacaggtccataataaattattggaaactaggatgtctgaatatcaaggaagacagccatagtctcttacagtgcctctgttggtctgtctcaaactgaattgggtgggaaaaggtatggtccaatataaaagttccatttttgccattattggcaaatcttgcctttgtttattttggtgccagtgttttctgcttaatcatttgctttgttggcatctgtgtttatttacttgtacaccacatgcagtttacatctgtcttaactactccttcccaggtaaattccaattatatttgacatccagctaagagggcccatctcttctcacctctttcctagtcagtatattcagcaaatatttattgagcccttactgtgggcaaatcattgtactggataattgagaaaaatagataattcccttattcagtaaatgtctactgagcacaatctagtgaatcattacagtatggcctcattgttttgtttgaggtgtgttattcataacaatattttacaccattcgtatcaatgtaattatagaacacaatatacgatcaaggataagtaattgtgtggttatctgccatttaaaagtatccagtatttgatcacattattataaataatgaaaaaatgatttaatctgtaataaactggtttattgtgcagtgactgtaatatactagagttataataaattgtttactctgcctcaccaaacacatgctaggatataacccccaaaataagtatttaactttgcattaggtataaaggagactgggtgctataattagattattttgaggcagacagagagctgttatcctaactgatttagtatgttctgtaattgagaaaatgttcaccaaattatactttttagtgatttacatgtacattttataggggacatgttctgtgtatagcgaataaataacttttatagtatcacaaaatgttttggattccttagtttcttattaggatatgatgtttctttacctatacattgatttcatcacatttgatttttgtcatcttttttgccacatacttaaaattttccatataaaattaactaaaaatctggaagtggaatttaagcttttaatttgtagcaattttgaaaatatagcagaggtatattttcaagggaggtgtgaaatggaggtattattgtttgtattttattttagaaattttgtttgaacttgcccaagatcacacagcaagtgtcagatcctaggttacagcccataatttttcacttgtttcatcttttgttaccatgtttgttgtttaatccaatggggaagtgtttttatagctttattttcatggagatagtaacattgatataatgggatctagaatttacttagagtcaaagtgactagatttaattacaaaaagtattttgttgtataccgttatacactcattaacataggggttcttatggacagaggttctatgtatttttaaaagaatatgtagaggctatagacttttttgccctctacctcccttctccatttccttttgaagttaagacatttaagggggagaattaaggtgcatattgagttggggttttgtttaaaaaaaattaggtaaatacatatataactacaataacaacagttggtagttctctaaaatatttaattatggtaaatcagaaaaggccctttaatttttgcatctgttgaatgaattgctttaggatctcttctgtggttgtttctctctatactgaatgctgtcaatattattgagcacttactgtgccgaaccatgtgcttttcaaatatttctatttaatcctaaaaacactcctgggaaatgggtattattcccattttacagatgagaaaattgtcctttgtagaatacccatcatgtgatagcttcttgcatattatgctattcatttctcacaaccttacaaggtaaatggataatgttcctggatgagagattaaacgtactcgaagatcttatggttgtgtggctcagagactctaagcatggctttccaaatctcattctcttgtagagattttccattgtattgcattttgaccatgttcctgtttacaaaacctaagattatattctgaagtatctgtgacttgagtgatagctcaggaataatctgagggcattctattaggaaggaggactagcaaagcctatagttagcctatcctaggcatgaactattctcattttagataggatgacttgataaataggatgaagtgagcaacctgtttgtcttcggttattgctatctacaagacattctgctagtcactgtggaaaagtttccttctcttgggttttttcctcttccccttcctcttaacagtgttggttatctttattatgtttctgtgtatttgtaacagctgtttcacccttgtattgcataatggggatttttcttggaataaaaagtgaggcatgtaaattcattgagaactaaccgtagtttgtaaagaagtaaaaggcctttgtatctagttttttgcagatcacatttctttgaatgctggaaagtgaaataaactggtctaggagccaaaaataaa

SEQ ID NO: 180192 - DNA, 2917 bp, Homo sapiens
  Payload ID: 15497
  Gene Symbol: SRSF10
  Gene Name: serine/arginine-rich splicing factor 10
  Uniprot ID: O75494
  ENST ID: ENST00000343255
  CDS Start-End: 73-858
gaggctcggccgcctgagccgcggacggtttgctgagcccgttagtgcgcccggccgagacacgccgccgccatgtcccgctacctgcgtccccccaacacgtctctgttcgtcaggaacgtggccgacgacaccaggtctgaagacttgcggcgtgaatttggtcgttatggtcctatagttgatgtgtatgttccacttgatttctacactcgccgtccaagaggatttgcttatgttcaatttgaggatgttcgtgatgctgaagacgctttacataatttggacagaaagtggatttgtggacggcagattgaaatacagtttgcccagggggatcgaaagacaccaaatcagatgaaagccaaggaagggaggaatgtgtacagttcttcacgctatgatgattatgacagatacagacgttctagaagccgaagttatgaaaggaggagatcaagaagtcggtcttttgattacaactatagaagatcgtatagtcctagaaatagaccgactggaagaccacggcgtagcagaagccattccgacaatgatagattcaaacaccgaaatcgatctttttcaagatctaaatccaattcaagatcacggtccaagtcccagcccaagaaagaaatgaaggctaaatcacgttctaggtctgcatctcacaccaaaactagaggcacctctaaaacagattccaaaacacattataagtctggctcaagatatgaaaaggaatcaaggaaaaaagaaccacctagatccaaatctcagtcaagatcacagtctaggtctaggtcaaaatctagatcaaggtcttggactagtcctaagtccagtggccactgatagtataaaccatggtcatttttaggcatgtatcattcatttactcatagtttggtttacttaaattatcaggaatacaatgttgcaatgatgcttaaaaaacacttgttagttttccctgtaccaggcaatggttataattaaaatgatatgctgttgagaagccactcttaagagtccagtttgtttaatgttatgggcagctaccaatttgtggtgtctctgtatatttttgtaaagattctcattttttatgcttgaagtatttggtgaaaagatgttggttgaccataatttgcaacattgtctcattaaaaataaactttcatattcatatttggtagaactgttaacctagaaatgtagcttgctaataagatagaatgatacaaaagtgaagtagtagccacagtacaacactgactgctcagacacatttaggttcagggtggacctttatgtcttgtcaagatgtctaggcccggctgggcgtggtggctcacacctgtaatcccagcactttgggaggccgaggcgggcggatcacgaggtcaggagttcgagaccagcctgaccaacacggtgaaaccccgtctctactaaaaatacaaaaattatccgggcatggtggcacatgcctgtaatctcagctactcaggaggctgaggcaagagaatcgcttgaacctgggaggtagaagttgcagtgagccaaaatcacgccactgcactccagcctgggcaacagagtgagactccgtctcaaaaaaaaaaaaaaaccggatgtctaggccaatgataattatttttgatgcagtgtggattagttcttttgttaaccccactgtcttggggaatgatgccagctgggaaattgagtttttgactgaaacatggagccttcactgctttttttctggttcctatgaagatttggaacatagaaaacacaaaaactcaccttaaaatttgagcaggtcgttgatggcaaaaataattttaaggaaaaaggaatattcttatgtagttattctaaagtttaaggagcgttgttgaccataatattgcttagttttcttactgctgttaagtaagtaaattgtttcaaagtaggttttgtgtgtgtgtgcctagtgtaaaagaactgaaattttgatgcttacagcacttggctcgtgcatttgtatcaaaatttgcctgcctctttatgagggaggcctgcttttcacacctcagtttatttaatacgaggcaagttgtaagacaacactcattctaggtgattctgtggtgccatgaaatttaaggtaatttggggaaaaggattagtcagttttaagcaagagtcacatcttttgagctttcgattatcagtgtagtacctgactaaaaatgaagtaatacccttaaaccatttataatttctagtatttctctgaaagatcgttttggggacaaaagtgacttgacatgtccaatttcatttcagaataaaaagctagcatctttaaaaatctcagattgcttgcttacagatacaagtacgaattatggacaaacgattccttttagaggattacttttttcaatttcggttttagtaatctaggctttgcctgtaaagaatacaacgatggattttaaatactgtttgtggaatgtgtttaaaggattgattctagaacctttgtatatttgatagtatttctaactttcatttctttactgtttgcagttaatgttcatgttctgctatgcaatcgtttatatgcacgtttctttaatttttttagattttcctggatgtatagtttaaacaacaaaaagtctatttaaaactgtagcagtagtttacagttctagcaaagaggaaagttgtggggttaaactttgtattttctttcttatagaggcttctaaaaaggtatttttatatgttctttttaacaaatattgtgtacaacctttaaaacatcaatgtttggatcaaaacaagacccagcttattttctgcttgctgtaaattaagcaaacatgctataataaaaacaaaatgaagg

SEQ ID NO: 180193 - DNA, 1194 bp, Homo sapiens
  Payload ID: 15497
  Gene Symbol: SRSF10
  Gene Name: serine/arginine-rich splicing factor 10
  Uniprot ID: O75494
  ENST ID: ENST00000374452
  CDS Start-End: 54-575
cgcggacggtttgctgagcccgttagtgcgcccggccgagacacgccgccgccatgtcccgctacctgcgtccccccaacacgtctctgttcgtcaggaacgtggccgacgacaccaggtctgaagacttgcggcgtgaatttggtcgttatggtcctatagttgatgtgtatgttccacttgatttctacactcgccgtccaagaggatttgcttatgttcaatttgaggatgttcgtgatgctgaagacgctttacataatttggacagaaagtggatttgtggacggcagattgaaatacagtttgcccagggggatcgaaagacaccaaatcagatgaaagccaaggaagggaggaatgtgtacagttcttcacgctatgatgattatgacagatacagacgttctagaagccgaagttatgaaaggaggagatcaagaagtcggtcttttgattacaactatagaagatcgtatagtcctagaaacagtagaccgactggaagaccacggcgtagcagaagccattccgacaatgatagccaagtaagcaagaagaaaaatgagagataatgcttcagtgagagaggaaaggtgctacatagagtatgagctgttaagttacatcccaggggaaagacctgggaactattgtattattctcttgaaaatttggcccagtaagctgctacatccagttcaactaacaaaatcctgtataccacagagaagaataaaggaaaccaaactgacaaacatccttcttttatttaagaccaaactgcagctggaatacccagtacagttctgcttactacacttcaagaaagatctgaaagcggaaaaagaaccaaagaagggcagttcaagcgaccaaagggtgggtggaaggtgctgcagtatgaatactgtacgaatattttgactctggtctgaaaagataaaagaatgttatcgaaaactacatggaataattgaagtcccttcaagtttgaaagtaagcattttaggacaaataaaaggaaattcaactttgtacttgtggaaactaatccctaaatatgaataggtttatattgattcatgggtaacaggtccataataaattattggaaactaggatgtctgaatatcaaggaagacagccatagtctcttacagtgcctctgttggtctgtctcaaactgaattg

SEQ ID NO: 180194 - DNA, 866 bp, Homo sapiens
  Payload ID: 15497
  Gene Symbol: SRSF10
  Gene Name: serine/arginine-rich splicing factor 10
  ENST ID: ENST00000374453
  CDS Start-End: 40-558
tgagcccgttagtgcgcccggccgagacacgccgccgccatgtcccgctacctgcgtccccccaacacgtctctgttcgtcaggaacgtggccgacgacaccaggtctgaagacttgcggcgtgaatttggtcgttatggtcctatagttgatgtgtatgttccacttgatttctacactcgccgtccaagaggatttgcttatgttcaatttgaggatgttcgtgatgctgaagacgctttacataatttggacagaaagtggatttgtggacggcagattgaaatacagtttgcccagggggatcgaaagacaccaaatcagatgaaagccaaggaagggaggaatgtgtacagttcttcacgctatgatgattatgacagatacagacgttctagaagccgaagttatgaaaggaggagatcaagaagtcggtcttttgattacaactatagaagatcgtatagtcctagaaatagaccgactggaagaccacggcgtagcagaagccattccgacaatgatagccaagtaagcaagaagaaaaatgagagataatgcttcagtgagagaggaaaggtgctacatagagtatgagctgttaagttacatcccaggggaaagacctgggaactattgtattattctcttgaaaatttggcccagtaagctgctacatccagttcaactaacaaaatcctgtataccacagagaagaataaaggaaaccaaactgacaaacatccttcttttatttaagaccaaactgcagctggaatacccagtacagttctgcttactacacttcaagaaagatctgaaagcggaaaaagaaccaaagaagggcagttcaagcgaccaaaggg

SEQ ID NO: 180195 - DNA, 1808 bp, Homo sapiens
  Payload ID: 15497
  Gene Symbol: SRSF10
  Gene Name: serine/arginine-rich splicing factor 10
  Uniprot ID: O75494
  ENST ID: ENST00000453840
  CDS Start-End: 42-590
gctgagcccgttagtgcgcccggccgagacacgccgccgccatgtcccgctacctgcgtccccccaacacgtctctgttcgtcaggaacgtggccgacgacaccaggtctgaagacttgcggcgtgaatttggtcgttatggtcctatagttgatgtgtatgttccacttgatttctacactcgccgtccaagaggatttgcttatgttcaatttgaggatgttcgtgatgctgaagacgctttacataatttggacagaaagtggatttgtggacggcagattgaaatacagtttgcccagggggatcgaaagacaccaaatcagatgaaagccaaggaagggaggaatgtgtacagttcttcacgctatgatgattatgacagatacagacgttctagaagccgaagttatgaaaggaggagatcaagaagtcggtcttttgattacaactatagaagatcgtatagtcctagaaatagaccgactggaagaccacggcgtagcagaagccattccgacaatgatagaccaaactgcagctggaatacccagtacagttctgcttactacacttcaagaaagatctgaaagcggaaaaagaaccaaagaagggcagttcaagcgaccaaagggtgggtggaaggtgctgcagtatgaatactgtacgaatattttgactctggtctgaaaagataaaagaatgttatcgaaaactacatggaataattgaagtcccttcaagtttgaaagtaagcattttaggacaaataaaaggaaattcaactttgtacttgtggaaactaatccctaaatatgaataggtttatattgattcatgggtaacaggtccataataaattattggaaactaggatgtctgaatatcaaggaagacagccatagtctcttacagtgcctctgttggtctgtctcaaactgaattgggtgggaaaaggtatggtccaatataaaagttccatttttgccattattggcaaatcttgcctttgtttattttggtgccagtgttttctgcttaatcatttgctttgttggcatctgtgtttatttacttgtacaccacatgcagtttacatctgtcttaactactccttcccaggtaaattccaattatatttgacatccagctaagagggcccatctcttctcacctctttcctagtcagtatattcagcaaatatttattgagcccttactgtgggcaaatcattgtactggataattgagaaaaatagataattcccttattcagtaaatgtctactgagcacaatctagtgaatcattacagtatggcctcattgttttgtttgaggtgtgttattcataacaatattttacaccattcgtatcaatgtaattatagaacacaatatacgatcaaggataagtaattgtgtggttatctgccatttaaaagtatccagtatttgatcacattattataaataatgaaaaaatgatttaatctgtaataaactggtttattgtgcagtgactgtaatatactagagttataataaattgtttactctgcctcaccaaacacatgctaggatataacccccaaaataagtatttaactttgcattaggtataaaggagactgggtgctataattagattattttgaggcagacagagagctgttatcctaactgatttagtatgttctgtaattgagaaaatgttcaccaaattatactttttagtgatttacatgtacattttataggggacatgttctgtgtatagcgaataaataacttttatagtatcacaaaa

SEQ ID NO: 180196 - DNA, 1089 bp, Homo sapiens
  Payload ID: 15497
  Gene Symbol: SRSF10
  Gene Name: serine/arginine-rich splicing factor 10
  Uniprot ID: O75494
  ENST ID: ENST00000484146
  CDS Start-End: 102-599
gtagcagagccctctagctgtgtgtgtctgaggctcggccgcctgagccgcggacggtttgctgagcccgttagtgcgcccggccgagacacgccgccgccatgtcccgctacctgcgtccccccaacacgtctctgttcgtcaggaacgtggccgacgacaccaggtctgaagacttgcggcgtgaatttggtcgttatggtcctatagttgatgtgtatgttccacttgatttctacactcgccgtccaagaggatttgcttatgttcaatttgaggatgttcgtgatgctgaagacgctttacataatttggacagaaagtggatttgtggacggcagattgaaatacagtttgcccagggggatcgaaagacaccaaatcagatgaaagccaaggaagggaggaatgtgtacagttcttcacgctatgatgattatgacagatacagacgttctagaagccgaagttatgaaaggaggagatcaagaagtcggtcttttgattacaactatagaagatcgtatagtcctagaaaaccaaactgcagctggaatacccagtacagttctgcttactacacttcaagaaagatctgaaagcggaaaaagaaccaaagaagggcagttcaagcgaccaaagggtgggtggaaggtgctgcagtatgaatactgtacgaatattttgactctggtctgaaaagataaaagaatgttatcgaaaactacatggaataattgaagtcccttcaagtttgaaagtaagcattttaggacaaataaaaggaaattcaactttgtacttgtggaaactaatccctaaatatgaataggtttatattgattcatgggtaacaggtccataataaattattggaaactaggatgtctgaatatcaaggaagacagccatagtctcttacagtgcctctgttggtctgtctcaaactgaattgggtgggaaaaggtatggtccaatataaaagttccatttttgccattattggcaaatcttgcctttgtttattttggtgccagtgttttctgcttaatcatttgctttgttggcatctgtgtttatttacttgta

SEQ ID NO: 180197 - DNA, 1631 bp, Homo sapiens
  Payload ID: 15497
  Gene Symbol: SRSF10
  Gene Name: serine/arginine-rich splicing factor 10
  Uniprot ID: O75494
  ENST ID: ENST00000492112
  CDS Start-End: 65-853
gccgcctgagccgcggacggtttgctgagcccgttagtgcgcccggccgagacacgccgccgccatgtcccgctacctgcgtccccccaacacgtctctgttcgtcaggaacgtggccgacgacaccaggtctgaagacttgcggcgtgaatttggtcgttatggtcctatagttgatgtgtatgttccacttgatttctacactcgccgtccaagaggatttgcttatgttcaatttgaggatgttcgtgatgctgaagacgctttacataatttggacagaaagtggatttgtggacggcagattgaaatacagtttgcccagggggatcgaaagacaccaaatcagatgaaagccaaggaagggaggaatgtgtacagttcttcacgctatgatgattatgacagatacagacgttctagaagccgaagttatgaaaggaggagatcaagaagtcggtcttttgattacaactatagaagatcgtatagtcctagaaacagtagaccgactggaagaccacggcgtagcagaagccattccgacaatgatagattcaaacaccgaaatcgatctttttcaagatctaaatccaattcaagatcacggtccaagtcccagcccaagaaagaaatgaaggctaaatcacgttctaggtctgcatctcacaccaaaactagaggcacctctaaaacagattccaaaacacattataagtctggctcaagatatgaaaaggaatcaaggaaaaaagaaccacctagatccaaatctcagtcaagatcacagtctaggtctaggtcaaaatctagatcaaggtcttggactagtcctaagtccagtggccactgatagtataaaccatggtcatttttaggcatgtatcattcatttactcatagtttggtttacttaaattatcaggaatacaatgttgcaatgatgcttaaaaaacacttgttagttttccctgtaccaggcaatggttataattaaaatgatatgctgttgagaagccactcttaagagtccagtttgtttaatgttatgggcagctaccaatttgtggtgtctctgtatatttttgtaaagattctcattttttatgcttgaagtatttggtgaaaagatgttggttgaccataatttgcaacattgtctcattaaaaataaactttcatattcatatttggtagaactgttaacctagaaatgtagcttgctaataagatagaatgatacaaaagtgaagtagtagccacagtacaacactgactgctcagacacatttaggttcagggtggacctttatgtcttgtcaagatgtctaggcccggctgggcgtggtggctcacacctgtaatcccagcactttgggaggccgaggcgggcggatcacgaggtcaggagttcgagaccagcctgaccaacacggtgaaaccccgtctctactaaaaatacaaaaattatccgggcatggtggcacatgcctgtaatctcagctactcaggaggctgaggcaagagaatcgcttgaacctgggaggtagaagttgcagtgagccaaaatcacgccactgcactccagcctgggcaacagagtgagactccgtctcaaaaaaaaaaaaaaa

SEQ ID NO: 180198 - DNA, 1390 bp, Homo sapiens
  Payload ID: 15497
  Gene Symbol: SRSF10
  Gene Name: serine/arginine-rich splicing factor 10
  ENST ID: ENST00000495785
  CDS Start-End: 17-226
gagacacgccgccgccatgtcccgctacctgcgtccccccaacacgtctctgttcgtcaggaacgtggccgacgacaccaggtctgaagacttgcggcgtgaatttggtcgttatggtcctatagttgatgtgtatgttccacttgatttctacactcgccgtccaagaggatttgcttatgttcaatatcctttcttcagatggctgattagtgaggggtgttgaagtttgaaattcaagtttatagaatgtaaagctgtacagttatggcgaccccaaagagaaagcatgaaagaacctttagagtagagttcaacacttaaggcaagtagacaagccaaagacctcttaaggatcaggcttgaagagaagggagagtttgggaaaagaaaaaataaagaaaagctggaagaaggacaagcctaatgggagacaaagcctcgctttatctacaaaagggggaaaaggttgtttttcaaagttaaagataaagccatctgtcatatttggccaagcatctcatgacaagtccttctgacaagcacttaaagagttaaaggtcaagatgaagttgaatgatggccaagattaaaggagtcatacctgatcacatttgaggatgttcgtgatgctgaagacgctttacataatttggacagaaagtggatttgtggacggcagattgaaatacagtttgcccagggggatcgaaagacaccaaatcagatgaaagccaaggaagggaggaatgtgtacagttcttcacgctatgatgattatgacagatacagacgttctagaagccgaagttatgaaaggaggagatcaagaagtcggtcttttgattacaactatagaagatcgtatagtcctagaaagtaagtgtgctgtgtagcacagtgatctgtttaaaaaatgtatttgttagcatttaatttttttttactattttgtatacttttaattatatacattgaatgtttcattgagacaaaaaatactgtagcattttattttaaaagttttatggtttgcttttaattagaaactttgcctctatgaatagatatttgtcactgctttttctgatatgctttttagcagtagaccgactggaagaccacggcgtagcagaagccattccgacaatgataggtaaataactttgctttgaaaaagactcatgtattttttaatttcagagtgaacttttgctctaaaaataacaaatttgattaatatagaatctaatttttactctaattatatctctcctctgttttgaaagattcaaacaccgaaatcgatctttttcaagatctaaatccaattcaagatcacggtccaagtcccagcccaagaaagaaatgaaggctaaatcacgttcta

SEQ ID NO: 180199 - DNA, 778 bp, Homo sapiens
  Payload ID: 15497
  Gene Symbol: SRSF10
  Gene Name: serine/arginine-rich splicing factor 10
  ENST ID: ENST00000473858
  CDS Start-End: 77-199
gtctgaggctcggccgcctgagccgcggacggtttgctgagcccgttagtgcgcccggccgagacacgccgccgccatgtcccgctacctgcgtccccccaacacgtctctgttcgtcaggaacgtggccgacgacaccagcaccaaatcagatgaaagccaaggaagggaggaatgtgtacagttcttcacgctatgatgattatgacagatacagacgttctagaagccgaagttatgaaaggaggagatcaagaagtcggtcttttgattacaactatagaagatcgtatagtcctagaaatagaccgactggaagaccacggcgtagcagaagccattccgacaatgatagaccaaactgcagctggaatacccagtacagttctgcttactacacttcaagaaagatctgaaagcggaaaaagaaccaaagaagggcagttcaagcgaccaaagggtgggtggaaggtgctgcagtatgaatactgtacgaatattttgactctggtctgaaaagataaaagaatgttatcgaaaactacatggaataattgaagtcccttcaagtttgaaagtaagcattttaggacaaataaaaggaaattcaactttgtacttgtggaaactaatccctaaatatgaataggtttatattgattcatgggtaacaggtccataataaattattggaaactaggatgtctgaatatcaaggaagacagccatagtctcttacagtgcctctgttggtctgtctcaaactgaattgggtggg

SEQ ID NO: 180200 - DNA, 3034 bp, Homo sapiens
  Payload ID: 15498
  Gene Symbol: SRSF11
  Gene Name: serine/arginine-rich splicing factor 11
  ENST ID: ENST00000370949
  CDS Start-End: 564-1838
aaagcattttactgtacaggtaaggaatgtgccatgttgttttacctatctctctttctctctcactcccatgcacacatcctgtgtgtattcagagaccttcagaaacattcatattcattttcatgagtcagcaaaagccctacgcttgattccaacagaatatttcctttacatactttcttctcttaatttttacaaaatttgtatggtaggtgtaaaagaaaatcatagtaactgtaccatattattaacccctaaatcaaactttttttgtcttgtgtatcttgatttttctgtgtgctttatagtgaagcagccgacacgagtcgttgttcataaaacagcttttgaaagttgagagcacacccctggagaaccgactgtgcttgcttacgtttggttcatgacttaaaaatcgagtacaggtgatgaaatcttggcagtgttaacaaaaaagtagtgtgtattgtgctatttttttttactctagaaacttaaccatttgtagagaaaaaggaaacaaattttcacacattgaagttcattctgacataaaattaatgataaataatcatagaaatcaagctttgtattttagcgaacataagtactttcaacaaactcaggtggtgtatcagggagacattttctgggtgtttttgtgtgttttctgtcttagaaaagaatgtgttctaatgcaaggatgtttctctgcaggagttattcctgatgaagctaaagctttgtctctgttggcaccagctaatgcagtggcaggtcttctgcctggtggtggactcctgcctactcctaacccacttacccagattggcgctgttccactggctgctttgggggctcctactcttgatcctgcccttgctgcacttgggcttcctggagcaaacttgaactctcagtctcttgctgcagatcagttgctgaagcttatgagtactgttgatcccaagttgaatcatgtagctgctggtctcgtttcaccaagtctgaaatcggatacctctagtaaagaaatagaggaagctatgaaaagagtacgagaagcacagtccctaatttctgctgctatagaaccagataagaaagaagaaaaaagaaggcattcaagatcaagatcacgttctaggaggaggaggactccctcatcttctagacacaggcggtcaagaagcagatcgagacggcggtcacattctaagtctaggagtcggcgacgatccaaaagcccaaggcggagaagatctcattccagagaaagaggtagaaggtcaaggagcacatcaaaaacaagagacaaaaagaaagaagacaaagaaaagaaacgttctaaaacaccaccaaaaagttacagcacagccagacgttctagaagtgcaagcagagagagacgacgacgaagaagcaggagtggcacaagatctcctaaaaagcctcggtctcctaaaagaaaattgtcccgctcaccatcccctaggagacataaaaaggagaagaagaaagataaagacaaagaaagaagtagggatgaaagagaacgatcaacaagcaagaagaagaagagtaaagataaggaaaaggaccgggaaagaaaatcagagagtgataaagatgtaaaacaggttacacgggattatgatgaagaggaacaggggtatgacagtgagaaagagaaaaaagaagagaagaaaccaatagaaacaggttcccctaaaacaaaggaatgttctgtggaaaagggaactggtgattcactaagagaatccaaagtgaatggggatgatcatcatgaagaagacatggatatgagtgactgaatattgcctctgagggagtccaactgtatacctgcatcagtgtcattcctttgtgtgatttcttaatgctgtatttgttcatctcaaacctagatgtatacagctctgagttataaatggttataaagctcctgttactcatattagttatttacatcaaaaagcttttagaaaatggtacgaggtaaccaattcttgtcatggtgaaatctgattgagtaaccaagcagttttactattctggtgctgcttcataacaaaaatgaaaagctgcatgcatctacagcaggcatggattgtttatgtcgtatgatatcctttattaagtaagttcacttatagtatttctataatttgattcattgccgtaatagagccatgtaggaaatgcactgattgcatgttattgtggcaagaatatcctaaatgtcattaaaatcctccaacatgatggatctacttatggtcttgtttgttgacatgacaaattaacattcttatagttacatctggaaatgagcatttgaaatagataatcctttaagccttgtggcaaaatttttgtggcttttgtttaactttgaaaggttattatgcactaaccttttttggtggctaattagggtttaaatacagaaacaagatttcaaataaaactgtctttggcagtgagtaaatagcatattttgaagtagagttgtatactttttcataagatgtttgggaatttttttcctgaagtaataatttattccacatctacatcagtgaaagctatctacctatcctgagtctatcttaaaggaaaaaaagaaaaaaaccttatctcttgcccttattttgaattttccactctttcattaatttgttttaagctccgtgttggaaaaaaggggtagtgcattttaaattgaccttcatacgcttttaaaataagacaaatctacttgataatgtacctttatttgatctcaagttgtataaaaccaataaatttgtgttactgcagtagtaatcttatgcacacggtgatttcatgttatatatgcaaagtaggcaactgttttcttagttacagaagtttcaagcttcacttttgtgcagtagaaacaaaagtaggctacagtctgtgccatgttgatgtacagtttctgaaattgttttacaagactttgataataaaacccttaaactta

SEQ ID NO: 180201 - DNA, 3784 bp, Homo sapiens
  Payload ID: 15498
  Gene Symbol: SRSF11
  Gene Name: serine/arginine-rich splicing factor 11
  Uniprot ID: Q05519
  ENST ID: ENST00000370950
  CDS Start-End: 83-1537
agagaagccttttccgttgccggtgccggcctagcgtcctggaattacttcaatcaacaggagcgagaacccgagcagcgccatgagcaacactaccgtcgtccccagcactgcaggtccgggccccagcggcgggcccggtggcggaggtggtggtggcggcggaggcggcggcaccgaggtaatccaggtgactaatgtctccccgagcgctagctctgagcagatgcggactctcttcggtttcctaggcaagatcgacgaactgcgcctcttcccgccggatgattcgcctttgccagtctcatctcgtgtctgctttgttaagttccatgatccagactcagcagttgtggcacagcatctgacaaacactgtattcgttgacagagctttgatagtcgtaccatatgcagaaggagttattcctgatgaagctaaagctttgtctctgttggcaccagctaatgcagtggcaggtcttctgcctggtggtggactcctgcctactcctaacccacttacccagattggcgctgttccactggctgctttgggggctcctactcttgatcctgcccttgctgcacttgggcttcctggagcaaacttgaactctcagtctcttgctgcagatcagttgctgaagcttatgagtactgttgatcccaagttgaatcatgtagctgctggtctcgtttcaccaagtctgaaatcggatacctctagtaaagaaatagaggaagctatgaaaagagtacgagaagcacagtccctaatttctgctgctatagaaccagataagaaagaagaaaaaagaaggcattcaagatcaagatcacgttctaggaggaggaggactccctcatcttctagacacaggcggtcaagaagcagatcgagacggcggtcacattctaagtctaggagtcggcgacgatccaaaagcccaaggcggagaagatctcattccagagaaagaggtagaaggtcaaggagcacatcaaaaacaagagacaaaaagaaagaagacaaagaaaagaaacgttctaaaacaccaccaaaaagttacagcacagccagacgttctagaagtgcaagcagagagagacgacgacgaagaagcaggagtggcacaagatctcctaaaaagcctcggtctcctaaaagaaaattgtcccgctcaccatcccctaggagacataaaaaggagaagaagaaagataaagacaaagaaagaagtagggatgaaagagaacgatcaacaagcaagaagaagaagagtaaagataaggaaaaggaccgggaaagaaaatcagagagtgataaagatgtaaaacaggttacacgggattatgatgaagaggaacaggggtatgacagtgagaaagagaaaaaagaagagaagaaaccaatagaaacaggttcccctaaaacaaaggaatgttctgtggaaaagggaactggtgattcactaagagaatccaaagtgaatggggatgatcatcatgaagaagacatggatatgagtgactgaatattgcctctgagggagtccaactgtatacctgcatcagtgtcattcctttgtgtgatttcttaatgctgtatttgttcatctcaaacctagatgtatacagctctgagttataaatggttataaagctcctgttactcatattagttatttacatcaaaaagcttttagaaaatggtacgaggtaaccaattcttgtcatggtgaaatctgattgagtaaccaagcagttttactattctggtgctgcttcataacaaaaatgaaaagctgcatgcatctacagcaggcatggattgtttatgtcgtatgatatcctttattaagtaagttcacttatagtatttctataatttgattcattgccgtaatagagccatgtaggaaatgcactgattgcatgttattgtggcaagaatatcctaaatgtcattaaaatcctccaacatgatggatctacttatggtcttgtttgttgacatgacaaattaacattcttatagttacatctggaaatgagcatttgaaatagataatcctttaagccttgtggcaaaatttttgtggcttttgtttaactttgaaaggttattatgcactaaccttttttggtggctaattagggtttaaatacagaaacaagatttcaaataaaactgtctttggcagtgagtaaatagcatattttgaagtagagttgtatactttttcataagatgtttgggaatttttttcctgaagtaataatttattccacatctacatcagtgaaagctatctacctatcctgagtctatcttaaaggaaaaaaagaaaaaaaccttatctcttgcccttattttgaattttccactctttcattaatttgttttaagctccgtgttggaaaaaaggggtagtgcattttaaattgaccttcatacgcttttaaaataagacaaatctacttgataatgtacctttatttgatctcaagttgtataaaaccaataaatttgtgttactgcagtagtaatcttatgcacacggtgatttcatgttatatatgcaaagtaggcaactgttttcttagttacagaagtttcaagcttcacttttgtgcagtagaaacaaaagtaggctacagtctgtgccatgttgatgtacagtttctgaaattgttttacaagactttgataataaaacccttaaacttatgttcatgttcctgtaaaaccgtatttgtatttatttacgctactgaatgtatgacatttacctcattcattttacaaattctttccctttctgtccacatatttcagtatagtaaaaagaggaagtctatcactgtagtgataattgccatcaaaattgtcaaaaatgatttaatttctatccaaaatagtccttttcttagcttagtatcattttattgcttattttttgtgtgggaatggggttggataaagcaatgaactttagtataaacaaatcccacctatatctagcaaatttatattttcggtgaaatacagatatttgcctttctggagtagtatagaagctgtcaatatgtatctactgtacagtactaaatagtattcatttatgaaatgagtagtgtttgggtggctggggttaagggaaaatgagacttggaattgtagcttttatccaagttttgagtataaatagggttttgttttgttttttttaacctaaaaactgaaatgccatatagaaaaacagcattgtttttacagtttgtagtaagtaactttttaaagattttatcaaaaagaattgtctatagtgagtaaaagaagttctaataatggtcctaatcactgcatttttaaaaaacaaagttcaacacaaatgacatttgttttaaactttagtagataaaaggtgaaccatgtgacatgggcatttttgtaagtcaaaaacaaatttcacatatggtaaacctaatattcacagtgtgttccctcacttgtaatctctgaatacaaatatactagcttttctaaagggaatcatttttttaaaagtagtgccactgacaagatgctacagtgaagattatccattcttaggatatttattttcagtgaacattttctgcacaaaggtagtgttgcactgggacacaagccttttaacagataaccagttgaaatcaaacactgcctccacaccgagttctgttgtgtatttgatagtaaattgatttaaaaataaaagtggtttttgttagaaaaa

SEQ ID NO: 180202 - DNA, 2385 bp, Homo sapiens
  Payload ID: 15498
  Gene Symbol: SRSF11
  Gene Name: serine/arginine-rich splicing factor 11
  Uniprot ID: Q05519
  ENST ID: ENST00000370951
  CDS Start-End: 122-1573
gcagtccagatgtcgtcagcaccagcgcctgggctggaggacagagaagccttttccgttgccggtgccggcctagcgtcctggaattacttcaatcaagagcgagaacccgagcagcgccatgagcaacactaccgtcgtccccagcactgcaggtccgggccccagcggcgggcccggtggcggaggtggtggtggcggcggaggcggcggcaccgaggtaatccaggtgactaatgtctccccgagcgctagctctgagcagatgcggactctcttcggtttcctaggcaagatcgacgaactgcgcctcttcccgccggatgattcgcctttgccagtctcatctcgtgtctgctttgttaagttccatgatccagactcagcagttgtggcacagcatctgacaaacactgtattcgttgacagagctttgatagtcgtaccatatgcagaaggagttattcctgatgaagctaaagctttgtctctgttggcaccagctaatgcagtggcaggtcttctgcctggtggtggactcctgcctactcctaacccacttacccagattggcgctgttccactggctgctttgggggctcctactcttgatcctgcccttgctgcacttgggcttcctggagcaaacttgaactctcagtctcttgctgcagatcagttgctgaagcttatgagtactgttgatcccaagttgaatcatgtagctgctggtctcgtttcaccaagtctgaaatcggatacctctagtaaagaaatagaggaagctatgaaaagagtacgagaagcacagtccctaatttctgctgctatagaaccagataagaaagaagaaaaaagaaggcattcaagatcaagatcacgttctaggaggaggaggactccctcatcttctagacacaggcggtcaagaagcagatcgagacggcggtcacattctaagtctaggagtcggcgacgatccaaaagcccaaggcggagaagatctcattccagagaaagaggtagaaggtcaaggagcacatcaaaaacaagagacaaaaagaaagaagacaaagaaaagaaacgttctaaaacaccaccaaaaagttacagcacagccagacgttctagaagtgcaagcagagagagacgacgacgaagaagcaggagtggcacaagatctcctaaaaagcctcggtctcctaaaagaaaattgtcccgctcaccatcccctaggagacataaaaaggagaagaagaaagataaagacaaagaaagaagtagggatgaaagagaacgatcaacaagcaagaagaagaagagtaaagataaggaaaaggaccgggaaagaaaatcagagagtgataaagatgtaaaagttacacgggattatgatgaagaggaacaggggtatgacagtgagaaagagaaaaaagaagagaagaaaccaatagaaacaggttcccctaaaacaaaggaatgttctgtggaaaagggaactggtgattcactaagagaatccaaagtgaatggggatgatcatcatgaagaagacatggatatgagtgactgaatattgcctctgagggagtccaactgtatacctgcatcagtgtcattcctttgtgtgatttcttaatgctgtatttgttcatctcaaacctagatgtatacagctctgagttataaatggttataaagctcctgttactcatattagttatttacatcaaaaagcttttagaaaatggtacgaggtaaccaattcttgtcatggtgaaatctgattgagtaaccaagcagttttactattctggtgctgcttcataacaaaaatgaaaagctgcatgcatctacagcaggcatggattgtttatgtcgtatgatatcctttattaagtaagttcacttatagtatttctataatttgattcattgccgtaatagagccatgtaggaaatgcactgattgcatgttattgtggcaagaatatcctaaatgtcattaaaatcctccaacatgatggatctacttatggtcttgtttgttgacatgacaaattaacattcttatagttacatctggaaatgagcatttgaaatagataatcctttaagccttgtggcaaaatttttgtggcttttgtttaactttgaaaggttattatgcactaaccttttttggtggctaattagggtttaaatacagaaacaagatttcaaataaaactgtctttggcagtgagtaaatagcatattttgaagtagagttgtatactttttcataagatgtttgggaatttttttcctgaagtaataatttattccacatctacatcagtgaaagctatctacctatcctgagtctatcttaaaggaaaaaaa

SEQ ID NO: 180203 - DNA, 1408 bp, Homo sapiens
  Payload ID: 15498
  Gene Symbol: SRSF11
  Gene Name: serine/arginine-rich splicing factor 11
  ENST ID: ENST00000395136
  CDS Start-End: 242-1408
gcgaggtggggcggccgtttgttttctcgtggtctcgagctcgcgcgctctcatcccctcccccgcggcgtgcggcggggcggagaaacggcggcggcggcggcggcatcggcagcagtagcagaggctgtagcatcggacaccctcctctctcccgcaatccggttcctcttccccctccttctcactgtttgttgtgtgtttgatgtgttaaagcaggagcgagaacccgagcagcgccatgagcaacactaccgtcgtccccagcactgcaggtccgggccccagcggcgggcccggtggcggaggtggtggtggcggcggaggcggcggcaccgaggtaatccaggtgactaatgtctccccgagcgctagctctgagcagatgcggactctcttcggtttcctaggcaagatcgacgaactgcgcctcttcccgccggatgattcgcctttgccagtctcatctcgtgtctgctttgttaagttccatgatccagactcagcagttgtggcacagcatctgacaaacactgtattcgttgacagagctttgatagtcgtaccatatgcagaaggagttattcctgatgaagctaaagctttgtctctgttggcaccagctaatgcagtggcaggtcttctgcctggtggtggactcctgcctactcctaacccacttacccagattggcgctgttccactggctgctttgggggctcctactcttgatcctgcccttgctgcacttgggcttcctggagcaaacttgaactctcagtctcttgctgcagatcagttgctgaagcttatgagtactgttgatcccaagttgaatcatgtagctgctggtctcgtttcaccaagtctgaaatcggatacctctagtaaagaaatagaggaagctatgaaaagagtacgagaagcacagtccctaatttctgctgctatagaaccagataagaaagaagaaaaaagaaggcattcaagatcaagatcacgttctaggaggaggaggactccctcatcttctagacacaggcggtcaagaagcagatcgagacggcggtcacattctaagtctaggagtcggcgacgatccaaaagcccaaggcggagaagatctcattccagagaaagaggtagaaggtcaaggagcacatcaaaaacaagagacaaaaagaaagaagacaaagaaaagaaacgttctaaaacaccaccaaaaagttacagcacagccagacgttctagaagtgcaagcagtttgcacatttgtgattctagagagagacgacgacgaagaagcaggagtggcacaagatctcctaaaaagcctcggtctcctaaaagaaaattgtcccgctcaccatcccctaggagacataaaaaggagaagaagaaagataaa

SEQ ID NO: 180204 - DNA, 796 bp, Homo sapiens
  Payload ID: 15498
  Gene Symbol: SRSF11
  Gene Name: serine/arginine-rich splicing factor 11
  ENST ID: ENST00000473950
  CDS Start-End: 169-411
ggcggggcggagaaacggcggcggcggcggcggcatcggcagcagtagcagaggctgtagcatcggacaccctcctctctcccgcaatccggttcctcttccccctccttctcactgtttgttgtgtgtttgatgtgttaaagcaggagcgagaacccgagcagcgccatgagcaacactaccgtcgtccccagcactgcaggtccgggccccagcggcgggcccggtggcggaggtggtggtggcggcggaggcggcggcaccgaggtaatccaggtgactaatgtctccccgagcgctagctctgagcagatgcggactctcttcggtttcctaggcaagatcgacgaactgcgcctcttcccgccggattccatgatccagactcagcagttgtggcacagcatctgacaaacactgtattcgttgacagagctttgatagtcgtaccatatgcagaagttcttttccctggttcagcctgaactatataccaggccctgctgaaaataccacccaacagttttcttctgcagcttatccagtttctcttaagtgccctgtacatatttgaagcagccgacacgagtcgttgttcataaaacagcttttgaaagttgagagcacacccctggagaaccgactgtgcttgcttacgtttggttcatgacttaaaaatcgagtacaggagttattcctgatgaagctaaagctttgtctctgttggcaccagctaatgcagtggcaggtcttctgcctggtggtggactcctgcctactcctaacccacttaccc

SEQ ID NO: 180205 - DNA, 760 bp, Homo sapiens
  Payload ID: 15498
  Gene Symbol: SRSF11
  Gene Name: serine/arginine-rich splicing factor 11
  ENST ID: ENST00000475204
  CDS Start-End: 54-440
cgggcccgctagtgtcgtggttggaggcgaggagcgagaacccgagcagcgccatgagcaacactaccgtcgtccccagcactgcaggtccgggccccagcggcgggcccggtggcggaggtggtggtggcggcggaggcggcggcaccgaggtaatccaggtgactaatgtctccccgagcgctagctctgagcagatgcggactctcttcggtttcctaggcaagatcgacgaactgcgcctcttcccgccggatgattcgcctttgccagtctcatctcgtgtctgctttgttaagttccatgatccagactcagcagttgtggcacagcatctgacaaacactgtattcgttgacagagctttgatagtcgtaccatatgcagaagtgaagcagccgacacgagtcgttgttcataaaacagcttttgaaagttgagagcacacccctggagaaccgactgtgcttgcttacgtttggttcatgacttaaaaatcgagtacaggagttattcctgatgaagctaaagctttgtctctgttggcaccagctaatgcagtggcaggtcttctgcctggtggtggactcctgcctactcctaacccacttacccagattggcgctgttccactggctgctttgggggctcctactcttgatcctgcccttgctgcacttgggcttcctggagcaaacttgaactctcagtctcttgctgcagatcagttgctgaagcttatgagtactgttgatcccaa

SEQ ID NO: 180206 - DNA, 3599 bp, Homo sapiens
  Payload ID: 15499
  Gene Symbol: SRSF12
  Gene Name: serine/arginine-rich splicing factor 12
  Uniprot ID: Q8WXF0
  ENST ID: ENST00000452027
  CDS Start-End: 195-980
ccgtgcgtccaggctggcgccgcgctgcgccccctctgcgccggcctctgcggctgcgcgctggcggggctgaggccgaggggtgggggtcgcgccgggggccggcggagctcctgtggtggtagcagcggtagcgggagacggagcgagtccagcggccgcgggcagacccggagggaacggaggaagcggtcatgtctcgctacacgaggccccccaacacctccctgttcatcaggaacgtcgcggacgccaccaggcctgaggacttgcgccgtgagtttggtcgatatggccctatagtagacgtttacattccacttgacttctacactcgccgcccaagaggatttgcttatgttcaatttgaagatgttcgagatgctgaagatgctctttataacctcaatagaaagtgggtatgtggccgtcagattgaaatacagtttgcacaaggtgatcgcaaaacaccaggccaaatgaaatcaaaagaacgtcatccttgttctccaagtgatcacaggagatcaagaagccccagccaaagaagaactcgaagtagaagttcttcatggggaagaaataggaggcggtcagacagccttaaagagtctcgacacaggcgattttcttatagccagtctaaatctcgttccaaatcattaccaaggcggtctacctcagcaaggcagtcaagaactccaagaaggaattttggctctagaggacggtcaaggtccaagtccttacaaaagaggtccaagtcaataggaaaatcacagtcaagttcacctcaaaagcagactagctcaggaacaaaatcaagatcacatggaagacattctgactcaatagcaagatccccgtgtaaatctcccaaagggtataccaattctgaaactaaagtacaaacagcaaagcattctcattttcggtcacattccagatctcgaagttatcgtcataaaaacagttggtgaacagcaacagaaagagcaccacgccgtctttaatataagttattaaactctcattatgttaaataaaaattctttaaggcatacagaaaatgcgagttgatattagttactttgggcatatggaagaaataaaatctctagctttggattaataaaaatttggtctccatttaaagggcccacactacaaattatgatttgtctaatgtcaccattttatggaccattttttatttacattgtggcagaagggtacttttcaagggaaatgagtaaactggaactaatttttaaaattctacttgcatagtattagtactattaataataccttttacacaaatatttttgactttaaagcactttcatgtaaaaagtaactatgactgtataattgcatagagcagacttaagctgtttgacacctatgtctcttttgtgtcttctgtttaaacttgggccaattcctggtggatattagttcatattacaaaattctgatgttccaaaaagtagaatatatatagagatcaaacattcaaaagatacattctctcctaagctcaaaggttatatttttattgggtagaacagtataggtaagttgacatgaaattgcatcctgcaccatgaccacattagtaatatcagaacttttgagaaatactggattttgaatggtttgagactaattctttaaaaattaggctgagcaacactcacaatccaaaaatattcatattaagacttacacatttgaagaatggtacattttgtataaaatcatatttgataccattatttccacatacctacttttcatctgttgcttaattttttctttttagagttcttgctcaactttatatggaacaagtcttattatttttgaaagagtgtttagtaccttgtattaagaaacttggccaagcgtggtggttcactcctgtaatcccagcactttgggaggtcgaggcgggcagattgcttgaggccaggagattgagaccagcctgggcaacatggtgaaatcctgtctctaaaatttaaaaaaaagaagaagaagaaactcgagactacatcttcaaaaaacaactttgcagtatttgaattttacattatactgcccttcatttctgacagccaaataactttattgatatttattgcttttgtagttgttataactaataatttctttgaaaatgtgttgtagtttatgtttttcaaagggttttggtagtgtttgtgatagaatggttttgcatatgattattataggggatatatttatagagctctacttgtatactttgtgacttacattatgaaaacttcaaagttctcaatccatacagttagtatttgtatccagagtgtttaagaaaaaaatctgtcttatatttttagtatataggagccagtgttgcttctatttgttttgaatacaaattccagttttctttgcatattagatcccatatgtaagaaacaaccttaaacaataatttgtatgctggtaatatttggacaagtgccataaattaatgtatattgtactttctgaatagattttctctaatcatagcaaaatttatttcaaaactacaactctttgaattattccgctataataaaatttagttataaaattatgtggcactactgaaaatctaaaggataatctgaagaatgagtaagacagatattgatagaaatttttagtattttcagaatgtttgggttcatacacataagtgaaatcattttaaaaactaggggctgggcacagtggctcacaccagtaatcctagcactttgggaggccaaggcaggaggattgcttgagcccaggagtttgagaccagcctgggcaacatagcaagacccctttatctataaaaataataataactaggtaccattgtgaaaaataataactagggattgattatagtatctttactctgtattcacaaatctctgtattcctgaacatatttaatcctttgatttacctctgactaggtttgtcattgtaatccctgggctgcttaggaggataccatttggtttgatgaaaaagctggaatgataatagctcaaactcttttgagcatttagtacatgcttggcactgttctatatgtcttaagttattcactcttgtatttaaccatcaacactcttatgaggtaaatatcccgcaattacttttgcgccaacctagtaccactacagacaaggaaacagatgcagagaggctaagttacaagggcacacagccataaactttggatctgtggagtgactgggcttcagagtcctcttcctgactgctgttcctatgtcttttgcaaagagaagtctttgacaggtatatgctttattaaaatcatgtttagaaagaaatgagagaatagaattagaaaaaggaatgactgtaggcttcgatgaaaatgacttttgtgactaggtgaaaattgtttggctgggtatcctggaaaattgtcttctgggaatatctatattccagggttcacttttgtcatagaattgtttcttggcccatttaagagagatactttgtttattaataaatcaaacgttttaatttta

SEQ ID NO: 180207 - DNA, 567 bp, Homo sapiens
  Payload ID: 15499
  Gene Symbol: SRSF12
  Gene Name: serine/arginine-rich splicing factor 12
  ENST ID: ENST00000517387
  CDS Start-End: 89-214
ggagctcctgtggtggtagcagcggtagcgggagacggagcgagtccagcggccgcgggcagacccggagggaacggaggaagcggtcatgtctcgctacacgaggccccccaacacctccctgttcatcaggaacgtcgcggacgccaccagatctaaagcagtccacagtagctggcaagcaccccccagtttgaaccaacctgttagctagaatccaagcataaacccagcaggcgagacaaaaggcacctaaagttcaagcatcaaggagtaaagagggagggtggacacagatataaagacctggaagaggggaagtctttatcaagcaaaagacaaagccaacaccaggttgagacttcggctttcctacatttactcagagttccagagtcaaagccaagtctgattttgttggttctgcgtctcttataaagtccatcttgcaagccttaaagagtaaaggtcaaggttcaagatcaagtgacattgagtgtccttaacagctagtcatatttgaagatgttcgagatgctgaagatgctctttataacctcaatagaa

SEQ ID NO: 180208 - DNA, 758 bp, Homo sapiens
  Payload ID: 15499
  Gene Symbol: SRSF12
  Gene Name: serine/arginine-rich splicing factor 12
  ENST ID: ENST00000475068
  CDS Start-End: 119-247
cgaggggtgggggtcgcgccgggggccggcggagctcctgtggtggtagcagcggtagcgggagacggagcgagtccagcggccgcgggcagacccggagggaacggaggaagcggtcatgtctcgctacacgaggccccccaacacctccctgttcatcaggaacgtcgcggacgccaccagaagatctaaagcagtccacagtagctggcaagcaccccccagtttgaaccaacctgttagctagaatccaagcataaacccagcaggcgagacaaaaggcacctaaagttcaagcatcaaggagtaaagagggagggtggacacagatataaagacctggaagaggggaagtctttatcaagcaaaagacaaagccaacaccaggttgagacttcggctttcctacatttactcagagttccagagtcaaagccaagtctgattttgttggttctgcgtctcttataaagtccatcttgcaagccttaaagagtaaaggtcaaggttcaagatcaagtgacattgagctagtcatatttgaagatgttcgagatgctgaagatgctctttataacctcaatagaaagtgggtatgtggccgtcagattgaaatacagtttgcacaaggtgatcgcaaaacaccaggccaaatgaaatcaaaagaacgtcatccttgttctccaagtgatcacaggagatcaagaagccccagccaaagaagaactcgaagtagaagttcttcatggggaagaaat

SEQ ID NO: 180209 - DNA, 572 bp, Homo sapiens
  Payload ID: 15500
  Gene Symbol: SRSF2
  Gene Name: serine/arginine-rich splicing factor 2
  ENST ID: ENST00000358156
  CDS Start-End: 172-572
agttgttactcaggtgcgctagcctgcggagcccgtccgtgctgttctgcggcaaggcctttcccagtgtccccacgcggaaggcaactgcctgagaggcgcggcgtcgcaccgcccagagctgaggaagccggcgccagttcgcggggctccgggccgccactcagagctatgagctacggccgcccccctcccgatgtggagggtatgacctccctcaaggtggacaacctgacctaccgcacctcgcccgacacgctgaggcgcgtcttcgagaagtacgggcgcgtcggcgacgtgtacatcccgcgggaccgctacaccaaggagtcccgcggcttcgccttcgttcgctttcacgacaagcgcgacgctgaggacgctatggatgccatggacggggccgtgctggacggccgcgagctgcgggtgcaaatggcgcgctacggccgccccccggactcacaccacagccgccggggaccgccaccccgcaggtacgggggcggtggctacggacgccggagccgcagccgatcccggagtcggagtcgttccaggtctcgcagccg

SEQ ID NO: 180210 - DNA, 1927 bp, Homo sapiens
  Payload ID: 15500
  Gene Symbol: SRSF2
  Gene Name: serine/arginine-rich splicing factor 2
  Uniprot ID: Q01130
  ENST ID: ENST00000359995
  CDS Start-End: 215-880
gtgaggagcgatataaacgggcgcagaggccggctgcccgcccagttgttactcaggtgcgctagcctgcggagcccgtccgtgctgttctgcggcaaggcctttcccagtgtccccacgcggaaggcaactgcctgagaggcgcggcgtcgcaccgcccagagctgaggaagccggcgccagttcgcggggctccgggccgccactcagagctatgagctacggccgcccccctcccgatgtggagggtatgacctccctcaaggtggacaacctgacctaccgcacctcgcccgacacgctgaggcgcgtcttcgagaagtacgggcgcgtcggcgacgtgtacatcccgcgggaccgctacaccaaggagtcccgcggcttcgccttcgttcgctttcacgacaagcgcgacgctgaggacgctatggatgccatggacggggccgtgctggacggccgcgagctgcgggtgcaaatggcgcgctacggccgccccccggactcacaccacagccgccggggaccgccaccccgcaggtacgggggcggtggctacggacgccggagccgcagccctaggcggcgtcgccgcagccgatcccggagtcggagtcgttccaggtctcgcagccgatctcgctacagccgctcgaagtctcggtcccgcactcgttctcgatctcggtcgacctccaagtccagatccgcacgaaggtccaagtccaagtcctcgtcggtctccagatctcgttcgcggtccaggtcccggtctcggtccaggagtcctcccccagtgtccaagagggaatccaaatccaggtcgcgatcgaagagtccccccaagtctcctgaagaggaaggagcggtgtcctcttaagaaaatgatgtatcggcaagcagtgtaaacggaggacttggggaaaaaggaccacatagtccatcgaagaagagtccttggaacaagcaactggctattgaaaaggttattttgtaacatttgtctaactttttacttgtttaagctttgcctcagttggcaaacttcattttatgtgccattttgttgctgttattcaaatttcttgtaatttagtgaggtgaacgacttcagatttcattattggatttggatatttgaggtaaaatttcattttgttatatagtgctgactttttttgtttgaaattaaacagattggtaacctaatttgtggcctcctgacttttaaggaaaacgtgtgcagccattacacacagcctaaagctgtcaagagattgactcagcattgccttcattccttaaaattaaaaacctacaaaagttggtgtaaatttgtatatgttatttaccttcagatctaaatggtaatctgaacccaaatttgtataaagacttttcaggtgaaaagacttgattttttgaaaggattgtttatcaaacacaattctaatctcttctcttatgtatttttgtgcactaggcgcagttgtgtagcagttgagtaatgctggttagctgttaaggtggcgtgttgcagtgcagagtgcttggctgtttcctgttttctcccgattgctcctgtgtaaagatgccttgtcgtgcagaaacaaatggctgtccagtttattaaaatgcctgacaactgcacttccagtcacccgggccttgcatataaataacggagcatacagtgagcacatctagctgatgataaatacacctttttttccctcttccccctaaaaatggtaaatctgatcatatctacatgtatgaacttaacatggaaaatgttaaggaagcaaatggttgtaactttgtaagtacttataacatggtgtatctttttgcttatgaatattctgtattataaccattgtttctgtagtttaattaaaacattttcttggtgttagcttttctc

SEQ ID NO: 180211 - DNA, 2885 bp, Homo sapiens
  Payload ID: 15500
  Gene Symbol: SRSF2
  Gene Name: serine/arginine-rich splicing factor 2
  Uniprot ID: Q01130
  ENST ID: ENST00000392485
  CDS Start-End: 174-839
ccagttgttactcaggtgcgctagcctgcggagcccgtccgtgctgttctgcggcaaggcctttcccagtgtccccacgcggaaggcaactgcctgagaggcgcggcgtcgcaccgcccagagctgaggaagccggcgccagttcgcggggctccgggccgccactcagagctatgagctacggccgcccccctcccgatgtggagggtatgacctccctcaaggtggacaacctgacctaccgcacctcgcccgacacgctgaggcgcgtcttcgagaagtacgggcgcgtcggcgacgtgtacatcccgcgggaccgctacaccaaggagtcccgcggcttcgccttcgttcgctttcacgacaagcgcgacgctgaggacgctatggatgccatggacggggccgtgctggacggccgcgagctgcgggtgcaaatggcgcgctacggccgccccccggactcacaccacagccgccggggaccgccaccccgcaggtacgggggcggtggctacggacgccggagccgcagccctaggcggcgtcgccgcagccgatcccggagtcggagtcgttccaggtctcgcagccgatctcgctacagccgctcgaagtctcggtcccgcactcgttctcgatctcggtcgacctccaagtccagatccgcacgaaggtccaagtccaagtcctcgtcggtctccagatctcgttcgcggtccaggtcccggtctcggtccaggagtcctcccccagtgtccaagagggaatccaaatccaggtcgcgatcgaagagtccccccaagtctcctgaagaggaaggagcggtgtcctcttaagaaaatggtaatgtctgggaatccgagacacataaccctaattcataaatgggatttggggtaggtctttttgagtcgtgttaatgtaagaatgactcctatcattaggagtgctgctcggaggttactcacctttgggagtaatactgaagagaggggtctgcagaaaggatgtgtatgaagcttagataataatggctgtttcgtaaactgtttgagacctattaatgaaaatgactatttcttgctgtttttatccaacgtctgcattttccccctttaaagctgcggtctcctgtttgataaaagaatattggccagtattgcagattttaactgatttggctgatcctccagggaccagtttctgtgggcgtgtattggagcaggtttgtctttaaatgttaaagatgcactatcctcttagagaaacaatcagttcaactattgttgtactgactgggacttcatattctaatggatgtggcaaaagaattgcaataagaagcagtgaacatttggaaccccaaaagaaagttacaggtattgcactgggtggggaaaggatagtgtgtctttaactcttaaattgtttggtcctattttttaaaaaggaaagggccctaagtagctcagatattaaagtagtattctcaattaccaaatgtttcatttgaaacaatttatcttaatgaaatatagaccaattctctgatctcgagttgtttttgtttggatacagcccttttttttttctttttttttcttccccttacctttcttcaccttggttatttggccaggaatacgtaaattcaaacttgtacatgctgatggtagcctttgtgaaattttcctaattgggccttttaaaaacatggctgggtggaacatttctgtaccctactggtttgaccagagccttagtaagtacgtgcctgaaactgaaaccatgtgcactttaatggaaggtaagctgaacttctttcttttcaaacctagatgtatcggcaagcagtgtaaacggaggacttggggaaaaaggaccacatagtccatcgaagaagagtccttggaacaagcaactggctattgaaaaggttattttgtaacatttgtctaactttttacttgtttaagctttgcctcagttggcaaacttcattttatgtgccattttgttgctgttattcaaatttcttgtaatttagtgaggtgaacgacttcagatttcattattggatttggatatttgaggtaaaatttcattttgttatatagtgctgactttttttgtttgaaattaaacagattggtaacctaatttgtggcctcctgacttttaaggaaaacgtgtgcagccattacacacagcctaaagctgtcaagagattgactcagcattgccttcattccttaaaattaaaaacctacaaaagttggtgtaaatttgtatatgttatttaccttcagatctaaatggtaatctgaacccaaatttgtataaagacttttcaggtgaaaagacttgattttttgaaaggattgtttatcaaacacaattctaatctcttctcttatgtatttttgtgcactaggcgcagttgtgtagcagttgagtaatgctggttagctgttaaggtggcgtgttgcagtgcagagtgcttggctgtttcctgttttctcccgattgctcctgtgtaaagatgccttgtcgtgcagaaacaaatggctgtccagtttattaaaatgcctgacaactgcacttccagtcacccgggccttgcatataaataacggagcatacagtgagcacatctagctgatgataaatacacctttttttccctcttccccctaaaaatggtaaatctgatcatatctacatgtatgaacttaacatggaaaatgttaaggaagcaaatggttgtaactttgtaagtacttataacatggtgtatctttttgcttatgaatattctgtattataaccattgtttctgtagtttaattaaaacattttcttggtgttagcttttctcagaa

SEQ ID NO: 180212 - DNA, 1357 bp, Homo sapiens
  Payload ID: 15500
  Gene Symbol: SRSF2
  Gene Name: serine/arginine-rich splicing factor 2
  Uniprot ID: Q01130
  ENST ID: ENST00000452355
  CDS Start-End: 172-837
agttgttactcaggtgcgctagcctgcggagcccgtccgtgctgttctgcggcaaggcctttcccagtgtccccacgcggaaggcaactgcctgagaggcgcggcgtcgcaccgcccagagctgaggaagccggcgccagttcgcggggctccgggccgccactcagagctatgagctacggccgcccccctcccgatgtggagggtatgacctccctcaaggtggacaacctgacctaccgcacctcgcccgacacgctgaggcgcgtcttcgagaagtacgggcgcgtcggcgacgtgtacatcccgcgggaccgctacaccaaggagtcccgcggcttcgccttcgttcgctttcacgacaagcgcgacgctgaggacgctatggatgccatggacggggccgtgctggacggccgcgagctgcgggtgcaaatggcgcgctacggccgccccccggactcacaccacagccgccggggaccgccaccccgcaggtacgggggcggtggctacggacgccggagccgcagccctaggcggcgtcgccgcagccgatcccggagtcggagtcgttccaggtctcgcagccgatctcgctacagccgctcgaagtctcggtcccgcactcgttctcgatctcggtcgacctccaagtccagatccgcacgaaggtccaagtccaagtcctcgtcggtctccagatctcgttcgcggtccaggtcccggtctcggtccaggagtcctcccccagtgtccaagagggaatccaaatccaggtcgcgatcgaagagtccccccaagtctcctgaagaggaaggagcggtgtcctcttaagaaaatgctgcggtctcctgtttgataaaagaatattggccagtattgcagattttaactgatttggctgatcctccagggaccagtttctgtgggcgtgtattggagcagatgtatcggcaagcagtgtaaacggaggacttggggaaaaaggaccacatagtccatcgaagaagagtccttggaacaagcaactggctattgaaaaggcgcagttgtgtagcagttgagtaatgctggttagctgttaaggtggcgtgttgcagtgcagagtgcttggctgtttcctgttttctcccgattgctcctgtgtaaagatgccttgtcgtgcagaaacaaatggctgtccagtttattaaaatgcctgacaactgcacttccagtcacccgggccttgcatataaataacggagcatacagtgagcacatctagctgatgataaatacacctttttttccctcttccccctaaaaatggtaaatctgatcatatctacatgtatgaacttaacatggaaaa

SEQ ID NO: 180213 - DNA, 1390 bp, Homo sapiens
  Payload ID: 15500
  Gene Symbol: SRSF2
  Gene Name: serine/arginine-rich splicing factor 2
  Uniprot ID: Q01130
  ENST ID: ENST00000508921
  CDS Start-End: 172-801
agttgttactcaggtgcgctagcctgcggagcccgtccgtgctgttctgcggcaaggcctttcccagtgtccccacgcggaaggcaactgcctgagaggcgcggcgtcgcaccgcccagagctgaggaagccggcgccagttcgcggggctccgggccgccactcagagctatgagctacggccgcccccctcccgatgtggagggtatgacctccctcaaggtggacaacctgacctaccgcacctcgcccgacacgctgaggcgcgtcttcgagaagtacgggcgcgtcggcgacgtgtacatcccgcgggaccgctacaccaaggagtcccgcggcttcgccttcgttcgctttcacgacaagcgcgacgctgaggacgctatggatgccatggacggggccgtgctggacggccgcgagctgcgggtgcaaatggcgcgctacggccgccccccggactcacaccacagccgccggggaccgccaccccgcagccctaggcggcgtcgccgcagccgatcccggagtcggagtcgttccaggtctcgcagccgatctcgctacagccgctcgaagtctcggtcccgcactcgttctcgatctcggtcgacctccaagtccagatccgcacgaaggtccaagtccaagtcctcgtcggtctccagatctcgttcgcggtccaggtcccggtctcggtccaggagtcctcccccagtgtccaagagggaatccaaatccaggtcgcgatcgaagagtccccccaagtctcctgaagaggaaggagcggtgtcctcttaagaaaatgatgtatcggcaagcagtgtaaacggaggacttggggaaaaaggaccacatagtccatcgaagaagagtccttggaacaagcaactggctattgaaaaggttattttgtaacatttgtctaactttttacttgtttaagctttgcctcagttggcaaacttcattttatgtgccattttgttgctgttattcaaatttcttgtaatttagtgaggtgaacgacttcagatttcattattggatttggatatttgaggtaaaatttcattttgttatatagtgctgactttttttgtttgaaattaaacagattggtaacctaatttgtggcctcctgacttttaaggaaaacgtgtgcagccattacacacagcctaaagctgtcaagagattgactcagcattgccttcattccttaaaattaaaaacctacaaaagttggtgtaaatttgtatatgttatttaccttcagatctaaatggtaatctgaacccaaatttgtataaagacttttcaggtgaaaagacttgattttttgaaaggattgtttatcaaacacaattctaatctcttctcttatgta

SEQ ID NO: 180214 - DNA, 1359 bp, Homo sapiens
  Payload ID: 15500
  Gene Symbol: SRSF2
  Gene Name: serine/arginine-rich splicing factor 2
  Uniprot ID: Q01130
  ENST ID: ENST00000585202
  CDS Start-End: 149-814
ctgcggagcccgtccgtgctgttctgcggcaaggcctttcccagtgtccccacgcggaaggcaactgcctgagaggcgcggcgtcgcaccgcccagagctgaggaagccggcgccagttcgcggggctccgggccgccactcagagctatgagctacggccgcccccctcccgatgtggagggtatgacctccctcaaggtggacaacctgacctaccgcacctcgcccgacacgctgaggcgcgtcttcgagaagtacgggcgcgtcggcgacgtgtacatcccgcgggaccgctacaccaaggagtcccgcggcttcgccttcgttcgctttcacgacaagcgcgacgctgaggacgctatggatgccatggacggggccgtgctggacggccgcgagctgcgggtgcaaatggcgcgctacggccgccccccggactcacaccacagccgccggggaccgccaccccgcaggtacgggggcggtggctacggacgccggagccgcagccctaggcggcgtcgccgcagccgatcccggagtcggagtcgttccaggtctcgcagccgatctcgctacagccgctcgaagtctcggtcccgcactcgttctcgatctcggtcgacctccaagtccagatccgcacgaaggtccaagtccaagtcctcgtcggtctccagatctcgttcgcggtccaggtcccggtctcggtccaggagtcctcccccagtgtccaagagggaatccaaatccaggtcgcgatcgaagagtccccccaagtctcctgaagaggaaggagcggtgtcctcttaagaaaatgatgtatcggcaagcagtgtaaacggaggacttggggaaaaaggaccacatagtccatcgaagaagagtccttggaacaagcaactggctattgaaaaggcgcagttgtgtagcagttgagtaatgctggttagctgttaaggtggcgtgttgcagtgcagagtgcttggctgtttcctgttttctcccgattgctcctgtgtaaagatgccttgtcgtgcagaaacaaatggctgtccagtttattaaaatgcctgacaactgcacttccagtcacccgggccttgcatataaataacggagcatacagtgagcacatctagctgatgataaatacacctttttttccctcttccccctaaaaatggtaaatctgatcatatctacatgtatgaacttaacatggaaaatgttaaggaagcaaatggttgtaactttgtaagtacttataacatggtgtatctttttgcttatgaatattctgtattataaccattgtttctgtagtttaattaaaacattttcttggtgttagcttt

SEQ ID NO: 180215 - DNA, 561 bp, Homo sapiens
  Payload ID: 15500
  Gene Symbol: SRSF2
  Gene Name: serine/arginine-rich splicing factor 2
  ENST ID: ENST00000583836
  CDS Start-End: 172-561
agttgttactcaggtgcgctagcctgcggagcccgtccgtgctgttctgcggcaaggcctttcccagtgtccccacgcggaaggcaactgcctgagaggcgcggcgtcgcaccgcccagagctgaggaagccggcgccagttcgcggggctccgggccgccactcagagctatgagctacggccgcccccctcccgatgtggagggtatgacctccctcaaggtggacaacctgacctaccgcacctcgcccgacacgctgaggcgcgtcttcgagaagtacgggcgcgtcggcgacgtgtacatcccgcgggaccgctacaccaaggagtcccgcggcttcgccttcgttcgctttcacgacaagcgcgacgctgaggacgctatggatgccatggacggggccgtgctggacggccgcgagctgcgggtgcaaatggcgcgctacggccgccccccggactcacaccacagccgccggggaccgccaccccgcagccgatcccggagtcggagtcgttccaggtctcgcagccgatctcgctacagccgctcgaagtct

SEQ ID NO: 180216 - DNA, 4222 bp, Homo sapiens
  Payload ID: 15501
  Gene Symbol: SRSF3
  Gene Name: serine/arginine-rich splicing factor 3
  Uniprot ID: P84103
  ENST ID: ENST00000373715
  CDS Start-End: 117-611
tttcgtggacgccgggtgagtgagagagttggttggtgttgggccggaggaaagcgggaagactcatcggagcgtgtggatttgagccgccgcattttttaaccctagatctcgaaatgcatcgtgattcctgtccattggactgtaaggtttatgtaggcaatcttggaaacaatggcaacaagacggaattggaacgggcttttggctactatggaccactccgaagtgtgtgggttgctagaaacccacccggctttgcttttgttgaatttgaagatccccgagatgcagctgatgcagtccgagagctagatggaagaacactatgtggctgccgtgtaagagtggaactgtcgaatggtgaaaaaagaagtagaaatcgtggcccacctccctcttggggtcgtcgccctcgagatgattatcgtaggaggagtcctccacctcgtcgcagatctccaagaaggagaagcttctctcgcagccggagcaggtccctttctagagataggagaagagagagatcgctgtctcgggagagaaatcacaagccgtcccgatccttctctaggtctcgtagtcgatctaggtcaaatgaaaggaaatagaagacagtttgcaagagaagtggtgtacaggaaattacttcatttgacaggagtatgtacagaaaattcaagttttgtttgagacttcataagcttggtgcatttttaagatgttttagctgttcaaatctgtttgtctcttgaaacagtgacacaaaggtgtaattctctatggtttgaaatggatcatacgaggcatgtaataccaagaattgttactttacaatgttcccttaagcaaaattgaatttgctttgaacttttagttatgcacagactgataataaacctctaaacctgcccagcggaagtgtgtttttttttaaatttaaatacagaaacaactggcaaaaattgaactaagatttacttttttttccatagctgggatataggctgcagctatagttgaacaagcagtctttaaaaactgctgtgaaacacaggccatcagggaaaacgaaatgctgcactattaaattagaggtttttgaaaaatccaactctcatcctgggcagaggttgcctagttggtatagaatgttaagtttcaagaaagtttacctttgctttaggtcataagttccttatttgattgctgtatatggatacatggctgttcgtgacattctttatgtgcaaatttgtgatttcaaaaatgtcctgccagtttaagggtacattgtagagccgaactttgagttactgtgcaagatttttttttcatgctgtcatttgtaatatgttttgtgagaatccttgggattaaagttttggttacaaattgttctttaacttgaaagcctgtttttccttgcaaactcaaatctgtgagcttggtaccaagtccaggtataacattcctattggaagccatacttatattttcttgtaaagtgcttttgaattaataaaatattagcataattgtgtatagtcagttgaacccactgttaccattgttcttatcccatgggaagcagttggttacacgattcttattttataagaaacagctgagaggcactatggattagtcttctgaagtgaaggaaatatagatgtcacctaagtgatagttaacccattttttttttttttaggcatagaagccagttcagggtccataatatttagtgaccaacattttaaagtatagcagcaacctggttcttaaacacaaagtaagttgcccattaacaaatggcttttatctttagcatgaaaactttccacaggtctaaaaattgcttccattttataatttgaggtgttgcatgggaattctaagctgatccatcatgatgtaaaagttcacaatatggttcaaatgtaacagtgcagaattgaatatggaggcatgcataaccttcctcttagaaaatggcaggtgttgtaatttcaaatttttgtgcaattagattaaatcataatgcaacagtcttgtggcttagtttccttaaatatgctcttaagatagttttggattatgcggtattgactgtcttaaatatgaaagataagtcattgcattaagagttcaagctaaatggatacattaagatacagttcctaaacaaattatttatttccaccttttacacaaatcttgggagaattggtgtcaggaaggttcagccttaaagttaagcatgttcaagaaagacacttttcagacagcctgtttatttactgagagctctggcattgggcattttgtctttagtattctcacatagcctacaacctgttcctgttaggaacaagccaagatagctaagaagttacggaagccatgcaatatgtcaattacattgctttttataaatggacaacttatgtgggcatttttgggcagtatatgacttccttgcaggctcttaagttggaagggtttctgtaaaaaggacagttacgggtataatatggctaagagaaataatacagaacctgaaataaaagtaacttcaccagggagttatcctgacttaggtgacatacagtcccagttggcagttactttaaccaggagccctagcataacctcaagactcttagaaactttagaacatggaaattgttaaaagctttgaattgcacatttagattgtggctattaggaatttttaaagttgtaattcctaaaataacaggtcacactaaccggtcttgtccatattcagggttgagtgtaaaaatgaaaggaatcacaaaactgaacttagacctgtggtttaaggatcaaggtgttcactagaagtcactgttactaatacttgatgacaatgtaaagaaacattaaggattatatttgattgttttcaaagacactggctggatgtggtggctcacacttgtaattcctagcactttgggaggctagggcgggtgggaggatctcttgaagccaggagttggagaccagtctgcccaacatggcaagattcacatttctattaaaaggaatatttagtttgatctctggttcacagttcattgtgggttgcttctgacctccatgtcttaagcagaaagtagggaagttgtagttttaccaagcacaggtaccctgtgtctaccatttgagtatcttagagatccttacaaacgtgatcccgtcagcgtccatgacactcccaccctgttagactgctgtcagtggctttcacacaaacccatatgtggatggaaaatccaggttattactacattcattttagtacagtgctgcctaattagaaattttgttgaagaggtatttcagaatagatacagccagactccaggctcattgacttagtttttcagggtgacctaaccctgtgtaattttgaggagttctacatgataaatacccttggtgatgtgagaaccactagtttagtattttgtccaagtatgctttttttcagagttctgaatgagatttagttgtcatacctagttggtggtaatttcttagttgtatatttttgtactaccagattgttgccttctggttttccatcttttcgagaaagatttctagttaaagttactgaagaaaaactgggttggaagtacatttttctctaaataatccagtagtgttgaatttgattttatgtccactctaatttttttcatcctgttttattagggggattcatcgggtacctgaagataattcagctgtagaccccttaaggttctgagacaaggtcattgaaatttgttttggctgggtgtgatggctcatgcctgtaatcccggtgcattgggaggttgaggcaggtggatcacttgtggtcaggagttggagaccagcttggtcaacatggtgaaaccccgtctctactaacagtacaaaaattagctgggtgtggtggcaggcgcctataatgccagccacttgggaggctgaggcaggagaagtgcttaaacctggtgggtggaggttgccatgagccgagatgtagccacttcactccagcctgagtgaaagcaaaacttcgtctccaaaaaaaaaaaaaaagtttgttttggtaagcctagtataattgattagttttgtccatgcaactttccccttgttggactctgtacttaataatacagtatttagattctca

SEQ ID NO: 180217 - DNA, 1095 bp, Homo sapiens
  Payload ID: 15501
  Gene Symbol: SRSF3
  Gene Name: serine/arginine-rich splicing factor 3
  Uniprot ID: P84103
  ENST ID: ENST00000477442
  CDS Start-End: 94-468
gagagttggttggtgttgggccggaggaaagcgggaagactcatcggagcgtgtggatttgagccgccgcattttttaaccctagatctcgaaatgcatcgtgattcctgtccattggactgtaaggtttatgtaggcaatcttggaaacaatggcaacaagacggaattggaacgggcttttggctactatggaccactccgaagtgtgtgggttgctagaaacccacccggctttgcttttgttgaatttgaagatccccgagatgcagctgatgcagtccgagagctagatggaagaacactatgtggctgccgtgtaagagtggaactgtcgaatggtgaaaaaagaagtagaaatcgtggcccacctccctcttggggtcgtcgccctcgagatgattatcgtaggaggagtcctccacctcgtcgcagagtcaccatcatgtctcttctcaccaccctctgaatctgcattagccagtcaactagccctttcagcgtcatgtgaccagcgcgccccattcagcttggctggtgtcgtttcacatgacccaggctggccagtcgtcaggttgcaccgccctttggttcccgagcatgctgttttctctcagccttctctccaaccttaaccaaatcggcagcagccacctcgaccgcccacacattcctggccaatcagctcagctgtttatttaccaaatgtcttcacaacaactacagcagcagccttcggctaacaaaaaagcaggaaaaatccacaacacccccttcgccaaccaactaaatccaacgcaacatctggcaaaaccttttcagcaaattcttcctggccgtcagtccggcagcctcacctcaccatttctagcttgttgaaacccaaaactaatctccaagaaggagaagcttctctcgcagccggagcaggtccctttctagagataggagaagagagagatcgctgtctcgggagagaaatcacaagccgtcccgatccttctctaggtctcgtagtcgatctaggtcaaatgaaaggaaatagaagacagtttgcaagagaagtggtgtacaggaaattacttcatttgacagg

SEQ ID NO: 180218 - DNA, 869 bp, Homo sapiens
  Payload ID: 15501
  Gene Symbol: SRSF3
  Gene Name: serine/arginine-rich splicing factor 3
  Uniprot ID: P84103
  ENST ID: ENST00000620941
  CDS Start-End: 167-661
gtgacgttcagcacggggcggtggcgggggctcccggcccatcggagggtttcctagtcttggagtggaagtctttatattcctcattggggcatgagccaggatgggggttacctgggagttgggaaccacaaaggggagccgatagccgagttgtattccagaaatgcatcgtgattcctgtccattggactgtaaggtttatgtaggcaatcttggaaacaatggcaacaagacggaattggaacgggcttttggctactatggaccactccgaagtgtgtgggttgctagaaacccacccggctttgcttttgttgaatttgaagatccccgagatgcagctgatgcagtccgagagctagatggaagaacactatgtggctgccgtgtaagagtggaactgtcgaatggtgaaaaaagaagtagaaatcgtggcccacctccctcttggggtcgtcgccctcgagatgattatcgtaggaggagtcctccacctcgtcgcagatctccaagaaggagaagcttctctcgcagccggagcaggtccctttctagagataggagaagagagagatcgctgtctcgggagagaaatcacaagccgtcccgatccttctctaggtctcgtagtcgatctaggtcaaatgaaaggaaatagaagacagtttgcaagagaagtggtgtacaggaaattacttcatttgacaggagtatgtacagaaaattcaagttttgtttgagacttcataagcttggtgcatttttaagatgttttagctgttcaaatctgtttgtctcttgaaacagtgacacaaaggtgtaattctctatggtttgaaatggatcatacgaggcatgtaatacca

SEQ ID NO: 180219 - DNA, 595 bp, Homo sapiens
  Payload ID: 15501
  Gene Symbol: SRSF3
  Gene Name: serine/arginine-rich splicing factor 3
  ENST ID: ENST00000613941
  CDS Start-End: 132-419
ggcggtggtccgccatttcgtggacgccgggtgagtgagagagttggttggtgttgggccggaggaaagcgggaagactcatcggagcgtgtggatttgagccgccgcattttttaaccctagatctcgaaatgcatcgtgattcctgtccattggactgtaaggtttatgtaggcaatcttggaaacaatggcaacaagacggaattggaacgggcttttggctactatggaccactccgaagtgtgtgggttgctagaaacccacccggctttgcttttgttgaatttgaagatccccgagatgcagctgatgcagtccgagagctagatggaaggctggagtgcaatggtgtgatcttggctcgttgtaacctctgcctactgggttcaagtgattctcctgcctcagccgcctgagtagctgggattacagaacactatgtggctgccgtgtaagagtggaactgtcgaatggtgaaaaaagaagtagaaatcgtggcccacctccctcttggggtcgtcgccctcgagatgattatcgtaggaggagtcctccacctcgtcgcagagtcaccatcatgtctcttctcacc

SEQ ID NO: 180220 - DNA, 2387 bp, Homo sapiens
  Payload ID: 15502
  Gene Symbol: SRSF4
  Gene Name: serine/arginine-rich splicing factor 4
  Uniprot ID: Q08170
  ENST ID: ENST00000373795
  CDS Start-End: 236-1720
gccgagcgggaagcgaacgcgcgctctctccggttaccttccgcctcggggaagggcgggggaagtggaagcgcgcgctcgcgagctgcgtgctcgcgtacgtcgccggggttcggctgcgtccgtcccgccgcccgcccgttgccgccgccgccgctgccgccgtgctctcgctttgcccgccgccgcctaaggggggctggggccggggccagccatcactgccgttgccgggatgccgcgggtgtacatcggccgcctgagctaccaggcccgggagcgcgatgtggagcgcttctttaagggctacgggaagatcctggaggtggatctgaagaacggatatggttttgtggagtttgatgatctgcgtgatgcagatgatgctgtttatgaactgaatggcaaagacctttgtggtgagcgagtaattgttgagcatgcccgcggcccacggcgagatggcagttacggttctggacgcagtggatatggttatagaagaagtggccgagataaatatggccctcctactcgcacagagtacagacttattgtggagaatttgtcaagtcggtgcagctggcaagacctaaaggattatatgcgtcaggcaggagaagtgacttatgcagatgctcacaagggacgcaaaaatgaaggggtgattgaatttgtatcttattctgatatgaaaagagctttggaaaagttggatggaactgaagtcaatgggagaaaaatcagattagttgaagacaagccaggttccagacgacgccggtcctactccagaagccggagtcattcaaggtctcgctctcgaagcagacattcccgtaagagcagaagccgaagtggcagcagcaaaagcagtcattctaagagtagatctcggtccaggtcgggctcccgctcccggagcaagagccggagccggagccagagtcggagccggagcaagaaagagaaaagcaggagccccagcaaggaaaagagccgcagccgcagccatagcgctggcaagagccgcagcaagagcaaagaccaagctgaagagaagatccaaaacaatgacaatgtcgggaaacccaagagccggagtcctagcaggcataaaagtaagagcaaaagtcggagcaggagtcaggagaggagagtggaggaggagaagcgagggagtgtgagcaggggcaggagccaggagaagagcctccgccagagtcggagccggagcaggagcaaagggggcagcaggagccggagcaggagccgcagcaagagcaaggacaagaggaagggcaggaagagaagcagagaggagagccgcagtcgcagtcgcagccgcagcaagagtgagaggagcagaaagcgaggcagcaagcgagacagcaaggcgggcagcagcaagaagaagaagaaggaagacactgaccgctcccagtccagatctccatcccgctccgtgtcaaaggagcgggaacatgccaagtctgaatccagccagagggaaggtcgaggagagagtgagaatgctggcaccaatcaggagacccggtccaggtcgagatccaattccaaatcgaaaccaaaccttccatcagaatcacgctccagatcaaagtcagcttcaaaaacccgatctcggtccaagtctagatccaggtctgcttccagatcgccctcccgatctagatctaggtcccactcaaggtcctaactggctatggccacagctggaactacccgagaagtcttttgtacatgtttggtagccgtagcacaagtgattggagtagaacatgtcactgctgtacatttttaactcccctaatggtgtgtctataattgttaaatctaagtgcttcctctcagtaaagcctcctggcaccaggccttcctgctcgactgaaaaaaattttctctttgaaaatccccttttactcatggcccacagtagaatatccaaaacgccttggctttcaggcctggcctttcctacagggagctcagtaacctggacggctctaaggctggaatgaccacataggtaggtatggtgagttcaaccatttttgctcttgaattgatgcccttcgatgtatgccatttagtgaaagtgctaagtcttaagtttcctaccactttggtttcatatttttggacttaacaaagttgtgaatagcacagtcgaggaaaattgatacctgcagtaacccataggaaataaactgtagagttccatattctggtattgtgattatattgttttatattaaaaaagaaaagaaaagaattttttttaattttatttttccccgtcttgcaaagtatagtgacccctgtttccattaaatttgaataaagactatttttgcttgacaaaa

SEQ ID NO: 180221 - DNA, 1399 bp, Homo sapiens
  Payload ID: 15502
  Gene Symbol: SRSF4
  Gene Name: serine/arginine-rich splicing factor 4
  ENST ID: ENST00000605204
  CDS Start-End: 139-621
gtacgtcgccggggttcggctgcgtccgtcccgccgcccgcccgttgccgccgccgccgctgccgccgtgctctcgctttgcccgccgccgcctaaggggggctggggccggggccagccatcactgccgttgccgggatgccgcgggtgtacatcggccgcctgagctaccaggcccgggagcgcgatgtggagcgcttctttaagggctacgggaagatcctggaggtggatctgaagaacggtctgttatgttctgaacccacacatgttttcggaaggaccagatggctgacactggctaatgggaaccaaaagacgagtgaaagtaacctggttgtcacatacccccagcttagaggtgcttcaccctgccccaaggtggggaaagatcaagtgcagactgagctgtggccaacgtttgcagaccaggaatccacactagctctaatcagagagcccttggtgtgcgggaactgccagtttgccgacgtgaaaagagtcccagactgggtaatggtgagccctgaagtcgcaccccagctctgccactcagtgagcacggcaacatccctaatcctgaccagccatggagaggttcggttcttacaaggaaaatgagtgaatgtgggaatggctcaccacattgtgaaaacaaaactcacatcctgctgatggttggctgaggactgtcatgtccacatacaaagaaaagcatgtggcacagttttaggacaaagatatggttttgtggagtttgatgatctgcgtgatgcagatgatgctgtttatgaactgaatggcaaagacctttgtggtgagcgagtaattgttgagcatgcccgcggcccacggcgagatggcagttacggttctggacgcaatttaacaaagacctcaatgttttaattaaaagaatcctttgaggctaagatgactgcctgttccatttgctgaccttgggttacctttccatgcgtggctctttgaaccattgtggcccttggctgaccaaaaacaggaagccatgtgacgaccgcaacctttccccattagacctgggtggtgaggatcccaagggttagacacagatgagattaaactgaaataggtggatatggttatagaagaagtggccgagataaatatggccctcctactcgcacagagtacagacttattgtggagaatttgtcaagtcggtgcagctggcaagacctaaaggattatatgcgtcaggcaggagaagtgacttatgcagatgctcacaagggacgcaaaaatgaaggggtgattgaatttgtatcttattctgatatgaaaagagctttggaaaagttggatggaactgaagtcaatgggagaaaaatcagattagttgaagacaagccaggttcca

SEQ ID NO: 180222 - DNA, 1264 bp, Homo sapiens
  Payload ID: 15502
  Gene Symbol: SRSF4
  Gene Name: serine/arginine-rich splicing factor 4
  ENST ID: ENST00000466448
  CDS Start-End: 131-1264
ccggggttcggctgcgtccgtcccgccgcccgcccgttgccgccgccgccgctgccgccgtgctctcgctttgcccgccgccgcctaaggggggctggggccggggccagccatcactgccgttgccgggatgccgcgggtgtacatcggccgcctgagctaccaggcccgggagcgcgatgtggagcgcttctttaagggctacgggaagatcctggaggtggatctgaagaacggatatggttttgtggagtttgatgatctgcgtgatgcagatgatgctgtttatgaactgaatggcaaagacctttgtggtgagcgagtaattgttgagcatgcccgcggcccacggcgagatggcagttacggttctggacgcagtggatatggttatagaagaagtggccgagataaatatggccctcctactcgcacagagtacagacttattgtggagaatttgtcaagtcggtgcagctggcaagacctaaaggattatatgcgtcaggcaggagaagtgacttatgcagatgctcacaagggacgcaaaaatgaaggggtgattgaatttgtatcttattctgatatgaaaagagctttggaaaagttggatggaactgaagtcaatgggagaaaaatcagattagttgaagacaagccaggttccagacgacgccggtcctactccagaagccggagtcattcaaggtcgggctcccgctcccggagcaagagccggagccggagccagagtcggagccggagcaagaaagagaaaagcaggagccccagcaaggaaaagagccgcagccgcagccatagcgctggcaagagccgcagcaagagcaaagaccaagctgaagagaagatccaaaacaatgacaatgtcgggaaacccaagagccggagtcctagcaggcataaaagtaagagcaaaagtcggagcaggagtcaggagaggagagtggaggaggagaagcgagggagtgtgagcaggggcaggagccaggagaagagcctccgccagagtcggagccggagcaggagcaaagggggcagcaggagccggagcaggagccgcagcaagagcaaggacaagaggaagggcaggaagagaagcagagaggagagccgcagtcgcagtcgcagccgcagcaagagtgagaggagcagaaagcgaggcagcaagcgagacagcaaggcgggcagcagcaagaagaagaagaaggaagacactgaccgctcccagtccagatctccatcc

SEQ ID NO: 180223 - DNA, 393 bp, Homo sapiens
  Payload ID: 15502
  Gene Symbol: SRSF4
  Gene Name: serine/arginine-rich splicing factor 4
  ENST ID: ENST00000489898
  CDS Start-End: 1-136
ttatgaactgaatggcaaagacctttgtggtgagcgagtaattgttgagcatgcccgcggcccacggcgagatggcagttacggttctggacgcaaatcctttgaggctaagatgactgcctgttccatttgctgaccttgggttacctttccatgcgtggctctttgaaccattgtggcccttggctgaccaaaaacaggaagccatgtgacgaccgcaacctttccccattagacctgggtggtgaggatcccaagggttagacacagatgagattaaactgaaataggtggatatggttatagaagaagtggccgagataaatatggccctcctactcgcacagagtacagacttattgtggagaatttgtcaagtcggtgcagctggca

SEQ ID NO: 180224 - DNA, 1638 bp, Homo sapiens
  Payload ID: 15503
  Gene Symbol: SRSF5
  Gene Name: serine/arginine-rich splicing factor 5
  Uniprot ID: Q13243
  ENST ID: ENST00000394366
  CDS Start-End: 308-1126
gacgtaggacgcgccctccattttgtggagcgccagagctgctaagtgcgtcagttgtggagtggcgtagacgagttaagtcctggtctgcgtggaggtcgacgactccgtcgcagactacggacctgtctgggtctcagccgccaaagaccccgtccggtaggtgagtggctcactttgagggcaagccttctcggatcgaggcttcttcatggccgctcagatcgtgagcggccggggctgctctctttgcggaggatggcgtctaatgagcgcagttgattcgaggaagtactagccggacatcatgagtggctgtcgggtattcatcgggagactaaatccagcggccagggagaaggacgtggaaagattcttcaagggatatggacggataagagatattgatctgaaaagaggctttggttttgtggaatttgaggatccaagggatgcagatgatgctgtgtatgagcttgatggaaaagaactctgtagtgaaagggttactattgaacatgctagggctcggtcacgaggtggaagaggtagaggacgatactctgaccgttttagtagtcgcagacctcgaaatgatagacgaaatgctccacctgtaagaacagaaaatcgtcttatagttgagaatttatcctcaagagtcagctggcaggatctcaaagatttcatgagacaagctggggaagtaacgtttgcggatgcacaccgacctaaattaaatgaaggggtggttgagtttgcctcttatggtgacttaaagaatgctattgaaaaactttctggaaaggaaataaatgggagaaaaataaaattaattgaaggcagcaaaaggcacagtaggtcaagaagcaggtctcgatcccggaccagaagttcctctaggtctcgtagccgatcccgttcccgtagtcgcaaatcttacagccggtcaagaagcaggagcaggagccggagccggagcaagtcccgttctgttagtaggtctcccgtgcctgagaagagccagaaacgtggttcttcaagtagatctaagtctccagcatctgtggatcgccagaggtcccggtcccgatcaaggtccagatcagttgacagtggcaattaaactgtaaataacttgccctgggggcctttttttaaaaaacaaaaaccacaaaaattcccaaaccatacttgctaaaaattctggtaagtatgtgcttttctgtgggggtgggatttggaaggggggttgggttgggctggatatctttgtagatgtggaccaccaaggggttgttgaaaactaattgtattaaatgtcttttgataagccttctgctcacatttttgtgaatgtctgaagtatatagtttgtgtatattgacagagctcttttataactaaagcaaatttaatttttttgtactagaaaaaaatttgaacattttagttcttggttataaaaatgttaattcagaattagtttaatgccttaattaaactaattaatagctttggacacttaaaagagctctaaatttgcttgtacataaaggcttaatttgttttccttgttagggtcaagggtgtcctccactctttaacagctgctggacagacacattagagcagctg

SEQ ID NO: 180225 - DNA, 567 bp, Homo sapiens
  Payload ID: 15503
  Gene Symbol: SRSF5
  Gene Name: serine/arginine-rich splicing factor 5
  ENST ID: ENST00000554021
  CDS Start-End: 68-484
agtagcggaccgtgttgggagggagctgggttttcattttgtctgcaggaagtactagccggacatcatgagtggctgtcgggtattcatcgggagactaaatccagcggccagggagaaggacgtggaaagattcttcaagggatatggacggataagagatattgatctgaaaagaggctttggttttgtggaatttgaggatccaagggatgcagatgatgctgtgtatgagcttgatggaaaagaactctgtagtgaaagggttactattgaacatgctagggctcggtcacgaggtggaagaggtagaggacgatactctgaccgttttagtagtcgcagacctcgaaatgatagacgaaatgctccacctgtaagaacagaaaatcgtcttatagttgagaatttatcctcaagagtcagctggcagcctgtctgtgtcgttggccttatgacgaggagtgcctgtgggttatcctaatcgttgtcttggtcactcttggttgggcctggttgactttgccagtcagctcctacagtgatcagttggccacctctagatct

SEQ ID NO: 180226 - DNA, 1500 bp, Homo sapiens
  Payload ID: 15503
  Gene Symbol: SRSF5
  Gene Name: serine/arginine-rich splicing factor 5
  Uniprot ID: Q13243
  ENST ID: ENST00000557154
  CDS Start-End: 152-970
gccagagctgctaagtgcgtcagttgtggagtggcgtagacgagttaagtcctggtctgcgtggaggtcgacgactccgtcgcagactacggacctgtctgggtctcagccgccaaagaccccgtccggtaggaagtactagccggacatcatgagtggctgtcgggtattcatcgggagactaaatccagcggccagggagaaggacgtggaaagattcttcaagggatatggacggataagagatattgatctgaaaagaggctttggttttgtggaatttgaggatccaagggatgcagatgatgctgtgtatgagcttgatggaaaagaactctgtagtgaaagggttactattgaacatgctagggctcggtcacgaggtggaagaggtagaggacgatactctgaccgttttagtagtcgcagacctcgaaatgatagacgaaatgctccacctgtaagaacagaaaatcgtcttatagttgagaatttatcctcaagagtcagctggcaggatctcaaagatttcatgagacaagctggggaagtaacgtttgcggatgcacaccgacctaaattaaatgaaggggtggttgagtttgcctcttatggtgacttaaagaatgctattgaaaaactttctggaaaggaaataaatgggagaaaaataaaattaattgaaggcagcaaaaggcacagtaggtcaagaagcaggtctcgatcccggaccagaagttcctctaggtctcgtagccgatcccgttcccgtagtcgcaaatcttacagccggtcaagaagcaggagcaggagccggagccggagcaagtcccgttctgttagtaggtctcccgtgcctgagaagagccagaaacgtggttcttcaagtagatctaagtctccagcatctgtggatcgccagaggtcccggtcccgatcaaggtccagatcagttgacagtggcaattaaactgtaaataacttgccctgggggcctttttttaaaaaacaaaaaccacaaaaattcccaaaccatacttgctaaaaattctggtaagtatgtgcttttctgtgggggtgggatttggaaggggggttgggttgggctggatatctttgtagatgtggaccaccaaggggttgttgaaaactaattgtattaaatgtcttttgataagccttctgctcacatttttgtgaatgtctgaagtatatagtttgtgtatattgacagagctcttttataactaaagcaaatttaatttttttgtactagaaaaaaatttgaacattttagttcttggttataaaaatgttaattcagaattagtttaatgccttaattaaactaattaatagctttggacacttaaaagagctctaaatttgcttgtacataaaggcttaatttgttttccttgttagggtcaagggtgtcctccactctttaacagctgctggacagacacattagagcagctgtttgttattgataataaa

SEQ ID NO: 180227 - DNA, 1412 bp, Homo sapiens
  Payload ID: 15503
  Gene Symbol: SRSF5
  Gene Name: serine/arginine-rich splicing factor 5
  Uniprot ID: Q13243
  ENST ID: ENST00000553635
  CDS Start-End: 115-924
gcgtagacgagttaagtcctggtctgcgtggaggtcgacgactccgtcgcagactacggacctgtctgggtctcagccgccaaagaccccgtccggaagtactagccggacatcatgagtggctgtcgggtattcatcgggagactaaatccagcggccagggagaaggacgtggaaagattcttcaagggatatggacggataagagatattgatctgaaaagaggctttggttttgtggatccaagggatgcagatgatgctgtgtatgagcttgatggaaaagaactctgtagtgaaagggttactattgaacatgctagggctcggtcacgaggtggaagaggtagaggacgatactctgaccgttttagtagtcgcagacctcgaaatgatagacgaaatgctccacctgtaagaacagaaaatcgtcttatagttgagaatttatcctcaagagtcagctggcaggatctcaaagatttcatgagacaagctggggaagtaacgtttgcggatgcacaccgacctaaattaaatgaaggggtggttgagtttgcctcttatggtgacttaaagaatgctattgaaaaactttctggaaaggaaataaatgggagaaaaataaaattaattgaaggcagcaaaaggcacagtaggtcaagaagcaggtctcgatcccggaccagaagttcctctaggtctcgtagccgatcccgttcccgtagtcgcaaatcttacagccggtcaagaagcaggagcaggagccggagccggagcaagtcccgttctgttagtaggtctcccgtgcctgagaagagccagaaacgtggttcttcaagtagatctaagtctccagcatctgtggatcgccagaggtcccggtcccgatcaaggtccagatcagttgacagtggcaattaaactgtaaataacttgccctgggggcctttttttaaaaaacaaaaaccacaaaaattcccaaaccatacttgctaaaaattctggtaagtatgtgcttttctgtgggggtgggatttggaaggggggttgggttgggctggatatctttgtagatgtggaccaccaaggggttgttgaaaactaattgtattaaatgtcttttgataagccttctgctcacatttttgtgaatgtctgaagtatatagtttgtgtatattgacagagctcttttataactaaagcaaatttaatttttttgtactagaaaaaaatttgaacattttagttcttggttataaaaatgttaattcagaattagtttaatgccttaattaaactaattaatagctttggacacttaaaagagctctaaatttgcttgtacataaaggcttaatttgttttccttgttagggtcaagggtgtcctccactctttaacagctgc

SEQ ID NO: 180228 - DNA, 565 bp, Homo sapiens
  Payload ID: 15503
  Gene Symbol: SRSF5
  Gene Name: serine/arginine-rich splicing factor 5
  ENST ID: ENST00000555349
  CDS Start-End: 68-442
agtagcggaccgtgttgggagggagctgggttttcattttgtctgcaggaagtactagccggacatcatgagtggctgtcgggtattcatcgggagactaaatccagcggccagggagaaggacgtggaaagattcttcaagggatatggacggataagagatattgatctgaaaagaggctttggttttgtggaatttgaggatccaagggatgcagatgatgctgtgtatgagcttgatggaaaagaactctgtagtgaaagggttactattgaacatgctagggctcggtcacgaggtggaagaggtagaggacgatactctgaccgttttagtagtcgcagacctcgaaatgatagacgaaatgctccacctgtaagaacagaaaatcgtcttatagttgagaatttatcctcaagagtcagctggcaggtttgttgaaatacagttttgagttattttgatgtggctttttaaaaaagttaatgggtagctaatgttgtattgttttattaaaagtagttttaaattaatggatttaatggaattgtaattttaaacatt

SEQ ID NO: 180229 - DNA, 2815 bp, Homo sapiens
  Payload ID: 15503
  Gene Symbol: SRSF5
  Gene Name: serine/arginine-rich splicing factor 5
  Uniprot ID: Q13243
  ENST ID: ENST00000553521
  CDS Start-End: 1454-2272
gccggaggaagcgccacgggcggctcagacctgaggccgcaagggcgcgccgggcgggcagggcggagggtccgatttcctccctctgaacggaaaaaaagccactttccctgggaagaactcgaagaagttggatgtctgatcttcaccttggatttgtggtctcggcccgcgggcgactcaccccacccaccaggatcccacgaagccgggccggctcagcccgctggcgccatctagtgtcgaatgaggaggcggccctctgcggctggaggggacgcttgggcgtgtgaaatctgaacggagaggattaaccaaataccatttggacttaaaagcagcttgaggccgggcgcggtggctcatgcctgtaatcccagcactttgggaggccgagacgggccgatcacgaggtcaggagatcgagaccatcccggctaacacggtgaaaccccgtctctactaaaaatacaaaaaaattagccggtgtggtggcgggcgcctgtagtcgcagctactcgggaggctgaggcagaagaatggcgtgaacccgggaggcggagcccagatcgcgccactgcactccagcctgggcgacagagcaagactgtctcaaaaaaaacaacaaaaaacagcttgaaacctcttccagccactctcccagagtgacggacatgcagaaatctgtattccagcctcaattcaagacagccttctagctgcagtcccattttcaacatttcatcagtgaaaatcctttcatttaaaaaatacttcagtgccttagtcttctcaccacaacaaaaccacacagctgtggcatggttgaaaaaagaactcgaacatctaggagctccctgctttgagggcaaatttaaattgcaagcagcaagagctaaggaaaggccaggtatttctgcaaagctaagtttctcctaattagtaatcttctgggtgtctaagaaaaactttagatacaagaagggttgccacttttctcaggagactcttctgggagagatgatgatgaaccgaacgccaaggacttagcaggggcgaacgacgtcaacagatgtccctccagactccggcaccagccggccgagcccaaacgagttctcgcccccgaccccacccaccgcgggagcagggttcggtcactcgcagtgtcagagaggcccacatcctcctaaatttccggccctcccaaaacttccgtcttccctaggtccaacggggtggacccaaggcccaggggcgtccccggaagtgacgtaggacgcgccctccattttgtggagcgccagagctgctaagtgcgtcagttgtggagtggcgtagacgagttaagtcctggtctgcgtggaggtcgacgactccgtcgcagactacggacctgtctgggtctcagccgccaaagaccccgtccggtaggaagtactagccggacatcatgagtggctgtcgggtattcatcgggagactaaatccagcggccagggagaaggacgtggaaagattcttcaagggatatggacggataagagatattgatctgaaaagaggctttggttttgtggaatttgaggatccaagggatgcagatgatgctgtgtatgagcttgatggaaaagaactctgtagtgaaagggttactattgaacatgctagggctcggtcacgaggtggaagaggtagaggacgatactctgaccgttttagtagtcgcagacctcgaaatgatagacgaaatgctccacctgtaagaacagaaaatcgtcttatagttgagaatttatcctcaagagtcagctggcaggatctcaaagatttcatgagacaagctggggaagtaacgtttgcggatgcacaccgacctaaattaaatgaaggggtggttgagtttgcctcttatggtgacttaaagaatgctattgaaaaactttctggaaaggaaataaatgggagaaaaataaaattaattgaaggcagcaaaaggcacagtaggtcaagaagcaggtctcgatcccggaccagaagttcctctaggtctcgtagccgatcccgttcccgtagtcgcaaatcttacagccggtcaagaagcaggagcaggagccggagccggagcaagtcccgttctgttagtaggtctcccgtgcctgagaagagccagaaacgtggttcttcaagtagatctaagtctccagcatctgtggatcgccagaggtcccggtcccgatcaaggtccagatcagttgacagtggcaattaaactgtaaataacttgccctgggggcctttttttaaaaaacaaaaaccacaaaaattcccaaaccatacttgctaaaaattctggtaagtatgtgcttttctgtgggggtgggatttggaaggggggttgggttgggctggatatctttgtagatgtggaccaccaaggggttgttgaaaactaattgtattaaatgtcttttgataagccttctgctcacatttttgtgaatgtctgaagtatatagtttgtgtatattgacagagctcttttataactaaagcaaatttaatttttttgtactagaaaaaaatttgaacattttagttcttggttataaaaatgttaattcagaattagtttaatgccttaattaaactaattaatagctttggacacttaaaagagctctaaatttgcttgtacataaaggcttaatttgttttccttgttagggtcaagggtgtcctccactctttaacagctgctggacagacacattagagcagctgtttgttattgataataaaatattataaaact

SEQ ID NO: 180230 - DNA, 526 bp, Homo sapiens
  Payload ID: 15503
  Gene Symbol: SRSF5
  Gene Name: serine/arginine-rich splicing factor 5
  ENST ID: ENST00000553548
  CDS Start-End: 164-463
attttgtggagcgccagagctgctaagtgcgtcagttgtggagtggcgtagacgagttaagtcctggtctgcgtggaggtcgacgactccgtcgcagactacggacctgtctgggtctcagccgccaaagaccccgtccggtaggaagtactagccggacatcatgagtggctgtcgggtattcatcgggagactaaatccagcggccagggagaaggacgtggaaagattcttcaagggatatggacggataagagatattgatctgaaaagaggctttggttttgtggaatttgaggatccaagggatgcagatgatgctgtgtatgagcttgatggaaaagaactctgtagtgaaagggttactattgaacatgctagggctcggtcacgaggtggaagaggtagaggacgatactctgaccgttttagtagtcgcagacctcgaaatgatagacgttgaacacaagtgctgtcattgcatttcttccattgtgaatacgaattttcttcctcagaaatgctc

SEQ ID NO: 180231 - DNA, 613 bp, Homo sapiens
  Payload ID: 15503
  Gene Symbol: SRSF5
  Gene Name: serine/arginine-rich splicing factor 5
  ENST ID: ENST00000553369
  CDS Start-End: 164-578
attttgtggagcgccagagctgctaagtgcgtcagttgtggagtggcgtagacgagttaagtcctggtctgcgtggaggtcgacgactccgtcgcagactacggacctgtctgggtctcagccgccaaagaccccgtccggtaggaagtactagccggacatcatgagtggctgtcgggtattcatcgggagactaaatccagcggccagggagaaggacgtggaaagattcttcaagggatatggacggataagagatattgatctgaaaagaggctttggttttgtggaatttgaggatccaagggatgcagatgatgctgtgtatgagcttgatggaaaagaactctgtagtgaaagggttactattgaacatgctagggctcggtcacgaggtggaagaggtagaggacgatactctgaccgttttagtagtcgcagacctcgaaatgatagacgaaatgctccacctgtaagaacagaaaatcgtcttatagttgagaatttatcctcaagagtcagctggcagcctgtctgtgtcgttggccttatgacgaggagtgcctgtgggttatcctaatcgttgtcttggtcactcttggttgggcctggt

SEQ ID NO: 180232 - DNA, 2057 bp, Homo sapiens
  Payload ID: 15503
  Gene Symbol: SRSF5
  Gene Name: serine/arginine-rich splicing factor 5
  ENST ID: ENST00000555547
  CDS Start-End: 90-506
ggaggtcgacgactccgtcgcagactacggacctgtctgggtctcagccgccaaagaccccgtccggtaggaagtactagccggacatcatgagtggctgtcgggtattcatcgggagactaaatccagcggccagggagaaggacgtggaaagattcttcaagggatatggacggataagagatattgatctgaaaagaggctttggttttgtggaatttgaggatccaagggatgcagatgatgctgtgtatgagcttgatggaaaagaactctgtagtgaaagggttactattgaacatgctagggctcggtcacgaggtggaagaggtagaggacgatactctgaccgttttagtagtcgcagacctcgaaatgatagacgaaatgctccacctgtaagaacagaaaatcgtcttatagttgagaatttatcctcaagagtcagctggcagcctgtctgtgtcgttggccttatgacgaggagtgcctgtgggttatcctaatcgttgtcttggtcactcttggttgggcctggttgactttgccagtcagctcctacagtgatcagttggccacctctagatctgtgtttgccggtctagacgttatcggtgcacttccttgaagtgccaggttgcagcgatcccagagcgttgataacgtgatctgatccctaagttgagacctgtcttcctgtaacgcttccgaataagaggtccggtcgaaaagagttgaaagatacgaaattaggtggtcgttggaatcctgatcgcagtaaagtggtccttggtaactgctcgagtagaacatgtctgcatccgccaatagtccgctaatagggagggctgtgcgattaaaggcttccatcgattgggtagtgtccttcaagtgggtggcgaagagccagtcgggcatatgtcatgaaggtttctccgaccgattaatggtttgctgcttgactagcctagggaaataataataaaggtaaagtaaacttttttaatgacatatggggcacaaaataactggtgtcttgtaaatgttctgtttttttaaataaaacttctctactttagtctttactttaaaaatatgtactgtttccttttttgttgtttttttgtttgtttttttttcttttgtactgagctcagcatagactaatactaccttaatgttaaaatctgaatttcttttagcattttgcttaaaagcaatatgctatttgcttattccgtgccctgacatagataatttttgaattctgatagaatacaagtgtggtaaatgccatgtttgtactttatctaacatcttctctttcagtagtcttgttttttttatatcatgtgattgtttgtgtgtcccctttcctcttctttgcttaacacaattatcttgtgttaaggatctcaaagatttcatgagacaagctggggaagtaacgtttgcggatgcacaccgacctaaattaaatgaaggggtggttgagtttgcctcttatggtgacttaaagaatgctattgaaaaactttctggaaaggaaataaatgggagaaaaataaaattaattgaaggcagcaaaaggcacagtaggtcaagaagcaggtctcgatcccggaccagaagttcctctaggtctcgtagccgatcccgttcccgtagtcgcaaatcttacagccggtcaagaagcaggagcaggagccggagccggagcaagtcccgttctgttagtaggtctcccgtgcctgagaagagccagaaacgtggttcttcaagtagatctaagtctccagcatctgtggatcgccagaggtcccggtcccgatcaaggtccagatcagttgacagtggcaattaaactgtaaataacttgccctgggggcctttttttaaaaaacaaaaaccacaaaaattcccaaaccatacttgctaaaaattctggtaagtatgtgcttttctgtgggggtgggatttggaaggggggttgggttgggctggatatctttgtagatgtggaccaccaaggggttgttgaaaactaattgtattaa

SEQ ID NO: 180233 - DNA, 4325 bp, Homo sapiens
  Payload ID: 15504
  Gene Symbol: SRSF6
  Gene Name: serine/arginine-rich splicing factor 6
  Uniprot ID: Q13247
  ENST ID: ENST00000244020
  CDS Start-End: 107-1141
gtgaggcgcgtgttcgggctcttgccgtccccgcacccgcaccgcggttactggcttgcggtccgccgttcgacaaccagcccttgggtccccgcccgccacggacatgccgcgcgtctacataggacgcctgagctacaacgtccgggagaaggacatccagcgctttttcagtggctatggccgcctcctcgaagtagacctcaaaaatgggtacggcttcgtggagttcgaggactcccgcgacgccgacgacgccgtttacgagctgaacggcaaggagctctgcggcgagcgcgtgatcgtagagcacgcccggggcccgcgtcgcgatcgcgacggctacagctacggaagccgcagtggtggaggtggatacagcagtcggagaacatctggcagagacaaatacggaccacctgttcgtacagaatacaggcttattgtagaaaatctttctagtcggtgcagttggcaagatttaaaggattttatgcgacaagcaggtgaagtaacctatgcggatgcccacaaggaacgaacaaatgagggtgtaattgagtttcgctcctactctgacatgaagcgtgctttggacaaactggatggcacagaaataaatggcagaaatattaggcttattgaagataagccacgcacaagccataggcgatcttactctggaagcagatccaggtctcgatctagaagacggtcacgaagtaggagtcgcaggagcagccgcagtagatctcgaagtatctcaaaaagtcgctcccgttccaggtcgcggagcaaaggtcgatcacgttctcgatcaaaaggcaggaaatctagatcaaagagcaaatctaagcccaagtctgatcggggctcccattcacattctcgaagcagatctaaggatgagtatgagaaatctcgaagcaggtctcggtcccgatcccctaaagaaaatggaaagggtgatataaagtcaaaatccagatcaaggagccagtcccgttccaattcgccgctacctgttccaccctcaaaggcccgttctgtgtcccctccaccaaaaagagctacttcaagatcccgttctagatctcgctcaaagtcaagatcaaggtccaggtcgagttccagagattaactcagaactccttgtttgcacattattatggaacactttcctacttaggcagttactcttccatgtttatacttggcctcttctgcaagaggaatctcttgaaaacaggggcacacagaaatttgatttgtggccaaattggatgaaaaagatgaggctctaaggaaatggtggcatgaagaccctctcccttctttgtagaattaagataactttgattttatagcttttgagctaacgtaacttttgtaaagattaagctcatttagtgttgtttttttttttttttttttttttttttttttttttttagtatttcagcaggatctgctggcagggtttttttgttttatttgtttgcttatttttaaattaactgttttgagctttgaatacttaaggctttagagggagaacccaattttcaattatgttggctttttataaagcttgagttatgtaagatttaaataaaagtttgctaccaagatgattgccttattgaataggtcactattaaattcctttaaatgttgatatctgccatttgtggaaacaacgtaaattctacttaagtgtaaacaaggcaagcctcagaccagcaataaattactcagtttggataacattattttgtgcagttaatcaaatttgccaaagtctttatctgcccctttaacaagttgagtaaaaataaaaggtattttttagtcaatgtgttccatgattttgcttaaattaatacttttaagtaatggaacttttttcaaaggcaaatttaaactatttaagaaatagctcctaatacttgggatcttgtttagagaatccactttctggaagttctcagcataattagtgttgagagtggttcagttgtctttaatgtttgtcatgtggaaatggaagtagcctctttttgttctgaaattgagtttattcaaagtgtaaaagcacatactgcattttctgctgaaagatcattatgtttaacaggcacttaatctcagtaaagtcagttgccagttaagttccacccagtagtcagtcccctttgtagttagtgggattatttgataattggttagatcatacttgtaaattttaatgctttgtgtaattggtttgaaaaacagtgaaatgggtaaacgcaaaacttttgtactttattacgagtaaagtgtaatgagtactgtggaaaccaaatttgaatactgcaaatttgtaggagttactaggttagcaattagtccatacatccataagcctgatgagttgaaattgcagtttgagaagtgaattaaccttacatccctttgttcagataccttaaaagttactttatttaaaagcatttattaatcttagtctgaaatcaaaatatagattaattggctcagctttaatacctttctaggaggtgtcacaatgtagggtaccaagggttggattgtgatggggcatggtcgtacactgctcattgtgccacaggtgtgactggaaagcatgatattctagggttggtttgtagattcaaataatccagaaatatacctaataagattgagtgaaaaatttgagtcaaatatctagggcattcacagagtagctgtgagttcttggtaatgtgaaaaaggccttgtttttcagaaattcctgggtttcctgttaaaaaatcttaaagcccaaccttaggaatatagtgccccaaaaggcggatgcttcttccattatcttattttctttgatactttatttaattagatgtttataaagaaatgggtttatttttccagcataaacctcagaatttaaggaaagaaaatgatgtctgttgttatagttcattgttttgcctactcagcagaagtgatgactcttaaaaattggctttgaccaaagttctcttgttttcagggaaagaacataaaagctttttgaactacagcctttttaaaagagggatgggaggatattacagtaagaaattaggctttctaaaagtatgaaacatccttcaactgggctctcttgttaataggacatcatatggtaatagactggtttgactatattgttagctgccacagtaagcaggtcattgtataggtaaatgcctgcacccataattttctagtaatagccacgaccaatttattaacagtcagggcctatccttgcctgtagttctcagtcactggatgcacaaaatcactgtgtaacattggctcacttggtgagcatagggttgactgataaaatgtttaattcccttgctagcttgtgagaagaatgagttgatgacatgctccataccagtggctagatggagtattaaggtggagcagaaaagaagtgagaacatcttgattcccctttcttttacttgatggtgtttatgaacatgccgtagtgcctttatggccagtttgagtcctgcctactttgacttttacgttcccattcctgtgttaccaccttcctcccgatttgttcacctattttgtgctttaaatctcaataaaatacttactgagggaaaggcttgttttgagtttattgcatatgcccacttaggaccagattcttaacaaatgtttttttgaattggagtttgcattggcaagccattcctgtcttgagtatgagaacaggatcttgtgttcacttacccagaaacgtgagtttgggatttagtatatggtttatgttgggcaactcattaatcactgtgcttcagtgtcatccatgaaactagggataaaacatgcatgggatgtgaagattaaaagtcaagaatatgaacagtacaagagagtaccataacaaatacaattttatttacaaatatacatggttggaccataccttggaatctacttgctaatgcagctgctgttaacagttcttgtatctgctcaagagatttctatgatcatataaaaatgcctttttaggttttcagtgttcatgccctgagtagtagtctgcagtttgctttaatacatggtaatacagagatcggctttaaatggctggctggttactgttgaatgaatgtatgataaattttttttcagaaccaacagtgtgaataatcctttcagttgtctatcagcatgaatttaaaaattactttcaagattcaacattacacaataaaacttagagttcttgcaataga

SEQ ID NO: 180234 - DNA, 1680 bp, Homo sapiens
  Payload ID: 15504
  Gene Symbol: SRSF6
  Gene Name: serine/arginine-rich splicing factor 6
  Uniprot ID: Q13247
  ENST ID: ENST00000483871
  CDS Start-End: 107-514
gtgaggcgcgtgttcgggctcttgccgtccccgcacccgcaccgcggttactggcttgcggtccgccgttcgacaaccagcccttgggtccccgcccgccacggacatgccgcgcgtctacataggacgcctgagctacaacgtccgggagaaggacatccagcgctttttcagtggctatggccgcctcctcgaagtagacctcaaaaatgggtacggcttcgtggagttcgaggactcccgcgacgccgacgacgccgtttacgagctgaacggcaaggagctctgcggcgagcgcgtgatcgtagagcacgcccggggcccgcgtcgcgatcgcgacggctacagctacggaagccgcatgaccaatggggctgaggctgtgtccactgaggctaagatgactgcctttcctgattggccttggcttttccatacattgtgtgacccttgccctatgaccctttggctgaccttaccggaagccatgacgacagcagccttttgccattagacgcagggtgatggtgaggattccaagggttagacaaaactggttaatctgaactaggtgactgttaccttgcgtgttttgtggccaaaccaccaccaaaaacctcacactgtgatgtggtggaggtggatacagcagtcggagaacatctggcagagacaaatacggaccacctgttcgtacagaatacaggcttattgtagaaaatctttctagtcggtgcagttggcaagatttaaaggattttatgcgacaagcaggtgaagtaacctatgcggatgcccacaaggaacgaacaaatgagggtgtaattgagtttcgctcctactctgacatgaagcgtgctttggacaaactggatggcacagaaataaatggcagaaatattaggcttattgaagataagccacgcacaagccataggcgatcttactctggaagcagatccaggtctcgatctagaagacggtcacgaagtaggagtcgcaggagcagccgcagtagatctcgaagtatctcaaaaagtcgctcccgttccaggtcgcggagcaaaggtcgatcacgttctcgatcaaaaggcaggaaatctagatcaaagagcaaatctaagcccaagtctgatcggggctcccattcacattctcgaagcagatctaaggatgagtatgagaaatctcgaagcaggtctcggtcccgatcccctaaagaaaatggaaagggtgatataaagtcaaaatccagatcaaggagccagtcccgttccaattcgccgctacctgttccaccctcaaaggcccgttctgtgtcccctccaccaaaaagagctacttcaagatcccgttctagatctcgctcaaagtcaagatcaaggtccaggtcgagttccagagattaactcagaactccttgtttgcacattattatggaacactttcctacttaggcagttactcttccatgtttatacttggcctcttctgcaagaggaatctcttgaaaacaggggcacacagaaatttgatttgtggccaaattggatgaaaaagatgaggctctaaggaaatggtggcatgaagaccctctcccttctttgtagaattaagataactttgattttatagcttttgagctaacgtaacttttgtaaagattaagctcatttagtg

SEQ ID NO: 180235 - DNA, 2489 bp, Homo sapiens
  Payload ID: 15505
  Gene Symbol: SRSF7
  Gene Name: serine/arginine-rich splicing factor 7
  Uniprot ID: Q16629
  ENST ID: ENST00000313117
  CDS Start-End: 239-955
agtctcttcagttccttccgcgtcgtttcttggctgtttccgcccagctcctttgtgccgcgcagaacaacgagatgacgcatgcgcaaagcgcagcggccgcatatataaacgcgaacccgggctcttcctcgtagtgccgccgggactcttggcgggtgaaggtgtgtgtcagcttttgcgtcactcgagccctgggcgctgcttgctaaagagccgagcacgcgggtctgtcatcatgtcgcgttacgggcggtacggaggagaaaccaaggtgtatgttggtaacctgggaactggcgctggcaaaggagagttagaaagggctttcagttattatggtcctttaagaactgtatggattgcgagaaatcctccaggatttgcctttgtggaattcgaagatcctagagatgcagaagatgcagtacgaggactggatggaaaggtgatttgtggctcccgagtgagggttgaactatcgacaggcatgcctcggagatcacgttttgatagaccacctgcccgacgtccctttgatccaaatgatagatgctatgagtgtggcgaaaagggacattatgcttatgattgtcatcgttacagccggcgaagaagaagcaggtcacggtctagatcacattctcgatccagaggaaggcgatactctcgctcacgcagcaggagcaggggacgaaggtcaaggtcagcatctcctcgacgatcaagatctatctctcttcgtagatcaagatcagcttcactcagaagatctaggtctggttctataaaaggatcgaggtatttccaatccccgtcgaggtcaagatcaagatccaggtctatttcacgaccaagaagcagccgatcaaagtccagatctccatctccaaaaagaagtcgttccccatcaggaagtcctcgcagaagtgcaagtcctgaaagaatggactgaagctctcaagttcaccctttagggaaaagttattttgtttacattattataagggatttgtgatgtctgtaaagtgtaacctaggaaagataattcaaccatctaatcaaaatggatctggattactatgtaaattcacagcagtaagataatataaattttgttgaatgtattaacatcatatggtctgaaaatgtgggtttttatttggcacatttaaataaaatgtttctaactagatttttgatttgtgttcaatattaacacttcttaatttgatatatttgagagtcagacattataattgttaaccttattcatacatacctacattcagaattgaaaggtgttggttaagtcttgaacatcactattctatgcataaaacttggccaggatcttaagggactttgaaaattccatcttacccttgtagctctgggtaagatgacctgagtcccttatgatacagcctgaatgcatcatgacagatccttaagttagctaatccgtttgaagttggtgttagtaggtattgtatgatcagtggtgaagcaagtaggaccactgatgtgtctaaatgagcatgacaggaactaaacgaaactgattaaatgtatgagaaatagaaacatttctggatgatctttatactaattgcagctttcaggctactaggtggcatagtgttaattaggactccccaagatatggggagttctactctcaatggtcttgtttctttgctttctacattagttaaccagttttataccaaaaaatgcatgtttgaggaattgtctgaaattgggacaaaacaccttcatgtaaaccagctttgcaaaattttccagcccagatactcttcatctattcaaatggattgtcttattctgagcaaagacctgttgttaatcttcaagctaggttttgcagttcccaaccacaacattcttctattttgccaggctggtgcaaagtaattaaagatgtcaatcagaaatgtcaatgagactaaagtggttttgtaaatctcagctatatttagcaacactccatgtagctaatattttttggtagcatctggtagaccttagaatgttacatagccagtaggttctttattcaaattttaagtatcttaagaatagtagggcagtaacagttacttttgagagttttctggtcaagcttttaccaggcattctctagccttggtacaaaaaaaaaaaaacctgctggttgcgcagatacctaggcttgtccattttatgcatttcagcaaagtcattggatactattgcaacttgggaatactggtctgcatcaagtttattcggtagtttgaccgctagtatgttggaagttatttggattgtttttggaattttgactggctgaattatggttggtataaagttatgtgtataactggcaggcttatttatctgttgcacttggttagctttaattgttctgtattatttaaagataagtttactcaacaataaatctgcagagattgaacaaataa

SEQ ID NO: 180236 - DNA, 1050 bp, Homo sapiens
  Payload ID: 15505
  Gene Symbol: SRSF7
  Gene Name: serine/arginine-rich splicing factor 7
  ENST ID: ENST00000409276
  CDS Start-End: 103-810
gtgccgccgggactcttggcgggtgaaggtgtgtgtcagcttttgcgtcactcgagccctgggcgctgcttgctaaagagccgagcacgcgggtctgtcatcatgtcgcgttacgggcggtacggaggagaaaccaaggtgtatgttggtaacctgggaactggcgctggcaaaggagagttagaaagggctttcagttattatggtcctttaagaactgtatggattgcgagaaatcctccaggatttgcctttgtggaattcgaagatcctagagatgcagaagatgcagtacgaggactggatggaaaggtgatttgtggctcccgagtgagggttgaactatcgacaggcatgcctcggagatcacgttttgatagaccacctgcccgacgtccctttgatccaaatgatagatgctatgagtgtggcgaaaagggacattatgcttatgattgtcatcgttacagccggcgaagaagaagcaggtcacggtctagatcacattctcgatccagaggaaggcgatactctcgctcacgcagcaggagcaggggacgaaggtcaaggtcagcatctcctcgacgatcaagatctatctctcttcgtagatcaagatcagcttcactcagaagatctaggtctggttctataaaaggatcgagatccccgtcgaggtcaagatcaagatccaggtctatttcacgaccaagaagcagccgatcaaagtccagatctccatctccaaaaagaagtcgttccccatcaggaagtcctcgcagaagtgcaagtcctgaaagaatggactgaagctctcaagttcaccctttagggaaaagttattttgtttacattattataagggatttgtgatgtctgtaaagtgtaacctaggaaagataattcaaccatctaatcaaaatggatctggattactatgtaaattcacagcagtaagataatataaattttgttgaatgtattaacatcatatggtctgaaaatgtgggtttttatttggcacatttaaataaaatgtttctaactaga

SEQ ID NO: 180237 - DNA, 747 bp, Homo sapiens
  Payload ID: 15505
  Gene Symbol: SRSF7
  Gene Name: serine/arginine-rich splicing factor 7
  ENST ID: ENST00000452806
  CDS Start-End: 1-331
tgattgtcatcgttacagccggcgaagaagaagcaggtcacggtctagatcacattctcgatccagaggaaggcgatactctcgctcacgcagcaggagcaggggacgaaggtcaaggtcagcatctcctcgacgatcaagatctatctctcttcgtagatcaagatcagcttcactcagaagatctaggtctggttctataaaaggatcgaggtatttccaatccccgtcgaggtcaagatcaagatccaggtctatttcacgaccaagaagcagtcgttccccatcaggaagtcctcgcagaagtgcaagtcctgaaagaatggactgaagctctcaagttcaccctttagggaaaagttattttgtttacattattataagggatttgtgatgtctgtaaagtgtaacctaggaaagataattcaaccatctaatcaaaatggatctggattactatgtaaattcacagcagtaagataatataaattttgttgaatgtattaacatcatatggtctgaaaatgtgggtttttatttggcacatttaaataaaatgtttctaactagatttttgatttgtgttcaatattaacacttcttaatttgatatatttgagagtcagacattataattgttaaccttattcatacatacctacattcagaattgaaaggtgttggttaagtcttgaacatcactattctatgcataaaacttggccaggatcttaagggactttgaaa

SEQ ID NO: 180238 - DNA, 1847 bp, Homo sapiens
  Payload ID: 15505
  Gene Symbol: SRSF7
  Gene Name: serine/arginine-rich splicing factor 7
  Uniprot ID: Q16629
  ENST ID: ENST00000431066
  CDS Start-End: 27-425
agagccgagcacgcgggtctgtcatcatgtcgcgttacgggcggtacggaggagaaaccaaggtgtatgttggtaacctgggaactggcgctggcaaaggagagttagaaagggctttcagttattatggtcctttaagaactgtatggattgcgagaaatcctccaggatttgcctttgtggaattcgaagatcctagagatgcagaagatgcagtacgaggactggatggaaaggtgatttgtggctcccgagtgagggttgaactatcgacaggcatgcctcggagatcacgttttgatagaccacctgcccgacgtccctttgatccaaatgatagatgctatgagtgtggcgaaaagggacattatgcttatgattgtcatcgttacagccggcgaagaagaagcaggtatttattttaataaaggaatggttggtattctagttaatcaagtaattcttttattagcaaggcagaaactagtgtttttctataaacttgaatgttaattgtacaggtgtattttacaatttttgtttaattaaaaaaatgttactatattaataatcaacctggtcaaaacctttcaggtttcttcgtttgagtcagtcgccttgattcagaatgtcacgagccttatgatatcatgctgaggcgccttgcaaatccgacaattaagatcctcctagaccttgaggtgatcagcataagaggccagatcccctcgagtcatctacacctagcttcaccttattctttaaagggcagaaaatttgagacggtgatcgccgtaacagtaaatttggcttacaattggggcccccctccggtttagaaagaggaacaccagattgaccacattcccaactagaaaaatcttcttgcgtcaatcaagcctcacctggctcatttggctgtcagtttgatcgtcgttagattgaagaaaacatctagatgcagcgatcggctatagatacttctagatcgtctagatctactagaccatgggccaaagagggtcgacctgcaaacttgcaaggtttattttaaatacacattacagtgttttatattatgtaatgctaagttgtaattcagcttttaacaaatctttttttaggtagtaaaaaaaaaaatactcaacaactaataggcccagagtttatttccaaatgagacactaaatttaaatagttttgagatttgatttcagcagaggcacacaaactcttaaaaacgagttattgtctgacattttgttttttctctaacttgaaaaataggtcacggtctagatcacattctcgatccagaggaaggcgatactctcgctcacgcagcaggagcaggggacgaaggtcaaggtcagcatctcctcgacgatcaagatctatctctcttcgtagatcaagatcagcttcactcagaagatctaggtctggttctataaaaggatcgagatccccgtcgaggtcaagatcaagatccaggtctatttcacgaccaagaagcagccgatcaaagtccagatctccatctccaaaaagaagtcgttccccatcaggaagtcctcgcagaagtgcaagtcctgaaagaatggactgaagctctcaagttcaccctttagggaaaagttattttgtttacattattataagggatttgtgatgtctgtaaagtgtaacctaggaaagataattcaaccatctaatcaaaatggatctggattactatgtaaattcacagcagtaagataatataaattttgttgaatgtattaacatcatatggtctgaaaatgtgggtttttatttggcacatttaaataaaatgtttctaacta

SEQ ID NO: 180239 - DNA, 2857 bp, Homo sapiens
  Payload ID: 15505
  Gene Symbol: SRSF7
  Gene Name: serine/arginine-rich splicing factor 7
  ENST ID: ENST00000425778
  CDS Start-End: 160-573
gcatgcgcaaagcgcagcggccgcatatataaacgcgaacccgggctcttcctcgtagtgccgccgggactcttggcgggtgaaggtgtgtgtcagcttttgcgtcactcgagccctgggcgctgcttgctaaagagccgagcacgcgggtctgtcatcatgtcgcgttacgggcggtacggaggagaaaccaaggtgtatgttggtaacctgggaactggcgctggcaaaggagagttagaaagggctttcagttattatggtcctttaagaactgtatggattgcgagaaatcctccaggatttgcctttgtggaattcgaagatcctagagatgcagaagatgcagtacgaggactggatggaaaggtgatttgtggctcccgagtgagggttgaactatcgacaggcatgcctcggagatcacgttttgatagaccacctgcccgacgtccctttgatccaaatgatagatgctatgagtgtggcgaaaagggacattatgcttatgattgtcatcgttacagccggcgaagaagaagcaggtttcttcgtttgagtcagtcgccttgattcagaatgtcacgagccttatgatatcatgctgaggcgccttgcaaatccgacaattaagatcctcctagaccttgaggtgatcagcataagaggccagatcccctcgagtcatctacacctagcttcaccttattctttaaagggcagaaaatttgagacggtgatcgccgtaacagtaaatttggcttacaattggggcccccctccggtttagaaagaggaacaccagattgaccacattcccaactagaaaaatcttcttgcgtcaatcaagcctcacctggctcatttggctgtcagtttgatcgtcgttagattgaagaaaacatctagatgcagcgatcggctatagatacttctagatcgtctagatctactagaccatgggccaaagagggtcgacctgcaaacttgcaaggtcacggtctagatcacattctcgatccagaggaaggcgatactctcgctcacgcagcaggagcaggggacgaaggtcaaggtcagcatctcctcgacgatcaagatctatctctcttcgtagatcaagatcagcttcactcagaagatctaggtctggttctataaaaggatcgaggtatttccaatccccgtcgaggtcaagatcaagatccaggtctatttcacgaccaagaagcagccgatcaaagtccagatctccatctccaaaaagaagtcgttccccatcaggaagtcctcgcagaagtgcaagtcctgaaagaatggactgaagctctcaagttcaccctttagggaaaagttattttgtttacattattataagggatttgtgatgtctgtaaagtgtaacctaggaaagataattcaaccatctaatcaaaatggatctggattactatgtaaattcacagcagtaagataatataaattttgttgaatgtattaacatcatatggtctgaaaatgtgggtttttatttggcacatttaaataaaatgtttctaactagatttttgatttgtgttcaatattaacacttcttaatttgatatatttgagagtcagacattataattgttaaccttattcatacatacctacattcagaattgaaaggtgttggttaagtcttgaacatcactattctatgcataaaacttggccaggatcttaagggactttgaaaattccatcttacccttgtagctctgggtaagatgacctgagtcccttatgatacagcctgaatgcatcatgacagatccttaagttagctaatccgtttgaagttggtgttagtaggtattgtatgatcagtggtgaagcaagtaggaccactgatgtgtctaaatgagcatgacaggaactaaacgaaactgattaaatgtatgagaaatagaaacatttctggatgatctttatactaattgcagctttcaggctactaggtggcatagtgttaattaggactccccaagatatggggagttctactctcaatggtcttgtttctttgctttctacattagttaaccagttttataccaaaaaatgcatgtttgaggaattgtctgaaattgggacaaaacaccttcatgtaaaccagctttgcaaaattttccagcccagatactcttcatctattcaaatggattgtcttattctgagcaaagacctgttgttaatcttcaagctaggttttgcagttcccaaccacaacattcttctattttgccaggctggtgcaaagtaattaaagatgtcaatcagaaatgtcaatgagactaaagtggttttgtaaatctcagctatatttagcaacactccatgtagctaatattttttggtagcatctggtagaccttagaatgttacatagccagtaggttctttattcaaattttaagtatcttaagaatagtagggcagtaacagttacttttgagagttttctggtcaagcttttaccaggcattctctagccttggtacaaaaaaaaaaaaacctgctggttgcgcagatacctaggcttgtccattttatgcatttcagcaaagtcattggatactattgcaacttgggaatactggtctgcatcaagtttattcggtagtttgaccgctagtatgttggaagttatttggattgtttttggaattttgactggctgaattatggttggtataaagttatgtgtataactggcaggcttatttatctgttgcacttggttagctttaattgttctgtattatttaaagataagtttactcaacaataaatctgcagagattgaacaaat

SEQ ID NO: 180240 - DNA, 603 bp, Homo sapiens
  Payload ID: 15505
  Gene Symbol: SRSF7
  Gene Name: serine/arginine-rich splicing factor 7
  ENST ID: ENST00000432873
  CDS Start-End: 1-213
cgatactctcgctcacgcagcaggagcaggggacgaaggtcaaggtcagcatctcctcgacgatcaagatctatctctcttcgtagatcaagatcagcttcactcagaagatctaggtctggttctataaaaggatcgaggtatttccacctcctgagtagctgggactgccattgtgtaccacagtgcccagctgagggatctgtgccttaagtgagatccccgtcgaggtcaagatcaagatccaggtctatttcacgaccaagaagcagccgatcaaagtccagatctccatctccaaaaagaagtcgttccccatcaggaagtcctcgcagaagtgcaagtcctgaaagaatggactgaagctctcaagttcaccctttagggaaaagttattttgtttacattattataagggatttgtgatgtctgtaaagtgtaacctaggaaagataattcaaccatctaatcaaaatggatctggattactatgtaaattcacagcagtaagataatataaattttgttgaatgtattaacatcatatggtctgaaaatgtgggtttttatttggcacatttaaataaaatgtttctaactaga

SEQ ID NO: 180241 - DNA, 2453 bp, Homo sapiens
  Payload ID: 15505
  Gene Symbol: SRSF7
  Gene Name: serine/arginine-rich splicing factor 7
  Uniprot ID: Q16629
  ENST ID: ENST00000446327
  CDS Start-End: 239-919
agtctcttcagttccttccgcgtcgtttcttggctgtttccgcccagctcctttgtgccgcgcagaacaacgagatgacgcatgcgcaaagcgcagcggccgcatatataaacgcgaacccgggctcttcctcgtagtgccgccgggactcttggcgggtgaaggtgtgtgtcagcttttgcgtcactcgagccctgggcgctgcttgctaaagagccgagcacgcgggtctgtcatcatgtcgcgttacgggcggtacggaggagaaaccaaggtgtatgttggtaacctgggaactggcgctggcaaaggagagttagaaagggctttcagttattatggtcctttaagaactgtatggattgcgagaaatcctccaggatttgcctttgtggaattcgaagatcctagagatgcagaagatgcagtacgaggactggatggaaaggtgatttgtggctcccgagtgagggttgaactatcgacaggcatgcctcggagatcacgttttgatagaccacctgcccgacgtccctttgatccaaatgatagatgctatgagtgtggcgaaaagggacattatgcttatgattgtcatcgttacagccggcgaagaagaagcaggtcacggtctagatcacattctcgatccagaggaaggcgatactctcgctcacgcagcaggagcaggggacgaaggtcaaggtcagcatctcctcgacgatcaagatctatctctcttcgtagatcaagatcagcttcactcagaagatctaggtctggttctataaaaggatcgaggtatttccaatccccgtcgaggtcaagatcaagatccaggtctatttcacgaccaagaagcagtcgttccccatcaggaagtcctcgcagaagtgcaagtcctgaaagaatggactgaagctctcaagttcaccctttagggaaaagttattttgtttacattattataagggatttgtgatgtctgtaaagtgtaacctaggaaagataattcaaccatctaatcaaaatggatctggattactatgtaaattcacagcagtaagataatataaattttgttgaatgtattaacatcatatggtctgaaaatgtgggtttttatttggcacatttaaataaaatgtttctaactagatttttgatttgtgttcaatattaacacttcttaatttgatatatttgagagtcagacattataattgttaaccttattcatacatacctacattcagaattgaaaggtgttggttaagtcttgaacatcactattctatgcataaaacttggccaggatcttaagggactttgaaaattccatcttacccttgtagctctgggtaagatgacctgagtcccttatgatacagcctgaatgcatcatgacagatccttaagttagctaatccgtttgaagttggtgttagtaggtattgtatgatcagtggtgaagcaagtaggaccactgatgtgtctaaatgagcatgacaggaactaaacgaaactgattaaatgtatgagaaatagaaacatttctggatgatctttatactaattgcagctttcaggctactaggtggcatagtgttaattaggactccccaagatatggggagttctactctcaatggtcttgtttctttgctttctacattagttaaccagttttataccaaaaaatgcatgtttgaggaattgtctgaaattgggacaaaacaccttcatgtaaaccagctttgcaaaattttccagcccagatactcttcatctattcaaatggattgtcttattctgagcaaagacctgttgttaatcttcaagctaggttttgcagttcccaaccacaacattcttctattttgccaggctggtgcaaagtaattaaagatgtcaatcagaaatgtcaatgagactaaagtggttttgtaaatctcagctatatttagcaacactccatgtagctaatattttttggtagcatctggtagaccttagaatgttacatagccagtaggttctttattcaaattttaagtatcttaagaatagtagggcagtaacagttacttttgagagttttctggtcaagcttttaccaggcattctctagccttggtacaaaaaaaaaaaaacctgctggttgcgcagatacctaggcttgtccattttatgcatttcagcaaagtcattggatactattgcaacttgggaatactggtctgcatcaagtttattcggtagtttgaccgctagtatgttggaagttatttggattgtttttggaattttgactggctgaattatggttggtataaagttatgtgtataactggcaggcttatttatctgttgcacttggttagctttaattgttctgtattatttaaagataagtttactcaacaataaatctgcagagattgaacaaataa

SEQ ID NO: 180242 - DNA, 1903 bp, Homo sapiens
  Payload ID: 15505
  Gene Symbol: SRSF7
  Gene Name: serine/arginine-rich splicing factor 7
  Uniprot ID: Q16629
  ENST ID: ENST00000443213
  CDS Start-End: 97-495
ccgggactcttggcgggtgaaggtgtgtgtcagcttttgcgtcactcgagccctgggcgctgcttgctaaagagccgagcacgcgggtctgtcatcatgtcgcgttacgggcggtacggaggagaaaccaaggtgtatgttggtaacctgggaactggcgctggcaaaggagagttagaaagggctttcagttattatggtcctttaagaactgtatggattgcgagaaatcctccaggatttgcctttgtggaattcgaagatcctagagatgcagaagatgcagtacgaggactggatggaaaggtgatttgtggctcccgagtgagggttgaactatcgacaggcatgcctcggagatcacgttttgatagaccacctgcccgacgtccctttgatccaaatgatagatgctatgagtgtggcgaaaagggacattatgcttatgattgtcatcgttacagccggcgaagaagaagcaggtatttattttaataaaggaatggttggtattctagttaatcaagtaattcttttattagcaaggcagaaactagtgtttttctataaacttgaatgttaattgtacaggtgtattttacaatttttgtttaattaaaaaaatgttactatattaataatcaacctggtcaaaacctttcaggtttcttcgtttgagtcagtcgccttgattcagaatgtcacgagccttatgatatcatgctgaggcgccttgcaaatccgacaattaagatcctcctagaccttgaggtgatcagcataagaggccagatcccctcgagtcatctacacctagcttcaccttattctttaaagggcagaaaatttgagacggtgatcgccgtaacagtaaatttggcttacaattggggcccccctccggtttagaaagaggaacaccagattgaccacattcccaactagaaaaatcttcttgcgtcaatcaagcctcacctggctcatttggctgtcagtttgatcgtcgttagattgaagaaaacatctagatgcagcgatcggctatagatacttctagatcgtctagatctactagaccatgggccaaagagggtcgacctgcaaacttgcaaggtttattttaaatacacattacagtgttttatattatgtaatgctaagttgtaattcagcttttaacaaatctttttttaggtagtaaaaaaaaaaatactcaacaactaataggcccagagtttatttccaaatgagacactaaatttaaatagttttgagatttgatttcagcagaggcacacaaactcttaaaaacgagttattgtctgacattttgttttttctctaacttgaaaaataggtcacggtctagatcacattctcgatccagaggaaggcgatactctcgctcacgcagcaggagcaggggacgaaggtcaaggtcagcatctcctcgacgatcaagatctatctctcttcgtagatcaagatcagcttcactcagaagatctaggtctggttctataaaaggatcgaggtatttccaatccccgtcgaggtcaagatcaagatccaggtctatttcacgaccaagaagcagccgatcaaagtccagatctccatctccaaaaagaagtcgttccccatcaggaagtcctcgcagaagtgcaagtcctgaaagaatggactgaagctctcaagttcaccctttagggaaaagttattttgtttacattattataagggatttgtgatgtctgtaaagtgtaacctaggaaagataattcaaccatctaatcaaaatggatctggattactatgtaaattcacagcagtaagataatataaattttgttgaatgtattaacatcatatggtctgaaaatgtgggtttttatttggcaca

SEQ ID NO: 180243 - DNA, 1135 bp, Homo sapiens
  Payload ID: 15505
  Gene Symbol: SRSF7
  Gene Name: serine/arginine-rich splicing factor 7
  ENST ID: ENST00000415527
  CDS Start-End: 540-695
attccgcgtgcgtaatggcggcttaggagcacgccagacgaagccggaggcagcggaggcggggtgctgaagggagacgggatggcgggtgtacatctctgccgagttccgtactcttgggcatttttgtggcccaatccagcctaaagcagggttgagatgacggttttcgcgttgcctttctcggagctgcccgccggcccccctccccccccgccctcggcggcggctgccattttgcgcacattgaggaccgtggtggcgcatttcctcagcgctttcccgccacttcagcggacagatctggccgcagctaaaccaaggtgtatgttggtaacctgggaactggcgctggcaaaggagagttagaaagggctttcagttattatggtcctttaagaactgtatggattgcgagaaatcctccaggatttgcctttgtggaattcgaagatcctagagatgcagaagatgcagtacgaggactggatggaaaggtgatttgtggctcccgagtgagggttgaactatcgacaggcatgcctcggagatcacgttttgatagaccacctgcccgacgtccctttgatccaaatgatagatgctatgagtgtggcgaaaagggacattatgcttatgattgtcatcgttacagccggcgaagaagaagcagggcagaaaatttgagacggtgatcgccgtaacagtaaatttggcttacaattggggcccccctccggtttagaaagaggaacaccagattgaccacattcccaactagaaaaatcttcttgcgtcaatcaagcctcacctggctcatttggctgtcagtttgatcgtcgttagattgaagaaaacatctagatgcagcgatcggctatagatacttctagatcgtctagatctactagaccatgggccaaagagggtcgacctgcaaacttgcaaggtcacggtctagatcacattctcgatccagaggaaggcgatactctcgctcacgcagcaggagcaggggacgaaggtcaaggtcagcatctcctcgacgatcaagatctatctctcttcgtagatcaagatcagcttcactcagaagatctaggtctggttctataaaaggatcgaggtatttcca

SEQ ID NO: 180244 - DNA, 1944 bp, Homo sapiens
  Payload ID: 15505
  Gene Symbol: SRSF7
  Gene Name: serine/arginine-rich splicing factor 7
  ENST ID: ENST00000425941
  CDS Start-End: 108-521
tcgtagtgccgccgggactcttggcgggtgaaggtgtgtgtcagcttttgcgtcactcgagccctgggcgctgcttgctaaagagccgagcacgcgggtctgtcatcatgtcgcgttacgggcggtacggaggagaaaccaaggtgtatgttggtaacctgggaactggcgctggcaaaggagagttagaaagggctttcagttattatggtcctttaagaactgtatggattgcgagaaatcctccaggatttgcctttgtggaattcgaagatcctagagatgcagaagatgcagtacgaggactggatggaaaggtgatttgtggctcccgagtgagggttgaactatcgacaggcatgcctcggagatcacgttttgatagaccacctgcccgacgtccctttgatccaaatgatagatgctatgagtgtggcgaaaagggacattatgcttatgattgtcatcgttacagccggcgaagaagaagcaggtttcttcgtttgagtcagtcgccttgattcagaatgtcacgagccttatgatatcatgctgaggcgccttgcaaatccgacaattaagatcctcctagaccttgaggtgatcagcataagaggccagatcccctcgagtcatctacacctagcttcaccttattctttaaagggcagaaaatttgagacggtgatcgccgtaacagtaaatttggcttacaattggggcccccctccggtttagaaagaggaacaccagattgaccacattcccaactagaaaaatcttcttgcgtcaatcaagcctcacctggctcatttggctgtcagtttgatcgtcgttagattgaagaaaacatctagatgcagcgatcggctatagatacttctagatcgtctagatctactagaccatgggccaaagagggtcgacctgcaaacttgcaaggtcacggtctagatcacattctcgatccagaggaaggcgatactctcgctcacgcagcaggagcaggggacgaaggtcaaggtcagcatctcctcgacgatcaagatctatctctcttcgtagatcaagatcagcttcactcagaagatctaggtctggttctataaaaggatcgagatccccgtcgaggtcaagatcaagatccaggtctatttcacgaccaagaagcagccgatcaaagtccagatctccatctccaaaaagaagtcgttccccatcaggaagtcctcgcagaagtgcaagtcctgaaagaatggactgaagctctcaagttcaccctttagggaaaagttattttgtttacattattataagggatttgtgatgtctgtaaagtgtaacctaggaaagataattcaaccatctaatcaaaatggatctggattactatgtaaattcacagcagtaagataatataaattttgttgaatgtattaacatcatatggtctgaaaatgtgggtttttatttggcacatttaaataaaatgtttctaactagatttttgatttgtgttcaatattaacacttcttaatttgatatatttgagagtcagacattataattgttaaccttattcatacatacctacattcagaattgaaaggtgttggttaagtcttgaacatcactattctatgcataaaacttggccaggatcttaagggactttgaaaattccatcttacccttgtagctctgggtaagatgacctgagtcccttatgatacagcctgaatgcatcatgacagatccttaagttagctaatccgtttgaagttggtgttagtaggtattgtatgatcagtggtgaagcaagtaggaccactgatgtgtctaaatgagcatgacaggaactaaacgaaactgattaaatgtatgagaaatagaaacatttctggatgatctttatactaattgcagctttcaggctactaggt

SEQ ID NO: 180245 - DNA, 4028 bp, Homo sapiens
  Payload ID: 15506
  Gene Symbol: SRSF8
  Gene Name: serine/arginine-rich splicing factor 8
  Uniprot ID: Q9BRL6
  ENST ID: ENST00000587424
  CDS Start-End: 31-879
agtttccgggcccgggctgctctcggagccatgagctgcggccgcccccctcccgacgtggacggcatgatcaccctcaaggtggacaacctgacctaccgcacctctcccgacagcttgaggcgcgtgttcgagaagtacgggcgcgtgggcgacgtgtacatcccgcgggagccccacaccaaggcgccccggggcttcgctttcgtccgctttcacgaccggcgcgacgcccaagacgccgaggccgccatggacggggcggagctggacggacgcgagctgcgggtgcaggtggcgcgctatggccgccgggacctgccccgcagccgccagggagagccacgcggcaggtccagaggcggcggctacggacggcggagccgcagctacgggcggcggagccgcagccccaggcggcgacaccgcagccgatcccggggtcccagctgctccaggtcccgcagccgatctcgctataggggttctcgctatagccggtctccctacagccgatctccttacagccggtcgcgctacagccgctctccctacagcagatctcgctacagggaatctcgctacggcggatctcactacagctcatctggttacagtaactctcgctacagccgatatcacagcagccggtctcactcgaagtctgggtcctccactagctctcgctctgcatcaacctccaaatcgagctctgcgcgacgatccaagtcctcctcggtctccaggtctcgctcgcggtccaggtcttcatctatgaccaggagtcctccccgggtatccaagaggaaatccaagtcaaggtcgcgatccaagaggccccccaagtctcctgaagaggaaggacagatgtcctcttaagaaaatgatgcatcaggaagcaacgtgatggaggacttgggggaaaaggatcacatactcagtctatggaagcaacgtccctggaagaagaggctgcctattgaaaaggttgtgtcacacttttctacctttttgccagtttgaagctttgcatcaggtggcaaaattcattctatgtgccgttttgttgttattcacattttattgtaacttaggaggtgaacgacctaagattacgttattgggtttggatatttgaggcaaaaatttatttttatttctatagtgatgactgttttggtttgaaatgaacagattggtaacctaatttgtggcctcctgacttttaaggaaacgtgtgcagccattacacacagcctaacgctgtcaagacatgcttcaacattgccttcattccttaaaaacctacaaaaggtggtgtaaattaatatggataattttatttacctccaggtctaaaaggtagtgtgacccaaatttgtataaagatttttcatgtgaaaggactggggttttagcaaacacaggtctaatctcttttgtgtttttgtgcaccaggcccggctgcgtagcagttgagtgatgctggttagctattaaggtggcctgttgcagtgcagagtgctgagctgcttcctgttttcttctgattgctcctggggaaaacacgccttgtcctgaagaacaaatggctgtccagtttattaaaatgcctgtcaactgcacttccagtcacccaggccttgcagataaataatggagcatgcagtgagcacatctagctgacgataatcacaccttttcccccgtcttttctgaaaaattgtaaatctgatcatatcaacatgtatgaacttaaaatatggagaatgttatggaagaaatagtttataagtttgttaagtacttataacatggtttatctttttgattattaattttttacgctaaccattgtttctgtagttaaaattgttttcttggtgttatcttttctcagaataaaattagaaacttttgatggaaagtaggttgttttattttctgtatgacttttggatatttgtacttttgagaaaattattagcaccaagtgtttctcaaaatataatttttaaaaaatccttaataggcttttagctatgtgctttattgttttatcacaatgcagtttatttgtagtttctctcttttttcctcacacctatggtttttttacttccaaaattattttcaaataatccatttttggctttcatcattatccctactagatgttatgtgttcttttgcaattgtttctgcttatacctttactagcaaagggaaaaataacaatttggtgtcaatgatctggtgacaataggattacattggagccaattgaataaatttattctttcaatcatatggatcttcattaatatttttgactgaattatcaattaaaaatatttcattccctttgtgcagaaactgctaaatccagggttcgattcttgaatgaactggcaaggtggctgtggtctgtagatatacatcccacattttgttgttataacagttagtagttagtattgctttcatatatagactccagaatctaaattttacgataatgacatttcttctggtcatgacaaatgtaatattttacaaatataaatctacgtagaatccaaagacacacacagagcagtcctgtctgagaaataaaaaatcaggacacccatggcatcgtagtagcccctcgcgtccagcaggtggcgaagggaggtgaggtatatttattaaatgggaccgagtgggacggggacggggcagccctaagggtagggaagcattgtcaatttctggggatagaatgagacccaggcatagctggagtttgaagctttgaagcaaaaatatctgtagaacatcttaaacgtgaccaaaatatgatgttaaaatcagcaactctttatacgttaaaaactttgaaacctgtggccgggcatggtggctcgcgcctgtaatcccagcactttgggaggccaaggcaggtggatcacctgaggtcaggagctcaagaccagcctgaccaacatggtgaaaccccgtctctactaaaaatacaaaaattagctgggcatggtggcgcatgcctataatcccagctactcggaggctgaggcaggataatcgcttgaaaccgggagacagaggttgtggtgagccgagatcacgccattgcactccagccggggcaacaagagcaaaacttcatctcaaaaaaaaaaaaaaaagaaaaaggaaaaaaacaaacaaacaacaactttgaaacctaggaacaattttggacctgttggagcagaaatgtgtagttgtcattgaaggtgtgaacataccctacctctactctacatgtggaagacctgacccacagaggacatgaacccatgaagaagagtgatgtgacatgttttgcattttattagtaccatgatctaaccaactgagctaactggccacaccattttatcctttataatgatcactatgagggctgagtgcagaatggagtgtatgtggtcaagagtggaagctgtgaggctattgcagtaatccagaaagaaaggtgacaatggcttagacttcagtggtagtgttggaaatggacataaatagacatattcaggaaatatattgatcttagatctaataagacacgtaatagattagaagtagggaaattaatgaaaaagcagaattaaggatgacttctcactggcttgaaatgctaaatggatgacggtgctgtttagtgagttggggaagactgggcgtggtgatgggtgtagaaattgagaaaggaaaatcaagaatttccagaactttcagagcaatgttaaatactttccttgatagtgggtcagtcatcatttataagtgcatttctaaaaatattgcttaattttgtttttgagctttgtataagtggaattttgtgtgtactgattattttgctcaatactatgtctttaagattctctgtattgttgcatgtggctgagtttatttttgatgctgtgtagtgttttactaattaataaatcataattcagtttttactgttctattgatgg

SEQ ID NO: 180246 - DNA, 1201 bp, Homo sapiens
  Payload ID: 15507
  Gene Symbol: SRSF9
  Gene Name: serine/arginine-rich splicing factor 9
  Uniprot ID: Q13242
  ENST ID: ENST00000229390
  CDS Start-End: 185-850
cgcagccgcgttctctttaagaggactccttttgcctccgccgaccccttcgcttccgctccgcgttcccacaatgcagtgcggctgagcgcctcggagcccgcggggacgctgcggggggacccgtgctgaggcggcggcggcgacgtgggctgcggcgggcccgcggcgtcgggcggtgcggatgtcgggctgggcggacgagcgcggcggcgagggcgacgggcgcatctacgtggggaaccttccgaccgacgtgcgcgagaaggacttggaggacctgttctacaagtacggccgcatccgcgagatcgagctcaagaaccggcacggcctcgtgcccttcgccttcgtgcgcttcgaggacccccgagatgcagaggatgctatttatggaagaaatggttatgattatggccagtgtcggcttcgtgtggagttccccaggacttatggaggtcggggtgggtggccccgtggtgggaggaatgggcctcctacaagaagatctgatttccgagttcttgtttcaggacttcctccgtcaggcagctggcaggacctgaaggatcacatgcgagaagctggggatgtctgttatgctgatgtgcagaaggatggagtggggatggtcgagtatctcagaaaagaagacatggaatatgccctgcgtaaactggatgacaccaaattccgctctcatgagggtgaaacttcctacatccgagtttatcctgagagaagcaccagctatggctactcacggtctcggtctgggtcaaggggccgtgactctccataccaaagcaggggttccccacactacttctctcctttcaggccctactgagacaggtgatgggaattttttctttattttttaggttaactgagctgctttgtgctcagaatctacattccagattgaggatttagtgtcttaggaaatttttttaattttttttttttaaagaagaaaaaaaactacataatttctaccagggccatattagcagtgaaacattttaaactgcagaaattgtggttttggttcagaaacaagttgtatatttttcacccctgattatgggaaaaaaatcagttctgtctttgtgggttgctctactatggagatcaacagttactgtgactgagtcggcccattctgtttagaaatatattttaaatgtttagtaattga

SEQ ID NO: 180247 - DNA, 327 bp, Homo sapiens
  Payload ID: 15507
  Gene Symbol: SRSF9
  Gene Name: serine/arginine-rich splicing factor 9
  ENST ID: ENST00000550458
  CDS Start-End: 1-327
cgggcgcatctacgtggggaaccttccgaccgacgtgcgcgagaaggacttggaggacctgttctacaagtacggccgcatccgcgagatcgagctcaagaaccggcacggcctcgtgcccttcgccttcgtgcgcttcgaggacccccgagatgcagaggatgctatttatggaagaaatggacttcctccgtcaggcagctggcaggacctgaaggatcacatgcgagaagctggggatgtctgttatgctgatgtgcagaaggatggagtggggatggtcgagtatctcagaaaagaagacatggaatatgccctgcgtaaact

SEQ ID NO: 180248 - DNA, 1043 bp, Homo sapiens
  Payload ID: 15507
  Gene Symbol: SRSF9
  Gene Name: serine/arginine-rich splicing factor 9
  ENST ID: ENST00000603963
  CDS Start-End: 31-390
gcggcgggcccgcggcgtcgggcggtgcggatgtcgggctgggcggacgagcgcggcggcgagggcgacgggcgcatctacgtggggaaccttccgaccgacgtgcgcgagaaggacttggaggacctgttctacaagtacggccgcatccgcgagatcgagctcaagaaccggcacggcctcgtgcccttcgccttcgtgcgcttcgaggacccccgagatgcagaggatgctatttatggaagaaatggttatgattatggccagtgtcggcttcgtgtggagttccccaggacttatggaggtcggggtgggtggccccgtggtgggaggaatgggcctcctacaagaagatctgatttccgagttcttgtttcagaaaactattaggaaatggctgcagtcctgagctgtgagcggtaaacacagcctttgagagcaggagcacatttccctttcatgacatcaggacttcctccgtcaggcagctggcaggacctgaaggatcacatgcgagaagctggggatgtctgttatgctgatgtgcagaaggatggagtggggatggtcgagtatctcagaaaagaagacatggaatatgccctgcgtaaactggatgacaccaaattccgctctcatgagggtgaaacttcctacatccgagtttatcctgagagaagcaccagctatggctactcacggtctcggtctgggtcaaggggccgtgactctccataccaaagcaggggttccccacactacttctctcctttcaggccctactgagacaggtgatgggaattttttctttattttttaggttaactgagctgctttgtgctcagaatctacattccagattgaggatttagtgtcttaggaaatttttttaattttttttttttaaagaagaaaaaaaactacataatttctaccagggccatattagcagtgaaacattttaaactgcagaaattgtggttttggttcagaaacaagttgtatatttttcacccctgattatgggaaaaaaatcagttctg

SEQ ID NO: 180249 - DNA, 6060 bp, Homo sapiens
  Payload ID: 15508
  Gene Symbol: STK10
  Gene Name: serine/threonine kinase 10
  Uniprot ID: O94804
  ENST ID: ENST00000176763
  CDS Start-End: 345-3251
cggtgggcgggcgcggggacggtcccctggaacgggtccgaggctctcgcaggcagggctgggccgggcaggagctgcgaggccggcacaagggaggcggccctggggacctgacagggcgggggcgggggcgggcacgccgccgcctgcgcggttccgggtgctcccggcgcggcgctgcccagggcacacttgaccgaggtcgggctgcggggaaaggcgggtctggggagaaccccgagagacgcggcgtcctccaactcctcctccttctcctcgcggccgccgaagccacagcccgagcccgagcccgagcccgagccggcgccaccgcgcccccggccatggcttttgccaatttccgccgcatcctgcgcctgtctaccttcgagaagagaaagtcccgcgaatatgagcacgtccgccgcgacctggaccccaacgaggtgtgggagatcgtgggcgagctgggcgacggcgccttcggcaaggtttacaaggccaagaataaggagacgggtgctttggctgcggccaaagtcattgaaaccaagagtgaggaggagctggaggactacatcgtggagattgagatcctggccacctgcgaccacccctacattgtgaagctcctgggagcctactatcacgacgggaagctgtggatcatgattgagttctgtccagggggagccgtggacgccatcatgctggagctggacagaggcctcacggagccccagatacaggtggtttgccgccagatgctagaagccctcaacttcctgcacagcaagaggatcatccaccgagatctgaaagctggcaacgtgctgatgaccctcgagggagacatcaggctggctgactttggtgtgtctgccaagaatctgaagactctacagaaacgagattccttcatcggcacgccttactggatggcccccgaggtggtcatgtgtgagaccatgaaagacacgccctacgactacaaagccgacatctggtccctgggcatcacgctgattgagatggcccagatcgagccgccacaccacgagctcaaccccatgcgggtcctgctaaagatcgccaagtcggaccctcccacgctgctcacgccctctaagtggtctgtagagttccgtgacttcctgaagatagccctggataagaacccagaaacccgacccagtgccgcgcagctgctggagcatcccttcgtcagcagcatcaccagtaacaaggctctgcgggagctggtggctgaggccaaggccgaggtgatggaagagatcgaagacggccgggatgagggggaagaggaggacgccgtggatgccgcctccaccctggagaaccatactcagaactcctctgaggtgagtccgccaagcctcaatgctgacaagcctctcgaggagtcaccttccaccccgctggcacccagccagtctcaggacagtgtgaatgagccctgcagccagccctctggggacagatccctccaaaccaccagtcccccagtcgtggcccctggaaatgagaacggcctggcagtgcctgtgcccctgcggaagtcccgacccgtgtcaatggatgccagaattcaggtagcccaggagaagcaagttgctgagcagggtggggacctcagcccagcagccaacagatctcaaaaggccagccagagccggcccaacagcagcgccctggagaccttgggtggggagaagctggccaatggcagcctggagccacctgcccaggcagctccagggccttccaagagggactcggactgcagcagcctctgcacctctgagagcatggactatggtaccaatctctccactgacctgtcgctgaacaaagagatgggctctctgtccatcaaggacccgaaactgtacaaaaaaaccctcaagcggacacgcaaatttgtggtggatggtgtggaggtgagcatcaccacctccaagatcatcagcgaagatgagaagaaggatgaggagatgagatttctcaggcgccaggaactccgagagcttcggctgctccagaaagaagagcatcggaaccagacccagctgagtaacaagcatgagctgcagctggagcaaatgcataaacgttttgaacaggaaatcaacgccaagaagaagttctttgacacggaattagagaacctggagcgtcagcaaaagcagcaagtggagaagatggagcaagaccatgccgtgcgccgccgggaggaggccaggcggatccgcctggagcaggatcgggactacaccaggttccaagagcagctcaaactgatgaagaaagaggtgaagaacgaggtggagaagctcccccgacagcagcggaaggaaagcatgaagcagaagatggaggagcacacgcagaaaaagcagcttcttgaccgggactttgtagccaagcagaaggaggacctggagctggccatgaagaggctcaccaccgacaacaggcgggagatctgtgacaaggagcgcgagtgcctcatgaagaagcaggagctccttcgagaccgggaagcagccctgtgggagatggaagagcaccagctgcaggagaggcaccagctggtgaagcagcagctcaaagaccagtacttcctccagcggcacgagctgctgcgcaagcatgagaaggagcgggagcagatgcagcgctacaaccagcgcatgatagagcagctgaaggtgcggcagcaacaggaaaaggcgcggctgcccaagatccagaggagtgagggcaagacgcgcatggccatgtacaagaagagcctccacatcaacggcgggggcagcgcagctgagcagcgtgagaagatcaagcagttctcccagcaggaggagaagaggcagaagtcggagcggctgcagcaacagcagaaacacgagaaccagatgcgggacatgctggcgcagtgtgagagcaacatgagcgagctgcagcagctgcagaatgaaaagtgccacctcctggtagagcacgaaacccagaaactgaaggccctggatgagagccataaccagaacctgaaggaatggcgggacaagcttcggccgcgcaagaaggctctggaagaggatctgaaccagaagaagcgggagcaggagatgttcttcaagctgagcgaggaggcggagtgcccaaacccctccaccccaagcaaggccgccaagttcttcccctacagttctgcggatgcttcttaacaaccgcccggggctgtggctggcagcttggtgggccccagggccttctccttcattctctgtgaacatgtaactcaggaccccttttccctcttgcgtctgtgccagctcaaatccagcccctcgccctgtgccaccccaactgtgcctgatagacctgccccagcgttcctgacttcttgctggcctgtggagggtgaggtgtaattatttgtcacctgaacctaatgtatattctccttgagccccagatcccttcaagctggaagggatggggctgttggtggggtcagggtccaagaggaatgggtgttctgtggcctcgagtcctctcctgtttgcgaaaataccagttttgctctctgtgggacaaagcactgctgatgaagtccccgtgggctcatccgggctggaattcttggtttttcagccattccctgcagagtcactcaatcatcaagtccctcacagccatttctgttcccagaggagccaggcctgcagctggctgctcaggagatggcctcattcctcctgttctcccagtttgctttccacttaagacaaagccttgtctatgtggggggcggggaccggggaaagagggaggctgaaatgtttattctgcttctcccgtgtttcatgccatctcgcgtcccccttcctgcacatgggtgtgaatgcacacacatacgcgtacacacaggacttggtctgctggcctggcctcttctgcccaggtgggttggaacacgtttgctgcctgagcctgtgccactgagcatgttaggtggagcagttggtgtggcacgtgcggggtgttggcaccggaggcatggaaaagcacaggctgtactgccaggctgcgatgcgtgctggcccccgcacaggctcctgtgtgcagggactgattcctcagcacacgaggcttccacaacccagtctgctccatagcactctggcccaccctgtctgcaggtgaaacaggagggctgtttgcctctgccccatccccccgactgtgttcaggagtcccaccttgcatttcagacctgggctggcagtctgttggacttctcttcaggaagaaaaagcatcagggggaaatggaatgcccctgccccaggaacatggcagaagcacaggttctgtacctcagatggactcctgctgggccttcggggtctcagttggcttcccccagattctgattctacagctgcagaatgtatataacgcaataaaagcaaatgtttgaaccagtatgcgggtttacttacaaggaaaccttttttcaccctgatttctaattattttattgaaacaactataaaatgtatggtttctccaggaagatatctgctttttaaaacaacaaacaagaacaacaacacaaaactggtaatgatttggagtaatcatgcgggcatattgagtctgggtagtgtttcgctggtggtagagtggttgagacttcctgggaggactttttccgccttcactcctacagatttaagattctttatttttaggccgggcatggtgactcacctgaggtgaggagttcgagactagcctggccaacatggcaaaaccctgtctctactaaaagtacaaaaattagccaggcgtggtggtgcatgcctataatcccagctactcgggaggctgaggcaggagaatcgcttgaacccaggaggcagaggttgcagtaagccaaggtcacaccactgcactccagcctaggtgacagggcgagactctgtctctcaaaaaaaaaaaaaaaaaaaattctttgagacagggtctctaatatgttgcccaagctgatctcaaactcgtggctcaactgattctcccgcttcaaccttgagtagctgggacgacagatacatgctactgcacccagctaggttaaggttctgtatactctgtctttctaaagcaattccctggaaattttctcaacattggttataactgaatgcttgggaagggaggggcagcccttcaacaggaaaaggggactgcccaaatcttaaatgcacagtcaagattctcttggagctagcaatggttctcaggttagtgagcatttagcttgcctgctgcagaatttgacccagatgggggtgttttttaggtctctcacaaatgagacaagcgaaacaattgtctccttttattctctttggtgcattggtgctggggaaacatgaactagcggcagtgtaactgcagaacatagacccagttctaccaggccaggccagcgttgggaaccaccagacagggctgctttgggctttgcttacagtatttccatgtgtagcctggcgtgtgagaaagtattaggtgaaatgccagtttcatggttcaggtgaaagtctgtgatcattcccctcgtggctcgtccttcacatcacttttgcccttcaaggagttgccgcgtccccgctcagtgccgcctgagccctcagagctcccctgtgcttttctggatggggactggcggggtcacctagcctcaccgtggagccaccgtgcaatgcccatctctgagaggcccacgcggtattcctcgtgccctgtgttagtgctttctgtataagggacagacagaactgggtttttttcctctgtctggttttagagtaaatgtaactaacttttattttccctttatgaaagatagaaattatttttatgtagtttccagactttatacaaaatttttgtaaaatgttctctggaaagttaactacaagaatgtaaatatgcttctaataaaataacaaggttatttgcc

SEQ ID NO: 180250 - DNA, 994 bp, Homo sapiens
  Payload ID: 15508
  Gene Symbol: STK10
  Gene Name: serine/threonine kinase 10
  ENST ID: ENST00000520476
  CDS Start-End: 1-845
gcctcatgaagaagcaggagctccttcgagaccgggaagcagccctgtgggagatggaagagcaccagctgcaggagaggcaccagctggtgaagcagcagctcaaagaccagtacttcctccagcggcacgagctgctgcgcaagcatgagaaggagcgggagcagatgcagcgctacaaccagcgcatgatagagcagctgaaggtgcggcagcaacaggaaaaggcgcggctgcccaagatccagaggagtgagggcaagacgcgcatggccatgtacaagaagagcctccacatcaacggcgggggcagcgcagctgagcagcgtgagaagatcaagcagttctcccagcaggaggagaagaggcagaagtcggagcggctgcagcaacagcagaaacacgagaaccagatgcgggacatgctggcgcagtgtgagagcaacatgagcgagctgcagcagctgcagaatgaaaagtgccacctcctggtagagcacgaaacccagaaactgaaggccctggatgagagccataaccagaacctgaaggaatggcgggacaagcttcggccgcgcaagaagatggagtctcgcaccgtcgcccaagttggagtgcagtggcgcaatctcaactcaggctctggaagaggatctgaaccagaagaagcgggagcaggagatgttcttcaagctgagcgaggaggcggagtgcccaaacccctccaccccaagcaaggccgccaagttcttcccctacagttctgcggatgcttcttaacaaccgcccggggctgtggctggcagcttggtgggccccagggccttctccttcattctctgtgaacatgtaactcaggaccccttttccctcttgcgtctgtgccagctcaaatccagcccctcgccctgtgccaccccaactgtgcctgatagacctgccccagcgttcctgacttcttgctggcctgtggagggtgaggtgtaattatttg

SEQ ID NO: 180251 - DNA, 2611 bp, Homo sapiens
  Payload ID: 15509
  Gene Symbol: STK11
  Gene Name: serine/threonine kinase 11
  Uniprot ID: Q15831
  ENST ID: ENST00000326873
  CDS Start-End: 451-1752
ggcctgtgggatgggcggcccggagaagactgcgctcggccgtgttcatacttgtccgtgggcctgaggtccccggaggatgacctagcactgaaaagccccggccggcctccccagggtccccgaggacgaagttgaccctgaccgggccgtctcccagttctgaggcccgggtcccactggaactcgcgtctgagccgccgtcccggacccccggtgcccgccggtccgcagaccctgcaccgggcttggactcgcagccgggactgacgtgtagaacaatcgtttctgttggaagaagggtttttcccttccttttggggtttttgttgccttttttttttcttttttctttgtaaaattttggagaagggaagtcggaacacaaggaaggaccgctcacccgcggactcagggctggcggcgggactccaggaccctgggtccagcatggaggtggtggacccgcagcagctgggcatgttcacggagggcgagctgatgtcggtgggtatggacacgttcatccaccgcatcgactccaccgaggtcatctaccagccgcgccgcaagcgggccaagctcatcggcaagtacctgatgggggacctgctgggggaaggctcttacggcaaggtgaaggaggtgctggactcggagacgctgtgcaggagggccgtcaagatcctcaagaagaagaagttgcgaaggatccccaacggggaggccaacgtgaagaaggaaattcaactactgaggaggttacggcacaaaaatgtcatccagctggtggatgtgttatacaacgaagagaagcagaaaatgtatatggtgatggagtactgcgtgtgtggcatgcaggaaatgctggacagcgtgccggagaagcgtttcccagtgtgccaggcccacgggtacttctgtcagctgattgacggcctggagtacctgcatagccagggcattgtgcacaaggacatcaagccggggaacctgctgctcaccaccggtggcaccctcaaaatctccgacctgggcgtggccgaggcactgcacccgttcgcggcggacgacacctgccggaccagccagggctccccggctttccagccgcccgagattgccaacggcctggacaccttctccggcttcaaggtggacatctggtcggctggggtcaccctctacaacatcaccacgggtctgtaccccttcgaaggggacaacatctacaagttgtttgagaacatcgggaaggggagctacgccatcccgggcgactgtggccccccgctctctgacctgctgaaagggatgcttgagtacgaaccggccaagaggttctccatccggcagatccggcagcacagctggttccggaagaaacatcctccggctgaagcaccagtgcccatcccaccgagcccagacaccaaggaccggtggcgcagcatgactgtggtgccgtacttggaggacctgcacggcgcggacgaggacgaggacctcttcgacatcgaggatgacatcatctacactcaggacttcacggtgcccggacaggtcccagaagaggaggccagtcacaatggacagcgccggggcctccccaaggccgtgtgtatgaacggcacagaggcggcgcagctgagcaccaaatccagggcggagggccgggcccccaaccctgcccgcaaggcctgctccgccagcagcaagatccgccggctgtcggcctgcaagcagcagtgaggctggccgcctgcagcccgtgtccaggagccccgccaggtgcccgcgccaggccctcagtcttcctgccggttccgcccgccctcccggagaggtggccgccatgcttctgtgccgaccacgccccaggacctccggagcgccctgcagggccgggcagggggacagcagggaccgggcgcagccctcccccctcggccgcccggcagtgcacgcggcttgttgacttcgcagccccgggcggagccttcccgggcgggcgtgggaggagggaggcggcctccatgcactttatgtggagactactggccccgcccgtggcctcgtgctccgcagggcgcccagcgccgtccggcggccccgccgcagaccagctggcgggtgtggagaccaggctcctgaccccgccatgcatgcagcgccacctggaagccgcgcggccgctttggttttttgtttggttggttccattttctttttttctttttttttttaagaaaaaataaaaggtggatttgagctgtggctgtgaggggtgtttgggagctgctgggtggcaggggggctgtggggtcgggctcacgtcgcggccgcctttgcgctctcgggtcaccctgctttggcggcccggccggagggcaggaccctcacctctcccccaaggccactgcgctcttgggaccccagagaaaacccggagcaagcaggagtgtgcggtcaatatttatatcatccagaaaagaaaaacacgagaaacgccatcgcgggatggtgcagacgcggcggggactcggagggtgccgtgcgggcgaggccgcccaaatttggcaataaataaagcttgggaagcttggacctg

SEQ ID NO: 180252 - DNA, 637 bp, Homo sapiens
  Payload ID: 15509
  Gene Symbol: STK11
  Gene Name: serine/threonine kinase 11
  ENST ID: ENST00000593219
  CDS Start-End: 99-404
tttgtaaaattttggagaagggaagtcggaacacaaggaaggaccgctcacccgcggactcagggctggcggcgggactccaggaccctgggtccagcatggaggtggtggacccgcagcagctgggcatgttcacggagggcgagctgatgtcggtgggtatggacacgttcatccaccgcatcgactccaccgaggtcatctaccagccgcgccgcaagcgggccaagctcatcggcaagtacctgatgggggacctgctgggggaaggctcttacggcaaggtgaaggaggtgctggactcggagacgctgtgcaggagggccgtcaagatcctcaagaagaagaagttgcgaaggatccccaacggggaggccaacgtgaagaactcctggccactctgaatccacttcctggctctggattggcttgtcctggatattgcatagaaatgggatcctgtcggccgggcgcggtgactcacgagagcaagagatccagaccatcctggccaacatgggaaattcaactactgaggaggttacggcacaaaaatgtcatccagctggtggatgtgttatacaacgaagagaagcagaaaatgtatatggtgatggagtactgcgtgtgtggcatg

SEQ ID NO: 180253 - DNA, 2777 bp, Homo sapiens
  Payload ID: 15509
  Gene Symbol: STK11
  Gene Name: serine/threonine kinase 11
  ENST ID: ENST00000586243
  CDS Start-End: 961-2259
cgggcgcggaagggggaggcggcccggggcgcccgcgagtgaggcgcggggcggcgaagggagcgcgggtggcggcacttgctgccgcggccttggatgggctgggcccccctcgccgctccgcctcctccacacgcgcggcggccgcggcgagggggacgcgccgcccggggcccggcaccttcgggaaccccccggcccggagcctgcggcctgcgccgcctcggccgccgggagccccgtggagcccccgccgccgcgccgccccgcggaccggacgctgagcggagctgttggccgcggcgggaggcctcccggacgcccccagccccccgaacgctcgcccgggccggcgggagtcggcgccccccgggaggtccgctcggtcgtccgcggcggagcgtttgctcctgggacaggcggtgggaccggggcgtcgccggagacgcccccagcgaagttgggctctccaggtgtgggggtcccggggggtagcgacgtcgcggacccggcctgtgggatgggcggcccggagaagactgcgctcggccgtgttcatacttgtccgtgggcctgaggtccccggaggatgacctagcactgaaaagccccggccggcctccccagggtccccgaggacgaagttgaccctgaccgggccgtctcccagttctgaggcccgggtcccactggaactcgcgtctgagccgccgtcccggacccccggtgcccgccggtccgcagaccctgcaccgggcttggactcgcagccgggactgacgtgtagaacaatcgtttctgttggaagaagggtttttcccttccttttggggtttttgttgccttttttttttcttttttctttgtaaaattttggagaagggaagtcggaacacaaggaaggaccgctcacccgcggactcagggctggcggcgggactccaggaccctgggtccagcatggaggtggtggacccgcagcagctgggcatgttcacggagggcgagctgatgtcggtgggtatggacacgttcatccaccgcatcgactccaccgaggtcatctaccagccgcgccgcaagcgggccaagctcatcggcaagtacctgatgggggacctgctgggggaaggctcttacggcaaggtgaaggaggtgctggactcggagacgctgtgcaggagggccgtcaagatcctcaagaagaagaagttgcgaaggatccccaacggggaggccaacgtgaagaaggaaattcaactactgaggaggttacggcacaaaaatgtcatccagctggtggatgtgttatacaacgaagagaagcagaaaatgtatatggtgatggagtactgcgtgtgtggcatgcaggaaatgctggacagcgtgccggagaagcgtttcccagtgtgccaggcccacgggtacttctgtcagctgattgacggcctggagtacctgcatagccagggcattgtgcacaaggacatcaagccggggaacctgctgctcaccaccggtggcaccctcaaaatctccgacctgggcgtggccgaggcactgcacccgttcgcggcggacgacacctgccggaccagccagggctccccggctttccagccgcccgagattgccaacggcctggacaccttctccggcttcaaggtggacatctggtcggctggggtcaccctctacaacatcaccacgggtctgtaccccttcgaaggggacaacatctacaagttgtttgagaacatcgggaaggggagctacgccatcccgggcgactgtggccccccgctctctgacctgctgaaagggatgcttgagtacgaaccggccaagaggttctccatccggcagatccggcagcacagctggttccggaagaaacatcctccggctgaagcaccagtgcccatcccaccgagcccagacaccaaggaccggtggcgcagcatgactgtggtgccgtacttggaggacctgcacggcgcggacgaggacgaggacctcttcgacatcgaggatgacatcatctacactcaggacttcacggtgcccggacaggtcccagaagaggaggccagtcacaatggacagcgccggggcctccccaaggccgtgtgtatgaacggcacagaggcggcgcagctgagcaccaaatccagggcggaggccgggcccccaaccctgcccgcaaggcctgctgccagcagcaagatccgccggctgtcggcctgcaagcagcagtgaggctggccgcctgcagcccgtgtccaggagccccgccaggtgcccgcgccaggccctcagtcttcctgccggttccgcccgccctcccggagaggtggccgccatgcttctgtgccgaccacgccccaggacctccggagcgccctgcagggccgggcagggggacagcagggaccgggcgcagccctcccccctcggccgcccggcagtgcacgcggcttgttgacttcgcagccccgggcggagccttcccgggcgggcgtgggaggagggaggcggcctccatgcactttatgtggagactactggccccgcccgtggcctcgtgctccgcagggcgcccagcgccgtccggcggccccgccgcagaccagctggcgggtgtggagaccaggctcctgaccccgccatgcatgcagcgccacctggaagccgcgcggccgctttggttttttgtttggttggttccattttctttttttctttttttttttaagaaaaaataaaaggtggatttg

SEQ ID NO: 180254 - DNA, 505 bp, Homo sapiens
  Payload ID: 15509
  Gene Symbol: STK11
  Gene Name: serine/threonine kinase 11
  ENST ID: ENST00000585851
  CDS Start-End: 46-505
gcggactcagggctggcggcgggactccaggaccctgggtccagcatggaggtggtggacccgcagcagctgggcatgttcacggagggcgagctgatgtcggtgggtatggacacgttcatccaccgcatcgactccaccgaggtcatctaccagccgcgccgcaagcgggccaagctcatcggcaagtacctgatgggggacctgctgggggaaggctcttacggcaaggtgaaggaggtgctggactcggagacgctgtgcaggagggccgtcaagatcctcaagaagaagaagttgcgaaggatccccaacggggaggccaacgtgaagaagtacttctgtcagctgattgacggcctggagtacctgcatagccagggcattgtgcacaaggacatcaagccggggaacctgctgctcaccaccggtggcaccctcaaaatctccgacctgggcgtggccgaggcactgcacccgttcgcggcggacgacacctgccgga

SEQ ID NO: 180255 - DNA, 746 bp, Homo sapiens
  Payload ID: 15509
  Gene Symbol: STK11
  Gene Name: serine/threonine kinase 11
  ENST ID: ENST00000585748
  CDS Start-End: 682-746
ggcaacagcaaagcatcacgctgagcgccgggaccttctgagtgcaggcggtgggcgaagccccgagtcacacacacccacgacgccggccctgctcccacagcggccctctggggtagcgactggtattacctgcatttcacgagggaggaaactgaggcacgaactgttcagaagctgccctgaggtcaccaagtgagctaggaagaggcgtgggctcgatctctgccacatccacctcgggaaaccacaaggtcctcctaaatgtcttcccagccccttcgagagaattgtggaagtggggttgccagatcaaacacaagacacccagttaaaattcaactgtaggcaaggattcagggacatctcagagccgctggggtctcgtcggtaaagtggtggtggacggcatggaggaactttagccctggaccagaaactttaggtcagtctatgtcagccattgttgctatcagccttcaggtcgtctgggctgggaggtctcctccctcttcctccaggcaccagtgggagcaggcagtcacaccttcctgtgagtgagaaccatagcagaaccttcaaagcacctctcaagtcggggaaattcaactactgaggaggttacggcacaaaaatgtcatccagctggtggatgtgttatacaacgaagagaagcagaaaatgtatatggtgatggagtactgcgtgtgtggcatgcaggaaatgctggacagcgtgccggagaa

SEQ ID NO: 180256 - DNA, 3601 bp, Homo sapiens
  Payload ID: 15510
  Gene Symbol: STK11IP
  Gene Name: serine/threonine kinase 11 interacting protein
  Uniprot ID: Q8N1F8
  ENST ID: ENST00000295641
  CDS Start-End: 44-3343
gataggcgccgggcagctgagctggtaggaggaccagacggggaggttcggctccgccccccagcgtcccgtggccatgacgaccgctcagagggactccctgttgtggaagctcgcggggttgctgcgggagtccggggatgtggtcctgtctggctgtagcaccctgagcctgctgactcccacactgcaacagctgaaccacgtatttgagctgcacctggggccatggggccctggccagacaggctttgtggctctgccctcccatcctgccgactcccctgttattcttcagcttcagtttctcttcgatgtgctgcagaaaacactttcactcaagctggtccatgttgctggtcctggccccacagggcccatcaagattttccccttcaaatcccttcggcacctggagctccgaggtgttcccctccactgtctgcatggcctccgaggcatctactcccagctggagaccctgatttgcagcaggagcctccaggcattagaggagctcctctcagcctgcggcggcgacttctgctctgccctcccttggctggctctgctttctgccaacttcagctacaatgcactgaccgccttagacagctccctgcgcctcttgtcagctctgcgtttcttgaacctaagccacaatcaagtccaggactgtcagggattcctgatggatttgtgtgagctccaccatctggacatctcctataatcgcctgcatttggtgccaagaatgggaccctcaggggctgctctgggggtcctgatactgcgaggcaatgagcttcggagcctgcatggcctagagcagctgaggaatctgcggcacctggatttggcatacaacctgctggaaggacaccgggagctgtcaccactgtggctgctggctgagctccgcaagctctacctggaggggaaccctctttggttccaccctgagcaccgagcagccactgcccagtacttgtcaccccgggccagggatgctgctactggcttccttctcgatggcaaggtcttgtcactgacagattttcagactcacacatccttggggctcagccccatgggcccacctttgccctggccagtggggagtactcctgaaacctcaggtggccctgacctgagtgacagcctctcctcagggggtgttgtgacccagcccctgcttcataaggttaagagccgagtccgtgtgaggcgggcaagcatctctgaacccagtgatacggacccggagccccgaactctgaacccctctccggctggatggttcgtgcagcagcacccggagctggagctcatgagcagcttccgggaacggttcggccgcaactggctgcagtacaggagtcacctggagccctccggaaaccctctgccggccacccccactacttctgcacccagtgcacctccagccagctcccagggccccgacactgcacccagaccttcacccccgcaggaggaagccagaggcccccaggagtcaccacagaaaatgtcagaggaggtcagggcggagccacaggaggaggaagaggagaaggaggggaaggaggagaaggaggagggggagatggtggaacagggagaagaggaggcaggagaggaggaagaagaggagcaggaccagaaggaagtggaagcggaactctgtcgccccttgttggtgtgtcccctggaggggcctgagggcgtacggggcagggaatgctttctcagggtcacttctgcccacctgtttgaggtggaactccaagcagctcgcaccttggagcgactggagctccagagtctggaggcagctgagatagagccggaggcccaggcccagaggtcgcccaggcccacgggctcagatctgctccctggagcccccatcctcagtctgcgcttctcctacatctgccctgaccggcagttgcgtcgctatttggtgctggagcctgatgcccacgcagctgtccaggagctgcttgccgtgttgaccccagtcaccaatgtggctcgggaacagcttggggaggccagggacctcctgctgggtagattccagtgtctacgctgtggccatgagttcaagccagaggagcccaggatgggattagacagtgaggaaggctggaggcctctgttccaaaagacagaatctcctgctgtgtgtcctaactgtggtagtgaccacgtggttctcctcgctgtgtctcggggaacccccaacagggagcggaaacagggagagcagtctctggctccttctccgtctgccagccctgtctgccaccctcctggccatggtgaccaccttgacagggccaagaacagcccacctcaggcaccgagcacccgtgaccatggtagttggagcctcagtcccccccctgagcgctgtggcctccgctctgtggaccaccgactccggctcttcctggatgttgaggtgttcagcgatgcccaggaggagttccagtgctgcctcaaggtgccagtggcattggcaggccacactggggagttcatgtgccttgtggttgtgtctgaccgcaggctgtacctgttgaaggtgactggggagatgcgtgagcctccagctagctggctgcagctgaccctggctgttcccctgcaggatctgagtggcatagagctgggcctggcaggccagagcctgcggctagagtgggcagctggggcgggccgctgtgtgctgctgccccgagatgccaggcattgccgggccttcctagaggagctccttgatgtcttgcagtctctgccccctgcctggaggaactgtgtcagtgccacagaggaggaggtcaccccccagcaccggctctggccattgctggaaaaagactcatccttggaggctcgccagttcttctaccttcgggcgttcctggttgaaggcccttccacctgcctcgtatccctgttgctgactccgtccaccctgttcctgttagatgaggatgctgcagggtccccggcagagccctctcctccagcagcatctggcgaagcctctgagaaggtgcctccctcggggccgggccctgctgtgcgtgtcagggagcagcagccactcagcagcctgagctccgtgctgctctaccgctcagcccctgaggacttgcggctgctcttctacgatgaggtgtcccggctggagagcttttgggcactccgtgtggtgtgtcaggagcagctgacagccctgcttgcctggatccgggaaccatgggaggagctgttttccatcggactccggacagtgatccaagaggcgctggcccttgaccgatgagggtcccacgctgaccttggccctgacctcaggagccacgctgtagacattccctctcctggtctctgggtctggcttccaggctctggctgtggatgtcttcagcctctgggtgctggccagtgaggtcccaaatgacccagggcttaagggagaggcgagagaatgatctggcctcaggggacaggccacctggtcaggaggaatatttttcctgcactttttctcaggtatcaataaagttgtttccaactcata

SEQ ID NO: 180257 - DNA, 3615 bp, Homo sapiens
  Payload ID: 15510
  Gene Symbol: STK11IP
  Gene Name: serine/threonine kinase 11 interacting protein
  ENST ID: ENST00000456909
  CDS Start-End: 91-3357
tcctttccatcattgataggcgccgggcagctgagctggtaggaggaccagacggggaggttcggctccgccccccagcgtcccgtggccatgacgaccgctcagagggactccctgttgtggaagctcgcggggttgctgcgggagtccggggatgtggtcctgtctggctgtagcaccctgagcctgctgactcccacactgcaacagctgaaccacgtatttgagctgcacctggggccatggggccctggccagacaggctttgtggctctgccctcccatcctgccgactcccctgttattcttcagcttcagtttctcttcgatgtgctgcagaaaacactttcactcaagctggtccatgttgctggtcctggccccacagggcccatcaagattttccccttcaaatcccttcggcacctggagctccgaggtgttcccctccactgtctgcatggcctccgaggcatctactcccagctggagaccctgatttgcagcaggagcctccaggcattagaggagctcctctcagcctgcggcggcgacttctgctctgccctcccttggctggctctgctttctgccaacttcagctacaatgcactgaccgccttagacagctccctgcgcctcttgtcagctctgcgtttcttgaacctaagccacaatcaagtccaggactgtcagggattcctgatggatttgtgtgagctccaccatctggacatctcctataatcgcctgcatttggtgccaagaatgggaccctcaggggctgctctgggggtcctgatactgcgaggcaatgagcttcggagcctgcatggcctagagcagctgaggaatctgcggcacctggatttggcatacaacctgctggaaggacaccgggagctgtcaccactgtggctgctggctgagctccgcaagctctacctggaggggaaccctctttggttccaccctgagcaccgagcagccactgcccagtacttgtcaccccgggccagggatgctgctactggcttccttctcgatggcaaggtcttgtcactgacagattttcagactcacacatccttggggctcagccccatgggcccacctttgccctggccagtggggagtactcctgaaacctcaggtggccctgacctgagtgacagcctctcctcagggggtgttgtgacccagcccctgcttcataaggttaagagccgagtccgtgtgaggcgggcaagcatctctgaacccagtgatacggacccggagccccgaactctgaacccctctccggctggatggttcgtgcagcagcacccggagctggagctcatgagcagcttccgggaacggttcggccgcaactggctgcagtacaggagtcacctggagccctccggaaaccctctgccggccacccccactacttctgcacccagtgcacctccagccagctcccagggccccgacactgcacccagaccttcacccccgcaggaggaagccagaggcccccaggagtcaccacagaaaatgtcagaggaggtcagggcggagccacaggaggaggaagaggagaaggaggggaaggaggagaaggaggagggggagatggtggaacagggagaagaggaggcaggagaggaggaagaagaggagcaggaccagaaggaagtggaagcggaactctgtcgccccttgttggtgtgtcccctggaggggcctgagggcgtacggggcagggaatgctttctcagggtcacttctgcccacctgtttgaggtggaactccaagcagctcgcaccttggagcgactggagctccagagtctggaggcagctgagatagagccggaggcccaggcccagaggtcgcccaggcccacgggctcagatctgctccctggagcccccatcctcagtctgcgcttctcctacatctgccctgaccggcagttgcgtcgctatttggtgctggagcctgatgcccacgcagctgtccaggagctgcttgccgtgttgaccccagtcaccaatgtggctcgggaacagcttggggaggccagggacctcctgctgggtagattccagtgtctacgctgtggccatgagttcaagccagaggagcccaggatgggattagacagtgaggaaggctggaggcctctgttccaaaagacagaatctcctgctgtgtgtcctaactgtggtagtgaccacgtggttctcctcgctgtgtctcggggaacccccaacagggagcggaaacagggagagcagtctctggctccttctccgtctgccagccctgtctgccaccctcctggccatggtgaccaccttgacagggccaagaacagcccacctcaggcaccgagcacccgtgaccatggtagttggagcctcagtcccccccctgagcgctgtggcctccgctctgtggaccaccgactccggctcttcctggatgttgaggtgttcagcgatgcccaggaggagttccagtgctgcctcaaggtgccagtggcattggcaggccacactggggagttcatgtgccttgtggttgtgtctgaccgcaggctgtacctgttgaaggtgactggggagatgcgtgagcctccagctagctggctgcagctgaccctggctgttcccctgcaggatctgagtggcatagagctgggcctggcaggccagagcctgcggctagagtgggcagctggggcgggccgctgtgtgctgctgccccgagatgccaggcattgccgggccttcctagaggagctccttgatgtcttgcagtctctgccccctgcctggaggaactgtgtcagtgccacagaggaggaggtcaccccccagcaccggctctggccattgctggaaaaagactcatccttggaggctcgccagttcttctaccttcgggcgttcctggttgaaggcccttccacctgcctcgtatccctgttgctgactccgtccaccctgttcctgttagatgaggatgctgcagggtccccggcagagccctctcctccagcagcatctggcgaagcctctgagaaggtgcctccctcggggccgggccctgctgtgcgtgtcagggagcagcagccactcagcagcctgagctccgtgctgctctaccgctcagcccctgaggacttgcggctgctcttctacgatgaggtgtcccggctggagagcttttgggcactccgtgtggtgtgtcaggagcagctgacagccctgcttgcctggatccgggaaccatgggaggagctgttttccatcggactccggacagtgatccaagaggcgctggcccttgaccgatgagggtcccacgctgaccttggccctgacctcaggagccacgctgtagacattccctctcctggtctctgggtctggcttccaggctctggctgtggatgtcttcagcctctgggtgctggccagtgaggtcccaaatgacccagggcttaagggagaggcgagagaatgatctggcctcaggggacaggccacctggtcaggaggaatatttttcctgcactttttctcaggtatcaataaagttgtttccaactcata

SEQ ID NO: 180258 - DNA, 578 bp, Homo sapiens
  Payload ID: 15510
  Gene Symbol: STK11IP
  Gene Name: serine/threonine kinase 11 interacting protein
  ENST ID: ENST00000456857
  CDS Start-End: 27-359
gctccgccccccagcgtcccgtggccatgacgaccgctcagagggactccctgttgtggaagctcgcggggttgctgcgggagtccggggatgtggtcctgtctggctgtagcaccctgagcctgctgactcccacactgcaacagctgaaccacgtatttgagctgcacctggggccatggggccctggccagacaggctttgtggctctgccctcccatcctgccgactcccctgttattcttcagcttcagtttctcttcgatgtgctgcagaaaacactttcactcaaggttctgggtgtggggaagaggcaggatgtgcaaggagcccaagagaatgatggaagttggggatagggtaggggtgcagaagtctgcagtgccaggatccagagggtgtcagagctggtccatgttgctggtcctggccccacagggcccatcaagattttccccttcaaatcccttcggcacctggagctccgaggtgttcccctccactgtctgcatggcctccgaggcatctactcccagctggagaccctgatttgcagcaggagcctccaggcattagag

SEQ ID NO: 180259 - DNA, 880 bp, Homo sapiens
  Payload ID: 15510
  Gene Symbol: STK11IP
  Gene Name: serine/threonine kinase 11 interacting protein
  ENST ID: ENST00000413891
  CDS Start-End: 1-598
ccagtgctgcctcaaggtgccagtggcattggcaggccacactggggagttcatgtgccttgtggttgtgtctgaccgcaggctgtacctgttgaaggtgactggggagatgcgtgagcctccagctagctggctgcagctgaccctggctgttcccctgcaggatctgagtggcatagagctgggcctggcaggccagagcctgcggctagagtgggcagctggggcgggccgctgtgtgctgctgccccgagatgccaggcattgccgggccttcctagaggagctccttgatgtcttgcagtctctgccccctgcctggaggaactgtgtcagtgccacagaggaggaggtcaccccccagcaccggctctggccattgctggaaaaagactcatccttggaggctcgccagttcttctaccttcgggcgttcctggttgaaggtgaagcctctgtgcagctgatgcttccctggtctctgtaccctaccttgtcacaggcactggcccacgcgcagcacctgtacagtgcccttgcagcaactgtcagttcctggaacctggagaacctctcacttgagggcatagctgagtaacagcctcagtgtgccctgaccctctgggtggggttaggaggcacccaggatcctcagttacccagagcctttgctctcgggcccaggctttctatgaagtggagcagcgtggctgagtcggccctgcctcatcagtcacagaaggagagggtggagccttgtttctgagtagggcccttccacctgcctcgtatccctgttgctgactccgtccaccctgttcctgttagatgaggatgctgcagggtccccggcagagccctctcctccagcagcatctgg

SEQ ID NO: 180260 - DNA, 705 bp, Homo sapiens
  Payload ID: 15510
  Gene Symbol: STK11IP
  Gene Name: serine/threonine kinase 11 interacting protein
  ENST ID: ENST00000447191
  CDS Start-End: 1-500
tagaggagctccttgatgtcttgcagtctctgccccctgcctggaggaactgtgtcagtgccacagaggaggaggtcaccccccagcaccggctctggccattgctggaaaaagactcatccttggaggctcgccagttcttctaccttcgggcgttcctggttgaaggcccttccacctgcctcgtatccctgttgctgactccgtccaccctgttcctgttagatgaggatgctgcagggtccccggcagagccctctcctccagcagcatctggcgaagcctctgagaaggtgcctccctcggggccgggccctgctgtgcgtgtcagggagcagcagccactcagcagcctgagctccgtgctgctctaccgctcagcccctgaggacttgcggctgctcttctacgatgaggtgaggaagctgaggcttggggatgttaaccagtttgcccagtccaaagtggtggagccgggaattgaatccacagttccctgaaattgagcccgcatcttctgtacaacagggaagatgaaaaagacaggtcctctggaggctttcagtaaacgtcggctggattctgtttacaaagctcagagtcaggatcttttatggggagtgacatgggcctggggaaggggagaggcactgagccaaggtggagacagtgaggccttcgcagagacctcccttgtacccaccc

SEQ ID NO: 180261 - DNA, 305 bp, Homo sapiens
  Payload ID: 15510
  Gene Symbol: STK11IP
  Gene Name: serine/threonine kinase 11 interacting protein
  ENST ID: ENST00000483319
  CDS Start-End: 1-290
acatctgccctgaccggcagttgcgtcgctatttggtgctggagcctgatgcccacgcagctgtccaggagctgcttgccgtgttgaccccagtcaccaatgtggctcgggaacagcttggggaggccagggacctcctgctgggtagattccagtgtctacgctgtggccatgagttcaagccagaggagcccaggatgggattagacagtgaggaaggctggaggcctctgttccaaaagacagaccagtcagcactatctttgaagaagacattgaagaagaaataaatattcttgataaca

SEQ ID NO: 180262 - DNA, 1673 bp, Homo sapiens
  Payload ID: 15511
  Gene Symbol: STK16
  Gene Name: serine/threonine kinase 16
  Uniprot ID: O75716
  ENST ID: ENST00000396738
  CDS Start-End: 423-1340
agcactgcttccggtcggtggcgcttctctctggcccgagccaggtcagtccggcagtgcagatggcccatcccgggctctgggctcctagaccggggtgggccctgccaggagtgggcctgagcctcgcacgtcctctgaaactacgctatgctctgcttttgcggcgcgatgggcgtgggagcgggggctgcccaaagatgggctggggttggaggaagtggcccggtagccgctgtgtgtcctgaggccgtaaggcgcctgaccccacccctgaagctggcgacggagcagggcctgttttctctacactatagtcatgatccgctgggcccccagcgcatctcctggaagagcccactcaccctggacgagctcttcggtagcctcagaccgtccttgaagaggatgactgagacattatgggccacgcgctgtgtgtctgctctcggggaactgtcatcattgacaataagcgctacctcttcatccagaaactgggggagggtgggttcagctatgtggacctagtggaagggttacatgatggacacttctacgccctgaagcgaatcctgtgtcacgagcagcaggaccgggaggaggcccagcgagaagccgacatgcatcgcctcttcaatcaccccaacatccttcgcctcgtggcttactgtctgagggaacggggtgctaagcatgaggcctggctgctgctaccattcttcaagagaggtacgctgtggaatgagatagaaaggctgaaggacaaaggcaacttcctgaccgaggatcaaatcctttggctgctgctggggatctgcagaggccttgaggccattcatgccaagggttatgcccacagagacttgaagcccaccaatatattgcttggagatgaggggcagccagttttaatggacttgggttccatgaatcaagcatgcatccatgtggagggctcccgccaggctctgaccctgcaggactgggcagcccagcggtgcaccatctcctaccgagccccagagctcttctctgtgcagagtcactgtgtcatcgatgagcggactgatgtctggtccctaggctgcgtgctatatgccatgatgtttggggaaggcccttatgacatggtgttccaaaagggtgacagtgtggcccttgctgtgcagaaccaactcagcatcccacaaagccccaggcattcttcagcattgcggcagctcctgaactcgatgatgaccgtggacccgcatcagcgtcctcacattcctctcctcctcagtcagctggaggcgcttcagcccccagctcctggccaacatactacccaaatctgaaaaagcagcatgttgagaagatggccccttgtgccttggaaagaggttcccatccctcattggaatcaccacccattccatccaggacttctcttacacttgggggtagcggggtcaggacaatcatctcagtcctgcatcttttcttctgctttcttccctccaagagcaaaacctgggcaaggggacttactgagtgggggtgggtgggggttgggaaaagggaaactggtgggatatggaacatggctctgagcaggactgttgagctcacatagtgttctgactccaaatctgggagcaggagaatgtgtaaacaagaataaagtggaa

SEQ ID NO: 180263 - DNA, 895 bp, Homo sapiens
  Payload ID: 15511
  Gene Symbol: STK16
  Gene Name: serine/threonine kinase 16
  ENST ID: ENST00000409516
  CDS Start-End: 145-708
ctgcttccggtcggtggcgcttctctctggcccgagccagcatgatccgctgggcccccagcgcatctcctggaagagcccactcaccctggacgagctcttcggtagcctcagaccgtccttgaagaggatgactgagacattatgggccacgcgctgtgtgtctgctctcggggaactgtcatcattgacaataagcgctacctcttcatccagaaactgggggagggagacttgaagcccaccaatatattgcttggagatgaggggcagccagttttaatggacttgggttccatgaatcaagcatgcatccatgtggagggctcccgccaggctctgaccctgcaggactgggcagcccagcggtgcaccatctcctaccgagccccagagctcttctctgtgcagagtcactgtgtcatcgatgagcggactgatgtctggtccctaggctgcgtgctatatgccatgatgtttggggaaggcccttatgacatggtgttccaaaagggtgacagtgtggcccttgctgtgcagaaccaactcagcatcccacaaagccccaggcattcttcagcattgcggcagctcctgaactcgatgatgaccgtggacccgcatcagcgtcctcacattcctctcctcctcagtcagctggaggcgcttcagcccccagctcctggccaacatactacccaaatctgaaaaagcagcatgttgagaagatggccccttgtgccttggaaagaggttcccatccctcattggaatcaccacccattccatccaggacttctcttacacttgggggtagcggggtcaggacaatcatctcagtcctgcatcttttcttctgctttcttccctccaagagcaaaacctgggcaagggg

SEQ ID NO: 180264 - DNA, 1069 bp, Homo sapiens
  Payload ID: 15511
  Gene Symbol: STK16
  Gene Name: serine/threonine kinase 16
  ENST ID: ENST00000409743
  CDS Start-End: 105-926
catgatccgctgggcccccagcgcatctcctggaagagcccactcaccctggacgagctcttcggtagcctcagaccgtccttgaagaggatgactgagacattatgggccacgcgctgtgtgtctgctctcggggaactgtcatcattgacaataagcgctacctcttcatccagaaactgggggagggtgggttcagctatgtggacctagtggaagggttacatgatggacacttctacgccctgaagcgaatcctgtgtcacgagcagcaggaccgggaggaggcccagcgagaagccgacatgcatcgcctcttcaatcaccccaacatccttcgcctcgtggcttactgtctgagggaacggggtgctaagcatgaggcctggctgctgctaccattcttcaagagaggtacgctgtggaatgagatagaaaggctgaaggacaaaggcaacttcctgaccgaggatcaaatcctttggctgctgctggggatctgcagaggccttgaggccattcatgccaagggttatgcccacagagacttgaagcccaccaatatattgcttggagatgaggggcagccagttttaatggacttgggttccatgaatcaagcatgcatccatgtggagggctcccgccaggctctgaccctgcagtccctaggctgcgtgctatatgccatgatgtttggggaaggcccttatgacatggtgttccaaaagggtgacagtgtggcccttgctgtgcagaaccaactcagcatcccacaaagccccaggcattcttcagcattgcggcagctcctgaactcgatgatgaccgtggacccgcatcagcgtcctcacattcctctcctcctcagtcagctggaggcgcttcagcccccagctcctggccaacatactacccaaatctgaaaaagcagcatgttgagaagatggccccttgtgccttggaaagaggttcccatccctcattggaatcaccacccattccatccaggacttctcttacacttgggggtagcggggtcaggacaatcatctcagtcctgcatctt

SEQ ID NO: 180265 - DNA, 2868 bp, Homo sapiens
  Payload ID: 15511
  Gene Symbol: STK16
  Gene Name: serine/threonine kinase 16
  Uniprot ID: O75716
  ENST ID: ENST00000409638
  CDS Start-End: 173-1090
acgccggcgcggactgatgatgtcagcactgcttccggtcggtggcgcttctctctggcccgagccagcatgatccgctgggcccccagcgcatctcctggaagagcccactcaccctggacgagctcttcggtagcctcagaccgtccttgaagaggatgactgagacattatgggccacgcgctgtgtgtctgctctcggggaactgtcatcattgacaataagcgctacctcttcatccagaaactgggggagggtgggttcagctatgtggacctagtggaagggttacatgatggacacttctacgccctgaagcgaatcctgtgtcacgagcagcaggaccgggaggaggcccagcgagaagccgacatgcatcgcctcttcaatcaccccaacatccttcgcctcgtggcttactgtctgagggaacggggtgctaagcatgaggcctggctgctgctaccattcttcaagagaggtacgctgtggaatgagatagaaaggctgaaggacaaaggcaacttcctgaccgaggatcaaatcctttggctgctgctggggatctgcagaggccttgaggccattcatgccaagggttatgcccacagagacttgaagcccaccaatatattgcttggagatgaggggcagccagttttaatggacttgggttccatgaatcaagcatgcatccatgtggagggctcccgccaggctctgaccctgcaggactgggcagcccagcggtgcaccatctcctaccgagccccagagctcttctctgtgcagagtcactgtgtcatcgatgagcggactgatgtctggtccctaggctgcgtgctatatgccatgatgtttggggaaggcccttatgacatggtgttccaaaagggtgacagtgtggcccttgctgtgcagaaccaactcagcatcccacaaagccccaggcattcttcagcattgcggcagctcctgaactcgatgatgaccgtggacccgcatcagcgtcctcacattcctctcctcctcagtcagctggaggcgcttcagcccccagctcctggccaacatactacccaaatctgaaaaagcagcatgttgagaagatggccccttgtgccttggaaagaggttcccatccctcattggaatcaccacccattccatccaggacttctcttacacttgggggtagcggggtcaggacaatcatctcagtcctgcatcttttcttctgctttcttccctccaagagcaaaacctgggcaaggggacttactgagtgggggtgggtgggggttgggaaaagggaaactggtgggatatggaacatggctctgagcaggactgttgagctcacatagtgttctgactccaaatctgggagcaggagaatgtgtaaacaagaataaagtggaagcaggttggtgtagatcttagtctcagtgttcctggagtgagagaagaggtgcaaggggcccaaagtcaggttgccatttcaggcgaactgcctgggaaggaggaatggtgcagagtcggcaatggtgtgacttcattctacaggaggttggttagcagtggacagttctagcttgtcttagatcaaaacttaaagctgcttgggctcaagctggcatctgcctgtgtcaagaactagggccccctaaaaacactcaactagttctttccttccttcactcctggggtgagtagcttagtcaaagctgcctagccggtttgctaggcaagggcctctgggtggagacacctgaggaagctttgagacaggtagattacaggtctcccatcctcagcctaggggcgaggggagtggaggtggcagcggcagctgttttggcctgtgtctccctgatcgttcaagctcatacatggttaatgattaatgaggcagtgtggtgtggcagtatccagctgccacttcctgcctactctgctgagtaaacaggggccctgtcttagctgggcttcaaacctgttccctagggaagggctctgttccctgaatcaccagggaggaaaggcaagggcagggttggcatctcctgctcttttgtgatccaagcctcctcccccgaaccatgtctaccccacagtatgacatcagcatggggcctggggctcctgttagcaaagttgaagctttccccagggccctagcaggagtctcccactagctagcacagaggctgaggccagaaagaaatcacaaacagaggggagatgacctgacttttaatggcacagccccagctccagcaaagcagcaagacaggaagctatgcaaagctgctcagaggtgcagtggcacaaacaactctaggagatcgcctgtgttccctcccatcccccaagcttatgacgtggctccatgcccaggaactctgggccagcccagccccactcccaaaccctcataatgcacagaggagcctgggccaagccttgcttccagagttggtaaatgtagaggcagcaggaagaacagggtagcagtctaactttcaaagacagaaaccactggattatactcctacttggaaaggagctgaagactcatccttcaacagtttgtgcctggattttggtcctcatttcctccctatactgagtaaccctaggacttcaatttaaagtccctggggttatgcttcctgggcctggcaagaacccctttgcaggtctcaccttcagcgatggaagggataagggtcatgaacagcaaacagagcagcagcagcatgaaggggaaggcagcagaagctcaagcactcagagggaacaagaaaccgtgcaaggaaactgtttatttcgaaaggattttgcaataaacatagtgaataggc

SEQ ID NO: 180266 - DNA, 1493 bp, Homo sapiens
  Payload ID: 15511
  Gene Symbol: STK16
  Gene Name: serine/threonine kinase 16
  ENST ID: ENST00000409260
  CDS Start-End: 109-1161
ccagcatgatccgctgggcccccagcgcatctcctggaagagcccactcaccctggacgagctcttcggtagcctcagaccgtccttgaagaggatgactgagacattatgggccacgcgctgtgtgtctgctctcggggaactgtcatcattgacaataagcgctacctcttcatccagaaactgggggagggatttctcttagagccacatcttgggaaggtttctgctaaatgggaaggacaccccactccccaccaggaaatttctctaggtccaagccatgtgggagatgaccatggccctttattgacccctttggcccacagtgggttcagctatgtggacctagtggaagggttacatgatggacacttctacgccctgaagcgaatcctgtgtcacgagcagcaggaccgggaggaggcccagcgagaagccgacatgcatcgcctcttcaatcaccccaacatccttcgcctcgtggcttactgtctgagggaacggggtgctaagcatgaggcctggctgctgctaccattcttcaagagaggtacgctgtggaatgagatagaaaggctgaaggacaaaggcaacttcctgaccgaggatcaaatcctttggctgctgctggggatctgcagaggccttgaggccattcatgccaagggttatgcccacagagacttgaagcccaccaatatattgcttggagatgaggggcagccagttttaatggacttgggttccatgaatcaagcatgcatccatgtggagggctcccgccaggctctgaccctgcaggactgggcagcccagcggtgcaccatctcctaccgagccccagagctcttctctgtgcagagtcactgtgtcatcgatgagcggactgatgtctggtccctaggctgcgtgctatatgccatgatgtttggggaaggcccttatgacatggtgttccaaaagggtgacagtgtggcccttgctgtgcagaaccaactcagcatcccacaaagccccaggcattcttcagcattgcggcagctcctgaactcgatgatgaccgtggacccgcatcagcgtcctcacattcctctcctcctcagtcagctggaggcgcttcagcccccagctcctggccaacatactacccaaatctgaaaaagcagcatgttgagaagatggccccttgtgccttggaaagaggttcccatccctcattggaatcaccacccattccatccaggacttctcttacacttgggggtagcggggtcaggacaatcatctcagtcctgcatcttttcttctgctttcttccctccaagagcaaaacctgggcaaggggacttactgagtgggggtgggtgggggttgggaaaagggaaactggtgggatatggaacatggctctgagcaggactgttgagctcacatagtgttctgactccaaatctgggagcaggagaatgtgtaaacaagaataaagtgga

SEQ ID NO: 180267 - DNA, 3368 bp, Homo sapiens
  Payload ID: 15512
  Gene Symbol: STK17A
  Gene Name: serine/threonine kinase 17a
  Uniprot ID: Q9UEE5
  ENST ID: ENST00000319357
  CDS Start-End: 180-1424
gcggggcgcggggcgggcccgagctaccggtagtctgcctgccgcagtccgagcgccgcgctggggagagcgggtgtttgaaggctccgcggaccggcactaggagccgggggcgggtccgtgaccctccggctgctcggagtgaacaggcggccaggaaagaagcgggcctgaacaccatgatccctttggagaagccaggcagcggcggctcctccccaggcgccacctcaggctcgggccgggcaggccggggtctgagcgggccgtgccggccgccgccgccgccccaggcccgcgggctgctgacagagatacgcgccgtggtgcgcaccgagcccttccaggacggctacagcctgtgcccgggccgggagctgggcagggggaaatttgcagtggtgagaaaatgtataaagaaagattctgggaaagaatttgctgcaaagttcatgagaaaaagaagaaaaggccaagattgtcggatggaaataattcatgagattgctgtacttgaactagcacaagacaatccttgggtcattaatttacatgaagtttatgagactgcatcagaaatgatcttagttctggaatatgctgctgggggtgaaatctttgaccagtgtgttgcagacagagaagaagcctttaaagaaaaagatgttcaaagacttatgcgacagattttagaaggtgttcactttttacacactcgtgatgtagttcatcttgatttgaagcctcagaatattctgttgacaagtgaatctccattgggtgacattaagattgttgattttggcctttcaagaatattgaagaacagtgaagagctccgagaaattatgggtacccctgaatatgtggctcctgaaattcttagttatgatcctataagcatggcaacagatatgtggagcattggagtgttaacatatgtcatgcttacaggaatatcacctttcttaggcaatgataaacaagaaacattcttaaacatctcacagatgaatttaagttattctgaggaagaatttgatgttttgtctgagtcggctgttgatttcatcaggacacttttagttaagaaacctgaagatcgagccactgctgaagaatgtctaaagcacccctggttgacacagagcagtattcaagagccttctttcaggatggaaaaggcactagaagaagcaaatgccctccaagaaggtcattctgtgcctgaaattaattcggataccgacaaatcagaaaccaaggaatccattgtaaccgaagagttaattgtagttacttcatatactctaggacaatgcagacagtctgaaaaagagaaaatggagcaaaaggccatttccaaacgatttaaatttgaggaacctttgctacaagaaattccaggagaatttatctactgagcaatatttccctttagaacttcaagatttctacattgaaaatgttaatattatttatggacctctggccaaatggtacatgtactggaagtggataaccagtatcacttacacaaacaaaaataactttgtcaaatttgtggagttaggtggaagccagattttaaaagttgccaaccaggagatttaacaggtacagttacccgtttcaatgttatttttaagaagggagatgttggcacctttgaattctacatcctgtttctccagaatgagaatttgtgtacaaagatatttgtattcactttctttaaaaaatccaagtaaaagtgccaaaactacacttctgtaaatctcttgcattattcatatgtgtatctatatctgcataatgtttgttaatgtctactaaaattgctactttttcactttggatttgtttttggcaaaattttagtctaaacagacatctaaattttcgagacttagaataacattcactaaagtttgataatgtcttttttaaatattttcttactgctttatagtgacttgatttggtttctgttgtgtttttgcctaaatactagtaacatatcagtgaaaaaccctaattttttttctcttcaatgtcactagtaagagaggtggtaatttttcacctctgaaattattctgggtttaggtgtcagctcttgagctgcttccctcatcacaccacactcacatgcatctgttctctctcacactctatacccctgccacttcctggcacctccccccatgcttgtcatttaattttggccacttgtaggtatcagtgtgatctgatcaacactctggttaccttggtcagtgaaaagatgctactatattgcttttgtcccaaagtgagtaaaatcccctagagcagagagagagagagagagagagagtgtcttcatgccaaccacagcctgtttctgctgagtttcttatcagccctcaagctatgctaggaaaagttataaaatgccaaaatatttataaacatttactttgtccataaaaaatttacattggatactctgtaagtaggaggtactttgtcccaaaaagatgtataagaatgtactaatagttttatttgattaggattgaacagttcagttgtatctatgccccacagtgaccagtaaagtccaattaaaatatggaaatgtaaaagtgtatgccgaataccttaaagtaactaattatccttacacacaaaaggctcagtgcattaaatatttgcctatcacctgtgtgctgtgtaccgtggccatgcctcgctctgcactatgaacaactcagacctgtcccttcacggtctgattagggtgtcacacaaagctctctccctaacatggtttctcaactgtcaaaatcatgaaaatgacagcacctaaccactattttaaagtatgtacagtaaatacccaaatgtgtgtaaatgtcatagacatatacaaagtcagtaatctcacccagtcctgctgtgtgaacctgtcaaagcacctgggagtgccctttacaccattaggtgaaattcatcaggcacttcagacaaccaggttgcactgttttctcactaaattggctttatttatacagtttcctggaacctagcattcctaaacaagctccaaaatgcagaagaagaaattgtgccacagtgatagagtttttaatgaatatccatggccacagttttgagtctcaggtaagtcttggaagaagttaaacacagtattaggcaaatatttatctctctgaaaaaatagggaggaggtgaccaggaaaaaataaccactattgaatgacacgtttgtacttgatggatctgtcatcaagttttaaaatcagaatcatttgggctttttaaaaaccattttatactcgtaataaatatatttaatataa

SEQ ID NO: 180268 - DNA, 5287 bp, Homo sapiens
  Payload ID: 15513
  Gene Symbol: STK17B
  Gene Name: serine/threonine kinase 17b
  Uniprot ID: O94768
  ENST ID: ENST00000263955
  CDS Start-End: 288-1406
ccgcgactgcaagcttcggtagtcctctccgctgctgtcgccaggagtcacttcacgagaagccaggtcacaaccgtcggcccttgtctggaaaagtaaaagtggatcctgccacgttcggagctccctggcgcctcgcccggctggagctagagaactcgtcctgtggcggcccccggcgtggggcgggacagcggccccctggagggggcagtcccgggagaacctgcggcggccggagcggtaaaaataagtgactaaagaagcagacctgggaatcacctaacatgtcgaggaggagatttgattgccgaagtatttcaggcctactaactacaactcctcaaattccaataaaaatggaaaactttaataatttctatatacttacatctaaagagctagggagaggaaaatttgctgtggttagacaatgtatatcaaaatctactggccaagaatatgctgcaaaatttctaaaaaagagaagaagaggacaggattgtcgagcagaaattttacacgagattgctgtgcttgaattggcaaagtcttgtccccgtgttattaatcttcatgaggtctatgaaaatacaagtgaaatcattttgatattggaatatgctgcaggtggagaaattttcagcctgtgtttacctgagttggctgaaatggtttctgaaaatgatgttatcagactcattaaacaaatacttgaaggagtttattatctacatcagaataacattgtacaccttgatttaaagccacagaatatattactgagcagcatataccctctcggggacattaaaatagtagattttggaatgtctcgaaaaatagggcatgcgtgtgaacttcgggaaatcatgggaacaccagaatatttagctccagaaatcctgaactatgatcccattaccacagcaacagatatgtggaatattggtataatagcatatatgttgttaactcacacatcaccatttgtgggagaagataatcaagaaacatacctcaatatttctcaagttaatgtagattattcggaagaaactttttcatcagtttcacagctggccacagactttattcagagccttttagtaaaaaatccagagaaaagaccaacagcagagatatgcctttctcattcttggctacagcagtgggactttgaaaacttgtttcaccctgaagaaacttccagttcctctcaaactcaggatcattctgtaaggtcctctgaagacaagacttctaaatcctcctgtaatggaacctgtggtgatagagaagacaaagagaatatcccagaggatagcagcatggtttccaaaagatttcgtttcgatgactcattacccaatccccatgaacttgtttcagatttgctctgttagcacttttttctttgactcatttggactgaatttgaaattttatatccactccagtgagattatgatttgtagcttcatatatgacatgtttatattgtaaatgcacttttccatggaataatttagggaagtgttttaatgttaaattactagttgctagcatgttatgatttcatatcctgagatagctctgcagataagaaaatatttaaatatatgacaaaaagtaaaattgtacatgtgagtttacatgttaatgaaataattcaacttcaaatgaacttaccagaatgttttgcatatcaacaaaaaaagtggcttgagttttattatagttggtgtaaactgaacacagtgaagacattggaatttaataggttctctctctaaggtgactcttataccatgcctctatcaacataatttgtttaggaaagcagtatgaagtttaagccaaaataatttctactttatagatgctcaagagacattttacaattgaaaatgtctttcaattacaaatattttgaaacttcgtaagattttcattctctgtggtctgttatatgagagagatcctttaactagagcaaagagggagttagaaacctgatcagggatattctttacaagttggagcagaggaaagagtagcatgccttcgtattttaacgcaaatgtctttttcctcctcccaacctacttgagatctgataaggtctggaagatggagatatttggtatgcaagtgtagagttttttaatcctccagaatttctagagtagaagatacttaggtatagttaaatattctgtatttttagtcaaacatatttattaattgaatatagaagaaaatgttgacacactcagacagcttactgaattttagatgtcttctgcatcttagaatacaagccagtcattcagagttctaaaagtatgcataaaaaattacagcaccggtaggtctattaacacagtgcccgagtcagcggtagcaagactgatgtgatcataaaacatgacatcaggctcgtctgaagttcttgtgtgaaattcctagtgagtgaggaggctcagcttaaagccatctgcagagtggcccctcattgtggtcttttgctgggaccaatgcaagagactagggagagcaaaatgtttgcttatggctagagactatatccagccctaatgatggggaaagttagtccttttcgggtaatcttttatgaattttcacctgatgaccgttatattggtctgttatcatgttacgataactgtgatctcatgaccatgttgctgtatcagaagaaatagtttgacaaatggtaacaacaacctgatgttccccctttagacctttaacttctcaaaattttggtaagtttccaaattctttaataataacttaaaactttttgaataactatcaggtcactttatttgaccacatggtgaattcctttaatgtcttcagcatttgttaaggaaaagttttctctacttgtgtgtgtatgtgtgcacatgtgtgtatgtacaggtgtatgtatatatctatagatagatacaatacattctttagacacttttcaagattctttgctgtggtatattgtgctcaactcaggtgccaaaggagctttttttttttttttttttttttgagatggagttttgctctgtctctcaggctggagtgcagtggcatgatctcagctcacggcaacctctgcctcccgggttcaagcaattctcctgtctcagcctcctgagtagttgggattacaggcgcatgccaccgtgcccagctaatttttgtatttttagtagagacggggtttcaccatgttggccaggctggtcacaaactcctgacttcaagtgatccacccgcctcggcctcccaaagtgctgggattacaggcgtgagccactgcgcccccgcccaggagctcttttcttatgacatataaattatgacatttatattctttatatgactttatgttctcttcttatgacatttaaattctttaagtagtttgttggtccaataaactagacgttgtataatctaaattgagcccttgtatatctaaaactgatgagttgtttctaaattgttgattgtccatttacttgcctttggtattaagataatgcaagtaaagtttagtaagtcattggataatgaaatgattatgtttctgaagaccatattatatttttaatttttagaggaatcatgccatcccccaaaaaatcaagaaatatttgaattttaaattataagttcatttgttaaaagacatttttacaaatgtctgaaaatcttaaaatactttacatctacctttaagtagtagaatacagagctgtaaatttccatgccttttttcctgatattaagttttatagtaaaaaagcaactagtgattgcacaaagaatataaaaatccactctttttacaaaggtgtgaatttaaataacgttattgattggaatatgaaaatagaccaatcatttaagagctttttagcaaatgattcaattcttactctttttctcccaagattgaaaagcataatgtatttctctaaagtaggaatctagagagcccctgtgagtggacaaatgtcagtaacacttgaacacatgagaagataagtgttatgttgtgataatttaaagttaaatttgctttttgggtaggatccctaaatagatgggatttttaaatagatgatatatagatgacaattgcaattgtcattttaattattttccctacagtaaagaacctagctctgagcagtgaaattgtaatggcactttaaaggaagtaagccgttaactgttctctagtggagcgatctccaactgttttggcactagggacgggttttgtggaagaaaatttttccacaggactgggggtttagggggatggtttcaggatgattcaagtacattacatttatcattagattctcataaggagcatgcaacctagatctcttgcacgtgtggttcacagcaggattcgagctcctttgagaatctaatgccatggctgatctaacaggaaactgagctcaggcagtaatgcttggcaccgccccccaccttctatgcagcccggtcgtggcctggggactggggacccctgctctagtcagtaataaggtacttgtgccagaatataaatcaacacattgcttcctttatcaaagaagtcttgttatttaaaaaaagtcaactgagccagtatgattagtgatgtaattgattttcattctggcacaagcctctttcattctggacagctcacaaatagttaatggaccatgctttgaatagccttcctctaagcaacatttataaatactgatattttagaactgtttacatttcttctgtttatttttgaattttcagtttgatatcttgtccttattcattgttgtataaacaactgtactttaatttcaagtagtattaaaagtatttcacttcagtttggggggattattatcaatttataattttataaaagtattttaaagaataattgtaaattttccataaattacaacttcctgccatattttattaaataataatcttgcttaaggcatatagacagacattattatgagtattccagtaaaaaaaatctacatcaacttgaccattctggctaaaaattaaaaagcacttttttatatctgtggttgtcatttgtttcaaagcatttctaaatttattgttcttaaaagtatgtctgcatgttctagcctttgacctaggtcatctatgaaccctctttgtgtctaataaacatatctgtaaaggcatataaatctgaaaacaa

SEQ ID NO: 180269 - DNA, 1441 bp, Homo sapiens
  Payload ID: 15513
  Gene Symbol: STK17B
  Gene Name: serine/threonine kinase 17b
  Uniprot ID: O94768
  ENST ID: ENST00000409228
  CDS Start-End: 323-1441
ctctttctctctcacagcttctcacgaggtagaactttagagcctggtgtgtttgtggctggagcatagcagctcttctacaactttactgtagtttctactgaatattttggtttgcaaatataaaggattctctgaagcacaaccttaaataacgtgtggtagacacctgggagaggaaaactgcagacagaaaaatgtggccggatgctctgtgggcgggcggcagcgatgttcggccaggtggctccaaggagaggaagcagtgatgcattgaggtaaaaataagtgactaaagaagcagacctgggaatcacctaacatgtcgaggaggagatttgattgccgaagtatttcaggcctactaactacaactcctcaaattccaataaaaatggaaaactttaataatttctatatacttacatctaaagagctagggagaggaaaatttgctgtggttagacaatgtatatcaaaatctactggccaagaatatgctgcaaaatttctaaaaaagagaagaagaggacaggattgtcgagcagaaattttacacgagattgctgtgcttgaattggcaaagtcttgtccccgtgttattaatcttcatgaggtctatgaaaatacaagtgaaatcattttgatattggaatatgctgcaggtggagaaattttcagcctgtgtttacctgagttggctgaaatggtttctgaaaatgatgttatcagactcattaaacaaatacttgaaggagtttattatctacatcagaataacattgtacaccttgatttaaagccacagaatatattactgagcagcatataccctctcggggacattaaaatagtagattttggaatgtctcgaaaaatagggcatgcgtgtgaacttcgggaaatcatgggaacaccagaatatttagctccagaaatcctgaactatgatcccattaccacagcaacagatatgtggaatattggtataatagcatatatgttgttaactcacacatcaccatttgtgggagaagataatcaagaaacatacctcaatatttctcaagttaatgtagattattcggaagaaactttttcatcagtttcacagctggccacagactttattcagagccttttagtaaaaaatccagagaaaagaccaacagcagagatatgcctttctcattcttggctacagcagtgggactttgaaaacttgtttcaccctgaagaaacttccagttcctctcaaactcaggatcattctgtaaggtcctctgaagacaagacttctaaatcctcctgtaatggaacctgtggtgatagagaagacaaagagaatatcccagaggatagcagcatggtttccaaaagatttcgtttcgatgactcattacccaatccccatgaacttgtttcagatttgctctgttag

SEQ ID NO: 180270 - DNA, 507 bp, Homo sapiens
  Payload ID: 15513
  Gene Symbol: STK17B
  Gene Name: serine/threonine kinase 17b
  ENST ID: ENST00000420683
  CDS Start-End: 306-507
aggaaaactgcagacagaaaaatgtggccggatgctctgtgggcgggcggcagcgatgttcggccaggtggctccaaggagaggaagcagtgatgcattgagggagtaaacatggaatcggtgagaatcactttccttgatcattatgtggtcagtatgcggtgactgacttgatgtgactggggaaggtcccttccctggacagaatatggtgagtgtcgtgccattaccggagaggatcaccttccctggccacatgtggtaaaaataagtgactaaagaagcagacctgggaatcacctaacatgtcgaggaggagatttgattgccgaagtatttcaggcctactaactacaactcctcaaattccaataaaaatggaaaactttaataatttctatatacttacatctaaagagctagggagaggaaaatttgctgtggttagacaatgtatatcaaaatctactggccaagaatatgctgcaaaatttctaaaaaagagaa

SEQ ID NO: 180271 - DNA, 567 bp, Homo sapiens
  Payload ID: 15513
  Gene Symbol: STK17B
  Gene Name: serine/threonine kinase 17b
  ENST ID: ENST00000449152
  CDS Start-End: 548-567
aggtcgcgccaggcagggcccccttcgcggcgggcccgcgcgggtcccttccacagcaaggccacgcggtccccctagcctctcccgagtcccagctgcggcgtgggcgcgttcccatcgggactcgtggacgcgtcctgctcccagctgcctttcgtctagagaaaggcaaccagatgtttgaggagggcttggtggacaaaggtgacattcatgctccactatatgcaaaactggccaaaggagaggaaatggaaaaatatcttggctctgacaattggttcagatgcagtaaataaaaggaaaatgaacttaagaaatgcttaatggatgcctaaagcagcttgtgatcactggaagatcaattcttttatcatccatactttagaggcagcaaaatcgaagctttcttcaccagtaaaagggaatgcgaagtaaatcacaacaaaattccatttcaccttcatcacactagaatagccaaacttaaaagtctgaattgggtaaaaataagtgactaaagaagcagacctgggaatcacctaacatgtcgaggaggagatttga

SEQ ID NO: 180272 - DNA, 562 bp, Homo sapiens
  Payload ID: 15513
  Gene Symbol: STK17B
  Gene Name: serine/threonine kinase 17b
  ENST ID: ENST00000606789
  CDS Start-End: 1-210
aaatttgctgtggttagacaatgtatatcaaaatctactggccaagaatatgctgcaaaatttctaaaaaagagaagaagaggacaggattgtcgagcagaaattttacacgagattgctgtgcttgaattggcaaagtcttgtccccgtgttattaatcttcatgaggtctatgaaaatacaagtgaaatcattttgatattggaatagtaagtatatactaaatagtacctattttagttggtatgaaaagatgattaaaatgtcaagaataagaatgataaaggtgtgacaagaacttgtaaagattcctgttaataaaatgtaaaagggacctaatttatattcagatattttcataagactaaatgtatagcctcgggcacatacacaaaaactaacagcacagaataagcaaatgacaaatacaacatttgaggaatgtggagaaatgaatatacattattttcttaatggctaattgattgaatttttctggaacacaatctgatgggcagatagaattgaagtaatttgtatattttcttcatctatttgaaaa

SEQ ID NO: 180273 - DNA, 1663 bp, Homo sapiens
  Payload ID: 15514
  Gene Symbol: STK19
  Gene Name: serine/threonine kinase 19
  Uniprot ID: P49842
  ENST ID: ENST00000375331
  CDS Start-End: 167-1261
ctgcctctttccttgcccttcacccaccctccctccaggtcctccaaatgcagtgaggttaggaaggacgtctgcgctcagatcaagaatccagttacctcaaagctccccaacttccacctccgcagagctatgacgtcatggcaggcacgccagaggccgaaggatgcaaaagtggttttctgctttcgatgatgcaatcattcagcgacagtggcgggcaaacccctcccggggcgggggaggtgtgagcttcacgaaggaggttgacaccaacgtggccaccggcgcccctccacgccgccaacgagtccccgggcgtgcgtgcccttggagggagccaatccgcggccggcgtggggcccggcctggcggaggtgatgctggagggacgcccggggagaccgtacgtcactgctctgcgccggaagaccctattttcaggttctcttccctccattcctaccccttccccggtaccataaaatcccgggatatgagctggaagaggcatcacctgatcccggagacctttggagttaagaggcggcggaagcgagggcctgtggagtcggatcctcttcggggtgagccagggtcggcgcgcgcggctgtctcagaactcatgcagctgttcccgcgaggcctgtttgaggacgcgctgccgcccatcgtgctgaggagccaggtgtacagccttgtgcctgacaggaccgtggccgaccggcagctgaaggagcttcaagagcagggggagatcagaatcgtccagctgggcttcgacttggatgcccatggaattatcttcactgaggactacaggaccagagtcctcaaggcctgtgatggccgaccgtatgctggggcagtgcagaaatttctagcttcagtacttccagcctgtggggaccttagtttccagcaggaccaaatgacacagacctttggcttcagggactcagaaatcacgcatctggtgaatgctggagtcctcaccgtccgagatgctgggagctggtggctagctgtgcctggagctgggagattcatcaagtactttgttaaagggcgccaggctgtccttagcatggtccggaaggcaaagtaccgggaactgctcctatcagagctcctgggccggcgggcgcctgtcgtggtgcggcttggcctcacctaccatgtgcacgacctcattggggcccagctagtggactgcatctctaccacttcaggaaccctcctccgcctgccagagacatgaagattctgctcatcattgctcagctcctcagagtgggccgggaggggactagaagagctgcatgatggtggctgagacagggtcaccttgggaaggcttgggagccaggatgagtgtcgggctctcgtgtgtgcaaaaggtcagatgtgactgctgctgtttgcctggtttctgacccagtggtggggtttgagcaatgcttctctgcccttccatggaaagtggaaccagaaatggtgccaaggctgtggctgttccctttcgtgtaaaatggtgctgttattactctgtcttgaaataggaaggtgggatttctggggaggctggtgaaggagggcagggttcttttctctacgtgtcatgttaaaattgccaaataaagtacctctgcctgtgatattt

SEQ ID NO: 180274 - DNA, 1557 bp, Homo sapiens
  Payload ID: 15514
  Gene Symbol: STK19
  Gene Name: serine/threonine kinase 19
  Uniprot ID: P49842
  ENST ID: ENST00000375333
  CDS Start-End: 54-1160
cttccacctccgcagagctatgacgtcatggcaggcacgccagaggccgaaggatgcaaaagtggttttctgctttcgatgatgcaatcattcagcgacagtggcgggcaaacccctcccggggcgggggaggtgtgagcttcacgaaggaggttgacaccaacgtggccaccggcgcccctccacgccgccaacgagtccccgggcgtgcgtgcccttggagggagccaatccgcggccggcgtggggcccggcctggcggaggtgatgctggagggacgcccggggagaccgtacgtcactgctctgcgccggaagaccctattttcaggttctcttccctccattcctaccccttccccggtaccataaaatcccgggatatgagctggaagaggcatcacctgatcccggagacctttggagttaagaggcggcggaagcgagggcctgtggagtcggatcctcttcggggtgagccagggtcggcgcgcgcggctgtctcagaactcatgcagctgttcccgcgaggcctgtttgaggacgcgctgccgcccatcgtgctgaggagccaggtgtacagccttgtgcctgacaggaccgtggccgaccggcagctgaaggagcttcaagagcagggggagatcagaatcgtccagctgggcttcgacttggatgcccatggaattatcttcactgaggactacaggaccagagtatgtgactgtgtcctcaaggcctgtgatggccgaccgtatgctggggcagtgcagaaatttctagcttcagtacttccagcctgtggggaccttagtttccagcaggaccaaatgacacagacctttggcttcagggactcagaaatcacgcatctggtgaatgctggagtcctcaccgtccgagatgctgggagctggtggctagctgtgcctggagctgggagattcatcaagtactttgttaaagggcgccaggctgtccttagcatggtccggaaggcaaagtaccgggaactgctcctatcagagctcctgggccggcgggcgcctgtcgtggtgcggcttggcctcacctaccatgtgcacgacctcattggggcccagctagtggactgcatctctaccacttcaggaaccctcctccgcctgccagagacatgaagattctgctcatcattgctcagctcctcagagtgggccgggaggggactagaagagctgcatgatggtggctgagacagggtcaccttgggaaggcttgggagccaggatgagtgtcgggctctcgtgtgtgcaaaaggtcagatgtgactgctgctgtttgcctggtttctgacccagtggtggggtttgagcaatgcttctctgcccttccatggaaagtggaaccagaaatggtgccaaggctgtggctgttccctttcgtgtaaaatggtgctgttattactctgtcttgaaataggaaggtgggatttctggggaggctggtgaaggagggcagggttcttttctctacgtgtcatgttaaaattgccaaataaagtacctctgcctgtga

SEQ ID NO: 180275 - DNA, 1557 bp, Homo sapiens
  Payload ID: 15514
  Gene Symbol: STK19
  Gene Name: serine/threonine kinase 19
  Uniprot ID: P49842
  ENST ID: ENST00000383327
  CDS Start-End: 54-1160
cttccacctccgcagagctatgacgtcatggcaggcacgccagaggccgaaggatgcaaaagtggttttctgctttcgatgatgcaatcattcagcgacagtggcgggcaaacccctcccggggcgggggaggtgtgagcttcacgaaggaggttgacaccaacgtggccaccggcgcccctccacgccgccaacgagtccccgggcgtgcgtgcccttggagggagccaatccgcggccggcgtggggcccggcctggcggaggtgatgctggagggacgcccggggagaccgtacgtcactgctctgcgccggaagaccctattttcaggttctcttccctccattcctaccccttccccggtaccataaaatcccgggatatgagctggaagaggcatcacctgatcccggagacctttggagttaagaggcggcggaagcgagggcctgtggagtcggatcctcttcggggtgagccagggtcggcgcgcgcggctgtctcagaactcatgcagctgttcccgcgaggcctgtttgaggacgcgctgccgcccatcgtgctgaggagccaggtgtacagccttgtgcctgacaggaccgtggccgaccggcagctgaaggagcttcaagagcagggggagatcagaatcgtccagctgggcttcgacttggatgcccatggaattatcttcactgaggactacaggaccagagtatgtgactgtgtcctcaaggcctgtgatggccgaccgtatgctggggcagtgcagaaatttctagcttcagtacttccagcctgtggggaccttagtttccagcaggaccaaatgacacagacctttggcttcagggactcagaaatcacgcatctggtgaatgctggagtcctcaccgtccgagatgctgggagctggtggctagctgtgcctggagctgggagattcatcaagtactttgttaaagggcgccaggctgtccttggcatggtccggaaggcaaagtaccgggaactgctcctatcagagctcctgggccggcgggcgcctgtcgtggtgcggcttggcctcacctaccatgtgcacgacctcattggggcccagctagtggactgcatctctaccacttcaggaaccctcctccgcctgccagagacatgaagattctgctcatcattgctcagctcctcagagtgggccgggaggggactagaagagctgcatgatggtggctgagacagggtcaccttgggaaggcttgggagccaggatgagtgtcgggctctcgtgtgtgcaaaaggtcagatgtgactgctgctgtttgcctggtttctgacccagtggtggggtttgagcaatgcttctctgcccttccatggaaagtggaaccagaaatggtgccaaggctgtggctgttccctttcgtgtaaaatggtgctgttattactctgtcttgaaataggaaggtgggatttctggggaggctggtgaaggagggcagggttcttttctctacgtgtcatgttaaaattgccaaataaagtacctctgcctgtga

SEQ ID NO: 180276 - DNA, 1620 bp, Homo sapiens
  Payload ID: 15514
  Gene Symbol: STK19
  Gene Name: serine/threonine kinase 19
  ENST ID: ENST00000383328
  CDS Start-End: 129-1223
gtcctccaaatgcagtgaggttaggaaggacgtctgcgctcagatcaagaatccagttacctcaaagctccccaacttccacctccgcagagctatgacgtcatggcaggcacgccagaggccgaaggatgcaaaagtggttttctgctttcgatgatgcaatcattcagcgacagtggcgggcaaacccctcccggggcgggggaggtgtgagcttcacgaaggaggttgacaccaacgtggccaccggcgcccctccacgccgccaacgagtccccgggcgtgcgtgcccttggagggagccaatccgcggccggcgtggggcccggcctggcggaggtgatgctggagggacgcccggggagaccgtacgtcactgctctgcgccggaagaccctattttcaggttctcttccctccattcctaccccttccccggtaccataaaatcccgggatatgagctggaagaggcatcacctgatcccggagacctttggagttaagaggcggcggaagcgagggcctgtggagtcggatcctcttcggggtgagccagggtcggcgcgcgcggctgtctcagaactcatgcagctgttcccgcgaggcctgtttgaggacgcgctgccgcccatcgtgctgaggagccaggtgtacagccttgtgcctgacaggaccgtggccgaccggcagctgaaggagcttcaagagcagggggagatcagaatcgtccagctgggcttcgacttggatgcccatggaattatcttcactgaggactacaggaccagagtcctcaaggcctgtgatggccgaccgtatgctggggcagtgcagaaatttctagcttcagtacttccagcctgtggggaccttagtttccagcaggaccaaatgacacagacctttggcttcagggactcagaaatcacgcatctggtgaatgctggagtcctcaccgtccgagatgctgggagctggtggctagctgtgcctggagctgggagattcatcaagtactttgttaaagggcgccaggctgtccttggcatggtccggaaggcaaagtaccgggaactgctcctatcagagctcctgggccggcgggcgcctgtcgtggtgcggcttggcctcacctaccatgtgcacgacctcattggggcccagctagtggactgcatctctaccacttcaggaaccctcctccgcctgccagagacatgaagattctgctcatcattgctcagctcctcagagtgggccgggaggggactagaagagctgcatgatggtggctgagacagggtcaccttgggaaggcttgggagccaggatgagtgtcgggctctcgtgtgtgcaaaaggtcagatgtgactgctgctgtttgcctggtttctgacccagtggtggggtttgagcaatgcttctctgcccttccatggaaagtggaaccagaaatggtgccaaggctgtggctgttccctttcgtgtaaaatggtgctgttattactctgtcttgaaataggaaggtgggatttctggggaggctggtgaaggagggcagggttcttttctctacgtgtcatgttaaaattgccaaataaagtacctctgcctgtga

SEQ ID NO: 180277 - DNA, 1620 bp, Homo sapiens
  Payload ID: 15514
  Gene Symbol: STK19
  Gene Name: serine/threonine kinase 19
  Uniprot ID: P49842
  ENST ID: ENST00000426802
  CDS Start-End: 129-1223
gtcctccaaatgcagtgaggttaggaaggacgtctgcgctcagatcaagaatccagttacctcaaagctccccaacttccacctccgcagagctatgacgtcatggcaggcacgccagaggccgaaggatgcaaaagtggttttctgctttcgatgatgcaatcattcagcgacagtggcgggcaaacccctcccggggcgggggaggtgtgagcttcacgaaggaggttgacaccaacgtggccaccggcgcccctccacgccgccaacgagtccccgggcgtgcgtgcccttggagggagccaatccgcggccggcgtggggcccggcctggcggaggtgatgctggagggacgcccggggagaccgtacgtcactgctctgcgccggaagaccctattttcaggttctcttccctccattcctaccccttccccggtaccataaaatcccgggatatgagctggaagaggcatcacctgatcccggagacctttggagttaagaggcggcggaagcgagggcctgtggagtcggatcctcttcggggtgagccagggtcggcgcgcgcggctgtctcagaactcatgcagctgttcccgcgaggcctgtttgaggacgcgctgccgcccatcgtgctgaggagccaggtgtacagccttgtgcctgacaggaccgtggccgaccggcagctgaaggagcttcaagagcagggggagatcagaatcgtccagctgggcttcgacttggatgcccatggaattatcttcactgaggactacaggaccagagtcctcaaggcctgtgatggccgaccgtatgctggggcagtgcagaaatttctagcttcagtacttccagcctgtggggaccttagtttccagcaggaccaaatgacacagacctttggcttcagggactcagaaatcacgcatctggtgaatgctggagtcctcaccgtccgagatgctgggagctggtggctagctgtgcctggagctgggagattcatcaagtactttgttaaagggcgccaggctgtccttagcatggtccggaaggcaaagtaccgggaactgctcctatcagagctcctgggccggcgggcgcctgtcgtggtgcggcttggcctcacctaccatgtgcacgacctcattggggcccagctagtggactgcatctctaccacttcaggaaccctcctccgcctgccagagacatgaagattctgctcatcattgctcagctcctcagagtgggccgggaggggactagaagagctgcatgatggtggctgagacagggtcaccttgggaaggcttgggagccaggatgagtgtcgggctctcgtgtgtgcaaaaggtcagatgtgactgctgctgtttgcctggtttctgacccagtggtggggtttgagcaatgcttctctgcccttccatggaaagtggaaccagaaatggtgccaaggctgtggctgttccctttcgtgtaaaatggtgctgttattactctgtcttgaaataggaaggtgggatttctggggaggctggtgaaggagggcagggttcttttctctacgtgtcatgttaaaattgccaaataaagtacctctgcctgtga

SEQ ID NO: 180278 - DNA, 1557 bp, Homo sapiens; identical to SEQ ID NO: 180274
  Payload ID: 15514
  Gene Symbol: STK19
  Gene Name: serine/threonine kinase 19
  Uniprot ID: P49842
  ENST ID: ENST00000438256
  CDS Start-End: 54-1160

SEQ ID NO: 180279 - DNA, 1620 bp, Homo sapiens; identical to SEQ ID NO: 180277
  Payload ID: 15514
  Gene Symbol: STK19
  Gene Name: serine/threonine kinase 19
  Uniprot ID: P49842
  ENST ID: ENST00000424104
  CDS Start-End: 129-1223

SEQ ID NO: 180280 - DNA, 1620 bp, Homo sapiens; identical to SEQ ID NO: 180277
  Payload ID: 15514
  Gene Symbol: STK19
  Gene Name: serine/threonine kinase 19
  Uniprot ID: P49842
  ENST ID: ENST00000425138
  CDS Start-End: 129-1223

SEQ ID NO: 180281 - DNA, 1557 bp, Homo sapiens; identical to SEQ ID NO: 180274
  Payload ID: 15514
  Gene Symbol: STK19
  Gene Name: serine/threonine kinase 19
  Uniprot ID: P49842
  ENST ID: ENST00000433397
  CDS Start-End: 54-1160

SEQ ID NO: 180282 - DNA, 1620 bp, Homo sapiens; identical to SEQ ID NO: 180277
  Payload ID: 15514
  Gene Symbol: STK19
  Gene Name: serine/threonine kinase 19
  Uniprot ID: P49842
  ENST ID: ENST00000444147
  CDS Start-End: 129-1223

SEQ ID NO: 180283 - DNA, 1557 bp, Homo sapiens; identical to SEQ ID NO: 180274
  Payload ID: 15514
  Gene Symbol: STK19
  Gene Name: serine/threonine kinase 19
  Uniprot ID: P49842
  ENST ID: ENST00000431383
  CDS Start-End: 54-1160

SEQ ID NO: 180284 - DNA, 1557 bp, Homo sapiens; identical to SEQ ID NO: 180274
  Payload ID: 15514
  Gene Symbol: STK19
  Gene Name: serine/threonine kinase 19
  Uniprot ID: P49842
  ENST ID: ENST00000452688
  CDS Start-End: 54-1160

SEQ ID NO: 180285 - DNA, 575 bp, Homo sapiens
  Payload ID: 15514
  Gene Symbol: STK19
  Gene Name: serine/threonine kinase 19
  ENST ID: ENST00000460018
  CDS Start-End: 238-575
aggctgaaggtctgacacaagcattagtgagatgctcccctcgaagaatagtcttgtttcttctaaggactgattctcaccccggctttggctctcctaattttagagggtcctccaaatgcagtgaggttaggaaggacgtctgcgctcagatcaagaatccagttacctcaaagctccccaacttccacctccgcagagctatgacgtcatggcaggcacgccagaggccgaaggatgcaaaagtggttttctgctttcgatgatgcaatcattcagcgacagtggcgggcaaacccctcccggggcgggggaggtgtgagcttcacgaaggaggttgacaccaacgtggccaccggcgcccctccacgccgccaacgagtccccgggcgtgcgtgcccttggagggagccaatccgcggccggcgtggggcccggcctggcggaggtgatgctggagggacgcccggggagaccgtacgtcactgctctgcgccggaagaccctattttcaggttctcttccctccattcctaccccttccccggtaccataaaatcccgggatatgagctg

SEQ ID NO: 180286 - DNA, 1039 bp, Homo sapiens
  Payload ID: 15514
  Gene Symbol: STK19
  Gene Name: serine/threonine kinase 19
  ENST ID: ENST00000483801
  CDS Start-End: 1-211
ccccttccccggtaccataaaatcccgggatatgagctggaagaggcatcacctgatcccggagacctttggagttaagaggcggcggaagcgagggcctgtggagtcggatcctcttcggggtgagccagaaggagcttcaagagcagggggagatcagaatcgtccagctgggcttcgacttggatgcccatggaattatcttcactgaggactacaggaccagagtcctcaaggcctgtgatggccgaccgtatgctggggcagtgcagaaatttctagcttcagtacttccagcctgtggggaccttagtttccagcaggaccaaatgacacagacctttggcttcagggactcagaaatcacgcatctggtgaatgctggagtcctcaccgtccgagatgctgggagctggtggctagctgtgcctggagctgggagattcatcaagtactttgttaaagggcgccaggctgtccttagcatggtccggaaggcaaagtaccgggaactgctcctatcagagctcctgggccggcgggcgcctgtcgtggtgcggcttggcctcacctaccatgtgcacgacctcattggggcccagctagtggactgcatctctaccacttcaggaaccctcctccgcctgccagagacatgaagattctgctcatcattgctcagctcctcagagtgggccgggaggggactagaagagctgcatgatggtggctgagacagggtcaccttgggaaggcttgggagccaggatgagtgtcgggctctcgtgtgtgcaaaaggtcagatgtgactgctgctgtttgcctggtttctgacccagtggtggggtttgagcaatgcttctctgcccttccatggaaagtggaaccagaaatggtgccaaggctgtggctgttccctttcgtgtaaaatggtgctgttattactctgtcttgaaataggaaggtgggatttctggggaggctggtgaaggagggcagggttcttttctctacgtgtcatgttaaaattgccaaataa

SEQ ID NO: 180287 - DNA, 1101 bp, Homo sapiens
  Payload ID: 15514
  Gene Symbol: STK19
  Gene Name: serine/threonine kinase 19
  ENST ID: ENST00000520138
  CDS Start-End: 1-211
ccccttccccggtaccataaaatcccgggatatgagctggaagaggcatcacctgatcccggagacctttggagttaagaggcggcggaagcgagggcctgtggagtcggatcctcttcggggtgagccagaaggagcttcaagagcagggggagatcagaatcgtccagctgggcttcgacttggatgcccatggaattatcttcactgaggactacaggaccagagtcctcaaggcctgtgatggccgaccgtatgctggggcagtgcagaaatttctagcttcagtacttccagcctgtggggaccttagtttccagcaggaccaaatgacacagacctttggcttcagggactcagaaatcacgcatctggtgaatgctggagtcctcaccgtccgagatgctgggagctggtggctagctgtgcctggagctgggagattcatcaagtactttgttaaagggcgccaggctgtccttagcatggtccggaaggcaaagtaccgggaactgctcctatcagagctcctgggccggcgggcgcctgtcgtggtgcggcttggcctcacctaccatgtgcacgacctcattggggcccagctagtggactgcatctctaccacttcaggaaccctcctccgcctgccagagacatgaagattctgctcatcattgctcagctcctcagagtgggccgggaggggactagaagagctgcatgatggtggctgagacagggtcaccttgggaaggcttgggagccaggatgagtgtcgggctctcgtgtgtgcaaaaggttgctcttgttctctccttctgtggttcatctgggggtccccctatcggtgggggtgcagctccaggatgtgccccgaggacaggtagtgaaaggatcagtgttcctgagaaacccatctcgtaataatgtcccctgctccccaaaggtggacttcacccttagctcagaaagagacttcgcactcctcagtctccaggtgcccttgaaagatgcgaagagctgtggcctccatcaactcctcagaggccctgaggtccagctggtggcccattcgccatggctaaaggactctctgtccag

SEQ ID NO: 180288 - DNA, 798 bp, Homo sapiens
  Payload ID: 15514
  Gene Symbol: STK19
  Gene Name: serine/threonine kinase 19
  ENST ID: ENST00000523972
  CDS Start-End: 1-211
ccccttccccggtaccataaaatcccgggatatgagctggaagaggcatcacctgatcccggagacctttggagttaagaggcggcggaagcgagggcctgtggagtcggatcctcttcggggtgagccagaaggagcttcaagagcagggggagatcagaatcgtccagctgggcttcgacttggatgcccatggaattatcttcactgaggactacaggaccagagtcctcaaggcctgtgatggccgaccgtatgctggggcagtgcagaaatttctagcttcagtacttccagcctgtggggaccttagtttccagcaggaccaaatgacacagacctttggcttcagggactcagaaatcacgcatctggtgaatgctggagtcctcaccgtccgagatgctgggagctggtggctagctgtgcctggagctgggagattcatcaagtactttgttaaagggcgccaggctgtccttagcatggtccggaaggcaaagtaccgggaactgctcctatcagagctcctgggccggcgggcgcctgtcgtggtgcggcttggcctcacctaccatgtgcacgacctcattggggcccagctagtggactgcatctctaccacttcaggaaccctcctccgcctgccagagacatgaagattctgctcatcattgctcagctcctcagagtgggccgggaggggactagaagagctgcatgatggtggctgagacagggtcaccttgggaaggcttgggagccaggatgagtgtcgggctctcgtgtgtgcaaaag

SEQ ID NO: 180289 - DNA, 1804 bp, Homo sapiens
  Payload ID: 15514
  Gene Symbol: STK19
  Gene Name: serine/threonine kinase 19
  ENST ID: ENST00000549310
  CDS Start-End: 443-1408
gtctgacacaagcattagtgagatgctcccctcgaagaatagtcttgtttcttctaaggactgattctcaccccggctttggctctcctaattttagagggtcctccaaatgcagtgaggttaggaaggacgtctgcgctcagatcaagaatccagttacctcaaagctccccaacttccacctccgcagagctatgacgtcatggcaggcacgccagaggccgaaggatgcaaaagtggttttctgctttcgatgatgcaatcattcagcgacagtggcgggcaaacccctcccggggcgggggaggtgtgagcttcacgaaggaggttgacaccaacgtggccaccggcgcccctccacgccgccaacgagtccccgggcgtgcgtgcccttggagggagccaatccgcggccggcgtggggcccggcctggcggaggtgatgctggtatgtgcgtcgccaccgcccctcccagcactgacgggcctgagggacgacaagttgacgctcctttcgtcatcacctggtctaggagggacgcccggggagaccgtacgtcactgctctgcgccggaagaccctattttcaggttctcttccctccattcctaccccttccccggtaccataaaatcccgggatatgagctggaagaggcatcacctgatcccggagacctttggagttaagaggcggcggaagcgagggcctgtggagtcggatcctcttcggggtgagccagggtcggcgcgcgcggctgtctcagaactcatgcagctgttcccgcgaggcctgtttgaggacgcgctgccgcccatcgtgctgaggagccaggtgtacagccttgtgcctgacaggaccgtggccgaccggcagctgaaggagcttcaagagcagggggagatcagaatcgtccagctgggcttcgacttggatgcccatggaattatcttcactgaggactacaggaccagagtcctcaaggcctgtgatggccgaccgtatgctggggcagtgcagaaatttctagcttcagtacttccagcctgtggggaccttagtttccagcaggaccaaatgacacagacctttggcttcagggactcagaaatcacgcatctggtgaatgctggagtcctcaccgtccgagatgctgggagctggtggctagctgtgcctggagctgggagattcatcaagtactttgttaaagggcgccaggctgtccttagcatggtccggaaggcaaagtaccgggaactgctcctatcagagctcctgggccggcgggcgcctgtcgtggtgcggcttggcctcacctaccatgtgcacgacctcattggggcccagctagtggactgcatctctaccacttcaggaaccctcctccgcctgccagagacatgaagattctgctcatcattgctcagctcctcagagtgggccgggaggggactagaagagctgcatgatggtggctgagacagggtcaccttgggaaggcttgggagccaggatgagtgtcgggctctcgtgtgtgcaaaaggtcagatgtgactgctgctgtttgcctggtttctgacccagtggtggggtttgagcaatgcttctctgcccttccatggaaagtggaaccagaaatggtgccaaggctgtggctgttccctttcgtgtaaaatggtgctgttattactctgtcttgaaataggaaggtgggatttctggggaggctggtgaaggagggcagggttcttttctctacgtgtcatgttaaaattgccaaataaagtacctctgcctgtg

SEQ ID NO: 180290 - DNA, 1804 bp, Homo sapiens; identical to SEQ ID NO: 180289
  Payload ID: 15514
  Gene Symbol: STK19
  Gene Name: serine/threonine kinase 19
  ENST ID: ENST00000549916
  CDS Start-End: 443-1408

SEQ ID NO: 180291 - DNA, 1804 bp, Homo sapiens; identical to SEQ ID NO: 180289
  Payload ID: 15514
  Gene Symbol: STK19
  Gene Name: serine/threonine kinase 19
  ENST ID: ENST00000550656
  CDS Start-End: 443-1408

SEQ ID NO: 180292 - DNA, 1804 bp, Homo sapiens
  Payload ID: 15514
  Gene Symbol: STK19
  Gene Name: serine/threonine kinase 19
  ENST ID: ENST00000547578
  CDS Start-End: 443-1408
gtctgacacaagcattagtgagatgctcccctcgaagaatagtcttgtttcttctaaggactgattctcaccccggctttggctctcctaattttagagggtcctccaaatgcagtgaggttaggaaggacgtctgcgctcagatcaagaatccagttacctcaaagctccccaacttccacctccgcagagctatgacgtcatggcaggcacgccagaggccgaaggatgcaaaagtggttttctgctttcgatgatgcaatcattcagcgacagtggcgggcaaacccctcccggggcgggggaggtgtgagcttcacgaaggaggttgacaccaacgtggccaccggcgcccctccacgccgccaacgagtccccgggcgtgcgtgcccttggagggagccaatccgcggccggcgtggggcccggcctggcggaggtgatgctggtatgtgcgtcgccaccgcccctcccagcactgacgggcctgagggacgacaagttgacgctcctttcgtcatcacctggtctaggagggacgcccggggagaccgtacgtcactgctctgcgccggaagaccctattttcaggttctcttccctccattcctaccccttccccggtaccataaaatcccgggatatgagctggaagaggcatcacctgatcccggagacctttggagttaagaggcggcggaagcgagggcctgtggagtcggatcctcttcggggtgagccagggtcggcgcgcgcggctgtctcagaactcatgcagctgttcccgcgaggcctgtttgaggacgcgctgccgcccatcgtgctgaggagccaggtgtacagccttgtgcctgacaggaccgtggccgaccggcagctgaaggagcttcaagagcagggggagatcagaatcgtccagctgggcttcgacttggatgcccatggaattatcttcactgaggactacaggaccagagtcctcaaggcctgtgatggccgaccgtatgctggggcagtgcagaaatttctagcttcagtacttccagcctgtggggaccttagtttccagcaggaccaaatgacacagacctttggcttcagggactcagaaatcacgcatctggtgaatgctggagtcctcaccgtccgagatgctgggagctggtggctagctgtgcctggagctgggagattcatcaagtactttgttaaagggcgccaggctgtccttggcatggtccggaaggcaaagtaccgggaactgctcctatcagagctcctgggccggcgggcgcctgtcgtggtgcggcttggcctcacctaccatgtgcacgacctcattggggcccagctagtggactgcatctctaccacttcaggaaccctcctccgcctgccagagacatgaagattctgctcatcattgctcagctcctcagagtgggccgggaggggactagaagagctgcatgatggtggctgagacagggtcaccttgggaaggcttgggagccaggatgagtgtcgggctctcgtgtgtgcaaaaggtcagatgtgactgctgctgtttgcctggtttctgacccagtggtggggtttgagcaatgcttctctgcccttccatggaaagtggaaccagaaatggtgccaaggctgtggctgttccctttcgtgtaaaatggtgctgttattactctgtcttgaaataggaaggtgggatttctggggaggctggtgaaggagggcagggttcttttctctacgtgtcatgttaaaattgccaaataaagtacctctgcctgtg

SEQ ID NO: 180293 - DNA, 1804 bp, Homo sapiens; identical to SEQ ID NO: 180289
  Payload ID: 15514
  Gene Symbol: STK19
  Gene Name: serine/threonine kinase 19
  ENST ID: ENST00000551718
  CDS Start-End: 443-1408

SEQ ID NO: 180294 - DNA, 1101 bp, Homo sapiens; identical to SEQ ID NO: 180287
  Payload ID: 15514
  Gene Symbol: STK19
  Gene Name: serine/threonine kinase 19
  ENST ID: ENST00000519179
  CDS Start-End: 1-211

SEQ ID NO: 180295 - DNA, 1049 bp, Homo sapiens
  Payload ID: 15514
  Gene Symbol: STK19
  Gene Name: serine/threonine kinase 19
  ENST ID: ENST00000481181
  CDS Start-End: 1-204
cccggtaccataaaatcccgggatatgagctggaagaggcatcacctgatcccggagacctttggagttaagaggcggcggaagcgagggcctgtggagtcggatcctcttcggggtgagccagaaggagcttcaagagcagggggagatcagaatcgtccagctgggcttcgacttggatgcccatggaattatcttcactgaggactacaggaccagagtcctcaaggcctgtgatggccgaccgtatgctggggcagtgcagaaatttctagcttcagtacttccagcctgtggggaccttagtttccagcaggaccaaatgacacagacctttggcttcagggactcagaaatcacgcatctggtgaatgctggagtcctcaccgtccgagatgctgggagctggtggctagctgtgcctggagctgggagattcatcaagtactttgttaaagggcgccaggctgtccttggcatggtccggaaggcaaagtaccgggaactgctcctatcagagctcctgggccggcgggcgcctgtcgtggtgcggcttggcctcacctaccatgtgcacgacctcattggggcccagctagtggactgcatctctaccacttcaggaaccctcctccgcctgccagagacatgaagattctgctcatcattgctcagctcctcagagtgggccgggaggggactagaagagctgcatgatggtggctgagacagggtcaccttgggaaggcttgggagccaggatgagtgtcgggctctcgtgtgtgcaaaaggtcagatgtgactgctgctgtttgcctggtttctgacccagtggtggggtttgagcaatgcttctctgcccttccatggaaagtggaaccagaaatggtgccaaggctgtggctgttccctttcgtgtaaaatggtgctgttattactctgtcttgaaataggaaggtgggatttctggggaggctggtgaaggagggcagggttcttttctctacgtgtcatgttaaaattgccaaataaagtacctctgcctgtga

SEQ ID NO: 180296 - DNA, 2492 bp, Homo sapiens
  Payload ID: 15515
  Gene Symbol: STK24
  Gene Name: serine/threonine kinase 24
  Uniprot ID: Q9Y6E0
  ENST ID: ENST00000376547
  CDS Start-End: 147-1478
tttgggttagggagagtgctttcgtttgttttaaatgggagaaactggagcatgttgccaagggcagagagccagcagagaggggtgaatggaagaaggagcgagaagggggttactgacgaagccttatcctggaggagagaaggatggactccagagcccagctttggggactggccttgaataaaaggagggccactctacctcatcctggagggagcacgaacctaaaggcagacccagaagagctttttacaaaactagagaaaattgggaagggctcctttggagaggtgttcaaaggcattgacaatcggactcagaaagtggttgccataaagatcattgatctggaagaagctgaagatgagatagaggacattcaacaagaaatcacagtgctgagtcagtgtgacagtccatatgtaaccaaatattatggatcctatctgaaggatacaaaattatggataataatggaatatcttggtggaggctccgcactagatctattagaacctggcccattagatgaaacccagatcgctactatattaagagaaatactgaaaggactcgattatctccattcggagaagaaaatccacagagacattaaagcggccaacgtcctgctgtctgagcatggcgaggtgaagctggcggactttggcgtggctggccagctgacagacacccagatcaaaaggaacaccttcgtgggcaccccattctggatggcacccgaggtcatcaaacagtcggcctatgactcgaaggcagacatctggtccctgggcataacagctattgaacttgcaagaggggaaccacctcattccgagctgcaccccatgaaagttttattcctcattccaaagaacaacccaccgacgttggaaggaaactacagtaaacccctcaaggagtttgtggaggcctgtttgaataaggagccgagctttagacccactgctaaggagttattgaagcacaagtttatactacgcaatgcaaagaaaacttcctacttgaccgagctcatcgacaggtacaagagatggaaggccgagcagagccatgacgactcgagctccgaggattccgacgcggaaacagatggccaagcctcggggggcagtgattctggggactggatcttcacaatccgagaaaaagatcccaagaatctcgagaatggagctcttcagccatcggacttggacagaaataagatgaaagacatcccgaagaggcctttctctcagtgtttatctacaattatttctcctctgtttgcagagttgaaggagaagagccaggcgtgcggagggaacttggggtccattgaagagctgcgaggggccatctacctagcggaggaggcgtgccctggcatctccgacaccatggtggcccagctcgtgcagcggctccagagatactctctaagtggtggaggaacttcatcccactgaaattcctttggcatttggggttttgtttttccttttttccttcttcatcctcctccttttttaaaagtcaacgagagccttcgctgactccaccgaagaggtgcgccactgggagccaccccagcgccaggcgcccgtccagggacacacacagtcttcactgtgctgcagccagatgaagtctctcagatgggtggggagggtcagctccttccagcgatcattttattttattttattacttttgtttttaattttaaccatagtgcacatattccaggaaagtgtctttaaaaacaaaaacaaaccctgaaatgtatatttgggattatgataaggcaactaaagacatgaaacctcaggtatcctgctttaagttgataactccctctgggagctggagaatcgctctggtggatgggtgtacagatttgtatataatgtcatttttacggaaaccctttcggcgtgcataaggaatcactgtgtacaaactggccaagtgcttctgtagataacgtcagtggagtaaatattcgacaggccataacttgagtctattgccttgcctttattacatgtacattttgaattctgtgaccagtgatttgggttttattttgtatttgcagggtttgtcattaataattaatgcccctctcttacagaacactcctatttgtacctcaacaaatgcaaattttccccgtttgccctacgccccttttggtacacctagaggttgatttcctttttcatcgatggtactatttcttagtgttttaaattggaacatatcttgcctcatgaagctttaaattataattttcagtttctccccatgaagcgctctcgtctgacatttgtttggaatcgtgccactgctggtctgcgccagatgtaccgtcctttccaatacgattttctgttgcaccttgtagtggattctgcatatcatctttcccacctaaaaatgtctgaatgcttacacaaataaattttataacacgctta

SEQ ID NO: 180297 - DNA, 3602 bp, Homo sapiens
  Payload ID: 15515
  Gene Symbol: STK24
  Gene Name: serine/threonine kinase 24
  ENST ID: ENST00000376554
  CDS Start-End: 1-630
gcagacatctggtccctgggcataacagctattgaacttgcaagaggggaaccacctcattccgagctgcaccccatgaaagttttattcctcattccaaagaacaacccaccgacgttggaaggaaactacagtaaacccctcaaggagtttgtggaggcctgtttgaataaggagccgagctttagacccactgctaaggagttattgaagcacaagtttatactacgcaatgcaaagaaaacttcctacttgaccgagctcatcgacaggtacaagagatggaaggccgagcagagccatgacgactcgagctccgaggattccgacgcggaaacagatggccaagcctcggggggcagtgattctggggactggatcttcacaatccgagaaaaagatcccaagaatctcgagaatggagctcttcagccatcggacttggacagaaataagttgaaggagaagagccaggcgtgcggagggaacttggggtccattgaagagctgcgaggggccatctacctagcggaggaggcgtgccctggcatctccgacaccatggtggcccagctcgtgcagcggctccagagatactctctaagtggtggaggaacttcatcccactgaaattcctttggcatttggggttttgtttttccttttttccttcttcatcctcctccttttttaaaagtcaacgagagccttcgctgactccaccgaagaggtgcgccactgggagccaccccagcgccaggcgcccgtccagggacacacacagtcttcactgtgctgcagccagatgaagtctctcagatgggtggggagggtcagctccttccagcgatcattttattttattttattacttttgtttttaattttaaccatagtgcacatattccaggaaagtgtctttaaaaacaaaaacaaaccctgaaatgtatatttgggattatgataaggcaactaaagacatgaaacctcaggtatcctgctttaagttgataactccctctgggagctggagaatcgctctggtggatgggtgtacagatttgtatataatgtcatttttacggaaaccctttcggcgtgcataaggaatcactgtgtacaaactggccaagtgcttctgtagataacgtcagtggagtaaatattcgacaggccataacttgagtctattgccttgcctttattacatgtacattttgaattctgtgaccagtgatttgggttttattttgtatttgcagggtttgtcattaataattaatgcccctctcttacagaacactcctatttgtacctcaacaaatgcaaattttccccgtttgccctacgccccttttggtacacctagaggttgatttcctttttcatcgatggtactatttcttagtgttttaaattggaacatatcttgcctcatgaagctttaaattataattttcagtttctccccatgaagcgctctcgtctgacatttgtttggaatcgtgccactgctggtctgcgccagatgtaccgtcctttccaatacgattttctgttgcaccttgtagtggattctgcatatcatctttcccacctaaaaatgtctgaatgcttacacaaataaattttataacacgcttattttgcatactccttgaaatgtgactcttcagaggacagggcacctgctgtgtatgtgtggccgtgcgtgtgtactcgtggctgtgtgtgtgtgatgagacactttggaagactccagggagaagtccccaggcctggagctgccgagtgcccaggtcagcgccctggactgcttgcgcacttgctcaccgagatgatgcagttggaggttgctgatctgtgcgattgctgtagcggttgccggggaccttaagagttattttgcttctctggaaggggcctatgcttgctaggcaggcagccagtgtgtctgtttttcttggtttgctgtgggaccttgcttggcgagggggaaaatctctgggtttctggagtgggagggttcgtgcagcagctgttgactggtacatgaagcattcttttatgtttgttgaagctgatgattgacatctcccgtgggtgtgccagttcttgtggagttaagacaggatttttggaagcaaggaagttagtgggtgagcttggggatgtagctcagctatctgctggtctagtggcctctaagctatagggaggggacagagccctgagctacagatgcttgagtgggttattgtgtcggtttgctagtgcagtctggtttttaagctctaaaattgaggtattttattagaagtggatttgggttgaactcttaatttgtataagggatatattttggttggggaaatagaactgagttgctaattcttattgtactcattactccatacaagaatgttatgttgaataataaaattggagaagatttcattttgtgtttccagggagtattctgtgtggggaactgtttccttacgtgaggccggcggcataagtcaaagatgagttttgtccttgcgaatcacacagattgagtctgtgttccccagggtgtgccgttacctgatttttaagtgagccagggcggacagcagcttttctgatttacagagttcttcagatttacaaatggacaatgacatcacagtttttagcactgaagccagtctcatgctagtaacagtgggtgagccgctcgagggactgggttctaatgaatactggtatgaacggggagtctctgcagtcgccagacaaatcatactcagccccttcccccgtagagcaacaagtggttcttttagagttgactggcagcatttcctgtcgggggaggtggggtttgatggagttagaaagctcgcctctgtgtacattctctcctgggctgttactttctgtagacgcacaaaatcagccccaatgtttttaagggcatcttagccaaggaagctggcttttgtgtcgccacttccaggcctgcattaagagagagcccaggcaccagggctaccactggaacctgcctcagcgtcaactgctgctggtctgtagccaggcccagcctttgagacgggtttactgtcaccagtagcctctcagtgccagccctgagctgctcctggctcagctgcccagagcctgcagcctggggaggtactcagcctctgggagacgagggccgtggactgggtggctggtagctcctgcgtttttgagctgtgtcctggctggctgctgccaatgaggtggacaccagtgtggtttggggtgcactggccacttcttgctgggttctgattttcttggaagtgcatctgccttccttatccaatagttttatccctgcattgctcttgtgaagtggctggtttggttctgtatgtagcattttgtacctttcctctggcaaaacactgtcagtttataaacattttttatatttccctcctttaaaaacagcttgtgtatttctgctataaaatgtgtcagcaaaggcagagtgacctaatagggcatgttcttaagcacagggactgtatcatgcaggggccaataaagctcaagaaaacgag

SEQ ID NO: 180298 - DNA, 4578 bp, Homo sapiens
  Payload ID: 15515
  Gene Symbol: STK24
  Gene Name: serine/threonine kinase 24
  ENST ID: ENST00000397517
  CDS Start-End: 366-1604
gggacgcgctcggcgctcgcgggctcggcgggctgtgcgcgcccactccggctccagcggccagcgcgcgcgggcccaggccgcccggctccagcccagcagtagcggcagcagcggcggcggcggcagtgcgcgcgaggccctgcgcccccagcagctcctccctggcgccgtgcatggagacgcggcccgccacccgccgctgagcccccgccgcccggccgggacccgccagggctggggtggcctcgggctccggccggccccgccgcccgagggctgcgcgcggcccgcgggcctcgccgccccgcgcggatcgtcgcggcccggccgtcccgtcccaggaagtggccgtcctgagcgccatggctcactccccggtgcagtcgggcctgcccggcatgcagaacctaaaggcagacccagaagagctttttacaaaactagagaaaattgggaagggctcctttggagaggtgttcaaaggcattgacaatcggactcagaaagtggttgccataaagatcattgatctggaagaagctgaagatgagatagaggacattcaacaagaaatcacagtgctgagtcagtgtgacagtccatatgtaaccaaatattatggatcctatctgaagttagaacctggcccattagatgaaacccagatcgctactatattaagagaaatactgaaaggactcgattatctccattcggagaagaaaatccacagagacattaaagcggccaacgtcctgctgtctgagcatggcgaggtgaagctggcggactttggcgtggctggccagctgacagacacccagatcaaaaggaacaccttcgtgggcaccccattctggatggcacccgaggtcatcaaacagtcggcctatgactcgaaggcagacatctggtccctgggcataacagctattgaacttgcaagaggggaaccacctcattccgagctgcaccccatgaaagttttattcctcattccaaagaacaacccaccgacgttggaaggaaactacagtaaacccctcaaggagtttgtggaggcctgtttgaataaggagccgagctttagacccactgctaaggagttattgaagcacaagtttatactacgcaatgcaaagaaaacttcctacttgaccgagctcatcgacaggtacaagagatggaaggccgagcagagccatgacgactcgagctccgaggattccgacgcggaaacagatggccaagcctcggggggcagtgattctggggactggatcttcacaatccgagaaaaagatcccaagaatctcgagaatggagctcttcagccatcggacttggacagaaataagatgaaagacatcccgaagaggcctttctctcagtgtttatctacaattatttctcctctgtttgcagagttgaaggagaagagccaggcgtgcggagggaacttggggtccattgaagagctgcgaggggccatctacctagcggaggaggcgtgccctggcatctccgacaccatggtggcccagctcgtgcagcggctccagagatactctctaagtggtggaggaacttcatcccactgaaattcctttggcatttggggttttgtttttccttttttccttcttcatcctcctccttttttaaaagtcaacgagagccttcgctgactccaccgaagaggtgcgccactgggagccaccccagcgccaggcgcccgtccagggacacacacagtcttcactgtgctgcagccagatgaagtctctcagatgggtggggagggtcagctccttccagcgatcattttattttattttattacttttgtttttaattttaaccatagtgcacatattccaggaaagtgtctttaaaaacaaaaacaaaccctgaaatgtatatttgggattatgataaggcaactaaagacatgaaacctcaggtatcctgctttaagttgataactccctctgggagctggagaatcgctctggtggatgggtgtacagatttgtatataatgtcatttttacggaaaccctttcggcgtgcataaggaatcactgtgtacaaactggccaagtgcttctgtagataacgtcagtggagtaaatattcgacaggccataacttgagtctattgccttgcctttattacatgtacattttgaattctgtgaccagtgatttgggttttattttgtatttgcagggtttgtcattaataattaatgcccctctcttacagaacactcctatttgtacctcaacaaatgcaaattttccccgtttgccctacgccccttttggtacacctagaggttgatttcctttttcatcgatggtactatttcttagtgttttaaattggaacatatcttgcctcatgaagctttaaattataattttcagtttctccccatgaagcgctctcgtctgacatttgtttggaatcgtgccactgctggtctgcgccagatgtaccgtcctttccaatacgattttctgttgcaccttgtagtggattctgcatatcatctttcccacctaaaaatgtctgaatgcttacacaaataaattttataacacgcttattttgcatactccttgaaatgtgactcttcagaggacagggcacctgctgtgtatgtgtggccgtgcgtgtgtactcgtggctgtgtgtgtgtgatgagacactttggaagactccagggagaagtccccaggcctggagctgccgagtgcccaggtcagcgccctggactgcttgcgcacttgctcaccgagatgatgcagttggaggttgctgatctgtgcgattgctgtagcggttgccggggaccttaagagttattttgcttctctggaaggggcctatgcttgctaggcaggcagccagtgtgtctgtttttcttggtttgctgtgggaccttgcttggcgagggggaaaatctctgggtttctggagtgggagggttcgtgcagcagctgttgactggtacatgaagcattcttttatgtttgttgaagctgatgattgacatctcccgtgggtgtgccagttcttgtggagttaagacaggatttttggaagcaaggaagttagtgggtgagcttggggatgtagctcagctatctgctggtctagtggcctctaagctatagggaggggacagagccctgagctacagatgcttgagtgggttattgtgtcggtttgctagtgcagtctggtttttaagctctaaaattgaggtattttattagaagtggatttgggttgaactcttaatttgtataagggatatattttggttggggaaatagaactgagttgctaattcttattgtactcattactccatacaagaatgttatgttgaataataaaattggagaagatttcattttgtgtttccagggagtattctgtgtggggaactgtttccttacgtgaggccggcggcataagtcaaagatgagttttgtccttgcgaatcacacagattgagtctgtgttccccagggtgtgccgttacctgatttttaagtgagccagggcggacagcagcttttctgatttacagagttcttcagatttacaaatggacaatgacatcacagtttttagcactgaagccagtctcatgctagtaacagtgggtgagccgctcgagggactgggttctaatgaatactggtatgaacggggagtctctgcagtcgccagacaaatcatactcagccccttcccccgtagagcaacaagtggttcttttagagttgactggcagcatttcctgtcgggggaggtggggtttgatggagttagaaagctcgcctctgtgtacattctctcctgggctgttactttctgtagacgcacaaaatcagccccaatgtttttaagggcatcttagccaaggaagctggcttttgtgtcgccacttccaggcctgcattaagagagagcccaggcaccagggctaccactggaacctgcctcagcgtcaactgctgctggtctgtagccaggcccagcctttgagacgggtttactgtcaccagtagcctctcagtgccagccctgagctgctcctggctcagctgcccagagcctgcagcctggggaggtactcagcctctgggagacgagggccgtggactgggtggctggtagctcctgcgtttttgagctgtgtcctggctggctgctgccaatgaggtggacaccagtgtggtttggggtgcactggccacttcttgctgggttctgattttcttggaagtgcatctgccttccttatccaatagttttatccctgcattgctcttgtgaagtggctggtttggttctgtatgtagcattttgtacctttcctctggcaaaacactgtcagtttataaacattttttatatttccctcctttaaaaacagcttgtgtatttctgctataaaatgtgtcagcaaaggcagagtgacctaatagggcatgttcttaagcacagggactgtatcatgcaggggccaataaagctcaagaaaacgagta

SEQ ID NO: 180299 - DNA, 1590 bp, Homo sapiens
  Payload ID: 15515
  Gene Symbol: STK24
  Gene Name: serine/threonine kinase 24
  ENST ID: ENST00000444574
  CDS Start-End: 1-1108
caaatattatggatcctatctgaaggatacaaaattatggataataatggaatatcttggtggaggctccgcactagatctattagaacctggcccattagatgaaacccagatcgctactatattaagagaaatactgaaaggactcgattatctccattcggagaagaaaatccacagagacattaaagcggccaacgtcctgctgtctgagcatggcgaggtgaagctggcggactttggcgtggctggccagctgacagacacccagatcaaaaggaacaccttcgtgggcaccccattctggatggcacccgaggtcatcaaacagtcggcctatgactcgaaggcagacatctggtccctgggcataacagctattgaacttgcaagaggggaaccacctcattccgagctgcaccccatgaaagttttattcctcattccaaagaacaacccaccgacgttggaaggaaactacagtaaacccctcaaggagtttgtggaggcctgtttgaataaggagccgagctttagacccactgctaaggagttattgaagcacaagtttatactacgcaatgcaaagaaaacttcctacttgaccgagctcatcgacaggtacaagagatggaaggccgagcagagccatgacgactcgagctccgaggattccgacgcggaaacagatggccaagcctcggggggcagtgattctggggactggatcttcacaatccgagaaaaagatcccaagaatctcgagaatggagctcttcagccatcggacttggacagaaataagatgaaagacatcccgaagaggcctttctctcagtgtttatctacaattatttctcctctgtttgcagagttgaaggagaagagccaggcgtgcggagggaacttggggtccattgaagagctgcgaggggccatctacctagcggaggaggcgtgccctggcatctccgacaccatggtggcccagctcgtgcagcggctccagaggagtatccatgggaaccaagcccctcctgactgccatctggcacaagtgcaggcgtttggaggcagtggatgtgtgctgggaagccgctctgtgtgacctgagggtgatttgtcactgggctgtcctccacacccccaggaggaccaggcgtgctgctgccttgacagttcatcttcaggtgtccaggctgacacctcccaaagctggctgagactctgtgatcatgagggggatttctgggtctttcctgagactgcgtcccacctgacagtacataaagaagttttgcacacgtgaggtcccttttgctatttggaagtgattgaaggggctgcctactgtcctgtgaagagcccctctacgtggggacagcaggagaaaaccacagttctgatacttcacgtttatgcttctgaactcgggtttcttagtaagacatttcaactttttaagttgctagaaaataaaaatgatctacttggctgccttcaattttgaggcaattgaaggacgatccctccctcctttgatactaaaaacaatataggaataaaggaaaatagaattaaaaagtcacc

SEQ ID NO: 180300 - DNA, 2172 bp, Homo sapiens
  Payload ID: 15515
  Gene Symbol: STK24
  Gene Name: serine/threonine kinase 24
  ENST ID: ENST00000418038
  CDS Start-End: 1-429
aagaaaacttcctacttgaccgagctcatcgacaggtacaagagatggaaggccgagcagagccatgacgactcgagctccgaggattccgacgcggaaacagatggccaagcctcggggggcagtgattctggggactggatcttcacaatccgagaaaaagatcccaagaatctcgagaatggagctcttcagccatcggacttggacagaaataagatgaaagacatcccgaagaggcctttctctcagtgtttatctacaattatttctcctctgtttgcagagttgaaggagaagagccaggcgtgcggagggaacttggggtccattgaagagctgcgaggggccatctacctagcggaggaggcgtgccctggcatctccgacaccatggtggcccagctcgtgcagcggctccagaggtaactacccagggcccctctgggctggggaaggagagacctgcacttgggctgggacttagttgatgagtttggtacttgattcttggcctgtctgttcctgttatcttgcaggcctcagggtagacagagttgaattagaggagactttgttctgaattctagaaatcaatgtgaatgaaggatctgaatctggaaactactggaaagcccacaggacttagtgcatttgtagcttttgccacataaatacagggtggtggtgaaatacctgtttcctcttaattatgcagcttaattattggccagagaatgatcgttcttagccagatgtgtgtaactatctatctggttttcggctttaaagtcaagtgtgagaaatgacagcagctttggtgtggtcaactcagcgggagcgggcgcaggtgtgttccctgtgttagctgtgtgtgtcatgtctggaagcctccttggtaggggttcatctgtgccagcctgtagggagcttttgtccctgcccagtggccccacctgttgaatgcactatgggtgaggactcagtggggtgacagttttgccctccctgccccctcccaacttgttgtaggagtatccatgggaaccaagcccctcctgactgccatctggcacaagtgcaggcgtttggaggcagtggatgtgtgctgggaagccgctctgtgtgacctgagggtgatttgtcactgggctgtcctccacacccccaggaggaccaggcgtgctgctgccttgacagttcatcttcaggtgtccaggctgacacctcccaaagctggctgagactctgtgatcatgagggggatttctgggtctttcctgagactgcgtcccacctgacagtacataaagaagttttgcacacgtgaggtcccttttgctatttggaagtgattgaaggggctgcctactgtcctgtgaagagcccctctacgtggggacagcaggagaaaaccacagttctgatacttcacgtttatgcttctgaactcgggtttcttagtaagacatttcaactttttaagttgctagaaaataaaaatgatctacttggctgccttcaattttgaggcaattgaaggacgatccctccctcctttgatactaaaaacaatataggaataaaggaaaatagaattaaaaagtcacccatcttttgcctgaacacaaactttttgatttctcaaacttagcatcacatacctcattctagaggcatttatttcccattagaaagagctttataataaaacaaatagaacaaaaccagaaacgggtaggattgttactgtcttgttgggcattttgctctctgcttttgtagtattacttttaaaaccaatactttccacactgtccagaattgcctgaaattgttatgaactgtttgtttatatacgtgacttgatttccccagggcagctccagggcacagagtgtgtggcttgtatgtgttgaactgatccacgtttcccattcccaggcccctatctctctgttcctcttcttttagttgttaaggcaagttgatctgtaccagtgctggccagtagaagtacagcgtgggccacacacagaattttatgttttctgctggatgtggtggctcatgcctgtaatcccaatgctttgggaggcccaggcaggaggatcgcttgaggccaagagtttgagaccagcctgggcaaaatagcaagaccctgtctctacc

SEQ ID NO: 180301 - DNA, 9361 bp, Homo sapiens
  Payload ID: 15515
  Gene Symbol: STK24
  Gene Name: serine/threonine kinase 24
  Uniprot ID: Q9Y6E0
  ENST ID: ENST00000539966
  CDS Start-End: 78-1373
gcccgcgggcctcgccgccccgcgcggatcgtcgcggcccggccgtcccgtcccaggaagtggccgtcctgagcgccatggctcactccccggtgcagtcgggcctgcccggcatgcagaacctaaaggcagacccagaagagctttttacaaaactagagaaaattgggaagggctcctttggagaggtgttcaaaggcattgacaatcggactcagaaagtggttgccataaagatcattgatctggaagaagctgaagatgagatagaggacattcaacaagaaatcacagtgctgagtcagtgtgacagtccatatgtaaccaaatattatggatcctatctgaaggatacaaaattatggataataatggaatatcttggtggaggctccgcactagatctattagaacctggcccattagatgaaacccagatcgctactatattaagagaaatactgaaaggactcgattatctccattcggagaagaaaatccacagagacattaaagcggccaacgtcctgctgtctgagcatggcgaggtgaagctggcggactttggcgtggctggccagctgacagacacccagatcaaaaggaacaccttcgtgggcaccccattctggatggcacccgaggtcatcaaacagtcggcctatgactcgaaggcagacatctggtccctgggcataacagctattgaacttgcaagaggggaaccacctcattccgagctgcaccccatgaaagttttattcctcattccaaagaacaacccaccgacgttggaaggaaactacagtaaacccctcaaggagtttgtggaggcctgtttgaataaggagccgagctttagacccactgctaaggagttattgaagcacaagtttatactacgcaatgcaaagaaaacttcctacttgaccgagctcatcgacaggtacaagagatggaaggccgagcagagccatgacgactcgagctccgaggattccgacgcggaaacagatggccaagcctcggggggcagtgattctggggactggatcttcacaatccgagaaaaagatcccaagaatctcgagaatggagctcttcagccatcggacttggacagaaataagatgaaagacatcccgaagaggcctttctctcagtgtttatctacaattatttctcctctgtttgcagagttgaaggagaagagccaggcgtgcggagggaacttggggtccattgaagagctgcgaggggccatctacctagcggaggaggcgtgccctggcatctccgacaccatggtggcccagctcgtgcagcggctccagagatactctctaagtggtggaggaacttcatcccactgaaattcctttggcatttggggttttgtttttccttttttccttcttcatcctcctccttttttaaaagtcaacgagagccttcgctgactccaccgaagaggtgcgccactgggagccaccccagcgccaggcgcccgtccagggacacacacagtcttcactgtgctgcagccagatgaagtctctcagatgggtggggagggtcagctccttccagcgatcattttattttattttattacttttgtttttaattttaaccatagtgcacatattccaggaaagtgtctttaaaaacaaaaacaaaccctgaaatgtatatttgggattatgataaggcaactaaagacatgaaacctcaggtatcctgctttaagttgataactccctctgggagctggagaatcgctctggtggatgggtgtacagatttgtatataatgtcatttttacggaaaccctttcggcgtgcataaggaatcactgtgtacaaactggccaagtgcttctgtagataacgtcagtggagtaaatattcgacaggccataacttgagtctattgccttgcctttattacatgtacattttgaattctgtgaccagtgatttgggttttattttgtatttgcagggtttgtcattaataattaatgcccctctcttacagaacactcctatttgtacctcaacaaatgcaaattttccccgtttgccctacgccccttttggtacacctagaggttgatttcctttttcatcgatggtactatttcttagtgttttaaattggaacatatcttgcctcatgaagctttaaattataattttcagtttctccccatgaagcgctctcgtctgacatttgtttggaatcgtgccactgctggtctgcgccagatgtaccgtcctttccaatacgattttctgttgcaccttgtagtggattctgcatatcatctttcccacctaaaaatgtctgaatgcttacacaaataaattttataacacgcttattttgcatactccttgaaatgtgactcttcagaggacagggcacctgctgtgtatgtgtggccgtgcgtgtgtactcgtggctgtgtgtgtgtgatgagacactttggaagactccagggagaagtccccaggcctggagctgccgagtgcccaggtcagcgccctggactgcttgcgcacttgctcaccgagatgatgcagttggaggttgctgatctgtgcgattgctgtagcggttgccggggaccttaagagttattttgcttctctggaaggggcctatgcttgctaggcaggcagccagtgtgtctgtttttcttggtttgctgtgggaccttgcttggcgagggggaaaatctctgggtttctggagtgggagggttcgtgcagcagctgttgactggtacatgaagcattcttttatgtttgttgaagctgatgattgacatctcccgtgggtgtgccagttcttgtggagttaagacaggatttttggaagcaaggaagttagtgggtgagcttggggatgtagctcagctatctgctggtctagtggcctctaagctatagggaggggacagagccctgagctacagatgcttgagtgggttattgtgtcggtttgctagtgcagtctggtttttaagctctaaaattgaggtattttattagaagtggatttgggttgaactcttaatttgtataagggatatattttggttggggaaatagaactgagttgctaattcttattgtactcattactccatacaagaatgttatgttgaataataaaattggagaagatttcattttgtgtttccagggagtattctgtgtggggaactgtttccttacgtgaggccggcggcataagtcaaagatgagttttgtccttgcgaatcacacagattgagtctgtgttccccagggtgtgccgttacctgatttttaagtgagccagggcggacagcagcttttctgatttacagagttcttcagatttacaaatggacaatgacatcacagtttttagcactgaagccagtctcatgctagtaacagtgggtgagccgctcgagggactgggttctaatgaatactggtatgaacggggagtctctgcagtcgccagacaaatcatactcagccccttcccccgtagagcaacaagtggttcttttagagttgactggcagcatttcctgtcgggggaggtggggtttgatggagttagaaagctcgcctctgtgtacattctctcctgggctgttactttctgtagacgcacaaaatcagccccaatgtttttaagggcatcttagccaaggaagctggcttttgtgtcgccacttccaggcctgcattaagagagagcccaggcaccagggctaccactggaacctgcctcagcgtcaactgctgctggtctgtagccaggcccagcctttgagacgggtttactgtcaccagtagcctctcagtgccagccctgagctgctcctggctcagctgcccagagcctgcagcctggggaggtactcagcctctgggagacgagggccgtggactgggtggctggtagctcctgcgtttttgagctgtgtcctggctggctgctgccaatgaggtggacaccagtgtggtttggggtgcactggccacttcttgctgggttctgattttcttggaagtgcatctgccttccttatccaatagttttatccctgcattgctcttgtgaagtggctggtttggttctgtatgtagcattttgtacctttcctctggcaaaacactgtcagtttataaacattttttatatttccctcctttaaaaacagcttgtgtatttctgctataaaatgtgtcagcaaaggcagagtgacctaatagggcatgttcttaagcacagggactgtatcatgcaggggccaataaagctcaagaaaacgagtatctgcatcattgtgtgtctcatgtgtagtgtgtctcaaactccactcagatggactgttacccacactagtattttcttgagggcacacaggaagcagaggtgctggtcacaggtcagaaccaccagtgtccagcaagtagtttggaatcaatcaatcattcagaaataaatagctgaggagactgccttgtccccaagtctccaggaatgagtgagtggtgacttctggagggagcctgatgctgctgtgtggcccggagctgtttgtttgctctgcccctgcctggaggtggggggagcatagggaacagtggggggcaggccctccctgtgtcactctgaacactggggctttagaaacccttgctggagtgtccccttcccccctccccccccacacagaaaatgaagactacagacaaagttggttgttttgccttaaaacatcaatatgctggattgtggcgtgaggtatttttattccctttgttagtactggaaaccgtctggtacatcttgtaaggcaaatgattaacacacggcaggctcttcgtccgtttgcaagttgctgtttgtttccagctacaccagtcagagctccacagagagggtgcgttcctggttctcaggtgggcaggtgctatggtgcggggcgctggaaagaatggggttgaattggccctcgcctccgcttgtttgagactctcgttagaaagggcttaggaaaaccaagggaatggcagccaccccatcaccatcgagaacaggcagacgtttcccgagtaggggccaaagccactggaaaccgtgttccctgtgcagtccgactgacactaccccatgcctggggggaatgagtataaaaagggaaatgtttttgaagacaggcacgatatatactactagagaatgcgcagtttcaaaccacagttgcaggaggatataggaataacgacaggtgccggggactacgtaccatgatttcatagtgctctgcagccagcaggctcactaaacgctcatcacggaacataccacaaatggtgctgatcaatgacacacgggttttcatgcttgtgacacagacagacagcaaaacaccacggcttattatcttcccattgtgtacaccactcacaggacggtgacagtccaggtattgcactggatctcggctttgcttaacagaaaacaaccctgctacggttggaaagagttaccacttaaaacgatttggtcaacttgcaccaagaagtaggttgggaacaggtgttttcaggtgagcgtgaaaccccgcagtggaacgctgtgtgctgcaaattgcttattaatcagagaagtgagtcctactaacttcctattattacaaaagtagaaagactgaaaaaaaaaatgaaatctgaaaatgatctcatttgcttaaggctgcactgagtgtattgcaaacaaacaaacaaacaccgggaagtccacttcgtaaaatgcagcagccaataggtgaaaataataaaagaaagaactttttttaggaagaaaaacacttgccctgtcttgtgttgaacggatgtgtgtgtactgtttttcaggggcagggtggagggaagatgtcatttggcactctcgtaatgacaatgttttaatactggcactagctaaagaacagcgcccccagcggatgccaggactggaggtgggagcgctgttcattcagacgctgagaggtcggggttaaaaaacgcggctgtggagacaggagagctgctgggaagccatgtttttgattttcagacaggtgttaattttaccaggcttcattaatacagaagaaaggaaacgtcttccaggaaagcagccactgcggaaacgagtgtgtccggccatcaatacacaagagactctttgtgactcaacacgtggggtcgcgaggcagagctggtggcactgcggatcacttccatccacctgcaacacgggaacgccagttagtcaaccttttgtttggacggactcctgacactttggtgggcatcgcttacagaaacacaaggtgaagtcaggccgcctggttggtaatctgccacttcagcagaagagcaagggaacagccagcacccaggcgttcctgaggtacagtggagacccactggcctgggcactcactcagtgtggagctggaagtaccttgctgcagtgacactgcccgctccattggagcagttaggagcgaggtggcctctggttgctggggagaacgctacctcctattttcatggacatggcagagaatggcgggacgtgtcccatcctgcttagtggaagctctcccttccttttttctttttcttttttttttgagacagggtctggctctgtcactcatactggagttcagtggtgcagttatcgcccactgtagctacctcctgggctcaatcgatcctccagccttggcctcccaggagatgggactacaggcttgcaccaccacgcccaaatctccctttttatatatttgtgtatttgctctctaccggtgcttctcaaatgggtgcaatgctgtcccatttggtaaagtctggagacatttttagatgtcccaactgaggggttgctgcgggcatctagtgggtggccagggatgccgctgaacatcctgcacaatgcaggacggactccccaaattacctggccttgtcccaggcctttcaggatctggactgcaaggctggaccctttgtcacaataatagcaaaatcccaactttgatcaacccagctctcaacccagctctcgagctcagtccaggatcagatttgagaatggctctcctctaggttcctttttcaggtgatgttgtttaggaggtgctcagcatattgctgaggacccctccccttctgcctcccggggcgaggagggctcagcagggcaaactgcacaagtagtcggcttggggatgcaatttgcagaggcccaggatctctattcaaaatatgaattgcaggaacagtcttaggcctgactgttgcatttctttcttggctaaatgaagtctgcagtccctgccattacaccatgtaggcagtctcactggggcttagcttcatcatcccggacacgttatgtcagagatctccaagcaagatgtctagggcctcagccaacaccgtgcagggtaagggcgcagggaagttgggaccccactttctgccatgagaacagaatcgcctgctggtgtcgggcagtgggaccccaggtctaaacgcttagttggcagggaagggtggggccatctcactcgctgacttgggagaaatcctgatgtttggaagagggggtcctcttctgcagggccctgtgcgtgggaagggggtgtctacctttcgaacgtgtactcgctttccgccctgaagtagtagacgtgggacttgaagtgcagcttgaacacgtagtctttctggatgttctcggactcagaggggatggtgagcgagtagccgagcagaggcaggctggcaaggggatgattgtcctggaaaggggaaacaaagcaaagtggcttttcggggtcagcttctgctgctgggcctggctgctgccccgcatcagacagggacttgggagcccaggcagctccctcctcgggcgtgggcctggaagggaccatggcagccagtgtttgcctgtacgtgatggcccgggtggcaagtcccgccaggactgagctgtagataaagccaacccccgtcccttgtccaggcagaagacaggtggcccttcctagggcagaagttgtccttcagtggatgataatgtcagtcttccctagagttgagggcctcgggtggacagggccccccgccagcatccctgtcatccccgtgacacctggagcccaagaggcctgagtcattccagaggagggcggccccctcacctcatgctgccacccccaaggtcccagggccacctgccctgtgcgagacacttacctggtgtgatttgtagaagaacaggcagaagtttgtgaacaccacccacagcttctgccacccgttgctgtttttgaatttcctcagcaggtttccagacaactgattctgaaaggcaaggaggcctgtgagaagcacagcgggcacctgccccaggagggcacagagagcagctctccctgcaccagggccctgggctggggcatgtccgtgactgaaggatgtgggccccacccccgctcccccgtgtgtggggagacttggcaggtcctgggaccctgatctcatcacttccccttgtcacttgctgtggggcatcttggggtccctgtgtccccccaaaagacacgttgaggtcctgactaccagtaccttagaacacaggcttatttggaaataggctcgttgcagggtaactagtgaagacgagatcacactggggtagggtgggccctaaatccaacgggagtggtgtcctgaggagaagagccaccttgaggggagaggggtgtgccctgtgacaccgaggcagaaatgggggcgcaggaccccatgcattgccagcaggcggaagctgaaggagggaaagatccatcccaacaagctcagagcagcactcgttttgaggggccaggcaccctacccaggaagtggggcctggggtgcatgtgagtggctcccacatgccctctagtggcccaggaggcagttgcagccctgcccacctccaggctcagggccggcccagcccctggagcattgttaggatgcgctgcagcccagctagggggcagggacaggcacctgtgtccatgctacctccaaacaactctgagcaggcctgacgcactggtggctcatttcgtccctttgccaaagtgacatcaccagcagagactcaaagcagttgcaccaccttgtaaaggcacttaatgccactgaattgttcccgtaaaaatcgttaagttggccaatattgtggtatagctattttaccacaataaaaaatacagacctccga

SEQ ID NO: 180302 - DNA, 4619 bp, Homo sapiens
  Payload ID: 15516
  Gene Symbol: STK25
  Gene Name: serine/threonine kinase 25
  Uniprot ID: O00506
  ENST ID: ENST00000316586
  CDS Start-End: 351-1631
gtccaacgccagcaggcttccgggcccggagtgggcggtgggactcggggtcccagagagccgtgcgcgggccgcgacgccgagcaccgccctcgccgtcgcctccgggctttctccggtcgctgccgccaccaccgttgcttcgcgggctgggaggcccggggtccccgggcgaacagaggctgcgggtgggagccttcgcgggcgctgcagagcgggccgggggaggccgggatggagccccgcggagtggactgacgccgcaggggcgagctagccggctccgcgcctctccgcgggatccagacgcctcctggggctgctggcggagggtctgaggcggcgcggccatggctcacctccggggatttgccaaccagcactctcgagtggaccctgaggagctcttcaccaagctcgaccgcattggcaagggctcgtttggggaggtctacaagggcatcgataaccacacaaaggaggtggtggccatcaagatcatcgacctggaggaggccgaggatgagatcgaggacatccagcaggagatcactgtcctcagtcagtgcgacagcccctacatcacccgctactttggctcctacctaaagagcaccaagctatggatcatcatggagtacctgggcggcggctcagcactggacttgcttaaaccaggtcccctggaggagacatacattgccacgatcctgcgggagattctgaagggcctggattatctgcactccgaacgcaagatccaccgagacatcaaagctgccaacgtgctactctcggagcagggtgacgtgaagctggcggactttggggtagcagggcagctcacagacacgcagattaagaggaacacattcgtgggcacccccttctggatggcacctgaggtcatcaagcagtcggcctacgacttcaaggctgacatctggtccctggggatcacagccatcgagctggccaagggggagcctccaaactctgacctccaccccatgcgcgtcctgttcctgattcccaagaacagcccacccacactggagggccagcacagcaagcccttcaaggagttcgtggaggcctgcctcaacaaagacccccgattccggcccacggccaaggagctcctgaagcacaagttcatcacacgctacaccaagaagacctccttcctcacggagctcatcgaccgctataagcgctggaagtcagaggggcatggcgaggagtccagctctgaggactctgacattgatggcgaggcggaggacggggagcagggccccatctggacgttcccccctaccatccggccgagtccacacagcaagcttcacaaggggacggccctgcacagttcacagaagcctgcggagcccgtcaagaggcagccgaggtcccagtgcctgtccacgctggtccggcccgtcttcggagagctcaaagagaagcacaagcagagcggcgggagcgtgggtgcgctggaggagctggagaacgccttcagcctggccgaggagtcctgccccggcatctcagacaagctgatggtgcacctggtggagcgagtgcagaggttttcacacaacagaaaccacctgacatccacccgctgaagcgcactgctgttcagataggggacggaaggtcgtttgtttttgttctgagctccataagaactgtgctgacttggaaggtgccctgtgctatgtcgtgcctgcagggacacgtcggatcccgtgggcctcacatgccaggtcaccaggtcaccgtctccttccacccctgcagtgtgctgttgtgcacgtcagggacgctgttctctatgcccactgccctcctccctctcctggcccagcagtattgctcacgggggctccagccgccggcgtggccctcatgagctacgcctgggtcttctgcagactcatgcagccctatggccgctcagaccaaggcgcagagcaactatcagggcagctctgcctcctcctcccatgaggtggggagaggcaacagggcagcccccagaggagtgtcctggccgctgtcctcccggggcccatgatggccatagatttgccttgtggtgttggatcaggtactgtgtctgctcataagtacttgtgtcatccagaatgttttgttttttaagaaaattgaattacttgtttcctgaaatattctgaggttaatatgttagttttcatagaacattgagaggcccctgccactttcaataaagacctgacttggagacatgcaggtgtgtgtggtggggcccgggccatgcggggctgcagcgtccctggtcccgagtcctcatcacagcacgcagagacggcagcccagccccccttcgaaacttccctgtgacggattcctgggctctgcttggcccaccggaagaacagagcaggcagaggagaatgcaggtggggagatgctgtttgtttatttttaatcaaatgtgtgtgaacaaagcagtcgcccatctacttcccgttggaaggaatgctgggcagtaataaattagacggccccaccctcccagggcacagggggactttggtttctgcttctctagaggtacatggggaacaagcgtggcttctgccagacttgtttagctgtgacctgcagggcaggcccctggggctgccacttggttcaccagatggaaggtcagcatggctgtgccacgcttgtctgagagggtcctggcagtgggtacgcagggtgtatggcagggcctcttttccagtgcttgctctaggccagtcctcggcagggaccctgctctggggagagaggcagggtgtgcccaggctttggtccgatgccgagagcactgctcaggccttgtctgcgtctttgagccaggggcctgggagctgtggcttgagcggctccgcgctcaagactcgcacatttttcccagggccccagatagctgctggcatgcactaggtcctgggtggggggatgaagcccctcccagatgttacatgaggcccacccacactgctggtgccagtggggatccagtgagaccacagccacttcccatctgttgagaagcctcaggacagaggtcacctctgtgtcctgctgttctttgtagttgtgtccaaacctgggcaggttgagcgtcattcctccttccccctgaccatcccctccagccctgaggagggttgggggccatcctgcacgatgcttggggccctcccggctgagctgctggccccctggatcacctccatccacctggaggagagggcggccatcagaccagtgagccatcttgtgctcagacactgtcccaagaacaacccaggatatgggacaagcaggacaaaagaagggttaaaaacctggggccgggtgcggtggctcatgcctataatcccagcactttgggaggctgaggcagatggatcacttgaggtcaggagttcgagaccagcctggccaacatggtgaaaccctgtctctactaaaaatacaaaaattagccaggcggcgtggcgtgcatgcctgtaatctcagttactcaggaggctgaggcagaagaatcgcttgaaccctggaggtgcaggttatagtgagccaagattgtatcactgcactccagcctgagtgacagagggagacgccatctccaaaaaaaaaaaaaacaaagcattgctgttttttggaaatgctggaagcattgctcagcccttcctttccagggcccagaaaacttgcctccaccaccatgagtagaaatgggagctgagcggacatcgaaatgggcagctgaccagggctgcctcctgcaaaattacctttcaaatgtgtacttgctctcagcccggaagaagtagacgtgggatttgaactggagcttgaaaacatagtctttgtgtatgccatcggcctccctggggatgctcacgctgtagcccagcagcgggaggctggccagtgggtagtcatcctgcaagacagcatagggacacgggttccaggggctgggttgccacagggaatgcccattcctctgctacctgcacaacggtggcacgtacaaatgcccacgggccaagggagccagtttccctgttcacacagcacagggtgtgtgggcaaagcatgggagggcagaaccaaaatacaaaagggacacaggtgagcagggttaagtgtctgtctgctagcatcacctgcattgggctccagtgaaactccagtacctgatgagttttgtagaagaacaaacagaagttggtaaagacgacccagagcttctgccagccatgactgtttttgaactttcttagcagatatcctgaaagctggttctgtcaataaaggaaaaatgcaggtgcattaaccagcacccaggaccccttgtgggagtgggtttgctccccaagactaagcctctgcatgctttctccagctgaggccttggttttacctctggactgctatgaacagcagctttatcagtacttaagtccaacagaagcatgttaaaaacctagagtgacattccaggcaccaagtaaagtgagttccctttccctgtgcacaataaagtcagtgttcagtaa

SEQ ID NO: 180303 - DNA, 2210 bp, Homo sapiens
  Payload ID: 15516
  Gene Symbol: STK25
  Gene Name: serine/threonine kinase 25
  Uniprot ID: O00506
  ENST ID: ENST00000403346
  CDS Start-End: 285-1565
aacgccagcaggcttccgggcccggagtgggcggtgggactcggggtcccagagagccgtgcgcgggccgcgacgccgagcaccgccctcgccgtcgcctccgggctttctccggtcgctgccgccaccaccgttgcttcgcgggctgggaggcccggggtccccgggcgaacagaggctgcggtggactgacgccgcaggggcgagctagccggctccgcgcctctccgcgggatccagacgcctcctggggctgctggcggagggtctgaggcggcgcggccatggctcacctccggggatttgccaaccagcactctcgagtggaccctgaggagctcttcaccaagctcgaccgcattggcaagggctcgtttggggaggtctacaagggcatcgataaccacacaaaggaggtggtggccatcaagatcatcgacctggaggaggccgaggatgagatcgaggacatccagcaggagatcactgtcctcagtcagtgcgacagcccctacatcacccgctactttggctcctacctaaagagcaccaagctatggatcatcatggagtacctgggcggcggctcagcactggacttgcttaaaccaggtcccctggaggagacatacattgccacgatcctgcgggagattctgaagggcctggattatctgcactccgaacgcaagatccaccgagacatcaaagctgccaacgtgctactctcggagcagggtgacgtgaagctggcggactttggggtagcagggcagctcacagacacgcagattaagaggaacacattcgtgggcacccccttctggatggcacctgaggtcatcaagcagtcggcctacgacttcaaggctgacatctggtccctggggatcacagccatcgagctggccaagggggagcctccaaactctgacctccaccccatgcgcgtcctgttcctgattcccaagaacagcccacccacactggagggccagcacagcaagcccttcaaggagttcgtggaggcctgcctcaacaaagacccccgattccggcccacggccaaggagctcctgaagcacaagttcatcacacgctacaccaagaagacctccttcctcacggagctcatcgaccgctataagcgctggaagtcagaggggcatggcgaggagtccagctctgaggactctgacattgatggcgaggcggaggacggggagcagggccccatctggacgttcccccctaccatccggccgagtccacacagcaagcttcacaaggggacggccctgcacagttcacagaagcctgcggagcccgtcaagaggcagccgaggtcccagtgcctgtccacgctggtccggcccgtcttcggagagctcaaagagaagcacaagcagagcggcgggagcgtgggtgcgctggaggagctggagaacgccttcagcctggccgaggagtcctgccccggcatctcagacaagctgatggtgcacctggtggagcgagtgcagaggttttcacacaacagaaaccacctgacatccacccgctgaagcgcactgctgttcagataggggacggaaggtcgtttgtttttgttctgagctccataagaactgtgctgacttggaaggtgccctgtgctatgtcgtgcctgcagggacacgtcggatcccgtgggcctcacatgccaggtcaccaggtcaccgtctccttccacccctgcagtgtgctgttgtgcacgtcagggacgctgttctctatgcccactgccctcctccctctcctggcccagcagtattgctcacgggggctccagccgccggcgtggccctcatgagctacgcctgggtcttctgcagactcatgcagccctatggccgctcagaccaaggcgcagagcaactatcagggcagctctgcctcctcctcccatgaggtggggagaggcaacagggcagcccccagaggagtgtcctggccgctgtcctcccggggcccatgatggccatagatttgccttgtggtgttggatcaggtactgtgtctgctcataagtacttgtgtcatccagaatgttttgttttttaagaaaattgaattacttgtttcctgaaatattctgaggttaatatgttagttttcatagaacattgagaggcccctgccactttcaataaagacctgacttggagaca

SEQ ID NO: 180304 - DNA, 1904 bp, Homo sapiens
  Payload ID: 15516
  Gene Symbol: STK25
  Gene Name: serine/threonine kinase 25
  Uniprot ID: O00506
  ENST ID: ENST00000405883
  CDS Start-End: 215-1264
gttgcttcgcgggctgggaggcccggggtccccgggcgaacagaggctgcgggtgggagccttcgcgggcgctgcagagcgggccgggggaggccgggatggagccccgcggagtggactgacgccgcaggggcgagctagccggctccgcgcctctccgcgggatccagacgcctcctggggctgctggcggagggtctgaggcggcgcggccatggctcacctccggggatttgccaaccagagcaccaagctatggatcatcatggagtacctgggcggcggctcagcactggacttgcttaaaccaggtcccctggaggagacatacattgccacgatcctgcgggagattctgaagggcctggattatctgcactccgaacgcaagatccaccgagacatcaaagctgccaacgtgctactctcggagcagggtgacgtgaagctggcggactttggggtagcagggcagctcacagacacgcagattaagaggaacacattcgtgggcacccccttctggatggcacctgaggtcatcaagcagtcggcctacgacttcaaggctgacatctggtccctggggatcacagccatcgagctggccaagggggagcctccaaactctgacctccaccccatgcgcgtcctgttcctgattcccaagaacagcccacccacactggagggccagcacagcaagcccttcaaggagttcgtggaggcctgcctcaacaaagacccccgattccggcccacggccaaggagctcctgaagcacaagttcatcacacgctacaccaagaagacctccttcctcacggagctcatcgaccgctataagcgctggaagtcagaggggcatggcgaggagtccagctctgaggactctgacattgatggcgaggcggaggacggggagcagggccccatctggacgttcccccctaccatccggccgagtccacacagcaagcttcacaaggggacggccctgcacagttcacagaagcctgcggagcccgtcaagaggcagccgaggtcccagtgcctgtccacgctggtccggcccgtcttcggagagctcaaagagaagcacaagcagagcggcgggagcgtgggtgcgctggaggagctggagaacgccttcagcctggccgaggagtcctgccccggcatctcagacaagctgatggtgcacctggtggagcgagtgcagaggttttcacacaacagaaaccacctgacatccacccgctgaagcgcactgctgttcagataggggacggaaggtcgtttgtttttgttctgagctccataagaactgtgctgacttggaaggtgccctgtgctatgtcgtgcctgcagggacacgtcggatcccgtgggcctcacatgccaggtcaccaggtcaccgtctccttccacccctgcagtgtgctgttgtgcacgtcagggacgctgttctctatgcccactgccctcctccctctcctggcccagcagtattgctcacgggggctccagccgccggcgtggccctcatgagctacgcctgggtcttctgcagactcatgcagccctatggccgctcagaccaaggcgcagagcaactatcagggcagctctgcctcctcctcccatgaggtggggagaggcaacagggcagcccccagaggagtgtcctggccgctgtcctcccggggcccatgatggccatagatttgccttgtggtgttggatcaggtactgtgtctgctcataagtacttgtgtcatccagaatgttttgttttttaagaaaattgaattacttgtttcctgaaatattctgaggttaatatgttagttttcatagaacattgagaggcccctgccactttcaataaagacctgacttgg

SEQ ID NO: 180305 - DNA, 1643 bp, Homo sapiens
  Payload ID: 15516
  Gene Symbol: STK25
  Gene Name: serine/threonine kinase 25
  Uniprot ID: O00506
  ENST ID: ENST00000405585
  CDS Start-End: 181-1230
gctttctccggtcgctgccgccaccaccgttgcttcgcgggctgggaggcccggggtccccgggcgaacagaggctgcggtggactgacgccgcaggggcgagctagccggctccgcgcctctccgcgggatccagacgcctcctggggctgctggcggagggtctgaggcggcgcggccatggctcacctccggggatttgccaaccagagcaccaagctatggatcatcatggagtacctgggcggcggctcagcactggacttgcttaaaccaggtcccctggaggagacatacattgccacgatcctgcgggagattctgaagggcctggattatctgcactccgaacgcaagatccaccgagacatcaaagctgccaacgtgctactctcggagcagggtgacgtgaagctggcggactttggggtagcagggcagctcacagacacgcagattaagaggaacacattcgtgggcacccccttctggatggcacctgaggtcatcaagcagtcggcctacgacttcaaggctgacatctggtccctggggatcacagccatcgagctggccaagggggagcctccaaactctgacctccaccccatgcgcgtcctgttcctgattcccaagaacagcccacccacactggagggccagcacagcaagcccttcaaggagttcgtggaggcctgcctcaacaaagacccccgattccggcccacggccaaggagctcctgaagcacaagttcatcacacgctacaccaagaagacctccttcctcacggagctcatcgaccgctataagcgctggaagtcagaggggcatggcgaggagtccagctctgaggactctgacattgatggcgaggcggaggacggggagcagggccccatctggacgttcccccctaccatccggccgagtccacacagcaagcttcacaaggggacggccctgcacagttcacagaagcctgcggagcccgtcaagaggcagccgaggtcccagtgcctgtccacgctggtccggcccgtcttcggagagctcaaagagaagcacaagcagagcggcgggagcgtgggtgcgctggaggagctggagaacgccttcagcctggccgaggagtcctgccccggcatctcagacaagctgatggtgcacctggtggagcgagtgcagaggttttcacacaacagaaaccacctgacatccacccgctgaagcgcactgctgttcagataggggacggaaggtcgtttgtttttgttctgagctccataagaactgtgctgacttggaaggtgccctgtgctatgtcgtgcctgcagggacacgtcggatcccgtgggcctcacatgccaggtcaccaggtcaccgtctccttccacccctgcagtgtgctgttgtgcacgtcagggacgctgttctctatgcccactgccctcctccctctcctggcccagcagtattgctcacgggggctccagccgccggcgtggccctcatgagctacgcctgggtcttctgcagactcatgcagccctatggccgctcagaccaaggcgcagagcaactatcagggcagctctgcctcctcctcccatgaggtggggagaggcaacagggcagccccc

SEQ ID NO: 180306 - DNA, 2251 bp, Homo sapiens
  Payload ID: 15516
  Gene Symbol: STK25
  Gene Name: serine/threonine kinase 25
  Uniprot ID: O00506
  ENST ID: ENST00000401869
  CDS Start-End: 328-1608
gggacaccggggcgggggcaccgggaggaagctgccttggaagaggtgggggcggcgacgggaggggcggcgagcccccgggagcctgggcgttaggcccgggcgtggcggggccccggcggcctggggggtctcctgggcccccccccacccatggagcccgccgccccggaggtcggtctcagatgactgaactgggcaccgagcgcccctggtgtccctcgcagtggactgacgccgcaggggcgagctagccggctccgcgcctctccgcgggatccagacgcctcctggggctgctggcggagggtctgaggcggcgcggccatggctcacctccggggatttgccaaccagcactctcgagtggaccctgaggagctcttcaccaagctcgaccgcattggcaagggctcgtttggggaggtctacaagggcatcgataaccacacaaaggaggtggtggccatcaagatcatcgacctggaggaggccgaggatgagatcgaggacatccagcaggagatcactgtcctcagtcagtgcgacagcccctacatcacccgctactttggctcctacctaaagagcaccaagctatggatcatcatggagtacctgggcggcggctcagcactggacttgcttaaaccaggtcccctggaggagacatacattgccacgatcctgcgggagattctgaagggcctggattatctgcactccgaacgcaagatccaccgagacatcaaagctgccaacgtgctactctcggagcagggtgacgtgaagctggcggactttggggtagcagggcagctcacagacacgcagattaagaggaacacattcgtgggcacccccttctggatggcacctgaggtcatcaagcagtcggcctacgacttcaaggctgacatctggtccctggggatcacagccatcgagctggccaagggggagcctccaaactctgacctccaccccatgcgcgtcctgttcctgattcccaagaacagcccacccacactggagggccagcacagcaagcccttcaaggagttcgtggaggcctgcctcaacaaagacccccgattccggcccacggccaaggagctcctgaagcacaagttcatcacacgctacaccaagaagacctccttcctcacggagctcatcgaccgctataagcgctggaagtcagaggggcatggcgaggagtccagctctgaggactctgacattgatggcgaggcggaggacggggagcagggccccatctggacgttcccccctaccatccggccgagtccacacagcaagcttcacaaggggacggccctgcacagttcacagaagcctgcggagcccgtcaagaggcagccgaggtcccagtgcctgtccacgctggtccggcccgtcttcggagagctcaaagagaagcacaagcagagcggcgggagcgtgggtgcgctggaggagctggagaacgccttcagcctggccgaggagtcctgccccggcatctcagacaagctgatggtgcacctggtggagcgagtgcagaggttttcacacaacagaaaccacctgacatccacccgctgaagcgcactgctgttcagataggggacggaaggtcgtttgtttttgttctgagctccataagaactgtgctgacttggaaggtgccctgtgctatgtcgtgcctgcagggacacgtcggatcccgtgggcctcacatgccaggtcaccaggtcaccgtctccttccacccctgcagtgtgctgttgtgcacgtcagggacgctgttctctatgcccactgccctcctccctctcctggcccagcagtattgctcacgggggctccagccgccggcgtggccctcatgagctacgcctgggtcttctgcagactcatgcagccctatggccgctcagaccaaggcgcagagcaactatcagggcagctctgcctcctcctcccatgaggtggggagaggcaacagggcagcccccagaggagtgtcctggccgctgtcctcccggggcccatgatggccatagatttgccttgtggtgttggatcaggtactgtgtctgctcataagtacttgtgtcatccagaatgttttgttttttaagaaaattgaattacttgtttcctgaaatattctgaggttaatatgttagttttcatagaacattgagaggcccctgccactttcaataaagacctgacttggaga

SEQ ID NO: 180307 - DNA, 801 bp, Homo sapiens
  Payload ID: 15516
  Gene Symbol: STK25
  Gene Name: serine/threonine kinase 25
  ENST ID: ENST00000413760
  CDS Start-End: 357-801
acggcttccagcagcagtcactgtcctgggcgcgtcccgcgctctagcccaggtgggtcccacaacggtgtgaccaaggacgtcctatgaccaccccttgacagcactctcgagtggaccctgaggagctcttcaccaagctcgaccgcattggcaagggctcgtttggggaggtctacaagggcatcgataaccacacaaaggaggtggtggccatcaagatcatcgacctggaggaggccgaggatgagatcgaggacatccagcaggagatcactgtcctcagtcagtgcgacagcccctacatcacccgctactttggctcctacctaaagagcaccaagctatggatcatcatggagtacctgggcggcggctcagcactggacttgcttaaaccaggtcccctggaggagacatacattgccacgatcctgcgggagattctgaagggcctggattatctgcactccgaacgcaagatccaccgagacatcaaagctgccaacgtgctactctcggagcagggtgacgtgaagctggcggactttggggtagcagggcagctcacagacacgcagattaagaggaacacattcgtgggcacccccttctggatggcacctgaggtcatcaagcagtcggcctacgacttcaaggctgacatctggtccctggggatcacagccatcgagctggccaagggggagcctccaaactctgacctccaccccatgcgcgtcctgttcctgattcccaagaacagcccacccacactggagggccagcacagcaagccct

SEQ ID NO: 180308 - DNA, 882 bp, Homo sapiens
  Payload ID: 15516
  Gene Symbol: STK25
  Gene Name: serine/threonine kinase 25
  ENST ID: ENST00000450497
  CDS Start-End: 352-882
tcagtgcgacagcccctacatcacccgctactttggctcctacctaaagccctgtaggactggatcagcagcctggtttttgatggggtcttggtgaagtggagtcagccactgctgtgtgtactcaacctgtcctctgagcatctgtagcagtagtgtggcaggaggggaagatgggcaaggccgagagagccctttcctgttcagggttcttggcagggatgggaccggtggggcctgggccctggctgactccggcctgtgactcccaccctggagcatgcccttcctcttgctgccaaatgctgatgggtttgtctccggtcccagagcaccaagctatggatcatcatggagtacctgggcggcggctcagcactggacttgcttaaaccaggtcccctggaggagacatacattgccacgatcctgcgggagattctgaagggcctggattatctgcactccgaacgcaagatccaccgagacatcaaagctgccaacgtgctactctcggagcagggtgacgtgaagctggcggactttggggtagcagggcagctcacagacacgcagattaagaggaacacattcgtgggcacccccttctggatggcacctgaggtcatcaagcagtcggcctacgacttcaaggctgacatctggtccctggggatcacagccatcgagctggccaagggggagcctccaaactctgacctccaccccatgcgcgtcctgttcctgattcccaagaacagcccacccacactggagggccagcacagcaagcccttcaaggagttcgtggaggcctgcctcaacaaagacccccgattccggcccacggccaaggagctcctgaagcacaagttcatcaca

SEQ ID NO: 180309 - DNA, 570 bp, Homo sapiens
  Payload ID: 15516
  Gene Symbol: STK25
  Gene Name: serine/threonine kinase 25
  ENST ID: ENST00000435225
  CDS Start-End: 425-570
tagagatggggtttcaccatgctggccaggctggtctcgaactcctgacctcaagtgatccacctgcctcggcctcccaaagtgctagaattacaggcgtgagccaccacgcccggccaagtttagtttttgaacaaaaagggagaaaggaagaaaccagagaagaattgagcactctcgagtggaccctgaggagctcttcaccaagctcgaccgcattggcaagggctcgtttggggaggtctacaagggcatcgataaccacacaaaggaggtggtggccatcaagatcatcgacctggaggaggccgaggatgagatcgaggacatccagcaggagatcactgtcctcagtcagtgcgacagcccctacatcacccgctactttggctcctacctaaagagcaccaagctatggatcatcatggagtacctgggcggcggctcagcactggacttgcttaaaccaggtcccctggaggagacatacattgccacgatcctgcgggagattctgaagggcctggattatctgcactccgaacgcaagatccaccgagacatcaaagg

SEQ ID NO: 180310 - DNA, 923 bp, Homo sapiens
  Payload ID: 15516
  Gene Symbol: STK25
  Gene Name: serine/threonine kinase 25
  ENST ID: ENST00000442307
  CDS Start-End: 435-923
gggccgcgacgccgagcaccgccctcgccgtcgcctccgggctttctccggtcgctgccgccaccaccgttgcttcgcgggctgggaggcccggggtccccgggcgaacagaggctgcgggtgggagccttcgcgggcgctgcagagcgggccgggggaggccgggatggagccccgcggagcactctcgagtggaccctgaggagctcttcaccaagctcgaccgcattggcaagggctcgtttggggaggtctacaagggcatcgataaccacacaaaggaggtggtggccatcaagatcatcgacctggaggaggccgaggatgagatcgaggacatccagcaggagatcactgtcctcagtcagtgcgacagcccctacatcacccgctactttggctcctacctaaagagcaccaagctatggatcatcatggagtacctgggcggcggctcagcactggacttgcttaaaccaggtcccctggaggagacatacattgccacgatcctgcgggagattctgaagggcctggattatctgcactccgaacgcaagatccaccgagacatcaaagctgccaacgtgctactctcggagcagggtgacgtgaagctggcggactttggggtagcagggcagctcacagacacgcagattaagaggaacacattcgtgggcacccccttctggatggcacctgaggtcatcaagcagtcggcctacgacttcaaggctgacatctggtccctggggatcacagccatcgagctggccaagggggagcctccaaactctgacctccaccccatgcgcgtcctgttcctgattcccaagaacagcccacccacactggagggccagcacagcaagcccttcaaggagttcgtggaggcctgcctcaacaaagacccccgattc

SEQ ID NO: 180311 - DNA, 935 bp, Homo sapiens
  Payload ID: 15516
  Gene Symbol: STK25
  Gene Name: serine/threonine kinase 25
  ENST ID: ENST00000440109
  CDS Start-End: 761-935
gtaaagaagcaggggtgatgagagatgcggacccaggaggggttcaaggggctgtcctggacgcatgacagggaagcatagcttcttaaaggactcggcagtgcaccatgagaagacacgcaccagggagcagagagaaacgccagaaccctctcgaagaaggagggatgtgaggaggtcaggatagtcacctgtgctgagccatcatggagagtgagggcctgtaagggtggacacagtatgcaggagggacaaatcttcctcaccggacaggtggggatccctgcggtgcactaggggaatgcacacagggggcactatgacctggcggcccacggggcacggggacgcaccaggtagccttgggatctgcaagtccctcccggaccctggggagtgccatgacggcttccagcagcagtcactgtcctgggcgcgtcccgcgctctagcccaggtgggtcccacaacggtgtgaccaaggacgtcctatgaccaccccttgacagcactctcgagtggaccctgaggagctcttcaccaagctcgaccgcattggcaagggctcgtttggggaggtctacaagggcatcgataaccacacaaaggaggtggtggccatcaagatcatcgacctggaggaggccgaggatgagatcgaggacatccagcaggagatcactgtcctcagtcagtgcgacagcccctacatcacccgctactttggctcctacctaaagagcaccaagctatggatcatcatggagtacctgggcggcggctcagcactggacttgcttaaaccaggtcccctggaggagacatacattgccacgatcctgcgggagattctgaagggcctggattatctgcactccgaacgcaagatccaccgagacatcaaaggtcctgctgggggtggatgtggctcttgta

SEQ ID NO: 180312 - DNA, 773 bp, Homo sapiens
  Payload ID: 15516
  Gene Symbol: STK25
  Gene Name: serine/threonine kinase 25
  ENST ID: ENST00000423004
  CDS Start-End: 1-743
cgatcctgcgggagattctgaagggcctggattatctgcactccgaacgcaagatccaccgagacatcaaagctgccaacgtgctactctcggagcagggtgacgtgaagctggcggactttggggtagcagggcagctcacagacacgcagattaagaggaacacattcgtgggcacccccttctggatggcacctgaggtcatcaagcagtcggcctacgacttcaaggctgacatctggtccctggggatcacagccatcgagctggccaagggggagcctccaaactctgacctccaccccatgcgcgtcctgttcctgattcccaagaacagcccacccacactggagggccagcacagcaagcccttcaaggagttcgtggaggcctgcctcaacaaagacccccgattccggcccacggccaaggagctcctgaagcacaagttcatcacacgctacaccaagaagacctccttcctcacggagctcatcgaccgctataagcgctggaagtcagaggggcatggcgaggagtccagctctgaggactctgacatcctgcggagcccgtcaagaggcagccgaggtcccagtgcctgtccacgctggtccggcccgtcttcggagagctcaaagagaagcacaagcagagcggcgggagcgtgggtgcgctggaggagctggagaacgccttcagcctggccgaggagtcctgccccggcatctcagacaagctgatggtgcacctggtggagcgagtgcagaggt

SEQ ID NO: 180313 - DNA, 395 bp, Homo sapiens
  Payload ID: 15516
  Gene Symbol: STK25
  Gene Name: serine/threonine kinase 25
  ENST ID: ENST00000420551
  CDS Start-End: 129-395
gggctttctccggtcgctgccgccaccaccgttgcttcgcgggctgggaggcccggggtccccgggcgaacagaggctgcgggtgggagccttcgcgggcgctgcagagcgggccgggggaggccgggatggagccccgcggagagttccagtcacctcgaggtctggcactcaaaaagggatgtgcagcggcatgtttcaagcactctcgagtggaccctgaggagctcttcaccaagctcgaccgcattggcaagggctcgtttggggaggtctacaagggcatcgataaccacacaaaggaggtggtggccatcaagatcatcgacctggaggaggccgaggatgagatcgaggacatccagcaggagatcactgtcctcagtcagtgcgac

SEQ ID NO: 180314 - DNA, 580 bp, Homo sapiens
  Payload ID: 15516
  Gene Symbol: STK25
  Gene Name: serine/threonine kinase 25
  ENST ID: ENST00000429279
  CDS Start-End: 344-580
gtcgcctccgggctttctccggtcgctgccgccaccaccgttgcttcgcgggctgggaggcccggggtccccgggcgaacagaggctgcggcactctcgagtggaccctgaggagctcttcaccaagctcgaccgcattggcaagggctcgtttggggaggtctacaagggcatcgataaccacacaaaggaggtggtggccatcaagatcatcgacctggaggaggccgaggatgagatcgaggacatccagcaggagatcactgtcctcagtcagtgcgacagcccctacatcacccgctactttggctcctacctaaagagcaccaagctatggatcatcatggagtacctgggcggcggctcagcactggacttgcttaaaccaggtcccctggaggagacatacattgccacgatcctgcgggagattctgaagggcctggattatctgcactccgaacgcaagatccaccgagacatcaaagctgccaacgtgctactctcggagcagggtgacgtgaagctggcggactttggggtagcagggcagctcacagacacgcagattaagaggaac

SEQ ID NO: 180315 - DNA, 779 bp, Homo sapiens
  Payload ID: 15516
  Gene Symbol: STK25
  Gene Name: serine/threonine kinase 25
  ENST ID: ENST00000439101
  CDS Start-End: 722-779
gctgccttggaagaggtgggggcggcgacgggaggggcggcgagcccccgggagcctgggcgttaggcccgggcgtggcggggccccggcggcctggggggtctcctgggcccccccccacccatggagcccgccgccccggaggtcggtctcagatgactgaactgggcaccgagcgcccctggtgtccctcgcagtggactgacgccgcaggggcgagctagccggctccgcgcctctccgcgggatccagacgcctcctggggctgctggcggagggtctgaggcggcgcggccatggctcacctccggggatttgccaaccaggtcccttcctccccagcagggcagcctctgcctgtcccccgcctcttgtgaccggcgctgtctgccctctgtccccgccctggccccacagcactctcgagtggaccctgaggagctcttcaccaagctcgaccgcattggcaagggctcgtttggggaggtctacaagggcatcgataaccacacaaaggaggtggtggccatcaagatcatcgacctggaggaggccgaggatgagatcgaggacatccagcaggagatcactgtcctcagtcagtgcgacagcccctacatcacccgctactttggctcctacctaaagcatgcccttcctcttgctgccaaatgctgatgggtttgtctccggtcccagagcaccaagctatggatcatcatggagtacctgggcggcggctcagcactggacttgcttaaaccaggtcccctggagg

SEQ ID NO: 180316 - DNA, 600 bp, Homo sapiens
  Payload ID: 15516
  Gene Symbol: STK25
  Gene Name: serine/threonine kinase 25
  ENST ID: ENST00000436402
  CDS Start-End: 146-600
gggacaccggggcgggggcaccgggaggaagctgccttggaagagtggactgacgccgcaggggcgagctagccggctccgcgcctctccgcgggatccagacgcctcctggggctgctggcggagggtctgaggcggcgcggccatggctcacctccggggatttgccaaccagcactctcgagtggaccctgaggagctcttcaccaagctcgaccgcattggcaagggctcgtttggggaggtctacaagggcatcgataaccacacaaaggaggtggtggccatcaagatcatcgacctggaggaggccgaggatgagatcgaggacatccagcaggagatcactgtcctcagtcagtgcgacagcccctacatcacccgctactttggctcctacctaaagagcaccaagctatggatcatcatggagtacctgggcggcggctcagcactggacttgcttaaaccaggtcccctggaggagacatacattgccacgatcctgcgggagattctgaagggcctggattatctgcactccgaacgcaagatccaccgagacatcaaagctgccaacgtgctactctcggagcaggg

SEQ ID NO: 180317 - DNA, 575 bp, Homo sapiens
  Payload ID: 15516
  Gene Symbol: STK25
  Gene Name: serine/threonine kinase 25
  ENST ID: ENST00000426941
  CDS Start-End: 230-575
gctgccgccaccaccgttgcttcgcgggctgggaggcccggggtccccgggcgaacagaggctgcgggtgggagccttcgcgggcgctgcagagcgggccgggggaggccgggatggagccccgcggagtggactgacgccgcaggggcgagctagccggctccgcgcctctccgcgggatccagacgcctcctggggctgctggcggagggtctgaggcggcgcggccatggctcacctccggggatttgccaaccagcactctcgagtggaccctgaggagctcttcaccaagctcgaccgcattggcaagggctcgtttggggaggtctacaagggcatcgataaccacacaaaggaggtggtggccatcaagatcatcgacctggaggaggccgaggatgagatcgaggacatccagcaggagatcactgtcctcagtcagtgcgacagcccctacatcacccgctactttggctcctacctaaaggtgcctgttgtggggaggcggggaccctgctggtgctgtgcccggctctcttccatgtcagagggactgagtgacatgccagagg

SEQ ID NO: 180318 - DNA, 781 bp, Homo sapiens
  Payload ID: 15516
  Gene Symbol: STK25
  Gene Name: serine/threonine kinase 25
  ENST ID: ENST00000424537
  CDS Start-End: 299-781
agctgccttggaagaggtgggggcggcgacgggaggggcggcgagcccccgggagcctgggcgttaggcccgggcgtggcggggccccggcggcctggggggtctcctgggcccccccccacccatggagcccgccgccccggaggtcggtctcagatgactgaactgggcaccgagcgcccctggtgtccctcgcagtggactgacgccgcaggggcgagctagccggctccgcgcctctccgcgggatccagacgcctcctggggctgctggcggagggtctgaggcggcgcggccatggctcacctccggggatttgccaaccagcttaaaccaggtcccctggaggagacatacattgccacgatcctgcgggagattctgaagggcctggattatctgcactccgaacgcaagatccaccgagacatcaaagctgccaacgtgctactctcggagcagggtgacgtgaagctggcggactttggggtagcagggcagctcacagacacgcagattaagaggaacacattcgtgggcacccccttctggatggcacctgaggtcatcaagcagtcggcctacgacttcaaggctgacatctggtccctggggatcacagccatcgagctggccaagggggagcctccaaactctgacctccaccccatgcgcgtcctgttcctgattcccaagaacagcccacccacactggagggccagcacagcaagcccttcaaggagttcgtggaggcctgcctcaacaaagacccccgattc

SEQ ID NO: 180319 - DNA, 2556 bp, Homo sapiens
  Payload ID: 15516
  Gene Symbol: STK25
  Gene Name: serine/threonine kinase 25
  Uniprot ID: O00506
  ENST ID: ENST00000543554
  CDS Start-End: 603-1601
gaaggagggatgtgaggaggtcaggatagtcacctgtgctgagccatcatggagagtgagggcctgtaagggtggacacagtatgcaggagggacaaatcttcctcaccggacaggtggggatccctgcggtgcactaggggaatgcacacagggggcactatgacctggcggcccacggggcacggggacgcaccaggtagccttgggatctgcaagtccctcccggaccctggggagtgccatgacggcttccagcagcagtcactgtcctgggcgcgtcccgcgctctagcccaggtgggtcccacaacggtgtgaccaaggacgtcctatgaccaccccttgacagcactctcgagtggaccctgaggagctcttcaccaagctcgaccgcattggcaagggctcgtttggggaggtctacaagggcatcgataaccacacaaaggaggtggtggccatcaagatcatcgacctggaggaggccgaggatgagatcgaggacatccagcaggagatcactgtcctcagtcagtgcgacagcccctacatcacccgctactttggctcctacctaaagagcaccaagctatggatcatcatggagtacctgggcggcggctcagcactggacttgcttaaaccaggtcccctggaggagacatacattgccacgatcctgcgggagattctgaagggcctggattatctgcactccgaacgcaagatccaccgagacatcaaagctgccaacgtgctactctcggagcagggtgacgtgaagctggcggactttggggtagcagggcagctcacagacacgcagattaagaggaacacattcgtgggcacccccttctggatggcacctgaggtcatcaagcagtcggcctacgacttcaaggctgacatctggtccctggggatcacagccatcgagctggccaagggggagcctccaaactctgacctccaccccatgcgcgtcctgttcctgattcccaagaacagcccacccacactggagggccagcacagcaagcccttcaaggagttcgtggaggcctgcctcaacaaagacccccgattccggcccacggccaaggagctcctgaagcacaagttcatcacacgctacaccaagaagacctccttcctcacggagctcatcgaccgctataagcgctggaagtcagaggggcatggcgaggagtccagctctgaggactctgacattgatggcgaggcggaggacggggagcagggccccatctggacgttcccccctaccatccggccgagtccacacagcaagcttcacaaggggacggccctgcacagttcacagaagcctgcggagcccgtcaagaggcagccgaggtcccagtgcctgtccacgctggtccggcccgtcttcggagagctcaaagagaagcacaagcagagcggcgggagcgtgggtgcgctggaggagctggagaacgccttcagcctggccgaggagtcctgccccggcatctcagacaagctgatggtgcacctggtggagcgagtgcagaggttttcacacaacagaaaccacctgacatccacccgctgaagcgcactgctgttcagataggggacggaaggtcgtttgtttttgttctgagctccataagaactgtgctgacttggaaggtgccctgtgctatgtcgtgcctgcagggacacgtcggatcccgtgggcctcacatgccaggtcaccaggtcaccgtctccttccacccctgcagtgtgctgttgtgcacgtcagggacgctgttctctatgcccactgccctcctccctctcctggcccagcagtattgctcacgggggctccagccgccggcgtggccctcatgagctacgcctgggtcttctgcagactcatgcagccctatggccgctcagaccaaggcgcagagcaactatcagggcagctctgcctcctcctcccatgaggtggggagaggcaacagggcagcccccagaggagtgtcctggccgctgtcctcccggggcccatgatggccatagatttgccttgtggtgttggatcaggtactgtgtctgctcataagtacttgtgtcatccagaatgttttgttttttaagaaaattgaattacttgtttcctgaaatattctgaggttaatatgttagttttcatagaacattgagaggcccctgccactttcaataaagacctgacttggagacatgcaggtgtgtgtggtggggcccgggccatgcggggctgcagcgtccctggtcccgagtcctcatcacagcacgcagagacggcagcccagccccccttcgaaacttccctgtgacggattcctgggctctgcttggcccaccggaagaacagagcaggcagaggagaatgcaggtggggagatgctgtttgtttatttttaatcaaatgtgtgtgaacaaagcagtcgcccatctacttcccgttggaaggaatgctgggcagtaataaattagacggccccaccctcccagggcacagggggactttg

SEQ ID NO: 180320 - DNA, 2459 bp, Homo sapiens
  Payload ID: 15516
  Gene Symbol: STK25
  Gene Name: serine/threonine kinase 25
  Uniprot ID: O00506
  ENST ID: ENST00000535007
  CDS Start-End: 506-1504
gtagtccaacgccagcaggcttccgggcccggagtgggcggtgggactcggggtcccagagagccgtgcgcgggccgcgacgccgagcaccgccctcgccgtcgcctccgggctttctccggtcgctgccgccaccaccgttgcttcgcgggctgggaggcccggggtccccgggcgaacagaggctgcgggtgggagccttcgcgggcgctgcagagcgggccgggggaggccgggatggagccccgcggagcactctcgagtggaccctgaggagctcttcaccaagctcgaccgcattggcaagggctcgtttggggaggtctacaagggcatcgataaccacacaaaggaggtggtggccatcaagatcatcgacctggaggaggccgaggatgagatcgaggacatccagcaggagatcactgtcctcagtcagtgcgacagcccctacatcacccgctactttggctcctacctaaagagcaccaagctatggatcatcatggagtacctgggcggcggctcagcactggacttgcttaaaccaggtcccctggaggagacatacattgccacgatcctgcgggagattctgaagggcctggattatctgcactccgaacgcaagatccaccgagacatcaaagctgccaacgtgctactctcggagcagggtgacgtgaagctggcggactttggggtagcagggcagctcacagacacgcagattaagaggaacacattcgtgggcacccccttctggatggcacctgaggtcatcaagcagtcggcctacgacttcaaggctgacatctggtccctggggatcacagccatcgagctggccaagggggagcctccaaactctgacctccaccccatgcgcgtcctgttcctgattcccaagaacagcccacccacactggagggccagcacagcaagcccttcaaggagttcgtggaggcctgcctcaacaaagacccccgattccggcccacggccaaggagctcctgaagcacaagttcatcacacgctacaccaagaagacctccttcctcacggagctcatcgaccgctataagcgctggaagtcagaggggcatggcgaggagtccagctctgaggactctgacattgatggcgaggcggaggacggggagcagggccccatctggacgttcccccctaccatccggccgagtccacacagcaagcttcacaaggggacggccctgcacagttcacagaagcctgcggagcccgtcaagaggcagccgaggtcccagtgcctgtccacgctggtccggcccgtcttcggagagctcaaagagaagcacaagcagagcggcgggagcgtgggtgcgctggaggagctggagaacgccttcagcctggccgaggagtcctgccccggcatctcagacaagctgatggtgcacctggtggagcgagtgcagaggttttcacacaacagaaaccacctgacatccacccgctgaagcgcactgctgttcagataggggacggaaggtcgtttgtttttgttctgagctccataagaactgtgctgacttggaaggtgccctgtgctatgtcgtgcctgcagggacacgtcggatcccgtgggcctcacatgccaggtcaccaggtcaccgtctccttccacccctgcagtgtgctgttgtgcacgtcagggacgctgttctctatgcccactgccctcctccctctcctggcccagcagtattgctcacgggggctccagccgccggcgtggccctcatgagctacgcctgggtcttctgcagactcatgcagccctatggccgctcagaccaaggcgcagagcaactatcagggcagctctgcctcctcctcccatgaggtggggagaggcaacagggcagcccccagaggagtgtcctggccgctgtcctcccggggcccatgatggccatagatttgccttgtggtgttggatcaggtactgtgtctgctcataagtacttgtgtcatccagaatgttttgttttttaagaaaattgaattacttgtttcctgaaatattctgaggttaatatgttagttttcatagaacattgagaggcccctgccactttcaataaagacctgacttggagacatgcaggtgtgtgtggtggggcccgggccatgcggggctgcagcgtccctggtcccgagtcctcatcacagcacgcagagacggcagcccagccccccttcgaaacttccctgtgacggattcctgggctctgcttggcccaccggaagaacagagcaggcagaggagaatgcaggtggggagatgctgtttgtttatttttaatcaaatgtgtgtgaacaaagcagtcgcccatctacttcccgttggaaggaatgctgggcagtaataaattagacggccccaccctcccagggcacagggggactttg

SEQ ID NO: 180321 - DNA, 2826 bp, Homo sapiens
  Payload ID: 15517
  Gene Symbol: STK3
  Gene Name: serine/threonine kinase 3
  Uniprot ID: Q13188
  ENST ID: ENST00000419617
  CDS Start-End: 142-1617
ccgcggagttacgggaaagttggtccgagttcccagagtttccctctgtggtgccctaggctcggccggccggtgccccggctcctttcctcctttcggccttcgccgtccaccaggtccctctctctgtccccggccgccatggagcagccgccggcgcctaagagtaaactaaaaaagctgagtgaagacagtttgactaagcagcctgaagaagtttttgatgtattagagaagcttggagaagggtcttatggaagtgtatttaaagcaatacacaaggaatccggtcaagttgtcgcaattaaacaagtacctgttgaatcagatcttcaggaaataatcaaagaaatttccataatgcagcaatgtgacagcccatatgttgtaaagtactatggcagttattttaagaatacagacctctggattgttatggagtactgtggcgctggctctgtctcagacataattagattacgaaacaagacattaatagaagatgaaattgcaaccattcttaaatctacattgaaaggactagaatatttgcactttatgagaaaaatacacagagatataaaagctggaaatattctcctcaatacagaaggacatgcaaaattggcagattttggagtggctggtcagttaacagatacaatggcaaaacgcaatactgtaataggaactccattttggatggctcctgaggtgattcaagaaataggctataactgtgtggccgacatctggtcccttggcattacttctatagaaatggctgaaggaaaacctccttatgctgatatacatccaatgagggctatttttatgattcccacaaatccaccaccaacattcagaaagccagaactttggtccgatgatttcaccgattttgttaaaaagtgtttggtgaagaatcctgagcagagagctactgcaacacaacttttacagcatccttttatcaagaatgccaaacctgtatcaatattaagagacctgatcacagaagctatggagatcaaagctaaaagacatgaggaacagcaacgagaattggaagaggaagaagaaaattcggatgaagatgagctggattcccacaccatggtgaagactagtgtggagagtgtgggcaccatgcgggccacaagcacgatgagtgaaggggcccagaccatgattgaacataatagcacgatgttggaatccgacttggggaccatggtgataaacagtgaggatgaggaagaagaagatggaactatgaaaagaaatgcaacctcaccacaagtacaaagaccatctttcatggactactttgataagcaagacttcaagaataagagtcacgaaaactgtaatcagaacatgcatgaacccttccctatgtccaaaaacgtttttcctgataactggaaagttcctcaagatggagactttgactttttgaaaaatctaagtttagaagaactacagatgcggttaaaagcactggaccccatgatggaacgggagatagaagaacttcgtcagagatacactgcgaaaagacagcccattctggatgcgatggatgcaaagaaaagaaggcagcaaaacttttgagtctaatttcctctctgtttttaactattctggagaccaagaaaccactaggaattgaaggaatatttggatatttttaatcctaagattttgccctacaattaggcagaggtcaaaaagtgacaatggtacatgcccaggtaaattcccaaaaggcagaattgacagttgtatctgctgtgcattcactctaagatgaggagaacaaaagaagtgtattctcttgttctgtcagctgcataccagtaataaaactgttatgaaatggattttcaaggtctctaaaccttgaaaatccaaagctattgttgcattgtacagcactgaagggctttatgttacaatattctttattcctatctagtatactaggctatttattgtatccccttaggtaaacttatttatttatgctattttgctttgtttcattttttaaggacaagatcaggatagctttggtgaaggtagggtcatattaatatgatgataatgtgcaaccaatttatactttctgcagggagctatggggtacattccttgatttccaggatagtttttcaaataggaaagcaataatggcagtagttctcaaatgggctaggccttttttatattgaagcaataattccatttttaccctttgaaattttgtttttttgatttttgatgtttggtacaaatagaactatatatatttaggtaaaatagatctatcgtgtttaaaaccaaagaaatcaatggaacccttgcacaaaaaagtgtgataaatatttttaaataaaaacttaatacaaatgtaatttgttaatattgtttcatgttttatgtgtagatctaatagctgaactgattcaaactgtaataagctcatcaatttcatttctatgaaaatgtgctctgttgtcacaggatgtttctgttgattttattcatttcctgggaattggtaaacatcatgttcctgatgataacccagtagcaaaaacatttgtactgagtggtacaagccttggggactgaaaaaaaaaagattaaaaccattaaaaagaaactcatttttacgctgaatgaacatttatatgattgcattgggaccagtcatttcctaagctacatatggccatcttgacagtgttttttcttttgtgtgtttaattattatgtgtaaatcataaagacaaataaatttcactgtgccacccagca

SEQ ID NO: 180322 - DNA, 817 bp, Homo sapiens
  Payload ID: 15517
  Gene Symbol: STK3
  Gene Name: serine/threonine kinase 3
  ENST ID: ENST00000518165
  CDS Start-End: 132-817
acgggaaagttggtccgagttcccagagtttccctctgtggtgccctaggctcggccggccggtgccccggctcctttcctcctttcggccttcgccgtccaccaggtccctctctctgtccccggccgccatggagcagccgccggcgcctaagagtaaactaaaaaagctgagtgaagacagtttgactaagcagcctgaagaagtttttgatgtattagagaagcttggagaagggtcttatggaagtgtatttaaagcaatacacaaggaatccggtcaagttgtcgcaattaaacaagtacctgttgaatcagatcttcaggaaataatcaaagaaatttccataatgcagcaatgtgacagcccatatgttgtaaagtactatggcagttattttaagaatacagacctctggattgttatggagtactgtggcgctggctctgtctcagacataattagattacgaaacaagacagctatttttatgattcccacaaatccaccaccaacattcagaaagccagaactttggtccgatgatttcaccgattttgttaaaaagtgtttggtgaagaatcctgagcagagagctactgcaacacaacttttacagcatccttttatcaagaatgccaaacctgtatcaatattaagagacctgatcacagaagctatggagatcaaagctaaaagacatgaggaacagcaacgagaattggaagaggaagaagaaaattcggatgaagatgagctggattcccacaccatggtgaagactagtgtggagagtgtgggcaccatgcgggccac

SEQ ID NO: 180323 - DNA, 2065 bp, Homo sapiens
  Payload ID: 15517
  Gene Symbol: STK3
  Gene Name: serine/threonine kinase 3
  ENST ID: ENST00000424861
  CDS Start-End: 127-633
aaagttggtccgagttcccagagtttccctctgtggtgccctaggctcggccggccggtgccccggctcctttcctcctttcggccttcgccgtccaccaggtccctctctctgtccccggccgccatggagcagccgccggcgcctaagagtaaactaaaaaagctgagtgaagacagtttgactaagcagcctgaagaagtttttgatgtattagagaagcttggagaagggtcttatggaagtgtatttaaagcaatacacaaggaatccggtcaagttgtcgcaattaaacaagtacctgttgaatcagatcttcaggaaataatcaaagaaatttccataatgcagcaatgtgacagcccatatgttgtaaagtactatggcagttattttaagaatacagacctctggattgttatggagtactgtggcgctggctctgtctcagacataattagattacgaaacaagacaggattcttaacagataccactgaaggaagtgctagctgtgatttgagaatggatctaacgcttttccatcttggagctgaattcttacattaccttcttctatatgaagcagatcctctctcatgtgttttctccctcttggtgttttcagtataaatctgaccattttgaaatagttgggtatggacctatccagcctcatgaaaagtcttacagatatgagaaagaattaagcatctgttttcaataaaatgctcataaagccacccattaatgtactcagggtgaaaggaatcaaaaaaattattggccagttaatagaagatgaaattgcaaccattcttaaatctacattgaaaggactagaatatttgcactttatgagaaaaatacacagagatataaaagctggaaatattctcctcaatacagaaggacatgcaaaattggcagattttggagtggctggtcagttaacagatacaatggcaaaacgcaatactgtaataggaactccattttggatggctcctgaggtgattcaagaaataggctataactgtgtggccgacatctggtcccttggcattacttctatagaaatggctgaaggaaaacctccttatgctgatatacatccaatgaggtaatgccttgattggttgtgtcacctgtgcagtagttgaaaatggatatgagtacacaatttcaggacctccctgcttccttgtagatcatttggccgtatgctatttttatgattcccacaaatccaccaccaacattcagaaagccagaactttggtccgatgatttcaccgattttgttaaaaagtgtttggtgaagaatcctgagcagagagctactgcaacacaacttttacaggtcagtgcttgtgcctcgaagggaaggatattttcttcatacctttcagctttctgacattggccagaattgctgtgtgtttcataactgatttctaaagatgtaaacctcccctcccctcctgtttgctcccttcttttctttcctcccctctcgtcccctcatttcccccagagtcattttaaaacaaaatttccaaagcattctcctttcagaaaggaatctttgtcttcatagttactatttctcatgttttttttttcttctgttccttgactcagcatttatcctttgactttttgctccaccataaaatatgtaagtacaagatccctggactccttgaagagattatcacgttgtaaatatcagttacaggattatctaaatgaagagcttcagagtttcaattttttttgatagaataattgtaagtagactttgtatccagaatgtcagtagattttaaaatctaccttaaaatttaatgcaaatagaaataatttaatatttataataggtgtttgtgaatcttaatttccccaacagaatagtcttagaactttcagctaataataagtatgtctcacattaacaaaacttgatatttgctaaatgatttctattgttaagtgacaaaaggatgaaaaacatggttcttgtaaaaagggacttccctgtctctaaaggaaccattgggtt

SEQ ID NO: 180324 - DNA, 531 bp, Homo sapiens
  Payload ID: 15517
  Gene Symbol: STK3
  Gene Name: serine/threonine kinase 3
  ENST ID: ENST00000519420
  CDS Start-End: 30-32
agagctcagtcctgagcctcagctgcgggatgcctgcggtcctctctctccaactgcctcattcctcctgcagcttttctcagtttgggagatttggagggagctttctcttccttcagactccccaagcctcccactcacggggtggtgacctgaagagcgttcctacgcttcgcacttccttttcatcaaaggggaggcaactccccagcagcgggcttcacacctttcccgcccttaagtatgtgtacgttgggtgcagaaccgtttggttttcccgaggggtaggcagaatttccaaccccacgagctgctccctctttccgcaaacctcctaaccccggggtttttccataaatgtgtttacttcgtccacgccagcctgcgaagttccaaaatggagtctgggccacgccggcgttctgggcacgactacggtctcttgaaaaggccattcaatgtcccttcttcaggaatttggaaaaaggatggagagatctctctgagctagactcttcagtggaggaaatg

SEQ ID NO: 180325 - DNA, 574 bp, Homo sapiens
  Payload ID: 15517
  Gene Symbol: STK3
  Gene Name: serine/threonine kinase 3
  ENST ID: ENST00000521649
  CDS Start-End: 107-355
gagtttccctctgtggtgccctaggctcggccggccggtgccccggctcctttcctcctttcggccttcgccgtccaccaggtccctctctctgtccccggccgccatggagcagccgccggcgcctaagagtaaactaaaaaagctgagtgaagacagtttgactaagcagcctgaagaagtttttgatgtattagagaagcttggagaagggtcttatggaagtgtatttaaagcaatacacaaggaatccggtcaagttgtcgcaattaaacaagtacctgttgaatcagatcttcaggaaataatcaaagaaatttccataatgcagcaatgtgacaggctatttttatgattcccacaaatccaccaccaacattcagaaagccagaactttggtccgatgatttcaccgattttgttaaaaagtgtttggtgaagaatcctgagcagagagctactgcaacacaacttttacagcatccttttatcaagaatgccaaacctgtatcaatattaagagacctgatcacagaagctatggagatcaaagctaaaagacatgaggaacagc

SEQ ID NO: 180326 - DNA, 3107 bp, Homo sapiens
  Payload ID: 15517
  Gene Symbol: STK3
  Gene Name: serine/threonine kinase 3
  Uniprot ID: Q13188
  ENST ID: ENST00000523601
  CDS Start-End: 401-1960
gtgcagaaccgtttggttttcccgaggggtaggcagaatttccaaccccacgagctgctccctctttccgcaaacctcctaaccccggggtttttccataaatgtgtttacttcgtccacgccagcctgcgaagttccaaaatggagtctgggccacgccggcgttctgggcacgactacggtctcttgaaaagatttggaattgaccatgtagataatctctgagagcagttcttaaagtgtaatccagaaccggtggaacttgctagaaacgcatattcttcggaccccctccaaatctgctgaatctgagattgtggaggccattcaatgtcccttcttcaggaatttggaaaaaggatggagagatctctctgagctagactcttcagtggaggaaatgttacaactcatggacagtggcattaccatctgccttaggaacggagcagcctctgtcttcaagaaaaaagaatggagcacacaaggagaagaaaacaagcaagacagtaaactaaaaaagctgagtgaagacagtttgactaagcagcctgaagaagtttttgatgtattagagaagcttggagaagggtcttatggaagtgtatttaaagcaatacacaaggaatccggtcaagttgtcgcaattaaacaagtacctgttgaatcagatcttcaggaaataatcaaagaaatttccataatgcagcaatgtgacagcccatatgttgtaaagtactatggcagttattttaagaatacagacctctggattgttatggagtactgtggcgctggctctgtctcagacataattagattacgaaacaagacattaatagaagatgaaattgcaaccattcttaaatctacattgaaaggactagaatatttgcactttatgagaaaaatacacagagatataaaagctggaaatattctcctcaatacagaaggacatgcaaaattggcagattttggagtggctggtcagttaacagatacaatggcaaaacgcaatactgtaataggaactccattttggatggctcctgaggtgattcaagaaataggctataactgtgtggccgacatctggtcccttggcattacttctatagaaatggctgaaggaaaacctccttatgctgatatacatccaatgagggctatttttatgattcccacaaatccaccaccaacattcagaaagccagaactttggtccgatgatttcaccgattttgttaaaaagtgtttggtgaagaatcctgagcagagagctactgcaacacaacttttacagcatccttttatcaagaatgccaaacctgtatcaatattaagagacctgatcacagaagctatggagatcaaagctaaaagacatgaggaacagcaacgagaattggaagaggaagaagaaaattcggatgaagatgagctggattcccacaccatggtgaagactagtgtggagagtgtgggcaccatgcgggccacaagcacgatgagtgaaggggcccagaccatgattgaacataatagcacgatgttggaatccgacttggggaccatggtgataaacagtgaggatgaggaagaagaagatggaactatgaaaagaaatgcaacctcaccacaagtacaaagaccatctttcatggactactttgataagcaagacttcaagaataagagtcacgaaaactgtaatcagaacatgcatgaacccttccctatgtccaaaaacgtttttcctgataactggaaagttcctcaagatggagactttgactttttgaaaaatctaagtttagaagaactacagatgcggttaaaagcactggaccccatgatggaacgggagatagaagaacttcgtcagagatacactgcgaaaagacagcccattctggatgcgatggatgcaaagaaaagaaggcagcaaaacttttgagtctaatttcctctctgtttttaactattctggagaccaagaaaccactaggaattgaaggaatatttggatatttttaatcctaagattttgccctacaattaggcagaggtcaaaaagtgacaatggtacatgcccaggtaaattcccaaaaggcagaattgacagttgtatctgctgtgcattcactctaagatgaggagaacaaaagaagtgtattctcttgttctgtcagctgcataccagtaataaaactgttatgaaatggattttcaaggtctctaaaccttgaaaatccaaagctattgttgcattgtacagcactgaagggctttatgttacaatattctttattcctatctagtatactaggctatttattgtatccccttaggtaaacttatttatttatgctattttgctttgtttcattttttaaggacaagatcaggatagctttggtgaaggtagggtcatattaatatgatgataatgtgcaaccaatttatactttctgcagggagctatggggtacattccttgatttccaggatagtttttcaaataggaaagcaataatggcagtagttctcaaatgggctaggccttttttatattgaagcaataattccatttttaccctttgaaattttgtttttttgatttttgatgtttggtacaaatagaactatatatatttaggtaaaatagatctatcgtgtttaaaaccaaagaaatcaatggaacccttgcacaaaaaagtgtgataaatatttttaaataaaaacttaatacaaatgtaatttgttaatattgtttcatgttttatgtgtagatctaatagctgaactgattcaaactgtaataagctcatcaatttcatttctatgaaaatgtgctctgttgtcacaggatgtttctgttgattttattcatttcctgggaattggtaaacatcatgttcctgatgataacccagtagcaaaaacatttgtactgagtggtacaagccttggggactgaaaaaaaaaagattaaaaccattaaaaagaaactcatttttacgctgaatgaacatttatatgattgcattgggaccagtcatttcctaagctacatatggccatcttgacagtgttttttcttt

SEQ ID NO: 180327 - DNA, 2485 bp, Homo sapiens
  Payload ID: 15517
  Gene Symbol: STK3
  Gene Name: serine/threonine kinase 3
  ENST ID: ENST00000617590
  CDS Start-End: 132-1274
acgggaaagttggtccgagttcccagagtttccctctgtggtgccctaggctcggccggccggtgccccggctcctttcctcctttcggccttcgccgtccaccaggtccctctctctgtccccggccgccatggagcagccgccggcgcctaagagtaaactaaaaaagctgagtgaagacagtttgactaagcagcctgaagaagtttttgatgtattagagaagcttggagaagggtcttatggaagtgtatttaaagcaatacacaaggaatccggtcaagttgtcgcaattaaacaagtacctgttgaatcagatcttcaggaaataatcaaagaaatttccataatgcagcaatgtgacagcccatatgttgtaaagtactatggcagttattttaagaatacagacctctggattgttatggagtactgtggcgctggctctgtctcagacataattagattacgaaacaagacagctatttttatgattcccacaaatccaccaccaacattcagaaagccagaactttggtccgatgatttcaccgattttgttaaaaagtgtttggtgaagaatcctgagcagagagctactgcaacacaacttttacagcatccttttatcaagaatgccaaacctgtatcaatattaagagacctgatcacagaagctatggagatcaaagctaaaagacatgaggaacagcaacgagaattggaagaggaagaagaaaattcggatgaagatgagctggattcccacaccatggtgaagactagtgtggagagtgtgggcaccatgcgggccacaagcacgatgagtgaaggggcccagaccatgattgaacataatagcacgatgttggaatccgacttggggaccatggtgataaacagtgaggatgaggaagaagaagatggaactatgaaaagaaatgcaacctcaccacaagtacaaagaccatctttcatggactactttgataagcaagacttcaagaataagagtcacgaaaactgtaatcagaacatgcatgaacccttccctatgtccaaaaacgtttttcctgataactggaaagttcctcaagatggagactttgactttttgaaaaatctaagtttagaagaactacagatgcggttaaaagcactggaccccatgatggaacgggagatagaagaacttcgtcagagatacactgcgaaaagacagcccattctggatgcgatggatgcaaagaaaagaaggcagcaaaacttttgagtctaatttcctctctgtttttaactattctggagaccaagaaaccactaggaattgaaggaatatttggatatttttaatcctaagattttgccctacaattaggcagaggtcaaaaagtgacaatggtacatgcccaggtaaattcccaaaaggcagaattgacagttgtatctgctgtgcattcactctaagatgaggagaacaaaagaagtgtattctcttgttctgtcagctgcataccagtaataaaactgttatgaaatggattttcaaggtctctaaaccttgaaaatccaaagctattgttgcattgtacagcactgaagggctttatgttacaatattctttattcctatctagtatactaggctatttattgtatccccttaggtaaacttatttatttatgctattttgctttgtttcattttttaaggacaagatcaggatagctttggtgaaggtagggtcatattaatatgatgataatgtgcaaccaatttatactttctgcagggagctatggggtacattccttgatttccaggatagtttttcaaataggaaagcaataatggcagtagttctcaaatgggctaggccttttttatattgaagcaataattccatttttaccctttgaaattttgtttttttgatttttgatgtttggtacaaatagaactatatatatttaggtaaaatagatctatcgtgtttaaaaccaaagaaatcaatggaacccttgcacaaaaaagtgtgataaatatttttaaataaaaacttaatacaaatgtaatttgttaatattgtttcatgttttatgtgtagatctaatagctgaactgattcaaactgtaataagctcatcaatttcatttctatgaaaatgtgctctgttgtcacaggatgtttctgttgattttattcatttcctgggaattggtaaacatcatgttcctgatgataacccagtagcaaaaacatttgtactgagtggtacaagccttggggactgaaaaaaaaaagattaaaaccattaaaaagaaactcatttttacgctgaatgaacatttatatgattgcattgggaccagtcatttcctaagctacatatggccatcttgacagtgttttttcttttgtgtgtttaattattatgtgtaaatcataaagacaaataaatttcactgtgccacccagcata

SEQ ID NO: 180328 - DNA, 3596 bp, Homo sapiens
  Payload ID: 15518
  Gene Symbol: STK31
  Gene Name: serine/threonine kinase 31
  Uniprot ID: Q9BXU1
  ENST ID: ENST00000354639
  CDS Start-End: 465-3455
aaagtgtgaggtcagtagtagtttttgtggtacgtgcagtggtggccgcttcaaggactattttcgtcgctgcttgcgttttaagtctccaatcctgggacgaggcccatttcagggttttctgtcaccttctagccgcccgccaccccagaggggtgccagatgccccagtttttgagtgcatgcaggcaggcgaaagtggctcgaaaagacctccggcctgaatgatctccatgaagacgcggtcacgcagcctccacactctcttccccttctcgaaaattctgtgccatttaagtttcaaaatcccttataaaataagtgtcagagagctacgtgtacccgtttcttccaaattttcatcacgaagtggagatttggacgtactattttgtgatctctgtttgcagaaagtgggtacggcatcagtgccttcataatcaggtttttcaggaattgttcaaatggatgaagatacacattacgataaagtggaagatgtggttggaagtcacatagaagatgcagtaacattttgggcccagagtatcaatagaaataaggatatcatgaagattggttgctcactgtctgaagtttgcccccaggccagttcagttttggggaatcttgacccaaacaagatttatggtggattattttctgaagatcagtgttggtacagatgcaaagtactgaaaatcatcagcgttgaaaagtgtctggtgaggtacattgactatggaaatactgaaattctaaatcgatctgatatagttgaaattcctttggagctgcagttttctagtgttgccaaaaagtataaactttggggactacacattccttctgatcaagaagttacccagtttgatcagggcacaacctttttggggagcttgatttttgaaaaggaaataaaaatgagaattaaagcaacctctgaagatggaacagttattgctcaggctgagtatggcagtgtggatataggggaagaggtgcttaagaaaggatttgcagagaaatgcagacttgcttccagaactgacatctgtgaggaaaaaaaattggatcctggtcaacttgttctcaggaacctcaaaagccccattcctttgtgggggcatagatcaaaccagtcaaccttcagcaggcccaaggggcacttaagtgagaaaatgactcttgacttgaaggatgaaaatgatgcaggcaatcttataacatttccaaaggaaagtttggctgttggtgactttaatttagggtctaacgtcagcctggaaaaaattaagcaggaccagaaactgattgaagaaaatgaaaaacttaaaacagagaaggacgctcttcttgaaagttataaggcgttagaattgaaagtagagcagattgcccaggagctgcagcaagagaaggcagctgctgtggatttgactaaccacttagaatacactctgaagacctatatagataccagaatgaaaaatctggcagctaagatggaaatactgaaagaaatgaggcatgtcgacatcagtgtccgtttcggaaaagacctttcagatgctatacaagtgttggatgaagggtgctttactactccagcttctttgaatggattagagataatatgggcagaatacagtctggctcaggagaatattaaaacttgtgaatatgtgagtgaagggaatattttgattgcccaaagaaatgaaatgcagcagaagctgtacatgtcagtagaagattttattctggaagttgatgagtcatctcttaataaacgcttaaaaacattgcaggatttgtcagtctctttagaagcagtgtatggacaagccaaagaaggagcaaattctgatgaaatacttaaaaaattttatgactggaagtgtgataaaagagaggagttcaccagtgttagaagtgaaacagacgcttctctgcaccgtcttgtagcatggttccaaagaaccttaaaggtttttgacctatctgtggaaggatcactgatttcagaagacgcaatggataatattgatgaaatcctagagaagactgagtcaagtgtctgcaaagagctggagatagctctggttgatcaaggtgatgcagacaaggagataatttcaaatacatatagtcaagtactgcaaaagattcattcagaggaaaggctcattgccacagtacaagctaagtacaaggacagtattgagtttaaaaagcagcttattgaatatttaaataagagtcccagtgtggatcacttgctatccattaagaagacattgaaaagcttaaaagctctactcagatggaaattggttgaaaagagtaatttggaagagtcagatgatcctgatggctctcaaattgagaaaataaaagaagaaataactcagctgcgcaataatgtctttcaggaaatttatcatgagagagaggaatatgagatgctaactagtttggcacagaaatggttccctgagctgcctctgcttcatcctgaaataggattactcaaatacatgaactctggtggtctccttacaatgagcttggaacgagatcttcttgatgctgagcccatgaaggaacttagcagcaagcgtcctttggtacgttctgaggttaatgggcagataattctgttaaagggctattctgtggatgttgacacagaagccaaggtgattgagagagcagccacctaccatagagcttggagagaagctgaaggagactcagggttactgccattgatattcctgtttttatgtaagtctgatcctatggcttatctgatggtcccatactaccctagggcaaacctgaatgctgttcaagccaacatgcctttaaattcagaagaaactttaaaggtcatgaaaggtgttgcccagggtctgcatacattgcataaggctgacataattcatggatcacttcatcagaacaatgtatttgctttaaaccgtgaacaaggaattgttggagattttgacttcaccaaatctgtgagtcagcgagcctcggtgaacatgatggttggtgacttgagtttgatgtcacctgagttgaaaatgggaaaacctgcttctccaggttcagacttatatgcttatggctgcctcttattatggctttctgttcaaaatcaggagtttgagataaataaagatggaatccccaaagtggatcagtttcatctggatgataaagtcaaatccctcctctgtagcttgatatgttatagaagttcaatgactgctgaacaagttttaaatgctgaatgtttcttgatgccaaaggagcaatcagttccaaacccagaaaaagatactgaatacaccctatataaaaaggaagaagaaataaagacggagaacttggataaatgtatggagaagacaagaaatggtgaagccaactttgattgttaaattattattgttgttgttgcagaggttctttttaaaaactttggtttggttaatacacagaaatatctagaaatgttctgggactagttgagttgtatctttagtattcaggttgtgaaaaataaagatgtttggctatgc

SEQ ID NO: 180329 - DNA, 3326 bp, Homo sapiens
  Payload ID: 15518
  Gene Symbol: STK31
  Gene Name: serine/threonine kinase 31
  Uniprot ID: Q9BXU1
  ENST ID: ENST00000355870
  CDS Start-End: 120-3179
aacaccggatgatggcgcagcgctgtgcacgcaggcgcagtgtggggcccttgcggtcgaagctcacgcggtaagccgctgcacgtgtgctacggcgggcggagggccgaaagtccagtatgtgggtccagggtcactcttctagagcttccgcaacggaaagtgtgagtttttcaggaattgttcaaatggatgaagatacacattacgataaagtggaagatgtggttggaagtcacatagaagatgcagtaacattttgggcccagagtatcaatagaaataaggatatcatgaagattggttgctcactgtctgaagtttgcccccaggccagttcagttttggggaatcttgacccaaacaagatttatggtggattattttctgaagatcagtgttggtacagatgcaaagtactgaaaatcatcagcgttgaaaagtgtctggtgaggtacattgactatggaaatactgaaattctaaatcgatctgatatagttgaaattcctttggagctgcagttttctagtgttgccaaaaagtataaactttggggactacacattccttctgatcaagaagttacccagtttgatcagggcacaacctttttggggagcttgatttttgaaaaggaaataaaaatgagaattaaagcaacctctgaagatggaacagttattgctcaggctgagtatggcagtgtggatataggggaagaggtgcttaagaaaggatttgcagagaaatgcagacttgcttccagaactgacatctgtgaggaaaaaaaattggatcctggtcaacttgttctcaggaacctcaaaagccccattcctttgtgggggcatagatcaaaccagtcaaccttcagcaggcccaaggggcacttaagtgagaaaatgactcttgacttgaaggatgaaaatgatgcaggcaatcttataacatttccaaaggaaagtttggctgttggtgactttaatttagggtctaacgtcagcctggaaaaaattaagcaggaccagaaactgattgaagaaaatgaaaaacttaaaacagagaaggacgctcttcttgaaagttataaggcgttagaattgaaagtagagcagattgcccaggagctgcagcaagagaaggcagctgctgtggatttgactaaccacttagaatacactctgaagacctatatagataccagaatgaaaaatctggcagctaagatggaaatactgaaagaaatgaggcatgtcgacatcagtgtccgtttcggaaaagacctttcagatgctatacaagtgttggatgaagggtgctttactactccagcttctttgaatggattagagataatatgggcagaatacagtctggctcaggagaatattaaaacttgtgaatatgtgagtgaagggaatattttgattgcccaaagaaatgaaatgcagcagaagctgtacatgtcagtagaagattttattctggaagttgatgagtcatctcttaataaacgcttaaaaacattgcaggatttgtcagtctctttagaagcagtgtatggacaagccaaagaaggagcaaattctgatgaaatacttaaaaaattttatgactggaagtgtgataaaagagaggagttcaccagtgttagaagtgaaacagacgcttctctgcaccgtcttgtagcatggttccaaagaaccttaaaggtttttgacctatctgtggaaggatcactgatttcagaagacgcaatggataatattgatgaaatcctagagaagactgagtcaagtgtctgcaaagagctggagatagctctggttgatcaaggtgatgcagacaaggagataatttcaaatacatatagtcaagtactgcaaaagattcattcagaggaaaggctcattgccacagtacaagctaagtacaaggacagtattgagtttaaaaagcagcttattgaatatttaaataagagtcccagtgtggatcacttgctatccattaagaagacattgaaaagcttaaaagctctactcagatggaaattggttgaaaagagtaatttggaagagtcagatgatcctgatggctctcaaattgagaaaataaaagaagaaataactcagctgcgcaataatgtctttcaggaaatttatcatgagagagaggaatatgagatgctaactagtttggcacagaaatggttccctgagctgcctctgcttcatcctgaaataggattactcaaatacatgaactctggtggtctccttacaatgagcttggaacgagatcttcttgatgctgagcccatgaaggaacttagcagcaagcgtcctttggtacgttctgaggttaatgggcagataattctgttaaagggctattctgtggatgttgacacagaagccaaggtgattgagagagcagccacctaccatagagcttggagagaagctgaaggagactcagggttactgccattgatattcctgtttttatgtaagtctgatcctatggcttatctgatggtcccatactaccctagggcaaacctgaatgctgttcaagccaacatgcctttaaattcagaagaaactttaaaggtcatgaaaggtgttgcccagggtctgcatacattgcataaggctgacataattcatggatcacttcatcagaacaatgtatttgctttaaaccgtgaacaaggaattgttggagattttgacttcaccaaatctgtgagtcagcgagcctcggtgaacatgatggttggtgacttgagtttgatgtcacctgagttgaaaatgggaaaacctgcttctccaggttcagacttatatgcttatggctgcctcttattatggctttctgttcaaaatcaggagtttgagataaataaagatggaatccccaaagtggatcagtttcatctggatgataaagtcaaatccctcctctgtagcttgatatgttatagaagttcaatgactgctgaacaagttttaaatgctgaatgtttcttgatgccaaaggagcaatcagttccaaacccagaaaaagatactgaatacaccctatataaaaaggaagaagaaataaagacggagaacttggataaatgtatggagaagacaagaaatggtgaagccaactttgattgttaaattattattgttgttgttgcagaggttctttttaaaaactttggtttggttaatacacagaaatatctagaaatgttctgggactagttgagttgtatctttagtattcaggttgtgaaaaataaagatgtttggctatgcacaaaa

SEQ ID NO: 180330 - DNA, 597 bp, Homo sapiens
  Payload ID: 15518
  Gene Symbol: STK31
  Gene Name: serine/threonine kinase 31
  ENST ID: ENST00000456014
  CDS Start-End: 93-570
gctacggcgggcggagggccgaaagtccagtatgtgggtccagggtcactcttctagagcttccgcaacggaaagtgtgaggaattgttcaaatggatgaagatacacattacgataaagtggaagatgtggttggaagtcacatagaagatgcagtaacattttgggcccagagtatcaatagaaataaggatatcatgaagattggttgctcactgtctgaagtttgcccccaggccagttcagttttggggaatcttgacccaaacaagatttatggtggattattttctgaagatcagtgttggtacagatgcaaagtactgaaaatcatcagcgttgaaaagtgtctggtgaggtacattgactatggaaatactgaaattctaaatcgatctgatatagttgaaattcctttggagctgcagttttctagtgttgccaaaaagtataaactttggggactacacattccttctgatcaagaagttacccagtttgatcagggcacaacctttttggggagcttgatttttgaaaaggaaataaaaatgagaattaaagcaacctctgaagatggaacagttattgctcagg

SEQ ID NO: 180331 - DNA, 661 bp, Homo sapiens
  Payload ID: 15518
  Gene Symbol: STK31
  Gene Name: serine/threonine kinase 31
  ENST ID: ENST00000444333
  CDS Start-End: 381-661
aaggactattttcgtcgctgcttgcgttttaagtctccaatcctgggacgaggcccatttcagggttttctgtcaccttctagccgcccgccaccccagaggggtgccagatgccccagtttttgagtgcatgcaggcaggcgaaagtggctcgaaaagacctccggcctgaatgatctccatgaagacgcggtcacgcagcctccacactctcttccccttctcgaaaattctgtgccatttaagtttcaaaatcccttataaaataagtgtcagagagctacgtgtacccgtttcttccaaattttcatcacgaagtggagatttggacgtactattttgtgatctctgtttgcagaaatttttcaggaattgttcaaatggatgaagatacacattacgataaagtggaagatgtggttggaagtcacatagaagatgcagtaacattttgggcccagagtatcaatagaaataaggatatcatgaagattggttgctcactgtctgaagtttgcccccaggccagttcagttttggggaatcttgacccaaacaagatttatggtggattattttctgaagatcagtgttggtacagatgcaaagtactgaaaatcatcagcgttgaaaagtgtctggtgaggtacattgactatgg

SEQ ID NO: 180332 - DNA, 3085 bp, Homo sapiens
  Payload ID: 15518
  Gene Symbol: STK31
  Gene Name: serine/threonine kinase 31
  Uniprot ID: Q9BXU1
  ENST ID: ENST00000433467
  CDS Start-End: 12-3002
gaaagtccagtatgtgggtccagggtcactcttctagagcttccgcaacggaaagtgtgagtttttcaggaattgttcaaatggatgaagatacacattacgataaagtggaagatgtggttggaagtcacatagaagatgcagtaacattttgggcccagagtatcaatagaaataaggatatcatgaagattggttgctcactgtctgaagtttgcccccaggccagttcagttttggggaatcttgacccaaacaagatttatggtggattattttctgaagatcagtgttggtacagatgcaaagtactgaaaatcatcagcgttgaaaagtgtctggtgaggtacattgactatggaaatactgaaattctaaatcgatctgatatagttgaaattcctttggagctgcagttttctagtgttgccaaaaagtataaactttggggactacacattccttctgatcaagaagttacccagtttgatcagggcacaacctttttggggagcttgatttttgaaaaggaaataaaaatgagaattaaagcaacctctgaagatggaacagttattgctcaggctgagtatggcagtgtggatataggggaagaggtgcttaagaaaggatttgcagagaaatgcagacttgcttccagaactgacatctgtgaggaaaaaaaattggatcctggtcaacttgttctcaggaacctcaaaagccccattcctttgtgggggcatagatcaaaccagtcaaccttcagcaggcccaaggggcacttaagtgagaaaatgactcttgacttgaaggatgaaaatgatgcaggcaatcttataacatttccaaaggaaagtttggctgttggtgactttaatttagggtctaacgtcagcctggaaaaaattaagcaggaccagaaactgattgaagaaaatgaaaaacttaaaacagagaaggacgctcttcttgaaagttataaggcgttagaattgaaagtagagcagattgcccaggagctgcagcaagagaaggcagctgctgtggatttgactaaccacttagaatacactctgaagacctatatagataccagaatgaaaaatctggcagctaagatggaaatactgaaagaaatgaggcatgtcgacatcagtgtccgtttcggaaaagacctttcagatgctatacaagtgttggatgaagggtgctttactactccagcttctttgaatggattagagataatatgggcagaatacagtctggctcaggagaatattaaaacttgtgaatatgtgagtgaagggaatattttgattgcccaaagaaatgaaatgcagcagaagctgtacatgtcagtagaagattttattctggaagttgatgagtcatctcttaataaacgcttaaaaacattgcaggatttgtcagtctctttagaagcagtgtatggacaagccaaagaaggagcaaattctgatgaaatacttaaaaaattttatgactggaagtgtgataaaagagaggagttcaccagtgttagaagtgaaacagacgcttctctgcaccgtcttgtagcatggttccaaagaaccttaaaggtttttgacctatctgtggaaggatcactgatttcagaagacgcaatggataatattgatgaaatcctagagaagactgagtcaagtgtctgcaaagagctggagatagctctggttgatcaaggtgatgcagacaaggagataatttcaaatacatatagtcaagtactgcaaaagattcattcagaggaaaggctcattgccacagtacaagctaagtacaaggacagtattgagtttaaaaagcagcttattgaatatttaaataagagtcccagtgtggatcacttgctatccattaagaagacattgaaaagcttaaaagctctactcagatggaaattggttgaaaagagtaatttggaagagtcagatgatcctgatggctctcaaattgagaaaataaaagaagaaataactcagctgcgcaataatgtctttcaggaaatttatcatgagagagaggaatatgagatgctaactagtttggcacagaaatggttccctgagctgcctctgcttcatcctgaaataggattactcaaatacatgaactctggtggtctccttacaatgagcttggaacgagatcttcttgatgctgagcccatgaaggaacttagcagcaagcgtcctttggtacgttctgaggttaatgggcagataattctgttaaagggctattctgtggatgttgacacagaagccaaggtgattgagagagcagccacctaccatagagcttggagagaagctgaaggagactcagggttactgccattgatattcctgtttttatgtaagtctgatcctatggcttatctgatggtcccatactaccctagggcaaacctgaatgctgttcaagccaacatgcctttaaattcagaagaaactttaaaggtcatgaaaggtgttgcccagggtctgcatacattgcataaggctgacataattcatggatcacttcatcagaacaatgtatttgctttaaaccgtgaacaaggaattgttggagattttgacttcaccaaatctgtgagtcagcgagcctcggtgaacatgatggttggtgacttgagtttgatgtcacctgagttgaaaatgggaaaacctgcttctccaggttcagacttatatgcttatggctgcctcttattatgggatgataaagtcaaatccctcctctgtagcttgatatgttatagaagttcaatgactgctgaacaagttttaaatgctgaatgtttcttgatgccaaaggagcaatcagttccaaacccagaaaaagatactgaatacaccctatataaaaaggaagaagaaataaagacggagaacttggataaatgtatggagaagacaagaaatggtgaagccaactttgattgttaaattattattgttgttgttgcagaggttctttttaaaaactttggtttggttaatacacagaaatatctagaaatgttctggga

SEQ ID NO: 180333 - DNA, 573 bp, Homo sapiens
  Payload ID: 15518
  Gene Symbol: STK31
  Gene Name: serine/threonine kinase 31
  ENST ID: ENST00000422637
  CDS Start-End: 153-573
gcagtgtggggcccttgcggtcgaagctcacgcggtaagccgctgcacgtgtgctacggcgggcggagggccgaaagtccagtatgtgggtccagggtcactcttctagagcttccgcaacggaaagtgtgagtttttcaggaattgttcaaatggatgaagatacacattacgataaagtggaagatgtggttggaagtcacatagaagatgcagtaacattttgggcccaggccagttcagttttggggaatcttgacccaaacaagatttatggtggattattttctgaagatcagtgttggtacagatgcaaagtactgaaaatcatcagcgttgaaaagtgtctggtgaggtacattgactatggaaatactgaaattctaaatcgatctgatatagttgaaattcctttggagctgcagttttctagtgttgccaaaaagtataaactttggggactacacattccttctgatcaagaagttacccagtttgatcagggcacaacctttttggggagcttgatttttgaaaaggaaataaaaatgagaattaaagcaacctctgaag

SEQ ID NO: 180334 - DNA, 563 bp, Homo sapiens
  Payload ID: 15518
  Gene Symbol: STK31
  Gene Name: serine/threonine kinase 31
  ENST ID: ENST00000531170
  CDS Start-End: 436-563
aagtgtgaggtcagtagtagtttttgtggtacgtgcagtggtggccgcttcaaggactattttcgtcgctgcttgcgttttaagtctccaatcctgggacgaggcccatttcagggttttctgtcaccttctagccgcccgccaccccagaggggtgccagatgccccagtttttgagtgcatgcaggcaggcgaaagtggctcgaaaagacctccggcctgaatgatctccatgaagacgcggtcacgcagcctccacactctcttccccttctcgaaaattctgtgccatttaagtttcaaaatcccttataaaataagtgtcagagagctacgtgtacccgtttcttccaaattttcatcacgaagtggagatttggacgtactattttgtgatctctgtttgcagaaagtggtttttcaggaattgttcaaatggatgaagatacacattacgataaagtggaagatgtggttggaagtcacatagaagatgcagtaacattttgggcccagagtatcaatagaaataaggatatcatgaagattggttgctcactgtc

SEQ ID NO: 180335 - DNA, 5393 bp, Homo sapiens
  Payload ID: 15519
  Gene Symbol: STK32A
  Gene Name: serine/threonine kinase 32A
  Uniprot ID: Q8WU08
  ENST ID: ENST00000397936
  CDS Start-End: 334-1524
gtgcgctgggcggcgctcggaccccttggcagccgcaggtgcctccccagcccagcccagctcagtccagcgcagcccagcccagcccagcccggcgctcgcagcctccgccgcttccgggcagataggtgccttttcttgctccttgctcttggagttcttctcttagtccctgttccctggatgaaagcatcgctccgagcctcatgggaggaatgaaggaagaatcgagactagatatccaactaaggcttcgggacatgttttgagcgaagatgggtgtttctgcccggatagtataaatcgaggatccaggtctgggcagattcaaccatgggagcgaacacttcaagaaaaccaccagtgtttgatgaaaatgaagatgtcaactttgaccactttgaaattttgcgagccattgggaaaggcagttttgggaaggtctgcattgtacagaagaatgataccaagaagatgtacgcaatgaagtacatgaataaacaaaagtgcgtggagcgcaatgaagtgagaaatgtcttcaaggaactccagatcatgcagggtctggagcaccctttcctggttaatttgtggtattccttccaagatgaggaagacatgttcatggtggtggacctcctgctgggtggagacctgcgttatcacctgcaacagaacgtccacttcaaggaagaaacagtgaagctcttcatctgtgagctggtcatggccctggactacctgcagaaccagcgcatcattcacagggatatgaagcctgacaatattttacttgacgaacatgggcacgtgcacatcacagatttcaacattgctgcgatgctgcccagggagacacagattaccaccatggctggcaccaagccttacatggcacctgagatgttcagctccagaaaaggagcaggctattcctttgctgttgactggtggtccctgggagtgacggcatatgaactgctgagaggccggagaccgtatcatattcgctccagtacttccagcaaggaaattgtacacacgtttgagacgactgttgtaacttacccttctgcctggtcacaggaaatggtgtcacttcttaaaaagctactcgaacctaatccagaccaacgattttctcagttatctgatgtccagaacttcccgtatatgaatgatataaactgggatgcagtttttcagaagaggctcattccaggtttcattcctaataaaggcaggctgaattgtgatcctacctttgaacttgaggaaatgattttggagtccaaacctctacataagaaaaaaaagcgtctggcaaagaaggagaaggatatgaggaaatgcgattcttctcagacatgtcttcttcaagagcaccttgactctgtccagaaggagttcataattttcaacagagaaaaagtaaacagggactttaacaaaagacaaccaaatctagccttggaacaaaccaaagacccacaaggtgaggatggtcagaataacaacttgtaaaggcctcatgtcttcttcttgggacaatctcatgccagaaacttctaattacatatgtcaagaaaagctgacagtagttcttgccactccacacaccatgacttagaaaatgtgaatgaatatatttcaaaaaaggcagcacaacacagtgaagggtcctgggcctgagctcctgggatgtcatttcacatcaatcaactgtgtgatctagagcaagtcacttagccactttctgtgctttactttatttatctaaaatgagagggttatactagacgagccataccctgcctttttagtgctatagttgttattctaaaccgcctttatttttattttaaaattaatatatgaatatagatttatttttccactccttctaattatgcagtgacaaatggacaaatggacacaggactcagtgagacttttcagacctcgaaagtttcataaagtggtcagaatgccccaggctacttggataaagataaggaattctatcagggaggcatgaatggaatcagattaaaagtaacagagatggatgagggccttccagtgatatgcgtgaatcagcattagatccgcttatctcagctggcaggagcctgctgtgcacaccacttcccagctccctcttcaacaatgtgaaagtggtaacttgaaattggtaataatgggagcatttacaccacggaaactggtaaatgctcgttttttccctcctaacaagtgaattgctaaatattagcccaccactccttccaagaagcatgttccttgagggctaattgtcctctgaagattagcagagacctgtatctggagaggatcagaaaagaatgtcatcacactgaaagtatgtccaccttgcagttcagaaaagttgcatcttatatggggtttattgtctaagttagaaatgaatttagaagatagtaaaatttaccgttgaaaaaccccttaaattacccataaagtatatgggaagtatcttttctcagtaaagcccaatacagtgtcacctttcactaatgaaacaagccattgcttttgttttgttttgacttagttatttttatttttggtctcattttggctaataccagatgagctaaaatgttgaacaaattatacttgtttttatagactagaattactcttttttttcttttcaggcagagtctcactctgtcacccaggctggagtgcagtggcatgatctctgctcactacatctgcctcccgggttcaagtgattcttgtgtctcagcctcctaagtagctgggatcgcatgtgtgtgccaccatgtgtagctaattttttgtatttttagtagagataggattttgctaagctggccaggttggtttcaaactcctggtctcaagtgatccgcccaccttggcctcccaaagtgctgggattacaggcgtgagccaccaaacctggccttagaattactcttagaacagtggaatgcccacacatccaagacaggcaagttcatggagactaagggaacagtggtatcatgtctcccttctcccttgtgcttactacaagaatggcaggcagaattccctacttatttaaaatatcactgatgtctcactctttttctttatattttatttattgatttgccacaaagtttaattcacctaagtgagacgtgcatatgatgtaactccactgtacagatacacagatctttacagaagaactatttttggcaacccctatgcccctgggtagggtccagaagtgaacaggcttggtgggggattgttttcacctcttggctactcagagtacctaaacctgtccttacttatggagagcatgtgtcacaccaagatggcagtaagctggcaactgcgaagacctgactgatgcccatttgggaagccaggcaagtgaaaatggaccgaagaaacagagatggctgtcttttatgcagggcttttccataaagaggttacactggggcaaccaagtatgtgtagaaagccagagctaaacttcagcttggcattcacagttttctcttcactgagctaataggcccagagtttcgggcagagctgtgaaatagtgcttctctaatagcaaccatattattgttacataattaaaagccagctcttttgttgtttgtttgattccttttccctacagttcccacatcatttgtctgtgctattctgtttttctccaaacactataaacttgaagcaattgccctgactcgatttcagagaaggggatgtgttggaaagagcaagaataagaaagtgaccagattctgctgcagtctggtaaccccacgagtgtcagggactacttgcatgtttacttctatccttcatttgttttgattcaagcctttatgtgctgtggactcacctccctaagtaaccaggttcctcctctcgctgcaaccttgtttgcatccttcccaagaagaggctttgggaaatttttctgtaattacacttaccaaagagccatggaaccattaggatctccactgtgatgagagttaagccatagtgccatttcacacgtatacatttatgatgggatgggaacccgatacaatctctgtaggctgaatccctagttttatttccagtgagctgcttctgtgactgaagcacctctgtgggcttttgggaaccatggatgcacagatgagagagcacaggctcagagagtaagatggatttctagtgctagccaggtgaatgacacacagtgtatttcaagtttgaaaagcaaaaccatggtatctgacagtgctgattgtaatcacctcccaccactgtgcattttaaacatgagaacaaaaaacttttccaaaatttaaacttttcctaaatctttgtggtcattgctagttgttgacatcagatcctttggttttattctataacttgggctaaacgttaatatcccactaggtggaacatgtctcttccggagttgtgacaaccgaggctcagagctgtgatttttagaaaacaagatgactattaaatcctttggcctggtattcttgaatgtttttctcccagtgcttcccttgcctgtatggagcatctgcaaagtctgagcaggttttgaagtccaagagcatcccagctataaggctcttgcactgtgacagagctgcccacctccagtacaccctcagtgacctcgagtagatgcgtagggcagtcaaacccggcaacttatgccacaaccctaattccaggaagtcgtctgctaatggctaacccactgccatggtggcactggttttgcctgaggtcattgctagggcaggaatgaacagcaaccagcacagagcattgctaaattaattacagtaatctaattaattagtagctaggcttcttctgataggaaagtttcaaccagaaaccactagatgttctattatcatagcttttgtagattggatggaagaataagtaggaagaaagagtattaatgtagctagtagggaccagtgttgctgcttgtggctgaggcagtaatgctaaggctttagctcttcaaaagcagaatgaaaaggcacaaaaagcacttcaagcttgtttctgtacccagttgtccctgtattgtctacataaaatcctgtttcctgctatctgtctgtgattcctgtttattacaaattcagtgtgtctgactgatattaaacactgatattaaaatttcaaacttcacttatctgtgctgttgtgaacaggcagctgatctggcagccctcgaatgggaaacaagtgcttctgttgagctgtagcatatataatataaatgtgcctatgtgtattaaaatgtcttctgtaaacaa

SEQ ID NO: 180336 - DNA, 1637 bp, Homo sapiens
  Payload ID: 15519
  Gene Symbol: STK32A
  Gene Name: serine/threonine kinase 32A
  ENST ID: ENST00000398523
  CDS Start-End: 172-1395
ctcttagtccctgttccctggatgaaagcatcgctccgagcctcatgggaggaatgaaggaagaatcgagactagatatccaactaaggcttcgggacatgttttgagcgaagatgggtgtttctgcccggatagtataaatcgaggatccaggtctgggcagattcaaccatgggagcgaacacttcaagaaaaccaccagtgtttgatgaaaatgaagatgtcaactttgaccactttgaaattttgcgagccattgggaaaggcagttttgggaaggtctgcattgtacagaagaatgataccaagaagatgtacgcaatgaagtacatgaataaacaaaagtgcgtggagcgcaatgaagtgagaaatgtcttcaaggaactccagatcatgcagggtctggagcaccctttcctggttaatttgtggtattccttccaagatgaggaagacatgttcatggtggtggacctcctgctgggtggagacctgcgttatcacctgcaacagaacgtccacttcaaggaagaaacagtgaagctcttcatctgtgagctggtcatggccctggactacctgcagaaccagcgcatcattcacagggatatgaagcctgacaatattttacttgacgaacatgggcacgtgcacatcacagatttcaacattgctgcgatgctgcccagggagacacagattaccaccatggctggcaccaagccttacatggcacctgagatgttcagctccagaaaaggagcaggctattcctttgctgttgactggtggtccctgggagtgacggcatatgaactgctgagaggccggagaccgtatcatattcgctccagtacttccagcaaggaaattgtacacacgtttgagacgactgttgtaacttacccttctgcctggtcacaggaaatggtgtcacttcttaaaaagctactcgaacctaatccagaccaacgattttctcagttatctgatgtccagaacttcccgtatatgaatgatataaactgggatgcagtttttcagaagaggctcattccaggtttcattcctaataaaggcaggctgaattgtgatcctacctttgaacttgaggaaatgattttggagtccaaacctctacataagaaaaaaaagcgtctggcaaagaaggagaaggatatgaggaaatgcgattcttctcagacatgtcttcttcaagagcaccttgactctgtccagaaggagttcataattttcaacagagaaaaagtaaacagggactttaacaaaagacaaccaaatctagccttggaacaaaccaaagacccacaagtgacaaatggacaaatggacacaggactcagtgagacttttcagacctcgaaagtttcataaagtggtcagaatgccccaggctacttggataaagataaggaattctatcagggaggcatgaatggaatcagattaaaagtaacagagatggatgagggccttccagtgatatgcgtgaatcagcattagatccgcttatctcagctggcaggagcctgctgtgcacaccacttcccagctccctcttcaacaatgtgaaagtggtaacttgaaattggtaataatgggagcatttacaccac

SEQ ID NO: 180337 - DNA, 798 bp, Homo sapiens
  Payload ID: 15519
  Gene Symbol: STK32A
  Gene Name: serine/threonine kinase 32A
  Uniprot ID: Q8WU08
  ENST ID: ENST00000626951
  CDS Start-End: 191-691
ccttgctcttggagttcttctcttagtccctgttccctggatgaaagcatcgctccgagcctcatgggaggaatgaaggaagaatcgagactagatatccaactaaggcttcgggacatgttttgagcgaagatgggtgtttctgcccggatagtataaatcgaggatccaggtctgggcagattcaaccatgggagcgaacacttcaagaaaaccaccagtgtttgatgaaaatgaagatgtcaactttgaccactttgaaattttgcgagccattgggaaaggcagttttgggaaggtctgcattgtacagaagaatgataccaagaagatgtacgcaatgaagtacatgaataaacaaaagtgcgtggagcgcaatgaagtgagaaatgtcttcaaggaactccagatcatgcagggtctggagcaccctttcctggttaatttgtggtattccttccaagatgaggaagacatgttcatggtggtggacctcctgctgggtggagacctgcgttatcacctgcaacagaacgtccacttcaaggaagaaacagtgaagctcttcatctgtgagctggtcatggccctggactacctgcagaaccagcgcatcattcacagggatatgaagcctgacaatattttacttgacgaacatgatacctggctctcctacaagtcccactgaattggagtttcaggagaccgaagcccaggcacatgtattttgcaaaactacactgaagtttctgataatgacggatatcaacaattaaacgcttacttcttgccaaa

SEQ ID NO: 180338 - DNA, 3582 bp, Homo sapiens
  Payload ID: 15520
  Gene Symbol: STK32B
  Gene Name: serine/threonine kinase 32B
  Uniprot ID: Q9NY57
  ENST ID: ENST00000282908
  CDS Start-End: 423-1667
ctgcgtgctgccttcgtccgtcccctcctcccccgctccttcccctccttcccctgctcccgcgccgcctcgcgtctcccgcccgctgtagccggcgaggagcgccgcacgttggccccggcgcgaggagctcccgggttcccgggcgggcactggagtaaggagctgcgagcgcagcccgaggcggggcacggcggaaggcgcggcgagagcggggtccctgcgagcgcagtcggaagggcgtccaggagaagggggacgccgtccccgcccctgcacggtgctcggccccctcgggctccgcgcgcggctacaacccggactgggcgcgcccccggcatcccgcatctctgcgcgcgtcccacatcccgcatccggcatcccagcggccgggcatgtagcagcggcagcaacggcggaatatgggcgggaaccactcccacaagccccccgtgtttgacgagaatgaggaagtcaactttgaccattttcagattctgcgggccattggtaaagggagttttggaaaggtatgcatcgtgcagaagcgagacactaagaaaatgtatgcaatgaagtacatgaacaagcagaagtgcatcgagagggatgaggttcggaatgttttccgggagctgcagatcatgcaagggctggagcaccccttcctggtcaatctgtggtactccttccaggatgaggaggacatgttcatggtggtggacctgctcctgggaggcgacctgcgctaccatctgcagcagaatgtgcatttcacagaggggactgtgaaactctacatctgtgagctggcactggccctggagtatcttcagaggtaccacatcatccacagagacatcaagccagacaatatcctgctggatgaacacggacatgttcacattacagacttcaacatagcgacggtagtgaaaggagcagaaagggcttcctccatggctggcaccaagccctacatggctccagaagtattccaggtgtacatggacagaggccccggatactcgtaccctgtcgactggtggtccctgggcatcacagcctatgagctgctgcggggctggaggccgtacgaaatccactcggtcacgcccatcgatgaaatcctcaacatgttcaaggtggagcgtgtccactactcctccacgtggtgcaaggggatggtggccctgctgaggaagctcctgaccaaggatcctgagagccgcgtgtccagccttcatgacatacagagcgtgccctacttggccgacatgaactgggacgcggtgttcaagaaggcactgatgcccggctttgtgcccaataaagggaggttgaactgcgatcccacatttgagcttgaagagatgattctagaatccaagccacttcacaaaaagaagaagcgattggcaaagaacagatccagggatggcacaaaggacagctgcccgctgaatggacacctgcagcactgtttggagactgtccgggaggaattcatcatattcaacagagagaagctcaggaggcagcagggacagggcagccagctcttggacaccgacagccgagggggaggccaggcccaaagcaagctccaggacgggtgcaacaacaacctcctcacccacacctgcacccgtggctgcagcagctgagcccacacttgttgctgctcaacaggactgcactcgtctctgccctgcccacccagagcccctctttgtgccctgatggtccctgtctcacccctgaaaacatcagatgcagaaaaagccctggacttggagctgggaagcctgggttctggtcccatctccatgactgattcacgtgtgacctcagacaagtcacgccctctctgtgcctccgttttctgcatctgccaaaggggttaaacacttctgccccacttcaaattacaagattatggggagaacccaattaggtaggaaacatgaaaaacctttgatatttataaaatcatttttacgtgcaaaatataaccttaatatttgaagtgacccccattccccaaagcaatcaaaccgtcatgactttgcaatttggcacatcctagcttgttagagggcacttccgaaaaacacagccctgacagcaaaataaaggtctgatatgttggccccttctatggaaacaacgctgccaaatcctggagcaaaacctgaagtgtcttcatgtgcattctctggcaggccacagtcctgagcttgtaagatggtgcagcatgcagaccagacttgtccccaaggtctcagcgctgcggtctcactcctcccctcatttaagaagactatccttaccttttagtttcagcagtcctcaccaccaccatatccccagtgctgggatggcacacaggtgtccattcagatgagagttgggtcgctgagcattggttactcctgcagagtgtaatcagcaccccatccaactggcccgaaagcccagacctgcagcagaactctccaactctctatcagctttcagggttttctctcctgggaagggtgtaaaatcagcttgtcagattcttcttacagagagtatccaatcggtattggtggagcggctccctatttatacaataggaagcatgggtgcttagaaagtttatttcaggaggaaaatgggttcacacaaaaagcaaactacattctggtctgctcagggagaagcttgcctttgaactggaagatgttgggatgagcagggaaagcttagactttggagtcaggtttgtgttcagaatccagccctgctggctactaactaactgggagaccttaggcaaagcatgcaatcgctctgaatggcagtttcctcatttttaaacagggataataaaactaatattgcaggggagttacagggttaaataagatcctgtgtgtaaccccaagcattggatgactcatagaatggccttttttgtcagcataatcgtcatcattatttagatactttcttccttcactcacccagcaggtcagttttctgtgcaaacaaacctgtttaggattcttccaaatgttcttcctggggtctttgatatttgtttgttacatcctgctgaagttcgactgtgtttttattttttcatccaacttccatttttcactttttacatgattactcaatccttggggctgtccatgtcatctcttagatttcttaaaagacattttaatgtatggttaggttttatatttttattttttaaaaaagaaatagtcagtgttttcctcctttcaaccgagactatttctggattgtgtgctcctcgtcagttgacttgttttgcacacttttctttacttcatgtccccatcaacaaccgtcctgctccccacctcccccaggaaataaggggcctgctcctctccctactgtgaccctggaggctcttaagatgatgatggttttttttattgggctgagttcacgaattaggggcaggagctggaagtcgccctaggaacaccagatttcctggttctgttcaagttggcatttcttgtttggaataaactatttcttggacattccttc

SEQ ID NO: 180339 - DNA, 3241 bp, Homo sapiens
  Payload ID: 15520
  Gene Symbol: STK32B
  Gene Name: serine/threonine kinase 32B
  Uniprot ID: Q9NY57
  ENST ID: ENST00000510398
  CDS Start-End: 233-1336
gtagagagtgaagcagcaagactgcagagcctcatcaagaagtgtggagtgaagggaaggcttcagatggacaatttgtgtgctggggaaaaaatggaatgtgctgcaaattcccctgtggataagggtggacggctgctctgtcaactttgaccattttcagattctgcgggccattggtaaagggagttttggaaaggtatgcatcgtgcagaagcgagacactaagaaaatgtatgcaatgaagtacatgaacaagcagaagtgcatcgagagggatgaggttcggaatgttttccgggagctgcagatcatgcaagggctggagcaccccttcctggtcaatctgtggtactccttccaggatgaggaggacatgttcatggtggtggacctgctcctgggaggcgacctgcgctaccatctgcagcagaatgtgcatttcacagaggggactgtgaaactctacatctgtgagctggcactggccctggagtatcttcagaggtaccacatcatccacagagacatcaagccagacaatatcctgctggatgaacacggacatgttcacattacagacttcaacatagcgacggtagtgaaaggagcagaaagggcttcctccatggctggcaccaagccctacatggctccagaagtattccaggtgtacatggacagaggccccggatactcgtaccctgtcgactggtggtccctgggcatcacagcctatgagctgctgcggggctggaggccgtacgaaatccactcggtcacgcccatcgatgaaatcctcaacatgttcaaggtggagcgtgtccactactcctccacgtggtgcaaggggatggtggccctgctgaggaagctcctgaccaaggatcctgagagccgcgtgtccagccttcatgacatacagagcgtgccctacttggccgacatgaactgggacgcggtgttcaagaaggcactgatgcccggctttgtgcccaataaagggaggttgaactgcgatcccacatttgagcttgaagagatgattctagaatccaagccacttcacaaaaagaagaagcgattggcaaagaacagatccagggatggcacaaaggacagctgcccgctgaatggacacctgcagcactgtttggagactgtccgggaggaattcatcatattcaacagagagaagctcaggaggcagcagggacagggcagccagctcttggacaccgacagccgagggggaggccaggcccaaagcaagctccaggacgggtgcaacaacaacctcctcacccacacctgcacccgtggctgcagcagctgagcccacacttgttgctgctcaacaggactgcactcgtctctgccctgcccacccagagcccctctttgtgccctgatggtccctgtctcacccctgaaaacatcagatgcagaaaaagccctggacttggagctgggaagcctgggttctggtcccatctccatgactgattcacgtgtgacctcagacaagtcacgccctctctgtgcctccgttttctgcatctgccaaaggggttaaacacttctgccccacttcaaattacaagattatggggagaacccaattaggtaggaaacatgaaaaacctttgatatttataaaatcatttttacgtgcaaaatataaccttaatatttgaagtgacccccattccccaaagcaatcaaaccgtcatgactttgcaatttggcacatcctagcttgttagagggcacttccgaaaaacacagccctgacagcaaaataaaggtctgatatgttggccccttctatggaaacaacgctgccaaatcctggagcaaaacctgaagtgtcttcatgtgcattctctggcaggccacagtcctgagcttgtaagatggtgcagcatgcagaccagacttgtccccaaggtctcagcgctgcggtctcactcctcccctcatttaagaagactatccttaccttttagtttcagcagtcctcaccaccaccatatccccagtgctgggatggcacacaggtgtccattcagatgagagttgggtcgctgagcattggttactcctgcagagtgtaatcagcaccccatccaactggcccgaaagcccagacctgcagcagaactctccaactctctatcagctttcagggttttctctcctgggaagggtgtaaaatcagcttgtcagattcttcttacagagagtatccaatcggtattggtggagcggctccctatttatacaataggaagcatgggtgcttagaaagtttatttcaggaggaaaatgggttcacacaaaaagcaaactacattctggtctgctcagggagaagcttgcctttgaactggaagatgttgggatgagcagggaaagcttagactttggagtcaggtttgtgttcagaatccagccctgctggctactaactaactgggagaccttaggcaaagcatgcaatcgctctgaatggcagtttcctcatttttaaacagggataataaaactaatattgcaggggagttacagggttaaataagatcctgtgtgtaaccccaagcattggatgactcatagaatggccttttttgtcagcataatcgtcatcattatttagatactttcttccttcactcacccagcaggtcagttttctgtgcaaacaaacctgtttaggattcttccaaatgttcttcctggggtctttgatatttgtttgttacatcctgctgaagttcgactgtgtttttattttttcatccaacttccatttttcactttttacatgattactcaatccttggggctgtccatgtcatctcttagatttcttaaaagacattttaatgtatggttaggttttatatttttattttttaaaaaagaaatagtcagtgttttcctcctttcaaccgagactatttctggattgtgtgctcctcgtcagttgacttgttttgcacacttttctttacttcatgtccccatcaacaaccgtcctgctccccacctcccccaggaaataaggggcctgctcctctccctactgtgaccctggaggctcttaagatgatgatggttttttttattgggctgagttcacgaattaggggcaggagctggaagtcgccctaggaacaccagatttcctggttctgttcaagttggcatttcttgtttggaataaactatttcttgg

SEQ ID NO: 180340 - DNA, 1989 bp, Homo sapiens
  Payload ID: 15520
  Gene Symbol: STK32B
  Gene Name: serine/threonine kinase 32B
  ENST ID: ENST00000512018
  CDS Start-End: 269-424
ggagtaaggagctgcgagcgcagcccgaggcggggcacggcggaaggcgcggcgagagcggggtccctgcgagcgcagtcggaagggcgtccaggagaagggggacgccgtccccgcccctgcacggtgctcggccccctcgggctccgcgcgcggctacaacccggactgggcgcgcccccggcatcccgcatctctgcgcgcgtcccacatcccgcatccggcatcccagcggccgggcatgtagcagcggcagcaacggcggaatatgggcgggaaccactcccacaagccccccgtgtttgacgagaatgaggaagtcaactttgaccattttcagattctgcgggccattggtaaagggagttttggaaaggattgccaatgccgtttgttccttgagaatctaagtgaggaaagttgaaaaaaaacccataaacatcacaaaggcagctctttccagcaacatagacgtttgttgttttggtatgcatcgtgcagaagcgagacactaagaaaatgtatgcaatgaagtacatgaacaagcagaagtgcatcgagagggatgaggttcggaatgttttccgggagctgcagatcatgcaagggctggagcaccccttcctggtcaatctgtggtactccttccaggatgaggaggacatgttcatggtggtggacctgctcctgggaggcgacctgcgctaccatctgcagcagaatgtgcatttcacagaggggactgtgaaactctacatctgtgagctggcactggccctggagtatcttcagaggtaccacatcatccacagagacatcaagccagacaatatcctgctggatgaacacggacatgttcacattacagacttcaacatagcgacggtagtgaaaggagcagaaagggcttcctccatggctggcaccaagccctacatggctccagaagtattccaggtgtacatggacagaggccccggatactcgtaccctgtcgactggtggtccctgggcatcacagcctatgagctgctgcggggctggaggccgtacgaaatccactcggtcacgcccatcgatgaaatcctcaacatgttcaaggtggagcgtgtccactactcctccacgtggtgcaaggggatggtggccctgctgaggaagctcctgaccaaggatcctgagagccgcgtgtccagccttcatgacatacagagcgtgccctacttggccgacatgaactgggacgcggtgttcaagaaggcactgatgcccggctttgtgcccaataaagggaggttgaactgcgatcccacatttgagcttgaagagatgattctagaatccaagccacttcacaaaaagaagaagcgattggcaaagaacagatccagggatggcacaaaggacagctgcccgctgaatggacacctgcagcactgtttggagactgtccgggaggaattcatcatattcaacagagagaagctcaggaggcagcagggacagggcagccagctcttggacaccgacagccgagggggaggccaggcccaaagcaagctccaggacgggtgcaacaacaacctcctcacccacacctgcacccgtggctgcagcagctgagcccacacttgttgctgctcaacaggactgcactcgtctctgccctgcccacccagagcccctctttgtgccctgatggtccctgtctcacccctgaaaacatcagatgcagaaaaagccctggacttggagctgggaagcctgggttctggtcccatctccatgactgattcacgtgtgacctcagacaagtcacgccctctctgtgcctccgttttctgcatctgccaaaggggttaaacacttctgccccacttcaaattacaagattatggggagaacccaattaggtaggaaacatgaaaaacctttgatatttataaaatcatttttacgtgcaaaatataaccttaatatttgaagtga

SEQ ID NO: 180341 - DNA, 3272 bp, Homo sapiens
  Payload ID: 15520
  Gene Symbol: STK32B
  Gene Name: serine/threonine kinase 32B
  ENST ID: ENST00000512636
  CDS Start-End: 348-1361
gggatttactggcaaggccgtacattgttgacctgtcttggtgtagggaaacatgtagaagccaggcagaagtggggtagagagtgaagcagcaagactgcagagcctcatcaagaagtgtggagtgaagggaaggcttcagatggacaatttgtgtgctggggaaaaaatggaatgtgctgcaaattcccctgtggataagggtggacggctgctctggcaagtatagtgcacctgacccaagagcctttggaatagtcaactttgaccattttcagattctgcgggccattggtaaagggagttttggaaaggtatgcatcgtgcagaagcgagacactaagaaaatgtatgcaatgaagtacatgaacaagcagaagtgcatcgagagggatgaggttcggaatgttttccgggagctgcagatcatgcaagggctggagcaccccttcctggtcaatctgtggtactccttccaggatgaggaggacatgttcatggtggtggacctgctcctgggaggcgacctgcgctaccatctgcagcagaatgtgcatttcacagaggggactgtgaaactctacatctgtgagctggcactggccctggagtatcttcagaggtaccacatcatccacagagacatcaagccagacaatatcctgctggatgaacacgctccagaagtattccaggtgtacatggacagaggccccggatactcgtaccctgtcgactggtggtccctgggcatcacagcctatgagctgctgcggggctggaggccgtacgaaatccactcggtcacgcccatcgatgaaatcctcaacatgttcaaggtggagcgtgtccactactcctccacgtggtgcaaggggatggtggccctgctgaggaagctcctgaccaaggatcctgagagccgcgtgtccagccttcatgacatacagagcgtgccctacttggccgacatgaactgggacgcggtgttcaagaaggcactgatgcccggctttgtgcccaataaagggaggttgaactgcgatcccacatttgagcttgaagagatgattctagaatccaagccacttcacaaaaagaagaagcgattggcaaagaacagatccagggatggcacaaaggacagctgcccgctgaatggacacctgcagcactgtttggagactgtccgggaggaattcatcatattcaacagagagaagctcaggaggcagcagggacagggcagccagctcttggacaccgacagccgagggggaggccaggcccaaagcaagctccaggacgggtgcaacaacaacctcctcacccacacctgcacccgtggctgcagcagctgagcccacacttgttgctgctcaacaggactgcactcgtctctgccctgcccacccagagcccctctttgtgccctgatggtccctgtctcacccctgaaaacatcagatgcagaaaaagccctggacttggagctgggaagcctgggttctggtcccatctccatgactgattcacgtgtgacctcagacaagtcacgccctctctgtgcctccgttttctgcatctgccaaaggggttaaacacttctgccccacttcaaattacaagattatggggagaacccaattaggtaggaaacatgaaaaacctttgatatttataaaatcatttttacgtgcaaaatataaccttaatatttgaagtgacccccattccccaaagcaatcaaaccgtcatgactttgcaatttggcacatcctagcttgttagagggcacttccgaaaaacacagccctgacagcaaaataaaggtctgatatgttggccccttctatggaaacaacgctgccaaatcctggagcaaaacctgaagtgtcttcatgtgcattctctggcaggccacagtcctgagcttgtaagatggtgcagcatgcagaccagacttgtccccaaggtctcagcgctgcggtctcactcctcccctcatttaagaagactatccttaccttttagtttcagcagtcctcaccaccaccatatccccagtgctgggatggcacacaggtgtccattcagatgagagttgggtcgctgagcattggttactcctgcagagtgtaatcagcaccccatccaactggcccgaaagcccagacctgcagcagaactctccaactctctatcagctttcagggttttctctcctgggaagggtgtaaaatcagcttgtcagattcttcttacagagagtatccaatcggtattggtggagcggctccctatttatacaataggaagcatgggtgcttagaaagtttatttcaggaggaaaatgggttcacacaaaaagcaaactacattctggtctgctcagggagaagcttgcctttgaactggaagatgttgggatgagcagggaaagcttagactttggagtcaggtttgtgttcagaatccagccctgctggctactaactaactgggagaccttaggcaaagcatgcaatcgctctgaatggcagtttcctcatttttaaacagggataataaaactaatattgcaggggagttacagggttaaataagatcctgtgtgtaaccccaagcattggatgactcatagaatggccttttttgtcagcataatcgtcatcattatttagatactttcttccttcactcacccagcaggtcagttttctgtgcaaacaaacctgtttaggattcttccaaatgttcttcctggggtctttgatatttgtttgttacatcctgctgaagttcgactgtgtttttattttttcatccaacttccatttttcactttttacatgattactcaatccttggggctgtccatgtcatctcttagatttcttaaaagacattttaatgtatggttaggttttatatttttattttttaaaaaagaaatagtcagtgttttcctcctttcaaccgagactatttctggattgtgtgctcctcgtcagttgacttgttttgcacacttttctttacttcatgtccccatcaacaaccgtcctgctccccacctcccccaggaaataaggggcctgctcctctccctactgtgaccctggaggctcttaagatgatgatggttttttttattgggctgagttcacgaattaggggcaggagctggaagtcgccctaggaacaccagatttcctggttctgttcaagttggcatttcttgtttggaataaactatttcttggacattc

SEQ ID NO: 180342 - DNA, 2086 bp, Homo sapiens
  Payload ID: 15521
  Gene Symbol: STK32C
  Gene Name: serine/threonine kinase 32C
  Uniprot ID: Q86UX6
  ENST ID: ENST00000298630
  CDS Start-End: 108-1568
acggcgggcgctgccggccccgagcgctcccgctaccactgccgctcccggccctgccggccggccatgccccgagttccggctgccgcgcgcacccagacccggcgatgaggagtggcgccgagcgcaggggcagcagcgccgcggcgtccccgggctcgccgccccccggccgcgcgcgccccgccggctccgacgcgccctcggccctgccgccgcccgctgctggccagccccgggcccgggactcgggcgatgtccgctcgcagccgcgccccctgtttcagtggagcaagtggaagaagaggatgggctcgtccatgtcggcggccaccgcgcggaggccggtgtttgacgacaaggaggacgtgaacttcgaccacttccagatccttcgggccattgggaagggcagctttggcaaggtgtgcattgtgcagaagcgggacacggagaagatgtacgccatgaagtacatgaacaagcagcagtgcatcgagcgcgacgaggtccgcaacgtcttccgggagctggagatcctgcaggagatcgagcacgtcttcctggtgaacctctggtactccttccaggacgaggaggacatgttcatggtcgtggacctgctactgggcggggacctgcgctaccacctgcagcagaacgtgcagttctccgaggacacggtgaggctgtacatctgcgagatggcactggctctggactacctgcgcggccagcacatcatccacagagatgtcaagcctgacaacattctcctggatgagagaggacatgcacacctgaccgacttcaacattgccaccatcatcaaggacggggagcgggcgacggcattagcaggcaccaagccgtacatggctccggagatcttccactcttttgtcaacggcgggaccggctactccttcgaggtggactggtggtcggtgggggtgatggcctatgagctgctgcgaggatggaggccctatgacatccactccagcaacgccgtggagtccctggtgcagctgttcagcaccgtgagcgtccagtatgtccccacgtggtccaaggagatggtggccttgctgcggaagctcctcactgtgaaccccgagcaccggctctccagcctccaggacgtgcaggcagccccggcgctggccggcgtgctgtgggaccacctgagcgagaagagggtggagccgggcttcgtgcccaacaaaggccgtctgcactgcgaccccacctttgagctggaggagatgatcctggagtccaggcccctgcacaagaagaagaagcgtctggccaagaacaagtcccgggacaacagcagggacagctcccagtccgagaatgactatcttcaagactgcctcgatgccatccagcaagacttcgtgatttttaacagagaaaagctgaagaggagccaggacctcccgagggagcctctccccgcccctgagtccagggatgctgcggagcctgtggaggacgaggcggaacgctccgccctgcccatgtgcggccccatttgcccctcggccgggagcggctaggccgggacgcccgtggtcctcaccccttgagctgctttggagactcggctgccagagggagggccatgggccgaggcctggcattcacgttcccacccagcctggctggcggtgcccacagtgccccggacacatttcacacctcaggctcgtggtggtgcaggggacaagaggctgtgggtgcaggggacacctgtggagggcatttcccgtgggcccccgagacccgcctagatggaggaagcgctgctgggcgccctcttaccgctcacggggagctggggccatggatgggacaggagtctttgtccctgctcagcccggaggctgtgcacggccctcgtcacaaggtgacccttgcagcacaggccgcgggtgccccaggctcggctcaggtcttggaggtcaagggcatgggttggggtagtgggtggggaggtgaatgttttctagagattcaaactgctccagcaatttctgtagttttcacctctgagaattacaatgtgagaaccgct

SEQ ID NO: 180343 - DNA, 733 bp, Homo sapiens
  Payload ID: 15521
  Gene Symbol: STK32C
  Gene Name: serine/threonine kinase 32C
  ENST ID: ENST00000368619
  CDS Start-End: 96-536
gcggccttgaaggggtggtggtcgacgggcaagtagagaccgcgagggtctggaggggcgaccggcctggcacagaggggaaggaagagagcgggatgctaagtgccgtctggggagccggagggcccggggcgggcggggctgctcgaggacagccgagcagaaaagaattgctgctgaggcaccacctttggagcggtcctcgctgcctgtccttcccgctgggctcactccccgcgtctctcctggggcttcctggagccacttcccacaggagctgcttgtccccaaatcttgcctcaggacttgctgccaggggaacgcagactcagagcgtcctctttggagaagtaaggctgcctctggacggaggagtgaggggggcgaggaaacgcagtcttctgagagcacaccccaggactgggattttgccaggaagatgtggaatggtgtggaaagacaagaagctgcagccttcaggctgccatgaaaaagctgggggtgtgttctgtggcccatcaagagggggtgtgtaatgaattgttaatgaatttctcagatgagccaaagtggtgaacttgtctcagtacccagggagactcagactcatccccagctcttggcctccattttcccagctgctgtgattggagtgggtccctggaattcatatgctggaaatttggtccaggtgtgggtgtgttgggaggtggggtttaaggtgtggttaggc

SEQ ID NO: 180344 - DNA, 830 bp, Homo sapiens
  Payload ID: 15521
  Gene Symbol: STK32C
  Gene Name: serine/threonine kinase 32C
  ENST ID: ENST00000368620
  CDS Start-End: 112-830
ccgtttttccgcgcccgcggccttgaaggggtggtggtcgacgggcaagtagagaccgcgagggtctggaggggcgaccggcctggcacagaggggaaggaagagagcgggatgctaagtgccgtctggggagccggagggcccggggcgggcggggctgctcgaggacagccgagcagaaaagaattgctgctgaggcaccacctttggagcggtcctcgctgcctgtccttcccgctgggctcactccccgcgtctctcctggggcttcctggagccacttcccacaggagctgcttgtccccaaatcttgcctcaggacttgctgccaggggaacgcagactcagagcgtcctctttggagaagtaaggctgcctctggacggaggagtgaggggggcgaggaaacgcatgaacttcgaccacttccagatccttcgggccattgggaagggcagctttggcaaggtgtccccacgtgtccccaggcgtcctcaggcgtcctgccgaacagccctgtgccctccaggtgtgcattgtgcagaagcgggacacggagaagatgtacgccatgaagtacatgaacaagcagcagtgcatcgagcgcgacgaggtccgcaacgtcttccgggagctggagatcctgcaggagatcgagcacgtcttcctggtgaacctctggtactccttccaggacgaggaggacatgttcatggtcgtggacctgctactgggcggggacctgcgctaccacctgcagcagaacgtgcagttctccgaggacacggtgaggctgtacatctgcgagatggcactggctctggactacc

SEQ ID NO: 180345 - DNA, 2010 bp, Homo sapiens
  Payload ID: 15521
  Gene Symbol: STK32C
  Gene Name: serine/threonine kinase 32C
  Uniprot ID: Q86UX6
  ENST ID: ENST00000368622
  CDS Start-End: 383-1492
gtactttgcagttagagaggcgctcacctgtgccgcccgagtgcgagtgaggctcctgccccacaggtggcggggcccggccgctcagaggctcagtctccttggtgaccgcgcggtgtccatcctctgctcacccatgtgcgctggaggcagggccaggccgttgtgcaaagacctgccctgccaggaacgagtgcgctgctgagtcctgtagataaagccgccaaccccggggactggtgtctcctgagtgaccgtgcagccgtgggcgccatagaaagcagagaaggcagtgaacttcgaccacttccagatccttcgggccattgggaagggcagctttggcaaggtgtgcattgtgcagaagcgggacacggagaagatgtacgccatgaagtacatgaacaagcagcagtgcatcgagcgcgacgaggtccgcaacgtcttccgggagctggagatcctgcaggagatcgagcacgtcttcctggtgaacctctggtactccttccaggacgaggaggacatgttcatggtcgtggacctgctactgggcggggacctgcgctaccacctgcagcagaacgtgcagttctccgaggacacggtgaggctgtacatctgcgagatggcactggctctggactacctgcgcggccagcacatcatccacagagatgtcaagcctgacaacattctcctggatgagagaggacatgcacacctgaccgacttcaacattgccaccatcatcaaggacggggagcgggcgacggcattagcaggcaccaagccgtacatggctccggagatcttccactcttttgtcaacggcgggaccggctactccttcgaggtggactggtggtcggtgggggtgatggcctatgagctgctgcgaggatggaggccctatgacatccactccagcaacgccgtggagtccctggtgcagctgttcagcaccgtgagcgtccagtatgtccccacgtggtccaaggagatggtggccttgctgcggaagctcctcactgtgaaccccgagcaccggctctccagcctccaggacgtgcaggcagccccggcgctggccggcgtgctgtgggaccacctgagcgagaagagggtggagccgggcttcgtgcccaacaaaggccgtctgcactgcgaccccacctttgagctggaggagatgatcctggagtccaggcccctgcacaagaagaagaagcgtctggccaagaacaagtcccgggacaacagcagggacagctcccagtccgagaatgactatcttcaagactgcctcgatgccatccagcaagacttcgtgatttttaacagagaaaagctgaagaggagccaggacctcccgagggagcctctccccgcccctgagtccagggatgctgcggagcctgtggaggacgaggcggaacgctccgccctgcccatgtgcggccccatttgcccctcggccgggagcggctaggccgggacgcccgtggtcctcaccccttgagctgctttggagactcggctgccagagggagggccatgggccgaggcctggcattcacgttcccacccagcctggctggcggtgcccacagtgccccggacacatttcacacctcaggctcgtggtggtgcaggggacaagaggctgtgggtgcaggggacacctgtggagggcatttcccgtgggcccccgagacccgcctagatggaggaagcgctgctgggcgccctcttaccgctcacggggagctggggccatggatgggacaggagtctttgtccctgctcagcccggaggctgtgcacggccctcgtcacaaggtgacccttgcagcacaggccgcgggtgccccaggctcggctcaggtcttggaggtcaagggcatgggttggggtagtgggtggggaggtgaatgttttctagagattcaaactgctccagcaatttctgtagttttcacctctgagaattacaatgtgagaaccgct

SEQ ID NO: 180346 - DNA, 607 bp, Homo sapiens
  Payload ID: 15521
  Gene Symbol: STK32C
  Gene Name: serine/threonine kinase 32C
  ENST ID: ENST00000456004
  CDS Start-End: 102-410
gcgcccgcggccttgaaggggtggtggtcgacgggcaagtagagaccgcgagggtctggaggggcgaccggcctggcacagaggggaaggaagagagcgggatgctaagtgccgtctggggagccggagggcccggggcgggcggggctgctcgaggacagccgagcagaaaagaattgctgctgaggcaccacctttggagcggtcctcgctgcctgtccttcccgctgggctcactccccgcgtctctcctggggcttcctggagccacttcccacaggagctgcttgtccccaaatcttgcctcaggacttgctgccaggggaacgcagactcagagcgtcctctttggagaagtaaggctgcctctggacggaggagtgaggggggcgaggaaacgcagaagctgaaagcacaaccagtaccttctcaggagcgtggggaggccagccacccgggcagagcaaggagagaatgaggagtgacatgggtgttgccgtgagtggcgaaggggatggaagatttcagcacgatgctatttctaacaagtttcagcattccagtatctcttttcacaaataaaacatttactaaccatttgagcgta

SEQ ID NO: 180347 - DNA, 2707 bp, Homo sapiens
  Payload ID: 15522
  Gene Symbol: STK33
  Gene Name: serine/threonine kinase 33
  Uniprot ID: Q9BYT3
  ENST ID: ENST00000315204
  CDS Start-End: 524-2068
gccggccggctggtaaccccccagcggagggaccgggccgagcccgcggacccctccgagtgtctcctggggcccagccgttggtaccccatttcccccgggtccggtatttggggtggtctctgtctgccccggttcatctccaccgtctcaccttcaccccatcttgggacgtgaaactttttgaaagtttagaagcgaacttactgtggggaccttcctctggggttagttctctggtgccaccttcagtgatctgtgtggcagctctgctgctcacttctggctttactgggttttggtatttaactgttgcttacgcacactggaaattttcacctgcagtttttcttctgcctaagctctcacgtgtgaatatgtgtctagtgcatccttaacctgaggacttcaccagttcgaaattacagttttcaccatcaactaccttatcctttttggcctggttttcttcctcaaacagtggaaacatttttaaagttgcttttgttgcagagttaaacaaatggctgatagtggcttagataaaaaatccacaaaatgccccgactgttcatctgcttctcagaaagatgtactttgtgtatgttccagcaaaacaagggttcctccagttttggtggtggaaatgtcacagacatcaagcattggtagtgcagaatctttaatttcactggagagaaaaaaagaaaaaaatatcaacagagatataacctccaggaaagatttgccctcaagaacctcaaatgtagagagaaaagcatctcagcaacaatggggtcggggcaactttacagaaggaaaagttcctcacataaggattgagaatggagctgctattgaggaaatctatacctttggaagaatattgggaaaagggagctttggaatagtcattgaagcgacagacaaggaaacagaaacgaagtgggcaattaaaaaagtgaacaaagaaaaggctggaagctctgctgtgaagttacttgaacgagaggtgaacattctgaaaagtgtaaaacatgaacacatcatacatctggaacaagtatttgaaacgccaaagaaaatgtaccttgtgatggagctttgtgaggatggagaactcaaagaaattctggataggaaagggcatttctcagagaatgagacaaggtggatcattcaaagtctcgcatcagctatagcatatcttcacaataatgatattgtacatagagatctgaaactggaaaatataatggttaaaagcagtcttattgatgataacaatgaaataaacttaaacataaaggtgactgattttggcttagcggtgaagaagcaaagtaggagtgaagccatgctgcaggccacatgtgggactcctatctatatggcccctgaagttatcagtgcccacgactatagccagcagtgtgacatttggagcataggcgtcgtaatgtacatgttattacgtggagaaccaccctttttggcaagctcagaagagaagctttttgagttaataagaaaaggagaactacattttgaaaatgcagtctggaattccataagtgactgtgctaaaagtgttttgaaacaacttatgaaagtagatcctgctcacagaatcacagctaaggaactactagataaccagtggttaacaggcaataaactttcttcggtgagaccaaccaatgtattagagatgatgaaggaatggaaaaataacccagaaagtgttgaggaaaacacaacagaagagaagaataagccgtccactgaagaaaagttgaaaagttaccaaccctggggaaatgtccctgatgccaattacacttcagatgaagaggaggaaaaacagtctactgcttatgaaaagcaatttcctgcaaccagtaaggacaactttgatatgtgcagttcaagtttcacatctagcaaactccttccagctgaaatcaagggagaaatggagaaaacccctgtgactccaagccaaggaacagcaaccaagtaccctgctaaatccggcgccctgtccagaaccaaaaagaaactctaaggttccctccagtgttggacagtacaaaaacaaagctgctcttgttagcactttgatgagggggtaggaggggaagaagacagccctatgctgagcttgtagccttttagctccacagagccccgccatgtgtttgcaccagcttaaaattgaagctgcttatctccaaagcagcataagctgcacatggcattaaaggacagccaccagtaggcttggcagtgggctgcagtggaaatcaactcaagatgtacacgaaggttttttaggggggcagataccttcaatttaaggctgtgggcacacttgctcatttttacttcaaattcttatgtttaggcacagctatttataggggaaaacaagaggccaaatatagtaatggaggtgccaaataattatgtgcactttgcactagaagactttgttagaaaattactaataaacttgccatacgtattacagcagaagtgcttcagtcattcacatgtgttcgtgagattttaggttgctatagattgtttaagacagcttattttaaatgtagaaaaataggagattttgtaactgcttgccattaacttgctgctaaattcccaatgtattgattaaatcaataaaaaacagatgttactcagc

SEQ ID NO: 180348 - DNA, 1991 bp, Homo sapiens
  Payload ID: 15522
  Gene Symbol: STK33
  Gene Name: serine/threonine kinase 33
  ENST ID: ENST00000358872
  CDS Start-End: 369-1352
gctgtttgtcctcgcgcggcccccgtccactgccctgcggttgctctgcgggctgaaaagtttctcccggtgcagaattccgggctcagcgacagcctgcgccgagtgtgcgcacctgtcggagacccgccagtccgccggccgcggaaatctatacctttggaagaatattgggaaaagggagctttggaatagtcattgaagcgacagacaaggaaacagaaacgaagtgggcaattaaaaaagtgaacaaagaaaaggctggaagctctgctgtgaagttacttgaacgagaggtgaacattctgaaaagtgtaaaacatgaacacatcatacatctggaacaagtatttgaaacgccaaagaaaatgtaccttgtgatggagctttgtgaggatggagaactcaaagaaattctggataggaaagggcatttctcagagaatgagacaaggtggatcattcaaagtctcgcatcagctatagcatatcttcacaataatgatattgtacatagagatctgaaactggaaaatataatggttaaaagcagtcttattgatgataacaatgaaataaacttaaacataaaggtgactgattttggcttagcggtgaagaagcaaagtaggagtgaagccatgctgcaggccacatgtgggactcctatctatatggcccctgaagttatcagtgcccacgactatagccagcagtgtgacatttggagcataggcgtcgtaatgtacatgttattacgtggagaaccaccctttttggcaagctcagaagagaagctttttgagttaataagaaaaggagaactacattttgaaaatgcagtctggaattccataagtgactgtgctaaaagtgttttgaaacaacttatgaaagtagatcctgctcacagaatcacagctaaggaactactagataaccagtggttaacaggcaataaactttcttcggtgagaccaaccaatgtattagagatgatgaaggaatggaaaaataacccagaaagtgttgaggaaaacacaacagaagagaagaataagccgtccactgaagaaaagttgaaaagttaccaaccctggggaaatgtccctgatgccaattacacttcagatgaagaggaggaaaaacagtctactgcttatgaaaagcaatttcctgcaaccagtaaggacaactttgatatgtgcagttcaagtttcacatctagcaaactccttccagctgaaatcaagggagaaatggagaaaacccctgtgactccaagccaaggaacagcaaccaagtaccctgctaaatccggcgccctgtccagaaccaaaaagaaactctaaggttccctccagtgttggacagtacaaaaacaaagctgctcttgttagcactttgatgagggggtaggaggggaagaagacagccctatgctgagcttgtagccttttagctccacagagccccgccatgtgtttgcaccagcttaaaattgaagctgcttatctccaaagcagcataagctgcacatggcattaaaggacagccaccagtaggcttggcagtgggctgcagtggaaatcaactcaagatgtacacgaaggttttttaggggggcagataccttcaatttaaggctgtgggcacacttgctcatttttacttcaaattcttatgtttaggcacagctatttataggggaaaacaagaggccaaatatagtaatggaggtgccaaataattatgtgcactttgcactagaagactttgttagaaaattactaataaacttgccatacgtattacagcagaagtgcttcagtcattcacatgtgttcgtgagattttaggttgctatagattgtttaagacagcttattttaaatgtagaaaaataggagattttgtaactgcttgccattaacttgctgctaaattcccaatgtattgattaaatcaataaaaaacagatgttactcagc

SEQ ID NO: 180349 - DNA, 2558 bp, Homo sapiens
  Payload ID: 15522
  Gene Symbol: STK33
  Gene Name: serine/threonine kinase 33
  Uniprot ID: Q9BYT3
  ENST ID: ENST00000396672
  CDS Start-End: 375-1919
gccggccggctggtaaccccccagcggagggaccgggccgagcccgcggacccctccgagtgtctcctggggcccagccgttggtaccccatttcccccgggtccggtatttggggtggtctctgtctgccccggttcatctccaccgtctcaccttcaccccatcttgggacgtgaaactttttgaaagtttagaagcgaacttactgtgggctctcacgtgtgaatatgtgtctagtgcatccttaacctgaggacttcaccagttcgaaattacagttttcaccatcaactaccttatcctttttggcctggttttcttcctcaaacagtggaaacatttttaaagttgcttttgttgcagagttaaacaaatggctgatagtggcttagataaaaaatccacaaaatgccccgactgttcatctgcttctcagaaagatgtactttgtgtatgttccagcaaaacaagggttcctccagttttggtggtggaaatgtcacagacatcaagcattggtagtgcagaatctttaatttcactggagagaaaaaaagaaaaaaatatcaacagagatataacctccaggaaagatttgccctcaagaacctcaaatgtagagagaaaagcatctcagcaacaatggggtcggggcaactttacagaaggaaaagttcctcacataaggattgagaatggagctgctattgaggaaatctatacctttggaagaatattgggaaaagggagctttggaatagtcattgaagcgacagacaaggaaacagaaacgaagtgggcaattaaaaaagtgaacaaagaaaaggctggaagctctgctgtgaagttacttgaacgagaggtgaacattctgaaaagtgtaaaacatgaacacatcatacatctggaacaagtatttgaaacgccaaagaaaatgtaccttgtgatggagctttgtgaggatggagaactcaaagaaattctggataggaaagggcatttctcagagaatgagacaaggtggatcattcaaagtctcgcatcagctatagcatatcttcacaataatgatattgtacatagagatctgaaactggaaaatataatggttaaaagcagtcttattgatgataacaatgaaataaacttaaacataaaggtgactgattttggcttagcggtgaagaagcaaagtaggagtgaagccatgctgcaggccacatgtgggactcctatctatatggcccctgaagttatcagtgcccacgactatagccagcagtgtgacatttggagcataggcgtcgtaatgtacatgttattacgtggagaaccaccctttttggcaagctcagaagagaagctttttgagttaataagaaaaggagaactacattttgaaaatgcagtctggaattccataagtgactgtgctaaaagtgttttgaaacaacttatgaaagtagatcctgctcacagaatcacagctaaggaactactagataaccagtggttaacaggcaataaactttcttcggtgagaccaaccaatgtattagagatgatgaaggaatggaaaaataacccagaaagtgttgaggaaaacacaacagaagagaagaataagccgtccactgaagaaaagttgaaaagttaccaaccctggggaaatgtccctgatgccaattacacttcagatgaagaggaggaaaaacagtctactgcttatgaaaagcaatttcctgcaaccagtaaggacaactttgatatgtgcagttcaagtttcacatctagcaaactccttccagctgaaatcaagggagaaatggagaaaacccctgtgactccaagccaaggaacagcaaccaagtaccctgctaaatccggcgccctgtccagaaccaaaaagaaactctaaggttccctccagtgttggacagtacaaaaacaaagctgctcttgttagcactttgatgagggggtaggaggggaagaagacagccctatgctgagcttgtagccttttagctccacagagccccgccatgtgtttgcaccagcttaaaattgaagctgcttatctccaaagcagcataagctgcacatggcattaaaggacagccaccagtaggcttggcagtgggctgcagtggaaatcaactcaagatgtacacgaaggttttttaggggggcagataccttcaatttaaggctgtgggcacacttgctcatttttacttcaaattcttatgtttaggcacagctatttataggggaaaacaagaggccaaatatagtaatggaggtgccaaataattatgtgcactttgcactagaagactttgttagaaaattactaataaacttgccatacgtattacagcagaagtgcttcagtcattcacatgtgttcgtgagattttaggttgctatagattgtttaagacagcttattttaaatgtagaaaaataggagattttgtaactgcttgccattaacttgctgctaaattcccaatgtattgattaaatcaataaaaaacagatgttactcagc

SEQ ID NO: 180350 - DNA, 946 bp, Homo sapiens
  Payload ID: 15522
  Gene Symbol: STK33
  Gene Name: serine/threonine kinase 33
  ENST ID: ENST00000418597
  CDS Start-End: 300-946
aggccgttgctatggcaacgcggtggaaaaacgggcctctgggtatctcgctgccggccggctggtaaccccccagcggagggaccgggccgagcccgcggacccctccgagtgtctcctggggcccagccgttggtaccccatttcccccgggtccggtatttggggtggtctctgtctgccccggttcatctccaccgtctcaccttcaccccatcttgggacgtgaaactttttgaaagtttagaagcgaacttactgtgggcaaaacaagggttcctccagttttggtggtggaaatgtcacagacatcaagcattggtagtgcagaatctttaatttcactggagagaaaaaaagaaaaaaatatcaacagagatataacctccaggaaagatttgccctcaagaacctcaaatgtagagagaaaagcatctcagcaacaatggggtcggggcaactttacagaaggaaaagttcctcacataaggattgagaatggagctgctattgaggaaatctatacctttggaagaatattgggaaaagggagctttggaatagtcattgaagcgacagacaaggaaacagaaacgaagtgggcaattaaaaaagtgaacaaagaaaaggctggaagctctgctgtgaagttacttgaacgagaggtgaacattctgaaaagtgtaaaacatgaacacatcatacatctggaacaagtatttgaaacgccaaagaaaatgtaccttgtgatggagctttgtgaggatggagaactcaaagaaattctggataggaaagggcatttctcagagaatgagacaaggtggatcattcaaagtctcgcatcagctatagcatatcttcacaataatgatattgtacatagagatctgaaactggaaaatataatggttaaaagcagtcttattgatgataacaatgaaat

SEQ ID NO: 180351 - DNA, 758 bp, Homo sapiens
  Payload ID: 15522
  Gene Symbol: STK33
  Gene Name: serine/threonine kinase 33
  ENST ID: ENST00000431279
  CDS Start-End: 568-758
tgggtatctcgctgccggccggctggtaaccccccagcggagggaccgggccgagcccgcggacccctccgagtgtctcctggggcccagccgttggtaccccatttcccccgggtccggtatttggggtggtctctgtctgccccggttcatctccaccgtctcaccttcaccccatcttgggacgtgaaactttttgaaagtttagaagcgaacttactgtggggcagggccactacttctcagcacatccggccttctggctcatctcctccctgcatctcactacgcccctccccactccagggcctgaagttaaatcattttggaaagtgatacaggagaggactctgctatgaaacttcctgagtgaaatgataagtggcatgaagaaaaacaaagcaagctctcacgtgtgaatatgtgtctagtgcatccttaacctgaggacttcaccagttcgaaattacagttttcaccatcaactaccttatcctttttggcctggttttcttcctcaaacagtggaaacatttttaaagttgcttttgttgcagagttaaacaaatggctgatagtggcttagataaaaaatccacaaaatgccccgactgttcatctgcttctcagaaagatgtactttgtgtatgttccagcaaaacaagggttcctccagttttggtggtggaaatgtcacagacatcaagcattggtagtgcagaatctttaatttcactggagagaaaaaaagaaaaaaa

SEQ ID NO: 180352 - DNA, 562 bp, Homo sapiens
  Payload ID: 15522
  Gene Symbol: STK33
  Gene Name: serine/threonine kinase 33
  ENST ID: ENST00000454443
  CDS Start-End: 450-562
gtgcagccggcacctcccggccaaccccgcggcttggagaaggggctttgcacccgccgccgctgtttgtcctcgcgcggcccccgtccactgccctgcggttgctctgcgggctgaaaagtttctcccggtgcagaattccgggctcagcgacagcctgcgccgagtgtgcgcacctgtcggagacccgccagtccgccggccgcggcagggccactacttctcagcacatccggccttctggctcatctcctccctgcatctcactacgcccctccccactccaggctctcacgtgtgaatatgtgtctagtgcatccttaacctgaggacttcaccagttcgaaattacagttttcaccatcaactaccttatcctttttggcctggttttcttcctcaaacagtggaaacatttttaaagttgcttttgttgcagagttaaacaaatggctgatagtggcttagataaaaaatccacaaaatgccccgactgttcatctgcttctcagaaagatgtactttgtgtatgttccagcaaaacaagggttcctccagtttt

SEQ ID NO: 180353 - DNA, 709 bp, Homo sapiens
  Payload ID: 15522
  Gene Symbol: STK33
  Gene Name: serine/threonine kinase 33
  ENST ID: ENST00000457885
  CDS Start-End: 196-709
gcctgaagttaaatcattttggaaagtgatacagctctcacgtgtgaatatgtgtctagtgcatccttaacctgaggacttcaccagttcgaaattacagttttcaccatcaactaccttatcctttttggcctggttttcttcctcaaacagtggaaacatttttaaagttgcttttgttgcagagttaaacaaatggctgatagtggcttagataaaaaatccacaaaatgccccgactgttcatctgcttctcagaaagatgtactttgtgtatgttccagcaaaacaagggttcctccagttttggtggtggaaatgtcacagacatcaagcattggtagtgcagaatctttaatttcactggagagaaaaaaagaaaaaaatatcaacagagatataacctccaggaaagatttgccctcaagaacctcaaatgtagagagaaaagcatctcagcaacaatggggtcggggcaactttacagaaggaaaagttcctcacataaggattgagaatggagctgctattgaggaaatctatacctttggaagaatattgggaaaagggagctttggaatagtcattgaagcgacagacaaggaaacagaaacgaagtgggcaattaaaaaagtgaacaaagaaaaggctggaagctctgctgtgaagttacttgaacgagaggtgaacattctgaaaagtgtaaaac

SEQ ID NO: 180354 - DNA, 767 bp, Homo sapiens
  Payload ID: 15522
  Gene Symbol: STK33
  Gene Name: serine/threonine kinase 33
  ENST ID: ENST00000422559
  CDS Start-End: 194-767
ggtgcagaattccgggctcagcgacagcctgcgccgagtgtgcgcacctgtcggagacccgccagtccgccggccgcggcagggccactacttctcagcacatccggccttctggctcatctcctccctgcatctcactacgcccctccccactccaggcaaaacaagggttcctccagttttggtggtggaaatgtcacagacatcaagcattggtagtgcagaatctttaatttcactggagagaaaaaaagaaaaaaatatcaacagagatataacctccaggaaagatttgccctcaagaacctcaaatgtagagagaaaagcatctcagcaacaatggggtcggggcaactttacagaaggaaaagttcctcacataaggattgagaatggagctgctattgaggaaatctatacctttggaagaatattgggaaaagggagctttggaatagtcattgaagcgacagacaaggaaacagaaacgaagtgggcaattaaaaaagtgaacaaagaaaaggctggaagctctgctgtgaagttacttgaacgagaggtgaacattctgaaaagtgtaaaacatgaacacatcatacatctggaacaagtatttgaaacgccaaagaaaatgtaccttgtgatggagctttgtgaggatggagaactcaaagaaattctggataggaaagggcatttctcagagaatgagacaaggtggatcattcaaagtctcgcatcagctatagcatatcttcacaataatg

SEQ ID NO: 180355 - DNA, 1243 bp, Homo sapiens
  Payload ID: 15522
  Gene Symbol: STK33
  Gene Name: serine/threonine kinase 33
  ENST ID: ENST00000444064
  CDS Start-End: 1-612
gttaaaagcagtcttattgatgataacaatgaaataaacttaaacataaaggtgactgattttggcttagcggtgaagaagcaaagtaggagtgaagccatgctgcaggccacatgtgggactcctatctatatggcccctgaagttatcagtgcccacgactatagccagcagtgtgacatttggagcataggcgtcgtaatgtacatgttattacgtggagaaccaccctttttggcaagctcagaagagaagctttttgagttaataagaaaaggagaactacattttgaaaatgcagtctggaattccataagtgactgtgctaaaagtgttttgaaacaacttatgaaagtagatcctgctcacagaatcacagctaaggaactactagataaccagtggttaacatctactgcttatgaaaagcaatttcctgcaaccagtaaggacaactttgatatgtgcagttcaagtttcacatctagcaaactccttccagctgaaatcaagggagaaatggagaaaacccctgtgactccaagccaaggaacagcaaccaagtaccctgctaaatccggcgccctgtccagaaccaaaaagaaactctaaggttccctccagtgttggacagtacaaaaacaaagctgctcttgttagcactttgatgagggggtaggaggggaagaagacagccctatgctgagcttgtagccttttagctccacagagccccgccatgtgtttgcaccagcttaaaattgaagctgcttatctccaaagcagcataagctgcacatggcattaaaggacagccaccagtaggcttggcagtgggctgcagtggaaatcaactcaagatgtacacgaaggttttttaggggggcagataccttcaatttaaggctgtgggcacacttgctcatttttacttcaaattcttatgtttaggcacagctatttataggggaaaacaagaggccaaatatagtaatggaggtgccaaataattatgtgcactttgcactagaagactttgttagaaaattactaataaacttgccatacgtattacagcagaagtgcttcagtcattcacatgtgttcgtgagattttaggttgctatagattgtttaagacagcttattttaaatgtagaaaaataggagattttgtaactgcttgccattaacttgctgctaaattcccaatgtattgattaaatcaataaaaaacagatgt

SEQ ID NO: 180356 - DNA, 3103 bp, Homo sapiens
  Payload ID: 15522
  Gene Symbol: STK33
  Gene Name: serine/threonine kinase 33
  Uniprot ID: Q9BYT3
  ENST ID: ENST00000447869
  CDS Start-End: 920-2464
atgtactcccaattacttctggaagtttctcaaagtactcctttatatgtactgcagagtgtatttttcttcctcctcaactgagatctttccaacttgccaccatgcagctgccaatggtcctagttaagtaaaatgctgccatacctattttagactcagggaaaaatagcacccactcatttttatttttgctcaatataaaaatgaggatacttatgaggatacttaaacttttaggattagctagttttctaaaaatcgaattattcactcctttgtaaagtatgtaataggaatttgctctaataatcaatagattaaggtttaaaatttgaaaccatagtaatgtatgtttaacaccaatattttaagcctttttaaaaaccacaacccacattaagaaatacatttcatactgtgatcaagtacacacgcacacacacactctatacatatatgtctgtccaattaaaagtttcacagaaatttccaaggaggtatgctaaatattatctctttgattctactttatttttaaaaagtggtatcaacccacaaaatggatttcataacccactacgcagtttgataagatgctgttttagaccatgcttttcaccagttttgtggtcctattttgtccttttcatgtctatacaggatgcttctagtgctagttgctagcttttctctgatttccaggatggtaataggttaagaatttctctaaatggttatttcttttctttctgcagctctcacgtgtgaatatgtgtctagtgcatccttaacctgaggacttcaccagttcgaaattacagttttcaccatcaactaccttatcctttttggcctggttttcttcctcaaacagtggaaacatttttaaagttgcttttgttgcagagttaaacaaatggctgatagtggcttagataaaaaatccacaaaatgccccgactgttcatctgcttctcagaaagatgtactttgtgtatgttccagcaaaacaagggttcctccagttttggtggtggaaatgtcacagacatcaagcattggtagtgcagaatctttaatttcactggagagaaaaaaagaaaaaaatatcaacagagatataacctccaggaaagatttgccctcaagaacctcaaatgtagagagaaaagcatctcagcaacaatggggtcggggcaactttacagaaggaaaagttcctcacataaggattgagaatggagctgctattgaggaaatctatacctttggaagaatattgggaaaagggagctttggaatagtcattgaagcgacagacaaggaaacagaaacgaagtgggcaattaaaaaagtgaacaaagaaaaggctggaagctctgctgtgaagttacttgaacgagaggtgaacattctgaaaagtgtaaaacatgaacacatcatacatctggaacaagtatttgaaacgccaaagaaaatgtaccttgtgatggagctttgtgaggatggagaactcaaagaaattctggataggaaagggcatttctcagagaatgagacaaggtggatcattcaaagtctcgcatcagctatagcatatcttcacaataatgatattgtacatagagatctgaaactggaaaatataatggttaaaagcagtcttattgatgataacaatgaaataaacttaaacataaaggtgactgattttggcttagcggtgaagaagcaaagtaggagtgaagccatgctgcaggccacatgtgggactcctatctatatggcccctgaagttatcagtgcccacgactatagccagcagtgtgacatttggagcataggcgtcgtaatgtacatgttattacgtggagaaccaccctttttggcaagctcagaagagaagctttttgagttaataagaaaaggagaactacattttgaaaatgcagtctggaattccataagtgactgtgctaaaagtgttttgaaacaacttatgaaagtagatcctgctcacagaatcacagctaaggaactactagataaccagtggttaacaggcaataaactttcttcggtgagaccaaccaatgtattagagatgatgaaggaatggaaaaataacccagaaagtgttgaggaaaacacaacagaagagaagaataagccgtccactgaagaaaagttgaaaagttaccaaccctggggaaatgtccctgatgccaattacacttcagatgaagaggaggaaaaacagtctactgcttatgaaaagcaatttcctgcaaccagtaaggacaactttgatatgtgcagttcaagtttcacatctagcaaactccttccagctgaaatcaagggagaaatggagaaaacccctgtgactccaagccaaggaacagcaaccaagtaccctgctaaatccggcgccctgtccagaaccaaaaagaaactctaaggttccctccagtgttggacagtacaaaaacaaagctgctcttgttagcactttgatgagggggtaggaggggaagaagacagccctatgctgagcttgtagccttttagctccacagagccccgccatgtgtttgcaccagcttaaaattgaagctgcttatctccaaagcagcataagctgcacatggcattaaaggacagccaccagtaggcttggcagtgggctgcagtggaaatcaactcaagatgtacacgaaggttttttaggggggcagataccttcaatttaaggctgtgggcacacttgctcatttttacttcaaattcttatgtttaggcacagctatttataggggaaaacaagaggccaaatatagtaatggaggtgccaaataattatgtgcactttgcactagaagactttgttagaaaattactaataaacttgccatacgtattacagcagaagtgcttcagtcattcacatgtgttcgtgagattttaggttgctatagattgtttaagacagcttattttaaatgtagaaaaataggagattttgtaactgcttgccattaacttgctgctaaattcccaatgtattgattaaatcaataaaaaacagatgttactcagc

SEQ ID NO: 180357 - DNA, 582 bp, Homo sapiens
  Payload ID: 15522
  Gene Symbol: STK33
  Gene Name: serine/threonine kinase 33
  ENST ID: ENST00000526360
  CDS Start-End: 496-582
acacaggagggatgggtcggcagagtttgtaagtttggatgggtaataacttaacccaggggattgttggtggaggaacgagggagtcctgtagctagagataggcagaagcagacaggatatttgggttctaggtaagcaaggtgcatctaagacctaagaagtcttcagaggcagcagagacgaacaaatgaacgtgaaggcagggccactacttctcagcacatccggccttctggctcatctcctccctgcatctcactacgcccctccccactccagggtaaattccaataatgctgctctgttccagatggagttcatgttgactgagctctcacgtgtgaatatgtgtctagtgcatccttaacctgaggacttcaccagttcgaaattacagttttcaccatcaactaccttatcctttttggcctggttttcttcctcaaacagtggaaacatttttaaagttgcttttgttgcagagttaaacaaatggctgatagtggcttagataaaaaatccacaaaatgccccgactgttcatctgcttctcagaaagatgtactttgtgtatgttcc

SEQ ID NO: 180358 - DNA, 1895 bp, Homo sapiens
  Payload ID: 15522
  Gene Symbol: STK33
  Gene Name: serine/threonine kinase 33
  ENST ID: ENST00000534493
  CDS Start-End: 151-1572
agaattccgggctcagcgacagcctgcgccgagtgtgcgcacctgtcggagacccgccagtccgccggccgcgatggggagccagataaacgttacataactagaaagtggcagagcaaaacaagggttcctccagttttggtggtggaaatgtcacagacatcaagcattggtagtgcagaatctttaatttcactggagagaaaaaaagaaaaaaatatcaacagagatataacctccaggaaagatttgccctcaagaacctcaaatgtagagagaaaagcatctcagcaacaatggggtcggggcaactttacagaaggaaaagttcctcacataaggattgagaatggagctgctattgaggaaatctatacctttggaagaatattgggaaaagggagctttggaatagtcattgaagcgacagacaaggaaacagaaacgaagtgggcaattaaaaaagtgaacaaagaaaaggctggaagctctgctgtgaagttacttgaacgagaggtgaacattctgaaaagtgtaaaacatgaacacatcatacatctggaacaagtatttgaaacgccaaagaaaatgtaccttgtgatggagctttgtgaggatggagaactcaaagaaattctggataggaaagggcatttctcagagaatgagacaaggtggatcattcaaagtctcgcatcagctatagcatatcttcacaataatgatattgtacatagagatctgaaactggaaaatataatggttaaaagcagtcttattgatgataacaatgaaataaacttaaacataaaggtgactgattttggcttagcggtgaagaagcaaagtaggagtgaagccatgctgcaggccacatgtgggactcctatctatatggcccctgaagttatcagtgcccacgactatagccagcagtgtgacatttggagcataggcgtcgtaatgtacatgttattacgtggagaaccaccctttttggcaagctcagaagagaagctttttgagttaataagaaaaggagaactacattttgaaaatgcagtctggaattccataagtgactgtgctaaaagtgttttgaaacaacttatgaaagtagatcctgctcacagaatcacagctaaggaactactagataaccagtggttaacaggcaataaactttcttcggtgagaccaaccaatgtattagagatgatgaaggaatggaaaaataacccagaaagtgttgaggaaaacacaacagaagagaagaataagccgtccactgaagaaaagttgaaaagttaccaaccctggggaaatgtccctgatgccaattacacttcagatgaagaggaggaaaaacagtctactgcttatgaaaagcaatttcctgcaaccagtaaggacaactttgatatgtgcagttcaagtttcacatctagcaaactccttccagctgaaatcaagggagaaatggagaaaacccctgtgactccaagccaaggaacagcaaccaagtaccctgctaaatccggcgccctgtccagaaccaaaaagaaactctaaggttccctccagtgttggacagtacaaaaacaaagctgctcttgttagcactttgatgagggggtaggaggggaagaagacagccctatgctgagcttgtagccttttagctccacagagccccgccatgtgtttgcaccagcttaaaattgaagctgcttatctccaaagcagcataagctgcacatggcattaaaggacagccaccagtaggcttggcagtgggctgcagtggaaatcaactcaagatgtacacgaaggttttttaggggggcagataccttcaatttaaggctgtgggcacacttgctcatttttacttc

SEQ ID NO: 180359 - DNA, 635 bp, Homo sapiens
  Payload ID: 15522
  Gene Symbol: STK33
  Gene Name: serine/threonine kinase 33
  ENST ID: ENST00000524760
  CDS Start-End: 1-635
gcagaatctttaatttcactggagagaaaaaaagaaaaaaatatcaacagagatataacctccaggaaagatttgccctcaagaacctcaaatgtagagagaaaagcatctcagcaacaatggggtcggggcaactttacagaaggaaaagttcctcacataaggattgagaatggagctgctattgaggctggaagctctgctgtgaagttacttgaacgagaggtgaacattctgaaaagtgtaaaacatgaacacatcatacatctggaacaagtatttgaaacgccaaagaaaatgtaccttgtgatggagctttgtgaggatggagaactcaaagaaattctggataggaaagggcatttctcagagaatgagacaaggtggatcattcaaagtctcgcatcagctatagcatatcttcacaataatgatattgtacatagagatctgaaactggaaaatataatggttaaaagcagtcttattgatgataacaatgaaataaacttaaacataaaggtgactgattttggcttagcggtgaagaagcaaagtaggagtgaagccatgctgcaggccacatgtgggactcctatctatatggcccctgaagttatcagtgcccacgacta

SEQ ID NO: 180360 - DNA, 6685 bp, Homo sapiens
  Payload ID: 15523
  Gene Symbol: STK35
  Gene Name: serine/threonine kinase 35
  Uniprot ID: Q8TDR2
  ENST ID: ENST00000381482
  CDS Start-End: 272-1876
gacaatcacccagtcagtatttattaggcgcctactgcggacggttggtcttcacgcagatcaggcgagaagggatagtgatgcgcgggccgctgcggagacccggagcccgccgcggatcacgggaatttcgcgcctattttttgttggctgggtgttctcgccagtgattgggtcccggcaaggcgtgccggtgcgctcggctgcggctgctccgtcgacctttgcaggaccgggcggtgcagggctcactcggctggcgtcccgggggatgggccaccaggagtctccgctggcccgggcgccggcgggaggtgcagcttatgtaaagaggttatgtaaagggctcagctggcgcgaacacgtggaaagccacgggagcctaggagcccaggcttccccagcgagcgccgcggcagcagaaggatccgctacacgccgggctcgggccgccacctcccgcgctgctcggtcccggaggcagcccgggcccggagcggaccatccccaggcaggggctccaggggggaaacgggccgcccggaagtggaggtgcgcgggccaggtcacaatccaaggtccggctcctccgcgtcccagggccggacggagggatgaggcagggggggcccgggcagcgccgttgctgctccccccgccgcccgcagccatggaaacggggaaggacggcgcccgcagaggtacacaaagcccggagcggaaaaggcgaagcccagtgccgcgggcgcccagcacgaagctgaggccggcggcggcggcccgggccatggatccggtggcggccgaggccccgggcgaggccttcctggcgcggcgacggcctgagggcggtggcgggtccgcgcggccgcgttacagcctgttggcggagatcgggcgcggcagctacggcgtggtttatgaggcagtggccgggcgcagcggggcccgggtggcggtcaagaagatccgctgcgacgcccccgagaacgtggagctggcgctggctgaattctgggccctcaccagcctcaagcggcgccaccagaacgtcgtgcagtttgaggagtgcgtcctgcagcgcaatgggttagcccagcgcatgagtcacggcaacaagagctcgcagctttacctgcgcctggtggagacctcgctgaaaggagaaaggatcctgggttatgctgaggagccctgctatctctggtttgtcatggagttctgtgaaggtggagacctgaatcagtatgtcctgtcccggaggccagacccagccaccaacaaaagtttcatgctacagctgacgagcgccattgccttcctgcacaaaaaccatattgtgcacagggacctgaagccagacaacatcctcatcacagagcggtctggcacccccatcctcaaagtggccgactttggactaagcaaggtctgtgctgggctggcaccccgaggcaaagagggcaatcaagacaacaaaaatgtgaatgtgaataagtactggctgtcctcagcctgcggttcggacttctacatggctcctgaagtctgggagggacactacacagccaaggcggacatctttgccctgggcattatcatctgggcaatgatagaaagaatcacttttattgactctgagaccaagaaggagctcctggggacctacattaaacaggggactgagatcgtccctgttggtgaggcgctgctagaaaacccaaagatggagttgcacatcccccaaaaacgcaggacttccatgtctgaggggatcaagcagctcttgaaagatatgttagctgctaacccacaggaccggcctgatgcctttgaacttgaaaccagaatggaccaggtcacatgtgctgcttaaaattcagggctaagcattttgggtgattttaaactaggtcgattcctcgggacccacagtctcaccacgtctcctccagaggacggcagagggtacaggtggtggcctggccggttggcgatctcccgacagctggatccggcaatgtgaagcttttgtttgggtttccccgcttctttttagttttgctttatttttttccttttcttttcttttttttttttcctctttcctttttttaaatttaaaccattgagacttcagaagagcaggacacaatgctgtggacaggcaccaatttctttaaagaaattcaatgtgggcaaggcatatgtgtaaatttcacttttactttttataaggggttagggagctatttttggttttgtccttcactttccctctgtcttccttctttatacttttctcagttctacttatgacacctcacttccctagagaaggcctgcctccccatagggaatctgggggtttcttctggaacggggcgtgaggacacaaggaggcctctgggccacgcctccctaccagatgcaggaactcctggactccttggtgggctggccctggctagcccttgggcctcggagatgatcagaggtgaagaaccgcctggaagaggaaggccagggtttggccaggagaactaagaaggtctcaactccaggctttgttgtgtttaagctattgagagccccaggccacaccaggacttgcagtggtgggaatccattcctcttctgccctgtgttgcagggaactaggaggtaagggtggagggcgaccatctcgctcttgctggcggtggagcagccatccctgcctttctgttgggaaaaactgttgtgccaaactcttgtgtggaacacagctgggtcttcagcaggcatctgtcactgccgtgaggtcagcgcttctcacctaactgcctcctggattgtcatcttcccagatgtgtcccatagtgtccaggtgtcacagagacggcctgaggccctaagatctggttgtgactttgccatgataacagggtgtcctgaactggctgccgttgtcgtgttctcacagtgaagggcgtgccctgtgtgccggggtccatggtgtcatatgcagtgacacacactgtcaagcgccatttccctcacccctggagacttactgttaggtgcctgccctcagtatagacgtatccaatgggaaaacagcggacctgcccagagcagggaggtgtcgtggaactgggtagaccccctgcagcgttaggggcccatttgtgggctcgccaccttcaggcttccccagccatgacacttcagccccgccacccatgcctgtctgctgcagccatccttgcactctccagcgacactctcgcacctccctaggggaagcttccctccccctgggctgctgctctgagcccatctgttctccccctgcaagaaggggcaatgctcttgtgttgtccctctgtctggacgcgcctggccactccgaaggcttttcaccccattatggccaaatagtatagggccactggggagggggaagggaatcattttgtgttcatttttgttttctgtttcacctaaaccagcataggattgataggggagacggttggcgggcatttccgtttctatgtgaccaaggcagcaggggcttttacctgctaagcggcaatcctttggccctgagaatttgggagagaacagtgcatcaggccaggctcagcaatatgtttgctcacattctttcagccttctgtcacccccctcaacaccaaactttcttccttgtgagcagaaggttggctgctgttagcaggatcccacagtgataaccaggcccttcccttcctaagccaaaacccattgtgactgcctgtctctcctgtctctgacttctcaggcagcctcctgagtgcactgagttgtatccgagagggtgggaacagcagcatcccctaattgcagtacacggttccttttccgcccgccaccctgcctttccttgggggcagctgtctctctgtacatgagcaaatgggcaaaaacagtccccaaacccagcacccccctctccctggctgcagcccacactgtaacatccctagtgaggctccagcctaatgagccccttattttcttttttttccctccccaggtctagtagctctaactaaaaagttcttggagccatcgtgctccccctttgttatttttcttgctatcagagtagcaagaaacagcacccctgtaggtgacaggtgggcagcctggtaggggtcgccagcctccatgccccctcatcttccagttcttgcttagtggcacgacctctttccatagcataaatgcaggccagcgttttagccccaagtgcctgcccttgcttcttacccctcccctgctttctcaaacacttgcccacctcaggcactcagcgggctccgccgtggtgagagaactggccgtggctcagccccgggtagcacctgtagtttcagtgccactctccactgtccccttgtggaccagcttccactcactgtcacgtcccccctcctgcgtcttcactgggtctcaggctgccagcagctctctggtgcatcgtctcaacaccaccaagtttgtaggacctgcccaagttctagtagtattcaaaacttcaaacggcagtcatttgttctcctcggctctgtggcaaggatagccctttggagggggactcttgacctcggctgttagggatctgaacttggttttcccgtcagaagaatcagcaggacagatcgtagtgccttattccattgtcctcccctggccaggcctcctggctcagctggaagtgcatggcttctttctccctatctgtgtcctctgtcacttgctctttcactctctctctcattcccagagagccacgggggagggatcaccctcacccccaacaccctcttcctgagggctgtagccaggtccgcatctccccaccaccaccagggcactcactcgcagctatagcccaggacagaaaaactgtgctttggacaggtgcacactctctgcctcttacctctagccaggaggatgcctcagtctgttcattcgagactggccccgtctgaaccttctctgggcactggggactaaggttgcaggccttagcctcgtctcgtcccagaggcattggatcaggagaatgggaatttttttcctcccacctggacatagtttgcccctgtggctgcctttctgagggagtatactaaatgtttacttaagaaacaccctgtttacagccagaggagaaacacccaacactgagtggagatttgactctggacagggcctggcctccttagtggcactgccggggggccccagagcgaatgagggcagagatgcccggggcaggggcaaacgccctccgctccctctgctcccaaccctgtggtgctaggaccactccccgccttccctacggcctcctcgccctgcacattccccacctccacattcccctcctccaagatctcagctccttaacatatcagttgtctcctagcctagaaaaccagtgtttggagcaataagatgattatttttgcttgaatctttttctaagagaaggaaaagagctggcattgtgggaattttctttttatgctgttagctgtttaccttcttagaagacatcctaataggatggatgtctgggttttagccttggggtatcttttggaaacttagaaaagcaggagtcaggctgccaccccctaaggagggaccctaacgttctgcccttgcctggttccatatggctccttccagccctgcccaccaagtgcagctcccactttccatcctgcccatacgcccctcttcccccgacatctgggggcgctggtggcacttactctaggttggtctcagactatccctccccttggctggttttccctcctaggcctgtctggcagcccccagacagacgtagctcctgggagtctcggccctggcaaccttggaagagccaagctgacattgtttagctcttcaggccactgggttttggaggcagaagtccagagatactggctctgccaagctgtcgtactgggctgtggcacagccttcgagacaacacgggtgtatctctgatcctgccctacctaggcttcaaggggcttctgtctggagaaatgccctcaaagggtaaccagtaggtgtggcattgaattggccagtgttagcatctacagccatcaccgagatgagtccactgccgttgcctgcccgagggccccctaaggttatagacggtatcagcagggaggccgtcccgctggttttctaggagagcccacaggaggaagggagcctcttcaggggcactggaatcttttgtgccaggggcttcttttcatcagagccggggagtacattgcagtgacttcttaaacatttgtgtgggacagacgagcgtgagggaggttttaagccaggcacaaagttagtttccaatactagttaataaatctatttttcttcatttcctttttttgcacagaagctggtaatctaggacctacgtgtgaacaactttatatgaatattttttgtacttggtttacttgggttggtatgatacattatatttaagttccttgaacactgtggatcccctaatgtgtatgaatgactgaggctttgtaaattaagggacgtttgtgtgaataaagttatttgatggggtcaaagaagccatatgtgatttgaaaaa

SEQ ID NO: 180361 - DNA, 1595 bp, Homo sapiens
  Payload ID: 15523
  Gene Symbol: STK35
  Gene Name: serine/threonine kinase 35
  ENST ID: ENST00000493263
  CDS Start-End: 1-1188
ggcgcccgcagaggtacacaaagcccggagcggaaaaggcgaagcccagtgccgcgggcgcccagcacgaagctgaggccggcggcggcggcccgggccatggatccggtggcggccgaggccccgggcgaggccttcctggcgcggcgacggcctgagggcggtggcgggtccgcgcggccgcgttacagcctgttggcggagatcgggcgcggcagctacggcgtggtttatgaggcagtggccgggcgcagcggggcccgggtggcggtcaagaagatccgctgcgacgcccccgagaacgtggagctggcgctggctgaattctgggccctcaccagcctcaagcggcgccaccagaacgtcgtgcagtttgaggagtgcgtcctgcagcgcaatgggttagcccagcgcatgagtcacggcaacaagagctcgcagctttacctgcgcctggtggagacctcgctgaaaggagaaaggatcctgggttatgctgaggagccctgctatctctggtttgtcatggagttctgtgaaggtggagacctgaatcagtatgtcctgtcccggaggccagacccagccaccaacaaaagtttcatgctacagctgacgagcgccattgccttcctgcacaaaaaccatattgtgcacagggacctgaagccagacaacatcctcatcacagagcggtctggcacccccatcctcaaagtggccgactttggactaagcaaggtctgtgctgggctggcaccccgaggcaaagagggcaatcaagacaacaaaaatgtgaatgtgaataagtactggctgtcctcagcctgcggttcggacttctacatggctcctgaagtctgggagggacactacacagccaaggcggacatctttgccctgggcattatcatctgggcaatgatagaaagaatcacttttattgactctgagaccaagaaggagctcctggggacctacattaaacaggggactgagatcgtccctgttggtgaggcgctgctagaaaacccaaagatggagttgcacatcccccaaaaacgcaggacttccatgtctgaggggatcaagcagctcttgaaagatatgttagctgctaacccacaggaccggcctgatgcctttgaacttgaaaccagaatggaccaggtcacatgtgctgcttaaaattcagggctaagcattttgggtgattttaaactagcagtgaccagaggtgctgttggacttcatggagctcatggcctcgagtgacatgtgtgggagtggacatttggacacagaggaggcatcaccccagtcctaggcaagggtctgctcccatctgtcatgggaaggaggtcagatgagaccacagctaactttccttctggctccaacactctgtgttccaggattctccagaatggaacagtctgaccttggggattctagcaggatcaagtcaggtccccttcatcatcccctctctccctctcatgccccgggaggcttccactcctgcagcatcaggcactgggaggcagagtccagctccacagtcatttttaacatattaaagttctggacagaaa

SEQ ID NO: 180362 - DNA, 4933 bp, Homo sapiens
  Payload ID: 15524
  Gene Symbol: STK36
  Gene Name: serine/threonine kinase 36
  Uniprot ID: Q9NRP7
  ENST ID: ENST00000295709
  CDS Start-End: 280-4227
aaaactaagaggggtgggcagctagcgtcgtttctaggcaaccgcagactccgggtccttagccgggcctgatggccctgaggcagttcggatgtgtcccaggaagtgcccatgtgtggtccgccgtccattccacacctctgagcgcctttgtcctctgaacttctcaccagttctagcgagtaaaattgcgtcccagatgttgtggaactgtccctggatctatagctcttcaccgtctctactttcttccttctaagagatcctgaaacctctgtcatggaaaagtaccacgtgttggagatgattggagaaggctcttttgggagggtgtacaagggtcgaagaaaatacagtgctcaggtcgtggccctgaagttcatcccaaaattggggcgctcagagaaggagctgaggaatttgcaacgagagattgaaataatgcggggtctgcggcatcccaacattgtgcatatgcttgacagctttgaaactgataaagaggtggtggtggtgacagactatgctgagggagagctctttcagatcctagaagatgacggaaaacttcctgaagaccaggttcaggccattgctgcccagttggtgtcagccctgtactatctgcattcccaccgcatcctacaccgagatatgaagcctcagaacatcctcctcgccaagggtggtggcatcaagctctgtgactttggatttgcccgggctatgagcaccaatacaatggtgctgacatccatcaaaggcacaccactctatatgtctccagagctggtggaggagcgaccatacgaccacacagcggacctctggtctgttggctgcatactatatgaactggcagtaggcacccctcccttctatgctacaagcatctttcagctggtcagcctcattctcaaggaccctgtgcgctggccctcaaccatcagtccctgctttaagaacttcctgcagggactgctcaccaaagacccacggcagcgactgtcctggccagacctcttatatcacccctttattgctggtcatgtcaccataataactgagccagcaggcccagatttggggaccccattcaccagccgcctacccccagaacttcaggtcctaaaggacgaacaggcccatcggttggcccccaagggtaatcagtctcgcatcttgactcaggcctataaacgcatggctgaggaggccatgcagaagaaacatcagaacacaggacctgcccttgagcaagaggacaagaccagcaaggtggctcctggcacagcccctctgcccagactcggggccactcctcaggaatcaagcctcctggccgggatcttagcctcagaattgaagagcagctgggctaaatcagggactggagaggtgccctctgcacctcgggaaaaccggaccaccccagattgtgaacgagcattcccagaggagaggccagaggtgctgggccagcggagcactgatgtagtggacctggaaaatgaggagccagacagtgacaatgagtggcagcacctgctagagaccactgagcctgtgcctattcaactgaaggctcctctcaccttgctgtgtaatcctgacttctgccagcgcatccagagtcagctgcatgaagctggagggcagatcctgaaaggcatcttggagggtgcttcccacatcctgcctgcattccgggtcctgagcagtcttctctccagctgcagtgattctgttgccttgtattccttctgccgggaggcagggcttcctgggctgctgctgagtctactcaggcacagtcaggagagcaacagcctccagcagcaatcttggtatgggaccttcttacaggacctgatggctgtgattcaggcctactttgcctgtaccttcaatctggagaggagccagacaagtgacagcctgcaggtgtttcaggaggctgccaacctttttctggacctgttggggaaactgctggcccaaccagatgactctgagcagactttgcggagggacagccttatgtgctttactgtcctgtgcgaagccatggatgggaacagccgggccatctccaaagccttttactccagcttgctgacgacacagcaggttgtcttggatgggctccttcatggcttgacagttccacagctccctgtccacactccccaaggagccccgcaagtgagccagccactgcgagagcagagtgaggatatacctggagccatttcctctgccctggcagccatatgcactgctcctgtgggactgcccgactgctgggatgccaaggagcaggtctgttggcatttggcaaatcagctaactgaagacagcagccagctcaggccatccctcatctctggcctgcagcatcccatcctgtgcctgcaccttctcaaggttctatactcctgctgccttgtcagtgagggcctgtgccgtcttctggggcaggagcccctggccttggaatccctgtttatgttgattcagggcaaggtaaaagtagtagattgggaagagtctactgaagtgacactctacttcctctcccttcttgtctttcggctccaaaacctgccttgtggaatggagaagctaggcagtgacgttgctactctctttacccattcgcatgtcgtctctcttgtgagtgcagcagcctgtctattgggacagcttggtcagcaaggggtgacctttgacctccagcccatggaatggatggctgcagccacacatgccttgtctgcccctgcagaggttcggttgactccaccaggtagttgtggattctatgatggcctccttatccttctgttgcagctcctcactgagcaggggaaggctagcctaatcagggatatgtccagttcagaaatgtggaccgttttgtggcaccgcttctccatggtcctgaggctccccgaggaggcatctgcacaggaaggggagctttcgctatccagtccaccaagccctgagccagactggacactgatttctccccagggcatggcagccctgctgagcctggccatggccacctttacccaggagccccagttatgcctgagctgcctgtcccagcatggaagtatcctcatgtccatcctgaagcatctgctttgccccagcttcctgaatcaactgcgccaggcgcctcatgggtctgagtttctccctgtcgtggtgctctctgtctgccagctcctttgcttcccctttgcgctggacatggatgctgacctccttataggtgtcttggccgacctcagggactcagaagttgcagcccatctgctgcaggtctgctgctaccatcttccgttgatgcaagtggagctgcccatcagccttctcacacgcctggccctcatggatcccacctctctcaaccagtttgtgaacacagtgtctgcctcccctagaaccatcgtctcgtttctctcagttgccctcctgagtgaccagccactgttgacctccgaccttctctctctgctggcccatactgccagggtcctgtctcccagccacttgtcctttatccaagagcttctggctggctctgatgaatcctatcggcccctgcgcagcctcctgggccacccagagaattctgtgcgggcacacacttataggctcctgggacacttgctccaacacagcatggccctgcgtggggcactgcagagccagtctggactgctcagccttctgctgcttgggcttggagacaaggatcctgttgtgcggtgcagtgccagctttgctgtgggcaatgcagcctaccaggctggtcctctgggacctgccctggcagctgcagtgcccagtatgacccagctgcttggagatcctcaggctggtatccggcgcaatgttgcatcagctctgggcaacttgggacctgaaggtttgggagaggagctgttacagtgcgaagtaccccagcggctcctagaaatggcatgtggagacccccagccaaatgtgaaggaggctgccctcattgccctccggagcctgcaacaggagcctggcatccatcaggtactggtgtccctgggtgccagtgagaaactatccttgctctctctggggaatcagtcactgccacacagcagtcctaggcctgcctctgccaaacactgcaggaaactcattcacctcctgaggccagcccatagcatgtgattccagattcctgcggtccagcctccaactttggttgccagctctttcttattctactacacaagccgccaactcaactgagagctaaagagactagaaaagagataagctgccaactcaactgagaacaagaaactagaagagatttatatataaagcttcttccttctcccagatgcaggatgttttcaaccagtaaattttattgctgttggtgccagagaagagtcctttcttctctacatccaggggccttttctccaataatgtgcctttaactctagggacctgcctcacggaccttagggaaaaacctcaacctgaaagatctcttcctttctggagctcctttaatcttcccagcaggtttttgccttagacgtgctggccccaggacagtgatgaagacagagcctgtctcagctctaggctgtggggatcaatgccatcagtccctgttattgagggattatcccttagccaacattcctatctgtgggtgggcgtggagagtgtatctttttttggggtgtgtgtgtatatgtgtgtgtgtatgtgtgtgtgtgtttaatagttctgtttgtaaactcttttaataaaagttgtgcctcaccatacttgaagctcccaggacaagggttgagaggctcaacccctctttcagcttctatgtggtgttggaggtgctggtatcgtgttcacacaa

SEQ ID NO: 180363 - DNA, 4821 bp, Homo sapiens
  Payload ID: 15524
  Gene Symbol: STK36
  Gene Name: serine/threonine kinase 36
  Uniprot ID: Q9NRP7
  ENST ID: ENST00000392105
  CDS Start-End: 237-4121
gcagactccgggtccttagccgggcctgatggccctgaggcagttcggatgtgtcccaggaagtgcccatgtgtggtccgccgtccattccacacctctgagcgcctttgtcctctgaacttctcaccagttctagcgagtaaaattgcgtcccagatgttgtggaactgtccctggatctatagctcttcaccgtctctactttcttccttctaagagatcctgaaacctctgtcatggaaaagtaccacgtgttggagatgattggagaaggctcttttgggagggtgtacaagggtcgaagaaaatacagtgctcaggtcgtggccctgaagttcatcccaaaattggggcgctcagagaaggagctgaggaatttgcaacgagagattgaaataatgcggggtctgcggcatcccaacattgtgcatatgcttgacagctttgaaactgataaagaggtggtggtggtgacagactatgctgagggagagctctttcagatcctagaagatgacggaaaacttcctgaagaccaggttcaggccattgctgcccagttggtgtcagccctgtactatctgcattcccaccgcatcctacaccgagatatgaagcctcagaacatcctcctcgccaagggtggtggcatcaagctctgtgactttggatttgcccgggctatgagcaccaatacaatggtgctgacatccatcaaaggcacaccactctatatgtctccagagctggtggaggagcgaccatacgaccacacagcggacctctggtctgttggctgcatactatatgaactggcagtaggcacccctcccttctatgctacaagcatctttcagctggtcagcctcattctcaaggaccctgtgcgctggccctcaaccatcagtccctgctttaagaacttcctgcagggactgctcaccaaagacccacggcagcgactgtcctggccagacctcttatatcacccctttattgctggtcatgtcaccataataactgagccagcaggcccagatttggggaccccattcaccagccgcctacccccagaacttcaggtcctaaaggacgaacaggcccatcggttggcccccaagggtaatcagtctcgcatcttgactcaggcctataaacgcatggctgaggaggccatgcagaagaaacatcagaacacaggacctgcccttgagcaagaggacaagaccagcaaggtggctcctggcacagcccctctgcccagactcggggccactcctcaggaatcaagcctcctggccgggatcttagcctcagaattgaagagcagctgggctaaatcagggactggagaggtgccctctgcacctcgggaaaaccggaccaccccagattgtgaacgagcattcccagaggagaggccagaggtgctgggccagcggagcactgatgtagtggacctggaaaatgaggagccagacagtgacaatgagtggcagcacctgctagagaccactgagcctgtgcctattcaactgaaggctcctctcaccttgctgtgtaatcctgacttctgccagcgcatccagagtcagctgcatgaagctggagggcagatcctgaaaggcatcttggagggtgcttcccacatcctgcctgcattccgggtcctgagcagtcttctctccagctgcagtgattctgttgccttgtattccttctgccgggaggcagggcttcctgggctgctgctgagtctactcaggcacagtcaggagagcaacagcctccagcagcaatcttggtatgggaccttcttacaggacctgatggctgtgattcaggcctactttgcctgtaccttcaatctggagaggagccagacaagtgacagcctgcaggtgtttcaggaggctgccaacctttttctggacctgttggggaaactgctggcccaaccagatgactctgagcagactttgcggagggacagccttatgtgctttactgtcctgtgcgaagccatggatgggaacagccgggccatctccaaagccttttactccagcttgctgacgacacagcaggttgtcttggatgggctccttcatggcttgacagttccacagctccctgtccacactccccaaggagccccgcaagtgagccagccactgcgagagcagagtgaggatatacctggagccatttcctctgccctggcagccatatgcactgctcctgtgggactgcccgactgctgggatgccaaggagcaggtctgttggcatttggcaaatcagctaactgaagacagcagccagctcaggccatccctcatctctggcctgcagcatcccatcctgtgcctgcaccttctcaaggttctatactcctgctgccttgtcagtgagggcctgtgccgtcttctggggcaggagcccctggccttggaatccctgtttatgttgattcagggcaaggtaaaagtagtagattgggaagagtctactgaagtgacactctacttcctctcccttcttgtctttcggctccaaaacctgccttgtggaatggagaagctaggcagtgacgttgctactctctttacccattcgcatgtcgtctctcttgtgagtgcagcagcctgtctattgggacagcttggtcagcaaggggtgacctttgacctccagcccatggaatggatggctgcagccacacatgccttgtctgcccctgcagagctcctcactgagcaggggaaggctagcctaatcagggatatgtccagttcagaaatgtggaccgttttgtggcaccgcttctccatggtcctgaggctccccgaggaggcatctgcacaggaaggggagctttcgctatccagtccaccaagccctgagccagactggacactgatttctccccagggcatggcagccctgctgagcctggccatggccacctttacccaggagccccagttatgcctgagctgcctgtcccagcatggaagtatcctcatgtccatcctgaagcatctgctttgccccagcttcctgaatcaactgcgccaggcgcctcatgggtctgagtttctccctgtcgtggtgctctctgtctgccagctcctttgcttcccctttgcgctggacatggatgctgacctccttataggtgtcttggccgacctcagggactcagaagttgcagcccatctgctgcaggtctgctgctaccatcttccgttgatgcaagtggagctgcccatcagccttctcacacgcctggccctcatggatcccacctctctcaaccagtttgtgaacacagtgtctgcctcccctagaaccatcgtctcgtttctctcagttgccctcctgagtgaccagccactgttgacctccgaccttctctctctgctggcccatactgccagggtcctgtctcccagccacttgtcctttatccaagagcttctggctggctctgatgaatcctatcggcccctgcgcagcctcctgggccacccagagaattctgtgcgggcacacacttataggctcctgggacacttgctccaacacagcatggccctgcgtggggcactgcagagccagtctggactgctcagccttctgctgcttgggcttggagacaaggatcctgttgtgcggtgcagtgccagctttgctgtgggcaatgcagcctaccaggctggtcctctgggacctgccctggcagctgcagtgcccagtatgacccagctgcttggagatcctcaggctggtatccggcgcaatgttgcatcagctctgggcaacttgggacctgaaggtttgggagaggagctgttacagtgcgaagtaccccagcggctcctagaaatggcatgtggagacccccagccaaatgtgaaggaggctgccctcattgccctccggagcctgcaacaggagcctggcatccatcaggtactggtgtccctgggtgccagtgagaaactatccttgctctctctggggaatcagtcactgccacacagcagtcctaggcctgcctctgccaaacactgcaggaaactcattcacctcctgaggccagcccatagcatgtgattccagattcctgcggtccagcctccaactttggttgccagctctttcttattctactacacaagccgccaactcaactgagagctaaagagactagaaaagagataagctgccaactcaactgagaacaagaaactagaagagatttatatataaagcttcttccttctcccagatgcaggatgttttcaaccagtaaattttattgctgttggtgccagagaagagtcctttcttctctacatccaggggccttttctccaataatgtgcctttaactctagggacctgcctcacggaccttagggaaaaacctcaacctgaaagatctcttcctttctggagctcctttaatcttcccagcaggtttttgccttagacgtgctggccccaggacagtgatgaagacagagcctgtctcagctctaggctgtggggatcaatgccatcagtccctgttattgagggattatcccttagccaacattcctatctgtgggtgggcgtggagagtgtatctttttttggggtgtgtgtgtatatgtgtgtgtgtatgtgtgtgtgtgtttaatagttctgtttgtaaactcttttaataaaagttgtgcctcaccatacttgaagctcccaggacaagggttgagaggctcaacccctctttcagcttctatgtggtgttggaggtgctggtatcgtgttc

SEQ ID NO: 180364 - DNA, 4721 bp, Homo sapiens
  Payload ID: 15524
  Gene Symbol: STK36
  Gene Name: serine/threonine kinase 36
  Uniprot ID: Q9NRP7
  ENST ID: ENST00000440309
  CDS Start-End: 160-4107
agaagagatggggctaaacgccagggaatccgtcccttggcctgaggagcttggagctcctaggctgggggcgtcccagatgttgtggaactgtccctggatctatagctcttcaccgtctctactttcttccttctaagagatcctgaaacctctgtcatggaaaagtaccacgtgttggagatgattggagaaggctcttttgggagggtgtacaagggtcgaagaaaatacagtgctcaggtcgtggccctgaagttcatcccaaaattggggcgctcagagaaggagctgaggaatttgcaacgagagattgaaataatgcggggtctgcggcatcccaacattgtgcatatgcttgacagctttgaaactgataaagaggtggtggtggtgacagactatgctgagggagagctctttcagatcctagaagatgacggaaaacttcctgaagaccaggttcaggccattgctgcccagttggtgtcagccctgtactatctgcattcccaccgcatcctacaccgagatatgaagcctcagaacatcctcctcgccaagggtggtggcatcaagctctgtgactttggatttgcccgggctatgagcaccaatacaatggtgctgacatccatcaaaggcacaccactctatatgtctccagagctggtggaggagcgaccatacgaccacacagcggacctctggtctgttggctgcatactatatgaactggcagtaggcacccctcccttctatgctacaagcatctttcagctggtcagcctcattctcaaggaccctgtgcgctggccctcaaccatcagtccctgctttaagaacttcctgcagggactgctcaccaaagacccacggcagcgactgtcctggccagacctcttatatcacccctttattgctggtcatgtcaccataataactgagccagcaggcccagatttggggaccccattcaccagccgcctacccccagaacttcaggtcctaaaggacgaacaggcccatcggttggcccccaagggtaatcagtctcgcatcttgactcaggcctataaacgcatggctgaggaggccatgcagaagaaacatcagaacacaggacctgcccttgagcaagaggacaagaccagcaaggtggctcctggcacagcccctctgcccagactcggggccactcctcaggaatcaagcctcctggccgggatcttagcctcagaattgaagagcagctgggctaaatcagggactggagaggtgccctctgcacctcgggaaaaccggaccaccccagattgtgaacgagcattcccagaggagaggccagaggtgctgggccagcggagcactgatgtagtggacctggaaaatgaggagccagacagtgacaatgagtggcagcacctgctagagaccactgagcctgtgcctattcaactgaaggctcctctcaccttgctgtgtaatcctgacttctgccagcgcatccagagtcagctgcatgaagctggagggcagatcctgaaaggcatcttggagggtgcttcccacatcctgcctgcattccgggtcctgagcagtcttctctccagctgcagtgattctgttgccttgtattccttctgccgggaggcagggcttcctgggctgctgctgagtctactcaggcacagtcaggagagcaacagcctccagcagcaatcttggtatgggaccttcttacaggacctgatggctgtgattcaggcctactttgcctgtaccttcaatctggagaggagccagacaagtgacagcctgcaggtgtttcaggaggctgccaacctttttctggacctgttggggaaactgctggcccaaccagatgactctgagcagactttgcggagggacagccttatgtgctttactgtcctgtgcgaagccatggatgggaacagccgggccatctccaaagccttttactccagcttgctgacgacacagcaggttgtcttggatgggctccttcatggcttgacagttccacagctccctgtccacactccccaaggagccccgcaagtgagccagccactgcgagagcagagtgaggatatacctggagccatttcctctgccctggcagccatatgcactgctcctgtgggactgcccgactgctgggatgccaaggagcaggtctgttggcatttggcaaatcagctaactgaagacagcagccagctcaggccatccctcatctctggcctgcagcatcccatcctgtgcctgcaccttctcaaggttctatactcctgctgccttgtcagtgagggcctgtgccgtcttctggggcaggagcccctggccttggaatccctgtttatgttgattcagggcaaggtaaaagtagtagattgggaagagtctactgaagtgacactctacttcctctcccttcttgtctttcggctccaaaacctgccttgtggaatggagaagctaggcagtgacgttgctactctctttacccattcgcatgtcgtctctcttgtgagtgcagcagcctgtctattgggacagcttggtcagcaaggggtgacctttgacctccagcccatggaatggatggctgcagccacacatgccttgtctgcccctgcagaggttcggttgactccaccaggtagttgtggattctatgatggcctccttatccttctgttgcagctcctcactgagcaggggaaggctagcctaatcagggatatgtccagttcagaaatgtggaccgttttgtggcaccgcttctccatggtcctgaggctccccgaggaggcatctgcacaggaaggggagctttcgctatccagtccaccaagccctgagccagactggacactgatttctccccagggcatggcagccctgctgagcctggccatggccacctttacccaggagccccagttatgcctgagctgcctgtcccagcatggaagtatcctcatgtccatcctgaagcatctgctttgccccagcttcctgaatcaactgcgccaggcgcctcatgggtctgagtttctccctgtcgtggtgctctctgtctgccagctcctttgcttcccctttgcgctggacatggatgctgacctccttataggtgtcttggccgacctcagggactcagaagttgcagcccatctgctgcaggtctgctgctaccatcttccgttgatgcaagtggagctgcccatcagccttctcacacgcctggccctcatggatcccacctctctcaaccagtttgtgaacacagtgtctgcctcccctagaaccatcgtctcgtttctctcagttgccctcctgagtgaccagccactgttgacctccgaccttctctctctgctggcccatactgccagggtcctgtctcccagccacttgtcctttatccaagagcttctggctggctctgatgaatcctatcggcccctgcgcagcctcctgggccacccagagaattctgtgcgggcacacacttataggctcctgggacacttgctccaacacagcatggccctgcgtggggcactgcagagccagtctggactgctcagccttctgctgcttgggcttggagacaaggatcctgttgtgcggtgcagtgccagctttgctgtgggcaatgcagcctaccaggctggtcctctgggacctgccctggcagctgcagtgcccagtatgacccagctgcttggagatcctcaggctggtatccggcgcaatgttgcatcagctctgggcaacttgggacctgaaggtttgggagaggagctgttacagtgcgaagtaccccagcggctcctagaaatggcatgtggagacccccagccaaatgtgaaggaggctgccctcattgccctccggagcctgcaacaggagcctggcatccatcaggtactggtgtccctgggtgccagtgagaaactatccttgctctctctggggaatcagtcactgccacacagcagtcctaggcctgcctctgccaaacactgcaggaaactcattcacctcctgaggccagcccatagcatgtgattccagattcctgcggtccagcctccaactttggttgccagctctttcttattctactacacaagccgccaactcaactgagagctaaagagactagaaaagagataagctgccaactcaactgagaacaagaaactagaagagatttatatataaagcttcttccttctcccagatgcaggatgttttcaaccagtaaattttattgctgttggtgccagagaagagtcctttcttctctacatccaggggccttttctccaataatgtgcctttaactctagggacctgcctcacggaccttagggaaaaacctcaacctgaaagatctcttcctttctggagctcctttaatcttcccagcaggtttttgccttagacgtgctggccccaggacagtgatgaagacagagcctgtctcagctctaggctgtggggatcaatgccatcagtccctgttattgagggattatcccttagccaacattcctatctgtgggtgggcgtggagagtgtatctttttttggggtgtgtgtgtatatgtgtgtgtgtatgtgtgtgtgtgtttaatagttctgtttgtaaactcttttaataaaagttgtgcctcacc

SEQ ID NO: 180365 - DNA, 583 bp, Homo sapiens
  Payload ID: 15524
  Gene Symbol: STK36
  Gene Name: serine/threonine kinase 36
  ENST ID: ENST00000455724
  CDS Start-End: 357-583
agactccgggtccttagccgggcctgatggccctgaggcagttcggatgtgtcccaggaagtgcccatgtgtggtccgccgtccattccacacctctgagcgcctttgtcctctgaacttctcaccagttctagcgagtaaaattgcgtcccagatgttgtggaactgtccctggatctatagctcttcaccgtctctactttcttccttctaagagatcctgaaacctctgtcatggaaaagtaccacgtgttggagatgattggagaaggctcttttgggagggtgtacaagggtcgaagaaaatacagtgctcagagaaggagctgaggaatttgcaacgagagattgaaataatgcggggtctgcggcatcccaacattgtgcatatgcttgacagctttgaaactgataaagaggtggtggtggtgacagactatgctgagggagagctctttcagatcctagaagatgacggaaaacttcctgaagaccaggttcaggccattgctgcccagttggtgtcagccctgtactatctgcattcccaccgcatcctacaccgagatatgaagcctcagaa

SEQ ID NO: 180366 - DNA, 878 bp, Homo sapiens
  Payload ID: 15524
  Gene Symbol: STK36
  Gene Name: serine/threonine kinase 36
  ENST ID: ENST00000424080
  CDS Start-End: 43-878
agcttggagctcctaggctggggagatcctgaaacctctgtcatggaaaagtaccacgtgttggagatgattggagaaggctcttttgggagggtgtacaagggtcgaagaaaatacagtgctcaggtcgtggccctgaagttcatcccaaaattggggcgctcagagaaggagctgaggaatttgcaacgagagattgaaataatgcggggtctgcggcatcccaacattgtgcatatgcttgacagctttgaaactgataaagaggtggtggtggtgacagactatgctgagggagagctctttcagatcctagaagatgacggaaaacttcctgaagaccaggttcaggccattgctgcccagttggtgtcagccctgtactatctgcattcccaccgcatcctacaccgagatatgaagcctcagaacatcctcctcgccaagggtggtggcatcaagctctgtgactttggatttgcccgggctatgagcaccaatacaatggtgctgacatccatcaaaggcacaccactctatatgtctccagagctggtggaggagcgaccatacgaccacacagcggacctctggtctgttggctgcatactatatgaactggcagtaggcacccctcccttctatgctacaagcatctttcagctggtcagcctcattctcaaggaccctgtgcgctggccctcaaccatcagtccctgctttaagaacttcctgcagggactgctcaccaaagacccacggcagcgactgtcctggccagacctcttatatcacccctttattgctggtcatgtcaccataataactgagccagcaggcccagatttggggaccccattcaccagccgcctaccccc

SEQ ID NO: 180367 - DNA, 2093 bp, Homo sapiens
  Payload ID: 15524
  Gene Symbol: STK36
  Gene Name: serine/threonine kinase 36
  ENST ID: ENST00000419433
  CDS Start-End: 1-445
tcggttgactccaccaggtagttgtggattctatgatggcctccttatccttctgttgcagctcctcactgagcaggggaaggctagcctaatcagggatatgtccagttcagaaatgtggaccgttttgtggcaccgcttctccatggtcctgaggctccccgaggaggcatctgcacaggaaggggagctttcgctatccagtccaccaagccctgagccagactggacactgatttctccccagggcatggcagccctgctgagcctggccatggccacctttacccaggagccccagttatgcctgagctgcctgtcccagcatggaagtatcctcatgtccatcctgaagcatctgctttgccccagcttcctgaatcaactgcgccaggcctcctttgcttcccctttgcgctggacatggatgctgacctccttataggtgtcttggccgacctcagggactcagaagttgcagcccatctgctgcaggtctgctgctaccatcttccgttgatgcaagtggagctgcccatcagccttctcacacgcctggccctcatggatcccacctctctcaaccagtttgtgaacacagtgtctgcctcccctagaaccatcgtctcgtttctctcagttgccctcctgagtgaccagccactgttgacctccgaccttctctctctgctggcccatactgccagggtcctgtctcccagccacttgtcctttatccaagagcttctggctggctctgatgaatcctatcggcccctgcgcagcctcctgggccacccagagaattctgtgcgggcacacacttataggctcctgggacacttgctccaacacagcatggccctgcgtggggcactgcagagccagtctggactgctcagccttctgctgcttgggcttggagacaaggatcctgttgtgcggtgcagtgccagctttgctgtgggcaatgcagcctaccaggctggtcctctgggacctgccctggcagctgcagtgcccagtatgacccagctgcttggagatcctcaggctggtatccggcgcaatgttgcatcagctctgggcaacttgggacctgaaggtttgggagaggagctgttacagtgcgaagtaccccagcggctcctagaaatggcatgtggagacccccagccaaatgtgaaggaggctgccctcattgccctccggagcctgcaacaggagcctggcatccatcaggtactggtgtccctgggtgccagtgagaaactatccttgctctctctggggaatcagtcactgccacacagcagtcctaggcctgcctctgccaaacactgcaggaaactcattcacctcctgaggccagcccatagcatgtgattccagattcctgcggtccagcctccaactttggttgccagctctttcttattctactacacaagccgccaactcaactgagagctaaagagactagaaaagagataagctgccaactcaactgagaacaagaaactagaagagatttatatataaagcttcttccttctcccagatgcaggatgttttcaaccagtaaattttattgctgttggtgccagagaagagtcctttcttctctacatccaggggccttttctccaataatgtgcctttaactctagggacctgcctcacggaccttagggaaaaacctcaacctgaaagatctcttcctttctggagctcctttaatcttcccagcaggtttttgccttagacgtgctggccccaggacagtgatgaagacagagcctgtctcagctctaggctgtggggatcaatgccatcagtccctgttattgagggattatcccttagccaacattcctatctgtgggtgggcgtggagagtgtatctttttttggggtgtgtgtgtatatgtgtgtgtgtatgtgtgtgtgtgtttaatagttctgtttgtaaactcttttaataaaagttgtgcctcaccatacttgaagctcccaggacaagggttgagaggctcaacccctctttcagcttctatgtggtgttggaggtgctggtatcgtgttcacacaag

SEQ ID NO: 180368 - DNA, 563 bp, Homo sapiens
  Payload ID: 15524
  Gene Symbol: STK36
  Gene Name: serine/threonine kinase 36
  ENST ID: ENST00000414413
  CDS Start-End: 1-320
cagggactggagaggtgccctctgcacctcgggaaaaccggaccaccccagattgtgaacgagcattcccagaggagaggccagaggtgctgggccagcggagcactgatgtagtggacctggaaaatgaggagccagacagtgacaatgagtggcagcacctgctagagaccactgagcctgtgcctattcaactgaaggctcctctcaccttgctgtgtaatcctgacttctgccagcgcatccagagtcagctgcatgaagctggagggcaggtgaagggctggagaagggagggagcagatgggaatggcacttagtctgacagagatcctgaggagaggcccctatccgttggtcactggtgttctgtgttagatcctgaaaggcatcttggagggtgcttcccacatcctgcctgcattccgggtcctgagcagtcttctctccagctgcagtgattctgttgccttgtattccttctgccgggaggcagggcttcctgggctgctgctgagtctactcaggcacagtcaggagagcaacagcctccagcagcaatc

SEQ ID NO: 180369 - DNA, 586 bp, Homo sapiens
  Payload ID: 15524
  Gene Symbol: STK36
  Gene Name: serine/threonine kinase 36
  ENST ID: ENST00000422778
  CDS Start-End: 1-199
ggaaaatgaggagccagacagtgacaatgagtggcagcacctgctagagaccactgagcctgtgcctattcaactgaaggctcctctcaccttgctgtgtaatcctgacttctgccagcgcatccagagtcagctgcatgaagctggagggcaggtgaagggctggagaagggagggagcagatgggaatggcacttagtctgacagagatcctgaggagaggcccctatccgttggtcactggtgttctgtgttagatcctgaaaggcatcttggagggtgcttcccacatcctgcctgcattccgggtcctgagcagtcttctctccagctgcagtgattctgttgccttgtattccttctgccgggaggcagggcttcctgggctgctgctgagtctactcaggcacagtcaggagagcaacagcctccagcaggacctgatggctgtgattcaggcctactttgcctgtaccttcaatctggagaggagccagacaagtgacagcctgcaggtgtttcaggaggctgccaacctttttctggacctgttggggaaactgctggcccaaccagatgactctga

SEQ ID NO: 180370 - DNA, 3576 bp, Homo sapiens
  Payload ID: 15525
  Gene Symbol: STK38
  Gene Name: serine/threonine kinase 38
  Uniprot ID: Q15208
  ENST ID: ENST00000229812
  CDS Start-End: 287-1684
ctcggccccgggctgccgcgccagcccgtctccgcggcgggggaccgggctgccttggcccctcagcgctcgcgtcttttccggcagttggaacgcttcctgttgtcctcacccgtaaccgcctgttgccccctgtctcagagtccctcacgcgtcccctcccgtctttggctcgttggctgccgccgccggggcttcgccagccttcaagtcgagactactggccgaaggggcgtctgcggctctccgccgtccccagccctgcctctccctgggctctgcagccatggcaatgacaggctcaacaccttgctcatccatgagtaaccacacaaaggaaagggtgacaatgaccaaagtgacactggagaatttttatagcaaccttatcgctcaacatgaagaacgagaaatgagacaaaagaagttagaaaaggtgatggaagaagaaggcctaaaagatgaggagaaacgactccggagatcagcacatgctcggaaggaaacagagtttcttcgtttgaagagaacaagacttggattggaagattttgagtccttaaaagtaataggcagaggagcatttggtgaggtacggcttgttcagaagaaagatacgggacatgtgtatgcaatgaaaatactccgtaaagcagatatgcttgaaaaagagcaggttggccacattcgtgcggagcgtgacattctagtggaggcagacagtttgtgggttgtgaaaatgttctatagttttcaggataagctaaacctctacctaatcatggagttcctgcctggaggggacatgatgaccttgttgatgaaaaaagacactctgacagaagaggagactcagttttatatagcagaaacagtattagccatagactctattcaccaacttggattcatccacagagacatcaaaccagacaaccttcttttggacagcaagggccatgtgaaactttctgactttggtctttgcacaggactgaaaaaagcacataggacagaattttataggaatctgaaccacagcctccccagtgatttcactttccagaacatgaattccaaaaggaaagcagaaacctggaaaagaaatagacgtcagctagccttctccacagtaggcactcctgactacattgctcctgaggtgttcatgcagaccgggtacaacaagctctgtgattggtggtcgcttggggtgatcatgtatgagatgctcatcggctacccacctttctgttctgagacccctcaagagacatataagaaggtgatgaactggaaagaaactttgacttttcctccagaagttcccatctctgagaaagccaaggatctaattttgaggttctgctgtgaatgggaacatagaattggagctcctggagttgaggaaataaaaagtaactctttttttgaaggcgttgactgggaacatatcagagagagacctgctgcaatatctattgaaatcaaaagcattgatgatacctcaaacttcgatgagtttccagaatctgatattcttaagccaacagtggccacaagtaatcatcctgagactgactacaagaacaaagactgggtcttcatcaattacacgtacaagcgctttgagggcctgactgcaaggggggcaataccttcctacatgaaagcagcaaaatagtactcttgccacggaatcctatgtggagcagagttctttgtataacatcatgcttttcctctcacactcttgaagagcttccaagaagttgatggaacccaccaatatgtcatagtaaagtctcctgaaatgtggtagtaagaggattttcttccataatgcatctgaaaaactgtaaacaaagacaaccatttctactacgtcggccataaacagctatcctgctttggaagagaagcatcatgagccaatttgataggtgttttaaaaataacttgagttttcctaagttcatcagaatgaaggggaaaaacagccatcatccaacattattgagattgtcgtgtatagtcatcgaatatcagccagttcctgtaattttgtgacacgctctctgccaagcccaccaagtatttcctttatagctaaaagttccatagtactaaggaaataaagcaataaagacagtctcagcagccaggattctggctgaaggaaatgatccgccaccctgagggtggtgatggtagtttctacccatacctcagcctcaggcgagtggcttatagcctccattcatggtgcactttatttatggtactaagataaagactgtcaatccattgatttatctcctcctgtcccccatctaaaatacccatgctgcttttctgagtgttgatgggggttaccagcttgatccactgttgctcttagaaggcccagaaagtctttgggcattgccaagaaatcccggattatgtggaaaaccctcactttctcttcacggctgtaccagaaaatccctaagacagatcttgccgtggactagcaatacctgcaagtgctgccaatgggaactcaatttattcctgggaacctaacgaggagagcccaggcctaggcaggaggcctggaaccctcttggctaaggtgctgttcctgttcctgcaaggtctccagaacccctttggaaatggtgaaggaaccagcccaatagaagtacagagccagctgacaagtccttgtaaagctcactcctcagtccttggcacagccatgttttgtcttctctcttggtatttcttctctcccaactttagccattttgccttggaatcatgattacaattttttcctttgcagatgccttcctgggggatactcctccccaccctaaagggtcgcctgcaacttaggcggattgggtctctctgctgtggcgttctctcttgagagaccctctgaattttagcacaaagtgccttctgtttcacagctgccaccacctttagaggaatttcgtcagaaaaatgtggaggctccatattaatgcattattttttaaaaagttttgataactcttaaagcatcatttgcacctatgtgggaactttgcctgttgcaaagtattgtggccgagctgcagctgggagcctgctttctgccagtcttgaggttctgaagatcagctttgaaaggaaagtatgtcctagcttagccattcagaagagaaaaatggaatatcagagttacagttgtcagtgaaactactttggattttaacctcttagaggaagaaaaaaggttagggaagtgtcaactctggatgaaggtgatgtgtttgcctctcagtctttcattcatagcctgctagtgaaaaggaagtaaatgagattcttttgtgtgactttgtagtctctttgtattaccaaatagttggggtgttgactcctgtgtgttttgcaagaatgtgtggtaagcctgggtaaagagaaggaactgcggtgttgggagagtctttgtgttggggagtggcaggggatgatttgtttcaggggaaaatgcccacattttaacttttaaacttctgaataaactgtgtaaaaaca

SEQ ID NO: 180371 - DNA, 5068 bp, Homo sapiens
  Payload ID: 15526
  Gene Symbol: STK38L
  Gene Name: serine/threonine kinase 38 like
  Uniprot ID: Q9Y2H1
  ENST ID: ENST00000389032
  CDS Start-End: 170-1564
gagagttcagggaggccgccctgagattccggcgaggccgcgggtcccacctcccgggggcggggcgagggcggagcggggagaagggagctgacgggcgcccggccggctgcggtccgtgcggaggctgagccggccgcgggcgcgaccggaggcagtttccgttactatggcaatgacggcagggactacaacaacctttcctatgagcaaccatacccgggaaagagtgactgtagccaagctcacattggagaatttttatagcaacctaattttacagcatgaagagagagaaaccaggcagaagaaattagaagtggccatggaagaagaaggattagcagatgaagagaaaaagttacgtcgatcacaacacgctcgcaaagaaacagagttcttacggctcaaaaggaccagacttggcttggatgactttgagtctctgaaagttataggaagaggagcttttggagaggtgcggttggtccagaagaaagatacaggccatatctatgcaatgaagatattgagaaagtctgatatgcttgaaaaagagcaggtggcccatatccgagcagaaagagatattttggtagaagcagatggtgcctgggtggtgaagatgttttacagttttcaggataagaggaatctttatctaatcatggaatttctccctggaggtgacatgatgacattgctaatgaagaaagacaccttgacagaagaggaaacacagttctacatttcagagactgttctggcaatagatgcgatccaccagttgggtttcatccatcgggatattaagccagacaaccttttattggatgccaagggtcatgtaaaattatctgattttggtttatgtacgggattaaagaaagctcacaggactgaattttatagaaatctcacacacaacccaccaagtgacttctcatttcagaacatgaactcaaagaggaaagcagaaacttggaagaagaacaggagacaactggcatattccacagttgggacaccagattacattgctccagaagtattcatgcagactggttacaacaaattgtgtgactggtggtctttgggagtgattatgtatgaaatgctaataggatatccacctttctgctctgaaacacctcaagaaacgtacagaaaagtgatgaactggaaagaaactctggtatttcctccagaggtacctatatctgagaaagccaaggacttaattctcagattttgtattgattctgaaaacagaattggaaatagtggagtagaagaaataaaaggtcatcccttttttgaaggtgtcgactgggagcacataagggaaaggccagcagcaatccctatagaaatcaaaagcattgatgatacttcaaattttgatgacttccctgaatctgatattttacaaccagtgccaaataccacagaaccggactacaaatccaaagactgggtttttctcaattatacctataaaaggtttgaagggttgactcaacgtggctctatccccacctacatgaaagctgggaagttatgaatgaagataacattcacccataaccaagagaactcaggtagctgcatcaccaggcttgcttggcgtagataacaatacactgaaatactcctgaagatggtggtgcttattgactacaagaggaaattctacaggattaggatttctaagactactataggaattggttggcagtgccagctggctcttttttttaatattttattatttttgttaactttattatatgaaggtactggaataaaaggaacagacatccctttctaactgcactgcctacatgcgtattaaggtccattctgcctgtgtgtgctgtggctttgaactgtaacacctctaatcaattcaggagaaacacatatcatttaaagcaacataggctaacctgtaggtaacactgcagtattgatgttttactgcaaatcttatgggtctagataatcagtaaaagccatcttccatagttggtgttagaacattgccctattggtttggacatctgtagaatatatatgaagacaatttctgtaatggttttaagagatttaaaaagaaattcactggttctttacaaaatagaatttatcatcaagttattacacaaacttcacagtaaggagtgacaagtttataataaggaagacaaagtttaacaccttcactcaagcactccactaatatatttacgttgcattcagaaatactgatgaccttcatatacgtagtctgtatactcatagggagatgtactgtattatataacatgtaaagttgattttcttgtgacaagagaacttctttttttaacaagaggacatggcattattttaatttgattatggtgagttgaatttaagacatgaccatgaaggctgcttgtagaattagtgtatttttattaaactatttttttaaatgtcaaacttctatcatgtaaatggacttatagagaacaaaaagctatttactttggttttctagaaagttgttacatatcatggctggttaacttttatttcttttgatgaaaatttttcctttgatagtacttgtattattgtgccattattttcttatgctccaaatgtaccaaagatcttgaacagagtggatgttcacaactgagtagaattttcctttcctgtgggcatgctgtattcagacctgacagatctttgatagaggtcagcttattaaagggcaatattgttcttgtttagctacatcactgtggtgaatatagatggaattaaggaagtaaatgcaggccagggggttgtgatgagaggataggggagataatatcagcatcaaattctttgggtatctctctaagaattaaataatcttttctagcttaatattttaattctaattcaaacaactctgaggttttggtttcattagtaatagttgaggaataatatactagcaaagaatggcctaatgtttgtcataactgttaatggatgaaattttttaaagatacaaccatgataaccattataaatgatctatgatcaaaatctaaagtgatgaattatttgtaggaatgtcttcctaatggggaagaattgcataggagcattatgcaaatctacacaagcttttataaatgttgctgctgggtagctccacagtgtttcataaggccatcctgtttcccccaactcccccatttttggtttgtttctttttaaatatttgttgagtacttacgtgtttatctaacagttcacttccatttttctagtctggattttttgagtatttaggaaagagagctattaaaaactggggatttctcaatgtgactaactctaatttttctaattataactgcctttaattaacataatattaacttttgctgaggtttatgagattttctcaccccacatcgctcccctttttttaaaaaggactgttttgctagtgtgataatgaataggtaagatatgagataattgcaacattgtctagttctagtatggtaactattcttgaaatggtattgaaaaataccgttaattcaaattgacagagattgataaaaagaaactgatttacctaagtttactttttaattgcataatagagcattttttgttttgagttccctcattcttattaccagaaagagcttgcaaatagttttactttcttggcactggaagggtagttctggaaagctactttgttgagagtctcattcttccctggagttaatagagtgattcacaatctttggggttttctcctcatcaaaagcatttcttaagtgcctatctaaaagcaattaaagactgtgtctgccctttagaagctaagaatttgattcatgatgcaaattaactagataatttgcaaagtacccttgagattgaattttctctattatatatttcccatatttcaggtgaataatttaatttaaatgacaaaaccctatctagtcaactgggcataatgacattttctttaaattagactctattttgaattaaaagagttttattataaaccgtgtgtttttggtttttctaagtatatagaaagcttgtataattcagatttatcaatttcctgatttaatgtagactttgacttttttattaaaaacctttgtattaaagcaagttatgttatttttcttttatgcatttattactaacatagctttaaatctttaaatgtattgaagcattgtgctgtctgaaaataaggaattgcttataaaccagccacttctgaatacaatatgtagctgatttaataagctagttagtgaatggaaaataagtgtggagtattaaaaatgttctttggttggtaaggcctaagatagggtttcatttatttctatactttttctgttttttaaacacctgcatatttttatgtaaatctctaaatttaaaatattttaagtacatttatttttggtgttttattgtataaaaccttagacaatcaatcagtcagtctttactgacaggagcagcagctatctgtcttttgctgatctacaaataaatgaattgagaatttagtccatagaggtccctggctaccaaacacattctcctttgaattgttaaaattcagaacattcaaaataactgttttgctacaacccatgattattttcctgttgtgtttatttaaatttactttctctttagaagtgcacttatttctgaaaaatcttaatgaaacaaacgcttagaacaaatataaatatgagacacttgggactactagagatattttagatttttatgaaaaaaatgtgaggggatattgctgctttaaaaaggaataaagtaataaaaatatatctcagctatttttttaaagcaatataattcagcaattgtctagaaaagtaatcatgaggctactgagtttggtgttcagttactgagtttcaaaaatgttttggtggcatgaggacaaaatttcattgaaggtaagataagaataaaaactatgtttacaaaa

SEQ ID NO: 180372 - DNA, 580 bp, Homo sapiens
  Payload ID: 15526
  Gene Symbol: STK38L
  Gene Name: serine/threonine kinase 38 like
  ENST ID: ENST00000407753
  CDS Start-End: 1-269
ggcagaagaaattagaagtggccatggaagaagaaggattagcagatgaagagaaaaagttacgtcgatcacaacacgctcgcaaagaaacagagttcttacggctcaaaaggaccagacttggcttggatgactttgagtctctgaaagttataggaagaggagcttttggagaggtgcggttggtccagaagaaagatacaggccatatctatgcaatgaagatattgagaaagtctgatatgcttgaaaaagagcaggtgacatgatgacattgctaatgaagaaagacaccttgacagaagaggaaacacagttctacatttcagagactgttctggcaatagatgcgatccaccagttgggtttcatccatcgggatattaagccagacaaccttttattggatgccaagggtcatgtaaaattatctgattttggtttatgtacgggattaaagaaagctcacaggactgaattttatagaaatctcacacacaacccaccaagtgacttctcatttcagaacatgaactcaaagaggaaagcagaaacttggaagaagaacaggagacaactg

SEQ ID NO: 180373 - DNA, 545 bp, Homo sapiens
  Payload ID: 15526
  Gene Symbol: STK38L
  Gene Name: serine/threonine kinase 38 like
  ENST ID: ENST00000541191
  CDS Start-End: 153-545
acggcagtgaggtgaggctggtgagaggggaagtggcgacagttcagtcaactccctcaaaaccagtctggccttcaccaggcggagatgggtggggccgggaagacgggcgttgacgacagaaggctacttccggctgtgtttccgttactatggcaatgacggcagggactacaacaacctttcctatgagcaaccatacccgggaaagagtgactgtagccaagctcacattggagaatttttatagcaacctaattttacagcatgaagagagagaaaccaggcagaagaaattagaagtggccatggaagaagaaggattagcagatgaagagaaaaagttacgtcgatcacaacacgctcgcaaagaaacagagttcttacggctcaaaaggaccagacttggcttggatgactttgagtctctgaaagttataggaagaggagcttttggagaggtgcggttggtccagaagaaagatacaggccatatctatgcaatgaagatattgagaaagtctgatatgcttgaaaaagagcag

SEQ ID NO: 180374 - DNA, 752 bp, Homo sapiens
  Payload ID: 15526
  Gene Symbol: STK38L
  Gene Name: serine/threonine kinase 38 like
  ENST ID: ENST00000545470
  CDS Start-End: 112-752
ggcggggcgagggcggagcggggagaagggagctgacgggcgcccggccggctgcggtccgtgcggaggctgagccggccgcgggcgcgaccggaggcagtttccgttactatggcaatgacggcagggactacaacaacctttcctatgagcaaccatacccgggaaagagtgactgtagccaagctcacattggagaatttttatagcaacctaattttacagcatgaagagagagaaaccaggcagaagaaattagaagtggccatggaagaagaaggattagcagatgaagaggtgcggttggtccagaagaaagatacaggccatatctatgcaatgaagatattgagaaagtctgatatgcttgaaaaagagcaggtggcccatatccgagcagaaagagatattttggtagaagcagatggtgcctgggtggtgaagatgttttacagttttcaggataagaggaatctttatctaatcatggaatttctccctggaggtgacatgatgacattgctaatgaagaaagacaccttgacagaagaggaaacacagttctacatttcagagactgttctggcaatagatgcgatccaccagttgggtttcatccatcgggatattaagccagacaaccttttattggatgccaagggtcatgtaaaattatctgattttggtttatgtacgggattaaagaaagctcacaggactgaattttatagaaatctcacacacaacccacc

SEQ ID NO: 180375 - DNA, 526 bp, Homo sapiens
  Payload ID: 15526
  Gene Symbol: STK38L
  Gene Name: serine/threonine kinase 38 like
  ENST ID: ENST00000544969
  CDS Start-End: 134-526
agggcagcctgctcgacaaggccccttggcagacagtcagctccctccaaggccaaaccccaagttcaacatacatctttctctcccatttctgcaagcataactgtgaacagcataattcttttccgttactatggcaatgacggcagggactacaacaacctttcctatgagcaaccatacccgggaaagagtgactgtagccaagctcacattggagaatttttatagcaacctaattttacagcatgaagagagagaaaccaggcagaagaaattagaagtggccatggaagaagaaggattagcagatgaagagaaaaagttacgtcgatcacaacacgctcgcaaagaaacagagttcttacggctcaaaaggaccagacttggcttggatgactttgagtctctgaaagttataggaagaggagcttttggagaggtgcggttggtccagaagaaagatacaggccatatctatgcaatgaagatattgagaaagtctgatatgcttgaaaaagagcag

SEQ ID NO: 180376 - DNA, 548 bp, Homo sapiens
  Payload ID: 15526
  Gene Symbol: STK38L
  Gene Name: serine/threonine kinase 38 like
  ENST ID: ENST00000543246
  CDS Start-End: 156-548
attgtatgtgaattagccacccttgtgactatttgaggagagagaagttagtctaaaatattatgttaaattatgatattacataattttattgcataagttcatcaaactacttccatctgaaaaatcctgatctcaaaatagtttccgttactatggcaatgacggcagggactacaacaacctttcctatgagcaaccatacccgggaaagagtgactgtagccaagctcacattggagaatttttatagcaacctaattttacagcatgaagagagagaaaccaggcagaagaaattagaagtggccatggaagaagaaggattagcagatgaagagaaaaagttacgtcgatcacaacacgctcgcaaagaaacagagttcttacggctcaaaaggaccagacttggcttggatgactttgagtctctgaaagttataggaagaggagcttttggagaggtgcggttggtccagaagaaagatacaggccatatctatgcaatgaagatattgagaaagtctgatatgcttgaaaaagagcag

SEQ ID NO: 180377 - DNA, 477 bp, Homo sapiens
  Payload ID: 15526
  Gene Symbol: STK38L
  Gene Name: serine/threonine kinase 38 like
  ENST ID: ENST00000546286
  CDS Start-End: 37-207
cggccgcgggcgcgaccggaggcagtttccgttactatggcaatgacggcagggactacaacaacctttcctatgagcaaccatacccgggaaagagtgactgtagccaagctcacattggagaatttttatagcaacctaattttacagcatgaagagagagaaaccagaggagaaaactggaaatcattcaacaagcagcactgaagtgcctaggggcagaagaaattagaagtggccatggaagaagaaggattagcagatgaagagaaaaagttacgtcgatcacaacacgctcgcaaagaaacagagttcttacggctcaaaaggaccagacttggcttggatgactttgagtctctgaaagttataggaagaggagcttttggagaggtgcggttggtccagaagaaagatacaggccatatctatgcaatgaagatattgagaaagtctgatatgcttgaaaaagagcag

SEQ ID NO: 180378 - DNA, 463 bp, Homo sapiens
  Payload ID: 15526
  Gene Symbol: STK38L
  Gene Name: serine/threonine kinase 38 like
  ENST ID: ENST00000540996
  CDS Start-End: 181-463
gtgcggaggctgagccggccgcgggcgcgaccggaggcaggcatctgaatttcatttgaaaatgaaatgggctgcacagtctggagaagtgtactataccttgttatagcacgttttggaatgacccagaattcagaatgaaatgggcagctatgagccccatccaaagtttccgttactatggcaatgacggcagggactacaacaacctttcctatgagcaaccatacccgggaaagagtgactgtagccaagctcacattggagaatttttatagcaacctaattttacagcatgaagagagagaaaccaggcagaagaaattagaagtggccatggaagaagaaggattagcagatgaagagaaaaagttacgtcgatcacaacacgctcgcaaagaaacagagttcttacggctcaaaaggaccagacttggcttggatgactttgagtctctgaaag

SEQ ID NO: 180379 - DNA, 1369 bp, Homo sapiens
  Payload ID: 15526
  Gene Symbol: STK38L
  Gene Name: serine/threonine kinase 38 like
  ENST ID: ENST00000536093
  CDS Start-End: 1-264
tacatttcagagactgttctggcaatagatgcgatccaccagttgggtttcatccatcgggatattaagccagacaaccttttattggatgccaagggtcatgtaaaattatctgattttggtttatgtacgggattaaagaaagctcacaggactgaattttatagaaatctcacacacaacccaccaagtgacttctatgtatatgtattttctttttgtggagagcatttttccctcgtgattacaattccatattgttgaaattagcatttcagaacatgaactcaaagaggaaagcagaaacttggaagaagaacaggagacaactggcatattccacagttgggacaccagattacattgctccagaagtattcatgcagactggttacaacaaattgtgtgactggtggtctttgggagtgattatgtatgaaatgctaataggatatccacctttctgctctgaaacacctcaagaaacgtacagaaaagtgatgaactggaaagaaactctggtatttcctccagaggtacctatatctgagaaagccaaggacttaattctcagattttgtattgattctgaaaacagaattggaaatagtggagtagaagaaataaaaggtcatcccttttttgaaggtgtcgactgggagcacataagggaaaggccagcagcaatccctatagaaatcaaaagcattgatgatacttcaaattttgatgacttccctgaatctgatattttacaaccagtgccaaataccacagaaccggactacaaatccaaagactgggtttttctcaattatacctataaaaggtttgaagggttgactcaacgtggctctatccccacctacatgaaagctgggaagttatgaatgaagataacattcacccataaccaagagaactcaggtagctgcatcaccaggcttgcttggcgtagataacaatacactgaaatactcctgaagatggtggtgcttattgactacaagaggaaattctacaggattaggatttctaagactactataggaattggttggcagtgccagctggctcttttttttaatattttattatttttgttaactttattatatgaaggtactggaataaaaggaacagacatccctttctaactgcactgcctacatgcgtattaaggtccattctgcctgtgtgtgctgtggctttgaactgtaacacctctaatcaattcaggagaaacacatatcatttaaagcaacataggctaacctgtaggtaacactgcagtattgatgttttactgcaaatcttatgggtctagataatcagtaaaagccatcttccatagttggtgttagaacat

SEQ ID NO: 180380 - DNA, 664 bp, Homo sapiens
  Payload ID: 15526
  Gene Symbol: STK38L
  Gene Name: serine/threonine kinase 38 like
  ENST ID: ENST00000544367
  CDS Start-End: 90-284
gagaagggagctgacgggcgcccggccggctgcggtccgtgcggaggctgagccggccgcgggcgcgaccggaggcagtttccgttactatggcaatgacggcagggactacaacaacctttcctatgagcaaccatacccgggaaagagtgactgtagccaagctcacattggagaatttttatagcaacctaattttacagcatgaagagagagaaaccaggcagaagaaattagaagtggccatggaagaagaaggattagcagatgaagaggtaatgtaattacctataattactgtacaaaagcacccccagtgacttttcattcatttgacatcagaaaaagttacgtcgatcacaacacgctcgcaaagaaacagagttcttacggctcaaaaggaccagacttggcttggatgactttgagtctctgaaagttataggaagaggagcttttggagaggtgcggttggtccagaagaaagatacaggccatatctatgcaatgaagatattgagaaagtctgatatgcttgaaaaagagcaggtggcccatatccgagcagaaagagatattttggtagaagcagatggtgcctgggtggtgaagatgttttacagttttcaggataagaggaatctttatctaatcatggaatttc

SEQ ID NO: 180381 - DNA, 2038 bp, Homo sapiens
  Payload ID: 15527
  Gene Symbol: STK4
  Gene Name: serine/threonine kinase 4
  Uniprot ID: Q13043
  ENST ID: ENST00000372801
  CDS Start-End: 48-1436
cgggaggatggagcagtgagcgggtctgggcggctgctggcagcgccatggagacggtacagctgaggaacccgccgcgccggcagctgaaaaagttggatgaagatagtttaaccaaacaaccagaagaagtatttgatgtcttagagaaacttggagaagggtcctatggcagcgtatacaaagctattcataaagagaccggccagattgttgctattaagcaagttcctgtggaatcagacctccaggagataatcaaagaaatctctataatgcagcaatgtgacagccctcatgtagtcaaatattatggcagttattttaagaacacagacttatggatcgttatggagtactgtggggctggttctgtatctgatatcattcgattacgaaataaaacgttaacagaagatgaaatagctacaatattacaatcaactcttaagggacttgaataccttcattttatgagaaaaatacaccgagatatcaaggcaggaaatattttgctaaatacagaaggacatgcaaaacttgcagattttggggtagcaggtcaacttacagataccatggccaagcggaatacagtgataggaacaccattttggatggctccagaagtgattcaggaaattggatacaactgtgtagcagacatctggtccctgggaataactgccatagaaatggctgaaggaaagcccccttatgctgatatccatccaatgagggcaatcttcatgattcctacaaatcctcctcccacattccgaaaaccagagctatggtcagataactttacagattttgtgaaacagtgtcttgtaaagagccctgagcagagggccacagccactcagctcctgcagcacccatttgtcaggagtgccaaaggagtgtcaatactgcgagacttaattaatgaagccatggatgtgaaactgaaacgccaggaatcccagcagcgggaagtggaccaggacgatgaagaaaactcagaagaggatgaaatggattctggcacgatggttcgagcagtgggtgatgagatgggcactgtccgagtagccagcaccatgactgatggagccaatactatgattgagcacgatgacacgttgccatcacaactgggcaccatggtgatcaatgcagaggatgaggaagaggaaggaactatgaaaagaagggatgagaccatgcagcctgcgaaaccatcctttcttgaatattttgaacaaaaagaaaaggaaaaccagatcaacagctttggcaagagtgtacctggtccactgaaaaattcttcagattggaaaataccacaggatggagactacgagtttaaaactagccaagaacagcagtctggaaaagacatatgtatccaaaattgccagggaaacctgctgtgtagatacgctttctgagaaaccacatgcttaagagttggacagtggaggaccttcagaagaggctcttggccctggaccccatgatggagcaggagattgaagagatccggcagaagtaccagtccaagcggcagcccatcctggatgccatagaggctaagaagagacggcaacaaaacttctgagcaaggccaggctgtgagggccccagctccacccaggctttgggtgaattctggatggcttgcctcatgtttgttagccagcacttctgctctgtcgtctctccacagcacctttgtgaactcaggaatgtgcgccagtgggaagggctctcttgacagtcagcgtgccatcttgatgtgtgtatgtacattggtcaggtatattatctcaaaggatttatattggcgcttttaactcagagttttaaaccccaggaacagagactcctagttgagtgatagctgggaaagttttacattgtctgtttttcttctcccaatagctttcaattgttctttctggaagacttttaaaaaaatataaatatgcatatatatatataaattataaatagattccccacgcagtgtggtggcatctctgtacaggta

SEQ ID NO: 180382 - DNA, 6342 bp, Homo sapiens
  Payload ID: 15527
  Gene Symbol: STK4
  Gene Name: serine/threonine kinase 4
  Uniprot ID: Q13043
  ENST ID: ENST00000372806
  CDS Start-End: 96-1559
ggaaagcggaagtgtgggagggtctgcggggcgggctcaggaggtccgcgggaggatggagcagtgagcgggtctgggcggctgctggcagcgccatggagacggtacagctgaggaacccgccgcgccggcagctgaaaaagttggatgaagatagtttaaccaaacaaccagaagaagtatttgatgtcttagagaaacttggagaagggtcctatggcagcgtatacaaagctattcataaagagaccggccagattgttgctattaagcaagttcctgtggaatcagacctccaggagataatcaaagaaatctctataatgcagcaatgtgacagccctcatgtagtcaaatattatggcagttattttaagaacacagacttatggatcgttatggagtactgtggggctggttctgtatctgatatcattcgattacgaaataaaacgttaacagaagatgaaatagctacaatattacaatcaactcttaagggacttgaataccttcattttatgagaaaaatacaccgagatatcaaggcaggaaatattttgctaaatacagaaggacatgcaaaacttgcagattttggggtagcaggtcaacttacagataccatggccaagcggaatacagtgataggaacaccattttggatggctccagaagtgattcaggaaattggatacaactgtgtagcagacatctggtccctgggaataactgccatagaaatggctgaaggaaagcccccttatgctgatatccatccaatgagggcaatcttcatgattcctacaaatcctcctcccacattccgaaaaccagagctatggtcagataactttacagattttgtgaaacagtgtcttgtaaagagccctgagcagagggccacagccactcagctcctgcagcacccatttgtcaggagtgccaaaggagtgtcaatactgcgagacttaattaatgaagccatggatgtgaaactgaaacgccaggaatcccagcagcgggaagtggaccaggacgatgaagaaaactcagaagaggatgaaatggattctggcacgatggttcgagcagtgggtgatgagatgggcactgtccgagtagccagcaccatgactgatggagccaatactatgattgagcacgatgacacgttgccatcacaactgggcaccatggtgatcaatgcagaggatgaggaagaggaaggaactatgaaaagaagggatgagaccatgcagcctgcgaaaccatcctttcttgaatattttgaacaaaaagaaaaggaaaaccagatcaacagctttggcaagagtgtacctggtccactgaaaaattcttcagattggaaaataccacaggatggagactacgagtttcttaagagttggacagtggaggaccttcagaagaggctcttggccctggaccccatgatggagcaggagattgaagagatccggcagaagtaccagtccaagcggcagcccatcctggatgccatagaggctaagaagagacggcaacaaaacttctgagcaaggccaggctgtgagggccccagctccacccaggctttgggtgaattctggatggcttgcctcatgtttgttagccagcacttctgctctgtcgtctctccacagcacctttgtgaactcaggaatgtgcgccagtgggaagggctctcttgacagtcagcgtgccatcttgatgtgtgtatgtacattggtcaggtatattatctcaaaggatttatattggcgcttttaactcagagttttaaaccccaggaacagagactcctagttgagtgatagctgggaaagttttacattgtctgtttttcttctcccaatagctttcaattgttctttctggaagacttttaaaaaaatataaatatgcatatatatatataaattataaatagattccccacgcagtgtggtggcatctctgtacaggtacagttttaaacggtttgcctcttttctgtaagattatggtactgtggaacatgagggcagaggacaccgggaggctgttagggggtcactgaatcccaggagccaacctccccctttgcagggctgcatttaaaaattaggtttgggacagttcttgtaccgtggtttcagccttgtgtggtcatcactggcttctggagctattggtgatgtccaagggaaagctttgagagtttatgtttactctttgagtcccaggagaagcctggcaccctctttgcaaattggcctttgctctttcaatgcctttcatccatctccactctctcaactgcctaaagtcacagcacagatactgcccagtgccttaagaggagacatgatctctaccagggactctcagcaaacacgggactgtgttcagtccacaaaggaaaagcgtttttgaagctctcattgttcatgtaaaaatcatacacgtggcatgttgctccacattccttacacacaggggtagaggggattgcttttgtgacccacgttcaaatatgtgactgttttcttttctcttttactgctaagcagcctggaaaggataaatgaatattagactaagatttgttttccaggaggctcaatctgaacacacagaatgtcagagctggaagggactatagagatcatctgatctgatcctcttgtacggatgatcgcaaaactgaggtgtagagaggggaatggccaaaatcacaaagcaagttagcgttaagagctgagactagaattcagggtcctcactcccaggccaccgaaccatgcagccccttctttgggggaagagacctgtgtcagtcttggttaattgttccagggaaccttgctaacagaaacttgctcttgccttggctcttcagtagatgacctggctgtaaagagattccctggacgagccagatcattcagtttcagcgagtccttgagctccacaacatctaccagatatagcagacaagcacccatggaggcaggtttcgggcctgaagcagatcagagggctttgcaaaagacagcatagagccatcttcctgcaactttacctctttccctcagatggggagccatgactgggttgcacctcaggatactgtaatttgactccataattgcttttgctcctgaaacctgggaatcaatggaaaggcagggaatgtgcctcttctgtggccagattctgttatttgcaattaaagcaagtttttaaaaaatgcaagaggcagttgttagtcttcagggcttggcaactgaaatagctatgtggcggatacggaaaacagaggacaatttgaggatcttgctggaataataaatgacagctaccatttgttgagcacctattatatatcaggcactgagctgggtaggctctaaacttcacaataaccctgtgacttaactactttatctccattttgtagttgaagaaataagttcagagagaaagattccttcccaaggtcatgcagctagtaaatgatagaatcaggattcatagcatcactatagggggtcaatatttacacaaaaaaggaaagtcacaagcctgtttaaaatgaagtgaccaccttttcttgcatagactaaataactcgaactggcatttttaggttggaaagacagctgaattagtagttaagtctgatagccaagtaagttttaaaaaccaaagcatccaggatgcacacccctgcaccatttgctgtgcgaattaatagttctgtctctctctctctttcttttttctttttattctttgagatggattttcgctcttgtcgcccaggctggagtacaatggcacgatcttggctcactgcaacctccgcctcccgggttcaagcgattcttctgctgggattacagcatatgccaccatgcccagattatttttttgtatttgtagtagagacggggtttcaccatgtcagtcaggctggtcttgaactcctgacctcaggtgatccacccgcctcagcctcccacactgctgggattacaggcatgagccaccgctcctggcctctctttcttttttaaacaaagaactttgcacttggccagagaggaggagaaagcccattttctcccttcctaagctagatccaaataaaagaaagttcagttttcccccataactattcttgggtcatgaactttgatctggagtttgttttgtttcaggaatgtgtgcacccagcttgctgatccaacaaagtctattgcttaccagtctagcttgatgaagccttttggccagaagtcaatttgttttggatcagagaaatttcctgacaaggtatatttgttttctagtgacagaaaggcaaaggaacaagtcctagttgttgttgttgttgttgaatactaaatttaagatatgtcagcttgctttcaatgagccttgggcttctgttattgcttgagcatttggaactcgagcttccagagaaatttgaggtcctcgcttgttctctgccttcaagaaacaatgacctgattctgtctttaaaaaaaaaaatctcagaattctttttttgtttgtgtttttttttttttttgagacagagtctcactctgttgcccaggctggagtgcagtggcgccatctcggctcactgcaacctccgcctcccaggttcaagcaattctcctgcctcagcctcccaggtagctgccactacaggtgctgcaccaccacgcccggctaatttttgtatttttagtagagacagggtttcaccatattagccaggtgggtcttgaactcctgaccttgtgatccacccgcctcggcctcccaaagtgctgggattacaggcgtgagccaccttgcctggccaaaaatctcagaattctttaagactgttttaattgctccatcagtaattttgaagcactttcctttttttttttttttcccctttttgtccctttccccaagccaccaattggatggatgaatgtttgacggggaagaggaagggtaggaggatgcatggatgagtggatgagtggatcgatggatgtattgataaatagatagaaccagtcatctgaagcaacttaagaattgtagccttgactccttgagactgtagatttcgatccaggaaacatttatttagcacctgccagatgccagaaatttataccatttaaaactcagtaagtcttttaaatatcaggaaggagagaagcgacatcatgatacatcctatgggtattaaaaagccaatagaatattatgaataattttatgctaataaatttaacaacttcaacatcataaacaaattccttgaaaaataaaaagtaccaaaattcattcaagaagaaatagataccagcctgagcaacatggcaaaatcccatctctacaaaacatcaaaaaaaaaaaaaattagtcgggcatggtggtgcacacctgtaatcccagcttgtcaggaggctgaagtgggaggatcacctgagcccagggaggtcaaggatgcagtgagccatggtctcaccactgcactctagcctgggtgacagaatgagaccccgtctcaaaaaaaaagaagaagtagataatctgaatagccctatatctatagaaacttaatagtgctgggagatataggtattattatcctcattttacagatgtgaaaattgaggctcagagaagtaaagtctattgctcaaggtcatgtggctagaatatggcagagccatgattcagatccaggtcttctgattcttattccagtgtcctttctagcataccatgttgcctctaaagattgcagctccttatttactagaaaattgttcctgcccaatctacatctccacctcaccccatcttttcttaagcactatgtttgtgtttttatcagtattatattcattgtctttggaatacatgttcttgtttgtgtttggaaaaaaaatctcttttaccagcttgcactcggaccaacttggaaaaaaaaaagcttaaatgtttttgctatgtacagtttaaaaatgtgaagtttgtagctttaactttttgtaagaaaatctaataacactggcttaagtgctgacttgaaatgctattttgtaaggtttggatgtaagtaatcaattgaggtcagcagtttgtatgagacatagcttcctccattgcccccactccttttttcttttttaagtttgagatgcttcctgtgtttttatgttagaattgttgttctccttcttttcttcttcctatacctcatcacgtttgttttaaataaactgtcctttggaccacaaaccctta

SEQ ID NO: 180383 - DNA, 6161 bp, Homo sapiens
  Payload ID: 15527
  Gene Symbol: STK4
  Gene Name: serine/threonine kinase 4
  ENST ID: ENST00000499879
  CDS Start-End: 91-1389
gcggaagtgtgggagggtctgcggggcgggctcaggaggtccgcgggaggatggagcagtgagcgggtctgggcggctgctggcagcgccatggagacggtacagctgaggaacccgccgcgccggcagctgaaaaagttggatgaagatagtttaaccaaacaaccagaagaagtatttgatgtcttagagaaacttggagaagggtcctatggcagcgtatacaaagctattcataaagagaccggccagattgttgctattaagcaagttcctgtggaatcagacctccaggagataatcaaagaaatctctataatgcagcaatgtgacagccctcatgtagtcaaatattatggcagttattttaagaacacagacttatggatcgttatggagtactgtggggctggttctgtatctgatatcattcgattacgaaataaaacggataccatggccaagcggaatacagtgataggaacaccattttggatggctccagaagtgattcaggaaattggatacaactgtgtagcagacatctggtccctgggaataactgccatagaaatggctgaaggaaagcccccttatgctgatatccatccaatgagggcaatcttcatgattcctacaaatcctcctcccacattccgaaaaccagagctatggtcagataactttacagattttgtgaaacagtgtcttgtaaagagccctgagcagagggccacagccactcagctcctgcagcacccatttgtcaggagtgccaaaggagtgtcaatactgcgagacttaattaatgaagccatggatgtgaaactgaaacgccaggaatcccagcagcgggaagtggaccaggacgatgaagaaaactcagaagaggatgaaatggattctggcacgatggttcgagcagtgggtgatgagatgggcactgtccgagtagccagcaccatgactgatggagccaatactatgattgagcacgatgacacgttgccatcacaactgggcaccatggtgatcaatgcagaggatgaggaagaggaaggaactatgaaaagaagggatgagaccatgcagcctgcgaaaccatcctttcttgaatattttgaacaaaaagaaaaggaaaaccagatcaacagctttggcaagagtgtacctggtccactgaaaaattcttcagattggaaaataccacaggatggagactacgagtttcttaagagttggacagtggaggaccttcagaagaggctcttggccctggaccccatgatggagcaggagattgaagagatccggcagaagtaccagtccaagcggcagcccatcctggatgccatagaggctaagaagagacggcaacaaaacttctgagcaaggccaggctgtgagggccccagctccacccaggctttgggtgaattctggatggcttgcctcatgtttgttagccagcacttctgctctgtcgtctctccacagcacctttgtgaactcaggaatgtgcgccagtgggaagggctctcttgacagtcagcgtgccatcttgatgtgtgtatgtacattggtcaggtatattatctcaaaggatttatattggcgcttttaactcagagttttaaaccccaggaacagagactcctagttgagtgatagctgggaaagttttacattgtctgtttttcttctcccaatagctttcaattgttctttctggaagacttttaaaaaaatataaatatgcatatatatatataaattataaatagattccccacgcagtgtggtggcatctctgtacaggtacagttttaaacggtttgcctcttttctgtaagattatggtactgtggaacatgagggcagaggacaccgggaggctgttagggggtcactgaatcccaggagccaacctccccctttgcagggctgcatttaaaaattaggtttgggacagttcttgtaccgtggtttcagccttgtgtggtcatcactggcttctggagctattggtgatgtccaagggaaagctttgagagtttatgtttactctttgagtcccaggagaagcctggcaccctctttgcaaattggcctttgctctttcaatgcctttcatccatctccactctctcaactgcctaaagtcacagcacagatactgcccagtgccttaagaggagacatgatctctaccagggactctcagcaaacacgggactgtgttcagtccacaaaggaaaagcgtttttgaagctctcattgttcatgtaaaaatcatacacgtggcatgttgctccacattccttacacacaggggtagaggggattgcttttgtgacccacgttcaaatatgtgactgttttcttttctcttttactgctaagcagcctggaaaggataaatgaatattagactaagatttgttttccaggaggctcaatctgaacacacagaatgtcagagctggaagggactatagagatcatctgatctgatcctcttgtacggatgatcgcaaaactgaggtgtagagaggggaatggccaaaatcacaaagcaagttagcgttaagagctgagactagaattcagggtcctcactcccaggccaccgaaccatgcagccccttctttgggggaagagacctgtgtcagtcttggttaattgttccagggaaccttgctaacagaaacttgctcttgccttggctcttcagtagatgacctggctgtaaagagattccctggacgagccagatcattcagtttcagcgagtccttgagctccacaacatctaccagatatagcagacaagcacccatggaggcaggtttcgggcctgaagcagatcagagggctttgcaaaagacagcatagagccatcttcctgcaactttacctctttccctcagatggggagccatgactgggttgcacctcaggatactgtaatttgactccataattgcttttgctcctgaaacctgggaatcaatggaaaggcagggaatgtgcctcttctgtggccagattctgttatttgcaattaaagcaagtttttaaaaaatgcaagaggcagttgttagtcttcagggcttggcaactgaaatagctatgtggcggatacggaaaacagaggacaatttgaggatcttgctggaataataaatgacagctaccatttgttgagcacctattatatatcaggcactgagctgggtaggctctaaacttcacaataaccctgtgacttaactactttatctccattttgtagttgaagaaataagttcagagagaaagattccttcccaaggtcatgcagctagtaaatgatagaatcaggattcatagcatcactatagggggtcaatatttacacaaaaaaggaaagtcacaagcctgtttaaaatgaagtgaccaccttttcttgcatagactaaataactcgaactggcatttttaggttggaaagacagctgaattagtagttaagtctgatagccaagtaagttttaaaaaccaaagcatccaggatgcacacccctgcaccatttgctgtgcgaattaatagttctgtctctctctctctttcttttttctttttattctttgagatggattttcgctcttgtcgcccaggctggagtacaatggcacgatcttggctcactgcaacctccgcctcccgggttcaagcgattcttctgctgggattacagcatatgccaccatgcccagattatttttttgtatttgtagtagagacggggtttcaccatgtcagtcaggctggtcttgaactcctgacctcaggtgatccacccgcctcagcctcccacactgctgggattacaggcatgagccaccgctcctggcctctctttcttttttaaacaaagaactttgcacttggccagagaggaggagaaagcccattttctcccttcctaagctagatccaaataaaagaaagttcagttttcccccataactattcttgggtcatgaactttgatctggagtttgttttgtttcaggaatgtgtgcacccagcttgctgatccaacaaagtctattgcttaccagtctagcttgatgaagccttttggccagaagtcaatttgttttggatcagagaaatttcctgacaaggtatatttgttttctagtgacagaaaggcaaaggaacaagtcctagttgttgttgttgttgttgaatactaaatttaagatatgtcagcttgctttcaatgagccttgggcttctgttattgcttgagcatttggaactcgagcttccagagaaatttgaggtcctcgcttgttctctgccttcaagaaacaatgacctgattctgtctttaaaaaaaaaaatctcagaattctttttttgtttgtgtttttttttttttttgagacagagtctcactctgttgcccaggctggagtgcagtggcgccatctcggctcactgcaacctccgcctcccaggttcaagcaattctcctgcctcagcctcccaggtagctgccactacaggtgctgcaccaccacgcccggctaatttttgtatttttagtagagacagggtttcaccatattagccaggtgggtcttgaactcctgaccttgtgatccacccgcctcggcctcccaaagtgctgggattacaggcgtgagccaccttgcctggccaaaaatctcagaattctttaagactgttttaattgctccatcagtaattttgaagcactttcctttttttttttttttcccctttttgtccctttccccaagccaccaattggatggatgaatgtttgacggggaagaggaagggtaggaggatgcatggatgagtggatgagtggatcgatggatgtattgataaatagatagaaccagtcatctgaagcaacttaagaattgtagccttgactccttgagactgtagatttcgatccaggaaacatttatttagcacctgccagatgccagaaatttataccatttaaaactcagtaagtcttttaaatatcaggaaggagagaagcgacatcatgatacatcctatgggtattaaaaagccaatagaatattatgaataattttatgctaataaatttaacaacttcaacatcataaacaaattccttgaaaaataaaaagtaccaaaattcattcaagaagaaatagataccagcctgagcaacatggcaaaatcccatctctacaaaacatcaaaaaaaaaaaaaattagtcgggcatggtggtgcacacctgtaatcccagcttgtcaggaggctgaagtgggaggatcacctgagcccagggaggtcaaggatgcagtgagccatggtctcaccactgcactctagcctgggtgacagaatgagaccccgtctcaaaaaaaaagaagaagtagataatctgaatagccctatatctatagaaacttaatagtgctgggagatataggtattattatcctcattttacagatgtgaaaattgaggctcagagaagtaaagtctattgctcaaggtcatgtggctagaatatggcagagccatgattcagatccaggtcttctgattcttattccagtgtcctttctagcataccatgttgcctctaaagattgcagctccttatttactagaaaattgttcctgcccaatctacatctccacctcaccccatcttttcttaagcactatgtttgtgtttttatcagtattatattcattgtctttggaatacatgttcttgtttgtgtttggaaaaaaaatctcttttaccagcttgcactcggaccaacttggaaaaaaaaaagcttaaatgtttttgctatgtacagtttaaaaatgtgaagtttgtagctttaactttttgtaagaaaatctaataacactggcttaagtgctgacttgaaatgctattttgtaaggtttggatgtaagtaatcaattgaggtcagcagtttgtatgagacatagcttcctccattgcccccactccttttttcttttttaagtttgagatgcttcctgtgtttttatgttagaattgttgttctccttcttttcttcttcctatacctcatcacgtttgttttaaataaactgtcctttggacc

SEQ ID NO: 180384 - DNA, 722 bp, Homo sapiens
  Payload ID: 15527
  Gene Symbol: STK4
  Gene Name: serine/threonine kinase 4
  ENST ID: ENST00000474717
  CDS Start-End: 258-722
gtttatagaagtttcagttctgaagtttaagaggagtttcacttcatcccttttcattttgaaggcagctgaaaaagttggatgaagatagtttaaccaaacaaccagaagaagtatttgatgtcttagagaaacttggagaagggtcctatggcagcgtatacaaagctattcataaagagaccggccagattgttgctattaagcaagttcctgtggaatcagacctccaggagataatcaaagaaatctctataatgcagcaatgtgacagccctcatgtagtcaaatattatggcagttattttaagaacacagacttatggatcgttatggagtactgtggggctggttctgtatctgatatcattcgattacgaaataaaacgttaacagaagatgaaatagctacaatattacaatcaactcttaagggacttgaataccttcattttatgagaaaaatacaccgagatatcaaggcaggaaatattttgctaaatacagaaggacatgcaaaacttgcagattttggggtagcaggtcaacttacagataccatggccaagcggaatacagtgataggaacaccattttggatggctccagaagtgattcaggaaattggatacaactgtgtagcagacatctggtccctgggaataactgccatagaaatggctgaaggaaagcccccttatgctgatatccatccaatgagg

SEQ ID NO: 180385 - DNA, 1850 bp, Homo sapiens
  Payload ID: 15527
  Gene Symbol: STK4
  Gene Name: serine/threonine kinase 4
  ENST ID: ENST00000487587
  CDS Start-End: 17-211
ggctgctggcagcgccatggagacggtacagctgaggaacccgccgcgccggcagctgaaaaagttggatgaagatagtttaaccaaacaaccagaagaagtatttgatgtcttagagaaacttggagaaggttggaaaaatactctttggaatccagcaagaaatcaagcagagaagggaagtaaaaatgacacaccagctgtgctgtgaaaagacaagtccaagatgaatctgaagactgccagttgactggcatcattaaagagacgaggtctcactgtgttgcccaggctggtcttgaactcttggccttaagtgatcctcctgcctcagcctcccaaagtgctaggattagagacgtgaaccactgcacctggacaaattgcgttttagatctatggatgtcttctgcaaggaatgtggaaatttccctatgaagatatcaccagggagaaaacaaagcttcagatctttcttcccatactatcaccttattgttcttctaaataataccagatttctggtatttcttggatttctgttattctgactgaatgaacctaagcaagcctcatttaactaggaatattttgaaggaagaccttcactgcacttcttttccaaacatgtgacacaatgctattctttttttttgagattaagtcttgctctgtcaccaggctggagtgcaatgtcacaatctcggctcactgcaacctccgcctcccaggttcaagcgattcccctgcctcagcctcctgagtagctgggactataggcacacaccaccacgcccgacttattttttgtattttagtagagatggggtttcaccatattggccaggatggtcttgatctcgtgatcttgtgatctgcctgcctcagcctcccaaattgctggaattacagatgtgagccaccacgcctggccaatgctattcttaaattgttcgggaggatgaatggtttgtgaactctcactgacttgtatcttgtgaaatgagctatggctaaaaaaactgttggattctggaggctgcaatcattctgtgttatgaggatcatatggatctgtggcagagtagagccaaagctccagaccaggatgagtggagagcacttgggaagtgttttcaagtggagcctagcaccttttttcttctacttaaagttgtacacattgactcatttgaatttttatcatagaatgataacaaaagcatcttgcccatggtttcataaaaaatgagtgctattgttaagacttgtatctgattaatttggcctcagatactgtggtatttccatttttctacatagatccttgccttgcatggcttatgtaaaacacctacttctccattctctgctgtcagttgtaattcattgaatcatctcattttgttgtagggaatcaagttttaagggacttgcttgtgagtatgattgctgaaatcttctaaccaccccctatccctgccttcagattactgtagatgcagtatatggaatcaggaatcttaacttcatgtgagctattggagttttccttgctatcaggatgcatagggaggtatgaagagtgttctggtcaagattgctgagtgagtgtatgaagagaactttctaatatataagaataatgagtgaaaattattttaaatataaggatatatagacagctatggacaagggataggaaagaaatctaaataatcagcggagactaaagcatgccttatccttgtcaggagattgcatttgagcttcctgcatgaagttgggggctggaactcggctctccatctgtgaactaaagctgaaataaatttgcctgaccacaacca

SEQ ID NO: 180386 - DNA, 4837 bp, Homo sapiens
  Payload ID: 15528
  Gene Symbol: STK40
  Gene Name: serine/threonine kinase 40
  Uniprot ID: Q8N2I9
  ENST ID: ENST00000359297
  CDS Start-End: 9-1262
agctgagaatgaagcggagagcatcagacagaggagctggggaaacgtcggccagggccaaggctctaggaagtgggatttctggaaataatgcaaagagagctggaccattcatccttggtccccgtctgggcaactcaccggtgccaagcatagtgcagtgtttggcgaggaaagatggcacggatgacttctatcagctgaagatcctgaccctggaggagaggggggaccaaggcatagagagccaggaagagcggcagggcaagatgctgctgcacaccgagtactcactgctgtctctcctgcacacgcaggatggcgtggtgcaccaccacggcctcttccaggaccgcacctgtgaaatcgttgaggacacagaatccagccggatggttaagaagatgaagaagcgcatctgcctcgtcctggactgcctctgtgctcatgacttcagcgataagaccgctgacctcatcaacctgcagcactacgtcatcaaggagaagaggctcagcgagagggagactgtggtaatcttctacgacgtggtccgcgtggtggaggccctgcaccagaaaaatatcgtgcacagagacctgaagctggggaacatggtgctcaacaagaggacacatcggataaccatcaccaacttctgcctcgggaagcatctggtgagcgagggggacctgctgaaggaccagagagggagccctgcctacatcagtcccgacgtgctcagcggccggccgtaccgtggcaagcccagtgacatgtgggccctgggcgtggtgctcttcaccatgctgtatggccagttccccttctacgacagcatcccgcaggagctcttccgcaagatcaaggctgccgagtataccattcctgaggatggacgggtttctgagaacaccgtgtgtctcatccggaagctgctggtccttgacccccagcagcgcctggccgccgccgacgtcctggaggccctcagtgccatcattgcatcatggcagtccctgtcatctctgagtgggcctttgcaagtggttcctgacattgatgaccaaatgagcaatgcggatagctcccaggaggtgagttggggagggcagatgggccattacccagccccaagggacaggcttctgggggcaggcagggcaagggcagaggtggcagctacccgcaggccacagagtttccttggtcttcttccccagccttggggtgggaaagggagacttcagtcctcagcctgagctgcctggggcctgccttgggcttggtgtagctggagatctttggccagagagacctgtgagacagccgagctggagccagtgcccaagtggcccaggccagccctctcagcttcctcctgctgcccaagtcacatttctctgccccctgactcagagttctctctcacccttcctgcttttcatttttcagatgattcatttctccctatttctttcctccccattccctgcactggagaaagtgttgggcctagggtgggggcagagacttgggcaccaggcagcagagggcaggtgatcttagggtgccccctggagggcagggcttggccgagcaacagcattgctgggccctggatattggaaggaccttccctccctggcccaccttggagctccacagtgagcagtgtgcaggtaggaccaggaggggccgtgcctgggagagcctcccagagcctcctggcccccgaggaaagagagttccaatccctacccacctccagcttccaccctttagctgtttggctaaaatcatcatcactagcccgcagtgagtgcctaccccgagggcacctcattcagccctcactgcgggcctgcgtggcctgtgttcttagccccatgttacagaagaggaaacagggttagagaggactttcccaaagccacacagcttagaagtagtggagctaagccttgaacccaagtctcatccggaagccctgctgtctcctgtggtgactggcacggggacaccacttcagcttctgttaccatctgcctagaccatcccagggagctcagcatggggccctgcgtatgtggctcctccaggtgctgcgcccccagcccagggcttgctcgtacctcttgacgtgcattagccgcctcagggctcagagaacctttgcgaggggccagacagctaaggcttctgaggtaaagtgacctctcacgcagccagtgagttaggaagcatgagtctgcgtcagtcccgggtccgcagggcggcctgcaaggggagttgaggttggctggagggggtcagggacccaccctcagcgccactcccacccccggccttgaggcctgagggtgtggtgcctggaagggtgactgcaggagccaggctgccagcactcttgcctgccctcctgtctgctgcgctgccttcatctgggtttatctttgtctccttcccaccctccccgcctcaaaggcgaaggtgacggaggagtgctcccagtacgagtttgagaactacatgcgtcagcagctgctgctggccgaggagaagagctccatccatgacgcccggagctgggtacccaagcggcagttcggcagcgcaccaccggtgcgacggctgggccacgacgcacagcccatgacctccttggacacggccatcctggcgcagcgctacctgcggaaataacagcctcagccggggccaccagcactgctgccacttcttccagccccagccaaaggcgtggctgtcagggctgggccctgtagtgctggactctcccgggccacaatagggacagggcagggacagggacagcccaggtcacacgtggggtcagcagaggtaccacgaagctaccttttgggatgattgctcgattgtttggtttttaaatctgagaagcctagataactaatctgcttttaatcacgatgttttaatctacctctgtctctttaaccatgctgtctctggactgagcaagagggaggagggagcctgctcaccccactccagggccttccccagcggccaccaactgacctggggcgctgctccccacagtccaaataagctgaaagtgcagctcgctgcaggccccagagcgagcttcccctcctccctgctctcccaggcccctgccacagcctctttccgtccctctctttctgatccaggcccctcagtccaagctttggaaaaccttcacctcatcttaaaccgaactcaaatatatttatttttttaccataccaacttctctcccatctctaggtggctcagtccatggccactccctgcccccagcctggctggacagcaaggaatccacagcccacacgtgagctccctcctcacccccaggcagggaagcccctcctgccagtccctgtcccctttcagcccaccagtccctctctgctgccggtgatgggaggcctttctagacctggctctttctctcccgtctcagtggcttctctgaggtgctgtacacgcgcgttaacctgttcccttctctatccttccccgtggtactgagctcacgtggactcccagtgcgaaggggcccatgggttgggctgcaggcctggccgtgagcgggggctgcctgcacgctcccctagcctactcttgtgtttaggggatggtgggaacatatcccagtgcccttgcctcataatagatgtggtgactctcccggtagaccctagcaagggtcctccatggtggtgagggactcaggagaattgtagggattgggggaccctgcctgcctggcttgagaacagccctgctgcccttttgagccgagattttgaagtggatgcccgtcttgccagaaatgctgttctcaccagaatgccccctccccttgcccttactggacttggccctgcctgatgccaagcaaagacccttccccagaggcctaccccccatatgtcctcagagaggctgagtgtcccctccaggcagtcatgggccctgaggcccctcctgcctggccctgctccccagtggggaggtgactgtgtttcccagagtgtgagccgctctcctccccctaaaaagctgactcactgtgagtgaccttgggcaagttcccaaacctccttgtgcctcagtttccccatctggaaaaaatggggccacctcttgccagcagtagcagggctgcccacgcccctttctccccatgccccatccagcacttgggcgactcatgcctctgcctcagtgggcctgtgggagcctactggagcccagcacttactccccctgagcagcgagcctgcgtctgtctcagctgtccagcgctgagggccagggtcttgtgctgtggggctgggggatgccctcttttctatatttatttcatagaaagtctcctgcgggagcggaaatgcagtccggcctagggctcccagcccttgactgtcctcctgtgagggcctgaagctgggccagggcccgtcgcagcggagccccctctcagcagcccaccgggtccctccaggctgctgcccgtgcgtggtctttctcctccttttcaaagcaatagccgccgggtctgcaaagccctgtcagacagactgggcccttccaaggtcaagccatgtgtctgatgacattcctggtgaagcaaaggagaggaggatgggtcagccctcactgggtgtcacacactgagagaagtcctattgtaaagaaacggaaaaagtcacaaaaaagtttgtataaagacatatttttgtactacatggggactcttcctgcatgtcagcaataaaacttcctgatctggaaccac

SEQ ID NO: 180387 - DNA, 3846 bp, Homo sapiens
  Payload ID: 15528
  Gene Symbol: STK40
  Gene Name: serine/threonine kinase 40
  Uniprot ID: Q8N2I9
  ENST ID: ENST00000373129
  CDS Start-End: 408-1715
ggcggcggcggcggcggcggcggctcgggtggctgcgctgggaggcggcggtgagaggctcgcacgcctccagcccggccccggccccccgggagggagagccgagcagccccggctctgggctacggactatgggcgaatagctctgaccacccggcgaagtgcacacacccagaagctatgtccttcggcagtaaaagttttacagcacaatatatgtgctctgctctcctcccgcaatcctgctccaagagatcttaagctggaggcaccaggtctgaattccagactcctccccaccacccacacttcacctccaactggagcatgaccacagacccattcagggaggctggcggactcttcatcctggacagtcccttactgtatgtcaagtagagctgagaatgaagcggagagcatcagacagaggagctggggaaacgtcggccagggccaaggctctaggaagtgggatttctggaaataatgcaaagagagctggaccattcatccttggtccccgtctgggcaactcaccggtgccaagcatagtgcagtgtttggcgaggaaagatggcacggatgacttctatcagctgaagatcctgaccctggaggagaggggggaccaaggcatagagagccaggaagagcggcagggcaagatgctgctgcacaccgagtactcactgctgtctctcctgcacacgcaggatggcgtggtgcaccaccacggcctcttccaggaccgcacctgtgaaatcgttgaggacacagaatccagccggatggttaagaagatgaagaagcgcatctgcctcgtcctggactgcctctgtgctcatgacttcagcgataagaccgctgacctcatcaacctgcagcactacgtcatcaaggagaagaggctcagcgagagggagactgtggtaatcttctacgacgtggtccgcgtggtggaggccctgcaccagaaaaatatcgtgcacagagacctgaagctggggaacatggtgctcaacaagaggacacatcggataaccatcaccaacttctgcctcgggaagcatctggtgagcgagggggacctgctgaaggaccagagagggagccctgcctacatcagtcccgacgtgctcagcggccggccgtaccgtggcaagcccagtgacatgtgggccctgggcgtggtgctcttcaccatgctgtatggccagttccccttctacgacagcatcccgcaggagctcttccgcaagatcaaggctgccgagtataccattcctgaggatggacgggtttctgagaacaccgtgtgtctcatccggaagctgctggtccttgacccccagcagcgcctggccgccgccgacgtcctggaggccctcagtgccatcattgcatcatggcagtccctgtcatctctgagtgggcctttgcaagtggttcctgacattgatgaccaaatgagcaatgcggatagctcccaggaggcgaaggtgacggaggagtgctcccagtacgagtttgagaactacatgcgtcagcagctgctgctggccgaggagaagagctccatccatgacgcccggagctgggtacccaagcggcagttcggcagcgcaccaccggtgcgacggctgggccacgacgcacagcccatgacctccttggacacggccatcctggcgcagcgctacctgcggaaataacagcctcagccggggccaccagcactgctgccacttcttccagccccagccaaaggcgtggctgtcagggctgggccctgtagtgctggactctcccgggccacaatagggacagggcagggacagggacagcccaggtcacacgtggggtcagcagaggtaccacgaagctaccttttgggatgattgctcgattgtttggtttttaaatctgagaagcctagataactaatctgcttttaatcacgatgttttaatctacctctgtctctttaaccatgctgtctctggactgagcaagagggaggagggagcctgctcaccccactccagggccttccccagcggccaccaactgacctggggcgctgctccccacagtccaaataagctgaaagtgcagctcgctgcaggccccagagcgagcttcccctcctccctgctctcccaggcccctgccacagcctctttccgtccctctctttctgatccaggcccctcagtccaagctttggaaaaccttcacctcatcttaaaccgaactcaaatatatttatttttttaccataccaacttctctcccatctctaggtggctcagtccatggccactccctgcccccagcctggctggacagcaaggaatccacagcccacacgtgagctccctcctcacccccaggcagggaagcccctcctgccagtccctgtcccctttcagcccaccagtccctctctgctgccggtgatgggaggcctttctagacctggctctttctctcccgtctcagtggcttctctgaggtgctgtacacgcgcgttaacctgttcccttctctatccttccccgtggtactgagctcacgtggactcccagtgcgaaggggcccatgggttgggctgcaggcctggccgtgagcgggggctgcctgcacgctcccctagcctactcttgtgtttaggggatggtgggaacatatcccagtgcccttgcctcataatagatgtggtgactctcccggtagaccctagcaagggtcctccatggtggtgagggactcaggagaattgtagggattgggggaccctgcctgcctggcttgagaacagccctgctgcccttttgagccgagattttgaagtggatgcccgtcttgccagaaatgctgttctcaccagaatgccccctccccttgcccttactggacttggccctgcctgatgccaagcaaagacccttccccagaggcctaccccccatatgtcctcagagaggctgagtgtcccctccaggcagtcatgggccctgaggcccctcctgcctggccctgctccccagtggggaggtgactgtgtttcccagagtgtgagccgctctcctccccctaaaaagctgactcactgtgagtgaccttgggcaagttcccaaacctccttgtgcctcagtttccccatctggaaaaaatggggccacctcttgccagcagtagcagggctgcccacgcccctttctccccatgccccatccagcacttgggcgactcatgcctctgcctcagtgggcctgtgggagcctactggagcccagcacttactccccctgagcagcgagcctgcgtctgtctcagctgtccagcgctgagggccagggtcttgtgctgtggggctgggggatgccctcttttctatatttatttcatagaaagtctcctgcgggagcggaaatgcagtccggcctagggctcccagcccttgactgtcctcctgtgagggcctgaagctgggccagggcccgtcgcagcggagccccctctcagcagcccaccgggtccctccaggctgctgcccgtgcgtggtctttctcctccttttcaaagcaatagccgccgggtctgcaaagccctgtcagacagactgggcccttccaaggtcaagccatgtgtctgatgacattcctggtgaagcaaaggagaggaggatgggtcagccctcactgggtgtcacacactgagagaagtcctattgtaaagaaacggaaaaagtcacaaaaaagtttgtataaagacatatttttgtactacatggggactcttcctgcatgtcagcaataaaacttcctgatctggaaccac

SEQ ID NO: 180388 - DNA, 3628 bp, Homo sapiens
  Payload ID: 15528
  Gene Symbol: STK40
  Gene Name: serine/threonine kinase 40
  Uniprot ID: Q8N2I9
  ENST ID: ENST00000373130
  CDS Start-End: 175-1497
gggaggcggcggcggcggcggcggcggctcgggtggctgcgctgggaggcggcggtgagaggctcgcacgcctccagcccggccccggccccccgggagggagagccgagcagccccggctctgggctacggactatgggcgaatagctctgaccacccggcgaagagctgagaatgaagcggagagcatcagacagaggagctggggaaacgtcggccagggccaaggctctaggaagtgggatttctggaaataatgcaaagagagctggaccattcatccttgctctctgtgccgtaggtccccgtctgggcaactcaccggtgccaagcatagtgcagtgtttggcgaggaaagatggcacggatgacttctatcagctgaagatcctgaccctggaggagaggggggaccaaggcatagagagccaggaagagcggcagggcaagatgctgctgcacaccgagtactcactgctgtctctcctgcacacgcaggatggcgtggtgcaccaccacggcctcttccaggaccgcacctgtgaaatcgttgaggacacagaatccagccggatggttaagaagatgaagaagcgcatctgcctcgtcctggactgcctctgtgctcatgacttcagcgataagaccgctgacctcatcaacctgcagcactacgtcatcaaggagaagaggctcagcgagagggagactgtggtaatcttctacgacgtggtccgcgtggtggaggccctgcaccagaaaaatatcgtgcacagagacctgaagctggggaacatggtgctcaacaagaggacacatcggataaccatcaccaacttctgcctcgggaagcatctggtgagcgagggggacctgctgaaggaccagagagggagccctgcctacatcagtcccgacgtgctcagcggccggccgtaccgtggcaagcccagtgacatgtgggccctgggcgtggtgctcttcaccatgctgtatggccagttccccttctacgacagcatcccgcaggagctcttccgcaagatcaaggctgccgagtataccattcctgaggatggacgggtttctgagaacaccgtgtgtctcatccggaagctgctggtccttgacccccagcagcgcctggccgccgccgacgtcctggaggccctcagtgccatcattgcatcatggcagtccctgtcatctctgagtgggcctttgcaagtggttcctgacattgatgaccaaatgagcaatgcggatagctcccaggaggcgaaggtgacggaggagtgctcccagtacgagtttgagaactacatgcgtcagcagctgctgctggccgaggagaagagctccatccatgacgcccggagctgggtacccaagcggcagttcggcagcgcaccaccggtgcgacggctgggccacgacgcacagcccatgacctccttggacacggccatcctggcgcagcgctacctgcggaaataacagcctcagccggggccaccagcactgctgccacttcttccagccccagccaaaggcgtggctgtcagggctgggccctgtagtgctggactctcccgggccacaatagggacagggcagggacagggacagcccaggtcacacgtggggtcagcagaggtaccacgaagctaccttttgggatgattgctcgattgtttggtttttaaatctgagaagcctagataactaatctgcttttaatcacgatgttttaatctacctctgtctctttaaccatgctgtctctggactgagcaagagggaggagggagcctgctcaccccactccagggccttccccagcggccaccaactgacctggggcgctgctccccacagtccaaataagctgaaagtgcagctcgctgcaggccccagagcgagcttcccctcctccctgctctcccaggcccctgccacagcctctttccgtccctctctttctgatccaggcccctcagtccaagctttggaaaaccttcacctcatcttaaaccgaactcaaatatatttatttttttaccataccaacttctctcccatctctaggtggctcagtccatggccactccctgcccccagcctggctggacagcaaggaatccacagcccacacgtgagctccctcctcacccccaggcagggaagcccctcctgccagtccctgtcccctttcagcccaccagtccctctctgctgccggtgatgggaggcctttctagacctggctctttctctcccgtctcagtggcttctctgaggtgctgtacacgcgcgttaacctgttcccttctctatccttccccgtggtactgagctcacgtggactcccagtgcgaaggggcccatgggttgggctgcaggcctggccgtgagcgggggctgcctgcacgctcccctagcctactcttgtgtttaggggatggtgggaacatatcccagtgcccttgcctcataatagatgtggtgactctcccggtagaccctagcaagggtcctccatggtggtgagggactcaggagaattgtagggattgggggaccctgcctgcctggcttgagaacagccctgctgcccttttgagccgagattttgaagtggatgcccgtcttgccagaaatgctgttctcaccagaatgccccctccccttgcccttactggacttggccctgcctgatgccaagcaaagacccttccccagaggcctaccccccatatgtcctcagagaggctgagtgtcccctccaggcagtcatgggccctgaggcccctcctgcctggccctgctccccagtggggaggtgactgtgtttcccagagtgtgagccgctctcctccccctaaaaagctgactcactgtgagtgaccttgggcaagttcccaaacctccttgtgcctcagtttccccatctggaaaaaatggggccacctcttgccagcagtagcagggctgcccacgcccctttctccccatgccccatccagcacttgggcgactcatgcctctgcctcagtgggcctgtgggagcctactggagcccagcacttactccccctgagcagcgagcctgcgtctgtctcagctgtccagcgctgagggccagggtcttgtgctgtggggctgggggatgccctcttttctatatttatttcatagaaagtctcctgcgggagcggaaatgcagtccggcctagggctcccagcccttgactgtcctcctgtgagggcctgaagctgggccagggcccgtcgcagcggagccccctctcagcagcccaccgggtccctccaggctgctgcccgtgcgtggtctttctcctccttttcaaagcaatagccgccgggtctgcaaagccctgtcagacagactgggcccttccaaggtcaagccatgtgtctgatgacattcctggtgaagcaaaggagaggaggatgggtcagccctcactgggtgtcacacactgagagaagtcctattgtaaagaaacggaaaaagtcacaaaaaagtttgtataaagacatatttttgtactacatggggactcttcctgcatgtcagcaataaaacttcctgatctggaaccac

SEQ ID NO: 180389 - DNA, 3621 bp, Homo sapiens
  Payload ID: 15528
  Gene Symbol: STK40
  Gene Name: serine/threonine kinase 40
  Uniprot ID: Q8N2I9
  ENST ID: ENST00000373132
  CDS Start-End: 183-1490
gccatggagggaggcggcggcggcggcggcggcggctcgggtggctgcgctgggaggcggcggtgagaggctcgcacgcctccagcccggccccggccccccgggagggagagccgagcagccccggctctgggctacggactatgggcgaatagctctgaccacccggcgaagagctgagaatgaagcggagagcatcagacagaggagctggggaaacgtcggccagggccaaggctctaggaagtgggatttctggaaataatgcaaagagagctggaccattcatccttggtccccgtctgggcaactcaccggtgccaagcatagtgcagtgtttggcgaggaaagatggcacggatgacttctatcagctgaagatcctgaccctggaggagaggggggaccaaggcatagagagccaggaagagcggcagggcaagatgctgctgcacaccgagtactcactgctgtctctcctgcacacgcaggatggcgtggtgcaccaccacggcctcttccaggaccgcacctgtgaaatcgttgaggacacagaatccagccggatggttaagaagatgaagaagcgcatctgcctcgtcctggactgcctctgtgctcatgacttcagcgataagaccgctgacctcatcaacctgcagcactacgtcatcaaggagaagaggctcagcgagagggagactgtggtaatcttctacgacgtggtccgcgtggtggaggccctgcaccagaaaaatatcgtgcacagagacctgaagctggggaacatggtgctcaacaagaggacacatcggataaccatcaccaacttctgcctcgggaagcatctggtgagcgagggggacctgctgaaggaccagagagggagccctgcctacatcagtcccgacgtgctcagcggccggccgtaccgtggcaagcccagtgacatgtgggccctgggcgtggtgctcttcaccatgctgtatggccagttccccttctacgacagcatcccgcaggagctcttccgcaagatcaaggctgccgagtataccattcctgaggatggacgggtttctgagaacaccgtgtgtctcatccggaagctgctggtccttgacccccagcagcgcctggccgccgccgacgtcctggaggccctcagtgccatcattgcatcatggcagtccctgtcatctctgagtgggcctttgcaagtggttcctgacattgatgaccaaatgagcaatgcggatagctcccaggaggcgaaggtgacggaggagtgctcccagtacgagtttgagaactacatgcgtcagcagctgctgctggccgaggagaagagctccatccatgacgcccggagctgggtacccaagcggcagttcggcagcgcaccaccggtgcgacggctgggccacgacgcacagcccatgacctccttggacacggccatcctggcgcagcgctacctgcggaaataacagcctcagccggggccaccagcactgctgccacttcttccagccccagccaaaggcgtggctgtcagggctgggccctgtagtgctggactctcccgggccacaatagggacagggcagggacagggacagcccaggtcacacgtggggtcagcagaggtaccacgaagctaccttttgggatgattgctcgattgtttggtttttaaatctgagaagcctagataactaatctgcttttaatcacgatgttttaatctacctctgtctctttaaccatgctgtctctggactgagcaagagggaggagggagcctgctcaccccactccagggccttccccagcggccaccaactgacctggggcgctgctccccacagtccaaataagctgaaagtgcagctcgctgcaggccccagagcgagcttcccctcctccctgctctcccaggcccctgccacagcctctttccgtccctctctttctgatccaggcccctcagtccaagctttggaaaaccttcacctcatcttaaaccgaactcaaatatatttatttttttaccataccaacttctctcccatctctaggtggctcagtccatggccactccctgcccccagcctggctggacagcaaggaatccacagcccacacgtgagctccctcctcacccccaggcagggaagcccctcctgccagtccctgtcccctttcagcccaccagtccctctctgctgccggtgatgggaggcctttctagacctggctctttctctcccgtctcagtggcttctctgaggtgctgtacacgcgcgttaacctgttcccttctctatccttccccgtggtactgagctcacgtggactcccagtgcgaaggggcccatgggttgggctgcaggcctggccgtgagcgggggctgcctgcacgctcccctagcctactcttgtgtttaggggatggtgggaacatatcccagtgcccttgcctcataatagatgtggtgactctcccggtagaccctagcaagggtcctccatggtggtgagggactcaggagaattgtagggattgggggaccctgcctgcctggcttgagaacagccctgctgcccttttgagccgagattttgaagtggatgcccgtcttgccagaaatgctgttctcaccagaatgccccctccccttgcccttactggacttggccctgcctgatgccaagcaaagacccttccccagaggcctaccccccatatgtcctcagagaggctgagtgtcccctccaggcagtcatgggccctgaggcccctcctgcctggccctgctccccagtggggaggtgactgtgtttcccagagtgtgagccgctctcctccccctaaaaagctgactcactgtgagtgaccttgggcaagttcccaaacctccttgtgcctcagtttccccatctggaaaaaatggggccacctcttgccagcagtagcagggctgcccacgcccctttctccccatgccccatccagcacttgggcgactcatgcctctgcctcagtgggcctgtgggagcctactggagcccagcacttactccccctgagcagcgagcctgcgtctgtctcagctgtccagcgctgagggccagggtcttgtgctgtggggctgggggatgccctcttttctatatttatttcatagaaagtctcctgcgggagcggaaatgcagtccggcctagggctcccagcccttgactgtcctcctgtgagggcctgaagctgggccagggcccgtcgcagcggagccccctctcagcagcccaccgggtccctccaggctgctgcccgtgcgtggtctttctcctccttttcaaagcaatagccgccgggtctgcaaagccctgtcagacagactgggcccttccaaggtcaagccatgtgtctgatgacattcctggtgaagcaaaggagaggaggatgggtcagccctcactgggtgtcacacactgagagaagtcctattgtaaagaaacggaaaaagtcacaaaaaagtttgtataaagacatatttttgtactacatggggactcttcctgcatgtcagcaataaaacttcctgatctggaaccac

SEQ ID NO: 180390 - DNA, 1442 bp, Homo sapiens
  Payload ID: 15529
  Gene Symbol: STRAP
  Gene Name: serine/threonine kinase receptor associated protein
  Uniprot ID: Q9Y3F4
  ENST ID: ENST00000025399
  CDS Start-End: 315-1406
acttcctgccgatgccggtgtggacgctgtgaatcgtggctggcccggttctccgcttctccccatcccctactttcctccctccctccctttccctccctcgtcgactgttgcttgctggtcgcagactccctgacccctccctcacccctccctaacctcggtgccaccggattgcccttcttttcctgttgcccagcccagccctagtgtcagggcgggggcctggagcagcccgaggcactgcagcagaagagagaaaagacaacgacgaccctcagctcgccagtccggtcgctggcttcgccgccgccatggcaatgagacagacgccgctcacctgctctggccacacgcgacccgtggttgatttggccttcagtggcatcacgccttatgggtatttcttaatcagcgcttgcaaaggagctggtcagcatttgcctagactctcgggacaacacgatggtaaacctatgctacgccagggagatacaggagactggattggaacatttttgggtcataaaggtgctgtttggggtgcaacactgaataaggatgccaccaaagcagctacagcagctgcagatttcacagccaaagtgtgggatgctgtctcaggagatgaattgatgaccctggctcataaacacattgtcaagactgtggatttcacgcaggatagtaattatttgttaaccgggggacaggataaactgttacgcatatatgacttgaacaaacctgaagcagaacctaaggaaattagtggtcatacttctggtataaaaaaagctctgtggtgcagtgaggataaacagattctttctgctgatgacaaaactgttcgactttgggatcatgctactatgacagaagtgaaatctctaaattttaatatgtctgttagtagtatggaatatattcctgagggagagattttggttataacttatggacgatctattgcttttcatagtgcagtaagtttggacccaattaaatcctttgaagctcctgcaaccatcaattctgcatctcttcatcctgagaaagaatttcttgttgcaggcggtgaagattttaaactttataagtatgattataatagtggagaagaattagaatcctacaagggacactttggtcctattcactgtgtgagatttagtcctgatggagaactctatgccagtggttcagaagatggaacattgagactatggcaaactgtggtaggaaaaacgtatggcctttggaaatgtgtgcttcctgaagaagatagtggtgagctggcaaagccaaagattggttttccagagacaacagaagaggagctagaagaaattgcttcagagaattcagattgcatctttccttcagctcctgatgttaaggcctgagcgtcaatcatatgtgcagttagtatacaactgact

SEQ ID NO: 180391 - DNA, 1866 bp, Homo sapiens
  Payload ID: 15529
  Gene Symbol: STRAP
  Gene Name: serine/threonine kinase receptor associated protein
  Uniprot ID: Q9Y3F4
  ENST ID: ENST00000419869
  CDS Start-End: 314-1366
cttcctgccgatgccggtgtggacgctgtgaatcgtggctggcccggttctccgcttctccccatcccctactttcctccctccctccctttccctccctcgtcgactgttgcttgctggtcgcagactccctgacccctccctcacccctccctaacctcggtgccaccggattgcccttcttttcctgttgcccagcccagccctagtgtcagggcgggggcctggagcagcccgaggcactgcagcagaagagagaaaagacaacgacgaccctcagctcgccagtccggtcgctggcttcgccgccgccatggcaatgagacagacgccgctcacctgctctggccacacgcgacccgtggttgatttggccttcagtggcatcacgccttatgggtatttcttaatcagcgcttgcaaagatggtaaacctatgctacgccagggagatacaggagactggattggaacatttttgggtcataaaggtgctgtttggggtgcaacactgaataaggatgccaccaaagcagctacagcagctgcagatttcacagccaaagtgtgggatgctgtctcaggagatgaattgatgaccctggctcataaacacattgtcaagactgtggatttcacgcaggatagtaattatttgttaaccgggggacaggataaactgttacgcatatatgacttgaacaaacctgaagcagaacctaaggaaattagtggtcatacttctggtataaaaaaagctctgtggtgcagtgaggataaacagattctttctgctgatgacaaaactgttcgactttgggatcatgctactatgacagaagtgaaatctctaaattttaatatgtctgttagtagtatggaatatattcctgagggagagattttggttataacttatggacgatctattgcttttcatagtgcagtaagtttggacccaattaaatcctttgaagctcctgcaaccatcaattctgcatctcttcatcctgagaaagaatttcttgttgcaggcggtgaagattttaaactttataagtatgattataatagtggagaagaattagaatcctacaagggacactttggtcctattcactgtgtgagatttagtcctgatggagaactctatgccagtggttcagaagatggaacattgagactatggcaaactgtggtaggaaaaacgtatggcctttggaaatgtgtgcttcctgaagaagatagtggtgagctggcaaagccaaagattggttttccagagacaacagaagaggagctagaagaaattgcttcagagaattcagattgcatctttccttcagctcctgatgttaaggcctgagcgtcaatcatatgtgcagttagtatacaactgactaaaacaagcaagcagagaaaagcatcagccttccagagttactgtctgcttaaggcagaaacagcagtaaataatgaggaaaatgaattagctccagtgctggaacaactaactaacttggtgttacctgtaagtgaaaactcaagtgtcagatgaagggaggtggagttatcctcttatagtacagtggcctgttatctttttaatgaatatatacaagccaacatccaatttctattattacaattagggttcttgtagctgtttatgttaatatggagaagaaaactatattggctgattttttctgatcttaaagcagaatgccttttctttttttgcttcagttgtaaagaagagggaatacatgataaagtaactggtttgatttctcgttcattgtacactgcctctgaacatctaattgtttttagttgtctaaataaaatgcctctaaaacaaaa

SEQ ID NO: 180392 - DNA, 1698 bp, Homo sapiens
  Payload ID: 15529
  Gene Symbol: STRAP
  Gene Name: serine/threonine kinase receptor associated protein
  ENST ID: ENST00000541731
  CDS Start-End: 324-464
gtcacttcctgccgatgccggtgtggacgctgtgaatcgtggctggcccggttctccgcttctccccatcccctactttcctccctccctccctttccctccctcgtcgactgttgcttgctggtcgcagactccctgacccctccctcacccctccctaacctcggtgccaccggattgcccttcttttcctgttgcccagcccagccctagtgtcagggcgggggcctggagcagcccgaggcactgcagcagaagagagaaaagacaacgacgaccctcagctcgccagtccggtcgctggcttcgccgccgccatggcaatgagacagacgccgctcacctgctctggccacacgcgacccgtggttgatttggccttcagtggcatcacgccttatgggtatttcttaatcagcgcttgcaaagcaaagtgtgggatgctgtctcaggagatgaattgatgaccctggctcataaacacattgtcaagactgtggatttcacgcaggatagtaattatttgttaaccgggggacaggataaactgttacgcatatatgacttgaacaaacctgaagcagaacctaaggaaattagtggtcatacttctggtataaaaaaagctctgtggtgcagtgaggataaacagattctttctgctgatgacaaaactgttcgactttgggatcatgctactatgacagaagtgaaatctctaaattttaatatgtctgttagtagtatggaatatattcctgagggagagattttggttataacttatggacgatctattgcttttcatagtgcagtaagtttggacccaattaaatcctttgaagctcctgcaaccatcaattctgcatctcttcatcctgagaaagaatttcttgttgcaggcggtgaagattttaaactttataagtatgattataatagtggagaagaattagaatcctacaagggacactttggtcctattcactgtgtgagatttagtcctgatggagaactctatgccagtggttcagaagatggaacattgagactatggcaaactgtggtaggaaaaacgtatggcctttggaaatgtgtgcttcctgaagaagatagtggtgagctggcaaagccaaagattggttttccagagacaacagaagaggagctagaagaaattgcttcagagaattcagattgcatctttccttcagctcctgatgttaaggcctgagcgtcaatcatatgtgcagttagtatacaactgactaaaacaagcaagcagagaaaagcatcagccttccagagttactgtctgcttaaggcagaaacagcagtaaataatgaggaaaatgaattagctccagtgctggaacaactaactaacttggtgttacctgtaagtgaaaactcaagtgtcagatgaagggaggtggagttatcctcttatagtacagtggcctgttatctttttaatgaatatatacaagccaacatccaatttctattattacaattagggttcttgtagctgtttatgttaatatggagaagaaaactatattggctgattttttctgatcttaaagcagaatgccttttctttttttgcttcagttgtaaagaagagggaatacatgataaagtaactggtttgatttctcgttcattgtacactgcctctgaacatctaattgt

SEQ ID NO: 180393 - DNA, 648 bp, Homo sapiens
  Payload ID: 15529
  Gene Symbol: STRAP
  Gene Name: serine/threonine kinase receptor associated protein
  ENST ID: ENST00000538718
  CDS Start-End: 1-286
gaaagaatttcttgttgcaggcggtgaagattttaaactttataagtatgattataatagtggagaagaattagaatcctacaagggacactttggtcctattcactgtgtgagatttagtcctgatggagaactctatgccagtggttcagaagatggaacattgagactatggcaaactgtggtaggaaaaacgtatggcctttggaaatgtgtgcttcctgaagaaattgcttcagagaattcagattgcatctttccttcagctcctgatgttaaggcctgagcgtcaatcatatgtgcagttagtatacaactgactaaaacaagcaagcagagaaaagcatcagccttccagagttactgtctgcttaaggcagaaacagcagtaaataatgaggaaaatgaattagctccagtgctggaacaactaactaacttggtgttacctgtaagtgaaaactcaagtgtcagatgaagggaggtggagttatcctcttatagtacagtggcctgttatctttttaatgaatatatacaagccaacatccaatttctattattacaattagggttcttgtagctgtttatgttaatatggagaagaaaactatattggctgattttttctgatcttaaagcagaatg

SEQ ID NO: 180394 - DNA, 2825 bp, Homo sapiens
  Payload ID: 15530
  Gene Symbol: STKLD1
  Gene Name: serine/threonine kinase-like domain containing 1
  Uniprot ID: Q8NE28
  ENST ID: ENST00000371957
  CDS Start-End: 108-2150
agtgcctcgagggcgccgttcgggcggggaggatcccgcgggtcccactgacccacgcggggtggggccaggggtggacgctcgcccgtacgcggtcgctactgatcatgcttgggccagggtccaatcgcaggcgccccacgcagggggagcgaggcccagggtcccccggagagcccatggagaagtaccaggttttgtaccagctgaatcctggggccttgggggtgaacctggtggtggaggaaatggaaaccaaagtcaagcatgtgataaagcaggtggaatgcatggatgaccattacgccagtcaggccctggaggagctgatgccactgctgaagctgcggcacgcccacatctctgtgtaccaggagctgttcatcacgtggaatggggagatctcttctctgtacctctgcctggtgatggagttcaatgagctcagcttccaggaggtcattgaggataagaggaaggcaaagaaaatcattgactctgagtggatgcagaatgtgctgggccaggtgctggacgcgctggaatacctgcaccatttggacatcatccacaggaatctcaaaccctccaacatcatcctcatcagcagtgaccactgcaaactgcaggacctgagttccaatgtgctaatgacagacaaagccaaatggaatattcgtgcggaggaagacccctttcgtaagtcctggatggcccctgaagccctcaacttctccttcagccagaaatcagacatctggtccctgggctgcatcattctggacatgaccagctgctccttcatggatggcacagaagccatgcatctgcggaagtccctccgccagagcccaggcagcctgaaggccgtcctgaagacaatggaggagaagcagatcccggatgtggaaaccttcaggaatcttctgcccttgatgctccagatcgacccctcggatcgaataacgataaaggacgtggtgcacatcaccttcttgagaggctccttcaagtcctcgtgcgtctctctgaccctgcaccggcagatggtgcctgcgtccatcaccgacatgctgttagaaggcaacgtggccagcattttagaggtcatgcagaaattctctggctggcccgaagtccagctcagggccatgaagaggcttctgaaaatgcctgcagatcagctaggtctgccgtggcccccggagctggtggaggtggtggtcacgaccatggagctacatgacagggtcctcgatgtccagctgtgtgcctgctccctgctgctgcacctcctgggccaagcgctggtgcaccacccggaagccaaggctccctgcaaccaagccatcacctccaccctgctgagtgctcttcagagccaccccgaggaggagccacttcttgtcatggtctacagcctgctagccatcaccacaacccaggagtcagagtcactgtcagaggagctgcagaatgctgggctgctggagcacatcctggagcacctcaacagctccctcgaaagcagggacgtctgcgccagcggcctgggcctgctctgggccctcctgctggacggtatcattgtgaacaaggcccccttggagaaggtcccggacctcatcagccaggtgttggccacctaccctgcggatggggaaatggcagaagccagctgcggagtcttctggctgctgtccctgctgggctgcatcaaggagcagcagtttgaacaagtggtggcgctgctcctgcaaagcatccggctgtgccaggacagagccctgctggtgaacaatgcctaccggggactggccagcctggtgaaggtgtcagagctggcggccttcaaggtggtggtgcaggaggagggcggcagtggcctcagcctcatcaaggagacctaccagctccacagggacgacccggaggtggtggagaacgtgggcatgctgctggtccacctggcttcctatgaggagatcctgccggagctggtgtccagtagtatgaaggccctgctccaggagatcaaggagcgcttcacctccagcctggtgagtgacagcagcgccttcagcaaaccaggcctccctccaggtggaagcccccagctggggtgcaccacgtctgggggactggaatagatgtttgtatggaactgaccttgatctccacgtgtatagttttcaagactgctctcctgcctgcctattatcccatctctatgactgggccaaaatcaatcttaaacgggaggggtaatcagacctctccaaagagtttcctgtccatgactgctggattgagtcacatgagtaactgctcctggacccggggactgtccacgaaaactgacttgcctgcttcctccttccaggaactggtttcttgcgcggaaaaagtgctcttgaggctggaggcagccacctctcccagcccactgggtggggaagcagctcagccctgatgcgggggagaagacagataccccacaggcccctccctccacgtgtgccctctccctgtccttcctttccatgggccactgtttcccttggggtggggggaagggtcatccagcaccagaatgcgcatctcacactcctcttaggtgactaataaagaggcccaaggccagtttctgccttaatcatttctggcaagaggctgtgactggccagtgggatacttaattctgcagtctctatagacctcgcccctggacagagcagtccttccagaccattctagatgagagtcaacactgagcctccacaggctccattccaagtaaacatctgcatttattttaaatcgca

SEQ ID NO: 180395 - DNA, 2825 bp, Homo sapiens; identical to SEQ ID NO: 180394
  Payload ID: 15530
  Gene Symbol: STKLD1
  Gene Name: Serine/threonine kinase-like domain containing 1
  ENST ID: ENST00000627962
  CDS Start-End: 108-2150

SEQ ID NO: 180396 - DNA, 3179 bp, Homo sapiens
  Payload ID: 15531
  Gene Symbol: STK26
  Gene Name: serine/threonine protein kinase 26
  ENST ID: ENST00000354719
  CDS Start-End: 217-1395
atcactcgagcccaggtcccagccaccaccactcacagcgctcggcgttcaggaagaggagcagcagcggaggcggctgcttcagcggcgggcgggcgccagaaaggccccgatcgaaaagcctgggagggccgccgaactacccccggagggaggagccagtccgaacccaaggcgccaccgccgcagaagcggagcgaggcagcattcgcctccatggcccactcgccggtggctgtccaagtgcctgggatgcagaataacatagctgatccagaagaactgttcacaaaattagagcgcattgggaaaggctcatttggggaagttttcaaaggaattgataaccgtacccagcaagtcgttgctattaaaatcatagaccttgaggaagccgaagatgaaatagaagacattcagcaagaaataactgtcttgagtcaatgtgacagctcatatgtaacaaaatactatgggtcatatttaaaggggtctaaattatggataataatggaatacctgggcggtggttcagcactggatcttcttcgagctggtccatttgatgagttccagattgctaccatgctaaaggaaattttaaaaggtctggactatctgcattcagaaaagaaaattcaccgagacataaaagctgccaatgtcttgctctcagaacaaggagatgttaaacttgctgattttggagttgctggtcagctgacagatacacagattaaaagaaatacctttgtgggaactccattttggatggctcctgaagttattcaacagtcagcttatgactcaaaagctgacatttggtcattgggaattactgctattgaactagccaagggagagccacctaactccgatatgcatccaatgagagttctgtttcttattcccaaaaacaatcctccaactcttgttggagactttactaagtcttttaaggagtttattgatgcttgcctgaacaaagatccatcatttcgtcctacagcaaaagaacttctgaaacacaaattcattgtaaaaaattcaaagaagacttcttatctgactgaactgatagatcgttttaagagatggaaggcagaaggacacagtgatgatgaatctgattccgagggctctgattcggaatctaccagcagggaaaacaatactcatcctgaatggagctttaccaccgtacgaaagaagcctgatccaaagaaagtacagaatggggcacaggacgagaataacgctagcaggaatcaggcgattgaagaactcgagaaaagtattgctgtggctgaagccgcctgtcccggcatcacagataaaatggtgaagaaactaattgaaaaatttcaaaagtgttcagcagacgaatccccctaagaaacttattattggcttctgtttcatatggacccagagagccccaccaaacctacgtcaagattaacaatgcttaacccatgagctccatgtgccttttggatctttgcaacactgaagatttggaagaagctattaaactattttgtgatggcgtttatcattttatattttgaaaggattattttgtaaggaataacttttaatactatagtttcacctgtattctagtaaatgttgagacaccgttttgcttttaagtatccctatttcttaagttacgaggatgaatacctttcacattttgatctttagttgactctacagtcatgaaacatacaggtctttcaaagtcattctcaatattcagcttttgtaaattatcaagcttcaaaaagcttttttttttaaaaaaaaacatgcatattctaaaaatgactattggtggggaggtgtaaataagtcataccttcttaaaacagaaaatttaagtaaagtcttttaaatgaaacctgtaaaagtattgactcttctaccaagttggtatgatattccaggcagctcaatgattatcacatttgagaccctgtgtttgaagcatttacaggcaatgtacagcaacagaggtacctcttggtgtatagtatttacattctcttttaggtagaagaggcaattttacccttatttcacatggttagaaatttaaagcaagatcatttacccaaggataggtgtttggtaatgttgaaggagttagtctggcttcatgttttacatcttcaactaaaatcccatactatctgcttggatttggagagccaaaaaataaagctgattgtcatgtgattaaatatctgatcaacaggtatgaatataacttaaatcagcatatttttgccatggtaataaattgtcctataaactatttatatatttttgttcttcataattatcactaataagcatcagtttgttgtttttaaaaggatatttaagtgagcattttctagttcatatgaaaataaccatagtacaggatgatttctgtccacacaaaggttaaattagattgcacagttaattttcacttatatttatggtactattatgtgggtgatgcctttttcttttaagcccagtacatatattatgcctgcctaagttctgaactggggctgtatttcagtagttgtagaattattgatatttagttttgatagctaatgtttaattgtttggatctgcacagtttggtttttgcacaaaagtcatttaaaaaaatctgagtaattgtcaaatattaaaagaaagatattcttcctgtaaggaatacagtttttagtcaaagtggccattacatcctctttttaatttacataatacagatacttgagaaagttgttgtggtgttgtatgccaagaaaattctttttattggtgcctatattgtaacaattatttttaatgcattgtattttgaagtaacggttcagttaaatttttcacctgctgtgtaactgaaacacaattacagtttataatcatctgtagaagtctggagataattttgcaactcatgttatgggttaaatgaatatttttgtaaaagtaaaagcaacaaatttataaattgattatttgaaactttacaacacaattgcatcccaaatacaaattgtattgcttattcattatagctattcgtcctgtaatctgtttctaggtgaagcatactccagtgttttaggggttttgaaaataaatatttaaatttcacagtc

SEQ ID NO: 180397 - DNA, 3288 bp, Homo sapiens
  Payload ID: 15531
  Gene Symbol: STK26
  Gene Name: serine/threonine protein kinase 26
  Uniprot ID: Q9P289
  ENST ID: ENST00000394334
  CDS Start-End: 254-1504
ctcctcttcctaaagcggcgaggcgcagaggagcggcatcactcgagcccaggtcccagccaccaccactcacagcgctcggcgttcaggaagaggagcagcagcggaggcggctgcttcagcggcgggcgggcgccagaaaggccccgatcgaaaagcctgggagggccgccgaactacccccggagggaggagccagtccgaacccaaggcgccaccgccgcagaagcggagcgaggcagcattcgcctccatggcccactcgccggtggctgtccaagtgcctgggatgcagaataacatagctgatccagaagaactgttcacaaaattagagcgcattgggaaaggctcatttggggaagttttcaaaggaattgataaccgtacccagcaagtcgttgctattaaaatcatagaccttgaggaagccgaagatgaaatagaagacattcagcaagaaataactgtcttgagtcaatgtgacagctcatatgtaacaaaatactatgggtcatatttaaaggggtctaaattatggataataatggaatacctgggcggtggttcagcactggatcttcttcgagctggtccatttgatgagttccagattgctaccatgctaaaggaaattttaaaaggtctggactatctgcattcagaaaagaaaattcaccgagacataaaagctgccaatgtcttgctctcagaacaaggagatgttaaacttgctgattttggagttgctggtcagctgacagatacacagattaaaagaaatacctttgtgggaactccattttggatggctcctgaagttattcaacagtcagcttatgactcaaaagctgacatttggtcattgggaattactgctattgaactagccaagggagagccacctaactccgatatgcatccaatgagagttctgtttcttattcccaaaaacaatcctccaactcttgttggagactttactaagtcttttaaggagtttattgatgcttgcctgaacaaagatccatcatttcgtcctacagcaaaagaacttctgaaacacaaattcattgtaaaaaattcaaagaagacttcttatctgactgaactgatagatcgttttaagagatggaaggcagaaggacacagtgatgatgaatctgattccgagggctctgattcggaatctaccagcagggaaaacaatactcatcctgaatggagctttaccaccgtacgaaagaagcctgatccaaagaaagtacagaatggggcagagcaagatcttgtgcaaaccctgagttgtttgtctatgataatcacacctgcatttgctgaacttaaacagcaggacgagaataacgctagcaggaatcaggcgattgaagaactcgagaaaagtattgctgtggctgaagccgcctgtcccggcatcacagataaaatggtgaagaaactaattgaaaaatttcaaaagtgttcagcagacgaatccccctaagaaacttattattggcttctgtttcatatggacccagagagccccaccaaacctacgtcaagattaacaatgcttaacccatgagctccatgtgccttttggatctttgcaacactgaagatttggaagaagctattaaactattttgtgatggcgtttatcattttatattttgaaaggattattttgtaaggaataacttttaatactatagtttcacctgtattctagtaaatgttgagacaccgttttgcttttaagtatccctatttcttaagttacgaggatgaatacctttcacattttgatctttagttgactctacagtcatgaaacatacaggtctttcaaagtcattctcaatattcagcttttgtaaattatcaagcttcaaaaagcttttttttttaaaaaaaaacatgcatattctaaaaatgactattggtggggaggtgtaaataagtcataccttcttaaaacagaaaatttaagtaaagtcttttaaatgaaacctgtaaaagtattgactcttctaccaagttggtatgatattccaggcagctcaatgattatcacatttgagaccctgtgtttgaagcatttacaggcaatgtacagcaacagaggtacctcttggtgtatagtatttacattctcttttaggtagaagaggcaattttacccttatttcacatggttagaaatttaaagcaagatcatttacccaaggataggtgtttggtaatgttgaaggagttagtctggcttcatgttttacatcttcaactaaaatcccatactatctgcttggatttggagagccaaaaaataaagctgattgtcatgtgattaaatatctgatcaacaggtatgaatataacttaaatcagcatatttttgccatggtaataaattgtcctataaactatttatatatttttgttcttcataattatcactaataagcatcagtttgttgtttttaaaaggatatttaagtgagcattttctagttcatatgaaaataaccatagtacaggatgatttctgtccacacaaaggttaaattagattgcacagttaattttcacttatatttatggtactattatgtgggtgatgcctttttcttttaagcccagtacatatattatgcctgcctaagttctgaactggggctgtatttcagtagttgtagaattattgatatttagttttgatagctaatgtttaattgtttggatctgcacagtttggtttttgcacaaaagtcatttaaaaaaatctgagtaattgtcaaatattaaaagaaagatattcttcctgtaaggaatacagtttttagtcaaagtggccattacatcctctttttaatttacataatacagatacttgagaaagttgttgtggtgttgtatgccaagaaaattctttttattggtgcctatattgtaacaattatttttaatgcattgtattttgaagtaacggttcagttaaatttttcacctgctgtgtaactgaaacacaattacagtttataatcatctgtagaagtctggagataattttgcaactcatgttatgggttaaatgaatatttttgtaaaagtaaaagcaacaaatttataaattgattatttgaaactttacaacacaattgcatcccaaatacaaattgtattgcttattcattatagctattcgtcctgtaatctgtttctaggtgaagcatactccagtgttttaggggttttgaaaataaatatttaaatttcacagtc

SEQ ID NO: 180398 - DNA, 3017 bp, Homo sapiens
  Payload ID: 15531
  Gene Symbol: STK26
  Gene Name: serine/threonine protein kinase 26
  Uniprot ID: Q9P289
  ENST ID: ENST00000394335
  CDS Start-End: 214-1233
actcgagcccaggtcccagccaccaccactcacagcgctcggcgttcaggaagaggagcagcagcggaggcggctgcttcagcggcgggcgggcgccagaaaggccccgatcgaaaagcctgggagggccgccgaactacccccggagggaggagccagtccgaacccaaggcgccaccgccgcagaagcggagcgaggcagcattcgcctccatggcccactcgccggtggctgtccaagtgcctgggatgcaggggtctaaattatggataataatggaatacctgggcggtggttcagcactggatcttcttcgagctggtccatttgatgagttccagattgctaccatgctaaaggaaattttaaaaggtctggactatctgcattcagaaaagaaaattcaccgagacataaaagctgccaatgtcttgctctcagaacaaggagatgttaaacttgctgattttggagttgctggtcagctgacagatacacagattaaaagaaatacctttgtgggaactccattttggatggctcctgaagttattcaacagtcagcttatgactcaaaagctgacatttggtcattgggaattactgctattgaactagccaagggagagccacctaactccgatatgcatccaatgagagttctgtttcttattcccaaaaacaatcctccaactcttgttggagactttactaagtcttttaaggagtttattgatgcttgcctgaacaaagatccatcatttcgtcctacagcaaaagaacttctgaaacacaaattcattgtaaaaaattcaaagaagacttcttatctgactgaactgatagatcgttttaagagatggaaggcagaaggacacagtgatgatgaatctgattccgagggctctgattcggaatctaccagcagggaaaacaatactcatcctgaatggagctttaccaccgtacgaaagaagcctgatccaaagaaagtacagaatggggcagagcaagatcttgtgcaaaccctgagttgtttgtctatgataatcacacctgcatttgctgaacttaaacagcaggacgagaataacgctagcaggaatcaggcgattgaagaactcgagaaaagtattgctgtggctgaagccgcctgtcccggcatcacagataaaatggtgaagaaactaattgaaaaatttcaaaagtgttcagcagacgaatccccctaagaaacttattattggcttctgtttcatatggacccagagagccccaccaaacctacgtcaagattaacaatgcttaacccatgagctccatgtgccttttggatctttgcaacactgaagatttggaagaagctattaaactattttgtgatggcgtttatcattttatattttgaaaggattattttgtaaggaataacttttaatactatagtttcacctgtattctagtaaatgttgagacaccgttttgcttttaagtatccctatttcttaagttacgaggatgaatacctttcacattttgatctttagttgactctacagtcatgaaacatacaggtctttcaaagtcattctcaatattcagcttttgtaaattatcaagcttcaaaaagcttttttttttaaaaaaaaacatgcatattctaaaaatgactattggtggggaggtgtaaataagtcataccttcttaaaacagaaaatttaagtaaagtcttttaaatgaaacctgtaaaagtattgactcttctaccaagttggtatgatattccaggcagctcaatgattatcacatttgagaccctgtgtttgaagcatttacaggcaatgtacagcaacagaggtacctcttggtgtatagtatttacattctcttttaggtagaagaggcaattttacccttatttcacatggttagaaatttaaagcaagatcatttacccaaggataggtgtttggtaatgttgaaggagttagtctggcttcatgttttacatcttcaactaaaatcccatactatctgcttggatttggagagccaaaaaataaagctgattgtcatgtgattaaatatctgatcaacaggtatgaatataacttaaatcagcatatttttgccatggtaataaattgtcctataaactatttatatatttttgttcttcataattatcactaataagcatcagtttgttgtttttaaaaggatatttaagtgagcattttctagttcatatgaaaataaccatagtacaggatgatttctgtccacacaaaggttaaattagattgcacagttaattttcacttatatttatggtactattatgtgggtgatgcctttttcttttaagcccagtacatatattatgcctgcctaagttctgaactggggctgtatttcagtagttgtagaattattgatatttagttttgatagctaatgtttaattgtttggatctgcacagtttggtttttgcacaaaagtcatttaaaaaaatctgagtaattgtcaaatattaaaagaaagatattcttcctgtaaggaatacagtttttagtcaaagtggccattacatcctctttttaatttacataatacagatacttgagaaagttgttgtggtgttgtatgccaagaaaattctttttattggtgcctatattgtaacaattatttttaatgcattgtattttgaagtaacggttcagttaaatttttcacctgctgtgtaactgaaacacaattacagtttataatcatctgtagaagtctggagataattttgcaactcatgttatgggttaaatgaatatttttgtaaaagtaaaagcaacaaatttataaattgattatttgaaactttacaacacaattgcatcccaaatacaaattgtattgcttattcattatagctattcgtcctgtaatctgtttctaggtgaagcatactccagtgttttaggggttttgaaaataaatatttaaatttcacagtc

SEQ ID NO: 180399 - DNA, 1835 bp, Homo sapiens
  Payload ID: 15531
  Gene Symbol: STK26
  Gene Name: serine/threonine protein kinase 26
  ENST ID: ENST00000481105
  CDS Start-End: 217-1533
atcactcgagcccaggtcccagccaccaccactcacagcgctcggcgttcaggaagaggagcagcagcggaggcggctgcttcagcggcgggcgggcgccagaaaggccccgatcgaaaagcctgggagggccgccgaactacccccggagggaggagccagtccgaacccaaggcgccaccgccgcagaagcggagcgaggcagcattcgcctccatggcccactcgccggtggctgtccaagtgcctgggatgcagaataacatagctgatccagaagaactgttcacaaaattagagcgcattgggaaaggctcatttggggaagttttcaaaggaattgataaccgtacccagcaagtcgttgctattaaaatcatagaccttgaggaagccgaagatgaaatagaagacattcagcaagaaataactgtcttgagtcaatgtgacagctcatatgtaacaaaatactatgggtcatatttaaaggatcatgggattagcagacacctgaagttccagcagatggaggtgttactacatagcagaaaactggggtctaaattatggataataatggaatacctgggcggtggttcagcactggatcttcttcgagctggtccatttgatgagttccagattgctaccatgctaaaggaaattttaaaaggtctggactatctgcattcagaaaagaaaattcaccgagacataaaagctgccaatgtcttgctctcagaacaaggagatgttaaacttgctgattttggagttgctggtcagctgacagatacacagattaaaagaaatacctttgtgggaactccattttggatggctcctgaagttattcaacagtcagcttatgactcaaaagctgacatttggtcattgggaattactgctattgaactagccaagggagagccacctaactccgatatgcatccaatgagagttctgtttcttattcccaaaaacaatcctccaactcttgttggagactttactaagtcttttaaggagtttattgatgcttgcctgaacaaagatccatcatttcgtcctacagcaaaagaacttctgaaacacaaattcattgtaaaaaattcaaagaagacttcttatctgactgaactgatagatcgttttaagagatggaaggcagaaggacacagtgatgatgaatctgattccgagggctctgattcggaatctaccagcagggaaaacaatactcatcctgaatggagctttaccaccgtacgaaagaagcctgatccaaagaaagtacagaatggggcagagcaagatcttgtgcaaaccctgagttgtttgtctatgataatcacacctgcatttgctgaacttaaacagcaggacgagaataacgctagcaggaatcaggcgattgaagaactcgagaaaagtattgctgtggctgaagccgcctgtcccggcatcacagataaaatggtgaagaaactaattgaaaaatttcaaaagtgttcagcagacgaatccccctaagaaacttattattggcttctgtttcatatggacccagagagccccaccaaacctacgtcaagattaacaatgcttaacccatgagctccatgtgccttttggatctttgcaacactgaagatttggaagaagctattaaactattttgtgatggcgtttatcattttatattttgaaaggattattttgtaaggaataacttttaatactatagtttcacctgtattctagtaaatgttgagacaccgttttgcttttaagtatccctatttcttaagttacgaggatgaatacctttcaca

SEQ ID NO: 180400 - DNA, 1186 bp, Homo sapiens
  Payload ID: 15531
  Gene Symbol: STK26
  Gene Name: serine/threonine protein kinase 26
  Uniprot ID: Q9P289
  ENST ID: ENST00000496850
  CDS Start-End: 11-1075
attcgcctccatggcccactcgccggtggctgtccaagtgcctgggatgcagaataacatagctgatccagaagaactgttcacaaaattagagcgcattgggaaaggctcatttggggaagttttcaaaggaattgataaccgtacccagcaagtcgttgctattaaaatcatagaccttgaggaagccgaagatgaaatagaagacattcagcaagaaataactgtcttgagtcaatgtgacagctcatatgtaacaaaatactatgggtcatatttaaaggggtctaaattatggataataatggaatacctgggcggtggttcagcactggatcttcttcgagctggtccatttgatgagttccagattgctaccatgctaaaggaaattttaaaaggtctggactatctgcattcagaaaagaaaattcaccgagacataaaagctgccaatgtcttgctctcagaacaaggagatgttaaacttgctgattttggagttgctggtcagctgacagatacacagattaaaagaaatacctttgtgggaactccattttggatggctcctgaagttattcaacagtcagcttatgactcaaaacgtcctacagcaaaagaacttctgaaacacaaattcattgtaaaaaattcaaagaagacttcttatctgactgaactgatagatcgttttaagagatggaaggcagaaggacacagtgatgatgaatctgattccgagggctctgattcggaatctaccagcagggaaaacaatactcatcctgaatggagctttaccaccgtacgaaagaagcctgatccaaagaaagtacagaatggggcagagcaagatcttgtgcaaaccctgagttgtttgtctatgataatcacacctgcatttgctgaacttaaacagcaggacgagaataacgctagcaggaatcaggcgattgaagaactcgagaaaagtattgctgtggctgaagccgcctgtcccggcatcacagataaaatggtgaagaaactaattgaaaaatttcaaaagtgttcagcagacgaatccccctaagaaacttattattggcttctgtttcatatggacccagagagccccaccaaacctacgtcaagattaacaatgcttaacccatgagctccatgtgccttttggatctttgca

SEQ ID NO: 180401 - DNA, 4857 bp, Homo sapiens
  Payload ID: 15532
  Gene Symbol: STYX
  Gene Name: serine/threonine/tyrosine interacting protein
  Uniprot ID: Q8WUJ0
  ENST ID: ENST00000354586
  CDS Start-End: 294-965
cctgtgctggatcctgggcggcctgaggggtacggagactctgggggagggagacggcagcggcatggcggccgggtgtaagacgcccgaccctcctcttccctgtcttcgccgccgccgctgctggagtcactgggaccctgtagtctgcgtgtgttagttgtaatcccgccgccctcctgtcagccctccgctccgccggccctccttccttccgccgccgcagccagcccgagggtcggccggctgtgtaacactctcccaccccacccaccagcccgcgggccagcaccatggaggacgtgaagctggagttcccttcccttccacagtgcaaggaagacgccgaggagtggacctaccctatgagacgagagatgcaggaaattttacctggattgttcttaggcccatattcatctgctatgaaaagcaagctacctgtactacagaaacatggaataacccatataatatgcatacgacaaaatattgaagcaaactttattaaaccaaactttcagcagttatttagatatttagtcctggatattgcagataatccagttgaaaatataatacgttttttccctatgactaaggaatttattgatgggagcttacaaatgggaggaaaagttcttgtgcatggaaatgcagggatctccagaagtgcagcctttgttattgcatacattatggaaacatttggaatgaagtacagagatgcttttgcttatgttcaagaaagaagattttgtattaatcctaatgctggatttgtccatcaacttcaggaatatgaagccatctacctagcaaaattaacaatacagatgatgtcaccactccagatagaaaggtcattatctgttcattctggtaccacaggcagtttgaagagaacacatgaagaagaggatgattttggaaccatgcaagtggcgactgcacagaatggctgacttgaagagcaacatcatagagtgtgaatttctatttgggaaggagaaaatacaagagaaaattataatgtaaaatggtaaaaacataagtagtttttttttcaattacatgttgcttccagacatacttctctgcaacttgttgagcaacattttaagatgttggacttctgcaatagatgacactgatggttttactcctttttttaaaaacacatgcgcgcgcacacacacatgctttacaagttttattataaaccaagaattttggacttgcaaagaggtattattgcaataatgcacttttcatacttgaaatttatttgtatgatataaagttattactttaaacaaaatgcaagtatggggggattgtttataaagtttgggtaatttataacaaaatttgctaaggtttgctaaaaattcatttttctgttctatatattacatttttaacataattttacagttcaattttatgatggagcctcttacagaaacattaacaaaatgcaggaatctgccacatttcttttttagtataacttaatagcttaattaccattttattttttatacttcttccattattaatctttaaatcatgatcctaattagctgtccttactttaacttgatctaattattgcttcctttcttattactttcctaatttttctatattttaaaaactacagtttccatgataaaaggaaaacgttttgatttatagtaccaagtgcttaaacacaaggatagtgttagattttcgagtgactttcctttttgcattttttggcagtaaaagccaaacgttgtatttgttcttttcagagttgtccagcccttttttcctttgtccaaaatgattctaaatagaatctaataaaccaatgtagcattatttttttctaaatgaagccccaaaaaagaaaagtgccttgcatcatttaaaaaaaataattaaatcctcatggcctctaaattagtatgtagaacactgaaaagttcttaacatttttgtgtaatttcctttctttttaaaccataaattagtttaaactgaaagtacgaggctggaagaaatattagtaaattatttggaatatagaatgtttactctttctttttatgttgtcttaatgattctgtgagattgttccggctcaaacagaagcttttctttggggaaggtgatttgtgggagactagtgtattttaaattagcattttaatccattcttgacattcagttagtccagatctgccccataatttgctttagtaaagtcactttatggatttttggctatgttttagtttgtgtgtataaaagttctaagaaaacatttttgctattttaagtatgtaagggaagagaggagtgtttttaactttttatagttgatgactttagggtagcacaaacaaaactcctttgtatctaacttttctcaatcctctcttgaggtgctttactaatgggaatgatttctgtatgttcccttggtaccaagaggtactatgcaaagtaacctattacaccaagttacttgctttgctttcctctctatgatgtgataatacagtaaaagctttcttacccagcatagtgggagagtggagattaattaaaattgttaattaagagttaattcctattgacccaggtgatatttctcttctgatttccctccccttcccttctcttatcttaccactgtgaaaacagcatattgttaatctcgttgtcgtccagtattctgctttgtgattaggtcttttgatgtacagtggtctagtggagtcaagattcgcattgggttttctaaaattccagttgataaaagttccagataacacagctttcctgtatatagatcactattgggcaggtcagcaaagatctcttacagtgtaataataatctatgatgcttcatttagcagaaactctgcttaaaagaatcttcataatagtaagtttaggttttaaaaacttgtttcataaatatacatatatcctctctagtagtctggccaaaagaacagattttgttattgataatttgtagctggtaattttccacattttctatccactgtaatttttatgttgtcactgaagtgcctgcccagtactgtatattacagtctctcacaaacactgggaaaagggactgtcatcatcttgagtactctgtgtgtatatatatatatatagatagatagatttttttttttttttgagacagagtctctaatgtcacccaggctggagtacagtggcacaatcttggctcactgcaacctccacctcctgggttcaagtgattttcctgcctcagcctcccaagtagctggggttagaggcacatgccaccatgcctggctaatttttgtagttttagtagagatggggtttcaccatgttggccaggctggtctcaaactcctgacctcaagtgatccacccacctcggcctcccaaagtgctgggattacaggcgtgagccactgcgcctggctgagtacaatattaatgtagacaaaccatgaagtttattatttcatataagaacattacaggtttgttttttcttgcatgtctgtccacctaatgtttaagtagttctggtagctcttcctattctttattctatttgattccatttctgtgattcttttattaccactgatgttttgtgatagttaactatgataaatttaactgatcatgatttatcttctagagtatttaaataatgtatgagtgaccacccaattccaacattaaaagtgtaatctgggcccataatttatagtgaaattgtatcaaaacatagggaaactgtattactgtccattttgaaaatatgaaacttgagtattgaaaatattcaaacatggaatggcagtattctaatttcagttagttggttcatgttaatttcttacctgttagatgtttaaactgcagtgacctttacttgtatctactctgtggtggaaatgttaaaccatgatagcttttgctaccaactcaaccacttaacttttagagcagttttggggagagtttatgcttcatctgagtttagaagtaatgtcagaaaatgttaagcatgtctgtattaagaaaatataaggtttctaattgtcttattaatatggtaattcaagtgaattagaaatatttaactgcaatcttgaattataaagttgagatatatatatatatgtatcaagatctcaacttgatgtaaagtaaatgagcagttacctggcggatttttttttttttaaataactgatttaatccataatcccataacaaacatagcttcacctcagtattttctttctttctttgttcaacagtgctccgataagggaatgctagaaaatagatgagaagtactgaaagacctttttttttaattgattagaaaagtaagtctctagggtctttgaatgctggaatttttttttttttttttgtctttcccatctgtggcagctaaaacaaaaatcactcaaaatattcaggtttacatgttagctctctctcatagggagctgccatacctcacagttcaaagtgtattctatagatcagtaacattatactgacatgtaattgcaatttactatgcagcaaaaatgattcaagaagaaaaataacctacagtgtctgtatacctttgtatacacaattgcttaagttactctgcttttaacatttgtacttggataaaatgcttatgtctgtataggaatgtcacagtgcaagatgctgctagcccaggcacaaagtattaaaattattttgtgaagattggtggttgtattaaaactgctgtgccattatacctccaaaatattgaaaa

SEQ ID NO: 180402 - DNA, 4554 bp, Homo sapiens
  Payload ID: 15532
  Gene Symbol: STYX
  Gene Name: serine/threonine/tyrosine interacting protein
  Uniprot ID: Q8WUJ0
  ENST ID: ENST00000442123
  CDS Start-End: 48-719
ttcctgtgctggatcctgggcggcctgagggcccgcgggccagcaccatggaggacgtgaagctggagttcccttcccttccacagtgcaaggaagacgccgaggagtggacctaccctatgagacgagagatgcaggaaattttacctggattgttcttaggcccatattcatctgctatgaaaagcaagctacctgtactacagaaacatggaataacccatataatatgcatacgacaaaatattgaagcaaactttattaaaccaaactttcagcagttatttagatatttagtcctggatattgcagataatccagttgaaaatataatacgttttttccctatgactaaggaatttattgatgggagcttacaaatgggaggaaaagttcttgtgcatggaaatgcagggatctccagaagtgcagcctttgttattgcatacattatggaaacatttggaatgaagtacagagatgcttttgcttatgttcaagaaagaagattttgtattaatcctaatgctggatttgtccatcaacttcaggaatatgaagccatctacctagcaaaattaacaatacagatgatgtcaccactccagatagaaaggtcattatctgttcattctggtaccacaggcagtttgaagagaacacatgaagaagaggatgattttggaaccatgcaagtggcgactgcacagaatggctgacttgaagagcaacatcatagagtgtgaatttctatttgggaaggagaaaatacaagagaaaattataatgtaaaatggtaaaaacataagtagtttttttttcaattacatgttgcttccagacatacttctctgcaacttgttgagcaacattttaagatgttggacttctgcaatagatgacactgatggttttactcctttttttaaaaacacatgcgcgcgcacacacacatgctttacaagttttattataaaccaagaattttggacttgcaaagaggtattattgcaataatgcacttttcatacttgaaatttatttgtatgatataaagttattactttaaacaaaatgcaagtatggggggattgtttataaagtttgggtaatttataacaaaatttgctaaggtttgctaaaaattcatttttctgttctatatattacatttttaacataattttacagttcaattttatgatggagcctcttacagaaacattaacaaaatgcaggaatctgccacatttcttttttagtataacttaatagcttaattaccattttattttttatacttcttccattattaatctttaaatcatgatcctaattagctgtccttactttaacttgatctaattattgcttcctttcttattactttcctaatttttctatattttaaaaactacagtttccatgataaaaggaaaacgttttgatttatagtaccaagtgcttaaacacaaggatagtgttagattttcgagtgactttcctttttgcattttttggcagtaaaagccaaacgttgtatttgttcttttcagagttgtccagcccttttttcctttgtccaaaatgattctaaatagaatctaataaaccaatgtagcattatttttttctaaatgaagccccaaaaaagaaaagtgccttgcatcatttaaaaaaaataattaaatcctcatggcctctaaattagtatgtagaacactgaaaagttcttaacatttttgtgtaatttcctttctttttaaaccataaattagtttaaactgaaagtacgaggctggaagaaatattagtaaattatttggaatatagaatgtttactctttctttttatgttgtcttaatgattctgtgagattgttccggctcaaacagaagcttttctttggggaaggtgatttgtgggagactagtgtattttaaattagcattttaatccattcttgacattcagttagtccagatctgccccataatttgctttagtaaagtcactttatggatttttggctatgttttagtttgtgtgtataaaagttctaagaaaacatttttgctattttaagtatgtaagggaagagaggagtgtttttaactttttatagttgatgactttagggtagcacaaacaaaactcctttgtatctaacttttctcaatcctctcttgaggtgctttactaatgggaatgatttctgtatgttcccttggtaccaagaggtactatgcaaagtaacctattacaccaagttacttgctttgctttcctctctatgatgtgataatacagtaaaagctttcttacccagcatagtgggagagtggagattaattaaaattgttaattaagagttaattcctattgacccaggtgatatttctcttctgatttccctccccttcccttctcttatcttaccactgtgaaaacagcatattgttaatctcgttgtcgtccagtattctgctttgtgattaggtcttttgatgtacagtggtctagtggagtcaagattcgcattgggttttctaaaattccagttgataaaagttccagataacacagctttcctgtatatagatcactattgggcaggtcagcaaagatctcttacagtgtaataataatctatgatgcttcatttagcagaaactctgcttaaaagaatcttcataatagtaagtttaggttttaaaaacttgtttcataaatatacatatatcctctctagtagtctggccaaaagaacagattttgttattgataatttgtagctggtaattttccacattttctatccactgtaatttttatgttgtcactgaagtgcctgcccagtactgtatattacagtctctcacaaacactgggaaaagggactgtcatcatcttgagtactctgtgtgtatatatatatatatagatagatagatttttttttttttttgagacagagtctctaatgtcacccaggctggagtacagtggcacaatcttggctcactgcaacctccacctcctgggttcaagtgattttcctgcctcagcctcccaagtagctggggttagaggcacatgccaccatgcctggctaatttttgtagttttagtagagatggggtttcaccatgttggccaggctggtctcaaactcctgacctcaagtgatccacccacctcggcctcccaaagtgctgggattacaggcgtgagccactgcgcctggctgagtacaatattaatgtagacaaaccatgaagtttattatttcatataagaacattacaggtttgttttttcttgcatgtctgtccacctaatgtttaagtagttctggtagctcttcctattctttattctatttgattccatttctgtgattcttttattaccactgatgttttgtgatagttaactatgataaatttaactgatcatgatttatcttctagagtatttaaataatgtatgagtgaccacccaattccaacattaaaagtgtaatctgggcccataatttatagtgaaattgtatcaaaacatagggaaactgtattactgtccattttgaaaatatgaaacttgagtattgaaaatattcaaacatggaatggcagtattctaatttcagttagttggttcatgttaatttcttacctgttagatgtttaaactgcagtgacctttacttgtatctactctgtggtggaaatgttaaaccatgatagcttttgctaccaactcaaccacttaacttttagagcagttttggggagagtttatgcttcatctgagtttagaagtaatgtcagaaaatgttaagcatgtctgtattaagaaaatataaggtttctaattgtcttattaatatggtaattcaagtgaattagaaatatttaactgcaatcttgaattataaagttgagatatatatatatatgtatcaagatctcaacttgatgtaaagtaaatgagcagttacctggcggatttttttttttttaaataactgatttaatccataatcccataacaaacatagcttcacctcagtattttctttctttctttgttcaacagtgctccgataagggaatgctagaaaatagatgagaagtactgaaagacctttttttttaattgattagaaaagtaagtctctagggtctttgaatgctggaatttttttttttttttttgtctttcccatctgtggcagctaaaacaaaaatcactcaaaatattcaggtttacatgttagctctctctcatagggagctgccatacctcacagttcaaagtgtattctatagatcagtaacattatactgacatgtaattgcaatttactatgcagcaaaaatgattcaagaagaaaaataacctacagtgtctgtatacctttgtatacacaattgcttaagttactctgcttttaacatttgtacttggataaaatgcttatgtctgtataggaatgtcacagtgcaagatgctgctagcccaggcacaaagtattaaaattattttgt

SEQ ID NO: 180403 - DNA, 1415 bp, Homo sapiens
  Payload ID: 15533
  Gene Symbol: STYXL1
  Gene Name: serine/threonine/tyrosine interacting-like 1
  Uniprot ID: Q9Y6J8
  ENST ID: ENST00000248600
  CDS Start-End: 344-1285
gccacttccgggagtcggaaaggaaagctgtgggaccatcctggcaaccccggtgtttggctgggttctagcgtagccgtctgtgtggccggtgggggacctgcggtcggagtgggagggccagtctgcacccaagaggtggaagaggacgggctttaggctggaagcgccttagaggagccatttttccaggtggggccccaggcagaggctccgacagggagcctggccatagtcgcgcagccggggaggtggagcgcgtcccagacccgagcccccgacctcagccaaacccattccttctgcccttggaggccagaggggactctgagctccggaaaggatgcctggtttgcttttatgtgaaccaacagagctttacaacatcctgaatcaggccacaaaactctccagattaacagaccccaactatctctgtttattggatgtccgttccaaatgggagtatgacgaaagccatgtgatcactgcccttcgagtgaagaagaaaaataatgaatatcttctcccggagtctgtggacctggagtgtgtgaagtactgcgtggtgtatgataacaacagcagcaccctggagatactcttaaaagatgatgatgatgattcagactctgatggtgatggcaaagatcttgtgcctcaagcagccattgagtatggcaggatcctgacccgcctcacccaccaccccgtctacatcctgaaagggggctatgagcgcttctcaggcacgtaccactttctccggacccagaagatcatctggatgcctcaggaactggatgcatttcagccataccccattgaaatcgtgccagggaaggtcttcgttggcaatttcagtcaagcctgtgaccccaagattcagaaggacttgaaaatcaaagcccatgtcaatgtctccatggatacagggcccttttttgcaggcgatgctgacaagcttctgcacatccggatagaagattccccggaagcccagattcttcccttcttacgccacatgtgtcacttcattgaaattcaccatcaccttggctctgtcattctgatcttttccacccaaggtatcagccgcagttgtgccgccatcatagcctacctcatgcatagtaacgagcagaccttgcagaggtcctgggcctatgtcaagaagtgcaaaaacaacatgtgtccaaatcggggattggtgagccagctgctggaatgggagaagactatccttggagattccatcacaaacatcatggatccgctctactgatcttctccgaggcccaccgaagggtactgaagagcctcacctgggggcattttgtgggtggagggccagagtgtgtatacccaggcttgtctggaaggagaaggcctttgctgcctgaaagtctcatgtt

SEQ ID NO: 180404 - DNA, 953 bp, Homo sapiens
  Payload ID: 15533
  Gene Symbol: STYXL1
  Gene Name: serine/threonine/tyrosine interacting-like 1
  Uniprot ID: Q9Y6J8
  ENST ID: ENST00000340062
  CDS Start-End: 174-827
aggaaagctgtgggaccatcctggcaaccccggtgtttggctgggttctagcgtagccgtctgtgtggccggtgggggacctgcggtcggagtgggagggccagtctgcacccaagaggtggaagaggacgggctttaggctggaagcgccttagaggagccatttttccaggatgcctggtttgcttttatgtgaaccaacagagctttacaacatcctgaatcaggccacaaaactctccagattaacagaccccaactatctctgtttattggatgtccgttccaaatgggagtatgacgaaagccatgtgatcactgcccttcgagtgaagaaggaactggatgcatttcagccataccccattgaaatcgtgccagggaaggtcttcgttggcaatttcagtcaagcctgtgaccccaagattcagaaggacttgaaaatcaaagcccatgtcaatgtctccatggatacagggcccttttttgcaggcgatgctgacaagcttctgcacatccggatagaagattccccggaagcccagattcttcccttcttacgccacatgtgtcacttcattgaaattcaccatcaccttggctctgtcattctgatcttttccacccaaggtatcagccgcagttgtgccgccatcatagcctacctcatgcatagtaacgagcagaccttgcagaggtcctgggcctatgtcaagaagtgcaaaaacaacatgtgtccaaatcggggattggtgagccagctgctggaatgggagaagactatccttggagattccatcacaaacatcatggatccgctctactgatcttctccgaggcccaccgaagggtactgaagagcctcacctgggggcattttgtgggtggagggccagagtgtgtatacccaggcttgtctggaaggagaaggcctttgctgcctgaaagtctca

SEQ ID NO: 180405 - DNA, 1374 bp, Homo sapiens
  Payload ID: 15533
  Gene Symbol: STYXL1
  Gene Name: serine/threonine/tyrosine interacting-like 1
  Uniprot ID: Q9Y6J8
  ENST ID: ENST00000359697
  CDS Start-End: 307-1248
ctggcaaccccggtgtttggctgggttctagcgtagccgtctgtgtggccggtgggggacctgcggtcggagtgggagggccagtctgcacccaagaggtggaagaggacgggctttaggctggaagcgccttagaggagccatttttccaggtggggccccaggcagaggctccgacagggagcctggccatagtcgcgcagccggggaggtggagcgcgtcccagacccgagcccccgacctcagccaaacccattccttctgcccttggaggccagaggggactctgagctccggaaagcaggatgcctggtttgcttttatgtgaaccaacagagctttacaacatcctgaatcaggccacaaaactctccagattaacagaccccaactatctctgtttattggatgtccgttccaaatgggagtatgacgaaagccatgtgatcactgcccttcgagtgaagaagaaaaataatgaatatcttctcccggagtctgtggacctggagtgtgtgaagtactgcgtggtgtatgataacaacagcagcaccctggagatactcttaaaagatgatgatgatgattcagactctgatggtgatggcaaagatcttgtgcctcaagcagccattgagtatggcaggatcctgacccgcctcacccaccaccccgtctacatcctgaaagggggctatgagcgcttctcaggcacgtaccactttctccggacccagaagatcatctggatgcctcaggaactggatgcatttcagccataccccattgaaatcgtgccagggaaggtcttcgttggcaatttcagtcaagcctgtgaccccaagattcagaaggacttgaaaatcaaagcccatgtcaatgtctccatggatacagggcccttttttgcaggcgatgctgacaagcttctgcacatccggatagaagattccccggaagcccagattcttcccttcttacgccacatgtgtcacttcattgaaattcaccatcaccttggctctgtcattctgatcttttccacccaaggtatcagccgcagttgtgccgccatcatagcctacctcatgcatagtaacgagcagaccttgcagaggtcctgggcctatgtcaagaagtgcaaaaacaacatgtgtccaaatcggggattggtgagccagctgctggaatgggagaagactatccttggagattccatcacaaacatcatggatccgctctactgatcttctccgaggcccaccgaagggtactgaagagcctcacctgggggcattttgtgggtggagggccagagtgtgtatacccaggcttgtctggaaggagaaggcctttgctgcctgaaagtctca

SEQ ID NO: 180406 - DNA, 1127 bp, Homo sapiens
  Payload ID: 15533
  Gene Symbol: STYXL1
  Gene Name: serine/threonine/tyrosine interacting-like 1
  Uniprot ID: Q9Y6J8
  ENST ID: ENST00000360591
  CDS Start-End: 344-997
gccacttccgggagtcggaaaggaaagctgtgggaccatcctggcaaccccggtgtttggctgggttctagcgtagccgtctgtgtggccggtgggggacctgcggtcggagtgggagggccagtctgcacccaagaggtggaagaggacgggctttaggctggaagcgccttagaggagccatttttccaggtggggccccaggcagaggctccgacagggagcctggccatagtcgcgcagccggggaggtggagcgcgtcccagacccgagcccccgacctcagccaaacccattccttctgcccttggaggccagaggggactctgagctccggaaaggatgcctggtttgcttttatgtgaaccaacagagctttacaacatcctgaatcaggccacaaaactctccagattaacagaccccaactatctctgtttattggatgtccgttccaaatgggagtatgacgaaagccatgtgatcactgcccttcgagtgaagaaggaactggatgcatttcagccataccccattgaaatcgtgccagggaaggtcttcgttggcaatttcagtcaagcctgtgaccccaagattcagaaggacttgaaaatcaaagcccatgtcaatgtctccatggatacagggcccttttttgcaggcgatgctgacaagcttctgcacatccggatagaagattccccggaagcccagattcttcccttcttacgccacatgtgtcacttcattgaaattcaccatcaccttggctctgtcattctgatcttttccacccaaggtatcagccgcagttgtgccgccatcatagcctacctcatgcatagtaacgagcagaccttgcagaggtcctgggcctatgtcaagaagtgcaaaaacaacatgtgtccaaatcggggattggtgagccagctgctggaatgggagaagactatccttggagattccatcacaaacatcatggatccgctctactgatcttctccgaggcccaccgaagggtactgaagagcctcacctgggggcattttgtgggtggagggccagagtgtgtatacccaggcttgtctggaaggagaaggcctttgctgcctgaaagtctcatgtt

SEQ ID NO: 180407 - DNA, 1147 bp, Homo sapiens
  Payload ID: 15533
  Gene Symbol: STYXL1
  Gene Name: serine/threonine/tyrosine interacting-like 1
  Uniprot ID: Q9Y6J8
  ENST ID: ENST00000431581
  CDS Start-End: 147-1088
cggtgtttggctgggttctagcgtagccgtctgtgtggccggtgggggacctgcggtcggagtgggagggccagtctgcacccaagaggtggaagaggacgggctttaggctggaagcgccttagaggagccatttttccagcaggatgcctggtttgcttttatgtgaaccaacagagctttacaacatcctgaatcaggccacaaaactctccagattaacagaccccaactatctctgtttattggatgtccgttccaaatgggagtatgacgaaagccatgtgatcactgcccttcgagtgaagaagaaaaataatgaatatcttctcccggagtctgtggacctggagtgtgtgaagtactgcgtggtgtatgataacaacagcagcaccctggagatactcttaaaagatgatgatgatgattcagactctgatggtgatggcaaagatcttgtgcctcaagcagccattgagtatggcaggatcctgacccgcctcacccaccaccccgtctacatcctgaaagggggctatgagcgcttctcaggcacgtaccactttctccggacccagaagatcatctggatgcctcaggaactggatgcatttcagccataccccattgaaatcgtgccagggaaggtcttcgttggcaatttcagtcaagcctgtgaccccaagattcagaaggacttgaaaatcaaagcccatgtcaatgtctccatggatacagggcccttttttgcaggcgatgctgacaagcttctgcacatccggatagaagattccccggaagcccagattcttcccttcttacgccacatgtgtcacttcattgaaattcaccatcaccttggctctgtcattctgatcttttccacccaaggtatcagccgcagttgtgccgccatcatagcctacctcatgcatagtaacgagcagaccttgcagaggtcctgggcctatgtcaagaagtgcaaaaacaacatgtgtccaaatcggggattggtgagccagctgctggaatgggagaagactatccttggagattccatcacaaacatcatggatccgctctactgatcttctccgaggcccaccgaagggtactgaagagcctcacctgggggcattttgtgggt

SEQ ID NO: 180408 - DNA, 651 bp, Homo sapiens
  Payload ID: 15533
  Gene Symbol: STYXL1
  Gene Name: serine/threonine/tyrosine interacting-like 1
  ENST ID: ENST00000430497
  CDS Start-End: 1-205
ccatgtgatcactgcccttcgagtgaagaagaaaaataatgaatatcttctcccggagtctgtggacctggagtgtgtgaagtactgcgtggtgtatgataacaacagcagcaccctggagatactcttaaaagatgatgatgatgattcagactctgatggtgatggcaaaggaactggatgcatttcagccataccccattgaaatcgtgccagggaaggtcttcgttggcaatttcagtcaagcctgtgaccccaagattcagaaggacttgaaaatcaaagcccatgtcaatgtctccatggatacagggcccttttttgcaggcgatgctgacaagcttctgcacatccggatagaagattccccggaagcccagattcttcccttcttacgccacatgtgtcacttcattgaggtcctgggcctatgtcaagaagtgcaaaaacaacatgtgtccaaatcggggattggtgagccagctgctggaatgggagaagactatccttggagattccatcacaaacatcatggatccgctctactgatcttctccgaggcccaccgaagggtactgaagagcctcacctgggggcattttgtgggtggagggccagagtgtgtatacccaggcttgtctggaaggagaa

SEQ ID NO: 180409 - DNA, 764 bp, Homo sapiens
  Payload ID: 15533
  Gene Symbol: STYXL1
  Gene Name: serine/threonine/tyrosine interacting-like 1
  ENST ID: ENST00000438695
  CDS Start-End: 1-205
ccatgtgatcactgcccttcgagtgaagaagaaaaataatgaatatcttctcccggagtctgtggacctggagtgtgtgaagtactgcgtggtgtatgataacaacagcagcaccctggagatactcttaaaagatgatgatgatgattcagactctgatggtgatggcaaaggaactggatgcatttcagccataccccattgaaatcgtgccagggaaggtcttcgttggcaatttcagtcaagcctgtgaccccaagattcagaaggacttgaaaatcaaagcccatgtcaatgtctccatggatacagggcccttttttgcaggcgatgctgacaagcttctgcacatccggatagaagattccccggaagcccagattcttcccttcttacgccacatgtgtcacttcattgaaattcaccatcaccttggctctgtcattctgatcttttccacccaaggtatcagccgcagttgtgccgccatcatagcctacctcatgcatagtaacgagcagaccttgcagaggtcctgggcctatgtcaagaagtgcaaaaacaacatgtgtccaaatcggggattggtgagccagctgctggaatgggagaagactatccttggagattccatcacaaacatcatggatccgctctactgatcttctccgaggcccaccgaagggtactgaagagcctcacctgggggcattttgtgggtggagggccagagtgtgtatacccaggcttgtctggaaggagaa

SEQ ID NO: 180410 - DNA, 663 bp, Homo sapiens
  Payload ID: 15533
  Gene Symbol: STYXL1
  Gene Name: serine/threonine/tyrosine interacting-like 1
  ENST ID: ENST00000454618
  CDS Start-End: 1-663
catgtgatcactgcccttcgagtgaagaagaaaaataatgaatatcttctcccggagtctgtggacctggagtgtgtgaagtactgcgtggtgtatgataacaacagcagcaccctggagatactcttaaaagatgatgatgatgattcagactctgatggtgatggcaaagatcttgtgcctcaagcagccattgagtatggcaggatcctgacccgcctcacccaccaccccgtctacatcctgaaagggggctatgagcgcttctcaggcacgtaccactttctccggacccagaagatcatctggatgcctcaggaactggatgcatttcagccataccccattgaaatcgtgccagggaaggtcttcgttggcaatttcagtcaagcctgtgaccccaagattcagaaggacttgaaaatcaaagcccatgtcaatgtctccatggatacagggcccttttttgcaggcgatgctgacaagcttctgcacatccggatagaagattccccggaagcccagattcttcccttcttacgccacatgtgtcacttcattgaggtcctgggcctatgtcaagaagtgcaaaaacaacatgtgtccaaatcggggattggtgagccagctgctggaatgggagaagactatccttggagattc

SEQ ID NO: 180411 - DNA, 1570 bp, Homo sapiens
  Payload ID: 15533
  Gene Symbol: STYXL1
  Gene Name: serine/threonine/tyrosine interacting-like 1
  ENST ID: ENST00000451157
  CDS Start-End: 171-1019
aaagctgtgggaccatcctggcaaccccggtgtttggctgggttctagcgtagccgtctgtgtggccggtgggggacctgcggtcggagtgggagggccagtctgcacccaagaggtggaagaggacgggctttaggctggaagcgccttagaggagccatttttccaggatgcctggtttgcttttatgtgaaccaacagagctttacaacatcctgaatcaggccacaaaactctccagattaacagaccccaactatctctgtttattggatgtccgttccaaatgggagtatgacgaaagccatgtgatcactgcccttcgagtgaagaagaaaaataatgaatatcttctcccggagtctgtggacctggagtgtgtgaagtactgcgtggtgtatgataacaacagcagcaccctggagatactcttaaaagatgatgatgatgattcagactctgatggtgatggcaaagatcttgtgcctcaagcagccattgagtatggcaggatcctgacccgcctcacccaccaccccgtctacatcctgaaagggggctatgagcgcttctcaggcacgtaccactttctccggacccagaagatcatctggatgcctcaggaactggatgcatttcagccataccccattgaaatcgtgccagggaaggtcttcgttggcaatttcagtcaagcctgtgaccccaagattcagaaggacttgaaaatcaaagcccatgtcaatgtctccatggatacagggcccttttttgcaggcgatgctgacaagcttctgcacatccggatagaagattccccggaagcccagattcttcccttcttacgccacatgtgtcacttcattgaaattcaccatcaccttggctctgtcattctgatcttttccacccaaggtatcagccgcagttgtgccgccatcatagcctacctcatgcatagtaacgagcagaccttgcagacggagtctcgctctgtcacccaggctggagtacagtagcacaatctcgactcactgcaagctctgcctcccgggctcatgccattcttctgcctcagcctcccgagtaactgggactacaggcatctgccaccactcaatttctttaatatatgtaggcctattcagattgtctgtttcttcttgtgtgagttttggcagtctgtgtctttcaaggaattgatcaatcacatttgtggatatgaatattcttctattatccttttaatgtctgtgggatctgtagcaatgtcttctctttcacttctgtattagtaatttgtgtcttctgtttaagttagcctggctagcggtgtatcgattttattgatcttttcaaagaaccggcttttggtttttttgattttctctattgatttcctgttttcaatttcattctttgcatggcgtatctagttttcctagcaccatttgttgaaatgactgtccttttcccccatcgaatggtcttggcatactatcaaaaattccttgacaggcccggtgcagtggctcacacctgtaatcccagcaggttgggaggcagaggt

SEQ ID NO: 180412 - DNA, 2995 bp, Homo sapiens
  Payload ID: 15534
  Gene Symbol: STYK1
  Gene Name: serine/threonine/tyrosine kinase 1
  Uniprot ID: Q6J9G0
  ENST ID: ENST00000075503
  CDS Start-End: 522-1790
ggagtcaccgtgatacctgacatctagcaatcactagagtaggaaatgagtatagatcagcaacaagtccagcctttacagttgcagcagaggtttcctgtggctcgagtgtggcgagtcccggaaacctcggagcccgcagacttcccttcgcgggagcccgcccgaactccatcctttgccggcagccacgccccgcagtgggaaggagggactgaaaagcatttccttgaggctggcacaccttgccctacccaaccctgtcattatttcccctccgactgggccggtgccatcggaaaccggagtgaccagaggagggacacgcatccaatttcactgggctgcaagatatcaataagccttgcctctttaaactacttatgtacaaataaaagtgatggtgagaacctggctcaggaaatgcagtagcaggccatattgcatccaaaggaattactcacagctgtgctgtgtgcattctctgtgggcctagcagggaaggggacagccctgtggcaatgggcatgacacggatgctcctggaatgcagtctcagtgacaagttgtgtgtcatccaggagaagcagtatgaagtgattatcgtcccaactttgttggttactatcttcctcatccttcttggggtcatcctgtggctttttatcagagaacaaagaactcaacagcagcgttctggacctcaaggcattgcccctgttcctccacctagggacctaagctgggaagcaggacatggaggaaatgtggctttgccacttaaggagacatccgtggaaaactttctgggagctaccacacctgccctggctaagctgcaggtgccgcgggagcaactctctgaagttctggagcagatttgcagtggtagctgtgggcccatctttcgagccaatatgaacactggggacccttctaagcccaagagtgttattctcaaggctttaaaagaaccagctgggctccatgaggtacaagatttcttagggcgaatccaattccatcaatacctggggaaacacaaaaacctggtgcagctggaaggctgctgcactgaaaagctgccactctatatggtgttggaggatgtggcccagggggacctgctcagctttctctggacctgtcggcgggatgtgatgactatggatggtcttctctatgatctcacagaaaaacaagtatatcacatcggaaagcaggtccttttggcgctggaattcctgcaggagaagcatttgttccatggggatgtggcagccaggaatattctgatgcaaagtgatctcactgctaagctctgtggattaggcctggcttatgaagtttacacccgaggggccatctcctctactcaaaccatacctctcaagtggcttgccccagaacggcttctcctgagacctgctagcatcagagcagatgtctggtcttttgggatcctgctctatgagatggtgactctaggagcaccaccgtatcctgaagtccctcctaccagcatcctagagcatctccaaagaaggaaaatcatgaagagacccagtagctgcacacataccatgtacagtatcatgaagtcctgctggcgctggcgtgaggctgaccgcccctcacctagagagctgcgcttgcgcctagaagctgccattaaaactgcagatgacgaggctgtgttacaagtaccagagttggtggtacctgaactgtatgcagctgtggccggcatcagagtggagagcctcttctacaactatagcatgctttgaagagtctcgggcaagaaacattcatgcatgagtatatgttcttggaatcaattcctctaagaacagagaatggtctttcccagggacacaaagggagaaatgggacatggattcttgatcttcctttacacatttctcgggaaatctgaaatgatgctggatgggactctacacatcctgagctaagacatactgtcagtctcacttctgctgtcccagtcctagaaatcctgggtagaagtggtggacctgtgcaaaggaggttttagaactctgcagtatttgttggggcatggcacaaataagctcatccctcccgtccgaggctagtttcctctggaaccacatttttatctagatgaaaatttggaatgaaatgaaggaatagaaatccaataaaagagttgaagggaaagaaaatttaaggttcttcttgctcaggattacagatatggaccaacacctccttcaagaaaaggtggtaggacacaaagttcttcagtcctgagccctacatgtggggttggaggagaactataacggaaaaacctctgagtttcaccttaggtatagataaaagaaagatggtccccttttatctgattctgagacaggtaaattctgtttgttactacgtttaattagaaggtggaggagtcatttcatgattaagaacattcaacatgtattgttcattaagctagcttcctagttccgattagactaaggagactaagcctagagagtcaatgttagaacagtgaaaagaattctgtgtgtgtgtgtgtgtgtgtgcacaataaataggaaatgtagaaaccaagcaagaaggcttagtagctcagtctttaacaagggctagaaaagaatgtaatctgatatggaaggatagcagcttctaattttcaatcatctgttgatatactgtgaaacttattttattaaattaatatttattaaatggaaatatgcttttctggtttataactactaaaaatatcatagggaggataaaagtaaataagtgaaagttaatgccaatagaaaaattcaagagataatgtacaatgtcagaaaagggattctttatgtgtaaatggggataatacctatttcacaaggttgttctgaggattgatacgttttgagtatgtatttgtacactatctggcacatatgcgctcaataaacgtgtttctcctttt

SEQ ID NO: 180413 - DNA, 249 bp, Homo sapiens
  Payload ID: 15534
  Gene Symbol: STYK1
  Gene Name: serine/threonine/tyrosine kinase 1
  ENST ID: ENST00000542924
  CDS Start-End: 1-249
ggcgaatccaattccatcaatacctggggaaacacaaaaacctggtgcagctggaaggctgctgcactgaaaagctgccactctatatggtgttggaggatgtggcccagggggacctgctcagctttctctggacctgtcggcgggtgagcagtagggcagaggatgtgatgactatggatggtcttctctatgatctcacagaaaaacaagtatatcacatcggaaagcaggtccttttggcgctgg

SEQ ID NO: 180414 - DNA, 520 bp, Homo sapiens
  Payload ID: 15534
  Gene Symbol: STYK1
  Gene Name: serine/threonine/tyrosine kinase 1
  ENST ID: ENST00000535345
  CDS Start-End: 325-520
gtcattatttcccctccgactgggccggtgccatcggaaaccggagtgaccagaggagggacacggaatctctggagacaggtaaaaatagaagcaagaaaaactgatagccctcagatttcataatttgcatccaatttcactgggctgcaagatatcaataagccttgcctctttaaactacttatgtacaaataaaagtgatggtgagaacctggctcaggaaatgcagtagcaggccatattgcatccaaaggaattactcacagctgtgctgtgtgcattctctgtgggcctagcagggaaggggacagccctgtggcaatgggcatgacacggatgctcctggaatgcagtctcagtgacaagttgtgtgtcatccaggagaagcagtatgaagtgattatcgtcccaactttgttggttactatcttcctcatccttcttggggtcatcctgtggctttttatcagagaacaaagaactcaacagcagcgttctggacctcaaggtaaagctc

SEQ ID NO: 180415 - DNA, 543 bp, Homo sapiens
  Payload ID: 15534
  Gene Symbol: STYK1
  Gene Name: serine/threonine/tyrosine kinase 1
  ENST ID: ENST00000541561
  CDS Start-End: 422-543
atcgtgactccgttttcacctggactggagtcaccgtgatacctgacatctagcaatcactagagtaggaaatgagtatagatcagcaacaagtccagcctttacagttgcagcagaggtttcctgtggctcgagtgtggcgagtcccggaaacctcggagcccgcagacttcccttcgcgggagcccgcccgaactccatcctttgccggcagccacgccccgcagtgggaaggagggactgaaaagcatttccttgaggctggcacaccttgccctacccaaccctgtcattatttcccctccgactgggccggtgccatcggaaaccggagtgaccagaggagggacacggaattactcacagctgtgctgtgtgcattctctgtgggcctagcagggaaggggacagccctgtggcaatgggcatgacacggatgctcctggaatgcagtctcagtgacaagttgtgtgtcatccaggagaagcagtatgaagtgattatcgtcccaactttgttggttactatcttcctcatccttct

SEQ ID NO: 180416 - DNA, 586 bp, Homo sapiens
  Payload ID: 15534
  Gene Symbol: STYK1
  Gene Name: serine/threonine/tyrosine kinase 1
  ENST ID: ENST00000538867
  CDS Start-End: 338-586
attcctggagagggggccatcaggagagggggaagggaaagaatgaggttacaggaattacttgtcagaggactgcatagcctttcagaccatggaatcgttgctttcagcttcggcttcctcatctgcaaagcataaatacgcatccaatttcactgggctgcaagatatcaataagccttgcctctttaaactacttatgtacaaataaaagtgatggtgagaacctggctcaggaaatgcagtagcaggccatattgcatccaaaggaattactcacagctgtgctgtgtgcattctctgtgggcctagcagggaaggggacagccctgtggcaatgggcatgacacggatgctcctggaatgcagtctcagtgacaagttgtgtgtcatccaggagaagcagtatgaagtgattatcgtcccaactttgttggttactatcttcctcatccttcttggggtcatcctgtggctttttatcagagaacaaagaactcaacagcagcgttctggacctcaaggcattgcccctgttcctccacctagggacctaagctgggaagcaggacatggaggaaatgtg

SEQ ID NO: 180417 - DNA, 582 bp, Homo sapiens
  Payload ID: 15534
  Gene Symbol: STYK1
  Gene Name: serine/threonine/tyrosine kinase 1
  ENST ID: ENST00000542562
  CDS Start-End: 321-582
accttgccctacccaaccctgtcattatttcccctccgactgggccggtgccatcggaaaccggagtgaccagaggagggacacgagacagggtcttgctgaagaccctggctaaccaggctggcctggaactcctggcctcaagtgatcctcatgccttcatcttccaaagtgctgggattacagaagtcagccacggaggtcagctgacagctaattcttaacaattgacatggtcagagcaaatcgaaggaattactcacagctgtgctgtgtgcattctctgtgggcctagcagggaaggggacagccctgtggcaatgggcatgacacggatgctcctggaatgcagtctcagtgacaagttgtgtgtcatccaggagaagcagtatgaagtgattatcgtcccaactttgttggttactatcttcctcatccttcttggggtcatcctgtggctttttatcagagaacaaagaactcaacagcagcgttctggacctcaaggcattgcccctgttcctccacctagggacctaagctgggaagcaggacatggaggaaatgtggctttgccactta

SEQ ID NO: 180418 - DNA, 3207 bp, Homo sapiens
  Payload ID: 15535
  Gene Symbol: SERTM1
  Gene Name: serine-rich and transmembrane domain containing 1
  Uniprot ID: A2A2V5
  ENST ID: ENST00000315190
  CDS Start-End: 447-770
gagactagggggcggtgaggagtgggacccgctcgcggccattggttgtgcggccaggaggggcggagggacgacgcgcgggctgtgcggggccggcagcccggatccactcccgctgcgcctgctgtccgccgtgcgcccagactgcgcgccgcgccgctgcgcccaacattcccgaggacggcttcgcgggcgcgtatcgtccagaccggagcaccgccccaccgctagcgcaggagacctgccggggaagtcgcgtgtcctgacctgcagtctcaatgcacatctgatacctgctgcctttgagaaacaagttttgttgtgctgatttaacagcctgtgaattctgcaaacacgatcgtgaaaaaatgccaatctgtcctgtgtaagccctgtgtgaagttttgactttaatctaccagatcactccttcaccctccataaagatgtctgaacctgacacttcctcaggattttcgggaagtgtggagaatggaacttttcttgagctgtttcccacatccctgtccacgtcagtggacccatcctcaggccacctgtcaaacgtctacatctatgtgtccatattcctcagccttttagcgtttctgcttctgcttttaatcattgccctccagaggctcaaaaatatcatctcctccagttcctcctacccagagtatccaagcgacgctggaagttctttcaccaatttggaagtctgcagcatttcctctcagaggtccactttttcaaacctttcatcctgaggaaaatggaagagtccttgagtgtggcagcagttttgacatccccttacggaagtgtcccgtgaggcattgcctcatgaaagaaatgatccttttggtgtagacctgcttctccttctcctttttctctgatttcttttctgttcatgatgcttttcatttggggatggagacaccgatgttggtggaaatgtgtgcaaaccccaaggtgcagaatttcacacaaatggcttgatgaatctagactgggcttcttcaggtaagtcagttcattctactttgttggacgccgtaggctcatctgaggtggcctctccgtggatgctggacatggactcgcacttcatttcttttacaaagccgtgaaatcaactgagcctgcagaaactggcaaaatcaagtctgacctatgtagaagttattttccatatttaaaagataaagtggagacaccaaacttaaaaaggaagagagtcaatttagatttaatgtatgacatttctaaaactgagggtaaatatatgctaaatattttctttaacttcactttaacaagtaaaaatcacacttattgatgaatgtaagtcatttgggaaagttttggaagagtttacattttaatagcaagacaaacatgtattatgatggagcttgtgatgtatttctgcctcctggagttttattttgtttttctgcttatgttttagtcataatgccacaaagttgtggaatttttgtgattaattgctgttactagtactaagagaagcaccagaagagatgccaagaagtttttatatgaataatttctatcagtgagaattaagcatatggaaaatattcatttagttgtattttatacagtaataactcttagctgtcgtgtaagttcctttattcggtttcatagtctttataattttagtgcagaattatattaagcctccaagatgtctgatatttgttcactcacattaggttgtaaaacttagaaactaaattgcaaatatatgtgttattatatactccacgaatgttgcgtctctgataattagttgttgtatgttaacataatactctacattaggatttcaggatgtgagtttgtattaaaaattgtaggcactcaagttgtgtagctgctgggagctttagggatcctaggagctgccgtgctgcaggcagcagagtatgtctgaactcggcgggcgggtggcaggggctgtctgtgaaattaggcacacatgtgagctcagacatggaatgtggaggaactcaagctgcccctaaaaacaaaacaatcaaactgcagctccttaagagtaagaattttaatttaattttgaaaataaatggcccacagggtaaacactgaacttattcaacctacaggaggccactgcatcaacacgccacggtcttcccatggcaactgaatcattccttgttcaaaacatttaatcatcttaagcagtggggcttcaacacaccgtttggttagattgtgcagtcagcactctccagtgattagaatgggggaaagaatccactatttgtacagggtttatctttatcatactaaaatgctgagtgagtggaggtctgggaatgaaaatcagaagtcttcttcttcttttaattcataagcctcacttaaatcagaacacatttaactatttatatatcaaaaacgtccccaaacaccataagaccagcacagagttgctgccctaaaatgtataattagtgaaaaatttacctctgcttccatttaaagcatggcagtgggttgggtgtcattatgtagtataaaaactggactagataaactgctattttagagcattattagcattctctgaatatatgtatatatacatatatatacgcacacacacacacacacataaatatatatatatatatatatatataaactcacatactcccaattaaaagtcgtgtgaaagctacacaggattacagaggcatctatattatcacttttgctctttgactaatcctatgctgtttttgttatagagagaaacaaggacatggatgaagtgatttttttttaaataaaaggacaaatttgccacacaacagaacaatctgagtatgatctgtcctcagggtatctttatatcctttccatgtgaaagagatataaagaattctgacagcaaaactactttaaaaatcaaatcaaatcaaatccacaagcacactcccattcctcccctgccgcaatggttcttgctctcaatgtttagtagagaaattaagagccacattcaaagatggaaaataagatttgtcattagaagcttgccaaggtaacagattgtacaacttgagatgaattcatgttgtttaagaagttcagaaaggttggaagatgggtttataaataaagaagtggagtccattgaaa

SEQ ID NO: 180419 - DNA, 1159 bp, Homo sapiens
  Payload ID: 15536
  Gene Symbol: SSMEM1
  Gene Name: serine-rich single-pass membrane protein 1
  Uniprot ID: Q8WWF3
  ENST ID: ENST00000297819
  CDS Start-End: 52-786
agtcatctttatccctttaagcatggtttattttctgagcaaggagtcatcatgggagaccttttttccttattttgggaggtagatcctcccccaatacctgtaaattgtgccattccaaatcaggattatgaatgctggaaggatgactcttgtggaaccatagggagcttcctgctttggtattttgttatcgtatttgtcctgatgttcttctctagggcttctgtctggatgtctgaggataaaaaggatgaaggcagtgggacaagtacttcagtaaggaaagcaagcaaagagacttcctgtaagcggcaaagcaaagacagtgcctgggatccctcacaaacaatgaagaaaccaaagcagaaccaacttacccctgtaaccaactcagaagtggctttggtcaatgcctatcctgaacaaagacgagccaggcgccagtctcagttcaatgaggtgaaccagaaccaacatgacagtgatactacggagtatggcagtgaagagtctaactcagaagcctcctcgtggaaggagagtgaaagtgaacaccacccatcaccagacagtattaagaggagaaaaatggctcagaggcaaaggaatctgggaagttaccaaatgagcgaaaggcactgcctccactgcaaagccttgagaaccaacgaatggttggcgcaccattcccgacagaagccttcagtaacaccgccaatgaaaagagacagtcaagaggaaagttccatatctgacattaacaagaaatttagtaaattttgaattttatcacgttcttccttcacttgaagccaaatgaaagagatgaataaaacatgaaaaatcaccagagctataggtgaggagacttttacaacaaagtctctctaccaacaaacaaaaacatacttggaacccaagaggtaaaatctcacacaattcttcgttcaaaaaaaaaaaggccatcacgtgtttatggcaccattggaacaccaaagatctatatctgctatgatttttttatttgaaatagcacaagacagatattttgtgccttgagtgtatatattttgtgccttgagtgtatgtattttgtttatgtctgtaatatgaataagaaagctctttgaaaatgtattatttatgttgagaaacc

SEQ ID NO: 180420 - DNA, 2314 bp, Homo sapiens
  Payload ID: 15537
  Gene Symbol: SDCCAG3
  Gene Name: serologically defined colon cancer antigen 3
  Uniprot ID: Q96C92
  ENST ID: ENST00000298537
  CDS Start-End: 213-1451
cctcgccgacggcccaaggcgttcaggcacgcgctttcggtgctcggagcggaagcagcggcgagaggctcggaggcgcgggggcggccgagcggcgggcgacgggggcgggcgacgggggcgggcgacgcgggccgcggcacgggcggagccggggccatggagccgccgctgccgggctaggcaggtcgtgccccgccgggccggcggcgatgtcgggctaccagcgccgcccgggcgccaccccgctgtcccgagcccggagcctcgccattcccgacgctccagcgttctatgagcgccggtcttgtctcccccagctaaattgtgagcgcccccatggcagggacctggactcccccttcttcggcattcggccggcctttatgtgctatgtgcccagcccggtgctggcttccgtgggagacacagatgacagatttgaagatctggaagaggcaaatccattctcttttagagagtttctgaagaccaagaacctcggcctctcgaaagaggatccggccagcagaatttatgcaaaggaagcctcgaggcattccctgggacttgaccacaactccccaccctcccaaaccggcgggtatggcctggagtatcagcagccatttttcgaggatccgacaggggctggtgacctcctggatgaggaggaggatgaggacaccggatggagtggggcctacctgccgtccgccatcgagcagactcaccccgagagggtccctgccggcacgtcgccctgcagcacatacctttcctttttctccaccccgtcggagctggcagggcctgagtctctgccctcgtgggcgttgagtgacactgattctcgcgtgtctccggcctctccggcagggagtcctagcgcagactttgcggttcatggagagtctctgggagacaggcacctgcggacgctgcagataagttacgacgcactgaaagatgaaaattctaagctgagaagaaagctgaatgaggttcagagcttctctgaagctcaaacagaaatggtgaggacgcttgagcggaagttagaagcaaaaatgatcaaggaggaaagcgactaccacgacctggagtcggtggttcagcaggtggagcagaacctggagctgatgaccaaacgggctgtaaaggcagaaaaccacgtcgtgaaactaaaacaggaaatcagtttgctccaggcgcaggtctccaacttccagcgagagaatgaagccctgcggtgcggccagggtgccagcctgaccgtggtgaagcagaacgccgacgtggccctgcagaacctccgggtggtcatgaacagtgcacaggcttccatcaagcaactggtttccggagctgagacactgaatcttgttgccgaaatccttaaatctatagacagaatttctgaagttaaagacgaggaggaagactcttgaggacccctgggtgttctcagcatgaagctccgtgtataccctgaggtcaccaccgctcgatctaaatgtgcagttgtgtccttaaatatgcagtcttcacccagagtaaagtgttgatcgcaagagtccagtgtcgtgccctcagccagttcttggccaccacaatgggagcagccctggccgagttgtctctgtggtttctatgcagcccttcttggcgaaattcctgcgatcttatagattctaatgagctcttggaagacattgtcataaaagccagtgattttaagaaaaagagtggttctggaatcaatgttttccagtcccatcccagaacatcagttgtaagataagtacaattggttgtccttgatttcataagtagaacaaacactaaatgtgcctctgagatggccaccccgggcagggacctgtgccttccgccgatgctcagggctccctctggctcccgggtcactcttgtggccccagtgggtggtccctgcagtcatggcctgagtgcgcaggggccaccgcgtggctgctgctgtcctcctccgggacccacggggaccaaggtcacacgttccgtgctgtgaagctgtccagatgtgcctctttggctgggggttctggtggacgtttcaagtggcattttgtacaatgcaggttagaattcaggaatttcaagtatgtgcccgggtctgtcaggtcccagttgcctttctgacggcccccctcagagggacggcgatgagcactaaatgcttttttgactattttcctatagattttttttaaaacttttttttcctcctgttccaattgatagctttcttatttaataaattctgtagttcacc

SEQ ID NO: 180421 - DNA, 2304 bp, Homo sapiens
  Payload ID: 15537
  Gene Symbol: SDCCAG3
  Gene Name: serologically defined colon cancer antigen 3
  Uniprot ID: Q96C92
  ENST ID: ENST00000357365
  CDS Start-End: 131-1438
ggcggccgagcggcgggcgacgggggcgggcgacgggggcgggcgacgcgggccgcggcacgggcggagccggggccatggagccgccgctgccgggctaggcaggtcgtgccccgccgggccggcggcgatgtcgggctaccagcgccgcccgggcgccaccccgctgtcccgagcccggagcctcgccattcccgacgctccagcgttctatgagcgccggtcttgtctcccccagctaaattgtgagcgcccccatggcagggacctggactcccccttcttcggcattcggccggcctttatgtgctatgtgcccagcccggtgctggcttccgtgggagacacagattttggctatggaaaggggaaatgttctaagcagagcccgtcaggagcccacgggacacattttggagatgacagatttgaagatctggaagaggcaaatccattctcttttagagagtttctgaagaccaagaacctcggcctctcgaaagaggatccggccagcagaatttatgcaaaggaagcctcgaggcattccctgggacttgaccacaactccccaccctcccaaaccggcgggtatggcctggagtatcagcagccatttttcgaggatccgacaggggctggtgacctcctggatgaggaggaggatgaggacaccggatggagtggggcctacctgccgtccgccatcgagcagactcaccccgagagggtccctgccggcacgtcgccctgcagcacatacctttcctttttctccaccccgtcggagctggcagggcctgagtctctgccctcgtgggcgttgagtgacactgattctcgcgtgtctccggcctctccggcagggagtcctagcgcagactttgcggttcatggagagtctctgggagacaggcacctgcggacgctgcagataagttacgacgcactgaaagatgaaaattctaagctgagaagaaagctgaatgaggttcagagcttctctgaagctcaaacagaaatggtgaggacgcttgagcggaagttagaagcaaaaatgatcaaggaggaaagcgactaccacgacctggagtcggtggttcagcaggtggagcagaacctggagctgatgaccaaacgggctgtaaaggcagaaaaccacgtcgtgaaactaaaacaggaaatcagtttgctccaggcgcaggtctccaacttccagcgagagaatgaagccctgcggtgcggccagggtgccagcctgaccgtggtgaagcagaacgccgacgtggccctgcagaacctccgggtggtcatgaacagtgcacaggcttccatcaagcaactggtttccggagctgagacactgaatcttgttgccgaaatccttaaatctatagacagaatttctgaagttaaagacgaggaggaagactcttgaggacccctgggtgttctcagcatgaagctccgtgtataccctgaggtcaccaccgctcgatctaaatgtgcagttgtgtccttaaatatgcagtcttcacccagagtaaagtgttgatcgcaagagtccagtgtcgtgccctcagccagttcttggccaccacaatgggagcagccctggccgagttgtctctgtggtttctatgcagcccttcttggcgaaattcctgcgatcttatagattctaatgagctcttggaagacattgtcataaaagccagtgattttaagaaaaagagtggttctggaatcaatgttttccagtcccatcccagaacatcagttgtaagataagtacaattggttgtccttgatttcataagtagaacaaacactaaatgtgcctctgagatggccaccccgggcagggacctgtgccttccgccgatgctcagggctccctctggctcccgggtcactcttgtggccccagtgggtggtccctgcagtcatggcctgagtgcgcaggggccaccgcgtggctgctgctgtcctcctccgggacccacggggaccaaggtcacacgttccgtgctgtgaagctgtccagatgtgcctctttggctgggggttctggtggacgtttcaagtggcattttgtacaatgcaggttagaattcaggaatttcaagtatgtgcccgggtctgtcaggtcccagttgcctttctgacggcccccctcagagggacggcgatgagcactaaatgcttttttgactattttcctatagattttttttaaaacttttttttcctcctgttccaattgatagctttcttatttaataaattctgtagttcaccgca

SEQ ID NO: 180422 - DNA, 865 bp, Homo sapiens
  Payload ID: 15537
  Gene Symbol: SDCCAG3
  Gene Name: serologically defined colon cancer antigen 3
  ENST ID: ENST00000371723
  CDS Start-End: 197-865
aggcgttcaggcacgcgctttcggtgctcggagcggaagcagcggcgagaggctcggaggcgcgggggcggccgagcggcgggcgacgggggcgggcgacgggggcgggcgacgcgggccgcggcacgggcggagccggggccatggagccgccgctgccgggctaggcaggtcgtgccccgccgggccggcggcgatgtcgggctaccagcgccgcccgggcgccaccccgctgtcccgagcccggagcctcgccattcccgacgattttggctatggaaaggggaaatgttctaagcagagcccgtcaggagcccacgggacacattttggagatgacagatttgaagatctggaagaggcaaatccattctcttttagagagtttctgaagaccaagaacctcggcctctcgaaagaggatccggccagcagaatttatgcaaaggaagcctcgaggcattccctgggacttgaccacaactccccaccctcccaaaccggcgggtatggcctggagtatcagcagccatttttcgaggatccgacaggggctggtgacctcctggatgaggaggaggatgaggacaccggatggagtggggcctacctgccgtccgccatcgagcagactcaccccgagagggtccctgccggcacgtcgccctgcagcacatacctttcctttttctccaccccgtcggagctggcagggcctgagtctctgccctcgtgggcgttgagtgacactgattctcgcgtgtctccggcctctccggcagggagtcctagcgcagactttgcggttcatggagagtctctgggagacaggcacctgcggacgctgcagataagttacgacgca

SEQ ID NO: 180423 - DNA, 2129 bp, Homo sapiens
  Payload ID: 15537
  Gene Symbol: SDCCAG3
  Gene Name: serologically defined colon cancer antigen 3
  Uniprot ID: Q96C92
  ENST ID: ENST00000371725
  CDS Start-End: 204-1292
cggcccaaggcgttcaggcacgcgctttcggtgctcggagcggaagcagcggcgagaggctcggaggcgcgggggcggccgagcggcgggcgacgggggcgggcgacgggggcgggcgacgcgggccgcggcacgggcggagccggggccatggagccgccgctgccgggctaggcaggtcgtgccccgccgggccggcggcgatgtcgggctaccagcgccgcccgggcgccaccccgctgtcccgagcccggagcctcgccattcccgacgatgacagatttgaagatctggaagaggcaaatccattctcttttagagagtttctgaagaccaagaacctcggcctctcgaaagaggatccggccagcagaatttatgcaaaggaagcctcgaggcattccctgggacttgaccacaactccccaccctcccaaaccggcgggtatggcctggagtatcagcagccatttttcgaggatccgacaggggctggtgacctcctggatgaggaggaggatgaggacaccggatggagtggggcctacctgccgtccgccatcgagcagactcaccccgagagggtccctgccggcacgtcgccctgcagcacatacctttcctttttctccaccccgtcggagctggcagggcctgagtctctgccctcgtgggcgttgagtgacactgattctcgcgtgtctccggcctctccggcagggagtcctagcgcagactttgcggttcatggagagtctctgggagacaggcacctgcggacgctgcagataagttacgacgcactgaaagatgaaaattctaagctgagaagaaagctgaatgaggttcagagcttctctgaagctcaaacagaaatggtgaggacgcttgagcggaagttagaagcaaaaatgatcaaggaggaaagcgactaccacgacctggagtcggtggttcagcaggtggagcagaacctggagctgatgaccaaacgggctgtaaaggcagaaaaccacgtcgtgaaactaaaacaggaaatcagtttgctccaggcgcaggtctccaacttccagcgagagaatgaagccctgcggtgcggccagggtgccagcctgaccgtggtgaagcagaacgccgacgtggccctgcagaacctccgggtggtcatgaacagtgcacaggcttccatcaagcaactggtttccggagctgagacactgaatcttgttgccgaaatccttaaatctatagacagaatttctgaagttaaagacgaggaggaagactcttgaggacccctgggtgttctcagcatgaagctccgtgtataccctgaggtcaccaccgctcgatctaaatgtgcagttgtgtccttaaatatgcagtcttcacccagagtaaagtgttgatcgcaagagtccagtgtcgtgccctcagccagttcttggccaccacaatgggagcagccctggccgagttgtctctgtggtttctatgcagcccttcttggcgaaattcctgcgatcttatagattctaatgagctcttggaagacattgtcataaaagccagtgattttaagaaaaagagtggttctggaatcaatgttttccagtcccatcccagaacatcagttgtaagataagtacaattggttgtccttgatttcataagtagaacaaacactaaatgtgcctctgagatggccaccccgggcagggacctgtgccttccgccgatgctcagggctccctctggctcccgggtcactcttgtggccccagtgggtggtccctgcagtcatggcctgagtgcgcaggggccaccgcgtggctgctgctgtcctcctccgggacccacggggaccaaggtcacacgttccgtgctgtgaagctgtccagatgtgcctctttggctgggggttctggtggacgtttcaagtggcattttgtacaatgcaggttagaattcaggaatttcaagtatgtgcccgggtctgtcaggtcccagttgcctttctgacggcccccctcagagggacggcgatgagcactaaatgcttttttgactattttcctatagattttttttaaaacttttttttcctcctgttccaattgatagctttc

SEQ ID NO: 180424 - DNA, 626 bp, Homo sapiens
  Payload ID: 15537
  Gene Symbol: SDCCAG3
  Gene Name: serologically defined colon cancer antigen 3
  ENST ID: ENST00000417512
  CDS Start-End: 1-503
gagacaggcacctgcggacgctgcagataagttacgacgcactgaaagatgaaaattctaagctgagaagaaagctgaatgaggttcagagcttctctgaagctcaaacagaaatggtgaggacgcttgagcggaagttagaagcaaaaatgatcaaggaggaaagcgactaccacgacctggagtcggtggttcagcagaaacgggctgtaaaggcagaaaaccacgtcgtgaaactaaaacaggaaatcagtttgctccaggcgcaggtctccaacttccagcgagagaatgaagccctgcggtgcggccagggtgccagcctgaccgtggtgaagcagaacgccgacgtggccctgcagaacctccgggtggtcatgaacagtgcacaggcttccatcaagcaactggtttccggagctgagacactgaatcttgttgccgaaatccttaaatctatagacagaatttctgaagttaaagacgaggaggaagactcttgaggacccctgggtgttctcagcatgaagctccgtgtataccctgaggtcaccaccgctcgatctaaatgtgcagttgtgtccttaaatatgcagtcttcacccagagtaaagtgttgatcgcaa

SEQ ID NO: 180425 - DNA, 459 bp, Homo sapiens
  Payload ID: 15537
  Gene Symbol: SDCCAG3
  Gene Name: serologically defined colon cancer antigen 3
  ENST ID: ENST00000446833
  CDS Start-End: 134-459
agtaaagtcgctgttgtcgttgcttccagctccagcgttctatgagcgccggtcttgtctcccccagctaaattgtgagcgcccccatggcagggacctggactcccccttcttcggcattcggccggcctttatgtgctatgtgcccagcccggtgctggcttccgtgggagacacaggtgagagacgagggcgccggccccggggacgcttccagttcccgcgccacgtgtggcacctccgctgcagcacgagctcgtccattgacccatcaatgtgcagagcgctcactgcgtgccaggcactcggaattcaaaggcggagtcccctgctaggagctcacagtctggttgcggggagacctcccccaagacagacagttccagtacaggatgatgacagatttgaagatctggaagaggcaaatccattctcttttagagagtttctgaagaccaa

SEQ ID NO: 180426 - DNA, 2567 bp, Homo sapiens
  Payload ID: 15538
  Gene Symbol: SDCCAG8
  Gene Name: serologically defined colon cancer antigen 8
  Uniprot ID: Q86SQ7
  ENST ID: ENST00000366541
  CDS Start-End: 119-2260
gtgacagccgcggcaggaagcaggcgggcgctccccggccacaggcctgttgttctcggaagggagaaagctggacatttccccacgtaactcccagctctgggcctagagtgcgtgcatggcgaagtccccggagaactctaccctggaggagattctggggcagtatcaacggagtctccgggaacatgccagcagaagcattcaccaactgacatgtgccctgaaagaaggcgatgtcactattggagaagatgcaccaaatctttcttttagcaccagtgtgggaaatgaggacgccaggacagcctggcccgaattacaacagagccatgctgttaatcagctcaaagatttgttgcgccaacaagcagataaggaaagtgaagtatctccgtcaagaagaagaaaaatgtcccccttgaggtcattagaacatgaggaaaccaatatgcctactatgcacgaccttgttcatactattaatgaccagtctcaatatattcatcatttagaggcagaagttaagttctgcaaggaggaactctctggaatgaaaaataaaatacaagtagttgtgcttgaaaacgaagggctccagcaacagctaaaatctcaaagacaagaggagacactgagggaacaaacacttctggatgcatccggaaacatgcacaattcttggattacaacaggtgaagattctggggtgggcgaaacctccaaaagaccattttcccatgacaatgcagattttggcaaagctgcatctgctggtgagcagctagaactggagaagctaaaacttacttatgaggaaaagtgtgaaattgaggaatcccaattgaagtttttgaggaacgacttagctgaatatcagagaacttgtgaagatcttaaagagcaactaaagcataaagaatttcttctggctgctaatacttgtaaccgtgttggtggtctttgtttgaaatgtgctcagcatgaagctgttctttcccaaacccatactaatgttcatatgcagaccatcgaaagactggttaaagaaagagatgacttgatgtctgcactagtttccgtaaggagcagcttggcagatacgcagcaaagagaagcaagtgcttatgaacaggtgaaacaagttttgcaaatatctgaggaagccaattttgaaaaaaccaaggctttaatccagtgtgaccagttgaggaaggagctggagaggcaggcggagcgacttgaaaaagaacttgcatctcagcaagagaaaagggccattgagaaagacatgatgaaaaaggaaataacgaaagaaagggagtacatgggatcaaagatgttgatcttgtctcagaatattgcccaactggaggcccaggtggaaaaggttacaaaggaaaagatttcagctattaatcaactggaggaaattcaaagccagctggcttctcgggaaatggatgtcacaaaggtgtgtggagaaatgcgctatcagctgaataaaaccaacatggagaaggatgaggcagaaaaggagcacagagagttcagagcaaaaactaacagggatcttgaaattaaagatcaggaaatagagaaattgagaatagaactggatgaaagcaaacaacacttggaacaggagcagcagaaggcagccctggccagagaggagtgcctgagactaacagaactgctgggcgaatctgagcaccaactgcacctcaccagacaggaaaaagatagcattcagcagagctttagcaaggaagcaaaggcccaagcccttcaggcccagcaaagagagcaggagctgacacagaagatacagcaaatggaggcccagcatgacaaaactgaaaatgaacagtatttgttgctgacctcccagaatacatttttgacaaagttaaaggaagaatgctgtacattagccaagaaactggaacaaatctctcaaaaaaccagatctgaaatagctcaactcagtcaagaaaaaaggtatacatatgataaattgggaaagttacagagaagaaatgaagaattggaggaacagtgtgtccagcatgggagagtacatgagacgatgaagcaaaggctaaggcagctggataagcacagccaggccacagcccagcagctggtgcagctcctcagcaagcagaaccagcttctcctggagaggcagagcctgtcggaagaggtggaccggctgcggacccagttacccagcatgccacaatctgattgctgacctggatggaacagagtgaaataaatgatttacaaagagatatttacattcatctggtttagacttaatatgccacaacgcaccacgaccttcccagggtgacaccgcctcagcctgcagtggggctggtcctcatcaacgcgggcgctgtccccgcacgcagtcgggctggagctggagtctgactctagctgagcagagctcctggtgtatgttttcagaaatggcttgaagttatgtgtttaaatctgctcattcgtatgctaggttatacatatgattttcaataaatgaactttttaaagac

SEQ ID NO: 180427 - DNA, 1551 bp, Homo sapiens
  Payload ID: 15538
  Gene Symbol: SDCCAG8
  Gene Name: serologically defined colon cancer antigen 8
  ENST ID: ENST00000435549
  CDS Start-End: 1-1245
cttctggatgcatccgagaagctaaaacttacttatgaggaaaagtgtgaaattgaggaatcccaattgaagtttttgaggaacgacttagctgaatatcagagaacttgtgaagatcttaaagagcaactaaagcataaagaatttcttctggctgctaatacttgtaaccgtgttggtggtctttgtttgaaatgtgctcagcatgaagctgttctttcccaaacccatactaatgttcatatgcagaccatcgaaagactggttaaagaaagagatgacttgatgtctgcactagtttccgtaaggagcagcttggcagatacgcagcaaagagaagcaagtgcttatgaacaggtgaaacaagttttgcaaatatctgaggaagccaattttgaaaaaaccaaggctttaatccagtgtgaccagttgaggaaggagctggagaggcaggcggagcgacttgaaaaagaacttgcatctcagcaagagaaaagggccattgagaaagacatgatgaaaaaggaaataacgaaagaaagggagtacatgggatcaaagatgttgatcttgtctcagaatattgcccaactggaggcccaggtggaaaaggttacaaaggaaaagatttcagctattaatcaactggaggaaattcaaagccagctggcttctcgggaaatggatgtcacaaaggtgtgtggagaaatgcgctatcagctgaataaaaccaacatggagaaggatgaggcagaaaaggagcacagagagttcagagcaaaaactaacagggatcttgaaattaaagatcaggaaatagagaaattgagaatagaactggatgaaagcaaacaacacttggaacaggagcagcagaaggcagccctggccagagaggagtgcctgagactaacagaactgctgggcgaatctgagcaccaactgcacctcaccagatctgaaatagctcaactcagtcaagaaaaaaggtatacatatgataaattgggaaagttacagagaagaaatgaagaattggaggaacagtgtgtccagcatgggagagtacatgagacgatgaagcaaaggctaaggcagctggataagcacagccaggccacagcccagcagctggtgcagctcctcagcaagcagaaccagcttctcctggagaggcagagcctgtcggaagaggtggaccggctgcggacccagttacccagcatgccacaatctgattgctgacctggatggaacagagtgaaataaatgatttacaaagagatatttacattcatctggtttagacttaatatgccacaacgcaccacgaccttcccagggtgacaccgcctcagcctgcagtggggctggtcctcatcaacgcgggcgctgtccccgcacgcagtcgggctggagctggagtctgactctagctgagcagagctcctggtgtatgttttcagaaatggcttgaagttatgtgtttaaatctgctcattcgtatgctaggttatacatatgattttcaataaatgaactttttaaaga

SEQ ID NO: 180428 - DNA, 1871 bp, Homo sapiens
  Payload ID: 15538
  Gene Symbol: SDCCAG8
  Gene Name: serologically defined colon cancer antigen 8
  ENST ID: ENST00000476722
  CDS Start-End: 1-467
gacaagaggagacactgagggaacaaacacttctggatgcatccggaaacatgcacaattcttggattacaacaggtgaagattctggggtgggcgaaacctccaaaagaccattttcccatgacaatgcagattttggcaaagctgcatctgctggtgagcagctagaactgaactttttgatcatctcaaacaaaaagtctggacgtattaaacaatatctccattcccctccctgccaacccctgatgacctctcttcaactttcggagaagctaaaacttacttatgaggaaaagtgtgaaattgaggaatcccaattgaagtttttgagaaataagaatcacggccgggcgcggtggctcacgcctgtaatcccagcactttgggaggctgaagcgggcgaatcacgaggtcaagagattgagaccatcctggccaacatggtgaaaccccgtttctactaaaaatacaaaaattagctgggcctggtagcacgtgcctgtagtcccagctacttgggaggctgaggcaggagaatcacttgaacctgggaggcggaggttgcagtaagctgagaccacgccactgcactccaacctggcaacagagtgagactccatttcaaaaaagaaaaaaaaaaaaaagaaataagaatcactaactgctcttatagaaattatgatattcaagtaaaataatgaaaataaagcactttagttttcaaattattagtattttttctctgtagatagtcttcatctaattttaaaattgcaatgataatataatagtttgagtatttgtatacatgatgaatttgagtatatatgatgaatattcatgtactttttatagaatctatttattagagatcccagtaagacctatatattatagattaaccattagtgatttatgtataatgagtagaaaaagacagcaggaattaatatttttgttgttaaagattatttttaaatagtagtaatgaagtaattttaaatcaaataaactttgaaatattgtttataattttattttaataagtccaatttgaaattttaaaatcttccaggccatagcctatctagagacataactagagtaatactaagagccagaactcagctgattgtggtggcttacgcatgtaatcccaacactttgggaagccaaggcgggtggatcatttgaggtcaagagttcgagactagcctggccaatatggtaaaaccctgtctctactaaaaatataaaaattagctgggtgtggtggcacacatctgtagtcccagctactcaggaggctgaggcagaatcacttgaacccaggagatagaggttgcagtgagccaagatcatgccactgcactccagcctgggtgacagagggagactccatctaaaaaaaaaaaaaaaaaaaaaaaccgagctggaactcatagctttcactgtacatggttgtttattttttaaatgttcttatgtttttcatagattaccctgattagttttaggatttctcttagagatttttacttttttacaaagaaatgttaacatttaaaaaatactctaatttttgctttcttgttttttgtcctattttattttattttgattttatttacgacttgattctttagtttttaaagtgatgtatttctagatcattgtacttaagggaatgtgacttattttgtctcattcagaatccagatatttcatctttaattacattaaaataccaacttgtaatgaattagactttgttctctgaatccttctgtttcttcattttcttttactataatttaagattatttaaagaggcattttcataaataaataaaatcagtcttcttttc

SEQ ID NO: 180429 - DNA, 2415 bp, Homo sapiens
  Payload ID: 15538
  Gene Symbol: SDCCAG8
  Gene Name: serologically defined colon cancer antigen 8
  Uniprot ID: Q86SQ7
  ENST ID: ENST00000622598
  CDS Start-End: 119-2260
gtgacagccgcggcaggaagcaggcgggcgctccccggccacaggcctgttgttctcggaagggagaaagctggacatttccccacgtaactcccagctctgggcctagagtgcgtgcatggcgaagtccccggagaactctaccctggaggagattctggggcagtatcaacggagtctccgggaacatgccagcagaagcattcaccaactgacatgtgccctgaaagaaggcgatgtcactattggagaagatgcaccaaatctttcttttagcaccagtgtgggaaatgaggacgccaggacagcctggcccgaattacaacagagccatgctgttaatcagctcaaagatttgttgcgccaacaagcagataaggaaagtgaagtatctccgtcaagaagaagaaaaatgtcccccttgaggtcattagaacatgaggaaaccaatatgcctactatgcacgaccttgttcatactattaatgaccagtctcaatatattcatcatttagaggcagaagttaagttctgcaaggaggaactctctggaatgaaaaataaaatacaagtagttgtgcttgaaaacgaagggctccagcaacagctaaaatctcaaagacaagaggagacactgagggaacaaacacttctggatgcatccggaaacatgcacaattcttggattacaacaggtgaagattctggggtgggcgaaacctccaaaagaccattttcccatgacaatgcagattttggcaaagctgcatctgctggtgagcagctagaactggagaagctaaaacttacttatgaggaaaagtgtgaaattgaggaatcccaattgaagtttttgaggaacgacttagctgaatatcagagaacttgtgaagatcttaaagagcaactaaagcataaagaatttcttctggctgctaatacttgtaaccgtgttggtggtctttgtttgaaatgtgctcagcatgaagctgttctttcccaaacccatactaatgttcatatgcagaccatcgaaagactggttaaagaaagagatgacttgatgtctgcactagtttccgtaaggagcagcttggcagatacgcagcaaagagaagcaagtgcttatgaacaggtgaaacaagttttgcaaatatctgaggaagccaattttgaaaaaaccaaggctttaatccagtgtgaccagttgaggaaggagctggagaggcaggcggagcgacttgaaaaagaacttgcatctcagcaagagaaaagggccattgagaaagacatgatgaaaaaggaaataacgaaagaaagggagtacatgggatcaaagatgttgatcttgtctcagaatattgcccaactggaggcccaggtggaaaaggttacaaaggaaaagatttcagctattaatcaactggaggaaattcaaagccagctggcttctcgggaaatggatgtcacaaaggtgtgtggagaaatgcgctatcagctgaataaaaccaacatggagaaggatgaggcagaaaaggagcacagagagttcagagcaaaaactaacagggatcttgaaattaaagatcaggaaatagagaaattgagaatagaactggatgaaagcaaacaacacttggaacaggagcagcagaaggcagccctggccagagaggagtgcctgagactaacagaactgctgggcgaatctgagcaccaactgcacctcaccagacaggaaaaagatagcattcagcagagctttagcaaggaagcaaaggcccaagcccttcaggcccagcaaagagagcaggagctgacacagaagatacagcaaatggaggcccagcatgacaaaactgaaaatgaacagtatttgttgctgacctcccagaatacatttttgacaaagttaaaggaagaatgctgtacattagccaagaaactggaacaaatctctcaaaaaaccagatctgaaatagctcaactcagtcaagaaaaaaggtatacatatgataaattgggaaagttacagagaagaaatgaagaattggaggaacagtgtgtccagcatgggagagtacatgagacgatgaagcaaaggctaaggcagctggataagcacagccaggccacagcccagcagctggtgcagctcctcagcaagcagaaccagcttctcctggagaggcagagcctgtcggaagaggtggaccggctgcggacccagttacccagcatgccacaatctgattgctgacctggatggaacagagtgaaataaatgatttacaaagagatatttacattcatctggtttagacttaatatgccacaacgcaccacgaccttcccagggtgacaccgcctcagcctgcagtggggctggtcctcatcaacgcgggcgctgtcccc

SEQ ID NO: 180430 - DNA, 2035 bp, Homo sapiens
  Payload ID: 15538
  Gene Symbol: SDCCAG8
  Gene Name: serologically defined colon cancer antigen 8
  ENST ID: ENST00000630785
  CDS Start-End: 153-1730
gttgttctcggaagggagaaagctggacatttccccacgtaactcccagctctgggcctagagtgcgtgcatggcgaagtccccggagaactctaccctggaggagattctggggcagtatcaacggagtctccggggaggaactctctggaatgaaaaataaaatacaagtagttgtgcttgaaaacgaagggctccagcaacagctaaaatctcaaagacaagaggagacactgagggaacaaacacttctggatgcatccgagaagctaaaacttacttatgaggaaaagtgtgaaattgaggaatcccaattgaagtttttgaggaacgacttagctgaatatcagagaacttgtgaagatcttaaagagcaactaaagcataaagaatttcttctggctgctaatacttgtaaccgtgttggtggtctttgtttgaaatgtgctcagcatgaagctgttctttcccaaacccatactaatgttcatatgcagaccatcgaaagactggttaaagaaagagatgacttgatgtctgcactagtttccgtaaggagcagcttggcagatacgcagcaaagagaagcaagtgcttatgaacaggtgaaacaagttttgcaaatatctgaggaagccaattttgaaaaaaccaaggctttaatccagtgtgaccagttgaggaaggagctggagaggcaggcggagcgacttgaaaaagaacttgcatctcagcaagagaaaagggccattgagaaagacatgatgaaaaaggaaataacgaaagaaagggagtacatgggatcaaagatgttgatcttgtctcagaatattgcccaactggaggcccaggtggaaaaggttacaaaggaaaagatttcagctattaatcaactggaggaaattcaaagccagctggcttctcgggaaatggatgtcacaaaggtgtgtggagaaatgcgctatcagctgaataaaaccaacatggagaaggatgaggcagaaaaggagcacagagagttcagagcaaaaactaacagggatcttgaaattaaagatcaggaaatagagaaattgagaatagaactggatgaaagcaaacaacacttggaacaggagcagcagaaggcagccctggccagagaggagtgcctgagactaacagaactgctgggcgaatctgagcaccaactgcacctcaccagacaggaaaaagatagcattcagcagagctttagcaaggaagcaaaggcccaagcccttcaggcccagcaaagagagcaggagctgacacagaagatacagcaaatggaggcccagcatgacaaaactgaaaatgaacagtatttgttgctgacctcccagaatacatttttgacaaagttaaaggaagaatgctgtacattagccaagaaactggaacaaatctctcaaaaaaccagatctgaaatagctcaactcagtcaagaaaaaaggtatacatatgataaattgggaaagttacagagaagaaatgaagaattggaggaacagtgtgtccagcatgggagagtacatgagacgatgaagcaaaggctaaggcagctggataagcacagccaggccacagcccagcagctggtgcagctcctcagcaagcagaaccagcttctcctggagaggcagagcctgtcggaagaggtggaccggctgcggacccagttacccagcatgccacaatctgattgctgacctggatggaacagagtgaaataaatgatttacaaagagatatttacattcatctggtttagacttaatatgccacaacgcaccacgaccttcccagggtgacaccgcctcagcctgcagtggggctggtcctcatcaacgcgggcgctgtccccgcacgcagtcgggctggagctggagtctgactctagctgagcagagctcctggtgtatgttttcagaaatggcttgaagttatgtgtttaaatctgctcattcgtatgctaggttatacatatgattttcaataaatgaactttttaaag

SEQ ID NO: 180431 - DNA, 1536 bp, Homo sapiens
  Payload ID: 15538
  Gene Symbol: SDCCAG8
  Gene Name: serologically defined colon cancer antigen 8
  ENST ID: ENST00000630755
  CDS Start-End: 1-1230
gagaagctaaaacttacttatgaggaaaagtgtgaaattgaggaatcccaattgaagtttttgaggaacgacttagctgaatatcagagaacttgtgaagatcttaaagagcaactaaagcataaagaatttcttctggctgctaatacttgtaaccgtgttggtggtctttgtttgaaatgtgctcagcatgaagctgttctttcccaaacccatactaatgttcatatgcagaccatcgaaagactggttaaagaaagagatgacttgatgtctgcactagtttccgtaaggagcagcttggcagatacgcagcaaagagaagcaagtgcttatgaacaggtgaaacaagttttgcaaatatctgaggaagccaattttgaaaaaaccaaggctttaatccagtgtgaccagttgaggaaggagctggagaggcaggcggagcgacttgaaaaagaacttgcatctcagcaagagaaaagggccattgagaaagacatgatgaaaaaggaaataacgaaagaaagggagtacatgggatcaaagatgttgatcttgtctcagaatattgcccaactggaggcccaggtggaaaaggttacaaaggaaaagatttcagctattaatcaactggaggaaattcaaagccagctggcttctcgggaaatggatgtcacaaaggtgtgtggagaaatgcgctatcagctgaataaaaccaacatggagaaggatgaggcagaaaaggagcacagagagttcagagcaaaaactaacagggatcttgaaattaaagatcaggaaatagagaaattgagaatagaactggatgaaagcaaacaacacttggaacaggagcagcagaaggcagccctggccagagaggagtgcctgagactaacagaactgctgggcgaatctgagcaccaactgcacctcaccagatctgaaatagctcaactcagtcaagaaaaaaggtatacatatgataaattgggaaagttacagagaagaaatgaagaattggaggaacagtgtgtccagcatgggagagtacatgagacgatgaagcaaaggctaaggcagctggataagcacagccaggccacagcccagcagctggtgcagctcctcagcaagcagaaccagcttctcctggagaggcagagcctgtcggaagaggtggaccggctgcggacccagttacccagcatgccacaatctgattgctgacctggatggaacagagtgaaataaatgatttacaaagagatatttacattcatctggtttagacttaatatgccacaacgcaccacgaccttcccagggtgacaccgcctcagcctgcagtggggctggtcctcatcaacgcgggcgctgtccccgcacgcagtcgggctggagctggagtctgactctagctgagcagagctcctggtgtatgttttcagaaatggcttgaagttatgtgtttaaatctgctcattcgtatgctaggttatacatatgattttcaataaatgaactttttaaaga

SEQ ID NO: 180432 - DNA, 2198 bp, Homo sapiens
  Payload ID: 15538
  Gene Symbol: SDCCAG8
  Gene Name: serologically defined colon cancer antigen 8
  ENST ID: ENST00000627744
  CDS Start-End: 187-1893
aggaagcaggcgggcgctccccggccacaggcctgttgttctcggaagggagaaagctggacatttccccacgtaactcccagctctgggcctagagtgcgtgcatggcgaagtccccggagaactctaccctggaggagattctggggcagtatcaacggagtctccggggaggaactctctggaatgaaaaataaaatacaagtagttgtgcttgaaaacgaagggctccagcaacagctaaaatctcaaagacaagaggagacactgagggaacaaacacttctggatgcatccggaaacatgcacaattcttggattacaacaggtgaagattctggggtgggcgaaacctccaaaagaccattttcccatgacaatgcagattttggcaaagctgcatctgctggtgagcagctagaactggagaagctaaaacttacttatgaggaaaagtgtgaaattgaggaatcccaattgaagtttttgaggaacgacttagctgaatatcagagaacttgtgaagatcttaaagagcaactaaagcataaagaatttcttctggctgctaatacttgtaaccgtgttggtggtctttgtttgaaatgtgctcagcatgaagctgttctttcccaaacccatactaatgttcatatgcagaccatcgaaagactggttaaagaaagagatgacttgatgtctgcactagtttccgtaaggagcagcttggcagatacgcagcaaagagaagcaagtgcttatgaacaggtgaaacaagttttgcaaatatctgaggaagccaattttgaaaaaaccaaggctttaatccagtgtgaccagttgaggaaggagctggagaggcaggcggagcgacttgaaaaagaacttgcatctcagcaagagaaaagggccattgagaaagacatgatgaaaaaggaaataacgaaagaaagggagtacatgggatcaaagatgttgatcttgtctcagaatattgcccaactggaggcccaggtggaaaaggttacaaaggaaaagatttcagctattaatcaactggaggaaattcaaagccagctggcttctcgggaaatggatgtcacaaaggtgtgtggagaaatgcgctatcagctgaataaaaccaacatggagaaggatgaggcagaaaaggagcacagagagttcagagcaaaaactaacagggatcttgaaattaaagatcaggaaatagagaaattgagaatagaactggatgaaagcaaacaacacttggaacaggagcagcagaaggcagccctggccagagaggagtgcctgagactaacagaactgctgggcgaatctgagcaccaactgcacctcaccagacaggaaaaagatagcattcagcagagctttagcaaggaagcaaaggcccaagcccttcaggcccagcaaagagagcaggagctgacacagaagatacagcaaatggaggcccagcatgacaaaactgaaaatgaacagtatttgttgctgacctcccagaatacatttttgacaaagttaaaggaagaatgctgtacattagccaagaaactggaacaaatctctcaaaaaaccagatctgaaatagctcaactcagtcaagaaaaaaggtatacatatgataaattgggaaagttacagagaagaaatgaagaattggaggaacagtgtgtccagcatgggagagtacatgagacgatgaagcaaaggctaaggcagctggataagcacagccaggccacagcccagcagctggtgcagctcctcagcaagcagaaccagcttctcctggagaggcagagcctgtcggaagaggtggaccggctgcggacccagttacccagcatgccacaatctgattgctgacctggatggaacagagtgaaataaatgatttacaaagagatatttacattcatctggtttagacttaatatgccacaacgcaccacgaccttcccagggtgacaccgcctcagcctgcagtggggctggtcctcatcaacgcgggcgctgtccccgcacgcagtcgggctggagctggagtctgactctagctgagcagagctcctggtgtatgttttcagaaatggcttgaagttatgtgtttaaatctgctcattcgtatgctaggttatacatatgattttcaataaatgaactttttaaag

SEQ ID NO: 180433 - DNA, 3236 bp, Homo sapiens
  Payload ID: 15539
  Gene Symbol: SERPINA1
  Gene Name: serpin peptidase inhibitor, clade A (alpha-1 antiproteinase, antitrypsin), member 1
  Uniprot ID: P01009
  ENST ID: ENST00000355814
  CDS Start-End: 278-1534
tgggcaggaactgggcactgtgcccagggcatgcactgcctccacgcagcaaccctcagagtcctgagctgaaccaagaaggaggagggggtcgggcctccgaggaaggcctagccgctgctgctgccaggaattccaggttggaggggcggcaacctcctgccagccttcaggccactctcctgtgcctgccagaagagacagagcttgaggagagcttgaggagagcaggaaaggtgggacattgctgctgctgctcactcagttccacaggacaatgccgtcttctgtctcgtggggcatcctcctgctggcaggcctgtgctgcctggtccctgtctccctggctgaggatccccagggagatgctgcccagaagacagatacatcccaccatgatcaggatcacccaaccttcaacaagatcacccccaacctggctgagttcgccttcagcctataccgccagctggcacaccagtccaacagcaccaatatcttcttctccccagtgagcatcgctacagcctttgcaatgctctccctggggaccaaggctgacactcacgatgaaatcctggagggcctgaatttcaacctcacggagattccggaggctcagatccatgaaggcttccaggaactcctccgtaccctcaaccagccagacagccagctccagctgaccaccggcaatggcctgttcctcagcgagggcctgaagctagtggataagtttttggaggatgttaaaaagttgtaccactcagaagccttcactgtcaacttcggggacaccgaagaggccaagaaacagatcaacgattacgtggagaagggtactcaagggaaaattgtggatttggtcaaggagcttgacagagacacagtttttgctctggtgaattacatcttctttaaaggcaaatgggagagaccctttgaagtcaaggacaccgaggaagaggacttccacgtggaccaggtgaccaccgtgaaggtgcctatgatgaagcgtttaggcatgtttaacatccagcactgtaagaagctgtccagctgggtgctgctgatgaaatacctgggcaatgccaccgccatcttcttcctgcctgatgaggggaaactacagcacctggaaaatgaactcacccacgatatcatcaccaagttcctggaaaatgaagacagaaggtctgccagcttacatttacccaaactgtccattactggaacctatgatctgaagagcgtcctgggtcaactgggcatcactaaggtcttcagcaatggggctgacctctccggggtcacagaggaggcacccctgaagctctccaaggccgtgcataaggctgtgctgaccatcgacgagaaagggactgaagctgctggggccatgtttttagaggccatacccatgtctatcccccccgaggtcaagttcaacaaaccctttgtcttcttaatgattgaacaaaataccaagtctcccctcttcatgggaaaagtggtgaatcccacccaaaaataactgcctctcgctcctcaacccctcccctccatccctggccccctccctggatgacattaaagaagggttgagctggtccctgcctgcatgtgactgtaaatccctcccatgttttctctgagtctccctttgcctgctgaggctgtatgtgggctccaggtaacagtgctgtcttcgggccccctgaactgtgttcatggagcatctggctgggtaggcacatgctgggcttgaatccaggggggactgaatcctcagcttacggacctgggcccatctgtttctggagggctccagtcttccttgtcctgtcttggagtccccaagaaggaatcacaggggaggaaccagataccagccatgaccccaggctccaccaagcatcttcatgtccccctgctcatcccccactcccccccacccagagttgctcatcctgccagggctggctgtgcccaccccaaggctgccctcctgggggccccagaactgcctgatcgtgccgtggcccagttttgtggcatctgcagcaacacaagagagaggacaatgtcctcctcttgacccgctgtcacctaaccagactcgggccctgcacctctcaggcacttctggaaaatgactgaggcagattcttcctgaagcccattctccatggggcaacaaggacacctattctgtccttgtccttccatcgctgccccagaaagcctcacatatctccgtttagaatcaggtcccttctccccagatgaagaggagggtctctgctttgttttctctatctcctcctcagacttgaccaggcccagcaggccccagaagaccattaccctatatcccttctcctccctagtcacatggccataggcctgctgatggctcaggaaggccattgcaaggactcctcagctatgggagaggaagcacatcacccattgacccccgcaacccctccctttcctcctctgagtcccgactggggccacatgcagcctgacttctttgtgcctgttgctgtccctgcagtcttcagagggccaccgcagctccagtgccacggcaggaggctgttcctgaatagcccctgtggtaagggccaggagagtccttccatcctccaaggccctgctaaaggacacagcagccaggaagtcccctgggcccctagctgaaggacagcctgctccctccgtctctaccaggaatggccttgtcctatggaaggcactgccccatcccaaactaatctaggaatcactgtctaaccactcactgtcatgaatgtgtacttaaaggatgaggttgagtcataccaaatagtgatttcgatagttcaaaatggtgaaattagcaattctacatgattcagtctaatcaatggataccgactgtttcccacacaagtctcctgttctcttaagcttactcactgacagcctttcactctccacaaatacattaaagatatggccatcaccaagccccctaggatgacaccagacctgagagtctgaagacctggatccaagttctgacttttccccctgacagctgtgtgaccttcgtgaagtcgccaaacctctctgagccccagtcattgctagtaagacctgcctttgagttggtatgatgttcaagttagataacaaaatgtttatacccattagaacagagaataaatagaactacatttcttgca

SEQ ID NO: 180434 - DNA, 1622 bp, Homo sapiens
  Payload ID: 15539
  Gene Symbol: SERPINA1
  Gene Name: serpin peptidase inhibitor, clade A (alpha-1 antiproteinase, antitrypsin), member 1
  Uniprot ID: P01009
  ENST ID: ENST00000393087
  CDS Start-End: 266-1522
aggtacaatgactcctttcggtaagtgcagtggaagctgtacactgcccaggcaaagcgtccgggcagcgtaggcgggcgactcagatcccagccagtggacttagcccctgtttgctcctccgataactggggtgaccttggttaatattcaccagcagcctcccccgttgcccctctggatccactgcttaaatacggacgaggacagggccctgtctcctcagcttcaggcaccaccactgacctgggacagtgaatcgacaatgccgtcttctgtctcgtggggcatcctcctgctggcaggcctgtgctgcctggtccctgtctccctggctgaggatccccagggagatgctgcccagaagacagatacatcccaccatgatcaggatcacccaaccttcaacaagatcacccccaacctggctgagttcgccttcagcctataccgccagctggcacaccagtccaacagcaccaatatcttcttctccccagtgagcatcgctacagcctttgcaatgctctccctggggaccaaggctgacactcacgatgaaatcctggagggcctgaatttcaacctcacggagattccggaggctcagatccatgaaggcttccaggaactcctccgtaccctcaaccagccagacagccagctccagctgaccaccggcaatggcctgttcctcagcgagggcctgaagctagtggataagtttttggaggatgttaaaaagttgtaccactcagaagccttcactgtcaacttcggggacaccgaagaggccaagaaacagatcaacgattacgtggagaagggtactcaagggaaaattgtggatttggtcaaggagcttgacagagacacagtttttgctctggtgaattacatcttctttaaaggcaaatgggagagaccctttgaagtcaaggacaccgaggaagaggacttccacgtggaccaggtgaccaccgtgaaggtgcctatgatgaagcgtttaggcatgtttaacatccagcactgtaagaagctgtccagctgggtgctgctgatgaaatacctgggcaatgccaccgccatcttcttcctgcctgatgaggggaaactacagcacctggaaaatgaactcacccacgatatcatcaccaagttcctggaaaatgaagacagaaggtctgccagcttacatttacccaaactgtccattactggaacctatgatctgaagagcgtcctgggtcaactgggcatcactaaggtcttcagcaatggggctgacctctccggggtcacagaggaggcacccctgaagctctccaaggccgtgcataaggctgtgctgaccatcgacgagaaagggactgaagctgctggggccatgtttttagaggccatacccatgtctatcccccccgaggtcaagttcaacaaaccctttgtcttcttaatgattgaacaaaataccaagtctcccctcttcatgggaaaagtggtgaatcccacccaaaaataactgcctctcgctcctcaacccctcccctccatccctggccccctccctggatgacattaaagaagggttgagctggtccctgcctgcatgtgactgtaaa

SEQ ID NO: 180435 - DNA, 1885 bp, Homo sapiens
  Payload ID: 15539
  Gene Symbol: SERPINA1
  Gene Name: serpin peptidase inhibitor, clade A (alpha-1 antiproteinase, antitrypsin), member 1
  Uniprot ID: P01009
  ENST ID: ENST00000393088
  CDS Start-End: 556-1812
gtgggcaggaactgggcactgtgcccagggcatgcactgcctccacgcagcaaccctcagagtcctgagctgaaccaagaaggaggagggggtcgggcctccgaggaaggcctagccgctgctgctgccaggaattccaggttggaggggcggcaacctcctgccagccttcaggccactctcctgtgcctgccagaagagacagagcttgaggagagcttgaggagagcaggaaagggcggcagtaagtcttcagcatcaggcattttggggtgactcagtaaatggtagatcttgctaccagtggaacagccactaaggattctgcagtgagagcagagggccagctaagtggtactctcccagagactgtctgactcacgccaccccctccaccttggacacaggacgctgtggtttctgagccaggtacaatgactcctttcgcagcctcccccgttgcccctctggatccactgcttaaatacggacgaggacagggccctgtctcctcagcttcaggcaccaccactgacctgggacagtgaatcgacaatgccgtcttctgtctcgtggggcatcctcctgctggcaggcctgtgctgcctggtccctgtctccctggctgaggatccccagggagatgctgcccagaagacagatacatcccaccatgatcaggatcacccaaccttcaacaagatcacccccaacctggctgagttcgccttcagcctataccgccagctggcacaccagtccaacagcaccaatatcttcttctccccagtgagcatcgctacagcctttgcaatgctctccctggggaccaaggctgacactcacgatgaaatcctggagggcctgaatttcaacctcacggagattccggaggctcagatccatgaaggcttccaggaactcctccgtaccctcaaccagccagacagccagctccagctgaccaccggcaatggcctgttcctcagcgagggcctgaagctagtggataagtttttggaggatgttaaaaagttgtaccactcagaagccttcactgtcaacttcggggacaccgaagaggccaagaaacagatcaacgattacgtggagaagggtactcaagggaaaattgtggatttggtcaaggagcttgacagagacacagtttttgctctggtgaattacatcttctttaaaggcaaatgggagagaccctttgaagtcaaggacaccgaggaagaggacttccacgtggaccaggtgaccaccgtgaaggtgcctatgatgaagcgtttaggcatgtttaacatccagcactgtaagaagctgtccagctgggtgctgctgatgaaatacctgggcaatgccaccgccatcttcttcctgcctgatgaggggaaactacagcacctggaaaatgaactcacccacgatatcatcaccaagttcctggaaaatgaagacagaaggtctgccagcttacatttacccaaactgtccattactggaacctatgatctgaagagcgtcctgggtcaactgggcatcactaaggtcttcagcaatggggctgacctctccggggtcacagaggaggcacccctgaagctctccaaggccgtgcataaggctgtgctgaccatcgacgagaaagggactgaagctgctggggccatgtttttagaggccatacccatgtctatcccccccgaggtcaagttcaacaaaccctttgtcttcttaatgattgaacaaaataccaagtctcccctcttcatgggaaaagtggtgaatcccacccaaaaataactgcctctcgctcctcaacccctcccctccatccctggccccctccctggatgacattaaagaagggttgagc

SEQ ID NO: 180436 - DNA, 1628 bp, Homo sapiens
  Payload ID: 15539
  Gene Symbol: SERPINA1
  Gene Name: serpin peptidase inhibitor, clade A (alpha-1 antiproteinase, antitrypsin), member 1
  Uniprot ID: P01009
  ENST ID: ENST00000404814
  CDS Start-End: 312-1568
atgcactgcctccacgcagcaaccctcagagtcctgagctgaaccaagaaggaggagggggtcgggcctccgaggaaggcctagccgctgctgctgccaggaattccaggttggaggggcggcaacctcctgccagccttcaggccactctcctgtgcctgccagaagagacagagcttgaggagagcttgaggagagcaggaaagcctcccccgttgcccctctggatccactgcttaaatacggacgaggacagggccctgtctcctcagcttcaggcaccaccactgacctgggacagtgaatcgacaatgccgtcttctgtctcgtggggcatcctcctgctggcaggcctgtgctgcctggtccctgtctccctggctgaggatccccagggagatgctgcccagaagacagatacatcccaccatgatcaggatcacccaaccttcaacaagatcacccccaacctggctgagttcgccttcagcctataccgccagctggcacaccagtccaacagcaccaatatcttcttctccccagtgagcatcgctacagcctttgcaatgctctccctggggaccaaggctgacactcacgatgaaatcctggagggcctgaatttcaacctcacggagattccggaggctcagatccatgaaggcttccaggaactcctccgtaccctcaaccagccagacagccagctccagctgaccaccggcaatggcctgttcctcagcgagggcctgaagctagtggataagtttttggaggatgttaaaaagttgtaccactcagaagccttcactgtcaacttcggggacaccgaagaggccaagaaacagatcaacgattacgtggagaagggtactcaagggaaaattgtggatttggtcaaggagcttgacagagacacagtttttgctctggtgaattacatcttctttaaaggcaaatgggagagaccctttgaagtcaaggacaccgaggaagaggacttccacgtggaccaggtgaccaccgtgaaggtgcctatgatgaagcgtttaggcatgtttaacatccagcactgtaagaagctgtccagctgggtgctgctgatgaaatacctgggcaatgccaccgccatcttcttcctgcctgatgaggggaaactacagcacctggaaaatgaactcacccacgatatcatcaccaagttcctggaaaatgaagacagaaggtctgccagcttacatttacccaaactgtccattactggaacctatgatctgaagagcgtcctgggtcaactgggcatcactaaggtcttcagcaatggggctgacctctccggggtcacagaggaggcacccctgaagctctccaaggccgtgcataaggctgtgctgaccatcgacgagaaagggactgaagctgctggggccatgtttttagaggccatacccatgtctatcccccccgaggtcaagttcaacaaaccctttgtcttcttaatgattgaacaaaataccaagtctcccctcttcatgggaaaagtggtgaatcccacccaaaaataactgcctctcgctcctcaacccctcccctccatccctggccccctccctggatgacattaa

SEQ ID NO: 180437 - DNA, 1450 bp, Homo sapiens
  Payload ID: 15539
  Gene Symbol: SERPINA1
  Gene Name: serpin peptidase inhibitor, clade A (alpha-1 antiproteinase, antitrypsin), member 1
  Uniprot ID: P01009
  ENST ID: ENST00000402629
  CDS Start-End: 35-1114
ggcaccaccactgacctgggacagtgaatcgacaatgccgtcttctgtctcgtggggcatcctcctgctggcaggcctgtgctgcctggtccctgtctccctggctgaggatccccagggagatgctgcccagaagacagatacatcccaccatgatcaggatcacccaaccttcaacaagatcacccccaacctggctgagttcgccttcagcctataccgccagctggcacaccagtccaacagcaccaatatcttcttctccccagtgagcatcgctacagcctttgcaatgctctccctggggaccaaggctgacactcacgatgaaatcctggagggcctgaatttcaacctcacggagattccggaggctcagatccatgaaggcttccaggaactcctccgtaccctcaaccagccagacagccagctccagctgaccaccggcaatggcctgttcctcagcgagggcctgaagctagtggataagtttttggaggatgttaaaaagttgtaccactcagaagccttcactgtcaacttcggggacaccgaagaggccaagaaacagatcaacgattacgtggagaagggtactcaagggaaaattgtggatttggtcaaggagcttgacagagacacagtttttgctctggtgaattacatcttctttaaaggcaaatgggagagaccctttgaagtcaaggacaccgaggaagaggacttccacgtggaccaggtgaccaccgtgaaggtgcctatgatgaagcgtttaggcatgtttaacatccagcactgtaagaagctgtccagctgggtgctgctgatgaaatacctgggcaatgccaccgccatcttcttcctgcctgatgaggggaaactacagcacctggaaaatgaactcacccacgatatcatcaccaagttcctggaaaatgaagacagaaggtctgccagcttacatttacccaaactgtccattactggaacctatgatctgaagagcgtcctgggtcaactgggcatcactaaggtcttcagcaatggggctgacctctccggggtcacagaggaggcacccctgaagctctccaaggtgagatcaccctgacgaccttgttgcaccctggtatctgtagggaagaatgtgtgggggctgcagctctgtcctgaggctgaggaaggggccgagggaaacaaatgaagacccaggctgagctcctgaagatgcccgtgattcactgacacgggacgtggtcaaacagcaaagccaggcaggggactgctgtgcagctggcactttcggggcctcccttgaggttgtgtcactgaccctgaatttcaactttgcccaagaccttctagacattgggccttgatttatccatactgacacagaaaggtttgggctaagttgtttcaaaggaatttctgactccttcgatct

SEQ ID NO: 180438 - DNA, 3144 bp, Homo sapiens
  Payload ID: 15539
  Gene Symbol: SERPINA1
  Gene Name: serpin peptidase inhibitor, clade A (alpha-1 antiproteinase, antitrypsin), member 1
  Uniprot ID: P01009
  ENST ID: ENST00000440909
  CDS Start-End: 186-1442
tcagagtcctgagctgaaccaagaaggaggagggggtcgggcctccgaggaaggcctagccgctgctgctgccaggaattccaggttggaggggcggcaacctcctgccagccttcaggccactctcctgtgcctgccagaagagacagagcttgaggagagcttgaggagagcaggaaaggacaatgccgtcttctgtctcgtggggcatcctcctgctggcaggcctgtgctgcctggtccctgtctccctggctgaggatccccagggagatgctgcccagaagacagatacatcccaccatgatcaggatcacccaaccttcaacaagatcacccccaacctggctgagttcgccttcagcctataccgccagctggcacaccagtccaacagcaccaatatcttcttctccccagtgagcatcgctacagcctttgcaatgctctccctggggaccaaggctgacactcacgatgaaatcctggagggcctgaatttcaacctcacggagattccggaggctcagatccatgaaggcttccaggaactcctccgtaccctcaaccagccagacagccagctccagctgaccaccggcaatggcctgttcctcagcgagggcctgaagctagtggataagtttttggaggatgttaaaaagttgtaccactcagaagccttcactgtcaacttcggggacaccgaagaggccaagaaacagatcaacgattacgtggagaagggtactcaagggaaaattgtggatttggtcaaggagcttgacagagacacagtttttgctctggtgaattacatcttctttaaaggcaaatgggagagaccctttgaagtcaaggacaccgaggaagaggacttccacgtggaccaggtgaccaccgtgaaggtgcctatgatgaagcgtttaggcatgtttaacatccagcactgtaagaagctgtccagctgggtgctgctgatgaaatacctgggcaatgccaccgccatcttcttcctgcctgatgaggggaaactacagcacctggaaaatgaactcacccacgatatcatcaccaagttcctggaaaatgaagacagaaggtctgccagcttacatttacccaaactgtccattactggaacctatgatctgaagagcgtcctgggtcaactgggcatcactaaggtcttcagcaatggggctgacctctccggggtcacagaggaggcacccctgaagctctccaaggccgtgcataaggctgtgctgaccatcgacgagaaagggactgaagctgctggggccatgtttttagaggccatacccatgtctatcccccccgaggtcaagttcaacaaaccctttgtcttcttaatgattgaacaaaataccaagtctcccctcttcatgggaaaagtggtgaatcccacccaaaaataactgcctctcgctcctcaacccctcccctccatccctggccccctccctggatgacattaaagaagggttgagctggtccctgcctgcatgtgactgtaaatccctcccatgttttctctgagtctccctttgcctgctgaggctgtatgtgggctccaggtaacagtgctgtcttcgggccccctgaactgtgttcatggagcatctggctgggtaggcacatgctgggcttgaatccaggggggactgaatcctcagcttacggacctgggcccatctgtttctggagggctccagtcttccttgtcctgtcttggagtccccaagaaggaatcacaggggaggaaccagataccagccatgaccccaggctccaccaagcatcttcatgtccccctgctcatcccccactcccccccacccagagttgctcatcctgccagggctggctgtgcccaccccaaggctgccctcctgggggccccagaactgcctgatcgtgccgtggcccagttttgtggcatctgcagcaacacaagagagaggacaatgtcctcctcttgacccgctgtcacctaaccagactcgggccctgcacctctcaggcacttctggaaaatgactgaggcagattcttcctgaagcccattctccatggggcaacaaggacacctattctgtccttgtccttccatcgctgccccagaaagcctcacatatctccgtttagaatcaggtcccttctccccagatgaagaggagggtctctgctttgttttctctatctcctcctcagacttgaccaggcccagcaggccccagaagaccattaccctatatcccttctcctccctagtcacatggccataggcctgctgatggctcaggaaggccattgcaaggactcctcagctatgggagaggaagcacatcacccattgacccccgcaacccctccctttcctcctctgagtcccgactggggccacatgcagcctgacttctttgtgcctgttgctgtccctgcagtcttcagagggccaccgcagctccagtgccacggcaggaggctgttcctgaatagcccctgtggtaagggccaggagagtccttccatcctccaaggccctgctaaaggacacagcagccaggaagtcccctgggcccctagctgaaggacagcctgctccctccgtctctaccaggaatggccttgtcctatggaaggcactgccccatcccaaactaatctaggaatcactgtctaaccactcactgtcatgaatgtgtacttaaaggatgaggttgagtcataccaaatagtgatttcgatagttcaaaatggtgaaattagcaattctacatgattcagtctaatcaatggataccgactgtttcccacacaagtctcctgttctcttaagcttactcactgacagcctttcactctccacaaatacattaaagatatggccatcaccaagccccctaggatgacaccagacctgagagtctgaagacctggatccaagttctgacttttccccctgacagctgtgtgaccttcgtgaagtcgccaaacctctctgagccccagtcattgctagtaagacctgcctttgagttggtatgatgttcaagttagataacaaaatgtttatacccattagaacagagaataaatagaactacatttcttgca

SEQ ID NO: 180439 - DNA, 3340 bp, Homo sapiens
  Payload ID: 15539
  Gene Symbol: SERPINA1
  Gene Name: serpin peptidase inhibitor, clade A (alpha-1 antiproteinase, antitrypsin), member 1
  Uniprot ID: P01009
  ENST ID: ENST00000437397
  CDS Start-End: 382-1638
tgggcaggaactgggcactgtgcccagggcatgcactgcctccacgcagcaaccctcagagtcctgagctgaaccaagaaggaggagggggtcgggcctccgaggaaggcctagccgctgctgctgccaggaattccaggttggaggggcggcaacctcctgccagccttcaggccactctcctgtgcctgccagaagagacagagcttgaggagagcttgaggagagcaggaaaggtgggacattgctgctgctgctcactcagttccacagcagcctcccccgttgcccctctggatccactgcttaaatacggacgaggacagggccctgtctcctcagcttcaggcaccaccactgacctgggacagtgaatcgacaatgccgtcttctgtctcgtggggcatcctcctgctggcaggcctgtgctgcctggtccctgtctccctggctgaggatccccagggagatgctgcccagaagacagatacatcccaccatgatcaggatcacccaaccttcaacaagatcacccccaacctggctgagttcgccttcagcctataccgccagctggcacaccagtccaacagcaccaatatcttcttctccccagtgagcatcgctacagcctttgcaatgctctccctggggaccaaggctgacactcacgatgaaatcctggagggcctgaatttcaacctcacggagattccggaggctcagatccatgaaggcttccaggaactcctccgtaccctcaaccagccagacagccagctccagctgaccaccggcaatggcctgttcctcagcgagggcctgaagctagtggataagtttttggaggatgttaaaaagttgtaccactcagaagccttcactgtcaacttcggggacaccgaagaggccaagaaacagatcaacgattacgtggagaagggtactcaagggaaaattgtggatttggtcaaggagcttgacagagacacagtttttgctctggtgaattacatcttctttaaaggcaaatgggagagaccctttgaagtcaaggacaccgaggaagaggacttccacgtggaccaggtgaccaccgtgaaggtgcctatgatgaagcgtttaggcatgtttaacatccagcactgtaagaagctgtccagctgggtgctgctgatgaaatacctgggcaatgccaccgccatcttcttcctgcctgatgaggggaaactacagcacctggaaaatgaactcacccacgatatcatcaccaagttcctggaaaatgaagacagaaggtctgccagcttacatttacccaaactgtccattactggaacctatgatctgaagagcgtcctgggtcaactgggcatcactaaggtcttcagcaatggggctgacctctccggggtcacagaggaggcacccctgaagctctccaaggccgtgcataaggctgtgctgaccatcgacgagaaagggactgaagctgctggggccatgtttttagaggccatacccatgtctatcccccccgaggtcaagttcaacaaaccctttgtcttcttaatgattgaacaaaataccaagtctcccctcttcatgggaaaagtggtgaatcccacccaaaaataactgcctctcgctcctcaacccctcccctccatccctggccccctccctggatgacattaaagaagggttgagctggtccctgcctgcatgtgactgtaaatccctcccatgttttctctgagtctccctttgcctgctgaggctgtatgtgggctccaggtaacagtgctgtcttcgggccccctgaactgtgttcatggagcatctggctgggtaggcacatgctgggcttgaatccaggggggactgaatcctcagcttacggacctgggcccatctgtttctggagggctccagtcttccttgtcctgtcttggagtccccaagaaggaatcacaggggaggaaccagataccagccatgaccccaggctccaccaagcatcttcatgtccccctgctcatcccccactcccccccacccagagttgctcatcctgccagggctggctgtgcccaccccaaggctgccctcctgggggccccagaactgcctgatcgtgccgtggcccagttttgtggcatctgcagcaacacaagagagaggacaatgtcctcctcttgacccgctgtcacctaaccagactcgggccctgcacctctcaggcacttctggaaaatgactgaggcagattcttcctgaagcccattctccatggggcaacaaggacacctattctgtccttgtccttccatcgctgccccagaaagcctcacatatctccgtttagaatcaggtcccttctccccagatgaagaggagggtctctgctttgttttctctatctcctcctcagacttgaccaggcccagcaggccccagaagaccattaccctatatcccttctcctccctagtcacatggccataggcctgctgatggctcaggaaggccattgcaaggactcctcagctatgggagaggaagcacatcacccattgacccccgcaacccctccctttcctcctctgagtcccgactggggccacatgcagcctgacttctttgtgcctgttgctgtccctgcagtcttcagagggccaccgcagctccagtgccacggcaggaggctgttcctgaatagcccctgtggtaagggccaggagagtccttccatcctccaaggccctgctaaaggacacagcagccaggaagtcccctgggcccctagctgaaggacagcctgctccctccgtctctaccaggaatggccttgtcctatggaaggcactgccccatcccaaactaatctaggaatcactgtctaaccactcactgtcatgaatgtgtacttaaaggatgaggttgagtcataccaaatagtgatttcgatagttcaaaatggtgaaattagcaattctacatgattcagtctaatcaatggataccgactgtttcccacacaagtctcctgttctcttaagcttactcactgacagcctttcactctccacaaatacattaaagatatggccatcaccaagccccctaggatgacaccagacctgagagtctgaagacctggatccaagttctgacttttccccctgacagctgtgtgaccttcgtgaagtcgccaaacctctctgagccccagtcattgctagtaagacctgcctttgagttggtatgatgttcaagttagataacaaaatgtttatacccattagaacagagaataaatagaactacatttcttgca

SEQ ID NO: 180440 - DNA, 3532 bp, Homo sapiens
  Payload ID: 15539
  Gene Symbol: SERPINA1
  Gene Name: serpin peptidase inhibitor, clade A (alpha-1 antiproteinase, antitrypsin), member 1
  Uniprot ID: P01009
  ENST ID: ENST00000448921
  CDS Start-End: 574-1830
tgggcaggaactgggcactgtgcccagggcatgcactgcctccacgcagcaaccctcagagtcctgagctgaaccaagaaggaggagggggtcgggcctccgaggaaggcctagccgctgctgctgccaggaattccaggttggaggggcggcaacctcctgccagccttcaggccactctcctgtgcctgccagaagagacagagcttgaggagagcttgaggagagcaggaaaggtgggacattgctgctgctgctcactcagttccacagggcggcagtaagtcttcagcatcaggcattttggggtgactcagtaaatggtagatcttgctaccagtggaacagccactaaggattctgcagtgagagcagagggccagctaagtggtactctcccagagactgtctgactcacgccaccccctccaccttggacacaggacgctgtggtttctgagccagcagcctcccccgttgcccctctggatccactgcttaaatacggacgaggacagggccctgtctcctcagcttcaggcaccaccactgacctgggacagtgaatcgacaatgccgtcttctgtctcgtggggcatcctcctgctggcaggcctgtgctgcctggtccctgtctccctggctgaggatccccagggagatgctgcccagaagacagatacatcccaccatgatcaggatcacccaaccttcaacaagatcacccccaacctggctgagttcgccttcagcctataccgccagctggcacaccagtccaacagcaccaatatcttcttctccccagtgagcatcgctacagcctttgcaatgctctccctggggaccaaggctgacactcacgatgaaatcctggagggcctgaatttcaacctcacggagattccggaggctcagatccatgaaggcttccaggaactcctccgtaccctcaaccagccagacagccagctccagctgaccaccggcaatggcctgttcctcagcgagggcctgaagctagtggataagtttttggaggatgttaaaaagttgtaccactcagaagccttcactgtcaacttcggggacaccgaagaggccaagaaacagatcaacgattacgtggagaagggtactcaagggaaaattgtggatttggtcaaggagcttgacagagacacagtttttgctctggtgaattacatcttctttaaaggcaaatgggagagaccctttgaagtcaaggacaccgaggaagaggacttccacgtggaccaggtgaccaccgtgaaggtgcctatgatgaagcgtttaggcatgtttaacatccagcactgtaagaagctgtccagctgggtgctgctgatgaaatacctgggcaatgccaccgccatcttcttcctgcctgatgaggggaaactacagcacctggaaaatgaactcacccacgatatcatcaccaagttcctggaaaatgaagacagaaggtctgccagcttacatttacccaaactgtccattactggaacctatgatctgaagagcgtcctgggtcaactgggcatcactaaggtcttcagcaatggggctgacctctccggggtcacagaggaggcacccctgaagctctccaaggccgtgcataaggctgtgctgaccatcgacgagaaagggactgaagctgctggggccatgtttttagaggccatacccatgtctatcccccccgaggtcaagttcaacaaaccctttgtcttcttaatgattgaacaaaataccaagtctcccctcttcatgggaaaagtggtgaatcccacccaaaaataactgcctctcgctcctcaacccctcccctccatccctggccccctccctggatgacattaaagaagggttgagctggtccctgcctgcatgtgactgtaaatccctcccatgttttctctgagtctccctttgcctgctgaggctgtatgtgggctccaggtaacagtgctgtcttcgggccccctgaactgtgttcatggagcatctggctgggtaggcacatgctgggcttgaatccaggggggactgaatcctcagcttacggacctgggcccatctgtttctggagggctccagtcttccttgtcctgtcttggagtccccaagaaggaatcacaggggaggaaccagataccagccatgaccccaggctccaccaagcatcttcatgtccccctgctcatcccccactcccccccacccagagttgctcatcctgccagggctggctgtgcccaccccaaggctgccctcctgggggccccagaactgcctgatcgtgccgtggcccagttttgtggcatctgcagcaacacaagagagaggacaatgtcctcctcttgacccgctgtcacctaaccagactcgggccctgcacctctcaggcacttctggaaaatgactgaggcagattcttcctgaagcccattctccatggggcaacaaggacacctattctgtccttgtccttccatcgctgccccagaaagcctcacatatctccgtttagaatcaggtcccttctccccagatgaagaggagggtctctgctttgttttctctatctcctcctcagacttgaccaggcccagcaggccccagaagaccattaccctatatcccttctcctccctagtcacatggccataggcctgctgatggctcaggaaggccattgcaaggactcctcagctatgggagaggaagcacatcacccattgacccccgcaacccctccctttcctcctctgagtcccgactggggccacatgcagcctgacttctttgtgcctgttgctgtccctgcagtcttcagagggccaccgcagctccagtgccacggcaggaggctgttcctgaatagcccctgtggtaagggccaggagagtccttccatcctccaaggccctgctaaaggacacagcagccaggaagtcccctgggcccctagctgaaggacagcctgctccctccgtctctaccaggaatggccttgtcctatggaaggcactgccccatcccaaactaatctaggaatcactgtctaaccactcactgtcatgaatgtgtacttaaaggatgaggttgagtcataccaaatagtgatttcgatagttcaaaatggtgaaattagcaattctacatgattcagtctaatcaatggataccgactgtttcccacacaagtctcctgttctcttaagcttactcactgacagcctttcactctccacaaatacattaaagatatggccatcaccaagccccctaggatgacaccagacctgagagtctgaagacctggatccaagttctgacttttccccctgacagctgtgtgaccttcgtgaagtcgccaaacctctctgagccccagtcattgctagtaagacctgcctttgagttggtatgatgttcaagttagataacaaaatgtttatacccattagaacagagaataaatagaactacatttcttgca

SEQ ID NO: 180441 - DNA, 1559 bp, Homo sapiens
  Payload ID: 15539
  Gene Symbol: SERPINA1
  Gene Name: serpin peptidase inhibitor, clade A (alpha-1 antiproteinase, antitrypsin), member 1
  Uniprot ID: P01009
  ENST ID: ENST00000449399
  CDS Start-End: 303-1559
cacgcagcaaccctcagagtcctgagctgaaccaagaaggaggagggggtcgggcctccgaggaaggcctagccgctgctgctgccaggaattccaggttggaggggcggcaacctcctgccagccttcaggccactctcctgtgcctgccagaagagacagagcttgaggagagcttgaggagagcaggaaagcagcctcccccgttgcccctctggatccactgcttaaatacggacgaggacagggccctgtctcctcagcttcaggcaccaccactgacctgggacagtgaatcgacaatgccgtcttctgtctcgtggggcatcctcctgctggcaggcctgtgctgcctggtccctgtctccctggctgaggatccccagggagatgctgcccagaagacagatacatcccaccatgatcaggatcacccaaccttcaacaagatcacccccaacctggctgagttcgccttcagcctataccgccagctggcacaccagtccaacagcaccaatatcttcttctccccagtgagcatcgctacagcctttgcaatgctctccctggggaccaaggctgacactcacgatgaaatcctggagggcctgaatttcaacctcacggagattccggaggctcagatccatgaaggcttccaggaactcctccgtaccctcaaccagccagacagccagctccagctgaccaccggcaatggcctgttcctcagcgagggcctgaagctagtggataagtttttggaggatgttaaaaagttgtaccactcagaagccttcactgtcaacttcggggacaccgaagaggccaagaaacagatcaacgattacgtggagaagggtactcaagggaaaattgtggatttggtcaaggagcttgacagagacacagtttttgctctggtgaattacatcttctttaaaggcaaatgggagagaccctttgaagtcaaggacaccgaggaagaggacttccacgtggaccaggtgaccaccgtgaaggtgcctatgatgaagcgtttaggcatgtttaacatccagcactgtaagaagctgtccagctgggtgctgctgatgaaatacctgggcaatgccaccgccatcttcttcctgcctgatgaggggaaactacagcacctggaaaatgaactcacccacgatatcatcaccaagttcctggaaaatgaagacagaaggtctgccagcttacatttacccaaactgtccattactggaacctatgatctgaagagcgtcctgggtcaactgggcatcactaaggtcttcagcaatggggctgacctctccggggtcacagaggaggcacccctgaagctctccaaggccgtgcataaggctgtgctgaccatcgacgagaaagggactgaagctgctggggccatgtttttagaggccatacccatgtctatcccccccgaggtcaagttcaacaaaccctttgtcttcttaatgattgaacaaaataccaagtctcccctcttcatgggaaaagtggtgaatcccacccaaaaataa

SEQ ID NO: 180442 - DNA, 446 bp, Homo sapiens
  Payload ID: 15539
  Gene Symbol: SERPINA1
  Gene Name: serpin peptidase inhibitor, clade A (alpha-1 antiproteinase, antitrypsin), member 1
  ENST ID: ENST00000554720
  CDS Start-End: 130-446
agcagcctcccccgttgcccctctggatccactgcttaaatacggacgaggacagggccctgtctcctcagcttcaggcaccaccactgacctgggacagtgaatctgagcatcgctacagcctttgcaatgctctccctggggaccaaggctgacactcacgatgaaatcctggagggcctgaatttcaacctcacggagattccggaggctcagatccatgaaggcttccaggaactcctccgtaccctcaaccagccagacagccagctccagctgaccaccggcaatggcctgttcctcagcgagggcctgaagctagtggataagtttttggaggatgttaaaaagttgtaccactcagaagccttcactgtcaacttcggggacaccgaagaggccaagaaacagatcaacgattacgtggagaagggtactcaagggaa

SEQ ID NO: 180443 - DNA, 571 bp, Homo sapiens
  Payload ID: 15539
  Gene Symbol: SERPINA1
  Gene Name: serpin peptidase inhibitor, clade A (alpha-1 antiproteinase, antitrypsin), member 1
  ENST ID: ENST00000556955
  CDS Start-End: 221-571
agagtcctgagctgaaccaagaaggaggagggggtcgggcctccgaggaaggcctagccgctgctgctgccaggaattccaggttggaggggcggcaacctcctgccagccttcaggccactctcctgtgcctgccagaagagacagagcttgaggagagcttgaggagagcaggaaaggtgggacattgctgctgctgctcactcagttccacaggacaatgccgtcttctgtctcgtggggcatcctcctgctggcaggcctgtgctgcctggtccctgtctccctggctgaggatccccagggagatgctgcccagaagacagatacatcccaccatgatcaggatcacccaaccttcaacaagatcacccccaacctggctgagttcgccttcagcctataccgccagctggcacaccagtccaacagcaccaatatcttcttctccccagtgagcatcgctacagcctttgcaatgctctccctggggaccaaggctgacactcacgatgaaatcctggagggcctgaatttcaacctcacggagattccggaggctcagatccat

SEQ ID NO: 180444 - DNA, 1562 bp, Homo sapiens
  Payload ID: 15539
  Gene Symbol: SERPINA1
  Gene Name: serpin peptidase inhibitor, clade A (alpha-1 antiproteinase, antitrypsin), member 1
  Uniprot ID: P01009
  ENST ID: ENST00000489769
  CDS Start-End: 10-930
tgcaggacaatgccgtcttctgtctcgtggggcatcctcctgctggcaggcctgtgctgcctggtccctgtctccctggctgaggatccccagggagatgctgcccagaagacagatacatcccaccatgatcaggatcacccaaccttcaacaagatcacccccaacctggctgagttcgccttcagcctataccgccagctggcacaccagtccaacagcaccaatatcttcttctccccagtgagcatcgctacagcctttgcaatgctctccctggggaccaaggctgacactcacgatgaaatcctggagggcctgaatttcaacctcacggagattccggaggctcagatccatgaaggcttccaggaactcctccgtaccctcaaccagccagacagccagctccagctgaccaccggcaatggcctgttcctcagcgagggcctgaagctagtggataagtttttggaggatgttaaaaagttgtaccactcagaagccttcactgtcaacttcggggacaccgaagaggccaagaaacagatcaacgattacgtggagaagggtactcaagggaaaattgtggatttggtcaaggagcttgacagagacacagtttttgctctggtgaattacatcttctttaaaggcaaatgggagagaccctttgaagtcaaggacaccgaggaagaggacttccacgtggaccaggtgaccaccgtgaaggtgcctatgatgaagcgtttaggcatgtttaacatccagcactgtaagaagctgtccagctgggtgctgctgatgaaatacctgggcaatgccaccgccatcttcttcctgcctgatgaggggaaactacagcacctggaaaatgaactcacccacgatatcatcaccaagttcctggaaaatgaagacagaaggtgattccccaacctgagggtgaccaagaagctgcccacacctcttagccatgttgggactgaggcccatcaggactggccagagggctgaggagggtgaaccccacatccctgggtcactgctactctgtataaacttggcttccagaatgaggccaccactgagttcaggcagcgccatccatgctccatgaggaggacagtacccaggggtgaggaggtctgccagcttacatttacccaaactgtccattactggaacctatgatctgaagagcgtcctgggtcaactgggcatcactaaggtcttcagcaatggggctgacctctccggggtcacagaggaggcacccctgaagctctccaaggccgtgcataaggctgtgctgaccatcgacgagaaagggactgaagctgctggggccatgtttttagaggccatacccatgtctatcccccccgaggtcaagttcaacaaaccctttgtcttcttaatgattgaacaaaataccaagtctcccctcttcatgggaaaagtggtgaatcccacccaaaaataactgcctctcgctcctcaacccctcccctccatccctggccccctccctggatgacattaaagaagggttgagctgg

SEQ ID NO: 180445 - DNA, 583 bp, Homo sapiens
  Payload ID: 15539
  Gene Symbol: SERPINA1
  Gene Name: serpin peptidase inhibitor, clade A (alpha-1 antiproteinase, antitrypsin), member 1
  ENST ID: ENST00000557118
  CDS Start-End: 517-583
agagtcctgagctgaaccaagaaggaggagggggtcgggcctccgaggaaggcctagccgctgctgctgccaggaattccaggttggaggggcggcaacctcctgccagccttcaggccactctcctgtgcctgccagaagagacagagcttgaggagagcttgaggagagcaggaaaggtgggacattgctgctgctgctcactcagttccacagggcggcagtaagtcttcagcatcaggcattttggggtgactcagtaaatggtagatcttgctaccagtggaacagccactaaggattctgcagtgagagcagagggccagctaagtggtactctcccagagactgtctgactcacgccaccccctccaccttggacacaggacgctgtggtttctgagccagcagcctcccccgttgcccctctggatccactgcttaaatacggacgaggacagggccctgtctcctcagcttcaggcaccaccactgacctgggacagtgaatcgacaatgccgtcttctgtctcgtggggcatcctcctgctggcaggcctgtgctgcctggtccctgtctccc

SEQ ID NO: 180446 - DNA, 643 bp, Homo sapiens
  Payload ID: 15539
  Gene Symbol: SERPINA1
  Gene Name: serpin peptidase inhibitor, clade A (alpha-1 antiproteinase, antitrypsin), member 1
  ENST ID: ENST00000556091
  CDS Start-End: 175-643
caggcaccaccactgacctgggacagtgaatctgttactgatgtcggcaagtacttggcacaggctggtttaataatccctaggcacttccacgtggtgtcaatccctgatcactgggagtcatcatgtgccttgactcggggcctggcccccccatctctgtcttgcaggacaatgccgtcttctgtctcgtggggcatcctcctgctggcaggcctgtgctgcctggtccctgtctccctggctgaggatccccagggagatgctgcccagaagacagatacatcccaccatgatcaggatcacccaaccttcaacaagatcacccccaacctggctgagttcgccttcagcctataccgccagctggcacaccagtccaacagcaccaatatcttcttctccccagtgagcatcgctacagcctttgcaatgctctccctggggaccaaggctgacactcacgatgaaatcctggagggcctgaatttcaacctcacggagattccggaggctcagatccatgaaggcttccaggaactcctccgtaccctcaaccagccagacagccagctccagctgaccaccggcaatggcctgttcctcagcgagggcctgaagctagtggataagtttttggagg

SEQ ID NO: 180447 - DNA, 951 bp, Homo sapiens
  Payload ID: 15539
  Gene Symbol: SERPINA1
  Gene Name: serpin peptidase inhibitor, clade A (alpha-1 antiproteinase, antitrypsin), member 1
  ENST ID: ENST00000557492
  CDS Start-End: 518-951
actgtgcccagggcatgcactgcctccacgcagcaaccctcagagtcctgagctgaaccaagaaggaggagggggtcgggcctccgaggaaggcctagccgctgctgctgccaggaattccaggttggaggggcggcaacctcctgccagccttcaggccactctcctgtgcctgccagaagagacagagcttgaggagagcttgaggagagcaggaaagggcggcagtaagtcttcagcatcaggcattttggggtgactcagtaaatggtagatcttgctaccagtggaacagccactaaggattctgcagtgagagcagagggccagctaagtggtactctcccagagactgtctgactcacgccaccccctccaccttggacacaggacgctgtggtttctgagccagcctcccccgttgcccctctggatccactgcttaaatacggacgaggacagggccctgtctcctcagcttcaggcaccaccactgacctgggacagtgaatcgacaatgccgtcttctgtctcgtggggcatcctcctgctggcaggcctgtgctgcctggtccctgtctccctggctgaggatccccagggagatgctgcccagaagacagatacatcccaccatgatcaggatcacccaaccttcaacaagatcacccccaacctggctgagttcgccttcagcctataccgccagctggcacaccagtccaacagcaccaatatcttcttctccccagtgagcatcgctacagcctttgcaatgctctccctggggaccaaggctgacactcacgatgaaatcctggagggcctgaatttcaacctcacggagattccggaggctcagatccatgaaggcttccaggaactcctccgtaccctcaaccagccagacagccagctccagctgaccaccggcaatggcctgttcctcag

SEQ ID NO: 180448 - DNA, 581 bp, Homo sapiens
  Payload ID: 15539
  Gene Symbol: SERPINA1
  Gene Name: serpin peptidase inhibitor, clade A (alpha-1 antiproteinase, antitrypsin), member 1
  ENST ID: ENST00000553327
  CDS Start-End: 304-581
aaggaggagggggtcgggcctccgaggaaggcctagccgctgctgctgccaggaattccaggttggaggggcggcaacctcctgccagccttcaggccactctcctgtgcctgccagaagagacagagcttgaggagagcttgaggagagcaggaaaggtgggacattgctgctgctgctcactcagttccacagcagcctcccccgttgcccctctggatccactgcttaaatacggacgaggacagggccctgtctcctcagcttcaggcaccaccactgacctgggacagtgaatcgacaatgccgtcttctgtctcgtggggcatcctcctgctggcaggcctgtgctgcctggtccctgtctccctggctgaggatccccagggagatgctgcccagaagacagatacatcccaccatgatcaggatcacccaaccttcaacaagatcacccccaacctggctgagttcgccttcagcctataccgccagctggcacaccagtccaacagcaccaatatcttcttctccccagtgagcatcgctacagcctttgcaatgctctccctggggaccaa

SEQ ID NO: 180449 - DNA, 3340 bp, Homo sapiens
  Payload ID: 15539
  Gene Symbol: SERPINA1
  Gene Name: serpin peptidase inhibitor, clade A (alpha-1 antiproteinase, antitrypsin), member 1
  ENST ID: ENST00000620666
  CDS Start-End: 382-1638
tgggcaggaactgggcactgtgcccagggcatgcactgcctccacgcagcaaccctcagagtcctgagctgaaccaagaaggaggagggggtcgggcctccgaggaaggcctagccgctgctgctgccaggaattccaggttggaggggcggcaacctcctgccagccttcaggccactctcctgtgcctgccagaagagacagagcttgaggagagcttgaggagagcaggaaaggtgggacattgctgctgctgctcactcagttccacagcagcctcccccgttgcccctctggatccactgcttaaatacggacgaggacagggccctgtctcctcagcttcaggcaccaccactgacctgggacagtgaatcgacaatgccgtcttctgtctcgtggggcatcctcctgctggcaggcctgtgctgcctggtccctgtctccctggctgaggatccccagggagatgctgcccagaagacagatacatcccaccatgatcaggatcacccaaccttcaacaagatcacccccaacctggctgagttcgccttcagcctataccgccagctggcacaccagtccaacagcaccaatatcttcttctccccagtgagcatcgctacagcctttgcaatgctctccctggggaccaaggctgacactcacgatgaaatcctggagggcctgaatttcaacctcacggagattccggaggctcagatccatgaaggcttccaggaactcctccgtaccctcaaccagccagacagccagctccagctgaccaccggcaatggcctgttcctcagcgagggcctgaagctagtggataagtttttggaggatgttaaaaagttgtaccactcagaagccttcactgtcaacttcggggacaccgaagaggccaagaaacagatcaacgattacgtggagaagggtactcaagggaaaattgtggatttggtcaaggagcttgacagagacacagtttttgctctggtgaattacatcttctttaaaggcaaatgggagagaccctttgaagtcaaggacaccgaggaagaggacttccacgtggaccaggcgaccaccgtgaaggtgcctatgatgaagcgtttaggcatgtttaacatccagcactgtaagaagctgtccagctgggtgctgctgatgaaatacctgggcaatgccaccgccatcttcttcctgcctgacgaggggaaactacagcacctggaaaatgaactcacccacgatatcatcaccaagttcctggaaaatgaagacagaaggtctgccagcttacatttacccaaactgtccattactggaacctatgatctgaagagcgtcctgggtcaactgggcatcactaaggtcttcagcaatggggctgacctctccggggtcacagaggaggcacccctgaagctctccaaggccgtgcataaggctgtgctgaccatcgacgagaaagggactgaagctgctggggccatgtttttagaggccatacccatgtctatcccccccgaggtcaagttcaacaaaccctttgtcttcttaatgattgaacaaaataccaagtctcccctcttcatgggaaaagtggtgaatcccacccaaaaataactgcctctcgctcctcaacccctcccctccatccctggccccctccctggatgacattaaagaagggttgagctggtccctgcctgcatgtgactgtaaatccctcccatgttttctctgagtctccctttgcctgctgaggctgtatgtgggctccaggtaacagtgctgtcttcgggccccctgaactgtgttcatggagcatctggctgggtaggcacatgctgggcttgaatccaggggggactgaatcctcagcttacggacctgggcccatctgtttctggagggctccagtcttccttgtcctgtctttgagtccccaagaaggaatcacaggggaggaaccagataccagccatgaccccaggctccaccaagcatcttcatgtccccctgctcatcccccactcccccccacccagagttgctcatcctgccagggctggctgtgcccaccccaaggctgccctcctggggaccccagaactgcctgatcgtgccgtggcccagttttgtggcatctgcagcaacacaagagagaggacaatgtcctcctcttgacccgctgtcacctaaccagactcgggccctgcacctctcaggcacttctggaaaatgactgaggcagattcttcctgaagcccattctccatggggcaacaaggacacctattctgtccttgtccttccatcgctgccccagaaagcctcacatatctccgtttagaatcaggtcccttctccccagatgaagaggagggtctctgctttgttttctctatctcctcctcagacttgaccaggcccagcaggccccagaagaccattaccctatatcccttctcctccctagtcacatggccataggcctgctgatggctcaggaaggccattgcaaggactcctcagctatgggagaggaagcacatcacccattgacccccgcaacccctccctttcctcctctgagtcccgactggggccacatgcagcctgacttctttgtgcctgttgctgtccctgcagtcttcagagggccaccgcagctccagtgccacggcaggaggctgttcctgaatagcccctgtggtaagggccaggagagtccttccatcctccaaggccctgctaaaggacacagcagccaggaagtcccctgggcccctagctgaaggacagcctgctccctccgtctctaccaggaatggccttgtcctgtggaaggcactgccccatcccaaactaatctaggaatcactgtctaaccactcactgtcatgaatgtgtacttaaaggatgaggttgagtcataccaaatagtgatttcgatagttcaaaatggtgaaattagcaattctacatgattcagtctaatcaatggataccgactgtttcccacacaagtctcctgttctcttaagcttactcactgacagcctttcactctccacaaatacattaaagatatggccatcaccaagccccctaggatgacaccagacctgagagtctgaagacctggatccaagttctgacttttccccctgacagttgtgtgaccttcgtgaagtcgccaaacctctctgagccccagtcattgctagtaagacctgcctttgagttggtatgatgttcaagttagataacaaaatgtttatacccattagaacagagaataaatagaactacatttcttgca

SEQ ID NO: 180450 - DNA, 3532 bp, Homo sapiens
  Payload ID: 15539
  Gene Symbol: SERPINA1
  Gene Name: serpin peptidase inhibitor, clade A (alpha-1 antiproteinase, antitrypsin), member 1
  ENST ID: ENST00000614317
  CDS Start-End: 574-1830
tgggcaggaactgggcactgtgcccagggcatgcactgcctccacgcagcaaccctcagagtcctgagctgaaccaagaaggaggagggggtcgggcctccgaggaaggcctagccgctgctgctgccaggaattccaggttggaggggcggcaacctcctgccagccttcaggccactctcctgtgcctgccagaagagacagagcttgaggagagcttgaggagagcaggaaaggtgggacattgctgctgctgctcactcagttccacagggcggcagtaagtcttcagcatcaggcattttggggtgactcagtaaatggtagatcttgctaccagtggaacagccactaaggattctgcagtgagagcagagggccagctaagtggtactctcccagagactgtctgactcacgccaccccctccaccttggacacaggacgctgtggtttctgagccagcagcctcccccgttgcccctctggatccactgcttaaatacggacgaggacagggccctgtctcctcagcttcaggcaccaccactgacctgggacagtgaatcgacaatgccgtcttctgtctcgtggggcatcctcctgctggcaggcctgtgctgcctggtccctgtctccctggctgaggatccccagggagatgctgcccagaagacagatacatcccaccatgatcaggatcacccaaccttcaacaagatcacccccaacctggctgagttcgccttcagcctataccgccagctggcacaccagtccaacagcaccaatatcttcttctccccagtgagcatcgctacagcctttgcaatgctctccctggggaccaaggctgacactcacgatgaaatcctggagggcctgaatttcaacctcacggagattccggaggctcagatccatgaaggcttccaggaactcctccgtaccctcaaccagccagacagccagctccagctgaccaccggcaatggcctgttcctcagcgagggcctgaagctagtggataagtttttggaggatgttaaaaagttgtaccactcagaagccttcactgtcaacttcggggacaccgaagaggccaagaaacagatcaacgattacgtggagaagggtactcaagggaaaattgtggatttggtcaaggagcttgacagagacacagtttttgctctggtgaattacatcttctttaaaggcaaatgggagagaccctttgaagtcaaggacaccgaggaagaggacttccacgtggaccaggcgaccaccgtgaaggtgcctatgatgaagcgtttaggcatgtttaacatccagcactgtaagaagctgtccagctgggtgctgctgatgaaatacctgggcaatgccaccgccatcttcttcctgcctgacgaggggaaactacagcacctggaaaatgaactcacccacgatatcatcaccaagttcctggaaaatgaagacagaaggtctgccagcttacatttacccaaactgtccattactggaacctatgatctgaagagcgtcctgggtcaactgggcatcactaaggtcttcagcaatggggctgacctctccggggtcacagaggaggcacccctgaagctctccaaggccgtgcataaggctgtgctgaccatcgacgagaaagggactgaagctgctggggccatgtttttagaggccatacccatgtctatcccccccgaggtcaagttcaacaaaccctttgtcttcttaatgattgaacaaaataccaagtctcccctcttcatgggaaaagtggtgaatcccacccaaaaataactgcctctcgctcctcaacccctcccctccatccctggccccctccctggatgacattaaagaagggttgagctggtccctgcctgcatgtgactgtaaatccctcccatgttttctctgagtctccctttgcctgctgaggctgtatgtgggctccaggtaacagtgctgtcttcgggccccctgaactgtgttcatggagcatctggctgggtaggcacatgctgggcttgaatccaggggggactgaatcctcagcttacggacctgggcccatctgtttctggagggctccagtcttccttgtcctgtctttgagtccccaagaaggaatcacaggggaggaaccagataccagccatgaccccaggctccaccaagcatcttcatgtccccctgctcatcccccactcccccccacccagagttgctcatcctgccagggctggctgtgcccaccccaaggctgccctcctggggaccccagaactgcctgatcgtgccgtggcccagttttgtggcatctgcagcaacacaagagagaggacaatgtcctcctcttgacccgctgtcacctaaccagactcgggccctgcacctctcaggcacttctggaaaatgactgaggcagattcttcctgaagcccattctccatggggcaacaaggacacctattctgtccttgtccttccatcgctgccccagaaagcctcacatatctccgtttagaatcaggtcccttctccccagatgaagaggagggtctctgctttgttttctctatctcctcctcagacttgaccaggcccagcaggccccagaagaccattaccctatatcccttctcctccctagtcacatggccataggcctgctgatggctcaggaaggccattgcaaggactcctcagctatgggagaggaagcacatcacccattgacccccgcaacccctccctttcctcctctgagtcccgactggggccacatgcagcctgacttctttgtgcctgttgctgtccctgcagtcttcagagggccaccgcagctccagtgccacggcaggaggctgttcctgaatagcccctgtggtaagggccaggagagtccttccatcctccaaggccctgctaaaggacacagcagccaggaagtcccctgggcccctagctgaaggacagcctgctccctccgtctctaccaggaatggccttgtcctgtggaaggcactgccccatcccaaactaatctaggaatcactgtctaaccactcactgtcatgaatgtgtacttaaaggatgaggttgagtcataccaaatagtgatttcgatagttcaaaatggtgaaattagcaattctacatgattcagtctaatcaatggataccgactgtttcccacacaagtctcctgttctcttaagcttactcactgacagcctttcactctccacaaatacattaaagatatggccatcaccaagccccctaggatgacaccagacctgagagtctgaagacctggatccaagttctgacttttccccctgacagttgtgtgaccttcgtgaagtcgccaaacctctctgagccccagtcattgctagtaagacctgcctttgagttggtatgatgttcaagttagataacaaaatgtttatacccattagaacagagaataaatagaactacatttcttgca

SEQ ID NO: 180451 - DNA, 3236 bp, Homo sapiens
  Payload ID: 15539
  Gene Symbol: SERPINA1
  Gene Name: serpin peptidase inhibitor, clade A (alpha-1 antiproteinase, antitrypsin), member 1
  ENST ID: ENST00000618636
  CDS Start-End: 278-1534
tgggcaggaactgggcactgtgcccagggcatgcactgcctccacgcagcaaccctcagagtcctgagctgaaccaagaaggaggagggggtcgggcctccgaggaaggcctagccgctgctgctgccaggaattccaggttggaggggcggcaacctcctgccagccttcaggccactctcctgtgcctgccagaagagacagagcttgaggagagcttgaggagagcaggaaaggtgggacattgctgctgctgctcactcagttccacaggacaatgccgtcttctgtctcgtggggcatcctcctgctggcaggcctgtgctgcctggtccctgtctccctggctgaggatccccagggagatgctgcccagaagacagatacatcccaccatgatcaggatcacccaaccttcaacaagatcacccccaacctggctgagttcgccttcagcctataccgccagctggcacaccagtccaacagcaccaatatcttcttctccccagtgagcatcgctacagcctttgcaatgctctccctggggaccaaggctgacactcacgatgaaatcctggagggcctgaatttcaacctcacggagattccggaggctcagatccatgaaggcttccaggaactcctccgtaccctcaaccagccagacagccagctccagctgaccaccggcaatggcctgttcctcagcgagggcctgaagctagtggataagtttttggaggatgttaaaaagttgtaccactcagaagccttcactgtcaacttcggggacaccgaagaggccaagaaacagatcaacgattacgtggagaagggtactcaagggaaaattgtggatttggtcaaggagcttgacagagacacagtttttgctctggtgaattacatcttctttaaaggcaaatgggagagaccctttgaagtcaaggacaccgaggaagaggacttccacgtggaccaggcgaccaccgtgaaggtgcctatgatgaagcgtttaggcatgtttaacatccagcactgtaagaagctgtccagctgggtgctgctgatgaaatacctgggcaatgccaccgccatcttcttcctgcctgacgaggggaaactacagcacctggaaaatgaactcacccacgatatcatcaccaagttcctggaaaatgaagacagaaggtctgccagcttacatttacccaaactgtccattactggaacctatgatctgaagagcgtcctgggtcaactgggcatcactaaggtcttcagcaatggggctgacctctccggggtcacagaggaggcacccctgaagctctccaaggccgtgcataaggctgtgctgaccatcgacgagaaagggactgaagctgctggggccatgtttttagaggccatacccatgtctatcccccccgaggtcaagttcaacaaaccctttgtcttcttaatgattgaacaaaataccaagtctcccctcttcatgggaaaagtggtgaatcccacccaaaaataactgcctctcgctcctcaacccctcccctccatccctggccccctccctggatgacattaaagaagggttgagctggtccctgcctgcatgtgactgtaaatccctcccatgttttctctgagtctccctttgcctgctgaggctgtatgtgggctccaggtaacagtgctgtcttcgggccccctgaactgtgttcatggagcatctggctgggtaggcacatgctgggcttgaatccaggggggactgaatcctcagcttacggacctgggcccatctgtttctggagggctccagtcttccttgtcctgtctttgagtccccaagaaggaatcacaggggaggaaccagataccagccatgaccccaggctccaccaagcatcttcatgtccccctgctcatcccccactcccccccacccagagttgctcatcctgccagggctggctgtgcccaccccaaggctgccctcctggggaccccagaactgcctgatcgtgccgtggcccagttttgtggcatctgcagcaacacaagagagaggacaatgtcctcctcttgacccgctgtcacctaaccagactcgggccctgcacctctcaggcacttctggaaaatgactgaggcagattcttcctgaagcccattctccatggggcaacaaggacacctattctgtccttgtccttccatcgctgccccagaaagcctcacatatctccgtttagaatcaggtcccttctccccagatgaagaggagggtctctgctttgttttctctatctcctcctcagacttgaccaggcccagcaggccccagaagaccattaccctatatcccttctcctccctagtcacatggccataggcctgctgatggctcaggaaggccattgcaaggactcctcagctatgggagaggaagcacatcacccattgacccccgcaacccctccctttcctcctctgagtcccgactggggccacatgcagcctgacttctttgtgcctgttgctgtccctgcagtcttcagagggccaccgcagctccagtgccacggcaggaggctgttcctgaatagcccctgtggtaagggccaggagagtccttccatcctccaaggccctgctaaaggacacagcagccaggaagtcccctgggcccctagctgaaggacagcctgctccctccgtctctaccaggaatggccttgtcctgtggaaggcactgccccatcccaaactaatctaggaatcactgtctaaccactcactgtcatgaatgtgtacttaaaggatgaggttgagtcataccaaatagtgatttcgatagttcaaaatggtgaaattagcaattctacatgattcagtctaatcaatggataccgactgtttcccacacaagtctcctgttctcttaagcttactcactgacagcctttcactctccacaaatacattaaagatatggccatcaccaagccccctaggatgacaccagacctgagagtctgaagacctggatccaagttctgacttttccccctgacagttgtgtgaccttcgtgaagtcgccaaacctctctgagccccagtcattgctagtaagacctgcctttgagttggtatgatgttcaagttagataacaaaatgtttatacccattagaacagagaataaatagaactacatttcttgca

SEQ ID NO: 180452 - DNA, 1559 bp, Homo sapiens
  Payload ID: 15539
  Gene Symbol: SERPINA1
  Gene Name: serpin peptidase inhibitor, clade A (alpha-1 antiproteinase, antitrypsin), member 1
  ENST ID: ENST00000627097
  CDS Start-End: 303-1559
cacgcagcaaccctcagagtcctgagctgaaccaagaaggaggagggggtcgggcctccgaggaaggcctagccgctgctgctgccaggaattccaggttggaggggcggcaacctcctgccagccttcaggccactctcctgtgcctgccagaagagacagagcttgaggagagcttgaggagagcaggaaagcagcctcccccgttgcccctctggatccactgcttaaatacggacgaggacagggccctgtctcctcagcttcaggcaccaccactgacctgggacagtgaatcgacaatgccgtcttctgtctcgtggggcatcctcctgctggcaggcctgtgctgcctggtccctgtctccctggctgaggatccccagggagatgctgcccagaagacagatacatcccaccatgatcaggatcacccaaccttcaacaagatcacccccaacctggctgagttcgccttcagcctataccgccagctggcacaccagtccaacagcaccaatatcttcttctccccagtgagcatcgctacagcctttgcaatgctctccctggggaccaaggctgacactcacgatgaaatcctggagggcctgaatttcaacctcacggagattccggaggctcagatccatgaaggcttccaggaactcctccgtaccctcaaccagccagacagccagctccagctgaccaccggcaatggcctgttcctcagcgagggcctgaagctagtggataagtttttggaggatgttaaaaagttgtaccactcagaagccttcactgtcaacttcggggacaccgaagaggccaagaaacagatcaacgattacgtggagaagggtactcaagggaaaattgtggatttggtcaaggagcttgacagagacacagtttttgctctggtgaattacatcttctttaaaggcaaatgggagagaccctttgaagtcaaggacaccgaggaagaggacttccacgtggaccaggcgaccaccgtgaaggtgcctatgatgaagcgtttaggcatgtttaacatccagcactgtaagaagctgtccagctgggtgctgctgatgaaatacctgggcaatgccaccgccatcttcttcctgcctgacgaggggaaactacagcacctggaaaatgaactcacccacgatatcatcaccaagttcctggaaaatgaagacagaaggtctgccagcttacatttacccaaactgtccattactggaacctatgatctgaagagcgtcctgggtcaactgggcatcactaaggtcttcagcaatggggctgacctctccggggtcacagaggaggcacccctgaagctctccaaggccgtgcataaggctgtgctgaccatcgacgagaaagggactgaagctgctggggccatgtttttagaggccatacccatgtctatcccccccgaggtcaagttcaacaaaccctttgtcttcttaatgattgaacaaaataccaagtctcccctcttcatgggaaaagtggtgaatcccacccaaaaataa

SEQ ID NO: 180453 - DNA, 3144 bp, Homo sapiens
  Payload ID: 15539
  Gene Symbol: SERPINA1
  Gene Name: serpin peptidase inhibitor, clade A (alpha-1 antiproteinase, antitrypsin), member 1
  ENST ID: ENST00000627595
  CDS Start-End: 186-1442
tcagagtcctgagctgaaccaagaaggaggagggggtcgggcctccgaggaaggcctagccgctgctgctgccaggaattccaggttggaggggcggcaacctcctgccagccttcaggccactctcctgtgcctgccagaagagacagagcttgaggagagcttgaggagagcaggaaaggacaatgccgtcttctgtctcgtggggcatcctcctgctggcaggcctgtgctgcctggtccctgtctccctggctgaggatccccagggagatgctgcccagaagacagatacatcccaccatgatcaggatcacccaaccttcaacaagatcacccccaacctggctgagttcgccttcagcctataccgccagctggcacaccagtccaacagcaccaatatcttcttctccccagtgagcatcgctacagcctttgcaatgctctccctggggaccaaggctgacactcacgatgaaatcctggagggcctgaatttcaacctcacggagattccggaggctcagatccatgaaggcttccaggaactcctccgtaccctcaaccagccagacagccagctccagctgaccaccggcaatggcctgttcctcagcgagggcctgaagctagtggataagtttttggaggatgttaaaaagttgtaccactcagaagccttcactgtcaacttcggggacaccgaagaggccaagaaacagatcaacgattacgtggagaagggtactcaagggaaaattgtggatttggtcaaggagcttgacagagacacagtttttgctctggtgaattacatcttctttaaaggcaaatgggagagaccctttgaagtcaaggacaccgaggaagaggacttccacgtggaccaggcgaccaccgtgaaggtgcctatgatgaagcgtttaggcatgtttaacatccagcactgtaagaagctgtccagctgggtgctgctgatgaaatacctgggcaatgccaccgccatcttcttcctgcctgacgaggggaaactacagcacctggaaaatgaactcacccacgatatcatcaccaagttcctggaaaatgaagacagaaggtctgccagcttacatttacccaaactgtccattactggaacctatgatctgaagagcgtcctgggtcaactgggcatcactaaggtcttcagcaatggggctgacctctccggggtcacagaggaggcacccctgaagctctccaaggccgtgcataaggctgtgctgaccatcgacgagaaagggactgaagctgctggggccatgtttttagaggccatacccatgtctatcccccccgaggtcaagttcaacaaaccctttgtcttcttaatgattgaacaaaataccaagtctcccctcttcatgggaaaagtggtgaatcccacccaaaaataactgcctctcgctcctcaacccctcccctccatccctggccccctccctggatgacattaaagaagggttgagctggtccctgcctgcatgtgactgtaaatccctcccatgttttctctgagtctccctttgcctgctgaggctgtatgtgggctccaggtaacagtgctgtcttcgggccccctgaactgtgttcatggagcatctggctgggtaggcacatgctgggcttgaatccaggggggactgaatcctcagcttacggacctgggcccatctgtttctggagggctccagtcttccttgtcctgtctttgagtccccaagaaggaatcacaggggaggaaccagataccagccatgaccccaggctccaccaagcatcttcatgtccccctgctcatcccccactcccccccacccagagttgctcatcctgccagggctggctgtgcccaccccaaggctgccctcctggggaccccagaactgcctgatcgtgccgtggcccagttttgtggcatctgcagcaacacaagagagaggacaatgtcctcctcttgacccgctgtcacctaaccagactcgggccctgcacctctcaggcacttctggaaaatgactgaggcagattcttcctgaagcccattctccatggggcaacaaggacacctattctgtccttgtccttccatcgctgccccagaaagcctcacatatctccgtttagaatcaggtcccttctccccagatgaagaggagggtctctgctttgttttctctatctcctcctcagacttgaccaggcccagcaggccccagaagaccattaccctatatcccttctcctccctagtcacatggccataggcctgctgatggctcaggaaggccattgcaaggactcctcagctatgggagaggaagcacatcacccattgacccccgcaacccctccctttcctcctctgagtcccgactggggccacatgcagcctgacttctttgtgcctgttgctgtccctgcagtcttcagagggccaccgcagctccagtgccacggcaggaggctgttcctgaatagcccctgtggtaagggccaggagagtccttccatcctccaaggccctgctaaaggacacagcagccaggaagtcccctgggcccctagctgaaggacagcctgctccctccgtctctaccaggaatggccttgtcctgtggaaggcactgccccatcccaaactaatctaggaatcactgtctaaccactcactgtcatgaatgtgtacttaaaggatgaggttgagtcataccaaatagtgatttcgatagttcaaaatggtgaaattagcaattctacatgattcagtctaatcaatggataccgactgtttcccacacaagtctcctgttctcttaagcttactcactgacagcctttcactctccacaaatacattaaagatatggccatcaccaagccccctaggatgacaccagacctgagagtctgaagacctggatccaagttctgacttttccccctgacagttgtgtgaccttcgtgaagtcgccaaacctctctgagccccagtcattgctagtaagacctgcctttgagttggtatgatgttcaagttagataacaaaatgtttatacccattagaacagagaataaatagaactacatttcttgca

SEQ ID NO: 180454 - DNA, 571 bp, Homo sapiens; identical to SEQ ID NO: 180443
  Payload ID: 15539
  Gene Symbol: SERPINA1
  Gene Name: serpin peptidase inhibitor, clade A (alpha-1 antiproteinase, antitrypsin), member 1
  ENST ID: ENST00000626480
  CDS Start-End: 221-571

SEQ ID NO: 180455 - DNA, 1628 bp, Homo sapiens
  Payload ID: 15539
  Gene Symbol: SERPINA1
  Gene Name: serpin peptidase inhibitor, clade A (alpha-1 antiproteinase, antitrypsin), member 1
  ENST ID: ENST00000627178
  CDS Start-End: 312-1568
atgcactgcctccacgcagcaaccctcagagtcctgagctgaaccaagaaggaggagggggtcgggcctccgaggaaggcctagccgctgctgctgccaggaattccaggttggaggggcggcaacctcctgccagccttcaggccactctcctgtgcctgccagaagagacagagcttgaggagagcttgaggagagcaggaaagcctcccccgttgcccctctggatccactgcttaaatacggacgaggacagggccctgtctcctcagcttcaggcaccaccactgacctgggacagtgaatcgacaatgccgtcttctgtctcgtggggcatcctcctgctggcaggcctgtgctgcctggtccctgtctccctggctgaggatccccagggagatgctgcccagaagacagatacatcccaccatgatcaggatcacccaaccttcaacaagatcacccccaacctggctgagttcgccttcagcctataccgccagctggcacaccagtccaacagcaccaatatcttcttctccccagtgagcatcgctacagcctttgcaatgctctccctggggaccaaggctgacactcacgatgaaatcctggagggcctgaatttcaacctcacggagattccggaggctcagatccatgaaggcttccaggaactcctccgtaccctcaaccagccagacagccagctccagctgaccaccggcaatggcctgttcctcagcgagggcctgaagctagtggataagtttttggaggatgttaaaaagttgtaccactcagaagccttcactgtcaacttcggggacaccgaagaggccaagaaacagatcaacgattacgtggagaagggtactcaagggaaaattgtggatttggtcaaggagcttgacagagacacagtttttgctctggtgaattacatcttctttaaaggcaaatgggagagaccctttgaagtcaaggacaccgaggaagaggacttccacgtggaccaggcgaccaccgtgaaggtgcctatgatgaagcgtttaggcatgtttaacatccagcactgtaagaagctgtccagctgggtgctgctgatgaaatacctgggcaatgccaccgccatcttcttcctgcctgacgaggggaaactacagcacctggaaaatgaactcacccacgatatcatcaccaagttcctggaaaatgaagacagaaggtctgccagcttacatttacccaaactgtccattactggaacctatgatctgaagagcgtcctgggtcaactgggcatcactaaggtcttcagcaatggggctgacctctccggggtcacagaggaggcacccctgaagctctccaaggccgtgcataaggctgtgctgaccatcgacgagaaagggactgaagctgctggggccatgtttttagaggccatacccatgtctatcccccccgaggtcaagttcaacaaaccctttgtcttcttaatgattgaacaaaataccaagtctcccctcttcatgggaaaagtggtgaatcccacccaaaaataactgcctctcgctcctcaacccctcccctccatccctggccccctccctggatgacattaa

SEQ ID NO: 180456 - DNA, 581 bp, Homo sapiens; identical to SEQ ID NO: 180448
  Payload ID: 15539
  Gene Symbol: SERPINA1
  Gene Name: serpin peptidase inhibitor, clade A (alpha-1 antiproteinase, antitrypsin), member 1
  ENST ID: ENST00000631256
  CDS Start-End: 304-581

SEQ ID NO: 180457 - DNA, 951 bp, Homo sapiens; identical to SEQ ID NO: 180447
  Payload ID: 15539
  Gene Symbol: SERPINA1
  Gene Name: serpin peptidase inhibitor, clade A (alpha-1 antiproteinase, antitrypsin), member 1
  ENST ID: ENST00000629092
  CDS Start-End: 518-951

SEQ ID NO: 180458 - DNA, 1450 bp, Homo sapiens
  Payload ID: 15539
  Gene Symbol: SERPINA1
  Gene Name: serpin peptidase inhibitor, clade A (alpha-1 antiproteinase, antitrypsin), member 1
  ENST ID: ENST00000625467
  CDS Start-End: 35-1114
ggcaccaccactgacctgggacagtgaatcgacaatgccgtcttctgtctcgtggggcatcctcctgctggcaggcctgtgctgcctggtccctgtctccctggctgaggatccccagggagatgctgcccagaagacagatacatcccaccatgatcaggatcacccaaccttcaacaagatcacccccaacctggctgagttcgccttcagcctataccgccagctggcacaccagtccaacagcaccaatatcttcttctccccagtgagcatcgctacagcctttgcaatgctctccctggggaccaaggctgacactcacgatgaaatcctggagggcctgaatttcaacctcacggagattccggaggctcagatccatgaaggcttccaggaactcctccgtaccctcaaccagccagacagccagctccagctgaccaccggcaatggcctgttcctcagcgagggcctgaagctagtggataagtttttggaggatgttaaaaagttgtaccactcagaagccttcactgtcaacttcggggacaccgaagaggccaagaaacagatcaacgattacgtggagaagggtactcaagggaaaattgtggatttggtcaaggagcttgacagagacacagtttttgctctggtgaattacatcttctttaaaggcaaatgggagagaccctttgaagtcaaggacaccgaggaagaggacttccacgtggaccaggcgaccaccgtgaaggtgcctatgatgaagcgtttaggcatgtttaacatccagcactgtaagaagctgtccagctgggtgctgctgatgaaatacctgggcaatgccaccgccatcttcttcctgcctgacgaggggaaactacagcacctggaaaatgaactcacccacgatatcatcaccaagttcctggaaaatgaagacagaaggtctgccagcttacatttacccaaactgtccattactggaacctatgatctgaagagcgtcctgggtcaactgggcatcactaaggtcttcagcaatggggctgacctctccggggtcacagaggaggcacccctgaagctctccaaggtgagatcaccctgacgaccttgttgcaccctggtatctgtagggaagaatgtgtgggggctgcagctctgtcctgaggctgaggaaggggccgagggaaacaaatgaagacccaggctgagctcctgaagatgcccgtgattcactgacacgggacgtggtcaaacagcaaagccaggcaggggactgctgtgcagctggcactttcggggcctcccttgaggttgtgtcactgaccctgaatttcaactttgcccaagaccttctagacattgggccttgatttatccatactgacacagaaaggtttgggctaagttgtttcaaaggaatttctgactccttcgatct

SEQ ID NO: 180459 - DNA, 1885 bp, Homo sapiens
  Payload ID: 15539
  Gene Symbol: SERPINA1
  Gene Name: serpin peptidase inhibitor, clade A (alpha-1 antiproteinase, antitrypsin), member 1
  ENST ID: ENST00000627096
  CDS Start-End: 556-1812
gtgggcaggaactgggcactgtgcccagggcatgcactgcctccacgcagcaaccctcagagtcctgagctgaaccaagaaggaggagggggtcgggcctccgaggaaggcctagccgctgctgctgccaggaattccaggttggaggggcggcaacctcctgccagccttcaggccactctcctgtgcctgccagaagagacagagcttgaggagagcttgaggagagcaggaaagggcggcagtaagtcttcagcatcaggcattttggggtgactcagtaaatggtagatcttgctaccagtggaacagccactaaggattctgcagtgagagcagagggccagctaagtggtactctcccagagactgtctgactcacgccaccccctccaccttggacacaggacgctgtggtttctgagccaggtacaatgactcctttcgcagcctcccccgttgcccctctggatccactgcttaaatacggacgaggacagggccctgtctcctcagcttcaggcaccaccactgacctgggacagtgaatcgacaatgccgtcttctgtctcgtggggcatcctcctgctggcaggcctgtgctgcctggtccctgtctccctggctgaggatccccagggagatgctgcccagaagacagatacatcccaccatgatcaggatcacccaaccttcaacaagatcacccccaacctggctgagttcgccttcagcctataccgccagctggcacaccagtccaacagcaccaatatcttcttctccccagtgagcatcgctacagcctttgcaatgctctccctggggaccaaggctgacactcacgatgaaatcctggagggcctgaatttcaacctcacggagattccggaggctcagatccatgaaggcttccaggaactcctccgtaccctcaaccagccagacagccagctccagctgaccaccggcaatggcctgttcctcagcgagggcctgaagctagtggataagtttttggaggatgttaaaaagttgtaccactcagaagccttcactgtcaacttcggggacaccgaagaggccaagaaacagatcaacgattacgtggagaagggtactcaagggaaaattgtggatttggtcaaggagcttgacagagacacagtttttgctctggtgaattacatcttctttaaaggcaaatgggagagaccctttgaagtcaaggacaccgaggaagaggacttccacgtggaccaggcgaccaccgtgaaggtgcctatgatgaagcgtttaggcatgtttaacatccagcactgtaagaagctgtccagctgggtgctgctgatgaaatacctgggcaatgccaccgccatcttcttcctgcctgacgaggggaaactacagcacctggaaaatgaactcacccacgatatcatcaccaagttcctggaaaatgaagacagaaggtctgccagcttacatttacccaaactgtccattactggaacctatgatctgaagagcgtcctgggtcaactgggcatcactaaggtcttcagcaatggggctgacctctccggggtcacagaggaggcacccctgaagctctccaaggccgtgcataaggctgtgctgaccatcgacgagaaagggactgaagctgctggggccatgtttttagaggccatacccatgtctatcccccccgaggtcaagttcaacaaaccctttgtcttcttaatgattgaacaaaataccaagtctcccctcttcatgggaaaagtggtgaatcccacccaaaaataactgcctctcgctcctcaacccctcccctccatccctggccccctccctggatgacattaaagaagggttgagc

SEQ ID NO: 180460 - DNA, 643 bp, Homo sapiens; identical to SEQ ID NO: 180446
  Payload ID: 15539
  Gene Symbol: SERPINA1
  Gene Name: serpin peptidase inhibitor, clade A (alpha-1 antiproteinase, antitrypsin), member 1
  ENST ID: ENST00000629711
  CDS Start-End: 175-643

SEQ ID NO: 180461 - DNA, 583 bp, Homo sapiens; identical to SEQ ID NO: 180445
  Payload ID: 15539
  Gene Symbol: SERPINA1
  Gene Name: serpin peptidase inhibitor, clade A (alpha-1 antiproteinase, antitrypsin), member 1
  ENST ID: ENST00000625866
  CDS Start-End: 517-583

SEQ ID NO: 180462 - DNA, 1622 bp, Homo sapiens
  Payload ID: 15539
  Gene Symbol: SERPINA1
  Gene Name: serpin peptidase inhibitor, clade A (alpha-1 antiproteinase, antitrypsin), member 1
  ENST ID: ENST00000628155
  CDS Start-End: 266-1522
aggtacaatgactcctttcggtaagtgcagtggaagctgtacactgcccaggcaaagcgtccgggcagcgtaggcgggcgactcagatcccagccagtggacttagcccctgtttgctcctccgataactggggtgaccttggttaatattcaccagcagcctcccccgttgcccctctggatccactgcttaaatacggacgaggacagggccctgtctcctcagcttcaggcaccaccactgacctgggacagtgaatcgacaatgccgtcttctgtctcgtggggcatcctcctgctggcaggcctgtgctgcctggtccctgtctccctggctgaggatccccagggagatgctgcccagaagacagatacatcccaccatgatcaggatcacccaaccttcaacaagatcacccccaacctggctgagttcgccttcagcctataccgccagctggcacaccagtccaacagcaccaatatcttcttctccccagtgagcatcgctacagcctttgcaatgctctccctggggaccaaggctgacactcacgatgaaatcctggagggcctgaatttcaacctcacggagattccggaggctcagatccatgaaggcttccaggaactcctccgtaccctcaaccagccagacagccagctccagctgaccaccggcaatggcctgttcctcagcgagggcctgaagctagtggataagtttttggaggatgttaaaaagttgtaccactcagaagccttcactgtcaacttcggggacaccgaagaggccaagaaacagatcaacgattacgtggagaagggtactcaagggaaaattgtggatttggtcaaggagcttgacagagacacagtttttgctctggtgaattacatcttctttaaaggcaaatgggagagaccctttgaagtcaaggacaccgaggaagaggacttccacgtggaccaggcgaccaccgtgaaggtgcctatgatgaagcgtttaggcatgtttaacatccagcactgtaagaagctgtccagctgggtgctgctgatgaaatacctgggcaatgccaccgccatcttcttcctgcctgacgaggggaaactacagcacctggaaaatgaactcacccacgatatcatcaccaagttcctggaaaatgaagacagaaggtctgccagcttacatttacccaaactgtccattactggaacctatgatctgaagagcgtcctgggtcaactgggcatcactaaggtcttcagcaatggggctgacctctccggggtcacagaggaggcacccctgaagctctccaaggccgtgcataaggctgtgctgaccatcgacgagaaagggactgaagctgctggggccatgtttttagaggccatacccatgtctatcccccccgaggtcaagttcaacaaaccctttgtcttcttaatgattgaacaaaataccaagtctcccctcttcatgggaaaagtggtgaatcccacccaaaaataactgcctctcgctcctcaacccctcccctccatccctggccccctccctggatgacattaaagaagggttgagctggtccctgcctgcatgtgactgtaaa

SEQ ID NO: 180463 - DNA, 4978 bp, Homo sapiens
  Payload ID: 15540
  Gene Symbol: SERPINA10
  Gene Name: serpin peptidase inhibitor, clade A (alpha-1 antiproteinase, antitrypsin), member 10
  Uniprot ID: Q9UK55
  ENST ID: ENST00000261994
  CDS Start-End: 134-1468
gctgaaggttctgggctgcaaagctgaagctttggtttctgctctaaatgaaggacttttccaggacccaaggccacacactggaagtcttgcagctgaagggaggcactccttggcctccgcagccgatcacatgaaggtggtgccaagtctcctgctctccgtcctcctggcacaggtgtggctggtacccggcttggcccccagtcctcagtcgccagagaccccagcccctcagaaccagaccagcagggtagtgcaggctcccaaggaggaagaggaagatgagcaggaggccagcgaggagaaggccagtgaggaagagaaagcctggctgatggccagcaggcagcagcttgccaaggagacttcaaacttcggattcagcctgctgcgaaagatctccatgaggcacgatggcaacatggtcttctctccatttggcatgtccttggccatgacaggcttgatgctgggggccacagggccgactgaaacccagatcaagagagggctccacttgcaggccctgaagcccaccaagcccgggctcctgccttccctctttaagggactcagagagaccctctcccgcaacctggaactgggcctcacacaggggagttttgccttcatccacaaggattttgatgtcaaagagactttcttcaatttatccaagaggtattttgatacagagtgcgtgcctatgaattttcgcaatgcctcacaggccaaaaggctcatgaatcattacattaacaaagagactcgggggaaaattcccaaactgtttgatgagattaatcctgaaaccaaattaattcttgtggattacatcttgttcaaagggaaatggttgaccccatttgaccctgtcttcaccgaagtcgacactttccacctggacaagtacaagaccattaaggtgcccatgatgtacggtgcaggcaagtttgcctccacctttgacaagaattttcgttgtcatgtcctcaaactgccctaccaaggaaatgccaccatgctggtggtcctcatggagaaaatgggtgaccacctcgcccttgaagactacctgaccacagacttggtggagacatggctcagaaacatgaaaaccagaaacatggaagttttctttccgaagttcaagctagatcagaagtatgagatgcatgagctgcttaggcagatgggaatcagaagaatcttctcaccctttgctgaccttagtgaactctcagctactggaagaaatctccaagtatccagggttttacaaagaacagtgattgaagttgatgaaaggggcactgaggcagtggcaggaatcttgtcagaaattactgcttattccatgcctcctgtcatcaaagtggaccggccatttcatttcatgatctatgaagaaacctctggaatgcttctgtttctgggcagggtggtgaatccgactctcctataattcaggacacgcataagcacttcgtgctgtagtagatgctgaatctgaggtatcaaacacacacaggataccagcaatggatggcaggggagagtgttccttttgttcttaactagtttagggtgttctcaaataaatacagtagtccccacttatctgagggggatacattcaaagacccccagcagatgcctgaaacggtggacagtgctgaaccttatatatattttttcctacacatacatacctatgataaagtttaatttataaattaggcacagtaagagattaacaataataacaacattaagtaaaatgagttacttgaatgcaagcactgcaataccataacagtcaaactgattatagagaaggctactaagtgactcatgggcgaggagcatagacagtgtggagacattgggcaaggggagaattcacatcctgggtgggacagagcaggacaatgcaagattccatcccactactcagaatggcatgctgcttaagacttttagattgtttatttctggaatttttcatttaatgtttttggaccatggttgaccatggttaactgagactgcagaaagcaaaaccatggataagggaggactactacaaaagcattaaattgatacatattttttaagatgtttgtgcaatctgtctggtattttaagcttgtttctaagaaccttagttacttggctaaagactagctgggtagaatatcttttctctgttgctcacatattttcatttttaaaaagttgcagatgagaacactatgtcaagataaagcctttgggaggaacacatgtaaacattctccttgagtcatgtgcttctctctctttccttctctctggtgcaaaataagtgttttattttaatctattacggagtcatttcttgctgactgacatcagaagaaaatagctctaaccagtcctgatcacagcatctgcttccatggtgcatcaaatcgcttggcagaggcattggctgaatcacagatcatctagttcaataccttcattttacaaaggaaagaaagagggacccagaaacaggtccatattcttactttcatgggccctaggcacgtttaaccttgtagactcctccttccttcatgaagatatatatgttctatggctgcattggtagaaagatgaatatattcgtctttcaaagttgcatatctagcttcaaagttatatgtctagcatatggcaataagcaaaacaccttcatgggcccttacagtactgtcagccttgggcactgtgtcttctgcatctagtggataagtcataccttatataccagtgggaacaaaatacttgtccaaggtcttccagtgtggcaatggcagagtcagaagcctacctttcctgagtctagtctccaagccctttttactcttccttccatctaaaacatctgatggggaccaggtaaacagcatgcactacagctacccatgggggttaaacagaatataagcatgaactttgtcccagggtgaaaaggaaaatcgtaaatatccctgatcttccttaggcagttattttctgtcacagaaacagaaaagactatattcagagaatcctgaatagagctgatttacagtgtgaactatgttaactaaatgcctaattggatttctgtctgtctgctatctaatgtttaaaaaaacctaaaattcatttattgattagttgtttaatataattcagagtaatgtgaataggtaataatattaatatgcagtctaaatactgacttttcatcattccataacctggactgatgaaaagtcagtatttagactgcatattaataaaataaaattcattcctgtattcattccaagagtactaattgacacttatgaagggacaggcaattctaggccctagagggccaaagacagaggactaactctatctgacattcttaagtcaccttgtttgtgttcaattagtcagatttgtttgtggaaaaatagtagaaagaggaataaagtagcatccagtccaatttcccacttttaagagatgaaatctggaaaaataagtctgtgagagcacaatactcactgaaatcaatatggccaaacccagtaataaaaaggtacattattattgaaggattcatatagcatgcagataaaaaactcctgccttcttcccaccacatacactgcaaagcaacaacagcataataattgtatttaatatactactctttaaggtagaaaatggacctattctatattttaaatatactttttaatgttccctcacatttgctttaagaagttcctaagacactcagtttcagatttcccaagtacacaggcatgacagaaaaacgcagaccaataaaaaatgtaacttaccttacacaaatacatacacacaaattcagggtttccaaccgagcgggggaaatcttaacattgtagaagtcttcactatatatgtgtcgagtttttgtttttgtttttgtttttgttttgagacagagtcttgctctgtcacccaggctggagtgcagtggtgcgatctcagctcactgcaacctccacctcccgggttcgtgccattctcctgcctcagcctcccgagtagctgggactacaggcacctgccaccacgaccggctaattttttgtattttaagtagagatggggtttcactgtgttagtcaggatggtcttgatctcctgaccttgtgatctgcccgcctcggcctcccaaagtgctgggattacaggcatgagccaccacgcccggccaagtgtcgagtcttaaaaattgttcctacacagacacactcaaccacacgttctcacatatatatgctgtaacaactgagaacaggttactgacttaatctaattcattctatcttcattgtaaaacttccactccagctgaagagcctgtttcatttcaattcaaagatttctcatatatccactaattgtatggcaaaactgactcatctccagactaagatattcaagctcaggaagtcaaataatagaaatgattttttaaatgtgtaagaggttataaagaaaaactttatgtgctccttatttaacctctattaagtaaaatcctttatagacctatctccatttctgcagtaaaagtgagctctacagttagcttgtaaggctaactagtgaaattcctggacttgttcttaaaaatgcaagttttagtaattaacaaaatgatgatgaagatgtcccttttccctacaactacagatggagggagatttttctttgccatacaactagcttaaaggattaatttgataagttgttaaactgagaactttcacaaaagtatccatcttgtttttgatataaatggagatacatgtagttattcataactgtcagtaatttgctgtttatcctgtttctatatatctgtccttgagagtataattttaataaatatttcaaagattttaggaaa

SEQ ID NO: 180464 - DNA, 2451 bp, Homo sapiens
  Payload ID: 15540
  Gene Symbol: SERPINA10
  Gene Name: serpin peptidase inhibitor, clade A (alpha-1 antiproteinase, antitrypsin), member 10
  Uniprot ID: Q9UK55
  ENST ID: ENST00000393096
  CDS Start-End: 467-1801
ctggagtggggtaagaggcgaattatagacacaaggggctcctctgcaggaaggaggccaagggaaagaggcttgaaaggcttgatatttcacccaccaccactcactgccggagtaagcaggtctccccttcccagggctgaggggaggcagggatgtgtgctgtcccagggctgagaagtggcaggtgagctggtgattccttactgcccaggttctgtctaggaaggtgcgtcctcaccatgctggatggtgtcctagtccaggagcaccccctgagctcctggcctagactccaaagggttgggtagatgagcaaagactttacaaagaccttaggcgatatatgtccaggagcacccaggaattactgggctaccactgcagactgcaggacaagctccaagaacaggaaggaagtcttgcagctgaagggaggcactccttggcctccgcagccgatcacatgaaggtggtgccaagtctcctgctctccgtcctcctggcacaggtgtggctggtacccggcttggcccccagtcctcagtcgccagagaccccagcccctcagaaccagaccagcagggtagtgcaggctcccaaggaggaagaggaagatgagcaggaggccagcgaggagaaggccagtgaggaagagaaagcctggctgatggccagcaggcagcagcttgccaaggagacttcaaacttcggattcagcctgctgcgaaagatctccatgaggcacgatggcaacatggtcttctctccatttggcatgtccttggccatgacaggcttgatgctgggggccacagggccgactgaaacccagatcaagagagggctccacttgcaggccctgaagcccaccaagcccgggctcctgccttccctctttaagggactcagagagaccctctcccgcaacctggaactgggcctcacacaggggagttttgccttcatccacaaggattttgatgtcaaagagactttcttcaatttatccaagaggtattttgatacagagtgcgtgcctatgaattttcgcaatgcctcacaggccaaaaggctcatgaatcattacattaacaaagagactcgggggaaaattcccaaactgtttgatgagattaatcctgaaaccaaattaattcttgtggattacatcttgttcaaagggaaatggttgaccccatttgaccctgtcttcaccgaagtcgacactttccacctggacaagtacaagaccattaaggtgcccatgatgtacggtgcaggcaagtttgcctccacctttgacaagaattttcgttgtcatgtcctcaaactgccctaccaaggaaatgccaccatgctggtggtcctcatggagaaaatgggtgaccacctcgcccttgaagactacctgaccacagacttggtggagacatggctcagaaacatgaaaaccagaaacatggaagttttctttccgaagttcaagctagatcagaagtatgagatgcatgagctgcttaggcagatgggaatcagaagaatcttctcaccctttgctgaccttagtgaactctcagctactggaagaaatctccaagtatccagggttttacaaagaacagtgattgaagttgatgaaaggggcactgaggcagtggcaggaatcttgtcagaaattactgcttattccatgcctcctgtcatcaaagtggaccggccatttcatttcatgatctatgaagaaacctctggaatgcttctgtttctgggcagggtggtgaatccgactctcctataattcaggacacgcataagcacttcgtgctgtagtagatgctgaatctgaggtatcaaacacacacaggataccagcaatggatggcaggggagagtgttccttttgttcttaactagtttagggtgttctcaaataaatacagtagtccccacttatctgagggggatacattcaaagacccccagcagatgcctgaaacggtggacagtgctgaaccttatatatattttttcctacacatacatacctatgataaagtttaatttataaattaggcacagtaagagattaacaataataacaacattaagtaaaatgagttacttgaatgcaagcactgcaataccataacagtcaaactgattatagagaaggctactaagtgactcatgggcgaggagcatagacagtgtggagacattgggcaaggggagaattcacatcctgggtgggacagagcaggacaatgcaagattccatcccactactcagaatggcatgctgcttaagacttttagattgtttatttctggaatttttcatttaatgtttttggaccatggttgaccatggttaactgagactgcagaaagcaaaaccatggataagggaggactactacaaaagcattaaattgatacatatttttt

SEQ ID NO: 180465 - DNA, 2526 bp, Homo sapiens
  Payload ID: 15540
  Gene Symbol: SERPINA10
  Gene Name: serpin peptidase inhibitor, clade A (alpha-1 antiproteinase, antitrypsin), member 10
  ENST ID: ENST00000554723
  CDS Start-End: 420-1874
gagggctgtgtggctgagcagtgcaaagacctccatcctacactccacagggactgtacatacagattgggagctggagtggggtaagaggcgaattatagacacaaggggctcctctgcaggaaggaggccaagggaaagaggcttgaaaggcttgatatttcacccaccaccactcactgccggagtaagcaggtctccccttcccagggctgaggggaggcagggatgtgtgctgtcccagggctgagaagtggcaggtgagctggtgattccttactgcccaggttctgtctaggaaggtgcgtcctcaccatgctggatggtgtcctagtccaggagcaccccctgagctcctggcctagactccaaagggttgggtagatgagcaaagactttacaaagaccttaggcgatatatgtccaggagcacccaggaattactgggctaccactgcagactgcaggacaagctccaagaacaggaaggaagtcttgcagctgaagggaggcactccttggcctccgcagccgatcacatgaaggtggtgccaagtctcctgctctccgtcctcctggcacaggtgtggctggtacccggcttggcccccagtcctcagtcgccagagaccccagcccctcagaaccagaccagcagggtagtgcaggctcccaaggaggaagaggaagatgagcaggaggccagcgaggagaaggccagtgaggaagagaaagcctggctgatggccagcaggcagcagcttgccaaggagacttcaaacttcggattcagcctgctgcgaaagatctccatgaggcacgatggcaacatggtcttctctccatttggcatgtccttggccatgacaggcttgatgctgggggccacagggccgactgaaacccagatcaagagagggctccacttgcaggccctgaagcccaccaagcccgggctcctgccttccctctttaagggactcagagagaccctctcccgcaacctggaactgggcctcacacaggggagttttgccttcatccacaaggattttgatgtcaaagagactttcttcaatttatccaagaggtattttgatacagagtgcgtgcctatgaattttcgcaatgcctcacaggccaaaaggctcatgaatcattacattaacaaagagactcgggggaaaattcccaaactgtttgatgagattaatcctgaaaccaaattaattcttgtggattacatcttgttcaaagggaaatggttgaccccatttgaccctgtcttcaccgaagtcgacactttccacctggacaagtacaagaccattaaggtgcccatgatgtacggtgcaggcaagtttgcctccacctttgacaagaattttcgttgtcatgtcctcaaactgccctaccaaggaaatgccaccatgctggtggtcctcatggagaaaatgggtgaccacctcgcccttgaagactacctgaccacagacttggtggagacatggctcagaaacatgaaaaccagaaacatggaagttttctttccgaagttcaagctagatcagaagtatgagatgcatgagctgcttaggcagatgggaatcagaagaatcttctcaccctttgctgaccttagtgaactctcagctactggaagaaatctccaagtatccagggttttacaaagaacagtgattgaagttgatgaaaggggcactgaggcagtggcaggaatcttgtcagaaattactgcttattccatgcctcctgtcatcaaagtggaccggccatttcatttcatgatctatgaagaaacctctggaatgcttctgtttctgggcagggtggtgaatccgactctcctataattcaggacacgcataagcacttcgtgctgtagtagatgctgaatctgaggtatcaaacacacacaggataccagcaatggatggcaggggagagtgttccttttgttcttaactagtttagggtgttctcaaataaatacagtagtccccacttatctgagggggatacattcaaagacccccagcagatgcctgaaacggtggacagtgctgaaccttatatatattttttcctacacatacatacctatgataaagtttaatttataaattaggcacagtaagagattaacaataataacaacattaagtaaaatgagttacttgaatgcaagcactgcaataccataacagtcaaactgattatagagaaggctactaagtgactcatgggcgaggagcatagacagtgtggagacattgggcaaggggagaattcacatcctgggtgggacagagcaggacaatgcaagattccatcccactactcagaatggcatgctgcttaagacttttagattgtttatttctggaatttttcatttaatgtttttggaccatggttgaccatggttaactgagactgcagaaagcaaaaccatggataagggaggactactacaaaagcattaaattgatacatattttttaa

SEQ ID NO: 180466 - DNA, 2000 bp, Homo sapiens
  Payload ID: 15540
  Gene Symbol: SERPINA10
  Gene Name: serpin peptidase inhibitor, clade A (alpha-1 antiproteinase, antitrypsin), member 10
  Uniprot ID: Q9UK55
  ENST ID: ENST00000554173
  CDS Start-End: 56-1390
cacaggaagtcttgcagctgaagggaggcactccttggcctccgcagccgatcacatgaaggtggtgccaagtctcctgctctccgtcctcctggcacaggtgtggctggtacccggcttggcccccagtcctcagtcgccagagaccccagcccctcagaaccagaccagcagggtagtgcaggctcccaaggaggaagaggaagatgagcaggaggccagcgaggagaaggccagtgaggaagagaaagcctggctgatggccagcaggcagcagcttgccaaggagacttcaaacttcggattcagcctgctgcgaaagatctccatgaggcacgatggcaacatggtcttctctccatttggcatgtccttggccatgacaggcttgatgctgggggccacagggccgactgaaacccagatcaagagagggctccacttgcaggccctgaagcccaccaagcccgggctcctgccttccctctttaagggactcagagagaccctctcccgcaacctggaactgggcctcacacaggggagttttgccttcatccacaaggattttgatgtcaaagagactttcttcaatttatccaagaggtattttgatacagagtgcgtgcctatgaattttcgcaatgcctcacaggccaaaaggctcatgaatcattacattaacaaagagactcgggggaaaattcccaaactgtttgatgagattaatcctgaaaccaaattaattcttgtggattacatcttgttcaaagggaaatggttgaccccatttgaccctgtcttcaccgaagtcgacactttccacctggacaagtacaagaccattaaggtgcccatgatgtacggtgcaggcaagtttgcctccacctttgacaagaattttcgttgtcatgtcctcaaactgccctaccaaggaaatgccaccatgctggtggtcctcatggagaaaatgggtgaccacctcgcccttgaagactacctgaccacagacttggtggagacatggctcagaaacatgaaaaccagaaacatggaagttttctttccgaagttcaagctagatcagaagtatgagatgcatgagctgcttaggcagatgggaatcagaagaatcttctcaccctttgctgaccttagtgaactctcagctactggaagaaatctccaagtatccagggttttacaaagaacagtgattgaagttgatgaaaggggcactgaggcagtggcaggaatcttgtcagaaattactgcttattccatgcctcctgtcatcaaagtggaccggccatttcatttcatgatctatgaagaaacctctggaatgcttctgtttctgggcagggtggtgaatccgactctcctataattcaggacacgcataagcacttcgtgctgtagtagatgctgaatctgaggtatcaaacacacacaggataccagcaatggatggcaggggagagtgttccttttgttcttaactagtttagggtgttctcaaataaatacagtagtccccacttatctgagggggatacattcaaagacccccagcagatgcctgaaacggtggacagtgctgaaccttatatatattttttcctacacatacatacctatgataaagtttaatttataaattaggcacagtaagagattaacaataataacaacattaagtaaaatgagttacttgaatgcaagcactgcaataccataacagtcaaactgattatagagaaggctactaagtgactcatgggcgaggagcatagacagtgtggagacattgggcaaggggagaattcacatcctgggtgggacagagcaggacaatgcaagattccatcccactactcagaatggcatgctgcttaagacttttagattgtttatttctggaatttttcatttaatgtttttggaccatggttgaccatggttaactgagactgcagaaagcaaaaccatggataagg

SEQ ID NO: 180467 - DNA, 2526 bp, Homo sapiens; identical to SEQ ID NO: 180465
  Payload ID: 15540
  Gene Symbol: SERPINA10
  Gene Name: serpin peptidase inhibitor, clade A (alpha-1 antiproteinase, antitrypsin), member 10
  ENST ID: ENST00000616057
  CDS Start-End: 420-1874

SEQ ID NO: 180468 - DNA, 4973 bp, Homo sapiens
  Payload ID: 15540
  Gene Symbol: SERPINA10
  Gene Name: serpin peptidase inhibitor, clade A (alpha-1 antiproteinase, antitrypsin), member 10
  Uniprot ID: Q9UK55
  ENST ID: ENST00000614630
  CDS Start-End: 134-1468
gctgaaggttctgggctgcaaagctgaagctttggtttctgctctaaatgaaggacttttccaggacccaaggccacacactggaagtcttgcagctgaagggaggcactccttggcctccgcagccgatcacatgaaggtggtgccaagtctcctgctctccgtcctcctggcacaggtgtggctggtacccggcttggcccccagtcctcagtcgccagagaccccagcccctcagaaccagaccagcagggtagtgcaggctcccaaggaggaagaggaagatgagcaggaggccagcgaggagaaggccagtgaggaagagaaagcctggctgatggccagcaggcagcagcttgccaaggagacttcaaacttcggattcagcctgctgcgaaagatctccatgaggcacgatggcaacatggtcttctctccatttggcatgtccttggccatgacaggcttgatgctgggggccacagggccgactgaaacccagatcaagagagggctccacttgcaggccctgaagcccaccaagcccgggctcctgccttccctctttaagggactcagagagaccctctcccgcaacctggaactgggcctcacacaggggagttttgccttcatccacaaggattttgatgtcaaagagactttcttcaatttatccaagaggtattttgatacagagtgcgtgcctatgaattttcgcaatgcctcacaggccaaaaggctcatgaatcattacattaacaaagagactcgggggaaaattcccaaactgtttgatgagattaatcctgaaaccaaattaattcttgtggattacatcttgttcaaagggaaatggttgaccccatttgaccctgtcttcaccgaagtcgacactttccacctggacaagtacaagaccattaaggtgcccatgatgtacggtgcaggcaagtttgcctccacctttgacaagaattttcgttgtcatgtcctcaaactgccctaccaaggaaatgccaccatgctggtggtcctcatggagaaaatgggtgaccacctcgcccttgaagactacctgaccacagacttggtggagacatggctcagaaacatgaaaaccagaaacatggaagttttctttccgaagttcaagctagatcagaagtatgagatgcatgagctgcttaggcagatgggaatcagaagaatcttctcaccctttgctgaccttagtgaactctcagctactggaagaaatctccaagtatccagggttttacaaagaacagtgattgaagttgatgaaaggggcactgaggcagtggcaggaatcttgtcagaaattactgcttattccatgcctcctgtcatcaaagtggaccggccatttcatttcatgatctatgaagaaacctctggaatgcttctgtttctgggcagggtggtgaatccgactctcctataattcaggacacgcataagcacttcgtgctgtagtagatgctgaatctgaggtatcaaacacacacaggataccagcaatggatggcaggggagagtgttccttttgttcttaactagtttagggtgttctcaaataaatacagtagtccccacttatctgagggggatacattcaaagacccccagcagatgcctgaaacggtggacagtgctgaaccttatatatattttttcctacacatacatacctatgataaagtttaatttataaattaggcacagtaagagattaacaataataacaacattaagtaaaatgagttacttgaatgcaagcactgcaataccataacagtcaaactgattatagagaaggctactaagtgactcatgggcgaggagcatagacagtgtggagacattgggcaaggggagaattcacatcctgggtgggacagagcaggacaatgcaagattccatcccactactcagaatggcatgctgcttaagacttttagattgtttatttctggaatttttcatttaatgtttttggaccatggttgaccatggttaactgagactgcagaaagcaaaaccatggataagggaggactactacaaaagcattaaattgatacatattttttaagatgtttgtgcaatctgtctggtattttaagcttgtttctaagaaccttagttacttggctaaagactagctgggtagaatatcttttctctgttgctcacatattttcatttttaaaaagttgcagatgagaacactatgtcaagataaagcctttgggaggaacacatgtaaacattctccttgagtcatgtgcttctctctctttccttctctctggtgcaaaataagtgttttattttaatctattacggagtcatttcttgctgactgacatcagaagaaaatagctctaaccagtcctgatcacagcatctgcttccatggtgcatcaaatcgcttggcagaggcattggctgaatcacagatcatctagttcaataccttcattttacaaaggaaagaaagagggacccagaaacaggtccatattcttactttcatgggccctaggcacgtttaaccttgtagactcctccttccttcatgaagatatatatgttctatggctgcattggtagaaagatgaatatattcgtctttcaaagttgcatatctagcttcaaagttatatgtctagcatatggcaataagcaaaacaccttcatgggcccttacagtactgtcagccttgggcactgtgtcttctgcatctagtggataagtcataccttatataccagtgggaacaaaatacttgtccaaggtcttccagtgtggcaatggcagagtcagaagcctacctttcctgagtctagtctccaagccctttttactcttccttccatctaaaacatctgatggggaccaggtaaacagcatgcactacagctacccatgggggttaaacagaatataagcatgaactttgtcccagggtgaaaaggaaaatcgtaaatatccctgatcttccttaggcagttattttctgtcacagaaacagaaaagactatattcagagaatcctgaatagagctgatttacagtgtgaactatgttaactaaatgcctaattggatttctgtctgtctgctatctaatgtttaaaaaaacctaaaattcatttattgattagttgtttaatataattcagagtaatgtgaataggtaataatattaatatgcagtctaaatactgacttttcatcattccataacctggactgatgaaaagtcagtatttagactgcatattaataaaataaaattcattcctgtattcattccaagagtactaattgacacttatgaagggacaggcaattctaggccctagagggccaaagacagaggactaactctatctgacattcttaagtcaccttgtttgtgttcaattagtcagatttgtttgtggaaaaatagtagaaagaggaataaagtagcatccagtccaatttcccacttttaagagatgaaatctggaaaaataagtctgtgagagcacaatactcactgaaatcaatatggccaaacccagtaataaaaaggtacattattattgaaggattcatatagcatgcagataaaaaactcctgccttcttcccaccacatacactgcaaagcaacaacagcataataattgtatttaatatactactctttaaggtagaaaatggacctattctatattttaaatatactttttaatgttccctcacatttgctttaagaagttcctaagacactcagtttcagatttcccaagtacacaggcatgacagaaaaacgcagaccaataaaaaatgtaacttaccttacacaaatacatacacacaaattcagggtttccaaccgagcgggggaaatcttaacattgtagaagtcttcactatatatgtgtcgagtttttgtttttgtttttgtttttgttttgagacagagtcttgctctgtcacccaggctggagtgcagtggtgcgatctcagctcactgcaacctccacctcccgggttcgtgccattctcctgcctcagcctcccgagtagctgggactacaggcacctgccaccacgaccggctaattttttgtattttaagtagagatggggtttcactgtgttagtcaggatggtcttgatctcctgaccttgtgatctgcccgcctcggcctcccaaagtgctgggattacaggcatgagccaccacgcccggccaagtgtcgagtcttaaaaattgttcctacacagacacactcaaccacacgttctcacatatatatgctgtaacaactgagaacaggttactgacttaatctaattcattctatcttcattgtaaaacttccactccagctgaagagcctgtttcatttcaattcaaagatttctcatatatccactaattgtatggcaaaactgactcatctccagactaagatattcaagctcaggaagtcaaataatagaaatgattttttaaatgtgtaagaggttataaagaaaaactttatgtgctccttatttaacctctattaagtaaaatcctttatagacctatctccatttctgcagtaaaagtgagctctacagttagcttgtaaggctaactagtgaaattcctggacttgttcttaaaaatgcaagttttagtaattaacaaaatgatgatgaagatgtcccttttccctacaactacagatggagggagatttttctttgccatacaactagcttaaaggattaatttgataagttgttaaactgagaactttcacaaaagtatccatcttgtttttgatataaatggagatacatgtagttattcataactgtcagtaatttgctgtttatcctgtttctatatatctgtccttgagagtataattttaataaatatttcaaagatttta

SEQ ID NO: 180469 - DNA, 1476 bp, Homo sapiens
  Payload ID: 15541
  Gene Symbol: SERPINA11
  Gene Name: serpin peptidase inhibitor, clade A (alpha-1 antiproteinase, antitrypsin), member 11
  Uniprot ID: Q86U17
  ENST ID: ENST00000334708
  CDS Start-End: 66-1334
ttcctgtgggtagaggtgatgcagtgctgaagacctgggcccctgctcagtgcctttgctctagaatgggtccagcttggctttggctactgggaacagggatcctggcctctgtccactgtcagccccttcttgcccatggagataaaagtctgcaggggcctcaaccccccaggcatcagctctcagagccagcccccgcctaccacagaatcacacccaccattaccaattttgctttgcgtttgtataaagagctggcagcagacgcccccggaaacatcttcttctcgccagtgagcatctccaccaccctggccctgctctctcttggggcccaagctaacacctcagctctgatcctggagggcctgggattcaacctcacagaaacccctgaagccgacatccaccagggcttccggagcctcctccacacccttgccctgcccagccccaaactcgaactaaaagtaggaaactccctgttcctagacaagcgactaaagcctcggcagcactatttggacagcatcaaggagctttatggagcttttgctttttctgccaacttcacagattctgttacaactgggaggcagattaatgactatttgagaaggcaaacatacgggcaagtcgtggactgcctcccggagttcagccaggacacgttcatggttcttgccaattacatcttcttcaaagccaagtggaagcaccctttcagtcgctaccagacccagaagcaggaaagtttctttgtggatgagaggacttctctccaggtccccatgatgcaccaaaaggaaatgcacagattcctctatgaccaggatttggcttgcaccgtcctccagatagaatacagaggaaatgccttggcgctgctggtcctccctgacccggggaaaatgaagcaggtggaggctgctctgcagccacagaccctgagaaaatggggccaattgctcctgcccagtctgttggatttgcacttgccaaggttttcaatttctggaacatataacctggaagacatacttccccaaattggtctcaccaacatactcaacttagaagctgacttctcaggagtcactgggcagctcaacaaaaccatctccaaggtgtcacacaaggcgatggtggacatgagtgagaaggggaccgaggccggggctgcttcaggcctcctctcccagcccccatctctgaacaccatgtcagacccacatgcccacttcaacaggcctttcctcttgctcctttgggaggtcaccacccagagcttactcttcctgggaaaagttgtcaacccagttgcagggtaaccatggtgggaggccaggagttatcttatctcatcctggaccaaacagataggccagaaccagcctgcatcctggggctgctatgtggttcagttaatcagtgtgccaagattctaataaagttgaccttgggttctgtgaa

SEQ ID NO: 180470 - DNA, 2061 bp, Homo sapiens
  Payload ID: 15542
  Gene Symbol: SERPINA12
  Gene Name: serpin peptidase inhibitor, clade A (alpha-1 antiproteinase, antitrypsin), member 12
  Uniprot ID: Q8IW75
  ENST ID: ENST00000341228
  CDS Start-End: 797-2041
ctcccaggtgcctggcagagagtcctcaccagccccctgccggatgtctggctggcatctgaggggactgaacatggcaagaagcaaaacagcagcacaagaaaccagtttcttcatctgaaaccgagcaggctctactccagaacagaacccacagtcccaggcgctgggccttcttcttaagttgggaaatcactcatccccaggagaaaaaaagagcaaaagcttccagtactggggatgtggggagaggttttttaaaaatatcagcccaacatatgggaaaatatgggatgcaggcatccccaggtgtcaagcgtccagatccgtagacacactgggacgatggtgatcagtatcactccctctgactcatcggccctacagggaagacaccatgctggtgcacagtcggtgccaaacccgcgtttgtaaatgaataagtgttgctgccctggtggaagcccagctcatgtggaggaagccagcttgcagagagagcaagaacagagccagcacacacattggagcaaaggcaagggcagatggaaagttctggcggcatcatgccaaggctcccatccgaggcctccctgaaccccactctctcggcgccaccttggatgctgcgggctggtacattccccacttgcaaaactctgtggggctgggttcctctcttttctttccaaatatcccaggaagtggatggttttatccaaattcagcagacgagtaaaaagagtcttcgggaggtgcaatagctttctaggaatgaggatattcttcaaggaaaatgaaccccacactaggcctggccatttttctggctgttctcctcacggtgaaaggtcttctaaagccgagcttctcaccaaggaattataaagctttgagcgaggtccaaggatggaagcaaaggatggcagccaaggagcttgcaaggcagaacatggacttaggctttaagctgctcaagaagctggccttttacaaccctggcaggaacatcttcctatcccccttgagcatctctacagctttctccatgctgtgcctgggtgcccaggacagcaccctggacgagatcaagcaggggttcaacttcagaaagatgccagaaaaagatcttcatgagggcttccattacatcatccacgagctgacccagaagacccaggacctcaaactgagcattgggaacacgctgttcattgaccagaggctgcagccacagcgtaagtttttggaagatgccaagaacttttacagtgccgaaaccatccttaccaactttcagaatttggaaatggctcagaagcagatcaatgactttatcagtcaaaaaacccatgggaaaattaacaacctgatcgagaatatagaccccggcactgtgatgcttcttgcaaattatattttctttcgagccaggtggaaacatgagtttgatccaaatgtaactaaagaggaagatttctttctggagaaaaacagttcagtcaaggtgcccatgatgttccgtagtggcatataccaagttggctatgacgataagctctcttgcaccatcctggaaataccctaccagaaaaatatcacagccatcttcatccttcctgatgagggcaagctgaagcacttggagaagggattgcaggtggacactttctccagatggaaaacattactgtcacgcagggtcgtagacgtgtctgtacccagactccacatgacgggcaccttcgacctgaagaagactctctcctacataggtgtctccaaaatctttgaggaacatggtgatctcaccaagatcgcccctcatcgcagcctgaaagtgggcgaggctgtgcacaaggctgagctgaagatggatgagaggggtacggaaggggccgctggcaccggagcacagactctgcccatggagacaccactcgtcgtcaagatagacaaaccctatctgctgctgatttacagcgagaaaataccttccgtgctcttcctgggaaagattgttaaccctattggaaaataaaggagaattcctgcttgcca

SEQ ID NO: 180471 - DNA, 1497 bp, Homo sapiens
  Payload ID: 15542
  Gene Symbol: SERPINA12
  Gene Name: serpin peptidase inhibitor, clade A (alpha-1 antiproteinase, antitrypsin), member 12
  Uniprot ID: Q8IW75
  ENST ID: ENST00000556881
  CDS Start-End: 224-1468
ggccttactcttccaagaggccatggaagtataaataataaagcaagaaaggcagatgcatttggctggctcagtggacttctgaatgtactgtgagtatgagaccttcccttccaaaagatccggtgcttcttgtctattccacacgaagcttgcttcagatcgagggaggatgtagcactgtccacaggtctactactcaacaggatattcttcaaggaaaatgaaccccacactaggcctggccatttttctggctgttctcctcacggtgaaaggtcttctaaagccgagcttctcaccaaggaattataaagctttgagcgaggtccaaggatggaagcaaaggatggcagccaaggagcttgcaaggcagaacatggacttaggctttaagctgctcaagaagctggccttttacaaccctggcaggaacatcttcctatcccccttgagcatctctacagctttctccatgctgtgcctgggtgcccaggacagcaccctggacgagatcaagcaggggttcaacttcagaaagatgccagaaaaagatcttcatgagggcttccattacatcatccacgagctgacccagaagacccaggacctcaaactgagcattgggaacacgctgttcattgaccagaggctgcagccacagcgtaagtttttggaagatgccaagaacttttacagtgccgaaaccatccttaccaactttcagaatttggaaatggctcagaagcagatcaatgactttatcagtcaaaaaacccatgggaaaattaacaacctgatcgagaatatagaccccggcactgtgatgcttcttgcaaattatattttctttcgagccaggtggaaacatgagtttgatccaaatgtaactaaagaggaagatttctttctggagaaaaacagttcagtcaaggtgcccatgatgttccgtagtggcatataccaagttggctatgacgataagctctcttgcaccatcctggaaataccctaccagaaaaatatcacagccatcttcatccttcctgatgagggcaagctgaagcacttggagaagggattgcaggtggacactttctccagatggaaaacattactgtcacgcagggtcgtagacgtgtctgtacccagactccacatgacgggcaccttcgacctgaagaagactctctcctacataggtgtctccaaaatctttgaggaacatggtgatctcaccaagatcgcccctcatcgcagcctgaaagtgggcgaggctgtgcacaaggctgagctgaagatggatgagaggggtacggaaggggccgctggcaccggagcacagactctgcccatggagacaccactcgtcgtcaagatagacaaaccctatctgctgctgatttacagcgagaaaataccttccgtgctcttcctgggaaagattgttaaccctattggaaaataaaggagaattcctgcttgccacagaccccg

SEQ ID NO: 180472 - DNA, 1485 bp, Homo sapiens
  Payload ID: 15543
  Gene Symbol: SERPINA2
  Gene Name: serpin peptidase inhibitor, clade A (alpha-1 antiproteinase, antitrypsin), member 2 (gene/pseudogene)
  ENST ID: ENST00000616052
  CDS Start-End: 144-1409
agaacgccctactttaccagtgaggggatgatggggctggaagagggaaggaatgaaaggagtgtgaaggaagcgccaccaaggagagctgtggaagcccaacccaaagaccgcacctgggatgtcgggaagggccaaggacaatgccattctctgtctcatggggcatcctcctgctggcaggcctgtgctgcctggtccccagctccctggttgaggatccccaggaagatgctgcccaaaagacggatacatcccaccatgatcaaggggactgggaggaccttgcttgccagaagatctcctataacgtcaccgacctcgcctttgatttgtacaaagagctggctgatctatcacaaaccagcaatgtcttagtcaccccaacaagcgtggctatggcctttgcaatgctctccctggggaccaaggctgacactcgcacagagatcctggaaggcctgaatgtcaacctcacagagacgcctgaggccaagatccacgaatgcttccagcaagttctccaagccctcagcaggccagacacccggctccagctgaccaccggcagtagcctgtttgttaacaagagtatgaagctagtggacacgtttttggaggataccaagaagctgtaccactcagaagcctcttccatcaacttcagggacaccgaggaggccaaagagcagatcaacaattatgtggagaaaagaactggaagaaaagtagtggatttggtcaaacacctgaaaaaagacacaagtcttgccctggtggattacatttcctttcacggcaagtggaaagataaattcaaggctgagcacattatggtagagggcttccatgtggatgataagaccatcatcagagtgcctatgataaaccacctgggtagatttgacatccaccgggacagggagttatccagctgggtgctggcacagcactatgtggggaacgccactgccttcttcatcctgcccgatccaaagaagatgtggcagttggaagaaaaattgacctacagccaccttgaaaatatccagagagcctttgacataaggtctatcaatctacattttcccaaactgtccatttctggaacctacaaactcaagagagtccttaggaatctgggcatcaccaagatcttcagcaacgaggccgacctctctggagtcagtcaggaggcacccctgaagctctccaaggctgtgcatgtggctgtgctcaccattgatgagaaagggaccgaagccaccggagccccccatctggaggagaaggcctggtctaagtatcagacagtcatgttcaaccggcccttcctggtcatcatcaaggatgacatcaccaactttccgctcttcattggaaaagtggtgaatcccacccaaaaataactggctgtcactcctcagcccctcccctccacccctggccccctccctggatgacattaaagaaaggctgaattgc

SEQ ID NO: 180473 - DNA, 1266 bp, Homo sapiens
  Payload ID: 15543
  Gene Symbol: SERPINA2
  Gene Name: serpin peptidase inhibitor, clade A (alpha-1 antiproteinase, antitrypsin), member 2 (gene/pseudogene)
  ENST ID: ENST00000613989
  CDS Start-End: 1-1266
atgccattctctgtctcatggggcatcctcctgctggcaggcctgtgctgcctggtccccagctccctggttgaggatccccaggaagatgctgcccaaaagacggatacatcccaccatgatcaaggggactgggaggaccttgcttgccagaagatctcctataacgtcaccgacctcgcctttgatttgtacaaagagctggctgatctatcacaaaccagcaatgtcttagtcaccccaacaagcgtggctatggcctttgcaatgctctccctggggaccaaggctgacactcgcacagagatcctggaaggcctgaatgtcaacctcacagagacgcctgaggccaagatccacgaatgcttccagcaagttctccaagccctcagcaggccagacacccggctccagctgaccaccggcagtagcctgtttgttaacaagagtatgaagctagtggacacgtttttggaggataccaagaagctgtaccactcagaagcctcttccatcaacttcagggacaccgaggaggccaaagagcagatcaacaattatgtggagaaaagaactggaagaaaagtagtggatttggtcaaacacctgaaaaaagacacaagtcttgccctggtggattacatttcctttcacggcaagtggaaagataaattcaaggctgagcacattatggtagagggcttccatgtggatgataagaccatcatcagagtgcctatgataaaccacctgggtagatttgacatccaccgggacagggagttatccagctgggtgctggcacagcactatgtggggaacgccactgccttcttcatcctgcccgatccaaagaagatgtggcagttggaagaaaaattgacctacagccaccttgaaaatatccagagagcctttgacataaggtctatcaatctacattttcccaaactgtccatttctggaacctacaaactcaagagagtccttaggaatctgggcatcaccaagatcttcagcaacgaggccgacctctctggagtcagtcaggaggcacccctgaagctctccaaggctgtgcatgtggctgtgctcaccattgatgagaaagggaccgaagccaccggagccccccatctggaggagaaggcctggtctaagtatcagacagtcatgttcaaccggcccttcctggtcatcatcaaggatgacatcaccaactttccgctcttcattggaaaagtggtgaatcccacccaaaaataa

SEQ ID NO: 180474 - DNA, 931 bp, Homo sapiens
  Payload ID: 15543
  Gene Symbol: SERPINA2
  Gene Name: serpin peptidase inhibitor, clade A (alpha-1 antiproteinase, antitrypsin), member 2 (gene/pseudogene)
  ENST ID: ENST00000553483
  CDS Start-End: 1-931
ataccattctctgtctcatggggcgtcctcctgctggcaggcctgtgctgcctggtccccagctccctggttgaggatccccaggaagatgctgcccaaaagacggatacatcccaccatgatcaaggggactgggaggaccttgcttgccagaagatctcctataacgtcaccgacctcgcctttgatttgtacaaagagctggctgatctatcacaaaccagcaatgtcttagtcaccccaacaagcgtggctatggcctttgcaatgctctccctggggaccaaggctgacactcgcacagagatcctggaaggcctgaatgtcaacctcacagagacgcctgaggccaagatccacgaatgcttccagcaagttctccaagccctcagcaggccagacacccggctccagctgaccaccggcagtagcctgtttgttaacaagagtatgaagctagtggacacgtttttggaggataccaagaagctgtaccactcagaagcctcttccatcaacttcagggacaccgaggaggccaaagagcagatcaacaattatgtggagaaaagaactggaagaaaagtagtggatttggtcaaacacctgaaaaaagacacaagtcttgccctggtggattacatttcctttcacggcaagtggaaagataaattcaaggctgagcgcattatggtagagggcttccatgtggatgataagaccatcatcagagtgcctatgataaaccacctgggtagatttgacatccaccgggacagggagttatccagctgggtgctggcacagcactatgtggggaacgccactgccttcttcatcctgcccgatccaaagaagatgtggcagttggaagaaaaattgacctacagccaccttgaaaatatccagagagcctttgacataaggtgat

SEQ ID NO: 180475 - DNA, 474 bp, Homo sapiens
  Payload ID: 15543
  Gene Symbol: SERPINA2
  Gene Name: serpin peptidase inhibitor, clade A (alpha-1 antiproteinase, antitrypsin), member 2 (gene/pseudogene)
  ENST ID: ENST00000627359
  CDS Start-End: 1-195
gtcaaacacctgaaaaaagacacaagtcttgccctggtggattacatttcctttcacggtctatcaatctacattttcccaaactgtccatttctggaacctacaaactcaagagagtccttaggaatctgggcatcaccaagatcttcagcaacgaggccgacctctctggagtcagtcaggaggcacccctgaagctctccaaggctgtgcatgtggctgtgctcaccattgatgagaaagggaccgaagccaccggagccccccatctggaggagaaggcctggtctaagtatcagacagtcatgttcaaccggcccttcctggtcatcatcaaggatgacatcaccaactttccgctcttcattggaaaagtggtgaatcccacccaaaaataactggctgtcactcctcagcccctcccctccacccctggccccctccctggatgacattaaagaaaggctgaattgc

SEQ ID NO: 180476 - DNA, 1581 bp, Homo sapiens
  Payload ID: 15544
  Gene Symbol: SERPINA3
  Gene Name: serpin peptidase inhibitor, clade A (alpha-1 antiproteinase, antitrypsin), member 3
  Uniprot ID: P01011
  ENST ID: ENST00000393080
  CDS Start-End: 69-1340
aaaatccactactccagacagacggctttggaatccaccagctacatccagctccctgagagttgagaatggagagaatgttacctctcctggctctggggctcttggcggctgggttctgccctgctgtcctctgccaccctaacagcccacttgacgaggagaatctgacccaggagaaccaagaccgagggacacacgtggacctcggattagcctccgccaacgtggacttcgctttcagcctgtacaagcagttagtcctgaaggcccctgataagaatgtcatcttctccccactgagcatctccaccgccttggccttcctgtctctgggggcccataataccaccctgacagagattctcaaaggcctcaagttcaacctcacggagacttctgaggcagaaattcaccagagcttccagcacctcctgcgcaccctcaatcagtccagcgatgagctgcagctgagtatgggaaatgccatgtttgtcaaagagcaactcagtctgctggacaggttcacggaggatgccaagaggctgtatggctccgaggcctttgccactgactttcaggactcagctgcagctaagaagctcatcaacgactacgtgaagaatggaactagggggaaaatcacagatctgatcaaggaccttgactcgcagacaatgatggtcctggtgaattacatcttctttaaagccaaatgggagatgccctttgacccccaagatactcatcagtcaaggttctacttgagcaagaaaaagtgggtaatggtgcccatgatgagtttgcatcacctgactataccttacttccgggacgaggagctgtcctgcaccgtggtggagctgaagtacacaggcaatgccagcgcactcttcatcctccctgatcaagacaagatggaggaagtggaagccatgctgctcccagagaccctgaagcggtggagagactctctggagttcagagagataggtgagctctacctgccaaagttttccatctcgagggactataacctgaacgacatacttctccagctgggcattgaggaagccttcaccagcaaggctgacctgtcagggatcacaggggccaggaacctagcagtctcccaggtggtccataaggctgtgcttgatgtatttgaggagggcacagaagcatctgctgccacagcagtcaaaatcaccctcctttctgcattagtggagacaaggaccattgtgcgtttcaacaggcccttcctgatgatcattgtccctacagacacccagaacatcttcttcatgagcaaagtcaccaatcccaagcaagcctagagcttgccatcaagcagtggggctctcagtaaggaacttggaatgcaagctggatgcctgggtctctgggcacagcctggcccctgtgcaccgagtggccatggcatgtgtggccctgtctgcttatccttggaaggtgacagcgattccctgtgtagctctcacatgcacaggggcccatggactcttcagtctggagggtcctgggcctcctgacagcaataaataatttcgttggaca

SEQ ID NO: 180477 - DNA, 2660 bp, Homo sapiens
  Payload ID: 15544
  Gene Symbol: SERPINA3
  Gene Name: serpin peptidase inhibitor, clade A (alpha-1 antiproteinase, antitrypsin), member 3
  Uniprot ID: P01011
  ENST ID: ENST00000467132
  CDS Start-End: 1149-2420
actactccagacagacggctttggaatccaccagctacatccagctccctgaggactgagtgggcggaggctgaaggtgaataatcttgtttgctgcggtcaccggcttggaactcagcccttccagggtctcttgtgcagtagctcatggctcttctctggcttgtagtttcaggaaaggggtagtatgggaggtggtgactgctcggtacgtctaatatgaaccaggtgccttcatcatttatctcacctgagccacttaacaggttgtgcagagacggaaacaggttgagagatgtacagtcacctgcttgccagtacacagcaatcaaaagtggccaaaataaaatcccagtccaagtctgggagactccaaagccctctctgccttctccccactaagaggcccttccaggcttatggtggacacagacaccacgtggcaacctggcaggggcagagaagaacatttgcctttctttggtcttgctgccaaccattatcagggccatcgaggctccagacactgtaccagggactttcatttccctctctcagtcgaccctcactgccacccagcatcacatcgtggaggcctgtggaggccacaccacgtgacatctagaggctgggagagtcactgtggcctctatctctgcccagggctccttcatccctgggttctactttggtggcagttgggagaatgaaggaagggagcccctgctttctaatcccctaggatgagatctgctcaccaagcaggagaggagcaggcattctgattggactgaacctcggaccccccatcagcttacagaccgaggagccaggcaaacctggctgcccactgggctcctttacctgtttgctgtatgatcttgggcaagccccctcaccgctctgtgcccggcttttccactgcaagaaaatggcaacaattatggtacctacctcaaagggtgaaatgaagcagagtgatgtgtgtcgggtgccccagagagcacctacctgagggaggctccaaagctagcaagaggcagcaggacagggaccaggacgcaggctgggtggagggcagtgggaggtggtcggggctccatctggccctctgagacttaaaggagctttgcttttcagagttgagaatggagagaatgttacctctcctggctctggggctcttggcggctgggttctgccctgctgtcctctgccaccctaacagcccacttgacgaggagaatctgacccaggagaaccaagaccgagggacacacgtggacctcggattagcctccgccaacgtggacttcgctttcagcctgtacaagcagttagtcctgaaggcccctgataagaatgtcatcttctccccactgagcatctccaccgccttggccttcctgtctctgggggcccataataccaccctgacagagattctcaaaggcctcaagttcaacctcacggagacttctgaggcagaaattcaccagagcttccagcacctcctgcgcaccctcaatcagtccagcgatgagctgcagctgagtatgggaaatgccatgtttgtcaaagagcaactcagtctgctggacaggttcacggaggatgccaagaggctgtatggctccgaggcctttgccactgactttcaggactcagctgcagctaagaagctcatcaacgactacgtgaagaatggaactagggggaaaatcacagatctgatcaaggaccttgactcgcagacaatgatggtcctggtgaattacatcttctttaaagccaaatgggagatgccctttgacccccaagatactcatcagtcaaggttctacttgagcaagaaaaagtgggtaatggtgcccatgatgagtttgcatcacctgactataccttacttccgggacgaggagctgtcctgcaccgtggtggagctgaagtacacaggcaatgccagcgcactcttcatcctccctgatcaagacaagatggaggaagtggaagccatgctgctcccagagaccctgaagcggtggagagactctctggagttcagagagataggtgagctctacctgccaaagttttccatctcgagggactataacctgaacgacatacttctccagctgggcattgaggaagccttcaccagcaaggctgacctgtcagggatcacaggggccaggaacctagcagtctcccaggtggtccataaggctgtgcttgatgtatttgaggagggcacagaagcatctgctgccacagcagtcaaaatcaccctcctttctgcattagtggagacaaggaccattgtgcgtttcaacaggcccttcctgatgatcattgtccctacagacacccagaacatcttcttcatgagcaaagtcaccaatcccaagcaagcctagagcttgccatcaagcagtggggctctcagtaaggaacttggaatgcaagctggatgcctgggtctctgggcacagcctggcccctgtgcaccgagtggccatggcatgtgtggccctgtctgcttatccttggaaggtgacagcgattccctgtgtagctctcacatgcacaggggcccatggactcttcagtctggagggtcctgggcctcctgacagcaataaataatttcgttggac

SEQ ID NO: 180478 - DNA, 2420 bp, Homo sapiens
  Payload ID: 15544
  Gene Symbol: SERPINA3
  Gene Name: serpin peptidase inhibitor, clade A (alpha-1 antiproteinase, antitrypsin), member 3
  ENST ID: ENST00000482740
  CDS Start-End: 1565-2182
aagttgacctgggcccatttgaaaattccttttgctccctcattttaacccctaaagtaaagccgtttgtgactttatgagcttttaccaagcatctcctaaaaccaagaatggaggtgaaagattgtggagcccacaacctagagaaaggattgacaattttttttccataaagggcctagtagtatgtattttaggctgtgtggtccacatgagggcagattcttctttttgacttcctcctctgcatcttcttcatcttctctttcctcttcattttttttacaacctttgaaaaatataagcaccattcttagctttaggtacacacaaaaataagctatggctgtattggcttacaggctatagtttcctgacccctgttctaggggaggaaaataattgtacccaactaaatgcgtgcgaatcatgggcctatgtcatgattcccaaagaatgagtttcatggaattttcaacattttaaatattttactccattcttcccttgcttgcatagtttctgatgagaagtctgctgtcattttcatccttattcctttttagataaggtggagttttcctccctctgcctctacctctacctctttcaagattttctctttctctttactatggtaaataggcctttagtgagaggagttatgtcagcctggctaggagtcaggctgcatttcaggtttgtgatagctagaggtaccagaggcagtttcatggaattttacctttgcaacactgagagcctaggcagcctcagagtcagaacacccacagttgaatcctcagcctgacagacactgaatccagggcaaatcttagctgaatattcatggtctgtagaggtggacatgagctagatatgagctaaggaccatagccagctcatggcttttgtgatgtccaacaccgctatcctctaagatgtcacaagtgtccctaggcttttattcccatggtctctcctggctctgagttctatcttccattaaggttcttcctgttcctcccctcattcacactgattggcatctcttctgtctgccctcaccaactcacatacagaacccagtctctttcctcttatttccacccaaagccctcccacaagccactgttatatgttcacatccctgtaataccagtgagtaataattgctaatgagacatttttccttttatggaacaaaggctgtcccatttctcctcaggcaccagcctcccacatgttgtcatgcctctttcccccactttccctaaaccttctttctctcttgcactccttattccctggttcctattgatttctcatttagcacaaggaactaggtctttcttttgtggcccttttcccaatccaagcctgctgggctctccctcacccccaataacttttactcttgccaagctacttctctaaaccaaagcagggtccctcctatgagggactctgggcacttccactgctgcggaagcagggtcgagcagggcgacccttgcactcacaccttctccaactgcttgctccaccttcagccaaatgggagatgccctttgacccccaagatactcatcagtcaaggttctacttgagcaagaaaaagtgggtaatggtgcccatgatgagtttgcatcacctgactataccttacttccgggacgaggagctgtcctgcaccgtggtggagctgaagtacacaggcaatgccagcgcactcttcatcctccctgatcaagacaagatggaggaagtggaagccatgctgctcccagagaccctgaagcggtggagagactctctggagttcagagagataggtgagctctacctgccaaagttttccatctcgagggactataacctgaacgacatacttctccagctgggcattgaggaagccttcaccagcaaggctgacctgtcagggatcacaggggccaggaacctagcagtctcccaggtggtccataaggctgtgcttgatgtatttgaggagggcacagaagcatctgctgccacagcagtcaaaatcaccctcctttctgcattagtggagacaaggaccattgtgcgtttcaacaggcccttcctgatgatcattgtccctacagacacccagaacatcttcttcatgagcaaagtcaccaatcccaagcaagcctagagcttgccatcaagcagtggggctctcagtaaggaacttggaatgcaagctggatgcctgggtctctgggcacagcctggcccctgtgcaccgagtggccatggcatgtgtggccctgtctgcttatccttggaaggtgacagcgattccctgtgtagctctcacatgcacaggggcccatggactcttcagtctggagggtcctgggcctcctgacagcaataaataatttcgttgg

SEQ ID NO: 180479 - DNA, 981 bp, Homo sapiens
  Payload ID: 15544
  Gene Symbol: SERPINA3
  Gene Name: serpin peptidase inhibitor, clade A (alpha-1 antiproteinase, antitrypsin), member 3
  ENST ID: ENST00000555820
  CDS Start-End: 65-981
cactactccagacagacggctttggaatccaccagctacatccagctccctgaggcagttgagaatggagagaatgttacctctcctggctctggggctcttggcggctgggttctgccctgctgtcctctgccaccctaacagcccacttgacgaggagaatctgacccaggagaaccaagaccgagggacacacgtggacctcggattagcctccgccaacgtggacttcgctttcagcctgtacaagcagttagtcctgaaggcccctgataagaatgtcatcttctccccactgagcatctccaccgccttggccttcctgtctctgggggcccataataccaccctgacagagattctcaaaggcctcaagttcaacctcacggagacttctgaggcagaaattcaccagagcttccagcacctcctgcgcaccctcaatcagtccagcgatgagctgcagctgagtatgggaaatgccatgtttgtcaaagagcaactcagtctgctggacaggttcacggaggatgccaagaggctgtatggctccgaggcctttgccactgactttcaggactcagctgcagctaagaagctcatcaacgactacgtgaagaatggaactagggggaaaatcacagatctgatcaaggaccttgactcgcagacaatgatggtcctggtgaattacatcttctttaaagccaaatgggagatgccctttgacccccaagatactcatcagtcaaggttctacttgagcaagaaaaagtgggtaatggtgcccatgatgagtttgcatcacctgactataccttacttccgggacgaggagctgtcctgcaccgtggtggagctgaagtacacaggcaatgccagcgcactcttcatcctccctgatcaagacaagatggaggaagtggaagccatgctgctcccagagaccctgaagcggtggagagactctctggagttcag

SEQ ID NO: 180480 - DNA, 1289 bp, Homo sapiens
  Payload ID: 15544
  Gene Symbol: SERPINA3
  Gene Name: serpin peptidase inhibitor, clade A (alpha-1 antiproteinase, antitrypsin), member 3
  Uniprot ID: P01011
  ENST ID: ENST00000556968
  CDS Start-End: 52-702
acggctttggaatccaccagctacatccagctccctgaggcagagttgagaatggagagaatgttacctctcctggctctggggctcttggcggctgggttctgccctgctgtcctctgccaccctaacagcccacttgacgaggagaatctgacccaggagaaccaagaccgagggacacacgtggacctcggattagcctccgccaacgtggacttcgctttcagcctgtacaagcagttagtcctgaaggcccctgataagaatgtcatcttctccccactgagcatctccaccgccttggccttcctgtctctgggggcccataataccaccctgacagagattctcaaaggcctcaagttcaacctcacggagacttctgaggcagaaattcaccagagcttccagcacctcctgcgcaccctcaatcagtccagcgatgagctgcagctgagtatgggaaatgccatgtttgtcaaagagcaactcagtctgctggacaggttcacggaggatgccaagaggctgtatggctccgaggcctttgccactgactttcaggactcagctgcagctaagaagctcatcaacgactacgtgaagaatggaactagggggaaaatcacagatctgatcaaggaccttgactcgcagacaatgatggtcctggtgaattacatcttctttaaagagagataggtgagctctacctgccaaagttttccatctcgagggactataacctgaacgacatacttctccagctgggcattgaggaagccttcaccagcaaggctgacctgtcagggatcacaggggccaggaacctagcagtctcccaggtggtccataaggctgtgcttgatgtatttgaggagggcacagaagcatctgctgccacagcagtcaaaatcaccctcctttctgcattagtggagacaaggaccattgtgcgtttcaacaggcccttcctgatgatcattgtccctacagacacccagaacatcttcttcatgagcaaagtcaccaatcccaagcaagcctagagcttgccatcaagcagtggggctctcagtaaggaacttggaatgcaagctggatgcctgggtctctgggcacagcctggcccctgtgcaccgagtggccatggcatgtgtggccctgtctgcttatccttggaaggtgacagcgattccctgtgtagctctcacatgcacaggggcccatggactcttcagtctggagggtcctgggcctcctgacagcaataaataatttcgttggac

SEQ ID NO: 180481 - DNA, 639 bp, Homo sapiens
  Payload ID: 15544
  Gene Symbol: SERPINA3
  Gene Name: serpin peptidase inhibitor, clade A (alpha-1 antiproteinase, antitrypsin), member 3
  ENST ID: ENST00000621603
  CDS Start-End: 1-140
gcaccgtggtggagctgaagtacacaggcaatgccagcgcactcttcatcctccctgatcaagacaagatggaggaagtggaagccatgctgctcccagagaccctgaagcggtggagagactctctggagttcaggtgattcttcctggcccccaaagaccccacatctctccacgtcaaggtctcaccaatgtccagggacaagggcatggtggtgggagaactcatacagggacaggtggaatttacacttactttgccctatgctgcctacatggctttgggcttgatttttctttttcttctttaagacaatgacatcagacaggacaaggggctgaggcttcctctgactccagcatgttctaagtcatgagaaatcttctgcacagtcccaaacactcatgcatggtttctcctggtctcaatctcttgaagggagagagaaacagaaggaattgtgatcagttgagggctgcagtgagatggactctgagaatcagttctgcactggtgaaccactgtatttattcattctctcagcatttgctgcatgattaattgagcacctactatgtgtcagacactaatttgcaccctgagagtaaatcagcaaataaaacacaagattccctgcc

SEQ ID NO: 180482 - DNA, 1589 bp, Homo sapiens
  Payload ID: 15545
  Gene Symbol:
  Gene Name: serpin peptidase inhibitor, clade A (alpha-1 antiproteinase, antitrypsin), member 3 [Source:EntrezGene
  Acc:12]
  ENST ID: ENST00000393078
  CDS Start-End: 80-1351
attcatgaaaatccactactccagacagacggctttggaatccaccagctacatccagctccctgaggcagagttgagaatggagagaatgttacctctcctggctctggggctcttggcggctgggttctgccctgctgtcctctgccaccctaacagcccacttgacgaggagaatctgacccaggagaaccaagaccgagggacacacgtggacctcggattagcctccgccaacgtggacttcgctttcagcctgtacaagcagttagtcctgaaggcccctgataagaatgtcatcttctccccactgagcatctccaccgccttggccttcctgtctctgggggcccataataccaccctgacagagattctcaaaggcctcaagttcaacctcacggagacttctgaggcagaaattcaccagagcttccagcacctcctgcgcaccctcaatcagtccagcgatgagctgcagctgagtatgggaaatgccatgtttgtcaaagagcaactcagtctgctggacaggttcacggaggatgccaagaggctgtatggctccgaggcctttgccactgactttcaggactcagctgcagctaagaagctcatcaacgactacgtgaagaatggaactagggggaaaatcacagatctgatcaaggaccttgactcgcagacaatgatggtcctggtgaattacatcttctttaaagccaaatgggagatgccctttgacccccaagatactcatcagtcaaggttctacttgagcaagaaaaagtgggtaatggtgcccatgatgagtttgcatcacctgactataccttacttccgggacgaggagctgtcctgcaccgtggtggagctgaagtacacaggcaatgccagcgcactcttcatcctccctgatcaagacaagatggaggaagtggaagccatgctgctcccagagaccctgaagcggtggagagactctctggagttcagagagataggtgagctctacctgccaaagttttccatctcgagggactataacctgaacgacatacttctccagctgggcattgaggaagccttcaccagcaaggctgacctgtcagggatcacaggggccaggaacctagcagtctcccaggtggtccataaggctgtgcttgatgtatttgaggagggcacagaagcatctgctgccacagcagtcaaaatcaccctcctttctgcattagtggagacaaggaccattgtgcgtttcaacaggcccttcctgatgatcattgtccctacagacacccagaacatcttcttcatgagcaaagtcaccaatcccaagcaagcctagagcttgccatcaagcagtggggctctcagtaaggaacttggaatgcaagctggatgcctgggtctctgggcacagcctggcccctgtgcaccgagtggccatggcatgtgtggccctgtctgcttatccttggaaggtgacagcgattccctgtgtagctctcacatgcacaggggcccatggactcttcagtctggagggtcctgggcctcctgacagcaataaataatttcgttgg

SEQ ID NO: 180483 - DNA, 3067 bp, Homo sapiens
  Payload ID: 15545
  Gene Symbol:
  Gene Name: serpin peptidase inhibitor, clade A (alpha-1 antiproteinase, antitrypsin), member 3 [Source:EntrezGene
  Acc:12]
  ENST ID: ENST00000553947
  CDS Start-End: 1-137
tggtgcacaaagctgtggtggaggtggacgagtcgggaaccagagcagcggcagccacggggacaatattcactttcagatattcactgaatggccactgtgtgcctggcactgttccaagtgctgaagaaaaatgaagaaaacaaaaatccctgcccttatagaggagacattataatgtgacaagataacataatgaaaaagaatgaagaataaaatagaaaagtaaaatggattgcatgtcacttgatgacaagtactgtggaatgaggccgtcatctaaatggagcacagaaagtggaacatggcgacatctcagccaaaagacccggcagacaccatcttggccaagggatcgaggttggcatcgccagctgtgagcagtgctgacatcttattatcttcgatatggcgtcatgagcaggctgcctcctcttggtgggatcttcccccaaacccagaacctcagtctaatcacaagaaaatgacagccaatcccaagttcagggacatttggcaaaatagcccaccactcctacttaaaagtgtcgaggtcttgaaaggcaaggaaaccctgggaaatcgtctttggccggaggaaactcagcagacatgacgactaaatgcaatgtagaatcctcggacagaaaaggacattagtaggacagctggtgaaacccaaaggaagaacctgtgtcaggacccccagagcggtgtctccactaagcagaagtctctgtttctctcctggcctctcccagaggggctgctctgaagcatgtggatttgatcaggataatcaagtccgagaacagaacacttggttgtcctggcatttcccaagcagggggaggagttctctgcaggaataaataagcctcagcattcatgaaaatccactactccagacagacggctttggaatccaccagctacatccagctccctgaggcagagttgagaatggagagaatgttacctctcctggctctggggctcttggcggctgggttctgccctgctgtcctctgccaccctaacagcccacttgacgaggagaatctgacccaggagaaccaagaccgagggacacacgtggacctcggattagcctccgccaacgtggacttcgctttcagcctgtacaagcagttagtcctgaaggcccctgataagaatgtcatcttctccccactgagcatctccaccgccttggccttcctgtctctgggggcccataataccaccctgacagagattctcaaaggcctcaagttcaacctcacggagacttctgaggcagaaattcaccagagcttccagcacctcctgcgcaccctcaatcagtccagcgatgagctgcagctgagtatgggaaatgccatgtttgtcaaagagcaactcagtctgctggacaggttcacggaggatgccaagaggctgtatggctccgaggcctttgccactgactttcaggactcagctgcagctaagaagctcatcaacgactacgtgaagaatggaactagggggaaaatcacagatctgatcaaggaccttgactcgcagacaatgatggtcctggtgaattacatcttctttaaagccaaatgggagatgccctttgacccccaagatactcatcagtcaaggttctacttgagcaagaaaaagtgggtaatggtgcccatgatgagtttgcatcacctgactataccttacttccgggacgaggagctgtcctgcaccgtggtggagctgaagtacacaggcaatgccagcgcactcttcatcctccctgatcaagacaagatggaggaagtggaagccatgctgctcccagagaccctgaagcggtggagagactctctggagttcagagagataggtgagctctacctgccaaagttttccatctcgagggactataacctgaacgacatacttctccagctgggcattgaggaagccttcaccagcaaggctgacctgtcagggatcacaggggccaggaacctagcagtctcccaggtggtccataaggctgtgcttgatgtatttgaggagggcacagaagcatctgctgccacagcagtcaaaatcaccctcctttctgcattagtggagacaaggaccattgtgcgtttcaacaggcccttcctgatgatcattgtccctacagacacccagaacatcttcttcatgagcaaagtcaccaatcccaagcaagcctagagcttgccatcaagcagtggggctctcagtaaggaacttggaatgcaagctggatgcctgggtctctgggcacagcctggcccctgtgcaccgagtggccatggcatgtgtggccctgtctgcttatccttggaaggtgacagcgattccctgtgtagctctcacatgcacaggggcccatggactcttcagtctggagggtcctgggcctcctgacagcaataaataatttcgttggacacgttgcttgtgcctttccatgctgactatcagactctgcgcccctgaggctacctgtgccccaaagacaagccccttgagctcccatgcaggctcagctccaccccaagatctgggctccttctgccttcagctgcagcagcctgcccaggactacctaagcttgtggccaagctcacccagacctcaggcccagggttgggaggggaccctgctgctctaaggccaattcctgccccccaggcttctgggtgcccactttcagtttctctccttccacccccagggcccaggctccacctggctctttccagagctcctagccctgaccacatctggcacagcccccggactccttgctcctgcagctgtgcagggctttatcatgcgacatccttcttctgccctttagcacccccaatttgggggaagtagctactttctgggtttccagatggagcccctcaactgcctcaccagttcctagccctggctctgtgaatgatctccctcaacaaccagaatgcagggctgaggacaaatgagccatcagcgcacaactgcaataaagcaatcgtgtagtcaggcattt

SEQ ID NO: 180484 - DNA, 1784 bp, Homo sapiens
  Payload ID: 15546
  Gene Symbol: SERPINA4
  Gene Name: serpin peptidase inhibitor, clade A (alpha-1 antiproteinase, antitrypsin), member 4
  Uniprot ID: P29622
  ENST ID: ENST00000298841
  CDS Start-End: 226-1509
agagctgagacagccacccagggggtccactccaggacagactgtgccgtgagtaaccccctgagacaatggagacgagagactctagagggagggtgaccaactgttccactttgcccaagactgataattcttctgggatatattttcagtgctaaaaccaggaaagtcccaggcaagctgggacactttgtcactcttgctagaggcctgagagtgcagaggatgcatcttatcgactacctgctcctcctgctggttggactactggccctttctcatggccagctgcacgttgagcatgatggtgagagttgcagtaacagctcccaccagcagattctggagacaggtgagggctcccccagcctcaagatagcccctgccaatgctgactttgccttccgcttctactacctgatcgcttcggagaccccggggaagaacatctttttctccccgctgagcatctcggcggcctacgccatgctttccctgggggcctgctcacacagccgcagccagatccttgagggcctgggcttcaacctcaccgagctgtctgagtccgatgtccataggggcttccagcacctcctgcacactctcaacctccccggccatgggctggaaacacgcgtgggcagtgctctgttcctgagccacaacctgaagttccttgcaaaattcctgaatgacaccatggccgtctatgaggctaaactcttccacaccaacttctacgacactgtgggcacaatccagcttatcaacgaccacgtcaagaaggaaactcgagggaagattgtggatttggtcagtgagctcaagaaggacgtcttgatggtgctggtgaattacatttacttcaaagccctgtgggagaaaccattcatttcctcaaggaccactcccaaagacttctatgttgatgagaacacaacagtccgggtgcccatgatgctgcaggaccaggagcatcactggtatcttcatgacagatacttgccctgctcggtgctacggatggattacaaaggagacgcaaccgtgtttttcattctccctaaccaaggcaaaatgagggagattgaagaggttctgactccagagatgctaatgaggtggaacaacttgttgcggaagaggaatttttacaagaagctagagttgcatcttcccaagttctccatttctggctcctatgtattagatcagattttgcccaggctgggcttcacggatctgttctccaagtgggctgacttatccggcatcaccaaacagcaaaaactggaggcatccaaaagtttccacaaggccaccttggacgtggatgaggctggcaccgaggctgcagcagccaccagcttcgcgatcaaattcttctctgcccagaccaatcgccacatcctgcgattcaaccggcccttccttgtggtgatcttttccaccagcacccagagtgtcctctttctgggcaaggtcgtcgaccccacgaaaccatagccctcccagggctgctcatctgttccaagcaggaggatgtggcaggggagggctgggagtgagtagctctgtgtttagagttggggacaaggatgacaccgaaggtccaggagtccaggacagcaggtgctggccggtggggagcggggaggggcactgagatgggcagggcctggacattccacaccctggtgctgtgcagcctctggcagagcatccgacctcttggagcaagtttctgcctctggaaagggggcgggcccttttcacaacag

SEQ ID NO: 180485 - DNA, 2012 bp, Homo sapiens
  Payload ID: 15546
  Gene Symbol: SERPINA4
  Gene Name: serpin peptidase inhibitor, clade A (alpha-1 antiproteinase, antitrypsin), member 4
  Uniprot ID: P29622
  ENST ID: ENST00000557004
  CDS Start-End: 422-1705
ggagggaggtgggcgactgaagctcagagagggagtaaatgagctcaacttcacacagctagtgaggggctggttggagaccagattttccaagtggttccccgggccctcggggagcagcaagggccaggcgaacctccatgcactgcacaaacatgaagaagtgaaccctcttggggttccccaggtgggaagtggggtgtcttcttgggagggggtgaaccaacttctggtgagttttccttgttgaggcaatgctgcacccgtagcctgtttgttaataattacctggtcgggagagagtgggtggtactgagaaggcctggtttgaccagtcctcctgggcttgataagacagagctgagacagccacccagggggtccactccaggacagactgtgccgcctgagagtgcagaggatgcatcttatcgactacctgctcctcctgctggttggactactggccctttctcatggccagctgcacgttgagcatgatggtgagagttgcagtaacagctcccaccagcagattctggagacaggtgagggctcccccagcctcaagatagcccctgccaatgctgactttgccttccgcttctactacctgatcgcttcggagaccccggggaagaacatctttttctccccgctgagcatctcggcggcctacgccatgctttccctgggggcctgctcacacagccgcagccagatccttgagggcctgggcttcaacctcaccgagctgtctgagtccgatgtccataggggcttccagcacctcctgcacactctcaacctccccggccatgggctggaaacacgcgtgggcagtgctctgttcctgagccacaacctgaagttccttgcaaaattcctgaatgacaccatggccgtctatgaggctaaactcttccacaccaacttctacgacactgtgggcacaatccagcttatcaacgaccacgtcaagaaggaaactcgagggaagattgtggatttggtcagtgagctcaagaaggacgtcttgatggtgctggtgaattacatttacttcaaagccctgtgggagaaaccattcatttcctcaaggaccactcccaaagacttctatgttgatgagaacacaacagtccgggtgcccatgatgctgcaggaccaggagcatcactggtatcttcatgacagatacttgccctgctcggtgctacggatggattacaaaggagacgcaaccgtgtttttcattctccctaaccaaggcaaaatgagggagattgaagaggttctgactccagagatgctaatgaggtggaacaacttgttgcggaagaggaatttttacaagaagctagagttgcatcttcccaagttctccatttctggctcctatgtattagatcagattttgcccaggctgggcttcacggatctgttctccaagtgggctgacttatccggcatcaccaaacagcaaaaactggaggcatccaaaagtttccacaaggccaccttggacgtggatgaggctggcaccgaggctgcagcagccaccagcttcgcgatcaaattcttctctgcccagaccaatcgccacatcctgcgattcaaccggcccttccttgtggtgatcttttccaccagcacccagagtgtcctctttctgggcaaggtcgtcgaccccacgaaaccatagccctcccagggctgctcatctgttccaagcaggaggatgtggcaggggagggctgggagtgagtagctctgtgtttagagttggggacaaggatgacaccgaaggtccaggagtccaggacagcaggtgctggccggtggggagcggggaggggcactgagatgggcagggcctggacattccacaccctggtgctgtgcagcctctggcagagcatccgacctcttggagcaagtttctgcctctggaaagggggcgggcccttttcacaacaggctggttgtaccgagtaaacaacacgatgcca

SEQ ID NO: 180486 - DNA, 1987 bp, Homo sapiens
  Payload ID: 15546
  Gene Symbol: SERPINA4
  Gene Name: serpin peptidase inhibitor, clade A (alpha-1 antiproteinase, antitrypsin), member 4
  Uniprot ID: P29622
  ENST ID: ENST00000555095
  CDS Start-End: 386-1669
aagacagagctgagacagccacccagggggtccactccaggacagactgtgccgtgagtaaccccctgagacaatggagacgagagactctagagggagggtgaccaactgttccactttgcccaagactgataattcttctgggatatattttcagtgctaaaaccaggaaagtcccaggcaagctgggacactttgtcactcttgctagaggtgagaaatactcaggctagaaaggccccgacttagggtccatgggcactggtgggtgactatgcccggagacccagaaaagcctcccccagggacacacagctggtacagggcggcactgactgagggccaaggtcttctggctgccaatccaggcctgagagtgcagaggatgcatcttatcgactacctgctcctcctgctggttggactactggccctttctcatggccagctgcacgttgagcatgatggtgagagttgcagtaacagctcccaccagcagattctggagacaggtgagggctcccccagcctcaagatagcccctgccaatgctgactttgccttccgcttctactacctgatcgcttcggagaccccggggaagaacatctttttctccccgctgagcatctcggcggcctacgccatgctttccctgggggcctgctcacacagccgcagccagatccttgagggcctgggcttcaacctcaccgagctgtctgagtccgatgtccataggggcttccagcacctcctgcacactctcaacctccccggccatgggctggaaacacgcgtgggcagtgctctgttcctgagccacaacctgaagttccttgcaaaattcctgaatgacaccatggccgtctatgaggctaaactcttccacaccaacttctacgacactgtgggcacaatccagcttatcaacgaccacgtcaagaaggaaactcgagggaagattgtggatttggtcagtgagctcaagaaggacgtcttgatggtgctggtgaattacatttacttcaaagccctgtgggagaaaccattcatttcctcaaggaccactcccaaagacttctatgttgatgagaacacaacagtccgggtgcccatgatgctgcaggaccaggagcatcactggtatcttcatgacagatacttgccctgctcggtgctacggatggattacaaaggagacgcaaccgtgtttttcattctccctaaccaaggcaaaatgagggagattgaagaggttctgactccagagatgctaatgaggtggaacaacttgttgcggaagaggaatttttacaagaagctagagttgcatcttcccaagttctccatttctggctcctatgtattagatcagattttgcccaggctgggcttcacggatctgttctccaagtgggctgacttatccggcatcaccaaacagcaaaaactggaggcatccaaaagtttccacaaggccaccttggacgtggatgaggctggcaccgaggctgcagcagccaccagcttcgcgatcaaattcttctctgcccagaccaatcgccacatcctgcgattcaaccggcccttccttgtggtgatcttttccaccagcacccagagtgtcctctttctgggcaaggtcgtcgaccccacgaaaccatagccctcccagggctgctcatctgttccaagcaggaggatgtggcaggggagggctgggagtgagtagctctgtgtttagagttggggacaaggatgacaccgaaggtccaggagtccaggacagcaggtgctggccggtggggagcggggaggggcactgagatgggcagggcctggacattccacaccctggtgctgtgcagcctctggcagagcatccgacctcttggagcaagtttctgcctctggaaagggggcgggcccttttcacaacaggctggttgtaccgagtaaacaacacgatgccatgaagaccctg

SEQ ID NO: 180487 - DNA, 2337 bp, Homo sapiens
  Payload ID: 15547
  Gene Symbol: SERPINA5
  Gene Name: serpin peptidase inhibitor, clade A (alpha-1 antiproteinase, antitrypsin), member 5
  Uniprot ID: P05154
  ENST ID: ENST00000329597
  CDS Start-End: 236-1456
ggtggagacagggccggctgtggtcagtgacaaatgctggctgcaatccagccagccctctgccctttctgagcccgagggactgccacctccactgtgtgcacactcagctacgggacacatttcaggtatccaaggcagcagaggtgagtgggtcccccgagctctgtgaccttatgctccacactaactctggcagagcctccgtttcctcatagaacaaagaacagccaccatgcagctcttcctcctcttgtgcctggtgcttctcagccctcagggggcctcccttcaccgccaccacccccgggagatgaagaagagagtcgaggacctccatgtaggtgccacggtggcccccagcagcagaagggactttacctttgacctctacagggccttggcttccgctgcccccagccagagcatcttcttctcccctgtgagcatctccatgagcctggccatgctctccctgggggctgggtccagcacaaagatgcagatcctggagggcctgggcctcaacctccagaaaagctcagagaaggagctgcacagaggctttcagcagctccttcaggaactcaaccagcccagagatggcttccagctgagcctcggcaatgcccttttcaccgacctggtggtagacctgcaggacaccttcgtaagtgccatgaagacgctgtacctggcagacactttccctaccaactttagggactctgcaggggccatgaagcagatcaatgattatgtggcaaagcaaacgaagggcaagattgtggacttgcttaagaacctcgatagcaatgcggtcgtgatcatggtgaattacatcttctttaaagctaagtgggagacaagcttcaaccacaaaggcacccaagagcaagacttctacgtgacctcggagactgtggtgcgggtacccatgatgagccgcgaggatcagtatcactacctcctggaccggaacctctcctgcagggtggtgggggtcccctaccaaggcaatgccacggctttgttcattctccccagtgagggaaagatgcagcaggtggagaatggactgagtgagaaaacgctgaggaagtggcttaagatgttcaaaaagaggcagctcgagctttaccttcccaaattctccattgagggctcctatcagctggagaaagtcctccccagtctggggatcagtaacgtcttcacctcccatgctgatctgtccggcatcagcaaccactcaaatatccaggtgtctgagatggtgcacaaagctgtggtggaggtggacgagtcgggaaccagagcagcggcagccacggggacaatattcactttcaggtcggcccgcctgaactctcagaggctagtgttcaacaggccctttctgatgttcattgtggataacaacatcctcttccttggcaaagtgaaccgcccctgaggtggggcttctcctgaaatctacaggcctcagggtgggagatgaagggggctaagctatggcccatctgtatgctggtagctagtgatttacacaggtttagttgactaatgaggcattacaaataatattactctatgatgattgcttccacccacacgactgcaacatacaggtgccttggggaaatgtggagaacattcaatcttgccgtcactattcatcaatgaagattaacactgagatccagagaggctggatgacttgctcaagttcaccagcatggtagtggcaaagagaggtccagagtcctggcccttgatgcccagctcagtgccacaaagctcaataggagggatgttccagtggatgagggccaccaggaagcacaggtccaaggctggtcccacacttatcagcagcaacaactgtcagttcatcctgcatgggaaaaatgttggaatgggagtctgaaatggggctactgtttcagtcctaatgtgctgtgtgacattgggacaacactttccctctctggacctcagtttccctctgtatacaaggatcagattcttgctgtgacccaagaactcctgaaatcatatagaaaggctggggtgggccctgtcattcgtggttgatttcaatacactcaagtgccattcatcctttaagaaaaacatctggatatcaaggtggaaatggcccatttaatgattgattatatcattttgtggatatagttataatctgatgggcctggctgggagtggaagaagggaagccttttgcaaatagtagagtatcagttgcaggtgccaatgactaactttttgaattctatgttggcattaacaataaagcattttgcaaacactggt

SEQ ID NO: 180488 - DNA, 586 bp, Homo sapiens
  Payload ID: 15547
  Gene Symbol: SERPINA5
  Gene Name: serpin peptidase inhibitor, clade A (alpha-1 antiproteinase, antitrypsin), member 5
  ENST ID: ENST00000554220
  CDS Start-End: 71-586
aagacagagctgagacagccacccagggggtccactccaggacagactgtgccaacaaagaacagccaccatgcagctcttcctcctcttgtgcctggtgcttctcagccctcagggggcctcccttcaccgccaccacccccgggagatgaagaagagagtcgaggacctccatgtaggtgccacggtggcccccagcagcagaagggactttacctttgacctctacagggccttggcttccgctgcccccagccagagcatcttcttctcccctgtgagcatctccatgagcctggccatgctctccctgggggctgggtccagcacaaagatgcagatcctggagggcctgggcctcaacctccagaaaagctcagagaaggagctgcacagaggctttcagcagctccttcaggaactcaaccagcccagagatggcttccagctgagcctcggcaatgcccttttcaccgacctggtggtagacctgcaggacaccttcgtaagtgccatgaagacgctgtacctggcagacactttccctaccaactttagggactctgcaggggccatgaagcagatc

SEQ ID NO: 180489 - DNA, 607 bp, Homo sapiens
  Payload ID: 15547
  Gene Symbol: SERPINA5
  Gene Name: serpin peptidase inhibitor, clade A (alpha-1 antiproteinase, antitrypsin), member 5
  ENST ID: ENST00000557598
  CDS Start-End: 137-607
acaatgcccaggacaagatcacaaagcatcatcctgttcaaaaggtcaacaggatcaaggttgagagaccctgaaataaggccatggggacaaaatgtcggctggataggaggtgctcaaacaaagaacagccaccatgcagctcttcctcctcttgtgcctggtgcttctcagccctcagggggcctcccttcaccgccaccacccccgggagatgaagaagagagtcgaggacctccatgtaggtgccacggtggcccccagcagcagaagggactttacctttgacctctacagggccttggcttccgctgcccccagccagagcatcttcttctcccctgtgagcatctccatgagcctggccatgctctccctgggggctgggtccagcacaaagatgcagatcctggagggcctgggcctcaacctccagaaaagctcagagaaggagctgcacagaggctttcagcagctccttcaggaactcaaccagcccagagatggcttccagctgagcctcggcaatgcccttttcaccgacctggtggtagacctgcaggacaccttcgtaagtgccatgaagacgctgtacctggcagacact

SEQ ID NO: 180490 - DNA, 829 bp, Homo sapiens
  Payload ID: 15547
  Gene Symbol: SERPINA5
  Gene Name: serpin peptidase inhibitor, clade A (alpha-1 antiproteinase, antitrypsin), member 5
  ENST ID: ENST00000556775
  CDS Start-End: 136-829
gacaaatgctggctgcaatccagccagccctctgccctttctgagcccgagggactgccacctccactgtgtgcacactcagctacgggacacatttcaggtatccaaggcagcagagaacaaagaacagccaccatgcagctcttcctcctcttgtgcctggtgcttctcagccctcagggggcctcccttcaccgccaccacccccgggagatgaagaagagagtcgaggacctccatgtaggtgccacggtggcccccagcagcagaagggactttacctttgacctctacagggccttggcttccgctgcccccagccagagcatcttcttctcccctgtgagcatctccatgagcctggccatgctctccctgggggctgggtccagcacaaagatgcagatcctggagggcctgggcctcaacctccagaaaagctcagagaaggagctgcacagaggctttcagcagctccttcaggaactcaaccagcccagagatggcttccagctgagcctcggcaatgcccttttcaccgacctggtggtagacctgcaggacaccttcgtaagtgccatgaagacgctgtacctggcagacactttccctaccaactttagggactctgcaggggccatgaagcagatcaatgattatgtggcaaagcaaacgaagggcaagattgtggacttgcttaagaacctcgatagcaatgcggtcgtgatcatggtgaattacatcttctttaaagctaagtgggagacaagcttcaaccacaaaggcacccaagagcaagacttctacgtgacctcggagactgtggtgc

SEQ ID NO: 180491 - DNA, 2071 bp, Homo sapiens
  Payload ID: 15547
  Gene Symbol: SERPINA5
  Gene Name: serpin peptidase inhibitor, clade A (alpha-1 antiproteinase, antitrypsin), member 5
  Uniprot ID: P05154
  ENST ID: ENST00000553780
  CDS Start-End: 294-1514
aagacagagctgagacagccacccagggggtccactccaggacagactgtgcctgtgggctcacagggaagaggtcatgggcgaacagagtgaaggcaaccatctataagtgccagagagccctcaccagagaccaaccctgacggcaccttgaccttggatttccagcgtccagaactccacataattgggccccaaagccatgaagaaggaagaggaaatgtcttaaaggttgtcgatggacagtgtttgctgaacatcaaaatcactttccagaacaaagaacagccaccatgcagctcttcctcctcttgtgcctggtgcttctcagccctcagggggcctcccttcaccgccaccacccccgggagatgaagaagagagtcgaggacctccatgtaggtgccacggtggcccccagcagcagaagggactttacctttgacctctacagggccttggcttccgctgcccccagccagagcatcttcttctcccctgtgagcatctccatgagcctggccatgctctccctgggggctgggtccagcacaaagatgcagatcctggagggcctgggcctcaacctccagaaaagctcagagaaggagctgcacagaggctttcagcagctccttcaggaactcaaccagcccagagatggcttccagctgagcctcggcaatgcccttttcaccgacctggtggtagacctgcaggacaccttcgtaagtgccatgaagacgctgtacctggcagacactttccctaccaactttagggactctgcaggggccatgaagcagatcaatgattatgtggcaaagcaaacgaagggcaagattgtggacttgcttaagaacctcgatagcaatgcggtcgtgatcatggtgaattacatcttctttaaagctaagtgggagacaagcttcaaccacaaaggcacccaagagcaagacttctacgtgacctcggagactgtggtgcgggtacccatgatgagccgcgaggatcagtatcactacctcctggaccggaacctctcctgcagggtggtgggggtcccctaccaaggcaatgccacggctttgttcattctccccagtgagggaaagatgcagcaggtggagaatggactgagtgagaaaacgctgaggaagtggcttaagatgttcaaaaagaggcagctcgagctttaccttcccaaattctccattgagggctcctatcagctggagaaagtcctccccagtctggggatcagtaacgtcttcacctcccatgctgatctgtccggcatcagcaaccactcaaatatccaggtgtctgagatggtgcacaaagctgtggtggaggtggacgagtcgggaaccagagcagcggcagccacggggacaatattcactttcaggtcggcccgcctgaactctcagaggctagtgttcaacaggccctttctgatgttcattgtggataacaacatcctcttccttggcaaagtgaaccgcccctgaggtggggcttctcctgaaatctacaggcctcagggtgggagatgaagggggctaagctatggcccatctgtatgctggtagctagtgatttacacaggtttagttgactaatgaggcattacaaataatattactctatgatgattgcttccacccacacgactgcaacatacaggtgccttggggaaatgtggagaacattcaatcttgccgtcactattcatcaatgaagattaacactgagatccagagaggctggatgacttgctcaagttcaccagcatggtagtggcaaagagaggtccagagtcctggcccttgatgcccagctcagtgccacaaagctcaataggagggatgttccagtggatgagggccaccaggaagcacaggtccaaggctggtcccacacttatcagcagcaacaactgtcagttcatcctgcatgggaaaaatgttggaatgggagtctgaaatggggctactgtttcagtcctaatgtgctgtgtgacattgggacaacactttccctctctggacctcagtttccctctgta

SEQ ID NO: 180492 - DNA, 2211 bp, Homo sapiens
  Payload ID: 15547
  Gene Symbol: SERPINA5
  Gene Name: serpin peptidase inhibitor, clade A (alpha-1 antiproteinase, antitrypsin), member 5
  Uniprot ID: P05154
  ENST ID: ENST00000554866
  CDS Start-End: 115-1335
agtgacaaatgctggctgcaatccagccagccctctgccctttctgagcccgagggactgccacctccactgtgtgcacactcagctacgggacacaaacaaagaacagccaccatgcagctcttcctcctcttgtgcctggtgcttctcagccctcagggggcctcccttcaccgccaccacccccgggagatgaagaagagagtcgaggacctccatgtaggtgccacggtggcccccagcagcagaagggactttacctttgacctctacagggccttggcttccgctgcccccagccagagcatcttcttctcccctgtgagcatctccatgagcctggccatgctctccctgggggctgggtccagcacaaagatgcagatcctggagggcctgggcctcaacctccagaaaagctcagagaaggagctgcacagaggctttcagcagctccttcaggaactcaaccagcccagagatggcttccagctgagcctcggcaatgcccttttcaccgacctggtggtagacctgcaggacaccttcgtaagtgccatgaagacgctgtacctggcagacactttccctaccaactttagggactctgcaggggccatgaagcagatcaatgattatgtggcaaagcaaacgaagggcaagattgtggacttgcttaagaacctcgatagcaatgcggtcgtgatcatggtgaattacatcttctttaaagctaagtgggagacaagcttcaaccacaaaggcacccaagagcaagacttctacgtgacctcggagactgtggtgcgggtacccatgatgagccgcgaggatcagtatcactacctcctggaccggaacctctcctgcagggtggtgggggtcccctaccaaggcaatgccacggctttgttcattctccccagtgagggaaagatgcagcaggtggagaatggactgagtgagaaaacgctgaggaagtggcttaagatgttcaaaaagaggcagctcgagctttaccttcccaaattctccattgagggctcctatcagctggagaaagtcctccccagtctggggatcagtaacgtcttcacctcccatgctgatctgtccggcatcagcaaccactcaaatatccaggtgtctgagatggtgcacaaagctgtggtggaggtggacgagtcgggaaccagagcagcggcagccacggggacaatattcactttcaggtcggcccgcctgaactctcagaggctagtgttcaacaggccctttctgatgttcattgtggataacaacatcctcttccttggcaaagtgaaccgcccctgaggtggggcttctcctgaaatctacaggcctcagggtgggagatgaagggggctaagctatggcccatctgtatgctggtagctagtgatttacacaggtttagttgactaatgaggcattacaaataatattactctatgatgattgcttccacccacacgactgcaacatacaggtgccttggggaaatgtggagaacattcaatcttgccgtcactattcatcaatgaagattaacactgagatccagagaggctggatgacttgctcaagttcaccagcatggtagtggcaaagagaggtccagagtcctggcccttgatgcccagctcagtgccacaaagctcaataggagggatgttccagtggatgagggccaccaggaagcacaggtccaaggctggtcccacacttatcagcagcaacaactgtcagttcatcctgcatgggaaaaatgttggaatgggagtctgaaatggggctactgtttcagtcctaatgtgctgtgtgacattgggacaacactttccctctctggacctcagtttccctctgtatacaaggatcagattcttgctgtgacccaagaactcctgaaatcatatagaaaggctggggtgggccctgtcattcgtggttgatttcaatacactcaagtgccattcatcctttaagaaaaacatctggatatcaaggtggaaatggcccatttaatgattgattatatcattttgtggatatagttataatctgatgggcctggctgggagtggaagaagggaagccttttgcaaatagtagagtatcagttgcaggtgccaatgactaactttttgaattctatgttggcattaacaataaagcattttgcaaaca

SEQ ID NO: 180493 - DNA, 574 bp, Homo sapiens
  Payload ID: 15547
  Gene Symbol: SERPINA5
  Gene Name: serpin peptidase inhibitor, clade A (alpha-1 antiproteinase, antitrypsin), member 5
  ENST ID: ENST00000553511
  CDS Start-End: 303-574
ctctgccctttctgagcccgagggactgccacctccactgtgtgcacactcagctacgggacacagtaagtaccgatgccgcaaagggaggtccccagggcttgagggcatgtgaggcgaggagaggatggactctagagttttggggtttggggtctgcaaagctctgaaggagtctcatctctgcagtttcaggtatccaaggcagcagaggtgagtgggtcccccgagctctgtgaccttatgctccacactaactctggcagagcctccgtttcctcatagaacaaagaacagccaccatgcagctcttcctcctcttgtgcctggtgcttctcagccctcagggggcctcccttcaccgccaccacccccgggagatgaagaagagagtcgaggacctccatgtaggtgccacggtggcccccagcagcagaagggactttacctttgacctctacagggccttggcttccgctgcccccagccagagcatcttcttctcccctgtgagcatctccatgagcctggccatgctctccctgggggctgggtccagcacaaagatgcagat

SEQ ID NO: 180494 - DNA, 462 bp, Homo sapiens
  Payload ID: 15547
  Gene Symbol: SERPINA5
  Gene Name: serpin peptidase inhibitor, clade A (alpha-1 antiproteinase, antitrypsin), member 5
  ENST ID: ENST00000556064
  CDS Start-End: 390-462
aaaatgtcggctggataggaggtgctcagtaagtggcagcttctgttgttttctgtgcctggagtcttgggcctttagaaatcaggaacaatgatccaatattatcggcttccgtgagataagggcatcttgcctggaggctgccacccaggccggtcatggcagctgctcatgaaggacagtaacaatttggcagtttgttaaatgaacaaaatgtagaaataaagtaagcagaatttttagtttttctgaaggtagggcttttggccagatatgcagcaataaaagagcaaactgcttccttgggccagtgtccttgctcatagatcaggaaaccgaagcatgaagaatacaggcggcagatgcctgaagaacaaagaacagccaccatgcagctcttcctcctcttgtgcctggtgcttctcagccctcagggggcctcccttcaccgccaccaccccc

SEQ ID NO: 180495 - DNA, 2210 bp, Homo sapiens
  Payload ID: 15547
  Gene Symbol: SERPINA5
  Gene Name: serpin peptidase inhibitor, clade A (alpha-1 antiproteinase, antitrypsin), member 5
  Uniprot ID: P05154
  ENST ID: ENST00000554276
  CDS Start-End: 114-1334
tttcaggtatccaaggcagcagaggtgagtgggtcccccgagctctgtgaccttatgctccacactaactctggcagagcctccgtttcctcatagaacaaagaacagccaccatgcagctcttcctcctcttgtgcctggtgcttctcagccctcagggggcctcccttcaccgccaccacccccgggagatgaagaagagagtcgaggacctccatgtaggtgccacggtggcccccagcagcagaagggactttacctttgacctctacagggccttggcttccgctgcccccagccagagcatcttcttctcccctgtgagcatctccatgagcctggccatgctctccctgggggctgggtccagcacaaagatgcagatcctggagggcctgggcctcaacctccagaaaagctcagagaaggagctgcacagaggctttcagcagctccttcaggaactcaaccagcccagagatggcttccagctgagcctcggcaatgcccttttcaccgacctggtggtagacctgcaggacaccttcgtaagtgccatgaagacgctgtacctggcagacactttccctaccaactttagggactctgcaggggccatgaagcagatcaatgattatgtggcaaagcaaacgaagggcaagattgtggacttgcttaagaacctcgatagcaatgcggtcgtgatcatggtgaattacatcttctttaaagctaagtgggagacaagcttcaaccacaaaggcacccaagagcaagacttctacgtgacctcggagactgtggtgcgggtacccatgatgagccgcgaggatcagtatcactacctcctggaccggaacctctcctgcagggtggtgggggtcccctaccaaggcaatgccacggctttgttcattctccccagtgagggaaagatgcagcaggtggagaatggactgagtgagaaaacgctgaggaagtggcttaagatgttcaaaaagaggcagctcgagctttaccttcccaaattctccattgagggctcctatcagctggagaaagtcctccccagtctggggatcagtaacgtcttcacctcccatgctgatctgtccggcatcagcaaccactcaaatatccaggtgtctgagatggtgcacaaagctgtggtggaggtggacgagtcgggaaccagagcagcggcagccacggggacaatattcactttcaggtcggcccgcctgaactctcagaggctagtgttcaacaggccctttctgatgttcattgtggataacaacatcctcttccttggcaaagtgaaccgcccctgaggtggggcttctcctgaaatctacaggcctcagggtgggagatgaagggggctaagctatggcccatctgtatgctggtagctagtgatttacacaggtttagttgactaatgaggcattacaaataatattactctatgatgattgcttccacccacacgactgcaacatacaggtgccttggggaaatgtggagaacattcaatcttgccgtcactattcatcaatgaagattaacactgagatccagagaggctggatgacttgctcaagttcaccagcatggtagtggcaaagagaggtccagagtcctggcccttgatgcccagctcagtgccacaaagctcaataggagggatgttccagtggatgagggccaccaggaagcacaggtccaaggctggtcccacacttatcagcagcaacaactgtcagttcatcctgcatgggaaaaatgttggaatgggagtctgaaatggggctactgtttcagtcctaatgtgctgtgtgacattgggacaacactttccctctctggacctcagtttccctctgtatacaaggatcagattcttgctgtgacccaagaactcctgaaatcatatagaaaggctggggtgggccctgtcattcgtggttgatttcaatacactcaagtgccattcatcctttaagaaaaacatctggatatcaaggtggaaatggcccatttaatgattgattatatcattttgtggatatagttataatctgatgggcctggctgggagtggaagaagggaagccttttgcaaatagtagagtatcagttgcaggtgccaatgactaactttttgaattctatgttggcattaacaataaagcattttgcaaaca

SEQ ID NO: 180496 - DNA, 618 bp, Homo sapiens
  Payload ID: 15547
  Gene Symbol: SERPINA5
  Gene Name: serpin peptidase inhibitor, clade A (alpha-1 antiproteinase, antitrypsin), member 5
  ENST ID: ENST00000555681
  CDS Start-End: 186-618
acactcagctacgggacacagtaagtaccgatgccgcaaagggaggtccccagggcttgagggcatgtgaggcgaggagaggatggactctagagttttggggtttggggtctgcaaagctctgaaggagtctcatctctgcagtttcaggtatccaaggcagcagagaacaaagaacagccaccatgcagctcttcctcctcttgtgcctggtgcttctcagccctcagggggcctcccttcaccgccaccacccccgggagatgaagaagagagtcgaggacctccatgtaggtgccacggtggcccccagcagcagaagggactttacctttgacctctacagggccttggcttccgctgcccccagccagagcatcttcttctcccctgtgagcatctccatgagcctggccatgctctccctgggggctgggtccagcacaaagatgcagatcctggagggcctgggcctcaacctccagaaaagctcagagaaggagctgcacagaggctttcagcagctccttcaggaactcaaccagcccagagatggcttccagctgagcctcggcaatgcccttttcaccgacctggtggtagacctgcaggacacct

SEQ ID NO: 180497 - DNA, 533 bp, Homo sapiens
  Payload ID: 15547
  Gene Symbol: SERPINA5
  Gene Name: serpin peptidase inhibitor, clade A (alpha-1 antiproteinase, antitrypsin), member 5
  ENST ID: ENST00000554633
  CDS Start-End: 276-533
gtgcacactcagctacgggacacatttcaggtatccaaggcagcagaggtgagtgggtcccccgagctctgtgaccttatgctccacactaactctggcagagcctccgtttcctcatagggcaaggccagcagtgctgatggtcccaggcatgtagctggtctgagttcatagaaggaccacagcgccctgccatgtgccaaaccaggacaccagagtgaaggccagaagctcacatggaagcagcttagttccctgaacaaagaacagccaccatgcagctcttcctcctcttgtgcctggtgcttctcagccctcagggggcctcccttcaccgccaccacccccgggagatgaagaagagagtcgaggacctccatgtaggtgccacggtggcccccagcagcagaagggactttacctttgacctctacagggccttggcttccgctgcccccagccagagcatcttcttctcccctgtgagcatctccatgagcctggccatgctctccctgggggctgggtccagc

SEQ ID NO: 180498 - DNA, 1113 bp, Homo sapiens
  Payload ID: 15547
  Gene Symbol: SERPINA5
  Gene Name: serpin peptidase inhibitor, clade A (alpha-1 antiproteinase, antitrypsin), member 5
  ENST ID: ENST00000554760
  CDS Start-End: 211-1113
agtgacaaatgctggctgcaatccagccagccctctgccctttctgagcccgagggactgccacctccactgtgtgcacactcagctacgggacacatttcaggtatccaaggcagcagaggtgagtgggtcccccgagctctgtgaccttatgctccacactaactctggcagagcctccgtttcctcatagaacaaagaacagccaccatgcagctcttcctcctcttgtgcctggtgcttctcagccctcagggggcctcccttcaccgccaccacccccgggagatgaagaagagagtcgaggacctccatgtaggtgccacggtggcccccagcagcagaagggactttacctttgacctctacagggccttggcttccgctgcccccagccagagcatcttcttctcccctgtgagcatctccatgagcctggccatgctctccctgggggctgggtccagcacaaagatgcagatcctggagggcctgggcctcaacctccagaaaagctcagagaaggagctgcacagaggctttcagcagctccttcaggaactcaaccagcccagagatggcttccagctgagcctcggcaatgcccttttcaccgacctggtggtagacctgcaggacaccttcgtaagtgccatgaagacgctgtacctggcagacactttccctaccaactttagggactctgcaggggccatgaagcagatcaatgattatgtggcaaagcaaacgaagggcaagattgtggacttgcttaagaacctcgatagcaatgcggtcgtgatcatggtgaattacatcttctttaaagctaagtgggagacaagcttcaaccacaaaggcacccaagagcaagacttctacgtgacctcggagactgtggtgcgggtacccatgatgagccgcgaggatcagtatcactacctcctggaccggaacctctcctgcagggtggtgggggtcccctaccaaggcaatgccacggctttgttcattctccccagtgagggaaagatgcagcaggtggagaatggactgagtgagaaaacgctgaggaagtggcttaagatgttcaaaaagaggtactttcagact

SEQ ID NO: 180499 - DNA, 1534 bp, Homo sapiens
  Payload ID: 15548
  Gene Symbol: SERPINA6
  Gene Name: serpin peptidase inhibitor, clade A (alpha-1 antiproteinase, antitrypsin), member 6
  Uniprot ID: P08185
  ENST ID: ENST00000341584
  CDS Start-End: 148-1365
attaaccacccaggaagctggcaaacaaaatttaacaggcagcatccaccgcaggcttactgtacacatgctagggtccaggacagcaggaccaagccagcagaaacagcctgagcccaccgcagactggcctggctatactggacaatgccactcctcctgtacacctgtcttctctggctgcccaccagcggcctctggaccgtccaggccatggatcctaacgctgcttatgtgaacatgagtaaccatcaccggggcctggcttcagccaacgttgactttgccttcagcctgtataagcacctagtggccttgagtcccaaaaagaacattttcatctcccctgtgagcatctccatggccttagctatgctgtccctgggcacctgtggccacacacgggcccagcttctccagggcctgggtttcaacctcactgagaggtctgagactgagatccaccagggtttccagcacctgcaccaactctttgcaaagtcagacaccagcttagaaatgaccatgggcaatgccttgtttcttgatggcagcctggagttgctggagtcattctcagcagacatcaagcactactatgagtcagaggtcttggctatgaatttccaggactgggcaacagccagcagacagatcaacagctatgtcaagaataagacacaggggaaaattgtcgacttgttttcagggctggatagcccagccatcctcgtcctggtcaactatatcttcttcaaaggcacatggacacagccctttgacctggcaagcaccagggaggagaacttctatgtggacgagacaactgtggtgaaggtgcccatgatgttgcagtcgagcaccatcagttaccttcatgactcggagctcccctgccagctggtgcagatgaactacgtgggcaatgggactgtcttcttcatccttccggacaaggggaagatgaacacagtcatcgctgcactgagccgggacacgattaacaggtggtccgcaggcctgaccagcagccaggtggacctgtacattccaaaggtcaccatctctggagtctatgacctcggagatgtgctggaggaaatgggcattgcagacttgttcaccaaccaggcaaatttctcacgcatcacccaggacgcccagctgaagtcatcaaaggtggtccataaagctgtgctgcaactcaatgaggagggtgtggacacagctggctccactggggtcaccctaaacctgacgtccaagcctatcatcttgcgtttcaaccagcccttcatcatcatgatcttcgaccacttcacctggagcagccttttcctggcgagggttatgaacccagtgtaagagaccacccacccagagcctcagcactgtctgactttgggaaccagggatcccacagaaatgttttggagagcgggaggtttcccccaatctcctccaagttcttctccctccaaccagagttgtgtctaactttaggcatcttttaataaatgtcattgcgactctg

SEQ ID NO: 180500 - DNA, 1609 bp, Homo sapiens
  Payload ID: 15548
  Gene Symbol: SERPINA6
  Gene Name: serpin peptidase inhibitor, clade A (alpha-1 antiproteinase, antitrypsin), member 6
  ENST ID: ENST00000555056
  CDS Start-End: 73-909
gtccaggacagcaggaccaagccagcagaaacagcctgagcccaccgcagactggcctggctatactggacaatgccactcctcctgtacacctgtcttctctggctgcccaccagcggcctctggaccgtccaggccatggatcctaacgctgcttatgtgaacatgagtaaccatcaccggggcctggcttcagccaacgttgactttgccttcagcctgtataagcacctagtggccttgagtcccaaaaagaacattttcatctcccctgtgagcatctccatggccttagctatgctgtccctgggcacctgtggccacacacgggcccagcttctccagggcctgggtttcaacctcactgagaggtctgagactgagatccaccagggtttccagcacctgcaccaactctttgcaaagtcagacaccagcttagaaatgaccatgggcaatgccttgtttcttgatggcagcctggagttgctggagtcattctcagcagacatcaagcactactatgagtcagaggtcttggctatgaatttccaggactgggcaacagccagcagacagatcaacagctatgtcaagaataagacacaggggaaaattgtcgacttgttttcagggctggatagcccagccatcctcgtcctggtcaactatatcttcttcaaaggtattcccacccatccccatctgaaggcccatccactatggccaggaataacagccgctaaaatccagggcacactcttgggcaaagtctttgattctgtaaagcacatacacatctgggaatctccatcttcaccacaatcctgctgggcacatggacacagccctttgacctggcaagcaccagggaggagaacttctatgtggacgagacaactgtggtgaaggtgcccatgatgttgcagtcgagcaccatcagttaccttcatgactcggagctcccctgccagctggtgcagatgaactacgtgggcaatgggactgtcttcttcatccttccggacaaggggaagatgaacacagtcatcgctgcactgagccgggacacgattaacaggtggtccgcaggcctgaccagcagccaggtggacctgtacattccaaaggtcaccatctctggagtctatgacctcggagatgtgctggaggaaatgggcattgcagacttgttcaccaaccaggcaaatttctcacgcatcacccaggacgcccagctgaagtcatcaaaggtggtccataaagctgtgctgcaactcaatgaggagggtgtggacacagctggctccactggggtcaccctaaacctgacgtccaagcctatcatcttgcgtttcaaccagcccttcatcatcatgatcttcgaccacttcacctggagcagccttttcctggcgagggttatgaacccagtgtaagagaccacccacccagagcctcagcactgtctgactttgggaaccagggatcccacagaaatgttttggagagcgggaggtttcccccaatctcctccaagttcttctccctccaaccagagttgtgtctaactttaggcatcttttaataaatgtcattgcgactctga

SEQ ID NO: 180501 - DNA, 719 bp, Homo sapiens
  Payload ID: 15548
  Gene Symbol: SERPINA6
  Gene Name: serpin peptidase inhibitor, clade A (alpha-1 antiproteinase, antitrypsin), member 6
  ENST ID: ENST00000557225
  CDS Start-End: 311-719
ccacccaggaagctggcaaacaaaatttaacaggcagcatccaccgcaggcttactgtacacatgctagggtccaggacagcaggaccaagccagcagaaacagcctgagcccaccgcagactatgaggaaactgaagtccagcgccctctgtgatgtgctccaggtcacacagccagtgtggaggaaggaactggggcttgaatggggtcttttgcctgcctcctcttgcactacgccccattgactcagagactgccacagcatctaacaagcttttctgatttggcagggcctggctatactggacaatgccactcctcctgtacacctgtcttctctggctgcccaccagcggcctctggaccgtccaggccatggatcctaacgctgcttatgtgaacatgagtaaccatcaccggggcctggcttcagccaacgttgactttgccttcagcctgtataagcacctagtggccttgagtcccaaaaagaacattttcatctcccctgtgagcatctccatggccttagctatgctgtccctgggcacctgtggccacacacgggcccagcttctccagggcctgggtttcaacctcactgagaggtctgagactgagatccaccagggtttccagcacctgcaccaactctttgcaaagtcagacaccagcttagaaatgaccatgggcaatgccttgtttcttgatggcagcc

SEQ ID NO: 180502 - DNA, 1534 bp, Homo sapiens; identical to SEQ ID NO: 180499
  Payload ID: 15548
  Gene Symbol: SERPINA6
  Gene Name: serpin peptidase inhibitor, clade A (alpha-1 antiproteinase, antitrypsin), member 6
  Uniprot ID: P08185
  ENST ID: ENST00000621384
  CDS Start-End: 148-1365

SEQ ID NO: 180503 - DNA, 1609 bp, Homo sapiens; identical to SEQ ID NO: 180500
  Payload ID: 15548
  Gene Symbol: SERPINA6
  Gene Name: serpin peptidase inhibitor, clade A (alpha-1 antiproteinase, antitrypsin), member 6
  ENST ID: ENST00000631236
  CDS Start-End: 73-909

SEQ ID NO: 180504 - DNA, 719 bp, Homo sapiens; identical to SEQ ID NO: 180501
  Payload ID: 15548
  Gene Symbol: SERPINA6
  Gene Name: serpin peptidase inhibitor, clade A (alpha-1 antiproteinase, antitrypsin), member 6
  ENST ID: ENST00000630843
  CDS Start-End: 311-719

SEQ ID NO: 180505 - DNA, 2642 bp, Homo sapiens
  Payload ID: 15549
  Gene Symbol: SERPINA7
  Gene Name: serpin peptidase inhibitor, clade A (alpha-1 antiproteinase, antitrypsin), member 7
  Uniprot ID: P05543
  ENST ID: ENST00000327674
  CDS Start-End: 337-1584
ttcagaaaaaaagtgattcaatttccataaatttaatttactcacagcgttttcataatgttgctataacatctgaatgacagtccatggcattatttccgtggttgcagcaagccacttctcctactccctgtccatattagatgcatctcctgtttttcaagggagagaaacccctgctcagcccctgatgagcacatcatcaaatatttactattgttttattaatcaatgtgggtggttattatgtgtctctggctcagggagtgtttcatccaactaagctccctcagtggttgtctcacttcatctcttatagattaacttccttccaaaatgtcaccattcctgtatctggttctcttggtacttgggcttcatgctacaatccactgtgcatcacctgaaggcaaagtaacagcctgccattcatcccaaccaaatgccactctctacaagatgtcatccattaatgctgactttgcattcaatctgtaccggaggttcactgtggagaccccagataagaacatcttcttttcccctgtgagcatttctgcagctttggttatgctttcctttggggcctgctgcagcacccaaactgagattgtggagaccttggggttcaacctcacagacactccaatggtagagatccagcatggcttccagcatctgatctgttcactgaattttccaaagaaggaactggaattgcagataggaaatgccctcttcattggcaagcatctgaaaccactggcaaagttcttgaatgatgtcaagaccctctatgagactgaagtcttttctaccgacttctccaacatttctgcagccaagcaggagattaacagtcatgtggagatgcaaaccaaagggaaagttgtgggtctaattcaagacctcaagccaaacaccatcatggtcttagtgaactatattcactttaaagcccagtgggcaaatccttttgatccatccaagacagaagacagttccagcttcttaatagacaagaccaccactgttcaagtgcccatgatgcaccagatggaacaatactatcacctagtggatatggaattgaactgcacagttctgcaaatggactacagcaagaatgctctggcactctttgttcttcccaaggagggacagatggagtcagtggaagctgccatgtcatctaaaacactgaagaagtggaaccgcttactacagaagggatgggttgacttgtttgttccaaagttttccatttctgccacatatgaccttggagccacacttttgaagatgggcattcagcatgcctattctgaaaatgctgatttttctggactcacagaggacaatggtctgaaactttccaatgctgcccataaggctgtgctgcacattggtgaaaagggaactgaagctgcagctgtccctgaagttgaactttcggatcagcctgaaaacactttcctacaccctattatccaaattgatagatctttcatgttgttgattttggagagaagcacaaggagtattctctttctagggaaagttgtgaacccaacggaagcgtagttgggaaaaaggccattggctaattgcacgtgtgtattgcaatgggaaataaataaataatatagcctggtgtgattgatgtgagcttggacttgcattcccttatgatgggatgaagattgaaccctggctgaactttgttggctgtggaagaggccaatcctatggcagagcattcagaatgtcaatgagtaattcattattatccaaagcataggaaggctctatgtttgtatatttctctttgtcagaatacccctcaactcatttgctctaataaatttgactgggttgaaaaattttcccttttctgtcttctggggaatagctaaaaagcaggtcaggtcttcgtatcccagtactccaataagatcaatggacataaaacaatgcagatgcattgtcttatatgtgaacttctcaacccccttcccactgtcccattagtaggattctctgagttcttgccagatctgacactggtaggttgaataaaggaactcccactatggggatgagttacagactgagacaactgaacaagttactgaacaagcatgggacaatacagcaagagataaacttgcctgtccaaccccaccttccccccaagaaaacatacttccaccttgccaatgtataagctgggagtggagaaagaaagtaattcattcatgtcatatctcatagaccctctttttctgtatcccaatcagactcctttccatatatagcacccctgtcccacttgtttaagtaggaatctcctttttggctctaatttcactgaatattggtacttttgtatccccagatccttcaacaaccttccctctacctgtacatgccaactcattaccacctaccaaactagattttatttcagacactatgtatttaaagcttgagtataaatggcacagtgagtggtaatgatgtagtatctgaaattctagccctgaggtaaaacacttcagtgacaggaaaatagtaaaaaaaatgcataagtactgttgcagatgttgtacttccatattgaaataaatatttatgtttag
